United States Patent Application Publication US 2005/0244851 A1 - sequence listing, part 58

SEQ ID NO: 2252380 - DNA, 25 bp, Homo sapien
aaatgacttttctcaagaatgtcca

SEQ ID NO: 2252381 - DNA, 25 bp, Homo sapien
aaaatgacttttctcaagaatgtcc

SEQ ID NO: 2252382 - DNA, 25 bp, Homo sapien
tgacttttctcaagaatgtccactc

SEQ ID NO: 2252383 - DNA, 25 bp, Homo sapien
aatgacttttctcaagaatgtccac

SEQ ID NO: 2252384 - DNA, 25 bp, Homo sapien
cccaagacagccaccatagtgggac

SEQ ID NO: 2252385 - DNA, 25 bp, Homo sapien
tactcccaagacagccaccatagtg

SEQ ID NO: 2252386 - DNA, 25 bp, Homo sapien
actcccaagacagccaccatagtgg

SEQ ID NO: 2252387 - DNA, 25 bp, Homo sapien
tcatggtactcccaagacagccacc

SEQ ID NO: 2252388 - DNA, 25 bp, Homo sapien
gcaaggcagctacaatttctggttc

SEQ ID NO: 2252389 - DNA, 25 bp, Homo sapien
ggtgtctctgctcctcacagtatac

SEQ ID NO: 2252390 - DNA, 25 bp, Homo sapien
gaggcccatgatatttctcttggtg

SEQ ID NO: 2252391 - DNA, 25 bp, Homo sapien
ggaacaggtagcaaggcagctacaa

SEQ ID NO: 2252392 - DNA, 25 bp, Homo sapien
tttctactgactgatctcctcagaa

SEQ ID NO: 2252393 - DNA, 25 bp, Homo sapien
cctcacggttgaccgagctccatgt

SEQ ID NO: 2252394 - DNA, 25 bp, Homo sapien
atacatggcccctcacggttgaccg

SEQ ID NO: 2252395 - DNA, 25 bp, Homo sapien
cagaacttttgtccatacatggccc

SEQ ID NO: 2252396 - DNA, 25 bp, Homo sapien
tctcagtgtcttgacggttcaccca

SEQ ID NO: 2252397 - DNA, 25 bp, Homo sapien
atctcagtgtcttgacggttcaccc

SEQ ID NO: 2252398 - DNA, 25 bp, Homo sapien
tcagtgtcttgacggttcacccaga

SEQ ID NO: 2252399 - DNA, 25 bp, Homo sapien
agtgtcttgacggttcacccagagc

SEQ ID NO: 2252400 - DNA, 25 bp, Homo sapien
gggctccttcgcttcttgaacatag

SEQ ID NO: 2252401 - DNA, 25 bp, Homo sapien
gcatcagctttatagctttccacag

SEQ ID NO: 2252402 - DNA, 25 bp, Homo sapien
tagcggtaggcttttggtaaatcaa

SEQ ID NO: 2252403 - DNA, 25 bp, Homo sapien
ctgggcatcagctttatagctttcc

SEQ ID NO: 2252404 - DNA, 25 bp, Homo sapien
agacctggacacagccgccaggtgg

SEQ ID NO: 2252405 - DNA, 25 bp, Homo sapien
tcctttagaagacctggacacagcc

SEQ ID NO: 2252406 - DNA, 25 bp, Homo sapien
agggagcctgcccctctgtacaaag

SEQ ID NO: 2252407 - DNA, 25 bp, Homo sapien
tacaaagcttgtcctttagaagacc

SEQ ID NO: 2252408 - DNA, 25 bp, Homo sapien
ttctataaacacctgatatttcatg

SEQ ID NO: 2252409 - DNA, 25 bp, Homo sapien
tgagacccttcaccgtggaagaaag

SEQ ID NO: 2252410 - DNA, 25 bp, Homo sapien
atccctgagacccttcaccgtggaa

SEQ ID NO: 2252411 - DNA, 25 bp, Homo sapien
tgttctataaacacctgatatttca

SEQ ID NO: 2252412 - DNA, 25 bp, Homo sapien
tctgggcacactatgaaaactaata

SEQ ID NO: 2252413 - DNA, 25 bp, Homo sapien
gatggaggtaggcatctggtagaaa

SEQ ID NO: 2252414 - DNA, 25 bp, Homo sapien
aactaataccagaaaccagatcaag

SEQ ID NO: 2252415 - DNA, 25 bp, Homo sapien
gaaaccagatcaagacacccaacat

SEQ ID NO: 2252416 - DNA, 25 bp, Homo sapien
ggatggaaacatgcacgctaacata

SEQ ID NO: 2252417 - DNA, 25 bp, Homo sapien
tcagtaggcgtaacacatggacagt

SEQ ID NO: 2252418 - DNA, 25 bp, Homo sapien
tgcatcttgcgataactggtgccaa

SEQ ID NO: 2252419 - DNA, 25 bp, Homo sapien
catcaacataaaggcaagagcgtca

SEQ ID NO: 2252420 - DNA, 25 bp, Homo sapien
aactgaaaggcctctacgggcagca

SEQ ID NO: 2252421 - DNA, 25 bp, Homo sapien
caactatggcgacactgctctcaga

SEQ ID NO: 2252422 - DNA, 25 bp, Homo sapien
tcgttatccagagtaccgagggccc

SEQ ID NO: 2252423 - DNA, 25 bp, Homo sapien
gaatgaaagctgtctagtagggcac

SEQ ID NO: 2252424 - DNA, 25 bp, Homo sapien
gaattgaggtcttgctactggactc

SEQ ID NO: 2252425 - DNA, 25 bp, Homo sapien
aagcctccgcaccagcttttctagg

SEQ ID NO: 2252426 - DNA, 25 bp, Homo sapien
tgtttgcttcaaaagcctccgcacc

SEQ ID NO: 2252427 - DNA, 25 bp, Homo sapien
cctcgaatacactcatctgtttgct

SEQ ID NO: 2252428 - DNA, 25 bp, Homo sapien
tcaaggcgtaaacagtatcaacaag

SEQ ID NO: 2252429 - DNA, 25 bp, Homo sapien
ggcgtaaacagtatcaacaaggctc

SEQ ID NO: 2252430 - DNA, 25 bp, Homo sapien
tgacctcgtccttcaaggcgtaaac

SEQ ID NO: 2252431 - DNA, 25 bp, Homo sapien
gacctcgtccttcaaggcgtaaaca

SEQ ID NO: 2252432 - DNA, 25 bp, Homo sapien
gatggtctggccgttgcttctggtt

SEQ ID NO: 2252433 - DNA, 25 bp, Homo sapien
ccatgatggtctggccgttgcttct

SEQ ID NO: 2252434 - DNA, 25 bp, Homo sapien
tggtctggccgttgcttctggtttc

SEQ ID NO: 2252435 - DNA, 25 bp, Homo sapien
ttccatgatggtctggccgttgctt

SEQ ID NO: 2252436 - DNA, 25 bp, Homo sapien
aggacttgtggaatggaatcttttc

SEQ ID NO: 2252437 - DNA, 25 bp, Homo sapien
cttgtggaatggaatcttttcgagt

SEQ ID NO: 2252438 - DNA, 25 bp, Homo sapien
gacttgtggaatggaatcttttcga

SEQ ID NO: 2252439 - DNA, 25 bp, Homo sapien
tgtggaatggaatcttttcgagtac

SEQ ID NO: 2252440 - DNA, 25 bp, Homo sapien
tcactcactagagaaagtagtttgg

SEQ ID NO: 2252441 - DNA, 25 bp, Homo sapien
tcactagagaaagtagtttggggga

SEQ ID NO: 2252442 - DNA, 25 bp, Homo sapien
ctcactagagaaagtagtttggggg

SEQ ID NO: 2252443 - DNA, 25 bp, Homo sapien
cactcactagagaaagtagtttggg

SEQ ID NO: 2252444 - DNA, 25 bp, Homo sapien
ttgttgaaaatttgcgctggtgcag

SEQ ID NO: 2252445 - DNA, 25 bp, Homo sapien
aaaatttgcgctggtgcagtaggct

SEQ ID NO: 2252446 - DNA, 25 bp, Homo sapien
ggtgcagtaggcttcgatcacttta

SEQ ID NO: 2252447 - DNA, 25 bp, Homo sapien
cagtaggcttcgatcactttaagga

SEQ ID NO: 2252448 - DNA, 25 bp, Homo sapien
catgacttttcatagatatatgctt

SEQ ID NO: 2252449 - DNA, 25 bp, Homo sapien
tcaaaatgatgcagcacactccact

SEQ ID NO: 2252450 - DNA, 25 bp, Homo sapien
cttctctgaccagtagagtttgtga

SEQ ID NO: 2252451 - DNA, 25 bp, Homo sapien
catcatgacttttcatagatatatg

SEQ ID NO: 2252452 - DNA, 25 bp, Homo sapien
tcatcgttttagggcttttactaga

SEQ ID NO: 2252453 - DNA, 25 bp, Homo sapien
tgaagaaatttcttcatcgttttag

SEQ ID NO: 2252454 - DNA, 25 bp, Homo sapien
ctccgatggttttctctcagtcttc

SEQ ID NO: 2252455 - DNA, 25 bp, Homo sapien
tattcctcctccgatggttttctct

SEQ ID NO: 2252456 - DNA, 25 bp, Homo sapien
caaaagtaaaagcatgaatgaaact

SEQ ID NO: 2252457 - DNA, 25 bp, Homo sapien
tgacagtctcagttaggagtacatc

SEQ ID NO: 2252458 - DNA, 25 bp, Homo sapien
gaggacagaggtttcttaatgaatt

SEQ ID NO: 2252459 - DNA, 25 bp, Homo sapien
gaaactaagtagaattcctctctct

SEQ ID NO: 2252460 - DNA, 25 bp, Homo sapien
tccgcagtcaaagagaagaaccaaa

SEQ ID NO: 2252461 - DNA, 25 bp, Homo sapien
gagactaagccatttttccgcagtc

SEQ ID NO: 2252462 - DNA, 25 bp, Homo sapien
tgccttagaaacagtcccacaaata

SEQ ID NO: 2252463 - DNA, 25 bp, Homo sapien
ttttgccatatgagtaaccagcagg

SEQ ID NO: 2252464 - DNA, 25 bp, Homo sapien
ctctttataacctagtgctgctgat

SEQ ID NO: 2252465 - DNA, 25 bp, Homo sapien
ctgctgatggtctaagtggaggtgc

SEQ ID NO: 2252466 - DNA, 25 bp, Homo sapien
caggtcgtagacaacttaaactcca

SEQ ID NO: 2252467 - DNA, 25 bp, Homo sapien
cctcggggctgtccggtagagctaa

SEQ ID NO: 2252468 - DNA, 25 bp, Homo sapien
gagatgttggcaatctgccatctga

SEQ ID NO: 2252469 - DNA, 25 bp, Homo sapien
aaatgtctgatgagatgttggcaat

SEQ ID NO: 2252470 - DNA, 25 bp, Homo sapien
aacccgaccttgtgccacacagtga

SEQ ID NO: 2252471 - DNA, 25 bp, Homo sapien
atctgccatctgaacccgaccttgt

SEQ ID NO: 2252472 - DNA, 25 bp, Homo sapien
cagcaggcaggagttgacgaaagac

SEQ ID NO: 2252473 - DNA, 25 bp, Homo sapien
tggacagaacacatggactacttac

SEQ ID NO: 2252474 - DNA, 25 bp, Homo sapien
tcgacttagcccactgttagtagga

SEQ ID NO: 2252475 - DNA, 25 bp, Homo sapien
aaaagactaagggtgtgctcgctgc

SEQ ID NO: 2252476 - DNA, 25 bp, Homo sapien
gatgacgatgaggttttggataatg

SEQ ID NO: 2252477 - DNA, 25 bp, Homo sapien
gaatgagcactacatgatgacgatg

SEQ ID NO: 2252478 - DNA, 25 bp, Homo sapien
ctggaagtcctggttgttgttacaa

SEQ ID NO: 2252479 - DNA, 25 bp, Homo sapien
caagaggcaggtcctctgatcagtc

SEQ ID NO: 2252480 - DNA, 25 bp, Homo sapien
ccaccgttcctgctattggtatttt

SEQ ID NO: 2252481 - DNA, 25 bp, Homo sapien
taatctagtcaccaccgttcctgct

SEQ ID NO: 2252482 - DNA, 25 bp, Homo sapien
tagtcaccaccgttcctgctattgg

SEQ ID NO: 2252483 - DNA, 25 bp, Homo sapien
tcatctaatctagtcaccaccgttc

SEQ ID NO: 2252484 - DNA, 25 bp, Homo sapien
aataacataaggtaccgctcctctt

SEQ ID NO: 2252485 - DNA, 25 bp, Homo sapien
cagataacattatcaggacatttga

SEQ ID NO: 2252486 - DNA, 25 bp, Homo sapien
ataacataaggtaccgctcctcttt

SEQ ID NO: 2252487 - DNA, 25 bp, Homo sapien
ataacattatcaggacatttgaaaa

SEQ ID NO: 2252488 - DNA, 25 bp, Homo sapien
tactgcaccattacttgtgacataa

SEQ ID NO: 2252489 - DNA, 25 bp, Homo sapien
ttcggacagtatctgtaactccagc

SEQ ID NO: 2252490 - DNA, 25 bp, Homo sapien
gaataggttcggacagtatctgtaa

SEQ ID NO: 2252491 - DNA, 25 bp, Homo sapien
catgcctgaataggttcggacagta

SEQ ID NO: 2252492 - DNA, 25 bp, Homo sapien
tttgaatgctacgattgctttcaga

SEQ ID NO: 2252493 - DNA, 25 bp, Homo sapien
gagttttgaatgctacgattgcttt

SEQ ID NO: 2252494 - DNA, 25 bp, Homo sapien
agttttgaatgctacgattgctttc

SEQ ID NO: 2252495 - DNA, 25 bp, Homo sapien
ttttgaatgctacgattgctttcag

SEQ ID NO: 2252496 - DNA, 25 bp, Homo sapien
taaaatgaggatacctgggctcgat

SEQ ID NO: 2252497 - DNA, 25 bp, Homo sapien
tatgccgttctaactcttgcaagag

SEQ ID NO: 2252498 - DNA, 25 bp, Homo sapien
ttctccagtcgcatgaatggtttgc

SEQ ID NO: 2252499 - DNA, 25 bp, Homo sapien
gggctcgatgcaccttgattttcca

SEQ ID NO: 2252500 - DNA, 25 bp, Homo sapien
cacagtaagccagatacatagattt

SEQ ID NO: 2252501 - DNA, 25 bp, Homo sapien
tttgcacagtaagccagatacatag

SEQ ID NO: 2252502 - DNA, 25 bp, Homo sapien
ggtttgcacagtaagccagatacat

SEQ ID NO: 2252503 - DNA, 25 bp, Homo sapien
ggatggtttgcacagtaagccagat

SEQ ID NO: 2252504 - DNA, 25 bp, Homo sapien
gacaacctcctactttgtgctggtt

SEQ ID NO: 2252505 - DNA, 25 bp, Homo sapien
gagactcagtagacaacctcctact

SEQ ID NO: 2252506 - DNA, 25 bp, Homo sapien
gtagacaacctcctactttgtgctg

SEQ ID NO: 2252507 - DNA, 25 bp, Homo sapien
tcagtagacaacctcctactttgtg

SEQ ID NO: 2252508 - DNA, 25 bp, Homo sapien
ctgttgaaatgtgcatacttcctcg

SEQ ID NO: 2252509 - DNA, 25 bp, Homo sapien
tgaaatgtgcatacttcctcgaagt

SEQ ID NO: 2252510 - DNA, 25 bp, Homo sapien
ggcagagtgtctgttgaaatgtgca

SEQ ID NO: 2252511 - DNA, 25 bp, Homo sapien
catacttcctcgaagtttcccagta

SEQ ID NO: 2252512 - DNA, 25 bp, Homo sapien
agctctccaaaagcaatatcttgca

SEQ ID NO: 2252513 - DNA, 25 bp, Homo sapien
cattatgttgctttacttagtgagg

SEQ ID NO: 2252514 - DNA, 25 bp, Homo sapien
cttggcaacctgtgatctgtggaaa

SEQ ID NO: 2252515 - DNA, 25 bp, Homo sapien
gctttctgaataaaagcaccaggga

SEQ ID NO: 2252516 - DNA, 25 bp, Homo sapien
cttaagtaagtaacaagaagagact

SEQ ID NO: 2252517 - DNA, 25 bp, Homo sapien
gaagagactgaagttctttagcata

SEQ ID NO: 2252518 - DNA, 25 bp, Homo sapien
ctgcaggggtcttaagtaagtaaca

SEQ ID NO: 2252519 - DNA, 25 bp, Homo sapien
gttattggactgcaggggtcttaag

SEQ ID NO: 2252520 - DNA, 25 bp, Homo sapien
tagggtcatgtcacaacccatttcc

SEQ ID NO: 2252521 - DNA, 25 bp, Homo sapien
cagttctagggtcatgtcacaaccc

SEQ ID NO: 2252522 - DNA, 25 bp, Homo sapien
tttccaagcctcttctagtgacagg

SEQ ID NO: 2252523 - DNA, 25 bp, Homo sapien
tcttctagtgacaggtaaaaccttc

SEQ ID NO: 2252524 - DNA, 25 bp, Homo sapien
aagacaatgcatgatgatctgcttt

SEQ ID NO: 2252525 - DNA, 25 bp, Homo sapien
tggtcaaaacaagtggagatcctgg

SEQ ID NO: 2252526 - DNA, 25 bp, Homo sapien
atcctggtaaccgtgggttctctgg

SEQ ID NO: 2252527 - DNA, 25 bp, Homo sapien
gcttttgaaaggtggaatggtcaaa

SEQ ID NO: 2252528 - DNA, 25 bp, Homo sapien
aaaagatcaactgatgaacttctga

SEQ ID NO: 2252529 - DNA, 25 bp, Homo sapien
gatcaactgatgaacttctgagact

SEQ ID NO: 2252530 - DNA, 25 bp, Homo sapien
aagatcaactgatgaacttctgaga

SEQ ID NO: 2252531 - DNA, 25 bp, Homo sapien
agatcaactgatgaacttctgagac

SEQ ID NO: 2252532 - DNA, 25 bp, Homo sapien
ggagaagggaacctacctctgctgg

SEQ ID NO: 2252533 - DNA, 25 bp, Homo sapien
gatgagtacgcaagacaaacgcaca

SEQ ID NO: 2252534 - DNA, 25 bp, Homo sapien
gaatgacaaggctaccagacaggga

SEQ ID NO: 2252535 - DNA, 25 bp, Homo sapien
taaaaactctatccatgcacaaagg

SEQ ID NO: 2252536 - DNA, 25 bp, Homo sapien
tgaatccgtgctacctttgaatttt

SEQ ID NO: 2252537 - DNA, 25 bp, Homo sapien
ttttcagcacagtagatgtaagact

SEQ ID NO: 2252538 - DNA, 25 bp, Homo sapien
gctgtgaatccgtgctacctttgaa

SEQ ID NO: 2252539 - DNA, 25 bp, Homo sapien
taatagggcttgctgtgaatccgtg

SEQ ID NO: 2252540 - DNA, 25 bp, Homo sapien
ggtaagtggagcagtttcaaatcct

SEQ ID NO: 2252541 - DNA, 25 bp, Homo sapien
cgctggagcccaggagtttgagacc

SEQ ID NO: 2252542 - DNA, 25 bp, Homo sapien
tggagcccaggagtttgagaccagc

SEQ ID NO: 2252543 - DNA, 25 bp, Homo sapien
gaaggccagggcaggaggatcgctg

SEQ ID NO: 2252544 - DNA, 25 bp, Homo sapien
aaggccagggcaggaggatcgctgg

SEQ ID NO: 2252545 - DNA, 25 bp, Homo sapien
ctcgtgtgacgtaaatgatgtcccc

SEQ ID NO: 2252546 - DNA, 25 bp, Homo sapien
tgatgtcccccttacaaactgacag

SEQ ID NO: 2252547 - DNA, 25 bp, Homo sapien
gttcatcctcattagtctgcttaaa

SEQ ID NO: 2252548 - DNA, 25 bp, Homo sapien
gcttttactatcaactgatgacttc

SEQ ID NO: 2252549 - DNA, 25 bp, Homo sapien
ctttgactgcctttgcagccctgaa

SEQ ID NO: 2252550 - DNA, 25 bp, Homo sapien
gtattagcagcactaagagaagagg

SEQ ID NO: 2252551 - DNA, 25 bp, Homo sapien
gagaagaggaacgtccacatggtct

SEQ ID NO: 2252552 - DNA, 25 bp, Homo sapien
gaaactgtgctagaaactgctccct

SEQ ID NO: 2252553 - DNA, 25 bp, Homo sapien
gacccctgaataaaggtcatcagga

SEQ ID NO: 2252554 - DNA, 25 bp, Homo sapien
tctgttgctttgttgacagctaaaa

SEQ ID NO: 2252555 - DNA, 25 bp, Homo sapien
gacagctaaaagagtactcagtacc

SEQ ID NO: 2252556 - DNA, 25 bp, Homo sapien
accttggagaaattgacccctgaat

SEQ ID NO: 2252557 - DNA, 25 bp, Homo sapien
tctggatggaaatgccccttctaaa

SEQ ID NO: 2252558 - DNA, 25 bp, Homo sapien
ttctggatggaaatgccccttctaa

SEQ ID NO: 2252559 - DNA, 25 bp, Homo sapien
atggaaatgccccttctaaaaacat

SEQ ID NO: 2252560 - DNA, 25 bp, Homo sapien
ctggatggaaatgccccttctaaaa

SEQ ID NO: 2252561 - DNA, 25 bp, Homo sapien
gccagttagttccagttagatccgt

SEQ ID NO: 2252562 - DNA, 25 bp, Homo sapien
tgactgagtcccagattagctgaac

SEQ ID NO: 2252563 - DNA, 25 bp, Homo sapien
ttagatccgtgaaggtcagatgaac

SEQ ID NO: 2252564 - DNA, 25 bp, Homo sapien
tcagatgaacagcaggattccctcc

SEQ ID NO: 2252565 - DNA, 25 bp, Homo sapien
ttgactttatccaagaggccccaga

SEQ ID NO: 2252566 - DNA, 25 bp, Homo sapien
gaagcatatgagaataaactttccc

SEQ ID NO: 2252567 - DNA, 25 bp, Homo sapien
ggcatagctctcatgactgggattg

SEQ ID NO: 2252568 - DNA, 25 bp, Homo sapien
ggcaccacgcttggacatcacatac

SEQ ID NO: 2252569 - DNA, 25 bp, Homo sapien
aaagcacactggttgccagttttgc

SEQ ID NO: 2252570 - DNA, 25 bp, Homo sapien
ctagactcagctgcctcacagtcag

SEQ ID NO: 2252571 - DNA, 25 bp, Homo sapien
gggtggatgggtgatctctcagctg

SEQ ID NO: 2252572 - DNA, 25 bp, Homo sapien
cactggttgccagttttgcggtgtg

SEQ ID NO: 2252573 - DNA, 25 bp, Homo sapien
ctccttatatgctccagaatcttct

SEQ ID NO: 2252574 - DNA, 25 bp, Homo sapien
tcatctccttatatgctccagaatc

SEQ ID NO: 2252575 - DNA, 25 bp, Homo sapien
tctccttatatgctccagaatcttc

SEQ ID NO: 2252576 - DNA, 25 bp, Homo sapien
catcatctccttatatgctccagaa

SEQ ID NO: 2252577 - DNA, 25 bp, Homo sapien
taaaaatggtactgttgactcctgc

SEQ ID NO: 2252578 - DNA, 25 bp, Homo sapien
aaaaatggtactgttgactcctgct

SEQ ID NO: 2252579 - DNA, 25 bp, Homo sapien
aggaaagaatccagtcggatgcaaa

SEQ ID NO: 2252580 - DNA, 25 bp, Homo sapien
ggaaagaatccagtcggatgcaaac

SEQ ID NO: 2252581 - DNA, 25 bp, Homo sapien
tgcggccagagctggacaactcgcc

SEQ ID NO: 2252582 - DNA, 25 bp, Homo sapien
cgctctgcgtccttggccctcatct

SEQ ID NO: 2252583 - DNA, 25 bp, Homo sapien
gacaactcgcccctaagtttggcgc

SEQ ID NO: 2252584 - DNA, 25 bp, Homo sapien
gtttggcgcgtcctcgctctgcgtc

SEQ ID NO: 2252585 - DNA, 25 bp, Homo sapien
cctcgcgcgctccccttcccctgac

SEQ ID NO: 2252586 - DNA, 25 bp, Homo sapien
tgcgagccacggcagtggggaagaa

SEQ ID NO: 2252587 - DNA, 25 bp, Homo sapien
ctgcgagccacggcagtggggaaga

SEQ ID NO: 2252588 - DNA, 25 bp, Homo sapien
ctcgcgcgctccccttcccctgacc

SEQ ID NO: 2252589 - DNA, 25 bp, Homo sapien
gctccctcactccagccgcgccgcc

SEQ ID NO: 2252590 - DNA, 25 bp, Homo sapien
ctggctcggccgctgcccgcctgtc

SEQ ID NO: 2252591 - DNA, 25 bp, Homo sapien
gctcggccgctgcccgcctgtcctc

SEQ ID NO: 2252592 - DNA, 25 bp, Homo sapien
tgctccctcactccagccgcgccgc

SEQ ID NO: 2252593 - DNA, 25 bp, Homo sapien
tgcgggaacagatcaacccagccgg

SEQ ID NO: 2252594 - DNA, 25 bp, Homo sapien
ctggaagccgttcgccctcccgagt

SEQ ID NO: 2252595 - DNA, 25 bp, Homo sapien
gtgccaaggctgcgggaacagatca

SEQ ID NO: 2252596 - DNA, 25 bp, Homo sapien
aacagatcaacccagccggagctgg

SEQ ID NO: 2252597 - DNA, 25 bp, Homo sapien
gcagcggagggaaagcggcctggag

SEQ ID NO: 2252598 - DNA, 25 bp, Homo sapien
ggtaagcagtgacccggacctggat

SEQ ID NO: 2252599 - DNA, 25 bp, Homo sapien
tgacccggacctggatcgcagaagt

SEQ ID NO: 2252600 - DNA, 25 bp, Homo sapien
ccggacctggatcgcagaagtagga

SEQ ID NO: 2252601 - DNA, 25 bp, Homo sapien
tgctgccgcccgcttcagcccctac

SEQ ID NO: 2252602 - DNA, 25 bp, Homo sapien
gggtcactgccagagcttcgggcgg

SEQ ID NO: 2252603 - DNA, 25 bp, Homo sapien
gttgcgggtcactgccagagcttcg

SEQ ID NO: 2252604 - DNA, 25 bp, Homo sapien
gcgggtcactgccagagcttcgggc

SEQ ID NO: 2252605 - DNA, 25 bp, Homo sapien
ttgcgggtcactgccagagcttcgg

SEQ ID NO: 2252606 - DNA, 25 bp, Homo sapien
ctcacccccagatgcaactcagaac

SEQ ID NO: 2252607 - DNA, 25 bp, Homo sapien
aacccccaaactctatggtgagccg

SEQ ID NO: 2252608 - DNA, 25 bp, Homo sapien
ggactagccctttctggtggcctgc

SEQ ID NO: 2252609 - DNA, 25 bp, Homo sapien
gactagccctttctggtggcctgct

SEQ ID NO: 2252610 - DNA, 25 bp, Homo sapien
ggaaaggagatcctgacttcacaca

SEQ ID NO: 2252611 - DNA, 25 bp, Homo sapien
aactgagcagctaaatatgcaaagc

SEQ ID NO: 2252612 - DNA, 25 bp, Homo sapien
ctttgcctagcggaaactgatggaa

SEQ ID NO: 2252613 - DNA, 25 bp, Homo sapien
ggtcttcctactagttccaactgag

SEQ ID NO: 2252614 - DNA, 25 bp, Homo sapien
cagtgaccctctacctagacaggag

SEQ ID NO: 2252615 - DNA, 25 bp, Homo sapien
aaaactgccattgctagaacttgtg

SEQ ID NO: 2252616 - DNA, 25 bp, Homo sapien
tcggaagaattgtaggtgtccccaa

SEQ ID NO: 2252617 - DNA, 25 bp, Homo sapien
tctggaaacttcacttgggacctga

SEQ ID NO: 2252618 - DNA, 25 bp, Homo sapien
tcaatttgtcggtacggtgctgcat

SEQ ID NO: 2252619 - DNA, 25 bp, Homo sapien
ttaatgtcgtcaccatgccccagag

SEQ ID NO: 2252620 - DNA, 25 bp, Homo sapien
gcatctgcggctccatttttctgca

SEQ ID NO: 2252621 - DNA, 25 bp, Homo sapien
gctgacaatttcaagccggtatgct

SEQ ID NO: 2252622 - DNA, 25 bp, Homo sapien
gaagtcattgatgttgttgatgcag

SEQ ID NO: 2252623 - DNA, 25 bp, Homo sapien
ggagggttgcacatcctttcaggaa

SEQ ID NO: 2252624 - DNA, 25 bp, Homo sapien
ttcaggaagtcattgatgttgttga

SEQ ID NO: 2252625 - DNA, 25 bp, Homo sapien
gcttcagtttggggatccagacaaa

SEQ ID NO: 2252626 - DNA, 25 bp, Homo sapien
gaactaccccatttttcagcgagga

SEQ ID NO: 2252627 - DNA, 25 bp, Homo sapien
tcccaaagatataagccatgtcacg

SEQ ID NO: 2252628 - DNA, 25 bp, Homo sapien
tgatcagtttgcacagaactacccc

SEQ ID NO: 2252629 - DNA, 25 bp, Homo sapien
cggatcacagatggtctttttaggg

SEQ ID NO: 2252630 - DNA, 25 bp, Homo sapien
tatgagttctcttcgggtgcttgca

SEQ ID NO: 2252631 - DNA, 25 bp, Homo sapien
ggactaagccacatccgcgattgca

SEQ ID NO: 2252632 - DNA, 25 bp, Homo sapien
ggtacactccaaacagcactctggg

SEQ ID NO: 2252633 - DNA, 25 bp, Homo sapien
cacacagagtgcaagaagttataag

SEQ ID NO: 2252634 - DNA, 25 bp, Homo sapien
taagatggcgaccaaagttaggctg

SEQ ID NO: 2252635 - DNA, 25 bp, Homo sapien
aaccctttaatgacgagtgcaccca

SEQ ID NO: 2252636 - DNA, 25 bp, Homo sapien
gagatcaagccctcaccatgtcaga

SEQ ID NO: 2252637 - DNA, 25 bp, Homo sapien
caagttacggtctccaatgagctgt

SEQ ID NO: 2252638 - DNA, 25 bp, Homo sapien
tgttgccatacaacatgaggatgtt

SEQ ID NO: 2252639 - DNA, 25 bp, Homo sapien
tgtggaacacaaggtgataaacctc

SEQ ID NO: 2252640 - DNA, 25 bp, Homo sapien
tctcagtataccaaatttctcctgg

SEQ ID NO: 2252641 - DNA, 25 bp, Homo sapien
tatagtgaacttaatagatcctctg

SEQ ID NO: 2252642 - DNA, 25 bp, Homo sapien
agaagtgtctctgtgcttatccagc

SEQ ID NO: 2252643 - DNA, 25 bp, Homo sapien
tccagaagtgtctctgtgcttatcc

SEQ ID NO: 2252644 - DNA, 25 bp, Homo sapien
caccattacgttccttccagaagtg

SEQ ID NO: 2252645 - DNA, 25 bp, Homo sapien
tccttgggcagccaccattacgttc

SEQ ID NO: 2252646 - DNA, 25 bp, Homo sapien
cagaagcccagagtcttgattagca

SEQ ID NO: 2252647 - DNA, 25 bp, Homo sapien
tagagtagcttaactcaggaccctg

SEQ ID NO: 2252648 - DNA, 25 bp, Homo sapien
gatgccccaataaatttctcctgag

SEQ ID NO: 2252649 - DNA, 25 bp, Homo sapien
tagttcctcatgaagtcttgcccaa

SEQ ID NO: 2252650 - DNA, 25 bp, Homo sapien
cacccatactggagaaaacctgcct

SEQ ID NO: 2252651 - DNA, 25 bp, Homo sapien
ggaaaaatccatcttatgggccatt

SEQ ID NO: 2252652 - DNA, 25 bp, Homo sapien
catcttatgggccattttttccatt

SEQ ID NO: 2252653 - DNA, 25 bp, Homo sapien
tctataaataacaggcatccacctt

SEQ ID NO: 2252654 - DNA, 25 bp, Homo sapien
tgtccaaaggactgaggcttatagg

SEQ ID NO: 2252655 - DNA, 25 bp, Homo sapien
tataggaatctgcacacatttggca

SEQ ID NO: 2252656 - DNA, 25 bp, Homo sapien
ggcataattcctgggcaacagtaga

SEQ ID NO: 2252657 - DNA, 25 bp, Homo sapien
tagtcaatgtgctctggtatcccag

SEQ ID NO: 2252658 - DNA, 25 bp, Homo sapien
tctatatctcaaattaatccggtat

SEQ ID NO: 2252659 - DNA, 25 bp, Homo sapien
tattgttgacacatggccatggctc

SEQ ID NO: 2252660 - DNA, 25 bp, Homo sapien
gtcattccctttgattaaatgctcc

SEQ ID NO: 2252661 - DNA, 25 bp, Homo sapien
ttgagctctcaaaaaaggatattgt

SEQ ID NO: 2252662 - DNA, 25 bp, Homo sapien
tttcccaaaaggctccacagacact

SEQ ID NO: 2252663 - DNA, 25 bp, Homo sapien
tatatagtatccaaatcaggtgcct

SEQ ID NO: 2252664 - DNA, 25 bp, Homo sapien
tagtagctattaagttgcacagcag

SEQ ID NO: 2252665 - DNA, 25 bp, Homo sapien
acagcaggtctctcaccagtaggtt

SEQ ID NO: 2252666 - DNA, 25 bp, Homo sapien
aagtagaaggctgacccaaaatatc

SEQ ID NO: 2252667 - DNA, 25 bp, Homo sapien
caaaatatccataacctgaattaac

SEQ ID NO: 2252668 - DNA, 25 bp, Homo sapien
ccaaaatatccataacctgaattaa

SEQ ID NO: 2252669 - DNA, 25 bp, Homo sapien
gtagaaggctgacccaaaatatcca

SEQ ID NO: 2252670 - DNA, 25 bp, Homo sapien
gccagagggcaatttttatatgacc

SEQ ID NO: 2252671 - DNA, 25 bp, Homo sapien
gggtaatagtttgcctttgccatcc

SEQ ID NO: 2252672 - DNA, 25 bp, Homo sapien
tatatgaccttggatccatgccaat

SEQ ID NO: 2252673 - DNA, 25 bp, Homo sapien
aaataaaggtggttagagccagagg

SEQ ID NO: 2252674 - DNA, 25 bp, Homo sapien
gacataacgtgctagaaggtatcac

SEQ ID NO: 2252675 - DNA, 25 bp, Homo sapien
tgtagatgataagacctcctggagg

SEQ ID NO: 2252676 - DNA, 25 bp, Homo sapien
gaaatctattcatgaagggagccac

SEQ ID NO: 2252677 - DNA, 25 bp, Homo sapien
cctggaggtggaatctggtctaaaa

SEQ ID NO: 2252678 - DNA, 25 bp, Homo sapien
taagctactcaagtaaaacagtggg

SEQ ID NO: 2252679 - DNA, 25 bp, Homo sapien
agctactcaagtaaaacagtgggag

SEQ ID NO: 2252680 - DNA, 25 bp, Homo sapien
aagctactcaagtaaaacagtggga

SEQ ID NO: 2252681 - DNA, 25 bp, Homo sapien
tgattgttttatggttacagactgt

SEQ ID NO: 2252682 - DNA, 25 bp, Homo sapien
tacagactgtcagttgtctgctcat

SEQ ID NO: 2252683 - DNA, 25 bp, Homo sapien
tgttttatggttacagactgtcagt

SEQ ID NO: 2252684 - DNA, 25 bp, Homo sapien
ttatggttacagactgtcagttgtc

SEQ ID NO: 2252685 - DNA, 25 bp, Homo sapien
tcaaatgaggcattgtctgggacaa

SEQ ID NO: 2252686 - DNA, 25 bp, Homo sapien
tagtgtcccatgcagttctaagcag

SEQ ID NO: 2252687 - DNA, 25 bp, Homo sapien
tgagtctcctacaccaaaaccaggg

SEQ ID NO: 2252688 - DNA, 25 bp, Homo sapien
gggacaatgcctacccatctcagga

SEQ ID NO: 2252689 - DNA, 25 bp, Homo sapien
gatatcaagtaaccgtgttcccagt

SEQ ID NO: 2252690 - DNA, 25 bp, Homo sapien
tgctagcaggccaaaagacccaagt

SEQ ID NO: 2252691 - DNA, 25 bp, Homo sapien
gaagtattccttatgatcagctggc

SEQ ID NO: 2252692 - DNA, 25 bp, Homo sapien
catccagcaggattgggtgctagca

SEQ ID NO: 2252693 - DNA, 25 bp, Homo sapien
tcatgaggacgtaaagttgctgcta

SEQ ID NO: 2252694 - DNA, 25 bp, Homo sapien
cacgtattggctggtcacttgggct

SEQ ID NO: 2252695 - DNA, 25 bp, Homo sapien
cacaaagagacgtagcaagagtcca

SEQ ID NO: 2252696 - DNA, 25 bp, Homo sapien
ggaattggccctagattatcatgag

SEQ ID NO: 2252697 - DNA, 25 bp, Homo sapien
gagttagttaccttaggacccagca

SEQ ID NO: 2252698 - DNA, 25 bp, Homo sapien
tcaagcagactgacgtacagtgggt

SEQ ID NO: 2252699 - DNA, 25 bp, Homo sapien
taagccattgcgtccagtcctttgg

SEQ ID NO: 2252700 - DNA, 25 bp, Homo sapien
gatagggtcccactagttgtctggg

SEQ ID NO: 2252701 - DNA, 25 bp, Homo sapien
cattcctcaaggatatcgtcaccag

SEQ ID NO: 2252702 - DNA, 25 bp, Homo sapien
tgataagactttggttcaaccacca

SEQ ID NO: 2252703 - DNA, 25 bp, Homo sapien
aagatgtgtcttagcaggtcaggca

SEQ ID NO: 2252704 - DNA, 25 bp, Homo sapien
gagtaggtctgctagcatcaaattc

SEQ ID NO: 2252705 - DNA, 25 bp, Homo sapien
caccctgcctagagtagtctttact

SEQ ID NO: 2252706 - DNA, 25 bp, Homo sapien
agtagtctttactctaggaggtggt

SEQ ID NO: 2252707 - DNA, 25 bp, Homo sapien
ccacaccctgcctagagtagtcttt

SEQ ID NO: 2252708 - DNA, 25 bp, Homo sapien
tagagtagtctttactctaggaggt

SEQ ID NO: 2252709 - DNA, 25 bp, Homo sapien
agattggcaagatggcacctggcga

SEQ ID NO: 2252710 - DNA, 25 bp, Homo sapien
cgctggttaccttagtgggcaataa

SEQ ID NO: 2252711 - DNA, 25 bp, Homo sapien
caggaggccggacaataagaagcaa

SEQ ID NO: 2252712 - DNA, 25 bp, Homo sapien
gacatcgagcagacaagtgaggtac

SEQ ID NO: 2252713 - DNA, 25 bp, Homo sapien
ccattgtgttgatagttttggctgc

SEQ ID NO: 2252714 - DNA, 25 bp, Homo sapien
ctttgcattcaaactggaagtctca

SEQ ID NO: 2252715 - DNA, 25 bp, Homo sapien
caagagctgttaacccttctagaag

SEQ ID NO: 2252716 - DNA, 25 bp, Homo sapien
ccaaccgcaggcatgtacttgggtt

SEQ ID NO: 2252717 - DNA, 25 bp, Homo sapien
catttccagaaatggaagttgcttt

SEQ ID NO: 2252718 - DNA, 25 bp, Homo sapien
tccagaaatggaagttgctttgttt

SEQ ID NO: 2252719 - DNA, 25 bp, Homo sapien
cagaaatggaagttgctttgtttac

SEQ ID NO: 2252720 - DNA, 25 bp, Homo sapien
tttccagaaatggaagttgctttgt

SEQ ID NO: 2252721 - DNA, 25 bp, Homo sapien
gacaactatggagtgcaaaaaccac

SEQ ID NO: 2252722 - DNA, 25 bp, Homo sapien
taagacagtgccataactacacgac

SEQ ID NO: 2252723 - DNA, 25 bp, Homo sapien
ggtatctcaagagccagaaggtcct

SEQ ID NO: 2252724 - DNA, 25 bp, Homo sapien
tagtgacttattgacaatcagccgc

SEQ ID NO: 2252725 - DNA, 25 bp, Homo sapien
tgagcaaacttcttacgtgtgtact

SEQ ID NO: 2252726 - DNA, 25 bp, Homo sapien
gagccagactcacggaaatgtaacc

SEQ ID NO: 2252727 - DNA, 25 bp, Homo sapien
tcacaatgaatgtgtcaggcactac

SEQ ID NO: 2252728 - DNA, 25 bp, Homo sapien
tacttccttgttgagaatgcttgca

SEQ ID NO: 2252729 - DNA, 25 bp, Homo sapien
ttagcatttcttactgccagcttta

SEQ ID NO: 2252730 - DNA, 25 bp, Homo sapien
gcatttcttactgccagctttatct

SEQ ID NO: 2252731 - DNA, 25 bp, Homo sapien
tccacgaccataatgagcaaaatca

SEQ ID NO: 2252732 - DNA, 25 bp, Homo sapien
agcactccacgaccataatgagcaa

SEQ ID NO: 2252733 - DNA, 25 bp, Homo sapien
gtcaggcatccaactaaatgtcaag

SEQ ID NO: 2252734 - DNA, 25 bp, Homo sapien
tcactggctcgggatggactggaat

SEQ ID NO: 2252735 - DNA, 25 bp, Homo sapien
tttcaacttcatggctggacctggg

SEQ ID NO: 2252736 - DNA, 25 bp, Homo sapien
caatggtgcactgccacgttaaatc

SEQ ID NO: 2252737 - DNA, 25 bp, Homo sapien
ggcatttccattgccttgaggtaca

SEQ ID NO: 2252738 - DNA, 25 bp, Homo sapien
ggaggacttctaatacgctattgaa

SEQ ID NO: 2252739 - DNA, 25 bp, Homo sapien
tgtactatgaggaaggtaagtgttc

SEQ ID NO: 2252740 - DNA, 25 bp, Homo sapien
ggtacagtatgtttcactgtactat

SEQ ID NO: 2252741 - DNA, 25 bp, Homo sapien
tttaaaagtgagacactacagagtt

SEQ ID NO: 2252742 - DNA, 25 bp, Homo sapien
aagtgagacactacagagttgcaaa

SEQ ID NO: 2252743 - DNA, 25 bp, Homo sapien
gagacactacagagttgcaaaaatt

SEQ ID NO: 2252744 - DNA, 25 bp, Homo sapien
aaagtgagacactacagagttgcaa

SEQ ID NO: 2252745 - DNA, 25 bp, Homo sapien
gtttactgggtgaatagcactttcc

SEQ ID NO: 2252746 - DNA, 25 bp, Homo sapien
ggtttactgggtgaatagcactttc

SEQ ID NO: 2252747 - DNA, 25 bp, Homo sapien
ttactgggtgaatagcactttcctt

SEQ ID NO: 2252748 - DNA, 25 bp, Homo sapien
ctgggtgaatagcactttccttaca

SEQ ID NO: 2252749 - DNA, 25 bp, Homo sapien
tccccctctatcagatcggcttcct

SEQ ID NO: 2252750 - DNA, 25 bp, Homo sapien
cccctctatcagatcggcttcctcc

SEQ ID NO: 2252751 - DNA, 25 bp, Homo sapien
ccctctatcagatcggcttcctcca

SEQ ID NO: 2252752 - DNA, 25 bp, Homo sapien
ctccccctctatcagatcggcttcc

SEQ ID NO: 2252753 - DNA, 25 bp, Homo sapien
cttgtctgccaacccgatcacgacc

SEQ ID NO: 2252754 - DNA, 25 bp, Homo sapien
gtgctccgcggcttgaactgctgta

SEQ ID NO: 2252755 - DNA, 25 bp, Homo sapien
gaactgctgtaggaatcacgtggag

SEQ ID NO: 2252756 - DNA, 25 bp, Homo sapien
tccaccataagatggcgggggccct

SEQ ID NO: 2252757 - DNA, 25 bp, Homo sapien
ggtcaatggtcaggtaatatggcaa

SEQ ID NO: 2252758 - DNA, 25 bp, Homo sapien
tcaatggtcaggtaatatggcaaca

SEQ ID NO: 2252759 - DNA, 25 bp, Homo sapien
gggtcaatggtcaggtaatatggca

SEQ ID NO: 2252760 - DNA, 25 bp, Homo sapien
gtcaatggtcaggtaatatggcaac

SEQ ID NO: 2252761 - DNA, 25 bp, Homo sapien
gccattgctggccataacagggatt

SEQ ID NO: 2252762 - DNA, 25 bp, Homo sapien
gctggccataacagggatttgctca

SEQ ID NO: 2252763 - DNA, 25 bp, Homo sapien
cattgctggccataacagggatttg

SEQ ID NO: 2252764 - DNA, 25 bp, Homo sapien
atctgaatttacagaattcttgtat

SEQ ID NO: 2252765 - DNA, 25 bp, Homo sapien
ccagagagcttgttattttatagta

SEQ ID NO: 2252766 - DNA, 25 bp, Homo sapien
ttatagtagacactcagccactttc

SEQ ID NO: 2252767 - DNA, 25 bp, Homo sapien
attttgaactgtagaacttgccttc

SEQ ID NO: 2252768 - DNA, 25 bp, Homo sapien
ccagtgataagttgcaattttgaac

SEQ ID NO: 2252769 - DNA, 25 bp, Homo sapien
tcaagctggtgatactaaagaccct

SEQ ID NO: 2252770 - DNA, 25 bp, Homo sapien
tggctcacgaacctaaaaactcaag

SEQ ID NO: 2252771 - DNA, 25 bp, Homo sapien
gggaaaacacataaggctgccaatt

SEQ ID NO: 2252772 - DNA, 25 bp, Homo sapien
tttaaaagcaagcaccacacagcct

SEQ ID NO: 2252773 - DNA, 25 bp, Homo sapien
taggaacctccacttggatgatctg

SEQ ID NO: 2252774 - DNA, 25 bp, Homo sapien
tgatctgaatagtcacgatcacgac

SEQ ID NO: 2252775 - DNA, 25 bp, Homo sapien
gaatctctgtaggaacctccacttg

SEQ ID NO: 2252776 - DNA, 25 bp, Homo sapien
cgatcacgaccatatccatctctat

SEQ ID NO: 2252777 - DNA, 25 bp, Homo sapien
tagtatcacgagaacttgggtaatc

SEQ ID NO: 2252778 - DNA, 25 bp, Homo sapien
tcctcttgatggatagtcatcacgt

SEQ ID NO: 2252779 - DNA, 25 bp, Homo sapien
taatctctagtatcacgagaacttg

SEQ ID NO: 2252780 - DNA, 25 bp, Homo sapien
tcacgtgaactggaatgaccataat

SEQ ID NO: 2252781 - DNA, 25 bp, Homo sapien
ggacaaataaacatctctacgagag

SEQ ID NO: 2252782 - DNA, 25 bp, Homo sapien
acaaataaacatctctacgagaggg

SEQ ID NO: 2252783 - DNA, 25 bp, Homo sapien
ggggacaaataaacatctctacgag

SEQ ID NO: 2252784 - DNA, 25 bp, Homo sapien
ttggggacaaataaacatctctacg

SEQ ID NO: 2252785 - DNA, 25 bp, Homo sapien
ttcaaagatgacattacggaggcta

SEQ ID NO: 2252786 - DNA, 25 bp, Homo sapien
aaacgtgaacttacattcaggctat

SEQ ID NO: 2252787 - DNA, 25 bp, Homo sapien
ttacggaggctagatcacctaattt

SEQ ID NO: 2252788 - DNA, 25 bp, Homo sapien
cgtgaacttacattcaggctatgaa

SEQ ID NO: 2252789 - DNA, 25 bp, Homo sapien
cacctctcaattctttgtgttacgg

SEQ ID NO: 2252790 - DNA, 25 bp, Homo sapien
tcttgacaccgtgatccgtctgccg

SEQ ID NO: 2252791 - DNA, 25 bp, Homo sapien
attttaagcatcattcacctctcaa

SEQ ID NO: 2252792 - DNA, 25 bp, Homo sapien
tagtagcataaatcatcatacatgg

SEQ ID NO: 2252793 - DNA, 25 bp, Homo sapien
ccattccactgctactgcgaactgg

SEQ ID NO: 2252794 - DNA, 25 bp, Homo sapien
tactgcgaactggtcctgaaggtgc

SEQ ID NO: 2252795 - DNA, 25 bp, Homo sapien
gcagatctcttaggaggaggacccc

SEQ ID NO: 2252796 - DNA, 25 bp, Homo sapien
ctgctactgcgaactggtcctgaag

SEQ ID NO: 2252797 - DNA, 25 bp, Homo sapien
tacagagtgaactacttggacaaga

SEQ ID NO: 2252798 - DNA, 25 bp, Homo sapien
tttaaatgcctttcctacagagtga

SEQ ID NO: 2252799 - DNA, 25 bp, Homo sapien
gcaatcactttggtagatgaacaag

SEQ ID NO: 2252800 - DNA, 25 bp, Homo sapien
taacactgtccacggtttaacacca

SEQ ID NO: 2252801 - DNA, 25 bp, Homo sapien
caaacccgaggtccacgcaagttat

SEQ ID NO: 2252802 - DNA, 25 bp, Homo sapien
tatacaccaaacccgaggtccacgc

SEQ ID NO: 2252803 - DNA, 25 bp, Homo sapien
tacaccaaacccgaggtccacgcaa

SEQ ID NO: 2252804 - DNA, 25 bp, Homo sapien
caccaaacccgaggtccacgcaagt

SEQ ID NO: 2252805 - DNA, 25 bp, Homo sapien
ggttcctccacttcctcctcttcca

SEQ ID NO: 2252806 - DNA, 25 bp, Homo sapien
tgagggaggtcccctggttcctcca

SEQ ID NO: 2252807 - DNA, 25 bp, Homo sapien
ccatgtgtcctccccgtgagggagg

SEQ ID NO: 2252808 - DNA, 25 bp, Homo sapien
tgtgtcctccccgtgagggaggtcc

SEQ ID NO: 2252809 - DNA, 25 bp, Homo sapien
ctcttggagggcctctacttcttgg

SEQ ID NO: 2252810 - DNA, 25 bp, Homo sapien
ctctaagacctcttggagggcctct

SEQ ID NO: 2252811 - DNA, 25 bp, Homo sapien
ctaagacctcttggagggcctctac

SEQ ID NO: 2252812 - DNA, 25 bp, Homo sapien
cttggagggcctctacttcttggag

SEQ ID NO: 2252813 - DNA, 25 bp, Homo sapien
actttcaaatgatggtttggtggct

SEQ ID NO: 2252814 - DNA, 25 bp, Homo sapien
cactttcaaatgatggtttggtggc

SEQ ID NO: 2252815 - DNA, 25 bp, Homo sapien
caaatgatggtttggtggcttgttc

SEQ ID NO: 2252816 - DNA, 25 bp, Homo sapien
tttcaaatgatggtttggtggcttg

SEQ ID NO: 2252817 - DNA, 25 bp, Homo sapien
tctctggctgcatccttagcgtctg

SEQ ID NO: 2252818 - DNA, 25 bp, Homo sapien
tctggctgcatccttagcgtctgct

SEQ ID NO: 2252819 - DNA, 25 bp, Homo sapien
gctgcatccttagcgtctgctgggc

SEQ ID NO: 2252820 - DNA, 25 bp, Homo sapien
ggctgcatccttagcgtctgctggg

SEQ ID NO: 2252821 - DNA, 25 bp, Homo sapien
acaaaagcaaatcctcttgatttgt

SEQ ID NO: 2252822 - DNA, 25 bp, Homo sapien
tttcaaaggtgacaaaagcaaatcc

SEQ ID NO: 2252823 - DNA, 25 bp, Homo sapien
aaagcaaatcctcttgatttgttgg

SEQ ID NO: 2252824 - DNA, 25 bp, Homo sapien
ttcaaaggtgacaaaagcaaatcct

SEQ ID NO: 2252825 - DNA, 25 bp, Homo sapien
tcatgtcagacgatcaatgcaatca

SEQ ID NO: 2252826 - DNA, 25 bp, Homo sapien
acattatcatgtcagacgatcaatg

SEQ ID NO: 2252827 - DNA, 25 bp, Homo sapien
ttatcatgtcagacgatcaatgcaa

SEQ ID NO: 2252828 - DNA, 25 bp, Homo sapien
catgtcagacgatcaatgcaatcaa

SEQ ID NO: 2252829 - DNA, 25 bp, Homo sapien
aatgaagagctttcctgggcgatct

SEQ ID NO: 2252830 - DNA, 25 bp, Homo sapien
gaagtttaagccaagttatgccgcc

SEQ ID NO: 2252831 - DNA, 25 bp, Homo sapien
tattaagtaacggaacgcggacgca

SEQ ID NO: 2252832 - DNA, 25 bp, Homo sapien
tgcagcggaacctaattaaaactcg

SEQ ID NO: 2252833 - DNA, 25 bp, Homo sapien
tcgacactccgtgactgcagcggaa

SEQ ID NO: 2252834 - DNA, 25 bp, Homo sapien
tcattagcgccagcgccataccaat

SEQ ID NO: 2252835 - DNA, 25 bp, Homo sapien
taccaatgcaggtatcgccgtggtg

SEQ ID NO: 2252836 - DNA, 25 bp, Homo sapien
ggccgccaatgaatacgaagcccgc

SEQ ID NO: 2252837 - DNA, 25 bp, Homo sapien
gcagcccgcatggaagtccacatgc

SEQ ID NO: 2252838 - DNA, 25 bp, Homo sapien
cacggggagagtgtcacgaaaaacg

SEQ ID NO: 2252839 - DNA, 25 bp, Homo sapien
taacacggggagagtgtcacgaaaa

SEQ ID NO: 2252840 - DNA, 25 bp, Homo sapien
ctaacacggggagagtgtcacgaaa

SEQ ID NO: 2252841 - DNA, 25 bp, Homo sapien
gcggctgccgggtgcgaggaccgaa

SEQ ID NO: 2252842 - DNA, 25 bp, Homo sapien
tgcgaggaccgaaccgcgaagccgc

SEQ ID NO: 2252843 - DNA, 25 bp, Homo sapien
ccgaaccgcgaagccgctagcacta

SEQ ID NO: 2252844 - DNA, 25 bp, Homo sapien
agctccaacgagctcggcgataggg

SEQ ID NO: 2252845 - DNA, 25 bp, Homo sapien
cgcaacgagggcgaacaaaggagac

SEQ ID NO: 2252846 - DNA, 25 bp, Homo sapien
gcaacgagggcgaacaaaggagaca

SEQ ID NO: 2252847 - DNA, 25 bp, Homo sapien
ctgcgcaacgagggcgaacaaagga

SEQ ID NO: 2252848 - DNA, 25 bp, Homo sapien
tgcgcaacgagggcgaacaaaggag

SEQ ID NO: 2252849 - DNA, 25 bp, Homo sapien
gaagtagcatgctggcggtgttgga

SEQ ID NO: 2252850 - DNA, 25 bp, Homo sapien
tctgcagttcacacccaggaatgtg

SEQ ID NO: 2252851 - DNA, 25 bp, Homo sapien
cccaaggaccaaaagcgagtgggtg

SEQ ID NO: 2252852 - DNA, 25 bp, Homo sapien
catgctggcggtgttggatgcaaac

SEQ ID NO: 2252853 - DNA, 25 bp, Homo sapien
cctcatacatgttgcagggttgtaa

SEQ ID NO: 2252854 - DNA, 25 bp, Homo sapien
tgcagggttgtaaggaagcaaaaga

SEQ ID NO: 2252855 - DNA, 25 bp, Homo sapien
aagatgaacatggtttggatgggcc

SEQ ID NO: 2252856 - DNA, 25 bp, Homo sapien
tgtccttgccgtctcacaggctttg

SEQ ID NO: 2252857 - DNA, 25 bp, Homo sapien
agctggcgacaacaacacactggtg

SEQ ID NO: 2252858 - DNA, 25 bp, Homo sapien
ggaagacctcaatgtcactgttaga

SEQ ID NO: 2252859 - DNA, 25 bp, Homo sapien
tgaggttgacataggcatacgccgt

SEQ ID NO: 2252860 - DNA, 25 bp, Homo sapien
gaaggtagtcgtgttgcccacatca

SEQ ID NO: 2252861 - DNA, 25 bp, Homo sapien
cgccagcacgatgcctttgttgtct

SEQ ID NO: 2252862 - DNA, 25 bp, Homo sapien
agcacgatgcctttgttgtcttgaa

SEQ ID NO: 2252863 - DNA, 25 bp, Homo sapien
tttgttgtcttgaatcgccgcctgc

SEQ ID NO: 2252864 - DNA, 25 bp, Homo sapien
gttgtcttgaatcgccgcctgccaa

SEQ ID NO: 2252865 - DNA, 25 bp, Homo sapien
taaacaagtgacctcttgttctcca

SEQ ID NO: 2252866 - DNA, 25 bp, Homo sapien
ttggcaaggcgcacacgactcagcg

SEQ ID NO: 2252867 - DNA, 25 bp, Homo sapien
gactcagcgtaaacaagtgacctct

SEQ ID NO: 2252868 - DNA, 25 bp, Homo sapien
gcacacgactcagcgtaaacaagtg

SEQ ID NO: 2252869 - DNA, 25 bp, Homo sapien
ctgacctcgtgacccgaccgcctgg

SEQ ID NO: 2252870 - DNA, 25 bp, Homo sapien
gacctcgtgacccgaccgcctgggc

SEQ ID NO: 2252871 - DNA, 25 bp, Homo sapien
ggcgcacgccactacgcccgctaat

SEQ ID NO: 2252872 - DNA, 25 bp, Homo sapien
caggcgcacgccactacgcccgcta

SEQ ID NO: 2252873 - DNA, 25 bp, Homo sapien
ggcgccctagcaaccgggttgcgaa

SEQ ID NO: 2252874 - DNA, 25 bp, Homo sapien
ctactggcgccctagcaaccgggtt

SEQ ID NO: 2252875 - DNA, 25 bp, Homo sapien
tggcgccctagcaaccgggttgcga

SEQ ID NO: 2252876 - DNA, 25 bp, Homo sapien
actggcgccctagcaaccgggttgc

SEQ ID NO: 2252877 - DNA, 25 bp, Homo sapien
cttcagtgatgacagcattgtgtgt

SEQ ID NO: 2252878 - DNA, 25 bp, Homo sapien
caaattgcttatttcatatcccact

SEQ ID NO: 2252879 - DNA, 25 bp, Homo sapien
catatcccactttgtatgttactga

SEQ ID NO: 2252880 - DNA, 25 bp, Homo sapien
tctcttcagtgatgacagcattgtg

SEQ ID NO: 2252881 - DNA, 25 bp, Homo sapien
actccggacacatccgaacgtctag

SEQ ID NO: 2252882 - DNA, 25 bp, Homo sapien
catccgaacgtctagaagaaacaaa

SEQ ID NO: 2252883 - DNA, 25 bp, Homo sapien
accgccttaagatctgtgacactca

SEQ ID NO: 2252884 - DNA, 25 bp, Homo sapien
ctgtaagaactgtaacggtcaccgc

SEQ ID NO: 2252885 - DNA, 25 bp, Homo sapien
aaaagaatcgtgtgtactgtaatac

SEQ ID NO: 2252886 - DNA, 25 bp, Homo sapien
tacttgtaaagtgctagagcagtgt

SEQ ID NO: 2252887 - DNA, 25 bp, Homo sapien
tgttgtacagccatctatgtagtct

SEQ ID NO: 2252888 - DNA, 25 bp, Homo sapien
tgctgggtcaaaggatacggacttt

SEQ ID NO: 2252889 - DNA, 25 bp, Homo sapien
ctctatctgagtgccaaaacgtggc

SEQ ID NO: 2252890 - DNA, 25 bp, Homo sapien
attctctatctgagtgccaaaacgt

SEQ ID NO: 2252891 - DNA, 25 bp, Homo sapien
tctctatctgagtgccaaaacgtgg

SEQ ID NO: 2252892 - DNA, 25 bp, Homo sapien
tatctgagtgccaaaacgtggctgt

SEQ ID NO: 2252893 - DNA, 25 bp, Homo sapien
atgtcagagccatgcaacagttgtg

SEQ ID NO: 2252894 - DNA, 25 bp, Homo sapien
agagccatgcaacagttgtggctcc

SEQ ID NO: 2252895 - DNA, 25 bp, Homo sapien
tcagagccatgcaacagttgtggct

SEQ ID NO: 2252896 - DNA, 25 bp, Homo sapien
agatgtcagagccatgcaacagttg

SEQ ID NO: 2252897 - DNA, 25 bp, Homo sapien
caaactgctgtttgaacccagagcc

SEQ ID NO: 2252898 - DNA, 25 bp, Homo sapien
ccagagcctataatcatcagctgag

SEQ ID NO: 2252899 - DNA, 25 bp, Homo sapien
caacaaacatttccgcctgactgtg

SEQ ID NO: 2252900 - DNA, 25 bp, Homo sapien
cacaacaaacatttccgcctgactg

SEQ ID NO: 2252901 - DNA, 25 bp, Homo sapien
aagaatgttgctaatacagtgtgga

SEQ ID NO: 2252902 - DNA, 25 bp, Homo sapien
aaacatttccgcctgactgtgggga

SEQ ID NO: 2252903 - DNA, 25 bp, Homo sapien
tctaagtcatgaaggttatcttcag

SEQ ID NO: 2252904 - DNA, 25 bp, Homo sapien
taagtcatgaaggttatcttcagct

SEQ ID NO: 2252905 - DNA, 25 bp, Homo sapien
tttctaagtcatgaaggttatcttc

SEQ ID NO: 2252906 - DNA, 25 bp, Homo sapien
ttttctaagtcatgaaggttatctt

SEQ ID NO: 2252907 - DNA, 25 bp, Homo sapien
cagtatcctccttcggctctggcgc

SEQ ID NO: 2252908 - DNA, 25 bp, Homo sapien
tcagtatcctccttcggctctggcg

SEQ ID NO: 2252909 - DNA, 25 bp, Homo sapien
tgcagtggctgcaggggtcgcagtg

SEQ ID NO: 2252910 - DNA, 25 bp, Homo sapien
aggaaattttgggctgagataatgg

SEQ ID NO: 2252911 - DNA, 25 bp, Homo sapien
ttaaggaaattttgggctgagataa

SEQ ID NO: 2252912 - DNA, 25 bp, Homo sapien
gaaattttgggctgagataatgggg

SEQ ID NO: 2252913 - DNA, 25 bp, Homo sapien
taaggaaattttgggctgagataat

SEQ ID NO: 2252914 - DNA, 25 bp, Homo sapien
ttgatctggctttcttggcggtgat

SEQ ID NO: 2252915 - DNA, 25 bp, Homo sapien
cttgatctggctttcttggcggtga

SEQ ID NO: 2252916 - DNA, 25 bp, Homo sapien
tcttgatctggctttcttggcggtg

SEQ ID NO: 2252917 - DNA, 25 bp, Homo sapien
gaaggtgaacgtctcttggtgactg

SEQ ID NO: 2252918 - DNA, 25 bp, Homo sapien
tgaaggtgaacgtctcttggtgact

SEQ ID NO: 2252919 - DNA, 25 bp, Homo sapien
gaaggggaatgtctccgccgcctgc

SEQ ID NO: 2252920 - DNA, 25 bp, Homo sapien
aggggaatgtctccgccgcctgcca

SEQ ID NO: 2252921 - DNA, 25 bp, Homo sapien
taagtctctttttggcgcttttgtg

SEQ ID NO: 2252922 - DNA, 25 bp, Homo sapien
ggcgcttttgtggtgatggagaggc

SEQ ID NO: 2252923 - DNA, 25 bp, Homo sapien
tcacatgggatctcatgggtcgttc

SEQ ID NO: 2252924 - DNA, 25 bp, Homo sapien
tcttcacatgggatctcatgggtcg

SEQ ID NO: 2252925 - DNA, 25 bp, Homo sapien
cattcttcacatgggatctcatggg

SEQ ID NO: 2252926 - DNA, 25 bp, Homo sapien
catgggatctcatgggtcgttcatc

SEQ ID NO: 2252927 - DNA, 25 bp, Homo sapien
ttagttgtctgtattggtgtctctg

SEQ ID NO: 2252928 - DNA, 25 bp, Homo sapien
tctgtattggtgtctctgctgcaca

SEQ ID NO: 2252929 - DNA, 25 bp, Homo sapien
tgctggtttagttgtctgtattggt

SEQ ID NO: 2252930 - DNA, 25 bp, Homo sapien
agttgtctgtattggtgtctctgct

SEQ ID NO: 2252931 - DNA, 25 bp, Homo sapien
tcttctgattcagacaactactttt

SEQ ID NO: 2252932 - DNA, 25 bp, Homo sapien
gctttggtgctggtgaacggcactc

SEQ ID NO: 2252933 - DNA, 25 bp, Homo sapien
ggtgctggtgaacggcactcccttt

SEQ ID NO: 2252934 - DNA, 25 bp, Homo sapien
atcttcttctgattcagacaactac

SEQ ID NO: 2252935 - DNA, 25 bp, Homo sapien
gaagttctccctggagacacggaaa

SEQ ID NO: 2252936 - DNA, 25 bp, Homo sapien
ctgaagttctccctggagacacgga

SEQ ID NO: 2252937 - DNA, 25 bp, Homo sapien
tgaagttctccctggagacacggaa

SEQ ID NO: 2252938 - DNA, 25 bp, Homo sapien
tttcttgtacagtttgactgctggg

SEQ ID NO: 2252939 - DNA, 25 bp, Homo sapien
cttctttggtggtgaccgggaatga

SEQ ID NO: 2252940 - DNA, 25 bp, Homo sapien
gatggcctgtaccttcgccttggag

SEQ ID NO: 2252941 - DNA, 25 bp, Homo sapien
ggacttgttgaaggagataacttac

SEQ ID NO: 2252942 - DNA, 25 bp, Homo sapien
attcccagacaaggatgctgatgaa

SEQ ID NO: 2252943 - DNA, 25 bp, Homo sapien
ccagacaaggatgctgatgaacgtc

SEQ ID NO: 2252944 - DNA, 25 bp, Homo sapien
ctattcccagacaaggatgctgatg

SEQ ID NO: 2252945 - DNA, 25 bp, Homo sapien
tcccagacaaggatgctgatgaacg

SEQ ID NO: 2252946 - DNA, 25 bp, Homo sapien
aggagatggctgccgccttgggctt

SEQ ID NO: 2252947 - DNA, 25 bp, Homo sapien
gaggagatggctgccgccttgggct

SEQ ID NO: 2252948 - DNA, 25 bp, Homo sapien
tggggaccgcatctgagattttgat

SEQ ID NO: 2252949 - DNA, 25 bp, Homo sapien
ctaggtggagtgtgagaaggacagt

SEQ ID NO: 2252950 - DNA, 25 bp, Homo sapien
tcttgattgggatctatggcgctgt

SEQ ID NO: 2252951 - DNA, 25 bp, Homo sapien
cagtggggaccgcatctgagatttt

SEQ ID NO: 2252952 - DNA, 25 bp, Homo sapien
tcactagtagaagtggcctgttgta

SEQ ID NO: 2252953 - DNA, 25 bp, Homo sapien
gtcactagtagaagtggcctgttgt

SEQ ID NO: 2252954 - DNA, 25 bp, Homo sapien
tgttttcttgtgcacttagcagcag

SEQ ID NO: 2252955 - DNA, 25 bp, Homo sapien
atgttttcttgtgcacttagcagca

SEQ ID NO: 2252956 - DNA, 25 bp, Homo sapien
gttttcttgtgcacttagcagcagg

SEQ ID NO: 2252957 - DNA, 25 bp, Homo sapien
ttttcttgtgcacttagcagcaggg

SEQ ID NO: 2252958 - DNA, 25 bp, Homo sapien
tctaggcattctgcaaatttcagct

SEQ ID NO: 2252959 - DNA, 25 bp, Homo sapien
tctttttgttatccaaggctttata

SEQ ID NO: 2252960 - DNA, 25 bp, Homo sapien
ctaggcattctgcaaatttcagctg

SEQ ID NO: 2252961 - DNA, 25 bp, Homo sapien
agaatcctgagtccatcttgccgcc

SEQ ID NO: 2252962 - DNA, 25 bp, Homo sapien
tgatcggtggaagaatcctgagtcc

SEQ ID NO: 2252963 - DNA, 25 bp, Homo sapien
ttgatcggtggaagaatcctgagtc

SEQ ID NO: 2252964 - DNA, 25 bp, Homo sapien
cttgatcggtggaagaatcctgagt

SEQ ID NO: 2252965 - DNA, 25 bp, Homo sapien
ttccagctttatggacaatcttttt

SEQ ID NO: 2252966 - DNA, 25 bp, Homo sapien
caagacccttatccccaaataagct

SEQ ID NO: 2252967 - DNA, 25 bp, Homo sapien
tattttgcacagtggctgaaattcc

SEQ ID NO: 2252968 - DNA, 25 bp, Homo sapien
ccagctttatggacaatctttttcc

SEQ ID NO: 2252969 - DNA, 25 bp, Homo sapien
gtctctcagacaaccaaccaaaggg

SEQ ID NO: 2252970 - DNA, 25 bp, Homo sapien
caatgggaacttggcctcaggactg

SEQ ID NO: 2252971 - DNA, 25 bp, Homo sapien
cacattatggatctgccaagcgcga

SEQ ID NO: 2252972 - DNA, 25 bp, Homo sapien
tagctgtgaccccatagaggagtcc

SEQ ID NO: 2252973 - DNA, 25 bp, Homo sapien
ggaaaagtagcagaatcgtaggaag

SEQ ID NO: 2252974 - DNA, 25 bp, Homo sapien
gtctgggtggctatcttctttcggg

SEQ ID NO: 2252975 - DNA, 25 bp, Homo sapien
tccttcttaatggtcttgtgcatgt

SEQ ID NO: 2252976 - DNA, 25 bp, Homo sapien
ggaagggacaatcttgccttcagtc

SEQ ID NO: 2252977 - DNA, 25 bp, Homo sapien
gaaaagccagatgattatggtgatc

SEQ ID NO: 2252978 - DNA, 25 bp, Homo sapien
aagccagatgattatggtgatcacc

SEQ ID NO: 2252979 - DNA, 25 bp, Homo sapien
atgattatggtgatcacccactggg

SEQ ID NO: 2252980 - DNA, 25 bp, Homo sapien
ccagatgattatggtgatcacccac

SEQ ID NO: 2252981 - DNA, 25 bp, Homo sapien
cgggatgttcactgcctcgacgtca

SEQ ID NO: 2252982 - DNA, 25 bp, Homo sapien
tgctgttgctgttacgacgactggg

SEQ ID NO: 2252983 - DNA, 25 bp, Homo sapien
gctttgcactggtagcacctgggca

SEQ ID NO: 2252984 - DNA, 25 bp, Homo sapien
ggttgacctctgtgcgacccttgtc

SEQ ID NO: 2252985 - DNA, 25 bp, Homo sapien
tacactactctcactggtccccgtg

SEQ ID NO: 2252986 - DNA, 25 bp, Homo sapien
tggcctctacactactctcactggt

SEQ ID NO: 2252987 - DNA, 25 bp, Homo sapien
tactctcactggtccccgtgcttcc

SEQ ID NO: 2252988 - DNA, 25 bp, Homo sapien
ctggcctctacactactctcactgg

SEQ ID NO: 2252989 - DNA, 25 bp, Homo sapien
tgaaggacaccacgctgagaatagt

SEQ ID NO: 2252990 - DNA, 25 bp, Homo sapien
caatccaggtgccatagaggagcag

SEQ ID NO: 2252991 - DNA, 25 bp, Homo sapien
gccacgagcgaaatctgcagcaggt

SEQ ID NO: 2252992 - DNA, 25 bp, Homo sapien
taaaacggttggtcacctgcagcag

SEQ ID NO: 2252993 - DNA, 25 bp, Homo sapien
tgagacaggttgcaggctcagtgcc

SEQ ID NO: 2252994 - DNA, 25 bp, Homo sapien
gtgccggcaccggtgggtggcaaag

SEQ ID NO: 2252995 - DNA, 25 bp, Homo sapien
gccagagggcgtgagacaggttgca

SEQ ID NO: 2252996 - DNA, 25 bp, Homo sapien
gctcagtgccggcaccggtgggtgg

SEQ ID NO: 2252997 - DNA, 25 bp, Homo sapien
tttccgcacggctccatccccagtg

SEQ ID NO: 2252998 - DNA, 25 bp, Homo sapien
gggtttccgcacggctccatcccca

SEQ ID NO: 2252999 - DNA, 25 bp, Homo sapien
ggtttccgcacggctccatccccag

SEQ ID NO: 2253000 - DNA, 25 bp, Homo sapien
gtttccgcacggctccatccccagt

SEQ ID NO: 2253001 - DNA, 25 bp, Homo sapien
tatggctcctttccggactctccag

SEQ ID NO: 2253002 - DNA, 25 bp, Homo sapien
ctcctttccggactctccagatctg

SEQ ID NO: 2253003 - DNA, 25 bp, Homo sapien
tggctcctttccggactctccagat

SEQ ID NO: 2253004 - DNA, 25 bp, Homo sapien
ctatggctcctttccggactctcca

SEQ ID NO: 2253005 - DNA, 25 bp, Homo sapien
tcacactgtctctggctccggggag

SEQ ID NO: 2253006 - DNA, 25 bp, Homo sapien
gcgtgcgctttctctgcttgtctct

SEQ ID NO: 2253007 - DNA, 25 bp, Homo sapien
gcgcgtgcgtgcgtgcgctttctct

SEQ ID NO: 2253008 - DNA, 25 bp, Homo sapien
ctccggggagttttggtcgctagcg

SEQ ID NO: 2253009 - DNA, 25 bp, Homo sapien
tctgtctccctgtggactttatttt

SEQ ID NO: 2253010 - DNA, 25 bp, Homo sapien
ctccctgtggactttattttgccgt

SEQ ID NO: 2253011 - DNA, 25 bp, Homo sapien
tgtggactttattttgccgtggaaa

SEQ ID NO: 2253012 - DNA, 25 bp, Homo sapien
tctggctggatctctgtctctttgg

SEQ ID NO: 2253013 - DNA, 25 bp, Homo sapien
tctgcttggtgtcggtgacagccga

SEQ ID NO: 2253014 - DNA, 25 bp, Homo sapien
ccggatctgcttggtgtcggtgaca

SEQ ID NO: 2253015 - DNA, 25 bp, Homo sapien
ctctttgctttctccggatctgctt

SEQ ID NO: 2253016 - DNA, 25 bp, Homo sapien
ctttctccggatctgcttggtgtcg

SEQ ID NO: 2253017 - DNA, 25 bp, Homo sapien
gtgcaggtccttcggggctcctcgc

SEQ ID NO: 2253018 - DNA, 25 bp, Homo sapien
ggcgccgcgtgcaggtccttcgggg

SEQ ID NO: 2253019 - DNA, 25 bp, Homo sapien
tgcgagctggcacggggcagcgggc

SEQ ID NO: 2253020 - DNA, 25 bp, Homo sapien
tgctgcagacgtggcgtcgcgggcg

SEQ ID NO: 2253021 - DNA, 25 bp, Homo sapien
ggcgcgcggcgtcttaaggcagcgc

SEQ ID NO: 2253022 - DNA, 25 bp, Homo sapien
gcgcggcgtcttaaggcagcgcggt

SEQ ID NO: 2253023 - DNA, 25 bp, Homo sapien
gcggcgtcttaaggcagcgcggtgc

SEQ ID NO: 2253024 - DNA, 25 bp, Homo sapien
ggggcgcgcggcgtcttaaggcagc

SEQ ID NO: 2253025 - DNA, 25 bp, Homo sapien
gtggtctcagtggttcggtgtgcat

SEQ ID NO: 2253026 - DNA, 25 bp, Homo sapien
aatgtggtctcagtggttcggtgtg

SEQ ID NO: 2253027 - DNA, 25 bp, Homo sapien
tgtggtctcagtggttcggtgtgca

SEQ ID NO: 2253028 - DNA, 25 bp, Homo sapien
atgtggtctcagtggttcggtgtgc

SEQ ID NO: 2253029 - DNA, 25 bp, Homo sapien
ctgtcggttcttgactttgcggcac

SEQ ID NO: 2253030 - DNA, 25 bp, Homo sapien
gctctgtcggttcttgactttgcgg

SEQ ID NO: 2253031 - DNA, 25 bp, Homo sapien
cggggggctctgtcggttcttgact

SEQ ID NO: 2253032 - DNA, 25 bp, Homo sapien
ggggctctgtcggttcttgactttg

SEQ ID NO: 2253033 - DNA, 25 bp, Homo sapien
acccctaactcaactcgaggtgcga

SEQ ID NO: 2253034 - DNA, 25 bp, Homo sapien
gcgccctcgcgactgtcatctgctg

SEQ ID NO: 2253035 - DNA, 25 bp, Homo sapien
acagcgcctgcgataggattcagca

SEQ ID NO: 2253036 - DNA, 25 bp, Homo sapien
tcaactcgaggtgcgagtccccatc

SEQ ID NO: 2253037 - DNA, 25 bp, Homo sapien
ttttttcctgccatgactgctaatg

SEQ ID NO: 2253038 - DNA, 25 bp, Homo sapien
aatgaatgatccaagatgttcttgt

SEQ ID NO: 2253039 - DNA, 25 bp, Homo sapien
ttttcctgccatgactgctaatgaa

SEQ ID NO: 2253040 - DNA, 25 bp, Homo sapien
gatccaagatgttcttgtcgcagtg

SEQ ID NO: 2253041 - DNA, 25 bp, Homo sapien
ttcttcagacggcagtccaggagag

SEQ ID NO: 2253042 - DNA, 25 bp, Homo sapien
tatcttcttcagacggcagtccagg

SEQ ID NO: 2253043 - DNA, 25 bp, Homo sapien
attatcttcttcagacggcagtcca

SEQ ID NO: 2253044 - DNA, 25 bp, Homo sapien
cttcagacggcagtccaggagaggc

SEQ ID NO: 2253045 - DNA, 25 bp, Homo sapien
cttcagcacctgcatctaaagggga

SEQ ID NO: 2253046 - DNA, 25 bp, Homo sapien
cagcacctgcatctaaaggggaaaa

SEQ ID NO: 2253047 - DNA, 25 bp, Homo sapien
aatttggaatgcagcaccttcagca

SEQ ID NO: 2253048 - DNA, 25 bp, Homo sapien
atggcaatttggaatgcagcacctt

SEQ ID NO: 2253049 - DNA, 25 bp, Homo sapien
ctttcatccctccaccttcaaagaa

SEQ ID NO: 2253050 - DNA, 25 bp, Homo sapien
ccctccaccttcaaagaagtctggg

SEQ ID NO: 2253051 - DNA, 25 bp, Homo sapien
atccctccaccttcaaagaagtctg

SEQ ID NO: 2253052 - DNA, 25 bp, Homo sapien
tcaaagaagtctgggctattggcca

SEQ ID NO: 2253053 - DNA, 25 bp, Homo sapien
attttatgcatgatgagtctctcct

SEQ ID NO: 2253054 - DNA, 25 bp, Homo sapien
gattgaattggtttctgcaggtggt

SEQ ID NO: 2253055 - DNA, 25 bp, Homo sapien
ctagagatctgtatgtcacatatgg

SEQ ID NO: 2253056 - DNA, 25 bp, Homo sapien
ggttgcgcaacattctcccctagag

SEQ ID NO: 2253057 - DNA, 25 bp, Homo sapien
tcagattctattatgtgagattgaa

SEQ ID NO: 2253058 - DNA, 25 bp, Homo sapien
ccacagaagtctatgtctacctgct

SEQ ID NO: 2253059 - DNA, 25 bp, Homo sapien
cacagaagtctatgtctacctgctt

SEQ ID NO: 2253060 - DNA, 25 bp, Homo sapien
tccacagaagtctatgtctacctgc

SEQ ID NO: 2253061 - DNA, 25 bp, Homo sapien
gactctgcacagtcatattctggaa

SEQ ID NO: 2253062 - DNA, 25 bp, Homo sapien
tctgcacagtcatattctggaatca

SEQ ID NO: 2253063 - DNA, 25 bp, Homo sapien
gtttctctggcaacagaagtctcaa

SEQ ID NO: 2253064 - DNA, 25 bp, Homo sapien
gaagtctcaattgactctgcacagt

SEQ ID NO: 2253065 - DNA, 25 bp, Homo sapien
gcaaacagtcaaccccgatctgtga

SEQ ID NO: 2253066 - DNA, 25 bp, Homo sapien
ttcttagcaaacagtcaaccccgat

SEQ ID NO: 2253067 - DNA, 25 bp, Homo sapien
tccacactaacagcaccatctgtga

SEQ ID NO: 2253068 - DNA, 25 bp, Homo sapien
tgtgatttactggagcccacagtct

SEQ ID NO: 2253069 - DNA, 25 bp, Homo sapien
tgactgcagcacaagatctggatca

SEQ ID NO: 2253070 - DNA, 25 bp, Homo sapien
tgaccaggtagacctcatagttggg

SEQ ID NO: 2253071 - DNA, 25 bp, Homo sapien
caagatctggatcaaggagacatga

SEQ ID NO: 2253072 - DNA, 25 bp, Homo sapien
gggtaggtagtgtgaagatgaccag

SEQ ID NO: 2253073 - DNA, 25 bp, Homo sapien
ggtaataggcagcaggatagatggt

SEQ ID NO: 2253074 - DNA, 25 bp, Homo sapien
taggcagcaggatagatggtaaaaa

SEQ ID NO: 2253075 - DNA, 25 bp, Homo sapien
cagcaggatagatggtaaaaaggtt

SEQ ID NO: 2253076 - DNA, 25 bp, Homo sapien
tgggtaataggcagcaggatagatg

SEQ ID NO: 2253077 - DNA, 25 bp, Homo sapien
tcttttcccagacttccattgagaa

SEQ ID NO: 2253078 - DNA, 25 bp, Homo sapien
agacttccattgagaaaatttccaa

SEQ ID NO: 2253079 - DNA, 25 bp, Homo sapien
ccagacttccattgagaaaatttcc

SEQ ID NO: 2253080 - DNA, 25 bp, Homo sapien
tcccagacttccattgagaaaattt

SEQ ID NO: 2253081 - DNA, 25 bp, Homo sapien
tggacctatagcaattgcctgcggg

SEQ ID NO: 2253082 - DNA, 25 bp, Homo sapien
tgtccagttggctagcttgtctctc

SEQ ID NO: 2253083 - DNA, 25 bp, Homo sapien
tgggagtaaagaatcaccaggttct

SEQ ID NO: 2253084 - DNA, 25 bp, Homo sapien
caggttctttatggtacttccaaca

SEQ ID NO: 2253085 - DNA, 25 bp, Homo sapien
cacctcaggagtaggaaaaatgctg

SEQ ID NO: 2253086 - DNA, 25 bp, Homo sapien
aatgctgaaagccaagattttacag

SEQ ID NO: 2253087 - DNA, 25 bp, Homo sapien
gctgaaagccaagattttacaggcc

SEQ ID NO: 2253088 - DNA, 25 bp, Homo sapien
cctcaggagtaggaaaaatgctgaa

SEQ ID NO: 2253089 - DNA, 25 bp, Homo sapien
gataaaactagtatcctggatcact

SEQ ID NO: 2253090 - DNA, 25 bp, Homo sapien
gatagactatatccacactagtgtt

SEQ ID NO: 2253091 - DNA, 25 bp, Homo sapien
ggatcactgacgcaatccaaaatag

SEQ ID NO: 2253092 - DNA, 25 bp, Homo sapien
tcttctagtcttcgaaatgcctttc

SEQ ID NO: 2253093 - DNA, 25 bp, Homo sapien
accccaaggattctactttcgactg

SEQ ID NO: 2253094 - DNA, 25 bp, Homo sapien
ctactttcgactgttatttgattac

SEQ ID NO: 2253095 - DNA, 25 bp, Homo sapien
cagaaccccaaggattctactttcg

SEQ ID NO: 2253096 - DNA, 25 bp, Homo sapien
caaggattctactttcgactgttat

SEQ ID NO: 2253097 - DNA, 25 bp, Homo sapien
cttatggcctcagaactcaggaaac

SEQ ID NO: 2253098 - DNA, 25 bp, Homo sapien
caggaaaccctgaatcacgtggcta

SEQ ID NO: 2253099 - DNA, 25 bp, Homo sapien
ctcttgaacttatggcctcagaact

SEQ ID NO: 2253100 - DNA, 25 bp, Homo sapien
ctacatgagggagggttggatcctt

SEQ ID NO: 2253101 - DNA, 25 bp, Homo sapien
cagttggacagatatggtcacatgg

SEQ ID NO: 2253102 - DNA, 25 bp, Homo sapien
tatgtgacttctgcagttggacaga

SEQ ID NO: 2253103 - DNA, 25 bp, Homo sapien
taaggaccacttagcttgatatgtg

SEQ ID NO: 2253104 - DNA, 25 bp, Homo sapien
ggaccacttagcttgatatgtgact

SEQ ID NO: 2253105 - DNA, 25 bp, Homo sapien
aggagcaaaaatgttggtgctgtgt

SEQ ID NO: 2253106 - DNA, 25 bp, Homo sapien
ggagcaaaaatgttggtgctgtgtt

SEQ ID NO: 2253107 - DNA, 25 bp, Homo sapien
caggagcaaaaatgttggtgctgtg

SEQ ID NO: 2253108 - DNA, 25 bp, Homo sapien
tgtggctgctgttgctgtccctgcc

SEQ ID NO: 2253109 - DNA, 25 bp, Homo sapien
ctctgtggctgctgttgctgtccct

SEQ ID NO: 2253110 - DNA, 25 bp, Homo sapien
ggctgctgttgctgtccctgccacc

SEQ ID NO: 2253111 - DNA, 25 bp, Homo sapien
tctgtggctgctgttgctgtccctg

SEQ ID NO: 2253112 - DNA, 25 bp, Homo sapien
tacctccttctaaactctgctgttt

SEQ ID NO: 2253113 - DNA, 25 bp, Homo sapien
tccttctaaactctgctgtttctgc

SEQ ID NO: 2253114 - DNA, 25 bp, Homo sapien
gtttctgccaccaatgactctctac

SEQ ID NO: 2253115 - DNA, 25 bp, Homo sapien
tccatacctccttctaaactctgct

SEQ ID NO: 2253116 - DNA, 25 bp, Homo sapien
gctggaaatcagctcgtcttcttca

SEQ ID NO: 2253117 - DNA, 25 bp, Homo sapien
caattgaatctaaaactatactgta

SEQ ID NO: 2253118 - DNA, 25 bp, Homo sapien
actgtacttcacacttgattggtcc

SEQ ID NO: 2253119 - DNA, 25 bp, Homo sapien
acttcacacttgattggtccttcag

SEQ ID NO: 2253120 - DNA, 25 bp, Homo sapien
tacagcataaatgtatcgaggacaa

SEQ ID NO: 2253121 - DNA, 25 bp, Homo sapien
agccgtcagcgagccattgaatgtc

SEQ ID NO: 2253122 - DNA, 25 bp, Homo sapien
gcataaatgtatcgaggacaaaaaa

SEQ ID NO: 2253123 - DNA, 25 bp, Homo sapien
aaaatatcttctgaatgcagccgtc

SEQ ID NO: 2253124 - DNA, 25 bp, Homo sapien
ggagcgacaagagacaagcaggcct

SEQ ID NO: 2253125 - DNA, 25 bp, Homo sapien
acaagcaggcctgcataaaaccacc

SEQ ID NO: 2253126 - DNA, 25 bp, Homo sapien
tctcttatccccagaggagcgacaa

SEQ ID NO: 2253127 - DNA, 25 bp, Homo sapien
aggcctgcataaaaccacccttcat

SEQ ID NO: 2253128 - DNA, 25 bp, Homo sapien
tatgggttgcatttgtatcatttaa

SEQ ID NO: 2253129 - DNA, 25 bp, Homo sapien
cccaggtagaggatccatacaacaa

SEQ ID NO: 2253130 - DNA, 25 bp, Homo sapien
tcaaagatgggatttactgctcgtt

SEQ ID NO: 2253131 - DNA, 25 bp, Homo sapien
atgaaaaatcaatccagatatgggt

SEQ ID NO: 2253132 - DNA, 25 bp, Homo sapien
catatttcctgcagggttgtgaccc

SEQ ID NO: 2253133 - DNA, 25 bp, Homo sapien
tcagattgagcaaatggttatatgt

SEQ ID NO: 2253134 - DNA, 25 bp, Homo sapien
cagattgagcaaatggttatatgta

SEQ ID NO: 2253135 - DNA, 25 bp, Homo sapien
cttcagattgagcaaatggttatat

SEQ ID NO: 2253136 - DNA, 25 bp, Homo sapien
agattgagcaaatggttatatgtaa

SEQ ID NO: 2253137 - DNA, 25 bp, Homo sapien
taacaatatttgtagcattcaagaa

SEQ ID NO: 2253138 - DNA, 25 bp, Homo sapien
ttaacaatatttgtagcattcaaga

SEQ ID NO: 2253139 - DNA, 25 bp, Homo sapien
caagcctgctggtagaatccgatgg

SEQ ID NO: 2253140 - DNA, 25 bp, Homo sapien
cctgctggtagaatccgatggcaat

SEQ ID NO: 2253141 - DNA, 25 bp, Homo sapien
gacaagcctgctggtagaatccgat

SEQ ID NO: 2253142 - DNA, 25 bp, Homo sapien
catgacaagcctgctggtagaatcc

SEQ ID NO: 2253143 - DNA, 25 bp, Homo sapien
aaatgcagccgaaacactggtgttg

SEQ ID NO: 2253144 - DNA, 25 bp, Homo sapien
cacattgcaaagagatctgtggcag

SEQ ID NO: 2253145 - DNA, 25 bp, Homo sapien
taagccaattccctgaggacccata

SEQ ID NO: 2253146 - DNA, 25 bp, Homo sapien
gaacatgtgcgtcattaaaaattgt

SEQ ID NO: 2253147 - DNA, 25 bp, Homo sapien
tccagctgtgcattgagtgacaagg

SEQ ID NO: 2253148 - DNA, 25 bp, Homo sapien
tgtggtccagctgtgcattgagtga

SEQ ID NO: 2253149 - DNA, 25 bp, Homo sapien
cattgagtgacaaggaaaaccctgt

SEQ ID NO: 2253150 - DNA, 25 bp, Homo sapien
gccaaaatccaaattgccatgggaa

SEQ ID NO: 2253151 - DNA, 25 bp, Homo sapien
cctattagtaggacaaagggcatca

SEQ ID NO: 2253152 - DNA, 25 bp, Homo sapien
gaaataccatctcctattagtagga

SEQ ID NO: 2253153 - DNA, 25 bp, Homo sapien
ccatctcctattagtaggacaaagg

SEQ ID NO: 2253154 - DNA, 25 bp, Homo sapien
agaaataccatctcctattagtagg

SEQ ID NO: 2253155 - DNA, 25 bp, Homo sapien
tgagcatctgccacgtatcggcatt

SEQ ID NO: 2253156 - DNA, 25 bp, Homo sapien
ccatcagtatttggtaggttattga

SEQ ID NO: 2253157 - DNA, 25 bp, Homo sapien
gccacgtatcggcattccatcagta

SEQ ID NO: 2253158 - DNA, 25 bp, Homo sapien
gtatttggtaggttattgaatatcc

SEQ ID NO: 2253159 - DNA, 25 bp, Homo sapien
ttctacatcccttccattcacattt

SEQ ID NO: 2253160 - DNA, 25 bp, Homo sapien
ttcacatttcctacaatggcagcag

SEQ ID NO: 2253161 - DNA, 25 bp, Homo sapien
ctactagtggttccaccttctacat

SEQ ID NO: 2253162 - DNA, 25 bp, Homo sapien
cctactagtggttccaccttctaca

SEQ ID NO: 2253163 - DNA, 25 bp, Homo sapien
gagtgtcacagtcaggggaaagtgc

SEQ ID NO: 2253164 - DNA, 25 bp, Homo sapien
cacagtcaggggaaagtgcccccag

SEQ ID NO: 2253165 - DNA, 25 bp, Homo sapien
gtgtcacagtcaggggaaagtgccc

SEQ ID NO: 2253166 - DNA, 25 bp, Homo sapien
cagtcaggggaaagtgcccccagaa

SEQ ID NO: 2253167 - DNA, 25 bp, Homo sapien
tctccccggtcattcatgatcctct

SEQ ID NO: 2253168 - DNA, 25 bp, Homo sapien
ggtcattcatgatcctctcttgtat

SEQ ID NO: 2253169 - DNA, 25 bp, Homo sapien
cctccgtgattccaaactccgaaat

SEQ ID NO: 2253170 - DNA, 25 bp, Homo sapien
tgattccaaactccgaaatttctcc

SEQ ID NO: 2253171 - DNA, 25 bp, Homo sapien
gcccggctcctttcgcagaggcaac

SEQ ID NO: 2253172 - DNA, 25 bp, Homo sapien
ggcccggctcctttcgcagaggcaa

SEQ ID NO: 2253173 - DNA, 25 bp, Homo sapien
tggcccggctcctttcgcagaggca

SEQ ID NO: 2253174 - DNA, 25 bp, Homo sapien
gctggcccggctcctttcgcagagg

SEQ ID NO: 2253175 - DNA, 25 bp, Homo sapien
tcacaaattccacaatgcaattcat

SEQ ID NO: 2253176 - DNA, 25 bp, Homo sapien
agttactctgtgaggctttgagaag

SEQ ID NO: 2253177 - DNA, 25 bp, Homo sapien
ggagctgggaatctaactccaggcc

SEQ ID NO: 2253178 - DNA, 25 bp, Homo sapien
ccttagtcaggtgggtactttctgg

SEQ ID NO: 2253179 - DNA, 25 bp, Homo sapien
gaatctaactccaggcccttagtca

SEQ ID NO: 2253180 - DNA, 25 bp, Homo sapien
tgacatcagcaggagaccggatgtt

SEQ ID NO: 2253181 - DNA, 25 bp, Homo sapien
gcaggagaccggatgttgccaaaga

SEQ ID NO: 2253182 - DNA, 25 bp, Homo sapien
gatgacatcagcaggagaccggatg

SEQ ID NO: 2253183 - DNA, 25 bp, Homo sapien
atcagcaggagaccggatgttgcca

SEQ ID NO: 2253184 - DNA, 25 bp, Homo sapien
gctctattatgtgcatcagctctat

SEQ ID NO: 2253185 - DNA, 25 bp, Homo sapien
cagtgtgtgcttagtgaatgcaaat

SEQ ID NO: 2253186 - DNA, 25 bp, Homo sapien
aatcgcagacaagcttccccttctc

SEQ ID NO: 2253187 - DNA, 25 bp, Homo sapien
tatcaatcagcctaagcccaatcag

SEQ ID NO: 2253188 - DNA, 25 bp, Homo sapien
gattgcagcaatcatcttgtatgtc

SEQ ID NO: 2253189 - DNA, 25 bp, Homo sapien
taatgtacgattttaataagggcat

SEQ ID NO: 2253190 - DNA, 25 bp, Homo sapien
tgggaaagttgaagaacatctaatc

SEQ ID NO: 2253191 - DNA, 25 bp, Homo sapien
tgataatagacataattggataatt

SEQ ID NO: 2253192 - DNA, 25 bp, Homo sapien
gaagaacatctaatcatttctgaat

SEQ ID NO: 2253193 - DNA, 25 bp, Homo sapien
cagtgttcgtgagaggagctgttcc

SEQ ID NO: 2253194 - DNA, 25 bp, Homo sapien
cacgttggatcctagagtgaagaca

SEQ ID NO: 2253195 - DNA, 25 bp, Homo sapien
catccaggagaccaacagtgttcgt

SEQ ID NO: 2253196 - DNA, 25 bp, Homo sapien
aatgttctgaacaaaggccctgaga

SEQ ID NO: 2253197 - DNA, 25 bp, Homo sapien
acgttgatcattattaggttattga

SEQ ID NO: 2253198 - DNA, 25 bp, Homo sapien
gttacgttgatcattattaggttat

SEQ ID NO: 2253199 - DNA, 25 bp, Homo sapien
tatgcttgccttgggtttagtttgc

SEQ ID NO: 2253200 - DNA, 25 bp, Homo sapien
gccttccttatgcttgccttgggtt

SEQ ID NO: 2253201 - DNA, 25 bp, Homo sapien
taagccacagtcatatttccctttg

SEQ ID NO: 2253202 - DNA, 25 bp, Homo sapien
aattcttaagccacagtcatatttc

SEQ ID NO: 2253203 - DNA, 25 bp, Homo sapien
tgtggtcctagttacatgaatggta

SEQ ID NO: 2253204 - DNA, 25 bp, Homo sapien
acatgaatggtagcttcaattttga

SEQ ID NO: 2253205 - DNA, 25 bp, Homo sapien
ttcccggagcctcgcagctctaagg

SEQ ID NO: 2253206 - DNA, 25 bp, Homo sapien
ggtatctcgcgcgcgcgaacggtcc

SEQ ID NO: 2253207 - DNA, 25 bp, Homo sapien
ccggagcctcgcagctctaaggaga

SEQ ID NO: 2253208 - DNA, 25 bp, Homo sapien
gcctcgcagctctaaggagagcaag

SEQ ID NO: 2253209 - DNA, 25 bp, Homo sapien
gagggacataaaccccgaagactgc

SEQ ID NO: 2253210 - DNA, 25 bp, Homo sapien
tgacagccgggtggaaagacatgat

SEQ ID NO: 2253211 - DNA, 25 bp, Homo sapien
taaagacgccggttgggatgacagc

SEQ ID NO: 2253212 - DNA, 25 bp, Homo sapien
aagactgccacgcttaaagacgccg

SEQ ID NO: 2253213 - DNA, 25 bp, Homo sapien
catttgaaattcgatcctgtgtcac

SEQ ID NO: 2253214 - DNA, 25 bp, Homo sapien
ggagctgaggtccaaccttccaacg

SEQ ID NO: 2253215 - DNA, 25 bp, Homo sapien
ccttccaacgggagactgttgcata

SEQ ID NO: 2253216 - DNA, 25 bp, Homo sapien
ctaatggtattaacaggagctgagg

SEQ ID NO: 2253217 - DNA, 25 bp, Homo sapien
tttcagacacgcacctctcagtcat

SEQ ID NO: 2253218 - DNA, 25 bp, Homo sapien
ccactattcaaagaacggggcgtct

SEQ ID NO: 2253219 - DNA, 25 bp, Homo sapien
gggcgtcttgttaaccatttctgaa

SEQ ID NO: 2253220 - DNA, 25 bp, Homo sapien
tctgaagtccctcgctgtacccggc

SEQ ID NO: 2253221 - DNA, 25 bp, Homo sapien
tgcagatgaactttccctgagttct

SEQ ID NO: 2253222 - DNA, 25 bp, Homo sapien
tcggagttgccctgcagatgaactt

SEQ ID NO: 2253223 - DNA, 25 bp, Homo sapien
gagtggctccaagctcctcggagtt

SEQ ID NO: 2253224 - DNA, 25 bp, Homo sapien
tcagagccctagctgagctagcgag

SEQ ID NO: 2253225 - DNA, 25 bp, Homo sapien
atgctcatttcaacaaccagatggc

SEQ ID NO: 2253226 - DNA, 25 bp, Homo sapien
agagcaacacaagtaggagagccca

SEQ ID NO: 2253227 - DNA, 25 bp, Homo sapien
caacagagcaacacaagtaggagag

SEQ ID NO: 2253228 - DNA, 25 bp, Homo sapien
caaccagatggcagatgtgacggga

SEQ ID NO: 2253229 - DNA, 25 bp, Homo sapien
tttgagcaaagcgaacaaaggttcc

SEQ ID NO: 2253230 - DNA, 25 bp, Homo sapien
gattgattcaaaatggatttatgga

SEQ ID NO: 2253231 - DNA, 25 bp, Homo sapien
caaaacctaaaagatactgattgat

SEQ ID NO: 2253232 - DNA, 25 bp, Homo sapien
gcaaaggctccaccgttttttgagc

SEQ ID NO: 2253233 - DNA, 25 bp, Homo sapien
tcttgaggcctcgccttgtgagggc

SEQ ID NO: 2253234 - DNA, 25 bp, Homo sapien
ggcctcgccttgtgagggccaagca

SEQ ID NO: 2253235 - DNA, 25 bp, Homo sapien
ttgaggcctcgccttgtgagggcca

SEQ ID NO: 2253236 - DNA, 25 bp, Homo sapien
tgaggcctcgccttgtgagggccaa

SEQ ID NO: 2253237 - DNA, 25 bp, Homo sapien
ctgggccgctcgctgggccgcagct

SEQ ID NO: 2253238 - DNA, 25 bp, Homo sapien
ctcgctgggccgcagctgctgcggc

SEQ ID NO: 2253239 - DNA, 25 bp, Homo sapien
tgggccgcagctgctgcggcaggcg

SEQ ID NO: 2253240 - DNA, 25 bp, Homo sapien
tgggccgctcgctgggccgcagctg

SEQ ID NO: 2253241 - DNA, 25 bp, Homo sapien
taaaattaggggttctgcaatgcca

SEQ ID NO: 2253242 - DNA, 25 bp, Homo sapien
tcaaggcagccattacaatttcagc

SEQ ID NO: 2253243 - DNA, 25 bp, Homo sapien
tctgccgtcactcttacaatttccc

SEQ ID NO: 2253244 - DNA, 25 bp, Homo sapien
agcttcccttgctaacatttgctgg

SEQ ID NO: 2253245 - DNA, 25 bp, Homo sapien
tatagcttctgtctggacctgcccc

SEQ ID NO: 2253246 - DNA, 25 bp, Homo sapien
gggtctgtcatgttggagagcagct

SEQ ID NO: 2253247 - DNA, 25 bp, Homo sapien
agctgagaatggtatagcttctgtc

SEQ ID NO: 2253248 - DNA, 25 bp, Homo sapien
gaatggtatagcttctgtctggacc

SEQ ID NO: 2253249 - DNA, 25 bp, Homo sapien
tggtttgcttgggtcccaagtatcg

SEQ ID NO: 2253250 - DNA, 25 bp, Homo sapien
cagtttcccatgaagtggctcctga

SEQ ID NO: 2253251 - DNA, 25 bp, Homo sapien
ttgcttgggtcccaagtatcgtctc

SEQ ID NO: 2253252 - DNA, 25 bp, Homo sapien
ttgcagtttcccatgaagtggctcc

SEQ ID NO: 2253253 - DNA, 25 bp, Homo sapien
ctgagccttgaaagccgtgcccttc

SEQ ID NO: 2253254 - DNA, 25 bp, Homo sapien
ttattgctgcaaagggaccacagca

SEQ ID NO: 2253255 - DNA, 25 bp, Homo sapien
tgtgagttggttaatatgccgcctg

SEQ ID NO: 2253256 - DNA, 25 bp, Homo sapien
cagcaaaatggtggcggcctatgct

SEQ ID NO: 2253257 - DNA, 25 bp, Homo sapien
ctggttggcaggcacctctgtatcc

SEQ ID NO: 2253258 - DNA, 25 bp, Homo sapien
gcacctctgtatcctaaacttgtcc

SEQ ID NO: 2253259 - DNA, 25 bp, Homo sapien
caggcacctctgtatcctaaacttg

SEQ ID NO: 2253260 - DNA, 25 bp, Homo sapien
tggcaggcacctctgtatcctaaac

SEQ ID NO: 2253261 - DNA, 25 bp, Homo sapien
caatgtagggttcttcagctgtttc

SEQ ID NO: 2253262 - DNA, 25 bp, Homo sapien
tcaaggaaaggccagccataagcct

SEQ ID NO: 2253263 - DNA, 25 bp, Homo sapien
caagaattctatcactggcaattaa

SEQ ID NO: 2253264 - DNA, 25 bp, Homo sapien
gccataagccttatagcaaatcaat

SEQ ID NO: 2253265 - DNA, 25 bp, Homo sapien
ccagaggcgttcaggatctacagaa

SEQ ID NO: 2253266 - DNA, 25 bp, Homo sapien
gagtggtgaagtacagcttgttaaa

SEQ ID NO: 2253267 - DNA, 25 bp, Homo sapien
tctgtaaggaccattgctatttgag

SEQ ID NO: 2253268 - DNA, 25 bp, Homo sapien
ggaccattgctatttgagtggtgaa

SEQ ID NO: 2253269 - DNA, 25 bp, Homo sapien
cagttgatttggtttaagcccatta

SEQ ID NO: 2253270 - DNA, 25 bp, Homo sapien
tttggcagtgccgtattccccagac

SEQ ID NO: 2253271 - DNA, 25 bp, Homo sapien
tagtgatcatttgcctatcactgct

SEQ ID NO: 2253272 - DNA, 25 bp, Homo sapien
cagactgacccacaagccacttggg

SEQ ID NO: 2253273 - DNA, 25 bp, Homo sapien
gaagccaacactctttgattgccta

SEQ ID NO: 2253274 - DNA, 25 bp, Homo sapien
tttgattgcctaaaattggctgtgc

SEQ ID NO: 2253275 - DNA, 25 bp, Homo sapien
tggatggcaatggagacctttgctg

SEQ ID NO: 2253276 - DNA, 25 bp, Homo sapien
aatggatggcaatggagacctttgc

SEQ ID NO: 2253277 - DNA, 25 bp, Homo sapien
ctgtctgcactgagctttggttggg

SEQ ID NO: 2253278 - DNA, 25 bp, Homo sapien
tgcactgagctttggttgggtattg

SEQ ID NO: 2253279 - DNA, 25 bp, Homo sapien
ttgggtattgggcagcagttcgacc

SEQ ID NO: 2253280 - DNA, 25 bp, Homo sapien
cccacaaggaaatagtctctgcctt

SEQ ID NO: 2253281 - DNA, 25 bp, Homo sapien
caaatgttgcctattgaattctcac

SEQ ID NO: 2253282 - DNA, 25 bp, Homo sapien
ctgaaaggttattttgtccaaggca

SEQ ID NO: 2253283 - DNA, 25 bp, Homo sapien
gtatctagtaaccaatcttcctgag

SEQ ID NO: 2253284 - DNA, 25 bp, Homo sapien
caccagcctgattagaaaggattat

SEQ ID NO: 2253285 - DNA, 25 bp, Homo sapien
cttttatatggggctctgtcctcat

SEQ ID NO: 2253286 - DNA, 25 bp, Homo sapien
ctatcaagactgtcaaatccaagca

SEQ ID NO: 2253287 - DNA, 25 bp, Homo sapien
caagactgtcaaatccaagcatcaa

SEQ ID NO: 2253288 - DNA, 25 bp, Homo sapien
tccatccaatgcagaccctatcaag

SEQ ID NO: 2253289 - DNA, 25 bp, Homo sapien
caatgcagaccctatcaagactgtc

SEQ ID NO: 2253290 - DNA, 25 bp, Homo sapien
tccttcaaggccctcataggcaggt

SEQ ID NO: 2253291 - DNA, 25 bp, Homo sapien
taggaataagcccttccttcaaggc

SEQ ID NO: 2253292 - DNA, 25 bp, Homo sapien
acacctggtacatataccatttggg

SEQ ID NO: 2253293 - DNA, 25 bp, Homo sapien
aggtgcacaaatgattccagcaagg

SEQ ID NO: 2253294 - DNA, 25 bp, Homo sapien
catgcaaactggtagcctgtgtgtg

SEQ ID NO: 2253295 - DNA, 25 bp, Homo sapien
tatgatcggagcagaatcacttcta

SEQ ID NO: 2253296 - DNA, 25 bp, Homo sapien
agcccagcggagcaaccactggaaa

SEQ ID NO: 2253297 - DNA, 25 bp, Homo sapien
caaactggtagcctgtgtgtgagca

SEQ ID NO: 2253298 - DNA, 25 bp, Homo sapien
ctggagctgtctgggaattctggtt

SEQ ID NO: 2253299 - DNA, 25 bp, Homo sapien
ttgtcttaattctgtcaaaggcttc

SEQ ID NO: 2253300 - DNA, 25 bp, Homo sapien
tcttaattctgtcaaaggcttctct

SEQ ID NO: 2253301 - DNA, 25 bp, Homo sapien
tctcccctggagctgtctgggaatt

SEQ ID NO: 2253302 - DNA, 25 bp, Homo sapien
cctttgtgcttaacttgttgaaata

SEQ ID NO: 2253303 - DNA, 25 bp, Homo sapien
cttcctttgtgcttaacttgttgaa

SEQ ID NO: 2253304 - DNA, 25 bp, Homo sapien
tacttcctttgtgcttaacttgttg

SEQ ID NO: 2253305 - DNA, 25 bp, Homo sapien
tcctttgtgcttaacttgttgaaat

SEQ ID NO: 2253306 - DNA, 25 bp, Homo sapien
tcttcttcacaatgggatccttttt

SEQ ID NO: 2253307 - DNA, 25 bp, Homo sapien
aaaatcagctgaagagaggtgctga

SEQ ID NO: 2253308 - DNA, 25 bp, Homo sapien
cagtcttctatttgggttggcaaaa

SEQ ID NO: 2253309 - DNA, 25 bp, Homo sapien
tgagtcaaagccgtccccatgttct

SEQ ID NO: 2253310 - DNA, 25 bp, Homo sapien
ttggctatgattgccaacctgatca

SEQ ID NO: 2253311 - DNA, 25 bp, Homo sapien
ctgatcactgtaggatgcctctgga

SEQ ID NO: 2253312 - DNA, 25 bp, Homo sapien
tgccagagatgttggttggctatga

SEQ ID NO: 2253313 - DNA, 25 bp, Homo sapien
tacacataactcgtaagctgaaatg

SEQ ID NO: 2253314 - DNA, 25 bp, Homo sapien
gacagaatcttcctgttggcccaca

SEQ ID NO: 2253315 - DNA, 25 bp, Homo sapien
tgttccgtgtaaagatgagccactg

SEQ ID NO: 2253316 - DNA, 25 bp, Homo sapien
ggcagtcttcggatgttccgtgtaa

SEQ ID NO: 2253317 - DNA, 25 bp, Homo sapien
ccaccggagaacacattggaaagga

SEQ ID NO: 2253318 - DNA, 25 bp, Homo sapien
gtaactttccctcagactatgcgcg

SEQ ID NO: 2253319 - DNA, 25 bp, Homo sapien
gacccaagctagatgtggacccaag

SEQ ID NO: 2253320 - DNA, 25 bp, Homo sapien
tacacttgacctcgccctttgaaga

SEQ ID NO: 2253321 - DNA, 25 bp, Homo sapien
gaaataccaataatcatcgccggga

SEQ ID NO: 2253322 - DNA, 25 bp, Homo sapien
gaagcgacttcgatctggctggaag

SEQ ID NO: 2253323 - DNA, 25 bp, Homo sapien
ggaagcagatgttaatggtgtacaa

SEQ ID NO: 2253324 - DNA, 25 bp, Homo sapien
gacaagctgggtaaggaagcgactt

SEQ ID NO: 2253325 - DNA, 25 bp, Homo sapien
taggcttgtagcacaccggggacaa

SEQ ID NO: 2253326 - DNA, 25 bp, Homo sapien
tgggatgggcagtgccgaggcaaga

SEQ ID NO: 2253327 - DNA, 25 bp, Homo sapien
cgacccgagaaataggtgcgtggta

SEQ ID NO: 2253328 - DNA, 25 bp, Homo sapien
tgccgaggcaagagaaagcgacccg

SEQ ID NO: 2253329 - DNA, 25 bp, Homo sapien
caagagaaagcgacccgagaaatag

SEQ ID NO: 2253330 - DNA, 25 bp, Homo sapien
tccgtttagaggaacagatgggctc

SEQ ID NO: 2253331 - DNA, 25 bp, Homo sapien
gagagaaagtccgtttagaggaaca

SEQ ID NO: 2253332 - DNA, 25 bp, Homo sapien
tggtaggagagaaagtccgtttaga

SEQ ID NO: 2253333 - DNA, 25 bp, Homo sapien
gaacagatgggctcaaaagaagttt

SEQ ID NO: 2253334 - DNA, 25 bp, Homo sapien
ttccgcctgtgttcgggtagccaca

SEQ ID NO: 2253335 - DNA, 25 bp, Homo sapien
tgttggcaaaccgactactacagcc

SEQ ID NO: 2253336 - DNA, 25 bp, Homo sapien
tacagccgtcgagttcacacttgaa

SEQ ID NO: 2253337 - DNA, 25 bp, Homo sapien
gagctggtcgcccatatgcgcgtga

SEQ ID NO: 2253338 - DNA, 25 bp, Homo sapien
tagaaacttcaacgctctcacccca

SEQ ID NO: 2253339 - DNA, 25 bp, Homo sapien
ggaaatagaaacttcaacgctctca

SEQ ID NO: 2253340 - DNA, 25 bp, Homo sapien
gaaacttcaacgctctcaccccatc

SEQ ID NO: 2253341 - DNA, 25 bp, Homo sapien
aatagaaacttcaacgctctcaccc

SEQ ID NO: 2253342 - DNA, 25 bp, Homo sapien
tgctctccacggaacaaggccacag

SEQ ID NO: 2253343 - DNA, 25 bp, Homo sapien
ctgctctccacggaacaaggccaca

SEQ ID NO: 2253344 - DNA, 25 bp, Homo sapien
acaaaagcaggcaacgattccagcg

SEQ ID NO: 2253345 - DNA, 25 bp, Homo sapien
aaatctaggtctggaggctcctgcc

SEQ ID NO: 2253346 - DNA, 25 bp, Homo sapien
gccgggaagccaatgtgacgatcaa

SEQ ID NO: 2253347 - DNA, 25 bp, Homo sapien
gaccgtagcggtttgcactctcctg

SEQ ID NO: 2253348 - DNA, 25 bp, Homo sapien
tctgagctctgccaaggcccatgtc

SEQ ID NO: 2253349 - DNA, 25 bp, Homo sapien
ctgcctgtgggcgtctctagctgag

SEQ ID NO: 2253350 - DNA, 25 bp, Homo sapien
catgtcatttagtggcccctccggg

SEQ ID NO: 2253351 - DNA, 25 bp, Homo sapien
cctgtgggcgtctctagctgagcct

SEQ ID NO: 2253352 - DNA, 25 bp, Homo sapien
atgcgccggcgcctcgttagggccg

SEQ ID NO: 2253353 - DNA, 25 bp, Homo sapien
aatgcgccggcgcctcgttagggcc

SEQ ID NO: 2253354 - DNA, 25 bp, Homo sapien
tgcgccggcgcctcgttagggccgg

SEQ ID NO: 2253355 - DNA, 25 bp, Homo sapien
tctaaaagcaggatgaataacgtag

SEQ ID NO: 2253356 - DNA, 25 bp, Homo sapien
ccacctcagatcagggcaagggtca

SEQ ID NO: 2253357 - DNA, 25 bp, Homo sapien
gttgaaggcgggatttttcttcatg

SEQ ID NO: 2253358 - DNA, 25 bp, Homo sapien
ctcagatcagggcaagggtcatttc

SEQ ID NO: 2253359 - DNA, 25 bp, Homo sapien
tctgctgataaaacctgcttcactc

SEQ ID NO: 2253360 - DNA, 25 bp, Homo sapien
gatgtctgctgataaaacctgcttc

SEQ ID NO: 2253361 - DNA, 25 bp, Homo sapien
cggatgtctgctgataaaacctgct

SEQ ID NO: 2253362 - DNA, 25 bp, Homo sapien
gctgataaaacctgcttcactctgt

SEQ ID NO: 2253363 - DNA, 25 bp, Homo sapien
ctttagccctggatggctcgagagg

SEQ ID NO: 2253364 - DNA, 25 bp, Homo sapien
ttatagccctcaagggcccataggg

SEQ ID NO: 2253365 - DNA, 25 bp, Homo sapien
taagcagagggaccacagactctgg

SEQ ID NO: 2253366 - DNA, 25 bp, Homo sapien
ggattccacctgtttatagccctca

SEQ ID NO: 2253367 - DNA, 25 bp, Homo sapien
gggctccagatctaggcactaagga

SEQ ID NO: 2253368 - DNA, 25 bp, Homo sapien
gttgctgccagaagccataatgtgg

SEQ ID NO: 2253369 - DNA, 25 bp, Homo sapien
tgggcaaaagaaaggcggcctctgc

SEQ ID NO: 2253370 - DNA, 25 bp, Homo sapien
taatgtggcccagagatatctttcc

SEQ ID NO: 2253371 - DNA, 25 bp, Homo sapien
tagaactagtacagcatttagcagc

SEQ ID NO: 2253372 - DNA, 25 bp, Homo sapien
ttgaagctaatttacattttagaac

SEQ ID NO: 2253373 - DNA, 25 bp, Homo sapien
aaatgtgtgctccaaaatgtcaggc

SEQ ID NO: 2253374 - DNA, 25 bp, Homo sapien
ggctctccaaattgattctccttcc

SEQ ID NO: 2253375 - DNA, 25 bp, Homo sapien
ttccaacctggggagagagctctgg

SEQ ID NO: 2253376 - DNA, 25 bp, Homo sapien
ggagagagctctggatgtggagaga

SEQ ID NO: 2253377 - DNA, 25 bp, Homo sapien
tggggagagagctctggatgtggag

SEQ ID NO: 2253378 - DNA, 25 bp, Homo sapien
cttccaacctggggagagagctctg

SEQ ID NO: 2253379 - DNA, 25 bp, Homo sapien
taaccaagattaggtgaccaatcac

SEQ ID NO: 2253380 - DNA, 25 bp, Homo sapien
ggtgaccaatcacaatacctagttt

SEQ ID NO: 2253381 - DNA, 25 bp, Homo sapien
gcaccattataataaccaagattag

SEQ ID NO: 2253382 - DNA, 25 bp, Homo sapien
tagaagcctacaccgtttgtcctcc

SEQ ID NO: 2253383 - DNA, 25 bp, Homo sapien
tcagtctgcaagacacttcaaaacc

SEQ ID NO: 2253384 - DNA, 25 bp, Homo sapien
gtgaaaagtatgtctgacagcaata

SEQ ID NO: 2253385 - DNA, 25 bp, Homo sapien
gtctgcaagacacttcaaaaccaat

SEQ ID NO: 2253386 - DNA, 25 bp, Homo sapien
aaagtatgtctgacagcaatagaat

SEQ ID NO: 2253387 - DNA, 25 bp, Homo sapien
tccagatcagctcagtcaatcctgg

SEQ ID NO: 2253388 - DNA, 25 bp, Homo sapien
catccagatcagctcagtcaatcct

SEQ ID NO: 2253389 - DNA, 25 bp, Homo sapien
gatcagctcagtcaatcctggcgat

SEQ ID NO: 2253390 - DNA, 25 bp, Homo sapien
cagatcagctcagtcaatcctggcg

SEQ ID NO: 2253391 - DNA, 25 bp, Homo sapien
tttcaggggtcccaaccaagcatgt

SEQ ID NO: 2253392 - DNA, 25 bp, Homo sapien
tctcccgcactgcacagtcctgtga

SEQ ID NO: 2253393 - DNA, 25 bp, Homo sapien
caagcatgtttcttctcccgcactg

SEQ ID NO: 2253394 - DNA, 25 bp, Homo sapien
tcaggggtcccaaccaagcatgttt

SEQ ID NO: 2253395 - DNA, 25 bp, Homo sapien
ttgtgtcttctagtagacccttaat

SEQ ID NO: 2253396 - DNA, 25 bp, Homo sapien
tgtgacgaacaaggtcatgttgctc

SEQ ID NO: 2253397 - DNA, 25 bp, Homo sapien
gaagctttgtgtcttctagtagacc

SEQ ID NO: 2253398 - DNA, 25 bp, Homo sapien
gacccttaatataattcaatatgtg

SEQ ID NO: 2253399 - DNA, 25 bp, Homo sapien
tgctatcagcaagctgaatcagcat

SEQ ID NO: 2253400 - DNA, 25 bp, Homo sapien
gtgttcagtggcactctgaaatact

SEQ ID NO: 2253401 - DNA, 25 bp, Homo sapien
tgttcagtggcactctgaaatactc

SEQ ID NO: 2253402 - DNA, 25 bp, Homo sapien
tgtgttcagtggcactctgaaatac

SEQ ID NO: 2253403 - DNA, 25 bp, Homo sapien
agtgactggtgccagtttctttgtg

SEQ ID NO: 2253404 - DNA, 25 bp, Homo sapien
caaatgcattaggtgtgcccaggta

SEQ ID NO: 2253405 - DNA, 25 bp, Homo sapien
cagaacacatttctcccgagcaaat

SEQ ID NO: 2253406 - DNA, 25 bp, Homo sapien
tgcccaggtaatttgaagtgctcat

SEQ ID NO: 2253407 - DNA, 25 bp, Homo sapien
catttctcccgagcaaatgcaaatg

SEQ ID NO: 2253408 - DNA, 25 bp, Homo sapien
gaccagggacaatgctaatctccgt

SEQ ID NO: 2253409 - DNA, 25 bp, Homo sapien
gtgtcatccttgaccagggacaatg

SEQ ID NO: 2253410 - DNA, 25 bp, Homo sapien
tgtgtgtcatccttgaccagggaca

SEQ ID NO: 2253411 - DNA, 25 bp, Homo sapien
tatatataatgctccatgaatttgt

SEQ ID NO: 2253412 - DNA, 25 bp, Homo sapien
aaaggatatacagaaggtgtactca

SEQ ID NO: 2253413 - DNA, 25 bp, Homo sapien
ggtgtactcatctctgacagggatg

SEQ ID NO: 2253414 - DNA, 25 bp, Homo sapien
ttcatcccatcaaaggatatacaga

SEQ ID NO: 2253415 - DNA, 25 bp, Homo sapien
ctaggtggtagtcaaagacgttgga

SEQ ID NO: 2253416 - DNA, 25 bp, Homo sapien
cccgctttcttacaggacatccata

SEQ ID NO: 2253417 - DNA, 25 bp, Homo sapien
tgctccccgctttcttacaggacat

SEQ ID NO: 2253418 - DNA, 25 bp, Homo sapien
gctttcttacaggacatccataagg

SEQ ID NO: 2253419 - DNA, 25 bp, Homo sapien
catccataaggcccgaaacccctct

SEQ ID NO: 2253420 - DNA, 25 bp, Homo sapien
tctggaggctcaagacctgttgatc

SEQ ID NO: 2253421 - DNA, 25 bp, Homo sapien
gacctgttgatctctgcaccatgtg

SEQ ID NO: 2253422 - DNA, 25 bp, Homo sapien
tttgcacctgcaggaaccagcatgg

SEQ ID NO: 2253423 - DNA, 25 bp, Homo sapien
cattagcagtagttctccctttgca

SEQ ID NO: 2253424 - DNA, 25 bp, Homo sapien
tgtgccttttgaaatctccggcaca

SEQ ID NO: 2253425 - DNA, 25 bp, Homo sapien
ccatccgcagtggttaaatgttttg

SEQ ID NO: 2253426 - DNA, 25 bp, Homo sapien
gccttttgaaatctccggcacagaa

SEQ ID NO: 2253427 - DNA, 25 bp, Homo sapien
ttcaccatccgcagtggttaaatgt

SEQ ID NO: 2253428 - DNA, 25 bp, Homo sapien
cttgtactacttcatccagggattc

SEQ ID NO: 2253429 - DNA, 25 bp, Homo sapien
tgccatgggaaaggaacggcaaatt

SEQ ID NO: 2253430 - DNA, 25 bp, Homo sapien
gctgtgatggattttgcacaaaacc

SEQ ID NO: 2253431 - DNA, 25 bp, Homo sapien
aactggttgatggataaagataggc

SEQ ID NO: 2253432 - DNA, 25 bp, Homo sapien
cacaaaacctttgaattgccatggg

SEQ ID NO: 2253433 - DNA, 25 bp, Homo sapien
ctcacaggtattgtaagtgtgaatc

SEQ ID NO: 2253434 - DNA, 25 bp, Homo sapien
ttagctcacaggtattgtaagtgtg

SEQ ID NO: 2253435 - DNA, 25 bp, Homo sapien
caggtattgtaagtgtgaatcccat

SEQ ID NO: 2253436 - DNA, 25 bp, Homo sapien
tgtaagtgtgaatcccattttcacc

SEQ ID NO: 2253437 - DNA, 25 bp, Homo sapien
agatgatcggttggctacatttcca

SEQ ID NO: 2253438 - DNA, 25 bp, Homo sapien
cccagctggaggttgcctttgtgta

SEQ ID NO: 2253439 - DNA, 25 bp, Homo sapien
taaaaggtgcatgacttaggtgtga

SEQ ID NO: 2253440 - DNA, 25 bp, Homo sapien
cagaagagagtaaaaggtgcatgac

SEQ ID NO: 2253441 - DNA, 25 bp, Homo sapien
atgttgaagcgtgcaaatgttccac

SEQ ID NO: 2253442 - DNA, 25 bp, Homo sapien
aaatgttccacagccacatagttta

SEQ ID NO: 2253443 - DNA, 25 bp, Homo sapien
cctcttgcaaaatgttgaagcgtgc

SEQ ID NO: 2253444 - DNA, 25 bp, Homo sapien
gttccacagccacatagtttatctt

SEQ ID NO: 2253445 - DNA, 25 bp, Homo sapien
cataacagaacaaggccattgagca

SEQ ID NO: 2253446 - DNA, 25 bp, Homo sapien
tggcttcctttgctgccgaagtaca

SEQ ID NO: 2253447 - DNA, 25 bp, Homo sapien
tgcagcataacagaacaaggccatt

SEQ ID NO: 2253448 - DNA, 25 bp, Homo sapien
ttgctgccgaagtacagaccctctg

SEQ ID NO: 2253449 - DNA, 25 bp, Homo sapien
catgtgctagacgtggcagactccc

SEQ ID NO: 2253450 - DNA, 25 bp, Homo sapien
cagctcacaggtcttgggtattacg

SEQ ID NO: 2253451 - DNA, 25 bp, Homo sapien
caaattcaagctgatgtccccactt

SEQ ID NO: 2253452 - DNA, 25 bp, Homo sapien
ttctgaacacccctagtgacctgca

SEQ ID NO: 2253453 - DNA, 25 bp, Homo sapien
aagccacactctttgattccccaat

SEQ ID NO: 2253454 - DNA, 25 bp, Homo sapien
ccaagccacactctttgattcccca

SEQ ID NO: 2253455 - DNA, 25 bp, Homo sapien
cttgtccaagccacactctttgatt

SEQ ID NO: 2253456 - DNA, 25 bp, Homo sapien
tgtccaagccacactctttgattcc

SEQ ID NO: 2253457 - DNA, 25 bp, Homo sapien
ggccttttgcgtgacccaatgccaa

SEQ ID NO: 2253458 - DNA, 25 bp, Homo sapien
cagaactttgatggattcatggccg

SEQ ID NO: 2253459 - DNA, 25 bp, Homo sapien
caatgcgcacaggttagggacaggc

SEQ ID NO: 2253460 - DNA, 25 bp, Homo sapien
cgtatgacggccttttgcgtgaccc

SEQ ID NO: 2253461 - DNA, 25 bp, Homo sapien
aaaagcaaatgcaggtttcctttct

SEQ ID NO: 2253462 - DNA, 25 bp, Homo sapien
gagtatgtgtacatgaagggatcaa

SEQ ID NO: 2253463 - DNA, 25 bp, Homo sapien
agggatcaaagtggccatgaaaaca

SEQ ID NO: 2253464 - DNA, 25 bp, Homo sapien
acatgaagggatcaaagtggccatg

SEQ ID NO: 2253465 - DNA, 25 bp, Homo sapien
tctgtgctccatgtgtaagtatgtt

SEQ ID NO: 2253466 - DNA, 25 bp, Homo sapien
tgtaagtatgttgggaaatatccag

SEQ ID NO: 2253467 - DNA, 25 bp, Homo sapien
gattgtacccatgttgtcacatctg

SEQ ID NO: 2253468 - DNA, 25 bp, Homo sapien
gctctgcaaattaggtctgtgctcc

SEQ ID NO: 2253469 - DNA, 25 bp, Homo sapien
ctatgacacatagactgtgtccgca

SEQ ID NO: 2253470 - DNA, 25 bp, Homo sapien
gtttccatgtgttttggatttcctc

SEQ ID NO: 2253471 - DNA, 25 bp, Homo sapien
gggagcgttctctgcatctatgaca

SEQ ID NO: 2253472 - DNA, 25 bp, Homo sapien
catgtttattgcatttgggagtttg

SEQ ID NO: 2253473 - DNA, 25 bp, Homo sapien
gccagccaggtagcagggttgacat

SEQ ID NO: 2253474 - DNA, 25 bp, Homo sapien
tctgcaccagattggatatcaggga

SEQ ID NO: 2253475 - DNA, 25 bp, Homo sapien
tttcacacagatggaggaccatccc

SEQ ID NO: 2253476 - DNA, 25 bp, Homo sapien
tagcagtcataatgcctaccacact

SEQ ID NO: 2253477 - DNA, 25 bp, Homo sapien
aatcttagtgcattagttatacaac

SEQ ID NO: 2253478 - DNA, 25 bp, Homo sapien
tagttatacaacatagtacagcaca

SEQ ID NO: 2253479 - DNA, 25 bp, Homo sapien
tgacataccatgagccacattgttt

SEQ ID NO: 2253480 - DNA, 25 bp, Homo sapien
gacataccatgagccacattgttta

SEQ ID NO: 2253481 - DNA, 25 bp, Homo sapien
taatcagaattgtctgagaatgctt

SEQ ID NO: 2253482 - DNA, 25 bp, Homo sapien
ttccagttggttccggcacagttgt

SEQ ID NO: 2253483 - DNA, 25 bp, Homo sapien
tcagaattgtctgagaatgcttgtt

SEQ ID NO: 2253484 - DNA, 25 bp, Homo sapien
gttccggcacagttgttcttcctcc

SEQ ID NO: 2253485 - DNA, 25 bp, Homo sapien
acatgaagaggaacggtcaggagca

SEQ ID NO: 2253486 - DNA, 25 bp, Homo sapien
caataaaggcttactctataaccca

SEQ ID NO: 2253487 - DNA, 25 bp, Homo sapien
tccattgggagctcaagaattatca

SEQ ID NO: 2253488 - DNA, 25 bp, Homo sapien
ggagcaaaggataggcaataggcca

SEQ ID NO: 2253489 - DNA, 25 bp, Homo sapien
ctctccagatggactgtgcaactca

SEQ ID NO: 2253490 - DNA, 25 bp, Homo sapien
gaagggcagccgattttcatcatct

SEQ ID NO: 2253491 - DNA, 25 bp, Homo sapien
tgcaactcatttgggaagaagggca

SEQ ID NO: 2253492 - DNA, 25 bp, Homo sapien
caaaagtgtgagtgccctctccaga

SEQ ID NO: 2253493 - DNA, 25 bp, Homo sapien
caaatggtggacaggaaatttagca

SEQ ID NO: 2253494 - DNA, 25 bp, Homo sapien
ttactgttggttagaactaccagcc

SEQ ID NO: 2253495 - DNA, 25 bp, Homo sapien
ccttgcaggcaagctggaatatggg

SEQ ID NO: 2253496 - DNA, 25 bp, Homo sapien
tagcaatgtctcttgctgaacaatc

SEQ ID NO: 2253497 - DNA, 25 bp, Homo sapien
cattacggcacaggacattatgtga

SEQ ID NO: 2253498 - DNA, 25 bp, Homo sapien
gattggtggaacagatcattacggc

SEQ ID NO: 2253499 - DNA, 25 bp, Homo sapien
gtgtcacactacgtggagcaaagct

SEQ ID NO: 2253500 - DNA, 25 bp, Homo sapien
cagtgatcttacatttaagctgagg

SEQ ID NO: 2253501 - DNA, 25 bp, Homo sapien
ataaagagtaaactgccctgtagaa

SEQ ID NO: 2253502 - DNA, 25 bp, Homo sapien
ttctagaatgaagaggttgtcaaaa

SEQ ID NO: 2253503 - DNA, 25 bp, Homo sapien
aaataaagagtaaactgccctgtag

SEQ ID NO: 2253504 - DNA, 25 bp, Homo sapien
aataaagagtaaactgccctgtaga

SEQ ID NO: 2253505 - DNA, 25 bp, Homo sapien
tatgatgctttccactggaggcaag

SEQ ID NO: 2253506 - DNA, 25 bp, Homo sapien
tggatatctgtagagattatgatgc

SEQ ID NO: 2253507 - DNA, 25 bp, Homo sapien
tagagattatgatgctttccactgg

SEQ ID NO: 2253508 - DNA, 25 bp, Homo sapien
ggatagagttggatatctgtagaga

SEQ ID NO: 2253509 - DNA, 25 bp, Homo sapien
ggacagtgtggataaggtggaagat

SEQ ID NO: 2253510 - DNA, 25 bp, Homo sapien
ctctggacagtgtggataaggtgga

SEQ ID NO: 2253511 - DNA, 25 bp, Homo sapien
gacagtgtggataaggtggaagatg

SEQ ID NO: 2253512 - DNA, 25 bp, Homo sapien
ctggacagtgtggataaggtggaag

SEQ ID NO: 2253513 - DNA, 25 bp, Homo sapien
ctattagacggtctgtccagagctt

SEQ ID NO: 2253514 - DNA, 25 bp, Homo sapien
tagaaatctattagacggtctgtcc

SEQ ID NO: 2253515 - DNA, 25 bp, Homo sapien
gaaatctattagacggtctgtccag

SEQ ID NO: 2253516 - DNA, 25 bp, Homo sapien
cagctctagaaatctattagacggt

SEQ ID NO: 2253517 - DNA, 25 bp, Homo sapien
aattcaaaagggagttctttggcat

SEQ ID NO: 2253518 - DNA, 25 bp, Homo sapien
ggagttctttggcatattcttctat

SEQ ID NO: 2253519 - DNA, 25 bp, Homo sapien
caaaagggagttctttggcatattc

SEQ ID NO: 2253520 - DNA, 25 bp, Homo sapien
cagtcagccatggcctcatgaaagc

SEQ ID NO: 2253521 - DNA, 25 bp, Homo sapien
gccattggaagtgctatctcagatc

SEQ ID NO: 2253522 - DNA, 25 bp, Homo sapien
ggaagtgctatctcagatccattca

SEQ ID NO: 2253523 - DNA, 25 bp, Homo sapien
cattggaagtgctatctcagatcca

SEQ ID NO: 2253524 - DNA, 25 bp, Homo sapien
ttggaagtgctatctcagatccatt

SEQ ID NO: 2253525 - DNA, 25 bp, Homo sapien
taataaaggccctcaagagtttcca

SEQ ID NO: 2253526 - DNA, 25 bp, Homo sapien
tggataaaaccagcccactctaggc

SEQ ID NO: 2253527 - DNA, 25 bp, Homo sapien
aatgctgtgatctccgactggctaa

SEQ ID NO: 2253528 - DNA, 25 bp, Homo sapien
tcttctgagctccaaacttagcatg

SEQ ID NO: 2253529 - DNA, 25 bp, Homo sapien
aagcaactggcctttcaggtgcata

SEQ ID NO: 2253530 - DNA, 25 bp, Homo sapien
acctggatatggcaaaccccatcct

SEQ ID NO: 2253531 - DNA, 25 bp, Homo sapien
aactggcctttcaggtgcatagttt

SEQ ID NO: 2253532 - DNA, 25 bp, Homo sapien
gaatgcacctggagaaagcggagac

SEQ ID NO: 2253533 - DNA, 25 bp, Homo sapien
cagcaaggggcacagcaaattctgg

SEQ ID NO: 2253534 - DNA, 25 bp, Homo sapien
gtgttcacggtagttcctcaacaca

SEQ ID NO: 2253535 - DNA, 25 bp, Homo sapien
tctggtgccatgcagatagcttcat

SEQ ID NO: 2253536 - DNA, 25 bp, Homo sapien
acggtagttcctcaacacaggcagc

SEQ ID NO: 2253537 - DNA, 25 bp, Homo sapien
ggcggtgctgattgtgttaagcata

SEQ ID NO: 2253538 - DNA, 25 bp, Homo sapien
tccagacagctccaagtatgttcat

SEQ ID NO: 2253539 - DNA, 25 bp, Homo sapien
ttcattaggcgctgattaggtttca

SEQ ID NO: 2253540 - DNA, 25 bp, Homo sapien
ggccggctcctactgggactaattc

SEQ ID NO: 2253541 - DNA, 25 bp, Homo sapien
cagtgtgagatgcgcagcctggaac

SEQ ID NO: 2253542 - DNA, 25 bp, Homo sapien
acttgtggtagacttcagttctgtg

SEQ ID NO: 2253543 - DNA, 25 bp, Homo sapien
gcctggaactgggtgatgcctactt

SEQ ID NO: 2253544 - DNA, 25 bp, Homo sapien
catggccagcaaaccattctggggc

SEQ ID NO: 2253545 - DNA, 25 bp, Homo sapien
gggttataagtttgccctctccatc

SEQ ID NO: 2253546 - DNA, 25 bp, Homo sapien
tacagggttataagtttgccctctc

SEQ ID NO: 2253547 - DNA, 25 bp, Homo sapien
taagattcatattggatcttttctt

SEQ ID NO: 2253548 - DNA, 25 bp, Homo sapien
tgtgaatacagggttataagtttgc

SEQ ID NO: 2253549 - DNA, 25 bp, Homo sapien
gacagagtaaaaactggccacaagg

SEQ ID NO: 2253550 - DNA, 25 bp, Homo sapien
ttgacagagtaaaaactggccacaa

SEQ ID NO: 2253551 - DNA, 25 bp, Homo sapien
cagagtaaaaactggccacaaggtt

SEQ ID NO: 2253552 - DNA, 25 bp, Homo sapien
gctaaatcctcaattgacagagtaa

SEQ ID NO: 2253553 - DNA, 25 bp, Homo sapien
gagcaatttcctgttgatcaccaac

SEQ ID NO: 2253554 - DNA, 25 bp, Homo sapien
ctgtcatttgagagtggagcaattt

SEQ ID NO: 2253555 - DNA, 25 bp, Homo sapien
gagtggagcaatttcctgttgatca

SEQ ID NO: 2253556 - DNA, 25 bp, Homo sapien
catttgagagtggagcaatttcctg

SEQ ID NO: 2253557 - DNA, 25 bp, Homo sapien
ggtggatgctgacgcttctttagaa

SEQ ID NO: 2253558 - DNA, 25 bp, Homo sapien
gctgcccgggtaattggctatgaaa

SEQ ID NO: 2253559 - DNA, 25 bp, Homo sapien
tagccacctggttgattagtgaccc

SEQ ID NO: 2253560 - DNA, 25 bp, Homo sapien
ttgtacttaattgcccacgttctgg

SEQ ID NO: 2253561 - DNA, 25 bp, Homo sapien
tcaatcgggggccttggaatttcaa

SEQ ID NO: 2253562 - DNA, 25 bp, Homo sapien
tacaaccaccgaagtttaagtgtga

SEQ ID NO: 2253563 - DNA, 25 bp, Homo sapien
gtatgattgttaagacactggcacc

SEQ ID NO: 2253564 - DNA, 25 bp, Homo sapien
gacactggcaccaagttcaatcggg

SEQ ID NO: 2253565 - DNA, 25 bp, Homo sapien
tgtacccacctttgggtcctcatgg

SEQ ID NO: 2253566 - DNA, 25 bp, Homo sapien
cttgtacccacctttgggtcctcat

SEQ ID NO: 2253567 - DNA, 25 bp, Homo sapien
acccacctttgggtcctcatggcat

SEQ ID NO: 2253568 - DNA, 25 bp, Homo sapien
gtacccacctttgggtcctcatggc

SEQ ID NO: 2253569 - DNA, 25 bp, Homo sapien
gactaatgaagttattctgtcttaa

SEQ ID NO: 2253570 - DNA, 25 bp, Homo sapien
ctaatgaagttattctgtcttaaaa

SEQ ID NO: 2253571 - DNA, 25 bp, Homo sapien
aatgaagttattctgtcttaaaatc

SEQ ID NO: 2253572 - DNA, 25 bp, Homo sapien
tgaagttattctgtcttaaaatctt

SEQ ID NO: 2253573 - DNA, 25 bp, Homo sapien
tctagtttttcatgtctacttccat

SEQ ID NO: 2253574 - DNA, 25 bp, Homo sapien
tagtttttcatgtctacttccattt

SEQ ID NO: 2253575 - DNA, 25 bp, Homo sapien
agtttttcatgtctacttccatttt

SEQ ID NO: 2253576 - DNA, 25 bp, Homo sapien
gtttttcatgtctacttccattttc

SEQ ID NO: 2253577 - DNA, 25 bp, Homo sapien
ctgggcaatccatatgctccccaaa

SEQ ID NO: 2253578 - DNA, 25 bp, Homo sapien
gctgggcaatccatatgctccccaa

SEQ ID NO: 2253579 - DNA, 25 bp, Homo sapien
acagtgctgggcaatccatatgctc

SEQ ID NO: 2253580 - DNA, 25 bp, Homo sapien
gcttcttaagtttggtcacatgcca

SEQ ID NO: 2253581 - DNA, 25 bp, Homo sapien
gtgctaagtgacatgctttggccat

SEQ ID NO: 2253582 - DNA, 25 bp, Homo sapien
taaagctgttgttgtccagtcctgt

SEQ ID NO: 2253583 - DNA, 25 bp, Homo sapien
ccatgtagataagccagattggcag

SEQ ID NO: 2253584 - DNA, 25 bp, Homo sapien
gcttctgcactaggaatatctggct

SEQ ID NO: 2253585 - DNA, 25 bp, Homo sapien
cagtgacacaagtcgcatgcaggca

SEQ ID NO: 2253586 - DNA, 25 bp, Homo sapien
gcttgcttggtaaatgacagtgaca

SEQ ID NO: 2253587 - DNA, 25 bp, Homo sapien
tatctatatggctccctggaaccag

SEQ ID NO: 2253588 - DNA, 25 bp, Homo sapien
taaatctacgtgtgcttgtggctac

SEQ ID NO: 2253589 - DNA, 25 bp, Homo sapien
gactaccctgagaccaatatgctgg

SEQ ID NO: 2253590 - DNA, 25 bp, Homo sapien
tactttgacccatacagcatgacag

SEQ ID NO: 2253591 - DNA, 25 bp, Homo sapien
tctcattggtaggtgggatcctctc

SEQ ID NO: 2253592 - DNA, 25 bp, Homo sapien
gatgacatgaccttcctcttttacc

SEQ ID NO: 2253593 - DNA, 25 bp, Homo sapien
ctcctgtatgatgacatgaccttcc

SEQ ID NO: 2253594 - DNA, 25 bp, Homo sapien
acacttgtaattccacccctcatct

SEQ ID NO: 2253595 - DNA, 25 bp, Homo sapien
tgtatgatgacatgaccttcctctt

SEQ ID NO: 2253596 - DNA, 25 bp, Homo sapien
ggtgctcctaaagccctcgcgtttc

SEQ ID NO: 2253597 - DNA, 25 bp, Homo sapien
tcctaaagccctcgcgtttcaccac

SEQ ID NO: 2253598 - DNA, 25 bp, Homo sapien
ccggtgctcctaaagccctcgcgtt

SEQ ID NO: 2253599 - DNA, 25 bp, Homo sapien
gctcctaaagccctcgcgtttcacc

SEQ ID NO: 2253600 - DNA, 25 bp, Homo sapien
caaagaaaagtgcaagtcgcccttg

SEQ ID NO: 2253601 - DNA, 25 bp, Homo sapien
tgacttcccctttgtataactgcat

SEQ ID NO: 2253602 - DNA, 25 bp, Homo sapien
tctttgctgtgcctgataggtggcc

SEQ ID NO: 2253603 - DNA, 25 bp, Homo sapien
ggcttttggagctagagataaacac

SEQ ID NO: 2253604 - DNA, 25 bp, Homo sapien
agctattactttggcggattctatg

SEQ ID NO: 2253605 - DNA, 25 bp, Homo sapien
ctgtgatgaaggcttagtgctaaaa

SEQ ID NO: 2253606 - DNA, 25 bp, Homo sapien
cagttttgagtacataccgtatggg

SEQ ID NO: 2253607 - DNA, 25 bp, Homo sapien
cagaggtttgacgtagctgtgatga

SEQ ID NO: 2253608 - DNA, 25 bp, Homo sapien
gggcctccttgacaattcatgacta

SEQ ID NO: 2253609 - DNA, 25 bp, Homo sapien
aaaaatccagccattgctgaagatg

SEQ ID NO: 2253610 - DNA, 25 bp, Homo sapien
catgactatgtgaatcctgtgtatc

SEQ ID NO: 2253611 - DNA, 25 bp, Homo sapien
gaacagactgttatatacggatgaa

SEQ ID NO: 2253612 - DNA, 25 bp, Homo sapien
ctttggcatcaggttttgggtgtac

SEQ ID NO: 2253613 - DNA, 25 bp, Homo sapien
atggctccatcctctcgacctttgg

SEQ ID NO: 2253614 - DNA, 25 bp, Homo sapien
gggaacatcctcaggtacagcaagg

SEQ ID NO: 2253615 - DNA, 25 bp, Homo sapien
ctgggaggtctgagaacaggccact

SEQ ID NO: 2253616 - DNA, 25 bp, Homo sapien
tggcagcccccagactatgactgat

SEQ ID NO: 2253617 - DNA, 25 bp, Homo sapien
gactgatcatgacaaggatctgatc

SEQ ID NO: 2253618 - DNA, 25 bp, Homo sapien
cagactatgactgatcatgacaagg

SEQ ID NO: 2253619 - DNA, 25 bp, Homo sapien
tcatgacaaggatctgatcatttcc

SEQ ID NO: 2253620 - DNA, 25 bp, Homo sapien
aaaagctggtaatgaagacaggagc

SEQ ID NO: 2253621 - DNA, 25 bp, Homo sapien
cacacatcatatgttggtggcactg

SEQ ID NO: 2253622 - DNA, 25 bp, Homo sapien
cacagaggctgatattaaaagctgg

SEQ ID NO: 2253623 - DNA, 25 bp, Homo sapien
ttggacacttaaggagaagacacct

SEQ ID NO: 2253624 - DNA, 25 bp, Homo sapien
cttatttgtgactccatgaaatttt

SEQ ID NO: 2253625 - DNA, 25 bp, Homo sapien
tagaaccattatggcaactaagttc

SEQ ID NO: 2253626 - DNA, 25 bp, Homo sapien
gaatggagccacatacccaaacatt

SEQ ID NO: 2253627 - DNA, 25 bp, Homo sapien
ggctcctttatagaaccattatggc

SEQ ID NO: 2253628 - DNA, 25 bp, Homo sapien
aggaatgcagagccttgggacttgg

SEQ ID NO: 2253629 - DNA, 25 bp, Homo sapien
gaatgcagagccttgggacttgggc

SEQ ID NO: 2253630 - DNA, 25 bp, Homo sapien
atgcagagccttgggacttgggcct

SEQ ID NO: 2253631 - DNA, 25 bp, Homo sapien
gcagagccttgggacttgggcctgg

SEQ ID NO: 2253632 - DNA, 25 bp, Homo sapien
tgattcccccaccatcgattttaaa

SEQ ID NO: 2253633 - DNA, 25 bp, Homo sapien
ccccaccatcgattttaaagccctg

SEQ ID NO: 2253634 - DNA, 25 bp, Homo sapien
tttgattcccccaccatcgatttta

SEQ ID NO: 2253635 - DNA, 25 bp, Homo sapien
caccatcgattttaaagccctggcc

SEQ ID NO: 2253636 - DNA, 25 bp, Homo sapien
tctttcttatccactgatggtcctt

SEQ ID NO: 2253637 - DNA, 25 bp, Homo sapien
gttttcctctgtcctacaacagctg

SEQ ID NO: 2253638 - DNA, 25 bp, Homo sapien
ttttcctctgtcctacaacagctgc

SEQ ID NO: 2253639 - DNA, 25 bp, Homo sapien
gatggtcctttttctcgtcttgttg

SEQ ID NO: 2253640 - DNA, 25 bp, Homo sapien
aaaattgttccatcatcatcaacaa

SEQ ID NO: 2253641 - DNA, 25 bp, Homo sapien
gaaaaattgttccatcatcatcaac

SEQ ID NO: 2253642 - DNA, 25 bp, Homo sapien
aaaaattgttccatcatcatcaaca

SEQ ID NO: 2253643 - DNA, 25 bp, Homo sapien
agaaaaattgttccatcatcatcaa

SEQ ID NO: 2253644 - DNA, 25 bp, Homo sapien
ttccaactctgtatgggtgccaaat

SEQ ID NO: 2253645 - DNA, 25 bp, Homo sapien
aactctgtatgggtgccaaataaca

SEQ ID NO: 2253646 - DNA, 25 bp, Homo sapien
tctctttccaactctgtatgggtgc

SEQ ID NO: 2253647 - DNA, 25 bp, Homo sapien
ctgtatgggtgccaaataacagaaa

SEQ ID NO: 2253648 - DNA, 25 bp, Homo sapien
ttagtcttcaatataagcataagat

SEQ ID NO: 2253649 - DNA, 25 bp, Homo sapien
aggagctcattactcagcttttcct

SEQ ID NO: 2253650 - DNA, 25 bp, Homo sapien
cacagacacctgtgttggagttggc

SEQ ID NO: 2253651 - DNA, 25 bp, Homo sapien
ggattccattctagactcacagaca

SEQ ID NO: 2253652 - DNA, 25 bp, Homo sapien
cagacacctgtgttggagttggcag

SEQ ID NO: 2253653 - DNA, 25 bp, Homo sapien
tgttctctgtcagcaactcattaga

SEQ ID NO: 2253654 - DNA, 25 bp, Homo sapien
gatctaggtttctcaatagagagct

SEQ ID NO: 2253655 - DNA, 25 bp, Homo sapien
taaggaccatcgatctaggtttctc

SEQ ID NO: 2253656 - DNA, 25 bp, Homo sapien
tctttggtaaggaccatcgatctag

SEQ ID NO: 2253657 - DNA, 25 bp, Homo sapien
ttcatctttggtaaggaccatcgat

SEQ ID NO: 2253658 - DNA, 25 bp, Homo sapien
tggtgttctcccttgccactaatac

SEQ ID NO: 2253659 - DNA, 25 bp, Homo sapien
atggtgttctcccttgccactaata

SEQ ID NO: 2253660 - DNA, 25 bp, Homo sapien
ggtgttctcccttgccactaatact

SEQ ID NO: 2253661 - DNA, 25 bp, Homo sapien
tatcatgagtcaggaaaaatggact

SEQ ID NO: 2253662 - DNA, 25 bp, Homo sapien
aaagtatcaggcagagggaattcat

SEQ ID NO: 2253663 - DNA, 25 bp, Homo sapien
caacagtatcatgagtcaggaaaaa

SEQ ID NO: 2253664 - DNA, 25 bp, Homo sapien
cctgaagccaaggttctcccagtga

SEQ ID NO: 2253665 - DNA, 25 bp, Homo sapien
ttaggaccacatttctactttgggc

SEQ ID NO: 2253666 - DNA, 25 bp, Homo sapien
ccaatgtgggttaggtatttccgca

SEQ ID NO: 2253667 - DNA, 25 bp, Homo sapien
gataatccacaaagattgtatccaa

SEQ ID NO: 2253668 - DNA, 25 bp, Homo sapien
gctaccagacgaagataattggata

SEQ ID NO: 2253669 - DNA, 25 bp, Homo sapien
tgagccaacactcgggcatggccat

SEQ ID NO: 2253670 - DNA, 25 bp, Homo sapien
tggccagtgagccaacactcgggca

SEQ ID NO: 2253671 - DNA, 25 bp, Homo sapien
gcttaggagagttgcatggccagtg

SEQ ID NO: 2253672 - DNA, 25 bp, Homo sapien
actgggcagaagtatcattgaattg

SEQ ID NO: 2253673 - DNA, 25 bp, Homo sapien
tccagcgccactagctttgcattga

SEQ ID NO: 2253674 - DNA, 25 bp, Homo sapien
gctttgcattgacgtccttaacggg

SEQ ID NO: 2253675 - DNA, 25 bp, Homo sapien
taacgggcattggtgtccttaacag

SEQ ID NO: 2253676 - DNA, 25 bp, Homo sapien
catgtcctggttggccccctgcggg

SEQ ID NO: 2253677 - DNA, 25 bp, Homo sapien
gaaccacaggtgtgtccaaaaactg

SEQ ID NO: 2253678 - DNA, 25 bp, Homo sapien
gctgggttatggctggcaatcccct

SEQ ID NO: 2253679 - DNA, 25 bp, Homo sapien
agttgatctcatgggtcagctcttt

SEQ ID NO: 2253680 - DNA, 25 bp, Homo sapien
aaaactgggactgcacctcaggatc

SEQ ID NO: 2253681 - DNA, 25 bp, Homo sapien
ttccaaaggttactgatgtagttgt

SEQ ID NO: 2253682 - DNA, 25 bp, Homo sapien
tgatgtagttgtcaaacatgatgtt

SEQ ID NO: 2253683 - DNA, 25 bp, Homo sapien
aaacatgatgttgttccaagctgcc

SEQ ID NO: 2253684 - DNA, 25 bp, Homo sapien
ctgatgtagttgtcaaacatgatgt

SEQ ID NO: 2253685 - DNA, 25 bp, Homo sapien
gctctaatcttactggcaccaacac

SEQ ID NO: 2253686 - DNA, 25 bp, Homo sapien
ggctctaatcttactggcaccaaca

SEQ ID NO: 2253687 - DNA, 25 bp, Homo sapien
taaggctctaatcttactggcacca

SEQ ID NO: 2253688 - DNA, 25 bp, Homo sapien
ctctaaggctctaatcttactggca

SEQ ID NO: 2253689 - DNA, 25 bp, Homo sapien
aacaaaacaacgaagagagctttct

SEQ ID NO: 2253690 - DNA, 25 bp, Homo sapien
tctgactttccaccattcccttctt

SEQ ID NO: 2253691 - DNA, 25 bp, Homo sapien
caaaacaacgaagagagctttctct

SEQ ID NO: 2253692 - DNA, 25 bp, Homo sapien
aacaacgaagagagctttctctgac

SEQ ID NO: 2253693 - DNA, 25 bp, Homo sapien
caaccttcttgatgatattcagaaa

SEQ ID NO: 2253694 - DNA, 25 bp, Homo sapien
tattatgtagcttaatttcccttta

SEQ ID NO: 2253695 - DNA, 25 bp, Homo sapien
gatgatattcagaaacttaattccc

SEQ ID NO: 2253696 - DNA, 25 bp, Homo sapien
ttccaacatggctcacaaccttctt

SEQ ID NO: 2253697 - DNA, 25 bp, Homo sapien
tgtattgagtttgtctctgtttctg

SEQ ID NO: 2253698 - DNA, 25 bp, Homo sapien
atgtattgagtttgtctctgtttct

SEQ ID NO: 2253699 - DNA, 25 bp, Homo sapien
ttgtctctgtttctgaaggatgatt

SEQ ID NO: 2253700 - DNA, 25 bp, Homo sapien
tctctgtttctgaaggatgattcat

SEQ ID NO: 2253701 - DNA, 25 bp, Homo sapien
tgaatgtactggcaaattcaccagt

SEQ ID NO: 2253702 - DNA, 25 bp, Homo sapien
atttgaatgtactggcaaattcacc

SEQ ID NO: 2253703 - DNA, 25 bp, Homo sapien
tgtactggcaaattcaccagttagt

SEQ ID NO: 2253704 - DNA, 25 bp, Homo sapien
tggcaaattcaccagttagtgtcat

SEQ ID NO: 2253705 - DNA, 25 bp, Homo sapien
aaagtttgtcagcattctacatctc

SEQ ID NO: 2253706 - DNA, 25 bp, Homo sapien
aagaaacaataaagcctcgcatttg

SEQ ID NO: 2253707 - DNA, 25 bp, Homo sapien
gcattctacatctccggtttcctac

SEQ ID NO: 2253708 - DNA, 25 bp, Homo sapien
taaagcctcgcatttgtcttgcagg

SEQ ID NO: 2253709 - DNA, 25 bp, Homo sapien
agcactcccctgagagagttccggt

SEQ ID NO: 2253710 - DNA, 25 bp, Homo sapien
gagagagttccggtgcactagtcat

SEQ ID NO: 2253711 - DNA, 25 bp, Homo sapien
tcccctgagagagttccggtgcact

SEQ ID NO: 2253712 - DNA, 25 bp, Homo sapien
cctgagagagttccggtgcactagt

SEQ ID NO: 2253713 - DNA, 25 bp, Homo sapien
ggtagtgcaattcttcttgattaga

SEQ ID NO: 2253714 - DNA, 25 bp, Homo sapien
cgtgcgctacacctcataacatgat

SEQ ID NO: 2253715 - DNA, 25 bp, Homo sapien
gaagttctggaggtctatggtttcc

SEQ ID NO: 2253716 - DNA, 25 bp, Homo sapien
gtgacatgaataatagccaatctgc

SEQ ID NO: 2253717 - DNA, 25 bp, Homo sapien
catcctggagctgatgggcaacaag

SEQ ID NO: 2253718 - DNA, 25 bp, Homo sapien
cataagagccaagcagcagttcctc

SEQ ID NO: 2253719 - DNA, 25 bp, Homo sapien
aatacttggtggcaacatcctggag

SEQ ID NO: 2253720 - DNA, 25 bp, Homo sapien
caaaggagctcctataggtgtagaa

SEQ ID NO: 2253721 - DNA, 25 bp, Homo sapien
gaaagagtagtggacaacaatccat

SEQ ID NO: 2253722 - DNA, 25 bp, Homo sapien
tagtggacaacaatccattgctcag

SEQ ID NO: 2253723 - DNA, 25 bp, Homo sapien
ggacaacaatccattgctcagccac

SEQ ID NO: 2253724 - DNA, 25 bp, Homo sapien
atgtggaaagagtagtggacaacaa

SEQ ID NO: 2253725 - DNA, 25 bp, Homo sapien
ggttctccactgcctggtgatccac

SEQ ID NO: 2253726 - DNA, 25 bp, Homo sapien
actggtttcctcttggttctccact

SEQ ID NO: 2253727 - DNA, 25 bp, Homo sapien
ctggtttcctcttggttctccactg

SEQ ID NO: 2253728 - DNA, 25 bp, Homo sapien
ctcttggttctccactgcctggtga

SEQ ID NO: 2253729 - DNA, 25 bp, Homo sapien
ttccaagaaacctttgttgccacat

SEQ ID NO: 2253730 - DNA, 25 bp, Homo sapien
tgacctgagtatgaaaaatatagta

SEQ ID NO: 2253731 - DNA, 25 bp, Homo sapien
gcctgctccacaggagtgacctgag

SEQ ID NO: 2253732 - DNA, 25 bp, Homo sapien
aagcagaaggacctggcttggcttt

SEQ ID NO: 2253733 - DNA, 25 bp, Homo sapien
ctggcagtggagattcgttttcagg

SEQ ID NO: 2253734 - DNA, 25 bp, Homo sapien
gctaaagaaattgtcctggctagga

SEQ ID NO: 2253735 - DNA, 25 bp, Homo sapien
gcactcagtgttctcaatggacagg

SEQ ID NO: 2253736 - DNA, 25 bp, Homo sapien
tattcatgttacgataaagcccaag

SEQ ID NO: 2253737 - DNA, 25 bp, Homo sapien
aatggacaggtcaggttcacgtcct

SEQ ID NO: 2253738 - DNA, 25 bp, Homo sapien
tcttgatcattgtagtggttaccca

SEQ ID NO: 2253739 - DNA, 25 bp, Homo sapien
tgcatagacctacacacataaacgt

SEQ ID NO: 2253740 - DNA, 25 bp, Homo sapien
tcttagtggtgacggaacagttcca

SEQ ID NO: 2253741 - DNA, 25 bp, Homo sapien
cacttgagtgtacatcatggcagga

SEQ ID NO: 2253742 - DNA, 25 bp, Homo sapien
aggcctcctggcctataatgggaga

SEQ ID NO: 2253743 - DNA, 25 bp, Homo sapien
ctggcctataatgggagaggctgca

SEQ ID NO: 2253744 - DNA, 25 bp, Homo sapien
gggacgcagggtaccatgtttcaag

SEQ ID NO: 2253745 - DNA, 25 bp, Homo sapien
catgtttcaaggctgcaaagagcaa

SEQ ID NO: 2253746 - DNA, 25 bp, Homo sapien
gcacgcatttgtcaatacacatgaa

SEQ ID NO: 2253747 - DNA, 25 bp, Homo sapien
gtttctgttacatggtgcacgcatt

SEQ ID NO: 2253748 - DNA, 25 bp, Homo sapien
taaactctacttcctgatatgcatg

SEQ ID NO: 2253749 - DNA, 25 bp, Homo sapien
catgaattgatatacctaacaggtt

SEQ ID NO: 2253750 - DNA, 25 bp, Homo sapien
ttcttggagataaagagcagtccag

SEQ ID NO: 2253751 - DNA, 25 bp, Homo sapien
tgatggttcatgaaagagtaacttc

SEQ ID NO: 2253752 - DNA, 25 bp, Homo sapien
tacttgtactcatgtgatattagca

SEQ ID NO: 2253753 - DNA, 25 bp, Homo sapien
catagattattgttctctgtgcaac

SEQ ID NO: 2253754 - DNA, 25 bp, Homo sapien
gaacttttgggtgaaggactgctag

SEQ ID NO: 2253755 - DNA, 25 bp, Homo sapien
gaacactgttaccttgagcctgaga

SEQ ID NO: 2253756 - DNA, 25 bp, Homo sapien
ttggtcaaaccacaagaacactgtt

SEQ ID NO: 2253757 - DNA, 25 bp, Homo sapien
taaactttttgtgcacaggacagaa

SEQ ID NO: 2253758 - DNA, 25 bp, Homo sapien
gagaactccgtgagatcgtgcagtg

SEQ ID NO: 2253759 - DNA, 25 bp, Homo sapien
ccgcttccagatcgggagaactccg

SEQ ID NO: 2253760 - DNA, 25 bp, Homo sapien
catggatttgcctccgttcagcacg

SEQ ID NO: 2253761 - DNA, 25 bp, Homo sapien
ttcagcacgccagagacacttctgc

SEQ ID NO: 2253762 - DNA, 25 bp, Homo sapien
ttctttgttcagacccagataccac

SEQ ID NO: 2253763 - DNA, 25 bp, Homo sapien
cagataccaccctcggcctgactgc

SEQ ID NO: 2253764 - DNA, 25 bp, Homo sapien
ccttctttgttcagacccagatacc

SEQ ID NO: 2253765 - DNA, 25 bp, Homo sapien
cctgactgctgctgacggtatatca

SEQ ID NO: 2253766 - DNA, 25 bp, Homo sapien
gaatttgcactcaggtgtgaaaagt

SEQ ID NO: 2253767 - DNA, 25 bp, Homo sapien
tgaatatgtcacataataattttca

SEQ ID NO: 2253768 - DNA, 25 bp, Homo sapien
caaacactgattctttgaatttgca

SEQ ID NO: 2253769 - DNA, 25 bp, Homo sapien
tgatgaatatgtcacataataattt

SEQ ID NO: 2253770 - DNA, 25 bp, Homo sapien
aacaaacaacttgatgtaacattta

SEQ ID NO: 2253771 - DNA, 25 bp, Homo sapien
ctaatccagtgcagggaagcagctc

SEQ ID NO: 2253772 - DNA, 25 bp, Homo sapien
gaagctggaatctgtttacggtagc

SEQ ID NO: 2253773 - DNA, 25 bp, Homo sapien
agctggtactggcatgtgatatttc

SEQ ID NO: 2253774 - DNA, 25 bp, Homo sapien
ggaagcagctccttctagaggaagc

SEQ ID NO: 2253775 - DNA, 25 bp, Homo sapien
ctgagttccagagggtaggaagagg

SEQ ID NO: 2253776 - DNA, 25 bp, Homo sapien
tgagttccagagggtaggaagaggt

SEQ ID NO: 2253777 - DNA, 25 bp, Homo sapien
gcaaggctgccactatgcacgcaat

SEQ ID NO: 2253778 - DNA, 25 bp, Homo sapien
tgtgatttagcaggcagtgcacttg

SEQ ID NO: 2253779 - DNA, 25 bp, Homo sapien
gccagttgataataggcacctctcc

SEQ ID NO: 2253780 - DNA, 25 bp, Homo sapien
gaatcaaacgtcagcatgtcagaaa

SEQ ID NO: 2253781 - DNA, 25 bp, Homo sapien
ttcttaagttctgatgctaagtcca

SEQ ID NO: 2253782 - DNA, 25 bp, Homo sapien
atgctaagtccacttggtgctttgg

SEQ ID NO: 2253783 - DNA, 25 bp, Homo sapien
tgctaagtccacttggtgctttgga

SEQ ID NO: 2253784 - DNA, 25 bp, Homo sapien
cttaagttctgatgctaagtccact

SEQ ID NO: 2253785 - DNA, 25 bp, Homo sapien
taaagagtatggctgttccagtggc

SEQ ID NO: 2253786 - DNA, 25 bp, Homo sapien
gcctgttttggctcaatggtacaat

SEQ ID NO: 2253787 - DNA, 25 bp, Homo sapien
tggtgaattccccagtaagtaagca

SEQ ID NO: 2253788 - DNA, 25 bp, Homo sapien
aatgaagtaaagagtatggctgttc

SEQ ID NO: 2253789 - DNA, 25 bp, Homo sapien
tactcaagggtatgctcggtccaat

SEQ ID NO: 2253790 - DNA, 25 bp, Homo sapien
caagggtatgctcggtccaatgagc

SEQ ID NO: 2253791 - DNA, 25 bp, Homo sapien
taatactcaagggtatgctcggtcc

SEQ ID NO: 2253792 - DNA, 25 bp, Homo sapien
cttaatactcaagggtatgctcggt

SEQ ID NO: 2253793 - DNA, 25 bp, Homo sapien
tttaatccttgtgcactgaacaacc

SEQ ID NO: 2253794 - DNA, 25 bp, Homo sapien
tgtgcactgaacaaccagtgtcctt

SEQ ID NO: 2253795 - DNA, 25 bp, Homo sapien
agtgtccttactgcaagtgttcctg

SEQ ID NO: 2253796 - DNA, 25 bp, Homo sapien
gtgtccttactgcaagtgttcctga

SEQ ID NO: 2253797 - DNA, 25 bp, Homo sapien
gaatacagatagagtgcagaccagg

SEQ ID NO: 2253798 - DNA, 25 bp, Homo sapien
cagtaagaatacagatagagtgcag

SEQ ID NO: 2253799 - DNA, 25 bp, Homo sapien
tctgtatgggaaaccctgccctgca

SEQ ID NO: 2253800 - DNA, 25 bp, Homo sapien
agtctgtgccctctgtatgggaaac

SEQ ID NO: 2253801 - DNA, 25 bp, Homo sapien
tgaattatctgtagcaaatgctgca

SEQ ID NO: 2253802 - DNA, 25 bp, Homo sapien
taattgaattatctgtagcaaatgc

SEQ ID NO: 2253803 - DNA, 25 bp, Homo sapien
gtagcaaatgctgcatcttgggctg

SEQ ID NO: 2253804 - DNA, 25 bp, Homo sapien
ctgtagcaaatgctgcatcttgggc

SEQ ID NO: 2253805 - DNA, 25 bp, Homo sapien
tcagaaagaggactgctttctggtc

SEQ ID NO: 2253806 - DNA, 25 bp, Homo sapien
gcaatctgactgagccgttgggatc

SEQ ID NO: 2253807 - DNA, 25 bp, Homo sapien
cacaagctgtctcattcccatggca

SEQ ID NO: 2253808 - DNA, 25 bp, Homo sapien
catctagtttgctatggtagtccca

SEQ ID NO: 2253809 - DNA, 25 bp, Homo sapien
tatagaaatgactttgtttcccaca

SEQ ID NO: 2253810 - DNA, 25 bp, Homo sapien
atagaaatgactttgtttcccacag

SEQ ID NO: 2253811 - DNA, 25 bp, Homo sapien
ttatagaaatgactttgtttcccac

SEQ ID NO: 2253812 - DNA, 25 bp, Homo sapien
cgaggtgtacaagtatccctcactg

SEQ ID NO: 2253813 - DNA, 25 bp, Homo sapien
caagtacagcttggtttgaactcct

SEQ ID NO: 2253814 - DNA, 25 bp, Homo sapien
tgaactccttggatagccaccactc

SEQ ID NO: 2253815 - DNA, 25 bp, Homo sapien
ctcactgttcattgccaagtacagc

SEQ ID NO: 2253816 - DNA, 25 bp, Homo sapien
cttggtaactatacccttaagctga

SEQ ID NO: 2253817 - DNA, 25 bp, Homo sapien
tggtgccatcaatggttccatccgc

SEQ ID NO: 2253818 - DNA, 25 bp, Homo sapien
catcaatggttccatccgcctgcag

SEQ ID NO: 2253819 - DNA, 25 bp, Homo sapien
aagtggtagccttgtcggctgtata

SEQ ID NO: 2253820 - DNA, 25 bp, Homo sapien
cttgacgcaacctgacacctagagc

SEQ ID NO: 2253821 - DNA, 25 bp, Homo sapien
cagtcgctggaatatcgcgctactc

SEQ ID NO: 2253822 - DNA, 25 bp, Homo sapien
gctgaatttccagtcgctggaatat

SEQ ID NO: 2253823 - DNA, 25 bp, Homo sapien
ttgacgcaacctgacacctagagct

SEQ ID NO: 2253824 - DNA, 25 bp, Homo sapien
ccccacctcactcgtaaagtatggg

SEQ ID NO: 2253825 - DNA, 25 bp, Homo sapien
tcactcgtaaagtatggggaaaaga

SEQ ID NO: 2253826 - DNA, 25 bp, Homo sapien
cacctcactcgtaaagtatggggaa

SEQ ID NO: 2253827 - DNA, 25 bp, Homo sapien
cgcccccacctcactcgtaaagtat

SEQ ID NO: 2253828 - DNA, 25 bp, Homo sapien
ttcttggagccgaagagtttgaccc

SEQ ID NO: 2253829 - DNA, 25 bp, Homo sapien
cgttggatttctcgcgctcgcgggc

SEQ ID NO: 2253830 - DNA, 25 bp, Homo sapien
cgggcttgcctcttctgacggatga

SEQ ID NO: 2253831 - DNA, 25 bp, Homo sapien
gctgacacacttgcaggcgttggat

SEQ ID NO: 2253832 - DNA, 25 bp, Homo sapien
gccacgacgcccaccaccaccgctt

SEQ ID NO: 2253833 - DNA, 25 bp, Homo sapien
ggccacgacgcccaccaccaccgct

SEQ ID NO: 2253834 - DNA, 25 bp, Homo sapien
ctcctccgctgcttgtccgctgtct

SEQ ID NO: 2253835 - DNA, 25 bp, Homo sapien
gctgtctcgcgacttcgccgctttg

SEQ ID NO: 2253836 - DNA, 25 bp, Homo sapien
gcttgtccgctgtctcgcgacttcg

SEQ ID NO: 2253837 - DNA, 25 bp, Homo sapien
tgtctcgcgacttcgccgctttggt

SEQ ID NO: 2253838 - DNA, 25 bp, Homo sapien
cgtttgcccgggcttctccgcactc

SEQ ID NO: 2253839 - DNA, 25 bp, Homo sapien
gtttgcccgggcttctccgcactcg

SEQ ID NO: 2253840 - DNA, 25 bp, Homo sapien
ttgcccgggcttctccgcactcggg

SEQ ID NO: 2253841 - DNA, 25 bp, Homo sapien
ctgcgtttgcccgggcttctccgca

SEQ ID NO: 2253842 - DNA, 25 bp, Homo sapien
ctgcctgggtcggagtcgacgccac

SEQ ID NO: 2253843 - DNA, 25 bp, Homo sapien
agctgctccggtccgaatttcgccg

SEQ ID NO: 2253844 - DNA, 25 bp, Homo sapien
actggcacgcggatgctgaactgcg

SEQ ID NO: 2253845 - DNA, 25 bp, Homo sapien
ctgaactgcgcgactgcgtgtggtc

SEQ ID NO: 2253846 - DNA, 25 bp, Homo sapien
tggcccctccgagtcttcgactagt

SEQ ID NO: 2253847 - DNA, 25 bp, Homo sapien
cgagtcttcgactagtccttgcaac

SEQ ID NO: 2253848 - DNA, 25 bp, Homo sapien
agagaggccgggagctcgggcggcc

SEQ ID NO: 2253849 - DNA, 25 bp, Homo sapien
cctccgagtcttcgactagtccttg

SEQ ID NO: 2253850 - DNA, 25 bp, Homo sapien
cgtgccaggtttccgacagggatca

SEQ ID NO: 2253851 - DNA, 25 bp, Homo sapien
gcggcacagtcgcagcacaggaatt

SEQ ID NO: 2253852 - DNA, 25 bp, Homo sapien
tcttggcgtgataatcgggaaaagt

SEQ ID NO: 2253853 - DNA, 25 bp, Homo sapien
taatggcctcgcatcttcgctgttg

SEQ ID NO: 2253854 - DNA, 25 bp, Homo sapien
gcttccgcactgccccagtcgtcca

SEQ ID NO: 2253855 - DNA, 25 bp, Homo sapien
ctgccccagtcgtccaaatccttct

SEQ ID NO: 2253856 - DNA, 25 bp, Homo sapien
gcactgccccagtcgtccaaatcct

SEQ ID NO: 2253857 - DNA, 25 bp, Homo sapien
tccgcactgccccagtcgtccaaat

SEQ ID NO: 2253858 - DNA, 25 bp, Homo sapien
gagcccctcagaagttcgccagatc

SEQ ID NO: 2253859 - DNA, 25 bp, Homo sapien
tgagctgaccagattgtgctcgggc

SEQ ID NO: 2253860 - DNA, 25 bp, Homo sapien
ttggacgcaccaacaacccggagaa

SEQ ID NO: 2253861 - DNA, 25 bp, Homo sapien
cacccacccgcgcagaggtattttg

SEQ ID NO: 2253862 - DNA, 25 bp, Homo sapien
aagggccttttgttcctactctcat

SEQ ID NO: 2253863 - DNA, 25 bp, Homo sapien
agctctcactgtttgcttctgcaaa

SEQ ID NO: 2253864 - DNA, 25 bp, Homo sapien
atagctctcactgtttgcttctgca

SEQ ID NO: 2253865 - DNA, 25 bp, Homo sapien
cacttctcctctcagatagctctca

SEQ ID NO: 2253866 - DNA, 25 bp, Homo sapien
ctcctctcagatagctctcactgtt

SEQ ID NO: 2253867 - DNA, 25 bp, Homo sapien
gaagtaatcactaggagagtggaaa

SEQ ID NO: 2253868 - DNA, 25 bp, Homo sapien
caccaagaagtaatcactaggagag

SEQ ID NO: 2253869 - DNA, 25 bp, Homo sapien
cagtaacaccattatgagaaggcaa

SEQ ID NO: 2253870 - DNA, 25 bp, Homo sapien
gtaacaccattatgagaaggcaaag

SEQ ID NO: 2253871 - DNA, 25 bp, Homo sapien
gacttgaaactggtcgctccggcaa

SEQ ID NO: 2253872 - DNA, 25 bp, Homo sapien
gcttgtttttctccgtgagctggaa

SEQ ID NO: 2253873 - DNA, 25 bp, Homo sapien
cttgggcgttggttccatcagctat

SEQ ID NO: 2253874 - DNA, 25 bp, Homo sapien
catcagctatctgcggcatctgcct

SEQ ID NO: 2253875 - DNA, 25 bp, Homo sapien
tgaatacgacttccttaacaaagcc

SEQ ID NO: 2253876 - DNA, 25 bp, Homo sapien
ctgaatacgacttccttaacaaagc

SEQ ID NO: 2253877 - DNA, 25 bp, Homo sapien
gaatacgacttccttaacaaagcca

SEQ ID NO: 2253878 - DNA, 25 bp, Homo sapien
aatacgacttccttaacaaagccat

SEQ ID NO: 2253879 - DNA, 25 bp, Homo sapien
gcttctttataagctggtcctaccc

SEQ ID NO: 2253880 - DNA, 25 bp, Homo sapien
gacaattgctgtctacatttggagc

SEQ ID NO: 2253881 - DNA, 25 bp, Homo sapien
tggtcctacccagacaattgctgtc

SEQ ID NO: 2253882 - DNA, 25 bp, Homo sapien
ctccaaggtaatggccagaaacatc

SEQ ID NO: 2253883 - DNA, 25 bp, Homo sapien
caagctgcagtaaggcttcttttcc

SEQ ID NO: 2253884 - DNA, 25 bp, Homo sapien
tattgtcgtgcacctaacacatatt

SEQ ID NO: 2253885 - DNA, 25 bp, Homo sapien
cgtgcacctaacacatatttaccat

SEQ ID NO: 2253886 - DNA, 25 bp, Homo sapien
tttatattgtcgtgcacctaacaca

SEQ ID NO: 2253887 - DNA, 25 bp, Homo sapien
ttatttatattgtcgtgcacctaac

SEQ ID NO: 2253888 - DNA, 25 bp, Homo sapien
cttccccttcgtttgagttccagtg

SEQ ID NO: 2253889 - DNA, 25 bp, Homo sapien
aaggaataaaatccctttgcaagtg

SEQ ID NO: 2253890 - DNA, 25 bp, Homo sapien
tgtgtgtgcatacttggaccaaaga

SEQ ID NO: 2253891 - DNA, 25 bp, Homo sapien
tgtgcatacttggaccaaagagaaa

SEQ ID NO: 2253892 - DNA, 25 bp, Homo sapien
cacagtgccggtttaacaaagctgc

SEQ ID NO: 2253893 - DNA, 25 bp, Homo sapien
gccatccacagggttaaagccagta

SEQ ID NO: 2253894 - DNA, 25 bp, Homo sapien
aagcagcgactgtgactagggacct

SEQ ID NO: 2253895 - DNA, 25 bp, Homo sapien
ctttgaaaggaccactgaggcagca

SEQ ID NO: 2253896 - DNA, 25 bp, Homo sapien
tccaatgacaacagtcttactgtcc

SEQ ID NO: 2253897 - DNA, 25 bp, Homo sapien
ttttgcctgtaaagctcttgcctca

SEQ ID NO: 2253898 - DNA, 25 bp, Homo sapien
gcctcaggcccagatttacaaaaat

SEQ ID NO: 2253899 - DNA, 25 bp, Homo sapien
caaccgagaacaggttttgccttca

SEQ ID NO: 2253900 - DNA, 25 bp, Homo sapien
aatcagggagcatgacagcctgagg

SEQ ID NO: 2253901 - DNA, 25 bp, Homo sapien
tcaggaatcagggagcatgacagcc

SEQ ID NO: 2253902 - DNA, 25 bp, Homo sapien
cagggagcatgacagcctgaggtaa

SEQ ID NO: 2253903 - DNA, 25 bp, Homo sapien
ggaatcagggagcatgacagcctga

SEQ ID NO: 2253904 - DNA, 25 bp, Homo sapien
gtgccacagaagttgtccattacca

SEQ ID NO: 2253905 - DNA, 25 bp, Homo sapien
ccacagaagttgtccattaccacaa

SEQ ID NO: 2253906 - DNA, 25 bp, Homo sapien
ggtgccacagaagttgtccattacc

SEQ ID NO: 2253907 - DNA, 25 bp, Homo sapien
gccacagaagttgtccattaccaca

SEQ ID NO: 2253908 - DNA, 25 bp, Homo sapien
tgtcactgggctgtgtacagactgt

SEQ ID NO: 2253909 - DNA, 25 bp, Homo sapien
tggatttcaacctgtcatcattatg

SEQ ID NO: 2253910 - DNA, 25 bp, Homo sapien
tgtggtgctgtataatgtcactggg

SEQ ID NO: 2253911 - DNA, 25 bp, Homo sapien
gggtctttgatgtttagcttgccac

SEQ ID NO: 2253912 - DNA, 25 bp, Homo sapien
gaattttaacccacatgccagtctc

SEQ ID NO: 2253913 - DNA, 25 bp, Homo sapien
gacaattatcataaggattcccata

SEQ ID NO: 2253914 - DNA, 25 bp, Homo sapien
ttcccataatgatgcaaaagggcaa

SEQ ID NO: 2253915 - DNA, 25 bp, Homo sapien
cgaattttaacccacatgccagtct

SEQ ID NO: 2253916 - DNA, 25 bp, Homo sapien
tatacagcgtcccatctgagactgt

SEQ ID NO: 2253917 - DNA, 25 bp, Homo sapien
catctgagactgtataacactttca

SEQ ID NO: 2253918 - DNA, 25 bp, Homo sapien
ccagggggcctcctagctatggcag

SEQ ID NO: 2253919 - DNA, 25 bp, Homo sapien
cagcgtcccatctgagactgtataa

SEQ ID NO: 2253920 - DNA, 25 bp, Homo sapien
tctttaattccgcagattggatgga

SEQ ID NO: 2253921 - DNA, 25 bp, Homo sapien
tggtgtacttgcttcagcgggcagc

SEQ ID NO: 2253922 - DNA, 25 bp, Homo sapien
gaagatttcgtgacacttagcacga

SEQ ID NO: 2253923 - DNA, 25 bp, Homo sapien
tggaatcttgtcgtaacataatgta

SEQ ID NO: 2253924 - DNA, 25 bp, Homo sapien
ccagcatgaattgttttctttcaca

SEQ ID NO: 2253925 - DNA, 25 bp, Homo sapien
cccagcatgaattgttttctttcac

SEQ ID NO: 2253926 - DNA, 25 bp, Homo sapien
cagcatgaattgttttctttcacac

SEQ ID NO: 2253927 - DNA, 25 bp, Homo sapien
gtgcctccaaagctttgattaatga

SEQ ID NO: 2253928 - DNA, 25 bp, Homo sapien
ctttgattaatgacgagctgactca

SEQ ID NO: 2253929 - DNA, 25 bp, Homo sapien
tgaggccattccatttcaccagaag

SEQ ID NO: 2253930 - DNA, 25 bp, Homo sapien
tcaccagaagtgagtcagtgcctcc

SEQ ID NO: 2253931 - DNA, 25 bp, Homo sapien
cagccaaaggcccatgtggccaggg

SEQ ID NO: 2253932 - DNA, 25 bp, Homo sapien
agcccagcctttccatcagccaaag

SEQ ID NO: 2253933 - DNA, 25 bp, Homo sapien
ttccatcagccaaaggcccatgtgg

SEQ ID NO: 2253934 - DNA, 25 bp, Homo sapien
atgtggccagggaggatagatcccc

SEQ ID NO: 2253935 - DNA, 25 bp, Homo sapien
tgggactctattcagccttgcttgg

SEQ ID NO: 2253936 - DNA, 25 bp, Homo sapien
tgagcaagttctaaggccacatgac

SEQ ID NO: 2253937 - DNA, 25 bp, Homo sapien
ccatcgtgttggatctggaagactt

SEQ ID NO: 2253938 - DNA, 25 bp, Homo sapien
gactttaagggtccgtctgaggctg

SEQ ID NO: 2253939 - DNA, 25 bp, Homo sapien
taccacgtgctaagtagacgcttgg

SEQ ID NO: 2253940 - DNA, 25 bp, Homo sapien
gacttcctagtagagctgcaaacaa

SEQ ID NO: 2253941 - DNA, 25 bp, Homo sapien
gccaggccaggcaatttaccacgtg

SEQ ID NO: 2253942 - DNA, 25 bp, Homo sapien
cacttgcctaaataaatgccatggg

SEQ ID NO: 2253943 - DNA, 25 bp, Homo sapien
tagcagggctaatgcatgcaggcac

SEQ ID NO: 2253944 - DNA, 25 bp, Homo sapien
taaatgtggcagcagacccaatgga

SEQ ID NO: 2253945 - DNA, 25 bp, Homo sapien
gaagccgacagagtacccaaatgga

SEQ ID NO: 2253946 - DNA, 25 bp, Homo sapien
cttgagggtagatgtagaagccgac

SEQ ID NO: 2253947 - DNA, 25 bp, Homo sapien
ttccaaaggttttgtacagccaaga

SEQ ID NO: 2253948 - DNA, 25 bp, Homo sapien
tggggtattcatggcatgggaaaca

SEQ ID NO: 2253949 - DNA, 25 bp, Homo sapien
actagtttcgaagcttgtgttggac

SEQ ID NO: 2253950 - DNA, 25 bp, Homo sapien
tctttagattcaatctgcctgacag

SEQ ID NO: 2253951 - DNA, 25 bp, Homo sapien
gaggagcccttagccatgactgata

SEQ ID NO: 2253952 - DNA, 25 bp, Homo sapien
gcttggccaccgacctaatctatgt

SEQ ID NO: 2253953 - DNA, 25 bp, Homo sapien
tgttctgcacaattcctagggttcc

SEQ ID NO: 2253954 - DNA, 25 bp, Homo sapien
cagcctgggcatagagtaagctaga

SEQ ID NO: 2253955 - DNA, 25 bp, Homo sapien
gaaacagtgccaggcaagccaccct

SEQ ID NO: 2253956 - DNA, 25 bp, Homo sapien
tctaggttggtagtacagcaattga

SEQ ID NO: 2253957 - DNA, 25 bp, Homo sapien
tacagctacactgcgtgaaacagtg

SEQ ID NO: 2253958 - DNA, 25 bp, Homo sapien
ggatcaaacggaatatatttaacta

SEQ ID NO: 2253959 - DNA, 25 bp, Homo sapien
gtgagtggttcctcagactttgatc

SEQ ID NO: 2253960 - DNA, 25 bp, Homo sapien
cctctttaatgttgcctgccaagca

SEQ ID NO: 2253961 - DNA, 25 bp, Homo sapien
gaggtgagtggttcctcagactttg

SEQ ID NO: 2253962 - DNA, 25 bp, Homo sapien
ggtgaggggagttctcccttgctct

SEQ ID NO: 2253963 - DNA, 25 bp, Homo sapien
gggactcttccagctacagatgctt

SEQ ID NO: 2253964 - DNA, 25 bp, Homo sapien
tgtgggcccatctacagctagggag

SEQ ID NO: 2253965 - DNA, 25 bp, Homo sapien
aacactgtctaggatagtatgaatc

SEQ ID NO: 2253966 - DNA, 25 bp, Homo sapien
tagagactgacagggactcttccag

SEQ ID NO: 2253967 - DNA, 25 bp, Homo sapien
gggctcctacactactcagatatgt

SEQ ID NO: 2253968 - DNA, 25 bp, Homo sapien
tttcaagagctaaatcccagattcc

SEQ ID NO: 2253969 - DNA, 25 bp, Homo sapien
ggcaaaatgtggcaacagctgtaaa

SEQ ID NO: 2253970 - DNA, 25 bp, Homo sapien
tggcaagtagaggaacaattatacc

SEQ ID NO: 2253971 - DNA, 25 bp, Homo sapien
caggaagttcttgtaaaaacttcat

SEQ ID NO: 2253972 - DNA, 25 bp, Homo sapien
tcaggaagttcttgtaaaaacttca

SEQ ID NO: 2253973 - DNA, 25 bp, Homo sapien
agtggttaaatgtacagcctggctg

SEQ ID NO: 2253974 - DNA, 25 bp, Homo sapien
gcttctttaagaattaggggcagag

SEQ ID NO: 2253975 - DNA, 25 bp, Homo sapien
tgaagccaaacaagcaccataccag

SEQ ID NO: 2253976 - DNA, 25 bp, Homo sapien
cataccagggcgagcaccagatact

SEQ ID NO: 2253977 - DNA, 25 bp, Homo sapien
tgccagtggcctgaagccaaacaag

SEQ ID NO: 2253978 - DNA, 25 bp, Homo sapien
tctgcagttgcagcagtttgaggaa

SEQ ID NO: 2253979 - DNA, 25 bp, Homo sapien
tgcagttgcagcagtttgaggaaca

SEQ ID NO: 2253980 - DNA, 25 bp, Homo sapien
gcagttgcagcagtttgaggaacat

SEQ ID NO: 2253981 - DNA, 25 bp, Homo sapien
attctgcagttgcagcagtttgagg

SEQ ID NO: 2253982 - DNA, 25 bp, Homo sapien
actcttcactattgggtgcttggta

SEQ ID NO: 2253983 - DNA, 25 bp, Homo sapien
taatacagcctacaaggatcccctg

SEQ ID NO: 2253984 - DNA, 25 bp, Homo sapien
aaatatagtggagctctctggctgg

SEQ ID NO: 2253985 - DNA, 25 bp, Homo sapien
ggagttgattaaaaggatataagca

SEQ ID NO: 2253986 - DNA, 25 bp, Homo sapien
tattactggattctgcaaatctcct

SEQ ID NO: 2253987 - DNA, 25 bp, Homo sapien
atttgtattactggattctgcaaat

SEQ ID NO: 2253988 - DNA, 25 bp, Homo sapien
ttactggattctgcaaatctccttg

SEQ ID NO: 2253989 - DNA, 25 bp, Homo sapien
tttgtattactggattctgcaaatc

SEQ ID NO: 2253990 - DNA, 25 bp, Homo sapien
gaagtataactaacagcggaggaca

SEQ ID NO: 2253991 - DNA, 25 bp, Homo sapien
tgtgtggccactttagcgagcatga

SEQ ID NO: 2253992 - DNA, 25 bp, Homo sapien
taattctagacttggtggccatgcc

SEQ ID NO: 2253993 - DNA, 25 bp, Homo sapien
cttggccccgttggataaacacagc

SEQ ID NO: 2253994 - DNA, 25 bp, Homo sapien
gctggcatcttccttattgtggctc

SEQ ID NO: 2253995 - DNA, 25 bp, Homo sapien
cattctgagcatgcttgctggcatc

SEQ ID NO: 2253996 - DNA, 25 bp, Homo sapien
ctggcatcttccttattgtggctca

SEQ ID NO: 2253997 - DNA, 25 bp, Homo sapien
cttatgtggacgacagcaggcaaac

SEQ ID NO: 2253998 - DNA, 25 bp, Homo sapien
cacatcttatgtggacgacagcagg

SEQ ID NO: 2253999 - DNA, 25 bp, Homo sapien
atgtggacgacagcaggcaaacaga

SEQ ID NO: 2254000 - DNA, 25 bp, Homo sapien
agtcacatcttatgtggacgacagc

SEQ ID NO: 2254001 - DNA, 25 bp, Homo sapien
gaataaccagtagtgatacccagga

SEQ ID NO: 2254002 - DNA, 25 bp, Homo sapien
ccctgggccagaaggaaatccattg

SEQ ID NO: 2254003 - DNA, 25 bp, Homo sapien
taaaataggacaccaatcagagttg

SEQ ID NO: 2254004 - DNA, 25 bp, Homo sapien
tctgtcttgcatcacggataccagc

SEQ ID NO: 2254005 - DNA, 25 bp, Homo sapien
ttctcagtgaggacgattaaagcag

SEQ ID NO: 2254006 - DNA, 25 bp, Homo sapien
tgcactgagtaatccacattggagg

SEQ ID NO: 2254007 - DNA, 25 bp, Homo sapien
tatgcccttaactctataaaatgtc

SEQ ID NO: 2254008 - DNA, 25 bp, Homo sapien
ggaattaccaggactatcaggccag

SEQ ID NO: 2254009 - DNA, 25 bp, Homo sapien
cttaggaagctgccaaatgtagctt

SEQ ID NO: 2254010 - DNA, 25 bp, Homo sapien
taggaagctgccaaatgtagcttcc

SEQ ID NO: 2254011 - DNA, 25 bp, Homo sapien
gaagctgccaaatgtagcttccaaa

SEQ ID NO: 2254012 - DNA, 25 bp, Homo sapien
atccacaaagggatagaggtttcca

SEQ ID NO: 2254013 - DNA, 25 bp, Homo sapien
tcacattgagccctgaagaagcagt

SEQ ID NO: 2254014 - DNA, 25 bp, Homo sapien
tagttgagactgcataacccatggg

SEQ ID NO: 2254015 - DNA, 25 bp, Homo sapien
cacaggcatttcgatgaaggtgaca

SEQ ID NO: 2254016 - DNA, 25 bp, Homo sapien
tctcaagagtaaagctgacgggtct

SEQ ID NO: 2254017 - DNA, 25 bp, Homo sapien
ttgacgaagagatcaatgatcagct

SEQ ID NO: 2254018 - DNA, 25 bp, Homo sapien
aatggagttggcttagcattgacga

SEQ ID NO: 2254019 - DNA, 25 bp, Homo sapien
gatcaatgatcagcttaaattccac

SEQ ID NO: 2254020 - DNA, 25 bp, Homo sapien
cctttgctataaagctttccccaag

SEQ ID NO: 2254021 - DNA, 25 bp, Homo sapien
agacactcgataattcaagtttcta

SEQ ID NO: 2254022 - DNA, 25 bp, Homo sapien
gtagacactcgataattcaagtttc

SEQ ID NO: 2254023 - DNA, 25 bp, Homo sapien
tagacactcgataattcaagtttct

SEQ ID NO: 2254024 - DNA, 25 bp, Homo sapien
tgtagacactcgataattcaagttt

SEQ ID NO: 2254025 - DNA, 25 bp, Homo sapien
tatgttaagagacgtcagtgaccag

SEQ ID NO: 2254026 - DNA, 25 bp, Homo sapien
ccttcggttacatagcagcattggg

SEQ ID NO: 2254027 - DNA, 25 bp, Homo sapien
taagatgtacccaccaaggatagca

SEQ ID NO: 2254028 - DNA, 25 bp, Homo sapien
tttaggcacacaatacacagggcat

SEQ ID NO: 2254029 - DNA, 25 bp, Homo sapien
gcaaggaagctccatagggcttccc

SEQ ID NO: 2254030 - DNA, 25 bp, Homo sapien
tcccattggccttatgcaccaacat

SEQ ID NO: 2254031 - DNA, 25 bp, Homo sapien
tatacaactcatagaattgcaagga

SEQ ID NO: 2254032 - DNA, 25 bp, Homo sapien
tagggcttcccattggccttatgca

SEQ ID NO: 2254033 - DNA, 25 bp, Homo sapien
tgaaataggcaatggtcttggaagc

SEQ ID NO: 2254034 - DNA, 25 bp, Homo sapien
gctaccaactaatatgaccttttct

SEQ ID NO: 2254035 - DNA, 25 bp, Homo sapien
tgaagctttgaagcattgaaatagg

SEQ ID NO: 2254036 - DNA, 25 bp, Homo sapien
cttggaagcattcaagctaccaact

SEQ ID NO: 2254037 - DNA, 25 bp, Homo sapien
aaagtgtatttgggacattctggac

SEQ ID NO: 2254038 - DNA, 25 bp, Homo sapien
ttctggacaatgctcccaataccac

SEQ ID NO: 2254039 - DNA, 25 bp, Homo sapien
tttgggacattctggacaatgctcc

SEQ ID NO: 2254040 - DNA, 25 bp, Homo sapien
gacattctggacaatgctcccaata

SEQ ID NO: 2254041 - DNA, 25 bp, Homo sapien
tccagcacctaatactgaagtacaa

SEQ ID NO: 2254042 - DNA, 25 bp, Homo sapien
ttctctattggaggtccagcaccta

SEQ ID NO: 2254043 - DNA, 25 bp, Homo sapien
gacaacgacaagtctgtgatgaaga

SEQ ID NO: 2254044 - DNA, 25 bp, Homo sapien
gatgaagaatttttggagtgttctc

SEQ ID NO: 2254045 - DNA, 25 bp, Homo sapien
tgtgctcatttcattcagaaagacc

SEQ ID NO: 2254046 - DNA, 25 bp, Homo sapien
agctctctgatgtgctcatttcatt

SEQ ID NO: 2254047 - DNA, 25 bp, Homo sapien
tctgatgtgctcatttcattcagaa

SEQ ID NO: 2254048 - DNA, 25 bp, Homo sapien
gctcatttcattcagaaagaccatt

SEQ ID NO: 2254049 - DNA, 25 bp, Homo sapien
ggatctatgtcttgtttaaggaaca

SEQ ID NO: 2254050 - DNA, 25 bp, Homo sapien
tctgtcaaatggcaaaagcacgatt

SEQ ID NO: 2254051 - DNA, 25 bp, Homo sapien
ctttgccacttttggactgcatgac

SEQ ID NO: 2254052 - DNA, 25 bp, Homo sapien
gttagtcaaactcattaagcctcaa

SEQ ID NO: 2254053 - DNA, 25 bp, Homo sapien
aattatccaggtgcagagagccaaa

SEQ ID NO: 2254054 - DNA, 25 bp, Homo sapien
taccaactgttgagacaggcttgca

SEQ ID NO: 2254055 - DNA, 25 bp, Homo sapien
tccatggcacacaacactaacgagt

SEQ ID NO: 2254056 - DNA, 25 bp, Homo sapien
cacttcgacgtgtttaagagttggc

SEQ ID NO: 2254057 - DNA, 25 bp, Homo sapien
aatcatctctatatccccaacagtg

SEQ ID NO: 2254058 - DNA, 25 bp, Homo sapien
caacagtgccaaacgcagagccttg

SEQ ID NO: 2254059 - DNA, 25 bp, Homo sapien
gtctgctttggattgcatgaacaca

SEQ ID NO: 2254060 - DNA, 25 bp, Homo sapien
ttgaatcaggaggtgctctgtctgc

SEQ ID NO: 2254061 - DNA, 25 bp, Homo sapien
ggagtaaggaggtattgcatcgtgg

SEQ ID NO: 2254062 - DNA, 25 bp, Homo sapien
gcttcactgcttcaggtttgtcagg

SEQ ID NO: 2254063 - DNA, 25 bp, Homo sapien
gtttgtcaggcacgaggagacagta

SEQ ID NO: 2254064 - DNA, 25 bp, Homo sapien
gagacagtactgaacttttccaaca

SEQ ID NO: 2254065 - DNA, 25 bp, Homo sapien
cctcagagaactttcctcggttttg

SEQ ID NO: 2254066 - DNA, 25 bp, Homo sapien
tgcatttgtattcccttccaactat

SEQ ID NO: 2254067 - DNA, 25 bp, Homo sapien
tcctctacaattgactctccaacag

SEQ ID NO: 2254068 - DNA, 25 bp, Homo sapien
taatctgcaggttcaagataactgc

SEQ ID NO: 2254069 - DNA, 25 bp, Homo sapien
tcttctttatagacaatgcagcttc

SEQ ID NO: 2254070 - DNA, 25 bp, Homo sapien
tcagagtgggcttaggcacagatga

SEQ ID NO: 2254071 - DNA, 25 bp, Homo sapien
ctcagagtgggcttaggcacagatg

SEQ ID NO: 2254072 - DNA, 25 bp, Homo sapien
gctcagagtgggcttaggcacagat

SEQ ID NO: 2254073 - DNA, 25 bp, Homo sapien
tggctcagagtgggcttaggcacag

SEQ ID NO: 2254074 - DNA, 25 bp, Homo sapien
cacatgtaaaactgctctctgatga

SEQ ID NO: 2254075 - DNA, 25 bp, Homo sapien
ccacatgtaaaactgctctctgatg

SEQ ID NO: 2254076 - DNA, 25 bp, Homo sapien
catgtaaaactgctctctgatgatt

SEQ ID NO: 2254077 - DNA, 25 bp, Homo sapien
ctctctgatgattatactggttccc

SEQ ID NO: 2254078 - DNA, 25 bp, Homo sapien
gtatctggttttcgcattcaccaga

SEQ ID NO: 2254079 - DNA, 25 bp, Homo sapien
gagtatctggttttcgcattcacca

SEQ ID NO: 2254080 - DNA, 25 bp, Homo sapien
tttcaagagtatctggttttcgcat

SEQ ID NO: 2254081 - DNA, 25 bp, Homo sapien
aagagtatctggttttcgcattcac

SEQ ID NO: 2254082 - DNA, 25 bp, Homo sapien
gggaacccaatatcttgagggccat

SEQ ID NO: 2254083 - DNA, 25 bp, Homo sapien
ctgatcttttggtagctctattagg

SEQ ID NO: 2254084 - DNA, 25 bp, Homo sapien
ggtagctctattagggaacccaata

SEQ ID NO: 2254085 - DNA, 25 bp, Homo sapien
tattagggaacccaatatcttgagg

SEQ ID NO: 2254086 - DNA, 25 bp, Homo sapien
ctttttcagttcaaacgttctctca

SEQ ID NO: 2254087 - DNA, 25 bp, Homo sapien
aggtttctgtctacatcctctgctt

SEQ ID NO: 2254088 - DNA, 25 bp, Homo sapien
cagttcaaacgttctctcataatgg

SEQ ID NO: 2254089 - DNA, 25 bp, Homo sapien
tgcaggtttctgtctacatcctctg

SEQ ID NO: 2254090 - DNA, 25 bp, Homo sapien
gtttgtaacaagtggaacatactcc

SEQ ID NO: 2254091 - DNA, 25 bp, Homo sapien
ccatacctgtttgtaacaagtggaa

SEQ ID NO: 2254092 - DNA, 25 bp, Homo sapien
tgtaacaagtggaacatactccaca

SEQ ID NO: 2254093 - DNA, 25 bp, Homo sapien
cctgtttgtaacaagtggaacatac

SEQ ID NO: 2254094 - DNA, 25 bp, Homo sapien
taaagtgggctctatatccaatgac

SEQ ID NO: 2254095 - DNA, 25 bp, Homo sapien
gactggagtccttgtaagacgagag

SEQ ID NO: 2254096 - DNA, 25 bp, Homo sapien
gaagatggccctaatgatgccttga

SEQ ID NO: 2254097 - DNA, 25 bp, Homo sapien
acgagaggaggacgtacaggcacac

SEQ ID NO: 2254098 - DNA, 25 bp, Homo sapien
tacaatagactactaggcagcaatt

SEQ ID NO: 2254099 - DNA, 25 bp, Homo sapien
ggcagcaattaaaatgatgctctga

SEQ ID NO: 2254100 - DNA, 25 bp, Homo sapien
caaatttaggtgcaagctgtagcat

SEQ ID NO: 2254101 - DNA, 25 bp, Homo sapien
gctgacaaatggtacctacctaaat

SEQ ID NO: 2254102 - DNA, 25 bp, Homo sapien
tttctgcccttgagcctttatgtta

SEQ ID NO: 2254103 - DNA, 25 bp, Homo sapien
gccctggtcacaaggtacttcaact

SEQ ID NO: 2254104 - DNA, 25 bp, Homo sapien
ccctggtcacaaggtacttcaactt

SEQ ID NO: 2254105 - DNA, 25 bp, Homo sapien
tctgcccttgagcctttatgttact

SEQ ID NO: 2254106 - DNA, 25 bp, Homo sapien
ttagttaagtccagaaccatagcct

SEQ ID NO: 2254107 - DNA, 25 bp, Homo sapien
cttaaaaggtgtgaaaactgctaca

SEQ ID NO: 2254108 - DNA, 25 bp, Homo sapien
gctacattagtagacttctggtcat

SEQ ID NO: 2254109 - DNA, 25 bp, Homo sapien
tccagaaccatagcctgaaatactg

SEQ ID NO: 2254110 - DNA, 25 bp, Homo sapien
cttcagtggagctacaatacaacaa

SEQ ID NO: 2254111 - DNA, 25 bp, Homo sapien
ggagctacaatacaacaaagacgat

SEQ ID NO: 2254112 - DNA, 25 bp, Homo sapien
gctacaatacaacaaagacgataaa

SEQ ID NO: 2254113 - DNA, 25 bp, Homo sapien
tcagtggagctacaatacaacaaag

SEQ ID NO: 2254114 - DNA, 25 bp, Homo sapien
cgtaggtggttttctatgtggtcca

SEQ ID NO: 2254115 - DNA, 25 bp, Homo sapien
gtggttttctatgtggtccactttc

SEQ ID NO: 2254116 - DNA, 25 bp, Homo sapien
gttttctatgtggtccactttccat

SEQ ID NO: 2254117 - DNA, 25 bp, Homo sapien
aggtggttttctatgtggtccactt

SEQ ID NO: 2254118 - DNA, 25 bp, Homo sapien
ggcccaagtataagaaatggatata

SEQ ID NO: 2254119 - DNA, 25 bp, Homo sapien
ccaagtataagaaatggatatacta

SEQ ID NO: 2254120 - DNA, 25 bp, Homo sapien
gcccaagtataagaaatggatatac

SEQ ID NO: 2254121 - DNA, 25 bp, Homo sapien
aagtataagaaatggatatactatt

SEQ ID NO: 2254122 - DNA, 25 bp, Homo sapien
gaatgtttagcaacatcgctgacct

SEQ ID NO: 2254123 - DNA, 25 bp, Homo sapien
gacagtgttcctgttcccacctctg

SEQ ID NO: 2254124 - DNA, 25 bp, Homo sapien
actagacacctgtagcaaccctgca

SEQ ID NO: 2254125 - DNA, 25 bp, Homo sapien
agctttcccctggagtaggacagtg

SEQ ID NO: 2254126 - DNA, 25 bp, Homo sapien
gagactacacaaaggaaggcatcca

SEQ ID NO: 2254127 - DNA, 25 bp, Homo sapien
gagtgccttactatctgcagagaac

SEQ ID NO: 2254128 - DNA, 25 bp, Homo sapien
gagaactgtatgaaatgcccaagag

SEQ ID NO: 2254129 - DNA, 25 bp, Homo sapien
tgcacacagaaatgcttacctggga

SEQ ID NO: 2254130 - DNA, 25 bp, Homo sapien
acagtcatcaacaaggtgcctatca

SEQ ID NO: 2254131 - DNA, 25 bp, Homo sapien
gattccatattactcatgcctatgg

SEQ ID NO: 2254132 - DNA, 25 bp, Homo sapien
tagtcctagtagtctggaagagccc

SEQ ID NO: 2254133 - DNA, 25 bp, Homo sapien
ggtaatctgggttactgattccata

SEQ ID NO: 2254134 - DNA, 25 bp, Homo sapien
gcaccggtccctttctgcacctttc

SEQ ID NO: 2254135 - DNA, 25 bp, Homo sapien
ggtccctttctgcacctttcctctc

SEQ ID NO: 2254136 - DNA, 25 bp, Homo sapien
cagcaccggtccctttctgcacctt

SEQ ID NO: 2254137 - DNA, 25 bp, Homo sapien
tccctttctgcacctttcctctcat

SEQ ID NO: 2254138 - DNA, 25 bp, Homo sapien
tgacaggctcatgtgaacatcctcc

SEQ ID NO: 2254139 - DNA, 25 bp, Homo sapien
tatggagggctttgtacttagacac

SEQ ID NO: 2254140 - DNA, 25 bp, Homo sapien
tgaaggtacacagtaagtgacaggc

SEQ ID NO: 2254141 - DNA, 25 bp, Homo sapien
ggatgtatcaccactcagcacagta

SEQ ID NO: 2254142 - DNA, 25 bp, Homo sapien
caaccaagtaggagcaactggaagg

SEQ ID NO: 2254143 - DNA, 25 bp, Homo sapien
aattcttgctgccaggaaagcagac

SEQ ID NO: 2254144 - DNA, 25 bp, Homo sapien
cagagagagaaaaccgttcactccc

SEQ ID NO: 2254145 - DNA, 25 bp, Homo sapien
aagtagacctgggacactccagctt

SEQ ID NO: 2254146 - DNA, 25 bp, Homo sapien
gggcatcatacattactgaggcttg

SEQ ID NO: 2254147 - DNA, 25 bp, Homo sapien
tgtggataattccttctatgtcggg

SEQ ID NO: 2254148 - DNA, 25 bp, Homo sapien
atgagggccatgtacattatggaga

SEQ ID NO: 2254149 - DNA, 25 bp, Homo sapien
cacatctaaaagtaccactagccag

SEQ ID NO: 2254150 - DNA, 25 bp, Homo sapien
ctgcacttttagagcccaggcgggt

SEQ ID NO: 2254151 - DNA, 25 bp, Homo sapien
tatctggtccggaatgcactgttcc

SEQ ID NO: 2254152 - DNA, 25 bp, Homo sapien
ctctcttgcattccagttgccactg

SEQ ID NO: 2254153 - DNA, 25 bp, Homo sapien
gtgggatccgggcagctagaccacc

SEQ ID NO: 2254154 - DNA, 25 bp, Homo sapien
tgcagctagctatgtgttggcccaa

SEQ ID NO: 2254155 - DNA, 25 bp, Homo sapien
cagctgccacatcacgaggctaatg

SEQ ID NO: 2254156 - DNA, 25 bp, Homo sapien
ggcgccgggcagctctttgccaagt

SEQ ID NO: 2254157 - DNA, 25 bp, Homo sapien
gccaagtttcaccttcggtgacaca

SEQ ID NO: 2254158 - DNA, 25 bp, Homo sapien
cacactaaggtttgtaataaacctg

SEQ ID NO: 2254159 - DNA, 25 bp, Homo sapien
cagagccttgaaacttgcctggata

SEQ ID NO: 2254160 - DNA, 25 bp, Homo sapien
tggctggcttcttgggctatgcatg

SEQ ID NO: 2254161 - DNA, 25 bp, Homo sapien
gaaacttgcctggatatggtggctg

SEQ ID NO: 2254162 - DNA, 25 bp, Homo sapien
tgcatggaattgtcctccattgtcc

SEQ ID NO: 2254163 - DNA, 25 bp, Homo sapien
tactggaaacctactacctgtgctt

SEQ ID NO: 2254164 - DNA, 25 bp, Homo sapien
tttcaaacagaatcaaggtccccgc

SEQ ID NO: 2254165 - DNA, 25 bp, Homo sapien
ggccatatttcattcagcagcacaa

SEQ ID NO: 2254166 - DNA, 25 bp, Homo sapien
gatacactgtgggtatgagccctaa

SEQ ID NO: 2254167 - DNA, 25 bp, Homo sapien
ggtctcccaacggtagcctgaaata

SEQ ID NO: 2254168 - DNA, 25 bp, Homo sapien
gaagtaaccacctgatggaaatcag

SEQ ID NO: 2254169 - DNA, 25 bp, Homo sapien
tccagaaacaaacgagaaatactcc

SEQ ID NO: 2254170 - DNA, 25 bp, Homo sapien
gaatgacgtgcctagatcaatctgg

SEQ ID NO: 2254171 - DNA, 25 bp, Homo sapien
tgctccgtggccattcggacacttg

SEQ ID NO: 2254172 - DNA, 25 bp, Homo sapien
gacacttgcacctaaggcacctgct

SEQ ID NO: 2254173 - DNA, 25 bp, Homo sapien
ggtcgctgcggtccagtgtgcttgg

SEQ ID NO: 2254174 - DNA, 25 bp, Homo sapien
gggactcggcgtgggtcgctgcggt

SEQ ID NO: 2254175 - DNA, 25 bp, Homo sapien
tgggcactagtgacaaggggacatc

SEQ ID NO: 2254176 - DNA, 25 bp, Homo sapien
cgaggctgcgctgccaaagcgcagc

SEQ ID NO: 2254177 - DNA, 25 bp, Homo sapien
ggcttggcgaggctgcgctgccaaa

SEQ ID NO: 2254178 - DNA, 25 bp, Homo sapien
tgacaaggggacatcagcctttgtt

SEQ ID NO: 2254179 - DNA, 25 bp, Homo sapien
tttgcacgcggcgtgtcgaagggtg

SEQ ID NO: 2254180 - DNA, 25 bp, Homo sapien
gcggcgtgtcgaagggtgcaaactc

SEQ ID NO: 2254181 - DNA, 25 bp, Homo sapien
cacgcggcgtgtcgaagggtgcaaa

SEQ ID NO: 2254182 - DNA, 25 bp, Homo sapien
tgcacgcggcgtgtcgaagggtgca

SEQ ID NO: 2254183 - DNA, 25 bp, Homo sapien
ataaggagtttaggattaggaggtg

SEQ ID NO: 2254184 - DNA, 25 bp, Homo sapien
tggataaggagtttaggattaggag

SEQ ID NO: 2254185 - DNA, 25 bp, Homo sapien
gtggataaggagtttaggattagga

SEQ ID NO: 2254186 - DNA, 25 bp, Homo sapien
aggagtttaggattaggaggtgtcg

SEQ ID NO: 2254187 - DNA, 25 bp, Homo sapien
tcatgggcagcttaggctccgggaa

SEQ ID NO: 2254188 - DNA, 25 bp, Homo sapien
aaagtggtgcaaacctagatccacc

SEQ ID NO: 2254189 - DNA, 25 bp, Homo sapien
cgagggtcgacaattccgcgaggaa

SEQ ID NO: 2254190 - DNA, 25 bp, Homo sapien
gaaaggaaagcaggcggactcggcg

SEQ ID NO: 2254191 - DNA, 25 bp, Homo sapien
tttccactcatagatcccagcttgc

SEQ ID NO: 2254192 - DNA, 25 bp, Homo sapien
tcgctcagaagacggaagtcctcgc

SEQ ID NO: 2254193 - DNA, 25 bp, Homo sapien
aagtcctcgccgagcgggtcggact

SEQ ID NO: 2254194 - DNA, 25 bp, Homo sapien
gcttgcttgacaaggttcgctcaga

SEQ ID NO: 2254195 - DNA, 25 bp, Homo sapien
cggaatccgcttttccccaccgctg

SEQ ID NO: 2254196 - DNA, 25 bp, Homo sapien
ggcggcaagtctcgaccacgagctc

SEQ ID NO: 2254197 - DNA, 25 bp, Homo sapien
cttagggcggcaagtctcgaccacg

SEQ ID NO: 2254198 - DNA, 25 bp, Homo sapien
tagggcggcaagtctcgaccacgag

SEQ ID NO: 2254199 - DNA, 25 bp, Homo sapien
ccgcgcgggccgctcgctgggagtt

SEQ ID NO: 2254200 - DNA, 25 bp, Homo sapien
gggactccccggcttcactgccggc

SEQ ID NO: 2254201 - DNA, 25 bp, Homo sapien
aagaagtgaagagacaaagcggcgc

SEQ ID NO: 2254202 - DNA, 25 bp, Homo sapien
tcagcttctgcccgcctgcggagag

SEQ ID NO: 2254203 - DNA, 25 bp, Homo sapien
ccggtcctagagagccacgaatcaa

SEQ ID NO: 2254204 - DNA, 25 bp, Homo sapien
aactctccggtcctagagagccacg

SEQ ID NO: 2254205 - DNA, 25 bp, Homo sapien
caacaccgcggcgcattctatataa

SEQ ID NO: 2254206 - DNA, 25 bp, Homo sapien
tagagagccacgaatcaacaccgcg

SEQ ID NO: 2254207 - DNA, 25 bp, Homo sapien
agttgagacagtccggctctcagtg

SEQ ID NO: 2254208 - DNA, 25 bp, Homo sapien
tctggctagctgctcaagttgagac

SEQ ID NO: 2254209 - DNA, 25 bp, Homo sapien
gagtcgacgacttttcgcttctggc

SEQ ID NO: 2254210 - DNA, 25 bp, Homo sapien
tcagtccgggagtcgacgacttttc

SEQ ID NO: 2254211 - DNA, 25 bp, Homo sapien
gtccctggtagcctcgcgctctgtt

SEQ ID NO: 2254212 - DNA, 25 bp, Homo sapien
ggccttttttttgtgcatgcgagtc

SEQ ID NO: 2254213 - DNA, 25 bp, Homo sapien
ttgtgcatgcgagtccctggtagcc

SEQ ID NO: 2254214 - DNA, 25 bp, Homo sapien
cctcgcgctctgttgagggactggg

SEQ ID NO: 2254215 - DNA, 25 bp, Homo sapien
tagagacattgtcatcaggcaccac

SEQ ID NO: 2254216 - DNA, 25 bp, Homo sapien
tgtagagacattgtcatcaggcacc

SEQ ID NO: 2254217 - DNA, 25 bp, Homo sapien
aagactgcttctcactggatgaaac

SEQ ID NO: 2254218 - DNA, 25 bp, Homo sapien
caagactgcttctcactggatgaaa

SEQ ID NO: 2254219 - DNA, 25 bp, Homo sapien
cattgccagtcgttttgcttctgat

SEQ ID NO: 2254220 - DNA, 25 bp, Homo sapien
cactgcattgccagtcgttttgctt

SEQ ID NO: 2254221 - DNA, 25 bp, Homo sapien
tgcattgccagtcgttttgcttctg

SEQ ID NO: 2254222 - DNA, 25 bp, Homo sapien
ttgccagtcgttttgcttctgatcc

SEQ ID NO: 2254223 - DNA, 25 bp, Homo sapien
tctctctttcacaaggtctgtctga

SEQ ID NO: 2254224 - DNA, 25 bp, Homo sapien
tgtctgaactataggaattcctgcc

SEQ ID NO: 2254225 - DNA, 25 bp, Homo sapien
ctataggaattcctgccctgtgcag

SEQ ID NO: 2254226 - DNA, 25 bp, Homo sapien
tcacaaggtctgtctgaactatagg

SEQ ID NO: 2254227 - DNA, 25 bp, Homo sapien
gaagcttcttggtcatgtcgtcact

SEQ ID NO: 2254228 - DNA, 25 bp, Homo sapien
ctgttgttattagcgcccacggtca

SEQ ID NO: 2254229 - DNA, 25 bp, Homo sapien
cttagaagtggagacgcaatgggcc

SEQ ID NO: 2254230 - DNA, 25 bp, Homo sapien
gaaacaagcaagatcccaccatgga

SEQ ID NO: 2254231 - DNA, 25 bp, Homo sapien
ctctgtcaaggcgaagggaccaaac

SEQ ID NO: 2254232 - DNA, 25 bp, Homo sapien
gtggagcaaagagctcacggctgtt

SEQ ID NO: 2254233 - DNA, 25 bp, Homo sapien
ccaaggctctgtcaaggcgaaggga

SEQ ID NO: 2254234 - DNA, 25 bp, Homo sapien
tgtcaaggcgaagggaccaaaccag

SEQ ID NO: 2254235 - DNA, 25 bp, Homo sapien
gaaatcctcagaataacaaaagcgg

SEQ ID NO: 2254236 - DNA, 25 bp, Homo sapien
cggcccttgagatccagaaatcctc

SEQ ID NO: 2254237 - DNA, 25 bp, Homo sapien
gagatccagaaatcctcagaataac

SEQ ID NO: 2254238 - DNA, 25 bp, Homo sapien
agaataacaaaagcggaggcagcca

SEQ ID NO: 2254239 - DNA, 25 bp, Homo sapien
gaggtgcttattctgtgagcctctg

SEQ ID NO: 2254240 - DNA, 25 bp, Homo sapien
ctgtggcagttaggtcttcactact

SEQ ID NO: 2254241 - DNA, 25 bp, Homo sapien
taggtcttcactactaatgtccaca

SEQ ID NO: 2254242 - DNA, 25 bp, Homo sapien
cacaatggggaggtgcttattctgt

SEQ ID NO: 2254243 - DNA, 25 bp, Homo sapien
tagtaggcagacaccccttgatgtc

SEQ ID NO: 2254244 - DNA, 25 bp, Homo sapien
cttgtagtaggcagacaccccttga

SEQ ID NO: 2254245 - DNA, 25 bp, Homo sapien
gacaccccttgatgtctgtcctgca

SEQ ID NO: 2254246 - DNA, 25 bp, Homo sapien
caccccttgatgtctgtcctgcagg

SEQ ID NO: 2254247 - DNA, 25 bp, Homo sapien
taccaatacagggagagggtctgca

SEQ ID NO: 2254248 - DNA, 25 bp, Homo sapien
tcaccaccaggaacagatatagcag

SEQ ID NO: 2254249 - DNA, 25 bp, Homo sapien
gcaacactagcttcaattgtgggca

SEQ ID NO: 2254250 - DNA, 25 bp, Homo sapien
taacgcataggcataaggtcccatt

SEQ ID NO: 2254251 - DNA, 25 bp, Homo sapien
taaaaacaggattctgtgagtgctg

SEQ ID NO: 2254252 - DNA, 25 bp, Homo sapien
aaaaacaggattctgtgagtgctga

SEQ ID NO: 2254253 - DNA, 25 bp, Homo sapien
tggaccatgtacctggctgtccact

SEQ ID NO: 2254254 - DNA, 25 bp, Homo sapien
gttttggaccatgtacctggctgtc

SEQ ID NO: 2254255 - DNA, 25 bp, Homo sapien
ggacagagttttggaccatgtacct

SEQ ID NO: 2254256 - DNA, 25 bp, Homo sapien
gaaagacattggcaaggaaaaacac

SEQ ID NO: 2254257 - DNA, 25 bp, Homo sapien
caagctattgtcaattgaggatttg

SEQ ID NO: 2254258 - DNA, 25 bp, Homo sapien
gggaagctcatgatcatagcagtgg

SEQ ID NO: 2254259 - DNA, 25 bp, Homo sapien
tatagctagatagtacagtggtacc

SEQ ID NO: 2254260 - DNA, 25 bp, Homo sapien
gcagcagcaatcaagctattgtcaa

SEQ ID NO: 2254261 - DNA, 25 bp, Homo sapien
gccagaatggtaagagtcactctca

SEQ ID NO: 2254262 - DNA, 25 bp, Homo sapien
tttaatgcagaggcttattgccaga

SEQ ID NO: 2254263 - DNA, 25 bp, Homo sapien
cttccccagagcaaggtgtttaatg

SEQ ID NO: 2254264 - DNA, 25 bp, Homo sapien
actctcacatctgtatgggtccaaa

SEQ ID NO: 2254265 - DNA, 25 bp, Homo sapien
cttgcagagtcattagccaaggctt

SEQ ID NO: 2254266 - DNA, 25 bp, Homo sapien
tgtctccctattaactctggtggtg

SEQ ID NO: 2254267 - DNA, 25 bp, Homo sapien
tcaacagataatcaggcccttcttc

SEQ ID NO: 2254268 - DNA, 25 bp, Homo sapien
gaaggataaccttgcatttcccact

SEQ ID NO: 2254269 - DNA, 25 bp, Homo sapien
tggccagaagcaggctactgtatcc

SEQ ID NO: 2254270 - DNA, 25 bp, Homo sapien
ggttggccagaagcaggctactgta

SEQ ID NO: 2254271 - DNA, 25 bp, Homo sapien
ccagaagcaggctactgtatcccat

SEQ ID NO: 2254272 - DNA, 25 bp, Homo sapien
gataaggttggccagaagcaggcta

SEQ ID NO: 2254273 - DNA, 25 bp, Homo sapien
aggaggaagagttgcaattgactcc

SEQ ID NO: 2254274 - DNA, 25 bp, Homo sapien
agtcctgttgactaatcggtttggg

SEQ ID NO: 2254275 - DNA, 25 bp, Homo sapien
tgctgattcagtcctgttgactaat

SEQ ID NO: 2254276 - DNA, 25 bp, Homo sapien
tgcaattgactcctgaaagccctgc

SEQ ID NO: 2254277 - DNA, 25 bp, Homo sapien
tgggcgataggaaggtcttgactaa

SEQ ID NO: 2254278 - DNA, 25 bp, Homo sapien
tatcagcatgattgctctgcttctc

SEQ ID NO: 2254279 - DNA, 25 bp, Homo sapien
cataaatggcagatctgatatcagc

SEQ ID NO: 2254280 - DNA, 25 bp, Homo sapien
taaagggcttcaggacactaatcca

SEQ ID NO: 2254281 - DNA, 25 bp, Homo sapien
gaaatatcttcagtgacctgggaat

SEQ ID NO: 2254282 - DNA, 25 bp, Homo sapien
caaggccagtaccacactcatgaag

SEQ ID NO: 2254283 - DNA, 25 bp, Homo sapien
gaagttaaattctccactctgtcca

SEQ ID NO: 2254284 - DNA, 25 bp, Homo sapien
tttggtctactctatcacaaggcca

SEQ ID NO: 2254285 - DNA, 25 bp, Homo sapien
gatactatggttctccactatggca

SEQ ID NO: 2254286 - DNA, 25 bp, Homo sapien
agctgacattgacccagacatattg

SEQ ID NO: 2254287 - DNA, 25 bp, Homo sapien
taactaaaaaagctgacattgaccc

SEQ ID NO: 2254288 - DNA, 25 bp, Homo sapien
cattgtaactaaaaaagctgacatt

SEQ ID NO: 2254289 - DNA, 25 bp, Homo sapien
cattgacccagacatattgtactct

SEQ ID NO: 2254290 - DNA, 25 bp, Homo sapien
gcagcaggctcaaaggcataagtca

SEQ ID NO: 2254291 - DNA, 25 bp, Homo sapien
agttgaagttgcctagaccagagga

SEQ ID NO: 2254292 - DNA, 25 bp, Homo sapien
tctggtttcgtgttcaccatggaac

SEQ ID NO: 2254293 - DNA, 25 bp, Homo sapien
ttaactagcataccccgaagtggag

SEQ ID NO: 2254294 - DNA, 25 bp, Homo sapien
caggttactccagaagctgtttgag

SEQ ID NO: 2254295 - DNA, 25 bp, Homo sapien
ccgaagctgagattctaacaatgca

SEQ ID NO: 2254296 - DNA, 25 bp, Homo sapien
gcttcaaaggcccaccgaagctgag

SEQ ID NO: 2254297 - DNA, 25 bp, Homo sapien
cggcacacggagacagcaggttact

SEQ ID NO: 2254298 - DNA, 25 bp, Homo sapien
ggccacagggatttcgtttctctca

SEQ ID NO: 2254299 - DNA, 25 bp, Homo sapien
cgttgtatctatttcctaaggtgca

SEQ ID NO: 2254300 - DNA, 25 bp, Homo sapien
acagatatgctaaaaggacaggtgc

SEQ ID NO: 2254301 - DNA, 25 bp, Homo sapien
caatgaatggtatgctggaactggc

SEQ ID NO: 2254302 - DNA, 25 bp, Homo sapien
tcattcaatccgaacaatattttct

SEQ ID NO: 2254303 - DNA, 25 bp, Homo sapien
tcaatccgaacaatattttcttcct

SEQ ID NO: 2254304 - DNA, 25 bp, Homo sapien
ttcaatccgaacaatattttcttcc

SEQ ID NO: 2254305 - DNA, 25 bp, Homo sapien
ctagggatctatatttgcttggaga

SEQ ID NO: 2254306 - DNA, 25 bp, Homo sapien
tctgctagggatctatatttgcttg

SEQ ID NO: 2254307 - DNA, 25 bp, Homo sapien
ctgctagggatctatatttgcttgg

SEQ ID NO: 2254308 - DNA, 25 bp, Homo sapien
gctagggatctatatttgcttggag

SEQ ID NO: 2254309 - DNA, 25 bp, Homo sapien
gaacaaaatttactcatgccccgaa

SEQ ID NO: 2254310 - DNA, 25 bp, Homo sapien
ggcacatacagacagtagccctgaa

SEQ ID NO: 2254311 - DNA, 25 bp, Homo sapien
gagctcaatgtcttttgcgcagtat

SEQ ID NO: 2254312 - DNA, 25 bp, Homo sapien
aataatccaaggcacaccgattgca

SEQ ID NO: 2254313 - DNA, 25 bp, Homo sapien
tacttgccatttgacatagtagctt

SEQ ID NO: 2254314 - DNA, 25 bp, Homo sapien
ctacttgccatttgacatagtagct

SEQ ID NO: 2254315 - DNA, 25 bp, Homo sapien
acttgccatttgacatagtagcttc

SEQ ID NO: 2254316 - DNA, 25 bp, Homo sapien
cttgccatttgacatagtagcttca

SEQ ID NO: 2254317 - DNA, 25 bp, Homo sapien
ggagagccatctccgacacaggtct

SEQ ID NO: 2254318 - DNA, 25 bp, Homo sapien
taggagagccatctccgacacaggt

SEQ ID NO: 2254319 - DNA, 25 bp, Homo sapien
tataggagagccatctccgacacag

SEQ ID NO: 2254320 - DNA, 25 bp, Homo sapien
tcaatataggagagccatctccgac

SEQ ID NO: 2254321 - DNA, 25 bp, Homo sapien
gatttctgcagattgtgatgcctca

SEQ ID NO: 2254322 - DNA, 25 bp, Homo sapien
tgaccattccgcaggttcttcagag

SEQ ID NO: 2254323 - DNA, 25 bp, Homo sapien
tcttcagagatttctgcagattgtg

SEQ ID NO: 2254324 - DNA, 25 bp, Homo sapien
cataagtagggtagaaatagttgct

SEQ ID NO: 2254325 - DNA, 25 bp, Homo sapien
gcttctgcctgaactgacgcaattg

SEQ ID NO: 2254326 - DNA, 25 bp, Homo sapien
cagtgctggtgtgttccaattcagt

SEQ ID NO: 2254327 - DNA, 25 bp, Homo sapien
ctcacagacctccaccacagtgctg

SEQ ID NO: 2254328 - DNA, 25 bp, Homo sapien
gaactgacgcaattgcctcacagac

SEQ ID NO: 2254329 - DNA, 25 bp, Homo sapien
taaaactaagtgagcttttgtacag

SEQ ID NO: 2254330 - DNA, 25 bp, Homo sapien
ataaaactaagtgagcttttgtaca

SEQ ID NO: 2254331 - DNA, 25 bp, Homo sapien
aaaactaagtgagcttttgtacagt

SEQ ID NO: 2254332 - DNA, 25 bp, Homo sapien
tataaaactaagtgagcttttgtac

SEQ ID NO: 2254333 - DNA, 25 bp, Homo sapien
ctgttaattgatcctgttgctttct

SEQ ID NO: 2254334 - DNA, 25 bp, Homo sapien
aaatctgaaacttatcccgttctgt

SEQ ID NO: 2254335 - DNA, 25 bp, Homo sapien
acttatcccgttctgttaattgatc

SEQ ID NO: 2254336 - DNA, 25 bp, Homo sapien
cgttctgttaattgatcctgttgct

SEQ ID NO: 2254337 - DNA, 25 bp, Homo sapien
tttcttttagccacgtcatcttcac

SEQ ID NO: 2254338 - DNA, 25 bp, Homo sapien
tcaaaagttcctgctgcttcaacaa

SEQ ID NO: 2254339 - DNA, 25 bp, Homo sapien
tttcttatttcttttagccacgtca

SEQ ID NO: 2254340 - DNA, 25 bp, Homo sapien
tcatcttcacatctacattagaagc

SEQ ID NO: 2254341 - DNA, 25 bp, Homo sapien
tacatattcagtgattccaacttca

SEQ ID NO: 2254342 - DNA, 25 bp, Homo sapien
ttacatattcagtgattccaacttc

SEQ ID NO: 2254343 - DNA, 25 bp, Homo sapien
tcaaacttgcggttatcacctttta

SEQ ID NO: 2254344 - DNA, 25 bp, Homo sapien
cagatttcaaacttgcggttatcac

SEQ ID NO: 2254345 - DNA, 25 bp, Homo sapien
taaaactgtatgacgggtatctgtc

SEQ ID NO: 2254346 - DNA, 25 bp, Homo sapien
cgctgcattggtttgaatctagcca

SEQ ID NO: 2254347 - DNA, 25 bp, Homo sapien
tcttgtgccctatccaaacgctgaa

SEQ ID NO: 2254348 - DNA, 25 bp, Homo sapien
ttcatacaagaaaaggtgtcgctgc

SEQ ID NO: 2254349 - DNA, 25 bp, Homo sapien
gcatagaatcattaactgacttcag

SEQ ID NO: 2254350 - DNA, 25 bp, Homo sapien
gcaatctgatgcatagaatcattaa

SEQ ID NO: 2254351 - DNA, 25 bp, Homo sapien
atcattaactgacttcagtaaatcc

SEQ ID NO: 2254352 - DNA, 25 bp, Homo sapien
aatccagcattgcatcgagtgcctt

SEQ ID NO: 2254353 - DNA, 25 bp, Homo sapien
cagatccttcacagtctttgctata

SEQ ID NO: 2254354 - DNA, 25 bp, Homo sapien
aacagagcagatccttcacagtctt

SEQ ID NO: 2254355 - DNA, 25 bp, Homo sapien
cttcaacagagcagatccttcacag

SEQ ID NO: 2254356 - DNA, 25 bp, Homo sapien
tcaacagagcagatccttcacagtc

SEQ ID NO: 2254357 - DNA, 25 bp, Homo sapien
actgatatttagtgattcgttgcac

SEQ ID NO: 2254358 - DNA, 25 bp, Homo sapien
ggtttgagtaaataggaatccagtc

SEQ ID NO: 2254359 - DNA, 25 bp, Homo sapien
gattcgttgcactggtttgagtaaa

SEQ ID NO: 2254360 - DNA, 25 bp, Homo sapien
tccagtctaagtctgtgttttaact

SEQ ID NO: 2254361 - DNA, 25 bp, Homo sapien
ttctgaatacttcctccaaattgtt

SEQ ID NO: 2254362 - DNA, 25 bp, Homo sapien
tggaaaaatgcgcattctgaatact

SEQ ID NO: 2254363 - DNA, 25 bp, Homo sapien
aatgcgcattctgaatacttcctcc

SEQ ID NO: 2254364 - DNA, 25 bp, Homo sapien
gcgcattctgaatacttcctccaaa

SEQ ID NO: 2254365 - DNA, 25 bp, Homo sapien
tggagcatgagcacaattttccagg

SEQ ID NO: 2254366 - DNA, 25 bp, Homo sapien
ggagcatgagcacaattttccaggc

SEQ ID NO: 2254367 - DNA, 25 bp, Homo sapien
gagcatgagcacaattttccaggct

SEQ ID NO: 2254368 - DNA, 25 bp, Homo sapien
ctggagcatgagcacaattttccag

SEQ ID NO: 2254369 - DNA, 25 bp, Homo sapien
caggagaggtggcataagatcaaac

SEQ ID NO: 2254370 - DNA, 25 bp, Homo sapien
gatcaaacatctctggattatccat

SEQ ID NO: 2254371 - DNA, 25 bp, Homo sapien
tggattatccatctccgctctataa

SEQ ID NO: 2254372 - DNA, 25 bp, Homo sapien
tcatatatttctgccatgtttccaa

SEQ ID NO: 2254373 - DNA, 25 bp, Homo sapien
tcgaacataaactctctcagtctgt

SEQ ID NO: 2254374 - DNA, 25 bp, Homo sapien
tatacagttctcgaacataaactct

SEQ ID NO: 2254375 - DNA, 25 bp, Homo sapien
aactctctcagtctgtatcagttca

SEQ ID NO: 2254376 - DNA, 25 bp, Homo sapien
aaaacagtatacagttctcgaacat

SEQ ID NO: 2254377 - DNA, 25 bp, Homo sapien
cgtatatcgaaatttgctgagagaa

SEQ ID NO: 2254378 - DNA, 25 bp, Homo sapien
tggtaactacgtgaggtgatagatg

SEQ ID NO: 2254379 - DNA, 25 bp, Homo sapien
gctaattacaactgtaacatcaaat

SEQ ID NO: 2254380 - DNA, 25 bp, Homo sapien
acatttgagagtcttacagtataaa

SEQ ID NO: 2254381 - DNA, 25 bp, Homo sapien
ggaccagaacttctcttctcctgac

SEQ ID NO: 2254382 - DNA, 25 bp, Homo sapien
taaaacatccaagctattgccattg

SEQ ID NO: 2254383 - DNA, 25 bp, Homo sapien
ttgccattgtccaaactggaggatg

SEQ ID NO: 2254384 - DNA, 25 bp, Homo sapien
tccaaactggaggatggaccagaac

SEQ ID NO: 2254385 - DNA, 25 bp, Homo sapien
acagctcatactgagaaactggcat

SEQ ID NO: 2254386 - DNA, 25 bp, Homo sapien
gagccaggacttgagaaacagctca

SEQ ID NO: 2254387 - DNA, 25 bp, Homo sapien
gaaacagctcatactgagaaactgg

SEQ ID NO: 2254388 - DNA, 25 bp, Homo sapien
tgagaaacagctcatactgagaaac

SEQ ID NO: 2254389 - DNA, 25 bp, Homo sapien
gggatatgccagtaatgcagtgaaa

SEQ ID NO: 2254390 - DNA, 25 bp, Homo sapien
tatgccagtaatgcagtgaaacaca

SEQ ID NO: 2254391 - DNA, 25 bp, Homo sapien
agtctttcaaagacacaatatttgt

SEQ ID NO: 2254392 - DNA, 25 bp, Homo sapien
taatgcagtgaaacacaatgcagca

SEQ ID NO: 2254393 - DNA, 25 bp, Homo sapien
ctgattttgtctccaagtcttcttc

SEQ ID NO: 2254394 - DNA, 25 bp, Homo sapien
cttttgaaaaaagtttacatgcttg

SEQ ID NO: 2254395 - DNA, 25 bp, Homo sapien
tgaaagaaagagtatccaactccca

SEQ ID NO: 2254396 - DNA, 25 bp, Homo sapien
gaaaaaagtttacatgcttgaaaga

SEQ ID NO: 2254397 - DNA, 25 bp, Homo sapien
tttacatgcttgaaagaaagagtat

SEQ ID NO: 2254398 - DNA, 25 bp, Homo sapien
caggtgtgggtaccacaaattggat

SEQ ID NO: 2254399 - DNA, 25 bp, Homo sapien
ggtaccacaaattggattggcctca

SEQ ID NO: 2254400 - DNA, 25 bp, Homo sapien
caaattttcaggtgtgggtaccaca

SEQ ID NO: 2254401 - DNA, 25 bp, Homo sapien
tgtgaccaaattttcaggtgtgggt

SEQ ID NO: 2254402 - DNA, 25 bp, Homo sapien
gcttgagttgtatagtcttcatttg

SEQ ID NO: 2254403 - DNA, 25 bp, Homo sapien
agcttgagttgtatagtcttcattt

SEQ ID NO: 2254404 - DNA, 25 bp, Homo sapien
tgtccaccctgttaacaccaacttc

SEQ ID NO: 2254405 - DNA, 25 bp, Homo sapien
tagctgtccaccctgttaacaccaa

SEQ ID NO: 2254406 - DNA, 25 bp, Homo sapien
gctgtccaccctgttaacaccaact

SEQ ID NO: 2254407 - DNA, 25 bp, Homo sapien
ctatagctgtccaccctgttaacac

SEQ ID NO: 2254408 - DNA, 25 bp, Homo sapien
gactgaaacttatctatttcctgat

SEQ ID NO: 2254409 - DNA, 25 bp, Homo sapien
taagctcaggagataatattacatc

SEQ ID NO: 2254410 - DNA, 25 bp, Homo sapien
ctgagcatcttctttagactgaaac

SEQ ID NO: 2254411 - DNA, 25 bp, Homo sapien
ctgattagctagaagacattcccct

SEQ ID NO: 2254412 - DNA, 25 bp, Homo sapien
gaaaggtaacgtagctcattgcacc

SEQ ID NO: 2254413 - DNA, 25 bp, Homo sapien
aaatatcagaaaggtaacgtagctc

SEQ ID NO: 2254414 - DNA, 25 bp, Homo sapien
tatgcattttgaaggtcctgctgag

SEQ ID NO: 2254415 - DNA, 25 bp, Homo sapien
ctgctgagttgtatccgttttgctt

SEQ ID NO: 2254416 - DNA, 25 bp, Homo sapien
ggcagattaaatcaagtgcataatg

SEQ ID NO: 2254417 - DNA, 25 bp, Homo sapien
gcttgtgtccatgtaatatcacaaa

SEQ ID NO: 2254418 - DNA, 25 bp, Homo sapien
gattaaatcaagtgcataatggtga

SEQ ID NO: 2254419 - DNA, 25 bp, Homo sapien
tttgctgcaagcttgtgtccatgta

SEQ ID NO: 2254420 - DNA, 25 bp, Homo sapien
tttacttgagctatagtccctgtta

SEQ ID NO: 2254421 - DNA, 25 bp, Homo sapien
gagctatagtccctgttacatcagc

SEQ ID NO: 2254422 - DNA, 25 bp, Homo sapien
cttgagctatagtccctgttacatc

SEQ ID NO: 2254423 - DNA, 25 bp, Homo sapien
gctatagtccctgttacatcagcca

SEQ ID NO: 2254424 - DNA, 25 bp, Homo sapien
aaaatcctgctcaaacttccatagt

SEQ ID NO: 2254425 - DNA, 25 bp, Homo sapien
catatcatgtacttgagtcagcaac

SEQ ID NO: 2254426 - DNA, 25 bp, Homo sapien
aagctgtttccatatcatgtacttg

SEQ ID NO: 2254427 - DNA, 25 bp, Homo sapien
gcagatactgctccatttttaattg

SEQ ID NO: 2254428 - DNA, 25 bp, Homo sapien
ccgatgacattctagtcttgaactg

SEQ ID NO: 2254429 - DNA, 25 bp, Homo sapien
tcttgaactgacagctccttcagtg

SEQ ID NO: 2254430 - DNA, 25 bp, Homo sapien
ggcacttccagatttgttagcagaa

SEQ ID NO: 2254431 - DNA, 25 bp, Homo sapien
tttgccagtcaccacttatttgccg

SEQ ID NO: 2254432 - DNA, 25 bp, Homo sapien
ttccaaaggactgtaacatctgagc

SEQ ID NO: 2254433 - DNA, 25 bp, Homo sapien
cttctattgagggaatatcatctgg

SEQ ID NO: 2254434 - DNA, 25 bp, Homo sapien
tctggtagttctgtctcagccagtt

SEQ ID NO: 2254435 - DNA, 25 bp, Homo sapien
caacagatgatacctttcagcacga

SEQ ID NO: 2254436 - DNA, 25 bp, Homo sapien
gtactgcaaggtgccgcctaactca

SEQ ID NO: 2254437 - DNA, 25 bp, Homo sapien
actgtggcagtactgcaaggtgccg

SEQ ID NO: 2254438 - DNA, 25 bp, Homo sapien
caatgtatgtcagcaaatcactaac

SEQ ID NO: 2254439 - DNA, 25 bp, Homo sapien
ctcaggggttaattgcttgtcatca

SEQ ID NO: 2254440 - DNA, 25 bp, Homo sapien
taatttaagcataaaatcctcctga

SEQ ID NO: 2254441 - DNA, 25 bp, Homo sapien
caatgtctgtgaacgttcgttgaag

SEQ ID NO: 2254442 - DNA, 25 bp, Homo sapien
gtaatttaagcataaaatcctcctg

SEQ ID NO: 2254443 - DNA, 25 bp, Homo sapien
tgtgaacgttcgttgaagaaagctg

SEQ ID NO: 2254444 - DNA, 25 bp, Homo sapien
tcttgcctctccggggatttgcttc

SEQ ID NO: 2254445 - DNA, 25 bp, Homo sapien
atcttgcctctccggggatttgctt

SEQ ID NO: 2254446 - DNA, 25 bp, Homo sapien
cgcctgtacgcaattacacttttct

SEQ ID NO: 2254447 - DNA, 25 bp, Homo sapien
tcgcctgtacgcaattacacttttc

SEQ ID NO: 2254448 - DNA, 25 bp, Homo sapien
gcctgtacgcaattacacttttctt

SEQ ID NO: 2254449 - DNA, 25 bp, Homo sapien
ttcgcctgtacgcaattacactttt

SEQ ID NO: 2254450 - DNA, 25 bp, Homo sapien
gatgaaatacgagctgcttcttggg

SEQ ID NO: 2254451 - DNA, 25 bp, Homo sapien
agctgccgtggctgcttccattagc

SEQ ID NO: 2254452 - DNA, 25 bp, Homo sapien
tcaacgcaacgttgatgaaatacga

SEQ ID NO: 2254453 - DNA, 25 bp, Homo sapien
gctgccgtggctgcttccattagca

SEQ ID NO: 2254454 - DNA, 25 bp, Homo sapien
tgacttaaatttcaattctgttttg

SEQ ID NO: 2254455 - DNA, 25 bp, Homo sapien
tttaagccttgtgaaaggctatagt

SEQ ID NO: 2254456 - DNA, 25 bp, Homo sapien
ttaagccttgtgaaaggctatagtt

SEQ ID NO: 2254457 - DNA, 25 bp, Homo sapien
ggtatgtgacttaaatttcaattct

SEQ ID NO: 2254458 - DNA, 25 bp, Homo sapien
caaaattctccactgagaaagcagc

SEQ ID NO: 2254459 - DNA, 25 bp, Homo sapien
aaaattctccactgagaaagcagcc

SEQ ID NO: 2254460 - DNA, 25 bp, Homo sapien
tcaaaattctccactgagaaagcag

SEQ ID NO: 2254461 - DNA, 25 bp, Homo sapien
gaataatggtaaaccgggagtctga

SEQ ID NO: 2254462 - DNA, 25 bp, Homo sapien
aaaccgggagtctgatccattttgc

SEQ ID NO: 2254463 - DNA, 25 bp, Homo sapien
gaccatgtatccaatcttcgatcca

SEQ ID NO: 2254464 - DNA, 25 bp, Homo sapien
tggagagagattttgagagaagacc

SEQ ID NO: 2254465 - DNA, 25 bp, Homo sapien
ttacagttttctggaaacgtaatga

SEQ ID NO: 2254466 - DNA, 25 bp, Homo sapien
cgtaatgatccaagcattgtccttt

SEQ ID NO: 2254467 - DNA, 25 bp, Homo sapien
tttctggaaacgtaatgatccaagc

SEQ ID NO: 2254468 - DNA, 25 bp, Homo sapien
tacttcctctggtatacatctaaaa

SEQ ID NO: 2254469 - DNA, 25 bp, Homo sapien
tttatacggaggagcagatcggttt

SEQ ID NO: 2254470 - DNA, 25 bp, Homo sapien
ggcgatgtcttgcattaagaaatga

SEQ ID NO: 2254471 - DNA, 25 bp, Homo sapien
gaaggcgatgtcttgcattaagaaa

SEQ ID NO: 2254472 - DNA, 25 bp, Homo sapien
gatgtcctttatacggaggagcaga

SEQ ID NO: 2254473 - DNA, 25 bp, Homo sapien
tcctggtctctggtggtgtcaggct

SEQ ID NO: 2254474 - DNA, 25 bp, Homo sapien
caaagtcctggtctctggtggtgtc

SEQ ID NO: 2254475 - DNA, 25 bp, Homo sapien
gccttcaaagtcctggtctctggtg

SEQ ID NO: 2254476 - DNA, 25 bp, Homo sapien
tggtctctggtggtgtcaggctgat

SEQ ID NO: 2254477 - DNA, 25 bp, Homo sapien
ctctcgaatttccacacggattttt

SEQ ID NO: 2254478 - DNA, 25 bp, Homo sapien
ctattcccacttctccggggacgca

SEQ ID NO: 2254479 - DNA, 25 bp, Homo sapien
tattcccacttctccggggacgcac

SEQ ID NO: 2254480 - DNA, 25 bp, Homo sapien
gagacagtttcatactgcttcctgc

SEQ ID NO: 2254481 - DNA, 25 bp, Homo sapien
ggataggagacctgaaccagcaatg

SEQ ID NO: 2254482 - DNA, 25 bp, Homo sapien
cactttcccacggtcctcctgcggg

SEQ ID NO: 2254483 - DNA, 25 bp, Homo sapien
cctgcgggaccagagctcctgatct

SEQ ID NO: 2254484 - DNA, 25 bp, Homo sapien
cagagctgcacgcctgcagcgcggc

SEQ ID NO: 2254485 - DNA, 25 bp, Homo sapien
agagctgcacgcctgcagcgcggca

SEQ ID NO: 2254486 - DNA, 25 bp, Homo sapien
ctgcgagctgagaccagagctgcac

SEQ ID NO: 2254487 - DNA, 25 bp, Homo sapien
ctcctgcgagctgagaccagagctg

SEQ ID NO: 2254488 - DNA, 25 bp, Homo sapien
gagaacggatgacccagcgagttcg

SEQ ID NO: 2254489 - DNA, 25 bp, Homo sapien
acggatgacccagcgagttcgtggc

SEQ ID NO: 2254490 - DNA, 25 bp, Homo sapien
aggaacggagaacggatgacccagc

SEQ ID NO: 2254491 - DNA, 25 bp, Homo sapien
ccagaggaacggagaacggatgacc

SEQ ID NO: 2254492 - DNA, 25 bp, Homo sapien
ggaggcagaggtagttcttcccgta

SEQ ID NO: 2254493 - DNA, 25 bp, Homo sapien
tagttcttcccgtacttctcggcaa

SEQ ID NO: 2254494 - DNA, 25 bp, Homo sapien
tcggcaatcctcacgcgctgcaggg

SEQ ID NO: 2254495 - DNA, 25 bp, Homo sapien
cagaggtagttcttcccgtacttct

SEQ ID NO: 2254496 - DNA, 25 bp, Homo sapien
gctatcggcatgaaagtgcagccat

SEQ ID NO: 2254497 - DNA, 25 bp, Homo sapien
tcggcatgaaagtgcagccatctgg

SEQ ID NO: 2254498 - DNA, 25 bp, Homo sapien
ctgggctatcggcatgaaagtgcag

SEQ ID NO: 2254499 - DNA, 25 bp, Homo sapien
tgggctatcggcatgaaagtgcagc

SEQ ID NO: 2254500 - DNA, 25 bp, Homo sapien
ggacactgaggtccacggcgccgaa

SEQ ID NO: 2254501 - DNA, 25 bp, Homo sapien
gacactgaggtccacggcgccgaag

SEQ ID NO: 2254502 - DNA, 25 bp, Homo sapien
tgaggtccacggcgccgaagcggca

SEQ ID NO: 2254503 - DNA, 25 bp, Homo sapien
cactgaggtccacggcgccgaagcg

SEQ ID NO: 2254504 - DNA, 25 bp, Homo sapien
cgcccgccttggcgaacccaggtag

SEQ ID NO: 2254505 - DNA, 25 bp, Homo sapien
ggcactgccggaggggtacagcccc

SEQ ID NO: 2254506 - DNA, 25 bp, Homo sapien
gcagggccgctactccagccagcag

SEQ ID NO: 2254507 - DNA, 25 bp, Homo sapien
atcctcacgctggagagccgggcag

SEQ ID NO: 2254508 - DNA, 25 bp, Homo sapien
cccaagggagtagagacttttcagg

SEQ ID NO: 2254509 - DNA, 25 bp, Homo sapien
cactaatctgggtgtcgctgtaagg

SEQ ID NO: 2254510 - DNA, 25 bp, Homo sapien
tcaagtctgaagtgccaactcctgc

SEQ ID NO: 2254511 - DNA, 25 bp, Homo sapien
gaaaaccatagctcacccagtcagt

SEQ ID NO: 2254512 - DNA, 25 bp, Homo sapien
caatgttgtaacaagttttgaggga

SEQ ID NO: 2254513 - DNA, 25 bp, Homo sapien
tgtgccaatgttgtaacaagttttg

SEQ ID NO: 2254514 - DNA, 25 bp, Homo sapien
atgtgccaatgttgtaacaagtttt

SEQ ID NO: 2254515 - DNA, 25 bp, Homo sapien
gccaatgttgtaacaagttttgagg

SEQ ID NO: 2254516 - DNA, 25 bp, Homo sapien
caggatgacaggatctgtaccttaa

SEQ ID NO: 2254517 - DNA, 25 bp, Homo sapien
caacagatattgtggactactagag

SEQ ID NO: 2254518 - DNA, 25 bp, Homo sapien
tgtaccttaagcctcagcatcatgt

SEQ ID NO: 2254519 - DNA, 25 bp, Homo sapien
tttcagcttggaactttatactgcg

SEQ ID NO: 2254520 - DNA, 25 bp, Homo sapien
tatatagggcctatgttgtgccacg

SEQ ID NO: 2254521 - DNA, 25 bp, Homo sapien
tgcactaggcaataaggatctaccg

SEQ ID NO: 2254522 - DNA, 25 bp, Homo sapien
gatactatactagccactgagggat

SEQ ID NO: 2254523 - DNA, 25 bp, Homo sapien
tacaggtacagagtgacagatcgtg

SEQ ID NO: 2254524 - DNA, 25 bp, Homo sapien
gccatgttgaggaatggtttctgcc

SEQ ID NO: 2254525 - DNA, 25 bp, Homo sapien
ggaggtccattatccctatctgcat

SEQ ID NO: 2254526 - DNA, 25 bp, Homo sapien
ggtctgacctgatctttgcactaaa

SEQ ID NO: 2254527 - DNA, 25 bp, Homo sapien
taatcatgtagttccaagacactct

SEQ ID NO: 2254528 - DNA, 25 bp, Homo sapien
tcctcaaacaatggacagcggttgt

SEQ ID NO: 2254529 - DNA, 25 bp, Homo sapien
tcagcagcttacctcaaatacgggc

SEQ ID NO: 2254530 - DNA, 25 bp, Homo sapien
ttaataatagtacaggcatgccaga

SEQ ID NO: 2254531 - DNA, 25 bp, Homo sapien
tagtaggcttacacccataagtggg

SEQ ID NO: 2254532 - DNA, 25 bp, Homo sapien
catttattgtgaactctagacatga

SEQ ID NO: 2254533 - DNA, 25 bp, Homo sapien
tgtgttgcgtatcaagtatcctgag

SEQ ID NO: 2254534 - DNA, 25 bp, Homo sapien
aaccactgtcagtatgcttgtagga

SEQ ID NO: 2254535 - DNA, 25 bp, Homo sapien
taacataggcagttcaagattcgga

SEQ ID NO: 2254536 - DNA, 25 bp, Homo sapien
tgtgtgcatgaaagatggccctgct

SEQ ID NO: 2254537 - DNA, 25 bp, Homo sapien
aaatgggcctataaggtggactcgc

SEQ ID NO: 2254538 - DNA, 25 bp, Homo sapien
tagaacgaggcaatctgggacaaag

SEQ ID NO: 2254539 - DNA, 25 bp, Homo sapien
tcctatggatggataaaagacctcc

SEQ ID NO: 2254540 - DNA, 25 bp, Homo sapien
caatacattagattcgtctgagaat

SEQ ID NO: 2254541 - DNA, 25 bp, Homo sapien
gatgcccttctacagctcagatttc

SEQ ID NO: 2254542 - DNA, 25 bp, Homo sapien
atgttcgtaaaagaagaggtctgac

SEQ ID NO: 2254543 - DNA, 25 bp, Homo sapien
ctggcggataatgagtcagatgccc

SEQ ID NO: 2254544 - DNA, 25 bp, Homo sapien
tggtgaacacctctgagagttgtgc

SEQ ID NO: 2254545 - DNA, 25 bp, Homo sapien
agactagctctaacacgccatggcc

SEQ ID NO: 2254546 - DNA, 25 bp, Homo sapien
caaaacattcctgtcctggtgaaca

SEQ ID NO: 2254547 - DNA, 25 bp, Homo sapien
gccggtgccgtattatcaaacaaag

SEQ ID NO: 2254548 - DNA, 25 bp, Homo sapien
aaactgtgattgctggaagtttgag

SEQ ID NO: 2254549 - DNA, 25 bp, Homo sapien
ggactttggctcagacagttgacat

SEQ ID NO: 2254550 - DNA, 25 bp, Homo sapien
ctgtaagaatcataatagtaatcat

SEQ ID NO: 2254551 - DNA, 25 bp, Homo sapien
ctattgccctgtgaacccatggttg

SEQ ID NO: 2254552 - DNA, 25 bp, Homo sapien
tgattaactatattctccaaaattt

SEQ ID NO: 2254553 - DNA, 25 bp, Homo sapien
gcattggataacgaagtttttacta

SEQ ID NO: 2254554 - DNA, 25 bp, Homo sapien
ctgcattggataacgaagtttttac

SEQ ID NO: 2254555 - DNA, 25 bp, Homo sapien
acctgcattggataacgaagttttt

SEQ ID NO: 2254556 - DNA, 25 bp, Homo sapien
cacctgcattggataacgaagtttt

SEQ ID NO: 2254557 - DNA, 25 bp, Homo sapien
cagaagaggaaattaagtgatgaac

SEQ ID NO: 2254558 - DNA, 25 bp, Homo sapien
ttatgcagaagaggaaattaagtga

SEQ ID NO: 2254559 - DNA, 25 bp, Homo sapien
tatgcagaagaggaaattaagtgat

SEQ ID NO: 2254560 - DNA, 25 bp, Homo sapien
tgcagaagaggaaattaagtgatga

SEQ ID NO: 2254561 - DNA, 25 bp, Homo sapien
aaaatacattctctgttgcttgaga

SEQ ID NO: 2254562 - DNA, 25 bp, Homo sapien
taatactatcagaagaatctcaggg

SEQ ID NO: 2254563 - DNA, 25 bp, Homo sapien
agaagaattatagccaaccatgtgg

SEQ ID NO: 2254564 - DNA, 25 bp, Homo sapien
gaagacagcatttgggcaaatacaa

SEQ ID NO: 2254565 - DNA, 25 bp, Homo sapien
tttatccacgtccagaatcgggtat

SEQ ID NO: 2254566 - DNA, 25 bp, Homo sapien
tcacaaagtgatttatccacgtcca

SEQ ID NO: 2254567 - DNA, 25 bp, Homo sapien
tccagaatcgggtatccaaggcaag

SEQ ID NO: 2254568 - DNA, 25 bp, Homo sapien
caaatcacaaagtgatttatccacg

SEQ ID NO: 2254569 - DNA, 25 bp, Homo sapien
cacaaaagatttcacgacggttacg

SEQ ID NO: 2254570 - DNA, 25 bp, Homo sapien
gacggttacgaattgcaccaggcaa

SEQ ID NO: 2254571 - DNA, 25 bp, Homo sapien
gaggtgtgatcaggctaagtagcta

SEQ ID NO: 2254572 - DNA, 25 bp, Homo sapien
tctaaactggcgtacaggctggagg

SEQ ID NO: 2254573 - DNA, 25 bp, Homo sapien
gatggcaaaaggagacctagctggt

SEQ ID NO: 2254574 - DNA, 25 bp, Homo sapien
ggcaaaaggagacctagctggtggg

SEQ ID NO: 2254575 - DNA, 25 bp, Homo sapien
agatgatggcaaaaggagacctagc

SEQ ID NO: 2254576 - DNA, 25 bp, Homo sapien
gatgatggcaaaaggagacctagct

SEQ ID NO: 2254577 - DNA, 25 bp, Homo sapien
gcttaaaacttctgggtcacatgag

SEQ ID NO: 2254578 - DNA, 25 bp, Homo sapien
tgttacttgctgtgacaccatggtc

SEQ ID NO: 2254579 - DNA, 25 bp, Homo sapien
caacagacgggagtcactaaatgca

SEQ ID NO: 2254580 - DNA, 25 bp, Homo sapien
caaaggtgtcgtgaaagctcaaaca

SEQ ID NO: 2254581 - DNA, 25 bp, Homo sapien
atactaagactgtaaaaacaatggt

SEQ ID NO: 2254582 - DNA, 25 bp, Homo sapien
aatactaagactgtaaaaacaatgg

SEQ ID NO: 2254583 - DNA, 25 bp, Homo sapien
gaatactaagactgtaaaaacaatg

SEQ ID NO: 2254584 - DNA, 25 bp, Homo sapien
gtgaatactaagactgtaaaaacaa

SEQ ID NO: 2254585 - DNA, 25 bp, Homo sapien
tttcttctagggatgcagtctgaaa

SEQ ID NO: 2254586 - DNA, 25 bp, Homo sapien
agtaagtcccaaagaagaacactgt

SEQ ID NO: 2254587 - DNA, 25 bp, Homo sapien
ggggcccaactgtagcatggcattg

SEQ ID NO: 2254588 - DNA, 25 bp, Homo sapien
tctagggatgcagtctgaaaaagaa

SEQ ID NO: 2254589 - DNA, 25 bp, Homo sapien
taaggtaagcagcatcatacagtgg

SEQ ID NO: 2254590 - DNA, 25 bp, Homo sapien
caaggatgtgaagcagatattgtac

SEQ ID NO: 2254591 - DNA, 25 bp, Homo sapien
gctgttccagtagactataggccag

SEQ ID NO: 2254592 - DNA, 25 bp, Homo sapien
tacaatcggggatctgaggtcagag

SEQ ID NO: 2254593 - DNA, 25 bp, Homo sapien
cacagaagaactggtacaaaaactg

SEQ ID NO: 2254594 - DNA, 25 bp, Homo sapien
tgtgagaatccacagaagaactggt

SEQ ID NO: 2254595 - DNA, 25 bp, Homo sapien
aagaactggtacaaaaactgtggca

SEQ ID NO: 2254596 - DNA, 25 bp, Homo sapien
cagaagaactggtacaaaaactgtg

SEQ ID NO: 2254597 - DNA, 25 bp, Homo sapien
cacagtgtttggcctggctaccagc

SEQ ID NO: 2254598 - DNA, 25 bp, Homo sapien
gtttggcctggctaccagcagatac

SEQ ID NO: 2254599 - DNA, 25 bp, Homo sapien
ttggcctggctaccagcagatactg

SEQ ID NO: 2254600 - DNA, 25 bp, Homo sapien
ccacagtgtttggcctggctaccag

SEQ ID NO: 2254601 - DNA, 25 bp, Homo sapien
tagaagaagtactgtacaaggtgtg

SEQ ID NO: 2254602 - DNA, 25 bp, Homo sapien
gtacaaggtgtgctattctcacata

SEQ ID NO: 2254603 - DNA, 25 bp, Homo sapien
taaactttggaacagaataatcgct

SEQ ID NO: 2254604 - DNA, 25 bp, Homo sapien
tcctagctgcttggcgaccttcttt

SEQ ID NO: 2254605 - DNA, 25 bp, Homo sapien
catgggattccaagatcatactaac

SEQ ID NO: 2254606 - DNA, 25 bp, Homo sapien
ttcccacatgggattccaagatcat

SEQ ID NO: 2254607 - DNA, 25 bp, Homo sapien
gacagagttattgggctgcctttta

SEQ ID NO: 2254608 - DNA, 25 bp, Homo sapien
ttggcaccatcacctatcgacagag

SEQ ID NO: 2254609 - DNA, 25 bp, Homo sapien
tttctgtaatggtgccatccgacag

SEQ ID NO: 2254610 - DNA, 25 bp, Homo sapien
ttgtttgaactagagtcttgactag

SEQ ID NO: 2254611 - DNA, 25 bp, Homo sapien
taattgtttgaactagagtcttgac

SEQ ID NO: 2254612 - DNA, 25 bp, Homo sapien
gtttgaactagagtcttgactagaa

SEQ ID NO: 2254613 - DNA, 25 bp, Homo sapien
ttgaactagagtcttgactagaatt

SEQ ID NO: 2254614 - DNA, 25 bp, Homo sapien
caaactctgctatgaagacaaatca

SEQ ID NO: 2254615 - DNA, 25 bp, Homo sapien
tagcttagtggttctctagccatcc

SEQ ID NO: 2254616 - DNA, 25 bp, Homo sapien
caatatagggaaaagacaaatggct

SEQ ID NO: 2254617 - DNA, 25 bp, Homo sapien
aaacgtatggtatctggaattcaaa

SEQ ID NO: 2254618 - DNA, 25 bp, Homo sapien
catgtcctctaaagaaagtggccac

SEQ ID NO: 2254619 - DNA, 25 bp, Homo sapien
cctttatgttccacaagttcttcct

SEQ ID NO: 2254620 - DNA, 25 bp, Homo sapien
cttcctagttgaaagtagagtcaaa

SEQ ID NO: 2254621 - DNA, 25 bp, Homo sapien
aagtggccacgttaacaagtatttg

SEQ ID NO: 2254622 - DNA, 25 bp, Homo sapien
tagcatgtggatttagctgtctcca

SEQ ID NO: 2254623 - DNA, 25 bp, Homo sapien
gctgcatgcagagcttcaatggtct

SEQ ID NO: 2254624 - DNA, 25 bp, Homo sapien
tgtggttagttctaagagctcagtg

SEQ ID NO: 2254625 - DNA, 25 bp, Homo sapien
cagtgagcacccagactttcaggcc

SEQ ID NO: 2254626 - DNA, 25 bp, Homo sapien
gcctctatgagctgtctgttaattc

SEQ ID NO: 2254627 - DNA, 25 bp, Homo sapien
tctgtcttgtaaggccatttttgcc

SEQ ID NO: 2254628 - DNA, 25 bp, Homo sapien
tctttgaaggctacacagagtgtcc

SEQ ID NO: 2254629 - DNA, 25 bp, Homo sapien
tgtcttcaactgcagtggctccaat

SEQ ID NO: 2254630 - DNA, 25 bp, Homo sapien
gccgagtctgctcctttacaaaaga

SEQ ID NO: 2254631 - DNA, 25 bp, Homo sapien
aatttcatgattttgcactctggga

SEQ ID NO: 2254632 - DNA, 25 bp, Homo sapien
tccacatggactttagttaactcaa

SEQ ID NO: 2254633 - DNA, 25 bp, Homo sapien
cattgcattacgttccacatggact

SEQ ID NO: 2254634 - DNA, 25 bp, Homo sapien
tatagacccaactacgctggatgct

SEQ ID NO: 2254635 - DNA, 25 bp, Homo sapien
ttgcaatactcacctaaatggaatg

SEQ ID NO: 2254636 - DNA, 25 bp, Homo sapien
gtaacttttaaagcggtctctctca

SEQ ID NO: 2254637 - DNA, 25 bp, Homo sapien
taagccagagtttacaataggcacc

SEQ ID NO: 2254638 - DNA, 25 bp, Homo sapien
tacgtcgccggacagcatcaaagtt

SEQ ID NO: 2254639 - DNA, 25 bp, Homo sapien
gacagcatcaaagtttaaggtgtga

SEQ ID NO: 2254640 - DNA, 25 bp, Homo sapien
cttcttgagtcttcacaattacact

SEQ ID NO: 2254641 - DNA, 25 bp, Homo sapien
cacaattacactcatacgtcgccgg

SEQ ID NO: 2254642 - DNA, 25 bp, Homo sapien
tatccatttcgatttcctaaaaatg

SEQ ID NO: 2254643 - DNA, 25 bp, Homo sapien
tctcatatatccatttcgatttcct

SEQ ID NO: 2254644 - DNA, 25 bp, Homo sapien
tctactctcatatatccatttcgat

SEQ ID NO: 2254645 - DNA, 25 bp, Homo sapien
gttctctactctcatatatccattt

SEQ ID NO: 2254646 - DNA, 25 bp, Homo sapien
tctggtgaagaggagatataggtta

SEQ ID NO: 2254647 - DNA, 25 bp, Homo sapien
taattcagctgattctgtagctcca

SEQ ID NO: 2254648 - DNA, 25 bp, Homo sapien
aacacaaggcacgtagaaacagctc

SEQ ID NO: 2254649 - DNA, 25 bp, Homo sapien
ccatcaacagcatcgtttgttttga

SEQ ID NO: 2254650 - DNA, 25 bp, Homo sapien
cagtttgagataatccatcaacctc

SEQ ID NO: 2254651 - DNA, 25 bp, Homo sapien
gcagcattcaatgaattccatgctg

SEQ ID NO: 2254652 - DNA, 25 bp, Homo sapien
agttccatcagtttgagataatcca

SEQ ID NO: 2254653 - DNA, 25 bp, Homo sapien
tatatttgtggccatctatgcagca

SEQ ID NO: 2254654 - DNA, 25 bp, Homo sapien
tctgatgtgttaaccagggctcctt

SEQ ID NO: 2254655 - DNA, 25 bp, Homo sapien
taaaagtccttatcccatgagatga

SEQ ID NO: 2254656 - DNA, 25 bp, Homo sapien
cataaatgataggaagtcggtgaac

SEQ ID NO: 2254657 - DNA, 25 bp, Homo sapien
tactgtgacgtacatggagacagga

SEQ ID NO: 2254658 - DNA, 25 bp, Homo sapien
gtagtgcatactgcagctttggtca

SEQ ID NO: 2254659 - DNA, 25 bp, Homo sapien
tgccaaacatactttagagtagtgc

SEQ ID NO: 2254660 - DNA, 25 bp, Homo sapien
taaatatacaatcaggaaagcatta

SEQ ID NO: 2254661 - DNA, 25 bp, Homo sapien
ctctcgctctttctgagtcttttgg

SEQ ID NO: 2254662 - DNA, 25 bp, Homo sapien
acagcagaacgtttctgagatttcc

SEQ ID NO: 2254663 - DNA, 25 bp, Homo sapien
atttcccttggtagttcaaagccat

SEQ ID NO: 2254664 - DNA, 25 bp, Homo sapien
tccattccagtgtaaacagcaactc

SEQ ID NO: 2254665 - DNA, 25 bp, Homo sapien
ttccattccagtgtaaacagcaact

SEQ ID NO: 2254666 - DNA, 25 bp, Homo sapien
tctcggtattttttagcgtagctcc

SEQ ID NO: 2254667 - DNA, 25 bp, Homo sapien
gcgtagctcctttcagcaagagatt

SEQ ID NO: 2254668 - DNA, 25 bp, Homo sapien
ttagcgtagctcctttcagcaagag

SEQ ID NO: 2254669 - DNA, 25 bp, Homo sapien
atcttctcggtattttttagcgtag

SEQ ID NO: 2254670 - DNA, 25 bp, Homo sapien
tattactgtagatattgattcgccc

SEQ ID NO: 2254671 - DNA, 25 bp, Homo sapien
tgtagatattgattcgcccaacaaa

SEQ ID NO: 2254672 - DNA, 25 bp, Homo sapien
ctggcaacagcctcaagactattac

SEQ ID NO: 2254673 - DNA, 25 bp, Homo sapien
gcctcaagactattactgtagatat

SEQ ID NO: 2254674 - DNA, 25 bp, Homo sapien
ctgggcccacaatgatttattctgg

SEQ ID NO: 2254675 - DNA, 25 bp, Homo sapien
ccacaatgatttattctgggttgat

SEQ ID NO: 2254676 - DNA, 25 bp, Homo sapien
cacaatgatttattctgggttgata

SEQ ID NO: 2254677 - DNA, 25 bp, Homo sapien
tcgatggattctgctgtacacagtg

SEQ ID NO: 2254678 - DNA, 25 bp, Homo sapien
tggtatcacgtactgcataatgtgt

SEQ ID NO: 2254679 - DNA, 25 bp, Homo sapien
cagtgcaatggtatcacgtactgca

SEQ ID NO: 2254680 - DNA, 25 bp, Homo sapien
cacattcaattgctgctcggagggt

SEQ ID NO: 2254681 - DNA, 25 bp, Homo sapien
tgcctgtacttctactacatcacca

SEQ ID NO: 2254682 - DNA, 25 bp, Homo sapien
ggttccatcagtggtgcaagatgat

SEQ ID NO: 2254683 - DNA, 25 bp, Homo sapien
tgcaattggattccccatcaagact

SEQ ID NO: 2254684 - DNA, 25 bp, Homo sapien
caagactggctgtagtgacataaca

SEQ ID NO: 2254685 - DNA, 25 bp, Homo sapien
tagtcatgtaattggagtaccggaa

SEQ ID NO: 2254686 - DNA, 25 bp, Homo sapien
gatttccttcaactagtggactggg

SEQ ID NO: 2254687 - DNA, 25 bp, Homo sapien
gaatgctggcagagggatactacaa

SEQ ID NO: 2254688 - DNA, 25 bp, Homo sapien
aacagttagccaagtgtagttgcac

SEQ ID NO: 2254689 - DNA, 25 bp, Homo sapien
tttctcactcgctttgcattttcaa

SEQ ID NO: 2254690 - DNA, 25 bp, Homo sapien
ttttctcactcgctttgcattttca

SEQ ID NO: 2254691 - DNA, 25 bp, Homo sapien
tttcttttctcactcgctttgcatt

SEQ ID NO: 2254692 - DNA, 25 bp, Homo sapien
tgtgtctcagacaatcctcatatcc

SEQ ID NO: 2254693 - DNA, 25 bp, Homo sapien
gtaactgggctagttggtgtgtcta

SEQ ID NO: 2254694 - DNA, 25 bp, Homo sapien
ctgggctagttggtgtgtctactgt

SEQ ID NO: 2254695 - DNA, 25 bp, Homo sapien
tccactggtaactgggctagttggt

SEQ ID NO: 2254696 - DNA, 25 bp, Homo sapien
ccactggtaactgggctagttggtg

SEQ ID NO: 2254697 - DNA, 25 bp, Homo sapien
caattcttctaaactgttcaaacag

SEQ ID NO: 2254698 - DNA, 25 bp, Homo sapien
ctgtacaaggaagattatgagaaaa

SEQ ID NO: 2254699 - DNA, 25 bp, Homo sapien
gttcaaacagattctttgggagaaa

SEQ ID NO: 2254700 - DNA, 25 bp, Homo sapien
ttgggagaaaattccaaagtgtata

SEQ ID NO: 2254701 - DNA, 25 bp, Homo sapien
ccgaaactggatgattgccaacaaa

SEQ ID NO: 2254702 - DNA, 25 bp, Homo sapien
caaacactgtgcgtgtgccaactcg

SEQ ID NO: 2254703 - DNA, 25 bp, Homo sapien
ctttgtgcaatgtaagcttctgttt

SEQ ID NO: 2254704 - DNA, 25 bp, Homo sapien
gatgagactattctattatcacaaa

SEQ ID NO: 2254705 - DNA, 25 bp, Homo sapien
tttttcatcacatttgtccacactt

SEQ ID NO: 2254706 - DNA, 25 bp, Homo sapien
ttcagtttttcatcacatttgtcca

SEQ ID NO: 2254707 - DNA, 25 bp, Homo sapien
tcagtttttcatcacatttgtccac

SEQ ID NO: 2254708 - DNA, 25 bp, Homo sapien
tcatcacatttgtccacacttctac

SEQ ID NO: 2254709 - DNA, 25 bp, Homo sapien
cttgtccaagcatgctgggccataa

SEQ ID NO: 2254710 - DNA, 25 bp, Homo sapien
ttgtccaagcatgctgggccataat

SEQ ID NO: 2254711 - DNA, 25 bp, Homo sapien
gataagagcaccaaattttccataa

SEQ ID NO: 2254712 - DNA, 25 bp, Homo sapien
tgataagagcaccaaattttccata

SEQ ID NO: 2254713 - DNA, 25 bp, Homo sapien
ataagagcaccaaattttccataat

SEQ ID NO: 2254714 - DNA, 25 bp, Homo sapien
gctggagggagagatgggaccatct

SEQ ID NO: 2254715 - DNA, 25 bp, Homo sapien
ctcagaggctggagggagagatggg

SEQ ID NO: 2254716 - DNA, 25 bp, Homo sapien
agaggctggagggagagatgggacc

SEQ ID NO: 2254717 - DNA, 25 bp, Homo sapien
ggctggagggagagatgggaccatc

SEQ ID NO: 2254718 - DNA, 25 bp, Homo sapien
cagaaatttggcaacacaatggcag

SEQ ID NO: 2254719 - DNA, 25 bp, Homo sapien
tcaagcaacttgtaccaacccctgt

SEQ ID NO: 2254720 - DNA, 25 bp, Homo sapien
caatggcagctaaatctcagagaga

SEQ ID NO: 2254721 - DNA, 25 bp, Homo sapien
gaatgctgcagattatcaagcaact

SEQ ID NO: 2254722 - DNA, 25 bp, Homo sapien
gaaacgctttcgttcactcctagga

SEQ ID NO: 2254723 - DNA, 25 bp, Homo sapien
aacggttggtggaagcgactgacca

SEQ ID NO: 2254724 - DNA, 25 bp, Homo sapien
tttaatcaggttcagacccaggcag

SEQ ID NO: 2254725 - DNA, 25 bp, Homo sapien
cacccagttgctatagggaaagcag

SEQ ID NO: 2254726 - DNA, 25 bp, Homo sapien
tcctgatctacttactgctctgggc

SEQ ID NO: 2254727 - DNA, 25 bp, Homo sapien
gactcaaaaggccaattacatctac

SEQ ID NO: 2254728 - DNA, 25 bp, Homo sapien
gactctcatccaattgcctatcctg

SEQ ID NO: 2254729 - DNA, 25 bp, Homo sapien
tcattaaactaagtcctgggccagg

SEQ ID NO: 2254730 - DNA, 25 bp, Homo sapien
tttccctctgatctctgaacaccat

SEQ ID NO: 2254731 - DNA, 25 bp, Homo sapien
actttccctctgatctctgaacacc

SEQ ID NO: 2254732 - DNA, 25 bp, Homo sapien
ctttccctctgatctctgaacacca

SEQ ID NO: 2254733 - DNA, 25 bp, Homo sapien
tgataactgttgagggcctggacca

SEQ ID NO: 2254734 - DNA, 25 bp, Homo sapien
agggcctggaccaaagctgcagcca

SEQ ID NO: 2254735 - DNA, 25 bp, Homo sapien
ctaggtgataactgttgagggcctg

SEQ ID NO: 2254736 - DNA, 25 bp, Homo sapien
aggtgataactgttgagggcctgga

SEQ ID NO: 2254737 - DNA, 25 bp, Homo sapien
tgagttgggtctaggatttcaccag

SEQ ID NO: 2254738 - DNA, 25 bp, Homo sapien
cagaaagggaacaacaggagccaat

SEQ ID NO: 2254739 - DNA, 25 bp, Homo sapien
taccccaggtacgtcagagaaggaa

SEQ ID NO: 2254740 - DNA, 25 bp, Homo sapien
ccagtgaatggaagagcggcagctt

SEQ ID NO: 2254741 - DNA, 25 bp, Homo sapien
ggcccagagcaagaatagtaggagt

SEQ ID NO: 2254742 - DNA, 25 bp, Homo sapien
gcaagaatagtaggagtaagaagaa

SEQ ID NO: 2254743 - DNA, 25 bp, Homo sapien
cagagcaagaatagtaggagtaaga

SEQ ID NO: 2254744 - DNA, 25 bp, Homo sapien
cccagagcaagaatagtaggagtaa

SEQ ID NO: 2254745 - DNA, 25 bp, Homo sapien
ttggatgaattggggtgccaaccat

SEQ ID NO: 2254746 - DNA, 25 bp, Homo sapien
tttggatgaattggggtgccaacca

SEQ ID NO: 2254747 - DNA, 25 bp, Homo sapien
ctttggatgaattggggtgccaacc

SEQ ID NO: 2254748 - DNA, 25 bp, Homo sapien
tatatagcccaacagaaaatctgct

SEQ ID NO: 2254749 - DNA, 25 bp, Homo sapien
cacagaccatcgatacttgatacga

SEQ ID NO: 2254750 - DNA, 25 bp, Homo sapien
taatcaaattcatcctagaggctca

SEQ ID NO: 2254751 - DNA, 25 bp, Homo sapien
gcaaaagaaggcctcaagcaacatt

SEQ ID NO: 2254752 - DNA, 25 bp, Homo sapien
ggtggtctgacattagcctgggtca

SEQ ID NO: 2254753 - DNA, 25 bp, Homo sapien
tctgaatcgtgctctaagtatgaac

SEQ ID NO: 2254754 - DNA, 25 bp, Homo sapien
caaggtactatgaggccctgtaaga

SEQ ID NO: 2254755 - DNA, 25 bp, Homo sapien
tgggaagaccgcacacagtagaaac

SEQ ID NO: 2254756 - DNA, 25 bp, Homo sapien
ctgcaactaattaattgtattcata

SEQ ID NO: 2254757 - DNA, 25 bp, Homo sapien
gcagctgtcactcagcctgtccaag

SEQ ID NO: 2254758 - DNA, 25 bp, Homo sapien
tctagcagctgtcactcagcctgtc

SEQ ID NO: 2254759 - DNA, 25 bp, Homo sapien
gcaactaattaattgtattcataag

SEQ ID NO: 2254760 - DNA, 25 bp, Homo sapien
ctccggcggaacatcgcgtcgaagg

SEQ ID NO: 2254761 - DNA, 25 bp, Homo sapien
tacttacaaaacgattcaagctccg

SEQ ID NO: 2254762 - DNA, 25 bp, Homo sapien
aaacgattcaagctccggcggaaca

SEQ ID NO: 2254763 - DNA, 25 bp, Homo sapien
ggagccgcagcgagtgtacttacaa

SEQ ID NO: 2254764 - DNA, 25 bp, Homo sapien
aaggcgccgtccacaaaacacactg

SEQ ID NO: 2254765 - DNA, 25 bp, Homo sapien
acaaaacacactgcggcgtgggccg

SEQ ID NO: 2254766 - DNA, 25 bp, Homo sapien
gggaaggcgccgtccacaaaacaca

SEQ ID NO: 2254767 - DNA, 25 bp, Homo sapien
ccggcggcgccaagcggagcagcga

SEQ ID NO: 2254768 - DNA, 25 bp, Homo sapien
cagggagcctgggtacagccaaccg

SEQ ID NO: 2254769 - DNA, 25 bp, Homo sapien
tcctcatctgcaccgacgagggttc

SEQ ID NO: 2254770 - DNA, 25 bp, Homo sapien
tgtctctgtcgggagccacagcctc

SEQ ID NO: 2254771 - DNA, 25 bp, Homo sapien
tctggtcccgcactcgggccaggga

SEQ ID NO: 2254772 - DNA, 25 bp, Homo sapien
gcttagccaattcctgtggaccgaa

SEQ ID NO: 2254773 - DNA, 25 bp, Homo sapien
tgatcaccgtatgcattgttcctgg

SEQ ID NO: 2254774 - DNA, 25 bp, Homo sapien
gcttgaatagctgaggtggcctgac

SEQ ID NO: 2254775 - DNA, 25 bp, Homo sapien
tctgtgctggattgtgcggatgccc

SEQ ID NO: 2254776 - DNA, 25 bp, Homo sapien
attcctgctttggacgcatcatcgc

SEQ ID NO: 2254777 - DNA, 25 bp, Homo sapien
cgctcagacaattataatggagata

SEQ ID NO: 2254778 - DNA, 25 bp, Homo sapien
tgctttggacgcatcatcgctcaga

SEQ ID NO: 2254779 - DNA, 25 bp, Homo sapien
gacgcatcatcgctcagacaattat

SEQ ID NO: 2254780 - DNA, 25 bp, Homo sapien
taataccaactaaaatgagtagatt

SEQ ID NO: 2254781 - DNA, 25 bp, Homo sapien
accaactaaaatgagtagatttctt

SEQ ID NO: 2254782 - DNA, 25 bp, Homo sapien
gataataccaactaaaatgagtaga

SEQ ID NO: 2254783 - DNA, 25 bp, Homo sapien
ataccaactaaaatgagtagatttc

SEQ ID NO: 2254784 - DNA, 25 bp, Homo sapien
gccagtccagaagctaaatctggga

SEQ ID NO: 2254785 - DNA, 25 bp, Homo sapien
ctaaatctgggaggcatcgctgact

SEQ ID NO: 2254786 - DNA, 25 bp, Homo sapien
tccagaagctaaatctgggaggcat

SEQ ID NO: 2254787 - DNA, 25 bp, Homo sapien
gaggcatcgctgactaatccatacc

SEQ ID NO: 2254788 - DNA, 25 bp, Homo sapien
aagtaggacacaaataacaagattc

SEQ ID NO: 2254789 - DNA, 25 bp, Homo sapien
caaaagtaggacacaaataacaaga

SEQ ID NO: 2254790 - DNA, 25 bp, Homo sapien
agtaggacacaaataacaagattca

SEQ ID NO: 2254791 - DNA, 25 bp, Homo sapien
aaagtaggacacaaataacaagatt

SEQ ID NO: 2254792 - DNA, 25 bp, Homo sapien
tgtcttgcttccaatgtctggctgg

SEQ ID NO: 2254793 - DNA, 25 bp, Homo sapien
tctggctggcgtcatatctatagga

SEQ ID NO: 2254794 - DNA, 25 bp, Homo sapien
tcagtagtaggaaaagctcctaagc

SEQ ID NO: 2254795 - DNA, 25 bp, Homo sapien
gcacccacatggcaagtttgaacct

SEQ ID NO: 2254796 - DNA, 25 bp, Homo sapien
tggatatggtagcagaaggttctaa

SEQ ID NO: 2254797 - DNA, 25 bp, Homo sapien
aagacactcgggcagtccctatggt

SEQ ID NO: 2254798 - DNA, 25 bp, Homo sapien
aattatggacccatgaaagggggca

SEQ ID NO: 2254799 - DNA, 25 bp, Homo sapien
ggacaacagcaatcaaattatggac

SEQ ID NO: 2254800 - DNA, 25 bp, Homo sapien
taaggttcctcgtcagaggcagctc

SEQ ID NO: 2254801 - DNA, 25 bp, Homo sapien
ctccctcaacgccatggtgagcttg

SEQ ID NO: 2254802 - DNA, 25 bp, Homo sapien
agcttgccgaacacgggaggagata

SEQ ID NO: 2254803 - DNA, 25 bp, Homo sapien
tgtcttctgatagtacaggaagatg

SEQ ID NO: 2254804 - DNA, 25 bp, Homo sapien
tgggagattcaggtccttacacaat

SEQ ID NO: 2254805 - DNA, 25 bp, Homo sapien
gctctgggagattcaggtccttaca

SEQ ID NO: 2254806 - DNA, 25 bp, Homo sapien
gatcagctctgggagattcaggtcc

SEQ ID NO: 2254807 - DNA, 25 bp, Homo sapien
gattcaggtccttacacaattcaac

SEQ ID NO: 2254808 - DNA, 25 bp, Homo sapien
tagtggtgaccccagcaaagtccac

SEQ ID NO: 2254809 - DNA, 25 bp, Homo sapien
agtgatgtgcatgggcctagtggtg

SEQ ID NO: 2254810 - DNA, 25 bp, Homo sapien
tgggcctagtggtgaccccagcaaa

SEQ ID NO: 2254811 - DNA, 25 bp, Homo sapien
tgcatgggcctagtggtgaccccag

SEQ ID NO: 2254812 - DNA, 25 bp, Homo sapien
ggaatgcctgtctcataatgacagc

SEQ ID NO: 2254813 - DNA, 25 bp, Homo sapien
cataatgacagcgtggcactgtgac

SEQ ID NO: 2254814 - DNA, 25 bp, Homo sapien
tgtctcataatgacagcgtggcact

SEQ ID NO: 2254815 - DNA, 25 bp, Homo sapien
tgcctgtctcataatgacagcgtgg

SEQ ID NO: 2254816 - DNA, 25 bp, Homo sapien
ttaggtgttcattctgccactgggt

SEQ ID NO: 2254817 - DNA, 25 bp, Homo sapien
catgttccaaccctggtgtattagg

SEQ ID NO: 2254818 - DNA, 25 bp, Homo sapien
gacttcttcgtagagcagctgagag

SEQ ID NO: 2254819 - DNA, 25 bp, Homo sapien
gggtcattggctgatactgacttct

SEQ ID NO: 2254820 - DNA, 25 bp, Homo sapien
gcctcctgtgccccaggattgctgg

SEQ ID NO: 2254821 - DNA, 25 bp, Homo sapien
cctgcctcctgtgccccaggattgc

SEQ ID NO: 2254822 - DNA, 25 bp, Homo sapien
ctcctgcctcctgtgccccaggatt

SEQ ID NO: 2254823 - DNA, 25 bp, Homo sapien
acctcctgcctcctgtgccccagga

SEQ ID NO: 2254824 - DNA, 25 bp, Homo sapien
cttactgataaagggcagtgtagtg

SEQ ID NO: 2254825 - DNA, 25 bp, Homo sapien
ataaagggcagtgtagtgccaccca

SEQ ID NO: 2254826 - DNA, 25 bp, Homo sapien
taaagggcagtgtagtgccacccat

SEQ ID NO: 2254827 - DNA, 25 bp, Homo sapien
ctgataaagggcagtgtagtgccac

SEQ ID NO: 2254828 - DNA, 25 bp, Homo sapien
ccgtaccctttaccatctgtctgtt

SEQ ID NO: 2254829 - DNA, 25 bp, Homo sapien
cagccatgggtgccataataggcac

SEQ ID NO: 2254830 - DNA, 25 bp, Homo sapien
tttaccatctgtctgttatccctcc

SEQ ID NO: 2254831 - DNA, 25 bp, Homo sapien
taccctttaccatctgtctgttatc

SEQ ID NO: 2254832 - DNA, 25 bp, Homo sapien
caaccataggccatttgattaaaat

SEQ ID NO: 2254833 - DNA, 25 bp, Homo sapien
gggttttcctgttatggagctgctg

SEQ ID NO: 2254834 - DNA, 25 bp, Homo sapien
ttttcctgttatggagctgctgatt

SEQ ID NO: 2254835 - DNA, 25 bp, Homo sapien
tcaaccataggccatttgattaaaa

SEQ ID NO: 2254836 - DNA, 25 bp, Homo sapien
gaagcctgtcacatcaaattgaggg

SEQ ID NO: 2254837 - DNA, 25 bp, Homo sapien
cattgagggtctgaatttcaattgg

SEQ ID NO: 2254838 - DNA, 25 bp, Homo sapien
cacatcaaattgagggagtggagaa

SEQ ID NO: 2254839 - DNA, 25 bp, Homo sapien
accaaccattgagggtctgaatttc

SEQ ID NO: 2254840 - DNA, 25 bp, Homo sapien
cactctctaatgtcataaaagcatc

SEQ ID NO: 2254841 - DNA, 25 bp, Homo sapien
tggtgctagaaccaggttacctgag

SEQ ID NO: 2254842 - DNA, 25 bp, Homo sapien
agagaatggtgctagaaccaggtta

SEQ ID NO: 2254843 - DNA, 25 bp, Homo sapien
caggttacctgagcattcactctct

SEQ ID NO: 2254844 - DNA, 25 bp, Homo sapien
ggaatgcctgtctcataatgacagc

SEQ ID NO: 2254845 - DNA, 25 bp, Homo sapien
tgcctgtctcataatgacagcgtgg

SEQ ID NO: 2254846 - DNA, 25 bp, Homo sapien
tgtctcataatgacagcgtggcact

SEQ ID NO: 2254847 - DNA, 25 bp, Homo sapien
cataatgacagcgtggcactgtgac

SEQ ID NO: 2254848 - DNA, 25 bp, Homo sapien
ttaggtgttcattctgccactgggt

SEQ ID NO: 2254849 - DNA, 25 bp, Homo sapien
catgttccaaccctggtgtattagg

SEQ ID NO: 2254850 - DNA, 25 bp, Homo sapien
gacttcttcgtagagcagctgagag

SEQ ID NO: 2254851 - DNA, 25 bp, Homo sapien
gggtcattggctgatactgacttct

SEQ ID NO: 2254852 - DNA, 25 bp, Homo sapien
ccactcctcactcacctcctgcctc

SEQ ID NO: 2254853 - DNA, 25 bp, Homo sapien
cagccactcctcactcacctcctgc

SEQ ID NO: 2254854 - DNA, 25 bp, Homo sapien
agccactcctcactcacctcctgcc

SEQ ID NO: 2254855 - DNA, 25 bp, Homo sapien
gccactcctcactcacctcctgcct

SEQ ID NO: 2254856 - DNA, 25 bp, Homo sapien
tttcatggggtcctaggactggacc

SEQ ID NO: 2254857 - DNA, 25 bp, Homo sapien
ggatgtggtacacagattgattccc

SEQ ID NO: 2254858 - DNA, 25 bp, Homo sapien
taatgacttgctcaatgatacagac

SEQ ID NO: 2254859 - DNA, 25 bp, Homo sapien
ggaccagtgttccacagatatgtaa

SEQ ID NO: 2254860 - DNA, 25 bp, Homo sapien
accagtgctgtacttcagctgctgc

SEQ ID NO: 2254861 - DNA, 25 bp, Homo sapien
tcaccagtgctgtacttcagctgct

SEQ ID NO: 2254862 - DNA, 25 bp, Homo sapien
caccagtgctgtacttcagctgctg

SEQ ID NO: 2254863 - DNA, 25 bp, Homo sapien
cttttgggaacttgacaatatgatt

SEQ ID NO: 2254864 - DNA, 25 bp, Homo sapien
tttgggaacttgacaatatgattct

SEQ ID NO: 2254865 - DNA, 25 bp, Homo sapien
caatatgattcttttagccttgctg

SEQ ID NO: 2254866 - DNA, 25 bp, Homo sapien
ttagccttgctgagcatttgccaaa

SEQ ID NO: 2254867 - DNA, 25 bp, Homo sapien
catccggttactgttgctatgatac

SEQ ID NO: 2254868 - DNA, 25 bp, Homo sapien
ggaggaggttcttgttagtagcatc

SEQ ID NO: 2254869 - DNA, 25 bp, Homo sapien
ctgatgcctgctgttgtcagcaatg

SEQ ID NO: 2254870 - DNA, 25 bp, Homo sapien
tgtttaggacaacataactgatgcc

SEQ ID NO: 2254871 - DNA, 25 bp, Homo sapien
gaatgatgcttaacattccagacca

SEQ ID NO: 2254872 - DNA, 25 bp, Homo sapien
cttttgtcaggaaggagttctgtgc

SEQ ID NO: 2254873 - DNA, 25 bp, Homo sapien
ttcagtctcaaagccagaatgatgc

SEQ ID NO: 2254874 - DNA, 25 bp, Homo sapien
agttctgtgcaaaaaggcgctgact

SEQ ID NO: 2254875 - DNA, 25 bp, Homo sapien
gctcctgtgatccccaagtgtttgc

SEQ ID NO: 2254876 - DNA, 25 bp, Homo sapien
ggctcctgtgatccccaagtgtttg

SEQ ID NO: 2254877 - DNA, 25 bp, Homo sapien
ttggcctttatgtgattggtgattc

SEQ ID NO: 2254878 - DNA, 25 bp, Homo sapien
ctttggcctttatgtgattggtgat

SEQ ID NO: 2254879 - DNA, 25 bp, Homo sapien
ccagagttgctgttgctagttgtac

SEQ ID NO: 2254880 - DNA, 25 bp, Homo sapien
ttgctagttgtacgcttctgatcca

SEQ ID NO: 2254881 - DNA, 25 bp, Homo sapien
caggaaggaggtgattgagtttttt

SEQ ID NO: 2254882 - DNA, 25 bp, Homo sapien
gcaggaaggaggtgattgagttttt

SEQ ID NO: 2254883 - DNA, 25 bp, Homo sapien
gtaggctttttcgtgcttagaattg

SEQ ID NO: 2254884 - DNA, 25 bp, Homo sapien
ttgttggtcttttgttgagaagagt

SEQ ID NO: 2254885 - DNA, 25 bp, Homo sapien
gctttttcgtgcttagaattggttg

SEQ ID NO: 2254886 - DNA, 25 bp, Homo sapien
ggtcttttgttgagaagagttcttc

SEQ ID NO: 2254887 - DNA, 25 bp, Homo sapien
gcacccctatccaatggtagtcctg

SEQ ID NO: 2254888 - DNA, 25 bp, Homo sapien
gtggcttggacatcacaaagcgctg

SEQ ID NO: 2254889 - DNA, 25 bp, Homo sapien
cctggggtggcttggacatcacaaa

SEQ ID NO: 2254890 - DNA, 25 bp, Homo sapien
atggggcacccctatccaatggtag

SEQ ID NO: 2254891 - DNA, 25 bp, Homo sapien
aggcacgttatcatccatgtttttg

SEQ ID NO: 2254892 - DNA, 25 bp, Homo sapien
tttaataagcccaggcacgttatca

SEQ ID NO: 2254893 - DNA, 25 bp, Homo sapien
tattgctgggttttaataagcccag

SEQ ID NO: 2254894 - DNA, 25 bp, Homo sapien
ccttcttcagtgcagtggaagtttt

SEQ ID NO: 2254895 - DNA, 25 bp, Homo sapien
ttctatccctatagtctgctcaggg

SEQ ID NO: 2254896 - DNA, 25 bp, Homo sapien
gccacagtggaacatattgctctgt

SEQ ID NO: 2254897 - DNA, 25 bp, Homo sapien
cagggaagtatctctccttagttct

SEQ ID NO: 2254898 - DNA, 25 bp, Homo sapien
acatatataatggaaacgagtctct

SEQ ID NO: 2254899 - DNA, 25 bp, Homo sapien
agcattagcaacagtggaatccatg

SEQ ID NO: 2254900 - DNA, 25 bp, Homo sapien
tcatctccccgtgaaattggtttaa

SEQ ID NO: 2254901 - DNA, 25 bp, Homo sapien
aagcagaaaggtatgaagcattagc

SEQ ID NO: 2254902 - DNA, 25 bp, Homo sapien
tgaagcattagcaacagtggaatcc

SEQ ID NO: 2254903 - DNA, 25 bp, Homo sapien
ttggaattataacgttgtagccatg

SEQ ID NO: 2254904 - DNA, 25 bp, Homo sapien
aattataacgttgtagccatgatca

SEQ ID NO: 2254905 - DNA, 25 bp, Homo sapien
ggaattataacgttgtagccatgat

SEQ ID NO: 2254906 - DNA, 25 bp, Homo sapien
tgtttggaattataacgttgtagcc

SEQ ID NO: 2254907 - DNA, 25 bp, Homo sapien
ttagcttcgtaaagggtgttgtggc

SEQ ID NO: 2254908 - DNA, 25 bp, Homo sapien
agctgccacttctgtacccatgttc

SEQ ID NO: 2254909 - DNA, 25 bp, Homo sapien
gcagctctttattagcttcgtaaag

SEQ ID NO: 2254910 - DNA, 25 bp, Homo sapien
ttctcttcctgccaatgtttgcagc

SEQ ID NO: 2254911 - DNA, 25 bp, Homo sapien
tgatgatgctgtcagtagaaagtgg

SEQ ID NO: 2254912 - DNA, 25 bp, Homo sapien
tgtcagtagaaagtggtacaatcac

SEQ ID NO: 2254913 - DNA, 25 bp, Homo sapien
gtggtacaatcactgaacaccctga

SEQ ID NO: 2254914 - DNA, 25 bp, Homo sapien
gaacaccctgatatacctacaaaca

SEQ ID NO: 2254915 - DNA, 25 bp, Homo sapien
tgtcattgacaaggagaaattcggt

SEQ ID NO: 2254916 - DNA, 25 bp, Homo sapien
tgacgaaacttttacacttgtgcat

SEQ ID NO: 2254917 - DNA, 25 bp, Homo sapien
gatgctgacgaaacttttacacttg

SEQ ID NO: 2254918 - DNA, 25 bp, Homo sapien
gttgcaatcttgtgtggacgctgat

SEQ ID NO: 2254919 - DNA, 25 bp, Homo sapien
atcctggaacaaaaagtgcatcttt

SEQ ID NO: 2254920 - DNA, 25 bp, Homo sapien
catctttttgaagagtgacagtcat

SEQ ID NO: 2254921 - DNA, 25 bp, Homo sapien
tctggttagcatcttcaaatcctgg

SEQ ID NO: 2254922 - DNA, 25 bp, Homo sapien
tgtgtactttctggttagcatcttc

SEQ ID NO: 2254923 - DNA, 25 bp, Homo sapien
ggctgtatcccagcatataacacag

SEQ ID NO: 2254924 - DNA, 25 bp, Homo sapien
gaatgcctagtctatgaccctgttg

SEQ ID NO: 2254925 - DNA, 25 bp, Homo sapien
ctatgaccctgttgagtgaatggag

SEQ ID NO: 2254926 - DNA, 25 bp, Homo sapien
tgttgctgctaccctcgctgttacc

SEQ ID NO: 2254927 - DNA, 25 bp, Homo sapien
gccctctttggctatcagacaacgt

SEQ ID NO: 2254928 - DNA, 25 bp, Homo sapien
taccactggacattcccctggcatg

SEQ ID NO: 2254929 - DNA, 25 bp, Homo sapien
cagacaacgttcacagagtctgcag

SEQ ID NO: 2254930 - DNA, 25 bp, Homo sapien
tgcagacatctgtgtgcccatagga

SEQ ID NO: 2254931 - DNA, 25 bp, Homo sapien
cacatgggcagttctccttcagtgt

SEQ ID NO: 2254932 - DNA, 25 bp, Homo sapien
acatggtatccatctgtcggcattg

SEQ ID NO: 2254933 - DNA, 25 bp, Homo sapien
cattgtcacataacatgcccatcca

SEQ ID NO: 2254934 - DNA, 25 bp, Homo sapien
tctgtcggcattgtcacataacatg

SEQ ID NO: 2254935 - DNA, 25 bp, Homo sapien
gacaaagatgttctctcttcctgtt

SEQ ID NO: 2254936 - DNA, 25 bp, Homo sapien
tcttttagttgcattagaaacgtgg

SEQ ID NO: 2254937 - DNA, 25 bp, Homo sapien
tgtcgtaatgacacactcggcatca

SEQ ID NO: 2254938 - DNA, 25 bp, Homo sapien
cggcatcattaagtgtccgtgaaga

SEQ ID NO: 2254939 - DNA, 25 bp, Homo sapien
agaaacgtggtttgtgaccactgag

SEQ ID NO: 2254940 - DNA, 25 bp, Homo sapien
gttgtaactaccctgcagctgttgc

SEQ ID NO: 2254941 - DNA, 25 bp, Homo sapien
cagttgattgactctcctgatgagt

SEQ ID NO: 2254942 - DNA, 25 bp, Homo sapien
gttgcttgcttgctacactgtaggt

SEQ ID NO: 2254943 - DNA, 25 bp, Homo sapien
ttttcagtatatacttgtcagttga

SEQ ID NO: 2254944 - DNA, 25 bp, Homo sapien
agtcctcataggaaccaagacaagg

SEQ ID NO: 2254945 - DNA, 25 bp, Homo sapien
aaagctttctcattagtcctcatag

SEQ ID NO: 2254946 - DNA, 25 bp, Homo sapien
taagtcccctgcacaatccagcatg

SEQ ID NO: 2254947 - DNA, 25 bp, Homo sapien
caaggtgtacaatttggcagcgagg

SEQ ID NO: 2254948 - DNA, 25 bp, Homo sapien
cactcccgatactcaacctggaaca

SEQ ID NO: 2254949 - DNA, 25 bp, Homo sapien
gaatattcctcccactcccgatact

SEQ ID NO: 2254950 - DNA, 25 bp, Homo sapien
gctaatgatatcaccatttatctga

SEQ ID NO: 2254951 - DNA, 25 bp, Homo sapien
tctgaacaggtgtgggtttggaata

SEQ ID NO: 2254952 - DNA, 25 bp, Homo sapien
ctgacagactttctggtcatcacag

SEQ ID NO: 2254953 - DNA, 25 bp, Homo sapien
cagactttctggtcatcacaggaca

SEQ ID NO: 2254954 - DNA, 25 bp, Homo sapien
agactttctggtcatcacaggacat

SEQ ID NO: 2254955 - DNA, 25 bp, Homo sapien
gacagactttctggtcatcacagga

SEQ ID NO: 2254956 - DNA, 25 bp, Homo sapien
tgtcgacaagaatgttcttatgcat

SEQ ID NO: 2254957 - DNA, 25 bp, Homo sapien
actaatctgatcctgctcctgctta

SEQ ID NO: 2254958 - DNA, 25 bp, Homo sapien
gagtgggtctgaagaatgacggagc

SEQ ID NO: 2254959 - DNA, 25 bp, Homo sapien
gacggagccgctcactaatctgatc

SEQ ID NO: 2254960 - DNA, 25 bp, Homo sapien
tctgaagaatgacggagccgctcac

SEQ ID NO: 2254961 - DNA, 25 bp, Homo sapien
caaagcgtatgggtctgtaaatcaa

SEQ ID NO: 2254962 - DNA, 25 bp, Homo sapien
gactgaacccgaacccgagcctgga

SEQ ID NO: 2254963 - DNA, 25 bp, Homo sapien
cagcagcaaggattgaagcaccaac

SEQ ID NO: 2254964 - DNA, 25 bp, Homo sapien
gtaccaaggctaagactgaacccga

SEQ ID NO: 2254965 - DNA, 25 bp, Homo sapien
taacattggctttagctgccgcgct

SEQ ID NO: 2254966 - DNA, 25 bp, Homo sapien
ccatcatcggtacaaggcaacagtc

SEQ ID NO: 2254967 - DNA, 25 bp, Homo sapien
caagcaaagctaaacaaggcgtccc

SEQ ID NO: 2254968 - DNA, 25 bp, Homo sapien
gaggaaaacagacgcgacacgactg

SEQ ID NO: 2254969 - DNA, 25 bp, Homo sapien
atcatgtcgcgcaggtcgccgaggc

SEQ ID NO: 2254970 - DNA, 25 bp, Homo sapien
actgcagtcccggcgccctggtagt

SEQ ID NO: 2254971 - DNA, 25 bp, Homo sapien
ccctggtagtgctggtgcacgccgt

SEQ ID NO: 2254972 - DNA, 25 bp, Homo sapien
ccgggtggcaggtacatgctgatca

SEQ ID NO: 2254973 - DNA, 25 bp, Homo sapien
gtgcgatgcgatggcgggcggcggc

SEQ ID NO: 2254974 - DNA, 25 bp, Homo sapien
agagtgcgatgcgatggcgggcggc

SEQ ID NO: 2254975 - DNA, 25 bp, Homo sapien
tgagagtgcgatgcgatggcgggcg

SEQ ID NO: 2254976 - DNA, 25 bp, Homo sapien
ctgagagtgcgatgcgatggcgggc

SEQ ID NO: 2254977 - DNA, 25 bp, Homo sapien
gccgcagctgcggccgcggcggtgg

SEQ ID NO: 2254978 - DNA, 25 bp, Homo sapien
cagctgcggccgcggcggtggcggg

SEQ ID NO: 2254979 - DNA, 25 bp, Homo sapien
cgcagctgcggccgcggcggtggcg

SEQ ID NO: 2254980 - DNA, 25 bp, Homo sapien
ctcatggcggctgcggccgcagctg

SEQ ID NO: 2254981 - DNA, 25 bp, Homo sapien
ccgggcggcatcattgggctgtact

SEQ ID NO: 2254982 - DNA, 25 bp, Homo sapien
gacgttcatgtagctctgagcgccg

SEQ ID NO: 2254983 - DNA, 25 bp, Homo sapien
tgcaccagcgagtacgcgccgttgg

SEQ ID NO: 2254984 - DNA, 25 bp, Homo sapien
ggctgtactgcaggccggccatgtc

SEQ ID NO: 2254985 - DNA, 25 bp, Homo sapien
ccagccgttcacgtgcgtgtacgtg

SEQ ID NO: 2254986 - DNA, 25 bp, Homo sapien
acgtgcgtgtacgtgtccaggcgct

SEQ ID NO: 2254987 - DNA, 25 bp, Homo sapien
acgcccaccggactgctggcggcag

SEQ ID NO: 2254988 - DNA, 25 bp, Homo sapien
ccgttcacgtgcgtgtacgtgtcca

SEQ ID NO: 2254989 - DNA, 25 bp, Homo sapien
cgggaggcaggaggccgctgggcag

SEQ ID NO: 2254990 - DNA, 25 bp, Homo sapien
gaggcaggaggccgctgggcaggga

SEQ ID NO: 2254991 - DNA, 25 bp, Homo sapien
ggcaggaggccgctgggcagggagt

SEQ ID NO: 2254992 - DNA, 25 bp, Homo sapien
caggaggccgctgggcagggagtac

SEQ ID NO: 2254993 - DNA, 25 bp, Homo sapien
tcggcgtcggtcagcagtttccagt

SEQ ID NO: 2254994 - DNA, 25 bp, Homo sapien
ggatactccttcatgtgcacggcgc

SEQ ID NO: 2254995 - DNA, 25 bp, Homo sapien
tcgatgaatggtcgcttctcggcgt

SEQ ID NO: 2254996 - DNA, 25 bp, Homo sapien
tgcacggcgcgaagtcgcttggcct

SEQ ID NO: 2254997 - DNA, 25 bp, Homo sapien
acctccgctcgcaccaccgctgctg

SEQ ID NO: 2254998 - DNA, 25 bp, Homo sapien
cccccgccacctccgctcgcaccac

SEQ ID NO: 2254999 - DNA, 25 bp, Homo sapien
cgccgcccgagttcgcgccgccggc

SEQ ID NO: 2255000 - DNA, 25 bp, Homo sapien
gccgcccgagttcgcgccgccggct

SEQ ID NO: 2255001 - DNA, 25 bp, Homo sapien
tgtccctacggggttcttgagttca

SEQ ID NO: 2255002 - DNA, 25 bp, Homo sapien
tgcccgccgcttgtgtgggtgtccc

SEQ ID NO: 2255003 - DNA, 25 bp, Homo sapien
cgccgcttgtgtgggtgtccctacg

SEQ ID NO: 2255004 - DNA, 25 bp, Homo sapien
cggtgcccgccgcttgtgtgggtgt

SEQ ID NO: 2255005 - DNA, 25 bp, Homo sapien
gatgagttctctcgaacaggtcgca

SEQ ID NO: 2255006 - DNA, 25 bp, Homo sapien
gcgggcttctcgcacctgatgagtt

SEQ ID NO: 2255007 - DNA, 25 bp, Homo sapien
aatgctccgcgccaaatcagcagga

SEQ ID NO: 2255008 - DNA, 25 bp, Homo sapien
gggaagggtaggcttatcaaaatgc

SEQ ID NO: 2255009 - DNA, 25 bp, Homo sapien
tgattgattttggaatttgagcctc

SEQ ID NO: 2255010 - DNA, 25 bp, Homo sapien
tttgagcctctttgtgatacactgc

SEQ ID NO: 2255011 - DNA, 25 bp, Homo sapien
gggacttaggcacactcagaaaagc

SEQ ID NO: 2255012 - DNA, 25 bp, Homo sapien
gatacactgcttagaagtgaccatt

SEQ ID NO: 2255013 - DNA, 25 bp, Homo sapien
gacatgaacccagatgtaatctctt

SEQ ID NO: 2255014 - DNA, 25 bp, Homo sapien
tgacatgaacccagatgtaatctct

SEQ ID NO: 2255015 - DNA, 25 bp, Homo sapien
gcagatgctgctgacatgaacccag

SEQ ID NO: 2255016 - DNA, 25 bp, Homo sapien
agcagatgctgctgacatgaaccca

SEQ ID NO: 2255017 - DNA, 25 bp, Homo sapien
tcttcaagtgctcgggatctgcggc

SEQ ID NO: 2255018 - DNA, 25 bp, Homo sapien
gatctgcggcagtgtgtcatccacc

SEQ ID NO: 2255019 - DNA, 25 bp, Homo sapien
tacacatgtgcagcctgagcagggt

SEQ ID NO: 2255020 - DNA, 25 bp, Homo sapien
agaaggagacaggttgttttcattc

SEQ ID NO: 2255021 - DNA, 25 bp, Homo sapien
tctttgttaggctttaatagaccaa

SEQ ID NO: 2255022 - DNA, 25 bp, Homo sapien
ctttgttaggctttaatagaccaat

SEQ ID NO: 2255023 - DNA, 25 bp, Homo sapien
tttgttaggctttaatagaccaatg

SEQ ID NO: 2255024 - DNA, 25 bp, Homo sapien
atctctactcactgcaatcaccgtc

SEQ ID NO: 2255025 - DNA, 25 bp, Homo sapien
cctggcctgtatttttgttgtttgt

SEQ ID NO: 2255026 - DNA, 25 bp, Homo sapien
ctctactcactgcaatcaccgtctc

SEQ ID NO: 2255027 - DNA, 25 bp, Homo sapien
tcaccgtctcccagcttcaagcgat

SEQ ID NO: 2255028 - DNA, 25 bp, Homo sapien
gccatcacgcctggcccacagtgtc

SEQ ID NO: 2255029 - DNA, 25 bp, Homo sapien
agccatcacgcctggcccacagtgt

SEQ ID NO: 2255030 - DNA, 25 bp, Homo sapien
gagccatcacgcctggcccacagtg

SEQ ID NO: 2255031 - DNA, 25 bp, Homo sapien
cccatatgtagactgctccacacaa

SEQ ID NO: 2255032 - DNA, 25 bp, Homo sapien
actctggaggttgctgctccaaggc

SEQ ID NO: 2255033 - DNA, 25 bp, Homo sapien
tgcccactctggaggttgctgctcc

SEQ ID NO: 2255034 - DNA, 25 bp, Homo sapien
gactgctccacacaacaaatctctg

SEQ ID NO: 2255035 - DNA, 25 bp, Homo sapien
gaggcctcgtaaacgtgaggcttaa

SEQ ID NO: 2255036 - DNA, 25 bp, Homo sapien
tcctggaggcaattccctctgtgat

SEQ ID NO: 2255037 - DNA, 25 bp, Homo sapien
ccagatagaggcctcgtaaacgtga

SEQ ID NO: 2255038 - DNA, 25 bp, Homo sapien
tcctgtagctctggcccagatagag

SEQ ID NO: 2255039 - DNA, 25 bp, Homo sapien
tgttgccactgtggagtagactcct

SEQ ID NO: 2255040 - DNA, 25 bp, Homo sapien
gaactacaagttctgtatcctccat

SEQ ID NO: 2255041 - DNA, 25 bp, Homo sapien
tggctggtactagaactacaagttc

SEQ ID NO: 2255042 - DNA, 25 bp, Homo sapien
tggagtagactcctatggctggtac

SEQ ID NO: 2255043 - DNA, 25 bp, Homo sapien
cccttaaagcttcttgtgaattgat

SEQ ID NO: 2255044 - DNA, 25 bp, Homo sapien
ttcccttaaagcttcttgtgaattg

SEQ ID NO: 2255045 - DNA, 25 bp, Homo sapien
ccttaaagcttcttgtgaattgatt

SEQ ID NO: 2255046 - DNA, 25 bp, Homo sapien
taaagcttcttgtgaattgatttca

SEQ ID NO: 2255047 - DNA, 25 bp, Homo sapien
taatctggactacatcaggtctggt

SEQ ID NO: 2255048 - DNA, 25 bp, Homo sapien
tatttgtggtgtaggctggctaatc

SEQ ID NO: 2255049 - DNA, 25 bp, Homo sapien
tagcatctctggtatgcaacctggg

SEQ ID NO: 2255050 - DNA, 25 bp, Homo sapien
caacctgggtgattgggtgtcacag

SEQ ID NO: 2255051 - DNA, 25 bp, Homo sapien
ctgtagagaacagcagtaggctgct

SEQ ID NO: 2255052 - DNA, 25 bp, Homo sapien
gtagagaacagcagtaggctgcttc

SEQ ID NO: 2255053 - DNA, 25 bp, Homo sapien
ccttgtggtgggcaacctttcaact

SEQ ID NO: 2255054 - DNA, 25 bp, Homo sapien
tttcaactttatgggtgatgctgcc

SEQ ID NO: 2255055 - DNA, 25 bp, Homo sapien
ggatgaaataacagctccctgctca

SEQ ID NO: 2255056 - DNA, 25 bp, Homo sapien
taatcattgccaaaccctgctgatg

SEQ ID NO: 2255057 - DNA, 25 bp, Homo sapien
tgttaccctggtaggagatgtgagc

SEQ ID NO: 2255058 - DNA, 25 bp, Homo sapien
tgaaataacagctccctgctcaggc

SEQ ID NO: 2255059 - DNA, 25 bp, Homo sapien
ttgaggacactaacggagagcttgc

SEQ ID NO: 2255060 - DNA, 25 bp, Homo sapien
ttcaactttgaggacactaacggag

SEQ ID NO: 2255061 - DNA, 25 bp, Homo sapien
aactttgaggacactaacggagagc

SEQ ID NO: 2255062 - DNA, 25 bp, Homo sapien
ctttgaggacactaacggagagctt

SEQ ID NO: 2255063 - DNA, 25 bp, Homo sapien
agagattctcccactctgagatatc

SEQ ID NO: 2255064 - DNA, 25 bp, Homo sapien
cagagattctcccactctgagatat

SEQ ID NO: 2255065 - DNA, 25 bp, Homo sapien
agattctcccactctgagatatcac

SEQ ID NO: 2255066 - DNA, 25 bp, Homo sapien
gagattctcccactctgagatatca

SEQ ID NO: 2255067 - DNA, 25 bp, Homo sapien
tcccatggccaatctgtctctagat

SEQ ID NO: 2255068 - DNA, 25 bp, Homo sapien
tggccaatctgtctctagatcccat

SEQ ID NO: 2255069 - DNA, 25 bp, Homo sapien
taactattggatttgccccttcctg

SEQ ID NO: 2255070 - DNA, 25 bp, Homo sapien
tttgctgtaactattggatttgccc

SEQ ID NO: 2255071 - DNA, 25 bp, Homo sapien
cactaagggcgcaaggccaggtctt

SEQ ID NO: 2255072 - DNA, 25 bp, Homo sapien
tattactcgtcagggatgtagccag

SEQ ID NO: 2255073 - DNA, 25 bp, Homo sapien
cagatgcagggtctccgtgtgacga

SEQ ID NO: 2255074 - DNA, 25 bp, Homo sapien
gataagactataagatgctgcaagc

SEQ ID NO: 2255075 - DNA, 25 bp, Homo sapien
catgtatctgttcaaaaagagactt

SEQ ID NO: 2255076 - DNA, 25 bp, Homo sapien
ctgagcctccaaagttaagcagagg

SEQ ID NO: 2255077 - DNA, 25 bp, Homo sapien
gagacttttgttgatcagccttgcc

SEQ ID NO: 2255078 - DNA, 25 bp, Homo sapien
tgacagtgaattttagaccttccct

SEQ ID NO: 2255079 - DNA, 25 bp, Homo sapien
gtcagctgtatagtgggtttgccat

SEQ ID NO: 2255080 - DNA, 25 bp, Homo sapien
ggtcagctgtatagtgggtttgcca

SEQ ID NO: 2255081 - DNA, 25 bp, Homo sapien
gggtcagctgtatagtgggtttgcc

SEQ ID NO: 2255082 - DNA, 25 bp, Homo sapien
ggggtcagctgtatagtgggtttgc

SEQ ID NO: 2255083 - DNA, 25 bp, Homo sapien
acttcagaagcaatcataagttggg

SEQ ID NO: 2255084 - DNA, 25 bp, Homo sapien
agattctcggatgaactatctgagc

SEQ ID NO: 2255085 - DNA, 25 bp, Homo sapien
aaaagtcaggacagattctcggatg

SEQ ID NO: 2255086 - DNA, 25 bp, Homo sapien
tgagcatccattatgccagcatccc

SEQ ID NO: 2255087 - DNA, 25 bp, Homo sapien
ctttccctgaaatgctcattgcttc

SEQ ID NO: 2255088 - DNA, 25 bp, Homo sapien
ttccctgaaatgctcattgcttcct

SEQ ID NO: 2255089 - DNA, 25 bp, Homo sapien
cctgaaatgctcattgcttccttgc

SEQ ID NO: 2255090 - DNA, 25 bp, Homo sapien
gcttccttgctttctcccctttcta

SEQ ID NO: 2255091 - DNA, 25 bp, Homo sapien
tctctaaattcttggccagtgcctt

SEQ ID NO: 2255092 - DNA, 25 bp, Homo sapien
cacaaagctcaaggagccacgtcat

SEQ ID NO: 2255093 - DNA, 25 bp, Homo sapien
ttcctttgactctacacaaagctca

SEQ ID NO: 2255094 - DNA, 25 bp, Homo sapien
cctgtctctaaattcttggccagtg

SEQ ID NO: 2255095 - DNA, 25 bp, Homo sapien
gccccttccaggttgggatccatac

SEQ ID NO: 2255096 - DNA, 25 bp, Homo sapien
cttccaggttgggatccatactcct

SEQ ID NO: 2255097 - DNA, 25 bp, Homo sapien
ccaggttgggatccatactcctctt

SEQ ID NO: 2255098 - DNA, 25 bp, Homo sapien
cccttccaggttgggatccatactc

SEQ ID NO: 2255099 - DNA, 25 bp, Homo sapien
ccttgacaggttgcaatcggtcttt

SEQ ID NO: 2255100 - DNA, 25 bp, Homo sapien
ctgttccttgacaggttgcaatcgg

SEQ ID NO: 2255101 - DNA, 25 bp, Homo sapien
gacaggttgcaatcggtcttttgat

SEQ ID NO: 2255102 - DNA, 25 bp, Homo sapien
tgtgtgctttctctgcagtaacaaa

SEQ ID NO: 2255103 - DNA, 25 bp, Homo sapien
taagccaagtgtacatgaagttggt

SEQ ID NO: 2255104 - DNA, 25 bp, Homo sapien
caagtgtacatgaagttggtattcc

SEQ ID NO: 2255105 - DNA, 25 bp, Homo sapien
aataagccaagtgtacatgaagttg

SEQ ID NO: 2255106 - DNA, 25 bp, Homo sapien
ctgaataagccaagtgtacatgaag

SEQ ID NO: 2255107 - DNA, 25 bp, Homo sapien
tatgggctctagagagagtactaga

SEQ ID NO: 2255108 - DNA, 25 bp, Homo sapien
cagaatctgggactagtatgggctc

SEQ ID NO: 2255109 - DNA, 25 bp, Homo sapien
cactactctcgggaccagggttctg

SEQ ID NO: 2255110 - DNA, 25 bp, Homo sapien
tacaaacgcgattagccctactcca

SEQ ID NO: 2255111 - DNA, 25 bp, Homo sapien
gcaaagagagtgactgacgcatcca

SEQ ID NO: 2255112 - DNA, 25 bp, Homo sapien
tctggtgtagcgaagaaaatttgcc

SEQ ID NO: 2255113 - DNA, 25 bp, Homo sapien
gttgaacagagcactgcggcaaaga

SEQ ID NO: 2255114 - DNA, 25 bp, Homo sapien
cagggacatgtgaccattctctggt

SEQ ID NO: 2255115 - DNA, 25 bp, Homo sapien
gcaatctctgctatttccacgtctg

SEQ ID NO: 2255116 - DNA, 25 bp, Homo sapien
cagtagcgacatcacaaaatcctgt

SEQ ID NO: 2255117 - DNA, 25 bp, Homo sapien
cacgtctgaatagtcagtagcgaca

SEQ ID NO: 2255118 - DNA, 25 bp, Homo sapien
gctatttccacgtctgaatagtcag

SEQ ID NO: 2255119 - DNA, 25 bp, Homo sapien
agcgactccctatctggaggctggt

SEQ ID NO: 2255120 - DNA, 25 bp, Homo sapien
tctataaatgtttgcagcgactccc

SEQ ID NO: 2255121 - DNA, 25 bp, Homo sapien
aaactgattgtgtataccctattac

SEQ ID NO: 2255122 - DNA, 25 bp, Homo sapien
caacatggtgtttcatagcaattaa

SEQ ID NO: 2255123 - DNA, 25 bp, Homo sapien
tcttagtgagtactggaaacaccca

SEQ ID NO: 2255124 - DNA, 25 bp, Homo sapien
cactgtcgaagctctaagcaaacgt

SEQ ID NO: 2255125 - DNA, 25 bp, Homo sapien
tggtcatcactaagcacaaaggctg

SEQ ID NO: 2255126 - DNA, 25 bp, Homo sapien
gaactctgtggcttacactgtcgaa

SEQ ID NO: 2255127 - DNA, 25 bp, Homo sapien
cagaaactcggtcctcctctgaaag

SEQ ID NO: 2255128 - DNA, 25 bp, Homo sapien
gagcttccttcaggccgtttcacaa

SEQ ID NO: 2255129 - DNA, 25 bp, Homo sapien
aaataaaatcctcccaggctggcgt

SEQ ID NO: 2255130 - DNA, 25 bp, Homo sapien
aggtgtcaagcgtgcacaggcagca

SEQ ID NO: 2255131 - DNA, 25 bp, Homo sapien
aagacgagacgagtcctccccagag

SEQ ID NO: 2255132 - DNA, 25 bp, Homo sapien
gagattgcgtggctcggagcagcca

SEQ ID NO: 2255133 - DNA, 25 bp, Homo sapien
caaagacgagacgagtcctccccag

SEQ ID NO: 2255134 - DNA, 25 bp, Homo sapien
gaggcggttaaggagaggagattgc

SEQ ID NO: 2255135 - DNA, 25 bp, Homo sapien
cccacaaattccctgagcggagcgt

SEQ ID NO: 2255136 - DNA, 25 bp, Homo sapien
ccgtattccgctttaaccaagcttg

SEQ ID NO: 2255137 - DNA, 25 bp, Homo sapien
agcggagcgtcttcgctggctcgca

SEQ ID NO: 2255138 - DNA, 25 bp, Homo sapien
taaccaagcttgtttccctggcggc

SEQ ID NO: 2255139 - DNA, 25 bp, Homo sapien
ctcctctccgtggtgccacgtagta

SEQ ID NO: 2255140 - DNA, 25 bp, Homo sapien
tctccgtggtgccacgtagtagacc

SEQ ID NO: 2255141 - DNA, 25 bp, Homo sapien
gaatccccgacgcagctaatcaact

SEQ ID NO: 2255142 - DNA, 25 bp, Homo sapien
tggtgccacgtagtagacctccggt

SEQ ID NO: 2255143 - DNA, 25 bp, Homo sapien
gactcctgagttccacgatcgcttc

SEQ ID NO: 2255144 - DNA, 25 bp, Homo sapien
ccatcatacaaaatttgagtttccc

SEQ ID NO: 2255145 - DNA, 25 bp, Homo sapien
gcttcacaactgcaagtcaccatca

SEQ ID NO: 2255146 - DNA, 25 bp, Homo sapien
ttccctaagtccgcgcctttgagag

SEQ ID NO: 2255147 - DNA, 25 bp, Homo sapien
tattgttacgaccaagcattttcat

SEQ ID NO: 2255148 - DNA, 25 bp, Homo sapien
tgttactattgttacgaccaagcat

SEQ ID NO: 2255149 - DNA, 25 bp, Homo sapien
tctattctttccctgttactattgt

SEQ ID NO: 2255150 - DNA, 25 bp, Homo sapien
tctcttcagacgaaatgcaattttc

SEQ ID NO: 2255151 - DNA, 25 bp, Homo sapien
ttaccatgttttagtccctcccaga

SEQ ID NO: 2255152 - DNA, 25 bp, Homo sapien
tctgccactagttcaatgaatggtc

SEQ ID NO: 2255153 - DNA, 25 bp, Homo sapien
gacattaccttgagagaaaggtgca

SEQ ID NO: 2255154 - DNA, 25 bp, Homo sapien
cagaaaaggaagtagggcataatgc

SEQ ID NO: 2255155 - DNA, 25 bp, Homo sapien
gggtcttccagcgacttcaagtctt

SEQ ID NO: 2255156 - DNA, 25 bp, Homo sapien
taatctcaaggtcttccagataatc

SEQ ID NO: 2255157 - DNA, 25 bp, Homo sapien
caatccatgtcttccggacaatcca

SEQ ID NO: 2255158 - DNA, 25 bp, Homo sapien
aacaactccgggtcttccagcgact

SEQ ID NO: 2255159 - DNA, 25 bp, Homo sapien
tcttccagcaattactggtcttcca

SEQ ID NO: 2255160 - DNA, 25 bp, Homo sapien
tccagcaattactggtcttccacca

SEQ ID NO: 2255161 - DNA, 25 bp, Homo sapien
cagtcttccagcaattactggtctt

SEQ ID NO: 2255162 - DNA, 25 bp, Homo sapien
gtcttccagcaattactggtcttcc

SEQ ID NO: 2255163 - DNA, 25 bp, Homo sapien
caaatacagatcttccagctaatcc

SEQ ID NO: 2255164 - DNA, 25 bp, Homo sapien
atcaaatacagatcttccagctaat

SEQ ID NO: 2255165 - DNA, 25 bp, Homo sapien
aaatccaagtcttccagtaaatcta

SEQ ID NO: 2255166 - DNA, 25 bp, Homo sapien
ccagtaaatctagttcttccagaaa

SEQ ID NO: 2255167 - DNA, 25 bp, Homo sapien
ttccagtcaatcagtgtcttccaga

SEQ ID NO: 2255168 - DNA, 25 bp, Homo sapien
agaaagaaatccaggtcttccagtc

SEQ ID NO: 2255169 - DNA, 25 bp, Homo sapien
cttccagtcaatcagtgtcttccag

SEQ ID NO: 2255170 - DNA, 25 bp, Homo sapien
ttccagtcagtcagtgtcttccaga

SEQ ID NO: 2255171 - DNA, 25 bp, Homo sapien
catcttccggaaaaaatccaggtct

SEQ ID NO: 2255172 - DNA, 25 bp, Homo sapien
ttccagtcaatccacatcttccgga

SEQ ID NO: 2255173 - DNA, 25 bp, Homo sapien
gtcaatccacatcttccggaaaaaa

SEQ ID NO: 2255174 - DNA, 25 bp, Homo sapien
ccacatcttccggaaaaaatccagg

SEQ ID NO: 2255175 - DNA, 25 bp, Homo sapien
gatccacgtcttccagaaaatccat

SEQ ID NO: 2255176 - DNA, 25 bp, Homo sapien
ttcctgaagatccacgtcttccaga

SEQ ID NO: 2255177 - DNA, 25 bp, Homo sapien
cctgaagatccacgtcttccagaaa

SEQ ID NO: 2255178 - DNA, 25 bp, Homo sapien
gaagatccacgtcttccagaaaatc

SEQ ID NO: 2255179 - DNA, 25 bp, Homo sapien
ttcccaacaatccaagtcttccgga

SEQ ID NO: 2255180 - DNA, 25 bp, Homo sapien
caagtcttccggataatttgggtct

SEQ ID NO: 2255181 - DNA, 25 bp, Homo sapien
tccggataatttgggtcttcctgaa

SEQ ID NO: 2255182 - DNA, 25 bp, Homo sapien
aaatccacgtcttcccaacaatcca

SEQ ID NO: 2255183 - DNA, 25 bp, Homo sapien
acaaagccatgtcttccagactatc

SEQ ID NO: 2255184 - DNA, 25 bp, Homo sapien
atctatagcttccaaaaaatccggg

SEQ ID NO: 2255185 - DNA, 25 bp, Homo sapien
ccaacaaagccatgtcttccagact

SEQ ID NO: 2255186 - DNA, 25 bp, Homo sapien
taaatctatagcttccaaaaaatcc

SEQ ID NO: 2255187 - DNA, 25 bp, Homo sapien
gccatgtcttccatcaaattaatgt

SEQ ID NO: 2255188 - DNA, 25 bp, Homo sapien
aatccatagcttccgaaaaatccag

SEQ ID NO: 2255189 - DNA, 25 bp, Homo sapien
taatgtcttccagcctacttgtgtc

SEQ ID NO: 2255190 - DNA, 25 bp, Homo sapien
caaatccatagcttccgaaaaatcc

SEQ ID NO: 2255191 - DNA, 25 bp, Homo sapien
gctacgtcttccaacaaatccatgt

SEQ ID NO: 2255192 - DNA, 25 bp, Homo sapien
catctccacgtcttccagcatctct

SEQ ID NO: 2255193 - DNA, 25 bp, Homo sapien
aactaagctacgtcttccaacaaat

SEQ ID NO: 2255194 - DNA, 25 bp, Homo sapien
agcatctgctcgtcttccaacatct

SEQ ID NO: 2255195 - DNA, 25 bp, Homo sapien
ttgctgagccaaacaagaccatgtg

SEQ ID NO: 2255196 - DNA, 25 bp, Homo sapien
tatatgaatgttctacagctacaca

SEQ ID NO: 2255197 - DNA, 25 bp, Homo sapien
tcatcagtgagagaaataggtcaca

SEQ ID NO: 2255198 - DNA, 25 bp, Homo sapien
caagcaatcatgtgtctaacagttg

SEQ ID NO: 2255199 - DNA, 25 bp, Homo sapien
ctgagatgattccaacagggccttt

SEQ ID NO: 2255200 - DNA, 25 bp, Homo sapien
gagatgattccaacagggcctttgc

SEQ ID NO: 2255201 - DNA, 25 bp, Homo sapien
ttcagtcagtgtggcccttcctgtc

SEQ ID NO: 2255202 - DNA, 25 bp, Homo sapien
ggactgagatgattccaacagggcc

SEQ ID NO: 2255203 - DNA, 25 bp, Homo sapien
gacatacaatggtgtggcagacatg

SEQ ID NO: 2255204 - DNA, 25 bp, Homo sapien
taagaggcaccacggtttatcgttc

SEQ ID NO: 2255205 - DNA, 25 bp, Homo sapien
aatgtgctggaatagccaggctccc

SEQ ID NO: 2255206 - DNA, 25 bp, Homo sapien
gaaagcagaagcgtacaatgcctct

SEQ ID NO: 2255207 - DNA, 25 bp, Homo sapien
cagcttccattggcgcccagagtcc

SEQ ID NO: 2255208 - DNA, 25 bp, Homo sapien
agagtccctttcaggggtacagttg

SEQ ID NO: 2255209 - DNA, 25 bp, Homo sapien
gagtccctttcaggggtacagttgc

SEQ ID NO: 2255210 - DNA, 25 bp, Homo sapien
tagttagagctagcttctaagtagc

SEQ ID NO: 2255211 - DNA, 25 bp, Homo sapien
taagtagctttcataaccatcctgg

SEQ ID NO: 2255212 - DNA, 25 bp, Homo sapien
tctaggttggcactgttagcatctt

SEQ ID NO: 2255213 - DNA, 25 bp, Homo sapien
ctggaagctgttggacagcgtagta

SEQ ID NO: 2255214 - DNA, 25 bp, Homo sapien
gctgcttgccatagagccttgtgtg

SEQ ID NO: 2255215 - DNA, 25 bp, Homo sapien
tttgacatcaaacggaggctgcttg

SEQ ID NO: 2255216 - DNA, 25 bp, Homo sapien
tattcttctggcatggttgccaacg

SEQ ID NO: 2255217 - DNA, 25 bp, Homo sapien
tgccaacgtgtagcattggaggatc

SEQ ID NO: 2255218 - DNA, 25 bp, Homo sapien
aatgggatcattgaatgaagagttg

SEQ ID NO: 2255219 - DNA, 25 bp, Homo sapien
aaatgggatcattgaatgaagagtt

SEQ ID NO: 2255220 - DNA, 25 bp, Homo sapien
aaaatgggatcattgaatgaagagt

SEQ ID NO: 2255221 - DNA, 25 bp, Homo sapien
tgcatataataccagagaggtccca

SEQ ID NO: 2255222 - DNA, 25 bp, Homo sapien
tgtaatactgtaagggaccactctg

SEQ ID NO: 2255223 - DNA, 25 bp, Homo sapien
tggtgccacaatctataatccaggc

SEQ ID NO: 2255224 - DNA, 25 bp, Homo sapien
ggttatagctaagtctccacgaggt

SEQ ID NO: 2255225 - DNA, 25 bp, Homo sapien
gatcctgtgggttcaagaggaaaaa

SEQ ID NO: 2255226 - DNA, 25 bp, Homo sapien
tggatcctgtgggttcaagaggaaa

SEQ ID NO: 2255227 - DNA, 25 bp, Homo sapien
cctgtgggttcaagaggaaaaatgc

SEQ ID NO: 2255228 - DNA, 25 bp, Homo sapien
tgtgggttcaagaggaaaaatgcaa

SEQ ID NO: 2255229 - DNA, 25 bp, Homo sapien
gatcctatggaacccaacacctggg

SEQ ID NO: 2255230 - DNA, 25 bp, Homo sapien
ggctgacccctgaagattgcaattc

SEQ ID NO: 2255231 - DNA, 25 bp, Homo sapien
tgactctaggcccatcaaattagcc

SEQ ID NO: 2255232 - DNA, 25 bp, Homo sapien
cagcctagagttgagagtgacttcc

SEQ ID NO: 2255233 - DNA, 25 bp, Homo sapien
caagtggagaatcaagtcaagaact

SEQ ID NO: 2255234 - DNA, 25 bp, Homo sapien
aagtggagaatcaagtcaagaactc

SEQ ID NO: 2255235 - DNA, 25 bp, Homo sapien
aaataattcaacaacgtttccagat

SEQ ID NO: 2255236 - DNA, 25 bp, Homo sapien
agatactggagcctccttaagggta

SEQ ID NO: 2255237 - DNA, 25 bp, Homo sapien
tggagcctccttaagggtagagagt

SEQ ID NO: 2255238 - DNA, 25 bp, Homo sapien
actggagcctccttaagggtagaga

SEQ ID NO: 2255239 - DNA, 25 bp, Homo sapien
tactggagcctccttaagggtagag

SEQ ID NO: 2255240 - DNA, 25 bp, Homo sapien
gaagaggagtgctggttcatgaccc

SEQ ID NO: 2255241 - DNA, 25 bp, Homo sapien
catgaggtattcaactagctcctag

SEQ ID NO: 2255242 - DNA, 25 bp, Homo sapien
ttcatgacccgtcatctgcatggtg

SEQ ID NO: 2255243 - DNA, 25 bp, Homo sapien
tgatctctgctagcccactgggaag

SEQ ID NO: 2255244 - DNA, 25 bp, Homo sapien
agactgtgtgaactgctgttgctaa

SEQ ID NO: 2255245 - DNA, 25 bp, Homo sapien
aattctgatccaagacggcagactg

SEQ ID NO: 2255246 - DNA, 25 bp, Homo sapien
ctgtgtaaacattgcatactgatgg

SEQ ID NO: 2255247 - DNA, 25 bp, Homo sapien
gatggaatttgcttgtcaactcaac

SEQ ID NO: 2255248 - DNA, 25 bp, Homo sapien
gcaatcctgattataggaagcctgg

SEQ ID NO: 2255249 - DNA, 25 bp, Homo sapien
caaagagatggacctttaccacaat

SEQ ID NO: 2255250 - DNA, 25 bp, Homo sapien
tatgccagggccattaattcaaact

SEQ ID NO: 2255251 - DNA, 25 bp, Homo sapien
ggaggcgaaaaagctgcaatcctga

SEQ ID NO: 2255252 - DNA, 25 bp, Homo sapien
ttctgaatctgtgatcgggatccat

SEQ ID NO: 2255253 - DNA, 25 bp, Homo sapien
ctttctgaatctgtgatcgggatcc

SEQ ID NO: 2255254 - DNA, 25 bp, Homo sapien
cctttctgaatctgtgatcgggatc

SEQ ID NO: 2255255 - DNA, 25 bp, Homo sapien
tttctgaatctgtgatcgggatcca

SEQ ID NO: 2255256 - DNA, 25 bp, Homo sapien
aatttcatgaaggattccaggttct

SEQ ID NO: 2255257 - DNA, 25 bp, Homo sapien
ttaccactaaattctgtgtgggtga

SEQ ID NO: 2255258 - DNA, 25 bp, Homo sapien
taccactaaattctgtgtgggtgag

SEQ ID NO: 2255259 - DNA, 25 bp, Homo sapien
agatggagccttgctttgtcggcca

SEQ ID NO: 2255260 - DNA, 25 bp, Homo sapien
tggagccttgctttgtcggccagcc

SEQ ID NO: 2255261 - DNA, 25 bp, Homo sapien
gagccttgctttgtcggccagcctg

SEQ ID NO: 2255262 - DNA, 25 bp, Homo sapien
gatggagccttgctttgtcggccag

SEQ ID NO: 2255263 - DNA, 25 bp, Homo sapien
caactagaacttgtcgggtaggcat

SEQ ID NO: 2255264 - DNA, 25 bp, Homo sapien
aatgacagccgactttcgagcgcag

SEQ ID NO: 2255265 - DNA, 25 bp, Homo sapien
caggcctgtcaacttgggaatatcg

SEQ ID NO: 2255266 - DNA, 25 bp, Homo sapien
gacccgtaaggatgatgccaccatt

SEQ ID NO: 2255267 - DNA, 25 bp, Homo sapien
ctggtgctcttggttgatatttgac

SEQ ID NO: 2255268 - DNA, 25 bp, Homo sapien
gcgctgcctccgattgccctggtgc

SEQ ID NO: 2255269 - DNA, 25 bp, Homo sapien
ggtgctcttggttgatatttgactt

SEQ ID NO: 2255270 - DNA, 25 bp, Homo sapien
ctccgattgccctggtgctcttggt

SEQ ID NO: 2255271 - DNA, 25 bp, Homo sapien
tttccagtcctctccatcgttacgg

SEQ ID NO: 2255272 - DNA, 25 bp, Homo sapien
tgcataggcgaataaacataatggg

SEQ ID NO: 2255273 - DNA, 25 bp, Homo sapien
gggaacatgcataggcgaataaaca

SEQ ID NO: 2255274 - DNA, 25 bp, Homo sapien
aacagatgagagaacgtggctttgg

SEQ ID NO: 2255275 - DNA, 25 bp, Homo sapien
tcagcattcctcacatctggtctga

SEQ ID NO: 2255276 - DNA, 25 bp, Homo sapien
attcctcacatctggtctgatcttt

SEQ ID NO: 2255277 - DNA, 25 bp, Homo sapien
cagcattcctcacatctggtctgat

SEQ ID NO: 2255278 - DNA, 25 bp, Homo sapien
gcattcctcacatctggtctgatct

SEQ ID NO: 2255279 - DNA, 25 bp, Homo sapien
ttagggtcccactggaagcactgtc

SEQ ID NO: 2255280 - DNA, 25 bp, Homo sapien
cactgtcacttctcaatactgtcac

SEQ ID NO: 2255281 - DNA, 25 bp, Homo sapien
ctcaatactgtcacactactggact

SEQ ID NO: 2255282 - DNA, 25 bp, Homo sapien
ccagaatcaccccagagaagcagtt

SEQ ID NO: 2255283 - DNA, 25 bp, Homo sapien
caccaccgccgaaggccgtcgtcca

SEQ ID NO: 2255284 - DNA, 25 bp, Homo sapien
gaaggccgtcgtccaccaccgccga

SEQ ID NO: 2255285 - DNA, 25 bp, Homo sapien
gccgtcgtccaccaccgccgaaggc

SEQ ID NO: 2255286 - DNA, 25 bp, Homo sapien
cgtccaccaccgccgaaggccgtcg

SEQ ID NO: 2255287 - DNA, 25 bp, Homo sapien
gccagcctgtgctagaaatgttcag

SEQ ID NO: 2255288 - DNA, 25 bp, Homo sapien
cttctgagtgtactgcctgaggcta

SEQ ID NO: 2255289 - DNA, 25 bp, Homo sapien
gggtcaatatcaggacctgcaggca

SEQ ID NO: 2255290 - DNA, 25 bp, Homo sapien
tctgagcagcatgcttgagggtcaa

SEQ ID NO: 2255291 - DNA, 25 bp, Homo sapien
ttgcctttgagttggataaatggct

SEQ ID NO: 2255292 - DNA, 25 bp, Homo sapien
ttggataaatggctgaaagctgatt

SEQ ID NO: 2255293 - DNA, 25 bp, Homo sapien
gataaatggctgaaagctgattctt

SEQ ID NO: 2255294 - DNA, 25 bp, Homo sapien
tgcctttgagttggataaatggctg

SEQ ID NO: 2255295 - DNA, 25 bp, Homo sapien
tctgacttgcggtaagagaaatttc

SEQ ID NO: 2255296 - DNA, 25 bp, Homo sapien
gactaaaccttgtcaatgatgtaga

SEQ ID NO: 2255297 - DNA, 25 bp, Homo sapien
caggagagcccgagtacagtttatt

SEQ ID NO: 2255298 - DNA, 25 bp, Homo sapien
actgggacaaggtatctgcgttgga

SEQ ID NO: 2255299 - DNA, 25 bp, Homo sapien
tgccgatcagcatacatttcctcct

SEQ ID NO: 2255300 - DNA, 25 bp, Homo sapien
ttgcaaaagccctcttggagccttg

SEQ ID NO: 2255301 - DNA, 25 bp, Homo sapien
tggagccttgtaatcaggccagtgg

SEQ ID NO: 2255302 - DNA, 25 bp, Homo sapien
ctgtatgccgatcagcatacatttc

SEQ ID NO: 2255303 - DNA, 25 bp, Homo sapien
aaagctacttaggaatacagtatct

SEQ ID NO: 2255304 - DNA, 25 bp, Homo sapien
tattgttcttggatagcctatgtta

SEQ ID NO: 2255305 - DNA, 25 bp, Homo sapien
cagataaatcggtcaaaagctactt

SEQ ID NO: 2255306 - DNA, 25 bp, Homo sapien
ttgtcaataaggagacaaacaatgg

SEQ ID NO: 2255307 - DNA, 25 bp, Homo sapien
tttaatacgattaaatgattacgac

SEQ ID NO: 2255308 - DNA, 25 bp, Homo sapien
tacgattaaatgattacgacattta

SEQ ID NO: 2255309 - DNA, 25 bp, Homo sapien
taaatgattacgacatttaatatga

SEQ ID NO: 2255310 - DNA, 25 bp, Homo sapien
aaatgattacgacatttaatatgac

SEQ ID NO: 2255311 - DNA, 25 bp, Homo sapien
aaagtggcacttttatccttagaca

SEQ ID NO: 2255312 - DNA, 25 bp, Homo sapien
ccagtatctgcgcttttattgcaga

SEQ ID NO: 2255313 - DNA, 25 bp, Homo sapien
gccatttcaagtctattacgcccaa

SEQ ID NO: 2255314 - DNA, 25 bp, Homo sapien
cattgatagtataatttcagcggcc

SEQ ID NO: 2255315 - DNA, 25 bp, Homo sapien
gaggaatctgggacacatctatgag

SEQ ID NO: 2255316 - DNA, 25 bp, Homo sapien
taaagtcaagttggctccagacatg

SEQ ID NO: 2255317 - DNA, 25 bp, Homo sapien
catagcccctagatagcagtacaag

SEQ ID NO: 2255318 - DNA, 25 bp, Homo sapien
aatgacttaacctggagcaatggcc

SEQ ID NO: 2255319 - DNA, 25 bp, Homo sapien
tgtgtaaaaccagtgcataggaaaa

SEQ ID NO: 2255320 - DNA, 25 bp, Homo sapien
gaggacactcggagtaggtagaaaa

SEQ ID NO: 2255321 - DNA, 25 bp, Homo sapien
ttttccaggtagtattgaggagctg

SEQ ID NO: 2255322 - DNA, 25 bp, Homo sapien
aaaaagaagtgtcaacaatttggct

SEQ ID NO: 2255323 - DNA, 25 bp, Homo sapien
tgagctgtccaaatcaatgtctgaa

SEQ ID NO: 2255324 - DNA, 25 bp, Homo sapien
tctgaaaaggcatagccaactctgg

SEQ ID NO: 2255325 - DNA, 25 bp, Homo sapien
tctgggaagatgtaagcctggcagc

SEQ ID NO: 2255326 - DNA, 25 bp, Homo sapien
ttggtcctgatctcgaaaggtggta

SEQ ID NO: 2255327 - DNA, 25 bp, Homo sapien
cacttccaagcacttccgagtgagt

SEQ ID NO: 2255328 - DNA, 25 bp, Homo sapien
ttccaagcacttccgagtgagtgag

SEQ ID NO: 2255329 - DNA, 25 bp, Homo sapien
gatcccggggatggccagggtagat

SEQ ID NO: 2255330 - DNA, 25 bp, Homo sapien
agcacttccgagtgagtgaggctcc

SEQ ID NO: 2255331 - DNA, 25 bp, Homo sapien
cagcagcaggtaactggagcgctat

SEQ ID NO: 2255332 - DNA, 25 bp, Homo sapien
ccagcagcaggtaactggagcgcta

SEQ ID NO: 2255333 - DNA, 25 bp, Homo sapien
cccagcagcaggtaactggagcgct

SEQ ID NO: 2255334 - DNA, 25 bp, Homo sapien
gcagcaggtaactggagcgctattc

SEQ ID NO: 2255335 - DNA, 25 bp, Homo sapien
agcagacgggcgcgggtaggtaagg

SEQ ID NO: 2255336 - DNA, 25 bp, Homo sapien
aacaaagacaagcactacggagaaa

SEQ ID NO: 2255337 - DNA, 25 bp, Homo sapien
agacaagcactacggagaaatgaag

SEQ ID NO: 2255338 - DNA, 25 bp, Homo sapien
caagcactacggagaaatgaagaga

SEQ ID NO: 2255339 - DNA, 25 bp, Homo sapien
gtcttcgtcgtcatcccagccaaag

SEQ ID NO: 2255340 - DNA, 25 bp, Homo sapien
tcgtcttcgtcgtcatcccagccaa

SEQ ID NO: 2255341 - DNA, 25 bp, Homo sapien
cttcgtcgtcatcccagccaaagca

SEQ ID NO: 2255342 - DNA, 25 bp, Homo sapien
gtcgtcttcgtcgtcatcccagcca

SEQ ID NO: 2255343 - DNA, 25 bp, Homo sapien
ctcatcgaggaaggcccggtaatca

SEQ ID NO: 2255344 - DNA, 25 bp, Homo sapien
tgtttcatctcatcgaggaaggccc

SEQ ID NO: 2255345 - DNA, 25 bp, Homo sapien
tcatctcatcgaggaaggcccggta

SEQ ID NO: 2255346 - DNA, 25 bp, Homo sapien
tttcatctcatcgaggaaggcccgg

SEQ ID NO: 2255347 - DNA, 25 bp, Homo sapien
taggatggggctatccatctcgatg

SEQ ID NO: 2255348 - DNA, 25 bp, Homo sapien
cggtgaggaggctgattaggaatgc

SEQ ID NO: 2255349 - DNA, 25 bp, Homo sapien
tgaggaggctgattaggaatgccac

SEQ ID NO: 2255350 - DNA, 25 bp, Homo sapien
atccatctcgatgtagggcaccacc

SEQ ID NO: 2255351 - DNA, 25 bp, Homo sapien
gacgccgtctgcacgataaactcgg

SEQ ID NO: 2255352 - DNA, 25 bp, Homo sapien
ttcacgagcatgtaagacgccgtct

SEQ ID NO: 2255353 - DNA, 25 bp, Homo sapien
catggcgtcgttgcagaatcggttc

SEQ ID NO: 2255354 - DNA, 25 bp, Homo sapien
gagctctcgccattaaacgtttcgg

SEQ ID NO: 2255355 - DNA, 25 bp, Homo sapien
catgagctggctgttctcgatgctc

SEQ ID NO: 2255356 - DNA, 25 bp, Homo sapien
tgttccatgagctggctgttctcga

SEQ ID NO: 2255357 - DNA, 25 bp, Homo sapien
ggtgccgcatcaggagcgcgtgcag

SEQ ID NO: 2255358 - DNA, 25 bp, Homo sapien
ttctcgatgctcagggcgcggtgcc

SEQ ID NO: 2255359 - DNA, 25 bp, Homo sapien
tggaaggacaggactcggctcggtt

SEQ ID NO: 2255360 - DNA, 25 bp, Homo sapien
ctcgcaggaagtgcgtgtccacgga

SEQ ID NO: 2255361 - DNA, 25 bp, Homo sapien
ctcggttcggctcggccaaggtgcg

SEQ ID NO: 2255362 - DNA, 25 bp, Homo sapien
gctcggccaaggtgcgcacggaggc

SEQ ID NO: 2255363 - DNA, 25 bp, Homo sapien
tttggcaagagcacaagtccaaggc

SEQ ID NO: 2255364 - DNA, 25 bp, Homo sapien
tcatagggagtacttgtctcgggcc

SEQ ID NO: 2255365 - DNA, 25 bp, Homo sapien
tcttgagccaccagatgagtgtgca

SEQ ID NO: 2255366 - DNA, 25 bp, Homo sapien
gagtgtgcacacatcgactgggtga

SEQ ID NO: 2255367 - DNA, 25 bp, Homo sapien
agctgggccatcaacactctgatca

SEQ ID NO: 2255368 - DNA, 25 bp, Homo sapien
agttctgtatgaaaagaccttctga

SEQ ID NO: 2255369 - DNA, 25 bp, Homo sapien
tcttttctgggcagggttcttatta

SEQ ID NO: 2255370 - DNA, 25 bp, Homo sapien
gatcgaattcagctgattcaagttc

SEQ ID NO: 2255371 - DNA, 25 bp, Homo sapien
caaggttgagagatgtagcttcttg

SEQ ID NO: 2255372 - DNA, 25 bp, Homo sapien
tgcccaaggttgagagatgtagctt

SEQ ID NO: 2255373 - DNA, 25 bp, Homo sapien
cccaaggttgagagatgtagcttct

SEQ ID NO: 2255374 - DNA, 25 bp, Homo sapien
gcccaaggttgagagatgtagcttc

SEQ ID NO: 2255375 - DNA, 25 bp, Homo sapien
ccactagtatggtcgaggactcaga

SEQ ID NO: 2255376 - DNA, 25 bp, Homo sapien
gtatggtcgaggactcagatgtttt

SEQ ID NO: 2255377 - DNA, 25 bp, Homo sapien
tcctcctgtagcgaaccactagtat

SEQ ID NO: 2255378 - DNA, 25 bp, Homo sapien
tagcgaaccactagtatggtcgagg

SEQ ID NO: 2255379 - DNA, 25 bp, Homo sapien
tcaccccgccggcactggattgttt

SEQ ID NO: 2255380 - DNA, 25 bp, Homo sapien
accccgccggcactggattgtttgt

SEQ ID NO: 2255381 - DNA, 25 bp, Homo sapien
cgccggcactggattgtttgtccat

SEQ ID NO: 2255382 - DNA, 25 bp, Homo sapien
ccccgccggcactggattgtttgtc

SEQ ID NO: 2255383 - DNA, 25 bp, Homo sapien
ggttcttcaatgtctgcggcaggct

SEQ ID NO: 2255384 - DNA, 25 bp, Homo sapien
cttttgtaggttttgaatcttcgca

SEQ ID NO: 2255385 - DNA, 25 bp, Homo sapien
ctcttgccctccctgtatataccct

SEQ ID NO: 2255386 - DNA, 25 bp, Homo sapien
tttgaatcttcgcagtggcccggag

SEQ ID NO: 2255387 - DNA, 25 bp, Homo sapien
gggcttgcgggcgaggggtgacagg

SEQ ID NO: 2255388 - DNA, 25 bp, Homo sapien
ggcttgcgggcgaggggtgacaggg

SEQ ID NO: 2255389 - DNA, 25 bp, Homo sapien
cactccctgggcttgcgggcgaggg

SEQ ID NO: 2255390 - DNA, 25 bp, Homo sapien
tgaccactccctgggcttgcgggcg

SEQ ID NO: 2255391 - DNA, 25 bp, Homo sapien
ctgaagatgcatcccaaaccgatct

SEQ ID NO: 2255392 - DNA, 25 bp, Homo sapien
agatgcatcccaaaccgatctgccg

SEQ ID NO: 2255393 - DNA, 25 bp, Homo sapien
gttgttgtttcagcatcccctgaag

SEQ ID NO: 2255394 - DNA, 25 bp, Homo sapien
gctgttgttgtttcagcatcccctg

SEQ ID NO: 2255395 - DNA, 25 bp, Homo sapien
gggcaacagcgttgctctttcaatt

SEQ ID NO: 2255396 - DNA, 25 bp, Homo sapien
gcaacagcgttgctctttcaatttg

SEQ ID NO: 2255397 - DNA, 25 bp, Homo sapien
ggggcaacagcgttgctctttcaat

SEQ ID NO: 2255398 - DNA, 25 bp, Homo sapien
ggcaacagcgttgctctttcaattt

SEQ ID NO: 2255399 - DNA, 25 bp, Homo sapien
tgcagctgccttggcatatttcctt

SEQ ID NO: 2255400 - DNA, 25 bp, Homo sapien
gctgccttggcatatttcctttaag

SEQ ID NO: 2255401 - DNA, 25 bp, Homo sapien
cttttccctattggtttcacactgc

SEQ ID NO: 2255402 - DNA, 25 bp, Homo sapien
gaatgattggatataagccttttcc

SEQ ID NO: 2255403 - DNA, 25 bp, Homo sapien
tttctaaatctgctgagcagctgaa

SEQ ID NO: 2255404 - DNA, 25 bp, Homo sapien
attatttctaaatctgctgagcagc

SEQ ID NO: 2255405 - DNA, 25 bp, Homo sapien
tcagtgatgcctactgtcactggga

SEQ ID NO: 2255406 - DNA, 25 bp, Homo sapien
gatgcctactgtcactgggattcga

SEQ ID NO: 2255407 - DNA, 25 bp, Homo sapien
cagaacacccattgtactggctaga

SEQ ID NO: 2255408 - DNA, 25 bp, Homo sapien
acacccattgtactggctagaatgt

SEQ ID NO: 2255409 - DNA, 25 bp, Homo sapien
ttcagaacacccattgtactggcta

SEQ ID NO: 2255410 - DNA, 25 bp, Homo sapien
tggccttagggagcttcatcccctc

SEQ ID NO: 2255411 - DNA, 25 bp, Homo sapien
ctgggtgatgaaagaggatggttgc

SEQ ID NO: 2255412 - DNA, 25 bp, Homo sapien
ggtgatgaaagaggatggttgctct

SEQ ID NO: 2255413 - DNA, 25 bp, Homo sapien
tgatgaaagaggatggttgctctgc

SEQ ID NO: 2255414 - DNA, 25 bp, Homo sapien
tgggtgatgaaagaggatggttgct

SEQ ID NO: 2255415 - DNA, 25 bp, Homo sapien
ggtttttcattttcagagctcagac

SEQ ID NO: 2255416 - DNA, 25 bp, Homo sapien
ttggtttttcattttcagagctcag

SEQ ID NO: 2255417 - DNA, 25 bp, Homo sapien
tttgttggtttttcattttcagagc

SEQ ID NO: 2255418 - DNA, 25 bp, Homo sapien
tgttggtttttcattttcagagctc

SEQ ID NO: 2255419 - DNA, 25 bp, Homo sapien
tggtgagggagtacaagccccacag

SEQ ID NO: 2255420 - DNA, 25 bp, Homo sapien
acttggtgagggagtacaagcccca

SEQ ID NO: 2255421 - DNA, 25 bp, Homo sapien
cttggtgagggagtacaagccccac

SEQ ID NO: 2255422 - DNA, 25 bp, Homo sapien
gtgagggagtacaagccccacagcc

SEQ ID NO: 2255423 - DNA, 25 bp, Homo sapien
gatccactcggatagttcttccttt

SEQ ID NO: 2255424 - DNA, 25 bp, Homo sapien
cacatgatccactcggatagttctt

SEQ ID NO: 2255425 - DNA, 25 bp, Homo sapien
tagacacatgatccactcggatagt

SEQ ID NO: 2255426 - DNA, 25 bp, Homo sapien
atagttagacacatgatccactcgg

SEQ ID NO: 2255427 - DNA, 25 bp, Homo sapien
cttatcggccaccccaagctggacc

SEQ ID NO: 2255428 - DNA, 25 bp, Homo sapien
gccaccccaagctggacctctcgct

SEQ ID NO: 2255429 - DNA, 25 bp, Homo sapien
caagctggacctctcgctcattcag

SEQ ID NO: 2255430 - DNA, 25 bp, Homo sapien
accccaagctggacctctcgctcat

SEQ ID NO: 2255431 - DNA, 25 bp, Homo sapien
gcttccgtattataaagtggcacca

SEQ ID NO: 2255432 - DNA, 25 bp, Homo sapien
gcaccacttgctctattctgcttgg

SEQ ID NO: 2255433 - DNA, 25 bp, Homo sapien
tcttcagaggatcaaaggcttccgt

SEQ ID NO: 2255434 - DNA, 25 bp, Homo sapien
tcacacccaagaagattccctggat

SEQ ID NO: 2255435 - DNA, 25 bp, Homo sapien
taatcctctctggtaagggaaacca

SEQ ID NO: 2255436 - DNA, 25 bp, Homo sapien
aatgttaacgtttctgaaggcctcg

SEQ ID NO: 2255437 - DNA, 25 bp, Homo sapien
aggcctcgtggtagactccattccg

SEQ ID NO: 2255438 - DNA, 25 bp, Homo sapien
tccattccgagtgctttgtcagcag

SEQ ID NO: 2255439 - DNA, 25 bp, Homo sapien
aaggtccccagctgttatgcttgac

SEQ ID NO: 2255440 - DNA, 25 bp, Homo sapien
tctgtgttaaaagaaggcaatccat

SEQ ID NO: 2255441 - DNA, 25 bp, Homo sapien
ggcaatccataacttccgaagactt

SEQ ID NO: 2255442 - DNA, 25 bp, Homo sapien
tatgcttgacagcttcatagttgaa

SEQ ID NO: 2255443 - DNA, 25 bp, Homo sapien
atatgccatacttcactgacacggc

SEQ ID NO: 2255444 - DNA, 25 bp, Homo sapien
ctgacacggcaaccgggctgactgg

SEQ ID NO: 2255445 - DNA, 25 bp, Homo sapien
tttgtccagtggcaatcttgataca

SEQ ID NO: 2255446 - DNA, 25 bp, Homo sapien
ccagtggcaatcttgatacacattc

SEQ ID NO: 2255447 - DNA, 25 bp, Homo sapien
aatccaaagtctttgtacagtcctc

SEQ ID NO: 2255448 - DNA, 25 bp, Homo sapien
atctggaaatccaaagtctttgtac

SEQ ID NO: 2255449 - DNA, 25 bp, Homo sapien
tttgcaggtaggccatatttgaaaa

SEQ ID NO: 2255450 - DNA, 25 bp, Homo sapien
tccaaagtctttgtacagtcctcaa

SEQ ID NO: 2255451 - DNA, 25 bp, Homo sapien
tctctcctcttgcacccagtatttt

SEQ ID NO: 2255452 - DNA, 25 bp, Homo sapien
ttttgtttaatgaggtcaagtctca

SEQ ID NO: 2255453 - DNA, 25 bp, Homo sapien
tatttttgtttaatgaggtcaagtc

SEQ ID NO: 2255454 - DNA, 25 bp, Homo sapien
agttctctcctcttgcacccagtat

SEQ ID NO: 2255455 - DNA, 25 bp, Homo sapien
tttccttgatttgtaggtggcatgc

SEQ ID NO: 2255456 - DNA, 25 bp, Homo sapien
cttgatttgtaggtggcatgcacac

SEQ ID NO: 2255457 - DNA, 25 bp, Homo sapien
gtacggtcaggcaaatgaaggctct

SEQ ID NO: 2255458 - DNA, 25 bp, Homo sapien
ctggccatgcagtacggtcaggcaa

SEQ ID NO: 2255459 - DNA, 25 bp, Homo sapien
caacatcaacttcccagtactggaa

SEQ ID NO: 2255460 - DNA, 25 bp, Homo sapien
caagagctgcttgcggaaaaaatct

SEQ ID NO: 2255461 - DNA, 25 bp, Homo sapien
tactggaacacactgttagcaggat

SEQ ID NO: 2255462 - DNA, 25 bp, Homo sapien
tagcaggatctaaacctaccaagcc

SEQ ID NO: 2255463 - DNA, 25 bp, Homo sapien
gaaggaccatcaaatggctcctttt

SEQ ID NO: 2255464 - DNA, 25 bp, Homo sapien
cctgacttaggagaggacaagaagg

SEQ ID NO: 2255465 - DNA, 25 bp, Homo sapien
gaggacaagaaggaccatcaaatgg

SEQ ID NO: 2255466 - DNA, 25 bp, Homo sapien
ttaggagaggacaagaaggaccatc

SEQ ID NO: 2255467 - DNA, 25 bp, Homo sapien
tcagactaacagcatgaacagtgga

SEQ ID NO: 2255468 - DNA, 25 bp, Homo sapien
gactaacagcatgaacagtggatct

SEQ ID NO: 2255469 - DNA, 25 bp, Homo sapien
ctaacagcatgaacagtggatctct

SEQ ID NO: 2255470 - DNA, 25 bp, Homo sapien
taacagcatgaacagtggatctctt

SEQ ID NO: 2255471 - DNA, 25 bp, Homo sapien
ccagcgttcaggtagattaggacca

SEQ ID NO: 2255472 - DNA, 25 bp, Homo sapien
tatttcactttcagtagggccggta

SEQ ID NO: 2255473 - DNA, 25 bp, Homo sapien
tttgggcgcctcactgatcagaagg

SEQ ID NO: 2255474 - DNA, 25 bp, Homo sapien
ggaacaatggcgagcccctttgggc

SEQ ID NO: 2255475 - DNA, 25 bp, Homo sapien
caaggttgagagatgtagcttcttg

SEQ ID NO: 2255476 - DNA, 25 bp, Homo sapien
tgcccaaggttgagagatgtagctt

SEQ ID NO: 2255477 - DNA, 25 bp, Homo sapien
gcccaaggttgagagatgtagcttc

SEQ ID NO: 2255478 - DNA, 25 bp, Homo sapien
cccaaggttgagagatgtagcttct

SEQ ID NO: 2255479 - DNA, 25 bp, Homo sapien
ccactagtatggtcgaggactcaga

SEQ ID NO: 2255480 - DNA, 25 bp, Homo sapien
gtatggtcgaggactcagatgtttt

SEQ ID NO: 2255481 - DNA, 25 bp, Homo sapien
tcctcctgtagcgaaccactagtat

SEQ ID NO: 2255482 - DNA, 25 bp, Homo sapien
tagcgaaccactagtatggtcgagg

SEQ ID NO: 2255483 - DNA, 25 bp, Homo sapien
tcaccccgccggcactggattgttt

SEQ ID NO: 2255484 - DNA, 25 bp, Homo sapien
ccccgccggcactggattgtttgtc

SEQ ID NO: 2255485 - DNA, 25 bp, Homo sapien
accccgccggcactggattgtttgt

SEQ ID NO: 2255486 - DNA, 25 bp, Homo sapien
cgccggcactggattgtttgtccat

SEQ ID NO: 2255487 - DNA, 25 bp, Homo sapien
gtaggttttgaatcttctcagtggc

SEQ ID NO: 2255488 - DNA, 25 bp, Homo sapien
gttcttcaatgtcagtggcaggctt

SEQ ID NO: 2255489 - DNA, 25 bp, Homo sapien
aatgtcagtggcaggcttttgtagg

SEQ ID NO: 2255490 - DNA, 25 bp, Homo sapien
cttttgtaggttttgaatcttctca

SEQ ID NO: 2255491 - DNA, 25 bp, Homo sapien
cactccctgggcttgcgggcgaggg

SEQ ID NO: 2255492 - DNA, 25 bp, Homo sapien
agatgcatcccaaaccgatctgccg

SEQ ID NO: 2255493 - DNA, 25 bp, Homo sapien
ggtgtagagcaaaccaaatgctgct

SEQ ID NO: 2255494 - DNA, 25 bp, Homo sapien
gctgttgtttcagcatcccctgaag

SEQ ID NO: 2255495 - DNA, 25 bp, Homo sapien
ccaataaactgtggatagagctccc

SEQ ID NO: 2255496 - DNA, 25 bp, Homo sapien
tacttcctgctttgcatggaccaat

SEQ ID NO: 2255497 - DNA, 25 bp, Homo sapien
aactgcagcgtgtccctacttcctg

SEQ ID NO: 2255498 - DNA, 25 bp, Homo sapien
tcttaaaggacagttctcattagct

SEQ ID NO: 2255499 - DNA, 25 bp, Homo sapien
cctgtatgtcaattggatgctgcat

SEQ ID NO: 2255500 - DNA, 25 bp, Homo sapien
atcctgtatgtcaattggatgctgc

SEQ ID NO: 2255501 - DNA, 25 bp, Homo sapien
tcctgtatgtcaattggatgctgca

SEQ ID NO: 2255502 - DNA, 25 bp, Homo sapien
caaggttgagagatgtagcttcttg

SEQ ID NO: 2255503 - DNA, 25 bp, Homo sapien
tgcccaaggttgagagatgtagctt

SEQ ID NO: 2255504 - DNA, 25 bp, Homo sapien
cccaaggttgagagatgtagcttct

SEQ ID NO: 2255505 - DNA, 25 bp, Homo sapien
gcccaaggttgagagatgtagcttc

SEQ ID NO: 2255506 - DNA, 25 bp, Homo sapien
gtctgagtacccactcgaggtctcc

SEQ ID NO: 2255507 - DNA, 25 bp, Homo sapien
agtacccactcgaggtctccggcat

SEQ ID NO: 2255508 - DNA, 25 bp, Homo sapien
gagtacccactcgaggtctccggca

SEQ ID NO: 2255509 - DNA, 25 bp, Homo sapien
ctgagtacccactcgaggtctccgg

SEQ ID NO: 2255510 - DNA, 25 bp, Homo sapien
tcaccccgccggcactggattgttt

SEQ ID NO: 2255511 - DNA, 25 bp, Homo sapien
accccgccggcactggattgtttgt

SEQ ID NO: 2255512 - DNA, 25 bp, Homo sapien
cgccggcactggattgtttgtccat

SEQ ID NO: 2255513 - DNA, 25 bp, Homo sapien
ccccgccggcactggattgtttgtc

SEQ ID NO: 2255514 - DNA, 25 bp, Homo sapien
gtaggttttgaatcttctcagtggc

SEQ ID NO: 2255515 - DNA, 25 bp, Homo sapien
tggttcttcaatgtcagcggcaggc

SEQ ID NO: 2255516 - DNA, 25 bp, Homo sapien
ttcttcaatgtcagcggcaggcttt

SEQ ID NO: 2255517 - DNA, 25 bp, Homo sapien
aatgtcagcggcaggcttttgtagg

SEQ ID NO: 2255518 - DNA, 25 bp, Homo sapien
tagggtggcttcgacgtcacaaagc

SEQ ID NO: 2255519 - DNA, 25 bp, Homo sapien
cacacccttgagctttgtttgatca

SEQ ID NO: 2255520 - DNA, 25 bp, Homo sapien
tgtttgatcatacaggcagtgtccc

SEQ ID NO: 2255521 - DNA, 25 bp, Homo sapien
ccaatggcagccctagggtggcttc

SEQ ID NO: 2255522 - DNA, 25 bp, Homo sapien
ggtggcaggggtgtagagcaaacca

SEQ ID NO: 2255523 - DNA, 25 bp, Homo sapien
cactccctgggcttgcgggcgaggg

SEQ ID NO: 2255524 - DNA, 25 bp, Homo sapien
agatgcatcccaaaccgatctgccg

SEQ ID NO: 2255525 - DNA, 25 bp, Homo sapien
ggtgtagagcaaaccaaatgctgct

SEQ ID NO: 2255526 - DNA, 25 bp, Homo sapien
tccgtagtaagggtcatatctctgt

SEQ ID NO: 2255527 - DNA, 25 bp, Homo sapien
tagtaagggtcatatctctgtttct

SEQ ID NO: 2255528 - DNA, 25 bp, Homo sapien
tcagtttccgtagtaagggtcatat

SEQ ID NO: 2255529 - DNA, 25 bp, Homo sapien
tttccgtagtaagggtcatatctct

SEQ ID NO: 2255530 - DNA, 25 bp, Homo sapien
catgtgccactcagctgtaatgttc

SEQ ID NO: 2255531 - DNA, 25 bp, Homo sapien
gctgtaatgttctgtctgcatgatt

SEQ ID NO: 2255532 - DNA, 25 bp, Homo sapien
ttctgtctgcatgattgtagatggc

SEQ ID NO: 2255533 - DNA, 25 bp, Homo sapien
gatggcatccttagcagtataaata

SEQ ID NO: 2255534 - DNA, 25 bp, Homo sapien
ggcagtcaagcactggtgcatagag

SEQ ID NO: 2255535 - DNA, 25 bp, Homo sapien
cacagcagaaggactttacctcctc

SEQ ID NO: 2255536 - DNA, 25 bp, Homo sapien
caagcactggtgcatagagaagaaa

SEQ ID NO: 2255537 - DNA, 25 bp, Homo sapien
tggccagttcaaaggagtgaacatt

SEQ ID NO: 2255538 - DNA, 25 bp, Homo sapien
gttccagtcttctattagaggtggt

SEQ ID NO: 2255539 - DNA, 25 bp, Homo sapien
ggtggtgaagaggtggtgacgggta

SEQ ID NO: 2255540 - DNA, 25 bp, Homo sapien
tgaagaggtggtgacgggtaggtaa

SEQ ID NO: 2255541 - DNA, 25 bp, Homo sapien
ctgttccagtcttctattagaggtg

SEQ ID NO: 2255542 - DNA, 25 bp, Homo sapien
tactgctgggatgccgagtcttctc

SEQ ID NO: 2255543 - DNA, 25 bp, Homo sapien
tctgcagaatcctgcgagttccttc

SEQ ID NO: 2255544 - DNA, 25 bp, Homo sapien
tgagagcgacgacaccctgtatcct

SEQ ID NO: 2255545 - DNA, 25 bp, Homo sapien
ggactcctcggatcctctccagaga

SEQ ID NO: 2255546 - DNA, 25 bp, Homo sapien
attctcctctccagattgttccaag

SEQ ID NO: 2255547 - DNA, 25 bp, Homo sapien
tcctgagtgggaggactccctctct

SEQ ID NO: 2255548 - DNA, 25 bp, Homo sapien
tcagagtcctcttgagggagaggac

SEQ ID NO: 2255549 - DNA, 25 bp, Homo sapien
ccagagtcctgagagtgctcctgag

SEQ ID NO: 2255550 - DNA, 25 bp, Homo sapien
gtccagcagcccagtagatgaatat

SEQ ID NO: 2255551 - DNA, 25 bp, Homo sapien
ctcagacaccttgctagagagtgat

SEQ ID NO: 2255552 - DNA, 25 bp, Homo sapien
gaatatacaagttcctcagacacct

SEQ ID NO: 2255553 - DNA, 25 bp, Homo sapien
gagtgattccttgacagacagcgag

SEQ ID NO: 2255554 - DNA, 25 bp, Homo sapien
ctgtttgtcactggagaagttccct

SEQ ID NO: 2255555 - DNA, 25 bp, Homo sapien
ccagagacatctgcccttcccctga

SEQ ID NO: 2255556 - DNA, 25 bp, Homo sapien
ttcccctgacatagaccactgtttg

SEQ ID NO: 2255557 - DNA, 25 bp, Homo sapien
tgtggtctcgcactctgaagcctgt

SEQ ID NO: 2255558 - DNA, 25 bp, Homo sapien
gtgttacaagaattagaaggtgaag

SEQ ID NO: 2255559 - DNA, 25 bp, Homo sapien
gttggcaacaacacacttatagatg

SEQ ID NO: 2255560 - DNA, 25 bp, Homo sapien
gggttgattgactgccagagattaa

SEQ ID NO: 2255561 - DNA, 25 bp, Homo sapien
gactgccagagattaaaggagctgt

SEQ ID NO: 2255562 - DNA, 25 bp, Homo sapien
caggaaaggccagcagattgccagc

SEQ ID NO: 2255563 - DNA, 25 bp, Homo sapien
ttttagtttgtcaggaaaggccagc

SEQ ID NO: 2255564 - DNA, 25 bp, Homo sapien
tgtcaggaaaggccagcagattgcc

SEQ ID NO: 2255565 - DNA, 25 bp, Homo sapien
tttagtttgtcaggaaaggccagca

SEQ ID NO: 2255566 - DNA, 25 bp, Homo sapien
tatcatctgctgtcaactctatctg

SEQ ID NO: 2255567 - DNA, 25 bp, Homo sapien
tgttctatccagtcaacaatcaagt

SEQ ID NO: 2255568 - DNA, 25 bp, Homo sapien
tgtcaactctatctgttctatccag

SEQ ID NO: 2255569 - DNA, 25 bp, Homo sapien
tctatctgttctatccagtcaacaa

SEQ ID NO: 2255570 - DNA, 25 bp, Homo sapien
gactaaataactctgtgtcagttat

SEQ ID NO: 2255571 - DNA, 25 bp, Homo sapien
tgactaaataactctgtgtcagtta

SEQ ID NO: 2255572 - DNA, 25 bp, Homo sapien
ttgactaaataactctgtgtcagtt

SEQ ID NO: 2255573 - DNA, 25 bp, Homo sapien
gttgactaaataactctgtgtcagt

SEQ ID NO: 2255574 - DNA, 25 bp, Homo sapien
gctaagacagtgacttgtactgaca

SEQ ID NO: 2255575 - DNA, 25 bp, Homo sapien
gatggaccgctaagacagtgacttg

SEQ ID NO: 2255576 - DNA, 25 bp, Homo sapien
tgtactgacagtgctgagggtctgt

SEQ ID NO: 2255577 - DNA, 25 bp, Homo sapien
gcacatagagatggaccgctaagac

SEQ ID NO: 2255578 - DNA, 25 bp, Homo sapien
ggtggtcacgtaactctcatacagc

SEQ ID NO: 2255579 - DNA, 25 bp, Homo sapien
atgcaggataaggtggtcacgtaac

SEQ ID NO: 2255580 - DNA, 25 bp, Homo sapien
ggataaggtggtcacgtaactctca

SEQ ID NO: 2255581 - DNA, 25 bp, Homo sapien
aactctcatacagctgcattgccat

SEQ ID NO: 2255582 - DNA, 25 bp, Homo sapien
tgcatgggagaataaccttgcccgg

SEQ ID NO: 2255583 - DNA, 25 bp, Homo sapien
gaagcgctgcattctggagttcccg

SEQ ID NO: 2255584 - DNA, 25 bp, Homo sapien
ttgtgccacagtcagcaagtgacca

SEQ ID NO: 2255585 - DNA, 25 bp, Homo sapien
gaatgcagggcttgaatgagccaca

SEQ ID NO: 2255586 - DNA, 25 bp, Homo sapien
gcaccttcaatatgcactgcgcagg

SEQ ID NO: 2255587 - DNA, 25 bp, Homo sapien
tagccaacgtgttcaggaatctctg

SEQ ID NO: 2255588 - DNA, 25 bp, Homo sapien
aggaatctctgctctgccgtgcttc

SEQ ID NO: 2255589 - DNA, 25 bp, Homo sapien
cctcctgtgattgtgcactgagcca

SEQ ID NO: 2255590 - DNA, 25 bp, Homo sapien
ttatttgactatatagtttgagaat

SEQ ID NO: 2255591 - DNA, 25 bp, Homo sapien
agaatgagtttctgagtaattccac

SEQ ID NO: 2255592 - DNA, 25 bp, Homo sapien
ttgactatatagtttgagaatgagt

SEQ ID NO: 2255593 - DNA, 25 bp, Homo sapien
gagaatgagtttctgagtaattcca

SEQ ID NO: 2255594 - DNA, 25 bp, Homo sapien
ttttgctcataaagaacctcggcat

SEQ ID NO: 2255595 - DNA, 25 bp, Homo sapien
gttgttgctcaagtttgatgtggct

SEQ ID NO: 2255596 - DNA, 25 bp, Homo sapien
tcataaagaacctcggcatttgtgt

SEQ ID NO: 2255597 - DNA, 25 bp, Homo sapien
tgctcaagtttgatgtggcttctcc

SEQ ID NO: 2255598 - DNA, 25 bp, Homo sapien
caaaatgaagcccattggtgactga

SEQ ID NO: 2255599 - DNA, 25 bp, Homo sapien
ccaaaatgaagcccattggtgactg

SEQ ID NO: 2255600 - DNA, 25 bp, Homo sapien
aaatgaagcccattggtgactgaga

SEQ ID NO: 2255601 - DNA, 25 bp, Homo sapien
ccccaaaatgaagcccattggtgac

SEQ ID NO: 2255602 - DNA, 25 bp, Homo sapien
tcttcagttgcaaactgaaagacac

SEQ ID NO: 2255603 - DNA, 25 bp, Homo sapien
gacaatcaacttcttatcatccaag

SEQ ID NO: 2255604 - DNA, 25 bp, Homo sapien
caataacatcctcagcagaatttag

SEQ ID NO: 2255605 - DNA, 25 bp, Homo sapien
aagacactcatctcattcagtctgt

SEQ ID NO: 2255606 - DNA, 25 bp, Homo sapien
cttgggactcataggtctgtctttc

SEQ ID NO: 2255607 - DNA, 25 bp, Homo sapien
ctcataggtctgtctttccaagact

SEQ ID NO: 2255608 - DNA, 25 bp, Homo sapien
gggactcataggtctgtctttccaa

SEQ ID NO: 2255609 - DNA, 25 bp, Homo sapien
gactcataggtctgtctttccaaga

SEQ ID NO: 2255610 - DNA, 25 bp, Homo sapien
gaggttacatcttagacttggctta

SEQ ID NO: 2255611 - DNA, 25 bp, Homo sapien
gatgatgaggttacatcttagactt

SEQ ID NO: 2255612 - DNA, 25 bp, Homo sapien
tcaaattacactcttcccttggcat

SEQ ID NO: 2255613 - DNA, 25 bp, Homo sapien
aaggctccttctgaagatgatgagg

SEQ ID NO: 2255614 - DNA, 25 bp, Homo sapien
tgcttgcatcctttagccattgaga

SEQ ID NO: 2255615 - DNA, 25 bp, Homo sapien
ccttggctgtgatcatgctttcatt

SEQ ID NO: 2255616 - DNA, 25 bp, Homo sapien
ccattgagatacacactcacagccc

SEQ ID NO: 2255617 - DNA, 25 bp, Homo sapien
ctgtgatcatgctttcattcagctt

SEQ ID NO: 2255618 - DNA, 25 bp, Homo sapien
ggattcgctcagttgcactgagtgt

SEQ ID NO: 2255619 - DNA, 25 bp, Homo sapien
gggattcgctcagttgcactgagtg

SEQ ID NO: 2255620 - DNA, 25 bp, Homo sapien
gcataacttcattatctacatggcc

SEQ ID NO: 2255621 - DNA, 25 bp, Homo sapien
ctggacaactagcataacttcatta

SEQ ID NO: 2255622 - DNA, 25 bp, Homo sapien
tctacatggcccacggtgatctcat

SEQ ID NO: 2255623 - DNA, 25 bp, Homo sapien
cattatctacatggcccacggtgat

SEQ ID NO: 2255624 - DNA, 25 bp, Homo sapien
cagagaccacctccaagcacttgga

SEQ ID NO: 2255625 - DNA, 25 bp, Homo sapien
tgatcaggaggccatttttcagcat

SEQ ID NO: 2255626 - DNA, 25 bp, Homo sapien
tcagccagcatctcatcataggtga

SEQ ID NO: 2255627 - DNA, 25 bp, Homo sapien
tcataggtgaggtcccgcgagttaa

SEQ ID NO: 2255628 - DNA, 25 bp, Homo sapien
cttcacttctagccggtctctggac

SEQ ID NO: 2255629 - DNA, 25 bp, Homo sapien
tagccggtctctggacaaggattcc

SEQ ID NO: 2255630 - DNA, 25 bp, Homo sapien
tctagccggtctctggacaaggatt

SEQ ID NO: 2255631 - DNA, 25 bp, Homo sapien
cacttctagccggtctctggacaag

SEQ ID NO: 2255632 - DNA, 25 bp, Homo sapien
tacagtgatgctctatggcctcaca

SEQ ID NO: 2255633 - DNA, 25 bp, Homo sapien
cctgtcttgttagaggatttgtctc

SEQ ID NO: 2255634 - DNA, 25 bp, Homo sapien
cacaggtctcctgtcttgttagagg

SEQ ID NO: 2255635 - DNA, 25 bp, Homo sapien
gatcttttcttacagtgatgctcta

SEQ ID NO: 2255636 - DNA, 25 bp, Homo sapien
tagaattgttgggcacagggttgca

SEQ ID NO: 2255637 - DNA, 25 bp, Homo sapien
aggtgtaccatagttgccatgaata

SEQ ID NO: 2255638 - DNA, 25 bp, Homo sapien
tatagaattgttgggcacagggttg

SEQ ID NO: 2255639 - DNA, 25 bp, Homo sapien
ggtgtaccatagttgccatgaatat

SEQ ID NO: 2255640 - DNA, 25 bp, Homo sapien
gcccacttctatcagggaaaggcca

SEQ ID NO: 2255641 - DNA, 25 bp, Homo sapien
tacttggtgatgacaatcgtcagca

SEQ ID NO: 2255642 - DNA, 25 bp, Homo sapien
tcacaggctttctcgagtatcacag

SEQ ID NO: 2255643 - DNA, 25 bp, Homo sapien
gtgtcatcactaccctcatcggcga

SEQ ID NO: 2255644 - DNA, 25 bp, Homo sapien
gccaggacaggtcctgcatcctcct

SEQ ID NO: 2255645 - DNA, 25 bp, Homo sapien
aggccaggacaggtcctgcatcctc

SEQ ID NO: 2255646 - DNA, 25 bp, Homo sapien
ccaggacaggtcctgcatcctcctc

SEQ ID NO: 2255647 - DNA, 25 bp, Homo sapien
ggccaggacaggtcctgcatcctcc

SEQ ID NO: 2255648 - DNA, 25 bp, Homo sapien
aggaagagcaggagctcagaggatt

SEQ ID NO: 2255649 - DNA, 25 bp, Homo sapien
cagaggaagagcaggagctcagagg

SEQ ID NO: 2255650 - DNA, 25 bp, Homo sapien
ctgcatgaaacagaggaagagcagg

SEQ ID NO: 2255651 - DNA, 25 bp, Homo sapien
acagaggaagagcaggagctcagag

SEQ ID NO: 2255652 - DNA, 25 bp, Homo sapien
ctgccaaaggccgacttacagctcc

SEQ ID NO: 2255653 - DNA, 25 bp, Homo sapien
ctcctcttctcttaaggtcgtgctt

SEQ ID NO: 2255654 - DNA, 25 bp, Homo sapien
gtcttcctagagagattgtcccctg

SEQ ID NO: 2255655 - DNA, 25 bp, Homo sapien
tcttaaggtcgtgcttcagggcctc

SEQ ID NO: 2255656 - DNA, 25 bp, Homo sapien
atgtccttcggactcacaaaatgca

SEQ ID NO: 2255657 - DNA, 25 bp, Homo sapien
ctgctgaactgagacgagcctcctc

SEQ ID NO: 2255658 - DNA, 25 bp, Homo sapien
gagcctcctcacaaagtgcctcatg

SEQ ID NO: 2255659 - DNA, 25 bp, Homo sapien
caaagtgcctcatgtccttcggact

SEQ ID NO: 2255660 - DNA, 25 bp, Homo sapien
ctgccggggttgaccagagctgaca

SEQ ID NO: 2255661 - DNA, 25 bp, Homo sapien
tttcacctccatataagcccctcca

SEQ ID NO: 2255662 - DNA, 25 bp, Homo sapien
gcactactagtcatgggtgttctct

SEQ ID NO: 2255663 - DNA, 25 bp, Homo sapien
acagggggcactactagtcatgggt

SEQ ID NO: 2255664 - DNA, 25 bp, Homo sapien
aggacagggggcactactagtcatg

SEQ ID NO: 2255665 - DNA, 25 bp, Homo sapien
ttccttcagccgctaaaatccattc

SEQ ID NO: 2255666 - DNA, 25 bp, Homo sapien
tccactttactgctgagtgtgaagt

SEQ ID NO: 2255667 - DNA, 25 bp, Homo sapien
ttgttccttcagccgctaaaatcca

SEQ ID NO: 2255668 - DNA, 25 bp, Homo sapien
tttttccactttactgctgagtgtg

SEQ ID NO: 2255669 - DNA, 25 bp, Homo sapien
tctggacgagcattgtagggcacct

SEQ ID NO: 2255670 - DNA, 25 bp, Homo sapien
gacaaggcatgccatgtagctgcat

SEQ ID NO: 2255671 - DNA, 25 bp, Homo sapien
tgggcttcccataaatgaagggctc

SEQ ID NO: 2255672 - DNA, 25 bp, Homo sapien
catccagtgcatatgtgagcaagga

SEQ ID NO: 2255673 - DNA, 25 bp, Homo sapien
ccttccaactttgctaggggctgcg

SEQ ID NO: 2255674 - DNA, 25 bp, Homo sapien
ttccaactttgctaggggctgcgcc

SEQ ID NO: 2255675 - DNA, 25 bp, Homo sapien
gcattcccttccaactttgctaggg

SEQ ID NO: 2255676 - DNA, 25 bp, Homo sapien
ccaactttgctaggggctgcgcctg

SEQ ID NO: 2255677 - DNA, 25 bp, Homo sapien
taaatctctacatcacccatatggg

SEQ ID NO: 2255678 - DNA, 25 bp, Homo sapien
caataccacactaccctgttacaga

SEQ ID NO: 2255679 - DNA, 25 bp, Homo sapien
tgcaaagaacactacgttcctcgag

SEQ ID NO: 2255680 - DNA, 25 bp, Homo sapien
actacctgctattcaaaggaaaagc

SEQ ID NO: 2255681 - DNA, 25 bp, Homo sapien
cagtggcatcatctgcggtatcaat

SEQ ID NO: 2255682 - DNA, 25 bp, Homo sapien
gacgttgctggacatgacactgagg

SEQ ID NO: 2255683 - DNA, 25 bp, Homo sapien
tgctttctgaatgggctctcggacc

SEQ ID NO: 2255684 - DNA, 25 bp, Homo sapien
cggtatcaattgtggcctggactct

SEQ ID NO: 2255685 - DNA, 25 bp, Homo sapien
gtctggcaggccctgacaggtgcct

SEQ ID NO: 2255686 - DNA, 25 bp, Homo sapien
gactcctcactgaatgagctccatg

SEQ ID NO: 2255687 - DNA, 25 bp, Homo sapien
ggtgcctgtatcctcccctttctgg

SEQ ID NO: 2255688 - DNA, 25 bp, Homo sapien
tgaaagaggactcactgtctggcag

SEQ ID NO: 2255689 - DNA, 25 bp, Homo sapien
ggaatgctctcggtaagatttggta

SEQ ID NO: 2255690 - DNA, 25 bp, Homo sapien
tgctctcggtaagatttggtatcac

SEQ ID NO: 2255691 - DNA, 25 bp, Homo sapien
tgggaatgctctcggtaagatttgg

SEQ ID NO: 2255692 - DNA, 25 bp, Homo sapien
aatgctctcggtaagatttggtatc

SEQ ID NO: 2255693 - DNA, 25 bp, Homo sapien
cgttgcggaatggaacgcctggaac

SEQ ID NO: 2255694 - DNA, 25 bp, Homo sapien
gtcttctaactcaactgaggtcggg

SEQ ID NO: 2255695 - DNA, 25 bp, Homo sapien
tactaagtacaaagtggaagaggcg

SEQ ID NO: 2255696 - DNA, 25 bp, Homo sapien
tgggatgctgtgcatctacccagtc

SEQ ID NO: 2255697 - DNA, 25 bp, Homo sapien
cagcaggtaaacgtatcaacaggga

SEQ ID NO: 2255698 - DNA, 25 bp, Homo sapien
gcagcaggtaaacgtatcaacaggg

SEQ ID NO: 2255699 - DNA, 25 bp, Homo sapien
agcaggtaaacgtatcaacagggat

SEQ ID NO: 2255700 - DNA, 25 bp, Homo sapien
gcaggtaaacgtatcaacagggata

SEQ ID NO: 2255701 - DNA, 25 bp, Homo sapien
cttcttctcttaaggtggtgctcta

SEQ ID NO: 2255702 - DNA, 25 bp, Homo sapien
ttcttctcttaaggtggtgctctag

SEQ ID NO: 2255703 - DNA, 25 bp, Homo sapien
tcctctgctgtgctgactttaggct

SEQ ID NO: 2255704 - DNA, 25 bp, Homo sapien
ctgggcctcctctgctgtgctgact

SEQ ID NO: 2255705 - DNA, 25 bp, Homo sapien
ctgtgctgactttaggctgtgtgcc

SEQ ID NO: 2255706 - DNA, 25 bp, Homo sapien
ctgactttaggctgtgtgcctcaca

SEQ ID NO: 2255707 - DNA, 25 bp, Homo sapien
ccagttcgtcaccacctggttcctg

SEQ ID NO: 2255708 - DNA, 25 bp, Homo sapien
agttcgtcaccacctggttcctgga

SEQ ID NO: 2255709 - DNA, 25 bp, Homo sapien
gttcgtcaccacctggttcctggag

SEQ ID NO: 2255710 - DNA, 25 bp, Homo sapien
ttcgtcaccacctggttcctggagc

SEQ ID NO: 2255711 - DNA, 25 bp, Homo sapien
ctcacggcagcgcagtacaggccgg

SEQ ID NO: 2255712 - DNA, 25 bp, Homo sapien
gggtttcttctctctatggtgggag

SEQ ID NO: 2255713 - DNA, 25 bp, Homo sapien
ccttcgatccgtcagattcccaaga

SEQ ID NO: 2255714 - DNA, 25 bp, Homo sapien
ttgattcgcgcctcctcacaaatgc

SEQ ID NO: 2255715 - DNA, 25 bp, Homo sapien
gagtctttcacctccgaataagccc

SEQ ID NO: 2255716 - DNA, 25 bp, Homo sapien
catctgagtctttcacctccgaata

SEQ ID NO: 2255717 - DNA, 25 bp, Homo sapien
tgagtctttcacctccgaataagcc

SEQ ID NO: 2255718 - DNA, 25 bp, Homo sapien
tctgagtctttcacctccgaataag

SEQ ID NO: 2255719 - DNA, 25 bp, Homo sapien
tgagtctttcacctccgaataagcc

SEQ ID NO: 2255720 - DNA, 25 bp, Homo sapien
gagtctttcacctccgaataagccc

SEQ ID NO: 2255721 - DNA, 25 bp, Homo sapien
catctgagtctttcacctccgaata

SEQ ID NO: 2255722 - DNA, 25 bp, Homo sapien
tctgagtctttcacctccgaataag

SEQ ID NO: 2255723 - DNA, 25 bp, Homo sapien
ccctctcatgatctgaagtgagact

SEQ ID NO: 2255724 - DNA, 25 bp, Homo sapien
gatgcctggaagagcctgagtccct

SEQ ID NO: 2255725 - DNA, 25 bp, Homo sapien
tcctctatgtcatcctggggatgcc

SEQ ID NO: 2255726 - DNA, 25 bp, Homo sapien
tgatctgaagtgagactcacttgag

SEQ ID NO: 2255727 - DNA, 25 bp, Homo sapien
agaagaatgacggagatttggcaac

SEQ ID NO: 2255728 - DNA, 25 bp, Homo sapien
aagaatgacggagatttggcaactg

SEQ ID NO: 2255729 - DNA, 25 bp, Homo sapien
tcagaagaatgacggagatttggca

SEQ ID NO: 2255730 - DNA, 25 bp, Homo sapien
gaagaatgacggagatttggcaact

SEQ ID NO: 2255731 - DNA, 25 bp, Homo sapien
caaggcaacggtgatctcaacttca

SEQ ID NO: 2255732 - DNA, 25 bp, Homo sapien
taataattacacattgcccaaagct

SEQ ID NO: 2255733 - DNA, 25 bp, Homo sapien
gaatcacaacacatggtcagacacg

SEQ ID NO: 2255734 - DNA, 25 bp, Homo sapien
tgtatgggatacctgaaatgatttg

SEQ ID NO: 2255735 - DNA, 25 bp, Homo sapien
gtgtttgctagttcataaatgaagg

SEQ ID NO: 2255736 - DNA, 25 bp, Homo sapien
tgttggcagcaaaattccctgtgac

SEQ ID NO: 2255737 - DNA, 25 bp, Homo sapien
tgacttcctggattatgttatcata

SEQ ID NO: 2255738 - DNA, 25 bp, Homo sapien
tgaaggtgatgtatctgcaattact

SEQ ID NO: 2255739 - DNA, 25 bp, Homo sapien
tgggttctgcaatgttggacatcgc

SEQ ID NO: 2255740 - DNA, 25 bp, Homo sapien
caatgggttctgcaatgttggacat

SEQ ID NO: 2255741 - DNA, 25 bp, Homo sapien
tctgcaatgttggacatcgccatca

SEQ ID NO: 2255742 - DNA, 25 bp, Homo sapien
ggttctgcaatgttggacatcgcca

SEQ ID NO: 2255743 - DNA, 25 bp, Homo sapien
taagaggccaatcgcctataggaag

SEQ ID NO: 2255744 - DNA, 25 bp, Homo sapien
aaaataagaggccaatcgcctatag

SEQ ID NO: 2255745 - DNA, 25 bp, Homo sapien
aatcgcctataggaagcaaggaggg

SEQ ID NO: 2255746 - DNA, 25 bp, Homo sapien
ggatcagggagtgcagatgccggct

SEQ ID NO: 2255747 - DNA, 25 bp, Homo sapien
tatcagtgtagaatcagtctgtgtc

SEQ ID NO: 2255748 - DNA, 25 bp, Homo sapien
tttcatattttgaggatgctgatcc

SEQ ID NO: 2255749 - DNA, 25 bp, Homo sapien
tgtgtcaagatcttacttgggttac

SEQ ID NO: 2255750 - DNA, 25 bp, Homo sapien
tctggttcagtaagtatcagtgtag

SEQ ID NO: 2255751 - DNA, 25 bp, Homo sapien
gggccctgcagatggtcttggactc

SEQ ID NO: 2255752 - DNA, 25 bp, Homo sapien
ccctgcagatggtcttggactctag

SEQ ID NO: 2255753 - DNA, 25 bp, Homo sapien
acccagctattggagctctctcctg

SEQ ID NO: 2255754 - DNA, 25 bp, Homo sapien
tctctcctgatacttgggccctgca

SEQ ID NO: 2255755 - DNA, 25 bp, Homo sapien
aaatgagggattcagtatgtccaaa

SEQ ID NO: 2255756 - DNA, 25 bp, Homo sapien
atgagggattcagtatgtccaaaag

SEQ ID NO: 2255757 - DNA, 25 bp, Homo sapien
aatgagggattcagtatgtccaaaa

SEQ ID NO: 2255758 - DNA, 25 bp, Homo sapien
tgagggattcagtatgtccaaaagg

SEQ ID NO: 2255759 - DNA, 25 bp, Homo sapien
cacttggtgggttgattgggaaact

SEQ ID NO: 2255760 - DNA, 25 bp, Homo sapien
agattatagttgagaaaaccgtggt

SEQ ID NO: 2255761 - DNA, 25 bp, Homo sapien
ttgtcaccctcaccgttttaccagc

SEQ ID NO: 2255762 - DNA, 25 bp, Homo sapien
tttttgaataacagcatttaaggca

SEQ ID NO: 2255763 - DNA, 25 bp, Homo sapien
gcacaaaaactggccttgataatgc

SEQ ID NO: 2255764 - DNA, 25 bp, Homo sapien
tttcttgttcatgaaacttgctaaa

SEQ ID NO: 2255765 - DNA, 25 bp, Homo sapien
tgataatgccccacactgtctagtg

SEQ ID NO: 2255766 - DNA, 25 bp, Homo sapien
cagcattgtgtcctgtcctgcacaa

SEQ ID NO: 2255767 - DNA, 25 bp, Homo sapien
gctgaagcctgaagtacaggcatgc

SEQ ID NO: 2255768 - DNA, 25 bp, Homo sapien
cagtcatttagctgaagcctgaagt

SEQ ID NO: 2255769 - DNA, 25 bp, Homo sapien
gtatctgattagtgtaacccatgga

SEQ ID NO: 2255770 - DNA, 25 bp, Homo sapien
ggtggtaacatcagtatctgattag

SEQ ID NO: 2255771 - DNA, 25 bp, Homo sapien
tctttgttaggaatgatcagtggca

SEQ ID NO: 2255772 - DNA, 25 bp, Homo sapien
agagggatgtgtagccatgtgtcct

SEQ ID NO: 2255773 - DNA, 25 bp, Homo sapien
gggtgaccatagctccaggatcagg

SEQ ID NO: 2255774 - DNA, 25 bp, Homo sapien
tgtagttcaaccatgcttgggctgg

SEQ ID NO: 2255775 - DNA, 25 bp, Homo sapien
cttctccactgatgcaggaatactc

SEQ ID NO: 2255776 - DNA, 25 bp, Homo sapien
ttctccactgatgcaggaatactcc

SEQ ID NO: 2255777 - DNA, 25 bp, Homo sapien
tctccactgatgcaggaatactcca

SEQ ID NO: 2255778 - DNA, 25 bp, Homo sapien
ctccactgatgcaggaatactccat

SEQ ID NO: 2255779 - DNA, 25 bp, Homo sapien
caaacatcgaatgttctcatttgtt

SEQ ID NO: 2255780 - DNA, 25 bp, Homo sapien
cactaagatttcattggtgacatcg

SEQ ID NO: 2255781 - DNA, 25 bp, Homo sapien
gcttgtactcagttaagggcatata

SEQ ID NO: 2255782 - DNA, 25 bp, Homo sapien
aagatttcattggtgacatcgtcca

SEQ ID NO: 2255783 - DNA, 25 bp, Homo sapien
tgctagcagcttgtactcagttaag

SEQ ID NO: 2255784 - DNA, 25 bp, Homo sapien
gccagttgtctttactgaatggaga

SEQ ID NO: 2255785 - DNA, 25 bp, Homo sapien
cattacattgtttgtctctgggagc

SEQ ID NO: 2255786 - DNA, 25 bp, Homo sapien
agggctgacaggactcattacattg

SEQ ID NO: 2255787 - DNA, 25 bp, Homo sapien
gctgagcttgcaagcgtttgtggca

SEQ ID NO: 2255788 - DNA, 25 bp, Homo sapien
ctgagtttcagaagatggtaacctg

SEQ ID NO: 2255789 - DNA, 25 bp, Homo sapien
gcaccgtgactctccaagtgttctg

SEQ ID NO: 2255790 - DNA, 25 bp, Homo sapien
tttagagtgtgatttaggccctggc

SEQ ID NO: 2255791 - DNA, 25 bp, Homo sapien
tatgggaaatctgcaagcaccgtga

SEQ ID NO: 2255792 - DNA, 25 bp, Homo sapien
ggccctggctaagtactaaagtaca

SEQ ID NO: 2255793 - DNA, 25 bp, Homo sapien
ggatgactgaatgagcagctctcat

SEQ ID NO: 2255794 - DNA, 25 bp, Homo sapien
aaggatgactgaatgagcagctctc

SEQ ID NO: 2255795 - DNA, 25 bp, Homo sapien
aggaaggatgactgaatgagcagct

SEQ ID NO: 2255796 - DNA, 25 bp, Homo sapien
gaaggatgactgaatgagcagctct

SEQ ID NO: 2255797 - DNA, 25 bp, Homo sapien
taatgcctttgtctgaggtgtacta

SEQ ID NO: 2255798 - DNA, 25 bp, Homo sapien
ttagagttcctcgtctgaaggttgc

SEQ ID NO: 2255799 - DNA, 25 bp, Homo sapien
taagaatccccagtgctaatgcctt

SEQ ID NO: 2255800 - DNA, 25 bp, Homo sapien
caaagcttgtcgatgggaggcaaac

SEQ ID NO: 2255801 - DNA, 25 bp, Homo sapien
tccatctggtaatgtctaaatatct

SEQ ID NO: 2255802 - DNA, 25 bp, Homo sapien
gtgtccacttttcttgtgaagggca

SEQ ID NO: 2255803 - DNA, 25 bp, Homo sapien
ctgtgtccacttttcttgtgaaggg

SEQ ID NO: 2255804 - DNA, 25 bp, Homo sapien
tgtgtccacttttcttgtgaagggc

SEQ ID NO: 2255805 - DNA, 25 bp, Homo sapien
tgtccacttttcttgtgaagggcat

SEQ ID NO: 2255806 - DNA, 25 bp, Homo sapien
acttccttgaggaatatcattattt

SEQ ID NO: 2255807 - DNA, 25 bp, Homo sapien
aagatctctagagagtttttggaca

SEQ ID NO: 2255808 - DNA, 25 bp, Homo sapien
tatcattattttcggagactctaag

SEQ ID NO: 2255809 - DNA, 25 bp, Homo sapien
ttttcggagactctaagatctctag

SEQ ID NO: 2255810 - DNA, 25 bp, Homo sapien
tcaggagtgacagctagtacccata

SEQ ID NO: 2255811 - DNA, 25 bp, Homo sapien
tccagatgcttggtgtgcatcatga

SEQ ID NO: 2255812 - DNA, 25 bp, Homo sapien
tgcatcatgatggtttcagtgagct

SEQ ID NO: 2255813 - DNA, 25 bp, Homo sapien
ttacgtggatggtgaagtagagatt

SEQ ID NO: 2255814 - DNA, 25 bp, Homo sapien
tgagttctggatgttgttgggagct

SEQ ID NO: 2255815 - DNA, 25 bp, Homo sapien
cagactcttagaccggccctgtgag

SEQ ID NO: 2255816 - DNA, 25 bp, Homo sapien
tcacagactcttagaccggccctgt

SEQ ID NO: 2255817 - DNA, 25 bp, Homo sapien
cttagaccggccctgtgagttctgg

SEQ ID NO: 2255818 - DNA, 25 bp, Homo sapien
agactttcacaaaaatcttcacgca

SEQ ID NO: 2255819 - DNA, 25 bp, Homo sapien
atagactttcacaaaaatcttcacg

SEQ ID NO: 2255820 - DNA, 25 bp, Homo sapien
tagactttcacaaaaatcttcacgc

SEQ ID NO: 2255821 - DNA, 25 bp, Homo sapien
gaaagcatagactcaagatggctct

SEQ ID NO: 2255822 - DNA, 25 bp, Homo sapien
ccacagcttgagaggtaggctgtac

SEQ ID NO: 2255823 - DNA, 25 bp, Homo sapien
gatggctcttgccagccacagcttg

SEQ ID NO: 2255824 - DNA, 25 bp, Homo sapien
taggctgtacgggcggtgcttccca

SEQ ID NO: 2255825 - DNA, 25 bp, Homo sapien
cgttcagtcactgagcacaaacaca

SEQ ID NO: 2255826 - DNA, 25 bp, Homo sapien
cagtccttttcggaatttggaacat

SEQ ID NO: 2255827 - DNA, 25 bp, Homo sapien
gctgaaatcagtccttttcggaatt

SEQ ID NO: 2255828 - DNA, 25 bp, Homo sapien
ttcagtcactgagcacaaacacata

SEQ ID NO: 2255829 - DNA, 25 bp, Homo sapien
cattgaaatctttgatctctcttga

SEQ ID NO: 2255830 - DNA, 25 bp, Homo sapien
ctattggtactttattttgctgtgc

SEQ ID NO: 2255831 - DNA, 25 bp, Homo sapien
attcatgtgcccagaatggtattgc

SEQ ID NO: 2255832 - DNA, 25 bp, Homo sapien
ctttgtcatgacctctttgcccatt

SEQ ID NO: 2255833 - DNA, 25 bp, Homo sapien
ggagctctgagataactgactcttg

SEQ ID NO: 2255834 - DNA, 25 bp, Homo sapien
cagctgatgagtgtcgagtcctgaa

SEQ ID NO: 2255835 - DNA, 25 bp, Homo sapien
gagtcctgaacagaaccatcatttt

SEQ ID NO: 2255836 - DNA, 25 bp, Homo sapien
ctgactcttgtcctgttgtcttcca

SEQ ID NO: 2255837 - DNA, 25 bp, Homo sapien
tcaacctttatctccatcgaaattg

SEQ ID NO: 2255838 - DNA, 25 bp, Homo sapien
ttgactcaaacattagctctcggat

SEQ ID NO: 2255839 - DNA, 25 bp, Homo sapien
tagctctcggatatactcttccaaa

SEQ ID NO: 2255840 - DNA, 25 bp, Homo sapien
caaattaaccactgacacaggactg

SEQ ID NO: 2255841 - DNA, 25 bp, Homo sapien
catggtgattcactgcctttatgaa

SEQ ID NO: 2255842 - DNA, 25 bp, Homo sapien
caccgttagatagtaggcaataatg

SEQ ID NO: 2255843 - DNA, 25 bp, Homo sapien
ataagaatcatggtgattcactgcc

SEQ ID NO: 2255844 - DNA, 25 bp, Homo sapien
tgacaccgttagatagtaggcaata

SEQ ID NO: 2255845 - DNA, 25 bp, Homo sapien
aaagcaggtgttcttcccacagtcc

SEQ ID NO: 2255846 - DNA, 25 bp, Homo sapien
gagaaagcaggtgttcttcccacag

SEQ ID NO: 2255847 - DNA, 25 bp, Homo sapien
ctgagaaagcaggtgttcttcccac

SEQ ID NO: 2255848 - DNA, 25 bp, Homo sapien
gaaagcaggtgttcttcccacagtc

SEQ ID NO: 2255849 - DNA, 25 bp, Homo sapien
ggtttggagagtaataactctggta

SEQ ID NO: 2255850 - DNA, 25 bp, Homo sapien
tttggagagtaataactctggtagg

SEQ ID NO: 2255851 - DNA, 25 bp, Homo sapien
gtttggagagtaataactctggtag

SEQ ID NO: 2255852 - DNA, 25 bp, Homo sapien
tggagagtaataactctggtaggaa

SEQ ID NO: 2255853 - DNA, 25 bp, Homo sapien
gaagacaaggacattgcgtagctgg

SEQ ID NO: 2255854 - DNA, 25 bp, Homo sapien
aaggacattgcgtagctggctgcat

SEQ ID NO: 2255855 - DNA, 25 bp, Homo sapien
aagacaaggacattgcgtagctggc

SEQ ID NO: 2255856 - DNA, 25 bp, Homo sapien
caaaggagcgctgtctcagatattc

SEQ ID NO: 2255857 - DNA, 25 bp, Homo sapien
gatgattacaaaggagcgctgtctc

SEQ ID NO: 2255858 - DNA, 25 bp, Homo sapien
agtgctttgacagtaagttccctct

SEQ ID NO: 2255859 - DNA, 25 bp, Homo sapien
ttcagtgctttgacagtaagttccc

SEQ ID NO: 2255860 - DNA, 25 bp, Homo sapien
aacccataatatgtgtcacacatac

SEQ ID NO: 2255861 - DNA, 25 bp, Homo sapien
tagcaaatacctgaacccataatat

SEQ ID NO: 2255862 - DNA, 25 bp, Homo sapien
cataatatgtgtcacacatactcac

SEQ ID NO: 2255863 - DNA, 25 bp, Homo sapien
catagccattagcaaatacctgaac

SEQ ID NO: 2255864 - DNA, 25 bp, Homo sapien
agcataattgcttgtgaaccttcag

SEQ ID NO: 2255865 - DNA, 25 bp, Homo sapien
ggaagtgcaacaagcataattgctt

SEQ ID NO: 2255866 - DNA, 25 bp, Homo sapien
tgcttgtgaaccttcagtaaattct

SEQ ID NO: 2255867 - DNA, 25 bp, Homo sapien
tcaccccaggaagtgcaacaagcat

SEQ ID NO: 2255868 - DNA, 25 bp, Homo sapien
tggacagggttgttcactgaaggaa

SEQ ID NO: 2255869 - DNA, 25 bp, Homo sapien
tgatctcctctaggaaggtctgaga

SEQ ID NO: 2255870 - DNA, 25 bp, Homo sapien
caagatgtggctttctgatctcctc

SEQ ID NO: 2255871 - DNA, 25 bp, Homo sapien
aaggtctgagaacaatggacagggt

SEQ ID NO: 2255872 - DNA, 25 bp, Homo sapien
gggtcatgccaatcgacaggtgcag

SEQ ID NO: 2255873 - DNA, 25 bp, Homo sapien
tgacatcttgattcccaccgagggg

SEQ ID NO: 2255874 - DNA, 25 bp, Homo sapien
caccgaggggtcatgccaatcgaca

SEQ ID NO: 2255875 - DNA, 25 bp, Homo sapien
gccaatcgacaggtgcagtttgtaa

SEQ ID NO: 2255876 - DNA, 25 bp, Homo sapien
gatgatatcattctgacagatttca

SEQ ID NO: 2255877 - DNA, 25 bp, Homo sapien
aaagcaagatgatatcattctgaca

SEQ ID NO: 2255878 - DNA, 25 bp, Homo sapien
taaaagcaagatgatatcattctga

SEQ ID NO: 2255879 - DNA, 25 bp, Homo sapien
gcaagatgatatcattctgacagat

SEQ ID NO: 2255880 - DNA, 25 bp, Homo sapien
tcagcagcttcagtggctatgggac

SEQ ID NO: 2255881 - DNA, 25 bp, Homo sapien
ggtcccctatgatcctcagaaatcc

SEQ ID NO: 2255882 - DNA, 25 bp, Homo sapien
tagggtcccctatgatcctcagaaa

SEQ ID NO: 2255883 - DNA, 25 bp, Homo sapien
gggtcccctatgatcctcagaaatc

SEQ ID NO: 2255884 - DNA, 25 bp, Homo sapien
aatagggtcccctatgatcctcaga

SEQ ID NO: 2255885 - DNA, 25 bp, Homo sapien
tggccaacacttgactgtgggagga

SEQ ID NO: 2255886 - DNA, 25 bp, Homo sapien
ccagaagtatggagcccagaacagt

SEQ ID NO: 2255887 - DNA, 25 bp, Homo sapien
tcccgaggttgcaatgtgtagccag

SEQ ID NO: 2255888 - DNA, 25 bp, Homo sapien
tcatgggatgttccggtgctcccga

SEQ ID NO: 2255889 - DNA, 25 bp, Homo sapien
taaatccttcctttatgctccgatg

SEQ ID NO: 2255890 - DNA, 25 bp, Homo sapien
tccttcctttatgctccgatgaaat

SEQ ID NO: 2255891 - DNA, 25 bp, Homo sapien
ttatgctccgatgaaattgtgttca

SEQ ID NO: 2255892 - DNA, 25 bp, Homo sapien
tatgctccgatgaaattgtgttcat

SEQ ID NO: 2255893 - DNA, 25 bp, Homo sapien
cgttcatttgctctagagaatttgg

SEQ ID NO: 2255894 - DNA, 25 bp, Homo sapien
cttgaatcacgttcatttgctctag

SEQ ID NO: 2255895 - DNA, 25 bp, Homo sapien
actcctacttgaatcacgttcattt

SEQ ID NO: 2255896 - DNA, 25 bp, Homo sapien
gaatcacgttcatttgctctagaga

SEQ ID NO: 2255897 - DNA, 25 bp, Homo sapien
cttccttcagaccatgcgtagttct

SEQ ID NO: 2255898 - DNA, 25 bp, Homo sapien
aatacccatcaggaagggatttgat

SEQ ID NO: 2255899 - DNA, 25 bp, Homo sapien
catgcgtagttctgcactgaacaaa

SEQ ID NO: 2255900 - DNA, 25 bp, Homo sapien
tcaaatacccatcaggaagggattt

SEQ ID NO: 2255901 - DNA, 25 bp, Homo sapien
aagacgggttatgtgccaacatctt

SEQ ID NO: 2255902 - DNA, 25 bp, Homo sapien
agggtggcgtatctcacgcatgtgt

SEQ ID NO: 2255903 - DNA, 25 bp, Homo sapien
ccaacatcttaacaaggtgggaggg

SEQ ID NO: 2255904 - DNA, 25 bp, Homo sapien
gtaagacgggttatgtgccaacatc

SEQ ID NO: 2255905 - DNA, 25 bp, Homo sapien
tatttaccacttcataggtgcaagc

SEQ ID NO: 2255906 - DNA, 25 bp, Homo sapien
ttttcaacaactcatataagacaca

SEQ ID NO: 2255907 - DNA, 25 bp, Homo sapien
tttgatagccacctgactcagttca

SEQ ID NO: 2255908 - DNA, 25 bp, Homo sapien
caacaactcatataagacacaaggc

SEQ ID NO: 2255909 - DNA, 25 bp, Homo sapien
tgcttggaacaactgtgcaccccat

SEQ ID NO: 2255910 - DNA, 25 bp, Homo sapien
agtatataaaacagacatgcttgga

SEQ ID NO: 2255911 - DNA, 25 bp, Homo sapien
gacatgcttggaacaactgtgcacc

SEQ ID NO: 2255912 - DNA, 25 bp, Homo sapien
tatataaaacagacatgcttggaac

SEQ ID NO: 2255913 - DNA, 25 bp, Homo sapien
cacttctcccttcttccacgctctc

SEQ ID NO: 2255914 - DNA, 25 bp, Homo sapien
tttaaactgattgattgattccact

SEQ ID NO: 2255915 - DNA, 25 bp, Homo sapien
tttttaaactgattgattgattcca

SEQ ID NO: 2255916 - DNA, 25 bp, Homo sapien
cttctcccttcttccacgctctcat

SEQ ID NO: 2255917 - DNA, 25 bp, Homo sapien
tactgaagttcggtctgtgccagca

SEQ ID NO: 2255918 - DNA, 25 bp, Homo sapien
gtgttcatttactgaagttcggtct

SEQ ID NO: 2255919 - DNA, 25 bp, Homo sapien
gaagttcggtctgtgccagcacagt

SEQ ID NO: 2255920 - DNA, 25 bp, Homo sapien
tcatttactgaagttcggtctgtgc

SEQ ID NO: 2255921 - DNA, 25 bp, Homo sapien
tgcttttgtaggctccagtgaaacc

SEQ ID NO: 2255922 - DNA, 25 bp, Homo sapien
tgacccgattacatttgattcttgg

SEQ ID NO: 2255923 - DNA, 25 bp, Homo sapien
gatggaagggtccagtatactacta

SEQ ID NO: 2255924 - DNA, 25 bp, Homo sapien
ccttctcctaatataagtgacccga

SEQ ID NO: 2255925 - DNA, 25 bp, Homo sapien
tctcttttagatcccattcacagcc

SEQ ID NO: 2255926 - DNA, 25 bp, Homo sapien
cactgaatctgatccagttccaggt

SEQ ID NO: 2255927 - DNA, 25 bp, Homo sapien
tgtctacatcgttatattccttctc

SEQ ID NO: 2255928 - DNA, 25 bp, Homo sapien
ccagtgacactgaatctgatccagt

SEQ ID NO: 2255929 - DNA, 25 bp, Homo sapien
ggaatattcacccaagaccagcaat

SEQ ID NO: 2255930 - DNA, 25 bp, Homo sapien
tgtttctggttgcaaaatacgtgaa

SEQ ID NO: 2255931 - DNA, 25 bp, Homo sapien
taggacataactggtattgtttctg

SEQ ID NO: 2255932 - DNA, 25 bp, Homo sapien
cagatggttgaaagttatagtagga

SEQ ID NO: 2255933 - DNA, 25 bp, Homo sapien
cacagctcttcccacgtgatggcaa

SEQ ID NO: 2255934 - DNA, 25 bp, Homo sapien
gaagcatgtgcttattgtgatgtgc

SEQ ID NO: 2255935 - DNA, 25 bp, Homo sapien
tgcgtaagtgaaatgacctcagctt

SEQ ID NO: 2255936 - DNA, 25 bp, Homo sapien
tcagacacggttgaacaatggaagc

SEQ ID NO: 2255937 - DNA, 25 bp, Homo sapien
aatacaaagaatatctgccacataa

SEQ ID NO: 2255938 - DNA, 25 bp, Homo sapien
taggaagtgactactttctcaaaac

SEQ ID NO: 2255939 - DNA, 25 bp, Homo sapien
ctaggaagtgactactttctcaaaa

SEQ ID NO: 2255940 - DNA, 25 bp, Homo sapien
aagaatatctgccacataaaatgaa

SEQ ID NO: 2255941 - DNA, 25 bp, Homo sapien
cactggaatgtgcaagcctttgaaa

SEQ ID NO: 2255942 - DNA, 25 bp, Homo sapien
gcctttgaaatcaatttcatcttgt

SEQ ID NO: 2255943 - DNA, 25 bp, Homo sapien
gcagtaccctacgtttatcccgata

SEQ ID NO: 2255944 - DNA, 25 bp, Homo sapien
taatcatgttgaatacgcagtaccc

SEQ ID NO: 2255945 - DNA, 25 bp, Homo sapien
acacatgcgcacacaaaaggtggac

SEQ ID NO: 2255946 - DNA, 25 bp, Homo sapien
cgcacacaaaaggtggacggtggct

SEQ ID NO: 2255947 - DNA, 25 bp, Homo sapien
gtagtaggcttacatcatcacttaa

SEQ ID NO: 2255948 - DNA, 25 bp, Homo sapien
gagtgtgggccaactcttgtagtag

SEQ ID NO: 2255949 - DNA, 25 bp, Homo sapien
gaccaaagactggtactcctctgtt

SEQ ID NO: 2255950 - DNA, 25 bp, Homo sapien
acagctactcgtatatgtttgacca

SEQ ID NO: 2255951 - DNA, 25 bp, Homo sapien
cccagccaaccagatcaactgaata

SEQ ID NO: 2255952 - DNA, 25 bp, Homo sapien
tctcttcgaccaagtttgcagctct

SEQ ID NO: 2255953 - DNA, 25 bp, Homo sapien
tttcatctaaacagatgatacactt

SEQ ID NO: 2255954 - DNA, 25 bp, Homo sapien
tctaaacagatgatacactttcctg

SEQ ID NO: 2255955 - DNA, 25 bp, Homo sapien
catctaaacagatgatacactttcc

SEQ ID NO: 2255956 - DNA, 25 bp, Homo sapien
tcatctaaacagatgatacactttc

SEQ ID NO: 2255957 - DNA, 25 bp, Homo sapien
ttggaggatctttggcctgcacatg

SEQ ID NO: 2255958 - DNA, 25 bp, Homo sapien
tcccaaagcaccattgctgactcct

SEQ ID NO: 2255959 - DNA, 25 bp, Homo sapien
ccaaagcaccattgctgactcctcc

SEQ ID NO: 2255960 - DNA, 25 bp, Homo sapien
caaagcaccattgctgactcctcca

SEQ ID NO: 2255961 - DNA, 25 bp, Homo sapien
cccaaagcaccattgctgactcctc

SEQ ID NO: 2255962 - DNA, 25 bp, Homo sapien
ggggtgccggtgaagtgtggaggag

SEQ ID NO: 2255963 - DNA, 25 bp, Homo sapien
ttgtggggggtgccggtgaagtgtg

SEQ ID NO: 2255964 - DNA, 25 bp, Homo sapien
tgattgtggggggtgccggtgaagt

SEQ ID NO: 2255965 - DNA, 25 bp, Homo sapien
tggggggtgccggtgaagtgtggag

SEQ ID NO: 2255966 - DNA, 25 bp, Homo sapien
caattctgatggtacacatagcagg

SEQ ID NO: 2255967 - DNA, 25 bp, Homo sapien
caaagtaactggagacccgttcaca

SEQ ID NO: 2255968 - DNA, 25 bp, Homo sapien
caggaagagagagtattctccaagt

SEQ ID NO: 2255969 - DNA, 25 bp, Homo sapien
tagaacccccgaaagattcatccca

SEQ ID NO: 2255970 - DNA, 25 bp, Homo sapien
tctcagtatgcatcctcagacagca

SEQ ID NO: 2255971 - DNA, 25 bp, Homo sapien
catttctcagtatgcatcctcagac

SEQ ID NO: 2255972 - DNA, 25 bp, Homo sapien
tatgtgtgcctcatgtgaaaggcat

SEQ ID NO: 2255973 - DNA, 25 bp, Homo sapien
tgtgcctcatgtgaaaggcatttct

SEQ ID NO: 2255974 - DNA, 25 bp, Homo sapien
tatcctatggccttccggagaaata

SEQ ID NO: 2255975 - DNA, 25 bp, Homo sapien
ctttatcctatggccttccggagaa

SEQ ID NO: 2255976 - DNA, 25 bp, Homo sapien
ttatcctatggccttccggagaaat

SEQ ID NO: 2255977 - DNA, 25 bp, Homo sapien
ttctttatcctatggccttccggag

SEQ ID NO: 2255978 - DNA, 25 bp, Homo sapien
attcaaaattctttgtgctacctaa

SEQ ID NO: 2255979 - DNA, 25 bp, Homo sapien
ttgtgctacctaatataccatatcc

SEQ ID NO: 2255980 - DNA, 25 bp, Homo sapien
ttctttgtgctacctaatataccat

SEQ ID NO: 2255981 - DNA, 25 bp, Homo sapien
ttcaaaattctttgtgctacctaat

SEQ ID NO: 2255982 - DNA, 25 bp, Homo sapien
gattaaagtatggccctcaagagat

SEQ ID NO: 2255983 - DNA, 25 bp, Homo sapien
ttaaagtatggccctcaagagatgg

SEQ ID NO: 2255984 - DNA, 25 bp, Homo sapien
cagattaaagtatggccctcaagag

SEQ ID NO: 2255985 - DNA, 25 bp, Homo sapien
gagatggatgaaatgtcctctttgg

SEQ ID NO: 2255986 - DNA, 25 bp, Homo sapien
tcactccctctttcagcactaatgt

SEQ ID NO: 2255987 - DNA, 25 bp, Homo sapien
ttcccatctgtagaccatcagtcac

SEQ ID NO: 2255988 - DNA, 25 bp, Homo sapien
agttcccatctgtagaccatcagtc

SEQ ID NO: 2255989 - DNA, 25 bp, Homo sapien
actccctctttcagcactaatgtat

SEQ ID NO: 2255990 - DNA, 25 bp, Homo sapien
ttgacacatatacttagttccattt

SEQ ID NO: 2255991 - DNA, 25 bp, Homo sapien
gacacatatacttagttccattttc

SEQ ID NO: 2255992 - DNA, 25 bp, Homo sapien
gtcagccagtggtaatgaatgtatc

SEQ ID NO: 2255993 - DNA, 25 bp, Homo sapien
acatatacttagttccattttcttc

SEQ ID NO: 2255994 - DNA, 25 bp, Homo sapien
ttggaagaactactgtagttcactg

SEQ ID NO: 2255995 - DNA, 25 bp, Homo sapien
caaacaattctgctaaagttcttgg

SEQ ID NO: 2255996 - DNA, 25 bp, Homo sapien
tcactgatatccttgtaggtttcct

SEQ ID NO: 2255997 - DNA, 25 bp, Homo sapien
cactgatatccttgtaggtttcctg

SEQ ID NO: 2255998 - DNA, 25 bp, Homo sapien
acttatttgcgtccctgatgaaggg

SEQ ID NO: 2255999 - DNA, 25 bp, Homo sapien
tacaacatagcctagcggagcaggc

SEQ ID NO: 2256000 - DNA, 25 bp, Homo sapien
cacaataagccacgtttgagtgttc

SEQ ID NO: 2256001 - DNA, 25 bp, Homo sapien
ggtttggttgcttcccacaataagc

SEQ ID NO: 2256002 - DNA, 25 bp, Homo sapien
caaccacaacctcaatgcgttgtgg

SEQ ID NO: 2256003 - DNA, 25 bp, Homo sapien
tcataggcctttccatcaaccacaa

SEQ ID NO: 2256004 - DNA, 25 bp, Homo sapien
caacctcaatgcgttgtggaagatg

SEQ ID NO: 2256005 - DNA, 25 bp, Homo sapien
ccacaacctcaatgcgttgtggaag

SEQ ID NO: 2256006 - DNA, 25 bp, Homo sapien
cttcatccgtattggagcattctgg

SEQ ID NO: 2256007 - DNA, 25 bp, Homo sapien
cataagataacttcatccgtattgg

SEQ ID NO: 2256008 - DNA, 25 bp, Homo sapien
taacttcatccgtattggagcattc

SEQ ID NO: 2256009 - DNA, 25 bp, Homo sapien
caggcataagataacttcatccgta

SEQ ID NO: 2256010 - DNA, 25 bp, Homo sapien
tttctttgcctcttagtatctctgc

SEQ ID NO: 2256011 - DNA, 25 bp, Homo sapien
tgcctcttagtatctctgcacacat

SEQ ID NO: 2256012 - DNA, 25 bp, Homo sapien
tatttctttgcctcttagtatctct

SEQ ID NO: 2256013 - DNA, 25 bp, Homo sapien
ctttgcctcttagtatctctgcaca

SEQ ID NO: 2256014 - DNA, 25 bp, Homo sapien
ttcagataagtctacgccttcgtcc

SEQ ID NO: 2256015 - DNA, 25 bp, Homo sapien
tacccttcctgaggtaatacacaaa

SEQ ID NO: 2256016 - DNA, 25 bp, Homo sapien
aagactctgtttggtacctcttgca

SEQ ID NO: 2256017 - DNA, 25 bp, Homo sapien
ttgtcctcctttgaaggtccttcac

SEQ ID NO: 2256018 - DNA, 25 bp, Homo sapien
ccccattggtgctggaagttggctg

SEQ ID NO: 2256019 - DNA, 25 bp, Homo sapien
tttgttattggattcacaggggctc

SEQ ID NO: 2256020 - DNA, 25 bp, Homo sapien
cgtcttctccccattggtgctggaa

SEQ ID NO: 2256021 - DNA, 25 bp, Homo sapien
tggtgctggaagttggctgttccat

SEQ ID NO: 2256022 - DNA, 25 bp, Homo sapien
cttgaaggacattacaggggtgaac

SEQ ID NO: 2256023 - DNA, 25 bp, Homo sapien
cgtggttaccgcattctctgctggg

SEQ ID NO: 2256024 - DNA, 25 bp, Homo sapien
gggtgaacgtggttaccgcattctc

SEQ ID NO: 2256025 - DNA, 25 bp, Homo sapien
tcagaagccctttcacttaaatggg

SEQ ID NO: 2256026 - DNA, 25 bp, Homo sapien
cagactctgtgctccacaccacagc

SEQ ID NO: 2256027 - DNA, 25 bp, Homo sapien
gatgaccatgagcaccaaggccaca

SEQ ID NO: 2256028 - DNA, 25 bp, Homo sapien
agtaggggatggctgaagggagatg

SEQ ID NO: 2256029 - DNA, 25 bp, Homo sapien
accttcttgattcatgaagtagggg

SEQ ID NO: 2256030 - DNA, 25 bp, Homo sapien
tggtgaacttgctggtcccacgctc

SEQ ID NO: 2256031 - DNA, 25 bp, Homo sapien
ctggtgaacttgctggtcccacgct

SEQ ID NO: 2256032 - DNA, 25 bp, Homo sapien
gtgaacttgctggtcccacgctcca

SEQ ID NO: 2256033 - DNA, 25 bp, Homo sapien
ggtgaacttgctggtcccacgctcc

SEQ ID NO: 2256034 - DNA, 25 bp, Homo sapien
gtagggagcaacagccatctgggct

SEQ ID NO: 2256035 - DNA, 25 bp, Homo sapien
ctgggggtagggagcaacagccatc

SEQ ID NO: 2256036 - DNA, 25 bp, Homo sapien
catctgggctgattgcttctccagg

SEQ ID NO: 2256037 - DNA, 25 bp, Homo sapien
atctgggctgattgcttctccaggc

SEQ ID NO: 2256038 - DNA, 25 bp, Homo sapien
agatgtagccagactgcgtgcagca

SEQ ID NO: 2256039 - DNA, 25 bp, Homo sapien
tcaagatgtagccagactgcgtgca

SEQ ID NO: 2256040 - DNA, 25 bp, Homo sapien
agactgcgtgcagcatgtacaacag

SEQ ID NO: 2256041 - DNA, 25 bp, Homo sapien
agccagactgcgtgcagcatgtaca

SEQ ID NO: 2256042 - DNA, 25 bp, Homo sapien
ggaaccttctgcccaagtccgcttc

SEQ ID NO: 2256043 - DNA, 25 bp, Homo sapien
aagtccgcttcccatgagacatgac

SEQ ID NO: 2256044 - DNA, 25 bp, Homo sapien
tgctgcatctttgtggggatcgagc

SEQ ID NO: 2256045 - DNA, 25 bp, Homo sapien
ttgtggggatcgagcatcatttgca

SEQ ID NO: 2256046 - DNA, 25 bp, Homo sapien
agtttggtgagcttccaccacagcc

SEQ ID NO: 2256047 - DNA, 25 bp, Homo sapien
ctctggtgctgactctaggtgctca

SEQ ID NO: 2256048 - DNA, 25 bp, Homo sapien
gccctctggtgctgactctaggtgc

SEQ ID NO: 2256049 - DNA, 25 bp, Homo sapien
cctctggtgctgactctaggtgctc

SEQ ID NO: 2256050 - DNA, 25 bp, Homo sapien
tctggtgctgactctaggtgctcac

SEQ ID NO: 2256051 - DNA, 25 bp, Homo sapien
ttgacctcctactctgggtataatc

SEQ ID NO: 2256052 - DNA, 25 bp, Homo sapien
ttgctttcactttgcccactactgt

SEQ ID NO: 2256053 - DNA, 25 bp, Homo sapien
tgacctcctactctgggtataatcc

SEQ ID NO: 2256054 - DNA, 25 bp, Homo sapien
ctactgtggtcctgattattctctc

SEQ ID NO: 2256055 - DNA, 25 bp, Homo sapien
catagcaagtcttagcagggagaac

SEQ ID NO: 2256056 - DNA, 25 bp, Homo sapien
gatctagtatttgtgaggtgccaac

SEQ ID NO: 2256057 - DNA, 25 bp, Homo sapien
tgcagctattaaccagcagcgtctg

SEQ ID NO: 2256058 - DNA, 25 bp, Homo sapien
tgagcaatatccactgcacaacatg

SEQ ID NO: 2256059 - DNA, 25 bp, Homo sapien
caaagcatgttgatcttggcactgt

SEQ ID NO: 2256060 - DNA, 25 bp, Homo sapien
tagttcagcccatctgaccacagtg

SEQ ID NO: 2256061 - DNA, 25 bp, Homo sapien
ccacagtgactaatgggatgagcac

SEQ ID NO: 2256062 - DNA, 25 bp, Homo sapien
tctgccctcaagttaaccgtaatgc

SEQ ID NO: 2256063 - DNA, 25 bp, Homo sapien
tgtgaactcatctgaaaccaatgca

SEQ ID NO: 2256064 - DNA, 25 bp, Homo sapien
aatatgccacttgcaatcatgagga

SEQ ID NO: 2256065 - DNA, 25 bp, Homo sapien
tatcactttgttaatcgggagctcc

SEQ ID NO: 2256066 - DNA, 25 bp, Homo sapien
taagagcaccagcacatacacatgg

SEQ ID NO: 2256067 - DNA, 25 bp, Homo sapien
tccagcggtttcaagatgcaggcca

SEQ ID NO: 2256068 - DNA, 25 bp, Homo sapien
gatcacaaagtccagaatatttctg

SEQ ID NO: 2256069 - DNA, 25 bp, Homo sapien
tcacgtaactgagaacaaactctag

SEQ ID NO: 2256070 - DNA, 25 bp, Homo sapien
aaaaatagctttgggtgcgctcaca

SEQ ID NO: 2256071 - DNA, 25 bp, Homo sapien
caatagagtttgcagtatccccaca

SEQ ID NO: 2256072 - DNA, 25 bp, Homo sapien
tacaaagcacaaagagacgaaggtt

SEQ ID NO: 2256073 - DNA, 25 bp, Homo sapien
tacacggagttgttacaatgccaca

SEQ ID NO: 2256074 - DNA, 25 bp, Homo sapien
agataaaggacccagctggtacagg

SEQ ID NO: 2256075 - DNA, 25 bp, Homo sapien
gaataaacacattggaatccctgct

SEQ ID NO: 2256076 - DNA, 25 bp, Homo sapien
gggaactctgcagtttcgccttcag

SEQ ID NO: 2256077 - DNA, 25 bp, Homo sapien
tcctcaaggacctgtaggtagtcag

SEQ ID NO: 2256078 - DNA, 25 bp, Homo sapien
tctggatagcggatctcaaagccac

SEQ ID NO: 2256079 - DNA, 25 bp, Homo sapien
caagtcacaagtacagtcccatggg

SEQ ID NO: 2256080 - DNA, 25 bp, Homo sapien
tctctatgccaaggaaagtgtcagc

SEQ ID NO: 2256081 - DNA, 25 bp, Homo sapien
cagtctagctaagggtgctccggaa

SEQ ID NO: 2256082 - DNA, 25 bp, Homo sapien
ttaaaatagacagaggcactggccc

SEQ ID NO: 2256083 - DNA, 25 bp, Homo sapien
tgcaaatttccaccgatatgtcaga

SEQ ID NO: 2256084 - DNA, 25 bp, Homo sapien
gcatttgtcgaagaaatcagggctg

SEQ ID NO: 2256085 - DNA, 25 bp, Homo sapien
aattagaccaaggtggtttcagctg

SEQ ID NO: 2256086 - DNA, 25 bp, Homo sapien
gagcacattctcaactgacacgcag

SEQ ID NO: 2256087 - DNA, 25 bp, Homo sapien
ttgcaatcagcaaacaactgtatgc

SEQ ID NO: 2256088 - DNA, 25 bp, Homo sapien
tcttgcaatcagcaaacaactgtat

SEQ ID NO: 2256089 - DNA, 25 bp, Homo sapien
tgcaatcagcaaacaactgtatgct

SEQ ID NO: 2256090 - DNA, 25 bp, Homo sapien
cttcttgcaatcagcaaacaactgt

SEQ ID NO: 2256091 - DNA, 25 bp, Homo sapien
aagaaaacattttttcaatggtcat

SEQ ID NO: 2256092 - DNA, 25 bp, Homo sapien
aggaaggggagttcacacaacacaa

SEQ ID NO: 2256093 - DNA, 25 bp, Homo sapien
tgaccacagactgcaactgctgagg

SEQ ID NO: 2256094 - DNA, 25 bp, Homo sapien
gaccacagactgcaactgctgagga

SEQ ID NO: 2256095 - DNA, 25 bp, Homo sapien
accacagactgcaactgctgaggaa

SEQ ID NO: 2256096 - DNA, 25 bp, Homo sapien
ccattagccatgacccaggaggatt

SEQ ID NO: 2256097 - DNA, 25 bp, Homo sapien
tggttcagaatacagccagcactgc

SEQ ID NO: 2256098 - DNA, 25 bp, Homo sapien
tctgaaaatgcataaggagctgccc

SEQ ID NO: 2256099 - DNA, 25 bp, Homo sapien
tggtaaaaccgaacatgtctcaagg

SEQ ID NO: 2256100 - DNA, 25 bp, Homo sapien
tattcctagtcttgccgagcgctag

SEQ ID NO: 2256101 - DNA, 25 bp, Homo sapien
gccccgagcctcagatccacgtctg

SEQ ID NO: 2256102 - DNA, 25 bp, Homo sapien
ttgccgagcgctagcaatctccgac

SEQ ID NO: 2256103 - DNA, 25 bp, Homo sapien
tctggtattcctagtcttgccgagc

SEQ ID NO: 2256104 - DNA, 25 bp, Homo sapien
gtgcagggcccgcggcgccgtgacc

SEQ ID NO: 2256105 - DNA, 25 bp, Homo sapien
agagcccagcgtctggtgcagggcc

SEQ ID NO: 2256106 - DNA, 25 bp, Homo sapien
gcggcgccgtgacctgcgctgctgt

SEQ ID NO: 2256107 - DNA, 25 bp, Homo sapien
ctctagagcccagcgtctggtgcag

SEQ ID NO: 2256108 - DNA, 25 bp, Homo sapien
tgtgattccggacagagctcctccg

SEQ ID NO: 2256109 - DNA, 25 bp, Homo sapien
gcgcgcacccgagcagacaccgcgc

SEQ ID NO: 2256110 - DNA, 25 bp, Homo sapien
cagcaggcgagcaggcgggccggcg

SEQ ID NO: 2256111 - DNA, 25 bp, Homo sapien
ctatgtgattccggacagagctcct

SEQ ID NO: 2256112 - DNA, 25 bp, Homo sapien
ctgcacctttacatacacgcgctga

SEQ ID NO: 2256113 - DNA, 25 bp, Homo sapien
accccgcacacaagcagtccttcct

SEQ ID NO: 2256114 - DNA, 25 bp, Homo sapien
acctttacatacacgcgctgaatcc

SEQ ID NO: 2256115 - DNA, 25 bp, Homo sapien
cttcctcccgacactcgaccacttt

SEQ ID NO: 2256116 - DNA, 25 bp, Homo sapien
ggctaattgtcaccccgcagaacgg

SEQ ID NO: 2256117 - DNA, 25 bp, Homo sapien
ttggctaattgtcaccccgcagaac

SEQ ID NO: 2256118 - DNA, 25 bp, Homo sapien
ctttggctaattgtcaccccgcaga

SEQ ID NO: 2256119 - DNA, 25 bp, Homo sapien
aattgtcaccccgcagaacggaggg

SEQ ID NO: 2256120 - DNA, 25 bp, Homo sapien
taaggcgaaagtgtgaggctttagc

SEQ ID NO: 2256121 - DNA, 25 bp, Homo sapien
gggctttaaggcgaaagtgtgaggc

SEQ ID NO: 2256122 - DNA, 25 bp, Homo sapien
tgtgaggctttagcctaaagtgaga

SEQ ID NO: 2256123 - DNA, 25 bp, Homo sapien
gcgaaagtgtgaggctttagcctaa

SEQ ID NO: 2256124 - DNA, 25 bp, Homo sapien
atcgtaggtctacactgatatactg

SEQ ID NO: 2256125 - DNA, 25 bp, Homo sapien
tacaaccagaatcgtaggtctacac

SEQ ID NO: 2256126 - DNA, 25 bp, Homo sapien
taggagtacaaccagaatcgtaggt

SEQ ID NO: 2256127 - DNA, 25 bp, Homo sapien
ccagaatcgtaggtctacactgata

SEQ ID NO: 2256128 - DNA, 25 bp, Homo sapien
gtcaacaacttgtatgtccttctgg

SEQ ID NO: 2256129 - DNA, 25 bp, Homo sapien
caataatggtaagcttccatggcac

SEQ ID NO: 2256130 - DNA, 25 bp, Homo sapien
gagatgacacagtccaaatttttga

SEQ ID NO: 2256131 - DNA, 25 bp, Homo sapien
catatttggaaagtacattaacagg

SEQ ID NO: 2256132 - DNA, 25 bp, Homo sapien
tagtggcacacgtctgtgtgcctgg

SEQ ID NO: 2256133 - DNA, 25 bp, Homo sapien
gcctggtggaaaatctggagaactc

SEQ ID NO: 2256134 - DNA, 25 bp, Homo sapien
tggtggaaaatctggagaactcagc

SEQ ID NO: 2256135 - DNA, 25 bp, Homo sapien
ggaccataggtagtggcacacgtct

SEQ ID NO: 2256136 - DNA, 25 bp, Homo sapien
ctatcccctcgggaaacatgagcat

SEQ ID NO: 2256137 - DNA, 25 bp, Homo sapien
ctctatcccctcgggaaacatgagc

SEQ ID NO: 2256138 - DNA, 25 bp, Homo sapien
atcccctcgggaaacatgagcattt

SEQ ID NO: 2256139 - DNA, 25 bp, Homo sapien
tttctctatcccctcgggaaacatg

SEQ ID NO: 2256140 - DNA, 25 bp, Homo sapien
gatgaggccacaattgtctcaagga

SEQ ID NO: 2256141 - DNA, 25 bp, Homo sapien
cttatctgtactgatgaggccacaa

SEQ ID NO: 2256142 - DNA, 25 bp, Homo sapien
attgtctcaaggagtgtcttcatgg

SEQ ID NO: 2256143 - DNA, 25 bp, Homo sapien
tctgtactgatgaggccacaattgt

SEQ ID NO: 2256144 - DNA, 25 bp, Homo sapien
tagctgcctgcataaccatcactca

SEQ ID NO: 2256145 - DNA, 25 bp, Homo sapien
gctgggccactgtaactgaactggt

SEQ ID NO: 2256146 - DNA, 25 bp, Homo sapien
ggtttgacaagcctataactcccat

SEQ ID NO: 2256147 - DNA, 25 bp, Homo sapien
gctggctgggccactgtaactgaac

SEQ ID NO: 2256148 - DNA, 25 bp, Homo sapien
tagaatccaagaagagttctacata

SEQ ID NO: 2256149 - DNA, 25 bp, Homo sapien
agaatccaagaagagttctacatat

SEQ ID NO: 2256150 - DNA, 25 bp, Homo sapien
tgtagaatccaagaagagttctaca

SEQ ID NO: 2256151 - DNA, 25 bp, Homo sapien
ctgtagaatccaagaagagttctac

SEQ ID NO: 2256152 - DNA, 25 bp, Homo sapien
gtcttttgacgtagctgccacagca

SEQ ID NO: 2256153 - DNA, 25 bp, Homo sapien
cttttgacgtagctgccacagcatc

SEQ ID NO: 2256154 - DNA, 25 bp, Homo sapien
ttgctttgtcttttgacgtagctgc

SEQ ID NO: 2256155 - DNA, 25 bp, Homo sapien
atatttgctttgtcttttgacgtag

SEQ ID NO: 2256156 - DNA, 25 bp, Homo sapien
atcaggcattcctaaaaaactataa

SEQ ID NO: 2256157 - DNA, 25 bp, Homo sapien
tcaggcattcctaaaaaactataat

SEQ ID NO: 2256158 - DNA, 25 bp, Homo sapien
ttcatagccatcattataaccatta

SEQ ID NO: 2256159 - DNA, 25 bp, Homo sapien
aggtctgtcatagggacctggctgc

SEQ ID NO: 2256160 - DNA, 25 bp, Homo sapien
aatcattatagcctccatagcttcc

SEQ ID NO: 2256161 - DNA, 25 bp, Homo sapien
gctaatgctgttatgctctttgcca

SEQ ID NO: 2256162 - DNA, 25 bp, Homo sapien
cttgtgtttctctagagcattttca

SEQ ID NO: 2256163 - DNA, 25 bp, Homo sapien
tgtttctctagagcattttcagcta

SEQ ID NO: 2256164 - DNA, 25 bp, Homo sapien
tctctagagcattttcagctatttc

SEQ ID NO: 2256165 - DNA, 25 bp, Homo sapien
tttctctagagcattttcagctatt

SEQ ID NO: 2256166 - DNA, 25 bp, Homo sapien
catcagtgttatgccatttggcacg

SEQ ID NO: 2256167 - DNA, 25 bp, Homo sapien
tctggaccactatgcttcagcaccc

SEQ ID NO: 2256168 - DNA, 25 bp, Homo sapien
ttcaaaggggagtacaaagccatca

SEQ ID NO: 2256169 - DNA, 25 bp, Homo sapien
tcattggccatgtcagaactatctg

SEQ ID NO: 2256170 - DNA, 25 bp, Homo sapien
ctccaccgtcagcacccaacatcat

SEQ ID NO: 2256171 - DNA, 25 bp, Homo sapien
cgttatgaatcctgctccaccgtca

SEQ ID NO: 2256172 - DNA, 25 bp, Homo sapien
gctccaccgtcagcacccaacatca

SEQ ID NO: 2256173 - DNA, 25 bp, Homo sapien
cttcgttatgaatcctgctccaccg

SEQ ID NO: 2256174 - DNA, 25 bp, Homo sapien
ttgcaacccaaatcactatgaggta

SEQ ID NO: 2256175 - DNA, 25 bp, Homo sapien
gcaacccaaatcactatgaggtatg

SEQ ID NO: 2256176 - DNA, 25 bp, Homo sapien
cccaaatcactatgaggtatgtggc

SEQ ID NO: 2256177 - DNA, 25 bp, Homo sapien
caaatcactatgaggtatgtggcct

SEQ ID NO: 2256178 - DNA, 25 bp, Homo sapien
tccatgtttgactagtcctccccac

SEQ ID NO: 2256179 - DNA, 25 bp, Homo sapien
ctccatgtttgactagtcctcccca

SEQ ID NO: 2256180 - DNA, 25 bp, Homo sapien
cgtatgcttcctgtagtaatacact

SEQ ID NO: 2256181 - DNA, 25 bp, Homo sapien
gggctaagaccctgttcggtgcctc

SEQ ID NO: 2256182 - DNA, 25 bp, Homo sapien
gaatttattttcgtatgcttcctgt

SEQ ID NO: 2256183 - DNA, 25 bp, Homo sapien
gatggagttctctcgggactggtcc

SEQ ID NO: 2256184 - DNA, 25 bp, Homo sapien
gaagtcggctgttccatgattctgc

SEQ ID NO: 2256185 - DNA, 25 bp, Homo sapien
tatattgaagcttgccaggaggatg

SEQ ID NO: 2256186 - DNA, 25 bp, Homo sapien
tagaatgtctatagtaggctcttgt

SEQ ID NO: 2256187 - DNA, 25 bp, Homo sapien
gctgttccatgattctgcttggttg

SEQ ID NO: 2256188 - DNA, 25 bp, Homo sapien
gatgcatcccaaactaatctgctgc

SEQ ID NO: 2256189 - DNA, 25 bp, Homo sapien
tgcatcccaaactaatctgctgctg

SEQ ID NO: 2256190 - DNA, 25 bp, Homo sapien
tgtgggggacggatgacaggggtgt

SEQ ID NO: 2256191 - DNA, 25 bp, Homo sapien
cccaaactaatctgctgctgctcat

SEQ ID NO: 2256192 - DNA, 25 bp, Homo sapien
aagcgagaaagagacggagacctgc

SEQ ID NO: 2256193 - DNA, 25 bp, Homo sapien
agctcgtcccagacaatcaagaggg

SEQ ID NO: 2256194 - DNA, 25 bp, Homo sapien
gcagcccaaagtgagctcgtcccag

SEQ ID NO: 2256195 - DNA, 25 bp, Homo sapien
cacgtgcctatctcatccgggcact

SEQ ID NO: 2256196 - DNA, 25 bp, Homo sapien
ttatcctttatactcaagggcatac

SEQ ID NO: 2256197 - DNA, 25 bp, Homo sapien
ctacttatcctttatactcaagggc

SEQ ID NO: 2256198 - DNA, 25 bp, Homo sapien
acttatcctttatactcaagggcat

SEQ ID NO: 2256199 - DNA, 25 bp, Homo sapien
tacttatcctttatactcaagggca

SEQ ID NO: 2256200 - DNA, 25 bp, Homo sapien
tctggctacagtaacaacaggatgg

SEQ ID NO: 2256201 - DNA, 25 bp, Homo sapien
tctatggcatctacgacatcatgat

SEQ ID NO: 2256202 - DNA, 25 bp, Homo sapien
aacactgagagtgcctgctttgttg

SEQ ID NO: 2256203 - DNA, 25 bp, Homo sapien
catctctgttatgcccaacactgag

SEQ ID NO: 2256204 - DNA, 25 bp, Homo sapien
tctctgaaatgttcatttgtttctg

SEQ ID NO: 2256205 - DNA, 25 bp, Homo sapien
ttctctgaaatgttcatttgtttct

SEQ ID NO: 2256206 - DNA, 25 bp, Homo sapien
ttttattagcaacttgtatggtcat

SEQ ID NO: 2256207 - DNA, 25 bp, Homo sapien
agctattgcactggacttcagtgtc

SEQ ID NO: 2256208 - DNA, 25 bp, Homo sapien
tttcgaaagactgatgggatcttca

SEQ ID NO: 2256209 - DNA, 25 bp, Homo sapien
tgatttcgaaagactgatgggatct

SEQ ID NO: 2256210 - DNA, 25 bp, Homo sapien
caatgatttcgaaagactgatggga

SEQ ID NO: 2256211 - DNA, 25 bp, Homo sapien
tcaatgatttcgaaagactgatggg

SEQ ID NO: 2256212 - DNA, 25 bp, Homo sapien
ctgcaaatgtaagatctccagcttt

SEQ ID NO: 2256213 - DNA, 25 bp, Homo sapien
tgtaagatctccagctttctttgtt

SEQ ID NO: 2256214 - DNA, 25 bp, Homo sapien
ttctttgttctccctactggaaaca

SEQ ID NO: 2256215 - DNA, 25 bp, Homo sapien
tctttgttctccctactggaaacat

SEQ ID NO: 2256216 - DNA, 25 bp, Homo sapien
tatggattcaggcttcaggtaaagc

SEQ ID NO: 2256217 - DNA, 25 bp, Homo sapien
gtcttggttccaagatccaaaggag

SEQ ID NO: 2256218 - DNA, 25 bp, Homo sapien
atatttgagccccagacacttgatt

SEQ ID NO: 2256219 - DNA, 25 bp, Homo sapien
aaatccctgcctgagagatatcgcc

SEQ ID NO: 2256220 - DNA, 25 bp, Homo sapien
tcagatgtgggcatggcaaccatcc

SEQ ID NO: 2256221 - DNA, 25 bp, Homo sapien
tcatcagtgtatgtgaatgccaaac

SEQ ID NO: 2256222 - DNA, 25 bp, Homo sapien
gcaaccatccattggcatcaacaga

SEQ ID NO: 2256223 - DNA, 25 bp, Homo sapien
gatttgcctggtaaaagattccaga

SEQ ID NO: 2256224 - DNA, 25 bp, Homo sapien
gatacttcaagcttcctagttttcc

SEQ ID NO: 2256225 - DNA, 25 bp, Homo sapien
agcttcctagttttcctcgtctccg

SEQ ID NO: 2256226 - DNA, 25 bp, Homo sapien
tagttttcctcgtctccggcctcat

SEQ ID NO: 2256227 - DNA, 25 bp, Homo sapien
aagtaataggatacttcaagcttcc

SEQ ID NO: 2256228 - DNA, 25 bp, Homo sapien
tttctttgaaatgcgaaaatgttca

SEQ ID NO: 2256229 - DNA, 25 bp, Homo sapien
tattctgttgtaatggtttcaagta

SEQ ID NO: 2256230 - DNA, 25 bp, Homo sapien
ttattctgttgtaatggtttcaagt

SEQ ID NO: 2256231 - DNA, 25 bp, Homo sapien
tctttgaaatgcgaaaatgttcatg

SEQ ID NO: 2256232 - DNA, 25 bp, Homo sapien
gctacagtagttctaaaggacttct

SEQ ID NO: 2256233 - DNA, 25 bp, Homo sapien
gaaagctaacactttcaggtagaac

SEQ ID NO: 2256234 - DNA, 25 bp, Homo sapien
cagagatatgtatgggtaattcaca

SEQ ID NO: 2256235 - DNA, 25 bp, Homo sapien
cactttcaggtagaacacagcatgt

SEQ ID NO: 2256236 - DNA, 25 bp, Homo sapien
gaccaaaagcttcaactaagaatat

SEQ ID NO: 2256237 - DNA, 25 bp, Homo sapien
gagaccaaaagcttcaactaagaat

SEQ ID NO: 2256238 - DNA, 25 bp, Homo sapien
agaccaaaagcttcaactaagaata

SEQ ID NO: 2256239 - DNA, 25 bp, Homo sapien
aatcaaacaccaaggcaatatcaga

SEQ ID NO: 2256240 - DNA, 25 bp, Homo sapien
aatatcagaaaatgcctccaggctt

SEQ ID NO: 2256241 - DNA, 25 bp, Homo sapien
aattttacatctagattctcccctg

SEQ ID NO: 2256242 - DNA, 25 bp, Homo sapien
ttgctatgcctagaaacagaatcac

SEQ ID NO: 2256243 - DNA, 25 bp, Homo sapien
ctgtgtagctgtatgggtttggata

SEQ ID NO: 2256244 - DNA, 25 bp, Homo sapien
gaatcccgtctatttctacttagaa

SEQ ID NO: 2256245 - DNA, 25 bp, Homo sapien
aattcatttttcacgtctgtgtagc

SEQ ID NO: 2256246 - DNA, 25 bp, Homo sapien
tggatatgcaggcttgagaatcaag

SEQ ID NO: 2256247 - DNA, 25 bp, Homo sapien
ccaatacaaataccacctctggata

SEQ ID NO: 2256248 - DNA, 25 bp, Homo sapien
tagtccagtcattgtcaggtaaccc

SEQ ID NO: 2256249 - DNA, 25 bp, Homo sapien
gagctcgaagttgaccaaaggccat

SEQ ID NO: 2256250 - DNA, 25 bp, Homo sapien
tcggaggaggaagttagtccagtca

SEQ ID NO: 2256251 - DNA, 25 bp, Homo sapien
cagttcagcgaggtgtctctgttcg

SEQ ID NO: 2256252 - DNA, 25 bp, Homo sapien
tgacagcgcacactgaaatgcagct

SEQ ID NO: 2256253 - DNA, 25 bp, Homo sapien
tacaaaattttgtcctccacgcaga

SEQ ID NO: 2256254 - DNA, 25 bp, Homo sapien
tctgttcgtgtcctgtgacagcgca

SEQ ID NO: 2256255 - DNA, 25 bp, Homo sapien
gagtatattggtgtcgaagtttccc

SEQ ID NO: 2256256 - DNA, 25 bp, Homo sapien
ctagcctctgggagttaccatcaat

SEQ ID NO: 2256257 - DNA, 25 bp, Homo sapien
tatgtactactttctaaggctgcca

SEQ ID NO: 2256258 - DNA, 25 bp, Homo sapien
caaaatcaatgagtatggcaagtcc

SEQ ID NO: 2256259 - DNA, 25 bp, Homo sapien
tacatgtaatctgacgaggaagttc

SEQ ID NO: 2256260 - DNA, 25 bp, Homo sapien
tacagttgttacacatgatggtgca

SEQ ID NO: 2256261 - DNA, 25 bp, Homo sapien
tgtgccatagtcactgtccggtgta

SEQ ID NO: 2256262 - DNA, 25 bp, Homo sapien
gcttaacagcagttgggacagccaa

SEQ ID NO: 2256263 - DNA, 25 bp, Homo sapien
actacgcacagtcataaacacatcg

SEQ ID NO: 2256264 - DNA, 25 bp, Homo sapien
tgtgctctattttcacactacgcac

SEQ ID NO: 2256265 - DNA, 25 bp, Homo sapien
aactgaacttagcctgaggtctgtg

SEQ ID NO: 2256266 - DNA, 25 bp, Homo sapien
aaacacatcgtttctctcaggccac

SEQ ID NO: 2256267 - DNA, 25 bp, Homo sapien
gctttcttggagcattccagcacag

SEQ ID NO: 2256268 - DNA, 25 bp, Homo sapien
tcagtgcaggatccaacggtagctc

SEQ ID NO: 2256269 - DNA, 25 bp, Homo sapien
cggtagctcctaacctctgcaaaaa

SEQ ID NO: 2256270 - DNA, 25 bp, Homo sapien
cattgctagtgctctcagtgggctt

SEQ ID NO: 2256271 - DNA, 25 bp, Homo sapien
atgctgtatatgagacatagatccc

SEQ ID NO: 2256272 - DNA, 25 bp, Homo sapien
tgctgtatatgagacatagatccca

SEQ ID NO: 2256273 - DNA, 25 bp, Homo sapien
cagctgtatgctgtatatgagacat

SEQ ID NO: 2256274 - DNA, 25 bp, Homo sapien
aagcagctgtatgctgtatatgaga

SEQ ID NO: 2256275 - DNA, 25 bp, Homo sapien
tgccaagctgtatactgctccctgt

SEQ ID NO: 2256276 - DNA, 25 bp, Homo sapien
tcgtctttgccaagctgtatactgc

SEQ ID NO: 2256277 - DNA, 25 bp, Homo sapien
aagctgtatactgctccctgtgcag

SEQ ID NO: 2256278 - DNA, 25 bp, Homo sapien
agacttctcgtctttgccaagctgt

SEQ ID NO: 2256279 - DNA, 25 bp, Homo sapien
ggctttgctgtaattcatgagtgtt

SEQ ID NO: 2256280 - DNA, 25 bp, Homo sapien
atgagtgttaactgatccacatcat

SEQ ID NO: 2256281 - DNA, 25 bp, Homo sapien
gctgtaattcatgagtgttaactga

SEQ ID NO: 2256282 - DNA, 25 bp, Homo sapien
tttgctgtaattcatgagtgttaac

SEQ ID NO: 2256283 - DNA, 25 bp, Homo sapien
aagttcttccatagccagcgtctcc

SEQ ID NO: 2256284 - DNA, 25 bp, Homo sapien
agttcttccatagccagcgtctcca

SEQ ID NO: 2256285 - DNA, 25 bp, Homo sapien
aaagttcttccatagccagcgtctc

SEQ ID NO: 2256286 - DNA, 25 bp, Homo sapien
gttcttccatagccagcgtctccat

SEQ ID NO: 2256287 - DNA, 25 bp, Homo sapien
tcttctctctcctcttcctccaaac

SEQ ID NO: 2256288 - DNA, 25 bp, Homo sapien
ctcttctctctcctcttcctccaaa

SEQ ID NO: 2256289 - DNA, 25 bp, Homo sapien
gatcactttagtgattcagagaata

SEQ ID NO: 2256290 - DNA, 25 bp, Homo sapien
tttgtttccatatggctactttcac

SEQ ID NO: 2256291 - DNA, 25 bp, Homo sapien
aactgcatagccaaacagttgcaac

SEQ ID NO: 2256292 - DNA, 25 bp, Homo sapien
tgtgggcacaattgggccagccatc

SEQ ID NO: 2256293 - DNA, 25 bp, Homo sapien
ataaacacgcgggacatcttttctc

SEQ ID NO: 2256294 - DNA, 25 bp, Homo sapien
tttggttataaacacgcgggacatc

SEQ ID NO: 2256295 - DNA, 25 bp, Homo sapien
tggttataaacacgcgggacatctt

SEQ ID NO: 2256296 - DNA, 25 bp, Homo sapien
aacacgcgggacatcttttctcgcc

SEQ ID NO: 2256297 - DNA, 25 bp, Homo sapien
gatggcttggattgatgcacttctc

SEQ ID NO: 2256298 - DNA, 25 bp, Homo sapien
tctcataatagagggtgtgggctat

SEQ ID NO: 2256299 - DNA, 25 bp, Homo sapien
caaatgctatgttgtgcatctgatg

SEQ ID NO: 2256300 - DNA, 25 bp, Homo sapien
ttgatgcacttctcataatagaggg

SEQ ID NO: 2256301 - DNA, 25 bp, Homo sapien
acaggccagaatattggcattcttt

SEQ ID NO: 2256302 - DNA, 25 bp, Homo sapien
ggcactggccaaaagtatgatgcta

SEQ ID NO: 2256303 - DNA, 25 bp, Homo sapien
accactgtgcaaatagtgatgatat

SEQ ID NO: 2256304 - DNA, 25 bp, Homo sapien
tgatgatatttcctggtgtacttag

SEQ ID NO: 2256305 - DNA, 25 bp, Homo sapien
tgtgggtagaagagtggacagaaca

SEQ ID NO: 2256306 - DNA, 25 bp, Homo sapien
tcaagataatgccttctacgagtgt

SEQ ID NO: 2256307 - DNA, 25 bp, Homo sapien
tagaagttgcatacatacgcacata

SEQ ID NO: 2256308 - DNA, 25 bp, Homo sapien
ctttgtagcctgaaatcgaattaga

SEQ ID NO: 2256309 - DNA, 25 bp, Homo sapien
cttgttctctctcactatccagtat

SEQ ID NO: 2256310 - DNA, 25 bp, Homo sapien
ctcactatccagtattcttccttca

SEQ ID NO: 2256311 - DNA, 25 bp, Homo sapien
tgcatgctctctcgctgctttttct

SEQ ID NO: 2256312 - DNA, 25 bp, Homo sapien
tctgtttcctgctccttgcatgctc

SEQ ID NO: 2256313 - DNA, 25 bp, Homo sapien
cactttttacccattaggatatggg

SEQ ID NO: 2256314 - DNA, 25 bp, Homo sapien
aaaataagatcccttgtgcactgtt

SEQ ID NO: 2256315 - DNA, 25 bp, Homo sapien
ggtaagctatgttgagaaaaacaaa

SEQ ID NO: 2256316 - DNA, 25 bp, Homo sapien
gtgcactgttggtggttatataaaa

SEQ ID NO: 2256317 - DNA, 25 bp, Homo sapien
cccttgtgccaaacgaatccacttg

SEQ ID NO: 2256318 - DNA, 25 bp, Homo sapien
tgtgccaaacgaatccacttgtcca

SEQ ID NO: 2256319 - DNA, 25 bp, Homo sapien
ccttgtgccaaacgaatccacttgt

SEQ ID NO: 2256320 - DNA, 25 bp, Homo sapien
cttgtgccaaacgaatccacttgtc

SEQ ID NO: 2256321 - DNA, 25 bp, Homo sapien
gagaggccagcaatcatactcagga

SEQ ID NO: 2256322 - DNA, 25 bp, Homo sapien
ttaaagacagctagacagaaggcgc

SEQ ID NO: 2256323 - DNA, 25 bp, Homo sapien
taatcatttacatccctgaaaggga

SEQ ID NO: 2256324 - DNA, 25 bp, Homo sapien
tagaaagaaataaccactagcagcc

SEQ ID NO: 2256325 - DNA, 25 bp, Homo sapien
tccaaaatctttcgctgtcctgtga

SEQ ID NO: 2256326 - DNA, 25 bp, Homo sapien
atttccaaaatctttcgctgtcctg

SEQ ID NO: 2256327 - DNA, 25 bp, Homo sapien
ttccaaaatctttcgctgtcctgtg

SEQ ID NO: 2256328 - DNA, 25 bp, Homo sapien
caaaatctttcgctgtcctgtgact

SEQ ID NO: 2256329 - DNA, 25 bp, Homo sapien
tctgttcattgggaactcggattca

SEQ ID NO: 2256330 - DNA, 25 bp, Homo sapien
ttcctttccattgaacactctgttc

SEQ ID NO: 2256331 - DNA, 25 bp, Homo sapien
tgtgacatagtgccttcatcacctt

SEQ ID NO: 2256332 - DNA, 25 bp, Homo sapien
cattgaacactctgttcattgggaa

SEQ ID NO: 2256333 - DNA, 25 bp, Homo sapien
gggagccgtctgttacttgtgacac

SEQ ID NO: 2256334 - DNA, 25 bp, Homo sapien
gcccacacgtgtactgcaatgttta

SEQ ID NO: 2256335 - DNA, 25 bp, Homo sapien
gttactgagaggtgaatctgaccag

SEQ ID NO: 2256336 - DNA, 25 bp, Homo sapien
tatgtacccaattagctagctcaaa

SEQ ID NO: 2256337 - DNA, 25 bp, Homo sapien
tgaaacataatacacatttagcctc

SEQ ID NO: 2256338 - DNA, 25 bp, Homo sapien
ctgaaacataatacacatttagcct

SEQ ID NO: 2256339 - DNA, 25 bp, Homo sapien
aaacataatacacatttagcctcat

SEQ ID NO: 2256340 - DNA, 25 bp, Homo sapien
gaaacataatacacatttagcctca

SEQ ID NO: 2256341 - DNA, 25 bp, Homo sapien
tccgaatgtccaccaataatggcat

SEQ ID NO: 2256342 - DNA, 25 bp, Homo sapien
taagctgctgagcaggagttaagtc

SEQ ID NO: 2256343 - DNA, 25 bp, Homo sapien
tttccgaatgtccaccaataatggc

SEQ ID NO: 2256344 - DNA, 25 bp, Homo sapien
ctttccgaatgtccaccaataatgg

SEQ ID NO: 2256345 - DNA, 25 bp, Homo sapien
tcattcatgagcaaagtaatccaga

SEQ ID NO: 2256346 - DNA, 25 bp, Homo sapien
tcatgagcaaagtaatccagatccc

SEQ ID NO: 2256347 - DNA, 25 bp, Homo sapien
tctgcaataactggcttgcttcctt

SEQ ID NO: 2256348 - DNA, 25 bp, Homo sapien
tgcttccttgctaaggccaccccag

SEQ ID NO: 2256349 - DNA, 25 bp, Homo sapien
tcttgatctctaccaggcccaatag

SEQ ID NO: 2256350 - DNA, 25 bp, Homo sapien
ttggaaacatactgcagaacctggg

SEQ ID NO: 2256351 - DNA, 25 bp, Homo sapien
cccctattgccagaagcgtttctac

SEQ ID NO: 2256352 - DNA, 25 bp, Homo sapien
cctggggcacagagttggctagcat

SEQ ID NO: 2256353 - DNA, 25 bp, Homo sapien
ggtttggaataaagattgagtgtac

SEQ ID NO: 2256354 - DNA, 25 bp, Homo sapien
tgaaatatgtcttgccctgggatga

SEQ ID NO: 2256355 - DNA, 25 bp, Homo sapien
gaaatatgtcttgccctgggatgaa

SEQ ID NO: 2256356 - DNA, 25 bp, Homo sapien
aaatatgtcttgccctgggatgaat

SEQ ID NO: 2256357 - DNA, 25 bp, Homo sapien
cttgctggtctaattgaatagtaag

SEQ ID NO: 2256358 - DNA, 25 bp, Homo sapien
gtggattcctcttcaacttgctggt

SEQ ID NO: 2256359 - DNA, 25 bp, Homo sapien
gaatagtaagtcgtggagaatgttt

SEQ ID NO: 2256360 - DNA, 25 bp, Homo sapien
ccatagatgattgtggtttcatgtc

SEQ ID NO: 2256361 - DNA, 25 bp, Homo sapien
ctgtaatccattttgaaagtctttt

SEQ ID NO: 2256362 - DNA, 25 bp, Homo sapien
gcaaatgcatttttcgagacatgga

SEQ ID NO: 2256363 - DNA, 25 bp, Homo sapien
tggtttcctcattcgatctgtgctg

SEQ ID NO: 2256364 - DNA, 25 bp, Homo sapien
catggagttaatgtgacgactatcc

SEQ ID NO: 2256365 - DNA, 25 bp, Homo sapien
taggaagtctagttatcatcagcaa

SEQ ID NO: 2256366 - DNA, 25 bp, Homo sapien
gatttacctaaccatcacagtgtta

SEQ ID NO: 2256367 - DNA, 25 bp, Homo sapien
cctttatactaaagatgtacgtgat

SEQ ID NO: 2256368 - DNA, 25 bp, Homo sapien
gctgctgtgatgatagctctctgca

SEQ ID NO: 2256369 - DNA, 25 bp, Homo sapien
tgtcacaacttacatcttatactgt

SEQ ID NO: 2256370 - DNA, 25 bp, Homo sapien
caagtaatgatctgtacagccagta

SEQ ID NO: 2256371 - DNA, 25 bp, Homo sapien
gccattaccatgaagtgaataagaa

SEQ ID NO: 2256372 - DNA, 25 bp, Homo sapien
gagaaatagtcaaccacattgggtc

SEQ ID NO: 2256373 - DNA, 25 bp, Homo sapien
gaatcaaaatcagccaaatatggac

SEQ ID NO: 2256374 - DNA, 25 bp, Homo sapien
gttgcatgacccttgtatcttctca

SEQ ID NO: 2256375 - DNA, 25 bp, Homo sapien
ataattataataggtgctcggccaa

SEQ ID NO: 2256376 - DNA, 25 bp, Homo sapien
taggtgctcggccaaatttattgtc

SEQ ID NO: 2256377 - DNA, 25 bp, Homo sapien
caaattctattgttgcatgaccctt

SEQ ID NO: 2256378 - DNA, 25 bp, Homo sapien
caaggccagaatcaccactgggtca

SEQ ID NO: 2256379 - DNA, 25 bp, Homo sapien
tttgatagtaaccaaggccagaatc

SEQ ID NO: 2256380 - DNA, 25 bp, Homo sapien
cagaatcaccactgggtcatgctgt

SEQ ID NO: 2256381 - DNA, 25 bp, Homo sapien
ccactgggtcatgctgttcgaatcc

SEQ ID NO: 2256382 - DNA, 25 bp, Homo sapien
cactcttgtaattatgtggacccaa

SEQ ID NO: 2256383 - DNA, 25 bp, Homo sapien
caagaatgaagtaggacgttccatg

SEQ ID NO: 2256384 - DNA, 25 bp, Homo sapien
gaaacgcagttgcttggaaccactc

SEQ ID NO: 2256385 - DNA, 25 bp, Homo sapien
gattgaaagcaaaacccaatagctt

SEQ ID NO: 2256386 - DNA, 25 bp, Homo sapien
gataacagaatgtggctcctcctct

SEQ ID NO: 2256387 - DNA, 25 bp, Homo sapien
taagaaacgcttgtaaaggccacag

SEQ ID NO: 2256388 - DNA, 25 bp, Homo sapien
accccatggccagtcaaagtgaaac

SEQ ID NO: 2256389 - DNA, 25 bp, Homo sapien
aaacaccctcatggatagagccaga

SEQ ID NO: 2256390 - DNA, 25 bp, Homo sapien
catcctggcagctgtttaggtaatc

SEQ ID NO: 2256391 - DNA, 25 bp, Homo sapien
gcagctgtttaggtaatcgattttc

SEQ ID NO: 2256392 - DNA, 25 bp, Homo sapien
aggacagcacacccagggtgtcttt

SEQ ID NO: 2256393 - DNA, 25 bp, Homo sapien
taatcgattttctgtaaacaaggca

SEQ ID NO: 2256394 - DNA, 25 bp, Homo sapien
taaagggcccgtaaatagtcatgag

SEQ ID NO: 2256395 - DNA, 25 bp, Homo sapien
tagtcatgaggttgaggataacaga

SEQ ID NO: 2256396 - DNA, 25 bp, Homo sapien
aaaaggctcttcaatggcccccttg

SEQ ID NO: 2256397 - DNA, 25 bp, Homo sapien
ccccttgtagccatgtgtagtaaag

SEQ ID NO: 2256398 - DNA, 25 bp, Homo sapien
taagagtttttacgactcttgccgc

SEQ ID NO: 2256399 - DNA, 25 bp, Homo sapien
tactcatgtcgtaagagtttttacg

SEQ ID NO: 2256400 - DNA, 25 bp, Homo sapien
taagcaaataattactcatgtcgta

SEQ ID NO: 2256401 - DNA, 25 bp, Homo sapien
gactcttgccgctcttttggcccat

SEQ ID NO: 2256402 - DNA, 25 bp, Homo sapien
ggaaacactgtgatacacgagcggc

SEQ ID NO: 2256403 - DNA, 25 bp, Homo sapien
cacgagcggcaggatattttttaat

SEQ ID NO: 2256404 - DNA, 25 bp, Homo sapien
cactgtgatacacgagcggcaggat

SEQ ID NO: 2256405 - DNA, 25 bp, Homo sapien
tgtgatacacgagcggcaggatatt

SEQ ID NO: 2256406 - DNA, 25 bp, Homo sapien
tcccatgataagagtgaaaaatacc

SEQ ID NO: 2256407 - DNA, 25 bp, Homo sapien
cagtttttgcacttgcactctccag

SEQ ID NO: 2256408 - DNA, 25 bp, Homo sapien
cgatcggcaccaagactactgcagt

SEQ ID NO: 2256409 - DNA, 25 bp, Homo sapien
cctctcctgatgttacgatcggcac

SEQ ID NO: 2256410 - DNA, 25 bp, Homo sapien
agtaggacaagtttgaagttacctg

SEQ ID NO: 2256411 - DNA, 25 bp, Homo sapien
tttgataatttcagatggacgaagg

SEQ ID NO: 2256412 - DNA, 25 bp, Homo sapien
cagatggacgaaggtagacctgaat

SEQ ID NO: 2256413 - DNA, 25 bp, Homo sapien
aggacaagtttgaagttacctggag

SEQ ID NO: 2256414 - DNA, 25 bp, Homo sapien
cagttgagggtggagattttagtac

SEQ ID NO: 2256415 - DNA, 25 bp, Homo sapien
ttgagggtggagattttagtaccat

SEQ ID NO: 2256416 - DNA, 25 bp, Homo sapien
gagcagttgagggtggagattttag

SEQ ID NO: 2256417 - DNA, 25 bp, Homo sapien
cagagcagttgagggtggagatttt

SEQ ID NO: 2256418 - DNA, 25 bp, Homo sapien
gcctaagggtaagttaaacatcatg

SEQ ID NO: 2256419 - DNA, 25 bp, Homo sapien
ggtagctagcgtcaagtaaatgtgc

SEQ ID NO: 2256420 - DNA, 25 bp, Homo sapien
tgccagaatcaggaggaggtatttg

SEQ ID NO: 2256421 - DNA, 25 bp, Homo sapien
tccctgtaggtaatccagaaaggct

SEQ ID NO: 2256422 - DNA, 25 bp, Homo sapien
tctcttctatgccacggattcccag

SEQ ID NO: 2256423 - DNA, 25 bp, Homo sapien
tacatgttagggagtctctcggaca

SEQ ID NO: 2256424 - DNA, 25 bp, Homo sapien
tctctcggacataagaggccctaga

SEQ ID NO: 2256425 - DNA, 25 bp, Homo sapien
ttcccagagggcttctgatacatgt

SEQ ID NO: 2256426 - DNA, 25 bp, Homo sapien
tgagtgccacagaggatccacttat

SEQ ID NO: 2256427 - DNA, 25 bp, Homo sapien
caatggccgtcagaaagcactgagc

SEQ ID NO: 2256428 - DNA, 25 bp, Homo sapien
tgagtagaagcaaagagccatgtgt

SEQ ID NO: 2256429 - DNA, 25 bp, Homo sapien
ggcatagcactcagtatgtgatagg

SEQ ID NO: 2256430 - DNA, 25 bp, Homo sapien
gaagaaagagccataccccaattgc

SEQ ID NO: 2256431 - DNA, 25 bp, Homo sapien
caaagccaactccaagtataactgg

SEQ ID NO: 2256432 - DNA, 25 bp, Homo sapien
ccacatcatcaccagatcgaaggat

SEQ ID NO: 2256433 - DNA, 25 bp, Homo sapien
ccagatcgaaggatcaaagccaact

SEQ ID NO: 2256434 - DNA, 25 bp, Homo sapien
aactccaagtataactggtatttgc

SEQ ID NO: 2256435 - DNA, 25 bp, Homo sapien
cgcagggacaagcccttctggaggc

SEQ ID NO: 2256436 - DNA, 25 bp, Homo sapien
catggaactcgaaggtgctgtgctt

SEQ ID NO: 2256437 - DNA, 25 bp, Homo sapien
cccttctggaggcatggaactcgaa

SEQ ID NO: 2256438 - DNA, 25 bp, Homo sapien
aaacaagcaccatcccagtgcgcag

SEQ ID NO: 2256439 - DNA, 25 bp, Homo sapien
gagtgggacaatctgccaatctcca

SEQ ID NO: 2256440 - DNA, 25 bp, Homo sapien
caatctttgctatagtgtcccaggt

SEQ ID NO: 2256441 - DNA, 25 bp, Homo sapien
gatagcctatccaagattcctgagg

SEQ ID NO: 2256442 - DNA, 25 bp, Homo sapien
ctgtagcctcgggaaaaatgatagc

SEQ ID NO: 2256443 - DNA, 25 bp, Homo sapien
gacttcccggcaaagacttctgaat

SEQ ID NO: 2256444 - DNA, 25 bp, Homo sapien
gatggagctcaaaataccaggttca

SEQ ID NO: 2256445 - DNA, 25 bp, Homo sapien
aacttggtttggtctatggccataa

SEQ ID NO: 2256446 - DNA, 25 bp, Homo sapien
tgcaagtatcagacagatggagctc

SEQ ID NO: 2256447 - DNA, 25 bp, Homo sapien
ccggcgcgagctagaagcctccggt

SEQ ID NO: 2256448 - DNA, 25 bp, Homo sapien
agaagcctccggtcggcctgcagtg

SEQ ID NO: 2256449 - DNA, 25 bp, Homo sapien
tggccgtcgcggctgtaggtccgca

SEQ ID NO: 2256450 - DNA, 25 bp, Homo sapien
gcccgagtggccgtcgcggctgtag

SEQ ID NO: 2256451 - DNA, 25 bp, Homo sapien
aggtaataagccacctcagtcagga

SEQ ID NO: 2256452 - DNA, 25 bp, Homo sapien
tcagctatattaagtcaacgtacag

SEQ ID NO: 2256453 - DNA, 25 bp, Homo sapien
cagttaccgagtatagccactgggt

SEQ ID NO: 2256454 - DNA, 25 bp, Homo sapien
gagttatagaaaccagcctgtcatc

SEQ ID NO: 2256455 - DNA, 25 bp, Homo sapien
cagtcacagatcacactgtaaggtt

SEQ ID NO: 2256456 - DNA, 25 bp, Homo sapien
gcttcaggacagtcacagatcacac

SEQ ID NO: 2256457 - DNA, 25 bp, Homo sapien
taaaagccaacgtacttgatgatgt

SEQ ID NO: 2256458 - DNA, 25 bp, Homo sapien
atatgaaaaccaggcctgaactgtc

SEQ ID NO: 2256459 - DNA, 25 bp, Homo sapien
aaaaaagcacgtctatccacgcaac

SEQ ID NO: 2256460 - DNA, 25 bp, Homo sapien
gtctctggacagaatatgaaaacca

SEQ ID NO: 2256461 - DNA, 25 bp, Homo sapien
aatttgactatctaatttaccctgg

SEQ ID NO: 2256462 - DNA, 25 bp, Homo sapien
gaggtttggacgttcaatttgacta

SEQ ID NO: 2256463 - DNA, 25 bp, Homo sapien
atctaatttaccctggcaactggag

SEQ ID NO: 2256464 - DNA, 25 bp, Homo sapien
tctttagtgagaggtttggacgttc

SEQ ID NO: 2256465 - DNA, 25 bp, Homo sapien
tgaaaatacttgcaggccagggctg

SEQ ID NO: 2256466 - DNA, 25 bp, Homo sapien
cagacaggcacagtgtagacagaaa

SEQ ID NO: 2256467 - DNA, 25 bp, Homo sapien
tggacgtgtgaatgggctgccaaca

SEQ ID NO: 2256468 - DNA, 25 bp, Homo sapien
gactttttatgagcacgttggacgt

SEQ ID NO: 2256469 - DNA, 25 bp, Homo sapien
gtcacaagtgttcccctggctgcta

SEQ ID NO: 2256470 - DNA, 25 bp, Homo sapien
acaagtgttcccctggctgctactt

SEQ ID NO: 2256471 - DNA, 25 bp, Homo sapien
tcagtcacaagtgttcccctggctg

SEQ ID NO: 2256472 - DNA, 25 bp, Homo sapien
aagtgttcccctggctgctacttcc

SEQ ID NO: 2256473 - DNA, 25 bp, Homo sapien
ttctctctgtagaacacattagtca

SEQ ID NO: 2256474 - DNA, 25 bp, Homo sapien
ctttgggaatagttgttcctctgct

SEQ ID NO: 2256475 - DNA, 25 bp, Homo sapien
aatagttgttcctctgcttcgtttc

SEQ ID NO: 2256476 - DNA, 25 bp, Homo sapien
tctctctgtagaacacattagtcat

SEQ ID NO: 2256477 - DNA, 25 bp, Homo sapien
caagaatcgcaacattccgaagggt

SEQ ID NO: 2256478 - DNA, 25 bp, Homo sapien
ggatcccatcaacaggcaagaatcg

SEQ ID NO: 2256479 - DNA, 25 bp, Homo sapien
tcgactgttcactataaaagagcaa

SEQ ID NO: 2256480 - DNA, 25 bp, Homo sapien
tgacttcaacggacggcaagatctt

SEQ ID NO: 2256481 - DNA, 25 bp, Homo sapien
ggtacttccctaagagcccatattc

SEQ ID NO: 2256482 - DNA, 25 bp, Homo sapien
tgctgtcctagttgccctaatctgg

SEQ ID NO: 2256483 - DNA, 25 bp, Homo sapien
cctagttgccctaatctggcaatca

SEQ ID NO: 2256484 - DNA, 25 bp, Homo sapien
gtcttgctgtcctagttgccctaat

SEQ ID NO: 2256485 - DNA, 25 bp, Homo sapien
ccccaaacctggattggtcatctaa

SEQ ID NO: 2256486 - DNA, 25 bp, Homo sapien
ggaaagctggaaatttttcctgcaa

SEQ ID NO: 2256487 - DNA, 25 bp, Homo sapien
tccagatatctacaaggaaagctgg

SEQ ID NO: 2256488 - DNA, 25 bp, Homo sapien
aaccccaaacctggattggtcatct

SEQ ID NO: 2256489 - DNA, 25 bp, Homo sapien
cctccaacttgcatgtatgcctcac

SEQ ID NO: 2256490 - DNA, 25 bp, Homo sapien
acttattttgaggatgactgagttc

SEQ ID NO: 2256491 - DNA, 25 bp, Homo sapien
tatcttctgtatcccgtaggtgttc

SEQ ID NO: 2256492 - DNA, 25 bp, Homo sapien
ttcacattgtagcaaacgaccatga

SEQ ID NO: 2256493 - DNA, 25 bp, Homo sapien
cctgatttcgcttcttcttttggga

SEQ ID NO: 2256494 - DNA, 25 bp, Homo sapien
tactcagaaagggaatagttacatg

SEQ ID NO: 2256495 - DNA, 25 bp, Homo sapien
ctcagaaagggaatagttacatgta

SEQ ID NO: 2256496 - DNA, 25 bp, Homo sapien
tttccaagtagggcacttcccacag

SEQ ID NO: 2256497 - DNA, 25 bp, Homo sapien
gaaagggaatagttacatgtaatct

SEQ ID NO: 2256498 - DNA, 25 bp, Homo sapien
caaacttgtacttagtgagccttac

SEQ ID NO: 2256499 - DNA, 25 bp, Homo sapien
aaacttgtacttagtgagccttact

SEQ ID NO: 2256500 - DNA, 25 bp, Homo sapien
ctgtccgaaggccaccacaaacttg

SEQ ID NO: 2256501 - DNA, 25 bp, Homo sapien
gacatgtagtgtaagtgactggcac

SEQ ID NO: 2256502 - DNA, 25 bp, Homo sapien
ggacacagtgacatgtagtgtaagt

SEQ ID NO: 2256503 - DNA, 25 bp, Homo sapien
cacagtgacatgtagtgtaagtgac

SEQ ID NO: 2256504 - DNA, 25 bp, Homo sapien
gtgtaagtgactggcacctttctga

SEQ ID NO: 2256505 - DNA, 25 bp, Homo sapien
cagcatggctgattgtgaaggtgcc

SEQ ID NO: 2256506 - DNA, 25 bp, Homo sapien
agcatggctgattgtgaaggtgccg

SEQ ID NO: 2256507 - DNA, 25 bp, Homo sapien
tcttctttaacctgtaggtgttcac

SEQ ID NO: 2256508 - DNA, 25 bp, Homo sapien
cccagtgattgccaggaccaggtga

SEQ ID NO: 2256509 - DNA, 25 bp, Homo sapien
gtcctagagaatgtccagcccactg

SEQ ID NO: 2256510 - DNA, 25 bp, Homo sapien
aactgtcatgcctgactcagtgaga

SEQ ID NO: 2256511 - DNA, 25 bp, Homo sapien
ggttttatcattcccctcaatagaa

SEQ ID NO: 2256512 - DNA, 25 bp, Homo sapien
tctgagtagggcattgcacacagca

SEQ ID NO: 2256513 - DNA, 25 bp, Homo sapien
cagcatggctgattgcggaagcgct

SEQ ID NO: 2256514 - DNA, 25 bp, Homo sapien
aagtcctagagaatgctcatcccac

SEQ ID NO: 2256515 - DNA, 25 bp, Homo sapien
caaacgtaattgttgataggagcag

SEQ ID NO: 2256516 - DNA, 25 bp, Homo sapien
gataagctgtttaccacgcaagaac

SEQ ID NO: 2256517 - DNA, 25 bp, Homo sapien
gatgcctattttgacccagttgtgc

SEQ ID NO: 2256518 - DNA, 25 bp, Homo sapien
ccttagtggtctagaaaagctgtga

SEQ ID NO: 2256519 - DNA, 25 bp, Homo sapien
gaagccgctcacatctgctctcttc

SEQ ID NO: 2256520 - DNA, 25 bp, Homo sapien
gagagacagaagcaaaacattttca

SEQ ID NO: 2256521 - DNA, 25 bp, Homo sapien
tcacaagtgagtcatgagagacaga

SEQ ID NO: 2256522 - DNA, 25 bp, Homo sapien
caaaacattttcaaataacactgac

SEQ ID NO: 2256523 - DNA, 25 bp, Homo sapien
agacagaagcaaaacattttcaaat

SEQ ID NO: 2256524 - DNA, 25 bp, Homo sapien
agcaaagcctctgtaaacttctctt

SEQ ID NO: 2256525 - DNA, 25 bp, Homo sapien
tctcttccaaagtcaccttcctgaa

SEQ ID NO: 2256526 - DNA, 25 bp, Homo sapien
tgagcaaagcctctgtaaacttctc

SEQ ID NO: 2256527 - DNA, 25 bp, Homo sapien
tccaaagtcaccttcctgaagtata

SEQ ID NO: 2256528 - DNA, 25 bp, Homo sapien
ctctgtaggttggaagtgcactcta

SEQ ID NO: 2256529 - DNA, 25 bp, Homo sapien
gcaaattgcctttccttcagatcag

SEQ ID NO: 2256530 - DNA, 25 bp, Homo sapien
caagtagaaccgtgtgtgcagtcca

SEQ ID NO: 2256531 - DNA, 25 bp, Homo sapien
gatcagctaagtcttcaccgtcaca

SEQ ID NO: 2256532 - DNA, 25 bp, Homo sapien
tggttgggagcagatagtattcaga

SEQ ID NO: 2256533 - DNA, 25 bp, Homo sapien
ctggttgctgcagaataaggtaaac

SEQ ID NO: 2256534 - DNA, 25 bp, Homo sapien
gacccaaccaaatcatatggccatg

SEQ ID NO: 2256535 - DNA, 25 bp, Homo sapien
catgtctgagctcaccagggtggta

SEQ ID NO: 2256536 - DNA, 25 bp, Homo sapien
taggtgtcccactagtccaactgtt

SEQ ID NO: 2256537 - DNA, 25 bp, Homo sapien
tagatggcagaaaggtaggtgtccc

SEQ ID NO: 2256538 - DNA, 25 bp, Homo sapien
gggaaaacatctcatagccggccta

SEQ ID NO: 2256539 - DNA, 25 bp, Homo sapien
tactagtattactacagcagcatct

SEQ ID NO: 2256540 - DNA, 25 bp, Homo sapien
cactccaatgtagcttcctatagca

SEQ ID NO: 2256541 - DNA, 25 bp, Homo sapien
gaaagtctttctacccggacatcca

SEQ ID NO: 2256542 - DNA, 25 bp, Homo sapien
tgcctactgggaccacctttaacta

SEQ ID NO: 2256543 - DNA, 25 bp, Homo sapien
cctatagcaattccataggatgctg

SEQ ID NO: 2256544 - DNA, 25 bp, Homo sapien
caaccagtccagctcggcatttggg

SEQ ID NO: 2256545 - DNA, 25 bp, Homo sapien
catgttgctcctacatccaaccagt

SEQ ID NO: 2256546 - DNA, 25 bp, Homo sapien
cagcggaagcacatgttgctcctac

SEQ ID NO: 2256547 - DNA, 25 bp, Homo sapien
gggacttgactgaagcggagcagca

SEQ ID NO: 2256548 - DNA, 25 bp, Homo sapien
cattggaatgtgttattctgtatgt

SEQ ID NO: 2256549 - DNA, 25 bp, Homo sapien
gcaaagtggtcatctcagtctgttt

SEQ ID NO: 2256550 - DNA, 25 bp, Homo sapien
gtggtcatctcagtctgtttacaga

SEQ ID NO: 2256551 - DNA, 25 bp, Homo sapien
ctgtttacagacattggaatgtgtt

SEQ ID NO: 2256552 - DNA, 25 bp, Homo sapien
ttgttccatgacacttagtgttcat

SEQ ID NO: 2256553 - DNA, 25 bp, Homo sapien
tatgtttgttccatgacacttagtg

SEQ ID NO: 2256554 - DNA, 25 bp, Homo sapien
tgtttgttccatgacacttagtgtt

SEQ ID NO: 2256555 - DNA, 25 bp, Homo sapien
gtttgttccatgacacttagtgttc

SEQ ID NO: 2256556 - DNA, 25 bp, Homo sapien
taaggaggtgggtcacatgaccaat

SEQ ID NO: 2256557 - DNA, 25 bp, Homo sapien
ccaattttggtccaataagctacgg

SEQ ID NO: 2256558 - DNA, 25 bp, Homo sapien
catttgtaggacagaaggttgctgc

SEQ ID NO: 2256559 - DNA, 25 bp, Homo sapien
tcaaactagctttcgctgtttcagc

SEQ ID NO: 2256560 - DNA, 25 bp, Homo sapien
gtatcttggatcctggagttagggc

SEQ ID NO: 2256561 - DNA, 25 bp, Homo sapien
tatggggatggagcttccaatatct

SEQ ID NO: 2256562 - DNA, 25 bp, Homo sapien
tctctagtccccagttccttatggg

SEQ ID NO: 2256563 - DNA, 25 bp, Homo sapien
cacagaacttctctagtccccagtt

SEQ ID NO: 2256564 - DNA, 25 bp, Homo sapien
gaacctgtgagtaagtggtctgtgt

SEQ ID NO: 2256565 - DNA, 25 bp, Homo sapien
aaagaggaagagcttctcttaagca

SEQ ID NO: 2256566 - DNA, 25 bp, Homo sapien
gagtaagtggtctgtgttcttagcc

SEQ ID NO: 2256567 - DNA, 25 bp, Homo sapien
caccacctttagttctatgtcttca

SEQ ID NO: 2256568 - DNA, 25 bp, Homo sapien
ggattcccatgggtgagacacctac

SEQ ID NO: 2256569 - DNA, 25 bp, Homo sapien
aagagggactgagaggattcccatg

SEQ ID NO: 2256570 - DNA, 25 bp, Homo sapien
gactgagaggattcccatgggtgag

SEQ ID NO: 2256571 - DNA, 25 bp, Homo sapien
tgagaggattcccatgggtgagaca

SEQ ID NO: 2256572 - DNA, 25 bp, Homo sapien
caataaacggtgagctctggcagat

SEQ ID NO: 2256573 - DNA, 25 bp, Homo sapien
gcagattagcccctactttggatat

SEQ ID NO: 2256574 - DNA, 25 bp, Homo sapien
ttttacagcaataaacggtgagctc

SEQ ID NO: 2256575 - DNA, 25 bp, Homo sapien
tactttggatattgtcacaggaggc

SEQ ID NO: 2256576 - DNA, 25 bp, Homo sapien
tgaagaagactagccgaatctatgg

SEQ ID NO: 2256577 - DNA, 25 bp, Homo sapien
tatgtgtagtgggtttctaatgtgg

SEQ ID NO: 2256578 - DNA, 25 bp, Homo sapien
taatgtggttatttccgctggattc

SEQ ID NO: 2256579 - DNA, 25 bp, Homo sapien
gaatctatggtgttcaccgtgtgcc

SEQ ID NO: 2256580 - DNA, 25 bp, Homo sapien
tgcactgtaggaactggacaccaaa

SEQ ID NO: 2256581 - DNA, 25 bp, Homo sapien
catttggatgctgtttgcaatgcac

SEQ ID NO: 2256582 - DNA, 25 bp, Homo sapien
gacaccaaaggtgcaactgtcacag

SEQ ID NO: 2256583 - DNA, 25 bp, Homo sapien
tcaccccaagggagactatatgcca

SEQ ID NO: 2256584 - DNA, 25 bp, Homo sapien
tcacttagggaagtctttttcagcc

SEQ ID NO: 2256585 - DNA, 25 bp, Homo sapien
gaagtctttttcagcccaataatgg

SEQ ID NO: 2256586 - DNA, 25 bp, Homo sapien
aataatggatcagtgtgcagtttgg

SEQ ID NO: 2256587 - DNA, 25 bp, Homo sapien
gcccaataatggatcagtgtgcagt

SEQ ID NO: 2256588 - DNA, 25 bp, Homo sapien
gacagcaacatccactatacgtgta

SEQ ID NO: 2256589 - DNA, 25 bp, Homo sapien
taggctgctctttgtcccggctttg

SEQ ID NO: 2256590 - DNA, 25 bp, Homo sapien
gactattgcaaagtatctcagatac

SEQ ID NO: 2256591 - DNA, 25 bp, Homo sapien
tacgtgtaaaatccagcaggttggc

SEQ ID NO: 2256592 - DNA, 25 bp, Homo sapien
gtgtgtcttttatgccgatggattt

SEQ ID NO: 2256593 - DNA, 25 bp, Homo sapien
gagtgtgtcttttatgccgatggat

SEQ ID NO: 2256594 - DNA, 25 bp, Homo sapien
tgagtgtgtcttttatgccgatgga

SEQ ID NO: 2256595 - DNA, 25 bp, Homo sapien
gtgtcttttatgccgatggatttta

SEQ ID NO: 2256596 - DNA, 25 bp, Homo sapien
cttcattcaggtctgtaatattcat

SEQ ID NO: 2256597 - DNA, 25 bp, Homo sapien
ccttcattcaggtctgtaatattca

SEQ ID NO: 2256598 - DNA, 25 bp, Homo sapien
gccttcattcaggtctgtaatattc

SEQ ID NO: 2256599 - DNA, 25 bp, Homo sapien
tgagcagaacgcttccttgtattgg

SEQ ID NO: 2256600 - DNA, 25 bp, Homo sapien
gactggataacgtgggctgccataa

SEQ ID NO: 2256601 - DNA, 25 bp, Homo sapien
cagattccgctaaagcacgctggga

SEQ ID NO: 2256602 - DNA, 25 bp, Homo sapien
gctgccataaccagagggagatcct

SEQ ID NO: 2256603 - DNA, 25 bp, Homo sapien
tctttggggcccaacatcatccact

SEQ ID NO: 2256604 - DNA, 25 bp, Homo sapien
ctactcctggaacttggacctctct

SEQ ID NO: 2256605 - DNA, 25 bp, Homo sapien
cctggaacttggacctctctttggg

SEQ ID NO: 2256606 - DNA, 25 bp, Homo sapien
tttggggcccaacatcatccactct

SEQ ID NO: 2256607 - DNA, 25 bp, Homo sapien
aaagcaagaatccttaggcttccaa

SEQ ID NO: 2256608 - DNA, 25 bp, Homo sapien
gcaagaatccttaggcttccaaagg

SEQ ID NO: 2256609 - DNA, 25 bp, Homo sapien
agcaagaatccttaggcttccaaag

SEQ ID NO: 2256610 - DNA, 25 bp, Homo sapien
aagcaagaatccttaggcttccaaa

SEQ ID NO: 2256611 - DNA, 25 bp, Homo sapien
ttttgatatttttcgctggtgctta

SEQ ID NO: 2256612 - DNA, 25 bp, Homo sapien
tttgatatttttcgctggtgcttac

SEQ ID NO: 2256613 - DNA, 25 bp, Homo sapien
gaatgaccttgtgcggcctcaggga

SEQ ID NO: 2256614 - DNA, 25 bp, Homo sapien
tgcatcccttgccatgaccattgaa

SEQ ID NO: 2256615 - DNA, 25 bp, Homo sapien
gagttccaatttactgccagtctgc

SEQ ID NO: 2256616 - DNA, 25 bp, Homo sapien
ggcaagtggatgaaaccccagctgt

SEQ ID NO: 2256617 - DNA, 25 bp, Homo sapien
gtaatgaagtcctaatttgcatggc

SEQ ID NO: 2256618 - DNA, 25 bp, Homo sapien
ggaacgacctgtgaggatgggtttg

SEQ ID NO: 2256619 - DNA, 25 bp, Homo sapien
ctgttggaggatgggaacgacctgt

SEQ ID NO: 2256620 - DNA, 25 bp, Homo sapien
tgcatggctgcatcgtcaatttcca

SEQ ID NO: 2256621 - DNA, 25 bp, Homo sapien
atcaccggagtcagaaggcggacgc

SEQ ID NO: 2256622 - DNA, 25 bp, Homo sapien
ggatcctgcagtcggacttgggtca

SEQ ID NO: 2256623 - DNA, 25 bp, Homo sapien
tcagaaggcggacgcccgggatcct

SEQ ID NO: 2256624 - DNA, 25 bp, Homo sapien
gaccacaggagggtcatcaccggag

SEQ ID NO: 2256625 - DNA, 25 bp, Homo sapien
ttaccttggacaccctctgttgctt

SEQ ID NO: 2256626 - DNA, 25 bp, Homo sapien
gcatacgacaacacagcagccttca

SEQ ID NO: 2256627 - DNA, 25 bp, Homo sapien
ttttgggagcagtgttgcgggacat

SEQ ID NO: 2256628 - DNA, 25 bp, Homo sapien
aacatttaagcaattgctccgggag

SEQ ID NO: 2256629 - DNA, 25 bp, Homo sapien
tggctttatctatactaaggttatc

SEQ ID NO: 2256630 - DNA, 25 bp, Homo sapien
gctttatctatactaaggttatcat

SEQ ID NO: 2256631 - DNA, 25 bp, Homo sapien
tttatctatactaaggttatcatct

SEQ ID NO: 2256632 - DNA, 25 bp, Homo sapien
cttggctttatctatactaaggtta

SEQ ID NO: 2256633 - DNA, 25 bp, Homo sapien
ggtaatctgaatgtttgaaggctgc

SEQ ID NO: 2256634 - DNA, 25 bp, Homo sapien
ggctgcaccagtcttgaatacaatc

SEQ ID NO: 2256635 - DNA, 25 bp, Homo sapien
gatacttggctctaggcatccatga

SEQ ID NO: 2256636 - DNA, 25 bp, Homo sapien
catgaagtgttatgactgtgtttcc

SEQ ID NO: 2256637 - DNA, 25 bp, Homo sapien
gcttctgtatgggagaataacttca

SEQ ID NO: 2256638 - DNA, 25 bp, Homo sapien
ccaagcttcgttcctgaggtcaggt

SEQ ID NO: 2256639 - DNA, 25 bp, Homo sapien
acttcaccccgcattggaatgcagg

SEQ ID NO: 2256640 - DNA, 25 bp, Homo sapien
taaggactgtgttccggagttccca

SEQ ID NO: 2256641 - DNA, 25 bp, Homo sapien
caaatctgatggtacagaaactgcc

SEQ ID NO: 2256642 - DNA, 25 bp, Homo sapien
tgctttgggaaagctggactgtcaa

SEQ ID NO: 2256643 - DNA, 25 bp, Homo sapien
gcaaaaatttggttctatatgggca

SEQ ID NO: 2256644 - DNA, 25 bp, Homo sapien
actgcctacataaagcattctggaa

SEQ ID NO: 2256645 - DNA, 25 bp, Homo sapien
agtacacgtaacaattgggatgaag

SEQ ID NO: 2256646 - DNA, 25 bp, Homo sapien
aagtacacgtaacaattgggatgaa

SEQ ID NO: 2256647 - DNA, 25 bp, Homo sapien
tcagctgagataaggcacattcaga

SEQ ID NO: 2256648 - DNA, 25 bp, Homo sapien
agctgagataaggcacattcagagt

SEQ ID NO: 2256649 - DNA, 25 bp, Homo sapien
cagctgagataaggcacattcagag

SEQ ID NO: 2256650 - DNA, 25 bp, Homo sapien
gctgagataaggcacattcagagtg

SEQ ID NO: 2256651 - DNA, 25 bp, Homo sapien
tttctatctcgcacattgacactct

SEQ ID NO: 2256652 - DNA, 25 bp, Homo sapien
ttctatctcgcacattgacactctc

SEQ ID NO: 2256653 - DNA, 25 bp, Homo sapien
ctttctatctcgcacattgacactc

SEQ ID NO: 2256654 - DNA, 25 bp, Homo sapien
tagcccaacaggagatattctgcca

SEQ ID NO: 2256655 - DNA, 25 bp, Homo sapien
agcccaacaggagatattctgccat

SEQ ID NO: 2256656 - DNA, 25 bp, Homo sapien
tttgaagctttataacacgtgctcc

SEQ ID NO: 2256657 - DNA, 25 bp, Homo sapien
tgaagctttataacacgtgctcctg

SEQ ID NO: 2256658 - DNA, 25 bp, Homo sapien
gttttgaagctttataacacgtgct

SEQ ID NO: 2256659 - DNA, 25 bp, Homo sapien
aagctttataacacgtgctcctgtg

SEQ ID NO: 2256660 - DNA, 25 bp, Homo sapien
gttcagttttcatgggatattctac

SEQ ID NO: 2256661 - DNA, 25 bp, Homo sapien
actgtgccttttataggctgaatac

SEQ ID NO: 2256662 - DNA, 25 bp, Homo sapien
tcatgggatattctacatctaaaac

SEQ ID NO: 2256663 - DNA, 25 bp, Homo sapien
gttttcatgggatattctacatcta

SEQ ID NO: 2256664 - DNA, 25 bp, Homo sapien
tggccaggggtaggtggtaactaga

SEQ ID NO: 2256665 - DNA, 25 bp, Homo sapien
tcatggccaggggtaggtggtaact

SEQ ID NO: 2256666 - DNA, 25 bp, Homo sapien
ttagttcatggccaggggtaggtgg

SEQ ID NO: 2256667 - DNA, 25 bp, Homo sapien
caggggtaggtggtaactagaatca

SEQ ID NO: 2256668 - DNA, 25 bp, Homo sapien
ggctgcccacctgtttatctgtctc

SEQ ID NO: 2256669 - DNA, 25 bp, Homo sapien
cctgtttatctgtctctgtgagaat

SEQ ID NO: 2256670 - DNA, 25 bp, Homo sapien
tccatggctgcccacctgtttatct

SEQ ID NO: 2256671 - DNA, 25 bp, Homo sapien
catggctgcccacctgtttatctgt

SEQ ID NO: 2256672 - DNA, 25 bp, Homo sapien
caggggatgtcaggagctgaaggag

SEQ ID NO: 2256673 - DNA, 25 bp, Homo sapien
tcaggggatgtcaggagctgaagga

SEQ ID NO: 2256674 - DNA, 25 bp, Homo sapien
gagagtcctacaatcccattgccac

SEQ ID NO: 2256675 - DNA, 25 bp, Homo sapien
tatctttgggtcaatggcgagggtc

SEQ ID NO: 2256676 - DNA, 25 bp, Homo sapien
tcatacatctacaggttacaaccag

SEQ ID NO: 2256677 - DNA, 25 bp, Homo sapien
gagagctttcggcatgacctgtttg

SEQ ID NO: 2256678 - DNA, 25 bp, Homo sapien
ctttgcgtggattgtcctacttttt

SEQ ID NO: 2256679 - DNA, 25 bp, Homo sapien
gcgtggattgtcctactttttctcg

SEQ ID NO: 2256680 - DNA, 25 bp, Homo sapien
tgtcctactttttctcgcacaggca

SEQ ID NO: 2256681 - DNA, 25 bp, Homo sapien
gattgtcctactttttctcgcacag

SEQ ID NO: 2256682 - DNA, 25 bp, Homo sapien
tccacctgcaaacataataaaactg

SEQ ID NO: 2256683 - DNA, 25 bp, Homo sapien
tagtgtgcatcagtcaaaggtctgg

SEQ ID NO: 2256684 - DNA, 25 bp, Homo sapien
tgtgcatcagtcaaaggtctggaga

SEQ ID NO: 2256685 - DNA, 25 bp, Homo sapien
tgcagttgacgtccacctgcaaaca

SEQ ID NO: 2256686 - DNA, 25 bp, Homo sapien
aatctgaagccaagttttcccaaga

SEQ ID NO: 2256687 - DNA, 25 bp, Homo sapien
aagccaagttttcccaagattgctc

SEQ ID NO: 2256688 - DNA, 25 bp, Homo sapien
tgaagccaagttttcccaagattgc

SEQ ID NO: 2256689 - DNA, 25 bp, Homo sapien
gccaagttttcccaagattgctcat

SEQ ID NO: 2256690 - DNA, 25 bp, Homo sapien
gctgctagaaacaatgatagaatac

SEQ ID NO: 2256691 - DNA, 25 bp, Homo sapien
cacgtgcaatcttggctgctagaaa

SEQ ID NO: 2256692 - DNA, 25 bp, Homo sapien
cttttcccacgtgcaatcttggctg

SEQ ID NO: 2256693 - DNA, 25 bp, Homo sapien
tgtccttttcccacgtgcaatcttg

SEQ ID NO: 2256694 - DNA, 25 bp, Homo sapien
tagcctttgataagggtaatttagc

SEQ ID NO: 2256695 - DNA, 25 bp, Homo sapien
catgagcatttgtgatcggtcttga

SEQ ID NO: 2256696 - DNA, 25 bp, Homo sapien
aattggtaagttgggcttcctgtga

SEQ ID NO: 2256697 - DNA, 25 bp, Homo sapien
gatcggtcttgactcttctcatggc

SEQ ID NO: 2256698 - DNA, 25 bp, Homo sapien
ggtgagatacctaagcaaattgtgg

SEQ ID NO: 2256699 - DNA, 25 bp, Homo sapien
aatggtgagatacctaagcaaattg

SEQ ID NO: 2256700 - DNA, 25 bp, Homo sapien
gatacctaagcaaattgtggttggt

SEQ ID NO: 2256701 - DNA, 25 bp, Homo sapien
accaaaatggtgagatacctaagca

SEQ ID NO: 2256702 - DNA, 25 bp, Homo sapien
accatagcttctcccggactttagg

SEQ ID NO: 2256703 - DNA, 25 bp, Homo sapien
caccaccatagcttctcccggactt

SEQ ID NO: 2256704 - DNA, 25 bp, Homo sapien
ctgcaccaccatagcttctcccgga

SEQ ID NO: 2256705 - DNA, 25 bp, Homo sapien
caccatagcttctcccggactttag

SEQ ID NO: 2256706 - DNA, 25 bp, Homo sapien
gaaagaagatacaaaccacgcggat

SEQ ID NO: 2256707 - DNA, 25 bp, Homo sapien
cagttgctggagaaaagggcccgaa

SEQ ID NO: 2256708 - DNA, 25 bp, Homo sapien
tcactgtttgtgagaggtggacacc

SEQ ID NO: 2256709 - DNA, 25 bp, Homo sapien
tccatttcaatacggctgggagtcc

SEQ ID NO: 2256710 - DNA, 25 bp, Homo sapien
tcatgccggcaacaatacaaagtcg

SEQ ID NO: 2256711 - DNA, 25 bp, Homo sapien
cgggcgttgaaacggtcgcgcactg

SEQ ID NO: 2256712 - DNA, 25 bp, Homo sapien
gccggcaacaatacaaagtcgtcgt

SEQ ID NO: 2256713 - DNA, 25 bp, Homo sapien
ctggcgggcgttgaaacggtcgcgc

SEQ ID NO: 2256714 - DNA, 25 bp, Homo sapien
ttgttctcgtcaccctggctctcca

SEQ ID NO: 2256715 - DNA, 25 bp, Homo sapien
cttgttctcgtcaccctggctctcc

SEQ ID NO: 2256716 - DNA, 25 bp, Homo sapien
ggctctccaggggcatgttgtagac

SEQ ID NO: 2256717 - DNA, 25 bp, Homo sapien
cctggctctccaggggcatgttgta

SEQ ID NO: 2256718 - DNA, 25 bp, Homo sapien
tggccgcccggcagtgaacccgcag

SEQ ID NO: 2256719 - DNA, 25 bp, Homo sapien
tctcctgctcacaggatacgatcag

SEQ ID NO: 2256720 - DNA, 25 bp, Homo sapien
atctcctgctcacaggatacgatca

SEQ ID NO: 2256721 - DNA, 25 bp, Homo sapien
ggttggcgatggtcctggccgcccg

SEQ ID NO: 2256722 - DNA, 25 bp, Homo sapien
gtgctgtagacgcagctttccccgg

SEQ ID NO: 2256723 - DNA, 25 bp, Homo sapien
tgctgtagacgcagctttccccgga

SEQ ID NO: 2256724 - DNA, 25 bp, Homo sapien
gctgtgctgtagacgcagctttccc

SEQ ID NO: 2256725 - DNA, 25 bp, Homo sapien
atgctgtgctgtagacgcagctttc

SEQ ID NO: 2256726 - DNA, 25 bp, Homo sapien
tggtcatgcgctgagggatctcctc

SEQ ID NO: 2256727 - DNA, 25 bp, Homo sapien
tgcggcttccggctggatgccgcca

SEQ ID NO: 2256728 - DNA, 25 bp, Homo sapien
ggttcgcgagcatctgcgcccggtt

SEQ ID NO: 2256729 - DNA, 25 bp, Homo sapien
tgcggcgtgatacagcacaggatct

SEQ ID NO: 2256730 - DNA, 25 bp, Homo sapien
cctcggggccggcaccgtctgcggc

SEQ ID NO: 2256731 - DNA, 25 bp, Homo sapien
tgcaagtgggattaggcccctgttt

SEQ ID NO: 2256732 - DNA, 25 bp, Homo sapien
gttgcaagtgggattaggcccctgt

SEQ ID NO: 2256733 - DNA, 25 bp, Homo sapien
caagtggttgcaagtgggattaggc

SEQ ID NO: 2256734 - DNA, 25 bp, Homo sapien
caagtgggattaggcccctgtttca

SEQ ID NO: 2256735 - DNA, 25 bp, Homo sapien
tttcctctgtgtacattgcatgttg

SEQ ID NO: 2256736 - DNA, 25 bp, Homo sapien
cattgcatgttgatcttcctcagag

SEQ ID NO: 2256737 - DNA, 25 bp, Homo sapien
cctctgtgtacattgcatgttgatc

SEQ ID NO: 2256738 - DNA, 25 bp, Homo sapien
tgtgtacattgcatgttgatcttcc

SEQ ID NO: 2256739 - DNA, 25 bp, Homo sapien
aaagtgtagttgcagcccccagtga

SEQ ID NO: 2256740 - DNA, 25 bp, Homo sapien
gatgttcctcattagatcagtgctg

SEQ ID NO: 2256741 - DNA, 25 bp, Homo sapien
cctcattagatcagtgctgctgact

SEQ ID NO: 2256742 - DNA, 25 bp, Homo sapien
taatgactttagtgtggtcatgaaa

SEQ ID NO: 2256743 - DNA, 25 bp, Homo sapien
ggatcaggaaagcactgctaacatg

SEQ ID NO: 2256744 - DNA, 25 bp, Homo sapien
tcaggaaagcactgctaacatggct

SEQ ID NO: 2256745 - DNA, 25 bp, Homo sapien
ggaaagcactgctaacatggctgtt

SEQ ID NO: 2256746 - DNA, 25 bp, Homo sapien
caggaaagcactgctaacatggctg

SEQ ID NO: 2256747 - DNA, 25 bp, Homo sapien
catcaaagtaagaattcttgtatat

SEQ ID NO: 2256748 - DNA, 25 bp, Homo sapien
cagtactctccaaggtaatccttag

SEQ ID NO: 2256749 - DNA, 25 bp, Homo sapien
tttgagaatacagtactctccaagg

SEQ ID NO: 2256750 - DNA, 25 bp, Homo sapien
tctccaaggtaatccttagcagaag

SEQ ID NO: 2256751 - DNA, 25 bp, Homo sapien
aatacagtactctccaaggtaatcc

SEQ ID NO: 2256752 - DNA, 25 bp, Homo sapien
ttcatggttttaacctgttggtgta

SEQ ID NO: 2256753 - DNA, 25 bp, Homo sapien
tcatggttttaacctgttggtgtag

SEQ ID NO: 2256754 - DNA, 25 bp, Homo sapien
catggttttaacctgttggtgtaga

SEQ ID NO: 2256755 - DNA, 25 bp, Homo sapien
tagtttcaccggctttttggctcga

SEQ ID NO: 2256756 - DNA, 25 bp, Homo sapien
tttcagccggtgataacgaccacgc

SEQ ID NO: 2256757 - DNA, 25 bp, Homo sapien
tgacttttcagtggcggacctctag

SEQ ID NO: 2256758 - DNA, 25 bp, Homo sapien
tctagagacatcacagaactgaggt

SEQ ID NO: 2256759 - DNA, 25 bp, Homo sapien
tacttgaggttgatggggtctgttc

SEQ ID NO: 2256760 - DNA, 25 bp, Homo sapien
ggcttctgtggctcactggtcacct

SEQ ID NO: 2256761 - DNA, 25 bp, Homo sapien
cttaacgccgcttctggaccttcgt

SEQ ID NO: 2256762 - DNA, 25 bp, Homo sapien
ccgcttctggaccttcgttgacggg

SEQ ID NO: 2256763 - DNA, 25 bp, Homo sapien
cttacacactttcaggacatagcat

SEQ ID NO: 2256764 - DNA, 25 bp, Homo sapien
tagcaacatgggatcctttcttttc

SEQ ID NO: 2256765 - DNA, 25 bp, Homo sapien
cacccattccaagtaaatgtccaac

SEQ ID NO: 2256766 - DNA, 25 bp, Homo sapien
tccccaaaagtgttagtcttacaca

SEQ ID NO: 2256767 - DNA, 25 bp, Homo sapien
gaatttcttctggacccatttgagc

SEQ ID NO: 2256768 - DNA, 25 bp, Homo sapien
ttcttctggacccatttgagccttc

SEQ ID NO: 2256769 - DNA, 25 bp, Homo sapien
ctttgagcaatgtaagaaataacaa

SEQ ID NO: 2256770 - DNA, 25 bp, Homo sapien
cttctggacccatttgagccttcat

SEQ ID NO: 2256771 - DNA, 25 bp, Homo sapien
gcaccatagtaaccatcctgagata

SEQ ID NO: 2256772 - DNA, 25 bp, Homo sapien
gatggtcagcaccatagtaaccatc

SEQ ID NO: 2256773 - DNA, 25 bp, Homo sapien
tgaccttgaggatagaaggcacaga

SEQ ID NO: 2256774 - DNA, 25 bp, Homo sapien
ctactgatacacgggttttggccct

SEQ ID NO: 2256775 - DNA, 25 bp, Homo sapien
actcatgcttatcttagcactaagt

SEQ ID NO: 2256776 - DNA, 25 bp, Homo sapien
taaactcatgcttatcttagcacta

SEQ ID NO: 2256777 - DNA, 25 bp, Homo sapien
agtaaactcatgcttatcttagcac

SEQ ID NO: 2256778 - DNA, 25 bp, Homo sapien
aactcatgcttatcttagcactaag

SEQ ID NO: 2256779 - DNA, 25 bp, Homo sapien
ctccagggtatgtagagacccatga

SEQ ID NO: 2256780 - DNA, 25 bp, Homo sapien
cctttgtgaaagttgcagagtacca

SEQ ID NO: 2256781 - DNA, 25 bp, Homo sapien
ttcaaccaccttccggttggtctca

SEQ ID NO: 2256782 - DNA, 25 bp, Homo sapien
caattaacatcaagctcatggctac

SEQ ID NO: 2256783 - DNA, 25 bp, Homo sapien
cagtcaggatgctgaattctattaa

SEQ ID NO: 2256784 - DNA, 25 bp, Homo sapien
cgatcgtcccacgtaagcctcctga

SEQ ID NO: 2256785 - DNA, 25 bp, Homo sapien
agcgatcgtcccacgtaagcctcct

SEQ ID NO: 2256786 - DNA, 25 bp, Homo sapien
gcgatcgtcccacgtaagcctcctg

SEQ ID NO: 2256787 - DNA, 25 bp, Homo sapien
aaaacactgtagcagcttcttccga

SEQ ID NO: 2256788 - DNA, 25 bp, Homo sapien
actgtggtacgttgggcttttctga

SEQ ID NO: 2256789 - DNA, 25 bp, Homo sapien
tatcgctgccttggtagatcttgca

SEQ ID NO: 2256790 - DNA, 25 bp, Homo sapien
ttccgaaggtgacagtatcgctgcc

SEQ ID NO: 2256791 - DNA, 25 bp, Homo sapien
tttggtgactcttgtagagccaagg

SEQ ID NO: 2256792 - DNA, 25 bp, Homo sapien
ctttggtgactcttgtagagccaag

SEQ ID NO: 2256793 - DNA, 25 bp, Homo sapien
gtgactcttgtagagccaagggctt

SEQ ID NO: 2256794 - DNA, 25 bp, Homo sapien
tggtgactcttgtagagccaagggc

SEQ ID NO: 2256795 - DNA, 25 bp, Homo sapien
agatcttggtttatatctccaagaa

SEQ ID NO: 2256796 - DNA, 25 bp, Homo sapien
tctagatcttggtttatatctccaa

SEQ ID NO: 2256797 - DNA, 25 bp, Homo sapien
taacttctagatcttggtttatatc

SEQ ID NO: 2256798 - DNA, 25 bp, Homo sapien
cttctagatcttggtttatatctcc

SEQ ID NO: 2256799 - DNA, 25 bp, Homo sapien
tgccatctttaatctttgatagagt

SEQ ID NO: 2256800 - DNA, 25 bp, Homo sapien
ttttcatgataataacatccaggtc

SEQ ID NO: 2256801 - DNA, 25 bp, Homo sapien
caatgccatctttaatctttgatag

SEQ ID NO: 2256802 - DNA, 25 bp, Homo sapien
ggtccaaacttgttacaatgccatc

SEQ ID NO: 2256803 - DNA, 25 bp, Homo sapien
tcccagagggcattggttttatgga

SEQ ID NO: 2256804 - DNA, 25 bp, Homo sapien
ccgattatctcctgtacctgctaga

SEQ ID NO: 2256805 - DNA, 25 bp, Homo sapien
gctagaaaaacagtggtcccagagg

SEQ ID NO: 2256806 - DNA, 25 bp, Homo sapien
cagagggcattggttttatggaaga

SEQ ID NO: 2256807 - DNA, 25 bp, Homo sapien
tctctgtttatttgtatggctccat

SEQ ID NO: 2256808 - DNA, 25 bp, Homo sapien
tttgtatggctccataaccaggaag

SEQ ID NO: 2256809 - DNA, 25 bp, Homo sapien
gtatggctccataaccaggaagaaa

SEQ ID NO: 2256810 - DNA, 25 bp, Homo sapien
ttatttgtatggctccataaccagg

SEQ ID NO: 2256811 - DNA, 25 bp, Homo sapien
ccactttgttataaatacatgacca

SEQ ID NO: 2256812 - DNA, 25 bp, Homo sapien
caatgcttcagtcgttcatttggtt

SEQ ID NO: 2256813 - DNA, 25 bp, Homo sapien
tacatgaccaatgcttcagtcgttc

SEQ ID NO: 2256814 - DNA, 25 bp, Homo sapien
aaatacatgaccaatgcttcagtcg

SEQ ID NO: 2256815 - DNA, 25 bp, Homo sapien
gatgggcctgcgtaattggcttaga

SEQ ID NO: 2256816 - DNA, 25 bp, Homo sapien
gctgatgggcctgcgtaattggctt

SEQ ID NO: 2256817 - DNA, 25 bp, Homo sapien
ttggcttagattggcatgtgtcaca

SEQ ID NO: 2256818 - DNA, 25 bp, Homo sapien
gtgatgggtccatgattgcaaggag

SEQ ID NO: 2256819 - DNA, 25 bp, Homo sapien
tgttcttcacatagataggatagtt

SEQ ID NO: 2256820 - DNA, 25 bp, Homo sapien
ttcttcacatagataggatagtttc

SEQ ID NO: 2256821 - DNA, 25 bp, Homo sapien
ttcacatagataggatagtttccaa

SEQ ID NO: 2256822 - DNA, 25 bp, Homo sapien
tcttcacatagataggatagtttcc

SEQ ID NO: 2256823 - DNA, 25 bp, Homo sapien
taggtctccattgacaccagcagtg

SEQ ID NO: 2256824 - DNA, 25 bp, Homo sapien
ttttctattaggtctccattgacac

SEQ ID NO: 2256825 - DNA, 25 bp, Homo sapien
gtctccattgacaccagcagtgaag

SEQ ID NO: 2256826 - DNA, 25 bp, Homo sapien
tattaggtctccattgacaccagca

SEQ ID NO: 2256827 - DNA, 25 bp, Homo sapien
tcccaccgtccagctgattttcgga

SEQ ID NO: 2256828 - DNA, 25 bp, Homo sapien
ggtcggaaaagaataacgcattgga

SEQ ID NO: 2256829 - DNA, 25 bp, Homo sapien
attttcggaggcatctggtgagagt

SEQ ID NO: 2256830 - DNA, 25 bp, Homo sapien
ataacgcattggatttttgccaccc

SEQ ID NO: 2256831 - DNA, 25 bp, Homo sapien
tgtgcagggactacaatacagatca

SEQ ID NO: 2256832 - DNA, 25 bp, Homo sapien
aggaaggtccagaatgaatgcatta

SEQ ID NO: 2256833 - DNA, 25 bp, Homo sapien
gattacagtatagcaaggaaggtcc

SEQ ID NO: 2256834 - DNA, 25 bp, Homo sapien
tcaacacatgctaacagaactgaca

SEQ ID NO: 2256835 - DNA, 25 bp, Homo sapien
ttctttatatcattggggccttggt

SEQ ID NO: 2256836 - DNA, 25 bp, Homo sapien
agcagtgctggagagttctcttctt

SEQ ID NO: 2256837 - DNA, 25 bp, Homo sapien
gaatcttctttatatcattggggcc

SEQ ID NO: 2256838 - DNA, 25 bp, Homo sapien
gcatcctctgttcagagatgaaggc

SEQ ID NO: 2256839 - DNA, 25 bp, Homo sapien
tccggcgctggccatcttttgtctg

SEQ ID NO: 2256840 - DNA, 25 bp, Homo sapien
tccagggatccggcgctggccatct

SEQ ID NO: 2256841 - DNA, 25 bp, Homo sapien
ggatccggcgctggccatcttttgt

SEQ ID NO: 2256842 - DNA, 25 bp, Homo sapien
cagggatccggcgctggccatcttt

SEQ ID NO: 2256843 - DNA, 25 bp, Homo sapien
tctgtagcagtagaagctctgaata

SEQ ID NO: 2256844 - DNA, 25 bp, Homo sapien
tcctgaaagagcaagagctttttgg

SEQ ID NO: 2256845 - DNA, 25 bp, Homo sapien
gaagagcccactgggaaatgaaaag

SEQ ID NO: 2256846 - DNA, 25 bp, Homo sapien
aaatgaatagttgggctctgtagca

SEQ ID NO: 2256847 - DNA, 25 bp, Homo sapien
gagtccattgagttagcccagcaag

SEQ ID NO: 2256848 - DNA, 25 bp, Homo sapien
gcctcctttggacaagggtatataa

SEQ ID NO: 2256849 - DNA, 25 bp, Homo sapien
cagtccctaggatttgcctttcaag

SEQ ID NO: 2256850 - DNA, 25 bp, Homo sapien
tataaatccccggaaagcctacatg

SEQ ID NO: 2256851 - DNA, 25 bp, Homo sapien
agttcttgtcaagagggtctctttc

SEQ ID NO: 2256852 - DNA, 25 bp, Homo sapien
attttcatttggagacacaggcctc

SEQ ID NO: 2256853 - DNA, 25 bp, Homo sapien
tagagttcttgtcaagagggtctct

SEQ ID NO: 2256854 - DNA, 25 bp, Homo sapien
tcctagagttcttgtcaagagggtc

SEQ ID NO: 2256855 - DNA, 25 bp, Homo sapien
ttcatcattataagactctctaagg

SEQ ID NO: 2256856 - DNA, 25 bp, Homo sapien
tcattataagactctctaaggactg

SEQ ID NO: 2256857 - DNA, 25 bp, Homo sapien
tagcacttcatcattataagactct

SEQ ID NO: 2256858 - DNA, 25 bp, Homo sapien
gcacttcatcattataagactctct

SEQ ID NO: 2256859 - DNA, 25 bp, Homo sapien
ttgacattattcttttcacatataa

SEQ ID NO: 2256860 - DNA, 25 bp, Homo sapien
tgacattattcttttcacatataaa

SEQ ID NO: 2256861 - DNA, 25 bp, Homo sapien
cttgacattattcttttcacatata

SEQ ID NO: 2256862 - DNA, 25 bp, Homo sapien
gacattattcttttcacatataaac

SEQ ID NO: 2256863 - DNA, 25 bp, Homo sapien
gaagatcctggatgcaagtgcactg

SEQ ID NO: 2256864 - DNA, 25 bp, Homo sapien
tctgatgagggctgaagatcctgga

SEQ ID NO: 2256865 - DNA, 25 bp, Homo sapien
cacccttccgacgtgaatacttgtg

SEQ ID NO: 2256866 - DNA, 25 bp, Homo sapien
cctctttgttttgtgagcagggcca

SEQ ID NO: 2256867 - DNA, 25 bp, Homo sapien
actgtgagctgtgagctgaatcaaa

SEQ ID NO: 2256868 - DNA, 25 bp, Homo sapien
gagctgtgagctgaatcaaatgttt

SEQ ID NO: 2256869 - DNA, 25 bp, Homo sapien
ggaactgtgagctgtgagctgaatc

SEQ ID NO: 2256870 - DNA, 25 bp, Homo sapien
taaggaactgtgagctgtgagctga

SEQ ID NO: 2256871 - DNA, 25 bp, Homo sapien
tatttcccgctttgagtcctgtcca

SEQ ID NO: 2256872 - DNA, 25 bp, Homo sapien
ccacgttgcatctttcacatgacag

SEQ ID NO: 2256873 - DNA, 25 bp, Homo sapien
tgcagaattcaatccactatctttc

SEQ ID NO: 2256874 - DNA, 25 bp, Homo sapien
tggaatttggacgaaggacttctgc

SEQ ID NO: 2256875 - DNA, 25 bp, Homo sapien
ttttaattatacatgattgccactg

SEQ ID NO: 2256876 - DNA, 25 bp, Homo sapien
ttatacatgattgccactgtctgca

SEQ ID NO: 2256877 - DNA, 25 bp, Homo sapien
tgcagtagggtaccacacacagcat

SEQ ID NO: 2256878 - DNA, 25 bp, Homo sapien
gccactgtctgcagtagggtaccac

SEQ ID NO: 2256879 - DNA, 25 bp, Homo sapien
ccttactacaactcctcactacaga

SEQ ID NO: 2256880 - DNA, 25 bp, Homo sapien
actacaactcctcactacagaataa

SEQ ID NO: 2256881 - DNA, 25 bp, Homo sapien
tccttactacaactcctcactacag

SEQ ID NO: 2256882 - DNA, 25 bp, Homo sapien
ccagacactcttagagatttttcag

SEQ ID NO: 2256883 - DNA, 25 bp, Homo sapien
acccagacactcttagagatttttc

SEQ ID NO: 2256884 - DNA, 25 bp, Homo sapien
cccagacactcttagagatttttca

SEQ ID NO: 2256885 - DNA, 25 bp, Homo sapien
caaaacagaaattgtgctaggcacc

SEQ ID NO: 2256886 - DNA, 25 bp, Homo sapien
caagcctatggtacttagcatcccc

SEQ ID NO: 2256887 - DNA, 25 bp, Homo sapien
tattttcttttgtccaacacaaaga

SEQ ID NO: 2256888 - DNA, 25 bp, Homo sapien
gctgacagcacccaagcctatggta

SEQ ID NO: 2256889 - DNA, 25 bp, Homo sapien
tccttagacacttttccagtccagc

SEQ ID NO: 2256890 - DNA, 25 bp, Homo sapien
caaagtaagtggtgaaaacacacaa

SEQ ID NO: 2256891 - DNA, 25 bp, Homo sapien
cacaaagtaagtggtgaaaacacac

SEQ ID NO: 2256892 - DNA, 25 bp, Homo sapien
acaaagtaagtggtgaaaacacaca

SEQ ID NO: 2256893 - DNA, 25 bp, Homo sapien
caaagtaagtggtgaaaacacacaa

SEQ ID NO: 2256894 - DNA, 25 bp, Homo sapien
cacaaagtaagtggtgaaaacacac

SEQ ID NO: 2256895 - DNA, 25 bp, Homo sapien
acaaagtaagtggtgaaaacacaca

SEQ ID NO: 2256896 - DNA, 25 bp, Homo sapien
caaagtaagtggtgaaaacacacaa

SEQ ID NO: 2256897 - DNA, 25 bp, Homo sapien
acaaagtaagtggtgaaaacacaca

SEQ ID NO: 2256898 - DNA, 25 bp, Homo sapien
cacaaagtaagtggtgaaaacacac

SEQ ID NO: 2256899 - DNA, 25 bp, Homo sapien
cactggccacttttcgcctctattt

SEQ ID NO: 2256900 - DNA, 25 bp, Homo sapien
gaatgccttaaggcccactggccac

SEQ ID NO: 2256901 - DNA, 25 bp, Homo sapien
tattaacccccacattcctcatctt

SEQ ID NO: 2256902 - DNA, 25 bp, Homo sapien
tctctgtgaagcttgccaaaagtga

SEQ ID NO: 2256903 - DNA, 25 bp, Homo sapien
ttttatctttggctggtctgtatct

SEQ ID NO: 2256904 - DNA, 25 bp, Homo sapien
ttatctttggctggtctgtatctgt

SEQ ID NO: 2256905 - DNA, 25 bp, Homo sapien
ctagaattgtaaacatttagtatgt

SEQ ID NO: 2256906 - DNA, 25 bp, Homo sapien
tgtttttatctttggctggtctgta

SEQ ID NO: 2256907 - DNA, 25 bp, Homo sapien
atcatctgaaatctcgtaacaccag

SEQ ID NO: 2256908 - DNA, 25 bp, Homo sapien
taacaccagatagccagaagaccag

SEQ ID NO: 2256909 - DNA, 25 bp, Homo sapien
gaagaccagggtacagtggattaca

SEQ ID NO: 2256910 - DNA, 25 bp, Homo sapien
ggtacagtggattacaataagcaat

SEQ ID NO: 2256911 - DNA, 25 bp, Homo sapien
tatatgtgtcgctgatgaattttct

SEQ ID NO: 2256912 - DNA, 25 bp, Homo sapien
tccttatatgtgtcgctgatgaatt

SEQ ID NO: 2256913 - DNA, 25 bp, Homo sapien
ccttatatgtgtcgctgatgaattt

SEQ ID NO: 2256914 - DNA, 25 bp, Homo sapien
gtttccttatatgtgtcgctgatga

SEQ ID NO: 2256915 - DNA, 25 bp, Homo sapien
ccaggtactgtgtgtgttagaaaca

SEQ ID NO: 2256916 - DNA, 25 bp, Homo sapien
taccaggtactgtgtgtgttagaaa

SEQ ID NO: 2256917 - DNA, 25 bp, Homo sapien
tataaaatagttattaccactgccc

SEQ ID NO: 2256918 - DNA, 25 bp, Homo sapien
atagttattaccactgccctcatga

SEQ ID NO: 2256919 - DNA, 25 bp, Homo sapien
ttaaaaatttcttaagctgactaga

SEQ ID NO: 2256920 - DNA, 25 bp, Homo sapien
attgattgagttccagagcgacggt

SEQ ID NO: 2256921 - DNA, 25 bp, Homo sapien
tccagagcgacggtcactttttaaa

SEQ ID NO: 2256922 - DNA, 25 bp, Homo sapien
gagttccagagcgacggtcactttt

SEQ ID NO: 2256923 - DNA, 25 bp, Homo sapien
acaacgaaggctgaatagtgttgga

SEQ ID NO: 2256924 - DNA, 25 bp, Homo sapien
ctttgaggcctacattggcaaaatg

SEQ ID NO: 2256925 - DNA, 25 bp, Homo sapien
tttgaggcctacattggcaaaatga

SEQ ID NO: 2256926 - DNA, 25 bp, Homo sapien
atgaggcaaacaacgaaggctgaat

SEQ ID NO: 2256927 - DNA, 25 bp, Homo sapien
attccttctcctcctccatccccat

SEQ ID NO: 2256928 - DNA, 25 bp, Homo sapien
tatgtctctattccattccttctcc

SEQ ID NO: 2256929 - DNA, 25 bp, Homo sapien
atgtctctattccattccttctcct

SEQ ID NO: 2256930 - DNA, 25 bp, Homo sapien
tccattccttctcctcctccatccc

SEQ ID NO: 2256931 - DNA, 25 bp, Homo sapien
tctggaaaatcactaacaaggcaag

SEQ ID NO: 2256932 - DNA, 25 bp, Homo sapien
tagtctcttttgcttccgggggcat

SEQ ID NO: 2256933 - DNA, 25 bp, Homo sapien
caagatactggttgctgactaggct

SEQ ID NO: 2256934 - DNA, 25 bp, Homo sapien
gactaggctacccttgtagtcatca

SEQ ID NO: 2256935 - DNA, 25 bp, Homo sapien
gcatcagtaaagcaagaaatgctat

SEQ ID NO: 2256936 - DNA, 25 bp, Homo sapien
aacatccaacacttcagcatcagta

SEQ ID NO: 2256937 - DNA, 25 bp, Homo sapien
gctgtgcatgcattgactgatttct

SEQ ID NO: 2256938 - DNA, 25 bp, Homo sapien
gtgcatgcattgactgatttctgaa

SEQ ID NO: 2256939 - DNA, 25 bp, Homo sapien
actgtttacctcagtagtagctgaa

SEQ ID NO: 2256940 - DNA, 25 bp, Homo sapien
gccaaactgtttacctcagtagtag

SEQ ID NO: 2256941 - DNA, 25 bp, Homo sapien
caaactgtttacctcagtagtagct

SEQ ID NO: 2256942 - DNA, 25 bp, Homo sapien
gtgccaaactgtttacctcagtagt

SEQ ID NO: 2256943 - DNA, 25 bp, Homo sapien
tgacacccataagctcattatttgt

SEQ ID NO: 2256944 - DNA, 25 bp, Homo sapien
ccctgacacccataagctcattatt

SEQ ID NO: 2256945 - DNA, 25 bp, Homo sapien
aatcttctgccctgacacccataag

SEQ ID NO: 2256946 - DNA, 25 bp, Homo sapien
tgccctgacacccataagctcatta

SEQ ID NO: 2256947 - DNA, 25 bp, Homo sapien
ttttccaatgtctgtcttcacgata

SEQ ID NO: 2256948 - DNA, 25 bp, Homo sapien
tcttcacgataacctgattcagaag

SEQ ID NO: 2256949 - DNA, 25 bp, Homo sapien
aatgtctgtcttcacgataacctga

SEQ ID NO: 2256950 - DNA, 25 bp, Homo sapien
cctgattcagaagcaagattggcat

SEQ ID NO: 2256951 - DNA, 25 bp, Homo sapien
gtttatctctgtggcagcaggtgca

SEQ ID NO: 2256952 - DNA, 25 bp, Homo sapien
cagccatgtccatggaacccaggtt

SEQ ID NO: 2256953 - DNA, 25 bp, Homo sapien
gcatcttgtttatctctgtggcagc

SEQ ID NO: 2256954 - DNA, 25 bp, Homo sapien
cttctggaacagtctttctgaacat

SEQ ID NO: 2256955 - DNA, 25 bp, Homo sapien
ccacaaggtctcttcaagtttacca

SEQ ID NO: 2256956 - DNA, 25 bp, Homo sapien
ggtgcacaaggaatattctgctgct

SEQ ID NO: 2256957 - DNA, 25 bp, Homo sapien
cattggtcctcagtccacacaggtc

SEQ ID NO: 2256958 - DNA, 25 bp, Homo sapien
cattgatctctgctatgtctgtgta

SEQ ID NO: 2256959 - DNA, 25 bp, Homo sapien
cttcagccgtggagcacagcagacc

SEQ ID NO: 2256960 - DNA, 25 bp, Homo sapien
cagacggtgcttactgttctttccc

SEQ ID NO: 2256961 - DNA, 25 bp, Homo sapien
tgttggcatagaaggaatgtattca

SEQ ID NO: 2256962 - DNA, 25 bp, Homo sapien
gacgcaaagtatccttcagacggtg

SEQ ID NO: 2256963 - DNA, 25 bp, Homo sapien
gctgcagaaaccacatcagggactt

SEQ ID NO: 2256964 - DNA, 25 bp, Homo sapien
atccccaaaggaagatgggtacagg

SEQ ID NO: 2256965 - DNA, 25 bp, Homo sapien
ttaagcaggagggtgatatatttcc

SEQ ID NO: 2256966 - DNA, 25 bp, Homo sapien
ggattagctacccactatgaattat

SEQ ID NO: 2256967 - DNA, 25 bp, Homo sapien
tcagcaccacggtctgggtggcctt

SEQ ID NO: 2256968 - DNA, 25 bp, Homo sapien
ctagccttcctacttgctccatgga

SEQ ID NO: 2256969 - DNA, 25 bp, Homo sapien
ttaagtatttccagctcctagcctt

SEQ ID NO: 2256970 - DNA, 25 bp, Homo sapien
tgttctccaaacttggtccctccaa

SEQ ID NO: 2256971 - DNA, 25 bp, Homo sapien
gagtccttctgaagcctctgcatca

SEQ ID NO: 2256972 - DNA, 25 bp, Homo sapien
agtttggtagggacccatctgtgca

SEQ ID NO: 2256973 - DNA, 25 bp, Homo sapien
gtgagtttggtagggacccatctgt

SEQ ID NO: 2256974 - DNA, 25 bp, Homo sapien
aatggtgagtttggtagggacccat

SEQ ID NO: 2256975 - DNA, 25 bp, Homo sapien
cccccttctcatccatcctgtacat

SEQ ID NO: 2256976 - DNA, 25 bp, Homo sapien
tctcccccttctcatccatcctgta

SEQ ID NO: 2256977 - DNA, 25 bp, Homo sapien
tgttttctcccccttctcatccatc

SEQ ID NO: 2256978 - DNA, 25 bp, Homo sapien
tttctcccccttctcatccatcctg

SEQ ID NO: 2256979 - DNA, 25 bp, Homo sapien
tgtggagttatagtcagcaatgaac

SEQ ID NO: 2256980 - DNA, 25 bp, Homo sapien
ttaagtgcacgttcttctaaaggtg

SEQ ID NO: 2256981 - DNA, 25 bp, Homo sapien
ttgctgctttgttttaagtgcacgt

SEQ ID NO: 2256982 - DNA, 25 bp, Homo sapien
tcatgaaacgctgttggttgtggag

SEQ ID NO: 2256983 - DNA, 25 bp, Homo sapien
tggagctcagccccatcatcaattg

SEQ ID NO: 2256984 - DNA, 25 bp, Homo sapien
tccctggagctcagccccatcatca

SEQ ID NO: 2256985 - DNA, 25 bp, Homo sapien
gagctcagccccatcatcaattgag

SEQ ID NO: 2256986 - DNA, 25 bp, Homo sapien
ttaaccttcttttccctggagctca

SEQ ID NO: 2256987 - DNA, 25 bp, Homo sapien
caagatctaccaaggcaacagcctt

SEQ ID NO: 2256988 - DNA, 25 bp, Homo sapien
cgggaagtgctatttgatccaacaa

SEQ ID NO: 2256989 - DNA, 25 bp, Homo sapien
tgaaggtaagatccacagatacaca

SEQ ID NO: 2256990 - DNA, 25 bp, Homo sapien
gcgcatatgtgttctgttgcgggaa

SEQ ID NO: 2256991 - DNA, 25 bp, Homo sapien
tcttcttggttgacattaaatggtg

SEQ ID NO: 2256992 - DNA, 25 bp, Homo sapien
tgttgctggctgtcgacaaaggaat

SEQ ID NO: 2256993 - DNA, 25 bp, Homo sapien
caagcatggtacctgtaggatccct

SEQ ID NO: 2256994 - DNA, 25 bp, Homo sapien
gacctcattggtgagtcctcttgtg

SEQ ID NO: 2256995 - DNA, 25 bp, Homo sapien
ccagttgagtcagccttctttacat

SEQ ID NO: 2256996 - DNA, 25 bp, Homo sapien
aatctggattcctttgagctttgca

SEQ ID NO: 2256997 - DNA, 25 bp, Homo sapien
ggctgttgcaatttcggccatcata

SEQ ID NO: 2256998 - DNA, 25 bp, Homo sapien
tctggcaacagatagtccaggaaag

SEQ ID NO: 2256999 - DNA, 25 bp, Homo sapien
gcctctgtaatttaacgagagagat

SEQ ID NO: 2257000 - DNA, 25 bp, Homo sapien
agagagatcagtccattcaaatata

SEQ ID NO: 2257001 - DNA, 25 bp, Homo sapien
taaaatagcatatcaaatgtggcct

SEQ ID NO: 2257002 - DNA, 25 bp, Homo sapien
aatagcatatcaaatgtggcctcta

SEQ ID NO: 2257003 - DNA, 25 bp, Homo sapien
tacagctctaaagggcggtgagtcc

SEQ ID NO: 2257004 - DNA, 25 bp, Homo sapien
gagagactagcagcaagatttcttt

SEQ ID NO: 2257005 - DNA, 25 bp, Homo sapien
ttgtggtctcggtggtttcaggaaa

SEQ ID NO: 2257006 - DNA, 25 bp, Homo sapien
ggtacaaaactgatacagagttctc

SEQ ID NO: 2257007 - DNA, 25 bp, Homo sapien
ccgttttgatagactgctgattggc

SEQ ID NO: 2257008 - DNA, 25 bp, Homo sapien
ttttgatagactgctgattggcacg

SEQ ID NO: 2257009 - DNA, 25 bp, Homo sapien
tagactgctgattggcacgtttaca

SEQ ID NO: 2257010 - DNA, 25 bp, Homo sapien
ctccaaatccccagccgattagcta

SEQ ID NO: 2257011 - DNA, 25 bp, Homo sapien
gcaatacatgcaaagggctaggtcc

SEQ ID NO: 2257012 - DNA, 25 bp, Homo sapien
gccaaggtccattgcagcttagaaa

SEQ ID NO: 2257013 - DNA, 25 bp, Homo sapien
cccaaattaatgcacaagccaaggt

SEQ ID NO: 2257014 - DNA, 25 bp, Homo sapien
caaactagtcatgagtgctgctcct

SEQ ID NO: 2257015 - DNA, 25 bp, Homo sapien
ctggccagaagtgatcctccaacct

SEQ ID NO: 2257016 - DNA, 25 bp, Homo sapien
acggagtcttattttgttgcccaag

SEQ ID NO: 2257017 - DNA, 25 bp, Homo sapien
gtggcctgatcgtagctcactgtag

SEQ ID NO: 2257018 - DNA, 25 bp, Homo sapien
ctggggtgcagtggcctgatcgtag

SEQ ID NO: 2257019 - DNA, 25 bp, Homo sapien
ccaaggcaggcattacaaaagaaga

SEQ ID NO: 2257020 - DNA, 25 bp, Homo sapien
tcacgtggccactatggtttcaggg

SEQ ID NO: 2257021 - DNA, 25 bp, Homo sapien
tcaagttagccaaaccagtgactgt

SEQ ID NO: 2257022 - DNA, 25 bp, Homo sapien
taggtgtcacatccataaccaaggc

SEQ ID NO: 2257023 - DNA, 25 bp, Homo sapien
gaagatacatacgtgacaaacaagc

SEQ ID NO: 2257024 - DNA, 25 bp, Homo sapien
tgctaaaagcacgatccctgaaaaa

SEQ ID NO: 2257025 - DNA, 25 bp, Homo sapien
gaaaagacaagccactgtctgggag

SEQ ID NO: 2257026 - DNA, 25 bp, Homo sapien
taacaggaagtctcactcattgctg

SEQ ID NO: 2257027 - DNA, 25 bp, Homo sapien
gatagcggagataacagaagtcaga

SEQ ID NO: 2257028 - DNA, 25 bp, Homo sapien
cactgagcttacactctagtgaggg

SEQ ID NO: 2257029 - DNA, 25 bp, Homo sapien
tcagagtatatagggcactgaagcc

SEQ ID NO: 2257030 - DNA, 25 bp, Homo sapien
ctctgagagatgtagggagtcactg

SEQ ID NO: 2257031 - DNA, 25 bp, Homo sapien
caccacagtatgacttcagggagtt

SEQ ID NO: 2257032 - DNA, 25 bp, Homo sapien
cagagggtatgcacaaagttctaca

SEQ ID NO: 2257033 - DNA, 25 bp, Homo sapien
taaaatttctggcatactcggtagc

SEQ ID NO: 2257034 - DNA, 25 bp, Homo sapien
gagttggcagtaacctagatgcccg

SEQ ID NO: 2257035 - DNA, 25 bp, Homo sapien
gactcaatccatgtcccttaaaggg

SEQ ID NO: 2257036 - DNA, 25 bp, Homo sapien
cagggccgcccaaaatctggtgaga

SEQ ID NO: 2257037 - DNA, 25 bp, Homo sapien
tgtctggcacacgatagatgctccg

SEQ ID NO: 2257038 - DNA, 25 bp, Homo sapien
gttgcaaggaggtgcatcggcccct

SEQ ID NO: 2257039 - DNA, 25 bp, Homo sapien
gaaggaccttcactctaagatgtta

SEQ ID NO: 2257040 - DNA, 25 bp, Homo sapien
tacatattagcgacaacagattgga

SEQ ID NO: 2257041 - DNA, 25 bp, Homo sapien
gaatgaccttgtaatgtaactgctc

SEQ ID NO: 2257042 - DNA, 25 bp, Homo sapien
ggtaccttgcacacatcatctgtaa

SEQ ID NO: 2257043 - DNA, 25 bp, Homo sapien
ttaagctaggaaaagaaatctatag

SEQ ID NO: 2257044 - DNA, 25 bp, Homo sapien
aagaaatctatagaaagtgttctgt

SEQ ID NO: 2257045 - DNA, 25 bp, Homo sapien
aggaaaagaaatctatagaaagtgt

SEQ ID NO: 2257046 - DNA, 25 bp, Homo sapien
tctatagaaagtgttctgttacaaa

SEQ ID NO: 2257047 - DNA, 25 bp, Homo sapien
cagactccacagttgatatggacat

SEQ ID NO: 2257048 - DNA, 25 bp, Homo sapien
tttgtcagactccacagttgatatg

SEQ ID NO: 2257049 - DNA, 25 bp, Homo sapien
tgtcagactccacagttgatatgga

SEQ ID NO: 2257050 - DNA, 25 bp, Homo sapien
cctttgtcagactccacagttgata

SEQ ID NO: 2257051 - DNA, 25 bp, Homo sapien
tcccctggaagtagaaggagaagca

SEQ ID NO: 2257052 - DNA, 25 bp, Homo sapien
ctggaagtagaaggagaagcagtat

SEQ ID NO: 2257053 - DNA, 25 bp, Homo sapien
gaagtagaaggagaagcagtatcca

SEQ ID NO: 2257054 - DNA, 25 bp, Homo sapien
aagtagaaggagaagcagtatccat

SEQ ID NO: 2257055 - DNA, 25 bp, Homo sapien
taaacctgcagcatctggttattcc

SEQ ID NO: 2257056 - DNA, 25 bp, Homo sapien
tagaccttgcttagctcacaagatc

SEQ ID NO: 2257057 - DNA, 25 bp, Homo sapien
gcatctggttattcccagtctccca

SEQ ID NO: 2257058 - DNA, 25 bp, Homo sapien
ccaggctagaccttgcttagctcac

SEQ ID NO: 2257059 - DNA, 25 bp, Homo sapien
aactggccactgacaaaaatgaccc

SEQ ID NO: 2257060 - DNA, 25 bp, Homo sapien
actggccactgacaaaaatgacccc

SEQ ID NO: 2257061 - DNA, 25 bp, Homo sapien
caaactggccactgacaaaaatgac

SEQ ID NO: 2257062 - DNA, 25 bp, Homo sapien
gcacaaactggccactgacaaaaat

SEQ ID NO: 2257063 - DNA, 25 bp, Homo sapien
taaaagttgaagagtgtaggattcc

SEQ ID NO: 2257064 - DNA, 25 bp, Homo sapien
agtcacttcctgtagtaccacctcc

SEQ ID NO: 2257065 - DNA, 25 bp, Homo sapien
atattgaaggaattcaggacaccag

SEQ ID NO: 2257066 - DNA, 25 bp, Homo sapien
aaggtatattgaaggaattcaggac

SEQ ID NO: 2257067 - DNA, 25 bp, Homo sapien
gagctttttgcccaattctaaatgc

SEQ ID NO: 2257068 - DNA, 25 bp, Homo sapien
gctctcatgggtatggaagtgtaaa

SEQ ID NO: 2257069 - DNA, 25 bp, Homo sapien
ttgtgtcttctattgatagcatttc

SEQ ID NO: 2257070 - DNA, 25 bp, Homo sapien
cagtgattgcactgggttgtgacac

SEQ ID NO: 2257071 - DNA, 25 bp, Homo sapien
cttaacggagagctctttgtagtct

SEQ ID NO: 2257072 - DNA, 25 bp, Homo sapien
cagcttaacggagagctctttgtag

SEQ ID NO: 2257073 - DNA, 25 bp, Homo sapien
gcttaacggagagctctttgtagtc

SEQ ID NO: 2257074 - DNA, 25 bp, Homo sapien
agcttaacggagagctctttgtagt

SEQ ID NO: 2257075 - DNA, 25 bp, Homo sapien
tgctcctcatttgatcttgatggtg

SEQ ID NO: 2257076 - DNA, 25 bp, Homo sapien
tccagttgttgcctaggccttctac

SEQ ID NO: 2257077 - DNA, 25 bp, Homo sapien
gaaattgtggaaaagcttagaggat

SEQ ID NO: 2257078 - DNA, 25 bp, Homo sapien
gcttagaggattcttgatattccag

SEQ ID NO: 2257079 - DNA, 25 bp, Homo sapien
tggtgcttttgttgcctcataaaag

SEQ ID NO: 2257080 - DNA, 25 bp, Homo sapien
ggctttcacaaaatgctctaatctc

SEQ ID NO: 2257081 - DNA, 25 bp, Homo sapien
attctgtaccctgcctccatacgtt

SEQ ID NO: 2257082 - DNA, 25 bp, Homo sapien
attctagcatttctcgttgaacgag

SEQ ID NO: 2257083 - DNA, 25 bp, Homo sapien
gattttcacagtaaggctcccacct

SEQ ID NO: 2257084 - DNA, 25 bp, Homo sapien
tcagttgcagaatgaccttggaatc

SEQ ID NO: 2257085 - DNA, 25 bp, Homo sapien
ccactgacttgcaagggtatagcct

SEQ ID NO: 2257086 - DNA, 25 bp, Homo sapien
ggagaatcgctctcttgccttctag

SEQ ID NO: 2257087 - DNA, 25 bp, Homo sapien
gggatcacatctgttgatgcttgtg

SEQ ID NO: 2257088 - DNA, 25 bp, Homo sapien
agggatcacatctgttgatgcttgt

SEQ ID NO: 2257089 - DNA, 25 bp, Homo sapien
tgttgatgcttgtgggcattatatt

SEQ ID NO: 2257090 - DNA, 25 bp, Homo sapien
tgggcattatattgtcaattaaggc

SEQ ID NO: 2257091 - DNA, 25 bp, Homo sapien
tgaaggcctctgagggttaacaagg

SEQ ID NO: 2257092 - DNA, 25 bp, Homo sapien
tggtcagtttgggtgagtgacaaac

SEQ ID NO: 2257093 - DNA, 25 bp, Homo sapien
tttattggtcagtttgggtgagtga

SEQ ID NO: 2257094 - DNA, 25 bp, Homo sapien
ggacttgaaggcctctgagggttaa

SEQ ID NO: 2257095 - DNA, 25 bp, Homo sapien
ctaggaataagtccaggatggagaa

SEQ ID NO: 2257096 - DNA, 25 bp, Homo sapien
ccaggatggagaaggcatcatccag

SEQ ID NO: 2257097 - DNA, 25 bp, Homo sapien
gtccaggatggagaaggcatcatcc

SEQ ID NO: 2257098 - DNA, 25 bp, Homo sapien
aggatggagaaggcatcatccagag

SEQ ID NO: 2257099 - DNA, 25 bp, Homo sapien
ctgcttcgtgttgggttactgcggt

SEQ ID NO: 2257100 - DNA, 25 bp, Homo sapien
gtgattttggatcatcctaggactg

SEQ ID NO: 2257101 - DNA, 25 bp, Homo sapien
gtgttgggttactgcggtctctgtc

SEQ ID NO: 2257102 - DNA, 25 bp, Homo sapien
tttggatcatcctaggactgctatc

SEQ ID NO: 2257103 - DNA, 25 bp, Homo sapien
actatcccatctggcttagtgattt

SEQ ID NO: 2257104 - DNA, 25 bp, Homo sapien
ctatcccatctggcttagtgatttt

SEQ ID NO: 2257105 - DNA, 25 bp, Homo sapien
cactatcccatctggcttagtgatt

SEQ ID NO: 2257106 - DNA, 25 bp, Homo sapien
tccacaggccatacgtcatcaaacc

SEQ ID NO: 2257107 - DNA, 25 bp, Homo sapien
acaggccatacgtcatcaaacccat

SEQ ID NO: 2257108 - DNA, 25 bp, Homo sapien
cgtcatcaaacccatgaaatggtct

SEQ ID NO: 2257109 - DNA, 25 bp, Homo sapien
ggccatacgtcatcaaacccatgaa

SEQ ID NO: 2257110 - DNA, 25 bp, Homo sapien
tcaatctggtgctggtttgggggat

SEQ ID NO: 2257111 - DNA, 25 bp, Homo sapien
atctggtgctggtttgggggattca

SEQ ID NO: 2257112 - DNA, 25 bp, Homo sapien
caatctggtgctggtttgggggatt

SEQ ID NO: 2257113 - DNA, 25 bp, Homo sapien
tctggtgctggtttgggggattcac

SEQ ID NO: 2257114 - DNA, 25 bp, Homo sapien
acttaagcattgattctcgaagtgc

SEQ ID NO: 2257115 - DNA, 25 bp, Homo sapien
gcattgattctcgaagtgcctgtcc

SEQ ID NO: 2257116 - DNA, 25 bp, Homo sapien
ttgattctcgaagtgcctgtccctc

SEQ ID NO: 2257117 - DNA, 25 bp, Homo sapien
taagcattgattctcgaagtgcctg

SEQ ID NO: 2257118 - DNA, 25 bp, Homo sapien
tcagaacctggaagttcaggaggat

SEQ ID NO: 2257119 - DNA, 25 bp, Homo sapien
aggcaaggtccaggcccccatattg

SEQ ID NO: 2257120 - DNA, 25 bp, Homo sapien
tgaagatgctattgaaatcttgtac

SEQ ID NO: 2257121 - DNA, 25 bp, Homo sapien
ccccatattgctgaagatgctattg

SEQ ID NO: 2257122 - DNA, 25 bp, Homo sapien
cgtggaaacgtatccctcctcctgg

SEQ ID NO: 2257123 - DNA, 25 bp, Homo sapien
ttatcgtggaaacgtatccctcctc

SEQ ID NO: 2257124 - DNA, 25 bp, Homo sapien
gccgaagttatcgtggaaacgtatc

SEQ ID NO: 2257125 - DNA, 25 bp, Homo sapien
catcaaagccgaagttatcgtggaa

SEQ ID NO: 2257126 - DNA, 25 bp, Homo sapien
aggggcgggatgctgaggattatcg

SEQ ID NO: 2257127 - DNA, 25 bp, Homo sapien
ccatgagcccccttcttcctcttct

SEQ ID NO: 2257128 - DNA, 25 bp, Homo sapien
tcttcttcctcatcatcatcttcat

SEQ ID NO: 2257129 - DNA, 25 bp, Homo sapien
ttcctcttcttcctcatcatcatct

SEQ ID NO: 2257130 - DNA, 25 bp, Homo sapien
tcctcttcttcctcatcatcatctt

SEQ ID NO: 2257131 - DNA, 25 bp, Homo sapien
tcccatattagaactggaatctttg

SEQ ID NO: 2257132 - DNA, 25 bp, Homo sapien
cttcagacacactatcgtggttatg

SEQ ID NO: 2257133 - DNA, 25 bp, Homo sapien
cacactatcgtggttatgttgaaat

SEQ ID NO: 2257134 - DNA, 25 bp, Homo sapien
gttgaaatttatgttcggagtcatt

SEQ ID NO: 2257135 - DNA, 25 bp, Homo sapien
tcggagtcatttttaggagtttcaa

SEQ ID NO: 2257136 - DNA, 25 bp, Homo sapien
tgaatgactctcttttctcttggtc

SEQ ID NO: 2257137 - DNA, 25 bp, Homo sapien
tcttcccctctttgaatgactctct

SEQ ID NO: 2257138 - DNA, 25 bp, Homo sapien
cttcccctctttgaatgactctctt

SEQ ID NO: 2257139 - DNA, 25 bp, Homo sapien
ctctcttcccctctttgaatgactc

SEQ ID NO: 2257140 - DNA, 25 bp, Homo sapien
gttttgaggcggagactgataagtc

SEQ ID NO: 2257141 - DNA, 25 bp, Homo sapien
ccatctgttttgaggcggagactga

SEQ ID NO: 2257142 - DNA, 25 bp, Homo sapien
gaggcggagactgataagtcccaca

SEQ ID NO: 2257143 - DNA, 25 bp, Homo sapien
gagactgataagtcccacaggaaac

SEQ ID NO: 2257144 - DNA, 25 bp, Homo sapien
ataatgatgcagctgttttcccttc

SEQ ID NO: 2257145 - DNA, 25 bp, Homo sapien
atctgtccctagatttgaaataatg

SEQ ID NO: 2257146 - DNA, 25 bp, Homo sapien
caggaaggtggagtatctgaggaca

SEQ ID NO: 2257147 - DNA, 25 bp, Homo sapien
ctcattgttggttgccaggaaggtg

SEQ ID NO: 2257148 - DNA, 25 bp, Homo sapien
catgagcattctcacaaggatctcc

SEQ ID NO: 2257149 - DNA, 25 bp, Homo sapien
ggacattactatagaggccatgagc

SEQ ID NO: 2257150 - DNA, 25 bp, Homo sapien
agcttttgaagcagatccacatgcc

SEQ ID NO: 2257151 - DNA, 25 bp, Homo sapien
cacatgccaaatcttcccttggagg

SEQ ID NO: 2257152 - DNA, 25 bp, Homo sapien
agtaatcaggatcccctgcacataa

SEQ ID NO: 2257153 - DNA, 25 bp, Homo sapien
ttagtaatcaggatcccctgcacat

SEQ ID NO: 2257154 - DNA, 25 bp, Homo sapien
tatactcaatagaaagaagatcagt

SEQ ID NO: 2257155 - DNA, 25 bp, Homo sapien
acagatgctagcaagaatgtaaaga

SEQ ID NO: 2257156 - DNA, 25 bp, Homo sapien
cagagaggtgtttgcactcccatta

SEQ ID NO: 2257157 - DNA, 25 bp, Homo sapien
aaagagaacctttgtacatcgctgg

SEQ ID NO: 2257158 - DNA, 25 bp, Homo sapien
gcaagcttggaacctgatcagagcc

SEQ ID NO: 2257159 - DNA, 25 bp, Homo sapien
gaatagcattggaggttgttgggaa

SEQ ID NO: 2257160 - DNA, 25 bp, Homo sapien
tctgagctggtggagaagtaaagga

SEQ ID NO: 2257161 - DNA, 25 bp, Homo sapien
gggaaagtatctctgagctggtgga

SEQ ID NO: 2257162 - DNA, 25 bp, Homo sapien
aaattcatcactagagtctctgggc

SEQ ID NO: 2257163 - DNA, 25 bp, Homo sapien
tcggaatgacccatttcatatgtaa

SEQ ID NO: 2257164 - DNA, 25 bp, Homo sapien
ccgtctcaggaagatcagtgaccat

SEQ ID NO: 2257165 - DNA, 25 bp, Homo sapien
cagtgaccattcttgctcaaattca

SEQ ID NO: 2257166 - DNA, 25 bp, Homo sapien
gtgtctttggaaggaccagataccc

SEQ ID NO: 2257167 - DNA, 25 bp, Homo sapien
gaccagataccccatagcttttctg

SEQ ID NO: 2257168 - DNA, 25 bp, Homo sapien
cctaataccagggagtggttacctg

SEQ ID NO: 2257169 - DNA, 25 bp, Homo sapien
tacctggagccctggtgtctttgga

SEQ ID NO: 2257170 - DNA, 25 bp, Homo sapien
aacagaaacagaagcagctcccatg

SEQ ID NO: 2257171 - DNA, 25 bp, Homo sapien
caaacagaaacagaagcagctccca

SEQ ID NO: 2257172 - DNA, 25 bp, Homo sapien
ctatggcaacaaacagaaacagaag

SEQ ID NO: 2257173 - DNA, 25 bp, Homo sapien
aacaaacagaaacagaagcagctcc

SEQ ID NO: 2257174 - DNA, 25 bp, Homo sapien
tcaatttctccatcaaaaattccat

SEQ ID NO: 2257175 - DNA, 25 bp, Homo sapien
ttaaactcaatttctccatcaaaaa

SEQ ID NO: 2257176 - DNA, 25 bp, Homo sapien
tctgtgttaaaccaacttaaactca

SEQ ID NO: 2257177 - DNA, 25 bp, Homo sapien
aactcaatttctccatcaaaaattc

SEQ ID NO: 2257178 - DNA, 25 bp, Homo sapien
cacagcaaaagagttatctctggat

SEQ ID NO: 2257179 - DNA, 25 bp, Homo sapien
tccttcacagcaaaagagttatctc

SEQ ID NO: 2257180 - DNA, 25 bp, Homo sapien
caggagtggccaaggcctcctttcc

SEQ ID NO: 2257181 - DNA, 25 bp, Homo sapien
cctaattcctgaacctcatccttca

SEQ ID NO: 2257182 - DNA, 25 bp, Homo sapien
cctcagtaccaactaacacacaaat

SEQ ID NO: 2257183 - DNA, 25 bp, Homo sapien
ggaccgtaacttgccaactggctcc

SEQ ID NO: 2257184 - DNA, 25 bp, Homo sapien
cggaccgtaacttgccaactggctc

SEQ ID NO: 2257185 - DNA, 25 bp, Homo sapien
caactaacacacaaattgaaggagc

SEQ ID NO: 2257186 - DNA, 25 bp, Homo sapien
tttaggatagctgcatcagcagata

SEQ ID NO: 2257187 - DNA, 25 bp, Homo sapien
tagctaagcgttagtgttttgcata

SEQ ID NO: 2257188 - DNA, 25 bp, Homo sapien
tttgcatagaattttgtccttgtta

SEQ ID NO: 2257189 - DNA, 25 bp, Homo sapien
aatattctctacctcaccactggca

SEQ ID NO: 2257190 - DNA, 25 bp, Homo sapien
tacttaagcaattagctaagcgtta

SEQ ID NO: 2257191 - DNA, 25 bp, Homo sapien
tgagcagctgcttcgcaatgaagat

SEQ ID NO: 2257192 - DNA, 25 bp, Homo sapien
taaggccctcagtgatgtacccatt

SEQ ID NO: 2257193 - DNA, 25 bp, Homo sapien
tcttctgttgtgatctaaggccctc

SEQ ID NO: 2257194 - DNA, 25 bp, Homo sapien
ggctggtatcttaatttcttgtgga

SEQ ID NO: 2257195 - DNA, 25 bp, Homo sapien
ttgaggtattgaccataccctggcc

SEQ ID NO: 2257196 - DNA, 25 bp, Homo sapien
tgtgatgtctggatatgttgaggta

SEQ ID NO: 2257197 - DNA, 25 bp, Homo sapien
gtgctgtgatgtctggatatgttga

SEQ ID NO: 2257198 - DNA, 25 bp, Homo sapien
atgttgaggtattgaccataccctg

SEQ ID NO: 2257199 - DNA, 25 bp, Homo sapien
ttgtttatgtggagagagtccctgc

SEQ ID NO: 2257200 - DNA, 25 bp, Homo sapien
ccttttgtttatgtggagagagtcc

SEQ ID NO: 2257201 - DNA, 25 bp, Homo sapien
cttttgtttatgtggagagagtccc

SEQ ID NO: 2257202 - DNA, 25 bp, Homo sapien
tttgtttatgtggagagagtccctg

SEQ ID NO: 2257203 - DNA, 25 bp, Homo sapien
ctgttgaaatagtttcagcatgcat

SEQ ID NO: 2257204 - DNA, 25 bp, Homo sapien
ctctgttgaaatagtttcagcatgc

SEQ ID NO: 2257205 - DNA, 25 bp, Homo sapien
tgctctgttgaaatagtttcagcat

SEQ ID NO: 2257206 - DNA, 25 bp, Homo sapien
cttgctctgttgaaatagtttcagc

SEQ ID NO: 2257207 - DNA, 25 bp, Homo sapien
cttcgctcggtagtggtatggcaga

SEQ ID NO: 2257208 - DNA, 25 bp, Homo sapien
tactggtagcttcgctcggtagtgg

SEQ ID NO: 2257209 - DNA, 25 bp, Homo sapien
agtggtatggcagagtagatgggca

SEQ ID NO: 2257210 - DNA, 25 bp, Homo sapien
agggagcaagtactggtagcttcgc

SEQ ID NO: 2257211 - DNA, 25 bp, Homo sapien
actcaggggaatggccgcaagggtc

SEQ ID NO: 2257212 - DNA, 25 bp, Homo sapien
gaactcaggggaatggccgcaaggg

SEQ ID NO: 2257213 - DNA, 25 bp, Homo sapien
ggaagaactcaggggaatggccgca

SEQ ID NO: 2257214 - DNA, 25 bp, Homo sapien
aagaactcaggggaatggccgcaag

SEQ ID NO: 2257215 - DNA, 25 bp, Homo sapien
cgttccccaaggattggccatttat

SEQ ID NO: 2257216 - DNA, 25 bp, Homo sapien
tctgccatcgttccccaaggattgg

SEQ ID NO: 2257217 - DNA, 25 bp, Homo sapien
ttctctctgccatcgttccccaagg

SEQ ID NO: 2257218 - DNA, 25 bp, Homo sapien
catcgttccccaaggattggccatt

SEQ ID NO: 2257219 - DNA, 25 bp, Homo sapien
agttggcagcggtgtgtatctgcat

SEQ ID NO: 2257220 - DNA, 25 bp, Homo sapien
tctgcatttctagctggttgtagca

SEQ ID NO: 2257221 - DNA, 25 bp, Homo sapien
ttacaaaaatgcaacaccagatgac

SEQ ID NO: 2257222 - DNA, 25 bp, Homo sapien
tccatttgaaagacagagaattgta

SEQ ID NO: 2257223 - DNA, 25 bp, Homo sapien
ctgaatgggttgatgagagcagccc

SEQ ID NO: 2257224 - DNA, 25 bp, Homo sapien
ttctattaatgacaccgccgaggat

SEQ ID NO: 2257225 - DNA, 25 bp, Homo sapien
tgaaaacttgcaactggaacccatg

SEQ ID NO: 2257226 - DNA, 25 bp, Homo sapien
gaaaaatgcttgacttccctctgga

SEQ ID NO: 2257227 - DNA, 25 bp, Homo sapien
ggctttgccagcaaaccagcttggg

SEQ ID NO: 2257228 - DNA, 25 bp, Homo sapien
gggtggccctgagactataaacaac

SEQ ID NO: 2257229 - DNA, 25 bp, Homo sapien
gaacaagcactggatttcatgccca

SEQ ID NO: 2257230 - DNA, 25 bp, Homo sapien
tattatagttcatcagggtggccct

SEQ ID NO: 2257231 - DNA, 25 bp, Homo sapien
cataaggcttacagtttctagggag

SEQ ID NO: 2257232 - DNA, 25 bp, Homo sapien
tcctggaagggtctactatgtgtca

SEQ ID NO: 2257233 - DNA, 25 bp, Homo sapien
tacagaagctggttagatagatcct

SEQ ID NO: 2257234 - DNA, 25 bp, Homo sapien
ggctttgatgacatagactcaggcc

SEQ ID NO: 2257235 - DNA, 25 bp, Homo sapien
cataccaggtcagaaacaaatgctt

SEQ ID NO: 2257236 - DNA, 25 bp, Homo sapien
gaatcattctggacattgcagccca

SEQ ID NO: 2257237 - DNA, 25 bp, Homo sapien
tctgtccgaagaggagccacggtta

SEQ ID NO: 2257238 - DNA, 25 bp, Homo sapien
gaaaggtggtagtccccatggtgcc

SEQ ID NO: 2257239 - DNA, 25 bp, Homo sapien
cgactgtacaaatggaggatttcaa

SEQ ID NO: 2257240 - DNA, 25 bp, Homo sapien
cagtgcctttagtacgactgtacaa

SEQ ID NO: 2257241 - DNA, 25 bp, Homo sapien
tttttagacactacccgaacctgca

SEQ ID NO: 2257242 - DNA, 25 bp, Homo sapien
tacccgaacctgcatgacagtgcct

SEQ ID NO: 2257243 - DNA, 25 bp, Homo sapien
gctagatgacagctagatgacccca

SEQ ID NO: 2257244 - DNA, 25 bp, Homo sapien
gggagtattccaccatagctaagat

SEQ ID NO: 2257245 - DNA, 25 bp, Homo sapien
aatgagagggaagcaactggatccc

SEQ ID NO: 2257246 - DNA, 25 bp, Homo sapien
tgaccccagtatgacagcagcagtg

SEQ ID NO: 2257247 - DNA, 25 bp, Homo sapien
agcacaccttggatcagagaagaca

SEQ ID NO: 2257248 - DNA, 25 bp, Homo sapien
aagcacaccttggatcagagaagac

SEQ ID NO: 2257249 - DNA, 25 bp, Homo sapien
gcacaccttggatcagagaagacaa

SEQ ID NO: 2257250 - DNA, 25 bp, Homo sapien
aggtgccaggcccggccaaagaggc

SEQ ID NO: 2257251 - DNA, 25 bp, Homo sapien
gagcaggtgccaggcccggccaaag

SEQ ID NO: 2257252 - DNA, 25 bp, Homo sapien
agcaggtgccaggcccggccaaaga

SEQ ID NO: 2257253 - DNA, 25 bp, Homo sapien
tgctcagtgagcaggtgccaggccc

SEQ ID NO: 2257254 - DNA, 25 bp, Homo sapien
gccccttcagtgttgcctgtcttaa

SEQ ID NO: 2257255 - DNA, 25 bp, Homo sapien
gacagcctggccccttcagtgttgc

SEQ ID NO: 2257256 - DNA, 25 bp, Homo sapien
agcctggccccttcagtgttgcctg

SEQ ID NO: 2257257 - DNA, 25 bp, Homo sapien
tggccccttcagtgttgcctgtctt

SEQ ID NO: 2257258 - DNA, 25 bp, Homo sapien
catctctgtttgaggagagtggcta

SEQ ID NO: 2257259 - DNA, 25 bp, Homo sapien
tcatctctgtttgaggagagtggct

SEQ ID NO: 2257260 - DNA, 25 bp, Homo sapien
atctctgtttgaggagagtggctag

SEQ ID NO: 2257261 - DNA, 25 bp, Homo sapien
ctcatctctgtttgaggagagtggc

SEQ ID NO: 2257262 - DNA, 25 bp, Homo sapien
cttctgttcatagtgctgcctcttg

SEQ ID NO: 2257263 - DNA, 25 bp, Homo sapien
aagcagcagccggcaccacttgtct

SEQ ID NO: 2257264 - DNA, 25 bp, Homo sapien
gcagccggcaccacttgtctcttct

SEQ ID NO: 2257265 - DNA, 25 bp, Homo sapien
tcccgcaggcacttctgttcatagt

SEQ ID NO: 2257266 - DNA, 25 bp, Homo sapien
tgattgggaagaaagtgcaccagtg

SEQ ID NO: 2257267 - DNA, 25 bp, Homo sapien
attgggaagaaagtgcaccagtgag

SEQ ID NO: 2257268 - DNA, 25 bp, Homo sapien
tgggaagaaagtgcaccagtgaggt

SEQ ID NO: 2257269 - DNA, 25 bp, Homo sapien
ggaagaaagtgcaccagtgaggtga

SEQ ID NO: 2257270 - DNA, 25 bp, Homo sapien
gcgaggccgtccttgttgctttaag

SEQ ID NO: 2257271 - DNA, 25 bp, Homo sapien
gccgtccttgttgctttaagggctc

SEQ ID NO: 2257272 - DNA, 25 bp, Homo sapien
agatctgagcgaggccgtccttgtt

SEQ ID NO: 2257273 - DNA, 25 bp, Homo sapien
ccttgttgctttaagggctctcagt

SEQ ID NO: 2257274 - DNA, 25 bp, Homo sapien
tccagggaattggctaaagggatcc

SEQ ID NO: 2257275 - DNA, 25 bp, Homo sapien
ccagggaattggctaaagggatcca

SEQ ID NO: 2257276 - DNA, 25 bp, Homo sapien
tctgcacggaggccagggaaccttt

SEQ ID NO: 2257277 - DNA, 25 bp, Homo sapien
gcgagcccctgccagatccggggat

SEQ ID NO: 2257278 - DNA, 25 bp, Homo sapien
gctcccactagctgattttgacagt

SEQ ID NO: 2257279 - DNA, 25 bp, Homo sapien
ggtcctcagctctgtggccgctccc

SEQ ID NO: 2257280 - DNA, 25 bp, Homo sapien
tctgtggccgctcccactagctgat

SEQ ID NO: 2257281 - DNA, 25 bp, Homo sapien
tcgcggcttctagctgtccaggctc

SEQ ID NO: 2257282 - DNA, 25 bp, Homo sapien
ggcttctagctgtccaggctccgcc

SEQ ID NO: 2257283 - DNA, 25 bp, Homo sapien
gcggcttctagctgtccaggctccg

SEQ ID NO: 2257284 - DNA, 25 bp, Homo sapien
gtcgcggcttctagctgtccaggct

SEQ ID NO: 2257285 - DNA, 25 bp, Homo sapien
gcggctgccgccgcagcgtcgggtc

SEQ ID NO: 2257286 - DNA, 25 bp, Homo sapien
cagcggctgccgccgcagcgtcggg

SEQ ID NO: 2257287 - DNA, 25 bp, Homo sapien
agcggctgccgccgcagcgtcgggt

SEQ ID NO: 2257288 - DNA, 25 bp, Homo sapien
ccgagtgggcgaccaggcgcttgcc

SEQ ID NO: 2257289 - DNA, 25 bp, Homo sapien
tgctgctgccgatgcggcccggaca

SEQ ID NO: 2257290 - DNA, 25 bp, Homo sapien
cttcctcgccggagcacaggaccag

SEQ ID NO: 2257291 - DNA, 25 bp, Homo sapien
cgagcggacccgagtgggcgaccag

SEQ ID NO: 2257292 - DNA, 25 bp, Homo sapien
aggcaacggccaggtgcggccagca

SEQ ID NO: 2257293 - DNA, 25 bp, Homo sapien
tctcaactttccaggtgcccaacgc

SEQ ID NO: 2257294 - DNA, 25 bp, Homo sapien
tgggggaaaggcaacggccaggtgc

SEQ ID NO: 2257295 - DNA, 25 bp, Homo sapien
tttccaggtgcccaacgcccgcggc

SEQ ID NO: 2257296 - DNA, 25 bp, Homo sapien
aagacctggctgacttttacactct

SEQ ID NO: 2257297 - DNA, 25 bp, Homo sapien
caagacctggctgacttttacactc

SEQ ID NO: 2257298 - DNA, 25 bp, Homo sapien
gacttttacactctgatcaccatta

SEQ ID NO: 2257299 - DNA, 25 bp, Homo sapien
ttacactctgatcaccattatttct

SEQ ID NO: 2257300 - DNA, 25 bp, Homo sapien
caagggtatcataaatgatacgcga

SEQ ID NO: 2257301 - DNA, 25 bp, Homo sapien
aaatgatacgcgagtcaggaacttc

SEQ ID NO: 2257302 - DNA, 25 bp, Homo sapien
tcctgttggtaatgagaaccttatg

SEQ ID NO: 2257303 - DNA, 25 bp, Homo sapien
cctcggttttcttaggcagggcctg

SEQ ID NO: 2257304 - DNA, 25 bp, Homo sapien
caccaggtaccatttgtgtggaggc

SEQ ID NO: 2257305 - DNA, 25 bp, Homo sapien
caggtaccatttgtgtggaggctct

SEQ ID NO: 2257306 - DNA, 25 bp, Homo sapien
tgcatcagtgggtcaccaggtacca

SEQ ID NO: 2257307 - DNA, 25 bp, Homo sapien
tgggtcaccaggtaccatttgtgtg

SEQ ID NO: 2257308 - DNA, 25 bp, Homo sapien
atgtaccacattcaggttccacagg

SEQ ID NO: 2257309 - DNA, 25 bp, Homo sapien
tgaatgtaccacattcaggttccac

SEQ ID NO: 2257310 - DNA, 25 bp, Homo sapien
actgaatgtaccacattcaggttcc

SEQ ID NO: 2257311 - DNA, 25 bp, Homo sapien
aaactgaatgtaccacattcaggtt

SEQ ID NO: 2257312 - DNA, 25 bp, Homo sapien
gagaatggttgaagagagaattctg

SEQ ID NO: 2257313 - DNA, 25 bp, Homo sapien
tttgacttggaaaggcacccactcc

SEQ ID NO: 2257314 - DNA, 25 bp, Homo sapien
gacatactctttagggtaatcgtgt

SEQ ID NO: 2257315 - DNA, 25 bp, Homo sapien
gtggctcttagatgtcgggcagtat

SEQ ID NO: 2257316 - DNA, 25 bp, Homo sapien
ttcctttactaagggctgtaactgc

SEQ ID NO: 2257317 - DNA, 25 bp, Homo sapien
tactcagtcttatttgttgacaact

SEQ ID NO: 2257318 - DNA, 25 bp, Homo sapien
tgacaactgttgtgggcacctctcc

SEQ ID NO: 2257319 - DNA, 25 bp, Homo sapien
tggagtcatgacttgtaaagtactc

SEQ ID NO: 2257320 - DNA, 25 bp, Homo sapien
tgaaagttctgactgctctgtgtgc

SEQ ID NO: 2257321 - DNA, 25 bp, Homo sapien
tccacagggtaccagactttaccaa

SEQ ID NO: 2257322 - DNA, 25 bp, Homo sapien
taccagactttaccaacttcaggac

SEQ ID NO: 2257323 - DNA, 25 bp, Homo sapien
ctctgtgtgcttaggacctccacag

SEQ ID NO: 2257324 - DNA, 25 bp, Homo sapien
catttcctggaccagtaattgggtc

SEQ ID NO: 2257325 - DNA, 25 bp, Homo sapien
cagtaattgggtcccttctaagtca

SEQ ID NO: 2257326 - DNA, 25 bp, Homo sapien
attgggtcccttctaagtcacctga

SEQ ID NO: 2257327 - DNA, 25 bp, Homo sapien
ctggaccagtaattgggtcccttct

SEQ ID NO: 2257328 - DNA, 25 bp, Homo sapien
taaaaaccatacttcaatgtaattc

SEQ ID NO: 2257329 - DNA, 25 bp, Homo sapien
cattgccacttttgccagacatcct

SEQ ID NO: 2257330 - DNA, 25 bp, Homo sapien
tttgccagacatcctatttccctgg

SEQ ID NO: 2257331 - DNA, 25 bp, Homo sapien
aaaccatacttcaatgtaattccca

SEQ ID NO: 2257332 - DNA, 25 bp, Homo sapien
catggctatagccttagttacccca

SEQ ID NO: 2257333 - DNA, 25 bp, Homo sapien
tatagccttagttaccccaatcact

SEQ ID NO: 2257334 - DNA, 25 bp, Homo sapien
tttccccatggctatagccttagtt

SEQ ID NO: 2257335 - DNA, 25 bp, Homo sapien
ttagttaccccaatcactatcctgc

SEQ ID NO: 2257336 - DNA, 25 bp, Homo sapien
tacatgcaaggagctgtgagaaatg

SEQ ID NO: 2257337 - DNA, 25 bp, Homo sapien
tacagtcttgtcagagagataatcc

SEQ ID NO: 2257338 - DNA, 25 bp, Homo sapien
taagaagtatgagagctacacagag

SEQ ID NO: 2257339 - DNA, 25 bp, Homo sapien
tatcatgcatgtatttaattgagca

SEQ ID NO: 2257340 - DNA, 25 bp, Homo sapien
gagaaaggacaatctaagtggaaga

SEQ ID NO: 2257341 - DNA, 25 bp, Homo sapien
agaaaggacaatctaagtggaagat

SEQ ID NO: 2257342 - DNA, 25 bp, Homo sapien
gaaaggacaatctaagtggaagata

SEQ ID NO: 2257343 - DNA, 25 bp, Homo sapien
aaaggacaatctaagtggaagatac

SEQ ID NO: 2257344 - DNA, 25 bp, Homo sapien
ctgtacctcgtctcactcctactga

SEQ ID NO: 2257345 - DNA, 25 bp, Homo sapien
tgtacctcgtctcactcctactgag

SEQ ID NO: 2257346 - DNA, 25 bp, Homo sapien
caggatctctaggggttgacttctt

SEQ ID NO: 2257347 - DNA, 25 bp, Homo sapien
tctctaggggttgacttctttggtc

SEQ ID NO: 2257348 - DNA, 25 bp, Homo sapien
ggggagtgcctctgtctgagtcctt

SEQ ID NO: 2257349 - DNA, 25 bp, Homo sapien
ttttgatatcattgggagttgggga

SEQ ID NO: 2257350 - DNA, 25 bp, Homo sapien
tcagagacccactagctgggggagt

SEQ ID NO: 2257351 - DNA, 25 bp, Homo sapien
tttgatatcattgggagttggggac

SEQ ID NO: 2257352 - DNA, 25 bp, Homo sapien
ggttcctcataagctgagtagggtt

SEQ ID NO: 2257353 - DNA, 25 bp, Homo sapien
agcatcatagagccagaaaggtttt

SEQ ID NO: 2257354 - DNA, 25 bp, Homo sapien
cataagctgagtagggttgcagtcc

SEQ ID NO: 2257355 - DNA, 25 bp, Homo sapien
cctcataagctgagtagggttgcag

SEQ ID NO: 2257356 - DNA, 25 bp, Homo sapien
catggactccatgaagcctctggga

SEQ ID NO: 2257357 - DNA, 25 bp, Homo sapien
tttcagttgtaaggtcagccatgga

SEQ ID NO: 2257358 - DNA, 25 bp, Homo sapien
tcagccatggactccatgaagcctc

SEQ ID NO: 2257359 - DNA, 25 bp, Homo sapien
tgctggcttttcagttgtaaggtca

SEQ ID NO: 2257360 - DNA, 25 bp, Homo sapien
tggtaatgtttataatgaaggaaag

SEQ ID NO: 2257361 - DNA, 25 bp, Homo sapien
cagatatggcacccagatgctttgc

SEQ ID NO: 2257362 - DNA, 25 bp, Homo sapien
taataactggattatctgatttcct

SEQ ID NO: 2257363 - DNA, 25 bp, Homo sapien
attgttatattcaggcattggcaga

SEQ ID NO: 2257364 - DNA, 25 bp, Homo sapien
tctgatcgtccactaagagctattt

SEQ ID NO: 2257365 - DNA, 25 bp, Homo sapien
cgtccactaagagctatttgcatag

SEQ ID NO: 2257366 - DNA, 25 bp, Homo sapien
ctagaccttgcttctgatcgtccac

SEQ ID NO: 2257367 - DNA, 25 bp, Homo sapien
tgcttctgatcgtccactaagagct

SEQ ID NO: 2257368 - DNA, 25 bp, Homo sapien
gaaaggccctatgaggtggtggagg

SEQ ID NO: 2257369 - DNA, 25 bp, Homo sapien
ctgctttgtgtgttaccctatgaaa

SEQ ID NO: 2257370 - DNA, 25 bp, Homo sapien
gctgctttgtgtgttaccctatgaa

SEQ ID NO: 2257371 - DNA, 25 bp, Homo sapien
tctcaagtcgggctgctttgtgtgt

SEQ ID NO: 2257372 - DNA, 25 bp, Homo sapien
aagcagtttttgtggtcagcgttat

SEQ ID NO: 2257373 - DNA, 25 bp, Homo sapien
cagcgttatgaatgaccaagacttt

SEQ ID NO: 2257374 - DNA, 25 bp, Homo sapien
ggcttgatcagtccaaacatttgac

SEQ ID NO: 2257375 - DNA, 25 bp, Homo sapien
aacatttgacttgatgtggctctgc

SEQ ID NO: 2257376 - DNA, 25 bp, Homo sapien
tagaatatgacccttgagagtaggg

SEQ ID NO: 2257377 - DNA, 25 bp, Homo sapien
gatagaatatgacccttgagagtag

SEQ ID NO: 2257378 - DNA, 25 bp, Homo sapien
aatatgacccttgagagtagggtgt

SEQ ID NO: 2257379 - DNA, 25 bp, Homo sapien
aggatagaatatgacccttgagagt

SEQ ID NO: 2257380 - DNA, 25 bp, Homo sapien
tatagttttgggagatgtattccag

SEQ ID NO: 2257381 - DNA, 25 bp, Homo sapien
catggtctggtattggattatatag

SEQ ID NO: 2257382 - DNA, 25 bp, Homo sapien
aagccatggtctggtattggattat

SEQ ID NO: 2257383 - DNA, 25 bp, Homo sapien
tgtattccaggacttacagcactgg

SEQ ID NO: 2257384 - DNA, 25 bp, Homo sapien
aagctggttattgtccttgtggcag

SEQ ID NO: 2257385 - DNA, 25 bp, Homo sapien
caatcctaggtttgtggcttatgta

SEQ ID NO: 2257386 - DNA, 25 bp, Homo sapien
gagacatgatcaccagaccaatcct

SEQ ID NO: 2257387 - DNA, 25 bp, Homo sapien
taagacctggttggtaagctggtta

SEQ ID NO: 2257388 - DNA, 25 bp, Homo sapien
cagattcaaaactactatagcaggc

SEQ ID NO: 2257389 - DNA, 25 bp, Homo sapien
ttcaaaactactatagcaggccgcc

SEQ ID NO: 2257390 - DNA, 25 bp, Homo sapien
gattcaaaactactatagcaggccg

SEQ ID NO: 2257391 - DNA, 25 bp, Homo sapien
aaactactatagcaggccgcctcct

SEQ ID NO: 2257392 - DNA, 25 bp, Homo sapien
cttgttcttgtctgcatcccctgcc

SEQ ID NO: 2257393 - DNA, 25 bp, Homo sapien
tgagcgagggggtgggatcatcatg

SEQ ID NO: 2257394 - DNA, 25 bp, Homo sapien
aaatttcattatgtgtcttccactg

SEQ ID NO: 2257395 - DNA, 25 bp, Homo sapien
cctgcccctcctcaatgagcgaggg

SEQ ID NO: 2257396 - DNA, 25 bp, Homo sapien
cattggttgcataaagtaaggcttg

SEQ ID NO: 2257397 - DNA, 25 bp, Homo sapien
caaactccggagttcagtctcaaca

SEQ ID NO: 2257398 - DNA, 25 bp, Homo sapien
cacaggtgtcagtttttcttaggga

SEQ ID NO: 2257399 - DNA, 25 bp, Homo sapien
tagaatgtcgataacatgagcgtgc

SEQ ID NO: 2257400 - DNA, 25 bp, Homo sapien
cagacgaatgtcctctcttgccgct

SEQ ID NO: 2257401 - DNA, 25 bp, Homo sapien
tcttttgggcacttccctccattgg

SEQ ID NO: 2257402 - DNA, 25 bp, Homo sapien
ggatcttgcagacgaatgtcctctc

SEQ ID NO: 2257403 - DNA, 25 bp, Homo sapien
cctccattggaggaacggatcttgc

SEQ ID NO: 2257404 - DNA, 25 bp, Homo sapien
cttcatagctgccattccacggttt

SEQ ID NO: 2257405 - DNA, 25 bp, Homo sapien
ccccaacctgggcagatgaattcat

SEQ ID NO: 2257406 - DNA, 25 bp, Homo sapien
cattccacggttttcctctttctgt

SEQ ID NO: 2257407 - DNA, 25 bp, Homo sapien
ctgtgagctgaggttcttacttacc

SEQ ID NO: 2257408 - DNA, 25 bp, Homo sapien
taaggaaatcaaggtcatttggcca

SEQ ID NO: 2257409 - DNA, 25 bp, Homo sapien
gaaatcaaggtcatttggccatttg

SEQ ID NO: 2257410 - DNA, 25 bp, Homo sapien
aatcaaggtcatttggccatttggc

SEQ ID NO: 2257411 - DNA, 25 bp, Homo sapien
tctaaggaaatcaaggtcatttggc

SEQ ID NO: 2257412 - DNA, 25 bp, Homo sapien
ccttgtgcatctgctggatatggag

SEQ ID NO: 2257413 - DNA, 25 bp, Homo sapien
cttgtgcatctgctggatatggaga

SEQ ID NO: 2257414 - DNA, 25 bp, Homo sapien
atctgctggatatggagaccaggat

SEQ ID NO: 2257415 - DNA, 25 bp, Homo sapien
tggatatggagaccaggatgttcat

SEQ ID NO: 2257416 - DNA, 25 bp, Homo sapien
cattaacgaaagtctttgcagtgga

SEQ ID NO: 2257417 - DNA, 25 bp, Homo sapien
aacgaaagtctttgcagtggaattg

SEQ ID NO: 2257418 - DNA, 25 bp, Homo sapien
cattcattaacgaaagtctttgcag

SEQ ID NO: 2257419 - DNA, 25 bp, Homo sapien
aaagtctttgcagtggaattgcaga

SEQ ID NO: 2257420 - DNA, 25 bp, Homo sapien
tgctactacatctacagcagatggg

SEQ ID NO: 2257421 - DNA, 25 bp, Homo sapien
gatttgatggccaactgagggttat

SEQ ID NO: 2257422 - DNA, 25 bp, Homo sapien
gagagtatcaccattgtaggctgag

SEQ ID NO: 2257423 - DNA, 25 bp, Homo sapien
caattccagttgaaagagcttctcc

SEQ ID NO: 2257424 - DNA, 25 bp, Homo sapien
atttgtggttgtatgtctgtgaatt

SEQ ID NO: 2257425 - DNA, 25 bp, Homo sapien
cctcctttggatttttgtagtggtg

SEQ ID NO: 2257426 - DNA, 25 bp, Homo sapien
tctgtgggcattggtaaggagcatc

SEQ ID NO: 2257427 - DNA, 25 bp, Homo sapien
gatgctgtgctacagtctgtgggca

SEQ ID NO: 2257428 - DNA, 25 bp, Homo sapien
tggtggtggttgctcatctcgatgc

SEQ ID NO: 2257429 - DNA, 25 bp, Homo sapien
gatgattccaagcatagctctctcc

SEQ ID NO: 2257430 - DNA, 25 bp, Homo sapien
acatgcgtgcatgctccggatgatt

SEQ ID NO: 2257431 - DNA, 25 bp, Homo sapien
gggagcagaccacagagaagtctct

SEQ ID NO: 2257432 - DNA, 25 bp, Homo sapien
gcagaccacagagaagtctcttgca

SEQ ID NO: 2257433 - DNA, 25 bp, Homo sapien
ggccccaagtggacagttttctgta

SEQ ID NO: 2257434 - DNA, 25 bp, Homo sapien
ggccataggccccaagtggacagtt

SEQ ID NO: 2257435 - DNA, 25 bp, Homo sapien
cccaagtggacagttttctgtagag

SEQ ID NO: 2257436 - DNA, 25 bp, Homo sapien
cataggccccaagtggacagttttc

SEQ ID NO: 2257437 - DNA, 25 bp, Homo sapien
ggattcctttcctgtaataggcact

SEQ ID NO: 2257438 - DNA, 25 bp, Homo sapien
caggagtttggatgcagtagccggc

SEQ ID NO: 2257439 - DNA, 25 bp, Homo sapien
ttggctactgtacttgagctattgt

SEQ ID NO: 2257440 - DNA, 25 bp, Homo sapien
gttgttgtctatggattcctttcct

SEQ ID NO: 2257441 - DNA, 25 bp, Homo sapien
aggatgtcctgaacccaggatgagc

SEQ ID NO: 2257442 - DNA, 25 bp, Homo sapien
ggatgtcctgaacccaggatgagct

SEQ ID NO: 2257443 - DNA, 25 bp, Homo sapien
caggatgtcctgaacccaggatgag

SEQ ID NO: 2257444 - DNA, 25 bp, Homo sapien
ctcaaggtataacatagtactggcc

SEQ ID NO: 2257445 - DNA, 25 bp, Homo sapien
caaggtataacatagtactggccgc

SEQ ID NO: 2257446 - DNA, 25 bp, Homo sapien
aaggtataacatagtactggccgcc

SEQ ID NO: 2257447 - DNA, 25 bp, Homo sapien
ggtataacatagtactggccgccat

SEQ ID NO: 2257448 - DNA, 25 bp, Homo sapien
tcatcctttatgcatcacagtgtgt

SEQ ID NO: 2257449 - DNA, 25 bp, Homo sapien
tgaagaaaggattatagaggcatct

SEQ ID NO: 2257450 - DNA, 25 bp, Homo sapien
tttgaaatttagaatccaagaggaa

SEQ ID NO: 2257451 - DNA, 25 bp, Homo sapien
aaggattatagaggcatctgaaagc

SEQ ID NO: 2257452 - DNA, 25 bp, Homo sapien
gaggccctctttgtttcagctgctg

SEQ ID NO: 2257453 - DNA, 25 bp, Homo sapien
tcagtaactcccatcagttcctgca

SEQ ID NO: 2257454 - DNA, 25 bp, Homo sapien
tctcatcacatctgaaggatgttgt

SEQ ID NO: 2257455 - DNA, 25 bp, Homo sapien
tgtgcttcgcatggtaatgaggccc

SEQ ID NO: 2257456 - DNA, 25 bp, Homo sapien
tgatggtagcgtgtggagggtctct

SEQ ID NO: 2257457 - DNA, 25 bp, Homo sapien
tgtgatggtagcgtgtggagggtct

SEQ ID NO: 2257458 - DNA, 25 bp, Homo sapien
gaaaacagcttgcttattacttggt

SEQ ID NO: 2257459 - DNA, 25 bp, Homo sapien
cagcttgcttattacttggttgggt

SEQ ID NO: 2257460 - DNA, 25 bp, Homo sapien
aatatgatcaccacataaactggat

SEQ ID NO: 2257461 - DNA, 25 bp, Homo sapien
cataaattggtattctagaaattcc

SEQ ID NO: 2257462 - DNA, 25 bp, Homo sapien
tccaggatagccctgatttcaattc

SEQ ID NO: 2257463 - DNA, 25 bp, Homo sapien
tattaaagttattgtcagagccatg

SEQ ID NO: 2257464 - DNA, 25 bp, Homo sapien
ggagctggcgaggattcagttccca

SEQ ID NO: 2257465 - DNA, 25 bp, Homo sapien
gctggcgaggattcagttcccatgc

SEQ ID NO: 2257466 - DNA, 25 bp, Homo sapien
caaagaagagcaattgtaactctgt

SEQ ID NO: 2257467 - DNA, 25 bp, Homo sapien
tttaggatcatcactgtcaaagaag

SEQ ID NO: 2257468 - DNA, 25 bp, Homo sapien
aatgtaatcactgaagagatgtcct

SEQ ID NO: 2257469 - DNA, 25 bp, Homo sapien
gattgggctttcatctttcaaggca

SEQ ID NO: 2257470 - DNA, 25 bp, Homo sapien
caatgtcgatgtaacggcagtgctc

SEQ ID NO: 2257471 - DNA, 25 bp, Homo sapien
taataatcgtccttgcaagaggcct

SEQ ID NO: 2257472 - DNA, 25 bp, Homo sapien
actgttcttaccagagcaggcagga

SEQ ID NO: 2257473 - DNA, 25 bp, Homo sapien
tgctgccgcccactatgtggaacat

SEQ ID NO: 2257474 - DNA, 25 bp, Homo sapien
actgctgccgcccactatgtggaac

SEQ ID NO: 2257475 - DNA, 25 bp, Homo sapien
ctgctgccgcccactatgtggaaca

SEQ ID NO: 2257476 - DNA, 25 bp, Homo sapien
tcactgctgccgcccactatgtgga

SEQ ID NO: 2257477 - DNA, 25 bp, Homo sapien
ggtaagagcgagaaatgacacccat

SEQ ID NO: 2257478 - DNA, 25 bp, Homo sapien
gaaatggaccgtgagagcttgcttg

SEQ ID NO: 2257479 - DNA, 25 bp, Homo sapien
cgcatgcagctccaatcgtttagat

SEQ ID NO: 2257480 - DNA, 25 bp, Homo sapien
tgaatcaaacctgacgttcagtggg

SEQ ID NO: 2257481 - DNA, 25 bp, Homo sapien
tcttgttctcatgggaatctaatcc

SEQ ID NO: 2257482 - DNA, 25 bp, Homo sapien
tgattatcaaaatgccgtatttcag

SEQ ID NO: 2257483 - DNA, 25 bp, Homo sapien
cccttaaatttgtctggttcacaga

SEQ ID NO: 2257484 - DNA, 25 bp, Homo sapien
gcagcagccgatcaaatacggcctt

SEQ ID NO: 2257485 - DNA, 25 bp, Homo sapien
tagggtgggaacaatgctaggaatc

SEQ ID NO: 2257486 - DNA, 25 bp, Homo sapien
cattttgcagggatgcttttcactg

SEQ ID NO: 2257487 - DNA, 25 bp, Homo sapien
cactgttagttgagccttctcttgc

SEQ ID NO: 2257488 - DNA, 25 bp, Homo sapien
caatgctaggaatccgggtagcagt

SEQ ID NO: 2257489 - DNA, 25 bp, Homo sapien
ctcaccatggatgcctggtatccct

SEQ ID NO: 2257490 - DNA, 25 bp, Homo sapien
ccatggatgcctggtatcccttcct

SEQ ID NO: 2257491 - DNA, 25 bp, Homo sapien
caccatggatgcctggtatcccttc

SEQ ID NO: 2257492 - DNA, 25 bp, Homo sapien
accatggatgcctggtatcccttcc

SEQ ID NO: 2257493 - DNA, 25 bp, Homo sapien
gctggtacatcacaatgccaaccac

SEQ ID NO: 2257494 - DNA, 25 bp, Homo sapien
actgtgctggtacatcacaatgcca

SEQ ID NO: 2257495 - DNA, 25 bp, Homo sapien
acactgtgctggtacatcacaatgc

SEQ ID NO: 2257496 - DNA, 25 bp, Homo sapien
tgtgctggtacatcacaatgccaac

SEQ ID NO: 2257497 - DNA, 25 bp, Homo sapien
gctttagaatgattactgaagccat

SEQ ID NO: 2257498 - DNA, 25 bp, Homo sapien
ggccgaagttatgctttagaatgat

SEQ ID NO: 2257499 - DNA, 25 bp, Homo sapien
tgttgcccttgaagaatcctaatta

SEQ ID NO: 2257500 - DNA, 25 bp, Homo sapien
taattaggggaattgcctggccgaa

SEQ ID NO: 2257501 - DNA, 25 bp, Homo sapien
tacggtctggatgtttcctcttgca

SEQ ID NO: 2257502 - DNA, 25 bp, Homo sapien
ttttctgaactctcacttggtacgg

SEQ ID NO: 2257503 - DNA, 25 bp, Homo sapien
tcctcttgcaactgtctttcaaatt

SEQ ID NO: 2257504 - DNA, 25 bp, Homo sapien
aaaggtcagaacatcggggccactc

SEQ ID NO: 2257505 - DNA, 25 bp, Homo sapien
attagctgaaacaatcttggttccc

SEQ ID NO: 2257506 - DNA, 25 bp, Homo sapien
ctaattagctgaaacaatcttggtt

SEQ ID NO: 2257507 - DNA, 25 bp, Homo sapien
gaaacaatcttggttccctctacac

SEQ ID NO: 2257508 - DNA, 25 bp, Homo sapien
tgaaacaatcttggttccctctaca

SEQ ID NO: 2257509 - DNA, 25 bp, Homo sapien
ctcattgcaagatgtatccgaggat

SEQ ID NO: 2257510 - DNA, 25 bp, Homo sapien
tgcagctgtcagattgtagctccaa

SEQ ID NO: 2257511 - DNA, 25 bp, Homo sapien
gaaaatatgccttctaactcaaaca

SEQ ID NO: 2257512 - DNA, 25 bp, Homo sapien
tctttgtaggatgcttgaggatgac

SEQ ID NO: 2257513 - DNA, 25 bp, Homo sapien
ggctcttctaggatgctatactcac

SEQ ID NO: 2257514 - DNA, 25 bp, Homo sapien
cctagagaaaggcttgaaggctctt

SEQ ID NO: 2257515 - DNA, 25 bp, Homo sapien
cttgaaggctcttctaggatgctat

SEQ ID NO: 2257516 - DNA, 25 bp, Homo sapien
taggatgctatactcaccttggctg

SEQ ID NO: 2257517 - DNA, 25 bp, Homo sapien
ccactgttggcatcatagatataaa

SEQ ID NO: 2257518 - DNA, 25 bp, Homo sapien
gccactgttggcatcatagatataa

SEQ ID NO: 2257519 - DNA, 25 bp, Homo sapien
tatggttctgtaaagagtgtggcag

SEQ ID NO: 2257520 - DNA, 25 bp, Homo sapien
gcacatatatggttctgtaaagagt

SEQ ID NO: 2257521 - DNA, 25 bp, Homo sapien
cacagcacatatatggttctgtaaa

SEQ ID NO: 2257522 - DNA, 25 bp, Homo sapien
catatatggttctgtaaagagtgtg

SEQ ID NO: 2257523 - DNA, 25 bp, Homo sapien
cagttgaagtgcctggagaaaagag

SEQ ID NO: 2257524 - DNA, 25 bp, Homo sapien
gggaccactaagtacagacttcagt

SEQ ID NO: 2257525 - DNA, 25 bp, Homo sapien
gaagtgactggacatcactggtcct

SEQ ID NO: 2257526 - DNA, 25 bp, Homo sapien
gagaaaagagtcctcatcatgttgc

SEQ ID NO: 2257527 - DNA, 25 bp, Homo sapien
cccttctgtggtgtcggctaataaa

SEQ ID NO: 2257528 - DNA, 25 bp, Homo sapien
aaccgggctccatgtctaaggcaat

SEQ ID NO: 2257529 - DNA, 25 bp, Homo sapien
gactgtacacagatcaatgggttca

SEQ ID NO: 2257530 - DNA, 25 bp, Homo sapien
ttcagcactaaactggaaccgggct

SEQ ID NO: 2257531 - DNA, 25 bp, Homo sapien
tgtccttcctgcgatactccactgt

SEQ ID NO: 2257532 - DNA, 25 bp, Homo sapien
ggaaaggcatcttgatcctcagaaa

SEQ ID NO: 2257533 - DNA, 25 bp, Homo sapien
gaaatctgcaggattggacacacag

SEQ ID NO: 2257534 - DNA, 25 bp, Homo sapien
agcagccagtttcagaaccctcaca

SEQ ID NO: 2257535 - DNA, 25 bp, Homo sapien
ccctctgcctgatattcgaagtcaa

SEQ ID NO: 2257536 - DNA, 25 bp, Homo sapien
ccaaccctctgcctgatattcgaag

SEQ ID NO: 2257537 - DNA, 25 bp, Homo sapien
tctgcctgatattcgaagtcaatca

SEQ ID NO: 2257538 - DNA, 25 bp, Homo sapien
aaccctctgcctgatattcgaagtc

SEQ ID NO: 2257539 - DNA, 25 bp, Homo sapien
tggaaaagagcacctcgcattcact

SEQ ID NO: 2257540 - DNA, 25 bp, Homo sapien
ttatcaaagcaggaaagccgtggaa

SEQ ID NO: 2257541 - DNA, 25 bp, Homo sapien
tagcagcgcactcggtaatattcca

SEQ ID NO: 2257542 - DNA, 25 bp, Homo sapien
taatcaagtgtcaagttagcagcgc

SEQ ID NO: 2257543 - DNA, 25 bp, Homo sapien
gagacatggtcattaactcgacctg

SEQ ID NO: 2257544 - DNA, 25 bp, Homo sapien
tattccctctgagactgtgtggcag

SEQ ID NO: 2257545 - DNA, 25 bp, Homo sapien
tcgacctgaatacctctgattgctt

SEQ ID NO: 2257546 - DNA, 25 bp, Homo sapien
tttgagacagccactgcaccagtgt

SEQ ID NO: 2257547 - DNA, 25 bp, Homo sapien
ttctaaatcaagtgtctgtgataca

SEQ ID NO: 2257548 - DNA, 25 bp, Homo sapien
caagattgtgccaaagtctcgggaa

SEQ ID NO: 2257549 - DNA, 25 bp, Homo sapien
gcactgacgagtttacctggcccaa

SEQ ID NO: 2257550 - DNA, 25 bp, Homo sapien
aaagaaagtgtggagcttcatgacc

SEQ ID NO: 2257551 - DNA, 25 bp, Homo sapien
cctttggctcccgagaagaagaagt

SEQ ID NO: 2257552 - DNA, 25 bp, Homo sapien
gcacagtgccatgagtgtgagttgt

SEQ ID NO: 2257553 - DNA, 25 bp, Homo sapien
cactggggatgtaacttccgagagc

SEQ ID NO: 2257554 - DNA, 25 bp, Homo sapien
gggatgtaacttccgagagcaggtc

SEQ ID NO: 2257555 - DNA, 25 bp, Homo sapien
cactggactcccgaaaatgctgact

SEQ ID NO: 2257556 - DNA, 25 bp, Homo sapien
ccttttgttgtataaggctgtggaa

SEQ ID NO: 2257557 - DNA, 25 bp, Homo sapien
gttgtactccaatggctgaagccat

SEQ ID NO: 2257558 - DNA, 25 bp, Homo sapien
ggctgtggaagttgtactccaatgg

SEQ ID NO: 2257559 - DNA, 25 bp, Homo sapien
ggccttttgttgtataaggctgtgg

SEQ ID NO: 2257560 - DNA, 25 bp, Homo sapien
catcccggaggttgaagttggagtt

SEQ ID NO: 2257561 - DNA, 25 bp, Homo sapien
tgtttcatgcaaatttgcatcccgg

SEQ ID NO: 2257562 - DNA, 25 bp, Homo sapien
tggaaagatactcttctagcatatc

SEQ ID NO: 2257563 - DNA, 25 bp, Homo sapien
tgtctgcattggaaagatactcttc

SEQ ID NO: 2257564 - DNA, 25 bp, Homo sapien
agccctctttaccaaaatcatcaca

SEQ ID NO: 2257565 - DNA, 25 bp, Homo sapien
gccctctttaccaaaatcatcacat

SEQ ID NO: 2257566 - DNA, 25 bp, Homo sapien
aagccctctttaccaaaatcatcac

SEQ ID NO: 2257567 - DNA, 25 bp, Homo sapien
gaagccagctgtcatattcggaggg

SEQ ID NO: 2257568 - DNA, 25 bp, Homo sapien
cactcatgtggctacgaaagtgtct

SEQ ID NO: 2257569 - DNA, 25 bp, Homo sapien
ttgtcctgcatcactcatgtggcta

SEQ ID NO: 2257570 - DNA, 25 bp, Homo sapien
cggagggaatttcagatgctttacc

SEQ ID NO: 2257571 - DNA, 25 bp, Homo sapien
acaccatgtcgctggaccattgtgg

SEQ ID NO: 2257572 - DNA, 25 bp, Homo sapien
caccatgtcgctggaccattgtggc

SEQ ID NO: 2257573 - DNA, 25 bp, Homo sapien
caacaccatgtcgctggaccattgt

SEQ ID NO: 2257574 - DNA, 25 bp, Homo sapien
aacaccatgtcgctggaccattgtg

SEQ ID NO: 2257575 - DNA, 25 bp, Homo sapien
caagcatgctcgtcttgtcagaatt

SEQ ID NO: 2257576 - DNA, 25 bp, Homo sapien
ctgtcactgttcttaacaagcatgc

SEQ ID NO: 2257577 - DNA, 25 bp, Homo sapien
gatccaccaactgtcactgttctta

SEQ ID NO: 2257578 - DNA, 25 bp, Homo sapien
tgggtgcagatttccaacattcatg

SEQ ID NO: 2257579 - DNA, 25 bp, Homo sapien
ggacagcacaagcaataatttcggg

SEQ ID NO: 2257580 - DNA, 25 bp, Homo sapien
gcacaagcaataatttcgggtcaca

SEQ ID NO: 2257581 - DNA, 25 bp, Homo sapien
caataatttcgggtcacaataatgt

SEQ ID NO: 2257582 - DNA, 25 bp, Homo sapien
caagcaataatttcgggtcacaata

SEQ ID NO: 2257583 - DNA, 25 bp, Homo sapien
tgctctagaaaaaacatcccacagg

SEQ ID NO: 2257584 - DNA, 25 bp, Homo sapien
ttctccagcgaaggaatttcctttc

SEQ ID NO: 2257585 - DNA, 25 bp, Homo sapien
gttagctcaaaccacaatgcacttg

SEQ ID NO: 2257586 - DNA, 25 bp, Homo sapien
caggagataatggtgcttctagtgc

SEQ ID NO: 2257587 - DNA, 25 bp, Homo sapien
tggatccttgaatatggccaaattt

SEQ ID NO: 2257588 - DNA, 25 bp, Homo sapien
gaatatggccaaatttctgggccca

SEQ ID NO: 2257589 - DNA, 25 bp, Homo sapien
tggccaaatttctgggcccatagcc

SEQ ID NO: 2257590 - DNA, 25 bp, Homo sapien
cttgaatatggccaaatttctgggc

SEQ ID NO: 2257591 - DNA, 25 bp, Homo sapien
tcttttgactatagctgcagctgcc

SEQ ID NO: 2257592 - DNA, 25 bp, Homo sapien
ttcttttgactatagctgcagctgc

SEQ ID NO: 2257593 - DNA, 25 bp, Homo sapien
ccaacgtcctgatgggtgaggtgca

SEQ ID NO: 2257594 - DNA, 25 bp, Homo sapien
cagagagccccaacgtcctgatggg

SEQ ID NO: 2257595 - DNA, 25 bp, Homo sapien
aagatgacgtaaggtttcctggcca

SEQ ID NO: 2257596 - DNA, 25 bp, Homo sapien
ctaagccctgctccccacgtagcat

SEQ ID NO: 2257597 - DNA, 25 bp, Homo sapien
tccaagcactcctggaagacctaag

SEQ ID NO: 2257598 - DNA, 25 bp, Homo sapien
agcactcctggaagacctaagccct

SEQ ID NO: 2257599 - DNA, 25 bp, Homo sapien
atacccaagtctgaggcctttcgtt

SEQ ID NO: 2257600 - DNA, 25 bp, Homo sapien
ggcctttcgtttgtgctcatcccta

SEQ ID NO: 2257601 - DNA, 25 bp, Homo sapien
cctgctgtaggagccgatgggtaga

SEQ ID NO: 2257602 - DNA, 25 bp, Homo sapien
tgctcatccctagctggtgcagtac

SEQ ID NO: 2257603 - DNA, 25 bp, Homo sapien
tcactcgctgtactgacaaagggct

SEQ ID NO: 2257604 - DNA, 25 bp, Homo sapien
gaagccagctgggaatagatctgcc

SEQ ID NO: 2257605 - DNA, 25 bp, Homo sapien
tgaatgtgcagagttgtagaagcca

SEQ ID NO: 2257606 - DNA, 25 bp, Homo sapien
caggctgacaagatttgaatgtgca

SEQ ID NO: 2257607 - DNA, 25 bp, Homo sapien
caaagcctttatggctccgcattaa

SEQ ID NO: 2257608 - DNA, 25 bp, Homo sapien
cggaagttcaaatgcaccaaagcct

SEQ ID NO: 2257609 - DNA, 25 bp, Homo sapien
tctcaattgatcaccagccggaagt

SEQ ID NO: 2257610 - DNA, 25 bp, Homo sapien
gtgctctcttgtatagaaagctggg

SEQ ID NO: 2257611 - DNA, 25 bp, Homo sapien
gaacactctgctgatttgctatcac

SEQ ID NO: 2257612 - DNA, 25 bp, Homo sapien
ccttcatgagcctggttggtgtgct

SEQ ID NO: 2257613 - DNA, 25 bp, Homo sapien
tttgctatcaccttcatgagcctgg

SEQ ID NO: 2257614 - DNA, 25 bp, Homo sapien
ggcatgtgtccgtgaacactctgct

SEQ ID NO: 2257615 - DNA, 25 bp, Homo sapien
gagtcccacggtgctttcttcagag

SEQ ID NO: 2257616 - DNA, 25 bp, Homo sapien
tcaaaagttcggaaagctcccaaga

SEQ ID NO: 2257617 - DNA, 25 bp, Homo sapien
agagcccacacaaggtcagcattgc

SEQ ID NO: 2257618 - DNA, 25 bp, Homo sapien
gaagcaccactgctcttcgtaagag

SEQ ID NO: 2257619 - DNA, 25 bp, Homo sapien
caagtccagtactacatctgctgag

SEQ ID NO: 2257620 - DNA, 25 bp, Homo sapien
gaatactcatcagtcttaggtggga

SEQ ID NO: 2257621 - DNA, 25 bp, Homo sapien
gagttttctgcatgcaatctcccaa

SEQ ID NO: 2257622 - DNA, 25 bp, Homo sapien
tgctaaggcaagctcctccatggga

SEQ ID NO: 2257623 - DNA, 25 bp, Homo sapien
taggaggacggtagtgagattctca

SEQ ID NO: 2257624 - DNA, 25 bp, Homo sapien
tgcctgtgcgggaaagcttggtcca

SEQ ID NO: 2257625 - DNA, 25 bp, Homo sapien
agatgcattcagtcagggctgtaaa

SEQ ID NO: 2257626 - DNA, 25 bp, Homo sapien
ttggtccatatgtcccaatcagctg

SEQ ID NO: 2257627 - DNA, 25 bp, Homo sapien
ctatgtgactgtgaagtttaccctg

SEQ ID NO: 2257628 - DNA, 25 bp, Homo sapien
gatcacccggatgagatccatctgg

SEQ ID NO: 2257629 - DNA, 25 bp, Homo sapien
taccctgaagggttatgcatgacag

SEQ ID NO: 2257630 - DNA, 25 bp, Homo sapien
ttatgcatgacaggggatcacccgg

SEQ ID NO: 2257631 - DNA, 25 bp, Homo sapien
ttagcttgtaggggtggcaggcagg

SEQ ID NO: 2257632 - DNA, 25 bp, Homo sapien
gcaggcagggttggggcaggcgtca

SEQ ID NO: 2257633 - DNA, 25 bp, Homo sapien
cagggttggggcaggcgtcacagac

SEQ ID NO: 2257634 - DNA, 25 bp, Homo sapien
aggcagggttggggcaggcgtcaca

SEQ ID NO: 2257635 - DNA, 25 bp, Homo sapien
ctgatggagctactgattgaattac

SEQ ID NO: 2257636 - DNA, 25 bp, Homo sapien
cctgtggccaccgttaagagtttct

SEQ ID NO: 2257637 - DNA, 25 bp, Homo sapien
gcttccctttctgatggagctactg

SEQ ID NO: 2257638 - DNA, 25 bp, Homo sapien
tgtggccaccgttaagagtttctgg

SEQ ID NO: 2257639 - DNA, 25 bp, Homo sapien
tcttcctttgtagacaatttaatct

SEQ ID NO: 2257640 - DNA, 25 bp, Homo sapien
tgtagacaatttaatcttggttttg

SEQ ID NO: 2257641 - DNA, 25 bp, Homo sapien
cctttgtagacaatttaatcttggt

SEQ ID NO: 2257642 - DNA, 25 bp, Homo sapien
cactgtcttcctttgtagacaattt

SEQ ID NO: 2257643 - DNA, 25 bp, Homo sapien
ccttttggtctcctaacttgttgat

SEQ ID NO: 2257644 - DNA, 25 bp, Homo sapien
tgtaataatatctccaagggtctgc

SEQ ID NO: 2257645 - DNA, 25 bp, Homo sapien
tagcacctcatcacctcttgttggg

SEQ ID NO: 2257646 - DNA, 25 bp, Homo sapien
catcagatgctattatgtcccgttg

SEQ ID NO: 2257647 - DNA, 25 bp, Homo sapien
caggctttgaaccatatttggaccc

SEQ ID NO: 2257648 - DNA, 25 bp, Homo sapien
ggagaggctccagggttaacagtta

SEQ ID NO: 2257649 - DNA, 25 bp, Homo sapien
agaggctccagggttaacagttaag

SEQ ID NO: 2257650 - DNA, 25 bp, Homo sapien
tggagaggctccagggttaacagtt

SEQ ID NO: 2257651 - DNA, 25 bp, Homo sapien
ctggagaggctccagggttaacagt

SEQ ID NO: 2257652 - DNA, 25 bp, Homo sapien
tagtaagctaaaccaattgtaggct

SEQ ID NO: 2257653 - DNA, 25 bp, Homo sapien
tccaatgagttatgagattttccac

SEQ ID NO: 2257654 - DNA, 25 bp, Homo sapien
cactatggctcttgagaacaagcac

SEQ ID NO: 2257655 - DNA, 25 bp, Homo sapien
tgtatggacaccatggatagttcca

SEQ ID NO: 2257656 - DNA, 25 bp, Homo sapien
ttgagaagtccgatgtggatggaat

SEQ ID NO: 2257657 - DNA, 25 bp, Homo sapien
tttcataagtaattggccctggtca

SEQ ID NO: 2257658 - DNA, 25 bp, Homo sapien
tcataagtaattggccctggtcaaa

SEQ ID NO: 2257659 - DNA, 25 bp, Homo sapien
tatctttgtagaccttgtaaacact

SEQ ID NO: 2257660 - DNA, 25 bp, Homo sapien
tctttgtagaccttgtaaacactca

SEQ ID NO: 2257661 - DNA, 25 bp, Homo sapien
ttcagagtcagagaatttgaggagg

SEQ ID NO: 2257662 - DNA, 25 bp, Homo sapien
caggaatgccccaccattgaatgag

SEQ ID NO: 2257663 - DNA, 25 bp, Homo sapien
gaagtgcttcttaaccaaccattgg

SEQ ID NO: 2257664 - DNA, 25 bp, Homo sapien
cattgggcatcactctggctatggc

SEQ ID NO: 2257665 - DNA, 25 bp, Homo sapien
atagtttcaagcagtccaatggccc

SEQ ID NO: 2257666 - DNA, 25 bp, Homo sapien
aaatggtcaacatcaggcttgctgc

SEQ ID NO: 2257667 - DNA, 25 bp, Homo sapien
cagtaaggctttcatgagccagagc

SEQ ID NO: 2257668 - DNA, 25 bp, Homo sapien
tcttctgagtgtgtaaatggtcaac

SEQ ID NO: 2257669 - DNA, 25 bp, Homo sapien
ggacccataaattgtgctcgtgccc

SEQ ID NO: 2257670 - DNA, 25 bp, Homo sapien
gagcatgtcctctcaagcaagattt

SEQ ID NO: 2257671 - DNA, 25 bp, Homo sapien
tagttgaatagctttgggtggcaga

SEQ ID NO: 2257672 - DNA, 25 bp, Homo sapien
gatgatgacagctacttgagcatgt

SEQ ID NO: 2257673 - DNA, 25 bp, Homo sapien
tgcctttctggctggtccctatgta

SEQ ID NO: 2257674 - DNA, 25 bp, Homo sapien
atgaagtccttctacagcaacagtg

SEQ ID NO: 2257675 - DNA, 25 bp, Homo sapien
aagtccttctacagcaacagtgagg

SEQ ID NO: 2257676 - DNA, 25 bp, Homo sapien
gaagtccttctacagcaacagtgag

SEQ ID NO: 2257677 - DNA, 25 bp, Homo sapien
tgaagtccttctacagcaacagtga

SEQ ID NO: 2257678 - DNA, 25 bp, Homo sapien
ctcctagacgtttgtaattgatcag

SEQ ID NO: 2257679 - DNA, 25 bp, Homo sapien
ctgactcctagacgtttgtaattga

SEQ ID NO: 2257680 - DNA, 25 bp, Homo sapien
taattgatcaggacacactgtaatg

SEQ ID NO: 2257681 - DNA, 25 bp, Homo sapien
gacgtttgtaattgatcaggacaca

SEQ ID NO: 2257682 - DNA, 25 bp, Homo sapien
tctactggtgaatagctcatttcca

SEQ ID NO: 2257683 - DNA, 25 bp, Homo sapien
tttccatagggcctccatatactgg

SEQ ID NO: 2257684 - DNA, 25 bp, Homo sapien
caggtttttcgccagtttcatgccc

SEQ ID NO: 2257685 - DNA, 25 bp, Homo sapien
ccctttttaaggactgacccatgca

SEQ ID NO: 2257686 - DNA, 25 bp, Homo sapien
tctccagcagccatagaaagggtgt

SEQ ID NO: 2257687 - DNA, 25 bp, Homo sapien
taacccctgttgtagattgctcagg

SEQ ID NO: 2257688 - DNA, 25 bp, Homo sapien
tgcctagcatagagggagcatttga

SEQ ID NO: 2257689 - DNA, 25 bp, Homo sapien
caagtaccctaggttgcctactatg

SEQ ID NO: 2257690 - DNA, 25 bp, Homo sapien
gagttttgcgctttgtgacactgtt

SEQ ID NO: 2257691 - DNA, 25 bp, Homo sapien
tctagtggctgtagaggagttttgc

SEQ ID NO: 2257692 - DNA, 25 bp, Homo sapien
aatttttgcatctgtctagtggctg

SEQ ID NO: 2257693 - DNA, 25 bp, Homo sapien
gattcagagcattttgatttaggga

SEQ ID NO: 2257694 - DNA, 25 bp, Homo sapien
gactgactctggtgcctgtctttcc

SEQ ID NO: 2257695 - DNA, 25 bp, Homo sapien
gaaacgtgctcggaactcagtctcc

SEQ ID NO: 2257696 - DNA, 25 bp, Homo sapien
gacagcccttcctgcataagaagcc

SEQ ID NO: 2257697 - DNA, 25 bp, Homo sapien
tgccacccctctatttgctttctga

SEQ ID NO: 2257698 - DNA, 25 bp, Homo sapien
ccaaaagctctggtctcagctgcat

SEQ ID NO: 2257699 - DNA, 25 bp, Homo sapien
ctaggagaaccaaaagctctggtct

SEQ ID NO: 2257700 - DNA, 25 bp, Homo sapien
taggagaaccaaaagctctggtctc

SEQ ID NO: 2257701 - DNA, 25 bp, Homo sapien
gagaaccaaaagctctggtctcagc

SEQ ID NO: 2257702 - DNA, 25 bp, Homo sapien
cttggagcttagtttcccagagagc

SEQ ID NO: 2257703 - DNA, 25 bp, Homo sapien
ttattttaaaatgacctcctctagc

SEQ ID NO: 2257704 - DNA, 25 bp, Homo sapien
cccagagagctttcacttcagtgct

SEQ ID NO: 2257705 - DNA, 25 bp, Homo sapien
cagagagctttcacttcagtgctgg

SEQ ID NO: 2257706 - DNA, 25 bp, Homo sapien
ggggccactagcatgccagcagcca

SEQ ID NO: 2257707 - DNA, 25 bp, Homo sapien
gattggctaggccacaatcccacaa

SEQ ID NO: 2257708 - DNA, 25 bp, Homo sapien
gctgtagacacacgggggccactag

SEQ ID NO: 2257709 - DNA, 25 bp, Homo sapien
caaagagattggctaggccacaatc

SEQ ID NO: 2257710 - DNA, 25 bp, Homo sapien
cctctcatgcagcagttcagttgta

SEQ ID NO: 2257711 - DNA, 25 bp, Homo sapien
gcataaggaattgcccatctctggg

SEQ ID NO: 2257712 - DNA, 25 bp, Homo sapien
cagcagttcagttgtagcaccagca

SEQ ID NO: 2257713 - DNA, 25 bp, Homo sapien
tagcaccagcataaggaattgccca

SEQ ID NO: 2257714 - DNA, 25 bp, Homo sapien
cttgccggctctcaaagacttctgc

SEQ ID NO: 2257715 - DNA, 25 bp, Homo sapien
gccggctctcaaagacttctgctct

SEQ ID NO: 2257716 - DNA, 25 bp, Homo sapien
gctctcaaagacttctgctctctgc

SEQ ID NO: 2257717 - DNA, 25 bp, Homo sapien
tgctctcctgtactatccaaatcat

SEQ ID NO: 2257718 - DNA, 25 bp, Homo sapien
aattgtccttcaatggactggcagg

SEQ ID NO: 2257719 - DNA, 25 bp, Homo sapien
tcaccaacaggcataacggcatggc

SEQ ID NO: 2257720 - DNA, 25 bp, Homo sapien
cggcatggccaggaacgtcaaacta

SEQ ID NO: 2257721 - DNA, 25 bp, Homo sapien
tagaaaccacctcgaagatactaaa

SEQ ID NO: 2257722 - DNA, 25 bp, Homo sapien
cacaggagacttgcttctgaggtcc

SEQ ID NO: 2257723 - DNA, 25 bp, Homo sapien
tctgaggtccgtggcattgatctta

SEQ ID NO: 2257724 - DNA, 25 bp, Homo sapien
aatcctcaaggcttcgctcagacca

SEQ ID NO: 2257725 - DNA, 25 bp, Homo sapien
gctcagaccagagatcagtgcttct

SEQ ID NO: 2257726 - DNA, 25 bp, Homo sapien
gatgaggcaacgtttcctgaagctt

SEQ ID NO: 2257727 - DNA, 25 bp, Homo sapien
gaaggagaaacatcgtataggcact

SEQ ID NO: 2257728 - DNA, 25 bp, Homo sapien
gaaagccccaccttgaaagtagatg

SEQ ID NO: 2257729 - DNA, 25 bp, Homo sapien
taggcactttaatgagaaagcccca

SEQ ID NO: 2257730 - DNA, 25 bp, Homo sapien
gccgcagagtacacaccagaggaat

SEQ ID NO: 2257731 - DNA, 25 bp, Homo sapien
ggaccgacacaaaattccactgaga

SEQ ID NO: 2257732 - DNA, 25 bp, Homo sapien
cagctgcttagatggccgcagagta

SEQ ID NO: 2257733 - DNA, 25 bp, Homo sapien
tctatatcgtaaagagctcggaccg

SEQ ID NO: 2257734 - DNA, 25 bp, Homo sapien
gcaggcaggctagtcatcactctgg

SEQ ID NO: 2257735 - DNA, 25 bp, Homo sapien
ggagtccagtgagcaagaccagggc

SEQ ID NO: 2257736 - DNA, 25 bp, Homo sapien
agggcaggcaggctagtcatcactc

SEQ ID NO: 2257737 - DNA, 25 bp, Homo sapien
gagggagtccagtgagcaagaccag

SEQ ID NO: 2257738 - DNA, 25 bp, Homo sapien
ctgtttgtctgatgcccaggggcct

SEQ ID NO: 2257739 - DNA, 25 bp, Homo sapien
tgtttgtctgatgcccaggggcctc

SEQ ID NO: 2257740 - DNA, 25 bp, Homo sapien
ggcctcttggcaacataagcagctt

SEQ ID NO: 2257741 - DNA, 25 bp, Homo sapien
ccaggggcctcttggcaacataagc

SEQ ID NO: 2257742 - DNA, 25 bp, Homo sapien
tctggattttgcctcaagctttctg

SEQ ID NO: 2257743 - DNA, 25 bp, Homo sapien
tgactataaccttgggcctgtctct

SEQ ID NO: 2257744 - DNA, 25 bp, Homo sapien
aatacccttgtgactcttgccttcc

SEQ ID NO: 2257745 - DNA, 25 bp, Homo sapien
gcctgtctctggaccttcgactggg

SEQ ID NO: 2257746 - DNA, 25 bp, Homo sapien
ggaggcgttgctcttccaagggctc

SEQ ID NO: 2257747 - DNA, 25 bp, Homo sapien
taaggtagagcaaatggctagtggt

SEQ ID NO: 2257748 - DNA, 25 bp, Homo sapien
tagagcaaatggctagtggttccag

SEQ ID NO: 2257749 - DNA, 25 bp, Homo sapien
ggccttgcccacaggaggcgttgct

SEQ ID NO: 2257750 - DNA, 25 bp, Homo sapien
tgctagtggccgattcttggctctt

SEQ ID NO: 2257751 - DNA, 25 bp, Homo sapien
tagtggccgattcttggctcttttc

SEQ ID NO: 2257752 - DNA, 25 bp, Homo sapien
atctttgctagtggccgattcttgg

SEQ ID NO: 2257753 - DNA, 25 bp, Homo sapien
ctactcaatctttgctagtggccga

SEQ ID NO: 2257754 - DNA, 25 bp, Homo sapien
gaagcagtcgttttatcaccctctg

SEQ ID NO: 2257755 - DNA, 25 bp, Homo sapien
actcccatgaagcagtcgttttatc

SEQ ID NO: 2257756 - DNA, 25 bp, Homo sapien
aatttctgtactagtactagacgat

SEQ ID NO: 2257757 - DNA, 25 bp, Homo sapien
tctgtactagtactagacgattttt

SEQ ID NO: 2257758 - DNA, 25 bp, Homo sapien
accttgtgttcgaggaaggagatag

SEQ ID NO: 2257759 - DNA, 25 bp, Homo sapien
tgaaagggcaatagagtgatcacaa

SEQ ID NO: 2257760 - DNA, 25 bp, Homo sapien
gaaggagataggcactgaatgagaa

SEQ ID NO: 2257761 - DNA, 25 bp, Homo sapien
tagagtgatcacaaaaggaccttgt

SEQ ID NO: 2257762 - DNA, 25 bp, Homo sapien
ttctgtgcttgggtttgattgctcc

SEQ ID NO: 2257763 - DNA, 25 bp, Homo sapien
tcttcccttttgtgcttgagattaa

SEQ ID NO: 2257764 - DNA, 25 bp, Homo sapien
ataactttgctagatcccttcaact

SEQ ID NO: 2257765 - DNA, 25 bp, Homo sapien
ctggccctgggttgacaggatttct

SEQ ID NO: 2257766 - DNA, 25 bp, Homo sapien
ccccatcagaggataaggactatca

SEQ ID NO: 2257767 - DNA, 25 bp, Homo sapien
gcctgggccgtcacattactcagag

SEQ ID NO: 2257768 - DNA, 25 bp, Homo sapien
ggtgattagcaccatacatgacagt

SEQ ID NO: 2257769 - DNA, 25 bp, Homo sapien
aagtacctgagggttggctcccagc

SEQ ID NO: 2257770 - DNA, 25 bp, Homo sapien
gagtttatacccaaagcgcttcaca

SEQ ID NO: 2257771 - DNA, 25 bp, Homo sapien
cgcttcacacagtaaggtatggaca

SEQ ID NO: 2257772 - DNA, 25 bp, Homo sapien
cctgacaggcggcaaaagattgggc

SEQ ID NO: 2257773 - DNA, 25 bp, Homo sapien
gttccaccacaacgggctatgccta

SEQ ID NO: 2257774 - DNA, 25 bp, Homo sapien
ttgacaacttggcactgagagacta

SEQ ID NO: 2257775 - DNA, 25 bp, Homo sapien
gatgcccaactatcgtacaaagaga

SEQ ID NO: 2257776 - DNA, 25 bp, Homo sapien
ttcacacaagtggaaatacagatgc

SEQ ID NO: 2257777 - DNA, 25 bp, Homo sapien
tacaaagagaaccatgatcaaggtc

SEQ ID NO: 2257778 - DNA, 25 bp, Homo sapien
tacaaataaagtgacgggaggacca

SEQ ID NO: 2257779 - DNA, 25 bp, Homo sapien
gaaaccatcgaccaaagcaagcgga

SEQ ID NO: 2257780 - DNA, 25 bp, Homo sapien
tctgtctagacccagtagtaggcac

SEQ ID NO: 2257781 - DNA, 25 bp, Homo sapien
taaaccacatgaaagaacccctgct

SEQ ID NO: 2257782 - DNA, 25 bp, Homo sapien
gattgacaatgacctaatattacac

SEQ ID NO: 2257783 - DNA, 25 bp, Homo sapien
gacacttctgatgactactgataac

SEQ ID NO: 2257784 - DNA, 25 bp, Homo sapien
tactgataactgagaagattcaaca

SEQ ID NO: 2257785 - DNA, 25 bp, Homo sapien
gaatatagaactacattctgggaga

SEQ ID NO: 2257786 - DNA, 25 bp, Homo sapien
tagatggccattgagttcaagggtc

SEQ ID NO: 2257787 - DNA, 25 bp, Homo sapien
taatcaggaacttagtgtggtgcct

SEQ ID NO: 2257788 - DNA, 25 bp, Homo sapien
tgtctgtaaccaaccatccctaaag

SEQ ID NO: 2257789 - DNA, 25 bp, Homo sapien
gagtgattcaatccacccatggata

SEQ ID NO: 2257790 - DNA, 25 bp, Homo sapien
attcagtaaataagccgtaactgtt

SEQ ID NO: 2257791 - DNA, 25 bp, Homo sapien
tattcagtaaataagccgtaactgt

SEQ ID NO: 2257792 - DNA, 25 bp, Homo sapien
gaagggagcacatcacatttgccat

SEQ ID NO: 2257793 - DNA, 25 bp, Homo sapien
tatgggtaatcacaaaacgaccagc

SEQ ID NO: 2257794 - DNA, 25 bp, Homo sapien
tgtttggattaactagccctcaggc

SEQ ID NO: 2257795 - DNA, 25 bp, Homo sapien
caggctgcttccaatattatgggta

SEQ ID NO: 2257796 - DNA, 25 bp, Homo sapien
tggctataggcaatcagttcacggg

SEQ ID NO: 2257797 - DNA, 25 bp, Homo sapien
tccactgagggatgtctgaaggccg

SEQ ID NO: 2257798 - DNA, 25 bp, Homo sapien
ggattgaagccaacccacacagtat

SEQ ID NO: 2257799 - DNA, 25 bp, Homo sapien
taaactcggcttgtcagaattccac

SEQ ID NO: 2257800 - DNA, 25 bp, Homo sapien
cacgaggctgttggcgctttttaaa

SEQ ID NO: 2257801 - DNA, 25 bp, Homo sapien
tcaattaaggctacaaccactaggt

SEQ ID NO: 2257802 - DNA, 25 bp, Homo sapien
gaacaggatattctgactcccacag

SEQ ID NO: 2257803 - DNA, 25 bp, Homo sapien
tggaaccaccgatttaataactgac

SEQ ID NO: 2257804 - DNA, 25 bp, Homo sapien
ccttactctaagctctggagcaggc

SEQ ID NO: 2257805 - DNA, 25 bp, Homo sapien
ttgtagactgtaccacagccctccc

SEQ ID NO: 2257806 - DNA, 25 bp, Homo sapien
aaggattctcctcgtctgttacggg

SEQ ID NO: 2257807 - DNA, 25 bp, Homo sapien
caaaagtgcgcatcgagggaaagga

SEQ ID NO: 2257808 - DNA, 25 bp, Homo sapien
tctttccccgcccagagtatgggag

SEQ ID NO: 2257809 - DNA, 25 bp, Homo sapien
gtccatcatcatcccacaaggctcc

SEQ ID NO: 2257810 - DNA, 25 bp, Homo sapien
gacaggggccatacttgtcaattct

SEQ ID NO: 2257811 - DNA, 25 bp, Homo sapien
agaaagcgtgtgctgaccacaaaat

SEQ ID NO: 2257812 - DNA, 25 bp, Homo sapien
tgtcaagcaatatcatttcagcata

SEQ ID NO: 2257813 - DNA, 25 bp, Homo sapien
tcaagcaatatcatttcagcatatt

SEQ ID NO: 2257814 - DNA, 25 bp, Homo sapien
gcaatatcatttcagcatattttat

SEQ ID NO: 2257815 - DNA, 25 bp, Homo sapien
aatatcatttcagcatattttatac

SEQ ID NO: 2257816 - DNA, 25 bp, Homo sapien
tgaagccgtccttccaggaacatag

SEQ ID NO: 2257817 - DNA, 25 bp, Homo sapien
taagggaaaagcttctcgcctgcct

SEQ ID NO: 2257818 - DNA, 25 bp, Homo sapien
gggaacatgggtagcaacatcaaaa

SEQ ID NO: 2257819 - DNA, 25 bp, Homo sapien
ccatcaactgtgaggcggaatcaaa

SEQ ID NO: 2257820 - DNA, 25 bp, Homo sapien
gaaactcatcacctagaagaaaaat

SEQ ID NO: 2257821 - DNA, 25 bp, Homo sapien
agtagaaactcatcacctagaagaa

SEQ ID NO: 2257822 - DNA, 25 bp, Homo sapien
gaaaaatattcacttggaattacca

SEQ ID NO: 2257823 - DNA, 25 bp, Homo sapien
cacttggaattaccacagaaagggt

SEQ ID NO: 2257824 - DNA, 25 bp, Homo sapien
caggtatttgtcctcatgaggaaac

SEQ ID NO: 2257825 - DNA, 25 bp, Homo sapien
tcaggtatttgtcctcatgaggaaa

SEQ ID NO: 2257826 - DNA, 25 bp, Homo sapien
ctaaaaggtcaaggatcgagaagcc

SEQ ID NO: 2257827 - DNA, 25 bp, Homo sapien
aatgggtaggttatcggcaggctcc

SEQ ID NO: 2257828 - DNA, 25 bp, Homo sapien
caatgattctggtgagccgttcctc

SEQ ID NO: 2257829 - DNA, 25 bp, Homo sapien
tcctaggccaccagcttagaggtca

SEQ ID NO: 2257830 - DNA, 25 bp, Homo sapien
tggcagtgcgacctcaggaatccac

SEQ ID NO: 2257831 - DNA, 25 bp, Homo sapien
tgaatactggcacgcagccttcggc

SEQ ID NO: 2257832 - DNA, 25 bp, Homo sapien
aatccactcccggaactctgactgg

SEQ ID NO: 2257833 - DNA, 25 bp, Homo sapien
agccaggcgctctgtggcattctga

SEQ ID NO: 2257834 - DNA, 25 bp, Homo sapien
ggcaaagtagctctggcggattttc

SEQ ID NO: 2257835 - DNA, 25 bp, Homo sapien
tccaaatatgacacagaggcaaagt

SEQ ID NO: 2257836 - DNA, 25 bp, Homo sapien
ggcggccgacctgtgtatccaaata

SEQ ID NO: 2257837 - DNA, 25 bp, Homo sapien
gaagatcgtccaaagcactcaagag

SEQ ID NO: 2257838 - DNA, 25 bp, Homo sapien
aaaagatatacatctagccttccag

SEQ ID NO: 2257839 - DNA, 25 bp, Homo sapien
aagagaaaagatatacatctagcct

SEQ ID NO: 2257840 - DNA, 25 bp, Homo sapien
gatatacatctagccttccagcagg

SEQ ID NO: 2257841 - DNA, 25 bp, Homo sapien
tatacatctagccttccagcaggat

SEQ ID NO: 2257842 - DNA, 25 bp, Homo sapien
gatgaagtcttcagtctgaaacctg

SEQ ID NO: 2257843 - DNA, 25 bp, Homo sapien
ctggtagatgaagtcttcagtctga

SEQ ID NO: 2257844 - DNA, 25 bp, Homo sapien
tgaaacctgtggaactttggtcctc

SEQ ID NO: 2257845 - DNA, 25 bp, Homo sapien
tcttcagtctgaaacctgtggaact

SEQ ID NO: 2257846 - DNA, 25 bp, Homo sapien
ggaaaggtgctatccactgagaaat

SEQ ID NO: 2257847 - DNA, 25 bp, Homo sapien
gaggaaaggtgctatccactgagaa

SEQ ID NO: 2257848 - DNA, 25 bp, Homo sapien
gtgctatccactgagaaatggggca

SEQ ID NO: 2257849 - DNA, 25 bp, Homo sapien
aaggtgctatccactgagaaatggg

SEQ ID NO: 2257850 - DNA, 25 bp, Homo sapien
aacaagccctcccagaaattctaag

SEQ ID NO: 2257851 - DNA, 25 bp, Homo sapien
gcttccaattgtgtaaatctgagtg

SEQ ID NO: 2257852 - DNA, 25 bp, Homo sapien
tcttccatccgctatagcttgcctg

SEQ ID NO: 2257853 - DNA, 25 bp, Homo sapien
tctgagtgggccaagactttgcatt

SEQ ID NO: 2257854 - DNA, 25 bp, Homo sapien
gctccgcccctaaatcatggcaaag

SEQ ID NO: 2257855 - DNA, 25 bp, Homo sapien
catggcaaaggaatgccggacatca

SEQ ID NO: 2257856 - DNA, 25 bp, Homo sapien
ctgagagtgacagctagccaggatg

SEQ ID NO: 2257857 - DNA, 25 bp, Homo sapien
tctaattgtgtggttgctccgcccc

SEQ ID NO: 2257858 - DNA, 25 bp, Homo sapien
cactggttgggagagtcctgatcca

SEQ ID NO: 2257859 - DNA, 25 bp, Homo sapien
cattataggtggagttgtgtctact

SEQ ID NO: 2257860 - DNA, 25 bp, Homo sapien
gtctactgagaagagtggtttcacc

SEQ ID NO: 2257861 - DNA, 25 bp, Homo sapien
tggtttcacctacgacactatgtca

SEQ ID NO: 2257862 - DNA, 25 bp, Homo sapien
cggcacactgatgtttaaggcttgg

SEQ ID NO: 2257863 - DNA, 25 bp, Homo sapien
taaggcttggacgtcttcccgttgc

SEQ ID NO: 2257864 - DNA, 25 bp, Homo sapien
gaaagtccacaggaattggaccata

SEQ ID NO: 2257865 - DNA, 25 bp, Homo sapien
taggccatcagggacctcgggatcg

SEQ ID NO: 2257866 - DNA, 25 bp, Homo sapien
catccacagggcaaagcaggttggc

SEQ ID NO: 2257867 - DNA, 25 bp, Homo sapien
gcttatgatacccaacggccaggaa

SEQ ID NO: 2257868 - DNA, 25 bp, Homo sapien
tgtttgtcaggcaaggtgccctcgg

SEQ ID NO: 2257869 - DNA, 25 bp, Homo sapien
caggaagaaaggactggctgacgtt

SEQ ID NO: 2257870 - DNA, 25 bp, Homo sapien
ccagctatacggagaatcatcggta

SEQ ID NO: 2257871 - DNA, 25 bp, Homo sapien
tacggagaatcatcggtatggttag

SEQ ID NO: 2257872 - DNA, 25 bp, Homo sapien
ggtggaaaagaccagctatacggag

SEQ ID NO: 2257873 - DNA, 25 bp, Homo sapien
tcatcggtatggttagaagatatcc

SEQ ID NO: 2257874 - DNA, 25 bp, Homo sapien
caaaagcatcgaagtgccaagtggg

SEQ ID NO: 2257875 - DNA, 25 bp, Homo sapien
cacccttaagcttagtagtttatag

SEQ ID NO: 2257876 - DNA, 25 bp, Homo sapien
gatattagataagggagccaggact

SEQ ID NO: 2257877 - DNA, 25 bp, Homo sapien
aagacagtataacagcactggaaac

SEQ ID NO: 2257878 - DNA, 25 bp, Homo sapien
acagtggtggctactgtcatcttga

SEQ ID NO: 2257879 - DNA, 25 bp, Homo sapien
gtggtggctactgtcatcttgaagc

SEQ ID NO: 2257880 - DNA, 25 bp, Homo sapien
cacacagtggtggctactgtcatct

SEQ ID NO: 2257881 - DNA, 25 bp, Homo sapien
tggtggctactgtcatcttgaagca

SEQ ID NO: 2257882 - DNA, 25 bp, Homo sapien
gctgaaaaatgtgttcccacaaggg

SEQ ID NO: 2257883 - DNA, 25 bp, Homo sapien
ctgagaaggacatggtgcttagagc

SEQ ID NO: 2257884 - DNA, 25 bp, Homo sapien
ctgcagggaaaggtttattctctga

SEQ ID NO: 2257885 - DNA, 25 bp, Homo sapien
cagggaaaggtttattctctgagaa

SEQ ID NO: 2257886 - DNA, 25 bp, Homo sapien
ggaaaggtttattctctgagaagga

SEQ ID NO: 2257887 - DNA, 25 bp, Homo sapien
cattgggcaataagtcagcaacagc

SEQ ID NO: 2257888 - DNA, 25 bp, Homo sapien
gaaaacgtggctgggttgacaagtc

SEQ ID NO: 2257889 - DNA, 25 bp, Homo sapien
taaagagagccagtttatcaggcag

SEQ ID NO: 2257890 - DNA, 25 bp, Homo sapien
tctctgggaccctatagatcctggg

SEQ ID NO: 2257891 - DNA, 25 bp, Homo sapien
cccaggatgggaatgctggattcag

SEQ ID NO: 2257892 - DNA, 25 bp, Homo sapien
tagcgagggactcgcccagccagaa

SEQ ID NO: 2257893 - DNA, 25 bp, Homo sapien
cccagactctggacatggagcagta

SEQ ID NO: 2257894 - DNA, 25 bp, Homo sapien
gaagagggctctgcaaagacagccc

SEQ ID NO: 2257895 - DNA, 25 bp, Homo sapien
aagacttttcccaccgacatggtca

SEQ ID NO: 2257896 - DNA, 25 bp, Homo sapien
gtggagaagtttccagcgtgcaccc

SEQ ID NO: 2257897 - DNA, 25 bp, Homo sapien
tcgtacaggcgggtggtgtcaggtc

SEQ ID NO: 2257898 - DNA, 25 bp, Homo sapien
ccctccagtaggagttgaagtcgta

SEQ ID NO: 2257899 - DNA, 25 bp, Homo sapien
acgcggctcggggcgcacactgctt

SEQ ID NO: 2257900 - DNA, 25 bp, Homo sapien
aaagaaacgcggctcggggcgcaca

SEQ ID NO: 2257901 - DNA, 25 bp, Homo sapien
agaaacgcggctcggggcgcacact

SEQ ID NO: 2257902 - DNA, 25 bp, Homo sapien
agtgaggaaagaaacgcggctcggg

SEQ ID NO: 2257903 - DNA, 25 bp, Homo sapien
aggcaagcgcccgttctgggagaaa

SEQ ID NO: 2257904 - DNA, 25 bp, Homo sapien
cagactatgcttccctctaacaaga

SEQ ID NO: 2257905 - DNA, 25 bp, Homo sapien
tgaaggtcaagctttcccatgagtg

SEQ ID NO: 2257906 - DNA, 25 bp, Homo sapien
tccactaccattttccagactatgc

SEQ ID NO: 2257907 - DNA, 25 bp, Homo sapien
gatgatgagaagaacgttcagagca

SEQ ID NO: 2257908 - DNA, 25 bp, Homo sapien
gccagttggtcaatatttggggacc

SEQ ID NO: 2257909 - DNA, 25 bp, Homo sapien
ggacctcaccagcttatccccataa

SEQ ID NO: 2257910 - DNA, 25 bp, Homo sapien
aggggcgcaggtcatccacgatgat

SEQ ID NO: 2257911 - DNA, 25 bp, Homo sapien
gaaatatgaatggatagaaggtaaa

SEQ ID NO: 2257912 - DNA, 25 bp, Homo sapien
tgatgtatgcaggaaaggacagatg

SEQ ID NO: 2257913 - DNA, 25 bp, Homo sapien
taaaagggacggatggaccaatgga

SEQ ID NO: 2257914 - DNA, 25 bp, Homo sapien
agggaacgaatgatggatgaaagaa

SEQ ID NO: 2257915 - DNA, 25 bp, Homo sapien
ctgtggtcgagttggcctgcgtttc

SEQ ID NO: 2257916 - DNA, 25 bp, Homo sapien
tttcggatccgagggcgacgcagac

SEQ ID NO: 2257917 - DNA, 25 bp, Homo sapien
gagttggcctgcgtttcggatccga

SEQ ID NO: 2257918 - DNA, 25 bp, Homo sapien
gacgcagacggagctcagaaccaga

SEQ ID NO: 2257919 - DNA, 25 bp, Homo sapien
gccagagaaggcctcggccggtccg

SEQ ID NO: 2257920 - DNA, 25 bp, Homo sapien
cagagaaggcctcggccggtccggg

SEQ ID NO: 2257921 - DNA, 25 bp, Homo sapien
agccagagaaggcctcggccggtcc

SEQ ID NO: 2257922 - DNA, 25 bp, Homo sapien
ccagagaaggcctcggccggtccgg

SEQ ID NO: 2257923 - DNA, 25 bp, Homo sapien
atgaagactgcgcaacacagccgcc

SEQ ID NO: 2257924 - DNA, 25 bp, Homo sapien
agcaggtggcgcagttagcagccgc

SEQ ID NO: 2257925 - DNA, 25 bp, Homo sapien
agcgcgagtgcgtccgtgcgactct

SEQ ID NO: 2257926 - DNA, 25 bp, Homo sapien
agacctcctcgtcgggaacccatga

SEQ ID NO: 2257927 - DNA, 25 bp, Homo sapien
cgggttctagaggtgcgcgtcatcc

SEQ ID NO: 2257928 - DNA, 25 bp, Homo sapien
ggtatagcgattcagccactgccct

SEQ ID NO: 2257929 - DNA, 25 bp, Homo sapien
tcatcctgcagcaataggcgtggcc

SEQ ID NO: 2257930 - DNA, 25 bp, Homo sapien
caggcccctaggtgtagaactgcta

SEQ ID NO: 2257931 - DNA, 25 bp, Homo sapien
caatgatggccgtttgggaataaag

SEQ ID NO: 2257932 - DNA, 25 bp, Homo sapien
cacttcagttctgggtggatggata

SEQ ID NO: 2257933 - DNA, 25 bp, Homo sapien
gggcttagagcaggcaaccctcatg

SEQ ID NO: 2257934 - DNA, 25 bp, Homo sapien
tcatgccaggcaatgattcagccac

SEQ ID NO: 2257935 - DNA, 25 bp, Homo sapien
tcaggcatgagtggacgcatcaaca

SEQ ID NO: 2257936 - DNA, 25 bp, Homo sapien
cagtgctcgcaagaagtcagtagtt

SEQ ID NO: 2257937 - DNA, 25 bp, Homo sapien
caaagacatgccaaattaccgtgac

SEQ ID NO: 2257938 - DNA, 25 bp, Homo sapien
cacagcctgaaataggatgccttca

SEQ ID NO: 2257939 - DNA, 25 bp, Homo sapien
gtggaatcaatgtgaaatgatattt

SEQ ID NO: 2257940 - DNA, 25 bp, Homo sapien
ctgtggaatcaatgtgaaatgatat

SEQ ID NO: 2257941 - DNA, 25 bp, Homo sapien
ggaatcaatgtgaaatgatattttt

SEQ ID NO: 2257942 - DNA, 25 bp, Homo sapien
tgtggaatcaatgtgaaatgatatt

SEQ ID NO: 2257943 - DNA, 25 bp, Homo sapien
tgagccactgctaaacttccctggg

SEQ ID NO: 2257944 - DNA, 25 bp, Homo sapien
tcagagagatgcataagggccagtg

SEQ ID NO: 2257945 - DNA, 25 bp, Homo sapien
gagttccagatcctagccttcttag

SEQ ID NO: 2257946 - DNA, 25 bp, Homo sapien
cccagatgaggcaaagctgtagcaa

SEQ ID NO: 2257947 - DNA, 25 bp, Homo sapien
tagtttacagatcgctcccacagga

SEQ ID NO: 2257948 - DNA, 25 bp, Homo sapien
catttcccatctacaggctttgagg

SEQ ID NO: 2257949 - DNA, 25 bp, Homo sapien
tggaaacctatggtctcacggcgct

SEQ ID NO: 2257950 - DNA, 25 bp, Homo sapien
cagatcaaaaaagaggcttcccgcc

SEQ ID NO: 2257951 - DNA, 25 bp, Homo sapien
caattacctggaaaccaaacttgct

SEQ ID NO: 2257952 - DNA, 25 bp, Homo sapien
aactgaaatcatatgaagcaggttc

SEQ ID NO: 2257953 - DNA, 25 bp, Homo sapien
tttttcatctgtacatactctaaga

SEQ ID NO: 2257954 - DNA, 25 bp, Homo sapien
gatcacgtgatcagccataaagcaa

SEQ ID NO: 2257955 - DNA, 25 bp, Homo sapien
tcccagcatgttagcaaggcccagt

SEQ ID NO: 2257956 - DNA, 25 bp, Homo sapien
tctgggcaaatctggcatgaagtct

SEQ ID NO: 2257957 - DNA, 25 bp, Homo sapien
catctaggtgctcaagggaagcttc

SEQ ID NO: 2257958 - DNA, 25 bp, Homo sapien
ggcccactgtgggtatgcaacagga

SEQ ID NO: 2257959 - DNA, 25 bp, Homo sapien
cttcagagagtggtagattaagccc

SEQ ID NO: 2257960 - DNA, 25 bp, Homo sapien
gattaagcccacgaagattcagaga

SEQ ID NO: 2257961 - DNA, 25 bp, Homo sapien
gacatcatgctaacaactggatgag

SEQ ID NO: 2257962 - DNA, 25 bp, Homo sapien
tatctctcctagtgatccacatggg

SEQ ID NO: 2257963 - DNA, 25 bp, Homo sapien
caatggcggaggtcatcattccact

SEQ ID NO: 2257964 - DNA, 25 bp, Homo sapien
gaagaccatgagcatcagttgtggc

SEQ ID NO: 2257965 - DNA, 25 bp, Homo sapien
ggtggagagtaccaacacctggact

SEQ ID NO: 2257966 - DNA, 25 bp, Homo sapien
aaggtctgttactcgaccagccagg

SEQ ID NO: 2257967 - DNA, 25 bp, Homo sapien
ggatgaactagtgaaggccccaaac

SEQ ID NO: 2257968 - DNA, 25 bp, Homo sapien
cttggttacctaagagatggcagac

SEQ ID NO: 2257969 - DNA, 25 bp, Homo sapien
gtctgttgcctaggtgacacccaaa

SEQ ID NO: 2257970 - DNA, 25 bp, Homo sapien
tccagaatgcctttgcgcaggtatg

SEQ ID NO: 2257971 - DNA, 25 bp, Homo sapien
taacagcaagcagtgtgcgccccga

SEQ ID NO: 2257972 - DNA, 25 bp, Homo sapien
gcctgtacgacttcaactcctactg

SEQ ID NO: 2257973 - DNA, 25 bp, Homo sapien
gcttctgctccctaacagcaagcag

SEQ ID NO: 2257974 - DNA, 25 bp, Homo sapien
ctactggagggtgcacgctggaaac

SEQ ID NO: 2257975 - DNA, 25 bp, Homo sapien
gaggcccggcaccagatgttcaata

SEQ ID NO: 2257976 - DNA, 25 bp, Homo sapien
aggcaccccagtcagagttccggga

SEQ ID NO: 2257977 - DNA, 25 bp, Homo sapien
aatacgatcttgcagtcaggcggtc

SEQ ID NO: 2257978 - DNA, 25 bp, Homo sapien
catgggatttaacaggctgcctgag

SEQ ID NO: 2257979 - DNA, 25 bp, Homo sapien
taacactactcactgtacaatttct

SEQ ID NO: 2257980 - DNA, 25 bp, Homo sapien
cattttttgtatcaaaaagggtgct

SEQ ID NO: 2257981 - DNA, 25 bp, Homo sapien
tcttttgcaagggatgttttaaatc

SEQ ID NO: 2257982 - DNA, 25 bp, Homo sapien
tatcaaaaagggtgctgtaacttta

SEQ ID NO: 2257983 - DNA, 25 bp, Homo sapien
tatggcgtatcttaaaaactgagca

SEQ ID NO: 2257984 - DNA, 25 bp, Homo sapien
gaatcaaaggttatggtttactcca

SEQ ID NO: 2257985 - DNA, 25 bp, Homo sapien
ggcagtggtgacactacagcattca

SEQ ID NO: 2257986 - DNA, 25 bp, Homo sapien
taggtggcacataccccaaactgaa

SEQ ID NO: 2257987 - DNA, 25 bp, Homo sapien
tccacctgtggcagtttttggtgtc

SEQ ID NO: 2257988 - DNA, 25 bp, Homo sapien
tattcttccgactaagtgacctaaa

SEQ ID NO: 2257989 - DNA, 25 bp, Homo sapien
ccacttccattaagctggagtagac

SEQ ID NO: 2257990 - DNA, 25 bp, Homo sapien
aatgagcatgtcttagcagtgaggc

SEQ ID NO: 2257991 - DNA, 25 bp, Homo sapien
tggagttaattagttctctggtgtg

SEQ ID NO: 2257992 - DNA, 25 bp, Homo sapien
caatggagttaattagttctctggt

SEQ ID NO: 2257993 - DNA, 25 bp, Homo sapien
ggagttaattagttctctggtgtgt

SEQ ID NO: 2257994 - DNA, 25 bp, Homo sapien
aatggagttaattagttctctggtg

SEQ ID NO: 2257995 - DNA, 25 bp, Homo sapien
gtaacatccctcctgtctaccttgg

SEQ ID NO: 2257996 - DNA, 25 bp, Homo sapien
acacatgccagcaaaggccaactag

SEQ ID NO: 2257997 - DNA, 25 bp, Homo sapien
tgtctgtgcaggtgatattggatac

SEQ ID NO: 2257998 - DNA, 25 bp, Homo sapien
gggctcagtgtaacatgcttgctaa

SEQ ID NO: 2257999 - DNA, 25 bp, Homo sapien
acaaaggtatgagtacagccccaga

SEQ ID NO: 2258000 - DNA, 25 bp, Homo sapien
tttcagggatcaatggaggccatgt

SEQ ID NO: 2258001 - DNA, 25 bp, Homo sapien
aaagtccactcctgcccagcagaaa

SEQ ID NO: 2258002 - DNA, 25 bp, Homo sapien
gatcagatccaaaaagtccactcct

SEQ ID NO: 2258003 - DNA, 25 bp, Homo sapien
cgcagtaatgcagcgtgttccttcc

SEQ ID NO: 2258004 - DNA, 25 bp, Homo sapien
gcagtaatgcagcgtgttccttccc

SEQ ID NO: 2258005 - DNA, 25 bp, Homo sapien
cacgcagtaatgcagcgtgttcctt

SEQ ID NO: 2258006 - DNA, 25 bp, Homo sapien
acgcagtaatgcagcgtgttccttc

SEQ ID NO: 2258007 - DNA, 25 bp, Homo sapien
aatcaagagatgtcaacactgatga

SEQ ID NO: 2258008 - DNA, 25 bp, Homo sapien
cagaaccaggaagatctcaaatgga

SEQ ID NO: 2258009 - DNA, 25 bp, Homo sapien
atcaagagatgtcaacactgatgac

SEQ ID NO: 2258010 - DNA, 25 bp, Homo sapien
caatcaagagatgtcaacactgatg

SEQ ID NO: 2258011 - DNA, 25 bp, Homo sapien
ccaccattatatgcttcattaagca

SEQ ID NO: 2258012 - DNA, 25 bp, Homo sapien
aattgaaagccaccattatatgctt

SEQ ID NO: 2258013 - DNA, 25 bp, Homo sapien
caattaagaacgcatttgaaacaaa

SEQ ID NO: 2258014 - DNA, 25 bp, Homo sapien
cttcattaagcaattaagaacgcat

SEQ ID NO: 2258015 - DNA, 25 bp, Homo sapien
tactttgcatggagatctgccctct

SEQ ID NO: 2258016 - DNA, 25 bp, Homo sapien
aaatgccctggaagcacatcccctt

SEQ ID NO: 2258017 - DNA, 25 bp, Homo sapien
tcacaccaataccaagagatcacga

SEQ ID NO: 2258018 - DNA, 25 bp, Homo sapien
tcacgagacgccctgccagcaaatg

SEQ ID NO: 2258019 - DNA, 25 bp, Homo sapien
catcttcgggagtaggtggcacgca

SEQ ID NO: 2258020 - DNA, 25 bp, Homo sapien
gagactgtcaggtcgggctcaacct

SEQ ID NO: 2258021 - DNA, 25 bp, Homo sapien
cctgttgggctgctcgagactgtca

SEQ ID NO: 2258022 - DNA, 25 bp, Homo sapien
gtcttggtacaggattgccccgcat

SEQ ID NO: 2258023 - DNA, 25 bp, Homo sapien
cccacaggggattaatgagaggcca

SEQ ID NO: 2258024 - DNA, 25 bp, Homo sapien
aacagacagtggtgagtatatttcc

SEQ ID NO: 2258025 - DNA, 25 bp, Homo sapien
ggccaagagcaattaacaaacatct

SEQ ID NO: 2258026 - DNA, 25 bp, Homo sapien
aacttttgctgggatggccggcttg

SEQ ID NO: 2258027 - DNA, 25 bp, Homo sapien
ggcaggtctgtcatgccaatgacac

SEQ ID NO: 2258028 - DNA, 25 bp, Homo sapien
tgaactccgaagacgggtgaacgct

SEQ ID NO: 2258029 - DNA, 25 bp, Homo sapien
ccaggacttgctaaggtggctgaac

SEQ ID NO: 2258030 - DNA, 25 bp, Homo sapien
ctgaaggacaaacccaggacttgct

SEQ ID NO: 2258031 - DNA, 25 bp, Homo sapien
ggcacatctaggagaaggtctctga

SEQ ID NO: 2258032 - DNA, 25 bp, Homo sapien
caggcaccctatcccgaaggagaaa

SEQ ID NO: 2258033 - DNA, 25 bp, Homo sapien
tgaaacttctgagcccgcagcatca

SEQ ID NO: 2258034 - DNA, 25 bp, Homo sapien
ctctgaatatctggtctccccagat

SEQ ID NO: 2258035 - DNA, 25 bp, Homo sapien
gaccaacagtcccagtttgctgagt

SEQ ID NO: 2258036 - DNA, 25 bp, Homo sapien
tgaattgcagtgctaaaagccggcg

SEQ ID NO: 2258037 - DNA, 25 bp, Homo sapien
tcccagggaagcaggacgaattggt

SEQ ID NO: 2258038 - DNA, 25 bp, Homo sapien
tggctgccaggtagggtgaccaaca

SEQ ID NO: 2258039 - DNA, 25 bp, Homo sapien
catgtgtcagcaagggcatcaggaa

SEQ ID NO: 2258040 - DNA, 25 bp, Homo sapien
tccttcagagatccagcgcgggaat

SEQ ID NO: 2258041 - DNA, 25 bp, Homo sapien
aacacaactgaatgccctggtaggg

SEQ ID NO: 2258042 - DNA, 25 bp, Homo sapien
gaaaggcccgaattgtcacagcaga

SEQ ID NO: 2258043 - DNA, 25 bp, Homo sapien
cttgtccttggtctcatctcctcct

SEQ ID NO: 2258044 - DNA, 25 bp, Homo sapien
tcttccttcacctcttgtccttggt

SEQ ID NO: 2258045 - DNA, 25 bp, Homo sapien
ttgctcttctagtcctcttcctctt

SEQ ID NO: 2258046 - DNA, 25 bp, Homo sapien
cttctcttttctgtgtcctcctctc

SEQ ID NO: 2258047 - DNA, 25 bp, Homo sapien
tgctacaccacacgttcacatgacc

SEQ ID NO: 2258048 - DNA, 25 bp, Homo sapien
tattcctccactttacctctctcct

SEQ ID NO: 2258049 - DNA, 25 bp, Homo sapien
tctcctcctgctacaccacacgttc

SEQ ID NO: 2258050 - DNA, 25 bp, Homo sapien
ctcctgctacaccacacgttcacat

SEQ ID NO: 2258051 - DNA, 25 bp, Homo sapien
aggggcagtgggacactccatgacc

SEQ ID NO: 2258052 - DNA, 25 bp, Homo sapien
gcagtgggacactccatgacctctg

SEQ ID NO: 2258053 - DNA, 25 bp, Homo sapien
ggggtcactgcctccagatggaggg

SEQ ID NO: 2258054 - DNA, 25 bp, Homo sapien
aggggtcactgcctccagatggagg

SEQ ID NO: 2258055 - DNA, 25 bp, Homo sapien
ggagtgcttaagtgaatactgactt

SEQ ID NO: 2258056 - DNA, 25 bp, Homo sapien
gagtgcttaagtgaatactgacttc

SEQ ID NO: 2258057 - DNA, 25 bp, Homo sapien
ttggagtgcttaagtgaatactgac

SEQ ID NO: 2258058 - DNA, 25 bp, Homo sapien
tggagtgcttaagtgaatactgact

SEQ ID NO: 2258059 - DNA, 25 bp, Homo sapien
gatgtaagaacaagcccctgagcag

SEQ ID NO: 2258060 - DNA, 25 bp, Homo sapien
gccaccgggatggactgggagctct

SEQ ID NO: 2258061 - DNA, 25 bp, Homo sapien
aaggccaccgggatggactgggagc

SEQ ID NO: 2258062 - DNA, 25 bp, Homo sapien
agaaggccaccgggatggactggga

SEQ ID NO: 2258063 - DNA, 25 bp, Homo sapien
ggccaccgggatggactgggagctc

SEQ ID NO: 2258064 - DNA, 25 bp, Homo sapien
gcaaagcaggatctttggaaaaggc

SEQ ID NO: 2258065 - DNA, 25 bp, Homo sapien
ggcaaggacttcctaaaagagatat

SEQ ID NO: 2258066 - DNA, 25 bp, Homo sapien
aaggcaaggacttcctaaaagagat

SEQ ID NO: 2258067 - DNA, 25 bp, Homo sapien
gcaaggacttcctaaaagagatatg

SEQ ID NO: 2258068 - DNA, 25 bp, Homo sapien
gactccagagcatccatggagggcc

SEQ ID NO: 2258069 - DNA, 25 bp, Homo sapien
gcagttggctgactattgcccggga

SEQ ID NO: 2258070 - DNA, 25 bp, Homo sapien
aagaaggccccgcatgtctgcagtt

SEQ ID NO: 2258071 - DNA, 25 bp, Homo sapien
cacagtggtttcaagggagcacagc

SEQ ID NO: 2258072 - DNA, 25 bp, Homo sapien
agggttagccgaacaccacccgcat

SEQ ID NO: 2258073 - DNA, 25 bp, Homo sapien
tccctttctcagggttagccgaaca

SEQ ID NO: 2258074 - DNA, 25 bp, Homo sapien
tgcctggcctgttgatgccattctt

SEQ ID NO: 2258075 - DNA, 25 bp, Homo sapien
gatgccattcttcctaggcccactc

SEQ ID NO: 2258076 - DNA, 25 bp, Homo sapien
tgtgcacctacgtgcacattgcacc

SEQ ID NO: 2258077 - DNA, 25 bp, Homo sapien
gctttacttgcacttcctctcctca

SEQ ID NO: 2258078 - DNA, 25 bp, Homo sapien
ctgccgcccagggagagtgtgcacc

SEQ ID NO: 2258079 - DNA, 25 bp, Homo sapien
acttcctctcctcatccgaccacag

SEQ ID NO: 2258080 - DNA, 25 bp, Homo sapien
agcacacccaggagtgagagtgagg

SEQ ID NO: 2258081 - DNA, 25 bp, Homo sapien
cagcacacccaggagtgagagtgag

SEQ ID NO: 2258082 - DNA, 25 bp, Homo sapien
ccagcacacccaggagtgagagtga

SEQ ID NO: 2258083 - DNA, 25 bp, Homo sapien
gaaaccactctaagcaggttctggg

SEQ ID NO: 2258084 - DNA, 25 bp, Homo sapien
ggtgttcggcagaagctggcaacca

SEQ ID NO: 2258085 - DNA, 25 bp, Homo sapien
catcccggggatcctcattcatgat

SEQ ID NO: 2258086 - DNA, 25 bp, Homo sapien
ttgaaaccactctaagcaggttctg

SEQ ID NO: 2258087 - DNA, 25 bp, Homo sapien
ctcatctccagcattcctgcttcct

SEQ ID NO: 2258088 - DNA, 25 bp, Homo sapien
tccagggagaagtaggcgcatctca

SEQ ID NO: 2258089 - DNA, 25 bp, Homo sapien
ctgcttcctcgagcttctccaggga

SEQ ID NO: 2258090 - DNA, 25 bp, Homo sapien
ttctccagggagaagtaggcgcatc

SEQ ID NO: 2258091 - DNA, 25 bp, Homo sapien
gaccacgaggcctgaattctggaag

SEQ ID NO: 2258092 - DNA, 25 bp, Homo sapien
gctcatggaacagtgcaggctccag

SEQ ID NO: 2258093 - DNA, 25 bp, Homo sapien
agacagaggactccaggttgctcag

SEQ ID NO: 2258094 - DNA, 25 bp, Homo sapien
gaggagccgttttgtctcatcaggc

SEQ ID NO: 2258095 - DNA, 25 bp, Homo sapien
cggttcctccggaccccactggcag

SEQ ID NO: 2258096 - DNA, 25 bp, Homo sapien
tgcaaaagagacgttaaagagacgg

SEQ ID NO: 2258097 - DNA, 25 bp, Homo sapien
ctgcaaaagagacgttaaagagacg

SEQ ID NO: 2258098 - DNA, 25 bp, Homo sapien
tcctccggaccccactggcaggcac

SEQ ID NO: 2258099 - DNA, 25 bp, Homo sapien
ctggggggctcagccctgcaagact

SEQ ID NO: 2258100 - DNA, 25 bp, Homo sapien
ctgcatagaccccagtcaagtgttc

SEQ ID NO: 2258101 - DNA, 25 bp, Homo sapien
cagtcaagtgttcccgcccttcttg

SEQ ID NO: 2258102 - DNA, 25 bp, Homo sapien
gactcagcctagagctgcatagacc

SEQ ID NO: 2258103 - DNA, 25 bp, Homo sapien
tggaggtgcagttaggtcgctgcgg

SEQ ID NO: 2258104 - DNA, 25 bp, Homo sapien
acactggaggtgcagttaggtcgct

SEQ ID NO: 2258105 - DNA, 25 bp, Homo sapien
cactggaggtgcagttaggtcgctg

SEQ ID NO: 2258106 - DNA, 25 bp, Homo sapien
actggaggtgcagttaggtcgctgc

SEQ ID NO: 2258107 - DNA, 25 bp, Homo sapien
tctttcccacaactacgccctcctc

SEQ ID NO: 2258108 - DNA, 25 bp, Homo sapien
agctctttcccacaactacgccctc

SEQ ID NO: 2258109 - DNA, 25 bp, Homo sapien
cagaagctctaacccagttcctgct

SEQ ID NO: 2258110 - DNA, 25 bp, Homo sapien
cctcctcttgcaggcggctcctcca

SEQ ID NO: 2258111 - DNA, 25 bp, Homo sapien
ccgccagccttactccagcttggct

SEQ ID NO: 2258112 - DNA, 25 bp, Homo sapien
cgccagccttactccagcttggctc

SEQ ID NO: 2258113 - DNA, 25 bp, Homo sapien
ctccttccggttcttcgtcgaggct

SEQ ID NO: 2258114 - DNA, 25 bp, Homo sapien
tcttcgtcgaggctgccggtctcga

SEQ ID NO: 2258115 - DNA, 25 bp, Homo sapien
ttccggttcttcgtcgaggctgccg

SEQ ID NO: 2258116 - DNA, 25 bp, Homo sapien
tcgaggctgccggtctcgaggtccc

SEQ ID NO: 2258117 - DNA, 25 bp, Homo sapien
aatgtttgctgtctatatgcatggc

SEQ ID NO: 2258118 - DNA, 25 bp, Homo sapien
tatgcatggctgagtacgtgcctcc

SEQ ID NO: 2258119 - DNA, 25 bp, Homo sapien
agaatagcgtctcctagcagccagg

SEQ ID NO: 2258120 - DNA, 25 bp, Homo sapien
cagtgcgtgtcttcgagaatgcgag

SEQ ID NO: 2258121 - DNA, 25 bp, Homo sapien
ttgcagcctggacactagccaggcg

SEQ ID NO: 2258122 - DNA, 25 bp, Homo sapien
cggagttagcggcaacgaccttgca

SEQ ID NO: 2258123 - DNA, 25 bp, Homo sapien
agcggcccacgtctccttgcttggg

SEQ ID NO: 2258124 - DNA, 25 bp, Homo sapien
tggccactggtttcccggagttagc

SEQ ID NO: 2258125 - DNA, 25 bp, Homo sapien
tttgccatcatgacgcagacctgta

SEQ ID NO: 2258126 - DNA, 25 bp, Homo sapien
gcaaagctgccagtaaatgtctcag

SEQ ID NO: 2258127 - DNA, 25 bp, Homo sapien
tactggagcccatacctaggaaagg

SEQ ID NO: 2258128 - DNA, 25 bp, Homo sapien
gctgtactgaccaacctgaagcaga

SEQ ID NO: 2258129 - DNA, 25 bp, Homo sapien
ccatgaggatgatgggcatttcccc

SEQ ID NO: 2258130 - DNA, 25 bp, Homo sapien
tcctggcaacattgggagggaccca

SEQ ID NO: 2258131 - DNA, 25 bp, Homo sapien
caggaagatattgccggaatcaggc

SEQ ID NO: 2258132 - DNA, 25 bp, Homo sapien
ggtggttgtacatcccatggcagat

SEQ ID NO: 2258133 - DNA, 25 bp, Homo sapien
tgcagtgtttctgaactgttcacag

SEQ ID NO: 2258134 - DNA, 25 bp, Homo sapien
tgggccattagtggcctgtgacttc

SEQ ID NO: 2258135 - DNA, 25 bp, Homo sapien
cagagtctacacttgtaatctgagg

SEQ ID NO: 2258136 - DNA, 25 bp, Homo sapien
tacacttgtaatctgaggagccttc

SEQ ID NO: 2258137 - DNA, 25 bp, Homo sapien
tcttcttggaccacatgccagagcg

SEQ ID NO: 2258138 - DNA, 25 bp, Homo sapien
taaatgtgacattcccagaggtgcc

SEQ ID NO: 2258139 - DNA, 25 bp, Homo sapien
tagggagcgtcttgtagctaccaga

SEQ ID NO: 2258140 - DNA, 25 bp, Homo sapien
tctctttggagttgggacacgggtc

SEQ ID NO: 2258141 - DNA, 25 bp, Homo sapien
tcaggtgaagaaccagatgggcccc

SEQ ID NO: 2258142 - DNA, 25 bp, Homo sapien
gtgcctgtccaaaacctcgctggaa

SEQ ID NO: 2258143 - DNA, 25 bp, Homo sapien
tcttccacgttgaccacgcgttggt

SEQ ID NO: 2258144 - DNA, 25 bp, Homo sapien
tcagctggcgaatgaaactcgtcaa

SEQ ID NO: 2258145 - DNA, 25 bp, Homo sapien
tccagaatcccaactgccaaacaag

SEQ ID NO: 2258146 - DNA, 25 bp, Homo sapien
aactgccccaaaagcttgaatgccc

SEQ ID NO: 2258147 - DNA, 25 bp, Homo sapien
tacaaacctctgtgcttcataagcc

SEQ ID NO: 2258148 - DNA, 25 bp, Homo sapien
tagtgctccaaaagcctgagtgctc

SEQ ID NO: 2258149 - DNA, 25 bp, Homo sapien
ggaggccgaagatttcctccttcca

SEQ ID NO: 2258150 - DNA, 25 bp, Homo sapien
ttttgctcagagtctttgatacctt

SEQ ID NO: 2258151 - DNA, 25 bp, Homo sapien
tctgtcatctcaggaggccgaagat

SEQ ID NO: 2258152 - DNA, 25 bp, Homo sapien
tctcaggaggccgaagatttcctcc

SEQ ID NO: 2258153 - DNA, 25 bp, Homo sapien
agccttccaaatagcagatgctcaa

SEQ ID NO: 2258154 - DNA, 25 bp, Homo sapien
tctactattaacctaagccttccaa

SEQ ID NO: 2258155 - DNA, 25 bp, Homo sapien
tagcatctctactattaacctaagc

SEQ ID NO: 2258156 - DNA, 25 bp, Homo sapien
ttaacctaagccttccaaatagcag

SEQ ID NO: 2258157 - DNA, 25 bp, Homo sapien
cttgtacactccatagcattttctg

SEQ ID NO: 2258158 - DNA, 25 bp, Homo sapien
cacaccatctatcagctcaggaagc

SEQ ID NO: 2258159 - DNA, 25 bp, Homo sapien
actccatagcattttctgcacttcc

SEQ ID NO: 2258160 - DNA, 25 bp, Homo sapien
tttgccacaccatctatcagctcag

SEQ ID NO: 2258161 - DNA, 25 bp, Homo sapien
acacgggaacgtgctgatgccagac

SEQ ID NO: 2258162 - DNA, 25 bp, Homo sapien
gaagtgctgattatgtattcgtccc

SEQ ID NO: 2258163 - DNA, 25 bp, Homo sapien
taggaatgctccatgttgcaggaag

SEQ ID NO: 2258164 - DNA, 25 bp, Homo sapien
agcaggtcaggtcgcagagtcagaa

SEQ ID NO: 2258165 - DNA, 25 bp, Homo sapien
tgccactgagaacactgattgctct

SEQ ID NO: 2258166 - DNA, 25 bp, Homo sapien
ccatgtgactcaaaagcaagaatct

SEQ ID NO: 2258167 - DNA, 25 bp, Homo sapien
gccaagcaaatccaggtatacatgt

SEQ ID NO: 2258168 - DNA, 25 bp, Homo sapien
tcacccaatagacaaggaacccaga

SEQ ID NO: 2258169 - DNA, 25 bp, Homo sapien
cggccttgggcatgctatgaccatc

SEQ ID NO: 2258170 - DNA, 25 bp, Homo sapien
catgctatcgcacgagaggccaaga

SEQ ID NO: 2258171 - DNA, 25 bp, Homo sapien
cagtgcttcttggaacatgaactcc

SEQ ID NO: 2258172 - DNA, 25 bp, Homo sapien
tcttcataaagggatgggtagcaga

SEQ ID NO: 2258173 - DNA, 25 bp, Homo sapien
gagctgggcgatggagacccacagg

SEQ ID NO: 2258174 - DNA, 25 bp, Homo sapien
agggcagcagtcaggagcgtgggca

SEQ ID NO: 2258175 - DNA, 25 bp, Homo sapien
gcagcagtcaggagcgtgggcagga

SEQ ID NO: 2258176 - DNA, 25 bp, Homo sapien
tggtcagggcagcagtcaggagcgt

SEQ ID NO: 2258177 - DNA, 25 bp, Homo sapien
ctcctggttagcctgtcccgagaac

SEQ ID NO: 2258178 - DNA, 25 bp, Homo sapien
tcctcctggttagcctgtcccgaga

SEQ ID NO: 2258179 - DNA, 25 bp, Homo sapien
cctcctggttagcctgtcccgagaa

SEQ ID NO: 2258180 - DNA, 25 bp, Homo sapien
gtcctcctggttagcctgtcccgag

SEQ ID NO: 2258181 - DNA, 25 bp, Homo sapien
tcactgctgacactgcctgggtctc

SEQ ID NO: 2258182 - DNA, 25 bp, Homo sapien
gacactgtctcagaccaaggcctgc

SEQ ID NO: 2258183 - DNA, 25 bp, Homo sapien
gctctgcgacctgaggacactgtct

SEQ ID NO: 2258184 - DNA, 25 bp, Homo sapien
ggtctcctctgctctgcgacctgag

SEQ ID NO: 2258185 - DNA, 25 bp, Homo sapien
tcaggtatgaggtgggtgttccaaa

SEQ ID NO: 2258186 - DNA, 25 bp, Homo sapien
cccttcaggtatgaggtgggtgttc

SEQ ID NO: 2258187 - DNA, 25 bp, Homo sapien
ggcttctacttcctcgaccctcaaa

SEQ ID NO: 2258188 - DNA, 25 bp, Homo sapien
cagctgaacccttcaggtatgaggt

SEQ ID NO: 2258189 - DNA, 25 bp, Homo sapien
tctgggtgtcctctaggtattcata

SEQ ID NO: 2258190 - DNA, 25 bp, Homo sapien
gggccacctcatggtcactcatgca

SEQ ID NO: 2258191 - DNA, 25 bp, Homo sapien
ctgacagaatctggccccttccatt

SEQ ID NO: 2258192 - DNA, 25 bp, Homo sapien
ctcatgcatgagatacccaaggctg

SEQ ID NO: 2258193 - DNA, 25 bp, Homo sapien
tttcctaggtctgggatgagaggtc

SEQ ID NO: 2258194 - DNA, 25 bp, Homo sapien
cttccaagactgacggcaggggcag

SEQ ID NO: 2258195 - DNA, 25 bp, Homo sapien
tggggccttccaagactgacggcag

SEQ ID NO: 2258196 - DNA, 25 bp, Homo sapien
gatgagaggtctggtgaatccttcc

SEQ ID NO: 2258197 - DNA, 25 bp, Homo sapien
ttgttccttccctggtctcctagag

SEQ ID NO: 2258198 - DNA, 25 bp, Homo sapien
accagccacaatgcaccacatgcgg

SEQ ID NO: 2258199 - DNA, 25 bp, Homo sapien
tgcccgggatcgcccaggccaagat

SEQ ID NO: 2258200 - DNA, 25 bp, Homo sapien
cacatgcggccaccgtgcccgggat

SEQ ID NO: 2258201 - DNA, 25 bp, Homo sapien
agatatcacgatccgcttgcctgac

SEQ ID NO: 2258202 - DNA, 25 bp, Homo sapien
cttccctcggtcagcccaggatgca

SEQ ID NO: 2258203 - DNA, 25 bp, Homo sapien
ttgcctgaccgccatgcccggaact

SEQ ID NO: 2258204 - DNA, 25 bp, Homo sapien
gcggccacgctaacgataccaagcc

SEQ ID NO: 2258205 - DNA, 25 bp, Homo sapien
ccagtgcgcaagtcagaggccttac

SEQ ID NO: 2258206 - DNA, 25 bp, Homo sapien
cccagtgcgcaagtcagaggcctta

SEQ ID NO: 2258207 - DNA, 25 bp, Homo sapien
agccgaaccggattctgccacggga

SEQ ID NO: 2258208 - DNA, 25 bp, Homo sapien
ccggattctgccacgggagacttgg

SEQ ID NO: 2258209 - DNA, 25 bp, Homo sapien
gttgacagcaggagccgaaccggat

SEQ ID NO: 2258210 - DNA, 25 bp, Homo sapien
gcaggagccgaaccggattctgcca

SEQ ID NO: 2258211 - DNA, 25 bp, Homo sapien
actcctcacagagcctcggccagct

SEQ ID NO: 2258212 - DNA, 25 bp, Homo sapien
cttgactcctcacagagcctcggcc

SEQ ID NO: 2258213 - DNA, 25 bp, Homo sapien
cctcacagagcctcggccagcttac

SEQ ID NO: 2258214 - DNA, 25 bp, Homo sapien
tgactcctcacagagcctcggccag

SEQ ID NO: 2258215 - DNA, 25 bp, Homo sapien
agccgcccctcagaaggaggcctct

SEQ ID NO: 2258216 - DNA, 25 bp, Homo sapien
cccagtgcgcacgtcagtgacgtca

SEQ ID NO: 2258217 - DNA, 25 bp, Homo sapien
tgcgcacgtcagtgacgtcacatcc

SEQ ID NO: 2258218 - DNA, 25 bp, Homo sapien
gcacgtcagtgacgtcacatccggc

SEQ ID NO: 2258219 - DNA, 25 bp, Homo sapien
ccagccagagctagactttgcaaac

SEQ ID NO: 2258220 - DNA, 25 bp, Homo sapien
tgtgagagaagatgcacaccatccc

SEQ ID NO: 2258221 - DNA, 25 bp, Homo sapien
gctgcacgcgttgcagagaatggct

SEQ ID NO: 2258222 - DNA, 25 bp, Homo sapien
cacctgtgattgtaggacctgtgag

SEQ ID NO: 2258223 - DNA, 25 bp, Homo sapien
tgtggccttcacacatacttactat

SEQ ID NO: 2258224 - DNA, 25 bp, Homo sapien
gacattatatacatctatgcttata

SEQ ID NO: 2258225 - DNA, 25 bp, Homo sapien
taatatctactcatagtatgtggcc

SEQ ID NO: 2258226 - DNA, 25 bp, Homo sapien
tacatattcgtttgtatttctagac

SEQ ID NO: 2258227 - DNA, 25 bp, Homo sapien
ggcagcatctttgcatgattcaaac

SEQ ID NO: 2258228 - DNA, 25 bp, Homo sapien
gtgcccagctgagattcacaggaaa

SEQ ID NO: 2258229 - DNA, 25 bp, Homo sapien
tcacaggaaaaccacgatcggaggg

SEQ ID NO: 2258230 - DNA, 25 bp, Homo sapien
ttaagtggcagcatctttgcatgat

SEQ ID NO: 2258231 - DNA, 25 bp, Homo sapien
catttgtaagtgagcaggccgagac

SEQ ID NO: 2258232 - DNA, 25 bp, Homo sapien
gagatccacctgcagaccatggctg

SEQ ID NO: 2258233 - DNA, 25 bp, Homo sapien
aaatcacaggcagggatacctctgg

SEQ ID NO: 2258234 - DNA, 25 bp, Homo sapien
tctaagatgaacaccccaagtgagc

SEQ ID NO: 2258235 - DNA, 25 bp, Homo sapien
tatgtaaagtgaagatcctgttata

SEQ ID NO: 2258236 - DNA, 25 bp, Homo sapien
tccacaactatcaagggcacttttt

SEQ ID NO: 2258237 - DNA, 25 bp, Homo sapien
gacaaagccagacgtgatctcatct

SEQ ID NO: 2258238 - DNA, 25 bp, Homo sapien
ctttttaacccaatgacaaagccag

SEQ ID NO: 2258239 - DNA, 25 bp, Homo sapien
tttattgaccagcacatattctgcc

SEQ ID NO: 2258240 - DNA, 25 bp, Homo sapien
ttgaccagcacatattctgcccaaa

SEQ ID NO: 2258241 - DNA, 25 bp, Homo sapien
tattgaccagcacatattctgccca

SEQ ID NO: 2258242 - DNA, 25 bp, Homo sapien
gaccagcacatattctgcccaaatg

SEQ ID NO: 2258243 - DNA, 25 bp, Homo sapien
tagctggcatgtactgtgacgtgcg

SEQ ID NO: 2258244 - DNA, 25 bp, Homo sapien
gggcccatcgctagctggcatgtac

SEQ ID NO: 2258245 - DNA, 25 bp, Homo sapien
ctatgtgctctggtctgcgtagtct

SEQ ID NO: 2258246 - DNA, 25 bp, Homo sapien
tggtctgcgtagtctgggtacgcct

SEQ ID NO: 2258247 - DNA, 25 bp, Homo sapien
cagcagccactagggtcaccggtac

SEQ ID NO: 2258248 - DNA, 25 bp, Homo sapien
catggcaagggtactacgggacgct

SEQ ID NO: 2258249 - DNA, 25 bp, Homo sapien
ggaagtcctgtggtgtccatggcaa

SEQ ID NO: 2258250 - DNA, 25 bp, Homo sapien
cacaggcccgtaagaattcatctga

SEQ ID NO: 2258251 - DNA, 25 bp, Homo sapien
actggactgttgtcactcgccacgg

SEQ ID NO: 2258252 - DNA, 25 bp, Homo sapien
agtaaggatggcagtagaactctaa

SEQ ID NO: 2258253 - DNA, 25 bp, Homo sapien
aagtaaggatggcagtagaactcta

SEQ ID NO: 2258254 - DNA, 25 bp, Homo sapien
aaagtaaggatggcagtagaactct

SEQ ID NO: 2258255 - DNA, 25 bp, Homo sapien
gggactcgcgttcacatcgtcaagg

SEQ ID NO: 2258256 - DNA, 25 bp, Homo sapien
ctcaaaatggcagattagggtgtcc

SEQ ID NO: 2258257 - DNA, 25 bp, Homo sapien
tacgcccctgtgcaagagaactcta

SEQ ID NO: 2258258 - DNA, 25 bp, Homo sapien
tcgtcaaggtttaccaagttgtggc

SEQ ID NO: 2258259 - DNA, 25 bp, Homo sapien
tccacttgagcacctctccagacac

SEQ ID NO: 2258260 - DNA, 25 bp, Homo sapien
ccacttgagcacctctccagacacc

SEQ ID NO: 2258261 - DNA, 25 bp, Homo sapien
cttccacttgagcacctctccagac

SEQ ID NO: 2258262 - DNA, 25 bp, Homo sapien
ttccacttgagcacctctccagaca

SEQ ID NO: 2258263 - DNA, 25 bp, Homo sapien
tgcctgaggtcgcccacttcccagg

SEQ ID NO: 2258264 - DNA, 25 bp, Homo sapien
ggggacacaggcccacagcgatggc

SEQ ID NO: 2258265 - DNA, 25 bp, Homo sapien
cctgcctgaggtcgcccacttccca

SEQ ID NO: 2258266 - DNA, 25 bp, Homo sapien
accctgcctgaggtcgcccacttcc

SEQ ID NO: 2258267 - DNA, 25 bp, Homo sapien
ccctccagaggcttgtcgttcatta

SEQ ID NO: 2258268 - DNA, 25 bp, Homo sapien
taacccctccagaggcttgtcgttc

SEQ ID NO: 2258269 - DNA, 25 bp, Homo sapien
cgacttaacccctccagaggcttgt

SEQ ID NO: 2258270 - DNA, 25 bp, Homo sapien
cttaacccctccagaggcttgtcgt

SEQ ID NO: 2258271 - DNA, 25 bp, Homo sapien
cattgacgccgttttcggaagccat

SEQ ID NO: 2258272 - DNA, 25 bp, Homo sapien
tacaagtttagctggcggaagaagc

SEQ ID NO: 2258273 - DNA, 25 bp, Homo sapien
tggagaccagcctttttgcggagaa

SEQ ID NO: 2258274 - DNA, 25 bp, Homo sapien
gcaaacactttgtgtgcgacgtccc

SEQ ID NO: 2258275 - DNA, 25 bp, Homo sapien
tcagggtgcggccttctgaacgaag

SEQ ID NO: 2258276 - DNA, 25 bp, Homo sapien
gaaaggcaccctttccaagccatga

SEQ ID NO: 2258277 - DNA, 25 bp, Homo sapien
gaaggtaggtctctgactgcaactg

SEQ ID NO: 2258278 - DNA, 25 bp, Homo sapien
ctgaacgaagcttcctcggccagag

SEQ ID NO: 2258279 - DNA, 25 bp, Homo sapien
gcacatgactgacactcggaagcac

SEQ ID NO: 2258280 - DNA, 25 bp, Homo sapien
ggtccccttgtcctagagctcctga

SEQ ID NO: 2258281 - DNA, 25 bp, Homo sapien
tgccacaccgtagatgcagacctgg

SEQ ID NO: 2258282 - DNA, 25 bp, Homo sapien
gacactagtgcacaagagtgccgag

SEQ ID NO: 2258283 - DNA, 25 bp, Homo sapien
catctctgcaacagttgttcctttg

SEQ ID NO: 2258284 - DNA, 25 bp, Homo sapien
agagactgccacgaaccggtgatgc

SEQ ID NO: 2258285 - DNA, 25 bp, Homo sapien
gagaggtgtccatccaaagcagtgt

SEQ ID NO: 2258286 - DNA, 25 bp, Homo sapien
ggtgatgcctccacgcttgagacat

SEQ ID NO: 2258287 - DNA, 25 bp, Homo sapien
gacgtataggaactagcgaggcacc

SEQ ID NO: 2258288 - DNA, 25 bp, Homo sapien
gagcctaaggcagaatccacctgtg

SEQ ID NO: 2258289 - DNA, 25 bp, Homo sapien
gcaccggcagttgggtcagagctac

SEQ ID NO: 2258290 - DNA, 25 bp, Homo sapien
gcaagtcggaaatctcatgagccta

SEQ ID NO: 2258291 - DNA, 25 bp, Homo sapien
cttaaggagagcaaaaatagtggct

SEQ ID NO: 2258292 - DNA, 25 bp, Homo sapien
gagcaggaaagtctaaaccatcccg

SEQ ID NO: 2258293 - DNA, 25 bp, Homo sapien
cattttttacacactgagcaggaaa

SEQ ID NO: 2258294 - DNA, 25 bp, Homo sapien
tgaggaaccggtttattgaacagct

SEQ ID NO: 2258295 - DNA, 25 bp, Homo sapien
gagactttcccacgcatagtcgtga

SEQ ID NO: 2258296 - DNA, 25 bp, Homo sapien
ttgcagcctctgacacacggtggaa

SEQ ID NO: 2258297 - DNA, 25 bp, Homo sapien
tgaattaaccccatgtaggccggcg

SEQ ID NO: 2258298 - DNA, 25 bp, Homo sapien
tagtgttccggcttcaagcagcgct

SEQ ID NO: 2258299 - DNA, 25 bp, Homo sapien
cagaaaagcatggaccatctcttgc

SEQ ID NO: 2258300 - DNA, 25 bp, Homo sapien
gaccatctcttgcttggtgttgccg

SEQ ID NO: 2258301 - DNA, 25 bp, Homo sapien
ccatctcttgcttggtgttgccgtt

SEQ ID NO: 2258302 - DNA, 25 bp, Homo sapien
agaacgtcagaaaagcatggaccat

SEQ ID NO: 2258303 - DNA, 25 bp, Homo sapien
tggcaatgtcccatgaaggcgtggc

SEQ ID NO: 2258304 - DNA, 25 bp, Homo sapien
ccatgaaggcgtggcaccccacggg

SEQ ID NO: 2258305 - DNA, 25 bp, Homo sapien
gcaatgtcccatgaaggcgtggcac

SEQ ID NO: 2258306 - DNA, 25 bp, Homo sapien
aatgtcccatgaaggcgtggcaccc

SEQ ID NO: 2258307 - DNA, 25 bp, Homo sapien
tgtatacaagcatggagtcactccc

SEQ ID NO: 2258308 - DNA, 25 bp, Homo sapien
cacgacctgggagtgctgaggacct

SEQ ID NO: 2258309 - DNA, 25 bp, Homo sapien
taaacacgtggtgcatcagagacat

SEQ ID NO: 2258310 - DNA, 25 bp, Homo sapien
tcagcaccgtatagacagatgttcc

SEQ ID NO: 2258311 - DNA, 25 bp, Homo sapien
tgccacttccgcgtcccgtcgtggt

SEQ ID NO: 2258312 - DNA, 25 bp, Homo sapien
gctgataggcgctggatgcaaacaa

SEQ ID NO: 2258313 - DNA, 25 bp, Homo sapien
tcccgtcgtggtgagtggctgatag

SEQ ID NO: 2258314 - DNA, 25 bp, Homo sapien
tgagtggctgataggcgctggatgc

SEQ ID NO: 2258315 - DNA, 25 bp, Homo sapien
gagacccagctccagtactggttct

SEQ ID NO: 2258316 - DNA, 25 bp, Homo sapien
acccagctccagtactggttctggt

SEQ ID NO: 2258317 - DNA, 25 bp, Homo sapien
gacccagctccagtactggttctgg

SEQ ID NO: 2258318 - DNA, 25 bp, Homo sapien
ctggagacccagctccagtactggt

SEQ ID NO: 2258319 - DNA, 25 bp, Homo sapien
gcagaggaaggcggagagagtgcgt

SEQ ID NO: 2258320 - DNA, 25 bp, Homo sapien
agtccacttaagctctgtccccgga

SEQ ID NO: 2258321 - DNA, 25 bp, Homo sapien
gcggggtgaacgagggggcagagga

SEQ ID NO: 2258322 - DNA, 25 bp, Homo sapien
gaggaaggcggagagagtgcgtccc

SEQ ID NO: 2258323 - DNA, 25 bp, Homo sapien
ctaatctggcatttcgatatttaat

SEQ ID NO: 2258324 - DNA, 25 bp, Homo sapien
gcatttcgatatttaatttgggagg

SEQ ID NO: 2258325 - DNA, 25 bp, Homo sapien
tatttaatttgggaggtgggagcac

SEQ ID NO: 2258326 - DNA, 25 bp, Homo sapien
taatttgggaggtgggagcacatac

SEQ ID NO: 2258327 - DNA, 25 bp, Homo sapien
gaaatctttgcggataccaaaccac

SEQ ID NO: 2258328 - DNA, 25 bp, Homo sapien
cctggccttctttcgaaacatgggt

SEQ ID NO: 2258329 - DNA, 25 bp, Homo sapien
tctgggtaatgaccaccctggcctt

SEQ ID NO: 2258330 - DNA, 25 bp, Homo sapien
gtttccatattctcgtagaaatggg

SEQ ID NO: 2258331 - DNA, 25 bp, Homo sapien
caaggacttctgaaatgctgagtac

SEQ ID NO: 2258332 - DNA, 25 bp, Homo sapien
aaggacttctgaaatgctgagtaca

SEQ ID NO: 2258333 - DNA, 25 bp, Homo sapien
gacttctgaaatgctgagtacatac

SEQ ID NO: 2258334 - DNA, 25 bp, Homo sapien
ggacttctgaaatgctgagtacata

SEQ ID NO: 2258335 - DNA, 25 bp, Homo sapien
tcagcgtgatcaacgagagccaaag

SEQ ID NO: 2258336 - DNA, 25 bp, Homo sapien
atgtggttgccatcagcgtgatcaa

SEQ ID NO: 2258337 - DNA, 25 bp, Homo sapien
aggcgttgtggccatccagtttgtg

SEQ ID NO: 2258338 - DNA, 25 bp, Homo sapien
caaagatcgggatgcaggagaaggc

SEQ ID NO: 2258339 - DNA, 25 bp, Homo sapien
tagtcccggttgatgccagcaccga

SEQ ID NO: 2258340 - DNA, 25 bp, Homo sapien
accgaaaatgggcagaggcggaagc

SEQ ID NO: 2258341 - DNA, 25 bp, Homo sapien
ccggttgatgccagcaccgaaaatg

SEQ ID NO: 2258342 - DNA, 25 bp, Homo sapien
aagagacatagtcccggttgatgcc

SEQ ID NO: 2258343 - DNA, 25 bp, Homo sapien
tccatagagcgcaagaacaagacgg

SEQ ID NO: 2258344 - DNA, 25 bp, Homo sapien
acgatggtcatccagctcagggcca

SEQ ID NO: 2258345 - DNA, 25 bp, Homo sapien
ctcagggccatggttatgtgtgtcc

SEQ ID NO: 2258346 - DNA, 25 bp, Homo sapien
caatgtagtagaggaccaccaggca

SEQ ID NO: 2258347 - DNA, 25 bp, Homo sapien
gagaatccacagcgggacacacaca

SEQ ID NO: 2258348 - DNA, 25 bp, Homo sapien
gaatccacagcgggacacacacaac

SEQ ID NO: 2258349 - DNA, 25 bp, Homo sapien
agaatccacagcgggacacacacaa

SEQ ID NO: 2258350 - DNA, 25 bp, Homo sapien
tcatacagtaggaaaagtgaccgtc

SEQ ID NO: 2258351 - DNA, 25 bp, Homo sapien
tggcatcgcgagacaagtaacctgt

SEQ ID NO: 2258352 - DNA, 25 bp, Homo sapien
ttagccccggcaaacactgatctgt

SEQ ID NO: 2258353 - DNA, 25 bp, Homo sapien
tgatgctggatacgtagcgctgccg

SEQ ID NO: 2258354 - DNA, 25 bp, Homo sapien
aataagaggatggtctgatacatgc

SEQ ID NO: 2258355 - DNA, 25 bp, Homo sapien
tctgatacatgcacttgaagaatat

SEQ ID NO: 2258356 - DNA, 25 bp, Homo sapien
gatggtctgatacatgcacttgaag

SEQ ID NO: 2258357 - DNA, 25 bp, Homo sapien
tagaaataagaggatggtctgatac

SEQ ID NO: 2258358 - DNA, 25 bp, Homo sapien
acactaaccatgttatctccccatg

SEQ ID NO: 2258359 - DNA, 25 bp, Homo sapien
caggatacaaaatggtgcacacagt

SEQ ID NO: 2258360 - DNA, 25 bp, Homo sapien
tctccccatggtgggattatgggtg

SEQ ID NO: 2258361 - DNA, 25 bp, Homo sapien
ccaagctttgtacagtgaatatgaa

SEQ ID NO: 2258362 - DNA, 25 bp, Homo sapien
tcttgtccagtcttaaggcaatgaa

SEQ ID NO: 2258363 - DNA, 25 bp, Homo sapien
atgatcttgtccagtcttaaggcaa

SEQ ID NO: 2258364 - DNA, 25 bp, Homo sapien
gtccagtcttaaggcaatgaatata

SEQ ID NO: 2258365 - DNA, 25 bp, Homo sapien
gatcttgtccagtcttaaggcaatg

SEQ ID NO: 2258366 - DNA, 25 bp, Homo sapien
gagaagaatcagttaaacaaagtat

SEQ ID NO: 2258367 - DNA, 25 bp, Homo sapien
gaagagaagaatcagttaaacaaag

SEQ ID NO: 2258368 - DNA, 25 bp, Homo sapien
gaagaatcagttaaacaaagtataa

SEQ ID NO: 2258369 - DNA, 25 bp, Homo sapien
aagagaagaatcagttaaacaaagt

SEQ ID NO: 2258370 - DNA, 25 bp, Homo sapien
ggcttcctctctcgattctgtcaca

SEQ ID NO: 2258371 - DNA, 25 bp, Homo sapien
aaacgcaagctgcaacagacaccgg

SEQ ID NO: 2258372 - DNA, 25 bp, Homo sapien
aacagcggcatgaagaccaggagcc

SEQ ID NO: 2258373 - DNA, 25 bp, Homo sapien
tagtgacctgtcatgtcgaaagccc

SEQ ID NO: 2258374 - DNA, 25 bp, Homo sapien
gctttaaactccacacacgtttctc

SEQ ID NO: 2258375 - DNA, 25 bp, Homo sapien
tgaggatttcgtgcccagactccag

SEQ ID NO: 2258376 - DNA, 25 bp, Homo sapien
cagccatattggagcaaagacagcc

SEQ ID NO: 2258377 - DNA, 25 bp, Homo sapien
tatgatgccatccaaacgaagggcc

SEQ ID NO: 2258378 - DNA, 25 bp, Homo sapien
ctgaggctccaacaatgaccattaa

SEQ ID NO: 2258379 - DNA, 25 bp, Homo sapien
ggtacatctgtttcggcatgtctta

SEQ ID NO: 2258380 - DNA, 25 bp, Homo sapien
ggtccggtacatctgtttcggcatg

SEQ ID NO: 2258381 - DNA, 25 bp, Homo sapien
acttgtttgtgggtccggtacatct

SEQ ID NO: 2258382 - DNA, 25 bp, Homo sapien
tgtttcggcatgtcttaacctgcat

SEQ ID NO: 2258383 - DNA, 25 bp, Homo sapien
gaaaggggatctggagccatgaccc

SEQ ID NO: 2258384 - DNA, 25 bp, Homo sapien
tctggagccatgacccatgccttgg

SEQ ID NO: 2258385 - DNA, 25 bp, Homo sapien
gagccatgacccatgccttgggacc

SEQ ID NO: 2258386 - DNA, 25 bp, Homo sapien
gggatctggagccatgacccatgcc

SEQ ID NO: 2258387 - DNA, 25 bp, Homo sapien
atattctgccttagtgccatgttct

SEQ ID NO: 2258388 - DNA, 25 bp, Homo sapien
tattctgccttagtgccatgttctc

SEQ ID NO: 2258389 - DNA, 25 bp, Homo sapien
atctctccaaagcaatggctgcact

SEQ ID NO: 2258390 - DNA, 25 bp, Homo sapien
attctgccttagtgccatgttctct

SEQ ID NO: 2258391 - DNA, 25 bp, Homo sapien
tgaagtcctggaagaggcccctcag

SEQ ID NO: 2258392 - DNA, 25 bp, Homo sapien
ctcgggttgaagtcctggaagaggc

SEQ ID NO: 2258393 - DNA, 25 bp, Homo sapien
gttgaagtcctggaagaggcccctc

SEQ ID NO: 2258394 - DNA, 25 bp, Homo sapien
aagtcctggaagaggcccctcaggt

SEQ ID NO: 2258395 - DNA, 25 bp, Homo sapien
ggcggagaacttcaccgcggcgtcc

SEQ ID NO: 2258396 - DNA, 25 bp, Homo sapien
gagaacttcaccgcggcgtcctcct

SEQ ID NO: 2258397 - DNA, 25 bp, Homo sapien
cggagaacttcaccgcggcgtcctc

SEQ ID NO: 2258398 - DNA, 25 bp, Homo sapien
gcggagaacttcaccgcggcgtcct

SEQ ID NO: 2258399 - DNA, 25 bp, Homo sapien
gccttacagcgggttcatggcgcca

SEQ ID NO: 2258400 - DNA, 25 bp, Homo sapien
ctgcgccttacagcgggttcatggc

SEQ ID NO: 2258401 - DNA, 25 bp, Homo sapien
cagcgggttcatggcgccagcgcca

SEQ ID NO: 2258402 - DNA, 25 bp, Homo sapien
ttacagcgggttcatggcgccagcg

SEQ ID NO: 2258403 - DNA, 25 bp, Homo sapien
cagagcgctcctcgctgggaggtcc

SEQ ID NO: 2258404 - DNA, 25 bp, Homo sapien
gcccagagcgctcctcgctgggagg

SEQ ID NO: 2258405 - DNA, 25 bp, Homo sapien
gagggccgcgcatgcgtccggagcc

SEQ ID NO: 2258406 - DNA, 25 bp, Homo sapien
ccgcccagagcgctcctcgctggga

SEQ ID NO: 2258407 - DNA, 25 bp, Homo sapien
cgcgaccggcggaggagatggcagg

SEQ ID NO: 2258408 - DNA, 25 bp, Homo sapien
acgcgaccggcggaggagatggcag

SEQ ID NO: 2258409 - DNA, 25 bp, Homo sapien
ttgtgtccgcacgcgaccggcggag

SEQ ID NO: 2258410 - DNA, 25 bp, Homo sapien
gtccgcacgcgaccggcggaggaga

SEQ ID NO: 2258411 - DNA, 25 bp, Homo sapien
agattttccccagtgacgactgagc

SEQ ID NO: 2258412 - DNA, 25 bp, Homo sapien
cttggcccgcgctaccttctggaga

SEQ ID NO: 2258413 - DNA, 25 bp, Homo sapien
gattttccccagtgacgactgagcc

SEQ ID NO: 2258414 - DNA, 25 bp, Homo sapien
gcccgcgctaccttctggagatttt

SEQ ID NO: 2258415 - DNA, 25 bp, Homo sapien
tggtgatataggatgcctctcctct

SEQ ID NO: 2258416 - DNA, 25 bp, Homo sapien
gcactggtgaagagaatcctggtga

SEQ ID NO: 2258417 - DNA, 25 bp, Homo sapien
cttcaatgtggtgatataggatgcc

SEQ ID NO: 2258418 - DNA, 25 bp, Homo sapien
agaatcctggtgaatttagacactt

SEQ ID NO: 2258419 - DNA, 25 bp, Homo sapien
tggccgtggaaccgccctccacaca

SEQ ID NO: 2258420 - DNA, 25 bp, Homo sapien
aatggccgtggaaccgccctccaca

SEQ ID NO: 2258421 - DNA, 25 bp, Homo sapien
ggccgtggaaccgccctccacacac

SEQ ID NO: 2258422 - DNA, 25 bp, Homo sapien
atggccgtggaaccgccctccacac

SEQ ID NO: 2258423 - DNA, 25 bp, Homo sapien
ctggctgcagcagtagaatggagag

SEQ ID NO: 2258424 - DNA, 25 bp, Homo sapien
caaggcctatgggactataaagagc

SEQ ID NO: 2258425 - DNA, 25 bp, Homo sapien
tcacccttgctccagtggagggagg

SEQ ID NO: 2258426 - DNA, 25 bp, Homo sapien
gagcttctcggaggtcagattgaca

SEQ ID NO: 2258427 - DNA, 25 bp, Homo sapien
ggcataagtgtgtcctcagagacat

SEQ ID NO: 2258428 - DNA, 25 bp, Homo sapien
ccagttcattatgggggcataagtg

SEQ ID NO: 2258429 - DNA, 25 bp, Homo sapien
tccagttcattatgggggcataagt

SEQ ID NO: 2258430 - DNA, 25 bp, Homo sapien
ataagtgtgtcctcagagacataat

SEQ ID NO: 2258431 - DNA, 25 bp, Homo sapien
cttggctctaagaagggacatgcag

SEQ ID NO: 2258432 - DNA, 25 bp, Homo sapien
taagaagggacatgcagtatccctg

SEQ ID NO: 2258433 - DNA, 25 bp, Homo sapien
ggctcataacatggtccagcctcat

SEQ ID NO: 2258434 - DNA, 25 bp, Homo sapien
catgcagtatccctgtttccagcag

SEQ ID NO: 2258435 - DNA, 25 bp, Homo sapien
tggttgttagtagagataagaacgg

SEQ ID NO: 2258436 - DNA, 25 bp, Homo sapien
aatgatgatatttgcgtgttaacat

SEQ ID NO: 2258437 - DNA, 25 bp, Homo sapien
ataagaacggtaaagctgtaaacag

SEQ ID NO: 2258438 - DNA, 25 bp, Homo sapien
tatttgcgtgttaacataatcatca

SEQ ID NO: 2258439 - DNA, 25 bp, Homo sapien
tgaggaggacaacaccactttcgga

SEQ ID NO: 2258440 - DNA, 25 bp, Homo sapien
gggactatgggcaaatttgggcaca

SEQ ID NO: 2258441 - DNA, 25 bp, Homo sapien
tgccttccacccatactgaggagga

SEQ ID NO: 2258442 - DNA, 25 bp, Homo sapien
gggcacagcaacgagagaaggaaac

SEQ ID NO: 2258443 - DNA, 25 bp, Homo sapien
caagtgccattaggcactttgcaaa

SEQ ID NO: 2258444 - DNA, 25 bp, Homo sapien
aagacttgtgcaagtgccattaggc

SEQ ID NO: 2258445 - DNA, 25 bp, Homo sapien
gacttgtgcaagtgccattaggcac

SEQ ID NO: 2258446 - DNA, 25 bp, Homo sapien
tgaagacttgtgcaagtgccattag

SEQ ID NO: 2258447 - DNA, 25 bp, Homo sapien
tggagccccacaccctcacccctct

SEQ ID NO: 2258448 - DNA, 25 bp, Homo sapien
ttttcctctgcatcttagaggacat

SEQ ID NO: 2258449 - DNA, 25 bp, Homo sapien
ctcacccctctcttacttttcctct

SEQ ID NO: 2258450 - DNA, 25 bp, Homo sapien
ctctcttacttttcctctgcatctt

SEQ ID NO: 2258451 - DNA, 25 bp, Homo sapien
ctacaggaactcatagtgtgcagga

SEQ ID NO: 2258452 - DNA, 25 bp, Homo sapien
catagtgtgcaggatcactgctggg

SEQ ID NO: 2258453 - DNA, 25 bp, Homo sapien
gggtttcccatatgacctcttcagg

SEQ ID NO: 2258454 - DNA, 25 bp, Homo sapien
cattgggcttgctctgatcatcacc

SEQ ID NO: 2258455 - DNA, 25 bp, Homo sapien
aatcgtgcacaggaccattatctgg

SEQ ID NO: 2258456 - DNA, 25 bp, Homo sapien
tgggcttcccatagacactgtgctt

SEQ ID NO: 2258457 - DNA, 25 bp, Homo sapien
ccacatgcacttgaagatcacagga

SEQ ID NO: 2258458 - DNA, 25 bp, Homo sapien
aaaaaaaagaccagccacatgcact

SEQ ID NO: 2258459 - DNA, 25 bp, Homo sapien
gatcacaggaaagtaatccttataa

SEQ ID NO: 2258460 - DNA, 25 bp, Homo sapien
ataatttttgatgacactctctagc

SEQ ID NO: 2258461 - DNA, 25 bp, Homo sapien
tcttggaacaaggtcttcaggtctg

SEQ ID NO: 2258462 - DNA, 25 bp, Homo sapien
gatgactctggtcagaatggcagag

SEQ ID NO: 2258463 - DNA, 25 bp, Homo sapien
gattggctccatagagtgttgtcaa

SEQ ID NO: 2258464 - DNA, 25 bp, Homo sapien
ctttcctcaggctcgcagtgctgat

SEQ ID NO: 2258465 - DNA, 25 bp, Homo sapien
tttcgctcctgctcaactgtggatg

SEQ ID NO: 2258466 - DNA, 25 bp, Homo sapien
gaaaattctgcacgggattcccaag

SEQ ID NO: 2258467 - DNA, 25 bp, Homo sapien
gctcaactgtggatgagtcttgtgt

SEQ ID NO: 2258468 - DNA, 25 bp, Homo sapien
ggtattcagatttattcccgacagg

SEQ ID NO: 2258469 - DNA, 25 bp, Homo sapien
cctgaggccgtgctcatgattccaa

SEQ ID NO: 2258470 - DNA, 25 bp, Homo sapien
ccccgatgtgaacatcaggatccac

SEQ ID NO: 2258471 - DNA, 25 bp, Homo sapien
catcagcccccgatgtgaacatcag

SEQ ID NO: 2258472 - DNA, 25 bp, Homo sapien
tcccctgaggccgtgctcatgattc

SEQ ID NO: 2258473 - DNA, 25 bp, Homo sapien
agtccgcagaatactcccagatcca

SEQ ID NO: 2258474 - DNA, 25 bp, Homo sapien
agactaaaggctgtagcagatggtg

SEQ ID NO: 2258475 - DNA, 25 bp, Homo sapien
ggcgttgagtatcgggacactccgc

SEQ ID NO: 2258476 - DNA, 25 bp, Homo sapien
gatccacgttaggacttggaaagca

SEQ ID NO: 2258477 - DNA, 25 bp, Homo sapien
gcagcctcctagtgtccagtcctgg

SEQ ID NO: 2258478 - DNA, 25 bp, Homo sapien
tgaagccccttcacatcctgaatgg

SEQ ID NO: 2258479 - DNA, 25 bp, Homo sapien
agccccttcacatcctgaatggctt

SEQ ID NO: 2258480 - DNA, 25 bp, Homo sapien
tgcagcctcctagtgtccagtcctg

SEQ ID NO: 2258481 - DNA, 25 bp, Homo sapien
tcctggagttttcctcaagcagtgg

SEQ ID NO: 2258482 - DNA, 25 bp, Homo sapien
ccttcctggagttttcctcaagcag

SEQ ID NO: 2258483 - DNA, 25 bp, Homo sapien
ctcccttcctggagttttcctcaag

SEQ ID NO: 2258484 - DNA, 25 bp, Homo sapien
tactcccttcctggagttttcctca

SEQ ID NO: 2258485 - DNA, 25 bp, Homo sapien
tggaacgccatcaaagtgtttcttt

SEQ ID NO: 2258486 - DNA, 25 bp, Homo sapien
tcttttctggaacgccatcaaagtg

SEQ ID NO: 2258487 - DNA, 25 bp, Homo sapien
gagaggcttcttttctggaacgcca

SEQ ID NO: 2258488 - DNA, 25 bp, Homo sapien
ggcttcttttctggaacgccatcaa

SEQ ID NO: 2258489 - DNA, 25 bp, Homo sapien
cccatattaagttctggtgggtcac

SEQ ID NO: 2258490 - DNA, 25 bp, Homo sapien
catctccccatattaagttctggtg

SEQ ID NO: 2258491 - DNA, 25 bp, Homo sapien
tccccatattaagttctggtgggtc

SEQ ID NO: 2258492 - DNA, 25 bp, Homo sapien
tctccatctccccatattaagttct

SEQ ID NO: 2258493 - DNA, 25 bp, Homo sapien
taatgaccttctccttttatttctc

SEQ ID NO: 2258494 - DNA, 25 bp, Homo sapien
atgaccttctccttttatttctctg

SEQ ID NO: 2258495 - DNA, 25 bp, Homo sapien
aatgaccttctccttttatttctct

SEQ ID NO: 2258496 - DNA, 25 bp, Homo sapien
cacttgcacttgaaatggataagca

SEQ ID NO: 2258497 - DNA, 25 bp, Homo sapien
cacagagggaagaatgggcctgatt

SEQ ID NO: 2258498 - DNA, 25 bp, Homo sapien
gaagcatgcattggcccatttccct

SEQ ID NO: 2258499 - DNA, 25 bp, Homo sapien
tcacccgatggaagagaaacctaaa

SEQ ID NO: 2258500 - DNA, 25 bp, Homo sapien
gatgcagttcccctccatgaagatt

SEQ ID NO: 2258501 - DNA, 25 bp, Homo sapien
tctatcaggtcaggcgaggtacttg

SEQ ID NO: 2258502 - DNA, 25 bp, Homo sapien
tcagccccttgactcgatacttgcg

SEQ ID NO: 2258503 - DNA, 25 bp, Homo sapien
atcagataggctcccaaagatggca

SEQ ID NO: 2258504 - DNA, 25 bp, Homo sapien
gactctggttaggtcagcaggccga

SEQ ID NO: 2258505 - DNA, 25 bp, Homo sapien
tggttaggtcagcaggccgaactgt

SEQ ID NO: 2258506 - DNA, 25 bp, Homo sapien
cgaactgtgggaaatatctgggtga

SEQ ID NO: 2258507 - DNA, 25 bp, Homo sapien
tcagcaggccgaactgtgggaaata

SEQ ID NO: 2258508 - DNA, 25 bp, Homo sapien
acttgttctcctccagtgatcctct

SEQ ID NO: 2258509 - DNA, 25 bp, Homo sapien
tctgggttctcctgggactcctgtc

SEQ ID NO: 2258510 - DNA, 25 bp, Homo sapien
tctcctccagtgatcctctgggttc

SEQ ID NO: 2258511 - DNA, 25 bp, Homo sapien
tccaggttggcctgttctctaaaaa

SEQ ID NO: 2258512 - DNA, 25 bp, Homo sapien
tgaggttgcaagctgggggtccctt

SEQ ID NO: 2258513 - DNA, 25 bp, Homo sapien
agggtgaacatctcatcttgactac

SEQ ID NO: 2258514 - DNA, 25 bp, Homo sapien
cagctggacatcagagcaggaggct

SEQ ID NO: 2258515 - DNA, 25 bp, Homo sapien
gaggtagggcaggtgaggttgcaag

SEQ ID NO: 2258516 - DNA, 25 bp, Homo sapien
gaaactctcagatcaatagctcttt

SEQ ID NO: 2258517 - DNA, 25 bp, Homo sapien
aaactctcagatcaatagctctttc

SEQ ID NO: 2258518 - DNA, 25 bp, Homo sapien
gagaaactctcagatcaatagctct

SEQ ID NO: 2258519 - DNA, 25 bp, Homo sapien
ctgagaaactctcagatcaatagct

SEQ ID NO: 2258520 - DNA, 25 bp, Homo sapien
ctgttgactggaagtcgtcctctga

SEQ ID NO: 2258521 - DNA, 25 bp, Homo sapien
agtcgtcctctgagaacatagtgct

SEQ ID NO: 2258522 - DNA, 25 bp, Homo sapien
gggaccactgtagttgtggaccata

SEQ ID NO: 2258523 - DNA, 25 bp, Homo sapien
cgtcctctgagaacatagtgctcac

SEQ ID NO: 2258524 - DNA, 25 bp, Homo sapien
ccatcatgtggttgtccagggctga

SEQ ID NO: 2258525 - DNA, 25 bp, Homo sapien
gactactggcagatcctggactcca

SEQ ID NO: 2258526 - DNA, 25 bp, Homo sapien
gagtgaggatgcaccacatgtggcc

SEQ ID NO: 2258527 - DNA, 25 bp, Homo sapien
caacctcgtggcagaaatgtgagca

SEQ ID NO: 2258528 - DNA, 25 bp, Homo sapien
tggagtccaaagtctcctgagtcct

SEQ ID NO: 2258529 - DNA, 25 bp, Homo sapien
ctctgcggaactgagtctccatccc

SEQ ID NO: 2258530 - DNA, 25 bp, Homo sapien
ccagaccccctctgcggaactgagt

SEQ ID NO: 2258531 - DNA, 25 bp, Homo sapien
ggagtccaaagtctcctgagtcctc

SEQ ID NO: 2258532 - DNA, 25 bp, Homo sapien
acagtcccctgaggcttaagcggcg

SEQ ID NO: 2258533 - DNA, 25 bp, Homo sapien
cccacagtcccctgaggcttaagcg

SEQ ID NO: 2258534 - DNA, 25 bp, Homo sapien
cagaagccgaggggggtgtcagagg

SEQ ID NO: 2258535 - DNA, 25 bp, Homo sapien
gcagaagccgaggggggtgtcagag

SEQ ID NO: 2258536 - DNA, 25 bp, Homo sapien
agtccatccccatggggtgatccag

SEQ ID NO: 2258537 - DNA, 25 bp, Homo sapien
aagtccatccccatggggtgatcca

SEQ ID NO: 2258538 - DNA, 25 bp, Homo sapien
gaagtccatccccatggggtgatcc

SEQ ID NO: 2258539 - DNA, 25 bp, Homo sapien
gacacccctcagaaagacgctttcg

SEQ ID NO: 2258540 - DNA, 25 bp, Homo sapien
gaagccaatggaggtcacatccggc

SEQ ID NO: 2258541 - DNA, 25 bp, Homo sapien
tgccactctcaagacacccctcaga

SEQ ID NO: 2258542 - DNA, 25 bp, Homo sapien
agacgctttcgcttctctcagatcc

SEQ ID NO: 2258543 - DNA, 25 bp, Homo sapien
tctcggaccaagtctctgactctga

SEQ ID NO: 2258544 - DNA, 25 bp, Homo sapien
atgtctgctcctctcggaccaagtc

SEQ ID NO: 2258545 - DNA, 25 bp, Homo sapien
ctggagctccgtcctctgccaatga

SEQ ID NO: 2258546 - DNA, 25 bp, Homo sapien
tggagctccgtcctctgccaatgat

SEQ ID NO: 2258547 - DNA, 25 bp, Homo sapien
gacaacattgccaaggtcttccggg

SEQ ID NO: 2258548 - DNA, 25 bp, Homo sapien
tgccaaggtcttccggggctgacag

SEQ ID NO: 2258549 - DNA, 25 bp, Homo sapien
cattgccaaggtcttccggggctga

SEQ ID NO: 2258550 - DNA, 25 bp, Homo sapien
tgaggtcgggggacaacattgccaa

SEQ ID NO: 2258551 - DNA, 25 bp, Homo sapien
tccagccgtattcctttaatcaacc

SEQ ID NO: 2258552 - DNA, 25 bp, Homo sapien
aattccagccgtattcctttaatca

SEQ ID NO: 2258553 - DNA, 25 bp, Homo sapien
cgtattcctttaatcaaccagtgtt

SEQ ID NO: 2258554 - DNA, 25 bp, Homo sapien
gccgtattcctttaatcaaccagtg

SEQ ID NO: 2258555 - DNA, 25 bp, Homo sapien
ctcaaatgctggaataatgtaaacc

SEQ ID NO: 2258556 - DNA, 25 bp, Homo sapien
gacagcctatggctcagagaaaagg

SEQ ID NO: 2258557 - DNA, 25 bp, Homo sapien
ggcttcaatagaccagcctccctag

SEQ ID NO: 2258558 - DNA, 25 bp, Homo sapien
ggtcctgaggtactgcacgcctttg

SEQ ID NO: 2258559 - DNA, 25 bp, Homo sapien
tttgtctccatgtcatatggataga

SEQ ID NO: 2258560 - DNA, 25 bp, Homo sapien
atttgtctccatgtcatatggatag

SEQ ID NO: 2258561 - DNA, 25 bp, Homo sapien
gggcaataaccagggctattgaacc

SEQ ID NO: 2258562 - DNA, 25 bp, Homo sapien
tctttgagctgtatagacatgatat

SEQ ID NO: 2258563 - DNA, 25 bp, Homo sapien
gaaccaggacctagatcaacacata

SEQ ID NO: 2258564 - DNA, 25 bp, Homo sapien
gatcaacacataggtctgtgagagt

SEQ ID NO: 2258565 - DNA, 25 bp, Homo sapien
ttccaagtataaatctctttttgtg

SEQ ID NO: 2258566 - DNA, 25 bp, Homo sapien
ccaagtataaatctctttttgtgcc

SEQ ID NO: 2258567 - DNA, 25 bp, Homo sapien
aagtataaatctctttttgtgccta

SEQ ID NO: 2258568 - DNA, 25 bp, Homo sapien
ataaatctctttttgtgcctaacat

SEQ ID NO: 2258569 - DNA, 25 bp, Homo sapien
ccaaaccatatcgacatgttaaaga

SEQ ID NO: 2258570 - DNA, 25 bp, Homo sapien
aaccatatcgacatgttaaagaata

SEQ ID NO: 2258571 - DNA, 25 bp, Homo sapien
gaaacacctgcccttatgatttgat

SEQ ID NO: 2258572 - DNA, 25 bp, Homo sapien
ttatgatttgattacctcccaccgg

SEQ ID NO: 2258573 - DNA, 25 bp, Homo sapien
ctttaagactactgctccacttttt

SEQ ID NO: 2258574 - DNA, 25 bp, Homo sapien
ggctttaagactactgctccacttt

SEQ ID NO: 2258575 - DNA, 25 bp, Homo sapien
gctttaagactactgctccactttt

SEQ ID NO: 2258576 - DNA, 25 bp, Homo sapien
gggctttaagactactgctccactt

SEQ ID NO: 2258577 - DNA, 25 bp, Homo sapien
aagcaaaattgggattcagtgcatt

SEQ ID NO: 2258578 - DNA, 25 bp, Homo sapien
aaaattgggattcagtgcattgggc

SEQ ID NO: 2258579 - DNA, 25 bp, Homo sapien
aattgggattcagtgcattgggcag

SEQ ID NO: 2258580 - DNA, 25 bp, Homo sapien
gcaaaattgggattcagtgcattgg

SEQ ID NO: 2258581 - DNA, 25 bp, Homo sapien
ttctagcacagggctttcccagcag

SEQ ID NO: 2258582 - DNA, 25 bp, Homo sapien
ttctgtagcaggtaaggcatcaggg

SEQ ID NO: 2258583 - DNA, 25 bp, Homo sapien
tgtagcaggtaaggcatcagggccc

SEQ ID NO: 2258584 - DNA, 25 bp, Homo sapien
gtagcaggtaaggcatcagggccca

SEQ ID NO: 2258585 - DNA, 25 bp, Homo sapien
aatcctctattccagacattatctg

SEQ ID NO: 2258586 - DNA, 25 bp, Homo sapien
tatctgcactttaaaccaatcctct

SEQ ID NO: 2258587 - DNA, 25 bp, Homo sapien
ttctctgttgtgacaaggacgcaga

SEQ ID NO: 2258588 - DNA, 25 bp, Homo sapien
cattatctgctgacatatagaccca

SEQ ID NO: 2258589 - DNA, 25 bp, Homo sapien
tcattggtattcctagcctgtatca

SEQ ID NO: 2258590 - DNA, 25 bp, Homo sapien
agctccacttgcatagcacccacct

SEQ ID NO: 2258591 - DNA, 25 bp, Homo sapien
gtatcaatggtcagccatcagtcac

SEQ ID NO: 2258592 - DNA, 25 bp, Homo sapien
tcctagcctgtatcaatggtcagcc

SEQ ID NO: 2258593 - DNA, 25 bp, Homo sapien
cagcctccactgggggtcaagacag

SEQ ID NO: 2258594 - DNA, 25 bp, Homo sapien
gaaaggggtccagtgtacacaggaa

SEQ ID NO: 2258595 - DNA, 25 bp, Homo sapien
tcagcctccactgggggtcaagaca

SEQ ID NO: 2258596 - DNA, 25 bp, Homo sapien
gtcagcctccactgggggtcaagac

SEQ ID NO: 2258597 - DNA, 25 bp, Homo sapien
tgattgtaggtcttaaactcccatt

SEQ ID NO: 2258598 - DNA, 25 bp, Homo sapien
gtaggtcttaaactcccatttcaga

SEQ ID NO: 2258599 - DNA, 25 bp, Homo sapien
ttgtaggtcttaaactcccatttca

SEQ ID NO: 2258600 - DNA, 25 bp, Homo sapien
ctgattgtaggtcttaaactcccat

SEQ ID NO: 2258601 - DNA, 25 bp, Homo sapien
cactactagttcatgcagctccaga

SEQ ID NO: 2258602 - DNA, 25 bp, Homo sapien
caaagaggaaatgcggtttgtggac

SEQ ID NO: 2258603 - DNA, 25 bp, Homo sapien
tccagctgcagatgctgagccacag

SEQ ID NO: 2258604 - DNA, 25 bp, Homo sapien
gcatcactttgttagcttccagctg

SEQ ID NO: 2258605 - DNA, 25 bp, Homo sapien
tctcatctcccaggaactcatagca

SEQ ID NO: 2258606 - DNA, 25 bp, Homo sapien
aggcacttgccggtacaccaggtac

SEQ ID NO: 2258607 - DNA, 25 bp, Homo sapien
ccataatgctgaggacttcccacat

SEQ ID NO: 2258608 - DNA, 25 bp, Homo sapien
gggtgctgggtcccctcaggcctct

SEQ ID NO: 2258609 - DNA, 25 bp, Homo sapien
tcagaactgagagggaacgacctgt

SEQ ID NO: 2258610 - DNA, 25 bp, Homo sapien
acaggttacttgtctcgcgatgcca

SEQ ID NO: 2258611 - DNA, 25 bp, Homo sapien
cagttaaaagcgcacttcccgtggg

SEQ ID NO: 2258612 - DNA, 25 bp, Homo sapien
gcgggaagccagtctcaacaggtta

SEQ ID NO: 2258613 - DNA, 25 bp, Homo sapien
catcaccggttcgtggcagtctctg

SEQ ID NO: 2258614 - DNA, 25 bp, Homo sapien
acagacactgctttggatggacacc

SEQ ID NO: 2258615 - DNA, 25 bp, Homo sapien
aacaactgttgcagagatggaccgc

SEQ ID NO: 2258616 - DNA, 25 bp, Homo sapien
aaacccacgtgcgtttctctggaga

SEQ ID NO: 2258617 - DNA, 25 bp, Homo sapien
aacatgctcgaaggccaacagctgc

SEQ ID NO: 2258618 - DNA, 25 bp, Homo sapien
caaaacatgctcgaaggccaacagc

SEQ ID NO: 2258619 - DNA, 25 bp, Homo sapien
aaaacatgctcgaaggccaacagct

SEQ ID NO: 2258620 - DNA, 25 bp, Homo sapien
aaacatgctcgaaggccaacagctg

SEQ ID NO: 2258621 - DNA, 25 bp, Homo sapien
gaaggaggctgcctccgactcccca

SEQ ID NO: 2258622 - DNA, 25 bp, Homo sapien
ccggggtgtagaagggtctctgcct

SEQ ID NO: 2258623 - DNA, 25 bp, Homo sapien
cctccgactccccactggactgcat

SEQ ID NO: 2258624 - DNA, 25 bp, Homo sapien
cacccggggtgtagaagggtctctg

SEQ ID NO: 2258625 - DNA, 25 bp, Homo sapien
aaattcttgacactcctaggtatac

SEQ ID NO: 2258626 - DNA, 25 bp, Homo sapien
caaagatgttcttcaagagacagat

SEQ ID NO: 2258627 - DNA, 25 bp, Homo sapien
cctggcaacaaggaactctcatttg

SEQ ID NO: 2258628 - DNA, 25 bp, Homo sapien
caaactgtggtccaacaacaacaga

SEQ ID NO: 2258629 - DNA, 25 bp, Homo sapien
aatgagggtaattccacaaatagcc

SEQ ID NO: 2258630 - DNA, 25 bp, Homo sapien
caaatagcctgatcgatactcccca

SEQ ID NO: 2258631 - DNA, 25 bp, Homo sapien
taataaccttgcagagggaaatcct

SEQ ID NO: 2258632 - DNA, 25 bp, Homo sapien
taaagtagcatggtatcctagatgg

SEQ ID NO: 2258633 - DNA, 25 bp, Homo sapien
cagtgccaggccatgtcttttaaat

SEQ ID NO: 2258634 - DNA, 25 bp, Homo sapien
actccacatggtactagaattccta

SEQ ID NO: 2258635 - DNA, 25 bp, Homo sapien
gagtcacagtgccaggccatgtctt

SEQ ID NO: 2258636 - DNA, 25 bp, Homo sapien
gaaaatgctttcaaccaactaggca

SEQ ID NO: 2258637 - DNA, 25 bp, Homo sapien
cagatagctttggtataggtcacac

SEQ ID NO: 2258638 - DNA, 25 bp, Homo sapien
tgtgggtctattcaaggactctcca

SEQ ID NO: 2258639 - DNA, 25 bp, Homo sapien
catacactttttgagtcagcttgtc

SEQ ID NO: 2258640 - DNA, 25 bp, Homo sapien
acagcattgactttgaatctacaga

SEQ ID NO: 2258641 - DNA, 25 bp, Homo sapien
caggacaaatggaagttggaggact

SEQ ID NO: 2258642 - DNA, 25 bp, Homo sapien
cagtcttaaggacagtgttcatgtt

SEQ ID NO: 2258643 - DNA, 25 bp, Homo sapien
ccaggtcataggcaggttcagaaat

SEQ ID NO: 2258644 - DNA, 25 bp, Homo sapien
tctggtttacgataaggagttgtgg

SEQ ID NO: 2258645 - DNA, 25 bp, Homo sapien
tctccgtccttgacagcacatgttg

SEQ ID NO: 2258646 - DNA, 25 bp, Homo sapien
gaaattgctttgtaccgcctcttgg

SEQ ID NO: 2258647 - DNA, 25 bp, Homo sapien
cacagtgcaaactggtgtggtgtac

SEQ ID NO: 2258648 - DNA, 25 bp, Homo sapien
cagatttttaaagcggctgtagcaa

SEQ ID NO: 2258649 - DNA, 25 bp, Homo sapien
tacattttgaccagcgatgtcagtg

SEQ ID NO: 2258650 - DNA, 25 bp, Homo sapien
caatcatggcttactcctaggctta

SEQ ID NO: 2258651 - DNA, 25 bp, Homo sapien
ttttgatgccaaatgtaagaactcc

SEQ ID NO: 2258652 - DNA, 25 bp, Homo sapien
cgccatgtatgtccagttgcttcaa

SEQ ID NO: 2258653 - DNA, 25 bp, Homo sapien
taaatgcctagtataatggcagcag

SEQ ID NO: 2258654 - DNA, 25 bp, Homo sapien
catttatacaggagcaattcttgca

SEQ ID NO: 2258655 - DNA, 25 bp, Homo sapien
gttgtataccttttctcgctccttg

SEQ ID NO: 2258656 - DNA, 25 bp, Homo sapien
gacaacatattagcacattgcccct

SEQ ID NO: 2258657 - DNA, 25 bp, Homo sapien
tcgaacaggcccaataacctctagt

SEQ ID NO: 2258658 - DNA, 25 bp, Homo sapien
cttctaggcctacaggatacaagca

SEQ ID NO: 2258659 - DNA, 25 bp, Homo sapien
cagtgtttttgggtaaagaacagtg

SEQ ID NO: 2258660 - DNA, 25 bp, Homo sapien
gatacaagcactcagggatagcagt

SEQ ID NO: 2258661 - DNA, 25 bp, Homo sapien
ctgtaagtttccttggacacgaaca

SEQ ID NO: 2258662 - DNA, 25 bp, Homo sapien
cacgaacacaggagcagagtttcta

SEQ ID NO: 2258663 - DNA, 25 bp, Homo sapien
tttctatggagcagctggtctcccc

SEQ ID NO: 2258664 - DNA, 25 bp, Homo sapien
cagagtttctatggagcagctggtc

SEQ ID NO: 2258665 - DNA, 25 bp, Homo sapien
ggttagtttctgagagtaggtacca

SEQ ID NO: 2258666 - DNA, 25 bp, Homo sapien
ttccaggaaagtgcagaggtcttac

SEQ ID NO: 2258667 - DNA, 25 bp, Homo sapien
gctggaatatcctaagatctgggac

SEQ ID NO: 2258668 - DNA, 25 bp, Homo sapien
tggactgggtctagatcatgagagc

SEQ ID NO: 2258669 - DNA, 25 bp, Homo sapien
gcagactggtcagcaaatagtccag

SEQ ID NO: 2258670 - DNA, 25 bp, Homo sapien
gctagtgttccagcgatccaagtgg

SEQ ID NO: 2258671 - DNA, 25 bp, Homo sapien
caagtcactgaggaccaacccagat

SEQ ID NO: 2258672 - DNA, 25 bp, Homo sapien
ccaatggaacaagcagcagactggt

SEQ ID NO: 2258673 - DNA, 25 bp, Homo sapien
cttcatctgccacctttactcctgg

SEQ ID NO: 2258674 - DNA, 25 bp, Homo sapien
tcatctgccacctttactcctggtt

SEQ ID NO: 2258675 - DNA, 25 bp, Homo sapien
tctgccacctttactcctggttctt

SEQ ID NO: 2258676 - DNA, 25 bp, Homo sapien
tgccacctttactcctggttctttc

SEQ ID NO: 2258677 - DNA, 25 bp, Homo sapien
attttcactcttcacagttactaac

SEQ ID NO: 2258678 - DNA, 25 bp, Homo sapien
cttcacagttactaacttgtcttct

SEQ ID NO: 2258679 - DNA, 25 bp, Homo sapien
acagttactaacttgtcttcttttg

SEQ ID NO: 2258680 - DNA, 25 bp, Homo sapien
actcttcacagttactaacttgtct

SEQ ID NO: 2258681 - DNA, 25 bp, Homo sapien
tagaatatgagagcatcacacagat

SEQ ID NO: 2258682 - DNA, 25 bp, Homo sapien
ctaacacatcaccacagaatacaat

SEQ ID NO: 2258683 - DNA, 25 bp, Homo sapien
agtatttagaatatgagagcatcac

SEQ ID NO: 2258684 - DNA, 25 bp, Homo sapien
tacaatgtgtcaaagtatttagaat

SEQ ID NO: 2258685 - DNA, 25 bp, Homo sapien
ttgtccactgccagaattctctggg

SEQ ID NO: 2258686 - DNA, 25 bp, Homo sapien
gccagaattctctgggatcactcat

SEQ ID NO: 2258687 - DNA, 25 bp, Homo sapien
tttccactgaggactgaaattctgt

SEQ ID NO: 2258688 - DNA, 25 bp, Homo sapien
ggactgaaattctgttgtccttttc

SEQ ID NO: 2258689 - DNA, 25 bp, Homo sapien
caccatagcctgaattctcaccagt

SEQ ID NO: 2258690 - DNA, 25 bp, Homo sapien
tgacacaccatagcctgaattctca

SEQ ID NO: 2258691 - DNA, 25 bp, Homo sapien
acacaccatagcctgaattctcacc

SEQ ID NO: 2258692 - DNA, 25 bp, Homo sapien
ctgacacaccatagcctgaattctc

SEQ ID NO: 2258693 - DNA, 25 bp, Homo sapien
aagtctgcatctgagtctgtagtac

SEQ ID NO: 2258694 - DNA, 25 bp, Homo sapien
cctgtggtgggatggcagtaatctc

SEQ ID NO: 2258695 - DNA, 25 bp, Homo sapien
caggagaacgtgtttggatggcatt

SEQ ID NO: 2258696 - DNA, 25 bp, Homo sapien
taatctctgctaagataaacgggag

SEQ ID NO: 2258697 - DNA, 25 bp, Homo sapien
tgaagcaaccttacaatcttgtgat

SEQ ID NO: 2258698 - DNA, 25 bp, Homo sapien
gagtggatgtcttacattgctacca

SEQ ID NO: 2258699 - DNA, 25 bp, Homo sapien
gaaagggcctctgataaatctccag

SEQ ID NO: 2258700 - DNA, 25 bp, Homo sapien
tattgcattggctaagacttccata

SEQ ID NO: 2258701 - DNA, 25 bp, Homo sapien
cacgaagcttgtggctgttggcaca

SEQ ID NO: 2258702 - DNA, 25 bp, Homo sapien
tccacaccacgaagcttgtggctgt

SEQ ID NO: 2258703 - DNA, 25 bp, Homo sapien
tattgtagggtctgcttcaaagatg

SEQ ID NO: 2258704 - DNA, 25 bp, Homo sapien
gctgttggcacacttggttgtcacc

SEQ ID NO: 2258705 - DNA, 25 bp, Homo sapien
caaggagcttgtgttactatcatta

SEQ ID NO: 2258706 - DNA, 25 bp, Homo sapien
ggagcttgtgttactatcattattt

SEQ ID NO: 2258707 - DNA, 25 bp, Homo sapien
aggagcttgtgttactatcattatt

SEQ ID NO: 2258708 - DNA, 25 bp, Homo sapien
aaggagcttgtgttactatcattat

SEQ ID NO: 2258709 - DNA, 25 bp, Homo sapien
ttcggggacttcattgccaatcagc

SEQ ID NO: 2258710 - DNA, 25 bp, Homo sapien
catactttcattttcggggacttca

SEQ ID NO: 2258711 - DNA, 25 bp, Homo sapien
caggcacttgtctccctcctttgct

SEQ ID NO: 2258712 - DNA, 25 bp, Homo sapien
ggctactctcctcctaggtttcact

SEQ ID NO: 2258713 - DNA, 25 bp, Homo sapien
ggtgaccaagattgtgaaggccttg

SEQ ID NO: 2258714 - DNA, 25 bp, Homo sapien
gggaaggtgaccaagattgtgaagg

SEQ ID NO: 2258715 - DNA, 25 bp, Homo sapien
tgtgaaggccttgcaccattttctt

SEQ ID NO: 2258716 - DNA, 25 bp, Homo sapien
ttgtgaaggccttgcaccattttct

SEQ ID NO: 2258717 - DNA, 25 bp, Homo sapien
tgctggtatgtcctctagcctccct

SEQ ID NO: 2258718 - DNA, 25 bp, Homo sapien
gctggtatgtcctctagcctccctg

SEQ ID NO: 2258719 - DNA, 25 bp, Homo sapien
ctggattgagaaaggtcggaaaact

SEQ ID NO: 2258720 - DNA, 25 bp, Homo sapien
gattgagaaaggtcggaaaactgga

SEQ ID NO: 2258721 - DNA, 25 bp, Homo sapien
tgctggattgagaaaggtcggaaaa

SEQ ID NO: 2258722 - DNA, 25 bp, Homo sapien
tttgctggattgagaaaggtcggaa

SEQ ID NO: 2258723 - DNA, 25 bp, Homo sapien
ccaatacagagatgagcagattgtg

SEQ ID NO: 2258724 - DNA, 25 bp, Homo sapien
aaatccaatacagagatgagcagat

SEQ ID NO: 2258725 - DNA, 25 bp, Homo sapien
caatacagagatgagcagattgtgc

SEQ ID NO: 2258726 - DNA, 25 bp, Homo sapien
tacaaatccaatacagagatgagca

SEQ ID NO: 2258727 - DNA, 25 bp, Homo sapien
tgcctttggcggtgatatgcgatcg

SEQ ID NO: 2258728 - DNA, 25 bp, Homo sapien
tatacggtgtgagaaatttggctgc

SEQ ID NO: 2258729 - DNA, 25 bp, Homo sapien
gctgctgagagcttgattgtaatga

SEQ ID NO: 2258730 - DNA, 25 bp, Homo sapien
ggtttccaggttgcaattggacaga

SEQ ID NO: 2258731 - DNA, 25 bp, Homo sapien
gcagctcttttaggaatgcggaaca

SEQ ID NO: 2258732 - DNA, 25 bp, Homo sapien
taggaatgcggaacagcagcctttt

SEQ ID NO: 2258733 - DNA, 25 bp, Homo sapien
agcagccttttcacaggcaagggtc

SEQ ID NO: 2258734 - DNA, 25 bp, Homo sapien
ccttttcacaggcaagggtccaggt

SEQ ID NO: 2258735 - DNA, 25 bp, Homo sapien
ccccgcaagaggagcagctgagaaa

SEQ ID NO: 2258736 - DNA, 25 bp, Homo sapien
tctttagagagtggccccgcaagag

SEQ ID NO: 2258737 - DNA, 25 bp, Homo sapien
tgcaaatggcagagccctccagctt

SEQ ID NO: 2258738 - DNA, 25 bp, Homo sapien
tgttctctttagagagtggccccgc

SEQ ID NO: 2258739 - DNA, 25 bp, Homo sapien
cggagtcaccctgcatcagctcttg

SEQ ID NO: 2258740 - DNA, 25 bp, Homo sapien
cggcttaaggctcgaggcgtgccag

SEQ ID NO: 2258741 - DNA, 25 bp, Homo sapien
cttaaggctcgaggcgtgccagggc

SEQ ID NO: 2258742 - DNA, 25 bp, Homo sapien
cccggagtcaccctgcatcagctct

SEQ ID NO: 2258743 - DNA, 25 bp, Homo sapien
taaagctgacgtgttggcctccagc

SEQ ID NO: 2258744 - DNA, 25 bp, Homo sapien
aataaagctgacgtgttggcctcca

SEQ ID NO: 2258745 - DNA, 25 bp, Homo sapien
ataaagctgacgtgttggcctccag

SEQ ID NO: 2258746 - DNA, 25 bp, Homo sapien
aaagctgacgtgttggcctccagct

SEQ ID NO: 2258747 - DNA, 25 bp, Homo sapien
ggagcatctctagagcttgccgaca

SEQ ID NO: 2258748 - DNA, 25 bp, Homo sapien
gcatctctagagcttgccgacacat

SEQ ID NO: 2258749 - DNA, 25 bp, Homo sapien
gagcatctctagagcttgccgacac

SEQ ID NO: 2258750 - DNA, 25 bp, Homo sapien
tcaggagcatctctagagcttgccg

SEQ ID NO: 2258751 - DNA, 25 bp, Homo sapien
agactcttcctagctcaggagaaac

SEQ ID NO: 2258752 - DNA, 25 bp, Homo sapien
cataaagtccctcgacttatgtcgg

SEQ ID NO: 2258753 - DNA, 25 bp, Homo sapien
cctcgacttatgtcgggtagactct

SEQ ID NO: 2258754 - DNA, 25 bp, Homo sapien
ttatgtcgggtagactcttcctagc

SEQ ID NO: 2258755 - DNA, 25 bp, Homo sapien
tggaagggcagctggacgcatggcc

SEQ ID NO: 2258756 - DNA, 25 bp, Homo sapien
aagggcagctggacgcatggcctct

SEQ ID NO: 2258757 - DNA, 25 bp, Homo sapien
agggcagctggacgcatggcctctg

SEQ ID NO: 2258758 - DNA, 25 bp, Homo sapien
ctggcctcactgtggaagggcagct

SEQ ID NO: 2258759 - DNA, 25 bp, Homo sapien
cttcagcccgtaagcccggcaggcc

SEQ ID NO: 2258760 - DNA, 25 bp, Homo sapien
cagcccactcttcagcccgtaagcc

SEQ ID NO: 2258761 - DNA, 25 bp, Homo sapien
gcccactcttcagcccgtaagcccg

SEQ ID NO: 2258762 - DNA, 25 bp, Homo sapien
ctcttcagcccgtaagcccggcagg

SEQ ID NO: 2258763 - DNA, 25 bp, Homo sapien
taatctggtgggtgaacaagctcct

SEQ ID NO: 2258764 - DNA, 25 bp, Homo sapien
agggagcccagtcttctatttattg

SEQ ID NO: 2258765 - DNA, 25 bp, Homo sapien
caccagggagcccagtcttctattt

SEQ ID NO: 2258766 - DNA, 25 bp, Homo sapien
ttccagaaccttcattatcatgttt

SEQ ID NO: 2258767 - DNA, 25 bp, Homo sapien
tgtcacttctgtacgtgaagcgaag

SEQ ID NO: 2258768 - DNA, 25 bp, Homo sapien
cgtgaagcgaagcttctcaatgata

SEQ ID NO: 2258769 - DNA, 25 bp, Homo sapien
agcccggaggagtcacctgaatttt

SEQ ID NO: 2258770 - DNA, 25 bp, Homo sapien
ggagttgccgtgactttttcagtaa

SEQ ID NO: 2258771 - DNA, 25 bp, Homo sapien
tgaacagggttgagctcccaatcac

SEQ ID NO: 2258772 - DNA, 25 bp, Homo sapien
ctgaacagggttgagctcccaatca

SEQ ID NO: 2258773 - DNA, 25 bp, Homo sapien
aagagcgtgatcttcgtatgactca

SEQ ID NO: 2258774 - DNA, 25 bp, Homo sapien
ctctttggcgtgaaccttctgcaac

SEQ ID NO: 2258775 - DNA, 25 bp, Homo sapien
ttcattggtgaagagcgtgatcttc

SEQ ID NO: 2258776 - DNA, 25 bp, Homo sapien
ggtctctttggcgtgaaccttctgc

SEQ ID NO: 2258777 - DNA, 25 bp, Homo sapien
cttgaattggacatcactaaagagg

SEQ ID NO: 2258778 - DNA, 25 bp, Homo sapien
agtgagtagtcagatccatggccca

SEQ ID NO: 2258779 - DNA, 25 bp, Homo sapien
catcactaaagaggttggcacggac

SEQ ID NO: 2258780 - DNA, 25 bp, Homo sapien
aggttggcacggacccacagcactt

SEQ ID NO: 2258781 - DNA, 25 bp, Homo sapien
tgtccctgctgccccttaaactggt

SEQ ID NO: 2258782 - DNA, 25 bp, Homo sapien
cttggaaacgtttttgtccctgctg

SEQ ID NO: 2258783 - DNA, 25 bp, Homo sapien
tttgtccctgctgccccttaaactg

SEQ ID NO: 2258784 - DNA, 25 bp, Homo sapien
cctgctgccccttaaactggtcaag

SEQ ID NO: 2258785 - DNA, 25 bp, Homo sapien
ctggattatccagctcctataagac

SEQ ID NO: 2258786 - DNA, 25 bp, Homo sapien
gcacctggattatccagctcctata

SEQ ID NO: 2258787 - DNA, 25 bp, Homo sapien
ctagaattcattttgcacctggatt

SEQ ID NO: 2258788 - DNA, 25 bp, Homo sapien
acctggattatccagctcctataag

SEQ ID NO: 2258789 - DNA, 25 bp, Homo sapien
aaattcactgaatttttgtctttct

SEQ ID NO: 2258790 - DNA, 25 bp, Homo sapien
cactgaatttttgtctttctcggta

SEQ ID NO: 2258791 - DNA, 25 bp, Homo sapien
tcactgaatttttgtctttctcggt

SEQ ID NO: 2258792 - DNA, 25 bp, Homo sapien
attcactgaatttttgtctttctcg

SEQ ID NO: 2258793 - DNA, 25 bp, Homo sapien
ttcatcttcactaggagattcaaac

SEQ ID NO: 2258794 - DNA, 25 bp, Homo sapien
attcatcttcactaggagattcaaa

SEQ ID NO: 2258795 - DNA, 25 bp, Homo sapien
tcggttttgtaatatgactcccacc

SEQ ID NO: 2258796 - DNA, 25 bp, Homo sapien
gccctcggttttgtaatatgactcc

SEQ ID NO: 2258797 - DNA, 25 bp, Homo sapien
cctcggttttgtaatatgactccca

SEQ ID NO: 2258798 - DNA, 25 bp, Homo sapien
ctcggttttgtaatatgactcccac

SEQ ID NO: 2258799 - DNA, 25 bp, Homo sapien
gaagtttcatactcatctgccttgg

SEQ ID NO: 2258800 - DNA, 25 bp, Homo sapien
taggctccttgctctatgcaccttg

SEQ ID NO: 2258801 - DNA, 25 bp, Homo sapien
gggcccgaattgcactttggcagtg

SEQ ID NO: 2258802 - DNA, 25 bp, Homo sapien
gcagtagcctggctggatgagggtt

SEQ ID NO: 2258803 - DNA, 25 bp, Homo sapien
gctgcctcctgcaccagtgcggcct

SEQ ID NO: 2258804 - DNA, 25 bp, Homo sapien
ctgcctcctgcaccagtgcggcctc

SEQ ID NO: 2258805 - DNA, 25 bp, Homo sapien
tgcaggagaacccatgcctctgttg

SEQ ID NO: 2258806 - DNA, 25 bp, Homo sapien
aggagaacccatgcctctgttgtgg

SEQ ID NO: 2258807 - DNA, 25 bp, Homo sapien
gaacccatgcctctgttgtggggcc

SEQ ID NO: 2258808 - DNA, 25 bp, Homo sapien
aacccatgcctctgttgtggggccc

SEQ ID NO: 2258809 - DNA, 25 bp, Homo sapien
ggatgggcatttgtaggtctgtgag

SEQ ID NO: 2258810 - DNA, 25 bp, Homo sapien
tttcagaagggacgtagggcacttg

SEQ ID NO: 2258811 - DNA, 25 bp, Homo sapien
caggtaatctcagttatctgacgct

SEQ ID NO: 2258812 - DNA, 25 bp, Homo sapien
gctagggatgggcatttgtaggtct

SEQ ID NO: 2258813 - DNA, 25 bp, Homo sapien
ggaggacccagcaagtgccaaccaa

SEQ ID NO: 2258814 - DNA, 25 bp, Homo sapien
gtcatggactcccatgggaccactt

SEQ ID NO: 2258815 - DNA, 25 bp, Homo sapien
tccttccaatttgccggggtagcta

SEQ ID NO: 2258816 - DNA, 25 bp, Homo sapien
caagtgccaaccaaataggcaaaca

SEQ ID NO: 2258817 - DNA, 25 bp, Homo sapien
gcctgctgccttgtattatttccct

SEQ ID NO: 2258818 - DNA, 25 bp, Homo sapien
ctccccctgccgcttgctctgccct

SEQ ID NO: 2258819 - DNA, 25 bp, Homo sapien
tgcctgctgccttgtattatttccc

SEQ ID NO: 2258820 - DNA, 25 bp, Homo sapien
gtgcctgctgccttgtattatttcc

SEQ ID NO: 2258821 - DNA, 25 bp, Homo sapien
gttgcaaaacagcagtcacgactca

SEQ ID NO: 2258822 - DNA, 25 bp, Homo sapien
ctttgggtcccatcaagattagcct

SEQ ID NO: 2258823 - DNA, 25 bp, Homo sapien
tagggaggcaagtcatcctggtctg

SEQ ID NO: 2258824 - DNA, 25 bp, Homo sapien
cctggaggatcgagccacagaattt

SEQ ID NO: 2258825 - DNA, 25 bp, Homo sapien
gccatatttgcatccccagttgagg

SEQ ID NO: 2258826 - DNA, 25 bp, Homo sapien
gaaacaaatattccgtcaccaggct

SEQ ID NO: 2258827 - DNA, 25 bp, Homo sapien
gaagcatttgcggacaatccccaag

SEQ ID NO: 2258828 - DNA, 25 bp, Homo sapien
gtcaccaggctgtcatgtgtccctg

SEQ ID NO: 2258829 - DNA, 25 bp, Homo sapien
agcaccgtgttggcgactgtgggag

SEQ ID NO: 2258830 - DNA, 25 bp, Homo sapien
ctgagaccctcaggaaatgggctca

SEQ ID NO: 2258831 - DNA, 25 bp, Homo sapien
ccgtgttggcgactgtgggagacaa

SEQ ID NO: 2258832 - DNA, 25 bp, Homo sapien
tgttggcgactgtgggagacaaggc

SEQ ID NO: 2258833 - DNA, 25 bp, Homo sapien
tgtcttcactgatttagcaatgcgg

SEQ ID NO: 2258834 - DNA, 25 bp, Homo sapien
tggcaactgtcttcactgatttagc

SEQ ID NO: 2258835 - DNA, 25 bp, Homo sapien
tcactgatttagcaatgcggttcat

SEQ ID NO: 2258836 - DNA, 25 bp, Homo sapien
tcttcactgatttagcaatgcggtt

SEQ ID NO: 2258837 - DNA, 25 bp, Homo sapien
gcgatcccactgctgtgcgttaatc

SEQ ID NO: 2258838 - DNA, 25 bp, Homo sapien
caggactctcggcaactctgcgatc

SEQ ID NO: 2258839 - DNA, 25 bp, Homo sapien
tctcggcaactctgcgatcccactg

SEQ ID NO: 2258840 - DNA, 25 bp, Homo sapien
gatcccactgctgtgcgttaatcat

SEQ ID NO: 2258841 - DNA, 25 bp, Homo sapien
tgcccgggcctgtgagttatggttt

SEQ ID NO: 2258842 - DNA, 25 bp, Homo sapien
ccatcttccattgccaaaggctgtg

SEQ ID NO: 2258843 - DNA, 25 bp, Homo sapien
tataccagcagtcccaagtcattgc

SEQ ID NO: 2258844 - DNA, 25 bp, Homo sapien
catttggccctaggcagtggtatgc

SEQ ID NO: 2258845 - DNA, 25 bp, Homo sapien
tgaaatatcagcagtgtagcagagg

SEQ ID NO: 2258846 - DNA, 25 bp, Homo sapien
tcgggccccagaaggctgatctaca

SEQ ID NO: 2258847 - DNA, 25 bp, Homo sapien
cttgacgtaagcatttgttttgggc

SEQ ID NO: 2258848 - DNA, 25 bp, Homo sapien
tgggcatttggtaacgcctgacata

SEQ ID NO: 2258849 - DNA, 25 bp, Homo sapien
agtgtgagcagagcccgtgtccagc

SEQ ID NO: 2258850 - DNA, 25 bp, Homo sapien
tgagcagagcccgtgtccagcacag

SEQ ID NO: 2258851 - DNA, 25 bp, Homo sapien
agcagagcccgtgtccagcacaggg

SEQ ID NO: 2258852 - DNA, 25 bp, Homo sapien
tgtgagcagagcccgtgtccagcac

SEQ ID NO: 2258853 - DNA, 25 bp, Homo sapien
aattgaatccgaagcagatgctcta

SEQ ID NO: 2258854 - DNA, 25 bp, Homo sapien
tgaatccgaagcagatgctctaatg

SEQ ID NO: 2258855 - DNA, 25 bp, Homo sapien
ctagccaaattgaatccgaagcaga

SEQ ID NO: 2258856 - DNA, 25 bp, Homo sapien
gccaaattgaatccgaagcagatgc

SEQ ID NO: 2258857 - DNA, 25 bp, Homo sapien
catcagtcctcatcaacttcttgaa

SEQ ID NO: 2258858 - DNA, 25 bp, Homo sapien
aacttcttgaaatcctcctgtggat

SEQ ID NO: 2258859 - DNA, 25 bp, Homo sapien
tgtgttcagcatcagtcctcatcaa

SEQ ID NO: 2258860 - DNA, 25 bp, Homo sapien
ttgaaatcctcctgtggatccttct

SEQ ID NO: 2258861 - DNA, 25 bp, Homo sapien
gagcatgaggctctcgaaacacaga

SEQ ID NO: 2258862 - DNA, 25 bp, Homo sapien
ctgaaggatacagccgcagggagca

SEQ ID NO: 2258863 - DNA, 25 bp, Homo sapien
tgaggctctcgaaacacagaaagcc

SEQ ID NO: 2258864 - DNA, 25 bp, Homo sapien
cagggagcatgaggctctcgaaaca

SEQ ID NO: 2258865 - DNA, 25 bp, Homo sapien
ggttatagtgggctccctcttcatc

SEQ ID NO: 2258866 - DNA, 25 bp, Homo sapien
tcagatgggctggttatagtgggct

SEQ ID NO: 2258867 - DNA, 25 bp, Homo sapien
atgggctggttatagtgggctccct

SEQ ID NO: 2258868 - DNA, 25 bp, Homo sapien
ggctggttatagtgggctccctctt

SEQ ID NO: 2258869 - DNA, 25 bp, Homo sapien
tgtgaaccaggaccttatgctgaga

SEQ ID NO: 2258870 - DNA, 25 bp, Homo sapien
tgtagcttggaaatgcctgtagggc

SEQ ID NO: 2258871 - DNA, 25 bp, Homo sapien
caagagaagtgtgtaggcctgctgc

SEQ ID NO: 2258872 - DNA, 25 bp, Homo sapien
tttgccttggctctcaacatgatgc

SEQ ID NO: 2258873 - DNA, 25 bp, Homo sapien
aaaacacagttgatggacagaagcc

SEQ ID NO: 2258874 - DNA, 25 bp, Homo sapien
cacggaatcacgtggagtggttgta

SEQ ID NO: 2258875 - DNA, 25 bp, Homo sapien
catgagtgtgcaccccatgcagtca

SEQ ID NO: 2258876 - DNA, 25 bp, Homo sapien
tcacacttgagtgggcacggaatca

SEQ ID NO: 2258877 - DNA, 25 bp, Homo sapien
aagaagaaggattactccttcctct

SEQ ID NO: 2258878 - DNA, 25 bp, Homo sapien
agaaggattactccttcctctgtgg

SEQ ID NO: 2258879 - DNA, 25 bp, Homo sapien
aagaaggattactccttcctctgtg

SEQ ID NO: 2258880 - DNA, 25 bp, Homo sapien
tcctctgtggaaggctgatctcttc

SEQ ID NO: 2258881 - DNA, 25 bp, Homo sapien
tgttggtgacaggttgctactcaga

SEQ ID NO: 2258882 - DNA, 25 bp, Homo sapien
aagtccaggttaggaaacgcatccg

SEQ ID NO: 2258883 - DNA, 25 bp, Homo sapien
ctactcagaggtgcggacaggagct

SEQ ID NO: 2258884 - DNA, 25 bp, Homo sapien
tccgctgagcgtgaccagatgtgtt

SEQ ID NO: 2258885 - DNA, 25 bp, Homo sapien
tacgctgggctactgggaggctccc

SEQ ID NO: 2258886 - DNA, 25 bp, Homo sapien
cccgtcgggcgtctgaaatccggcg

SEQ ID NO: 2258887 - DNA, 25 bp, Homo sapien
tagaagggcgcaagctcctcgggct

SEQ ID NO: 2258888 - DNA, 25 bp, Homo sapien
tcaccggcgacggtgccttcacatg

SEQ ID NO: 2258889 - DNA, 25 bp, Homo sapien
tttgccgcctctgagcgagagtgtg

SEQ ID NO: 2258890 - DNA, 25 bp, Homo sapien
cgagagtgtggagtgtgcgcgccga

SEQ ID NO: 2258891 - DNA, 25 bp, Homo sapien
accccaacgctgtttgccgcctctg

SEQ ID NO: 2258892 - DNA, 25 bp, Homo sapien
gcgccgaatccgctgccctgcactc

SEQ ID NO: 2258893 - DNA, 25 bp, Homo sapien
agccatcggaacctgtgcaaacacg

SEQ ID NO: 2258894 - DNA, 25 bp, Homo sapien
gattaaattcggactgagcagacac

SEQ ID NO: 2258895 - DNA, 25 bp, Homo sapien
ggattagcctgccagaaagctcggc

SEQ ID NO: 2258896 - DNA, 25 bp, Homo sapien
caaatacttttctcggccagttggc

SEQ ID NO: 2258897 - DNA, 25 bp, Homo sapien
gtgtgtgtgagcgggcgggagcaca

SEQ ID NO: 2258898 - DNA, 25 bp, Homo sapien
tgggtgtgtgtgagcgggcgggagc

SEQ ID NO: 2258899 - DNA, 25 bp, Homo sapien
ggcgggagcacagcgtggctggggg

SEQ ID NO: 2258900 - DNA, 25 bp, Homo sapien
gtgtgtgagcgggcgggagcacagc

SEQ ID NO: 2258901 - DNA, 25 bp, Homo sapien
tgctgctcacgggtaggcaaaccca

SEQ ID NO: 2258902 - DNA, 25 bp, Homo sapien
gcgcggtccccacggtgaacgtgct

SEQ ID NO: 2258903 - DNA, 25 bp, Homo sapien
cacggtgaacgtgctgctcacgggt

SEQ ID NO: 2258904 - DNA, 25 bp, Homo sapien
tcgttgttgtttggcaccacggtgc

SEQ ID NO: 2258905 - DNA, 25 bp, Homo sapien
agccgagcttactagaggcggctgc

SEQ ID NO: 2258906 - DNA, 25 bp, Homo sapien
cgagccgagcttactagaggcggct

SEQ ID NO: 2258907 - DNA, 25 bp, Homo sapien
agcgagccgagcttactagaggcgg

SEQ ID NO: 2258908 - DNA, 25 bp, Homo sapien
cgagcgagccgagcttactagaggc

SEQ ID NO: 2258909 - DNA, 25 bp, Homo sapien
cgccgccaacaatccgctttataaa

SEQ ID NO: 2258910 - DNA, 25 bp, Homo sapien
cgccgccgccaacaatccgctttat

SEQ ID NO: 2258911 - DNA, 25 bp, Homo sapien
gccaacaatccgctttataaaaagc

SEQ ID NO: 2258912 - DNA, 25 bp, Homo sapien
gccgccaacaatccgctttataaaa

SEQ ID NO: 2258913 - DNA, 25 bp, Homo sapien
ttggtttcgctttgcagcgggcgcc

SEQ ID NO: 2258914 - DNA, 25 bp, Homo sapien
agaggccctaggctgcaagcgctcc

SEQ ID NO: 2258915 - DNA, 25 bp, Homo sapien
ggcagacgcgactcgccgatgcgct

SEQ ID NO: 2258916 - DNA, 25 bp, Homo sapien
ggacggccgagtggactgcactgcg

SEQ ID NO: 2258917 - DNA, 25 bp, Homo sapien
tgccctgctgcttgttctgccaagt

SEQ ID NO: 2258918 - DNA, 25 bp, Homo sapien
caagtaaataaccagtaagtggatt

SEQ ID NO: 2258919 - DNA, 25 bp, Homo sapien
gccctgctgcttgttctgccaagta

SEQ ID NO: 2258920 - DNA, 25 bp, Homo sapien
gttctgccaagtaaataaccagtaa

SEQ ID NO: 2258921 - DNA, 25 bp, Homo sapien
ccagagtgggaggcccgttccccat

SEQ ID NO: 2258922 - DNA, 25 bp, Homo sapien
gctgattcatcactgggtagcacat

SEQ ID NO: 2258923 - DNA, 25 bp, Homo sapien
gggtagcacatgacgcccagatgag

SEQ ID NO: 2258924 - DNA, 25 bp, Homo sapien
tcatcactgggtagcacatgacgcc

SEQ ID NO: 2258925 - DNA, 25 bp, Homo sapien
tttaacctcaatggcatgaaaattt

SEQ ID NO: 2258926 - DNA, 25 bp, Homo sapien
tgcatatgtctgcttatctgtcact

SEQ ID NO: 2258927 - DNA, 25 bp, Homo sapien
tcaggcattcagcttgactggttct

SEQ ID NO: 2258928 - DNA, 25 bp, Homo sapien
gcttgactggttctcttgttctttc

SEQ ID NO: 2258929 - DNA, 25 bp, Homo sapien
ggcattcagcttgactggttctctt

SEQ ID NO: 2258930 - DNA, 25 bp, Homo sapien
tcagcttgactggttctcttgttct

SEQ ID NO: 2258931 - DNA, 25 bp, Homo sapien
gctcggagcaggtacctattccctt

SEQ ID NO: 2258932 - DNA, 25 bp, Homo sapien
tacctattcccttcataaggcagct

SEQ ID NO: 2258933 - DNA, 25 bp, Homo sapien
gcaggtacctattcccttcataagg

SEQ ID NO: 2258934 - DNA, 25 bp, Homo sapien
tcctccagctcggagcaggtaccta

SEQ ID NO: 2258935 - DNA, 25 bp, Homo sapien
caaggtactttgtgcacattcgctc

SEQ ID NO: 2258936 - DNA, 25 bp, Homo sapien
tcagactcgattcagggttggaaca

SEQ ID NO: 2258937 - DNA, 25 bp, Homo sapien
tcggtgaaacctggaggcaagtgtt

SEQ ID NO: 2258938 - DNA, 25 bp, Homo sapien
catgggtatgagctctaagggcctg

SEQ ID NO: 2258939 - DNA, 25 bp, Homo sapien
tgaccagcgttgtccactgccaagc

SEQ ID NO: 2258940 - DNA, 25 bp, Homo sapien
gatgttctgaccagcgttgtccact

SEQ ID NO: 2258941 - DNA, 25 bp, Homo sapien
gttctgaccagcgttgtccactgcc

SEQ ID NO: 2258942 - DNA, 25 bp, Homo sapien
tgggatgttctgaccagcgttgtcc

SEQ ID NO: 2258943 - DNA, 25 bp, Homo sapien
acagagtgagttgtcgaaacagctc

SEQ ID NO: 2258944 - DNA, 25 bp, Homo sapien
aacagctcccttagaagcctcaaga

SEQ ID NO: 2258945 - DNA, 25 bp, Homo sapien
gagtgagttgtcgaaacagctccct

SEQ ID NO: 2258946 - DNA, 25 bp, Homo sapien
aaacccagatttacagctttgagtc

SEQ ID NO: 2258947 - DNA, 25 bp, Homo sapien
tccagatatacagctgggccggagg

SEQ ID NO: 2258948 - DNA, 25 bp, Homo sapien
ggttccagatatacagctgggccgg

SEQ ID NO: 2258949 - DNA, 25 bp, Homo sapien
cttttcagggttccagatatacagc

SEQ ID NO: 2258950 - DNA, 25 bp, Homo sapien
tttcagggttccagatatacagctg

SEQ ID NO: 2258951 - DNA, 25 bp, Homo sapien
gatccacaggtagccaagtccaggt

SEQ ID NO: 2258952 - DNA, 25 bp, Homo sapien
gaggatccacaggtagccaagtcca

SEQ ID NO: 2258953 - DNA, 25 bp, Homo sapien
ctgtgagaggatccacaggtagcca

SEQ ID NO: 2258954 - DNA, 25 bp, Homo sapien
tgagaggatccacaggtagccaagt

SEQ ID NO: 2258955 - DNA, 25 bp, Homo sapien
ctcatcagccaaatctggggcctca

SEQ ID NO: 2258956 - DNA, 25 bp, Homo sapien
tttgggctttgtggtgtgaaggtac

SEQ ID NO: 2258957 - DNA, 25 bp, Homo sapien
tcatcagccaaatctggggcctcag

SEQ ID NO: 2258958 - DNA, 25 bp, Homo sapien
cctgtccaatatgccctcatcagcc

SEQ ID NO: 2258959 - DNA, 25 bp, Homo sapien
tggagccaccagcatagctgccctc

SEQ ID NO: 2258960 - DNA, 25 bp, Homo sapien
tggaggtgccacacttgcagcattc

SEQ ID NO: 2258961 - DNA, 25 bp, Homo sapien
ccacacttgcagcattcctgggtgg

SEQ ID NO: 2258962 - DNA, 25 bp, Homo sapien
cacccgccaaatgggcctggagcca

SEQ ID NO: 2258963 - DNA, 25 bp, Homo sapien
gctcccattgacctggacgatccat

SEQ ID NO: 2258964 - DNA, 25 bp, Homo sapien
cctgctcccattgacctggacgatc

SEQ ID NO: 2258965 - DNA, 25 bp, Homo sapien
ccctgctcccattgacctggacgat

SEQ ID NO: 2258966 - DNA, 25 bp, Homo sapien
tgctcccattgacctggacgatcca

SEQ ID NO: 2258967 - DNA, 25 bp, Homo sapien
ttctcaggagatggtacaatacaaa

SEQ ID NO: 2258968 - DNA, 25 bp, Homo sapien
tctgagctcattaaattcatataca

SEQ ID NO: 2258969 - DNA, 25 bp, Homo sapien
catatacatctataggttgaggatc

SEQ ID NO: 2258970 - DNA, 25 bp, Homo sapien
ggatcatccttagagctgtcagttc

SEQ ID NO: 2258971 - DNA, 25 bp, Homo sapien
tgtagactcatgtagacaaagcctg

SEQ ID NO: 2258972 - DNA, 25 bp, Homo sapien
tgttcaatcggttgttgtagactca

SEQ ID NO: 2258973 - DNA, 25 bp, Homo sapien
tcagaaccattttgtggccaagcag

SEQ ID NO: 2258974 - DNA, 25 bp, Homo sapien
catgtagacaaagcctgcaagcttg

SEQ ID NO: 2258975 - DNA, 25 bp, Homo sapien
ggcttcaggaacttggtctgttgtc

SEQ ID NO: 2258976 - DNA, 25 bp, Homo sapien
gcttcaggaacttggtctgttgtcc

SEQ ID NO: 2258977 - DNA, 25 bp, Homo sapien
ggaacttggtctgttgtcctgggac

SEQ ID NO: 2258978 - DNA, 25 bp, Homo sapien
tcaggaacttggtctgttgtcctgg

SEQ ID NO: 2258979 - DNA, 25 bp, Homo sapien
gttttctgacaccacggttggtatc

SEQ ID NO: 2258980 - DNA, 25 bp, Homo sapien
tttctgacaccacggttggtatcat

SEQ ID NO: 2258981 - DNA, 25 bp, Homo sapien
ttttctgacaccacggttggtatca

SEQ ID NO: 2258982 - DNA, 25 bp, Homo sapien
ggtttcgtccaagcgccgtcgctgt

SEQ ID NO: 2258983 - DNA, 25 bp, Homo sapien
ggaagttgggactccttgggccagc

SEQ ID NO: 2258984 - DNA, 25 bp, Homo sapien
gcccgaggtgggtgcgcgctcacgg

SEQ ID NO: 2258985 - DNA, 25 bp, Homo sapien
ccttgccgcaccgtcagggttgggt

SEQ ID NO: 2258986 - DNA, 25 bp, Homo sapien
gcactggccgcgaagcctcgatggc

SEQ ID NO: 2258987 - DNA, 25 bp, Homo sapien
gatggccgctctcggccagtgtttc

SEQ ID NO: 2258988 - DNA, 25 bp, Homo sapien
tcgcatccccggtgggccctgcgga

SEQ ID NO: 2258989 - DNA, 25 bp, Homo sapien
tgtcatacacgagaggtttatctgc

SEQ ID NO: 2258990 - DNA, 25 bp, Homo sapien
aagttgaagctgagtctaactctgc

SEQ ID NO: 2258991 - DNA, 25 bp, Homo sapien
tttttcaaagttgaagctgagtcta

SEQ ID NO: 2258992 - DNA, 25 bp, Homo sapien
ttgaatcccttgcttggagagagaa

SEQ ID NO: 2258993 - DNA, 25 bp, Homo sapien
ctctttgaatcccttgcttggagag

SEQ ID NO: 2258994 - DNA, 25 bp, Homo sapien
tctctacttctagatcctcatagcc

SEQ ID NO: 2258995 - DNA, 25 bp, Homo sapien
acttgtactgaagtatcagctttca

SEQ ID NO: 2258996 - DNA, 25 bp, Homo sapien
tcctcatagcctctcacttgtactg

SEQ ID NO: 2258997 - DNA, 25 bp, Homo sapien
ctcggtccttctctacttctagatc

SEQ ID NO: 2258998 - DNA, 25 bp, Homo sapien
catattgcagactaaaccgaaggtg

SEQ ID NO: 2258999 - DNA, 25 bp, Homo sapien
tagaagaggcatgtgttgaacgcag

SEQ ID NO: 2259000 - DNA, 25 bp, Homo sapien
cagatgtgtggtgtaggtactgcac

SEQ ID NO: 2259001 - DNA, 25 bp, Homo sapien
ggtactgcaccaatagctgaatagg

SEQ ID NO: 2259002 - DNA, 25 bp, Homo sapien
gcactgtccaaggatgtcgggagca

SEQ ID NO: 2259003 - DNA, 25 bp, Homo sapien
aatgtagggctaccgtcttggatgc

SEQ ID NO: 2259004 - DNA, 25 bp, Homo sapien
gcaaatgttgctctagtcagtccag

SEQ ID NO: 2259005 - DNA, 25 bp, Homo sapien
tacttgaagtaccaggccgtttgct

SEQ ID NO: 2259006 - DNA, 25 bp, Homo sapien
cataaattaacaaagtgtcactcca

SEQ ID NO: 2259007 - DNA, 25 bp, Homo sapien
attggtctaccaagtaagacatctc

SEQ ID NO: 2259008 - DNA, 25 bp, Homo sapien
tgtaaaggactatttataactaata

SEQ ID NO: 2259009 - DNA, 25 bp, Homo sapien
gctaaggctcgagttaaaacaatga

SEQ ID NO: 2259010 - DNA, 25 bp, Homo sapien
tactcttaacataaaccatgggcgg

SEQ ID NO: 2259011 - DNA, 25 bp, Homo sapien
cacttggttgccctacagatggcaa

SEQ ID NO: 2259012 - DNA, 25 bp, Homo sapien
tccgagggcggcatcagaacacttg

SEQ ID NO: 2259013 - DNA, 25 bp, Homo sapien
caacagaagttaaatgttactctta

SEQ ID NO: 2259014 - DNA, 25 bp, Homo sapien
gagaatacaaaccaaccaacagtgg

SEQ ID NO: 2259015 - DNA, 25 bp, Homo sapien
ggtagaggcgaacacagaagtactc

SEQ ID NO: 2259016 - DNA, 25 bp, Homo sapien
aatcgaatgtgataaatgagatagg

SEQ ID NO: 2259017 - DNA, 25 bp, Homo sapien
ccaacagtggaaatcgaatgtgata

SEQ ID NO: 2259018 - DNA, 25 bp, Homo sapien
tcttgtaggaacatcagcattgaga

SEQ ID NO: 2259019 - DNA, 25 bp, Homo sapien
caggagtatagagggcaattgcaca

SEQ ID NO: 2259020 - DNA, 25 bp, Homo sapien
gcctccagcctgtaagtagttattg

SEQ ID NO: 2259021 - DNA, 25 bp, Homo sapien
taagtagttattgacaccaggagta

SEQ ID NO: 2259022 - DNA, 25 bp, Homo sapien
caaagaggcgcactcagtctcagag

SEQ ID NO: 2259023 - DNA, 25 bp, Homo sapien
gaggtaattatgtcatgcccctgct

SEQ ID NO: 2259024 - DNA, 25 bp, Homo sapien
gattgcaagctcacagttgttgtag

SEQ ID NO: 2259025 - DNA, 25 bp, Homo sapien
gatttagctgcggtcctggtgctct

SEQ ID NO: 2259026 - DNA, 25 bp, Homo sapien
taaaatacatggacctcaggcattg

SEQ ID NO: 2259027 - DNA, 25 bp, Homo sapien
gctcaattcggtgtcctttagtaaa

SEQ ID NO: 2259028 - DNA, 25 bp, Homo sapien
tgtatcatatcagacctgaattgcc

SEQ ID NO: 2259029 - DNA, 25 bp, Homo sapien
tgtgtgacacacgtaagcgcatata

SEQ ID NO: 2259030 - DNA, 25 bp, Homo sapien
agtgctaggattattggcccaaagt

SEQ ID NO: 2259031 - DNA, 25 bp, Homo sapien
aaagtatattcttaatctgccagtt

SEQ ID NO: 2259032 - DNA, 25 bp, Homo sapien
gtgctaggattattggcccaaagta

SEQ ID NO: 2259033 - DNA, 25 bp, Homo sapien
agttcttaactgccttacagctata

SEQ ID NO: 2259034 - DNA, 25 bp, Homo sapien
cattgtccacctgacgcgagatcgg

SEQ ID NO: 2259035 - DNA, 25 bp, Homo sapien
cagtggcagccaaagctcatgggat

SEQ ID NO: 2259036 - DNA, 25 bp, Homo sapien
tctttaggacactgctcgtgccgag

SEQ ID NO: 2259037 - DNA, 25 bp, Homo sapien
ccctcggttgatccatggtgcgcag

SEQ ID NO: 2259038 - DNA, 25 bp, Homo sapien
gaagcaacttctggcattcaggcag

SEQ ID NO: 2259039 - DNA, 25 bp, Homo sapien
ttcaagatgcattgccagccccgtg

SEQ ID NO: 2259040 - DNA, 25 bp, Homo sapien
gaggttcaagaaagctgtacgccat

SEQ ID NO: 2259041 - DNA, 25 bp, Homo sapien
tgtcttttaggattaggcccaggga

SEQ ID NO: 2259042 - DNA, 25 bp, Homo sapien
tgggaacctcctgattcttacggaa

SEQ ID NO: 2259043 - DNA, 25 bp, Homo sapien
taagtgtactagaatgcgaagccgt

SEQ ID NO: 2259044 - DNA, 25 bp, Homo sapien
ggatgatgccttcgacaaaccagag

SEQ ID NO: 2259045 - DNA, 25 bp, Homo sapien
ccctggctgactaggactgttaaac

SEQ ID NO: 2259046 - DNA, 25 bp, Homo sapien
taagcttctcgagaaataccttcag

SEQ ID NO: 2259047 - DNA, 25 bp, Homo sapien
ctaagcttctcgagaaataccttca

SEQ ID NO: 2259048 - DNA, 25 bp, Homo sapien
tagacagtttacaagtcacacctgg

SEQ ID NO: 2259049 - DNA, 25 bp, Homo sapien
caagcacgtgaacagatgtacaggg

SEQ ID NO: 2259050 - DNA, 25 bp, Homo sapien
agtcacacctggacacaagcacgtg

SEQ ID NO: 2259051 - DNA, 25 bp, Homo sapien
aacactagacagtttacaagtcaca

SEQ ID NO: 2259052 - DNA, 25 bp, Homo sapien
taggctttgtgcagaaagcacccgg

SEQ ID NO: 2259053 - DNA, 25 bp, Homo sapien
gctcctgaaatgaacgttctgcaaa

SEQ ID NO: 2259054 - DNA, 25 bp, Homo sapien
gggtctctctcaactgcagtcagtg

SEQ ID NO: 2259055 - DNA, 25 bp, Homo sapien
atagacacatggtgaccagagcccg

SEQ ID NO: 2259056 - DNA, 25 bp, Homo sapien
tctgtcagggattaaagggccgagc

SEQ ID NO: 2259057 - DNA, 25 bp, Homo sapien
tttgcaaaacgaacacgaggcatgc

SEQ ID NO: 2259058 - DNA, 25 bp, Homo sapien
catgggaagcttctcgagaccaggc

SEQ ID NO: 2259059 - DNA, 25 bp, Homo sapien
acatacttggtatcagggagggaca

SEQ ID NO: 2259060 - DNA, 25 bp, Homo sapien
gtcccgtgagcctctgacaacagag

SEQ ID NO: 2259061 - DNA, 25 bp, Homo sapien
cagagctcaccgggacagaaccata

SEQ ID NO: 2259062 - DNA, 25 bp, Homo sapien
agagctcaccgggacagaaccatat

SEQ ID NO: 2259063 - DNA, 25 bp, Homo sapien
tgtcccgtgagcctctgacaacaga

SEQ ID NO: 2259064 - DNA, 25 bp, Homo sapien
tacttggtgctgaccggttcgctcc

SEQ ID NO: 2259065 - DNA, 25 bp, Homo sapien
gaagattcctaagctctcaaggcag

SEQ ID NO: 2259066 - DNA, 25 bp, Homo sapien
ggaaacaggcctacgaattgcttca

SEQ ID NO: 2259067 - DNA, 25 bp, Homo sapien
gagctacaaagtcacctgcgtttca

SEQ ID NO: 2259068 - DNA, 25 bp, Homo sapien
tcagatccgggctggttcgggcggc

SEQ ID NO: 2259069 - DNA, 25 bp, Homo sapien
cagatccgggctggttcgggcggcg

SEQ ID NO: 2259070 - DNA, 25 bp, Homo sapien
tgcgtgtgcaacgtggagtatttca

SEQ ID NO: 2259071 - DNA, 25 bp, Homo sapien
tcgtgactgagaactcctgaccaag

SEQ ID NO: 2259072 - DNA, 25 bp, Homo sapien
caagtcctctgcagctaaaaaagca

SEQ ID NO: 2259073 - DNA, 25 bp, Homo sapien
taagggtccccaatcgtgactgaga

SEQ ID NO: 2259074 - DNA, 25 bp, Homo sapien
gcagagttagtgatgcgcacaggac

SEQ ID NO: 2259075 - DNA, 25 bp, Homo sapien
gccacctgaacatccttatccggat

SEQ ID NO: 2259076 - DNA, 25 bp, Homo sapien
taacaacgacatgcagcgaaggctt

SEQ ID NO: 2259077 - DNA, 25 bp, Homo sapien
ggagttctcatcatcgtcctcagaa

SEQ ID NO: 2259078 - DNA, 25 bp, Homo sapien
gaagactgttcgtcccagaattcac

SEQ ID NO: 2259079 - DNA, 25 bp, Homo sapien
tcaagttcttagagtggaccccacc

SEQ ID NO: 2259080 - DNA, 25 bp, Homo sapien
tacacctgttacaagagggattcgg

SEQ ID NO: 2259081 - DNA, 25 bp, Homo sapien
aaatgcgggcgttgctctttggcag

SEQ ID NO: 2259082 - DNA, 25 bp, Homo sapien
ccagcaagggccagtgttcaagttc

SEQ ID NO: 2259083 - DNA, 25 bp, Homo sapien
tgcatctgaaggcaagacacaaagc

SEQ ID NO: 2259084 - DNA, 25 bp, Homo sapien
gacacaaagcttagaatccctggag

SEQ ID NO: 2259085 - DNA, 25 bp, Homo sapien
gagtaagagcgctcctgacagcaaa

SEQ ID NO: 2259086 - DNA, 25 bp, Homo sapien
tgacagcaaacatgcgggctttcca

SEQ ID NO: 2259087 - DNA, 25 bp, Homo sapien
gggacactgctcttacgaggaacta

SEQ ID NO: 2259088 - DNA, 25 bp, Homo sapien
tgtgaaaactgtggactgtcgcatc

SEQ ID NO: 2259089 - DNA, 25 bp, Homo sapien
gccccatgccaaaaaagatctgcgt

SEQ ID NO: 2259090 - DNA, 25 bp, Homo sapien
tgctatagtgaagaatgccccgccc

SEQ ID NO: 2259091 - DNA, 25 bp, Homo sapien
tgtgtcccagaatccccatctcgtt

SEQ ID NO: 2259092 - DNA, 25 bp, Homo sapien
tgcaataagaacacggtcagagatg

SEQ ID NO: 2259093 - DNA, 25 bp, Homo sapien
tgactatgtacctggttgccctggg

SEQ ID NO: 2259094 - DNA, 25 bp, Homo sapien
cagaaaacccctgtattaggcggct

SEQ ID NO: 2259095 - DNA, 25 bp, Homo sapien
gggcactgccagagcaataagggcc

SEQ ID NO: 2259096 - DNA, 25 bp, Homo sapien
cactgccagagcaataagggccgtg

SEQ ID NO: 2259097 - DNA, 25 bp, Homo sapien
ggccgtgctttgcaaacccccagga

SEQ ID NO: 2259098 - DNA, 25 bp, Homo sapien
cgggggcactgccagagcaataagg

SEQ ID NO: 2259099 - DNA, 25 bp, Homo sapien
tgtagctggagacggcaccgatgag

SEQ ID NO: 2259100 - DNA, 25 bp, Homo sapien
gctgaatgctgaagcagaacttctt

SEQ ID NO: 2259101 - DNA, 25 bp, Homo sapien
tcttctgctggtaggagatgtagct

SEQ ID NO: 2259102 - DNA, 25 bp, Homo sapien
accccggcaatggtgccaggctctg

SEQ ID NO: 2259103 - DNA, 25 bp, Homo sapien
gatgcatttgtatcaggggagcaga

SEQ ID NO: 2259104 - DNA, 25 bp, Homo sapien
ccagagatgcatttgtatcagggga

SEQ ID NO: 2259105 - DNA, 25 bp, Homo sapien
ttgaggcccataagaaatttctttg

SEQ ID NO: 2259106 - DNA, 25 bp, Homo sapien
tccctctgtaaagatcagctatcag

SEQ ID NO: 2259107 - DNA, 25 bp, Homo sapien
catggccaacaggagcctcaggatt

SEQ ID NO: 2259108 - DNA, 25 bp, Homo sapien
tcattttcctttcacatggccaaca

SEQ ID NO: 2259109 - DNA, 25 bp, Homo sapien
ctgatgcagtttctagcttgacttt

SEQ ID NO: 2259110 - DNA, 25 bp, Homo sapien
caacaggagcctcaggattcagaaa

SEQ ID NO: 2259111 - DNA, 25 bp, Homo sapien
gtcattgctgccgtaccggccatca

SEQ ID NO: 2259112 - DNA, 25 bp, Homo sapien
tcattgctgccgtaccggccatcac

SEQ ID NO: 2259113 - DNA, 25 bp, Homo sapien
tcgtcattgctgccgtaccggccat

SEQ ID NO: 2259114 - DNA, 25 bp, Homo sapien
ggtcgtcattgctgccgtaccggcc

SEQ ID NO: 2259115 - DNA, 25 bp, Homo sapien
ccgtgaagatcagttcccagtaaaa

SEQ ID NO: 2259116 - DNA, 25 bp, Homo sapien
catccgtgaagatcagttcccagta

SEQ ID NO: 2259117 - DNA, 25 bp, Homo sapien
caataccatccgtgaagatcagttc

SEQ ID NO: 2259118 - DNA, 25 bp, Homo sapien
ccaacccaataccatccgtgaagat

SEQ ID NO: 2259119 - DNA, 25 bp, Homo sapien
tagcaggtctcatagctataggaac

SEQ ID NO: 2259120 - DNA, 25 bp, Homo sapien
tatagcaaccaccatagctacagag

SEQ ID NO: 2259121 - DNA, 25 bp, Homo sapien
taggaacctctctagctatagcaac

SEQ ID NO: 2259122 - DNA, 25 bp, Homo sapien
atagggaccgtcactgtagcaatag

SEQ ID NO: 2259123 - DNA, 25 bp, Homo sapien
gggttcgcacttggagcagacacaa

SEQ ID NO: 2259124 - DNA, 25 bp, Homo sapien
taaacgcaggaggtggtgatccaaa

SEQ ID NO: 2259125 - DNA, 25 bp, Homo sapien
tttagacccggaaggagaagctcag

SEQ ID NO: 2259126 - DNA, 25 bp, Homo sapien
caagcagtgtatagctgagtgagcc

SEQ ID NO: 2259127 - DNA, 25 bp, Homo sapien
aaaactctagctttgagcagactca

SEQ ID NO: 2259128 - DNA, 25 bp, Homo sapien
gaagacatccatttcgtaccaccca

SEQ ID NO: 2259129 - DNA, 25 bp, Homo sapien
tgaaagagctgtcacgaaaactcta

SEQ ID NO: 2259130 - DNA, 25 bp, Homo sapien
ttgagcagactcagaagtttgggaa

SEQ ID NO: 2259131 - DNA, 25 bp, Homo sapien
tgatccgggagtgctaataacaccc

SEQ ID NO: 2259132 - DNA, 25 bp, Homo sapien
ccaacaggccagtgagggtgatccg

SEQ ID NO: 2259133 - DNA, 25 bp, Homo sapien
tagcccgagcaacggagtagacact

SEQ ID NO: 2259134 - DNA, 25 bp, Homo sapien
aactgagaacagatgtaaggagcca

SEQ ID NO: 2259135 - DNA, 25 bp, Homo sapien
gcctttctccatgtttgaagatcac

SEQ ID NO: 2259136 - DNA, 25 bp, Homo sapien
tggcctttctccatgtttgaagatc

SEQ ID NO: 2259137 - DNA, 25 bp, Homo sapien
ttgaagatcacaggaacctggcggt

SEQ ID NO: 2259138 - DNA, 25 bp, Homo sapien
tgtttgaagatcacaggaacctggc

SEQ ID NO: 2259139 - DNA, 25 bp, Homo sapien
tcagggacacaacaagaagatagcc

SEQ ID NO: 2259140 - DNA, 25 bp, Homo sapien
gcagcctgaagtaagacacatgggt

SEQ ID NO: 2259141 - DNA, 25 bp, Homo sapien
gaaggtcgacccctcatgataggat

SEQ ID NO: 2259142 - DNA, 25 bp, Homo sapien
cagtctagaagtagcgatataccac

SEQ ID NO: 2259143 - DNA, 25 bp, Homo sapien
ggcacaccgttcttgcaagaaaaga

SEQ ID NO: 2259144 - DNA, 25 bp, Homo sapien
tattcccatacgaaaggcacaccgt

SEQ ID NO: 2259145 - DNA, 25 bp, Homo sapien
taaatgttccatgttatcctgacac

SEQ ID NO: 2259146 - DNA, 25 bp, Homo sapien
cctttaatcggaagagaacactatt

SEQ ID NO: 2259147 - DNA, 25 bp, Homo sapien
ggcttcagccagcatgaaacgttaa

SEQ ID NO: 2259148 - DNA, 25 bp, Homo sapien
gatggaacagttctgcctgctaatt

SEQ ID NO: 2259149 - DNA, 25 bp, Homo sapien
tctcttgaggttgagagggctgctt

SEQ ID NO: 2259150 - DNA, 25 bp, Homo sapien
ttgccttggcaaataggcttcagcc

SEQ ID NO: 2259151 - DNA, 25 bp, Homo sapien
gttgtgttggcacaaatcaatgctc

SEQ ID NO: 2259152 - DNA, 25 bp, Homo sapien
aagggttgtgttggcacaaatcaat

SEQ ID NO: 2259153 - DNA, 25 bp, Homo sapien
tgttggcacaaatcaatgctcctac

SEQ ID NO: 2259154 - DNA, 25 bp, Homo sapien
tgtgttggcacaaatcaatgctcct

SEQ ID NO: 2259155 - DNA, 25 bp, Homo sapien
tccaccccctactatgtcttcaaga

SEQ ID NO: 2259156 - DNA, 25 bp, Homo sapien
cccctactatgtcttcaagatcctt

SEQ ID NO: 2259157 - DNA, 25 bp, Homo sapien
tctccaccccctactatgtcttcaa

SEQ ID NO: 2259158 - DNA, 25 bp, Homo sapien
caccccctactatgtcttcaagatc

SEQ ID NO: 2259159 - DNA, 25 bp, Homo sapien
gatcatttcgatcatccagggcatc

SEQ ID NO: 2259160 - DNA, 25 bp, Homo sapien
tcctccagcaattggtttcctgcgg

SEQ ID NO: 2259161 - DNA, 25 bp, Homo sapien
ggcatcagccaagtcaaaatcattt

SEQ ID NO: 2259162 - DNA, 25 bp, Homo sapien
gcggccatcatctcgatcatttcga

SEQ ID NO: 2259163 - DNA, 25 bp, Homo sapien
tcgtggtggttacatggttccatct

SEQ ID NO: 2259164 - DNA, 25 bp, Homo sapien
gcctcttggtcgtggtggttacatg

SEQ ID NO: 2259165 - DNA, 25 bp, Homo sapien
tactggcctcttggtcgtggtggtt

SEQ ID NO: 2259166 - DNA, 25 bp, Homo sapien
tggttactggcctcttggtcgtggt

SEQ ID NO: 2259167 - DNA, 25 bp, Homo sapien
aactcgtcttttgggtcatcagtac

SEQ ID NO: 2259168 - DNA, 25 bp, Homo sapien
cctaaactcgtcttttgggtcatca

SEQ ID NO: 2259169 - DNA, 25 bp, Homo sapien
caattgaccctaaactcgtcttttg

SEQ ID NO: 2259170 - DNA, 25 bp, Homo sapien
tcgtcttttgggtcatcagtacctt

SEQ ID NO: 2259171 - DNA, 25 bp, Homo sapien
gtttcctgcggccatcatcttgatc

SEQ ID NO: 2259172 - DNA, 25 bp, Homo sapien
tcctatacccggtttcctgcggcca

SEQ ID NO: 2259173 - DNA, 25 bp, Homo sapien
tcttgatcatccaaagcatcagcca

SEQ ID NO: 2259174 - DNA, 25 bp, Homo sapien
agcatcagccaagtccaatccacta

SEQ ID NO: 2259175 - DNA, 25 bp, Homo sapien
ggtagttcacttgcatgctacccca

SEQ ID NO: 2259176 - DNA, 25 bp, Homo sapien
tgcatgctaccccagagggaactcc

SEQ ID NO: 2259177 - DNA, 25 bp, Homo sapien
ttcacttgcatgctaccccagaggg

SEQ ID NO: 2259178 - DNA, 25 bp, Homo sapien
acttgcatgctaccccagagggaac

SEQ ID NO: 2259179 - DNA, 25 bp, Homo sapien
gttttgccggagctctggtggttcc

SEQ ID NO: 2259180 - DNA, 25 bp, Homo sapien
ctggaggttttgccggagctctggt

SEQ ID NO: 2259181 - DNA, 25 bp, Homo sapien
gttcctggcctattggttgtggtgg

SEQ ID NO: 2259182 - DNA, 25 bp, Homo sapien
gtggttcctggcctattggttgtgg

SEQ ID NO: 2259183 - DNA, 25 bp, Homo sapien
cacagcagctactttatgacttggg

SEQ ID NO: 2259184 - DNA, 25 bp, Homo sapien
ggagcacgtttagtaacaaaacaca

SEQ ID NO: 2259185 - DNA, 25 bp, Homo sapien
taggagctccagagaatcacactga

SEQ ID NO: 2259186 - DNA, 25 bp, Homo sapien
cttgaggcccctctagctaggagct

SEQ ID NO: 2259187 - DNA, 25 bp, Homo sapien
cccagatctgctggagatggcacgt

SEQ ID NO: 2259188 - DNA, 25 bp, Homo sapien
ccagatctgctggagatggcacgtg

SEQ ID NO: 2259189 - DNA, 25 bp, Homo sapien
ttgcacccagatctgctggagatgg

SEQ ID NO: 2259190 - DNA, 25 bp, Homo sapien
cacccagatctgctggagatggcac

SEQ ID NO: 2259191 - DNA, 25 bp, Homo sapien
ccgtcgctgtctaaggtgagtcctt

SEQ ID NO: 2259192 - DNA, 25 bp, Homo sapien
ctgtctaaggtgagtccttgggcca

SEQ ID NO: 2259193 - DNA, 25 bp, Homo sapien
tgttctttgacaccgtcgctgtcta

SEQ ID NO: 2259194 - DNA, 25 bp, Homo sapien
tgacaccgtcgctgtctaaggtgag

SEQ ID NO: 2259195 - DNA, 25 bp, Homo sapien
cttactttcctagaattattccagg

SEQ ID NO: 2259196 - DNA, 25 bp, Homo sapien
gtttatgtgctagggtggggacttc

SEQ ID NO: 2259197 - DNA, 25 bp, Homo sapien
tatgtgctagggtggggacttcaca

SEQ ID NO: 2259198 - DNA, 25 bp, Homo sapien
ttcttactttcctagaattattcca

SEQ ID NO: 2259199 - DNA, 25 bp, Homo sapien
tagaccgaatacaaatggttcccag

SEQ ID NO: 2259200 - DNA, 25 bp, Homo sapien
gttgaatggcaggtatgtggtcttt

SEQ ID NO: 2259201 - DNA, 25 bp, Homo sapien
aagtcctggcatcttgcccacagca

SEQ ID NO: 2259202 - DNA, 25 bp, Homo sapien
ccacagcaaatggtagaccgaatac

SEQ ID NO: 2259203 - DNA, 25 bp, Homo sapien
tgaagctctttgggttccatatttt

SEQ ID NO: 2259204 - DNA, 25 bp, Homo sapien
tccatattttccttattcccttcca

SEQ ID NO: 2259205 - DNA, 25 bp, Homo sapien
agctctttgggttccatattttcct

SEQ ID NO: 2259206 - DNA, 25 bp, Homo sapien
ccatattttccttattcccttccat

SEQ ID NO: 2259207 - DNA, 25 bp, Homo sapien
gatgctccatttgactacaatcagg

SEQ ID NO: 2259208 - DNA, 25 bp, Homo sapien
ataaaccacgtgtctgccagtaagg

SEQ ID NO: 2259209 - DNA, 25 bp, Homo sapien
tttggtcctagcagtcacaatgcac

SEQ ID NO: 2259210 - DNA, 25 bp, Homo sapien
tacccaaggtgacagttcagaagtg

SEQ ID NO: 2259211 - DNA, 25 bp, Homo sapien
ggccttaaacccactaacaagcatc

SEQ ID NO: 2259212 - DNA, 25 bp, Homo sapien
ttgatatagaacttctagcatccag

SEQ ID NO: 2259213 - DNA, 25 bp, Homo sapien
ggggaacaccacgtgacaacagagg

SEQ ID NO: 2259214 - DNA, 25 bp, Homo sapien
ccactaacaagcatctttgtaagag

SEQ ID NO: 2259215 - DNA, 25 bp, Homo sapien
gcatcctccaggttaaaatcatcaa

SEQ ID NO: 2259216 - DNA, 25 bp, Homo sapien
ggttaaaatcatcaaagtccccaga

SEQ ID NO: 2259217 - DNA, 25 bp, Homo sapien
tactgaggaagtttctttcactgca

SEQ ID NO: 2259218 - DNA, 25 bp, Homo sapien
tccaggttaaaatcatcaaagtccc

SEQ ID NO: 2259219 - DNA, 25 bp, Homo sapien
tgcctgtcatctgggcttactgcct

SEQ ID NO: 2259220 - DNA, 25 bp, Homo sapien
cctgtcatctgggcttactgcctgc

SEQ ID NO: 2259221 - DNA, 25 bp, Homo sapien
ctgcctgtcatctgggcttactgcc

SEQ ID NO: 2259222 - DNA, 25 bp, Homo sapien
gcctgtcatctgggcttactgcctg

SEQ ID NO: 2259223 - DNA, 25 bp, Homo sapien
gtctgacccggtcactgacagggca

SEQ ID NO: 2259224 - DNA, 25 bp, Homo sapien
cggtcactgacagggtgactcttcc

SEQ ID NO: 2259225 - DNA, 25 bp, Homo sapien
tgcagtggccataagaggtctgacc

SEQ ID NO: 2259226 - DNA, 25 bp, Homo sapien
cagggcacccggtcactgacagggt

SEQ ID NO: 2259227 - DNA, 25 bp, Homo sapien
ttcctccctttgacttgtgcaactt

SEQ ID NO: 2259228 - DNA, 25 bp, Homo sapien
ccatgaacttgtccatgtgcgtcat

SEQ ID NO: 2259229 - DNA, 25 bp, Homo sapien
ctccatgaacttgtccatgtgcgtc

SEQ ID NO: 2259230 - DNA, 25 bp, Homo sapien
ctccctttgacttgtgcaacttttc

SEQ ID NO: 2259231 - DNA, 25 bp, Homo sapien
attaaggccagctcagcagtggcca

SEQ ID NO: 2259232 - DNA, 25 bp, Homo sapien
ttaaggccagctcagcagtggccat

SEQ ID NO: 2259233 - DNA, 25 bp, Homo sapien
cattaaggccagctcagcagtggcc

SEQ ID NO: 2259234 - DNA, 25 bp, Homo sapien
tcactttctgttgctatcagcctgg

SEQ ID NO: 2259235 - DNA, 25 bp, Homo sapien
gcctctagtatcctcgaatccactt

SEQ ID NO: 2259236 - DNA, 25 bp, Homo sapien
gaaacatatattcttgttaactgta

SEQ ID NO: 2259237 - DNA, 25 bp, Homo sapien
cctaatagtatagaacactagactt

SEQ ID NO: 2259238 - DNA, 25 bp, Homo sapien
tctcctgacttccagtacccttcct

SEQ ID NO: 2259239 - DNA, 25 bp, Homo sapien
tcctgaggctgtcctctcctgactt

SEQ ID NO: 2259240 - DNA, 25 bp, Homo sapien
tgtcctctcctgacttccagtaccc

SEQ ID NO: 2259241 - DNA, 25 bp, Homo sapien
ctggctgttgacctgcttcctgagg

SEQ ID NO: 2259242 - DNA, 25 bp, Homo sapien
atatatggctgagacaggaatattg

SEQ ID NO: 2259243 - DNA, 25 bp, Homo sapien
atatggctgagacaggaatattgct

SEQ ID NO: 2259244 - DNA, 25 bp, Homo sapien
catatatggctgagacaggaatatt

SEQ ID NO: 2259245 - DNA, 25 bp, Homo sapien
tatatggctgagacaggaatattgc

SEQ ID NO: 2259246 - DNA, 25 bp, Homo sapien
gggaccgtgccgctcatgcgcagag

SEQ ID NO: 2259247 - DNA, 25 bp, Homo sapien
agccaccgcaggcccgagaggcggg

SEQ ID NO: 2259248 - DNA, 25 bp, Homo sapien
gcacagccgggccggccggtggcag

SEQ ID NO: 2259249 - DNA, 25 bp, Homo sapien
aggcggggaccgtgccgctcatgcg

SEQ ID NO: 2259250 - DNA, 25 bp, Homo sapien
agacaaggaacgccgagcgccaggc

SEQ ID NO: 2259251 - DNA, 25 bp, Homo sapien
gcagacaaggaacgccgagcgccag

SEQ ID NO: 2259252 - DNA, 25 bp, Homo sapien
aggcagacaaggaacgccgagcgcc

SEQ ID NO: 2259253 - DNA, 25 bp, Homo sapien
ggcagacaaggaacgccgagcgcca

SEQ ID NO: 2259254 - DNA, 25 bp, Homo sapien
ccccgccgcctctgcagggtcccgc

SEQ ID NO: 2259255 - DNA, 25 bp, Homo sapien
aggagcacagttagcgcgagagcgc

SEQ ID NO: 2259256 - DNA, 25 bp, Homo sapien
gagagcgcccgaaggggaggccgag

SEQ ID NO: 2259257 - DNA, 25 bp, Homo sapien
gagcacagttagcgcgagagcgccc

SEQ ID NO: 2259258 - DNA, 25 bp, Homo sapien
catggtcagtgtagagctgactcaa

SEQ ID NO: 2259259 - DNA, 25 bp, Homo sapien
ctgcagacggcagggtgttctgaga

SEQ ID NO: 2259260 - DNA, 25 bp, Homo sapien
atgggaacacggaggtgcagcccct

SEQ ID NO: 2259261 - DNA, 25 bp, Homo sapien
aaataatggtttggcctgcagacgg

SEQ ID NO: 2259262 - DNA, 25 bp, Homo sapien
ctaggtgacaggagccattagagtg

SEQ ID NO: 2259263 - DNA, 25 bp, Homo sapien
aggtgacaggagccattagagtgaa

SEQ ID NO: 2259264 - DNA, 25 bp, Homo sapien
taggtgacaggagccattagagtga

SEQ ID NO: 2259265 - DNA, 25 bp, Homo sapien
cacgatagtgatgatattggcaatt

SEQ ID NO: 2259266 - DNA, 25 bp, Homo sapien
cgaccacacgatagtgatgatattg

SEQ ID NO: 2259267 - DNA, 25 bp, Homo sapien
caacgaccacacgatagtgatgata

SEQ ID NO: 2259268 - DNA, 25 bp, Homo sapien
ccacacgatagtgatgatattggca

SEQ ID NO: 2259269 - DNA, 25 bp, Homo sapien
ccccgtccagatataacaagacctt

SEQ ID NO: 2259270 - DNA, 25 bp, Homo sapien
cgttcgtgcactctgtggctggtct

SEQ ID NO: 2259271 - DNA, 25 bp, Homo sapien
aagaccttgagggtgacatttgcca

SEQ ID NO: 2259272 - DNA, 25 bp, Homo sapien
aggtctccacttcctgacacttctt

SEQ ID NO: 2259273 - DNA, 25 bp, Homo sapien
catctggcctaataggtgacctcac

SEQ ID NO: 2259274 - DNA, 25 bp, Homo sapien
tgttgcactgtctcttaagcctttg

SEQ ID NO: 2259275 - DNA, 25 bp, Homo sapien
aagcctttgcattctggcacccaaa

SEQ ID NO: 2259276 - DNA, 25 bp, Homo sapien
cctgagccctggatcaagatgcacc

SEQ ID NO: 2259277 - DNA, 25 bp, Homo sapien
gcacccaaatgcgaatgtcccctga

SEQ ID NO: 2259278 - DNA, 25 bp, Homo sapien
cttcgtggagaggagaatatttggt

SEQ ID NO: 2259279 - DNA, 25 bp, Homo sapien
cattgtccaagttggcttcgtggag

SEQ ID NO: 2259280 - DNA, 25 bp, Homo sapien
tggagaggagaatatttggtgctcc

SEQ ID NO: 2259281 - DNA, 25 bp, Homo sapien
catgcatatgattggtgcaaaataa

SEQ ID NO: 2259282 - DNA, 25 bp, Homo sapien
ctctgaggctctgccacgtcccacc

SEQ ID NO: 2259283 - DNA, 25 bp, Homo sapien
ctgaggctctgccacgtcccaccca

SEQ ID NO: 2259284 - DNA, 25 bp, Homo sapien
tgaggctctgccacgtcccacccat

SEQ ID NO: 2259285 - DNA, 25 bp, Homo sapien
tctgaggctctgccacgtcccaccc

SEQ ID NO: 2259286 - DNA, 25 bp, Homo sapien
actgttatcagaggatttgtgctta

SEQ ID NO: 2259287 - DNA, 25 bp, Homo sapien
ctgtttggaagtataaactgttatc

SEQ ID NO: 2259288 - DNA, 25 bp, Homo sapien
cttctcttatcaagggtcccatttc

SEQ ID NO: 2259289 - DNA, 25 bp, Homo sapien
tagtaagtgaatgcttgtaatttac

SEQ ID NO: 2259290 - DNA, 25 bp, Homo sapien
ttccccaggtagcttttggcttgcc

SEQ ID NO: 2259291 - DNA, 25 bp, Homo sapien
tggctcttccccaggtagcttttgg

SEQ ID NO: 2259292 - DNA, 25 bp, Homo sapien
tagcttttggcttgcccagcaatca

SEQ ID NO: 2259293 - DNA, 25 bp, Homo sapien
ccaggtagcttttggcttgcccagc

SEQ ID NO: 2259294 - DNA, 25 bp, Homo sapien
ggcagtcaattcgttgatctgtaca

SEQ ID NO: 2259295 - DNA, 25 bp, Homo sapien
agtcaattcgttgatctgtacagcg

SEQ ID NO: 2259296 - DNA, 25 bp, Homo sapien
ctgtacagcgtaggggtggagctca

SEQ ID NO: 2259297 - DNA, 25 bp, Homo sapien
ttgggcagtcaattcgttgatctgt

SEQ ID NO: 2259298 - DNA, 25 bp, Homo sapien
gcagggccagaagctctgttacagg

SEQ ID NO: 2259299 - DNA, 25 bp, Homo sapien
tctgttacaggaaatccagatcccc

SEQ ID NO: 2259300 - DNA, 25 bp, Homo sapien
tgtgatcttgaaacctgagtgggag

SEQ ID NO: 2259301 - DNA, 25 bp, Homo sapien
gatcttgaaacctgagtgggaggta

SEQ ID NO: 2259302 - DNA, 25 bp, Homo sapien
cacttcgtgaacttgtgcaggggcc

SEQ ID NO: 2259303 - DNA, 25 bp, Homo sapien
ggaacacttcgtgaacttgtgcagg

SEQ ID NO: 2259304 - DNA, 25 bp, Homo sapien
aacacttcgtgaacttgtgcagggg

SEQ ID NO: 2259305 - DNA, 25 bp, Homo sapien
acttcgtgaacttgtgcaggggcca

SEQ ID NO: 2259306 - DNA, 25 bp, Homo sapien
acctttgctgcccttttctctggct

SEQ ID NO: 2259307 - DNA, 25 bp, Homo sapien
ctttgctgcccttttctctggctgt

SEQ ID NO: 2259308 - DNA, 25 bp, Homo sapien
tcaggccctttcacctttgctgccc

SEQ ID NO: 2259309 - DNA, 25 bp, Homo sapien
aggccctttcacctttgctgccctt

SEQ ID NO: 2259310 - DNA, 25 bp, Homo sapien
gaagagtcctgaatggtcactgaca

SEQ ID NO: 2259311 - DNA, 25 bp, Homo sapien
acacagctgtttgcccgatacttca

SEQ ID NO: 2259312 - DNA, 25 bp, Homo sapien
aacacagctgtttgcccgatacttc

SEQ ID NO: 2259313 - DNA, 25 bp, Homo sapien
cacagctgtttgcccgatacttcat

SEQ ID NO: 2259314 - DNA, 25 bp, Homo sapien
tagagtatccttcattccctcaagc

SEQ ID NO: 2259315 - DNA, 25 bp, Homo sapien
tccaaactagtctttaggcctctcc

SEQ ID NO: 2259316 - DNA, 25 bp, Homo sapien
ccttgggctccctgagtctagggtg

SEQ ID NO: 2259317 - DNA, 25 bp, Homo sapien
ggaggtatcctcaagctaacgggca

SEQ ID NO: 2259318 - DNA, 25 bp, Homo sapien
aaaagcagccttacatcactaaggc

SEQ ID NO: 2259319 - DNA, 25 bp, Homo sapien
cactaaggcggcaaagctgaaggag

SEQ ID NO: 2259320 - DNA, 25 bp, Homo sapien
gctgggtgagatgtggaataattta

SEQ ID NO: 2259321 - DNA, 25 bp, Homo sapien
caaaaaagctgggtgagatgtggaa

SEQ ID NO: 2259322 - DNA, 25 bp, Homo sapien
gggagcgccgtaattgacacatctc

SEQ ID NO: 2259323 - DNA, 25 bp, Homo sapien
tctggagcaccctgaaactgtatca

SEQ ID NO: 2259324 - DNA, 25 bp, Homo sapien
caaagggtcctgctaaagttgcccg

SEQ ID NO: 2259325 - DNA, 25 bp, Homo sapien
gaaaaggcactctcgtgttctcctc

SEQ ID NO: 2259326 - DNA, 25 bp, Homo sapien
tttgaggctatgaaacacgcaggag

SEQ ID NO: 2259327 - DNA, 25 bp, Homo sapien
gggtgagtgttgctattgcccagca

SEQ ID NO: 2259328 - DNA, 25 bp, Homo sapien
acttgcatgtctggaggcggtgtcc

SEQ ID NO: 2259329 - DNA, 25 bp, Homo sapien
tccgtagcaatgaaggatacagtac

SEQ ID NO: 2259330 - DNA, 25 bp, Homo sapien
ggatagtacctactccctctaacca

SEQ ID NO: 2259331 - DNA, 25 bp, Homo sapien
gaatgacattttatccttcggaaag

SEQ ID NO: 2259332 - DNA, 25 bp, Homo sapien
gaacaaggctgtgatgtagtgacta

SEQ ID NO: 2259333 - DNA, 25 bp, Homo sapien
gggacgttggatgcattcattttct

SEQ ID NO: 2259334 - DNA, 25 bp, Homo sapien
gggtggtggccattaacattacagc

SEQ ID NO: 2259335 - DNA, 25 bp, Homo sapien
taactggctgggcattccatggcac

SEQ ID NO: 2259336 - DNA, 25 bp, Homo sapien
attaacattacagcccacaaactgg

SEQ ID NO: 2259337 - DNA, 25 bp, Homo sapien
ctggctgggcattccatggcaccac

SEQ ID NO: 2259338 - DNA, 25 bp, Homo sapien
ccatccgagtactagccaggtccaa

SEQ ID NO: 2259339 - DNA, 25 bp, Homo sapien
atccgagtactagccaggtccaacc

SEQ ID NO: 2259340 - DNA, 25 bp, Homo sapien
gtgcattcaggatggtatggtcata

SEQ ID NO: 2259341 - DNA, 25 bp, Homo sapien
tcccatccgagtactagccaggtcc

SEQ ID NO: 2259342 - DNA, 25 bp, Homo sapien
agctcaactcacagcgtttctcttc

SEQ ID NO: 2259343 - DNA, 25 bp, Homo sapien
actggagcctgcaagcagttgagac

SEQ ID NO: 2259344 - DNA, 25 bp, Homo sapien
gagctcaactcacagcgtttctctt

SEQ ID NO: 2259345 - DNA, 25 bp, Homo sapien
tcactggagcctgcaagcagttgag

SEQ ID NO: 2259346 - DNA, 25 bp, Homo sapien
tctgccgctgaaatatgctctagtg

SEQ ID NO: 2259347 - DNA, 25 bp, Homo sapien
ccgctgaaatatgctctagtgaaac

SEQ ID NO: 2259348 - DNA, 25 bp, Homo sapien
aatctgccgctgaaatatgctctag

SEQ ID NO: 2259349 - DNA, 25 bp, Homo sapien
tgccgctgaaatatgctctagtgaa

SEQ ID NO: 2259350 - DNA, 25 bp, Homo sapien
tctttaataagctcagaagacagta

SEQ ID NO: 2259351 - DNA, 25 bp, Homo sapien
tatgggttgatcaattgctctagaa

SEQ ID NO: 2259352 - DNA, 25 bp, Homo sapien
catctgctcccaatgaagcattgca

SEQ ID NO: 2259353 - DNA, 25 bp, Homo sapien
tgtcctttggacattattcacgatg

SEQ ID NO: 2259354 - DNA, 25 bp, Homo sapien
aaggcagaccctaaggagaggctgc

SEQ ID NO: 2259355 - DNA, 25 bp, Homo sapien
caggttcttataaaggcagacccta

SEQ ID NO: 2259356 - DNA, 25 bp, Homo sapien
ttcaggttcttataaaggcagaccc

SEQ ID NO: 2259357 - DNA, 25 bp, Homo sapien
aggcagaccctaaggagaggctgct

SEQ ID NO: 2259358 - DNA, 25 bp, Homo sapien
ctgggtccaaggacgtgggggtctg

SEQ ID NO: 2259359 - DNA, 25 bp, Homo sapien
ggggagcaggggtcggattcctggc

SEQ ID NO: 2259360 - DNA, 25 bp, Homo sapien
gacgtgggggtctgtttggggagca

SEQ ID NO: 2259361 - DNA, 25 bp, Homo sapien
tcaggaaagggggtctgtaggtaca

SEQ ID NO: 2259362 - DNA, 25 bp, Homo sapien
tctgtaggtacacctgggcaggagg

SEQ ID NO: 2259363 - DNA, 25 bp, Homo sapien
gggtctgtaggtacacctgggcagg

SEQ ID NO: 2259364 - DNA, 25 bp, Homo sapien
gctcaggaaagggggtctgtaggta

SEQ ID NO: 2259365 - DNA, 25 bp, Homo sapien
gagggcctttgcaagccttaagtcc

SEQ ID NO: 2259366 - DNA, 25 bp, Homo sapien
ggagggcctttgcaagccttaagtc

SEQ ID NO: 2259367 - DNA, 25 bp, Homo sapien
gggcctttgcaagccttaagtccat

SEQ ID NO: 2259368 - DNA, 25 bp, Homo sapien
tggagggcctttgcaagccttaagt

SEQ ID NO: 2259369 - DNA, 25 bp, Homo sapien
tagaggcccagtactcaggatgaag

SEQ ID NO: 2259370 - DNA, 25 bp, Homo sapien
cgatcgtggcaaggatacctctcca

SEQ ID NO: 2259371 - DNA, 25 bp, Homo sapien
caggatgaagtatgcgatcgtggca

SEQ ID NO: 2259372 - DNA, 25 bp, Homo sapien
ccatctaagatggtgttgtgacctt

SEQ ID NO: 2259373 - DNA, 25 bp, Homo sapien
ttctggtataactagtggtggcatc

SEQ ID NO: 2259374 - DNA, 25 bp, Homo sapien
gtctgcctttggactgagttctggt

SEQ ID NO: 2259375 - DNA, 25 bp, Homo sapien
tattgtagtctttaaggttctccag

SEQ ID NO: 2259376 - DNA, 25 bp, Homo sapien
gtctttaaggttctccaggtctgcc

SEQ ID NO: 2259377 - DNA, 25 bp, Homo sapien
cccaggttccaggttgtttagcttg

SEQ ID NO: 2259378 - DNA, 25 bp, Homo sapien
gttccaggttgtttagcttgggctg

SEQ ID NO: 2259379 - DNA, 25 bp, Homo sapien
gtttagcttgggctgacatggaaca

SEQ ID NO: 2259380 - DNA, 25 bp, Homo sapien
gttgtttagcttgggctgacatgga

SEQ ID NO: 2259381 - DNA, 25 bp, Homo sapien
gagacatttgtagtcattgtggtca

SEQ ID NO: 2259382 - DNA, 25 bp, Homo sapien
tcattgtggtcagaaggatggccat

SEQ ID NO: 2259383 - DNA, 25 bp, Homo sapien
taggagacatttgtagtcattgtgg

SEQ ID NO: 2259384 - DNA, 25 bp, Homo sapien
ttgtagtcattgtggtcagaaggat

SEQ ID NO: 2259385 - DNA, 25 bp, Homo sapien
gagatcccacaattgacttggtgta

SEQ ID NO: 2259386 - DNA, 25 bp, Homo sapien
caattgacttggtgtacaggtccca

SEQ ID NO: 2259387 - DNA, 25 bp, Homo sapien
gatgagatcccacaattgacttggt

SEQ ID NO: 2259388 - DNA, 25 bp, Homo sapien
tcccacaattgacttggtgtacagg

SEQ ID NO: 2259389 - DNA, 25 bp, Homo sapien
gttctgtgatgtcttacaatagaca

SEQ ID NO: 2259390 - DNA, 25 bp, Homo sapien
ttctgtgatgtcttacaatagacag

SEQ ID NO: 2259391 - DNA, 25 bp, Homo sapien
gcgtatcttgttgtgggagcttcag

SEQ ID NO: 2259392 - DNA, 25 bp, Homo sapien
tgcgtatcttgttgtgggagcttca

SEQ ID NO: 2259393 - DNA, 25 bp, Homo sapien
ctgcgtatcttgttgtgggagcttc

SEQ ID NO: 2259394 - DNA, 25 bp, Homo sapien
aaagctggaagcagtgtctatgtcc

SEQ ID NO: 2259395 - DNA, 25 bp, Homo sapien
tgaagtgataactaccagtgaaaag

SEQ ID NO: 2259396 - DNA, 25 bp, Homo sapien
tccgtgtagatataaatgatgatcc

SEQ ID NO: 2259397 - DNA, 25 bp, Homo sapien
cacaaagatgttaactgaagtgata

SEQ ID NO: 2259398 - DNA, 25 bp, Homo sapien
gcaccttgcctacagctgacttttt

SEQ ID NO: 2259399 - DNA, 25 bp, Homo sapien
gccaggcagggtgctaagactggca

SEQ ID NO: 2259400 - DNA, 25 bp, Homo sapien
caggcagggtgctaagactggcaaa

SEQ ID NO: 2259401 - DNA, 25 bp, Homo sapien
gggtgctaagactggcaaagggcat

SEQ ID NO: 2259402 - DNA, 25 bp, Homo sapien
tttgaaaggcttctcgacaggagcc

SEQ ID NO: 2259403 - DNA, 25 bp, Homo sapien
ttagtagccggcagaaatccattcc

SEQ ID NO: 2259404 - DNA, 25 bp, Homo sapien
gagtgtccgaatcacgcccctttag

SEQ ID NO: 2259405 - DNA, 25 bp, Homo sapien
tactgtggcaagaagactagtctgg

SEQ ID NO: 2259406 - DNA, 25 bp, Homo sapien
agcctctcgtcctgagtttccttga

SEQ ID NO: 2259407 - DNA, 25 bp, Homo sapien
aatgccgagcatcccgagagggaga

SEQ ID NO: 2259408 - DNA, 25 bp, Homo sapien
tgccgctcagtagagaatgccgagc

SEQ ID NO: 2259409 - DNA, 25 bp, Homo sapien
tggaaaggagacgagctcccgctcc

SEQ ID NO: 2259410 - DNA, 25 bp, Homo sapien
tatggagagtgcaagacctggaccg

SEQ ID NO: 2259411 - DNA, 25 bp, Homo sapien
tcacaaggatacttgcagaggcaag

SEQ ID NO: 2259412 - DNA, 25 bp, Homo sapien
cacagaaggctctagacaggcaagg

SEQ ID NO: 2259413 - DNA, 25 bp, Homo sapien
gaggcaagcatctagcgttcaaggg

SEQ ID NO: 2259414 - DNA, 25 bp, Homo sapien
tatgttctgcgcgatggttatcacc

SEQ ID NO: 2259415 - DNA, 25 bp, Homo sapien
aatcggcaactccatggtcattttg

SEQ ID NO: 2259416 - DNA, 25 bp, Homo sapien
tctaatcatctttatgttctgcgcg

SEQ ID NO: 2259417 - DNA, 25 bp, Homo sapien
ggttatcaccatcgttgtagaccta

SEQ ID NO: 2259418 - DNA, 25 bp, Homo sapien
cccgcgcccgagaatcgagcaggga

SEQ ID NO: 2259419 - DNA, 25 bp, Homo sapien
ggcagcggagatcccaaggtccgta

SEQ ID NO: 2259420 - DNA, 25 bp, Homo sapien
tggagggatagaaggcagcaaaacc

SEQ ID NO: 2259421 - DNA, 25 bp, Homo sapien
cagcaaaaccgagtagggattggcg

SEQ ID NO: 2259422 - DNA, 25 bp, Homo sapien
aaatctttattgccaaaggaacagg

SEQ ID NO: 2259423 - DNA, 25 bp, Homo sapien
aatctttattgccaaaggaacagga

SEQ ID NO: 2259424 - DNA, 25 bp, Homo sapien
ggactatattggccctaatacttag

SEQ ID NO: 2259425 - DNA, 25 bp, Homo sapien
ttggactatattggccctaatactt

SEQ ID NO: 2259426 - DNA, 25 bp, Homo sapien
tatattggccctaatacttaggtaa

SEQ ID NO: 2259427 - DNA, 25 bp, Homo sapien
actatattggccctaatacttaggt

SEQ ID NO: 2259428 - DNA, 25 bp, Homo sapien
gctgtgaactaagggctgcgagttc

SEQ ID NO: 2259429 - DNA, 25 bp, Homo sapien
ctgctgtgaactaagggctgcgagt

SEQ ID NO: 2259430 - DNA, 25 bp, Homo sapien
aagagcgtttgcacagaatcctgga

SEQ ID NO: 2259431 - DNA, 25 bp, Homo sapien
agcgtttgcacagaatcctggaaat

SEQ ID NO: 2259432 - DNA, 25 bp, Homo sapien
tggaagagcgtttgcacagaatcct

SEQ ID NO: 2259433 - DNA, 25 bp, Homo sapien
ctggaagagcgtttgcacagaatcc

SEQ ID NO: 2259434 - DNA, 25 bp, Homo sapien
tggaaacccatcctccactttaatc

SEQ ID NO: 2259435 - DNA, 25 bp, Homo sapien
ctggaaacccatcctccactttaat

SEQ ID NO: 2259436 - DNA, 25 bp, Homo sapien
cctctttgagtcaaatctgccatat

SEQ ID NO: 2259437 - DNA, 25 bp, Homo sapien
tctttgagtcaaatctgccatatat

SEQ ID NO: 2259438 - DNA, 25 bp, Homo sapien
ttgagcagccgcttcattaacagtg

SEQ ID NO: 2259439 - DNA, 25 bp, Homo sapien
agagttgagcagccgcttcattaac

SEQ ID NO: 2259440 - DNA, 25 bp, Homo sapien
tatcgttcatctcaaagatgtgacc

SEQ ID NO: 2259441 - DNA, 25 bp, Homo sapien
tagcagctttttcacttcgttcaag

SEQ ID NO: 2259442 - DNA, 25 bp, Homo sapien
ccaaatttcctcctctttgcgtgga

SEQ ID NO: 2259443 - DNA, 25 bp, Homo sapien
aagcattttggccaacgtcttgttg

SEQ ID NO: 2259444 - DNA, 25 bp, Homo sapien
cagcagcatccagtgcctcgctgct

SEQ ID NO: 2259445 - DNA, 25 bp, Homo sapien
ttttcggcagtgtgggggccatccg

SEQ ID NO: 2259446 - DNA, 25 bp, Homo sapien
acacactctgccacagagagcacag

SEQ ID NO: 2259447 - DNA, 25 bp, Homo sapien
atccgctccacacactctgccacag

SEQ ID NO: 2259448 - DNA, 25 bp, Homo sapien
ttgccagagtctggactcaccagca

SEQ ID NO: 2259449 - DNA, 25 bp, Homo sapien
cttgccagagtctggactcaccagc

SEQ ID NO: 2259450 - DNA, 25 bp, Homo sapien
ctcttggtggcatggtggccttgcc

SEQ ID NO: 2259451 - DNA, 25 bp, Homo sapien
ggagaggctgtgctcgctcttggtg

SEQ ID NO: 2259452 - DNA, 25 bp, Homo sapien
ccacatctgacttcccctgtcccaa

SEQ ID NO: 2259453 - DNA, 25 bp, Homo sapien
accacatctgacttcccctgtccca

SEQ ID NO: 2259454 - DNA, 25 bp, Homo sapien
ctatgtcagtgatccctctggtaat

SEQ ID NO: 2259455 - DNA, 25 bp, Homo sapien
tggtaatttatagatcggtatgtta

SEQ ID NO: 2259456 - DNA, 25 bp, Homo sapien
cagtgatccctctggtaatttatag

SEQ ID NO: 2259457 - DNA, 25 bp, Homo sapien
atttatagatcggtatgttactgac

SEQ ID NO: 2259458 - DNA, 25 bp, Homo sapien
tgaagcggcttgctagccatgccca

SEQ ID NO: 2259459 - DNA, 25 bp, Homo sapien
cagggtttgtgacccagtctcttaa

SEQ ID NO: 2259460 - DNA, 25 bp, Homo sapien
aagtcagcggccgattgaaaagccc

SEQ ID NO: 2259461 - DNA, 25 bp, Homo sapien
aaagccttctgtagccttctaacat

SEQ ID NO: 2259462 - DNA, 25 bp, Homo sapien
ggataaaggcatcaaaataagaaag

SEQ ID NO: 2259463 - DNA, 25 bp, Homo sapien
tcacagagttgctggacatcatcac

SEQ ID NO: 2259464 - DNA, 25 bp, Homo sapien
cttcacagagttgctggacatcatc

SEQ ID NO: 2259465 - DNA, 25 bp, Homo sapien
atcatcaccaccttgttggataaag

SEQ ID NO: 2259466 - DNA, 25 bp, Homo sapien
tgcaactcccccagggtcctgggta

SEQ ID NO: 2259467 - DNA, 25 bp, Homo sapien
ctgcaactcccccagggtcctgggt

SEQ ID NO: 2259468 - DNA, 25 bp, Homo sapien
actgtgggtgggtttaactcagcta

SEQ ID NO: 2259469 - DNA, 25 bp, Homo sapien
gactgtgggtgggtttaactcagct

SEQ ID NO: 2259470 - DNA, 25 bp, Homo sapien
tgtgggtgggtttaactcagctagc

SEQ ID NO: 2259471 - DNA, 25 bp, Homo sapien
tgggtgggtttaactcagctagcag

SEQ ID NO: 2259472 - DNA, 25 bp, Homo sapien
tgctcttcacattgtgactggtgaa

SEQ ID NO: 2259473 - DNA, 25 bp, Homo sapien
gaacaaggccgacttcattccacag

SEQ ID NO: 2259474 - DNA, 25 bp, Homo sapien
gaataaaagacaagggagcgctagg

SEQ ID NO: 2259475 - DNA, 25 bp, Homo sapien
tactccgactaattggcttccccag

SEQ ID NO: 2259476 - DNA, 25 bp, Homo sapien
tactgggggccttcaataccagagg

SEQ ID NO: 2259477 - DNA, 25 bp, Homo sapien
aataccagaggtagtaatcagggcc

SEQ ID NO: 2259478 - DNA, 25 bp, Homo sapien
ccagaggtagtaatcagggccttgg

SEQ ID NO: 2259479 - DNA, 25 bp, Homo sapien
ttcaataccagaggtagtaatcagg

SEQ ID NO: 2259480 - DNA, 25 bp, Homo sapien
gatactggagttggctttaagaagt

SEQ ID NO: 2259481 - DNA, 25 bp, Homo sapien
atactggagttggctttaagaagtc

SEQ ID NO: 2259482 - DNA, 25 bp, Homo sapien
tactggagttggctttaagaagtca

SEQ ID NO: 2259483 - DNA, 25 bp, Homo sapien
taacctgagagttgcgaaaatccaa

SEQ ID NO: 2259484 - DNA, 25 bp, Homo sapien
cctgagagttgcgaaaatccaactg

SEQ ID NO: 2259485 - DNA, 25 bp, Homo sapien
gagttgcgaaaatccaactggtatt

SEQ ID NO: 2259486 - DNA, 25 bp, Homo sapien
tctgtaacctgagagttgcgaaaat

SEQ ID NO: 2259487 - DNA, 25 bp, Homo sapien
caaggggggaagtgccatacacctt

SEQ ID NO: 2259488 - DNA, 25 bp, Homo sapien
aagcgtgagcaaggggggaagtgcc

SEQ ID NO: 2259489 - DNA, 25 bp, Homo sapien
gagaaagcgtgagcaaggggggaag

SEQ ID NO: 2259490 - DNA, 25 bp, Homo sapien
tgagcaaggggggaagtgccataca

SEQ ID NO: 2259491 - DNA, 25 bp, Homo sapien
tatctgtaattctgactagttctcc

SEQ ID NO: 2259492 - DNA, 25 bp, Homo sapien
ttgtttatctgtaattctgactagt

SEQ ID NO: 2259493 - DNA, 25 bp, Homo sapien
tctgtaattctgactagttctccct

SEQ ID NO: 2259494 - DNA, 25 bp, Homo sapien
gtaattctgactagttctccctctc

SEQ ID NO: 2259495 - DNA, 25 bp, Homo sapien
aaaagagcctgcatcgccaagtcaa

SEQ ID NO: 2259496 - DNA, 25 bp, Homo sapien
caaaaaagagcctgcatcgccaagt

SEQ ID NO: 2259497 - DNA, 25 bp, Homo sapien
aagagcctgcatcgccaagtcaatc

SEQ ID NO: 2259498 - DNA, 25 bp, Homo sapien
aaaaagagcctgcatcgccaagtca

SEQ ID NO: 2259499 - DNA, 25 bp, Homo sapien
ggagaaactgctttgcgccggtcaa

SEQ ID NO: 2259500 - DNA, 25 bp, Homo sapien
gcgccggtcaaagccaagttgaatt

SEQ ID NO: 2259501 - DNA, 25 bp, Homo sapien
gccaagttgaattaagacaacgatg

SEQ ID NO: 2259502 - DNA, 25 bp, Homo sapien
ttaagacaacgatgtgaatttccat

SEQ ID NO: 2259503 - DNA, 25 bp, Homo sapien
attggagactcattggaccatatta

SEQ ID NO: 2259504 - DNA, 25 bp, Homo sapien
tattactccgaacattttagcatcc

SEQ ID NO: 2259505 - DNA, 25 bp, Homo sapien
gactcattggaccatattactccga

SEQ ID NO: 2259506 - DNA, 25 bp, Homo sapien
cattggaccatattactccgaacat

SEQ ID NO: 2259507 - DNA, 25 bp, Homo sapien
aagagctctctttcgaaggatgtcc

SEQ ID NO: 2259508 - DNA, 25 bp, Homo sapien
ctttcgaaggatgtcctcctgtccc

SEQ ID NO: 2259509 - DNA, 25 bp, Homo sapien
ctctaagagctctctttcgaaggat

SEQ ID NO: 2259510 - DNA, 25 bp, Homo sapien
tttcgaaggatgtcctcctgtcccc

SEQ ID NO: 2259511 - DNA, 25 bp, Homo sapien
tttccaccactctaagctgctggtt

SEQ ID NO: 2259512 - DNA, 25 bp, Homo sapien
gatgaggcccagatagagattacta

SEQ ID NO: 2259513 - DNA, 25 bp, Homo sapien
tatccatgtggtgcagaaaatagct

SEQ ID NO: 2259514 - DNA, 25 bp, Homo sapien
ttgaactaaaacctggacttcctgc

SEQ ID NO: 2259515 - DNA, 25 bp, Homo sapien
gactgattctggtttcctaatggaa

SEQ ID NO: 2259516 - DNA, 25 bp, Homo sapien
gataagccactgattttacccaagg

SEQ ID NO: 2259517 - DNA, 25 bp, Homo sapien
gaggcagattaaggttcatcctgaa

SEQ ID NO: 2259518 - DNA, 25 bp, Homo sapien
tacccaaggtggcttgcatcagcaa

SEQ ID NO: 2259519 - DNA, 25 bp, Homo sapien
aggctcacgacagtggcgtgaaggc

SEQ ID NO: 2259520 - DNA, 25 bp, Homo sapien
tgaaggctcacgacagtggcgtgaa

SEQ ID NO: 2259521 - DNA, 25 bp, Homo sapien
ggaatgaaggctcacgacagtggcg

SEQ ID NO: 2259522 - DNA, 25 bp, Homo sapien
aatgaaggctcacgacagtggcgtg

SEQ ID NO: 2259523 - DNA, 25 bp, Homo sapien
tcaattaaaaggttcgaggaagctc

SEQ ID NO: 2259524 - DNA, 25 bp, Homo sapien
ccattcaggtaaaaggaccttagct

SEQ ID NO: 2259525 - DNA, 25 bp, Homo sapien
caaaaagtattctccttgggcatat

SEQ ID NO: 2259526 - DNA, 25 bp, Homo sapien
gcaaagcaaagatctcactactcaa

SEQ ID NO: 2259527 - DNA, 25 bp, Homo sapien
gaatttgtcacttgtctgaggtcag

SEQ ID NO: 2259528 - DNA, 25 bp, Homo sapien
gatgtctcttgacgtcgatgctaaa

SEQ ID NO: 2259529 - DNA, 25 bp, Homo sapien
tacagttagaatacccaaggagacc

SEQ ID NO: 2259530 - DNA, 25 bp, Homo sapien
ggaattcctcgacatcactcctggc

SEQ ID NO: 2259531 - DNA, 25 bp, Homo sapien
ttcccatttagtatggtttcataga

SEQ ID NO: 2259532 - DNA, 25 bp, Homo sapien
cccatttagtatggtttcatagaat

SEQ ID NO: 2259533 - DNA, 25 bp, Homo sapien
caatgttatcatgtttagctctggc

SEQ ID NO: 2259534 - DNA, 25 bp, Homo sapien
ggctttcccatttagtatggtttca

SEQ ID NO: 2259535 - DNA, 25 bp, Homo sapien
aggagttgattagattgaattccat

SEQ ID NO: 2259536 - DNA, 25 bp, Homo sapien
ggggaggagttgattagattgaatt

SEQ ID NO: 2259537 - DNA, 25 bp, Homo sapien
ctcaccccagtctgcgtaattcttg

SEQ ID NO: 2259538 - DNA, 25 bp, Homo sapien
ggaggagttgattagattgaattcc

SEQ ID NO: 2259539 - DNA, 25 bp, Homo sapien
tgtagaggtcagactttttattcat

SEQ ID NO: 2259540 - DNA, 25 bp, Homo sapien
ctgtagaggtcagactttttattca

SEQ ID NO: 2259541 - DNA, 25 bp, Homo sapien
caaggataggatacccagaagagca

SEQ ID NO: 2259542 - DNA, 25 bp, Homo sapien
gagcaagtctattcaaggaagtccc

SEQ ID NO: 2259543 - DNA, 25 bp, Homo sapien
cccacctgggtgatatgtctatgcc

SEQ ID NO: 2259544 - DNA, 25 bp, Homo sapien
gatgctgctaacctccctagtgttg

SEQ ID NO: 2259545 - DNA, 25 bp, Homo sapien
tagtgtccatatggaaggattcttg

SEQ ID NO: 2259546 - DNA, 25 bp, Homo sapien
gatgtagtgtccatatggaaggatt

SEQ ID NO: 2259547 - DNA, 25 bp, Homo sapien
gtccatatggaaggattcttgtgcc

SEQ ID NO: 2259548 - DNA, 25 bp, Homo sapien
ttcttgtgccttgtacattcctcat

SEQ ID NO: 2259549 - DNA, 25 bp, Homo sapien
catcgtaggtgcaccataggaggca

SEQ ID NO: 2259550 - DNA, 25 bp, Homo sapien
aagcttgcggtgtcgcgaataggcc

SEQ ID NO: 2259551 - DNA, 25 bp, Homo sapien
gcgcgtctccattaccacagtcggg

SEQ ID NO: 2259552 - DNA, 25 bp, Homo sapien
gacattccctgcaggaccctcgttt

SEQ ID NO: 2259553 - DNA, 25 bp, Homo sapien
tagacttttcggtgaacttctccat

SEQ ID NO: 2259554 - DNA, 25 bp, Homo sapien
gcaggtgccataagggtaaaggcaa

SEQ ID NO: 2259555 - DNA, 25 bp, Homo sapien
tgacaatacaggactttgatacagt

SEQ ID NO: 2259556 - DNA, 25 bp, Homo sapien
cctattcgctgcagtgatcggggag

SEQ ID NO: 2259557 - DNA, 25 bp, Homo sapien
gggagagactgacaatacaggactt

SEQ ID NO: 2259558 - DNA, 25 bp, Homo sapien
tacttgtaatggaagtaagattcct

SEQ ID NO: 2259559 - DNA, 25 bp, Homo sapien
actgatcagcagaattcttacatgg

SEQ ID NO: 2259560 - DNA, 25 bp, Homo sapien
gatactgatcagcagaattcttaca

SEQ ID NO: 2259561 - DNA, 25 bp, Homo sapien
ctgcctgatactgatcagcagaatt

SEQ ID NO: 2259562 - DNA, 25 bp, Homo sapien
cctgatactgatcagcagaattctt

SEQ ID NO: 2259563 - DNA, 25 bp, Homo sapien
gcccactgcatggagattggtctcc

SEQ ID NO: 2259564 - DNA, 25 bp, Homo sapien
gtaggcccactgcatggagattggt

SEQ ID NO: 2259565 - DNA, 25 bp, Homo sapien
catggagattggtctccacacagtt

SEQ ID NO: 2259566 - DNA, 25 bp, Homo sapien
cactgcatggagattggtctccaca

SEQ ID NO: 2259567 - DNA, 25 bp, Homo sapien
aggagagtggtcaggtgtttatctg

SEQ ID NO: 2259568 - DNA, 25 bp, Homo sapien
gtaggtaaggagagtggtcaggtgt

SEQ ID NO: 2259569 - DNA, 25 bp, Homo sapien
taggtaaggagagtggtcaggtgtt

SEQ ID NO: 2259570 - DNA, 25 bp, Homo sapien
gagtggtcaggtgtttatctgtgga

SEQ ID NO: 2259571 - DNA, 25 bp, Homo sapien
catccaggcatattccagtgactca

SEQ ID NO: 2259572 - DNA, 25 bp, Homo sapien
caaccaaagctatatgttgccttct

SEQ ID NO: 2259573 - DNA, 25 bp, Homo sapien
ctttagtgttagcagctggcatcca

SEQ ID NO: 2259574 - DNA, 25 bp, Homo sapien
cacagtgctggtcttagtatagtct

SEQ ID NO: 2259575 - DNA, 25 bp, Homo sapien
tcaggccttagttgttggacagcat

SEQ ID NO: 2259576 - DNA, 25 bp, Homo sapien
tagccagactgtacttgtcgtgggc

SEQ ID NO: 2259577 - DNA, 25 bp, Homo sapien
catcagatgattaaacagcccttgg

SEQ ID NO: 2259578 - DNA, 25 bp, Homo sapien
ccaaggaggctcatgagattaccaa

SEQ ID NO: 2259579 - DNA, 25 bp, Homo sapien
tatcctggtgccatagttccgcaga

SEQ ID NO: 2259580 - DNA, 25 bp, Homo sapien
gagcaccaggtgagcatctctgagg

SEQ ID NO: 2259581 - DNA, 25 bp, Homo sapien
tgtttgacgtgcctgccatcgccat

SEQ ID NO: 2259582 - DNA, 25 bp, Homo sapien
tcaagtgccctcgttactatcctgg

SEQ ID NO: 2259583 - DNA, 25 bp, Homo sapien
cttgcagagctattggacaaggtct

SEQ ID NO: 2259584 - DNA, 25 bp, Homo sapien
gagctattggacaaggtctctttcc

SEQ ID NO: 2259585 - DNA, 25 bp, Homo sapien
ttcatgctaggtacccagactctgc

SEQ ID NO: 2259586 - DNA, 25 bp, Homo sapien
ggccaatgcccagtacaagtttctt

SEQ ID NO: 2259587 - DNA, 25 bp, Homo sapien
ccgtaggcgtgggtctctggctctt

SEQ ID NO: 2259588 - DNA, 25 bp, Homo sapien
aggcatcctagggaaccgtaggcgt

SEQ ID NO: 2259589 - DNA, 25 bp, Homo sapien
gagtccctggggcatagacccactc

SEQ ID NO: 2259590 - DNA, 25 bp, Homo sapien
gccagctggaggtgtaggcatccta

SEQ ID NO: 2259591 - DNA, 25 bp, Homo sapien
tataacgggtaaggtctctggagac

SEQ ID NO: 2259592 - DNA, 25 bp, Homo sapien
cctggctgaccaagctaaggctgcc

SEQ ID NO: 2259593 - DNA, 25 bp, Homo sapien
cacctccggccgtaaagaatggtgg

SEQ ID NO: 2259594 - DNA, 25 bp, Homo sapien
ggacgctcttgcaccgcgattcgag

SEQ ID NO: 2259595 - DNA, 25 bp, Homo sapien
cacgacctgtactccaggagtggga

SEQ ID NO: 2259596 - DNA, 25 bp, Homo sapien
ttttttgcacgacctgtactccagg

SEQ ID NO: 2259597 - DNA, 25 bp, Homo sapien
gctcaatctccacgtagcgggagct

SEQ ID NO: 2259598 - DNA, 25 bp, Homo sapien
tagcgggagcttttttgcacgacct

SEQ ID NO: 2259599 - DNA, 25 bp, Homo sapien
ggcgaagaaagaatttgagcagggc

SEQ ID NO: 2259600 - DNA, 25 bp, Homo sapien
ctggcgaagaaagaatttgagcagg

SEQ ID NO: 2259601 - DNA, 25 bp, Homo sapien
cgaagaaagaatttgagcagggcag

SEQ ID NO: 2259602 - DNA, 25 bp, Homo sapien
gcgaagaaagaatttgagcagggca

SEQ ID NO: 2259603 - DNA, 25 bp, Homo sapien
ggcacatcgccacaaaggcaaagct

SEQ ID NO: 2259604 - DNA, 25 bp, Homo sapien
cctatactgggatgccctggctgga

SEQ ID NO: 2259605 - DNA, 25 bp, Homo sapien
cgaaggtggattcgcatttctgccc

SEQ ID NO: 2259606 - DNA, 25 bp, Homo sapien
aaagctgatttctccatggctgggg

SEQ ID NO: 2259607 - DNA, 25 bp, Homo sapien
cacacccaagatcacatacctgggt

SEQ ID NO: 2259608 - DNA, 25 bp, Homo sapien
aagatcacatacctgggttttcagg

SEQ ID NO: 2259609 - DNA, 25 bp, Homo sapien
agtgccatcgcgaccacctttacca

SEQ ID NO: 2259610 - DNA, 25 bp, Homo sapien
ccaagatcacatacctgggttttca

SEQ ID NO: 2259611 - DNA, 25 bp, Homo sapien
tgagccatctcatactcattgctgg

SEQ ID NO: 2259612 - DNA, 25 bp, Homo sapien
tgcgggctgtggagcgagtgtgata

SEQ ID NO: 2259613 - DNA, 25 bp, Homo sapien
ggattactaggatcccttgctgaca

SEQ ID NO: 2259614 - DNA, 25 bp, Homo sapien
tagaaataggaatcagatgcatttg

SEQ ID NO: 2259615 - DNA, 25 bp, Homo sapien
tggaggtggctctcgaatcccatac

SEQ ID NO: 2259616 - DNA, 25 bp, Homo sapien
ggcaaaggccggatggaggtggctc

SEQ ID NO: 2259617 - DNA, 25 bp, Homo sapien
atgcgcatgtaaataaggcaaaggc

SEQ ID NO: 2259618 - DNA, 25 bp, Homo sapien
cgtgaaggacacagatgcgcatgta

SEQ ID NO: 2259619 - DNA, 25 bp, Homo sapien
tgtcctcataggacagtattgcagc

SEQ ID NO: 2259620 - DNA, 25 bp, Homo sapien
gctgtcctcataggacagtattgca

SEQ ID NO: 2259621 - DNA, 25 bp, Homo sapien
agctgtcctcataggacagtattgc

SEQ ID NO: 2259622 - DNA, 25 bp, Homo sapien
tcctcataggacagtattgcagcag

SEQ ID NO: 2259623 - DNA, 25 bp, Homo sapien
ggtctgcattccggccctgaggcct

SEQ ID NO: 2259624 - DNA, 25 bp, Homo sapien
agccaaatgtaggccctctgcagaa

SEQ ID NO: 2259625 - DNA, 25 bp, Homo sapien
gaggtctgcattccggccctgaggc

SEQ ID NO: 2259626 - DNA, 25 bp, Homo sapien
gaagaggtctgcattccggccctga

SEQ ID NO: 2259627 - DNA, 25 bp, Homo sapien
caccttgcatttgagttgcccagaa

SEQ ID NO: 2259628 - DNA, 25 bp, Homo sapien
tactgaagacctaactggcaaattc

SEQ ID NO: 2259629 - DNA, 25 bp, Homo sapien
tccctcactcatgttgtagtcgtgg

SEQ ID NO: 2259630 - DNA, 25 bp, Homo sapien
gagctgctaacttcaccctcctgag

SEQ ID NO: 2259631 - DNA, 25 bp, Homo sapien
tgccaccaccaccacaagctgttct

SEQ ID NO: 2259632 - DNA, 25 bp, Homo sapien
ccaccaccacaagctgttcttcctt

SEQ ID NO: 2259633 - DNA, 25 bp, Homo sapien
gccaccaccaccacaagctgttctt

SEQ ID NO: 2259634 - DNA, 25 bp, Homo sapien
caccaccaccacaagctgttcttcc

SEQ ID NO: 2259635 - DNA, 25 bp, Homo sapien
acagaacgcctgttctgtggtccgt

SEQ ID NO: 2259636 - DNA, 25 bp, Homo sapien
caacttttcacagaacgcctgttct

SEQ ID NO: 2259637 - DNA, 25 bp, Homo sapien
ggcttccggtctctttcctgcatca

SEQ ID NO: 2259638 - DNA, 25 bp, Homo sapien
gtccgtgtcactgttcgggcttccg

SEQ ID NO: 2259639 - DNA, 25 bp, Homo sapien
gtaatgaaagtgcaaaacaatggtg

SEQ ID NO: 2259640 - DNA, 25 bp, Homo sapien
tgatgatgattataatcttttcatt

SEQ ID NO: 2259641 - DNA, 25 bp, Homo sapien
ctaagtaatgaaagtgcaaaacaat

SEQ ID NO: 2259642 - DNA, 25 bp, Homo sapien
gatgatgattataatcttttcatta

SEQ ID NO: 2259643 - DNA, 25 bp, Homo sapien
ctctatgtcggatgacagtctggaa

SEQ ID NO: 2259644 - DNA, 25 bp, Homo sapien
tcggatgacagtctggaagtcacca

SEQ ID NO: 2259645 - DNA, 25 bp, Homo sapien
tatgtcggatgacagtctggaagtc

SEQ ID NO: 2259646 - DNA, 25 bp, Homo sapien
cgtgtctctatgtcggatgacagtc

SEQ ID NO: 2259647 - DNA, 25 bp, Homo sapien
ccagaggcactgagtcagagttcca

SEQ ID NO: 2259648 - DNA, 25 bp, Homo sapien
ggcactgagtcagagttccacatca

SEQ ID NO: 2259649 - DNA, 25 bp, Homo sapien
gcactgagtcagagttccacatcat

SEQ ID NO: 2259650 - DNA, 25 bp, Homo sapien
gaggcactgagtcagagttccacat

SEQ ID NO: 2259651 - DNA, 25 bp, Homo sapien
acccagatgcatagctgccatacac

SEQ ID NO: 2259652 - DNA, 25 bp, Homo sapien
tagggcttcttaatacaagcgccag

SEQ ID NO: 2259653 - DNA, 25 bp, Homo sapien
actagggcttcttaatacaagcgcc

SEQ ID NO: 2259654 - DNA, 25 bp, Homo sapien
tgacccagatgcatagctgccatac

SEQ ID NO: 2259655 - DNA, 25 bp, Homo sapien
ccacttgatgctttgagcctcaatg

SEQ ID NO: 2259656 - DNA, 25 bp, Homo sapien
ttagtgctctggcggcggtatgggc

SEQ ID NO: 2259657 - DNA, 25 bp, Homo sapien
cttgatgctttgagcctcaatgtcc

SEQ ID NO: 2259658 - DNA, 25 bp, Homo sapien
ctctggcggcggtatgggcccaatg

SEQ ID NO: 2259659 - DNA, 25 bp, Homo sapien
atggtttctggatctgcagtgctgc

SEQ ID NO: 2259660 - DNA, 25 bp, Homo sapien
tggtttctggatctgcagtgctgct

SEQ ID NO: 2259661 - DNA, 25 bp, Homo sapien
catggtttctggatctgcagtgctg

SEQ ID NO: 2259662 - DNA, 25 bp, Homo sapien
tcaacaagtttgatcctttggggac

SEQ ID NO: 2259663 - DNA, 25 bp, Homo sapien
ccatttgaagcatgtagttcaatta

SEQ ID NO: 2259664 - DNA, 25 bp, Homo sapien
catgtagttcaattaacttgtcttg

SEQ ID NO: 2259665 - DNA, 25 bp, Homo sapien
tgaagcatgtagttcaattaacttg

SEQ ID NO: 2259666 - DNA, 25 bp, Homo sapien
tgcttccatttgaagcatgtagttc

SEQ ID NO: 2259667 - DNA, 25 bp, Homo sapien
attttgatcaccatggggtataccc

SEQ ID NO: 2259668 - DNA, 25 bp, Homo sapien
tataccctgttgggtataaaatgta

SEQ ID NO: 2259669 - DNA, 25 bp, Homo sapien
ccctgttgggtataaaatgtactct

SEQ ID NO: 2259670 - DNA, 25 bp, Homo sapien
tctggagacctctcagcttgccctg

SEQ ID NO: 2259671 - DNA, 25 bp, Homo sapien
aggatactgttggcccactcccttc

SEQ ID NO: 2259672 - DNA, 25 bp, Homo sapien
caggatactgttggcccactccctt

SEQ ID NO: 2259673 - DNA, 25 bp, Homo sapien
ggcaggatactgttggcccactccc

SEQ ID NO: 2259674 - DNA, 25 bp, Homo sapien
gcaggatactgttggcccactccct

SEQ ID NO: 2259675 - DNA, 25 bp, Homo sapien
gattcagtgcaatccaaatcaaatt

SEQ ID NO: 2259676 - DNA, 25 bp, Homo sapien
aagagtttagcaatggcactggata

SEQ ID NO: 2259677 - DNA, 25 bp, Homo sapien
ctagcaatgagcaattggcaattga

SEQ ID NO: 2259678 - DNA, 25 bp, Homo sapien
gatgtataagatctgtccactgaaa

SEQ ID NO: 2259679 - DNA, 25 bp, Homo sapien
ggttatgtcttagttagctttgact

SEQ ID NO: 2259680 - DNA, 25 bp, Homo sapien
tatgtcttagttagctttgacttcc

SEQ ID NO: 2259681 - DNA, 25 bp, Homo sapien
ttatgtcttagttagctttgacttc

SEQ ID NO: 2259682 - DNA, 25 bp, Homo sapien
ggggttatgtcttagttagctttga

SEQ ID NO: 2259683 - DNA, 25 bp, Homo sapien
aattacagtcacacttaggctgctg

SEQ ID NO: 2259684 - DNA, 25 bp, Homo sapien
tatagcctgcctagacgtcagatga

SEQ ID NO: 2259685 - DNA, 25 bp, Homo sapien
taaccctagggtaatagcaggacag

SEQ ID NO: 2259686 - DNA, 25 bp, Homo sapien
ttaaggcagtatggttccggagatc

SEQ ID NO: 2259687 - DNA, 25 bp, Homo sapien
tgactcgcagcttgagactggcgga

SEQ ID NO: 2259688 - DNA, 25 bp, Homo sapien
gacaagcgagcttctgcgtctgact

SEQ ID NO: 2259689 - DNA, 25 bp, Homo sapien
gctttcaaccaaggaaagccccagc

SEQ ID NO: 2259690 - DNA, 25 bp, Homo sapien
aagccccagctgcccggatgtgatg

SEQ ID NO: 2259691 - DNA, 25 bp, Homo sapien
tgcactatgtagtcagggaggtact

SEQ ID NO: 2259692 - DNA, 25 bp, Homo sapien
gatgaggtccgtgtgcactatgtag

SEQ ID NO: 2259693 - DNA, 25 bp, Homo sapien
attcctttagttgagagtaaggtgc

SEQ ID NO: 2259694 - DNA, 25 bp, Homo sapien
tcagggaggtactgtagcctgtcca

SEQ ID NO: 2259695 - DNA, 25 bp, Homo sapien
tataggcaagcaactagtcggtgca

SEQ ID NO: 2259696 - DNA, 25 bp, Homo sapien
tgccccgggtataacagtggactgg

SEQ ID NO: 2259697 - DNA, 25 bp, Homo sapien
tgcctgttgcaaagccgagtttcct

SEQ ID NO: 2259698 - DNA, 25 bp, Homo sapien
gatagaactccgacagtgtgccctg

SEQ ID NO: 2259699 - DNA, 25 bp, Homo sapien
caagttaaggcaaacaagccagtag

SEQ ID NO: 2259700 - DNA, 25 bp, Homo sapien
gaaagtcactgggaaaacaactctc

SEQ ID NO: 2259701 - DNA, 25 bp, Homo sapien
tctcgagtagttatccaggcggtag

SEQ ID NO: 2259702 - DNA, 25 bp, Homo sapien
ccagtagagcacattgaagaagaag

SEQ ID NO: 2259703 - DNA, 25 bp, Homo sapien
tacttcttaaaacgcttgcaccact

SEQ ID NO: 2259704 - DNA, 25 bp, Homo sapien
aaaacgcttgcaccactcacagcag

SEQ ID NO: 2259705 - DNA, 25 bp, Homo sapien
agtacttcttaaaacgcttgcacca

SEQ ID NO: 2259706 - DNA, 25 bp, Homo sapien
tcttaaaacgcttgcaccactcaca

SEQ ID NO: 2259707 - DNA, 25 bp, Homo sapien
agacgggcgctcctctccatcactt

SEQ ID NO: 2259708 - DNA, 25 bp, Homo sapien
ctgcggggaccctcagggctacctg

SEQ ID NO: 2259709 - DNA, 25 bp, Homo sapien
gaggctgcggggaccctcagggcta

SEQ ID NO: 2259710 - DNA, 25 bp, Homo sapien
tgggctgagcaagacgggcgctcct

SEQ ID NO: 2259711 - DNA, 25 bp, Homo sapien
aaagcttcctgatgttggcgggcac

SEQ ID NO: 2259712 - DNA, 25 bp, Homo sapien
tcgggaacgtgcacgggtacgggca

SEQ ID NO: 2259713 - DNA, 25 bp, Homo sapien
cgtgcacgggtacgggcatgggcac

SEQ ID NO: 2259714 - DNA, 25 bp, Homo sapien
ggcgggcacaggctcgggaacgtgc

SEQ ID NO: 2259715 - DNA, 25 bp, Homo sapien
ctggaaactgtctttggcacaccat

SEQ ID NO: 2259716 - DNA, 25 bp, Homo sapien
ggaagataacccaagtctaagtgct

SEQ ID NO: 2259717 - DNA, 25 bp, Homo sapien
agtcaagggaagataacccaagtct

SEQ ID NO: 2259718 - DNA, 25 bp, Homo sapien
tgtctttggcacaccatatcttggc

SEQ ID NO: 2259719 - DNA, 25 bp, Homo sapien
agcatgggcttttgtctggttgtag

SEQ ID NO: 2259720 - DNA, 25 bp, Homo sapien
gaagcatgggcttttgtctggttgt

SEQ ID NO: 2259721 - DNA, 25 bp, Homo sapien
atggcggagtttaggagaagcatgg

SEQ ID NO: 2259722 - DNA, 25 bp, Homo sapien
ttaggagaagcatgggcttttgtct

SEQ ID NO: 2259723 - DNA, 25 bp, Homo sapien
ggcgatatagaaatccaaggctgtg

SEQ ID NO: 2259724 - DNA, 25 bp, Homo sapien
cttacgagaaaaggtgcccaacgtg

SEQ ID NO: 2259725 - DNA, 25 bp, Homo sapien
cagaagacgaagcagatggcgatat

SEQ ID NO: 2259726 - DNA, 25 bp, Homo sapien
gatataggagacacgcgggaaattc

SEQ ID NO: 2259727 - DNA, 25 bp, Homo sapien
gaaacccaggagagcatcgtggtca

SEQ ID NO: 2259728 - DNA, 25 bp, Homo sapien
catagttttgaaaggcaacatagcc

SEQ ID NO: 2259729 - DNA, 25 bp, Homo sapien
cctgctcacattgaagaaaatcgtc

SEQ ID NO: 2259730 - DNA, 25 bp, Homo sapien
tggtcacggaagaagggacatagtt

SEQ ID NO: 2259731 - DNA, 25 bp, Homo sapien
ttttcagctcacagtattccctagg

SEQ ID NO: 2259732 - DNA, 25 bp, Homo sapien
attacagtgctgacacgacggtccc

SEQ ID NO: 2259733 - DNA, 25 bp, Homo sapien
ccctaggatagaggcatgatgtgac

SEQ ID NO: 2259734 - DNA, 25 bp, Homo sapien
ccccttagcaggacgtgaacagtaa

SEQ ID NO: 2259735 - DNA, 25 bp, Homo sapien
aaatgccttcgtgagtgagcactgc

SEQ ID NO: 2259736 - DNA, 25 bp, Homo sapien
gctccacaggtggtcaaaaccggca

SEQ ID NO: 2259737 - DNA, 25 bp, Homo sapien
tagccttctagatatcatgcccacg

SEQ ID NO: 2259738 - DNA, 25 bp, Homo sapien
tggctctcagctagacggtcatggc

SEQ ID NO: 2259739 - DNA, 25 bp, Homo sapien
taattagttatacccaggccctgca

SEQ ID NO: 2259740 - DNA, 25 bp, Homo sapien
caacagactatgatccatgccggga

SEQ ID NO: 2259741 - DNA, 25 bp, Homo sapien
ttaatcgccgagcacgtaagtatgc

SEQ ID NO: 2259742 - DNA, 25 bp, Homo sapien
gaaagtggatcaactgcccagcagg

SEQ ID NO: 2259743 - DNA, 25 bp, Homo sapien
tcactagggcaccattttgaaacaa

SEQ ID NO: 2259744 - DNA, 25 bp, Homo sapien
ctaaacggaaccactagtgacttga

SEQ ID NO: 2259745 - DNA, 25 bp, Homo sapien
ttgtagtcactagggcaccattttg

SEQ ID NO: 2259746 - DNA, 25 bp, Homo sapien
caatgcacaatcatctactaaacgg

SEQ ID NO: 2259747 - DNA, 25 bp, Homo sapien
gagcaaggctcccaagtcaaaggta

SEQ ID NO: 2259748 - DNA, 25 bp, Homo sapien
tcacttttgatgatgggtccccacc

SEQ ID NO: 2259749 - DNA, 25 bp, Homo sapien
cccatggttagctggcagaagagca

SEQ ID NO: 2259750 - DNA, 25 bp, Homo sapien
ctatccgggaaaagctgaggtgcag

SEQ ID NO: 2259751 - DNA, 25 bp, Homo sapien
aggtcccttggctcctcattcaggt

SEQ ID NO: 2259752 - DNA, 25 bp, Homo sapien
ttctggaaacgatgagggcagtgcc

SEQ ID NO: 2259753 - DNA, 25 bp, Homo sapien
tgaacttggtcaggatgtgtgaaga

SEQ ID NO: 2259754 - DNA, 25 bp, Homo sapien
ggcagtgccttcactgccctgaact

SEQ ID NO: 2259755 - DNA, 25 bp, Homo sapien
taacctcgaaactgaagggtctgca

SEQ ID NO: 2259756 - DNA, 25 bp, Homo sapien
tgggtatggagaactcacacgagct

SEQ ID NO: 2259757 - DNA, 25 bp, Homo sapien
cactatgtctatgtggaatccacca

SEQ ID NO: 2259758 - DNA, 25 bp, Homo sapien
tgaagtgtaagatacccaggacctt

SEQ ID NO: 2259759 - DNA, 25 bp, Homo sapien
ctcctgtaaaatcaaactggaagag

SEQ ID NO: 2259760 - DNA, 25 bp, Homo sapien
cctgtaaaatcaaactggaagagct

SEQ ID NO: 2259761 - DNA, 25 bp, Homo sapien
tcctgtaaaatcaaactggaagagc

SEQ ID NO: 2259762 - DNA, 25 bp, Homo sapien
agagtgagaatccattggaaatctg

SEQ ID NO: 2259763 - DNA, 25 bp, Homo sapien
aaagatagagggcaagagtgagaat

SEQ ID NO: 2259764 - DNA, 25 bp, Homo sapien
tgagcatccggcatcaatggtcatc

SEQ ID NO: 2259765 - DNA, 25 bp, Homo sapien
tctgagcatgtggagtgagcatccg

SEQ ID NO: 2259766 - DNA, 25 bp, Homo sapien
ttgtagatgcggaccatctggttgg

SEQ ID NO: 2259767 - DNA, 25 bp, Homo sapien
taattgtgtacaacaccttgccatc

SEQ ID NO: 2259768 - DNA, 25 bp, Homo sapien
catgctcgtgggtcctcttagaatt

SEQ ID NO: 2259769 - DNA, 25 bp, Homo sapien
atggtgatctcatgctcgtgggtcc

SEQ ID NO: 2259770 - DNA, 25 bp, Homo sapien
cgttgtaacagaggcgttcgtcgta

SEQ ID NO: 2259771 - DNA, 25 bp, Homo sapien
aaaggtgtccgggatccatagctgg

SEQ ID NO: 2259772 - DNA, 25 bp, Homo sapien
catagctggctcaccacattgccat

SEQ ID NO: 2259773 - DNA, 25 bp, Homo sapien
gagactcaaaggtgtcgttgtaaca

SEQ ID NO: 2259774 - DNA, 25 bp, Homo sapien
tctgggagaagatgatgtcaatggt

SEQ ID NO: 2259775 - DNA, 25 bp, Homo sapien
ggtctgggagaagatgatgtcaatg

SEQ ID NO: 2259776 - DNA, 25 bp, Homo sapien
agaagatgatgtcaatggtgtattc

SEQ ID NO: 2259777 - DNA, 25 bp, Homo sapien
caggtctgggagaagatgatgtcaa

SEQ ID NO: 2259778 - DNA, 25 bp, Homo sapien
tattggagttgttacagaagtacag

SEQ ID NO: 2259779 - DNA, 25 bp, Homo sapien
ggagttgttacagaagtacagagca

SEQ ID NO: 2259780 - DNA, 25 bp, Homo sapien
aattattggagttgttacagaagta

SEQ ID NO: 2259781 - DNA, 25 bp, Homo sapien
tagtactaaaaaagcttagtactca

SEQ ID NO: 2259782 - DNA, 25 bp, Homo sapien
caaggctgttgacggagatctcaac

SEQ ID NO: 2259783 - DNA, 25 bp, Homo sapien
cggagatctcaacagtgaccacagt

SEQ ID NO: 2259784 - DNA, 25 bp, Homo sapien
gagatctcaacagtgaccacagtgg

SEQ ID NO: 2259785 - DNA, 25 bp, Homo sapien
aggaccaaggctgttgacggagatc

SEQ ID NO: 2259786 - DNA, 25 bp, Homo sapien
catgagcatggcaccctctgttact

SEQ ID NO: 2259787 - DNA, 25 bp, Homo sapien
tgacaggtcaatagcagatgttcct

SEQ ID NO: 2259788 - DNA, 25 bp, Homo sapien
taagtgtcaaacaggcgcatgggac

SEQ ID NO: 2259789 - DNA, 25 bp, Homo sapien
tcaagtaagtgttggaccacacagt

SEQ ID NO: 2259790 - DNA, 25 bp, Homo sapien
cagtttgtggtcataattactcagg

SEQ ID NO: 2259791 - DNA, 25 bp, Homo sapien
tactcaggatagtgttcaggatgcg

SEQ ID NO: 2259792 - DNA, 25 bp, Homo sapien
tcaggatagtgttcaggatgcgaga

SEQ ID NO: 2259793 - DNA, 25 bp, Homo sapien
tccaatgccagggcgcagtttgtgg

SEQ ID NO: 2259794 - DNA, 25 bp, Homo sapien
gggccatagacaacatcacgggaag

SEQ ID NO: 2259795 - DNA, 25 bp, Homo sapien
gggaagaggcttcattctttgattc

SEQ ID NO: 2259796 - DNA, 25 bp, Homo sapien
ctgggggccatagacaacatcacgg

SEQ ID NO: 2259797 - DNA, 25 bp, Homo sapien
catagacaacatcacgggaagaggc

SEQ ID NO: 2259798 - DNA, 25 bp, Homo sapien
ccccagctagtgcctcttgggacag

SEQ ID NO: 2259799 - DNA, 25 bp, Homo sapien
ccagctagtgcctcttgggacagaa

SEQ ID NO: 2259800 - DNA, 25 bp, Homo sapien
cagctagtgcctcttgggacagaag

SEQ ID NO: 2259801 - DNA, 25 bp, Homo sapien
agctagtgcctcttgggacagaagc

SEQ ID NO: 2259802 - DNA, 25 bp, Homo sapien
gacagattaggcttgtgaatttctt

SEQ ID NO: 2259803 - DNA, 25 bp, Homo sapien
tagcaaattataagacagtgacaga

SEQ ID NO: 2259804 - DNA, 25 bp, Homo sapien
ttaaattgtgactggtaatagcaaa

SEQ ID NO: 2259805 - DNA, 25 bp, Homo sapien
gaagagggcatttatgtctgagcgc

SEQ ID NO: 2259806 - DNA, 25 bp, Homo sapien
gccatctgccaaggtatgaaactca

SEQ ID NO: 2259807 - DNA, 25 bp, Homo sapien
gccatgcaccacagccaagaaaaag

SEQ ID NO: 2259808 - DNA, 25 bp, Homo sapien
aatgcttgcgaaagccagagcggcc

SEQ ID NO: 2259809 - DNA, 25 bp, Homo sapien
tgtgggtgtctaaacaggaaaggca

SEQ ID NO: 2259810 - DNA, 25 bp, Homo sapien
tattctgacaactcatcagctgtac

SEQ ID NO: 2259811 - DNA, 25 bp, Homo sapien
ttatgatttgagcacttctctgtat

SEQ ID NO: 2259812 - DNA, 25 bp, Homo sapien
ggtcctgctcacattcgggtccttg

SEQ ID NO: 2259813 - DNA, 25 bp, Homo sapien
tttggctttctttacaccgctgtgg

SEQ ID NO: 2259814 - DNA, 25 bp, Homo sapien
ggcaagagacgttggcatgacccct

SEQ ID NO: 2259815 - DNA, 25 bp, Homo sapien
catgacccctgtattgcggaccaag

SEQ ID NO: 2259816 - DNA, 25 bp, Homo sapien
gatctaggtgttggttacacgggcc

SEQ ID NO: 2259817 - DNA, 25 bp, Homo sapien
tacacgggcctgtttacttgtgaaa

SEQ ID NO: 2259818 - DNA, 25 bp, Homo sapien
tgaaatccatggacgagatcctccc

SEQ ID NO: 2259819 - DNA, 25 bp, Homo sapien
gatatcagagggtcataaggtggct

SEQ ID NO: 2259820 - DNA, 25 bp, Homo sapien
aagtggctacttcccattgtgggcg

SEQ ID NO: 2259821 - DNA, 25 bp, Homo sapien
ggcacaatcagaactggcagtcagt

SEQ ID NO: 2259822 - DNA, 25 bp, Homo sapien
gaggactggaagaactttggacaac

SEQ ID NO: 2259823 - DNA, 25 bp, Homo sapien
taagatgcctaggaggactggaaga

SEQ ID NO: 2259824 - DNA, 25 bp, Homo sapien
ggatcaataagatgcctaggaggac

SEQ ID NO: 2259825 - DNA, 25 bp, Homo sapien
ctcgactggaggatcaataagatgc

SEQ ID NO: 2259826 - DNA, 25 bp, Homo sapien
cggaggtcgcggctcacgctctggc

SEQ ID NO: 2259827 - DNA, 25 bp, Homo sapien
ttccgcggagaccggcgcgaccacc

SEQ ID NO: 2259828 - DNA, 25 bp, Homo sapien
agaccggcgcgaccacctgcgcgga

SEQ ID NO: 2259829 - DNA, 25 bp, Homo sapien
accacctgcgcggaggtcgcggctc

SEQ ID NO: 2259830 - DNA, 25 bp, Homo sapien
cttgaggtcttgagtaacaccagga

SEQ ID NO: 2259831 - DNA, 25 bp, Homo sapien
ggcacacctggtatccttgaggtct

SEQ ID NO: 2259832 - DNA, 25 bp, Homo sapien
caggcacacctggtatccttgaggt

SEQ ID NO: 2259833 - DNA, 25 bp, Homo sapien
acacctggtatccttgaggtcttga

SEQ ID NO: 2259834 - DNA, 25 bp, Homo sapien
tgagaggtaatggtcagccctggga

SEQ ID NO: 2259835 - DNA, 25 bp, Homo sapien
ataagattactctgtgagaggtaat

SEQ ID NO: 2259836 - DNA, 25 bp, Homo sapien
attactctgtgagaggtaatggtca

SEQ ID NO: 2259837 - DNA, 25 bp, Homo sapien
aagattactctgtgagaggtaatgg

SEQ ID NO: 2259838 - DNA, 25 bp, Homo sapien
cagtggtgcgcttcagcacaaccca

SEQ ID NO: 2259839 - DNA, 25 bp, Homo sapien
agaaggccgcttggatttggttagt

SEQ ID NO: 2259840 - DNA, 25 bp, Homo sapien
tggagctccgagaaggccgcttgga

SEQ ID NO: 2259841 - DNA, 25 bp, Homo sapien
ccgagaaggccgcttggatttggtt

SEQ ID NO: 2259842 - DNA, 25 bp, Homo sapien
aagacagggaaatcagcaaggtttt

SEQ ID NO: 2259843 - DNA, 25 bp, Homo sapien
ggaggataagacagggaaatcagca

SEQ ID NO: 2259844 - DNA, 25 bp, Homo sapien
cagtggcaacaatgacaagagctgc

SEQ ID NO: 2259845 - DNA, 25 bp, Homo sapien
gcaaggttttcagtggcaacaatga

SEQ ID NO: 2259846 - DNA, 25 bp, Homo sapien
ggcaggatatcaaggattccagaca

SEQ ID NO: 2259847 - DNA, 25 bp, Homo sapien
tggcaggatatcaaggattccagac

SEQ ID NO: 2259848 - DNA, 25 bp, Homo sapien
gcaggatatcaaggattccagacat

SEQ ID NO: 2259849 - DNA, 25 bp, Homo sapien
attggcaggatatcaaggattccag

SEQ ID NO: 2259850 - DNA, 25 bp, Homo sapien
cataatacacacagatctcatcctc

SEQ ID NO: 2259851 - DNA, 25 bp, Homo sapien
tctctgactgcataatacacacaga

SEQ ID NO: 2259852 - DNA, 25 bp, Homo sapien
cacctctctgactgcataatacaca

SEQ ID NO: 2259853 - DNA, 25 bp, Homo sapien
ctacagcacctctctgactgcataa

SEQ ID NO: 2259854 - DNA, 25 bp, Homo sapien
tcccaacaggaccagtgcatgatac

SEQ ID NO: 2259855 - DNA, 25 bp, Homo sapien
cagctgagagtgtcactgtggacac

SEQ ID NO: 2259856 - DNA, 25 bp, Homo sapien
caacaggaccagtgcatgatacttc

SEQ ID NO: 2259857 - DNA, 25 bp, Homo sapien
gctgagagtgtcactgtggacacct

SEQ ID NO: 2259858 - DNA, 25 bp, Homo sapien
ttcaagcagcgagtgcccttggacc

SEQ ID NO: 2259859 - DNA, 25 bp, Homo sapien
actcatagcatatgggatcactgct

SEQ ID NO: 2259860 - DNA, 25 bp, Homo sapien
gaccacgtgctccagtactttcaag

SEQ ID NO: 2259861 - DNA, 25 bp, Homo sapien
tattccactgctgtaactatgtccc

SEQ ID NO: 2259862 - DNA, 25 bp, Homo sapien
gcaatcatgcccaagacgattatca

SEQ ID NO: 2259863 - DNA, 25 bp, Homo sapien
gcatgatctgattattatcaaccac

SEQ ID NO: 2259864 - DNA, 25 bp, Homo sapien
tttctcctcagggacgcatttgccc

SEQ ID NO: 2259865 - DNA, 25 bp, Homo sapien
ctgattattatcaaccaccaggcca

SEQ ID NO: 2259866 - DNA, 25 bp, Homo sapien
ggcaggtgacaagggtgtaggtgtt

SEQ ID NO: 2259867 - DNA, 25 bp, Homo sapien
tcataggagtcccaggcaggtgaca

SEQ ID NO: 2259868 - DNA, 25 bp, Homo sapien
cccaggcaggtgacaagggtgtagg

SEQ ID NO: 2259869 - DNA, 25 bp, Homo sapien
caggcaggtgacaagggtgtaggtg

SEQ ID NO: 2259870 - DNA, 25 bp, Homo sapien
ggggtccgcttccttcacgtcaatg

SEQ ID NO: 2259871 - DNA, 25 bp, Homo sapien
gccaaagaccagctgcaaggactcg

SEQ ID NO: 2259872 - DNA, 25 bp, Homo sapien
tcacaggaaagcagcgcttgtaatt

SEQ ID NO: 2259873 - DNA, 25 bp, Homo sapien
ccagctgcaaggactcggaggcttt

SEQ ID NO: 2259874 - DNA, 25 bp, Homo sapien
aaaatgaatcaagtcagccaccttc

SEQ ID NO: 2259875 - DNA, 25 bp, Homo sapien
tccatagagtgaaatcgatggcagt

SEQ ID NO: 2259876 - DNA, 25 bp, Homo sapien
gttgctggagcccttaatggattgc

SEQ ID NO: 2259877 - DNA, 25 bp, Homo sapien
gagtgctgctcggaacacagactct

SEQ ID NO: 2259878 - DNA, 25 bp, Homo sapien
taatggattgcctccatagagtgaa

SEQ ID NO: 2259879 - DNA, 25 bp, Homo sapien
ctgctcctcagtagtggcagcctgc

SEQ ID NO: 2259880 - DNA, 25 bp, Homo sapien
gctcctcagtagtggcagcctgcac

SEQ ID NO: 2259881 - DNA, 25 bp, Homo sapien
tgctcctcagtagtggcagcctgca

SEQ ID NO: 2259882 - DNA, 25 bp, Homo sapien
gctgactcttctgctcaagagacat

SEQ ID NO: 2259883 - DNA, 25 bp, Homo sapien
ggcccagggcctcttcttgggtgtc

SEQ ID NO: 2259884 - DNA, 25 bp, Homo sapien
cctcttcttgggtgtcaaggccttc

SEQ ID NO: 2259885 - DNA, 25 bp, Homo sapien
gggcctcttcttgggtgtcaaggcc

SEQ ID NO: 2259886 - DNA, 25 bp, Homo sapien
cgactctggtcaccgcaacaggcag

SEQ ID NO: 2259887 - DNA, 25 bp, Homo sapien
gacgactctggtcaccgcaacaggc

SEQ ID NO: 2259888 - DNA, 25 bp, Homo sapien
ctggtcaccgcaacaggcaggagtg

SEQ ID NO: 2259889 - DNA, 25 bp, Homo sapien
ctctggtcaccgcaacaggcaggag

SEQ ID NO: 2259890 - DNA, 25 bp, Homo sapien
ggagcttcctggtgatcctggtcag

SEQ ID NO: 2259891 - DNA, 25 bp, Homo sapien
tctcctttggtgctcctctagggcc

SEQ ID NO: 2259892 - DNA, 25 bp, Homo sapien
tctagggcctcctggggatcctctg

SEQ ID NO: 2259893 - DNA, 25 bp, Homo sapien
ctcctggggatcctctggagcttcc

SEQ ID NO: 2259894 - DNA, 25 bp, Homo sapien
atctggccacacgtgcccaggtcct

SEQ ID NO: 2259895 - DNA, 25 bp, Homo sapien
gatgctgaaatgcattggaattcat

SEQ ID NO: 2259896 - DNA, 25 bp, Homo sapien
aggacaggaagagatgctgaaatgc

SEQ ID NO: 2259897 - DNA, 25 bp, Homo sapien
aggaagagatgctgaaatgcattgg

SEQ ID NO: 2259898 - DNA, 25 bp, Homo sapien
gagatgctgaaatgcattggaattc

SEQ ID NO: 2259899 - DNA, 25 bp, Homo sapien
ctgacaccaatgatcccagggtaag

SEQ ID NO: 2259900 - DNA, 25 bp, Homo sapien
gtaagtcggggggactgcagcagac

SEQ ID NO: 2259901 - DNA, 25 bp, Homo sapien
agtgcagacccctcgacaaagacct

SEQ ID NO: 2259902 - DNA, 25 bp, Homo sapien
accaatgatcccagggtaagtcggg

SEQ ID NO: 2259903 - DNA, 25 bp, Homo sapien
cctcctcacagagcccgggcccatt

SEQ ID NO: 2259904 - DNA, 25 bp, Homo sapien
gagcccgggcccattcccctctgct

SEQ ID NO: 2259905 - DNA, 25 bp, Homo sapien
tcccctctgctgatctcagtcggct

SEQ ID NO: 2259906 - DNA, 25 bp, Homo sapien
acagagcccgggcccattcccctct

SEQ ID NO: 2259907 - DNA, 25 bp, Homo sapien
tgtggaaaataccacgacagggtca

SEQ ID NO: 2259908 - DNA, 25 bp, Homo sapien
tctcctcaggcccaaacagtgtctt

SEQ ID NO: 2259909 - DNA, 25 bp, Homo sapien
ttcttgtggaaaataccacgacagg

SEQ ID NO: 2259910 - DNA, 25 bp, Homo sapien
aataccacgacagggtcactgcaga

SEQ ID NO: 2259911 - DNA, 25 bp, Homo sapien
cgacttaacaagatccagggatata

SEQ ID NO: 2259912 - DNA, 25 bp, Homo sapien
caaatatgatggaagggttcccaat

SEQ ID NO: 2259913 - DNA, 25 bp, Homo sapien
cgtgtgaccttagattctgaagctc

SEQ ID NO: 2259914 - DNA, 25 bp, Homo sapien
aagacaaagatgttatgcactgtat

SEQ ID NO: 2259915 - DNA, 25 bp, Homo sapien
ttaaaacacagtgaagaatctgtct

SEQ ID NO: 2259916 - DNA, 25 bp, Homo sapien
tccacatatgagtaaaatcatgtgg

SEQ ID NO: 2259917 - DNA, 25 bp, Homo sapien
tgtggtatttgacttgccttttaaa

SEQ ID NO: 2259918 - DNA, 25 bp, Homo sapien
aacacagtgaagaatctgtcttact

SEQ ID NO: 2259919 - DNA, 25 bp, Homo sapien
cacagtgggaaggatcttggatcac

SEQ ID NO: 2259920 - DNA, 25 bp, Homo sapien
tgtagcgctagaacttgcactggcc

SEQ ID NO: 2259921 - DNA, 25 bp, Homo sapien
cagaaactcataccgtgcaggatca

SEQ ID NO: 2259922 - DNA, 25 bp, Homo sapien
gacctgtagggtgcttggactctcc

SEQ ID NO: 2259923 - DNA, 25 bp, Homo sapien
atcagcagaaacctcctctggggtg

SEQ ID NO: 2259924 - DNA, 25 bp, Homo sapien
gggaggagcaggctatctgagcact

SEQ ID NO: 2259925 - DNA, 25 bp, Homo sapien
ctaatggaagggaagcaacgaccga

SEQ ID NO: 2259926 - DNA, 25 bp, Homo sapien
gggaggatttggtgtctcatcatca

SEQ ID NO: 2259927 - DNA, 25 bp, Homo sapien
agtggatgatgaagcatcctcctcc

SEQ ID NO: 2259928 - DNA, 25 bp, Homo sapien
aagtggatgatgaagcatcctcctc

SEQ ID NO: 2259929 - DNA, 25 bp, Homo sapien
tgtgcaccctcgaggccctgtgtct

SEQ ID NO: 2259930 - DNA, 25 bp, Homo sapien
gcaccctcgaggccctgtgtctcac

SEQ ID NO: 2259931 - DNA, 25 bp, Homo sapien
ttcaggcatgcagcgctgacgcttt

SEQ ID NO: 2259932 - DNA, 25 bp, Homo sapien
gctgacgctttggagctcgaggcat

SEQ ID NO: 2259933 - DNA, 25 bp, Homo sapien
ttcttcaggcatgcagcgctgacgc

SEQ ID NO: 2259934 - DNA, 25 bp, Homo sapien
catgcagcgctgacgctttggagct

SEQ ID NO: 2259935 - DNA, 25 bp, Homo sapien
gggcaggacttgggcgatggggacc

SEQ ID NO: 2259936 - DNA, 25 bp, Homo sapien
tgtggtgtcccacagctcttgacct

SEQ ID NO: 2259937 - DNA, 25 bp, Homo sapien
ggtcttctccttcagtgctgctctg

SEQ ID NO: 2259938 - DNA, 25 bp, Homo sapien
gtgtcccacagctcttgacctcttg

SEQ ID NO: 2259939 - DNA, 25 bp, Homo sapien
ctccttcagtgctgctctgtggtgt

SEQ ID NO: 2259940 - DNA, 25 bp, Homo sapien
aagaaggaagtgagagatggctcct

SEQ ID NO: 2259941 - DNA, 25 bp, Homo sapien
gaagtgagagatggctcctcaggat

SEQ ID NO: 2259942 - DNA, 25 bp, Homo sapien
gagatggctcctcaggatgcagccg

SEQ ID NO: 2259943 - DNA, 25 bp, Homo sapien
ggatgcagccggcagaggccaaggc

SEQ ID NO: 2259944 - DNA, 25 bp, Homo sapien
ggtacacattcagggcatgcacctc

SEQ ID NO: 2259945 - DNA, 25 bp, Homo sapien
agctgatgcagtggggtccactttg

SEQ ID NO: 2259946 - DNA, 25 bp, Homo sapien
ctgatgcagtggggtccactttgtc

SEQ ID NO: 2259947 - DNA, 25 bp, Homo sapien
tggtacacattcagggcatgcacct

SEQ ID NO: 2259948 - DNA, 25 bp, Homo sapien
ctctgtgacctgaaaacactgcctt

SEQ ID NO: 2259949 - DNA, 25 bp, Homo sapien
tctgtgacctgaaaacactgcctta

SEQ ID NO: 2259950 - DNA, 25 bp, Homo sapien
ctgtgacctgaaaacactgccttag

SEQ ID NO: 2259951 - DNA, 25 bp, Homo sapien
cttgtcagatcctgcgacccactgt

SEQ ID NO: 2259952 - DNA, 25 bp, Homo sapien
ggactcttgtcagatcctgcgaccc

SEQ ID NO: 2259953 - DNA, 25 bp, Homo sapien
actcttgtcagatcctgcgacccac

SEQ ID NO: 2259954 - DNA, 25 bp, Homo sapien
tcttgtcagatcctgcgacccactg

SEQ ID NO: 2259955 - DNA, 25 bp, Homo sapien
gaggggttccctgtgttgacttgag

SEQ ID NO: 2259956 - DNA, 25 bp, Homo sapien
ctctgagagcaaggttctcacctcc

SEQ ID NO: 2259957 - DNA, 25 bp, Homo sapien
aagaggggttccctgtgttgacttg

SEQ ID NO: 2259958 - DNA, 25 bp, Homo sapien
ccctctgagagcaaggttctcacct

SEQ ID NO: 2259959 - DNA, 25 bp, Homo sapien
tgaccaagtgtggaaccctgtaata

SEQ ID NO: 2259960 - DNA, 25 bp, Homo sapien
cctgtaataacttcttagcaaccct

SEQ ID NO: 2259961 - DNA, 25 bp, Homo sapien
tcttagcaaccctcagaccaaggtc

SEQ ID NO: 2259962 - DNA, 25 bp, Homo sapien
tccctctgttgaccaagtgtggaac

SEQ ID NO: 2259963 - DNA, 25 bp, Homo sapien
tgtccctcagaacgagaacctcgct

SEQ ID NO: 2259964 - DNA, 25 bp, Homo sapien
aagcctgtccctcagaacgagaacc

SEQ ID NO: 2259965 - DNA, 25 bp, Homo sapien
gatctcaagcctgtccctcagaacg

SEQ ID NO: 2259966 - DNA, 25 bp, Homo sapien
tgggcccgctctcttcagccgatct

SEQ ID NO: 2259967 - DNA, 25 bp, Homo sapien
catgggtgcggttcccaggccagat

SEQ ID NO: 2259968 - DNA, 25 bp, Homo sapien
ccagatggtccctggggagctgcaa

SEQ ID NO: 2259969 - DNA, 25 bp, Homo sapien
cccttgcagagcatgggtgcggttc

SEQ ID NO: 2259970 - DNA, 25 bp, Homo sapien
gctgcaacacccgtgattgtaatga

SEQ ID NO: 2259971 - DNA, 25 bp, Homo sapien
tcttatttgccgtctatgcaggctg

SEQ ID NO: 2259972 - DNA, 25 bp, Homo sapien
gtcctcttatttgccgtctatgcag

SEQ ID NO: 2259973 - DNA, 25 bp, Homo sapien
tttgccgtctatgcaggctgcggac

SEQ ID NO: 2259974 - DNA, 25 bp, Homo sapien
tcgtcctcttatttgccgtctatgc

SEQ ID NO: 2259975 - DNA, 25 bp, Homo sapien
caaggtccaattcgaaattctgcag

SEQ ID NO: 2259976 - DNA, 25 bp, Homo sapien
ttctcccctccaggattgattctgg

SEQ ID NO: 2259977 - DNA, 25 bp, Homo sapien
tccgcaaatgcactgttgtcctcca

SEQ ID NO: 2259978 - DNA, 25 bp, Homo sapien
cttagggttctatcatgttttgctg

SEQ ID NO: 2259979 - DNA, 25 bp, Homo sapien
caagttccactagtgacccagaagg

SEQ ID NO: 2259980 - DNA, 25 bp, Homo sapien
gactagtgcaggtattcagagccaa

SEQ ID NO: 2259981 - DNA, 25 bp, Homo sapien
agaaggcccgctgagattgtgctga

SEQ ID NO: 2259982 - DNA, 25 bp, Homo sapien
cagagaggcaaagatcaggcttcca

SEQ ID NO: 2259983 - DNA, 25 bp, Homo sapien
tggcacgcaggatcacatggcctag

SEQ ID NO: 2259984 - DNA, 25 bp, Homo sapien
tgctcagttggctacaagggtgcca

SEQ ID NO: 2259985 - DNA, 25 bp, Homo sapien
cagccaaggcttccactatggagag

SEQ ID NO: 2259986 - DNA, 25 bp, Homo sapien
tattttggccatacatggtagacgg

SEQ ID NO: 2259987 - DNA, 25 bp, Homo sapien
tgcccttgatagctgactcccggtt

SEQ ID NO: 2259988 - DNA, 25 bp, Homo sapien
tgtttgcggatcatgcccttgatag

SEQ ID NO: 2259989 - DNA, 25 bp, Homo sapien
tttgcggatcatgcccttgatagct

SEQ ID NO: 2259990 - DNA, 25 bp, Homo sapien
ctgactcccggttgacatatgtggc

SEQ ID NO: 2259991 - DNA, 25 bp, Homo sapien
agattgaatatggcaaagagcacag

SEQ ID NO: 2259992 - DNA, 25 bp, Homo sapien
agcacaggaaagatgatgcgggaaa

SEQ ID NO: 2259993 - DNA, 25 bp, Homo sapien
gcgggaaattttgtcaaccttgctg

SEQ ID NO: 2259994 - DNA, 25 bp, Homo sapien
gatgatgcgggaaattttgtcaacc

SEQ ID NO: 2259995 - DNA, 25 bp, Homo sapien
tccccacgatgttgaaggtagtgct

SEQ ID NO: 2259996 - DNA, 25 bp, Homo sapien
ttgtaggtcttggtctcagtcgggc

SEQ ID NO: 2259997 - DNA, 25 bp, Homo sapien
tgatgggataggtggtccccacgat

SEQ ID NO: 2259998 - DNA, 25 bp, Homo sapien
gagatggtggaaaattcagtgtcct

SEQ ID NO: 2259999 - DNA, 25 bp, Homo sapien
tgtgtcaacccccttgcaggtgctc

SEQ ID NO: 2260000 - DNA, 25 bp, Homo sapien
ctgtgtcaacccccttgcaggtgct

SEQ ID NO: 2260001 - DNA, 25 bp, Homo sapien
aattccagtttatgatgtcagatga

SEQ ID NO: 2260002 - DNA, 25 bp, Homo sapien
ataaagtgaactggttgtagaaatc

SEQ ID NO: 2260003 - DNA, 25 bp, Homo sapien
ccagtttatgatgtcagatgagtca

SEQ ID NO: 2260004 - DNA, 25 bp, Homo sapien
aataaagtgaactggttgtagaaat

SEQ ID NO: 2260005 - DNA, 25 bp, Homo sapien
tatgtcagagtaaggatacctttgt

SEQ ID NO: 2260006 - DNA, 25 bp, Homo sapien
tgtcagagtaaggatacctttgttc

SEQ ID NO: 2260007 - DNA, 25 bp, Homo sapien
ttaatatgtcagagtaaggatacct

SEQ ID NO: 2260008 - DNA, 25 bp, Homo sapien
cagagtaaggatacctttgttcact

SEQ ID NO: 2260009 - DNA, 25 bp, Homo sapien
gatagtgtcccaaaagtgtgtggca

SEQ ID NO: 2260010 - DNA, 25 bp, Homo sapien
tctagatttcaggtcaaggatagtg

SEQ ID NO: 2260011 - DNA, 25 bp, Homo sapien
cccaagaagtaagggctcggaagtg

SEQ ID NO: 2260012 - DNA, 25 bp, Homo sapien
gaaagtgaagcgcagtgaaaatcag

SEQ ID NO: 2260013 - DNA, 25 bp, Homo sapien
tgccaggttgccaagaagcactcca

SEQ ID NO: 2260014 - DNA, 25 bp, Homo sapien
tgaagatagagtccaagcctttgag

SEQ ID NO: 2260015 - DNA, 25 bp, Homo sapien
agttgagaactggattgatgacccc

SEQ ID NO: 2260016 - DNA, 25 bp, Homo sapien
caatgggtgccccttgagtctagca

SEQ ID NO: 2260017 - DNA, 25 bp, Homo sapien
tacaaaggcataacagacggctatg

SEQ ID NO: 2260018 - DNA, 25 bp, Homo sapien
gccgtcgcatatgccactttaggta

SEQ ID NO: 2260019 - DNA, 25 bp, Homo sapien
taaggaatttctggcactgatactc

SEQ ID NO: 2260020 - DNA, 25 bp, Homo sapien
agcccaactccgcttggtgaaatag

SEQ ID NO: 2260021 - DNA, 25 bp, Homo sapien
tgacatgtgtctcttataccaaacc

SEQ ID NO: 2260022 - DNA, 25 bp, Homo sapien
gtgatgacatgtgtctcttatacca

SEQ ID NO: 2260023 - DNA, 25 bp, Homo sapien
gacatgtgtctcttataccaaacca

SEQ ID NO: 2260024 - DNA, 25 bp, Homo sapien
gatgacatgtgtctcttataccaaa

SEQ ID NO: 2260025 - DNA, 25 bp, Homo sapien
catggcaagtaggtctggatcacaa

SEQ ID NO: 2260026 - DNA, 25 bp, Homo sapien
ttgagccagaacgacacttgtgaca

SEQ ID NO: 2260027 - DNA, 25 bp, Homo sapien
ggaagtgggttgtcatgacgacata

SEQ ID NO: 2260028 - DNA, 25 bp, Homo sapien
gactgtacgggcaggaacagactct

SEQ ID NO: 2260029 - DNA, 25 bp, Homo sapien
aagggaggtccctgctggcaatgcc

SEQ ID NO: 2260030 - DNA, 25 bp, Homo sapien
tggcaatgcccagagaggacacaga

SEQ ID NO: 2260031 - DNA, 25 bp, Homo sapien
caatgcccagagaggacacagacct

SEQ ID NO: 2260032 - DNA, 25 bp, Homo sapien
cccagagaggacacagacctggagg

SEQ ID NO: 2260033 - DNA, 25 bp, Homo sapien
aaccacttcagctgttgtataggca

SEQ ID NO: 2260034 - DNA, 25 bp, Homo sapien
gattatctctgtcccaacaacatgg

SEQ ID NO: 2260035 - DNA, 25 bp, Homo sapien
catggcccaaaaggtcatactggtt

SEQ ID NO: 2260036 - DNA, 25 bp, Homo sapien
gatttgttctttccgagagtccaag

SEQ ID NO: 2260037 - DNA, 25 bp, Homo sapien
cactttttgtttaaagatagtgcca

SEQ ID NO: 2260038 - DNA, 25 bp, Homo sapien
ctttgctattcagatggttgtaaca

SEQ ID NO: 2260039 - DNA, 25 bp, Homo sapien
tcagatggttgtaacactttttgtt

SEQ ID NO: 2260040 - DNA, 25 bp, Homo sapien
actttttgtttaaagatagtgccat

SEQ ID NO: 2260041 - DNA, 25 bp, Homo sapien
aaatcttccaaatgcatgggacact

SEQ ID NO: 2260042 - DNA, 25 bp, Homo sapien
gcttccaaacttcagtgggcaggca

SEQ ID NO: 2260043 - DNA, 25 bp, Homo sapien
gggacactcagcatgaattgttaac

SEQ ID NO: 2260044 - DNA, 25 bp, Homo sapien
tgggcaggcatgcacatccatggga

SEQ ID NO: 2260045 - DNA, 25 bp, Homo sapien
tggctatatttcctactccctttat

SEQ ID NO: 2260046 - DNA, 25 bp, Homo sapien
atatttcctactccctttatcactg

SEQ ID NO: 2260047 - DNA, 25 bp, Homo sapien
tccctttatcactgccatgttccaa

SEQ ID NO: 2260048 - DNA, 25 bp, Homo sapien
tgttccaaaatcttattactcctct

SEQ ID NO: 2260049 - DNA, 25 bp, Homo sapien
taggaagctgtccttctgtagtttt

SEQ ID NO: 2260050 - DNA, 25 bp, Homo sapien
tagtaggaagctgtccttctgtagt

SEQ ID NO: 2260051 - DNA, 25 bp, Homo sapien
attttagtaggaagctgtccttctg

SEQ ID NO: 2260052 - DNA, 25 bp, Homo sapien
tttagtaggaagctgtccttctgta

SEQ ID NO: 2260053 - DNA, 25 bp, Homo sapien
ctgtgtaggaaaccgatggcttcat

SEQ ID NO: 2260054 - DNA, 25 bp, Homo sapien
taggaaaccgatggcttcatcatgc

SEQ ID NO: 2260055 - DNA, 25 bp, Homo sapien
ctactgtgtaggaaaccgatggctt

SEQ ID NO: 2260056 - DNA, 25 bp, Homo sapien
gaaaccgatggcttcatcatgcttc

SEQ ID NO: 2260057 - DNA, 25 bp, Homo sapien
cttactagccaggagattgttcagt

SEQ ID NO: 2260058 - DNA, 25 bp, Homo sapien
tgtccggtgtccagatcttactagc

SEQ ID NO: 2260059 - DNA, 25 bp, Homo sapien
cttgccattgtggaagaaggtgtcc

SEQ ID NO: 2260060 - DNA, 25 bp, Homo sapien
tagaggagggttccgttgtccacca

SEQ ID NO: 2260061 - DNA, 25 bp, Homo sapien
tgccgaaaaaatacatcaatagtgt

SEQ ID NO: 2260062 - DNA, 25 bp, Homo sapien
ctgccgaaaaaatacatcaatagtg

SEQ ID NO: 2260063 - DNA, 25 bp, Homo sapien
ccgaaaaaatacatcaatagtgtac

SEQ ID NO: 2260064 - DNA, 25 bp, Homo sapien
gaaaaaatacatcaatagtgtactc

SEQ ID NO: 2260065 - DNA, 25 bp, Homo sapien
agggccaaaactggtcacgtagatg

SEQ ID NO: 2260066 - DNA, 25 bp, Homo sapien
cagggccaaaactggtcacgtagat

SEQ ID NO: 2260067 - DNA, 25 bp, Homo sapien
gggccaaaactggtcacgtagatgt

SEQ ID NO: 2260068 - DNA, 25 bp, Homo sapien
acagggccaaaactggtcacgtaga

SEQ ID NO: 2260069 - DNA, 25 bp, Homo sapien
aggaaaacacgttcgaaatgaatgg

SEQ ID NO: 2260070 - DNA, 25 bp, Homo sapien
tattataactctgtttcatgaggta

SEQ ID NO: 2260071 - DNA, 25 bp, Homo sapien
gaatggaaagatagatgttctcagc

SEQ ID NO: 2260072 - DNA, 25 bp, Homo sapien
tgaagtgtcagccaaagagtttaaa

SEQ ID NO: 2260073 - DNA, 25 bp, Homo sapien
gatgaggaaccctcctctaagttga

SEQ ID NO: 2260074 - DNA, 25 bp, Homo sapien
gaaccctcctctaagttgatataca

SEQ ID NO: 2260075 - DNA, 25 bp, Homo sapien
tcggatgaggaaccctcctctaagt

SEQ ID NO: 2260076 - DNA, 25 bp, Homo sapien
ttttcggatgaggaaccctcctcta

SEQ ID NO: 2260077 - DNA, 25 bp, Homo sapien
attaatacaaccaacagacacatga

SEQ ID NO: 2260078 - DNA, 25 bp, Homo sapien
aatacattaatacaaccaacagaca

SEQ ID NO: 2260079 - DNA, 25 bp, Homo sapien
tacattaatacaaccaacagacaca

SEQ ID NO: 2260080 - DNA, 25 bp, Homo sapien
cattaatacaaccaacagacacatg

SEQ ID NO: 2260081 - DNA, 25 bp, Homo sapien
acagcttcaagaggaaatccattgg

SEQ ID NO: 2260082 - DNA, 25 bp, Homo sapien
tggctacaagagacaagtcagagtc

SEQ ID NO: 2260083 - DNA, 25 bp, Homo sapien
ttaaacagcttcaagaggaaatcca

SEQ ID NO: 2260084 - DNA, 25 bp, Homo sapien
ccattggctacaagagacaagtcag

SEQ ID NO: 2260085 - DNA, 25 bp, Homo sapien
ccaagcccaggtcgcagccggttgt

SEQ ID NO: 2260086 - DNA, 25 bp, Homo sapien
ttgtcatagccgtccagaagacgat

SEQ ID NO: 2260087 - DNA, 25 bp, Homo sapien
tgtcagtgctgtcatcaggaatatc

SEQ ID NO: 2260088 - DNA, 25 bp, Homo sapien
gaagacgatccaagattctggtgaa

SEQ ID NO: 2260089 - DNA, 25 bp, Homo sapien
ggatggcatttttcctaaaccacat

SEQ ID NO: 2260090 - DNA, 25 bp, Homo sapien
ttcattaaaaggatggcatttttcc

SEQ ID NO: 2260091 - DNA, 25 bp, Homo sapien
cattaaaaggatggcatttttccta

SEQ ID NO: 2260092 - DNA, 25 bp, Homo sapien
aggatggcatttttcctaaaccaca

SEQ ID NO: 2260093 - DNA, 25 bp, Homo sapien
ctgcttcacaaagtccccgggttct

SEQ ID NO: 2260094 - DNA, 25 bp, Homo sapien
cttgaccagtggttccagggagaat

SEQ ID NO: 2260095 - DNA, 25 bp, Homo sapien
tcaggaaaagaatcccaaggctggt

SEQ ID NO: 2260096 - DNA, 25 bp, Homo sapien
tgaccagtggttccagggagaatat

SEQ ID NO: 2260097 - DNA, 25 bp, Homo sapien
cagggagaatattaatcaggaaaag

SEQ ID NO: 2260098 - DNA, 25 bp, Homo sapien
acagtgacttgtttgtgtgattatc

SEQ ID NO: 2260099 - DNA, 25 bp, Homo sapien
taacagtgacttgtttgtgtgatta

SEQ ID NO: 2260100 - DNA, 25 bp, Homo sapien
agtgacttgtttgtgtgattatcat

SEQ ID NO: 2260101 - DNA, 25 bp, Homo sapien
gtaacagtgacttgtttgtgtgatt

SEQ ID NO: 2260102 - DNA, 25 bp, Homo sapien
cttcttaggcacaaacttggagaga

SEQ ID NO: 2260103 - DNA, 25 bp, Homo sapien
ttcttaggcacaaacttggagagac

SEQ ID NO: 2260104 - DNA, 25 bp, Homo sapien
tcaaagccatccctatccgatccat

SEQ ID NO: 2260105 - DNA, 25 bp, Homo sapien
atatcaaagccatccctatccgatc

SEQ ID NO: 2260106 - DNA, 25 bp, Homo sapien
aaagccatccctatccgatccatat

SEQ ID NO: 2260107 - DNA, 25 bp, Homo sapien
tatcaaagccatccctatccgatcc

SEQ ID NO: 2260108 - DNA, 25 bp, Homo sapien
gctcaaacatccgtggtgcatgagc

SEQ ID NO: 2260109 - DNA, 25 bp, Homo sapien
tcaaacatccgtggtgcatgagcag

SEQ ID NO: 2260110 - DNA, 25 bp, Homo sapien
ctcaaacatccgtggtgcatgagca

SEQ ID NO: 2260111 - DNA, 25 bp, Homo sapien
caaacatccgtggtgcatgagcagc

SEQ ID NO: 2260112 - DNA, 25 bp, Homo sapien
caaacatccgtggtgcataagcagc

SEQ ID NO: 2260113 - DNA, 25 bp, Homo sapien
gctcaaacatccgtggtgcataagc

SEQ ID NO: 2260114 - DNA, 25 bp, Homo sapien
tcaaacatccgtggtgcataagcag

SEQ ID NO: 2260115 - DNA, 25 bp, Homo sapien
aaacatccgtggtgcataagcagcc

SEQ ID NO: 2260116 - DNA, 25 bp, Homo sapien
ttgtagccttcacataaggttcatt

SEQ ID NO: 2260117 - DNA, 25 bp, Homo sapien
tgtagccttcacataaggttcattg

SEQ ID NO: 2260118 - DNA, 25 bp, Homo sapien
gtagccttcacataaggttcattgt

SEQ ID NO: 2260119 - DNA, 25 bp, Homo sapien
agccttcacataaggttcattgttc

SEQ ID NO: 2260120 - DNA, 25 bp, Homo sapien
gggaaagaggctgcaaggtaccctc

SEQ ID NO: 2260121 - DNA, 25 bp, Homo sapien
aaagaggctgcaaggtaccctcctt

SEQ ID NO: 2260122 - DNA, 25 bp, Homo sapien
agaggctgcaaggtaccctccttct

SEQ ID NO: 2260123 - DNA, 25 bp, Homo sapien
gaaagaggctgcaaggtaccctcct

SEQ ID NO: 2260124 - DNA, 25 bp, Homo sapien
actggggaacccaggatagcatcac

SEQ ID NO: 2260125 - DNA, 25 bp, Homo sapien
cctgctcagatgccgcctctgggct

SEQ ID NO: 2260126 - DNA, 25 bp, Homo sapien
ctgctcagatgccgcctctgggctt

SEQ ID NO: 2260127 - DNA, 25 bp, Homo sapien
ggaacccaggatagcatcacagctg

SEQ ID NO: 2260128 - DNA, 25 bp, Homo sapien
tctacagtctgagcggaaaggagag

SEQ ID NO: 2260129 - DNA, 25 bp, Homo sapien
gttggaggttgagccctgacagagc

SEQ ID NO: 2260130 - DNA, 25 bp, Homo sapien
tctctggtttgctcgctagcttgcg

SEQ ID NO: 2260131 - DNA, 25 bp, Homo sapien
tgaactgaaacaagttggaggttga

SEQ ID NO: 2260132 - DNA, 25 bp, Homo sapien
tagctgatgtgtgatgcttacttgc

SEQ ID NO: 2260133 - DNA, 25 bp, Homo sapien
ggacaataatgagctagaaaaatgt

SEQ ID NO: 2260134 - DNA, 25 bp, Homo sapien
tatgggcgtgccttctaacccaggc

SEQ ID NO: 2260135 - DNA, 25 bp, Homo sapien
ttgctgctccgagactgaagagtga

SEQ ID NO: 2260136 - DNA, 25 bp, Homo sapien
taactcccctagacttgactcttgg

SEQ ID NO: 2260137 - DNA, 25 bp, Homo sapien
gttttatgtataacaaggctcccag

SEQ ID NO: 2260138 - DNA, 25 bp, Homo sapien
caatcagcttggacatatagtgcct

SEQ ID NO: 2260139 - DNA, 25 bp, Homo sapien
tctctgactagtttgcctggctgcc

SEQ ID NO: 2260140 - DNA, 25 bp, Homo sapien
aatcaagatttgtgatgtgggcatc

SEQ ID NO: 2260141 - DNA, 25 bp, Homo sapien
caagatttgtgatgtgggcatccaa

SEQ ID NO: 2260142 - DNA, 25 bp, Homo sapien
ttaatcaagatttgtgatgtgggca

SEQ ID NO: 2260143 - DNA, 25 bp, Homo sapien
gatttgtgatgtgggcatccaaagg

SEQ ID NO: 2260144 - DNA, 25 bp, Homo sapien
ccctcctcttgcgttctgccttgtg

SEQ ID NO: 2260145 - DNA, 25 bp, Homo sapien
gtccctcctcttgcgttctgccttg

SEQ ID NO: 2260146 - DNA, 25 bp, Homo sapien
cagtccctcctcttgcgttctgcct

SEQ ID NO: 2260147 - DNA, 25 bp, Homo sapien
cctcctcttgcgttctgccttgtgt

SEQ ID NO: 2260148 - DNA, 25 bp, Homo sapien
tatcttgggctaagacttcactgtc

SEQ ID NO: 2260149 - DNA, 25 bp, Homo sapien
tgtcttaattgctatagccctaaac

SEQ ID NO: 2260150 - DNA, 25 bp, Homo sapien
gcagagcaaatttcctcaccacttt

SEQ ID NO: 2260151 - DNA, 25 bp, Homo sapien
ggcctgaaaattaagggatcattca

SEQ ID NO: 2260152 - DNA, 25 bp, Homo sapien
cccttccctacattcatcccagaat

SEQ ID NO: 2260153 - DNA, 25 bp, Homo sapien
cttctttgtagataggatctgtgac

SEQ ID NO: 2260154 - DNA, 25 bp, Homo sapien
ttgtagataggatctgtgacttttc

SEQ ID NO: 2260155 - DNA, 25 bp, Homo sapien
tctttgtagataggatctgtgactt

SEQ ID NO: 2260156 - DNA, 25 bp, Homo sapien
agaatcaaaagcttccagcaccatg

SEQ ID NO: 2260157 - DNA, 25 bp, Homo sapien
ctgtatcttgccctgtgctccattg

SEQ ID NO: 2260158 - DNA, 25 bp, Homo sapien
tccattgtgaaccagcaccgtgtcc

SEQ ID NO: 2260159 - DNA, 25 bp, Homo sapien
caccgtgtccacatcgatatccgag

SEQ ID NO: 2260160 - DNA, 25 bp, Homo sapien
gcagagtataaacgctgaagctgct

SEQ ID NO: 2260161 - DNA, 25 bp, Homo sapien
catcgcctaaccacttgagaaacac

SEQ ID NO: 2260162 - DNA, 25 bp, Homo sapien
ccactactatagttacagcatttct

SEQ ID NO: 2260163 - DNA, 25 bp, Homo sapien
agacacaaatcttgatccctttcat

SEQ ID NO: 2260164 - DNA, 25 bp, Homo sapien
atcttgatccctttcatcgcctaac

SEQ ID NO: 2260165 - DNA, 25 bp, Homo sapien
ggatgcacagaagttagccatcacc

SEQ ID NO: 2260166 - DNA, 25 bp, Homo sapien
gggcagggatgcacagaagttagcc

SEQ ID NO: 2260167 - DNA, 25 bp, Homo sapien
gcagggatgcacagaagttagccat

SEQ ID NO: 2260168 - DNA, 25 bp, Homo sapien
cagggatgcacagaagttagccatc

SEQ ID NO: 2260169 - DNA, 25 bp, Homo sapien
cataccccaggacagtggaagccat

SEQ ID NO: 2260170 - DNA, 25 bp, Homo sapien
acatagacctcttcataccccagga

SEQ ID NO: 2260171 - DNA, 25 bp, Homo sapien
gccttcccaccgcttttcacataga

SEQ ID NO: 2260172 - DNA, 25 bp, Homo sapien
gacctcttcataccccaggacagtg

SEQ ID NO: 2260173 - DNA, 25 bp, Homo sapien
aatccagacttcaggccggtggggt

SEQ ID NO: 2260174 - DNA, 25 bp, Homo sapien
cgttgctagcgtccatgagagagac

SEQ ID NO: 2260175 - DNA, 25 bp, Homo sapien
ggagagccgttgctagcgtccatga

SEQ ID NO: 2260176 - DNA, 25 bp, Homo sapien
tgtcactccgagctctaaatccaga

SEQ ID NO: 2260177 - DNA, 25 bp, Homo sapien
ttcaccagcgtcccagatgtgggaa

SEQ ID NO: 2260178 - DNA, 25 bp, Homo sapien
tcaccagcgtcccagatgtgggaac

SEQ ID NO: 2260179 - DNA, 25 bp, Homo sapien
cttcaccagcgtcccagatgtggga

SEQ ID NO: 2260180 - DNA, 25 bp, Homo sapien
caccagcgtcccagatgtgggaact

SEQ ID NO: 2260181 - DNA, 25 bp, Homo sapien
ttgcccttgtggtcccgctatggct

SEQ ID NO: 2260182 - DNA, 25 bp, Homo sapien
cccgctatggctcattttgattgag

SEQ ID NO: 2260183 - DNA, 25 bp, Homo sapien
gtggtcccgctatggctcattttga

SEQ ID NO: 2260184 - DNA, 25 bp, Homo sapien
cttgtggtcccgctatggctcattt

SEQ ID NO: 2260185 - DNA, 25 bp, Homo sapien
cttttgttcctggaacttccttgat

SEQ ID NO: 2260186 - DNA, 25 bp, Homo sapien
tcctggaacttccttgatgggtccc

SEQ ID NO: 2260187 - DNA, 25 bp, Homo sapien
gttcctggaacttccttgatgggtc

SEQ ID NO: 2260188 - DNA, 25 bp, Homo sapien
ctggaacttccttgatgggtccctt

SEQ ID NO: 2260189 - DNA, 25 bp, Homo sapien
aaggaaacagggagatcaaagaagg

SEQ ID NO: 2260190 - DNA, 25 bp, Homo sapien
gagatcaaagaagggcactggtttg

SEQ ID NO: 2260191 - DNA, 25 bp, Homo sapien
caggggcttcatagagaaatggtgc

SEQ ID NO: 2260192 - DNA, 25 bp, Homo sapien
tgagaacaggggcttcatagagaaa

SEQ ID NO: 2260193 - DNA, 25 bp, Homo sapien
ttctgggccagggttgagaggatgc

SEQ ID NO: 2260194 - DNA, 25 bp, Homo sapien
tttgatagggcttctgggccagggt

SEQ ID NO: 2260195 - DNA, 25 bp, Homo sapien
gcttctgggccagggttgagaggat

SEQ ID NO: 2260196 - DNA, 25 bp, Homo sapien
agggcttctgggccagggttgagag

SEQ ID NO: 2260197 - DNA, 25 bp, Homo sapien
tgggtggttgttggacaatgggctg

SEQ ID NO: 2260198 - DNA, 25 bp, Homo sapien
ttgttggacaatgggctggaggctc

SEQ ID NO: 2260199 - DNA, 25 bp, Homo sapien
gttggtgggtggttgttggacaatg

SEQ ID NO: 2260200 - DNA, 25 bp, Homo sapien
caatgggctggaggctcgtggtttc

SEQ ID NO: 2260201 - DNA, 25 bp, Homo sapien
gaccagcgtctctcaacagtctact

SEQ ID NO: 2260202 - DNA, 25 bp, Homo sapien
accagaccagcgtctctcaacagtc

SEQ ID NO: 2260203 - DNA, 25 bp, Homo sapien
ttcaccagaccagcgtctctcaaca

SEQ ID NO: 2260204 - DNA, 25 bp, Homo sapien
cagaccagcgtctctcaacagtcta

SEQ ID NO: 2260205 - DNA, 25 bp, Homo sapien
ttatgttagtcttgtggtagaattc

SEQ ID NO: 2260206 - DNA, 25 bp, Homo sapien
gcgcatttttatgttagtcttgtgg

SEQ ID NO: 2260207 - DNA, 25 bp, Homo sapien
tgttagtcttgtggtagaattcctt

SEQ ID NO: 2260208 - DNA, 25 bp, Homo sapien
catttttatgttagtcttgtggtag

SEQ ID NO: 2260209 - DNA, 25 bp, Homo sapien
tatggaagttaaactgctttactta

SEQ ID NO: 2260210 - DNA, 25 bp, Homo sapien
cacagctgagcagtatagcctagac

SEQ ID NO: 2260211 - DNA, 25 bp, Homo sapien
gcagtatagcctagacaagttgaca

SEQ ID NO: 2260212 - DNA, 25 bp, Homo sapien
gactactgtttgaccacacagctga

SEQ ID NO: 2260213 - DNA, 25 bp, Homo sapien
taatctgtccattcttggcctttcc

SEQ ID NO: 2260214 - DNA, 25 bp, Homo sapien
attaatctgtccattcttggccttt

SEQ ID NO: 2260215 - DNA, 25 bp, Homo sapien
ttaatctgtccattcttggcctttc

SEQ ID NO: 2260216 - DNA, 25 bp, Homo sapien
acaagcaaatttgggctgctgtgct

SEQ ID NO: 2260217 - DNA, 25 bp, Homo sapien
tacaagcaaatttgggctgctgtgc

SEQ ID NO: 2260218 - DNA, 25 bp, Homo sapien
ctgtgctctgcttcccaaatcaacc

SEQ ID NO: 2260219 - DNA, 25 bp, Homo sapien
ctgctgtgctctgcttcccaaatca

SEQ ID NO: 2260220 - DNA, 25 bp, Homo sapien
agatccccatccgggcagaatccgg

SEQ ID NO: 2260221 - DNA, 25 bp, Homo sapien
atccccatccgggcagaatccggtt

SEQ ID NO: 2260222 - DNA, 25 bp, Homo sapien
atccagatccccatccgggcagaat

SEQ ID NO: 2260223 - DNA, 25 bp, Homo sapien
ccatccagatccccatccgggcaga

SEQ ID NO: 2260224 - DNA, 25 bp, Homo sapien
cctattgagctgtatgttctctgat

SEQ ID NO: 2260225 - DNA, 25 bp, Homo sapien
ccatgtcctattgagctgtatgttc

SEQ ID NO: 2260226 - DNA, 25 bp, Homo sapien
tgagctgtatgttctctgataagtc

SEQ ID NO: 2260227 - DNA, 25 bp, Homo sapien
ctaattattccatgtcctattgagc

SEQ ID NO: 2260228 - DNA, 25 bp, Homo sapien
ccaggaagccatatgatgtcaaaaa

SEQ ID NO: 2260229 - DNA, 25 bp, Homo sapien
gctgaggagtctgattcgccatatt

SEQ ID NO: 2260230 - DNA, 25 bp, Homo sapien
tctcatagtagaagtcctctggctg

SEQ ID NO: 2260231 - DNA, 25 bp, Homo sapien
tgacgcttagacacttggttaccac

SEQ ID NO: 2260232 - DNA, 25 bp, Homo sapien
tgacactggaaaacgctggagaact

SEQ ID NO: 2260233 - DNA, 25 bp, Homo sapien
tacctcgacaggtgtacaggcgtgt

SEQ ID NO: 2260234 - DNA, 25 bp, Homo sapien
aaaatactggccttcagcgtgccta

SEQ ID NO: 2260235 - DNA, 25 bp, Homo sapien
tgaaatcggactttcacagggcgtc

SEQ ID NO: 2260236 - DNA, 25 bp, Homo sapien
aggagcagaagcattgtttgtcaca

SEQ ID NO: 2260237 - DNA, 25 bp, Homo sapien
ctggacacatgggaacagtaaagtc

SEQ ID NO: 2260238 - DNA, 25 bp, Homo sapien
gccagtgtgccatttccatgctttc

SEQ ID NO: 2260239 - DNA, 25 bp, Homo sapien
gctttctctccgctttcaacagcaa

SEQ ID NO: 2260240 - DNA, 25 bp, Homo sapien
gaaccctccagtggtcctttgcacc

SEQ ID NO: 2260241 - DNA, 25 bp, Homo sapien
ttgcaccttcgccagcatcccagat

SEQ ID NO: 2260242 - DNA, 25 bp, Homo sapien
tggtcctttgcaccttcgccagcat

SEQ ID NO: 2260243 - DNA, 25 bp, Homo sapien
caccttcgccagcatcccagatctg

SEQ ID NO: 2260244 - DNA, 25 bp, Homo sapien
ctgtagtgaccctctcgttggtagt

SEQ ID NO: 2260245 - DNA, 25 bp, Homo sapien
tctgtagtgaccctctcgttggtag

SEQ ID NO: 2260246 - DNA, 25 bp, Homo sapien
aggcatctgtagtgaccctctcgtt

SEQ ID NO: 2260247 - DNA, 25 bp, Homo sapien
gcatctgtagtgaccctctcgttgg

SEQ ID NO: 2260248 - DNA, 25 bp, Homo sapien
caccactccagtggtcgtgtgcact

SEQ ID NO: 2260249 - DNA, 25 bp, Homo sapien
actccagtggtcgtgtgcacttttg

SEQ ID NO: 2260250 - DNA, 25 bp, Homo sapien
tccaccactccagtggtcgtgtgca

SEQ ID NO: 2260251 - DNA, 25 bp, Homo sapien
ccactccagtggtcgtgtgcacttt

SEQ ID NO: 2260252 - DNA, 25 bp, Homo sapien
ctgcctttgttaacagggaaaatgg

SEQ ID NO: 2260253 - DNA, 25 bp, Homo sapien
ctttgttaacagggaaaatggtcat

SEQ ID NO: 2260254 - DNA, 25 bp, Homo sapien
ttttgattgagttcttttggctggt

SEQ ID NO: 2260255 - DNA, 25 bp, Homo sapien
tcaggtagccttgaggtttctggcc

SEQ ID NO: 2260256 - DNA, 25 bp, Homo sapien
cttttggctggtcggagtggctgga

SEQ ID NO: 2260257 - DNA, 25 bp, Homo sapien
ccttgtggtcctactgtgtctcatt

SEQ ID NO: 2260258 - DNA, 25 bp, Homo sapien
ctggaacttccttgacgggtccctg

SEQ ID NO: 2260259 - DNA, 25 bp, Homo sapien
ttagggagagccttttgttcctgga

SEQ ID NO: 2260260 - DNA, 25 bp, Homo sapien
tgttcccttccgggttgtcttggca

SEQ ID NO: 2260261 - DNA, 25 bp, Homo sapien
gagagccttttgttcctggaacttc

SEQ ID NO: 2260262 - DNA, 25 bp, Homo sapien
caatgggctggaggctcgtggtttc

SEQ ID NO: 2260263 - DNA, 25 bp, Homo sapien
tgggtggttgttggacaatgggctg

SEQ ID NO: 2260264 - DNA, 25 bp, Homo sapien
ttgttggacaatgggctggaggctc

SEQ ID NO: 2260265 - DNA, 25 bp, Homo sapien
gttggtgggtggttgttggacaatg

SEQ ID NO: 2260266 - DNA, 25 bp, Homo sapien
ctctccatgcctcccccaggacagt

SEQ ID NO: 2260267 - DNA, 25 bp, Homo sapien
cagtgtctctcaacagtctactcca

SEQ ID NO: 2260268 - DNA, 25 bp, Homo sapien
ccacctggtctctccatgcctcccc

SEQ ID NO: 2260269 - DNA, 25 bp, Homo sapien
tcaccagaccagtgtctctcaacag

SEQ ID NO: 2260270 - DNA, 25 bp, Homo sapien
taatttgtcagttcttggcctttcc

SEQ ID NO: 2260271 - DNA, 25 bp, Homo sapien
aatttgtcagttcttggcctttcct

SEQ ID NO: 2260272 - DNA, 25 bp, Homo sapien
ttcaaatttacagaatagagtgagg

SEQ ID NO: 2260273 - DNA, 25 bp, Homo sapien
gaacagaaactcactactaacaata

SEQ ID NO: 2260274 - DNA, 25 bp, Homo sapien
ccactgctgttatttgtcacaattc

SEQ ID NO: 2260275 - DNA, 25 bp, Homo sapien
tttaacttcttgaggtctttatctc

SEQ ID NO: 2260276 - DNA, 25 bp, Homo sapien
ttcctgttcttcgttgctggagccc

SEQ ID NO: 2260277 - DNA, 25 bp, Homo sapien
ctcatcggattgactccagagagta

SEQ ID NO: 2260278 - DNA, 25 bp, Homo sapien
tcctactgagtgctacttggaagct

SEQ ID NO: 2260279 - DNA, 25 bp, Homo sapien
tggaagctcgtctccaggtcaggaa

SEQ ID NO: 2260280 - DNA, 25 bp, Homo sapien
aggacttggtgactcggcagcaggc

SEQ ID NO: 2260281 - DNA, 25 bp, Homo sapien
ggaggacttggtgactcggcagcag

SEQ ID NO: 2260282 - DNA, 25 bp, Homo sapien
gggaggacttggtgactcggcagca

SEQ ID NO: 2260283 - DNA, 25 bp, Homo sapien
gacttggtgactcggcagcaggcac

SEQ ID NO: 2260284 - DNA, 25 bp, Homo sapien
agtgctgactcctctgctcaagtgg

SEQ ID NO: 2260285 - DNA, 25 bp, Homo sapien
tagcaggagcctgcgcacccaccaa

SEQ ID NO: 2260286 - DNA, 25 bp, Homo sapien
aggaggcagtctcctgctcctcagt

SEQ ID NO: 2260287 - DNA, 25 bp, Homo sapien
tcctcagtagcaggagcctgcgcac

SEQ ID NO: 2260288 - DNA, 25 bp, Homo sapien
gcaggagctagtgctgctccggggc

SEQ ID NO: 2260289 - DNA, 25 bp, Homo sapien
aggagctagtgctgctccggggcct

SEQ ID NO: 2260290 - DNA, 25 bp, Homo sapien
caggagctagtgctgctccggggcc

SEQ ID NO: 2260291 - DNA, 25 bp, Homo sapien
tgcagggcctaataccgcccttttg

SEQ ID NO: 2260292 - DNA, 25 bp, Homo sapien
taccgcccttttgctggccaaagaa

SEQ ID NO: 2260293 - DNA, 25 bp, Homo sapien
ctaataccgcccttttgctggccaa

SEQ ID NO: 2260294 - DNA, 25 bp, Homo sapien
cttgcagggcctaataccgcccttt

SEQ ID NO: 2260295 - DNA, 25 bp, Homo sapien
ccactgtgtctgtcgactacatggg

SEQ ID NO: 2260296 - DNA, 25 bp, Homo sapien
ggtagatcttaggaccactgtgtct

SEQ ID NO: 2260297 - DNA, 25 bp, Homo sapien
gcttggtagatcttaggaccactgt

SEQ ID NO: 2260298 - DNA, 25 bp, Homo sapien
tcttaggaccactgtgtctgtcgac

SEQ ID NO: 2260299 - DNA, 25 bp, Homo sapien
cagcgctggattattgggggccctc

SEQ ID NO: 2260300 - DNA, 25 bp, Homo sapien
ctgagaagtcttcccctgcagggtg

SEQ ID NO: 2260301 - DNA, 25 bp, Homo sapien
ccagagttccctgcggttaaagcgg

SEQ ID NO: 2260302 - DNA, 25 bp, Homo sapien
agcctgagaagtcttcccctgcagg

SEQ ID NO: 2260303 - DNA, 25 bp, Homo sapien
gttgctcagggcgagaatctcgctg

SEQ ID NO: 2260304 - DNA, 25 bp, Homo sapien
ccgttgctcagggcgagaatctcgc

SEQ ID NO: 2260305 - DNA, 25 bp, Homo sapien
ttgctcagggcgagaatctcgctgt

SEQ ID NO: 2260306 - DNA, 25 bp, Homo sapien
ccgacgtcaggccgttgctcagggc

SEQ ID NO: 2260307 - DNA, 25 bp, Homo sapien
ggcctgtcttggctgttgctcaaaa

SEQ ID NO: 2260308 - DNA, 25 bp, Homo sapien
cattcacatagtccaggctccatgg

SEQ ID NO: 2260309 - DNA, 25 bp, Homo sapien
tgctcaaaagtcagcaacccattca

SEQ ID NO: 2260310 - DNA, 25 bp, Homo sapien
agcaggcatgagacaactccctgcc

SEQ ID NO: 2260311 - DNA, 25 bp, Homo sapien
actaccaacgagagggtcactacag

SEQ ID NO: 2260312 - DNA, 25 bp, Homo sapien
acagatgccttatccccaggcccaa

SEQ ID NO: 2260313 - DNA, 25 bp, Homo sapien
accaacgagagggtcactacagatg

SEQ ID NO: 2260314 - DNA, 25 bp, Homo sapien
ggtcactacagatgccttatcccca

SEQ ID NO: 2260315 - DNA, 25 bp, Homo sapien
ctgctgttattatgtgacaactcac

SEQ ID NO: 2260316 - DNA, 25 bp, Homo sapien
gatgctgaagttcatccaaccattt

SEQ ID NO: 2260317 - DNA, 25 bp, Homo sapien
cgttcacaatataggcaaatacata

SEQ ID NO: 2260318 - DNA, 25 bp, Homo sapien
gtattttactgctaattcgttcaca

SEQ ID NO: 2260319 - DNA, 25 bp, Homo sapien
accgatctttagtgtatggtgcagg

SEQ ID NO: 2260320 - DNA, 25 bp, Homo sapien
aggttctccaccgatctttagtgta

SEQ ID NO: 2260321 - DNA, 25 bp, Homo sapien
tccctctctcaaagcccgttcatgc

SEQ ID NO: 2260322 - DNA, 25 bp, Homo sapien
tctccaccgatctttagtgtatggt

SEQ ID NO: 2260323 - DNA, 25 bp, Homo sapien
ctgcaccagatcttgcatgagcagc

SEQ ID NO: 2260324 - DNA, 25 bp, Homo sapien
caccagatcttgcatgagcagcttc

SEQ ID NO: 2260325 - DNA, 25 bp, Homo sapien
gcaccagatcttgcatgagcagctt

SEQ ID NO: 2260326 - DNA, 25 bp, Homo sapien
tgcaccagatcttgcatgagcagct

SEQ ID NO: 2260327 - DNA, 25 bp, Homo sapien
ggggcacagtcgccctctattgcga

SEQ ID NO: 2260328 - DNA, 25 bp, Homo sapien
gggcacagtcgccctctattgcgat

SEQ ID NO: 2260329 - DNA, 25 bp, Homo sapien
caggggcacagtcgccctctattgc

SEQ ID NO: 2260330 - DNA, 25 bp, Homo sapien
ctcaggggcacagtcgccctctatt

SEQ ID NO: 2260331 - DNA, 25 bp, Homo sapien
tgtagttgatggtagtcgagaagct

SEQ ID NO: 2260332 - DNA, 25 bp, Homo sapien
gaaaatgaaccaactcaaccatctt

SEQ ID NO: 2260333 - DNA, 25 bp, Homo sapien
tccaggtcgggaaacattcttggcc

SEQ ID NO: 2260334 - DNA, 25 bp, Homo sapien
catcggattgtctccaaagagtgta

SEQ ID NO: 2260335 - DNA, 25 bp, Homo sapien
tcggtgagtcggcagcaggcacctc

SEQ ID NO: 2260336 - DNA, 25 bp, Homo sapien
tccactagagtagaagaggaagaag

SEQ ID NO: 2260337 - DNA, 25 bp, Homo sapien
ggaagaagcggtctgctgctcctca

SEQ ID NO: 2260338 - DNA, 25 bp, Homo sapien
cccagggtaacttccactagagtag

SEQ ID NO: 2260339 - DNA, 25 bp, Homo sapien
cgggcaggagctgggcaatgaagac

SEQ ID NO: 2260340 - DNA, 25 bp, Homo sapien
gggcagcaggcaggagtgcgggcag

SEQ ID NO: 2260341 - DNA, 25 bp, Homo sapien
ggcagcaggcaggagtgcgggcagg

SEQ ID NO: 2260342 - DNA, 25 bp, Homo sapien
gcaggagctgggcaatgaagaccca

SEQ ID NO: 2260343 - DNA, 25 bp, Homo sapien
gtgcctcgggtcctacttgtcagcc

SEQ ID NO: 2260344 - DNA, 25 bp, Homo sapien
ccagtgcctcgggtcctacttgtca

SEQ ID NO: 2260345 - DNA, 25 bp, Homo sapien
tcgggtcctacttgtcagcctgtcc

SEQ ID NO: 2260346 - DNA, 25 bp, Homo sapien
cctcgggtcctacttgtcagcctgt

SEQ ID NO: 2260347 - DNA, 25 bp, Homo sapien
gcctcactgcctggttcctggagct

SEQ ID NO: 2260348 - DNA, 25 bp, Homo sapien
gacactgactcagaccaaggcctca

SEQ ID NO: 2260349 - DNA, 25 bp, Homo sapien
gttggcactgtctgcgtcccctctg

SEQ ID NO: 2260350 - DNA, 25 bp, Homo sapien
tcagtgttggcactgtctgcgtccc

SEQ ID NO: 2260351 - DNA, 25 bp, Homo sapien
ctgatatggtacagaaggagatgag

SEQ ID NO: 2260352 - DNA, 25 bp, Homo sapien
gggacccacatctggccatacgtga

SEQ ID NO: 2260353 - DNA, 25 bp, Homo sapien
gacaacgagagatgtccaaattcat

SEQ ID NO: 2260354 - DNA, 25 bp, Homo sapien
tgaccaggtcctcccgcgaaggaca

SEQ ID NO: 2260355 - DNA, 25 bp, Homo sapien
ccagggtctctgaagtaaccgcagg

SEQ ID NO: 2260356 - DNA, 25 bp, Homo sapien
agggacttcagctgacagccctgcc

SEQ ID NO: 2260357 - DNA, 25 bp, Homo sapien
atcaaagatcccaggataatggagg

SEQ ID NO: 2260358 - DNA, 25 bp, Homo sapien
cagggtctctgaagtaaccgcaggg

SEQ ID NO: 2260359 - DNA, 25 bp, Homo sapien
catctgtcgaccagatgggggcccc

SEQ ID NO: 2260360 - DNA, 25 bp, Homo sapien
ccactgcatctgtcgaccagatggg

SEQ ID NO: 2260361 - DNA, 25 bp, Homo sapien
tggatgcttggcagatcctagaacc

SEQ ID NO: 2260362 - DNA, 25 bp, Homo sapien
gaaccactgcatctgtcgaccagat

SEQ ID NO: 2260363 - DNA, 25 bp, Homo sapien
ctggaaacagaagtgaggaggggcc

SEQ ID NO: 2260364 - DNA, 25 bp, Homo sapien
gtgaggaggggccacatcctgttac

SEQ ID NO: 2260365 - DNA, 25 bp, Homo sapien
acagaagtgaggaggggccacatcc

SEQ ID NO: 2260366 - DNA, 25 bp, Homo sapien
aagtgaggaggggccacatcctgtt

SEQ ID NO: 2260367 - DNA, 25 bp, Homo sapien
ttctagggtgaacgttatgatggcc

SEQ ID NO: 2260368 - DNA, 25 bp, Homo sapien
gtgaacgttatgatggcctcctgtg

SEQ ID NO: 2260369 - DNA, 25 bp, Homo sapien
tttggttctagggtgaacgttatga

SEQ ID NO: 2260370 - DNA, 25 bp, Homo sapien
tagggtgaacgttatgatggcctcc

SEQ ID NO: 2260371 - DNA, 25 bp, Homo sapien
ctgccagggactgccctttctcaac

SEQ ID NO: 2260372 - DNA, 25 bp, Homo sapien
aggatccgcgtgcttggccgccatt

SEQ ID NO: 2260373 - DNA, 25 bp, Homo sapien
atgtgaacgtcaggatccgcgtgct

SEQ ID NO: 2260374 - DNA, 25 bp, Homo sapien
gaacgtcaggatccgcgtgcttggc

SEQ ID NO: 2260375 - DNA, 25 bp, Homo sapien
ccggagcttccgtgggttgattgca

SEQ ID NO: 2260376 - DNA, 25 bp, Homo sapien
gggatgggattggtagtgagggtag

SEQ ID NO: 2260377 - DNA, 25 bp, Homo sapien
ggatgggattggtagtgagggtagg

SEQ ID NO: 2260378 - DNA, 25 bp, Homo sapien
ggggatgggattggtagtgagggta

SEQ ID NO: 2260379 - DNA, 25 bp, Homo sapien
tgccctggtcacacaaagctcttac

SEQ ID NO: 2260380 - DNA, 25 bp, Homo sapien
tgggccctgagcacttctaaccagc

SEQ ID NO: 2260381 - DNA, 25 bp, Homo sapien
tctgggccctgagcacttctaacca

SEQ ID NO: 2260382 - DNA, 25 bp, Homo sapien
tgagtctgggccctgagcacttcta

SEQ ID NO: 2260383 - DNA, 25 bp, Homo sapien
cgctggattattgggggccctctgt

SEQ ID NO: 2260384 - DNA, 25 bp, Homo sapien
agcctgagaagtcttcccctgcagg

SEQ ID NO: 2260385 - DNA, 25 bp, Homo sapien
cagcgctggattattgggggccctc

SEQ ID NO: 2260386 - DNA, 25 bp, Homo sapien
ctgagaagtcttcccctgcagggtg

SEQ ID NO: 2260387 - DNA, 25 bp, Homo sapien
tccctccgccgacgtcaggccgttg

SEQ ID NO: 2260388 - DNA, 25 bp, Homo sapien
gcctgcttccctccgccgacgtcag

SEQ ID NO: 2260389 - DNA, 25 bp, Homo sapien
cggagcctgcgcctgcttccctccg

SEQ ID NO: 2260390 - DNA, 25 bp, Homo sapien
tgcctcctcacggagcctgcgcctg

SEQ ID NO: 2260391 - DNA, 25 bp, Homo sapien
gcctcacgtcacaggaggcagtgga

SEQ ID NO: 2260392 - DNA, 25 bp, Homo sapien
attgaggtacaaggcaagaatcaac

SEQ ID NO: 2260393 - DNA, 25 bp, Homo sapien
catgtatgttattgctaattcgctc

SEQ ID NO: 2260394 - DNA, 25 bp, Homo sapien
tcataaacctggatgctgacgctca

SEQ ID NO: 2260395 - DNA, 25 bp, Homo sapien
ggtaggaaatgtgaggtcctccact

SEQ ID NO: 2260396 - DNA, 25 bp, Homo sapien
tgtgaggtcctccactgatctttac

SEQ ID NO: 2260397 - DNA, 25 bp, Homo sapien
ccctctctcaaaacccactcatgca

SEQ ID NO: 2260398 - DNA, 25 bp, Homo sapien
tctctcaaaacccactcatgcaggg

SEQ ID NO: 2260399 - DNA, 25 bp, Homo sapien
gcgattatggccaggacgattatca

SEQ ID NO: 2260400 - DNA, 25 bp, Homo sapien
tgcgattatggccaggacgattatc

SEQ ID NO: 2260401 - DNA, 25 bp, Homo sapien
ttgcgattatggccaggacgattat

SEQ ID NO: 2260402 - DNA, 25 bp, Homo sapien
catcagctcgatgccaaagaccagc

SEQ ID NO: 2260403 - DNA, 25 bp, Homo sapien
gtggccgatggggtccacttccatc

SEQ ID NO: 2260404 - DNA, 25 bp, Homo sapien
ccagctgcaaggaactggaagcttt

SEQ ID NO: 2260405 - DNA, 25 bp, Homo sapien
agatcacaggaaagaaatactgcca

SEQ ID NO: 2260406 - DNA, 25 bp, Homo sapien
ctccagagagggtagttcatggtag

SEQ ID NO: 2260407 - DNA, 25 bp, Homo sapien
tccagagagggtagttcatggtagt

SEQ ID NO: 2260408 - DNA, 25 bp, Homo sapien
gctccagagagggtagttcatggta

SEQ ID NO: 2260409 - DNA, 25 bp, Homo sapien
ggctccagagagggtagttcatggt

SEQ ID NO: 2260410 - DNA, 25 bp, Homo sapien
tctcctcgggcctcaaggccttctt

SEQ ID NO: 2260411 - DNA, 25 bp, Homo sapien
ctctcctcgggcctcaaggccttct

SEQ ID NO: 2260412 - DNA, 25 bp, Homo sapien
tggtcagggcaacaggcgggagtgt

SEQ ID NO: 2260413 - DNA, 25 bp, Homo sapien
ggtcagggcaacaggcgggagtgtg

SEQ ID NO: 2260414 - DNA, 25 bp, Homo sapien
cgggggcctctggtcctccaggtca

SEQ ID NO: 2260415 - DNA, 25 bp, Homo sapien
cttcagtgctcctccgggggcctct

SEQ ID NO: 2260416 - DNA, 25 bp, Homo sapien
cctctggtcctccaggtcagcctgt

SEQ ID NO: 2260417 - DNA, 25 bp, Homo sapien
tcctccaggtcagcctgtcccctca

SEQ ID NO: 2260418 - DNA, 25 bp, Homo sapien
ccggccagcgcatgctgaggctgca

SEQ ID NO: 2260419 - DNA, 25 bp, Homo sapien
ctcagggtacatccggccagcgcat

SEQ ID NO: 2260420 - DNA, 25 bp, Homo sapien
ggtacatccggccagcgcatgctga

SEQ ID NO: 2260421 - DNA, 25 bp, Homo sapien
atccggccagcgcatgctgaggctg

SEQ ID NO: 2260422 - DNA, 25 bp, Homo sapien
cagaccacagccctcaactctctgg

SEQ ID NO: 2260423 - DNA, 25 bp, Homo sapien
cacagccctcaactctctggtcacc

SEQ ID NO: 2260424 - DNA, 25 bp, Homo sapien
ctgaagtcccactcttcagaccaca

SEQ ID NO: 2260425 - DNA, 25 bp, Homo sapien
tgaagtcccactcttcagaccacag

SEQ ID NO: 2260426 - DNA, 25 bp, Homo sapien
agagttccccgtggctaaagcggcg

SEQ ID NO: 2260427 - DNA, 25 bp, Homo sapien
gaccttgattcctgccacagcgtgg

SEQ ID NO: 2260428 - DNA, 25 bp, Homo sapien
gcagcactggattatttgaggccct

SEQ ID NO: 2260429 - DNA, 25 bp, Homo sapien
gagcttccgtgacttgataccaggg

SEQ ID NO: 2260430 - DNA, 25 bp, Homo sapien
acgtcaggccgtcgctcgttgctca

SEQ ID NO: 2260431 - DNA, 25 bp, Homo sapien
ctcctcaccgagcctgggccggctt

SEQ ID NO: 2260432 - DNA, 25 bp, Homo sapien
gccgacgtcaggccgtcgctcgttg

SEQ ID NO: 2260433 - DNA, 25 bp, Homo sapien
tccgccgacgtcaggccgtcgctcg

SEQ ID NO: 2260434 - DNA, 25 bp, Homo sapien
catccaacaggatgatcagatgtct

SEQ ID NO: 2260435 - DNA, 25 bp, Homo sapien
caaatgtatttttgctattagaggg

SEQ ID NO: 2260436 - DNA, 25 bp, Homo sapien
tgtatttttgctattagaggggccc

SEQ ID NO: 2260437 - DNA, 25 bp, Homo sapien
tcaaatgtatttttgctattagagg

SEQ ID NO: 2260438 - DNA, 25 bp, Homo sapien
ttttgctattagaggggccccagtg

SEQ ID NO: 2260439 - DNA, 25 bp, Homo sapien
cctggaacgtgcactagtccacccc

SEQ ID NO: 2260440 - DNA, 25 bp, Homo sapien
ctggaacgtgcactagtccacccca

SEQ ID NO: 2260441 - DNA, 25 bp, Homo sapien
tggaacgtgcactagtccaccccac

SEQ ID NO: 2260442 - DNA, 25 bp, Homo sapien
ctgcatcgcctgctgaaactctctc

SEQ ID NO: 2260443 - DNA, 25 bp, Homo sapien
gctgcatcgcctgctgaaactctct

SEQ ID NO: 2260444 - DNA, 25 bp, Homo sapien
tgcatcgcctgctgaaactctctct

SEQ ID NO: 2260445 - DNA, 25 bp, Homo sapien
ggctgcatcgcctgctgaaactctc

SEQ ID NO: 2260446 - DNA, 25 bp, Homo sapien
gcgcagttgccctccgtgaagatca

SEQ ID NO: 2260447 - DNA, 25 bp, Homo sapien
ggcttgctcgggtcatcaaccagca

SEQ ID NO: 2260448 - DNA, 25 bp, Homo sapien
taattcgaaacttgtggagcaggac

SEQ ID NO: 2260449 - DNA, 25 bp, Homo sapien
ggagcaggacactaactaaatcaga

SEQ ID NO: 2260450 - DNA, 25 bp, Homo sapien
atgggcaaggtgattggctcctcct

SEQ ID NO: 2260451 - DNA, 25 bp, Homo sapien
agccctcatcggattggttccatag

SEQ ID NO: 2260452 - DNA, 25 bp, Homo sapien
ttgggatgggcaaggtgattggctc

SEQ ID NO: 2260453 - DNA, 25 bp, Homo sapien
catcggattggttccatagagtgtt

SEQ ID NO: 2260454 - DNA, 25 bp, Homo sapien
ccagggtgcccatgatcagactaga

SEQ ID NO: 2260455 - DNA, 25 bp, Homo sapien
cagtgcctcagcagcacacaactcc

SEQ ID NO: 2260456 - DNA, 25 bp, Homo sapien
cccatgatcagactagaggaggaag

SEQ ID NO: 2260457 - DNA, 25 bp, Homo sapien
gactcagtgcctcagcagcacacaa

SEQ ID NO: 2260458 - DNA, 25 bp, Homo sapien
ggcaggagctgggtaatggggatgc

SEQ ID NO: 2260459 - DNA, 25 bp, Homo sapien
tgggcaggagctgggtaatggggat

SEQ ID NO: 2260460 - DNA, 25 bp, Homo sapien
gcaggagctgggtaatggggatgca

SEQ ID NO: 2260461 - DNA, 25 bp, Homo sapien
gggcaggagctgggtaatggggatg

SEQ ID NO: 2260462 - DNA, 25 bp, Homo sapien
gtcctcctggtcagcctgtcccctg

SEQ ID NO: 2260463 - DNA, 25 bp, Homo sapien
cctcctggtcagcctgtcccctgag

SEQ ID NO: 2260464 - DNA, 25 bp, Homo sapien
cctggtcagcctgtcccctgagaat

SEQ ID NO: 2260465 - DNA, 25 bp, Homo sapien
ttctccttcagtgctcctctggggc

SEQ ID NO: 2260466 - DNA, 25 bp, Homo sapien
catggggtgtccagggctgacacca

SEQ ID NO: 2260467 - DNA, 25 bp, Homo sapien
caaagttctcctgtgggttattcat

SEQ ID NO: 2260468 - DNA, 25 bp, Homo sapien
tggaagttccaaagttctcctgtgg

SEQ ID NO: 2260469 - DNA, 25 bp, Homo sapien
ccctccatggggtgtccagggctga

SEQ ID NO: 2260470 - DNA, 25 bp, Homo sapien
cctaaccacccctgccttggtcaca

SEQ ID NO: 2260471 - DNA, 25 bp, Homo sapien
tcctaaccacccctgccttggtcac

SEQ ID NO: 2260472 - DNA, 25 bp, Homo sapien
tctcctaaccacccctgccttggtc

SEQ ID NO: 2260473 - DNA, 25 bp, Homo sapien
ctcctaaccacccctgccttggtca

SEQ ID NO: 2260474 - DNA, 25 bp, Homo sapien
caggtttgcttgaagcgggggtctt

SEQ ID NO: 2260475 - DNA, 25 bp, Homo sapien
tcaggtttgcttgaagcgggggtct

SEQ ID NO: 2260476 - DNA, 25 bp, Homo sapien
tactgtgtgcacttctggttgagac

SEQ ID NO: 2260477 - DNA, 25 bp, Homo sapien
cagcatagattccaagttcagcttt

SEQ ID NO: 2260478 - DNA, 25 bp, Homo sapien
gaggccacatccagtgtccatgaag

SEQ ID NO: 2260479 - DNA, 25 bp, Homo sapien
gaagaaagctttctggtagcaatgc

SEQ ID NO: 2260480 - DNA, 25 bp, Homo sapien
ttttgctacaactgaagatgtggcc

SEQ ID NO: 2260481 - DNA, 25 bp, Homo sapien
caaatgggtccgatatgtccgagca

SEQ ID NO: 2260482 - DNA, 25 bp, Homo sapien
catggcacacaaggatgatgtctca

SEQ ID NO: 2260483 - DNA, 25 bp, Homo sapien
atgtggccattccagcggcttccag

SEQ ID NO: 2260484 - DNA, 25 bp, Homo sapien
tctggtccagccctccatgacatga

SEQ ID NO: 2260485 - DNA, 25 bp, Homo sapien
ctctctggtccagccctccatgaca

SEQ ID NO: 2260486 - DNA, 25 bp, Homo sapien
agtcactctccctacatctctctgg

SEQ ID NO: 2260487 - DNA, 25 bp, Homo sapien
ggtccagccctccatgacatgaact

SEQ ID NO: 2260488 - DNA, 25 bp, Homo sapien
catcacacagacatcaaactccagg

SEQ ID NO: 2260489 - DNA, 25 bp, Homo sapien
tccaggcacctagagaagtagcttg

SEQ ID NO: 2260490 - DNA, 25 bp, Homo sapien
taacagtaaaattggaggcagggcc

SEQ ID NO: 2260491 - DNA, 25 bp, Homo sapien
ggaaatgctatcaacacactttggg

SEQ ID NO: 2260492 - DNA, 25 bp, Homo sapien
tggcaatacaggatgcttaggtaaa

SEQ ID NO: 2260493 - DNA, 25 bp, Homo sapien
gcttctggcctctgtaacgtgctcc

SEQ ID NO: 2260494 - DNA, 25 bp, Homo sapien
tacaaatgggatatagtcatactaa

SEQ ID NO: 2260495 - DNA, 25 bp, Homo sapien
gggtagggttaccagtggcaataca

SEQ ID NO: 2260496 - DNA, 25 bp, Homo sapien
tccaaacggctaaaataggctcaag

SEQ ID NO: 2260497 - DNA, 25 bp, Homo sapien
catcctagtgttgcgttagcctggc

SEQ ID NO: 2260498 - DNA, 25 bp, Homo sapien
gaatgactgcttgtggcaacacagg

SEQ ID NO: 2260499 - DNA, 25 bp, Homo sapien
catgacgagggaaacgatgcaaggc

SEQ ID NO: 2260500 - DNA, 25 bp, Homo sapien
tctttttcatgatgcgcaggaactc

SEQ ID NO: 2260501 - DNA, 25 bp, Homo sapien
ctttttcatgatgcgcaggaactct

SEQ ID NO: 2260502 - DNA, 25 bp, Homo sapien
catctccatctcgatcagcttcatc

SEQ ID NO: 2260503 - DNA, 25 bp, Homo sapien
atctccatctcgatcagcttcatca

SEQ ID NO: 2260504 - DNA, 25 bp, Homo sapien
tccatctccatctcgatcagcttca

SEQ ID NO: 2260505 - DNA, 25 bp, Homo sapien
tctccatctccatctcgatcagctt

SEQ ID NO: 2260506 - DNA, 25 bp, Homo sapien
aactccttggccacgcgtttcagat

SEQ ID NO: 2260507 - DNA, 25 bp, Homo sapien
agtcaggttctcacccaactccttg

SEQ ID NO: 2260508 - DNA, 25 bp, Homo sapien
gtcaggttctcacccaactccttgg

SEQ ID NO: 2260509 - DNA, 25 bp, Homo sapien
tttcagatttttgaacgaaatcttc

SEQ ID NO: 2260510 - DNA, 25 bp, Homo sapien
ggtcatcacagttaaaaagtcacca

SEQ ID NO: 2260511 - DNA, 25 bp, Homo sapien
tgggtcatcacagttaaaaagtcac

SEQ ID NO: 2260512 - DNA, 25 bp, Homo sapien
gggtcatcacagttaaaaagtcacc

SEQ ID NO: 2260513 - DNA, 25 bp, Homo sapien
gaagggcagtacggcaggaatgcac

SEQ ID NO: 2260514 - DNA, 25 bp, Homo sapien
aggaagggcagtacggcaggaatgc

SEQ ID NO: 2260515 - DNA, 25 bp, Homo sapien
agagaggtgatagggagatgacaag

SEQ ID NO: 2260516 - DNA, 25 bp, Homo sapien
agaggtgatagggagatgacaagga

SEQ ID NO: 2260517 - DNA, 25 bp, Homo sapien
cagttccatccgcatcgaaaagatc

SEQ ID NO: 2260518 - DNA, 25 bp, Homo sapien
gcttagggctcattctttttcgctg

SEQ ID NO: 2260519 - DNA, 25 bp, Homo sapien
tcttcagtaagctcaggcttagggc

SEQ ID NO: 2260520 - DNA, 25 bp, Homo sapien
gatcaaaagcttcccggatctcctg

SEQ ID NO: 2260521 - DNA, 25 bp, Homo sapien
ctgtgtgtggaaattttggcagaat

SEQ ID NO: 2260522 - DNA, 25 bp, Homo sapien
ggaaattttggcagaatgaggaggc

SEQ ID NO: 2260523 - DNA, 25 bp, Homo sapien
ttttggcagaatgaggaggccaggg

SEQ ID NO: 2260524 - DNA, 25 bp, Homo sapien
cccagctgtgtgtggaaattttggc

SEQ ID NO: 2260525 - DNA, 25 bp, Homo sapien
ctactctcccgggaaagagctcaaa

SEQ ID NO: 2260526 - DNA, 25 bp, Homo sapien
aggagaggcggcgtggccgagctgg

SEQ ID NO: 2260527 - DNA, 25 bp, Homo sapien
ctaaagccgagaaaggcgcaggaga

SEQ ID NO: 2260528 - DNA, 25 bp, Homo sapien
aaggaaagactggtgcgctaaagcc

SEQ ID NO: 2260529 - DNA, 25 bp, Homo sapien
agccaaaggagtccgctgccggttg

SEQ ID NO: 2260530 - DNA, 25 bp, Homo sapien
agtccgctgccggttgttaggcaac

SEQ ID NO: 2260531 - DNA, 25 bp, Homo sapien
taggcaaccgacgtgtacactgact

SEQ ID NO: 2260532 - DNA, 25 bp, Homo sapien
ggttgttaggcaaccgacgtgtaca

SEQ ID NO: 2260533 - DNA, 25 bp, Homo sapien
acctccgtctcactggttcaagcga

SEQ ID NO: 2260534 - DNA, 25 bp, Homo sapien
cactctgtcaccctggctggagtgc

SEQ ID NO: 2260535 - DNA, 25 bp, Homo sapien
cgtcccaaagtgctggggtgacagg

SEQ ID NO: 2260536 - DNA, 25 bp, Homo sapien
actctgtcaccctggctggagtgca

SEQ ID NO: 2260537 - DNA, 25 bp, Homo sapien
gctcctctcctaatgtgggacactg

SEQ ID NO: 2260538 - DNA, 25 bp, Homo sapien
tcctctcctaatgtgggacactggg

SEQ ID NO: 2260539 - DNA, 25 bp, Homo sapien
tcagctcctctcctaatgtgggaca

SEQ ID NO: 2260540 - DNA, 25 bp, Homo sapien
tcatctgttcagctcctctcctaat

SEQ ID NO: 2260541 - DNA, 25 bp, Homo sapien
gggtccgcgctcagcacctgatttc

SEQ ID NO: 2260542 - DNA, 25 bp, Homo sapien
gtggagccttcagacaagaagcaac

SEQ ID NO: 2260543 - DNA, 25 bp, Homo sapien
aaaggcccacgcgatgatggagttg

SEQ ID NO: 2260544 - DNA, 25 bp, Homo sapien
ttcagacaagaagcaacaaaggccc

SEQ ID NO: 2260545 - DNA, 25 bp, Homo sapien
agccaaatggaaccacggtttcctg

SEQ ID NO: 2260546 - DNA, 25 bp, Homo sapien
cggtttcctgttcacgccctgtcat

SEQ ID NO: 2260547 - DNA, 25 bp, Homo sapien
tgtagccaaatggaaccacggtttc

SEQ ID NO: 2260548 - DNA, 25 bp, Homo sapien
tggaaccacggtttcctgttcacgc

SEQ ID NO: 2260549 - DNA, 25 bp, Homo sapien
gctcctttgcccaccatgcagggtg

SEQ ID NO: 2260550 - DNA, 25 bp, Homo sapien
gtgccgcatggtggtaagggcagca

SEQ ID NO: 2260551 - DNA, 25 bp, Homo sapien
gaagatatcctttgggcagcctgag

SEQ ID NO: 2260552 - DNA, 25 bp, Homo sapien
tctcagcagggtcaacaggagcagc

SEQ ID NO: 2260553 - DNA, 25 bp, Homo sapien
gcgcacactcacaatgcccactgag

SEQ ID NO: 2260554 - DNA, 25 bp, Homo sapien
ccaggcgcacactcacaatgcccac

SEQ ID NO: 2260555 - DNA, 25 bp, Homo sapien
aggcgcacactcacaatgcccactg

SEQ ID NO: 2260556 - DNA, 25 bp, Homo sapien
gcacactcacaatgcccactgagca

SEQ ID NO: 2260557 - DNA, 25 bp, Homo sapien
caagtcaaacccgtttgcaggcaag

SEQ ID NO: 2260558 - DNA, 25 bp, Homo sapien
cccgtttgcaggcaagatcagctgc

SEQ ID NO: 2260559 - DNA, 25 bp, Homo sapien
caaacccgtttgcaggcaagatcag

SEQ ID NO: 2260560 - DNA, 25 bp, Homo sapien
gtcaaacccgtttgcaggcaagatc

SEQ ID NO: 2260561 - DNA, 25 bp, Homo sapien
tacatcaaaccgcattggctctggg

SEQ ID NO: 2260562 - DNA, 25 bp, Homo sapien
tgaattaacccgacagcatctgtgg

SEQ ID NO: 2260563 - DNA, 25 bp, Homo sapien
ggatggccttccacgatgagcggct

SEQ ID NO: 2260564 - DNA, 25 bp, Homo sapien
caataaagcactcggtgagcaccaa

SEQ ID NO: 2260565 - DNA, 25 bp, Homo sapien
ccccacgagccgggcaccggtgcca

SEQ ID NO: 2260566 - DNA, 25 bp, Homo sapien
cgcgccctgcgactgcccgaccctc

SEQ ID NO: 2260567 - DNA, 25 bp, Homo sapien
agcccgcgccctgcgactgcccgac

SEQ ID NO: 2260568 - DNA, 25 bp, Homo sapien
cctgcgactgcccgaccctccaccc

SEQ ID NO: 2260569 - DNA, 25 bp, Homo sapien
cgggagtcagtggatttctggtttt

SEQ ID NO: 2260570 - DNA, 25 bp, Homo sapien
ccccgggagtcagtggatttctggt

SEQ ID NO: 2260571 - DNA, 25 bp, Homo sapien
gctccaagcatctctcttcgggttc

SEQ ID NO: 2260572 - DNA, 25 bp, Homo sapien
ccccccgggagtcagtggatttctg

SEQ ID NO: 2260573 - DNA, 25 bp, Homo sapien
ccactcattaacgcccgctgagcca

SEQ ID NO: 2260574 - DNA, 25 bp, Homo sapien
attaacgcccgctgagccatccctc

SEQ ID NO: 2260575 - DNA, 25 bp, Homo sapien
tgctgctgagatggcggcagagctc

SEQ ID NO: 2260576 - DNA, 25 bp, Homo sapien
actcattaacgcccgctgagccatc

SEQ ID NO: 2260577 - DNA, 25 bp, Homo sapien
cccaactctggctcttgtaggagga

SEQ ID NO: 2260578 - DNA, 25 bp, Homo sapien
gaccagatgggagtacttatgtttc

SEQ ID NO: 2260579 - DNA, 25 bp, Homo sapien
gggcaggcctatgtgctggtcccca

SEQ ID NO: 2260580 - DNA, 25 bp, Homo sapien
ccttgtcccagagccacgtgaaagt

SEQ ID NO: 2260581 - DNA, 25 bp, Homo sapien
gtgaaagtgcttgcagacagagctt

SEQ ID NO: 2260582 - DNA, 25 bp, Homo sapien
tccgctaatgactgccccggagagc

SEQ ID NO: 2260583 - DNA, 25 bp, Homo sapien
ggcatggttctcatcgcagagcgga

SEQ ID NO: 2260584 - DNA, 25 bp, Homo sapien
gcacacggtactgctggccttctga

SEQ ID NO: 2260585 - DNA, 25 bp, Homo sapien
gctccagcaagggaagccagtgttg

SEQ ID NO: 2260586 - DNA, 25 bp, Homo sapien
gaactgtcccaaggtctgtagtcag

SEQ ID NO: 2260587 - DNA, 25 bp, Homo sapien
taggaacacctgtggagtgagcgcc

SEQ ID NO: 2260588 - DNA, 25 bp, Homo sapien
caacagaactctaacgtggcagctt

SEQ ID NO: 2260589 - DNA, 25 bp, Homo sapien
cccagatgaagtgaggaactgtccc

SEQ ID NO: 2260590 - DNA, 25 bp, Homo sapien
tcagctcttggaggccgcaccaaag

SEQ ID NO: 2260591 - DNA, 25 bp, Homo sapien
aggagagctgcggagcaatcaccat

SEQ ID NO: 2260592 - DNA, 25 bp, Homo sapien
aagccctgctgaatcaagtgagagg

SEQ ID NO: 2260593 - DNA, 25 bp, Homo sapien
caccatgagtatctcagctcttgga

SEQ ID NO: 2260594 - DNA, 25 bp, Homo sapien
tcaagcagatgaaagtgcgaaccac

SEQ ID NO: 2260595 - DNA, 25 bp, Homo sapien
gggacaagagctggattaccaagca

SEQ ID NO: 2260596 - DNA, 25 bp, Homo sapien
cgaggaggagcgcaataacgttctc

SEQ ID NO: 2260597 - DNA, 25 bp, Homo sapien
aggatgaatcggagggtcgcaccat

SEQ ID NO: 2260598 - DNA, 25 bp, Homo sapien
agtcgcgccacatccttttcatcag

SEQ ID NO: 2260599 - DNA, 25 bp, Homo sapien
tcagctggggaggttccgaagccta

SEQ ID NO: 2260600 - DNA, 25 bp, Homo sapien
aggccggagtcgcgccacatccttt

SEQ ID NO: 2260601 - DNA, 25 bp, Homo sapien
ttttcatcagctggggaggttccga

SEQ ID NO: 2260602 - DNA, 25 bp, Homo sapien
gagcacaagggctcccactggctac

SEQ ID NO: 2260603 - DNA, 25 bp, Homo sapien
ttcaccaagcccatagacagctctt

SEQ ID NO: 2260604 - DNA, 25 bp, Homo sapien
tcctctggctacaagatgaccactg

SEQ ID NO: 2260605 - DNA, 25 bp, Homo sapien
ctctggctacaagatgaccactgag

SEQ ID NO: 2260606 - DNA, 25 bp, Homo sapien
tgagaacagctaacgctggtcctcc

SEQ ID NO: 2260607 - DNA, 25 bp, Homo sapien
gctgccagtctggtgagaacagcta

SEQ ID NO: 2260608 - DNA, 25 bp, Homo sapien
agctctacatcaggggacaccgagg

SEQ ID NO: 2260609 - DNA, 25 bp, Homo sapien
tatcaggcgcagctctacatcaggg

SEQ ID NO: 2260610 - DNA, 25 bp, Homo sapien
cctacaatatcaggcgcagctctac

SEQ ID NO: 2260611 - DNA, 25 bp, Homo sapien
ggcaccctacaatatcaggcgcagc

SEQ ID NO: 2260612 - DNA, 25 bp, Homo sapien
tacgtcctgtcagcggccaagaaga

SEQ ID NO: 2260613 - DNA, 25 bp, Homo sapien
cgggagcactcctacgtcctgtcag

SEQ ID NO: 2260614 - DNA, 25 bp, Homo sapien
tgcaagcggtgttctgaggaggaca

SEQ ID NO: 2260615 - DNA, 25 bp, Homo sapien
gtcagaggctgcaagcggtgttctg

SEQ ID NO: 2260616 - DNA, 25 bp, Homo sapien
gacacaggcaccgtttatcgcgaag

SEQ ID NO: 2260617 - DNA, 25 bp, Homo sapien
acacaggcaccgtttatcgcgaaga

SEQ ID NO: 2260618 - DNA, 25 bp, Homo sapien
gagacacaggcaccgtttatcgcga

SEQ ID NO: 2260619 - DNA, 25 bp, Homo sapien
cacaggcaccgtttatcgcgaagag

SEQ ID NO: 2260620 - DNA, 25 bp, Homo sapien
tggaagaggacgggccttctgagaa

SEQ ID NO: 2260621 - DNA, 25 bp, Homo sapien
aagaggacgggccttctgagaagag

SEQ ID NO: 2260622 - DNA, 25 bp, Homo sapien
gaagaggacgggccttctgagaaga

SEQ ID NO: 2260623 - DNA, 25 bp, Homo sapien
agaggacgggccttctgagaagagc

SEQ ID NO: 2260624 - DNA, 25 bp, Homo sapien
caagaggtgaggaaattgtccgcct

SEQ ID NO: 2260625 - DNA, 25 bp, Homo sapien
gaaattgtccgcctgcagatcctga

SEQ ID NO: 2260626 - DNA, 25 bp, Homo sapien
acccagggcaggactccgcctggtg

SEQ ID NO: 2260627 - DNA, 25 bp, Homo sapien
tggccccagacgtggaaggcatgag

SEQ ID NO: 2260628 - DNA, 25 bp, Homo sapien
cccaaattggatgacaggtaagact

SEQ ID NO: 2260629 - DNA, 25 bp, Homo sapien
tcgagtgagtggagtatgtgacccc

SEQ ID NO: 2260630 - DNA, 25 bp, Homo sapien
ggtggccaaagtatctctaacctgc

SEQ ID NO: 2260631 - DNA, 25 bp, Homo sapien
tcttgtgaatcaccaagcctaggga

SEQ ID NO: 2260632 - DNA, 25 bp, Homo sapien
gccccagcggatctgagcaattcgt

SEQ ID NO: 2260633 - DNA, 25 bp, Homo sapien
ttcgtcagacgagagagctgcacca

SEQ ID NO: 2260634 - DNA, 25 bp, Homo sapien
gctgtacccactcagcaacctgcag

SEQ ID NO: 2260635 - DNA, 25 bp, Homo sapien
ccaccaaggtcggagaggcctggca

SEQ ID NO: 2260636 - DNA, 25 bp, Homo sapien
cgagctgcatggtcactgttactgt

SEQ ID NO: 2260637 - DNA, 25 bp, Homo sapien
caagtgaattggactccagctctac

SEQ ID NO: 2260638 - DNA, 25 bp, Homo sapien
gaggagcccctcgagctgcatggtc

SEQ ID NO: 2260639 - DNA, 25 bp, Homo sapien
agtgaattggactccagctctacca

SEQ ID NO: 2260640 - DNA, 25 bp, Homo sapien
tgggaagccagtatctgcacgctat

SEQ ID NO: 2260641 - DNA, 25 bp, Homo sapien
aaagggattctcttcgtgaaggagt

SEQ ID NO: 2260642 - DNA, 25 bp, Homo sapien
gaaggagtacgtgaatgctagtgaa

SEQ ID NO: 2260643 - DNA, 25 bp, Homo sapien
agccagtatctgcacgctatagcaa

SEQ ID NO: 2260644 - DNA, 25 bp, Homo sapien
tgaggactcattcgccatggagaag

SEQ ID NO: 2260645 - DNA, 25 bp, Homo sapien
agcctccatgtggcagcactccata

SEQ ID NO: 2260646 - DNA, 25 bp, Homo sapien
gcattgaggactcattcgccatgga

SEQ ID NO: 2260647 - DNA, 25 bp, Homo sapien
gactcattcgccatggagaagaagc

SEQ ID NO: 2260648 - DNA, 25 bp, Homo sapien
gactgtccaaagattaccctagaac

SEQ ID NO: 2260649 - DNA, 25 bp, Homo sapien
tctgtacttactgcaaccgtgagat

SEQ ID NO: 2260650 - DNA, 25 bp, Homo sapien
gaacatcttggtatctgctgccatg

SEQ ID NO: 2260651 - DNA, 25 bp, Homo sapien
ccgtgagatccgagactgtccaaag

SEQ ID NO: 2260652 - DNA, 25 bp, Homo sapien
ttgcagtaaaccgatgggcgatctc

SEQ ID NO: 2260653 - DNA, 25 bp, Homo sapien
tcctggatcagatcttcattcaccg

SEQ ID NO: 2260654 - DNA, 25 bp, Homo sapien
aaaccgatgggcgatctcctggatc

SEQ ID NO: 2260655 - DNA, 25 bp, Homo sapien
gatcttcattcaccgtgacaccatt

SEQ ID NO: 2260656 - DNA, 25 bp, Homo sapien
gatgtcatttcaggctcaaccaaag

SEQ ID NO: 2260657 - DNA, 25 bp, Homo sapien
cagaagctgatgactcgtggacaaa

SEQ ID NO: 2260658 - DNA, 25 bp, Homo sapien
tagaaagcgctttatgcccatgatg

SEQ ID NO: 2260659 - DNA, 25 bp, Homo sapien
gactgttgatgatccctggtgggta

SEQ ID NO: 2260660 - DNA, 25 bp, Homo sapien
tacttgggacatggaaactcgttgg

SEQ ID NO: 2260661 - DNA, 25 bp, Homo sapien
gatgtaagcctgtccatgcagtcag

SEQ ID NO: 2260662 - DNA, 25 bp, Homo sapien
tgaagtacttcaagggccaagctgc

SEQ ID NO: 2260663 - DNA, 25 bp, Homo sapien
caaaggcataggcttgcaaagagca

SEQ ID NO: 2260664 - DNA, 25 bp, Homo sapien
tgagtctcagtgcaggaccagtgga

SEQ ID NO: 2260665 - DNA, 25 bp, Homo sapien
catcagacttggcacgtggtggaca

SEQ ID NO: 2260666 - DNA, 25 bp, Homo sapien
accccgttggtgagaggtgctatcc

SEQ ID NO: 2260667 - DNA, 25 bp, Homo sapien
taaagaggcccaagataggctggct

SEQ ID NO: 2260668 - DNA, 25 bp, Homo sapien
taattggtgacagtgtgacacaaag

SEQ ID NO: 2260669 - DNA, 25 bp, Homo sapien
aattggtgacagtgtgacacaaaga

SEQ ID NO: 2260670 - DNA, 25 bp, Homo sapien
ttaattggtgacagtgtgacacaaa

SEQ ID NO: 2260671 - DNA, 25 bp, Homo sapien
attggtgacagtgtgacacaaagac

SEQ ID NO: 2260672 - DNA, 25 bp, Homo sapien
aggtgcctctgctttggcctttgca

SEQ ID NO: 2260673 - DNA, 25 bp, Homo sapien
cagcagcaggggaccagagtctgcc

SEQ ID NO: 2260674 - DNA, 25 bp, Homo sapien
cagcaggtgcctctgctttggcctt

SEQ ID NO: 2260675 - DNA, 25 bp, Homo sapien
gggaccagagtctgccctgcaggcc

SEQ ID NO: 2260676 - DNA, 25 bp, Homo sapien
gacgtcgggagtccagaaaggccac

SEQ ID NO: 2260677 - DNA, 25 bp, Homo sapien
tggacgtcgggagtccagaaaggcc

SEQ ID NO: 2260678 - DNA, 25 bp, Homo sapien
ggaacaggtggacgtcgggagtcca

SEQ ID NO: 2260679 - DNA, 25 bp, Homo sapien
acaggtggacgtcgggagtccagaa

SEQ ID NO: 2260680 - DNA, 25 bp, Homo sapien
cttacaaggtagtgaatcgacaggt

SEQ ID NO: 2260681 - DNA, 25 bp, Homo sapien
aaggtagtgaatcgacaggttctca

SEQ ID NO: 2260682 - DNA, 25 bp, Homo sapien
caaggtagtgaatcgacaggttctc

SEQ ID NO: 2260683 - DNA, 25 bp, Homo sapien
tacaaggtagtgaatcgacaggttc

SEQ ID NO: 2260684 - DNA, 25 bp, Homo sapien
tctgccagctggcacgcaccaaggg

SEQ ID NO: 2260685 - DNA, 25 bp, Homo sapien
aacacaatgcatggtaggagctctg

SEQ ID NO: 2260686 - DNA, 25 bp, Homo sapien
aggaaggcaccttgatggacctttc

SEQ ID NO: 2260687 - DNA, 25 bp, Homo sapien
tcctcaggggcacttgttgaggact

SEQ ID NO: 2260688 - DNA, 25 bp, Homo sapien
cagccagtcactgctcatgaccacc

SEQ ID NO: 2260689 - DNA, 25 bp, Homo sapien
gccagtcactgctcatgaccaccag

SEQ ID NO: 2260690 - DNA, 25 bp, Homo sapien
cctttggtacccagccagtcactgc

SEQ ID NO: 2260691 - DNA, 25 bp, Homo sapien
agtcactgctcatgaccaccagcat

SEQ ID NO: 2260692 - DNA, 25 bp, Homo sapien
tgcagtcgaggtcacagtcacaagg

SEQ ID NO: 2260693 - DNA, 25 bp, Homo sapien
ttcttgacacggaacagcagtgagc

SEQ ID NO: 2260694 - DNA, 25 bp, Homo sapien
agtcacaaggtgagcgtctgccatg

SEQ ID NO: 2260695 - DNA, 25 bp, Homo sapien
aatgtgtactcgcttcagggaaccc

SEQ ID NO: 2260696 - DNA, 25 bp, Homo sapien
cttcttcagcccctgcttcgctggg

SEQ ID NO: 2260697 - DNA, 25 bp, Homo sapien
ctccaggtcccacgtggcctgggtg

SEQ ID NO: 2260698 - DNA, 25 bp, Homo sapien
aaagtccacagggtagatatttggg

SEQ ID NO: 2260699 - DNA, 25 bp, Homo sapien
gtgccagtgggcatgctcagctcaa

SEQ ID NO: 2260700 - DNA, 25 bp, Homo sapien
agtgtagtggttccccgcttgtgtc

SEQ ID NO: 2260701 - DNA, 25 bp, Homo sapien
tccctgttagtgtaagctgcccctt

SEQ ID NO: 2260702 - DNA, 25 bp, Homo sapien
gaaggagtgcttcggtcttctgagc

SEQ ID NO: 2260703 - DNA, 25 bp, Homo sapien
gcaccccatgtgctaagtgtagtgg

SEQ ID NO: 2260704 - DNA, 25 bp, Homo sapien
acagccgcctgcgtttcactaatgg

SEQ ID NO: 2260705 - DNA, 25 bp, Homo sapien
tcagccttgggatacgtggcctggc

SEQ ID NO: 2260706 - DNA, 25 bp, Homo sapien
ggtaagcctccctgtatggtctggg

SEQ ID NO: 2260707 - DNA, 25 bp, Homo sapien
tgctttcactgcctaacagccgcct

SEQ ID NO: 2260708 - DNA, 25 bp, Homo sapien
ctgaggtgcagagacactggcttct

SEQ ID NO: 2260709 - DNA, 25 bp, Homo sapien
tgaggtgcagagacactggcttctg

SEQ ID NO: 2260710 - DNA, 25 bp, Homo sapien
ctgcacggtggcctgaggtgcagag

SEQ ID NO: 2260711 - DNA, 25 bp, Homo sapien
tgcacggtggcctgaggtgcagaga

SEQ ID NO: 2260712 - DNA, 25 bp, Homo sapien
cttattcttcatcactgcctcagtg

SEQ ID NO: 2260713 - DNA, 25 bp, Homo sapien
ctccctgatggcttctccttattct

SEQ ID NO: 2260714 - DNA, 25 bp, Homo sapien
cctctccctgatggcttctccttat

SEQ ID NO: 2260715 - DNA, 25 bp, Homo sapien
tcttcatcactgcctcagtgttctc

SEQ ID NO: 2260716 - DNA, 25 bp, Homo sapien
gaaaattgggaggacaccctcgctg

SEQ ID NO: 2260717 - DNA, 25 bp, Homo sapien
tggcgacccgagctaagagatgttt

SEQ ID NO: 2260718 - DNA, 25 bp, Homo sapien
tggagcacccgcatgattgacagag

SEQ ID NO: 2260719 - DNA, 25 bp, Homo sapien
gctttagggcgtcaaggcactgctc

SEQ ID NO: 2260720 - DNA, 25 bp, Homo sapien
actttcagtttcctgtaccacatac

SEQ ID NO: 2260721 - DNA, 25 bp, Homo sapien
agcagttcccgaaaacactttcagt

SEQ ID NO: 2260722 - DNA, 25 bp, Homo sapien
ctgggctaggggaagcagttcccga

SEQ ID NO: 2260723 - DNA, 25 bp, Homo sapien
gaagcagttcccgaaaacactttca

SEQ ID NO: 2260724 - DNA, 25 bp, Homo sapien
catccaggctctcggcagggaggct

SEQ ID NO: 2260725 - DNA, 25 bp, Homo sapien
cggaggctctaaaggtggggatcta

SEQ ID NO: 2260726 - DNA, 25 bp, Homo sapien
tggggatctaacttggggcatgacc

SEQ ID NO: 2260727 - DNA, 25 bp, Homo sapien
ggaggctgcaacatcccagggctct

SEQ ID NO: 2260728 - DNA, 25 bp, Homo sapien
taagcctgccttcacagtgtcctga

SEQ ID NO: 2260729 - DNA, 25 bp, Homo sapien
tccctaggaccctgtatgcgcacag

SEQ ID NO: 2260730 - DNA, 25 bp, Homo sapien
gagtagtgtaattgacagtgtcagc

SEQ ID NO: 2260731 - DNA, 25 bp, Homo sapien
gcaccaatcctctagcagtgtcagt

SEQ ID NO: 2260732 - DNA, 25 bp, Homo sapien
gaagtggtcccaggtttcacacagc

SEQ ID NO: 2260733 - DNA, 25 bp, Homo sapien
tatggactgatctaatactagggca

SEQ ID NO: 2260734 - DNA, 25 bp, Homo sapien
gtttgacagcactcaaataactctg

SEQ ID NO: 2260735 - DNA, 25 bp, Homo sapien
cactgccacgtaggaaggcagaagt

SEQ ID NO: 2260736 - DNA, 25 bp, Homo sapien
tgtgggttcttcctcaaagtccaga

SEQ ID NO: 2260737 - DNA, 25 bp, Homo sapien
actctgctgtgtgtgcttcgggtgc

SEQ ID NO: 2260738 - DNA, 25 bp, Homo sapien
ggactctgctgtgtgtgcttcgggt

SEQ ID NO: 2260739 - DNA, 25 bp, Homo sapien
tcctgctgtgggttcttcctcaaag

SEQ ID NO: 2260740 - DNA, 25 bp, Homo sapien
ctgtagtgaaaaggccaacgtcagg

SEQ ID NO: 2260741 - DNA, 25 bp, Homo sapien
ggtagagtggccctctttctcagga

SEQ ID NO: 2260742 - DNA, 25 bp, Homo sapien
caggaatgcctgacggatgagaaag

SEQ ID NO: 2260743 - DNA, 25 bp, Homo sapien
gggcaggagacagcctcactgctca

SEQ ID NO: 2260744 - DNA, 25 bp, Homo sapien
cgtgatgggtcctgcttcactggat

SEQ ID NO: 2260745 - DNA, 25 bp, Homo sapien
gccacttcagactcgctctgctttt

SEQ ID NO: 2260746 - DNA, 25 bp, Homo sapien
caactctatccagttaggcagttcc

SEQ ID NO: 2260747 - DNA, 25 bp, Homo sapien
cagcgcggatgctgcaataacacag

SEQ ID NO: 2260748 - DNA, 25 bp, Homo sapien
ttcccccgtaatctgggttgctgtc

SEQ ID NO: 2260749 - DNA, 25 bp, Homo sapien
cgtaatctgggttgctgtccgagcc

SEQ ID NO: 2260750 - DNA, 25 bp, Homo sapien
cccgtaatctgggttgctgtccgag

SEQ ID NO: 2260751 - DNA, 25 bp, Homo sapien
aatctgggttgctgtccgagcccgg

SEQ ID NO: 2260752 - DNA, 25 bp, Homo sapien
aggtgcctccaagccggagttcccg

SEQ ID NO: 2260753 - DNA, 25 bp, Homo sapien
cgcagcgcgaccaccacacgtctat

SEQ ID NO: 2260754 - DNA, 25 bp, Homo sapien
accacacgtctatggcggctgccgc

SEQ ID NO: 2260755 - DNA, 25 bp, Homo sapien
cctccgtgctgactgcgccacgagg

SEQ ID NO: 2260756 - DNA, 25 bp, Homo sapien
tgccgacgacggtggcagccaggct

SEQ ID NO: 2260757 - DNA, 25 bp, Homo sapien
gtggcagccaggctcgccacgtgcc

SEQ ID NO: 2260758 - DNA, 25 bp, Homo sapien
tcgccacgtgccatttggcccagca

SEQ ID NO: 2260759 - DNA, 25 bp, Homo sapien
cccgtgccgacgacggtggcagcca

SEQ ID NO: 2260760 - DNA, 25 bp, Homo sapien
agggaaggtcctgcggcttgcagcg

SEQ ID NO: 2260761 - DNA, 25 bp, Homo sapien
agagggaaggtcctgcggcttgcag

SEQ ID NO: 2260762 - DNA, 25 bp, Homo sapien
tgcggcttgcagcggcccgaaagta

SEQ ID NO: 2260763 - DNA, 25 bp, Homo sapien
aaggtcctgcggcttgcagcggccc

SEQ ID NO: 2260764 - DNA, 25 bp, Homo sapien
caattaacttagttaacacgtcctg

SEQ ID NO: 2260765 - DNA, 25 bp, Homo sapien
ttctggtggcacctcaatgtccaat

SEQ ID NO: 2260766 - DNA, 25 bp, Homo sapien
tcctgtcccaacgaagggactgggc

SEQ ID NO: 2260767 - DNA, 25 bp, Homo sapien
tcccagagcaaaggttactgtggca

SEQ ID NO: 2260768 - DNA, 25 bp, Homo sapien
ctgtggcctgagcttgtttcgcagg

SEQ ID NO: 2260769 - DNA, 25 bp, Homo sapien
agcttgtttcgcagggagccctggc

SEQ ID NO: 2260770 - DNA, 25 bp, Homo sapien
tgccccttcccacgctcaaggtctg

SEQ ID NO: 2260771 - DNA, 25 bp, Homo sapien
gggtgaccgcgcgtggaccgtcgcc

SEQ ID NO: 2260772 - DNA, 25 bp, Homo sapien
tcagaaagccactgtaaaacccaat

SEQ ID NO: 2260773 - DNA, 25 bp, Homo sapien
agaaagccactgtaaaacccaatga

SEQ ID NO: 2260774 - DNA, 25 bp, Homo sapien
ctacttcaatggactaccaaaaatc

SEQ ID NO: 2260775 - DNA, 25 bp, Homo sapien
gccactgtaaaacccaatgaagact

SEQ ID NO: 2260776 - DNA, 25 bp, Homo sapien
tctttaggcttagactctggctttg

SEQ ID NO: 2260777 - DNA, 25 bp, Homo sapien
cctctttaggcttagactctggctt

SEQ ID NO: 2260778 - DNA, 25 bp, Homo sapien
gcaggggcctctttaggcttagact

SEQ ID NO: 2260779 - DNA, 25 bp, Homo sapien
ggcctctttaggcttagactctggc

SEQ ID NO: 2260780 - DNA, 25 bp, Homo sapien
gtggtgatagtggcgggacataggc

SEQ ID NO: 2260781 - DNA, 25 bp, Homo sapien
ggtggtgatagtggcgggacatagg

SEQ ID NO: 2260782 - DNA, 25 bp, Homo sapien
tggtgatagtggcgggacataggct

SEQ ID NO: 2260783 - DNA, 25 bp, Homo sapien
tggtggtgatagtggcgggacatag

SEQ ID NO: 2260784 - DNA, 25 bp, Homo sapien
ttccacccctgcaagttgggcagat

SEQ ID NO: 2260785 - DNA, 25 bp, Homo sapien
gatgaaggttcagtttgaagctggt

SEQ ID NO: 2260786 - DNA, 25 bp, Homo sapien
tgaccttgggccagtagtgtccctt

SEQ ID NO: 2260787 - DNA, 25 bp, Homo sapien
ccttgggccagtagtgtcccttctc

SEQ ID NO: 2260788 - DNA, 25 bp, Homo sapien
gcgctttggccggagggcctcaggt

SEQ ID NO: 2260789 - DNA, 25 bp, Homo sapien
gctttggccggagggcctcaggtcc

SEQ ID NO: 2260790 - DNA, 25 bp, Homo sapien
ctgggcagcgaagcgctttggccgg

SEQ ID NO: 2260791 - DNA, 25 bp, Homo sapien
gcgaagcgctttggccggagggcct

SEQ ID NO: 2260792 - DNA, 25 bp, Homo sapien
cagccagaggaccagtcctggacgg

SEQ ID NO: 2260793 - DNA, 25 bp, Homo sapien
tggggcatctcctgcacggaatggc

SEQ ID NO: 2260794 - DNA, 25 bp, Homo sapien
gcctggggcatctcctgcacggaat

SEQ ID NO: 2260795 - DNA, 25 bp, Homo sapien
ggcatctcctgcacggaatggcacc

SEQ ID NO: 2260796 - DNA, 25 bp, Homo sapien
gccctatcagaactgaagcagcctg

SEQ ID NO: 2260797 - DNA, 25 bp, Homo sapien
gcctgtccgccctatcagaactgaa

SEQ ID NO: 2260798 - DNA, 25 bp, Homo sapien
tgtccgccctatcagaactgaagca

SEQ ID NO: 2260799 - DNA, 25 bp, Homo sapien
cctatcagaactgaagcagcctgca

SEQ ID NO: 2260800 - DNA, 25 bp, Homo sapien
ccgccgccgcagcggcgcgcagccc

SEQ ID NO: 2260801 - DNA, 25 bp, Homo sapien
cgccgccgcagcggcgcgcagcccc

SEQ ID NO: 2260802 - DNA, 25 bp, Homo sapien
agcggcgcgcagcccccgacgcgcc

SEQ ID NO: 2260803 - DNA, 25 bp, Homo sapien
cgcagcggcgcgcagcccccgacgc

SEQ ID NO: 2260804 - DNA, 25 bp, Homo sapien
cctctactttagtgctggctctggc

SEQ ID NO: 2260805 - DNA, 25 bp, Homo sapien
tgggaccgcctctactttagtgctg

SEQ ID NO: 2260806 - DNA, 25 bp, Homo sapien
tcctgggaccgcctctactttagtg

SEQ ID NO: 2260807 - DNA, 25 bp, Homo sapien
gaccgcctctactttagtgctggct

SEQ ID NO: 2260808 - DNA, 25 bp, Homo sapien
acttcacccggatggtcgcctggga

SEQ ID NO: 2260809 - DNA, 25 bp, Homo sapien
tcgcctgggactcgttgtctccaaa

SEQ ID NO: 2260810 - DNA, 25 bp, Homo sapien
gccgcaacacgaaagctgagagacg

SEQ ID NO: 2260811 - DNA, 25 bp, Homo sapien
ccagaggctcagtaaggtgggccct

SEQ ID NO: 2260812 - DNA, 25 bp, Homo sapien
ggttctccgccaggagcgcgtgcac

SEQ ID NO: 2260813 - DNA, 25 bp, Homo sapien
tgtggtctagccagacctcaaagga

SEQ ID NO: 2260814 - DNA, 25 bp, Homo sapien
tgccacacatgcagcatttcggtgg

SEQ ID NO: 2260815 - DNA, 25 bp, Homo sapien
tgcagggcggtcccacgcaagcctt

SEQ ID NO: 2260816 - DNA, 25 bp, Homo sapien
aacacgcgaccgagaccgagaaact

SEQ ID NO: 2260817 - DNA, 25 bp, Homo sapien
tgaccgatggatcgcagccagcaca

SEQ ID NO: 2260818 - DNA, 25 bp, Homo sapien
ttgctccgggaagtggaacacgcga

SEQ ID NO: 2260819 - DNA, 25 bp, Homo sapien
cgagaaactcctcgcctgagcaacg

SEQ ID NO: 2260820 - DNA, 25 bp, Homo sapien
gagggactcttggaattcggcatca

SEQ ID NO: 2260821 - DNA, 25 bp, Homo sapien
gaaacgctttgcctagcactgtaaa

SEQ ID NO: 2260822 - DNA, 25 bp, Homo sapien
aaagcatagttgacttcccggtcga

SEQ ID NO: 2260823 - DNA, 25 bp, Homo sapien
aaagtgtcccataggcctcagggca

SEQ ID NO: 2260824 - DNA, 25 bp, Homo sapien
caggatagggttcccagcgcggacc

SEQ ID NO: 2260825 - DNA, 25 bp, Homo sapien
gcccgcgattctggccagtgccggg

SEQ ID NO: 2260826 - DNA, 25 bp, Homo sapien
ccgggctgacacgaggggcaggata

SEQ ID NO: 2260827 - DNA, 25 bp, Homo sapien
tcccagcgcggaccagggtggcacg

SEQ ID NO: 2260828 - DNA, 25 bp, Homo sapien
gagcgggcgagagcgaggttaatgc

SEQ ID NO: 2260829 - DNA, 25 bp, Homo sapien
agcgggcgagagcgaggttaatgcc

SEQ ID NO: 2260830 - DNA, 25 bp, Homo sapien
gcgggcgagagcgaggttaatgccc

SEQ ID NO: 2260831 - DNA, 25 bp, Homo sapien
ctccccgcgcgggcgttccctctga

SEQ ID NO: 2260832 - DNA, 25 bp, Homo sapien
cgcgcgggcgttccctctgactgtg

SEQ ID NO: 2260833 - DNA, 25 bp, Homo sapien
cacagggcgcgtcgggggctgcgcg

SEQ ID NO: 2260834 - DNA, 25 bp, Homo sapien
cccacagggcgcgtcgggggctgcg

SEQ ID NO: 2260835 - DNA, 25 bp, Homo sapien
gcagcctccgctcaaaacagagatt

SEQ ID NO: 2260836 - DNA, 25 bp, Homo sapien
agggcctgagtcagccttccatagg

SEQ ID NO: 2260837 - DNA, 25 bp, Homo sapien
tccctggagacctccgtctgtcagg

SEQ ID NO: 2260838 - DNA, 25 bp, Homo sapien
gattctgcgcccgtggatctgacca

SEQ ID NO: 2260839 - DNA, 25 bp, Homo sapien
gacaaatagagctgtggagggccac

SEQ ID NO: 2260840 - DNA, 25 bp, Homo sapien
caaaggctgttgcaacctgacacaa

SEQ ID NO: 2260841 - DNA, 25 bp, Homo sapien
gggttcccatgcacgaatgcctgat

SEQ ID NO: 2260842 - DNA, 25 bp, Homo sapien
caaataatacttctgtgaggacacc

SEQ ID NO: 2260843 - DNA, 25 bp, Homo sapien
cagctaaagcatgttggtggccaat

SEQ ID NO: 2260844 - DNA, 25 bp, Homo sapien
taaagttcaccatgggcatccagac

SEQ ID NO: 2260845 - DNA, 25 bp, Homo sapien
tagcagacagcgatgggtaacaagt

SEQ ID NO: 2260846 - DNA, 25 bp, Homo sapien
catcagtgctagacagaaggatctc

SEQ ID NO: 2260847 - DNA, 25 bp, Homo sapien
gagccatgattgaagccctcttagg

SEQ ID NO: 2260848 - DNA, 25 bp, Homo sapien
gatatgtccccgagtgaactgggag

SEQ ID NO: 2260849 - DNA, 25 bp, Homo sapien
tgagccatgattgaagccctcttag

SEQ ID NO: 2260850 - DNA, 25 bp, Homo sapien
agttctcacatctgcggatatgtcc

SEQ ID NO: 2260851 - DNA, 25 bp, Homo sapien
catcagcaccaattcatgtgcccag

SEQ ID NO: 2260852 - DNA, 25 bp, Homo sapien
caccaattcatgtgcccaggactgt

SEQ ID NO: 2260853 - DNA, 25 bp, Homo sapien
agcatcagcaccaattcatgtgccc

SEQ ID NO: 2260854 - DNA, 25 bp, Homo sapien
agcaccaattcatgtgcccaggact

SEQ ID NO: 2260855 - DNA, 25 bp, Homo sapien
acagacagacagatgtcaccacacc

SEQ ID NO: 2260856 - DNA, 25 bp, Homo sapien
cagacagatgtcaccacaccacggg

SEQ ID NO: 2260857 - DNA, 25 bp, Homo sapien
gacagacagatgtcaccacaccacg

SEQ ID NO: 2260858 - DNA, 25 bp, Homo sapien
gacagacagacagatgtcaccacac

SEQ ID NO: 2260859 - DNA, 25 bp, Homo sapien
tactcatctaagtggatggcaatct

SEQ ID NO: 2260860 - DNA, 25 bp, Homo sapien
ccagtgcaaattattggccctgggt

SEQ ID NO: 2260861 - DNA, 25 bp, Homo sapien
caatctgttgacagaggccccgagc

SEQ ID NO: 2260862 - DNA, 25 bp, Homo sapien
ctctctgtatcccagtgcaaattat

SEQ ID NO: 2260863 - DNA, 25 bp, Homo sapien
cagttgctgtctgctaacgactctc

SEQ ID NO: 2260864 - DNA, 25 bp, Homo sapien
tcagttgctgtctgctaacgactct

SEQ ID NO: 2260865 - DNA, 25 bp, Homo sapien
gacgccaataagtacaggacactga

SEQ ID NO: 2260866 - DNA, 25 bp, Homo sapien
tcaagtgaaatacgttgttcactgg

SEQ ID NO: 2260867 - DNA, 25 bp, Homo sapien
tgaaatgatttgcaccaacgaatac

SEQ ID NO: 2260868 - DNA, 25 bp, Homo sapien
gaaatacgttgttcactggagacgc

SEQ ID NO: 2260869 - DNA, 25 bp, Homo sapien
aaagaccccgtttcatgcatgtcag

SEQ ID NO: 2260870 - DNA, 25 bp, Homo sapien
tgttgctgcaagcttttgtatatgt

SEQ ID NO: 2260871 - DNA, 25 bp, Homo sapien
tctgttcttggtgttgctgcaagct

SEQ ID NO: 2260872 - DNA, 25 bp, Homo sapien
tctctttgcagaaagaccccgtttc

SEQ ID NO: 2260873 - DNA, 25 bp, Homo sapien
aaatctggttgaacgtacaaagttg

SEQ ID NO: 2260874 - DNA, 25 bp, Homo sapien
tgtgttcttatcatctttaggattg

SEQ ID NO: 2260875 - DNA, 25 bp, Homo sapien
ctggaaatctggttgaacgtacaaa

SEQ ID NO: 2260876 - DNA, 25 bp, Homo sapien
ctggttgaacgtacaaagttgagta

SEQ ID NO: 2260877 - DNA, 25 bp, Homo sapien
ggctccatctggacaggcacagcac

SEQ ID NO: 2260878 - DNA, 25 bp, Homo sapien
aaggctccatctggacaggcacagc

SEQ ID NO: 2260879 - DNA, 25 bp, Homo sapien
gcaaaggctccatctggacaggcac

SEQ ID NO: 2260880 - DNA, 25 bp, Homo sapien
caaaggctccatctggacaggcaca

SEQ ID NO: 2260881 - DNA, 25 bp, Homo sapien
catactgcacatggaccccgtcctc

SEQ ID NO: 2260882 - DNA, 25 bp, Homo sapien
acatggaccccgtcctccacactct

SEQ ID NO: 2260883 - DNA, 25 bp, Homo sapien
cacatggaccccgtcctccacactc

SEQ ID NO: 2260884 - DNA, 25 bp, Homo sapien
atctacatactgcacatggaccccg

SEQ ID NO: 2260885 - DNA, 25 bp, Homo sapien
agagggctactacggacgcctcctc

SEQ ID NO: 2260886 - DNA, 25 bp, Homo sapien
tattgagagggctactacggacgcc

SEQ ID NO: 2260887 - DNA, 25 bp, Homo sapien
gaaacttctattgagagggctacta

SEQ ID NO: 2260888 - DNA, 25 bp, Homo sapien
tcccgtggaaacttctattgagagg

SEQ ID NO: 2260889 - DNA, 25 bp, Homo sapien
gaattgactatctcttaatttcttt

SEQ ID NO: 2260890 - DNA, 25 bp, Homo sapien
tatacacagaactgtgtgactgctg

SEQ ID NO: 2260891 - DNA, 25 bp, Homo sapien
aagaattgactatctcttaatttct

SEQ ID NO: 2260892 - DNA, 25 bp, Homo sapien
aacactgaccgctctcttcagagtg

SEQ ID NO: 2260893 - DNA, 25 bp, Homo sapien
ggaagaaaaagcgaactcttgcact

SEQ ID NO: 2260894 - DNA, 25 bp, Homo sapien
gatgggaagaaaaagcgaactcttg

SEQ ID NO: 2260895 - DNA, 25 bp, Homo sapien
tgggaagaaaaagcgaactcttgca

SEQ ID NO: 2260896 - DNA, 25 bp, Homo sapien
aagaaaaagcgaactcttgcactga

SEQ ID NO: 2260897 - DNA, 25 bp, Homo sapien
gactccaggatacaagaggtgcttg

SEQ ID NO: 2260898 - DNA, 25 bp, Homo sapien
atagcgtgcgggatcactgtccggc

SEQ ID NO: 2260899 - DNA, 25 bp, Homo sapien
tccattgcaatcatgaccaggacaa

SEQ ID NO: 2260900 - DNA, 25 bp, Homo sapien
gtgattactgctcggaacaaggact

SEQ ID NO: 2260901 - DNA, 25 bp, Homo sapien
aggatctgttgacccagcagtgggc

SEQ ID NO: 2260902 - DNA, 25 bp, Homo sapien
ctgtcgagtgaagttgatggtagtg

SEQ ID NO: 2260903 - DNA, 25 bp, Homo sapien
gttgatggtagtgggaaaggcggag

SEQ ID NO: 2260904 - DNA, 25 bp, Homo sapien
gggaggatctgttgacccagcagtg

SEQ ID NO: 2260905 - DNA, 25 bp, Homo sapien
gatgactctcgtcagggcagcaggc

SEQ ID NO: 2260906 - DNA, 25 bp, Homo sapien
gcaggagctgggcaatgaagaccca

SEQ ID NO: 2260907 - DNA, 25 bp, Homo sapien
agcaggcaggagtgtgggcaggagc

SEQ ID NO: 2260908 - DNA, 25 bp, Homo sapien
gggcaggagctgggcaatgaagacc

SEQ ID NO: 2260909 - DNA, 25 bp, Homo sapien
tggcctccagggaatcctgtcctct

SEQ ID NO: 2260910 - DNA, 25 bp, Homo sapien
ccagggaatcctgtcctctgggttg

SEQ ID NO: 2260911 - DNA, 25 bp, Homo sapien
tcctgtcctctgggttggcctgtcc

SEQ ID NO: 2260912 - DNA, 25 bp, Homo sapien
tctgtggcctccagggaatcctgtc

SEQ ID NO: 2260913 - DNA, 25 bp, Homo sapien
tgatcccaggataacggaaggacct

SEQ ID NO: 2260914 - DNA, 25 bp, Homo sapien
tcaatgatcccaggataacggaagg

SEQ ID NO: 2260915 - DNA, 25 bp, Homo sapien
ataacggaaggacctcggcagacgg

SEQ ID NO: 2260916 - DNA, 25 bp, Homo sapien
ccaggataacggaaggacctcggca

SEQ ID NO: 2260917 - DNA, 25 bp, Homo sapien
ggtgaggattccaatagccttgtct

SEQ ID NO: 2260918 - DNA, 25 bp, Homo sapien
gaggattccaatagccttgtctgtc

SEQ ID NO: 2260919 - DNA, 25 bp, Homo sapien
ttccaatagccttgtctgtctcact

SEQ ID NO: 2260920 - DNA, 25 bp, Homo sapien
gattccaatagccttgtctgtctca

SEQ ID NO: 2260921 - DNA, 25 bp, Homo sapien
gcctgggtcaggttccttcggccga

SEQ ID NO: 2260922 - DNA, 25 bp, Homo sapien
ggccgaactctacgccgtccctcag

SEQ ID NO: 2260923 - DNA, 25 bp, Homo sapien
gtcaggttccttcggccgaactcta

SEQ ID NO: 2260924 - DNA, 25 bp, Homo sapien
agagcctgggtcaggttccttcggc

SEQ ID NO: 2260925 - DNA, 25 bp, Homo sapien
agaattcctcacataatgcattaaa

SEQ ID NO: 2260926 - DNA, 25 bp, Homo sapien
ctgtaagaattcctcacataatgca

SEQ ID NO: 2260927 - DNA, 25 bp, Homo sapien
taagaattcctcacataatgcatta

SEQ ID NO: 2260928 - DNA, 25 bp, Homo sapien
tgtaagaattcctcacataatgcat

SEQ ID NO: 2260929 - DNA, 25 bp, Homo sapien
tcccgggtatgccaagcaagttcaa

SEQ ID NO: 2260930 - DNA, 25 bp, Homo sapien
gattttcgtggaagcattgatattc

SEQ ID NO: 2260931 - DNA, 25 bp, Homo sapien
gtatgccaagcaagttcaatttcct

SEQ ID NO: 2260932 - DNA, 25 bp, Homo sapien
ctgctgaatgattttcgtggaagca

SEQ ID NO: 2260933 - DNA, 25 bp, Homo sapien
cattaaacacattaccacatgtctt

SEQ ID NO: 2260934 - DNA, 25 bp, Homo sapien
tactttcgggatggctgtgcattcc

SEQ ID NO: 2260935 - DNA, 25 bp, Homo sapien
gtgcattcctgaattccgtgctgca

SEQ ID NO: 2260936 - DNA, 25 bp, Homo sapien
taggaggcacaattacattaaacac

SEQ ID NO: 2260937 - DNA, 25 bp, Homo sapien
cagcagacccccggtgaccaagggt

SEQ ID NO: 2260938 - DNA, 25 bp, Homo sapien
ctgcctggacgcccagcagaccccc

SEQ ID NO: 2260939 - DNA, 25 bp, Homo sapien
gcctggacgcccagcagacccccgg

SEQ ID NO: 2260940 - DNA, 25 bp, Homo sapien
cccagcagacccccggtgaccaagg

SEQ ID NO: 2260941 - DNA, 25 bp, Homo sapien
taaaaccacggtagagaggtgcaga

SEQ ID NO: 2260942 - DNA, 25 bp, Homo sapien
gcttcctgggaagcacaggtccata

SEQ ID NO: 2260943 - DNA, 25 bp, Homo sapien
taatcaccaggatgatcgccacgca

SEQ ID NO: 2260944 - DNA, 25 bp, Homo sapien
taagagtcactgatttggtgtcggc

SEQ ID NO: 2260945 - DNA, 25 bp, Homo sapien
cacgaaaggatgctttcctgataca

SEQ ID NO: 2260946 - DNA, 25 bp, Homo sapien
catgttgcagcatactccagaattg

SEQ ID NO: 2260947 - DNA, 25 bp, Homo sapien
gctctccctttaccatgttgcagca

SEQ ID NO: 2260948 - DNA, 25 bp, Homo sapien
actgagcagggtgcttcgcgtttca

SEQ ID NO: 2260949 - DNA, 25 bp, Homo sapien
gacaccataggaaaactacaggcaa

SEQ ID NO: 2260950 - DNA, 25 bp, Homo sapien
gcaatgacccttatgaaaacaaagt

SEQ ID NO: 2260951 - DNA, 25 bp, Homo sapien
gaggccaacattaccatgacactaa

SEQ ID NO: 2260952 - DNA, 25 bp, Homo sapien
gggagtcttcccaactccttctatg

SEQ ID NO: 2260953 - DNA, 25 bp, Homo sapien
gaaggtgagctctatgttatttcca

SEQ ID NO: 2260954 - DNA, 25 bp, Homo sapien
tgttatttccatgatgatactttgt

SEQ ID NO: 2260955 - DNA, 25 bp, Homo sapien
tggagcctgacttccgaaggtgagc

SEQ ID NO: 2260956 - DNA, 25 bp, Homo sapien
tgatactttgtcattgtaataggac

SEQ ID NO: 2260957 - DNA, 25 bp, Homo sapien
gattcgagaacctgaagacgctggc

SEQ ID NO: 2260958 - DNA, 25 bp, Homo sapien
ggacttccaccaccgggattcgaga

SEQ ID NO: 2260959 - DNA, 25 bp, Homo sapien
cagaggcgaggctctcggtatccag

SEQ ID NO: 2260960 - DNA, 25 bp, Homo sapien
agagagtcaccaggcgccaatgtct

SEQ ID NO: 2260961 - DNA, 25 bp, Homo sapien
ctggaggtggcaccataggcccaca

SEQ ID NO: 2260962 - DNA, 25 bp, Homo sapien
caaaggccacttgcccgttctgtgt

SEQ ID NO: 2260963 - DNA, 25 bp, Homo sapien
gatgtttcatgggatagtaagtacc

SEQ ID NO: 2260964 - DNA, 25 bp, Homo sapien
aggtcagtggtccacggaaaggaat

SEQ ID NO: 2260965 - DNA, 25 bp, Homo sapien
gacgtcgggagtccagaaaggccac

SEQ ID NO: 2260966 - DNA, 25 bp, Homo sapien
tggacgtcgggagtccagaaaggcc

SEQ ID NO: 2260967 - DNA, 25 bp, Homo sapien
ggaacaggtggacgtcgggagtcca

SEQ ID NO: 2260968 - DNA, 25 bp, Homo sapien
acaggtggacgtcgggagtccagaa

SEQ ID NO: 2260969 - DNA, 25 bp, Homo sapien
cttacaaggtagtgaatcgacaggt

SEQ ID NO: 2260970 - DNA, 25 bp, Homo sapien
aaggtagtgaatcgacaggttctca

SEQ ID NO: 2260971 - DNA, 25 bp, Homo sapien
caaggtagtgaatcgacaggttctc

SEQ ID NO: 2260972 - DNA, 25 bp, Homo sapien
tacaaggtagtgaatcgacaggttc

SEQ ID NO: 2260973 - DNA, 25 bp, Homo sapien
tcacgggcaccatcgtggtcatgct

SEQ ID NO: 2260974 - DNA, 25 bp, Homo sapien
tgctcaccatagcagtcacaggatg

SEQ ID NO: 2260975 - DNA, 25 bp, Homo sapien
tggtcaccatcatggtcacgggcac

SEQ ID NO: 2260976 - DNA, 25 bp, Homo sapien
gatgagcgtccatcgtgccctggcg

SEQ ID NO: 2260977 - DNA, 25 bp, Homo sapien
tctgctgttcggacgcgtgggtcac

SEQ ID NO: 2260978 - DNA, 25 bp, Homo sapien
agtgggcgtctgctgttcggacgcg

SEQ ID NO: 2260979 - DNA, 25 bp, Homo sapien
gaacaatggctagcggtgggtgagt

SEQ ID NO: 2260980 - DNA, 25 bp, Homo sapien
ggtgagtgggcgtctgctgttcgga

SEQ ID NO: 2260981 - DNA, 25 bp, Homo sapien
tctgactcctctaagatgggcttga

SEQ ID NO: 2260982 - DNA, 25 bp, Homo sapien
gggccatgtcgactgcactgcccat

SEQ ID NO: 2260983 - DNA, 25 bp, Homo sapien
cgttttctgactcctctaagatggg

SEQ ID NO: 2260984 - DNA, 25 bp, Homo sapien
ctcctctaagatgggcttgagcccc

SEQ ID NO: 2260985 - DNA, 25 bp, Homo sapien
cctctttggtggtggaagcagcctc

SEQ ID NO: 2260986 - DNA, 25 bp, Homo sapien
ctctttggtggtggaagcagcctca

SEQ ID NO: 2260987 - DNA, 25 bp, Homo sapien
ggtcaggaacttcatccgcgaggtc

SEQ ID NO: 2260988 - DNA, 25 bp, Homo sapien
atgtatcccggctcctaaacacctg

SEQ ID NO: 2260989 - DNA, 25 bp, Homo sapien
tcctgcgcagagaagtctggatctt

SEQ ID NO: 2260990 - DNA, 25 bp, Homo sapien
agcacctgccgcagtcgcaggtggt

SEQ ID NO: 2260991 - DNA, 25 bp, Homo sapien
acctgcacctctggccactgcttgc

SEQ ID NO: 2260992 - DNA, 25 bp, Homo sapien
ctgcttcacctgcacctctggccac

SEQ ID NO: 2260993 - DNA, 25 bp, Homo sapien
tgcacctctggccactgcttgcccc

SEQ ID NO: 2260994 - DNA, 25 bp, Homo sapien
ttcacctgcacctctggccactgct

SEQ ID NO: 2260995 - DNA, 25 bp, Homo sapien
cacggcctcctggaactcatgttcc

SEQ ID NO: 2260996 - DNA, 25 bp, Homo sapien
acggcctcctggaactcatgttcct

SEQ ID NO: 2260997 - DNA, 25 bp, Homo sapien
cttgagggagggagcctgatcagac

SEQ ID NO: 2260998 - DNA, 25 bp, Homo sapien
gctgactgttgcagtctctgacgca

SEQ ID NO: 2260999 - DNA, 25 bp, Homo sapien
ctgactgttgcagtctctgacgcag

SEQ ID NO: 2261000 - DNA, 25 bp, Homo sapien
agggagcctgatcagacaggaatgt

SEQ ID NO: 2261001 - DNA, 25 bp, Homo sapien
gctggaggccggccttcaaccacct

SEQ ID NO: 2261002 - DNA, 25 bp, Homo sapien
ctggaggccggccttcaaccacctg

SEQ ID NO: 2261003 - DNA, 25 bp, Homo sapien
tggaggccggccttcaaccacctgg

SEQ ID NO: 2261004 - DNA, 25 bp, Homo sapien
cggggctgttagctcggctgggcac

SEQ ID NO: 2261005 - DNA, 25 bp, Homo sapien
acgggcggctccgtggcgcttcctg

SEQ ID NO: 2261006 - DNA, 25 bp, Homo sapien
ctgggtgagtgtgcgggccgcggga

SEQ ID NO: 2261007 - DNA, 25 bp, Homo sapien
ccgctccaccgagggccgcgcgtcg

SEQ ID NO: 2261008 - DNA, 25 bp, Homo sapien
ccactcgcctgccgcccaaagtcca

SEQ ID NO: 2261009 - DNA, 25 bp, Homo sapien
ccccactcgcctgccgcccaaagtc

SEQ ID NO: 2261010 - DNA, 25 bp, Homo sapien
cactcgcctgccgcccaaagtccat

SEQ ID NO: 2261011 - DNA, 25 bp, Homo sapien
cccccactcgcctgccgcccaaagt

SEQ ID NO: 2261012 - DNA, 25 bp, Homo sapien
taacgtgtgtcctgtaatttcgcca

SEQ ID NO: 2261013 - DNA, 25 bp, Homo sapien
gatgcaaaatgtcacccagcttcct

SEQ ID NO: 2261014 - DNA, 25 bp, Homo sapien
cataaagtcgtcactgctcccagct

SEQ ID NO: 2261015 - DNA, 25 bp, Homo sapien
taactcagaacgtagcataaagtcg

SEQ ID NO: 2261016 - DNA, 25 bp, Homo sapien
aattgcagcgggcatgtttttgagt

SEQ ID NO: 2261017 - DNA, 25 bp, Homo sapien
cagcacattaactgcctggcatgga

SEQ ID NO: 2261018 - DNA, 25 bp, Homo sapien
gaatagtccctacccaattgcagcg

SEQ ID NO: 2261019 - DNA, 25 bp, Homo sapien
tgtgtccattagctgtgtcacccca

SEQ ID NO: 2261020 - DNA, 25 bp, Homo sapien
tgagaacaatagctatgtcccaccc

SEQ ID NO: 2261021 - DNA, 25 bp, Homo sapien
gtctctttaaacttggccctcaatg

SEQ ID NO: 2261022 - DNA, 25 bp, Homo sapien
gtcatttgcgtatctctgagaacaa

SEQ ID NO: 2261023 - DNA, 25 bp, Homo sapien
tataatcagccttgcactagagctg

SEQ ID NO: 2261024 - DNA, 25 bp, Homo sapien
ccatggcattgtccatgatgctgct

SEQ ID NO: 2261025 - DNA, 25 bp, Homo sapien
gaactggtgcacttggaggattctg

SEQ ID NO: 2261026 - DNA, 25 bp, Homo sapien
ccagggtgtcctcgggctttacaca

SEQ ID NO: 2261027 - DNA, 25 bp, Homo sapien
cagagcccatggcattgtccatgat

SEQ ID NO: 2261028 - DNA, 25 bp, Homo sapien
ggcaggtgcctggagaatggggatg

SEQ ID NO: 2261029 - DNA, 25 bp, Homo sapien
gtacaacccgcattggtttgcaaag

SEQ ID NO: 2261030 - DNA, 25 bp, Homo sapien
aaggcactggatttcaccagcatct

SEQ ID NO: 2261031 - DNA, 25 bp, Homo sapien
tcgtccgcatcatctgaccgggatg

SEQ ID NO: 2261032 - DNA, 25 bp, Homo sapien
cgctgttgccaacgtatgtgtacaa

SEQ ID NO: 2261033 - DNA, 25 bp, Homo sapien
tagttcttgtggatcctcacgcagc

SEQ ID NO: 2261034 - DNA, 25 bp, Homo sapien
ctgccttttgccaggacagtggact

SEQ ID NO: 2261035 - DNA, 25 bp, Homo sapien
ggttcctggcaaggcacgtcatctg

SEQ ID NO: 2261036 - DNA, 25 bp, Homo sapien
ggtgaaacgccaaagcatagttctt

SEQ ID NO: 2261037 - DNA, 25 bp, Homo sapien
gggacctctatgggccttgcctgac

SEQ ID NO: 2261038 - DNA, 25 bp, Homo sapien
ctggaccccagctaagacctcttgg

SEQ ID NO: 2261039 - DNA, 25 bp, Homo sapien
tcatcctcgttttccggctcctcca

SEQ ID NO: 2261040 - DNA, 25 bp, Homo sapien
cagacagcactgctcatccgggctg

SEQ ID NO: 2261041 - DNA, 25 bp, Homo sapien
accagcctcgctggcattcccctgg

SEQ ID NO: 2261042 - DNA, 25 bp, Homo sapien
agcggcctcggcagcatcttctgct

SEQ ID NO: 2261043 - DNA, 25 bp, Homo sapien
gaccagcctcgctggcattcccctg

SEQ ID NO: 2261044 - DNA, 25 bp, Homo sapien
gggcactttcaccttccccagcggc

SEQ ID NO: 2261045 - DNA, 25 bp, Homo sapien
atctcccggatgagccggagcagcc

SEQ ID NO: 2261046 - DNA, 25 bp, Homo sapien
tcagggtatcctggagtgcctcgct

SEQ ID NO: 2261047 - DNA, 25 bp, Homo sapien
ccaggaagccaggtggcctcttctc

SEQ ID NO: 2261048 - DNA, 25 bp, Homo sapien
tggctcctcgctgggaaggctgccc

SEQ ID NO: 2261049 - DNA, 25 bp, Homo sapien
ccagcgcggacaagttggtatcttc

SEQ ID NO: 2261050 - DNA, 25 bp, Homo sapien
tagtcgcaggtaattggccaaggct

SEQ ID NO: 2261051 - DNA, 25 bp, Homo sapien
gaagtcattcgagtgtcctggttcc

SEQ ID NO: 2261052 - DNA, 25 bp, Homo sapien
tggttcctaaatacctgccccagcg

SEQ ID NO: 2261053 - DNA, 25 bp, Homo sapien
tgcagcgccaaggctggacccaggc

SEQ ID NO: 2261054 - DNA, 25 bp, Homo sapien
gtgcagcgccaaggctggacccagg

SEQ ID NO: 2261055 - DNA, 25 bp, Homo sapien
ctcctgcctcacccacagctcctgc

SEQ ID NO: 2261056 - DNA, 25 bp, Homo sapien
tgcagctcctgcctcacccacagct

SEQ ID NO: 2261057 - DNA, 25 bp, Homo sapien
agctcctgcctcacccacagctcct

SEQ ID NO: 2261058 - DNA, 25 bp, Homo sapien
ctgcagctcctgcctcacccacagc

SEQ ID NO: 2261059 - DNA, 25 bp, Homo sapien
gctcctgcctcacccacagctcctg

SEQ ID NO: 2261060 - DNA, 25 bp, Homo sapien
tgcctcacccacagctcctgcctca

SEQ ID NO: 2261061 - DNA, 25 bp, Homo sapien
tcctgcctcacccacagctcctgcc

SEQ ID NO: 2261062 - DNA, 25 bp, Homo sapien
ctcacctgctgctcctgcctcaccc

SEQ ID NO: 2261063 - DNA, 25 bp, Homo sapien
aactgggcatatcctgaaactcaat

SEQ ID NO: 2261064 - DNA, 25 bp, Homo sapien
gaagtgcttggtgagtactcggtac

SEQ ID NO: 2261065 - DNA, 25 bp, Homo sapien
gccccccattgcctggtatttgatg

SEQ ID NO: 2261066 - DNA, 25 bp, Homo sapien
taaatactcagcgaactccaccaag

SEQ ID NO: 2261067 - DNA, 25 bp, Homo sapien
aatcaagcttcggtttaaatactca

SEQ ID NO: 2261068 - DNA, 25 bp, Homo sapien
cacggcctcctggaactcatgttcc

SEQ ID NO: 2261069 - DNA, 25 bp, Homo sapien
acggcctcctggaactcatgttcct

SEQ ID NO: 2261070 - DNA, 25 bp, Homo sapien
cttgagggagggagcctgatcaatc

SEQ ID NO: 2261071 - DNA, 25 bp, Homo sapien
gctgactgttgcagtctccgacaca

SEQ ID NO: 2261072 - DNA, 25 bp, Homo sapien
gggagcctgatcaatcaggaatgtg

SEQ ID NO: 2261073 - DNA, 25 bp, Homo sapien
tgactgttgcagtctccgacacagc

SEQ ID NO: 2261074 - DNA, 25 bp, Homo sapien
ggcactgccacgccgacagcctcca

SEQ ID NO: 2261075 - DNA, 25 bp, Homo sapien
gcctgtaccactggccgccaggcag

SEQ ID NO: 2261076 - DNA, 25 bp, Homo sapien
cgtcgcctgtaccactggccgccag

SEQ ID NO: 2261077 - DNA, 25 bp, Homo sapien
tccggctccgcaccccgtgcaccct

SEQ ID NO: 2261078 - DNA, 25 bp, Homo sapien
tcgcctgtaccactggccgccaggc

SEQ ID NO: 2261079 - DNA, 25 bp, Homo sapien
gaggatcggcggagtacatttgcaa

SEQ ID NO: 2261080 - DNA, 25 bp, Homo sapien
gactggtgtcgctatgcaaggcaaa

SEQ ID NO: 2261081 - DNA, 25 bp, Homo sapien
tctgaggcacttggcgccaacagtc

SEQ ID NO: 2261082 - DNA, 25 bp, Homo sapien
tcaaaaggtggaaaggctcgaagcc

SEQ ID NO: 2261083 - DNA, 25 bp, Homo sapien
agggttggacaaactggcccacatg

SEQ ID NO: 2261084 - DNA, 25 bp, Homo sapien
gtcgcagggttggacaaactggccc

SEQ ID NO: 2261085 - DNA, 25 bp, Homo sapien
tccatgccatgagccacgcagtact

SEQ ID NO: 2261086 - DNA, 25 bp, Homo sapien
acatgacacaaggcattctccatgc

SEQ ID NO: 2261087 - DNA, 25 bp, Homo sapien
caatgtgtccacacacgcggtgcca

SEQ ID NO: 2261088 - DNA, 25 bp, Homo sapien
aatgtgtccacacacgcggtgccaa

SEQ ID NO: 2261089 - DNA, 25 bp, Homo sapien
tgtgtccacacacgcggtgccaaca

SEQ ID NO: 2261090 - DNA, 25 bp, Homo sapien
atgtgtccacacacgcggtgccaac

SEQ ID NO: 2261091 - DNA, 25 bp, Homo sapien
tgaagtccctgatgaggccattggg

SEQ ID NO: 2261092 - DNA, 25 bp, Homo sapien
gccttgaggcaatccgaagcatcta

SEQ ID NO: 2261093 - DNA, 25 bp, Homo sapien
cagacagtctttgcaagggctggca

SEQ ID NO: 2261094 - DNA, 25 bp, Homo sapien
tgggcccagaaatgcaatcctcgtg

SEQ ID NO: 2261095 - DNA, 25 bp, Homo sapien
taactagtaaattgtcctggctgga

SEQ ID NO: 2261096 - DNA, 25 bp, Homo sapien
aactgtgaatgcttcaagagccaca

SEQ ID NO: 2261097 - DNA, 25 bp, Homo sapien
gctggattcgttgtgaaatggaact

SEQ ID NO: 2261098 - DNA, 25 bp, Homo sapien
ctggcagtgtctccatgtaactagt

SEQ ID NO: 2261099 - DNA, 25 bp, Homo sapien
gttctttccagtcgcttctgttccc

SEQ ID NO: 2261100 - DNA, 25 bp, Homo sapien
gctgtgtgttctttccagtcgcttc

SEQ ID NO: 2261101 - DNA, 25 bp, Homo sapien
tgtgttctttccagtcgcttctgtt

SEQ ID NO: 2261102 - DNA, 25 bp, Homo sapien
tgtgtgttctttccagtcgcttctg

SEQ ID NO: 2261103 - DNA, 25 bp, Homo sapien
ggcaacatggcagctcccatacttg

SEQ ID NO: 2261104 - DNA, 25 bp, Homo sapien
tggcagctcccatacttgccagggt

SEQ ID NO: 2261105 - DNA, 25 bp, Homo sapien
gctcccatacttgccagggtagttg

SEQ ID NO: 2261106 - DNA, 25 bp, Homo sapien
ccatacttgccagggtagttggaag

SEQ ID NO: 2261107 - DNA, 25 bp, Homo sapien
tcgtctcgatggttgtgatgcccat

SEQ ID NO: 2261108 - DNA, 25 bp, Homo sapien
tcgatggttgtgatgcccatgaggt

SEQ ID NO: 2261109 - DNA, 25 bp, Homo sapien
actgtagtcgtctcgatggttgtga

SEQ ID NO: 2261110 - DNA, 25 bp, Homo sapien
aaattttataactgtagtcgtctcg

SEQ ID NO: 2261111 - DNA, 25 bp, Homo sapien
tgggactcgcagctggttccatccg

SEQ ID NO: 2261112 - DNA, 25 bp, Homo sapien
ccaggagttctggacagctgctctg

SEQ ID NO: 2261113 - DNA, 25 bp, Homo sapien
tgctctgcagattcttatatacctt

SEQ ID NO: 2261114 - DNA, 25 bp, Homo sapien
tgagaggggacgtctttgacaccag

SEQ ID NO: 2261115 - DNA, 25 bp, Homo sapien
tctttcccgcattgtggagagggct

SEQ ID NO: 2261116 - DNA, 25 bp, Homo sapien
tcccgcattgtggagagggctcccc

SEQ ID NO: 2261117 - DNA, 25 bp, Homo sapien
atgcaggggtggagcgcccagggtg

SEQ ID NO: 2261118 - DNA, 25 bp, Homo sapien
tttgtcttctttcccgcattgtgga

SEQ ID NO: 2261119 - DNA, 25 bp, Homo sapien
aaggggttgtcgctgcttctacaaa

SEQ ID NO: 2261120 - DNA, 25 bp, Homo sapien
ttaaggggttgtcgctgcttctaca

SEQ ID NO: 2261121 - DNA, 25 bp, Homo sapien
ggggttgtcgctgcttctacaaatc

SEQ ID NO: 2261122 - DNA, 25 bp, Homo sapien
gttgtcgctgcttctacaaatccag

SEQ ID NO: 2261123 - DNA, 25 bp, Homo sapien
atggtagtgcgagcctatgatccca

SEQ ID NO: 2261124 - DNA, 25 bp, Homo sapien
ggtagtgcgagcctatgatcccagc

SEQ ID NO: 2261125 - DNA, 25 bp, Homo sapien
aggcatggtagtgcgagcctatgat

SEQ ID NO: 2261126 - DNA, 25 bp, Homo sapien
gcatggtagtgcgagcctatgatcc

SEQ ID NO: 2261127 - DNA, 25 bp, Homo sapien
tgacccatgggtgtcatttaacgca

SEQ ID NO: 2261128 - DNA, 25 bp, Homo sapien
gaatgaccttatccagtgacccatg

SEQ ID NO: 2261129 - DNA, 25 bp, Homo sapien
gagagcagctctcttcgtcaccacg

SEQ ID NO: 2261130 - DNA, 25 bp, Homo sapien
cgtcaccacgcagagatctgccagg

SEQ ID NO: 2261131 - DNA, 25 bp, Homo sapien
tatcaagaagaatgccacagggtgt

SEQ ID NO: 2261132 - DNA, 25 bp, Homo sapien
catatcaagaagaatgccacagggt

SEQ ID NO: 2261133 - DNA, 25 bp, Homo sapien
ccatatcaagaagaatgccacaggg

SEQ ID NO: 2261134 - DNA, 25 bp, Homo sapien
atatcaagaagaatgccacagggtg

SEQ ID NO: 2261135 - DNA, 25 bp, Homo sapien
agcctccagatacccctcttcccag

SEQ ID NO: 2261136 - DNA, 25 bp, Homo sapien
cagctgccgtcacctcaggttcttg

SEQ ID NO: 2261137 - DNA, 25 bp, Homo sapien
tcttcctcggcatcttcatcgtctt

SEQ ID NO: 2261138 - DNA, 25 bp, Homo sapien
caggttcttgttcttcctcggcatc

SEQ ID NO: 2261139 - DNA, 25 bp, Homo sapien
agtagttggcaatgtttattgggaa

SEQ ID NO: 2261140 - DNA, 25 bp, Homo sapien
aatccagggccgtatggctggtcag

SEQ ID NO: 2261141 - DNA, 25 bp, Homo sapien
gaatccagggccgtatggctggtca

SEQ ID NO: 2261142 - DNA, 25 bp, Homo sapien
gcaatgtttattgggaaacagcaaa

SEQ ID NO: 2261143 - DNA, 25 bp, Homo sapien
ggggtggtagaggccagctgaacgg

SEQ ID NO: 2261144 - DNA, 25 bp, Homo sapien
gccgggggtggtagaggccagctga

SEQ ID NO: 2261145 - DNA, 25 bp, Homo sapien
aggagccgggggtggtagaggccag

SEQ ID NO: 2261146 - DNA, 25 bp, Homo sapien
cgggggtggtagaggccagctgaac

SEQ ID NO: 2261147 - DNA, 25 bp, Homo sapien
tgcgcttggctctgcccggaagtag

SEQ ID NO: 2261148 - DNA, 25 bp, Homo sapien
aaagagggacagctcggcaatctcg

SEQ ID NO: 2261149 - DNA, 25 bp, Homo sapien
catcaggcggcaagtacatgggctc

SEQ ID NO: 2261150 - DNA, 25 bp, Homo sapien
aatactagggcaccagactcgtcgt

SEQ ID NO: 2261151 - DNA, 25 bp, Homo sapien
ggtgatgttcccacggggatagcaa

SEQ ID NO: 2261152 - DNA, 25 bp, Homo sapien
gggcgggcactgaccggcttcctgg

SEQ ID NO: 2261153 - DNA, 25 bp, Homo sapien
accggcttcctgggcttctgggcac

SEQ ID NO: 2261154 - DNA, 25 bp, Homo sapien
gaccggcttcctgggcttctgggca

SEQ ID NO: 2261155 - DNA, 25 bp, Homo sapien
ctggggcgggcactgaccggcttcc

SEQ ID NO: 2261156 - DNA, 25 bp, Homo sapien
gctgctctaggcggcctttaatcag

SEQ ID NO: 2261157 - DNA, 25 bp, Homo sapien
gctctaggcggcctttaatcagcgg

SEQ ID NO: 2261158 - DNA, 25 bp, Homo sapien
taggcggcctttaatcagcggccgc

SEQ ID NO: 2261159 - DNA, 25 bp, Homo sapien
gcggcctttaatcagcggccgcagc

SEQ ID NO: 2261160 - DNA, 25 bp, Homo sapien
tctggagtgtgaccaaggtgcccac

SEQ ID NO: 2261161 - DNA, 25 bp, Homo sapien
ctgttggccaacaatgaggcctggg

SEQ ID NO: 2261162 - DNA, 25 bp, Homo sapien
agtggtgcggaaggcagtaacctcc

SEQ ID NO: 2261163 - DNA, 25 bp, Homo sapien
tcactggagatcaggtgccgctcgt

SEQ ID NO: 2261164 - DNA, 25 bp, Homo sapien
agcaggtacaatggccccaaggagg

SEQ ID NO: 2261165 - DNA, 25 bp, Homo sapien
gcatcttcctggacaaccagtcagg

SEQ ID NO: 2261166 - DNA, 25 bp, Homo sapien
agaggccctaccagtcacgcctgtt

SEQ ID NO: 2261167 - DNA, 25 bp, Homo sapien
ctgttccggtactcacagggaggga

SEQ ID NO: 2261168 - DNA, 25 bp, Homo sapien
caaggctttctttgtgtccaagtca

SEQ ID NO: 2261169 - DNA, 25 bp, Homo sapien
gtccaagtcaaaccgcccgtctgtc

SEQ ID NO: 2261170 - DNA, 25 bp, Homo sapien
gaaaccaaggctttctttgtgtcca

SEQ ID NO: 2261171 - DNA, 25 bp, Homo sapien
tctttgtgtccaagtcaaaccgccc

SEQ ID NO: 2261172 - DNA, 25 bp, Homo sapien
cacaatcatccatcctcggccaact

SEQ ID NO: 2261173 - DNA, 25 bp, Homo sapien
ccaactcgatcttgggagagggctt

SEQ ID NO: 2261174 - DNA, 25 bp, Homo sapien
aacgtggggctgcaacggcttctgc

SEQ ID NO: 2261175 - DNA, 25 bp, Homo sapien
catcctcggccaactcgatcttggg

SEQ ID NO: 2261176 - DNA, 25 bp, Homo sapien
tttggcgtaggccatcactgaagac

SEQ ID NO: 2261177 - DNA, 25 bp, Homo sapien
ctgtgctttggcgtaggccatcact

SEQ ID NO: 2261178 - DNA, 25 bp, Homo sapien
tgctttggcgtaggccatcactgaa

SEQ ID NO: 2261179 - DNA, 25 bp, Homo sapien
ttggcgtaggccatcactgaagact

SEQ ID NO: 2261180 - DNA, 25 bp, Homo sapien
tccattagttcattcatcttggtag

SEQ ID NO: 2261181 - DNA, 25 bp, Homo sapien
tttctccattagttcattcatcttg

SEQ ID NO: 2261182 - DNA, 25 bp, Homo sapien
tctccattagttcattcatcttggt

SEQ ID NO: 2261183 - DNA, 25 bp, Homo sapien
ctatttctccattagttcattcatc

SEQ ID NO: 2261184 - DNA, 25 bp, Homo sapien
aggatctgggtagctgccactgccc

SEQ ID NO: 2261185 - DNA, 25 bp, Homo sapien
actgcccctggtctgctgtggtgga

SEQ ID NO: 2261186 - DNA, 25 bp, Homo sapien
gcatggggctgcttttcgagccaca

SEQ ID NO: 2261187 - DNA, 25 bp, Homo sapien
tcagatttcctgctcatccagggct

SEQ ID NO: 2261188 - DNA, 25 bp, Homo sapien
tgagcccgtcaccactgccggggtt

SEQ ID NO: 2261189 - DNA, 25 bp, Homo sapien
tgttggtaccctcaactctcctgtc

SEQ ID NO: 2261190 - DNA, 25 bp, Homo sapien
cattcttgcactgacagcattgctt

SEQ ID NO: 2261191 - DNA, 25 bp, Homo sapien
tctccactgttggtaccctcaactc

SEQ ID NO: 2261192 - DNA, 25 bp, Homo sapien
cctcacttcataggtggtgccgcac

SEQ ID NO: 2261193 - DNA, 25 bp, Homo sapien
ggtgccgcacctccaacagagcctg

SEQ ID NO: 2261194 - DNA, 25 bp, Homo sapien
ccagcaagagcccagaaggcacact

SEQ ID NO: 2261195 - DNA, 25 bp, Homo sapien
aaggcacactggctgctcctcactt

SEQ ID NO: 2261196 - DNA, 25 bp, Homo sapien
accaatgatcattataagaatgatg

SEQ ID NO: 2261197 - DNA, 25 bp, Homo sapien
tgttgcgaataccaatgatcattat

SEQ ID NO: 2261198 - DNA, 25 bp, Homo sapien
gcagtttactaacagcaattataaa

SEQ ID NO: 2261199 - DNA, 25 bp, Homo sapien
tggcatagattataagcagtttact

SEQ ID NO: 2261200 - DNA, 25 bp, Homo sapien
ccaagagtgatggtattgcagatca

SEQ ID NO: 2261201 - DNA, 25 bp, Homo sapien
taggatacgaggaaactggatcccc

SEQ ID NO: 2261202 - DNA, 25 bp, Homo sapien
ggtgctgcgacaaatgtgtatccat

SEQ ID NO: 2261203 - DNA, 25 bp, Homo sapien
tgatttccagtcaatggtgctgcga

SEQ ID NO: 2261204 - DNA, 25 bp, Homo sapien
actgcaacttccctctcatgggctc

SEQ ID NO: 2261205 - DNA, 25 bp, Homo sapien
caacttccctctcatgggctcaagt

SEQ ID NO: 2261206 - DNA, 25 bp, Homo sapien
tcactgcaacttccctctcatgggc

SEQ ID NO: 2261207 - DNA, 25 bp, Homo sapien
tgcaacttccctctcatgggctcaa

SEQ ID NO: 2261208 - DNA, 25 bp, Homo sapien
ccacggccttcgcagaggtgtcagc

SEQ ID NO: 2261209 - DNA, 25 bp, Homo sapien
acggccttcgcagaggtgtcagcaa

SEQ ID NO: 2261210 - DNA, 25 bp, Homo sapien
cccagcagatctgctcgccttgctg

SEQ ID NO: 2261211 - DNA, 25 bp, Homo sapien
tcttcacggtctccacggccttcgc

SEQ ID NO: 2261212 - DNA, 25 bp, Homo sapien
gagcgagcaggcactaaatgccgct

SEQ ID NO: 2261213 - DNA, 25 bp, Homo sapien
tggtctcacgtagcgacggcatctc

SEQ ID NO: 2261214 - DNA, 25 bp, Homo sapien
gaagtcaccaatcagagttctcgga

SEQ ID NO: 2261215 - DNA, 25 bp, Homo sapien
tctggcaaccctcgatgcctaggga

SEQ ID NO: 2261216 - DNA, 25 bp, Homo sapien
ggctcggagcctctcgcttagaaaa

SEQ ID NO: 2261217 - DNA, 25 bp, Homo sapien
tgtagtcatcgtaactaaagccggc

SEQ ID NO: 2261218 - DNA, 25 bp, Homo sapien
tgcgcacgtgggaactgtagtcatc

SEQ ID NO: 2261219 - DNA, 25 bp, Homo sapien
caggaccagccagtcagaggttgga

SEQ ID NO: 2261220 - DNA, 25 bp, Homo sapien
tcacatgtggaacaacgaaacaagc

SEQ ID NO: 2261221 - DNA, 25 bp, Homo sapien
gagcgtaacgtgacaacagtgcggc

SEQ ID NO: 2261222 - DNA, 25 bp, Homo sapien
gatctgggcctagctagtgcctgct

SEQ ID NO: 2261223 - DNA, 25 bp, Homo sapien
gaaacaagcaaacattgacgagccc

SEQ ID NO: 2261224 - DNA, 25 bp, Homo sapien
tgatggggccgcacgggtggaggtc

SEQ ID NO: 2261225 - DNA, 25 bp, Homo sapien
ccgcacgggtggaggtcagggcctg

SEQ ID NO: 2261226 - DNA, 25 bp, Homo sapien
tcagattctggtgcgtggcctggat

SEQ ID NO: 2261227 - DNA, 25 bp, Homo sapien
gctggcagcactcgcccagctcgtc

SEQ ID NO: 2261228 - DNA, 25 bp, Homo sapien
gcttctggtctagggtgctgatgtc

SEQ ID NO: 2261229 - DNA, 25 bp, Homo sapien
tcggaagtgaccagacgcagcttct

SEQ ID NO: 2261230 - DNA, 25 bp, Homo sapien
gaagtcggaagtgaccagacgcagc

SEQ ID NO: 2261231 - DNA, 25 bp, Homo sapien
ctgatgtcggctgcgcccgcagcag

SEQ ID NO: 2261232 - DNA, 25 bp, Homo sapien
ctgcaaagccagaggcagagtccct

SEQ ID NO: 2261233 - DNA, 25 bp, Homo sapien
tgcctggcaagctccgccagcttct

SEQ ID NO: 2261234 - DNA, 25 bp, Homo sapien
tcctcctcggacttggcagaggcac

SEQ ID NO: 2261235 - DNA, 25 bp, Homo sapien
taagcgcgtgcaacttggcagcact

SEQ ID NO: 2261236 - DNA, 25 bp, Homo sapien
cgttctaagcgcgtgcaacttggca

SEQ ID NO: 2261237 - DNA, 25 bp, Homo sapien
tccctggtgtcctcgaagtgctcca

SEQ ID NO: 2261238 - DNA, 25 bp, Homo sapien
ccagcaaggcctcgttcttctccct

SEQ ID NO: 2261239 - DNA, 25 bp, Homo sapien
ccacgggtcgcactctggattcagg

SEQ ID NO: 2261240 - DNA, 25 bp, Homo sapien
aaggcctcgttcttctccctggtgt

SEQ ID NO: 2261241 - DNA, 25 bp, Homo sapien
tgccccttgcccgtatgctgcccgg

SEQ ID NO: 2261242 - DNA, 25 bp, Homo sapien
atggagcaccctaggtgctcaccct

SEQ ID NO: 2261243 - DNA, 25 bp, Homo sapien
ggaccaagagaagcccgtcaatact

SEQ ID NO: 2261244 - DNA, 25 bp, Homo sapien
tgaggcccacatcccaccttcatac

SEQ ID NO: 2261245 - DNA, 25 bp, Homo sapien
caatggtcaggctccggatggtatc

SEQ ID NO: 2261246 - DNA, 25 bp, Homo sapien
tccggatggtatcgagcaactggtc

SEQ ID NO: 2261247 - DNA, 25 bp, Homo sapien
gcaactggagcacccaatggtcagg

SEQ ID NO: 2261248 - DNA, 25 bp, Homo sapien
caactggtccatgaagtgtagctgc

SEQ ID NO: 2261249 - DNA, 25 bp, Homo sapien
aggtgcgagaagctcagggcaccca

SEQ ID NO: 2261250 - DNA, 25 bp, Homo sapien
aggagcacaggtgcgagaagctcag

SEQ ID NO: 2261251 - DNA, 25 bp, Homo sapien
ggcacccaggacaggggcgatggca

SEQ ID NO: 2261252 - DNA, 25 bp, Homo sapien
ggacaggggcgatggcactgggagg

SEQ ID NO: 2261253 - DNA, 25 bp, Homo sapien
tgcctgcacggtggtgctgaccaca

SEQ ID NO: 2261254 - DNA, 25 bp, Homo sapien
cggtggtgctgaccacagtcatgtg

SEQ ID NO: 2261255 - DNA, 25 bp, Homo sapien
accacagtcatgtgctccaaggtga

SEQ ID NO: 2261256 - DNA, 25 bp, Homo sapien
ccacagtcatgtgctccaaggtgat

SEQ ID NO: 2261257 - DNA, 25 bp, Homo sapien
gggcagcgggctgccacgtccccac

SEQ ID NO: 2261258 - DNA, 25 bp, Homo sapien
ggggcagcgggctgccacgtcccca

SEQ ID NO: 2261259 - DNA, 25 bp, Homo sapien
gaaacgtctattcggacactttgtc

SEQ ID NO: 2261260 - DNA, 25 bp, Homo sapien
tgtgatttacaactatttaccgcct

SEQ ID NO: 2261261 - DNA, 25 bp, Homo sapien
tacaagtccctcatcagtcatgtga

SEQ ID NO: 2261262 - DNA, 25 bp, Homo sapien
tgtgttcctctaatggcccgtgatg

SEQ ID NO: 2261263 - DNA, 25 bp, Homo sapien
tcgaaaagttaagcacagagtgacc

SEQ ID NO: 2261264 - DNA, 25 bp, Homo sapien
aatcgtagaaaaccagctgtagccc

SEQ ID NO: 2261265 - DNA, 25 bp, Homo sapien
ggtgccgccgcactggaaaacagtt

SEQ ID NO: 2261266 - DNA, 25 bp, Homo sapien
tcaacaagacggatgccagcaagtg

SEQ ID NO: 2261267 - DNA, 25 bp, Homo sapien
ggccattggtcacgtgaataaatct

SEQ ID NO: 2261268 - DNA, 25 bp, Homo sapien
tgtgtcataggccattggtcacgtg

SEQ ID NO: 2261269 - DNA, 25 bp, Homo sapien
cataggccattggtcacgtgaataa

SEQ ID NO: 2261270 - DNA, 25 bp, Homo sapien
cctggggctgtgtcataggccattg

SEQ ID NO: 2261271 - DNA, 25 bp, Homo sapien
agcattactcataatcatcgagtga

SEQ ID NO: 2261272 - DNA, 25 bp, Homo sapien
atttagaaacgagaaggtgggtgct

SEQ ID NO: 2261273 - DNA, 25 bp, Homo sapien
gggtgctggagtttctttgacctac

SEQ ID NO: 2261274 - DNA, 25 bp, Homo sapien
tcatcgagtgaaaacaattatttca

SEQ ID NO: 2261275 - DNA, 25 bp, Homo sapien
tcgggagaaactctcgggccacaag

SEQ ID NO: 2261276 - DNA, 25 bp, Homo sapien
gatgagggacctcgggagaaactct

SEQ ID NO: 2261277 - DNA, 25 bp, Homo sapien
gacctcgggagaaactctcgggcca

SEQ ID NO: 2261278 - DNA, 25 bp, Homo sapien
cgcagggtagatgagggacctcggg

SEQ ID NO: 2261279 - DNA, 25 bp, Homo sapien
cagggacaaccaggttctacccaag

SEQ ID NO: 2261280 - DNA, 25 bp, Homo sapien
gaagtcatcaaccaaggacaggaca

SEQ ID NO: 2261281 - DNA, 25 bp, Homo sapien
cactggtcatcagaagccagagatc

SEQ ID NO: 2261282 - DNA, 25 bp, Homo sapien
ccaggcgccgggatgaatgaagaat

SEQ ID NO: 2261283 - DNA, 25 bp, Homo sapien
gctcctggtcatctggcgcacacag

SEQ ID NO: 2261284 - DNA, 25 bp, Homo sapien
gagctcctggtcatctggcgcacac

SEQ ID NO: 2261285 - DNA, 25 bp, Homo sapien
agctcgtggcccagcttcgtcattt

SEQ ID NO: 2261286 - DNA, 25 bp, Homo sapien
acacagcatcagctcgtggcccagc

SEQ ID NO: 2261287 - DNA, 25 bp, Homo sapien
cacctctgttgggacccctttcagt

SEQ ID NO: 2261288 - DNA, 25 bp, Homo sapien
gatcttcacctctgttgggacccct

SEQ ID NO: 2261289 - DNA, 25 bp, Homo sapien
ttcagtgagctgaacctgtcctgca

SEQ ID NO: 2261290 - DNA, 25 bp, Homo sapien
gttgggacccctttcagtgagctga

SEQ ID NO: 2261291 - DNA, 25 bp, Homo sapien
ggctcctgccgcaacagagtctgtg

SEQ ID NO: 2261292 - DNA, 25 bp, Homo sapien
ctgcattcagtcatgtgggggctcc

SEQ ID NO: 2261293 - DNA, 25 bp, Homo sapien
tgccgcaacagagtctgtggtcaca

SEQ ID NO: 2261294 - DNA, 25 bp, Homo sapien
cattcagtcatgtgggggctcctgc

SEQ ID NO: 2261295 - DNA, 25 bp, Homo sapien
tgtgacttattaagacaaccgtggg

SEQ ID NO: 2261296 - DNA, 25 bp, Homo sapien
ttattaagacaaccgtgggttctgc

SEQ ID NO: 2261297 - DNA, 25 bp, Homo sapien
ctctgtgacttattaagacaaccgt

SEQ ID NO: 2261298 - DNA, 25 bp, Homo sapien
gacaaccgtgggttctgcgcaagcg

SEQ ID NO: 2261299 - DNA, 25 bp, Homo sapien
tgtgcaagggcgggcacagtaaacc

SEQ ID NO: 2261300 - DNA, 25 bp, Homo sapien
caagggcgggcacagtaaaccctga

SEQ ID NO: 2261301 - DNA, 25 bp, Homo sapien
ccagcactgtgcaagggcgggcaca

SEQ ID NO: 2261302 - DNA, 25 bp, Homo sapien
tgcaagggcgggcacagtaaaccct

SEQ ID NO: 2261303 - DNA, 25 bp, Homo sapien
taggatctccaagcggtactctgag

SEQ ID NO: 2261304 - DNA, 25 bp, Homo sapien
ggctctgtgatatacagaccctcga

SEQ ID NO: 2261305 - DNA, 25 bp, Homo sapien
cgggtacacatccactctaggatct

SEQ ID NO: 2261306 - DNA, 25 bp, Homo sapien
tgtgatatacagaccctcgaggaag

SEQ ID NO: 2261307 - DNA, 25 bp, Homo sapien
caaagggcaaagatgaatgatccac

SEQ ID NO: 2261308 - DNA, 25 bp, Homo sapien
acttgacagagtggcacgaggctct

SEQ ID NO: 2261309 - DNA, 25 bp, Homo sapien
ttctggaggctatcacccctggcat

SEQ ID NO: 2261310 - DNA, 25 bp, Homo sapien
cgggtactgcagttccacaggcggt

SEQ ID NO: 2261311 - DNA, 25 bp, Homo sapien
tctgagtagtcgtcgccgccacggc

SEQ ID NO: 2261312 - DNA, 25 bp, Homo sapien
gcttcccgaacacctccacagccgc

SEQ ID NO: 2261313 - DNA, 25 bp, Homo sapien
tcgtcctctgagtagtcgtcgccgc

SEQ ID NO: 2261314 - DNA, 25 bp, Homo sapien
gtcgccctcgtcctctgagtagtcg

SEQ ID NO: 2261315 - DNA, 25 bp, Homo sapien
tttcgcgctccgagccgcgccccgc

SEQ ID NO: 2261316 - DNA, 25 bp, Homo sapien
gcgctccgagccgcgccccgcccat

SEQ ID NO: 2261317 - DNA, 25 bp, Homo sapien
tcgcgctccgagccgcgccccgccc

SEQ ID NO: 2261318 - DNA, 25 bp, Homo sapien
gtttcgcgctccgagccgcgccccg

SEQ ID NO: 2261319 - DNA, 25 bp, Homo sapien
ttcactggccggcaagaccgccaat

SEQ ID NO: 2261320 - DNA, 25 bp, Homo sapien
ggactgaagcgttcctctcccagcg

SEQ ID NO: 2261321 - DNA, 25 bp, Homo sapien
tgcagaatggaactcggactgaagc

SEQ ID NO: 2261322 - DNA, 25 bp, Homo sapien
gcgttgaagcgaggctcttccagga

SEQ ID NO: 2261323 - DNA, 25 bp, Homo sapien
agcagtgggtgcagccaatcggtga

SEQ ID NO: 2261324 - DNA, 25 bp, Homo sapien
tgggtgcagccaatcggtgacccca

SEQ ID NO: 2261325 - DNA, 25 bp, Homo sapien
tgcagccaatcggtgaccccaaaat

SEQ ID NO: 2261326 - DNA, 25 bp, Homo sapien
gccaatcggtgaccccaaaatgctg

SEQ ID NO: 2261327 - DNA, 25 bp, Homo sapien
ttcatgccgcttcgaggccgcaggt

SEQ ID NO: 2261328 - DNA, 25 bp, Homo sapien
ggccgcaggtcatccagagaccctt

SEQ ID NO: 2261329 - DNA, 25 bp, Homo sapien
tccagagacccttgagtggtgatgg

SEQ ID NO: 2261330 - DNA, 25 bp, Homo sapien
cagaggtccccgctgagcatgagct

SEQ ID NO: 2261331 - DNA, 25 bp, Homo sapien
aggctcggagtgaggcccactcaag

SEQ ID NO: 2261332 - DNA, 25 bp, Homo sapien
acctcgatgtgtgagtgacaggtcc

SEQ ID NO: 2261333 - DNA, 25 bp, Homo sapien
tgggaatggacgaagcccacaggct

SEQ ID NO: 2261334 - DNA, 25 bp, Homo sapien
cttgctcaagaggtaacctcgatgt

SEQ ID NO: 2261335 - DNA, 25 bp, Homo sapien
cgtcttcttggctaccaccctagag

SEQ ID NO: 2261336 - DNA, 25 bp, Homo sapien
tggccctgtttcatcattgcaagtc

SEQ ID NO: 2261337 - DNA, 25 bp, Homo sapien
gggtgactggtaccccagctttgcc

SEQ ID NO: 2261338 - DNA, 25 bp, Homo sapien
taccaccctagagcgtggctgggtg

SEQ ID NO: 2261339 - DNA, 25 bp, Homo sapien
tgctctaaagagatggtatccaggg

SEQ ID NO: 2261340 - DNA, 25 bp, Homo sapien
tcacacctgcggtcgccaaacctgg

SEQ ID NO: 2261341 - DNA, 25 bp, Homo sapien
gggcttatgccattgccgcccctgt

SEQ ID NO: 2261342 - DNA, 25 bp, Homo sapien
tggtggggcttgaaaccctccctga

SEQ ID NO: 2261343 - DNA, 25 bp, Homo sapien
cggcccggcaatgtctgctgagctg

SEQ ID NO: 2261344 - DNA, 25 bp, Homo sapien
ggcgcactggcatccccaggtttct

SEQ ID NO: 2261345 - DNA, 25 bp, Homo sapien
tggactggcactggcgcactggcat

SEQ ID NO: 2261346 - DNA, 25 bp, Homo sapien
tctgggccatgtgctctacggcccg

SEQ ID NO: 2261347 - DNA, 25 bp, Homo sapien
cagcgagccagaccttggcaggctg

SEQ ID NO: 2261348 - DNA, 25 bp, Homo sapien
ttgtcaaaggggcagcgagccagac

SEQ ID NO: 2261349 - DNA, 25 bp, Homo sapien
cgagtccgggcttgtcaaaggggca

SEQ ID NO: 2261350 - DNA, 25 bp, Homo sapien
tgggcccacgatgcgggcaggaccc

SEQ ID NO: 2261351 - DNA, 25 bp, Homo sapien
tgttctgcctaacggtggtgttccc

SEQ ID NO: 2261352 - DNA, 25 bp, Homo sapien
tgtgccccagcgagcattctctgct

SEQ ID NO: 2261353 - DNA, 25 bp, Homo sapien
tgttcccgtgataaccgacggtgag

SEQ ID NO: 2261354 - DNA, 25 bp, Homo sapien
tgctcagaatgctcgcaaaggccgg

SEQ ID NO: 2261355 - DNA, 25 bp, Homo sapien
gcctgcgtgtccttgcggcactgcg

SEQ ID NO: 2261356 - DNA, 25 bp, Homo sapien
ggcctgcgtgtccttgcggcactgc

SEQ ID NO: 2261357 - DNA, 25 bp, Homo sapien
ctgcgtgtccttgcggcactgcggc

SEQ ID NO: 2261358 - DNA, 25 bp, Homo sapien
cgggcctgcgtgtccttgcggcact

SEQ ID NO: 2261359 - DNA, 25 bp, Homo sapien
caccctgcgccccgcatcgcgcgcg

SEQ ID NO: 2261360 - DNA, 25 bp, Homo sapien
ctgcaccctgcgccccgcatcgcgc

SEQ ID NO: 2261361 - DNA, 25 bp, Homo sapien
gcaccctgcgccccgcatcgcgcgc

SEQ ID NO: 2261362 - DNA, 25 bp, Homo sapien
tgcaccctgcgccccgcatcgcgcg

SEQ ID NO: 2261363 - DNA, 25 bp, Homo sapien
tacttcggtgtgctcgttccttggg

SEQ ID NO: 2261364 - DNA, 25 bp, Homo sapien
gggcatcctcgccactggctcttcc

SEQ ID NO: 2261365 - DNA, 25 bp, Homo sapien
gaggtaccctctctctgggcatcct

SEQ ID NO: 2261366 - DNA, 25 bp, Homo sapien
ttgatgaccttcgcgtcctgcagcc

SEQ ID NO: 2261367 - DNA, 25 bp, Homo sapien
gcatgggctgccgtagattagagta

SEQ ID NO: 2261368 - DNA, 25 bp, Homo sapien
tagattagagtagagcgctgggcca

SEQ ID NO: 2261369 - DNA, 25 bp, Homo sapien
agtgctgcagaagtgcatccaccca

SEQ ID NO: 2261370 - DNA, 25 bp, Homo sapien
caaaggcgcaggctgaatcgggcaa

SEQ ID NO: 2261371 - DNA, 25 bp, Homo sapien
ctgtgtctttctgcggcacccggcg

SEQ ID NO: 2261372 - DNA, 25 bp, Homo sapien
gctttgcacgcagctgccagtgggt

SEQ ID NO: 2261373 - DNA, 25 bp, Homo sapien
tgtctggacccttgttaacgaggac

SEQ ID NO: 2261374 - DNA, 25 bp, Homo sapien
ccggcgccggacaggcggttgcttt

SEQ ID NO: 2261375 - DNA, 25 bp, Homo sapien
tccagatggtctgaatgcccaggag

SEQ ID NO: 2261376 - DNA, 25 bp, Homo sapien
tggcttccagatggtctgaatgccc

SEQ ID NO: 2261377 - DNA, 25 bp, Homo sapien
gcttccagatggtctgaatgcccag

SEQ ID NO: 2261378 - DNA, 25 bp, Homo sapien
ggcttccagatggtctgaatgccca

SEQ ID NO: 2261379 - DNA, 25 bp, Homo sapien
ccagtgactagggagtgactcggga

SEQ ID NO: 2261380 - DNA, 25 bp, Homo sapien
gggtccagtgactagggagtgactc

SEQ ID NO: 2261381 - DNA, 25 bp, Homo sapien
tcactgagggtccagtgactaggga

SEQ ID NO: 2261382 - DNA, 25 bp, Homo sapien
gtgactagggagtgactcgggagct

SEQ ID NO: 2261383 - DNA, 25 bp, Homo sapien
aggagttctccgctctatagagcga

SEQ ID NO: 2261384 - DNA, 25 bp, Homo sapien
gggtaagtccctctcaggctgcatg

SEQ ID NO: 2261385 - DNA, 25 bp, Homo sapien
gatgccctgggtaacctgacctgac

SEQ ID NO: 2261386 - DNA, 25 bp, Homo sapien
ggctctgccggaggctgaagacctc

SEQ ID NO: 2261387 - DNA, 25 bp, Homo sapien
ccctaagtggcggatagccagaagg

SEQ ID NO: 2261388 - DNA, 25 bp, Homo sapien
taagtagagtgggagagacgccacc

SEQ ID NO: 2261389 - DNA, 25 bp, Homo sapien
ctcctgctgttcacaagctattcca

SEQ ID NO: 2261390 - DNA, 25 bp, Homo sapien
tgctgttcacaagctattccatggg

SEQ ID NO: 2261391 - DNA, 25 bp, Homo sapien
gagtcctcggtagaccaccttgatg

SEQ ID NO: 2261392 - DNA, 25 bp, Homo sapien
gatggactcccactgtttgctttgg

SEQ ID NO: 2261393 - DNA, 25 bp, Homo sapien
gaagtcatggatttgtggctcagca

SEQ ID NO: 2261394 - DNA, 25 bp, Homo sapien
cagcggccaagcttaagccatgaag

SEQ ID NO: 2261395 - DNA, 25 bp, Homo sapien
tgaggaagcccctaggtccacacag

SEQ ID NO: 2261396 - DNA, 25 bp, Homo sapien
acttttgccaccctcctgaggaagc

SEQ ID NO: 2261397 - DNA, 25 bp, Homo sapien
ggcccgacttttgccaccctcctga

SEQ ID NO: 2261398 - DNA, 25 bp, Homo sapien
tcctgaggaagcccctaggtccaca

SEQ ID NO: 2261399 - DNA, 25 bp, Homo sapien
cttccacacttgcaggtgtcacgtt

SEQ ID NO: 2261400 - DNA, 25 bp, Homo sapien
cacacttgcaggtgtcacgttttgc

SEQ ID NO: 2261401 - DNA, 25 bp, Homo sapien
ttgcaggtgtcacgttttgcaggga

SEQ ID NO: 2261402 - DNA, 25 bp, Homo sapien
cacttgcaggtgtcacgttttgcag

SEQ ID NO: 2261403 - DNA, 25 bp, Homo sapien
gcgtcatccccactattcccatgaa

SEQ ID NO: 2261404 - DNA, 25 bp, Homo sapien
aaccaaacaggagcaggcgtcatcc

SEQ ID NO: 2261405 - DNA, 25 bp, Homo sapien
aggcgtcatccccactattcccatg

SEQ ID NO: 2261406 - DNA, 25 bp, Homo sapien
cacaaaaccaaacaggagcaggcgt

SEQ ID NO: 2261407 - DNA, 25 bp, Homo sapien
ccttttcgacttggcagcaccggaa

SEQ ID NO: 2261408 - DNA, 25 bp, Homo sapien
caccggaagacgcattttccaggaa

SEQ ID NO: 2261409 - DNA, 25 bp, Homo sapien
ccctcatttcattggacttctcttc

SEQ ID NO: 2261410 - DNA, 25 bp, Homo sapien
tctcttccccttttcgacttggcag

SEQ ID NO: 2261411 - DNA, 25 bp, Homo sapien
tctgtgaatcccttgtccacaagct

SEQ ID NO: 2261412 - DNA, 25 bp, Homo sapien
gacatcatgctaccccaaaagaatc

SEQ ID NO: 2261413 - DNA, 25 bp, Homo sapien
caaacatgacacaggttccacaggg

SEQ ID NO: 2261414 - DNA, 25 bp, Homo sapien
tggcccttcatggagagacatcatg

SEQ ID NO: 2261415 - DNA, 25 bp, Homo sapien
acatctatagtgtcccctggacttc

SEQ ID NO: 2261416 - DNA, 25 bp, Homo sapien
agtgacatctatagtgtcccctgga

SEQ ID NO: 2261417 - DNA, 25 bp, Homo sapien
tgacatctatagtgtcccctggact

SEQ ID NO: 2261418 - DNA, 25 bp, Homo sapien
gacatctatagtgtcccctggactt

SEQ ID NO: 2261419 - DNA, 25 bp, Homo sapien
gatgtcatgcctgtattgtagtcaa

SEQ ID NO: 2261420 - DNA, 25 bp, Homo sapien
gctgcacacagtacactcccggcct

SEQ ID NO: 2261421 - DNA, 25 bp, Homo sapien
tgcacattcattctccctacaaatc

SEQ ID NO: 2261422 - DNA, 25 bp, Homo sapien
tgtcatgcctgtattgtagtcaaag

SEQ ID NO: 2261423 - DNA, 25 bp, Homo sapien
ggatctctgtgtccatggtataaat

SEQ ID NO: 2261424 - DNA, 25 bp, Homo sapien
ggggatctctgtgtccatggtataa

SEQ ID NO: 2261425 - DNA, 25 bp, Homo sapien
ttaggggatctctgtgtccatggta

SEQ ID NO: 2261426 - DNA, 25 bp, Homo sapien
taggggatctctgtgtccatggtat

SEQ ID NO: 2261427 - DNA, 25 bp, Homo sapien
gcttggtaaggtcgtcattaaacac

SEQ ID NO: 2261428 - DNA, 25 bp, Homo sapien
ggcttggtaaggtcgtcattaaaca

SEQ ID NO: 2261429 - DNA, 25 bp, Homo sapien
tgattggcttggtaaggtcgtcatt

SEQ ID NO: 2261430 - DNA, 25 bp, Homo sapien
ttggcttggtaaggtcgtcattaaa

SEQ ID NO: 2261431 - DNA, 25 bp, Homo sapien
aattccagcccgttgaggccaaaca

SEQ ID NO: 2261432 - DNA, 25 bp, Homo sapien
ggaagacagtagctctcctgcaaag

SEQ ID NO: 2261433 - DNA, 25 bp, Homo sapien
caacgtcatacagggaattggtaac

SEQ ID NO: 2261434 - DNA, 25 bp, Homo sapien
tttacaaggccgagaacattccaga

SEQ ID NO: 2261435 - DNA, 25 bp, Homo sapien
gccacgtgcaggagcactcgcaaga

SEQ ID NO: 2261436 - DNA, 25 bp, Homo sapien
gcactcgcaagacggcgaaggacat

SEQ ID NO: 2261437 - DNA, 25 bp, Homo sapien
tgcaggagcactcgcaagacggcga

SEQ ID NO: 2261438 - DNA, 25 bp, Homo sapien
ctccacagtccggaccgccacgtgc

SEQ ID NO: 2261439 - DNA, 25 bp, Homo sapien
gaagcatagctgtcttaccctgggc

SEQ ID NO: 2261440 - DNA, 25 bp, Homo sapien
tcaaggcaagaactggacctacgtc

SEQ ID NO: 2261441 - DNA, 25 bp, Homo sapien
taaaccggaactgggagtgtgacag

SEQ ID NO: 2261442 - DNA, 25 bp, Homo sapien
tgtaccaatcagatcaaggccttgg

SEQ ID NO: 2261443 - DNA, 25 bp, Homo sapien
catgggggatcaggccctcgcaccc

SEQ ID NO: 2261444 - DNA, 25 bp, Homo sapien
tgggggatcaggccctcgcaccccg

SEQ ID NO: 2261445 - DNA, 25 bp, Homo sapien
atgggggatcaggccctcgcacccc

SEQ ID NO: 2261446 - DNA, 25 bp, Homo sapien
tcatgggggatcaggccctcgcacc

SEQ ID NO: 2261447 - DNA, 25 bp, Homo sapien
caggtgaggtttacgagcaagcgca

SEQ ID NO: 2261448 - DNA, 25 bp, Homo sapien
ctggattccggaagcttctggtgca

SEQ ID NO: 2261449 - DNA, 25 bp, Homo sapien
aggtggtactgccacaccaggtgag

SEQ ID NO: 2261450 - DNA, 25 bp, Homo sapien
tgtgcagggttacctgggctcgcac

SEQ ID NO: 2261451 - DNA, 25 bp, Homo sapien
accgccacggcgatgtgctgggcct

SEQ ID NO: 2261452 - DNA, 25 bp, Homo sapien
agcggaggcacagcgccccatggta

SEQ ID NO: 2261453 - DNA, 25 bp, Homo sapien
tggaagcggaggcacagcgccccat

SEQ ID NO: 2261454 - DNA, 25 bp, Homo sapien
ggcacagcgccccatggtagctgtc

SEQ ID NO: 2261455 - DNA, 25 bp, Homo sapien
ctggagggaaaccaggtagtggagc

SEQ ID NO: 2261456 - DNA, 25 bp, Homo sapien
tggagggaaaccaggtagtggagca

SEQ ID NO: 2261457 - DNA, 25 bp, Homo sapien
gagggaaaccaggtagtggagcagg

SEQ ID NO: 2261458 - DNA, 25 bp, Homo sapien
gggaaaccaggtagtggagcaggta

SEQ ID NO: 2261459 - DNA, 25 bp, Homo sapien
ggaagcgcagaactctcagcatgag

SEQ ID NO: 2261460 - DNA, 25 bp, Homo sapien
gaagcgcagaactctcagcatgaga

SEQ ID NO: 2261461 - DNA, 25 bp, Homo sapien
tggaagcgcagaactctcagcatga

SEQ ID NO: 2261462 - DNA, 25 bp, Homo sapien
gacatcaggctccttctcacgtttg

SEQ ID NO: 2261463 - DNA, 25 bp, Homo sapien
gctttcgaggctccccataatctgg

SEQ ID NO: 2261464 - DNA, 25 bp, Homo sapien
tcaaggccatccaggtacttccttc

SEQ ID NO: 2261465 - DNA, 25 bp, Homo sapien
taatctggcccagcgtttctctcac

SEQ ID NO: 2261466 - DNA, 25 bp, Homo sapien
ggtaaatggtgcaagcagtggcaat

SEQ ID NO: 2261467 - DNA, 25 bp, Homo sapien
ccttataaggatgggtgtggttaca

SEQ ID NO: 2261468 - DNA, 25 bp, Homo sapien
ggctgcattccttggttgctggccc

SEQ ID NO: 2261469 - DNA, 25 bp, Homo sapien
cacgtggccttctctgacggtgact

SEQ ID NO: 2261470 - DNA, 25 bp, Homo sapien
tgatctcccatcttaaggtctctaa

SEQ ID NO: 2261471 - DNA, 25 bp, Homo sapien
aacactactgtggatgtcctggcag

SEQ ID NO: 2261472 - DNA, 25 bp, Homo sapien
taaagtctaccggagtgcagggccg

SEQ ID NO: 2261473 - DNA, 25 bp, Homo sapien
agcgttctccaaaaggctccgcgcg

SEQ ID NO: 2261474 - DNA, 25 bp, Homo sapien
tgacaggaaccctcggacagcgttc

SEQ ID NO: 2261475 - DNA, 25 bp, Homo sapien
ttcccggcctctgctacggtgagca

SEQ ID NO: 2261476 - DNA, 25 bp, Homo sapien
ggcgcggcgcaaaggcggaggtcct

SEQ ID NO: 2261477 - DNA, 25 bp, Homo sapien
gcggctcactgctcagcacaccggg

SEQ ID NO: 2261478 - DNA, 25 bp, Homo sapien
ggtccacgccatggggatacctcgc

SEQ ID NO: 2261479 - DNA, 25 bp, Homo sapien
cgccactcggaagtgcaccctggct

SEQ ID NO: 2261480 - DNA, 25 bp, Homo sapien
gccactcggaagtgcaccctggctt

SEQ ID NO: 2261481 - DNA, 25 bp, Homo sapien
tcgccactcggaagtgcaccctggc

SEQ ID NO: 2261482 - DNA, 25 bp, Homo sapien
actggaggtgctcgcggcgggcgtg

SEQ ID NO: 2261483 - DNA, 25 bp, Homo sapien
ctccggtcacccgagccgcaaatcc

SEQ ID NO: 2261484 - DNA, 25 bp, Homo sapien
cccagcgtggcttaggccaggtaca

SEQ ID NO: 2261485 - DNA, 25 bp, Homo sapien
tgtcggcccagcgtggcttaggcca

SEQ ID NO: 2261486 - DNA, 25 bp, Homo sapien
ttaggccaggtacaaccggcagcgc

SEQ ID NO: 2261487 - DNA, 25 bp, Homo sapien
catgcacgggatcttgggtgtgacc

SEQ ID NO: 2261488 - DNA, 25 bp, Homo sapien
ttttcagcgatttgagtaaccagga

SEQ ID NO: 2261489 - DNA, 25 bp, Homo sapien
tggtgaatcttctgcctggtattat

SEQ ID NO: 2261490 - DNA, 25 bp, Homo sapien
tgagcaagctctgagcatgcacggg

SEQ ID NO: 2261491 - DNA, 25 bp, Homo sapien
aagggccaagtgaatgcaaggagct

SEQ ID NO: 2261492 - DNA, 25 bp, Homo sapien
gaagggccaagtgaatgcaaggagc

SEQ ID NO: 2261493 - DNA, 25 bp, Homo sapien
tgtcctgggcctccgatagcccagg

SEQ ID NO: 2261494 - DNA, 25 bp, Homo sapien
tgggcctccgatagcccagggacga

SEQ ID NO: 2261495 - DNA, 25 bp, Homo sapien
gaggtcagcgaggtcacctctgaaa

SEQ ID NO: 2261496 - DNA, 25 bp, Homo sapien
ctgaaacaaggctccgctgcgatgg

SEQ ID NO: 2261497 - DNA, 25 bp, Homo sapien
acaaggctccgctgcgatggttgga

SEQ ID NO: 2261498 - DNA, 25 bp, Homo sapien
ctgcaacgaggtcagcgaggtcacc

SEQ ID NO: 2261499 - DNA, 25 bp, Homo sapien
cttttcttccaagccagctcgtcat

SEQ ID NO: 2261500 - DNA, 25 bp, Homo sapien
tctcttttcttccaagccagctcgt

SEQ ID NO: 2261501 - DNA, 25 bp, Homo sapien
gtactgtccagctcctctcttttct

SEQ ID NO: 2261502 - DNA, 25 bp, Homo sapien
cagtactgtccagctcctctctttt

SEQ ID NO: 2261503 - DNA, 25 bp, Homo sapien
tcatcaatgaccttgcaaagcccat

SEQ ID NO: 2261504 - DNA, 25 bp, Homo sapien
gaccttgcaaagcccatggatgttg

SEQ ID NO: 2261505 - DNA, 25 bp, Homo sapien
ccttgcaaagcccatggatgttgtt

SEQ ID NO: 2261506 - DNA, 25 bp, Homo sapien
atgaccttgcaaagcccatggatgt

SEQ ID NO: 2261507 - DNA, 25 bp, Homo sapien
caggcactgtcgatctgcagaacgg

SEQ ID NO: 2261508 - DNA, 25 bp, Homo sapien
cgatctgcagaacggtgcgggcatt

SEQ ID NO: 2261509 - DNA, 25 bp, Homo sapien
cactgtcgatctgcagaacggtgcg

SEQ ID NO: 2261510 - DNA, 25 bp, Homo sapien
agcaagacaggcactgtcgatctgc

SEQ ID NO: 2261511 - DNA, 25 bp, Homo sapien
tccagcttctggttctcagtctcca

SEQ ID NO: 2261512 - DNA, 25 bp, Homo sapien
tctccagcttctggttctcagtctc

SEQ ID NO: 2261513 - DNA, 25 bp, Homo sapien
cagcttctggttctcagtctccagg

SEQ ID NO: 2261514 - DNA, 25 bp, Homo sapien
tgctctccagcttctggttctcagt

SEQ ID NO: 2261515 - DNA, 25 bp, Homo sapien
cccgtggccaggccccagaccccat

SEQ ID NO: 2261516 - DNA, 25 bp, Homo sapien
gtggccaggccccagaccccatgcc

SEQ ID NO: 2261517 - DNA, 25 bp, Homo sapien
ggccccagaccccatgccaccctgg

SEQ ID NO: 2261518 - DNA, 25 bp, Homo sapien
ggccaggccccagaccccatgccac

SEQ ID NO: 2261519 - DNA, 25 bp, Homo sapien
catagacgcttgcctcactgctgaa

SEQ ID NO: 2261520 - DNA, 25 bp, Homo sapien
atagacgcttgcctcactgctgaac

SEQ ID NO: 2261521 - DNA, 25 bp, Homo sapien
tagacgcttgcctcactgctgaaca

SEQ ID NO: 2261522 - DNA, 25 bp, Homo sapien
ctctccggcgggagagtgagaggac

SEQ ID NO: 2261523 - DNA, 25 bp, Homo sapien
tgagaggacaggactcgggctttgc

SEQ ID NO: 2261524 - DNA, 25 bp, Homo sapien
gctctccggcgggagagtgagagga

SEQ ID NO: 2261525 - DNA, 25 bp, Homo sapien
gagtgagaggacaggactcgggctt

SEQ ID NO: 2261526 - DNA, 25 bp, Homo sapien
tggtcctacaggtcttcgggcaaca

SEQ ID NO: 2261527 - DNA, 25 bp, Homo sapien
tagcaccgacccaaactatgaggac

SEQ ID NO: 2261528 - DNA, 25 bp, Homo sapien
tatgaggacacaaaagacccttcag

SEQ ID NO: 2261529 - DNA, 25 bp, Homo sapien
tcgggcaacatgagaagtgacaagc

SEQ ID NO: 2261530 - DNA, 25 bp, Homo sapien
ggtactgaggggtaatagccgctct

SEQ ID NO: 2261531 - DNA, 25 bp, Homo sapien
caccgatgtgggaagcaggtactga

SEQ ID NO: 2261532 - DNA, 25 bp, Homo sapien
ggtcacgtggcaccgcatctgcact

SEQ ID NO: 2261533 - DNA, 25 bp, Homo sapien
tcgggacccaaatcagccaccgatg

SEQ ID NO: 2261534 - DNA, 25 bp, Homo sapien
tgtggtgagacaccctgactggaga

SEQ ID NO: 2261535 - DNA, 25 bp, Homo sapien
acaccctgactggagaagcatgttc

SEQ ID NO: 2261536 - DNA, 25 bp, Homo sapien
ctgtggtgagacaccctgactggag

SEQ ID NO: 2261537 - DNA, 25 bp, Homo sapien
gagacaccctgactggagaagcatg

SEQ ID NO: 2261538 - DNA, 25 bp, Homo sapien
agcaaagtgcagctcccgtgcccct

SEQ ID NO: 2261539 - DNA, 25 bp, Homo sapien
ccccagcaaagtgcagctcccgtgc

SEQ ID NO: 2261540 - DNA, 25 bp, Homo sapien
ccagcaaagtgcagctcccgtgccc

SEQ ID NO: 2261541 - DNA, 25 bp, Homo sapien
gcaaagtgcagctcccgtgcccctc

SEQ ID NO: 2261542 - DNA, 25 bp, Homo sapien
tcaagtcccccttgggagtgttctg

SEQ ID NO: 2261543 - DNA, 25 bp, Homo sapien
accgctatttcctgaggccgagcag

SEQ ID NO: 2261544 - DNA, 25 bp, Homo sapien
agggaaccgctatttcctgaggccg

SEQ ID NO: 2261545 - DNA, 25 bp, Homo sapien
gggatgaagagggaaccgctatttc

SEQ ID NO: 2261546 - DNA, 25 bp, Homo sapien
gcatgctcctcttccggcaacggat

SEQ ID NO: 2261547 - DNA, 25 bp, Homo sapien
agctccccgggcatctccgggcagg

SEQ ID NO: 2261548 - DNA, 25 bp, Homo sapien
ctcctcttccggcaacggatgggtc

SEQ ID NO: 2261549 - DNA, 25 bp, Homo sapien
gagctccccgggcatctccgggcag

SEQ ID NO: 2261550 - DNA, 25 bp, Homo sapien
actcattggcgccactggggaccgg

SEQ ID NO: 2261551 - DNA, 25 bp, Homo sapien
caagttgcgcccagtcctcaatggg

SEQ ID NO: 2261552 - DNA, 25 bp, Homo sapien
attctgcgcgtaaccgtccacctag

SEQ ID NO: 2261553 - DNA, 25 bp, Homo sapien
tcaatgggccccttcgctggggtgc

SEQ ID NO: 2261554 - DNA, 25 bp, Homo sapien
gattagggggttggctgcgctcagc

SEQ ID NO: 2261555 - DNA, 25 bp, Homo sapien
gccggcgctacagggggcctgagtg

SEQ ID NO: 2261556 - DNA, 25 bp, Homo sapien
ccagagccggcgctacagggggcct

SEQ ID NO: 2261557 - DNA, 25 bp, Homo sapien
cccggcgagggtcgcgggtgagagg

SEQ ID NO: 2261558 - DNA, 25 bp, Homo sapien
accatgacctgagacattttctcct

SEQ ID NO: 2261559 - DNA, 25 bp, Homo sapien
gagacattttctcctctaactccat

SEQ ID NO: 2261560 - DNA, 25 bp, Homo sapien
ctaaccatgacctgagacattttct

SEQ ID NO: 2261561 - DNA, 25 bp, Homo sapien
tgagacattttctcctctaactcca

SEQ ID NO: 2261562 - DNA, 25 bp, Homo sapien
ttccacgtgcgagcctgcaccgccg

SEQ ID NO: 2261563 - DNA, 25 bp, Homo sapien
cggcttccacgtgcgagcctgcacc

SEQ ID NO: 2261564 - DNA, 25 bp, Homo sapien
gcttccacgtgcgagcctgcaccgc

SEQ ID NO: 2261565 - DNA, 25 bp, Homo sapien
tcggcttccacgtgcgagcctgcac

SEQ ID NO: 2261566 - DNA, 25 bp, Homo sapien
ccgtgctcctgtacgaccagggcgg

SEQ ID NO: 2261567 - DNA, 25 bp, Homo sapien
cgagctgtacgagtcggcgcgcatc

SEQ ID NO: 2261568 - DNA, 25 bp, Homo sapien
tggactgccgcagccgcgagctgta

SEQ ID NO: 2261569 - DNA, 25 bp, Homo sapien
cagcctgtcggtgcgcgcgctcctg

SEQ ID NO: 2261570 - DNA, 25 bp, Homo sapien
tgtgtgcgcacgtgtcggcgctcac

SEQ ID NO: 2261571 - DNA, 25 bp, Homo sapien
gagcctggagaggatctatgcttgt

SEQ ID NO: 2261572 - DNA, 25 bp, Homo sapien
tgtgagtgagggtggccaaactacc

SEQ ID NO: 2261573 - DNA, 25 bp, Homo sapien
cagatgtcttgacgggatcactggg

SEQ ID NO: 2261574 - DNA, 25 bp, Homo sapien
gcacacaacagccgtgcaggaaaga

SEQ ID NO: 2261575 - DNA, 25 bp, Homo sapien
cgaagcacacaacagccgtgcagga

SEQ ID NO: 2261576 - DNA, 25 bp, Homo sapien
caagcaggaccacccacactcagcg

SEQ ID NO: 2261577 - DNA, 25 bp, Homo sapien
aagcacacaacagccgtgcaggaaa

SEQ ID NO: 2261578 - DNA, 25 bp, Homo sapien
agcgccatgcgccacaccctcaaat

SEQ ID NO: 2261579 - DNA, 25 bp, Homo sapien
caaatctcaaaatccagcagaggcc

SEQ ID NO: 2261580 - DNA, 25 bp, Homo sapien
tgggggaggggaccgaaagcatcca

SEQ ID NO: 2261581 - DNA, 25 bp, Homo sapien
tgccagcaccccctcggcttttggc

SEQ ID NO: 2261582 - DNA, 25 bp, Homo sapien
ttggggggctggccagcacggaggc

SEQ ID NO: 2261583 - DNA, 25 bp, Homo sapien
acttggggggctggccagcacggag

SEQ ID NO: 2261584 - DNA, 25 bp, Homo sapien
tcaccacttggggggctggccagca

SEQ ID NO: 2261585 - DNA, 25 bp, Homo sapien
ccacttggggggctggccagcacgg

SEQ ID NO: 2261586 - DNA, 25 bp, Homo sapien
tctgccccagcttccggatgtggcg

SEQ ID NO: 2261587 - DNA, 25 bp, Homo sapien
tgtggcgggccatgccctgctcaga

SEQ ID NO: 2261588 - DNA, 25 bp, Homo sapien
caggaacgaggtggcattgaaggct

SEQ ID NO: 2261589 - DNA, 25 bp, Homo sapien
gatgtggcgcaggaacgaggtggca

SEQ ID NO: 2261590 - DNA, 25 bp, Homo sapien
actgacagagcctaagatgtccctg

SEQ ID NO: 2261591 - DNA, 25 bp, Homo sapien
gttcttccggatctgctcactgaca

SEQ ID NO: 2261592 - DNA, 25 bp, Homo sapien
ccgagcaaagttcttccggatctgc

SEQ ID NO: 2261593 - DNA, 25 bp, Homo sapien
agatgtccctgtcgaaggctgtgtc

SEQ ID NO: 2261594 - DNA, 25 bp, Homo sapien
aggctgaaggtcagggggggtctct

SEQ ID NO: 2261595 - DNA, 25 bp, Homo sapien
ctggggaaaggctgaaggtcagggg

SEQ ID NO: 2261596 - DNA, 25 bp, Homo sapien
cagaaggtgccggatgaagtctttg

SEQ ID NO: 2261597 - DNA, 25 bp, Homo sapien
ggtctcgctccagaaggtgccggat

SEQ ID NO: 2261598 - DNA, 25 bp, Homo sapien
caaaggtgccgcaaggcctgttggc

SEQ ID NO: 2261599 - DNA, 25 bp, Homo sapien
aaggcctgttggcaggtgaacctct

SEQ ID NO: 2261600 - DNA, 25 bp, Homo sapien
ttctgagatgtcatcccagaaagga

SEQ ID NO: 2261601 - DNA, 25 bp, Homo sapien
tcagggtcgctctcgtcgtagaagg

SEQ ID NO: 2261602 - DNA, 25 bp, Homo sapien
agtcaaactcatagctggccctcag

SEQ ID NO: 2261603 - DNA, 25 bp, Homo sapien
ctgattctgagatgtcatcccagaa

SEQ ID NO: 2261604 - DNA, 25 bp, Homo sapien
cacagatgaatcatccagctgtccc

SEQ ID NO: 2261605 - DNA, 25 bp, Homo sapien
cccacagatgaatcatccagctgtc

SEQ ID NO: 2261606 - DNA, 25 bp, Homo sapien
ccacagatgaatcatccagctgtcc

SEQ ID NO: 2261607 - DNA, 25 bp, Homo sapien
caggcaggcaggagacaagccttcc

SEQ ID NO: 2261608 - DNA, 25 bp, Homo sapien
ctccccaacccagcaggggcaggca

SEQ ID NO: 2261609 - DNA, 25 bp, Homo sapien
gcaggcaggagacaagccttcccag

SEQ ID NO: 2261610 - DNA, 25 bp, Homo sapien
ggagacaagccttcccagcggtcac

SEQ ID NO: 2261611 - DNA, 25 bp, Homo sapien
tcccgtagggtttctgctccaagag

SEQ ID NO: 2261612 - DNA, 25 bp, Homo sapien
cacatctacggccttcccgtagggt

SEQ ID NO: 2261613 - DNA, 25 bp, Homo sapien
gccttcccgtagggtttctgctcca

SEQ ID NO: 2261614 - DNA, 25 bp, Homo sapien
ccagggcccacacatctacggcctt

SEQ ID NO: 2261615 - DNA, 25 bp, Homo sapien
cacacacgcagccatgccgctcagt

SEQ ID NO: 2261616 - DNA, 25 bp, Homo sapien
ccagagacagacagacgcacgcaca

SEQ ID NO: 2261617 - DNA, 25 bp, Homo sapien
agccatgccgctcagtgtcactggc

SEQ ID NO: 2261618 - DNA, 25 bp, Homo sapien
gccagagacagacagacgcacgcac

SEQ ID NO: 2261619 - DNA, 25 bp, Homo sapien
aaggcaacgggcacaacagccttcc

SEQ ID NO: 2261620 - DNA, 25 bp, Homo sapien
ccacacaaaggcaacgggcacaaca

SEQ ID NO: 2261621 - DNA, 25 bp, Homo sapien
agcccaggaatggcccacacaaagg

SEQ ID NO: 2261622 - DNA, 25 bp, Homo sapien
gcaagcctcagggtgtcgtccctca

SEQ ID NO: 2261623 - DNA, 25 bp, Homo sapien
gagtccaaagtcagagaccatgatc

SEQ ID NO: 2261624 - DNA, 25 bp, Homo sapien
acaggcggtgcctagcatgttccca

SEQ ID NO: 2261625 - DNA, 25 bp, Homo sapien
cctcaaagggcgtggcatacaggag

SEQ ID NO: 2261626 - DNA, 25 bp, Homo sapien
gagaccatgatcttcgagtcctcaa

SEQ ID NO: 2261627 - DNA, 25 bp, Homo sapien
ccttggtggagcaggagatcaagaa

SEQ ID NO: 2261628 - DNA, 25 bp, Homo sapien
tgtgacacacggacaccgggaaaag

SEQ ID NO: 2261629 - DNA, 25 bp, Homo sapien
cgtgctcccgggaaaacaaaggcag

SEQ ID NO: 2261630 - DNA, 25 bp, Homo sapien
cagtcagtcctgacgcggtgccggt

SEQ ID NO: 2261631 - DNA, 25 bp, Homo sapien
ccaggctgtgcaggtaggagacggc

SEQ ID NO: 2261632 - DNA, 25 bp, Homo sapien
gcaggtaggagacggcgccaaggac

SEQ ID NO: 2261633 - DNA, 25 bp, Homo sapien
tctctgtgtaggagccgcgctccat

SEQ ID NO: 2261634 - DNA, 25 bp, Homo sapien
aggagacggcgccaaggacctgacc

SEQ ID NO: 2261635 - DNA, 25 bp, Homo sapien
gcggtcaaacagctcgccacccgtc

SEQ ID NO: 2261636 - DNA, 25 bp, Homo sapien
atgcggtcaaacagctcgccacccg

SEQ ID NO: 2261637 - DNA, 25 bp, Homo sapien
gatgcggtcaaacagctcgccaccc

SEQ ID NO: 2261638 - DNA, 25 bp, Homo sapien
ggtcaaacagctcgccacccgtcac

SEQ ID NO: 2261639 - DNA, 25 bp, Homo sapien
gggtttggctgacccaggcactcag

SEQ ID NO: 2261640 - DNA, 25 bp, Homo sapien
acatcctccagagcgacgatgttgg

SEQ ID NO: 2261641 - DNA, 25 bp, Homo sapien
ccagagcgacgatgttggggtgact

SEQ ID NO: 2261642 - DNA, 25 bp, Homo sapien
tgggaagggctctcgtggacatcct

SEQ ID NO: 2261643 - DNA, 25 bp, Homo sapien
tctcgtggacatcctccagagcgac

SEQ ID NO: 2261644 - DNA, 25 bp, Homo sapien
ctacggagcactgcgatctcgttct

SEQ ID NO: 2261645 - DNA, 25 bp, Homo sapien
gccacgaggtgtgcggagccccgct

SEQ ID NO: 2261646 - DNA, 25 bp, Homo sapien
gggatgcacttgagggccacgaggt

SEQ ID NO: 2261647 - DNA, 25 bp, Homo sapien
cggagcactgcgatctcgttctcca

SEQ ID NO: 2261648 - DNA, 25 bp, Homo sapien
ggagagagagtggagcggggagggc

SEQ ID NO: 2261649 - DNA, 25 bp, Homo sapien
tgccgcagacggggcggtgggaggt

SEQ ID NO: 2261650 - DNA, 25 bp, Homo sapien
gcagacggggcggtgggaggtggga

SEQ ID NO: 2261651 - DNA, 25 bp, Homo sapien
gagagagtggagcggggagggcccc

SEQ ID NO: 2261652 - DNA, 25 bp, Homo sapien
ccactcacacatgccatctcacaga

SEQ ID NO: 2261653 - DNA, 25 bp, Homo sapien
gatggggaggccctacctggccctg

SEQ ID NO: 2261654 - DNA, 25 bp, Homo sapien
tcatctcacacccactcgcgtagtc

SEQ ID NO: 2261655 - DNA, 25 bp, Homo sapien
actcgcgtagtcacacacacatgcc

SEQ ID NO: 2261656 - DNA, 25 bp, Homo sapien
gagccgagcctctcgcggatctcgt

SEQ ID NO: 2261657 - DNA, 25 bp, Homo sapien
gatgtcctccgtgtgtttcttcagc

SEQ ID NO: 2261658 - DNA, 25 bp, Homo sapien
ctgatgtcctccgtgtgtttcttca

SEQ ID NO: 2261659 - DNA, 25 bp, Homo sapien
cgcggatctcgtagacgctgctgat

SEQ ID NO: 2261660 - DNA, 25 bp, Homo sapien
ccgccgggggcaagggcagcttcct

SEQ ID NO: 2261661 - DNA, 25 bp, Homo sapien
cgccccgccgggggcaagggcagct

SEQ ID NO: 2261662 - DNA, 25 bp, Homo sapien
ctccacatcccaggcctacagctgc

SEQ ID NO: 2261663 - DNA, 25 bp, Homo sapien
atcccaggcctacagctgctatccc

SEQ ID NO: 2261664 - DNA, 25 bp, Homo sapien
aggcctacagctgctatcccacgca

SEQ ID NO: 2261665 - DNA, 25 bp, Homo sapien
cacatcccaggcctacagctgctat

SEQ ID NO: 2261666 - DNA, 25 bp, Homo sapien
cccgaaggcgaccagcgcctggatg

SEQ ID NO: 2261667 - DNA, 25 bp, Homo sapien
ggcgaccagcgcctggatgctgcct

SEQ ID NO: 2261668 - DNA, 25 bp, Homo sapien
acacatccggccgctttccagaagg

SEQ ID NO: 2261669 - DNA, 25 bp, Homo sapien
acatccggccgctttccagaaggct

SEQ ID NO: 2261670 - DNA, 25 bp, Homo sapien
tgcgtggaccgagcgcgtgcgggca

SEQ ID NO: 2261671 - DNA, 25 bp, Homo sapien
ggcgcgccaggcgtgacaggtgtgc

SEQ ID NO: 2261672 - DNA, 25 bp, Homo sapien
agccacctgccaagaccgcggccac

SEQ ID NO: 2261673 - DNA, 25 bp, Homo sapien
gtgtgctgcggacgcgcaaggctgc

SEQ ID NO: 2261674 - DNA, 25 bp, Homo sapien
gtgccgcagcgtcgtgccgcgcagt

SEQ ID NO: 2261675 - DNA, 25 bp, Homo sapien
gccgcagcgtcgtgccgcgcagtgg

SEQ ID NO: 2261676 - DNA, 25 bp, Homo sapien
gcgggtgccgcagcgtcgtgccgcg

SEQ ID NO: 2261677 - DNA, 25 bp, Homo sapien
ctggagcgggtgccgcagcgtcgtg

SEQ ID NO: 2261678 - DNA, 25 bp, Homo sapien
cttgtaaggcaatcgccgggatccg

SEQ ID NO: 2261679 - DNA, 25 bp, Homo sapien
ttgtaaggcaatcgccgggatccgg

SEQ ID NO: 2261680 - DNA, 25 bp, Homo sapien
tgtaaggcaatcgccgggatccggc

SEQ ID NO: 2261681 - DNA, 25 bp, Homo sapien
gtaaggcaatcgccgggatccggct

SEQ ID NO: 2261682 - DNA, 25 bp, Homo sapien
ttctctacccagcagccagagcatt

SEQ ID NO: 2261683 - DNA, 25 bp, Homo sapien
gccagagcattccttttattgagat

SEQ ID NO: 2261684 - DNA, 25 bp, Homo sapien
cagcagccagagcattccttttatt

SEQ ID NO: 2261685 - DNA, 25 bp, Homo sapien
tacccagcagccagagcattccttt

SEQ ID NO: 2261686 - DNA, 25 bp, Homo sapien
cgacgtcttcaagagagtccacggg

SEQ ID NO: 2261687 - DNA, 25 bp, Homo sapien
ccagcatcacaagggttccgtcaag

SEQ ID NO: 2261688 - DNA, 25 bp, Homo sapien
cagagagtgtatctccgcgaaccca

SEQ ID NO: 2261689 - DNA, 25 bp, Homo sapien
ccaggaaataagtgcgggtgaccga

SEQ ID NO: 2261690 - DNA, 25 bp, Homo sapien
gatcttatcaattagagtgcggcgc

SEQ ID NO: 2261691 - DNA, 25 bp, Homo sapien
tggagaggttgcagaatcattcacc

SEQ ID NO: 2261692 - DNA, 25 bp, Homo sapien
tattcagagtgtcacgtgtccacca

SEQ ID NO: 2261693 - DNA, 25 bp, Homo sapien
acagatgcctattttaagttccctc

SEQ ID NO: 2261694 - DNA, 25 bp, Homo sapien
tcacctactgaggaacatcttaatt

SEQ ID NO: 2261695 - DNA, 25 bp, Homo sapien
catagagtaggtagctttgtcaggc

SEQ ID NO: 2261696 - DNA, 25 bp, Homo sapien
aatactatcgcactggtctttaagg

SEQ ID NO: 2261697 - DNA, 25 bp, Homo sapien
tctttgcatgggttcatagctttcc

SEQ ID NO: 2261698 - DNA, 25 bp, Homo sapien
gccgcggaggggtgaagtccgggca

SEQ ID NO: 2261699 - DNA, 25 bp, Homo sapien
agctcacatcaccagctcacctctg

SEQ ID NO: 2261700 - DNA, 25 bp, Homo sapien
cagctcacctctggtagccatagca

SEQ ID NO: 2261701 - DNA, 25 bp, Homo sapien
gctcacctctggtagccatagcagc

SEQ ID NO: 2261702 - DNA, 25 bp, Homo sapien
tggtagccatagcagcccctgcttc

SEQ ID NO: 2261703 - DNA, 25 bp, Homo sapien
tctgcccctagccaaggagtgtgaa

SEQ ID NO: 2261704 - DNA, 25 bp, Homo sapien
gctgagtgaccccaagaaaggcttc

SEQ ID NO: 2261705 - DNA, 25 bp, Homo sapien
caaggcaaatatttcagctgggcta

SEQ ID NO: 2261706 - DNA, 25 bp, Homo sapien
tttgtctgtcacgtccagtcccgag

SEQ ID NO: 2261707 - DNA, 25 bp, Homo sapien
ctccactagaaagggcgctccagaa

SEQ ID NO: 2261708 - DNA, 25 bp, Homo sapien
tagaaagggcgctccagaagctggc

SEQ ID NO: 2261709 - DNA, 25 bp, Homo sapien
ctagaaagggcgctccagaagctgg

SEQ ID NO: 2261710 - DNA, 25 bp, Homo sapien
tcactccactagaaagggcgctcca

SEQ ID NO: 2261711 - DNA, 25 bp, Homo sapien
tcctcatgcagacaccaggcatggc

SEQ ID NO: 2261712 - DNA, 25 bp, Homo sapien
cctcatgtgctactggagagtagca

SEQ ID NO: 2261713 - DNA, 25 bp, Homo sapien
gaagccccggtactggcctggcttg

SEQ ID NO: 2261714 - DNA, 25 bp, Homo sapien
ctactggagagtagcacagtgcagg

SEQ ID NO: 2261715 - DNA, 25 bp, Homo sapien
ccagagaaggcaagcgagtcctcta

SEQ ID NO: 2261716 - DNA, 25 bp, Homo sapien
ggagtgactagtggcgttctgccac

SEQ ID NO: 2261717 - DNA, 25 bp, Homo sapien
aaatgtgacgaacaggaacccagag

SEQ ID NO: 2261718 - DNA, 25 bp, Homo sapien
tgtctgtcccaaatgtgacgaacag

SEQ ID NO: 2261719 - DNA, 25 bp, Homo sapien
caccatgacaacttttattgccctc

SEQ ID NO: 2261720 - DNA, 25 bp, Homo sapien
accatgacaacttttattgccctca

SEQ ID NO: 2261721 - DNA, 25 bp, Homo sapien
taatgtgcttggagagtgtggacaa

SEQ ID NO: 2261722 - DNA, 25 bp, Homo sapien
cacccaccctcctgcgggaccaaag

SEQ ID NO: 2261723 - DNA, 25 bp, Homo sapien
gcattctgaacgtgtagcaatcagg

SEQ ID NO: 2261724 - DNA, 25 bp, Homo sapien
tgtaatgtgcttggagagtgtggac

SEQ ID NO: 2261725 - DNA, 25 bp, Homo sapien
ttgtccatgggaccatctactgcag

SEQ ID NO: 2261726 - DNA, 25 bp, Homo sapien
tcttgtccatgggaccatctactgc

SEQ ID NO: 2261727 - DNA, 25 bp, Homo sapien
ccttcttgtccatgggaccatctac

SEQ ID NO: 2261728 - DNA, 25 bp, Homo sapien
tgtccatgggaccatctactgcagc

SEQ ID NO: 2261729 - DNA, 25 bp, Homo sapien
tgctcctccagcaagcggtcgtact

SEQ ID NO: 2261730 - DNA, 25 bp, Homo sapien
tttgcgtgctcctccagcaagcggt

SEQ ID NO: 2261731 - DNA, 25 bp, Homo sapien
gcagctttgcgtgctcctccagcaa

SEQ ID NO: 2261732 - DNA, 25 bp, Homo sapien
ctcagactgcttccgcatggccaga

SEQ ID NO: 2261733 - DNA, 25 bp, Homo sapien
caaacgaggttatacaggaggctac

SEQ ID NO: 2261734 - DNA, 25 bp, Homo sapien
ggaaaaaacccgactgctacagaca

SEQ ID NO: 2261735 - DNA, 25 bp, Homo sapien
tctagtggctctcggcaagggtaac

SEQ ID NO: 2261736 - DNA, 25 bp, Homo sapien
tccctttaatggagaggaactctag

SEQ ID NO: 2261737 - DNA, 25 bp, Homo sapien
gctattggtctgttttcagccagcc

SEQ ID NO: 2261738 - DNA, 25 bp, Homo sapien
ggaaggacacgaggtcgagcctcac

SEQ ID NO: 2261739 - DNA, 25 bp, Homo sapien
ttcagccagccctcgagcgtgcgtg

SEQ ID NO: 2261740 - DNA, 25 bp, Homo sapien
tctggacttccctgcggggaaggac

SEQ ID NO: 2261741 - DNA, 25 bp, Homo sapien
cgacatccaacttgcctccgtcaac

SEQ ID NO: 2261742 - DNA, 25 bp, Homo sapien
tccaacttgcctccgtcaacagcag

SEQ ID NO: 2261743 - DNA, 25 bp, Homo sapien
catccaacttgcctccgtcaacagc

SEQ ID NO: 2261744 - DNA, 25 bp, Homo sapien
gacatccaacttgcctccgtcaaca

SEQ ID NO: 2261745 - DNA, 25 bp, Homo sapien
tgtacttcttggccgcctcactagc

SEQ ID NO: 2261746 - DNA, 25 bp, Homo sapien
cttggccgcctcactagcactctcc

SEQ ID NO: 2261747 - DNA, 25 bp, Homo sapien
gagagtcaccaggcgtctaagcagg

SEQ ID NO: 2261748 - DNA, 25 bp, Homo sapien
tgagagtcaccaggcgtctaagcag

SEQ ID NO: 2261749 - DNA, 25 bp, Homo sapien
gaaaaagagcatgaagggctggcag

SEQ ID NO: 2261750 - DNA, 25 bp, Homo sapien
ggcaggagcacctcctggttgctcc

SEQ ID NO: 2261751 - DNA, 25 bp, Homo sapien
ctggcaggagcacctcctggttgct

SEQ ID NO: 2261752 - DNA, 25 bp, Homo sapien
ggctggcaggagcacctcctggttg

SEQ ID NO: 2261753 - DNA, 25 bp, Homo sapien
tcccaggtcccaacgtaagatagaa

SEQ ID NO: 2261754 - DNA, 25 bp, Homo sapien
ggctgcgctggaacacatccgttat

SEQ ID NO: 2261755 - DNA, 25 bp, Homo sapien
ttatgtaacagcaccccgaatgagg

SEQ ID NO: 2261756 - DNA, 25 bp, Homo sapien
ttggttcacccttgccccgagatgt

SEQ ID NO: 2261757 - DNA, 25 bp, Homo sapien
tcagaaggcaagggtcacacagggc

SEQ ID NO: 2261758 - DNA, 25 bp, Homo sapien
ctcagaaggcaagggtcacacaggg

SEQ ID NO: 2261759 - DNA, 25 bp, Homo sapien
agagagaaacaatgcatctgactca

SEQ ID NO: 2261760 - DNA, 25 bp, Homo sapien
actgagcgccctaggagccagagag

SEQ ID NO: 2261761 - DNA, 25 bp, Homo sapien
acagcctgaaggtggaggaagctac

SEQ ID NO: 2261762 - DNA, 25 bp, Homo sapien
gccagagagaaacaatgcatctgac

SEQ ID NO: 2261763 - DNA, 25 bp, Homo sapien
cggcatggccagaagtcaatggaga

SEQ ID NO: 2261764 - DNA, 25 bp, Homo sapien
atcggcatggccagaagtcaatgga

SEQ ID NO: 2261765 - DNA, 25 bp, Homo sapien
gcatggccagaagtcaatggagagg

SEQ ID NO: 2261766 - DNA, 25 bp, Homo sapien
catggccagaagtcaatggagaggc

SEQ ID NO: 2261767 - DNA, 25 bp, Homo sapien
tggatgacccgggatcattctcccc

SEQ ID NO: 2261768 - DNA, 25 bp, Homo sapien
catatattcctcaacctaggctggc

SEQ ID NO: 2261769 - DNA, 25 bp, Homo sapien
tgctgctaagttaccctcctgaggt

SEQ ID NO: 2261770 - DNA, 25 bp, Homo sapien
cttcctgctggatgacccgggatca

SEQ ID NO: 2261771 - DNA, 25 bp, Homo sapien
tcgtgtagcccctgctgtagtggtg

SEQ ID NO: 2261772 - DNA, 25 bp, Homo sapien
tagtggtgggcaggcaaaccgcctt

SEQ ID NO: 2261773 - DNA, 25 bp, Homo sapien
ccgccttggactcagccctcttggc

SEQ ID NO: 2261774 - DNA, 25 bp, Homo sapien
tgaccacctcgtgtagcccctgctg

SEQ ID NO: 2261775 - DNA, 25 bp, Homo sapien
ggcacactgaaaaggggtcttccgc

SEQ ID NO: 2261776 - DNA, 25 bp, Homo sapien
gcacactgaaaaggggtcttccgcc

SEQ ID NO: 2261777 - DNA, 25 bp, Homo sapien
tggactctgggtgaacacgccccag

SEQ ID NO: 2261778 - DNA, 25 bp, Homo sapien
ccagtggactctgggtgaacacgcc

SEQ ID NO: 2261779 - DNA, 25 bp, Homo sapien
agtggactctgggtgaacacgcccc

SEQ ID NO: 2261780 - DNA, 25 bp, Homo sapien
tggccagtggactctgggtgaacac

SEQ ID NO: 2261781 - DNA, 25 bp, Homo sapien
ttaagacaagtagtcatcgtagcgc

SEQ ID NO: 2261782 - DNA, 25 bp, Homo sapien
tctggaggttcaccttttccgtcac

SEQ ID NO: 2261783 - DNA, 25 bp, Homo sapien
gaaaagccagcaatgtagagattcc

SEQ ID NO: 2261784 - DNA, 25 bp, Homo sapien
tctgggcacggaaaagcttcatgtg

SEQ ID NO: 2261785 - DNA, 25 bp, Homo sapien
tacttccgaatttcgcgcacggcat

SEQ ID NO: 2261786 - DNA, 25 bp, Homo sapien
aaccacaaagaaggtgttgccatag

SEQ ID NO: 2261787 - DNA, 25 bp, Homo sapien
ggacactaacaactccaccagccgg

SEQ ID NO: 2261788 - DNA, 25 bp, Homo sapien
gagaaccacaaagaaggtgttgcca

SEQ ID NO: 2261789 - DNA, 25 bp, Homo sapien
acaactccaccagccgggacttgaa

SEQ ID NO: 2261790 - DNA, 25 bp, Homo sapien
tccaatggccgaatagcccatgcaa

SEQ ID NO: 2261791 - DNA, 25 bp, Homo sapien
tctccaatggccgaatagcccatgc

SEQ ID NO: 2261792 - DNA, 25 bp, Homo sapien
tcttctccaatggccgaatagccca

SEQ ID NO: 2261793 - DNA, 25 bp, Homo sapien
caatggccgaatagcccatgcaaag

SEQ ID NO: 2261794 - DNA, 25 bp, Homo sapien
tcattgtactcccctttgtaatatt

SEQ ID NO: 2261795 - DNA, 25 bp, Homo sapien
ttcattgtactcccctttgtaatat

SEQ ID NO: 2261796 - DNA, 25 bp, Homo sapien
tttcattgtactcccctttgtaata

SEQ ID NO: 2261797 - DNA, 25 bp, Homo sapien
gcaacacaacaaagacctccgcata

SEQ ID NO: 2261798 - DNA, 25 bp, Homo sapien
gaagcaacacaacaaagacctccgc

SEQ ID NO: 2261799 - DNA, 25 bp, Homo sapien
agacctccgcatagaggaaggtggc

SEQ ID NO: 2261800 - DNA, 25 bp, Homo sapien
caacaaagacctccgcatagaggaa

SEQ ID NO: 2261801 - DNA, 25 bp, Homo sapien
gttgctagaaggtttcccacaggaa

SEQ ID NO: 2261802 - DNA, 25 bp, Homo sapien
ttgctagaaggtttcccacaggaag

SEQ ID NO: 2261803 - DNA, 25 bp, Homo sapien
tgctagaaggtttcccacaggaaga

SEQ ID NO: 2261804 - DNA, 25 bp, Homo sapien
ctggcagggcacaaaaggtacggga

SEQ ID NO: 2261805 - DNA, 25 bp, Homo sapien
cagggcacaaaaggtacgggacttg

SEQ ID NO: 2261806 - DNA, 25 bp, Homo sapien
tggcagggcacaaaaggtacgggac

SEQ ID NO: 2261807 - DNA, 25 bp, Homo sapien
tccagttcagttaccctgcgaggct

SEQ ID NO: 2261808 - DNA, 25 bp, Homo sapien
gccaagaacatccagttcagttacc

SEQ ID NO: 2261809 - DNA, 25 bp, Homo sapien
gaacatccagttcagttaccctgcg

SEQ ID NO: 2261810 - DNA, 25 bp, Homo sapien
agttcagttaccctgcgaggctggg

SEQ ID NO: 2261811 - DNA, 25 bp, Homo sapien
agagcggcctctcccgacgatccct

SEQ ID NO: 2261812 - DNA, 25 bp, Homo sapien
agcacgtgtgtcaacacgtccagag

SEQ ID NO: 2261813 - DNA, 25 bp, Homo sapien
cccctccagcacgtgtgtcaacacg

SEQ ID NO: 2261814 - DNA, 25 bp, Homo sapien
caggaagcccgagatttccgacgcc

SEQ ID NO: 2261815 - DNA, 25 bp, Homo sapien
aggaggacgcctcggcacccatcgg

SEQ ID NO: 2261816 - DNA, 25 bp, Homo sapien
gcaccaagaggaggacgcctcggca

SEQ ID NO: 2261817 - DNA, 25 bp, Homo sapien
agaggaggacgcctcggcacccatc

SEQ ID NO: 2261818 - DNA, 25 bp, Homo sapien
accaagaggaggacgcctcggcacc

SEQ ID NO: 2261819 - DNA, 25 bp, Homo sapien
ggcgcccgcggagagaaaccggcac

SEQ ID NO: 2261820 - DNA, 25 bp, Homo sapien
aaggccgcacctagtccaagcgctg

SEQ ID NO: 2261821 - DNA, 25 bp, Homo sapien
gctctgcgggcccaaatccccgcta

SEQ ID NO: 2261822 - DNA, 25 bp, Homo sapien
aggcagaactcagccgcagaggcgg

SEQ ID NO: 2261823 - DNA, 25 bp, Homo sapien
gcgcaaaggcaggtctcgaccaagc

SEQ ID NO: 2261824 - DNA, 25 bp, Homo sapien
ctggaggcccgcaagagcgactcct

SEQ ID NO: 2261825 - DNA, 25 bp, Homo sapien
attcgggaccaagcgcaaaggcagg

SEQ ID NO: 2261826 - DNA, 25 bp, Homo sapien
tcctagagggcaggattcgggacca

SEQ ID NO: 2261827 - DNA, 25 bp, Homo sapien
tagacgcagtatcctcagaagccag

SEQ ID NO: 2261828 - DNA, 25 bp, Homo sapien
tctagacgcagtatcctcagaagcc

SEQ ID NO: 2261829 - DNA, 25 bp, Homo sapien
gttctagacgcagtatcctcagaag

SEQ ID NO: 2261830 - DNA, 25 bp, Homo sapien
ctagacgcagtatcctcagaagcca

SEQ ID NO: 2261831 - DNA, 25 bp, Homo sapien
cccagagcgaggggcctccgacttg

SEQ ID NO: 2261832 - DNA, 25 bp, Homo sapien
cccacccagagcgaggggcctccga

SEQ ID NO: 2261833 - DNA, 25 bp, Homo sapien
gagcgaggggcctccgacttggccc

SEQ ID NO: 2261834 - DNA, 25 bp, Homo sapien
agagcgaggggcctccgacttggcc

SEQ ID NO: 2261835 - DNA, 25 bp, Homo sapien
cgcccccgagaccagcttctagagg

SEQ ID NO: 2261836 - DNA, 25 bp, Homo sapien
agcttctagaggcgccgcccggttt

SEQ ID NO: 2261837 - DNA, 25 bp, Homo sapien
ccccgagaccagcttctagaggcgc

SEQ ID NO: 2261838 - DNA, 25 bp, Homo sapien
gagaccagcttctagaggcgccgcc

SEQ ID NO: 2261839 - DNA, 25 bp, Homo sapien
cctctctccctcgtcgatgggccgg

SEQ ID NO: 2261840 - DNA, 25 bp, Homo sapien
gctgcgggccccgagattccccggc

SEQ ID NO: 2261841 - DNA, 25 bp, Homo sapien
ctctccctcgtcgatgggccgggga

SEQ ID NO: 2261842 - DNA, 25 bp, Homo sapien
cgcctctctccctcgtcgatgggcc

SEQ ID NO: 2261843 - DNA, 25 bp, Homo sapien
caacagaactctcccacagcagccc

SEQ ID NO: 2261844 - DNA, 25 bp, Homo sapien
ggccccgccgcagcaacagaactct

SEQ ID NO: 2261845 - DNA, 25 bp, Homo sapien
cgagtttcccacagtcaacgtgcag

SEQ ID NO: 2261846 - DNA, 25 bp, Homo sapien
gtttcccacagtcaacgtgcaggcc

SEQ ID NO: 2261847 - DNA, 25 bp, Homo sapien
agaggaagaggcgcctcgggctccg

SEQ ID NO: 2261848 - DNA, 25 bp, Homo sapien
agggccgcttctctagtccgcgcgg

SEQ ID NO: 2261849 - DNA, 25 bp, Homo sapien
gcggccgtcccacgtctctgtggtg

SEQ ID NO: 2261850 - DNA, 25 bp, Homo sapien
cgtcccacgtctctgtggtgcggga

SEQ ID NO: 2261851 - DNA, 25 bp, Homo sapien
acgtccttcgcccatgtgtgatcgg

SEQ ID NO: 2261852 - DNA, 25 bp, Homo sapien
ggacaagtctctatgtgtgcagata

SEQ ID NO: 2261853 - DNA, 25 bp, Homo sapien
aaatggaatcatgtgctctgtggca

SEQ ID NO: 2261854 - DNA, 25 bp, Homo sapien
cgtggctagcactggttatcatctc

SEQ ID NO: 2261855 - DNA, 25 bp, Homo sapien
cacacacttgctacagttcgatggg

SEQ ID NO: 2261856 - DNA, 25 bp, Homo sapien
acacacacttgctacagttcgatgg

SEQ ID NO: 2261857 - DNA, 25 bp, Homo sapien
cacacacacttgctacagttcgatg

SEQ ID NO: 2261858 - DNA, 25 bp, Homo sapien
taggatttattcctgatcccaggag

SEQ ID NO: 2261859 - DNA, 25 bp, Homo sapien
ttaggatttattcctgatcccagga

SEQ ID NO: 2261860 - DNA, 25 bp, Homo sapien
tcggagggctgagagttgttcctcc

SEQ ID NO: 2261861 - DNA, 25 bp, Homo sapien
atcccaggaggtggccgattcggag

SEQ ID NO: 2261862 - DNA, 25 bp, Homo sapien
tatgagagtttacaaggttacttga

SEQ ID NO: 2261863 - DNA, 25 bp, Homo sapien
cacacagtctgaatgggaattcaaa

SEQ ID NO: 2261864 - DNA, 25 bp, Homo sapien
ggttacttgatacatagaaatccat

SEQ ID NO: 2261865 - DNA, 25 bp, Homo sapien
gatgataggattgtgtacgcagaaa

SEQ ID NO: 2261866 - DNA, 25 bp, Homo sapien
cacgtcccactgacccaacgagtcc

SEQ ID NO: 2261867 - DNA, 25 bp, Homo sapien
caacgagtccccttccagcattgag

SEQ ID NO: 2261868 - DNA, 25 bp, Homo sapien
gagtccccttccagcattgagaagc

SEQ ID NO: 2261869 - DNA, 25 bp, Homo sapien
ttcagcccagcaaacgtgaagccca

SEQ ID NO: 2261870 - DNA, 25 bp, Homo sapien
cacttccgccagcccctctgtggat

SEQ ID NO: 2261871 - DNA, 25 bp, Homo sapien
cttccgccagcccctctgtggatgg

SEQ ID NO: 2261872 - DNA, 25 bp, Homo sapien
cgtcctcccacttccgccagcccct

SEQ ID NO: 2261873 - DNA, 25 bp, Homo sapien
tccgccagcccctctgtggatggcc

SEQ ID NO: 2261874 - DNA, 25 bp, Homo sapien
ctcagctccatctcctgcccaacgc

SEQ ID NO: 2261875 - DNA, 25 bp, Homo sapien
cctcagctccatctcctgcccaacg

SEQ ID NO: 2261876 - DNA, 25 bp, Homo sapien
gcctcagctccatctcctgcccaac

SEQ ID NO: 2261877 - DNA, 25 bp, Homo sapien
gcccacggtcagtactccatcatgc

SEQ ID NO: 2261878 - DNA, 25 bp, Homo sapien
ctcttgtctgggtggtgggcgcagg

SEQ ID NO: 2261879 - DNA, 25 bp, Homo sapien
tctcttgtctgggtggtgggcgcag

SEQ ID NO: 2261880 - DNA, 25 bp, Homo sapien
tgggcgcaggggcgcgctgtgacac

SEQ ID NO: 2261881 - DNA, 25 bp, Homo sapien
gacacagcttccgccagccttccag

SEQ ID NO: 2261882 - DNA, 25 bp, Homo sapien
tgcaacctctttttcccggagttca

SEQ ID NO: 2261883 - DNA, 25 bp, Homo sapien
gtgctttattctgggatctgcgtac

SEQ ID NO: 2261884 - DNA, 25 bp, Homo sapien
gcaaaccaagaaggtcctagggcca

SEQ ID NO: 2261885 - DNA, 25 bp, Homo sapien
tctgggatctgcgtaccaggctggc

SEQ ID NO: 2261886 - DNA, 25 bp, Homo sapien
caaaccaagaaggtcctagggccag

SEQ ID NO: 2261887 - DNA, 25 bp, Homo sapien
tgatgacgcggatgtggcggatgac

SEQ ID NO: 2261888 - DNA, 25 bp, Homo sapien
tggcccccgatgtccggagtgtgca

SEQ ID NO: 2261889 - DNA, 25 bp, Homo sapien
gcggatgacgtcctggatggcttca

SEQ ID NO: 2261890 - DNA, 25 bp, Homo sapien
tggatggcttcagatgttgtgccct

SEQ ID NO: 2261891 - DNA, 25 bp, Homo sapien
acaggcaggctcggcacacaccagg

SEQ ID NO: 2261892 - DNA, 25 bp, Homo sapien
cacaggcaggctcggcacacaccag

SEQ ID NO: 2261893 - DNA, 25 bp, Homo sapien
caggcaggctcggcacacaccaggc

SEQ ID NO: 2261894 - DNA, 25 bp, Homo sapien
aggcaggctcggcacacaccaggcc

SEQ ID NO: 2261895 - DNA, 25 bp, Homo sapien
tctcctgtgacgtgcaggactggga

SEQ ID NO: 2261896 - DNA, 25 bp, Homo sapien
gaagtggcaccagctaagggccaga

SEQ ID NO: 2261897 - DNA, 25 bp, Homo sapien
tggggccagatccagtaccatcctc

SEQ ID NO: 2261898 - DNA, 25 bp, Homo sapien
ggctgtggtcagtgcatgaggcggg

SEQ ID NO: 2261899 - DNA, 25 bp, Homo sapien
gcggggcagcagggtagggtgcgag

SEQ ID NO: 2261900 - DNA, 25 bp, Homo sapien
gatgccaggacagccttacggatgg

SEQ ID NO: 2261901 - DNA, 25 bp, Homo sapien
cagccttacggatggaggtggcata

SEQ ID NO: 2261902 - DNA, 25 bp, Homo sapien
gacagccttacggatggaggtggca

SEQ ID NO: 2261903 - DNA, 25 bp, Homo sapien
ccaggacagccttacggatggaggt

SEQ ID NO: 2261904 - DNA, 25 bp, Homo sapien
ggttggcgatgttcttattggcgat

SEQ ID NO: 2261905 - DNA, 25 bp, Homo sapien
gttcttattggcgatactcttgccg

SEQ ID NO: 2261906 - DNA, 25 bp, Homo sapien
ggcgatgttcttattggcgatactc

SEQ ID NO: 2261907 - DNA, 25 bp, Homo sapien
tggcgatactcttgccggtgttcct

SEQ ID NO: 2261908 - DNA, 25 bp, Homo sapien
cagtcccgcgcagacattgttgacg

SEQ ID NO: 2261909 - DNA, 25 bp, Homo sapien
gagattgggcatcaccatgacatca

SEQ ID NO: 2261910 - DNA, 25 bp, Homo sapien
atggccatagttggccccagccaca

SEQ ID NO: 2261911 - DNA, 25 bp, Homo sapien
ttcaaacaccgcgtacacatggcca

SEQ ID NO: 2261912 - DNA, 25 bp, Homo sapien
gagcagattcggaagcatgggtgag

SEQ ID NO: 2261913 - DNA, 25 bp, Homo sapien
ggagcagattcggaagcatgggtga

SEQ ID NO: 2261914 - DNA, 25 bp, Homo sapien
atccacaatcatgttctcgaaggtg

SEQ ID NO: 2261915 - DNA, 25 bp, Homo sapien
gagggtagcgggctgccacctccct

SEQ ID NO: 2261916 - DNA, 25 bp, Homo sapien
tcatgttctcgaaggtgatctgagg

SEQ ID NO: 2261917 - DNA, 25 bp, Homo sapien
ttctcgaaggtgatctgagggtagc

SEQ ID NO: 2261918 - DNA, 25 bp, Homo sapien
ctggaggaaaagcccatcgcccagt

SEQ ID NO: 2261919 - DNA, 25 bp, Homo sapien
tggaggaaaagcccatcgcccagtt

SEQ ID NO: 2261920 - DNA, 25 bp, Homo sapien
gaggaaaagcccatcgcccagtttc

SEQ ID NO: 2261921 - DNA, 25 bp, Homo sapien
ttctggactgctcgcagagaggtca

SEQ ID NO: 2261922 - DNA, 25 bp, Homo sapien
cctcaccagcaaaatggacagaatc

SEQ ID NO: 2261923 - DNA, 25 bp, Homo sapien
cagcttggccatcgcaacagtcagc

SEQ ID NO: 2261924 - DNA, 25 bp, Homo sapien
tgaattctaacctgtccctcaccag

SEQ ID NO: 2261925 - DNA, 25 bp, Homo sapien
ccagcttgaaggcatactcggcaat

SEQ ID NO: 2261926 - DNA, 25 bp, Homo sapien
tgaaggcatactcggcaatgcgcag

SEQ ID NO: 2261927 - DNA, 25 bp, Homo sapien
tgtgcacggccgtcactttcttgcg

SEQ ID NO: 2261928 - DNA, 25 bp, Homo sapien
tcggcaatgcgcagggacttggcct

SEQ ID NO: 2261929 - DNA, 25 bp, Homo sapien
ggtcaccacgcctggaaggctctta

SEQ ID NO: 2261930 - DNA, 25 bp, Homo sapien
tgtgttctcccggacaatgaggatg

SEQ ID NO: 2261931 - DNA, 25 bp, Homo sapien
tcttacagtggatgacgttggcata

SEQ ID NO: 2261932 - DNA, 25 bp, Homo sapien
tctatgtccttgtgccgggtcacca

SEQ ID NO: 2261933 - DNA, 25 bp, Homo sapien
aggttatggttggtttcgatgttgc

SEQ ID NO: 2261934 - DNA, 25 bp, Homo sapien
cgacggtggcaggttatggttggtt

SEQ ID NO: 2261935 - DNA, 25 bp, Homo sapien
aaggatgttgtttcgagatttgtgc

SEQ ID NO: 2261936 - DNA, 25 bp, Homo sapien
tttcgagatttgtgcgacggtggca

SEQ ID NO: 2261937 - DNA, 25 bp, Homo sapien
ctggtgcagcaggtgctccatgaat

SEQ ID NO: 2261938 - DNA, 25 bp, Homo sapien
gcagcaggtgctccatgaataaccc

SEQ ID NO: 2261939 - DNA, 25 bp, Homo sapien
ggtgcagcaggtgctccatgaataa

SEQ ID NO: 2261940 - DNA, 25 bp, Homo sapien
tgcagcaggtgctccatgaataacc

SEQ ID NO: 2261941 - DNA, 25 bp, Homo sapien
tcgaatcccagcatcgcagcgcaaa

SEQ ID NO: 2261942 - DNA, 25 bp, Homo sapien
agcacgagggtcctctctagccaga

SEQ ID NO: 2261943 - DNA, 25 bp, Homo sapien
ccacccagtctccaagcacgagggt

SEQ ID NO: 2261944 - DNA, 25 bp, Homo sapien
tcgcagcgcaaacaggcccgaggag

SEQ ID NO: 2261945 - DNA, 25 bp, Homo sapien
catgatggcattgcgaatgtcctct

SEQ ID NO: 2261946 - DNA, 25 bp, Homo sapien
ccttcagggccacgcggttccggcg

SEQ ID NO: 2261947 - DNA, 25 bp, Homo sapien
cggttccggcggatggccatgatgg

SEQ ID NO: 2261948 - DNA, 25 bp, Homo sapien
cttcatcagcattggaactcacgtg

SEQ ID NO: 2261949 - DNA, 25 bp, Homo sapien
gcttacaggtcgtcttgccatggcc

SEQ ID NO: 2261950 - DNA, 25 bp, Homo sapien
gggacacgcttgaactccacaatgc

SEQ ID NO: 2261951 - DNA, 25 bp, Homo sapien
cagtctggcgggatcacaggccatg

SEQ ID NO: 2261952 - DNA, 25 bp, Homo sapien
catggcctcaccgagtgcttctggg

SEQ ID NO: 2261953 - DNA, 25 bp, Homo sapien
ctggcccgatgccatcccctgggat

SEQ ID NO: 2261954 - DNA, 25 bp, Homo sapien
tgaagacggacttgacatgcagcat

SEQ ID NO: 2261955 - DNA, 25 bp, Homo sapien
tgtgccgcccgccatacttagcgga

SEQ ID NO: 2261956 - DNA, 25 bp, Homo sapien
ccctgggatcatggtcaccgtgtgc

SEQ ID NO: 2261957 - DNA, 25 bp, Homo sapien
tgaaggtgggccttcggggatccca

SEQ ID NO: 2261958 - DNA, 25 bp, Homo sapien
aggtgggccttcggggatcccacat

SEQ ID NO: 2261959 - DNA, 25 bp, Homo sapien
cagagggtgaaggtgggccttcggg

SEQ ID NO: 2261960 - DNA, 25 bp, Homo sapien
gaggcagagggtgaaggtgggcctt

SEQ ID NO: 2261961 - DNA, 25 bp, Homo sapien
agagccccccaaacctaacaggcag

SEQ ID NO: 2261962 - DNA, 25 bp, Homo sapien
acctaacaggcagagaagaatactc

SEQ ID NO: 2261963 - DNA, 25 bp, Homo sapien
gagccccccaaacctaacaggcaga

SEQ ID NO: 2261964 - DNA, 25 bp, Homo sapien
ctaacaggcagagaagaatactcac

SEQ ID NO: 2261965 - DNA, 25 bp, Homo sapien
aaagacacatgcgtgggcacgggca

SEQ ID NO: 2261966 - DNA, 25 bp, Homo sapien
cacaattgcggccacatggagaaag

SEQ ID NO: 2261967 - DNA, 25 bp, Homo sapien
caatcagccaaggttccaagagcaa

SEQ ID NO: 2261968 - DNA, 25 bp, Homo sapien
gatgctggctagtacaactcccaga

SEQ ID NO: 2261969 - DNA, 25 bp, Homo sapien
gaggggacctcgtgggcgcctagaa

SEQ ID NO: 2261970 - DNA, 25 bp, Homo sapien
agatgttcctcgaggggacctcgtg

SEQ ID NO: 2261971 - DNA, 25 bp, Homo sapien
aaagatgttcctcgaggggacctcg

SEQ ID NO: 2261972 - DNA, 25 bp, Homo sapien
cctcgaggggacctcgtgggcgcct

SEQ ID NO: 2261973 - DNA, 25 bp, Homo sapien
agcggttggtttgatgtctaaccca

SEQ ID NO: 2261974 - DNA, 25 bp, Homo sapien
ccaggcaggtcccctgtctgtgcag

SEQ ID NO: 2261975 - DNA, 25 bp, Homo sapien
tgtgcccaggcaggtcccctgtctg

SEQ ID NO: 2261976 - DNA, 25 bp, Homo sapien
ggcaggtcccctgtctgtgcagcat

SEQ ID NO: 2261977 - DNA, 25 bp, Homo sapien
tgcccaggcaggtcccctgtctgtg

SEQ ID NO: 2261978 - DNA, 25 bp, Homo sapien
tttggccagttattcccgctcagcg

SEQ ID NO: 2261979 - DNA, 25 bp, Homo sapien
agataattagctccaaagcctcagt

SEQ ID NO: 2261980 - DNA, 25 bp, Homo sapien
tcttaaaaggcgtgtccctgccctc

SEQ ID NO: 2261981 - DNA, 25 bp, Homo sapien
tggaaagtagaaggcgctccagcct

SEQ ID NO: 2261982 - DNA, 25 bp, Homo sapien
tgacaacagtcacgttatcacttcg

SEQ ID NO: 2261983 - DNA, 25 bp, Homo sapien
tcacttcgccgatcactttttctta

SEQ ID NO: 2261984 - DNA, 25 bp, Homo sapien
caaaccacagatccatgacaacagt

SEQ ID NO: 2261985 - DNA, 25 bp, Homo sapien
aatcattacaacaaaccacagatcc

SEQ ID NO: 2261986 - DNA, 25 bp, Homo sapien
catcatagccattggccaaagagcc

SEQ ID NO: 2261987 - DNA, 25 bp, Homo sapien
tccagccaatggcagaagcatcata

SEQ ID NO: 2261988 - DNA, 25 bp, Homo sapien
ccagccaatggcagaagcatcatag

SEQ ID NO: 2261989 - DNA, 25 bp, Homo sapien
agaagcatcatagccattggccaaa

SEQ ID NO: 2261990 - DNA, 25 bp, Homo sapien
tgagtgactgcctcagaagggctcc

SEQ ID NO: 2261991 - DNA, 25 bp, Homo sapien
gaagactcggacctgaatacgcaag

SEQ ID NO: 2261992 - DNA, 25 bp, Homo sapien
ctccagactgcttcgggtgcggcta

SEQ ID NO: 2261993 - DNA, 25 bp, Homo sapien
caaggacactaaggaggtgacagcc

SEQ ID NO: 2261994 - DNA, 25 bp, Homo sapien
agagaagggctggcccgagcaccgc

SEQ ID NO: 2261995 - DNA, 25 bp, Homo sapien
agggctggcccgagcaccgccttcg

SEQ ID NO: 2261996 - DNA, 25 bp, Homo sapien
cccgagcaccgccttcgcggcgctg

SEQ ID NO: 2261997 - DNA, 25 bp, Homo sapien
gcggcgctgccggcgacggtcgcta

SEQ ID NO: 2261998 - DNA, 25 bp, Homo sapien
acaggcgcggacccggtactgcgca

SEQ ID NO: 2261999 - DNA, 25 bp, Homo sapien
gacacgcagataccgctctcgcgag

SEQ ID NO: 2262000 - DNA, 25 bp, Homo sapien
gacggaaagtgagagcctccgcacg

SEQ ID NO: 2262001 - DNA, 25 bp, Homo sapien
taccgctctcgcgagagttcgacgg

SEQ ID NO: 2262002 - DNA, 25 bp, Homo sapien
tgtgctgtgcctacacgaggtaacc

SEQ ID NO: 2262003 - DNA, 25 bp, Homo sapien
tcagggcacggtgatgccagatcct

SEQ ID NO: 2262004 - DNA, 25 bp, Homo sapien
cctagccagtgttgacaggtcacct

SEQ ID NO: 2262005 - DNA, 25 bp, Homo sapien
catgcaagaacagggtccaggtgag

SEQ ID NO: 2262006 - DNA, 25 bp, Homo sapien
caagtacaaaggcagcttgctttat

SEQ ID NO: 2262007 - DNA, 25 bp, Homo sapien
gtacaaaggcagcttgctttattct

SEQ ID NO: 2262008 - DNA, 25 bp, Homo sapien
accaagtacaaaggcagcttgcttt

SEQ ID NO: 2262009 - DNA, 25 bp, Homo sapien
caaccaagtacaaaggcagcttgct

SEQ ID NO: 2262010 - DNA, 25 bp, Homo sapien
ggcttggtttctagagccctcacca

SEQ ID NO: 2262011 - DNA, 25 bp, Homo sapien
tcacacgtgcaaatcctgaggaggt

SEQ ID NO: 2262012 - DNA, 25 bp, Homo sapien
caactattggcaagcacagaaaggg

SEQ ID NO: 2262013 - DNA, 25 bp, Homo sapien
atggcccgaggtcttccactgctgc

SEQ ID NO: 2262014 - DNA, 25 bp, Homo sapien
cacccagacgaggagatgtgtgcgt

SEQ ID NO: 2262015 - DNA, 25 bp, Homo sapien
ggaatgcacacgcacagctgaaggg

SEQ ID NO: 2262016 - DNA, 25 bp, Homo sapien
cctgtctgcaagtacacgggtcggg

SEQ ID NO: 2262017 - DNA, 25 bp, Homo sapien
caaataactgcagtgcgcagcggcg

SEQ ID NO: 2262018 - DNA, 25 bp, Homo sapien
gttgtagacccgcttgccatcggcg

SEQ ID NO: 2262019 - DNA, 25 bp, Homo sapien
aggtaagggctgctttcagggccca

SEQ ID NO: 2262020 - DNA, 25 bp, Homo sapien
acgcagctgtggtagtgctcgccct

SEQ ID NO: 2262021 - DNA, 25 bp, Homo sapien
gatcttcagggcacgggctttcagc

SEQ ID NO: 2262022 - DNA, 25 bp, Homo sapien
tcaagttggagttgccggccatggc

SEQ ID NO: 2262023 - DNA, 25 bp, Homo sapien
tatgttgcggcacttgaattccagg

SEQ ID NO: 2262024 - DNA, 25 bp, Homo sapien
ttgcaggccaaacttgcgcaggctt

SEQ ID NO: 2262025 - DNA, 25 bp, Homo sapien
tgctgaaatggaagtcccggctctg

SEQ ID NO: 2262026 - DNA, 25 bp, Homo sapien
atccaggaagtcatcccggtcgctg

SEQ ID NO: 2262027 - DNA, 25 bp, Homo sapien
gaagtcatcccggtcgctgtccttc

SEQ ID NO: 2262028 - DNA, 25 bp, Homo sapien
ttcagtttacgagcacgcagctccc

SEQ ID NO: 2262029 - DNA, 25 bp, Homo sapien
ggtgatttcagtttacgagcacgca

SEQ ID NO: 2262030 - DNA, 25 bp, Homo sapien
tcttcccggttctggacgtctacac

SEQ ID NO: 2262031 - DNA, 25 bp, Homo sapien
ctcttcccggttctggacgtctaca

SEQ ID NO: 2262032 - DNA, 25 bp, Homo sapien
ctgactctcaggtcgggccaccagc

SEQ ID NO: 2262033 - DNA, 25 bp, Homo sapien
cggtctccctcacggatccggccgt

SEQ ID NO: 2262034 - DNA, 25 bp, Homo sapien
tccctcacggatccggccgtctttg

SEQ ID NO: 2262035 - DNA, 25 bp, Homo sapien
ctccctcacggatccggccgtcttt

SEQ ID NO: 2262036 - DNA, 25 bp, Homo sapien
gtctccctcacggatccggccgtct

SEQ ID NO: 2262037 - DNA, 25 bp, Homo sapien
cgtccgtgcggtagcaaaccatcag

SEQ ID NO: 2262038 - DNA, 25 bp, Homo sapien
tctccgacataaatgcccaggtcct

SEQ ID NO: 2262039 - DNA, 25 bp, Homo sapien
tcctcgtcgtccgtgcggtagcaaa

SEQ ID NO: 2262040 - DNA, 25 bp, Homo sapien
tgtcccggtggctgcttttatacag

SEQ ID NO: 2262041 - DNA, 25 bp, Homo sapien
gccacgaggggtccgggaggaagca

SEQ ID NO: 2262042 - DNA, 25 bp, Homo sapien
cacgaggggtccgggaggaagcaga

SEQ ID NO: 2262043 - DNA, 25 bp, Homo sapien
ctgccacgaggggtccgggaggaag

SEQ ID NO: 2262044 - DNA, 25 bp, Homo sapien
cgaggggtccgggaggaagcagagg

SEQ ID NO: 2262045 - DNA, 25 bp, Homo sapien
cgacatggacggaacacgtaacctc

SEQ ID NO: 2262046 - DNA, 25 bp, Homo sapien
actcagccagatgcgtgccaggagg

SEQ ID NO: 2262047 - DNA, 25 bp, Homo sapien
ccgcaccctccctgactcagccaga

SEQ ID NO: 2262048 - DNA, 25 bp, Homo sapien
catggacggaacacgtaacctcacc

SEQ ID NO: 2262049 - DNA, 25 bp, Homo sapien
gtcataatactcatggctgattggg

SEQ ID NO: 2262050 - DNA, 25 bp, Homo sapien
aaactccgccgggtcataatactca

SEQ ID NO: 2262051 - DNA, 25 bp, Homo sapien
tgcgggccgccctccataaactccg

SEQ ID NO: 2262052 - DNA, 25 bp, Homo sapien
tccagctcatccaagcggtctgcct

SEQ ID NO: 2262053 - DNA, 25 bp, Homo sapien
ccgcagcccgggctaagattagcag

SEQ ID NO: 2262054 - DNA, 25 bp, Homo sapien
cagcccgggctaagattagcagaat

SEQ ID NO: 2262055 - DNA, 25 bp, Homo sapien
attagcagaatgaggcagcgctcac

SEQ ID NO: 2262056 - DNA, 25 bp, Homo sapien
agatggaggaaattcagagcaggta

SEQ ID NO: 2262057 - DNA, 25 bp, Homo sapien
ttccggcagcgacgtcccggacagg

SEQ ID NO: 2262058 - DNA, 25 bp, Homo sapien
gctgaggccctcaaccctggcactt

SEQ ID NO: 2262059 - DNA, 25 bp, Homo sapien
caagggatgcaagaagattcaagga

SEQ ID NO: 2262060 - DNA, 25 bp, Homo sapien
cccaaggctagaggcctggaggttt

SEQ ID NO: 2262061 - DNA, 25 bp, Homo sapien
tggagcccttgggtaccacggtcag

SEQ ID NO: 2262062 - DNA, 25 bp, Homo sapien
ttgggtaccacggtcagttctggag

SEQ ID NO: 2262063 - DNA, 25 bp, Homo sapien
gagcccggcccaaggctagaggcct

SEQ ID NO: 2262064 - DNA, 25 bp, Homo sapien
gatgtcggtctgagtgccactgtcc

SEQ ID NO: 2262065 - DNA, 25 bp, Homo sapien
tgcccagcgccatgatatgctcgaa

SEQ ID NO: 2262066 - DNA, 25 bp, Homo sapien
caccagctgcaggtcgtgacaggag

SEQ ID NO: 2262067 - DNA, 25 bp, Homo sapien
tgctcctgagacagcttggagagct

SEQ ID NO: 2262068 - DNA, 25 bp, Homo sapien
ccgtaagaaccctcaaaggcttgct

SEQ ID NO: 2262069 - DNA, 25 bp, Homo sapien
taagaaccctcaaaggcttgctcct

SEQ ID NO: 2262070 - DNA, 25 bp, Homo sapien
tccgtaagaaccctcaaaggcttgc

SEQ ID NO: 2262071 - DNA, 25 bp, Homo sapien
agagacacgcctccgtaagaaccct

SEQ ID NO: 2262072 - DNA, 25 bp, Homo sapien
agtatgctgcgaccttcaagtcctc

SEQ ID NO: 2262073 - DNA, 25 bp, Homo sapien
gcaccctgggacagtatgctgcgac

SEQ ID NO: 2262074 - DNA, 25 bp, Homo sapien
agtgcccacaaggtcgaaggctgct

SEQ ID NO: 2262075 - DNA, 25 bp, Homo sapien
gaaggctgcttccgcagcaccctgg

SEQ ID NO: 2262076 - DNA, 25 bp, Homo sapien
cagcagcaaccagagtgatcgcctg

SEQ ID NO: 2262077 - DNA, 25 bp, Homo sapien
gtgatcgcctgtgacagccaggcag

SEQ ID NO: 2262078 - DNA, 25 bp, Homo sapien
cagagtgatcgcctgtgacagccag

SEQ ID NO: 2262079 - DNA, 25 bp, Homo sapien
aaccagagtgatcgcctgtgacagc

SEQ ID NO: 2262080 - DNA, 25 bp, Homo sapien
aaacgttcatggtagcctttgatcc

SEQ ID NO: 2262081 - DNA, 25 bp, Homo sapien
gtctgaatcttaccccagagtgtaa

SEQ ID NO: 2262082 - DNA, 25 bp, Homo sapien
acaatttaattacaaggctgtgggc

SEQ ID NO: 2262083 - DNA, 25 bp, Homo sapien
gatccagtcaatgtgctctaagtaa

SEQ ID NO: 2262084 - DNA, 25 bp, Homo sapien
gggaagctcgacctgcatcgacaca

SEQ ID NO: 2262085 - DNA, 25 bp, Homo sapien
aataccgatggaagagcaattcgca

SEQ ID NO: 2262086 - DNA, 25 bp, Homo sapien
gccttccggagctttttgcagagaa

SEQ ID NO: 2262087 - DNA, 25 bp, Homo sapien
gaaagtgctggcaccgctttccccg

SEQ ID NO: 2262088 - DNA, 25 bp, Homo sapien
tctgcggcagaaccactgagttgac

SEQ ID NO: 2262089 - DNA, 25 bp, Homo sapien
cttccactccacaaggactttctca

SEQ ID NO: 2262090 - DNA, 25 bp, Homo sapien
cagcttctgcggcagaaccactgag

SEQ ID NO: 2262091 - DNA, 25 bp, Homo sapien
agaaccactgagttgactgagagtc

SEQ ID NO: 2262092 - DNA, 25 bp, Homo sapien
tggaagggtggaggccagcgtggat

SEQ ID NO: 2262093 - DNA, 25 bp, Homo sapien
ccagcgtggatgtgctggcagcatc

SEQ ID NO: 2262094 - DNA, 25 bp, Homo sapien
ggaggccagcgtggatgtgctggca

SEQ ID NO: 2262095 - DNA, 25 bp, Homo sapien
agggtggaggccagcgtggatgtgc

SEQ ID NO: 2262096 - DNA, 25 bp, Homo sapien
aagacgtcgctgaagaggggacact

SEQ ID NO: 2262097 - DNA, 25 bp, Homo sapien
ttctctcccccgcagttgcctacat

SEQ ID NO: 2262098 - DNA, 25 bp, Homo sapien
tgcctacatgttggcgatggtctcc

SEQ ID NO: 2262099 - DNA, 25 bp, Homo sapien
acgctcccgcactcaagcagtactt

SEQ ID NO: 2262100 - DNA, 25 bp, Homo sapien
gcacagagggcgcatgcggcagtgg

SEQ ID NO: 2262101 - DNA, 25 bp, Homo sapien
agcaggaaagcgcacagagggcgca

SEQ ID NO: 2262102 - DNA, 25 bp, Homo sapien
gcatgcggcagtggccctcctcctg

SEQ ID NO: 2262103 - DNA, 25 bp, Homo sapien
caggaaagcgcacagagggcgcatg

SEQ ID NO: 2262104 - DNA, 25 bp, Homo sapien
agagacgaggagtggcagccgggaa

SEQ ID NO: 2262105 - DNA, 25 bp, Homo sapien
gctggcaatggccacacaaggtttc

SEQ ID NO: 2262106 - DNA, 25 bp, Homo sapien
gtttccaaacagcgggaacaagaga

SEQ ID NO: 2262107 - DNA, 25 bp, Homo sapien
ggcaatggccacacaaggtttccaa

SEQ ID NO: 2262108 - DNA, 25 bp, Homo sapien
acgcacaggcaagaagccccgttcc

SEQ ID NO: 2262109 - DNA, 25 bp, Homo sapien
cacaggcaagaagccccgttccggg

SEQ ID NO: 2262110 - DNA, 25 bp, Homo sapien
gcacaggcaagaagccccgttccgg

SEQ ID NO: 2262111 - DNA, 25 bp, Homo sapien
cgcacaggcaagaagccccgttccg

SEQ ID NO: 2262112 - DNA, 25 bp, Homo sapien
gagacgcctaaggcccgggagccca

SEQ ID NO: 2262113 - DNA, 25 bp, Homo sapien
gagcccatcgttcgggcagggccag

SEQ ID NO: 2262114 - DNA, 25 bp, Homo sapien
caggcccgccgggatctagattcgg

SEQ ID NO: 2262115 - DNA, 25 bp, Homo sapien
gggacgcccacgcactcccacgctc

SEQ ID NO: 2262116 - DNA, 25 bp, Homo sapien
gctcctccggtttctggaccacgca

SEQ ID NO: 2262117 - DNA, 25 bp, Homo sapien
tgtactgctcctccggtttctggac

SEQ ID NO: 2262118 - DNA, 25 bp, Homo sapien
cctccggtttctggaccacgcacat

SEQ ID NO: 2262119 - DNA, 25 bp, Homo sapien
tttgtactgctcctccggtttctgg

SEQ ID NO: 2262120 - DNA, 25 bp, Homo sapien
gcctttcactgacccgggcgcggga

SEQ ID NO: 2262121 - DNA, 25 bp, Homo sapien
aagacgcctttcactgacccgggcg

SEQ ID NO: 2262122 - DNA, 25 bp, Homo sapien
cgggaagacgcctttcactgacccg

SEQ ID NO: 2262123 - DNA, 25 bp, Homo sapien
ggaacgggaagacgcctttcactga

SEQ ID NO: 2262124 - DNA, 25 bp, Homo sapien
gtcaggggccgtgggccgcgcgcct

SEQ ID NO: 2262125 - DNA, 25 bp, Homo sapien
gcgccgggcgttgccaggctacggc

SEQ ID NO: 2262126 - DNA, 25 bp, Homo sapien
gcccctcaggttaactcttcgctgg

SEQ ID NO: 2262127 - DNA, 25 bp, Homo sapien
agcggctcgcccctcaggttaactc

SEQ ID NO: 2262128 - DNA, 25 bp, Homo sapien
ccagcagccgctggccgtctccagc

SEQ ID NO: 2262129 - DNA, 25 bp, Homo sapien
ctcccggcgcccgctcttcgtccag

SEQ ID NO: 2262130 - DNA, 25 bp, Homo sapien
cccggcgcccgctcttcgtccagca

SEQ ID NO: 2262131 - DNA, 25 bp, Homo sapien
cagcagccgctggccgtctccagct

SEQ ID NO: 2262132 - DNA, 25 bp, Homo sapien
ttcctcgggcttcgccttaaatgac

SEQ ID NO: 2262133 - DNA, 25 bp, Homo sapien
cctcgggcttcgccttaaatgactg

SEQ ID NO: 2262134 - DNA, 25 bp, Homo sapien
ctcgggcttcgccttaaatgactgc

SEQ ID NO: 2262135 - DNA, 25 bp, Homo sapien
tcgggcttcgccttaaatgactgca

SEQ ID NO: 2262136 - DNA, 25 bp, Homo sapien
ttggccatgagctgagtttgctgct

SEQ ID NO: 2262137 - DNA, 25 bp, Homo sapien
gctgctttgttttctctctctccat

SEQ ID NO: 2262138 - DNA, 25 bp, Homo sapien
tggccatgagctgagtttgctgctt

SEQ ID NO: 2262139 - DNA, 25 bp, Homo sapien
tttgctgctttgttttctctctctc

SEQ ID NO: 2262140 - DNA, 25 bp, Homo sapien
taatatagctgtatcatatatgctt

SEQ ID NO: 2262141 - DNA, 25 bp, Homo sapien
ttatatgttctttagttgagtttgg

SEQ ID NO: 2262142 - DNA, 25 bp, Homo sapien
atgttctttagttgagtttgggagg

SEQ ID NO: 2262143 - DNA, 25 bp, Homo sapien
ttaatatagctgtatcatatatgct

SEQ ID NO: 2262144 - DNA, 25 bp, Homo sapien
ggatactcttacacggttgccagta

SEQ ID NO: 2262145 - DNA, 25 bp, Homo sapien
tactcttacacggttgccagtaaga

SEQ ID NO: 2262146 - DNA, 25 bp, Homo sapien
tggatactcttacacggttgccagt

SEQ ID NO: 2262147 - DNA, 25 bp, Homo sapien
gatactcttacacggttgccagtaa

SEQ ID NO: 2262148 - DNA, 25 bp, Homo sapien
caactgttcagacgatagggagggc

SEQ ID NO: 2262149 - DNA, 25 bp, Homo sapien
cactagtggcgtaaagggaaggaca

SEQ ID NO: 2262150 - DNA, 25 bp, Homo sapien
cagcatttcggagaccctttcgggc

SEQ ID NO: 2262151 - DNA, 25 bp, Homo sapien
tgtatggagctcctgaaagccggcc

SEQ ID NO: 2262152 - DNA, 25 bp, Homo sapien
attctagggccacggcagggttgat

SEQ ID NO: 2262153 - DNA, 25 bp, Homo sapien
ctattctagggccacggcagggttg

SEQ ID NO: 2262154 - DNA, 25 bp, Homo sapien
cctgagctgtcattgccccctgccg

SEQ ID NO: 2262155 - DNA, 25 bp, Homo sapien
tgatgggggaagtggcccctgagct

SEQ ID NO: 2262156 - DNA, 25 bp, Homo sapien
ccataatcggccaggctgtcgtcac

SEQ ID NO: 2262157 - DNA, 25 bp, Homo sapien
cttgatgtccccgttgagcgatggc

SEQ ID NO: 2262158 - DNA, 25 bp, Homo sapien
tcgttgaactgaacatccacgctgc

SEQ ID NO: 2262159 - DNA, 25 bp, Homo sapien
actgtactggccaatgaacgaacca

SEQ ID NO: 2262160 - DNA, 25 bp, Homo sapien
cacaccaggcgcacattgtctatag

SEQ ID NO: 2262161 - DNA, 25 bp, Homo sapien
gaatgcgctcagaaagagcagctct

SEQ ID NO: 2262162 - DNA, 25 bp, Homo sapien
tctttgggcattccccagatcctgg

SEQ ID NO: 2262163 - DNA, 25 bp, Homo sapien
tctatagggagaccttgctgttggc

SEQ ID NO: 2262164 - DNA, 25 bp, Homo sapien
gtggagctgagtgccagcacccact

SEQ ID NO: 2262165 - DNA, 25 bp, Homo sapien
ggtgagatgtgaaggccagggtgga

SEQ ID NO: 2262166 - DNA, 25 bp, Homo sapien
agcacccactcctgccccggctcac

SEQ ID NO: 2262167 - DNA, 25 bp, Homo sapien
cacccggcagcacagagaagagaga

SEQ ID NO: 2262168 - DNA, 25 bp, Homo sapien
tctttcatcggtcgggcctcagagt

SEQ ID NO: 2262169 - DNA, 25 bp, Homo sapien
tactcgccgaaggtctcatctttca

SEQ ID NO: 2262170 - DNA, 25 bp, Homo sapien
ctgtactcgccgaaggtctcatctt

SEQ ID NO: 2262171 - DNA, 25 bp, Homo sapien
gaaggtctcatctttcatcggtcgg

SEQ ID NO: 2262172 - DNA, 25 bp, Homo sapien
gatgatggcactcacaaagccgatg

SEQ ID NO: 2262173 - DNA, 25 bp, Homo sapien
gtatttgccgcccttgctgcgcttg

SEQ ID NO: 2262174 - DNA, 25 bp, Homo sapien
ccttgctgcgcttgatgaagcagag

SEQ ID NO: 2262175 - DNA, 25 bp, Homo sapien
aaagccgatgaaccagccctcagtg

SEQ ID NO: 2262176 - DNA, 25 bp, Homo sapien
tctcgtagtcagtgtcaggctgcag

SEQ ID NO: 2262177 - DNA, 25 bp, Homo sapien
cctctccttaaacaagtggatctcg

SEQ ID NO: 2262178 - DNA, 25 bp, Homo sapien
ggtcccactgcgtgtaggagctctg

SEQ ID NO: 2262179 - DNA, 25 bp, Homo sapien
catttggtgccggaacatcctctcc

SEQ ID NO: 2262180 - DNA, 25 bp, Homo sapien
tactgtggcgaaagggaagccccac

SEQ ID NO: 2262181 - DNA, 25 bp, Homo sapien
gacatactgtggcgaaagggaagcc

SEQ ID NO: 2262182 - DNA, 25 bp, Homo sapien
ctgacatactgtggcgaaagggaag

SEQ ID NO: 2262183 - DNA, 25 bp, Homo sapien
catactgtggcgaaagggaagcccc

SEQ ID NO: 2262184 - DNA, 25 bp, Homo sapien
cactgtagttttcacccgctgtggc

SEQ ID NO: 2262185 - DNA, 25 bp, Homo sapien
ggacccaggagacgacactgtagtt

SEQ ID NO: 2262186 - DNA, 25 bp, Homo sapien
tatggaacctgaagttgcactggcc

SEQ ID NO: 2262187 - DNA, 25 bp, Homo sapien
tcccaaggctttgaacaagatatgg

SEQ ID NO: 2262188 - DNA, 25 bp, Homo sapien
agatcggtcaggttgtgtgtccgaa

SEQ ID NO: 2262189 - DNA, 25 bp, Homo sapien
cctgaagctggaagcggtaccgcag

SEQ ID NO: 2262190 - DNA, 25 bp, Homo sapien
ggttgaaggacagttgccccttgcc

SEQ ID NO: 2262191 - DNA, 25 bp, Homo sapien
atagtgcctccttcccgtacgatgg

SEQ ID NO: 2262192 - DNA, 25 bp, Homo sapien
acgtagccggtgagcacgccgttgt

SEQ ID NO: 2262193 - DNA, 25 bp, Homo sapien
agcaggctggtgttcgactggcact

SEQ ID NO: 2262194 - DNA, 25 bp, Homo sapien
gggtggtaggagagcacgtagccgg

SEQ ID NO: 2262195 - DNA, 25 bp, Homo sapien
gagcacgccgttgtggctgagtggg

SEQ ID NO: 2262196 - DNA, 25 bp, Homo sapien
gctgaaggtgaactcgctggcgggc

SEQ ID NO: 2262197 - DNA, 25 bp, Homo sapien
gatcctcgcccgttaaaggcctgca

SEQ ID NO: 2262198 - DNA, 25 bp, Homo sapien
ggtctttgtggatatgtctcttgct

SEQ ID NO: 2262199 - DNA, 25 bp, Homo sapien
tggtaggagctatagggccgcaagc

SEQ ID NO: 2262200 - DNA, 25 bp, Homo sapien
attgtatccgcggaggtggcccttg

SEQ ID NO: 2262201 - DNA, 25 bp, Homo sapien
cggccgccacttgaccagcacggca

SEQ ID NO: 2262202 - DNA, 25 bp, Homo sapien
cacggcacttgagttgaggatttca

SEQ ID NO: 2262203 - DNA, 25 bp, Homo sapien
ttgtatccgcggaggtggcccttga

SEQ ID NO: 2262204 - DNA, 25 bp, Homo sapien
tggaaaccaccagtgacttggatag

SEQ ID NO: 2262205 - DNA, 25 bp, Homo sapien
gacttggatagagccataggctctc

SEQ ID NO: 2262206 - DNA, 25 bp, Homo sapien
ccagtgacttggatagagccatagg

SEQ ID NO: 2262207 - DNA, 25 bp, Homo sapien
gatagagccataggctctcacccca

SEQ ID NO: 2262208 - DNA, 25 bp, Homo sapien
gctgttgacggcctggactttgatc

SEQ ID NO: 2262209 - DNA, 25 bp, Homo sapien
ctctccagagtagccgatagtgacc

SEQ ID NO: 2262210 - DNA, 25 bp, Homo sapien
tggacgtgttggacaccaccaggaa

SEQ ID NO: 2262211 - DNA, 25 bp, Homo sapien
tctcatagggcacgaaggtggacgt

SEQ ID NO: 2262212 - DNA, 25 bp, Homo sapien
accatattggtggtctcatttcctt

SEQ ID NO: 2262213 - DNA, 25 bp, Homo sapien
ttccacgtgatgaccatattggtgg

SEQ ID NO: 2262214 - DNA, 25 bp, Homo sapien
cttccacgtgatgaccatattggtg

SEQ ID NO: 2262215 - DNA, 25 bp, Homo sapien
ccatattggtggtctcatttccttc

SEQ ID NO: 2262216 - DNA, 25 bp, Homo sapien
tatttgtttatggcagtaaccctaa

SEQ ID NO: 2262217 - DNA, 25 bp, Homo sapien
agtctcagagaccgggctgggctcc

SEQ ID NO: 2262218 - DNA, 25 bp, Homo sapien
ttatggcagtaaccctaaaggtgta

SEQ ID NO: 2262219 - DNA, 25 bp, Homo sapien
gcagtaaccctaaaggtgtagtgga

SEQ ID NO: 2262220 - DNA, 25 bp, Homo sapien
tgtaccatttttcaggcgccatttc

SEQ ID NO: 2262221 - DNA, 25 bp, Homo sapien
tggaaccttgcccagactgtaccat

SEQ ID NO: 2262222 - DNA, 25 bp, Homo sapien
tgagggtggtagaggtctggttccc

SEQ ID NO: 2262223 - DNA, 25 bp, Homo sapien
tttttcaggcgccatttccttgtcc

SEQ ID NO: 2262224 - DNA, 25 bp, Homo sapien
ctgccaagaaatgaaccgacaatgg

SEQ ID NO: 2262225 - DNA, 25 bp, Homo sapien
aagaaatgaaccgacaatggagtga

SEQ ID NO: 2262226 - DNA, 25 bp, Homo sapien
gccaagaaatgaaccgacaatggag

SEQ ID NO: 2262227 - DNA, 25 bp, Homo sapien
gaaatgaaccgacaatggagtgatc

SEQ ID NO: 2262228 - DNA, 25 bp, Homo sapien
gggctggcagaagtgacggtggggt

SEQ ID NO: 2262229 - DNA, 25 bp, Homo sapien
gattcccatgaggaaccgtgagtcc

SEQ ID NO: 2262230 - DNA, 25 bp, Homo sapien
gcagaagtgacggtggggtggcact

SEQ ID NO: 2262231 - DNA, 25 bp, Homo sapien
ttcccatgaggaaccgtgagtcccc

SEQ ID NO: 2262232 - DNA, 25 bp, Homo sapien
cagcaggtgcaggtcggacagcacc

SEQ ID NO: 2262233 - DNA, 25 bp, Homo sapien
aggacacgcgcacctggctctgcgt

SEQ ID NO: 2262234 - DNA, 25 bp, Homo sapien
accagccgtggcaccggcccagggc

SEQ ID NO: 2262235 - DNA, 25 bp, Homo sapien
aggactccaggacacgcgcacctgg

SEQ ID NO: 2262236 - DNA, 25 bp, Homo sapien
accaccaagagctgtgccctactct

SEQ ID NO: 2262237 - DNA, 25 bp, Homo sapien
caggcgcccatcctctatgaagtac

SEQ ID NO: 2262238 - DNA, 25 bp, Homo sapien
gctgtagttgccctggtcgctgtag

SEQ ID NO: 2262239 - DNA, 25 bp, Homo sapien
tccagttcggtactggccacgcagc

SEQ ID NO: 2262240 - DNA, 25 bp, Homo sapien
gcacgtgaaggtcaccctggaacct

SEQ ID NO: 2262241 - DNA, 25 bp, Homo sapien
tcgaccgtccccacgccaggtgatg

SEQ ID NO: 2262242 - DNA, 25 bp, Homo sapien
gggcccctgagtgatctgagttgca

SEQ ID NO: 2262243 - DNA, 25 bp, Homo sapien
cctttcttctcgattgtgctgcggg

SEQ ID NO: 2262244 - DNA, 25 bp, Homo sapien
tgccagccatgtggcaagggttgcc

SEQ ID NO: 2262245 - DNA, 25 bp, Homo sapien
taatgcgtgcgtggggaagtcactc

SEQ ID NO: 2262246 - DNA, 25 bp, Homo sapien
tgagggtaatgcgtgcgtggggaag

SEQ ID NO: 2262247 - DNA, 25 bp, Homo sapien
gaagtcactctgttgtcctccagag

SEQ ID NO: 2262248 - DNA, 25 bp, Homo sapien
ccaggcagaagtagcgtccggtgtc

SEQ ID NO: 2262249 - DNA, 25 bp, Homo sapien
ttggcctggaggtctcgaatgccca

SEQ ID NO: 2262250 - DNA, 25 bp, Homo sapien
gaagaagcgttcgtcctgaagcact

SEQ ID NO: 2262251 - DNA, 25 bp, Homo sapien
aacattgttttggtcattggcagcc

SEQ ID NO: 2262252 - DNA, 25 bp, Homo sapien
tgtccgcagtcaggatcttggctgg

SEQ ID NO: 2262253 - DNA, 25 bp, Homo sapien
ccctggacagccatgtacgtctgat

SEQ ID NO: 2262254 - DNA, 25 bp, Homo sapien
aggcgctccgaaggccttgcacaga

SEQ ID NO: 2262255 - DNA, 25 bp, Homo sapien
tccgaaggccttgcacagaaggtag

SEQ ID NO: 2262256 - DNA, 25 bp, Homo sapien
tgaatccggtacttctggtctttgg

SEQ ID NO: 2262257 - DNA, 25 bp, Homo sapien
tgggctgcacgttgctcaggatcag

SEQ ID NO: 2262258 - DNA, 25 bp, Homo sapien
cggttgcgggcctcacattgggtca

SEQ ID NO: 2262259 - DNA, 25 bp, Homo sapien
caacgtagatgtaggcattggccag

SEQ ID NO: 2262260 - DNA, 25 bp, Homo sapien
gatcccgttgattctccaggtgacc

SEQ ID NO: 2262261 - DNA, 25 bp, Homo sapien
agggatcccgttgattctccaggtg

SEQ ID NO: 2262262 - DNA, 25 bp, Homo sapien
tgccctggacttggcagtccaggcg

SEQ ID NO: 2262263 - DNA, 25 bp, Homo sapien
ggcttgtgcagccagtacggggcag

SEQ ID NO: 2262264 - DNA, 25 bp, Homo sapien
ttctggtaggtgacacggtcggctg

SEQ ID NO: 2262265 - DNA, 25 bp, Homo sapien
tgcccagtgagttctcggccaggca

SEQ ID NO: 2262266 - DNA, 25 bp, Homo sapien
aggcagcggtactcgccatcatcct

SEQ ID NO: 2262267 - DNA, 25 bp, Homo sapien
ggtgacatagtacgcatgccgggca

SEQ ID NO: 2262268 - DNA, 25 bp, Homo sapien
gcgcggcttcctgtcaatcatgctg

SEQ ID NO: 2262269 - DNA, 25 bp, Homo sapien
aggcgcggcttcctgtcaatcatgc

SEQ ID NO: 2262270 - DNA, 25 bp, Homo sapien
aagccctcggcgatgcactccagga

SEQ ID NO: 2262271 - DNA, 25 bp, Homo sapien
gagcaggcgcggcttcctgtcaatc

SEQ ID NO: 2262272 - DNA, 25 bp, Homo sapien
acccgctcgtcctgcttgatgtgca

SEQ ID NO: 2262273 - DNA, 25 bp, Homo sapien
tgtcggaggtgagcacattggcaaa

SEQ ID NO: 2262274 - DNA, 25 bp, Homo sapien
aggttgccgttctggcccatcgtca

SEQ ID NO: 2262275 - DNA, 25 bp, Homo sapien
tcgtcctgcttgatgtgcaagatct

SEQ ID NO: 2262276 - DNA, 25 bp, Homo sapien
aaggaggccgaagtcatgaccccgt

SEQ ID NO: 2262277 - DNA, 25 bp, Homo sapien
ctaacaccccgaccccacgaggcag

SEQ ID NO: 2262278 - DNA, 25 bp, Homo sapien
gccgaagtcatgaccccgtccagga

SEQ ID NO: 2262279 - DNA, 25 bp, Homo sapien
aggccgaagtcatgaccccgtccag

SEQ ID NO: 2262280 - DNA, 25 bp, Homo sapien
tagatccggagaggctctgcacttg

SEQ ID NO: 2262281 - DNA, 25 bp, Homo sapien
agggttgcaaggcagaaccactgac

SEQ ID NO: 2262282 - DNA, 25 bp, Homo sapien
gctgttcatccagtagatccggaga

SEQ ID NO: 2262283 - DNA, 25 bp, Homo sapien
acctccacgggcttcactgtctcct

SEQ ID NO: 2262284 - DNA, 25 bp, Homo sapien
cagccatgaggcaggcaccaggaaa

SEQ ID NO: 2262285 - DNA, 25 bp, Homo sapien
gccatgaggcaggcaccaggaaagc

SEQ ID NO: 2262286 - DNA, 25 bp, Homo sapien
tcctgctcagccatgaggcaggcac

SEQ ID NO: 2262287 - DNA, 25 bp, Homo sapien
cttcctgctcagccatgaggcaggc

SEQ ID NO: 2262288 - DNA, 25 bp, Homo sapien
ggtttgaagtggacaccatccctcg

SEQ ID NO: 2262289 - DNA, 25 bp, Homo sapien
catggcggtgcccagcttattgctg

SEQ ID NO: 2262290 - DNA, 25 bp, Homo sapien
tgagccggatctcatgggacatggc

SEQ ID NO: 2262291 - DNA, 25 bp, Homo sapien
gatgccctggaacctctgagcaaag

SEQ ID NO: 2262292 - DNA, 25 bp, Homo sapien
cttgccactggcctcacacttgagg

SEQ ID NO: 2262293 - DNA, 25 bp, Homo sapien
tgttccgtgatgacaggtggctcca

SEQ ID NO: 2262294 - DNA, 25 bp, Homo sapien
aaccaggcgccgtggagactgttcc

SEQ ID NO: 2262295 - DNA, 25 bp, Homo sapien
cacacttgaggctgatgtcatctgt

SEQ ID NO: 2262296 - DNA, 25 bp, Homo sapien
ctgagaaatccaggcaggcagcaag

SEQ ID NO: 2262297 - DNA, 25 bp, Homo sapien
ggcaggcagcaagggagggaatgga

SEQ ID NO: 2262298 - DNA, 25 bp, Homo sapien
tgagaaatccaggcaggcagcaagg

SEQ ID NO: 2262299 - DNA, 25 bp, Homo sapien
ggcagcaagggagggaatggagaga

SEQ ID NO: 2262300 - DNA, 25 bp, Homo sapien
agtcagggtccggaacagggagaag

SEQ ID NO: 2262301 - DNA, 25 bp, Homo sapien
atggtcctgacacgccccgcacctt

SEQ ID NO: 2262302 - DNA, 25 bp, Homo sapien
acatagcggcgaaggtaggcgccca

SEQ ID NO: 2262303 - DNA, 25 bp, Homo sapien
gggtacccaacgtcctggctatctc

SEQ ID NO: 2262304 - DNA, 25 bp, Homo sapien
acacgtaccgcagcgccacgaccat

SEQ ID NO: 2262305 - DNA, 25 bp, Homo sapien
gatctggataagcaggcaggggctg

SEQ ID NO: 2262306 - DNA, 25 bp, Homo sapien
agaggccacacgtaccgcagcgcca

SEQ ID NO: 2262307 - DNA, 25 bp, Homo sapien
attcctcggggatctggataagcag

SEQ ID NO: 2262308 - DNA, 25 bp, Homo sapien
ttcccggcggcaccgcgcagcacag

SEQ ID NO: 2262309 - DNA, 25 bp, Homo sapien
ccagccgggctcggttcaggctccg

SEQ ID NO: 2262310 - DNA, 25 bp, Homo sapien
gctcggttcaggctccggccggagg

SEQ ID NO: 2262311 - DNA, 25 bp, Homo sapien
ctttcccggcggcaccgcgcagcac

SEQ ID NO: 2262312 - DNA, 25 bp, Homo sapien
gaagcgctgattgtcctcctgatgc

SEQ ID NO: 2262313 - DNA, 25 bp, Homo sapien
tttaggagcgcggtgtagcaaacca

SEQ ID NO: 2262314 - DNA, 25 bp, Homo sapien
gaaaacaagtgacaccccacgaaga

SEQ ID NO: 2262315 - DNA, 25 bp, Homo sapien
gaacgtgtttccctcttggtgatca

SEQ ID NO: 2262316 - DNA, 25 bp, Homo sapien
ccgcccagcctccgcgcacgccggc

SEQ ID NO: 2262317 - DNA, 25 bp, Homo sapien
ctgcgctgcggccaccgctcgggct

SEQ ID NO: 2262318 - DNA, 25 bp, Homo sapien
cgctcgggctgcccgcccagcctcc

SEQ ID NO: 2262319 - DNA, 25 bp, Homo sapien
tgcccgcccagcctccgcgcacgcc

SEQ ID NO: 2262320 - DNA, 25 bp, Homo sapien
gaggtctttatgaatcgccacccag

SEQ ID NO: 2262321 - DNA, 25 bp, Homo sapien
ctctggaatccatggcgcaggcagc

SEQ ID NO: 2262322 - DNA, 25 bp, Homo sapien
cacagtcacgtgcacagctctggaa

SEQ ID NO: 2262323 - DNA, 25 bp, Homo sapien
aggcatctgagcaagggtacccgcc

SEQ ID NO: 2262324 - DNA, 25 bp, Homo sapien
agtgtggcttgggggtcgtgtctag

SEQ ID NO: 2262325 - DNA, 25 bp, Homo sapien
gtggcttgggggtcgtgtctaggcc

SEQ ID NO: 2262326 - DNA, 25 bp, Homo sapien
tgtggcttgggggtcgtgtctaggc

SEQ ID NO: 2262327 - DNA, 25 bp, Homo sapien
gtgtggcttgggggtcgtgtctagg

SEQ ID NO: 2262328 - DNA, 25 bp, Homo sapien
aacacagagtccatgttctgtgcca

SEQ ID NO: 2262329 - DNA, 25 bp, Homo sapien
acagagtccatgttctgtgccacag

SEQ ID NO: 2262330 - DNA, 25 bp, Homo sapien
ttaaacacagagtccatgttctgtg

SEQ ID NO: 2262331 - DNA, 25 bp, Homo sapien
gtagatgctggcccaaggccctggc

SEQ ID NO: 2262332 - DNA, 25 bp, Homo sapien
ggagagtgaccagtgagttcccccg

SEQ ID NO: 2262333 - DNA, 25 bp, Homo sapien
cagcaattccttggtttagcccgga

SEQ ID NO: 2262334 - DNA, 25 bp, Homo sapien
aagacccacctgagttcctcccact

SEQ ID NO: 2262335 - DNA, 25 bp, Homo sapien
aaagcaagccctcagccaacatccc

SEQ ID NO: 2262336 - DNA, 25 bp, Homo sapien
gcctgtgtgtctggcggcaggttcc

SEQ ID NO: 2262337 - DNA, 25 bp, Homo sapien
tgtgtgtctggcggcaggttccctt

SEQ ID NO: 2262338 - DNA, 25 bp, Homo sapien
gggcctgtgtgtctggcggcaggtt

SEQ ID NO: 2262339 - DNA, 25 bp, Homo sapien
tgtgtctggcggcaggttcccttga

SEQ ID NO: 2262340 - DNA, 25 bp, Homo sapien
ctccacgtgttgctctggggaggct

SEQ ID NO: 2262341 - DNA, 25 bp, Homo sapien
aagcagcgtcgtctgtgtccagagg

SEQ ID NO: 2262342 - DNA, 25 bp, Homo sapien
aggctgggaccaagcagcgtcgtct

SEQ ID NO: 2262343 - DNA, 25 bp, Homo sapien
gaccaagcagcgtcgtctgtgtcca

SEQ ID NO: 2262344 - DNA, 25 bp, Homo sapien
aggaggccctcgggactgctcccag

SEQ ID NO: 2262345 - DNA, 25 bp, Homo sapien
ggagtggtcagagaggctctgttct

SEQ ID NO: 2262346 - DNA, 25 bp, Homo sapien
agctccgcgccagccaggagtggtc

SEQ ID NO: 2262347 - DNA, 25 bp, Homo sapien
ctgcggtgggaaggaccggcctgtt

SEQ ID NO: 2262348 - DNA, 25 bp, Homo sapien
ggcctgtttcgagtgctccttccct

SEQ ID NO: 2262349 - DNA, 25 bp, Homo sapien
accagtcgctcgaggccctctcgtg

SEQ ID NO: 2262350 - DNA, 25 bp, Homo sapien
gatgaggccccgcatgccgttgtgc

SEQ ID NO: 2262351 - DNA, 25 bp, Homo sapien
tgatatacttgtgggggatgaggcc

SEQ ID NO: 2262352 - DNA, 25 bp, Homo sapien
agtcgctcgaggccctctcgtgcag

SEQ ID NO: 2262353 - DNA, 25 bp, Homo sapien
ctgtgcggcccgtgtaggcaaagca

SEQ ID NO: 2262354 - DNA, 25 bp, Homo sapien
tgtgcggcccgtgtaggcaaagcag

SEQ ID NO: 2262355 - DNA, 25 bp, Homo sapien
gctgtgcggcccgtgtaggcaaagc

SEQ ID NO: 2262356 - DNA, 25 bp, Homo sapien
catcctcctgtgcgggcatctcggc

SEQ ID NO: 2262357 - DNA, 25 bp, Homo sapien
agctccggctcattgtccgccccca

SEQ ID NO: 2262358 - DNA, 25 bp, Homo sapien
ccggctcattgtccgcccccaggct

SEQ ID NO: 2262359 - DNA, 25 bp, Homo sapien
ctcctgtgcgggcatctcggcttcc

SEQ ID NO: 2262360 - DNA, 25 bp, Homo sapien
cccctcggcagcaccaagggtgtac

SEQ ID NO: 2262361 - DNA, 25 bp, Homo sapien
agcgggcaccggtagcagcgtgggc

SEQ ID NO: 2262362 - DNA, 25 bp, Homo sapien
cgggaagacccgatcgggctgcact

SEQ ID NO: 2262363 - DNA, 25 bp, Homo sapien
ggtgccatgcacttctcgtagacgg

SEQ ID NO: 2262364 - DNA, 25 bp, Homo sapien
actatgagcgtctgcaccagctggt

SEQ ID NO: 2262365 - DNA, 25 bp, Homo sapien
gggacacgcacatcacaagcagaga

SEQ ID NO: 2262366 - DNA, 25 bp, Homo sapien
gcagagagcccgcaccccgagtccc

SEQ ID NO: 2262367 - DNA, 25 bp, Homo sapien
tggggggacacgcacatcacaagca

SEQ ID NO: 2262368 - DNA, 25 bp, Homo sapien
acacgcacatcacaagcagagagcc

SEQ ID NO: 2262369 - DNA, 25 bp, Homo sapien
aaggtgaagaggtagcgcagaacca

SEQ ID NO: 2262370 - DNA, 25 bp, Homo sapien
aagaggtagcgcagaaccaccagca

SEQ ID NO: 2262371 - DNA, 25 bp, Homo sapien
ggtgaagaggtagcgcagaaccacc

SEQ ID NO: 2262372 - DNA, 25 bp, Homo sapien
aggaaggtgaagaggtagcgcagaa

SEQ ID NO: 2262373 - DNA, 25 bp, Homo sapien
ccggccaccgagtccaggtcatggg

SEQ ID NO: 2262374 - DNA, 25 bp, Homo sapien
gaagccagcagctcgccgaacaggt

SEQ ID NO: 2262375 - DNA, 25 bp, Homo sapien
tccaggctccggaagtagagcttca

SEQ ID NO: 2262376 - DNA, 25 bp, Homo sapien
ccgagtccaggtcatgggcagtgca

SEQ ID NO: 2262377 - DNA, 25 bp, Homo sapien
cggagctgggcacccgatacccgga

SEQ ID NO: 2262378 - DNA, 25 bp, Homo sapien
ctgggcacccgatacccggaagatg

SEQ ID NO: 2262379 - DNA, 25 bp, Homo sapien
acggatctctgagacccggagctgg

SEQ ID NO: 2262380 - DNA, 25 bp, Homo sapien
tcgaaggcatcacggatctctgaga

SEQ ID NO: 2262381 - DNA, 25 bp, Homo sapien
ctgtgggaggacaaggagctggtgg

SEQ ID NO: 2262382 - DNA, 25 bp, Homo sapien
tccaggatggcctcccatgccaggt

SEQ ID NO: 2262383 - DNA, 25 bp, Homo sapien
agctggtgggcactgagcatcttcc

SEQ ID NO: 2262384 - DNA, 25 bp, Homo sapien
ggatggcctcccatgccaggtgctg

SEQ ID NO: 2262385 - DNA, 25 bp, Homo sapien
atgaagcgaatgcagctctccacca

SEQ ID NO: 2262386 - DNA, 25 bp, Homo sapien
ggttgatgaagcgaatgcagctctc

SEQ ID NO: 2262387 - DNA, 25 bp, Homo sapien
ttgatgaagcgaatgcagctctcca

SEQ ID NO: 2262388 - DNA, 25 bp, Homo sapien
tgatgaagcgaatgcagctctccac

SEQ ID NO: 2262389 - DNA, 25 bp, Homo sapien
catcatcgttgtcggcacagaggct

SEQ ID NO: 2262390 - DNA, 25 bp, Homo sapien
cgtttgttagatccactcgtaggtg

SEQ ID NO: 2262391 - DNA, 25 bp, Homo sapien
cagaggcttagcacaccgtttgtta

SEQ ID NO: 2262392 - DNA, 25 bp, Homo sapien
cagtgccttacgttgtatttgcaaa

SEQ ID NO: 2262393 - DNA, 25 bp, Homo sapien
tgactgattgagagtggaggaccct

SEQ ID NO: 2262394 - DNA, 25 bp, Homo sapien
tcccttcaatcagcggaggctatag

SEQ ID NO: 2262395 - DNA, 25 bp, Homo sapien
ctggaagaggcccacccagaaaagg

SEQ ID NO: 2262396 - DNA, 25 bp, Homo sapien
tcagcatgtacaggtgggctggcat

SEQ ID NO: 2262397 - DNA, 25 bp, Homo sapien
tctccatgtctcccccaaagagtct

SEQ ID NO: 2262398 - DNA, 25 bp, Homo sapien
ttctccatgtctcccccaaagagtc

SEQ ID NO: 2262399 - DNA, 25 bp, Homo sapien
gaattttctctgtgtgtactgggtc

SEQ ID NO: 2262400 - DNA, 25 bp, Homo sapien
ttctggaattttctctgtgtgtact

SEQ ID NO: 2262401 - DNA, 25 bp, Homo sapien
tggaattttctctgtgtgtactggg

SEQ ID NO: 2262402 - DNA, 25 bp, Homo sapien
ctggaattttctctgtgtgtactgg

SEQ ID NO: 2262403 - DNA, 25 bp, Homo sapien
tgtggagaatagggtgccccacccc

SEQ ID NO: 2262404 - DNA, 25 bp, Homo sapien
ccaagccggcctctaattctctgaa

SEQ ID NO: 2262405 - DNA, 25 bp, Homo sapien
gtgtggagaatagggtgccccaccc

SEQ ID NO: 2262406 - DNA, 25 bp, Homo sapien
gaagagatggcggaccgtcgcaggg

SEQ ID NO: 2262407 - DNA, 25 bp, Homo sapien
atggcggaccgtcgcagggccccag

SEQ ID NO: 2262408 - DNA, 25 bp, Homo sapien
agagatggcggaccgtcgcagggcc

SEQ ID NO: 2262409 - DNA, 25 bp, Homo sapien
gaagagaagagatggcggaccgtcg

SEQ ID NO: 2262410 - DNA, 25 bp, Homo sapien
caagacacctcctgctcctccttgt

SEQ ID NO: 2262411 - DNA, 25 bp, Homo sapien
agacacctcctgctcctccttgtca

SEQ ID NO: 2262412 - DNA, 25 bp, Homo sapien
aagacacctcctgctcctccttgtc

SEQ ID NO: 2262413 - DNA, 25 bp, Homo sapien
gacacctcctgctcctccttgtcac

SEQ ID NO: 2262414 - DNA, 25 bp, Homo sapien
gtgggagaacattggtctgcctctc

SEQ ID NO: 2262415 - DNA, 25 bp, Homo sapien
gaacattggtctgcctctcgggcca

SEQ ID NO: 2262416 - DNA, 25 bp, Homo sapien
aggggtcttcaaggcatcccagaga

SEQ ID NO: 2262417 - DNA, 25 bp, Homo sapien
cgtgggctagacagggtcctgggca

SEQ ID NO: 2262418 - DNA, 25 bp, Homo sapien
ttggcgaggatgctccgtccactca

SEQ ID NO: 2262419 - DNA, 25 bp, Homo sapien
ctgcagcttggcgaggatgctccgt

SEQ ID NO: 2262420 - DNA, 25 bp, Homo sapien
gtccactcagatactcctggagctt

SEQ ID NO: 2262421 - DNA, 25 bp, Homo sapien
gaggatgctccgtccactcagatac

SEQ ID NO: 2262422 - DNA, 25 bp, Homo sapien
gaagagccccaagtgttagccctgg

SEQ ID NO: 2262423 - DNA, 25 bp, Homo sapien
gccccaagtgttagccctggcttga

SEQ ID NO: 2262424 - DNA, 25 bp, Homo sapien
caagaagagccccaagtgttagccc

SEQ ID NO: 2262425 - DNA, 25 bp, Homo sapien
ccccaagaagagccccaagtgttag

SEQ ID NO: 2262426 - DNA, 25 bp, Homo sapien
ggtagaaggtttcggtctcctgctg

SEQ ID NO: 2262427 - DNA, 25 bp, Homo sapien
tagaaggtttcggtctcctgctgct

SEQ ID NO: 2262428 - DNA, 25 bp, Homo sapien
acttgagggactcggtggaggggct

SEQ ID NO: 2262429 - DNA, 25 bp, Homo sapien
tgaggtagaaggtttcggtctcctg

SEQ ID NO: 2262430 - DNA, 25 bp, Homo sapien
ctggaaggaatcaagcacatccccg

SEQ ID NO: 2262431 - DNA, 25 bp, Homo sapien
acatccccgtcatccgaggccacca

SEQ ID NO: 2262432 - DNA, 25 bp, Homo sapien
tgcagtgtcgccttcagagtcttgt

SEQ ID NO: 2262433 - DNA, 25 bp, Homo sapien
agggcctgcagtgtcgccttcagag

SEQ ID NO: 2262434 - DNA, 25 bp, Homo sapien
gacaggaagtccaagtcagaaggaa

SEQ ID NO: 2262435 - DNA, 25 bp, Homo sapien
gggcagccacttccaacagcaggct

SEQ ID NO: 2262436 - DNA, 25 bp, Homo sapien
agaggagaccacaccagggtggtaa

SEQ ID NO: 2262437 - DNA, 25 bp, Homo sapien
tctaacccccggtgggctgcccaga

SEQ ID NO: 2262438 - DNA, 25 bp, Homo sapien
gctccatttcaacgcagatctcagc

SEQ ID NO: 2262439 - DNA, 25 bp, Homo sapien
atggtctgtcggtccaggcggctct

SEQ ID NO: 2262440 - DNA, 25 bp, Homo sapien
gcagaatctcgtcccgcagctccat

SEQ ID NO: 2262441 - DNA, 25 bp, Homo sapien
tctcaatggtctgtcggtccaggcg

SEQ ID NO: 2262442 - DNA, 25 bp, Homo sapien
gcgagacgccatctcaaaataaaat

SEQ ID NO: 2262443 - DNA, 25 bp, Homo sapien
taactgggcacggtggcatgcgcct

SEQ ID NO: 2262444 - DNA, 25 bp, Homo sapien
aattaactgggcacggtggcatgcg

SEQ ID NO: 2262445 - DNA, 25 bp, Homo sapien
ttatctgaactcaggagttggagac

SEQ ID NO: 2262446 - DNA, 25 bp, Homo sapien
tacagtgaaggccagagaatgccaa

SEQ ID NO: 2262447 - DNA, 25 bp, Homo sapien
agtgaaggccagagaatgccaagcc

SEQ ID NO: 2262448 - DNA, 25 bp, Homo sapien
cattacagtgaaggccagagaatgc

SEQ ID NO: 2262449 - DNA, 25 bp, Homo sapien
gccaagcccagcagggggtgaccct

SEQ ID NO: 2262450 - DNA, 25 bp, Homo sapien
atgcacctcgagaaccttggctttg

SEQ ID NO: 2262451 - DNA, 25 bp, Homo sapien
gggacagaagacggtagcatgcacc

SEQ ID NO: 2262452 - DNA, 25 bp, Homo sapien
ctctcagcggccgtgtagctccgga

SEQ ID NO: 2262453 - DNA, 25 bp, Homo sapien
cttgggaggcttgggtgcggctctc

SEQ ID NO: 2262454 - DNA, 25 bp, Homo sapien
tagccaggctaagcaggtactcgtt

SEQ ID NO: 2262455 - DNA, 25 bp, Homo sapien
tccaagacgtcatgcaggtagtagt

SEQ ID NO: 2262456 - DNA, 25 bp, Homo sapien
cgttgcgcgcctttgtgcacttgag

SEQ ID NO: 2262457 - DNA, 25 bp, Homo sapien
tagttactgacagcagcgttgacac

SEQ ID NO: 2262458 - DNA, 25 bp, Homo sapien
gggtgcacgagaaacccagcttgga

SEQ ID NO: 2262459 - DNA, 25 bp, Homo sapien
acccagcttggagccagcacacagg

SEQ ID NO: 2262460 - DNA, 25 bp, Homo sapien
cacatggcaccccaccatggagggt

SEQ ID NO: 2262461 - DNA, 25 bp, Homo sapien
tgagtggaaggtgcgcacatggcac

SEQ ID NO: 2262462 - DNA, 25 bp, Homo sapien
gcccatggcccataggcctgcgtct

SEQ ID NO: 2262463 - DNA, 25 bp, Homo sapien
ccatggcccataggcctgcgtctga

SEQ ID NO: 2262464 - DNA, 25 bp, Homo sapien
catggcccataggcctgcgtctgag

SEQ ID NO: 2262465 - DNA, 25 bp, Homo sapien
ggcccatggcccataggcctgcgtc

SEQ ID NO: 2262466 - DNA, 25 bp, Homo sapien
cagcctccctcccttcttgagggag

SEQ ID NO: 2262467 - DNA, 25 bp, Homo sapien
caccagcctccctcccttcttgagg

SEQ ID NO: 2262468 - DNA, 25 bp, Homo sapien
gcctccctcccttcttgagggagct

SEQ ID NO: 2262469 - DNA, 25 bp, Homo sapien
accagcctccctcccttcttgaggg

SEQ ID NO: 2262470 - DNA, 25 bp, Homo sapien
cttgcggaggggccctgcctcagtg

SEQ ID NO: 2262471 - DNA, 25 bp, Homo sapien
gccctgcctcagtggcaccagcggt

SEQ ID NO: 2262472 - DNA, 25 bp, Homo sapien
ctgcctcagtggcaccagcggtggt

SEQ ID NO: 2262473 - DNA, 25 bp, Homo sapien
gggccctgcctcagtggcaccagcg

SEQ ID NO: 2262474 - DNA, 25 bp, Homo sapien
cggagcttggcctcggcattcacgc

SEQ ID NO: 2262475 - DNA, 25 bp, Homo sapien
ttcacgctctccatgtgatatgcct

SEQ ID NO: 2262476 - DNA, 25 bp, Homo sapien
cggcattcacgctctccatgtgata

SEQ ID NO: 2262477 - DNA, 25 bp, Homo sapien
gatatgcctggtacgtcttcttggc

SEQ ID NO: 2262478 - DNA, 25 bp, Homo sapien
ctgcagggagacccaaagcaaggtg

SEQ ID NO: 2262479 - DNA, 25 bp, Homo sapien
gcagggagacccaaagcaaggtggt

SEQ ID NO: 2262480 - DNA, 25 bp, Homo sapien
ggagacccaaagcaaggtggtgctg

SEQ ID NO: 2262481 - DNA, 25 bp, Homo sapien
agggagacccaaagcaaggtggtgc

SEQ ID NO: 2262482 - DNA, 25 bp, Homo sapien
tccaggagctcatcctgcagctgct

SEQ ID NO: 2262483 - DNA, 25 bp, Homo sapien
ggagctctgagaccacctccaggag

SEQ ID NO: 2262484 - DNA, 25 bp, Homo sapien
tctggagctctgagaccacctccag

SEQ ID NO: 2262485 - DNA, 25 bp, Homo sapien
cgtctggagctctgagaccacctcc

SEQ ID NO: 2262486 - DNA, 25 bp, Homo sapien
cttcccgtggcccaggatgagagcc

SEQ ID NO: 2262487 - DNA, 25 bp, Homo sapien
ccgtggcccaggatgagagcctcac

SEQ ID NO: 2262488 - DNA, 25 bp, Homo sapien
tcccgtggcccaggatgagagcctc

SEQ ID NO: 2262489 - DNA, 25 bp, Homo sapien
cacttcccgtggcccaggatgagag

SEQ ID NO: 2262490 - DNA, 25 bp, Homo sapien
tcctctgcaatgtgactcaggcgct

SEQ ID NO: 2262491 - DNA, 25 bp, Homo sapien
cagtgcaagggcgacaggagggacg

SEQ ID NO: 2262492 - DNA, 25 bp, Homo sapien
caatgtgactcaggcgctgggccag

SEQ ID NO: 2262493 - DNA, 25 bp, Homo sapien
aagggcgacaggagggacggctcct

SEQ ID NO: 2262494 - DNA, 25 bp, Homo sapien
cggcgccgcatgaactctgccagct

SEQ ID NO: 2262495 - DNA, 25 bp, Homo sapien
aggccccgggagtattccagctcca

SEQ ID NO: 2262496 - DNA, 25 bp, Homo sapien
ccaggcggcctccacggctggagaa

SEQ ID NO: 2262497 - DNA, 25 bp, Homo sapien
ctccacggctggagaagcgctcggc

SEQ ID NO: 2262498 - DNA, 25 bp, Homo sapien
tccctcgttcctggaaagcctctga

SEQ ID NO: 2262499 - DNA, 25 bp, Homo sapien
ctgtctctccctcgttcctggaaag

SEQ ID NO: 2262500 - DNA, 25 bp, Homo sapien
ctttcagtttggcttcctgtctctc

SEQ ID NO: 2262501 - DNA, 25 bp, Homo sapien
tctgaatggtttcccctgcgacttc

SEQ ID NO: 2262502 - DNA, 25 bp, Homo sapien
ccctatcactggcttgatttggcaa

SEQ ID NO: 2262503 - DNA, 25 bp, Homo sapien
ttttgacaccctatcactggcttga

SEQ ID NO: 2262504 - DNA, 25 bp, Homo sapien
gcttgatttggcaacgctgcttccc

SEQ ID NO: 2262505 - DNA, 25 bp, Homo sapien
atactgccggccttttgacacccta

SEQ ID NO: 2262506 - DNA, 25 bp, Homo sapien
gaaaggtgttagacaactgctcgcc

SEQ ID NO: 2262507 - DNA, 25 bp, Homo sapien
gaagccatgtcctagtccagatccg

SEQ ID NO: 2262508 - DNA, 25 bp, Homo sapien
tcctggcagagctttcggatctcag

SEQ ID NO: 2262509 - DNA, 25 bp, Homo sapien
cagagggaaccgctgcctttcttca

SEQ ID NO: 2262510 - DNA, 25 bp, Homo sapien
ttgctgactgaagttttccaagtct

SEQ ID NO: 2262511 - DNA, 25 bp, Homo sapien
tgctgactgaagttttccaagtctt

SEQ ID NO: 2262512 - DNA, 25 bp, Homo sapien
agagacagtggccctcgcctctgct

SEQ ID NO: 2262513 - DNA, 25 bp, Homo sapien
tgcgccagcttgacccagagacagt

SEQ ID NO: 2262514 - DNA, 25 bp, Homo sapien
agacagtggccctcgcctctgctcc

SEQ ID NO: 2262515 - DNA, 25 bp, Homo sapien
gccagcttgacccagagacagtggc

SEQ ID NO: 2262516 - DNA, 25 bp, Homo sapien
tctcttttaccagcggccaccagtg

SEQ ID NO: 2262517 - DNA, 25 bp, Homo sapien
tactgccttctgaggggcacgttgg

SEQ ID NO: 2262518 - DNA, 25 bp, Homo sapien
cccaatcaagctggttgacttcact

SEQ ID NO: 2262519 - DNA, 25 bp, Homo sapien
gcacgttgggtgcatctggctctct

SEQ ID NO: 2262520 - DNA, 25 bp, Homo sapien
gagctccctcacgaccttgggttct

SEQ ID NO: 2262521 - DNA, 25 bp, Homo sapien
tcacgaccttgggttctccgcagga

SEQ ID NO: 2262522 - DNA, 25 bp, Homo sapien
gcttggagctccctcacgaccttgg

SEQ ID NO: 2262523 - DNA, 25 bp, Homo sapien
gggacgcttggagctccctcacgac

SEQ ID NO: 2262524 - DNA, 25 bp, Homo sapien
ttgacttgcgtctcatactcagcct

SEQ ID NO: 2262525 - DNA, 25 bp, Homo sapien
ctttgacttgcgtctcatactcagc

SEQ ID NO: 2262526 - DNA, 25 bp, Homo sapien
tcccgccgcagcttcccgtgagcgg

SEQ ID NO: 2262527 - DNA, 25 bp, Homo sapien
gacttgcgtctcatactcagcctgc

SEQ ID NO: 2262528 - DNA, 25 bp, Homo sapien
tgagcgggcccggcgccgggacttg

SEQ ID NO: 2262529 - DNA, 25 bp, Homo sapien
ggccgcgccgtcgaaccccactgct

SEQ ID NO: 2262530 - DNA, 25 bp, Homo sapien
cccactgctcccacgcggccgtgag

SEQ ID NO: 2262531 - DNA, 25 bp, Homo sapien
cgcggccgcgccgtcgaaccccact

SEQ ID NO: 2262532 - DNA, 25 bp, Homo sapien
gggccgctggcccactgtaccagtg

SEQ ID NO: 2262533 - DNA, 25 bp, Homo sapien
cactgtaccagtggccatgaacacc

SEQ ID NO: 2262534 - DNA, 25 bp, Homo sapien
gcccactgtaccagtggccatgaac

SEQ ID NO: 2262535 - DNA, 25 bp, Homo sapien
cagacatccgatggggtcctccctt

SEQ ID NO: 2262536 - DNA, 25 bp, Homo sapien
tgcgggcacacatgaccttgacctg

SEQ ID NO: 2262537 - DNA, 25 bp, Homo sapien
gcttcaaggcctgggagctagccag

SEQ ID NO: 2262538 - DNA, 25 bp, Homo sapien
ggcccttctcgaacacgtcgtcgtg

SEQ ID NO: 2262539 - DNA, 25 bp, Homo sapien
tcggaagtaccgatgttcgagtcct

SEQ ID NO: 2262540 - DNA, 25 bp, Homo sapien
gccaccgcacccaacagccgcccag

SEQ ID NO: 2262541 - DNA, 25 bp, Homo sapien
tggtggcatgatcagggcccacagc

SEQ ID NO: 2262542 - DNA, 25 bp, Homo sapien
ccgcacccaacagccgcccagtttt

SEQ ID NO: 2262543 - DNA, 25 bp, Homo sapien
cacccaacagccgcccagttttgta

SEQ ID NO: 2262544 - DNA, 25 bp, Homo sapien
gaaacctactgtaaaccatgggctg

SEQ ID NO: 2262545 - DNA, 25 bp, Homo sapien
caaaacacattcagcgtggccaagc

SEQ ID NO: 2262546 - DNA, 25 bp, Homo sapien
tgttgagctttgagcctgagcagcc

SEQ ID NO: 2262547 - DNA, 25 bp, Homo sapien
gctgtagcccgaagcaggtgtgatt

SEQ ID NO: 2262548 - DNA, 25 bp, Homo sapien
tttattgtgaaagctcgtggggtga

SEQ ID NO: 2262549 - DNA, 25 bp, Homo sapien
tattgtgaaagctcgtggggtgagg

SEQ ID NO: 2262550 - DNA, 25 bp, Homo sapien
tgtgaaagctcgtggggtgaggagg

SEQ ID NO: 2262551 - DNA, 25 bp, Homo sapien
gccacggagcgaatttattgtgaaa

SEQ ID NO: 2262552 - DNA, 25 bp, Homo sapien
tgttctcgatggcacccagcaccac

SEQ ID NO: 2262553 - DNA, 25 bp, Homo sapien
aggctgagtcggaggcctctgagct

SEQ ID NO: 2262554 - DNA, 25 bp, Homo sapien
ctcgctgaggtccttgctgtcccca

SEQ ID NO: 2262555 - DNA, 25 bp, Homo sapien
tgtgctctctgtggtctcgctgacc

SEQ ID NO: 2262556 - DNA, 25 bp, Homo sapien
ccagggagaagcgggggcaaagaga

SEQ ID NO: 2262557 - DNA, 25 bp, Homo sapien
ggagaagcgggggcaaagagacagg

SEQ ID NO: 2262558 - DNA, 25 bp, Homo sapien
agggagaagcgggggcaaagagaca

SEQ ID NO: 2262559 - DNA, 25 bp, Homo sapien
agaagcgggggcaaagagacagggc

SEQ ID NO: 2262560 - DNA, 25 bp, Homo sapien
tgggcttaccgactaccatggaggc

SEQ ID NO: 2262561 - DNA, 25 bp, Homo sapien
gaaactgaggtcgtgactcctggca

SEQ ID NO: 2262562 - DNA, 25 bp, Homo sapien
tggcaacgtagccacaagagctggc

SEQ ID NO: 2262563 - DNA, 25 bp, Homo sapien
gagctggcatccaaagtcggtctcg

SEQ ID NO: 2262564 - DNA, 25 bp, Homo sapien
ctcgtcggccatctgagtgaggtcc

SEQ ID NO: 2262565 - DNA, 25 bp, Homo sapien
cgtcggccatctgagtgaggtcccg

SEQ ID NO: 2262566 - DNA, 25 bp, Homo sapien
tcggccatctgagtgaggtcccgct

SEQ ID NO: 2262567 - DNA, 25 bp, Homo sapien
tcgtcggccatctgagtgaggtccc

SEQ ID NO: 2262568 - DNA, 25 bp, Homo sapien
tctgcatagtatttgggctccactt

SEQ ID NO: 2262569 - DNA, 25 bp, Homo sapien
atctgcatagtatttgggctccact

SEQ ID NO: 2262570 - DNA, 25 bp, Homo sapien
tatcgtggctactggagcaaggtgc

SEQ ID NO: 2262571 - DNA, 25 bp, Homo sapien
caaggaggaagacctgtatcccggg

SEQ ID NO: 2262572 - DNA, 25 bp, Homo sapien
taccaaacgggctgagtgcagttag

SEQ ID NO: 2262573 - DNA, 25 bp, Homo sapien
cagaacccaggaaagacggtgagcc

SEQ ID NO: 2262574 - DNA, 25 bp, Homo sapien
cacatggagcacgtttcagcaggca

SEQ ID NO: 2262575 - DNA, 25 bp, Homo sapien
gaaggcaactcagccggtctcaggt

SEQ ID NO: 2262576 - DNA, 25 bp, Homo sapien
gcttttcaaccatcagccgccgagt

SEQ ID NO: 2262577 - DNA, 25 bp, Homo sapien
ccgccgagtgaatgtggaggtatcc

SEQ ID NO: 2262578 - DNA, 25 bp, Homo sapien
ggtgttggaatagaggtgcagggcg

SEQ ID NO: 2262579 - DNA, 25 bp, Homo sapien
tgcaggggaacaaggcactgctgag

SEQ ID NO: 2262580 - DNA, 25 bp, Homo sapien
ctgcaggggaacaaggcactgctga

SEQ ID NO: 2262581 - DNA, 25 bp, Homo sapien
gatcttcaccaaaagctgaggtacc

SEQ ID NO: 2262582 - DNA, 25 bp, Homo sapien
ggacccccgtcaaggcagtatctct

SEQ ID NO: 2262583 - DNA, 25 bp, Homo sapien
cttcaccaaaagctgaggtacccca

SEQ ID NO: 2262584 - DNA, 25 bp, Homo sapien
tggatcttcaccaaaagctgaggta

SEQ ID NO: 2262585 - DNA, 25 bp, Homo sapien
agtttctgagccagaccgaggcgcc

SEQ ID NO: 2262586 - DNA, 25 bp, Homo sapien
tttctgagccagaccgaggcgccgg

SEQ ID NO: 2262587 - DNA, 25 bp, Homo sapien
gagccagaccgaggcgccggtggga

SEQ ID NO: 2262588 - DNA, 25 bp, Homo sapien
gttctctatcatggctcgagaggcc

SEQ ID NO: 2262589 - DNA, 25 bp, Homo sapien
tgaggtgatatgtccatggggcaca

SEQ ID NO: 2262590 - DNA, 25 bp, Homo sapien
caatgaggtgatatgtccatggggc

SEQ ID NO: 2262591 - DNA, 25 bp, Homo sapien
aggtgatatgtccatggggcacatc

SEQ ID NO: 2262592 - DNA, 25 bp, Homo sapien
aatgaggtgatatgtccatggggca

SEQ ID NO: 2262593 - DNA, 25 bp, Homo sapien
tgtagagtggacatgcactacagcc

SEQ ID NO: 2262594 - DNA, 25 bp, Homo sapien
gccatttgtagagtggacatgcact

SEQ ID NO: 2262595 - DNA, 25 bp, Homo sapien
tcttggatcagagcagccgatcctg

SEQ ID NO: 2262596 - DNA, 25 bp, Homo sapien
agagccgggagcctcttggatcaga

SEQ ID NO: 2262597 - DNA, 25 bp, Homo sapien
caatcttcccattctcgtcctcagc

SEQ ID NO: 2262598 - DNA, 25 bp, Homo sapien
attctcgtcctcagcaatgtaagag

SEQ ID NO: 2262599 - DNA, 25 bp, Homo sapien
tctcgtcctcagcaatgtaagagag

SEQ ID NO: 2262600 - DNA, 25 bp, Homo sapien
tcccattctcgtcctcagcaatgta

SEQ ID NO: 2262601 - DNA, 25 bp, Homo sapien
tccgggctgagtggcttggtctccc

SEQ ID NO: 2262602 - DNA, 25 bp, Homo sapien
aagacgcaaagtggggatcctgccc

SEQ ID NO: 2262603 - DNA, 25 bp, Homo sapien
cagatgggattttcctcggcctgct

SEQ ID NO: 2262604 - DNA, 25 bp, Homo sapien
tgggctctgacagacttgtccactc

SEQ ID NO: 2262605 - DNA, 25 bp, Homo sapien
gctgcatgttcattaggtcctctgg

SEQ ID NO: 2262606 - DNA, 25 bp, Homo sapien
ggaaaggccatggtagaagtagtat

SEQ ID NO: 2262607 - DNA, 25 bp, Homo sapien
aggccatggtagaagtagtatttca

SEQ ID NO: 2262608 - DNA, 25 bp, Homo sapien
aggttgcagtgctgcatgttcatta

SEQ ID NO: 2262609 - DNA, 25 bp, Homo sapien
agggaaggagggcagtggaacgcgc

SEQ ID NO: 2262610 - DNA, 25 bp, Homo sapien
aggagggcagtggaacgcgctcagt

SEQ ID NO: 2262611 - DNA, 25 bp, Homo sapien
aaggagggcagtggaacgcgctcag

SEQ ID NO: 2262612 - DNA, 25 bp, Homo sapien
ggaaggagggcagtggaacgcgctc

SEQ ID NO: 2262613 - DNA, 25 bp, Homo sapien
caacggaggcccgacatcacgcaaa

SEQ ID NO: 2262614 - DNA, 25 bp, Homo sapien
gtgaccacgggtgagaagcctgctc

SEQ ID NO: 2262615 - DNA, 25 bp, Homo sapien
atctgactttgcacaacgcccggag

SEQ ID NO: 2262616 - DNA, 25 bp, Homo sapien
tgggcaggcactgtgacgatctgac

SEQ ID NO: 2262617 - DNA, 25 bp, Homo sapien
ccagcggatcgtgaaggcgcagtca

SEQ ID NO: 2262618 - DNA, 25 bp, Homo sapien
gcgctccgaagcgacgccgggacgg

SEQ ID NO: 2262619 - DNA, 25 bp, Homo sapien
ggtcccagcggatcgtgaaggcgca

SEQ ID NO: 2262620 - DNA, 25 bp, Homo sapien
tgaaggcgcagtcagctgccgccgc

SEQ ID NO: 2262621 - DNA, 25 bp, Homo sapien
attccgcgcctcggcaggcgggggt

SEQ ID NO: 2262622 - DNA, 25 bp, Homo sapien
tattccgcgcctcggcaggcggggg

SEQ ID NO: 2262623 - DNA, 25 bp, Homo sapien
ttattccgcgcctcggcaggcgggg

SEQ ID NO: 2262624 - DNA, 25 bp, Homo sapien
caccttgccctctcggctcaggtag

SEQ ID NO: 2262625 - DNA, 25 bp, Homo sapien
tgccctctcggctcaggtagccaaa

SEQ ID NO: 2262626 - DNA, 25 bp, Homo sapien
cattccccgtactcgggatcgcgaa

SEQ ID NO: 2262627 - DNA, 25 bp, Homo sapien
tttgaaaggacctcccttgatggag

SEQ ID NO: 2262628 - DNA, 25 bp, Homo sapien
gctgagatcacgccattgcgctcca

SEQ ID NO: 2262629 - DNA, 25 bp, Homo sapien
cacaggaggcggaggttgcagtgag

SEQ ID NO: 2262630 - DNA, 25 bp, Homo sapien
gctgaggcgggagaatagcttgaac

SEQ ID NO: 2262631 - DNA, 25 bp, Homo sapien
gtaatcccagcagtatactcgggag

SEQ ID NO: 2262632 - DNA, 25 bp, Homo sapien
gcactcagcctgggcgatagagacc

SEQ ID NO: 2262633 - DNA, 25 bp, Homo sapien
tgcactcagcctgggcgatagagac

SEQ ID NO: 2262634 - DNA, 25 bp, Homo sapien
ggcagaggcttcttcgttgactgaa

SEQ ID NO: 2262635 - DNA, 25 bp, Homo sapien
aacgaacagcactggggctccggaa

SEQ ID NO: 2262636 - DNA, 25 bp, Homo sapien
ccaaaattcgagctctaggagggca

SEQ ID NO: 2262637 - DNA, 25 bp, Homo sapien
actggggctccggaaactctcagac

SEQ ID NO: 2262638 - DNA, 25 bp, Homo sapien
gccacttggtagaagaggcgcagca

SEQ ID NO: 2262639 - DNA, 25 bp, Homo sapien
ctgtcactgtaacccatgaggaagg

SEQ ID NO: 2262640 - DNA, 25 bp, Homo sapien
ctggcggaaggtgtactcagccact

SEQ ID NO: 2262641 - DNA, 25 bp, Homo sapien
cccactgtcactgtaacccatgagg

SEQ ID NO: 2262642 - DNA, 25 bp, Homo sapien
cagcatcctggaagtaaaagaggcc

SEQ ID NO: 2262643 - DNA, 25 bp, Homo sapien
caatcacgtgggctcgaagttcggg

SEQ ID NO: 2262644 - DNA, 25 bp, Homo sapien
ggtcgcctttccgaatgcaatgacg

SEQ ID NO: 2262645 - DNA, 25 bp, Homo sapien
catccggagtggaagggcaacaata

SEQ ID NO: 2262646 - DNA, 25 bp, Homo sapien
gcactcccatatctgaagcccagaa

SEQ ID NO: 2262647 - DNA, 25 bp, Homo sapien
ccgccaggcactcccatatctgaag

SEQ ID NO: 2262648 - DNA, 25 bp, Homo sapien
tccctccctaacaatgagcgaggct

SEQ ID NO: 2262649 - DNA, 25 bp, Homo sapien
tgctccctccctaacaatgagcgag

SEQ ID NO: 2262650 - DNA, 25 bp, Homo sapien
gcagccaggaagttccttgccaccc

SEQ ID NO: 2262651 - DNA, 25 bp, Homo sapien
agccaggaagttccttgccaccctc

SEQ ID NO: 2262652 - DNA, 25 bp, Homo sapien
ctgacacattctccagcacagcttg

SEQ ID NO: 2262653 - DNA, 25 bp, Homo sapien
aggcagccaggaagttccttgccac

SEQ ID NO: 2262654 - DNA, 25 bp, Homo sapien
gctaaagtgcagtggccgcaatctc

SEQ ID NO: 2262655 - DNA, 25 bp, Homo sapien
agtggccgcaatctcgactcactac

SEQ ID NO: 2262656 - DNA, 25 bp, Homo sapien
acgagccaccgcgtccagcccgggc

SEQ ID NO: 2262657 - DNA, 25 bp, Homo sapien
gcacgagccaccgcgtccagcccgg

SEQ ID NO: 2262658 - DNA, 25 bp, Homo sapien
caggttcagtagcatcatgggcacc

SEQ ID NO: 2262659 - DNA, 25 bp, Homo sapien
ctccaccaggttcagtagcatcatg

SEQ ID NO: 2262660 - DNA, 25 bp, Homo sapien
ctgcagaatcctccgggcgcaccag

SEQ ID NO: 2262661 - DNA, 25 bp, Homo sapien
tagcatcatgggcaccgccatgggc

SEQ ID NO: 2262662 - DNA, 25 bp, Homo sapien
acccagtggacgatctgatccatca

SEQ ID NO: 2262663 - DNA, 25 bp, Homo sapien
agtggacgatctgatccatcatctc

SEQ ID NO: 2262664 - DNA, 25 bp, Homo sapien
gcacccagtggacgatctgatccat

SEQ ID NO: 2262665 - DNA, 25 bp, Homo sapien
gatccatcatctccaccgcttccgt

SEQ ID NO: 2262666 - DNA, 25 bp, Homo sapien
ggctgaggctacatcctgtgccatc

SEQ ID NO: 2262667 - DNA, 25 bp, Homo sapien
gcccaggctgaggctacatcctgtg

SEQ ID NO: 2262668 - DNA, 25 bp, Homo sapien
ccaggctgaggctacatcctgtgcc

SEQ ID NO: 2262669 - DNA, 25 bp, Homo sapien
caggctgaggctacatcctgtgcca

SEQ ID NO: 2262670 - DNA, 25 bp, Homo sapien
cagggcctacttggggcctggcacc

SEQ ID NO: 2262671 - DNA, 25 bp, Homo sapien
agacaccttcatccagggcctactt

SEQ ID NO: 2262672 - DNA, 25 bp, Homo sapien
cttcatccagggcctacttggggcc

SEQ ID NO: 2262673 - DNA, 25 bp, Homo sapien
tcatccagggcctacttggggcctg

SEQ ID NO: 2262674 - DNA, 25 bp, Homo sapien
tgctcccagtctgggggtgcagccc

SEQ ID NO: 2262675 - DNA, 25 bp, Homo sapien
ggtgcagccccttccaggctgtggg

SEQ ID NO: 2262676 - DNA, 25 bp, Homo sapien
tccgccccactctgctcccagtctg

SEQ ID NO: 2262677 - DNA, 25 bp, Homo sapien
cgccccactctgctcccagtctggg

SEQ ID NO: 2262678 - DNA, 25 bp, Homo sapien
cttgcgtagtgagtgggaatgcatc

SEQ ID NO: 2262679 - DNA, 25 bp, Homo sapien
gggcagggcgtggatagggccctct

SEQ ID NO: 2262680 - DNA, 25 bp, Homo sapien
ggaatgcatcaggtggccatggcag

SEQ ID NO: 2262681 - DNA, 25 bp, Homo sapien
ccctctccgtctgcgcccctgtggg

SEQ ID NO: 2262682 - DNA, 25 bp, Homo sapien
ttgccaggaggtgccacccgggcat

SEQ ID NO: 2262683 - DNA, 25 bp, Homo sapien
ggcataccgcagcaagaactcacca

SEQ ID NO: 2262684 - DNA, 25 bp, Homo sapien
gtggctctccacagctcgttcatgg

SEQ ID NO: 2262685 - DNA, 25 bp, Homo sapien
cactgaagatggttcgctgcacctt

SEQ ID NO: 2262686 - DNA, 25 bp, Homo sapien
taaacatggacggagtcactgggag

SEQ ID NO: 2262687 - DNA, 25 bp, Homo sapien
gggtaaggccaggacgccccgcaca

SEQ ID NO: 2262688 - DNA, 25 bp, Homo sapien
tagatccctctaggaactccgcaca

SEQ ID NO: 2262689 - DNA, 25 bp, Homo sapien
gcacatgtgccctgttgagtaaaca

SEQ ID NO: 2262690 - DNA, 25 bp, Homo sapien
ggtacaggcgacaatacatccatac

SEQ ID NO: 2262691 - DNA, 25 bp, Homo sapien
cggaagcgctcgaaagtgcggtaca

SEQ ID NO: 2262692 - DNA, 25 bp, Homo sapien
ctgagcatggcggaagcgctcgaaa

SEQ ID NO: 2262693 - DNA, 25 bp, Homo sapien
aagtgcggtacaggcgacaatacat

SEQ ID NO: 2262694 - DNA, 25 bp, Homo sapien
agcttccaggctgggaacaccatac

SEQ ID NO: 2262695 - DNA, 25 bp, Homo sapien
gggagacctttgaggcgatgggccg

SEQ ID NO: 2262696 - DNA, 25 bp, Homo sapien
gagcttccaggctgggaacaccata

SEQ ID NO: 2262697 - DNA, 25 bp, Homo sapien
cgatgggccgtgtgcctgagcttcc

SEQ ID NO: 2262698 - DNA, 25 bp, Homo sapien
tacttgaggtcatcatacacccgcc

SEQ ID NO: 2262699 - DNA, 25 bp, Homo sapien
ccctcgcggccaaggcacgtgaaga

SEQ ID NO: 2262700 - DNA, 25 bp, Homo sapien
tcgcggccaaggcacgtgaagaagc

SEQ ID NO: 2262701 - DNA, 25 bp, Homo sapien
gccacacatacttgaggtcatcata

SEQ ID NO: 2262702 - DNA, 25 bp, Homo sapien
ttagcaaagtctggaacgggccttg

SEQ ID NO: 2262703 - DNA, 25 bp, Homo sapien
aggactccagaagcacgccgagtac

SEQ ID NO: 2262704 - DNA, 25 bp, Homo sapien
gcaaagtctggaacgggccttgcca

SEQ ID NO: 2262705 - DNA, 25 bp, Homo sapien
cagcaaatctgtgaggtgcctgaga

SEQ ID NO: 2262706 - DNA, 25 bp, Homo sapien
tccaggcctgcagagtctctcgctc

SEQ ID NO: 2262707 - DNA, 25 bp, Homo sapien
ccagacagagttggtcgcggtcccg

SEQ ID NO: 2262708 - DNA, 25 bp, Homo sapien
ccgcacttgttcctgccgcgaccct

SEQ ID NO: 2262709 - DNA, 25 bp, Homo sapien
gtcgcggtcccgtgactgtcactca

SEQ ID NO: 2262710 - DNA, 25 bp, Homo sapien
gtcgcgctgggagacccttgctcat

SEQ ID NO: 2262711 - DNA, 25 bp, Homo sapien
tttggggtgcttggtaatgaggctg

SEQ ID NO: 2262712 - DNA, 25 bp, Homo sapien
gtgcttggtaatgaggctgatgccc

SEQ ID NO: 2262713 - DNA, 25 bp, Homo sapien
gggtgcttggtaatgaggctgatgc

SEQ ID NO: 2262714 - DNA, 25 bp, Homo sapien
gcttggtaatgaggctgatgccctg

SEQ ID NO: 2262715 - DNA, 25 bp, Homo sapien
aggcgaagcgcccacaacgccattt

SEQ ID NO: 2262716 - DNA, 25 bp, Homo sapien
aacgccatttgccaaaggtatggca

SEQ ID NO: 2262717 - DNA, 25 bp, Homo sapien
gcccacaacgccatttgccaaaggt

SEQ ID NO: 2262718 - DNA, 25 bp, Homo sapien
caaaggtatggcaaatccgcaaggc

SEQ ID NO: 2262719 - DNA, 25 bp, Homo sapien
ccaggagcttctggtagcggagtgc

SEQ ID NO: 2262720 - DNA, 25 bp, Homo sapien
tggagacacggaggctttggttact

SEQ ID NO: 2262721 - DNA, 25 bp, Homo sapien
gacacggaggctttggttactccag

SEQ ID NO: 2262722 - DNA, 25 bp, Homo sapien
tctggtagcggagtgcctgggtgct

SEQ ID NO: 2262723 - DNA, 25 bp, Homo sapien
cctatagatgcggagtgatcgccca

SEQ ID NO: 2262724 - DNA, 25 bp, Homo sapien
tgggctccaaggtgactaaacgtga

SEQ ID NO: 2262725 - DNA, 25 bp, Homo sapien
caaatccttctgacttgctggcaag

SEQ ID NO: 2262726 - DNA, 25 bp, Homo sapien
gatccctgccaagaattagccaaga

SEQ ID NO: 2262727 - DNA, 25 bp, Homo sapien
tcggccttagatttctttggagcag

SEQ ID NO: 2262728 - DNA, 25 bp, Homo sapien
cttagatttctttggagcagatttc

SEQ ID NO: 2262729 - DNA, 25 bp, Homo sapien
ggccttagatttctttggagcagat

SEQ ID NO: 2262730 - DNA, 25 bp, Homo sapien
catcggccttagatttctttggagc

SEQ ID NO: 2262731 - DNA, 25 bp, Homo sapien
gaggacatgggccgcttgttggctg

SEQ ID NO: 2262732 - DNA, 25 bp, Homo sapien
ggacatgggccgcttgttggctggc

SEQ ID NO: 2262733 - DNA, 25 bp, Homo sapien
acatgggccgcttgttggctggctt

SEQ ID NO: 2262734 - DNA, 25 bp, Homo sapien
catgggccgcttgttggctggcttg

SEQ ID NO: 2262735 - DNA, 25 bp, Homo sapien
gagtactcgataatcttgccggagg

SEQ ID NO: 2262736 - DNA, 25 bp, Homo sapien
gatggccaggtacacggagtactcg

SEQ ID NO: 2262737 - DNA, 25 bp, Homo sapien
tacacccgcatgaaggccagctggg

SEQ ID NO: 2262738 - DNA, 25 bp, Homo sapien
tagcccttctcattgcgggcggcga

SEQ ID NO: 2262739 - DNA, 25 bp, Homo sapien
cacgaaacttataggctgtgcctgg

SEQ ID NO: 2262740 - DNA, 25 bp, Homo sapien
aaccaggcaggcacgtcttaaaggc

SEQ ID NO: 2262741 - DNA, 25 bp, Homo sapien
tagtcagggacggtgcccaaatcat

SEQ ID NO: 2262742 - DNA, 25 bp, Homo sapien
caggcattgattccggcaacacgaa

SEQ ID NO: 2262743 - DNA, 25 bp, Homo sapien
cacatcaaaccactggttttccttc

SEQ ID NO: 2262744 - DNA, 25 bp, Homo sapien
aatagtgtgtcaccattacattggt

SEQ ID NO: 2262745 - DNA, 25 bp, Homo sapien
tggtggcaggaaatagtgtgtcacc

SEQ ID NO: 2262746 - DNA, 25 bp, Homo sapien
ggtgcccttaatgactcccacatca

SEQ ID NO: 2262747 - DNA, 25 bp, Homo sapien
ttggccacttcggtcagggtagctg

SEQ ID NO: 2262748 - DNA, 25 bp, Homo sapien
caaccggctggggggccacaaatgt

SEQ ID NO: 2262749 - DNA, 25 bp, Homo sapien
gatgccattggccacttcggtcagg

SEQ ID NO: 2262750 - DNA, 25 bp, Homo sapien
caccacaaccggctggggggccaca

SEQ ID NO: 2262751 - DNA, 25 bp, Homo sapien
ccagcaccaattcgccctcagtcgc

SEQ ID NO: 2262752 - DNA, 25 bp, Homo sapien
caccaattcgccctcagtcgcttac

SEQ ID NO: 2262753 - DNA, 25 bp, Homo sapien
ccccagcaccaattcgccctcagtc

SEQ ID NO: 2262754 - DNA, 25 bp, Homo sapien
agcaccaattcgccctcagtcgctt

SEQ ID NO: 2262755 - DNA, 25 bp, Homo sapien
tccgcctgagtcacggttgctgctg

SEQ ID NO: 2262756 - DNA, 25 bp, Homo sapien
acaatgggtatggtggtggcctggc

SEQ ID NO: 2262757 - DNA, 25 bp, Homo sapien
gcaattgctctcaatggctgggtcg

SEQ ID NO: 2262758 - DNA, 25 bp, Homo sapien
ccgtgccggccagctcattgaggca

SEQ ID NO: 2262759 - DNA, 25 bp, Homo sapien
ctgctccagggtcgagagaaacact

SEQ ID NO: 2262760 - DNA, 25 bp, Homo sapien
tgctccagggtcgagagaaacacta

SEQ ID NO: 2262761 - DNA, 25 bp, Homo sapien
tgagccccgttaccatgagggtggt

SEQ ID NO: 2262762 - DNA, 25 bp, Homo sapien
ctggcccgaagatggctcccctgtg

SEQ ID NO: 2262763 - DNA, 25 bp, Homo sapien
gataactggtctacttcggactgtg

SEQ ID NO: 2262764 - DNA, 25 bp, Homo sapien
tgggcctcggccattagctcttggg

SEQ ID NO: 2262765 - DNA, 25 bp, Homo sapien
ggcagtctcagtcattgatgagatc

SEQ ID NO: 2262766 - DNA, 25 bp, Homo sapien
tagtcagagcccttggggcagtctc

SEQ ID NO: 2262767 - DNA, 25 bp, Homo sapien
cttggggcagtctcagtcattgatg

SEQ ID NO: 2262768 - DNA, 25 bp, Homo sapien
acttcagtagtcagagcccttgggg

SEQ ID NO: 2262769 - DNA, 25 bp, Homo sapien
tccttgtgggcctaagttttcattc

SEQ ID NO: 2262770 - DNA, 25 bp, Homo sapien
tccagcccatgttaaatagggaggg

SEQ ID NO: 2262771 - DNA, 25 bp, Homo sapien
tttcattcttgatgggccagctcca

SEQ ID NO: 2262772 - DNA, 25 bp, Homo sapien
agtggttctctgaccagcatgagga

SEQ ID NO: 2262773 - DNA, 25 bp, Homo sapien
tgtggactgcgtcacggtggtcaca

SEQ ID NO: 2262774 - DNA, 25 bp, Homo sapien
ttcacgctgtcgccctgggtgctct

SEQ ID NO: 2262775 - DNA, 25 bp, Homo sapien
acagcccgcgtcagtgtggaggaca

SEQ ID NO: 2262776 - DNA, 25 bp, Homo sapien
acacggttgtcgtgatggcactgga

SEQ ID NO: 2262777 - DNA, 25 bp, Homo sapien
cacgctgaccgacatggtggtgcca

SEQ ID NO: 2262778 - DNA, 25 bp, Homo sapien
ggtccttaatgcttgggctgctcag

SEQ ID NO: 2262779 - DNA, 25 bp, Homo sapien
taggccagactccacggtcctgtgg

SEQ ID NO: 2262780 - DNA, 25 bp, Homo sapien
ttggcactgggacttagagccctgg

SEQ ID NO: 2262781 - DNA, 25 bp, Homo sapien
gttggtggtgcccgtctcgtgggtc

SEQ ID NO: 2262782 - DNA, 25 bp, Homo sapien
tggtgcccgtctcgtgggtctcgca

SEQ ID NO: 2262783 - DNA, 25 bp, Homo sapien
tggtggtgcccgtctcgtgggtctc

SEQ ID NO: 2262784 - DNA, 25 bp, Homo sapien
ggtggtgcccgtctcgtgggtctcg

SEQ ID NO: 2262785 - DNA, 25 bp, Homo sapien
gtgggtctcgcagggcgggttcgaa

SEQ ID NO: 2262786 - DNA, 25 bp, Homo sapien
ctgcccggccatgttggaggtggcg

SEQ ID NO: 2262787 - DNA, 25 bp, Homo sapien
gtctcgcagggcgggttcgaacaga

SEQ ID NO: 2262788 - DNA, 25 bp, Homo sapien
tcgcagggcgggttcgaacagactc

SEQ ID NO: 2262789 - DNA, 25 bp, Homo sapien
gcccacagtcgaggtcacaagagaa

SEQ ID NO: 2262790 - DNA, 25 bp, Homo sapien
tgctggcccacagtcgaggtcacaa

SEQ ID NO: 2262791 - DNA, 25 bp, Homo sapien
tggcccacagtcgaggtcacaagag

SEQ ID NO: 2262792 - DNA, 25 bp, Homo sapien
ccacagtcgaggtcacaagagaagc

SEQ ID NO: 2262793 - DNA, 25 bp, Homo sapien
caacagtagtggtggccgtgttggt

SEQ ID NO: 2262794 - DNA, 25 bp, Homo sapien
gtgtcccccaaggttagccacaaca

SEQ ID NO: 2262795 - DNA, 25 bp, Homo sapien
cagtagtggtggccgtgttggtggt

SEQ ID NO: 2262796 - DNA, 25 bp, Homo sapien
tcccccaaggttagccacaacagta

SEQ ID NO: 2262797 - DNA, 25 bp, Homo sapien
cactaggtgccgtgatcagagttac

SEQ ID NO: 2262798 - DNA, 25 bp, Homo sapien
cctggcctgagtcggcgatggtaac

SEQ ID NO: 2262799 - DNA, 25 bp, Homo sapien
gacacagggaggtcatgcacaggct

SEQ ID NO: 2262800 - DNA, 25 bp, Homo sapien
taactgtggcggtgggctgttctgt

SEQ ID NO: 2262801 - DNA, 25 bp, Homo sapien
ccagggaagcactagtgctgtggcc

SEQ ID NO: 2262802 - DNA, 25 bp, Homo sapien
tctgtgcggccgacacagtgatggc

SEQ ID NO: 2262803 - DNA, 25 bp, Homo sapien
tggtggagacggtgcctgtcactgt

SEQ ID NO: 2262804 - DNA, 25 bp, Homo sapien
caaggtggtgatgggcgtggccagg

SEQ ID NO: 2262805 - DNA, 25 bp, Homo sapien
tgacgggtgtgaccaggcgaacacc

SEQ ID NO: 2262806 - DNA, 25 bp, Homo sapien
ccaacgtggtgacggctggcttgac

SEQ ID NO: 2262807 - DNA, 25 bp, Homo sapien
cttgacggcggagacggtgacgggt

SEQ ID NO: 2262808 - DNA, 25 bp, Homo sapien
ggtgcctttcacaaccaacgtggtg

SEQ ID NO: 2262809 - DNA, 25 bp, Homo sapien
ggacagcagtgatgattttcgcagg

SEQ ID NO: 2262810 - DNA, 25 bp, Homo sapien
cagcagtgatgattttcgcaggtgc

SEQ ID NO: 2262811 - DNA, 25 bp, Homo sapien
tgatgggggacttgatgccaggact

SEQ ID NO: 2262812 - DNA, 25 bp, Homo sapien
cagtgatgattttcgcaggtgctcc

SEQ ID NO: 2262813 - DNA, 25 bp, Homo sapien
ccactggcctgcgtggtagtgatga

SEQ ID NO: 2262814 - DNA, 25 bp, Homo sapien
gatggtgggcttggtccccgcccca

SEQ ID NO: 2262815 - DNA, 25 bp, Homo sapien
ccgtggcgcccgcctgggtgatgat

SEQ ID NO: 2262816 - DNA, 25 bp, Homo sapien
tgatggtggtcgtgccgggcttggt

SEQ ID NO: 2262817 - DNA, 25 bp, Homo sapien
tggcctgtgactgctgaagtctgaa

SEQ ID NO: 2262818 - DNA, 25 bp, Homo sapien
caggacccgtggacgcctggcctgt

SEQ ID NO: 2262819 - DNA, 25 bp, Homo sapien
tctgagtcacaggacccgtggacgc

SEQ ID NO: 2262820 - DNA, 25 bp, Homo sapien
gtctggaccaccgacatcactttgc

SEQ ID NO: 2262821 - DNA, 25 bp, Homo sapien
gtgatggtcttggtgaccccgccca

SEQ ID NO: 2262822 - DNA, 25 bp, Homo sapien
cggaggaaaccgatgtccccacctg

SEQ ID NO: 2262823 - DNA, 25 bp, Homo sapien
tcttcagcatgcgagtggcagggtt

SEQ ID NO: 2262824 - DNA, 25 bp, Homo sapien
gtgcctgacttgtgcactgtgatga

SEQ ID NO: 2262825 - DNA, 25 bp, Homo sapien
ccactcatctgtgggctactgccaa

SEQ ID NO: 2262826 - DNA, 25 bp, Homo sapien
tgtcacagccatggtcttcacgatg

SEQ ID NO: 2262827 - DNA, 25 bp, Homo sapien
ggagggtggtagtgccaggtgtcac

SEQ ID NO: 2262828 - DNA, 25 bp, Homo sapien
ggtggtacccgctgggacactcagc

SEQ ID NO: 2262829 - DNA, 25 bp, Homo sapien
gcctgaggaccggtcactttgagaa

SEQ ID NO: 2262830 - DNA, 25 bp, Homo sapien
gcctggctggcaggtcgcatggtga

SEQ ID NO: 2262831 - DNA, 25 bp, Homo sapien
tgggcactctgtgttggcacaacca

SEQ ID NO: 2262832 - DNA, 25 bp, Homo sapien
atggagttcctgttgtagcctgagg

SEQ ID NO: 2262833 - DNA, 25 bp, Homo sapien
gagctgccaggcaccgttggcaaga

SEQ ID NO: 2262834 - DNA, 25 bp, Homo sapien
gccaggcaccgttggcaagacctgg

SEQ ID NO: 2262835 - DNA, 25 bp, Homo sapien
atggagctgccaggcaccgttggca

SEQ ID NO: 2262836 - DNA, 25 bp, Homo sapien
gctgcggtgggcacagaaatggagc

SEQ ID NO: 2262837 - DNA, 25 bp, Homo sapien
caggagcgtgatgcctacttgggtc

SEQ ID NO: 2262838 - DNA, 25 bp, Homo sapien
agaaggtagctgtcggctgttgcca

SEQ ID NO: 2262839 - DNA, 25 bp, Homo sapien
cagatgggaccggattgggtgtagg

SEQ ID NO: 2262840 - DNA, 25 bp, Homo sapien
gaggtggcagtagcagccgtggcag

SEQ ID NO: 2262841 - DNA, 25 bp, Homo sapien
gttggtgttggcgcgtaccagttgt

SEQ ID NO: 2262842 - DNA, 25 bp, Homo sapien
ggtgttggcgcgtaccagttgtact

SEQ ID NO: 2262843 - DNA, 25 bp, Homo sapien
ggagttggtgttggcgcgtaccagt

SEQ ID NO: 2262844 - DNA, 25 bp, Homo sapien
accagttgtactcgggctgggggtg

SEQ ID NO: 2262845 - DNA, 25 bp, Homo sapien
tgtctctaggtaccagaggtccttg

SEQ ID NO: 2262846 - DNA, 25 bp, Homo sapien
gtcacgcccactccaaatgtacagg

SEQ ID NO: 2262847 - DNA, 25 bp, Homo sapien
tccaaatgtacaggcgggtgttgat

SEQ ID NO: 2262848 - DNA, 25 bp, Homo sapien
ctggttgttccaggccttgcggtag

SEQ ID NO: 2262849 - DNA, 25 bp, Homo sapien
cactcggagcccgaggaggccatac

SEQ ID NO: 2262850 - DNA, 25 bp, Homo sapien
ccactcggagcccgaggaggccata

SEQ ID NO: 2262851 - DNA, 25 bp, Homo sapien
tgtggccactttgacgtcatccatg

SEQ ID NO: 2262852 - DNA, 25 bp, Homo sapien
cgtgttggtacacttccactccttc

SEQ ID NO: 2262853 - DNA, 25 bp, Homo sapien
atgacgagaggcacccagccaccaa

SEQ ID NO: 2262854 - DNA, 25 bp, Homo sapien
ttgagacaagccagcgtgttggtac

SEQ ID NO: 2262855 - DNA, 25 bp, Homo sapien
gccaccccgctgagactgggcttat

SEQ ID NO: 2262856 - DNA, 25 bp, Homo sapien
ggttgccgagtggagactgcgagga

SEQ ID NO: 2262857 - DNA, 25 bp, Homo sapien
ctgggcttattccacgtcagggtgt

SEQ ID NO: 2262858 - DNA, 25 bp, Homo sapien
agactgcgaggaagaggcgccaccc

SEQ ID NO: 2262859 - DNA, 25 bp, Homo sapien
gacccgctttgtcccatggctgctg

SEQ ID NO: 2262860 - DNA, 25 bp, Homo sapien
cagccaagaggcagacccgctttgt

SEQ ID NO: 2262861 - DNA, 25 bp, Homo sapien
gaggcagacccgctttgtcccatgg

SEQ ID NO: 2262862 - DNA, 25 bp, Homo sapien
agccaagaggcagacccgctttgtc

SEQ ID NO: 2262863 - DNA, 25 bp, Homo sapien
ccgccgtagatcaccagcttggact

SEQ ID NO: 2262864 - DNA, 25 bp, Homo sapien
cagagcctggccgtaattccaggat

SEQ ID NO: 2262865 - DNA, 25 bp, Homo sapien
taggaccccgtaagtgatgggaatg

SEQ ID NO: 2262866 - DNA, 25 bp, Homo sapien
tctttttcggtgtagaccacggcag

SEQ ID NO: 2262867 - DNA, 25 bp, Homo sapien
tcattggccagacccccaaacaggt

SEQ ID NO: 2262868 - DNA, 25 bp, Homo sapien
tttgggtcctcgctatcattggcca

SEQ ID NO: 2262869 - DNA, 25 bp, Homo sapien
caaacaggtagcatttgttgcccac

SEQ ID NO: 2262870 - DNA, 25 bp, Homo sapien
ctgtgcccgagtcgaggacacggag

SEQ ID NO: 2262871 - DNA, 25 bp, Homo sapien
ggagttcgtagaggtcattgctgta

SEQ ID NO: 2262872 - DNA, 25 bp, Homo sapien
gttcgtagaggtcattgctgtattt

SEQ ID NO: 2262873 - DNA, 25 bp, Homo sapien
tgctgtatttcccatactccaccat

SEQ ID NO: 2262874 - DNA, 25 bp, Homo sapien
ctggagttcgtagaggtcattgctg

SEQ ID NO: 2262875 - DNA, 25 bp, Homo sapien
aggcgagtcccgtcacacacgaagc

SEQ ID NO: 2262876 - DNA, 25 bp, Homo sapien
gaatgtcccccctcacggctgggat

SEQ ID NO: 2262877 - DNA, 25 bp, Homo sapien
ctcacggctgggatgaaccactggt

SEQ ID NO: 2262878 - DNA, 25 bp, Homo sapien
acaccaggaggcgagtcccgtcaca

SEQ ID NO: 2262879 - DNA, 25 bp, Homo sapien
taggtggcgataatctccgagatgt

SEQ ID NO: 2262880 - DNA, 25 bp, Homo sapien
caaagtcaacgtggtaggtggcgat

SEQ ID NO: 2262881 - DNA, 25 bp, Homo sapien
taatctccgagatgtggagaaacca

SEQ ID NO: 2262882 - DNA, 25 bp, Homo sapien
cagcctttcaaagtcaacgtggtag

SEQ ID NO: 2262883 - DNA, 25 bp, Homo sapien
tccttgatggccacggcgcggtggc

SEQ ID NO: 2262884 - DNA, 25 bp, Homo sapien
caccgctggcaagttggcgggcgac

SEQ ID NO: 2262885 - DNA, 25 bp, Homo sapien
agttcgtccactattccctcgttgc

SEQ ID NO: 2262886 - DNA, 25 bp, Homo sapien
ccgtgttgtacacgtgcagttcgtc

SEQ ID NO: 2262887 - DNA, 25 bp, Homo sapien
taaggcagctctcacggagaagcgg

SEQ ID NO: 2262888 - DNA, 25 bp, Homo sapien
tcgacacacctaacgaatggaggcg

SEQ ID NO: 2262889 - DNA, 25 bp, Homo sapien
caactgtacggcagaagaagcggta

SEQ ID NO: 2262890 - DNA, 25 bp, Homo sapien
ttcaaagagctagagttaggccccg

SEQ ID NO: 2262891 - DNA, 25 bp, Homo sapien
ctcgaggttggcattcggcccacga

SEQ ID NO: 2262892 - DNA, 25 bp, Homo sapien
cctgctcagtgccctcgaggttggc

SEQ ID NO: 2262893 - DNA, 25 bp, Homo sapien
tgagcacattgccaccaggtaagga

SEQ ID NO: 2262894 - DNA, 25 bp, Homo sapien
ttcggcccacgactgtgatgactga

SEQ ID NO: 2262895 - DNA, 25 bp, Homo sapien
ggcaaatggcaggacccgacccagg

SEQ ID NO: 2262896 - DNA, 25 bp, Homo sapien
gggcaaatggcaggacccgacccag

SEQ ID NO: 2262897 - DNA, 25 bp, Homo sapien
tggggcaaatggcaggacccgaccc

SEQ ID NO: 2262898 - DNA, 25 bp, Homo sapien
caaatggcaggacccgacccagggc

SEQ ID NO: 2262899 - DNA, 25 bp, Homo sapien
gctggagggagggcgaaaagaaggc

SEQ ID NO: 2262900 - DNA, 25 bp, Homo sapien
ctggagggagggcgaaaagaaggcg

SEQ ID NO: 2262901 - DNA, 25 bp, Homo sapien
acttgatgtggtcaccggggtgatc

SEQ ID NO: 2262902 - DNA, 25 bp, Homo sapien
ttgccaaatcccttgccagattggg

SEQ ID NO: 2262903 - DNA, 25 bp, Homo sapien
gtagaatttgccaaatcccttgcca

SEQ ID NO: 2262904 - DNA, 25 bp, Homo sapien
gaatttgccaaatcccttgccagat

SEQ ID NO: 2262905 - DNA, 25 bp, Homo sapien
aacagaccaactaaaggcagagatt

SEQ ID NO: 2262906 - DNA, 25 bp, Homo sapien
gatgatagacttaactccaaccatt

SEQ ID NO: 2262907 - DNA, 25 bp, Homo sapien
gacttaactccaaccattaaatgga

SEQ ID NO: 2262908 - DNA, 25 bp, Homo sapien
aatggattaaacagaccaactaaag

SEQ ID NO: 2262909 - DNA, 25 bp, Homo sapien
cagaatatacggttcatatgcaaaa

SEQ ID NO: 2262910 - DNA, 25 bp, Homo sapien
acagaatatacggttcatatgcaaa

SEQ ID NO: 2262911 - DNA, 25 bp, Homo sapien
atatacggttcatatgcaaaactca

SEQ ID NO: 2262912 - DNA, 25 bp, Homo sapien
gaatatacggttcatatgcaaaact

SEQ ID NO: 2262913 - DNA, 25 bp, Homo sapien
tgtataatatcatgatgaactagaa

SEQ ID NO: 2262914 - DNA, 25 bp, Homo sapien
tcaaagataccatttagaatagcat

SEQ ID NO: 2262915 - DNA, 25 bp, Homo sapien
gcatttctgtataatatcatgatga

SEQ ID NO: 2262916 - DNA, 25 bp, Homo sapien
aaatcaaagataccatttagaatag

SEQ ID NO: 2262917 - DNA, 25 bp, Homo sapien
aaagctcaaggctttcggtgcaaca

SEQ ID NO: 2262918 - DNA, 25 bp, Homo sapien
ggctttcggtgcaacaaagtccaca

SEQ ID NO: 2262919 - DNA, 25 bp, Homo sapien
agctcaaggctttcggtgcaacaaa

SEQ ID NO: 2262920 - DNA, 25 bp, Homo sapien
ggtgcaacaaagtccacaagtagag

SEQ ID NO: 2262921 - DNA, 25 bp, Homo sapien
ttattactcaaggacaacctggacg

SEQ ID NO: 2262922 - DNA, 25 bp, Homo sapien
ctcacggctgaacacaaaatcactg

SEQ ID NO: 2262923 - DNA, 25 bp, Homo sapien
ggcatgtagtgtgactcacggctga

SEQ ID NO: 2262924 - DNA, 25 bp, Homo sapien
tggacgtcaccaatgcccagcttca

SEQ ID NO: 2262925 - DNA, 25 bp, Homo sapien
tgtctgggtaactaggtcttgggcc

SEQ ID NO: 2262926 - DNA, 25 bp, Homo sapien
gaattctcgcttcttgctaggactg

SEQ ID NO: 2262927 - DNA, 25 bp, Homo sapien
caaattgtaagcaggtaggagggcc

SEQ ID NO: 2262928 - DNA, 25 bp, Homo sapien
tcttgggcctagctagaccttgggt

SEQ ID NO: 2262929 - DNA, 25 bp, Homo sapien
taggcctcgtcggccccattgtgca

SEQ ID NO: 2262930 - DNA, 25 bp, Homo sapien
ctaggcctcgtcggccccattgtgc

SEQ ID NO: 2262931 - DNA, 25 bp, Homo sapien
ctcccctcacgggtctgtgcagcca

SEQ ID NO: 2262932 - DNA, 25 bp, Homo sapien
agcctcccaacatgcgccagcctcc

SEQ ID NO: 2262933 - DNA, 25 bp, Homo sapien
ctctcctcccctcacgggtctgtgc

SEQ ID NO: 2262934 - DNA, 25 bp, Homo sapien
gcctcccaacatgcgccagcctcct

SEQ ID NO: 2262935 - DNA, 25 bp, Homo sapien
gaggactcgtgcaccatgagaactt

SEQ ID NO: 2262936 - DNA, 25 bp, Homo sapien
tcgtgcaccatgagaacttctgacc

SEQ ID NO: 2262937 - DNA, 25 bp, Homo sapien
acttctgaccatgagaactttgact

SEQ ID NO: 2262938 - DNA, 25 bp, Homo sapien
tgagaactttgacttccggatttgg

SEQ ID NO: 2262939 - DNA, 25 bp, Homo sapien
tgcctgtcctgttccaggcccaagc

SEQ ID NO: 2262940 - DNA, 25 bp, Homo sapien
gctctgaaattcatcactttcttcg

SEQ ID NO: 2262941 - DNA, 25 bp, Homo sapien
gaaattcatcactttcttcgggccc

SEQ ID NO: 2262942 - DNA, 25 bp, Homo sapien
attcatcactttcttcgggcccctg

SEQ ID NO: 2262943 - DNA, 25 bp, Homo sapien
aaattcctgctggggcttcctattt

SEQ ID NO: 2262944 - DNA, 25 bp, Homo sapien
ctgggatggaaaattcctgctgggg

SEQ ID NO: 2262945 - DNA, 25 bp, Homo sapien
ggatggaaaattcctgctggggctt

SEQ ID NO: 2262946 - DNA, 25 bp, Homo sapien
aattcctgctggggcttcctatttc

SEQ ID NO: 2262947 - DNA, 25 bp, Homo sapien
caccctcgggctaaaggaggtgcta

SEQ ID NO: 2262948 - DNA, 25 bp, Homo sapien
ggcaccctcgggctaaaggaggtgc

SEQ ID NO: 2262949 - DNA, 25 bp, Homo sapien
caggcaccctcgggctaaaggaggt

SEQ ID NO: 2262950 - DNA, 25 bp, Homo sapien
gggcaggcaccctcgggctaaagga

SEQ ID NO: 2262951 - DNA, 25 bp, Homo sapien
gggttgatgataatctgcggtggct

SEQ ID NO: 2262952 - DNA, 25 bp, Homo sapien
agggccccatcctcgtacagggcca

SEQ ID NO: 2262953 - DNA, 25 bp, Homo sapien
ttctgtcgggcagggttgatgataa

SEQ ID NO: 2262954 - DNA, 25 bp, Homo sapien
tcgggcagggttgatgataatctgc

SEQ ID NO: 2262955 - DNA, 25 bp, Homo sapien
tgacgacgatgatgcagagctgcca

SEQ ID NO: 2262956 - DNA, 25 bp, Homo sapien
ctgacgacgatgatgcagagctgcc

SEQ ID NO: 2262957 - DNA, 25 bp, Homo sapien
actggctcctgatggcgctgccagg

SEQ ID NO: 2262958 - DNA, 25 bp, Homo sapien
tctgccagtgctggacacgtaggag

SEQ ID NO: 2262959 - DNA, 25 bp, Homo sapien
ttccacggctgtgggccgggatcct

SEQ ID NO: 2262960 - DNA, 25 bp, Homo sapien
agaggccgcctaggctctcgtcact

SEQ ID NO: 2262961 - DNA, 25 bp, Homo sapien
gaaggggggatgcagctggcggcct

SEQ ID NO: 2262962 - DNA, 25 bp, Homo sapien
gcctctccattttcaactgtcacca

SEQ ID NO: 2262963 - DNA, 25 bp, Homo sapien
gctgccctcaaacggggcctctcca

SEQ ID NO: 2262964 - DNA, 25 bp, Homo sapien
cccgctgccctcaaacggggcctct

SEQ ID NO: 2262965 - DNA, 25 bp, Homo sapien
tgccccgctgccctcaaacggggcc

SEQ ID NO: 2262966 - DNA, 25 bp, Homo sapien
gaaccaaagggcaagcaagaaatgt

SEQ ID NO: 2262967 - DNA, 25 bp, Homo sapien
tccgcaaagcaggactgcccggggc

SEQ ID NO: 2262968 - DNA, 25 bp, Homo sapien
ggtcggagctgggctccgcaaagca

SEQ ID NO: 2262969 - DNA, 25 bp, Homo sapien
tcagttcagaggggcgctgccccaa

SEQ ID NO: 2262970 - DNA, 25 bp, Homo sapien
gtcataggaggcctccttttggccc

SEQ ID NO: 2262971 - DNA, 25 bp, Homo sapien
cctccttttggcccggcggtgcagg

SEQ ID NO: 2262972 - DNA, 25 bp, Homo sapien
cataggaggcctccttttggcccgg

SEQ ID NO: 2262973 - DNA, 25 bp, Homo sapien
ctgggtcataggaggcctccttttg

SEQ ID NO: 2262974 - DNA, 25 bp, Homo sapien
aggcccaggcccagctcaggtgggc

SEQ ID NO: 2262975 - DNA, 25 bp, Homo sapien
caggcccaggcccagctcaggtggg

SEQ ID NO: 2262976 - DNA, 25 bp, Homo sapien
caggtgggcagggcccgggcctggg

SEQ ID NO: 2262977 - DNA, 25 bp, Homo sapien
ggcccaggcccagctcaggtgggca

SEQ ID NO: 2262978 - DNA, 25 bp, Homo sapien
caggtgcttcttgtagatctgcatg

SEQ ID NO: 2262979 - DNA, 25 bp, Homo sapien
gcagtgtgctctgggtgcttctcaa

SEQ ID NO: 2262980 - DNA, 25 bp, Homo sapien
cttgtagatctgcatggcgatggga

SEQ ID NO: 2262981 - DNA, 25 bp, Homo sapien
agacctgcttgcagtgtgctctggg

SEQ ID NO: 2262982 - DNA, 25 bp, Homo sapien
gacaggtttgtcctcggcaaggtaa

SEQ ID NO: 2262983 - DNA, 25 bp, Homo sapien
ccaggtggggtctgtacaaggccca

SEQ ID NO: 2262984 - DNA, 25 bp, Homo sapien
gaagttgtttggagccctgcctact

SEQ ID NO: 2262985 - DNA, 25 bp, Homo sapien
gggtctgtacaaggcccatagtgtc

SEQ ID NO: 2262986 - DNA, 25 bp, Homo sapien
tcacagccctctgaccagccaaggt

SEQ ID NO: 2262987 - DNA, 25 bp, Homo sapien
caccgtgcgtcttcacagccctctg

SEQ ID NO: 2262988 - DNA, 25 bp, Homo sapien
gtcttcacagccctctgaccagcca

SEQ ID NO: 2262989 - DNA, 25 bp, Homo sapien
gtgcgtcttcacagccctctgacca

SEQ ID NO: 2262990 - DNA, 25 bp, Homo sapien
gagcccacttgaagacaaattacaa

SEQ ID NO: 2262991 - DNA, 25 bp, Homo sapien
acacacagttaggtgcagggtgagg

SEQ ID NO: 2262992 - DNA, 25 bp, Homo sapien
atgggactgaagctcgggcaactcg

SEQ ID NO: 2262993 - DNA, 25 bp, Homo sapien
ccctggcccgcagtgcactctgcag

SEQ ID NO: 2262994 - DNA, 25 bp, Homo sapien
aagctgaaggtgtccgtgtccacag

SEQ ID NO: 2262995 - DNA, 25 bp, Homo sapien
tggacccggcaaagcggctgaaccg

SEQ ID NO: 2262996 - DNA, 25 bp, Homo sapien
acagccagccttcccgtcttgatgt

SEQ ID NO: 2262997 - DNA, 25 bp, Homo sapien
cagggtgccccgcactgtctgtgtc

SEQ ID NO: 2262998 - DNA, 25 bp, Homo sapien
agcctctcatccagaaggacgttgg

SEQ ID NO: 2262999 - DNA, 25 bp, Homo sapien
gcctctcatccagaaggacgttgga

SEQ ID NO: 2263000 - DNA, 25 bp, Homo sapien
cctctcatccagaaggacgttggaa

SEQ ID NO: 2263001 - DNA, 25 bp, Homo sapien
cagcctctcatccagaaggacgttg

SEQ ID NO: 2263002 - DNA, 25 bp, Homo sapien
cggcttagataaggctggactcgag

SEQ ID NO: 2263003 - DNA, 25 bp, Homo sapien
tggcactgccctgagcgctccagct

SEQ ID NO: 2263004 - DNA, 25 bp, Homo sapien
ggggcctctgctcatcagtagggcc

SEQ ID NO: 2263005 - DNA, 25 bp, Homo sapien
tggactcgaggctgccagcccggtg

SEQ ID NO: 2263006 - DNA, 25 bp, Homo sapien
ctgccccggcagttctcaagggccc

SEQ ID NO: 2263007 - DNA, 25 bp, Homo sapien
ccacattgataggacgcggggcccc

SEQ ID NO: 2263008 - DNA, 25 bp, Homo sapien
atgcctgatccccacattgatagga

SEQ ID NO: 2263009 - DNA, 25 bp, Homo sapien
gccctgccccggcagttctcaaggg

SEQ ID NO: 2263010 - DNA, 25 bp, Homo sapien
gcccgggctgtacccagaaggatgt

SEQ ID NO: 2263011 - DNA, 25 bp, Homo sapien
gaattgcccgggctgtacccagaag

SEQ ID NO: 2263012 - DNA, 25 bp, Homo sapien
ttgcccgggctgtacccagaaggat

SEQ ID NO: 2263013 - DNA, 25 bp, Homo sapien
cgggctgtacccagaaggatgtcca

SEQ ID NO: 2263014 - DNA, 25 bp, Homo sapien
aggagagaggtgggcaggcctgggt

SEQ ID NO: 2263015 - DNA, 25 bp, Homo sapien
ggccaggagagaggtgggcaggcct

SEQ ID NO: 2263016 - DNA, 25 bp, Homo sapien
gccaggagagaggtgggcaggcctg

SEQ ID NO: 2263017 - DNA, 25 bp, Homo sapien
ctgaggccaggagagaggtgggcag

SEQ ID NO: 2263018 - DNA, 25 bp, Homo sapien
gggaggttgctggatggccgttcct

SEQ ID NO: 2263019 - DNA, 25 bp, Homo sapien
caggggaggttgctggatggccgtt

SEQ ID NO: 2263020 - DNA, 25 bp, Homo sapien
aggggaggttgctggatggccgttc

SEQ ID NO: 2263021 - DNA, 25 bp, Homo sapien
acaggggaggttgctggatggccgt

SEQ ID NO: 2263022 - DNA, 25 bp, Homo sapien
agtagccagcaaagtccacaatgtt

SEQ ID NO: 2263023 - DNA, 25 bp, Homo sapien
aagccgttctgagcacagtagccag

SEQ ID NO: 2263024 - DNA, 25 bp, Homo sapien
gcagtggagacggtcctccagggag

SEQ ID NO: 2263025 - DNA, 25 bp, Homo sapien
accaggcagtagaagccgttctgag

SEQ ID NO: 2263026 - DNA, 25 bp, Homo sapien
ctcggtcaggaagctctgcttcact

SEQ ID NO: 2263027 - DNA, 25 bp, Homo sapien
tgcttcactgcagtccactccaggt

SEQ ID NO: 2263028 - DNA, 25 bp, Homo sapien
acagctgctccacctcggtcaggaa

SEQ ID NO: 2263029 - DNA, 25 bp, Homo sapien
gctccacctcggtcaggaagctctg

SEQ ID NO: 2263030 - DNA, 25 bp, Homo sapien
agggaagacgggcagcgtgaggctc

SEQ ID NO: 2263031 - DNA, 25 bp, Homo sapien
ctacccgaggcccagaaccaccaag

SEQ ID NO: 2263032 - DNA, 25 bp, Homo sapien
gaggctctcgaagcgaaggccttcg

SEQ ID NO: 2263033 - DNA, 25 bp, Homo sapien
cagcgtgaggctctcgaagcgaagg

SEQ ID NO: 2263034 - DNA, 25 bp, Homo sapien
tcctccgagaagttgtgggtgcccc

SEQ ID NO: 2263035 - DNA, 25 bp, Homo sapien
ggtgccccgggaaatctcacagagg

SEQ ID NO: 2263036 - DNA, 25 bp, Homo sapien
acagcatacaccgtgttcctcatca

SEQ ID NO: 2263037 - DNA, 25 bp, Homo sapien
tgttcctcatcaccgcccggtacac

SEQ ID NO: 2263038 - DNA, 25 bp, Homo sapien
gctgcctcccagctgacccagcttg

SEQ ID NO: 2263039 - DNA, 25 bp, Homo sapien
cctggatcaggtggggtccctgtct

SEQ ID NO: 2263040 - DNA, 25 bp, Homo sapien
ctcttcccttctgcccaaggctcca

SEQ ID NO: 2263041 - DNA, 25 bp, Homo sapien
gactggggctctgcgctacatcaaa

SEQ ID NO: 2263042 - DNA, 25 bp, Homo sapien
tggagatggcggtggaggccacagg

SEQ ID NO: 2263043 - DNA, 25 bp, Homo sapien
gagatggcggtggaggccacaggga

SEQ ID NO: 2263044 - DNA, 25 bp, Homo sapien
ctcaggccctgaatgggtctgggag

SEQ ID NO: 2263045 - DNA, 25 bp, Homo sapien
agggcttgggaccaggccgagctca

SEQ ID NO: 2263046 - DNA, 25 bp, Homo sapien
aggatggcaacttccgggggctcca

SEQ ID NO: 2263047 - DNA, 25 bp, Homo sapien
ggatggcaacttccgggggctccag

SEQ ID NO: 2263048 - DNA, 25 bp, Homo sapien
tgaggatggcaacttccgggggctc

SEQ ID NO: 2263049 - DNA, 25 bp, Homo sapien
gaggatggcaacttccgggggctcc

SEQ ID NO: 2263050 - DNA, 25 bp, Homo sapien
gcctcccagccgtggggtgcccgga

SEQ ID NO: 2263051 - DNA, 25 bp, Homo sapien
gccggcctcccagccgtggggtgcc

SEQ ID NO: 2263052 - DNA, 25 bp, Homo sapien
tggggtgcccggagtcccgcgctca

SEQ ID NO: 2263053 - DNA, 25 bp, Homo sapien
cagccgtggggtgcccggagtcccg

SEQ ID NO: 2263054 - DNA, 25 bp, Homo sapien
ttgcggttgatccagggccacagga

SEQ ID NO: 2263055 - DNA, 25 bp, Homo sapien
ctgtgatgatgtcccgcgcacggag

SEQ ID NO: 2263056 - DNA, 25 bp, Homo sapien
tgcgtgaggatgtgcacgaggtcgg

SEQ ID NO: 2263057 - DNA, 25 bp, Homo sapien
gctcggtctggtcgcgcacgatcag

SEQ ID NO: 2263058 - DNA, 25 bp, Homo sapien
cggggggcgtcaggcgtcggcgcca

SEQ ID NO: 2263059 - DNA, 25 bp, Homo sapien
ggcgtcaggcgtcggcgccaggagc

SEQ ID NO: 2263060 - DNA, 25 bp, Homo sapien
ggggcgtcaggcgtcggcgccagga

SEQ ID NO: 2263061 - DNA, 25 bp, Homo sapien
ggcggggggcgtcaggcgtcggcgc

SEQ ID NO: 2263062 - DNA, 25 bp, Homo sapien
ctccagggcgtccatcactttgtag

SEQ ID NO: 2263063 - DNA, 25 bp, Homo sapien
cactttgtagaagcggcacatgacc

SEQ ID NO: 2263064 - DNA, 25 bp, Homo sapien
aagcggcacatgacccagggcggca

SEQ ID NO: 2263065 - DNA, 25 bp, Homo sapien
cgaactggcaccagtcggcgggctc

SEQ ID NO: 2263066 - DNA, 25 bp, Homo sapien
tgggcgccgggggctgcgggctccc

SEQ ID NO: 2263067 - DNA, 25 bp, Homo sapien
ctgggcgccgggggctgcgggctcc

SEQ ID NO: 2263068 - DNA, 25 bp, Homo sapien
ggccgggtccgcggacactgactca

SEQ ID NO: 2263069 - DNA, 25 bp, Homo sapien
gccgggtccgcggacactgactcac

SEQ ID NO: 2263070 - DNA, 25 bp, Homo sapien
cggccgggtccgcggacactgactc

SEQ ID NO: 2263071 - DNA, 25 bp, Homo sapien
ccggccgggtccgcggacactgact

SEQ ID NO: 2263072 - DNA, 25 bp, Homo sapien
cccttcgagccggcctcgtgcgacg

SEQ ID NO: 2263073 - DNA, 25 bp, Homo sapien
ttccccttcgagccggcctcgtgcg

SEQ ID NO: 2263074 - DNA, 25 bp, Homo sapien
cttcgagccggcctcgtgcgacgcc

SEQ ID NO: 2263075 - DNA, 25 bp, Homo sapien
tcgagccggcctcgtgcgacgcccg

SEQ ID NO: 2263076 - DNA, 25 bp, Homo sapien
catttggcaagggtgagctcaggca

SEQ ID NO: 2263077 - DNA, 25 bp, Homo sapien
tgagtgtatgcgttgctgctgcccc

SEQ ID NO: 2263078 - DNA, 25 bp, Homo sapien
ctgaaatatgccgagaacgctgccc

SEQ ID NO: 2263079 - DNA, 25 bp, Homo sapien
ggcagcagccttgagccattcagtc

SEQ ID NO: 2263080 - DNA, 25 bp, Homo sapien
agaagattgtctgcacccgcactgg

SEQ ID NO: 2263081 - DNA, 25 bp, Homo sapien
gcactgttcatgcttcgggcctgga

SEQ ID NO: 2263082 - DNA, 25 bp, Homo sapien
ttggactgacgcacatgattctggg

SEQ ID NO: 2263083 - DNA, 25 bp, Homo sapien
tgtcagtcagaaaacacgcacgtgg

SEQ ID NO: 2263084 - DNA, 25 bp, Homo sapien
cgttggctagtttggcactgatgga

SEQ ID NO: 2263085 - DNA, 25 bp, Homo sapien
gccatccagcgagctgagaagctgg

SEQ ID NO: 2263086 - DNA, 25 bp, Homo sapien
ccgccatccagcgagctgagaagct

SEQ ID NO: 2263087 - DNA, 25 bp, Homo sapien
ggccgttggctagtttggcactgat

SEQ ID NO: 2263088 - DNA, 25 bp, Homo sapien
catgggtactggaaagctgtcggtc

SEQ ID NO: 2263089 - DNA, 25 bp, Homo sapien
tcgtgggaaccctatgtgctgagcc

SEQ ID NO: 2263090 - DNA, 25 bp, Homo sapien
tgacaacctggtcggatgctgcgct

SEQ ID NO: 2263091 - DNA, 25 bp, Homo sapien
cacatctggtggcttgagggactaa

SEQ ID NO: 2263092 - DNA, 25 bp, Homo sapien
gccctacccataaggagaagagaca

SEQ ID NO: 2263093 - DNA, 25 bp, Homo sapien
gaagctttgtcagagccctacccat

SEQ ID NO: 2263094 - DNA, 25 bp, Homo sapien
tatttcagttaatcgggaagctttg

SEQ ID NO: 2263095 - DNA, 25 bp, Homo sapien
tttgctttgcaatccgctccgtgta

SEQ ID NO: 2263096 - DNA, 25 bp, Homo sapien
tgcacagatcggatagaagactcct

SEQ ID NO: 2263097 - DNA, 25 bp, Homo sapien
gtttgtacttttctgcggccgtggc

SEQ ID NO: 2263098 - DNA, 25 bp, Homo sapien
ccctggcgaagtttgaaaaggcatc

SEQ ID NO: 2263099 - DNA, 25 bp, Homo sapien
cattagggtccagggatgtgtcgcc

SEQ ID NO: 2263100 - DNA, 25 bp, Homo sapien
ggtcatcatacatgggtccccggtc

SEQ ID NO: 2263101 - DNA, 25 bp, Homo sapien
tacacatcatacttcccagcagagc

SEQ ID NO: 2263102 - DNA, 25 bp, Homo sapien
taagcttccgtgtccagccttcagg

SEQ ID NO: 2263103 - DNA, 25 bp, Homo sapien
tcacggatgatggagcgccgctgtt

SEQ ID NO: 2263104 - DNA, 25 bp, Homo sapien
cgcacttcaagggactctgggctcg

SEQ ID NO: 2263105 - DNA, 25 bp, Homo sapien
gagtcgcacttcaagggactctggg

SEQ ID NO: 2263106 - DNA, 25 bp, Homo sapien
gtcgcacttcaagggactctgggct

SEQ ID NO: 2263107 - DNA, 25 bp, Homo sapien
cacttcaagggactctgggctcgat

SEQ ID NO: 2263108 - DNA, 25 bp, Homo sapien
ttcatttggagaactttcaggttca

SEQ ID NO: 2263109 - DNA, 25 bp, Homo sapien
tcaggttcatctggagaactttcat

SEQ ID NO: 2263110 - DNA, 25 bp, Homo sapien
cttttcatttggagaactttcaggt

SEQ ID NO: 2263111 - DNA, 25 bp, Homo sapien
tttcaggttcatctggagaactttc

SEQ ID NO: 2263112 - DNA, 25 bp, Homo sapien
tgctggatgaataaccacaacacgg

SEQ ID NO: 2263113 - DNA, 25 bp, Homo sapien
gatgaataaccacaacacggacgca

SEQ ID NO: 2263114 - DNA, 25 bp, Homo sapien
cggacgcagcgctccacgtgcttct

SEQ ID NO: 2263115 - DNA, 25 bp, Homo sapien
tcaacacatgctggatgaataacca

SEQ ID NO: 2263116 - DNA, 25 bp, Homo sapien
tggttcgtaatgctgacatctgagc

SEQ ID NO: 2263117 - DNA, 25 bp, Homo sapien
gttcgtaatgctgacatctgagccc

SEQ ID NO: 2263118 - DNA, 25 bp, Homo sapien
tcgtaatgctgacatctgagccccc

SEQ ID NO: 2263119 - DNA, 25 bp, Homo sapien
ttggttcgtaatgctgacatctgag

SEQ ID NO: 2263120 - DNA, 25 bp, Homo sapien
ggcagaggaatcaaactcacccagg

SEQ ID NO: 2263121 - DNA, 25 bp, Homo sapien
taagatcatgttcagcggatgcaca

SEQ ID NO: 2263122 - DNA, 25 bp, Homo sapien
tagtgctctctgtcgccacctaatg

SEQ ID NO: 2263123 - DNA, 25 bp, Homo sapien
ggtagcagcctagcctattccacgg

SEQ ID NO: 2263124 - DNA, 25 bp, Homo sapien
ggtatgaacatcagctgacgctggc

SEQ ID NO: 2263125 - DNA, 25 bp, Homo sapien
tttcctatcttcattggccatctgt

SEQ ID NO: 2263126 - DNA, 25 bp, Homo sapien
tagtggtgactagtggtaagttagc

SEQ ID NO: 2263127 - DNA, 25 bp, Homo sapien
gcaagctaccgagcaggtgcaggta

SEQ ID NO: 2263128 - DNA, 25 bp, Homo sapien
gaacgacaggcttgagaacagatct

SEQ ID NO: 2263129 - DNA, 25 bp, Homo sapien
ctgacctccgcctacgaagagactt

SEQ ID NO: 2263130 - DNA, 25 bp, Homo sapien
tcctgggtcctggaacgacaggctt

SEQ ID NO: 2263131 - DNA, 25 bp, Homo sapien
gaacagatctgaatcccatcttgca

SEQ ID NO: 2263132 - DNA, 25 bp, Homo sapien
tgaatgttgaagcacactcgtgttt

SEQ ID NO: 2263133 - DNA, 25 bp, Homo sapien
tcttggttgtaatatgcaggcgcac

SEQ ID NO: 2263134 - DNA, 25 bp, Homo sapien
catcaagcaagtttaccagtgccat

SEQ ID NO: 2263135 - DNA, 25 bp, Homo sapien
cgtgtttctgcgaaaagcctcttgg

SEQ ID NO: 2263136 - DNA, 25 bp, Homo sapien
aaactgcacccataaaagatggcaa

SEQ ID NO: 2263137 - DNA, 25 bp, Homo sapien
ctactatcatcattttgcggcacca

SEQ ID NO: 2263138 - DNA, 25 bp, Homo sapien
caaactgcacccataaaagatggca

SEQ ID NO: 2263139 - DNA, 25 bp, Homo sapien
tatcatcattttgcggcaccacaaa

SEQ ID NO: 2263140 - DNA, 25 bp, Homo sapien
ggaaccctatactcagccaatcaag

SEQ ID NO: 2263141 - DNA, 25 bp, Homo sapien
caaagttaaacagtagtccccatag

SEQ ID NO: 2263142 - DNA, 25 bp, Homo sapien
aagtccatcctatctgagtccctag

SEQ ID NO: 2263143 - DNA, 25 bp, Homo sapien
ttgaatgaccacagtacaacgagtg

SEQ ID NO: 2263144 - DNA, 25 bp, Homo sapien
aaagagcagatacttgcccagattg

SEQ ID NO: 2263145 - DNA, 25 bp, Homo sapien
gcaactagaaatggtgggcaaaaca

SEQ ID NO: 2263146 - DNA, 25 bp, Homo sapien
gaatcgtacgaaataaacagcactg

SEQ ID NO: 2263147 - DNA, 25 bp, Homo sapien
gagctatataagcaagccaaggttt

SEQ ID NO: 2263148 - DNA, 25 bp, Homo sapien
cttacataccaccagacaaagtgct

SEQ ID NO: 2263149 - DNA, 25 bp, Homo sapien
aactgtcacaactgcagacatttgt

SEQ ID NO: 2263150 - DNA, 25 bp, Homo sapien
tgccaagtgtaattccaaaaacagc

SEQ ID NO: 2263151 - DNA, 25 bp, Homo sapien
tgtacctatacgcattttcaaagtt

SEQ ID NO: 2263152 - DNA, 25 bp, Homo sapien
gacagcatagatgggcagagcacct

SEQ ID NO: 2263153 - DNA, 25 bp, Homo sapien
agagcacctcacgctgccttctggg

SEQ ID NO: 2263154 - DNA, 25 bp, Homo sapien
gcctggaaagaaagccgagcctggc

SEQ ID NO: 2263155 - DNA, 25 bp, Homo sapien
tggggcccagggaacatctaagagt

SEQ ID NO: 2263156 - DNA, 25 bp, Homo sapien
ttggggcagggtagcagagatactt

SEQ ID NO: 2263157 - DNA, 25 bp, Homo sapien
tttggggcagggtagcagagatact

SEQ ID NO: 2263158 - DNA, 25 bp, Homo sapien
tggggcagggtagcagagatacttt

SEQ ID NO: 2263159 - DNA, 25 bp, Homo sapien
tgattgtctgctgatagggctgccc

SEQ ID NO: 2263160 - DNA, 25 bp, Homo sapien
cagccggcaattacatgagttggaa

SEQ ID NO: 2263161 - DNA, 25 bp, Homo sapien
tcccggataaggagaagataccact

SEQ ID NO: 2263162 - DNA, 25 bp, Homo sapien
tctggaatgaacactgtagccccac

SEQ ID NO: 2263163 - DNA, 25 bp, Homo sapien
atttcttatggatgtctacaacagc

SEQ ID NO: 2263164 - DNA, 25 bp, Homo sapien
tatttcttatggatgtctacaacag

SEQ ID NO: 2263165 - DNA, 25 bp, Homo sapien
ctatttcttatggatgtctacaaca

SEQ ID NO: 2263166 - DNA, 25 bp, Homo sapien
tttcttatggatgtctacaacagct

SEQ ID NO: 2263167 - DNA, 25 bp, Homo sapien
atggccaaaccaggacatatactaa

SEQ ID NO: 2263168 - DNA, 25 bp, Homo sapien
tggccaaaccaggacatatactaaa

SEQ ID NO: 2263169 - DNA, 25 bp, Homo sapien
gccaaaccaggacatatactaaaaa

SEQ ID NO: 2263170 - DNA, 25 bp, Homo sapien
ggccaaaccaggacatatactaaaa

SEQ ID NO: 2263171 - DNA, 25 bp, Homo sapien
tgagccctaacatcccagctaccat

SEQ ID NO: 2263172 - DNA, 25 bp, Homo sapien
ctgagccctaacatcccagctacca

SEQ ID NO: 2263173 - DNA, 25 bp, Homo sapien
acatgtcacatcaaagcaggaactg

SEQ ID NO: 2263174 - DNA, 25 bp, Homo sapien
gacaaagtactaggctatttcccag

SEQ ID NO: 2263175 - DNA, 25 bp, Homo sapien
gagctgcacgacctttttcccaggg

SEQ ID NO: 2263176 - DNA, 25 bp, Homo sapien
tactggcacgtaacacacagtgcta

SEQ ID NO: 2263177 - DNA, 25 bp, Homo sapien
gcttacctagctagaaacaaaggat

SEQ ID NO: 2263178 - DNA, 25 bp, Homo sapien
ccttccatcgcagcggtgataatgc

SEQ ID NO: 2263179 - DNA, 25 bp, Homo sapien
tggaaagggctggtatggaggcacc

SEQ ID NO: 2263180 - DNA, 25 bp, Homo sapien
gaggcaccgaggacaaggtccttcc

SEQ ID NO: 2263181 - DNA, 25 bp, Homo sapien
ggcttgccgggacagcagtagtttc

SEQ ID NO: 2263182 - DNA, 25 bp, Homo sapien
gaaaaaaagattgcgtctgccagcc

SEQ ID NO: 2263183 - DNA, 25 bp, Homo sapien
aaaagattgcgtctgccagccacgc

SEQ ID NO: 2263184 - DNA, 25 bp, Homo sapien
agaaaaaaagattgcgtctgccagc

SEQ ID NO: 2263185 - DNA, 25 bp, Homo sapien
aaaaaagattgcgtctgccagccac

SEQ ID NO: 2263186 - DNA, 25 bp, Homo sapien
tactagactagattgcacagaggca

SEQ ID NO: 2263187 - DNA, 25 bp, Homo sapien
gcaggcacgggaaacgactctggtt

SEQ ID NO: 2263188 - DNA, 25 bp, Homo sapien
gtatgataaacagctaaccggaggg

SEQ ID NO: 2263189 - DNA, 25 bp, Homo sapien
cggagttcggctgactgcatgacac

SEQ ID NO: 2263190 - DNA, 25 bp, Homo sapien
ccctgaattcgatcctgttatctca

SEQ ID NO: 2263191 - DNA, 25 bp, Homo sapien
acccctgaattcgatcctgttatct

SEQ ID NO: 2263192 - DNA, 25 bp, Homo sapien
caacccctgaattcgatcctgttat

SEQ ID NO: 2263193 - DNA, 25 bp, Homo sapien
aacccctgaattcgatcctgttatc

SEQ ID NO: 2263194 - DNA, 25 bp, Homo sapien
cagcagagacacaacgtgtgaaagg

SEQ ID NO: 2263195 - DNA, 25 bp, Homo sapien
cgtgtgaaaggctcggcagagccca

SEQ ID NO: 2263196 - DNA, 25 bp, Homo sapien
agtctggggtactgatcccgcacag

SEQ ID NO: 2263197 - DNA, 25 bp, Homo sapien
gtactgatcccgcacagcagagaca

SEQ ID NO: 2263198 - DNA, 25 bp, Homo sapien
gcaatgtcataaacggtctcccctg

SEQ ID NO: 2263199 - DNA, 25 bp, Homo sapien
ttatgtaactggaagatcgccggcg

SEQ ID NO: 2263200 - DNA, 25 bp, Homo sapien
gaacttgccccatctggtaccggtg

SEQ ID NO: 2263201 - DNA, 25 bp, Homo sapien
tgagagcccgttacctactatgtcc

SEQ ID NO: 2263202 - DNA, 25 bp, Homo sapien
ccgcgagcacgggtgacgggccgag

SEQ ID NO: 2263203 - DNA, 25 bp, Homo sapien
cagccgtgtcgtccgaccccgcggg

SEQ ID NO: 2263204 - DNA, 25 bp, Homo sapien
ggggagagtcgccaccggcggcggc

SEQ ID NO: 2263205 - DNA, 25 bp, Homo sapien
gagggacgccatccgccagccgtgt

SEQ ID NO: 2263206 - DNA, 25 bp, Homo sapien
ctcctcctcctccgctcggcgcggc

SEQ ID NO: 2263207 - DNA, 25 bp, Homo sapien
tcctcctccgctcggcgcggcggcg

SEQ ID NO: 2263208 - DNA, 25 bp, Homo sapien
tcctcctcctccgctcggcgcggcg

SEQ ID NO: 2263209 - DNA, 25 bp, Homo sapien
cctcctcctccgctcggcgcggcgg

SEQ ID NO: 2263210 - DNA, 25 bp, Homo sapien
acagccctctctccgagaggaggga

SEQ ID NO: 2263211 - DNA, 25 bp, Homo sapien
cggacggcttttaccacagccctct

SEQ ID NO: 2263212 - DNA, 25 bp, Homo sapien
ttaccacagccctctctccgagagg

SEQ ID NO: 2263213 - DNA, 25 bp, Homo sapien
gcttttaccacagccctctctccga

SEQ ID NO: 2263214 - DNA, 25 bp, Homo sapien
cgcacggccgacgtcgcgccccgcc

SEQ ID NO: 2263215 - DNA, 25 bp, Homo sapien
cacggccgacgtcgcgccccgccct

SEQ ID NO: 2263216 - DNA, 25 bp, Homo sapien
cccgcacggccgacgtcgcgccccg

SEQ ID NO: 2263217 - DNA, 25 bp, Homo sapien
ccgcacggccgacgtcgcgccccgc

SEQ ID NO: 2263218 - DNA, 25 bp, Homo sapien
acaagacagctgtccccgggataat

SEQ ID NO: 2263219 - DNA, 25 bp, Homo sapien
cccgggataatggactcttgggaag

SEQ ID NO: 2263220 - DNA, 25 bp, Homo sapien
tggtcatgcgggtctgagtcttgta

SEQ ID NO: 2263221 - DNA, 25 bp, Homo sapien
ggcacccgagacatctcaatcatgg

SEQ ID NO: 2263222 - DNA, 25 bp, Homo sapien
atcaaagaccctcagtccgggcaca

SEQ ID NO: 2263223 - DNA, 25 bp, Homo sapien
gggttcctgagctgaccaactctgt

SEQ ID NO: 2263224 - DNA, 25 bp, Homo sapien
ctctgtagggacaccgtgaaactct

SEQ ID NO: 2263225 - DNA, 25 bp, Homo sapien
cctcagtccgggcacagtcacaggg

SEQ ID NO: 2263226 - DNA, 25 bp, Homo sapien
gatggaacacctctcactggatgag

SEQ ID NO: 2263227 - DNA, 25 bp, Homo sapien
tgttttgactactaggatgtggcag

SEQ ID NO: 2263228 - DNA, 25 bp, Homo sapien
tccccttctctggaatcagagctgg

SEQ ID NO: 2263229 - DNA, 25 bp, Homo sapien
atagcattacttggcactccgccca

SEQ ID NO: 2263230 - DNA, 25 bp, Homo sapien
aaaaagcgttgcacagggcccgagg

SEQ ID NO: 2263231 - DNA, 25 bp, Homo sapien
gggcttcgcagaggcgttcagctca

SEQ ID NO: 2263232 - DNA, 25 bp, Homo sapien
aagcgttgcacagggcccgaggcag

SEQ ID NO: 2263233 - DNA, 25 bp, Homo sapien
cggaaaaagcgttgcacagggcccg

SEQ ID NO: 2263234 - DNA, 25 bp, Homo sapien
agccgtttccgaagccgcagccttg

SEQ ID NO: 2263235 - DNA, 25 bp, Homo sapien
tttgcccagccgtttccgaagccgc

SEQ ID NO: 2263236 - DNA, 25 bp, Homo sapien
tgcccagccgtttccgaagccgcag

SEQ ID NO: 2263237 - DNA, 25 bp, Homo sapien
tccgaagccgcagccttgctccgga

SEQ ID NO: 2263238 - DNA, 25 bp, Homo sapien
gggctggcacacgtgtggcccaggg

SEQ ID NO: 2263239 - DNA, 25 bp, Homo sapien
cagggcattggtgggattgcactga

SEQ ID NO: 2263240 - DNA, 25 bp, Homo sapien
gggattgcactgagctgggtcatta

SEQ ID NO: 2263241 - DNA, 25 bp, Homo sapien
tcatccacagaacagggacagtgac

SEQ ID NO: 2263242 - DNA, 25 bp, Homo sapien
gtgaccattccatcttgccaaggag

SEQ ID NO: 2263243 - DNA, 25 bp, Homo sapien
cagaacagggacagtgaccattcca

SEQ ID NO: 2263244 - DNA, 25 bp, Homo sapien
ttgccaaggagtgcggggcacacac

SEQ ID NO: 2263245 - DNA, 25 bp, Homo sapien
catctgctggaggcccagagtcctt

SEQ ID NO: 2263246 - DNA, 25 bp, Homo sapien
cataatcggcaagcaagagctgtgg

SEQ ID NO: 2263247 - DNA, 25 bp, Homo sapien
tcaccaggctggtggttacataatc

SEQ ID NO: 2263248 - DNA, 25 bp, Homo sapien
cttggagtacagtctacacctggag

SEQ ID NO: 2263249 - DNA, 25 bp, Homo sapien
ggctcttgaaggtctccgtgatctc

SEQ ID NO: 2263250 - DNA, 25 bp, Homo sapien
ggcgcggactcaggaacttgaacaa

SEQ ID NO: 2263251 - DNA, 25 bp, Homo sapien
ccagttgggtgacttgctgtagcat

SEQ ID NO: 2263252 - DNA, 25 bp, Homo sapien
tgcacaggcgtgagctgatcagtga

SEQ ID NO: 2263253 - DNA, 25 bp, Homo sapien
gattgtgtttgaggttgtaaatctc

SEQ ID NO: 2263254 - DNA, 25 bp, Homo sapien
tctctcttcgctgcaggccagattg

SEQ ID NO: 2263255 - DNA, 25 bp, Homo sapien
cataggatagataggccattctctc

SEQ ID NO: 2263256 - DNA, 25 bp, Homo sapien
tgcaggcgaccattcacctgttctt

SEQ ID NO: 2263257 - DNA, 25 bp, Homo sapien
accgcttacgtagaagagagaaggc

SEQ ID NO: 2263258 - DNA, 25 bp, Homo sapien
gtgatggaacccatagactggcagg

SEQ ID NO: 2263259 - DNA, 25 bp, Homo sapien
ggcaccagagcgtgatggaacccat

SEQ ID NO: 2263260 - DNA, 25 bp, Homo sapien
ggctctggcaccaccgcttacgtag

SEQ ID NO: 2263261 - DNA, 25 bp, Homo sapien
gacagaaaccggaacagtggccaat

SEQ ID NO: 2263262 - DNA, 25 bp, Homo sapien
aacaattccacggagcgaaagccgc

SEQ ID NO: 2263263 - DNA, 25 bp, Homo sapien
cacagcttgggtggatctcaaaaca

SEQ ID NO: 2263264 - DNA, 25 bp, Homo sapien
ccaattatgggagacgggcattcac

SEQ ID NO: 2263265 - DNA, 25 bp, Homo sapien
gggctctgaaagcagggccttctca

SEQ ID NO: 2263266 - DNA, 25 bp, Homo sapien
gctgtaagctctggaagcgactctc

SEQ ID NO: 2263267 - DNA, 25 bp, Homo sapien
gcgactctccaagatgaagggcctg

SEQ ID NO: 2263268 - DNA, 25 bp, Homo sapien
cctttaggctgtgataggactcctg

SEQ ID NO: 2263269 - DNA, 25 bp, Homo sapien
gataccagcttgaggtagctcacag

SEQ ID NO: 2263270 - DNA, 25 bp, Homo sapien
ggcgcgctggttcaccttctcaaag

SEQ ID NO: 2263271 - DNA, 25 bp, Homo sapien
tagaggatgcggtgcctgacactat

SEQ ID NO: 2263272 - DNA, 25 bp, Homo sapien
cctggtgccggtctgctttggatac

SEQ ID NO: 2263273 - DNA, 25 bp, Homo sapien
tggaagggccactggggccgtcttc

SEQ ID NO: 2263274 - DNA, 25 bp, Homo sapien
ctggaagggccactggggccgtctt

SEQ ID NO: 2263275 - DNA, 25 bp, Homo sapien
gacagggaccggcatgaaggcacat

SEQ ID NO: 2263276 - DNA, 25 bp, Homo sapien
ggatgacagggaccggcatgaaggc

SEQ ID NO: 2263277 - DNA, 25 bp, Homo sapien
cagggaccggcatgaaggcacattg

SEQ ID NO: 2263278 - DNA, 25 bp, Homo sapien
cattggaggggagggttgcgctggg

SEQ ID NO: 2263279 - DNA, 25 bp, Homo sapien
tgtgcattcaagatgggcccgacac

SEQ ID NO: 2263280 - DNA, 25 bp, Homo sapien
agatttgtgcattcaagatgggccc

SEQ ID NO: 2263281 - DNA, 25 bp, Homo sapien
tgcattcaagatgggcccgacacag

SEQ ID NO: 2263282 - DNA, 25 bp, Homo sapien
tttgtgcattcaagatgggcccgac

SEQ ID NO: 2263283 - DNA, 25 bp, Homo sapien
ggacagctatgaggacagcacccag

SEQ ID NO: 2263284 - DNA, 25 bp, Homo sapien
agggctttccatagccatggcccag

SEQ ID NO: 2263285 - DNA, 25 bp, Homo sapien
gccgtcggggacagggctttccata

SEQ ID NO: 2263286 - DNA, 25 bp, Homo sapien
ggccgccatccgcaggacagctatg

SEQ ID NO: 2263287 - DNA, 25 bp, Homo sapien
tttccattcggagccgtcctgggag

SEQ ID NO: 2263288 - DNA, 25 bp, Homo sapien
gttgcccaatccgaaagttttgcac

SEQ ID NO: 2263289 - DNA, 25 bp, Homo sapien
cagcccgagtcctgccattgggagt

SEQ ID NO: 2263290 - DNA, 25 bp, Homo sapien
gttttgcacgcaggccctcaaagaa

SEQ ID NO: 2263291 - DNA, 25 bp, Homo sapien
tcaccaggctggtggttacataatc

SEQ ID NO: 2263292 - DNA, 25 bp, Homo sapien
catctgctggaggcccagagtcctt

SEQ ID NO: 2263293 - DNA, 25 bp, Homo sapien
cataatcggcaagcaagagctgtgg

SEQ ID NO: 2263294 - DNA, 25 bp, Homo sapien
cttggagtacagtctacacctggag

SEQ ID NO: 2263295 - DNA, 25 bp, Homo sapien
ggcgcggactcaggaacttgaacaa

SEQ ID NO: 2263296 - DNA, 25 bp, Homo sapien
ggctcttgaaggtctccgtgatctc

SEQ ID NO: 2263297 - DNA, 25 bp, Homo sapien
ccagttgggtgacttgctgtagcat

SEQ ID NO: 2263298 - DNA, 25 bp, Homo sapien
tgcacaggcgtgagctgatcagtga

SEQ ID NO: 2263299 - DNA, 25 bp, Homo sapien
gattgtgtttgaggttgtaaatctc

SEQ ID NO: 2263300 - DNA, 25 bp, Homo sapien
tctctcttcgctgcaggccagattg

SEQ ID NO: 2263301 - DNA, 25 bp, Homo sapien
cataggatagataggccattctctc

SEQ ID NO: 2263302 - DNA, 25 bp, Homo sapien
tgcaggcgaccattcacctgttctt

SEQ ID NO: 2263303 - DNA, 25 bp, Homo sapien
accgcttacgtagaagagagaaggc

SEQ ID NO: 2263304 - DNA, 25 bp, Homo sapien
ggcaccagagcgtgatggaacccat

SEQ ID NO: 2263305 - DNA, 25 bp, Homo sapien
ggctctggcaccaccgcttacgtag

SEQ ID NO: 2263306 - DNA, 25 bp, Homo sapien
gtgatggaacccatagactggcagg

SEQ ID NO: 2263307 - DNA, 25 bp, Homo sapien
aacaattccacggagcgaaagccgc

SEQ ID NO: 2263308 - DNA, 25 bp, Homo sapien
cacagcttgggtggatctcaaaaca

SEQ ID NO: 2263309 - DNA, 25 bp, Homo sapien
gacagaaaccggaacagtggccaat

SEQ ID NO: 2263310 - DNA, 25 bp, Homo sapien
ccaattatgggagacgggcattcac

SEQ ID NO: 2263311 - DNA, 25 bp, Homo sapien
gggctctgaaagcagggccttctca

SEQ ID NO: 2263312 - DNA, 25 bp, Homo sapien
gcgactctccaagatgaagggcctg

SEQ ID NO: 2263313 - DNA, 25 bp, Homo sapien
gctgtaagctctggaagcgactctc

SEQ ID NO: 2263314 - DNA, 25 bp, Homo sapien
cctttaggctgtgataggactcctg

SEQ ID NO: 2263315 - DNA, 25 bp, Homo sapien
gataccagcttgaggtagctcacag

SEQ ID NO: 2263316 - DNA, 25 bp, Homo sapien
ggcgcgctggttcaccttctcaaag

SEQ ID NO: 2263317 - DNA, 25 bp, Homo sapien
tagaggatgcggtgcctgacactat

SEQ ID NO: 2263318 - DNA, 25 bp, Homo sapien
cctggtgccggtctgctttggatac

SEQ ID NO: 2263319 - DNA, 25 bp, Homo sapien
ctggaagggccactggggccgtctt

SEQ ID NO: 2263320 - DNA, 25 bp, Homo sapien
tggaagggccactggggccgtcttc

SEQ ID NO: 2263321 - DNA, 25 bp, Homo sapien
cagggaccggcatgaaggcacattg

SEQ ID NO: 2263322 - DNA, 25 bp, Homo sapien
cattggaggggagggttgcgctggg

SEQ ID NO: 2263323 - DNA, 25 bp, Homo sapien
gacagggaccggcatgaaggcacat

SEQ ID NO: 2263324 - DNA, 25 bp, Homo sapien
ggatgacagggaccggcatgaaggc

SEQ ID NO: 2263325 - DNA, 25 bp, Homo sapien
tttgtgcattcaagatgggcccgac

SEQ ID NO: 2263326 - DNA, 25 bp, Homo sapien
tgtgcattcaagatgggcccgacac

SEQ ID NO: 2263327 - DNA, 25 bp, Homo sapien
agatttgtgcattcaagatgggccc

SEQ ID NO: 2263328 - DNA, 25 bp, Homo sapien
tgcattcaagatgggcccgacacag

SEQ ID NO: 2263329 - DNA, 25 bp, Homo sapien
agggctttccatagccatggcccag

SEQ ID NO: 2263330 - DNA, 25 bp, Homo sapien
gccgtcggggacagggctttccata

SEQ ID NO: 2263331 - DNA, 25 bp, Homo sapien
ggccgccatccgcaggacagctatg

SEQ ID NO: 2263332 - DNA, 25 bp, Homo sapien
ggacagctatgaggacagcacccag

SEQ ID NO: 2263333 - DNA, 25 bp, Homo sapien
tttccattcggagccgtcctgggag

SEQ ID NO: 2263334 - DNA, 25 bp, Homo sapien
cagcccgagtcctgccattgggagt

SEQ ID NO: 2263335 - DNA, 25 bp, Homo sapien
gttttgcacgcaggccctcaaagaa

SEQ ID NO: 2263336 - DNA, 25 bp, Homo sapien
gttgcccaatccgaaagttttgcac

SEQ ID NO: 2263337 - DNA, 25 bp, Homo sapien
tgaggcaggtgggcgtctatatcca

SEQ ID NO: 2263338 - DNA, 25 bp, Homo sapien
ggtgggcgtctatatccatttcacc

SEQ ID NO: 2263339 - DNA, 25 bp, Homo sapien
caggtgggcgtctatatccatttca

SEQ ID NO: 2263340 - DNA, 25 bp, Homo sapien
aggcaggtgggcgtctatatccatt

SEQ ID NO: 2263341 - DNA, 25 bp, Homo sapien
cccagagtccttggagtacagtcta

SEQ ID NO: 2263342 - DNA, 25 bp, Homo sapien
catctgctggaggcccagagtcctt

SEQ ID NO: 2263343 - DNA, 25 bp, Homo sapien
cttggagtacagtctacacctggag

SEQ ID NO: 2263344 - DNA, 25 bp, Homo sapien
gagtccttggagtacagtctacacc

SEQ ID NO: 2263345 - DNA, 25 bp, Homo sapien
ggctcttgaaggtctccgtgatctc

SEQ ID NO: 2263346 - DNA, 25 bp, Homo sapien
ggcgcggactcaggaacttgaacaa

SEQ ID NO: 2263347 - DNA, 25 bp, Homo sapien
ccagttgggtgacttgctgtagcat

SEQ ID NO: 2263348 - DNA, 25 bp, Homo sapien
tgcacaggcgtgagctgatcagtga

SEQ ID NO: 2263349 - DNA, 25 bp, Homo sapien
gattgtgtttgaggttgtaaatctc

SEQ ID NO: 2263350 - DNA, 25 bp, Homo sapien
tctctcttcgctgcaggccagattg

SEQ ID NO: 2263351 - DNA, 25 bp, Homo sapien
cataggatagataggccattctctc

SEQ ID NO: 2263352 - DNA, 25 bp, Homo sapien
tgcaggcgaccattcacctgttctt

SEQ ID NO: 2263353 - DNA, 25 bp, Homo sapien
accgcttacgtagaagagagaaggc

SEQ ID NO: 2263354 - DNA, 25 bp, Homo sapien
gtgatggaacccatagactggcagg

SEQ ID NO: 2263355 - DNA, 25 bp, Homo sapien
ggcaccagagcgtgatggaacccat

SEQ ID NO: 2263356 - DNA, 25 bp, Homo sapien
ggctctggcaccaccgcttacgtag

SEQ ID NO: 2263357 - DNA, 25 bp, Homo sapien
aacaattccacggagcgaaagccgc

SEQ ID NO: 2263358 - DNA, 25 bp, Homo sapien
gacagaaaccggaacagtggccaat

SEQ ID NO: 2263359 - DNA, 25 bp, Homo sapien
cacagcttgggtggatctcaaaaca

SEQ ID NO: 2263360 - DNA, 25 bp, Homo sapien
ccaattatgggagacgggcattcac

SEQ ID NO: 2263361 - DNA, 25 bp, Homo sapien
gggctctgaaagcagggccttctca

SEQ ID NO: 2263362 - DNA, 25 bp, Homo sapien
gctgtaagctctggaagcgactctc

SEQ ID NO: 2263363 - DNA, 25 bp, Homo sapien
gcgactctccaagatgaagggcctg

SEQ ID NO: 2263364 - DNA, 25 bp, Homo sapien
cctttaggctgtgataggactcctg

SEQ ID NO: 2263365 - DNA, 25 bp, Homo sapien
ggcgcgctggttcaccttctcaaag

SEQ ID NO: 2263366 - DNA, 25 bp, Homo sapien
cacctggtgccggtctgctttggat

SEQ ID NO: 2263367 - DNA, 25 bp, Homo sapien
tagaggatgcggtgcctgacactat

SEQ ID NO: 2263368 - DNA, 25 bp, Homo sapien
gataccagcttgaggtagctcacag

SEQ ID NO: 2263369 - DNA, 25 bp, Homo sapien
ctgtaagttgtgggctaggcctcca

SEQ ID NO: 2263370 - DNA, 25 bp, Homo sapien
tgtaagttgtgggctaggcctccat

SEQ ID NO: 2263371 - DNA, 25 bp, Homo sapien
ctggaagggccactggggccgtctt

SEQ ID NO: 2263372 - DNA, 25 bp, Homo sapien
tggaagggccactggggccgtcttc

SEQ ID NO: 2263373 - DNA, 25 bp, Homo sapien
ggatgacagggaccggcatgaaggc

SEQ ID NO: 2263374 - DNA, 25 bp, Homo sapien
cagggaccggcatgaaggcacattg

SEQ ID NO: 2263375 - DNA, 25 bp, Homo sapien
cattggaggggagggttgcgctggg

SEQ ID NO: 2263376 - DNA, 25 bp, Homo sapien
gacagggaccggcatgaaggcacat

SEQ ID NO: 2263377 - DNA, 25 bp, Homo sapien
tgtgcattcaagatgggcccgacac

SEQ ID NO: 2263378 - DNA, 25 bp, Homo sapien
agatttgtgcattcaagatgggccc

SEQ ID NO: 2263379 - DNA, 25 bp, Homo sapien
tgcattcaagatgggcccgacacag

SEQ ID NO: 2263380 - DNA, 25 bp, Homo sapien
tttgtgcattcaagatgggcccgac

SEQ ID NO: 2263381 - DNA, 25 bp, Homo sapien
tgactgatatcttcgatacactgag

SEQ ID NO: 2263382 - DNA, 25 bp, Homo sapien
cttctcaatagcatcaatgcaatcc

SEQ ID NO: 2263383 - DNA, 25 bp, Homo sapien
tatcttcgatacactgagagaataa

SEQ ID NO: 2263384 - DNA, 25 bp, Homo sapien
ctgatatcttcgatacactgagaga

SEQ ID NO: 2263385 - DNA, 25 bp, Homo sapien
ctctgagaccgacatgggggctagt

SEQ ID NO: 2263386 - DNA, 25 bp, Homo sapien
gacatgggggctagtgctggcacca

SEQ ID NO: 2263387 - DNA, 25 bp, Homo sapien
ccgacatgggggctagtgctggcac

SEQ ID NO: 2263388 - DNA, 25 bp, Homo sapien
aaggttctctgagaccgacatgggg

SEQ ID NO: 2263389 - DNA, 25 bp, Homo sapien
tcacaggctggcaatgggctaactc

SEQ ID NO: 2263390 - DNA, 25 bp, Homo sapien
cagggttcattcgagtcagtcacgt

SEQ ID NO: 2263391 - DNA, 25 bp, Homo sapien
gctggcaatgggctaactcctcctc

SEQ ID NO: 2263392 - DNA, 25 bp, Homo sapien
tcgagtcagtcacgtcacaggctgg

SEQ ID NO: 2263393 - DNA, 25 bp, Homo sapien
gagtgggtcttcagactccaaaggg

SEQ ID NO: 2263394 - DNA, 25 bp, Homo sapien
gactaatggcggatgctgaggcgag

SEQ ID NO: 2263395 - DNA, 25 bp, Homo sapien
gccattcgctcttcagacgccggag

SEQ ID NO: 2263396 - DNA, 25 bp, Homo sapien
ctgaggcgagggctgagttcccgga

SEQ ID NO: 2263397 - DNA, 25 bp, Homo sapien
aatccattccatcagggccacatgc

SEQ ID NO: 2263398 - DNA, 25 bp, Homo sapien
cgagctccgggtaagttctcctcat

SEQ ID NO: 2263399 - DNA, 25 bp, Homo sapien
tgttgcaagatatggccagccgctt

SEQ ID NO: 2263400 - DNA, 25 bp, Homo sapien
caccttgcaggtgttgcaagatatg

SEQ ID NO: 2263401 - DNA, 25 bp, Homo sapien
gcagggccacgggcccggtggcttc

SEQ ID NO: 2263402 - DNA, 25 bp, Homo sapien
agggccacgggcccggtggcttcag

SEQ ID NO: 2263403 - DNA, 25 bp, Homo sapien
cagggccacgggcccggtggcttca

SEQ ID NO: 2263404 - DNA, 25 bp, Homo sapien
ggccacgggcccggtggcttcaggc

SEQ ID NO: 2263405 - DNA, 25 bp, Homo sapien
gcagggactcgggaaccatgtgtcc

SEQ ID NO: 2263406 - DNA, 25 bp, Homo sapien
catcttattgctctgattacttccc

SEQ ID NO: 2263407 - DNA, 25 bp, Homo sapien
taagaacctggtaatgaatactccc

SEQ ID NO: 2263408 - DNA, 25 bp, Homo sapien
catgtgtcccaaaacctggcttgaa

SEQ ID NO: 2263409 - DNA, 25 bp, Homo sapien
gaggttctaccacttcacgaggcct

SEQ ID NO: 2263410 - DNA, 25 bp, Homo sapien
gcagccgggagaggttctaccactt

SEQ ID NO: 2263411 - DNA, 25 bp, Homo sapien
gtgggcactcgccttcacccttgga

SEQ ID NO: 2263412 - DNA, 25 bp, Homo sapien
gggagaggttctaccacttcacgag

SEQ ID NO: 2263413 - DNA, 25 bp, Homo sapien
gctgaaagtgcaaaagggatactga

SEQ ID NO: 2263414 - DNA, 25 bp, Homo sapien
aaaataaagatgttggggtgaccag

SEQ ID NO: 2263415 - DNA, 25 bp, Homo sapien
aggaagaagctacaacccccagagc

SEQ ID NO: 2263416 - DNA, 25 bp, Homo sapien
tactgaagtaacagagttggtgaag

SEQ ID NO: 2263417 - DNA, 25 bp, Homo sapien
gtgacgtgtcccctctatggaaggt

SEQ ID NO: 2263418 - DNA, 25 bp, Homo sapien
cgtgtcccctctatggaaggtaggt

SEQ ID NO: 2263419 - DNA, 25 bp, Homo sapien
cctctatggaaggtaggttgtctct

SEQ ID NO: 2263420 - DNA, 25 bp, Homo sapien
aatcctggggtgacgtgtcccctct

SEQ ID NO: 2263421 - DNA, 25 bp, Homo sapien
gagctgaggggttccgttcggcaca

SEQ ID NO: 2263422 - DNA, 25 bp, Homo sapien
ctgaggggttccgttcggcacactc

SEQ ID NO: 2263423 - DNA, 25 bp, Homo sapien
agctgaggggttccgttcggcacac

SEQ ID NO: 2263424 - DNA, 25 bp, Homo sapien
gaggggttccgttcggcacactcac

SEQ ID NO: 2263425 - DNA, 25 bp, Homo sapien
caggtatgcttgaaatgacacaact

SEQ ID NO: 2263426 - DNA, 25 bp, Homo sapien
acaagttgtatcattgctcctttcc

SEQ ID NO: 2263427 - DNA, 25 bp, Homo sapien
gacacaactacaagttgtatcattg

SEQ ID NO: 2263428 - DNA, 25 bp, Homo sapien
tgcttgaaatgacacaactacaagt

SEQ ID NO: 2263429 - DNA, 25 bp, Homo sapien
ctggaccaggacgatggccccaccc

SEQ ID NO: 2263430 - DNA, 25 bp, Homo sapien
gaccaggacgatggccccacccagg

SEQ ID NO: 2263431 - DNA, 25 bp, Homo sapien
tggaccaggacgatggccccaccca

SEQ ID NO: 2263432 - DNA, 25 bp, Homo sapien
ggaccaggacgatggccccacccag

SEQ ID NO: 2263433 - DNA, 25 bp, Homo sapien
gagcaattctcccttctcgctaagg

SEQ ID NO: 2263434 - DNA, 25 bp, Homo sapien
taaggccacattccgtgccatggcc

SEQ ID NO: 2263435 - DNA, 25 bp, Homo sapien
tgataacctcagcaagagcaattct

SEQ ID NO: 2263436 - DNA, 25 bp, Homo sapien
catggccttcgtggcatggtttgtg

SEQ ID NO: 2263437 - DNA, 25 bp, Homo sapien
aatgtgttgcatccaagctctgaaa

SEQ ID NO: 2263438 - DNA, 25 bp, Homo sapien
catcactcagggtgggaatgatcaa

SEQ ID NO: 2263439 - DNA, 25 bp, Homo sapien
gttgcatcactcagggtgggaatga

SEQ ID NO: 2263440 - DNA, 25 bp, Homo sapien
ggaatgatcaaatgtgttgcatcca

SEQ ID NO: 2263441 - DNA, 25 bp, Homo sapien
gaaaccctgttgaatgacggaagca

SEQ ID NO: 2263442 - DNA, 25 bp, Homo sapien
gaatgcagcacagggacagttacgg

SEQ ID NO: 2263443 - DNA, 25 bp, Homo sapien
tacggtgggcaaaaccatacacaca

SEQ ID NO: 2263444 - DNA, 25 bp, Homo sapien
gagtcaactgtacgtctccagggcc

SEQ ID NO: 2263445 - DNA, 25 bp, Homo sapien
ttccgtggccatgagcgggaagaac

SEQ ID NO: 2263446 - DNA, 25 bp, Homo sapien
agcgtggaccgttccgtggccatga

SEQ ID NO: 2263447 - DNA, 25 bp, Homo sapien
ccgtggccatgagcgggaagaacca

SEQ ID NO: 2263448 - DNA, 25 bp, Homo sapien
tgcggctccgcgagcgtggaccgtt

SEQ ID NO: 2263449 - DNA, 25 bp, Homo sapien
gcaggtgccacgacctctggacgtt

SEQ ID NO: 2263450 - DNA, 25 bp, Homo sapien
gcactgttgcgtgtgcaccggcgac

SEQ ID NO: 2263451 - DNA, 25 bp, Homo sapien
tcgggaatggaacgcttagagaagc

SEQ ID NO: 2263452 - DNA, 25 bp, Homo sapien
ggaattccgtgcaatctgagcatgg

SEQ ID NO: 2263453 - DNA, 25 bp, Homo sapien
tctgcccaagtgaaagccgagaggt

SEQ ID NO: 2263454 - DNA, 25 bp, Homo sapien
gtgagcgcagcacggcacagggcag

SEQ ID NO: 2263455 - DNA, 25 bp, Homo sapien
gacaagcagcgccaccaaatggctc

SEQ ID NO: 2263456 - DNA, 25 bp, Homo sapien
aagaagacaagcagcgccaccaaat

SEQ ID NO: 2263457 - DNA, 25 bp, Homo sapien
gggatgtgctcgtccccccatttga

SEQ ID NO: 2263458 - DNA, 25 bp, Homo sapien
ccttgagcaggtaggacacgctgta

SEQ ID NO: 2263459 - DNA, 25 bp, Homo sapien
ggctgcccacgtgcttcaccaggat

SEQ ID NO: 2263460 - DNA, 25 bp, Homo sapien
accaggatctcctcgcagggggtcc

SEQ ID NO: 2263461 - DNA, 25 bp, Homo sapien
ccttggtcagagagtctacaaacac

SEQ ID NO: 2263462 - DNA, 25 bp, Homo sapien
tgcagtctactgtgaagctgctctt

SEQ ID NO: 2263463 - DNA, 25 bp, Homo sapien
gctttgctgcagtctactgtgaagc

SEQ ID NO: 2263464 - DNA, 25 bp, Homo sapien
caaacactgatgatgtctcgtggag

SEQ ID NO: 2263465 - DNA, 25 bp, Homo sapien
tcaatggtcaccgacagggcaccag

SEQ ID NO: 2263466 - DNA, 25 bp, Homo sapien
agatgaggtagctgccaggtgccat

SEQ ID NO: 2263467 - DNA, 25 bp, Homo sapien
agctcccgcattgctcgtgttcacg

SEQ ID NO: 2263468 - DNA, 25 bp, Homo sapien
gggccgccgtacttgatggagatga

SEQ ID NO: 2263469 - DNA, 25 bp, Homo sapien
cgtgcagccgcaccgacagacttac

SEQ ID NO: 2263470 - DNA, 25 bp, Homo sapien
tgcctccctgtcctcggccacccag

SEQ ID NO: 2263471 - DNA, 25 bp, Homo sapien
ggcaagggcctagcagctgtgtgca

SEQ ID NO: 2263472 - DNA, 25 bp, Homo sapien
tcctgttgtcaccaagagcttggag

SEQ ID NO: 2263473 - DNA, 25 bp, Homo sapien
ctgtgacaccgccttccagacctgc

SEQ ID NO: 2263474 - DNA, 25 bp, Homo sapien
gacgtcaatcaggtaaacgccattc

SEQ ID NO: 2263475 - DNA, 25 bp, Homo sapien
tgctccgtaagcagacaccaagcct

SEQ ID NO: 2263476 - DNA, 25 bp, Homo sapien
gggtgccgttgaacttgacgtcaat

SEQ ID NO: 2263477 - DNA, 25 bp, Homo sapien
agcagggagtcatgctgtgggcctg

SEQ ID NO: 2263478 - DNA, 25 bp, Homo sapien
ccctcctcaaaccagcagatggtgt

SEQ ID NO: 2263479 - DNA, 25 bp, Homo sapien
ctgaggagcagggagtcatgctgtg

SEQ ID NO: 2263480 - DNA, 25 bp, Homo sapien
gggcccctcctcaaaccagcagatg

SEQ ID NO: 2263481 - DNA, 25 bp, Homo sapien
tcctgagggccgaaggtttagacac

SEQ ID NO: 2263482 - DNA, 25 bp, Homo sapien
tcagagacgggcaggaacttgcttc

SEQ ID NO: 2263483 - DNA, 25 bp, Homo sapien
tgtgcacaagtaccatggccgtggc

SEQ ID NO: 2263484 - DNA, 25 bp, Homo sapien
cctaatagctgtgggtggcgagcca

SEQ ID NO: 2263485 - DNA, 25 bp, Homo sapien
cttggtcaatttctgtgacatagca

SEQ ID NO: 2263486 - DNA, 25 bp, Homo sapien
ggctggctggttgacctttagccct

SEQ ID NO: 2263487 - DNA, 25 bp, Homo sapien
tgtgcaccttggcatcgatcgcccc

SEQ ID NO: 2263488 - DNA, 25 bp, Homo sapien
tgtgacatagcactcctccagggct

SEQ ID NO: 2263489 - DNA, 25 bp, Homo sapien
caagaggcccgcgggtcgcacttac

SEQ ID NO: 2263490 - DNA, 25 bp, Homo sapien
cacagcagacatggttagatggggg

SEQ ID NO: 2263491 - DNA, 25 bp, Homo sapien
ccaggagcaagaggcccgcgggtcg

SEQ ID NO: 2263492 - DNA, 25 bp, Homo sapien
ggttagatgggggtgcttgagccag

SEQ ID NO: 2263493 - DNA, 25 bp, Homo sapien
ccatctggcgtccaacttggtttaa

SEQ ID NO: 2263494 - DNA, 25 bp, Homo sapien
cttggtttaaagagggagagccact

SEQ ID NO: 2263495 - DNA, 25 bp, Homo sapien
actctgccgtcgcacacacccaggt

SEQ ID NO: 2263496 - DNA, 25 bp, Homo sapien
taaagagggagagccactgatttgc

SEQ ID NO: 2263497 - DNA, 25 bp, Homo sapien
atttcctgccgaccccaagcgtggg

SEQ ID NO: 2263498 - DNA, 25 bp, Homo sapien
tgggcggtttctctcggtgcctcac

SEQ ID NO: 2263499 - DNA, 25 bp, Homo sapien
tgagacacgagaaaaactccacgtg

SEQ ID NO: 2263500 - DNA, 25 bp, Homo sapien
ccacgtggtgggcaggatatttcct

SEQ ID NO: 2263501 - DNA, 25 bp, Homo sapien
gaaggctagaaacagtgaggcggcg

SEQ ID NO: 2263502 - DNA, 25 bp, Homo sapien
ggcgggcgtcgccagacggagaagc

SEQ ID NO: 2263503 - DNA, 25 bp, Homo sapien
ggcgtcgccagacggagaagccaca

SEQ ID NO: 2263504 - DNA, 25 bp, Homo sapien
aggcggcgggcgtcgccagacggag

SEQ ID NO: 2263505 - DNA, 25 bp, Homo sapien
gtgttcctcgttgaacttgactgag

SEQ ID NO: 2263506 - DNA, 25 bp, Homo sapien
gttgaacttgactgagacttcgtag

SEQ ID NO: 2263507 - DNA, 25 bp, Homo sapien
tgtcgggaatgtgttcctcgttgaa

SEQ ID NO: 2263508 - DNA, 25 bp, Homo sapien
ggaatgtgttcctcgttgaacttga

SEQ ID NO: 2263509 - DNA, 25 bp, Homo sapien
gccagccctgggtccaatacccaca

SEQ ID NO: 2263510 - DNA, 25 bp, Homo sapien
gacctcaaagtgaagagtgagtgcc

SEQ ID NO: 2263511 - DNA, 25 bp, Homo sapien
cgaacagcctgggtggccctgtgac

SEQ ID NO: 2263512 - DNA, 25 bp, Homo sapien
ctgggtccaatacccacactcaggc

SEQ ID NO: 2263513 - DNA, 25 bp, Homo sapien
tggaccacataagccacaccacagg

SEQ ID NO: 2263514 - DNA, 25 bp, Homo sapien
tccttgcggtcctcaaaagagatct

SEQ ID NO: 2263515 - DNA, 25 bp, Homo sapien
gcttcccgggtccagatactgaatt

SEQ ID NO: 2263516 - DNA, 25 bp, Homo sapien
gggccctcgacagcaatggccaggc

SEQ ID NO: 2263517 - DNA, 25 bp, Homo sapien
ggcatagccaaggtagacatgcctg

SEQ ID NO: 2263518 - DNA, 25 bp, Homo sapien
ctggccaacgcaggagagcgagcac

SEQ ID NO: 2263519 - DNA, 25 bp, Homo sapien
ccaacgcaggagagcgagcactcgg

SEQ ID NO: 2263520 - DNA, 25 bp, Homo sapien
cccctccaggcatagccaaggtaga

SEQ ID NO: 2263521 - DNA, 25 bp, Homo sapien
gatctcggcctcatgggtcttgccc

SEQ ID NO: 2263522 - DNA, 25 bp, Homo sapien
tcagcgggaacaaagcggatgcagt

SEQ ID NO: 2263523 - DNA, 25 bp, Homo sapien
tgtgtgtgcccatctcagcgggaac

SEQ ID NO: 2263524 - DNA, 25 bp, Homo sapien
tggcccttgtacttcacgctgactg

SEQ ID NO: 2263525 - DNA, 25 bp, Homo sapien
tggggatgggctagtgagcagcagc

SEQ ID NO: 2263526 - DNA, 25 bp, Homo sapien
tgggctccacccctcctcttggggc

SEQ ID NO: 2263527 - DNA, 25 bp, Homo sapien
tggggctgcttgagccccaggaccc

SEQ ID NO: 2263528 - DNA, 25 bp, Homo sapien
gcagggtggggatgggctagtgagc

SEQ ID NO: 2263529 - DNA, 25 bp, Homo sapien
cacaatgactaccaacgttggccac

SEQ ID NO: 2263530 - DNA, 25 bp, Homo sapien
caggctgaggtcacaatgactacca

SEQ ID NO: 2263531 - DNA, 25 bp, Homo sapien
ggtgatgctctctttcacccggccc

SEQ ID NO: 2263532 - DNA, 25 bp, Homo sapien
acgttggccactgaaggagcccgac

SEQ ID NO: 2263533 - DNA, 25 bp, Homo sapien
ctggtgtagtgaggggggctgccga

SEQ ID NO: 2263534 - DNA, 25 bp, Homo sapien
caggcacgtgctggtcggcaaactt

SEQ ID NO: 2263535 - DNA, 25 bp, Homo sapien
cggcaaacttgatgttgatgatgta

SEQ ID NO: 2263536 - DNA, 25 bp, Homo sapien
gcacgtgctggtcggcaaacttgat

SEQ ID NO: 2263537 - DNA, 25 bp, Homo sapien
tgctggtcggcaaacttgatgttga

SEQ ID NO: 2263538 - DNA, 25 bp, Homo sapien
gggcagtaggtgaccctgcacgtcc

SEQ ID NO: 2263539 - DNA, 25 bp, Homo sapien
cagtaggtgaccctgcacgtcccgt

SEQ ID NO: 2263540 - DNA, 25 bp, Homo sapien
ggtcctctgtgttgatgtccacctt

SEQ ID NO: 2263541 - DNA, 25 bp, Homo sapien
gggccctcaatggacaggctgagcc

SEQ ID NO: 2263542 - DNA, 25 bp, Homo sapien
gggatggatacccctgagcctcggt

SEQ ID NO: 2263543 - DNA, 25 bp, Homo sapien
ggggatggatacccctgagcctcgg

SEQ ID NO: 2263544 - DNA, 25 bp, Homo sapien
gctcaaaggtgtggccttcgtgaag

SEQ ID NO: 2263545 - DNA, 25 bp, Homo sapien
gactggcatccccaatttccgactg

SEQ ID NO: 2263546 - DNA, 25 bp, Homo sapien
tgcatcgcgggtatcaatgataaac

SEQ ID NO: 2263547 - DNA, 25 bp, Homo sapien
tttccgactggctgatcaccaccgg

SEQ ID NO: 2263548 - DNA, 25 bp, Homo sapien
gtggccattacgcagccgcttcagc

SEQ ID NO: 2263549 - DNA, 25 bp, Homo sapien
gagatccgtctctgagatgttgatg

SEQ ID NO: 2263550 - DNA, 25 bp, Homo sapien
agggcgggaccacagtggccgtcag

SEQ ID NO: 2263551 - DNA, 25 bp, Homo sapien
cagcagagccgacctttaggtggga

SEQ ID NO: 2263552 - DNA, 25 bp, Homo sapien
tgttcattgtacttgactagaatgc

SEQ ID NO: 2263553 - DNA, 25 bp, Homo sapien
ggctgcctgggacgtgctgttcatt

SEQ ID NO: 2263554 - DNA, 25 bp, Homo sapien
agaatgctgtagtcccccggcagca

SEQ ID NO: 2263555 - DNA, 25 bp, Homo sapien
ttctgctttggacgggccctcaatg

SEQ ID NO: 2263556 - DNA, 25 bp, Homo sapien
gggtgagcatgggaactatgctggg

SEQ ID NO: 2263557 - DNA, 25 bp, Homo sapien
agagagccgtgggtgagcatgggaa

SEQ ID NO: 2263558 - DNA, 25 bp, Homo sapien
ctggagagagccgtgggtgagcatg

SEQ ID NO: 2263559 - DNA, 25 bp, Homo sapien
ccgtgggtgagcatgggaactatgc

SEQ ID NO: 2263560 - DNA, 25 bp, Homo sapien
cacagttgacgtaatccacatagaa

SEQ ID NO: 2263561 - DNA, 25 bp, Homo sapien
gtgacatggccacagttgacgtaat

SEQ ID NO: 2263562 - DNA, 25 bp, Homo sapien
catggccacagttgacgtaatccac

SEQ ID NO: 2263563 - DNA, 25 bp, Homo sapien
tgaggccaggcccataggcagtgac

SEQ ID NO: 2263564 - DNA, 25 bp, Homo sapien
cttgtggaatggcagcctcgtgtgt

SEQ ID NO: 2263565 - DNA, 25 bp, Homo sapien
ccttgtggaatggcagcctcgtgtg

SEQ ID NO: 2263566 - DNA, 25 bp, Homo sapien
catagcggatgtccatctcgtgcag

SEQ ID NO: 2263567 - DNA, 25 bp, Homo sapien
tgtcagtgatggtgggctgcgccac

SEQ ID NO: 2263568 - DNA, 25 bp, Homo sapien
tcgctgggtgcataccgcacggtca

SEQ ID NO: 2263569 - DNA, 25 bp, Homo sapien
cggtgccgtctttgttgtcagtgat

SEQ ID NO: 2263570 - DNA, 25 bp, Homo sapien
gtgatctcgcccttcttgatggtga

SEQ ID NO: 2263571 - DNA, 25 bp, Homo sapien
tgtgatctcgcccttcttgatggtg

SEQ ID NO: 2263572 - DNA, 25 bp, Homo sapien
ctgtgatctcgcccttcttgatggt

SEQ ID NO: 2263573 - DNA, 25 bp, Homo sapien
tgatctcgcccttcttgatggtgaa

SEQ ID NO: 2263574 - DNA, 25 bp, Homo sapien
ctgctgagaccgtagagggggctgc

SEQ ID NO: 2263575 - DNA, 25 bp, Homo sapien
gcaccgagggctggtccccagccag

SEQ ID NO: 2263576 - DNA, 25 bp, Homo sapien
cgccctgggcgtaggtgtactgtgg

SEQ ID NO: 2263577 - DNA, 25 bp, Homo sapien
gccgccctgggcgtaggtgtactgt

SEQ ID NO: 2263578 - DNA, 25 bp, Homo sapien
gaagatgtcgaaagtgccgtcctca

SEQ ID NO: 2263579 - DNA, 25 bp, Homo sapien
caccaaagcgcacacagatgacgta

SEQ ID NO: 2263580 - DNA, 25 bp, Homo sapien
tgcacacggtgcacgtcactttgcc

SEQ ID NO: 2263581 - DNA, 25 bp, Homo sapien
gtctcctccccaatctgaatggtgg

SEQ ID NO: 2263582 - DNA, 25 bp, Homo sapien
gggcacacggctgcctgcgcccttc

SEQ ID NO: 2263583 - DNA, 25 bp, Homo sapien
ctgctgaacgccagcatctggctgg

SEQ ID NO: 2263584 - DNA, 25 bp, Homo sapien
acacggctgcctgcgcccttctggc

SEQ ID NO: 2263585 - DNA, 25 bp, Homo sapien
actgctgaacgccagcatctggctg

SEQ ID NO: 2263586 - DNA, 25 bp, Homo sapien
ttgccagagagcaacttcagcgccc

SEQ ID NO: 2263587 - DNA, 25 bp, Homo sapien
tcaagcttgccagagagcaacttca

SEQ ID NO: 2263588 - DNA, 25 bp, Homo sapien
cccgtggccgtcaagcttgccagag

SEQ ID NO: 2263589 - DNA, 25 bp, Homo sapien
ggccgtcaagcttgccagagagcaa

SEQ ID NO: 2263590 - DNA, 25 bp, Homo sapien
ggggaatgtctgaataacgtcactg

SEQ ID NO: 2263591 - DNA, 25 bp, Homo sapien
cacctcgcccaagtgccaggcctgt

SEQ ID NO: 2263592 - DNA, 25 bp, Homo sapien
ctgttggggaatgtctgaataacgt

SEQ ID NO: 2263593 - DNA, 25 bp, Homo sapien
cctcgcccaagtgccaggcctgtag

SEQ ID NO: 2263594 - DNA, 25 bp, Homo sapien
gacactggcgctactgcactaccag

SEQ ID NO: 2263595 - DNA, 25 bp, Homo sapien
gacgggccacagaatgcactttggg

SEQ ID NO: 2263596 - DNA, 25 bp, Homo sapien
atgctggccgcccaagcagtcgaca

SEQ ID NO: 2263597 - DNA, 25 bp, Homo sapien
caagcagtcgacactggcgctactg

SEQ ID NO: 2263598 - DNA, 25 bp, Homo sapien
gatggtgtagcgacctgtcacgtct

SEQ ID NO: 2263599 - DNA, 25 bp, Homo sapien
gggatctcgtcaccaccgtacttga

SEQ ID NO: 2263600 - DNA, 25 bp, Homo sapien
tgtcacgtctggcacgtaggccact

SEQ ID NO: 2263601 - DNA, 25 bp, Homo sapien
tatacgtgccgtcatggttgtcttg

SEQ ID NO: 2263602 - DNA, 25 bp, Homo sapien
tccccggcgtcctttgcatcgatgg

SEQ ID NO: 2263603 - DNA, 25 bp, Homo sapien
gcaggcacgccagtggtgttgagcc

SEQ ID NO: 2263604 - DNA, 25 bp, Homo sapien
gtcctttgcatcgatggtgaactcc

SEQ ID NO: 2263605 - DNA, 25 bp, Homo sapien
tggcatcatgagtaggcagcacctt

SEQ ID NO: 2263606 - DNA, 25 bp, Homo sapien
gcgttgtctaccacgtccactggct

SEQ ID NO: 2263607 - DNA, 25 bp, Homo sapien
ttctcggctgggcacataattgacg

SEQ ID NO: 2263608 - DNA, 25 bp, Homo sapien
cataattgacggtctgggtgccatc

SEQ ID NO: 2263609 - DNA, 25 bp, Homo sapien
acagtactgagatgctgtagggccc

SEQ ID NO: 2263610 - DNA, 25 bp, Homo sapien
agcatcagctagtctcctgggcctc

SEQ ID NO: 2263611 - DNA, 25 bp, Homo sapien
gcatcagctagtctcctgggcctcc

SEQ ID NO: 2263612 - DNA, 25 bp, Homo sapien
ctggctccaggcatgcaaacactca

SEQ ID NO: 2263613 - DNA, 25 bp, Homo sapien
tggctccaggcatgcaaacactcac

SEQ ID NO: 2263614 - DNA, 25 bp, Homo sapien
ggcacgaaccatgcctgggctcagg

SEQ ID NO: 2263615 - DNA, 25 bp, Homo sapien
tgggcccttgcactttgacctgcaa

SEQ ID NO: 2263616 - DNA, 25 bp, Homo sapien
ctttgggcccttgcactttgacctg

SEQ ID NO: 2263617 - DNA, 25 bp, Homo sapien
aggactgagggaggttggcacgaac

SEQ ID NO: 2263618 - DNA, 25 bp, Homo sapien
gacgcatctgtcacatcatgcacag

SEQ ID NO: 2263619 - DNA, 25 bp, Homo sapien
cacatcatgcacagggaccttgaaa

SEQ ID NO: 2263620 - DNA, 25 bp, Homo sapien
tctgtcacatcatgcacagggacct

SEQ ID NO: 2263621 - DNA, 25 bp, Homo sapien
tgaccttggacgcatctgtcacatc

SEQ ID NO: 2263622 - DNA, 25 bp, Homo sapien
tgagggttggggcaaagggatggcg

SEQ ID NO: 2263623 - DNA, 25 bp, Homo sapien
ctgagggttggggcaaagggatggc

SEQ ID NO: 2263624 - DNA, 25 bp, Homo sapien
ggtgccagcctcataagggatgtac

SEQ ID NO: 2263625 - DNA, 25 bp, Homo sapien
tgatggccaccataggtgacgttga

SEQ ID NO: 2263626 - DNA, 25 bp, Homo sapien
ctggcacttgatggccaccataggt

SEQ ID NO: 2263627 - DNA, 25 bp, Homo sapien
atgtactcgaccgagcagctgccgt

SEQ ID NO: 2263628 - DNA, 25 bp, Homo sapien
ctggtccaaacagacagccggtcat

SEQ ID NO: 2263629 - DNA, 25 bp, Homo sapien
tggcccgtggacacgcacccgggag

SEQ ID NO: 2263630 - DNA, 25 bp, Homo sapien
taggtcacgtccacggagtgcagtc

SEQ ID NO: 2263631 - DNA, 25 bp, Homo sapien
ataggtcacgtccacggagtgcagt

SEQ ID NO: 2263632 - DNA, 25 bp, Homo sapien
gtgccactttggatgcctggcccgt

SEQ ID NO: 2263633 - DNA, 25 bp, Homo sapien
tcagtggtggcctcacggaagacac

SEQ ID NO: 2263634 - DNA, 25 bp, Homo sapien
tcctcgtaaggcgtgtactccactt

SEQ ID NO: 2263635 - DNA, 25 bp, Homo sapien
gaacgtaggtctccgtcaggttgcc

SEQ ID NO: 2263636 - DNA, 25 bp, Homo sapien
catcgccacggtcctgaacgtaggt

SEQ ID NO: 2263637 - DNA, 25 bp, Homo sapien
gctggccgccgtacttgatggtgac

SEQ ID NO: 2263638 - DNA, 25 bp, Homo sapien
cattgtccaagcactcgagctgcgc

SEQ ID NO: 2263639 - DNA, 25 bp, Homo sapien
tgttgatgttgtagtccccgggctc

SEQ ID NO: 2263640 - DNA, 25 bp, Homo sapien
taggacacggaacatgtgccatccc

SEQ ID NO: 2263641 - DNA, 25 bp, Homo sapien
gcacagtgggttctacccttagggc

SEQ ID NO: 2263642 - DNA, 25 bp, Homo sapien
gagcacagtgggttctacccttagg

SEQ ID NO: 2263643 - DNA, 25 bp, Homo sapien
agcacagtgggttctacccttaggg

SEQ ID NO: 2263644 - DNA, 25 bp, Homo sapien
gcaggaagcgcaccacactgttgtc

SEQ ID NO: 2263645 - DNA, 25 bp, Homo sapien
tgaccaccagcaccctttgatttga

SEQ ID NO: 2263646 - DNA, 25 bp, Homo sapien
acgggcacgccgtcataggtcacct

SEQ ID NO: 2263647 - DNA, 25 bp, Homo sapien
tcatagggcccttcctcacggggca

SEQ ID NO: 2263648 - DNA, 25 bp, Homo sapien
gggatcccctccataagtgacattg

SEQ ID NO: 2263649 - DNA, 25 bp, Homo sapien
cctccataagtgacattgacgccta

SEQ ID NO: 2263650 - DNA, 25 bp, Homo sapien
agggctcttagggatgggatcccct

SEQ ID NO: 2263651 - DNA, 25 bp, Homo sapien
actgagaaagggctcttagggatgg

SEQ ID NO: 2263652 - DNA, 25 bp, Homo sapien
gatgatgtccacatctcgcactgca

SEQ ID NO: 2263653 - DNA, 25 bp, Homo sapien
caggcgtgtacttgactgtgtaggt

SEQ ID NO: 2263654 - DNA, 25 bp, Homo sapien
gaactggacgtccagcttgcctttg

SEQ ID NO: 2263655 - DNA, 25 bp, Homo sapien
gccagcagctttggcatttactgtg

SEQ ID NO: 2263656 - DNA, 25 bp, Homo sapien
agggctccaccttgactcggatggg

SEQ ID NO: 2263657 - DNA, 25 bp, Homo sapien
cttcaccttactggcgtcatgagag

SEQ ID NO: 2263658 - DNA, 25 bp, Homo sapien
ggccctcggccttcaccttactggc

SEQ ID NO: 2263659 - DNA, 25 bp, Homo sapien
tcggccttcaccttactggcgtcat

SEQ ID NO: 2263660 - DNA, 25 bp, Homo sapien
tcgatgtcagcttcggcggggccta

SEQ ID NO: 2263661 - DNA, 25 bp, Homo sapien
gaaggtgtcattgtcattgcggatg

SEQ ID NO: 2263662 - DNA, 25 bp, Homo sapien
cggatgatgtcgaagtcgatgtcag

SEQ ID NO: 2263663 - DNA, 25 bp, Homo sapien
accataatggtgtagctgccagccc

SEQ ID NO: 2263664 - DNA, 25 bp, Homo sapien
ggctgagacctcgcagggacacccc

SEQ ID NO: 2263665 - DNA, 25 bp, Homo sapien
aggctgagacctcgcagggacaccc

SEQ ID NO: 2263666 - DNA, 25 bp, Homo sapien
ctgagacctcgcagggacaccccag

SEQ ID NO: 2263667 - DNA, 25 bp, Homo sapien
gctgagacctcgcagggacacccca

SEQ ID NO: 2263668 - DNA, 25 bp, Homo sapien
cgtatactttgaccttgttggggtg

SEQ ID NO: 2263669 - DNA, 25 bp, Homo sapien
gtcttggctactccggggccgtata

SEQ ID NO: 2263670 - DNA, 25 bp, Homo sapien
cagcctcggcgcagtccacagtgaa

SEQ ID NO: 2263671 - DNA, 25 bp, Homo sapien
taggtgggctcgtgggccttgagcc

SEQ ID NO: 2263672 - DNA, 25 bp, Homo sapien
tgccattgccgttgtccttgaccaa

SEQ ID NO: 2263673 - DNA, 25 bp, Homo sapien
gctgtgtgcttcaccggcttcctgg

SEQ ID NO: 2263674 - DNA, 25 bp, Homo sapien
taggagcagctgtaagtgccattgc

SEQ ID NO: 2263675 - DNA, 25 bp, Homo sapien
cttgaccaacgcctccacagggcag

SEQ ID NO: 2263676 - DNA, 25 bp, Homo sapien
ctgcccccaacacccgtgggtgctc

SEQ ID NO: 2263677 - DNA, 25 bp, Homo sapien
cctgcccccaacacccgtgggtgct

SEQ ID NO: 2263678 - DNA, 25 bp, Homo sapien
ctgccctgcccccaacacccgtggg

SEQ ID NO: 2263679 - DNA, 25 bp, Homo sapien
gcccccaacacccgtgggtgctcta

SEQ ID NO: 2263680 - DNA, 25 bp, Homo sapien
cactgtgaactctgctggcttgttg

SEQ ID NO: 2263681 - DNA, 25 bp, Homo sapien
gaagtggggccttgccaccgtgctt

SEQ ID NO: 2263682 - DNA, 25 bp, Homo sapien
ttgttgacggccacacctgtcttct

SEQ ID NO: 2263683 - DNA, 25 bp, Homo sapien
aactctgctggcttgttgacggcca

SEQ ID NO: 2263684 - DNA, 25 bp, Homo sapien
agtagcgcacatcacaggagccgtc

SEQ ID NO: 2263685 - DNA, 25 bp, Homo sapien
ggcggatgtcttcgctgttgcacag

SEQ ID NO: 2263686 - DNA, 25 bp, Homo sapien
tgttgcacagcacgtgaacggcata

SEQ ID NO: 2263687 - DNA, 25 bp, Homo sapien
cattcgatcttagcctgcgatggcc

SEQ ID NO: 2263688 - DNA, 25 bp, Homo sapien
cagggtgggccgtccttgccatcgt

SEQ ID NO: 2263689 - DNA, 25 bp, Homo sapien
tgggccgtccttgccatcgtctgtc

SEQ ID NO: 2263690 - DNA, 25 bp, Homo sapien
ccttgccatcgtctgtccccaggtg

SEQ ID NO: 2263691 - DNA, 25 bp, Homo sapien
ggtgggccgtccttgccatcgtctg

SEQ ID NO: 2263692 - DNA, 25 bp, Homo sapien
cgtaccttctgattgccacactcgg

SEQ ID NO: 2263693 - DNA, 25 bp, Homo sapien
cccgatagcctccaccacaaagtct

SEQ ID NO: 2263694 - DNA, 25 bp, Homo sapien
ggtgcccaccttcacttcgaaggga

SEQ ID NO: 2263695 - DNA, 25 bp, Homo sapien
gtgcccacgtcgtccccgatagcct

SEQ ID NO: 2263696 - DNA, 25 bp, Homo sapien
atgttctgaccaccccacgtgatgg

SEQ ID NO: 2263697 - DNA, 25 bp, Homo sapien
ggtgacgatataggttccagggacc

SEQ ID NO: 2263698 - DNA, 25 bp, Homo sapien
ggtaatactcgaagccatacacgcc

SEQ ID NO: 2263699 - DNA, 25 bp, Homo sapien
tccagggaccatggggtaatactcg

SEQ ID NO: 2263700 - DNA, 25 bp, Homo sapien
cgcccggcaggcactcgggttacag

SEQ ID NO: 2263701 - DNA, 25 bp, Homo sapien
ttcacccgcacacccttgggctgga

SEQ ID NO: 2263702 - DNA, 25 bp, Homo sapien
caaccgcccggcaggcactcgggtt

SEQ ID NO: 2263703 - DNA, 25 bp, Homo sapien
tgccagcgccctttgtgtacacctt

SEQ ID NO: 2263704 - DNA, 25 bp, Homo sapien
gcacggtgtggacgccctccatggt

SEQ ID NO: 2263705 - DNA, 25 bp, Homo sapien
gggtcctggatcacaacctcgacct

SEQ ID NO: 2263706 - DNA, 25 bp, Homo sapien
tagctgcagcggtatgtgctgtcgc

SEQ ID NO: 2263707 - DNA, 25 bp, Homo sapien
ggcacgccggcaaacgtgacgtgca

SEQ ID NO: 2263708 - DNA, 25 bp, Homo sapien
ttatccacgtacacctcgaaggggc

SEQ ID NO: 2263709 - DNA, 25 bp, Homo sapien
tgtcactttgctggcgtcaccctgt

SEQ ID NO: 2263710 - DNA, 25 bp, Homo sapien
gctccaggccgggaccttgggctgt

SEQ ID NO: 2263711 - DNA, 25 bp, Homo sapien
tcttgttggcgatgttgccactggg

SEQ ID NO: 2263712 - DNA, 25 bp, Homo sapien
gagaaggtgcggttcttgtcgttat

SEQ ID NO: 2263713 - DNA, 25 bp, Homo sapien
tcacctcggggacgtaccagacgga

SEQ ID NO: 2263714 - DNA, 25 bp, Homo sapien
taccagacggagaaggtgcggttct

SEQ ID NO: 2263715 - DNA, 25 bp, Homo sapien
tcttgtcgttattggcggtcacttt

SEQ ID NO: 2263716 - DNA, 25 bp, Homo sapien
tgtccggccgggtcctccacgtaca

SEQ ID NO: 2263717 - DNA, 25 bp, Homo sapien
cggccgggtcctccacgtacaccag

SEQ ID NO: 2263718 - DNA, 25 bp, Homo sapien
gccgggtcctccacgtacaccagca

SEQ ID NO: 2263719 - DNA, 25 bp, Homo sapien
accatgttgcctgtgggctcgatgc

SEQ ID NO: 2263720 - DNA, 25 bp, Homo sapien
gtcatgacagagtgctcgtccacgt

SEQ ID NO: 2263721 - DNA, 25 bp, Homo sapien
taggcacgggctttcttcgggttca

SEQ ID NO: 2263722 - DNA, 25 bp, Homo sapien
tggcccgtaggcacgggctttcttc

SEQ ID NO: 2263723 - DNA, 25 bp, Homo sapien
cagtttgggccgcaagggagcccct

SEQ ID NO: 2263724 - DNA, 25 bp, Homo sapien
ctgtagccaggccgggcgggtgtac

SEQ ID NO: 2263725 - DNA, 25 bp, Homo sapien
tgggggatgcccagccagtcatccg

SEQ ID NO: 2263726 - DNA, 25 bp, Homo sapien
tgcatggcctctcgcgcattggtaa

SEQ ID NO: 2263727 - DNA, 25 bp, Homo sapien
tcccaagagtcccagtcaggacaca

SEQ ID NO: 2263728 - DNA, 25 bp, Homo sapien
attggtaacgggcttgctggcgtcc

SEQ ID NO: 2263729 - DNA, 25 bp, Homo sapien
cagcccagtctctcctgcctctgcg

SEQ ID NO: 2263730 - DNA, 25 bp, Homo sapien
gcccagtctctcctgcctctgcgcc

SEQ ID NO: 2263731 - DNA, 25 bp, Homo sapien
ctctcctgcctctgcgccccctcac

SEQ ID NO: 2263732 - DNA, 25 bp, Homo sapien
cccagcccagtctctcctgcctctg

SEQ ID NO: 2263733 - DNA, 25 bp, Homo sapien
tgccagtcccggctgaagttggtga

SEQ ID NO: 2263734 - DNA, 25 bp, Homo sapien
ttcaggttcccgtccacgatggcct

SEQ ID NO: 2263735 - DNA, 25 bp, Homo sapien
gctgcggcagcttgttctggatcca

SEQ ID NO: 2263736 - DNA, 25 bp, Homo sapien
agtagtgcaggatcagggtccagat

SEQ ID NO: 2263737 - DNA, 25 bp, Homo sapien
ctgtgagtagaagagtggccacgct

SEQ ID NO: 2263738 - DNA, 25 bp, Homo sapien
gtgagtagaagagtggccacgctgg

SEQ ID NO: 2263739 - DNA, 25 bp, Homo sapien
cgggaggggccgatcccaggctttg

SEQ ID NO: 2263740 - DNA, 25 bp, Homo sapien
gctgtgcgggaggggccgatcccag

SEQ ID NO: 2263741 - DNA, 25 bp, Homo sapien
ctcttggccagtggtaggatgtgga

SEQ ID NO: 2263742 - DNA, 25 bp, Homo sapien
tggccagtggtaggatgtggatgag

SEQ ID NO: 2263743 - DNA, 25 bp, Homo sapien
ccagtggtaggatgtggatgaggcc

SEQ ID NO: 2263744 - DNA, 25 bp, Homo sapien
tggtaggatgtggatgaggccctct

SEQ ID NO: 2263745 - DNA, 25 bp, Homo sapien
tcttgagaacgaattgggctgctgc

SEQ ID NO: 2263746 - DNA, 25 bp, Homo sapien
gaactttggttcttgggatctgccc

SEQ ID NO: 2263747 - DNA, 25 bp, Homo sapien
caagtagtctacaagccaggtctct

SEQ ID NO: 2263748 - DNA, 25 bp, Homo sapien
cctacatggaagcaagagtttggcc

SEQ ID NO: 2263749 - DNA, 25 bp, Homo sapien
ccgcccgagagtgggagctactcat

SEQ ID NO: 2263750 - DNA, 25 bp, Homo sapien
tggacaccagtttgatgctctcgcg

SEQ ID NO: 2263751 - DNA, 25 bp, Homo sapien
tgcaggttggcgatgcgcttgctca

SEQ ID NO: 2263752 - DNA, 25 bp, Homo sapien
cgacacgttctcaagctgcatttgg

SEQ ID NO: 2263753 - DNA, 25 bp, Homo sapien
ttgaggcgcgagaagccgggggggc

SEQ ID NO: 2263754 - DNA, 25 bp, Homo sapien
attaaagtcgcaggcacctaggcgc

SEQ ID NO: 2263755 - DNA, 25 bp, Homo sapien
taattaaagtcgcaggcacctaggc

SEQ ID NO: 2263756 - DNA, 25 bp, Homo sapien
aaagtcgcaggcacctaggcgcgcg

SEQ ID NO: 2263757 - DNA, 25 bp, Homo sapien
cattcgtgggcacagacatggctcg

SEQ ID NO: 2263758 - DNA, 25 bp, Homo sapien
catggctcgtgggtcaactagggaa

SEQ ID NO: 2263759 - DNA, 25 bp, Homo sapien
tctcaggcatgcagtggtccgttca

SEQ ID NO: 2263760 - DNA, 25 bp, Homo sapien
tatatcctggctggcagtgcgcatc

SEQ ID NO: 2263761 - DNA, 25 bp, Homo sapien
gggtggcgcccggatcgccttcgcg

SEQ ID NO: 2263762 - DNA, 25 bp, Homo sapien
tgagagcgaccggtgaccgatgacc

SEQ ID NO: 2263763 - DNA, 25 bp, Homo sapien
cctcggggattctgtcggcgtccgc

SEQ ID NO: 2263764 - DNA, 25 bp, Homo sapien
ctgctgttcctgagagcgaccggtg

SEQ ID NO: 2263765 - DNA, 25 bp, Homo sapien
tctttgttaggatctttgcgtgtag

SEQ ID NO: 2263766 - DNA, 25 bp, Homo sapien
gggccttgccaacagtgattcctct

SEQ ID NO: 2263767 - DNA, 25 bp, Homo sapien
ctctgaaagatgaggtgcaaacccc

SEQ ID NO: 2263768 - DNA, 25 bp, Homo sapien
caaactgccatctgtcccctcagct

SEQ ID NO: 2263769 - DNA, 25 bp, Homo sapien
ccagtttggggcctacccagtgagg

SEQ ID NO: 2263770 - DNA, 25 bp, Homo sapien
tgggcaaacctccatggatgactgg

SEQ ID NO: 2263771 - DNA, 25 bp, Homo sapien
gtgaggggcacactagttgattcca

SEQ ID NO: 2263772 - DNA, 25 bp, Homo sapien
tgtcaccagccctcaactgtgaaac

SEQ ID NO: 2263773 - DNA, 25 bp, Homo sapien
gccacagggtgacgtctgggctccc

SEQ ID NO: 2263774 - DNA, 25 bp, Homo sapien
ccgcacgccacagggtgacgtctgg

SEQ ID NO: 2263775 - DNA, 25 bp, Homo sapien
cacagggtgacgtctgggctcccag

SEQ ID NO: 2263776 - DNA, 25 bp, Homo sapien
cacgccacagggtgacgtctgggct

SEQ ID NO: 2263777 - DNA, 25 bp, Homo sapien
cttctagagggagccatgagggtct

SEQ ID NO: 2263778 - DNA, 25 bp, Homo sapien
tgggcctagcccagagtagtgcttg

SEQ ID NO: 2263779 - DNA, 25 bp, Homo sapien
tgcaggctgaagaaggcaacccctt

SEQ ID NO: 2263780 - DNA, 25 bp, Homo sapien
tcatttaccacttcatgcaggctga

SEQ ID NO: 2263781 - DNA, 25 bp, Homo sapien
catataatcgtggtacaacaaggta

SEQ ID NO: 2263782 - DNA, 25 bp, Homo sapien
ggtatatacagagaacccacttgga

SEQ ID NO: 2263783 - DNA, 25 bp, Homo sapien
atgcacgctaccagcagtctgcggg

SEQ ID NO: 2263784 - DNA, 25 bp, Homo sapien
gaaaaagctgaagtccacctcggtg

SEQ ID NO: 2263785 - DNA, 25 bp, Homo sapien
gggtgctggcattagtcacccaagc

SEQ ID NO: 2263786 - DNA, 25 bp, Homo sapien
tggcattagtcacccaagcctttgg

SEQ ID NO: 2263787 - DNA, 25 bp, Homo sapien
cacttggcacagctcccatgtagtg

SEQ ID NO: 2263788 - DNA, 25 bp, Homo sapien
acttggcacagctcccatgtagtgc

SEQ ID NO: 2263789 - DNA, 25 bp, Homo sapien
tcctcacaggtccaccttagggatt

SEQ ID NO: 2263790 - DNA, 25 bp, Homo sapien
cccaatgcaaagactgatggctggc

SEQ ID NO: 2263791 - DNA, 25 bp, Homo sapien
cctggatggtccatggcgggtggta

SEQ ID NO: 2263792 - DNA, 25 bp, Homo sapien
acaaacaggttgctactgccaggac

SEQ ID NO: 2263793 - DNA, 25 bp, Homo sapien
gaggaggtagctgggtgtacttggc

SEQ ID NO: 2263794 - DNA, 25 bp, Homo sapien
gggtgtacttggcaaccactgtggt

SEQ ID NO: 2263795 - DNA, 25 bp, Homo sapien
ggcactgtccaagaagatactggat

SEQ ID NO: 2263796 - DNA, 25 bp, Homo sapien
ctctgggcactgtccaagaagatac

SEQ ID NO: 2263797 - DNA, 25 bp, Homo sapien
gcccaaggtccaagcgagaggccac

SEQ ID NO: 2263798 - DNA, 25 bp, Homo sapien
agagctctgagagaccactgtggcc

SEQ ID NO: 2263799 - DNA, 25 bp, Homo sapien
aagaaggacatttgccttgaccctc

SEQ ID NO: 2263800 - DNA, 25 bp, Homo sapien
ggttggaggtacgaagggtgtctgc

SEQ ID NO: 2263801 - DNA, 25 bp, Homo sapien
gcgccaagaccggccaagaaggaca

SEQ ID NO: 2263802 - DNA, 25 bp, Homo sapien
tccaaaagaggtgacagcgccaaga

SEQ ID NO: 2263803 - DNA, 25 bp, Homo sapien
aagagagtgccaggggtgtaggacc

SEQ ID NO: 2263804 - DNA, 25 bp, Homo sapien
tcatgagcatggcacactcctgact

SEQ ID NO: 2263805 - DNA, 25 bp, Homo sapien
gcttcatgagcatggcacactcctg

SEQ ID NO: 2263806 - DNA, 25 bp, Homo sapien
tgtggcttcatgagcatggcacact

SEQ ID NO: 2263807 - DNA, 25 bp, Homo sapien
gcatagaggtaaaggggccaagcac

SEQ ID NO: 2263808 - DNA, 25 bp, Homo sapien
cacactctggaagcctctaaaagcc

SEQ ID NO: 2263809 - DNA, 25 bp, Homo sapien
tgggcccaatggcatagaggtaaag

SEQ ID NO: 2263810 - DNA, 25 bp, Homo sapien
ctctaaaagccaccagctgaacggg

SEQ ID NO: 2263811 - DNA, 25 bp, Homo sapien
gtgactatggaaagacccccgccgc

SEQ ID NO: 2263812 - DNA, 25 bp, Homo sapien
gcccaactcggcacacaaaggccca

SEQ ID NO: 2263813 - DNA, 25 bp, Homo sapien
ggacaggaagtaggtgactatggaa

SEQ ID NO: 2263814 - DNA, 25 bp, Homo sapien
acccacgcccaactcggcacacaaa

SEQ ID NO: 2263815 - DNA, 25 bp, Homo sapien
atgtatccttcctggacacggtgtc

SEQ ID NO: 2263816 - DNA, 25 bp, Homo sapien
ggcagggcactcccgaaccaggatg

SEQ ID NO: 2263817 - DNA, 25 bp, Homo sapien
gtatccttcctggacacggtgtcca

SEQ ID NO: 2263818 - DNA, 25 bp, Homo sapien
caacaaagggtgagcatgtatcctt

SEQ ID NO: 2263819 - DNA, 25 bp, Homo sapien
tggctgctgtcgtggctgtgcccat

SEQ ID NO: 2263820 - DNA, 25 bp, Homo sapien
cagctcctttgggaccctcaatgga

SEQ ID NO: 2263821 - DNA, 25 bp, Homo sapien
gtccggacgcccctagggtgctctg

SEQ ID NO: 2263822 - DNA, 25 bp, Homo sapien
tggagccagtaagtccaggagggcg

SEQ ID NO: 2263823 - DNA, 25 bp, Homo sapien
tgccgaacaggtcgctaggagagca

SEQ ID NO: 2263824 - DNA, 25 bp, Homo sapien
ccgaacaggtcgctaggagagcact

SEQ ID NO: 2263825 - DNA, 25 bp, Homo sapien
gaacaggtcgctaggagagcactcc

SEQ ID NO: 2263826 - DNA, 25 bp, Homo sapien
ctgccgaacaggtcgctaggagagc

SEQ ID NO: 2263827 - DNA, 25 bp, Homo sapien
ctcgctgttcttcccgcgggatcgg

SEQ ID NO: 2263828 - DNA, 25 bp, Homo sapien
agggaggacacagtccccgtccagg

SEQ ID NO: 2263829 - DNA, 25 bp, Homo sapien
tcggtgggcctgaccgtgtcctgaa

SEQ ID NO: 2263830 - DNA, 25 bp, Homo sapien
tgaccgtgtcctgaagcaccccagg

SEQ ID NO: 2263831 - DNA, 25 bp, Homo sapien
tgggaaaggcttccatgaagagcca

SEQ ID NO: 2263832 - DNA, 25 bp, Homo sapien
ctgggaaaggcttccatgaagagcc

SEQ ID NO: 2263833 - DNA, 25 bp, Homo sapien
ggggtctcggtggcagagtctccct

SEQ ID NO: 2263834 - DNA, 25 bp, Homo sapien
ggttctctgtgatgggttttgcaac

SEQ ID NO: 2263835 - DNA, 25 bp, Homo sapien
tctcggtggcagagtctcccttctt

SEQ ID NO: 2263836 - DNA, 25 bp, Homo sapien
cccttcttggggttctctgtgatgg

SEQ ID NO: 2263837 - DNA, 25 bp, Homo sapien
aggccccggccagtgtcagccccag

SEQ ID NO: 2263838 - DNA, 25 bp, Homo sapien
ttcaggatgtcaaagcacgccccgc

SEQ ID NO: 2263839 - DNA, 25 bp, Homo sapien
cgccctcagaaatgcaggccccggc

SEQ ID NO: 2263840 - DNA, 25 bp, Homo sapien
ctgctcccgctgacaccaaggacat

SEQ ID NO: 2263841 - DNA, 25 bp, Homo sapien
tgaccaccggtctgcaaaggaaggg

SEQ ID NO: 2263842 - DNA, 25 bp, Homo sapien
ggccctgatctcaggcgacgcctgt

SEQ ID NO: 2263843 - DNA, 25 bp, Homo sapien
aagacagtgaccaccggtctgcaaa

SEQ ID NO: 2263844 - DNA, 25 bp, Homo sapien
tcaggcgacgcctgtccgcctcgtc

SEQ ID NO: 2263845 - DNA, 25 bp, Homo sapien
attgctgggtcgagatatatgtaca

SEQ ID NO: 2263846 - DNA, 25 bp, Homo sapien
tgcatttactatgaacacagccttg

SEQ ID NO: 2263847 - DNA, 25 bp, Homo sapien
actgcaccgggcctccatttgatgt

SEQ ID NO: 2263848 - DNA, 25 bp, Homo sapien
tctagaataattacctgtaagtgga

SEQ ID NO: 2263849 - DNA, 25 bp, Homo sapien
ctgagtgatgcaaccccagggcttc

SEQ ID NO: 2263850 - DNA, 25 bp, Homo sapien
catggcacggaatgtggccttagcg

SEQ ID NO: 2263851 - DNA, 25 bp, Homo sapien
ccttagcgagaagggagaattgctc

SEQ ID NO: 2263852 - DNA, 25 bp, Homo sapien
tggccctggagacgtacagttgact

SEQ ID NO: 2263853 - DNA, 25 bp, Homo sapien
cctggaaaacaggtgcgctcgagca

SEQ ID NO: 2263854 - DNA, 25 bp, Homo sapien
tatataagccatgcgcaggcggagg

SEQ ID NO: 2263855 - DNA, 25 bp, Homo sapien
tctatggttcttacgcgcgcagaca

SEQ ID NO: 2263856 - DNA, 25 bp, Homo sapien
cccttcggtgtggtgagtaagcgca

SEQ ID NO: 2263857 - DNA, 25 bp, Homo sapien
gctcaccgcattttcgggcgctaga

SEQ ID NO: 2263858 - DNA, 25 bp, Homo sapien
gaagcgacggttccctcgtatctct

SEQ ID NO: 2263859 - DNA, 25 bp, Homo sapien
gccctgtcttgggaactgaccctat

SEQ ID NO: 2263860 - DNA, 25 bp, Homo sapien
tatggcccgctgaaaacaattgtgg

SEQ ID NO: 2263861 - DNA, 25 bp, Homo sapien
taatgcggcgattttgtagtacgca

SEQ ID NO: 2263862 - DNA, 25 bp, Homo sapien
tgagctgtgcaatgataatgcggcg

SEQ ID NO: 2263863 - DNA, 25 bp, Homo sapien
tagtacgcagtgtcttgaagagaga

SEQ ID NO: 2263864 - DNA, 25 bp, Homo sapien
tctgtgttgcagcagccaactgttg

SEQ ID NO: 2263865 - DNA, 25 bp, Homo sapien
agaacaagccgtacccaaagtctcg

SEQ ID NO: 2263866 - DNA, 25 bp, Homo sapien
agtctcgcttctgccgaggtgtccc

SEQ ID NO: 2263867 - DNA, 25 bp, Homo sapien
agccgtacccaaagtctcgcttctg

SEQ ID NO: 2263868 - DNA, 25 bp, Homo sapien
aagtctcgcttctgccgaggtgtcc

SEQ ID NO: 2263869 - DNA, 25 bp, Homo sapien
ctgcggactccgcgtccgtctgtga

SEQ ID NO: 2263870 - DNA, 25 bp, Homo sapien
gcggactccgcgtccgtctgtgaca

SEQ ID NO: 2263871 - DNA, 25 bp, Homo sapien
cccctgcacacttacccaatccttt

SEQ ID NO: 2263872 - DNA, 25 bp, Homo sapien
ctgcacacttacccaatccttttag

SEQ ID NO: 2263873 - DNA, 25 bp, Homo sapien
ccaagattcgcatttttgacctggg

SEQ ID NO: 2263874 - DNA, 25 bp, Homo sapien
atgccaagattcgcatttttgacct

SEQ ID NO: 2263875 - DNA, 25 bp, Homo sapien
tcgcatttttgacctggggcggaaa

SEQ ID NO: 2263876 - DNA, 25 bp, Homo sapien
ttcgcatttttgacctggggcggaa

SEQ ID NO: 2263877 - DNA, 25 bp, Homo sapien
gcaggattctttgttcgtcaccccc

SEQ ID NO: 2263878 - DNA, 25 bp, Homo sapien
ggcaggattctttgttcgtcacccc

SEQ ID NO: 2263879 - DNA, 25 bp, Homo sapien
gtaaggcaggattctttgttcgtca

SEQ ID NO: 2263880 - DNA, 25 bp, Homo sapien
aaggcaggattctttgttcgtcacc

SEQ ID NO: 2263881 - DNA, 25 bp, Homo sapien
ttccacgtcatccgcatcaacaaga

SEQ ID NO: 2263882 - DNA, 25 bp, Homo sapien
tggaggctgcccgaatttgtgccaa

SEQ ID NO: 2263883 - DNA, 25 bp, Homo sapien
ccaataagtacatggtaaaaagttg

SEQ ID NO: 2263884 - DNA, 25 bp, Homo sapien
gatggcttccatatccgggtgcggc

SEQ ID NO: 2263885 - DNA, 25 bp, Homo sapien
ttagctgaatgacaaccatcttgcc

SEQ ID NO: 2263886 - DNA, 25 bp, Homo sapien
gaaacactggtgatgggagtagctc

SEQ ID NO: 2263887 - DNA, 25 bp, Homo sapien
tttatcagagcatagaggtggcccc

SEQ ID NO: 2263888 - DNA, 25 bp, Homo sapien
gggatctccgcagccaattaagccg

SEQ ID NO: 2263889 - DNA, 25 bp, Homo sapien
cagttctttccattgctccttagat

SEQ ID NO: 2263890 - DNA, 25 bp, Homo sapien
cagaaggtatgtagtgctgcagccc

SEQ ID NO: 2263891 - DNA, 25 bp, Homo sapien
agttctttccattgctccttagatc

SEQ ID NO: 2263892 - DNA, 25 bp, Homo sapien
gccagaaggtatgtagtgctgcagc

SEQ ID NO: 2263893 - DNA, 25 bp, Homo sapien
tgtatccagggacaggactccaaag

SEQ ID NO: 2263894 - DNA, 25 bp, Homo sapien
caagacctcggaacagacacgtgtg

SEQ ID NO: 2263895 - DNA, 25 bp, Homo sapien
ctgaactattgtagaacagcgctgg

SEQ ID NO: 2263896 - DNA, 25 bp, Homo sapien
ccagcagcgtttatttagcaagggt

SEQ ID NO: 2263897 - DNA, 25 bp, Homo sapien
gctgctcagcggttataacaggcct

SEQ ID NO: 2263898 - DNA, 25 bp, Homo sapien
tacagcacccaggaggtgcgagtgt

SEQ ID NO: 2263899 - DNA, 25 bp, Homo sapien
tataatgagccaaaatgtttcccgg

SEQ ID NO: 2263900 - DNA, 25 bp, Homo sapien
atgttgccttgaccagccttggctg

SEQ ID NO: 2263901 - DNA, 25 bp, Homo sapien
cattggcatatctgctgcacaagtg

SEQ ID NO: 2263902 - DNA, 25 bp, Homo sapien
taggcacaagcccaaccaaagaaca

SEQ ID NO: 2263903 - DNA, 25 bp, Homo sapien
tgatactacactacctggcaggtgg

SEQ ID NO: 2263904 - DNA, 25 bp, Homo sapien
aagtgtcctatctcaccaatctggg

SEQ ID NO: 2263905 - DNA, 25 bp, Homo sapien
ggctgagaggctggacgctgtgcgc

SEQ ID NO: 2263906 - DNA, 25 bp, Homo sapien
tgagaggctggacgctgtgcgcctg

SEQ ID NO: 2263907 - DNA, 25 bp, Homo sapien
ggggacaggagtgatagcagcaaca

SEQ ID NO: 2263908 - DNA, 25 bp, Homo sapien
gaggctggacgctgtgcgcctggct

SEQ ID NO: 2263909 - DNA, 25 bp, Homo sapien
ccacggggtagtggtcactgatgtt

SEQ ID NO: 2263910 - DNA, 25 bp, Homo sapien
acggggtagtggtcactgatgttga

SEQ ID NO: 2263911 - DNA, 25 bp, Homo sapien
tccacggggtagtggtcactgatgt

SEQ ID NO: 2263912 - DNA, 25 bp, Homo sapien
cacggggtagtggtcactgatgttg

SEQ ID NO: 2263913 - DNA, 25 bp, Homo sapien
gggcttccctgtgaccctgctgctg

SEQ ID NO: 2263914 - DNA, 25 bp, Homo sapien
gccgaggggcttccctgtgaccctg

SEQ ID NO: 2263915 - DNA, 25 bp, Homo sapien
tgccctccctcctcatgccagcccc

SEQ ID NO: 2263916 - DNA, 25 bp, Homo sapien
gggcagtgtcagtgcccggggccga

SEQ ID NO: 2263917 - DNA, 25 bp, Homo sapien
tcagcattgaagtccccaagcagga

SEQ ID NO: 2263918 - DNA, 25 bp, Homo sapien
tttggtcagtgaagcgcagtcagca

SEQ ID NO: 2263919 - DNA, 25 bp, Homo sapien
tcggcaatcacccagtggaagcctg

SEQ ID NO: 2263920 - DNA, 25 bp, Homo sapien
aagtcaaaggcagccgcagtgtgca

SEQ ID NO: 2263921 - DNA, 25 bp, Homo sapien
tgggagacctccagaaacacatcgt

SEQ ID NO: 2263922 - DNA, 25 bp, Homo sapien
agcgggaccaacaccaggctgggaa

SEQ ID NO: 2263923 - DNA, 25 bp, Homo sapien
tctacggccttaggagtggtgtgca

SEQ ID NO: 2263924 - DNA, 25 bp, Homo sapien
tcgtagagggcgttcagctccttct

SEQ ID NO: 2263925 - DNA, 25 bp, Homo sapien
cgagggctgccatccactcctggac

SEQ ID NO: 2263926 - DNA, 25 bp, Homo sapien
agggaccgagggctgccatccactc

SEQ ID NO: 2263927 - DNA, 25 bp, Homo sapien
accgagggctgccatccactcctgg

SEQ ID NO: 2263928 - DNA, 25 bp, Homo sapien
ctgcaaggcccagggaccgagggct

SEQ ID NO: 2263929 - DNA, 25 bp, Homo sapien
tgggccacaaatggctcccgggcaa

SEQ ID NO: 2263930 - DNA, 25 bp, Homo sapien
tcatcgttgtacacgtaggaactca

SEQ ID NO: 2263931 - DNA, 25 bp, Homo sapien
tacacgtaggaactcaggacctgtg

SEQ ID NO: 2263932 - DNA, 25 bp, Homo sapien
ccgggcaaagacgtcatcctcatcg

SEQ ID NO: 2263933 - DNA, 25 bp, Homo sapien
cgatagaagtacacatacgtctcca

SEQ ID NO: 2263934 - DNA, 25 bp, Homo sapien
gaagtacacatacgtctccatgtag

SEQ ID NO: 2263935 - DNA, 25 bp, Homo sapien
tccatgtaggtgctgcgccccagct

SEQ ID NO: 2263936 - DNA, 25 bp, Homo sapien
gtacacatacgtctccatgtaggtg

SEQ ID NO: 2263937 - DNA, 25 bp, Homo sapien
atggcgctgccggaagagtccacca

SEQ ID NO: 2263938 - DNA, 25 bp, Homo sapien
cgattgagttctcgaagcaggagcg

SEQ ID NO: 2263939 - DNA, 25 bp, Homo sapien
ccatgatgtcacagcgagccagtat

SEQ ID NO: 2263940 - DNA, 25 bp, Homo sapien
agcgggatggcgctgccggaagagt

SEQ ID NO: 2263941 - DNA, 25 bp, Homo sapien
cgcagatgcgaaaggcctgggcccc

SEQ ID NO: 2263942 - DNA, 25 bp, Homo sapien
agtgtcagccgctgggcattgaagg

SEQ ID NO: 2263943 - DNA, 25 bp, Homo sapien
cgaactaaggtgtccatcacctgct

SEQ ID NO: 2263944 - DNA, 25 bp, Homo sapien
cattgaaggcgcagatgcgaaaggc

SEQ ID NO: 2263945 - DNA, 25 bp, Homo sapien
ctctcactgggctcagttctggctc

SEQ ID NO: 2263946 - DNA, 25 bp, Homo sapien
ccagggtgcgctctcactgggctca

SEQ ID NO: 2263947 - DNA, 25 bp, Homo sapien
ggctgccggggacaccccaggaatc

SEQ ID NO: 2263948 - DNA, 25 bp, Homo sapien
tgcgctctcactgggctcagttctg

SEQ ID NO: 2263949 - DNA, 25 bp, Homo sapien
ttttaaaaggtctcagatatggcca

SEQ ID NO: 2263950 - DNA, 25 bp, Homo sapien
ttagcaactacaggaacatcttcgt

SEQ ID NO: 2263951 - DNA, 25 bp, Homo sapien
ctttaagataaactcccggcagtga

SEQ ID NO: 2263952 - DNA, 25 bp, Homo sapien
tctgtctccccacttgtgagatgtt

SEQ ID NO: 2263953 - DNA, 25 bp, Homo sapien
taccagtaagaaccagagagagcga

SEQ ID NO: 2263954 - DNA, 25 bp, Homo sapien
tatcagccttggtgggagccctagg

SEQ ID NO: 2263955 - DNA, 25 bp, Homo sapien
gagagagcgacggttcctggcttca

SEQ ID NO: 2263956 - DNA, 25 bp, Homo sapien
tatacatgggtatgtgggcagccct

SEQ ID NO: 2263957 - DNA, 25 bp, Homo sapien
caagtctgcctcatccttaagtgga

SEQ ID NO: 2263958 - DNA, 25 bp, Homo sapien
tccttaagtggatcgcgatacccca

SEQ ID NO: 2263959 - DNA, 25 bp, Homo sapien
tgcctcatccttaagtggatcgcga

SEQ ID NO: 2263960 - DNA, 25 bp, Homo sapien
tggatcgcgataccccagaagagca

SEQ ID NO: 2263961 - DNA, 25 bp, Homo sapien
agccacacggccagaaagggcctgg

SEQ ID NO: 2263962 - DNA, 25 bp, Homo sapien
gaagaggctgtgttcctgagccaca

SEQ ID NO: 2263963 - DNA, 25 bp, Homo sapien
aaaaagaggaagaggctgtgttcct

SEQ ID NO: 2263964 - DNA, 25 bp, Homo sapien
ctgtgttcctgagccacacggccag

SEQ ID NO: 2263965 - DNA, 25 bp, Homo sapien
gagtgagaccccgagcttcgctcgc

SEQ ID NO: 2263966 - DNA, 25 bp, Homo sapien
tcagctcccggtctgggtccccagt

SEQ ID NO: 2263967 - DNA, 25 bp, Homo sapien
tggaagtcatgcctgatgccacgag

SEQ ID NO: 2263968 - DNA, 25 bp, Homo sapien
ccccaagggcgtgagtcttctgtcc

SEQ ID NO: 2263969 - DNA, 25 bp, Homo sapien
ccacagtcgtgaagtcaagggagga

SEQ ID NO: 2263970 - DNA, 25 bp, Homo sapien
gatggctgtagctaatggattcgac

SEQ ID NO: 2263971 - DNA, 25 bp, Homo sapien
tcgacgtggtaatagaaggctggac

SEQ ID NO: 2263972 - DNA, 25 bp, Homo sapien
caaatgaggtgctcggacagggtct

SEQ ID NO: 2263973 - DNA, 25 bp, Homo sapien
cactagagagacaaaaggcgagcgc

SEQ ID NO: 2263974 - DNA, 25 bp, Homo sapien
gtcaagcggcccgtgcgcgctttcg

SEQ ID NO: 2263975 - DNA, 25 bp, Homo sapien
caggttcgctttccggcggttgcac

SEQ ID NO: 2263976 - DNA, 25 bp, Homo sapien
cgcgctttcgacagtcggtcgggct

SEQ ID NO: 2263977 - DNA, 25 bp, Homo sapien
gcggccccgacctagcgggcgagcc

SEQ ID NO: 2263978 - DNA, 25 bp, Homo sapien
ccagcagcgtcgtcatgggcttggt

SEQ ID NO: 2263979 - DNA, 25 bp, Homo sapien
aggcaggcccgcccgggtacccatg

SEQ ID NO: 2263980 - DNA, 25 bp, Homo sapien
atgcccggccggaggtgggacttag

SEQ ID NO: 2263981 - DNA, 25 bp, Homo sapien
tccgaaatcaaggtggcaccagggt

SEQ ID NO: 2263982 - DNA, 25 bp, Homo sapien
cttcagctgcgtgcagtgctctcct

SEQ ID NO: 2263983 - DNA, 25 bp, Homo sapien
ttcttccggtggttcccagcaatgc

SEQ ID NO: 2263984 - DNA, 25 bp, Homo sapien
cccagcaatgctccgtgttccttgg

SEQ ID NO: 2263985 - DNA, 25 bp, Homo sapien
ctgtatcagggagggtccatctgca

SEQ ID NO: 2263986 - DNA, 25 bp, Homo sapien
attggccgggtgcggcgatgcgcgc

SEQ ID NO: 2263987 - DNA, 25 bp, Homo sapien
tgggcgtagggttccgcgaagcctc

SEQ ID NO: 2263988 - DNA, 25 bp, Homo sapien
gtatcagggagggtccatctgcagg

SEQ ID NO: 2263989 - DNA, 25 bp, Homo sapien
tgttccgaccttgcaatgtgactgg

SEQ ID NO: 2263990 - DNA, 25 bp, Homo sapien
tatgaacgactctttggtaccacag

SEQ ID NO: 2263991 - DNA, 25 bp, Homo sapien
actggtttaccatggagcgcctcga

SEQ ID NO: 2263992 - DNA, 25 bp, Homo sapien
gcaaggacccaaggcagcttaggta

SEQ ID NO: 2263993 - DNA, 25 bp, Homo sapien
ttgacccagattgtgtgaccctgtg

SEQ ID NO: 2263994 - DNA, 25 bp, Homo sapien
gatcgctttgatgaccacaagggcc

SEQ ID NO: 2263995 - DNA, 25 bp, Homo sapien
agcttcccagggttcgtcgctgtga

SEQ ID NO: 2263996 - DNA, 25 bp, Homo sapien
tgcgtagatgctagaccaaccagct

SEQ ID NO: 2263997 - DNA, 25 bp, Homo sapien
ccttaaggttatagggctccctgag

SEQ ID NO: 2263998 - DNA, 25 bp, Homo sapien
tcctgcttggctgtcgttatcgttt

SEQ ID NO: 2263999 - DNA, 25 bp, Homo sapien
gtagcaaatgctccctccttaaggt

SEQ ID NO: 2264000 - DNA, 25 bp, Homo sapien
tgggagtgtggaagtactacttaac

SEQ ID NO: 2264001 - DNA, 25 bp, Homo sapien
aggtgggctgggtgcgatcgccggc

SEQ ID NO: 2264002 - DNA, 25 bp, Homo sapien
cgatcgccggctgtttggcatgttc

SEQ ID NO: 2264003 - DNA, 25 bp, Homo sapien
aagggacctccacgacaggtgggct

SEQ ID NO: 2264004 - DNA, 25 bp, Homo sapien
gaagggacctccacgacaggtgggc

SEQ ID NO: 2264005 - DNA, 25 bp, Homo sapien
tttaggcgcgtgctcgccggaggga

SEQ ID NO: 2264006 - DNA, 25 bp, Homo sapien
aaataaacgcgggtcgccatgcgtt

SEQ ID NO: 2264007 - DNA, 25 bp, Homo sapien
catgcgttgggcctcttgtcgctca

SEQ ID NO: 2264008 - DNA, 25 bp, Homo sapien
tcatttctgcgctgggctttaggcg

SEQ ID NO: 2264009 - DNA, 25 bp, Homo sapien
tccttaaccctagcgatggcttggg

SEQ ID NO: 2264010 - DNA, 25 bp, Homo sapien
ggcacggcctttgactttgagaaca

SEQ ID NO: 2264011 - DNA, 25 bp, Homo sapien
catgaagcgcaaacagaacgacgtc

SEQ ID NO: 2264012 - DNA, 25 bp, Homo sapien
gacatctacaaacgcatggctggca

SEQ ID NO: 2264013 - DNA, 25 bp, Homo sapien
aacttgggagctactggcgtggaca

SEQ ID NO: 2264014 - DNA, 25 bp, Homo sapien
gaagaacccagacgttgacacaagc

SEQ ID NO: 2264015 - DNA, 25 bp, Homo sapien
tgttccagagatcaccacgaagaag

SEQ ID NO: 2264016 - DNA, 25 bp, Homo sapien
gggcgtcggccatatcaaaatcatt

SEQ ID NO: 2264017 - DNA, 25 bp, Homo sapien
gggcccgctgcttgttcctggcaaa

SEQ ID NO: 2264018 - DNA, 25 bp, Homo sapien
cctcttgtaaggctcctgggactcc

SEQ ID NO: 2264019 - DNA, 25 bp, Homo sapien
ccagctgtacctgtgatgcccgagg

SEQ ID NO: 2264020 - DNA, 25 bp, Homo sapien
cactgagagggtagcgctgagccct

SEQ ID NO: 2264021 - DNA, 25 bp, Homo sapien
gtgcccagccaagtgagatgcaatt

SEQ ID NO: 2264022 - DNA, 25 bp, Homo sapien
tggagtcttgctggttttgaacctc

SEQ ID NO: 2264023 - DNA, 25 bp, Homo sapien
ccagccaagtgagatgcaatttttt

SEQ ID NO: 2264024 - DNA, 25 bp, Homo sapien
gatggagtcttgctggttttgaacc

SEQ ID NO: 2264025 - DNA, 25 bp, Homo sapien
taaagagaagttgcgggatgacagc

SEQ ID NO: 2264026 - DNA, 25 bp, Homo sapien
tttaaatagggtggcttggacagcc

SEQ ID NO: 2264027 - DNA, 25 bp, Homo sapien
caggactggattgtagcccaggata

SEQ ID NO: 2264028 - DNA, 25 bp, Homo sapien
taataaagagaaggacgtgtgaggc

SEQ ID NO: 2264029 - DNA, 25 bp, Homo sapien
gggaaatccctcagaaatggatgga

SEQ ID NO: 2264030 - DNA, 25 bp, Homo sapien
taatgacaactaagccacaggaaaa

SEQ ID NO: 2264031 - DNA, 25 bp, Homo sapien
taagggagatggttgaaaatactac

SEQ ID NO: 2264032 - DNA, 25 bp, Homo sapien
catatgataatgacaactaagccac

SEQ ID NO: 2264033 - DNA, 25 bp, Homo sapien
acgcaaagtgggacctcgctccatt

SEQ ID NO: 2264034 - DNA, 25 bp, Homo sapien
aaggatggacgcactgcctacaagg

SEQ ID NO: 2264035 - DNA, 25 bp, Homo sapien
tgcctacaaggagacgcaaagtggg

SEQ ID NO: 2264036 - DNA, 25 bp, Homo sapien
ctgccctagggaaggatggacgcac

SEQ ID NO: 2264037 - DNA, 25 bp, Homo sapien
aaacggggggcccaaagcgctgcat

SEQ ID NO: 2264038 - DNA, 25 bp, Homo sapien
caagaaagttgatgacggaaattcg

SEQ ID NO: 2264039 - DNA, 25 bp, Homo sapien
ggtcaagaaagttgatgacggaaat

SEQ ID NO: 2264040 - DNA, 25 bp, Homo sapien
aagctggtcaagaaagttgatgacg

SEQ ID NO: 2264041 - DNA, 25 bp, Homo sapien
catgggcgatttccgcctccaaggg

SEQ ID NO: 2264042 - DNA, 25 bp, Homo sapien
gacccatgggcgatttccgcctcca

SEQ ID NO: 2264043 - DNA, 25 bp, Homo sapien
ggacccatgggcgatttccgcctcc

SEQ ID NO: 2264044 - DNA, 25 bp, Homo sapien
cccatgggcgatttccgcctccaag

SEQ ID NO: 2264045 - DNA, 25 bp, Homo sapien
gcagacgcggcgtctctgcccggac

SEQ ID NO: 2264046 - DNA, 25 bp, Homo sapien
tgtgcggccgcattcgtgaccccct

SEQ ID NO: 2264047 - DNA, 25 bp, Homo sapien
tggcgcagacgcggcgtctctgccc

SEQ ID NO: 2264048 - DNA, 25 bp, Homo sapien
attcgtgaccccctggcgcagacgc

SEQ ID NO: 2264049 - DNA, 25 bp, Homo sapien
ggtgcaaactgacccacagtcggtc

SEQ ID NO: 2264050 - DNA, 25 bp, Homo sapien
tgactggcgcgtggtcagttcccgc

SEQ ID NO: 2264051 - DNA, 25 bp, Homo sapien
tttcgcgcgtaactcgattccagag

SEQ ID NO: 2264052 - DNA, 25 bp, Homo sapien
agaaactctgccctttcgcgcgtaa

SEQ ID NO: 2264053 - DNA, 25 bp, Homo sapien
caccagctgatccattgccagggaa

SEQ ID NO: 2264054 - DNA, 25 bp, Homo sapien
tgggaaacgacaccaaaagcacctc

SEQ ID NO: 2264055 - DNA, 25 bp, Homo sapien
caggcccgggcagatctattggagc

SEQ ID NO: 2264056 - DNA, 25 bp, Homo sapien
attgtagtcacaccatggccgcagg

SEQ ID NO: 2264057 - DNA, 25 bp, Homo sapien
gcatggcccctgtagtggacagctg

SEQ ID NO: 2264058 - DNA, 25 bp, Homo sapien
ctgtagtggacagctgccatttgcg

SEQ ID NO: 2264059 - DNA, 25 bp, Homo sapien
gccatttgcggccaccattgaggat

SEQ ID NO: 2264060 - DNA, 25 bp, Homo sapien
tggccctgatctgacacatgcatgg

SEQ ID NO: 2264061 - DNA, 25 bp, Homo sapien
aagagtgtttatttgctgggggcat

SEQ ID NO: 2264062 - DNA, 25 bp, Homo sapien
gacagcagaggtggtacacagagaa

SEQ ID NO: 2264063 - DNA, 25 bp, Homo sapien
atttgctgggggcatctgagacagc

SEQ ID NO: 2264064 - DNA, 25 bp, Homo sapien
aggtggtggcctgggatgtagcaga

SEQ ID NO: 2264065 - DNA, 25 bp, Homo sapien
taaaccaatgattggatatcagaaa

SEQ ID NO: 2264066 - DNA, 25 bp, Homo sapien
aattgcctttattgttaaaccaatg

SEQ ID NO: 2264067 - DNA, 25 bp, Homo sapien
cagaaacagcctagctaatatagct

SEQ ID NO: 2264068 - DNA, 25 bp, Homo sapien
aaacagcctagctaatatagctcct

SEQ ID NO: 2264069 - DNA, 25 bp, Homo sapien
tcagaagccgctggattccgactgg

SEQ ID NO: 2264070 - DNA, 25 bp, Homo sapien
gatatgttcatcttccacagggagg

SEQ ID NO: 2264071 - DNA, 25 bp, Homo sapien
tgttggacccgccagaagtcaggtg

SEQ ID NO: 2264072 - DNA, 25 bp, Homo sapien
tgtggaagcaaacccaggtcaagct

SEQ ID NO: 2264073 - DNA, 25 bp, Homo sapien
ggtagcctggcgttgggcacctccc

SEQ ID NO: 2264074 - DNA, 25 bp, Homo sapien
ctgcaacaggagaacacacttagtg

SEQ ID NO: 2264075 - DNA, 25 bp, Homo sapien
aacacacttagtgcgacatgcagcg

SEQ ID NO: 2264076 - DNA, 25 bp, Homo sapien
ggcacctccccatgctccgagaatt

SEQ ID NO: 2264077 - DNA, 25 bp, Homo sapien
gtctcagtcacttcagggtgcagga

SEQ ID NO: 2264078 - DNA, 25 bp, Homo sapien
tttggagaagcccttctccattgtc

SEQ ID NO: 2264079 - DNA, 25 bp, Homo sapien
tcagtcacttcagggtgcaggaagc

SEQ ID NO: 2264080 - DNA, 25 bp, Homo sapien
aagcccttctccattgtctcagtca

SEQ ID NO: 2264081 - DNA, 25 bp, Homo sapien
cgttcgatgtcgtccagcgtcaggc

SEQ ID NO: 2264082 - DNA, 25 bp, Homo sapien
ctgctggcatctgccgcactgaagt

SEQ ID NO: 2264083 - DNA, 25 bp, Homo sapien
ggccaagactttggagatcagctgc

SEQ ID NO: 2264084 - DNA, 25 bp, Homo sapien
actgaagtggcgggccaagactttg

SEQ ID NO: 2264085 - DNA, 25 bp, Homo sapien
tggcatctgccgcactgaagtggcg

SEQ ID NO: 2264086 - DNA, 25 bp, Homo sapien
gctataatccgagagtcgtttccca

SEQ ID NO: 2264087 - DNA, 25 bp, Homo sapien
gaccactaggttgagcttggagttg

SEQ ID NO: 2264088 - DNA, 25 bp, Homo sapien
gcctcgccttcttctagtagcacct

SEQ ID NO: 2264089 - DNA, 25 bp, Homo sapien
gagttgggcccgatgctataatccg

SEQ ID NO: 2264090 - DNA, 25 bp, Homo sapien
gacagatcgatgggttcctcctcct

SEQ ID NO: 2264091 - DNA, 25 bp, Homo sapien
aaagacagatcgatgggttcctcct

SEQ ID NO: 2264092 - DNA, 25 bp, Homo sapien
caaagacagatcgatgggttcctcc

SEQ ID NO: 2264093 - DNA, 25 bp, Homo sapien
ggctgtgaggcatgcggccgcctcc

SEQ ID NO: 2264094 - DNA, 25 bp, Homo sapien
ggcatccggctgtgaggcatgcggc

SEQ ID NO: 2264095 - DNA, 25 bp, Homo sapien
tgcggcatccggctgtgaggcatgc

SEQ ID NO: 2264096 - DNA, 25 bp, Homo sapien
catccggctgtgaggcatgcggccg

SEQ ID NO: 2264097 - DNA, 25 bp, Homo sapien
tgcggggctccccgggcgtctcctc

SEQ ID NO: 2264098 - DNA, 25 bp, Homo sapien
cgcactgggacgttcagcttctcgg

SEQ ID NO: 2264099 - DNA, 25 bp, Homo sapien
gccgctgctggcgcactgggacgtt

SEQ ID NO: 2264100 - DNA, 25 bp, Homo sapien
agctgcttcagcgtggacaccagct

SEQ ID NO: 2264101 - DNA, 25 bp, Homo sapien
actgggacgttcagcttctcggaga

SEQ ID NO: 2264102 - DNA, 25 bp, Homo sapien
tgcagcgccttcaccgtcagctgca

SEQ ID NO: 2264103 - DNA, 25 bp, Homo sapien
gcagcgccttcaccgtcagctgcat

SEQ ID NO: 2264104 - DNA, 25 bp, Homo sapien
gacggcgtccactcgggccggcgcg

SEQ ID NO: 2264105 - DNA, 25 bp, Homo sapien
ggtcgcgacggcgtccactcgggcc

SEQ ID NO: 2264106 - DNA, 25 bp, Homo sapien
tcgcgacggcgtccactcgggccgg

SEQ ID NO: 2264107 - DNA, 25 bp, Homo sapien
ggcggtcgcgacggcgtccactcgg

SEQ ID NO: 2264108 - DNA, 25 bp, Homo sapien
ctgatgaaagcttgacccagaggcc

SEQ ID NO: 2264109 - DNA, 25 bp, Homo sapien
gcgcccacctacctaactcagcatg

SEQ ID NO: 2264110 - DNA, 25 bp, Homo sapien
gaaatatattttctgggcagcgccc

SEQ ID NO: 2264111 - DNA, 25 bp, Homo sapien
gctggggctgatgaaagcttgaccc

SEQ ID NO: 2264112 - DNA, 25 bp, Homo sapien
tggcagccaccgtagagaggaaagt

SEQ ID NO: 2264113 - DNA, 25 bp, Homo sapien
tctccgctcctcaatcagtgtgggc

SEQ ID NO: 2264114 - DNA, 25 bp, Homo sapien
tgaggaaagcgtacaagggcatgac

SEQ ID NO: 2264115 - DNA, 25 bp, Homo sapien
cagtacgatgggtagccggatgcct

SEQ ID NO: 2264116 - DNA, 25 bp, Homo sapien
cctgagtggatgctcaccacaaagc

SEQ ID NO: 2264117 - DNA, 25 bp, Homo sapien
tgagtggatgctcaccacaaagcca

SEQ ID NO: 2264118 - DNA, 25 bp, Homo sapien
aggcctgagtggatgctcaccacaa

SEQ ID NO: 2264119 - DNA, 25 bp, Homo sapien
ggcctgagtggatgctcaccacaaa

SEQ ID NO: 2264120 - DNA, 25 bp, Homo sapien
cccagtcggtggcacggtgtgaccc

SEQ ID NO: 2264121 - DNA, 25 bp, Homo sapien
aggcgccgtcctgttggcctggcct

SEQ ID NO: 2264122 - DNA, 25 bp, Homo sapien
gatcacgatgatgccctcactgtcc

SEQ ID NO: 2264123 - DNA, 25 bp, Homo sapien
aatgctcaagtagcggcccccagtc

SEQ ID NO: 2264124 - DNA, 25 bp, Homo sapien
tgcccttgtcctgcattaacaccat

SEQ ID NO: 2264125 - DNA, 25 bp, Homo sapien
gcttaagggacctgtgccaccaccc

SEQ ID NO: 2264126 - DNA, 25 bp, Homo sapien
ctgcccttgtcctgcattaacacca

SEQ ID NO: 2264127 - DNA, 25 bp, Homo sapien
ggagaacatccccactggtgctgtt

SEQ ID NO: 2264128 - DNA, 25 bp, Homo sapien
gacggatggcgtgcccaggccctct

SEQ ID NO: 2264129 - DNA, 25 bp, Homo sapien
cccactggtgctgttgggttgtcct

SEQ ID NO: 2264130 - DNA, 25 bp, Homo sapien
cctggaggacggatggcgtgcccag

SEQ ID NO: 2264131 - DNA, 25 bp, Homo sapien
agtacaggagctaagatgaaggcac

SEQ ID NO: 2264132 - DNA, 25 bp, Homo sapien
tcttacctctgaagagggaggcagg

SEQ ID NO: 2264133 - DNA, 25 bp, Homo sapien
tttgagcagatgcacccacaaggca

SEQ ID NO: 2264134 - DNA, 25 bp, Homo sapien
gctggcggctctgagtcactccaag

SEQ ID NO: 2264135 - DNA, 25 bp, Homo sapien
gaagttgtcggacgggtggctagca

SEQ ID NO: 2264136 - DNA, 25 bp, Homo sapien
tgtcggacgggtggctagcagagct

SEQ ID NO: 2264137 - DNA, 25 bp, Homo sapien
cggaagttgtcggacgggtggctag

SEQ ID NO: 2264138 - DNA, 25 bp, Homo sapien
gttgtcggacgggtggctagcagag

SEQ ID NO: 2264139 - DNA, 25 bp, Homo sapien
gccgccgtcccacagccggcgaccc

SEQ ID NO: 2264140 - DNA, 25 bp, Homo sapien
aggaagggcacgccgccgtcccaca

SEQ ID NO: 2264141 - DNA, 25 bp, Homo sapien
cgctcgggccgtctcggagtctggg

SEQ ID NO: 2264142 - DNA, 25 bp, Homo sapien
cgccgtcccacagccggcgacccgc

SEQ ID NO: 2264143 - DNA, 25 bp, Homo sapien
cgccaggcctcgcaaacgcgcggcg

SEQ ID NO: 2264144 - DNA, 25 bp, Homo sapien
gccgggcgcccgagtgggcgatcgc

SEQ ID NO: 2264145 - DNA, 25 bp, Homo sapien
gcggccccgccaggcctcgcaaacg

SEQ ID NO: 2264146 - DNA, 25 bp, Homo sapien
tgggcgatcgcggagcagggtcggg

SEQ ID NO: 2264147 - DNA, 25 bp, Homo sapien
gccaccgcgcagcttagctgcagcg

SEQ ID NO: 2264148 - DNA, 25 bp, Homo sapien
acagccaccgcgcagcttagctgca

SEQ ID NO: 2264149 - DNA, 25 bp, Homo sapien
cagccaccgcgcagcttagctgcag

SEQ ID NO: 2264150 - DNA, 25 bp, Homo sapien
ccaccgcgcagcttagctgcagcgt

SEQ ID NO: 2264151 - DNA, 25 bp, Homo sapien
agtcgcccgcgagctcggcctgtca

SEQ ID NO: 2264152 - DNA, 25 bp, Homo sapien
tcgcccgcgagctcggcctgtcagg

SEQ ID NO: 2264153 - DNA, 25 bp, Homo sapien
ctggcaggcagtcgcccgcgagctc

SEQ ID NO: 2264154 - DNA, 25 bp, Homo sapien
gcagtcgcccgcgagctcggcctgt

SEQ ID NO: 2264155 - DNA, 25 bp, Homo sapien
tgatggagtcggaggtatttgcccc

SEQ ID NO: 2264156 - DNA, 25 bp, Homo sapien
ctcttgtcaagactgtgatggagtc

SEQ ID NO: 2264157 - DNA, 25 bp, Homo sapien
ttgtcaagactgtgatggagtcgga

SEQ ID NO: 2264158 - DNA, 25 bp, Homo sapien
ccccgggtaggtgcacaagacgcat

SEQ ID NO: 2264159 - DNA, 25 bp, Homo sapien
agtggcttttcacggagcgatccta

SEQ ID NO: 2264160 - DNA, 25 bp, Homo sapien
gatgctgagtttagtggagacacca

SEQ ID NO: 2264161 - DNA, 25 bp, Homo sapien
cagtggcttttcacggagcgatcct

SEQ ID NO: 2264162 - DNA, 25 bp, Homo sapien
tttagtggagacaccagatcagaat

SEQ ID NO: 2264163 - DNA, 25 bp, Homo sapien
tgctgagctttttgtggacacctga

SEQ ID NO: 2264164 - DNA, 25 bp, Homo sapien
cacctggcctagcatggaagtttta

SEQ ID NO: 2264165 - DNA, 25 bp, Homo sapien
ggcctagcatggaagttttaacctg

SEQ ID NO: 2264166 - DNA, 25 bp, Homo sapien
cctgatcggcctggcatactacagc

SEQ ID NO: 2264167 - DNA, 25 bp, Homo sapien
ctcctctttgggaagtcaggcaggc

SEQ ID NO: 2264168 - DNA, 25 bp, Homo sapien
ggaagtcaggcaggctgtgctccat

SEQ ID NO: 2264169 - DNA, 25 bp, Homo sapien
tttgggaagtcaggcaggctgtgct

SEQ ID NO: 2264170 - DNA, 25 bp, Homo sapien
tgggaagtcaggcaggctgtgctcc

SEQ ID NO: 2264171 - DNA, 25 bp, Homo sapien
ttaaccgtaacctgggagagacgca

SEQ ID NO: 2264172 - DNA, 25 bp, Homo sapien
tgagtcacatctcagtcgcagcggg

SEQ ID NO: 2264173 - DNA, 25 bp, Homo sapien
gacaaaaggctgtctgctcgggctg

SEQ ID NO: 2264174 - DNA, 25 bp, Homo sapien
tcaaaggcagccgaagtctgtgggc

SEQ ID NO: 2264175 - DNA, 25 bp, Homo sapien
tgggctcccgtgacaaagtgcggca

SEQ ID NO: 2264176 - DNA, 25 bp, Homo sapien
ttggctcactggaaggaatcacact

SEQ ID NO: 2264177 - DNA, 25 bp, Homo sapien
ggaaacatgtttagcccgcagtgca

SEQ ID NO: 2264178 - DNA, 25 bp, Homo sapien
caaaccgcgggactgtgatcgggct

SEQ ID NO: 2264179 - DNA, 25 bp, Homo sapien
ttctccgcgggatacagccttccat

SEQ ID NO: 2264180 - DNA, 25 bp, Homo sapien
agccttccatctccagcgcctcggg

SEQ ID NO: 2264181 - DNA, 25 bp, Homo sapien
ctagctggccgtgcttctccgcggg

SEQ ID NO: 2264182 - DNA, 25 bp, Homo sapien
gggcagccttcgtacttgttgctgt

SEQ ID NO: 2264183 - DNA, 25 bp, Homo sapien
ccttggccccgacaaacacccagct

SEQ ID NO: 2264184 - DNA, 25 bp, Homo sapien
cagctgtcccggaaggccagctcct

SEQ ID NO: 2264185 - DNA, 25 bp, Homo sapien
tgcacacccttggccccgacaaaca

SEQ ID NO: 2264186 - DNA, 25 bp, Homo sapien
ccccgacaaacacccagctgtcccg

SEQ ID NO: 2264187 - DNA, 25 bp, Homo sapien
aaggggtgtcagctgttgctgcaga

SEQ ID NO: 2264188 - DNA, 25 bp, Homo sapien
tgtcagctgttgctgcagaagggca

SEQ ID NO: 2264189 - DNA, 25 bp, Homo sapien
aggaaggggtgtcagctgttgctgc

SEQ ID NO: 2264190 - DNA, 25 bp, Homo sapien
tgaggctggcctccccaagcaccta

SEQ ID NO: 2264191 - DNA, 25 bp, Homo sapien
ccttcgtgcagtggccgaataaact

SEQ ID NO: 2264192 - DNA, 25 bp, Homo sapien
gaacaccagggtgccttcgtgcagt

SEQ ID NO: 2264193 - DNA, 25 bp, Homo sapien
gtcgtaggatgccacgaacaccagg

SEQ ID NO: 2264194 - DNA, 25 bp, Homo sapien
aataaacttcaacaggtcgttgaca

SEQ ID NO: 2264195 - DNA, 25 bp, Homo sapien
cactgagcaccctcccacaagcccg

SEQ ID NO: 2264196 - DNA, 25 bp, Homo sapien
tgagcaccctcccacaagcccgttc

SEQ ID NO: 2264197 - DNA, 25 bp, Homo sapien
agcaccctcccacaagcccgttctc

SEQ ID NO: 2264198 - DNA, 25 bp, Homo sapien
actgagcaccctcccacaagcccgt

SEQ ID NO: 2264199 - DNA, 25 bp, Homo sapien
gggcctcgatgagctcgccgctgac

SEQ ID NO: 2264200 - DNA, 25 bp, Homo sapien
ctccggcccacatgtcaaaggcccg

SEQ ID NO: 2264201 - DNA, 25 bp, Homo sapien
aaaggcccgggcctcgatgagctcg

SEQ ID NO: 2264202 - DNA, 25 bp, Homo sapien
cggcccacatgtcaaaggcccgggc

SEQ ID NO: 2264203 - DNA, 25 bp, Homo sapien
agggcgatgttcagcccgcggccca

SEQ ID NO: 2264204 - DNA, 25 bp, Homo sapien
gcggcccacgttgtccttgacgctg

SEQ ID NO: 2264205 - DNA, 25 bp, Homo sapien
ccacgttgtccttgacgctgctcat

SEQ ID NO: 2264206 - DNA, 25 bp, Homo sapien
cgttgtccttgacgctgctcatcag

SEQ ID NO: 2264207 - DNA, 25 bp, Homo sapien
aggcagatcttgggcccaatgacgt

SEQ ID NO: 2264208 - DNA, 25 bp, Homo sapien
acacttgtacttcctggcccgtggc

SEQ ID NO: 2264209 - DNA, 25 bp, Homo sapien
atgacgttggcggccccgctgacca

SEQ ID NO: 2264210 - DNA, 25 bp, Homo sapien
cacttgtacttcctggcccgtggcg

SEQ ID NO: 2264211 - DNA, 25 bp, Homo sapien
tgggcagggatagcaggtgttatcc

SEQ ID NO: 2264212 - DNA, 25 bp, Homo sapien
cagggatagcaggtgttatccatgg

SEQ ID NO: 2264213 - DNA, 25 bp, Homo sapien
atagcaggtgttatccatgggcctg

SEQ ID NO: 2264214 - DNA, 25 bp, Homo sapien
tagcaggtgttatccatgggcctgg

SEQ ID NO: 2264215 - DNA, 25 bp, Homo sapien
tctgtgtcctactggtgaggccaca

SEQ ID NO: 2264216 - DNA, 25 bp, Homo sapien
ggtagaacaagtgaccgcagagcag

SEQ ID NO: 2264217 - DNA, 25 bp, Homo sapien
gaggtcaggaccagcacacatggta

SEQ ID NO: 2264218 - DNA, 25 bp, Homo sapien
catactctgtgtcctactggtgagg

SEQ ID NO: 2264219 - DNA, 25 bp, Homo sapien
tctaggaagcgtctgtgggaaaact

SEQ ID NO: 2264220 - DNA, 25 bp, Homo sapien
gaagcaagcatatgagacgcaggaa

SEQ ID NO: 2264221 - DNA, 25 bp, Homo sapien
tgtcccctggacagaacagcaaggc

SEQ ID NO: 2264222 - DNA, 25 bp, Homo sapien
tgttcaagcgtttgccccagagctg

SEQ ID NO: 2264223 - DNA, 25 bp, Homo sapien
tcgggaggctggggcactagaatcg

SEQ ID NO: 2264224 - DNA, 25 bp, Homo sapien
cttgaacccaggaggtagaggttgc

SEQ ID NO: 2264225 - DNA, 25 bp, Homo sapien
cgagattgcaccactgcactccagc

SEQ ID NO: 2264226 - DNA, 25 bp, Homo sapien
agtgaaccgagattgcaccactgca

SEQ ID NO: 2264227 - DNA, 25 bp, Homo sapien
cctccagagaaggataaggcggggt

SEQ ID NO: 2264228 - DNA, 25 bp, Homo sapien
aggataaggcggggtcccacactca

SEQ ID NO: 2264229 - DNA, 25 bp, Homo sapien
ggataaggcggggtcccacactcac

SEQ ID NO: 2264230 - DNA, 25 bp, Homo sapien
cagagaaggataaggcggggtccca

SEQ ID NO: 2264231 - DNA, 25 bp, Homo sapien
actaggaccacaatgcggagagggc

SEQ ID NO: 2264232 - DNA, 25 bp, Homo sapien
tgtgacacccacactgacgactagg

SEQ ID NO: 2264233 - DNA, 25 bp, Homo sapien
tgctggatgcgaggaaagccactgc

SEQ ID NO: 2264234 - DNA, 25 bp, Homo sapien
gatgctgaccacgatccatgtgaca

SEQ ID NO: 2264235 - DNA, 25 bp, Homo sapien
accccagaatgaccccatagccttg

SEQ ID NO: 2264236 - DNA, 25 bp, Homo sapien
ccagaatgaccccatagccttgcat

SEQ ID NO: 2264237 - DNA, 25 bp, Homo sapien
gaaccccagaatgaccccatagcct

SEQ ID NO: 2264238 - DNA, 25 bp, Homo sapien
cagcgaaccccagaatgaccccata

SEQ ID NO: 2264239 - DNA, 25 bp, Homo sapien
acttctcctgctgggttgggaccgc

SEQ ID NO: 2264240 - DNA, 25 bp, Homo sapien
ctcctgctgggttgggaccgccggc

SEQ ID NO: 2264241 - DNA, 25 bp, Homo sapien
ccacttctcctgctgggttgggacc

SEQ ID NO: 2264242 - DNA, 25 bp, Homo sapien
ttctcctgctgggttgggaccgccg

SEQ ID NO: 2264243 - DNA, 25 bp, Homo sapien
gtcaggggcaagcctgtgcgggacc

SEQ ID NO: 2264244 - DNA, 25 bp, Homo sapien
gctgggggcgggcgcgatcggtgct

SEQ ID NO: 2264245 - DNA, 25 bp, Homo sapien
ggggtcaggggcaagcctgtgcggg

SEQ ID NO: 2264246 - DNA, 25 bp, Homo sapien
gggcgggcgcgatcggtgctacgac

SEQ ID NO: 2264247 - DNA, 25 bp, Homo sapien
ggcagggctcctcggaaacgcgcgg

SEQ ID NO: 2264248 - DNA, 25 bp, Homo sapien
caggaggggcctcaggaacccgttg

SEQ ID NO: 2264249 - DNA, 25 bp, Homo sapien
ctggccaggaggggcctcaggaacc

SEQ ID NO: 2264250 - DNA, 25 bp, Homo sapien
tggccaggaggggcctcaggaaccc

SEQ ID NO: 2264251 - DNA, 25 bp, Homo sapien
ggcctgggggctggcgatgcgggcc

SEQ ID NO: 2264252 - DNA, 25 bp, Homo sapien
ggggctggcgatgcgggccgggccg

SEQ ID NO: 2264253 - DNA, 25 bp, Homo sapien
tgggggctggcgatgcgggccgggc

SEQ ID NO: 2264254 - DNA, 25 bp, Homo sapien
ctgggggctggcgatgcgggccggg

SEQ ID NO: 2264255 - DNA, 25 bp, Homo sapien
ccccggagaggacgcaaggcccctg

SEQ ID NO: 2264256 - DNA, 25 bp, Homo sapien
acgcaaggcccctgcgcagggtggc

SEQ ID NO: 2264257 - DNA, 25 bp, Homo sapien
gacgtgggctcggtcagggaggttc

SEQ ID NO: 2264258 - DNA, 25 bp, Homo sapien
tgtccgtggggagacgtgggctcgg

SEQ ID NO: 2264259 - DNA, 25 bp, Homo sapien
cttgcaccctgaggtcagatttgtg

SEQ ID NO: 2264260 - DNA, 25 bp, Homo sapien
gaacctgttccaaagttgatccatg

SEQ ID NO: 2264261 - DNA, 25 bp, Homo sapien
cgtgggaagacgcagatggatctgg

SEQ ID NO: 2264262 - DNA, 25 bp, Homo sapien
cagaattagaacctgttccaaagtt

SEQ ID NO: 2264263 - DNA, 25 bp, Homo sapien
gccagcacggtgactagagcacatg

SEQ ID NO: 2264264 - DNA, 25 bp, Homo sapien
gacaccccaggtatttttgagcact

SEQ ID NO: 2264265 - DNA, 25 bp, Homo sapien
tctatacagagaggagcacacccaa

SEQ ID NO: 2264266 - DNA, 25 bp, Homo sapien
aaagggatgtcaagcctcctgaggc

SEQ ID NO: 2264267 - DNA, 25 bp, Homo sapien
agcagtgaagctctaggaggcaaga

SEQ ID NO: 2264268 - DNA, 25 bp, Homo sapien
tcctcgaagtgttctagtggaggcg

SEQ ID NO: 2264269 - DNA, 25 bp, Homo sapien
gtcgtcctggactagtctgatcacg

SEQ ID NO: 2264270 - DNA, 25 bp, Homo sapien
gcctgtatgtctgggtgtcgtcctg

SEQ ID NO: 2264271 - DNA, 25 bp, Homo sapien
tgttcagggtacagctcgtgttgtt

SEQ ID NO: 2264272 - DNA, 25 bp, Homo sapien
tcagggtacagctcgtgttgttttc

SEQ ID NO: 2264273 - DNA, 25 bp, Homo sapien
gtgttgttttctcgggcttatgtcc

SEQ ID NO: 2264274 - DNA, 25 bp, Homo sapien
ctcgtgttgttttctcgggcttatg

SEQ ID NO: 2264275 - DNA, 25 bp, Homo sapien
tcctagaacccgggccacaagtgca

SEQ ID NO: 2264276 - DNA, 25 bp, Homo sapien
ggccacaagtgcagggaccatagtg

SEQ ID NO: 2264277 - DNA, 25 bp, Homo sapien
ggaccatagtgtctggtttcgccat

SEQ ID NO: 2264278 - DNA, 25 bp, Homo sapien
caagtgcagggaccatagtgtctgg

SEQ ID NO: 2264279 - DNA, 25 bp, Homo sapien
cagggcattgaggttgggaggggtc

SEQ ID NO: 2264280 - DNA, 25 bp, Homo sapien
aatggcagggcattgaggttgggag

SEQ ID NO: 2264281 - DNA, 25 bp, Homo sapien
ggcattgaggttgggaggggtccca

SEQ ID NO: 2264282 - DNA, 25 bp, Homo sapien
ggatttaatggcagggcattgaggt

SEQ ID NO: 2264283 - DNA, 25 bp, Homo sapien
gcttttcttatagcagagaggctgc

SEQ ID NO: 2264284 - DNA, 25 bp, Homo sapien
ctctgggacagacgaatgggcgccc

SEQ ID NO: 2264285 - DNA, 25 bp, Homo sapien
ccagtggccaataagctctgggaca

SEQ ID NO: 2264286 - DNA, 25 bp, Homo sapien
gacaaggaatgtcaagtggcactga

SEQ ID NO: 2264287 - DNA, 25 bp, Homo sapien
cacaggcagattctctcacgtgggt

SEQ ID NO: 2264288 - DNA, 25 bp, Homo sapien
atggtcccggagtcctcccgactcg

SEQ ID NO: 2264289 - DNA, 25 bp, Homo sapien
gaggtcaatggtcccggagtcctcc

SEQ ID NO: 2264290 - DNA, 25 bp, Homo sapien
tcaatggtcccggagtcctcccgac

SEQ ID NO: 2264291 - DNA, 25 bp, Homo sapien
ctgaggtcaatggtcccggagtcct

SEQ ID NO: 2264292 - DNA, 25 bp, Homo sapien
tcagagcttgtgggggttcacccac

SEQ ID NO: 2264293 - DNA, 25 bp, Homo sapien
cctcatactggaaacccactctctt

SEQ ID NO: 2264294 - DNA, 25 bp, Homo sapien
cagctcgtctgcctccgtggggcct

SEQ ID NO: 2264295 - DNA, 25 bp, Homo sapien
tgccctcatactggaaacccactct

SEQ ID NO: 2264296 - DNA, 25 bp, Homo sapien
gctcgtctgcctccgtggggcctcg

SEQ ID NO: 2264297 - DNA, 25 bp, Homo sapien
ggagaggcatgaggtagctccaccc

SEQ ID NO: 2264298 - DNA, 25 bp, Homo sapien
gaggcatgaggtagctccaccctca

SEQ ID NO: 2264299 - DNA, 25 bp, Homo sapien
aggcatgaggtagctccaccctcac

SEQ ID NO: 2264300 - DNA, 25 bp, Homo sapien
gagaggcatgaggtagctccaccct

SEQ ID NO: 2264301 - DNA, 25 bp, Homo sapien
atacgccaggcctcacggagctcgt

SEQ ID NO: 2264302 - DNA, 25 bp, Homo sapien
tgaaaatacgccaggcctcacggag

SEQ ID NO: 2264303 - DNA, 25 bp, Homo sapien
ctgccataaatataggggatgggct

SEQ ID NO: 2264304 - DNA, 25 bp, Homo sapien
cagtggggtgaaaatacgccaggcc

SEQ ID NO: 2264305 - DNA, 25 bp, Homo sapien
cagaagacgtccaggatgaggcgct

SEQ ID NO: 2264306 - DNA, 25 bp, Homo sapien
cgaagtgcatctggctcccgcagaa

SEQ ID NO: 2264307 - DNA, 25 bp, Homo sapien
tcgtaggcgtcagggagcttcacgt

SEQ ID NO: 2264308 - DNA, 25 bp, Homo sapien
tgcgcacgaagtgcatctggctccc

SEQ ID NO: 2264309 - DNA, 25 bp, Homo sapien
tccacactgctccttctctgtaggg

SEQ ID NO: 2264310 - DNA, 25 bp, Homo sapien
cctccacactgctccttctctgtag

SEQ ID NO: 2264311 - DNA, 25 bp, Homo sapien
cacactgctccttctctgtagggca

SEQ ID NO: 2264312 - DNA, 25 bp, Homo sapien
acactgctccttctctgtagggcac

SEQ ID NO: 2264313 - DNA, 25 bp, Homo sapien
tatctgttgccgtaggtcaggtcca

SEQ ID NO: 2264314 - DNA, 25 bp, Homo sapien
aacatgcccggcttcttggtcatca

SEQ ID NO: 2264315 - DNA, 25 bp, Homo sapien
gatgtcgccggccacatcatggaac

SEQ ID NO: 2264316 - DNA, 25 bp, Homo sapien
tgtacacggcctcgttgggctgcac

SEQ ID NO: 2264317 - DNA, 25 bp, Homo sapien
gcggaaagggcagcctcagcaccag

SEQ ID NO: 2264318 - DNA, 25 bp, Homo sapien
ggtgtggaccagtgcgtgagtgtct

SEQ ID NO: 2264319 - DNA, 25 bp, Homo sapien
tgagtgtctcagtgggagctccagt

SEQ ID NO: 2264320 - DNA, 25 bp, Homo sapien
tggaccagtgcgtgagtgtctcagt

SEQ ID NO: 2264321 - DNA, 25 bp, Homo sapien
ttctccacatagaggacgacggctg

SEQ ID NO: 2264322 - DNA, 25 bp, Homo sapien
cattctccacatagaggacgacggc

SEQ ID NO: 2264323 - DNA, 25 bp, Homo sapien
tcattctccacatagaggacgacgg

SEQ ID NO: 2264324 - DNA, 25 bp, Homo sapien
tctccacatagaggacgacggctgc

SEQ ID NO: 2264325 - DNA, 25 bp, Homo sapien
tccaggtaccctttggtggcctcgc

SEQ ID NO: 2264326 - DNA, 25 bp, Homo sapien
cacattgttggcctgcacctctgag

SEQ ID NO: 2264327 - DNA, 25 bp, Homo sapien
cgtactggcccaggaccacattgtt

SEQ ID NO: 2264328 - DNA, 25 bp, Homo sapien
cgcggggcaccgtggggtcgtccag

SEQ ID NO: 2264329 - DNA, 25 bp, Homo sapien
tctcatcacggacgtcatctgagtt

SEQ ID NO: 2264330 - DNA, 25 bp, Homo sapien
catcacggacgtcatctgagttggt

SEQ ID NO: 2264331 - DNA, 25 bp, Homo sapien
cttctcatcacggacgtcatctgag

SEQ ID NO: 2264332 - DNA, 25 bp, Homo sapien
tcatcacggacgtcatctgagttgg

SEQ ID NO: 2264333 - DNA, 25 bp, Homo sapien
cacagcatctgcagtaggtggttct

SEQ ID NO: 2264334 - DNA, 25 bp, Homo sapien
caccagacacagcatctgcagtagg

SEQ ID NO: 2264335 - DNA, 25 bp, Homo sapien
atctgcagtaggtggttctgcatca

SEQ ID NO: 2264336 - DNA, 25 bp, Homo sapien
ctgcagtaggtggttctgcatcacg

SEQ ID NO: 2264337 - DNA, 25 bp, Homo sapien
ccagatggggccgaagatcctgttg

SEQ ID NO: 2264338 - DNA, 25 bp, Homo sapien
aggcgatgttgtcccggttccagat

SEQ ID NO: 2264339 - DNA, 25 bp, Homo sapien
ccttgaaggtgaggataacgcaggc

SEQ ID NO: 2264340 - DNA, 25 bp, Homo sapien
gatcccaaattcatcgaaatagccc

SEQ ID NO: 2264341 - DNA, 25 bp, Homo sapien
cgaagggcttctccacgatgatgcg

SEQ ID NO: 2264342 - DNA, 25 bp, Homo sapien
ggagatgtggttggacagccggtca

SEQ ID NO: 2264343 - DNA, 25 bp, Homo sapien
caggtagtggtcgatgcggtagatc

SEQ ID NO: 2264344 - DNA, 25 bp, Homo sapien
cagccggtcagagctctgcaggtcc

SEQ ID NO: 2264345 - DNA, 25 bp, Homo sapien
gcccggagctgcgttacccccttga

SEQ ID NO: 2264346 - DNA, 25 bp, Homo sapien
agcccggagctgcgttacccccttg

SEQ ID NO: 2264347 - DNA, 25 bp, Homo sapien
tggctcaacaccttccgggaagcct

SEQ ID NO: 2264348 - DNA, 25 bp, Homo sapien
gtggccacctcccgtgccttgtgtt

SEQ ID NO: 2264349 - DNA, 25 bp, Homo sapien
agatgaccctctggctcaacacctt

SEQ ID NO: 2264350 - DNA, 25 bp, Homo sapien
cttgtgttcccagatgaccctctgg

SEQ ID NO: 2264351 - DNA, 25 bp, Homo sapien
gcattgctggcatgctgccgggggc

SEQ ID NO: 2264352 - DNA, 25 bp, Homo sapien
ggtgtttcgtggagcaacgctgcca

SEQ ID NO: 2264353 - DNA, 25 bp, Homo sapien
gggccatgctgcattcgcagagcaa

SEQ ID NO: 2264354 - DNA, 25 bp, Homo sapien
cacgctcatagagtggtgggagcac

SEQ ID NO: 2264355 - DNA, 25 bp, Homo sapien
gatggccccggcaccatggatgctg

SEQ ID NO: 2264356 - DNA, 25 bp, Homo sapien
gaagggagggcaacggcaagcctta

SEQ ID NO: 2264357 - DNA, 25 bp, Homo sapien
aatgttcttggtgacggcctcgtag

SEQ ID NO: 2264358 - DNA, 25 bp, Homo sapien
ttcttggtgacggcctcgtagacgg

SEQ ID NO: 2264359 - DNA, 25 bp, Homo sapien
tcttggtgacggcctcgtagacggt

SEQ ID NO: 2264360 - DNA, 25 bp, Homo sapien
tgttcttggtgacggcctcgtagac

SEQ ID NO: 2264361 - DNA, 25 bp, Homo sapien
gctggtaggaggctgcatcatcgta

SEQ ID NO: 2264362 - DNA, 25 bp, Homo sapien
cagccacataggagttgcgggcaaa

SEQ ID NO: 2264363 - DNA, 25 bp, Homo sapien
catcgtactggccagccacatagga

SEQ ID NO: 2264364 - DNA, 25 bp, Homo sapien
ggagttgcgggcaaagaagtcctcc

SEQ ID NO: 2264365 - DNA, 25 bp, Homo sapien
tgggtcctggtcacgggggctggta

SEQ ID NO: 2264366 - DNA, 25 bp, Homo sapien
ccatgctgggggctggtagagaggg

SEQ ID NO: 2264367 - DNA, 25 bp, Homo sapien
taatgggggtctcaaggaagtacga

SEQ ID NO: 2264368 - DNA, 25 bp, Homo sapien
tctcaaggaagtacgagagcaggcg

SEQ ID NO: 2264369 - DNA, 25 bp, Homo sapien
gggctcactctgtttgcggatgtca

SEQ ID NO: 2264370 - DNA, 25 bp, Homo sapien
tgtcagccactgtgaggcgggaacg

SEQ ID NO: 2264371 - DNA, 25 bp, Homo sapien
cccacgatgaaggtgttttcgggca

SEQ ID NO: 2264372 - DNA, 25 bp, Homo sapien
cgggaacgggcatagcccacgatga

SEQ ID NO: 2264373 - DNA, 25 bp, Homo sapien
gtggggtagatcttcttcttggcca

SEQ ID NO: 2264374 - DNA, 25 bp, Homo sapien
gatggtggggtagatcttcttcttg

SEQ ID NO: 2264375 - DNA, 25 bp, Homo sapien
cagatggtggggtagatcttcttct

SEQ ID NO: 2264376 - DNA, 25 bp, Homo sapien
tggtggggtagatcttcttcttggc

SEQ ID NO: 2264377 - DNA, 25 bp, Homo sapien
tggaatgcagtgttgcgatttctgc

SEQ ID NO: 2264378 - DNA, 25 bp, Homo sapien
gaatgcagtgttgcgatttctgctc

SEQ ID NO: 2264379 - DNA, 25 bp, Homo sapien
gctggaatgcagtgttgcgatttct

SEQ ID NO: 2264380 - DNA, 25 bp, Homo sapien
actacaggtgcccacaccaggcctg

SEQ ID NO: 2264381 - DNA, 25 bp, Homo sapien
tggcagagcccttctccctcggctg

SEQ ID NO: 2264382 - DNA, 25 bp, Homo sapien
gagcccttctccctcggctgcctcc

SEQ ID NO: 2264383 - DNA, 25 bp, Homo sapien
ctcggctgcctcctcattccctttt

SEQ ID NO: 2264384 - DNA, 25 bp, Homo sapien
tcggctgcctcctcattcccttttg

SEQ ID NO: 2264385 - DNA, 25 bp, Homo sapien
cgatgcacccatgatgatgaatatg

SEQ ID NO: 2264386 - DNA, 25 bp, Homo sapien
gaatatgtgtgtatccgactgatgg

SEQ ID NO: 2264387 - DNA, 25 bp, Homo sapien
ccgactgatggaaggcatcgccctg

SEQ ID NO: 2264388 - DNA, 25 bp, Homo sapien
gcacccatgatgatgaatatgtgtg

SEQ ID NO: 2264389 - DNA, 25 bp, Homo sapien
cgcagccccgaagtgtacgaccgtt

SEQ ID NO: 2264390 - DNA, 25 bp, Homo sapien
gcgctcgcagccccgaagtgtacga

SEQ ID NO: 2264391 - DNA, 25 bp, Homo sapien
ctgcgcttcgtcgtcgtcgccctcc

SEQ ID NO: 2264392 - DNA, 25 bp, Homo sapien
cttcgtcgtcgtcgccctccgcgct

SEQ ID NO: 2264393 - DNA, 25 bp, Homo sapien
cggccaccacccctcgtgcgggcgg

SEQ ID NO: 2264394 - DNA, 25 bp, Homo sapien
gacccgcctcaggcgaggcgtgcgg

SEQ ID NO: 2264395 - DNA, 25 bp, Homo sapien
tgcctctcgggcacctgcgctggag

SEQ ID NO: 2264396 - DNA, 25 bp, Homo sapien
gggcgcctgggctgagcggacccgc

SEQ ID NO: 2264397 - DNA, 25 bp, Homo sapien
cacgggtgcagctccgcgtagtgct

SEQ ID NO: 2264398 - DNA, 25 bp, Homo sapien
aattccggcgggcacgggtgcagct

SEQ ID NO: 2264399 - DNA, 25 bp, Homo sapien
gcagctccgcgtagtgctcccgaat

SEQ ID NO: 2264400 - DNA, 25 bp, Homo sapien
tgcatccccaattccggcgggcacg

SEQ ID NO: 2264401 - DNA, 25 bp, Homo sapien
gcgcgctcgcggagggctccacttc

SEQ ID NO: 2264402 - DNA, 25 bp, Homo sapien
agcttccgcgggcctgcagagcctg

SEQ ID NO: 2264403 - DNA, 25 bp, Homo sapien
tcagacttctctccggagcgggatg

SEQ ID NO: 2264404 - DNA, 25 bp, Homo sapien
cagagcctggcggactcagacttct

SEQ ID NO: 2264405 - DNA, 25 bp, Homo sapien
ggcggactcagacttctctccggag

SEQ ID NO: 2264406 - DNA, 25 bp, Homo sapien
tgtctgctcgaaccacttgcctcgg

SEQ ID NO: 2264407 - DNA, 25 bp, Homo sapien
gccagaccgatgtgtatttaaccag

SEQ ID NO: 2264408 - DNA, 25 bp, Homo sapien
gatatggacaccctgcagatacatg

SEQ ID NO: 2264409 - DNA, 25 bp, Homo sapien
tacgcttcagctgttgatccgctgg

SEQ ID NO: 2264410 - DNA, 25 bp, Homo sapien
taccgacgaaaggatggatgcaatg

SEQ ID NO: 2264411 - DNA, 25 bp, Homo sapien
tctgccccttgcttaatgtctctga

SEQ ID NO: 2264412 - DNA, 25 bp, Homo sapien
ccgtgtgcagcagagtaccgacgaa

SEQ ID NO: 2264413 - DNA, 25 bp, Homo sapien
tcggatggatagatcatgttggcct

SEQ ID NO: 2264414 - DNA, 25 bp, Homo sapien
gcaggaactaggtatcgccagaaga

SEQ ID NO: 2264415 - DNA, 25 bp, Homo sapien
caggaactaggtatcgccagaagaa

SEQ ID NO: 2264416 - DNA, 25 bp, Homo sapien
agcaggaactaggtatcgccagaag

SEQ ID NO: 2264417 - DNA, 25 bp, Homo sapien
ttaggacttcctttcttgacttgat

SEQ ID NO: 2264418 - DNA, 25 bp, Homo sapien
tgcctccgcatcctcgtgggccctg

SEQ ID NO: 2264419 - DNA, 25 bp, Homo sapien
tcacgccagggggcggaacttcctg

SEQ ID NO: 2264420 - DNA, 25 bp, Homo sapien
tctgcctccgcatcctcgtgggccc

SEQ ID NO: 2264421 - DNA, 25 bp, Homo sapien
gggggcggaacttcctgcagcctct

SEQ ID NO: 2264422 - DNA, 25 bp, Homo sapien
ttcgacgggcgatgctgatggccca

SEQ ID NO: 2264423 - DNA, 25 bp, Homo sapien
cagggggttcgacgggcgatgctga

SEQ ID NO: 2264424 - DNA, 25 bp, Homo sapien
gcacagggggttcgacgggcgatgc

SEQ ID NO: 2264425 - DNA, 25 bp, Homo sapien
ttcctgatggcccagggggcaatgc

SEQ ID NO: 2264426 - DNA, 25 bp, Homo sapien
tactgaggtgtcatttgcggtgcct

SEQ ID NO: 2264427 - DNA, 25 bp, Homo sapien
gcggtgcctttctttcgaaatgttc

SEQ ID NO: 2264428 - DNA, 25 bp, Homo sapien
tcgaaatgttcggtttctattggaa

SEQ ID NO: 2264429 - DNA, 25 bp, Homo sapien
aaatgttcggtttctattggaatct

SEQ ID NO: 2264430 - DNA, 25 bp, Homo sapien
tgcaccccagtcaggagtcattggg

SEQ ID NO: 2264431 - DNA, 25 bp, Homo sapien
aggctggacgttgggctgcacccca

SEQ ID NO: 2264432 - DNA, 25 bp, Homo sapien
gatgatggagcgtcctgaccggact

SEQ ID NO: 2264433 - DNA, 25 bp, Homo sapien
cctgctctactgagagggcgaccgt

SEQ ID NO: 2264434 - DNA, 25 bp, Homo sapien
gggttttctgctttcgctgaaccca

SEQ ID NO: 2264435 - DNA, 25 bp, Homo sapien
ggttttctgctttcgctgaacccac

SEQ ID NO: 2264436 - DNA, 25 bp, Homo sapien
tgtggatcagtggtcctagtagaaa

SEQ ID NO: 2264437 - DNA, 25 bp, Homo sapien
ggcactgaactctccttgattcttg

SEQ ID NO: 2264438 - DNA, 25 bp, Homo sapien
gaaatggctcctgcagttgacagct

SEQ ID NO: 2264439 - DNA, 25 bp, Homo sapien
gctgaatttcgagaatcttttaaga

SEQ ID NO: 2264440 - DNA, 25 bp, Homo sapien
gaaatagcaggcgaaacaccaggtc

SEQ ID NO: 2264441 - DNA, 25 bp, Homo sapien
gggagaaatagcaggcgaaacacca

SEQ ID NO: 2264442 - DNA, 25 bp, Homo sapien
ctgggatagagggacgcacggggag

SEQ ID NO: 2264443 - DNA, 25 bp, Homo sapien
tagagggacgcacggggagaaatag

SEQ ID NO: 2264444 - DNA, 25 bp, Homo sapien
tacctaacttgcaaatccaggagtt

SEQ ID NO: 2264445 - DNA, 25 bp, Homo sapien
ccaggagtttctcagatggattcct

SEQ ID NO: 2264446 - DNA, 25 bp, Homo sapien
ttctcagatggattcctcaaggtgg

SEQ ID NO: 2264447 - DNA, 25 bp, Homo sapien
ctcaaggtgggtggaagggtatgca

SEQ ID NO: 2264448 - DNA, 25 bp, Homo sapien
ctgtgaattttcatccggttcccca

SEQ ID NO: 2264449 - DNA, 25 bp, Homo sapien
caatgcacgtctgctgtgaattttc

SEQ ID NO: 2264450 - DNA, 25 bp, Homo sapien
ttccaaacaatgcacgtctgctgtg

SEQ ID NO: 2264451 - DNA, 25 bp, Homo sapien
tttcatccggttccccagctgatgc

SEQ ID NO: 2264452 - DNA, 25 bp, Homo sapien
cactcgtgctgggaccattccctag

SEQ ID NO: 2264453 - DNA, 25 bp, Homo sapien
gaaacaaacatgtaagccgtcctcc

SEQ ID NO: 2264454 - DNA, 25 bp, Homo sapien
tcctccagcgacaaacaatcaggcc

SEQ ID NO: 2264455 - DNA, 25 bp, Homo sapien
gcatgacctaggaaggggcgccagg

SEQ ID NO: 2264456 - DNA, 25 bp, Homo sapien
ggcagaaagcactgcgtgatccaca

SEQ ID NO: 2264457 - DNA, 25 bp, Homo sapien
tgatggagagctgcagttggcggtg

SEQ ID NO: 2264458 - DNA, 25 bp, Homo sapien
ctgcagttggcggtggtctgcagca

SEQ ID NO: 2264459 - DNA, 25 bp, Homo sapien
aagcactgcgtgatccacatcaaca

SEQ ID NO: 2264460 - DNA, 25 bp, Homo sapien
tgctggggtgttcccaggtttctag

SEQ ID NO: 2264461 - DNA, 25 bp, Homo sapien
accctgccacgctgtgaccgccacc

SEQ ID NO: 2264462 - DNA, 25 bp, Homo sapien
taccaggtctctgttctgagaccct

SEQ ID NO: 2264463 - DNA, 25 bp, Homo sapien
gtttctagcagcctgaccgtggggt

SEQ ID NO: 2264464 - DNA, 25 bp, Homo sapien
aagcacccctggcacgggaagcggt

SEQ ID NO: 2264465 - DNA, 25 bp, Homo sapien
tgttgccggacacagtgaactcctt

SEQ ID NO: 2264466 - DNA, 25 bp, Homo sapien
atagtcagtatgttgccggacacag

SEQ ID NO: 2264467 - DNA, 25 bp, Homo sapien
ctgcttccatgggtgtcgcgaaagg

SEQ ID NO: 2264468 - DNA, 25 bp, Homo sapien
tctcctgggccgccagcattgcccc

SEQ ID NO: 2264469 - DNA, 25 bp, Homo sapien
tgggccgccagcattgccccctggg

SEQ ID NO: 2264470 - DNA, 25 bp, Homo sapien
agcatcgcccgtcgaaccccctgtg

SEQ ID NO: 2264471 - DNA, 25 bp, Homo sapien
cctgggccatcagcatcgcccgtcg

SEQ ID NO: 2264472 - DNA, 25 bp, Homo sapien
gcccggctctcagagagaaggtcag

SEQ ID NO: 2264473 - DNA, 25 bp, Homo sapien
ggctccggagcctctgcccggctct

SEQ ID NO: 2264474 - DNA, 25 bp, Homo sapien
ctctgcccggctctcagagagaagg

SEQ ID NO: 2264475 - DNA, 25 bp, Homo sapien
tctgcccggctctcagagagaaggt

SEQ ID NO: 2264476 - DNA, 25 bp, Homo sapien
acacacagctacagcgcgagactcc

SEQ ID NO: 2264477 - DNA, 25 bp, Homo sapien
cgcgagactcctatgtacaagcaca

SEQ ID NO: 2264478 - DNA, 25 bp, Homo sapien
agcgcgagactcctatgtacaagca

SEQ ID NO: 2264479 - DNA, 25 bp, Homo sapien
cagcgcgagactcctatgtacaagc

SEQ ID NO: 2264480 - DNA, 25 bp, Homo sapien
agggaatccgccctctcttgcagag

SEQ ID NO: 2264481 - DNA, 25 bp, Homo sapien
catgtactggatctcctcggccagg

SEQ ID NO: 2264482 - DNA, 25 bp, Homo sapien
cgttcttcttttccaccgctttgca

SEQ ID NO: 2264483 - DNA, 25 bp, Homo sapien
gccttgcagacctcttctatcgaat

SEQ ID NO: 2264484 - DNA, 25 bp, Homo sapien
tgctccaccctcttcttctggcgat

SEQ ID NO: 2264485 - DNA, 25 bp, Homo sapien
cagtgaggacctcctgctccaccct

SEQ ID NO: 2264486 - DNA, 25 bp, Homo sapien
cctgctccaccctcttcttctggcg

SEQ ID NO: 2264487 - DNA, 25 bp, Homo sapien
ctccaccctcttcttctggcgatac

SEQ ID NO: 2264488 - DNA, 25 bp, Homo sapien
ctccatttttttttcagcttcttat

SEQ ID NO: 2264489 - DNA, 25 bp, Homo sapien
ttttttcagcttcttatccagtttc

SEQ ID NO: 2264490 - DNA, 25 bp, Homo sapien
catttttttttcagcttcttatcca

SEQ ID NO: 2264491 - DNA, 25 bp, Homo sapien
ttttcagcttcttatccagtttctc

SEQ ID NO: 2264492 - DNA, 25 bp, Homo sapien
agggtcataaggtttggggcaggca

SEQ ID NO: 2264493 - DNA, 25 bp, Homo sapien
aggagggtcataaggtttggggcag

SEQ ID NO: 2264494 - DNA, 25 bp, Homo sapien
ggacacctggagatggcgggctcct

SEQ ID NO: 2264495 - DNA, 25 bp, Homo sapien
gagggtcataaggtttggggcaggc

SEQ ID NO: 2264496 - DNA, 25 bp, Homo sapien
tcttggaaatgtaagcagtggagtc

SEQ ID NO: 2264497 - DNA, 25 bp, Homo sapien
ctcctttgtgcagtgagggatcttg

SEQ ID NO: 2264498 - DNA, 25 bp, Homo sapien
gcgtcttcctcctttgtgcagtgag

SEQ ID NO: 2264499 - DNA, 25 bp, Homo sapien
gagggatcttggaaatgtaagcagt

SEQ ID NO: 2264500 - DNA, 25 bp, Homo sapien
ggggaagaggttgcaagaaggtgaa

SEQ ID NO: 2264501 - DNA, 25 bp, Homo sapien
gggaagaggttgcaagaaggtgaag

SEQ ID NO: 2264502 - DNA, 25 bp, Homo sapien
ggaagaggttgcaagaaggtgaagg

SEQ ID NO: 2264503 - DNA, 25 bp, Homo sapien
aaggggaagaggttgcaagaaggtg

SEQ ID NO: 2264504 - DNA, 25 bp, Homo sapien
gggttaaactttctgggagatggca

SEQ ID NO: 2264505 - DNA, 25 bp, Homo sapien
tctgggagatggcaaatcgggttca

SEQ ID NO: 2264506 - DNA, 25 bp, Homo sapien
ctttctgggagatggcaaatcgggt

SEQ ID NO: 2264507 - DNA, 25 bp, Homo sapien
taaactttctgggagatggcaaatc

SEQ ID NO: 2264508 - DNA, 25 bp, Homo sapien
atagtctcctggactgggggggctc

SEQ ID NO: 2264509 - DNA, 25 bp, Homo sapien
tagtctcctggactgggggggctcc

SEQ ID NO: 2264510 - DNA, 25 bp, Homo sapien
agtctcctggactgggggggctcct

SEQ ID NO: 2264511 - DNA, 25 bp, Homo sapien
gatcacacgagtcatccaacgtggc

SEQ ID NO: 2264512 - DNA, 25 bp, Homo sapien
ccagaagctcgtctggcatggtttc

SEQ ID NO: 2264513 - DNA, 25 bp, Homo sapien
gtcgaactccttcagatcagttttc

SEQ ID NO: 2264514 - DNA, 25 bp, Homo sapien
tccaacgtggccagaagctcgtctg

SEQ ID NO: 2264515 - DNA, 25 bp, Homo sapien
tcctccttgccatcgttggaggcac

SEQ ID NO: 2264516 - DNA, 25 bp, Homo sapien
gaaagcatcctccttgccatcgttg

SEQ ID NO: 2264517 - DNA, 25 bp, Homo sapien
aaagaaagcatcctccttgccatcg

SEQ ID NO: 2264518 - DNA, 25 bp, Homo sapien
ctgtcccaaagaaagcatcctcctt

SEQ ID NO: 2264519 - DNA, 25 bp, Homo sapien
catgaggtttgaagtgcttggccac

SEQ ID NO: 2264520 - DNA, 25 bp, Homo sapien
cccatgaggtttgaagtgcttggcc

SEQ ID NO: 2264521 - DNA, 25 bp, Homo sapien
gaggtttgaagtgcttggccacctc

SEQ ID NO: 2264522 - DNA, 25 bp, Homo sapien
aacccatgaggtttgaagtgcttgg

SEQ ID NO: 2264523 - DNA, 25 bp, Homo sapien
ttcgaaggtgtctttgtcggttaca

SEQ ID NO: 2264524 - DNA, 25 bp, Homo sapien
aaggtgtctttgtcggttacagcaa

SEQ ID NO: 2264525 - DNA, 25 bp, Homo sapien
gaaggtgtctttgtcggttacagca

SEQ ID NO: 2264526 - DNA, 25 bp, Homo sapien
cgaaggtgtctttgtcggttacagc

SEQ ID NO: 2264527 - DNA, 25 bp, Homo sapien
gcgggcggagcagaaaatcgtcatt

SEQ ID NO: 2264528 - DNA, 25 bp, Homo sapien
gcttttccaggagtataatgcgagt

SEQ ID NO: 2264529 - DNA, 25 bp, Homo sapien
gttgtcagtggatctatgattcggg

SEQ ID NO: 2264530 - DNA, 25 bp, Homo sapien
cgtgcggaggaaactacatctgtgg

SEQ ID NO: 2264531 - DNA, 25 bp, Homo sapien
gccgactcccttccttactccacaa

SEQ ID NO: 2264532 - DNA, 25 bp, Homo sapien
gcggaggatcgtgcttcacactggt

SEQ ID NO: 2264533 - DNA, 25 bp, Homo sapien
gacactgctgcgctcagcggaggat

SEQ ID NO: 2264534 - DNA, 25 bp, Homo sapien
gccctccacgctttccttgagtggg

SEQ ID NO: 2264535 - DNA, 25 bp, Homo sapien
gggagaaggacaggaccgaggaaga

SEQ ID NO: 2264536 - DNA, 25 bp, Homo sapien
agaaggacaggaccgaggaagagag

SEQ ID NO: 2264537 - DNA, 25 bp, Homo sapien
tcagcatgaccagcttcaggacatt

SEQ ID NO: 2264538 - DNA, 25 bp, Homo sapien
tcgtcggtactctgctgcacacgga

SEQ ID NO: 2264539 - DNA, 25 bp, Homo sapien
cactgccgtaagagcattgcatcca

SEQ ID NO: 2264540 - DNA, 25 bp, Homo sapien
gcacatacattatcaggccaacatg

SEQ ID NO: 2264541 - DNA, 25 bp, Homo sapien
ttccagggcaactgaagggcatggc

SEQ ID NO: 2264542 - DNA, 25 bp, Homo sapien
gacaacaaggacaagcgccgtgtgt

SEQ ID NO: 2264543 - DNA, 25 bp, Homo sapien
gaaatcggccatgcaaagatgaggg

SEQ ID NO: 2264544 - DNA, 25 bp, Homo sapien
cagcaggagagggacataacgtgac

SEQ ID NO: 2264545 - DNA, 25 bp, Homo sapien
cacctagggcttcatcggttgccat

SEQ ID NO: 2264546 - DNA, 25 bp, Homo sapien
gtgccggaccacatcgttacatacg

SEQ ID NO: 2264547 - DNA, 25 bp, Homo sapien
tctcttagggttacgcaccagggct

SEQ ID NO: 2264548 - DNA, 25 bp, Homo sapien
gttcacaccaacatgctacaaggca

SEQ ID NO: 2264549 - DNA, 25 bp, Homo sapien
ggagcgcgcatgaacaccagagaac

SEQ ID NO: 2264550 - DNA, 25 bp, Homo sapien
tgttcttgtgcattggtcggcagga

SEQ ID NO: 2264551 - DNA, 25 bp, Homo sapien
taatccaaccagttgttctggaagc

SEQ ID NO: 2264552 - DNA, 25 bp, Homo sapien
tggttccctcccaagagtaatccaa

SEQ ID NO: 2264553 - DNA, 25 bp, Homo sapien
tgcatggtaagagggcagcactccc

SEQ ID NO: 2264554 - DNA, 25 bp, Homo sapien
aacaaaaagagcagcgagtcaggcc

SEQ ID NO: 2264555 - DNA, 25 bp, Homo sapien
ccgaggcaagtggttcgagcagaca

SEQ ID NO: 2264556 - DNA, 25 bp, Homo sapien
ggttaaatacacatcggtctggctg

SEQ ID NO: 2264557 - DNA, 25 bp, Homo sapien
cccaaaagaggggaccagcggatca

SEQ ID NO: 2264558 - DNA, 25 bp, Homo sapien
agctgaagcgtaaggtgccgcggcc

SEQ ID NO: 2264559 - DNA, 25 bp, Homo sapien
gaagcgtaaggtgccgcggccagct

SEQ ID NO: 2264560 - DNA, 25 bp, Homo sapien
ccagcggatcaacagctgaagcgta

SEQ ID NO: 2264561 - DNA, 25 bp, Homo sapien
gcaggcgggagaggaaagcgcagac

SEQ ID NO: 2264562 - DNA, 25 bp, Homo sapien
acggtcccgggcacgtcctcggcag

SEQ ID NO: 2264563 - DNA, 25 bp, Homo sapien
ctgcacggtcccgggcacgtcctcg

SEQ ID NO: 2264564 - DNA, 25 bp, Homo sapien
aggcgggagaggaaagcgcagactg

SEQ ID NO: 2264565 - DNA, 25 bp, Homo sapien
catgacatgtatctgcagggtgtcc

SEQ ID NO: 2264566 - DNA, 25 bp, Homo sapien
gtatctgcagggtgtccatatcagg

SEQ ID NO: 2264567 - DNA, 25 bp, Homo sapien
catgtatctgcagggtgtccatatc

SEQ ID NO: 2264568 - DNA, 25 bp, Homo sapien
ctccatgacatgtatctgcagggtg

SEQ ID NO: 2264569 - DNA, 25 bp, Homo sapien
agggccaggggagaggagaggtagg

SEQ ID NO: 2264570 - DNA, 25 bp, Homo sapien
ggcagggccaggggagaggagaggt

SEQ ID NO: 2264571 - DNA, 25 bp, Homo sapien
cagggccaggggagaggagaggtag

SEQ ID NO: 2264572 - DNA, 25 bp, Homo sapien
gcagggccaggggagaggagaggta

SEQ ID NO: 2264573 - DNA, 25 bp, Homo sapien
gcaggcccagttctcgctcactcac

SEQ ID NO: 2264574 - DNA, 25 bp, Homo sapien
aaggtcgaactgtgacctcccgcgg

SEQ ID NO: 2264575 - DNA, 25 bp, Homo sapien
gagagcaacaggaaggtcgaactgt

SEQ ID NO: 2264576 - DNA, 25 bp, Homo sapien
gctaccgatggggtggcctacacga

SEQ ID NO: 2264577 - DNA, 25 bp, Homo sapien
gtcaagccacgcatttctgtaaagc

SEQ ID NO: 2264578 - DNA, 25 bp, Homo sapien
aagctccttggctggactagtgtca

SEQ ID NO: 2264579 - DNA, 25 bp, Homo sapien
tccttggctggactagtgtcaaagc

SEQ ID NO: 2264580 - DNA, 25 bp, Homo sapien
gaaaacagaaaccgtccagtcaagc

SEQ ID NO: 2264581 - DNA, 25 bp, Homo sapien
ggaagtccgccttgtagatatccgc

SEQ ID NO: 2264582 - DNA, 25 bp, Homo sapien
tcagcctggaagtccgccttgtaga

SEQ ID NO: 2264583 - DNA, 25 bp, Homo sapien
cagcctggaagtccgccttgtagat

SEQ ID NO: 2264584 - DNA, 25 bp, Homo sapien
cctggaagtccgccttgtagatatc

SEQ ID NO: 2264585 - DNA, 25 bp, Homo sapien
accggaacggtctccatcacaatct

SEQ ID NO: 2264586 - DNA, 25 bp, Homo sapien
gctgtttgagatcttccagctgcat

SEQ ID NO: 2264587 - DNA, 25 bp, Homo sapien
cttcagcttatcgatcacctcctgt

SEQ ID NO: 2264588 - DNA, 25 bp, Homo sapien
tgggccttcagcaccggaacggtct

SEQ ID NO: 2264589 - DNA, 25 bp, Homo sapien
agaaggatgaaagagtggccctggc

SEQ ID NO: 2264590 - DNA, 25 bp, Homo sapien
agctgacggagcctcgtcagcccag

SEQ ID NO: 2264591 - DNA, 25 bp, Homo sapien
aaggatgaaagagtggccctggctg

SEQ ID NO: 2264592 - DNA, 25 bp, Homo sapien
ctgacggagcctcgtcagcccaggg

SEQ ID NO: 2264593 - DNA, 25 bp, Homo sapien
caggatctcagcgtgcacagggaga

SEQ ID NO: 2264594 - DNA, 25 bp, Homo sapien
gctgggtgatgccagcccctgattt

SEQ ID NO: 2264595 - DNA, 25 bp, Homo sapien
gcccattgcaggatctcagcgtgca

SEQ ID NO: 2264596 - DNA, 25 bp, Homo sapien
gcccctgatttgagggcccattgca

SEQ ID NO: 2264597 - DNA, 25 bp, Homo sapien
ctgaagaggccgctgaggtcatctg

SEQ ID NO: 2264598 - DNA, 25 bp, Homo sapien
tgtcacggcccaaaacgacagagga

SEQ ID NO: 2264599 - DNA, 25 bp, Homo sapien
ccctccagagattaagtggccagtt

SEQ ID NO: 2264600 - DNA, 25 bp, Homo sapien
agctcagctgagagccctcagtcct

SEQ ID NO: 2264601 - DNA, 25 bp, Homo sapien
gctgagccaggtgccagatggcgat

SEQ ID NO: 2264602 - DNA, 25 bp, Homo sapien
cttggcttgggggaagctgagccag

SEQ ID NO: 2264603 - DNA, 25 bp, Homo sapien
tgagccaggtgccagatggcgatgg

SEQ ID NO: 2264604 - DNA, 25 bp, Homo sapien
ggaagctgagccaggtgccagatgg

SEQ ID NO: 2264605 - DNA, 25 bp, Homo sapien
tgatgtggttgtcgtattcttggaa

SEQ ID NO: 2264606 - DNA, 25 bp, Homo sapien
gatgtggttgtcgtattcttggaag

SEQ ID NO: 2264607 - DNA, 25 bp, Homo sapien
gtggttgtcgtattcttggaagagc

SEQ ID NO: 2264608 - DNA, 25 bp, Homo sapien
cttgatgtggttgtcgtattcttgg

SEQ ID NO: 2264609 - DNA, 25 bp, Homo sapien
ccctgcatgcgcagctggtccacct

SEQ ID NO: 2264610 - DNA, 25 bp, Homo sapien
ctggcgctccatgcggagcgcggcc

SEQ ID NO: 2264611 - DNA, 25 bp, Homo sapien
tggcgctccatgcggagcgcggcct

SEQ ID NO: 2264612 - DNA, 25 bp, Homo sapien
aagaacgtggttgacgtgagcaccc

SEQ ID NO: 2264613 - DNA, 25 bp, Homo sapien
ctttctctagtggtcaggtcggtcc

SEQ ID NO: 2264614 - DNA, 25 bp, Homo sapien
gaagcaggaccgaatgagaaccaca

SEQ ID NO: 2264615 - DNA, 25 bp, Homo sapien
ggatttaggtacctgcctggcagag

SEQ ID NO: 2264616 - DNA, 25 bp, Homo sapien
agagcctggcattccttagtggcag

SEQ ID NO: 2264617 - DNA, 25 bp, Homo sapien
tggcagcctccaagcgactctggct

SEQ ID NO: 2264618 - DNA, 25 bp, Homo sapien
ctgcagctccccgagcaaggacgtc

SEQ ID NO: 2264619 - DNA, 25 bp, Homo sapien
acgtcacctgggctttcacagaggc

SEQ ID NO: 2264620 - DNA, 25 bp, Homo sapien
ctgcaggataaaaagccacttcctg

SEQ ID NO: 2264621 - DNA, 25 bp, Homo sapien
gctttctccccagcggcccactcct

SEQ ID NO: 2264622 - DNA, 25 bp, Homo sapien
actgctttctccccagcggcccact

SEQ ID NO: 2264623 - DNA, 25 bp, Homo sapien
agcactgctttctccccagcggccc

SEQ ID NO: 2264624 - DNA, 25 bp, Homo sapien
tgagcttcccggttgtgactccgtg

SEQ ID NO: 2264625 - DNA, 25 bp, Homo sapien
gctgtcccacactgttgccgaaaga

SEQ ID NO: 2264626 - DNA, 25 bp, Homo sapien
tgccgaaagaaacaggtgccgtctg

SEQ ID NO: 2264627 - DNA, 25 bp, Homo sapien
gtctgcacaactcccctgggcgagg

SEQ ID NO: 2264628 - DNA, 25 bp, Homo sapien
tcaccgcgggttttcagaacctggc

SEQ ID NO: 2264629 - DNA, 25 bp, Homo sapien
gctggcttggaaatgcagaagctcc

SEQ ID NO: 2264630 - DNA, 25 bp, Homo sapien
tggaacttgcacatgaggaactcct

SEQ ID NO: 2264631 - DNA, 25 bp, Homo sapien
cttcagatcgagcttctccaggccg

SEQ ID NO: 2264632 - DNA, 25 bp, Homo sapien
gcagcgctcccgcagaatctggttg

SEQ ID NO: 2264633 - DNA, 25 bp, Homo sapien
ctcctcaccaacctggccactccgg

SEQ ID NO: 2264634 - DNA, 25 bp, Homo sapien
ctgcatgggagcctcgcccattccc

SEQ ID NO: 2264635 - DNA, 25 bp, Homo sapien
accaacctggccactccggcgcccg

SEQ ID NO: 2264636 - DNA, 25 bp, Homo sapien
tgcatgggagcctcgcccattcccc

SEQ ID NO: 2264637 - DNA, 25 bp, Homo sapien
gttactgtgctcctggatcttcatc

SEQ ID NO: 2264638 - DNA, 25 bp, Homo sapien
ctgacagttactgtgctcctggatc

SEQ ID NO: 2264639 - DNA, 25 bp, Homo sapien
ggcttctgcttttgtgcccgtgatg

SEQ ID NO: 2264640 - DNA, 25 bp, Homo sapien
catctttgctccctgggcttctgct

SEQ ID NO: 2264641 - DNA, 25 bp, Homo sapien
cttgtgctacttcaatctgtgaatc

SEQ ID NO: 2264642 - DNA, 25 bp, Homo sapien
tacttcaatctgtgaatcccagagc

SEQ ID NO: 2264643 - DNA, 25 bp, Homo sapien
ttcaatctgtgaatcccagagcctc

SEQ ID NO: 2264644 - DNA, 25 bp, Homo sapien
tgctacttcaatctgtgaatcccag

SEQ ID NO: 2264645 - DNA, 25 bp, Homo sapien
ggcagaaagcactgcgtgatccaca

SEQ ID NO: 2264646 - DNA, 25 bp, Homo sapien
cactcgtgctgggaccattccctag

SEQ ID NO: 2264647 - DNA, 25 bp, Homo sapien
gaaacaaacatgtaagccgtcctcc

SEQ ID NO: 2264648 - DNA, 25 bp, Homo sapien
tcctccagcgacaaacaatcaggcc

SEQ ID NO: 2264649 - DNA, 25 bp, Homo sapien
tgcccctccggggaggcggatccca

SEQ ID NO: 2264650 - DNA, 25 bp, Homo sapien
ctgttctgagaccttgtgtttgggt

SEQ ID NO: 2264651 - DNA, 25 bp, Homo sapien
tctgcccctccggggaggcggatcc

SEQ ID NO: 2264652 - DNA, 25 bp, Homo sapien
ctctgttctgagaccttgtgtttgg

SEQ ID NO: 2264653 - DNA, 25 bp, Homo sapien
gcgccttccctgtcctggtcccgaa

SEQ ID NO: 2264654 - DNA, 25 bp, Homo sapien
tccgcccagcgccttccctgtcctg

SEQ ID NO: 2264655 - DNA, 25 bp, Homo sapien
cagcgccttccctgtcctggtcccg

SEQ ID NO: 2264656 - DNA, 25 bp, Homo sapien
caccctcatccgcccagcgccttcc

SEQ ID NO: 2264657 - DNA, 25 bp, Homo sapien
aacagtaggttgccggacacggtga

SEQ ID NO: 2264658 - DNA, 25 bp, Homo sapien
cttccatgggcgacgagaaaggcat

SEQ ID NO: 2264659 - DNA, 25 bp, Homo sapien
cggcatcccgggacaggatcctgcg

SEQ ID NO: 2264660 - DNA, 25 bp, Homo sapien
tgaagtccttcagaaccgcccctgg

SEQ ID NO: 2264661 - DNA, 25 bp, Homo sapien
aactgaagcaggcggctgtccggcc

SEQ ID NO: 2264662 - DNA, 25 bp, Homo sapien
cggcctcctggccccgcaggggcac

SEQ ID NO: 2264663 - DNA, 25 bp, Homo sapien
gaagcaggcggctgtccggcctcct

SEQ ID NO: 2264664 - DNA, 25 bp, Homo sapien
ccggcctcctggccccgcaggggca

SEQ ID NO: 2264665 - DNA, 25 bp, Homo sapien
gcagaagcggcaccgccatgcggac

SEQ ID NO: 2264666 - DNA, 25 bp, Homo sapien
ctgcgcagaagcggcaccgccatgc

SEQ ID NO: 2264667 - DNA, 25 bp, Homo sapien
cgcagaagcggcaccgccatgcgga

SEQ ID NO: 2264668 - DNA, 25 bp, Homo sapien
agaagcggcaccgccatgcggaccc

SEQ ID NO: 2264669 - DNA, 25 bp, Homo sapien
gggcccacgaggatgcggaggcaga

SEQ ID NO: 2264670 - DNA, 25 bp, Homo sapien
aaggtcagggcccacgaggatgcgg

SEQ ID NO: 2264671 - DNA, 25 bp, Homo sapien
gtcagggcccacgaggatgcggagg

SEQ ID NO: 2264672 - DNA, 25 bp, Homo sapien
tcagggcccacgaggatgcggaggc

SEQ ID NO: 2264673 - DNA, 25 bp, Homo sapien
gtgagcagccggctgtccgccggac

SEQ ID NO: 2264674 - DNA, 25 bp, Homo sapien
ccgtgagcagccggctgtccgccgg

SEQ ID NO: 2264675 - DNA, 25 bp, Homo sapien
tgagcagccggctgtccgccggacc

SEQ ID NO: 2264676 - DNA, 25 bp, Homo sapien
agcagccggctgtccgccggacccc

SEQ ID NO: 2264677 - DNA, 25 bp, Homo sapien
taggccaggtcggcatcatctctca

SEQ ID NO: 2264678 - DNA, 25 bp, Homo sapien
ctaggccaggtcggcatcatctctc

SEQ ID NO: 2264679 - DNA, 25 bp, Homo sapien
aggccaggtcggcatcatctctcac

SEQ ID NO: 2264680 - DNA, 25 bp, Homo sapien
caagagagtctgagcagtgacggag

SEQ ID NO: 2264681 - DNA, 25 bp, Homo sapien
cccgtgtgggtcagtcggcccacga

SEQ ID NO: 2264682 - DNA, 25 bp, Homo sapien
tcgcagaagaagtgggtgatgaggc

SEQ ID NO: 2264683 - DNA, 25 bp, Homo sapien
gctgtaggtgaatgcgttggccaag

SEQ ID NO: 2264684 - DNA, 25 bp, Homo sapien
atagctgcatagaatcataggccac

SEQ ID NO: 2264685 - DNA, 25 bp, Homo sapien
cagatagctgcatagaatcataggc

SEQ ID NO: 2264686 - DNA, 25 bp, Homo sapien
ggcagatagctgcatagaatcatag

SEQ ID NO: 2264687 - DNA, 25 bp, Homo sapien
ctgcatagaatcataggccacggct

SEQ ID NO: 2264688 - DNA, 25 bp, Homo sapien
ccatcagcgagtggccgcccaagaa

SEQ ID NO: 2264689 - DNA, 25 bp, Homo sapien
aaatgcaccagcacctgagtcacca

SEQ ID NO: 2264690 - DNA, 25 bp, Homo sapien
ggcgtcggtagtccactgtgaacat

SEQ ID NO: 2264691 - DNA, 25 bp, Homo sapien
tgttggagatacaggcggcatccat

SEQ ID NO: 2264692 - DNA, 25 bp, Homo sapien
actgggacactagggtcccattccg

SEQ ID NO: 2264693 - DNA, 25 bp, Homo sapien
tgcttggaaccacgcacagaaccct

SEQ ID NO: 2264694 - DNA, 25 bp, Homo sapien
tgtccctcaggcctttcagaagaaa

SEQ ID NO: 2264695 - DNA, 25 bp, Homo sapien
ttccgcagctgcttggaaccacgca

SEQ ID NO: 2264696 - DNA, 25 bp, Homo sapien
ctgtagtatgcaactcagagtcaga

SEQ ID NO: 2264697 - DNA, 25 bp, Homo sapien
tgtagtatgcaactcagagtcagat

SEQ ID NO: 2264698 - DNA, 25 bp, Homo sapien
gtagtatgcaactcagagtcagatg

SEQ ID NO: 2264699 - DNA, 25 bp, Homo sapien
tagtatgcaactcagagtcagatga

SEQ ID NO: 2264700 - DNA, 25 bp, Homo sapien
cagaagtacccagatcagcctcggt

SEQ ID NO: 2264701 - DNA, 25 bp, Homo sapien
ttgggtacacggcagaagtacccag

SEQ ID NO: 2264702 - DNA, 25 bp, Homo sapien
cccagatcagcctcggtgtggtgaa

SEQ ID NO: 2264703 - DNA, 25 bp, Homo sapien
atcagcctcggtgtggtgaagacca

SEQ ID NO: 2264704 - DNA, 25 bp, Homo sapien
tattctctaagctggactctgggtc

SEQ ID NO: 2264705 - DNA, 25 bp, Homo sapien
tctaaagcagaagggagcaattggc

SEQ ID NO: 2264706 - DNA, 25 bp, Homo sapien
ggtgtttcccacatgtctccaaggc

SEQ ID NO: 2264707 - DNA, 25 bp, Homo sapien
taacacaagtgctccacacgaggga

SEQ ID NO: 2264708 - DNA, 25 bp, Homo sapien
cacttggacatagtctactctttgt

SEQ ID NO: 2264709 - DNA, 25 bp, Homo sapien
catccgtccactcctgttttgtgct

SEQ ID NO: 2264710 - DNA, 25 bp, Homo sapien
ttcatccgtccactcctgttttgtg

SEQ ID NO: 2264711 - DNA, 25 bp, Homo sapien
ttctgctcatccacttggacatagt

SEQ ID NO: 2264712 - DNA, 25 bp, Homo sapien
tgcctcggccctggactggagatga

SEQ ID NO: 2264713 - DNA, 25 bp, Homo sapien
ggtattctgtgattctgcaatctct

SEQ ID NO: 2264714 - DNA, 25 bp, Homo sapien
cacacttcagatgggggctgcttct

SEQ ID NO: 2264715 - DNA, 25 bp, Homo sapien
aataaaaaacagccgtgggtgatga

SEQ ID NO: 2264716 - DNA, 25 bp, Homo sapien
tttgtccacgtaagggcaccactgc

SEQ ID NO: 2264717 - DNA, 25 bp, Homo sapien
tccagggccaaataatctaggctga

SEQ ID NO: 2264718 - DNA, 25 bp, Homo sapien
taggctgaatttctttgtccacgta

SEQ ID NO: 2264719 - DNA, 25 bp, Homo sapien
cagggaactggctgttcggtgctcc

SEQ ID NO: 2264720 - DNA, 25 bp, Homo sapien
tttttactcaacatggataacctgg

SEQ ID NO: 2264721 - DNA, 25 bp, Homo sapien
ccctggagagtaatcatttgctatc

SEQ ID NO: 2264722 - DNA, 25 bp, Homo sapien
tgttgcagatagctcatcacagtct

SEQ ID NO: 2264723 - DNA, 25 bp, Homo sapien
agaatgtcttgcgtgatcttgaccc

SEQ ID NO: 2264724 - DNA, 25 bp, Homo sapien
tctactacaggttctataagattca

SEQ ID NO: 2264725 - DNA, 25 bp, Homo sapien
cagattattttgagttatcgcttca

SEQ ID NO: 2264726 - DNA, 25 bp, Homo sapien
ttaccattatctagacagtgaactg

SEQ ID NO: 2264727 - DNA, 25 bp, Homo sapien
cagtgaactggattgtgtatattga

SEQ ID NO: 2264728 - DNA, 25 bp, Homo sapien
agttcttgccagggcagttaggcag

SEQ ID NO: 2264729 - DNA, 25 bp, Homo sapien
ttcttgccagggcagttaggcagga

SEQ ID NO: 2264730 - DNA, 25 bp, Homo sapien
ggaagttcttgccagggcagttagg

SEQ ID NO: 2264731 - DNA, 25 bp, Homo sapien
aagttcttgccagggcagttaggca

SEQ ID NO: 2264732 - DNA, 25 bp, Homo sapien
caggattagcaaaaaatcttgcaga

SEQ ID NO: 2264733 - DNA, 25 bp, Homo sapien
ctctggaaacaggattagcaaaaaa

SEQ ID NO: 2264734 - DNA, 25 bp, Homo sapien
tgtagctttcttcgtcttctctgga

SEQ ID NO: 2264735 - DNA, 25 bp, Homo sapien
gaattaataccatttctttctggag

SEQ ID NO: 2264736 - DNA, 25 bp, Homo sapien
tccggccaaagcaattcctgaagag

SEQ ID NO: 2264737 - DNA, 25 bp, Homo sapien
tggctcccaattcacaaaggctgct

SEQ ID NO: 2264738 - DNA, 25 bp, Homo sapien
tcaggccctctatgtgacacagctc

SEQ ID NO: 2264739 - DNA, 25 bp, Homo sapien
gccaggaactaacatggccctcatg

SEQ ID NO: 2264740 - DNA, 25 bp, Homo sapien
cctggtaagagatgcatgttcccgg

SEQ ID NO: 2264741 - DNA, 25 bp, Homo sapien
cacagtgcgggtcctggtaagagat

SEQ ID NO: 2264742 - DNA, 25 bp, Homo sapien
gatcgagaggtttctcaggtccaga

SEQ ID NO: 2264743 - DNA, 25 bp, Homo sapien
catgttcccggatgatcgagaggtt

SEQ ID NO: 2264744 - DNA, 25 bp, Homo sapien
gagagatcagtcattctaccaatgc

SEQ ID NO: 2264745 - DNA, 25 bp, Homo sapien
tgcttccttgtaatcacacagccaa

SEQ ID NO: 2264746 - DNA, 25 bp, Homo sapien
tggagtagaccaggcatgagtaggg

SEQ ID NO: 2264747 - DNA, 25 bp, Homo sapien
gaagttggaatgcacgagagatcag

SEQ ID NO: 2264748 - DNA, 25 bp, Homo sapien
tctctattcactgggggaggttcca

SEQ ID NO: 2264749 - DNA, 25 bp, Homo sapien
tcaggcaacgggcttgagatgcttc

SEQ ID NO: 2264750 - DNA, 25 bp, Homo sapien
cctgggggctcatgggcacatagct

SEQ ID NO: 2264751 - DNA, 25 bp, Homo sapien
gagttcattggaatgtagtcatcag

SEQ ID NO: 2264752 - DNA, 25 bp, Homo sapien
taagccgcttgtctcggtgtcttaa

SEQ ID NO: 2264753 - DNA, 25 bp, Homo sapien
caaattcaaactaagccgcttgtct

SEQ ID NO: 2264754 - DNA, 25 bp, Homo sapien
tgtctcggtgtcttaaggattggcc

SEQ ID NO: 2264755 - DNA, 25 bp, Homo sapien
gtcttaaggattggccttctacatc

SEQ ID NO: 2264756 - DNA, 25 bp, Homo sapien
cattaagggcccaattgaggtctgt

SEQ ID NO: 2264757 - DNA, 25 bp, Homo sapien
caacagtgttgagtggtgcagagaa

SEQ ID NO: 2264758 - DNA, 25 bp, Homo sapien
cagagaaacgattgccttgtggagc

SEQ ID NO: 2264759 - DNA, 25 bp, Homo sapien
tctgtgaccagaaaagctactcagg

SEQ ID NO: 2264760 - DNA, 25 bp, Homo sapien
cctcttggcgccgttcagacagatg

SEQ ID NO: 2264761 - DNA, 25 bp, Homo sapien
ggcttcttgctaccactgtgtgtac

SEQ ID NO: 2264762 - DNA, 25 bp, Homo sapien
cttggaaccagagtgcattctggct

SEQ ID NO: 2264763 - DNA, 25 bp, Homo sapien
tctcatgttgtctaaaccagagagg

SEQ ID NO: 2264764 - DNA, 25 bp, Homo sapien
aatgaacggtctgagtttgaccagc

SEQ ID NO: 2264765 - DNA, 25 bp, Homo sapien
gatttctctactccagatcagggca

SEQ ID NO: 2264766 - DNA, 25 bp, Homo sapien
tccagcaatggtgaagaagacaagt

SEQ ID NO: 2264767 - DNA, 25 bp, Homo sapien
tgtctagttcttttgctccacaggg

SEQ ID NO: 2264768 - DNA, 25 bp, Homo sapien
ttccagtctcgcagttggacaaaac

SEQ ID NO: 2264769 - DNA, 25 bp, Homo sapien
cttccagtctcgcagttggacaaaa

SEQ ID NO: 2264770 - DNA, 25 bp, Homo sapien
agtcttccagtctcgcagttggaca

SEQ ID NO: 2264771 - DNA, 25 bp, Homo sapien
tgcagtcttccagtctcgcagttgg

SEQ ID NO: 2264772 - DNA, 25 bp, Homo sapien
tggaaggaagagaagctctgactca

SEQ ID NO: 2264773 - DNA, 25 bp, Homo sapien
ggaaggaagagaagctctgactcac

SEQ ID NO: 2264774 - DNA, 25 bp, Homo sapien
ctggaaggaagagaagctctgactc

SEQ ID NO: 2264775 - DNA, 25 bp, Homo sapien
cggcattagtgtttgggtcatctct

SEQ ID NO: 2264776 - DNA, 25 bp, Homo sapien
gaggagggcgtgtaagagaggctct

SEQ ID NO: 2264777 - DNA, 25 bp, Homo sapien
ctggtttcctcagtggctacggcat

SEQ ID NO: 2264778 - DNA, 25 bp, Homo sapien
cagcatgggcggtaagaagggagct

SEQ ID NO: 2264779 - DNA, 25 bp, Homo sapien
catccacatttgactttcactgtgg

SEQ ID NO: 2264780 - DNA, 25 bp, Homo sapien
tcatccacatttgactttcactgtg

SEQ ID NO: 2264781 - DNA, 25 bp, Homo sapien
tctatcacccggatgggcttgctgg

SEQ ID NO: 2264782 - DNA, 25 bp, Homo sapien
ttggccaccaggtagaatgtacggg

SEQ ID NO: 2264783 - DNA, 25 bp, Homo sapien
agacctgactgatgctgtgcaccca

SEQ ID NO: 2264784 - DNA, 25 bp, Homo sapien
tcctgtagtactccaagacatcggg

SEQ ID NO: 2264785 - DNA, 25 bp, Homo sapien
ggaggacaaaccagcgcttgcgcca

SEQ ID NO: 2264786 - DNA, 25 bp, Homo sapien
gccggaggacaaaccagcgcttgcg

SEQ ID NO: 2264787 - DNA, 25 bp, Homo sapien
gaggacaaaccagcgcttgcgccag

SEQ ID NO: 2264788 - DNA, 25 bp, Homo sapien
gcggcctcgccggaggacaaaccag

SEQ ID NO: 2264789 - DNA, 25 bp, Homo sapien
tttgatgtagacagtaccatcttgg

SEQ ID NO: 2264790 - DNA, 25 bp, Homo sapien
tcagtacaaagaaagggtgcagatc

SEQ ID NO: 2264791 - DNA, 25 bp, Homo sapien
caaagaaagggtgcagatctctggc

SEQ ID NO: 2264792 - DNA, 25 bp, Homo sapien
gatgtagacagtaccatcttggctc

SEQ ID NO: 2264793 - DNA, 25 bp, Homo sapien
atttaggtgccctttgttcatcgaa

SEQ ID NO: 2264794 - DNA, 25 bp, Homo sapien
taggtgccctttgttcatcgaaggg

SEQ ID NO: 2264795 - DNA, 25 bp, Homo sapien
tgccctttgttcatcgaagggccag

SEQ ID NO: 2264796 - DNA, 25 bp, Homo sapien
gccctttgttcatcgaagggccaga

SEQ ID NO: 2264797 - DNA, 25 bp, Homo sapien
agttggagttacagatagaacacag

SEQ ID NO: 2264798 - DNA, 25 bp, Homo sapien
gaaaggctttcaagttgaatgtaaa

SEQ ID NO: 2264799 - DNA, 25 bp, Homo sapien
gagacgttggagatggaactagctt

SEQ ID NO: 2264800 - DNA, 25 bp, Homo sapien
tgtaaattgatgagacgttggagat

SEQ ID NO: 2264801 - DNA, 25 bp, Homo sapien
tgtgaaataggaaccaaatactgcc

SEQ ID NO: 2264802 - DNA, 25 bp, Homo sapien
tggccaaagaccctaaaccactgat

SEQ ID NO: 2264803 - DNA, 25 bp, Homo sapien
gccagaactggaagcctctaacagg

SEQ ID NO: 2264804 - DNA, 25 bp, Homo sapien
tataagggtcatagctcaagagatc

SEQ ID NO: 2264805 - DNA, 25 bp, Homo sapien
tcagtgggacgttcttacaaggctc

SEQ ID NO: 2264806 - DNA, 25 bp, Homo sapien
ttgtaacagagggaagtccagggcc

SEQ ID NO: 2264807 - DNA, 25 bp, Homo sapien
gatgggaaggttttcgcccacacac

SEQ ID NO: 2264808 - DNA, 25 bp, Homo sapien
gaaccccgactttgatgtagcacac

SEQ ID NO: 2264809 - DNA, 25 bp, Homo sapien
agcgcggtgtcagcattaagaagaa

SEQ ID NO: 2264810 - DNA, 25 bp, Homo sapien
ctataaaagcgcggtgtcagcatta

SEQ ID NO: 2264811 - DNA, 25 bp, Homo sapien
gcgcggtgtcagcattaagaagaag

SEQ ID NO: 2264812 - DNA, 25 bp, Homo sapien
taaaagcgcggtgtcagcattaaga

SEQ ID NO: 2264813 - DNA, 25 bp, Homo sapien
ctgtagcttcctctcggggggcgac

SEQ ID NO: 2264814 - DNA, 25 bp, Homo sapien
ggcgacttaacgagccagccggtgc

SEQ ID NO: 2264815 - DNA, 25 bp, Homo sapien
tagcgctgtagcttcctctcggggg

SEQ ID NO: 2264816 - DNA, 25 bp, Homo sapien
gtgcacactgcgtcgcccgcactca

SEQ ID NO: 2264817 - DNA, 25 bp, Homo sapien
gccgccgccgcttcctccagctggg

SEQ ID NO: 2264818 - DNA, 25 bp, Homo sapien
cgccgccgccgcttcctccagctgg

SEQ ID NO: 2264819 - DNA, 25 bp, Homo sapien
gcatagttcacggagaaacaaaagc

SEQ ID NO: 2264820 - DNA, 25 bp, Homo sapien
tgtgcatagttcacggagaaacaaa

SEQ ID NO: 2264821 - DNA, 25 bp, Homo sapien
gccatgtgcatagttcacggagaaa

SEQ ID NO: 2264822 - DNA, 25 bp, Homo sapien
tctgccatgtgcatagttcacggag

SEQ ID NO: 2264823 - DNA, 25 bp, Homo sapien
tcttgttctggcctagaggtcagtc

SEQ ID NO: 2264824 - DNA, 25 bp, Homo sapien
tataactgagttttgtccatgctgg

SEQ ID NO: 2264825 - DNA, 25 bp, Homo sapien
gcctgatgggcctggtagttttcca

SEQ ID NO: 2264826 - DNA, 25 bp, Homo sapien
tgagatcaagtactcagaggcagtg

SEQ ID NO: 2264827 - DNA, 25 bp, Homo sapien
gcagagaatggggactcttccaggg

SEQ ID NO: 2264828 - DNA, 25 bp, Homo sapien
ggggcagagaatggggactcttcca

SEQ ID NO: 2264829 - DNA, 25 bp, Homo sapien
agccctgcagtgggggcagagaatg

SEQ ID NO: 2264830 - DNA, 25 bp, Homo sapien
tgggggcagagaatggggactcttc

SEQ ID NO: 2264831 - DNA, 25 bp, Homo sapien
gtggaaacccagagttacaaggtca

SEQ ID NO: 2264832 - DNA, 25 bp, Homo sapien
tttgtgtggaaacccagagttacaa

SEQ ID NO: 2264833 - DNA, 25 bp, Homo sapien
ttttgtgtggaaacccagagttaca

SEQ ID NO: 2264834 - DNA, 25 bp, Homo sapien
tgttgtccaggagcttaagtgaaat

SEQ ID NO: 2264835 - DNA, 25 bp, Homo sapien
acagcatttttattgcttttgaagg

SEQ ID NO: 2264836 - DNA, 25 bp, Homo sapien
agcatttttattgcttttgaaggtt

SEQ ID NO: 2264837 - DNA, 25 bp, Homo sapien
acacagcatttttattgcttttgaa

SEQ ID NO: 2264838 - DNA, 25 bp, Homo sapien
cacagcatttttattgcttttgaag

SEQ ID NO: 2264839 - DNA, 25 bp, Homo sapien
gacatcattctattgcacagatgtg

SEQ ID NO: 2264840 - DNA, 25 bp, Homo sapien
cagacatcattctattgcacagatg

SEQ ID NO: 2264841 - DNA, 25 bp, Homo sapien
gcagacatcattctattgcacagat

SEQ ID NO: 2264842 - DNA, 25 bp, Homo sapien
catcattctattgcacagatgtgtc

SEQ ID NO: 2264843 - DNA, 25 bp, Homo sapien
agggatggggtccattgcttttgct

SEQ ID NO: 2264844 - DNA, 25 bp, Homo sapien
aaggagggcaggctttagagggatg

SEQ ID NO: 2264845 - DNA, 25 bp, Homo sapien
gacaaatgaaatacccagcatatac

SEQ ID NO: 2264846 - DNA, 25 bp, Homo sapien
tacccagcatatacagttgaaggca

SEQ ID NO: 2264847 - DNA, 25 bp, Homo sapien
gagcagccctgtttgtcttaaagca

SEQ ID NO: 2264848 - DNA, 25 bp, Homo sapien
gacacaaaactagttggagcagccc

SEQ ID NO: 2264849 - DNA, 25 bp, Homo sapien
gaagactgaaccttactggctgaat

SEQ ID NO: 2264850 - DNA, 25 bp, Homo sapien
ggagaatcaacccttcaggagcctg

SEQ ID NO: 2264851 - DNA, 25 bp, Homo sapien
tgtggagaactgcacgcttggtcga

SEQ ID NO: 2264852 - DNA, 25 bp, Homo sapien
tcaaagtagtgagcgtactggctgc

SEQ ID NO: 2264853 - DNA, 25 bp, Homo sapien
actggctgcggatggcctcagagtc

SEQ ID NO: 2264854 - DNA, 25 bp, Homo sapien
caacaccattattgaccagtgagag

SEQ ID NO: 2264855 - DNA, 25 bp, Homo sapien
tctgctgtccgaacaattttcaggg

SEQ ID NO: 2264856 - DNA, 25 bp, Homo sapien
acaatgaaaggcgaaagttctgctg

SEQ ID NO: 2264857 - DNA, 25 bp, Homo sapien
tgagtgccctggtcagtaggtgcaa

SEQ ID NO: 2264858 - DNA, 25 bp, Homo sapien
cctggtcagtaggtgcaatgaacac

SEQ ID NO: 2264859 - DNA, 25 bp, Homo sapien
tcataatggattccttctaataagc

SEQ ID NO: 2264860 - DNA, 25 bp, Homo sapien
aaacctacatagctgtcataatgga

SEQ ID NO: 2264861 - DNA, 25 bp, Homo sapien
aagcagctttgagctttaccccaat

SEQ ID NO: 2264862 - DNA, 25 bp, Homo sapien
tcccagtactactgttcttgttcca

SEQ ID NO: 2264863 - DNA, 25 bp, Homo sapien
tgttcctcgtcatctcctccgttga

SEQ ID NO: 2264864 - DNA, 25 bp, Homo sapien
tggtagctgccaaactccaagaact

SEQ ID NO: 2264865 - DNA, 25 bp, Homo sapien
cctccgttgagataaagtggtactc

SEQ ID NO: 2264866 - DNA, 25 bp, Homo sapien
tttggtgccaaacatgttgccttgg

SEQ ID NO: 2264867 - DNA, 25 bp, Homo sapien
tttcagatggcgagtggtaccagcc

SEQ ID NO: 2264868 - DNA, 25 bp, Homo sapien
ccatgaaaatgagaggcagcctgaa

SEQ ID NO: 2264869 - DNA, 25 bp, Homo sapien
tgtgtacaagaacccaaatccccga

SEQ ID NO: 2264870 - DNA, 25 bp, Homo sapien
tgtatggaaaccctagctgcctttg

SEQ ID NO: 2264871 - DNA, 25 bp, Homo sapien
tctccggattctggctgagcagggc

SEQ ID NO: 2264872 - DNA, 25 bp, Homo sapien
ttcttaatgtggctgcgacccaccc

SEQ ID NO: 2264873 - DNA, 25 bp, Homo sapien
tacacaaacttctccggattctggc

SEQ ID NO: 2264874 - DNA, 25 bp, Homo sapien
ctgagcagggcattcttaatgtggc

SEQ ID NO: 2264875 - DNA, 25 bp, Homo sapien
gaggcaaagcctacatacctgggtt

SEQ ID NO: 2264876 - DNA, 25 bp, Homo sapien
actgccaacaggtgaacatgagttg

SEQ ID NO: 2264877 - DNA, 25 bp, Homo sapien
ggattttcctctctcggcactcaaa

SEQ ID NO: 2264878 - DNA, 25 bp, Homo sapien
cctgggtttgaagcaaggacttact

SEQ ID NO: 2264879 - DNA, 25 bp, Homo sapien
cttgaatgcagggagccgaacgact

SEQ ID NO: 2264880 - DNA, 25 bp, Homo sapien
tcttcctcttgaatgcagggagccg

SEQ ID NO: 2264881 - DNA, 25 bp, Homo sapien
gagccgaacgacttcctcgtaggaa

SEQ ID NO: 2264882 - DNA, 25 bp, Homo sapien
atgcagggagccgaacgacttcctc

SEQ ID NO: 2264883 - DNA, 25 bp, Homo sapien
ttttctgctggttacagagactggg

SEQ ID NO: 2264884 - DNA, 25 bp, Homo sapien
gctttctgtagaatgcgccttctgc

SEQ ID NO: 2264885 - DNA, 25 bp, Homo sapien
gcagcaagcttgtgaagatggattc

SEQ ID NO: 2264886 - DNA, 25 bp, Homo sapien
agagactgggaaacacgtgaatgct

SEQ ID NO: 2264887 - DNA, 25 bp, Homo sapien
gtgcttggccagatatttgtctttg

SEQ ID NO: 2264888 - DNA, 25 bp, Homo sapien
tgactgagccatacttgccactcgc

SEQ ID NO: 2264889 - DNA, 25 bp, Homo sapien
ccaaagggactgcagctcggggctt

SEQ ID NO: 2264890 - DNA, 25 bp, Homo sapien
ctcggggcttcgctaggagctgact

SEQ ID NO: 2264891 - DNA, 25 bp, Homo sapien
cctttttgggatcatagtcaaactg

SEQ ID NO: 2264892 - DNA, 25 bp, Homo sapien
tccttgcaagggatcagattgtcct

SEQ ID NO: 2264893 - DNA, 25 bp, Homo sapien
gatcaatcctgctgactccttggag

SEQ ID NO: 2264894 - DNA, 25 bp, Homo sapien
gctgtcatccttgttgataatctgg

SEQ ID NO: 2264895 - DNA, 25 bp, Homo sapien
ctgtagtgcaggaagacggctttgc

SEQ ID NO: 2264896 - DNA, 25 bp, Homo sapien
acttttaatgagatcattcctttgg

SEQ ID NO: 2264897 - DNA, 25 bp, Homo sapien
aagacggctttgctggttgggaatt

SEQ ID NO: 2264898 - DNA, 25 bp, Homo sapien
cggctttgctggttgggaattactt

SEQ ID NO: 2264899 - DNA, 25 bp, Homo sapien
ctgatccactgaatgatttgtcaca

SEQ ID NO: 2264900 - DNA, 25 bp, Homo sapien
gctgatccactgaatgatttgtcac

SEQ ID NO: 2264901 - DNA, 25 bp, Homo sapien
gtttggaggattataagcttcatgc

SEQ ID NO: 2264902 - DNA, 25 bp, Homo sapien
acaaaaatgctaccagtttggagga

SEQ ID NO: 2264903 - DNA, 25 bp, Homo sapien
caaaaatgctaccagtttggaggat

SEQ ID NO: 2264904 - DNA, 25 bp, Homo sapien
aggattataagcttcatgccccaca

SEQ ID NO: 2264905 - DNA, 25 bp, Homo sapien
tggatcatgccaccatgaagaattc

SEQ ID NO: 2264906 - DNA, 25 bp, Homo sapien
tcatgccaccatgaagaattctggc

SEQ ID NO: 2264907 - DNA, 25 bp, Homo sapien
ccatgaagaattctggccaccgtac

SEQ ID NO: 2264908 - DNA, 25 bp, Homo sapien
tgccaccatgaagaattctggccac

SEQ ID NO: 2264909 - DNA, 25 bp, Homo sapien
tctcaaactgtatgagtcgcacttt

SEQ ID NO: 2264910 - DNA, 25 bp, Homo sapien
cttctcaaactgtatgagtcgcact

SEQ ID NO: 2264911 - DNA, 25 bp, Homo sapien
tcaaactgtatgagtcgcactttcc

SEQ ID NO: 2264912 - DNA, 25 bp, Homo sapien
aactgtatgagtcgcactttccgca

SEQ ID NO: 2264913 - DNA, 25 bp, Homo sapien
gcaggagacccgttggtgtacatgt

SEQ ID NO: 2264914 - DNA, 25 bp, Homo sapien
tgtcctcggtcacagtattcaatgg

SEQ ID NO: 2264915 - DNA, 25 bp, Homo sapien
ccttgacctgggcagggctacctgg

SEQ ID NO: 2264916 - DNA, 25 bp, Homo sapien
tgtcccttgacctgggcagggctac

SEQ ID NO: 2264917 - DNA, 25 bp, Homo sapien
caaagcaacgtatgaaatcaggagc

SEQ ID NO: 2264918 - DNA, 25 bp, Homo sapien
aaacaacaaagcaacgtatgaaatc

SEQ ID NO: 2264919 - DNA, 25 bp, Homo sapien
ttcaagaggctctgaaaacttattt

SEQ ID NO: 2264920 - DNA, 25 bp, Homo sapien
tctaacattcaagaggctctgaaaa

SEQ ID NO: 2264921 - DNA, 25 bp, Homo sapien
tggcctttgttctgcagcctctggc

SEQ ID NO: 2264922 - DNA, 25 bp, Homo sapien
ctggcctttgttctgcagcctctgg

SEQ ID NO: 2264923 - DNA, 25 bp, Homo sapien
tctggcctttgttctgcagcctctg

SEQ ID NO: 2264924 - DNA, 25 bp, Homo sapien
gtctggcctttgttctgcagcctct

SEQ ID NO: 2264925 - DNA, 25 bp, Homo sapien
cagaaggtgccgcactcggcatgca

SEQ ID NO: 2264926 - DNA, 25 bp, Homo sapien
gcactcggcatgcaccttggtgtcc

SEQ ID NO: 2264927 - DNA, 25 bp, Homo sapien
cttggtgtccgtgcacaggctgttc

SEQ ID NO: 2264928 - DNA, 25 bp, Homo sapien
tcaacctcctgccatcgcagaaggt

SEQ ID NO: 2264929 - DNA, 25 bp, Homo sapien
tccatgtctgcgtccttccttattt

SEQ ID NO: 2264930 - DNA, 25 bp, Homo sapien
catgtctgcgtccttccttatttgc

SEQ ID NO: 2264931 - DNA, 25 bp, Homo sapien
ccatgtctgcgtccttccttatttg

SEQ ID NO: 2264932 - DNA, 25 bp, Homo sapien
ccaccagcggggagtaatgctgcat

SEQ ID NO: 2264933 - DNA, 25 bp, Homo sapien
taggcaacaaacaacactgcgtcac

SEQ ID NO: 2264934 - DNA, 25 bp, Homo sapien
ctggagtaggcaacaaacaacactg

SEQ ID NO: 2264935 - DNA, 25 bp, Homo sapien
aacaacactgcgtcacactcagtga

SEQ ID NO: 2264936 - DNA, 25 bp, Homo sapien
cagcaaagactggtaagagccccaa

SEQ ID NO: 2264937 - DNA, 25 bp, Homo sapien
gaaagtgttgcttcaaacaggcccg

SEQ ID NO: 2264938 - DNA, 25 bp, Homo sapien
tggagtcaagccacacttcatcgtg

SEQ ID NO: 2264939 - DNA, 25 bp, Homo sapien
aaactttctgactgctactactggg

SEQ ID NO: 2264940 - DNA, 25 bp, Homo sapien
taagaaccccgacacaaaatacatc

SEQ ID NO: 2264941 - DNA, 25 bp, Homo sapien
aaaatcacaagtccaagtttatggg

SEQ ID NO: 2264942 - DNA, 25 bp, Homo sapien
cagccaagtgagtactgattgtggg

SEQ ID NO: 2264943 - DNA, 25 bp, Homo sapien
agtgtacctcaataagacttccaga

SEQ ID NO: 2264944 - DNA, 25 bp, Homo sapien
atccatccctggaatctggattcct

SEQ ID NO: 2264945 - DNA, 25 bp, Homo sapien
gttccacccgcaaatatacactggc

SEQ ID NO: 2264946 - DNA, 25 bp, Homo sapien
gacggaggttaatagctatttacca

SEQ ID NO: 2264947 - DNA, 25 bp, Homo sapien
ccttagggcatctttgaggacggag

SEQ ID NO: 2264948 - DNA, 25 bp, Homo sapien
gatgtgttccttaaagactttctgt

SEQ ID NO: 2264949 - DNA, 25 bp, Homo sapien
tccttgatgtgttccttaaagactt

SEQ ID NO: 2264950 - DNA, 25 bp, Homo sapien
tccttaaagactttctgttactctg

SEQ ID NO: 2264951 - DNA, 25 bp, Homo sapien
cttaaagactttctgttactctgac

SEQ ID NO: 2264952 - DNA, 25 bp, Homo sapien
cggccgcgcgctggccttgtcctca

SEQ ID NO: 2264953 - DNA, 25 bp, Homo sapien
gttttccttgcccttaataagcgca

SEQ ID NO: 2264954 - DNA, 25 bp, Homo sapien
tcaccccgccggctatcgcggtctc

SEQ ID NO: 2264955 - DNA, 25 bp, Homo sapien
tgctgggggcaaggatccactgcac

SEQ ID NO: 2264956 - DNA, 25 bp, Homo sapien
aggtagaggtcggagagcgccgtgt

SEQ ID NO: 2264957 - DNA, 25 bp, Homo sapien
agaggtcggagagcgccgtgtgcat

SEQ ID NO: 2264958 - DNA, 25 bp, Homo sapien
tctggccgactacgcttctgcagca

SEQ ID NO: 2264959 - DNA, 25 bp, Homo sapien
tctcgccctcgctcgccttgagggt

SEQ ID NO: 2264960 - DNA, 25 bp, Homo sapien
gaacgcaagacagggcagcgctggg

SEQ ID NO: 2264961 - DNA, 25 bp, Homo sapien
ggagggcgcggacggagctccgcct

SEQ ID NO: 2264962 - DNA, 25 bp, Homo sapien
cggagaaggcgggagacgcggtgcg

SEQ ID NO: 2264963 - DNA, 25 bp, Homo sapien
cgcggtgcggctgggccagtcaccg

SEQ ID NO: 2264964 - DNA, 25 bp, Homo sapien
cccgcaggcggtgcgccgggagggc

SEQ ID NO: 2264965 - DNA, 25 bp, Homo sapien
gcaggagcttctgcactcaagctca

SEQ ID NO: 2264966 - DNA, 25 bp, Homo sapien
tgcagcaggagcttctgcactcaag

SEQ ID NO: 2264967 - DNA, 25 bp, Homo sapien
caggagcttctgcactcaagctcat

SEQ ID NO: 2264968 - DNA, 25 bp, Homo sapien
cagcaggagcttctgcactcaagct

SEQ ID NO: 2264969 - DNA, 25 bp, Homo sapien
aagaggaaggtcagctccaccaaag

SEQ ID NO: 2264970 - DNA, 25 bp, Homo sapien
aggtcagctccaccaaaggggccgc

SEQ ID NO: 2264971 - DNA, 25 bp, Homo sapien
agctccaccaaaggggccgccaagg

SEQ ID NO: 2264972 - DNA, 25 bp, Homo sapien
gaggaaggtcagctccaccaaaggg

SEQ ID NO: 2264973 - DNA, 25 bp, Homo sapien
gaggtacatcaagatgttaatgatg

SEQ ID NO: 2264974 - DNA, 25 bp, Homo sapien
tatttctggttgctagaattatgga

SEQ ID NO: 2264975 - DNA, 25 bp, Homo sapien
attgaagggaggtacatcaagatgt

SEQ ID NO: 2264976 - DNA, 25 bp, Homo sapien
attgtttcacagaacagactttgga

SEQ ID NO: 2264977 - DNA, 25 bp, Homo sapien
gagagaccacacttgccctgttgaa

SEQ ID NO: 2264978 - DNA, 25 bp, Homo sapien
cagtggactggatcaactacaagaa

SEQ ID NO: 2264979 - DNA, 25 bp, Homo sapien
tttaagcagatagcaaatgccccac

SEQ ID NO: 2264980 - DNA, 25 bp, Homo sapien
tttggagtccaactggagagaccac

SEQ ID NO: 2264981 - DNA, 25 bp, Homo sapien
agttaagttctcctccacaaggtga

SEQ ID NO: 2264982 - DNA, 25 bp, Homo sapien
agttctcctccacaaggtgattcag

SEQ ID NO: 2264983 - DNA, 25 bp, Homo sapien
ctcattctgatgtaagttaagttct

SEQ ID NO: 2264984 - DNA, 25 bp, Homo sapien
tctgatgtaagttaagttctcctcc

SEQ ID NO: 2264985 - DNA, 25 bp, Homo sapien
aggatccccattagtgctgaggtga

SEQ ID NO: 2264986 - DNA, 25 bp, Homo sapien
aggtaaggcactcttgataagttgc

SEQ ID NO: 2264987 - DNA, 25 bp, Homo sapien
gaagcagcagaggatccccattagt

SEQ ID NO: 2264988 - DNA, 25 bp, Homo sapien
gataagttgccataagtaatccctg

SEQ ID NO: 2264989 - DNA, 25 bp, Homo sapien
gctgcggctgaagagctggtaatcc

SEQ ID NO: 2264990 - DNA, 25 bp, Homo sapien
ttcccaaggcagacaaaggcaaagg

SEQ ID NO: 2264991 - DNA, 25 bp, Homo sapien
gaagctactgtctccaacaagaggc

SEQ ID NO: 2264992 - DNA, 25 bp, Homo sapien
caagaggcaagttagagagcatagc

SEQ ID NO: 2264993 - DNA, 25 bp, Homo sapien
aatggacttaggaccacggaattca

SEQ ID NO: 2264994 - DNA, 25 bp, Homo sapien
gacttaggaccacggaattcaaaga

SEQ ID NO: 2264995 - DNA, 25 bp, Homo sapien
tggaattaggccttagtctttagag

SEQ ID NO: 2264996 - DNA, 25 bp, Homo sapien
agaaaccagtggaattaggccttag

SEQ ID NO: 2264997 - DNA, 25 bp, Homo sapien
ttaaattggatgcaccctcctggcc

SEQ ID NO: 2264998 - DNA, 25 bp, Homo sapien
cctattgtgtggtgatatggcagac

SEQ ID NO: 2264999 - DNA, 25 bp, Homo sapien
tagcacaaaggtagaaggcaagcca

SEQ ID NO: 2265000 - DNA, 25 bp, Homo sapien
caaagaggtcagataagggtcaagc

SEQ ID NO: 2265001 - DNA, 25 bp, Homo sapien
tagcgagtcagtaacggtgggtcta

SEQ ID NO: 2265002 - DNA, 25 bp, Homo sapien
ggtctagagagttcaccacaggtgt

SEQ ID NO: 2265003 - DNA, 25 bp, Homo sapien
tcagtagaggtcctgtgcctcgcag

SEQ ID NO: 2265004 - DNA, 25 bp, Homo sapien
ggcaatctggtgcacccaactctgg

SEQ ID NO: 2265005 - DNA, 25 bp, Homo sapien
ttatattctgggatactaggccctt

SEQ ID NO: 2265006 - DNA, 25 bp, Homo sapien
catgagtttgttggatccttgtata

SEQ ID NO: 2265007 - DNA, 25 bp, Homo sapien
gagaagttccattgaagtcctttac

SEQ ID NO: 2265008 - DNA, 25 bp, Homo sapien
ttctgggatactaggccctttatca

SEQ ID NO: 2265009 - DNA, 25 bp, Homo sapien
tttactccctgagtagttactcctg

SEQ ID NO: 2265010 - DNA, 25 bp, Homo sapien
ccatcttgactgctggagatgagga

SEQ ID NO: 2265011 - DNA, 25 bp, Homo sapien
actccttcacatacatgctggtaag

SEQ ID NO: 2265012 - DNA, 25 bp, Homo sapien
catgctggtaagcagagattttact

SEQ ID NO: 2265013 - DNA, 25 bp, Homo sapien
tgcatctgatattgctttactctcc

SEQ ID NO: 2265014 - DNA, 25 bp, Homo sapien
ggtggcaaacatattggtaaagtag

SEQ ID NO: 2265015 - DNA, 25 bp, Homo sapien
catattggtaaagtaggatgaagca

SEQ ID NO: 2265016 - DNA, 25 bp, Homo sapien
cctcccttggaggtgaagtcgagct

SEQ ID NO: 2265017 - DNA, 25 bp, Homo sapien
gtgttttatcccagatgaatccaca

SEQ ID NO: 2265018 - DNA, 25 bp, Homo sapien
tcaactccatgcgaagagtgctgcg

SEQ ID NO: 2265019 - DNA, 25 bp, Homo sapien
agttgggtgcaaacggatgtatcga

SEQ ID NO: 2265020 - DNA, 25 bp, Homo sapien
gagtgctgcgaatgctataatgagt

SEQ ID NO: 2265021 - DNA, 25 bp, Homo sapien
tctaatgtgtccagaagccattccc

SEQ ID NO: 2265022 - DNA, 25 bp, Homo sapien
taatgtgtccagaagccattcccag

SEQ ID NO: 2265023 - DNA, 25 bp, Homo sapien
atctctaatgtgtccagaagccatt

SEQ ID NO: 2265024 - DNA, 25 bp, Homo sapien
atgtgtccagaagccattcccaggg

SEQ ID NO: 2265025 - DNA, 25 bp, Homo sapien
caataaggcattccacccgccaaat

SEQ ID NO: 2265026 - DNA, 25 bp, Homo sapien
cacccgccaaattccagctttggat

SEQ ID NO: 2265027 - DNA, 25 bp, Homo sapien
catgtagatgctcgccaataaggca

SEQ ID NO: 2265028 - DNA, 25 bp, Homo sapien
cagaaaaagtgtgctcatcccagca

SEQ ID NO: 2265029 - DNA, 25 bp, Homo sapien
gataagtcagggtgagttccctctg

SEQ ID NO: 2265030 - DNA, 25 bp, Homo sapien
ttcccagggtctttctgagcaaaag

SEQ ID NO: 2265031 - DNA, 25 bp, Homo sapien
tggactctgtgaaacagataagtca

SEQ ID NO: 2265032 - DNA, 25 bp, Homo sapien
ttctgagcaaaaggtgtgtttccca

SEQ ID NO: 2265033 - DNA, 25 bp, Homo sapien
ttaacctatccatgttggagttcaa

SEQ ID NO: 2265034 - DNA, 25 bp, Homo sapien
taacctatccatgttggagttcaaa

SEQ ID NO: 2265035 - DNA, 25 bp, Homo sapien
ctggatagagattgtacagtgccat

SEQ ID NO: 2265036 - DNA, 25 bp, Homo sapien
gagcagataccatcgaatcctttga

SEQ ID NO: 2265037 - DNA, 25 bp, Homo sapien
tgatcctgagccattactaagccag

SEQ ID NO: 2265038 - DNA, 25 bp, Homo sapien
tgaacacatgtccactgaaatgaat

SEQ ID NO: 2265039 - DNA, 25 bp, Homo sapien
taaaagtgggatcttccatctggat

SEQ ID NO: 2265040 - DNA, 25 bp, Homo sapien
tctggatattcgagggagccctgca

SEQ ID NO: 2265041 - DNA, 25 bp, Homo sapien
catggaagcgataattctctttaaa

SEQ ID NO: 2265042 - DNA, 25 bp, Homo sapien
gatcttccatctggatattcgaggg

SEQ ID NO: 2265043 - DNA, 25 bp, Homo sapien
gggttcagtgtgttagtgtggcaga

SEQ ID NO: 2265044 - DNA, 25 bp, Homo sapien
gcttttggtctcatcaaagatggtg

SEQ ID NO: 2265045 - DNA, 25 bp, Homo sapien
tgtctcccatgagcagggttcagtg

SEQ ID NO: 2265046 - DNA, 25 bp, Homo sapien
agagcaaattcctgtactgtcactt

SEQ ID NO: 2265047 - DNA, 25 bp, Homo sapien
ataagcccaggctttgcagtcaaac

SEQ ID NO: 2265048 - DNA, 25 bp, Homo sapien
gacgagaggcctgatttctgaaagt

SEQ ID NO: 2265049 - DNA, 25 bp, Homo sapien
tagaatagaaggaatagggacgaga

SEQ ID NO: 2265050 - DNA, 25 bp, Homo sapien
tgcctctgatcttcctcataagaaa

SEQ ID NO: 2265051 - DNA, 25 bp, Homo sapien
tgaactgagggacactgccactctg

SEQ ID NO: 2265052 - DNA, 25 bp, Homo sapien
tcatttagttctccacggtataagg

SEQ ID NO: 2265053 - DNA, 25 bp, Homo sapien
tttcttgaactgagggacactgcca

SEQ ID NO: 2265054 - DNA, 25 bp, Homo sapien
ttctccacggtataagggctgagta

SEQ ID NO: 2265055 - DNA, 25 bp, Homo sapien
ccagtagtgttgaactttcctgagt

SEQ ID NO: 2265056 - DNA, 25 bp, Homo sapien
ttcaatggttcctttgttgatcaca

SEQ ID NO: 2265057 - DNA, 25 bp, Homo sapien
tcaatggttcctttgttgatcacat

SEQ ID NO: 2265058 - DNA, 25 bp, Homo sapien
ctacatgtccaacgttgatgatagt

SEQ ID NO: 2265059 - DNA, 25 bp, Homo sapien
gtccaacgttgatgatagtgacatg

SEQ ID NO: 2265060 - DNA, 25 bp, Homo sapien
aacgttgatgatagtgacatgaacc

SEQ ID NO: 2265061 - DNA, 25 bp, Homo sapien
catgtccaacgttgatgatagtgac

SEQ ID NO: 2265062 - DNA, 25 bp, Homo sapien
tcccaattttggcttagatttagca

SEQ ID NO: 2265063 - DNA, 25 bp, Homo sapien
ttttggcttagatttagcagtgatt

SEQ ID NO: 2265064 - DNA, 25 bp, Homo sapien
aattttggcttagatttagcagtga

SEQ ID NO: 2265065 - DNA, 25 bp, Homo sapien
ccaattttggcttagatttagcagt

SEQ ID NO: 2265066 - DNA, 25 bp, Homo sapien
tacttgtgttatgacagcaaaccaa

SEQ ID NO: 2265067 - DNA, 25 bp, Homo sapien
gatacttgtgttatgacagcaaacc

SEQ ID NO: 2265068 - DNA, 25 bp, Homo sapien
atacttgtgttatgacagcaaacca

SEQ ID NO: 2265069 - DNA, 25 bp, Homo sapien
ctaaagtgcatctgcttggtggcat

SEQ ID NO: 2265070 - DNA, 25 bp, Homo sapien
ttggaccctaaagtgcatctgcttg

SEQ ID NO: 2265071 - DNA, 25 bp, Homo sapien
gaccctaaagtgcatctgcttggtg

SEQ ID NO: 2265072 - DNA, 25 bp, Homo sapien
tgtcttcagcatccattttgacttc

SEQ ID NO: 2265073 - DNA, 25 bp, Homo sapien
gagcaaaggaataaccaatgcattc

SEQ ID NO: 2265074 - DNA, 25 bp, Homo sapien
caagagcagagcaaaggaataacca

SEQ ID NO: 2265075 - DNA, 25 bp, Homo sapien
gcagagcaaaggaataaccaatgca

SEQ ID NO: 2265076 - DNA, 25 bp, Homo sapien
aaaggaataaccaatgcattcatac

SEQ ID NO: 2265077 - DNA, 25 bp, Homo sapien
ctgtttcttagaacatgtggggagc

SEQ ID NO: 2265078 - DNA, 25 bp, Homo sapien
tgtttcttagaacatgtggggagct

SEQ ID NO: 2265079 - DNA, 25 bp, Homo sapien
tttcttagaacatgtggggagctac

SEQ ID NO: 2265080 - DNA, 25 bp, Homo sapien
gtttcttagaacatgtggggagcta

SEQ ID NO: 2265081 - DNA, 25 bp, Homo sapien
gaaagctgcgggggctctgattttc

SEQ ID NO: 2265082 - DNA, 25 bp, Homo sapien
tgcagcaataaaatagtgtcgtgtt

SEQ ID NO: 2265083 - DNA, 25 bp, Homo sapien
gtatcatcatagtcaatttcctctt

SEQ ID NO: 2265084 - DNA, 25 bp, Homo sapien
tcatcccataatcccagagcctctc

SEQ ID NO: 2265085 - DNA, 25 bp, Homo sapien
tcacaagcgttcagggacaaaatgg

SEQ ID NO: 2265086 - DNA, 25 bp, Homo sapien
catagtggttatcccaagcaagagg

SEQ ID NO: 2265087 - DNA, 25 bp, Homo sapien
gatccagatggccaggagacccatt

SEQ ID NO: 2265088 - DNA, 25 bp, Homo sapien
gagacccattgctagtttccgtagg

SEQ ID NO: 2265089 - DNA, 25 bp, Homo sapien
aaagctctcttactacgttgcgtga

SEQ ID NO: 2265090 - DNA, 25 bp, Homo sapien
gatgctatgactcctcgtaaggcaa

SEQ ID NO: 2265091 - DNA, 25 bp, Homo sapien
ggagactgagtaatggcccctttct

SEQ ID NO: 2265092 - DNA, 25 bp, Homo sapien
gaccactgggttgaggtgtcatcca

SEQ ID NO: 2265093 - DNA, 25 bp, Homo sapien
ccatgtggagtaggactctgtcgca

SEQ ID NO: 2265094 - DNA, 25 bp, Homo sapien
tcagaggtccaccagactcagtaag

SEQ ID NO: 2265095 - DNA, 25 bp, Homo sapien
gatcagataaggatagcccatgtgg

SEQ ID NO: 2265096 - DNA, 25 bp, Homo sapien
aactctgttgctgcagttgtcccca

SEQ ID NO: 2265097 - DNA, 25 bp, Homo sapien
aattgcttttgcctagtgctagggt

SEQ ID NO: 2265098 - DNA, 25 bp, Homo sapien
gaaatatcttcataactgtcctcgt

SEQ ID NO: 2265099 - DNA, 25 bp, Homo sapien
ttttctggaattgtggtggcattaa

SEQ ID NO: 2265100 - DNA, 25 bp, Homo sapien
tagggtgtcttgaattctgggagaa

SEQ ID NO: 2265101 - DNA, 25 bp, Homo sapien
tctgttccgaaagtctgagttgtgg

SEQ ID NO: 2265102 - DNA, 25 bp, Homo sapien
ctagaaaccttcagtaaggcggtca

SEQ ID NO: 2265103 - DNA, 25 bp, Homo sapien
taaggcggtcatgcctctgttccga

SEQ ID NO: 2265104 - DNA, 25 bp, Homo sapien
ttgtggcaccccagaatccatagac

SEQ ID NO: 2265105 - DNA, 25 bp, Homo sapien
gggttttccatcgacatgaagacag

SEQ ID NO: 2265106 - DNA, 25 bp, Homo sapien
gaatgtaccagtatgccacctcatg

SEQ ID NO: 2265107 - DNA, 25 bp, Homo sapien
tgtgctccaatgcttagaatgtacc

SEQ ID NO: 2265108 - DNA, 25 bp, Homo sapien
cagtttctcctgagaatgggaatag

SEQ ID NO: 2265109 - DNA, 25 bp, Homo sapien
tattctctgtgaggtaccagcttcg

SEQ ID NO: 2265110 - DNA, 25 bp, Homo sapien
ggatgacattcctcttgtctgacat

SEQ ID NO: 2265111 - DNA, 25 bp, Homo sapien
gaggcttggaactctggatcctcaa

SEQ ID NO: 2265112 - DNA, 25 bp, Homo sapien
ccagcttcggttctcatcaaataca

SEQ ID NO: 2265113 - DNA, 25 bp, Homo sapien
taatagcgggtcaggcaccgaggat

SEQ ID NO: 2265114 - DNA, 25 bp, Homo sapien
gccaatgagtcctgaagctagatct

SEQ ID NO: 2265115 - DNA, 25 bp, Homo sapien
caccgaggatctgatttagttggcc

SEQ ID NO: 2265116 - DNA, 25 bp, Homo sapien
gttggcccatcttctacagtcactg

SEQ ID NO: 2265117 - DNA, 25 bp, Homo sapien
ctggcagaattggaaaatccttcaa

SEQ ID NO: 2265118 - DNA, 25 bp, Homo sapien
tggaaaatccttcaaatgttttaca

SEQ ID NO: 2265119 - DNA, 25 bp, Homo sapien
ggcagaattggaaaatccttcaaat

SEQ ID NO: 2265120 - DNA, 25 bp, Homo sapien
cagaattggaaaatccttcaaatgt

SEQ ID NO: 2265121 - DNA, 25 bp, Homo sapien
tgaatacaaaggacggacatcagtg

SEQ ID NO: 2265122 - DNA, 25 bp, Homo sapien
ccttgaatacaaaggacggacatca

SEQ ID NO: 2265123 - DNA, 25 bp, Homo sapien
gatgttatatggtctgcttgcttga

SEQ ID NO: 2265124 - DNA, 25 bp, Homo sapien
gacatcagtgattccgtgagggtag

SEQ ID NO: 2265125 - DNA, 25 bp, Homo sapien
tatgaggtattttagaaactcaaaa

SEQ ID NO: 2265126 - DNA, 25 bp, Homo sapien
tggagacaaggctgaattatgaggt

SEQ ID NO: 2265127 - DNA, 25 bp, Homo sapien
catacaatcagctattatttgtgta

SEQ ID NO: 2265128 - DNA, 25 bp, Homo sapien
tcaaaactctccagactttttcttc

SEQ ID NO: 2265129 - DNA, 25 bp, Homo sapien
gcttcacgagtcttaaaggtttcat

SEQ ID NO: 2265130 - DNA, 25 bp, Homo sapien
tcatctgtgtatgccataaatcgga

SEQ ID NO: 2265131 - DNA, 25 bp, Homo sapien
tccgctgagggccattgttcaaata

SEQ ID NO: 2265132 - DNA, 25 bp, Homo sapien
gattcatgctgaatagcttcacgag

SEQ ID NO: 2265133 - DNA, 25 bp, Homo sapien
gagaaaaaaagatgagaggttggga

SEQ ID NO: 2265134 - DNA, 25 bp, Homo sapien
agatgagaggttgggaagaaaaatt

SEQ ID NO: 2265135 - DNA, 25 bp, Homo sapien
aagatgagaggttgggaagaaaaat

SEQ ID NO: 2265136 - DNA, 25 bp, Homo sapien
ctgtataagagaaaaaaagatgaga

SEQ ID NO: 2265137 - DNA, 25 bp, Homo sapien
aggactaagggagcatagtcccagt

SEQ ID NO: 2265138 - DNA, 25 bp, Homo sapien
gcagcaatgtaatgtacccaagttt

SEQ ID NO: 2265139 - DNA, 25 bp, Homo sapien
tacccaagttttaggatgcttcttg

SEQ ID NO: 2265140 - DNA, 25 bp, Homo sapien
taagggagcatagtcccagtcctcc

SEQ ID NO: 2265141 - DNA, 25 bp, Homo sapien
aaggaaggagagttgtcatcatcaa

SEQ ID NO: 2265142 - DNA, 25 bp, Homo sapien
ataaaggaaggagagttgtcatcat

SEQ ID NO: 2265143 - DNA, 25 bp, Homo sapien
ctgagcgaatttggataaaggaagg

SEQ ID NO: 2265144 - DNA, 25 bp, Homo sapien
cgaatttggataaaggaaggagagt

SEQ ID NO: 2265145 - DNA, 25 bp, Homo sapien
cattcgtagttggggttcctctgga

SEQ ID NO: 2265146 - DNA, 25 bp, Homo sapien
catttcagaatcagtaagatcatca

SEQ ID NO: 2265147 - DNA, 25 bp, Homo sapien
ttcattcgtagttggggttcctctg

SEQ ID NO: 2265148 - DNA, 25 bp, Homo sapien
ccatttcagaatcagtaagatcatc

SEQ ID NO: 2265149 - DNA, 25 bp, Homo sapien
tgtctactttgacataagcttccat

SEQ ID NO: 2265150 - DNA, 25 bp, Homo sapien
gatttccaaggacgcctggcgatgg

SEQ ID NO: 2265151 - DNA, 25 bp, Homo sapien
cagtagaaactgtccaaggtccatc

SEQ ID NO: 2265152 - DNA, 25 bp, Homo sapien
ccttcgaggaatattgagtgcactt

SEQ ID NO: 2265153 - DNA, 25 bp, Homo sapien
tggcgatggttcctcacaagaaatg

SEQ ID NO: 2265154 - DNA, 25 bp, Homo sapien
cttgggtagagcacttcggttttga

SEQ ID NO: 2265155 - DNA, 25 bp, Homo sapien
tttttctgagaagtgggatgccagg

SEQ ID NO: 2265156 - DNA, 25 bp, Homo sapien
tgctcctttggagtgtcatagttcc

SEQ ID NO: 2265157 - DNA, 25 bp, Homo sapien
tctcggtgaatgtagtagcctctgt

SEQ ID NO: 2265158 - DNA, 25 bp, Homo sapien
gctgagattgcgccactgcactcca

SEQ ID NO: 2265159 - DNA, 25 bp, Homo sapien
gtgagctgagattgcgccactgcac

SEQ ID NO: 2265160 - DNA, 25 bp, Homo sapien
atggcgtgaaccccggggggcagag

SEQ ID NO: 2265161 - DNA, 25 bp, Homo sapien
tgaaccccggggggcagagcctgca

SEQ ID NO: 2265162 - DNA, 25 bp, Homo sapien
gagcttccgatgagttctgttctga

SEQ ID NO: 2265163 - DNA, 25 bp, Homo sapien
cagtgggctatatcctctgagatgc

SEQ ID NO: 2265164 - DNA, 25 bp, Homo sapien
tatacattaagatccccagaggcca

SEQ ID NO: 2265165 - DNA, 25 bp, Homo sapien
tctgagatgccgagctgtttgtgaa

SEQ ID NO: 2265166 - DNA, 25 bp, Homo sapien
cattgactgtgtgcattttaggcca

SEQ ID NO: 2265167 - DNA, 25 bp, Homo sapien
gcagcatccctatcctgcatcaagg

SEQ ID NO: 2265168 - DNA, 25 bp, Homo sapien
ggcagagacctgtttacataaccat

SEQ ID NO: 2265169 - DNA, 25 bp, Homo sapien
taggccaggcccgagcagatgcagc

SEQ ID NO: 2265170 - DNA, 25 bp, Homo sapien
atttgtgcaaggtctgtgtcttttc

SEQ ID NO: 2265171 - DNA, 25 bp, Homo sapien
gtataaatttgtgcaaggtctgtgt

SEQ ID NO: 2265172 - DNA, 25 bp, Homo sapien
taaatttgtgcaaggtctgtgtctt

SEQ ID NO: 2265173 - DNA, 25 bp, Homo sapien
tataaatttgtgcaaggtctgtgtc

SEQ ID NO: 2265174 - DNA, 25 bp, Homo sapien
tggaccattctctttcaggacctgc

SEQ ID NO: 2265175 - DNA, 25 bp, Homo sapien
gaattcaagtcttttaccaggtcca

SEQ ID NO: 2265176 - DNA, 25 bp, Homo sapien
caggacctgccagacatatgtatgg

SEQ ID NO: 2265177 - DNA, 25 bp, Homo sapien
tactagtagggctccaatgaggcct

SEQ ID NO: 2265178 - DNA, 25 bp, Homo sapien
gcctggatggtaggacctagcagac

SEQ ID NO: 2265179 - DNA, 25 bp, Homo sapien
gaccactgtatcataaacctcagcc

SEQ ID NO: 2265180 - DNA, 25 bp, Homo sapien
catgaagactgacaggatgggaagc

SEQ ID NO: 2265181 - DNA, 25 bp, Homo sapien
taaacctcagcctggatggtaggac

SEQ ID NO: 2265182 - DNA, 25 bp, Homo sapien
ctgtaagaatgagatgtccgccaaa

SEQ ID NO: 2265183 - DNA, 25 bp, Homo sapien
agatgtccgccaaaggttacttggg

SEQ ID NO: 2265184 - DNA, 25 bp, Homo sapien
tacttggggatagtactccagaaaa

SEQ ID NO: 2265185 - DNA, 25 bp, Homo sapien
agaatgagatgtccgccaaaggtta

SEQ ID NO: 2265186 - DNA, 25 bp, Homo sapien
tgcccctgtaattactgacaaaaag

SEQ ID NO: 2265187 - DNA, 25 bp, Homo sapien
cagtggagaagcatgcccctgtaat

SEQ ID NO: 2265188 - DNA, 25 bp, Homo sapien
caaaagttagagtcaaggtcacagt

SEQ ID NO: 2265189 - DNA, 25 bp, Homo sapien
aaagtagtatttgcttgctgccaac

SEQ ID NO: 2265190 - DNA, 25 bp, Homo sapien
ttctaagtggttctcctgaagcctc

SEQ ID NO: 2265191 - DNA, 25 bp, Homo sapien
agtcttctaagtggttctcctgaag

SEQ ID NO: 2265192 - DNA, 25 bp, Homo sapien
ttgtccagtcttctaagtggttctc

SEQ ID NO: 2265193 - DNA, 25 bp, Homo sapien
tccagtcttctaagtggttctcctg

SEQ ID NO: 2265194 - DNA, 25 bp, Homo sapien
cagagtctttttgtacacgactgag

SEQ ID NO: 2265195 - DNA, 25 bp, Homo sapien
cacgactgaggtgttgaatggaaaa

SEQ ID NO: 2265196 - DNA, 25 bp, Homo sapien
tggccttggcttagcgatgttgaaa

SEQ ID NO: 2265197 - DNA, 25 bp, Homo sapien
ggtgatccgtgaattctacaaacag

SEQ ID NO: 2265198 - DNA, 25 bp, Homo sapien
ctgcgtgaagaaaggaaaaagtcgt

SEQ ID NO: 2265199 - DNA, 25 bp, Homo sapien
cccagcccaagcatgtttaaatata

SEQ ID NO: 2265200 - DNA, 25 bp, Homo sapien
cagtagcattaaatagtctggccag

SEQ ID NO: 2265201 - DNA, 25 bp, Homo sapien
ccagcccaagcatgtttaaatatac

SEQ ID NO: 2265202 - DNA, 25 bp, Homo sapien
agtagcattaaatagtctggccagg

SEQ ID NO: 2265203 - DNA, 25 bp, Homo sapien
tctccttgaaactgcagacctctct

SEQ ID NO: 2265204 - DNA, 25 bp, Homo sapien
gacctctctcaaggagacccactga

SEQ ID NO: 2265205 - DNA, 25 bp, Homo sapien
cagattggctgaaaagtctccttga

SEQ ID NO: 2265206 - DNA, 25 bp, Homo sapien
cccttcacaggatctcgcagcagat

SEQ ID NO: 2265207 - DNA, 25 bp, Homo sapien
tatgacgaagagaagcaatggacaa

SEQ ID NO: 2265208 - DNA, 25 bp, Homo sapien
caggtagcatcacaaccatcctaac

SEQ ID NO: 2265209 - DNA, 25 bp, Homo sapien
gaattggcagttagcatttctgcta

SEQ ID NO: 2265210 - DNA, 25 bp, Homo sapien
gatcagaccctacaggacatgcctt

SEQ ID NO: 2265211 - DNA, 25 bp, Homo sapien
acccaggtagtatcttctggtggca

SEQ ID NO: 2265212 - DNA, 25 bp, Homo sapien
catgacagttccactgcacccaggt

SEQ ID NO: 2265213 - DNA, 25 bp, Homo sapien
cacaggcagctcaccgagatcactt

SEQ ID NO: 2265214 - DNA, 25 bp, Homo sapien
cactttgcatatagtcccatgacag

SEQ ID NO: 2265215 - DNA, 25 bp, Homo sapien
gaatcgcaaaaggcacagaaagaag

SEQ ID NO: 2265216 - DNA, 25 bp, Homo sapien
caaaaggcacagaaagaagcaggtg

SEQ ID NO: 2265217 - DNA, 25 bp, Homo sapien
gcagaatcgcaaaaggcacagaaag

SEQ ID NO: 2265218 - DNA, 25 bp, Homo sapien
ctaaagcagaatcgcaaaaggcaca

SEQ ID NO: 2265219 - DNA, 25 bp, Homo sapien
taaggaactttacccactggatgtg

SEQ ID NO: 2265220 - DNA, 25 bp, Homo sapien
gcagtaaccgataggattgcttcct

SEQ ID NO: 2265221 - DNA, 25 bp, Homo sapien
tgctacaaatgttcaactggagaag

SEQ ID NO: 2265222 - DNA, 25 bp, Homo sapien
aatttgtgctcctattcctagccta

SEQ ID NO: 2265223 - DNA, 25 bp, Homo sapien
ggaactcgcctccaggtactgagcg

SEQ ID NO: 2265224 - DNA, 25 bp, Homo sapien
gagtaggacacatcgcagaagccga

SEQ ID NO: 2265225 - DNA, 25 bp, Homo sapien
gattgagtcgcagtcgcgtcaggaa

SEQ ID NO: 2265226 - DNA, 25 bp, Homo sapien
tcttcaccaggcgaggattgagtcg

SEQ ID NO: 2265227 - DNA, 25 bp, Homo sapien
ctctgtgatgtagccgcttgcggag

SEQ ID NO: 2265228 - DNA, 25 bp, Homo sapien
cgggacgctttctggcacgcttttt

SEQ ID NO: 2265229 - DNA, 25 bp, Homo sapien
gggcctgtgacaccgcacgctgagc

SEQ ID NO: 2265230 - DNA, 25 bp, Homo sapien
cttgcggagactgcaagcagccgcg

SEQ ID NO: 2265231 - DNA, 25 bp, Homo sapien
caggtggtgtcatttgtgaagaaga

SEQ ID NO: 2265232 - DNA, 25 bp, Homo sapien
tgaagaagaatgttctagtaactgg

SEQ ID NO: 2265233 - DNA, 25 bp, Homo sapien
ctgttttcaggtggtgtcatttgtg

SEQ ID NO: 2265234 - DNA, 25 bp, Homo sapien
gaagaagaatgttctagtaactggg

SEQ ID NO: 2265235 - DNA, 25 bp, Homo sapien
gtgtgacttacccacagcaatggga

SEQ ID NO: 2265236 - DNA, 25 bp, Homo sapien
caatgggatggtaacagcaaagcta

SEQ ID NO: 2265237 - DNA, 25 bp, Homo sapien
gctaaccaaagtgctctgtgcccct

SEQ ID NO: 2265238 - DNA, 25 bp, Homo sapien
catatatggtgatagtggctgcagc

SEQ ID NO: 2265239 - DNA, 25 bp, Homo sapien
tcatttggtggaaacatggagcagc

SEQ ID NO: 2265240 - DNA, 25 bp, Homo sapien
tgttctgcatagatggcatattcat

SEQ ID NO: 2265241 - DNA, 25 bp, Homo sapien
tcatttgctatttgctgctacctgg

SEQ ID NO: 2265242 - DNA, 25 bp, Homo sapien
gcagctcagtatattacattctaca

SEQ ID NO: 2265243 - DNA, 25 bp, Homo sapien
gagcacaacacttacgcagttcttg

SEQ ID NO: 2265244 - DNA, 25 bp, Homo sapien
ttcccttgggatactgagcacaaca

SEQ ID NO: 2265245 - DNA, 25 bp, Homo sapien
gaacagacgacagatcttcccttgg

SEQ ID NO: 2265246 - DNA, 25 bp, Homo sapien
gcagttcttggatgacagcctgaca

SEQ ID NO: 2265247 - DNA, 25 bp, Homo sapien
caggcttgcttctggcacggatcct

SEQ ID NO: 2265248 - DNA, 25 bp, Homo sapien
tctcacaggcttgcttctggcacgg

SEQ ID NO: 2265249 - DNA, 25 bp, Homo sapien
cacaggcttgcttctggcacggatc

SEQ ID NO: 2265250 - DNA, 25 bp, Homo sapien
acatttctgtatctcacaggcttgc

SEQ ID NO: 2265251 - DNA, 25 bp, Homo sapien
tctgagacaagcagtatatgccctt

SEQ ID NO: 2265252 - DNA, 25 bp, Homo sapien
caacgttaggctagaggagccgacg

SEQ ID NO: 2265253 - DNA, 25 bp, Homo sapien
tacaatagtgcctggaaaggactcc

SEQ ID NO: 2265254 - DNA, 25 bp, Homo sapien
ttattacttcctgagaaaggtgcca

SEQ ID NO: 2265255 - DNA, 25 bp, Homo sapien
agatgttgatgctgctaggagctgc

SEQ ID NO: 2265256 - DNA, 25 bp, Homo sapien
ggcaggtgaattgctgcagggcaaa

SEQ ID NO: 2265257 - DNA, 25 bp, Homo sapien
ctgcagggcaaataagcgacaaata

SEQ ID NO: 2265258 - DNA, 25 bp, Homo sapien
aagcgacaaatagatgttgatgctg

SEQ ID NO: 2265259 - DNA, 25 bp, Homo sapien
catctgttctgtagaaggtgctgac

SEQ ID NO: 2265260 - DNA, 25 bp, Homo sapien
gacttttgtgggattcatcagatcc

SEQ ID NO: 2265261 - DNA, 25 bp, Homo sapien
agatcccaggtccagccgatgatgt

SEQ ID NO: 2265262 - DNA, 25 bp, Homo sapien
ccaagtccttggtgatcagggcatc

SEQ ID NO: 2265263 - DNA, 25 bp, Homo sapien
ttgacttgctttctgcctacgtaac

SEQ ID NO: 2265264 - DNA, 25 bp, Homo sapien
ttccaaaggagtcaatttcaagtta

SEQ ID NO: 2265265 - DNA, 25 bp, Homo sapien
tacggatcctgactaagtgcttttg

SEQ ID NO: 2265266 - DNA, 25 bp, Homo sapien
caatttcaagttacggatcctgact

SEQ ID NO: 2265267 - DNA, 25 bp, Homo sapien
ttcttcatgacccttgctaaacttc

SEQ ID NO: 2265268 - DNA, 25 bp, Homo sapien
cttgctaaacttctgtttcttgagc

SEQ ID NO: 2265269 - DNA, 25 bp, Homo sapien
ttgcagtattcttcatgacccttgc

SEQ ID NO: 2265270 - DNA, 25 bp, Homo sapien
cagtattcttcatgacccttgctaa

SEQ ID NO: 2265271 - DNA, 25 bp, Homo sapien
gcccaagggtgggtgcactgcagta

SEQ ID NO: 2265272 - DNA, 25 bp, Homo sapien
actgcagtagtggatgaagtgattg

SEQ ID NO: 2265273 - DNA, 25 bp, Homo sapien
gagcatatcttcgtagaatcccagc

SEQ ID NO: 2265274 - DNA, 25 bp, Homo sapien
ggatgaagtgattgccaaatactga

SEQ ID NO: 2265275 - DNA, 25 bp, Homo sapien
gcttaagcaacagctcctgtactcc

SEQ ID NO: 2265276 - DNA, 25 bp, Homo sapien
caggttagtcatcaggcaaaagctt

SEQ ID NO: 2265277 - DNA, 25 bp, Homo sapien
gtcatcaggcaaaagcttaagcaac

SEQ ID NO: 2265278 - DNA, 25 bp, Homo sapien
agcttaagcaacagctcctgtactc

SEQ ID NO: 2265279 - DNA, 25 bp, Homo sapien
gtacaatggaaaataattaagcaac

SEQ ID NO: 2265280 - DNA, 25 bp, Homo sapien
gagagtcccagtacaatggaaaata

SEQ ID NO: 2265281 - DNA, 25 bp, Homo sapien
cagtacaatggaaaataattaagca

SEQ ID NO: 2265282 - DNA, 25 bp, Homo sapien
gagtcccagtacaatggaaaataat

SEQ ID NO: 2265283 - DNA, 25 bp, Homo sapien
tccgggtagagttgccacatgagag

SEQ ID NO: 2265284 - DNA, 25 bp, Homo sapien
atccatgtagcgctcctccgggtag

SEQ ID NO: 2265285 - DNA, 25 bp, Homo sapien
ctcctccgggtagagttgccacatg

SEQ ID NO: 2265286 - DNA, 25 bp, Homo sapien
gagttgttatccatgtagcgctcct

SEQ ID NO: 2265287 - DNA, 25 bp, Homo sapien
tgctggactcgtgcccttaggaaac

SEQ ID NO: 2265288 - DNA, 25 bp, Homo sapien
gctgcgtcacctaagggaacctgaa

SEQ ID NO: 2265289 - DNA, 25 bp, Homo sapien
ggaggtaagaaggtgacttggccta

SEQ ID NO: 2265290 - DNA, 25 bp, Homo sapien
ggaacctgaatttgctggactcgtg

SEQ ID NO: 2265291 - DNA, 25 bp, Homo sapien
tcttggtgaacccagaggtgatcgg

SEQ ID NO: 2265292 - DNA, 25 bp, Homo sapien
tgcgctggtattcgtcgcggtagat

SEQ ID NO: 2265293 - DNA, 25 bp, Homo sapien
gcggtagataccctcttggtgaacc

SEQ ID NO: 2265294 - DNA, 25 bp, Homo sapien
aggtgatcgggtggagcccccacat

SEQ ID NO: 2265295 - DNA, 25 bp, Homo sapien
ttgggttccaattctagccctgctt

SEQ ID NO: 2265296 - DNA, 25 bp, Homo sapien
tgggttccaattctagccctgcttt

SEQ ID NO: 2265297 - DNA, 25 bp, Homo sapien
ttccaattctagccctgcttttctc

SEQ ID NO: 2265298 - DNA, 25 bp, Homo sapien
ggttccaattctagccctgcttttc

SEQ ID NO: 2265299 - DNA, 25 bp, Homo sapien
tcaccagtaagcaaggtgatctggt

SEQ ID NO: 2265300 - DNA, 25 bp, Homo sapien
caaggtgatctggtactagcaacca

SEQ ID NO: 2265301 - DNA, 25 bp, Homo sapien
ccgcgcacaggacacaggtgtgact

SEQ ID NO: 2265302 - DNA, 25 bp, Homo sapien
tgggtttgaatgaactcaccagtaa

SEQ ID NO: 2265303 - DNA, 25 bp, Homo sapien
caagacaactaaagtgacactcagg

SEQ ID NO: 2265304 - DNA, 25 bp, Homo sapien
tgtaggactagcactacaggaagct

SEQ ID NO: 2265305 - DNA, 25 bp, Homo sapien
catctgaagctttctgcaagacaac

SEQ ID NO: 2265306 - DNA, 25 bp, Homo sapien
cagtgtctggcaaaatgtagttagc

SEQ ID NO: 2265307 - DNA, 25 bp, Homo sapien
gtagaaaaccaaatcaaagacacga

SEQ ID NO: 2265308 - DNA, 25 bp, Homo sapien
atcaaagacacgaacacggacgggc

SEQ ID NO: 2265309 - DNA, 25 bp, Homo sapien
aaccaaatcaaagacacgaacacgg

SEQ ID NO: 2265310 - DNA, 25 bp, Homo sapien
aagacacgaacacggacgggctgtg

SEQ ID NO: 2265311 - DNA, 25 bp, Homo sapien
cactcgaaccgaagttatgaggcgc

SEQ ID NO: 2265312 - DNA, 25 bp, Homo sapien
taggctaaaacttccaggtctccca

SEQ ID NO: 2265313 - DNA, 25 bp, Homo sapien
gatgtcgtcttaaagggctgtcccc

SEQ ID NO: 2265314 - DNA, 25 bp, Homo sapien
ttaatccgccttgagaacagctagg

SEQ ID NO: 2265315 - DNA, 25 bp, Homo sapien
ttctggccgcctgacacttgtttag

SEQ ID NO: 2265316 - DNA, 25 bp, Homo sapien
cgggtattacgacgcagcagctgac

SEQ ID NO: 2265317 - DNA, 25 bp, Homo sapien
gatctgcgcttttcgcccggttgac

SEQ ID NO: 2265318 - DNA, 25 bp, Homo sapien
ccggttgaccaaaactgcaaggcag

SEQ ID NO: 2265319 - DNA, 25 bp, Homo sapien
tgaattttacctatacagtacacgt

SEQ ID NO: 2265320 - DNA, 25 bp, Homo sapien
cagtacacgtttgcaaaagaaaaat

SEQ ID NO: 2265321 - DNA, 25 bp, Homo sapien
tatagttcagttacatcatacacac

SEQ ID NO: 2265322 - DNA, 25 bp, Homo sapien
tcatacacacacttaacgtacctga

SEQ ID NO: 2265323 - DNA, 25 bp, Homo sapien
tatgtggtccaatccgtaacctgct

SEQ ID NO: 2265324 - DNA, 25 bp, Homo sapien
agctctctgccgtacttgccataca

SEQ ID NO: 2265325 - DNA, 25 bp, Homo sapien
tcagtctaacagcttaaccagctct

SEQ ID NO: 2265326 - DNA, 25 bp, Homo sapien
gaaaagctgaaactgctggtttcca

SEQ ID NO: 2265327 - DNA, 25 bp, Homo sapien
aaaagagcatctctcgtgtaccagg

SEQ ID NO: 2265328 - DNA, 25 bp, Homo sapien
aaagagcatctctcgtgtaccaggc

SEQ ID NO: 2265329 - DNA, 25 bp, Homo sapien
agcgacctccaactttttatccctg

SEQ ID NO: 2265330 - DNA, 25 bp, Homo sapien
ctttttatccctgggtctgaagtca

SEQ ID NO: 2265331 - DNA, 25 bp, Homo sapien
ttatccctgggtctgaagtcacatc

SEQ ID NO: 2265332 - DNA, 25 bp, Homo sapien
agaaaacagataagcgacctccaac

SEQ ID NO: 2265333 - DNA, 25 bp, Homo sapien
gaagcgctctcgatatgagttttgg

SEQ ID NO: 2265334 - DNA, 25 bp, Homo sapien
gaatgactccgaggaactgctcttt

SEQ ID NO: 2265335 - DNA, 25 bp, Homo sapien
cagagtgataggacgtaccctgcct

SEQ ID NO: 2265336 - DNA, 25 bp, Homo sapien
cctgcctggtcatgcccaagggatt

SEQ ID NO: 2265337 - DNA, 25 bp, Homo sapien
tgctggctgacgtccaagctaacag

SEQ ID NO: 2265338 - DNA, 25 bp, Homo sapien
cttggaaatcatgaacgtcccgtct

SEQ ID NO: 2265339 - DNA, 25 bp, Homo sapien
agctaacagccgccccattgggaaa

SEQ ID NO: 2265340 - DNA, 25 bp, Homo sapien
gaacgtcccgtctgtggtcacagct

SEQ ID NO: 2265341 - DNA, 25 bp, Homo sapien
tgtctttggctgttctgagggcacc

SEQ ID NO: 2265342 - DNA, 25 bp, Homo sapien
gggcttttcactcagagagaaggaa

SEQ ID NO: 2265343 - DNA, 25 bp, Homo sapien
tgtttggacggaagcagaatgcctg

SEQ ID NO: 2265344 - DNA, 25 bp, Homo sapien
cctgagagaatttctgagtggatgc

SEQ ID NO: 2265345 - DNA, 25 bp, Homo sapien
gaccccgaactacaaaactagcaga

SEQ ID NO: 2265346 - DNA, 25 bp, Homo sapien
aatttgggcaattcacactgcctgg

SEQ ID NO: 2265347 - DNA, 25 bp, Homo sapien
cattttaagttgatacggaatctcg

SEQ ID NO: 2265348 - DNA, 25 bp, Homo sapien
aaacttatgtgcacgaaaggaagca

SEQ ID NO: 2265349 - DNA, 25 bp, Homo sapien
tacttatctcaatggctaaagaaaa

SEQ ID NO: 2265350 - DNA, 25 bp, Homo sapien
aattaactgggcaccatgacacaca

SEQ ID NO: 2265351 - DNA, 25 bp, Homo sapien
aactgggcaccatgacacacaccag

SEQ ID NO: 2265352 - DNA, 25 bp, Homo sapien
accacagcgaggctatgacttactt

SEQ ID NO: 2265353 - DNA, 25 bp, Homo sapien
tggttgtacagctctatgactatac

SEQ ID NO: 2265354 - DNA, 25 bp, Homo sapien
gctcctggtctgcaacagctattgg

SEQ ID NO: 2265355 - DNA, 25 bp, Homo sapien
ctgcgaaggagataaaatgagctcc

SEQ ID NO: 2265356 - DNA, 25 bp, Homo sapien
tgtgctccctaagctccctgcgaag

SEQ ID NO: 2265357 - DNA, 25 bp, Homo sapien
cttgactgtttatccagcttgccgt

SEQ ID NO: 2265358 - DNA, 25 bp, Homo sapien
tgactgtttatccagcttgccgttc

SEQ ID NO: 2265359 - DNA, 25 bp, Homo sapien
tcttgactgtttatccagcttgccg

SEQ ID NO: 2265360 - DNA, 25 bp, Homo sapien
actgtttatccagcttgccgttctg

SEQ ID NO: 2265361 - DNA, 25 bp, Homo sapien
ggttatttcacagactttttatgtg

SEQ ID NO: 2265362 - DNA, 25 bp, Homo sapien
gttatttcacagactttttatgtgg

SEQ ID NO: 2265363 - DNA, 25 bp, Homo sapien
ctggttatttcacagactttttatg

SEQ ID NO: 2265364 - DNA, 25 bp, Homo sapien
agctggttatttcacagacttttta

SEQ ID NO: 2265365 - DNA, 25 bp, Homo sapien
ggcagcactggtttgtaaggcaaga

SEQ ID NO: 2265366 - DNA, 25 bp, Homo sapien
cactggtttgtaaggcaagaggtct

SEQ ID NO: 2265367 - DNA, 25 bp, Homo sapien
tttgtaaggcaagaggtcttggtac

SEQ ID NO: 2265368 - DNA, 25 bp, Homo sapien
cagcactggtttgtaaggcaagagg

SEQ ID NO: 2265369 - DNA, 25 bp, Homo sapien
gatagctaggaactgcttccaaatt

SEQ ID NO: 2265370 - DNA, 25 bp, Homo sapien
cttgctcacttaggccctttgtttg

SEQ ID NO: 2265371 - DNA, 25 bp, Homo sapien
gtttgatactgcagaagtggcatcc

SEQ ID NO: 2265372 - DNA, 25 bp, Homo sapien
ccctgcacactgaagatagctagga

SEQ ID NO: 2265373 - DNA, 25 bp, Homo sapien
ggcccctttagggactgctacagat

SEQ ID NO: 2265374 - DNA, 25 bp, Homo sapien
tgtttggcccctttagggactgcta

SEQ ID NO: 2265375 - DNA, 25 bp, Homo sapien
cctttagggactgctacagatctag

SEQ ID NO: 2265376 - DNA, 25 bp, Homo sapien
tagggactgctacagatctagtcat

SEQ ID NO: 2265377 - DNA, 25 bp, Homo sapien
tctatatcaagaatcctggttttca

SEQ ID NO: 2265378 - DNA, 25 bp, Homo sapien
caagggtgatagaattaagctagac

SEQ ID NO: 2265379 - DNA, 25 bp, Homo sapien
taaggttgttcccacattgttggag

SEQ ID NO: 2265380 - DNA, 25 bp, Homo sapien
caacattactattcacacgcaaagc

SEQ ID NO: 2265381 - DNA, 25 bp, Homo sapien
aagaccttgactttcttcgagatca

SEQ ID NO: 2265382 - DNA, 25 bp, Homo sapien
gactttcttcgagatcaatttacta

SEQ ID NO: 2265383 - DNA, 25 bp, Homo sapien
gatcaatttactaccacagaagtca

SEQ ID NO: 2265384 - DNA, 25 bp, Homo sapien
gaggaagaccttgactttcttcgag

SEQ ID NO: 2265385 - DNA, 25 bp, Homo sapien
cttcagatgtaggagctgcactttc

SEQ ID NO: 2265386 - DNA, 25 bp, Homo sapien
cagcatgtggcagttgtttatggtt

SEQ ID NO: 2265387 - DNA, 25 bp, Homo sapien
ttaccttgccaaaccgtgagctctt

SEQ ID NO: 2265388 - DNA, 25 bp, Homo sapien
tgcagcatgtggcagttgtttatgg

SEQ ID NO: 2265389 - DNA, 25 bp, Homo sapien
tactagtacattgaccagcgctggg

SEQ ID NO: 2265390 - DNA, 25 bp, Homo sapien
gaatgccggacgctagcacagttta

SEQ ID NO: 2265391 - DNA, 25 bp, Homo sapien
caacataagggagatcttggccaac

SEQ ID NO: 2265392 - DNA, 25 bp, Homo sapien
gaaaactcttagctgaaatggccga

SEQ ID NO: 2265393 - DNA, 25 bp, Homo sapien
aatttactcatgaggatgtatgcag

SEQ ID NO: 2265394 - DNA, 25 bp, Homo sapien
cccagccagatgtacgtgttaatct

SEQ ID NO: 2265395 - DNA, 25 bp, Homo sapien
tacaactgtacaccaatgcatttgg

SEQ ID NO: 2265396 - DNA, 25 bp, Homo sapien
caagactacaaatgagagagaggtt

SEQ ID NO: 2265397 - DNA, 25 bp, Homo sapien
tccccatggaatacatttctggaaa

SEQ ID NO: 2265398 - DNA, 25 bp, Homo sapien
gacagaaagcacaaaagatcaccat

SEQ ID NO: 2265399 - DNA, 25 bp, Homo sapien
taaccatgatatcaaaacctgacag

SEQ ID NO: 2265400 - DNA, 25 bp, Homo sapien
ggagagtcccaatataccatagtat

SEQ ID NO: 2265401 - DNA, 25 bp, Homo sapien
ttttcattcacatacagctaaataa

SEQ ID NO: 2265402 - DNA, 25 bp, Homo sapien
tattttcattcacatacagctaaat

SEQ ID NO: 2265403 - DNA, 25 bp, Homo sapien
tcacatttcattacagtgcacaaca

SEQ ID NO: 2265404 - DNA, 25 bp, Homo sapien
catttcattacagtgcacaacaaag

SEQ ID NO: 2265405 - DNA, 25 bp, Homo sapien
tacttccagattgcaggtgccaagg

SEQ ID NO: 2265406 - DNA, 25 bp, Homo sapien
ggtgccaaggcattgaaaccccagg

SEQ ID NO: 2265407 - DNA, 25 bp, Homo sapien
tgtcttttacaaccacgaaggtggc

SEQ ID NO: 2265408 - DNA, 25 bp, Homo sapien
gcacaggtggcagaatagtcttcca

SEQ ID NO: 2265409 - DNA, 25 bp, Homo sapien
cagttcaagtaggagagcatgtttt

SEQ ID NO: 2265410 - DNA, 25 bp, Homo sapien
tctcttacttttcagttcaagtagg

SEQ ID NO: 2265411 - DNA, 25 bp, Homo sapien
tacttttcagttcaagtaggagagc

SEQ ID NO: 2265412 - DNA, 25 bp, Homo sapien
tcaagtaggagagcatgttttggaa

SEQ ID NO: 2265413 - DNA, 25 bp, Homo sapien
ctcctctctgatttgacaacctctt

SEQ ID NO: 2265414 - DNA, 25 bp, Homo sapien
ctgatttgacaacctcttctgaaga

SEQ ID NO: 2265415 - DNA, 25 bp, Homo sapien
cacatttggtacaaatccactcttc

SEQ ID NO: 2265416 - DNA, 25 bp, Homo sapien
tactgagttcctgtagtaggcgcga

SEQ ID NO: 2265417 - DNA, 25 bp, Homo sapien
taagagaagaccacctactgagttc

SEQ ID NO: 2265418 - DNA, 25 bp, Homo sapien
cattaatggcatctcgggctgacgt

SEQ ID NO: 2265419 - DNA, 25 bp, Homo sapien
tatgcagcagccagtttctcggcct

SEQ ID NO: 2265420 - DNA, 25 bp, Homo sapien
ctgggcaaagcgaccctcggtgaag

SEQ ID NO: 2265421 - DNA, 25 bp, Homo sapien
gcttgatgcgttttcctggctcgat

SEQ ID NO: 2265422 - DNA, 25 bp, Homo sapien
tggctcgatctccaccaagcgggag

SEQ ID NO: 2265423 - DNA, 25 bp, Homo sapien
acaatgagccggaactggtacagcc

SEQ ID NO: 2265424 - DNA, 25 bp, Homo sapien
tgcaggtctccttggcccggaccgg

SEQ ID NO: 2265425 - DNA, 25 bp, Homo sapien
tagctcagccgcgagcgcatcgctg

SEQ ID NO: 2265426 - DNA, 25 bp, Homo sapien
gcggctcggcaggatctagctcagc

SEQ ID NO: 2265427 - DNA, 25 bp, Homo sapien
cgctcgcaaaggtgatgaaatggca

SEQ ID NO: 2265428 - DNA, 25 bp, Homo sapien
caacctccatctcctgggctcaagc

SEQ ID NO: 2265429 - DNA, 25 bp, Homo sapien
gggctcaagcagttatcctccctca

SEQ ID NO: 2265430 - DNA, 25 bp, Homo sapien
tcctgggctcaagcagttatcctcc

SEQ ID NO: 2265431 - DNA, 25 bp, Homo sapien
tgcccggactcctgtatagttctat

SEQ ID NO: 2265432 - DNA, 25 bp, Homo sapien
taaggtggacatgctagcaacaaat

SEQ ID NO: 2265433 - DNA, 25 bp, Homo sapien
acctcttttgtgttgcttttggcaa

SEQ ID NO: 2265434 - DNA, 25 bp, Homo sapien
gatcactctgaatgtgttacctcat

SEQ ID NO: 2265435 - DNA, 25 bp, Homo sapien
ccacctgttcggtacaatgcacact

SEQ ID NO: 2265436 - DNA, 25 bp, Homo sapien
ggtttgcagaatggtataacggaca

SEQ ID NO: 2265437 - DNA, 25 bp, Homo sapien
gacagatacacttaaagcccaggct

SEQ ID NO: 2265438 - DNA, 25 bp, Homo sapien
taacggacattggagtctcagaagt

SEQ ID NO: 2265439 - DNA, 25 bp, Homo sapien
tattaagtcatagccccatcagaag

SEQ ID NO: 2265440 - DNA, 25 bp, Homo sapien
ccatcagaaggtgaggagtatctat

SEQ ID NO: 2265441 - DNA, 25 bp, Homo sapien
tagaatccaaggtcttagcattggg

SEQ ID NO: 2265442 - DNA, 25 bp, Homo sapien
gtgcttgttgctactagggtactat

SEQ ID NO: 2265443 - DNA, 25 bp, Homo sapien
tgatatgaagtgtttacatcatcat

SEQ ID NO: 2265444 - DNA, 25 bp, Homo sapien
tatttttactaatagcagtgtttag

SEQ ID NO: 2265445 - DNA, 25 bp, Homo sapien
ctaatagcagtgtttagttataaaa

SEQ ID NO: 2265446 - DNA, 25 bp, Homo sapien
tggattctgatatgaagtgtttaca

SEQ ID NO: 2265447 - DNA, 25 bp, Homo sapien
atatatgggatacaatgtggtgttt

SEQ ID NO: 2265448 - DNA, 25 bp, Homo sapien
aatgatcaaataggcgtaattacca

SEQ ID NO: 2265449 - DNA, 25 bp, Homo sapien
tcaaataggcgtaattaccatatcc

SEQ ID NO: 2265450 - DNA, 25 bp, Homo sapien
atatgggatacaatgtggtgtttca

SEQ ID NO: 2265451 - DNA, 25 bp, Homo sapien
gattctaccctctacttgtgtgaga

SEQ ID NO: 2265452 - DNA, 25 bp, Homo sapien
caccctactgtggtgaataccaaaa

SEQ ID NO: 2265453 - DNA, 25 bp, Homo sapien
caaggacagtactttgagtttgctc

SEQ ID NO: 2265454 - DNA, 25 bp, Homo sapien
tgagggagcaagagttaagttcagc

SEQ ID NO: 2265455 - DNA, 25 bp, Homo sapien
taaaagattcagttgactttgtttc

SEQ ID NO: 2265456 - DNA, 25 bp, Homo sapien
gaataaaagattcagttgactttgt

SEQ ID NO: 2265457 - DNA, 25 bp, Homo sapien
aataaaagattcagttgactttgtt

SEQ ID NO: 2265458 - DNA, 25 bp, Homo sapien
atgaataaaagattcagttgacttt

SEQ ID NO: 2265459 - DNA, 25 bp, Homo sapien
gcagtggtttgccatacagataaag

SEQ ID NO: 2265460 - DNA, 25 bp, Homo sapien
taatctggtcacaaaggctacattc

SEQ ID NO: 2265461 - DNA, 25 bp, Homo sapien
gaggtggtcatagttctaggcgtca

SEQ ID NO: 2265462 - DNA, 25 bp, Homo sapien
tccaggaattcaagcaaagggcaaa

SEQ ID NO: 2265463 - DNA, 25 bp, Homo sapien
ttcaggacacgtgtgggtaaattct

SEQ ID NO: 2265464 - DNA, 25 bp, Homo sapien
gcattgtggagataacgccagactc

SEQ ID NO: 2265465 - DNA, 25 bp, Homo sapien
ggtaaattcttcacgggcataggca

SEQ ID NO: 2265466 - DNA, 25 bp, Homo sapien
tctttgtcttcaggacacgtgtggg

SEQ ID NO: 2265467 - DNA, 25 bp, Homo sapien
gctggaatgtcaaagtcacgatatt

SEQ ID NO: 2265468 - DNA, 25 bp, Homo sapien
atgtcaaagtcacgatatttcttgg

SEQ ID NO: 2265469 - DNA, 25 bp, Homo sapien
tcaaagtcacgatatttcttggcag

SEQ ID NO: 2265470 - DNA, 25 bp, Homo sapien
ggaatgtcaaagtcacgatatttct

SEQ ID NO: 2265471 - DNA, 25 bp, Homo sapien
ggggttgcaataagccttgatcatg

SEQ ID NO: 2265472 - DNA, 25 bp, Homo sapien
tggaaggtcactatgctttgtgctg

SEQ ID NO: 2265473 - DNA, 25 bp, Homo sapien
gatgataatgacaaagctataatat

SEQ ID NO: 2265474 - DNA, 25 bp, Homo sapien
ttcagcctgccttataaagacttac

SEQ ID NO: 2265475 - DNA, 25 bp, Homo sapien
tataatataataataccgcactgga

SEQ ID NO: 2265476 - DNA, 25 bp, Homo sapien
ggtccccatccaagaatagtcttct

SEQ ID NO: 2265477 - DNA, 25 bp, Homo sapien
taataatgttcagcttgggtaacaa

SEQ ID NO: 2265478 - DNA, 25 bp, Homo sapien
gacgcttgaattctttgagcagaga

SEQ ID NO: 2265479 - DNA, 25 bp, Homo sapien
gctacaatcagccagtgttagctgg

SEQ ID NO: 2265480 - DNA, 25 bp, Homo sapien
taactatttagaatgctcagctact

SEQ ID NO: 2265481 - DNA, 25 bp, Homo sapien
cactggctcttcaatatctagttaa

SEQ ID NO: 2265482 - DNA, 25 bp, Homo sapien
tatctatacatactacttacactgg

SEQ ID NO: 2265483 - DNA, 25 bp, Homo sapien
aaatatgctttccacacatttagac

SEQ ID NO: 2265484 - DNA, 25 bp, Homo sapien
cacatcaaaagactccttgtacttg

SEQ ID NO: 2265485 - DNA, 25 bp, Homo sapien
tacagcccacatcaaaagactcctt

SEQ ID NO: 2265486 - DNA, 25 bp, Homo sapien
agcccacatcaaaagactccttgta

SEQ ID NO: 2265487 - DNA, 25 bp, Homo sapien
caaaagactccttgtacttgggact

SEQ ID NO: 2265488 - DNA, 25 bp, Homo sapien
aaaaagaaacatgcgtcaactatca

SEQ ID NO: 2265489 - DNA, 25 bp, Homo sapien
taaaaagaaacatgcgtcaactatc

SEQ ID NO: 2265490 - DNA, 25 bp, Homo sapien
gaagaatcactacactatcttccac

SEQ ID NO: 2265491 - DNA, 25 bp, Homo sapien
agaataatagcctgtagctccatcc

SEQ ID NO: 2265492 - DNA, 25 bp, Homo sapien
ctgctgttagctctttgaagaatca

SEQ ID NO: 2265493 - DNA, 25 bp, Homo sapien
tcttttctatggctacatactattc

SEQ ID NO: 2265494 - DNA, 25 bp, Homo sapien
ccttgggaatcctctttggcaaatc

SEQ ID NO: 2265495 - DNA, 25 bp, Homo sapien
aatggtaacgagctgaatccttggg

SEQ ID NO: 2265496 - DNA, 25 bp, Homo sapien
actctaaatagtctccttcatggga

SEQ ID NO: 2265497 - DNA, 25 bp, Homo sapien
ctatggactctaaatagtctccttc

SEQ ID NO: 2265498 - DNA, 25 bp, Homo sapien
ctgtatttgttgtgttggccaaaat

SEQ ID NO: 2265499 - DNA, 25 bp, Homo sapien
gtatttgttgtgttggccaaaatta

SEQ ID NO: 2265500 - DNA, 25 bp, Homo sapien
atttgttgtgttggccaaaattata

SEQ ID NO: 2265501 - DNA, 25 bp, Homo sapien
atgtttatttccaactgcacatagt

SEQ ID NO: 2265502 - DNA, 25 bp, Homo sapien
cgtcagtctgtacctcattgatttt

SEQ ID NO: 2265503 - DNA, 25 bp, Homo sapien
cagtctgtacctcattgattttaat

SEQ ID NO: 2265504 - DNA, 25 bp, Homo sapien
acgtcagtctgtacctcattgattt

SEQ ID NO: 2265505 - DNA, 25 bp, Homo sapien
gtcagtctgtacctcattgatttta

SEQ ID NO: 2265506 - DNA, 25 bp, Homo sapien
tataaccttttttgacggacatgag

SEQ ID NO: 2265507 - DNA, 25 bp, Homo sapien
taaccttttttgacggacatgagaa

SEQ ID NO: 2265508 - DNA, 25 bp, Homo sapien
tgctgcatataaccttttttgacgg

SEQ ID NO: 2265509 - DNA, 25 bp, Homo sapien
tgcatataaccttttttgacggaca

SEQ ID NO: 2265510 - DNA, 25 bp, Homo sapien
gacgtggcggcggccactagctcct

SEQ ID NO: 2265511 - DNA, 25 bp, Homo sapien
cagtgacggtgattcagatgacggc

SEQ ID NO: 2265512 - DNA, 25 bp, Homo sapien
gctccctgctctagacagtgacggt

SEQ ID NO: 2265513 - DNA, 25 bp, Homo sapien
aactcagttcctgggtacaagccca

SEQ ID NO: 2265514 - DNA, 25 bp, Homo sapien
caagaaaagatgctcccaaacgttc

SEQ ID NO: 2265515 - DNA, 25 bp, Homo sapien
caccaggaacggaggattggtacct

SEQ ID NO: 2265516 - DNA, 25 bp, Homo sapien
tatacaccaggaacggaggattggt

SEQ ID NO: 2265517 - DNA, 25 bp, Homo sapien
tccttgttatacaccaggaacggag

SEQ ID NO: 2265518 - DNA, 25 bp, Homo sapien
tgttatacaccaggaacggaggatt

SEQ ID NO: 2265519 - DNA, 25 bp, Homo sapien
attaaaaataagcagagttaggtct

SEQ ID NO: 2265520 - DNA, 25 bp, Homo sapien
attattaaaaataagcagagttagg

SEQ ID NO: 2265521 - DNA, 25 bp, Homo sapien
tgattattaaaaataagcagagtta

SEQ ID NO: 2265522 - DNA, 25 bp, Homo sapien
ctatgattattaaaaataagcagag

SEQ ID NO: 2265523 - DNA, 25 bp, Homo sapien
cagttgtcacattaaatttaactcc

SEQ ID NO: 2265524 - DNA, 25 bp, Homo sapien
caacagttgtcacattaaatttaac

SEQ ID NO: 2265525 - DNA, 25 bp, Homo sapien
ctggtcatgtcaacagttgtcacat

SEQ ID NO: 2265526 - DNA, 25 bp, Homo sapien
atttaactcctttaagccagaggat

SEQ ID NO: 2265527 - DNA, 25 bp, Homo sapien
gcgttggcaaaagggacagtttcca

SEQ ID NO: 2265528 - DNA, 25 bp, Homo sapien
ttggcaaaagggacagtttccaata

SEQ ID NO: 2265529 - DNA, 25 bp, Homo sapien
aaagggacagtttccaatactctct

SEQ ID NO: 2265530 - DNA, 25 bp, Homo sapien
agtttccaatactctctccatcact

SEQ ID NO: 2265531 - DNA, 25 bp, Homo sapien
ccataaggattttctatcacgtttt

SEQ ID NO: 2265532 - DNA, 25 bp, Homo sapien
cataaggattttctatcacgttttc

SEQ ID NO: 2265533 - DNA, 25 bp, Homo sapien
tcatggaagaaggtgaaaggcacat

SEQ ID NO: 2265534 - DNA, 25 bp, Homo sapien
atcatggaagaaggtgaaaggcaca

SEQ ID NO: 2265535 - DNA, 25 bp, Homo sapien
tagcaccctattcttggtaccaatt

SEQ ID NO: 2265536 - DNA, 25 bp, Homo sapien
tgagccctcccatgtgttccaacct

SEQ ID NO: 2265537 - DNA, 25 bp, Homo sapien
ttaagtagcaccctattcttggtac

SEQ ID NO: 2265538 - DNA, 25 bp, Homo sapien
gccctcccatgtgttccaacctctg

SEQ ID NO: 2265539 - DNA, 25 bp, Homo sapien
ctttacaaaaagctcaatctcaggg

SEQ ID NO: 2265540 - DNA, 25 bp, Homo sapien
agggtccacttgagtgccgggccgc

SEQ ID NO: 2265541 - DNA, 25 bp, Homo sapien
tttacaaaaagctcaatctcagggt

SEQ ID NO: 2265542 - DNA, 25 bp, Homo sapien
ttacaaaaagctcaatctcagggtc

SEQ ID NO: 2265543 - DNA, 25 bp, Homo sapien
cctgtagagtccacaatacttgtag

SEQ ID NO: 2265544 - DNA, 25 bp, Homo sapien
tcaagaggtgtgacgcagaaaattc

SEQ ID NO: 2265545 - DNA, 25 bp, Homo sapien
gaagaccgtctagcttgtagtggac

SEQ ID NO: 2265546 - DNA, 25 bp, Homo sapien
tagtggactgagtcagacctggagc

SEQ ID NO: 2265547 - DNA, 25 bp, Homo sapien
ggcttgtttagtgtgccccacctag

SEQ ID NO: 2265548 - DNA, 25 bp, Homo sapien
tccagtgatactgtctaaaagaggg

SEQ ID NO: 2265549 - DNA, 25 bp, Homo sapien
ttggaagcttggactggaacagatc

SEQ ID NO: 2265550 - DNA, 25 bp, Homo sapien
gttttggcgtctgtatcaggaacca

SEQ ID NO: 2265551 - DNA, 25 bp, Homo sapien
gggagcatgcatctcacatgatgaa

SEQ ID NO: 2265552 - DNA, 25 bp, Homo sapien
cagtggctgtgaagcggtatcttac

SEQ ID NO: 2265553 - DNA, 25 bp, Homo sapien
gaccaactcttgcaatgaattcaga

SEQ ID NO: 2265554 - DNA, 25 bp, Homo sapien
tatgagagtggtaccaagccaccca

SEQ ID NO: 2265555 - DNA, 25 bp, Homo sapien
gtctttcaaaaaacacccattcatg

SEQ ID NO: 2265556 - DNA, 25 bp, Homo sapien
tgactggtgtaagatagtattgttt

SEQ ID NO: 2265557 - DNA, 25 bp, Homo sapien
ccactaacagtgcataagcattact

SEQ ID NO: 2265558 - DNA, 25 bp, Homo sapien
ttgtatgtctttcaaaaaacaccca

SEQ ID NO: 2265559 - DNA, 25 bp, Homo sapien
tacttgccaacgtctgtcatttttg

SEQ ID NO: 2265560 - DNA, 25 bp, Homo sapien
tctagtagatttacggtgtcaggtc

SEQ ID NO: 2265561 - DNA, 25 bp, Homo sapien
tacaatggccatattcccatactgt

SEQ ID NO: 2265562 - DNA, 25 bp, Homo sapien
gaccaatatcatagagttataccat

SEQ ID NO: 2265563 - DNA, 25 bp, Homo sapien
gataaactgtggtgtgatcacgcac

SEQ ID NO: 2265564 - DNA, 25 bp, Homo sapien
gatcacgcactcaacttccatatag

SEQ ID NO: 2265565 - DNA, 25 bp, Homo sapien
taagcaatgatgaaactcctaaaca

SEQ ID NO: 2265566 - DNA, 25 bp, Homo sapien
cagcactgtttgtagtagttccaaa

SEQ ID NO: 2265567 - DNA, 25 bp, Homo sapien
gtctctcctgagaccttgactcatt

SEQ ID NO: 2265568 - DNA, 25 bp, Homo sapien
cttctgtctctcctgagaccttgac

SEQ ID NO: 2265569 - DNA, 25 bp, Homo sapien
cctgagaccttgactcattaattat

SEQ ID NO: 2265570 - DNA, 25 bp, Homo sapien
gagaccttgactcattaattatttt

SEQ ID NO: 2265571 - DNA, 25 bp, Homo sapien
tcatcaccggttcccatttctttga

SEQ ID NO: 2265572 - DNA, 25 bp, Homo sapien
ttgaaagtgtttgtaggtcacacac

SEQ ID NO: 2265573 - DNA, 25 bp, Homo sapien
tcttgctgctagatatgtaattttc

SEQ ID NO: 2265574 - DNA, 25 bp, Homo sapien
ttgctgctagatatgtaattttctt

SEQ ID NO: 2265575 - DNA, 25 bp, Homo sapien
gggctaatgctgtgtaaaactgtga

SEQ ID NO: 2265576 - DNA, 25 bp, Homo sapien
cgactaaagatcacaagggctaatg

SEQ ID NO: 2265577 - DNA, 25 bp, Homo sapien
ggcaggcaggcacggtaatttatcc

SEQ ID NO: 2265578 - DNA, 25 bp, Homo sapien
taatttatcccctgcacgactaaag

SEQ ID NO: 2265579 - DNA, 25 bp, Homo sapien
taggaataacaaaacgcagaagcgg

SEQ ID NO: 2265580 - DNA, 25 bp, Homo sapien
ctgatgcaaaaagtcccggcctggg

SEQ ID NO: 2265581 - DNA, 25 bp, Homo sapien
tgactcccatgaagacgtaccgtgc

SEQ ID NO: 2265582 - DNA, 25 bp, Homo sapien
cgaaataattcctatggcggcagta

SEQ ID NO: 2265583 - DNA, 25 bp, Homo sapien
cagcagtcaacagtggccacatctc

SEQ ID NO: 2265584 - DNA, 25 bp, Homo sapien
aacgaggtgaaggaggtggttctgc

SEQ ID NO: 2265585 - DNA, 25 bp, Homo sapien
gcagtcaacagtggccacatctcca

SEQ ID NO: 2265586 - DNA, 25 bp, Homo sapien
gagatggtttcttgcagaacgaggt

SEQ ID NO: 2265587 - DNA, 25 bp, Homo sapien
tcctgcccgtggctgtcaaaagcct

SEQ ID NO: 2265588 - DNA, 25 bp, Homo sapien
cagcgacttgatggcttccgtgtcc

SEQ ID NO: 2265589 - DNA, 25 bp, Homo sapien
tccttttcgtgggtagccatgacca

SEQ ID NO: 2265590 - DNA, 25 bp, Homo sapien
cagcagaaagagctcctcgggaagc

SEQ ID NO: 2265591 - DNA, 25 bp, Homo sapien
cagcacgtccgagaaggcgcccagg

SEQ ID NO: 2265592 - DNA, 25 bp, Homo sapien
cgagccggagttcggaggaagcagc

SEQ ID NO: 2265593 - DNA, 25 bp, Homo sapien
agcggaccagcacgtccgagaaggc

SEQ ID NO: 2265594 - DNA, 25 bp, Homo sapien
ccgccgagccggagttcggaggaag

SEQ ID NO: 2265595 - DNA, 25 bp, Homo sapien
ggcggcgcgctggaagtgaccggcg

SEQ ID NO: 2265596 - DNA, 25 bp, Homo sapien
ccaggcgctgcatgcgcgtgaagac

SEQ ID NO: 2265597 - DNA, 25 bp, Homo sapien
tgtagtcgcgcgccagcagctggca

SEQ ID NO: 2265598 - DNA, 25 bp, Homo sapien
gccagggcgccggtgtagtcgcgcg

SEQ ID NO: 2265599 - DNA, 25 bp, Homo sapien
ggcccagctcgaggtgcagacgcac

SEQ ID NO: 2265600 - DNA, 25 bp, Homo sapien
ctggcccagctcgaggtgcagacgc

SEQ ID NO: 2265601 - DNA, 25 bp, Homo sapien
tggcccagctcgaggtgcagacgca

SEQ ID NO: 2265602 - DNA, 25 bp, Homo sapien
gctggcccagctcgaggtgcagacg

SEQ ID NO: 2265603 - DNA, 25 bp, Homo sapien
ccgggcccgtggaagagcgcctgct

SEQ ID NO: 2265604 - DNA, 25 bp, Homo sapien
tcttcagcttgttcgataccagccg

SEQ ID NO: 2265605 - DNA, 25 bp, Homo sapien
caccaggccgcgtagggcagacact

SEQ ID NO: 2265606 - DNA, 25 bp, Homo sapien
ttcggcttccgcaggaaccgcttct

SEQ ID NO: 2265607 - DNA, 25 bp, Homo sapien
ccgccgccgcccaggcctgcagccg

SEQ ID NO: 2265608 - DNA, 25 bp, Homo sapien
ggcgccgccgccgcccaggcctgca

SEQ ID NO: 2265609 - DNA, 25 bp, Homo sapien
ccgccgcccaggcctgcagccgctg

SEQ ID NO: 2265610 - DNA, 25 bp, Homo sapien
gccgccgccgcccaggcctgcagcc

SEQ ID NO: 2265611 - DNA, 25 bp, Homo sapien
agcacttcccgacgcgccgccgcag

SEQ ID NO: 2265612 - DNA, 25 bp, Homo sapien
cccaagcacttcccgacgcgccgcc

SEQ ID NO: 2265613 - DNA, 25 bp, Homo sapien
caagcacttcccgacgcgccgccgc

SEQ ID NO: 2265614 - DNA, 25 bp, Homo sapien
aagcacttcccgacgcgccgccgca

SEQ ID NO: 2265615 - DNA, 25 bp, Homo sapien
cagaattaatgaaggcccaagactt

SEQ ID NO: 2265616 - DNA, 25 bp, Homo sapien
ccgggtgggtggacgagtggacctg

SEQ ID NO: 2265617 - DNA, 25 bp, Homo sapien
ttgacagaattaatgaaggcccaag

SEQ ID NO: 2265618 - DNA, 25 bp, Homo sapien
gacgagtggacctgtcaggtcccag

SEQ ID NO: 2265619 - DNA, 25 bp, Homo sapien
gatgttccgctctccgctgttctgg

SEQ ID NO: 2265620 - DNA, 25 bp, Homo sapien
tgttgaaaagggtgctcagtagcct

SEQ ID NO: 2265621 - DNA, 25 bp, Homo sapien
tcagtagcctgtcgttgtgaaccac

SEQ ID NO: 2265622 - DNA, 25 bp, Homo sapien
caggtactcaataaccgcagcgagg

SEQ ID NO: 2265623 - DNA, 25 bp, Homo sapien
ggacggtgcgagagcaggtccgccc

SEQ ID NO: 2265624 - DNA, 25 bp, Homo sapien
cggccgccagcaccggaggaccctc

SEQ ID NO: 2265625 - DNA, 25 bp, Homo sapien
cgaaagctccgctcggacggtgcga

SEQ ID NO: 2265626 - DNA, 25 bp, Homo sapien
ctgaaaacgaaagctccgctcggac

SEQ ID NO: 2265627 - DNA, 25 bp, Homo sapien
gctgggcgttgagtgtgctatctcg

SEQ ID NO: 2265628 - DNA, 25 bp, Homo sapien
tgctatctcggcttggcccagctag

SEQ ID NO: 2265629 - DNA, 25 bp, Homo sapien
ctcggcttggcccagctaggcaaga

SEQ ID NO: 2265630 - DNA, 25 bp, Homo sapien
ggcgttgagtgtgctatctcggctt

SEQ ID NO: 2265631 - DNA, 25 bp, Homo sapien
gaaacccctgtacctataagcagtc

SEQ ID NO: 2265632 - DNA, 25 bp, Homo sapien
ggtaccacgccttcacaatgttgca

SEQ ID NO: 2265633 - DNA, 25 bp, Homo sapien
tttctactggatgggaacaccgtgg

SEQ ID NO: 2265634 - DNA, 25 bp, Homo sapien
ataagcagtcacttgccgcacgcct

SEQ ID NO: 2265635 - DNA, 25 bp, Homo sapien
tgtagaaatacaaccgactgttgca

SEQ ID NO: 2265636 - DNA, 25 bp, Homo sapien
tcttggatactgcaactttgctgag

SEQ ID NO: 2265637 - DNA, 25 bp, Homo sapien
ctttgctgagccgaatatgctttgc

SEQ ID NO: 2265638 - DNA, 25 bp, Homo sapien
tgagcatactcagacagggttggca

SEQ ID NO: 2265639 - DNA, 25 bp, Homo sapien
agcctggtaagaataggctgacggt

SEQ ID NO: 2265640 - DNA, 25 bp, Homo sapien
cctggtaagaataggctgacggtgc

SEQ ID NO: 2265641 - DNA, 25 bp, Homo sapien
gcctggtaagaataggctgacggtg

SEQ ID NO: 2265642 - DNA, 25 bp, Homo sapien
cagcctggtaagaataggctgacgg

SEQ ID NO: 2265643 - DNA, 25 bp, Homo sapien
ccccattccccgaatgcattagtga

SEQ ID NO: 2265644 - DNA, 25 bp, Homo sapien
tgaattgtagtttagttgggtatga

SEQ ID NO: 2265645 - DNA, 25 bp, Homo sapien
tccccgaatgcattagtgatatgat

SEQ ID NO: 2265646 - DNA, 25 bp, Homo sapien
ttgaattgtagtttagttgggtatg

SEQ ID NO: 2265647 - DNA, 25 bp, Homo sapien
gattattggtttacccctgctctct

SEQ ID NO: 2265648 - DNA, 25 bp, Homo sapien
tacgaggaactatgtctgttttcaa

SEQ ID NO: 2265649 - DNA, 25 bp, Homo sapien
tggctcatgcttttagaatacgagg

SEQ ID NO: 2265650 - DNA, 25 bp, Homo sapien
cttttctttgttgacctgcgccggt

SEQ ID NO: 2265651 - DNA, 25 bp, Homo sapien
ggcatcagagaggaagttagaaagc

SEQ ID NO: 2265652 - DNA, 25 bp, Homo sapien
gaaaaaccttcactgagttcacagt

SEQ ID NO: 2265653 - DNA, 25 bp, Homo sapien
caccatcagtgggtagaccatggag

SEQ ID NO: 2265654 - DNA, 25 bp, Homo sapien
ttcctgtgacacgacactgcctcag

SEQ ID NO: 2265655 - DNA, 25 bp, Homo sapien
catactcacagattaaagcccagga

SEQ ID NO: 2265656 - DNA, 25 bp, Homo sapien
tcatgttatggaacgcccactgctc

SEQ ID NO: 2265657 - DNA, 25 bp, Homo sapien
tgtatagcggttccaaagtaccctg

SEQ ID NO: 2265658 - DNA, 25 bp, Homo sapien
caggactagaatggagctacccaca

SEQ ID NO: 2265659 - DNA, 25 bp, Homo sapien
ggactgcaggcactcatgactccac

SEQ ID NO: 2265660 - DNA, 25 bp, Homo sapien
ggcactcatgactccacccaactaa

SEQ ID NO: 2265661 - DNA, 25 bp, Homo sapien
ctcatgactccacccaactaacttt

SEQ ID NO: 2265662 - DNA, 25 bp, Homo sapien
tgcaggcactcatgactccacccaa

SEQ ID NO: 2265663 - DNA, 25 bp, Homo sapien
ttggtctgctaaggataagggcctc

SEQ ID NO: 2265664 - DNA, 25 bp, Homo sapien
tcataggggatttgttgcatagatt

SEQ ID NO: 2265665 - DNA, 25 bp, Homo sapien
gtgtcataggggatttgttgcatag

SEQ ID NO: 2265666 - DNA, 25 bp, Homo sapien
tggtctgctaaggataagggcctcc

SEQ ID NO: 2265667 - DNA, 25 bp, Homo sapien
tatagtgtaagcaagggagccggtt

SEQ ID NO: 2265668 - DNA, 25 bp, Homo sapien
ttgtgtgtcatctccgatttctttg

SEQ ID NO: 2265669 - DNA, 25 bp, Homo sapien
aggattgccttcggtattcgggctt

SEQ ID NO: 2265670 - DNA, 25 bp, Homo sapien
tgctgatttggctgtcggctttact

SEQ ID NO: 2265671 - DNA, 25 bp, Homo sapien
agtaagtgccttgcggtgatcagaa

SEQ ID NO: 2265672 - DNA, 25 bp, Homo sapien
agagtaagtgccttgcggtgatcag

SEQ ID NO: 2265673 - DNA, 25 bp, Homo sapien
gggtcagtgataaatattcccctta

SEQ ID NO: 2265674 - DNA, 25 bp, Homo sapien
gtgccttgcggtgatcagaagaatg

SEQ ID NO: 2265675 - DNA, 25 bp, Homo sapien
ttcgtggagtatcttcctggagttc

SEQ ID NO: 2265676 - DNA, 25 bp, Homo sapien
tcagggacaccaatcagtcttagat

SEQ ID NO: 2265677 - DNA, 25 bp, Homo sapien
cagttccgtcaggttggttacattc

SEQ ID NO: 2265678 - DNA, 25 bp, Homo sapien
gctaggttagggaatttctcataga

SEQ ID NO: 2265679 - DNA, 25 bp, Homo sapien
tgttgccagcccaaatgcgcctgca

SEQ ID NO: 2265680 - DNA, 25 bp, Homo sapien
cgaggtacagacctgttgccagccc

SEQ ID NO: 2265681 - DNA, 25 bp, Homo sapien
gagctccggcccagcgaggtacaga

SEQ ID NO: 2265682 - DNA, 25 bp, Homo sapien
cccaaatgcgcctgcaggacaaggc

SEQ ID NO: 2265683 - DNA, 25 bp, Homo sapien
tcaaggtagtcgctagcccatgggt

SEQ ID NO: 2265684 - DNA, 25 bp, Homo sapien
tggaacacattttggagcactggat

SEQ ID NO: 2265685 - DNA, 25 bp, Homo sapien
tgccaaatgtgatctaggaactccc

SEQ ID NO: 2265686 - DNA, 25 bp, Homo sapien
taatccacaggcctaggtaaaggac

SEQ ID NO: 2265687 - DNA, 25 bp, Homo sapien
ttggcggtagccagtgaagcattcc

SEQ ID NO: 2265688 - DNA, 25 bp, Homo sapien
gccccaagaggcgagcagtgtttaa

SEQ ID NO: 2265689 - DNA, 25 bp, Homo sapien
gaagcattccctgccatgtaggaca

SEQ ID NO: 2265690 - DNA, 25 bp, Homo sapien
ttaaatagcagccacacagttggcg

SEQ ID NO: 2265691 - DNA, 25 bp, Homo sapien
tgggcggcaggaccataaacaaaac

SEQ ID NO: 2265692 - DNA, 25 bp, Homo sapien
catgacattttatgctaagctgaag

SEQ ID NO: 2265693 - DNA, 25 bp, Homo sapien
tcatacaaatagagtcactgatgcc

SEQ ID NO: 2265694 - DNA, 25 bp, Homo sapien
cactgatgccttagagatgggatga

SEQ ID NO: 2265695 - DNA, 25 bp, Homo sapien
aagtaagtacccgttcttcactgct

SEQ ID NO: 2265696 - DNA, 25 bp, Homo sapien
gcttgcttgacatctttagagatta

SEQ ID NO: 2265697 - DNA, 25 bp, Homo sapien
tcttcactgcttcagtattacaagc

SEQ ID NO: 2265698 - DNA, 25 bp, Homo sapien
ttgacatctttagagattaggaccc

SEQ ID NO: 2265699 - DNA, 25 bp, Homo sapien
tctatcgttagagtccggtgtgctg

SEQ ID NO: 2265700 - DNA, 25 bp, Homo sapien
taaggaacggtattgatgacagccc

SEQ ID NO: 2265701 - DNA, 25 bp, Homo sapien
tgtgctgtataccagcgatggacga

SEQ ID NO: 2265702 - DNA, 25 bp, Homo sapien
gacagcccggtcatagttgttgtac

SEQ ID NO: 2265703 - DNA, 25 bp, Homo sapien
tcccagagacgaagtgacgataagt

SEQ ID NO: 2265704 - DNA, 25 bp, Homo sapien
cctatgttcaatacttgtcccagag

SEQ ID NO: 2265705 - DNA, 25 bp, Homo sapien
agttccactgcctgttgaccgtgtt

SEQ ID NO: 2265706 - DNA, 25 bp, Homo sapien
ttctctcaggaatatcacattggag

SEQ ID NO: 2265707 - DNA, 25 bp, Homo sapien
tctgaaccaactacacctcataaat

SEQ ID NO: 2265708 - DNA, 25 bp, Homo sapien
ctctataatcatctgaaccaactac

SEQ ID NO: 2265709 - DNA, 25 bp, Homo sapien
gagaaccttgactaacacacccatg

SEQ ID NO: 2265710 - DNA, 25 bp, Homo sapien
cacctcataaatcctctctcatata

SEQ ID NO: 2265711 - DNA, 25 bp, Homo sapien
gatgggaagataggtgataaagcaa

SEQ ID NO: 2265712 - DNA, 25 bp, Homo sapien
gggttcctctgagatgtatgtgcag

SEQ ID NO: 2265713 - DNA, 25 bp, Homo sapien
gctgtaagcaaatattgaactctac

SEQ ID NO: 2265714 - DNA, 25 bp, Homo sapien
gaaagagtccagatgtgtattcata

SEQ ID NO: 2265715 - DNA, 25 bp, Homo sapien
gcagaagcaggagcggtaatccatc

SEQ ID NO: 2265716 - DNA, 25 bp, Homo sapien
tctcactgcaagaagaggcattgta

SEQ ID NO: 2265717 - DNA, 25 bp, Homo sapien
catctgcagtgtcaagaacagagca

SEQ ID NO: 2265718 - DNA, 25 bp, Homo sapien
taaaagccataaggaaggactctag

SEQ ID NO: 2265719 - DNA, 25 bp, Homo sapien
gcttcaatggcactttactgaggag

SEQ ID NO: 2265720 - DNA, 25 bp, Homo sapien
catgggtagatatttaagactggcc

SEQ ID NO: 2265721 - DNA, 25 bp, Homo sapien
gaatccatctactagcagtgtcctg

SEQ ID NO: 2265722 - DNA, 25 bp, Homo sapien
caatcatgtggttgtgacattctcc

SEQ ID NO: 2265723 - DNA, 25 bp, Homo sapien
aagtcatacaaatctgcaggagcag

SEQ ID NO: 2265724 - DNA, 25 bp, Homo sapien
gatcttggttcgaacagaatggaaa

SEQ ID NO: 2265725 - DNA, 25 bp, Homo sapien
taattaagaaaccactcaagactat

SEQ ID NO: 2265726 - DNA, 25 bp, Homo sapien
gactatcacatataaagactttaca

SEQ ID NO: 2265727 - DNA, 25 bp, Homo sapien
cagtgtgccgatccagagctagctt

SEQ ID NO: 2265728 - DNA, 25 bp, Homo sapien
ccacagggctcttgaaaataggtag

SEQ ID NO: 2265729 - DNA, 25 bp, Homo sapien
cttggtgtacgcagtgtcacctctg

SEQ ID NO: 2265730 - DNA, 25 bp, Homo sapien
cacctctggagaagtctgaagtgaa

SEQ ID NO: 2265731 - DNA, 25 bp, Homo sapien
agaaagacctgttagctatttgaaa

SEQ ID NO: 2265732 - DNA, 25 bp, Homo sapien
aagaaagacctgttagctatttgaa

SEQ ID NO: 2265733 - DNA, 25 bp, Homo sapien
cagtccctcgttggtttctaagaag

SEQ ID NO: 2265734 - DNA, 25 bp, Homo sapien
ggtagatttcagcattccatagtat

SEQ ID NO: 2265735 - DNA, 25 bp, Homo sapien
ccatagtattctaggctggatgact

SEQ ID NO: 2265736 - DNA, 25 bp, Homo sapien
tggcaatctaccgatggaacttggg

SEQ ID NO: 2265737 - DNA, 25 bp, Homo sapien
tgaagagaaaaataaaatgtttcaa

SEQ ID NO: 2265738 - DNA, 25 bp, Homo sapien
ttgaagagaaaaataaaatgtttca

SEQ ID NO: 2265739 - DNA, 25 bp, Homo sapien
aaataactgtccttcagaagagtac

SEQ ID NO: 2265740 - DNA, 25 bp, Homo sapien
ccacaaaataactgtccttcagaag

SEQ ID NO: 2265741 - DNA, 25 bp, Homo sapien
cattttccacaaaataactgtcctt

SEQ ID NO: 2265742 - DNA, 25 bp, Homo sapien
tttccacaaaataactgtccttcag

SEQ ID NO: 2265743 - DNA, 25 bp, Homo sapien
ccaaagaagatcaagtctcctgtcc

SEQ ID NO: 2265744 - DNA, 25 bp, Homo sapien
caaagaagatcaagtctcctgtcca

SEQ ID NO: 2265745 - DNA, 25 bp, Homo sapien
ccccaaagaagatcaagtctcctgt

SEQ ID NO: 2265746 - DNA, 25 bp, Homo sapien
cccaaagaagatcaagtctcctgtc

SEQ ID NO: 2265747 - DNA, 25 bp, Homo sapien
ttgtagcacgatgctgagcggcagt

SEQ ID NO: 2265748 - DNA, 25 bp, Homo sapien
tgtggtctcatccagacgaatggtc

SEQ ID NO: 2265749 - DNA, 25 bp, Homo sapien
tcgaagccagacgtaatcaaagcgc

SEQ ID NO: 2265750 - DNA, 25 bp, Homo sapien
tccaggctgcgctggtgagtcttag

SEQ ID NO: 2265751 - DNA, 25 bp, Homo sapien
tgtccttttgctgactggaatccat

SEQ ID NO: 2265752 - DNA, 25 bp, Homo sapien
ataaaattaacactcagcaaatgct

SEQ ID NO: 2265753 - DNA, 25 bp, Homo sapien
taatggatcatcaggagagcaagac

SEQ ID NO: 2265754 - DNA, 25 bp, Homo sapien
tcatcatctatagacactgggacac

SEQ ID NO: 2265755 - DNA, 25 bp, Homo sapien
aaagagcactctagtttcaggatgg

SEQ ID NO: 2265756 - DNA, 25 bp, Homo sapien
caaggctgcagtaatcctgttagga

SEQ ID NO: 2265757 - DNA, 25 bp, Homo sapien
tcccaacttgtaggctaatcttaaa

SEQ ID NO: 2265758 - DNA, 25 bp, Homo sapien
aaaataaatggctagaggtcctgtc

SEQ ID NO: 2265759 - DNA, 25 bp, Homo sapien
tcccctagttgagaagggatttcac

SEQ ID NO: 2265760 - DNA, 25 bp, Homo sapien
tgtgttttcttaccacgattttatc

SEQ ID NO: 2265761 - DNA, 25 bp, Homo sapien
gctgccaagcacaagtcagagactt

SEQ ID NO: 2265762 - DNA, 25 bp, Homo sapien
gacttggaggctgtatggtgccaat

SEQ ID NO: 2265763 - DNA, 25 bp, Homo sapien
ccaatggacagctaaaggaagtaag

SEQ ID NO: 2265764 - DNA, 25 bp, Homo sapien
gtggaagggccggatatatgactcc

SEQ ID NO: 2265765 - DNA, 25 bp, Homo sapien
gcagcaggtatctgaaattcacaca

SEQ ID NO: 2265766 - DNA, 25 bp, Homo sapien
cacctgctatagacacatacagaaa

SEQ ID NO: 2265767 - DNA, 25 bp, Homo sapien
taccaggacgttggtctgggcaaaa

SEQ ID NO: 2265768 - DNA, 25 bp, Homo sapien
aaaaagctactgtacatcaaaggat

SEQ ID NO: 2265769 - DNA, 25 bp, Homo sapien
tgtttttccaattccctgagatgga

SEQ ID NO: 2265770 - DNA, 25 bp, Homo sapien
cggtttcaataatgctgtctgtcaa

SEQ ID NO: 2265771 - DNA, 25 bp, Homo sapien
gaaactttcggtttcaataatgctg

SEQ ID NO: 2265772 - DNA, 25 bp, Homo sapien
tgtctgtcaaatatgtctttcttac

SEQ ID NO: 2265773 - DNA, 25 bp, Homo sapien
taaggtttttctgaatgtccaccat

SEQ ID NO: 2265774 - DNA, 25 bp, Homo sapien
tttatttgccaggtgccaagtaagg

SEQ ID NO: 2265775 - DNA, 25 bp, Homo sapien
cacacatttatttgccaggtgccaa

SEQ ID NO: 2265776 - DNA, 25 bp, Homo sapien
ccaggtgccaagtaaggtttttctg

SEQ ID NO: 2265777 - DNA, 25 bp, Homo sapien
gaaagatttcataacgaagatatca

SEQ ID NO: 2265778 - DNA, 25 bp, Homo sapien
gcccagtgaaagatttcataacgaa

SEQ ID NO: 2265779 - DNA, 25 bp, Homo sapien
cagtgaaagatttcataacgaagat

SEQ ID NO: 2265780 - DNA, 25 bp, Homo sapien
gatttcataacgaagatatcaaaag

SEQ ID NO: 2265781 - DNA, 25 bp, Homo sapien
taatataacctctacagtatggaga

SEQ ID NO: 2265782 - DNA, 25 bp, Homo sapien
gcctcacaacgatagcagaaggtga

SEQ ID NO: 2265783 - DNA, 25 bp, Homo sapien
aggcctcacaacgatagcagaaggt

SEQ ID NO: 2265784 - DNA, 25 bp, Homo sapien
tataacctctacagtatggagattt

SEQ ID NO: 2265785 - DNA, 25 bp, Homo sapien
aagtctctcagtaaattaggcatag

SEQ ID NO: 2265786 - DNA, 25 bp, Homo sapien
taggtgatagaagcaaaatacactc

SEQ ID NO: 2265787 - DNA, 25 bp, Homo sapien
taggcatagaatggaacttccttag

SEQ ID NO: 2265788 - DNA, 25 bp, Homo sapien
ctagtagagttgaggatatgcatac

SEQ ID NO: 2265789 - DNA, 25 bp, Homo sapien
tgtagtatactgatgcaatggaata

SEQ ID NO: 2265790 - DNA, 25 bp, Homo sapien
gtctgatgctgggagtagtaatgaa

SEQ ID NO: 2265791 - DNA, 25 bp, Homo sapien
caatatttaaacactgtgagcatca

SEQ ID NO: 2265792 - DNA, 25 bp, Homo sapien
tgcagatgggcaaggaagatgtcac

SEQ ID NO: 2265793 - DNA, 25 bp, Homo sapien
tgtcgcgcaactggcacagatcgtg

SEQ ID NO: 2265794 - DNA, 25 bp, Homo sapien
gaaacaatgtacactgggcgtcagt

SEQ ID NO: 2265795 - DNA, 25 bp, Homo sapien
tgatctccgggcagactctgtcgcg

SEQ ID NO: 2265796 - DNA, 25 bp, Homo sapien
tagggactcgctgaaagctaaacac

SEQ ID NO: 2265797 - DNA, 25 bp, Homo sapien
gaggcagcctttcacccgccttttg

SEQ ID NO: 2265798 - DNA, 25 bp, Homo sapien
ctgtgctggaggtcgtgactgctaa

SEQ ID NO: 2265799 - DNA, 25 bp, Homo sapien
tgactgctaactccgcagagtgggc

SEQ ID NO: 2265800 - DNA, 25 bp, Homo sapien
caagcaaggagagtctcgggaggca

SEQ ID NO: 2265801 - DNA, 25 bp, Homo sapien
aagtaatcttgtggctggtctgagg

SEQ ID NO: 2265802 - DNA, 25 bp, Homo sapien
gaaccatgtggtgataggcatgact

SEQ ID NO: 2265803 - DNA, 25 bp, Homo sapien
tttaaatggcactgatacttctatg

SEQ ID NO: 2265804 - DNA, 25 bp, Homo sapien
catctctcatagtgaaataggcatt

SEQ ID NO: 2265805 - DNA, 25 bp, Homo sapien
gcagatactatcttatatcccatga

SEQ ID NO: 2265806 - DNA, 25 bp, Homo sapien
gaggcctgcagatactatcttatat

SEQ ID NO: 2265807 - DNA, 25 bp, Homo sapien
aataagtagagacttacacctgcca

SEQ ID NO: 2265808 - DNA, 25 bp, Homo sapien
ttaataagtagagacttacacctgc

SEQ ID NO: 2265809 - DNA, 25 bp, Homo sapien
taattttacagtatggtggcaggaa

SEQ ID NO: 2265810 - DNA, 25 bp, Homo sapien
ggctatagctattaaactatgagga

SEQ ID NO: 2265811 - DNA, 25 bp, Homo sapien
gttcactggctatagctattaaact

SEQ ID NO: 2265812 - DNA, 25 bp, Homo sapien
tatgcagtatcccaaatatcagtgc

SEQ ID NO: 2265813 - DNA, 25 bp, Homo sapien
gatgtttgctccaagacgaagactt

SEQ ID NO: 2265814 - DNA, 25 bp, Homo sapien
caaagaacagggcaatacctcatgg

SEQ ID NO: 2265815 - DNA, 25 bp, Homo sapien
gaaggctatcatattgggaatcagg

SEQ ID NO: 2265816 - DNA, 25 bp, Homo sapien
tattgggaatcagggccaaagaaca

SEQ ID NO: 2265817 - DNA, 25 bp, Homo sapien
aggatgtccacagatcagcttttta

SEQ ID NO: 2265818 - DNA, 25 bp, Homo sapien
caatagaatatggatagagctggcc

SEQ ID NO: 2265819 - DNA, 25 bp, Homo sapien
tcaccactgctgaatcaggatgtcc

SEQ ID NO: 2265820 - DNA, 25 bp, Homo sapien
agctttttatctggcacttctaaag

SEQ ID NO: 2265821 - DNA, 25 bp, Homo sapien
ttccaacttctcagtatgcaatggt

SEQ ID NO: 2265822 - DNA, 25 bp, Homo sapien
tatgcaatggtatcatattcaactg

SEQ ID NO: 2265823 - DNA, 25 bp, Homo sapien
cttctcagtatgcaatggtatcata

SEQ ID NO: 2265824 - DNA, 25 bp, Homo sapien
cagtatgcaatggtatcatattcaa

SEQ ID NO: 2265825 - DNA, 25 bp, Homo sapien
ccacttcgccaagcattaagagcta

SEQ ID NO: 2265826 - DNA, 25 bp, Homo sapien
ttcatctggatgacgccacttcgcc

SEQ ID NO: 2265827 - DNA, 25 bp, Homo sapien
ttaagagctacagctccgggaaagc

SEQ ID NO: 2265828 - DNA, 25 bp, Homo sapien
cagggaccggatacagagattccta

SEQ ID NO: 2265829 - DNA, 25 bp, Homo sapien
cactagcatgctgagtaggatagta

SEQ ID NO: 2265830 - DNA, 25 bp, Homo sapien
taatcaacttatagtgctgacagat

SEQ ID NO: 2265831 - DNA, 25 bp, Homo sapien
taggatagtaaatcaggatgctcat

SEQ ID NO: 2265832 - DNA, 25 bp, Homo sapien
ctttgtatgtctgacccaagtgcca

SEQ ID NO: 2265833 - DNA, 25 bp, Homo sapien
tatggcctttcagacatttagcaat

SEQ ID NO: 2265834 - DNA, 25 bp, Homo sapien
accattgaaagacacaatatggcct

SEQ ID NO: 2265835 - DNA, 25 bp, Homo sapien
ttgaaagacacaatatggcctttca

SEQ ID NO: 2265836 - DNA, 25 bp, Homo sapien
taattaacaaaaccattgaaagaca

SEQ ID NO: 2265837 - DNA, 25 bp, Homo sapien
ctctggagaccagcaagggcccaga

SEQ ID NO: 2265838 - DNA, 25 bp, Homo sapien
cagggaccctttttgtgcccacaca

SEQ ID NO: 2265839 - DNA, 25 bp, Homo sapien
tggagaccagcaagggcccagaccc

SEQ ID NO: 2265840 - DNA, 25 bp, Homo sapien
gggaccctttttgtgcccacacatg

SEQ ID NO: 2265841 - DNA, 25 bp, Homo sapien
gccacatctgcaagatcaagtaaga

SEQ ID NO: 2265842 - DNA, 25 bp, Homo sapien
tctgcaagatcaagtaagatggtga

SEQ ID NO: 2265843 - DNA, 25 bp, Homo sapien
gggccacatctgcaagatcaagtaa

SEQ ID NO: 2265844 - DNA, 25 bp, Homo sapien
catctgcaagatcaagtaagatggt

SEQ ID NO: 2265845 - DNA, 25 bp, Homo sapien
accgagcaagaagttgaaaggatgc

SEQ ID NO: 2265846 - DNA, 25 bp, Homo sapien
ttggggataccgagcaagaagttga

SEQ ID NO: 2265847 - DNA, 25 bp, Homo sapien
gataccgagcaagaagttgaaagga

SEQ ID NO: 2265848 - DNA, 25 bp, Homo sapien
gggataccgagcaagaagttgaaag

SEQ ID NO: 2265849 - DNA, 25 bp, Homo sapien
tacggcatttgacgctgtttaccac

SEQ ID NO: 2265850 - DNA, 25 bp, Homo sapien
cttcatgcggaagtcagcggcgtcc

SEQ ID NO: 2265851 - DNA, 25 bp, Homo sapien
tgtttaccacaagagctgtcgaacg

SEQ ID NO: 2265852 - DNA, 25 bp, Homo sapien
tactcccagaatgcagtacggctcc

SEQ ID NO: 2265853 - DNA, 25 bp, Homo sapien
tgtcgacagttccagttgtcgggca

SEQ ID NO: 2265854 - DNA, 25 bp, Homo sapien
aggaccagttttggcgaggtgcgtc

SEQ ID NO: 2265855 - DNA, 25 bp, Homo sapien
ttgggcttctctggtgtcgacagtt

SEQ ID NO: 2265856 - DNA, 25 bp, Homo sapien
cagttccagttgtcgggcaggacca

SEQ ID NO: 2265857 - DNA, 25 bp, Homo sapien
cagtgccttctcttcttccatccat

SEQ ID NO: 2265858 - DNA, 25 bp, Homo sapien
tcagtgccttctcttcttccatcca

SEQ ID NO: 2265859 - DNA, 25 bp, Homo sapien
cttgctctcagtgccttctcttctt

SEQ ID NO: 2265860 - DNA, 25 bp, Homo sapien
ctctcagtgccttctcttcttccat

SEQ ID NO: 2265861 - DNA, 25 bp, Homo sapien
ttcttaggataatgcacagtgtggt

SEQ ID NO: 2265862 - DNA, 25 bp, Homo sapien
taaatctattaggtgctgttttacc

SEQ ID NO: 2265863 - DNA, 25 bp, Homo sapien
cattctgtactctagtcatgtgagc

SEQ ID NO: 2265864 - DNA, 25 bp, Homo sapien
cagtgtggtttataaagtcttgtat

SEQ ID NO: 2265865 - DNA, 25 bp, Homo sapien
tatttgacatagatcttaggcccac

SEQ ID NO: 2265866 - DNA, 25 bp, Homo sapien
ttaaatgacgcacaaactgaagatg

SEQ ID NO: 2265867 - DNA, 25 bp, Homo sapien
atctggctcatggtacctgttcttc

SEQ ID NO: 2265868 - DNA, 25 bp, Homo sapien
tctagcatagcacaaacgtttttcc

SEQ ID NO: 2265869 - DNA, 25 bp, Homo sapien
tacaacatatttatgattcagaaga

SEQ ID NO: 2265870 - DNA, 25 bp, Homo sapien
cacagccaatgtacgttttctcctc

SEQ ID NO: 2265871 - DNA, 25 bp, Homo sapien
catatttatgattcagaagatattc

SEQ ID NO: 2265872 - DNA, 25 bp, Homo sapien
gatgtttgggcgtgttctcttttta

SEQ ID NO: 2265873 - DNA, 25 bp, Homo sapien
tctggacccggcaccagattgaaag

SEQ ID NO: 2265874 - DNA, 25 bp, Homo sapien
taaaacagggactctggacccggca

SEQ ID NO: 2265875 - DNA, 25 bp, Homo sapien
cagcaagagataaaacagggactct

SEQ ID NO: 2265876 - DNA, 25 bp, Homo sapien
agcttcagcaagagataaaacaggg

SEQ ID NO: 2265877 - DNA, 25 bp, Homo sapien
gaccttcagacaccatacgaggatc

SEQ ID NO: 2265878 - DNA, 25 bp, Homo sapien
ccttcagacaccatacgaggatccg

SEQ ID NO: 2265879 - DNA, 25 bp, Homo sapien
ttcagacaccatacgaggatccgag

SEQ ID NO: 2265880 - DNA, 25 bp, Homo sapien
cagacaccatacgaggatccgaggg

SEQ ID NO: 2265881 - DNA, 25 bp, Homo sapien
gttccacaactcaaacaaatattcc

SEQ ID NO: 2265882 - DNA, 25 bp, Homo sapien
aatttctttacattcagcccatatc

SEQ ID NO: 2265883 - DNA, 25 bp, Homo sapien
cttggggccttgagtccaaatttct

SEQ ID NO: 2265884 - DNA, 25 bp, Homo sapien
aacaaatattccttggggccttgag

SEQ ID NO: 2265885 - DNA, 25 bp, Homo sapien
tgtgttcttaagaggcttccagaga

SEQ ID NO: 2265886 - DNA, 25 bp, Homo sapien
cactgtgttcttaagaggcttccag

SEQ ID NO: 2265887 - DNA, 25 bp, Homo sapien
actgtgttcttaagaggcttccaga

SEQ ID NO: 2265888 - DNA, 25 bp, Homo sapien
catagatccgttctttgctgagctt

SEQ ID NO: 2265889 - DNA, 25 bp, Homo sapien
ctatagatctcagtgagttcaaagc

SEQ ID NO: 2265890 - DNA, 25 bp, Homo sapien
aaattcttctatagatctcagtgag

SEQ ID NO: 2265891 - DNA, 25 bp, Homo sapien
cctgtgtgcaggcatagatccgttc

SEQ ID NO: 2265892 - DNA, 25 bp, Homo sapien
tcccgataggaggagcggcagtctg

SEQ ID NO: 2265893 - DNA, 25 bp, Homo sapien
ccggcctgaatgatggtggtgagcg

SEQ ID NO: 2265894 - DNA, 25 bp, Homo sapien
agatggccccgaggaggtcccgata

SEQ ID NO: 2265895 - DNA, 25 bp, Homo sapien
tgagcgggaggtctcgaggtgatcc

SEQ ID NO: 2265896 - DNA, 25 bp, Homo sapien
cgggaacgcggtctgcggtccaggg

SEQ ID NO: 2265897 - DNA, 25 bp, Homo sapien
cagcatgcgcgatgcgggctgggca

SEQ ID NO: 2265898 - DNA, 25 bp, Homo sapien
tcagcaaaatgggaacgtgtcagaa

SEQ ID NO: 2265899 - DNA, 25 bp, Homo sapien
agggttggcccaaggcagccgccgg

SEQ ID NO: 2265900 - DNA, 25 bp, Homo sapien
cttcgcggtgccgcacggatcttcc

SEQ ID NO: 2265901 - DNA, 25 bp, Homo sapien
tccctcgggagtctcgcagggaccc

SEQ ID NO: 2265902 - DNA, 25 bp, Homo sapien
ctcgggagtctcgcagggaccccat

SEQ ID NO: 2265903 - DNA, 25 bp, Homo sapien
tcgcggtgccgcacggatcttcctg

SEQ ID NO: 2265904 - DNA, 25 bp, Homo sapien
tctcgccaacgtccggggataatct

SEQ ID NO: 2265905 - DNA, 25 bp, Homo sapien
gagatccccttgctctcgccaacgt

SEQ ID NO: 2265906 - DNA, 25 bp, Homo sapien
ttcaccaaacatgcagagatcccct

SEQ ID NO: 2265907 - DNA, 25 bp, Homo sapien
tgcagagatgacctcgtccccatca

SEQ ID NO: 2265908 - DNA, 25 bp, Homo sapien
tggtccccaccaacatccagggata

SEQ ID NO: 2265909 - DNA, 25 bp, Homo sapien
catccagggataaccttgaacccat

SEQ ID NO: 2265910 - DNA, 25 bp, Homo sapien
aggatgacctggtccccaccaacat

SEQ ID NO: 2265911 - DNA, 25 bp, Homo sapien
cacccacaggatgacctggtcccca

SEQ ID NO: 2265912 - DNA, 25 bp, Homo sapien
agccggtacaggagcctccggttca

SEQ ID NO: 2265913 - DNA, 25 bp, Homo sapien
ttgcctctatcgacgcagaggccac

SEQ ID NO: 2265914 - DNA, 25 bp, Homo sapien
tgctccggatgcagccggtacagga

SEQ ID NO: 2265915 - DNA, 25 bp, Homo sapien
ggccggcatgccctgctccggatgc

SEQ ID NO: 2265916 - DNA, 25 bp, Homo sapien
gggctcccgtaacaagtgctccgga

SEQ ID NO: 2265917 - DNA, 25 bp, Homo sapien
tgtcgtagccgggtccccgaagcag

SEQ ID NO: 2265918 - DNA, 25 bp, Homo sapien
ttgaagatgtgtccagcccggggct

SEQ ID NO: 2265919 - DNA, 25 bp, Homo sapien
ggtgaccctgtacacaggcagctcc

SEQ ID NO: 2265920 - DNA, 25 bp, Homo sapien
agaggggcacaggcgcaagggggcc

SEQ ID NO: 2265921 - DNA, 25 bp, Homo sapien
ggtggtgggaagagcgcacacagct

SEQ ID NO: 2265922 - DNA, 25 bp, Homo sapien
gaggtggtgggaagagcgcacacag

SEQ ID NO: 2265923 - DNA, 25 bp, Homo sapien
acacagcttgcaaaggccggggtac

SEQ ID NO: 2265924 - DNA, 25 bp, Homo sapien
aggtggtgggaagagcgcacacagc

SEQ ID NO: 2265925 - DNA, 25 bp, Homo sapien
gtcctcgtcccaggcagacgccgtg

SEQ ID NO: 2265926 - DNA, 25 bp, Homo sapien
gagtcctcgtcccaggcagacgccg

SEQ ID NO: 2265927 - DNA, 25 bp, Homo sapien
cctcgtcccaggcagacgccgtgca

SEQ ID NO: 2265928 - DNA, 25 bp, Homo sapien
ggtgccggccttggaaggcagcggc

SEQ ID NO: 2265929 - DNA, 25 bp, Homo sapien
tcacagccgtggctcggacgggaac

SEQ ID NO: 2265930 - DNA, 25 bp, Homo sapien
cacagccgtggctcggacgggaacc

SEQ ID NO: 2265931 - DNA, 25 bp, Homo sapien
ctggccgcggctgcggtgggtctcc

SEQ ID NO: 2265932 - DNA, 25 bp, Homo sapien
gccactggccgcggctgcggtgggt

SEQ ID NO: 2265933 - DNA, 25 bp, Homo sapien
actcgggccactggccgcggctgcg

SEQ ID NO: 2265934 - DNA, 25 bp, Homo sapien
tgcggtgggtctcccggagccccca

SEQ ID NO: 2265935 - DNA, 25 bp, Homo sapien
ttccagccgctggaatcccagagct

SEQ ID NO: 2265936 - DNA, 25 bp, Homo sapien
ctcctggcagctcccgccgggtctc

SEQ ID NO: 2265937 - DNA, 25 bp, Homo sapien
cgccgggtctctgcgggacactctt

SEQ ID NO: 2265938 - DNA, 25 bp, Homo sapien
cttccagccgctggaatcccagagc

SEQ ID NO: 2265939 - DNA, 25 bp, Homo sapien
cctctgtgtcatgacggattccatc

SEQ ID NO: 2265940 - DNA, 25 bp, Homo sapien
tctgtgtcatgacggattccatcca

SEQ ID NO: 2265941 - DNA, 25 bp, Homo sapien
atcctctgtgtcatgacggattcca

SEQ ID NO: 2265942 - DNA, 25 bp, Homo sapien
tcctctgtgtcatgacggattccat

SEQ ID NO: 2265943 - DNA, 25 bp, Homo sapien
tgttcttatttacatcttcccaaaa

SEQ ID NO: 2265944 - DNA, 25 bp, Homo sapien
ggagcccattctttatcagcccggg

SEQ ID NO: 2265945 - DNA, 25 bp, Homo sapien
agaccctaagccaacaccagctaca

SEQ ID NO: 2265946 - DNA, 25 bp, Homo sapien
agaagcaaccacacctgtaccgcgg

SEQ ID NO: 2265947 - DNA, 25 bp, Homo sapien
aagaaaggacgagatcctctcggtc

SEQ ID NO: 2265948 - DNA, 25 bp, Homo sapien
cccgcgttggcttcacaaggttctg

SEQ ID NO: 2265949 - DNA, 25 bp, Homo sapien
cgaattgttggtctcgagcccagaa

SEQ ID NO: 2265950 - DNA, 25 bp, Homo sapien
agaatgaaaggcctggtctccctgg

SEQ ID NO: 2265951 - DNA, 25 bp, Homo sapien
tttttacggtgacttcaggtcagga

SEQ ID NO: 2265952 - DNA, 25 bp, Homo sapien
ttcgagaccagcctggccaacttga

SEQ ID NO: 2265953 - DNA, 25 bp, Homo sapien
ttttacggtgacttcaggtcaggag

SEQ ID NO: 2265954 - DNA, 25 bp, Homo sapien
agtgcagcctcgagaagctgttgga

SEQ ID NO: 2265955 - DNA, 25 bp, Homo sapien
gtgcagcctcgagaagctgttggaa

SEQ ID NO: 2265956 - DNA, 25 bp, Homo sapien
tgcagcctcgagaagctgttggaag

SEQ ID NO: 2265957 - DNA, 25 bp, Homo sapien
gcagtgcagcctcgagaagctgttg

SEQ ID NO: 2265958 - DNA, 25 bp, Homo sapien
agagccggggacacagtgccgacat

SEQ ID NO: 2265959 - DNA, 25 bp, Homo sapien
gggcacatcccagagccggggacac

SEQ ID NO: 2265960 - DNA, 25 bp, Homo sapien
catttcagcacgacagggcgcgtga

SEQ ID NO: 2265961 - DNA, 25 bp, Homo sapien
ctgggtgacggaccatttcagcacg

SEQ ID NO: 2265962 - DNA, 25 bp, Homo sapien
agccgggactcctcgtgcgaaatgg

SEQ ID NO: 2265963 - DNA, 25 bp, Homo sapien
ttcttgttcaggcagtacgtcatcg

SEQ ID NO: 2265964 - DNA, 25 bp, Homo sapien
catttcagcaccacggggccgtggg

SEQ ID NO: 2265965 - DNA, 25 bp, Homo sapien
acatagctgacaggccaggtcagca

SEQ ID NO: 2265966 - DNA, 25 bp, Homo sapien
tcagcagcacggggcacagaccgta

SEQ ID NO: 2265967 - DNA, 25 bp, Homo sapien
gccccacatagctgacaggccaggt

SEQ ID NO: 2265968 - DNA, 25 bp, Homo sapien
aaagtgcaggttcttctccgagccc

SEQ ID NO: 2265969 - DNA, 25 bp, Homo sapien
ttgtgtacaccatatggacaaagtg

SEQ ID NO: 2265970 - DNA, 25 bp, Homo sapien
caccagcgccgttgtgtacaccata

SEQ ID NO: 2265971 - DNA, 25 bp, Homo sapien
ccagcatgtgggctatccgcaggtc

SEQ ID NO: 2265972 - DNA, 25 bp, Homo sapien
gctcagcccctcgaagtttctgcag

SEQ ID NO: 2265973 - DNA, 25 bp, Homo sapien
gacacagcatgtccccgaagatgtt

SEQ ID NO: 2265974 - DNA, 25 bp, Homo sapien
tgatacaggcgaccaggtactcgtg

SEQ ID NO: 2265975 - DNA, 25 bp, Homo sapien
caggatgaccacctcgcgtggatgc

SEQ ID NO: 2265976 - DNA, 25 bp, Homo sapien
taggagacgatgacctgttggcccc

SEQ ID NO: 2265977 - DNA, 25 bp, Homo sapien
caaggagctctcgtcttcataggag

SEQ ID NO: 2265978 - DNA, 25 bp, Homo sapien
ggatgagggcctcggtcttcaccct

SEQ ID NO: 2265979 - DNA, 25 bp, Homo sapien
catggtctccaggtatcggatgagg

SEQ ID NO: 2265980 - DNA, 25 bp, Homo sapien
tgatgttggtgcaccgtgaacccgg

SEQ ID NO: 2265981 - DNA, 25 bp, Homo sapien
tcttctccagggactcggacgggtg

SEQ ID NO: 2265982 - DNA, 25 bp, Homo sapien
acgaagccgtctgcgccgatgaagt

SEQ ID NO: 2265983 - DNA, 25 bp, Homo sapien
ttctccgtgaggttgatgccggcca

SEQ ID NO: 2265984 - DNA, 25 bp, Homo sapien
cagcagcttctgattgagcgcgatg

SEQ ID NO: 2265985 - DNA, 25 bp, Homo sapien
tcagcaccacagcagcttctgattg

SEQ ID NO: 2265986 - DNA, 25 bp, Homo sapien
cacagcagcttctgattgagcgcga

SEQ ID NO: 2265987 - DNA, 25 bp, Homo sapien
gcagcttctgattgagcgcgatgac

SEQ ID NO: 2265988 - DNA, 25 bp, Homo sapien
cgccgcgtcccgaacttcagaaggg

SEQ ID NO: 2265989 - DNA, 25 bp, Homo sapien
tgaaaacgtattatcatcggtccta

SEQ ID NO: 2265990 - DNA, 25 bp, Homo sapien
ctatgatcaccaacatttggcccaa

SEQ ID NO: 2265991 - DNA, 25 bp, Homo sapien
cccaaacaaagtcacaatacttgga

SEQ ID NO: 2265992 - DNA, 25 bp, Homo sapien
gggaagacaggcgaagtcaccacgc

SEQ ID NO: 2265993 - DNA, 25 bp, Homo sapien
gaagacaggcgaagtcaccacgccc

SEQ ID NO: 2265994 - DNA, 25 bp, Homo sapien
ggaagacaggcgaagtcaccacgcc

SEQ ID NO: 2265995 - DNA, 25 bp, Homo sapien
ctgggaagacaggcgaagtcaccac

SEQ ID NO: 2265996 - DNA, 25 bp, Homo sapien
aggccggctcctaagtgggctgtca

SEQ ID NO: 2265997 - DNA, 25 bp, Homo sapien
ggtctgtaagggctccagacgccac

SEQ ID NO: 2265998 - DNA, 25 bp, Homo sapien
tataggcttggtgtgagaactagct

SEQ ID NO: 2265999 - DNA, 25 bp, Homo sapien
cagacgccacagcaaggagaataca

SEQ ID NO: 2266000 - DNA, 25 bp, Homo sapien
ggaccgttcacgcttcagaggcaga

SEQ ID NO: 2266001 - DNA, 25 bp, Homo sapien
tttaaagaaatatcggcggctgggc

SEQ ID NO: 2266002 - DNA, 25 bp, Homo sapien
ttgaacacttcagtagcactccggg

SEQ ID NO: 2266003 - DNA, 25 bp, Homo sapien
gcagaaaaccggtgtgcgagtctcc

SEQ ID NO: 2266004 - DNA, 25 bp, Homo sapien
gatacgcccctgacagacaaggatt

SEQ ID NO: 2266005 - DNA, 25 bp, Homo sapien
gcagctccaacaagcgacatgtaga

SEQ ID NO: 2266006 - DNA, 25 bp, Homo sapien
ttcggtgattttgtggatacgcccc

SEQ ID NO: 2266007 - DNA, 25 bp, Homo sapien
tcatttcaccgtagcaaccgggtac

SEQ ID NO: 2266008 - DNA, 25 bp, Homo sapien
ctatcctgaaagctgccagaggtgt

SEQ ID NO: 2266009 - DNA, 25 bp, Homo sapien
tttctaaagatgcttctggcgtgct

SEQ ID NO: 2266010 - DNA, 25 bp, Homo sapien
gctgccagaggtgtcttggctgcat

SEQ ID NO: 2266011 - DNA, 25 bp, Homo sapien
gcacccggcctcctgaattaacatt

SEQ ID NO: 2266012 - DNA, 25 bp, Homo sapien
cactgtgcccggcctgaattaactt

SEQ ID NO: 2266013 - DNA, 25 bp, Homo sapien
ctgtgcccggcctgaattaactttt

SEQ ID NO: 2266014 - DNA, 25 bp, Homo sapien
gggttttcagcatgtcggtcaggct

SEQ ID NO: 2266015 - DNA, 25 bp, Homo sapien
gccactgtgcccggcctgaattaac

SEQ ID NO: 2266016 - DNA, 25 bp, Homo sapien
tctttccaggatgaacggacgccca

SEQ ID NO: 2266017 - DNA, 25 bp, Homo sapien
cctacggcaaattccggaagctctt

SEQ ID NO: 2266018 - DNA, 25 bp, Homo sapien
gctggctgtataaggaggccacagt

SEQ ID NO: 2266019 - DNA, 25 bp, Homo sapien
gggtcatcatcagcaactcagccta

SEQ ID NO: 2266020 - DNA, 25 bp, Homo sapien
cgtccactgttggtctaggagcccc

SEQ ID NO: 2266021 - DNA, 25 bp, Homo sapien
tcaaattttgtgtaaggagcctgcc

SEQ ID NO: 2266022 - DNA, 25 bp, Homo sapien
tcatcttgcacgtgagggacgtcag

SEQ ID NO: 2266023 - DNA, 25 bp, Homo sapien
gatgaagccgccctaaagctttgaa

SEQ ID NO: 2266024 - DNA, 25 bp, Homo sapien
atctgtctacaccatcgcctctcct

SEQ ID NO: 2266025 - DNA, 25 bp, Homo sapien
tacaccatccttctgtcaacaccgg

SEQ ID NO: 2266026 - DNA, 25 bp, Homo sapien
tgtctacactggcaccactgcccca

SEQ ID NO: 2266027 - DNA, 25 bp, Homo sapien
cacccgtctatacaatccacccatc

SEQ ID NO: 2266028 - DNA, 25 bp, Homo sapien
aatccacccatctacaccatcacct

SEQ ID NO: 2266029 - DNA, 25 bp, Homo sapien
tgccctatctataccaccaccctgt

SEQ ID NO: 2266030 - DNA, 25 bp, Homo sapien
caccagcaccactaccccatctata

SEQ ID NO: 2266031 - DNA, 25 bp, Homo sapien
cgtctacataatccacccgtgtaca

SEQ ID NO: 2266032 - DNA, 25 bp, Homo sapien
ggtggctacatttccgcacaatccc

SEQ ID NO: 2266033 - DNA, 25 bp, Homo sapien
tactcccacataaagtaacgtagaa

SEQ ID NO: 2266034 - DNA, 25 bp, Homo sapien
tcagcctcccgacatgtaaacggtg

SEQ ID NO: 2266035 - DNA, 25 bp, Homo sapien
cataaagtaacgtagaaagacgagc

SEQ ID NO: 2266036 - DNA, 25 bp, Homo sapien
ttttgtagataatggggtcttacca

SEQ ID NO: 2266037 - DNA, 25 bp, Homo sapien
ttgtagataatggggtcttaccata

SEQ ID NO: 2266038 - DNA, 25 bp, Homo sapien
agataatggggtcttaccatattgc

SEQ ID NO: 2266039 - DNA, 25 bp, Homo sapien
gtagataatggggtcttaccatatt

SEQ ID NO: 2266040 - DNA, 25 bp, Homo sapien
ttttgtagataatggggtcttacca

SEQ ID NO: 2266041 - DNA, 25 bp, Homo sapien
ttgtagataatggggtcttaccata

SEQ ID NO: 2266042 - DNA, 25 bp, Homo sapien
agataatggggtcttaccatattgc

SEQ ID NO: 2266043 - DNA, 25 bp, Homo sapien
gtagataatggggtcttaccatatt

SEQ ID NO: 2266044 - DNA, 25 bp, Homo sapien
ttgtagataatagggtcttaccata

SEQ ID NO: 2266045 - DNA, 25 bp, Homo sapien
tgtagataatagggtcttaccatat

SEQ ID NO: 2266046 - DNA, 25 bp, Homo sapien
gtagataatagggtcttaccatatt

SEQ ID NO: 2266047 - DNA, 25 bp, Homo sapien
ttgtagataatagggtcttaccata

SEQ ID NO: 2266048 - DNA, 25 bp, Homo sapien
tgtagataatagggtcttaccatat

SEQ ID NO: 2266049 - DNA, 25 bp, Homo sapien
gtagataatagggtcttaccatatt

SEQ ID NO: 2266050 - DNA, 25 bp, Homo sapien
ttgtagataatagggtcttaccata

SEQ ID NO: 2266051 - DNA, 25 bp, Homo sapien
tgtagataatagggtcttaccatat

SEQ ID NO: 2266052 - DNA, 25 bp, Homo sapien
gtagataatagggtcttaccatatt

SEQ ID NO: 2266053 - DNA, 25 bp, Homo sapien
ccaaaacagacgacggcttcaccat

SEQ ID NO: 2266054 - DNA, 25 bp, Homo sapien
tcttccaaaacagacgacggcttca

SEQ ID NO: 2266055 - DNA, 25 bp, Homo sapien
caccgtcttccaaaacagacgacgg

SEQ ID NO: 2266056 - DNA, 25 bp, Homo sapien
cgtcttccaaaacagacgacggctt

SEQ ID NO: 2266057 - DNA, 25 bp, Homo sapien
cagtgacggatgtagacaaagagcc

SEQ ID NO: 2266058 - DNA, 25 bp, Homo sapien
ctagagccgtcatcatccctgggct

SEQ ID NO: 2266059 - DNA, 25 bp, Homo sapien
tccccgtgggtagaaaatccagtga

SEQ ID NO: 2266060 - DNA, 25 bp, Homo sapien
cccgtgcaggagaaacgcaggtgca

SEQ ID NO: 2266061 - DNA, 25 bp, Homo sapien
gtagctgtctccaccccggtatcag

SEQ ID NO: 2266062 - DNA, 25 bp, Homo sapien
atggcgtagctgtctccaccccggt

SEQ ID NO: 2266063 - DNA, 25 bp, Homo sapien
ggcctggccgtcggctgcagcctcc

SEQ ID NO: 2266064 - DNA, 25 bp, Homo sapien
tgtcctcaccatggcgtagctgtct

SEQ ID NO: 2266065 - DNA, 25 bp, Homo sapien
gtgatggcaagacgggctacccaga

SEQ ID NO: 2266066 - DNA, 25 bp, Homo sapien
caagacgggctacccagaataaggg

SEQ ID NO: 2266067 - DNA, 25 bp, Homo sapien
acggggcccggagagccatgagacg

SEQ ID NO: 2266068 - DNA, 25 bp, Homo sapien
gacagtgatggcaagacgggctacc

SEQ ID NO: 2266069 - DNA, 25 bp, Homo sapien
gccttcgtgtcagaaccaagagtgt

SEQ ID NO: 2266070 - DNA, 25 bp, Homo sapien
ggtgaccgccggcaccagaccggca

SEQ ID NO: 2266071 - DNA, 25 bp, Homo sapien
acctcctcacgggacaagacacagc

SEQ ID NO: 2266072 - DNA, 25 bp, Homo sapien
catgagctctgttccgggaggacca

SEQ ID NO: 2266073 - DNA, 25 bp, Homo sapien
ctctgaatgacaatcgtgggtcccc

SEQ ID NO: 2266074 - DNA, 25 bp, Homo sapien
agggaccccacaaaacaagcactcg

SEQ ID NO: 2266075 - DNA, 25 bp, Homo sapien
agaagccaggatgttccagggctca

SEQ ID NO: 2266076 - DNA, 25 bp, Homo sapien
accccttggagatccccgagcaggg

SEQ ID NO: 2266077 - DNA, 25 bp, Homo sapien
cgacacctttgccggagaagtgggg

SEQ ID NO: 2266078 - DNA, 25 bp, Homo sapien
acacacctatgagccggagcccatg

SEQ ID NO: 2266079 - DNA, 25 bp, Homo sapien
cccatggtcatgggagggctctgac

SEQ ID NO: 2266080 - DNA, 25 bp, Homo sapien
ggctgagacatgagaggcctccctg

SEQ ID NO: 2266081 - DNA, 25 bp, Homo sapien
ccaattagggttcaaggctgagaca

SEQ ID NO: 2266082 - DNA, 25 bp, Homo sapien
tcccgggggaatgctgctgtcccca

SEQ ID NO: 2266083 - DNA, 25 bp, Homo sapien
ctcccgggggaatgctgctgtcccc

SEQ ID NO: 2266084 - DNA, 25 bp, Homo sapien
gggcaggaggttctgccgcagggaa

SEQ ID NO: 2266085 - DNA, 25 bp, Homo sapien
gtgaaggaggcggacgcacagggtg

SEQ ID NO: 2266086 - DNA, 25 bp, Homo sapien
aggcggacgcacagggtggtcccgt

SEQ ID NO: 2266087 - DNA, 25 bp, Homo sapien
gacgcacagggtggtcccgtgaccc

SEQ ID NO: 2266088 - DNA, 25 bp, Homo sapien
gcacagggtggtcccgtgacccctg

SEQ ID NO: 2266089 - DNA, 25 bp, Homo sapien
ggcacccgacgtggatgagcccagg

SEQ ID NO: 2266090 - DNA, 25 bp, Homo sapien
caggaaacggaggtggcagcgtcca

SEQ ID NO: 2266091 - DNA, 25 bp, Homo sapien
caggtggtgaccatgggaacaaccc

SEQ ID NO: 2266092 - DNA, 25 bp, Homo sapien
agagcagcatacgcaccccgttcat

SEQ ID NO: 2266093 - DNA, 25 bp, Homo sapien
gccacagcgtggctccgtccaggat

SEQ ID NO: 2266094 - DNA, 25 bp, Homo sapien
ggattttcagtcacgggctcggctc

SEQ ID NO: 2266095 - DNA, 25 bp, Homo sapien
tcacgcttgtacgtttggaggattt

SEQ ID NO: 2266096 - DNA, 25 bp, Homo sapien
gcgtggctccgtccaggatttacaa

SEQ ID NO: 2266097 - DNA, 25 bp, Homo sapien
tgaatgggacgggttcccacacgga

SEQ ID NO: 2266098 - DNA, 25 bp, Homo sapien
tggaaagggtccgtgtgcgcacaac

SEQ ID NO: 2266099 - DNA, 25 bp, Homo sapien
gtgaatgttttgtgtaaacgtacaa

SEQ ID NO: 2266100 - DNA, 25 bp, Homo sapien
tgcgcacaacggtgaccggcggctc

SEQ ID NO: 2266101 - DNA, 25 bp, Homo sapien
cgggacgcccttccaggtggccagg

SEQ ID NO: 2266102 - DNA, 25 bp, Homo sapien
cagggctgagctccgtcaggatcct

SEQ ID NO: 2266103 - DNA, 25 bp, Homo sapien
ggctgagctccgtcaggatcctcat

SEQ ID NO: 2266104 - DNA, 25 bp, Homo sapien
ggccagggctgagctccgtcaggat

SEQ ID NO: 2266105 - DNA, 25 bp, Homo sapien
tggcggcctcgttccctgtcctggc

SEQ ID NO: 2266106 - DNA, 25 bp, Homo sapien
cgttccctgtcctggccgtgcgggt

SEQ ID NO: 2266107 - DNA, 25 bp, Homo sapien
cgcgttgccgggccccacaaggagt

SEQ ID NO: 2266108 - DNA, 25 bp, Homo sapien
gtgcgggtgggcgtgccgccgcgtt

SEQ ID NO: 2266109 - DNA, 25 bp, Homo sapien
tctaaaagtccgcagatggccgggt

SEQ ID NO: 2266110 - DNA, 25 bp, Homo sapien
agatggccgggtcccgttgccgtgt

SEQ ID NO: 2266111 - DNA, 25 bp, Homo sapien
gaagccaggtctaaaagtccgcaga

SEQ ID NO: 2266112 - DNA, 25 bp, Homo sapien
gcgagggaagccaggtctaaaagtc

SEQ ID NO: 2266113 - DNA, 25 bp, Homo sapien
ctgtcggttggtgtcggcgtgccct

SEQ ID NO: 2266114 - DNA, 25 bp, Homo sapien
tgtcggcgtgccctgtgcgactgta

SEQ ID NO: 2266115 - DNA, 25 bp, Homo sapien
tcgggactttgtctgcctcgcgagt

SEQ ID NO: 2266116 - DNA, 25 bp, Homo sapien
tgtgcgactgtagacgctcgggact

SEQ ID NO: 2266117 - DNA, 25 bp, Homo sapien
ttgaggcgctgtcagtgggaccctt

SEQ ID NO: 2266118 - DNA, 25 bp, Homo sapien
tcaggattgtgggtgcaaaggccct

SEQ ID NO: 2266119 - DNA, 25 bp, Homo sapien
cccttgtgacctgcggtgaggatac

SEQ ID NO: 2266120 - DNA, 25 bp, Homo sapien
actggtatgcggacttcctccctgg

SEQ ID NO: 2266121 - DNA, 25 bp, Homo sapien
agagctcactgcagaatattcgcgg

SEQ ID NO: 2266122 - DNA, 25 bp, Homo sapien
tcaggaaggttggtttgtgtaccca

SEQ ID NO: 2266123 - DNA, 25 bp, Homo sapien
gatgcattgtgggatcgtggactca

SEQ ID NO: 2266124 - DNA, 25 bp, Homo sapien
tccgtaccccaaatagcagagctgt

SEQ ID NO: 2266125 - DNA, 25 bp, Homo sapien
ctctgtggctttgatcgtggtgtcc

SEQ ID NO: 2266126 - DNA, 25 bp, Homo sapien
gctgtgcgttgcagcccgtactgag

SEQ ID NO: 2266127 - DNA, 25 bp, Homo sapien
ttccgcctcccgctgcagagtgggg

SEQ ID NO: 2266128 - DNA, 25 bp, Homo sapien
ctttgatcgtggtgtccggtcctgc

SEQ ID NO: 2266129 - DNA, 25 bp, Homo sapien
atccatgagtgtgcgtcccggccaa

SEQ ID NO: 2266130 - DNA, 25 bp, Homo sapien
atgagtgtgcgtcccggccaaaccc

SEQ ID NO: 2266131 - DNA, 25 bp, Homo sapien
gggctcagctggaatccatgagtgt

SEQ ID NO: 2266132 - DNA, 25 bp, Homo sapien
gaatccatgagtgtgcgtcccggcc

SEQ ID NO: 2266133 - DNA, 25 bp, Homo sapien
gggaacgtccacacagaagaccaag

SEQ ID NO: 2266134 - DNA, 25 bp, Homo sapien
gagggtgccggatcctcccctcgct

SEQ ID NO: 2266135 - DNA, 25 bp, Homo sapien
tgtgttgcgcggcatccaccgtcac

SEQ ID NO: 2266136 - DNA, 25 bp, Homo sapien
gcttgtggacgcagggagggtgccg

SEQ ID NO: 2266137 - DNA, 25 bp, Homo sapien
cggggtccttcgggtggacgcacag

SEQ ID NO: 2266138 - DNA, 25 bp, Homo sapien
ggggtccttcgggtggacgcacaga

SEQ ID NO: 2266139 - DNA, 25 bp, Homo sapien
ggtccttcgggtggacgcacagacc

SEQ ID NO: 2266140 - DNA, 25 bp, Homo sapien
gggtccttcgggtggacgcacagac

SEQ ID NO: 2266141 - DNA, 25 bp, Homo sapien
ccctggcgggtgctcctgagcttga

SEQ ID NO: 2266142 - DNA, 25 bp, Homo sapien
ctgactgtgcgacgtcccacctggg

SEQ ID NO: 2266143 - DNA, 25 bp, Homo sapien
gagcttgatcttctgactgtgcgac

SEQ ID NO: 2266144 - DNA, 25 bp, Homo sapien
tcaggggtcctctgacgggcacagc

SEQ ID NO: 2266145 - DNA, 25 bp, Homo sapien
tcgtgctgccctctcggttcaagaa

SEQ ID NO: 2266146 - DNA, 25 bp, Homo sapien
actggcccgcggctgcgacttcgtg

SEQ ID NO: 2266147 - DNA, 25 bp, Homo sapien
tcggttcaagaagcggctgaaggcc

SEQ ID NO: 2266148 - DNA, 25 bp, Homo sapien
gctggccgtgcacccgttgttgcgt

SEQ ID NO: 2266149 - DNA, 25 bp, Homo sapien
gcagcttggagaccgtctggctcag

SEQ ID NO: 2266150 - DNA, 25 bp, Homo sapien
gaaaatgtgaactagagctagaggc

SEQ ID NO: 2266151 - DNA, 25 bp, Homo sapien
tccagatcccgatccaggaggggac

SEQ ID NO: 2266152 - DNA, 25 bp, Homo sapien
cattttccaaaagtacgtgtcgatg

SEQ ID NO: 2266153 - DNA, 25 bp, Homo sapien
cggcggcgtcgcctcgtgatgacat

SEQ ID NO: 2266154 - DNA, 25 bp, Homo sapien
aagcctcctgcaaaagctccgaggg

SEQ ID NO: 2266155 - DNA, 25 bp, Homo sapien
caaagcctcctgcaaaagctccgag

SEQ ID NO: 2266156 - DNA, 25 bp, Homo sapien
gcgcgcgtggctagcggcggcgtcg

SEQ ID NO: 2266157 - DNA, 25 bp, Homo sapien
tctaggactgccacgccgccatggg

SEQ ID NO: 2266158 - DNA, 25 bp, Homo sapien
ctctggcaggcacgcattgcgcatg

SEQ ID NO: 2266159 - DNA, 25 bp, Homo sapien
tcgcatttccgcagctctaggactg

SEQ ID NO: 2266160 - DNA, 25 bp, Homo sapien
tatgcacggcgcatgctccatgcgg

SEQ ID NO: 2266161 - DNA, 25 bp, Homo sapien
tgcaagacggacagacccgaatggg

SEQ ID NO: 2266162 - DNA, 25 bp, Homo sapien
gccccagcgcagactgaaggcgcat

SEQ ID NO: 2266163 - DNA, 25 bp, Homo sapien
gcgtccatccggctgtggagcagct

SEQ ID NO: 2266164 - DNA, 25 bp, Homo sapien
gcttggataattgcagctggccaca

SEQ ID NO: 2266165 - DNA, 25 bp, Homo sapien
gcgccgctcgggacaaaaggggcga

SEQ ID NO: 2266166 - DNA, 25 bp, Homo sapien
cgccgctcgggacaaaaggggcgat

SEQ ID NO: 2266167 - DNA, 25 bp, Homo sapien
caaaaggggcgatgtgtgaagggtt

SEQ ID NO: 2266168 - DNA, 25 bp, Homo sapien
aatagcggcacgtggcggccgcctt

SEQ ID NO: 2266169 - DNA, 25 bp, Homo sapien
ttcttaatttgtgaccacgcttcct

SEQ ID NO: 2266170 - DNA, 25 bp, Homo sapien
aatccattgcggagtctcacttcca

SEQ ID NO: 2266171 - DNA, 25 bp, Homo sapien
tgacttcatgtaaatagcggcacgt

SEQ ID NO: 2266172 - DNA, 25 bp, Homo sapien
tggggcacgaacaagacatctgaaa

SEQ ID NO: 2266173 - DNA, 25 bp, Homo sapien
tctgaaaataactggggttccgtgc

SEQ ID NO: 2266174 - DNA, 25 bp, Homo sapien
gtgctgccaaaacggcaccggacgt

SEQ ID NO: 2266175 - DNA, 25 bp, Homo sapien
acggcaccggacgtcagctgttctc

SEQ ID NO: 2266176 - DNA, 25 bp, Homo sapien
cagcctttacgctttgccgccccag

SEQ ID NO: 2266177 - DNA, 25 bp, Homo sapien
gccagcctttacgctttgccgcccc

SEQ ID NO: 2266178 - DNA, 25 bp, Homo sapien
gcctttacgctttgccgccccagca

SEQ ID NO: 2266179 - DNA, 25 bp, Homo sapien
gctttgccgccccagcacgcaggtg

SEQ ID NO: 2266180 - DNA, 25 bp, Homo sapien
cgcctgaattggagtagctcttccc

SEQ ID NO: 2266181 - DNA, 25 bp, Homo sapien
cgtggagcccatcgcaatgcctggg

SEQ ID NO: 2266182 - DNA, 25 bp, Homo sapien
tccagatctgccagtccgcctgaat

SEQ ID NO: 2266183 - DNA, 25 bp, Homo sapien
ccacagtcacgacagctgccctggg

SEQ ID NO: 2266184 - DNA, 25 bp, Homo sapien
ccagctgtgctcgccatgcttattt

SEQ ID NO: 2266185 - DNA, 25 bp, Homo sapien
ctttcaaccttcggaattcctggcg

SEQ ID NO: 2266186 - DNA, 25 bp, Homo sapien
tgcttatttaaatctcgctgattta

SEQ ID NO: 2266187 - DNA, 25 bp, Homo sapien
tgtgctcgccatgcttatttaaatc

SEQ ID NO: 2266188 - DNA, 25 bp, Homo sapien
ctgaccgccgatgccaagcgggatg

SEQ ID NO: 2266189 - DNA, 25 bp, Homo sapien
caagcgggatgtctaaatcgggcgc

SEQ ID NO: 2266190 - DNA, 25 bp, Homo sapien
cgccgatgccaagcgggatgtctaa

SEQ ID NO: 2266191 - DNA, 25 bp, Homo sapien
ttgcaagccaccctgaccgccgatg

SEQ ID NO: 2266192 - DNA, 25 bp, Homo sapien
taattcggaaggtggcacattcccc

SEQ ID NO: 2266193 - DNA, 25 bp, Homo sapien
ggaaccagtgcccttctaattcgga

SEQ ID NO: 2266194 - DNA, 25 bp, Homo sapien
ccgagctcagccgtgggtcctggag

SEQ ID NO: 2266195 - DNA, 25 bp, Homo sapien
agacgctgtgttacggttccccgcg

SEQ ID NO: 2266196 - DNA, 25 bp, Homo sapien
gcccgtccctttagtctttgagctc

SEQ ID NO: 2266197 - DNA, 25 bp, Homo sapien
ttctaaatgtcataagggaaactta

SEQ ID NO: 2266198 - DNA, 25 bp, Homo sapien
gctgtggagggtacttccattttca

SEQ ID NO: 2266199 - DNA, 25 bp, Homo sapien
ctcctcttctcggtctcctcccgcg

SEQ ID NO: 2266200 - DNA, 25 bp, Homo sapien
ctggattatggaaaacggtgtgcgt

SEQ ID NO: 2266201 - DNA, 25 bp, Homo sapien
aaacggtgtgcgtgatctggactcg

SEQ ID NO: 2266202 - DNA, 25 bp, Homo sapien
aaaacggtgtgcgtgatctggactc

SEQ ID NO: 2266203 - DNA, 25 bp, Homo sapien
tatggaaaacggtgtgcgtgatctg

SEQ ID NO: 2266204 - DNA, 25 bp, Homo sapien
acagttcctagtgggctggtgatga

SEQ ID NO: 2266205 - DNA, 25 bp, Homo sapien
caggtcccgttaggtcctctgagaa

SEQ ID NO: 2266206 - DNA, 25 bp, Homo sapien
agccccgggcacacggtgaacagtt

SEQ ID NO: 2266207 - DNA, 25 bp, Homo sapien
gggatggcttcagcgttcacctccg

SEQ ID NO: 2266208 - DNA, 25 bp, Homo sapien
tttgcagacgtttctcggtaatgtt

SEQ ID NO: 2266209 - DNA, 25 bp, Homo sapien
ggtttgcagacgtttctcggtaatg

SEQ ID NO: 2266210 - DNA, 25 bp, Homo sapien
gcagaagcaaagatcgagctcctgg

SEQ ID NO: 2266211 - DNA, 25 bp, Homo sapien
tgcagaagcaaagatcgagctcctg

SEQ ID NO: 2266212 - DNA, 25 bp, Homo sapien
agcgtcctgcgtggcgaggtgcccg

SEQ ID NO: 2266213 - DNA, 25 bp, Homo sapien
gtggatcggcagaaacaagttgtgt

SEQ ID NO: 2266214 - DNA, 25 bp, Homo sapien
ttacgggaagcccggagcgtcctgc

SEQ ID NO: 2266215 - DNA, 25 bp, Homo sapien
cagacacgggtgttcttacgggaag

SEQ ID NO: 2266216 - DNA, 25 bp, Homo sapien
tcaaaactcagcaaagggtccgaca

SEQ ID NO: 2266217 - DNA, 25 bp, Homo sapien
ggagcgtcagaaacacagtcgagca

SEQ ID NO: 2266218 - DNA, 25 bp, Homo sapien
gagcaaaggtttcacgacgtcagtt

SEQ ID NO: 2266219 - DNA, 25 bp, Homo sapien
cccacaaggctgaaggcagtgacgt

SEQ ID NO: 2266220 - DNA, 25 bp, Homo sapien
tcctctcctgggctagaccattgct

SEQ ID NO: 2266221 - DNA, 25 bp, Homo sapien
agtgaaacgcggctgattttcctct

SEQ ID NO: 2266222 - DNA, 25 bp, Homo sapien
gagatgacggtgcaaagtgaaacgc

SEQ ID NO: 2266223 - DNA, 25 bp, Homo sapien
tctcctgggctagaccattgctcac

SEQ ID NO: 2266224 - DNA, 25 bp, Homo sapien
tgcgtctacagacacggaaatgtgt

SEQ ID NO: 2266225 - DNA, 25 bp, Homo sapien
ccctcggaatcttgcaagtgtggga

SEQ ID NO: 2266226 - DNA, 25 bp, Homo sapien
cgggaatgggagtcttttgcccaag

SEQ ID NO: 2266227 - DNA, 25 bp, Homo sapien
gagaagcggcttcctccctcggaat

SEQ ID NO: 2266228 - DNA, 25 bp, Homo sapien
ggatgtttgtggacttttgtagcca

SEQ ID NO: 2266229 - DNA, 25 bp, Homo sapien
tgtgcccacgaagacgattattcta

SEQ ID NO: 2266230 - DNA, 25 bp, Homo sapien
tgcccacgaagacgattattctaag

SEQ ID NO: 2266231 - DNA, 25 bp, Homo sapien
cgaagacgattattctaagggagaa

SEQ ID NO: 2266232 - DNA, 25 bp, Homo sapien
tcaagaatagaagctccttccccta

SEQ ID NO: 2266233 - DNA, 25 bp, Homo sapien
acaggtgcctctcacggcgctgaca

SEQ ID NO: 2266234 - DNA, 25 bp, Homo sapien
acagccccggcacgtgtcgtgggct

SEQ ID NO: 2266235 - DNA, 25 bp, Homo sapien
aaatgtcatccgtcctcagctcggg

SEQ ID NO: 2266236 - DNA, 25 bp, Homo sapien
agctggaaagttggcggtaggtctt

SEQ ID NO: 2266237 - DNA, 25 bp, Homo sapien
gggcccgtgtgttcatcacacctgc

SEQ ID NO: 2266238 - DNA, 25 bp, Homo sapien
ggggcccgtgtgttcatcacacctg

SEQ ID NO: 2266239 - DNA, 25 bp, Homo sapien
cggggcccgtgtgttcatcacacct

SEQ ID NO: 2266240 - DNA, 25 bp, Homo sapien
gaaacttgagttcccgtgcgtgcgt

SEQ ID NO: 2266241 - DNA, 25 bp, Homo sapien
cccgtgcgtgcgtgtcctcgtcctc

SEQ ID NO: 2266242 - DNA, 25 bp, Homo sapien
tgaaacttgagttcccgtgcgtgcg

SEQ ID NO: 2266243 - DNA, 25 bp, Homo sapien
gtgaaacttgagttcccgtgcgtgc

SEQ ID NO: 2266244 - DNA, 25 bp, Homo sapien
caaaaacattatcttcgggagcacg

SEQ ID NO: 2266245 - DNA, 25 bp, Homo sapien
acaaaaacattatcttcgggagcac

SEQ ID NO: 2266246 - DNA, 25 bp, Homo sapien
gccttccggagcttctccgtgccct

SEQ ID NO: 2266247 - DNA, 25 bp, Homo sapien
cctcctgtacattgcctagaaatcg

SEQ ID NO: 2266248 - DNA, 25 bp, Homo sapien
tagaaatcgccagaaagctgccacc

SEQ ID NO: 2266249 - DNA, 25 bp, Homo sapien
ttccccaagcatccagccttccgga

SEQ ID NO: 2266250 - DNA, 25 bp, Homo sapien
ctgtgacaggtgcagaccggtgtcc

SEQ ID NO: 2266251 - DNA, 25 bp, Homo sapien
cggctggctggacgtctggacatct

SEQ ID NO: 2266252 - DNA, 25 bp, Homo sapien
ctggctggacgtctggacatctgga

SEQ ID NO: 2266253 - DNA, 25 bp, Homo sapien
gtgcagaccggtgtccggctggctg

SEQ ID NO: 2266254 - DNA, 25 bp, Homo sapien
tcttacgtcaacaaatgcaccgccg

SEQ ID NO: 2266255 - DNA, 25 bp, Homo sapien
tctccagaggccgccaaacttgcgg

SEQ ID NO: 2266256 - DNA, 25 bp, Homo sapien
ctacattacttcttacgtcaacaaa

SEQ ID NO: 2266257 - DNA, 25 bp, Homo sapien
gtcaacaaatgcaccgccgtttctc

SEQ ID NO: 2266258 - DNA, 25 bp, Homo sapien
catagacggtgtgcgtgactgaaca

SEQ ID NO: 2266259 - DNA, 25 bp, Homo sapien
gatcatttcagctcctagccttgaa

SEQ ID NO: 2266260 - DNA, 25 bp, Homo sapien
ccttgaaataaaacgccgcttgccg

SEQ ID NO: 2266261 - DNA, 25 bp, Homo sapien
ccgacggacgtctgcaatgatgatg

SEQ ID NO: 2266262 - DNA, 25 bp, Homo sapien
cagagtctccaatgcacatctcaga

SEQ ID NO: 2266263 - DNA, 25 bp, Homo sapien
ctcagagtctccaatgcacatctca

SEQ ID NO: 2266264 - DNA, 25 bp, Homo sapien
tcagagtctccaatgcacatctcag

SEQ ID NO: 2266265 - DNA, 25 bp, Homo sapien
tcagtctccaatgcccacgtcagag

SEQ ID NO: 2266266 - DNA, 25 bp, Homo sapien
ccgggaaatcgttcatttcaatcag

SEQ ID NO: 2266267 - DNA, 25 bp, Homo sapien
aactcggagcttcaccgggaaatcg

SEQ ID NO: 2266268 - DNA, 25 bp, Homo sapien
taggggacctcaccccatagaacca

SEQ ID NO: 2266269 - DNA, 25 bp, Homo sapien
caggatgtaggggacctcaccccat

SEQ ID NO: 2266270 - DNA, 25 bp, Homo sapien
ggcagcacctgtggacgtgaacatc

SEQ ID NO: 2266271 - DNA, 25 bp, Homo sapien
gcacctgtggacgtgaacatcagcc

SEQ ID NO: 2266272 - DNA, 25 bp, Homo sapien
cagcacctgtggacgtgaacatcag

SEQ ID NO: 2266273 - DNA, 25 bp, Homo sapien
gcagcacctgtggacgtgaacatca

SEQ ID NO: 2266274 - DNA, 25 bp, Homo sapien
agagggacagtatcccattgcctga

SEQ ID NO: 2266275 - DNA, 25 bp, Homo sapien
tgctccgaagccctgggttgcactg

SEQ ID NO: 2266276 - DNA, 25 bp, Homo sapien
catgacaagtcgcagagtgtggtcg

SEQ ID NO: 2266277 - DNA, 25 bp, Homo sapien
caaaaatcaggactatcaacgcgtg

SEQ ID NO: 2266278 - DNA, 25 bp, Homo sapien
ccaagaacgcttgcctggtacacaa

SEQ ID NO: 2266279 - DNA, 25 bp, Homo sapien
ctgcgtcagccctaccccggtgtct

SEQ ID NO: 2266280 - DNA, 25 bp, Homo sapien
tctcgtccaagaacgcttgcctggt

SEQ ID NO: 2266281 - DNA, 25 bp, Homo sapien
cccggtgtctcgtccaagaacgctt

SEQ ID NO: 2266282 - DNA, 25 bp, Homo sapien
ggacgctttgatataagcctgtaac

SEQ ID NO: 2266283 - DNA, 25 bp, Homo sapien
gagttcctgtctgggaatagaaggc

SEQ ID NO: 2266284 - DNA, 25 bp, Homo sapien
gttccgagttcctgtctgggaatag

SEQ ID NO: 2266285 - DNA, 25 bp, Homo sapien
ttgccaacagttggacgctttgata

SEQ ID NO: 2266286 - DNA, 25 bp, Homo sapien
gttttttaactactgacgctttgca

SEQ ID NO: 2266287 - DNA, 25 bp, Homo sapien
ccagaatggtgggtggttcccattt

SEQ ID NO: 2266288 - DNA, 25 bp, Homo sapien
taactactgacgctttgcacgtcca

SEQ ID NO: 2266289 - DNA, 25 bp, Homo sapien
ctactgacgctttgcacgtccaatc

SEQ ID NO: 2266290 - DNA, 25 bp, Homo sapien
gcctgcaaacgctaactggggcttg

SEQ ID NO: 2266291 - DNA, 25 bp, Homo sapien
cccgaatgcctgcaaacgctaactg

SEQ ID NO: 2266292 - DNA, 25 bp, Homo sapien
tcccccgaatgcctgcaaacgctaa

SEQ ID NO: 2266293 - DNA, 25 bp, Homo sapien
ctgcaaacgctaactggggcttggt

SEQ ID NO: 2266294 - DNA, 25 bp, Homo sapien
aggaattcacgatgctcacagccca

SEQ ID NO: 2266295 - DNA, 25 bp, Homo sapien
tcttgggagattaagaccccatttg

SEQ ID NO: 2266296 - DNA, 25 bp, Homo sapien
tcatgatctgcaggttcatccctaa

SEQ ID NO: 2266297 - DNA, 25 bp, Homo sapien
catgtctctgtgagtcacggtcact

SEQ ID NO: 2266298 - DNA, 25 bp, Homo sapien
atttttaattgccacgtatatcctc

SEQ ID NO: 2266299 - DNA, 25 bp, Homo sapien
gcgtcttccacggcgcgcttcagag

SEQ ID NO: 2266300 - DNA, 25 bp, Homo sapien
ggcgcgcttcagaggcccggctgtc

SEQ ID NO: 2266301 - DNA, 25 bp, Homo sapien
tatatcctcacaactgcgtcttcca

SEQ ID NO: 2266302 - DNA, 25 bp, Homo sapien
cagccgtggtgacattggacgtcgt

SEQ ID NO: 2266303 - DNA, 25 bp, Homo sapien
gaagacggctggctttttccggcga

SEQ ID NO: 2266304 - DNA, 25 bp, Homo sapien
tctgcaaggtgcgacatgcagccgt

SEQ ID NO: 2266305 - DNA, 25 bp, Homo sapien
tgaggggggacatgcaccctgtcca

SEQ ID NO: 2266306 - DNA, 25 bp, Homo sapien
aacaccctcgatcacccccacaaag

SEQ ID NO: 2266307 - DNA, 25 bp, Homo sapien
aacattttcatccacaccttcgtcc

SEQ ID NO: 2266308 - DNA, 25 bp, Homo sapien
accttcgtccatacagcaaacaccc

SEQ ID NO: 2266309 - DNA, 25 bp, Homo sapien
agggtggcctcccatgactgagatt

SEQ ID NO: 2266310 - DNA, 25 bp, Homo sapien
agtgctatctttgggagcaggtttg

SEQ ID NO: 2266311 - DNA, 25 bp, Homo sapien
gttagtgctatctttgggagcaggt

SEQ ID NO: 2266312 - DNA, 25 bp, Homo sapien
tactactggtgctgaggaatgagac

SEQ ID NO: 2266313 - DNA, 25 bp, Homo sapien
tccccccgttactactggtgctgag

SEQ ID NO: 2266314 - DNA, 25 bp, Homo sapien
tcttgacgctttggtgaccgattca

SEQ ID NO: 2266315 - DNA, 25 bp, Homo sapien
gaaacgtcgcctgccttttcagttg

SEQ ID NO: 2266316 - DNA, 25 bp, Homo sapien
tacgtgaaatgtctacggcttgagg

SEQ ID NO: 2266317 - DNA, 25 bp, Homo sapien
gcttgaggatccgtaatcttgacgc

SEQ ID NO: 2266318 - DNA, 25 bp, Homo sapien
ttacaattccgatgagatctccacg

SEQ ID NO: 2266319 - DNA, 25 bp, Homo sapien
gctggctgcatgagtttacaattcc

SEQ ID NO: 2266320 - DNA, 25 bp, Homo sapien
tgtacggtgcagagatgacaacacg

SEQ ID NO: 2266321 - DNA, 25 bp, Homo sapien
taatgtcattcttggaaacaggtcg

SEQ ID NO: 2266322 - DNA, 25 bp, Homo sapien
cccggcacgtacaatctggccttat

SEQ ID NO: 2266323 - DNA, 25 bp, Homo sapien
gcacgtacaatctggccttattcta

SEQ ID NO: 2266324 - DNA, 25 bp, Homo sapien
catgaagatcagcaccccggcacgt

SEQ ID NO: 2266325 - DNA, 25 bp, Homo sapien
atgaagatcagcaccccggcacgta

SEQ ID NO: 2266326 - DNA, 25 bp, Homo sapien
tcgtggcatccgaggtgacagcttt

SEQ ID NO: 2266327 - DNA, 25 bp, Homo sapien
gaaagatgctgcctccacagcgtaa

SEQ ID NO: 2266328 - DNA, 25 bp, Homo sapien
catttcgtttctgccgaccgtgtgg

SEQ ID NO: 2266329 - DNA, 25 bp, Homo sapien
gagattttcacacaccgtcgtggca

SEQ ID NO: 2266330 - DNA, 25 bp, Homo sapien
gctgctgcgtcctgggcgtctgatc

SEQ ID NO: 2266331 - DNA, 25 bp, Homo sapien
cggaggttcattcgcgtcctggcgt

SEQ ID NO: 2266332 - DNA, 25 bp, Homo sapien
tgtttgcagtagaaagagacgcgcg

SEQ ID NO: 2266333 - DNA, 25 bp, Homo sapien
cgcaaaccctgtgcggactcgggct

SEQ ID NO: 2266334 - DNA, 25 bp, Homo sapien
tttgtctagtaggaaactccgctct

SEQ ID NO: 2266335 - DNA, 25 bp, Homo sapien
aaactccgctctaccagggtgtccg

SEQ ID NO: 2266336 - DNA, 25 bp, Homo sapien
tgtccgagcctccaggaatgagcat

SEQ ID NO: 2266337 - DNA, 25 bp, Homo sapien
ttgggccgcaatctggacccctttg

SEQ ID NO: 2266338 - DNA, 25 bp, Homo sapien
tcactatttatacgcggcgacctcg

SEQ ID NO: 2266339 - DNA, 25 bp, Homo sapien
cctgtctggtgcaattactggtctc

SEQ ID NO: 2266340 - DNA, 25 bp, Homo sapien
tttggcgtccgtacaccttggtgcg

SEQ ID NO: 2266341 - DNA, 25 bp, Homo sapien
ggacgcacgcagagacgctgtgtct

SEQ ID NO: 2266342 - DNA, 25 bp, Homo sapien
gatacaaaagccgtgagctcttcca

SEQ ID NO: 2266343 - DNA, 25 bp, Homo sapien
ttggatacaaaagccgtgagctctt

SEQ ID NO: 2266344 - DNA, 25 bp, Homo sapien
aagacttggatacaaaagccgtgag

SEQ ID NO: 2266345 - DNA, 25 bp, Homo sapien
cgccgttaccgtccttgcttttctg

SEQ ID NO: 2266346 - DNA, 25 bp, Homo sapien
tccttgtcattgtctacgtggtcct

SEQ ID NO: 2266347 - DNA, 25 bp, Homo sapien
tcgcggtgccgaattctttcagttt

SEQ ID NO: 2266348 - DNA, 25 bp, Homo sapien
tggaggctggaatccgacgtcccca

SEQ ID NO: 2266349 - DNA, 25 bp, Homo sapien
cgtggtccttgaacaaatgcaccgg

SEQ ID NO: 2266350 - DNA, 25 bp, Homo sapien
ctaccccaccagagtgtgccaaaaa

SEQ ID NO: 2266351 - DNA, 25 bp, Homo sapien
ccactttttcacacgcggtcgggca

SEQ ID NO: 2266352 - DNA, 25 bp, Homo sapien
aaccgcgtgcgcagaaatctctcct

SEQ ID NO: 2266353 - DNA, 25 bp, Homo sapien
tctccagtagttggtgacctgtctg

SEQ ID NO: 2266354 - DNA, 25 bp, Homo sapien
gtcctccgacttcacgtcctcgcgc

SEQ ID NO: 2266355 - DNA, 25 bp, Homo sapien
ctccgacttcacgtcctcgcgcttc

SEQ ID NO: 2266356 - DNA, 25 bp, Homo sapien
cgtcctcgcgcttctctttgcattc

SEQ ID NO: 2266357 - DNA, 25 bp, Homo sapien
cctccgacttcacgtcctcgcgctt

SEQ ID NO: 2266358 - DNA, 25 bp, Homo sapien
gtaatgggtctcgtcgaagagtcgc

SEQ ID NO: 2266359 - DNA, 25 bp, Homo sapien
aagttggtgcggctgcgcctctgtt

SEQ ID NO: 2266360 - DNA, 25 bp, Homo sapien
tggctgagctcctcgcgcatgaagg

SEQ ID NO: 2266361 - DNA, 25 bp, Homo sapien
aagagtcgctcgagctcgttcagct

SEQ ID NO: 2266362 - DNA, 25 bp, Homo sapien
cagacgccctaaggagggacacagt

SEQ ID NO: 2266363 - DNA, 25 bp, Homo sapien
acagccctcggtaaagatgcctggg

SEQ ID NO: 2266364 - DNA, 25 bp, Homo sapien
tccctcctgggctgtatcgctttgg

SEQ ID NO: 2266365 - DNA, 25 bp, Homo sapien
cacatgggaagacggaagagaatca

SEQ ID NO: 2266366 - DNA, 25 bp, Homo sapien
ccacaaccaattttccgcagctgaa

SEQ ID NO: 2266367 - DNA, 25 bp, Homo sapien
tttccgcagctgaactaacgtgctc

SEQ ID NO: 2266368 - DNA, 25 bp, Homo sapien
ctaacgtgctctcgtcggtaataga

SEQ ID NO: 2266369 - DNA, 25 bp, Homo sapien
agctgaactaacgtgctctcgtcgg

SEQ ID NO: 2266370 - DNA, 25 bp, Homo sapien
tagggcgttctcggggtccgcacac

SEQ ID NO: 2266371 - DNA, 25 bp, Homo sapien
gggcgttctcggggtccgcacacac

SEQ ID NO: 2266372 - DNA, 25 bp, Homo sapien
ttagggcgttctcggggtccgcaca

SEQ ID NO: 2266373 - DNA, 25 bp, Homo sapien
agggcgttctcggggtccgcacaca

SEQ ID NO: 2266374 - DNA, 25 bp, Homo sapien
agagagatgtgaagagccctgtgaa

SEQ ID NO: 2266375 - DNA, 25 bp, Homo sapien
gagagatgtgaagagccctgtgaac

SEQ ID NO: 2266376 - DNA, 25 bp, Homo sapien
atgtgaagagccctgtgaacccagc

SEQ ID NO: 2266377 - DNA, 25 bp, Homo sapien
gagatgtgaagagccctgtgaaccc

SEQ ID NO: 2266378 - DNA, 25 bp, Homo sapien
attctcttgtttgcggcacttggct

SEQ ID NO: 2266379 - DNA, 25 bp, Homo sapien
gattctcttgtttgcggcacttggc

SEQ ID NO: 2266380 - DNA, 25 bp, Homo sapien
tgattctcttgtttgcggcacttgg

SEQ ID NO: 2266381 - DNA, 25 bp, Homo sapien
taaggctcccatgttgacgtagggt

SEQ ID NO: 2266382 - DNA, 25 bp, Homo sapien
catgttgacgtagggtgccactcgg

SEQ ID NO: 2266383 - DNA, 25 bp, Homo sapien
gaaaggcatccgtaaggctcccatg

SEQ ID NO: 2266384 - DNA, 25 bp, Homo sapien
tagggtgccactcggcaggcgtcta

SEQ ID NO: 2266385 - DNA, 25 bp, Homo sapien
tgcgggctccaacggcctaatttca

SEQ ID NO: 2266386 - DNA, 25 bp, Homo sapien
ccaagactccggtgcgcaaagccag

SEQ ID NO: 2266387 - DNA, 25 bp, Homo sapien
gacggtacaagaagtaggctcgttc

SEQ ID NO: 2266388 - DNA, 25 bp, Homo sapien
atttcactgggtcccgccgtcggca

SEQ ID NO: 2266389 - DNA, 25 bp, Homo sapien
cttccagagacaccaggtccccaag

SEQ ID NO: 2266390 - DNA, 25 bp, Homo sapien
ttccagagacaccaggtccccaagc

SEQ ID NO: 2266391 - DNA, 25 bp, Homo sapien
tccagagacaccaggtccccaagcc

SEQ ID NO: 2266392 - DNA, 25 bp, Homo sapien
tccaaggtcaccaggtccccaagcc

SEQ ID NO: 2266393 - DNA, 25 bp, Homo sapien
cgggacaccaggtccccaagcctct

SEQ ID NO: 2266394 - DNA, 25 bp, Homo sapien
tgggacaccaggtgtccaagcctct

SEQ ID NO: 2266395 - DNA, 25 bp, Homo sapien
gggacaccaagtccccaagcctctc

SEQ ID NO: 2266396 - DNA, 25 bp, Homo sapien
tcccgagacaccaggtccccaagcc

SEQ ID NO: 2266397 - DNA, 25 bp, Homo sapien
ggtccacaaatggaacgccctcagg

SEQ ID NO: 2266398 - DNA, 25 bp, Homo sapien
gatgcgctctcttcgcagggattca

SEQ ID NO: 2266399 - DNA, 25 bp, Homo sapien
cagggattcagggactttggctcac

SEQ ID NO: 2266400 - DNA, 25 bp, Homo sapien
gggaatccgaacagctccctgcaaa

SEQ ID NO: 2266401 - DNA, 25 bp, Homo sapien
gcgtcgccccttctccagccgtgga

SEQ ID NO: 2266402 - DNA, 25 bp, Homo sapien
cctagggagcgtcgccccttctcca

SEQ ID NO: 2266403 - DNA, 25 bp, Homo sapien
tgcgggagcggacccggcggggtga

SEQ ID NO: 2266404 - DNA, 25 bp, Homo sapien
tccagccgtggagaccaccccacac

SEQ ID NO: 2266405 - DNA, 25 bp, Homo sapien
gcggccgaggcggactcggccagcg

SEQ ID NO: 2266406 - DNA, 25 bp, Homo sapien
ccagcgacgcgatgggcagcccgaa

SEQ ID NO: 2266407 - DNA, 25 bp, Homo sapien
actcggccagcgacgcgatgggcag

SEQ ID NO: 2266408 - DNA, 25 bp, Homo sapien
ggcggactcggccagcgacgcgatg

SEQ ID NO: 2266409 - DNA, 25 bp, Homo sapien
gtgcttccgcgccttgagccgcagg

SEQ ID NO: 2266410 - DNA, 25 bp, Homo sapien
ctccgcgtgcttccgcgccttgagc

SEQ ID NO: 2266411 - DNA, 25 bp, Homo sapien
gccttgagccgcaggtcggcgatgc

SEQ ID NO: 2266412 - DNA, 25 bp, Homo sapien
agggcctccgcgtgcttccgcgcct

SEQ ID NO: 2266413 - DNA, 25 bp, Homo sapien
tctacacccgtgatttttgcaaagg

SEQ ID NO: 2266414 - DNA, 25 bp, Homo sapien
tcagaacatggaacgtggatctccc

SEQ ID NO: 2266415 - DNA, 25 bp, Homo sapien
cagaagatacaaatgagacgggtcc

SEQ ID NO: 2266416 - DNA, 25 bp, Homo sapien
catagggtatagcagaggaagacgc

SEQ ID NO: 2266417 - DNA, 25 bp, Homo sapien
tgtccccgggaaaactgtggagcta

SEQ ID NO: 2266418 - DNA, 25 bp, Homo sapien
tcatttcggttaaacgcccagctgt

SEQ ID NO: 2266419 - DNA, 25 bp, Homo sapien
tgaccagagcttggcaccaaaacct

SEQ ID NO: 2266420 - DNA, 25 bp, Homo sapien
caaagtgcctccgaaatgtgtgtcg

SEQ ID NO: 2266421 - DNA, 25 bp, Homo sapien
gacctgcacgtacaatgggctgaac

SEQ ID NO: 2266422 - DNA, 25 bp, Homo sapien
tgtcaaacgtgtccaccgaaagcct

SEQ ID NO: 2266423 - DNA, 25 bp, Homo sapien
gaatgagggcgtcaccagagaaact

SEQ ID NO: 2266424 - DNA, 25 bp, Homo sapien
ccacgtgtgtcgaagaatatcagca

SEQ ID NO: 2266425 - DNA, 25 bp, Homo sapien
ccgggcgacaagagcaaaactccat

SEQ ID NO: 2266426 - DNA, 25 bp, Homo sapien
catgccattatactccagcccgggc

SEQ ID NO: 2266427 - DNA, 25 bp, Homo sapien
agcccgggcgacaagagcaaaactc

SEQ ID NO: 2266428 - DNA, 25 bp, Homo sapien
atgccattatactccagcccgggcg

SEQ ID NO: 2266429 - DNA, 25 bp, Homo sapien
agaggatctttggagctcaggagct

SEQ ID NO: 2266430 - DNA, 25 bp, Homo sapien
tcagcagcaaagcaagatcccgtct

SEQ ID NO: 2266431 - DNA, 25 bp, Homo sapien
aaacattatcttgacatggtggtgg

SEQ ID NO: 2266432 - DNA, 25 bp, Homo sapien
gagaccacgggcagtggttcatgct

SEQ ID NO: 2266433 - DNA, 25 bp, Homo sapien
ccagaatgtgtttagttaacacaca

SEQ ID NO: 2266434 - DNA, 25 bp, Homo sapien
ttaattaattagcacatgtatctca

SEQ ID NO: 2266435 - DNA, 25 bp, Homo sapien
tgtggggggatagaaggcaagagga

SEQ ID NO: 2266436 - DNA, 25 bp, Homo sapien
tgtaccccagaatgtgtttagttaa

SEQ ID NO: 2266437 - DNA, 25 bp, Homo sapien
caagggcagccctatagtgggtgtc

SEQ ID NO: 2266438 - DNA, 25 bp, Homo sapien
tggaatgtccgtgcctccaggcttg

SEQ ID NO: 2266439 - DNA, 25 bp, Homo sapien
ttcacaaagcgtccatccaagggca

SEQ ID NO: 2266440 - DNA, 25 bp, Homo sapien
tctcgtactctagggatattgcacc

SEQ ID NO: 2266441 - DNA, 25 bp, Homo sapien
ccaagctctccaaactccgaaatcc

SEQ ID NO: 2266442 - DNA, 25 bp, Homo sapien
tccggttgcccttggaactcggcat

SEQ ID NO: 2266443 - DNA, 25 bp, Homo sapien
atccggttgcccttggaactcggca

SEQ ID NO: 2266444 - DNA, 25 bp, Homo sapien
tctccaaactccgaaatccggttgc

SEQ ID NO: 2266445 - DNA, 25 bp, Homo sapien
gtccacgaccagacgatgaacagtt

SEQ ID NO: 2266446 - DNA, 25 bp, Homo sapien
tcaatgtccacgaccagacgatgaa

SEQ ID NO: 2266447 - DNA, 25 bp, Homo sapien
tgtccacgaccagacgatgaacagt

SEQ ID NO: 2266448 - DNA, 25 bp, Homo sapien
gggactcaatgtccacgaccagacg

SEQ ID NO: 2266449 - DNA, 25 bp, Homo sapien
ctggcagttctacggttgggggctg

SEQ ID NO: 2266450 - DNA, 25 bp, Homo sapien
ggcagttctacggttgggggctgcc

SEQ ID NO: 2266451 - DNA, 25 bp, Homo sapien
agctggcagttctacggttgggggc

SEQ ID NO: 2266452 - DNA, 25 bp, Homo sapien
ggagctggcagttctacggttgggg

SEQ ID NO: 2266453 - DNA, 25 bp, Homo sapien
gacaaggaggcatacatcttgcaag

SEQ ID NO: 2266454 - DNA, 25 bp, Homo sapien
aaggaggcatacatcttgcaagcac

SEQ ID NO: 2266455 - DNA, 25 bp, Homo sapien
gaggcatacatcttgcaagcaccct

SEQ ID NO: 2266456 - DNA, 25 bp, Homo sapien
cagacaaggaggcatacatcttgca

SEQ ID NO: 2266457 - DNA, 25 bp, Homo sapien
aaggaggcatacatcttgcaagcac

SEQ ID NO: 2266458 - DNA, 25 bp, Homo sapien
gacaaggaggcatacatcttgcaag

SEQ ID NO: 2266459 - DNA, 25 bp, Homo sapien
cagacaaggaggcatacatcttgca

SEQ ID NO: 2266460 - DNA, 25 bp, Homo sapien
gaggcatacatcttgcaagcaccct

SEQ ID NO: 2266461 - DNA, 25 bp, Homo sapien
ggaggatctgtgttctattcccacc

SEQ ID NO: 2266462 - DNA, 25 bp, Homo sapien
tcatgacacctggtagcaggaagca

SEQ ID NO: 2266463 - DNA, 25 bp, Homo sapien
gcaatgcctgcctctgaacaatgaa

SEQ ID NO: 2266464 - DNA, 25 bp, Homo sapien
aacaatgaagttggctctgaacgcc

SEQ ID NO: 2266465 - DNA, 25 bp, Homo sapien
cagaagcttcttctcgccaaactct

SEQ ID NO: 2266466 - DNA, 25 bp, Homo sapien
tcttctcgccaaactctggtgcact

SEQ ID NO: 2266467 - DNA, 25 bp, Homo sapien
agtgaggtcaccatacagccagagt

SEQ ID NO: 2266468 - DNA, 25 bp, Homo sapien
gccaaactctggtgcactccagcca

SEQ ID NO: 2266469 - DNA, 25 bp, Homo sapien
ttcgagcatggggtacttgggatag

SEQ ID NO: 2266470 - DNA, 25 bp, Homo sapien
catggggtacttgggatagaggatg

SEQ ID NO: 2266471 - DNA, 25 bp, Homo sapien
cattcgagcatggggtacttgggat

SEQ ID NO: 2266472 - DNA, 25 bp, Homo sapien
cgagcatggggtacttgggatagag

SEQ ID NO: 2266473 - DNA, 25 bp, Homo sapien
cgcgaatttgcagcgtccagctcag

SEQ ID NO: 2266474 - DNA, 25 bp, Homo sapien
gcccacatcaccctggactgtgtcc

SEQ ID NO: 2266475 - DNA, 25 bp, Homo sapien
gggtgatgccgaaaacgtgtcttcc

SEQ ID NO: 2266476 - DNA, 25 bp, Homo sapien
tgtcttcccgcgaatttgcagcgtc

SEQ ID NO: 2266477 - DNA, 25 bp, Homo sapien
ttttgcgggtgcgtttgatcttcct

SEQ ID NO: 2266478 - DNA, 25 bp, Homo sapien
tcggtcgtggtcatcatccatagaa

SEQ ID NO: 2266479 - DNA, 25 bp, Homo sapien
tgatcttccttagtgaacgctcacg

SEQ ID NO: 2266480 - DNA, 25 bp, Homo sapien
tgaagcttgcctgagattacgtcgg

SEQ ID NO: 2266481 - DNA, 25 bp, Homo sapien
acgtcccctgtgcattgaataccgg

SEQ ID NO: 2266482 - DNA, 25 bp, Homo sapien
agacacgtcccctgtgcattgaata

SEQ ID NO: 2266483 - DNA, 25 bp, Homo sapien
tgaccggggcgttagcagggcctgg

SEQ ID NO: 2266484 - DNA, 25 bp, Homo sapien
gtgcattgaataccggcgtccactg

SEQ ID NO: 2266485 - DNA, 25 bp, Homo sapien
tgcattgaataccagcgtccactgt

SEQ ID NO: 2266486 - DNA, 25 bp, Homo sapien
cctgtgcattgaataccagcgtcca

SEQ ID NO: 2266487 - DNA, 25 bp, Homo sapien
tcccctgtgcattgaataccagcgt

SEQ ID NO: 2266488 - DNA, 25 bp, Homo sapien
gaataccagcgtccactgtctgcac

SEQ ID NO: 2266489 - DNA, 25 bp, Homo sapien
catggagtcacgtcccctgtgcatt

SEQ ID NO: 2266490 - DNA, 25 bp, Homo sapien
tctgtggtgaggtttgcatggagtc

SEQ ID NO: 2266491 - DNA, 25 bp, Homo sapien
gtcacgtcccctgtgcattgaatac

SEQ ID NO: 2266492 - DNA, 25 bp, Homo sapien
tgaggtttgcatggagtcacgtccc

SEQ ID NO: 2266493 - DNA, 25 bp, Homo sapien
cctggacctgtctgtggtgaggttt

SEQ ID NO: 2266494 - DNA, 25 bp, Homo sapien
tgaggtttgcatggagtcacgtccc

SEQ ID NO: 2266495 - DNA, 25 bp, Homo sapien
tgaataccagcgtccactgtctgca

SEQ ID NO: 2266496 - DNA, 25 bp, Homo sapien
tcacgtcccctgtgcattgaatacc

SEQ ID NO: 2266497 - DNA, 25 bp, Homo sapien
agacacgtcccctgtgcattgaata

SEQ ID NO: 2266498 - DNA, 25 bp, Homo sapien
cctggacctgtctgtggtgaggttt

SEQ ID NO: 2266499 - DNA, 25 bp, Homo sapien
cacgtcccctgtgcattgaataccg

SEQ ID NO: 2266500 - DNA, 25 bp, Homo sapien
gcctggacctgtctgtggtgaggtt

SEQ ID NO: 2266501 - DNA, 25 bp, Homo sapien
gtgcattgaataccggcgtccactg

SEQ ID NO: 2266502 - DNA, 25 bp, Homo sapien
cgtcccctgtgcattgaataccggc

SEQ ID NO: 2266503 - DNA, 25 bp, Homo sapien
tcccctgtgcattgaataccggcgt

SEQ ID NO: 2266504 - DNA, 25 bp, Homo sapien
cctgtgcattgaataccggcgtcca

SEQ ID NO: 2266505 - DNA, 25 bp, Homo sapien
cagggtgttagcagggcctggtccc

SEQ ID NO: 2266506 - DNA, 25 bp, Homo sapien
agggtgttagcagggcctggtccca

SEQ ID NO: 2266507 - DNA, 25 bp, Homo sapien
cactgtgtgtacctgacctgtgccc

SEQ ID NO: 2266508 - DNA, 25 bp, Homo sapien
ccaggatgttagcagtgcctggaca

SEQ ID NO: 2266509 - DNA, 25 bp, Homo sapien
gatgagtattgaatgttcacgtcca

SEQ ID NO: 2266510 - DNA, 25 bp, Homo sapien
ttagcagggtctggtcccatctggg

SEQ ID NO: 2266511 - DNA, 25 bp, Homo sapien
aattccatgcccattggccgttctg

SEQ ID NO: 2266512 - DNA, 25 bp, Homo sapien
tgcccattggccgttctgtgccagc

SEQ ID NO: 2266513 - DNA, 25 bp, Homo sapien
gctgggaattccatgcccattggcc

SEQ ID NO: 2266514 - DNA, 25 bp, Homo sapien
tggccgttctgtgccagcacgatgc

SEQ ID NO: 2266515 - DNA, 25 bp, Homo sapien
tggccgtgctagacactttccgcag

SEQ ID NO: 2266516 - DNA, 25 bp, Homo sapien
ccggtgctggccgtgctagacactt

SEQ ID NO: 2266517 - DNA, 25 bp, Homo sapien
tccacctgcacctgcggattctcat

SEQ ID NO: 2266518 - DNA, 25 bp, Homo sapien
aggtccccgtatctctggccggtgc

SEQ ID NO: 2266519 - DNA, 25 bp, Homo sapien
gggctgaagtccagcaaccagatgt

SEQ ID NO: 2266520 - DNA, 25 bp, Homo sapien
tcacggacgggtgttgtaggaatta

SEQ ID NO: 2266521 - DNA, 25 bp, Homo sapien
ggctgaagtccagcaaccagatgtc

SEQ ID NO: 2266522 - DNA, 25 bp, Homo sapien
ctcataggcgctcaatgccacaatg

SEQ ID NO: 2266523 - DNA, 25 bp, Homo sapien
ggcagtcaacgctgcaatgcactca

SEQ ID NO: 2266524 - DNA, 25 bp, Homo sapien
tgccaccatgcactgataggcagtc

SEQ ID NO: 2266525 - DNA, 25 bp, Homo sapien
tgcaatgcactcataggcgctcaat

SEQ ID NO: 2266526 - DNA, 25 bp, Homo sapien
acaatgcactgatacacactcaatg

SEQ ID NO: 2266527 - DNA, 25 bp, Homo sapien
gcactgatacgcactcaacattacg

SEQ ID NO: 2266528 - DNA, 25 bp, Homo sapien
cgcactcaacattacgatgcactga

SEQ ID NO: 2266529 - DNA, 25 bp, Homo sapien
tattatgatgcactgatacatgctg

SEQ ID NO: 2266530 - DNA, 25 bp, Homo sapien
gatggctgagccatgaacagagatg

SEQ ID NO: 2266531 - DNA, 25 bp, Homo sapien
atgtggatggctgagccatgaacag

SEQ ID NO: 2266532 - DNA, 25 bp, Homo sapien
ctgggaccatgtggatggctgagcc

SEQ ID NO: 2266533 - DNA, 25 bp, Homo sapien
gaccatgtggatggctgagccatga

SEQ ID NO: 2266534 - DNA, 25 bp, Homo sapien
caaatttgtccgagtttcgagcaac

SEQ ID NO: 2266535 - DNA, 25 bp, Homo sapien
gaaatcttgagtctgaaaaccctga

SEQ ID NO: 2266536 - DNA, 25 bp, Homo sapien
gaggacatctgccatcagttgatgg

SEQ ID NO: 2266537 - DNA, 25 bp, Homo sapien
gaaaaaagcgatgggtctcttctct

SEQ ID NO: 2266538 - DNA, 25 bp, Homo sapien
tgttttatatggcagagcaccagca

SEQ ID NO: 2266539 - DNA, 25 bp, Homo sapien
cagcctcctcggacggacttgagga

SEQ ID NO: 2266540 - DNA, 25 bp, Homo sapien
cggacggacttgaggatgttttata

SEQ ID NO: 2266541 - DNA, 25 bp, Homo sapien
tttatatggcagagcaccagcagcc

SEQ ID NO: 2266542 - DNA, 25 bp, Homo sapien
ccagaaggcttgatccgcagcattg

SEQ ID NO: 2266543 - DNA, 25 bp, Homo sapien
aacaaaaggcccagaaggcttgatc

SEQ ID NO: 2266544 - DNA, 25 bp, Homo sapien
tgatccgcagcattgagtgagtgcg

SEQ ID NO: 2266545 - DNA, 25 bp, Homo sapien
aaaggcccagaaggcttgatccgca

SEQ ID NO: 2266546 - DNA, 25 bp, Homo sapien
cgcgggccggtaaatgagacggctg

SEQ ID NO: 2266547 - DNA, 25 bp, Homo sapien
gccggtaaatgagacggctgccgaa

SEQ ID NO: 2266548 - DNA, 25 bp, Homo sapien
taaatgagacggctgccgaacacaa

SEQ ID NO: 2266549 - DNA, 25 bp, Homo sapien
gagacggctgccgaacacaatggcc

SEQ ID NO: 2266550 - DNA, 25 bp, Homo sapien
cctgggcccgaaatataggtgtgat

SEQ ID NO: 2266551 - DNA, 25 bp, Homo sapien
gcccgaaatataggtgtgataatca

SEQ ID NO: 2266552 - DNA, 25 bp, Homo sapien
tgataatcatagctttctcccacat

SEQ ID NO: 2266553 - DNA, 25 bp, Homo sapien
taggtgtgataatcatagctttctc

SEQ ID NO: 2266554 - DNA, 25 bp, Homo sapien
ccggattcgtcgacataacccttgg

SEQ ID NO: 2266555 - DNA, 25 bp, Homo sapien
cggattcgtcgacataacccttggg

SEQ ID NO: 2266556 - DNA, 25 bp, Homo sapien
cccggattcgtcgacataacccttg

SEQ ID NO: 2266557 - DNA, 25 bp, Homo sapien
tgatcaaatttttcccggattcgtc

SEQ ID NO: 2266558 - DNA, 25 bp, Homo sapien
gtcatatcccgattttgattccata

SEQ ID NO: 2266559 - DNA, 25 bp, Homo sapien
ccgtaacgctaaatatcccgatcgg

SEQ ID NO: 2266560 - DNA, 25 bp, Homo sapien
gtaacaatgtcatatcccgattttg

SEQ ID NO: 2266561 - DNA, 25 bp, Homo sapien
tcaatacccctgctatggaaccagg

SEQ ID NO: 2266562 - DNA, 25 bp, Homo sapien
ataccccataactatatacactgct

SEQ ID NO: 2266563 - DNA, 25 bp, Homo sapien
atccttataccccataactatatac

SEQ ID NO: 2266564 - DNA, 25 bp, Homo sapien
aaatatccttataccccataactat

SEQ ID NO: 2266565 - DNA, 25 bp, Homo sapien
aatatccttataccccataactata

SEQ ID NO: 2266566 - DNA, 25 bp, Homo sapien
caccctgggtgtaggacaagtagaa

SEQ ID NO: 2266567 - DNA, 25 bp, Homo sapien
gattaactctcaaacccaagtcttg

SEQ ID NO: 2266568 - DNA, 25 bp, Homo sapien
gggtgtaccctcttccgcagagaca

SEQ ID NO: 2266569 - DNA, 25 bp, Homo sapien
tgtttcaggaagacgtatggtagca

SEQ ID NO: 2266570 - DNA, 25 bp, Homo sapien
tgcatttggtgacaccgcaggcaga

SEQ ID NO: 2266571 - DNA, 25 bp, Homo sapien
tgcatcctggaaaccctggttcctg

SEQ ID NO: 2266572 - DNA, 25 bp, Homo sapien
ccgcggatgccacgtccatttgctt

SEQ ID NO: 2266573 - DNA, 25 bp, Homo sapien
cctccaggtttaggaggggtctctg

SEQ ID NO: 2266574 - DNA, 25 bp, Homo sapien
tgcatttggtgacaccgcaggcaga

SEQ ID NO: 2266575 - DNA, 25 bp, Homo sapien
ggtttagaaggggtgtctgggtgca

SEQ ID NO: 2266576 - DNA, 25 bp, Homo sapien
tcctggaaaccctggttcttgcctc

SEQ ID NO: 2266577 - DNA, 25 bp, Homo sapien
ccgcggatgccacgtccatttgctt

SEQ ID NO: 2266578 - DNA, 25 bp, Homo sapien
ttgaaaggatcagtaacgaagtccg

SEQ ID NO: 2266579 - DNA, 25 bp, Homo sapien
tgaaaggatcagtaacgaagtccgg

SEQ ID NO: 2266580 - DNA, 25 bp, Homo sapien
tttgaaaggatcagtaacgaagtcc

SEQ ID NO: 2266581 - DNA, 25 bp, Homo sapien
ctttgaaaggatcagtaacgaagtc

SEQ ID NO: 2266582 - DNA, 25 bp, Homo sapien
tgtgcccggtcaggtaggatctcat

SEQ ID NO: 2266583 - DNA, 25 bp, Homo sapien
gaagttgtcggtgctaagttctctc

SEQ ID NO: 2266584 - DNA, 25 bp, Homo sapien
cgctgaagctacagagaggacctct

SEQ ID NO: 2266585 - DNA, 25 bp, Homo sapien
tctggattttcaggaggccagttct

SEQ ID NO: 2266586 - DNA, 25 bp, Homo sapien
ctgcattgcaatggactgtgcggtg

SEQ ID NO: 2266587 - DNA, 25 bp, Homo sapien
ggcctgcattgcaatggactgtgcg

SEQ ID NO: 2266588 - DNA, 25 bp, Homo sapien
aagcagggcctgcattgcaatggac

SEQ ID NO: 2266589 - DNA, 25 bp, Homo sapien
agggcctgcattgcaatggactgtg

SEQ ID NO: 2266590 - DNA, 25 bp, Homo sapien
tccgaaggagttgctattcctgcct

SEQ ID NO: 2266591 - DNA, 25 bp, Homo sapien
cctgattcttgggagcctatattcc

SEQ ID NO: 2266592 - DNA, 25 bp, Homo sapien
tacgcaatgccgctattattttcaa

SEQ ID NO: 2266593 - DNA, 25 bp, Homo sapien
gctgtatttgtgagacgatacgcaa

SEQ ID NO: 2266594 - DNA, 25 bp, Homo sapien
cccatgaattgtgcatacgggtccg

SEQ ID NO: 2266595 - DNA, 25 bp, Homo sapien
atgaattgtgcatacgggtccgccc

SEQ ID NO: 2266596 - DNA, 25 bp, Homo sapien
tgacgcccatgaattgtgcatacgg

SEQ ID NO: 2266597 - DNA, 25 bp, Homo sapien
ctgacgcccatgaattgtgcatacg

SEQ ID NO: 2266598 - DNA, 25 bp, Homo sapien
ctagaccacacgtaattcatggcaa

SEQ ID NO: 2266599 - DNA, 25 bp, Homo sapien
tagaccacacgtaattcatggcaaa

SEQ ID NO: 2266600 - DNA, 25 bp, Homo sapien
gaccacacgtaattcatggcaaact

SEQ ID NO: 2266601 - DNA, 25 bp, Homo sapien
agaccacacgtaattcatggcaaac

SEQ ID NO: 2266602 - DNA, 25 bp, Homo sapien
cccatccatgaagccatcctggtcc

SEQ ID NO: 2266603 - DNA, 25 bp, Homo sapien
ccatccatgaagccatcctggtcca

SEQ ID NO: 2266604 - DNA, 25 bp, Homo sapien
catccatgaagccatcctggtccat

SEQ ID NO: 2266605 - DNA, 25 bp, Homo sapien
aagaagcagcttgttactaggagaa

SEQ ID NO: 2266606 - DNA, 25 bp, Homo sapien
ggaagaagcagcttgttactaggag

SEQ ID NO: 2266607 - DNA, 25 bp, Homo sapien
gaagaagcagcttgttactaggaga

SEQ ID NO: 2266608 - DNA, 25 bp, Homo sapien
gaagcagcttgttactaggagaatt

SEQ ID NO: 2266609 - DNA, 25 bp, Homo sapien
tgagtgttggaggccccataggaat

SEQ ID NO: 2266610 - DNA, 25 bp, Homo sapien
catgtgttccccgaggaggaacggc

SEQ ID NO: 2266611 - DNA, 25 bp, Homo sapien
gaggaacggcgtagtcttggcgggc

SEQ ID NO: 2266612 - DNA, 25 bp, Homo sapien
ctgcccatgtgttccccgaggagga

SEQ ID NO: 2266613 - DNA, 25 bp, Homo sapien
cggcgtagtcttggcgggcttgtgg

SEQ ID NO: 2266614 - DNA, 25 bp, Homo sapien
acaatgagttgccaaagtgacatct

SEQ ID NO: 2266615 - DNA, 25 bp, Homo sapien
atgagttgccaaagtgacatcttcc

SEQ ID NO: 2266616 - DNA, 25 bp, Homo sapien
gagttgccaaagtgacatcttcctc

SEQ ID NO: 2266617 - DNA, 25 bp, Homo sapien
gttgccaaagtgacatcttcctctt

SEQ ID NO: 2266618 - DNA, 25 bp, Homo sapien
tagtgggctggcgagggtagtggca

SEQ ID NO: 2266619 - DNA, 25 bp, Homo sapien
ggcgagggtagtggcatctttgtaa

SEQ ID NO: 2266620 - DNA, 25 bp, Homo sapien
catcttagtgggctggcgagggtag

SEQ ID NO: 2266621 - DNA, 25 bp, Homo sapien
gctggcgagggtagtggcatctttg

SEQ ID NO: 2266622 - DNA, 25 bp, Homo sapien
agcgagaaaaagctgagatgctgct

SEQ ID NO: 2266623 - DNA, 25 bp, Homo sapien
ctgccagcgagaaaaagctgagatg

SEQ ID NO: 2266624 - DNA, 25 bp, Homo sapien
tggttgcatgggtcccccatagagt

SEQ ID NO: 2266625 - DNA, 25 bp, Homo sapien
agatgctgctggttgcatgggtccc

SEQ ID NO: 2266626 - DNA, 25 bp, Homo sapien
tgggatgctggtttcccgcagacac

SEQ ID NO: 2266627 - DNA, 25 bp, Homo sapien
taatgtgcggccctgagcgtataat

SEQ ID NO: 2266628 - DNA, 25 bp, Homo sapien
cgcgtctgaagtgaactgggatgct

SEQ ID NO: 2266629 - DNA, 25 bp, Homo sapien
cgtataatcaacacgctcgcgtctg

SEQ ID NO: 2266630 - DNA, 25 bp, Homo sapien
tgaattcgagataaacagcagtatg

SEQ ID NO: 2266631 - DNA, 25 bp, Homo sapien
tgcgtgcccaggtatacttgaattc

SEQ ID NO: 2266632 - DNA, 25 bp, Homo sapien
cagcagtatggatgcgtgcccaggt

SEQ ID NO: 2266633 - DNA, 25 bp, Homo sapien
cttgaattcgaggtgaacaggagta

SEQ ID NO: 2266634 - DNA, 25 bp, Homo sapien
acatttgagttggagataaacagca

SEQ ID NO: 2266635 - DNA, 25 bp, Homo sapien
agtggaattcgaggtaaacagcaga

SEQ ID NO: 2266636 - DNA, 25 bp, Homo sapien
gcagaacagttgcatgctcaggtac

SEQ ID NO: 2266637 - DNA, 25 bp, Homo sapien
ccaggtagagtggaattcgaggtaa

SEQ ID NO: 2266638 - DNA, 25 bp, Homo sapien
gcacgccggccccaaacaggccaat

SEQ ID NO: 2266639 - DNA, 25 bp, Homo sapien
ccccaaacaggccaatttgtcctgt

SEQ ID NO: 2266640 - DNA, 25 bp, Homo sapien
cctgtctctgtgggatctcttggtt

SEQ ID NO: 2266641 - DNA, 25 bp, Homo sapien
aaacaggccaatttgtcctgtctct

SEQ ID NO: 2266642 - DNA, 25 bp, Homo sapien
cggccgttgagtggcgtctgggatc

SEQ ID NO: 2266643 - DNA, 25 bp, Homo sapien
tcacgcctcatctggtttgatgtag

SEQ ID NO: 2266644 - DNA, 25 bp, Homo sapien
tttccagtgcgatggggcggccgtt

SEQ ID NO: 2266645 - DNA, 25 bp, Homo sapien
tcatctggtttgatgtagtcttttg

SEQ ID NO: 2266646 - DNA, 25 bp, Homo sapien
ggccacggccattctctgactccca

SEQ ID NO: 2266647 - DNA, 25 bp, Homo sapien
ggccattctctgactcccagacttt

SEQ ID NO: 2266648 - DNA, 25 bp, Homo sapien
ctggcttcaggccacggccattctc

SEQ ID NO: 2266649 - DNA, 25 bp, Homo sapien
ttctctgactcccagactttaattc

SEQ ID NO: 2266650 - DNA, 25 bp, Homo sapien
aggagccggtggtatgtcttcaatc

SEQ ID NO: 2266651 - DNA, 25 bp, Homo sapien
tagaactgatgcttccgttgcagag

SEQ ID NO: 2266652 - DNA, 25 bp, Homo sapien
gcttgatagcttttctctaaccaca

SEQ ID NO: 2266653 - DNA, 25 bp, Homo sapien
agaaggtcccgtctggtatctgacg

SEQ ID NO: 2266654 - DNA, 25 bp, Homo sapien
gcctggcttagaactgatgcttccg

SEQ ID NO: 2266655 - DNA, 25 bp, Homo sapien
ccagcgggtggccagagccgctgac

SEQ ID NO: 2266656 - DNA, 25 bp, Homo sapien
cagcgggtggccagagccgctgact

SEQ ID NO: 2266657 - DNA, 25 bp, Homo sapien
gccagcgggtggccagagccgctga

SEQ ID NO: 2266658 - DNA, 25 bp, Homo sapien
tgagaggatagagcgagaaggcggc

SEQ ID NO: 2266659 - DNA, 25 bp, Homo sapien
ctccaccctcgaaggaggaaggaag

SEQ ID NO: 2266660 - DNA, 25 bp, Homo sapien
aaggccctgagaggatagagcgaga

SEQ ID NO: 2266661 - DNA, 25 bp, Homo sapien
gaaggaagcccttgataaaagccac

SEQ ID NO: 2266662 - DNA, 25 bp, Homo sapien
ttgactttgctcaccctttgggacc

SEQ ID NO: 2266663 - DNA, 25 bp, Homo sapien
ccttgagggactcgtggaatccggc

SEQ ID NO: 2266664 - DNA, 25 bp, Homo sapien
gacttgtggtatccggtctggtatg

SEQ ID NO: 2266665 - DNA, 25 bp, Homo sapien
ccggtctggtatgaagattgtgaaa

SEQ ID NO: 2266666 - DNA, 25 bp, Homo sapien
tatcctatgcacataaacacagccc

SEQ ID NO: 2266667 - DNA, 25 bp, Homo sapien
gaatgggaagtaacagctccgctcg

SEQ ID NO: 2266668 - DNA, 25 bp, Homo sapien
gggttcttctgaaagctcgcggata

SEQ ID NO: 2266669 - DNA, 25 bp, Homo sapien
actggaaagtctctggttatggaac

SEQ ID NO: 2266670 - DNA, 25 bp, Homo sapien
acatcctacgcacataaacacagct

SEQ ID NO: 2266671 - DNA, 25 bp, Homo sapien
gaagtaacagcgttgcattcagaag

SEQ ID NO: 2266672 - DNA, 25 bp, Homo sapien
ggaatgggaagtaacagcgttgcat

SEQ ID NO: 2266673 - DNA, 25 bp, Homo sapien
actggaaagtctctggttgtggaac

SEQ ID NO: 2266674 - DNA, 25 bp, Homo sapien
tctgctgcagctctaatgtcctgtc

SEQ ID NO: 2266675 - DNA, 25 bp, Homo sapien
tttcagggtgccccgaaagagcttc

SEQ ID NO: 2266676 - DNA, 25 bp, Homo sapien
aaaccttattagtctctgctgcagc

SEQ ID NO: 2266677 - DNA, 25 bp, Homo sapien
tcctgtccgatgaatgaggtttcag

SEQ ID NO: 2266678 - DNA, 25 bp, Homo sapien
cccaaggtcacgctcatacactgga

SEQ ID NO: 2266679 - DNA, 25 bp, Homo sapien
acagatccccaaggtcacgctcata

SEQ ID NO: 2266680 - DNA, 25 bp, Homo sapien
tcacgctcatacactggacagggct

SEQ ID NO: 2266681 - DNA, 25 bp, Homo sapien
aaggtcacgctcatacactggacag

SEQ ID NO: 2266682 - DNA, 25 bp, Homo sapien
tagtgtagagtgtagatggatcccc

SEQ ID NO: 2266683 - DNA, 25 bp, Homo sapien
tattgtagagtgtaggaggatcccc

SEQ ID NO: 2266684 - DNA, 25 bp, Homo sapien
tagtgtagagtgtaggaggatcccc

SEQ ID NO: 2266685 - DNA, 25 bp, Homo sapien
tattgtagagtgtaggtggatcccc

SEQ ID NO: 2266686 - DNA, 25 bp, Homo sapien
taggtggatccccagatgggtgttt

SEQ ID NO: 2266687 - DNA, 25 bp, Homo sapien
tattgtagagtatagctggatccca

SEQ ID NO: 2266688 - DNA, 25 bp, Homo sapien
taaagggtaagtggatccccagatg

SEQ ID NO: 2266689 - DNA, 25 bp, Homo sapien
ggatccccagatgggtgtgtctatt

SEQ ID NO: 2266690 - DNA, 25 bp, Homo sapien
gatttccagttgatcggcgccatct

SEQ ID NO: 2266691 - DNA, 25 bp, Homo sapien
ctctgcagactttataggcaggctg

SEQ ID NO: 2266692 - DNA, 25 bp, Homo sapien
taatcttaagcaaatgggatttcca

SEQ ID NO: 2266693 - DNA, 25 bp, Homo sapien
gcatgacatccatagagtgcgtggg

SEQ ID NO: 2266694 - DNA, 25 bp, Homo sapien
gacgtgttgactagagttctctcgg

SEQ ID NO: 2266695 - DNA, 25 bp, Homo sapien
cgatgtcccacggacgacgtgttga

SEQ ID NO: 2266696 - DNA, 25 bp, Homo sapien
ccttttgccgaaagcgatgtgaaca

SEQ ID NO: 2266697 - DNA, 25 bp, Homo sapien
gaacagaaatacagccgatgtccca

SEQ ID NO: 2266698 - DNA, 25 bp, Homo sapien
ttccaaaccagaacgtatccagctg

SEQ ID NO: 2266699 - DNA, 25 bp, Homo sapien
tccagctgccttggataccgaggat

SEQ ID NO: 2266700 - DNA, 25 bp, Homo sapien
cattatcaaattgggctcactcagc

SEQ ID NO: 2266701 - DNA, 25 bp, Homo sapien
gatatgcaaactggaaggctgggca

SEQ ID NO: 2266702 - DNA, 25 bp, Homo sapien
taccctgtggccgtacaggaagcca

SEQ ID NO: 2266703 - DNA, 25 bp, Homo sapien
gaagccacaggcgtgtacattaccc

SEQ ID NO: 2266704 - DNA, 25 bp, Homo sapien
cacatccagaagttgaaaggaagag

SEQ ID NO: 2266705 - DNA, 25 bp, Homo sapien
gctgaatctctaacaacatctaaca

SEQ ID NO: 2266706 - DNA, 25 bp, Homo sapien
aggcagcaggaacatgtaaattata

SEQ ID NO: 2266707 - DNA, 25 bp, Homo sapien
tcagagtttgctttcatatgcccca

SEQ ID NO: 2266708 - DNA, 25 bp, Homo sapien
cgataccgtagcgtggaaggcagca

SEQ ID NO: 2266709 - DNA, 25 bp, Homo sapien
aagtcatcaggtgctccgataccgt

SEQ ID NO: 2266710 - DNA, 25 bp, Homo sapien
ggtgcatttagcacagatggttccc

SEQ ID NO: 2266711 - DNA, 25 bp, Homo sapien
gaggccagacggatttgttgtgaaa

SEQ ID NO: 2266712 - DNA, 25 bp, Homo sapien
cagacggatttgttgtgaaagatga

SEQ ID NO: 2266713 - DNA, 25 bp, Homo sapien
gcaagaggccagacggatttgttgt

SEQ ID NO: 2266714 - DNA, 25 bp, Homo sapien
agaaattcagaccgagttgcattgg

SEQ ID NO: 2266715 - DNA, 25 bp, Homo sapien
aattcagaccgagttgcattggcca

SEQ ID NO: 2266716 - DNA, 25 bp, Homo sapien
aaattcagaccgagttgcattggcc

SEQ ID NO: 2266717 - DNA, 25 bp, Homo sapien
attcagaccgagttgcattggccat

SEQ ID NO: 2266718 - DNA, 25 bp, Homo sapien
tcagcaccggcggacacgccgtttg

SEQ ID NO: 2266719 - DNA, 25 bp, Homo sapien
gtggagaggccgtccccaagcgtct

SEQ ID NO: 2266720 - DNA, 25 bp, Homo sapien
tggtaaccgcctccaaatgcaccga

SEQ ID NO: 2266721 - DNA, 25 bp, Homo sapien
gccgtttgatcacggcagccacctg

SEQ ID NO: 2266722 - DNA, 25 bp, Homo sapien
gacttttcggaaagatcagacagcg

SEQ ID NO: 2266723 - DNA, 25 bp, Homo sapien
tgcccggctgccgattaatatgaag

SEQ ID NO: 2266724 - DNA, 25 bp, Homo sapien
ttttcctacagagatgacgtcccgg

SEQ ID NO: 2266725 - DNA, 25 bp, Homo sapien
cagacagcgatgtaccttggaccgt

SEQ ID NO: 2266726 - DNA, 25 bp, Homo sapien
ggtatggggatatcacagcaggaaa

SEQ ID NO: 2266727 - DNA, 25 bp, Homo sapien
acgtcgctgctgaacgcctccagcc

SEQ ID NO: 2266728 - DNA, 25 bp, Homo sapien
gacaactgccttctctgttacggcc

SEQ ID NO: 2266729 - DNA, 25 bp, Homo sapien
tccagcccacgagatccttctcagt

SEQ ID NO: 2266730 - DNA, 25 bp, Homo sapien
tcccgtgtgcgctgaaagcagcttt

SEQ ID NO: 2266731 - DNA, 25 bp, Homo sapien
gaaggttgtactccccgattgagct

SEQ ID NO: 2266732 - DNA, 25 bp, Homo sapien
gatacagccttcgtggttccagttg

SEQ ID NO: 2266733 - DNA, 25 bp, Homo sapien
gggtcagcagcttcgtaaccatgaa

SEQ ID NO: 2266734 - DNA, 25 bp, Homo sapien
tcgtctatagatgggtatgagggct

SEQ ID NO: 2266735 - DNA, 25 bp, Homo sapien
tctatagatgggtatgagggctgtc

SEQ ID NO: 2266736 - DNA, 25 bp, Homo sapien
tcatctatagatgggtatgagggct

SEQ ID NO: 2266737 - DNA, 25 bp, Homo sapien
ttcatctatagatgggtatgagggc

SEQ ID NO: 2266738 - DNA, 25 bp, Homo sapien
caaagcagtggaaggaagtataatt

SEQ ID NO: 2266739 - DNA, 25 bp, Homo sapien
taagtggctgcagttaccgtaacaa

SEQ ID NO: 2266740 - DNA, 25 bp, Homo sapien
tcaacacacggaaattcctaagtgg

SEQ ID NO: 2266741 - DNA, 25 bp, Homo sapien
tttctgccgcatcccagaaaggctg

SEQ ID NO: 2266742 - DNA, 25 bp, Homo sapien
caggttcaagtgactctcctgcctc

SEQ ID NO: 2266743 - DNA, 25 bp, Homo sapien
tgcagtggcacgatcttggctcatt

SEQ ID NO: 2266744 - DNA, 25 bp, Homo sapien
ctcgcccttgtcgtccaggctagag

SEQ ID NO: 2266745 - DNA, 25 bp, Homo sapien
ttgcaacctctgcctcccaggttca

SEQ ID NO: 2266746 - DNA, 25 bp, Homo sapien
cgcagctccggaacgcaggacagag

SEQ ID NO: 2266747 - DNA, 25 bp, Homo sapien
cgggaacgcagctccggaacgcagg

SEQ ID NO: 2266748 - DNA, 25 bp, Homo sapien
gctccggaacgcaggacagaggtgc

SEQ ID NO: 2266749 - DNA, 25 bp, Homo sapien
aacgcagctccggaacgcaggacag

SEQ ID NO: 2266750 - DNA, 25 bp, Homo sapien
tgatcaggagcagcgtgagccaaag

SEQ ID NO: 2266751 - DNA, 25 bp, Homo sapien
agggtgatcaggagcagcgtgagcc

SEQ ID NO: 2266752 - DNA, 25 bp, Homo sapien
agcagcgtgagccaaaggaggacca

SEQ ID NO: 2266753 - DNA, 25 bp, Homo sapien
atcaggagcagcgtgagccaaagga

SEQ ID NO: 2266754 - DNA, 25 bp, Homo sapien
acatttctgttaaggtcccaggtca

SEQ ID NO: 2266755 - DNA, 25 bp, Homo sapien
cggcatagaatagtcggcgtcttta

SEQ ID NO: 2266756 - DNA, 25 bp, Homo sapien
aactgctgagcctttgctttcatcc

SEQ ID NO: 2266757 - DNA, 25 bp, Homo sapien
gcgtctttaacacactcgatatcgg

SEQ ID NO: 2266758 - DNA, 25 bp, Homo sapien
ccagcgatgggagcagtattggttc

SEQ ID NO: 2266759 - DNA, 25 bp, Homo sapien
ccaggtagtcatgacaccagcgatg

SEQ ID NO: 2266760 - DNA, 25 bp, Homo sapien
tgggagcagtattggttctgagatt

SEQ ID NO: 2266761 - DNA, 25 bp, Homo sapien
cttcggggcagaaaccaggtagtca

SEQ ID NO: 2266762 - DNA, 25 bp, Homo sapien
gacggtgtagttggtcacttcacat

SEQ ID NO: 2266763 - DNA, 25 bp, Homo sapien
cacataaggaaattgctccaaactg

SEQ ID NO: 2266764 - DNA, 25 bp, Homo sapien
tcagggaagaggatccacgtggaga

SEQ ID NO: 2266765 - DNA, 25 bp, Homo sapien
tgggttggccactcggacggtgtag

SEQ ID NO: 2266766 - DNA, 25 bp, Homo sapien
gtacaggtcgtactggacgtccgcg

SEQ ID NO: 2266767 - DNA, 25 bp, Homo sapien
tcaagaaatccacgtcatgaatcca

SEQ ID NO: 2266768 - DNA, 25 bp, Homo sapien
ttggcaacgttcaagtacaggtcgt

SEQ ID NO: 2266769 - DNA, 25 bp, Homo sapien
aatccagcaggtcagattctccgca

SEQ ID NO: 2266770 - DNA, 25 bp, Homo sapien
gggacgaccccacgccgatggcacc

SEQ ID NO: 2266771 - DNA, 25 bp, Homo sapien
cgaccccacgccgatggcacccgca

SEQ ID NO: 2266772 - DNA, 25 bp, Homo sapien
ccccacgccgatggcacccgcacca

SEQ ID NO: 2266773 - DNA, 25 bp, Homo sapien
tgggggacgaccccacgccgatggc

SEQ ID NO: 2266774 - DNA, 25 bp, Homo sapien
gagatgtcatcgaaacgacacccga

SEQ ID NO: 2266775 - DNA, 25 bp, Homo sapien
tgagcatccgttttgtagtgaagac

SEQ ID NO: 2266776 - DNA, 25 bp, Homo sapien
tgccccgcaccaggatgtgggaact

SEQ ID NO: 2266777 - DNA, 25 bp, Homo sapien
tagtgaagacactcgtactgttgac

SEQ ID NO: 2266778 - DNA, 25 bp, Homo sapien
tctgaagctcatagcgaaatttgcg

SEQ ID NO: 2266779 - DNA, 25 bp, Homo sapien
cattttccagtgcataaaggaatgt

SEQ ID NO: 2266780 - DNA, 25 bp, Homo sapien
gaatgtgtcttattacactttgcag

SEQ ID NO: 2266781 - DNA, 25 bp, Homo sapien
aatttgcgattgaaatgacttctca

SEQ ID NO: 2266782 - DNA, 25 bp, Homo sapien
ctgttctgtgattacaggctgcatt

SEQ ID NO: 2266783 - DNA, 25 bp, Homo sapien
tgttctgtgattacaggctgcattc

SEQ ID NO: 2266784 - DNA, 25 bp, Homo sapien
gttctgtgattacaggctgcattct

SEQ ID NO: 2266785 - DNA, 25 bp, Homo sapien
tttgcaatgtcaagtacagcggctg

SEQ ID NO: 2266786 - DNA, 25 bp, Homo sapien
cctttgcaatgtcaagtacagcggc

SEQ ID NO: 2266787 - DNA, 25 bp, Homo sapien
tgcaatgtcaagtacagcggctggg

SEQ ID NO: 2266788 - DNA, 25 bp, Homo sapien
agcggctgggggtagggaacactca

SEQ ID NO: 2266789 - DNA, 25 bp, Homo sapien
gatgaagagagggaaggagaaaggg

SEQ ID NO: 2266790 - DNA, 25 bp, Homo sapien
ctgggcaacaagagaaaaactccgt

SEQ ID NO: 2266791 - DNA, 25 bp, Homo sapien
ctccgtttcaaaaagaaagatgaag

SEQ ID NO: 2266792 - DNA, 25 bp, Homo sapien
gcaacaagagaaaaactccgtttca

SEQ ID NO: 2266793 - DNA, 25 bp, Homo sapien
agagagacagagaggggaagggaga

SEQ ID NO: 2266794 - DNA, 25 bp, Homo sapien
agagacagagaggggaagggagaga

SEQ ID NO: 2266795 - DNA, 25 bp, Homo sapien
gagagagagacagaggggaagggag

SEQ ID NO: 2266796 - DNA, 25 bp, Homo sapien
gagagagacagaggggaagggagag

SEQ ID NO: 2266797 - DNA, 25 bp, Homo sapien
tggactaatacaggaggacggagat

SEQ ID NO: 2266798 - DNA, 25 bp, Homo sapien
caggaggacggagatagaaacagac

SEQ ID NO: 2266799 - DNA, 25 bp, Homo sapien
ggaaggatcctcattagtccatgaa

SEQ ID NO: 2266800 - DNA, 25 bp, Homo sapien
aacagacatagacagagatagtggg

SEQ ID NO: 2266801 - DNA, 25 bp, Homo sapien
aaataaagaagaggggccaggtatg

SEQ ID NO: 2266802 - DNA, 25 bp, Homo sapien
caggtatggtggctcatgactctca

SEQ ID NO: 2266803 - DNA, 25 bp, Homo sapien
ggccaggtatggtggctcatgactc

SEQ ID NO: 2266804 - DNA, 25 bp, Homo sapien
aggtatggtggctcatgactctcac

SEQ ID NO: 2266805 - DNA, 25 bp, Homo sapien
ctttcccgggctcttatttgtactg

SEQ ID NO: 2266806 - DNA, 25 bp, Homo sapien
tgtactgtgtacgttccaggattga

SEQ ID NO: 2266807 - DNA, 25 bp, Homo sapien
gtgctccaggcgctcaagaattcat

SEQ ID NO: 2266808 - DNA, 25 bp, Homo sapien
gaattcatacactctttcccgggct

SEQ ID NO: 2266809 - DNA, 25 bp, Homo sapien
tgcagatcacgaagacacagaccag

SEQ ID NO: 2266810 - DNA, 25 bp, Homo sapien
cgacgtccgccaggcacgtgtgttt

SEQ ID NO: 2266811 - DNA, 25 bp, Homo sapien
tgtgtttgcgccctcctcctggtcg

SEQ ID NO: 2266812 - DNA, 25 bp, Homo sapien
gcgatcagcagcgacgtccgccagg

SEQ ID NO: 2266813 - DNA, 25 bp, Homo sapien
aacccaaaaccgaccagctcatcat

SEQ ID NO: 2266814 - DNA, 25 bp, Homo sapien
ctgaacccaaaaccgaccagctcat

SEQ ID NO: 2266815 - DNA, 25 bp, Homo sapien
aaaaccgaccagctcatcatctggg

SEQ ID NO: 2266816 - DNA, 25 bp, Homo sapien
ccaaaaccgaccagctcatcatctg

SEQ ID NO: 2266817 - DNA, 25 bp, Homo sapien
cggaggaaagagaaatggcccagct

SEQ ID NO: 2266818 - DNA, 25 bp, Homo sapien
ctcggaggaaagagaaatggcccag

SEQ ID NO: 2266819 - DNA, 25 bp, Homo sapien
tcggaggaaagagaaatggcccagc

SEQ ID NO: 2266820 - DNA, 25 bp, Homo sapien
tggaagctgtcaccgatggggtctt

SEQ ID NO: 2266821 - DNA, 25 bp, Homo sapien
ttttggaagctgtcaccgatggggt

SEQ ID NO: 2266822 - DNA, 25 bp, Homo sapien
gctgtcaccgatggggtctttcatg

SEQ ID NO: 2266823 - DNA, 25 bp, Homo sapien
agggatgcggggaaagagtctctgc

SEQ ID NO: 2266824 - DNA, 25 bp, Homo sapien
tcccaaagtggccaccacgcctcca

SEQ ID NO: 2266825 - DNA, 25 bp, Homo sapien
tccagacccgtcccaaggcagaaaa

SEQ ID NO: 2266826 - DNA, 25 bp, Homo sapien
gcctccagacccgtcccaaggcaga

SEQ ID NO: 2266827 - DNA, 25 bp, Homo sapien
aaagtggccaccacgcctccagacc

SEQ ID NO: 2266828 - DNA, 25 bp, Homo sapien
tttctgcacgacctgtacttcagtc

SEQ ID NO: 2266829 - DNA, 25 bp, Homo sapien
agttttctgcacgacctgtacttca

SEQ ID NO: 2266830 - DNA, 25 bp, Homo sapien
tctgcacgacctgtacttcagtcac

SEQ ID NO: 2266831 - DNA, 25 bp, Homo sapien
tcaagttttctgcacgacctgtact

SEQ ID NO: 2266832 - DNA, 25 bp, Homo sapien
ccaccacccgttaggaatgtccatt

SEQ ID NO: 2266833 - DNA, 25 bp, Homo sapien
ccattcctgggctgcgtgcgcaggt

SEQ ID NO: 2266834 - DNA, 25 bp, Homo sapien
cagccagtctgtgcaggcgcctggc

SEQ ID NO: 2266835 - DNA, 25 bp, Homo sapien
tcctggcagcttcggacgaaattac

SEQ ID NO: 2266836 - DNA, 25 bp, Homo sapien
gggccagactcggtgactacaggcc

SEQ ID NO: 2266837 - DNA, 25 bp, Homo sapien
cagactcggtgactacaggccagcc

SEQ ID NO: 2266838 - DNA, 25 bp, Homo sapien
agaccgagactcggtctgaaaaaag

SEQ ID NO: 2266839 - DNA, 25 bp, Homo sapien
tcggtgactacaggccagcctgtaa

SEQ ID NO: 2266840 - DNA, 25 bp, Homo sapien
gagacactccagtactgagacctag

SEQ ID NO: 2266841 - DNA, 25 bp, Homo sapien
tcaagaaggtgatctaagggccgcg

SEQ ID NO: 2266842 - DNA, 25 bp, Homo sapien
cttcaagggtgcgtggtccaacgtc

SEQ ID NO: 2266843 - DNA, 25 bp, Homo sapien
tgctggtcctgtacgacgagctcaa

SEQ ID NO: 2266844 - DNA, 25 bp, Homo sapien
ggccaatagggcaacgagcctgccc

SEQ ID NO: 2266845 - DNA, 25 bp, Homo sapien
ctccaccgtgaagggtaattctaag

SEQ ID NO: 2266846 - DNA, 25 bp, Homo sapien
aacccttccggtggatgcctggcag

SEQ ID NO: 2266847 - DNA, 25 bp, Homo sapien
gaaggccgcgatcgctttgtccacg

SEQ ID NO: 2266848 - DNA, 25 bp, Homo sapien
ttcttcttggtccttggaggggcag

SEQ ID NO: 2266849 - DNA, 25 bp, Homo sapien
ctcccaggtcatgccctagtcaggc

SEQ ID NO: 2266850 - DNA, 25 bp, Homo sapien
cacttccaattcctgggtgtgaggc

SEQ ID NO: 2266851 - DNA, 25 bp, Homo sapien
agtgagagacacagctctaccccca

SEQ ID NO: 2266852 - DNA, 25 bp, Homo sapien
tcccggccgtccgatgaagcctgaa

SEQ ID NO: 2266853 - DNA, 25 bp, Homo sapien
tcccgttaaaacacctctgcttctg

SEQ ID NO: 2266854 - DNA, 25 bp, Homo sapien
gccgtccgatgaagcctgaagtctt

SEQ ID NO: 2266855 - DNA, 25 bp, Homo sapien
cgatgaagcctgaagtcttcccgtt

SEQ ID NO: 2266856 - DNA, 25 bp, Homo sapien
tgatgtcgagtacacagctcctccc

SEQ ID NO: 2266857 - DNA, 25 bp, Homo sapien
aggatgatgtcgagtacacagctcc

SEQ ID NO: 2266858 - DNA, 25 bp, Homo sapien
agaggtcttggggagccctcttcca

SEQ ID NO: 2266859 - DNA, 25 bp, Homo sapien
tgaggagcccttttcaggggggtga

SEQ ID NO: 2266860 - DNA, 25 bp, Homo sapien
aaacaggacctctggactcttaaga

SEQ ID NO: 2266861 - DNA, 25 bp, Homo sapien
tggagtaactgtgcaaaaacaggac

SEQ ID NO: 2266862 - DNA, 25 bp, Homo sapien
tgcccttaaagcaagggcccgtgga

SEQ ID NO: 2266863 - DNA, 25 bp, Homo sapien
ggtgccctcgccatttgcccttaaa

SEQ ID NO: 2266864 - DNA, 25 bp, Homo sapien
ggggaatggggacgggatgcagaca

SEQ ID NO: 2266865 - DNA, 25 bp, Homo sapien
gcggggaatggggacgggatgcaga

SEQ ID NO: 2266866 - DNA, 25 bp, Homo sapien
ctttgatggttttgaagcctgaagc

SEQ ID NO: 2266867 - DNA, 25 bp, Homo sapien
ttttgaagcctgaagctccttcctc

SEQ ID NO: 2266868 - DNA, 25 bp, Homo sapien
ctccgtagggctcacaggcggcttc

SEQ ID NO: 2266869 - DNA, 25 bp, Homo sapien
ctgtcttacggcacgaagcccaggg

SEQ ID NO: 2266870 - DNA, 25 bp, Homo sapien
tgaccactggccatctcggaagaaa

SEQ ID NO: 2266871 - DNA, 25 bp, Homo sapien
ggcttctagagaagatgcccgccac

SEQ ID NO: 2266872 - DNA, 25 bp, Homo sapien
tgagaaagcaggcaaagtccctgcc

SEQ ID NO: 2266873 - DNA, 25 bp, Homo sapien
ggccctcaccgcgtggcaatcaaga

SEQ ID NO: 2266874 - DNA, 25 bp, Homo sapien
tggggcgacagcatcccggtcacct

SEQ ID NO: 2266875 - DNA, 25 bp, Homo sapien
tcaagaaggatgaggcttccaggcc

SEQ ID NO: 2266876 - DNA, 25 bp, Homo sapien
cacacatggtgtctccatgggaggc

SEQ ID NO: 2266877 - DNA, 25 bp, Homo sapien
tcacacatggtgtctccatgggagg

SEQ ID NO: 2266878 - DNA, 25 bp, Homo sapien
tacagtggcctggtatcacaaaaga

SEQ ID NO: 2266879 - DNA, 25 bp, Homo sapien
ggcctatttcaaggtgctcactgca

SEQ ID NO: 2266880 - DNA, 25 bp, Homo sapien
tgttctatccgtgtacaggcacgtg

SEQ ID NO: 2266881 - DNA, 25 bp, Homo sapien
ggcggcctatatcaaggtgcgagct

SEQ ID NO: 2266882 - DNA, 25 bp, Homo sapien
ggaggcatctgcaaagcgagaaccg

SEQ ID NO: 2266883 - DNA, 25 bp, Homo sapien
taggtgctgttttcacggcgcgtgc

SEQ ID NO: 2266884 - DNA, 25 bp, Homo sapien
cacatgctcactgcggttgtaggga

SEQ ID NO: 2266885 - DNA, 25 bp, Homo sapien
ccttaggaggcactgaggttcagga

SEQ ID NO: 2266886 - DNA, 25 bp, Homo sapien
agagactgtcacgagcgggacctcc

SEQ ID NO: 2266887 - DNA, 25 bp, Homo sapien
gagactgtcacgagcgggacctccc

SEQ ID NO: 2266888 - DNA, 25 bp, Homo sapien
caggctatggagtggcagttctctg

SEQ ID NO: 2266889 - DNA, 25 bp, Homo sapien
cccacaggctatggagtggcagttc

SEQ ID NO: 2266890 - DNA, 25 bp, Homo sapien
cacaggctatggagtggcagttctc

SEQ ID NO: 2266891 - DNA, 25 bp, Homo sapien
atgcccacaggctatggagtggcag

SEQ ID NO: 2266892 - DNA, 25 bp, Homo sapien
caggcagacggctgctgtgacggtg

SEQ ID NO: 2266893 - DNA, 25 bp, Homo sapien
tcttctgcacgatttccagtgtgtt

SEQ ID NO: 2266894 - DNA, 25 bp, Homo sapien
tgccgtctaccaggcagggtctcag

SEQ ID NO: 2266895 - DNA, 25 bp, Homo sapien
gtgtgtttcctccatggggcgccat

SEQ ID NO: 2266896 - DNA, 25 bp, Homo sapien
cactgaacatgctggtgcagactga

SEQ ID NO: 2266897 - DNA, 25 bp, Homo sapien
agtcactgaacatgctggtgcagac

SEQ ID NO: 2266898 - DNA, 25 bp, Homo sapien
actgaacatgctggtgcagactgaa

SEQ ID NO: 2266899 - DNA, 25 bp, Homo sapien
ctgtgtcctgctgaaggatccccgc

SEQ ID NO: 2266900 - DNA, 25 bp, Homo sapien
cgttctgagctcctgttgcctgctg

SEQ ID NO: 2266901 - DNA, 25 bp, Homo sapien
gagctcctgttgcctgctgtgtccc

SEQ ID NO: 2266902 - DNA, 25 bp, Homo sapien
ctgctgaaggatccccgcctggctg

SEQ ID NO: 2266903 - DNA, 25 bp, Homo sapien
ggccagacgacaaagtccacaagtt

SEQ ID NO: 2266904 - DNA, 25 bp, Homo sapien
ctggccagacgacaaagtccacaag

SEQ ID NO: 2266905 - DNA, 25 bp, Homo sapien
aaagtccacaagttactcagcaggg

SEQ ID NO: 2266906 - DNA, 25 bp, Homo sapien
agttactcagcagggtcgccgagag

SEQ ID NO: 2266907 - DNA, 25 bp, Homo sapien
tgtacgtcctgtgccggatcctgca

SEQ ID NO: 2266908 - DNA, 25 bp, Homo sapien
cccagcgctgagctgtacgtcctgt

SEQ ID NO: 2266909 - DNA, 25 bp, Homo sapien
ctgacggacgtatctcgttttgtct

SEQ ID NO: 2266910 - DNA, 25 bp, Homo sapien
gagctgtacgtcctgtgccggatcc

SEQ ID NO: 2266911 - DNA, 25 bp, Homo sapien
tggagctctgttcaagtccccacgg

SEQ ID NO: 2266912 - DNA, 25 bp, Homo sapien
gagtcaaaccgcacgggcgtgacat

SEQ ID NO: 2266913 - DNA, 25 bp, Homo sapien
tgtacttcaggaagacccattcccg

SEQ ID NO: 2266914 - DNA, 25 bp, Homo sapien
ggcgtgacatcactaaccagctcct

SEQ ID NO: 2266915 - DNA, 25 bp, Homo sapien
atgtgcgccgactctgcctgcctcg

SEQ ID NO: 2266916 - DNA, 25 bp, Homo sapien
tgccattgcccactcaccggcagtg

SEQ ID NO: 2266917 - DNA, 25 bp, Homo sapien
cctgaatcaggggatcaccagagaa

SEQ ID NO: 2266918 - DNA, 25 bp, Homo sapien
cagcaattacagaggggcgtgcagc

SEQ ID NO: 2266919 - DNA, 25 bp, Homo sapien
gatcttttggacgtcaccacccaac

SEQ ID NO: 2266920 - DNA, 25 bp, Homo sapien
ctggggcttaggacttggacagatc

SEQ ID NO: 2266921 - DNA, 25 bp, Homo sapien
cagaccggaggtctgagatcaaggc

SEQ ID NO: 2266922 - DNA, 25 bp, Homo sapien
cctgtcctgcagaccggaggtctga

SEQ ID NO: 2266923 - DNA, 25 bp, Homo sapien
tcatcagtgcaagtagccgagacgt

SEQ ID NO: 2266924 - DNA, 25 bp, Homo sapien
tcacggaaggaactgacccgagagc

SEQ ID NO: 2266925 - DNA, 25 bp, Homo sapien
gaacagccgagatcagcattcatgg

SEQ ID NO: 2266926 - DNA, 25 bp, Homo sapien
cattcatgggcatccacggtgccga

SEQ ID NO: 2266927 - DNA, 25 bp, Homo sapien
tgcctgtcactgtatctgtatgtcc

SEQ ID NO: 2266928 - DNA, 25 bp, Homo sapien
gtgtgcgtgcctgtctgttggtgta

SEQ ID NO: 2266929 - DNA, 25 bp, Homo sapien
tgtgtgcgtgcctgtctgttggtgt

SEQ ID NO: 2266930 - DNA, 25 bp, Homo sapien
tgtgcgtgcgtaagaatgtgtctct

SEQ ID NO: 2266931 - DNA, 25 bp, Homo sapien
ctgctgtgcttgtgtgtacgtctgt

SEQ ID NO: 2266932 - DNA, 25 bp, Homo sapien
catgactgactgtgtgtggtatgtc

SEQ ID NO: 2266933 - DNA, 25 bp, Homo sapien
tgtgtgcgtgcgtaagaatgtgtct

SEQ ID NO: 2266934 - DNA, 25 bp, Homo sapien
taacacaggtctattgactcacaca

SEQ ID NO: 2266935 - DNA, 25 bp, Homo sapien
aaggcgtggcagctcatgccggtaa

SEQ ID NO: 2266936 - DNA, 25 bp, Homo sapien
cacttggctatggagagcagccgac

SEQ ID NO: 2266937 - DNA, 25 bp, Homo sapien
tcagtatgatgatttttgcagccac

SEQ ID NO: 2266938 - DNA, 25 bp, Homo sapien
catcgtcccttagttgtggttctgg

SEQ ID NO: 2266939 - DNA, 25 bp, Homo sapien
tccctgctgacatcgtcccttagtt

SEQ ID NO: 2266940 - DNA, 25 bp, Homo sapien
gttctggtctccgtagcccggtgca

SEQ ID NO: 2266941 - DNA, 25 bp, Homo sapien
cggtgcacgccgaaatttctgttta

SEQ ID NO: 2266942 - DNA, 25 bp, Homo sapien
tcttggagatgccaggcgtaataac

SEQ ID NO: 2266943 - DNA, 25 bp, Homo sapien
ccaggcgtaataacaaacagaaaag

SEQ ID NO: 2266944 - DNA, 25 bp, Homo sapien
ggatgctactccacacctcagcaag

SEQ ID NO: 2266945 - DNA, 25 bp, Homo sapien
cagcctggatgctactccacacctc

SEQ ID NO: 2266946 - DNA, 25 bp, Homo sapien
caggacagaaccgagagattcaggc

SEQ ID NO: 2266947 - DNA, 25 bp, Homo sapien
ctcccaggacagaaccgagagattc

SEQ ID NO: 2266948 - DNA, 25 bp, Homo sapien
acagaaccgagagattcaggccacc

SEQ ID NO: 2266949 - DNA, 25 bp, Homo sapien
tcccaggacagaaccgagagattca

SEQ ID NO: 2266950 - DNA, 25 bp, Homo sapien
ctgtcacaggaaggaaggctggata

SEQ ID NO: 2266951 - DNA, 25 bp, Homo sapien
gtcacaggaaggaaggctggatagc

SEQ ID NO: 2266952 - DNA, 25 bp, Homo sapien
caggaaggaaggctggatagcagcc

SEQ ID NO: 2266953 - DNA, 25 bp, Homo sapien
cacaggaaggaaggctggatagcag

SEQ ID NO: 2266954 - DNA, 25 bp, Homo sapien
ttccaagacgtagttcacaagaggg

SEQ ID NO: 2266955 - DNA, 25 bp, Homo sapien
taagcctggacatggtatctgagaa

SEQ ID NO: 2266956 - DNA, 25 bp, Homo sapien
tagttcacaagagggccctgggact

SEQ ID NO: 2266957 - DNA, 25 bp, Homo sapien
aagtcggaccgaaaacattcagatg

SEQ ID NO: 2266958 - DNA, 25 bp, Homo sapien
ggccaaaagtctgcaaagcaccgtc

SEQ ID NO: 2266959 - DNA, 25 bp, Homo sapien
atgcacagagtgcttccaggggtct

SEQ ID NO: 2266960 - DNA, 25 bp, Homo sapien
gtctgcaaagcaccgtcacagggat

SEQ ID NO: 2266961 - DNA, 25 bp, Homo sapien
gcaaagcaccgtcacagggatgcac

SEQ ID NO: 2266962 - DNA, 25 bp, Homo sapien
cgtatgaggatgaatgcaagacttt

SEQ ID NO: 2266963 - DNA, 25 bp, Homo sapien
caagactttgagttcacacggtgct

SEQ ID NO: 2266964 - DNA, 25 bp, Homo sapien
tggaagcacttgctcctccgggctt

SEQ ID NO: 2266965 - DNA, 25 bp, Homo sapien
cagtagctctgatggaatctccagg

SEQ ID NO: 2266966 - DNA, 25 bp, Homo sapien
agccgccgagctggacttttatgct

SEQ ID NO: 2266967 - DNA, 25 bp, Homo sapien
ggtgagccgccgagctggactttta

SEQ ID NO: 2266968 - DNA, 25 bp, Homo sapien
gagctctcacctgctacttctgccg

SEQ ID NO: 2266969 - DNA, 25 bp, Homo sapien
acaggtgagccgccgagctggactt

SEQ ID NO: 2266970 - DNA, 25 bp, Homo sapien
tgacagccgtgggaccccactctgt

SEQ ID NO: 2266971 - DNA, 25 bp, Homo sapien
ggtctccgcactcacaaacctgtag

SEQ ID NO: 2266972 - DNA, 25 bp, Homo sapien
cgcactcacaaacctgtagagtatc

SEQ ID NO: 2266973 - DNA, 25 bp, Homo sapien
gcctgtttggggtctccgcactcac

SEQ ID NO: 2266974 - DNA, 25 bp, Homo sapien
gactgccgctatccgattttctcca

SEQ ID NO: 2266975 - DNA, 25 bp, Homo sapien
gccgctatccgattttctccaagct

SEQ ID NO: 2266976 - DNA, 25 bp, Homo sapien
gctcctccgaggtgaaacacttatg

SEQ ID NO: 2266977 - DNA, 25 bp, Homo sapien
ctcctccgaggtgaaacacttatgt

SEQ ID NO: 2266978 - DNA, 25 bp, Homo sapien
tttcagcaattgcatgtccgtcctt

SEQ ID NO: 2266979 - DNA, 25 bp, Homo sapien
tcagcaattgcatgtccgtccttct

SEQ ID NO: 2266980 - DNA, 25 bp, Homo sapien
ttcagcaattgcatgtccgtccttc

SEQ ID NO: 2266981 - DNA, 25 bp, Homo sapien
tcattgtcaatggataggattgtca

SEQ ID NO: 2266982 - DNA, 25 bp, Homo sapien
atcattgtcaatggataggattgtc

SEQ ID NO: 2266983 - DNA, 25 bp, Homo sapien
cattgtcaatggataggattgtcat

SEQ ID NO: 2266984 - DNA, 25 bp, Homo sapien
cctcgacgatccccggacaggcgcg

SEQ ID NO: 2266985 - DNA, 25 bp, Homo sapien
ccgccgctggcccaagctcccgccg

SEQ ID NO: 2266986 - DNA, 25 bp, Homo sapien
cccggaggcgcctccgacgccgcca

SEQ ID NO: 2266987 - DNA, 25 bp, Homo sapien
gacgatccccggacaggcgcggcct

SEQ ID NO: 2266988 - DNA, 25 bp, Homo sapien
atccagcagccagcagctcccaagg

SEQ ID NO: 2266989 - DNA, 25 bp, Homo sapien
tccagcagccagcagctcccaaggc

SEQ ID NO: 2266990 - DNA, 25 bp, Homo sapien
aacataagacgcagacagtcagcac

SEQ ID NO: 2266991 - DNA, 25 bp, Homo sapien
cactttctggacccggagaagagaa

SEQ ID NO: 2266992 - DNA, 25 bp, Homo sapien
gaaacagcagtgtctctctgccgtg

SEQ ID NO: 2266993 - DNA, 25 bp, Homo sapien
tctgccgtgtcagagaccggtttcc

SEQ ID NO: 2266994 - DNA, 25 bp, Homo sapien
tacaagccgtaagcagggcagagct

SEQ ID NO: 2266995 - DNA, 25 bp, Homo sapien
tgtcgtgcacgatggtagccgctgc

SEQ ID NO: 2266996 - DNA, 25 bp, Homo sapien
tgcacataggcctcgaagttcaagt

SEQ ID NO: 2266997 - DNA, 25 bp, Homo sapien
tgctcttggaaatacgcagcgtgga

SEQ ID NO: 2266998 - DNA, 25 bp, Homo sapien
gccgtcctcgcccttgtacatgagt

SEQ ID NO: 2266999 - DNA, 25 bp, Homo sapien
gcccttgtacatgagtttcatcccg

SEQ ID NO: 2267000 - DNA, 25 bp, Homo sapien
tcctcgcccttgtacatgagtttca

SEQ ID NO: 2267001 - DNA, 25 bp, Homo sapien
tacatgagtttcatcccgcgcaggg

SEQ ID NO: 2267002 - DNA, 25 bp, Homo sapien
tgccgcttcttaattgaggcatcac

SEQ ID NO: 2267003 - DNA, 25 bp, Homo sapien
ttctctctgcgcttttgttcttctc

SEQ ID NO: 2267004 - DNA, 25 bp, Homo sapien
cagctgccgcttcttaattgaggca

SEQ ID NO: 2267005 - DNA, 25 bp, Homo sapien
actcaggtgtttggtcgaatcaaaa

SEQ ID NO: 2267006 - DNA, 25 bp, Homo sapien
ccaggtgccggacaccagcgccgag

SEQ ID NO: 2267007 - DNA, 25 bp, Homo sapien
aggtgccggacaccagcgccgaggg

SEQ ID NO: 2267008 - DNA, 25 bp, Homo sapien
actcccaggtgccggacaccagcgc

SEQ ID NO: 2267009 - DNA, 25 bp, Homo sapien
cgagggcccgctcccgcagaaggta

SEQ ID NO: 2267010 - DNA, 25 bp, Homo sapien
catgtgtgctatgtgccgatacaga

SEQ ID NO: 2267011 - DNA, 25 bp, Homo sapien
catacaaagtacacacaccggttca

SEQ ID NO: 2267012 - DNA, 25 bp, Homo sapien
tcgggcgcacatagggacatacaaa

SEQ ID NO: 2267013 - DNA, 25 bp, Homo sapien
agccggcagagatcgtgtcagacca

SEQ ID NO: 2267014 - DNA, 25 bp, Homo sapien
gcgcagctcacggtccctctgcttc

SEQ ID NO: 2267015 - DNA, 25 bp, Homo sapien
gcgatgagccggatggactgcaggt

SEQ ID NO: 2267016 - DNA, 25 bp, Homo sapien
ttctgctccctcttgcgaagcttct

SEQ ID NO: 2267017 - DNA, 25 bp, Homo sapien
ccagcttcttctgattccggcgcag

SEQ ID NO: 2267018 - DNA, 25 bp, Homo sapien
gctggtttcgtagctacagctgcag

SEQ ID NO: 2267019 - DNA, 25 bp, Homo sapien
agcgctacaccctcccgggaaggag

SEQ ID NO: 2267020 - DNA, 25 bp, Homo sapien
ggagccgtcatcctcggcattaaag

SEQ ID NO: 2267021 - DNA, 25 bp, Homo sapien
atcgggaacgacagacgagcgctac

SEQ ID NO: 2267022 - DNA, 25 bp, Homo sapien
tgcaaaaggaaaccgtcacagctct

SEQ ID NO: 2267023 - DNA, 25 bp, Homo sapien
atgggagttaccagtcgcgcctgca

SEQ ID NO: 2267024 - DNA, 25 bp, Homo sapien
acgcagccctcctgaggacaaggag

SEQ ID NO: 2267025 - DNA, 25 bp, Homo sapien
gcgctggtgagacctgtcaggttca

SEQ ID NO: 2267026 - DNA, 25 bp, Homo sapien
gctccttcccggggacttatcacaa

SEQ ID NO: 2267027 - DNA, 25 bp, Homo sapien
gactgggctgccacatgtctcagcc

SEQ ID NO: 2267028 - DNA, 25 bp, Homo sapien
catgaggtaaggactgggctgccac

SEQ ID NO: 2267029 - DNA, 25 bp, Homo sapien
gtctcagcctcttgtcatgctcctt

SEQ ID NO: 2267030 - DNA, 25 bp, Homo sapien
agacgcatgccaccgccgtagctgc

SEQ ID NO: 2267031 - DNA, 25 bp, Homo sapien
gcctggcctagcctgggttagtgtc

SEQ ID NO: 2267032 - DNA, 25 bp, Homo sapien
agctgagatgacgccgcagacgcat

SEQ ID NO: 2267033 - DNA, 25 bp, Homo sapien
ctggcctagcctgggttagtgtctt

SEQ ID NO: 2267034 - DNA, 25 bp, Homo sapien
tcttctctggagagccatcctcggg

SEQ ID NO: 2267035 - DNA, 25 bp, Homo sapien
gagacattctgctcgcaggcaggga

SEQ ID NO: 2267036 - DNA, 25 bp, Homo sapien
cgttcacgcttttgggagcgccgtc

SEQ ID NO: 2267037 - DNA, 25 bp, Homo sapien
ggaccacacgacaggagctctgaac

SEQ ID NO: 2267038 - DNA, 25 bp, Homo sapien
ctttgctgtgggacctccgggaccg

SEQ ID NO: 2267039 - DNA, 25 bp, Homo sapien
cccggttgcacttgtcctgttctga

SEQ ID NO: 2267040 - DNA, 25 bp, Homo sapien
tctcccgcttgtgccggtcagcaag

SEQ ID NO: 2267041 - DNA, 25 bp, Homo sapien
gtgtggtccgggctcgtgctgcgcc

SEQ ID NO: 2267042 - DNA, 25 bp, Homo sapien
gctccgtggacattcgtggctgcag

SEQ ID NO: 2267043 - DNA, 25 bp, Homo sapien
gaggaccggccgcattaaagctatc

SEQ ID NO: 2267044 - DNA, 25 bp, Homo sapien
aactgaagtgccaagtacgctgcgg

SEQ ID NO: 2267045 - DNA, 25 bp, Homo sapien
cagtgtgactatggtggcccgtgca

SEQ ID NO: 2267046 - DNA, 25 bp, Homo sapien
tgtcagcacgacgattcggcatccc

SEQ ID NO: 2267047 - DNA, 25 bp, Homo sapien
caatgtcagcacgacgattcggcat

SEQ ID NO: 2267048 - DNA, 25 bp, Homo sapien
cgtgactcaatgtcagcacgacgat

SEQ ID NO: 2267049 - DNA, 25 bp, Homo sapien
cttcctcatccgtgactcaatgtca

SEQ ID NO: 2267050 - DNA, 25 bp, Homo sapien
tcacttggagaagcaaacgattata

SEQ ID NO: 2267051 - DNA, 25 bp, Homo sapien
aggtatttctgagcttcacttggag

SEQ ID NO: 2267052 - DNA, 25 bp, Homo sapien
gaaggagcatcagaccattttgtac

SEQ ID NO: 2267053 - DNA, 25 bp, Homo sapien
taaaacaagtttgcagcctgaaatc

SEQ ID NO: 2267054 - DNA, 25 bp, Homo sapien
ctcttgcttctcgtcccaaaagtct

SEQ ID NO: 2267055 - DNA, 25 bp, Homo sapien
gtcagcctcatgagtgcgatcagct

SEQ ID NO: 2267056 - DNA, 25 bp, Homo sapien
agcctcatgagtgcgatcagctcca

SEQ ID NO: 2267057 - DNA, 25 bp, Homo sapien
cttgcttctcgtcccaaaagtctgg

SEQ ID NO: 2267058 - DNA, 25 bp, Homo sapien
gccggtccggccgcagcttcagcat

SEQ ID NO: 2267059 - DNA, 25 bp, Homo sapien
ccgagctggccggtccggccgcagc

SEQ ID NO: 2267060 - DNA, 25 bp, Homo sapien
ccggtccggccgcagcttcagcatc

SEQ ID NO: 2267061 - DNA, 25 bp, Homo sapien
tggccggtccggccgcagcttcagc

SEQ ID NO: 2267062 - DNA, 25 bp, Homo sapien
cttccggactgagtgcctcggtggt

SEQ ID NO: 2267063 - DNA, 25 bp, Homo sapien
gagtgcctcggtggtctctggcagc

SEQ ID NO: 2267064 - DNA, 25 bp, Homo sapien
accctggcacagatgggcttccgga

SEQ ID NO: 2267065 - DNA, 25 bp, Homo sapien
caatgaccctggcacagatgggctt

SEQ ID NO: 2267066 - DNA, 25 bp, Homo sapien
gacggatcactctagaaatttgcat

SEQ ID NO: 2267067 - DNA, 25 bp, Homo sapien
caaacaaagacggatcactctagaa

SEQ ID NO: 2267068 - DNA, 25 bp, Homo sapien
cctgcccagtactcaaacaaagacg

SEQ ID NO: 2267069 - DNA, 25 bp, Homo sapien
tctagaaatttgcattaaccgtatt

SEQ ID NO: 2267070 - DNA, 25 bp, Homo sapien
ggggaagagccacccgctcacagct

SEQ ID NO: 2267071 - DNA, 25 bp, Homo sapien
gggaagagccacccgctcacagctg

SEQ ID NO: 2267072 - DNA, 25 bp, Homo sapien
gtctccaatccagccgtggcttccg

SEQ ID NO: 2267073 - DNA, 25 bp, Homo sapien
gataggcctggtcctctgaggatcc

SEQ ID NO: 2267074 - DNA, 25 bp, Homo sapien
tagtcattaaggaggcgataggcct

SEQ ID NO: 2267075 - DNA, 25 bp, Homo sapien
caccatgaagccgttggcgtagtca

SEQ ID NO: 2267076 - DNA, 25 bp, Homo sapien
ccgttggcgtagtcattaaggaggc

SEQ ID NO: 2267077 - DNA, 25 bp, Homo sapien
gaaggtcaaacacgcccagctcgca

SEQ ID NO: 2267078 - DNA, 25 bp, Homo sapien
ggcgagaaggtcaaacacgcccagc

SEQ ID NO: 2267079 - DNA, 25 bp, Homo sapien
gcctcggcgagaaggtcaaacacgc

SEQ ID NO: 2267080 - DNA, 25 bp, Homo sapien
gctctgtcccatgggcgctggccct

SEQ ID NO: 2267081 - DNA, 25 bp, Homo sapien
ggctgaccgtggtcaggtagtcgct

SEQ ID NO: 2267082 - DNA, 25 bp, Homo sapien
gacagctctgtgtttcgatagaaag

SEQ ID NO: 2267083 - DNA, 25 bp, Homo sapien
tgcattgtgacgtcgggctgaccgt

SEQ ID NO: 2267084 - DNA, 25 bp, Homo sapien
gtggccccagcaccggtagctggtc

SEQ ID NO: 2267085 - DNA, 25 bp, Homo sapien
cctggggtcagccaccacctcccag

SEQ ID NO: 2267086 - DNA, 25 bp, Homo sapien
agcatctgcctgggtgcagccacca

SEQ ID NO: 2267087 - DNA, 25 bp, Homo sapien
agcatctgcctggggtcagccacca

SEQ ID NO: 2267088 - DNA, 25 bp, Homo sapien
acctcccagcatctgcctgggtgca

SEQ ID NO: 2267089 - DNA, 25 bp, Homo sapien
ctgtagatggccgtaaaaagctctt

SEQ ID NO: 2267090 - DNA, 25 bp, Homo sapien
gaacgccaaacgtctccaggtactg

SEQ ID NO: 2267091 - DNA, 25 bp, Homo sapien
tcttcagcgggaacgccaaacgtct

SEQ ID NO: 2267092 - DNA, 25 bp, Homo sapien
taaaaagctcttcagcgggaacgcc

SEQ ID NO: 2267093 - DNA, 25 bp, Homo sapien
ctttcgaaggaagggtcacgttgca

SEQ ID NO: 2267094 - DNA, 25 bp, Homo sapien
gagtttgtgagtagtcctttcgaag

SEQ ID NO: 2267095 - DNA, 25 bp, Homo sapien
gcttcctcctgggttgtgccatttg

SEQ ID NO: 2267096 - DNA, 25 bp, Homo sapien
taaacatcagatgagcaaaatctgg

SEQ ID NO: 2267097 - DNA, 25 bp, Homo sapien
ccagagcaagggtgtacataacccc

SEQ ID NO: 2267098 - DNA, 25 bp, Homo sapien
cccagagcaagggtgtacataaccc

SEQ ID NO: 2267099 - DNA, 25 bp, Homo sapien
gggacgtgcccagagcaagggtgta

SEQ ID NO: 2267100 - DNA, 25 bp, Homo sapien
cgtgcccagagcaagggtgtacata

SEQ ID NO: 2267101 - DNA, 25 bp, Homo sapien
ctggcatgcaaaaccacgcttgtca

SEQ ID NO: 2267102 - DNA, 25 bp, Homo sapien
aaaccacgcttgtcaagatggtgag

SEQ ID NO: 2267103 - DNA, 25 bp, Homo sapien
ggcatgcaaaaccacgcttgtcaag

SEQ ID NO: 2267104 - DNA, 25 bp, Homo sapien
tgcaaaaccacgcttgtcaagatgg

SEQ ID NO: 2267105 - DNA, 25 bp, Homo sapien
ggtcagcacgcttctcccgttgacg

SEQ ID NO: 2267106 - DNA, 25 bp, Homo sapien
ttgacgctccagacctcctgcagag

SEQ ID NO: 2267107 - DNA, 25 bp, Homo sapien
cttgcatgaactgtagccgctcgcc

SEQ ID NO: 2267108 - DNA, 25 bp, Homo sapien
cactgacaggtcaaaggcggtcagc

SEQ ID NO: 2267109 - DNA, 25 bp, Homo sapien
ccagcctcccagccccccaggccct

SEQ ID NO: 2267110 - DNA, 25 bp, Homo sapien
tgtcctagtgctctccctcccccag

SEQ ID NO: 2267111 - DNA, 25 bp, Homo sapien
gccccccaggccctgacaggcccca

SEQ ID NO: 2267112 - DNA, 25 bp, Homo sapien
ctcccagccccccaggccctgacag

SEQ ID NO: 2267113 - DNA, 25 bp, Homo sapien
agacatgcattccttagccagagct

SEQ ID NO: 2267114 - DNA, 25 bp, Homo sapien
tctgggatgtcaaaaacggtgatct

SEQ ID NO: 2267115 - DNA, 25 bp, Homo sapien
gatcttacatccagggtacagagac

SEQ ID NO: 2267116 - DNA, 25 bp, Homo sapien
tttgccgtccacaccacttctggga

SEQ ID NO: 2267117 - DNA, 25 bp, Homo sapien
aggcacaccgaggtcagcctgcaat

SEQ ID NO: 2267118 - DNA, 25 bp, Homo sapien
ggtcttccaggctagtcacctgcag

SEQ ID NO: 2267119 - DNA, 25 bp, Homo sapien
catttgactaaacctattctgggca

SEQ ID NO: 2267120 - DNA, 25 bp, Homo sapien
attctgggcacaaaaggtcacctgg

SEQ ID NO: 2267121 - DNA, 25 bp, Homo sapien
accctggccaggatgtacagatcag

SEQ ID NO: 2267122 - DNA, 25 bp, Homo sapien
ccagcaggtgtgagcactttccgtc

SEQ ID NO: 2267123 - DNA, 25 bp, Homo sapien
cactttccgtctgcccagtcatgga

SEQ ID NO: 2267124 - DNA, 25 bp, Homo sapien
gatgtacagatcagcttccggaaga

SEQ ID NO: 2267125 - DNA, 25 bp, Homo sapien
tgcccttccgtctgcacaagcatgt

SEQ ID NO: 2267126 - DNA, 25 bp, Homo sapien
cagagagtagagctgcgtgagcaga

SEQ ID NO: 2267127 - DNA, 25 bp, Homo sapien
gaggctttcaattaccagaatgcca

SEQ ID NO: 2267128 - DNA, 25 bp, Homo sapien
gaggacctcgcctgtcttcatccag

SEQ ID NO: 2267129 - DNA, 25 bp, Homo sapien
tgtgtgctttgacgttagttccagg

SEQ ID NO: 2267130 - DNA, 25 bp, Homo sapien
gacgttagttccaggtcacaagaaa

SEQ ID NO: 2267131 - DNA, 25 bp, Homo sapien
tatgtcttgtgtgctttgacgttag

SEQ ID NO: 2267132 - DNA, 25 bp, Homo sapien
gctttgacgttagttccaggtcaca

SEQ ID NO: 2267133 - DNA, 25 bp, Homo sapien
gcaaatgcccgcactctcatggtgg

SEQ ID NO: 2267134 - DNA, 25 bp, Homo sapien
tctcacggttgaaatggcatcacta

SEQ ID NO: 2267135 - DNA, 25 bp, Homo sapien
cttgttgacattgcggaagaggtcc

SEQ ID NO: 2267136 - DNA, 25 bp, Homo sapien
tgtggcgtgatctaatctggcggca

SEQ ID NO: 2267137 - DNA, 25 bp, Homo sapien
gattagacattgcaaaaagaagcag

SEQ ID NO: 2267138 - DNA, 25 bp, Homo sapien
gaaatgtgcacaccattccttacct

SEQ ID NO: 2267139 - DNA, 25 bp, Homo sapien
tgttaggaccacctaacatggtgaa

SEQ ID NO: 2267140 - DNA, 25 bp, Homo sapien
cctttcttgtagatgagtttgttag

SEQ ID NO: 2267141 - DNA, 25 bp, Homo sapien
caaatccccatgtgatagacagaat

SEQ ID NO: 2267142 - DNA, 25 bp, Homo sapien
tagcctagggaaactgacttcagcc

SEQ ID NO: 2267143 - DNA, 25 bp, Homo sapien
catcccactccccatatggtagagg

SEQ ID NO: 2267144 - DNA, 25 bp, Homo sapien
catgtggtagaaggagtaatggccc

SEQ ID NO: 2267145 - DNA, 25 bp, Homo sapien
tccggaatggtccacatgttgccat

SEQ ID NO: 2267146 - DNA, 25 bp, Homo sapien
ggcaccggttctcgctcttccggaa

SEQ ID NO: 2267147 - DNA, 25 bp, Homo sapien
tcgctcttccggaatggtccacatg

SEQ ID NO: 2267148 - DNA, 25 bp, Homo sapien
ctgctggcaggcaccggttctcgct

SEQ ID NO: 2267149 - DNA, 25 bp, Homo sapien
aaatgcagaaacagcgcctcggtaa

SEQ ID NO: 2267150 - DNA, 25 bp, Homo sapien
aatgcagaaacagcgcctcggtaat

SEQ ID NO: 2267151 - DNA, 25 bp, Homo sapien
cagaaacagcgcctcggtaatttct

SEQ ID NO: 2267152 - DNA, 25 bp, Homo sapien
aacagcgcctcggtaatttctgaca

SEQ ID NO: 2267153 - DNA, 25 bp, Homo sapien
tcagacccatcgaggccggacaggg

SEQ ID NO: 2267154 - DNA, 25 bp, Homo sapien
cccaggtcgcttcccgtctgtaaat

SEQ ID NO: 2267155 - DNA, 25 bp, Homo sapien
tggcgatgcccggagatcgtgcaac

SEQ ID NO: 2267156 - DNA, 25 bp, Homo sapien
taaatggagtctcgtggtgcccgag

SEQ ID NO: 2267157 - DNA, 25 bp, Homo sapien
cctccggagggagctgcatgtagtt

SEQ ID NO: 2267158 - DNA, 25 bp, Homo sapien
gctattgtccacaagctgcagtggg

SEQ ID NO: 2267159 - DNA, 25 bp, Homo sapien
aagatctgttcacgtgctattgtcc

SEQ ID NO: 2267160 - DNA, 25 bp, Homo sapien
agagattgcagtgatgcggccagaa

SEQ ID NO: 2267161 - DNA, 25 bp, Homo sapien
agcagaactgccagccgagaaaaca

SEQ ID NO: 2267162 - DNA, 25 bp, Homo sapien
tggccctgaatctgtcccctgcatc

SEQ ID NO: 2267163 - DNA, 25 bp, Homo sapien
tcacaagtgaacaatctccaggtcc

SEQ ID NO: 2267164 - DNA, 25 bp, Homo sapien
ctctgcagatggagtaattccaata

SEQ ID NO: 2267165 - DNA, 25 bp, Homo sapien
cactgaagctgaagattgaggctcc

SEQ ID NO: 2267166 - DNA, 25 bp, Homo sapien
gccgcatatactcatcacgcacatt

SEQ ID NO: 2267167 - DNA, 25 bp, Homo sapien
tactcatcacgcacattctctttga

SEQ ID NO: 2267168 - DNA, 25 bp, Homo sapien
ttattgctgccgcatatactcatca

SEQ ID NO: 2267169 - DNA, 25 bp, Homo sapien
cattctctttgagcccgattctgtt

SEQ ID NO: 2267170 - DNA, 25 bp, Homo sapien
tggccgtcacgcttgaagaaaatct

SEQ ID NO: 2267171 - DNA, 25 bp, Homo sapien
tctggcaaacgatgtaattatatcc

SEQ ID NO: 2267172 - DNA, 25 bp, Homo sapien
atgacacaagcgacttccccaggaa

SEQ ID NO: 2267173 - DNA, 25 bp, Homo sapien
aggaaggaagcactcccacatctgg

SEQ ID NO: 2267174 - DNA, 25 bp, Homo sapien
cactagaattcacaccttcagactc

SEQ ID NO: 2267175 - DNA, 25 bp, Homo sapien
cacactagaattcacaccttcagac

SEQ ID NO: 2267176 - DNA, 25 bp, Homo sapien
tcacactagaattcacaccttcaga

SEQ ID NO: 2267177 - DNA, 25 bp, Homo sapien
acactagaattcacaccttcagact

SEQ ID NO: 2267178 - DNA, 25 bp, Homo sapien
gaaactggatattcccgtgcctcag

SEQ ID NO: 2267179 - DNA, 25 bp, Homo sapien
cactatggttgttatcaggcaggtt

SEQ ID NO: 2267180 - DNA, 25 bp, Homo sapien
gagaagggcacggacttatcttttg

SEQ ID NO: 2267181 - DNA, 25 bp, Homo sapien
atggttgttatcaggcaggttcttc

SEQ ID NO: 2267182 - DNA, 25 bp, Homo sapien
cttgtccatgacgagatgggccagt

SEQ ID NO: 2267183 - DNA, 25 bp, Homo sapien
agatgggccagtccacatcacaggc

SEQ ID NO: 2267184 - DNA, 25 bp, Homo sapien
acattctaaaggtgactgtcggcca

SEQ ID NO: 2267185 - DNA, 25 bp, Homo sapien
cacaggtaggagaccccaacacagt

SEQ ID NO: 2267186 - DNA, 25 bp, Homo sapien
ttctgcagccttggaaagccgtctc

SEQ ID NO: 2267187 - DNA, 25 bp, Homo sapien
cagccttggaaagccgtctcaggcc

SEQ ID NO: 2267188 - DNA, 25 bp, Homo sapien
cttggaaagccgtctcaggccgggc

SEQ ID NO: 2267189 - DNA, 25 bp, Homo sapien
tgcagccttggaaagccgtctcagg

SEQ ID NO: 2267190 - DNA, 25 bp, Homo sapien
caaagaggatctgctattgcagact

SEQ ID NO: 2267191 - DNA, 25 bp, Homo sapien
ctgaggatgtctcacatgaggcaac

SEQ ID NO: 2267192 - DNA, 25 bp, Homo sapien
ctggatcacgtgcaaacccaggcaa

SEQ ID NO: 2267193 - DNA, 25 bp, Homo sapien
caacgggtcggtgggtggtttgctg

SEQ ID NO: 2267194 - DNA, 25 bp, Homo sapien
cctggagaatgtgcttcaggtctcg

SEQ ID NO: 2267195 - DNA, 25 bp, Homo sapien
accagagattcgtacctgcggcacg

SEQ ID NO: 2267196 - DNA, 25 bp, Homo sapien
gagacttcaaataccgatcctggag

SEQ ID NO: 2267197 - DNA, 25 bp, Homo sapien
tgcagaaggtccctgtccgagactt

SEQ ID NO: 2267198 - DNA, 25 bp, Homo sapien
gaagtcccttccaagaacagcgaga

SEQ ID NO: 2267199 - DNA, 25 bp, Homo sapien
ctggaagtcccttccaagaacagcg

SEQ ID NO: 2267200 - DNA, 25 bp, Homo sapien
ggctggaagtcccttccaagaacag

SEQ ID NO: 2267201 - DNA, 25 bp, Homo sapien
ttccaggctggaagtcccttccaag

SEQ ID NO: 2267202 - DNA, 25 bp, Homo sapien
ccccattgggagattgagtatacac

SEQ ID NO: 2267203 - DNA, 25 bp, Homo sapien
tgatttgcagtaagccccacaaggg

SEQ ID NO: 2267204 - DNA, 25 bp, Homo sapien
cccttgggaagccaaaatagctgct

SEQ ID NO: 2267205 - DNA, 25 bp, Homo sapien
tagctgctaggcgacaaactgtcag

SEQ ID NO: 2267206 - DNA, 25 bp, Homo sapien
caatcttcctagtcatcacttatta

SEQ ID NO: 2267207 - DNA, 25 bp, Homo sapien
tccaaagggaaccattaataagtca

SEQ ID NO: 2267208 - DNA, 25 bp, Homo sapien
tcacttattaccactcaacagaatt

SEQ ID NO: 2267209 - DNA, 25 bp, Homo sapien
tcattctcccaagtatccattcaat

SEQ ID NO: 2267210 - DNA, 25 bp, Homo sapien
agagggcatgtgcagcggaacctgg

SEQ ID NO: 2267211 - DNA, 25 bp, Homo sapien
gtgccagactcttctgacaagcatt

SEQ ID NO: 2267212 - DNA, 25 bp, Homo sapien
gatcaaggcattgcagggctgcttc

SEQ ID NO: 2267213 - DNA, 25 bp, Homo sapien
ttcatttaggagatagatcagcagg

SEQ ID NO: 2267214 - DNA, 25 bp, Homo sapien
gctgaacagatgtcagtagaaccta

SEQ ID NO: 2267215 - DNA, 25 bp, Homo sapien
gagggctatgaaaatgcatcactgg

SEQ ID NO: 2267216 - DNA, 25 bp, Homo sapien
ggttggttgcaaaatggatcttcgc

SEQ ID NO: 2267217 - DNA, 25 bp, Homo sapien
gacatctatggagagggaatccact

SEQ ID NO: 2267218 - DNA, 25 bp, Homo sapien
gatacttgtcttcgttgcattgccg

SEQ ID NO: 2267219 - DNA, 25 bp, Homo sapien
gttagacagacccaaagagacagat

SEQ ID NO: 2267220 - DNA, 25 bp, Homo sapien
gcgttgcattgtggaccagagctca

SEQ ID NO: 2267221 - DNA, 25 bp, Homo sapien
tcacaacagccaatgtcaagggtgt

SEQ ID NO: 2267222 - DNA, 25 bp, Homo sapien
gccacagatgtgaggagctctcacc

SEQ ID NO: 2267223 - DNA, 25 bp, Homo sapien
tgtggaggcacaggacgcgtcctct

SEQ ID NO: 2267224 - DNA, 25 bp, Homo sapien
tggagcagggactgattatacccag

SEQ ID NO: 2267225 - DNA, 25 bp, Homo sapien
cattgatattggtggatgcgacact

SEQ ID NO: 2267226 - DNA, 25 bp, Homo sapien
gcgacactccaggtgaaataggtcc

SEQ ID NO: 2267227 - DNA, 25 bp, Homo sapien
gagaccccacctctagagagaaaga

SEQ ID NO: 2267228 - DNA, 25 bp, Homo sapien
agcatctgcagtcaggcctatttgg

SEQ ID NO: 2267229 - DNA, 25 bp, Homo sapien
ttgactcgggaggacattttctaga

SEQ ID NO: 2267230 - DNA, 25 bp, Homo sapien
tttccgtgcctgctattataaatgg

SEQ ID NO: 2267231 - DNA, 25 bp, Homo sapien
tcgggaggacattttctagatcatt

SEQ ID NO: 2267232 - DNA, 25 bp, Homo sapien
tcttagatcagcaaagtctggttga

SEQ ID NO: 2267233 - DNA, 25 bp, Homo sapien
aatgtgacctgagggaatttcagtt

SEQ ID NO: 2267234 - DNA, 25 bp, Homo sapien
gtgacctgagggaatttcagttcca

SEQ ID NO: 2267235 - DNA, 25 bp, Homo sapien
cctgagggaatttcagttccacctc

SEQ ID NO: 2267236 - DNA, 25 bp, Homo sapien
agtgaccacagggcctatcgtgggc

SEQ ID NO: 2267237 - DNA, 25 bp, Homo sapien
cctctgcgcgtagattgagttgctg

SEQ ID NO: 2267238 - DNA, 25 bp, Homo sapien
gaatccagataacctctgcgcgtag

SEQ ID NO: 2267239 - DNA, 25 bp, Homo sapien
agttgctgcaccgtcgtcgtcgtga

SEQ ID NO: 2267240 - DNA, 25 bp, Homo sapien
tcgtcgtgatgttctcccaccagtc

SEQ ID NO: 2267241 - DNA, 25 bp, Homo sapien
ccaccagccttgtgcccactcacac

SEQ ID NO: 2267242 - DNA, 25 bp, Homo sapien
gaccaccagccttgtgcccactcac

SEQ ID NO: 2267243 - DNA, 25 bp, Homo sapien
cccagaataggaaacgcaagctgct

SEQ ID NO: 2267244 - DNA, 25 bp, Homo sapien
ccagaataggaaacgcaagctgctc

SEQ ID NO: 2267245 - DNA, 25 bp, Homo sapien
tgctctcatgcagtggtagtatcat

SEQ ID NO: 2267246 - DNA, 25 bp, Homo sapien
ctgctctcatgcagtggtagtatca

SEQ ID NO: 2267247 - DNA, 25 bp, Homo sapien
agttattactgctctcacacggcgg

SEQ ID NO: 2267248 - DNA, 25 bp, Homo sapien
cacacggcggtggtattgtattact

SEQ ID NO: 2267249 - DNA, 25 bp, Homo sapien
tgttgtagttattactgctctcaca

SEQ ID NO: 2267250 - DNA, 25 bp, Homo sapien
tactgctctcacacggcggtggtat

SEQ ID NO: 2267251 - DNA, 25 bp, Homo sapien
ctgctctcatgtggcggtagtatca

SEQ ID NO: 2267252 - DNA, 25 bp, Homo sapien
tgttgttgctctcatgcggcggtag

SEQ ID NO: 2267253 - DNA, 25 bp, Homo sapien
tactgctctcatgcggcggtagtat

SEQ ID NO: 2267254 - DNA, 25 bp, Homo sapien
tcatgcggcggtagtatcatattac

SEQ ID NO: 2267255 - DNA, 25 bp, Homo sapien
tcatgcggcggtagtatcatattac

SEQ ID NO: 2267256 - DNA, 25 bp, Homo sapien
tactgctctcatgcggcggtagtat

SEQ ID NO: 2267257 - DNA, 25 bp, Homo sapien
tctcatgcggcggtagtatcatatt

SEQ ID NO: 2267258 - DNA, 25 bp, Homo sapien
catgtggcggtggtatcatattact

SEQ ID NO: 2267259 - DNA, 25 bp, Homo sapien
gttactagcacccaagcgaggcaga

SEQ ID NO: 2267260 - DNA, 25 bp, Homo sapien
actagcacccaagcgaggcagacag

SEQ ID NO: 2267261 - DNA, 25 bp, Homo sapien
gcacccaagcgaggcagacagatgg

SEQ ID NO: 2267262 - DNA, 25 bp, Homo sapien
tgtgttactagcacccaagcgaggc

SEQ ID NO: 2267263 - DNA, 25 bp, Homo sapien
tatgtgaagacacttcatgcctgag

SEQ ID NO: 2267264 - DNA, 25 bp, Homo sapien
cttgccttcggtgtgtacatcgtga

SEQ ID NO: 2267265 - DNA, 25 bp, Homo sapien
gagtttgaaagcataagaagatgta

SEQ ID NO: 2267266 - DNA, 25 bp, Homo sapien
tacatcgtgaggaatgacgcgtata

SEQ ID NO: 2267267 - DNA, 25 bp, Homo sapien
ctgcaacctccgcttcctgagttca

SEQ ID NO: 2267268 - DNA, 25 bp, Homo sapien
agtgcagtggcatcatctcggctca

SEQ ID NO: 2267269 - DNA, 25 bp, Homo sapien
gcacatgccaccatgactggccaat

SEQ ID NO: 2267270 - DNA, 25 bp, Homo sapien
gagtctcgctctgtttccgggctgg

SEQ ID NO: 2267271 - DNA, 25 bp, Homo sapien
gcaaagaggatttcgggcagcagac

SEQ ID NO: 2267272 - DNA, 25 bp, Homo sapien
caatgacagaaactcgtaggcgatc

SEQ ID NO: 2267273 - DNA, 25 bp, Homo sapien
caagctgccagcgtctctgctgtaa

SEQ ID NO: 2267274 - DNA, 25 bp, Homo sapien
tctgctgtaaggatgaggcgctgac

SEQ ID NO: 2267275 - DNA, 25 bp, Homo sapien
tgtctgagactagcagggcacccat

SEQ ID NO: 2267276 - DNA, 25 bp, Homo sapien
cgcatttccgtatacaaaaccatga

SEQ ID NO: 2267277 - DNA, 25 bp, Homo sapien
gataagactttggaaaatgaggccc

SEQ ID NO: 2267278 - DNA, 25 bp, Homo sapien
catgacgatgtctgcaaaaatacag

SEQ ID NO: 2267279 - DNA, 25 bp, Homo sapien
gcctcagatgagtgtccgactgtga

SEQ ID NO: 2267280 - DNA, 25 bp, Homo sapien
ctcaatactgtcaaaccaggaaaaa

SEQ ID NO: 2267281 - DNA, 25 bp, Homo sapien
tgtgataagctcttccgtgccattt

SEQ ID NO: 2267282 - DNA, 25 bp, Homo sapien
gtcctgtctttcactctttaggcaa

SEQ ID NO: 2267283 - DNA, 25 bp, Homo sapien
gttgtactatcgaatactaggtatg

SEQ ID NO: 2267284 - DNA, 25 bp, Homo sapien
cgaatactaggtatgaataattaca

SEQ ID NO: 2267285 - DNA, 25 bp, Homo sapien
ctatcgaatactaggtatgaataat

SEQ ID NO: 2267286 - DNA, 25 bp, Homo sapien
tgtactatcgaatactaggtatgaa

SEQ ID NO: 2267287 - DNA, 25 bp, Homo sapien
gtatcagctcttcccggcagcgtgt

SEQ ID NO: 2267288 - DNA, 25 bp, Homo sapien
cggcagcgtgtggatttcctgcaaa

SEQ ID NO: 2267289 - DNA, 25 bp, Homo sapien
ggatttcctgcaaaagtggcctcat

SEQ ID NO: 2267290 - DNA, 25 bp, Homo sapien
tctcaatttagttgtatcagctctt

SEQ ID NO: 2267291 - DNA, 25 bp, Homo sapien
tccacagcagtgtgcagcaggctgc

SEQ ID NO: 2267292 - DNA, 25 bp, Homo sapien
agtccacagcagtgtgcagcaggct

SEQ ID NO: 2267293 - DNA, 25 bp, Homo sapien
ttagtccacagcagtgtgcagcagg

SEQ ID NO: 2267294 - DNA, 25 bp, Homo sapien
cacagcagtgtgcagcaggctgctg

SEQ ID NO: 2267295 - DNA, 25 bp, Homo sapien
ttctccgatcgtctccctcatgcct

SEQ ID NO: 2267296 - DNA, 25 bp, Homo sapien
gccgtattctctttctccgatcgtc

SEQ ID NO: 2267297 - DNA, 25 bp, Homo sapien
ttctgccgtattctctttctccgat

SEQ ID NO: 2267298 - DNA, 25 bp, Homo sapien
ctgccgtattctctttctccgatcg

SEQ ID NO: 2267299 - DNA, 25 bp, Homo sapien
tgttgacgccctttgccatcatcta

SEQ ID NO: 2267300 - DNA, 25 bp, Homo sapien
cagcccagaggtgttgacgcccttt

SEQ ID NO: 2267301 - DNA, 25 bp, Homo sapien
tgtgataccagatgatgctcaaggc

SEQ ID NO: 2267302 - DNA, 25 bp, Homo sapien
tgataccagatgatgctcaaggccc

SEQ ID NO: 2267303 - DNA, 25 bp, Homo sapien
tgagggtatcgtgcaaagcagccct

SEQ ID NO: 2267304 - DNA, 25 bp, Homo sapien
cagccctgttcaaaagacccggatc

SEQ ID NO: 2267305 - DNA, 25 bp, Homo sapien
gcaaagcagccctgttcaaaagacc

SEQ ID NO: 2267306 - DNA, 25 bp, Homo sapien
ctgagggtatcgtgcaaagcagccc

SEQ ID NO: 2267307 - DNA, 25 bp, Homo sapien
ctggaaccagtgtgaagcaaggaca

SEQ ID NO: 2267308 - DNA, 25 bp, Homo sapien
gcagaatgactaagccaccaggaat

SEQ ID NO: 2267309 - DNA, 25 bp, Homo sapien
caatccccagggcagaatgactaag

SEQ ID NO: 2267310 - DNA, 25 bp, Homo sapien
gtgtgaagcaaggacaatccccagg

SEQ ID NO: 2267311 - DNA, 25 bp, Homo sapien
ggagtcaaccaccacgtgctgtacg

SEQ ID NO: 2267312 - DNA, 25 bp, Homo sapien
gctgtcctcattcgtctaaacctga

SEQ ID NO: 2267313 - DNA, 25 bp, Homo sapien
gacggtaaggagataagctgtcctc

SEQ ID NO: 2267314 - DNA, 25 bp, Homo sapien
gacagaaggctacagataaccggag

SEQ ID NO: 2267315 - DNA, 25 bp, Homo sapien
tatttccggctgttgtgctatgtct

SEQ ID NO: 2267316 - DNA, 25 bp, Homo sapien
tatgaaaggctatttccggctgttg

SEQ ID NO: 2267317 - DNA, 25 bp, Homo sapien
ggctgttgtgctatgtctgtgctct

SEQ ID NO: 2267318 - DNA, 25 bp, Homo sapien
gaaaggctatttccggctgttgtgc

SEQ ID NO: 2267319 - DNA, 25 bp, Homo sapien
gtctgctggcgacaaaaatcaccat

SEQ ID NO: 2267320 - DNA, 25 bp, Homo sapien
agagtctgctggcgacaaaaatcac

SEQ ID NO: 2267321 - DNA, 25 bp, Homo sapien
gagtctgctggcgacaaaaatcacc

SEQ ID NO: 2267322 - DNA, 25 bp, Homo sapien
agtctgctggcgacaaaaatcacca

SEQ ID NO: 2267323 - DNA, 25 bp, Homo sapien
gcctctctctttcttaagttgacag

SEQ ID NO: 2267324 - DNA, 25 bp, Homo sapien
ccacgactggcctctgtgtaatttc

SEQ ID NO: 2267325 - DNA, 25 bp, Homo sapien
gatttggcccaagtacaagagtcac

SEQ ID NO: 2267326 - DNA, 25 bp, Homo sapien
gttgacagaagaggattgatttggc

SEQ ID NO: 2267327 - DNA, 25 bp, Homo sapien
cgccaaagccgtaaatgcattgaga

SEQ ID NO: 2267328 - DNA, 25 bp, Homo sapien
gaatacgccggcgttttcatcacca

SEQ ID NO: 2267329 - DNA, 25 bp, Homo sapien
taaggcagggtgttcacgaatacgc

SEQ ID NO: 2267330 - DNA, 25 bp, Homo sapien
aattatcccctcagccgaatgcaag

SEQ ID NO: 2267331 - DNA, 25 bp, Homo sapien
tcagaatccccacggttaaacacaa

SEQ ID NO: 2267332 - DNA, 25 bp, Homo sapien
aaaagttcacacaggtatgccggcg

SEQ ID NO: 2267333 - DNA, 25 bp, Homo sapien
ttttgagaccagacacgaagcacgg

SEQ ID NO: 2267334 - DNA, 25 bp, Homo sapien
tatgccggcgcgatcttcagaatcc

SEQ ID NO: 2267335 - DNA, 25 bp, Homo sapien
tatcggattattgaggtggatcctc

SEQ ID NO: 2267336 - DNA, 25 bp, Homo sapien
agatgggaggatgatatcggattat

SEQ ID NO: 2267337 - DNA, 25 bp, Homo sapien
gatatcggattattgaggtggatcc

SEQ ID NO: 2267338 - DNA, 25 bp, Homo sapien
aggatgatatcggattattgaggtg

SEQ ID NO: 2267339 - DNA, 25 bp, Homo sapien
agctgggtgcagtggtgggtgcctg

SEQ ID NO: 2267340 - DNA, 25 bp, Homo sapien
ggcaggagaatggcgtgaacctggg

SEQ ID NO: 2267341 - DNA, 25 bp, Homo sapien
agtgagccgaggtcttgccactgta

SEQ ID NO: 2267342 - DNA, 25 bp, Homo sapien
tagtcccggctactcgggaggctga

SEQ ID NO: 2267343 - DNA, 25 bp, Homo sapien
tataaataaatcaaaccccagcggc

SEQ ID NO: 2267344 - DNA, 25 bp, Homo sapien
taaataaatcaaaccccagcggctc

SEQ ID NO: 2267345 - DNA, 25 bp, Homo sapien
aactcctccaaatataaataaatca

SEQ ID NO: 2267346 - DNA, 25 bp, Homo sapien
aatataaataaatcaaaccccagcg

SEQ ID NO: 2267347 - DNA, 25 bp, Homo sapien
tctgtctttgaagtcgtgctcctct

SEQ ID NO: 2267348 - DNA, 25 bp, Homo sapien
actctggcctgcgtactttgttgta

SEQ ID NO: 2267349 - DNA, 25 bp, Homo sapien
taatactctggcctgcgtactttgt

SEQ ID NO: 2267350 - DNA, 25 bp, Homo sapien
gcctgcgtactttgttgtactttct

SEQ ID NO: 2267351 - DNA, 25 bp, Homo sapien
gggacatttcggctgtggccattga

SEQ ID NO: 2267352 - DNA, 25 bp, Homo sapien
cattgagcctttacctcgactgagt

SEQ ID NO: 2267353 - DNA, 25 bp, Homo sapien
cacaacatcttatggacgaccacag

SEQ ID NO: 2267354 - DNA, 25 bp, Homo sapien
tgtgagtggtatctgctgcccacaa

SEQ ID NO: 2267355 - DNA, 25 bp, Homo sapien
tggctttttttgatgctcccagctt

SEQ ID NO: 2267356 - DNA, 25 bp, Homo sapien
ggtggtcttcccaaataatcacttc

SEQ ID NO: 2267357 - DNA, 25 bp, Homo sapien
agcgttgacggtgccaccatggaaa

SEQ ID NO: 2267358 - DNA, 25 bp, Homo sapien
tggtgcttctgtcctatgccagcgt

SEQ ID NO: 2267359 - DNA, 25 bp, Homo sapien
tccagttgggtaaggttctgatgag

SEQ ID NO: 2267360 - DNA, 25 bp, Homo sapien
tgtattagatcctgatgagatccag

SEQ ID NO: 2267361 - DNA, 25 bp, Homo sapien
gatgagatccagttgggtaaggttc

SEQ ID NO: 2267362 - DNA, 25 bp, Homo sapien
tcatgatgagatctagttgtattag

SEQ ID NO: 2267363 - DNA, 25 bp, Homo sapien
gatctaattgggtaggtcatgatga

SEQ ID NO: 2267364 - DNA, 25 bp, Homo sapien
ttaggtgatgatgaaatcttgttgg

SEQ ID NO: 2267365 - DNA, 25 bp, Homo sapien
gatgatgaaatcttgttgggctagg

SEQ ID NO: 2267366 - DNA, 25 bp, Homo sapien
taggtcatgatgaggtcttgttgag

SEQ ID NO: 2267367 - DNA, 25 bp, Homo sapien
tgtcgattcagacatgtatgcaaat

SEQ ID NO: 2267368 - DNA, 25 bp, Homo sapien
ctacttaggtgtcgattcagacatg

SEQ ID NO: 2267369 - DNA, 25 bp, Homo sapien
tatgcaaatgttgatgtgcatatag

SEQ ID NO: 2267370 - DNA, 25 bp, Homo sapien
agctcatgaaggtgatattcacaac

SEQ ID NO: 2267371 - DNA, 25 bp, Homo sapien
atgtgctctgctttcaaatcttagt

SEQ ID NO: 2267372 - DNA, 25 bp, Homo sapien
gtgctctgctttcaaatcttagttt

SEQ ID NO: 2267373 - DNA, 25 bp, Homo sapien
ctgctttcaaatcttagtttgatga

SEQ ID NO: 2267374 - DNA, 25 bp, Homo sapien
caaatcttagtttgatgattttctc

SEQ ID NO: 2267375 - DNA, 25 bp, Homo sapien
tcacactgacggcatattgcagagc

SEQ ID NO: 2267376 - DNA, 25 bp, Homo sapien
gacggcatattgcagagcctgccag

SEQ ID NO: 2267377 - DNA, 25 bp, Homo sapien
gcatattgcagagcctgccagggac

SEQ ID NO: 2267378 - DNA, 25 bp, Homo sapien
tcacaggggatgacaggggatttat

SEQ ID NO: 2267379 - DNA, 25 bp, Homo sapien
ggagctcccccgtcagtccctgcag

SEQ ID NO: 2267380 - DNA, 25 bp, Homo sapien
tgtgctgaactgtggcggagctccc

SEQ ID NO: 2267381 - DNA, 25 bp, Homo sapien
ttcaggagacccttgatagccttgt

SEQ ID NO: 2267382 - DNA, 25 bp, Homo sapien
caggagacccttgatagccttgtct

SEQ ID NO: 2267383 - DNA, 25 bp, Homo sapien
tctcttctttgtgtgggtacagccg

SEQ ID NO: 2267384 - DNA, 25 bp, Homo sapien
ggtacagccgttggcaaactttgct

SEQ ID NO: 2267385 - DNA, 25 bp, Homo sapien
caaactttgctgacagatgctactg

SEQ ID NO: 2267386 - DNA, 25 bp, Homo sapien
tgtgtgggtacagccgttggcaaac

SEQ ID NO: 2267387 - DNA, 25 bp, Homo sapien
tcttcactgaagacagccggaagcc

SEQ ID NO: 2267388 - DNA, 25 bp, Homo sapien
ggactgacacgtgctccgtcttcac

SEQ ID NO: 2267389 - DNA, 25 bp, Homo sapien
agacagccggaagccgtggtgttcc

SEQ ID NO: 2267390 - DNA, 25 bp, Homo sapien
tggctgtggaaactagagtgtccat

SEQ ID NO: 2267391 - DNA, 25 bp, Homo sapien
gctccttggatgtctttgttggtga

SEQ ID NO: 2267392 - DNA, 25 bp, Homo sapien
tggtgaacgtgatgagatagaattt

SEQ ID NO: 2267393 - DNA, 25 bp, Homo sapien
aaagctccgaggtgtgatcattgca

SEQ ID NO: 2267394 - DNA, 25 bp, Homo sapien
tcaaatagtccttagcctttgttct

SEQ ID NO: 2267395 - DNA, 25 bp, Homo sapien
cagtggcagtccgttggccgcatgc

SEQ ID NO: 2267396 - DNA, 25 bp, Homo sapien
cgtagggaacgtcatcagtgcggtc

SEQ ID NO: 2267397 - DNA, 25 bp, Homo sapien
tccgttggccgcatgcgtagggaac

SEQ ID NO: 2267398 - DNA, 25 bp, Homo sapien
tcatcagtgcggtccattggccaca

SEQ ID NO: 2267399 - DNA, 25 bp, Homo sapien
tgtggtgagttgactgtgccctgtt

SEQ ID NO: 2267400 - DNA, 25 bp, Homo sapien
gtggtgagttgactgtgccctgttc

SEQ ID NO: 2267401 - DNA, 25 bp, Homo sapien
ctgtggtgagttgactgtgccctgt

SEQ ID NO: 2267402 - DNA, 25 bp, Homo sapien
ggcgtcccgcacattgtccctgtta

SEQ ID NO: 2267403 - DNA, 25 bp, Homo sapien
tttttggcgtcccgcacattgtccc

SEQ ID NO: 2267404 - DNA, 25 bp, Homo sapien
tttggcgtcccgcacattgtccctg

SEQ ID NO: 2267405 - DNA, 25 bp, Homo sapien
ggtttttggcgtcccgcacattgtc

SEQ ID NO: 2267406 - DNA, 25 bp, Homo sapien
caaactcgcagataaactgtttcta

SEQ ID NO: 2267407 - DNA, 25 bp, Homo sapien
ggccgcacccttcattcttgattca

SEQ ID NO: 2267408 - DNA, 25 bp, Homo sapien
tgattcacctggttacaaactcgca

SEQ ID NO: 2267409 - DNA, 25 bp, Homo sapien
cgcccggccgcacccttcattcttg

SEQ ID NO: 2267410 - DNA, 25 bp, Homo sapien
tggctgtcccttgggccacatgctt

SEQ ID NO: 2267411 - DNA, 25 bp, Homo sapien
cttagggaacgtcttcagtgtgtac

SEQ ID NO: 2267412 - DNA, 25 bp, Homo sapien
cgtggctgtcccttgggccacatgc

SEQ ID NO: 2267413 - DNA, 25 bp, Homo sapien
acatgcttagggaacgtcttcagtg

SEQ ID NO: 2267414 - DNA, 25 bp, Homo sapien
tacatggtggtggtcccttagccac

SEQ ID NO: 2267415 - DNA, 25 bp, Homo sapien
catggtggtggtcccttagccacaa

SEQ ID NO: 2267416 - DNA, 25 bp, Homo sapien
acatggtggtggtcccttagccaca

SEQ ID NO: 2267417 - DNA, 25 bp, Homo sapien
ccccacccagatcagaggttgagaa

SEQ ID NO: 2267418 - DNA, 25 bp, Homo sapien
aatcttcggatttctggagatgccc

SEQ ID NO: 2267419 - DNA, 25 bp, Homo sapien
ttatatccgtgtagacttgggagga

SEQ ID NO: 2267420 - DNA, 25 bp, Homo sapien
ggaggatgacaggagagcaacctta

SEQ ID NO: 2267421 - DNA, 25 bp, Homo sapien
tgttttcttttcataagaggtgctg

SEQ ID NO: 2267422 - DNA, 25 bp, Homo sapien
gaggtgctggactcacagtggctct

SEQ ID NO: 2267423 - DNA, 25 bp, Homo sapien
cagtggctctgtgctgtgatgaaat

SEQ ID NO: 2267424 - DNA, 25 bp, Homo sapien
gctcggatgacaggtgtcagccacg

SEQ ID NO: 2267425 - DNA, 25 bp, Homo sapien
cttatgtggtatccgtttcctctgt

SEQ ID NO: 2267426 - DNA, 25 bp, Homo sapien
tggtctgaatcacatcacaggcttc

SEQ ID NO: 2267427 - DNA, 25 bp, Homo sapien
tatccgtttcctctgtcagcgacca

SEQ ID NO: 2267428 - DNA, 25 bp, Homo sapien
tgtggtatccgtttcctctgtcagc

SEQ ID NO: 2267429 - DNA, 25 bp, Homo sapien
caccttccgtgtggtctggactttg

SEQ ID NO: 2267430 - DNA, 25 bp, Homo sapien
gcctggcggcgcctttcattcttga

SEQ ID NO: 2267431 - DNA, 25 bp, Homo sapien
ggcgtcccacgtgttgtccctgtaa

SEQ ID NO: 2267432 - DNA, 25 bp, Homo sapien
cccctgtggcgagctgactgtgcca

SEQ ID NO: 2267433 - DNA, 25 bp, Homo sapien
actggctagagctaggtgccatgga

SEQ ID NO: 2267434 - DNA, 25 bp, Homo sapien
tgaacaaactggctagagctaggtg

SEQ ID NO: 2267435 - DNA, 25 bp, Homo sapien
ggttttttgcatcccacatgttgtc

SEQ ID NO: 2267436 - DNA, 25 bp, Homo sapien
tttttgcatcccacatgttgtccct

SEQ ID NO: 2267437 - DNA, 25 bp, Homo sapien
taaactcacagataaactgtttcca

SEQ ID NO: 2267438 - DNA, 25 bp, Homo sapien
ctttctttcttgatccacctggttt

SEQ ID NO: 2267439 - DNA, 25 bp, Homo sapien
tttaaactcacagataaactgtttc

SEQ ID NO: 2267440 - DNA, 25 bp, Homo sapien
tcttgatccacctggttttaaactc

SEQ ID NO: 2267441 - DNA, 25 bp, Homo sapien
tcttcagtgcgtacacggtggtccc

SEQ ID NO: 2267442 - DNA, 25 bp, Homo sapien
gtacacggtggtcccgtagccacat

SEQ ID NO: 2267443 - DNA, 25 bp, Homo sapien
cagtgtgcacatgtggcggtcccct

SEQ ID NO: 2267444 - DNA, 25 bp, Homo sapien
ccctggtcgcattcttacggaatgt

SEQ ID NO: 2267445 - DNA, 25 bp, Homo sapien
tggctcttagtacaaaacttcactc

SEQ ID NO: 2267446 - DNA, 25 bp, Homo sapien
cctttgttcagggtactgtgacttc

SEQ ID NO: 2267447 - DNA, 25 bp, Homo sapien
actccaggtactagacctgtttcag

SEQ ID NO: 2267448 - DNA, 25 bp, Homo sapien
cctttgttcagggtactgtgacctc

SEQ ID NO: 2267449 - DNA, 25 bp, Homo sapien
cctgtgagttcctgtgggcaaatga

SEQ ID NO: 2267450 - DNA, 25 bp, Homo sapien
gtgagttcctgtgggcaaatgagcc

SEQ ID NO: 2267451 - DNA, 25 bp, Homo sapien
gtttttagagtattgcagtcagcac

SEQ ID NO: 2267452 - DNA, 25 bp, Homo sapien
agagtattgcagtcagcacagtttc

SEQ ID NO: 2267453 - DNA, 25 bp, Homo sapien
tcagtttttagagtattgcagtcag

SEQ ID NO: 2267454 - DNA, 25 bp, Homo sapien
ttttagagtattgcagtcagcacag

SEQ ID NO: 2267455 - DNA, 25 bp, Homo sapien
tggaggcacatgtctgggtaacaga

SEQ ID NO: 2267456 - DNA, 25 bp, Homo sapien
actgaaggtcatagagagaactcat

SEQ ID NO: 2267457 - DNA, 25 bp, Homo sapien
ctgaaggtcatagagagaactcatc

SEQ ID NO: 2267458 - DNA, 25 bp, Homo sapien
ttcatccacgtgttgaactgaaggt

SEQ ID NO: 2267459 - DNA, 25 bp, Homo sapien
tggataggacagaagctccgcccag

SEQ ID NO: 2267460 - DNA, 25 bp, Homo sapien
ggaccatgtcctattcacactgtct

SEQ ID NO: 2267461 - DNA, 25 bp, Homo sapien
ctctgtgctcttcagggaccatgtc

SEQ ID NO: 2267462 - DNA, 25 bp, Homo sapien
cagccccacatgagagctctgtgct

SEQ ID NO: 2267463 - DNA, 25 bp, Homo sapien
gattttgcgtgcatgtcttccagca

SEQ ID NO: 2267464 - DNA, 25 bp, Homo sapien
gcttcggtttaattgcatgcacatc

SEQ ID NO: 2267465 - DNA, 25 bp, Homo sapien
ctgtgcttgcaagggttccgtaaca

SEQ ID NO: 2267466 - DNA, 25 bp, Homo sapien
agaaacactaaacctctttgcaatg

SEQ ID NO: 2267467 - DNA, 25 bp, Homo sapien
atgttcatattggaacttgcctgca

SEQ ID NO: 2267468 - DNA, 25 bp, Homo sapien
atattggaacttgcctgcattgcag

SEQ ID NO: 2267469 - DNA, 25 bp, Homo sapien
tggaacttgcctgcattgcagatgt

SEQ ID NO: 2267470 - DNA, 25 bp, Homo sapien
gttccacagatgttcatattggaac

SEQ ID NO: 2267471 - DNA, 25 bp, Homo sapien
gacactgaattatgtcaacagttct

SEQ ID NO: 2267472 - DNA, 25 bp, Homo sapien
gtcaacagttctcccccaagtaatg

SEQ ID NO: 2267473 - DNA, 25 bp, Homo sapien
tgttccttcccctgttgacactgaa

SEQ ID NO: 2267474 - DNA, 25 bp, Homo sapien
caagtaatgcatgggtttaaatcac

SEQ ID NO: 2267475 - DNA, 25 bp, Homo sapien
gtacccagcctcggtgaaaacctca

SEQ ID NO: 2267476 - DNA, 25 bp, Homo sapien
ggcgcagtcagataagcattaacta

SEQ ID NO: 2267477 - DNA, 25 bp, Homo sapien
atattccctgccgagccggtaggtg

SEQ ID NO: 2267478 - DNA, 25 bp, Homo sapien
aggcagcatattccctgccgagccg

SEQ ID NO: 2267479 - DNA, 25 bp, Homo sapien
ctctgggtgccaagacacgtgatca

SEQ ID NO: 2267480 - DNA, 25 bp, Homo sapien
tatggcgtggactttacctcctcaa

SEQ ID NO: 2267481 - DNA, 25 bp, Homo sapien
tcagtcagtgcaagatggtccaacc

SEQ ID NO: 2267482 - DNA, 25 bp, Homo sapien
tcctggagttcaccaatatggcgtg

SEQ ID NO: 2267483 - DNA, 25 bp, Homo sapien
cgtcaggggcccttcggtaacactg

SEQ ID NO: 2267484 - DNA, 25 bp, Homo sapien
aggcctgcgggtgactccgtctctc

SEQ ID NO: 2267485 - DNA, 25 bp, Homo sapien
gctgtctcaggcctgcgggtgactc

SEQ ID NO: 2267486 - DNA, 25 bp, Homo sapien
ttcggtaacactggtcttgtgctgt

SEQ ID NO: 2267487 - DNA, 25 bp, Homo sapien
tcgaaggggttgggtgaggggagca

SEQ ID NO: 2267488 - DNA, 25 bp, Homo sapien
gcggccaccagacggcggagcaggc

SEQ ID NO: 2267489 - DNA, 25 bp, Homo sapien
cccaaggcgagcagagatcgtccgc

SEQ ID NO: 2267490 - DNA, 25 bp, Homo sapien
agcagagatcgtccgcgagtgcagc

SEQ ID NO: 2267491 - DNA, 25 bp, Homo sapien
cgagcagagatcgtccgcgagtgca

SEQ ID NO: 2267492 - DNA, 25 bp, Homo sapien
gagaaagtgggcgcctcctccggac

SEQ ID NO: 2267493 - DNA, 25 bp, Homo sapien
atcaggaaaggcatcgctaagtcaa

SEQ ID NO: 2267494 - DNA, 25 bp, Homo sapien
tcaggaaaggcatcgctaagtcaaa

SEQ ID NO: 2267495 - DNA, 25 bp, Homo sapien
acatgagagttgcaatcatcagtac

SEQ ID NO: 2267496 - DNA, 25 bp, Homo sapien
gggggcattaggtggtgctgggtca

SEQ ID NO: 2267497 - DNA, 25 bp, Homo sapien
ccaggtcggttggggtttggatctg

SEQ ID NO: 2267498 - DNA, 25 bp, Homo sapien
atctggctttggtttgggggcatta

SEQ ID NO: 2267499 - DNA, 25 bp, Homo sapien
ggggcattaggtggtgctgggtcac

SEQ ID NO: 2267500 - DNA, 25 bp, Homo sapien
ctccctcaccaaaggcatctgctaa

SEQ ID NO: 2267501 - DNA, 25 bp, Homo sapien
cctcaccaaaggcatctgctaagtc

SEQ ID NO: 2267502 - DNA, 25 bp, Homo sapien
tcaccaaaggcatctgctaagtcaa

SEQ ID NO: 2267503 - DNA, 25 bp, Homo sapien
tgtttcctccctcaccaaaggcatc

SEQ ID NO: 2267504 - DNA, 25 bp, Homo sapien
aatctcctcttctcagatgacacgg

SEQ ID NO: 2267505 - DNA, 25 bp, Homo sapien
agatgacacggacatcactgccagg

SEQ ID NO: 2267506 - DNA, 25 bp, Homo sapien
caacatagagaccaccccgtagggt

SEQ ID NO: 2267507 - DNA, 25 bp, Homo sapien
gctcttatcagtgaaaccaggtcag

SEQ ID NO: 2267508 - DNA, 25 bp, Homo sapien
tggagccccacgtgactaaatactt

SEQ ID NO: 2267509 - DNA, 25 bp, Homo sapien
caatactgacgggaaaacaccttag

SEQ ID NO: 2267510 - DNA, 25 bp, Homo sapien
ggtgaacaccaatatcggagacggt

SEQ ID NO: 2267511 - DNA, 25 bp, Homo sapien
caccttctgtgagggagaccctaag

SEQ ID NO: 2267512 - DNA, 25 bp, Homo sapien
tccatcacgaaaggcatctgctaag

SEQ ID NO: 2267513 - DNA, 25 bp, Homo sapien
cctccatcacgaaaggcatctgcta

SEQ ID NO: 2267514 - DNA, 25 bp, Homo sapien
atttcctccatcacgaaaggcatct

SEQ ID NO: 2267515 - DNA, 25 bp, Homo sapien
tcacgaaaggcatctgctaagtcaa

SEQ ID NO: 2267516 - DNA, 25 bp, Homo sapien
gggttcgcatttggcttcagcttgg

SEQ ID NO: 2267517 - DNA, 25 bp, Homo sapien
aggctgctcagggttcgcatttggc

SEQ ID NO: 2267518 - DNA, 25 bp, Homo sapien
tttggcttcagcttgggtgaattaa

SEQ ID NO: 2267519 - DNA, 25 bp, Homo sapien
tcagcttgggtgaattaagaggtgc

SEQ ID NO: 2267520 - DNA, 25 bp, Homo sapien
aaaaacagttgctagtcagattacc

SEQ ID NO: 2267521 - DNA, 25 bp, Homo sapien
ccatcacaatgccaagaggatatga

SEQ ID NO: 2267522 - DNA, 25 bp, Homo sapien
tacaaaaagtcaatagcaagcacct

SEQ ID NO: 2267523 - DNA, 25 bp, Homo sapien
cctgcccactggagtaactgtacaa

SEQ ID NO: 2267524 - DNA, 25 bp, Homo sapien
tgactctgccaacccatttatgctg

SEQ ID NO: 2267525 - DNA, 25 bp, Homo sapien
gggtgtctaaatagtgactctgcca

SEQ ID NO: 2267526 - DNA, 25 bp, Homo sapien
cagagtttgccttctagttttaagc

SEQ ID NO: 2267527 - DNA, 25 bp, Homo sapien
gctggacaaactgacgtgaaaactc

SEQ ID NO: 2267528 - DNA, 25 bp, Homo sapien
ctgcacatggttctctcctgttgat

SEQ ID NO: 2267529 - DNA, 25 bp, Homo sapien
ggatatccctctaaccagaatctca

SEQ ID NO: 2267530 - DNA, 25 bp, Homo sapien
gaaatggtctcgtaaacagatgcag

SEQ ID NO: 2267531 - DNA, 25 bp, Homo sapien
aagaacaaaagatgagagccagaga

SEQ ID NO: 2267532 - DNA, 25 bp, Homo sapien
acagagttggaattccaactctaac

SEQ ID NO: 2267533 - DNA, 25 bp, Homo sapien
tttgtcatgtaaggcatctgctaag

SEQ ID NO: 2267534 - DNA, 25 bp, Homo sapien
ggtccctgggtgatcgaacaagtca

SEQ ID NO: 2267535 - DNA, 25 bp, Homo sapien
aatatggcacccttgtaagcatggg

SEQ ID NO: 2267536 - DNA, 25 bp, Homo sapien
gatcagctacagaattggcaaggta

SEQ ID NO: 2267537 - DNA, 25 bp, Homo sapien
cactcatgaagcctaacttggccag

SEQ ID NO: 2267538 - DNA, 25 bp, Homo sapien
gtaaaagatgagagttgagattatg

SEQ ID NO: 2267539 - DNA, 25 bp, Homo sapien
ggtgggttcagtggtgctggctcgt

SEQ ID NO: 2267540 - DNA, 25 bp, Homo sapien
tcaccatgaagaaacatctgtgaaa

SEQ ID NO: 2267541 - DNA, 25 bp, Homo sapien
gaaacatctgtgaaatcaaagtcat

SEQ ID NO: 2267542 - DNA, 25 bp, Homo sapien
tgaagaaacatctgtgaaatcaaag

SEQ ID NO: 2267543 - DNA, 25 bp, Homo sapien
ccatgaagaaacatctgtgaaatca

SEQ ID NO: 2267544 - DNA, 25 bp, Homo sapien
caacagcagcgtgggatcagagcca

SEQ ID NO: 2267545 - DNA, 25 bp, Homo sapien
cctagggacactcgaagggacattt

SEQ ID NO: 2267546 - DNA, 25 bp, Homo sapien
gacattttcaagactgggcactgac

SEQ ID NO: 2267547 - DNA, 25 bp, Homo sapien
actttgcacttagctgccgaaggga

SEQ ID NO: 2267548 - DNA, 25 bp, Homo sapien
caatggtgcggttgctttgaaaagc

SEQ ID NO: 2267549 - DNA, 25 bp, Homo sapien
acatgggaggccgtttgaaatgccc

SEQ ID NO: 2267550 - DNA, 25 bp, Homo sapien
tatctgccttggacctgattctagg

SEQ ID NO: 2267551 - DNA, 25 bp, Homo sapien
gcctggcggatccttcaatggttaa

SEQ ID NO: 2267552 - DNA, 25 bp, Homo sapien
tacccccaagaactggaatctggaa

SEQ ID NO: 2267553 - DNA, 25 bp, Homo sapien
gaaaccttgagctgaatagttcaaa

SEQ ID NO: 2267554 - DNA, 25 bp, Homo sapien
gttgtcacaaactgggcatcttggg

SEQ ID NO: 2267555 - DNA, 25 bp, Homo sapien
tggaatctggaaagatctctgcctg

SEQ ID NO: 2267556 - DNA, 25 bp, Homo sapien
cctgaatgtgaagatcggtgaccga

SEQ ID NO: 2267557 - DNA, 25 bp, Homo sapien
gcccagtgaattgaagaatctccag

SEQ ID NO: 2267558 - DNA, 25 bp, Homo sapien
tgtacgagcctccatcagaggatag

SEQ ID NO: 2267559 - DNA, 25 bp, Homo sapien
taaatgtggaccctgggaacaagga

SEQ ID NO: 2267560 - DNA, 25 bp, Homo sapien
cccacagcccttctcctcctctttc

SEQ ID NO: 2267561 - DNA, 25 bp, Homo sapien
atttccccacagcccttctcctcct

SEQ ID NO: 2267562 - DNA, 25 bp, Homo sapien
cacagcccttctcctcctctttccc

SEQ ID NO: 2267563 - DNA, 25 bp, Homo sapien
ttccccacagcccttctcctcctct

SEQ ID NO: 2267564 - DNA, 25 bp, Homo sapien
acgcccagctagttgttgttttaag

SEQ ID NO: 2267565 - DNA, 25 bp, Homo sapien
gactgagtctcactccagcccgggc

SEQ ID NO: 2267566 - DNA, 25 bp, Homo sapien
cccagctagttgttgttttaagact

SEQ ID NO: 2267567 - DNA, 25 bp, Homo sapien
cagctagttgttgttttaagactga

SEQ ID NO: 2267568 - DNA, 25 bp, Homo sapien
gaacagatctcattaagcacaggag

SEQ ID NO: 2267569 - DNA, 25 bp, Homo sapien
gggtccctactcctgaggtcctgaa

SEQ ID NO: 2267570 - DNA, 25 bp, Homo sapien
tgagcatgcccacgagaggtctcag

SEQ ID NO: 2267571 - DNA, 25 bp, Homo sapien
gaatttcccctgtaccggtgagtga

SEQ ID NO: 2267572 - DNA, 25 bp, Homo sapien
cacactcctgtcttctccactgaga

SEQ ID NO: 2267573 - DNA, 25 bp, Homo sapien
gttggtctgccacactcctgtcttc

SEQ ID NO: 2267574 - DNA, 25 bp, Homo sapien
ttggtctgccacactcctgtcttct

SEQ ID NO: 2267575 - DNA, 25 bp, Homo sapien
actcctgtcttctccactgagattt

SEQ ID NO: 2267576 - DNA, 25 bp, Homo sapien
caggcgtgctgccaattaaagggac

SEQ ID NO: 2267577 - DNA, 25 bp, Homo sapien
ggcgtgctgccaattaaagggacag

SEQ ID NO: 2267578 - DNA, 25 bp, Homo sapien
aaagggacagctttgtggagctcca

SEQ ID NO: 2267579 - DNA, 25 bp, Homo sapien
cagctttgtggagctccagaagcat

SEQ ID NO: 2267580 - DNA, 25 bp, Homo sapien
taacctcattgtttatgggtggccc

SEQ ID NO: 2267581 - DNA, 25 bp, Homo sapien
tgacttcgggtaggtccaaaggcaa

SEQ ID NO: 2267582 - DNA, 25 bp, Homo sapien
tagctgaggctggttgacccatcca

SEQ ID NO: 2267583 - DNA, 25 bp, Homo sapien
taatggctctggaaccaatgtctcc

SEQ ID NO: 2267584 - DNA, 25 bp, Homo sapien
tgtgaaacccacgaacacggtcaac

SEQ ID NO: 2267585 - DNA, 25 bp, Homo sapien
tgtcaacagcaatgtgaaacccacg

SEQ ID NO: 2267586 - DNA, 25 bp, Homo sapien
cacgaacacggtcaacatcgtagag

SEQ ID NO: 2267587 - DNA, 25 bp, Homo sapien
attctttctggtatgtcaacagcaa

SEQ ID NO: 2267588 - DNA, 25 bp, Homo sapien
tgtgttctgagtggaggcatgcctc

SEQ ID NO: 2267589 - DNA, 25 bp, Homo sapien
cagacacttggtttgaagagatcca

SEQ ID NO: 2267590 - DNA, 25 bp, Homo sapien
tctatcggacaatgagtgaatggct

SEQ ID NO: 2267591 - DNA, 25 bp, Homo sapien
tgtctcagaactgctagaccagctg

SEQ ID NO: 2267592 - DNA, 25 bp, Homo sapien
ggtgtaaaatgactgtcactgaggg

SEQ ID NO: 2267593 - DNA, 25 bp, Homo sapien
ttatactaactaccaccaaggccat

SEQ ID NO: 2267594 - DNA, 25 bp, Homo sapien
gaagcatactatatttccagtgcaa

SEQ ID NO: 2267595 - DNA, 25 bp, Homo sapien
gattctacagtcaagagatccccat

SEQ ID NO: 2267596 - DNA, 25 bp, Homo sapien
tattttaatcggcacttcagctcag

SEQ ID NO: 2267597 - DNA, 25 bp, Homo sapien
tctgatgcaaggttgtcgcagttcc

SEQ ID NO: 2267598 - DNA, 25 bp, Homo sapien
cattctatgtagagcaggacttgag

SEQ ID NO: 2267599 - DNA, 25 bp, Homo sapien
acatttgttcctgggtaaagcagct

SEQ ID NO: 2267600 - DNA, 25 bp, Homo sapien
cactgctccttcccaaacaccgcac

SEQ ID NO: 2267601 - DNA, 25 bp, Homo sapien
tcactgctccttcccaaacaccgca

SEQ ID NO: 2267602 - DNA, 25 bp, Homo sapien
tttagagaggcaatgcgatcatcgc

SEQ ID NO: 2267603 - DNA, 25 bp, Homo sapien
gcccatgcctgtctagtggcctgta

SEQ ID NO: 2267604 - DNA, 25 bp, Homo sapien
ttctgtgagaccaaggtttctagac

SEQ ID NO: 2267605 - DNA, 25 bp, Homo sapien
tcatgtggtacttgtctttccgtgc

SEQ ID NO: 2267606 - DNA, 25 bp, Homo sapien
aacttggcccgtgtgcagaagtgcc

SEQ ID NO: 2267607 - DNA, 25 bp, Homo sapien
gattcctgcacccaatagagactgg

SEQ ID NO: 2267608 - DNA, 25 bp, Homo sapien
tctttagaactaagcagggtgcagc

SEQ ID NO: 2267609 - DNA, 25 bp, Homo sapien
tgttcagatcttcatgagcctgggc

SEQ ID NO: 2267610 - DNA, 25 bp, Homo sapien
gaatgggctaatacaggctcctact

SEQ ID NO: 2267611 - DNA, 25 bp, Homo sapien
ggttttgcaccatccccctcaatta

SEQ ID NO: 2267612 - DNA, 25 bp, Homo sapien
agtggcaagatgcttggtgctgtgc

SEQ ID NO: 2267613 - DNA, 25 bp, Homo sapien
aatatgtctagagagaaattttggc

SEQ ID NO: 2267614 - DNA, 25 bp, Homo sapien
ggacggtcccggagtgcagggcgtg

SEQ ID NO: 2267615 - DNA, 25 bp, Homo sapien
ggcaggacagatactcccccacggg

SEQ ID NO: 2267616 - DNA, 25 bp, Homo sapien
aggcggcaggacagatactccccca

SEQ ID NO: 2267617 - DNA, 25 bp, Homo sapien
tcccggagtgcagggcgtgggcgaa

SEQ ID NO: 2267618 - DNA, 25 bp, Homo sapien
ggggcggcgaccagaacacccagca

SEQ ID NO: 2267619 - DNA, 25 bp, Homo sapien
ctgggcccccgtgggcacagcgcgt

SEQ ID NO: 2267620 - DNA, 25 bp, Homo sapien
tgggcccccgtgggcacagcgcgtc

SEQ ID NO: 2267621 - DNA, 25 bp, Homo sapien
tgtaagagtttgcaactccgacaac

SEQ ID NO: 2267622 - DNA, 25 bp, Homo sapien
ttttctctctggaacggctccagga

SEQ ID NO: 2267623 - DNA, 25 bp, Homo sapien
gacaacaaacgctgacttttctctc

SEQ ID NO: 2267624 - DNA, 25 bp, Homo sapien
caaggccgccccacatgtaagagtt

SEQ ID NO: 2267625 - DNA, 25 bp, Homo sapien
ttataacataccacatccggcaggg

SEQ ID NO: 2267626 - DNA, 25 bp, Homo sapien
ccgccgcagatggacaatttggtaa

SEQ ID NO: 2267627 - DNA, 25 bp, Homo sapien
cacagcacgcgctgaaattcccgga

SEQ ID NO: 2267628 - DNA, 25 bp, Homo sapien
ctagcgattccaaatttaggcccgg

SEQ ID NO: 2267629 - DNA, 25 bp, Homo sapien
agatccatcagtgctgacggccagg

SEQ ID NO: 2267630 - DNA, 25 bp, Homo sapien
gatccatcagtgctgacggccaggc

SEQ ID NO: 2267631 - DNA, 25 bp, Homo sapien
atccatcagtgctgacggccaggcc

SEQ ID NO: 2267632 - DNA, 25 bp, Homo sapien
ggagatccatcagtgctgacggcca

SEQ ID NO: 2267633 - DNA, 25 bp, Homo sapien
tttacaatgatttttcaggtggctc

SEQ ID NO: 2267634 - DNA, 25 bp, Homo sapien
cctgagcccgggagacacaggtcgc

SEQ ID NO: 2267635 - DNA, 25 bp, Homo sapien
aataagaatgtaggacagttgattt

SEQ ID NO: 2267636 - DNA, 25 bp, Homo sapien
acttccaaataagaatgtaggacag

SEQ ID NO: 2267637 - DNA, 25 bp, Homo sapien
tagagcagctagaatccaagccact

SEQ ID NO: 2267638 - DNA, 25 bp, Homo sapien
cagaggtgaagcacggaagacagca

SEQ ID NO: 2267639 - DNA, 25 bp, Homo sapien
tctttgttgagggtactagagcagc

SEQ ID NO: 2267640 - DNA, 25 bp, Homo sapien
gaaaatccacatgggcctgggacat

SEQ ID NO: 2267641 - DNA, 25 bp, Homo sapien
gagggagcggaacaaaagctttgcc

SEQ ID NO: 2267642 - DNA, 25 bp, Homo sapien
tgcccatgcggcttctttagcaagg

SEQ ID NO: 2267643 - DNA, 25 bp, Homo sapien
gggtggctgcaagctactttcacag

SEQ ID NO: 2267644 - DNA, 25 bp, Homo sapien
tcctctcctctgttgaattttcttc

SEQ ID NO: 2267645 - DNA, 25 bp, Homo sapien
gaagaagacagctagcaacagcagc

SEQ ID NO: 2267646 - DNA, 25 bp, Homo sapien
gctgaattcatcgaagacagccctg

SEQ ID NO: 2267647 - DNA, 25 bp, Homo sapien
taaatgcctaacacttctctccgag

SEQ ID NO: 2267648 - DNA, 25 bp, Homo sapien
tctctccgagtgttcaattgctgag

SEQ ID NO: 2267649 - DNA, 25 bp, Homo sapien
cattacagtttaaggagcacagctc

SEQ ID NO: 2267650 - DNA, 25 bp, Homo sapien
caaacgtgtggtcaactctgcaggc

SEQ ID NO: 2267651 - DNA, 25 bp, Homo sapien
cacctgaagcgctttctcacaagta

SEQ ID NO: 2267652 - DNA, 25 bp, Homo sapien
ttttaaagcctacccatgtgatgca

SEQ ID NO: 2267653 - DNA, 25 bp, Homo sapien
atgaagacccgccactggcctgggt

SEQ ID NO: 2267654 - DNA, 25 bp, Homo sapien
ggacatcatttaagcagtgctctgt

SEQ ID NO: 2267655 - DNA, 25 bp, Homo sapien
aaatgtccaattcactcagccccag

SEQ ID NO: 2267656 - DNA, 25 bp, Homo sapien
tgtgtgctctttacttgctgctgag

SEQ ID NO: 2267657 - DNA, 25 bp, Homo sapien
ctagagtacagtagcatgatctcaa

SEQ ID NO: 2267658 - DNA, 25 bp, Homo sapien
aggctagagtacagtagcatgatct

SEQ ID NO: 2267659 - DNA, 25 bp, Homo sapien
ggctagagtacagtagcatgatctc

SEQ ID NO: 2267660 - DNA, 25 bp, Homo sapien
agagtacagtagcatgatctcaact

SEQ ID NO: 2267661 - DNA, 25 bp, Homo sapien
gggcatcggataaatcgaaaccacc

SEQ ID NO: 2267662 - DNA, 25 bp, Homo sapien
caggaagggcatcggataaatcgaa

SEQ ID NO: 2267663 - DNA, 25 bp, Homo sapien
gcatcggataaatcgaaaccaccat

SEQ ID NO: 2267664 - DNA, 25 bp, Homo sapien
gaagggcatcggataaatcgaaacc

SEQ ID NO: 2267665 - DNA, 25 bp, Homo sapien
acaccgagctgaggtttatacaacg

SEQ ID NO: 2267666 - DNA, 25 bp, Homo sapien
gaggtttatacaacgactcttgagc

SEQ ID NO: 2267667 - DNA, 25 bp, Homo sapien
ttatacaacgactcttgagcccaga

SEQ ID NO: 2267668 - DNA, 25 bp, Homo sapien
ccgagctgaggtttatacaacgact

SEQ ID NO: 2267669 - DNA, 25 bp, Homo sapien
tttcttggggattgcagtgggtttc

SEQ ID NO: 2267670 - DNA, 25 bp, Homo sapien
gattgcagtgggtttcttgttttca

SEQ ID NO: 2267671 - DNA, 25 bp, Homo sapien
cactgggtttcttggggattgcagt

SEQ ID NO: 2267672 - DNA, 25 bp, Homo sapien
cagcactgggtttcttggggattgc

SEQ ID NO: 2267673 - DNA, 25 bp, Homo sapien
taaaaagctaggagagaagctctca

SEQ ID NO: 2267674 - DNA, 25 bp, Homo sapien
gaaggaatgacctcgtgaacagatc

SEQ ID NO: 2267675 - DNA, 25 bp, Homo sapien
tatgtgctccgcaactgatgtgaca

SEQ ID NO: 2267676 - DNA, 25 bp, Homo sapien
aatgaattgtgttgcctggaccaag

SEQ ID NO: 2267677 - DNA, 25 bp, Homo sapien
acaacagcatctcctaagtcaaagt

SEQ ID NO: 2267678 - DNA, 25 bp, Homo sapien
acagcatctcctaagtcaaagtcat

SEQ ID NO: 2267679 - DNA, 25 bp, Homo sapien
cattttctccatcaacaacagcatc

SEQ ID NO: 2267680 - DNA, 25 bp, Homo sapien
gcatctcctaagtcaaagtcatccc

SEQ ID NO: 2267681 - DNA, 25 bp, Homo sapien
tggatttggcatcggtttgggtggg

SEQ ID NO: 2267682 - DNA, 25 bp, Homo sapien
gtggttggggtttggatttggcatc

SEQ ID NO: 2267683 - DNA, 25 bp, Homo sapien
tttggatttggcatcggtttgggtg

SEQ ID NO: 2267684 - DNA, 25 bp, Homo sapien
tggttggggtttggatttggcatcg

SEQ ID NO: 2267685 - DNA, 25 bp, Homo sapien
catccgcaaggtcagcatctgaaaa

SEQ ID NO: 2267686 - DNA, 25 bp, Homo sapien
ccatccgcaaggtcagcatctgaaa

SEQ ID NO: 2267687 - DNA, 25 bp, Homo sapien
caacgtctgcaatgggaaggtttgg

SEQ ID NO: 2267688 - DNA, 25 bp, Homo sapien
tcacagccaggaccgtgaagaggct

SEQ ID NO: 2267689 - DNA, 25 bp, Homo sapien
attcacagccaggaccgtgaagagg

SEQ ID NO: 2267690 - DNA, 25 bp, Homo sapien
aaaacaacgtctgcaatgggaaggt

SEQ ID NO: 2267691 - DNA, 25 bp, Homo sapien
tcttccccttctttcctgtggctgc

SEQ ID NO: 2267692 - DNA, 25 bp, Homo sapien
ccttctttcctgtggctgcctccac

SEQ ID NO: 2267693 - DNA, 25 bp, Homo sapien
cctgtggctgcctccaccatcactg

SEQ ID NO: 2267694 - DNA, 25 bp, Homo sapien
gcctccaccatcactgcctcctttt

SEQ ID NO: 2267695 - DNA, 25 bp, Homo sapien
agggccaagcgcaaccgaggatact

SEQ ID NO: 2267696 - DNA, 25 bp, Homo sapien
tcccacctggttactgacgttctca

SEQ ID NO: 2267697 - DNA, 25 bp, Homo sapien
tactgacgttctcaagggccaagcg

SEQ ID NO: 2267698 - DNA, 25 bp, Homo sapien
aaccgaggatactgcgtcacaagcc

SEQ ID NO: 2267699 - DNA, 25 bp, Homo sapien
tactttgtcacccaggctggagtgc

SEQ ID NO: 2267700 - DNA, 25 bp, Homo sapien
agagtcttgctctgttgcccaggct

SEQ ID NO: 2267701 - DNA, 25 bp, Homo sapien
tttttggcggggagacagagtcttg

SEQ ID NO: 2267702 - DNA, 25 bp, Homo sapien
ttttgaaatgcagtcttactttgtc

SEQ ID NO: 2267703 - DNA, 25 bp, Homo sapien
cacaatcccggggatcacgcctggg

SEQ ID NO: 2267704 - DNA, 25 bp, Homo sapien
caatgaagctagagatggctccagc

SEQ ID NO: 2267705 - DNA, 25 bp, Homo sapien
ttctttttctggtaagcaatgaagc

SEQ ID NO: 2267706 - DNA, 25 bp, Homo sapien
ggtaagcaatgaagctagagatggc

SEQ ID NO: 2267707 - DNA, 25 bp, Homo sapien
cagcttcacggcggatcccaataca

SEQ ID NO: 2267708 - DNA, 25 bp, Homo sapien
gcttcacggcggatcccaatacaag

SEQ ID NO: 2267709 - DNA, 25 bp, Homo sapien
tcccaatacaaggtcccaaagagcc

SEQ ID NO: 2267710 - DNA, 25 bp, Homo sapien
ccaatacaaggtcccaaagagcctg

SEQ ID NO: 2267711 - DNA, 25 bp, Homo sapien
gggaaataaacacgagcagctcatt

SEQ ID NO: 2267712 - DNA, 25 bp, Homo sapien
acacgagcagctcatttaaagtctt

SEQ ID NO: 2267713 - DNA, 25 bp, Homo sapien
cgctctaaataatgtttgtggatgt

SEQ ID NO: 2267714 - DNA, 25 bp, Homo sapien
ttaaagtcttgagatccgaaagctg

SEQ ID NO: 2267715 - DNA, 25 bp, Homo sapien
gcttttgttcttgaagaatctagga

SEQ ID NO: 2267716 - DNA, 25 bp, Homo sapien
tcttgaagaatctaggaaaattgtt

SEQ ID NO: 2267717 - DNA, 25 bp, Homo sapien
acctcgccaggacatatttgctttt

SEQ ID NO: 2267718 - DNA, 25 bp, Homo sapien
aggtgtcggccacctcgccaggaca

SEQ ID NO: 2267719 - DNA, 25 bp, Homo sapien
tccttaggacgtgagtgagcttaac

SEQ ID NO: 2267720 - DNA, 25 bp, Homo sapien
gataaaacgattacggtcaggacgc

SEQ ID NO: 2267721 - DNA, 25 bp, Homo sapien
caaaagcatatggaactgaaggcag

SEQ ID NO: 2267722 - DNA, 25 bp, Homo sapien
taaaacatggaagtcactgccctgt

SEQ ID NO: 2267723 - DNA, 25 bp, Homo sapien
gtgtgaatagggacctgaccaccca

SEQ ID NO: 2267724 - DNA, 25 bp, Homo sapien
gaggctccgtgctcaaatgtgtgaa

SEQ ID NO: 2267725 - DNA, 25 bp, Homo sapien
caagttggtggactttggaaacaga

SEQ ID NO: 2267726 - DNA, 25 bp, Homo sapien
atccaaggaagacggccgcagaggc

SEQ ID NO: 2267727 - DNA, 25 bp, Homo sapien
taaagtctcacaagggcaaagtcca

SEQ ID NO: 2267728 - DNA, 25 bp, Homo sapien
tctgtgagaaggtgaccagacccat

SEQ ID NO: 2267729 - DNA, 25 bp, Homo sapien
gaggatcaaaccatccgtgctcagc

SEQ ID NO: 2267730 - DNA, 25 bp, Homo sapien
tagaactacggctcaaccataaggg

SEQ ID NO: 2267731 - DNA, 25 bp, Homo sapien
tgtcatttgttctgccagtcacaag

SEQ ID NO: 2267732 - DNA, 25 bp, Homo sapien
agtcacaagttgtcaacacgggtgc

SEQ ID NO: 2267733 - DNA, 25 bp, Homo sapien
atgtcatttgttctgccagtcacaa

SEQ ID NO: 2267734 - DNA, 25 bp, Homo sapien
ttgtcaacacgggtgcattttgcag

SEQ ID NO: 2267735 - DNA, 25 bp, Homo sapien
agccagcagcgtaacttttaatgac

SEQ ID NO: 2267736 - DNA, 25 bp, Homo sapien
cagcctcgccagtttacgctacgtg

SEQ ID NO: 2267737 - DNA, 25 bp, Homo sapien
accgtgccaagccagcagcgtaact

SEQ ID NO: 2267738 - DNA, 25 bp, Homo sapien
gccagtttacgctacgtgaactcca

SEQ ID NO: 2267739 - DNA, 25 bp, Homo sapien
gaggctcagtgcaacagataaccca

SEQ ID NO: 2267740 - DNA, 25 bp, Homo sapien
cttcaacagggtaatccaagcagct

SEQ ID NO: 2267741 - DNA, 25 bp, Homo sapien
tgaggtcgacgctcctattgcttgg

SEQ ID NO: 2267742 - DNA, 25 bp, Homo sapien
gaggaacacgcacatggaagctctt

SEQ ID NO: 2267743 - DNA, 25 bp, Homo sapien
ggcattccggtggctctccatgtcc

SEQ ID NO: 2267744 - DNA, 25 bp, Homo sapien
ctggctctgcgttggcattccggtg

SEQ ID NO: 2267745 - DNA, 25 bp, Homo sapien
agctggctctgcgttggcattccgg

SEQ ID NO: 2267746 - DNA, 25 bp, Homo sapien
cagctggctctgcgttggcattccg

SEQ ID NO: 2267747 - DNA, 25 bp, Homo sapien
gagaccctgtctgggcaacctagtg

SEQ ID NO: 2267748 - DNA, 25 bp, Homo sapien
gagaaggttccaatgtatgcacaaa

SEQ ID NO: 2267749 - DNA, 25 bp, Homo sapien
ttcaaaagtggttctgatggcaaaa

SEQ ID NO: 2267750 - DNA, 25 bp, Homo sapien
aatgcctgccttttaccctgagaag

SEQ ID NO: 2267751 - DNA, 25 bp, Homo sapien
agaggtcgcaccactgcactccagc

SEQ ID NO: 2267752 - DNA, 25 bp, Homo sapien
gttgcagtgagcagaggtcgcacca

SEQ ID NO: 2267753 - DNA, 25 bp, Homo sapien
gaatcacttgacactgggaggcagg

SEQ ID NO: 2267754 - DNA, 25 bp, Homo sapien
gcctgggtgacagagagacactcca

SEQ ID NO: 2267755 - DNA, 25 bp, Homo sapien
caatcaatttcattgaatgatgcca

SEQ ID NO: 2267756 - DNA, 25 bp, Homo sapien
aaatgggcccaaaactcatcacgag

SEQ ID NO: 2267757 - DNA, 25 bp, Homo sapien
gcaaaaccctaaatctcaatcaatt

SEQ ID NO: 2267758 - DNA, 25 bp, Homo sapien
gaaaacagcagaaggcaatttccac

SEQ ID NO: 2267759 - DNA, 25 bp, Homo sapien
caactttcaggagccagtggtttta

SEQ ID NO: 2267760 - DNA, 25 bp, Homo sapien
tacaactttcaggagccagtggttt

SEQ ID NO: 2267761 - DNA, 25 bp, Homo sapien
gttcctacaactttcaggagccagt

SEQ ID NO: 2267762 - DNA, 25 bp, Homo sapien
acacagttcctacaactttcaggag

SEQ ID NO: 2267763 - DNA, 25 bp, Homo sapien
ggagacagagacaaaagaaagtcat

SEQ ID NO: 2267764 - DNA, 25 bp, Homo sapien
gacagagacaaaagaaagtcattcc

SEQ ID NO: 2267765 - DNA, 25 bp, Homo sapien
cagagacaaaagaaagtcattccca

SEQ ID NO: 2267766 - DNA, 25 bp, Homo sapien
agacaaaagaaagtcattcccaggt

SEQ ID NO: 2267767 - DNA, 25 bp, Homo sapien
tatttctctaaaagagtacgctgaa

SEQ ID NO: 2267768 - DNA, 25 bp, Homo sapien
ctatttctctaaaagagtacgctga

SEQ ID NO: 2267769 - DNA, 25 bp, Homo sapien
taaaacaaagaatccgccgtgaaca

SEQ ID NO: 2267770 - DNA, 25 bp, Homo sapien
gttagtaaacatcatccgcccagca

SEQ ID NO: 2267771 - DNA, 25 bp, Homo sapien
ggacttaataatggccagcctttca

SEQ ID NO: 2267772 - DNA, 25 bp, Homo sapien
gcaacaagcaaagcacatcgcaaga

SEQ ID NO: 2267773 - DNA, 25 bp, Homo sapien
gtgctcgatggacacgtgatttgta

SEQ ID NO: 2267774 - DNA, 25 bp, Homo sapien
gacgtgctcgatggacacgtgattt

SEQ ID NO: 2267775 - DNA, 25 bp, Homo sapien
cgtgctcgatggacacgtgatttgt

SEQ ID NO: 2267776 - DNA, 25 bp, Homo sapien
acgtgctcgatggacacgtgatttg

SEQ ID NO: 2267777 - DNA, 25 bp, Homo sapien
tgaaaaacaaatatccctacaaatg

SEQ ID NO: 2267778 - DNA, 25 bp, Homo sapien
caaatatccctacaaatgaaagaaa

SEQ ID NO: 2267779 - DNA, 25 bp, Homo sapien
tttattagtctgatatgaaaaacaa

SEQ ID NO: 2267780 - DNA, 25 bp, Homo sapien
aaacaaatatccctacaaatgaaag

SEQ ID NO: 2267781 - DNA, 25 bp, Homo sapien
atcttgtacatcttaggaagtacag

SEQ ID NO: 2267782 - DNA, 25 bp, Homo sapien
tatctggatgtagggagtacctgga

SEQ ID NO: 2267783 - DNA, 25 bp, Homo sapien
agtgttgggaaaatgcggtacatct

SEQ ID NO: 2267784 - DNA, 25 bp, Homo sapien
ggagtacctggatttagaggagtat

SEQ ID NO: 2267785 - DNA, 25 bp, Homo sapien
ggtgttaaaaactgactgctgcacg

SEQ ID NO: 2267786 - DNA, 25 bp, Homo sapien
gatatcatcagtacgtcctcagtcg

SEQ ID NO: 2267787 - DNA, 25 bp, Homo sapien
tagaagtttcgcaaatgcccaggac

SEQ ID NO: 2267788 - DNA, 25 bp, Homo sapien
cattctcaggatattgaagggcaca

SEQ ID NO: 2267789 - DNA, 25 bp, Homo sapien
cattcaactcgagaagtcatcctgt

SEQ ID NO: 2267790 - DNA, 25 bp, Homo sapien
gatgaaaagttagaacctcgcctgt

SEQ ID NO: 2267791 - DNA, 25 bp, Homo sapien
tatagatgaaaacctgttgtaaccc

SEQ ID NO: 2267792 - DNA, 25 bp, Homo sapien
tccatacacttggaggatgcggaag

SEQ ID NO: 2267793 - DNA, 25 bp, Homo sapien
gaactgccagaaacaaatgggctcc

SEQ ID NO: 2267794 - DNA, 25 bp, Homo sapien
gtggaaaatatgagcggaactgcca

SEQ ID NO: 2267795 - DNA, 25 bp, Homo sapien
ccaagcggattgtgagacccggcct

SEQ ID NO: 2267796 - DNA, 25 bp, Homo sapien
ccagccaagcggattgtgagacccg

SEQ ID NO: 2267797 - DNA, 25 bp, Homo sapien
gaacgcaagacagggaagtccccac

SEQ ID NO: 2267798 - DNA, 25 bp, Homo sapien
ttagaaaacacaggaacgcaagaca

SEQ ID NO: 2267799 - DNA, 25 bp, Homo sapien
ctcgggcgtgcattagaaaacacag

SEQ ID NO: 2267800 - DNA, 25 bp, Homo sapien
caagacagggaagtccccaccagct

SEQ ID NO: 2267801 - DNA, 25 bp, Homo sapien
tggtgcatgatctgctcctcggaac

SEQ ID NO: 2267802 - DNA, 25 bp, Homo sapien
gcatgatctgctcctcggaacccat

SEQ ID NO: 2267803 - DNA, 25 bp, Homo sapien
gagcaggccgccctggtgcatgatc

SEQ ID NO: 2267804 - DNA, 25 bp, Homo sapien
gctgcagacaccagagctgagcagg

SEQ ID NO: 2267805 - DNA, 25 bp, Homo sapien
cacatgacgccattgctttcacggg

SEQ ID NO: 2267806 - DNA, 25 bp, Homo sapien
ggagatgtcccaggtagacaacgct

SEQ ID NO: 2267807 - DNA, 25 bp, Homo sapien
ccaggtagacaacgctaactctggg

SEQ ID NO: 2267808 - DNA, 25 bp, Homo sapien
ctgtctccaaggtcgggttgcacat

SEQ ID NO: 2267809 - DNA, 25 bp, Homo sapien
aaagcagttaatctaatgaatgtgt

SEQ ID NO: 2267810 - DNA, 25 bp, Homo sapien
aaaagcagttaatctaatgaatgtg

SEQ ID NO: 2267811 - DNA, 25 bp, Homo sapien
gggcatctgccaaatcaaagtctct

SEQ ID NO: 2267812 - DNA, 25 bp, Homo sapien
ggcatctgccaaatcaaagtctctt

SEQ ID NO: 2267813 - DNA, 25 bp, Homo sapien
gacagggtaggattcaaccttcacc

SEQ ID NO: 2267814 - DNA, 25 bp, Homo sapien
ctccatgttggggtgagtcattaca

SEQ ID NO: 2267815 - DNA, 25 bp, Homo sapien
ccttgacagggtaggattcaacctt

SEQ ID NO: 2267816 - DNA, 25 bp, Homo sapien
tcaatctgccttgacagggtaggat

SEQ ID NO: 2267817 - DNA, 25 bp, Homo sapien
acagtcgccatgcaggtgactgtgg

SEQ ID NO: 2267818 - DNA, 25 bp, Homo sapien
tcttaaagcccaggcagtatagaca

SEQ ID NO: 2267819 - DNA, 25 bp, Homo sapien
gaaaagtgaattccccacagtcgcc

SEQ ID NO: 2267820 - DNA, 25 bp, Homo sapien
gcccaggcagtatagacagtgaaaa

SEQ ID NO: 2267821 - DNA, 25 bp, Homo sapien
gccaaagtagctgagaacatccaag

SEQ ID NO: 2267822 - DNA, 25 bp, Homo sapien
gtgacaaagccatacaaagtaaatg

SEQ ID NO: 2267823 - DNA, 25 bp, Homo sapien
aacatccaagacaagtaagtgagcc

SEQ ID NO: 2267824 - DNA, 25 bp, Homo sapien
ccatgaacgccctgatgaaaggtga

SEQ ID NO: 2267825 - DNA, 25 bp, Homo sapien
tctctttcatataccccacagttct

SEQ ID NO: 2267826 - DNA, 25 bp, Homo sapien
gctatctggtacagttgttgcatct

SEQ ID NO: 2267827 - DNA, 25 bp, Homo sapien
tcccctccgtaagcatcagttcaag

SEQ ID NO: 2267828 - DNA, 25 bp, Homo sapien
cagttcaaggacgttgcctcagttt

SEQ ID NO: 2267829 - DNA, 25 bp, Homo sapien
taaaagtgaataattcaggggcact

SEQ ID NO: 2267830 - DNA, 25 bp, Homo sapien
ggcagtcacgacattgcttctggtt

SEQ ID NO: 2267831 - DNA, 25 bp, Homo sapien
acctctgtgtacttccagaatgctt

SEQ ID NO: 2267832 - DNA, 25 bp, Homo sapien
ggttctagggattcacctattcttg

SEQ ID NO: 2267833 - DNA, 25 bp, Homo sapien
tatgctatcatcactctccaacagc

SEQ ID NO: 2267834 - DNA, 25 bp, Homo sapien
tcttgcttgatagtgaacatttcct

SEQ ID NO: 2267835 - DNA, 25 bp, Homo sapien
tgttggaaatctttatgctatcatc

SEQ ID NO: 2267836 - DNA, 25 bp, Homo sapien
caacagcaatttagctgcattttca

SEQ ID NO: 2267837 - DNA, 25 bp, Homo sapien
tatttcattaggcattgaagtgggt

SEQ ID NO: 2267838 - DNA, 25 bp, Homo sapien
tgtttttcccaatgtcacgatttta

SEQ ID NO: 2267839 - DNA, 25 bp, Homo sapien
gcattgaagtgggtaatgtttttcc

SEQ ID NO: 2267840 - DNA, 25 bp, Homo sapien
cacgattttactgatgtgaaataca

SEQ ID NO: 2267841 - DNA, 25 bp, Homo sapien
catttgaataccctcctggcccagg

SEQ ID NO: 2267842 - DNA, 25 bp, Homo sapien
agggacagtgttattcttctccata

SEQ ID NO: 2267843 - DNA, 25 bp, Homo sapien
agtgtatatgctgcccaaactagaa

SEQ ID NO: 2267844 - DNA, 25 bp, Homo sapien
ggcccagggacagtgttattcttct

SEQ ID NO: 2267845 - DNA, 25 bp, Homo sapien
gcaacgggaccgctacagccactgg

SEQ ID NO: 2267846 - DNA, 25 bp, Homo sapien
gccagctcaccgcagcaacgggacc

SEQ ID NO: 2267847 - DNA, 25 bp, Homo sapien
cgggaccgctacagccactggacaa

SEQ ID NO: 2267848 - DNA, 25 bp, Homo sapien
tcaccgcagcaacgggaccgctaca

SEQ ID NO: 2267849 - DNA, 25 bp, Homo sapien
tccaggatagagtgaagcgacccat

SEQ ID NO: 2267850 - DNA, 25 bp, Homo sapien
tcaagaatggagcaccagctaggcc

SEQ ID NO: 2267851 - DNA, 25 bp, Homo sapien
gaatcccagaatgcgaaactcagag

SEQ ID NO: 2267852 - DNA, 25 bp, Homo sapien
taagtatcgacctcgtcggaaggcg

SEQ ID NO: 2267853 - DNA, 25 bp, Homo sapien
tgttaagcgtattcaacagcgatga

SEQ ID NO: 2267854 - DNA, 25 bp, Homo sapien
cagctgtgcaagagaatattcccgc

SEQ ID NO: 2267855 - DNA, 25 bp, Homo sapien
catatgcttctgctatgttaagcgt

SEQ ID NO: 2267856 - DNA, 25 bp, Homo sapien
gcgatgattacagtccagctgtgca

SEQ ID NO: 2267857 - DNA, 25 bp, Homo sapien
ttatccctcttaaactggacgattc

SEQ ID NO: 2267858 - DNA, 25 bp, Homo sapien
gtgcgacgccactttatccctctta

SEQ ID NO: 2267859 - DNA, 25 bp, Homo sapien
gctctccatcctcgctcctgtgcga

SEQ ID NO: 2267860 - DNA, 25 bp, Homo sapien
tggacgattcagtagtaccggggaa

SEQ ID NO: 2267861 - DNA, 25 bp, Homo sapien
gcaactggacgctgtacctctccat

SEQ ID NO: 2267862 - DNA, 25 bp, Homo sapien
tgtggctgggcgcaactggacgctg

SEQ ID NO: 2267863 - DNA, 25 bp, Homo sapien
cagggtatcaggtgtagtgtggcgg

SEQ ID NO: 2267864 - DNA, 25 bp, Homo sapien
tgggccgcagggtatcaggtgtagt

SEQ ID NO: 2267865 - DNA, 25 bp, Homo sapien
ctgcggccccgaaactacacttaag

SEQ ID NO: 2267866 - DNA, 25 bp, Homo sapien
tggcaggcgtgatgaagcgccacac

SEQ ID NO: 2267867 - DNA, 25 bp, Homo sapien
tgcggccccgaaactacacttaaga

SEQ ID NO: 2267868 - DNA, 25 bp, Homo sapien
ggatggcaggcgtgatgaagcgcca

SEQ ID NO: 2267869 - DNA, 25 bp, Homo sapien
tcaaagtcccgctccagaggttcct

SEQ ID NO: 2267870 - DNA, 25 bp, Homo sapien
cccacgaggccggacggcactgcca

SEQ ID NO: 2267871 - DNA, 25 bp, Homo sapien
tccccatcgacacctcctcctgttc

SEQ ID NO: 2267872 - DNA, 25 bp, Homo sapien
tagtggttccgaggaagcggtcaaa

SEQ ID NO: 2267873 - DNA, 25 bp, Homo sapien
gagtgaattattagccctggttgag

SEQ ID NO: 2267874 - DNA, 25 bp, Homo sapien
gaatgtgtgctgtgaagaactcctt

SEQ ID NO: 2267875 - DNA, 25 bp, Homo sapien
ttactgctgtaaagggttcgcggct

SEQ ID NO: 2267876 - DNA, 25 bp, Homo sapien
tgtcacacactatcctaggagctgt

SEQ ID NO: 2267877 - DNA, 25 bp, Homo sapien
ctatgtaaccagcttgcccacgtac

SEQ ID NO: 2267878 - DNA, 25 bp, Homo sapien
cagcttgcccacgtaccccttgaac

SEQ ID NO: 2267879 - DNA, 25 bp, Homo sapien
tatgtaaccagcttgcccacgtacc

SEQ ID NO: 2267880 - DNA, 25 bp, Homo sapien
aaccagcttgcccacgtaccccttg

SEQ ID NO: 2267881 - DNA, 25 bp, Homo sapien
tcagggcattcttccggagggctgc

SEQ ID NO: 2267882 - DNA, 25 bp, Homo sapien
gctgcattccatcacgatatgaggg

SEQ ID NO: 2267883 - DNA, 25 bp, Homo sapien
tgcaacaggcatggaaacccatgat

SEQ ID NO: 2267884 - DNA, 25 bp, Homo sapien
tgatctgtcctgcttatcattttca

SEQ ID NO: 2267885 - DNA, 25 bp, Homo sapien
ggtcctaattgacaaggctgctatg

SEQ ID NO: 2267886 - DNA, 25 bp, Homo sapien
ggtggtcctaattgacaaggctgct

SEQ ID NO: 2267887 - DNA, 25 bp, Homo sapien
taaaggaggtggtcctaattgacaa

SEQ ID NO: 2267888 - DNA, 25 bp, Homo sapien
taattgacaaggctgctatggaaaa

SEQ ID NO: 2267889 - DNA, 25 bp, Homo sapien
cttgctttggattagctcgtgatga

SEQ ID NO: 2267890 - DNA, 25 bp, Homo sapien
ctttggattagctcgtgatgatggc

SEQ ID NO: 2267891 - DNA, 25 bp, Homo sapien
ttggattagctcgtgatgatggctg

SEQ ID NO: 2267892 - DNA, 25 bp, Homo sapien
tgctttggattagctcgtgatgatg

SEQ ID NO: 2267893 - DNA, 25 bp, Homo sapien
tgccaatcgtgagaaataacctata

SEQ ID NO: 2267894 - DNA, 25 bp, Homo sapien
tacaggtgtcagttatgccgcagga

SEQ ID NO: 2267895 - DNA, 25 bp, Homo sapien
tccttgtgactgtgacatgctgtga

SEQ ID NO: 2267896 - DNA, 25 bp, Homo sapien
gaaacagcacgatttaggagcctta

SEQ ID NO: 2267897 - DNA, 25 bp, Homo sapien
cagatgagtgagaagtttagttccg

SEQ ID NO: 2267898 - DNA, 25 bp, Homo sapien
caaagtctgttgtcgtaaaccgcag

SEQ ID NO: 2267899 - DNA, 25 bp, Homo sapien
agaatctgttcttttccggtgcaac

SEQ ID NO: 2267900 - DNA, 25 bp, Homo sapien
taaaccgcaggaagtcagatgagtg

SEQ ID NO: 2267901 - DNA, 25 bp, Homo sapien
ctttttcaaatgatggaggcagata

SEQ ID NO: 2267902 - DNA, 25 bp, Homo sapien
tttttcaaatgatggaggcagatat

SEQ ID NO: 2267903 - DNA, 25 bp, Homo sapien
ttttcaaatgatggaggcagatata

SEQ ID NO: 2267904 - DNA, 25 bp, Homo sapien
gcacaacgagacacactcttctcag

SEQ ID NO: 2267905 - DNA, 25 bp, Homo sapien
gagcacaacgagacacactcttctc

SEQ ID NO: 2267906 - DNA, 25 bp, Homo sapien
cagaccgagcacaacgagacacact

SEQ ID NO: 2267907 - DNA, 25 bp, Homo sapien
accgagcacaacgagacacactctt

SEQ ID NO: 2267908 - DNA, 25 bp, Homo sapien
gctgcttcaacgtgtgaaaataagc

SEQ ID NO: 2267909 - DNA, 25 bp, Homo sapien
tggcgggtctccctagcatccgtca

SEQ ID NO: 2267910 - DNA, 25 bp, Homo sapien
tccctagcatccgtcaagagagcgt

SEQ ID NO: 2267911 - DNA, 25 bp, Homo sapien
tgcttcaacgtgtgaaaataagcta

SEQ ID NO: 2267912 - DNA, 25 bp, Homo sapien
tcggcgctgcaacacgctttaagtg

SEQ ID NO: 2267913 - DNA, 25 bp, Homo sapien
gcaacacgctttaagtgcttcttgg

SEQ ID NO: 2267914 - DNA, 25 bp, Homo sapien
atgcttcggcgctgcaacacgcttt

SEQ ID NO: 2267915 - DNA, 25 bp, Homo sapien
cgctgcaacacgctttaagtgcttc

SEQ ID NO: 2267916 - DNA, 25 bp, Homo sapien
aatacacccgttagtttgtcaagca

SEQ ID NO: 2267917 - DNA, 25 bp, Homo sapien
atacacccgttagtttgtcaagcat

SEQ ID NO: 2267918 - DNA, 25 bp, Homo sapien
ctgaggaagacgatcagaggaagac

SEQ ID NO: 2267919 - DNA, 25 bp, Homo sapien
agaggaagacattccctcagcttgt

SEQ ID NO: 2267920 - DNA, 25 bp, Homo sapien
gaggaagacgatcagaggaagacat

SEQ ID NO: 2267921 - DNA, 25 bp, Homo sapien
tcagaggaagacattccctcagctt

SEQ ID NO: 2267922 - DNA, 25 bp, Homo sapien
aattttgatgaaacgttgcatacat

SEQ ID NO: 2267923 - DNA, 25 bp, Homo sapien
ttgatgaaacgttgcatacatatct

SEQ ID NO: 2267924 - DNA, 25 bp, Homo sapien
ttttgatgaaacgttgcatacatat

SEQ ID NO: 2267925 - DNA, 25 bp, Homo sapien
tttgatgaaacgttgcatacatatc

SEQ ID NO: 2267926 - DNA, 25 bp, Homo sapien
tgcggtgaacagcaaaacggccctt

SEQ ID NO: 2267927 - DNA, 25 bp, Homo sapien
ctgtgatgcggtgaacagcaaaacg

SEQ ID NO: 2267928 - DNA, 25 bp, Homo sapien
tgatgcggtgaacagcaaaacggcc

SEQ ID NO: 2267929 - DNA, 25 bp, Homo sapien
gatgcggtgaacagcaaaacggccc

SEQ ID NO: 2267930 - DNA, 25 bp, Homo sapien
caaagtgaaataacacaggagtgga

SEQ ID NO: 2267931 - DNA, 25 bp, Homo sapien
tataacgggcttcagagactcagac

SEQ ID NO: 2267932 - DNA, 25 bp, Homo sapien
tgttgaatagcactctaccacaaga

SEQ ID NO: 2267933 - DNA, 25 bp, Homo sapien
tgttcaatgtacactactaaggtga

SEQ ID NO: 2267934 - DNA, 25 bp, Homo sapien
ggttcactaagggtaagactggcca

SEQ ID NO: 2267935 - DNA, 25 bp, Homo sapien
tcagagttcggattgagtcctgcaa

SEQ ID NO: 2267936 - DNA, 25 bp, Homo sapien
gatcttgggtcctctcgcttagtag

SEQ ID NO: 2267937 - DNA, 25 bp, Homo sapien
tgcaagtaggcaggctcaaagccac

SEQ ID NO: 2267938 - DNA, 25 bp, Homo sapien
caagggacaattaggctgactgagc

SEQ ID NO: 2267939 - DNA, 25 bp, Homo sapien
cgtatctttgggctctcaggactaa

SEQ ID NO: 2267940 - DNA, 25 bp, Homo sapien
taaggcctggatcctatgcagtcaa

SEQ ID NO: 2267941 - DNA, 25 bp, Homo sapien
tacaataaatgaactcgaggagcca

SEQ ID NO: 2267942 - DNA, 25 bp, Homo sapien
gaatctgtttcagaaccctctggtg

SEQ ID NO: 2267943 - DNA, 25 bp, Homo sapien
tcctcggtcagagaaggagtgctct

SEQ ID NO: 2267944 - DNA, 25 bp, Homo sapien
caattgatagtcctcaatgggcaac

SEQ ID NO: 2267945 - DNA, 25 bp, Homo sapien
tctggagcggtggtaacaaagagcc

SEQ ID NO: 2267946 - DNA, 25 bp, Homo sapien
accaggtgagggattcccttcactc

SEQ ID NO: 2267947 - DNA, 25 bp, Homo sapien
tcccacagtaatcttcctcactttg

SEQ ID NO: 2267948 - DNA, 25 bp, Homo sapien
atctgggtagcggatggttcgagca

SEQ ID NO: 2267949 - DNA, 25 bp, Homo sapien
gggattcccttcactcccacagtaa

SEQ ID NO: 2267950 - DNA, 25 bp, Homo sapien
taaagttgattatcttgccagtccc

SEQ ID NO: 2267951 - DNA, 25 bp, Homo sapien
atttgataaagttgattatcttgcc

SEQ ID NO: 2267952 - DNA, 25 bp, Homo sapien
gttgattatcttgccagtccctaaa

SEQ ID NO: 2267953 - DNA, 25 bp, Homo sapien
ttgataaagttgattatcttgccag

SEQ ID NO: 2267954 - DNA, 25 bp, Homo sapien
aaaggcctttaactggatggctagc

SEQ ID NO: 2267955 - DNA, 25 bp, Homo sapien
aggcaggcccctgatgatttttcaa

SEQ ID NO: 2267956 - DNA, 25 bp, Homo sapien
caaagatggcatggaacagcactgg

SEQ ID NO: 2267957 - DNA, 25 bp, Homo sapien
tatactatctaggacacaggctacc

SEQ ID NO: 2267958 - DNA, 25 bp, Homo sapien
accaacacgaccgaggttggctcca

SEQ ID NO: 2267959 - DNA, 25 bp, Homo sapien
gaccgaggttggctccaccaatcac

SEQ ID NO: 2267960 - DNA, 25 bp, Homo sapien
acgaccgaggttggctccaccaatc

SEQ ID NO: 2267961 - DNA, 25 bp, Homo sapien
aacacgaccgaggttggctccacca

SEQ ID NO: 2267962 - DNA, 25 bp, Homo sapien
gatgtctttccctgttggtgatcac

SEQ ID NO: 2267963 - DNA, 25 bp, Homo sapien
tcaaaagaaccaggatgtctttccc

SEQ ID NO: 2267964 - DNA, 25 bp, Homo sapien
accaggatgtctttccctgttggtg

SEQ ID NO: 2267965 - DNA, 25 bp, Homo sapien
tccttcacatgcaccacatcaaaag

SEQ ID NO: 2267966 - DNA, 25 bp, Homo sapien
caaaaatgttggaaagcctcgtggc

SEQ ID NO: 2267967 - DNA, 25 bp, Homo sapien
aaaatgttggaaagcctcgtggcaa

SEQ ID NO: 2267968 - DNA, 25 bp, Homo sapien
tgacaaaaatgttggaaagcctcgt

SEQ ID NO: 2267969 - DNA, 25 bp, Homo sapien
gacaaaaatgttggaaagcctcgtg

SEQ ID NO: 2267970 - DNA, 25 bp, Homo sapien
agagagcttgctgcactctgtgaac

SEQ ID NO: 2267971 - DNA, 25 bp, Homo sapien
taaatagagagcttgctgcactctg

SEQ ID NO: 2267972 - DNA, 25 bp, Homo sapien
gctctaaatagagagcttgctgcac

SEQ ID NO: 2267973 - DNA, 25 bp, Homo sapien
gagagcttgctgcactctgtgaacc

SEQ ID NO: 2267974 - DNA, 25 bp, Homo sapien
ccaagttgggtgatcaccaggtcag

SEQ ID NO: 2267975 - DNA, 25 bp, Homo sapien
taaaggcaaggccactaacttcagg

SEQ ID NO: 2267976 - DNA, 25 bp, Homo sapien
tatcctaaggactgccagggtacaa

SEQ ID NO: 2267977 - DNA, 25 bp, Homo sapien
aagcttttcagttggccaggcgtcg

SEQ ID NO: 2267978 - DNA, 25 bp, Homo sapien
ggtggccagcctcttatctctctct

SEQ ID NO: 2267979 - DNA, 25 bp, Homo sapien
tgtttggtggccagcctcttatctc

SEQ ID NO: 2267980 - DNA, 25 bp, Homo sapien
agtaagtcgaatgccctttcccctg

SEQ ID NO: 2267981 - DNA, 25 bp, Homo sapien
ttcagcaacagtaagtcgaatgccc

SEQ ID NO: 2267982 - DNA, 25 bp, Homo sapien
aaaaaagatatgctgctactgcaat

SEQ ID NO: 2267983 - DNA, 25 bp, Homo sapien
aaaaaaagatatgctgctactgcaa

SEQ ID NO: 2267984 - DNA, 25 bp, Homo sapien
gaaaaaaagatatgctgctactgca

SEQ ID NO: 2267985 - DNA, 25 bp, Homo sapien
catagcttccacaaaagaatgccgt

SEQ ID NO: 2267986 - DNA, 25 bp, Homo sapien
ggtggtattcctagagatcttaaga

SEQ ID NO: 2267987 - DNA, 25 bp, Homo sapien
cactctgcccacagagatggtgtgg

SEQ ID NO: 2267988 - DNA, 25 bp, Homo sapien
catgtatgagggaagcaaaggttta

SEQ ID NO: 2267989 - DNA, 25 bp, Homo sapien
gatttgttggcatcgctccttgtca

SEQ ID NO: 2267990 - DNA, 25 bp, Homo sapien
cacagttggtgtcaggagcatggtt

SEQ ID NO: 2267991 - DNA, 25 bp, Homo sapien
caatagtttggagttgcagtagtcc

SEQ ID NO: 2267992 - DNA, 25 bp, Homo sapien
gataagctctcttgcatgccaaaca

SEQ ID NO: 2267993 - DNA, 25 bp, Homo sapien
gctctatagacactacttgcttcct

SEQ ID NO: 2267994 - DNA, 25 bp, Homo sapien
cacattcgcaagtatttttgttgag

SEQ ID NO: 2267995 - DNA, 25 bp, Homo sapien
tatagacactacttgcttccttcat

SEQ ID NO: 2267996 - DNA, 25 bp, Homo sapien
aacaagctctatagacactacttgc

SEQ ID NO: 2267997 - DNA, 25 bp, Homo sapien
tttacatctgacaagtctatttcaa

SEQ ID NO: 2267998 - DNA, 25 bp, Homo sapien
tatttacatctgacaagtctatttc

SEQ ID NO: 2267999 - DNA, 25 bp, Homo sapien
gaaatatttacatctgacaagtcta

SEQ ID NO: 2268000 - DNA, 25 bp, Homo sapien
tacatctgacaagtctatttcaagg

SEQ ID NO: 2268001 - DNA, 25 bp, Homo sapien
taccattttattgcaatgcacttaa

SEQ ID NO: 2268002 - DNA, 25 bp, Homo sapien
caaaaacagtgatagcaattttctc

SEQ ID NO: 2268003 - DNA, 25 bp, Homo sapien
acttaaacccattggatatatccaa

SEQ ID NO: 2268004 - DNA, 25 bp, Homo sapien
tggtagagaaccaacacttgtgaga

SEQ ID NO: 2268005 - DNA, 25 bp, Homo sapien
gctggagtttccgtcacaacgttcc

SEQ ID NO: 2268006 - DNA, 25 bp, Homo sapien
tacttgcgcaccaccgccttagttg

SEQ ID NO: 2268007 - DNA, 25 bp, Homo sapien
tgccatctccggtggacctgggatt

SEQ ID NO: 2268008 - DNA, 25 bp, Homo sapien
ccttagttggttgcgtgcaggcaag

SEQ ID NO: 2268009 - DNA, 25 bp, Homo sapien
tgcaggacggcctttctctggagca

SEQ ID NO: 2268010 - DNA, 25 bp, Homo sapien
tgtgcgggcggtcggcgacagcggc

SEQ ID NO: 2268011 - DNA, 25 bp, Homo sapien
ccgacggatgtgcgggcggtcggcg

SEQ ID NO: 2268012 - DNA, 25 bp, Homo sapien
cgggtgctgcaggacggcctttctc

SEQ ID NO: 2268013 - DNA, 25 bp, Homo sapien
tacgggacgccgaccaggccacaaa

SEQ ID NO: 2268014 - DNA, 25 bp, Homo sapien
gggacgccgaccaggccacaaacag

SEQ ID NO: 2268015 - DNA, 25 bp, Homo sapien
aaacaggttactgcgcgcgcactag

SEQ ID NO: 2268016 - DNA, 25 bp, Homo sapien
aggccacaaacaggttactgcgcgc

SEQ ID NO: 2268017 - DNA, 25 bp, Homo sapien
ctcctcggggcctgttcggcgccga

SEQ ID NO: 2268018 - DNA, 25 bp, Homo sapien
gcctgttcggcgccgagcgccacgc

SEQ ID NO: 2268019 - DNA, 25 bp, Homo sapien
cctgttcggcgccgagcgccacgcc

SEQ ID NO: 2268020 - DNA, 25 bp, Homo sapien
tcggggcctgttcggcgccgagcgc

SEQ ID NO: 2268021 - DNA, 25 bp, Homo sapien
atcaactgccttccggacaaacggg

SEQ ID NO: 2268022 - DNA, 25 bp, Homo sapien
gctcagggcaactggataatcacta

SEQ ID NO: 2268023 - DNA, 25 bp, Homo sapien
gcagtggtgtcgaccccaggtccat

SEQ ID NO: 2268024 - DNA, 25 bp, Homo sapien
aggtccatcaactgccttccggaca

SEQ ID NO: 2268025 - DNA, 25 bp, Homo sapien
agcagcaggcgcctagcagccgcca

SEQ ID NO: 2268026 - DNA, 25 bp, Homo sapien
ttttttccagataccgccttcaaga

SEQ ID NO: 2268027 - DNA, 25 bp, Homo sapien
ctcaaggatcataaccgaatttttt

SEQ ID NO: 2268028 - DNA, 25 bp, Homo sapien
acactctcaatactccccagcagca

SEQ ID NO: 2268029 - DNA, 25 bp, Homo sapien
tatggcgacaaaggcaagggccgcc

SEQ ID NO: 2268030 - DNA, 25 bp, Homo sapien
aagggaacgagcacgccctgttgcg

SEQ ID NO: 2268031 - DNA, 25 bp, Homo sapien
tcacctaaagcgtagccgacactgc

SEQ ID NO: 2268032 - DNA, 25 bp, Homo sapien
gtctggaacgtacgcgcgcatatgg

SEQ ID NO: 2268033 - DNA, 25 bp, Homo sapien
tagactctcggaagggcacagagcc

SEQ ID NO: 2268034 - DNA, 25 bp, Homo sapien
cgcccgaacggacgcctgcggcatg

SEQ ID NO: 2268035 - DNA, 25 bp, Homo sapien
ctgctgaaacgggtggctgtagact

SEQ ID NO: 2268036 - DNA, 25 bp, Homo sapien
gctgaggggcgaaatgaccccggcg

SEQ ID NO: 2268037 - DNA, 25 bp, Homo sapien
ctttaattctcattagtcacagctc

SEQ ID NO: 2268038 - DNA, 25 bp, Homo sapien
gcctttaattctcattagtcacagc

SEQ ID NO: 2268039 - DNA, 25 bp, Homo sapien
ggcctttaattctcattagtcacag

SEQ ID NO: 2268040 - DNA, 25 bp, Homo sapien
cctttaattctcattagtcacagct

SEQ ID NO: 2268041 - DNA, 25 bp, Homo sapien
aatgagtttggctcttgtggctgca

SEQ ID NO: 2268042 - DNA, 25 bp, Homo sapien
tggctcttgtggctgcaattcaaat

SEQ ID NO: 2268043 - DNA, 25 bp, Homo sapien
ctattccatcaaaaaatgagtttgg

SEQ ID NO: 2268044 - DNA, 25 bp, Homo sapien
tattccatcaaaaaatgagtttggc

SEQ ID NO: 2268045 - DNA, 25 bp, Homo sapien
tgaaactatgtcactcgtcagagga

SEQ ID NO: 2268046 - DNA, 25 bp, Homo sapien
tatcttgctggtccactgagatccc

SEQ ID NO: 2268047 - DNA, 25 bp, Homo sapien
tgagatcccgctggcatctatgact

SEQ ID NO: 2268048 - DNA, 25 bp, Homo sapien
catgcatggattcactcgttaaaac

SEQ ID NO: 2268049 - DNA, 25 bp, Homo sapien
gattttagtaacagaatgactacag

SEQ ID NO: 2268050 - DNA, 25 bp, Homo sapien
gggattttagtaacagaatgactac

SEQ ID NO: 2268051 - DNA, 25 bp, Homo sapien
gtcagggattttagtaacagaatga

SEQ ID NO: 2268052 - DNA, 25 bp, Homo sapien
cagggattttagtaacagaatgact

SEQ ID NO: 2268053 - DNA, 25 bp, Homo sapien
tgaactggtcaattaggataactaa

SEQ ID NO: 2268054 - DNA, 25 bp, Homo sapien
tccaaagaccgtagtaatgaactgg

SEQ ID NO: 2268055 - DNA, 25 bp, Homo sapien
aaatgacacaatgattccgtaagtt

SEQ ID NO: 2268056 - DNA, 25 bp, Homo sapien
taagttgtaaccatattaacgtaga

SEQ ID NO: 2268057 - DNA, 25 bp, Homo sapien
tatcagaaaactaggccataatggt

SEQ ID NO: 2268058 - DNA, 25 bp, Homo sapien
taaaatcattaagcaggttcagagg

SEQ ID NO: 2268059 - DNA, 25 bp, Homo sapien
gaggtaaatgcctactctccctgtg

SEQ ID NO: 2268060 - DNA, 25 bp, Homo sapien
gaaaatgcctgcacaactcttttgc

SEQ ID NO: 2268061 - DNA, 25 bp, Homo sapien
gctgtgcaagcaacaccactaattg

SEQ ID NO: 2268062 - DNA, 25 bp, Homo sapien
gaaatcgctgtaccatttagctact

SEQ ID NO: 2268063 - DNA, 25 bp, Homo sapien
gaaaatttctatcaccctcacaaga

SEQ ID NO: 2268064 - DNA, 25 bp, Homo sapien
tattccacacaacactatccacgaa

SEQ ID NO: 2268065 - DNA, 25 bp, Homo sapien
caggcattgccatcaagcattgtta

SEQ ID NO: 2268066 - DNA, 25 bp, Homo sapien
tacaggcattgccatcaagcattgt

SEQ ID NO: 2268067 - DNA, 25 bp, Homo sapien
gcattgccatcaagcattgttaatt

SEQ ID NO: 2268068 - DNA, 25 bp, Homo sapien
ttacaggcattgccatcaagcattg

SEQ ID NO: 2268069 - DNA, 25 bp, Homo sapien
cactgcatccagcttaccaatgttc

SEQ ID NO: 2268070 - DNA, 25 bp, Homo sapien
aatgtcctactagtaaattcagtac

SEQ ID NO: 2268071 - DNA, 25 bp, Homo sapien
gaagatctgaaaaataatgtcctac

SEQ ID NO: 2268072 - DNA, 25 bp, Homo sapien
tcagtacacactagtcctaatatat

SEQ ID NO: 2268073 - DNA, 25 bp, Homo sapien
tgacttcaggacaagtgctatccac

SEQ ID NO: 2268074 - DNA, 25 bp, Homo sapien
cactttacaaggatccatttctgat

SEQ ID NO: 2268075 - DNA, 25 bp, Homo sapien
ttcaggacaagtgctatccacttta

SEQ ID NO: 2268076 - DNA, 25 bp, Homo sapien
tttctgattctgcatcgatggtcac

SEQ ID NO: 2268077 - DNA, 25 bp, Homo sapien
ggaacacgaatactgctgttctgat

SEQ ID NO: 2268078 - DNA, 25 bp, Homo sapien
ctctccacaatgtctacagttccac

SEQ ID NO: 2268079 - DNA, 25 bp, Homo sapien
cctgggaacacgaatactgctgttc

SEQ ID NO: 2268080 - DNA, 25 bp, Homo sapien
tccctgggaacacgaatactgctgt

SEQ ID NO: 2268081 - DNA, 25 bp, Homo sapien
gcccatgcaattggtacgaaggttt

SEQ ID NO: 2268082 - DNA, 25 bp, Homo sapien
atttgctgctcatgcacagcagctg

SEQ ID NO: 2268083 - DNA, 25 bp, Homo sapien
tgcaattggtacgaaggttttcatt

SEQ ID NO: 2268084 - DNA, 25 bp, Homo sapien
tgctgcccatgcaattggtacgaag

SEQ ID NO: 2268085 - DNA, 25 bp, Homo sapien
aagaagtcctgacactcatgaatga

SEQ ID NO: 2268086 - DNA, 25 bp, Homo sapien
cacagaattacacaacattataaat

SEQ ID NO: 2268087 - DNA, 25 bp, Homo sapien
acaatgtgcattaaaacacagaatt

SEQ ID NO: 2268088 - DNA, 25 bp, Homo sapien
tgtgcattaaaacacagaattacac

SEQ ID NO: 2268089 - DNA, 25 bp, Homo sapien
ggcacttgcagtgccattccggttt

SEQ ID NO: 2268090 - DNA, 25 bp, Homo sapien
aggccagcagactcatctatgtgca

SEQ ID NO: 2268091 - DNA, 25 bp, Homo sapien
catctatgtgcaagagggcacttgc

SEQ ID NO: 2268092 - DNA, 25 bp, Homo sapien
cattccggttttcaattccatcaga

SEQ ID NO: 2268093 - DNA, 25 bp, Homo sapien
tgctttctcagttccgacgggtgtc

SEQ ID NO: 2268094 - DNA, 25 bp, Homo sapien
catctcacacttatgaggatagtct

SEQ ID NO: 2268095 - DNA, 25 bp, Homo sapien
gaaagcctttctcgcacatctcaca

SEQ ID NO: 2268096 - DNA, 25 bp, Homo sapien
ggtatggattcgcatgtgctttctc

SEQ ID NO: 2268097 - DNA, 25 bp, Homo sapien
aaagagacagcgttccttcacagga

SEQ ID NO: 2268098 - DNA, 25 bp, Homo sapien
tcaggtagggacatgtataaaggct

SEQ ID NO: 2268099 - DNA, 25 bp, Homo sapien
caagaacaggatcatgaaggacagt

SEQ ID NO: 2268100 - DNA, 25 bp, Homo sapien
tacaatttgtacagaggaagggaca

SEQ ID NO: 2268101 - DNA, 25 bp, Homo sapien
cgaggtcctgtagcacactgttcct

SEQ ID NO: 2268102 - DNA, 25 bp, Homo sapien
tggaatcaggagaccggagagacca

SEQ ID NO: 2268103 - DNA, 25 bp, Homo sapien
tctgttgtgctgtcagagagcggca

SEQ ID NO: 2268104 - DNA, 25 bp, Homo sapien
tcctgatagcatgcctggagtcacg

SEQ ID NO: 2268105 - DNA, 25 bp, Homo sapien
tagtgctgcctgatcctcgggtctt

SEQ ID NO: 2268106 - DNA, 25 bp, Homo sapien
tctaactctgataggcctctgctgg

SEQ ID NO: 2268107 - DNA, 25 bp, Homo sapien
caggacgattgtatttaggtggcca

SEQ ID NO: 2268108 - DNA, 25 bp, Homo sapien
cagtgactgtcatcgggccaagatc

SEQ ID NO: 2268109 - DNA, 25 bp, Homo sapien
tgtcagctcagagacaaaagcatcg

SEQ ID NO: 2268110 - DNA, 25 bp, Homo sapien
tgtcactatataggctataagtttt

SEQ ID NO: 2268111 - DNA, 25 bp, Homo sapien
tttcccatctaaagataggcctctt

SEQ ID NO: 2268112 - DNA, 25 bp, Homo sapien
ggatagagggacagatttactcttc

SEQ ID NO: 2268113 - DNA, 25 bp, Homo sapien
ataaacacgtatgcacttaacacag

SEQ ID NO: 2268114 - DNA, 25 bp, Homo sapien
gactggtacaacactgtaagtcaac

SEQ ID NO: 2268115 - DNA, 25 bp, Homo sapien
ttcaataacagataggaccaacaag

SEQ ID NO: 2268116 - DNA, 25 bp, Homo sapien
taagcagcagagtagacctctaatg

SEQ ID NO: 2268117 - DNA, 25 bp, Homo sapien
ttaccacccgcactgagtctcttaa

SEQ ID NO: 2268118 - DNA, 25 bp, Homo sapien
tggatggccattaccacccgcactg

SEQ ID NO: 2268119 - DNA, 25 bp, Homo sapien
tcttaactgtgagcactgaaatgta

SEQ ID NO: 2268120 - DNA, 25 bp, Homo sapien
caagtgcattcttgtcgtagcccat

SEQ ID NO: 2268121 - DNA, 25 bp, Homo sapien
cagcagagtgggttgaaggtacaac

SEQ ID NO: 2268122 - DNA, 25 bp, Homo sapien
caacaggagaagaagtccccgtcaa

SEQ ID NO: 2268123 - DNA, 25 bp, Homo sapien
acaacaggagaagaagtccccgtca

SEQ ID NO: 2268124 - DNA, 25 bp, Homo sapien
gggttgaaggtacaacaggagaaga

SEQ ID NO: 2268125 - DNA, 25 bp, Homo sapien
tgttgacagtctcctttgttgggca

SEQ ID NO: 2268126 - DNA, 25 bp, Homo sapien
gaggacttaatcagaaattctttgc

SEQ ID NO: 2268127 - DNA, 25 bp, Homo sapien
cacaatttattgactatggagcctt

SEQ ID NO: 2268128 - DNA, 25 bp, Homo sapien
ccaaatttgctgaagatcaggtggt

SEQ ID NO: 2268129 - DNA, 25 bp, Homo sapien
cagacttgtccgtagtttctttcta

SEQ ID NO: 2268130 - DNA, 25 bp, Homo sapien
tctgatgttcagacttgtccgtagt

SEQ ID NO: 2268131 - DNA, 25 bp, Homo sapien
caaagtatcccagcgtgtccggaat

SEQ ID NO: 2268132 - DNA, 25 bp, Homo sapien
tctactggtggatgtgtggtctcac

SEQ ID NO: 2268133 - DNA, 25 bp, Homo sapien
gtccaacatagaggggctgcatctg

SEQ ID NO: 2268134 - DNA, 25 bp, Homo sapien
agtccaacatagaggggctgcatct

SEQ ID NO: 2268135 - DNA, 25 bp, Homo sapien
tttctgtttgagctcttgtatcatt

SEQ ID NO: 2268136 - DNA, 25 bp, Homo sapien
tattttctgtttgagctcttgtatc

SEQ ID NO: 2268137 - DNA, 25 bp, Homo sapien
ttatgaaattgttgtagtgaaaatt

SEQ ID NO: 2268138 - DNA, 25 bp, Homo sapien
attatgaaattgttgtagtgaaaat

SEQ ID NO: 2268139 - DNA, 25 bp, Homo sapien
cataagagaacacagtctagtggcc

SEQ ID NO: 2268140 - DNA, 25 bp, Homo sapien
cctagtgcccagagtagttagtcat

SEQ ID NO: 2268141 - DNA, 25 bp, Homo sapien
aagttgttcaaaagagagctcccca

SEQ ID NO: 2268142 - DNA, 25 bp, Homo sapien
gagaccccatggtatctgagacctt

SEQ ID NO: 2268143 - DNA, 25 bp, Homo sapien
ccttgagtggttgtagcacatttct

SEQ ID NO: 2268144 - DNA, 25 bp, Homo sapien
tctgtttgcagaccttgagtggttg

SEQ ID NO: 2268145 - DNA, 25 bp, Homo sapien
aataggaatctgtttgcagaccttg

SEQ ID NO: 2268146 - DNA, 25 bp, Homo sapien
cagaccttgagtggttgtagcacat

SEQ ID NO: 2268147 - DNA, 25 bp, Homo sapien
gtaggacaaatgactacaaaatggc

SEQ ID NO: 2268148 - DNA, 25 bp, Homo sapien
taatcaagcttaatgcacatatcag

SEQ ID NO: 2268149 - DNA, 25 bp, Homo sapien
ttaatctttagctgtaggacaaatg

SEQ ID NO: 2268150 - DNA, 25 bp, Homo sapien
taagtatggcacataggacatgaaa

SEQ ID NO: 2268151 - DNA, 25 bp, Homo sapien
gagcataaccataggctgacgctat

SEQ ID NO: 2268152 - DNA, 25 bp, Homo sapien
ccctccggtcttgataatgccatga

SEQ ID NO: 2268153 - DNA, 25 bp, Homo sapien
tgttttgaatatagtgagcatgcac

SEQ ID NO: 2268154 - DNA, 25 bp, Homo sapien
tgccatgacaactcatatcaagtag

SEQ ID NO: 2268155 - DNA, 25 bp, Homo sapien
tgactgctgttgagagcgccactgg

SEQ ID NO: 2268156 - DNA, 25 bp, Homo sapien
agtcatgtaggcaacatgtaacaac

SEQ ID NO: 2268157 - DNA, 25 bp, Homo sapien
ttgaattaccattgtttatgactgc

SEQ ID NO: 2268158 - DNA, 25 bp, Homo sapien
tcttaatctatatctcttgttccag

SEQ ID NO: 2268159 - DNA, 25 bp, Homo sapien
atattgttttatgcccaattatgtg

SEQ ID NO: 2268160 - DNA, 25 bp, Homo sapien
gtgtaatactatcagtagaatgttg

SEQ ID NO: 2268161 - DNA, 25 bp, Homo sapien
cctggtttcggctagagagttctgt

SEQ ID NO: 2268162 - DNA, 25 bp, Homo sapien
tgtcgtagtctaagtttgtaggtct

SEQ ID NO: 2268163 - DNA, 25 bp, Homo sapien
gaaccaactcctagattcgttgatt

SEQ ID NO: 2268164 - DNA, 25 bp, Homo sapien
ggcatttagtgtcataaacttcctt

SEQ ID NO: 2268165 - DNA, 25 bp, Homo sapien
cctcaaatggtgatgctcggttgct

SEQ ID NO: 2268166 - DNA, 25 bp, Homo sapien
ctcggttgctcatctgatatctttc

SEQ ID NO: 2268167 - DNA, 25 bp, Homo sapien
tctgtttgcaagtgacgtgtacaca

SEQ ID NO: 2268168 - DNA, 25 bp, Homo sapien
ttttagcatgttcaaaagtcagcca

SEQ ID NO: 2268169 - DNA, 25 bp, Homo sapien
ggtgcatatctcaaaaacgtgtgtc

SEQ ID NO: 2268170 - DNA, 25 bp, Homo sapien
agttttaagatgtcaggtacacacc

SEQ ID NO: 2268171 - DNA, 25 bp, Homo sapien
gaaatcattcccaagcccaatgtca

SEQ ID NO: 2268172 - DNA, 25 bp, Homo sapien
gatcacttgaccacataccgatggg

SEQ ID NO: 2268173 - DNA, 25 bp, Homo sapien
tacaacatttgttgaagagtctatc

SEQ ID NO: 2268174 - DNA, 25 bp, Homo sapien
gattccctcataggttgacttctag

SEQ ID NO: 2268175 - DNA, 25 bp, Homo sapien
cattagcatagagtgtaaatgctgc

SEQ ID NO: 2268176 - DNA, 25 bp, Homo sapien
ttcattagcatagagtgtaaatgct

SEQ ID NO: 2268177 - DNA, 25 bp, Homo sapien
ttagcatagagtgtaaatgctgcca

SEQ ID NO: 2268178 - DNA, 25 bp, Homo sapien
tagcatagagtgtaaatgctgccat

SEQ ID NO: 2268179 - DNA, 25 bp, Homo sapien
atctaaaccacttgcattgattcct

SEQ ID NO: 2268180 - DNA, 25 bp, Homo sapien
ttccaaactgtcacatctaaaccac

SEQ ID NO: 2268181 - DNA, 25 bp, Homo sapien
tccaaactgtcacatctaaaccact

SEQ ID NO: 2268182 - DNA, 25 bp, Homo sapien
ctaaaccacttgcattgattcctca

SEQ ID NO: 2268183 - DNA, 25 bp, Homo sapien
caaattggtggcttgggtaataaca

SEQ ID NO: 2268184 - DNA, 25 bp, Homo sapien
ttttcattacccatagatggacagg

SEQ ID NO: 2268185 - DNA, 25 bp, Homo sapien
tcaaatatgcatagactaggatagc

SEQ ID NO: 2268186 - DNA, 25 bp, Homo sapien
tatcaatttagtagggctcgaccac

SEQ ID NO: 2268187 - DNA, 25 bp, Homo sapien
caatgtgcgaaatgactggcaacac

SEQ ID NO: 2268188 - DNA, 25 bp, Homo sapien
gaaaatagaagctttacctccactg

SEQ ID NO: 2268189 - DNA, 25 bp, Homo sapien
cacagttcttgtacctacctaacat

SEQ ID NO: 2268190 - DNA, 25 bp, Homo sapien
gccataaaacactcattagctggag

SEQ ID NO: 2268191 - DNA, 25 bp, Homo sapien
caccaaatgtctgaatctgtggttc

SEQ ID NO: 2268192 - DNA, 25 bp, Homo sapien
ttggccccattggttcctcagccaa

SEQ ID NO: 2268193 - DNA, 25 bp, Homo sapien
gagcaggattaccaaggcaacaact

SEQ ID NO: 2268194 - DNA, 25 bp, Homo sapien
tctgtggttcctctcatactgagca

SEQ ID NO: 2268195 - DNA, 25 bp, Homo sapien
tgcccatgccctactggttggtccg

SEQ ID NO: 2268196 - DNA, 25 bp, Homo sapien
atccgacccagaagctcatctgact

SEQ ID NO: 2268197 - DNA, 25 bp, Homo sapien
tcagtaacaataaccaagatttccc

SEQ ID NO: 2268198 - DNA, 25 bp, Homo sapien
catctgacttcacctctcagtaaca

SEQ ID NO: 2268199 - DNA, 25 bp, Homo sapien
taatgttgtgcgactttttccttag

SEQ ID NO: 2268200 - DNA, 25 bp, Homo sapien
aagaccacaaaaaactaggctggca

SEQ ID NO: 2268201 - DNA, 25 bp, Homo sapien
caagactgggtccttatcacaagac

SEQ ID NO: 2268202 - DNA, 25 bp, Homo sapien
gacactgtaccagataataatgttg

SEQ ID NO: 2268203 - DNA, 25 bp, Homo sapien
ttgcactccaggacagagcgagacc

SEQ ID NO: 2268204 - DNA, 25 bp, Homo sapien
gaggcagaggaaggtggattgcctg

SEQ ID NO: 2268205 - DNA, 25 bp, Homo sapien
ttagcctggcgtgttggcgtgtgcc

SEQ ID NO: 2268206 - DNA, 25 bp, Homo sapien
ccattgcactccaggacagagcgag

SEQ ID NO: 2268207 - DNA, 25 bp, Homo sapien
tgtgaagtactagagacagcagcat

SEQ ID NO: 2268208 - DNA, 25 bp, Homo sapien
cgaagcaggcgagtacatgtgaagt

SEQ ID NO: 2268209 - DNA, 25 bp, Homo sapien
gacgtccgaagcaggcgagtacatg

SEQ ID NO: 2268210 - DNA, 25 bp, Homo sapien
cgagtacatgtgaagtactagagac

SEQ ID NO: 2268211 - DNA, 25 bp, Homo sapien
tccatgtagcaatatctgtactctg

SEQ ID NO: 2268212 - DNA, 25 bp, Homo sapien
gaagctggcggacgggatgacggag

SEQ ID NO: 2268213 - DNA, 25 bp, Homo sapien
actccccaggccggcacatgggtga

SEQ ID NO: 2268214 - DNA, 25 bp, Homo sapien
gctgtccaccgcctggaagaagctg

SEQ ID NO: 2268215 - DNA, 25 bp, Homo sapien
cggctcaatggccaatatatcagta

SEQ ID NO: 2268216 - DNA, 25 bp, Homo sapien
aagagcattcggctcaatggccaat

SEQ ID NO: 2268217 - DNA, 25 bp, Homo sapien
cattcggctcaatggccaatatatc

SEQ ID NO: 2268218 - DNA, 25 bp, Homo sapien
ctcaatggccaatatatcagtaaca

SEQ ID NO: 2268219 - DNA, 25 bp, Homo sapien
tctttgttagtggtgtcagcatgct

SEQ ID NO: 2268220 - DNA, 25 bp, Homo sapien
cagcatgctctaatactgcaaggcc

SEQ ID NO: 2268221 - DNA, 25 bp, Homo sapien
gcatagcagtttccgcattcatgta

SEQ ID NO: 2268222 - DNA, 25 bp, Homo sapien
gcaaattgacgagctgaaaggactt

SEQ ID NO: 2268223 - DNA, 25 bp, Homo sapien
agccatcatcatgattacatttgat

SEQ ID NO: 2268224 - DNA, 25 bp, Homo sapien
cagccatcatcatgattacatttga

SEQ ID NO: 2268225 - DNA, 25 bp, Homo sapien
tgattacatttgatgtgggtcacat

SEQ ID NO: 2268226 - DNA, 25 bp, Homo sapien
tcagccatcatcatgattacatttg

SEQ ID NO: 2268227 - DNA, 25 bp, Homo sapien
catctccaagggaccacaaaataaa

SEQ ID NO: 2268228 - DNA, 25 bp, Homo sapien
tcaaagacttcataagattcacatc

SEQ ID NO: 2268229 - DNA, 25 bp, Homo sapien
ttccatcaatatatcatcagtgttg

SEQ ID NO: 2268230 - DNA, 25 bp, Homo sapien
catcaatatatcatcagtgttgttc

SEQ ID NO: 2268231 - DNA, 25 bp, Homo sapien
cacatccccgtactcagtgaaaaca

SEQ ID NO: 2268232 - DNA, 25 bp, Homo sapien
atccccgtactcagtgaaaacaatg

SEQ ID NO: 2268233 - DNA, 25 bp, Homo sapien
acatccccgtactcagtgaaaacaa

SEQ ID NO: 2268234 - DNA, 25 bp, Homo sapien
tcacatccccgtactcagtgaaaac

SEQ ID NO: 2268235 - DNA, 25 bp, Homo sapien
aaaattgccacaagccccacttggt

SEQ ID NO: 2268236 - DNA, 25 bp, Homo sapien
ttatatcaaaagaacctgtgcaaaa

SEQ ID NO: 2268237 - DNA, 25 bp, Homo sapien
tgggaagctgctccaaaattgccac

SEQ ID NO: 2268238 - DNA, 25 bp, Homo sapien
tcaaaagaacctgtgcaaaattcca

SEQ ID NO: 2268239 - DNA, 25 bp, Homo sapien
catctccaagggaccacaaaataaa

SEQ ID NO: 2268240 - DNA, 25 bp, Homo sapien
tcaaagacttcataagattcacatc

SEQ ID NO: 2268241 - DNA, 25 bp, Homo sapien
ttccatcaatatatcatcagtgttg

SEQ ID NO: 2268242 - DNA, 25 bp, Homo sapien
catcaatatatcatcagtgttgttc

SEQ ID NO: 2268243 - DNA, 25 bp, Homo sapien
gagagatgatatccaacatagtagg

SEQ ID NO: 2268244 - DNA, 25 bp, Homo sapien
aaggcacttcaggtcctttgacaca

SEQ ID NO: 2268245 - DNA, 25 bp, Homo sapien
tcctttgacacaagaagatgaggtt

SEQ ID NO: 2268246 - DNA, 25 bp, Homo sapien
aacatagtaggagatctgtgaaggc

SEQ ID NO: 2268247 - DNA, 25 bp, Homo sapien
ctaaaaactgtgtatgggaagaact

SEQ ID NO: 2268248 - DNA, 25 bp, Homo sapien
gggaagaacttacctcagcctaata

SEQ ID NO: 2268249 - DNA, 25 bp, Homo sapien
gaggccagcattattcggatactac

SEQ ID NO: 2268250 - DNA, 25 bp, Homo sapien
cggatactacaaccagacgaagaca

SEQ ID NO: 2268251 - DNA, 25 bp, Homo sapien
agagcacactcccagaggtcgctga

SEQ ID NO: 2268252 - DNA, 25 bp, Homo sapien
gagcacactcccagaggtcgctgac

SEQ ID NO: 2268253 - DNA, 25 bp, Homo sapien
tgagagcacactcccagaggtcgct

SEQ ID NO: 2268254 - DNA, 25 bp, Homo sapien
ctgagagcacactcccagaggtcgc

SEQ ID NO: 2268255 - DNA, 25 bp, Homo sapien
tatgccccacagctccccaacttca

SEQ ID NO: 2268256 - DNA, 25 bp, Homo sapien
tgccccacagctccccaacttcact

SEQ ID NO: 2268257 - DNA, 25 bp, Homo sapien
aggtacagaacagcaacagatttta

SEQ ID NO: 2268258 - DNA, 25 bp, Homo sapien
tacagaacagcaacagattttatgc

SEQ ID NO: 2268259 - DNA, 25 bp, Homo sapien
ttcttttgagagcaccactcccaga

SEQ ID NO: 2268260 - DNA, 25 bp, Homo sapien
catcgttgaaccgtatcaaagtgaa

SEQ ID NO: 2268261 - DNA, 25 bp, Homo sapien
gtccgaagctttgaagcactacttg

SEQ ID NO: 2268262 - DNA, 25 bp, Homo sapien
cgaagctttgaagcactacttggca

SEQ ID NO: 2268263 - DNA, 25 bp, Homo sapien
gttgaaccgtatcaaagtgaacagt

SEQ ID NO: 2268264 - DNA, 25 bp, Homo sapien
ccttggactctgatatctagttgtg

SEQ ID NO: 2268265 - DNA, 25 bp, Homo sapien
tcagggatcttttagtaatgtggaa

SEQ ID NO: 2268266 - DNA, 25 bp, Homo sapien
accgcagccggccaaatatttcttg

SEQ ID NO: 2268267 - DNA, 25 bp, Homo sapien
catgtggaaatcacccgataagtca

SEQ ID NO: 2268268 - DNA, 25 bp, Homo sapien
accacgaccagccaaaatctttgtc

SEQ ID NO: 2268269 - DNA, 25 bp, Homo sapien
ctgttgtttccgagaaagacaaaca

SEQ ID NO: 2268270 - DNA, 25 bp, Homo sapien
tgttgtttccgagaaagacaaacag

SEQ ID NO: 2268271 - DNA, 25 bp, Homo sapien
gttgtttccgagaaagacaaacagc

SEQ ID NO: 2268272 - DNA, 25 bp, Homo sapien
gcgttatttctcgacatgattgagg

SEQ ID NO: 2268273 - DNA, 25 bp, Homo sapien
tgtgctctggtaaggcaagaactct

SEQ ID NO: 2268274 - DNA, 25 bp, Homo sapien
gctttgggtcttcgccgggctgtct

SEQ ID NO: 2268275 - DNA, 25 bp, Homo sapien
caagaactctgcctgtatctgcgtt

SEQ ID NO: 2268276 - DNA, 25 bp, Homo sapien
tccagtcgcggaggatcttaacgga

SEQ ID NO: 2268277 - DNA, 25 bp, Homo sapien
tcttcttctgaagggtaggccttaa

SEQ ID NO: 2268278 - DNA, 25 bp, Homo sapien
tgaagggtaggccttaaaccgatgc

SEQ ID NO: 2268279 - DNA, 25 bp, Homo sapien
aaaccgatgcttatacatccagtcg

SEQ ID NO: 2268280 - DNA, 25 bp, Homo sapien
ccgggagaatgcgtctgcgagcatt

SEQ ID NO: 2268281 - DNA, 25 bp, Homo sapien
acagacgcctcggtgctctgcaggt

SEQ ID NO: 2268282 - DNA, 25 bp, Homo sapien
tctacgctgttgaagcatatccggg

SEQ ID NO: 2268283 - DNA, 25 bp, Homo sapien
tgcccgttttgtggccaatgatggg

SEQ ID NO: 2268284 - DNA, 25 bp, Homo sapien
ggccacaggggcaggctttgtacat

SEQ ID NO: 2268285 - DNA, 25 bp, Homo sapien
cacaggggcaggctttgtacattgt

SEQ ID NO: 2268286 - DNA, 25 bp, Homo sapien
ggcaggctttgtacattgtctggac

SEQ ID NO: 2268287 - DNA, 25 bp, Homo sapien
caggggcaggctttgtacattgtct

SEQ ID NO: 2268288 - DNA, 25 bp, Homo sapien
cgactccggatctggttgcttctct

SEQ ID NO: 2268289 - DNA, 25 bp, Homo sapien
agtgatagaaatcttgacctttttc

SEQ ID NO: 2268290 - DNA, 25 bp, Homo sapien
tcatggattaggctcttgcttcttc

SEQ ID NO: 2268291 - DNA, 25 bp, Homo sapien
gctgcatcgactagcagcaggaagc

SEQ ID NO: 2268292 - DNA, 25 bp, Homo sapien
ttgtactgctgcatcgactagcagc

SEQ ID NO: 2268293 - DNA, 25 bp, Homo sapien
gaacataaacaggtttaccacagta

SEQ ID NO: 2268294 - DNA, 25 bp, Homo sapien
agatggaggcgaatttggagactgt

SEQ ID NO: 2268295 - DNA, 25 bp, Homo sapien
atggaggcgaatttggagactgtca

SEQ ID NO: 2268296 - DNA, 25 bp, Homo sapien
ggtacagatggaggcgaatttggag

SEQ ID NO: 2268297 - DNA, 25 bp, Homo sapien
tggaggcgaatttggagactgtcat

SEQ ID NO: 2268298 - DNA, 25 bp, Homo sapien
aactgttctggaccaatctctttct

SEQ ID NO: 2268299 - DNA, 25 bp, Homo sapien
aaactgttctggaccaatctctttc

SEQ ID NO: 2268300 - DNA, 25 bp, Homo sapien
gaattgcagtagcaggtattcccaa

SEQ ID NO: 2268301 - DNA, 25 bp, Homo sapien
aattgcagtagcaggtattcccaaa

SEQ ID NO: 2268302 - DNA, 25 bp, Homo sapien
atattatcattaggttagcgaccat

SEQ ID NO: 2268303 - DNA, 25 bp, Homo sapien
tattatcattaggttagcgaccatt

SEQ ID NO: 2268304 - DNA, 25 bp, Homo sapien
tatcattaggttagcgaccattttg

SEQ ID NO: 2268305 - DNA, 25 bp, Homo sapien
taacgttccccaaaaaatctcatga

SEQ ID NO: 2268306 - DNA, 25 bp, Homo sapien
gaagttgatccatatatttaaatct

SEQ ID NO: 2268307 - DNA, 25 bp, Homo sapien
cacccggtaagagagttttgtatat

SEQ ID NO: 2268308 - DNA, 25 bp, Homo sapien
taagagagttttgtatatcgatgaa

SEQ ID NO: 2268309 - DNA, 25 bp, Homo sapien
gagttttgtatatcgatgaagttga

SEQ ID NO: 2268310 - DNA, 25 bp, Homo sapien
gattggtggcatcacctgaagtgtt

SEQ ID NO: 2268311 - DNA, 25 bp, Homo sapien
ctggattggtggcatcacctgaagt

SEQ ID NO: 2268312 - DNA, 25 bp, Homo sapien
ttccacagtgaaccacaacagcaac

SEQ ID NO: 2268313 - DNA, 25 bp, Homo sapien
tggtggcatcacctgaagtgttaaa

SEQ ID NO: 2268314 - DNA, 25 bp, Homo sapien
tccttaggaatgacactgtagccta

SEQ ID NO: 2268315 - DNA, 25 bp, Homo sapien
ttacatccttaggaatgacactgta

SEQ ID NO: 2268316 - DNA, 25 bp, Homo sapien
gatatcgatatggttaatagaattc

SEQ ID NO: 2268317 - DNA, 25 bp, Homo sapien
tgccatagttggttgatatcgatat

SEQ ID NO: 2268318 - DNA, 25 bp, Homo sapien
gagaagtgcttatcatcaacatcct

SEQ ID NO: 2268319 - DNA, 25 bp, Homo sapien
actcaatatcatcagagaagtgctt

SEQ ID NO: 2268320 - DNA, 25 bp, Homo sapien
caatatcatcagagaagtgcttatc

SEQ ID NO: 2268321 - DNA, 25 bp, Homo sapien
agagaagtgcttatcatcaacatcc

SEQ ID NO: 2268322 - DNA, 25 bp, Homo sapien
ctcctacacattcaagacttatcat

SEQ ID NO: 2268323 - DNA, 25 bp, Homo sapien
aattcttctcctacacattcaagac

SEQ ID NO: 2268324 - DNA, 25 bp, Homo sapien
taaattcttctcctacacattcaag

SEQ ID NO: 2268325 - DNA, 25 bp, Homo sapien
tcttctcctacacattcaagactta

SEQ ID NO: 2268326 - DNA, 25 bp, Homo sapien
tctgactgaaaagtttaaatgaagc

SEQ ID NO: 2268327 - DNA, 25 bp, Homo sapien
tcattctgactgaaaagtttaaatg

SEQ ID NO: 2268328 - DNA, 25 bp, Homo sapien
tctgctcctttgtgaacatatgctg

SEQ ID NO: 2268329 - DNA, 25 bp, Homo sapien
ttgtgaacatatgctgcttcattct

SEQ ID NO: 2268330 - DNA, 25 bp, Homo sapien
tctctgtggaagtatttcaaaactt

SEQ ID NO: 2268331 - DNA, 25 bp, Homo sapien
acactagcgtacattgttccattca

SEQ ID NO: 2268332 - DNA, 25 bp, Homo sapien
atcctctctgtggaagtatttcaaa

SEQ ID NO: 2268333 - DNA, 25 bp, Homo sapien
tctcccacaacactagcgtacattg

SEQ ID NO: 2268334 - DNA, 25 bp, Homo sapien
catatgtttcttttcattttcatgt

SEQ ID NO: 2268335 - DNA, 25 bp, Homo sapien
gatcatatgtttcttttcattttca

SEQ ID NO: 2268336 - DNA, 25 bp, Homo sapien
tcagatcatatgtttcttttcattt

SEQ ID NO: 2268337 - DNA, 25 bp, Homo sapien
cagatcatatgtttcttttcatttt

SEQ ID NO: 2268338 - DNA, 25 bp, Homo sapien
tcaagctgctttttgcaccatcacc

SEQ ID NO: 2268339 - DNA, 25 bp, Homo sapien
cctcctcctcaagctgctttttgca

SEQ ID NO: 2268340 - DNA, 25 bp, Homo sapien
ctcctcaagctgctttttgcaccat

SEQ ID NO: 2268341 - DNA, 25 bp, Homo sapien
aagctgctttttgcaccatcaccac

SEQ ID NO: 2268342 - DNA, 25 bp, Homo sapien
tccatctgttggacgaactcgaaga

SEQ ID NO: 2268343 - DNA, 25 bp, Homo sapien
ccaccatgggctagggagtaacagt

SEQ ID NO: 2268344 - DNA, 25 bp, Homo sapien
gagtaacagtcccttacaatttcca

SEQ ID NO: 2268345 - DNA, 25 bp, Homo sapien
gcaacagcgttgcaagatggcagcc

SEQ ID NO: 2268346 - DNA, 25 bp, Homo sapien
caagttgaaatatagacattcccgt

SEQ ID NO: 2268347 - DNA, 25 bp, Homo sapien
cacttgaatgtgttgatcacagatc

SEQ ID NO: 2268348 - DNA, 25 bp, Homo sapien
cattcccgttacaagaatcaaggag

SEQ ID NO: 2268349 - DNA, 25 bp, Homo sapien
caaggagtattctgccaaggaagga

SEQ ID NO: 2268350 - DNA, 25 bp, Homo sapien
ttcattcttaatggtggtaatcact

SEQ ID NO: 2268351 - DNA, 25 bp, Homo sapien
cattcttaatggtggtaatcacttc

SEQ ID NO: 2268352 - DNA, 25 bp, Homo sapien
tttcattcttaatggtggtaatcac

SEQ ID NO: 2268353 - DNA, 25 bp, Homo sapien
gactatccatatctgaacctcctac

SEQ ID NO: 2268354 - DNA, 25 bp, Homo sapien
tagtcagcattcgactatccatatc

SEQ ID NO: 2268355 - DNA, 25 bp, Homo sapien
tctgactcctttcgatgtatagtca

SEQ ID NO: 2268356 - DNA, 25 bp, Homo sapien
cctttcgatgtatagtcagcattcg

SEQ ID NO: 2268357 - DNA, 25 bp, Homo sapien
gaaacactcctgcaggcaagcaaaa

SEQ ID NO: 2268358 - DNA, 25 bp, Homo sapien
cctacttgcagacccctagttaaga

SEQ ID NO: 2268359 - DNA, 25 bp, Homo sapien
actgtgagttggtctggttagttac

SEQ ID NO: 2268360 - DNA, 25 bp, Homo sapien
tcttaaactcgtccattcaggaaga

SEQ ID NO: 2268361 - DNA, 25 bp, Homo sapien
cactttcctgttgagttacatattt

SEQ ID NO: 2268362 - DNA, 25 bp, Homo sapien
ttaggatctttagaccactttcctg

SEQ ID NO: 2268363 - DNA, 25 bp, Homo sapien
ggatctttagaccactttcctgttg

SEQ ID NO: 2268364 - DNA, 25 bp, Homo sapien
tagaccactttcctgttgagttaca

SEQ ID NO: 2268365 - DNA, 25 bp, Homo sapien
tgaaggctacactctcataaataaa

SEQ ID NO: 2268366 - DNA, 25 bp, Homo sapien
aattaatgctgatgataaaagggct

SEQ ID NO: 2268367 - DNA, 25 bp, Homo sapien
agggcttgaggatgtgagttcaatc

SEQ ID NO: 2268368 - DNA, 25 bp, Homo sapien
taagcatgtggtattctgtattaac

SEQ ID NO: 2268369 - DNA, 25 bp, Homo sapien
tgtgtagacatgcagcacacctgat

SEQ ID NO: 2268370 - DNA, 25 bp, Homo sapien
catgataaaattgcattgctcttga

SEQ ID NO: 2268371 - DNA, 25 bp, Homo sapien
caagaaagaacacgtcactgacagg

SEQ ID NO: 2268372 - DNA, 25 bp, Homo sapien
tcagatattgctatgtcctactttc

SEQ ID NO: 2268373 - DNA, 25 bp, Homo sapien
taggcagatgtctgctttgccaagc

SEQ ID NO: 2268374 - DNA, 25 bp, Homo sapien
gcacaacaccagaattaaatccaac

SEQ ID NO: 2268375 - DNA, 25 bp, Homo sapien
ccaagcacaacaccagaattaaatc

SEQ ID NO: 2268376 - DNA, 25 bp, Homo sapien
gtaggcagatgtctgctttgccaag

SEQ ID NO: 2268377 - DNA, 25 bp, Homo sapien
gcctatattcaaactcactatttct

SEQ ID NO: 2268378 - DNA, 25 bp, Homo sapien
tttcatgtagcctatattcaaactc

SEQ ID NO: 2268379 - DNA, 25 bp, Homo sapien
tcatgtagcctatattcaaactcac

SEQ ID NO: 2268380 - DNA, 25 bp, Homo sapien
tgtagcctatattcaaactcactat

SEQ ID NO: 2268381 - DNA, 25 bp, Homo sapien
tgttcattcctgacggtgggctcgt

SEQ ID NO: 2268382 - DNA, 25 bp, Homo sapien
ttcatagtctcgctggctcagcagt

SEQ ID NO: 2268383 - DNA, 25 bp, Homo sapien
gagttgttcattcctgacggtgggc

SEQ ID NO: 2268384 - DNA, 25 bp, Homo sapien
gggttcatagtctcgctggctcagc

SEQ ID NO: 2268385 - DNA, 25 bp, Homo sapien
gttataattctaagtcatatgagaa

SEQ ID NO: 2268386 - DNA, 25 bp, Homo sapien
accaaacaccatttcgtatttggca

SEQ ID NO: 2268387 - DNA, 25 bp, Homo sapien
taagtcatatgagaattgtaggagt

SEQ ID NO: 2268388 - DNA, 25 bp, Homo sapien
aacaccatttcgtatttggcaatgt

SEQ ID NO: 2268389 - DNA, 25 bp, Homo sapien
tcattggcagattccccatttttag

SEQ ID NO: 2268390 - DNA, 25 bp, Homo sapien
cattggcagattccccatttttagg

SEQ ID NO: 2268391 - DNA, 25 bp, Homo sapien
gatcatacaaggtataatcatacag

SEQ ID NO: 2268392 - DNA, 25 bp, Homo sapien
ttcttaagagatcatacaaggtata

SEQ ID NO: 2268393 - DNA, 25 bp, Homo sapien
agaacttgttgactaagacactaaa

SEQ ID NO: 2268394 - DNA, 25 bp, Homo sapien
aagaacttgttgactaagacactaa

SEQ ID NO: 2268395 - DNA, 25 bp, Homo sapien
cagaaacacagtggcattgctacag

SEQ ID NO: 2268396 - DNA, 25 bp, Homo sapien
agttgctgtgaactgtatcatgatt

SEQ ID NO: 2268397 - DNA, 25 bp, Homo sapien
aacacagtggcattgctacagttgc

SEQ ID NO: 2268398 - DNA, 25 bp, Homo sapien
ggcattgctacagttgctgtgaact

SEQ ID NO: 2268399 - DNA, 25 bp, Homo sapien
cactggagtagctgaagttgatttc

SEQ ID NO: 2268400 - DNA, 25 bp, Homo sapien
tagttaccatagacctgtagttcca

SEQ ID NO: 2268401 - DNA, 25 bp, Homo sapien
aaagcaacataaactacaggtccat

SEQ ID NO: 2268402 - DNA, 25 bp, Homo sapien
tatatctgctagaagctgtttggtg

SEQ ID NO: 2268403 - DNA, 25 bp, Homo sapien
tccttattttcacaaatgcacttct

SEQ ID NO: 2268404 - DNA, 25 bp, Homo sapien
gtccttattttcacaaatgcacttc

SEQ ID NO: 2268405 - DNA, 25 bp, Homo sapien
tatctgcgggatacgcgatactgat

SEQ ID NO: 2268406 - DNA, 25 bp, Homo sapien
taactagatactggctaattagggc

SEQ ID NO: 2268407 - DNA, 25 bp, Homo sapien
ttcaaaatgattgtctagctcagac

SEQ ID NO: 2268408 - DNA, 25 bp, Homo sapien
taattagggccttgagcgtatctgc

SEQ ID NO: 2268409 - DNA, 25 bp, Homo sapien
tacaccacttccactttcacgaaag

SEQ ID NO: 2268410 - DNA, 25 bp, Homo sapien
ctgataccggtaatacaccacttcc

SEQ ID NO: 2268411 - DNA, 25 bp, Homo sapien
gataccggtaatacaccacttccac

SEQ ID NO: 2268412 - DNA, 25 bp, Homo sapien
cggtaatacaccacttccactttca

SEQ ID NO: 2268413 - DNA, 25 bp, Homo sapien
tcattgatcaaggcccatgtcatac

SEQ ID NO: 2268414 - DNA, 25 bp, Homo sapien
attgatcaaggcccatgtcatacca

SEQ ID NO: 2268415 - DNA, 25 bp, Homo sapien
cattgatcaaggcccatgtcatacc

SEQ ID NO: 2268416 - DNA, 25 bp, Homo sapien
ctgtggctatagctgaacttccagg

SEQ ID NO: 2268417 - DNA, 25 bp, Homo sapien
actgtggctatagctgaacttccag

SEQ ID NO: 2268418 - DNA, 25 bp, Homo sapien
cagcatatttaagctgccggaaaga

SEQ ID NO: 2268419 - DNA, 25 bp, Homo sapien
aaggagaccatgtggatgaggacag

SEQ ID NO: 2268420 - DNA, 25 bp, Homo sapien
catatttaagctgccggaaagaaat

SEQ ID NO: 2268421 - DNA, 25 bp, Homo sapien
gacagcatatttaagctgccggaaa

SEQ ID NO: 2268422 - DNA, 25 bp, Homo sapien
tttccagagtggtcgtggatcagaa

SEQ ID NO: 2268423 - DNA, 25 bp, Homo sapien
cagagtggtcgtggatcagaacaag

SEQ ID NO: 2268424 - DNA, 25 bp, Homo sapien
cgtggatcagaacaaggtcccacat

SEQ ID NO: 2268425 - DNA, 25 bp, Homo sapien
tggtcgtggatcagaacaaggtccc

SEQ ID NO: 2268426 - DNA, 25 bp, Homo sapien
cacctgcagtttgtaccaactgcct

SEQ ID NO: 2268427 - DNA, 25 bp, Homo sapien
caactgcctcttttaccttgttctc

SEQ ID NO: 2268428 - DNA, 25 bp, Homo sapien
ccaactgcctcttttaccttgttct

SEQ ID NO: 2268429 - DNA, 25 bp, Homo sapien
tgcagtttgtaccaactgcctcttt

SEQ ID NO: 2268430 - DNA, 25 bp, Homo sapien
tcatcttcttctcagtttaggccac

SEQ ID NO: 2268431 - DNA, 25 bp, Homo sapien
ggtcccattgccatttgtgagtttt

SEQ ID NO: 2268432 - DNA, 25 bp, Homo sapien
ttgccatttgtgagttttacaagca

SEQ ID NO: 2268433 - DNA, 25 bp, Homo sapien
tgtgagttttacaagcagaccaaag

SEQ ID NO: 2268434 - DNA, 25 bp, Homo sapien
atttgtgagttttacaagcagacca

SEQ ID NO: 2268435 - DNA, 25 bp, Homo sapien
acagagtctctgcttatggagagta

SEQ ID NO: 2268436 - DNA, 25 bp, Homo sapien
ctctgcttctgcgtgctggaatttc

SEQ ID NO: 2268437 - DNA, 25 bp, Homo sapien
tctgcttctgcgtgctggaatttct

SEQ ID NO: 2268438 - DNA, 25 bp, Homo sapien
ttctatgatgacacaaatatcattt

SEQ ID NO: 2268439 - DNA, 25 bp, Homo sapien
atgatgacacaaatatcattttgtt

SEQ ID NO: 2268440 - DNA, 25 bp, Homo sapien
cggtacttgaaagtacacagaaatc

SEQ ID NO: 2268441 - DNA, 25 bp, Homo sapien
gtacttgaaagtacacagaaatcat

SEQ ID NO: 2268442 - DNA, 25 bp, Homo sapien
tgttcggtacttgaaagtacacaga

SEQ ID NO: 2268443 - DNA, 25 bp, Homo sapien
tttgttcggtacttgaaagtacaca

SEQ ID NO: 2268444 - DNA, 25 bp, Homo sapien
agaaaaatttccattatgttctggg

SEQ ID NO: 2268445 - DNA, 25 bp, Homo sapien
aaatttccattatgttctgggttat

SEQ ID NO: 2268446 - DNA, 25 bp, Homo sapien
ctacataagaaaaatttccattatg

SEQ ID NO: 2268447 - DNA, 25 bp, Homo sapien
ataagaaaaatttccattatgttct

SEQ ID NO: 2268448 - DNA, 25 bp, Homo sapien
gcttttcaaaccagataaactaaca

SEQ ID NO: 2268449 - DNA, 25 bp, Homo sapien
tcacaaagatcacagactgaaaatt

SEQ ID NO: 2268450 - DNA, 25 bp, Homo sapien
tcaaatgttgagaggcaaataacag

SEQ ID NO: 2268451 - DNA, 25 bp, Homo sapien
tacatagctgagtgattattgatcc

SEQ ID NO: 2268452 - DNA, 25 bp, Homo sapien
gcatctgcgttatagaaaggtttct

SEQ ID NO: 2268453 - DNA, 25 bp, Homo sapien
caataagtaattttaggcagaggcc

SEQ ID NO: 2268454 - DNA, 25 bp, Homo sapien
ttcatctatgggtattaggcctctg

SEQ ID NO: 2268455 - DNA, 25 bp, Homo sapien
ggcctctgtcaataagtaattttag

SEQ ID NO: 2268456 - DNA, 25 bp, Homo sapien
gatttcctgttcaatgcctttgcat

SEQ ID NO: 2268457 - DNA, 25 bp, Homo sapien
gcaggactgacaagtcaggtgcttc

SEQ ID NO: 2268458 - DNA, 25 bp, Homo sapien
gcctttgcatgcgtaaggattcgaa

SEQ ID NO: 2268459 - DNA, 25 bp, Homo sapien
aacaaccatggttcctttgtgggat

SEQ ID NO: 2268460 - DNA, 25 bp, Homo sapien
tctttgaagacgaattggacccatt

SEQ ID NO: 2268461 - DNA, 25 bp, Homo sapien
taaccagttctttgaagacgaattg

SEQ ID NO: 2268462 - DNA, 25 bp, Homo sapien
tgaagacgaattggacccattcaag

SEQ ID NO: 2268463 - DNA, 25 bp, Homo sapien
accagttctttgaagacgaattgga

SEQ ID NO: 2268464 - DNA, 25 bp, Homo sapien
ttccatctccactctgtctgcattt

SEQ ID NO: 2268465 - DNA, 25 bp, Homo sapien
atactttccatctccactctgtctg

SEQ ID NO: 2268466 - DNA, 25 bp, Homo sapien
actttccatctccactctgtctgca

SEQ ID NO: 2268467 - DNA, 25 bp, Homo sapien
tttccatctccactctgtctgcatt

SEQ ID NO: 2268468 - DNA, 25 bp, Homo sapien
ggtgttgagattctctttgcttaag

SEQ ID NO: 2268469 - DNA, 25 bp, Homo sapien
gttgccttcttgttgctgtatgctt

SEQ ID NO: 2268470 - DNA, 25 bp, Homo sapien
tctctttgcttaagttgccttcttg

SEQ ID NO: 2268471 - DNA, 25 bp, Homo sapien
ttactctggcttttgggtgttgaga

SEQ ID NO: 2268472 - DNA, 25 bp, Homo sapien
tccaaagtttgcaagctgctttaag

SEQ ID NO: 2268473 - DNA, 25 bp, Homo sapien
ctaagactgggctatgacggtataa

SEQ ID NO: 2268474 - DNA, 25 bp, Homo sapien
gctttaagaaggattgtaatagcct

SEQ ID NO: 2268475 - DNA, 25 bp, Homo sapien
cactttttctgccaactgaaaggat

SEQ ID NO: 2268476 - DNA, 25 bp, Homo sapien
atttcagcctatgtggagcccagag

SEQ ID NO: 2268477 - DNA, 25 bp, Homo sapien
gacagattatgcctgaccttcagag

SEQ ID NO: 2268478 - DNA, 25 bp, Homo sapien
tcaaactgggtgtgaacttgcggcc

SEQ ID NO: 2268479 - DNA, 25 bp, Homo sapien
tatgcagttgatcatggccagggag

SEQ ID NO: 2268480 - DNA, 25 bp, Homo sapien
aatatctcccctatgggtactgaca

SEQ ID NO: 2268481 - DNA, 25 bp, Homo sapien
ctatgggtactgacagtattattga

SEQ ID NO: 2268482 - DNA, 25 bp, Homo sapien
tgggtactgacagtattattgataa

SEQ ID NO: 2268483 - DNA, 25 bp, Homo sapien
tcttaatatctcccctatgggtact

SEQ ID NO: 2268484 - DNA, 25 bp, Homo sapien
gttatccaacagaagttgccaaatt

SEQ ID NO: 2268485 - DNA, 25 bp, Homo sapien
taggtgtaactgaaccccactgtat

SEQ ID NO: 2268486 - DNA, 25 bp, Homo sapien
tggagtaattcacagtcaacagtga

SEQ ID NO: 2268487 - DNA, 25 bp, Homo sapien
tattctatgagaattccacagtaag

SEQ ID NO: 2268488 - DNA, 25 bp, Homo sapien
ctagtctaaagctgcgatggtgacc

SEQ ID NO: 2268489 - DNA, 25 bp, Homo sapien
acaaagactgactccctgtttctag

SEQ ID NO: 2268490 - DNA, 25 bp, Homo sapien
tcacaaagactgactccctgtttct

SEQ ID NO: 2268491 - DNA, 25 bp, Homo sapien
ctaaagctgcgatggtgaccaaaat

SEQ ID NO: 2268492 - DNA, 25 bp, Homo sapien
ctctttctgccggaagatttataaa

SEQ ID NO: 2268493 - DNA, 25 bp, Homo sapien
atagctctttctgccggaagattta

SEQ ID NO: 2268494 - DNA, 25 bp, Homo sapien
ttagctcataccatgtatagaccat

SEQ ID NO: 2268495 - DNA, 25 bp, Homo sapien
ttataaatcttagctcataccatgt

SEQ ID NO: 2268496 - DNA, 25 bp, Homo sapien
tttaattggctggactactgcagac

SEQ ID NO: 2268497 - DNA, 25 bp, Homo sapien
aaatgcagctggtctcaactattcc

SEQ ID NO: 2268498 - DNA, 25 bp, Homo sapien
tggactaatcccacactactctgag

SEQ ID NO: 2268499 - DNA, 25 bp, Homo sapien
cattgaaacgtataggaaaactgct

SEQ ID NO: 2268500 - DNA, 25 bp, Homo sapien
gctcctcctgtaactgtcccttcat

SEQ ID NO: 2268501 - DNA, 25 bp, Homo sapien
gcacaggtgtgaggagacacttcac

SEQ ID NO: 2268502 - DNA, 25 bp, Homo sapien
aggagacacttcactattacatttt

SEQ ID NO: 2268503 - DNA, 25 bp, Homo sapien
tcactattacattttgctcctcctg

SEQ ID NO: 2268504 - DNA, 25 bp, Homo sapien
tacttcgatcgcctttccagattaa

SEQ ID NO: 2268505 - DNA, 25 bp, Homo sapien
tactcaactgtgagcggggtctggt

SEQ ID NO: 2268506 - DNA, 25 bp, Homo sapien
gggtctggtacttcgatcgcctttc

SEQ ID NO: 2268507 - DNA, 25 bp, Homo sapien
gaggctgtccgcatatatcatactc

SEQ ID NO: 2268508 - DNA, 25 bp, Homo sapien
gctagagaacaagcatcccacagca

SEQ ID NO: 2268509 - DNA, 25 bp, Homo sapien
gactccagctagagaacaagcatcc

SEQ ID NO: 2268510 - DNA, 25 bp, Homo sapien
cgctggctgccgactccagctagag

SEQ ID NO: 2268511 - DNA, 25 bp, Homo sapien
tgccgactccagctagagaacaagc

SEQ ID NO: 2268512 - DNA, 25 bp, Homo sapien
ttttcttgtgtgtttttcttgtgat

SEQ ID NO: 2268513 - DNA, 25 bp, Homo sapien
gagaagtttgatttttcttgtgtgt

SEQ ID NO: 2268514 - DNA, 25 bp, Homo sapien
ttcttgtgtgtttttcttgtgatac

SEQ ID NO: 2268515 - DNA, 25 bp, Homo sapien
ttttctcagagaagtttgatttttc

SEQ ID NO: 2268516 - DNA, 25 bp, Homo sapien
tgaatggcgagggggagggacttaa

SEQ ID NO: 2268517 - DNA, 25 bp, Homo sapien
tgaaccaggggaaggcgtggggaga

SEQ ID NO: 2268518 - DNA, 25 bp, Homo sapien
ggaaggcgtggggagagaagtgaac

SEQ ID NO: 2268519 - DNA, 25 bp, Homo sapien
tggcgagggggagggacttaacaga

SEQ ID NO: 2268520 - DNA, 25 bp, Homo sapien
tgtgctgcctgtgtcgccgctggca

SEQ ID NO: 2268521 - DNA, 25 bp, Homo sapien
tcgcagtccgcagagcagccggagt

SEQ ID NO: 2268522 - DNA, 25 bp, Homo sapien
ccggagtcgctgaggttgtttctga

SEQ ID NO: 2268523 - DNA, 25 bp, Homo sapien
cactctgcgcactctgtttggcttg

SEQ ID NO: 2268524 - DNA, 25 bp, Homo sapien
gcccgctccacggagactgcgactg

SEQ ID NO: 2268525 - DNA, 25 bp, Homo sapien
tccacggagactgcgactgctgtag

SEQ ID NO: 2268526 - DNA, 25 bp, Homo sapien
ggcttccgcccgctccacggagact

SEQ ID NO: 2268527 - DNA, 25 bp, Homo sapien
cgctccacggagactgcgactgctg

SEQ ID NO: 2268528 - DNA, 25 bp, Homo sapien
tgaagctggctgtaccctttaaagg

SEQ ID NO: 2268529 - DNA, 25 bp, Homo sapien
gcagtgtccgcgcactaagtgtgga

SEQ ID NO: 2268530 - DNA, 25 bp, Homo sapien
tcccaaagtaacgaagcgcagcggt

SEQ ID NO: 2268531 - DNA, 25 bp, Homo sapien
aaaagatattctccctgcgctcacc

SEQ ID NO: 2268532 - DNA, 25 bp, Homo sapien
tgcgccaagggtcgtaccctcaagg

SEQ ID NO: 2268533 - DNA, 25 bp, Homo sapien
tcctctctgcgccaagggtcgtacc

SEQ ID NO: 2268534 - DNA, 25 bp, Homo sapien
tctctgcgccaagggtcgtaccctc

SEQ ID NO: 2268535 - DNA, 25 bp, Homo sapien
cctcctctctgcgccaagggtcgta

SEQ ID NO: 2268536 - DNA, 25 bp, Homo sapien
aaaagagccgttttatcgctacgcg

SEQ ID NO: 2268537 - DNA, 25 bp, Homo sapien
tgcggctgctcgcttttaaaaagtc

SEQ ID NO: 2268538 - DNA, 25 bp, Homo sapien
cctttgtgaggacgtgaactgtttc

SEQ ID NO: 2268539 - DNA, 25 bp, Homo sapien
ctaaaaaatgcacccgtttgcggct

SEQ ID NO: 2268540 - DNA, 25 bp, Homo sapien
caaggaagcggctctggctgtacac

SEQ ID NO: 2268541 - DNA, 25 bp, Homo sapien
ctaagcgctcagatgcgagtcccag

SEQ ID NO: 2268542 - DNA, 25 bp, Homo sapien
tgtacactctgagaaagtgacctct

SEQ ID NO: 2268543 - DNA, 25 bp, Homo sapien
ctaaccctcagtccgtttgcgacta

SEQ ID NO: 2268544 - DNA, 25 bp, Homo sapien
ccgtaagcgcttcacatgagcagcc

SEQ ID NO: 2268545 - DNA, 25 bp, Homo sapien
ccctaagccgcaggcgggtgaagca

SEQ ID NO: 2268546 - DNA, 25 bp, Homo sapien
gccgcagtggcgcaaatagcaattc

SEQ ID NO: 2268547 - DNA, 25 bp, Homo sapien
cagaggaacgcggaataaatcattc

SEQ ID NO: 2268548 - DNA, 25 bp, Homo sapien
ttctttcgtcaagacggcccgcaca

SEQ ID NO: 2268549 - DNA, 25 bp, Homo sapien
cttagcgcatccatctctcggttct

SEQ ID NO: 2268550 - DNA, 25 bp, Homo sapien
tctctcggttctttcgtcaagacgg

SEQ ID NO: 2268551 - DNA, 25 bp, Homo sapien
ggcccgcacacggtccgcgctctct

SEQ ID NO: 2268552 - DNA, 25 bp, Homo sapien
tgcagcgggactcagcttttgggaa

SEQ ID NO: 2268553 - DNA, 25 bp, Homo sapien
tccctcgccgcttggcgagtgtggc

SEQ ID NO: 2268554 - DNA, 25 bp, Homo sapien
tccggcctggtaggcaaaggcgctc

SEQ ID NO: 2268555 - DNA, 25 bp, Homo sapien
ccaaggcgactgaagaacagggttc

SEQ ID NO: 2268556 - DNA, 25 bp, Homo sapien
cggcgggccgccagcagtggccacc

SEQ ID NO: 2268557 - DNA, 25 bp, Homo sapien
tacatgatgtaaggttcagagatga

SEQ ID NO: 2268558 - DNA, 25 bp, Homo sapien
gctttaggccctattctttcattag

SEQ ID NO: 2268559 - DNA, 25 bp, Homo sapien
caggacaaagggagtttactggata

SEQ ID NO: 2268560 - DNA, 25 bp, Homo sapien
gagtggatacatgatggtgcctaaa

SEQ ID NO: 2268561 - DNA, 25 bp, Homo sapien
tcatcagcgggaacttcagtctccc

SEQ ID NO: 2268562 - DNA, 25 bp, Homo sapien
tacaaagcttagtgcaaaaagacac

SEQ ID NO: 2268563 - DNA, 25 bp, Homo sapien
tgaagcttcccctcttaattctgga

SEQ ID NO: 2268564 - DNA, 25 bp, Homo sapien
gacaaaatgggtataaccatgcctt

SEQ ID NO: 2268565 - DNA, 25 bp, Homo sapien
gacagaggatacatcagatattaaa

SEQ ID NO: 2268566 - DNA, 25 bp, Homo sapien
cctcggacagaggatacatcagata

SEQ ID NO: 2268567 - DNA, 25 bp, Homo sapien
atattgtcctcggacagaggataca

SEQ ID NO: 2268568 - DNA, 25 bp, Homo sapien
tgtcctcggacagaggatacatcag

SEQ ID NO: 2268569 - DNA, 25 bp, Homo sapien
gttaagatattccatcctcttccat

SEQ ID NO: 2268570 - DNA, 25 bp, Homo sapien
taagatattccatcctcttccatcc

SEQ ID NO: 2268571 - DNA, 25 bp, Homo sapien
gttgatctgtactttttaagcaccc

SEQ ID NO: 2268572 - DNA, 25 bp, Homo sapien
cattcatccatccagttgatctgta

SEQ ID NO: 2268573 - DNA, 25 bp, Homo sapien
ttcttcacaagattacaaagttgag

SEQ ID NO: 2268574 - DNA, 25 bp, Homo sapien
cagcttcttcacaagattacaaagt

SEQ ID NO: 2268575 - DNA, 25 bp, Homo sapien
caagattacaaagttgagagcagct

SEQ ID NO: 2268576 - DNA, 25 bp, Homo sapien
gcttcttcacaagattacaaagttg

SEQ ID NO: 2268577 - DNA, 25 bp, Homo sapien
agtcctcatagtgcactgcaatcag

SEQ ID NO: 2268578 - DNA, 25 bp, Homo sapien
cagtcctcatagtgcactgcaatca

SEQ ID NO: 2268579 - DNA, 25 bp, Homo sapien
tcagtcctcatagtgcactgcaatc

SEQ ID NO: 2268580 - DNA, 25 bp, Homo sapien
atatctgaattaaaacccactgtca

SEQ ID NO: 2268581 - DNA, 25 bp, Homo sapien
cttgaaatatctgaattaaaaccca

SEQ ID NO: 2268582 - DNA, 25 bp, Homo sapien
aatatctgaattaaaacccactgtc

SEQ ID NO: 2268583 - DNA, 25 bp, Homo sapien
gaaatatctgaattaaaacccactg

SEQ ID NO: 2268584 - DNA, 25 bp, Homo sapien
ccaatgtccctcagtccacattgcc

SEQ ID NO: 2268585 - DNA, 25 bp, Homo sapien
tgtccctcagtccacattgcctcat

SEQ ID NO: 2268586 - DNA, 25 bp, Homo sapien
catctccaatgtccctcagtccaca

SEQ ID NO: 2268587 - DNA, 25 bp, Homo sapien
tttcactcttaatccatctccaatg

SEQ ID NO: 2268588 - DNA, 25 bp, Homo sapien
gcaactttcagattgacataactgc

SEQ ID NO: 2268589 - DNA, 25 bp, Homo sapien
gatgttagcataattgacactctgt

SEQ ID NO: 2268590 - DNA, 25 bp, Homo sapien
gagtacctataaaagtgtccaccat

SEQ ID NO: 2268591 - DNA, 25 bp, Homo sapien
ggcaaggaatcattataaaggaggg

SEQ ID NO: 2268592 - DNA, 25 bp, Homo sapien
gaggaagaagaaattattaagaagc

SEQ ID NO: 2268593 - DNA, 25 bp, Homo sapien
agaagaggaagaagaaattattaag

SEQ ID NO: 2268594 - DNA, 25 bp, Homo sapien
ctgaccaaaagaagaggagagagag

SEQ ID NO: 2268595 - DNA, 25 bp, Homo sapien
ggaagaagaaattattaagaagcca

SEQ ID NO: 2268596 - DNA, 25 bp, Homo sapien
gtcccggacaacaaacacttgtgac

SEQ ID NO: 2268597 - DNA, 25 bp, Homo sapien
cgtcccggacaacaaacacttgtga

SEQ ID NO: 2268598 - DNA, 25 bp, Homo sapien
tcaacagccgctgggagagtatatt

SEQ ID NO: 2268599 - DNA, 25 bp, Homo sapien
gcacatctccggtcttgtacactag

SEQ ID NO: 2268600 - DNA, 25 bp, Homo sapien
taatttctcacgatcaatgcgagcg

SEQ ID NO: 2268601 - DNA, 25 bp, Homo sapien
gtagtttttctcctgggcgccagag

SEQ ID NO: 2268602 - DNA, 25 bp, Homo sapien
tttcttggaagttcattaagctgcc

SEQ ID NO: 2268603 - DNA, 25 bp, Homo sapien
tcaagacaaatcagaaatttcttgg

SEQ ID NO: 2268604 - DNA, 25 bp, Homo sapien
aaatcagaaatttcttggaagttca

SEQ ID NO: 2268605 - DNA, 25 bp, Homo sapien
gaaatttcttggaagttcattaagc

SEQ ID NO: 2268606 - DNA, 25 bp, Homo sapien
ttatgttccataagtgtccatccat

SEQ ID NO: 2268607 - DNA, 25 bp, Homo sapien
tatgttccataagtgtccatccata

SEQ ID NO: 2268608 - DNA, 25 bp, Homo sapien
cccttaggaataactttcctcacag

SEQ ID NO: 2268609 - DNA, 25 bp, Homo sapien
agctatctgtgactgatcccttagg

SEQ ID NO: 2268610 - DNA, 25 bp, Homo sapien
acttcttcaacttggagatttctac

SEQ ID NO: 2268611 - DNA, 25 bp, Homo sapien
ctacatagggtttggaatctaggaa

SEQ ID NO: 2268612 - DNA, 25 bp, Homo sapien
agtagaaaatatagcttaagaagtc

SEQ ID NO: 2268613 - DNA, 25 bp, Homo sapien
gtagaaaatatagcttaagaagtct

SEQ ID NO: 2268614 - DNA, 25 bp, Homo sapien
gaaaatatagcttaagaagtcttgt

SEQ ID NO: 2268615 - DNA, 25 bp, Homo sapien
agaaaatatagcttaagaagtcttg

SEQ ID NO: 2268616 - DNA, 25 bp, Homo sapien
actgaagccttttgccatatgtttg

SEQ ID NO: 2268617 - DNA, 25 bp, Homo sapien
aactgaagccttttgccatatgttt

SEQ ID NO: 2268618 - DNA, 25 bp, Homo sapien
ccaaatgtagttagttcaactgagc

SEQ ID NO: 2268619 - DNA, 25 bp, Homo sapien
atgtagttagttcaactgagctcac

SEQ ID NO: 2268620 - DNA, 25 bp, Homo sapien
aaatgtagttagttcaactgagctc

SEQ ID NO: 2268621 - DNA, 25 bp, Homo sapien
cccaaatgtagttagttcaactgag

SEQ ID NO: 2268622 - DNA, 25 bp, Homo sapien
tctttgaggaaagccaccatcttca

SEQ ID NO: 2268623 - DNA, 25 bp, Homo sapien
tatggtccgcatccttatccgtcac

SEQ ID NO: 2268624 - DNA, 25 bp, Homo sapien
ggaactgattactgaatactggcct

SEQ ID NO: 2268625 - DNA, 25 bp, Homo sapien
ctgactgattcaaaggaggtttgcc

SEQ ID NO: 2268626 - DNA, 25 bp, Homo sapien
tttgccagaattgtgaataaatatt

SEQ ID NO: 2268627 - DNA, 25 bp, Homo sapien
gacattgctggttaagggtggtacc

SEQ ID NO: 2268628 - DNA, 25 bp, Homo sapien
tttcttcactacagtcagcatgcct

SEQ ID NO: 2268629 - DNA, 25 bp, Homo sapien
agcattaggcccactgtctgcatcc

SEQ ID NO: 2268630 - DNA, 25 bp, Homo sapien
aattacctgaaagaccactgtgcct

SEQ ID NO: 2268631 - DNA, 25 bp, Homo sapien
tctaaaatggagagcgtaactgcag

SEQ ID NO: 2268632 - DNA, 25 bp, Homo sapien
tacaacgacagttatggtgccagca

SEQ ID NO: 2268633 - DNA, 25 bp, Homo sapien
gaaatatttggtcggatgacaccag

SEQ ID NO: 2268634 - DNA, 25 bp, Homo sapien
ggtgtggtgcctggcgacatcttac

SEQ ID NO: 2268635 - DNA, 25 bp, Homo sapien
tttggggtagcccattcagaattct

SEQ ID NO: 2268636 - DNA, 25 bp, Homo sapien
tggggtagcccattcagaattctgc

SEQ ID NO: 2268637 - DNA, 25 bp, Homo sapien
tctgggtttggggtagcccattcag

SEQ ID NO: 2268638 - DNA, 25 bp, Homo sapien
cgctgtagggatctgaactgcttga

SEQ ID NO: 2268639 - DNA, 25 bp, Homo sapien
agtgtcgggccaaatcagggctgtc

SEQ ID NO: 2268640 - DNA, 25 bp, Homo sapien
caaaggtgttatcgagaggcagttc

SEQ ID NO: 2268641 - DNA, 25 bp, Homo sapien
tagccacagtcagaaacgctgtagg

SEQ ID NO: 2268642 - DNA, 25 bp, Homo sapien
gtctggtgtgtacggacacaggtac

SEQ ID NO: 2268643 - DNA, 25 bp, Homo sapien
cggtctggtgtgtacggacacaggt

SEQ ID NO: 2268644 - DNA, 25 bp, Homo sapien
ggtctggtgtgtacggacacaggta

SEQ ID NO: 2268645 - DNA, 25 bp, Homo sapien
gagagtactctgttattgcgctgca

SEQ ID NO: 2268646 - DNA, 25 bp, Homo sapien
gagtagtttggctagttcagctcac

SEQ ID NO: 2268647 - DNA, 25 bp, Homo sapien
gaaagcacaaggttcactaggacat

SEQ ID NO: 2268648 - DNA, 25 bp, Homo sapien
taaaaatgtctcttgccctggatac

SEQ ID NO: 2268649 - DNA, 25 bp, Homo sapien
cccgtagtcgatgaatgacaacaca

SEQ ID NO: 2268650 - DNA, 25 bp, Homo sapien
gagatatctgagaacttgcaaggca

SEQ ID NO: 2268651 - DNA, 25 bp, Homo sapien
taaattaaaggtgcgaccaggtcaa

SEQ ID NO: 2268652 - DNA, 25 bp, Homo sapien
cacccggccgatgactagttttaag

SEQ ID NO: 2268653 - DNA, 25 bp, Homo sapien
tacaaccaggtgttagtatctacat

SEQ ID NO: 2268654 - DNA, 25 bp, Homo sapien
taaactgtatacattgcccaatctg

SEQ ID NO: 2268655 - DNA, 25 bp, Homo sapien
gtattccagttgaaagatgctctat

SEQ ID NO: 2268656 - DNA, 25 bp, Homo sapien
gctccaaagtagaaagccaaaacaa

SEQ ID NO: 2268657 - DNA, 25 bp, Homo sapien
taacttatcttgagggggttggatg

SEQ ID NO: 2268658 - DNA, 25 bp, Homo sapien
tatacttgcagatcatcctgtaaga

SEQ ID NO: 2268659 - DNA, 25 bp, Homo sapien
taagatttgaacatgcccacattag

SEQ ID NO: 2268660 - DNA, 25 bp, Homo sapien
tgttggaaaatgtgatctgatataa

SEQ ID NO: 2268661 - DNA, 25 bp, Homo sapien
gatttttctcccctgcttccctatc

SEQ ID NO: 2268662 - DNA, 25 bp, Homo sapien
tctcccctgcttccctatctgccat

SEQ ID NO: 2268663 - DNA, 25 bp, Homo sapien
gaatgatttttctcccctgcttccc

SEQ ID NO: 2268664 - DNA, 25 bp, Homo sapien
attgcctctttcagaatgatttttc

SEQ ID NO: 2268665 - DNA, 25 bp, Homo sapien
ttcccatggttagggacaattaaca

SEQ ID NO: 2268666 - DNA, 25 bp, Homo sapien
tcttatagcttgggccgtgaaattc

SEQ ID NO: 2268667 - DNA, 25 bp, Homo sapien
catggttagggacaattaacaaagg

SEQ ID NO: 2268668 - DNA, 25 bp, Homo sapien
acattcccatggttagggacaatta

SEQ ID NO: 2268669 - DNA, 25 bp, Homo sapien
gtgcattaggtgttctggagttaaa

SEQ ID NO: 2268670 - DNA, 25 bp, Homo sapien
gtttatcattttctagggattcctg

SEQ ID NO: 2268671 - DNA, 25 bp, Homo sapien
tatcattttctagggattcctgtgc

SEQ ID NO: 2268672 - DNA, 25 bp, Homo sapien
ggattcctgtgcattaggtgttctg

SEQ ID NO: 2268673 - DNA, 25 bp, Homo sapien
tacggcctgacgtttacagagaaat

SEQ ID NO: 2268674 - DNA, 25 bp, Homo sapien
gaacacggataatacactaggcacc

SEQ ID NO: 2268675 - DNA, 25 bp, Homo sapien
tacagatggactgagtacggcctga

SEQ ID NO: 2268676 - DNA, 25 bp, Homo sapien
tggaagatcagcttgcacgtggact

SEQ ID NO: 2268677 - DNA, 25 bp, Homo sapien
agctccttgggtccaccctcagcct

SEQ ID NO: 2268678 - DNA, 25 bp, Homo sapien
caatgtccctgatgctgaaggccat

SEQ ID NO: 2268679 - DNA, 25 bp, Homo sapien
tgcacccccaatgtccctgatgctg

SEQ ID NO: 2268680 - DNA, 25 bp, Homo sapien
ccccaatgtccctgatgctgaaggc

SEQ ID NO: 2268681 - DNA, 25 bp, Homo sapien
cttggaaaggctgctattgtcggta

SEQ ID NO: 2268682 - DNA, 25 bp, Homo sapien
agctctatacccatggagtggttag

SEQ ID NO: 2268683 - DNA, 25 bp, Homo sapien
aaggctgctattgtcggtaaattct

SEQ ID NO: 2268684 - DNA, 25 bp, Homo sapien
agtggttagttacagagacagggct

SEQ ID NO: 2268685 - DNA, 25 bp, Homo sapien
ctactgcttttcatacagataaatt

SEQ ID NO: 2268686 - DNA, 25 bp, Homo sapien
tactgcttttcatacagataaattc

SEQ ID NO: 2268687 - DNA, 25 bp, Homo sapien
tactaaatcgtctctgtctaggcag

SEQ ID NO: 2268688 - DNA, 25 bp, Homo sapien
tatgattccatcttcagtccgaaca

SEQ ID NO: 2268689 - DNA, 25 bp, Homo sapien
taaaaactccaatccccaagcattc

SEQ ID NO: 2268690 - DNA, 25 bp, Homo sapien
ttcccaagcccctactgccaagtta

SEQ ID NO: 2268691 - DNA, 25 bp, Homo sapien
tagcgttaggtgattcaaatccagc

SEQ ID NO: 2268692 - DNA, 25 bp, Homo sapien
gggttgtgaaatagcctcagttctg

SEQ ID NO: 2268693 - DNA, 25 bp, Homo sapien
tatttaagatgagtagatacagctc

SEQ ID NO: 2268694 - DNA, 25 bp, Homo sapien
aaaacctcatctgtattgcgaaaac

SEQ ID NO: 2268695 - DNA, 25 bp, Homo sapien
atcatccaatcacctgccagcgcag

SEQ ID NO: 2268696 - DNA, 25 bp, Homo sapien
gctagaaaaggcagtcagaagaagg

SEQ ID NO: 2268697 - DNA, 25 bp, Homo sapien
ttttgggactctgaatgagccacta

SEQ ID NO: 2268698 - DNA, 25 bp, Homo sapien
gaaaaccctgactagtacagtctcc

SEQ ID NO: 2268699 - DNA, 25 bp, Homo sapien
ctaaatcacctagagtggacaattt

SEQ ID NO: 2268700 - DNA, 25 bp, Homo sapien
gatgccaatcttcattatggtccct

SEQ ID NO: 2268701 - DNA, 25 bp, Homo sapien
caggagccacattctcttcaaaggg

SEQ ID NO: 2268702 - DNA, 25 bp, Homo sapien
attttcactgttgcacaggagccac

SEQ ID NO: 2268703 - DNA, 25 bp, Homo sapien
ttccgggatcacatagttccggtcc

SEQ ID NO: 2268704 - DNA, 25 bp, Homo sapien
aacttccgggatcacatagttccgg

SEQ ID NO: 2268705 - DNA, 25 bp, Homo sapien
gaacttccgggatcacatagttccg

SEQ ID NO: 2268706 - DNA, 25 bp, Homo sapien
acttccgggatcacatagttccggt

SEQ ID NO: 2268707 - DNA, 25 bp, Homo sapien
tagattcaggatcggagttgccatc

SEQ ID NO: 2268708 - DNA, 25 bp, Homo sapien
tactcctcctgaggatagccaaggg

SEQ ID NO: 2268709 - DNA, 25 bp, Homo sapien
catccccttcagtgcgattgctggg

SEQ ID NO: 2268710 - DNA, 25 bp, Homo sapien
tgggtgtagcacgatcaaagtactc

SEQ ID NO: 2268711 - DNA, 25 bp, Homo sapien
gctggtactctgctttgcgaatgcc

SEQ ID NO: 2268712 - DNA, 25 bp, Homo sapien
tgccctgttattcttctgatcagtt

SEQ ID NO: 2268713 - DNA, 25 bp, Homo sapien
tgctttgcgaatgccctatctgccc

SEQ ID NO: 2268714 - DNA, 25 bp, Homo sapien
cttgattagttgacagcgcagctgg

SEQ ID NO: 2268715 - DNA, 25 bp, Homo sapien
gtgatgcctatctgaggaacgctaa

SEQ ID NO: 2268716 - DNA, 25 bp, Homo sapien
gatgcctatctgaggaacgctaaag

SEQ ID NO: 2268717 - DNA, 25 bp, Homo sapien
cctatctgaggaacgctaaagtaat

SEQ ID NO: 2268718 - DNA, 25 bp, Homo sapien
ttaagtgatgcctatctgaggaacg

SEQ ID NO: 2268719 - DNA, 25 bp, Homo sapien
tgtccggggaggagagagataggac

SEQ ID NO: 2268720 - DNA, 25 bp, Homo sapien
ctgtccggggaggagagagatagga

SEQ ID NO: 2268721 - DNA, 25 bp, Homo sapien
tccggggaggagagagataggacag

SEQ ID NO: 2268722 - DNA, 25 bp, Homo sapien
gctgtccggggaggagagagatagg

SEQ ID NO: 2268723 - DNA, 25 bp, Homo sapien
cgctggccgcgctgctgaccggccg

SEQ ID NO: 2268724 - DNA, 25 bp, Homo sapien
cgcgctgctgaccggccgggcgccg

SEQ ID NO: 2268725 - DNA, 25 bp, Homo sapien
tggccgcgctgctgaccggccgggc

SEQ ID NO: 2268726 - DNA, 25 bp, Homo sapien
gccgcgctgctgaccggccgggcgc

SEQ ID NO: 2268727 - DNA, 25 bp, Homo sapien
ccaggccccatgccgccccggaagc

SEQ ID NO: 2268728 - DNA, 25 bp, Homo sapien
catccccgcggccaggcccccaggc

SEQ ID NO: 2268729 - DNA, 25 bp, Homo sapien
agacccccagccatccccgcggcca

SEQ ID NO: 2268730 - DNA, 25 bp, Homo sapien
cccaggccccatgccgccccggaag

SEQ ID NO: 2268731 - DNA, 25 bp, Homo sapien
gctttgcatggtcttcttgttctgg

SEQ ID NO: 2268732 - DNA, 25 bp, Homo sapien
ggctttgcatggtcttcttgttctg

SEQ ID NO: 2268733 - DNA, 25 bp, Homo sapien
ttttgctctccagcctacggttctc

SEQ ID NO: 2268734 - DNA, 25 bp, Homo sapien
tgctctccagcctacggttctcagt

SEQ ID NO: 2268735 - DNA, 25 bp, Homo sapien
ttgtcaatatgtagaacgatgcagg

SEQ ID NO: 2268736 - DNA, 25 bp, Homo sapien
aagacgggcattgtcaatatgtaga

SEQ ID NO: 2268737 - DNA, 25 bp, Homo sapien
acgggcattgtcaatatgtagaacg

SEQ ID NO: 2268738 - DNA, 25 bp, Homo sapien
gcattgtcaatatgtagaacgatgc

SEQ ID NO: 2268739 - DNA, 25 bp, Homo sapien
gcggagcccatggatgtcgttctcc

SEQ ID NO: 2268740 - DNA, 25 bp, Homo sapien
atgtcgttctccacagactggcgca

SEQ ID NO: 2268741 - DNA, 25 bp, Homo sapien
tgtcgttctccacagactggcgcat

SEQ ID NO: 2268742 - DNA, 25 bp, Homo sapien
cttgcggagcccatggatgtcgttc

SEQ ID NO: 2268743 - DNA, 25 bp, Homo sapien
gtcaagtgacattggtgtcatcaat

SEQ ID NO: 2268744 - DNA, 25 bp, Homo sapien
ctgcagtcaagtgacattggtgtca

SEQ ID NO: 2268745 - DNA, 25 bp, Homo sapien
cagtcaagtgacattggtgtcatca

SEQ ID NO: 2268746 - DNA, 25 bp, Homo sapien
gcagtcaagtgacattggtgtcatc

SEQ ID NO: 2268747 - DNA, 25 bp, Homo sapien
ccctgagagcttcaatctctgtctc

SEQ ID NO: 2268748 - DNA, 25 bp, Homo sapien
ctgagagcttcaatctctgtctcta

SEQ ID NO: 2268749 - DNA, 25 bp, Homo sapien
ccacggtcaacctaaagctggcaat

SEQ ID NO: 2268750 - DNA, 25 bp, Homo sapien
ctccacggtcaacctaaagctggca

SEQ ID NO: 2268751 - DNA, 25 bp, Homo sapien
gccagtatttgtctagctcctctcg

SEQ ID NO: 2268752 - DNA, 25 bp, Homo sapien
aatctgctgaggccagtatttgtct

SEQ ID NO: 2268753 - DNA, 25 bp, Homo sapien
ggccagtatttgtctagctcctctc

SEQ ID NO: 2268754 - DNA, 25 bp, Homo sapien
gctgaggccagtatttgtctagctc

SEQ ID NO: 2268755 - DNA, 25 bp, Homo sapien
atctgaagggagtagcgggcctcca

SEQ ID NO: 2268756 - DNA, 25 bp, Homo sapien
tctgaagggagtagcgggcctccac

SEQ ID NO: 2268757 - DNA, 25 bp, Homo sapien
catctgaagggagtagcgggcctcc

SEQ ID NO: 2268758 - DNA, 25 bp, Homo sapien
gtgcagcaggatcccgatgagctgc

SEQ ID NO: 2268759 - DNA, 25 bp, Homo sapien
gcagcaggatcccgatgagctgcac

SEQ ID NO: 2268760 - DNA, 25 bp, Homo sapien
caggtgcagcaggatcccgatgagc

SEQ ID NO: 2268761 - DNA, 25 bp, Homo sapien
ccaggtgcagcaggatcccgatgag

SEQ ID NO: 2268762 - DNA, 25 bp, Homo sapien
tgttcagcacggcctcattactcct

SEQ ID NO: 2268763 - DNA, 25 bp, Homo sapien
gttcagcacggcctcattactcctg

SEQ ID NO: 2268764 - DNA, 25 bp, Homo sapien
tcagcacggcctcattactcctggg

SEQ ID NO: 2268765 - DNA, 25 bp, Homo sapien
gatgttcagcacggcctcattactc

SEQ ID NO: 2268766 - DNA, 25 bp, Homo sapien
actttgccatccactctccggcggg

SEQ ID NO: 2268767 - DNA, 25 bp, Homo sapien
tttgccatccactctccggcgggtg

SEQ ID NO: 2268768 - DNA, 25 bp, Homo sapien
gccatccactctccggcgggtggtg

SEQ ID NO: 2268769 - DNA, 25 bp, Homo sapien
gctgtccaaggcatcaccaagaatg

SEQ ID NO: 2268770 - DNA, 25 bp, Homo sapien
actctgtactttttattggcctcct

SEQ ID NO: 2268771 - DNA, 25 bp, Homo sapien
tccccaaagggtaccctgcttctgc

SEQ ID NO: 2268772 - DNA, 25 bp, Homo sapien
ctcctgctccccaaagggtaccctg

SEQ ID NO: 2268773 - DNA, 25 bp, Homo sapien
caaagggtaccctgcttctgctggc

SEQ ID NO: 2268774 - DNA, 25 bp, Homo sapien
tcttagctggtatgacagcagtcca

SEQ ID NO: 2268775 - DNA, 25 bp, Homo sapien
gaagccgcatgaatcattaagtgaa

SEQ ID NO: 2268776 - DNA, 25 bp, Homo sapien
catataagcaggcacatgaagccgc

SEQ ID NO: 2268777 - DNA, 25 bp, Homo sapien
gaactcttgggtatggcaaatcagg

SEQ ID NO: 2268778 - DNA, 25 bp, Homo sapien
tctgaacctgggtgcccagaactct

SEQ ID NO: 2268779 - DNA, 25 bp, Homo sapien
gacaccatgaaggtttagctctgaa

SEQ ID NO: 2268780 - DNA, 25 bp, Homo sapien
gtgccatcgtggtttactgcgcaga

SEQ ID NO: 2268781 - DNA, 25 bp, Homo sapien
cacctcatggtcatactcttcaatt

SEQ ID NO: 2268782 - DNA, 25 bp, Homo sapien
aaatgggcatccttatcatgttgca

SEQ ID NO: 2268783 - DNA, 25 bp, Homo sapien
gctgaaccatccttgtgtaatagga

SEQ ID NO: 2268784 - DNA, 25 bp, Homo sapien
cttgggcttttatatcctgggagaa

SEQ ID NO: 2268785 - DNA, 25 bp, Homo sapien
tcagcgtgatatactagctgtgggt

SEQ ID NO: 2268786 - DNA, 25 bp, Homo sapien
gaatcacctctggacggtctggcct

SEQ ID NO: 2268787 - DNA, 25 bp, Homo sapien
caatgcgatggtctgtgtcactgga

SEQ ID NO: 2268788 - DNA, 25 bp, Homo sapien
gaatgatccagagatgccggcatcc

SEQ ID NO: 2268789 - DNA, 25 bp, Homo sapien
ctgactacgatggagggcaataacc

SEQ ID NO: 2268790 - DNA, 25 bp, Homo sapien
aaaccaagaagagggtgcccagtca

SEQ ID NO: 2268791 - DNA, 25 bp, Homo sapien
tgaaaacgctacttaacctgctggg

SEQ ID NO: 2268792 - DNA, 25 bp, Homo sapien
tgatatcacagaggaggaatcttcc

SEQ ID NO: 2268793 - DNA, 25 bp, Homo sapien
taagaagttattctgcacgcccagt

SEQ ID NO: 2268794 - DNA, 25 bp, Homo sapien
gtcacataagccacacgcacttcag

SEQ ID NO: 2268795 - DNA, 25 bp, Homo sapien
catatcccttttattgcccggaggg

SEQ ID NO: 2268796 - DNA, 25 bp, Homo sapien
tatccagagagaacaacggaagtcc

SEQ ID NO: 2268797 - DNA, 25 bp, Homo sapien
gtccaaagggttccataagaatgca

SEQ ID NO: 2268798 - DNA, 25 bp, Homo sapien
tagagggtgaagaccctgtccagtc

SEQ ID NO: 2268799 - DNA, 25 bp, Homo sapien
ccttggtagagggtgaagaccctgt

SEQ ID NO: 2268800 - DNA, 25 bp, Homo sapien
caactagttgtagtagggggatcag

SEQ ID NO: 2268801 - DNA, 25 bp, Homo sapien
caacaactagttgtagtagggggat

SEQ ID NO: 2268802 - DNA, 25 bp, Homo sapien
agtagttcagtcttggggctgggct

SEQ ID NO: 2268803 - DNA, 25 bp, Homo sapien
cagtagttcagtcttggggctgggc

SEQ ID NO: 2268804 - DNA, 25 bp, Homo sapien
ctggggtccaaatcaagcaaggaat

SEQ ID NO: 2268805 - DNA, 25 bp, Homo sapien
actggggtccaaatcaagcaaggaa

SEQ ID NO: 2268806 - DNA, 25 bp, Homo sapien
gcaaggaatcatgacctgaagttac

SEQ ID NO: 2268807 - DNA, 25 bp, Homo sapien
aagcaaggaatcatgacctgaagtt

SEQ ID NO: 2268808 - DNA, 25 bp, Homo sapien
acaattttactgatctttgtctgtg

SEQ ID NO: 2268809 - DNA, 25 bp, Homo sapien
catcatcctattagttttcttaaca

SEQ ID NO: 2268810 - DNA, 25 bp, Homo sapien
taacaattttactgatctttgtctg

SEQ ID NO: 2268811 - DNA, 25 bp, Homo sapien
ctcttgtttgtctgagtcttcatca

SEQ ID NO: 2268812 - DNA, 25 bp, Homo sapien
tttcctataccgactatcttttctg

SEQ ID NO: 2268813 - DNA, 25 bp, Homo sapien
taagaatttcctataccgactatct

SEQ ID NO: 2268814 - DNA, 25 bp, Homo sapien
tcctataccgactatcttttctgat

SEQ ID NO: 2268815 - DNA, 25 bp, Homo sapien
tatactaagaatttcctataccgac

SEQ ID NO: 2268816 - DNA, 25 bp, Homo sapien
acacagttttctcacctggagatat

SEQ ID NO: 2268817 - DNA, 25 bp, Homo sapien
tcacctggagatattgtcgcttcat

SEQ ID NO: 2268818 - DNA, 25 bp, Homo sapien
tatctctacacagttttctcacctg

SEQ ID NO: 2268819 - DNA, 25 bp, Homo sapien
gttttctcacctggagatattgtcg

SEQ ID NO: 2268820 - DNA, 25 bp, Homo sapien
cccagatttaaggagcatgtgacat

SEQ ID NO: 2268821 - DNA, 25 bp, Homo sapien
tacagaaacccagatttaaggagca

SEQ ID NO: 2268822 - DNA, 25 bp, Homo sapien
gagcatgtgacatactgatgctgac

SEQ ID NO: 2268823 - DNA, 25 bp, Homo sapien
tagcagaacatgtcactacagaaac

SEQ ID NO: 2268824 - DNA, 25 bp, Homo sapien
cacatttagggtcacacatgtcaca

SEQ ID NO: 2268825 - DNA, 25 bp, Homo sapien
ccacatttagggtcacacatgtcac

SEQ ID NO: 2268826 - DNA, 25 bp, Homo sapien
gttagtattaactgctactccatca

SEQ ID NO: 2268827 - DNA, 25 bp, Homo sapien
tgttagtattaactgctactccatc

SEQ ID NO: 2268828 - DNA, 25 bp, Homo sapien
ttttgttagtattaactgctactcc

SEQ ID NO: 2268829 - DNA, 25 bp, Homo sapien
tttgttagtattaactgctactcca

SEQ ID NO: 2268830 - DNA, 25 bp, Homo sapien
ggtttaaacttgcatcattagcacc

SEQ ID NO: 2268831 - DNA, 25 bp, Homo sapien
taaacttgcatcattagcacctact

SEQ ID NO: 2268832 - DNA, 25 bp, Homo sapien
tcattagcacctactttttgagtaa

SEQ ID NO: 2268833 - DNA, 25 bp, Homo sapien
ttgcatcattagcacctactttttg

SEQ ID NO: 2268834 - DNA, 25 bp, Homo sapien
cacaaaaagtgaattcattcagctt

SEQ ID NO: 2268835 - DNA, 25 bp, Homo sapien
aaaaagtgaattcattcagcttggg

SEQ ID NO: 2268836 - DNA, 25 bp, Homo sapien
ctgtcttggcctctacacaaaaagt

SEQ ID NO: 2268837 - DNA, 25 bp, Homo sapien
cagcttggggcacaattgggcacaa

SEQ ID NO: 2268838 - DNA, 25 bp, Homo sapien
gagatgaagtgtggccaaatggaag

SEQ ID NO: 2268839 - DNA, 25 bp, Homo sapien
agatgaagtgtggccaaatggaagt

SEQ ID NO: 2268840 - DNA, 25 bp, Homo sapien
gcatattgcagagaaatctgatctg

SEQ ID NO: 2268841 - DNA, 25 bp, Homo sapien
tattgcagagaaatctgatctgctg

SEQ ID NO: 2268842 - DNA, 25 bp, Homo sapien
tgcagagaaatctgatctgctgaag

SEQ ID NO: 2268843 - DNA, 25 bp, Homo sapien
catattgcagagaaatctgatctgc

SEQ ID NO: 2268844 - DNA, 25 bp, Homo sapien
gctgctaactatggacccgctgtag

SEQ ID NO: 2268845 - DNA, 25 bp, Homo sapien
cagctatgagaacccatgagctgct

SEQ ID NO: 2268846 - DNA, 25 bp, Homo sapien
gtgggcagctatgagaacccatgag

SEQ ID NO: 2268847 - DNA, 25 bp, Homo sapien
tatggacccgctgtagacctgactg

SEQ ID NO: 2268848 - DNA, 25 bp, Homo sapien
ccggagtgctgagagccgaatggga

SEQ ID NO: 2268849 - DNA, 25 bp, Homo sapien
ttgctgctccactcaccaaccagaa

SEQ ID NO: 2268850 - DNA, 25 bp, Homo sapien
gattcttcagacagccggagtgctg

SEQ ID NO: 2268851 - DNA, 25 bp, Homo sapien
tgctgctccactcaccaaccagaat

SEQ ID NO: 2268852 - DNA, 25 bp, Homo sapien
ccgggttttggtaggattgctgagg

SEQ ID NO: 2268853 - DNA, 25 bp, Homo sapien
ctgcccgggttttggtaggattgct

SEQ ID NO: 2268854 - DNA, 25 bp, Homo sapien
acatgactgcccgggttttggtagg

SEQ ID NO: 2268855 - DNA, 25 bp, Homo sapien
atgactgcccgggttttggtaggat

SEQ ID NO: 2268856 - DNA, 25 bp, Homo sapien
aagtagtactgcattggcatcctcg

SEQ ID NO: 2268857 - DNA, 25 bp, Homo sapien
tgatcagtaagtagtactgcattgg

SEQ ID NO: 2268858 - DNA, 25 bp, Homo sapien
tcagtaagtagtactgcattggcat

SEQ ID NO: 2268859 - DNA, 25 bp, Homo sapien
agtaagtagtactgcattggcatcc

SEQ ID NO: 2268860 - DNA, 25 bp, Homo sapien
aacagaggatcaacatcggagcgtg

SEQ ID NO: 2268861 - DNA, 25 bp, Homo sapien
aacatcggagcgtgacaggccaaat

SEQ ID NO: 2268862 - DNA, 25 bp, Homo sapien
aattgcaggcgtcaggaggcttgcc

SEQ ID NO: 2268863 - DNA, 25 bp, Homo sapien
gctcttgcagaattgcaggcgtcag

SEQ ID NO: 2268864 - DNA, 25 bp, Homo sapien
ttcacttggaggtagactccgtgaa

SEQ ID NO: 2268865 - DNA, 25 bp, Homo sapien
ttgcagctgccgattccagatggct

SEQ ID NO: 2268866 - DNA, 25 bp, Homo sapien
catcaatggactcgctggaggtcct

SEQ ID NO: 2268867 - DNA, 25 bp, Homo sapien
gactccgtgaatgcccctgtggcct

SEQ ID NO: 2268868 - DNA, 25 bp, Homo sapien
tgtactctcgcaggtcgaggcaaat

SEQ ID NO: 2268869 - DNA, 25 bp, Homo sapien
taggctagaaccctggcatgtactc

SEQ ID NO: 2268870 - DNA, 25 bp, Homo sapien
ctggcatgtactctcgcaggtcgag

SEQ ID NO: 2268871 - DNA, 25 bp, Homo sapien
ttcgtctgcactgtaggctagaacc

SEQ ID NO: 2268872 - DNA, 25 bp, Homo sapien
taggcgtccgggcacacgcgggctg

SEQ ID NO: 2268873 - DNA, 25 bp, Homo sapien
ctccgagaagcccttggaacttgtg

SEQ ID NO: 2268874 - DNA, 25 bp, Homo sapien
tcctcagtgtggcaagccatgaaca

SEQ ID NO: 2268875 - DNA, 25 bp, Homo sapien
acttgtgccgggtagctaggcgtcc

SEQ ID NO: 2268876 - DNA, 25 bp, Homo sapien
ctctggcacccggtaggtcagcgag

SEQ ID NO: 2268877 - DNA, 25 bp, Homo sapien
cccggtaggtcagcgagccctcagg

SEQ ID NO: 2268878 - DNA, 25 bp, Homo sapien
agcctctctggcacccggtaggtca

SEQ ID NO: 2268879 - DNA, 25 bp, Homo sapien
ggcacccggtaggtcagcgagccct

SEQ ID NO: 2268880 - DNA, 25 bp, Homo sapien
ctcccgccgctccacgaggccctcc

SEQ ID NO: 2268881 - DNA, 25 bp, Homo sapien
tcccgccgctccacgaggccctcct

SEQ ID NO: 2268882 - DNA, 25 bp, Homo sapien
cctcccgccgctccacgaggccctc

SEQ ID NO: 2268883 - DNA, 25 bp, Homo sapien
gatgacggcgcctctgcggtctagg

SEQ ID NO: 2268884 - DNA, 25 bp, Homo sapien
atgacggcgcctctgcggtctaggt

SEQ ID NO: 2268885 - DNA, 25 bp, Homo sapien
ggccgaagaaacactgagaaggata

SEQ ID NO: 2268886 - DNA, 25 bp, Homo sapien
tagaaaggccgaagaaacactgaga

SEQ ID NO: 2268887 - DNA, 25 bp, Homo sapien
aaaggccgaagaaacactgagaagg

SEQ ID NO: 2268888 - DNA, 25 bp, Homo sapien
gccgaagaaacactgagaaggatac

SEQ ID NO: 2268889 - DNA, 25 bp, Homo sapien
tcttcatcttcgtcagtgatcaggg

SEQ ID NO: 2268890 - DNA, 25 bp, Homo sapien
ttcatcttcgtcagtgatcagggct

SEQ ID NO: 2268891 - DNA, 25 bp, Homo sapien
catcttcgtcagtgatcagggctga

SEQ ID NO: 2268892 - DNA, 25 bp, Homo sapien
tcttcgtcagtgatcagggctgaca

SEQ ID NO: 2268893 - DNA, 25 bp, Homo sapien
gatgaacacgatgcttctcttcttc

SEQ ID NO: 2268894 - DNA, 25 bp, Homo sapien
tcttgcagagatgaacacgatgctt

SEQ ID NO: 2268895 - DNA, 25 bp, Homo sapien
tgatgttcaccagatattccttggt

SEQ ID NO: 2268896 - DNA, 25 bp, Homo sapien
gggttactccgaaagaacaacatga

SEQ ID NO: 2268897 - DNA, 25 bp, Homo sapien
cataatccggataccactcaattgg

SEQ ID NO: 2268898 - DNA, 25 bp, Homo sapien
taatccggataccactcaattggag

SEQ ID NO: 2268899 - DNA, 25 bp, Homo sapien
cttcataatccggataccactcaat

SEQ ID NO: 2268900 - DNA, 25 bp, Homo sapien
tccggataccactcaattggagtgg

SEQ ID NO: 2268901 - DNA, 25 bp, Homo sapien
tcttgttagatcctgcgaagttgtg

SEQ ID NO: 2268902 - DNA, 25 bp, Homo sapien
ttgttagatcctgcgaagttgtggt

SEQ ID NO: 2268903 - DNA, 25 bp, Homo sapien
cttgttagatcctgcgaagttgtgg

SEQ ID NO: 2268904 - DNA, 25 bp, Homo sapien
atcttgttagatcctgcgaagttgt

SEQ ID NO: 2268905 - DNA, 25 bp, Homo sapien
gggattgcgccacaggtccttacat

SEQ ID NO: 2268906 - DNA, 25 bp, Homo sapien
gattgcgccacaggtccttacatag

SEQ ID NO: 2268907 - DNA, 25 bp, Homo sapien
tattgcaggggattgcgccacaggt

SEQ ID NO: 2268908 - DNA, 25 bp, Homo sapien
tgcgccacaggtccttacataggat

SEQ ID NO: 2268909 - DNA, 25 bp, Homo sapien
ctgttccctcttcaggtggcttcat

SEQ ID NO: 2268910 - DNA, 25 bp, Homo sapien
gacgtctctgttccctcttcaggtg

SEQ ID NO: 2268911 - DNA, 25 bp, Homo sapien
ctgacgtctctgttccctcttcagg

SEQ ID NO: 2268912 - DNA, 25 bp, Homo sapien
ctctgttccctcttcaggtggcttc

SEQ ID NO: 2268913 - DNA, 25 bp, Homo sapien
cagccgtggaatcaagtgccacaga

SEQ ID NO: 2268914 - DNA, 25 bp, Homo sapien
ttgacagccgtggaatcaagtgcca

SEQ ID NO: 2268915 - DNA, 25 bp, Homo sapien
ggttgacagccgtggaatcaagtgc

SEQ ID NO: 2268916 - DNA, 25 bp, Homo sapien
ggttggtgggatgactgccggtggg

SEQ ID NO: 2268917 - DNA, 25 bp, Homo sapien
tttgtgactcgatctctttttcctt

SEQ ID NO: 2268918 - DNA, 25 bp, Homo sapien
taggtaaaatctgatgctccatcat

SEQ ID NO: 2268919 - DNA, 25 bp, Homo sapien
tcctgaatttttgtgactcgatctc

SEQ ID NO: 2268920 - DNA, 25 bp, Homo sapien
ttcctgtgcataagaccatgctgag

SEQ ID NO: 2268921 - DNA, 25 bp, Homo sapien
cacagtaggatagagggcagcttga

SEQ ID NO: 2268922 - DNA, 25 bp, Homo sapien
aggaggacaagactcccgctccaga

SEQ ID NO: 2268923 - DNA, 25 bp, Homo sapien
gtgtctttgacatgcacacagtagg

SEQ ID NO: 2268924 - DNA, 25 bp, Homo sapien
tccgactgttttcagaataatttgc

SEQ ID NO: 2268925 - DNA, 25 bp, Homo sapien
tggaagaagcattacacagcctgta

SEQ ID NO: 2268926 - DNA, 25 bp, Homo sapien
tccgagttactgaggcacggtgcaa

SEQ ID NO: 2268927 - DNA, 25 bp, Homo sapien
tgtggcccacgtgcacggatattca

SEQ ID NO: 2268928 - DNA, 25 bp, Homo sapien
tcagtgcccttagcatctgtggccc

SEQ ID NO: 2268929 - DNA, 25 bp, Homo sapien
aagacaccaagtccctgtcggtaca

SEQ ID NO: 2268930 - DNA, 25 bp, Homo sapien
gacaccaagtccctgtcggtacaaa

SEQ ID NO: 2268931 - DNA, 25 bp, Homo sapien
agacaccaagtccctgtcggtacaa

SEQ ID NO: 2268932 - DNA, 25 bp, Homo sapien
gtttggcacacgagatgtcggcgtg

SEQ ID NO: 2268933 - DNA, 25 bp, Homo sapien
ctttgctacgtgatggatttgcagg

SEQ ID NO: 2268934 - DNA, 25 bp, Homo sapien
tctggagagttcttgcgcagaggta

SEQ ID NO: 2268935 - DNA, 25 bp, Homo sapien
gtcggaaagcatgcggaagtcctgc

SEQ ID NO: 2268936 - DNA, 25 bp, Homo sapien
ggccacagagcatctccgccttgtg

SEQ ID NO: 2268937 - DNA, 25 bp, Homo sapien
cacagagcatctccgccttgtgagc

SEQ ID NO: 2268938 - DNA, 25 bp, Homo sapien
tagtcatcgggcctcggggggtatg

SEQ ID NO: 2268939 - DNA, 25 bp, Homo sapien
cagcaggggatagtcatcgggcctc

SEQ ID NO: 2268940 - DNA, 25 bp, Homo sapien
cgtgggtcttgcagggagcgggtct

SEQ ID NO: 2268941 - DNA, 25 bp, Homo sapien
cgcagcagcggttgcggtgcctgtt

SEQ ID NO: 2268942 - DNA, 25 bp, Homo sapien
gggaccggagccctttggccagtgc

SEQ ID NO: 2268943 - DNA, 25 bp, Homo sapien
aggttctcagcagggcgacgcccgt

SEQ ID NO: 2268944 - DNA, 25 bp, Homo sapien
cccggtaggtcagcgagccctcagg

SEQ ID NO: 2268945 - DNA, 25 bp, Homo sapien
ctctggcacccggtaggtcagcgag

SEQ ID NO: 2268946 - DNA, 25 bp, Homo sapien
agcctctctggcacccggtaggtca

SEQ ID NO: 2268947 - DNA, 25 bp, Homo sapien
ggcacccggtaggtcagcgagccct

SEQ ID NO: 2268948 - DNA, 25 bp, Homo sapien
gctgctcggcatcaccaagggtttc

SEQ ID NO: 2268949 - DNA, 25 bp, Homo sapien
aaacgtctgctgctcggcatcacca

SEQ ID NO: 2268950 - DNA, 25 bp, Homo sapien
ctgctcggcatcaccaagggtttct

SEQ ID NO: 2268951 - DNA, 25 bp, Homo sapien
acgtctgctgctcggcatcaccaag

SEQ ID NO: 2268952 - DNA, 25 bp, Homo sapien
tccaggctgaccatgtagctcagca

SEQ ID NO: 2268953 - DNA, 25 bp, Homo sapien
ccaggctgaccatgtagctcagcat

SEQ ID NO: 2268954 - DNA, 25 bp, Homo sapien
ctccaggctgaccatgtagctcagc

SEQ ID NO: 2268955 - DNA, 25 bp, Homo sapien
cctactaaaccctctagcctcagtc

SEQ ID NO: 2268956 - DNA, 25 bp, Homo sapien
tcccctactaaaccctctagcctca

SEQ ID NO: 2268957 - DNA, 25 bp, Homo sapien
tctagcctcagtcttcccagcctca

SEQ ID NO: 2268958 - DNA, 25 bp, Homo sapien
ctagcctcagtcttcccagcctcac

SEQ ID NO: 2268959 - DNA, 25 bp, Homo sapien
tcacgagatattccttggtaatcac

SEQ ID NO: 2268960 - DNA, 25 bp, Homo sapien
tgttcacgagatattccttggtaat

SEQ ID NO: 2268961 - DNA, 25 bp, Homo sapien
gatgttcacgagatattccttggta

SEQ ID NO: 2268962 - DNA, 25 bp, Homo sapien
gtgatgttcacgagatattccttgg

SEQ ID NO: 2268963 - DNA, 25 bp, Homo sapien
ggtgtccccagcgatagggctcaac

SEQ ID NO: 2268964 - DNA, 25 bp, Homo sapien
gtggtgtccccagcgatagggctca

SEQ ID NO: 2268965 - DNA, 25 bp, Homo sapien
agcgatagggctcaacatcataatc

SEQ ID NO: 2268966 - DNA, 25 bp, Homo sapien
tccccagcgatagggctcaacatca

SEQ ID NO: 2268967 - DNA, 25 bp, Homo sapien
cagactggtgacccaagcagctggg

SEQ ID NO: 2268968 - DNA, 25 bp, Homo sapien
ctggtgacccaagcagctgggaaca

SEQ ID NO: 2268969 - DNA, 25 bp, Homo sapien
gtgacccaagcagctgggaacacac

SEQ ID NO: 2268970 - DNA, 25 bp, Homo sapien
tcagactggtgacccaagcagctgg

SEQ ID NO: 2268971 - DNA, 25 bp, Homo sapien
caacttaacggctcatctgaaatct

SEQ ID NO: 2268972 - DNA, 25 bp, Homo sapien
tgtgccacagttccgtacataagct

SEQ ID NO: 2268973 - DNA, 25 bp, Homo sapien
ctccagttccaacttaacggctcat

SEQ ID NO: 2268974 - DNA, 25 bp, Homo sapien
ggtttgtgccacagttccgtacata

SEQ ID NO: 2268975 - DNA, 25 bp, Homo sapien
acgctcccctgacatgcttggtccc

SEQ ID NO: 2268976 - DNA, 25 bp, Homo sapien
ccaggcctgctacgtcccgtttgga

SEQ ID NO: 2268977 - DNA, 25 bp, Homo sapien
tttggatgacaccacgctcccctga

SEQ ID NO: 2268978 - DNA, 25 bp, Homo sapien
tacgtcccgtttggatgacaccacg

SEQ ID NO: 2268979 - DNA, 25 bp, Homo sapien
tcagtttgggatcaaccagggctct

SEQ ID NO: 2268980 - DNA, 25 bp, Homo sapien
cagtttgggatcaaccagggctctc

SEQ ID NO: 2268981 - DNA, 25 bp, Homo sapien
ggttcagtttgggatcaaccagggc

SEQ ID NO: 2268982 - DNA, 25 bp, Homo sapien
ctggggttcagtttgggatcaacca

SEQ ID NO: 2268983 - DNA, 25 bp, Homo sapien
agcgcctccccgcatggtagaggga

SEQ ID NO: 2268984 - DNA, 25 bp, Homo sapien
cactaaggagtattgcattggcatc

SEQ ID NO: 2268985 - DNA, 25 bp, Homo sapien
cttcagttggttgatttactgtgac

SEQ ID NO: 2268986 - DNA, 25 bp, Homo sapien
ggcatctgcaatgaggagcgcctcc

SEQ ID NO: 2268987 - DNA, 25 bp, Homo sapien
tgcctttgggtgctcttaggccttc

SEQ ID NO: 2268988 - DNA, 25 bp, Homo sapien
gcctttgggtgctcttaggccttct

SEQ ID NO: 2268989 - DNA, 25 bp, Homo sapien
cctgcctttgggtgctcttaggcct

SEQ ID NO: 2268990 - DNA, 25 bp, Homo sapien
ctttgggtgctcttaggccttcttc

SEQ ID NO: 2268991 - DNA, 25 bp, Homo sapien
gcgagttctcaccagaacaggtttt

SEQ ID NO: 2268992 - DNA, 25 bp, Homo sapien
agcgagttctcaccagaacaggttt

SEQ ID NO: 2268993 - DNA, 25 bp, Homo sapien
gaagcgagttctcaccagaacaggt

SEQ ID NO: 2268994 - DNA, 25 bp, Homo sapien
cagaagcgagttctcaccagaacag

SEQ ID NO: 2268995 - DNA, 25 bp, Homo sapien
gaaacgtgggttgccacggacacat

SEQ ID NO: 2268996 - DNA, 25 bp, Homo sapien
ggtactatcttcctgcatgcagcgg

SEQ ID NO: 2268997 - DNA, 25 bp, Homo sapien
gctgagcatcagacgtttggggcat

SEQ ID NO: 2268998 - DNA, 25 bp, Homo sapien
taaaaagccggagcagaggcgggta

SEQ ID NO: 2268999 - DNA, 25 bp, Homo sapien
ggaggaggaccaacgggcacagcct

SEQ ID NO: 2269000 - DNA, 25 bp, Homo sapien
tgcaggaggaggaccaacgggcaca

SEQ ID NO: 2269001 - DNA, 25 bp, Homo sapien
gaggaggaccaacgggcacagcctg

SEQ ID NO: 2269002 - DNA, 25 bp, Homo sapien
acaggcggtggtctgtgggagtccg

SEQ ID NO: 2269003 - DNA, 25 bp, Homo sapien
tgtgctgctgttagacaacataatg

SEQ ID NO: 2269004 - DNA, 25 bp, Homo sapien
tagacaacataatggcggagacgaa

SEQ ID NO: 2269005 - DNA, 25 bp, Homo sapien
gagtccggagaagggcactgtcttc

SEQ ID NO: 2269006 - DNA, 25 bp, Homo sapien
atatcgacggccaacctggcggctg

SEQ ID NO: 2269007 - DNA, 25 bp, Homo sapien
gatatcgacggccaacctggcggct

SEQ ID NO: 2269008 - DNA, 25 bp, Homo sapien
attgtgtgcacgcaggatatcgacg

SEQ ID NO: 2269009 - DNA, 25 bp, Homo sapien
gtgtgcacgcaggatatcgacggcc

SEQ ID NO: 2269010 - DNA, 25 bp, Homo sapien
tagacgcaggtttcctgaaaagccc

SEQ ID NO: 2269011 - DNA, 25 bp, Homo sapien
tagtcccacaggtacgtagacgcag

SEQ ID NO: 2269012 - DNA, 25 bp, Homo sapien
cgcagatcgccgcacttgacctggg

SEQ ID NO: 2269013 - DNA, 25 bp, Homo sapien
tgctgagaacctagtcccacaggta

SEQ ID NO: 2269014 - DNA, 25 bp, Homo sapien
gcaccgcctcctctttcaaggccgc

SEQ ID NO: 2269015 - DNA, 25 bp, Homo sapien
tcaaggccgcctccttgctctgtac

SEQ ID NO: 2269016 - DNA, 25 bp, Homo sapien
acattggtctcctccttaaccacca

SEQ ID NO: 2269017 - DNA, 25 bp, Homo sapien
tacacattggtctcctccttaacca

SEQ ID NO: 2269018 - DNA, 25 bp, Homo sapien
ccatgcaccacaaactcgagtcttt

SEQ ID NO: 2269019 - DNA, 25 bp, Homo sapien
aaactcgagtctttagcaccttgtg

SEQ ID NO: 2269020 - DNA, 25 bp, Homo sapien
agccccatgcaccacaaactcgagt

SEQ ID NO: 2269021 - DNA, 25 bp, Homo sapien
gcaccacaaactcgagtctttagca

SEQ ID NO: 2269022 - DNA, 25 bp, Homo sapien
cgtggtgacaccctgcaattttgca

SEQ ID NO: 2269023 - DNA, 25 bp, Homo sapien
ccctctcttgttgatcccctgtctt

SEQ ID NO: 2269024 - DNA, 25 bp, Homo sapien
aagaaggcaacaccacgactgtggt

SEQ ID NO: 2269025 - DNA, 25 bp, Homo sapien
tccagatgattggttgggcaagcgt

SEQ ID NO: 2269026 - DNA, 25 bp, Homo sapien
gaccatttcatctagctgggctgaa

SEQ ID NO: 2269027 - DNA, 25 bp, Homo sapien
catttcatctagctgggctgaagtg

SEQ ID NO: 2269028 - DNA, 25 bp, Homo sapien
aacgggaccatttcatctagctggg

SEQ ID NO: 2269029 - DNA, 25 bp, Homo sapien
gactcaacgggaccatttcatctag

SEQ ID NO: 2269030 - DNA, 25 bp, Homo sapien
cgccggtaaccaggatgactgagtt

SEQ ID NO: 2269031 - DNA, 25 bp, Homo sapien
aaaggaaatttcatccagccgccgg

SEQ ID NO: 2269032 - DNA, 25 bp, Homo sapien
ccaggatgccaaagaagtattcctt

SEQ ID NO: 2269033 - DNA, 25 bp, Homo sapien
gatgccaaagaagtattccttaatg

SEQ ID NO: 2269034 - DNA, 25 bp, Homo sapien
aggcaatgttctgcctacagctgga

SEQ ID NO: 2269035 - DNA, 25 bp, Homo sapien
taggcaatgttctgcctacagctgg

SEQ ID NO: 2269036 - DNA, 25 bp, Homo sapien
gtaggcaatgttctgcctacagctg

SEQ ID NO: 2269037 - DNA, 25 bp, Homo sapien
ccatgatgccccaccacggacccca

SEQ ID NO: 2269038 - DNA, 25 bp, Homo sapien
gaggccaaggaatgagcagcaaggt

SEQ ID NO: 2269039 - DNA, 25 bp, Homo sapien
catgatgccccaccacggaccccac

SEQ ID NO: 2269040 - DNA, 25 bp, Homo sapien
cccatgatgccccaccacggacccc

SEQ ID NO: 2269041 - DNA, 25 bp, Homo sapien
ttccctgtacagtggcctgtcttat

SEQ ID NO: 2269042 - DNA, 25 bp, Homo sapien
agattccctgtacagtggcctgtct

SEQ ID NO: 2269043 - DNA, 25 bp, Homo sapien
ctccagattccctgtacagtggcct

SEQ ID NO: 2269044 - DNA, 25 bp, Homo sapien
cagaaaatagaacatttcctcacac

SEQ ID NO: 2269045 - DNA, 25 bp, Homo sapien
gataagatacctgttccagactcaa

SEQ ID NO: 2269046 - DNA, 25 bp, Homo sapien
caatatagtgataagatacctgttc

SEQ ID NO: 2269047 - DNA, 25 bp, Homo sapien
tagtgataagatacctgttccagac

SEQ ID NO: 2269048 - DNA, 25 bp, Homo sapien
taagatcctggaaccaacctgaaac

SEQ ID NO: 2269049 - DNA, 25 bp, Homo sapien
ttaatccagtctcattgtggaccat

SEQ ID NO: 2269050 - DNA, 25 bp, Homo sapien
tcccaatggtacaatcccggatttc

SEQ ID NO: 2269051 - DNA, 25 bp, Homo sapien
acgggatcatcctggtacagctgaa

SEQ ID NO: 2269052 - DNA, 25 bp, Homo sapien
gatattaaacctatagcctggaatt

SEQ ID NO: 2269053 - DNA, 25 bp, Homo sapien
tacagctgaatgctggagtacccca

SEQ ID NO: 2269054 - DNA, 25 bp, Homo sapien
gtggaccgcttttaactggaatgtg

SEQ ID NO: 2269055 - DNA, 25 bp, Homo sapien
acagcaggagcagattttgtaggag

SEQ ID NO: 2269056 - DNA, 25 bp, Homo sapien
gaccgcttttaactggaatgtgccc

SEQ ID NO: 2269057 - DNA, 25 bp, Homo sapien
gcaggagcagattttgtaggaggag

SEQ ID NO: 2269058 - DNA, 25 bp, Homo sapien
ctatttcctgtagaggaatgttcat

SEQ ID NO: 2269059 - DNA, 25 bp, Homo sapien
ttcctgtagaggaatgttcatcctg

SEQ ID NO: 2269060 - DNA, 25 bp, Homo sapien
gtagaggaatgttcatcctgactag

SEQ ID NO: 2269061 - DNA, 25 bp, Homo sapien
gaggaatgttcatcctgactagaat

SEQ ID NO: 2269062 - DNA, 25 bp, Homo sapien
tacctcacagcagccatcaagatca

SEQ ID NO: 2269063 - DNA, 25 bp, Homo sapien
atgttctctacctcacagcagccat

SEQ ID NO: 2269064 - DNA, 25 bp, Homo sapien
cttggacattcagaatgttctctac

SEQ ID NO: 2269065 - DNA, 25 bp, Homo sapien
ttcagaatgttctctacctcacagc

SEQ ID NO: 2269066 - DNA, 25 bp, Homo sapien
cttccatggagaacctgaaagctag

SEQ ID NO: 2269067 - DNA, 25 bp, Homo sapien
gagtttaaaatgttgtggtgcttcc

SEQ ID NO: 2269068 - DNA, 25 bp, Homo sapien
gaacctgaaagctagagtaagccaa

SEQ ID NO: 2269069 - DNA, 25 bp, Homo sapien
gctagagtaagccaagggttggatt

SEQ ID NO: 2269070 - DNA, 25 bp, Homo sapien
gaatccattgtgtgattgtttcctt

SEQ ID NO: 2269071 - DNA, 25 bp, Homo sapien
tgggaatccattgtgtgattgtttc

SEQ ID NO: 2269072 - DNA, 25 bp, Homo sapien
aactataaattccagctatagctgc

SEQ ID NO: 2269073 - DNA, 25 bp, Homo sapien
ccagctatagctgctaacaaggaaa

SEQ ID NO: 2269074 - DNA, 25 bp, Homo sapien
gcttcaggtcatgaggggttactct

SEQ ID NO: 2269075 - DNA, 25 bp, Homo sapien
ggtcatgaggggttactctttcatc

SEQ ID NO: 2269076 - DNA, 25 bp, Homo sapien
ttcgaattcatttcccagcctagca

SEQ ID NO: 2269077 - DNA, 25 bp, Homo sapien
ctctttcatcatcttgtggtttcat

SEQ ID NO: 2269078 - DNA, 25 bp, Homo sapien
ctgcagtgaattgggatgctggctc

SEQ ID NO: 2269079 - DNA, 25 bp, Homo sapien
cctgccggaatccaaattactctca

SEQ ID NO: 2269080 - DNA, 25 bp, Homo sapien
cattttgttggcctgtctgtggctc

SEQ ID NO: 2269081 - DNA, 25 bp, Homo sapien
tggctcagacctgccggaatccaaa

SEQ ID NO: 2269082 - DNA, 25 bp, Homo sapien
caggtcttgagcgggtattcctcca

SEQ ID NO: 2269083 - DNA, 25 bp, Homo sapien
aggtcttgagcgggtattcctccat

SEQ ID NO: 2269084 - DNA, 25 bp, Homo sapien
acaggtcttgagcgggtattcctcc

SEQ ID NO: 2269085 - DNA, 25 bp, Homo sapien
tacaggtcttgagcgggtattcctc

SEQ ID NO: 2269086 - DNA, 25 bp, Homo sapien
aatgagtacgccctagtcctagggc

SEQ ID NO: 2269087 - DNA, 25 bp, Homo sapien
aaggagaactccttggaggttgtgt

SEQ ID NO: 2269088 - DNA, 25 bp, Homo sapien
tctgtggggtccatagtatgatccc

SEQ ID NO: 2269089 - DNA, 25 bp, Homo sapien
gcactactgcctagagacaagcctc

SEQ ID NO: 2269090 - DNA, 25 bp, Homo sapien
cagctggacactttagtcttcctca

SEQ ID NO: 2269091 - DNA, 25 bp, Homo sapien
agctggacactttagtcttcctcac

SEQ ID NO: 2269092 - DNA, 25 bp, Homo sapien
acagctggacactttagtcttcctc

SEQ ID NO: 2269093 - DNA, 25 bp, Homo sapien
ttcatgttgtgagggggctctcttt

SEQ ID NO: 2269094 - DNA, 25 bp, Homo sapien
tgttgtgagggggctctctttcatt

SEQ ID NO: 2269095 - DNA, 25 bp, Homo sapien
catgttgtgagggggctctctttca

SEQ ID NO: 2269096 - DNA, 25 bp, Homo sapien
gttgtgagggggctctctttcattg

SEQ ID NO: 2269097 - DNA, 25 bp, Homo sapien
ccagtgtttcattgtcctgcaacca

SEQ ID NO: 2269098 - DNA, 25 bp, Homo sapien
ggagcacaccacaccaaaattcaga

SEQ ID NO: 2269099 - DNA, 25 bp, Homo sapien
caaaattcagacatctccagtgttt

SEQ ID NO: 2269100 - DNA, 25 bp, Homo sapien
aaaaagaggagcacaccacaccaaa

SEQ ID NO: 2269101 - DNA, 25 bp, Homo sapien
ggagtccaaatcaccgaccgttgca

SEQ ID NO: 2269102 - DNA, 25 bp, Homo sapien
gaattgggaggcaagctgatatttg

SEQ ID NO: 2269103 - DNA, 25 bp, Homo sapien
tcaccgaccgttgcaaaaaaagcca

SEQ ID NO: 2269104 - DNA, 25 bp, Homo sapien
gcaagctgatatttgctggagtcca

SEQ ID NO: 2269105 - DNA, 25 bp, Homo sapien
tcttgagttgcagggctcgatgttc

SEQ ID NO: 2269106 - DNA, 25 bp, Homo sapien
ctcttcttgagttgcagggctcgat

SEQ ID NO: 2269107 - DNA, 25 bp, Homo sapien
gagttgcagggctcgatgttcttta

SEQ ID NO: 2269108 - DNA, 25 bp, Homo sapien
cagggctcgatgttctttatgtttc

SEQ ID NO: 2269109 - DNA, 25 bp, Homo sapien
ctggaattcatgtgatactcccatg

SEQ ID NO: 2269110 - DNA, 25 bp, Homo sapien
agggaaggacttttgcctatcttct

SEQ ID NO: 2269111 - DNA, 25 bp, Homo sapien
tggaattcatgtgatactcccatga

SEQ ID NO: 2269112 - DNA, 25 bp, Homo sapien
gaattcatgtgatactcccatgatg

SEQ ID NO: 2269113 - DNA, 25 bp, Homo sapien
ggttgatacagtcaaggtcctgcag

SEQ ID NO: 2269114 - DNA, 25 bp, Homo sapien
ggctgacagctttgacagcccagtg

SEQ ID NO: 2269115 - DNA, 25 bp, Homo sapien
ccaaaggggtgttgaggttgataca

SEQ ID NO: 2269116 - DNA, 25 bp, Homo sapien
ctgacagctttgacagcccagtgcc

SEQ ID NO: 2269117 - DNA, 25 bp, Homo sapien
ttagagttgactttgtcgtggttcc

SEQ ID NO: 2269118 - DNA, 25 bp, Homo sapien
cttagagttgactttgtcgtggttc

SEQ ID NO: 2269119 - DNA, 25 bp, Homo sapien
tcaacatggaacctgatacttgcac

SEQ ID NO: 2269120 - DNA, 25 bp, Homo sapien
gacaccagaatatactccaatcaac

SEQ ID NO: 2269121 - DNA, 25 bp, Homo sapien
tacaagacaccagaatatactccaa

SEQ ID NO: 2269122 - DNA, 25 bp, Homo sapien
tactccaatcaacatggaacctgat

SEQ ID NO: 2269123 - DNA, 25 bp, Homo sapien
ggcttaacgacttctacactaaaca

SEQ ID NO: 2269124 - DNA, 25 bp, Homo sapien
tagttctggcttaacgacttctaca

SEQ ID NO: 2269125 - DNA, 25 bp, Homo sapien
tcctagttctggcttaacgacttct

SEQ ID NO: 2269126 - DNA, 25 bp, Homo sapien
ttctggcttaacgacttctacacta

SEQ ID NO: 2269127 - DNA, 25 bp, Homo sapien
tttgagacctttcatactcagagcc

SEQ ID NO: 2269128 - DNA, 25 bp, Homo sapien
tttcaggtagcagtactccaacgct

SEQ ID NO: 2269129 - DNA, 25 bp, Homo sapien
cacatcatggctcggctttcaggta

SEQ ID NO: 2269130 - DNA, 25 bp, Homo sapien
tccaacgctcaagtaacatttgaag

SEQ ID NO: 2269131 - DNA, 25 bp, Homo sapien
aaggaataagttcagataagggtga

SEQ ID NO: 2269132 - DNA, 25 bp, Homo sapien
gtcatgagggggtattccttcatca

SEQ ID NO: 2269133 - DNA, 25 bp, Homo sapien
taagggtgaggataaaatctggtga

SEQ ID NO: 2269134 - DNA, 25 bp, Homo sapien
ttcagataagggtgaggataaaatc

SEQ ID NO: 2269135 - DNA, 25 bp, Homo sapien
tgcagcctaaccatggagacactag

SEQ ID NO: 2269136 - DNA, 25 bp, Homo sapien
cattgtcctgcagcctaaccatgga

SEQ ID NO: 2269137 - DNA, 25 bp, Homo sapien
gcctaaccatggagacactagcagt

SEQ ID NO: 2269138 - DNA, 25 bp, Homo sapien
tgtcctgcagcctaaccatggagac

SEQ ID NO: 2269139 - DNA, 25 bp, Homo sapien
ggcagccttttttctcgctaccagg

SEQ ID NO: 2269140 - DNA, 25 bp, Homo sapien
gaggtccccacttatggtcccacag

SEQ ID NO: 2269141 - DNA, 25 bp, Homo sapien
gacatggccatggagatgccatgaa

SEQ ID NO: 2269142 - DNA, 25 bp, Homo sapien
gtcccacagtgggatttcacaggca

SEQ ID NO: 2269143 - DNA, 25 bp, Homo sapien
acattcttgaaacgcctccttctcc

SEQ ID NO: 2269144 - DNA, 25 bp, Homo sapien
attcttgaaacgcctccttctccag

SEQ ID NO: 2269145 - DNA, 25 bp, Homo sapien
ttcttgaaacgcctccttctccagc

SEQ ID NO: 2269146 - DNA, 25 bp, Homo sapien
tcacattcttgaaacgcctccttct

SEQ ID NO: 2269147 - DNA, 25 bp, Homo sapien
tcttgcacatagcctcttttgagac

SEQ ID NO: 2269148 - DNA, 25 bp, Homo sapien
taagcagccataacatcggataggg

SEQ ID NO: 2269149 - DNA, 25 bp, Homo sapien
aattcagtccccagcttagcaagtg

SEQ ID NO: 2269150 - DNA, 25 bp, Homo sapien
tttgggacacagagtataagcagcc

SEQ ID NO: 2269151 - DNA, 25 bp, Homo sapien
cattcccttagttgaagaagcagtc

SEQ ID NO: 2269152 - DNA, 25 bp, Homo sapien
tgtccaaataatctccccctacaaa

SEQ ID NO: 2269153 - DNA, 25 bp, Homo sapien
ctccccctacaaagcacaaagccat

SEQ ID NO: 2269154 - DNA, 25 bp, Homo sapien
ccatgtccaaataatctccccctac

SEQ ID NO: 2269155 - DNA, 25 bp, Homo sapien
aataatctccccctacaaagcacaa

SEQ ID NO: 2269156 - DNA, 25 bp, Homo sapien
gtaaagcctgccagtatgccctggg

SEQ ID NO: 2269157 - DNA, 25 bp, Homo sapien
caggtaaagcctgccagtatgccct

SEQ ID NO: 2269158 - DNA, 25 bp, Homo sapien
ggtaaagcctgccagtatgccctgg

SEQ ID NO: 2269159 - DNA, 25 bp, Homo sapien
tcccaggtaaagcctgccagtatgc

SEQ ID NO: 2269160 - DNA, 25 bp, Homo sapien
tatattccaatttagatgggtcctg

SEQ ID NO: 2269161 - DNA, 25 bp, Homo sapien
tcctgattcttgcacaaaggctctt

SEQ ID NO: 2269162 - DNA, 25 bp, Homo sapien
cctcctccagtggtacccaaagatg

SEQ ID NO: 2269163 - DNA, 25 bp, Homo sapien
gtcttgaaacgcgtcctcctccagt

SEQ ID NO: 2269164 - DNA, 25 bp, Homo sapien
catgtttcctgccttttgcagagag

SEQ ID NO: 2269165 - DNA, 25 bp, Homo sapien
ctttttcatgtttcctgccttttgc

SEQ ID NO: 2269166 - DNA, 25 bp, Homo sapien
ttttcatgtttcctgccttttgcag

SEQ ID NO: 2269167 - DNA, 25 bp, Homo sapien
ttcatgtttcctgccttttgcagag

SEQ ID NO: 2269168 - DNA, 25 bp, Homo sapien
tcagacagggtggggatacaatctt

SEQ ID NO: 2269169 - DNA, 25 bp, Homo sapien
cagacagggtggggatacaatcttg

SEQ ID NO: 2269170 - DNA, 25 bp, Homo sapien
agacagggtggggatacaatcttgt

SEQ ID NO: 2269171 - DNA, 25 bp, Homo sapien
acagggtggggatacaatcttgtga

SEQ ID NO: 2269172 - DNA, 25 bp, Homo sapien
cacatcatgagggttactcctcctt

SEQ ID NO: 2269173 - DNA, 25 bp, Homo sapien
aggtgaacacgtgcttcacatcatg

SEQ ID NO: 2269174 - DNA, 25 bp, Homo sapien
acatcatgagggttactcctccttt

SEQ ID NO: 2269175 - DNA, 25 bp, Homo sapien
caggtgaacacgtgcttcacatcat

SEQ ID NO: 2269176 - DNA, 25 bp, Homo sapien
gaacagccagtttaaggtgtgagaa

SEQ ID NO: 2269177 - DNA, 25 bp, Homo sapien
atgagggttccacattgcccctcat

SEQ ID NO: 2269178 - DNA, 25 bp, Homo sapien
tgagggttccacattgcccctcatc

SEQ ID NO: 2269179 - DNA, 25 bp, Homo sapien
ggaggtgcatgggataccccaactg

SEQ ID NO: 2269180 - DNA, 25 bp, Homo sapien
gtaaagatgaaatctggggaggtgc

SEQ ID NO: 2269181 - DNA, 25 bp, Homo sapien
taaagatgaaatctggggaggtgca

SEQ ID NO: 2269182 - DNA, 25 bp, Homo sapien
ggtgcatgggataccccaactgcac

SEQ ID NO: 2269183 - DNA, 25 bp, Homo sapien
aattcaccttgaattcgattcccag

SEQ ID NO: 2269184 - DNA, 25 bp, Homo sapien
ccaataattcatgtcttaggtcggg

SEQ ID NO: 2269185 - DNA, 25 bp, Homo sapien
tcgattcccagccaagccaataatt

SEQ ID NO: 2269186 - DNA, 25 bp, Homo sapien
cagggcacattgaattcaccttgaa

SEQ ID NO: 2269187 - DNA, 25 bp, Homo sapien
tctgtggtgttcatgggattgtccc

SEQ ID NO: 2269188 - DNA, 25 bp, Homo sapien
ctgtggtgttcatgggattgtccca

SEQ ID NO: 2269189 - DNA, 25 bp, Homo sapien
cttctctgtggtgttcatgggattg

SEQ ID NO: 2269190 - DNA, 25 bp, Homo sapien
ctgacttctctgtggtgttcatggg

SEQ ID NO: 2269191 - DNA, 25 bp, Homo sapien
gagacctccttggagatgcatcggc

SEQ ID NO: 2269192 - DNA, 25 bp, Homo sapien
tctgatgagtgcctgagcctgcctc

SEQ ID NO: 2269193 - DNA, 25 bp, Homo sapien
gagtgtgagtgctggctagcatcac

SEQ ID NO: 2269194 - DNA, 25 bp, Homo sapien
actgctgccttgtgacaatgccctg

SEQ ID NO: 2269195 - DNA, 25 bp, Homo sapien
ctggtggaggatttcgagtgttgga

SEQ ID NO: 2269196 - DNA, 25 bp, Homo sapien
ggatttcgagtgttggatgtctgca

SEQ ID NO: 2269197 - DNA, 25 bp, Homo sapien
tctggtggaggatttcgagtgttgg

SEQ ID NO: 2269198 - DNA, 25 bp, Homo sapien
tggaggatttcgagtgttggatgtc

SEQ ID NO: 2269199 - DNA, 25 bp, Homo sapien
ctccgtggagaagtgtcagcggtgt

SEQ ID NO: 2269200 - DNA, 25 bp, Homo sapien
tggagaagtgtcagcggtgtcttct

SEQ ID NO: 2269201 - DNA, 25 bp, Homo sapien
gaagtgtcagcggtgtcttctcgtc

SEQ ID NO: 2269202 - DNA, 25 bp, Homo sapien
aagtgtcagcggtgtcttctcgtct

SEQ ID NO: 2269203 - DNA, 25 bp, Homo sapien
ctctgtctagcatcacaataaatgt

SEQ ID NO: 2269204 - DNA, 25 bp, Homo sapien
gtgagctctgtctagcatcacaata

SEQ ID NO: 2269205 - DNA, 25 bp, Homo sapien
gagctctgtctagcatcacaataaa

SEQ ID NO: 2269206 - DNA, 25 bp, Homo sapien
ggtctgattgtgagctctgtctagc

SEQ ID NO: 2269207 - DNA, 25 bp, Homo sapien
aggaaatggctagcagggtccctga

SEQ ID NO: 2269208 - DNA, 25 bp, Homo sapien
ctgaacaaggaaatggctagcaggg

SEQ ID NO: 2269209 - DNA, 25 bp, Homo sapien
gtcctgcagcgggtttttatagtca

SEQ ID NO: 2269210 - DNA, 25 bp, Homo sapien
ctgcagcgggtttttatagtcagcc

SEQ ID NO: 2269211 - DNA, 25 bp, Homo sapien
tcgcgaaacacctcttcctccagcg

SEQ ID NO: 2269212 - DNA, 25 bp, Homo sapien
agtcgcgaaacacctcttcctccag

SEQ ID NO: 2269213 - DNA, 25 bp, Homo sapien
cgaaacacctcttcctccagcgcga

SEQ ID NO: 2269214 - DNA, 25 bp, Homo sapien
gcgaaacacctcttcctccagcgcg

SEQ ID NO: 2269215 - DNA, 25 bp, Homo sapien
tagaagagcagtttccagcgaccac

SEQ ID NO: 2269216 - DNA, 25 bp, Homo sapien
cctctttcgctaatggagttagaag

SEQ ID NO: 2269217 - DNA, 25 bp, Homo sapien
aagagcagtttccagcgaccacctc

SEQ ID NO: 2269218 - DNA, 25 bp, Homo sapien
gagttagaagagcagtttccagcga

SEQ ID NO: 2269219 - DNA, 25 bp, Homo sapien
ccttcatacatgagccaaatgggag

SEQ ID NO: 2269220 - DNA, 25 bp, Homo sapien
tcatgtcatgaggaagatcttgtcc

SEQ ID NO: 2269221 - DNA, 25 bp, Homo sapien
aaagtgacactcacagacctgtgtg

SEQ ID NO: 2269222 - DNA, 25 bp, Homo sapien
cagtgttttattgacctgagtccaa

SEQ ID NO: 2269223 - DNA, 25 bp, Homo sapien
ctagaaaagggcagatgagagccag

SEQ ID NO: 2269224 - DNA, 25 bp, Homo sapien
tagaaaagggcagatgagagccaga

SEQ ID NO: 2269225 - DNA, 25 bp, Homo sapien
ggaggtgcaccggcattggaaccac

SEQ ID NO: 2269226 - DNA, 25 bp, Homo sapien
ccacaaatagtctcatgatcatggc

SEQ ID NO: 2269227 - DNA, 25 bp, Homo sapien
atagtctcatgatcatggcagaagg

SEQ ID NO: 2269228 - DNA, 25 bp, Homo sapien
ggcattggaaccacacctgtcttct

SEQ ID NO: 2269229 - DNA, 25 bp, Homo sapien
cttctccagcgggaaccaatcatgg

SEQ ID NO: 2269230 - DNA, 25 bp, Homo sapien
gggccctgactttgcaaattttaca

SEQ ID NO: 2269231 - DNA, 25 bp, Homo sapien
tacagtccagccgttggttttcgca

SEQ ID NO: 2269232 - DNA, 25 bp, Homo sapien
ggttttcgcaggcagactttgtcct

SEQ ID NO: 2269233 - DNA, 25 bp, Homo sapien
agtcttcagagaccacctcagtttg

SEQ ID NO: 2269234 - DNA, 25 bp, Homo sapien
cagtggttcccagccatggagtcat

SEQ ID NO: 2269235 - DNA, 25 bp, Homo sapien
cttcagagaccacctcagtttggaa

SEQ ID NO: 2269236 - DNA, 25 bp, Homo sapien
ccttcagtggttcccagccatggag

SEQ ID NO: 2269237 - DNA, 25 bp, Homo sapien
ccgttcgacatgtaagaatactgct

SEQ ID NO: 2269238 - DNA, 25 bp, Homo sapien
tttcaacatcatctacatgagtgag

SEQ ID NO: 2269239 - DNA, 25 bp, Homo sapien
tagtggacatgattgtcagacttgc

SEQ ID NO: 2269240 - DNA, 25 bp, Homo sapien
aacagcattagtggacatgattgtc

SEQ ID NO: 2269241 - DNA, 25 bp, Homo sapien
gatgggaatgtctctaaatacagat

SEQ ID NO: 2269242 - DNA, 25 bp, Homo sapien
cagttctcaggaggcttttggttcc

SEQ ID NO: 2269243 - DNA, 25 bp, Homo sapien
caaaaatgactttgcataggctggc

SEQ ID NO: 2269244 - DNA, 25 bp, Homo sapien
ttccagcttgtggttcgtggtctca

SEQ ID NO: 2269245 - DNA, 25 bp, Homo sapien
gttgtgagggggcaatcctccatca

SEQ ID NO: 2269246 - DNA, 25 bp, Homo sapien
tgagcagctgcttcacgttgtgagg

SEQ ID NO: 2269247 - DNA, 25 bp, Homo sapien
taaccttgaattcagtttccagctg

SEQ ID NO: 2269248 - DNA, 25 bp, Homo sapien
cagtcatgttgcagagctccttgaa

SEQ ID NO: 2269249 - DNA, 25 bp, Homo sapien
ggacatttggagtacaaactggggc

SEQ ID NO: 2269250 - DNA, 25 bp, Homo sapien
tggagtacaaactggggccaagttg

SEQ ID NO: 2269251 - DNA, 25 bp, Homo sapien
aggggacatttggagtacaaactgg

SEQ ID NO: 2269252 - DNA, 25 bp, Homo sapien
gcaataaggtaataaggtcagatag

SEQ ID NO: 2269253 - DNA, 25 bp, Homo sapien
ctttgaacagcaataaggtaataag

SEQ ID NO: 2269254 - DNA, 25 bp, Homo sapien
tgaacagcaataaggtaataaggtc

SEQ ID NO: 2269255 - DNA, 25 bp, Homo sapien
tcagataggggtggggatacccctc

SEQ ID NO: 2269256 - DNA, 25 bp, Homo sapien
ctcgaatttgattcccagaggagtt

SEQ ID NO: 2269257 - DNA, 25 bp, Homo sapien
ccagaggagttggtgcttcacatca

SEQ ID NO: 2269258 - DNA, 25 bp, Homo sapien
ggtgcttcacatcatcagggggaac

SEQ ID NO: 2269259 - DNA, 25 bp, Homo sapien
atcagggggaacttctccattgtct

SEQ ID NO: 2269260 - DNA, 25 bp, Homo sapien
cattcatctctaccgggcctattaa

SEQ ID NO: 2269261 - DNA, 25 bp, Homo sapien
ttcagccaatccaaggagagacact

SEQ ID NO: 2269262 - DNA, 25 bp, Homo sapien
cagaaatataccagtgtttaattgt

SEQ ID NO: 2269263 - DNA, 25 bp, Homo sapien
ccagtgtttaattgtctttcagcca

SEQ ID NO: 2269264 - DNA, 25 bp, Homo sapien
ggctgagaaacaccactgtccaaat

SEQ ID NO: 2269265 - DNA, 25 bp, Homo sapien
catgaatctgcagtgaattggcaag

SEQ ID NO: 2269266 - DNA, 25 bp, Homo sapien
caagctggctgagaaacaccactgt

SEQ ID NO: 2269267 - DNA, 25 bp, Homo sapien
tgaattggcaagctggctgagaaac

SEQ ID NO: 2269268 - DNA, 25 bp, Homo sapien
gggctgctgggatccatattcttta

SEQ ID NO: 2269269 - DNA, 25 bp, Homo sapien
ttgggctgctgggatccatattctt

SEQ ID NO: 2269270 - DNA, 25 bp, Homo sapien
acttgggctgctgggatccatattc

SEQ ID NO: 2269271 - DNA, 25 bp, Homo sapien
ctacttgggctgctgggatccatat

SEQ ID NO: 2269272 - DNA, 25 bp, Homo sapien
gaagcataatgggagggcaatcgat

SEQ ID NO: 2269273 - DNA, 25 bp, Homo sapien
gttgcaaaagcagtccacacaatcc

SEQ ID NO: 2269274 - DNA, 25 bp, Homo sapien
tcctttagttgcaaaagcagtccac

SEQ ID NO: 2269275 - DNA, 25 bp, Homo sapien
caatcgatagatactgggtggcatg

SEQ ID NO: 2269276 - DNA, 25 bp, Homo sapien
ttttttctggaacagagagtgtgag

SEQ ID NO: 2269277 - DNA, 25 bp, Homo sapien
cagcaaaaagaacagttaggggtga

SEQ ID NO: 2269278 - DNA, 25 bp, Homo sapien
ggcaactcctccatcgttttgggat

SEQ ID NO: 2269279 - DNA, 25 bp, Homo sapien
gagtgtgagcagcaaaaagaacagt

SEQ ID NO: 2269280 - DNA, 25 bp, Homo sapien
ctcgaattcaatcagatgcttcaca

SEQ ID NO: 2269281 - DNA, 25 bp, Homo sapien
gagaaacctgacaacggagatggcc

SEQ ID NO: 2269282 - DNA, 25 bp, Homo sapien
aggttgagactcttaatatcccaca

SEQ ID NO: 2269283 - DNA, 25 bp, Homo sapien
agaaacctgacaacggagatggccc

SEQ ID NO: 2269284 - DNA, 25 bp, Homo sapien
gactcttaatatcccacagtggatt

SEQ ID NO: 2269285 - DNA, 25 bp, Homo sapien
gtactccacagtaaaagaccatttg

SEQ ID NO: 2269286 - DNA, 25 bp, Homo sapien
aaagaccatttggagtgcaaattga

SEQ ID NO: 2269287 - DNA, 25 bp, Homo sapien
gaccatttggagtgcaaattgaggc

SEQ ID NO: 2269288 - DNA, 25 bp, Homo sapien
cacagtaaaagaccatttggagtgc

SEQ ID NO: 2269289 - DNA, 25 bp, Homo sapien
tttgtggccagtctatgtggctctg

SEQ ID NO: 2269290 - DNA, 25 bp, Homo sapien
tttttgtggccagtctatgtggctc

SEQ ID NO: 2269291 - DNA, 25 bp, Homo sapien
tggcagctgagataccccggcatcc

SEQ ID NO: 2269292 - DNA, 25 bp, Homo sapien
tccacagtgaattcaatggcagctg

SEQ ID NO: 2269293 - DNA, 25 bp, Homo sapien
ctgtagtcaaatggaagtggaatag

SEQ ID NO: 2269294 - DNA, 25 bp, Homo sapien
gtcctcattggtgtagggcttcctg

SEQ ID NO: 2269295 - DNA, 25 bp, Homo sapien
tcaacatcttccacactaaactctt

SEQ ID NO: 2269296 - DNA, 25 bp, Homo sapien
tcaaatggaagtggaatagattgat

SEQ ID NO: 2269297 - DNA, 25 bp, Homo sapien
aaaaatttggagtgcaaattgtggc

SEQ ID NO: 2269298 - DNA, 25 bp, Homo sapien
caccagcaaaaagggtgaaaataga

SEQ ID NO: 2269299 - DNA, 25 bp, Homo sapien
ccaacctgcaggaaaaatttggagt

SEQ ID NO: 2269300 - DNA, 25 bp, Homo sapien
gccaatctggaaaactcctggtttg

SEQ ID NO: 2269301 - DNA, 25 bp, Homo sapien
ttctggtatttcaggtataagtcca

SEQ ID NO: 2269302 - DNA, 25 bp, Homo sapien
caaagactgctcaacatctcaccag

SEQ ID NO: 2269303 - DNA, 25 bp, Homo sapien
ggtataagtccatcatccaaagact

SEQ ID NO: 2269304 - DNA, 25 bp, Homo sapien
atgaatgagtgcagagaggtcaagt

SEQ ID NO: 2269305 - DNA, 25 bp, Homo sapien
gaaaccacaggatagtcccatgagc

SEQ ID NO: 2269306 - DNA, 25 bp, Homo sapien
tgtggaaaccacaggatagtcccat

SEQ ID NO: 2269307 - DNA, 25 bp, Homo sapien
gtggagctgcgtggttggtgaactc

SEQ ID NO: 2269308 - DNA, 25 bp, Homo sapien
gctgcgtggttggtgaactcttgcc

SEQ ID NO: 2269309 - DNA, 25 bp, Homo sapien
tcacagtctggaaatgcctctccct

SEQ ID NO: 2269310 - DNA, 25 bp, Homo sapien
tgggaatggattcagaagagcagtt

SEQ ID NO: 2269311 - DNA, 25 bp, Homo sapien
cagacaattttccaatcaccatggg

SEQ ID NO: 2269312 - DNA, 25 bp, Homo sapien
atcaccatgggacccatttctggca

SEQ ID NO: 2269313 - DNA, 25 bp, Homo sapien
ttgccttttgcagagggccccatca

SEQ ID NO: 2269314 - DNA, 25 bp, Homo sapien
tttgccttttgcagagggccccatc

SEQ ID NO: 2269315 - DNA, 25 bp, Homo sapien
tgccttttgcagagggccccatcaa

SEQ ID NO: 2269316 - DNA, 25 bp, Homo sapien
gcgcatcacactccaaagcaaatat

SEQ ID NO: 2269317 - DNA, 25 bp, Homo sapien
tccgttatttttccgtggagtatga

SEQ ID NO: 2269318 - DNA, 25 bp, Homo sapien
ttctcagtgaattaggagacagcgc

SEQ ID NO: 2269319 - DNA, 25 bp, Homo sapien
cagggctccatctccgttatttttc

SEQ ID NO: 2269320 - DNA, 25 bp, Homo sapien
ggtgtggatcctcgagatagtccca

SEQ ID NO: 2269321 - DNA, 25 bp, Homo sapien
catgaatgtcatagttgcctaagtc

SEQ ID NO: 2269322 - DNA, 25 bp, Homo sapien
tgtggatcctcgagatagtcccatg

SEQ ID NO: 2269323 - DNA, 25 bp, Homo sapien
gaggtgtggatcctcgagatagtcc

SEQ ID NO: 2269324 - DNA, 25 bp, Homo sapien
gtgtgcatgagccatcctcgcaaat

SEQ ID NO: 2269325 - DNA, 25 bp, Homo sapien
ggcacaaggccttagctttgagctc

SEQ ID NO: 2269326 - DNA, 25 bp, Homo sapien
caaatgcatattcgctagtgtcagg

SEQ ID NO: 2269327 - DNA, 25 bp, Homo sapien
catcctcgcaaatgcatattcgcta

SEQ ID NO: 2269328 - DNA, 25 bp, Homo sapien
accatgtagatcacaagacgtggtc

SEQ ID NO: 2269329 - DNA, 25 bp, Homo sapien
ggaatgcttcatactccagtgggac

SEQ ID NO: 2269330 - DNA, 25 bp, Homo sapien
cagtgggacccgaccatgtagatca

SEQ ID NO: 2269331 - DNA, 25 bp, Homo sapien
tccccttgggaccagattcttgcat

SEQ ID NO: 2269332 - DNA, 25 bp, Homo sapien
tccaaccacagagatgacccgaagg

SEQ ID NO: 2269333 - DNA, 25 bp, Homo sapien
atccaaccacagagatgacccgaag

SEQ ID NO: 2269334 - DNA, 25 bp, Homo sapien
tgaaagcccagtccaagatatgaga

SEQ ID NO: 2269335 - DNA, 25 bp, Homo sapien
tgctcctgtctttcacaatgagccc

SEQ ID NO: 2269336 - DNA, 25 bp, Homo sapien
ccttgttgttgctcctgtctttcac

SEQ ID NO: 2269337 - DNA, 25 bp, Homo sapien
agaccctgtctcaacttcaccttca

SEQ ID NO: 2269338 - DNA, 25 bp, Homo sapien
gagtctagaccttttgggtaaggca

SEQ ID NO: 2269339 - DNA, 25 bp, Homo sapien
tgaccatggagactgcccaaaaggg

SEQ ID NO: 2269340 - DNA, 25 bp, Homo sapien
gacagaggagcagattgcagcgacc

SEQ ID NO: 2269341 - DNA, 25 bp, Homo sapien
agagagcagactcttacacacagtc

SEQ ID NO: 2269342 - DNA, 25 bp, Homo sapien
gattatatgccaatccccgctggac

SEQ ID NO: 2269343 - DNA, 25 bp, Homo sapien
tggcatgacccgatcaccaagatgg

SEQ ID NO: 2269344 - DNA, 25 bp, Homo sapien
tcaccaagatggactggagagtcca

SEQ ID NO: 2269345 - DNA, 25 bp, Homo sapien
ggtctttcctgaatggagtcacaag

SEQ ID NO: 2269346 - DNA, 25 bp, Homo sapien
catagattattaagtggccagggat

SEQ ID NO: 2269347 - DNA, 25 bp, Homo sapien
cattttcctggtaatctagcctctg

SEQ ID NO: 2269348 - DNA, 25 bp, Homo sapien
cagattggactgcttttcaccatag

SEQ ID NO: 2269349 - DNA, 25 bp, Homo sapien
aaaagattggctattctggctgcac

SEQ ID NO: 2269350 - DNA, 25 bp, Homo sapien
tattcttccacttctatcagaggcc

SEQ ID NO: 2269351 - DNA, 25 bp, Homo sapien
ttcttccacttctatcagaggcctg

SEQ ID NO: 2269352 - DNA, 25 bp, Homo sapien
ccacttctatcagaggcctgcgtga

SEQ ID NO: 2269353 - DNA, 25 bp, Homo sapien
cttccacttctatcagaggcctgcg

SEQ ID NO: 2269354 - DNA, 25 bp, Homo sapien
attgtcatgttttaatgagtgggac

SEQ ID NO: 2269355 - DNA, 25 bp, Homo sapien
tgagtgggacgctttgatagtttta

SEQ ID NO: 2269356 - DNA, 25 bp, Homo sapien
catgttttaatgagtgggacgcttt

SEQ ID NO: 2269357 - DNA, 25 bp, Homo sapien
taatgagtgggacgctttgatagtt

SEQ ID NO: 2269358 - DNA, 25 bp, Homo sapien
tcatgagtctgcagtggattgggaa

SEQ ID NO: 2269359 - DNA, 25 bp, Homo sapien
cagtggattgggaagcatgccaaaa

SEQ ID NO: 2269360 - DNA, 25 bp, Homo sapien
tctgcagtggattgggaagcatgcc

SEQ ID NO: 2269361 - DNA, 25 bp, Homo sapien
tcattcatgagtctgcagtggattg

SEQ ID NO: 2269362 - DNA, 25 bp, Homo sapien
ctatattgcaatccccatgtgacct

SEQ ID NO: 2269363 - DNA, 25 bp, Homo sapien
ccattggaggccagtccaatgcgtg

SEQ ID NO: 2269364 - DNA, 25 bp, Homo sapien
cagtccaatgcgtgaggacactgct

SEQ ID NO: 2269365 - DNA, 25 bp, Homo sapien
gaggccagtccaatgcgtgaggaca

SEQ ID NO: 2269366 - DNA, 25 bp, Homo sapien
attggaggccagtccaatgcgtgag

SEQ ID NO: 2269367 - DNA, 25 bp, Homo sapien
ccacttctatcgaatggctgcataa

SEQ ID NO: 2269368 - DNA, 25 bp, Homo sapien
cctagagtttcctgtgactggttca

SEQ ID NO: 2269369 - DNA, 25 bp, Homo sapien
gagaatgatcttcatgggactccat

SEQ ID NO: 2269370 - DNA, 25 bp, Homo sapien
gactggttcaacaacttccacactt

SEQ ID NO: 2269371 - DNA, 25 bp, Homo sapien
cagtgtttaaagcacgtgtttccaa

SEQ ID NO: 2269372 - DNA, 25 bp, Homo sapien
ataaagacagtgtttaaagcacgtg

SEQ ID NO: 2269373 - DNA, 25 bp, Homo sapien
agacagtgtttaaagcacgtgtttc

SEQ ID NO: 2269374 - DNA, 25 bp, Homo sapien
tttaaagcacgtgtttccaacttca

SEQ ID NO: 2269375 - DNA, 25 bp, Homo sapien
gtcagatacaggtgagtatacaatc

SEQ ID NO: 2269376 - DNA, 25 bp, Homo sapien
tatcctgggacctagagtgtgagta

SEQ ID NO: 2269377 - DNA, 25 bp, Homo sapien
taaggtcagatacaggtgagtatac

SEQ ID NO: 2269378 - DNA, 25 bp, Homo sapien
cttcacataatgagggggcactcct

SEQ ID NO: 2269379 - DNA, 25 bp, Homo sapien
agtcctctccacagggccacttgaa

SEQ ID NO: 2269380 - DNA, 25 bp, Homo sapien
atacagggggagacactagcagtcc

SEQ ID NO: 2269381 - DNA, 25 bp, Homo sapien
tcctgcagcaaatacagggggagac

SEQ ID NO: 2269382 - DNA, 25 bp, Homo sapien
tctccacagggccacttgaacttac

SEQ ID NO: 2269383 - DNA, 25 bp, Homo sapien
gtaggagagggcatacataagccag

SEQ ID NO: 2269384 - DNA, 25 bp, Homo sapien
aggattgtcccatgagagtaggaga

SEQ ID NO: 2269385 - DNA, 25 bp, Homo sapien
acaggattgtcccatgagagtagga

SEQ ID NO: 2269386 - DNA, 25 bp, Homo sapien
taggagagggcatacataagccagc

SEQ ID NO: 2269387 - DNA, 25 bp, Homo sapien
ttttcaggtttgcaatcgccacaga

SEQ ID NO: 2269388 - DNA, 25 bp, Homo sapien
attttgttcataggtgagcaggtac

SEQ ID NO: 2269389 - DNA, 25 bp, Homo sapien
gcaggtacttcctgtcgtcagggtt

SEQ ID NO: 2269390 - DNA, 25 bp, Homo sapien
gttcataggtgagcaggtacttcct

SEQ ID NO: 2269391 - DNA, 25 bp, Homo sapien
tgtcgtcagggttcactcctccatc

SEQ ID NO: 2269392 - DNA, 25 bp, Homo sapien
atagagatcagtcctggctgcgtgg

SEQ ID NO: 2269393 - DNA, 25 bp, Homo sapien
cattacatagagatcagtcctggct

SEQ ID NO: 2269394 - DNA, 25 bp, Homo sapien
tacatagagatcagtcctggctgcg

SEQ ID NO: 2269395 - DNA, 25 bp, Homo sapien
gagggatccacaggatacatccata

SEQ ID NO: 2269396 - DNA, 25 bp, Homo sapien
agctctggctagcatcacaatgaat

SEQ ID NO: 2269397 - DNA, 25 bp, Homo sapien
tggctagcatcacaatgaatgtcac

SEQ ID NO: 2269398 - DNA, 25 bp, Homo sapien
ctctggctagcatcacaatgaatgt

SEQ ID NO: 2269399 - DNA, 25 bp, Homo sapien
tatgagctctggctagcatcacaat

SEQ ID NO: 2269400 - DNA, 25 bp, Homo sapien
tcaaatgcacatgcacgcctcaggg

SEQ ID NO: 2269401 - DNA, 25 bp, Homo sapien
caaatgcacatgcacgcctcagggc

SEQ ID NO: 2269402 - DNA, 25 bp, Homo sapien
aaatgcacatgcacgcctcagggca

SEQ ID NO: 2269403 - DNA, 25 bp, Homo sapien
aatgcacatgcacgcctcagggcac

SEQ ID NO: 2269404 - DNA, 25 bp, Homo sapien
gtcgccctaacttcgagcattgtag

SEQ ID NO: 2269405 - DNA, 25 bp, Homo sapien
gggagacggcttgaagtcgccctaa

SEQ ID NO: 2269406 - DNA, 25 bp, Homo sapien
cctatttctggataccgagccagct

SEQ ID NO: 2269407 - DNA, 25 bp, Homo sapien
tagggtcccgcagtgcattattgca

SEQ ID NO: 2269408 - DNA, 25 bp, Homo sapien
tctgcctgcaaataaagctactctt

SEQ ID NO: 2269409 - DNA, 25 bp, Homo sapien
cctctgcctgcaaataaagctactc

SEQ ID NO: 2269410 - DNA, 25 bp, Homo sapien
ctctgcctgcaaataaagctactct

SEQ ID NO: 2269411 - DNA, 25 bp, Homo sapien
ggaagatacgtcaagcaaaccccag

SEQ ID NO: 2269412 - DNA, 25 bp, Homo sapien
gctggaagatacgtcaagcaaaccc

SEQ ID NO: 2269413 - DNA, 25 bp, Homo sapien
agccagctggaagatacgtcaagca

SEQ ID NO: 2269414 - DNA, 25 bp, Homo sapien
tacgtcaagcaaaccccaggaataa

SEQ ID NO: 2269415 - DNA, 25 bp, Homo sapien
acaattccgtgaggtttggcggaga

SEQ ID NO: 2269416 - DNA, 25 bp, Homo sapien
tcacaattccgtgaggtttggcgga

SEQ ID NO: 2269417 - DNA, 25 bp, Homo sapien
caattccgtgaggtttggcggagaa

SEQ ID NO: 2269418 - DNA, 25 bp, Homo sapien
cacaattccgtgaggtttggcggag

SEQ ID NO: 2269419 - DNA, 25 bp, Homo sapien
tactattgggttttaatgactgggc

SEQ ID NO: 2269420 - DNA, 25 bp, Homo sapien
taccacttaatggaagacgaccctc

SEQ ID NO: 2269421 - DNA, 25 bp, Homo sapien
cagcctaaggtttcttgggtctggc

SEQ ID NO: 2269422 - DNA, 25 bp, Homo sapien
gggtctggctgtacatattccacat

SEQ ID NO: 2269423 - DNA, 25 bp, Homo sapien
tcattatgggaaagatacttttaac

SEQ ID NO: 2269424 - DNA, 25 bp, Homo sapien
tattgtccagtgtacaccccattta

SEQ ID NO: 2269425 - DNA, 25 bp, Homo sapien
gtccagtgtacaccccatttagaaa

SEQ ID NO: 2269426 - DNA, 25 bp, Homo sapien
gtgttttattgtccagtgtacaccc

SEQ ID NO: 2269427 - DNA, 25 bp, Homo sapien
gcttcacgtcgtgagaaggcaccct

SEQ ID NO: 2269428 - DNA, 25 bp, Homo sapien
ggttcccagccagctaggtgcttca

SEQ ID NO: 2269429 - DNA, 25 bp, Homo sapien
agcacactagcagtcttgtccacag

SEQ ID NO: 2269430 - DNA, 25 bp, Homo sapien
gcaggaaacccagggagcacactag

SEQ ID NO: 2269431 - DNA, 25 bp, Homo sapien
ccagggagcacactagcagtcttgt

SEQ ID NO: 2269432 - DNA, 25 bp, Homo sapien
tctcccagagattcattgtcctgca

SEQ ID NO: 2269433 - DNA, 25 bp, Homo sapien
cctaggaggtgcttcatgctgtgag

SEQ ID NO: 2269434 - DNA, 25 bp, Homo sapien
cttgaattcggttgacagcctagga

SEQ ID NO: 2269435 - DNA, 25 bp, Homo sapien
aatctggtgagaagtgaatgggtcc

SEQ ID NO: 2269436 - DNA, 25 bp, Homo sapien
tcaggtagggtggaggatccaatct

SEQ ID NO: 2269437 - DNA, 25 bp, Homo sapien
tttggtggactgtttgttgggtctg

SEQ ID NO: 2269438 - DNA, 25 bp, Homo sapien
ggtctgcttgggctgtgttttcttt

SEQ ID NO: 2269439 - DNA, 25 bp, Homo sapien
tggtggactgtttgttgggtctgct

SEQ ID NO: 2269440 - DNA, 25 bp, Homo sapien
gcttgggctgtgttttctttattga

SEQ ID NO: 2269441 - DNA, 25 bp, Homo sapien
cctcacagtattgatattcttcctc

SEQ ID NO: 2269442 - DNA, 25 bp, Homo sapien
accacctcacagtattgatattctt

SEQ ID NO: 2269443 - DNA, 25 bp, Homo sapien
ccacctcacagtattgatattcttc

SEQ ID NO: 2269444 - DNA, 25 bp, Homo sapien
cacctcacagtattgatattcttcc

SEQ ID NO: 2269445 - DNA, 25 bp, Homo sapien
ctgtgagtggccagtccaaggcctg

SEQ ID NO: 2269446 - DNA, 25 bp, Homo sapien
tattccaatgtccacgggacataat

SEQ ID NO: 2269447 - DNA, 25 bp, Homo sapien
tgtgagtggccagtccaaggcctga

SEQ ID NO: 2269448 - DNA, 25 bp, Homo sapien
cgggacataattctttcacacagcc

SEQ ID NO: 2269449 - DNA, 25 bp, Homo sapien
tgatgctgggtatgatatggcctcc

SEQ ID NO: 2269450 - DNA, 25 bp, Homo sapien
ttcagatgggagtacttcacagtgc

SEQ ID NO: 2269451 - DNA, 25 bp, Homo sapien
tgaaagctttcatacccggagccaa

SEQ ID NO: 2269452 - DNA, 25 bp, Homo sapien
gaaacagaaggtgcttcaaactcca

SEQ ID NO: 2269453 - DNA, 25 bp, Homo sapien
tcctctattttcttgggatttcatc

SEQ ID NO: 2269454 - DNA, 25 bp, Homo sapien
tgggcctgcctgacaatgtgcatac

SEQ ID NO: 2269455 - DNA, 25 bp, Homo sapien
gagatgccccaaagaggccttgagg

SEQ ID NO: 2269456 - DNA, 25 bp, Homo sapien
taagtttctggcgatgacctcacag

SEQ ID NO: 2269457 - DNA, 25 bp, Homo sapien
gacaatattccagacccgtgggacc

SEQ ID NO: 2269458 - DNA, 25 bp, Homo sapien
tcaggcttgctatcaccacagttgg

SEQ ID NO: 2269459 - DNA, 25 bp, Homo sapien
acctcatctgcaaccatgtgaggcc

SEQ ID NO: 2269460 - DNA, 25 bp, Homo sapien
catctgcaaccatgtgaggccagtc

SEQ ID NO: 2269461 - DNA, 25 bp, Homo sapien
tgaggacactgcatcaccttggact

SEQ ID NO: 2269462 - DNA, 25 bp, Homo sapien
aactccagcacaatgtactggacac

SEQ ID NO: 2269463 - DNA, 25 bp, Homo sapien
caactccagcacaatgtactggaca

SEQ ID NO: 2269464 - DNA, 25 bp, Homo sapien
tcaactccagcacaatgtactggac

SEQ ID NO: 2269465 - DNA, 25 bp, Homo sapien
tgtggattgtgtcccgcaagtgcac

SEQ ID NO: 2269466 - DNA, 25 bp, Homo sapien
agctctcaagtgaatcaagagtctt

SEQ ID NO: 2269467 - DNA, 25 bp, Homo sapien
aatcaagagtcttcctgattgagat

SEQ ID NO: 2269468 - DNA, 25 bp, Homo sapien
atcagctctcaagtgaatcaagagt

SEQ ID NO: 2269469 - DNA, 25 bp, Homo sapien
gaatcaagagtcttcctgattgaga

SEQ ID NO: 2269470 - DNA, 25 bp, Homo sapien
ttcagtttgtaacaatggtttaatc

SEQ ID NO: 2269471 - DNA, 25 bp, Homo sapien
tcagtttgtaacaatggtttaatca

SEQ ID NO: 2269472 - DNA, 25 bp, Homo sapien
tcagtgtgatttcggggtctggatc

SEQ ID NO: 2269473 - DNA, 25 bp, Homo sapien
aaatttatgctgaatgccgagtctc

SEQ ID NO: 2269474 - DNA, 25 bp, Homo sapien
aagtttgatgatatcagcttcagtg

SEQ ID NO: 2269475 - DNA, 25 bp, Homo sapien
gtgactgtctctgattgagactgaa

SEQ ID NO: 2269476 - DNA, 25 bp, Homo sapien
gggtccacagtgggactgtgtgagt

SEQ ID NO: 2269477 - DNA, 25 bp, Homo sapien
gtccacagtgggactgtgtgagttt

SEQ ID NO: 2269478 - DNA, 25 bp, Homo sapien
ggtccacagtgggactgtgtgagtt

SEQ ID NO: 2269479 - DNA, 25 bp, Homo sapien
gaggagtagcaatgccaggtcattc

SEQ ID NO: 2269480 - DNA, 25 bp, Homo sapien
caatgccaggtcattccttgctgcc

SEQ ID NO: 2269481 - DNA, 25 bp, Homo sapien
gagtagcaatgccaggtcattcctt

SEQ ID NO: 2269482 - DNA, 25 bp, Homo sapien
gtagcaatgccaggtcattccttgc

SEQ ID NO: 2269483 - DNA, 25 bp, Homo sapien
agccagcattctgaactattcaggt

SEQ ID NO: 2269484 - DNA, 25 bp, Homo sapien
gccagcattctgaactattcaggtt

SEQ ID NO: 2269485 - DNA, 25 bp, Homo sapien
ccagcattctgaactattcaggttc

SEQ ID NO: 2269486 - DNA, 25 bp, Homo sapien
atcacttgcacctttaacatttcta

SEQ ID NO: 2269487 - DNA, 25 bp, Homo sapien
agtctttggcctgagtaatgaagca

SEQ ID NO: 2269488 - DNA, 25 bp, Homo sapien
gcaaacaatggaactgcctatgtca

SEQ ID NO: 2269489 - DNA, 25 bp, Homo sapien
aactgcctatgtcagggtacaggtg

SEQ ID NO: 2269490 - DNA, 25 bp, Homo sapien
gtagatggtacggaatattgcagat

SEQ ID NO: 2269491 - DNA, 25 bp, Homo sapien
gatggtacggaatattgcagatccg

SEQ ID NO: 2269492 - DNA, 25 bp, Homo sapien
aatattgcagatccggagaattctc

SEQ ID NO: 2269493 - DNA, 25 bp, Homo sapien
tacggaatattgcagatccggagaa

SEQ ID NO: 2269494 - DNA, 25 bp, Homo sapien
gaaccctgcgctgccctttctgtag

SEQ ID NO: 2269495 - DNA, 25 bp, Homo sapien
acccatagcacaggaaccctgcgct

SEQ ID NO: 2269496 - DNA, 25 bp, Homo sapien
tgtgcagcccgacccatagcacagg

SEQ ID NO: 2269497 - DNA, 25 bp, Homo sapien
atagcacaggaaccctgcgctgccc

SEQ ID NO: 2269498 - DNA, 25 bp, Homo sapien
gtgcccgctggtccttctgccgctc

SEQ ID NO: 2269499 - DNA, 25 bp, Homo sapien
tctcctgcttcaaggttgcctcctc

SEQ ID NO: 2269500 - DNA, 25 bp, Homo sapien
ccctctgcgcctcgggcagagtgaa

SEQ ID NO: 2269501 - DNA, 25 bp, Homo sapien
gaagacggtgcaccctgaagacggt

SEQ ID NO: 2269502 - DNA, 25 bp, Homo sapien
gcaaagagattttgataaggttcct

SEQ ID NO: 2269503 - DNA, 25 bp, Homo sapien
gaaatgctcgacataatcaagcaaa

SEQ ID NO: 2269504 - DNA, 25 bp, Homo sapien
tgcactgatgacagtagataatttc

SEQ ID NO: 2269505 - DNA, 25 bp, Homo sapien
gataaggttcctggaattggagttc

SEQ ID NO: 2269506 - DNA, 25 bp, Homo sapien
tctgaacaactatggaattcacctt

SEQ ID NO: 2269507 - DNA, 25 bp, Homo sapien
caactatggaattcaccttacgttt

SEQ ID NO: 2269508 - DNA, 25 bp, Homo sapien
attctgaacaactatggaattcacc

SEQ ID NO: 2269509 - DNA, 25 bp, Homo sapien
gaacaactatggaattcaccttacg

SEQ ID NO: 2269510 - DNA, 25 bp, Homo sapien
tgtagcttcgcatcaaggttaaaag

SEQ ID NO: 2269511 - DNA, 25 bp, Homo sapien
ctaatactgttgtaaaccgaaggtg

SEQ ID NO: 2269512 - DNA, 25 bp, Homo sapien
gcatcaaggttaaaagattccatca

SEQ ID NO: 2269513 - DNA, 25 bp, Homo sapien
aaatccatatttgtcacccctgtcc

SEQ ID NO: 2269514 - DNA, 25 bp, Homo sapien
cttagtaggactgcctgtctctgag

SEQ ID NO: 2269515 - DNA, 25 bp, Homo sapien
ttaggcagctagcatagacatccac

SEQ ID NO: 2269516 - DNA, 25 bp, Homo sapien
atttaggcagctagcatagacatcc

SEQ ID NO: 2269517 - DNA, 25 bp, Homo sapien
catagacatccacttgctttttgta

SEQ ID NO: 2269518 - DNA, 25 bp, Homo sapien
atgctgatgaattgcagagatgtct

SEQ ID NO: 2269519 - DNA, 25 bp, Homo sapien
catgatgggcaaatagatgctgatg

SEQ ID NO: 2269520 - DNA, 25 bp, Homo sapien
gacatgatgggcaaatagatgctga

SEQ ID NO: 2269521 - DNA, 25 bp, Homo sapien
agatgctgatgaattgcagagatgt

SEQ ID NO: 2269522 - DNA, 25 bp, Homo sapien
aattatctttttaggctctgcagat

SEQ ID NO: 2269523 - DNA, 25 bp, Homo sapien
tctttttaggctctgcagatgaagc

SEQ ID NO: 2269524 - DNA, 25 bp, Homo sapien
agggacataaaagacttaattatct

SEQ ID NO: 2269525 - DNA, 25 bp, Homo sapien
tcactgagacactagggacataaaa

SEQ ID NO: 2269526 - DNA, 25 bp, Homo sapien
agctgacatatgactggctgtcatc

SEQ ID NO: 2269527 - DNA, 25 bp, Homo sapien
gctgacatatgactggctgtcatcc

SEQ ID NO: 2269528 - DNA, 25 bp, Homo sapien
tacgtcagttgtgtccatggataac

SEQ ID NO: 2269529 - DNA, 25 bp, Homo sapien
agttgtgtccatggataactgtggg

SEQ ID NO: 2269530 - DNA, 25 bp, Homo sapien
gatgcctacgtcagttgtgtccatg

SEQ ID NO: 2269531 - DNA, 25 bp, Homo sapien
gttcatggatgcctacgtcagttgt

SEQ ID NO: 2269532 - DNA, 25 bp, Homo sapien
gggacagcagcaacctcatgaacca

SEQ ID NO: 2269533 - DNA, 25 bp, Homo sapien
aagtcctggaatctatgcatagtca

SEQ ID NO: 2269534 - DNA, 25 bp, Homo sapien
cactgtcttgatctagggacagcag

SEQ ID NO: 2269535 - DNA, 25 bp, Homo sapien
tcctcagcatgtttatgaaaggtgc

SEQ ID NO: 2269536 - DNA, 25 bp, Homo sapien
gctgtaacccttgctactccaaaag

SEQ ID NO: 2269537 - DNA, 25 bp, Homo sapien
ggagatctgagctgtaacccttgct

SEQ ID NO: 2269538 - DNA, 25 bp, Homo sapien
agggaaagtattgttctcctcagaa

SEQ ID NO: 2269539 - DNA, 25 bp, Homo sapien
gggaaagtattgttctcctcagaag

SEQ ID NO: 2269540 - DNA, 25 bp, Homo sapien
gaactgtttgttgcttaccagtaca

SEQ ID NO: 2269541 - DNA, 25 bp, Homo sapien
acagctactagctcaatgaactgtt

SEQ ID NO: 2269542 - DNA, 25 bp, Homo sapien
tgctaacagctactagctcaatgaa

SEQ ID NO: 2269543 - DNA, 25 bp, Homo sapien
taacagctactagctcaatgaactg

SEQ ID NO: 2269544 - DNA, 25 bp, Homo sapien
tgcttctctgcttgactccaaacag

SEQ ID NO: 2269545 - DNA, 25 bp, Homo sapien
caagatagcccctttggggacattc

SEQ ID NO: 2269546 - DNA, 25 bp, Homo sapien
cactctggttttcttatgttccttt

SEQ ID NO: 2269547 - DNA, 25 bp, Homo sapien
ggcaagataggccagaccaagatag

SEQ ID NO: 2269548 - DNA, 25 bp, Homo sapien
gggatataatgaagtcccgaactga

SEQ ID NO: 2269549 - DNA, 25 bp, Homo sapien
agtcccgaactgagggcaaatttct

SEQ ID NO: 2269550 - DNA, 25 bp, Homo sapien
taatgaagtcccgaactgagggcaa

SEQ ID NO: 2269551 - DNA, 25 bp, Homo sapien
cctgcagggatataatgaagtcccg

SEQ ID NO: 2269552 - DNA, 25 bp, Homo sapien
ccactgttctgcataagggttccag

SEQ ID NO: 2269553 - DNA, 25 bp, Homo sapien
tcaatgctctattcaatgaagtagc

SEQ ID NO: 2269554 - DNA, 25 bp, Homo sapien
tccaggcatgcagaagagtattctg

SEQ ID NO: 2269555 - DNA, 25 bp, Homo sapien
tgctgatcacagaaagcccatgtgc

SEQ ID NO: 2269556 - DNA, 25 bp, Homo sapien
ctatggttacgagcccatgggtgga

SEQ ID NO: 2269557 - DNA, 25 bp, Homo sapien
gttcctggccagcaatccatgactc

SEQ ID NO: 2269558 - DNA, 25 bp, Homo sapien
atccccgtggtgtcccaacagcacc

SEQ ID NO: 2269559 - DNA, 25 bp, Homo sapien
tgcaccaccaaatcatccccgtggt

SEQ ID NO: 2269560 - DNA, 25 bp, Homo sapien
gcatgataagaccaccagtatgtag

SEQ ID NO: 2269561 - DNA, 25 bp, Homo sapien
gaagtggtaccagagcatgataaga

SEQ ID NO: 2269562 - DNA, 25 bp, Homo sapien
ccaccagtatgtagacattttgttc

SEQ ID NO: 2269563 - DNA, 25 bp, Homo sapien
gctcacccctttgaagtggtaccag

SEQ ID NO: 2269564 - DNA, 25 bp, Homo sapien
tgctgatactgtggactggtatcaa

SEQ ID NO: 2269565 - DNA, 25 bp, Homo sapien
ctgtggactggtatcaacaggtcct

SEQ ID NO: 2269566 - DNA, 25 bp, Homo sapien
gatactgtggactggtatcaacagg

SEQ ID NO: 2269567 - DNA, 25 bp, Homo sapien
tactgtggactggtatcaacaggtc

SEQ ID NO: 2269568 - DNA, 25 bp, Homo sapien
agtttaggtaaccaatggcgactag

SEQ ID NO: 2269569 - DNA, 25 bp, Homo sapien
tgcagcgacagagggcgggactgca

SEQ ID NO: 2269570 - DNA, 25 bp, Homo sapien
ttggcactggcggtgaccaccactg

SEQ ID NO: 2269571 - DNA, 25 bp, Homo sapien
acggcggcgcaagggattggcactg

SEQ ID NO: 2269572 - DNA, 25 bp, Homo sapien
ttgctacagcaacatgaggtcggtg

SEQ ID NO: 2269573 - DNA, 25 bp, Homo sapien
acagttgtcacatatccggcgatca

SEQ ID NO: 2269574 - DNA, 25 bp, Homo sapien
cagtcgatgtacgtgaagtccaggc

SEQ ID NO: 2269575 - DNA, 25 bp, Homo sapien
ccttgacggttttgcgactcagaaa

SEQ ID NO: 2269576 - DNA, 25 bp, Homo sapien
tctggcgtgccagcagaggaaaaca

SEQ ID NO: 2269577 - DNA, 25 bp, Homo sapien
gctgaaccagggattctggcgtgcc

SEQ ID NO: 2269578 - DNA, 25 bp, Homo sapien
ttctggcgtgccagcagaggaaaac

SEQ ID NO: 2269579 - DNA, 25 bp, Homo sapien
aaccagggattctggcgtgccagca

SEQ ID NO: 2269580 - DNA, 25 bp, Homo sapien
taaatggatccagtgatgaacaact

SEQ ID NO: 2269581 - DNA, 25 bp, Homo sapien
tgtgttctactaggcctgcaatcgc

SEQ ID NO: 2269582 - DNA, 25 bp, Homo sapien
gttgtgtcagttacccagctcggcg

SEQ ID NO: 2269583 - DNA, 25 bp, Homo sapien
cagtgcaatagtgcgaaagcagctc

SEQ ID NO: 2269584 - DNA, 25 bp, Homo sapien
gggaaaaactcgagtgccatctctg

SEQ ID NO: 2269585 - DNA, 25 bp, Homo sapien
ggaagtgtcctcctatccagcagga

SEQ ID NO: 2269586 - DNA, 25 bp, Homo sapien
ggagcaaagcaccagaatccggact

SEQ ID NO: 2269587 - DNA, 25 bp, Homo sapien
tctttgccctttagacacgtggagt

SEQ ID NO: 2269588 - DNA, 25 bp, Homo sapien
aatataagcatattgggctccaagc

SEQ ID NO: 2269589 - DNA, 25 bp, Homo sapien
gataaagatacctttccagacccaa

SEQ ID NO: 2269590 - DNA, 25 bp, Homo sapien
gcaagcaagttactagacatcctaa

SEQ ID NO: 2269591 - DNA, 25 bp, Homo sapien
tcagccgagatcatgattgcgcaac

SEQ ID NO: 2269592 - DNA, 25 bp, Homo sapien
ggaaagcttttagcagcctcaacaa

SEQ ID NO: 2269593 - DNA, 25 bp, Homo sapien
tattcatatgattaacccactggga

SEQ ID NO: 2269594 - DNA, 25 bp, Homo sapien
gaggcagcgagaactggcacagaaa

SEQ ID NO: 2269595 - DNA, 25 bp, Homo sapien
gactggagggattcacctagggcat

SEQ ID NO: 2269596 - DNA, 25 bp, Homo sapien
tttggggacctacatcagtgatctt

SEQ ID NO: 2269597 - DNA, 25 bp, Homo sapien
tacaatttggcccaacgatggctga

SEQ ID NO: 2269598 - DNA, 25 bp, Homo sapien
tggctgacacctatttggaggaatg

SEQ ID NO: 2269599 - DNA, 25 bp, Homo sapien
catcagaagtccattgccagcatcc

SEQ ID NO: 2269600 - DNA, 25 bp, Homo sapien
cataccatcagaagtccattgccag

SEQ ID NO: 2269601 - DNA, 25 bp, Homo sapien
tgttgtgcaacattagcctggcaga

SEQ ID NO: 2269602 - DNA, 25 bp, Homo sapien
gacacagcttaacaccgagtagtga

SEQ ID NO: 2269603 - DNA, 25 bp, Homo sapien
tgcaaacatgcatcaggaaaagtcc

SEQ ID NO: 2269604 - DNA, 25 bp, Homo sapien
tgattccggccccagaaatgcaaac

SEQ ID NO: 2269605 - DNA, 25 bp, Homo sapien
ttggtaaatagctgctaaatccagc

SEQ ID NO: 2269606 - DNA, 25 bp, Homo sapien
gaggtggttggtaaatagctgctaa

SEQ ID NO: 2269607 - DNA, 25 bp, Homo sapien
gtgtgatttgcctcctttaactctt

SEQ ID NO: 2269608 - DNA, 25 bp, Homo sapien
ggttcttgactccaagtgtgatttg

SEQ ID NO: 2269609 - DNA, 25 bp, Homo sapien
gagtggcatagcctagaatggccca

SEQ ID NO: 2269610 - DNA, 25 bp, Homo sapien
ccagctgtggcaatgaggctacaca

SEQ ID NO: 2269611 - DNA, 25 bp, Homo sapien
cctgtcaagtgtgagtgatgtggcc

SEQ ID NO: 2269612 - DNA, 25 bp, Homo sapien
tgcacacataggttatggaccctgg

SEQ ID NO: 2269613 - DNA, 25 bp, Homo sapien
tgggcccaacaagccagtgctttac

SEQ ID NO: 2269614 - DNA, 25 bp, Homo sapien
cctttttcgaagcagcttggagcag

SEQ ID NO: 2269615 - DNA, 25 bp, Homo sapien
cccagaagaggcagtatcctggtct

SEQ ID NO: 2269616 - DNA, 25 bp, Homo sapien
tgcccttgctccgacatggttctgg

SEQ ID NO: 2269617 - DNA, 25 bp, Homo sapien
gcataccaggcaaagcattcttgac

SEQ ID NO: 2269618 - DNA, 25 bp, Homo sapien
gacaatgagggtttcctagctcctt

SEQ ID NO: 2269619 - DNA, 25 bp, Homo sapien
ttgacaatgagggtttcctagctcc

SEQ ID NO: 2269620 - DNA, 25 bp, Homo sapien
gcattcttgacaatgagggtttcct

SEQ ID NO: 2269621 - DNA, 25 bp, Homo sapien
gagccacagaatcaaatccagggag

SEQ ID NO: 2269622 - DNA, 25 bp, Homo sapien
agccacagaatcaaatccagggagg

SEQ ID NO: 2269623 - DNA, 25 bp, Homo sapien
agaagagccacagaatcaaatccag

SEQ ID NO: 2269624 - DNA, 25 bp, Homo sapien
aagagccacagaatcaaatccaggg

SEQ ID NO: 2269625 - DNA, 25 bp, Homo sapien
cactctatctgagatgcagctggcc

SEQ ID NO: 2269626 - DNA, 25 bp, Homo sapien
catgccagcgatagtattcttgggc

SEQ ID NO: 2269627 - DNA, 25 bp, Homo sapien
tggttgtgacatgaacagatcctgt

SEQ ID NO: 2269628 - DNA, 25 bp, Homo sapien
ttgtccacgcagaggtaagtcttcc

SEQ ID NO: 2269629 - DNA, 25 bp, Homo sapien
cttagcaccttacaacctaggacat

SEQ ID NO: 2269630 - DNA, 25 bp, Homo sapien
gcaccttacaacctaggacatcaat

SEQ ID NO: 2269631 - DNA, 25 bp, Homo sapien
accttacaacctaggacatcaatgc

SEQ ID NO: 2269632 - DNA, 25 bp, Homo sapien
tagcaccttacaacctaggacatca

SEQ ID NO: 2269633 - DNA, 25 bp, Homo sapien
attttcctgttgatttcctgtgtaa

SEQ ID NO: 2269634 - DNA, 25 bp, Homo sapien
ttcctgttgatttcctgtgtaaatt

SEQ ID NO: 2269635 - DNA, 25 bp, Homo sapien
ttttcctgttgatttcctgtgtaaa

SEQ ID NO: 2269636 - DNA, 25 bp, Homo sapien
cattttcctgttgatttcctgtgta

SEQ ID NO: 2269637 - DNA, 25 bp, Homo sapien
acaggacagtcagaacatagggacc

SEQ ID NO: 2269638 - DNA, 25 bp, Homo sapien
gcacccaaccagtacaggccaattt

SEQ ID NO: 2269639 - DNA, 25 bp, Homo sapien
atagggacccgtgaagaagcagctc

SEQ ID NO: 2269640 - DNA, 25 bp, Homo sapien
ccaaccagtacaggccaatttcact

SEQ ID NO: 2269641 - DNA, 25 bp, Homo sapien
tcagtgctcaggaaaaaggatgtgg

SEQ ID NO: 2269642 - DNA, 25 bp, Homo sapien
cagtgctcaggaaaaaggatgtggc

SEQ ID NO: 2269643 - DNA, 25 bp, Homo sapien
ggtgacaaatgtcacaaaatgctca

SEQ ID NO: 2269644 - DNA, 25 bp, Homo sapien
cacaaaatgctcaaaatggacagca

SEQ ID NO: 2269645 - DNA, 25 bp, Homo sapien
ctggtgacaaatgtcacaaaatgct

SEQ ID NO: 2269646 - DNA, 25 bp, Homo sapien
tgctcaaaatggacagcatgctgac

SEQ ID NO: 2269647 - DNA, 25 bp, Homo sapien
aacgagaaaactagctgaagcacaa

SEQ ID NO: 2269648 - DNA, 25 bp, Homo sapien
gactaggcagacatatgggctctgg

SEQ ID NO: 2269649 - DNA, 25 bp, Homo sapien
tctggcatcttaagaagacattccc

SEQ ID NO: 2269650 - DNA, 25 bp, Homo sapien
attccccaaggtttcagaggtcaga

SEQ ID NO: 2269651 - DNA, 25 bp, Homo sapien
ccaggcagaagtacaggctctgcat

SEQ ID NO: 2269652 - DNA, 25 bp, Homo sapien
ctggaccaggcagaagtacaggctc

SEQ ID NO: 2269653 - DNA, 25 bp, Homo sapien
gaccaggcagaagtacaggctctgc

SEQ ID NO: 2269654 - DNA, 25 bp, Homo sapien
tggaccaggcagaagtacaggctct

SEQ ID NO: 2269655 - DNA, 25 bp, Homo sapien
gacatcgtccagtgccacttgggca

SEQ ID NO: 2269656 - DNA, 25 bp, Homo sapien
agaggtgatgcccagtgtggcatac

SEQ ID NO: 2269657 - DNA, 25 bp, Homo sapien
cagcatgagctatttatcaaaccca

SEQ ID NO: 2269658 - DNA, 25 bp, Homo sapien
tcttcactgaccagaaacagcatga

SEQ ID NO: 2269659 - DNA, 25 bp, Homo sapien
tttatcaaacccatccagatctgac

SEQ ID NO: 2269660 - DNA, 25 bp, Homo sapien
gaaacagcatgagctatttatcaaa

SEQ ID NO: 2269661 - DNA, 25 bp, Homo sapien
gagaaacagtttatgacaatccaca

SEQ ID NO: 2269662 - DNA, 25 bp, Homo sapien
gcttcatttcttcaaaaactgccct

SEQ ID NO: 2269663 - DNA, 25 bp, Homo sapien
ggagaaacagtttatgacaatccac

SEQ ID NO: 2269664 - DNA, 25 bp, Homo sapien
ctgcccttctgttaagagaacagct

SEQ ID NO: 2269665 - DNA, 25 bp, Homo sapien
ggccagcagcgctcagccaacattc

SEQ ID NO: 2269666 - DNA, 25 bp, Homo sapien
gtggaacagcggccatgtacacagc

SEQ ID NO: 2269667 - DNA, 25 bp, Homo sapien
agcgctcagccaacattccaagtgg

SEQ ID NO: 2269668 - DNA, 25 bp, Homo sapien
agcagcgctcagccaacattccaag

SEQ ID NO: 2269669 - DNA, 25 bp, Homo sapien
caggtgtctgagtgcccatgcagat

SEQ ID NO: 2269670 - DNA, 25 bp, Homo sapien
catttgtccaggtgtctgagtgccc

SEQ ID NO: 2269671 - DNA, 25 bp, Homo sapien
agtgcccatgcagatgacgatactc

SEQ ID NO: 2269672 - DNA, 25 bp, Homo sapien
gcccatgcagatgacgatactccat

SEQ ID NO: 2269673 - DNA, 25 bp, Homo sapien
aacagttactttcccactcagaagc

SEQ ID NO: 2269674 - DNA, 25 bp, Homo sapien
tcagaagcatatgtgttacacatgc

SEQ ID NO: 2269675 - DNA, 25 bp, Homo sapien
tctgcttggagcaaacagttacttt

SEQ ID NO: 2269676 - DNA, 25 bp, Homo sapien
cccactcagaagcatatgtgttaca

SEQ ID NO: 2269677 - DNA, 25 bp, Homo sapien
gacaaactcacgctgtgtgcagggc

SEQ ID NO: 2269678 - DNA, 25 bp, Homo sapien
aaatccttactaagcatttgcccca

SEQ ID NO: 2269679 - DNA, 25 bp, Homo sapien
aaacactgacaaactcacgctgtgt

SEQ ID NO: 2269680 - DNA, 25 bp, Homo sapien
ctacattggtcaaatccttactaag

SEQ ID NO: 2269681 - DNA, 25 bp, Homo sapien
catagaaatggcaagccgtctgtgg

SEQ ID NO: 2269682 - DNA, 25 bp, Homo sapien
ctttatggtaacttcatgtgtggac

SEQ ID NO: 2269683 - DNA, 25 bp, Homo sapien
gcatccagtcatagaaatggcaagc

SEQ ID NO: 2269684 - DNA, 25 bp, Homo sapien
tttatggtaacttcatgtgtggacc

SEQ ID NO: 2269685 - DNA, 25 bp, Homo sapien
agagaagggattgcgttttggcaaa

SEQ ID NO: 2269686 - DNA, 25 bp, Homo sapien
aaagagaagggattgcgttttggca

SEQ ID NO: 2269687 - DNA, 25 bp, Homo sapien
agggattgcgttttggcaaaatgca

SEQ ID NO: 2269688 - DNA, 25 bp, Homo sapien
gcgttttggcaaaatgcagttttgc

SEQ ID NO: 2269689 - DNA, 25 bp, Homo sapien
catggcgatgaggtattgatgaagt

SEQ ID NO: 2269690 - DNA, 25 bp, Homo sapien
tggcgatgaggtattgatgaagttg

SEQ ID NO: 2269691 - DNA, 25 bp, Homo sapien
ctcatggcgatgaggtattgatgaa

SEQ ID NO: 2269692 - DNA, 25 bp, Homo sapien
tcatggcgatgaggtattgatgaag

SEQ ID NO: 2269693 - DNA, 25 bp, Homo sapien
aagttcacctcgtcactggttatgc

SEQ ID NO: 2269694 - DNA, 25 bp, Homo sapien
ccagaaagttcacctcgtcactggt

SEQ ID NO: 2269695 - DNA, 25 bp, Homo sapien
gaaagttcacctcgtcactggttat

SEQ ID NO: 2269696 - DNA, 25 bp, Homo sapien
cagaaagttcacctcgtcactggtt

SEQ ID NO: 2269697 - DNA, 25 bp, Homo sapien
gcaggtcaacacctactcccttcct

SEQ ID NO: 2269698 - DNA, 25 bp, Homo sapien
aggtcaacacctactcccttcctca

SEQ ID NO: 2269699 - DNA, 25 bp, Homo sapien
tgcaggtcaacacctactcccttcc

SEQ ID NO: 2269700 - DNA, 25 bp, Homo sapien
ctgcaggtcaacacctactcccttc

SEQ ID NO: 2269701 - DNA, 25 bp, Homo sapien
gaacatctttcatcagcttgggtcc

SEQ ID NO: 2269702 - DNA, 25 bp, Homo sapien
cagcttgggtcctcttttggaaagg

SEQ ID NO: 2269703 - DNA, 25 bp, Homo sapien
tcatcagcttgggtcctcttttgga

SEQ ID NO: 2269704 - DNA, 25 bp, Homo sapien
ctcttttggaaagggcaggttgtca

SEQ ID NO: 2269705 - DNA, 25 bp, Homo sapien
ctgtccagctagagtactggcagct

SEQ ID NO: 2269706 - DNA, 25 bp, Homo sapien
ctttcacttcaagacccacaggcag

SEQ ID NO: 2269707 - DNA, 25 bp, Homo sapien
ggctgtccagctagagtactggcag

SEQ ID NO: 2269708 - DNA, 25 bp, Homo sapien
acagactccattgccatctggctgt

SEQ ID NO: 2269709 - DNA, 25 bp, Homo sapien
ggcagacggtggcactagtgtccca

SEQ ID NO: 2269710 - DNA, 25 bp, Homo sapien
agggcagacggtggcactagtgtcc

SEQ ID NO: 2269711 - DNA, 25 bp, Homo sapien
tgagggcagacggtggcactagtgt

SEQ ID NO: 2269712 - DNA, 25 bp, Homo sapien
gcagacggtggcactagtgtcccat

SEQ ID NO: 2269713 - DNA, 25 bp, Homo sapien
tctatagggcggctgtcgaacactg

SEQ ID NO: 2269714 - DNA, 25 bp, Homo sapien
tgccgcatctgcaccacatcaggaa

SEQ ID NO: 2269715 - DNA, 25 bp, Homo sapien
cactgtggcctctcggttctttgga

SEQ ID NO: 2269716 - DNA, 25 bp, Homo sapien
tcacagcaactatcagggacaggga

SEQ ID NO: 2269717 - DNA, 25 bp, Homo sapien
agaaattcagactcactgacttacc

SEQ ID NO: 2269718 - DNA, 25 bp, Homo sapien
tgacttaccatgtacttgctggcaa

SEQ ID NO: 2269719 - DNA, 25 bp, Homo sapien
tagagcagtagtatgtccaagtggg

SEQ ID NO: 2269720 - DNA, 25 bp, Homo sapien
gaagtggcttctctatgggtttata

SEQ ID NO: 2269721 - DNA, 25 bp, Homo sapien
gttgggtggaatctcaacatcccca

SEQ ID NO: 2269722 - DNA, 25 bp, Homo sapien
tcgtggccccgaaggactgtggctt

SEQ ID NO: 2269723 - DNA, 25 bp, Homo sapien
agaggctagcaaatcactgacaggg

SEQ ID NO: 2269724 - DNA, 25 bp, Homo sapien
ggttccaggcacaaatgaacacctc

SEQ ID NO: 2269725 - DNA, 25 bp, Homo sapien
gcccccgttgctattctcattcagg

SEQ ID NO: 2269726 - DNA, 25 bp, Homo sapien
gagcccccgttgctattctcattca

SEQ ID NO: 2269727 - DNA, 25 bp, Homo sapien
ctcaacacgagctgggtggagcccc

SEQ ID NO: 2269728 - DNA, 25 bp, Homo sapien
ggtggagcccccgttgctattctca

SEQ ID NO: 2269729 - DNA, 25 bp, Homo sapien
gcctggctggcagattttaccaatt

SEQ ID NO: 2269730 - DNA, 25 bp, Homo sapien
cagattttaccaatttcaaagtgcc

SEQ ID NO: 2269731 - DNA, 25 bp, Homo sapien
ctggctggcagattttaccaatttc

SEQ ID NO: 2269732 - DNA, 25 bp, Homo sapien
gctggcagattttaccaatttcaaa

SEQ ID NO: 2269733 - DNA, 25 bp, Homo sapien
tgtccatattcttgcgaaaccatca

SEQ ID NO: 2269734 - DNA, 25 bp, Homo sapien
ctgtccatattcttgcgaaaccatc

SEQ ID NO: 2269735 - DNA, 25 bp, Homo sapien
catgcaggaggggtgcaggacttac

SEQ ID NO: 2269736 - DNA, 25 bp, Homo sapien
ctgacccatgcaggaggggtgcagg

SEQ ID NO: 2269737 - DNA, 25 bp, Homo sapien
tgacccatgcaggaggggtgcagga

SEQ ID NO: 2269738 - DNA, 25 bp, Homo sapien
acccatgcaggaggggtgcaggact

SEQ ID NO: 2269739 - DNA, 25 bp, Homo sapien
tgttccatttcagagcgaagatggg

SEQ ID NO: 2269740 - DNA, 25 bp, Homo sapien
ttttgttccatttcagagcgaagat

SEQ ID NO: 2269741 - DNA, 25 bp, Homo sapien
tttcagagcgaagatggggccttta

SEQ ID NO: 2269742 - DNA, 25 bp, Homo sapien
catttcagagcgaagatggggcctt

SEQ ID NO: 2269743 - DNA, 25 bp, Homo sapien
tctaaacggcttcgtaggccatctg

SEQ ID NO: 2269744 - DNA, 25 bp, Homo sapien
atggctccccgtagacctgcccagg

SEQ ID NO: 2269745 - DNA, 25 bp, Homo sapien
tgtgcccaggttgctagattcctgc

SEQ ID NO: 2269746 - DNA, 25 bp, Homo sapien
gcaagtcaattctaaacggcttcgt

SEQ ID NO: 2269747 - DNA, 25 bp, Homo sapien
tgaaaaggaaactgctgtttggctt

SEQ ID NO: 2269748 - DNA, 25 bp, Homo sapien
tgtgagcatcccaaattattgttgt

SEQ ID NO: 2269749 - DNA, 25 bp, Homo sapien
tcctgtgtgagcatcccaaattatt

SEQ ID NO: 2269750 - DNA, 25 bp, Homo sapien
gcttctcctgtgtgagcatcccaaa

SEQ ID NO: 2269751 - DNA, 25 bp, Homo sapien
ggtctgcatgtctggtattctaggg

SEQ ID NO: 2269752 - DNA, 25 bp, Homo sapien
catttaagccatgtgatggaactct

SEQ ID NO: 2269753 - DNA, 25 bp, Homo sapien
tagggatgtgaatttgttacggaac

SEQ ID NO: 2269754 - DNA, 25 bp, Homo sapien
ttcctgtccgcaaaggtagattttg

SEQ ID NO: 2269755 - DNA, 25 bp, Homo sapien
tgttctgccagtccacatcaagggc

SEQ ID NO: 2269756 - DNA, 25 bp, Homo sapien
tgttgttctgccagtccacatcaag

SEQ ID NO: 2269757 - DNA, 25 bp, Homo sapien
gtctgtgctacaggaggcaaaggtc

SEQ ID NO: 2269758 - DNA, 25 bp, Homo sapien
tgtctgtgctacaggaggcaaaggt

SEQ ID NO: 2269759 - DNA, 25 bp, Homo sapien
tggtcacagccgagcctgcacacat

SEQ ID NO: 2269760 - DNA, 25 bp, Homo sapien
tgtgtccctggaaggttttgactgg

SEQ ID NO: 2269761 - DNA, 25 bp, Homo sapien
tgggtggtcacagccgagcctgcac

SEQ ID NO: 2269762 - DNA, 25 bp, Homo sapien
aaggttttgactgggtggtcacagc

SEQ ID NO: 2269763 - DNA, 25 bp, Homo sapien
agtagatgaggtcgccttccagcag

SEQ ID NO: 2269764 - DNA, 25 bp, Homo sapien
agagcggagagtctcttgaaaaata

SEQ ID NO: 2269765 - DNA, 25 bp, Homo sapien
gtcgctgcagaaggtcttaggcctc

SEQ ID NO: 2269766 - DNA, 25 bp, Homo sapien
agcgcgccaccgtcgctgcagaagg

SEQ ID NO: 2269767 - DNA, 25 bp, Homo sapien
tccagaaggatcccatttgatggca

SEQ ID NO: 2269768 - DNA, 25 bp, Homo sapien
cccatttgatggcattgacctcgtt

SEQ ID NO: 2269769 - DNA, 25 bp, Homo sapien
agcaggacgccagcaacattccaga

SEQ ID NO: 2269770 - DNA, 25 bp, Homo sapien
aatgtcatgtcatccgagcaggacg

SEQ ID NO: 2269771 - DNA, 25 bp, Homo sapien
gaagatcgtggacgcatgcatcctg

SEQ ID NO: 2269772 - DNA, 25 bp, Homo sapien
agcctgaagatcgtggacgcatgca

SEQ ID NO: 2269773 - DNA, 25 bp, Homo sapien
tgaagatcgtggacgcatgcatcct

SEQ ID NO: 2269774 - DNA, 25 bp, Homo sapien
cctgaagatcgtggacgcatgcatc

SEQ ID NO: 2269775 - DNA, 25 bp, Homo sapien
catacttgtcaaaggatccactagc

SEQ ID NO: 2269776 - DNA, 25 bp, Homo sapien
cactagccaagtactttccatcggg

SEQ ID NO: 2269777 - DNA, 25 bp, Homo sapien
cttcatgagtgtgtgggtgcagaca

SEQ ID NO: 2269778 - DNA, 25 bp, Homo sapien
tattccagatatgaacatacttgtc

SEQ ID NO: 2269779 - DNA, 25 bp, Homo sapien
gccttggtagctgtggacgagactt

SEQ ID NO: 2269780 - DNA, 25 bp, Homo sapien
atcagacgcgctggcgcccacttta

SEQ ID NO: 2269781 - DNA, 25 bp, Homo sapien
tggtagctgtggacgagacttccac

SEQ ID NO: 2269782 - DNA, 25 bp, Homo sapien
agagccatcagacgcgctggcgccc

SEQ ID NO: 2269783 - DNA, 25 bp, Homo sapien
ctgttccctggtaaaccagaggtgt

SEQ ID NO: 2269784 - DNA, 25 bp, Homo sapien
caccctgttccctggtaaaccagag

SEQ ID NO: 2269785 - DNA, 25 bp, Homo sapien
ctggtaaaccagaggtgttgcttac

SEQ ID NO: 2269786 - DNA, 25 bp, Homo sapien
ccctggtaaaccagaggtgttgctt

SEQ ID NO: 2269787 - DNA, 25 bp, Homo sapien
gcaaccccatgcattcaaggcaggt

SEQ ID NO: 2269788 - DNA, 25 bp, Homo sapien
aaacatatacactcctgtggcctgg

SEQ ID NO: 2269789 - DNA, 25 bp, Homo sapien
ggcctgggacaagttggtttcagaa

SEQ ID NO: 2269790 - DNA, 25 bp, Homo sapien
ggagctgatagaattgtgtttgaac

SEQ ID NO: 2269791 - DNA, 25 bp, Homo sapien
tttgttctgccaacactcccttgag

SEQ ID NO: 2269792 - DNA, 25 bp, Homo sapien
cactcataacatggctgtggcaaag

SEQ ID NO: 2269793 - DNA, 25 bp, Homo sapien
caagctgtcagtttctagggcttcg

SEQ ID NO: 2269794 - DNA, 25 bp, Homo sapien
gcttcggcagtacctttttgttctg

SEQ ID NO: 2269795 - DNA, 25 bp, Homo sapien
gaacaatagcattccgctcaggcca

SEQ ID NO: 2269796 - DNA, 25 bp, Homo sapien
cagaaaatgagtaacaagcggaccc

SEQ ID NO: 2269797 - DNA, 25 bp, Homo sapien
gatggctctactaacattccagcag

SEQ ID NO: 2269798 - DNA, 25 bp, Homo sapien
aaacactggaggctatggaaacagc

SEQ ID NO: 2269799 - DNA, 25 bp, Homo sapien
cactataaggtagtgcctgcccagg

SEQ ID NO: 2269800 - DNA, 25 bp, Homo sapien
gagtcacagggttgcagatggattc

SEQ ID NO: 2269801 - DNA, 25 bp, Homo sapien
ttgtatcaggaatatcgagcgcagg

SEQ ID NO: 2269802 - DNA, 25 bp, Homo sapien
tgtgtacttctggagtcacagggtt

SEQ ID NO: 2269803 - DNA, 25 bp, Homo sapien
ttgaaatccatactgcaagtgaatc

SEQ ID NO: 2269804 - DNA, 25 bp, Homo sapien
atttgaaatccatactgcaagtgaa

SEQ ID NO: 2269805 - DNA, 25 bp, Homo sapien
tttgaaatccatactgcaagtgaat

SEQ ID NO: 2269806 - DNA, 25 bp, Homo sapien
tctgagttaactcagaccaagattc

SEQ ID NO: 2269807 - DNA, 25 bp, Homo sapien
taactcagaccaagattcctccaga

SEQ ID NO: 2269808 - DNA, 25 bp, Homo sapien
tcacactttctctgagttaactcag

SEQ ID NO: 2269809 - DNA, 25 bp, Homo sapien
cctccagattcaccttaatccaacc

SEQ ID NO: 2269810 - DNA, 25 bp, Homo sapien
tatcctgcaattaactgcttgttcc

SEQ ID NO: 2269811 - DNA, 25 bp, Homo sapien
tcagaagcagatttacgcatttccc

SEQ ID NO: 2269812 - DNA, 25 bp, Homo sapien
tgttccagacatgacaaatgactct

SEQ ID NO: 2269813 - DNA, 25 bp, Homo sapien
ttccaggtaagtggccaaagctttg

SEQ ID NO: 2269814 - DNA, 25 bp, Homo sapien
acaggtgtttgcagcctcggagctg

SEQ ID NO: 2269815 - DNA, 25 bp, Homo sapien
ggtgtttgcagcctcggagctgtgg

SEQ ID NO: 2269816 - DNA, 25 bp, Homo sapien
aggtgtttgcagcctcggagctgtg

SEQ ID NO: 2269817 - DNA, 25 bp, Homo sapien
caggtgtttgcagcctcggagctgt

SEQ ID NO: 2269818 - DNA, 25 bp, Homo sapien
cacccatgggatagtgagcttggaa

SEQ ID NO: 2269819 - DNA, 25 bp, Homo sapien
ggagtcactgtgataatggcaccaa

SEQ ID NO: 2269820 - DNA, 25 bp, Homo sapien
cactgagccggctgcagaggtaatg

SEQ ID NO: 2269821 - DNA, 25 bp, Homo sapien
tcagtatttgtcagcgcccctataa

SEQ ID NO: 2269822 - DNA, 25 bp, Homo sapien
actgataggaatgattagcttcaaa

SEQ ID NO: 2269823 - DNA, 25 bp, Homo sapien
gataggaatgattagcttcaaaatc

SEQ ID NO: 2269824 - DNA, 25 bp, Homo sapien
gtagtgtgagtgcaaaagtactgat

SEQ ID NO: 2269825 - DNA, 25 bp, Homo sapien
gagtgcaaaagtactgataggaatg

SEQ ID NO: 2269826 - DNA, 25 bp, Homo sapien
ggtgctgccaagattgttggtgctt

SEQ ID NO: 2269827 - DNA, 25 bp, Homo sapien
tttcagagggctggttgggtctaga

SEQ ID NO: 2269828 - DNA, 25 bp, Homo sapien
cctaaccagctcttgggtgctgcca

SEQ ID NO: 2269829 - DNA, 25 bp, Homo sapien
gatgatagcaaggagtaatgtctgt

SEQ ID NO: 2269830 - DNA, 25 bp, Homo sapien
gcattcatcaaacaactccttcact

SEQ ID NO: 2269831 - DNA, 25 bp, Homo sapien
tgcattcatcaaacaactccttcac

SEQ ID NO: 2269832 - DNA, 25 bp, Homo sapien
attcatcaaacaactccttcactct

SEQ ID NO: 2269833 - DNA, 25 bp, Homo sapien
tcatcaaacaactccttcactctct

SEQ ID NO: 2269834 - DNA, 25 bp, Homo sapien
ggtcccgtgagaactgtgaggctct

SEQ ID NO: 2269835 - DNA, 25 bp, Homo sapien
cccgtgagaactgtgaggctctccc

SEQ ID NO: 2269836 - DNA, 25 bp, Homo sapien
agtggtggtcccgtgagaactgtga

SEQ ID NO: 2269837 - DNA, 25 bp, Homo sapien
tggtcccgtgagaactgtgaggctc

SEQ ID NO: 2269838 - DNA, 25 bp, Homo sapien
tggctggattccctgtttaggatct

SEQ ID NO: 2269839 - DNA, 25 bp, Homo sapien
tcagcaaatggctggattccctgtt

SEQ ID NO: 2269840 - DNA, 25 bp, Homo sapien
ttccgcgggcctgtttttgtcttca

SEQ ID NO: 2269841 - DNA, 25 bp, Homo sapien
gctggattccctgtttaggatctgg

SEQ ID NO: 2269842 - DNA, 25 bp, Homo sapien
acagtcagagaataaaccgcgttca

SEQ ID NO: 2269843 - DNA, 25 bp, Homo sapien
gctggggttctctgcctatagccct

SEQ ID NO: 2269844 - DNA, 25 bp, Homo sapien
tcagagaataaaccgcgttcaaaaa

SEQ ID NO: 2269845 - DNA, 25 bp, Homo sapien
cacaggccatgcaccccgtcctctg

SEQ ID NO: 2269846 - DNA, 25 bp, Homo sapien
gatgggaaaagtcttcagtcccagc

SEQ ID NO: 2269847 - DNA, 25 bp, Homo sapien
accaggattggccttcacagagcgg

SEQ ID NO: 2269848 - DNA, 25 bp, Homo sapien
ccaggattggccttcacagagcgga

SEQ ID NO: 2269849 - DNA, 25 bp, Homo sapien
ggtcatctcggccacgtgatgggaa

SEQ ID NO: 2269850 - DNA, 25 bp, Homo sapien
tgctggatggctgcgaggaaggcgg

SEQ ID NO: 2269851 - DNA, 25 bp, Homo sapien
ctagcagcaatagccccgggaggga

SEQ ID NO: 2269852 - DNA, 25 bp, Homo sapien
cctcctccagctcggtggccgcgtg

SEQ ID NO: 2269853 - DNA, 25 bp, Homo sapien
caagcattcccggtctcacgcccgc

SEQ ID NO: 2269854 - DNA, 25 bp, Homo sapien
agccgcggcagcatcaacggaggct

SEQ ID NO: 2269855 - DNA, 25 bp, Homo sapien
cggagcgctcgggaagccggactcc

SEQ ID NO: 2269856 - DNA, 25 bp, Homo sapien
tcgcctctgggtgcgcggctcggca

SEQ ID NO: 2269857 - DNA, 25 bp, Homo sapien
cacggctgacggagacacagagaca

SEQ ID NO: 2269858 - DNA, 25 bp, Homo sapien
tctcgggagttgctctccgccgcgg

SEQ ID NO: 2269859 - DNA, 25 bp, Homo sapien
tccgtcacctctcgggagttgctct

SEQ ID NO: 2269860 - DNA, 25 bp, Homo sapien
ggcatcctccgtcacctctcgggag

SEQ ID NO: 2269861 - DNA, 25 bp, Homo sapien
agtcggcggcatcctccgtcacctc

SEQ ID NO: 2269862 - DNA, 25 bp, Homo sapien
ccatggtgaccagcgcgtcgcagtc

SEQ ID NO: 2269863 - DNA, 25 bp, Homo sapien
cgcacacacgtgagtattaccaaat

SEQ ID NO: 2269864 - DNA, 25 bp, Homo sapien
tgcgtttccgtcttgctcctccagc

SEQ ID NO: 2269865 - DNA, 25 bp, Homo sapien
aatctgccctctagcacctgcgttt

SEQ ID NO: 2269866 - DNA, 25 bp, Homo sapien
gcccaggtttctgtgcaaacaatct

SEQ ID NO: 2269867 - DNA, 25 bp, Homo sapien
gaaaagtcatatacaggtccctagt

SEQ ID NO: 2269868 - DNA, 25 bp, Homo sapien
ttggaaaagtcatatacaggtccct

SEQ ID NO: 2269869 - DNA, 25 bp, Homo sapien
aagtcatatacaggtccctagtaag

SEQ ID NO: 2269870 - DNA, 25 bp, Homo sapien
tttaattggaaaagtcatatacagg

SEQ ID NO: 2269871 - DNA, 25 bp, Homo sapien
ctgaacaggggacctgttccttcgc

SEQ ID NO: 2269872 - DNA, 25 bp, Homo sapien
tgcagcacattcccgggagtagatt

SEQ ID NO: 2269873 - DNA, 25 bp, Homo sapien
ccgggagtagattcacggatgatct

SEQ ID NO: 2269874 - DNA, 25 bp, Homo sapien
aacagctgacaccatctgagcccag

SEQ ID NO: 2269875 - DNA, 25 bp, Homo sapien
cattcccgggagtagattcacggat

SEQ ID NO: 2269876 - DNA, 25 bp, Homo sapien
gacgtcgggaatgctcatcaccttg

SEQ ID NO: 2269877 - DNA, 25 bp, Homo sapien
ctgctcctgcttccggcggatgacg

SEQ ID NO: 2269878 - DNA, 25 bp, Homo sapien
gacttctcattgtgcacgtgctgct

SEQ ID NO: 2269879 - DNA, 25 bp, Homo sapien
ccttgagggcgaagaaatgcttggc

SEQ ID NO: 2269880 - DNA, 25 bp, Homo sapien
tctttttggacctggtcagccatgg

SEQ ID NO: 2269881 - DNA, 25 bp, Homo sapien
ctggaactgccagcaaaaggtggag

SEQ ID NO: 2269882 - DNA, 25 bp, Homo sapien
taaaaagtccaacacctggaactgc

SEQ ID NO: 2269883 - DNA, 25 bp, Homo sapien
gcaggtgggcacctttagcaaatcc

SEQ ID NO: 2269884 - DNA, 25 bp, Homo sapien
ccttggtgcaagtcaagtcagcatt

SEQ ID NO: 2269885 - DNA, 25 bp, Homo sapien
aaacatctcaggttcggtcacttgg

SEQ ID NO: 2269886 - DNA, 25 bp, Homo sapien
aatacaaacatctcaggttcggtca

SEQ ID NO: 2269887 - DNA, 25 bp, Homo sapien
caggttcggtcacttggcttgcagg

SEQ ID NO: 2269888 - DNA, 25 bp, Homo sapien
tctcaggttcggtcacttggcttgc

SEQ ID NO: 2269889 - DNA, 25 bp, Homo sapien
gctcagcaagttcaaaatctgtggt

SEQ ID NO: 2269890 - DNA, 25 bp, Homo sapien
tacagctcagcaagttcaaaatctg

SEQ ID NO: 2269891 - DNA, 25 bp, Homo sapien
agctcagcaagttcaaaatctgtgg

SEQ ID NO: 2269892 - DNA, 25 bp, Homo sapien
cagctcagcaagttcaaaatctgtg

SEQ ID NO: 2269893 - DNA, 25 bp, Homo sapien
cactttaaaatttgcagattctgca

SEQ ID NO: 2269894 - DNA, 25 bp, Homo sapien
tctccaccttgctgctagattcctg

SEQ ID NO: 2269895 - DNA, 25 bp, Homo sapien
cacaaatacaggttgtaggaatgcc

SEQ ID NO: 2269896 - DNA, 25 bp, Homo sapien
ctggagttcggggactaatgaccca

SEQ ID NO: 2269897 - DNA, 25 bp, Homo sapien
atctccgcagagtagaagagccccg

SEQ ID NO: 2269898 - DNA, 25 bp, Homo sapien
tagaggaagcgctcctcatgccacg

SEQ ID NO: 2269899 - DNA, 25 bp, Homo sapien
tagacgatctccttggagtgcaggt

SEQ ID NO: 2269900 - DNA, 25 bp, Homo sapien
ccggcacatactccatgagcatgta

SEQ ID NO: 2269901 - DNA, 25 bp, Homo sapien
gatactgatttaacaactgtctggt

SEQ ID NO: 2269902 - DNA, 25 bp, Homo sapien
gagacaagattgtgcaacggcactt

SEQ ID NO: 2269903 - DNA, 25 bp, Homo sapien
tggtgctaaaaatgttaaattcaaa

SEQ ID NO: 2269904 - DNA, 25 bp, Homo sapien
aagattgtgcaacggcacttcagct

SEQ ID NO: 2269905 - DNA, 25 bp, Homo sapien
taggagcctcagactagcttggaca

SEQ ID NO: 2269906 - DNA, 25 bp, Homo sapien
tctaagcatggaacaaggatcccct

SEQ ID NO: 2269907 - DNA, 25 bp, Homo sapien
caggctctgggagatacaagtcagg

SEQ ID NO: 2269908 - DNA, 25 bp, Homo sapien
caagaacggtgtcatgcctgtcatc

SEQ ID NO: 2269909 - DNA, 25 bp, Homo sapien
ctggctgccatccaaatttcaaatt

SEQ ID NO: 2269910 - DNA, 25 bp, Homo sapien
atttcaaattctgtcggccatccat

SEQ ID NO: 2269911 - DNA, 25 bp, Homo sapien
actggctgccatccaaatttcaaat

SEQ ID NO: 2269912 - DNA, 25 bp, Homo sapien
cacctcttttccgacaagagacttt

SEQ ID NO: 2269913 - DNA, 25 bp, Homo sapien
tgtgggcacgtatcttggcttcagc

SEQ ID NO: 2269914 - DNA, 25 bp, Homo sapien
tgttatctttccttcgcttctccac

SEQ ID NO: 2269915 - DNA, 25 bp, Homo sapien
tactgttatctttccttcgcttctc

SEQ ID NO: 2269916 - DNA, 25 bp, Homo sapien
agtctgccctgtttgcggtggtgtg

SEQ ID NO: 2269917 - DNA, 25 bp, Homo sapien
ggaaatacacttcctcccctgcatg

SEQ ID NO: 2269918 - DNA, 25 bp, Homo sapien
ccagtgtaaagacggaaatacactt

SEQ ID NO: 2269919 - DNA, 25 bp, Homo sapien
actggatggtcagcagagcttatgt

SEQ ID NO: 2269920 - DNA, 25 bp, Homo sapien
tatgtgttctttcactctctaccct

SEQ ID NO: 2269921 - DNA, 25 bp, Homo sapien
aatgcagtcaccttagaagctctga

SEQ ID NO: 2269922 - DNA, 25 bp, Homo sapien
ttaccatccttgctactgttgctgg

SEQ ID NO: 2269923 - DNA, 25 bp, Homo sapien
cactcagtggtgcttggctaatgca

SEQ ID NO: 2269924 - DNA, 25 bp, Homo sapien
gctccctttaccgtctgtgcacata

SEQ ID NO: 2269925 - DNA, 25 bp, Homo sapien
ctaggtactcgggtgttccacagag

SEQ ID NO: 2269926 - DNA, 25 bp, Homo sapien
gggctaggtactcgggtgttccaca

SEQ ID NO: 2269927 - DNA, 25 bp, Homo sapien
gctaggtactcgggtgttccacaga

SEQ ID NO: 2269928 - DNA, 25 bp, Homo sapien
taggtactcgggtgttccacagagg

SEQ ID NO: 2269929 - DNA, 25 bp, Homo sapien
ggtagctaactgtgaatatcaactg

SEQ ID NO: 2269930 - DNA, 25 bp, Homo sapien
gagttcaactggtagctaactgtga

SEQ ID NO: 2269931 - DNA, 25 bp, Homo sapien
aaagcagagtaaggagttcaactgg

SEQ ID NO: 2269932 - DNA, 25 bp, Homo sapien
cagagtaaggagttcaactggtagc

SEQ ID NO: 2269933 - DNA, 25 bp, Homo sapien
aagagctcaggccagcgagagtgga

SEQ ID NO: 2269934 - DNA, 25 bp, Homo sapien
gagactgtgagaaagctgtatcctg

SEQ ID NO: 2269935 - DNA, 25 bp, Homo sapien
gagggagagcccagaaatgcctggg

SEQ ID NO: 2269936 - DNA, 25 bp, Homo sapien
gcatctccgtcaaggcaagagctca

SEQ ID NO: 2269937 - DNA, 25 bp, Homo sapien
ctgcagctgcttcaacgaaaaggta

SEQ ID NO: 2269938 - DNA, 25 bp, Homo sapien
gaatccagcaaatcgagctgcgata

SEQ ID NO: 2269939 - DNA, 25 bp, Homo sapien
gggaatccagcaaatcgagctgcga

SEQ ID NO: 2269940 - DNA, 25 bp, Homo sapien
ccagcaaatcgagctgcgataggaa

SEQ ID NO: 2269941 - DNA, 25 bp, Homo sapien
ttgatcctgctaagagtgggaatcc

SEQ ID NO: 2269942 - DNA, 25 bp, Homo sapien
cattggaagacacgtgctttggaaa

SEQ ID NO: 2269943 - DNA, 25 bp, Homo sapien
ggctggcattggaagacacgtgctt

SEQ ID NO: 2269944 - DNA, 25 bp, Homo sapien
tggaagacacgtgctttggaaatgc

SEQ ID NO: 2269945 - DNA, 25 bp, Homo sapien
ctgccccagttctgaagaccagggc

SEQ ID NO: 2269946 - DNA, 25 bp, Homo sapien
gcaagttaaactgatctgtggtgac

SEQ ID NO: 2269947 - DNA, 25 bp, Homo sapien
tacggcatttggcattattaagcaa

SEQ ID NO: 2269948 - DNA, 25 bp, Homo sapien
gagaataaattctcattatacggca

SEQ ID NO: 2269949 - DNA, 25 bp, Homo sapien
gtggtgacagctacacttgcaagga

SEQ ID NO: 2269950 - DNA, 25 bp, Homo sapien
ttaggggagtcgcattcctgtttct

SEQ ID NO: 2269951 - DNA, 25 bp, Homo sapien
ggggcgaccctgtgtcaatacattc

SEQ ID NO: 2269952 - DNA, 25 bp, Homo sapien
tttggggggcgaccctgtgtcaata

SEQ ID NO: 2269953 - DNA, 25 bp, Homo sapien
taacagtagttaggggagtcgcatt

SEQ ID NO: 2269954 - DNA, 25 bp, Homo sapien
gataaatgccaaacgggttgtcatc

SEQ ID NO: 2269955 - DNA, 25 bp, Homo sapien
tgataaatgccaaacgggttgtcat

SEQ ID NO: 2269956 - DNA, 25 bp, Homo sapien
tgccaaacgggttgtcatcaaaaaa

SEQ ID NO: 2269957 - DNA, 25 bp, Homo sapien
aaatgccaaacgggttgtcatcaaa

SEQ ID NO: 2269958 - DNA, 25 bp, Homo sapien
tggacccgcactgggtatgtaaaga

SEQ ID NO: 2269959 - DNA, 25 bp, Homo sapien
ggcatcgtggggaacactggaaggg

SEQ ID NO: 2269960 - DNA, 25 bp, Homo sapien
ttggtggacccgcactgggtatgta

SEQ ID NO: 2269961 - DNA, 25 bp, Homo sapien
acccgcactgggtatgtaaagagac

SEQ ID NO: 2269962 - DNA, 25 bp, Homo sapien
aggctaaagtggcaagatcagttga

SEQ ID NO: 2269963 - DNA, 25 bp, Homo sapien
ggcaagatcagttgagaccaagagt

SEQ ID NO: 2269964 - DNA, 25 bp, Homo sapien
taaagtggcaagatcagttgagacc

SEQ ID NO: 2269965 - DNA, 25 bp, Homo sapien
ttggtgtttggcatctaagaaaatg

SEQ ID NO: 2269966 - DNA, 25 bp, Homo sapien
taaatgtgggacagcagaagaaata

SEQ ID NO: 2269967 - DNA, 25 bp, Homo sapien
aaatgtgggacagcagaagaaataa

SEQ ID NO: 2269968 - DNA, 25 bp, Homo sapien
aattaaatgtgggacagcagaagaa

SEQ ID NO: 2269969 - DNA, 25 bp, Homo sapien
ttaaatgtgggacagcagaagaaat

SEQ ID NO: 2269970 - DNA, 25 bp, Homo sapien
ttctctgcggaacagctttccagtc

SEQ ID NO: 2269971 - DNA, 25 bp, Homo sapien
gcggaacagctttccagtccacgga

SEQ ID NO: 2269972 - DNA, 25 bp, Homo sapien
acggagcggaaccaccgatggtgtt

SEQ ID NO: 2269973 - DNA, 25 bp, Homo sapien
gtccacggagcggaaccaccgatgg

SEQ ID NO: 2269974 - DNA, 25 bp, Homo sapien
gttgccagctatcgtgggcacgatg

SEQ ID NO: 2269975 - DNA, 25 bp, Homo sapien
gccgttgccagctatcgtgggcacg

SEQ ID NO: 2269976 - DNA, 25 bp, Homo sapien
tgtcgccgttgccagctatcgtggg

SEQ ID NO: 2269977 - DNA, 25 bp, Homo sapien
agtgtcgccgttgccagctatcgtg

SEQ ID NO: 2269978 - DNA, 25 bp, Homo sapien
aaggctagacctatgtgtgaaatct

SEQ ID NO: 2269979 - DNA, 25 bp, Homo sapien
tttttcagggacagtaggcgcagct

SEQ ID NO: 2269980 - DNA, 25 bp, Homo sapien
cagctgtggacagtatgtgatgaaa

SEQ ID NO: 2269981 - DNA, 25 bp, Homo sapien
ggctggatgttgtcgcatgcacctg

SEQ ID NO: 2269982 - DNA, 25 bp, Homo sapien
ttttgcaaggatccataagcgtgaa

SEQ ID NO: 2269983 - DNA, 25 bp, Homo sapien
tttttgcaaggatccataagcgtga

SEQ ID NO: 2269984 - DNA, 25 bp, Homo sapien
ttgcaaggatccataagcgtgaatt

SEQ ID NO: 2269985 - DNA, 25 bp, Homo sapien
tctttttgcaaggatccataagcgt

SEQ ID NO: 2269986 - DNA, 25 bp, Homo sapien
taaaacagcatgacttgtcgaggag

SEQ ID NO: 2269987 - DNA, 25 bp, Homo sapien
tcaactgggactttaataggtagcc

SEQ ID NO: 2269988 - DNA, 25 bp, Homo sapien
ggtatgcacaatgacacccgactaa

SEQ ID NO: 2269989 - DNA, 25 bp, Homo sapien
tgtcgaggagagtattaggcacact

SEQ ID NO: 2269990 - DNA, 25 bp, Homo sapien
ctgttgtcaacaaggaattcctgga

SEQ ID NO: 2269991 - DNA, 25 bp, Homo sapien
ccctgtgacctcatacacagcagat

SEQ ID NO: 2269992 - DNA, 25 bp, Homo sapien
ccctgttgtcaacaaggaattcctg

SEQ ID NO: 2269993 - DNA, 25 bp, Homo sapien
tacacagcagatttgagcaatgcca

SEQ ID NO: 2269994 - DNA, 25 bp, Homo sapien
gaggtgtttcccagacaggtattga

SEQ ID NO: 2269995 - DNA, 25 bp, Homo sapien
gctccaatagcaaggaatgcaccgg

SEQ ID NO: 2269996 - DNA, 25 bp, Homo sapien
cattttcactaacacatggcaaggg

SEQ ID NO: 2269997 - DNA, 25 bp, Homo sapien
ttcttatctgtaggcgaactctggc

SEQ ID NO: 2269998 - DNA, 25 bp, Homo sapien
aatctgcggatcttcctcgcgcagg

SEQ ID NO: 2269999 - DNA, 25 bp, Homo sapien
gtatacctgctgccgaagtcagcaa

SEQ ID NO: 2270000 - DNA, 25 bp, Homo sapien
tatggaatgctgcatgaatctgcgg

SEQ ID NO: 2270001 - DNA, 25 bp, Homo sapien
tgctgcatgaatctgcggatcttcc

SEQ ID NO: 2270002 - DNA, 25 bp, Homo sapien
gattatcgtaagaattttcctctac

SEQ ID NO: 2270003 - DNA, 25 bp, Homo sapien
aaaattacacatatggactcatggg

SEQ ID NO: 2270004 - DNA, 25 bp, Homo sapien
tgcaggcatgacacactctgccagg

SEQ ID NO: 2270005 - DNA, 25 bp, Homo sapien
tctcttactgtatcccaatttaaga

SEQ ID NO: 2270006 - DNA, 25 bp, Homo sapien
tgtgcacagcatccggcagcagtca

SEQ ID NO: 2270007 - DNA, 25 bp, Homo sapien
tattaggaaggactgtactgctggg

SEQ ID NO: 2270008 - DNA, 25 bp, Homo sapien
tgcttttaagtgaatcccgtccatt

SEQ ID NO: 2270009 - DNA, 25 bp, Homo sapien
ggactgtggaaaagcttcaaatccc

SEQ ID NO: 2270010 - DNA, 25 bp, Homo sapien
tctgcctgtctagaaagagtatatt

SEQ ID NO: 2270011 - DNA, 25 bp, Homo sapien
tacaatctttgcagcctagaataag

SEQ ID NO: 2270012 - DNA, 25 bp, Homo sapien
gatctgtcattacttaaagaacaca

SEQ ID NO: 2270013 - DNA, 25 bp, Homo sapien
tgtaacatttacaatacgaaacatg

SEQ ID NO: 2270014 - DNA, 25 bp, Homo sapien
gagacagctgtttgcggttaaaggc

SEQ ID NO: 2270015 - DNA, 25 bp, Homo sapien
agacagctgtttgcggttaaaggca

SEQ ID NO: 2270016 - DNA, 25 bp, Homo sapien
ctcatgcgtggcttaggctggcgtt

SEQ ID NO: 2270017 - DNA, 25 bp, Homo sapien
tttcctgatagtgctcatacttccc

SEQ ID NO: 2270018 - DNA, 25 bp, Homo sapien
cttgccttttcctgatagtgctcat

SEQ ID NO: 2270019 - DNA, 25 bp, Homo sapien
tgccttttcctgatagtgctcatac

SEQ ID NO: 2270020 - DNA, 25 bp, Homo sapien
ccttttcctgatagtgctcatactt

SEQ ID NO: 2270021 - DNA, 25 bp, Homo sapien
ttgctgcctgaccaagagaaaatta

SEQ ID NO: 2270022 - DNA, 25 bp, Homo sapien
cacccttgctgcctgaccaagagaa

SEQ ID NO: 2270023 - DNA, 25 bp, Homo sapien
gccaaattcccgtcaattatcctct

SEQ ID NO: 2270024 - DNA, 25 bp, Homo sapien
ctgtagccaaattcccgtcaattat

SEQ ID NO: 2270025 - DNA, 25 bp, Homo sapien
gcatatctagttgagtggaaccagc

SEQ ID NO: 2270026 - DNA, 25 bp, Homo sapien
tttccatctggcatatctagttgag

SEQ ID NO: 2270027 - DNA, 25 bp, Homo sapien
gtctggcaatttaggagtcaccact

SEQ ID NO: 2270028 - DNA, 25 bp, Homo sapien
tctggcaatttaggagtcaccactg

SEQ ID NO: 2270029 - DNA, 25 bp, Homo sapien
gagctccaaagggtgggagcgtcca

SEQ ID NO: 2270030 - DNA, 25 bp, Homo sapien
catgagctccaaagggtgggagcgt

SEQ ID NO: 2270031 - DNA, 25 bp, Homo sapien
aaggatgccaggacatgaagggttt

SEQ ID NO: 2270032 - DNA, 25 bp, Homo sapien
gatgccaggacatgaagggttttct

SEQ ID NO: 2270033 - DNA, 25 bp, Homo sapien
gtcatttcatacagacatcccaaca

SEQ ID NO: 2270034 - DNA, 25 bp, Homo sapien
gagtcatttcatacagacatcccaa

SEQ ID NO: 2270035 - DNA, 25 bp, Homo sapien
tttcatacagacatcccaacaacct

SEQ ID NO: 2270036 - DNA, 25 bp, Homo sapien
ggagagtcatttcatacagacatcc

SEQ ID NO: 2270037 - DNA, 25 bp, Homo sapien
tgaggggcccagaaaacacagaaac

SEQ ID NO: 2270038 - DNA, 25 bp, Homo sapien
ctgagcaatgaggggcccagaaaac

SEQ ID NO: 2270039 - DNA, 25 bp, Homo sapien
caatgaggggcccagaaaacacaga

SEQ ID NO: 2270040 - DNA, 25 bp, Homo sapien
gagcaatgaggggcccagaaaacac

SEQ ID NO: 2270041 - DNA, 25 bp, Homo sapien
aggatgaccagagtgacgtcttttc

SEQ ID NO: 2270042 - DNA, 25 bp, Homo sapien
atgggcacagcaggatgaccagagt

SEQ ID NO: 2270043 - DNA, 25 bp, Homo sapien
ttccagcagcaaggctaccaggagg

SEQ ID NO: 2270044 - DNA, 25 bp, Homo sapien
ggtgctccaaatgccatgggcacag

SEQ ID NO: 2270045 - DNA, 25 bp, Homo sapien
agcaatcattgatctgaacttcttc

SEQ ID NO: 2270046 - DNA, 25 bp, Homo sapien
tctgcaaagcaatcattgatctgaa

SEQ ID NO: 2270047 - DNA, 25 bp, Homo sapien
caaagcaatcattgatctgaacttc

SEQ ID NO: 2270048 - DNA, 25 bp, Homo sapien
gcggcttttccaactgtaacttcaa

SEQ ID NO: 2270049 - DNA, 25 bp, Homo sapien
ttgtgtttgtcctggatataacagc

SEQ ID NO: 2270050 - DNA, 25 bp, Homo sapien
ttgtcctggatataacagccttcac

SEQ ID NO: 2270051 - DNA, 25 bp, Homo sapien
cggtttttgtgtttgtcctggatat

SEQ ID NO: 2270052 - DNA, 25 bp, Homo sapien
gtgtttgtcctggatataacagcct

SEQ ID NO: 2270053 - DNA, 25 bp, Homo sapien
tggagaaataaggaataaggaattc

SEQ ID NO: 2270054 - DNA, 25 bp, Homo sapien
tatggagaaataaggaataaggaat

SEQ ID NO: 2270055 - DNA, 25 bp, Homo sapien
gagaaataaggaataaggaattcac

SEQ ID NO: 2270056 - DNA, 25 bp, Homo sapien
ttatggagaaataaggaataaggaa

SEQ ID NO: 2270057 - DNA, 25 bp, Homo sapien
gtagccttccagatccccttgttct

SEQ ID NO: 2270058 - DNA, 25 bp, Homo sapien
tcaagctctgtagccttccagatcc

SEQ ID NO: 2270059 - DNA, 25 bp, Homo sapien
gtcaagctctgtagccttccagatc

SEQ ID NO: 2270060 - DNA, 25 bp, Homo sapien
ctctgtagccttccagatccccttg

SEQ ID NO: 2270061 - DNA, 25 bp, Homo sapien
tccacagggcttgtggcccataagg

SEQ ID NO: 2270062 - DNA, 25 bp, Homo sapien
cagctctaggtccacagggcttgtg

SEQ ID NO: 2270063 - DNA, 25 bp, Homo sapien
ggcttgtggcccataaggtaatgga

SEQ ID NO: 2270064 - DNA, 25 bp, Homo sapien
taaggtaatggagctcatgagtgtg

SEQ ID NO: 2270065 - DNA, 25 bp, Homo sapien
tcattgtgagatattttgctgtgtg

SEQ ID NO: 2270066 - DNA, 25 bp, Homo sapien
ttcattgtgagatattttgctgtgt

SEQ ID NO: 2270067 - DNA, 25 bp, Homo sapien
tgcttcagttccttccaaattaggg

SEQ ID NO: 2270068 - DNA, 25 bp, Homo sapien
tcatgcttcagttccttccaaatta

SEQ ID NO: 2270069 - DNA, 25 bp, Homo sapien
catgcttcagttccttccaaattag

SEQ ID NO: 2270070 - DNA, 25 bp, Homo sapien
atgcttcagttccttccaaattagg

SEQ ID NO: 2270071 - DNA, 25 bp, Homo sapien
cattgtatccttttgtcctctaacc

SEQ ID NO: 2270072 - DNA, 25 bp, Homo sapien
tctaaccacatttcttcaagctgtc

SEQ ID NO: 2270073 - DNA, 25 bp, Homo sapien
cttgcattgtatccttttgtcctct

SEQ ID NO: 2270074 - DNA, 25 bp, Homo sapien
tgtatccttttgtcctctaaccaca

SEQ ID NO: 2270075 - DNA, 25 bp, Homo sapien
tcaggtaataggctgattataaggc

SEQ ID NO: 2270076 - DNA, 25 bp, Homo sapien
ttataaggctccaggaaaacttgga

SEQ ID NO: 2270077 - DNA, 25 bp, Homo sapien
aaaacttggaaaggatgaatctctg

SEQ ID NO: 2270078 - DNA, 25 bp, Homo sapien
ttgttttcatagctaaatctctggg

SEQ ID NO: 2270079 - DNA, 25 bp, Homo sapien
agcattctggtttatgtcttatcat

SEQ ID NO: 2270080 - DNA, 25 bp, Homo sapien
tcttgaatgaggactctgtagttca

SEQ ID NO: 2270081 - DNA, 25 bp, Homo sapien
ttatgaaaacgtgaagacttctgtc

SEQ ID NO: 2270082 - DNA, 25 bp, Homo sapien
tttatgaaaacgtgaagacttctgt

SEQ ID NO: 2270083 - DNA, 25 bp, Homo sapien
aagaatgactcaatattgtacctta

SEQ ID NO: 2270084 - DNA, 25 bp, Homo sapien
cctttgcagaattctgtccaaaaga

SEQ ID NO: 2270085 - DNA, 25 bp, Homo sapien
cagataagatcattgtggtctccaa

SEQ ID NO: 2270086 - DNA, 25 bp, Homo sapien
taccttaaagctatctcgtatttcc

SEQ ID NO: 2270087 - DNA, 25 bp, Homo sapien
ctggaattaacatttgacagattaa

SEQ ID NO: 2270088 - DNA, 25 bp, Homo sapien
gtaatgctccctgagtgtgtacacc

SEQ ID NO: 2270089 - DNA, 25 bp, Homo sapien
taatgctccctgagtgtgtacacct

SEQ ID NO: 2270090 - DNA, 25 bp, Homo sapien
aatgctccctgagtgtgtacacctg

SEQ ID NO: 2270091 - DNA, 25 bp, Homo sapien
gagtaatgctccctgagtgtgtaca

SEQ ID NO: 2270092 - DNA, 25 bp, Homo sapien
tgttgctggctagcccttcatgtcc

SEQ ID NO: 2270093 - DNA, 25 bp, Homo sapien
gttgctggctagcccttcatgtcca

SEQ ID NO: 2270094 - DNA, 25 bp, Homo sapien
ctggtagcaccacggcggctttcca

SEQ ID NO: 2270095 - DNA, 25 bp, Homo sapien
acaggcataaacacgatttcttctt

SEQ ID NO: 2270096 - DNA, 25 bp, Homo sapien
acggtagcgcctggtagcaccacgg

SEQ ID NO: 2270097 - DNA, 25 bp, Homo sapien
atggtagacggaccacggtagcgcc

SEQ ID NO: 2270098 - DNA, 25 bp, Homo sapien
tactttgggacttataagtggcacc

SEQ ID NO: 2270099 - DNA, 25 bp, Homo sapien
tccattttgcaagggcaagtgttcc

SEQ ID NO: 2270100 - DNA, 25 bp, Homo sapien
atgatccagaaatcctacagtgaag

SEQ ID NO: 2270101 - DNA, 25 bp, Homo sapien
agggacccaaaggtcacgccaggag

SEQ ID NO: 2270102 - DNA, 25 bp, Homo sapien
tcacgtgttttagatttgtaacctc

SEQ ID NO: 2270103 - DNA, 25 bp, Homo sapien
gttttgaccaatggatgaacattgc

SEQ ID NO: 2270104 - DNA, 25 bp, Homo sapien
caatggatgaacattgctaacattt

SEQ ID NO: 2270105 - DNA, 25 bp, Homo sapien
attgatgaatataagcaagaatcca

SEQ ID NO: 2270106 - DNA, 25 bp, Homo sapien
ctctgtagatcaaccagcgatgcat

SEQ ID NO: 2270107 - DNA, 25 bp, Homo sapien
ctgctctgtagatcaaccagcgatg

SEQ ID NO: 2270108 - DNA, 25 bp, Homo sapien
gaatctggctgggtaaaaccgcatc

SEQ ID NO: 2270109 - DNA, 25 bp, Homo sapien
gtaaaaccgcatcaaagctgctctg

SEQ ID NO: 2270110 - DNA, 25 bp, Homo sapien
tttcttagtttccaggtgtgggagc

SEQ ID NO: 2270111 - DNA, 25 bp, Homo sapien
ttccaggtgtgggagctttgcctgc

SEQ ID NO: 2270112 - DNA, 25 bp, Homo sapien
tcttttgtgcaagtcctttcttagt

SEQ ID NO: 2270113 - DNA, 25 bp, Homo sapien
ccaggtgtgggagctttgcctgcat

SEQ ID NO: 2270114 - DNA, 25 bp, Homo sapien
tatggcatgacctgatcatcttcct

SEQ ID NO: 2270115 - DNA, 25 bp, Homo sapien
actgtatggcatgacctgatcatct

SEQ ID NO: 2270116 - DNA, 25 bp, Homo sapien
tcatcttcctgcagctctttaaaca

SEQ ID NO: 2270117 - DNA, 25 bp, Homo sapien
catcttcctgcagctctttaaacat

SEQ ID NO: 2270118 - DNA, 25 bp, Homo sapien
gcagagctcctgctgttcggtaaga

SEQ ID NO: 2270119 - DNA, 25 bp, Homo sapien
tgcagagctcctgctgttcggtaag

SEQ ID NO: 2270120 - DNA, 25 bp, Homo sapien
ctgaaaacctggcactggaccactg

SEQ ID NO: 2270121 - DNA, 25 bp, Homo sapien
tttctttagataagatctcccagac

SEQ ID NO: 2270122 - DNA, 25 bp, Homo sapien
taagatctcccagacagcaactgca

SEQ ID NO: 2270123 - DNA, 25 bp, Homo sapien
tggaccactgcccatgcagctgcct

SEQ ID NO: 2270124 - DNA, 25 bp, Homo sapien
aggctcccataaaaatttcttcctg

SEQ ID NO: 2270125 - DNA, 25 bp, Homo sapien
tttcttcctgtttcagctcagtcaa

SEQ ID NO: 2270126 - DNA, 25 bp, Homo sapien
cttcctgtttcagctcagtcaaggg

SEQ ID NO: 2270127 - DNA, 25 bp, Homo sapien
gtttcagctcagtcaaggggtaaca

SEQ ID NO: 2270128 - DNA, 25 bp, Homo sapien
caaccacgacgtggaccaccgccat

SEQ ID NO: 2270129 - DNA, 25 bp, Homo sapien
cttctcctcaaccacgacgtggacc

SEQ ID NO: 2270130 - DNA, 25 bp, Homo sapien
tcctcaaccacgacgtggaccaccg

SEQ ID NO: 2270131 - DNA, 25 bp, Homo sapien
tctcctcaaccacgacgtggaccac

SEQ ID NO: 2270132 - DNA, 25 bp, Homo sapien
aggtgcttctgccaaagcttccgtc

SEQ ID NO: 2270133 - DNA, 25 bp, Homo sapien
gcttctgccaaagcttccgtctcag

SEQ ID NO: 2270134 - DNA, 25 bp, Homo sapien
agcttccgtctcagccgcgggcaga

SEQ ID NO: 2270135 - DNA, 25 bp, Homo sapien
cggagatgccctggctaatggcccc

SEQ ID NO: 2270136 - DNA, 25 bp, Homo sapien
tggactggatcccctgttccccgcc

SEQ ID NO: 2270137 - DNA, 25 bp, Homo sapien
ccgccccctgtagcccgtcgcgcac

SEQ ID NO: 2270138 - DNA, 25 bp, Homo sapien
cctggactggatcccctgttccccg

SEQ ID NO: 2270139 - DNA, 25 bp, Homo sapien
ctggactggatcccctgttccccgc

SEQ ID NO: 2270140 - DNA, 25 bp, Homo sapien
ccagtccgtaccacatgctctcagg

SEQ ID NO: 2270141 - DNA, 25 bp, Homo sapien
gtgagtgctaagcttggctcccagt

SEQ ID NO: 2270142 - DNA, 25 bp, Homo sapien
tgtgcatgaagggtccttggcgcca

SEQ ID NO: 2270143 - DNA, 25 bp, Homo sapien
agttttctcctttgtgagtgctaag

SEQ ID NO: 2270144 - DNA, 25 bp, Homo sapien
ggtgcaatgcaggtagagggaagaa

SEQ ID NO: 2270145 - DNA, 25 bp, Homo sapien
gggtgcaatgcaggtagagggaaga

SEQ ID NO: 2270146 - DNA, 25 bp, Homo sapien
gcagggattgagacagaagccctga

SEQ ID NO: 2270147 - DNA, 25 bp, Homo sapien
aagccctgactgatgacgtgggggg

SEQ ID NO: 2270148 - DNA, 25 bp, Homo sapien
ctgcagggattgagacagaagccct

SEQ ID NO: 2270149 - DNA, 25 bp, Homo sapien
agaagccctgactgatgacgtgggg

SEQ ID NO: 2270150 - DNA, 25 bp, Homo sapien
ctctgagggcctaactccttcccgt

SEQ ID NO: 2270151 - DNA, 25 bp, Homo sapien
ttccctctctgagggcctaactcct

SEQ ID NO: 2270152 - DNA, 25 bp, Homo sapien
ctgagggcctaactccttcccgtag

SEQ ID NO: 2270153 - DNA, 25 bp, Homo sapien
ctctctgagggcctaactccttccc

SEQ ID NO: 2270154 - DNA, 25 bp, Homo sapien
ctcttcacgtctccctagtgtgcag

SEQ ID NO: 2270155 - DNA, 25 bp, Homo sapien
acaaggactcttcacgtctccctag

SEQ ID NO: 2270156 - DNA, 25 bp, Homo sapien
gattgccaaacctggcagcaccctg

SEQ ID NO: 2270157 - DNA, 25 bp, Homo sapien
agaaccacaaggactcttcacgtct

SEQ ID NO: 2270158 - DNA, 25 bp, Homo sapien
tgacccacgccctcgtggggagaat

SEQ ID NO: 2270159 - DNA, 25 bp, Homo sapien
gagaatgctagcctctctggagact

SEQ ID NO: 2270160 - DNA, 25 bp, Homo sapien
cgtggggagaatgctagcctctctg

SEQ ID NO: 2270161 - DNA, 25 bp, Homo sapien
tccttcacctactgacccacgccct

SEQ ID NO: 2270162 - DNA, 25 bp, Homo sapien
cccgcaacatacaacagtcctgagt

SEQ ID NO: 2270163 - DNA, 25 bp, Homo sapien
gagttatcaatgagccttctgtgag

SEQ ID NO: 2270164 - DNA, 25 bp, Homo sapien
tgggtgtccatgtactagaaggaga

SEQ ID NO: 2270165 - DNA, 25 bp, Homo sapien
tcctgagttgttgaaagttcctgtg

SEQ ID NO: 2270166 - DNA, 25 bp, Homo sapien
tccatctgggttaaggagggtgtca

SEQ ID NO: 2270167 - DNA, 25 bp, Homo sapien
cactctctgtaccttgaaacagtgg

SEQ ID NO: 2270168 - DNA, 25 bp, Homo sapien
ctgggccaccaggagtaactcttcc

SEQ ID NO: 2270169 - DNA, 25 bp, Homo sapien
aaggagggtgtcagcataatgtgac

SEQ ID NO: 2270170 - DNA, 25 bp, Homo sapien
tcaatgcttcgccacactcaggatg

SEQ ID NO: 2270171 - DNA, 25 bp, Homo sapien
gtggtgacccaaagccagatgcatg

SEQ ID NO: 2270172 - DNA, 25 bp, Homo sapien
aataattggctgaagcccaccgccg

SEQ ID NO: 2270173 - DNA, 25 bp, Homo sapien
gcctagcccgtctaatgtagtgaga

SEQ ID NO: 2270174 - DNA, 25 bp, Homo sapien
tgacggcccagttgtgctgggtcca

SEQ ID NO: 2270175 - DNA, 25 bp, Homo sapien
ggctgtgcccactcgtctatcttct

SEQ ID NO: 2270176 - DNA, 25 bp, Homo sapien
tcattatgacttccaccgtcagcac

SEQ ID NO: 2270177 - DNA, 25 bp, Homo sapien
ccctgtggcatagggtattcaagga

SEQ ID NO: 2270178 - DNA, 25 bp, Homo sapien
ttatgaaagtaaaggttgtgacgaa

SEQ ID NO: 2270179 - DNA, 25 bp, Homo sapien
cgaggataccaatggtagtactcct

SEQ ID NO: 2270180 - DNA, 25 bp, Homo sapien
tggtagtactccttaattatcactt

SEQ ID NO: 2270181 - DNA, 25 bp, Homo sapien
tatgaaagtaaaggttgtgacgaaa

SEQ ID NO: 2270182 - DNA, 25 bp, Homo sapien
tactgcaacggattgagacataggc

SEQ ID NO: 2270183 - DNA, 25 bp, Homo sapien
cagaaggtcgtccaggaaaggtcag

SEQ ID NO: 2270184 - DNA, 25 bp, Homo sapien
agaagccaaggaatgaccagtgagg

SEQ ID NO: 2270185 - DNA, 25 bp, Homo sapien
gggcagtactgcaacggattgagac

SEQ ID NO: 2270186 - DNA, 25 bp, Homo sapien
tttcttgttcacttcaatctccgtg

SEQ ID NO: 2270187 - DNA, 25 bp, Homo sapien
actgtgcccttcttgttcagtcttt

SEQ ID NO: 2270188 - DNA, 25 bp, Homo sapien
tgtgcccttcttgttcagtctttta

SEQ ID NO: 2270189 - DNA, 25 bp, Homo sapien
tcaatctccgtgaacactgtgccct

SEQ ID NO: 2270190 - DNA, 25 bp, Homo sapien
catatcttggatactgcctgtaacc

SEQ ID NO: 2270191 - DNA, 25 bp, Homo sapien
gaacactcatatcttggatactgcc

SEQ ID NO: 2270192 - DNA, 25 bp, Homo sapien
tcatatcttggatactgcctgtaac

SEQ ID NO: 2270193 - DNA, 25 bp, Homo sapien
aacactcatatcttggatactgcct

SEQ ID NO: 2270194 - DNA, 25 bp, Homo sapien
aactccaacatgattcagaagactt

SEQ ID NO: 2270195 - DNA, 25 bp, Homo sapien
atactggcagttccaggaactccaa

SEQ ID NO: 2270196 - DNA, 25 bp, Homo sapien
tccaggaactccaacatgattcaga

SEQ ID NO: 2270197 - DNA, 25 bp, Homo sapien
cagaagactttctgaatttgtctca

SEQ ID NO: 2270198 - DNA, 25 bp, Homo sapien
catagtagcagcaggcgttgtatag

SEQ ID NO: 2270199 - DNA, 25 bp, Homo sapien
ttgtatagtgtattggtccataacc

SEQ ID NO: 2270200 - DNA, 25 bp, Homo sapien
gtattggtccataaccatttgttga

SEQ ID NO: 2270201 - DNA, 25 bp, Homo sapien
aggcgttgtatagtgtattggtcca

SEQ ID NO: 2270202 - DNA, 25 bp, Homo sapien
ttcacatataagcctttcagtggtc

SEQ ID NO: 2270203 - DNA, 25 bp, Homo sapien
tttgggtttgatcatttcacatata

SEQ ID NO: 2270204 - DNA, 25 bp, Homo sapien
tcacatataagcctttcagtggtca

SEQ ID NO: 2270205 - DNA, 25 bp, Homo sapien
tttcacatataagcctttcagtggt

SEQ ID NO: 2270206 - DNA, 25 bp, Homo sapien
tgtactctgaatcttgagcaagaag

SEQ ID NO: 2270207 - DNA, 25 bp, Homo sapien
gaatgctcaggccttaatccagaaa

SEQ ID NO: 2270208 - DNA, 25 bp, Homo sapien
gagattgggcttgatgtgtgtactc

SEQ ID NO: 2270209 - DNA, 25 bp, Homo sapien
aagaagatgggcctcattggagccc

SEQ ID NO: 2270210 - DNA, 25 bp, Homo sapien
agatttttttgtcctgtcaatttct

SEQ ID NO: 2270211 - DNA, 25 bp, Homo sapien
gcagatttttttgtcctgtcaattt

SEQ ID NO: 2270212 - DNA, 25 bp, Homo sapien
tttttgtcctgtcaatttcttgcat

SEQ ID NO: 2270213 - DNA, 25 bp, Homo sapien
atttttttgtcctgtcaatttcttg

SEQ ID NO: 2270214 - DNA, 25 bp, Homo sapien
gtcctacatttgtcactcttattaa

SEQ ID NO: 2270215 - DNA, 25 bp, Homo sapien
catttgtcactcttattaatggaga

SEQ ID NO: 2270216 - DNA, 25 bp, Homo sapien
cttattaatggagacttctccagga

SEQ ID NO: 2270217 - DNA, 25 bp, Homo sapien
cactcttattaatggagacttctcc

SEQ ID NO: 2270218 - DNA, 25 bp, Homo sapien
cagcagccttgtaatctgttgacag

SEQ ID NO: 2270219 - DNA, 25 bp, Homo sapien
tgcccctggtttccataaggtccac

SEQ ID NO: 2270220 - DNA, 25 bp, Homo sapien
aggtccacacccagcatttggagga

SEQ ID NO: 2270221 - DNA, 25 bp, Homo sapien
ggtccacacccagcatttggaggat

SEQ ID NO: 2270222 - DNA, 25 bp, Homo sapien
ctacatgtggttttgcccttttggt

SEQ ID NO: 2270223 - DNA, 25 bp, Homo sapien
ccgtgccctacttttatcaaatgcc

SEQ ID NO: 2270224 - DNA, 25 bp, Homo sapien
cgtgccctacttttatcaaatgccc

SEQ ID NO: 2270225 - DNA, 25 bp, Homo sapien
gtgccctacttttatcaaatgcccc

SEQ ID NO: 2270226 - DNA, 25 bp, Homo sapien
tgcatgactgatggtcacactgcgc

SEQ ID NO: 2270227 - DNA, 25 bp, Homo sapien
gcatgactgatggtcacactgcgcc

SEQ ID NO: 2270228 - DNA, 25 bp, Homo sapien
catgactgatggtcacactgcgcct

SEQ ID NO: 2270229 - DNA, 25 bp, Homo sapien
tgactgatggtcacactgcgcctgg

SEQ ID NO: 2270230 - DNA, 25 bp, Homo sapien
tctcacattgcgctccttgatattg

SEQ ID NO: 2270231 - DNA, 25 bp, Homo sapien
gctccttgatattgacagatccatc

SEQ ID NO: 2270232 - DNA, 25 bp, Homo sapien
cattgcgctccttgatattgacaga

SEQ ID NO: 2270233 - DNA, 25 bp, Homo sapien
tctttctcacattgcgctccttgat

SEQ ID NO: 2270234 - DNA, 25 bp, Homo sapien
ggactgtctgcttcaaattcattcc

SEQ ID NO: 2270235 - DNA, 25 bp, Homo sapien
tctgcttcaaattcattccgctctg

SEQ ID NO: 2270236 - DNA, 25 bp, Homo sapien
ttcaaattcattccgctctgtctct

SEQ ID NO: 2270237 - DNA, 25 bp, Homo sapien
tgtctgcttcaaattcattccgctc

SEQ ID NO: 2270238 - DNA, 25 bp, Homo sapien
tcgaatggataagaattgaacacat

SEQ ID NO: 2270239 - DNA, 25 bp, Homo sapien
gaatggataagaattgaacacatac

SEQ ID NO: 2270240 - DNA, 25 bp, Homo sapien
aagcactcagcaatcgaatggataa

SEQ ID NO: 2270241 - DNA, 25 bp, Homo sapien
cagcaatcgaatggataagaattga

SEQ ID NO: 2270242 - DNA, 25 bp, Homo sapien
ggtgatatgagtctcttcttctgtc

SEQ ID NO: 2270243 - DNA, 25 bp, Homo sapien
ggtcctttcaacaggatacattgtg

SEQ ID NO: 2270244 - DNA, 25 bp, Homo sapien
caatgggcattgtgccatattcctg

SEQ ID NO: 2270245 - DNA, 25 bp, Homo sapien
ggtttgtcatttaggtgatatgagt

SEQ ID NO: 2270246 - DNA, 25 bp, Homo sapien
cacatgaagcactgtgacataaggg

SEQ ID NO: 2270247 - DNA, 25 bp, Homo sapien
gaactcagaaccagatgatgtggca

SEQ ID NO: 2270248 - DNA, 25 bp, Homo sapien
gacttgtgaatatctcagaactcag

SEQ ID NO: 2270249 - DNA, 25 bp, Homo sapien
ggaacgggctcctaggtgatgtaac

SEQ ID NO: 2270250 - DNA, 25 bp, Homo sapien
gatagtgacatcttcctaggccagt

SEQ ID NO: 2270251 - DNA, 25 bp, Homo sapien
tgattgtactattttgccagggcca

SEQ ID NO: 2270252 - DNA, 25 bp, Homo sapien
aaaatgggccctgcacacatggcag

SEQ ID NO: 2270253 - DNA, 25 bp, Homo sapien
gaaggcattttgacatagcacaggg

SEQ ID NO: 2270254 - DNA, 25 bp, Homo sapien
ggcaactctcctacatgaaaacaag

SEQ ID NO: 2270255 - DNA, 25 bp, Homo sapien
tgcacacttggctgacagtaaggac

SEQ ID NO: 2270256 - DNA, 25 bp, Homo sapien
tgggctctgccctcagtaagaattg

SEQ ID NO: 2270257 - DNA, 25 bp, Homo sapien
gacatcactggatctagaatgcaag

SEQ ID NO: 2270258 - DNA, 25 bp, Homo sapien
aaatcagagaactggcttggctgtt

SEQ ID NO: 2270259 - DNA, 25 bp, Homo sapien
tggtacacagcccaaatcagagaac

SEQ ID NO: 2270260 - DNA, 25 bp, Homo sapien
gtgggcctgttaattccttggtaca

SEQ ID NO: 2270261 - DNA, 25 bp, Homo sapien
accaaagagttcagcaccgtggcca

SEQ ID NO: 2270262 - DNA, 25 bp, Homo sapien
cagaggtgttggcatgagtgatccc

SEQ ID NO: 2270263 - DNA, 25 bp, Homo sapien
tccctgtgggggagaaccctctcag

SEQ ID NO: 2270264 - DNA, 25 bp, Homo sapien
aatcccccagcattttgaagcacag

SEQ ID NO: 2270265 - DNA, 25 bp, Homo sapien
caggctatacctggagctgtagggt

SEQ ID NO: 2270266 - DNA, 25 bp, Homo sapien
ctccagaatgtcacggtctaatgaa

SEQ ID NO: 2270267 - DNA, 25 bp, Homo sapien
cagaatgtcacggtctaatgaaaat

SEQ ID NO: 2270268 - DNA, 25 bp, Homo sapien
gtctaatgaaaatctggagaaggtc

SEQ ID NO: 2270269 - DNA, 25 bp, Homo sapien
ctaatgaaaatctggagaaggtcac

SEQ ID NO: 2270270 - DNA, 25 bp, Homo sapien
gatttgggcctccttaatccactgg

SEQ ID NO: 2270271 - DNA, 25 bp, Homo sapien
ttcactggcacctgtacgcttcaga

SEQ ID NO: 2270272 - DNA, 25 bp, Homo sapien
actggcctgtgaaacgcaactggaa

SEQ ID NO: 2270273 - DNA, 25 bp, Homo sapien
catgagtgtaggcacaaaagcaacc

SEQ ID NO: 2270274 - DNA, 25 bp, Homo sapien
ttgccaggccaatctgctgcgacca

SEQ ID NO: 2270275 - DNA, 25 bp, Homo sapien
aaagcttgccaggccaatctgctgc

SEQ ID NO: 2270276 - DNA, 25 bp, Homo sapien
tgccaggccaatctgctgcgaccat

SEQ ID NO: 2270277 - DNA, 25 bp, Homo sapien
agcttgccaggccaatctgctgcga

SEQ ID NO: 2270278 - DNA, 25 bp, Homo sapien
cttggactttcggaatgatctctac

SEQ ID NO: 2270279 - DNA, 25 bp, Homo sapien
ttggactttcggaatgatctctacc

SEQ ID NO: 2270280 - DNA, 25 bp, Homo sapien
tcatccaaggctctcgtgcaggtgg

SEQ ID NO: 2270281 - DNA, 25 bp, Homo sapien
gaacattagacctttactcctcatc

SEQ ID NO: 2270282 - DNA, 25 bp, Homo sapien
cctgactcattgagtgaaagtctct

SEQ ID NO: 2270283 - DNA, 25 bp, Homo sapien
aggaattattccctgactcattgag

SEQ ID NO: 2270284 - DNA, 25 bp, Homo sapien
gctgtcgccttttggtaggaattat

SEQ ID NO: 2270285 - DNA, 25 bp, Homo sapien
tccattttgcaagggcaagtgttcc

SEQ ID NO: 2270286 - DNA, 25 bp, Homo sapien
atgatccagaaatcctacagtgaag

SEQ ID NO: 2270287 - DNA, 25 bp, Homo sapien
agggacccaaaggtcacgccaggag

SEQ ID NO: 2270288 - DNA, 25 bp, Homo sapien
tactttgggacttataagtggcacc

SEQ ID NO: 2270289 - DNA, 25 bp, Homo sapien
gctctgtagatcagccagcagtgca

SEQ ID NO: 2270290 - DNA, 25 bp, Homo sapien
ctgctctgtagatcagccagcagtg

SEQ ID NO: 2270291 - DNA, 25 bp, Homo sapien
gcttggtaaaactgcaatcaaagct

SEQ ID NO: 2270292 - DNA, 25 bp, Homo sapien
ttggtaaaactgcaatcaaagctgc

SEQ ID NO: 2270293 - DNA, 25 bp, Homo sapien
tttaagcagtgaaagctgacctgca

SEQ ID NO: 2270294 - DNA, 25 bp, Homo sapien
tagggtgctgtacgtggtttaagca

SEQ ID NO: 2270295 - DNA, 25 bp, Homo sapien
gtttgagtagggtgctgtacgtggt

SEQ ID NO: 2270296 - DNA, 25 bp, Homo sapien
tacgtggtttaagcagtgaaagctg

SEQ ID NO: 2270297 - DNA, 25 bp, Homo sapien
gcctacttgtggaagatcataaagc

SEQ ID NO: 2270298 - DNA, 25 bp, Homo sapien
cctacttgtggaagatcataaagca

SEQ ID NO: 2270299 - DNA, 25 bp, Homo sapien
ctacttgtggaagatcataaagcac

SEQ ID NO: 2270300 - DNA, 25 bp, Homo sapien
gaccaccagcgagtatgttaccggc

SEQ ID NO: 2270301 - DNA, 25 bp, Homo sapien
gatgccctggtagatagcctcgtcc

SEQ ID NO: 2270302 - DNA, 25 bp, Homo sapien
tcacctgccgcttcatatcagcctt

SEQ ID NO: 2270303 - DNA, 25 bp, Homo sapien
aaagattccacctcagccgcgggca

SEQ ID NO: 2270304 - DNA, 25 bp, Homo sapien
ctttgactgtcggacatgtccgaca

SEQ ID NO: 2270305 - DNA, 25 bp, Homo sapien
caaattgtgggagatagtgctgagg

SEQ ID NO: 2270306 - DNA, 25 bp, Homo sapien
tgtccgacatgtgggcaaattgtgg

SEQ ID NO: 2270307 - DNA, 25 bp, Homo sapien
atagtgctgaggctccattgttctc

SEQ ID NO: 2270308 - DNA, 25 bp, Homo sapien
tactgaaattcacgtttattttctg

SEQ ID NO: 2270309 - DNA, 25 bp, Homo sapien
cataggacctgagggcggagctacc

SEQ ID NO: 2270310 - DNA, 25 bp, Homo sapien
ctggaagctggatgcataggacctg

SEQ ID NO: 2270311 - DNA, 25 bp, Homo sapien
tctctcggcaagaataaaaagcgaa

SEQ ID NO: 2270312 - DNA, 25 bp, Homo sapien
cagctccaagggtctttcatgcagt

SEQ ID NO: 2270313 - DNA, 25 bp, Homo sapien
acaccaaccgccctcgaaatgattg

SEQ ID NO: 2270314 - DNA, 25 bp, Homo sapien
ctcgaaatgattggcccacctccag

SEQ ID NO: 2270315 - DNA, 25 bp, Homo sapien
gggctttcccggcacagtttctggc

SEQ ID NO: 2270316 - DNA, 25 bp, Homo sapien
tgagtcagtggcttgccacactcag

SEQ ID NO: 2270317 - DNA, 25 bp, Homo sapien
tggtgagtcagtggcttgccacact

SEQ ID NO: 2270318 - DNA, 25 bp, Homo sapien
tgttggtgagtcagtggcttgccac

SEQ ID NO: 2270319 - DNA, 25 bp, Homo sapien
gttggtgagtcagtggcttgccaca

SEQ ID NO: 2270320 - DNA, 25 bp, Homo sapien
gccggtgctgcgagtgcgagagcct

SEQ ID NO: 2270321 - DNA, 25 bp, Homo sapien
tcccttcagggttaggtgcacacag

SEQ ID NO: 2270322 - DNA, 25 bp, Homo sapien
cctagcaggtactgcggccggtgct

SEQ ID NO: 2270323 - DNA, 25 bp, Homo sapien
catagggcccggattcccttcaggg

SEQ ID NO: 2270324 - DNA, 25 bp, Homo sapien
tgtcacccatagactctgcgggcct

SEQ ID NO: 2270325 - DNA, 25 bp, Homo sapien
gctgagaatcacgtctcacacctac

SEQ ID NO: 2270326 - DNA, 25 bp, Homo sapien
ctaacgcccctgtcacccatagact

SEQ ID NO: 2270327 - DNA, 25 bp, Homo sapien
cagctgagaatcacgtctcacacct

SEQ ID NO: 2270328 - DNA, 25 bp, Homo sapien
tgctggggcataatgggaccaggac

SEQ ID NO: 2270329 - DNA, 25 bp, Homo sapien
ctccagcgagttcgttgcgtgctgg

SEQ ID NO: 2270330 - DNA, 25 bp, Homo sapien
tgcgtgctggggcataatgggacca

SEQ ID NO: 2270331 - DNA, 25 bp, Homo sapien
cgtgctggggcataatgggaccagg

SEQ ID NO: 2270332 - DNA, 25 bp, Homo sapien
cttgactcctggctgacccacagtg

SEQ ID NO: 2270333 - DNA, 25 bp, Homo sapien
agtgcctatgacctggctccccaaa

SEQ ID NO: 2270334 - DNA, 25 bp, Homo sapien
acatccaggagctagaggctcaccc

SEQ ID NO: 2270335 - DNA, 25 bp, Homo sapien
ccacatccaggagctagaggctcac

SEQ ID NO: 2270336 - DNA, 25 bp, Homo sapien
tgtgaggcggctgcttcctcagggt

SEQ ID NO: 2270337 - DNA, 25 bp, Homo sapien
tcatctccctgaagggtaggcgtgt

SEQ ID NO: 2270338 - DNA, 25 bp, Homo sapien
tctccctgaagggtaggcgtgtcca

SEQ ID NO: 2270339 - DNA, 25 bp, Homo sapien
ccctgaagggtaggcgtgtccacca

SEQ ID NO: 2270340 - DNA, 25 bp, Homo sapien
caccacttagtggtcctctgtctct

SEQ ID NO: 2270341 - DNA, 25 bp, Homo sapien
cctctgtctctgcctggcatggggg

SEQ ID NO: 2270342 - DNA, 25 bp, Homo sapien
ctgtctctgcctggcatgggggcac

SEQ ID NO: 2270343 - DNA, 25 bp, Homo sapien
accacttagtggtcctctgtctctg

SEQ ID NO: 2270344 - DNA, 25 bp, Homo sapien
gtggaagtaaagattgtgacaaaag

SEQ ID NO: 2270345 - DNA, 25 bp, Homo sapien
tgaggatgccaaggcaatactcctg

SEQ ID NO: 2270346 - DNA, 25 bp, Homo sapien
attgtggaagtaaagattgtgacaa

SEQ ID NO: 2270347 - DNA, 25 bp, Homo sapien
gaagtaaagattgtgacaaaaggaa

SEQ ID NO: 2270348 - DNA, 25 bp, Homo sapien
ctcacttcagcaatccttccagaac

SEQ ID NO: 2270349 - DNA, 25 bp, Homo sapien
aggaggtatactgcctgtggctgga

SEQ ID NO: 2270350 - DNA, 25 bp, Homo sapien
ctgtggctggaggattgaccttcat

SEQ ID NO: 2270351 - DNA, 25 bp, Homo sapien
tcacttcagcaatccttccagaacc

SEQ ID NO: 2270352 - DNA, 25 bp, Homo sapien
tatattaactaggtgctgggctcag

SEQ ID NO: 2270353 - DNA, 25 bp, Homo sapien
caaaatctaacgtgaggtgaagcca

SEQ ID NO: 2270354 - DNA, 25 bp, Homo sapien
caatgtcccaaataagcaaggctca

SEQ ID NO: 2270355 - DNA, 25 bp, Homo sapien
tcctggttcctgagatgcgttacaa

SEQ ID NO: 2270356 - DNA, 25 bp, Homo sapien
aacaggttttgccatgggttgttga

SEQ ID NO: 2270357 - DNA, 25 bp, Homo sapien
tacattcagtaaagattgagcacaa

SEQ ID NO: 2270358 - DNA, 25 bp, Homo sapien
tttattacatcaacaggttttgcca

SEQ ID NO: 2270359 - DNA, 25 bp, Homo sapien
taatatccgagaacaacctaaagtc

SEQ ID NO: 2270360 - DNA, 25 bp, Homo sapien
cagcaatatttgagatcttttcaaa

SEQ ID NO: 2270361 - DNA, 25 bp, Homo sapien
ctgatttctctctttttagtaaggg

SEQ ID NO: 2270362 - DNA, 25 bp, Homo sapien
agggttgaggagcagttacaggttt

SEQ ID NO: 2270363 - DNA, 25 bp, Homo sapien
atgcctaaggtttgtctccagtctg

SEQ ID NO: 2270364 - DNA, 25 bp, Homo sapien
ggagcagttacaggttttgccacat

SEQ ID NO: 2270365 - DNA, 25 bp, Homo sapien
ttatcttaggcttagcaagttctga

SEQ ID NO: 2270366 - DNA, 25 bp, Homo sapien
gaattatcttaggcttagcaagttc

SEQ ID NO: 2270367 - DNA, 25 bp, Homo sapien
gtaacatttccccacagtatgaact

SEQ ID NO: 2270368 - DNA, 25 bp, Homo sapien
cacatttgtaacatttccccacagt

SEQ ID NO: 2270369 - DNA, 25 bp, Homo sapien
ttatcttatctttagtaatgtctga

SEQ ID NO: 2270370 - DNA, 25 bp, Homo sapien
ttatctttagtaatgtctgagaact

SEQ ID NO: 2270371 - DNA, 25 bp, Homo sapien
atctttagtaatgtctgagaactac

SEQ ID NO: 2270372 - DNA, 25 bp, Homo sapien
atcttatctttagtaatgtctgaga

SEQ ID NO: 2270373 - DNA, 25 bp, Homo sapien
ttatattcaatatatttgtagggtt

SEQ ID NO: 2270374 - DNA, 25 bp, Homo sapien
ctgagagccacataaaagctttttt

SEQ ID NO: 2270375 - DNA, 25 bp, Homo sapien
taaaagcttttttatattcaatata

SEQ ID NO: 2270376 - DNA, 25 bp, Homo sapien
cacataaaagcttttttatattcaa

SEQ ID NO: 2270377 - DNA, 25 bp, Homo sapien
ctttccggtattaattctcttgtgt

SEQ ID NO: 2270378 - DNA, 25 bp, Homo sapien
aatgattagtaacatctgagaaaca

SEQ ID NO: 2270379 - DNA, 25 bp, Homo sapien
gagaagcaggtaaaagctgtcccac

SEQ ID NO: 2270380 - DNA, 25 bp, Homo sapien
ctaatgattagtaacatctgagaaa

SEQ ID NO: 2270381 - DNA, 25 bp, Homo sapien
gaagcaggtaaaagctgtcccacat

SEQ ID NO: 2270382 - DNA, 25 bp, Homo sapien
gacttttccacacttataacatttg

SEQ ID NO: 2270383 - DNA, 25 bp, Homo sapien
taacagtcattacctttatgatgca

SEQ ID NO: 2270384 - DNA, 25 bp, Homo sapien
ttctaaagaggtgtgagaacaagct

SEQ ID NO: 2270385 - DNA, 25 bp, Homo sapien
gaacaccatatgagaacttgttaaa

SEQ ID NO: 2270386 - DNA, 25 bp, Homo sapien
gggattgtctagacccatctagaca

SEQ ID NO: 2270387 - DNA, 25 bp, Homo sapien
tatgggattgtctagacccatctag

SEQ ID NO: 2270388 - DNA, 25 bp, Homo sapien
tgtttatgggattgtctagacccat

SEQ ID NO: 2270389 - DNA, 25 bp, Homo sapien
tttatgggattgtctagacccatct

SEQ ID NO: 2270390 - DNA, 25 bp, Homo sapien
gttccattagcttgggttaatcgta

SEQ ID NO: 2270391 - DNA, 25 bp, Homo sapien
agtgttccattagcttgggttaatc

SEQ ID NO: 2270392 - DNA, 25 bp, Homo sapien
cattagcttgggttaatcgtatggc

SEQ ID NO: 2270393 - DNA, 25 bp, Homo sapien
ccattagcttgggttaatcgtatgg

SEQ ID NO: 2270394 - DNA, 25 bp, Homo sapien
tttataagtgcatggagaattttca

SEQ ID NO: 2270395 - DNA, 25 bp, Homo sapien
cctttataagtgcatggagaatttt

SEQ ID NO: 2270396 - DNA, 25 bp, Homo sapien
tggagctcctttataagtgcatgga

SEQ ID NO: 2270397 - DNA, 25 bp, Homo sapien
gctcctttataagtgcatggagaat

SEQ ID NO: 2270398 - DNA, 25 bp, Homo sapien
tatgaaactgccaggttctgccatc

SEQ ID NO: 2270399 - DNA, 25 bp, Homo sapien
taagttttatgaaactgccaggttc

SEQ ID NO: 2270400 - DNA, 25 bp, Homo sapien
tttatgaaactgccaggttctgcca

SEQ ID NO: 2270401 - DNA, 25 bp, Homo sapien
gttttatgaaactgccaggttctgc

SEQ ID NO: 2270402 - DNA, 25 bp, Homo sapien
ttaacacctattgtttactctgtca

SEQ ID NO: 2270403 - DNA, 25 bp, Homo sapien
tctgtcaaagtaattattttgtcag

SEQ ID NO: 2270404 - DNA, 25 bp, Homo sapien
ctgtcaaagtaattattttgtcaga

SEQ ID NO: 2270405 - DNA, 25 bp, Homo sapien
tagagataagaggattttaacacct

SEQ ID NO: 2270406 - DNA, 25 bp, Homo sapien
catttttagtgtatgggcctgatag

SEQ ID NO: 2270407 - DNA, 25 bp, Homo sapien
ccaacatttttagtgtatgggcctg

SEQ ID NO: 2270408 - DNA, 25 bp, Homo sapien
tactttgggaaggatataaccaaca

SEQ ID NO: 2270409 - DNA, 25 bp, Homo sapien
tataaccaacatttttagtgtatgg

SEQ ID NO: 2270410 - DNA, 25 bp, Homo sapien
tctggacaatgcaccacctgaaaac

SEQ ID NO: 2270411 - DNA, 25 bp, Homo sapien
atctggacaatgcaccacctgaaaa

SEQ ID NO: 2270412 - DNA, 25 bp, Homo sapien
aatctggacaatgcaccacctgaaa

SEQ ID NO: 2270413 - DNA, 25 bp, Homo sapien
ttctagcaggaagcattgtaacata

SEQ ID NO: 2270414 - DNA, 25 bp, Homo sapien
tctagcaggaagcattgtaacatat

SEQ ID NO: 2270415 - DNA, 25 bp, Homo sapien
ctcagctcagaacctaaggtgatat

SEQ ID NO: 2270416 - DNA, 25 bp, Homo sapien
tcttctagcaggaagcattgtaaca

SEQ ID NO: 2270417 - DNA, 25 bp, Homo sapien
tgagatgtcacaatccatctgtggg

SEQ ID NO: 2270418 - DNA, 25 bp, Homo sapien
ggcaggaccctggaagaagaatcat

SEQ ID NO: 2270419 - DNA, 25 bp, Homo sapien
tgtcacaatccatctgtgggcagga

SEQ ID NO: 2270420 - DNA, 25 bp, Homo sapien
agaagaatcatatcatctggatgct

SEQ ID NO: 2270421 - DNA, 25 bp, Homo sapien
cacgggtttgctgaatcgaggttca

SEQ ID NO: 2270422 - DNA, 25 bp, Homo sapien
gcagtcacaatctcaacaatgggca

SEQ ID NO: 2270423 - DNA, 25 bp, Homo sapien
cattaatagagtcgaagcaccacgg

SEQ ID NO: 2270424 - DNA, 25 bp, Homo sapien
gtcacacacaagtactggcttaggg

SEQ ID NO: 2270425 - DNA, 25 bp, Homo sapien
tactgatgttataaaagatccactg

SEQ ID NO: 2270426 - DNA, 25 bp, Homo sapien
gctgatatcagtcggtaccatttgt

SEQ ID NO: 2270427 - DNA, 25 bp, Homo sapien
tagtttcatgaagcattctctatgg

SEQ ID NO: 2270428 - DNA, 25 bp, Homo sapien
tgcttgagtagaatcatgttattgg

SEQ ID NO: 2270429 - DNA, 25 bp, Homo sapien
aaatcaggagtttgcgaggatggcc

SEQ ID NO: 2270430 - DNA, 25 bp, Homo sapien
ggcataaaagtcctcaaatcaggag

SEQ ID NO: 2270431 - DNA, 25 bp, Homo sapien
tttggctccgggcataaaagtcctc

SEQ ID NO: 2270432 - DNA, 25 bp, Homo sapien
ttgcacatttgagtactcccaccta

SEQ ID NO: 2270433 - DNA, 25 bp, Homo sapien
taggccgatcacgaacatggaagtc

SEQ ID NO: 2270434 - DNA, 25 bp, Homo sapien
ctaggccgatcacgaacatggaagt

SEQ ID NO: 2270435 - DNA, 25 bp, Homo sapien
ggccgatcacgaacatggaagtcag

SEQ ID NO: 2270436 - DNA, 25 bp, Homo sapien
aggccgatcacgaacatggaagtca

SEQ ID NO: 2270437 - DNA, 25 bp, Homo sapien
catgagggtcgttctccgtgaactg

SEQ ID NO: 2270438 - DNA, 25 bp, Homo sapien
attcccatgagggtcgttctccgtg

SEQ ID NO: 2270439 - DNA, 25 bp, Homo sapien
aagttgttgagccagacgtgggaaa

SEQ ID NO: 2270440 - DNA, 25 bp, Homo sapien
gttgttgagccagacgtgggaaaca

SEQ ID NO: 2270441 - DNA, 25 bp, Homo sapien
tactcccacctgaacaatagaccat

SEQ ID NO: 2270442 - DNA, 25 bp, Homo sapien
gagtactcccacctgaacaatagac

SEQ ID NO: 2270443 - DNA, 25 bp, Homo sapien
ggagtactcccacctgaacaataga

SEQ ID NO: 2270444 - DNA, 25 bp, Homo sapien
ttggagtactcccacctgaacaata

SEQ ID NO: 2270445 - DNA, 25 bp, Homo sapien
catcaatacattccacttccgtttg

SEQ ID NO: 2270446 - DNA, 25 bp, Homo sapien
aatacattccacttccgtttggctc

SEQ ID NO: 2270447 - DNA, 25 bp, Homo sapien
gtttgataggatagccccaatttcc

SEQ ID NO: 2270448 - DNA, 25 bp, Homo sapien
caaatagggagtttgataggatagc

SEQ ID NO: 2270449 - DNA, 25 bp, Homo sapien
ctctgaaatccctggctgctaaata

SEQ ID NO: 2270450 - DNA, 25 bp, Homo sapien
ggtgagaggcagtctcatccagaaa

SEQ ID NO: 2270451 - DNA, 25 bp, Homo sapien
tggtgagaggcagtctcatccagaa

SEQ ID NO: 2270452 - DNA, 25 bp, Homo sapien
tgactcccttcatccagggccttgc

SEQ ID NO: 2270453 - DNA, 25 bp, Homo sapien
ccttcatccagggccttgcaggggc

SEQ ID NO: 2270454 - DNA, 25 bp, Homo sapien
gactcccttcatccagggccttgca

SEQ ID NO: 2270455 - DNA, 25 bp, Homo sapien
tcatccagggccttgcaggggcttt

SEQ ID NO: 2270456 - DNA, 25 bp, Homo sapien
tatagtccggtgtgttgttgtggtt

SEQ ID NO: 2270457 - DNA, 25 bp, Homo sapien
gaatatagtccggtgtgttgttgtg

SEQ ID NO: 2270458 - DNA, 25 bp, Homo sapien
ctgaaagagactgtgcgcaagaatt

SEQ ID NO: 2270459 - DNA, 25 bp, Homo sapien
gactgtgcgcaagaattaggtccca

SEQ ID NO: 2270460 - DNA, 25 bp, Homo sapien
gcagcaggactactactacctcttt

SEQ ID NO: 2270461 - DNA, 25 bp, Homo sapien
tgcagcaggactactactacctctt

SEQ ID NO: 2270462 - DNA, 25 bp, Homo sapien
cagcaggactactactacctctttc

SEQ ID NO: 2270463 - DNA, 25 bp, Homo sapien
caggactactactacctctttctgg

SEQ ID NO: 2270464 - DNA, 25 bp, Homo sapien
caacctttaggcaagcctgaggcat

SEQ ID NO: 2270465 - DNA, 25 bp, Homo sapien
acaacctttaggcaagcctgaggca

SEQ ID NO: 2270466 - DNA, 25 bp, Homo sapien
cacaacctttaggcaagcctgaggc

SEQ ID NO: 2270467 - DNA, 25 bp, Homo sapien
cccatgaggatcgttctaagtgaag

SEQ ID NO: 2270468 - DNA, 25 bp, Homo sapien
tggattcccatgaggatcgttctaa

SEQ ID NO: 2270469 - DNA, 25 bp, Homo sapien
gttttgtgttgaagtcgttaagcca

SEQ ID NO: 2270470 - DNA, 25 bp, Homo sapien
tgttgaagtcgttaagccagaatga

SEQ ID NO: 2270471 - DNA, 25 bp, Homo sapien
aggtcgatgagccaatcccaggaaa

SEQ ID NO: 2270472 - DNA, 25 bp, Homo sapien
aaacactaggccgatgagaaacaag

SEQ ID NO: 2270473 - DNA, 25 bp, Homo sapien
agtgtataggccacatcccactcag

SEQ ID NO: 2270474 - DNA, 25 bp, Homo sapien
gtcagtaaaagtagaggcaagtgta

SEQ ID NO: 2270475 - DNA, 25 bp, Homo sapien
atggattcccactggggtcgttctc

SEQ ID NO: 2270476 - DNA, 25 bp, Homo sapien
aggtgtcagtgaaaggtggtgggct

SEQ ID NO: 2270477 - DNA, 25 bp, Homo sapien
tgaaaggtggtgggctcttgacctc

SEQ ID NO: 2270478 - DNA, 25 bp, Homo sapien
tcagtgaaaggtggtgggctcttga

SEQ ID NO: 2270479 - DNA, 25 bp, Homo sapien
aggaggcaggtgtcagtgaaaggtg

SEQ ID NO: 2270480 - DNA, 25 bp, Homo sapien
gtgtacagaaatcaagtcccatggg

SEQ ID NO: 2270481 - DNA, 25 bp, Homo sapien
cctttcgagacagtgaggtgatcac

SEQ ID NO: 2270482 - DNA, 25 bp, Homo sapien
tgtctccgttgtagggtccctctgg

SEQ ID NO: 2270483 - DNA, 25 bp, Homo sapien
agtttgtgctgtctccgttgtaggg

SEQ ID NO: 2270484 - DNA, 25 bp, Homo sapien
tcactgcctccctttatcctggata

SEQ ID NO: 2270485 - DNA, 25 bp, Homo sapien
gtgtctgcaaaagacgaccaggccc

SEQ ID NO: 2270486 - DNA, 25 bp, Homo sapien
ctgcctccctttatcctggatatct

SEQ ID NO: 2270487 - DNA, 25 bp, Homo sapien
caaaagacgaccaggcccttgactt

SEQ ID NO: 2270488 - DNA, 25 bp, Homo sapien
tggagttccatgggtatcggaatat

SEQ ID NO: 2270489 - DNA, 25 bp, Homo sapien
ggagttccatgggtatcggaatata

SEQ ID NO: 2270490 - DNA, 25 bp, Homo sapien
gagttccatgggtatcggaatatag

SEQ ID NO: 2270491 - DNA, 25 bp, Homo sapien
atggagttccatgggtatcggaata

SEQ ID NO: 2270492 - DNA, 25 bp, Homo sapien
catttgggccgtcttcgtagtcggg

SEQ ID NO: 2270493 - DNA, 25 bp, Homo sapien
catttccagactttgaggtggtctc

SEQ ID NO: 2270494 - DNA, 25 bp, Homo sapien
cccatttgggccgtcttcgtagtcg

SEQ ID NO: 2270495 - DNA, 25 bp, Homo sapien
tgttctgcctccatacctgaaagag

SEQ ID NO: 2270496 - DNA, 25 bp, Homo sapien
gctacactgataggtcaccaaaaag

SEQ ID NO: 2270497 - DNA, 25 bp, Homo sapien
tcagccaacctccaaattaactgca

SEQ ID NO: 2270498 - DNA, 25 bp, Homo sapien
tgcaaatccatgatccagagaaaaa

SEQ ID NO: 2270499 - DNA, 25 bp, Homo sapien
aaataataaacacagagctccacag

SEQ ID NO: 2270500 - DNA, 25 bp, Homo sapien
tctactaagatcatggaactatgcc

SEQ ID NO: 2270501 - DNA, 25 bp, Homo sapien
tcatggaactatgccgtgatcccac

SEQ ID NO: 2270502 - DNA, 25 bp, Homo sapien
tgtctgccctctactaagatcatgg

SEQ ID NO: 2270503 - DNA, 25 bp, Homo sapien
ggaactatgccgtgatcccacagag

SEQ ID NO: 2270504 - DNA, 25 bp, Homo sapien
ggcaagaggctgttccatccagcag

SEQ ID NO: 2270505 - DNA, 25 bp, Homo sapien
tcatcttacaggaataatgcagccc

SEQ ID NO: 2270506 - DNA, 25 bp, Homo sapien
ccctggcagccaaataatctgtggc

SEQ ID NO: 2270507 - DNA, 25 bp, Homo sapien
ccctcctaatgagaagacttgcaga

SEQ ID NO: 2270508 - DNA, 25 bp, Homo sapien
gcgttgttgagcattccttaggaga

SEQ ID NO: 2270509 - DNA, 25 bp, Homo sapien
taccagaatcgggtcccatggagat

SEQ ID NO: 2270510 - DNA, 25 bp, Homo sapien
tttcaagacagtgaggtgtttccca

SEQ ID NO: 2270511 - DNA, 25 bp, Homo sapien
taccaaaagagactgtgtaccagaa

SEQ ID NO: 2270512 - DNA, 25 bp, Homo sapien
cggtgcccagctgttagaattgtca

SEQ ID NO: 2270513 - DNA, 25 bp, Homo sapien
cattcatgaagcaggctccggtgcc

SEQ ID NO: 2270514 - DNA, 25 bp, Homo sapien
gagactagctgatgagcattcatga

SEQ ID NO: 2270515 - DNA, 25 bp, Homo sapien
gcctggtgccctgagactagctgat

SEQ ID NO: 2270516 - DNA, 25 bp, Homo sapien
ttagggatttcacagtttatttcag

SEQ ID NO: 2270517 - DNA, 25 bp, Homo sapien
atccttagggatttcacagtttatt

SEQ ID NO: 2270518 - DNA, 25 bp, Homo sapien
ggatccttagggatttcacagttta

SEQ ID NO: 2270519 - DNA, 25 bp, Homo sapien
tgtgaatccttttggatccttaggg

SEQ ID NO: 2270520 - DNA, 25 bp, Homo sapien
tcagtttcgagccaagcaggttctc

SEQ ID NO: 2270521 - DNA, 25 bp, Homo sapien
ttcagtttcgagccaagcaggttct

SEQ ID NO: 2270522 - DNA, 25 bp, Homo sapien
gtttcgagccaagcaggttctccac

SEQ ID NO: 2270523 - DNA, 25 bp, Homo sapien
cagtttcgagccaagcaggttctcc

SEQ ID NO: 2270524 - DNA, 25 bp, Homo sapien
ggcaggctgatagttctgacaacca

SEQ ID NO: 2270525 - DNA, 25 bp, Homo sapien
gaagtgtattggtgttgggctccca

SEQ ID NO: 2270526 - DNA, 25 bp, Homo sapien
ttcacagtgggttttacaagcatcc

SEQ ID NO: 2270527 - DNA, 25 bp, Homo sapien
gcagaacccaaaaacggagatggct

SEQ ID NO: 2270528 - DNA, 25 bp, Homo sapien
gctagcgtcacagtgaatgtcatca

SEQ ID NO: 2270529 - DNA, 25 bp, Homo sapien
agcgactgttcctccggcttggcag

SEQ ID NO: 2270530 - DNA, 25 bp, Homo sapien
tctctgtgggattctcggtatagtc

SEQ ID NO: 2270531 - DNA, 25 bp, Homo sapien
cattcatgaagatgtgtcggcagtg

SEQ ID NO: 2270532 - DNA, 25 bp, Homo sapien
ctccactttggacatgcctttgtcg

SEQ ID NO: 2270533 - DNA, 25 bp, Homo sapien
cctggactccaggacaagtaagctc

SEQ ID NO: 2270534 - DNA, 25 bp, Homo sapien
ctaggcttgcaatcaccacagatga

SEQ ID NO: 2270535 - DNA, 25 bp, Homo sapien
cattcaccctcaaaaacaacactgg

SEQ ID NO: 2270536 - DNA, 25 bp, Homo sapien
cagatgacctctgagaaaacttatg

SEQ ID NO: 2270537 - DNA, 25 bp, Homo sapien
tggctgtgctccagattttgaacca

SEQ ID NO: 2270538 - DNA, 25 bp, Homo sapien
aggctggctgtgctccagattttga

SEQ ID NO: 2270539 - DNA, 25 bp, Homo sapien
ttttgaaccattgtcttgttgtggg

SEQ ID NO: 2270540 - DNA, 25 bp, Homo sapien
tgtgctccagattttgaaccattgt

SEQ ID NO: 2270541 - DNA, 25 bp, Homo sapien
gacaaatgggagtgcaacggataga

SEQ ID NO: 2270542 - DNA, 25 bp, Homo sapien
caggtggcagtactccagtgtgcaa

SEQ ID NO: 2270543 - DNA, 25 bp, Homo sapien
tagatgctgggtggtatatggtacc

SEQ ID NO: 2270544 - DNA, 25 bp, Homo sapien
tccatattcctcattgggctagggt

SEQ ID NO: 2270545 - DNA, 25 bp, Homo sapien
cttgggacatagaatgtgagctgca

SEQ ID NO: 2270546 - DNA, 25 bp, Homo sapien
ggtcagttaggggtgaggatacaat

SEQ ID NO: 2270547 - DNA, 25 bp, Homo sapien
aggtcagttaggggtgaggatacaa

SEQ ID NO: 2270548 - DNA, 25 bp, Homo sapien
atgtgagctgcaataaggtcagtta

SEQ ID NO: 2270549 - DNA, 25 bp, Homo sapien
acttcaggtcgtgagggtgcactcc

SEQ ID NO: 2270550 - DNA, 25 bp, Homo sapien
ttcaggtcgtgagggtgcactcctc

SEQ ID NO: 2270551 - DNA, 25 bp, Homo sapien
caggtcgtgagggtgcactcctcca

SEQ ID NO: 2270552 - DNA, 25 bp, Homo sapien
aggtacttcaggtcgtgagggtgca

SEQ ID NO: 2270553 - DNA, 25 bp, Homo sapien
gacactagtagtcctgtctgcaggg

SEQ ID NO: 2270554 - DNA, 25 bp, Homo sapien
tgtcctgtggccaaaccagaaagag

SEQ ID NO: 2270555 - DNA, 25 bp, Homo sapien
caggcacttaacatctctaggagga

SEQ ID NO: 2270556 - DNA, 25 bp, Homo sapien
aattcggtttccacccaagcaggca

SEQ ID NO: 2270557 - DNA, 25 bp, Homo sapien
gagccaagtccctgcgttttggaaa

SEQ ID NO: 2270558 - DNA, 25 bp, Homo sapien
gaaaagaaggatacctccgctgagg

SEQ ID NO: 2270559 - DNA, 25 bp, Homo sapien
aattaatgtccttgttgcccagagc

SEQ ID NO: 2270560 - DNA, 25 bp, Homo sapien
aaatgcgcatgcgattgtcccaggg

SEQ ID NO: 2270561 - DNA, 25 bp, Homo sapien
tccagggagacccaacgacatcaga

SEQ ID NO: 2270562 - DNA, 25 bp, Homo sapien
ggagacccaacgacatcagatcctg

SEQ ID NO: 2270563 - DNA, 25 bp, Homo sapien
gacccaacgacatcagatcctgcct

SEQ ID NO: 2270564 - DNA, 25 bp, Homo sapien
cagggagacccaacgacatcagatc

SEQ ID NO: 2270565 - DNA, 25 bp, Homo sapien
gggcactcctccatcgttttgggat

SEQ ID NO: 2270566 - DNA, 25 bp, Homo sapien
tgagcaggtgcttcatgtcctgaag

SEQ ID NO: 2270567 - DNA, 25 bp, Homo sapien
caggtgcttcatgtcctgaaggggc

SEQ ID NO: 2270568 - DNA, 25 bp, Homo sapien
cttcatgtcctgaaggggcactcct

SEQ ID NO: 2270569 - DNA, 25 bp, Homo sapien
catcagtgatggactctctcctgtc

SEQ ID NO: 2270570 - DNA, 25 bp, Homo sapien
cttgcatcagtgatggactctctcc

SEQ ID NO: 2270571 - DNA, 25 bp, Homo sapien
tggctggcatcacaatgaatatcag

SEQ ID NO: 2270572 - DNA, 25 bp, Homo sapien
ctggcatcacaatgaatatcagcat

SEQ ID NO: 2270573 - DNA, 25 bp, Homo sapien
tgggatgcagggctccttgttcttt

SEQ ID NO: 2270574 - DNA, 25 bp, Homo sapien
cctgtctatgtaggtctccttggga

SEQ ID NO: 2270575 - DNA, 25 bp, Homo sapien
tttggtggcctgtctatgtaggtct

SEQ ID NO: 2270576 - DNA, 25 bp, Homo sapien
gatgcagggctccttgttctttatt

SEQ ID NO: 2270577 - DNA, 25 bp, Homo sapien
gtcagagagttgctaatgttgaatg

SEQ ID NO: 2270578 - DNA, 25 bp, Homo sapien
cttaggttggctctcttgaggtggg

SEQ ID NO: 2270579 - DNA, 25 bp, Homo sapien
acacagccaagggagttgctgggct

SEQ ID NO: 2270580 - DNA, 25 bp, Homo sapien
gtgcattcattgaagtgttgctcaa

SEQ ID NO: 2270581 - DNA, 25 bp, Homo sapien
gggaatctagactatttcatttcat

SEQ ID NO: 2270582 - DNA, 25 bp, Homo sapien
catggccttctcaatttggaggggt

SEQ ID NO: 2270583 - DNA, 25 bp, Homo sapien
ctgggaatctagactatttcatttc

SEQ ID NO: 2270584 - DNA, 25 bp, Homo sapien
gatgcatcttgtgaggcagcacccc

SEQ ID NO: 2270585 - DNA, 25 bp, Homo sapien
gagacaaataatgtgagcagcaata

SEQ ID NO: 2270586 - DNA, 25 bp, Homo sapien
tcttgagacaaataatgtgagcagc

SEQ ID NO: 2270587 - DNA, 25 bp, Homo sapien
gttcccaactgagcaggtgatgcat

SEQ ID NO: 2270588 - DNA, 25 bp, Homo sapien
tgttagtgtcacaatgaatgccact

SEQ ID NO: 2270589 - DNA, 25 bp, Homo sapien
gaggtgtgtcagtggtgaattctcc

SEQ ID NO: 2270590 - DNA, 25 bp, Homo sapien
gagatagagacctccgtagaggtgt

SEQ ID NO: 2270591 - DNA, 25 bp, Homo sapien
gaatgccactcttgcgtagtgaaaa

SEQ ID NO: 2270592 - DNA, 25 bp, Homo sapien
ttctgtgggaatgttgcaaatattg

SEQ ID NO: 2270593 - DNA, 25 bp, Homo sapien
caggtgcttcacatcctcaggaggt

SEQ ID NO: 2270594 - DNA, 25 bp, Homo sapien
attcagttctgagtcaagcaggtgc

SEQ ID NO: 2270595 - DNA, 25 bp, Homo sapien
ctcaggaggtactcctccattgtct

SEQ ID NO: 2270596 - DNA, 25 bp, Homo sapien
ctcaaattcagttctgagtcaagca

SEQ ID NO: 2270597 - DNA, 25 bp, Homo sapien
ggatccatgggtttgatccatgatc

SEQ ID NO: 2270598 - DNA, 25 bp, Homo sapien
tgtgggatccatgggtttgatccat

SEQ ID NO: 2270599 - DNA, 25 bp, Homo sapien
tctgtgggatccatgggtttgatcc

SEQ ID NO: 2270600 - DNA, 25 bp, Homo sapien
tgggatccatgggtttgatccatga

SEQ ID NO: 2270601 - DNA, 25 bp, Homo sapien
gagacaacctcatagtcttcaaatg

SEQ ID NO: 2270602 - DNA, 25 bp, Homo sapien
acagcgtttttcaggagtggagtca

SEQ ID NO: 2270603 - DNA, 25 bp, Homo sapien
agagacaacctcatagtcttcaaat

SEQ ID NO: 2270604 - DNA, 25 bp, Homo sapien
tttcactgacaatagcttctgaggt

SEQ ID NO: 2270605 - DNA, 25 bp, Homo sapien
actgacaatagcttctgaggtctga

SEQ ID NO: 2270606 - DNA, 25 bp, Homo sapien
tagcttctgaggtctgaggtatgat

SEQ ID NO: 2270607 - DNA, 25 bp, Homo sapien
ctgaggtctgaggtatgattctatc

SEQ ID NO: 2270608 - DNA, 25 bp, Homo sapien
agatcagattgggtgagaatacatt

SEQ ID NO: 2270609 - DNA, 25 bp, Homo sapien
gatcagattgggtgagaatacattc

SEQ ID NO: 2270610 - DNA, 25 bp, Homo sapien
atcttgatacatagagtttgagcag

SEQ ID NO: 2270611 - DNA, 25 bp, Homo sapien
tgatacatagagtttgagcagcaat

SEQ ID NO: 2270612 - DNA, 25 bp, Homo sapien
aggcagtacccctccattgtcttgg

SEQ ID NO: 2270613 - DNA, 25 bp, Homo sapien
atttcatccagggacattgagtgtg

SEQ ID NO: 2270614 - DNA, 25 bp, Homo sapien
tcttcatgtcttaaggcagtacccc

SEQ ID NO: 2270615 - DNA, 25 bp, Homo sapien
ggtcccagccgagcagggtcttcat

SEQ ID NO: 2270616 - DNA, 25 bp, Homo sapien
acatccgtggaggtgagtcggtggt

SEQ ID NO: 2270617 - DNA, 25 bp, Homo sapien
tagtgacaagtccaggcggcttggc

SEQ ID NO: 2270618 - DNA, 25 bp, Homo sapien
agtcggtggtgaattctcgcttgtc

SEQ ID NO: 2270619 - DNA, 25 bp, Homo sapien
cttctctgagggatctacgacatac

SEQ ID NO: 2270620 - DNA, 25 bp, Homo sapien
tgctcttgctattgtcatggctcct

SEQ ID NO: 2270621 - DNA, 25 bp, Homo sapien
tgagaggcgagtctgtggtgtgaaa

SEQ ID NO: 2270622 - DNA, 25 bp, Homo sapien
gaaaacactgttccaacttgctctt

SEQ ID NO: 2270623 - DNA, 25 bp, Homo sapien
tgttccaacttgctcttgctattgt

SEQ ID NO: 2270624 - DNA, 25 bp, Homo sapien
ttcacaggcaatccacagtgaccct

SEQ ID NO: 2270625 - DNA, 25 bp, Homo sapien
accctcattggcaatactggacact

SEQ ID NO: 2270626 - DNA, 25 bp, Homo sapien
tggacactgttttcaagcatgtcat

SEQ ID NO: 2270627 - DNA, 25 bp, Homo sapien
acaggcaatccacagtgaccctcat

SEQ ID NO: 2270628 - DNA, 25 bp, Homo sapien
taggggagggcagacatgagacaac

SEQ ID NO: 2270629 - DNA, 25 bp, Homo sapien
ctaggggagggcagacatgagacaa

SEQ ID NO: 2270630 - DNA, 25 bp, Homo sapien
caatgaatgtcatcgttgcctagag

SEQ ID NO: 2270631 - DNA, 25 bp, Homo sapien
gttggtggtgggcttttgtccatct

SEQ ID NO: 2270632 - DNA, 25 bp, Homo sapien
gcctgattctgagctgtgtctagca

SEQ ID NO: 2270633 - DNA, 25 bp, Homo sapien
ttgcctagagacaagtccgttggtc

SEQ ID NO: 2270634 - DNA, 25 bp, Homo sapien
tgacagaagtcctctgcaacactgt

SEQ ID NO: 2270635 - DNA, 25 bp, Homo sapien
cactgtctcaaccttttctgcatgc

SEQ ID NO: 2270636 - DNA, 25 bp, Homo sapien
caggcttgtaatcatgacagaagtc

SEQ ID NO: 2270637 - DNA, 25 bp, Homo sapien
gaccagtttgaggtgtgagaagact

SEQ ID NO: 2270638 - DNA, 25 bp, Homo sapien
ttcatggtgaatccacagtgcccat

SEQ ID NO: 2270639 - DNA, 25 bp, Homo sapien
tgcccatcaatagcaccactaaaca

SEQ ID NO: 2270640 - DNA, 25 bp, Homo sapien
tcatggtgaatccacagtgcccatc

SEQ ID NO: 2270641 - DNA, 25 bp, Homo sapien
acagtgcccatcaatagcaccacta

SEQ ID NO: 2270642 - DNA, 25 bp, Homo sapien
tgggatcaaagggagagttccatga

SEQ ID NO: 2270643 - DNA, 25 bp, Homo sapien
aagggagagttccatgattcaaggg

SEQ ID NO: 2270644 - DNA, 25 bp, Homo sapien
tctctgtgggatcaaagggagagtt

SEQ ID NO: 2270645 - DNA, 25 bp, Homo sapien
ttcaaggggagggtagacatgagcc

SEQ ID NO: 2270646 - DNA, 25 bp, Homo sapien
acagcttcaggagctgcttggctat

SEQ ID NO: 2270647 - DNA, 25 bp, Homo sapien
cttcaggagctgcttggctatgtgt

SEQ ID NO: 2270648 - DNA, 25 bp, Homo sapien
tgtttctgtgagagtgttttctgca

SEQ ID NO: 2270649 - DNA, 25 bp, Homo sapien
tatgtgtttctgtgagagtgttttc

SEQ ID NO: 2270650 - DNA, 25 bp, Homo sapien
aggtttcttgaaacttgtcccactg

SEQ ID NO: 2270651 - DNA, 25 bp, Homo sapien
gtacatcctgactgtgttagctggg

SEQ ID NO: 2270652 - DNA, 25 bp, Homo sapien
tgtgatttctaggtacatcctgact

SEQ ID NO: 2270653 - DNA, 25 bp, Homo sapien
tgaggtttcttgaaacttgtcccac

SEQ ID NO: 2270654 - DNA, 25 bp, Homo sapien
gtgattgtgactggtgcatagtgac

SEQ ID NO: 2270655 - DNA, 25 bp, Homo sapien
ggcagaggagacttttgtggaggtg

SEQ ID NO: 2270656 - DNA, 25 bp, Homo sapien
acagtgattgtgactggtgcatagt

SEQ ID NO: 2270657 - DNA, 25 bp, Homo sapien
cagaggagacttttgtggaggtgca

SEQ ID NO: 2270658 - DNA, 25 bp, Homo sapien
gagatgaagacagtcagtgatgtca

SEQ ID NO: 2270659 - DNA, 25 bp, Homo sapien
ctgagatgaagacagtcagtgatgt

SEQ ID NO: 2270660 - DNA, 25 bp, Homo sapien
tgagatgaagacagtcagtgatgtc

SEQ ID NO: 2270661 - DNA, 25 bp, Homo sapien
cctgagatgaagacagtcagtgatg

SEQ ID NO: 2270662 - DNA, 25 bp, Homo sapien
gttgtaagggggtactcctccatca

SEQ ID NO: 2270663 - DNA, 25 bp, Homo sapien
gagcaggtacttcacgttgtaaggg

SEQ ID NO: 2270664 - DNA, 25 bp, Homo sapien
aaggtcagatatgggtggagataaa

SEQ ID NO: 2270665 - DNA, 25 bp, Homo sapien
taaggtcagatatgggtggagataa

SEQ ID NO: 2270666 - DNA, 25 bp, Homo sapien
tgcttgggctacaaagcttcatgtt

SEQ ID NO: 2270667 - DNA, 25 bp, Homo sapien
atagttcagcgttatttttttgagt

SEQ ID NO: 2270668 - DNA, 25 bp, Homo sapien
ggatctgcttgggctacaaagcttc

SEQ ID NO: 2270669 - DNA, 25 bp, Homo sapien
tagttcagcgttatttttttgagtc

SEQ ID NO: 2270670 - DNA, 25 bp, Homo sapien
cagggtgacagctcttacagccagg

SEQ ID NO: 2270671 - DNA, 25 bp, Homo sapien
ggtgacagctcttacagccaggctt

SEQ ID NO: 2270672 - DNA, 25 bp, Homo sapien
gacagctcttacagccaggcttcca

SEQ ID NO: 2270673 - DNA, 25 bp, Homo sapien
ggcagggtgacagctcttacagcca

SEQ ID NO: 2270674 - DNA, 25 bp, Homo sapien
ccagtttgaggtgtgagagtacttc

SEQ ID NO: 2270675 - DNA, 25 bp, Homo sapien
tgtgagagtacttctccaatttgga

SEQ ID NO: 2270676 - DNA, 25 bp, Homo sapien
actactggacaccatttctagggtt

SEQ ID NO: 2270677 - DNA, 25 bp, Homo sapien
tagggttgcaatcaccacagatagc

SEQ ID NO: 2270678 - DNA, 25 bp, Homo sapien
atttcacggggggtccacagtgcca

SEQ ID NO: 2270679 - DNA, 25 bp, Homo sapien
tgatttcacggggggtccacagtgc

SEQ ID NO: 2270680 - DNA, 25 bp, Homo sapien
ttcacggggggtccacagtgccact

SEQ ID NO: 2270681 - DNA, 25 bp, Homo sapien
ttcttgatttcacggggggtccaca

SEQ ID NO: 2270682 - DNA, 25 bp, Homo sapien
tcaagttagcccagtattcagttgg

SEQ ID NO: 2270683 - DNA, 25 bp, Homo sapien
tgcacaaacagtcctcaagttagcc

SEQ ID NO: 2270684 - DNA, 25 bp, Homo sapien
tagcccagtattcagttgggagtac

SEQ ID NO: 2270685 - DNA, 25 bp, Homo sapien
ggtgcttccagcagaccccacattt

SEQ ID NO: 2270686 - DNA, 25 bp, Homo sapien
ttcccattgtcaggggtcactcctc

SEQ ID NO: 2270687 - DNA, 25 bp, Homo sapien
gtcttggaatttcatcctagggcat

SEQ ID NO: 2270688 - DNA, 25 bp, Homo sapien
cctagggcatagagtgtaagcagca

SEQ ID NO: 2270689 - DNA, 25 bp, Homo sapien
gtaagcagcaataagatcaggtggg

SEQ ID NO: 2270690 - DNA, 25 bp, Homo sapien
acagcggtggactttcgcctgtctt

SEQ ID NO: 2270691 - DNA, 25 bp, Homo sapien
gggtgacagcggtggactttcgcct

SEQ ID NO: 2270692 - DNA, 25 bp, Homo sapien
ggactcacgggatagtcccatgttc

SEQ ID NO: 2270693 - DNA, 25 bp, Homo sapien
tgggactcacgggatagtcccatgt

SEQ ID NO: 2270694 - DNA, 25 bp, Homo sapien
gggatccaagggatattcccgtgat

SEQ ID NO: 2270695 - DNA, 25 bp, Homo sapien
aacattggtagtgcaaacttggacc

SEQ ID NO: 2270696 - DNA, 25 bp, Homo sapien
tcccttaattacacaagccatcaac

SEQ ID NO: 2270697 - DNA, 25 bp, Homo sapien
ttgcattcccttaattacacaagcc

SEQ ID NO: 2270698 - DNA, 25 bp, Homo sapien
tcaggtgggagtacttcaatgtgca

SEQ ID NO: 2270699 - DNA, 25 bp, Homo sapien
aaggcagcagcaataagataaaagt

SEQ ID NO: 2270700 - DNA, 25 bp, Homo sapien
gataaaagtggggatacaatctggt

SEQ ID NO: 2270701 - DNA, 25 bp, Homo sapien
ataaaagtggggatacaatctggtg

SEQ ID NO: 2270702 - DNA, 25 bp, Homo sapien
gcagcagcaataagataaaagtggg

SEQ ID NO: 2270703 - DNA, 25 bp, Homo sapien
ttggaatcctcgacatagtcccatg

SEQ ID NO: 2270704 - DNA, 25 bp, Homo sapien
tttggaatcctcgacatagtcccat

SEQ ID NO: 2270705 - DNA, 25 bp, Homo sapien
ctctttggaatcctcgacatagtcc

SEQ ID NO: 2270706 - DNA, 25 bp, Homo sapien
tctttggaatcctcgacatagtccc

SEQ ID NO: 2270707 - DNA, 25 bp, Homo sapien
caaaacatgacaatggagacacacc

SEQ ID NO: 2270708 - DNA, 25 bp, Homo sapien
cctccagcaaaacatgacaatggag

SEQ ID NO: 2270709 - DNA, 25 bp, Homo sapien
cagcaaaacatgacaatggagacac

SEQ ID NO: 2270710 - DNA, 25 bp, Homo sapien
aacatgacaatggagacacaccaaa

SEQ ID NO: 2270711 - DNA, 25 bp, Homo sapien
gacagtattccagtctcaatgggac

SEQ ID NO: 2270712 - DNA, 25 bp, Homo sapien
agacagtattccagtctcaatggga

SEQ ID NO: 2270713 - DNA, 25 bp, Homo sapien
cagacagtattccagtctcaatggg

SEQ ID NO: 2270714 - DNA, 25 bp, Homo sapien
atatgattctatcacgcaaggaacc

SEQ ID NO: 2270715 - DNA, 25 bp, Homo sapien
ctatcacgcaaggaaccatcaaaaa

SEQ ID NO: 2270716 - DNA, 25 bp, Homo sapien
gattctatcacgcaaggaaccatca

SEQ ID NO: 2270717 - DNA, 25 bp, Homo sapien
tatgattctatcacgcaaggaacca

SEQ ID NO: 2270718 - DNA, 25 bp, Homo sapien
cagttatgggtgaggatacaatggt

SEQ ID NO: 2270719 - DNA, 25 bp, Homo sapien
tcaaattcggttgccagctgaggag

SEQ ID NO: 2270720 - DNA, 25 bp, Homo sapien
gagaggatgggatcccacaacttca

SEQ ID NO: 2270721 - DNA, 25 bp, Homo sapien
tgagtagcagtaaggtcagttatgg

SEQ ID NO: 2270722 - DNA, 25 bp, Homo sapien
tttcatggacaatccgcagtgcccc

SEQ ID NO: 2270723 - DNA, 25 bp, Homo sapien
agtgccccttaacaccactactgga

SEQ ID NO: 2270724 - DNA, 25 bp, Homo sapien
gacaccgtttttaggcttgccatca

SEQ ID NO: 2270725 - DNA, 25 bp, Homo sapien
cacatcttcaccagtgagaggccag

SEQ ID NO: 2270726 - DNA, 25 bp, Homo sapien
aaattcaattgccagtcaagcaggt

SEQ ID NO: 2270727 - DNA, 25 bp, Homo sapien
ttcaattgccagtcaagcaggtgct

SEQ ID NO: 2270728 - DNA, 25 bp, Homo sapien
tgaaattcaattgccagtcaagcag

SEQ ID NO: 2270729 - DNA, 25 bp, Homo sapien
aattcaattgccagtcaagcaggtg

SEQ ID NO: 2270730 - DNA, 25 bp, Homo sapien
gtgatttttaggtacagcctgcttc

SEQ ID NO: 2270731 - DNA, 25 bp, Homo sapien
tgtgatttttaggtacagcctgctt

SEQ ID NO: 2270732 - DNA, 25 bp, Homo sapien
caaatatggagatggcccgaatggg

SEQ ID NO: 2270733 - DNA, 25 bp, Homo sapien
gacccaaatatggagatggcccgaa

SEQ ID NO: 2270734 - DNA, 25 bp, Homo sapien
cccaaatatggagatggcccgaatg

SEQ ID NO: 2270735 - DNA, 25 bp, Homo sapien
aaatatggagatggcccgaatgggc

SEQ ID NO: 2270736 - DNA, 25 bp, Homo sapien
aaggtccaaggtgcaagaacactgc

SEQ ID NO: 2270737 - DNA, 25 bp, Homo sapien
ctgcacccatgagtggaaggtccaa

SEQ ID NO: 2270738 - DNA, 25 bp, Homo sapien
tggaaggtccaaggtgcaagaacac

SEQ ID NO: 2270739 - DNA, 25 bp, Homo sapien
catgagtggaaggtccaaggtgcaa

SEQ ID NO: 2270740 - DNA, 25 bp, Homo sapien
catggagtgtgaacagcaatagggt

SEQ ID NO: 2270741 - DNA, 25 bp, Homo sapien
aaatttggttccctgctgagtaggt

SEQ ID NO: 2270742 - DNA, 25 bp, Homo sapien
tggagtgtgaacagcaatagggtca

SEQ ID NO: 2270743 - DNA, 25 bp, Homo sapien
tcaaatttggttccctgctgagtag

SEQ ID NO: 2270744 - DNA, 25 bp, Homo sapien
ggaatcaaccacatagtcccatgat

SEQ ID NO: 2270745 - DNA, 25 bp, Homo sapien
tgtaggtggtggactgtcacctgtc

SEQ ID NO: 2270746 - DNA, 25 bp, Homo sapien
taggtggtggactgtcacctgtctt

SEQ ID NO: 2270747 - DNA, 25 bp, Homo sapien
tgtgtaggtggtggactgtcacctg

SEQ ID NO: 2270748 - DNA, 25 bp, Homo sapien
tggttaacttcccaatgaatgtcac

SEQ ID NO: 2270749 - DNA, 25 bp, Homo sapien
ctggttaacttcccaatgaatgtca

SEQ ID NO: 2270750 - DNA, 25 bp, Homo sapien
acttctgtttaagctgattgagagc

SEQ ID NO: 2270751 - DNA, 25 bp, Homo sapien
gggcatctaagcctgctgcaggaat

SEQ ID NO: 2270752 - DNA, 25 bp, Homo sapien
gctctgcgtgtacaatttacttctg

SEQ ID NO: 2270753 - DNA, 25 bp, Homo sapien
atctgggcatctaagcctgctgcag

SEQ ID NO: 2270754 - DNA, 25 bp, Homo sapien
tctcccaatactaggccagctctgt

SEQ ID NO: 2270755 - DNA, 25 bp, Homo sapien
ccaatactaggccagctctgtctgt

SEQ ID NO: 2270756 - DNA, 25 bp, Homo sapien
cattttctcccaatactaggccagc

SEQ ID NO: 2270757 - DNA, 25 bp, Homo sapien
ttttctcccaatactaggccagctc

SEQ ID NO: 2270758 - DNA, 25 bp, Homo sapien
gaccagctcatagtctcgaaatgcc

SEQ ID NO: 2270759 - DNA, 25 bp, Homo sapien
tcaggaacacagcagacggtattcc

SEQ ID NO: 2270760 - DNA, 25 bp, Homo sapien
tctattacccaaagatctctcagga

SEQ ID NO: 2270761 - DNA, 25 bp, Homo sapien
aagggcagtttccatcgaccagctc

SEQ ID NO: 2270762 - DNA, 25 bp, Homo sapien
tccaatatgggacttctgcaaaacc

SEQ ID NO: 2270763 - DNA, 25 bp, Homo sapien
tgcaaaaccataccacctgaggatc

SEQ ID NO: 2270764 - DNA, 25 bp, Homo sapien
gaggatctgccagcctgtgtttctg

SEQ ID NO: 2270765 - DNA, 25 bp, Homo sapien
ggttgctgtctccaatatgggactt

SEQ ID NO: 2270766 - DNA, 25 bp, Homo sapien
cacagtctgaaaatgccttatcctc

SEQ ID NO: 2270767 - DNA, 25 bp, Homo sapien
ccacacagtctgaaaatgccttatc

SEQ ID NO: 2270768 - DNA, 25 bp, Homo sapien
aagagctgtttccatcgaccaccac

SEQ ID NO: 2270769 - DNA, 25 bp, Homo sapien
agagctgtttccatcgaccaccaca

SEQ ID NO: 2270770 - DNA, 25 bp, Homo sapien
ctttttcagagagcccctgtgaggc

SEQ ID NO: 2270771 - DNA, 25 bp, Homo sapien
tttttcagagagcccctgtgaggcc

SEQ ID NO: 2270772 - DNA, 25 bp, Homo sapien
ttttcagagagcccctgtgaggccc

SEQ ID NO: 2270773 - DNA, 25 bp, Homo sapien
agaggcaagtctgaggagtgacaac

SEQ ID NO: 2270774 - DNA, 25 bp, Homo sapien
gcacccatgagaggcaagtctgagg

SEQ ID NO: 2270775 - DNA, 25 bp, Homo sapien
gcaagtctgaggagtgacaacactg

SEQ ID NO: 2270776 - DNA, 25 bp, Homo sapien
atgagaggcaagtctgaggagtgac

SEQ ID NO: 2270777 - DNA, 25 bp, Homo sapien
gatacacttttcaggcttgctctca

SEQ ID NO: 2270778 - DNA, 25 bp, Homo sapien
tcagggcagccttaattttttcatt

SEQ ID NO: 2270779 - DNA, 25 bp, Homo sapien
tctcagggcagccttaattttttca

SEQ ID NO: 2270780 - DNA, 25 bp, Homo sapien
acacttttcaggcttgctctcacca

SEQ ID NO: 2270781 - DNA, 25 bp, Homo sapien
actgctctactttggacttgtgttt

SEQ ID NO: 2270782 - DNA, 25 bp, Homo sapien
cactgctctactttggacttgtgtt

SEQ ID NO: 2270783 - DNA, 25 bp, Homo sapien
ctgctctactttggacttgtgtttg

SEQ ID NO: 2270784 - DNA, 25 bp, Homo sapien
cttcttcaggcttgccatagatgct

SEQ ID NO: 2270785 - DNA, 25 bp, Homo sapien
tcttcaggcttgccatagatgctga

SEQ ID NO: 2270786 - DNA, 25 bp, Homo sapien
cttcaggcttgccatagatgctgat

SEQ ID NO: 2270787 - DNA, 25 bp, Homo sapien
ttcttcaggcttgccatagatgctg

SEQ ID NO: 2270788 - DNA, 25 bp, Homo sapien
tgtcttcgttgtgggatacatggga

SEQ ID NO: 2270789 - DNA, 25 bp, Homo sapien
ttgtgggatacatgggatagttgca

SEQ ID NO: 2270790 - DNA, 25 bp, Homo sapien
tcttcgttgtgggatacatgggata

SEQ ID NO: 2270791 - DNA, 25 bp, Homo sapien
ttcgttgtgggatacatgggatagt

SEQ ID NO: 2270792 - DNA, 25 bp, Homo sapien
tgtgttccctggggttgatctttcc

SEQ ID NO: 2270793 - DNA, 25 bp, Homo sapien
tgttccctggggttgatctttccca

SEQ ID NO: 2270794 - DNA, 25 bp, Homo sapien
gttgatctttcccaggtatggcttc

SEQ ID NO: 2270795 - DNA, 25 bp, Homo sapien
cagaagtcaggaaagttgctcaagg

SEQ ID NO: 2270796 - DNA, 25 bp, Homo sapien
gctcaaggagctatggcgattttta

SEQ ID NO: 2270797 - DNA, 25 bp, Homo sapien
ctggatagggtgcactctgctcctc

SEQ ID NO: 2270798 - DNA, 25 bp, Homo sapien
tggtggaagcagctgccatgattat

SEQ ID NO: 2270799 - DNA, 25 bp, Homo sapien
caggtcctaattgcttcaggctcag

SEQ ID NO: 2270800 - DNA, 25 bp, Homo sapien
caggccaggtcctaattgcttcagg

SEQ ID NO: 2270801 - DNA, 25 bp, Homo sapien
tcctaattgcttcaggctcagtaca

SEQ ID NO: 2270802 - DNA, 25 bp, Homo sapien
aattgcttcaggctcagtacattgt

SEQ ID NO: 2270803 - DNA, 25 bp, Homo sapien
tataacatcgatgatccctacatgg

SEQ ID NO: 2270804 - DNA, 25 bp, Homo sapien
gatgggaatgaaaattcagagatta

SEQ ID NO: 2270805 - DNA, 25 bp, Homo sapien
cgatgatccctacatgggcaccagt

SEQ ID NO: 2270806 - DNA, 25 bp, Homo sapien
ttcagagattaatataacatcgatg

SEQ ID NO: 2270807 - DNA, 25 bp, Homo sapien
taccgtgaagttgacaagcctgttt

SEQ ID NO: 2270808 - DNA, 25 bp, Homo sapien
cataagcttcaactggagttaccgt

SEQ ID NO: 2270809 - DNA, 25 bp, Homo sapien
caactggagttaccgtgaagttgac

SEQ ID NO: 2270810 - DNA, 25 bp, Homo sapien
gagttaccgtgaagttgacaagcct

SEQ ID NO: 2270811 - DNA, 25 bp, Homo sapien
taatattgacagaagagtgaaatta

SEQ ID NO: 2270812 - DNA, 25 bp, Homo sapien
agtagtggaggggtttaacttgcat

SEQ ID NO: 2270813 - DNA, 25 bp, Homo sapien
tgtgtagattgtttcttcaatgttg

SEQ ID NO: 2270814 - DNA, 25 bp, Homo sapien
ttgatttccataagttcagtagtgg

SEQ ID NO: 2270815 - DNA, 25 bp, Homo sapien
gaatcatcttgtaacaggaatagtc

SEQ ID NO: 2270816 - DNA, 25 bp, Homo sapien
agttgccttccatggaggacagatc

SEQ ID NO: 2270817 - DNA, 25 bp, Homo sapien
gaatagtcaggtgggcagttgcctt

SEQ ID NO: 2270818 - DNA, 25 bp, Homo sapien
tgaagatggagcaagaatcatcttg

SEQ ID NO: 2270819 - DNA, 25 bp, Homo sapien
tacaggcttattttggtagaccagc

SEQ ID NO: 2270820 - DNA, 25 bp, Homo sapien
tgaactattgcagccacaaatttat

SEQ ID NO: 2270821 - DNA, 25 bp, Homo sapien
ttctaggtctccaaacatacccatc

SEQ ID NO: 2270822 - DNA, 25 bp, Homo sapien
tacccatccactttgtaactacagg

SEQ ID NO: 2270823 - DNA, 25 bp, Homo sapien
taagccagggctaagaattgtgctc

SEQ ID NO: 2270824 - DNA, 25 bp, Homo sapien
tgctctctgacttgtttaggagatg

SEQ ID NO: 2270825 - DNA, 25 bp, Homo sapien
gatgtagctgtccattgaaagctga

SEQ ID NO: 2270826 - DNA, 25 bp, Homo sapien
cttccttcattaagccagggctaag

SEQ ID NO: 2270827 - DNA, 25 bp, Homo sapien
ggtaacattgtggaaactacagtcc

SEQ ID NO: 2270828 - DNA, 25 bp, Homo sapien
gtaacattgtggaaactacagtcca

SEQ ID NO: 2270829 - DNA, 25 bp, Homo sapien
taacattgtggaaactacagtccat

SEQ ID NO: 2270830 - DNA, 25 bp, Homo sapien
cctagactgggtccgtggagtaatt

SEQ ID NO: 2270831 - DNA, 25 bp, Homo sapien
gattctgacacaggtagtgtccagg

SEQ ID NO: 2270832 - DNA, 25 bp, Homo sapien
tttacgcattgtccaacatgtgccc

SEQ ID NO: 2270833 - DNA, 25 bp, Homo sapien
gcatctggaaaatcatcatgagtcc

SEQ ID NO: 2270834 - DNA, 25 bp, Homo sapien
gactggtgaaggctatttgtctcca

SEQ ID NO: 2270835 - DNA, 25 bp, Homo sapien
gctttgagactggtgaaggctattt

SEQ ID NO: 2270836 - DNA, 25 bp, Homo sapien
gaaggctatttgtctccaactgcca

SEQ ID NO: 2270837 - DNA, 25 bp, Homo sapien
tctccaactgccattgccagatact

SEQ ID NO: 2270838 - DNA, 25 bp, Homo sapien
ctgtggctcaatcccctgcagtact

SEQ ID NO: 2270839 - DNA, 25 bp, Homo sapien
tctgcagtcccccaatcatcagcca

SEQ ID NO: 2270840 - DNA, 25 bp, Homo sapien
ccacttctgcagtcccccaatcatc

SEQ ID NO: 2270841 - DNA, 25 bp, Homo sapien
agggcctgtggctcaatcccctgca

SEQ ID NO: 2270842 - DNA, 25 bp, Homo sapien
tgtgaccttcttcagctagttggct

SEQ ID NO: 2270843 - DNA, 25 bp, Homo sapien
ggctacccaggtcccggcaggattg

SEQ ID NO: 2270844 - DNA, 25 bp, Homo sapien
ctgaggtgggcaccacggtagggca

SEQ ID NO: 2270845 - DNA, 25 bp, Homo sapien
ctccatgtgaccttcttcagctagt

SEQ ID NO: 2270846 - DNA, 25 bp, Homo sapien
tgagcatatatagcctctgttgcac

SEQ ID NO: 2270847 - DNA, 25 bp, Homo sapien
ctgagcatatatagcctctgttgca

SEQ ID NO: 2270848 - DNA, 25 bp, Homo sapien
ggacaaactttcttccctctgctgg

SEQ ID NO: 2270849 - DNA, 25 bp, Homo sapien
gacaaactttcttccctctgctggt

SEQ ID NO: 2270850 - DNA, 25 bp, Homo sapien
acaaactttcttccctctgctggtg

SEQ ID NO: 2270851 - DNA, 25 bp, Homo sapien
aggttcaatgtgcactgggctgctg

SEQ ID NO: 2270852 - DNA, 25 bp, Homo sapien
attcaggttcaatgtgcactgggct

SEQ ID NO: 2270853 - DNA, 25 bp, Homo sapien
caggttcaatgtgcactgggctgct

SEQ ID NO: 2270854 - DNA, 25 bp, Homo sapien
tcaggttcaatgtgcactgggctgc

SEQ ID NO: 2270855 - DNA, 25 bp, Homo sapien
aggcgccctgcccaacgctggcctg

SEQ ID NO: 2270856 - DNA, 25 bp, Homo sapien
tccagggccaatcattgtgagggcg

SEQ ID NO: 2270857 - DNA, 25 bp, Homo sapien
ttgcaagggctgtaggcgtctcccg

SEQ ID NO: 2270858 - DNA, 25 bp, Homo sapien
ggcgtcggccaattattgcaagggc

SEQ ID NO: 2270859 - DNA, 25 bp, Homo sapien
ggccaccaatgaaagcttcccagga

SEQ ID NO: 2270860 - DNA, 25 bp, Homo sapien
ctttcagcatctttttcactggctt

SEQ ID NO: 2270861 - DNA, 25 bp, Homo sapien
gaaagcttcccaggacaatctgctt

SEQ ID NO: 2270862 - DNA, 25 bp, Homo sapien
accatgtttcgcaaacacttctttc

SEQ ID NO: 2270863 - DNA, 25 bp, Homo sapien
aataacgaacgcaaagtctctggac

SEQ ID NO: 2270864 - DNA, 25 bp, Homo sapien
gtctctggacttgctggttcaaccc

SEQ ID NO: 2270865 - DNA, 25 bp, Homo sapien
ttgctggttcaaccctttatcagaa

SEQ ID NO: 2270866 - DNA, 25 bp, Homo sapien
cattctcaaaaataacgaacgcaaa

SEQ ID NO: 2270867 - DNA, 25 bp, Homo sapien
ttcatgtgagggaagccaccctcct

SEQ ID NO: 2270868 - DNA, 25 bp, Homo sapien
ttctgtttctcgaagaagctggtgg

SEQ ID NO: 2270869 - DNA, 25 bp, Homo sapien
tgagggaagccaccctcctgttcct

SEQ ID NO: 2270870 - DNA, 25 bp, Homo sapien
gccaccctcctgttcctccactact

SEQ ID NO: 2270871 - DNA, 25 bp, Homo sapien
taggaggaagacctccacttcgtga

SEQ ID NO: 2270872 - DNA, 25 bp, Homo sapien
atgttgagatcaagagtgtatccat

SEQ ID NO: 2270873 - DNA, 25 bp, Homo sapien
taactggaatggctcccctagaaga

SEQ ID NO: 2270874 - DNA, 25 bp, Homo sapien
gctcccctagaagaactcatgttga

SEQ ID NO: 2270875 - DNA, 25 bp, Homo sapien
atctcttggagacatatggtctttt

SEQ ID NO: 2270876 - DNA, 25 bp, Homo sapien
tggagacatatggtcttttctccgg

SEQ ID NO: 2270877 - DNA, 25 bp, Homo sapien
agacatatggtcttttctccgggaa

SEQ ID NO: 2270878 - DNA, 25 bp, Homo sapien
tcttggagacatatggtcttttctc

SEQ ID NO: 2270879 - DNA, 25 bp, Homo sapien
tctctaaaggaatattcaccctgac

SEQ ID NO: 2270880 - DNA, 25 bp, Homo sapien
aaggaatattcaccctgactagaat

SEQ ID NO: 2270881 - DNA, 25 bp, Homo sapien
taaaggaatattcaccctgactaga

SEQ ID NO: 2270882 - DNA, 25 bp, Homo sapien
tattctctaaaggaatattcaccct

SEQ ID NO: 2270883 - DNA, 25 bp, Homo sapien
atctctaccacgggcgtcattgtag

SEQ ID NO: 2270884 - DNA, 25 bp, Homo sapien
tctaccacgggcgtcattgtagcca

SEQ ID NO: 2270885 - DNA, 25 bp, Homo sapien
taccacgggcgtcattgtagccatc

SEQ ID NO: 2270886 - DNA, 25 bp, Homo sapien
tctctaccacgggcgtcattgtagc

SEQ ID NO: 2270887 - DNA, 25 bp, Homo sapien
catctccttgcgtaactctcttgac

SEQ ID NO: 2270888 - DNA, 25 bp, Homo sapien
cggcttcttccaccgtaagacaact

SEQ ID NO: 2270889 - DNA, 25 bp, Homo sapien
ttccaccgtaagacaactgaggccc

SEQ ID NO: 2270890 - DNA, 25 bp, Homo sapien
acatctccttgcgtaactctcttga

SEQ ID NO: 2270891 - DNA, 25 bp, Homo sapien
cagtagaaggactaccagcgggcac

SEQ ID NO: 2270892 - DNA, 25 bp, Homo sapien
cgcgtcatggtcagcgggaagtcca

SEQ ID NO: 2270893 - DNA, 25 bp, Homo sapien
cagcagccagggtatagagtgcaga

SEQ ID NO: 2270894 - DNA, 25 bp, Homo sapien
gagaaggccaacatagagcagtaga

SEQ ID NO: 2270895 - DNA, 25 bp, Homo sapien
cgcaggaaatcctatgccaacgagg

SEQ ID NO: 2270896 - DNA, 25 bp, Homo sapien
ctatgccaacgaggaacatggaagt

SEQ ID NO: 2270897 - DNA, 25 bp, Homo sapien
cttcgtgaaccaggaaatgtttagt

SEQ ID NO: 2270898 - DNA, 25 bp, Homo sapien
aatcgttgagccagacgcaggaaat

SEQ ID NO: 2270899 - DNA, 25 bp, Homo sapien
caagattccggtatgatgaatagca

SEQ ID NO: 2270900 - DNA, 25 bp, Homo sapien
gattccggtatgatgaatagcaggc

SEQ ID NO: 2270901 - DNA, 25 bp, Homo sapien
tcagagggctgcaagattccggtat

SEQ ID NO: 2270902 - DNA, 25 bp, Homo sapien
ggctgcaagattccggtatgatgaa

SEQ ID NO: 2270903 - DNA, 25 bp, Homo sapien
tctgcacccatgagaggccagttca

SEQ ID NO: 2270904 - DNA, 25 bp, Homo sapien
actgtctcaatctcatctgcaccca

SEQ ID NO: 2270905 - DNA, 25 bp, Homo sapien
cacaacaaatgtcctctgagacact

SEQ ID NO: 2270906 - DNA, 25 bp, Homo sapien
agtcacaacaaatgtcctctgagac

SEQ ID NO: 2270907 - DNA, 25 bp, Homo sapien
ctggtcaatgccttccacactaaat

SEQ ID NO: 2270908 - DNA, 25 bp, Homo sapien
catcctggatctggtcaatgccttc

SEQ ID NO: 2270909 - DNA, 25 bp, Homo sapien
tcatcctggatctggtcaatgcctt

SEQ ID NO: 2270910 - DNA, 25 bp, Homo sapien
tggatctggtcaatgccttccacac

SEQ ID NO: 2270911 - DNA, 25 bp, Homo sapien
ctgaccatagagatgatctgaaggg

SEQ ID NO: 2270912 - DNA, 25 bp, Homo sapien
gacctgaccatagagatgatctgaa

SEQ ID NO: 2270913 - DNA, 25 bp, Homo sapien
cgtgacctgaccatagagatgatct

SEQ ID NO: 2270914 - DNA, 25 bp, Homo sapien
agcgtgacctgaccatagagatgat

SEQ ID NO: 2270915 - DNA, 25 bp, Homo sapien
gtgaggatacgaccgctgaggggaa

SEQ ID NO: 2270916 - DNA, 25 bp, Homo sapien
ggatacgaccgctgaggggaagatt

SEQ ID NO: 2270917 - DNA, 25 bp, Homo sapien
ctgaggggaagattgggtcctgcaa

SEQ ID NO: 2270918 - DNA, 25 bp, Homo sapien
caggggtgaggatacgaccgctgag

SEQ ID NO: 2270919 - DNA, 25 bp, Homo sapien
atgctgggtgtcatgtggcttccac

SEQ ID NO: 2270920 - DNA, 25 bp, Homo sapien
tgctgggtgtcatgtggcttccaca

SEQ ID NO: 2270921 - DNA, 25 bp, Homo sapien
tccaaatcatctccccctgagaaaa

SEQ ID NO: 2270922 - DNA, 25 bp, Homo sapien
atccaaatcatctccccctgagaaa

SEQ ID NO: 2270923 - DNA, 25 bp, Homo sapien
acagtgaagtgggaagctggccgac

SEQ ID NO: 2270924 - DNA, 25 bp, Homo sapien
aagtgggaagctggccgacacccgc

SEQ ID NO: 2270925 - DNA, 25 bp, Homo sapien
tggaaagaccattatcaatgtagat

SEQ ID NO: 2270926 - DNA, 25 bp, Homo sapien
gagttcctcagttatctttctggaa

SEQ ID NO: 2270927 - DNA, 25 bp, Homo sapien
caatgtagataatctatggcagagg

SEQ ID NO: 2270928 - DNA, 25 bp, Homo sapien
tcttcgatctgtccattagttctaa

SEQ ID NO: 2270929 - DNA, 25 bp, Homo sapien
ctgaaagagtgagcccattaaacac

SEQ ID NO: 2270930 - DNA, 25 bp, Homo sapien
tgaaagagtgagcccattaaacacc

SEQ ID NO: 2270931 - DNA, 25 bp, Homo sapien
gaaagagtgagcccattaaacacca

SEQ ID NO: 2270932 - DNA, 25 bp, Homo sapien
aaagagtgagcccattaaacaccat

SEQ ID NO: 2270933 - DNA, 25 bp, Homo sapien
agttcctccttctttacattaatag

SEQ ID NO: 2270934 - DNA, 25 bp, Homo sapien
gctaggagctccacttgcaaagaaa

SEQ ID NO: 2270935 - DNA, 25 bp, Homo sapien
acattaatagctaggagctccactt

SEQ ID NO: 2270936 - DNA, 25 bp, Homo sapien
ttctttacattaatagctaggagct

SEQ ID NO: 2270937 - DNA, 25 bp, Homo sapien
tattgccaaatagtgggctttgaga

SEQ ID NO: 2270938 - DNA, 25 bp, Homo sapien
ttattgccaaatagtgggctttgag

SEQ ID NO: 2270939 - DNA, 25 bp, Homo sapien
ttgccaaatagtgggctttgagaga

SEQ ID NO: 2270940 - DNA, 25 bp, Homo sapien
tgccaaatagtgggctttgagagac

SEQ ID NO: 2270941 - DNA, 25 bp, Homo sapien
gagtaacagggccacagtgttagca

SEQ ID NO: 2270942 - DNA, 25 bp, Homo sapien
gtaacagggccacagtgttagcact

SEQ ID NO: 2270943 - DNA, 25 bp, Homo sapien
gagagtaacagggccacagtgttag

SEQ ID NO: 2270944 - DNA, 25 bp, Homo sapien
tgggagagtaacagggccacagtgt

SEQ ID NO: 2270945 - DNA, 25 bp, Homo sapien
tatccacaaataatggcagtgttcc

SEQ ID NO: 2270946 - DNA, 25 bp, Homo sapien
agggtgacttattcagggtatccac

SEQ ID NO: 2270947 - DNA, 25 bp, Homo sapien
aaggctcccacagtcaaggtcatct

SEQ ID NO: 2270948 - DNA, 25 bp, Homo sapien
ttgttgatgacagccccaagatcca

SEQ ID NO: 2270949 - DNA, 25 bp, Homo sapien
tcccagagggcataactgagaagtc

SEQ ID NO: 2270950 - DNA, 25 bp, Homo sapien
cccagagggcataactgagaagtca

SEQ ID NO: 2270951 - DNA, 25 bp, Homo sapien
ttgggagtttgccatgatggcccca

SEQ ID NO: 2270952 - DNA, 25 bp, Homo sapien
ctaggctcccagtatgaaagccctc

SEQ ID NO: 2270953 - DNA, 25 bp, Homo sapien
ggagtttgccatgatggccccagtt

SEQ ID NO: 2270954 - DNA, 25 bp, Homo sapien
taggctcccagtatgaaagccctca

SEQ ID NO: 2270955 - DNA, 25 bp, Homo sapien
ccctgggggctaaaagatctgtggt

SEQ ID NO: 2270956 - DNA, 25 bp, Homo sapien
tccctgggggctaaaagatctgtgg

SEQ ID NO: 2270957 - DNA, 25 bp, Homo sapien
ataaaatcccaagacgatggcggag

SEQ ID NO: 2270958 - DNA, 25 bp, Homo sapien
atcccaagacgatggcggagtgccc

SEQ ID NO: 2270959 - DNA, 25 bp, Homo sapien
gagtgccccctcatgacacgaagca

SEQ ID NO: 2270960 - DNA, 25 bp, Homo sapien
cactgtttgtcccagaataaaatcc

SEQ ID NO: 2270961 - DNA, 25 bp, Homo sapien
tgccctaggatcatgggagtatctg

SEQ ID NO: 2270962 - DNA, 25 bp, Homo sapien
caagggctcataatcaggcctgagt

SEQ ID NO: 2270963 - DNA, 25 bp, Homo sapien
tggtgaatacaacagacgagacgca

SEQ ID NO: 2270964 - DNA, 25 bp, Homo sapien
tcgatgtgacacaagcaagggctca

SEQ ID NO: 2270965 - DNA, 25 bp, Homo sapien
acagcctctttcagccatggagtga

SEQ ID NO: 2270966 - DNA, 25 bp, Homo sapien
tcccatgggacttgattcttacaca

SEQ ID NO: 2270967 - DNA, 25 bp, Homo sapien
gaaaagcagtttccagcgtcctcct

SEQ ID NO: 2270968 - DNA, 25 bp, Homo sapien
ccagcgtcctcctcacagtctcaaa

SEQ ID NO: 2270969 - DNA, 25 bp, Homo sapien
caggcttgcattcgccacaaatggg

SEQ ID NO: 2270970 - DNA, 25 bp, Homo sapien
cattgcccttcaacagtgctactgg

SEQ ID NO: 2270971 - DNA, 25 bp, Homo sapien
ctcgttctctcaggcgagctttgat

SEQ ID NO: 2270972 - DNA, 25 bp, Homo sapien
cacaaatgggcgctgagacactgtc

SEQ ID NO: 2270973 - DNA, 25 bp, Homo sapien
ttcttttggttgcttgtctgtgtgg

SEQ ID NO: 2270974 - DNA, 25 bp, Homo sapien
ctctgcttgggctgtggggctccat

SEQ ID NO: 2270975 - DNA, 25 bp, Homo sapien
ggctctgcttgggctgtggggctcc

SEQ ID NO: 2270976 - DNA, 25 bp, Homo sapien
cttttcttttggttgcttgtctgtg

SEQ ID NO: 2270977 - DNA, 25 bp, Homo sapien
ctgggacacagaatatgagcagaaa

SEQ ID NO: 2270978 - DNA, 25 bp, Homo sapien
gacacagaatatgagcagaaataac

SEQ ID NO: 2270979 - DNA, 25 bp, Homo sapien
catcagataaaggtgaggatataat

SEQ ID NO: 2270980 - DNA, 25 bp, Homo sapien
gaatatgagcagaaataacatcaga

SEQ ID NO: 2270981 - DNA, 25 bp, Homo sapien
gagcaggtgctacaccattgtgagg

SEQ ID NO: 2270982 - DNA, 25 bp, Homo sapien
agcaggtgctacaccattgtgaggg

SEQ ID NO: 2270983 - DNA, 25 bp, Homo sapien
gcaggtgctacaccattgtgagggg

SEQ ID NO: 2270984 - DNA, 25 bp, Homo sapien
tgagcaggtgctacaccattgtgag

SEQ ID NO: 2270985 - DNA, 25 bp, Homo sapien
ccatcaggacgcgaagacagagatg

SEQ ID NO: 2270986 - DNA, 25 bp, Homo sapien
ggacgcgaagacagagatggtccaa

SEQ ID NO: 2270987 - DNA, 25 bp, Homo sapien
atcctccatcaggacgcgaagacag

SEQ ID NO: 2270988 - DNA, 25 bp, Homo sapien
tcaggacgcgaagacagagatggtc

SEQ ID NO: 2270989 - DNA, 25 bp, Homo sapien
tgagcaacaataaggtcagacaaga

SEQ ID NO: 2270990 - DNA, 25 bp, Homo sapien
attcaggtcccagccacgcagttgc

SEQ ID NO: 2270991 - DNA, 25 bp, Homo sapien
aaggtcagacaagagtgaggataaa

SEQ ID NO: 2270992 - DNA, 25 bp, Homo sapien
acgcagttgcttcacatcataaggg

SEQ ID NO: 2270993 - DNA, 25 bp, Homo sapien
catgcttcacatcattgggggacac

SEQ ID NO: 2270994 - DNA, 25 bp, Homo sapien
agggagagacactagcagatctgtc

SEQ ID NO: 2270995 - DNA, 25 bp, Homo sapien
gaggacaacgcagggagagacacta

SEQ ID NO: 2270996 - DNA, 25 bp, Homo sapien
cttcacatcattgggggacacttct

SEQ ID NO: 2270997 - DNA, 25 bp, Homo sapien
aaatgggagtgagatgcattgacgc

SEQ ID NO: 2270998 - DNA, 25 bp, Homo sapien
gagatgcattgacgctgggtgggat

SEQ ID NO: 2270999 - DNA, 25 bp, Homo sapien
ccatagccaaatgggagtgagatgc

SEQ ID NO: 2271000 - DNA, 25 bp, Homo sapien
cattcccatagccaaatgggagtga

SEQ ID NO: 2271001 - DNA, 25 bp, Homo sapien
ctgggagtactccaacgtgcaggga

SEQ ID NO: 2271002 - DNA, 25 bp, Homo sapien
tccaacgtgcagggaacatttggtg

SEQ ID NO: 2271003 - DNA, 25 bp, Homo sapien
acgtgcagggaacatttggtgtgca

SEQ ID NO: 2271004 - DNA, 25 bp, Homo sapien
caacgtgcagggaacatttggtgtg

SEQ ID NO: 2271005 - DNA, 25 bp, Homo sapien
caaatgcatctctgcattcccttaa

SEQ ID NO: 2271006 - DNA, 25 bp, Homo sapien
taattgcaccagcagtgtgcaccat

SEQ ID NO: 2271007 - DNA, 25 bp, Homo sapien
gtgtgcaccatgaccctgtgttcac

SEQ ID NO: 2271008 - DNA, 25 bp, Homo sapien
ttcccttaattgcaccagcagtgtg

SEQ ID NO: 2271009 - DNA, 25 bp, Homo sapien
tcacataggggtgagcatacaatct

SEQ ID NO: 2271010 - DNA, 25 bp, Homo sapien
gttcacataggggtgagcatacaat

SEQ ID NO: 2271011 - DNA, 25 bp, Homo sapien
acataggggtgagcatacaatctgg

SEQ ID NO: 2271012 - DNA, 25 bp, Homo sapien
taagttcacataggggtgagcatac

SEQ ID NO: 2271013 - DNA, 25 bp, Homo sapien
cagactcttccaatccccatcggac

SEQ ID NO: 2271014 - DNA, 25 bp, Homo sapien
tcagactcttccaatccccatcgga

SEQ ID NO: 2271015 - DNA, 25 bp, Homo sapien
gactcttccaatccccatcggacct

SEQ ID NO: 2271016 - DNA, 25 bp, Homo sapien
actcttccaatccccatcggacctg

SEQ ID NO: 2271017 - DNA, 25 bp, Homo sapien
ggccttcttctcaaccaccaccatg

SEQ ID NO: 2271018 - DNA, 25 bp, Homo sapien
accaccatgacgttgtccaccacca

SEQ ID NO: 2271019 - DNA, 25 bp, Homo sapien
gccttcgagctctgtaccctggctg

SEQ ID NO: 2271020 - DNA, 25 bp, Homo sapien
cccaagggcgccttcgagctctgta

SEQ ID NO: 2271021 - DNA, 25 bp, Homo sapien
gacctccagcgaatctgtggctggc

SEQ ID NO: 2271022 - DNA, 25 bp, Homo sapien
aaggacctccagcgaatctgtggct

SEQ ID NO: 2271023 - DNA, 25 bp, Homo sapien
ctccagcgaatctgtggctggccag

SEQ ID NO: 2271024 - DNA, 25 bp, Homo sapien
tccagcgaatctgtggctggccagg

SEQ ID NO: 2271025 - DNA, 25 bp, Homo sapien
gctcccatgtgtgtaatggaggtgt

SEQ ID NO: 2271026 - DNA, 25 bp, Homo sapien
acggaggttgtatatgcccagggcc

SEQ ID NO: 2271027 - DNA, 25 bp, Homo sapien
tgtgtaatggaggtgtatgtgcaac

SEQ ID NO: 2271028 - DNA, 25 bp, Homo sapien
ctctttgggtgcagtgcaggcagaa

SEQ ID NO: 2271029 - DNA, 25 bp, Homo sapien
aagcccctgccaacaaggagcgggc

SEQ ID NO: 2271030 - DNA, 25 bp, Homo sapien
aggagcgggcggcacaagtaggcag

SEQ ID NO: 2271031 - DNA, 25 bp, Homo sapien
gaggcggctgtatcttcagagttgc

SEQ ID NO: 2271032 - DNA, 25 bp, Homo sapien
tgggcatgtccacttgatggagctg

SEQ ID NO: 2271033 - DNA, 25 bp, Homo sapien
gatgcgaacacgatattccttaatg

SEQ ID NO: 2271034 - DNA, 25 bp, Homo sapien
caaggatgcgaacacgatattcctt

SEQ ID NO: 2271035 - DNA, 25 bp, Homo sapien
tgcgaacacgatattccttaatgat

SEQ ID NO: 2271036 - DNA, 25 bp, Homo sapien
aataaaggtagtgatgaaaggaaca

SEQ ID NO: 2271037 - DNA, 25 bp, Homo sapien
ttctaggggactcattccagttaaa

SEQ ID NO: 2271038 - DNA, 25 bp, Homo sapien
tctaggggactcattccagttaaaa

SEQ ID NO: 2271039 - DNA, 25 bp, Homo sapien
taggggactcattccagttaaaaga

SEQ ID NO: 2271040 - DNA, 25 bp, Homo sapien
catcttcaagaagtggaggtcctcc

SEQ ID NO: 2271041 - DNA, 25 bp, Homo sapien
gatgccaaggccctggcttccagag

SEQ ID NO: 2271042 - DNA, 25 bp, Homo sapien
ggatgccaaggccctggcttccaga

SEQ ID NO: 2271043 - DNA, 25 bp, Homo sapien
gccttaacatggtgccctccttggg

SEQ ID NO: 2271044 - DNA, 25 bp, Homo sapien
ccttggggctccaacagagcaaagc

SEQ ID NO: 2271045 - DNA, 25 bp, Homo sapien
tcttcccccagggttgccttcctgc

SEQ ID NO: 2271046 - DNA, 25 bp, Homo sapien
gcacaggccatcctctcctgcacag

SEQ ID NO: 2271047 - DNA, 25 bp, Homo sapien
tgcaatgatgtcatcccccactagc

SEQ ID NO: 2271048 - DNA, 25 bp, Homo sapien
tctgcaatgatgtcatcccccacta

SEQ ID NO: 2271049 - DNA, 25 bp, Homo sapien
caatgatgtcatcccccactagcat

SEQ ID NO: 2271050 - DNA, 25 bp, Homo sapien
ctctgcaatgatgtcatcccccact

SEQ ID NO: 2271051 - DNA, 25 bp, Homo sapien
tgcagcctgggacattcatgtagct

SEQ ID NO: 2271052 - DNA, 25 bp, Homo sapien
cattcatgtagctgcgctccaagtg

SEQ ID NO: 2271053 - DNA, 25 bp, Homo sapien
cctgggacattcatgtagctgcgct

SEQ ID NO: 2271054 - DNA, 25 bp, Homo sapien
catgtagctgcgctccaagtgaagg

SEQ ID NO: 2271055 - DNA, 25 bp, Homo sapien
gggtgcatgtgtccaccccatggaa

SEQ ID NO: 2271056 - DNA, 25 bp, Homo sapien
gtgtgaggcaactacttgctcagtg

SEQ ID NO: 2271057 - DNA, 25 bp, Homo sapien
aactacttgctcagtgtttctgagc

SEQ ID NO: 2271058 - DNA, 25 bp, Homo sapien
tgcatgtgtccaccccatggaactg

SEQ ID NO: 2271059 - DNA, 25 bp, Homo sapien
tgtgatcccggccaacatctgggtg

SEQ ID NO: 2271060 - DNA, 25 bp, Homo sapien
ccggccaacatctgggtgtgctgca

SEQ ID NO: 2271061 - DNA, 25 bp, Homo sapien
cggccaacatctgggtgtgctgcac

SEQ ID NO: 2271062 - DNA, 25 bp, Homo sapien
atcccggccaacatctgggtgtgct

SEQ ID NO: 2271063 - DNA, 25 bp, Homo sapien
cctgaagactcaggctccttagcct

SEQ ID NO: 2271064 - DNA, 25 bp, Homo sapien
gacaccagacccctcctgaagactc

SEQ ID NO: 2271065 - DNA, 25 bp, Homo sapien
ctcaacctgacccagacaccagacc

SEQ ID NO: 2271066 - DNA, 25 bp, Homo sapien
cctcctgaagactcaggctccttag

SEQ ID NO: 2271067 - DNA, 25 bp, Homo sapien
atcctgcctccggtacccgggatag

SEQ ID NO: 2271068 - DNA, 25 bp, Homo sapien
ctgcctccggtacccgggatagttg

SEQ ID NO: 2271069 - DNA, 25 bp, Homo sapien
cgaagcaatactcttgaatgatcac

SEQ ID NO: 2271070 - DNA, 25 bp, Homo sapien
cgaggatgccgaagcaatactcttg

SEQ ID NO: 2271071 - DNA, 25 bp, Homo sapien
tttctagcttgaaatacagggtatt

SEQ ID NO: 2271072 - DNA, 25 bp, Homo sapien
ctcttcatttactaagactatgtaa

SEQ ID NO: 2271073 - DNA, 25 bp, Homo sapien
tatgtaattctcagagaggacacac

SEQ ID NO: 2271074 - DNA, 25 bp, Homo sapien
tactaagactatgtaattctcagag

SEQ ID NO: 2271075 - DNA, 25 bp, Homo sapien
gtcctgctttgctacgtgatggatt

SEQ ID NO: 2271076 - DNA, 25 bp, Homo sapien
ctttgctacgtgatggatttgcagg

SEQ ID NO: 2271077 - DNA, 25 bp, Homo sapien
ctgctttgctacgtgatggatttgc

SEQ ID NO: 2271078 - DNA, 25 bp, Homo sapien
cctgctttgctacgtgatggatttg

SEQ ID NO: 2271079 - DNA, 25 bp, Homo sapien
tctggagagttcttgcgcagaggta

SEQ ID NO: 2271080 - DNA, 25 bp, Homo sapien
ctctggagagttcttgcgcagaggt

SEQ ID NO: 2271081 - DNA, 25 bp, Homo sapien
agttcttgcgcagaggtagattgtt

SEQ ID NO: 2271082 - DNA, 25 bp, Homo sapien
gagagttcttgcgcagaggtagatt

SEQ ID NO: 2271083 - DNA, 25 bp, Homo sapien
caggcgctgcactcaaaggggtgta

SEQ ID NO: 2271084 - DNA, 25 bp, Homo sapien
gcagatgcgcattcttccaactgca

SEQ ID NO: 2271085 - DNA, 25 bp, Homo sapien
accagctccgcagatgcgcattctt

SEQ ID NO: 2271086 - DNA, 25 bp, Homo sapien
gctgcactcaaaggggtgtaggccc

SEQ ID NO: 2271087 - DNA, 25 bp, Homo sapien
cacagagcatctccgccttgtgagc

SEQ ID NO: 2271088 - DNA, 25 bp, Homo sapien
cagcaggggatagtcatcgggcctc

SEQ ID NO: 2271089 - DNA, 25 bp, Homo sapien
tagtcatcgggcctcggggggtatg

SEQ ID NO: 2271090 - DNA, 25 bp, Homo sapien
ggccacagagcatctccgccttgtg

SEQ ID NO: 2271091 - DNA, 25 bp, Homo sapien
ccgcagcagcggttgcggtgcctgt

SEQ ID NO: 2271092 - DNA, 25 bp, Homo sapien
tgctggggaccggagccctttggcc

SEQ ID NO: 2271093 - DNA, 25 bp, Homo sapien
gggaccggagccctttggccagtgc

SEQ ID NO: 2271094 - DNA, 25 bp, Homo sapien
cgcagcagcggttgcggtgcctgtt

SEQ ID NO: 2271095 - DNA, 25 bp, Homo sapien
tcggcctgcgcgcacgctgttgtgc

SEQ ID NO: 2271096 - DNA, 25 bp, Homo sapien
cattgtcggcctgcgcgcacgctgt

SEQ ID NO: 2271097 - DNA, 25 bp, Homo sapien
gccttgacgacccagaggctcccgc

SEQ ID NO: 2271098 - DNA, 25 bp, Homo sapien
cagccgccagggttggccattgtcg

SEQ ID NO: 2271099 - DNA, 25 bp, Homo sapien
ccaaggagcattccaaagggcctct

SEQ ID NO: 2271100 - DNA, 25 bp, Homo sapien
tccaaggagcattccaaagggcctc

SEQ ID NO: 2271101 - DNA, 25 bp, Homo sapien
tcgaggcaaatagaggctccgagta

SEQ ID NO: 2271102 - DNA, 25 bp, Homo sapien
gtcgaggcaaatagaggctccgagt

SEQ ID NO: 2271103 - DNA, 25 bp, Homo sapien
cgaggcaaatagaggctccgagtac

SEQ ID NO: 2271104 - DNA, 25 bp, Homo sapien
aggtcgaggcaaatagaggctccga

SEQ ID NO: 2271105 - DNA, 25 bp, Homo sapien
cccggtaggtcagcgagccctcagg

SEQ ID NO: 2271106 - DNA, 25 bp, Homo sapien
ctctggcacccggtaggtcagcgag

SEQ ID NO: 2271107 - DNA, 25 bp, Homo sapien
agcctctctggcacccggtaggtca

SEQ ID NO: 2271108 - DNA, 25 bp, Homo sapien
ggcacccggtaggtcagcgagccct

SEQ ID NO: 2271109 - DNA, 25 bp, Homo sapien
ccagctccacctgaacggccagcag

SEQ ID NO: 2271110 - DNA, 25 bp, Homo sapien
gcacagcctgctgtgcccgctgggc

SEQ ID NO: 2271111 - DNA, 25 bp, Homo sapien
aggcacagcctgctgtgcccgctgg

SEQ ID NO: 2271112 - DNA, 25 bp, Homo sapien
tccacctgaacggccagcagctcct

SEQ ID NO: 2271113 - DNA, 25 bp, Homo sapien
aaaggccttcctggcttgggcatta

SEQ ID NO: 2271114 - DNA, 25 bp, Homo sapien
ctgccgagaaaaggccttcctggct

SEQ ID NO: 2271115 - DNA, 25 bp, Homo sapien
ccttcctggcttgggcattaaccgg

SEQ ID NO: 2271116 - DNA, 25 bp, Homo sapien
gccgagaaaaggccttcctggcttg

SEQ ID NO: 2271117 - DNA, 25 bp, Homo sapien
gatgacggcgcctctgcggtctagg

SEQ ID NO: 2271118 - DNA, 25 bp, Homo sapien
atgacggcgcctctgcggtctaggt

SEQ ID NO: 2271119 - DNA, 25 bp, Homo sapien
gttccccaaagagtcacatcgacgc

SEQ ID NO: 2271120 - DNA, 25 bp, Homo sapien
aagagtcacatcgacgccgagctgc

SEQ ID NO: 2271121 - DNA, 25 bp, Homo sapien
agccacactggtccgtggcaactcc

SEQ ID NO: 2271122 - DNA, 25 bp, Homo sapien
cccaaagagtcacatcgacgccgag

SEQ ID NO: 2271123 - DNA, 25 bp, Homo sapien
tcttcatcttcgtcagtgatcaggg

SEQ ID NO: 2271124 - DNA, 25 bp, Homo sapien
ttcatcttcgtcagtgatcagggct

SEQ ID NO: 2271125 - DNA, 25 bp, Homo sapien
catcttcgtcagtgatcagggctga

SEQ ID NO: 2271126 - DNA, 25 bp, Homo sapien
tcttcgtcagtgatcagggctgaca

SEQ ID NO: 2271127 - DNA, 25 bp, Homo sapien
agagatgaacaggatgcttctcttc

SEQ ID NO: 2271128 - DNA, 25 bp, Homo sapien
tgatgttcaccagatattccttggt

SEQ ID NO: 2271129 - DNA, 25 bp, Homo sapien
gggttactccgaaagaacaacatga

SEQ ID NO: 2271130 - DNA, 25 bp, Homo sapien
ttgcagagatgaacaggatgcttct

SEQ ID NO: 2271131 - DNA, 25 bp, Homo sapien
ctggatcccgttggcaatgatccac

SEQ ID NO: 2271132 - DNA, 25 bp, Homo sapien
ggctggatcccgttggcaatgatcc

SEQ ID NO: 2271133 - DNA, 25 bp, Homo sapien
gggctggatcccgttggcaatgatc

SEQ ID NO: 2271134 - DNA, 25 bp, Homo sapien
gatcccgttggcaatgatccaccca

SEQ ID NO: 2271135 - DNA, 25 bp, Homo sapien
taatccggataccactcaattggag

SEQ ID NO: 2271136 - DNA, 25 bp, Homo sapien
tccggataccactcaattggagtgg

SEQ ID NO: 2271137 - DNA, 25 bp, Homo sapien
cataatccggataccactcaattgg

SEQ ID NO: 2271138 - DNA, 25 bp, Homo sapien
cttcataatccggataccactcaat

SEQ ID NO: 2271139 - DNA, 25 bp, Homo sapien
cttgttagatcctgcgaagttgtgg

SEQ ID NO: 2271140 - DNA, 25 bp, Homo sapien
atcttgttagatcctgcgaagttgt

SEQ ID NO: 2271141 - DNA, 25 bp, Homo sapien
ttgttagatcctgcgaagttgtggt

SEQ ID NO: 2271142 - DNA, 25 bp, Homo sapien
tcttgttagatcctgcgaagttgtg

SEQ ID NO: 2271143 - DNA, 25 bp, Homo sapien
cacatggggtcattcctcatgtttc

SEQ ID NO: 2271144 - DNA, 25 bp, Homo sapien
agggctcagaaaggtgacccaagca

SEQ ID NO: 2271145 - DNA, 25 bp, Homo sapien
tggggtcattcctcatgtttcccag

SEQ ID NO: 2271146 - DNA, 25 bp, Homo sapien
ctgggaacacatggggtcattcctc

SEQ ID NO: 2271147 - DNA, 25 bp, Homo sapien
gacgtctctgttccctcttcaggtg

SEQ ID NO: 2271148 - DNA, 25 bp, Homo sapien
tattgcaggggattgcgccacaggt

SEQ ID NO: 2271149 - DNA, 25 bp, Homo sapien
tgcgccacaggtccttacataggat

SEQ ID NO: 2271150 - DNA, 25 bp, Homo sapien
ggcttcatcctcttgtagtattgca

SEQ ID NO: 2271151 - DNA, 25 bp, Homo sapien
gcccaatgccatgaacgtcctggat

SEQ ID NO: 2271152 - DNA, 25 bp, Homo sapien
gaaatggacgattcttcactgggct

SEQ ID NO: 2271153 - DNA, 25 bp, Homo sapien
taacgtgccttttcagcccaatgcc

SEQ ID NO: 2271154 - DNA, 25 bp, Homo sapien
gctatcacccgctttgcagtgcagt

SEQ ID NO: 2271155 - DNA, 25 bp, Homo sapien
ttgacagccgtggaatcaagtgcca

SEQ ID NO: 2271156 - DNA, 25 bp, Homo sapien
ggttgacagccgtggaatcaagtgc

SEQ ID NO: 2271157 - DNA, 25 bp, Homo sapien
gacagccgtggaatcaagtgccaca

SEQ ID NO: 2271158 - DNA, 25 bp, Homo sapien
cagccgtggaatcaagtgccacaga

SEQ ID NO: 2271159 - DNA, 25 bp, Homo sapien
ggcaacagcttaaggaaatccatca

SEQ ID NO: 2271160 - DNA, 25 bp, Homo sapien
tcctcctaccacgtgttacaaactg

SEQ ID NO: 2271161 - DNA, 25 bp, Homo sapien
caagatgcactggaccctaaaagca

SEQ ID NO: 2271162 - DNA, 25 bp, Homo sapien
tacaaactgttctgcgcaatccctg

SEQ ID NO: 2271163 - DNA, 25 bp, Homo sapien
tcctgaatttttgtgactcgatctc

SEQ ID NO: 2271164 - DNA, 25 bp, Homo sapien
tttgtgactcgatctctttttcctt

SEQ ID NO: 2271165 - DNA, 25 bp, Homo sapien
taggtaaaatctgatgctccatcat

SEQ ID NO: 2271166 - DNA, 25 bp, Homo sapien
ttcctgtgcataagaccatgctgag

SEQ ID NO: 2271167 - DNA, 25 bp, Homo sapien
cacagtaggatagagggcagcttga

SEQ ID NO: 2271168 - DNA, 25 bp, Homo sapien
aggaggacaagactcccgctccaga

SEQ ID NO: 2271169 - DNA, 25 bp, Homo sapien
gtgtctttgacatgcacacagtagg

SEQ ID NO: 2271170 - DNA, 25 bp, Homo sapien
tccgactgttttcagaataatttgc

SEQ ID NO: 2271171 - DNA, 25 bp, Homo sapien
tcagtgcccttagcatctgtggccc

SEQ ID NO: 2271172 - DNA, 25 bp, Homo sapien
tccgagttactgaggcacggtgcaa

SEQ ID NO: 2271173 - DNA, 25 bp, Homo sapien
tggaagaagcattacacagcctgta

SEQ ID NO: 2271174 - DNA, 25 bp, Homo sapien
tgtggcccacgtgcacggatattca

SEQ ID NO: 2271175 - DNA, 25 bp, Homo sapien
aagacaccaagtccctgtcggtaca

SEQ ID NO: 2271176 - DNA, 25 bp, Homo sapien
gacaccaagtccctgtcggtacaaa

SEQ ID NO: 2271177 - DNA, 25 bp, Homo sapien
agacaccaagtccctgtcggtacaa

SEQ ID NO: 2271178 - DNA, 25 bp, Homo sapien
tgttttatcatacagggaccagact

SEQ ID NO: 2271179 - DNA, 25 bp, Homo sapien
tgtggaaattggcagcctggctgtc

SEQ ID NO: 2271180 - DNA, 25 bp, Homo sapien
gagactagaggacttaggagtttcc

SEQ ID NO: 2271181 - DNA, 25 bp, Homo sapien
gctatagttacaaggctaccaaaga

SEQ ID NO: 2271182 - DNA, 25 bp, Homo sapien
cgagatgtcggcgtgggtcggaaag

SEQ ID NO: 2271183 - DNA, 25 bp, Homo sapien
ctttgctacgtgatggatttgcagg

SEQ ID NO: 2271184 - DNA, 25 bp, Homo sapien
gtcctgctttgctacgtgatggatt

SEQ ID NO: 2271185 - DNA, 25 bp, Homo sapien
gtcggaaagcatgcggaagtcctgc

SEQ ID NO: 2271186 - DNA, 25 bp, Homo sapien
cagcaggggatagtcatcgggcctc

SEQ ID NO: 2271187 - DNA, 25 bp, Homo sapien
cacagagcatctccgccttgtgagc

SEQ ID NO: 2271188 - DNA, 25 bp, Homo sapien
tagtcatcgggcctcggggggtatg

SEQ ID NO: 2271189 - DNA, 25 bp, Homo sapien
ggccacagagcatctccgccttgtg

SEQ ID NO: 2271190 - DNA, 25 bp, Homo sapien
cccgtgggtcttgcagggagcgggt

SEQ ID NO: 2271191 - DNA, 25 bp, Homo sapien
tctcagcagggcgacgcccgtgggt

SEQ ID NO: 2271192 - DNA, 25 bp, Homo sapien
gtcttgcagggagcgggtctgctgg

SEQ ID NO: 2271193 - DNA, 25 bp, Homo sapien
tcagcagggcgacgcccgtgggtct

SEQ ID NO: 2271194 - DNA, 25 bp, Homo sapien
tcggcctgcgcgcacgctgttgtgc

SEQ ID NO: 2271195 - DNA, 25 bp, Homo sapien
gccttgacgacccagaggctcccgc

SEQ ID NO: 2271196 - DNA, 25 bp, Homo sapien
cattgtcggcctgcgcgcacgctgt

SEQ ID NO: 2271197 - DNA, 25 bp, Homo sapien
cagccgccagggttggccattgtcg

SEQ ID NO: 2271198 - DNA, 25 bp, Homo sapien
tacggaggtaatacagcagatgcag

SEQ ID NO: 2271199 - DNA, 25 bp, Homo sapien
cacactctcacaggtcgaggcaaat

SEQ ID NO: 2271200 - DNA, 25 bp, Homo sapien
gctgaggtggaattgatctgctgta

SEQ ID NO: 2271201 - DNA, 25 bp, Homo sapien
acatctctcttcgttaggcaggcca

SEQ ID NO: 2271202 - DNA, 25 bp, Homo sapien
gtaggtcagcgagccctcagggcgc

SEQ ID NO: 2271203 - DNA, 25 bp, Homo sapien
taggtcagcgagccctcagggcgca

SEQ ID NO: 2271204 - DNA, 25 bp, Homo sapien
aggtcagcgagccctcagggcgcat

SEQ ID NO: 2271205 - DNA, 25 bp, Homo sapien
ctcccgccgctccacgaggccctcc

SEQ ID NO: 2271206 - DNA, 25 bp, Homo sapien
cctcccgccgctccacgaggccctc

SEQ ID NO: 2271207 - DNA, 25 bp, Homo sapien
tcccgccgctccacgaggccctcct

SEQ ID NO: 2271208 - DNA, 25 bp, Homo sapien
gatgacggcgcctctgcggtctagg

SEQ ID NO: 2271209 - DNA, 25 bp, Homo sapien
atgacggcgcctctgcggtctaggt

SEQ ID NO: 2271210 - DNA, 25 bp, Homo sapien
gaagaaacactgagaaggatacaac

SEQ ID NO: 2271211 - DNA, 25 bp, Homo sapien
acactgagaaggatacaacattggc

SEQ ID NO: 2271212 - DNA, 25 bp, Homo sapien
tagaaaggccgaagaaacactgaga

SEQ ID NO: 2271213 - DNA, 25 bp, Homo sapien
aaggccgaagaaacactgagaagga

SEQ ID NO: 2271214 - DNA, 25 bp, Homo sapien
tccaggctgaccatgtagctcagca

SEQ ID NO: 2271215 - DNA, 25 bp, Homo sapien
ccaggctgaccatgtagctcagcat

SEQ ID NO: 2271216 - DNA, 25 bp, Homo sapien
ctccaggctgaccatgtagctcagc

SEQ ID NO: 2271217 - DNA, 25 bp, Homo sapien
agagatgaacaggatgcttctcttc

SEQ ID NO: 2271218 - DNA, 25 bp, Homo sapien
tgatgttcaccagatattccttggt

SEQ ID NO: 2271219 - DNA, 25 bp, Homo sapien
gggttactccgaaagaacaacatga

SEQ ID NO: 2271220 - DNA, 25 bp, Homo sapien
atgaacaggatgcttctcttcttcc

SEQ ID NO: 2271221 - DNA, 25 bp, Homo sapien
cataatccagataccactcaattgg

SEQ ID NO: 2271222 - DNA, 25 bp, Homo sapien
aatccagataccactcaattggagt

SEQ ID NO: 2271223 - DNA, 25 bp, Homo sapien
ttcataatccagataccactcaatt

SEQ ID NO: 2271224 - DNA, 25 bp, Homo sapien
gataggcctccacttcataatccag

SEQ ID NO: 2271225 - DNA, 25 bp, Homo sapien
tcttgttagatcctgcgaagttgtg

SEQ ID NO: 2271226 - DNA, 25 bp, Homo sapien
cttgttagatcctgcgaagttgtgg

SEQ ID NO: 2271227 - DNA, 25 bp, Homo sapien
ttgttagatcctgcgaagttgtggt

SEQ ID NO: 2271228 - DNA, 25 bp, Homo sapien
atcttgttagatcctgcgaagttgt

SEQ ID NO: 2271229 - DNA, 25 bp, Homo sapien
gacgtctctgttccctcttcaggtg

SEQ ID NO: 2271230 - DNA, 25 bp, Homo sapien
tattgcaggggattgcgccacaggt

SEQ ID NO: 2271231 - DNA, 25 bp, Homo sapien
ggcttcatcctcttgtagtattgca

SEQ ID NO: 2271232 - DNA, 25 bp, Homo sapien
tgcgccacaggtccttacataggat

SEQ ID NO: 2271233 - DNA, 25 bp, Homo sapien
cagccgtggaatcaagtgccacaga

SEQ ID NO: 2271234 - DNA, 25 bp, Homo sapien
ttgacagccgtggaatcaagtgcca

SEQ ID NO: 2271235 - DNA, 25 bp, Homo sapien
ggttgacagccgtggaatcaagtgc

SEQ ID NO: 2271236 - DNA, 25 bp, Homo sapien
gacagccgtggaatcaagtgccaca

SEQ ID NO: 2271237 - DNA, 25 bp, Homo sapien
ttgtggtttggggcaaggatgacca

SEQ ID NO: 2271238 - DNA, 25 bp, Homo sapien
tttgtggtttggggcaaggatgacc

SEQ ID NO: 2271239 - DNA, 25 bp, Homo sapien
tgtggtttggggcaaggatgaccag

SEQ ID NO: 2271240 - DNA, 25 bp, Homo sapien
aaacacaaactcatgttaaaacgca

SEQ ID NO: 2271241 - DNA, 25 bp, Homo sapien
caaactcatgttaaaacgcattttc

SEQ ID NO: 2271242 - DNA, 25 bp, Homo sapien
catttgtgatcccttaaacttcctc

SEQ ID NO: 2271243 - DNA, 25 bp, Homo sapien
tgttaaaacgcattttctctgagcc

SEQ ID NO: 2271244 - DNA, 25 bp, Homo sapien
tttgtgactcgatctctttttcctt

SEQ ID NO: 2271245 - DNA, 25 bp, Homo sapien
ttcctgtgcataagaccatgctgag

SEQ ID NO: 2271246 - DNA, 25 bp, Homo sapien
taggtaaaatctgatgctccatcat

SEQ ID NO: 2271247 - DNA, 25 bp, Homo sapien
tcctgaatttttgtgactcgatctc

SEQ ID NO: 2271248 - DNA, 25 bp, Homo sapien
cacagtaggatagagggcagcttga

SEQ ID NO: 2271249 - DNA, 25 bp, Homo sapien
aggaggacaagactcccgctccaga

SEQ ID NO: 2271250 - DNA, 25 bp, Homo sapien
gtgtctttgacatgcacacagtagg

SEQ ID NO: 2271251 - DNA, 25 bp, Homo sapien
tccgactgttttcagaataatttgc

SEQ ID NO: 2271252 - DNA, 25 bp, Homo sapien
tccgagttactgaggcacggtgcaa

SEQ ID NO: 2271253 - DNA, 25 bp, Homo sapien
tggaagaagcattacacagcctgta

SEQ ID NO: 2271254 - DNA, 25 bp, Homo sapien
tgtggcccacgtgcacggatattca

SEQ ID NO: 2271255 - DNA, 25 bp, Homo sapien
tcagtgcccttagcatctgtggccc

SEQ ID NO: 2271256 - DNA, 25 bp, Homo sapien
aagacaccaagtccctgtcggtaca

SEQ ID NO: 2271257 - DNA, 25 bp, Homo sapien
gacaccaagtccctgtcggtacaaa

SEQ ID NO: 2271258 - DNA, 25 bp, Homo sapien
agacaccaagtccctgtcggtacaa

SEQ ID NO: 2271259 - DNA, 25 bp, Homo sapien
tgttttatcatacagggaccagact

SEQ ID NO: 2271260 - DNA, 25 bp, Homo sapien
tgtggaaattggcagcctggctgtc

SEQ ID NO: 2271261 - DNA, 25 bp, Homo sapien
ttatttgtctcctagtgccattgcc

SEQ ID NO: 2271262 - DNA, 25 bp, Homo sapien
gagactagaggacttaggagtttcc

SEQ ID NO: 2271263 - DNA, 25 bp, Homo sapien
gtttggcacacgagatgtcggcgtg

SEQ ID NO: 2271264 - DNA, 25 bp, Homo sapien
tctggagagttcttgcgcagaggta

SEQ ID NO: 2271265 - DNA, 25 bp, Homo sapien
ctttgctacgtgatggatttgcagg

SEQ ID NO: 2271266 - DNA, 25 bp, Homo sapien
gtcggaaagcatgcggaagtcctgc

SEQ ID NO: 2271267 - DNA, 25 bp, Homo sapien
cacagagcatctccgccttgtgagc

SEQ ID NO: 2271268 - DNA, 25 bp, Homo sapien
cagcaggggatagtcatcgggcctc

SEQ ID NO: 2271269 - DNA, 25 bp, Homo sapien
tagtcatcgggcctcggggggtatg

SEQ ID NO: 2271270 - DNA, 25 bp, Homo sapien
ggccacagagcatctccgccttgtg

SEQ ID NO: 2271271 - DNA, 25 bp, Homo sapien
ccgcagcagcggttgcggtgcctgt

SEQ ID NO: 2271272 - DNA, 25 bp, Homo sapien
cgcagcagcggttgcggtgcctgtt

SEQ ID NO: 2271273 - DNA, 25 bp, Homo sapien
gggaccggagccctttggccagtgc

SEQ ID NO: 2271274 - DNA, 25 bp, Homo sapien
tgctggggaccggagccctttggcc

SEQ ID NO: 2271275 - DNA, 25 bp, Homo sapien
tcccgtcgtggccagtcaatgggag

SEQ ID NO: 2271276 - DNA, 25 bp, Homo sapien
gacttcctcccgtcgtggccagtca

SEQ ID NO: 2271277 - DNA, 25 bp, Homo sapien
ttcctcccgtcgtggccagtcaatg

SEQ ID NO: 2271278 - DNA, 25 bp, Homo sapien
ccaggccgacttcctcccgtcgtgg

SEQ ID NO: 2271279 - DNA, 25 bp, Homo sapien
cccggtaggtcagcgagccctcagg

SEQ ID NO: 2271280 - DNA, 25 bp, Homo sapien
agcctctctggcacccggtaggtca

SEQ ID NO: 2271281 - DNA, 25 bp, Homo sapien
ggcacccggtaggtcagcgagccct

SEQ ID NO: 2271282 - DNA, 25 bp, Homo sapien
ctctggcacccggtaggtcagcgag

SEQ ID NO: 2271283 - DNA, 25 bp, Homo sapien
atgacggcgcctctgcggtctaggt

SEQ ID NO: 2271284 - DNA, 25 bp, Homo sapien
gatgacggcgcctctgcggtctagg

SEQ ID NO: 2271285 - DNA, 25 bp, Homo sapien
cccaaagagtcacatcgacgccgag

SEQ ID NO: 2271286 - DNA, 25 bp, Homo sapien
gttccccaaagagtcacatcgacgc

SEQ ID NO: 2271287 - DNA, 25 bp, Homo sapien
aagagtcacatcgacgccgagctgc

SEQ ID NO: 2271288 - DNA, 25 bp, Homo sapien
agccacactggtccgtggcaactcc

SEQ ID NO: 2271289 - DNA, 25 bp, Homo sapien
tccaggctgaccatgtagctcagca

SEQ ID NO: 2271290 - DNA, 25 bp, Homo sapien
ctccaggctgaccatgtagctcagc

SEQ ID NO: 2271291 - DNA, 25 bp, Homo sapien
ccaggctgaccatgtagctcagcat

SEQ ID NO: 2271292 - DNA, 25 bp, Homo sapien
agagatgaacaggatgcttctcttc

SEQ ID NO: 2271293 - DNA, 25 bp, Homo sapien
tgatgttcaccagatattccttggt

SEQ ID NO: 2271294 - DNA, 25 bp, Homo sapien
gggttactccgaaagaacaacatga

SEQ ID NO: 2271295 - DNA, 25 bp, Homo sapien
atgaacaggatgcttctcttcttcc

SEQ ID NO: 2271296 - DNA, 25 bp, Homo sapien
ctggatcccgttggcaatgatccac

SEQ ID NO: 2271297 - DNA, 25 bp, Homo sapien
ggctggatcccgttggcaatgatcc

SEQ ID NO: 2271298 - DNA, 25 bp, Homo sapien
gggctggatcccgttggcaatgatc

SEQ ID NO: 2271299 - DNA, 25 bp, Homo sapien
gatcccgttggcaatgatccaccca

SEQ ID NO: 2271300 - DNA, 25 bp, Homo sapien
tccggataccactcaattggagtgg

SEQ ID NO: 2271301 - DNA, 25 bp, Homo sapien
taatccggataccactcaattggag

SEQ ID NO: 2271302 - DNA, 25 bp, Homo sapien
cataatccggataccactcaattgg

SEQ ID NO: 2271303 - DNA, 25 bp, Homo sapien
cttcataatccggataccactcaat

SEQ ID NO: 2271304 - DNA, 25 bp, Homo sapien
tcttgttagatcctgcgaagttgtg

SEQ ID NO: 2271305 - DNA, 25 bp, Homo sapien
ttgttagatcctgcgaagttgtggt

SEQ ID NO: 2271306 - DNA, 25 bp, Homo sapien
cttgttagatcctgcgaagttgtgg

SEQ ID NO: 2271307 - DNA, 25 bp, Homo sapien
atcttgttagatcctgcgaagttgt

SEQ ID NO: 2271308 - DNA, 25 bp, Homo sapien
gacgtctctgttccctcttcaggtg

SEQ ID NO: 2271309 - DNA, 25 bp, Homo sapien
tattgcaggggattgcgccacaggt

SEQ ID NO: 2271310 - DNA, 25 bp, Homo sapien
tgcgccacaggtccttacataggat

SEQ ID NO: 2271311 - DNA, 25 bp, Homo sapien
ggcttcatcctcttgtagtattgca

SEQ ID NO: 2271312 - DNA, 25 bp, Homo sapien
cagccgtggaatcaagtgccacaga

SEQ ID NO: 2271313 - DNA, 25 bp, Homo sapien
ttgacagccgtggaatcaagtgcca

SEQ ID NO: 2271314 - DNA, 25 bp, Homo sapien
ggttgacagccgtggaatcaagtgc

SEQ ID NO: 2271315 - DNA, 25 bp, Homo sapien
gacagccgtggaatcaagtgccaca

SEQ ID NO: 2271316 - DNA, 25 bp, Homo sapien
aaacacaaactcatgttaaaacgca

SEQ ID NO: 2271317 - DNA, 25 bp, Homo sapien
catttgtgatcccttaaacttcctc

SEQ ID NO: 2271318 - DNA, 25 bp, Homo sapien
caaactcatgttaaaacgcattttc

SEQ ID NO: 2271319 - DNA, 25 bp, Homo sapien
tgttaaaacgcattttctctgagcc

SEQ ID NO: 2271320 - DNA, 25 bp, Homo sapien
taggtaaaatctgatgctccatcat

SEQ ID NO: 2271321 - DNA, 25 bp, Homo sapien
tttgtgactcgatctctttttcctt

SEQ ID NO: 2271322 - DNA, 25 bp, Homo sapien
tcctgaatttttgtgactcgatctc

SEQ ID NO: 2271323 - DNA, 25 bp, Homo sapien
ttcctgtgcataagaccatgctgag

SEQ ID NO: 2271324 - DNA, 25 bp, Homo sapien
cacagtaggatagagggcagcttga

SEQ ID NO: 2271325 - DNA, 25 bp, Homo sapien
aggaggacaagactcccgctccaga

SEQ ID NO: 2271326 - DNA, 25 bp, Homo sapien
gtgtctttgacatgcacacagtagg

SEQ ID NO: 2271327 - DNA, 25 bp, Homo sapien
tccgactgttttcagaataatttgc

SEQ ID NO: 2271328 - DNA, 25 bp, Homo sapien
cacggtgcaaatttgtcagtgccct

SEQ ID NO: 2271329 - DNA, 25 bp, Homo sapien
tggaagaagcattacacagcctgta

SEQ ID NO: 2271330 - DNA, 25 bp, Homo sapien
tccgagttactgaggcacggtgcaa

SEQ ID NO: 2271331 - DNA, 25 bp, Homo sapien
tcagtgcccttagcatctgtggccc

SEQ ID NO: 2271332 - DNA, 25 bp, Homo sapien
tgttttatcatacagggaccagact

SEQ ID NO: 2271333 - DNA, 25 bp, Homo sapien
tgtggaaattggcagcctggctgtc

SEQ ID NO: 2271334 - DNA, 25 bp, Homo sapien
ttatttgtctcctagtgccattgcc

SEQ ID NO: 2271335 - DNA, 25 bp, Homo sapien
gagactagaggacttaggagtttcc

SEQ ID NO: 2271336 - DNA, 25 bp, Homo sapien
gtttggcacacgagatgtcggcgtg

SEQ ID NO: 2271337 - DNA, 25 bp, Homo sapien
tctggagagttcttgcgcagaggta

SEQ ID NO: 2271338 - DNA, 25 bp, Homo sapien
ctttgctacgtgatggatttgcagg

SEQ ID NO: 2271339 - DNA, 25 bp, Homo sapien
gtcggaaagcatgcggaagtcctgc

SEQ ID NO: 2271340 - DNA, 25 bp, Homo sapien
cacagagcatctccgccttgtgagc

SEQ ID NO: 2271341 - DNA, 25 bp, Homo sapien
cagcaggggatagtcatcgggcctc

SEQ ID NO: 2271342 - DNA, 25 bp, Homo sapien
tagtcatcgggcctcggggggtatg

SEQ ID NO: 2271343 - DNA, 25 bp, Homo sapien
ggccacagagcatctccgccttgtg

SEQ ID NO: 2271344 - DNA, 25 bp, Homo sapien
tcggcctgcgcgcacgctgttgtgc

SEQ ID NO: 2271345 - DNA, 25 bp, Homo sapien
cattgtcggcctgcgcgcacgctgt

SEQ ID NO: 2271346 - DNA, 25 bp, Homo sapien
gccttgacgacccagaggctcccgc

SEQ ID NO: 2271347 - DNA, 25 bp, Homo sapien
cagccgccagggttggccattgtcg

SEQ ID NO: 2271348 - DNA, 25 bp, Homo sapien
cccggtaggtcagcgagccctcagg

SEQ ID NO: 2271349 - DNA, 25 bp, Homo sapien
ctctggcacccggtaggtcagcgag

SEQ ID NO: 2271350 - DNA, 25 bp, Homo sapien
agcctctctggcacccggtaggtca

SEQ ID NO: 2271351 - DNA, 25 bp, Homo sapien
ggcacccggtaggtcagcgagccct

SEQ ID NO: 2271352 - DNA, 25 bp, Homo sapien
ctcccgccgctccacgaggccctcc

SEQ ID NO: 2271353 - DNA, 25 bp, Homo sapien
cctcccgccgctccacgaggccctc

SEQ ID NO: 2271354 - DNA, 25 bp, Homo sapien
tcccgccgctccacgaggccctcct

SEQ ID NO: 2271355 - DNA, 25 bp, Homo sapien
atgacggcgcctctgcggtctaggt

SEQ ID NO: 2271356 - DNA, 25 bp, Homo sapien
gatgacggcgcctctgcggtctagg

SEQ ID NO: 2271357 - DNA, 25 bp, Homo sapien
aaaggccgaagaaacactgagaagg

SEQ ID NO: 2271358 - DNA, 25 bp, Homo sapien
ggccgaagaaacactgagaaggata

SEQ ID NO: 2271359 - DNA, 25 bp, Homo sapien
tagaaaggccgaagaaacactgaga

SEQ ID NO: 2271360 - DNA, 25 bp, Homo sapien
gccgaagaaacactgagaaggatac

SEQ ID NO: 2271361 - DNA, 25 bp, Homo sapien
tccaggctgaccatgtagctcagca

SEQ ID NO: 2271362 - DNA, 25 bp, Homo sapien
ctccaggctgaccatgtagctcagc

SEQ ID NO: 2271363 - DNA, 25 bp, Homo sapien
ccaggctgaccatgtagctcagcat

SEQ ID NO: 2271364 - DNA, 25 bp, Homo sapien
agagatgaacaggatgcttctcttc

SEQ ID NO: 2271365 - DNA, 25 bp, Homo sapien
tgatgttcaccagatattccttggt

SEQ ID NO: 2271366 - DNA, 25 bp, Homo sapien
gggttactccgaaagaacaacatga

SEQ ID NO: 2271367 - DNA, 25 bp, Homo sapien
atgaacaggatgcttctcttcttcc

SEQ ID NO: 2271368 - DNA, 25 bp, Homo sapien
tccggataccactcaattggagtgg

SEQ ID NO: 2271369 - DNA, 25 bp, Homo sapien
taatccggataccactcaattggag

SEQ ID NO: 2271370 - DNA, 25 bp, Homo sapien
cttcataatccggataccactcaat

SEQ ID NO: 2271371 - DNA, 25 bp, Homo sapien
cataatccggataccactcaattgg

SEQ ID NO: 2271372 - DNA, 25 bp, Homo sapien
tcttgttagatcctgcgaagttgtg

SEQ ID NO: 2271373 - DNA, 25 bp, Homo sapien
ttgttagatcctgcgaagttgtggt

SEQ ID NO: 2271374 - DNA, 25 bp, Homo sapien
cttgttagatcctgcgaagttgtgg

SEQ ID NO: 2271375 - DNA, 25 bp, Homo sapien
atcttgttagatcctgcgaagttgt

SEQ ID NO: 2271376 - DNA, 25 bp, Homo sapien
gggattgcgccacaggtccttacat

SEQ ID NO: 2271377 - DNA, 25 bp, Homo sapien
gattgcgccacaggtccttacatag

SEQ ID NO: 2271378 - DNA, 25 bp, Homo sapien
tattgcaggggattgcgccacaggt

SEQ ID NO: 2271379 - DNA, 25 bp, Homo sapien
tgcgccacaggtccttacataggat

SEQ ID NO: 2271380 - DNA, 25 bp, Homo sapien
gtctctgttccctcttcaggtggct

SEQ ID NO: 2271381 - DNA, 25 bp, Homo sapien
gacgtctctgttccctcttcaggtg

SEQ ID NO: 2271382 - DNA, 25 bp, Homo sapien
ctgacgtctctgttccctcttcagg

SEQ ID NO: 2271383 - DNA, 25 bp, Homo sapien
cgtctctgttccctcttcaggtggc

SEQ ID NO: 2271384 - DNA, 25 bp, Homo sapien
ttgacagccgtggaatcaagtgcca

SEQ ID NO: 2271385 - DNA, 25 bp, Homo sapien
cagccgtggaatcaagtgccacaga

SEQ ID NO: 2271386 - DNA, 25 bp, Homo sapien
ggttggtgggatgactgccggtggg

SEQ ID NO: 2271387 - DNA, 25 bp, Homo sapien
ggttgacagccgtggaatcaagtgc

SEQ ID NO: 2271388 - DNA, 25 bp, Homo sapien
tttgtggtttggggcaaggatgacc

SEQ ID NO: 2271389 - DNA, 25 bp, Homo sapien
ttgtggtttggggcaaggatgacca

SEQ ID NO: 2271390 - DNA, 25 bp, Homo sapien
tgtggtttggggcaaggatgaccag

SEQ ID NO: 2271391 - DNA, 25 bp, Homo sapien
aaacacaaactcatgttaaaacgca

SEQ ID NO: 2271392 - DNA, 25 bp, Homo sapien
caaactcatgttaaaacgcattttc

SEQ ID NO: 2271393 - DNA, 25 bp, Homo sapien
catttgtgatcccttaaacttcctc

SEQ ID NO: 2271394 - DNA, 25 bp, Homo sapien
tgttaaaacgcattttctctgagcc

SEQ ID NO: 2271395 - DNA, 25 bp, Homo sapien
tttgtgactcgatctctttttcctt

SEQ ID NO: 2271396 - DNA, 25 bp, Homo sapien
taggtaaaatctgatgctccatcat

SEQ ID NO: 2271397 - DNA, 25 bp, Homo sapien
ttcctgtgcataagaccatgctgag

SEQ ID NO: 2271398 - DNA, 25 bp, Homo sapien
tcctgaatttttgtgactcgatctc

SEQ ID NO: 2271399 - DNA, 25 bp, Homo sapien
tatagggataccgtactggaccaca

SEQ ID NO: 2271400 - DNA, 25 bp, Homo sapien
aggaggacaagactcccgctccaga

SEQ ID NO: 2271401 - DNA, 25 bp, Homo sapien
tctttgacatgcacacagtaggata

SEQ ID NO: 2271402 - DNA, 25 bp, Homo sapien
tccgactgttttcagaataatttgc

SEQ ID NO: 2271403 - DNA, 25 bp, Homo sapien
tccgagttactgaggcacggtgcaa

SEQ ID NO: 2271404 - DNA, 25 bp, Homo sapien
tggaagaagcattacacagcctgta

SEQ ID NO: 2271405 - DNA, 25 bp, Homo sapien
tgtggcccacgtgcacggatattca

SEQ ID NO: 2271406 - DNA, 25 bp, Homo sapien
tcagtgcccttagcatctgtggccc

SEQ ID NO: 2271407 - DNA, 25 bp, Homo sapien
gccttgacgacccagaggctcccgc

SEQ ID NO: 2271408 - DNA, 25 bp, Homo sapien
tcggcctgcgcgcacgctgttgtgc

SEQ ID NO: 2271409 - DNA, 25 bp, Homo sapien
cattgtcggcctgcgcgcacgctgt

SEQ ID NO: 2271410 - DNA, 25 bp, Homo sapien
cagccgccagggttggccattgtcg

SEQ ID NO: 2271411 - DNA, 25 bp, Homo sapien
ccaggcgccccctaagggactgcgc

SEQ ID NO: 2271412 - DNA, 25 bp, Homo sapien
cttccaggcgccccctaagggactg

SEQ ID NO: 2271413 - DNA, 25 bp, Homo sapien
gcgccgggcttccaggcgcccccta

SEQ ID NO: 2271414 - DNA, 25 bp, Homo sapien
tccaggcgccccctaagggactgcg

SEQ ID NO: 2271415 - DNA, 25 bp, Homo sapien
ctctggcacccggtaggtcagcgag

SEQ ID NO: 2271416 - DNA, 25 bp, Homo sapien
cccggtaggtcagcgagccctcagg

SEQ ID NO: 2271417 - DNA, 25 bp, Homo sapien
agcctctctggcacccggtaggtca

SEQ ID NO: 2271418 - DNA, 25 bp, Homo sapien
ggcacccggtaggtcagcgagccct

SEQ ID NO: 2271419 - DNA, 25 bp, Homo sapien
ctcccgccgctccacgaggccctcc

SEQ ID NO: 2271420 - DNA, 25 bp, Homo sapien
cctcccgccgctccacgaggccctc

SEQ ID NO: 2271421 - DNA, 25 bp, Homo sapien
tcccgccgctccacgaggccctcct

SEQ ID NO: 2271422 - DNA, 25 bp, Homo sapien
cttcctggcttgggcattaaccggc

SEQ ID NO: 2271423 - DNA, 25 bp, Homo sapien
aaaggccgaagaaacactgagaagg

SEQ ID NO: 2271424 - DNA, 25 bp, Homo sapien
ggccgaagaaacactgagaaggata

SEQ ID NO: 2271425 - DNA, 25 bp, Homo sapien
tagaaaggccgaagaaacactgaga

SEQ ID NO: 2271426 - DNA, 25 bp, Homo sapien
gccgaagaaacactgagaaggatac

SEQ ID NO: 2271427 - DNA, 25 bp, Homo sapien
tccaggctgaccatgtagctcagca

SEQ ID NO: 2271428 - DNA, 25 bp, Homo sapien
ctccaggctgaccatgtagctcagc

SEQ ID NO: 2271429 - DNA, 25 bp, Homo sapien
ccaggctgaccatgtagctcagcat

SEQ ID NO: 2271430 - DNA, 25 bp, Homo sapien
agagatgaacaggatgcttctcttc

SEQ ID NO: 2271431 - DNA, 25 bp, Homo sapien
atgaacaggatgcttctcttcttcc

SEQ ID NO: 2271432 - DNA, 25 bp, Homo sapien
tgatgttcaccagatattccttggt

SEQ ID NO: 2271433 - DNA, 25 bp, Homo sapien
gggttactccgaaagaacaacatga

SEQ ID NO: 2271434 - DNA, 25 bp, Homo sapien
ctggatcccgttggcaatgatccac

SEQ ID NO: 2271435 - DNA, 25 bp, Homo sapien
gggctggatcccgttggcaatgatc

SEQ ID NO: 2271436 - DNA, 25 bp, Homo sapien
gatcccgttggcaatgatccaccca

SEQ ID NO: 2271437 - DNA, 25 bp, Homo sapien
ggctggatcccgttggcaatgatcc

SEQ ID NO: 2271438 - DNA, 25 bp, Homo sapien
tccggataccactcaattggagtgg

SEQ ID NO: 2271439 - DNA, 25 bp, Homo sapien
taatccggataccactcaattggag

SEQ ID NO: 2271440 - DNA, 25 bp, Homo sapien
cataatccggataccactcaattgg

SEQ ID NO: 2271441 - DNA, 25 bp, Homo sapien
cttcataatccggataccactcaat

SEQ ID NO: 2271442 - DNA, 25 bp, Homo sapien
cttgttagatcctgcgaagttgtgg

SEQ ID NO: 2271443 - DNA, 25 bp, Homo sapien
tcttgttagatcctgcgaagttgtg

SEQ ID NO: 2271444 - DNA, 25 bp, Homo sapien
ttgttagatcctgcgaagttgtggt

SEQ ID NO: 2271445 - DNA, 25 bp, Homo sapien
atcttgttagatcctgcgaagttgt

SEQ ID NO: 2271446 - DNA, 25 bp, Homo sapien
gggattgcgccacaggtccttacat

SEQ ID NO: 2271447 - DNA, 25 bp, Homo sapien
gattgcgccacaggtccttacatag

SEQ ID NO: 2271448 - DNA, 25 bp, Homo sapien
tattgcaggggattgcgccacaggt

SEQ ID NO: 2271449 - DNA, 25 bp, Homo sapien
tgcgccacaggtccttacataggat

SEQ ID NO: 2271450 - DNA, 25 bp, Homo sapien
gacgtctctgttccctcttcaggtg

SEQ ID NO: 2271451 - DNA, 25 bp, Homo sapien
ctgacgtctctgttccctcttcagg

SEQ ID NO: 2271452 - DNA, 25 bp, Homo sapien
cgtctctgttccctcttcaggtggc

SEQ ID NO: 2271453 - DNA, 25 bp, Homo sapien
gtctctgttccctcttcaggtggct

SEQ ID NO: 2271454 - DNA, 25 bp, Homo sapien
cagccgtggaatcaagtgccacaga

SEQ ID NO: 2271455 - DNA, 25 bp, Homo sapien
ggttggtgggatgactgccggtggg

SEQ ID NO: 2271456 - DNA, 25 bp, Homo sapien
ttgacagccgtggaatcaagtgcca

SEQ ID NO: 2271457 - DNA, 25 bp, Homo sapien
ggttgacagccgtggaatcaagtgc

SEQ ID NO: 2271458 - DNA, 25 bp, Homo sapien
aaacacaaactcatgttaaaacgca

SEQ ID NO: 2271459 - DNA, 25 bp, Homo sapien
tgttaaaacgcattttctctgagcc

SEQ ID NO: 2271460 - DNA, 25 bp, Homo sapien
catttgtgatcccttaaacttcctc

SEQ ID NO: 2271461 - DNA, 25 bp, Homo sapien
caaactcatgttaaaacgcattttc

SEQ ID NO: 2271462 - DNA, 25 bp, Homo sapien
taggtaaaatctgatgctccatcat

SEQ ID NO: 2271463 - DNA, 25 bp, Homo sapien
tcctgaatttttgtgactcgatctc

SEQ ID NO: 2271464 - DNA, 25 bp, Homo sapien
tttgtgactcgatctctttttcctt

SEQ ID NO: 2271465 - DNA, 25 bp, Homo sapien
ttcctgtgcataagaccatgctgag

SEQ ID NO: 2271466 - DNA, 25 bp, Homo sapien
cacagtaggatagagggcagcttga

SEQ ID NO: 2271467 - DNA, 25 bp, Homo sapien
aggaggacaagactcccgctccaga

SEQ ID NO: 2271468 - DNA, 25 bp, Homo sapien
tccgactgttttcagaataatttgc

SEQ ID NO: 2271469 - DNA, 25 bp, Homo sapien
gtgtctttgacatgcacacagtagg

SEQ ID NO: 2271470 - DNA, 25 bp, Homo sapien
tcagtgcccttagcatctgtggccc

SEQ ID NO: 2271471 - DNA, 25 bp, Homo sapien
tggaagaagcattacacagcctgta

SEQ ID NO: 2271472 - DNA, 25 bp, Homo sapien
tccgagttactgaggcacggtgcaa

SEQ ID NO: 2271473 - DNA, 25 bp, Homo sapien
tgtggcccacgtgcacggatattca

SEQ ID NO: 2271474 - DNA, 25 bp, Homo sapien
aagacaccaagtccctgtcggtaca

SEQ ID NO: 2271475 - DNA, 25 bp, Homo sapien
gacaccaagtccctgtcggtacaaa

SEQ ID NO: 2271476 - DNA, 25 bp, Homo sapien
agacaccaagtccctgtcggtacaa

SEQ ID NO: 2271477 - DNA, 25 bp, Homo sapien
tgttttatcatacagggaccagact

SEQ ID NO: 2271478 - DNA, 25 bp, Homo sapien
gagactagaggacttaggagtttcc

SEQ ID NO: 2271479 - DNA, 25 bp, Homo sapien
tgtggaaattggcagcctggctgtc

SEQ ID NO: 2271480 - DNA, 25 bp, Homo sapien
ttatttgtctcctagtgccattgcc

SEQ ID NO: 2271481 - DNA, 25 bp, Homo sapien
gtttggcacacgagatgtcggcgtg

SEQ ID NO: 2271482 - DNA, 25 bp, Homo sapien
tctggagagttcttgcgcagaggta

SEQ ID NO: 2271483 - DNA, 25 bp, Homo sapien
ctttgctacgtgatggatttgcagg

SEQ ID NO: 2271484 - DNA, 25 bp, Homo sapien
gtcggaaagcatgcggaagtcctgc

SEQ ID NO: 2271485 - DNA, 25 bp, Homo sapien
gggcaccagctccgcagatgcgcat

SEQ ID NO: 2271486 - DNA, 25 bp, Homo sapien
gggctgccgaccacctgacggcggg

SEQ ID NO: 2271487 - DNA, 25 bp, Homo sapien
cacaaggtgcttaagacgggttcgc

SEQ ID NO: 2271488 - DNA, 25 bp, Homo sapien
tgcttaagacgggttcgcggcgcat

SEQ ID NO: 2271489 - DNA, 25 bp, Homo sapien
cacagagcatctccgccttgtgagc

SEQ ID NO: 2271490 - DNA, 25 bp, Homo sapien
cagcaggggatagtcatcgggcctc

SEQ ID NO: 2271491 - DNA, 25 bp, Homo sapien
atagtcatcgggcctcggggggtat

SEQ ID NO: 2271492 - DNA, 25 bp, Homo sapien
ggccacagagcatctccgccttgtg

SEQ ID NO: 2271493 - DNA, 25 bp, Homo sapien
cccgtgggtcttgcagggagcgggt

SEQ ID NO: 2271494 - DNA, 25 bp, Homo sapien
tctcagcagggcgacgcccgtgggt

SEQ ID NO: 2271495 - DNA, 25 bp, Homo sapien
gtcttgcagggagcgggtctgctgg

SEQ ID NO: 2271496 - DNA, 25 bp, Homo sapien
tcagcagggcgacgcccgtgggtct

SEQ ID NO: 2271497 - DNA, 25 bp, Homo sapien
tcggcctgcgcgcacgctgttgtgc

SEQ ID NO: 2271498 - DNA, 25 bp, Homo sapien
cagccgccagggttggccattgtcg

SEQ ID NO: 2271499 - DNA, 25 bp, Homo sapien
cattgtcggcctgcgcgcacgctgt

SEQ ID NO: 2271500 - DNA, 25 bp, Homo sapien
gccttgacgacccagaggctcccgc

SEQ ID NO: 2271501 - DNA, 25 bp, Homo sapien
cacactctcacaggtcgaggcaaat

SEQ ID NO: 2271502 - DNA, 25 bp, Homo sapien
gctgaggtggaattgatctgctgta

SEQ ID NO: 2271503 - DNA, 25 bp, Homo sapien
acatctctcttcgttaggcaggcca

SEQ ID NO: 2271504 - DNA, 25 bp, Homo sapien
tacggaggtaatacagcagatgcag

SEQ ID NO: 2271505 - DNA, 25 bp, Homo sapien
agcctctctggcacccggtaggtca

SEQ ID NO: 2271506 - DNA, 25 bp, Homo sapien
cccggtaggtcagcgagccctcagg

SEQ ID NO: 2271507 - DNA, 25 bp, Homo sapien
ggcacccggtaggtcagcgagccct

SEQ ID NO: 2271508 - DNA, 25 bp, Homo sapien
ctctggcacccggtaggtcagcgag

SEQ ID NO: 2271509 - DNA, 25 bp, Homo sapien
ctcccgccgctccacgaggccctcc

SEQ ID NO: 2271510 - DNA, 25 bp, Homo sapien
tcccgccgctccacgaggccctcct

SEQ ID NO: 2271511 - DNA, 25 bp, Homo sapien
cctcccgccgctccacgaggccctc

SEQ ID NO: 2271512 - DNA, 25 bp, Homo sapien
gatgacggcgcctctgcggtctagg

SEQ ID NO: 2271513 - DNA, 25 bp, Homo sapien
atgacggcgcctctgcggtctaggt

SEQ ID NO: 2271514 - DNA, 25 bp, Homo sapien
aaaggccgaagaaacactgagaagg

SEQ ID NO: 2271515 - DNA, 25 bp, Homo sapien
ggccgaagaaacactgagaaggata

SEQ ID NO: 2271516 - DNA, 25 bp, Homo sapien
tagaaaggccgaagaaacactgaga

SEQ ID NO: 2271517 - DNA, 25 bp, Homo sapien
gccgaagaaacactgagaaggatac

SEQ ID NO: 2271518 - DNA, 25 bp, Homo sapien
tccaggctgaccatgtagctcagca

SEQ ID NO: 2271519 - DNA, 25 bp, Homo sapien
ctccaggctgaccatgtagctcagc

SEQ ID NO: 2271520 - DNA, 25 bp, Homo sapien
ccaggctgaccatgtagctcagcat

SEQ ID NO: 2271521 - DNA, 25 bp, Homo sapien
agagatgaacaggatgcttctcttc

SEQ ID NO: 2271522 - DNA, 25 bp, Homo sapien
atgaacaggatgcttctcttcttcc

SEQ ID NO: 2271523 - DNA, 25 bp, Homo sapien
gggttactccgaaagaacaacatga

SEQ ID NO: 2271524 - DNA, 25 bp, Homo sapien
tgatgttcaccagatattccttggt

SEQ ID NO: 2271525 - DNA, 25 bp, Homo sapien
tccggataccactcaattggagtgg

SEQ ID NO: 2271526 - DNA, 25 bp, Homo sapien
taatccggataccactcaattggag

SEQ ID NO: 2271527 - DNA, 25 bp, Homo sapien
cataatccggataccactcaattgg

SEQ ID NO: 2271528 - DNA, 25 bp, Homo sapien
cttcataatccggataccactcaat

SEQ ID NO: 2271529 - DNA, 25 bp, Homo sapien
tcttgttagatcctgcgaagttgtg

SEQ ID NO: 2271530 - DNA, 25 bp, Homo sapien
ttgttagatcctgcgaagttgtggt

SEQ ID NO: 2271531 - DNA, 25 bp, Homo sapien
atcttgttagatcctgcgaagttgt

SEQ ID NO: 2271532 - DNA, 25 bp, Homo sapien
cttgttagatcctgcgaagttgtgg

SEQ ID NO: 2271533 - DNA, 25 bp, Homo sapien
tattgcaggggattgcgccacaggt

SEQ ID NO: 2271534 - DNA, 25 bp, Homo sapien
gacgtctctgttccctcttcaggtg

SEQ ID NO: 2271535 - DNA, 25 bp, Homo sapien
ggcttcatcctcttgtagtattgca

SEQ ID NO: 2271536 - DNA, 25 bp, Homo sapien
tgcgccacaggtccttacataggat

SEQ ID NO: 2271537 - DNA, 25 bp, Homo sapien
cagccgtggaatcaagtgccacaga

SEQ ID NO: 2271538 - DNA, 25 bp, Homo sapien
ggttgacagccgtggaatcaagtgc

SEQ ID NO: 2271539 - DNA, 25 bp, Homo sapien
gacagccgtggaatcaagtgccaca

SEQ ID NO: 2271540 - DNA, 25 bp, Homo sapien
ttgacagccgtggaatcaagtgcca

SEQ ID NO: 2271541 - DNA, 25 bp, Homo sapien
taggtaaaatctgatgctccatcat

SEQ ID NO: 2271542 - DNA, 25 bp, Homo sapien
attccatacaatccacatttacccc

SEQ ID NO: 2271543 - DNA, 25 bp, Homo sapien
ttcctgaatttttgtgactcgatct

SEQ ID NO: 2271544 - DNA, 25 bp, Homo sapien
ttcctgtgcataagaccatgctgag

SEQ ID NO: 2271545 - DNA, 25 bp, Homo sapien
cacagtaggatagagggcagcttga

SEQ ID NO: 2271546 - DNA, 25 bp, Homo sapien
aggaggacaagactcccgctccaga

SEQ ID NO: 2271547 - DNA, 25 bp, Homo sapien
gtgtctttgacatgcacacagtagg

SEQ ID NO: 2271548 - DNA, 25 bp, Homo sapien
tccgactgttttcagaataatttgc

SEQ ID NO: 2271549 - DNA, 25 bp, Homo sapien
tggaagaagcattacacagcctgta

SEQ ID NO: 2271550 - DNA, 25 bp, Homo sapien
tccgagttactgaggcacggtgcaa

SEQ ID NO: 2271551 - DNA, 25 bp, Homo sapien
tgtggcccacgtgcacggatattca

SEQ ID NO: 2271552 - DNA, 25 bp, Homo sapien
tcagtgcccttagcatctgtggccc

SEQ ID NO: 2271553 - DNA, 25 bp, Homo sapien
aagacaccaagtccctgtcggtaca

SEQ ID NO: 2271554 - DNA, 25 bp, Homo sapien
gacaccaagtccctgtcggtacaaa

SEQ ID NO: 2271555 - DNA, 25 bp, Homo sapien
agacaccaagtccctgtcggtacaa

SEQ ID NO: 2271556 - DNA, 25 bp, Homo sapien
gtttggcacacgagatgtcggcgtg

SEQ ID NO: 2271557 - DNA, 25 bp, Homo sapien
ctttgctacgtgatggatttgcagg

SEQ ID NO: 2271558 - DNA, 25 bp, Homo sapien
tctggagagttcttgcgcagaggta

SEQ ID NO: 2271559 - DNA, 25 bp, Homo sapien
gtcggaaagcatgcggaagtcctgc

SEQ ID NO: 2271560 - DNA, 25 bp, Homo sapien
ggcagcaagggatagtcattgggct

SEQ ID NO: 2271561 - DNA, 25 bp, Homo sapien
agcaagggatagtcattgggcttca

SEQ ID NO: 2271562 - DNA, 25 bp, Homo sapien
cagcaagggatagtcattgggcttc

SEQ ID NO: 2271563 - DNA, 25 bp, Homo sapien
gcagcaagggatagtcattgggctt

SEQ ID NO: 2271564 - DNA, 25 bp, Homo sapien
caggaaacctgggtccacgtaggtg

SEQ ID NO: 2271565 - DNA, 25 bp, Homo sapien
ctcaggaaacctgggtccacgtagg

SEQ ID NO: 2271566 - DNA, 25 bp, Homo sapien
ctgcgggtccagcggagctcctcag

SEQ ID NO: 2271567 - DNA, 25 bp, Homo sapien
ctcctcaggaaacctgggtccacgt

SEQ ID NO: 2271568 - DNA, 25 bp, Homo sapien
tagatggtacggaagtaatactgcg

SEQ ID NO: 2271569 - DNA, 25 bp, Homo sapien
tcccaagctcctgtccgcatttgag

SEQ ID NO: 2271570 - DNA, 25 bp, Homo sapien
gggctagggcggcagggttggacta

SEQ ID NO: 2271571 - DNA, 25 bp, Homo sapien
taatactgcggatccagagaagtct

SEQ ID NO: 2271572 - DNA, 25 bp, Homo sapien
ggcatggtagccctgtgccctgaca

SEQ ID NO: 2271573 - DNA, 25 bp, Homo sapien
ttccgtccccgagcctcctccgaga

SEQ ID NO: 2271574 - DNA, 25 bp, Homo sapien
ttgtgccgggtagctcagagtccag

SEQ ID NO: 2271575 - DNA, 25 bp, Homo sapien
ccttggagcttgtgccgggtagctc

SEQ ID NO: 2271576 - DNA, 25 bp, Homo sapien
gggcgcgcctgcatctccagcccac

SEQ ID NO: 2271577 - DNA, 25 bp, Homo sapien
gggactgcgcgctaagggccaaggg

SEQ ID NO: 2271578 - DNA, 25 bp, Homo sapien
tccctcatggccaatcaatgggagg

SEQ ID NO: 2271579 - DNA, 25 bp, Homo sapien
taagggactgcgcgctaagggccaa

SEQ ID NO: 2271580 - DNA, 25 bp, Homo sapien
ctccaactcccaaagccgcctgctc

SEQ ID NO: 2271581 - DNA, 25 bp, Homo sapien
aaggcagtgccctcctcggcaccgc

SEQ ID NO: 2271582 - DNA, 25 bp, Homo sapien
tcctcggcaccgcacacaccaaggc

SEQ ID NO: 2271583 - DNA, 25 bp, Homo sapien
tgccaccagcactgcctccaactcc

SEQ ID NO: 2271584 - DNA, 25 bp, Homo sapien
acctgcccctccacgagggcctcct

SEQ ID NO: 2271585 - DNA, 25 bp, Homo sapien
ggctgtgcccgctgggcctccacct

SEQ ID NO: 2271586 - DNA, 25 bp, Homo sapien
gcccgctgggcctccacctgcccct

SEQ ID NO: 2271587 - DNA, 25 bp, Homo sapien
tccacctgcccctccacgagggcct

SEQ ID NO: 2271588 - DNA, 25 bp, Homo sapien
cttcctggcttgggcattaaccggc

SEQ ID NO: 2271589 - DNA, 25 bp, Homo sapien
gaagaaacactgagaaggatacaac

SEQ ID NO: 2271590 - DNA, 25 bp, Homo sapien
acactgagaaggatacaacattggc

SEQ ID NO: 2271591 - DNA, 25 bp, Homo sapien
tagaaaggccgaagaaacactgaga

SEQ ID NO: 2271592 - DNA, 25 bp, Homo sapien
aaggccgaagaaacactgagaagga

SEQ ID NO: 2271593 - DNA, 25 bp, Homo sapien
tgaaaaacgtcttctgctctgaact

SEQ ID NO: 2271594 - DNA, 25 bp, Homo sapien
tcactgaaaaacgtcttctgctctg

SEQ ID NO: 2271595 - DNA, 25 bp, Homo sapien
gattcactgaaaaacgtcttctgct

SEQ ID NO: 2271596 - DNA, 25 bp, Homo sapien
cttgattcactgaaaaacgtcttct

SEQ ID NO: 2271597 - DNA, 25 bp, Homo sapien
ctgggggtggtgtgcaatctgattt

SEQ ID NO: 2271598 - DNA, 25 bp, Homo sapien
ggtggtgtgcaatctgatttaggtc

SEQ ID NO: 2271599 - DNA, 25 bp, Homo sapien
gtgcaatctgatttaggtcaaagag

SEQ ID NO: 2271600 - DNA, 25 bp, Homo sapien
ggtgtgcaatctgatttaggtcaaa

SEQ ID NO: 2271601 - DNA, 25 bp, Homo sapien
tgtcttcatcttggtcagtgatcag

SEQ ID NO: 2271602 - DNA, 25 bp, Homo sapien
ctccaggtggatcatgtagctcagc

SEQ ID NO: 2271603 - DNA, 25 bp, Homo sapien
tcatcttggtcagtgatcagggctg

SEQ ID NO: 2271604 - DNA, 25 bp, Homo sapien
tcttggtcagtgatcagggctgaca

SEQ ID NO: 2271605 - DNA, 25 bp, Homo sapien
aacatgatcttgcacaggtgaactg

SEQ ID NO: 2271606 - DNA, 25 bp, Homo sapien
caggtgaactggatgcttcacttct

SEQ ID NO: 2271607 - DNA, 25 bp, Homo sapien
tggaagtaagggttactctgaaaca

SEQ ID NO: 2271608 - DNA, 25 bp, Homo sapien
caacatgatcttgcacaggtgaact

SEQ ID NO: 2271609 - DNA, 25 bp, Homo sapien
tcctgttgtggtggttgcggcgata

SEQ ID NO: 2271610 - DNA, 25 bp, Homo sapien
actgctgataccgagcaggaggtgt

SEQ ID NO: 2271611 - DNA, 25 bp, Homo sapien
gctttttgaaggcagcacaacagat

SEQ ID NO: 2271612 - DNA, 25 bp, Homo sapien
tgtcaaacacccttccctgaaacaa

SEQ ID NO: 2271613 - DNA, 25 bp, Homo sapien
agattcatgaactttgactgtcaaa

SEQ ID NO: 2271614 - DNA, 25 bp, Homo sapien
tactggaccacagtgcctttgacca

SEQ ID NO: 2271615 - DNA, 25 bp, Homo sapien
cagcacacagtaagataatggcagc

SEQ ID NO: 2271616 - DNA, 25 bp, Homo sapien
actataggggtactgtactggacca

SEQ ID NO: 2271617 - DNA, 25 bp, Homo sapien
tctgttgccccattccactataggg

SEQ ID NO: 2271618 - DNA, 25 bp, Homo sapien
tccgtttggatgatgccagtctcct

SEQ ID NO: 2271619 - DNA, 25 bp, Homo sapien
tgacatgctcgtttccctctgccat

SEQ ID NO: 2271620 - DNA, 25 bp, Homo sapien
agggctgccaagttccgtttggatg

SEQ ID NO: 2271621 - DNA, 25 bp, Homo sapien
cagtctcctctgacatgctcgtttc

SEQ ID NO: 2271622 - DNA, 25 bp, Homo sapien
cagcttggactcaaccagggctctc

SEQ ID NO: 2271623 - DNA, 25 bp, Homo sapien
gggttcagcttggactcaaccaggg

SEQ ID NO: 2271624 - DNA, 25 bp, Homo sapien
ctggggttcagcttggactcaacca

SEQ ID NO: 2271625 - DNA, 25 bp, Homo sapien
gttcagcttggactcaaccagggct

SEQ ID NO: 2271626 - DNA, 25 bp, Homo sapien
gcagctatggggcatcatggcaaag

SEQ ID NO: 2271627 - DNA, 25 bp, Homo sapien
atcatggcaaaggaccttcttcgac

SEQ ID NO: 2271628 - DNA, 25 bp, Homo sapien
ggaccttcttcgacattccttggca

SEQ ID NO: 2271629 - DNA, 25 bp, Homo sapien
ttcttcgacattccttggcatcaga

SEQ ID NO: 2271630 - DNA, 25 bp, Homo sapien
ggacagtatgcaggaagccgtgcct

SEQ ID NO: 2271631 - DNA, 25 bp, Homo sapien
gagtttcccgcaggtcactacctaa

SEQ ID NO: 2271632 - DNA, 25 bp, Homo sapien
gactgcccagggtacggcacgattg

SEQ ID NO: 2271633 - DNA, 25 bp, Homo sapien
catgcaggtgaaagcccgagtttcc

SEQ ID NO: 2271634 - DNA, 25 bp, Homo sapien
tatctatgacttccaagcttccaag

SEQ ID NO: 2271635 - DNA, 25 bp, Homo sapien
tggtgtttccttatctatgacttcc

SEQ ID NO: 2271636 - DNA, 25 bp, Homo sapien
gattcacttggcagtccttgcctgc

SEQ ID NO: 2271637 - DNA, 25 bp, Homo sapien
tctctagttggctgcaatagctctg

SEQ ID NO: 2271638 - DNA, 25 bp, Homo sapien
tgcaggagactctgcgccagcaaag

SEQ ID NO: 2271639 - DNA, 25 bp, Homo sapien
cagtgcacatgggtcatcgaatggg

SEQ ID NO: 2271640 - DNA, 25 bp, Homo sapien
tgctactgctcttgcaggagactct

SEQ ID NO: 2271641 - DNA, 25 bp, Homo sapien
ccgctagcaggcactacggctgcta

SEQ ID NO: 2271642 - DNA, 25 bp, Homo sapien
cacattggcctccttggtcaccacc

SEQ ID NO: 2271643 - DNA, 25 bp, Homo sapien
cagccacgctgaattggcagctgca

SEQ ID NO: 2271644 - DNA, 25 bp, Homo sapien
ccagccacgctgaattggcagctgc

SEQ ID NO: 2271645 - DNA, 25 bp, Homo sapien
tgggcttgtacacacgagggaacct

SEQ ID NO: 2271646 - DNA, 25 bp, Homo sapien
gctgctgtccggatgtgcgctctcc

SEQ ID NO: 2271647 - DNA, 25 bp, Homo sapien
ttctgctgctgtccggatgtgcgct

SEQ ID NO: 2271648 - DNA, 25 bp, Homo sapien
gggtgggcttgtacacacgagggaa

SEQ ID NO: 2271649 - DNA, 25 bp, Homo sapien
tggtggtcttggccgcccagacagc

SEQ ID NO: 2271650 - DNA, 25 bp, Homo sapien
tgtggtggtcttggccgcccagaca

SEQ ID NO: 2271651 - DNA, 25 bp, Homo sapien
gtggtggtcttggccgcccagacag

SEQ ID NO: 2271652 - DNA, 25 bp, Homo sapien
ggctacctcgcaggactttggtcta

SEQ ID NO: 2271653 - DNA, 25 bp, Homo sapien
tagcctgacctacaaatccgtcaag

SEQ ID NO: 2271654 - DNA, 25 bp, Homo sapien
tagctggagtgaagaacgcgtttcc

SEQ ID NO: 2271655 - DNA, 25 bp, Homo sapien
tccgtcaagtagcttaggaagactg

SEQ ID NO: 2271656 - DNA, 25 bp, Homo sapien
taactgcctgcagcattgaccttca

SEQ ID NO: 2271657 - DNA, 25 bp, Homo sapien
tgtaactgcctgcagcattgacctt

SEQ ID NO: 2271658 - DNA, 25 bp, Homo sapien
aggtgtaactgcctgcagcattgac

SEQ ID NO: 2271659 - DNA, 25 bp, Homo sapien
actgcctgcagcattgaccttcagg

SEQ ID NO: 2271660 - DNA, 25 bp, Homo sapien
agaggggagtaaacatgtcagggga

SEQ ID NO: 2271661 - DNA, 25 bp, Homo sapien
aggggagtaaacatgtcaggggagc

SEQ ID NO: 2271662 - DNA, 25 bp, Homo sapien
tggcagaggggagtaaacatgtcag

SEQ ID NO: 2271663 - DNA, 25 bp, Homo sapien
cagaggggagtaaacatgtcagggg

SEQ ID NO: 2271664 - DNA, 25 bp, Homo sapien
gattccctgtgcagtggcctctcgt

SEQ ID NO: 2271665 - DNA, 25 bp, Homo sapien
gtggacatatgatgaatcttcagca

SEQ ID NO: 2271666 - DNA, 25 bp, Homo sapien
atcgtggacatatgatgaatcttca

SEQ ID NO: 2271667 - DNA, 25 bp, Homo sapien
tcgtggacatatgatgaatcttcag

SEQ ID NO: 2271668 - DNA, 25 bp, Homo sapien
cgtggacatatgatgaatcttcagc

SEQ ID NO: 2271669 - DNA, 25 bp, Homo sapien
acacagactgtatctgatatactta

SEQ ID NO: 2271670 - DNA, 25 bp, Homo sapien
gacacagactgtatctgatatactt

SEQ ID NO: 2271671 - DNA, 25 bp, Homo sapien
tgcaggcccagtatccagtaggaat

SEQ ID NO: 2271672 - DNA, 25 bp, Homo sapien
aggcccagtatccagtaggaattac

SEQ ID NO: 2271673 - DNA, 25 bp, Homo sapien
ggctgcaggcccagtatccagtagg

SEQ ID NO: 2271674 - DNA, 25 bp, Homo sapien
aaaattatactgtggctgcaggccc

SEQ ID NO: 2271675 - DNA, 25 bp, Homo sapien
ggcagtaaatgccttgacaaatcct

SEQ ID NO: 2271676 - DNA, 25 bp, Homo sapien
tgttgctgatacactcacactgtgt

SEQ ID NO: 2271677 - DNA, 25 bp, Homo sapien
taaatgccttgacaaatcctgttgc

SEQ ID NO: 2271678 - DNA, 25 bp, Homo sapien
acacagcctgtaactccatcattaa

SEQ ID NO: 2271679 - DNA, 25 bp, Homo sapien
tctaagtctccaattgtaaacatct

SEQ ID NO: 2271680 - DNA, 25 bp, Homo sapien
cagcaatcaatttctggttacaacc

SEQ ID NO: 2271681 - DNA, 25 bp, Homo sapien
tcagcaatcaatttctggttacaac

SEQ ID NO: 2271682 - DNA, 25 bp, Homo sapien
ttcagcaatcaatttctggttacaa

SEQ ID NO: 2271683 - DNA, 25 bp, Homo sapien
cattatcctgtggatacaagccaag

SEQ ID NO: 2271684 - DNA, 25 bp, Homo sapien
tatcagtgaatacctggacaacctc

SEQ ID NO: 2271685 - DNA, 25 bp, Homo sapien
catgggaccaagatgagtcttcagc

SEQ ID NO: 2271686 - DNA, 25 bp, Homo sapien
tctgtgcatagaggatgttacttcc

SEQ ID NO: 2271687 - DNA, 25 bp, Homo sapien
agaatcatggcactgtcctgtgtat

SEQ ID NO: 2271688 - DNA, 25 bp, Homo sapien
ctagaatcatggcactgtcctgtgt

SEQ ID NO: 2271689 - DNA, 25 bp, Homo sapien
ctactagaatcatggcactgtcctg

SEQ ID NO: 2271690 - DNA, 25 bp, Homo sapien
tactagaatcatggcactgtcctgt

SEQ ID NO: 2271691 - DNA, 25 bp, Homo sapien
cttagggatttcacggttcattcct

SEQ ID NO: 2271692 - DNA, 25 bp, Homo sapien
ttgatgttccttcgggctggctcac

SEQ ID NO: 2271693 - DNA, 25 bp, Homo sapien
gaactctccttgatgttccttcggg

SEQ ID NO: 2271694 - DNA, 25 bp, Homo sapien
tcacggttcattcctggaactctcc

SEQ ID NO: 2271695 - DNA, 25 bp, Homo sapien
tcttgggtatgacgtgctgctcttc

SEQ ID NO: 2271696 - DNA, 25 bp, Homo sapien
gggttagcgtgaaacactgagagat

SEQ ID NO: 2271697 - DNA, 25 bp, Homo sapien
cagagaagactgctagtgtctctcc

SEQ ID NO: 2271698 - DNA, 25 bp, Homo sapien
ttggtcttgggtatgacgtgctgct

SEQ ID NO: 2271699 - DNA, 25 bp, Homo sapien
aaatggagtgtcccctgttgacttt

SEQ ID NO: 2271700 - DNA, 25 bp, Homo sapien
tgttgactttaagcacctgctcggc

SEQ ID NO: 2271701 - DNA, 25 bp, Homo sapien
gtgtcccctgttgactttaagcacc

SEQ ID NO: 2271702 - DNA, 25 bp, Homo sapien
tgactttaagcacctgctcggctgg

SEQ ID NO: 2271703 - DNA, 25 bp, Homo sapien
tggtagctcctgagtttggttggtt

SEQ ID NO: 2271704 - DNA, 25 bp, Homo sapien
acccctaagcacacaatggcacaca

SEQ ID NO: 2271705 - DNA, 25 bp, Homo sapien
attatccacagtcctttaagcagac

SEQ ID NO: 2271706 - DNA, 25 bp, Homo sapien
gacatccaacactcacaacattttc

SEQ ID NO: 2271707 - DNA, 25 bp, Homo sapien
ggctcatactctatgtcccagaatg

SEQ ID NO: 2271708 - DNA, 25 bp, Homo sapien
tcacaagattgtatcctcactcctc

SEQ ID NO: 2271709 - DNA, 25 bp, Homo sapien
tcctctctgaccttattgtggctca

SEQ ID NO: 2271710 - DNA, 25 bp, Homo sapien
ttgcaggcaaagttgctggacccag

SEQ ID NO: 2271711 - DNA, 25 bp, Homo sapien
cagtgatagcatcatacgtgtgacc

SEQ ID NO: 2271712 - DNA, 25 bp, Homo sapien
tgtgtgcaagatcaggtctcatggg

SEQ ID NO: 2271713 - DNA, 25 bp, Homo sapien
tgatccggttccactagaggaggag

SEQ ID NO: 2271714 - DNA, 25 bp, Homo sapien
tctcatggggattggaaggttgtct

SEQ ID NO: 2271715 - DNA, 25 bp, Homo sapien
tctcccctaggatcgtgggactatc

SEQ ID NO: 2271716 - DNA, 25 bp, Homo sapien
ttcctggggtttgcttgacgtatct

SEQ ID NO: 2271717 - DNA, 25 bp, Homo sapien
tttgcttgacgtatcttccagctgg

SEQ ID NO: 2271718 - DNA, 25 bp, Homo sapien
tgctctcccctaggatcgtgggact

SEQ ID NO: 2271719 - DNA, 25 bp, Homo sapien
tatagtgactcaaactggagcacca

SEQ ID NO: 2271720 - DNA, 25 bp, Homo sapien
tcaggacatgaagcacctacttggc

SEQ ID NO: 2271721 - DNA, 25 bp, Homo sapien
ttgctggtgaaggtacgggacccca

SEQ ID NO: 2271722 - DNA, 25 bp, Homo sapien
ggttttgtgaaagaatcatgcccca

SEQ ID NO: 2271723 - DNA, 25 bp, Homo sapien
acacttgcaacagtcccacagaaac

SEQ ID NO: 2271724 - DNA, 25 bp, Homo sapien
tgctcagtggttctgtaggaagccc

SEQ ID NO: 2271725 - DNA, 25 bp, Homo sapien
caccaacaagcacacaatgccacac

SEQ ID NO: 2271726 - DNA, 25 bp, Homo sapien
ctcctgatgctcagtggttctgtag

SEQ ID NO: 2271727 - DNA, 25 bp, Homo sapien
cactgtctcccttcatcctggtcct

SEQ ID NO: 2271728 - DNA, 25 bp, Homo sapien
atggctgggctcttgacctcactgt

SEQ ID NO: 2271729 - DNA, 25 bp, Homo sapien
tgagaacccagaagtgggtgtcagt

SEQ ID NO: 2271730 - DNA, 25 bp, Homo sapien
tcatcctggtccttgcagggcctct

SEQ ID NO: 2271731 - DNA, 25 bp, Homo sapien
caggctttcgtgatgggctgtcaga

SEQ ID NO: 2271732 - DNA, 25 bp, Homo sapien
cattgtgatgctagctggagcccat

SEQ ID NO: 2271733 - DNA, 25 bp, Homo sapien
tgtgtctaagagtatgcaggctttc

SEQ ID NO: 2271734 - DNA, 25 bp, Homo sapien
ctccacggagttcttatccacaaag

SEQ ID NO: 2271735 - DNA, 25 bp, Homo sapien
taataggcccggtagagatgaatga

SEQ ID NO: 2271736 - DNA, 25 bp, Homo sapien
cccctgatgatgtgaagcaccaact

SEQ ID NO: 2271737 - DNA, 25 bp, Homo sapien
actcctctgggaatcaaattcgagg

SEQ ID NO: 2271738 - DNA, 25 bp, Homo sapien
agatgaatgatagtgtctctccttg

SEQ ID NO: 2271739 - DNA, 25 bp, Homo sapien
tttccatgaactggggaatgttgag

SEQ ID NO: 2271740 - DNA, 25 bp, Homo sapien
caatagaatcccatgaggatcattt

SEQ ID NO: 2271741 - DNA, 25 bp, Homo sapien
gaatgttgagtttagaagacgttga

SEQ ID NO: 2271742 - DNA, 25 bp, Homo sapien
tgttgagtttagaagacgttgagcc

SEQ ID NO: 2271743 - DNA, 25 bp, Homo sapien
ttgacttcaggacaataaaacattc

SEQ ID NO: 2271744 - DNA, 25 bp, Homo sapien
cctcacaacgtgaagcagctgctca

SEQ ID NO: 2271745 - DNA, 25 bp, Homo sapien
ggatgatggaggattgccccctcac

SEQ ID NO: 2271746 - DNA, 25 bp, Homo sapien
tgaattcaaggttaattcaaggagc

SEQ ID NO: 2271747 - DNA, 25 bp, Homo sapien
cgaacgggtctctcactcatgtaga

SEQ ID NO: 2271748 - DNA, 25 bp, Homo sapien
gatggaattatacccgagaccccag

SEQ ID NO: 2271749 - DNA, 25 bp, Homo sapien
tgtgataaccaagtgcagtaccgta

SEQ ID NO: 2271750 - DNA, 25 bp, Homo sapien
aattattgaccatggagccccttca

SEQ ID NO: 2271751 - DNA, 25 bp, Homo sapien
tgggctgtaccaagaagtcacagca

SEQ ID NO: 2271752 - DNA, 25 bp, Homo sapien
tggtgggctgtaccaagaagtcaca

SEQ ID NO: 2271753 - DNA, 25 bp, Homo sapien
gggctgtaccaagaagtcacagcag

SEQ ID NO: 2271754 - DNA, 25 bp, Homo sapien
ggtgggctgtaccaagaagtcacag

SEQ ID NO: 2271755 - DNA, 25 bp, Homo sapien
ggtattaaagcccacaaatcggcag

SEQ ID NO: 2271756 - DNA, 25 bp, Homo sapien
tagtacatgacgctgtttagaagga

SEQ ID NO: 2271757 - DNA, 25 bp, Homo sapien
gcacattggaatactcatacctgaa

SEQ ID NO: 2271758 - DNA, 25 bp, Homo sapien
atacctgaacactgagccattgtct

SEQ ID NO: 2271759 - DNA, 25 bp, Homo sapien
gaattccacagtttattcctggggc

SEQ ID NO: 2271760 - DNA, 25 bp, Homo sapien
tgtttctttaggcaggctaatgtct

SEQ ID NO: 2271761 - DNA, 25 bp, Homo sapien
ctgtcctctcctagaactatgggaa

SEQ ID NO: 2271762 - DNA, 25 bp, Homo sapien
aatgtctaggcaggtctgatgcatc

SEQ ID NO: 2271763 - DNA, 25 bp, Homo sapien
tcacgctggaggaagaaccatttca

SEQ ID NO: 2271764 - DNA, 25 bp, Homo sapien
taggactcctatgaccatcaccatg

SEQ ID NO: 2271765 - DNA, 25 bp, Homo sapien
catcaccatggttgggtcacgctgg

SEQ ID NO: 2271766 - DNA, 25 bp, Homo sapien
ccatttcatgactgtgaggttatcg

SEQ ID NO: 2271767 - DNA, 25 bp, Homo sapien
tttggttcacagctgagtgggtgct

SEQ ID NO: 2271768 - DNA, 25 bp, Homo sapien
ttggttcacagctgagtgggtgctt

SEQ ID NO: 2271769 - DNA, 25 bp, Homo sapien
gttcacagctgagtgggtgcttcat

SEQ ID NO: 2271770 - DNA, 25 bp, Homo sapien
ttcacagctgagtgggtgcttcatg

SEQ ID NO: 2271771 - DNA, 25 bp, Homo sapien
ctgtcttttttgtgggatccacagt

SEQ ID NO: 2271772 - DNA, 25 bp, Homo sapien
tttgtgggatccacagtatagtccc

SEQ ID NO: 2271773 - DNA, 25 bp, Homo sapien
tttttgtgggatccacagtatagtc

SEQ ID NO: 2271774 - DNA, 25 bp, Homo sapien
tcttttttgtgggatccacagtata

SEQ ID NO: 2271775 - DNA, 25 bp, Homo sapien
aaatgtggatgtgctagtctcagag

SEQ ID NO: 2271776 - DNA, 25 bp, Homo sapien
tggatgtgctagtctcagagcccca

SEQ ID NO: 2271777 - DNA, 25 bp, Homo sapien
tttgagctctggctagtgtcaccat

SEQ ID NO: 2271778 - DNA, 25 bp, Homo sapien
agagccccaagtctgattttgagct

SEQ ID NO: 2271779 - DNA, 25 bp, Homo sapien
aagaagcatcgaacattccttggac

SEQ ID NO: 2271780 - DNA, 25 bp, Homo sapien
gattttgcatcctctgacaagaagc

SEQ ID NO: 2271781 - DNA, 25 bp, Homo sapien
tcaccacagatcttttggctgcaag

SEQ ID NO: 2271782 - DNA, 25 bp, Homo sapien
actttgggtagattggctgagctcc

SEQ ID NO: 2271783 - DNA, 25 bp, Homo sapien
tgttccagtgtttctatatctcaaa

SEQ ID NO: 2271784 - DNA, 25 bp, Homo sapien
agcaggagaaatccgggattgtacc

SEQ ID NO: 2271785 - DNA, 25 bp, Homo sapien
cagcaggagaaatccgggattgtac

SEQ ID NO: 2271786 - DNA, 25 bp, Homo sapien
atttatgctgaatccaaggtctcat

SEQ ID NO: 2271787 - DNA, 25 bp, Homo sapien
aatttatgctgaatccaaggtctca

SEQ ID NO: 2271788 - DNA, 25 bp, Homo sapien
tgttgtgactgtatctgctaacatc

SEQ ID NO: 2271789 - DNA, 25 bp, Homo sapien
tggtccaagagtttactattggagt

SEQ ID NO: 2271790 - DNA, 25 bp, Homo sapien
actgtatctgctaacatcttggtcc

SEQ ID NO: 2271791 - DNA, 25 bp, Homo sapien
tgggtccacgatctaactttaacac

SEQ ID NO: 2271792 - DNA, 25 bp, Homo sapien
cagaggacttgggactgaacattca

SEQ ID NO: 2271793 - DNA, 25 bp, Homo sapien
gactgtgtcagtctcatcctgtaac

SEQ ID NO: 2271794 - DNA, 25 bp, Homo sapien
ttacaattagagacttagactgcat

SEQ ID NO: 2271795 - DNA, 25 bp, Homo sapien
cattcagactctgtccagatattta

SEQ ID NO: 2271796 - DNA, 25 bp, Homo sapien
ctgaaaccaagcactcagagtatta

SEQ ID NO: 2271797 - DNA, 25 bp, Homo sapien
aagcactcagagtattaatgtcagg

SEQ ID NO: 2271798 - DNA, 25 bp, Homo sapien
agcactcagagtattaatgtcaggc

SEQ ID NO: 2271799 - DNA, 25 bp, Homo sapien
aaaccaagcactcagagtattaatg

SEQ ID NO: 2271800 - DNA, 25 bp, Homo sapien
tatcagttgcagaatgtgtctcgtg

SEQ ID NO: 2271801 - DNA, 25 bp, Homo sapien
tctcgtgtctgactgtattggtttc

SEQ ID NO: 2271802 - DNA, 25 bp, Homo sapien
gaatgtgtctcgtgtctgactgtat

SEQ ID NO: 2271803 - DNA, 25 bp, Homo sapien
tccattgctctattttatcagttgc

SEQ ID NO: 2271804 - DNA, 25 bp, Homo sapien
gattgggtccagattgaaatccagg

SEQ ID NO: 2271805 - DNA, 25 bp, Homo sapien
gttgacactcaaccgggaaacattg

SEQ ID NO: 2271806 - DNA, 25 bp, Homo sapien
tgcttaagaggtttttgtccaggat

SEQ ID NO: 2271807 - DNA, 25 bp, Homo sapien
taatggactcttcaggaaatgttga

SEQ ID NO: 2271808 - DNA, 25 bp, Homo sapien
ttccttcaggcatataggaaggacc

SEQ ID NO: 2271809 - DNA, 25 bp, Homo sapien
gactttccttcaggcatataggaag

SEQ ID NO: 2271810 - DNA, 25 bp, Homo sapien
gttgaaaatatggtggctgcttcag

SEQ ID NO: 2271811 - DNA, 25 bp, Homo sapien
ctttccttcaggcatataggaagga

SEQ ID NO: 2271812 - DNA, 25 bp, Homo sapien
atcctgaagacagtgcccttctccg

SEQ ID NO: 2271813 - DNA, 25 bp, Homo sapien
cctgggccaccaccttcgtctccgc

SEQ ID NO: 2271814 - DNA, 25 bp, Homo sapien
ggtattcctggctcgggcattaacc

SEQ ID NO: 2271815 - DNA, 25 bp, Homo sapien
gaaaaggtattcctggctcgggcat

SEQ ID NO: 2271816 - DNA, 25 bp, Homo sapien
tctcctgagaaaaggtattcctggc

SEQ ID NO: 2271817 - DNA, 25 bp, Homo sapien
actgaaaatgatgcaacactggccc

SEQ ID NO: 2271818 - DNA, 25 bp, Homo sapien
ctgattctttccactcaggccttct

SEQ ID NO: 2271819 - DNA, 25 bp, Homo sapien
ctttgtcagtgatgtagaatttatc

SEQ ID NO: 2271820 - DNA, 25 bp, Homo sapien
tttatctgattctttccactcaggc

SEQ ID NO: 2271821 - DNA, 25 bp, Homo sapien
ggccttcttcaagaccttgattcat

SEQ ID NO: 2271822 - DNA, 25 bp, Homo sapien
agtctcgtctcccaacttttcagag

SEQ ID NO: 2271823 - DNA, 25 bp, Homo sapien
ctaaagcaacactttgacactctca

SEQ ID NO: 2271824 - DNA, 25 bp, Homo sapien
gtctcgtctcccaacttttcagagc

SEQ ID NO: 2271825 - DNA, 25 bp, Homo sapien
gcaacactttgacactctcatccat

SEQ ID NO: 2271826 - DNA, 25 bp, Homo sapien
taccacttgttctcaggatggctga

SEQ ID NO: 2271827 - DNA, 25 bp, Homo sapien
accacttgttctcaggatggctgag

SEQ ID NO: 2271828 - DNA, 25 bp, Homo sapien
cccccacgaagcccgatgcccatcc

SEQ ID NO: 2271829 - DNA, 25 bp, Homo sapien
ccaggccacaggggcattcacggag

SEQ ID NO: 2271830 - DNA, 25 bp, Homo sapien
cccacgaagcccgatgcccatcccc

SEQ ID NO: 2271831 - DNA, 25 bp, Homo sapien
acgaagcccgatgcccatcccctgc

SEQ ID NO: 2271832 - DNA, 25 bp, Homo sapien
taccgctaacccgagtcttaagcac

SEQ ID NO: 2271833 - DNA, 25 bp, Homo sapien
ggtcggcagccccatgtaccgctaa

SEQ ID NO: 2271834 - DNA, 25 bp, Homo sapien
gtggaggtcggcagccccatgtacc

SEQ ID NO: 2271835 - DNA, 25 bp, Homo sapien
ccatgtaccgctaacccgagtctta

SEQ ID NO: 2271836 - DNA, 25 bp, Homo sapien
caggtcaacatctggtgtgccaaac

SEQ ID NO: 2271837 - DNA, 25 bp, Homo sapien
gattcagtgggcaagcctcctgacg

SEQ ID NO: 2271838 - DNA, 25 bp, Homo sapien
catttggcctgtcacgctccgatgt

SEQ ID NO: 2271839 - DNA, 25 bp, Homo sapien
caatctacatctggtcaaggagtct

SEQ ID NO: 2271840 - DNA, 25 bp, Homo sapien
tcttgctgccggtaacagggatgcc

SEQ ID NO: 2271841 - DNA, 25 bp, Homo sapien
atcttgctgccggtaacagggatgc

SEQ ID NO: 2271842 - DNA, 25 bp, Homo sapien
cttcatcttgctgccggtaacaggg

SEQ ID NO: 2271843 - DNA, 25 bp, Homo sapien
aatcttcatcttgctgccggtaaca

SEQ ID NO: 2271844 - DNA, 25 bp, Homo sapien
gtcatgttcagccaaacaggtgaaa

SEQ ID NO: 2271845 - DNA, 25 bp, Homo sapien
cctaccaaaacccgggcagtcatgt

SEQ ID NO: 2271846 - DNA, 25 bp, Homo sapien
acaggtgaaaaagctcaggtaggag

SEQ ID NO: 2271847 - DNA, 25 bp, Homo sapien
caaacaggtgaaaaagctcaggtag

SEQ ID NO: 2271848 - DNA, 25 bp, Homo sapien
catgacagacctgggagaaacattc

SEQ ID NO: 2271849 - DNA, 25 bp, Homo sapien
tgtagacttagatgggcctcaggtg

SEQ ID NO: 2271850 - DNA, 25 bp, Homo sapien
cctggaggaagctctaaaatacatg

SEQ ID NO: 2271851 - DNA, 25 bp, Homo sapien
tgaaggtccccagccattttgcaat

SEQ ID NO: 2271852 - DNA, 25 bp, Homo sapien
tttctaaatggaggacaccagtgaa

SEQ ID NO: 2271853 - DNA, 25 bp, Homo sapien
taaatggaggacaccagtgaaaaga

SEQ ID NO: 2271854 - DNA, 25 bp, Homo sapien
aaatggaggacaccagtgaaaagat

SEQ ID NO: 2271855 - DNA, 25 bp, Homo sapien
tctaaatggaggacaccagtgaaaa

SEQ ID NO: 2271856 - DNA, 25 bp, Homo sapien
tctccaagaagatggtgatctccac

SEQ ID NO: 2271857 - DNA, 25 bp, Homo sapien
ggtgatctccacattaccaccactt

SEQ ID NO: 2271858 - DNA, 25 bp, Homo sapien
gaagatggtgatctccacattacca

SEQ ID NO: 2271859 - DNA, 25 bp, Homo sapien
gttaacttgttctactttcattgct

SEQ ID NO: 2271860 - DNA, 25 bp, Homo sapien
agatgatggagcataatctctggtg

SEQ ID NO: 2271861 - DNA, 25 bp, Homo sapien
ggtatccataatctctagatgatgg

SEQ ID NO: 2271862 - DNA, 25 bp, Homo sapien
atccataatctctagatgatggagc

SEQ ID NO: 2271863 - DNA, 25 bp, Homo sapien
gatgatggagcataatctctggtgt

SEQ ID NO: 2271864 - DNA, 25 bp, Homo sapien
aaaagtttgctaatgtcagcaggaa

SEQ ID NO: 2271865 - DNA, 25 bp, Homo sapien
aaaaagtttgctaatgtcagcagga

SEQ ID NO: 2271866 - DNA, 25 bp, Homo sapien
aagtttgctaatgtcagcaggaaca

SEQ ID NO: 2271867 - DNA, 25 bp, Homo sapien
aaagtttgctaatgtcagcaggaac

SEQ ID NO: 2271868 - DNA, 25 bp, Homo sapien
gcccccactatagtcatcatggtca

SEQ ID NO: 2271869 - DNA, 25 bp, Homo sapien
aggcccccactatagtcatcatggt

SEQ ID NO: 2271870 - DNA, 25 bp, Homo sapien
tgatctctaccaaggcccccactat

SEQ ID NO: 2271871 - DNA, 25 bp, Homo sapien
atctctaccaaggcccccactatag

SEQ ID NO: 2271872 - DNA, 25 bp, Homo sapien
gcaggtggtgcaccatagaaggtcc

SEQ ID NO: 2271873 - DNA, 25 bp, Homo sapien
tgcaggtggtgcaccatagaaggtc

SEQ ID NO: 2271874 - DNA, 25 bp, Homo sapien
tcatgcaggtggtgcaccatagaag

SEQ ID NO: 2271875 - DNA, 25 bp, Homo sapien
catgcaggtggtgcaccatagaagg

SEQ ID NO: 2271876 - DNA, 25 bp, Homo sapien
catttttaattgctctcccagaggg

SEQ ID NO: 2271877 - DNA, 25 bp, Homo sapien
tttttaattgctctcccagagggca

SEQ ID NO: 2271878 - DNA, 25 bp, Homo sapien
ttttaattgctctcccagagggcat

SEQ ID NO: 2271879 - DNA, 25 bp, Homo sapien
atttttaattgctctcccagagggc

SEQ ID NO: 2271880 - DNA, 25 bp, Homo sapien
tttgagcttccccactatctcaggg

SEQ ID NO: 2271881 - DNA, 25 bp, Homo sapien
ttccccactatctcagggttctctg

SEQ ID NO: 2271882 - DNA, 25 bp, Homo sapien
tttcctacttccagtgactggattt

SEQ ID NO: 2271883 - DNA, 25 bp, Homo sapien
tacttccagtgactggattttgagc

SEQ ID NO: 2271884 - DNA, 25 bp, Homo sapien
tttccccttaatgtctgaacaggta

SEQ ID NO: 2271885 - DNA, 25 bp, Homo sapien
ttgtataggaaccaatgcaggaaag

SEQ ID NO: 2271886 - DNA, 25 bp, Homo sapien
caggtatatactgtgatgataaggg

SEQ ID NO: 2271887 - DNA, 25 bp, Homo sapien
gatgataagggttgagtttggacca

SEQ ID NO: 2271888 - DNA, 25 bp, Homo sapien
tgaagagcacctgtatttctgtttt

SEQ ID NO: 2271889 - DNA, 25 bp, Homo sapien
gccgctggaggtaggcaggatttcc

SEQ ID NO: 2271890 - DNA, 25 bp, Homo sapien
atgcagacaacctgagggccgaacg

SEQ ID NO: 2271891 - DNA, 25 bp, Homo sapien
tgctcaggccagctcgaagtgtgct

SEQ ID NO: 2271892 - DNA, 25 bp, Homo sapien
tatggctactgctgcacttgcggga

SEQ ID NO: 2271893 - DNA, 25 bp, Homo sapien
ggtccagataccgagcacggttagc

SEQ ID NO: 2271894 - DNA, 25 bp, Homo sapien
agagcccgtctagcaggcactatgg

SEQ ID NO: 2271895 - DNA, 25 bp, Homo sapien
gagtcggagtccaaggctctgggct

SEQ ID NO: 2271896 - DNA, 25 bp, Homo sapien
acaggccgccctctcctgcagaacc

SEQ ID NO: 2271897 - DNA, 25 bp, Homo sapien
caggccgccctctcctgcagaacct

SEQ ID NO: 2271898 - DNA, 25 bp, Homo sapien
ctgtgcacaggccgccctctcctgc

SEQ ID NO: 2271899 - DNA, 25 bp, Homo sapien
tgcacaggccgccctctcctgcaga

SEQ ID NO: 2271900 - DNA, 25 bp, Homo sapien
gccatgatgtcatacccgactagca

SEQ ID NO: 2271901 - DNA, 25 bp, Homo sapien
ccatgatgtcatacccgactagcat

SEQ ID NO: 2271902 - DNA, 25 bp, Homo sapien
caagaaatcgtgtccggggagatgg

SEQ ID NO: 2271903 - DNA, 25 bp, Homo sapien
tcgtgtccggggagatggtgcctgc

SEQ ID NO: 2271904 - DNA, 25 bp, Homo sapien
gtgtccggggagatggtgcctgcct

SEQ ID NO: 2271905 - DNA, 25 bp, Homo sapien
ggcaagaaatcgtgtccggggagat

SEQ ID NO: 2271906 - DNA, 25 bp, Homo sapien
aagaagaaagaggacagactcaaag

SEQ ID NO: 2271907 - DNA, 25 bp, Homo sapien
ccactacctggccaagaagaagaaa

SEQ ID NO: 2271908 - DNA, 25 bp, Homo sapien
aagaaagaggacagactcaaaggag

SEQ ID NO: 2271909 - DNA, 25 bp, Homo sapien
ggatggctgagttcccccactacct

SEQ ID NO: 2271910 - DNA, 25 bp, Homo sapien
ggaaagcttcatcctactgttggta

SEQ ID NO: 2271911 - DNA, 25 bp, Homo sapien
gaaagcttcatcctactgttggtac

SEQ ID NO: 2271912 - DNA, 25 bp, Homo sapien
gactgcagtcgaatgaatcatcctg

SEQ ID NO: 2271913 - DNA, 25 bp, Homo sapien
ctgtactgcttgcagctgaaggctt

SEQ ID NO: 2271914 - DNA, 25 bp, Homo sapien
gagctgtactgcttgcagctgaagg

SEQ ID NO: 2271915 - DNA, 25 bp, Homo sapien
cactggactgcagtcgaatgaatca

SEQ ID NO: 2271916 - DNA, 25 bp, Homo sapien
ttcccatgatgttccactgaggtgc

SEQ ID NO: 2271917 - DNA, 25 bp, Homo sapien
ccatgatgttccactgaggtgccca

SEQ ID NO: 2271918 - DNA, 25 bp, Homo sapien
tcccatgatgttccactgaggtgcc

SEQ ID NO: 2271919 - DNA, 25 bp, Homo sapien
cccatgatgttccactgaggtgccc

SEQ ID NO: 2271920 - DNA, 25 bp, Homo sapien
ggaagtactgcaggggattgagcca

SEQ ID NO: 2271921 - DNA, 25 bp, Homo sapien
aagtactgcaggggattgagccaca

SEQ ID NO: 2271922 - DNA, 25 bp, Homo sapien
cacagtccctggctgatgatctagg

SEQ ID NO: 2271923 - DNA, 25 bp, Homo sapien
tactgcaggggattgagccacagtc

SEQ ID NO: 2271924 - DNA, 25 bp, Homo sapien
gaaattcaacaccattttgggtcca

SEQ ID NO: 2271925 - DNA, 25 bp, Homo sapien
cagagctgcatggtagtagtagtga

SEQ ID NO: 2271926 - DNA, 25 bp, Homo sapien
tgtccatagttaggcagttgctgcc

SEQ ID NO: 2271927 - DNA, 25 bp, Homo sapien
ccaagatgaaacctagctgaaattc

SEQ ID NO: 2271928 - DNA, 25 bp, Homo sapien
ggtttctgagcttcttactctcacc

SEQ ID NO: 2271929 - DNA, 25 bp, Homo sapien
tggtttctgagcttcttactctcac

SEQ ID NO: 2271930 - DNA, 25 bp, Homo sapien
catggtttctgagcttcttactctc

SEQ ID NO: 2271931 - DNA, 25 bp, Homo sapien
cttcatggtttctgagcttcttact

SEQ ID NO: 2271932 - DNA, 25 bp, Homo sapien
gcatgaccctagaaccactggactg

SEQ ID NO: 2271933 - DNA, 25 bp, Homo sapien
gcagtggagccagtcgccctgtatc

SEQ ID NO: 2271934 - DNA, 25 bp, Homo sapien
ctgcagtggagccagtcgccctgta

SEQ ID NO: 2271935 - DNA, 25 bp, Homo sapien
ctgcatgaccctagaaccactggac

SEQ ID NO: 2271936 - DNA, 25 bp, Homo sapien
tttccttccattgcatctaaaggct

SEQ ID NO: 2271937 - DNA, 25 bp, Homo sapien
ccattgcatctaaaggctctttgac

SEQ ID NO: 2271938 - DNA, 25 bp, Homo sapien
ccaagcctctgggtgctctaggtct

SEQ ID NO: 2271939 - DNA, 25 bp, Homo sapien
cctctgggtgctctaggtcttcttc

SEQ ID NO: 2271940 - DNA, 25 bp, Homo sapien
gtgcctgtggtgtgggtcgggtggc

SEQ ID NO: 2271941 - DNA, 25 bp, Homo sapien
cctgtggtgtgggtcgggtggcaca

SEQ ID NO: 2271942 - DNA, 25 bp, Homo sapien
ctgtggtgtgggtcgggtggcacag

SEQ ID NO: 2271943 - DNA, 25 bp, Homo sapien
tgcctgtggtgtgggtcgggtggca

SEQ ID NO: 2271944 - DNA, 25 bp, Homo sapien
aagtgggcagtagtggcgcggctcc

SEQ ID NO: 2271945 - DNA, 25 bp, Homo sapien
cgccctttgcgtgcagttcgttagg

SEQ ID NO: 2271946 - DNA, 25 bp, Homo sapien
gcgcggctcccagcgccctttgcgt

SEQ ID NO: 2271947 - DNA, 25 bp, Homo sapien
accaccatcgcactgattggtcttg

SEQ ID NO: 2271948 - DNA, 25 bp, Homo sapien
aagcatggtactcggagcctgtatt

SEQ ID NO: 2271949 - DNA, 25 bp, Homo sapien
aggaagcatggtactcggagcctgt

SEQ ID NO: 2271950 - DNA, 25 bp, Homo sapien
ggaagcatggtactcggagcctgta

SEQ ID NO: 2271951 - DNA, 25 bp, Homo sapien
catggtactcggagcctgtatttgc

SEQ ID NO: 2271952 - DNA, 25 bp, Homo sapien
gaacctagtaccacacctacatgga

SEQ ID NO: 2271953 - DNA, 25 bp, Homo sapien
acatggtgtcctcctgggtgctccg

SEQ ID NO: 2271954 - DNA, 25 bp, Homo sapien
ggatgcgaagccttttagaatgctc

SEQ ID NO: 2271955 - DNA, 25 bp, Homo sapien
gttcaggatctagaggcccatgtcc

SEQ ID NO: 2271956 - DNA, 25 bp, Homo sapien
tccagtgagctcattgacggcctgg

SEQ ID NO: 2271957 - DNA, 25 bp, Homo sapien
cctccagtgagctcattgacggcct

SEQ ID NO: 2271958 - DNA, 25 bp, Homo sapien
cagtgagctcattgacggcctgggt

SEQ ID NO: 2271959 - DNA, 25 bp, Homo sapien
gaagacctccagtgagctcattgac

SEQ ID NO: 2271960 - DNA, 25 bp, Homo sapien
catcttgatgaagaattcctgtttc

SEQ ID NO: 2271961 - DNA, 25 bp, Homo sapien
acatcttgatgaagaattcctgttt

SEQ ID NO: 2271962 - DNA, 25 bp, Homo sapien
atctgagccccttggccccgaggtg

SEQ ID NO: 2271963 - DNA, 25 bp, Homo sapien
tcgtcgggacaagcgataatggtgt

SEQ ID NO: 2271964 - DNA, 25 bp, Homo sapien
ccatggcggtcctgcacgtggtctg

SEQ ID NO: 2271965 - DNA, 25 bp, Homo sapien
gccagcccgatgtgttggaagctct

SEQ ID NO: 2271966 - DNA, 25 bp, Homo sapien
tggtggcagcaagctcaattatagg

SEQ ID NO: 2271967 - DNA, 25 bp, Homo sapien
agcagcaggactggaattcttgctg

SEQ ID NO: 2271968 - DNA, 25 bp, Homo sapien
caagctcaattataggtgtctcctg

SEQ ID NO: 2271969 - DNA, 25 bp, Homo sapien
caattataggtgtctcctgcttcat

SEQ ID NO: 2271970 - DNA, 25 bp, Homo sapien
ctacattttaaagccattgacattt

SEQ ID NO: 2271971 - DNA, 25 bp, Homo sapien
ctaaaccagctcatcaaagatggca

SEQ ID NO: 2271972 - DNA, 25 bp, Homo sapien
cagctcatcaaagatggcattatgg

SEQ ID NO: 2271973 - DNA, 25 bp, Homo sapien
aaccagctcatcaaagatggcatta

SEQ ID NO: 2271974 - DNA, 25 bp, Homo sapien
taaaccagctcatcaaagatggcat

SEQ ID NO: 2271975 - DNA, 25 bp, Homo sapien
cctgcgtgagcacgatttccttcat

SEQ ID NO: 2271976 - DNA, 25 bp, Homo sapien
tgcccggcctgcgtgagcacgattt

SEQ ID NO: 2271977 - DNA, 25 bp, Homo sapien
ccggcctgcgtgagcacgatttcct

SEQ ID NO: 2271978 - DNA, 25 bp, Homo sapien
ggcctgcgtgagcacgatttccttc

SEQ ID NO: 2271979 - DNA, 25 bp, Homo sapien
tagaatacaagtcaccgtgtgcggg

SEQ ID NO: 2271980 - DNA, 25 bp, Homo sapien
ggattgaacatgatcaaggcccagc

SEQ ID NO: 2271981 - DNA, 25 bp, Homo sapien
tggctgagggaccacgcctaggtct

SEQ ID NO: 2271982 - DNA, 25 bp, Homo sapien
gaagcctccagaatgcgtgagtgca

SEQ ID NO: 2271983 - DNA, 25 bp, Homo sapien
tgcacatagcctggtgaagcttggg

SEQ ID NO: 2271984 - DNA, 25 bp, Homo sapien
caggtttgttgtcagcacttccttc

SEQ ID NO: 2271985 - DNA, 25 bp, Homo sapien
taatacctagtgtgcatgtccatga

SEQ ID NO: 2271986 - DNA, 25 bp, Homo sapien
tagctgtccatacttactctcctga

SEQ ID NO: 2271987 - DNA, 25 bp, Homo sapien
acttacactgcatatggtctcccac

SEQ ID NO: 2271988 - DNA, 25 bp, Homo sapien
ctgggtccagctccattatgacact

SEQ ID NO: 2271989 - DNA, 25 bp, Homo sapien
acatgatgtaattctgttctgtgac

SEQ ID NO: 2271990 - DNA, 25 bp, Homo sapien
tcttgggacgtctgcctgactttgt

SEQ ID NO: 2271991 - DNA, 25 bp, Homo sapien
acacagtgtgttcttatactcagta

SEQ ID NO: 2271992 - DNA, 25 bp, Homo sapien
caacagaggacacttctggtgttca

SEQ ID NO: 2271993 - DNA, 25 bp, Homo sapien
tcatttgagagttcagctctggcaa

SEQ ID NO: 2271994 - DNA, 25 bp, Homo sapien
tgcctggaggatgtaaaactcattg

SEQ ID NO: 2271995 - DNA, 25 bp, Homo sapien
tttcagggccttctggagtcttcat

SEQ ID NO: 2271996 - DNA, 25 bp, Homo sapien
cagacaggcaatgatgggaggctgc

SEQ ID NO: 2271997 - DNA, 25 bp, Homo sapien
acaggcaatgatgggaggctgcaca

SEQ ID NO: 2271998 - DNA, 25 bp, Homo sapien
cagccatggaaagagtctgtgtcct

SEQ ID NO: 2271999 - DNA, 25 bp, Homo sapien
cacagacaggcaatgatgggaggct

SEQ ID NO: 2272000 - DNA, 25 bp, Homo sapien
gagatggtaactgcccaccgcctgg

SEQ ID NO: 2272001 - DNA, 25 bp, Homo sapien
agagatggtaactgcccaccgcctg

SEQ ID NO: 2272002 - DNA, 25 bp, Homo sapien
cagtagtggttctccacatcgtcct

SEQ ID NO: 2272003 - DNA, 25 bp, Homo sapien
gagttggaagtgatggttgccttca

SEQ ID NO: 2272004 - DNA, 25 bp, Homo sapien
atcgtcctcaactgccagtgcttct

SEQ ID NO: 2272005 - DNA, 25 bp, Homo sapien
aagttctccgtcaagttcacctcag

SEQ ID NO: 2272006 - DNA, 25 bp, Homo sapien
cagaacagccccatgatcgaaatcc

SEQ ID NO: 2272007 - DNA, 25 bp, Homo sapien
aacagccccatgatcgaaatccaag

SEQ ID NO: 2272008 - DNA, 25 bp, Homo sapien
tttcttgttgacacagagatggttg

SEQ ID NO: 2272009 - DNA, 25 bp, Homo sapien
ttcttgttgacacagagatggttga

SEQ ID NO: 2272010 - DNA, 25 bp, Homo sapien
cccatgggttctggagcagaggcct

SEQ ID NO: 2272011 - DNA, 25 bp, Homo sapien
ccgtccaactgctggaagccgtggc

SEQ ID NO: 2272012 - DNA, 25 bp, Homo sapien
caggcctgtgtctctctcgtgtcct

SEQ ID NO: 2272013 - DNA, 25 bp, Homo sapien
ccgtggcactgagcatgtccatggg

SEQ ID NO: 2272014 - DNA, 25 bp, Homo sapien
ccagtttcaaaacaggccattttgg

SEQ ID NO: 2272015 - DNA, 25 bp, Homo sapien
aacaggaatccgtcatcaggacatg

SEQ ID NO: 2272016 - DNA, 25 bp, Homo sapien
cccagctcgcgagctcctgagcttc

SEQ ID NO: 2272017 - DNA, 25 bp, Homo sapien
aggacatgatgcctcagtcccctgc

SEQ ID NO: 2272018 - DNA, 25 bp, Homo sapien
gaaagtgtaaccatgttgactgtta

SEQ ID NO: 2272019 - DNA, 25 bp, Homo sapien
ctggcccccgaaagtgtaaccatgt

SEQ ID NO: 2272020 - DNA, 25 bp, Homo sapien
gtgtctctggcccccgaaagtgtaa

SEQ ID NO: 2272021 - DNA, 25 bp, Homo sapien
aaagtgtaaccatgttgactgttac

SEQ ID NO: 2272022 - DNA, 25 bp, Homo sapien
tgagtccgtactgggtctgcggcca

SEQ ID NO: 2272023 - DNA, 25 bp, Homo sapien
tgaatccgaggcacatctacctccg

SEQ ID NO: 2272024 - DNA, 25 bp, Homo sapien
tgtcccacatgagtccgtactgggt

SEQ ID NO: 2272025 - DNA, 25 bp, Homo sapien
cagggcacgtgggaacatgaatccg

SEQ ID NO: 2272026 - DNA, 25 bp, Homo sapien
ggcctgtgcaacgtggcccaccggg

SEQ ID NO: 2272027 - DNA, 25 bp, Homo sapien
acacggcctgtgcaacgtggcccac

SEQ ID NO: 2272028 - DNA, 25 bp, Homo sapien
gcacacggcctgtgcaacgtggccc

SEQ ID NO: 2272029 - DNA, 25 bp, Homo sapien
ggtgtcaccctccctccttggtcgc

SEQ ID NO: 2272030 - DNA, 25 bp, Homo sapien
ttcatgtcataatcgaaggtccagg

SEQ ID NO: 2272031 - DNA, 25 bp, Homo sapien
tccaggtatccatgccagggtggca

SEQ ID NO: 2272032 - DNA, 25 bp, Homo sapien
tgtacccgaactggacagagagacc

SEQ ID NO: 2272033 - DNA, 25 bp, Homo sapien
agagaccggcattttggagtccagg

SEQ ID NO: 2272034 - DNA, 25 bp, Homo sapien
gatgtcctgccagcatgctttgagc

SEQ ID NO: 2272035 - DNA, 25 bp, Homo sapien
cctgccagcatgctttgagcagaac

SEQ ID NO: 2272036 - DNA, 25 bp, Homo sapien
ctgaatgaaaaagatgtcctgccag

SEQ ID NO: 2272037 - DNA, 25 bp, Homo sapien
tgaaaaagatgtcctgccagcatgc

SEQ ID NO: 2272038 - DNA, 25 bp, Homo sapien
gtggtttctggacccttcagagggc

SEQ ID NO: 2272039 - DNA, 25 bp, Homo sapien
ggacccttcagagggccattaccca

SEQ ID NO: 2272040 - DNA, 25 bp, Homo sapien
ttcagagggccattacccagggccc

SEQ ID NO: 2272041 - DNA, 25 bp, Homo sapien
tctggacccttcagagggccattac

SEQ ID NO: 2272042 - DNA, 25 bp, Homo sapien
cttctttactatcttcttccatttt

SEQ ID NO: 2272043 - DNA, 25 bp, Homo sapien
tcagtaaattttgaggtggctcctc

SEQ ID NO: 2272044 - DNA, 25 bp, Homo sapien
tggcttcatcgcttcactgtgatct

SEQ ID NO: 2272045 - DNA, 25 bp, Homo sapien
aaagattcagggaggggcagtttca

SEQ ID NO: 2272046 - DNA, 25 bp, Homo sapien
ccagagacgtctggcaggatataga

SEQ ID NO: 2272047 - DNA, 25 bp, Homo sapien
catggaaaatcccatggcggcggtg

SEQ ID NO: 2272048 - DNA, 25 bp, Homo sapien
caggatatagatctggaagccgcat

SEQ ID NO: 2272049 - DNA, 25 bp, Homo sapien
aagccgcatctgtcctctcgcatat

SEQ ID NO: 2272050 - DNA, 25 bp, Homo sapien
ttcgctggaggattcgaaaggagtg

SEQ ID NO: 2272051 - DNA, 25 bp, Homo sapien
tcttcgctggaggattcgaaaggag

SEQ ID NO: 2272052 - DNA, 25 bp, Homo sapien
agtcttcgctggaggattcgaaagg

SEQ ID NO: 2272053 - DNA, 25 bp, Homo sapien
cttcgctggaggattcgaaaggagt

SEQ ID NO: 2272054 - DNA, 25 bp, Homo sapien
agcacagtccggggtgatccagtcc

SEQ ID NO: 2272055 - DNA, 25 bp, Homo sapien
gcacagtccggggtgatccagtcca

SEQ ID NO: 2272056 - DNA, 25 bp, Homo sapien
tgatccagtccatcccatccggccc

SEQ ID NO: 2272057 - DNA, 25 bp, Homo sapien
ccgatagctatgttctccgtaatat

SEQ ID NO: 2272058 - DNA, 25 bp, Homo sapien
tactgccttctcttccgatagctat

SEQ ID NO: 2272059 - DNA, 25 bp, Homo sapien
tgtaacaatcaacttgccaatactg

SEQ ID NO: 2272060 - DNA, 25 bp, Homo sapien
ttaagaactcagttcttcataagac

SEQ ID NO: 2272061 - DNA, 25 bp, Homo sapien
ttttgtcagatacggttatctttgg

SEQ ID NO: 2272062 - DNA, 25 bp, Homo sapien
taaatctgaagcattatattactaa

SEQ ID NO: 2272063 - DNA, 25 bp, Homo sapien
tctgaagcattatattactaaaaca

SEQ ID NO: 2272064 - DNA, 25 bp, Homo sapien
tttttgtcagatacggttatctttg

SEQ ID NO: 2272065 - DNA, 25 bp, Homo sapien
gcctataacgcatatagtctcttca

SEQ ID NO: 2272066 - DNA, 25 bp, Homo sapien
aggaaaggcctataacgcatatagt

SEQ ID NO: 2272067 - DNA, 25 bp, Homo sapien
tccagcctgctatatgggaagcact

SEQ ID NO: 2272068 - DNA, 25 bp, Homo sapien
gtctcttcaaagtacacagttttcc

SEQ ID NO: 2272069 - DNA, 25 bp, Homo sapien
cccatctggaaaggatgagccgccc

SEQ ID NO: 2272070 - DNA, 25 bp, Homo sapien
tcatgcgccggacggaatgccaggc

SEQ ID NO: 2272071 - DNA, 25 bp, Homo sapien
gtccccaccgcggaggcctgtggaa

SEQ ID NO: 2272072 - DNA, 25 bp, Homo sapien
ctcacagtggagcgggtcatgcgcc

SEQ ID NO: 2272073 - DNA, 25 bp, Homo sapien
ggcagcgccccacaaggcagagctg

SEQ ID NO: 2272074 - DNA, 25 bp, Homo sapien
gcagagctgggtttggtcccagagg

SEQ ID NO: 2272075 - DNA, 25 bp, Homo sapien
ctggtcccgaaggtgcacacccggg

SEQ ID NO: 2272076 - DNA, 25 bp, Homo sapien
gacacgaacaaagggccaaccagtg

SEQ ID NO: 2272077 - DNA, 25 bp, Homo sapien
ctgcgcggtaccaggagtggtcgac

SEQ ID NO: 2272078 - DNA, 25 bp, Homo sapien
atcgccgccgccgtcacggccagcc

SEQ ID NO: 2272079 - DNA, 25 bp, Homo sapien
cggtaccaggagtggtcgactggcc

SEQ ID NO: 2272080 - DNA, 25 bp, Homo sapien
cgcggtaccaggagtggtcgactgg

SEQ ID NO: 2272081 - DNA, 25 bp, Homo sapien
agcggcctccgagcacgaaggcgac

SEQ ID NO: 2272082 - DNA, 25 bp, Homo sapien
gaacccttcgcaccaacgtgcgagg

SEQ ID NO: 2272083 - DNA, 25 bp, Homo sapien
gcggactgcagtgcccagggtctca

SEQ ID NO: 2272084 - DNA, 25 bp, Homo sapien
gtgaccagcagccactcgtgcaagg

SEQ ID NO: 2272085 - DNA, 25 bp, Homo sapien
ctagtgtcacaaaagctggtggcac

SEQ ID NO: 2272086 - DNA, 25 bp, Homo sapien
ggggtcagcgccctttggcatgtat

SEQ ID NO: 2272087 - DNA, 25 bp, Homo sapien
gtcagcgccctttggcatgtattag

SEQ ID NO: 2272088 - DNA, 25 bp, Homo sapien
acaaaagctggtggcacctgaccct

SEQ ID NO: 2272089 - DNA, 25 bp, Homo sapien
ggcagatttttgaatgggtcgtcgc

SEQ ID NO: 2272090 - DNA, 25 bp, Homo sapien
agatttttgaatgggtcgtcgctgc

SEQ ID NO: 2272091 - DNA, 25 bp, Homo sapien
catcgaaagttgataaggcagattt

SEQ ID NO: 2272092 - DNA, 25 bp, Homo sapien
ttttgaatgggtcgtcgctgccact

SEQ ID NO: 2272093 - DNA, 25 bp, Homo sapien
cctaaaggatttaaagtagactcat

SEQ ID NO: 2272094 - DNA, 25 bp, Homo sapien
tctagtggcacaatacgaatgcccc

SEQ ID NO: 2272095 - DNA, 25 bp, Homo sapien
ggcggttctattccatcattcctag

SEQ ID NO: 2272096 - DNA, 25 bp, Homo sapien
cgggagtgggtaatttttgcacctg

SEQ ID NO: 2272097 - DNA, 25 bp, Homo sapien
gtcggaacaacgacggtatctgatc

SEQ ID NO: 2272098 - DNA, 25 bp, Homo sapien
tggtcggaacaacgacggtatctga

SEQ ID NO: 2272099 - DNA, 25 bp, Homo sapien
tatggtcggaacaacgacggtatct

SEQ ID NO: 2272100 - DNA, 25 bp, Homo sapien
cggaacaacgacggtatctgatcgt

SEQ ID NO: 2272101 - DNA, 25 bp, Homo sapien
tcatggaaataacaccgctgcatca

SEQ ID NO: 2272102 - DNA, 25 bp, Homo sapien
aaatcactccaccaactaaggccat

SEQ ID NO: 2272103 - DNA, 25 bp, Homo sapien
gtctccttcattatcggaattaacc

SEQ ID NO: 2272104 - DNA, 25 bp, Homo sapien
ccagagtctccttcattatcggaat

SEQ ID NO: 2272105 - DNA, 25 bp, Homo sapien
gagtctccttcattatcggaattaa

SEQ ID NO: 2272106 - DNA, 25 bp, Homo sapien
gggtggctaaatgccacttatccct

SEQ ID NO: 2272107 - DNA, 25 bp, Homo sapien
acagacgtgttatttctcaatctcg

SEQ ID NO: 2272108 - DNA, 25 bp, Homo sapien
gtgttatttctcaatctcgggtggc

SEQ ID NO: 2272109 - DNA, 25 bp, Homo sapien
tctcaatctcgggtggctaaatgcc

SEQ ID NO: 2272110 - DNA, 25 bp, Homo sapien
cccgatcaccatcaccaatggtgtt

SEQ ID NO: 2272111 - DNA, 25 bp, Homo sapien
caccaatggtgttcaacaggttacc

SEQ ID NO: 2272112 - DNA, 25 bp, Homo sapien
gtagcgtgcgtgcagccccagacat

SEQ ID NO: 2272113 - DNA, 25 bp, Homo sapien
gtcactgtagcgtgcgtgcagcccc

SEQ ID NO: 2272114 - DNA, 25 bp, Homo sapien
aagggtagggacttcacgcaagcct

SEQ ID NO: 2272115 - DNA, 25 bp, Homo sapien
catccaatcagtagtagcgactggc

SEQ ID NO: 2272116 - DNA, 25 bp, Homo sapien
ggacttcacgcaagcctatgaccca

SEQ ID NO: 2272117 - DNA, 25 bp, Homo sapien
gatccctcgacaggttcaactatgg

SEQ ID NO: 2272118 - DNA, 25 bp, Homo sapien
gcacgatggccactgtgtacagccc

SEQ ID NO: 2272119 - DNA, 25 bp, Homo sapien
catcagcggcgacatgcaagtgcag

SEQ ID NO: 2272120 - DNA, 25 bp, Homo sapien
atgcgacagcacgatggccactgtg

SEQ ID NO: 2272121 - DNA, 25 bp, Homo sapien
gcgacatgcaagtgcagcgcggccc

SEQ ID NO: 2272122 - DNA, 25 bp, Homo sapien
cgcaggagccgagtgatccaccgct

SEQ ID NO: 2272123 - DNA, 25 bp, Homo sapien
acaggaactcgaccccagtgggctc

SEQ ID NO: 2272124 - DNA, 25 bp, Homo sapien
cctgcactacgagctgtgtgaggca

SEQ ID NO: 2272125 - DNA, 25 bp, Homo sapien
gaagaaacaggaccgtggtggtggc

SEQ ID NO: 2272126 - DNA, 25 bp, Homo sapien
cgatgatgcgcaacgacaatgatgg

SEQ ID NO: 2272127 - DNA, 25 bp, Homo sapien
gccctgacatcaaagctctggacgg

SEQ ID NO: 2272128 - DNA, 25 bp, Homo sapien
cctgatggcatatgacactgtagca

SEQ ID NO: 2272129 - DNA, 25 bp, Homo sapien
gaccatggccatgaacgctgccaga

SEQ ID NO: 2272130 - DNA, 25 bp, Homo sapien
ggtccaaggatgtggcagcaccatt

SEQ ID NO: 2272131 - DNA, 25 bp, Homo sapien
gcctctgaaagctgccaatcagtga

SEQ ID NO: 2272132 - DNA, 25 bp, Homo sapien
cgaatcggcatcagattcactccag

SEQ ID NO: 2272133 - DNA, 25 bp, Homo sapien
gaaagtctacgaatcggcatcagat

SEQ ID NO: 2272134 - DNA, 25 bp, Homo sapien
cctctgaaagctgccaatcagtgac

SEQ ID NO: 2272135 - DNA, 25 bp, Homo sapien
ttttcaaagagaaatcctgtcaagg

SEQ ID NO: 2272136 - DNA, 25 bp, Homo sapien
caaagagaaatcctgtcaaggaaac

SEQ ID NO: 2272137 - DNA, 25 bp, Homo sapien
gactgtttatcacaactaaattgga

SEQ ID NO: 2272138 - DNA, 25 bp, Homo sapien
aattggaaatcacggcagctgagga

SEQ ID NO: 2272139 - DNA, 25 bp, Homo sapien
cttgttagaattacaatattgcttc

SEQ ID NO: 2272140 - DNA, 25 bp, Homo sapien
ttctggctacttggttcatcatttc

SEQ ID NO: 2272141 - DNA, 25 bp, Homo sapien
tacttggttcatcatttcttgttag

SEQ ID NO: 2272142 - DNA, 25 bp, Homo sapien
agaattacaatattgcttcttacca

SEQ ID NO: 2272143 - DNA, 25 bp, Homo sapien
ctgtgttgcctcctcgatgggaaaa

SEQ ID NO: 2272144 - DNA, 25 bp, Homo sapien
tgcctcctcgatgggaaaagaaaca

SEQ ID NO: 2272145 - DNA, 25 bp, Homo sapien
gaaacaagcgcactaatggtgcatt

SEQ ID NO: 2272146 - DNA, 25 bp, Homo sapien
gggaaaagaaacaagcgcactaatg

SEQ ID NO: 2272147 - DNA, 25 bp, Homo sapien
ttcttgaacagatgtgctcaacctg

SEQ ID NO: 2272148 - DNA, 25 bp, Homo sapien
aatcacagatctgttcttgaacaga

SEQ ID NO: 2272149 - DNA, 25 bp, Homo sapien
cttgaacagatgtgctcaacctgag

SEQ ID NO: 2272150 - DNA, 25 bp, Homo sapien
tgaacagatgtgctcaacctgagag

SEQ ID NO: 2272151 - DNA, 25 bp, Homo sapien
agtcgaataacacgccagaacttac

SEQ ID NO: 2272152 - DNA, 25 bp, Homo sapien
taaagtcgaataacacgccagaact

SEQ ID NO: 2272153 - DNA, 25 bp, Homo sapien
aaagtcgaataacacgccagaactt

SEQ ID NO: 2272154 - DNA, 25 bp, Homo sapien
ctaaagtcgaataacacgccagaac

SEQ ID NO: 2272155 - DNA, 25 bp, Homo sapien
gagctgcggtgacatcctgcagcca

SEQ ID NO: 2272156 - DNA, 25 bp, Homo sapien
aagttggtagttcgctcccgggctg

SEQ ID NO: 2272157 - DNA, 25 bp, Homo sapien
cagccacacgggaggtggctcctca

SEQ ID NO: 2272158 - DNA, 25 bp, Homo sapien
ctcctcaggggcgattgctggctgt

SEQ ID NO: 2272159 - DNA, 25 bp, Homo sapien
tcccacactccttctgtaagatatt

SEQ ID NO: 2272160 - DNA, 25 bp, Homo sapien
ccacactccttctgtaagatatttc

SEQ ID NO: 2272161 - DNA, 25 bp, Homo sapien
acactccttctgtaagatatttcac

SEQ ID NO: 2272162 - DNA, 25 bp, Homo sapien
ttctcccacactccttctgtaagat

SEQ ID NO: 2272163 - DNA, 25 bp, Homo sapien
tctcctagccagtgggatcctggtc

SEQ ID NO: 2272164 - DNA, 25 bp, Homo sapien
tgctgctttctcctagccagtggga

SEQ ID NO: 2272165 - DNA, 25 bp, Homo sapien
gatcctggtctctcacatctagcca

SEQ ID NO: 2272166 - DNA, 25 bp, Homo sapien
tagccagtgggatcctggtctctca

SEQ ID NO: 2272167 - DNA, 25 bp, Homo sapien
ggagccaattaatgccaccaggttc

SEQ ID NO: 2272168 - DNA, 25 bp, Homo sapien
agagccaggtggacatactcagaca

SEQ ID NO: 2272169 - DNA, 25 bp, Homo sapien
aatgtgcagggcgattaggagccaa

SEQ ID NO: 2272170 - DNA, 25 bp, Homo sapien
tggacatactcagacaggagtcccc

SEQ ID NO: 2272171 - DNA, 25 bp, Homo sapien
ttacacatcgaggccttcaccatga

SEQ ID NO: 2272172 - DNA, 25 bp, Homo sapien
catgaatcaggaagagtgcaaaatc

SEQ ID NO: 2272173 - DNA, 25 bp, Homo sapien
tcaggaagagtgcaaaatcaaacaa

SEQ ID NO: 2272174 - DNA, 25 bp, Homo sapien
catcgaggccttcaccatgaatcag

SEQ ID NO: 2272175 - DNA, 25 bp, Homo sapien
cagtaattcctgatgtacagtgcat

SEQ ID NO: 2272176 - DNA, 25 bp, Homo sapien
tgtggcccagtaattcctgatgtac

SEQ ID NO: 2272177 - DNA, 25 bp, Homo sapien
tggcccagtaattcctgatgtacag

SEQ ID NO: 2272178 - DNA, 25 bp, Homo sapien
gttgtggcccagtaattcctgatgt

SEQ ID NO: 2272179 - DNA, 25 bp, Homo sapien
aatccgagcgtttgacctggggctg

SEQ ID NO: 2272180 - DNA, 25 bp, Homo sapien
tggggctgcgcatttttggcgaaca

SEQ ID NO: 2272181 - DNA, 25 bp, Homo sapien
ctaatccgagcgtttgacctggggc

SEQ ID NO: 2272182 - DNA, 25 bp, Homo sapien
cctggggctgcgcatttttggcgaa

SEQ ID NO: 2272183 - DNA, 25 bp, Homo sapien
tcctctggttagtcgcaatcctctt

SEQ ID NO: 2272184 - DNA, 25 bp, Homo sapien
caggacaggatcttcggtcagcaga

SEQ ID NO: 2272185 - DNA, 25 bp, Homo sapien
aacatggtgctcagaccagtgtgca

SEQ ID NO: 2272186 - DNA, 25 bp, Homo sapien
ttcttgcagggtgcaccagcgactg

SEQ ID NO: 2272187 - DNA, 25 bp, Homo sapien
aggccgccggatacggtctgcgaac

SEQ ID NO: 2272188 - DNA, 25 bp, Homo sapien
gggtcaagtctctgccgcagagaaa

SEQ ID NO: 2272189 - DNA, 25 bp, Homo sapien
ctaggccgccggatacggtctgcga

SEQ ID NO: 2272190 - DNA, 25 bp, Homo sapien
agaaagcggccctgcgccagctagg

SEQ ID NO: 2272191 - DNA, 25 bp, Homo sapien
ctgaggtagaacaacgaagagatgc

SEQ ID NO: 2272192 - DNA, 25 bp, Homo sapien
caacgaagagatgcgcttattcaca

SEQ ID NO: 2272193 - DNA, 25 bp, Homo sapien
caccgacgaactgtgggcaattttt

SEQ ID NO: 2272194 - DNA, 25 bp, Homo sapien
gcttattcacaggtagcaccgacga

SEQ ID NO: 2272195 - DNA, 25 bp, Homo sapien
ctcgctggggacgtagcaggcacaa

SEQ ID NO: 2272196 - DNA, 25 bp, Homo sapien
ccagggatcggaacgtgcagtggac

SEQ ID NO: 2272197 - DNA, 25 bp, Homo sapien
tcggaacgtgcagtggacctcgctg

SEQ ID NO: 2272198 - DNA, 25 bp, Homo sapien
gaagccagggatcggaacgtgcagt

SEQ ID NO: 2272199 - DNA, 25 bp, Homo sapien
acacaactgaccgccttcataagct

SEQ ID NO: 2272200 - DNA, 25 bp, Homo sapien
ccgccttcataagctttgtcctttt

SEQ ID NO: 2272201 - DNA, 25 bp, Homo sapien
tgaccgccttcataagctttgtcct

SEQ ID NO: 2272202 - DNA, 25 bp, Homo sapien
aactgaccgccttcataagctttgt

SEQ ID NO: 2272203 - DNA, 25 bp, Homo sapien
tagttttcctgggtcattggatact

SEQ ID NO: 2272204 - DNA, 25 bp, Homo sapien
caggttcccgtgctcatcagtcata

SEQ ID NO: 2272205 - DNA, 25 bp, Homo sapien
ctgggtcattggatactcaaagtcc

SEQ ID NO: 2272206 - DNA, 25 bp, Homo sapien
ttcatcggcatcttgcctgtactgg

SEQ ID NO: 2272207 - DNA, 25 bp, Homo sapien
attgcaaggcaacatcactggctcc

SEQ ID NO: 2272208 - DNA, 25 bp, Homo sapien
cgtgatatggtctgccccatgctgg

SEQ ID NO: 2272209 - DNA, 25 bp, Homo sapien
aacctttcttggtcactgtgattcc

SEQ ID NO: 2272210 - DNA, 25 bp, Homo sapien
cttttggatggcgagccagaacctt

SEQ ID NO: 2272211 - DNA, 25 bp, Homo sapien
gatggcgagccagaacctttcttgg

SEQ ID NO: 2272212 - DNA, 25 bp, Homo sapien
tttggatggcgagccagaacctttc

SEQ ID NO: 2272213 - DNA, 25 bp, Homo sapien
aagagcctttggacctggccatctg

SEQ ID NO: 2272214 - DNA, 25 bp, Homo sapien
ctggaaagagcctttggacctggcc

SEQ ID NO: 2272215 - DNA, 25 bp, Homo sapien
tggaaagagcctttggacctggcca

SEQ ID NO: 2272216 - DNA, 25 bp, Homo sapien
agcctttggacctggccatctgcct

SEQ ID NO: 2272217 - DNA, 25 bp, Homo sapien
ggattggtcagttcttaggtcagca

SEQ ID NO: 2272218 - DNA, 25 bp, Homo sapien
caaaggtggtgtgactactaggctc

SEQ ID NO: 2272219 - DNA, 25 bp, Homo sapien
catttgtaattgactcaccagggac

SEQ ID NO: 2272220 - DNA, 25 bp, Homo sapien
cagcgtccgtttcagcagtgacaga

SEQ ID NO: 2272221 - DNA, 25 bp, Homo sapien
acatccattctagttcctcacttcc

SEQ ID NO: 2272222 - DNA, 25 bp, Homo sapien
tccattctagttcctcacttcctgt

SEQ ID NO: 2272223 - DNA, 25 bp, Homo sapien
tcacatccattctagttcctcactt

SEQ ID NO: 2272224 - DNA, 25 bp, Homo sapien
cattctagttcctcacttcctgtcc

SEQ ID NO: 2272225 - DNA, 25 bp, Homo sapien
ggtgacccagagaaagaccaccatc

SEQ ID NO: 2272226 - DNA, 25 bp, Homo sapien
ctcgatcttgcacttgaaacttcct

SEQ ID NO: 2272227 - DNA, 25 bp, Homo sapien
gctgcacggtgacccagagaaagac

SEQ ID NO: 2272228 - DNA, 25 bp, Homo sapien
gcacggtgacccagagaaagaccac

SEQ ID NO: 2272229 - DNA, 25 bp, Homo sapien
ttatagacgcctctgtctgagaagg

SEQ ID NO: 2272230 - DNA, 25 bp, Homo sapien
tctgtctgagaaggacgcctccttg

SEQ ID NO: 2272231 - DNA, 25 bp, Homo sapien
aggacgcctccttgatggaaagggt

SEQ ID NO: 2272232 - DNA, 25 bp, Homo sapien
cgcctccttgatggaaagggtccgg

SEQ ID NO: 2272233 - DNA, 25 bp, Homo sapien
tgggcaggggcgcagctttggcagt

SEQ ID NO: 2272234 - DNA, 25 bp, Homo sapien
gcgcagctttggcagtgcagtgaat

SEQ ID NO: 2272235 - DNA, 25 bp, Homo sapien
ggcaggggcgcagctttggcagtgc

SEQ ID NO: 2272236 - DNA, 25 bp, Homo sapien
gcagctttggcagtgcagtgaatgt

SEQ ID NO: 2272237 - DNA, 25 bp, Homo sapien
gatgtagagcgtcccgttggggaaa

SEQ ID NO: 2272238 - DNA, 25 bp, Homo sapien
aggtgcccgtgatgcgcgcgttggc

SEQ ID NO: 2272239 - DNA, 25 bp, Homo sapien
caggttggcggccacgcactcatag

SEQ ID NO: 2272240 - DNA, 25 bp, Homo sapien
cactcatagcgcccgctgtccttgg

SEQ ID NO: 2272241 - DNA, 25 bp, Homo sapien
cggcagcctccagaggatgcgcggc

SEQ ID NO: 2272242 - DNA, 25 bp, Homo sapien
cagcctccagaggatgcgcggccag

SEQ ID NO: 2272243 - DNA, 25 bp, Homo sapien
cttggacggcagcctccagaggatg

SEQ ID NO: 2272244 - DNA, 25 bp, Homo sapien
ttggacggcagcctccagaggatgc

SEQ ID NO: 2272245 - DNA, 25 bp, Homo sapien
gagctgctgaatgccgaagacagca

SEQ ID NO: 2272246 - DNA, 25 bp, Homo sapien
ccatagcagcgtgaactgagttgga

SEQ ID NO: 2272247 - DNA, 25 bp, Homo sapien
gaatgccgaagacagcacaatccag

SEQ ID NO: 2272248 - DNA, 25 bp, Homo sapien
aatccagggattctccaccatagca

SEQ ID NO: 2272249 - DNA, 25 bp, Homo sapien
gaagtctaagcactgctgagttaat

SEQ ID NO: 2272250 - DNA, 25 bp, Homo sapien
gcactgctgagttaataattacaaa

SEQ ID NO: 2272251 - DNA, 25 bp, Homo sapien
tcttccccatgaagtctaagcactg

SEQ ID NO: 2272252 - DNA, 25 bp, Homo sapien
ccccatgaagtctaagcactgctga

SEQ ID NO: 2272253 - DNA, 25 bp, Homo sapien
tattgcaaaatgcccaatggttttt

SEQ ID NO: 2272254 - DNA, 25 bp, Homo sapien
tgctattgcaaaatgcccaatggtt

SEQ ID NO: 2272255 - DNA, 25 bp, Homo sapien
gtggctgctattgcaaaatgcccaa

SEQ ID NO: 2272256 - DNA, 25 bp, Homo sapien
ggctgctattgcaaaatgcccaatg

SEQ ID NO: 2272257 - DNA, 25 bp, Homo sapien
tgtaagaagacattactgtatgacc

SEQ ID NO: 2272258 - DNA, 25 bp, Homo sapien
tgtatgacctcatggtagagaagtc

SEQ ID NO: 2272259 - DNA, 25 bp, Homo sapien
ccccataaaggataaggtatattgg

SEQ ID NO: 2272260 - DNA, 25 bp, Homo sapien
tgttgggataactgtttcaaccaca

SEQ ID NO: 2272261 - DNA, 25 bp, Homo sapien
tgctcaaaggagtcaagcctgatcc

SEQ ID NO: 2272262 - DNA, 25 bp, Homo sapien
tagttagccattggaggcactctgg

SEQ ID NO: 2272263 - DNA, 25 bp, Homo sapien
tccacattgcaagcaggatggtcct

SEQ ID NO: 2272264 - DNA, 25 bp, Homo sapien
gatctatgacattcacagatgggag

SEQ ID NO: 2272265 - DNA, 25 bp, Homo sapien
cttcctctcacttttgctgggaaat

SEQ ID NO: 2272266 - DNA, 25 bp, Homo sapien
ccttcctctcacttttgctgggaaa

SEQ ID NO: 2272267 - DNA, 25 bp, Homo sapien
cctcagcgattgcttggtcacaaaa

SEQ ID NO: 2272268 - DNA, 25 bp, Homo sapien
ccagccacctcagcgattgcttggt

SEQ ID NO: 2272269 - DNA, 25 bp, Homo sapien
caaaattactaagaaccaggccttg

SEQ ID NO: 2272270 - DNA, 25 bp, Homo sapien
gcgattgcttggtcacaaaattact

SEQ ID NO: 2272271 - DNA, 25 bp, Homo sapien
aatgcaacacaacacacagtcctgg

SEQ ID NO: 2272272 - DNA, 25 bp, Homo sapien
tagctaataggcaatatcaatgtca

SEQ ID NO: 2272273 - DNA, 25 bp, Homo sapien
aaagacaaagttcatctggttagat

SEQ ID NO: 2272274 - DNA, 25 bp, Homo sapien
tgcttctgacaaaagtatacaatcc

SEQ ID NO: 2272275 - DNA, 25 bp, Homo sapien
actattagcaatgagcaccctggca

SEQ ID NO: 2272276 - DNA, 25 bp, Homo sapien
catatcaccagttaaaattgcaggg

SEQ ID NO: 2272277 - DNA, 25 bp, Homo sapien
tcatttccaaagaaccagggctctt

SEQ ID NO: 2272278 - DNA, 25 bp, Homo sapien
tagaagcaaaagtagagtcatggcg

SEQ ID NO: 2272279 - DNA, 25 bp, Homo sapien
catgagtctagcttgatgcctgtac

SEQ ID NO: 2272280 - DNA, 25 bp, Homo sapien
tacatggcatatactcagtacaggg

SEQ ID NO: 2272281 - DNA, 25 bp, Homo sapien
caaatgtagggtaacaaatgccatc

SEQ ID NO: 2272282 - DNA, 25 bp, Homo sapien
gtctatacctgtaagcttgcactca

SEQ ID NO: 2272283 - DNA, 25 bp, Homo sapien
gaattatcctataaacactcccgaa

SEQ ID NO: 2272284 - DNA, 25 bp, Homo sapien
ccatttccctgattgaaaagacagt

SEQ ID NO: 2272285 - DNA, 25 bp, Homo sapien
tccctgattgaaaagacagtcatga

SEQ ID NO: 2272286 - DNA, 25 bp, Homo sapien
gacagtcatgaattatcctataaac

SEQ ID NO: 2272287 - DNA, 25 bp, Homo sapien
tctacccaatacatatatactaaat

SEQ ID NO: 2272288 - DNA, 25 bp, Homo sapien
tacccaatacatatatactaaatga

SEQ ID NO: 2272289 - DNA, 25 bp, Homo sapien
cgagtaatcggaactacaggcgtaa

SEQ ID NO: 2272290 - DNA, 25 bp, Homo sapien
agtaatcggaactacaggcgtaagc

SEQ ID NO: 2272291 - DNA, 25 bp, Homo sapien
tgccaatacccctggactctgctgc

SEQ ID NO: 2272292 - DNA, 25 bp, Homo sapien
ctgccaatacccctggactctgctg

SEQ ID NO: 2272293 - DNA, 25 bp, Homo sapien
agaggtgggcccgtgacacacttct

SEQ ID NO: 2272294 - DNA, 25 bp, Homo sapien
gccagaggtgggcccgtgacacact

SEQ ID NO: 2272295 - DNA, 25 bp, Homo sapien
tgaccaatgagaagaattctcaggg

SEQ ID NO: 2272296 - DNA, 25 bp, Homo sapien
ggtgggcccgtgacacacttctgac

SEQ ID NO: 2272297 - DNA, 25 bp, Homo sapien
gtccaggtctgcagcgtaacattca

SEQ ID NO: 2272298 - DNA, 25 bp, Homo sapien
cttggaatctgaaccatacactggg

SEQ ID NO: 2272299 - DNA, 25 bp, Homo sapien
acattcaagacctctggatgttgcc

SEQ ID NO: 2272300 - DNA, 25 bp, Homo sapien
cctactgattcagaccctttccaag

SEQ ID NO: 2272301 - DNA, 25 bp, Homo sapien
cttcatctgccttccaaaaataagc

SEQ ID NO: 2272302 - DNA, 25 bp, Homo sapien
tgctctcaacccgagtgcccgatgg

SEQ ID NO: 2272303 - DNA, 25 bp, Homo sapien
tggtttcatgtcagcagccttcatc

SEQ ID NO: 2272304 - DNA, 25 bp, Homo sapien
gcccgatggaggctttggtttcatg

SEQ ID NO: 2272305 - DNA, 25 bp, Homo sapien
actttagcgaacatatgcgtgtgtg

SEQ ID NO: 2272306 - DNA, 25 bp, Homo sapien
gctgtgtagtatttatctcataaaa

SEQ ID NO: 2272307 - DNA, 25 bp, Homo sapien
ctcctactaatacgcattttggttg

SEQ ID NO: 2272308 - DNA, 25 bp, Homo sapien
gtgtatttggatatatacttaggaa

SEQ ID NO: 2272309 - DNA, 25 bp, Homo sapien
atcaccagccatgcttgcggcggcg

SEQ ID NO: 2272310 - DNA, 25 bp, Homo sapien
gtccaatcatcaccagccatgcttg

SEQ ID NO: 2272311 - DNA, 25 bp, Homo sapien
cagtcgtccaatcatcaccagccat

SEQ ID NO: 2272312 - DNA, 25 bp, Homo sapien
catcaccagccatgcttgcggcggc

SEQ ID NO: 2272313 - DNA, 25 bp, Homo sapien
tacagttctcaaattcttgttggct

SEQ ID NO: 2272314 - DNA, 25 bp, Homo sapien
ttcagcggcggtttcaattcccgcc

SEQ ID NO: 2272315 - DNA, 25 bp, Homo sapien
tttacagttctcaaattcttgttgg

SEQ ID NO: 2272316 - DNA, 25 bp, Homo sapien
cttgttggcttcagcggcggtttca

SEQ ID NO: 2272317 - DNA, 25 bp, Homo sapien
catcactgtcagagtggtcaaactg

SEQ ID NO: 2272318 - DNA, 25 bp, Homo sapien
ggtcaaactgtgagtaattgactgg

SEQ ID NO: 2272319 - DNA, 25 bp, Homo sapien
cactgtcagagtggtcaaactgtga

SEQ ID NO: 2272320 - DNA, 25 bp, Homo sapien
aactgtgagtaattgactggtttct

SEQ ID NO: 2272321 - DNA, 25 bp, Homo sapien
ttcttctttccggagattgttcaag

SEQ ID NO: 2272322 - DNA, 25 bp, Homo sapien
cggagattgttcaagttaggttttg

SEQ ID NO: 2272323 - DNA, 25 bp, Homo sapien
tcttgttttaactcctttggtgctg

SEQ ID NO: 2272324 - DNA, 25 bp, Homo sapien
ctggatttcttgtttaaaggtacag

SEQ ID NO: 2272325 - DNA, 25 bp, Homo sapien
tggcagtaaaacattatatatgcca

SEQ ID NO: 2272326 - DNA, 25 bp, Homo sapien
ttttcatagagaaacttgtggcagt

SEQ ID NO: 2272327 - DNA, 25 bp, Homo sapien
tagagaaacttgtggcagtaaaaca

SEQ ID NO: 2272328 - DNA, 25 bp, Homo sapien
catagagaaacttgtggcagtaaaa

SEQ ID NO: 2272329 - DNA, 25 bp, Homo sapien
gaagcactgagatgtaccttaaaga

SEQ ID NO: 2272330 - DNA, 25 bp, Homo sapien
caagctgctcaaaagtgctatggag

SEQ ID NO: 2272331 - DNA, 25 bp, Homo sapien
gaaaacgtcaaagacagataaggaa

SEQ ID NO: 2272332 - DNA, 25 bp, Homo sapien
ctataaagtcctattcaagctgctc

SEQ ID NO: 2272333 - DNA, 25 bp, Homo sapien
ggcactgcactagctggaatactaa

SEQ ID NO: 2272334 - DNA, 25 bp, Homo sapien
ctgcactagctggaatactaaaagt

SEQ ID NO: 2272335 - DNA, 25 bp, Homo sapien
cactgcactagctggaatactaaaa

SEQ ID NO: 2272336 - DNA, 25 bp, Homo sapien
gcactagctggaatactaaaagtac

SEQ ID NO: 2272337 - DNA, 25 bp, Homo sapien
agctagtgcaacttctaagtctctc

SEQ ID NO: 2272338 - DNA, 25 bp, Homo sapien
ttctgcacattagtggtgactgttg

SEQ ID NO: 2272339 - DNA, 25 bp, Homo sapien
tagtgcaacttctaagtctctctgg

SEQ ID NO: 2272340 - DNA, 25 bp, Homo sapien
tgcaacttctaagtctctctggtag

SEQ ID NO: 2272341 - DNA, 25 bp, Homo sapien
tgtttctattttactactgccatgt

SEQ ID NO: 2272342 - DNA, 25 bp, Homo sapien
tattttactactgccatgtttttca

SEQ ID NO: 2272343 - DNA, 25 bp, Homo sapien
gatatgaggagacttattcattgtt

SEQ ID NO: 2272344 - DNA, 25 bp, Homo sapien
ttctattttactactgccatgtttt

SEQ ID NO: 2272345 - DNA, 25 bp, Homo sapien
cttttcccttgaacaccaccaacat

SEQ ID NO: 2272346 - DNA, 25 bp, Homo sapien
tgaacaccaccaacatcatcttcca

SEQ ID NO: 2272347 - DNA, 25 bp, Homo sapien
gtcattagcactatcaccatcactg

SEQ ID NO: 2272348 - DNA, 25 bp, Homo sapien
gcaaagtctggttcagtgtcattag

SEQ ID NO: 2272349 - DNA, 25 bp, Homo sapien
aaaacagaagattatatagttcatc

SEQ ID NO: 2272350 - DNA, 25 bp, Homo sapien
tctgttgccttaactttatccacag

SEQ ID NO: 2272351 - DNA, 25 bp, Homo sapien
cagacaggtcactaacttcactgag

SEQ ID NO: 2272352 - DNA, 25 bp, Homo sapien
tgaggattctgttgccttaacttta

SEQ ID NO: 2272353 - DNA, 25 bp, Homo sapien
tcgtcattatcctcactctcacaaa

SEQ ID NO: 2272354 - DNA, 25 bp, Homo sapien
tacatttggatttagatttcttctc

SEQ ID NO: 2272355 - DNA, 25 bp, Homo sapien
taactttactttttctcatagagaa

SEQ ID NO: 2272356 - DNA, 25 bp, Homo sapien
agagaagtcttcgtcattatcctca

SEQ ID NO: 2272357 - DNA, 25 bp, Homo sapien
tagtaagtactcagcaacaggctac

SEQ ID NO: 2272358 - DNA, 25 bp, Homo sapien
ttagtaagtactcagcaacaggcta

SEQ ID NO: 2272359 - DNA, 25 bp, Homo sapien
tgtggtaagggatatggcagactct

SEQ ID NO: 2272360 - DNA, 25 bp, Homo sapien
tagggttagaaacatggctcctgct

SEQ ID NO: 2272361 - DNA, 25 bp, Homo sapien
gagtctggctagtcacagtcatgca

SEQ ID NO: 2272362 - DNA, 25 bp, Homo sapien
actggttcagtgtacggctggagca

SEQ ID NO: 2272363 - DNA, 25 bp, Homo sapien
aatatacgtaaaaatgtttgtcatg

SEQ ID NO: 2272364 - DNA, 25 bp, Homo sapien
taaaaatgtttgtcatgcaggaaga

SEQ ID NO: 2272365 - DNA, 25 bp, Homo sapien
cgtaaaaatgtttgtcatgcaggaa

SEQ ID NO: 2272366 - DNA, 25 bp, Homo sapien
tacgtaaaaatgtttgtcatgcagg

SEQ ID NO: 2272367 - DNA, 25 bp, Homo sapien
ccttttttggcaaggactgagattc

SEQ ID NO: 2272368 - DNA, 25 bp, Homo sapien
cccatttaggtttcttgctttcagc

SEQ ID NO: 2272369 - DNA, 25 bp, Homo sapien
gaaggactgcgtatttctaatggtt

SEQ ID NO: 2272370 - DNA, 25 bp, Homo sapien
cagctgaaggactgcgtatttctaa

SEQ ID NO: 2272371 - DNA, 25 bp, Homo sapien
gctttcagctgaaggactgcgtatt

SEQ ID NO: 2272372 - DNA, 25 bp, Homo sapien
cacatgatgtttgtaactaggaaaa

SEQ ID NO: 2272373 - DNA, 25 bp, Homo sapien
tgcccagagatttctaaaataagga

SEQ ID NO: 2272374 - DNA, 25 bp, Homo sapien
gctcacacatgatgtttgtaactag

SEQ ID NO: 2272375 - DNA, 25 bp, Homo sapien
taaggacatttgcacttattgcaat

SEQ ID NO: 2272376 - DNA, 25 bp, Homo sapien
tgctcgcctacacaacagtattata

SEQ ID NO: 2272377 - DNA, 25 bp, Homo sapien
aaggtcctgcaatttttacaagtag

SEQ ID NO: 2272378 - DNA, 25 bp, Homo sapien
gacactaaaacctcaccatgaaagc

SEQ ID NO: 2272379 - DNA, 25 bp, Homo sapien
gatggtgactgtagttgctcgccta

SEQ ID NO: 2272380 - DNA, 25 bp, Homo sapien
gctaatctggacaagccaaggcgga

SEQ ID NO: 2272381 - DNA, 25 bp, Homo sapien
ggtgctagtggcatttggatgcaaa

SEQ ID NO: 2272382 - DNA, 25 bp, Homo sapien
ctctgattgggagacttcacagaca

SEQ ID NO: 2272383 - DNA, 25 bp, Homo sapien
caaggcggagactctgattgggaga

SEQ ID NO: 2272384 - DNA, 25 bp, Homo sapien
ccatctaaatcggagacatatgcca

SEQ ID NO: 2272385 - DNA, 25 bp, Homo sapien
aaactgacaacgtagcttaagtagc

SEQ ID NO: 2272386 - DNA, 25 bp, Homo sapien
aacagaatacgctcttcacaaggaa

SEQ ID NO: 2272387 - DNA, 25 bp, Homo sapien
tgtggacttcatgtcgaactgatag

SEQ ID NO: 2272388 - DNA, 25 bp, Homo sapien
cataatagggatgactaagtacttg

SEQ ID NO: 2272389 - DNA, 25 bp, Homo sapien
catgaaatgtggacaatcaggaaca

SEQ ID NO: 2272390 - DNA, 25 bp, Homo sapien
aacacgtggatgagtggtatcaaga

SEQ ID NO: 2272391 - DNA, 25 bp, Homo sapien
tctgcggagctctcattttatcatg

SEQ ID NO: 2272392 - DNA, 25 bp, Homo sapien
tacaccaaatagagtacctcagtgc

SEQ ID NO: 2272393 - DNA, 25 bp, Homo sapien
ctataaagaacacggcaaaaacagg

SEQ ID NO: 2272394 - DNA, 25 bp, Homo sapien
aaaacaggttattgagctggtgcca

SEQ ID NO: 2272395 - DNA, 25 bp, Homo sapien
tgggtttggcaacataaaggtatca

SEQ ID NO: 2272396 - DNA, 25 bp, Homo sapien
tgttccggtgcggataggcggcggg

SEQ ID NO: 2272397 - DNA, 25 bp, Homo sapien
tttgttccggtgcggataggcggcg

SEQ ID NO: 2272398 - DNA, 25 bp, Homo sapien
tgaggccggcgctgaccgcccgccg

SEQ ID NO: 2272399 - DNA, 25 bp, Homo sapien
ccggtgcggataggcggcgggagga

SEQ ID NO: 2272400 - DNA, 25 bp, Homo sapien
cagaagcttcgtcgcctgcctcgta

SEQ ID NO: 2272401 - DNA, 25 bp, Homo sapien
tcgtactcgcgcctgactgctcgtg

SEQ ID NO: 2272402 - DNA, 25 bp, Homo sapien
gcattctgcacgcttttcattctcc

SEQ ID NO: 2272403 - DNA, 25 bp, Homo sapien
ctcgtgaagtacgagcctccgcggc

SEQ ID NO: 2272404 - DNA, 25 bp, Homo sapien
agagcctcatccacgcgaggcgtgt

SEQ ID NO: 2272405 - DNA, 25 bp, Homo sapien
ttcgcgcgcttttgtgtcaggggct

SEQ ID NO: 2272406 - DNA, 25 bp, Homo sapien
cgtgtggtcgtggacccacttacga

SEQ ID NO: 2272407 - DNA, 25 bp, Homo sapien
gagcacagaggtgcccgggcatatg

SEQ ID NO: 2272408 - DNA, 25 bp, Homo sapien
tgttacattagcagagtacagctga

SEQ ID NO: 2272409 - DNA, 25 bp, Homo sapien
cattagcagagtacagctgaaaccg

SEQ ID NO: 2272410 - DNA, 25 bp, Homo sapien
attccctgttacattagcagagtac

SEQ ID NO: 2272411 - DNA, 25 bp, Homo sapien
cagagtacagctgaaaccgcttgct

SEQ ID NO: 2272412 - DNA, 25 bp, Homo sapien
gggagtcaaatcacatttccttggc

SEQ ID NO: 2272413 - DNA, 25 bp, Homo sapien
ccttggctttttagcatccatttga

SEQ ID NO: 2272414 - DNA, 25 bp, Homo sapien
aggaagggagtcaaatcacatttcc

SEQ ID NO: 2272415 - DNA, 25 bp, Homo sapien
tggctttttagcatccatttgagtc

SEQ ID NO: 2272416 - DNA, 25 bp, Homo sapien
acctttgcctttgcgctgtacccag

SEQ ID NO: 2272417 - DNA, 25 bp, Homo sapien
ttagattaaggccttgcccttctgc

SEQ ID NO: 2272418 - DNA, 25 bp, Homo sapien
tgcctttgcgctgtacccagaggtg

SEQ ID NO: 2272419 - DNA, 25 bp, Homo sapien
tggccctgccaatcagcatgatcct

SEQ ID NO: 2272420 - DNA, 25 bp, Homo sapien
gcaaaggactttgtattagggtcca

SEQ ID NO: 2272421 - DNA, 25 bp, Homo sapien
gaagtcaaacctgaatgctttgggc

SEQ ID NO: 2272422 - DNA, 25 bp, Homo sapien
tataggaggacgatttttgctaggc

SEQ ID NO: 2272423 - DNA, 25 bp, Homo sapien
ccttgggttaggctgctgaactcca

SEQ ID NO: 2272424 - DNA, 25 bp, Homo sapien
acacagtagttttaagtttcaagag

SEQ ID NO: 2272425 - DNA, 25 bp, Homo sapien
tatttaagacccatcagaacaacta

SEQ ID NO: 2272426 - DNA, 25 bp, Homo sapien
ctataaaatacgacataatcaaatc

SEQ ID NO: 2272427 - DNA, 25 bp, Homo sapien
aaagccaatcgacgttgaaaagaca

SEQ ID NO: 2272428 - DNA, 25 bp, Homo sapien
tgtgacactcactgataagcccgtc

SEQ ID NO: 2272429 - DNA, 25 bp, Homo sapien
aatgagacaatgaatgaccgtcgga

SEQ ID NO: 2272430 - DNA, 25 bp, Homo sapien
gaccgtcggatatcctcttccactg

SEQ ID NO: 2272431 - DNA, 25 bp, Homo sapien
gataagcccgtctcttgcaggaagc

SEQ ID NO: 2272432 - DNA, 25 bp, Homo sapien
tctcttcagcttgaactgatttcca

SEQ ID NO: 2272433 - DNA, 25 bp, Homo sapien
gttcctgcttttcgtataggaagtg

SEQ ID NO: 2272434 - DNA, 25 bp, Homo sapien
ctgtttgctgtctcttcagcttgaa

SEQ ID NO: 2272435 - DNA, 25 bp, Homo sapien
caacaccaaatggtcggatcaggat

SEQ ID NO: 2272436 - DNA, 25 bp, Homo sapien
cctatcttcattgagccactgattc

SEQ ID NO: 2272437 - DNA, 25 bp, Homo sapien
catttaacaggtgaatgcattacca

SEQ ID NO: 2272438 - DNA, 25 bp, Homo sapien
cttctagttcgagtcttccatttgc

SEQ ID NO: 2272439 - DNA, 25 bp, Homo sapien
tctagattggctgcttacgattata

SEQ ID NO: 2272440 - DNA, 25 bp, Homo sapien
tgtagatctcagaaagagtggggcc

SEQ ID NO: 2272441 - DNA, 25 bp, Homo sapien
catgtagatctcagaaagagtgggg

SEQ ID NO: 2272442 - DNA, 25 bp, Homo sapien
atgtagatctcagaaagagtggggc

SEQ ID NO: 2272443 - DNA, 25 bp, Homo sapien
cgaacgctggatgtcctcacctgga

SEQ ID NO: 2272444 - DNA, 25 bp, Homo sapien
ttttcggaaaggcacacctccatca

SEQ ID NO: 2272445 - DNA, 25 bp, Homo sapien
cagggaagatagcaactggactctc

SEQ ID NO: 2272446 - DNA, 25 bp, Homo sapien
agtcatacttcacaggcgattttcc

SEQ ID NO: 2272447 - DNA, 25 bp, Homo sapien
agaaaataggaacaatgcttggcat

SEQ ID NO: 2272448 - DNA, 25 bp, Homo sapien
ggaagaaaataggaacaatgcttgg

SEQ ID NO: 2272449 - DNA, 25 bp, Homo sapien
gaagaaaataggaacaatgcttggc

SEQ ID NO: 2272450 - DNA, 25 bp, Homo sapien
gtggaagaaaataggaacaatgctt

SEQ ID NO: 2272451 - DNA, 25 bp, Homo sapien
gaaggtggcttctggatctgaaccg

SEQ ID NO: 2272452 - DNA, 25 bp, Homo sapien
gagttcttgatattggaaggtggct

SEQ ID NO: 2272453 - DNA, 25 bp, Homo sapien
acttgggtcattctggagttcttga

SEQ ID NO: 2272454 - DNA, 25 bp, Homo sapien
gatctgaaccgaaagtttacttcca

SEQ ID NO: 2272455 - DNA, 25 bp, Homo sapien
ctgcaggctttcaacagctcacact

SEQ ID NO: 2272456 - DNA, 25 bp, Homo sapien
agctgcaggctttcaacagctcaca

SEQ ID NO: 2272457 - DNA, 25 bp, Homo sapien
gctgcaggctttcaacagctcacac

SEQ ID NO: 2272458 - DNA, 25 bp, Homo sapien
tagctgcaggctttcaacagctcac

SEQ ID NO: 2272459 - DNA, 25 bp, Homo sapien
gcagagtcaacaaacacatgggctc

SEQ ID NO: 2272460 - DNA, 25 bp, Homo sapien
tcaacaaacacatgggctctgggtt

SEQ ID NO: 2272461 - DNA, 25 bp, Homo sapien
gcagcagagtcaacaaacacatggg

SEQ ID NO: 2272462 - DNA, 25 bp, Homo sapien
gagtcaacaaacacatgggctctgg

SEQ ID NO: 2272463 - DNA, 25 bp, Homo sapien
ccacaaaggggagtgaagtaacact

SEQ ID NO: 2272464 - DNA, 25 bp, Homo sapien
gtccacaaaggggagtgaagtaaca

SEQ ID NO: 2272465 - DNA, 25 bp, Homo sapien
tccacaaaggggagtgaagtaacac

SEQ ID NO: 2272466 - DNA, 25 bp, Homo sapien
gatgacttcagcaggactttcttgc

SEQ ID NO: 2272467 - DNA, 25 bp, Homo sapien
acttcagcaggactttcttgctaat

SEQ ID NO: 2272468 - DNA, 25 bp, Homo sapien
tgacttcagcaggactttcttgcta

SEQ ID NO: 2272469 - DNA, 25 bp, Homo sapien
gacttcagcaggactttcttgctaa

SEQ ID NO: 2272470 - DNA, 25 bp, Homo sapien
ctggctttggactaaaaccaggtct

SEQ ID NO: 2272471 - DNA, 25 bp, Homo sapien
cttctcagggtccagtccgtctgca

SEQ ID NO: 2272472 - DNA, 25 bp, Homo sapien
gcagctactgtgcttttccccacta

SEQ ID NO: 2272473 - DNA, 25 bp, Homo sapien
ctatcctgggcctttctaaaactgg

SEQ ID NO: 2272474 - DNA, 25 bp, Homo sapien
gtcagagtcaccttttgcttctttg

SEQ ID NO: 2272475 - DNA, 25 bp, Homo sapien
gaagccttgagctctgaggccggca

SEQ ID NO: 2272476 - DNA, 25 bp, Homo sapien
taatgctagggtggaaaggtatttc

SEQ ID NO: 2272477 - DNA, 25 bp, Homo sapien
tagggtggaaaggtatttctgaagc

SEQ ID NO: 2272478 - DNA, 25 bp, Homo sapien
gatagggggcaccatattatttgac

SEQ ID NO: 2272479 - DNA, 25 bp, Homo sapien
acattggcgctctcgtgcgtggtca

SEQ ID NO: 2272480 - DNA, 25 bp, Homo sapien
gttaggacttccctacaccagccag

SEQ ID NO: 2272481 - DNA, 25 bp, Homo sapien
cagattgcaagaagagattatgagt

SEQ ID NO: 2272482 - DNA, 25 bp, Homo sapien
gcaagttgcccaagttaacgtggaa

SEQ ID NO: 2272483 - DNA, 25 bp, Homo sapien
tataattagtccgtcttgagaggct

SEQ ID NO: 2272484 - DNA, 25 bp, Homo sapien
tagagcagcgcaggtaaaaattcca

SEQ ID NO: 2272485 - DNA, 25 bp, Homo sapien
ggaggcttcacgctcaaatctgcag

SEQ ID NO: 2272486 - DNA, 25 bp, Homo sapien
taaatttctcaggagccgtgtcgag

SEQ ID NO: 2272487 - DNA, 25 bp, Homo sapien
acagctccgcgtagcccaggatttc

SEQ ID NO: 2272488 - DNA, 25 bp, Homo sapien
tcttggcttcaagacccaggaacca

SEQ ID NO: 2272489 - DNA, 25 bp, Homo sapien
catcatcaaaactcgtcttgctaaa

SEQ ID NO: 2272490 - DNA, 25 bp, Homo sapien
ggtaggcaatgtgatcatgcaggac

SEQ ID NO: 2272491 - DNA, 25 bp, Homo sapien
cacttggccacctgtccaaaggacc

SEQ ID NO: 2272492 - DNA, 25 bp, Homo sapien
gtttttgtgatccaagcacttggcc

SEQ ID NO: 2272493 - DNA, 25 bp, Homo sapien
gtctccagaacttcatagcggtagg

SEQ ID NO: 2272494 - DNA, 25 bp, Homo sapien
agtagaaaaagtccttcatatgcac

SEQ ID NO: 2272495 - DNA, 25 bp, Homo sapien
aggtgatgcagaagtgattgcgaaa

SEQ ID NO: 2272496 - DNA, 25 bp, Homo sapien
gcagaagtgattgcgaaagtagaaa

SEQ ID NO: 2272497 - DNA, 25 bp, Homo sapien
tgattgcgaaagtagaaaaagtcct

SEQ ID NO: 2272498 - DNA, 25 bp, Homo sapien
tgattttctctaccgaaagcatctg

SEQ ID NO: 2272499 - DNA, 25 bp, Homo sapien
gccgaactatggacagactgaagcc

SEQ ID NO: 2272500 - DNA, 25 bp, Homo sapien
taccgaaagcatctgcaagcacttc

SEQ ID NO: 2272501 - DNA, 25 bp, Homo sapien
agagagagtgaagcgccgaactatg

SEQ ID NO: 2272502 - DNA, 25 bp, Homo sapien
catatgtcaagctacagtaatgcgg

SEQ ID NO: 2272503 - DNA, 25 bp, Homo sapien
gaagaaaagacatatgtcaagctac

SEQ ID NO: 2272504 - DNA, 25 bp, Homo sapien
agctacagtaatgcggccctaggcc

SEQ ID NO: 2272505 - DNA, 25 bp, Homo sapien
gaaaagacatatgtcaagctacagt

SEQ ID NO: 2272506 - DNA, 25 bp, Homo sapien
taacagaggcttggcccttttggta

SEQ ID NO: 2272507 - DNA, 25 bp, Homo sapien
caaagtcaatgactttaacagaggc

SEQ ID NO: 2272508 - DNA, 25 bp, Homo sapien
tctggtgttcataacagcttgatcc

SEQ ID NO: 2272509 - DNA, 25 bp, Homo sapien
cccttttggtatagcactatatttt

SEQ ID NO: 2272510 - DNA, 25 bp, Homo sapien
gtagcccgtgtacaactccgccgtg

SEQ ID NO: 2272511 - DNA, 25 bp, Homo sapien
ggatcggtagaaccggctttggatg

SEQ ID NO: 2272512 - DNA, 25 bp, Homo sapien
aaccggctttggatgtacgtgtata

SEQ ID NO: 2272513 - DNA, 25 bp, Homo sapien
ccgtgtacaactccgccgtgatgca

SEQ ID NO: 2272514 - DNA, 25 bp, Homo sapien
cgtgggagccgaccgccagccctcc

SEQ ID NO: 2272515 - DNA, 25 bp, Homo sapien
tgggagccgaccgccagccctccgc

SEQ ID NO: 2272516 - DNA, 25 bp, Homo sapien
gtgggagccgaccgccagccctccg

SEQ ID NO: 2272517 - DNA, 25 bp, Homo sapien
gattttaatgggtgtcatgtccgtc

SEQ ID NO: 2272518 - DNA, 25 bp, Homo sapien
tacacatgaggcttacggtatcagg

SEQ ID NO: 2272519 - DNA, 25 bp, Homo sapien
tcgacttgacaagtacaagggagta

SEQ ID NO: 2272520 - DNA, 25 bp, Homo sapien
gataaaacgttagatgtcgacttga

SEQ ID NO: 2272521 - DNA, 25 bp, Homo sapien
cataatgaatgactaatgcctgaac

SEQ ID NO: 2272522 - DNA, 25 bp, Homo sapien
cattaattagaacaggcttcctcac

SEQ ID NO: 2272523 - DNA, 25 bp, Homo sapien
cattttaatcgggttgtcagctgac

SEQ ID NO: 2272524 - DNA, 25 bp, Homo sapien
ggagtcaccgaattagacgacatta

SEQ ID NO: 2272525 - DNA, 25 bp, Homo sapien
gctgtctgaatgaagccggctggcg

SEQ ID NO: 2272526 - DNA, 25 bp, Homo sapien
ggctgtctgaatgaagccggctggc

SEQ ID NO: 2272527 - DNA, 25 bp, Homo sapien
cctggaggctgtctgaatgaagccg

SEQ ID NO: 2272528 - DNA, 25 bp, Homo sapien
ggaggctgtctgaatgaagccggct

SEQ ID NO: 2272529 - DNA, 25 bp, Homo sapien
catgtgtagattacccaaggaatgc

SEQ ID NO: 2272530 - DNA, 25 bp, Homo sapien
cacacacactcagtttgaaataacc

SEQ ID NO: 2272531 - DNA, 25 bp, Homo sapien
gagtggcctctgtagctcttttgct

SEQ ID NO: 2272532 - DNA, 25 bp, Homo sapien
ggtgtaaatctttagtggtcacatg

SEQ ID NO: 2272533 - DNA, 25 bp, Homo sapien
gttttcagcaccatcgtgaggtcct

SEQ ID NO: 2272534 - DNA, 25 bp, Homo sapien
gcaccatcgtgaggtccttggaatc

SEQ ID NO: 2272535 - DNA, 25 bp, Homo sapien
ttcagcaccatcgtgaggtccttgg

SEQ ID NO: 2272536 - DNA, 25 bp, Homo sapien
catcgtgaggtccttggaatctggg

SEQ ID NO: 2272537 - DNA, 25 bp, Homo sapien
tataagacgatttgggtactaaatc

SEQ ID NO: 2272538 - DNA, 25 bp, Homo sapien
tccctaatataagacgatttgggta

SEQ ID NO: 2272539 - DNA, 25 bp, Homo sapien
ccctaattccctaatataagacgat

SEQ ID NO: 2272540 - DNA, 25 bp, Homo sapien
aattccctaatataagacgatttgg

SEQ ID NO: 2272541 - DNA, 25 bp, Homo sapien
tagaacagagattatggcatataac

SEQ ID NO: 2272542 - DNA, 25 bp, Homo sapien
taagctatgttgatatctcaaagat

SEQ ID NO: 2272543 - DNA, 25 bp, Homo sapien
caacaaagccccacatgggttattg

SEQ ID NO: 2272544 - DNA, 25 bp, Homo sapien
tacctggaaacaactaatggaaata

SEQ ID NO: 2272545 - DNA, 25 bp, Homo sapien
tggtccggggtcatgcgaagagaag

SEQ ID NO: 2272546 - DNA, 25 bp, Homo sapien
ccggggtcatgcgaagagaaggttc

SEQ ID NO: 2272547 - DNA, 25 bp, Homo sapien
gcctggtccggggtcatgcgaagag

SEQ ID NO: 2272548 - DNA, 25 bp, Homo sapien
ggtcatgcgaagagaaggttcccat

SEQ ID NO: 2272549 - DNA, 25 bp, Homo sapien
cgagtgatgacagccttgaaccttg

SEQ ID NO: 2272550 - DNA, 25 bp, Homo sapien
cttttctgctcgagtgatgacagcc

SEQ ID NO: 2272551 - DNA, 25 bp, Homo sapien
tgtggcttgaggttccgagactgat

SEQ ID NO: 2272552 - DNA, 25 bp, Homo sapien
tccttccttgtctcagaggggaaaa

SEQ ID NO: 2272553 - DNA, 25 bp, Homo sapien
gattttaatttccagactacagaac

SEQ ID NO: 2272554 - DNA, 25 bp, Homo sapien
aatggcaggctagtcatgatgtagc

SEQ ID NO: 2272555 - DNA, 25 bp, Homo sapien
gagaaattgacatgcaaatccttca

SEQ ID NO: 2272556 - DNA, 25 bp, Homo sapien
tagaatattaattcccggactgtgg

SEQ ID NO: 2272557 - DNA, 25 bp, Homo sapien
tctgatcatttcagcgaccctggag

SEQ ID NO: 2272558 - DNA, 25 bp, Homo sapien
tgtaaagcacctccaatgtgccggg

SEQ ID NO: 2272559 - DNA, 25 bp, Homo sapien
gccgggcattattctaagcactgta

SEQ ID NO: 2272560 - DNA, 25 bp, Homo sapien
tcacttagtggaaacgatgaccgtg

SEQ ID NO: 2272561 - DNA, 25 bp, Homo sapien
gagcgtctaccagttgaggcagctg

SEQ ID NO: 2272562 - DNA, 25 bp, Homo sapien
aacagtgtcagctccgtgctggaga

SEQ ID NO: 2272563 - DNA, 25 bp, Homo sapien
gagacagtcctgctgatcacctgaa

SEQ ID NO: 2272564 - DNA, 25 bp, Homo sapien
ctgacttcttgggagcgtctaccag

SEQ ID NO: 2272565 - DNA, 25 bp, Homo sapien
ttggcggttaacttctgagcagggc

SEQ ID NO: 2272566 - DNA, 25 bp, Homo sapien
gactccctgttagcaaggaagcctg

SEQ ID NO: 2272567 - DNA, 25 bp, Homo sapien
taagaggagtcatgccaattggcca

SEQ ID NO: 2272568 - DNA, 25 bp, Homo sapien
tgaattcctggatcctgctgcgcct

SEQ ID NO: 2272569 - DNA, 25 bp, Homo sapien
caatagtttaccacttaagctggaa

SEQ ID NO: 2272570 - DNA, 25 bp, Homo sapien
tgcttagcccaatttatggatatgt

SEQ ID NO: 2272571 - DNA, 25 bp, Homo sapien
aagtgaggtttttggtaggcagcat

SEQ ID NO: 2272572 - DNA, 25 bp, Homo sapien
gccttctcttggactatttgaacat

SEQ ID NO: 2272573 - DNA, 25 bp, Homo sapien
tccggacatcaaggagcacttctcc

SEQ ID NO: 2272574 - DNA, 25 bp, Homo sapien
ctgtccggacatcaaggagcacttc

SEQ ID NO: 2272575 - DNA, 25 bp, Homo sapien
tctccttccatgtgagcacaaacgt

SEQ ID NO: 2272576 - DNA, 25 bp, Homo sapien
gagcacaaacgtcttagttggtgag

SEQ ID NO: 2272577 - DNA, 25 bp, Homo sapien
gtgacattgacaggacccggacaac

SEQ ID NO: 2272578 - DNA, 25 bp, Homo sapien
acaacccgggattgtgcggcagccg

SEQ ID NO: 2272579 - DNA, 25 bp, Homo sapien
acattgacaggacccggacaacccg

SEQ ID NO: 2272580 - DNA, 25 bp, Homo sapien
ccggacaacccgggattgtgcggca

SEQ ID NO: 2272581 - DNA, 25 bp, Homo sapien
cctcccaaggtggtgcacaattgaa

SEQ ID NO: 2272582 - DNA, 25 bp, Homo sapien
tgcctaggaagttggcgtgaccgct

SEQ ID NO: 2272583 - DNA, 25 bp, Homo sapien
gcggaaagcgaaaggagaaaccaga

SEQ ID NO: 2272584 - DNA, 25 bp, Homo sapien
gctccaaacctagagaaaccagagt

SEQ ID NO: 2272585 - DNA, 25 bp, Homo sapien
cagcaagagacttgtcaaacattcc

SEQ ID NO: 2272586 - DNA, 25 bp, Homo sapien
taaaaggagtgaagtgcttgagaaa

SEQ ID NO: 2272587 - DNA, 25 bp, Homo sapien
ataatgataaaaggagtgaagtgct

SEQ ID NO: 2272588 - DNA, 25 bp, Homo sapien
gaggttcttggtactagaatgaacc

SEQ ID NO: 2272589 - DNA, 25 bp, Homo sapien
ctggcgacagggtgggccgtgacac

SEQ ID NO: 2272590 - DNA, 25 bp, Homo sapien
agggtgggccgtgacacacagatgt

SEQ ID NO: 2272591 - DNA, 25 bp, Homo sapien
actgactgaggaacgtccacctttc

SEQ ID NO: 2272592 - DNA, 25 bp, Homo sapien
gactgaggaacgtccacctttccca

SEQ ID NO: 2272593 - DNA, 25 bp, Homo sapien
atcccactgactgaggaacgtccac

SEQ ID NO: 2272594 - DNA, 25 bp, Homo sapien
ccactgactgaggaacgtccacctt

SEQ ID NO: 2272595 - DNA, 25 bp, Homo sapien
ccatgggacgaaggtgcatgatgtc

SEQ ID NO: 2272596 - DNA, 25 bp, Homo sapien
cccatgggacgaaggtgcatgatgt

SEQ ID NO: 2272597 - DNA, 25 bp, Homo sapien
catgggacgaaggtgcatgatgtca

SEQ ID NO: 2272598 - DNA, 25 bp, Homo sapien
tatgacaaagactctacgacctgca

SEQ ID NO: 2272599 - DNA, 25 bp, Homo sapien
caatctagagcttgcatgacaaagg

SEQ ID NO: 2272600 - DNA, 25 bp, Homo sapien
aattttactgaaatgcagccatgcc

SEQ ID NO: 2272601 - DNA, 25 bp, Homo sapien
gagatgccggaacctagctgaaaga

SEQ ID NO: 2272602 - DNA, 25 bp, Homo sapien
tggtcatccaaacgtgctcagagca

SEQ ID NO: 2272603 - DNA, 25 bp, Homo sapien
tcaatgcaagtttcaaaatgggcca

SEQ ID NO: 2272604 - DNA, 25 bp, Homo sapien
caagggcacacagtcaggtgggcaa

SEQ ID NO: 2272605 - DNA, 25 bp, Homo sapien
gacacagtctaaacagtggctttgg

SEQ ID NO: 2272606 - DNA, 25 bp, Homo sapien
tgtgttgtactactcgtcggataga

SEQ ID NO: 2272607 - DNA, 25 bp, Homo sapien
tgtactactcgtcggatagaatctt

SEQ ID NO: 2272608 - DNA, 25 bp, Homo sapien
tgctgtgttgtactactcgtcggat

SEQ ID NO: 2272609 - DNA, 25 bp, Homo sapien
tgttgtactactcgtcggatagaat

SEQ ID NO: 2272610 - DNA, 25 bp, Homo sapien
ggggaatcttcacaaaaacatcctc

SEQ ID NO: 2272611 - DNA, 25 bp, Homo sapien
gggaatcttcacaaaaacatcctca

SEQ ID NO: 2272612 - DNA, 25 bp, Homo sapien
ggaatcttcacaaaaacatcctcaa

SEQ ID NO: 2272613 - DNA, 25 bp, Homo sapien
cttccggaaatgcatctctcactac

SEQ ID NO: 2272614 - DNA, 25 bp, Homo sapien
gcttccggaaatgcatctctcacta

SEQ ID NO: 2272615 - DNA, 25 bp, Homo sapien
tggcttccggaaatgcatctctcac

SEQ ID NO: 2272616 - DNA, 25 bp, Homo sapien
ggcttccggaaatgcatctctcact

SEQ ID NO: 2272617 - DNA, 25 bp, Homo sapien
ccatttaagagtagaaattaggccg

SEQ ID NO: 2272618 - DNA, 25 bp, Homo sapien
ttaagagtagaaattaggccgggca

SEQ ID NO: 2272619 - DNA, 25 bp, Homo sapien
cagtggctcatgcctgtaatcccag

SEQ ID NO: 2272620 - DNA, 25 bp, Homo sapien
cctgggtgtcagagtgcgactctgt

SEQ ID NO: 2272621 - DNA, 25 bp, Homo sapien
gggtataggaccaaaccgatgcata

SEQ ID NO: 2272622 - DNA, 25 bp, Homo sapien
aggggtataggaccaaaccgatgca

SEQ ID NO: 2272623 - DNA, 25 bp, Homo sapien
ggggtataggaccaaaccgatgcat

SEQ ID NO: 2272624 - DNA, 25 bp, Homo sapien
ggtataggaccaaaccgatgcatac

SEQ ID NO: 2272625 - DNA, 25 bp, Homo sapien
caggatccttaactgcattaacaat

SEQ ID NO: 2272626 - DNA, 25 bp, Homo sapien
ggcatcaggatccttaactgcatta

SEQ ID NO: 2272627 - DNA, 25 bp, Homo sapien
catcaggatccttaactgcattaac

SEQ ID NO: 2272628 - DNA, 25 bp, Homo sapien
gatccttaactgcattaacaattcc

SEQ ID NO: 2272629 - DNA, 25 bp, Homo sapien
cattctattccgtaatgtctttttc

SEQ ID NO: 2272630 - DNA, 25 bp, Homo sapien
acatcataatcgtctttccacatca

SEQ ID NO: 2272631 - DNA, 25 bp, Homo sapien
tattttatcaattgccagttttgag

SEQ ID NO: 2272632 - DNA, 25 bp, Homo sapien
tacactgcatgtaatcacaattatt

SEQ ID NO: 2272633 - DNA, 25 bp, Homo sapien
ccacagcaaagatgtacttcaccag

SEQ ID NO: 2272634 - DNA, 25 bp, Homo sapien
cacagcaaagatgtacttcaccagg

SEQ ID NO: 2272635 - DNA, 25 bp, Homo sapien
acagcaaagatgtacttcaccaggt

SEQ ID NO: 2272636 - DNA, 25 bp, Homo sapien
tgtgcaccactgtgcgcagtagcag

SEQ ID NO: 2272637 - DNA, 25 bp, Homo sapien
attctcttgcatcaccccacctcca

SEQ ID NO: 2272638 - DNA, 25 bp, Homo sapien
gcaattctcttgcatcaccccacct

SEQ ID NO: 2272639 - DNA, 25 bp, Homo sapien
tgtgcgcagtagcagtcacctaggc

SEQ ID NO: 2272640 - DNA, 25 bp, Homo sapien
tggatttacccagcaggacttgacg

SEQ ID NO: 2272641 - DNA, 25 bp, Homo sapien
gcacagggttccacagccgtttaaa

SEQ ID NO: 2272642 - DNA, 25 bp, Homo sapien
cagtagcagtgggttttcaactagc

SEQ ID NO: 2272643 - DNA, 25 bp, Homo sapien
gagtacatgcgttgagtatcaccca

SEQ ID NO: 2272644 - DNA, 25 bp, Homo sapien
taagctagcctatgagaactgcagg

SEQ ID NO: 2272645 - DNA, 25 bp, Homo sapien
aataaccacctcgacctgtgaggct

SEQ ID NO: 2272646 - DNA, 25 bp, Homo sapien
tgtgataagcatctctctgcccaag

SEQ ID NO: 2272647 - DNA, 25 bp, Homo sapien
caggaagacagaccgctgtagagca

SEQ ID NO: 2272648 - DNA, 25 bp, Homo sapien
tccagggctcaaatgggcttatttc

SEQ ID NO: 2272649 - DNA, 25 bp, Homo sapien
gctccactttatcccttgttatcca

SEQ ID NO: 2272650 - DNA, 25 bp, Homo sapien
gggcttatttcaaagactcttgcta

SEQ ID NO: 2272651 - DNA, 25 bp, Homo sapien
tgttatccagggctcaaatgggctt

SEQ ID NO: 2272652 - DNA, 25 bp, Homo sapien
tgcaattcttttaccagagggctgt

SEQ ID NO: 2272653 - DNA, 25 bp, Homo sapien
agtctgcaattcttttaccagaggg

SEQ ID NO: 2272654 - DNA, 25 bp, Homo sapien
tcttttaccagagggctgtaagcca

SEQ ID NO: 2272655 - DNA, 25 bp, Homo sapien
caattcttttaccagagggctgtaa

SEQ ID NO: 2272656 - DNA, 25 bp, Homo sapien
cggtaagtgcgatgacgccgcagca

SEQ ID NO: 2272657 - DNA, 25 bp, Homo sapien
agccagcggtaagtgcgatgacgcc

SEQ ID NO: 2272658 - DNA, 25 bp, Homo sapien
ccagcggtaagtgcgatgacgccgc

SEQ ID NO: 2272659 - DNA, 25 bp, Homo sapien
gacagccagcggtaagtgcgatgac

SEQ ID NO: 2272660 - DNA, 25 bp, Homo sapien
agacgccaaaaccaagagctgctca

SEQ ID NO: 2272661 - DNA, 25 bp, Homo sapien
catgggccgacccaaaagacgccaa

SEQ ID NO: 2272662 - DNA, 25 bp, Homo sapien
tgggtgctcaaaccacatgggccga

SEQ ID NO: 2272663 - DNA, 25 bp, Homo sapien
taaagagaccgcctggctgggtgct

SEQ ID NO: 2272664 - DNA, 25 bp, Homo sapien
cctgaaatgttttaatagtggaact

SEQ ID NO: 2272665 - DNA, 25 bp, Homo sapien
ctgaaatgttttaatagtggaactg

SEQ ID NO: 2272666 - DNA, 25 bp, Homo sapien
tgaaatgttttaatagtggaactgt

SEQ ID NO: 2272667 - DNA, 25 bp, Homo sapien
gggtctttacaatactttgacatta

SEQ ID NO: 2272668 - DNA, 25 bp, Homo sapien
aaatcatgctcaagttctaagtgac

SEQ ID NO: 2272669 - DNA, 25 bp, Homo sapien
gctagaagtggtttgtcataggaaa

SEQ ID NO: 2272670 - DNA, 25 bp, Homo sapien
gggtccttgtcttctagaacgtatg

SEQ ID NO: 2272671 - DNA, 25 bp, Homo sapien
gtgaaacacaatgaccaaccctggg

SEQ ID NO: 2272672 - DNA, 25 bp, Homo sapien
gggcattccctcatcaaacagcgtt

SEQ ID NO: 2272673 - DNA, 25 bp, Homo sapien
taatccagatgtggtactaagggca

SEQ ID NO: 2272674 - DNA, 25 bp, Homo sapien
tctctgtaaggagacgggcattccc

SEQ ID NO: 2272675 - DNA, 25 bp, Homo sapien
gccccaagatgatcccaatgctggt

SEQ ID NO: 2272676 - DNA, 25 bp, Homo sapien
ccacagcaactcaaaagcgttggga

SEQ ID NO: 2272677 - DNA, 25 bp, Homo sapien
cacacttggagtagctcactgttga

SEQ ID NO: 2272678 - DNA, 25 bp, Homo sapien
tggtgatctatggaccacacttgga

SEQ ID NO: 2272679 - DNA, 25 bp, Homo sapien
catctaagtgtaaagaaagacttcc

SEQ ID NO: 2272680 - DNA, 25 bp, Homo sapien
ctgttttaggtgctgtggacatagc

SEQ ID NO: 2272681 - DNA, 25 bp, Homo sapien
tggactcacacacatgctatcgtat

SEQ ID NO: 2272682 - DNA, 25 bp, Homo sapien
tcatgccaagcagatgttagtgcca

SEQ ID NO: 2272683 - DNA, 25 bp, Homo sapien
tacctacagcttacagagttgcaag

SEQ ID NO: 2272684 - DNA, 25 bp, Homo sapien
tgtctagccccagaaaagatgtgtt

SEQ ID NO: 2272685 - DNA, 25 bp, Homo sapien
gaggtcgggtgaatctacgctaaga

SEQ ID NO: 2272686 - DNA, 25 bp, Homo sapien
taaacacctgctgtcaagaaggccc

SEQ ID NO: 2272687 - DNA, 25 bp, Homo sapien
ttgaaacgaaggtaaaaattgcagc

SEQ ID NO: 2272688 - DNA, 25 bp, Homo sapien
aaaaattgcagctctcaaacagatg

SEQ ID NO: 2272689 - DNA, 25 bp, Homo sapien
tgaaaaagtggagatctggcaacac

SEQ ID NO: 2272690 - DNA, 25 bp, Homo sapien
atctggcaacactggccagcgccct

SEQ ID NO: 2272691 - DNA, 25 bp, Homo sapien
tgctaatttacctgctttcctggaa

SEQ ID NO: 2272692 - DNA, 25 bp, Homo sapien
aagatgttaactccctttagcccag

SEQ ID NO: 2272693 - DNA, 25 bp, Homo sapien
tataccacttgtgttcaggtcctgg

SEQ ID NO: 2272694 - DNA, 25 bp, Homo sapien
cactgttggtcacaccatgctggat

SEQ ID NO: 2272695 - DNA, 25 bp, Homo sapien
ttgccaaaggtaaggacgtgcccag

SEQ ID NO: 2272696 - DNA, 25 bp, Homo sapien
gagttttagccccatcccttgatcg

SEQ ID NO: 2272697 - DNA, 25 bp, Homo sapien
cagtcaatcggcacttaaggtgaac

SEQ ID NO: 2272698 - DNA, 25 bp, Homo sapien
gaaagacagtttttgcacaatcagg

SEQ ID NO: 2272699 - DNA, 25 bp, Homo sapien
cctgtgtgcttggtagtgcccataa

SEQ ID NO: 2272700 - DNA, 25 bp, Homo sapien
tagaatcactattcgtggtagccat

SEQ ID NO: 2272701 - DNA, 25 bp, Homo sapien
gagaggaaacacctaggtcaactag

SEQ ID NO: 2272702 - DNA, 25 bp, Homo sapien
atgaaggaggaaccgaaggtccagc

SEQ ID NO: 2272703 - DNA, 25 bp, Homo sapien
agcaggttaagaatcagaaccagcc

SEQ ID NO: 2272704 - DNA, 25 bp, Homo sapien
cagaaccagcctagcttttgtggga

SEQ ID NO: 2272705 - DNA, 25 bp, Homo sapien
atcagaaccagcctagcttttgtgg

SEQ ID NO: 2272706 - DNA, 25 bp, Homo sapien
ggagcaggttaagaatcagaaccag

SEQ ID NO: 2272707 - DNA, 25 bp, Homo sapien
cagaaggagattgacagcaatggcc

SEQ ID NO: 2272708 - DNA, 25 bp, Homo sapien
gaaaataccagaaggagattgacag

SEQ ID NO: 2272709 - DNA, 25 bp, Homo sapien
aaggagattgacagcaatggccaga

SEQ ID NO: 2272710 - DNA, 25 bp, Homo sapien
taccagaaggagattgacagcaatg

SEQ ID NO: 2272711 - DNA, 25 bp, Homo sapien
ttattcagatgtaaaggaagctccc

SEQ ID NO: 2272712 - DNA, 25 bp, Homo sapien
gatgtaaaggaagctccctgtggag

SEQ ID NO: 2272713 - DNA, 25 bp, Homo sapien
gccccgtagcgtttattcagatgta

SEQ ID NO: 2272714 - DNA, 25 bp, Homo sapien
gtctctttatcactgccccgtagcg

SEQ ID NO: 2272715 - DNA, 25 bp, Homo sapien
ctggagtatcttagcatatgcacct

SEQ ID NO: 2272716 - DNA, 25 bp, Homo sapien
gctggagtatcttagcatatgcacc

SEQ ID NO: 2272717 - DNA, 25 bp, Homo sapien
gtgctggagtatcttagcatatgca

SEQ ID NO: 2272718 - DNA, 25 bp, Homo sapien
gagtatcttagcatatgcaccttga

SEQ ID NO: 2272719 - DNA, 25 bp, Homo sapien
atctttcgccctcttcagtgtgctg

SEQ ID NO: 2272720 - DNA, 25 bp, Homo sapien
ttcttgttgcctcagagctaatttc

SEQ ID NO: 2272721 - DNA, 25 bp, Homo sapien
ccattgcctttagaagagggcgtac

SEQ ID NO: 2272722 - DNA, 25 bp, Homo sapien
ctgaggtacgcgttgtaaccaaact

SEQ ID NO: 2272723 - DNA, 25 bp, Homo sapien
tctacacccggattagtttccttgc

SEQ ID NO: 2272724 - DNA, 25 bp, Homo sapien
cgttcctcttctacacccggattag

SEQ ID NO: 2272725 - DNA, 25 bp, Homo sapien
tacacccggattagtttccttgctg

SEQ ID NO: 2272726 - DNA, 25 bp, Homo sapien
cacccggattagtttccttgctggc

SEQ ID NO: 2272727 - DNA, 25 bp, Homo sapien
gagttgggaaggatatgtcttccga

SEQ ID NO: 2272728 - DNA, 25 bp, Homo sapien
ggaaggatatgtcttccgaagacat

SEQ ID NO: 2272729 - DNA, 25 bp, Homo sapien
ttgggaaggatatgtcttccgaaga

SEQ ID NO: 2272730 - DNA, 25 bp, Homo sapien
tgggagttgggaaggatatgtcttc

SEQ ID NO: 2272731 - DNA, 25 bp, Homo sapien
atgatactggtgatggcccgttgta

SEQ ID NO: 2272732 - DNA, 25 bp, Homo sapien
tcaacaatcgagagggcgtccggtt

SEQ ID NO: 2272733 - DNA, 25 bp, Homo sapien
cgttgtataatggacagagcttcat

SEQ ID NO: 2272734 - DNA, 25 bp, Homo sapien
tccttcaacaatcgagagggcgtcc

SEQ ID NO: 2272735 - DNA, 25 bp, Homo sapien
tcctggatacttctggttgtaaagc

SEQ ID NO: 2272736 - DNA, 25 bp, Homo sapien
aaagcttaatcttctcatccaagtg

SEQ ID NO: 2272737 - DNA, 25 bp, Homo sapien
tgcgggcttgagcaagacctttcct

SEQ ID NO: 2272738 - DNA, 25 bp, Homo sapien
tcctttcaggatgccgtattatttt

SEQ ID NO: 2272739 - DNA, 25 bp, Homo sapien
tgacttcaatgtgagcatccaagat

SEQ ID NO: 2272740 - DNA, 25 bp, Homo sapien
cacccaacattgacttcaatgtgag

SEQ ID NO: 2272741 - DNA, 25 bp, Homo sapien
caacattgacttcaatgtgagcatc

SEQ ID NO: 2272742 - DNA, 25 bp, Homo sapien
gcatccaagatggcgaccacgtctg

SEQ ID NO: 2272743 - DNA, 25 bp, Homo sapien
tcctgaatccgagccaagattggct

SEQ ID NO: 2272744 - DNA, 25 bp, Homo sapien
caggagacacaatcacagtgcggtc

SEQ ID NO: 2272745 - DNA, 25 bp, Homo sapien
tagcggcaccagagttcccagttaa

SEQ ID NO: 2272746 - DNA, 25 bp, Homo sapien
cttgtggcagtgcatcgtagcggca

SEQ ID NO: 2272747 - DNA, 25 bp, Homo sapien
atgagcattccaccatccagagacc

SEQ ID NO: 2272748 - DNA, 25 bp, Homo sapien
tcaggctaagctccacgttctctcc

SEQ ID NO: 2272749 - DNA, 25 bp, Homo sapien
caggatgcccatgattgaaggactc

SEQ ID NO: 2272750 - DNA, 25 bp, Homo sapien
ccatagatgagcattccaccatcca

SEQ ID NO: 2272751 - DNA, 25 bp, Homo sapien
cgggaacagggcaaaatctcgacct

SEQ ID NO: 2272752 - DNA, 25 bp, Homo sapien
gatttcggccactcgcagagcattg

SEQ ID NO: 2272753 - DNA, 25 bp, Homo sapien
tgttccaggccaagtagaccatgtg

SEQ ID NO: 2272754 - DNA, 25 bp, Homo sapien
tctctaggtgggcaatccgggaaca

SEQ ID NO: 2272755 - DNA, 25 bp, Homo sapien
tcttccgtgctgctgttcaattcca

SEQ ID NO: 2272756 - DNA, 25 bp, Homo sapien
gtttttcccggagtgccattctgga

SEQ ID NO: 2272757 - DNA, 25 bp, Homo sapien
tcttccatagcccacgatggtgtgg

SEQ ID NO: 2272758 - DNA, 25 bp, Homo sapien
tggaagaaacgtctccaaaatctat

SEQ ID NO: 2272759 - DNA, 25 bp, Homo sapien
ggcttcaagagtggataaacatttt

SEQ ID NO: 2272760 - DNA, 25 bp, Homo sapien
gaacgaccagccacaaggagcagag

SEQ ID NO: 2272761 - DNA, 25 bp, Homo sapien
accaggaacgaccagccacaaggag

SEQ ID NO: 2272762 - DNA, 25 bp, Homo sapien
gatcccggcaggcattttctaagca

SEQ ID NO: 2272763 - DNA, 25 bp, Homo sapien
tttccccaacacaccgaggacacca

SEQ ID NO: 2272764 - DNA, 25 bp, Homo sapien
tgtgagctgaattcatggcagtaat

SEQ ID NO: 2272765 - DNA, 25 bp, Homo sapien
agtaatacatgatgggggtgttgcc

SEQ ID NO: 2272766 - DNA, 25 bp, Homo sapien
gagctgaattcatggcagtaataca

SEQ ID NO: 2272767 - DNA, 25 bp, Homo sapien
gcctggaacgggtccctgatccaag

SEQ ID NO: 2272768 - DNA, 25 bp, Homo sapien
cataggcattgtcagccagcaggag

SEQ ID NO: 2272769 - DNA, 25 bp, Homo sapien
aggcattgtcagccagcaggagacc

SEQ ID NO: 2272770 - DNA, 25 bp, Homo sapien
ataggcattgtcagccagcaggaga

SEQ ID NO: 2272771 - DNA, 25 bp, Homo sapien
taggcattgtcagccagcaggagac

SEQ ID NO: 2272772 - DNA, 25 bp, Homo sapien
ttgtcccacatagagctccccagtt

SEQ ID NO: 2272773 - DNA, 25 bp, Homo sapien
tagctgccttggagcatggttctaa

SEQ ID NO: 2272774 - DNA, 25 bp, Homo sapien
cgatcactagcactggcctctgcaa

SEQ ID NO: 2272775 - DNA, 25 bp, Homo sapien
cttgccagggtctgtcaggcagcga

SEQ ID NO: 2272776 - DNA, 25 bp, Homo sapien
gaatgcataattatttatttagtaa

SEQ ID NO: 2272777 - DNA, 25 bp, Homo sapien
gcataattatttatttagtaatggt

SEQ ID NO: 2272778 - DNA, 25 bp, Homo sapien
cataattatttatttagtaatggta

SEQ ID NO: 2272779 - DNA, 25 bp, Homo sapien
ttggaatgcataattatttatttag

SEQ ID NO: 2272780 - DNA, 25 bp, Homo sapien
gagtcacaagggtcatagcctcctc

SEQ ID NO: 2272781 - DNA, 25 bp, Homo sapien
taacgctgtgctcctcaacttaaag

SEQ ID NO: 2272782 - DNA, 25 bp, Homo sapien
gctgttgcttcaccccgaagatgga

SEQ ID NO: 2272783 - DNA, 25 bp, Homo sapien
tcagtggcacactatcttaacgctg

SEQ ID NO: 2272784 - DNA, 25 bp, Homo sapien
taatcctggcctatgttctgtacta

SEQ ID NO: 2272785 - DNA, 25 bp, Homo sapien
ggagccgtgccagtctccatgctca

SEQ ID NO: 2272786 - DNA, 25 bp, Homo sapien
tgagcaaaacctcccctgctgttgg

SEQ ID NO: 2272787 - DNA, 25 bp, Homo sapien
ctggttttcctacacgtgggcaagt

SEQ ID NO: 2272788 - DNA, 25 bp, Homo sapien
ctgaccccatgagacccatcagggt

SEQ ID NO: 2272789 - DNA, 25 bp, Homo sapien
gaccccatgagacccatcagggtca

SEQ ID NO: 2272790 - DNA, 25 bp, Homo sapien
atcagggtcaccttcaccttgtgct

SEQ ID NO: 2272791 - DNA, 25 bp, Homo sapien
tctctccctcttcagggaaactgtg

SEQ ID NO: 2272792 - DNA, 25 bp, Homo sapien
caccgcttggtatctctgtttatga

SEQ ID NO: 2272793 - DNA, 25 bp, Homo sapien
ctacaggtctggagcacaagcacgt

SEQ ID NO: 2272794 - DNA, 25 bp, Homo sapien
tggatttcccacacttgcgtgctac

SEQ ID NO: 2272795 - DNA, 25 bp, Homo sapien
acaagcacgtggctacccaaaagat

SEQ ID NO: 2272796 - DNA, 25 bp, Homo sapien
gaattgatgacccagatccagcacc

SEQ ID NO: 2272797 - DNA, 25 bp, Homo sapien
acctgaagtcgccataaacagacat

SEQ ID NO: 2272798 - DNA, 25 bp, Homo sapien
agtagaagccattccacttgcaaga

SEQ ID NO: 2272799 - DNA, 25 bp, Homo sapien
tcattgagaaagaagctgggagtgt

SEQ ID NO: 2272800 - DNA, 25 bp, Homo sapien
tattgggtacatgctttttcgaaac

SEQ ID NO: 2272801 - DNA, 25 bp, Homo sapien
gcatttctctaactacgaatgaggt

SEQ ID NO: 2272802 - DNA, 25 bp, Homo sapien
tatcactgtcctgcttgcctaaggc

SEQ ID NO: 2272803 - DNA, 25 bp, Homo sapien
ccaaatcatttccaggcagccctga

SEQ ID NO: 2272804 - DNA, 25 bp, Homo sapien
gcaggaaaaccatagaagtgatatt

SEQ ID NO: 2272805 - DNA, 25 bp, Homo sapien
tccgacaactgatgatgttaacgcc

SEQ ID NO: 2272806 - DNA, 25 bp, Homo sapien
aggaggcccatgatatccgtttgtc

SEQ ID NO: 2272807 - DNA, 25 bp, Homo sapien
tgttaacgccaatcactcaattaaa

SEQ ID NO: 2272808 - DNA, 25 bp, Homo sapien
aaatctcagagataatgtcccttcc

SEQ ID NO: 2272809 - DNA, 25 bp, Homo sapien
gtctcctcaagattataggttcagg

SEQ ID NO: 2272810 - DNA, 25 bp, Homo sapien
catttagttatctcgttagtcccct

SEQ ID NO: 2272811 - DNA, 25 bp, Homo sapien
gaaaagtcgcaaacatagtacaaag

SEQ ID NO: 2272812 - DNA, 25 bp, Homo sapien
tccctgccaacacttgatagcacaa

SEQ ID NO: 2272813 - DNA, 25 bp, Homo sapien
gatagcacaacgctttgacctgaag

SEQ ID NO: 2272814 - DNA, 25 bp, Homo sapien
cacttgatagcacaacgctttgacc

SEQ ID NO: 2272815 - DNA, 25 bp, Homo sapien
acaacgctttgacctgaagttccct

SEQ ID NO: 2272816 - DNA, 25 bp, Homo sapien
tctcctactttttctgctggagaga

SEQ ID NO: 2272817 - DNA, 25 bp, Homo sapien
tactccttctcttaaccttctccta

SEQ ID NO: 2272818 - DNA, 25 bp, Homo sapien
ccttctcctactttttctgctggag

SEQ ID NO: 2272819 - DNA, 25 bp, Homo sapien
tggagagagaagacagcattgaatc

SEQ ID NO: 2272820 - DNA, 25 bp, Homo sapien
ggttcttcagcgtgttccaagtgga

SEQ ID NO: 2272821 - DNA, 25 bp, Homo sapien
gtgttccaagtggaagctcctctgt

SEQ ID NO: 2272822 - DNA, 25 bp, Homo sapien
aaacacagcgttctgcctggcccaa

SEQ ID NO: 2272823 - DNA, 25 bp, Homo sapien
gctttggttcttcagcgtgttccaa

SEQ ID NO: 2272824 - DNA, 25 bp, Homo sapien
tatggacaacgaggagaaatgacca

SEQ ID NO: 2272825 - DNA, 25 bp, Homo sapien
agcagtcttcaatctaccggtcaag

SEQ ID NO: 2272826 - DNA, 25 bp, Homo sapien
tatatacattcatggcaccaaggtc

SEQ ID NO: 2272827 - DNA, 25 bp, Homo sapien
cgatttatgaatttaagacatctag

SEQ ID NO: 2272828 - DNA, 25 bp, Homo sapien
tgatgaccttcacatcaagcatgag

SEQ ID NO: 2272829 - DNA, 25 bp, Homo sapien
tcgtgccccaagaagggtttcactg

SEQ ID NO: 2272830 - DNA, 25 bp, Homo sapien
atcaagcatgaggtcgtgccccaag

SEQ ID NO: 2272831 - DNA, 25 bp, Homo sapien
agagctgatgttctgtgatgacctt

SEQ ID NO: 2272832 - DNA, 25 bp, Homo sapien
gctagagcttactgggatgcccgga

SEQ ID NO: 2272833 - DNA, 25 bp, Homo sapien
ccatggaaatagacgcacacttgcc

SEQ ID NO: 2272834 - DNA, 25 bp, Homo sapien
cacaggcgcgtgtgaaattggctgc

SEQ ID NO: 2272835 - DNA, 25 bp, Homo sapien
aattggctgcccgaaaagacgcgtg

SEQ ID NO: 2272836 - DNA, 25 bp, Homo sapien
cccctcggaggtgcgctccccgcca

SEQ ID NO: 2272837 - DNA, 25 bp, Homo sapien
gccccctcggaggtgcgctccccgc

SEQ ID NO: 2272838 - DNA, 25 bp, Homo sapien
gacagggtgcgcaattgtgtctcaa

SEQ ID NO: 2272839 - DNA, 25 bp, Homo sapien
gagatattgatcaccagccgctcgc

SEQ ID NO: 2272840 - DNA, 25 bp, Homo sapien
gagatgagaatgaccaacacggaga

SEQ ID NO: 2272841 - DNA, 25 bp, Homo sapien
ccgccagcgtaagggatttctccga

SEQ ID NO: 2272842 - DNA, 25 bp, Homo sapien
ctgtaaagaaggagcccccaagagt

SEQ ID NO: 2272843 - DNA, 25 bp, Homo sapien
tgtaaagaaggagcccccaagagta

SEQ ID NO: 2272844 - DNA, 25 bp, Homo sapien
acagcgtctccaccagaaagaaggg

SEQ ID NO: 2272845 - DNA, 25 bp, Homo sapien
gctcaaaagtgaaccagacaatgca

SEQ ID NO: 2272846 - DNA, 25 bp, Homo sapien
aggagctcaaaagtgaaccagacaa

SEQ ID NO: 2272847 - DNA, 25 bp, Homo sapien
aagtgaaccagacaatgcacagcgt

SEQ ID NO: 2272848 - DNA, 25 bp, Homo sapien
gaagaaggccggcttgctagggcag

SEQ ID NO: 2272849 - DNA, 25 bp, Homo sapien
gcttgctagggcaggcggagaagcg

SEQ ID NO: 2272850 - DNA, 25 bp, Homo sapien
gccggcttgctagggcaggcggaga

SEQ ID NO: 2272851 - DNA, 25 bp, Homo sapien
gttccggaagaaggccggcttgcta

SEQ ID NO: 2272852 - DNA, 25 bp, Homo sapien
cacaagtgacgtgggtatactggcc

SEQ ID NO: 2272853 - DNA, 25 bp, Homo sapien
tcttttctctgcataggcccgatgt

SEQ ID NO: 2272854 - DNA, 25 bp, Homo sapien
catccgggatgctgggaaaaagcga

SEQ ID NO: 2272855 - DNA, 25 bp, Homo sapien
gaatcgtcatcgtcagcctctgcga

SEQ ID NO: 2272856 - DNA, 25 bp, Homo sapien
gcaacaaggttgatagtccaggtat

SEQ ID NO: 2272857 - DNA, 25 bp, Homo sapien
tgctgcagggattaagcaacaaggt

SEQ ID NO: 2272858 - DNA, 25 bp, Homo sapien
gggtggcaccgctggaatttcaaaa

SEQ ID NO: 2272859 - DNA, 25 bp, Homo sapien
taagagactgttagctcagtgctcc

SEQ ID NO: 2272860 - DNA, 25 bp, Homo sapien
tgaaaaatcagtcttgagggaaggt

SEQ ID NO: 2272861 - DNA, 25 bp, Homo sapien
gtaagtcccagacatgaaaaatcag

SEQ ID NO: 2272862 - DNA, 25 bp, Homo sapien
gacatgaaaaatcagtcttgaggga

SEQ ID NO: 2272863 - DNA, 25 bp, Homo sapien
tcccagacatgaaaaatcagtcttg

SEQ ID NO: 2272864 - DNA, 25 bp, Homo sapien
tgaagctaggaaacgcacatgaccc

SEQ ID NO: 2272865 - DNA, 25 bp, Homo sapien
gaaactaggtcgagctacagcctct

SEQ ID NO: 2272866 - DNA, 25 bp, Homo sapien
gaatatcccgcatctcaggctgagg

SEQ ID NO: 2272867 - DNA, 25 bp, Homo sapien
taaatgtagaccgaacaccagtgcc

SEQ ID NO: 2272868 - DNA, 25 bp, Homo sapien
ctgagacccagggaatactggttcg

SEQ ID NO: 2272869 - DNA, 25 bp, Homo sapien
cttcttcctctagtgtggaatctga

SEQ ID NO: 2272870 - DNA, 25 bp, Homo sapien
gagacccagggaatactggttcgca

SEQ ID NO: 2272871 - DNA, 25 bp, Homo sapien
ctctagtgtggaatctgagacccag

SEQ ID NO: 2272872 - DNA, 25 bp, Homo sapien
ccttctaaggagtaagactatcagg

SEQ ID NO: 2272873 - DNA, 25 bp, Homo sapien
gagttaggctcaacagatgtttccc

SEQ ID NO: 2272874 - DNA, 25 bp, Homo sapien
ttcccgcagatttgtcaacagagcc

SEQ ID NO: 2272875 - DNA, 25 bp, Homo sapien
caatcagtctctggcaatagcttgc

SEQ ID NO: 2272876 - DNA, 25 bp, Homo sapien
ccacaaagcactccaagggcaagcc

SEQ ID NO: 2272877 - DNA, 25 bp, Homo sapien
ctgacacaatgcgtgtgtctctgtg

SEQ ID NO: 2272878 - DNA, 25 bp, Homo sapien
acacaatgcgtgtgtctctgtgact

SEQ ID NO: 2272879 - DNA, 25 bp, Homo sapien
gcgtagccaaacaaaccagcaatca

SEQ ID NO: 2272880 - DNA, 25 bp, Homo sapien
gaaccagaacaaaaggacatgtagt

SEQ ID NO: 2272881 - DNA, 25 bp, Homo sapien
gttagtgatatgaggttgtgtcgca

SEQ ID NO: 2272882 - DNA, 25 bp, Homo sapien
ttgtgtcgcatgagggatggaactg

SEQ ID NO: 2272883 - DNA, 25 bp, Homo sapien
tggaactgagaaacctggacacacc

SEQ ID NO: 2272884 - DNA, 25 bp, Homo sapien
tatgcatagatgtccttgcttgcac

SEQ ID NO: 2272885 - DNA, 25 bp, Homo sapien
ctccagagcggtgtcaggccagatg

SEQ ID NO: 2272886 - DNA, 25 bp, Homo sapien
tttctggcttggttgctgcttgtgg

SEQ ID NO: 2272887 - DNA, 25 bp, Homo sapien
tgaagaagttgagggtccagctgct

SEQ ID NO: 2272888 - DNA, 25 bp, Homo sapien
tctgggccccatctttagggacaac

SEQ ID NO: 2272889 - DNA, 25 bp, Homo sapien
atcccctgaccaccccatagctggt

SEQ ID NO: 2272890 - DNA, 25 bp, Homo sapien
gggtctgcaacatacccatgcacct

SEQ ID NO: 2272891 - DNA, 25 bp, Homo sapien
tgttcctacagcttcaccccaacat

SEQ ID NO: 2272892 - DNA, 25 bp, Homo sapien
tgggcattaaagcaacctggagcct

SEQ ID NO: 2272893 - DNA, 25 bp, Homo sapien
tgcgggtgactagaaagaacatcct

SEQ ID NO: 2272894 - DNA, 25 bp, Homo sapien
tagacacatggcgaaggctacggtc

SEQ ID NO: 2272895 - DNA, 25 bp, Homo sapien
tgcctactcttgtggagaccgcttg

SEQ ID NO: 2272896 - DNA, 25 bp, Homo sapien
agagacacattccaaagacaagcag

SEQ ID NO: 2272897 - DNA, 25 bp, Homo sapien
gagagacacattccaaagacaagca

SEQ ID NO: 2272898 - DNA, 25 bp, Homo sapien
ctggaagttgcaggcacccataagc

SEQ ID NO: 2272899 - DNA, 25 bp, Homo sapien
tctgcgtggagtttccaggaacact

SEQ ID NO: 2272900 - DNA, 25 bp, Homo sapien
gcacactgagccaaagttcccaggg

SEQ ID NO: 2272901 - DNA, 25 bp, Homo sapien
cttgctttcacaggccaggagatcg

SEQ ID NO: 2272902 - DNA, 25 bp, Homo sapien
ccagttattttcagagcagttccag

SEQ ID NO: 2272903 - DNA, 25 bp, Homo sapien
gagcaccaggaatccccagttattt

SEQ ID NO: 2272904 - DNA, 25 bp, Homo sapien
ttctcacttcttggtacaactgaag

SEQ ID NO: 2272905 - DNA, 25 bp, Homo sapien
ctgaagattggcaggaggactcaga

SEQ ID NO: 2272906 - DNA, 25 bp, Homo sapien
actggtggtccttctcttctgttgc

SEQ ID NO: 2272907 - DNA, 25 bp, Homo sapien
ttctcttctgttgctaatcatctcc

SEQ ID NO: 2272908 - DNA, 25 bp, Homo sapien
ctgactggtggtccttctcttctgt

SEQ ID NO: 2272909 - DNA, 25 bp, Homo sapien
ctcttctgttgctaatcatctccat

SEQ ID NO: 2272910 - DNA, 25 bp, Homo sapien
tctccatcagcatgtcagcgagcgc

SEQ ID NO: 2272911 - DNA, 25 bp, Homo sapien
cttcatgagtccagatggtgagccg

SEQ ID NO: 2272912 - DNA, 25 bp, Homo sapien
tggtgagccgggtaaacaagaagtc

SEQ ID NO: 2272913 - DNA, 25 bp, Homo sapien
cacttccttggacgttgcttcatga

SEQ ID NO: 2272914 - DNA, 25 bp, Homo sapien
caattaagggccaacgatgaatcca

SEQ ID NO: 2272915 - DNA, 25 bp, Homo sapien
aaattggctgaccttggaagggaca

SEQ ID NO: 2272916 - DNA, 25 bp, Homo sapien
tctatacacaagttactgcactgga

SEQ ID NO: 2272917 - DNA, 25 bp, Homo sapien
tgaaaccactatgaaagcccctagc

SEQ ID NO: 2272918 - DNA, 25 bp, Homo sapien
caaccgagattgtttgactggcccc

SEQ ID NO: 2272919 - DNA, 25 bp, Homo sapien
gagctccgaaataacagccgggtaa

SEQ ID NO: 2272920 - DNA, 25 bp, Homo sapien
cgtgcttttagacttgtggccaggg

SEQ ID NO: 2272921 - DNA, 25 bp, Homo sapien
gcatgctgcttccaagagctccgaa

SEQ ID NO: 2272922 - DNA, 25 bp, Homo sapien
aataacatagtgtccccattgcata

SEQ ID NO: 2272923 - DNA, 25 bp, Homo sapien
tgacttgtgtctgcagttgctggtg

SEQ ID NO: 2272924 - DNA, 25 bp, Homo sapien
cataatctttggcaacatcttcttc

SEQ ID NO: 2272925 - DNA, 25 bp, Homo sapien
ggatagggttttggctttgatcaat

SEQ ID NO: 2272926 - DNA, 25 bp, Homo sapien
ctgggcgctgcaagatcagcagaaa

SEQ ID NO: 2272927 - DNA, 25 bp, Homo sapien
tgggcgctgcaagatcagcagaaac

SEQ ID NO: 2272928 - DNA, 25 bp, Homo sapien
ggcgctgcaagatcagcagaaacct

SEQ ID NO: 2272929 - DNA, 25 bp, Homo sapien
aaacctgagaaagcgcctggaatac

SEQ ID NO: 2272930 - DNA, 25 bp, Homo sapien
tggagtggagcagggtgcgtgcggc

SEQ ID NO: 2272931 - DNA, 25 bp, Homo sapien
cccagcgcggacctcgccaaggcta

SEQ ID NO: 2272932 - DNA, 25 bp, Homo sapien
tcgccaaggctacgcggcgcgccag

SEQ ID NO: 2272933 - DNA, 25 bp, Homo sapien
tgcgtgcggcggcgggtccgctcgg

SEQ ID NO: 2272934 - DNA, 25 bp, Homo sapien
cagttggacaatcgctttacggagc

SEQ ID NO: 2272935 - DNA, 25 bp, Homo sapien
ccttgattcgatcccgaaggaggcg

SEQ ID NO: 2272936 - DNA, 25 bp, Homo sapien
tacggagcagctacggcgaaaatgt

SEQ ID NO: 2272937 - DNA, 25 bp, Homo sapien
gaagctccgaggcaaatgacgataa

SEQ ID NO: 2272938 - DNA, 25 bp, Homo sapien
cacagacctctagcttgagaaagca

SEQ ID NO: 2272939 - DNA, 25 bp, Homo sapien
ggacggacctacagacaccgaagaa

SEQ ID NO: 2272940 - DNA, 25 bp, Homo sapien
tggacgtttgctagggctatcacac

SEQ ID NO: 2272941 - DNA, 25 bp, Homo sapien
ttaaactagagatcggaaaagcgcc

SEQ ID NO: 2272942 - DNA, 25 bp, Homo sapien
ttcgcctgccgccttctaagctccc

SEQ ID NO: 2272943 - DNA, 25 bp, Homo sapien
tacgggggtagaaaatcagaagcat

SEQ ID NO: 2272944 - DNA, 25 bp, Homo sapien
gcgatcgatgcacgctgcagagaaa

SEQ ID NO: 2272945 - DNA, 25 bp, Homo sapien
ccaccagggcgatcgatgcacgctg

SEQ ID NO: 2272946 - DNA, 25 bp, Homo sapien
gatcccaggtgccttaacgcagtgc

SEQ ID NO: 2272947 - DNA, 25 bp, Homo sapien
cgttctagcggactgggccattgct

SEQ ID NO: 2272948 - DNA, 25 bp, Homo sapien
gggagatctgcgactttgcctctcg

SEQ ID NO: 2272949 - DNA, 25 bp, Homo sapien
tcaacacgagcaggtcgggagatct

SEQ ID NO: 2272950 - DNA, 25 bp, Homo sapien
tgaggatgaccatgacggagacgat

SEQ ID NO: 2272951 - DNA, 25 bp, Homo sapien
gatctcctcggagaacatgtccagg

SEQ ID NO: 2272952 - DNA, 25 bp, Homo sapien
tatctcggtgcccagcgtgatgaaa

SEQ ID NO: 2272953 - DNA, 25 bp, Homo sapien
gatacacagcgtttccacgatgaag

SEQ ID NO: 2272954 - DNA, 25 bp, Homo sapien
cttagagtggcgggagagcttgaag

SEQ ID NO: 2272955 - DNA, 25 bp, Homo sapien
gtggcgggagagcttgaagattcta

SEQ ID NO: 2272956 - DNA, 25 bp, Homo sapien
gagagcttgaagattctaaaaaccc

SEQ ID NO: 2272957 - DNA, 25 bp, Homo sapien
tagagtggcgggagagcttgaagat

SEQ ID NO: 2272958 - DNA, 25 bp, Homo sapien
caattgttagcacaccagcgatggc

SEQ ID NO: 2272959 - DNA, 25 bp, Homo sapien
catagtagaggaactgcggcgactg

SEQ ID NO: 2272960 - DNA, 25 bp, Homo sapien
gatcttgcctccaattgtcacaggg

SEQ ID NO: 2272961 - DNA, 25 bp, Homo sapien
atactagctttgagggtctggccca

SEQ ID NO: 2272962 - DNA, 25 bp, Homo sapien
ggagcactacactggacctgaggaa

SEQ ID NO: 2272963 - DNA, 25 bp, Homo sapien
tcaggctgtcaaagggaccaatgct

SEQ ID NO: 2272964 - DNA, 25 bp, Homo sapien
tgtgtccaaagtggccctcgatagg

SEQ ID NO: 2272965 - DNA, 25 bp, Homo sapien
tgagaccatttagcggcactgcaga

SEQ ID NO: 2272966 - DNA, 25 bp, Homo sapien
tccaccggtgggcagctgccgagct

SEQ ID NO: 2272967 - DNA, 25 bp, Homo sapien
tccagaggcctgtgttccgtggctc

SEQ ID NO: 2272968 - DNA, 25 bp, Homo sapien
cagaggcctgtgttccgtggctctc

SEQ ID NO: 2272969 - DNA, 25 bp, Homo sapien
accggtgggcagctgccgagctcca

SEQ ID NO: 2272970 - DNA, 25 bp, Homo sapien
ttaagcaagtaggaaaggaatcgcc

SEQ ID NO: 2272971 - DNA, 25 bp, Homo sapien
tgtgtgcactagacctcaacgttga

SEQ ID NO: 2272972 - DNA, 25 bp, Homo sapien
taatgccctgtagtcggatgctgcg

SEQ ID NO: 2272973 - DNA, 25 bp, Homo sapien
tcaaccagtccagagtgtaaccacg

SEQ ID NO: 2272974 - DNA, 25 bp, Homo sapien
caacttgggttgtgtctggtcttaa

SEQ ID NO: 2272975 - DNA, 25 bp, Homo sapien
ttaaagcgaaaagccctgaggtcag

SEQ ID NO: 2272976 - DNA, 25 bp, Homo sapien
cagtgacccaaggtaatggaacagt

SEQ ID NO: 2272977 - DNA, 25 bp, Homo sapien
gaatgagagttcacctcctgagatc

SEQ ID NO: 2272978 - DNA, 25 bp, Homo sapien
gacacgtccttaactcaaggtggaa

SEQ ID NO: 2272979 - DNA, 25 bp, Homo sapien
cagtcccaaaacagtgcgctgaaga

SEQ ID NO: 2272980 - DNA, 25 bp, Homo sapien
cagtaggtgaagatgagacacgtcc

SEQ ID NO: 2272981 - DNA, 25 bp, Homo sapien
tactattagaggcatgtcacatgga

SEQ ID NO: 2272982 - DNA, 25 bp, Homo sapien
gagctccacgtacatcttgttgccc

SEQ ID NO: 2272983 - DNA, 25 bp, Homo sapien
tcagagctccacgtacatcttgttg

SEQ ID NO: 2272984 - DNA, 25 bp, Homo sapien
ctccacgtacatcttgttgccccag

SEQ ID NO: 2272985 - DNA, 25 bp, Homo sapien
tccacgtacatcttgttgccccagg

SEQ ID NO: 2272986 - DNA, 25 bp, Homo sapien
gactttctcgtcttgttgtccagct

SEQ ID NO: 2272987 - DNA, 25 bp, Homo sapien
ttagagactttctcgtcttgttgtc

SEQ ID NO: 2272988 - DNA, 25 bp, Homo sapien
ttacgtcgtagaaataatgccttcc

SEQ ID NO: 2272989 - DNA, 25 bp, Homo sapien
cttccttcaccagagggcacttcag

SEQ ID NO: 2272990 - DNA, 25 bp, Homo sapien
tacaaacttgcagtaggaagacctc

SEQ ID NO: 2272991 - DNA, 25 bp, Homo sapien
taggctgacttaacgcgggcatgtg

SEQ ID NO: 2272992 - DNA, 25 bp, Homo sapien
tcccagttgaagaatcaggattcct

SEQ ID NO: 2272993 - DNA, 25 bp, Homo sapien
gatttatgaccttcggcagttagac

SEQ ID NO: 2272994 - DNA, 25 bp, Homo sapien
cttccccacagcatccaacatagca

SEQ ID NO: 2272995 - DNA, 25 bp, Homo sapien
tgcttgcaaaaatttccttgggtct

SEQ ID NO: 2272996 - DNA, 25 bp, Homo sapien
tttccttgggtcttccccacagcat

SEQ ID NO: 2272997 - DNA, 25 bp, Homo sapien
cacagcatccaacatagcaaaatat

SEQ ID NO: 2272998 - DNA, 25 bp, Homo sapien
gaacagaaggacgaaaagcagtctc

SEQ ID NO: 2272999 - DNA, 25 bp, Homo sapien
catagcctggtgtctaagtgagaat

SEQ ID NO: 2273000 - DNA, 25 bp, Homo sapien
cagaaaggtcttccggtcttccaga

SEQ ID NO: 2273001 - DNA, 25 bp, Homo sapien
tctgctgcactctgaacagtcatag

SEQ ID NO: 2273002 - DNA, 25 bp, Homo sapien
gcttaattcccggtggaagagtgag

SEQ ID NO: 2273003 - DNA, 25 bp, Homo sapien
cccggtggaagagtgagtcatacat

SEQ ID NO: 2273004 - DNA, 25 bp, Homo sapien
tcctctgcttaattcccggtggaag

SEQ ID NO: 2273005 - DNA, 25 bp, Homo sapien
taattcccggtggaagagtgagtca

SEQ ID NO: 2273006 - DNA, 25 bp, Homo sapien
tgaggctgacaccagattgcaaggg

SEQ ID NO: 2273007 - DNA, 25 bp, Homo sapien
caaggcatgtggcaatcaggaggac

SEQ ID NO: 2273008 - DNA, 25 bp, Homo sapien
ggctctctgggacacacataaaggg

SEQ ID NO: 2273009 - DNA, 25 bp, Homo sapien
tctgatgctaatggctcctggtggc

SEQ ID NO: 2273010 - DNA, 25 bp, Homo sapien
cacccgtggagagaaccatgctgag

SEQ ID NO: 2273011 - DNA, 25 bp, Homo sapien
caccactcagaaggctcccgtgtgt

SEQ ID NO: 2273012 - DNA, 25 bp, Homo sapien
cacaatcctgaatgatgggtcctcc

SEQ ID NO: 2273013 - DNA, 25 bp, Homo sapien
tgtaagatgccggtgccaccactca

SEQ ID NO: 2273014 - DNA, 25 bp, Homo sapien
agtagtgtactctccctttctgcag

SEQ ID NO: 2273015 - DNA, 25 bp, Homo sapien
catgaggtactgaagtcatcctccc

SEQ ID NO: 2273016 - DNA, 25 bp, Homo sapien
tcctgctatgatcgggcctggaagc

SEQ ID NO: 2273017 - DNA, 25 bp, Homo sapien
tggaagcagagcccgtaatgaatca

SEQ ID NO: 2273018 - DNA, 25 bp, Homo sapien
catctgctgcccactccggttgttg

SEQ ID NO: 2273019 - DNA, 25 bp, Homo sapien
cggttgttgccaaagtcttgctcag

SEQ ID NO: 2273020 - DNA, 25 bp, Homo sapien
tgcttgaggagagagtcccattttc

SEQ ID NO: 2273021 - DNA, 25 bp, Homo sapien
ttcgtttcaggcacgatataaagga

SEQ ID NO: 2273022 - DNA, 25 bp, Homo sapien
ggtgtcctgttgtgtatgtgctgag

SEQ ID NO: 2273023 - DNA, 25 bp, Homo sapien
gtcctgttgtgtatgtgctgagcag

SEQ ID NO: 2273024 - DNA, 25 bp, Homo sapien
cagaggaatcacagggaatgaaccc

SEQ ID NO: 2273025 - DNA, 25 bp, Homo sapien
tgtcctgttgtgtatgtgctgagca

SEQ ID NO: 2273026 - DNA, 25 bp, Homo sapien
gagggtgatggagaccctgcactgc

SEQ ID NO: 2273027 - DNA, 25 bp, Homo sapien
cttggaggggtgaaagatgggaatg

SEQ ID NO: 2273028 - DNA, 25 bp, Homo sapien
gtgaaagatgggaatgagggtgatg

SEQ ID NO: 2273029 - DNA, 25 bp, Homo sapien
aatgagggtgatggagaccctgcac

SEQ ID NO: 2273030 - DNA, 25 bp, Homo sapien
ggtcaatggcagaataggcaagttc

SEQ ID NO: 2273031 - DNA, 25 bp, Homo sapien
taggtctccatcaaagtgttgatgg

SEQ ID NO: 2273032 - DNA, 25 bp, Homo sapien
caaagtgttgatggtgaggtcaatg

SEQ ID NO: 2273033 - DNA, 25 bp, Homo sapien
aggtcaatggcagaataggcaagtt

SEQ ID NO: 2273034 - DNA, 25 bp, Homo sapien
gcaaagtttaggcttatctgtggag

SEQ ID NO: 2273035 - DNA, 25 bp, Homo sapien
tggccaatagaattcttaagggatc

SEQ ID NO: 2273036 - DNA, 25 bp, Homo sapien
tgtttcctgaactgaattgggaagg

SEQ ID NO: 2273037 - DNA, 25 bp, Homo sapien
cacaagaccagtctaggaagggaag

SEQ ID NO: 2273038 - DNA, 25 bp, Homo sapien
cagttctacttgttccagtcatgcc

SEQ ID NO: 2273039 - DNA, 25 bp, Homo sapien
gttctacttgttccagtcatgccca

SEQ ID NO: 2273040 - DNA, 25 bp, Homo sapien
cttgatcagttctacttgttccagt

SEQ ID NO: 2273041 - DNA, 25 bp, Homo sapien
gatcagttctacttgttccagtcat

SEQ ID NO: 2273042 - DNA, 25 bp, Homo sapien
cagaggagaagtgatcaccgggcca

SEQ ID NO: 2273043 - DNA, 25 bp, Homo sapien
aaggcccaggtgtatttattccaga

SEQ ID NO: 2273044 - DNA, 25 bp, Homo sapien
caaatgaaagctcccactggatggc

SEQ ID NO: 2273045 - DNA, 25 bp, Homo sapien
cactggccattgtgagcacctataa

SEQ ID NO: 2273046 - DNA, 25 bp, Homo sapien
aagcaaggcctgacgccaccaggag

SEQ ID NO: 2273047 - DNA, 25 bp, Homo sapien
caggcccaggttgtaggcagtgagg

SEQ ID NO: 2273048 - DNA, 25 bp, Homo sapien
agaggcaccctaggagaaccaccag

SEQ ID NO: 2273049 - DNA, 25 bp, Homo sapien
cagaggctcctgttgggacacgaag

SEQ ID NO: 2273050 - DNA, 25 bp, Homo sapien
ctccatctgtagtccactggctggc

SEQ ID NO: 2273051 - DNA, 25 bp, Homo sapien
tccatctgtagtccactggctggca

SEQ ID NO: 2273052 - DNA, 25 bp, Homo sapien
ccatctgtagtccactggctggcag

SEQ ID NO: 2273053 - DNA, 25 bp, Homo sapien
tgccatggtggtagagatgcaggaa

SEQ ID NO: 2273054 - DNA, 25 bp, Homo sapien
tcaactaccccttagagtgggatat

SEQ ID NO: 2273055 - DNA, 25 bp, Homo sapien
gcttcattcataaagtaaagaacac

SEQ ID NO: 2273056 - DNA, 25 bp, Homo sapien
gcctgctacatatttgactccagcc

SEQ ID NO: 2273057 - DNA, 25 bp, Homo sapien
aagatatcatttccaccagaagcag

SEQ ID NO: 2273058 - DNA, 25 bp, Homo sapien
cagaagcagggccacatagaaggcc

SEQ ID NO: 2273059 - DNA, 25 bp, Homo sapien
gtagggtggtaagatatcatttcca

SEQ ID NO: 2273060 - DNA, 25 bp, Homo sapien
gacatggaccaaagaattaagcatc

SEQ ID NO: 2273061 - DNA, 25 bp, Homo sapien
gagcaatctgctcagcaccagtaag

SEQ ID NO: 2273062 - DNA, 25 bp, Homo sapien
cttcagaggatacaatggagaccca

SEQ ID NO: 2273063 - DNA, 25 bp, Homo sapien
gatctggacagaaggcaatcctcct

SEQ ID NO: 2273064 - DNA, 25 bp, Homo sapien
gagcacagatgtgttgaacccaaca

SEQ ID NO: 2273065 - DNA, 25 bp, Homo sapien
tttcttgactattgaggcatggcaa

SEQ ID NO: 2273066 - DNA, 25 bp, Homo sapien
taactaaaaggccagatggagacac

SEQ ID NO: 2273067 - DNA, 25 bp, Homo sapien
tccacaggatgtagccttgcctggc

SEQ ID NO: 2273068 - DNA, 25 bp, Homo sapien
cacatcctgcgtaatttagagggaa

SEQ ID NO: 2273069 - DNA, 25 bp, Homo sapien
cctcgcttggccctgacgtcaagaa

SEQ ID NO: 2273070 - DNA, 25 bp, Homo sapien
ttgctggcgcgatcccctcgcttgg

SEQ ID NO: 2273071 - DNA, 25 bp, Homo sapien
agcccgttaccaagcagccgaaaag

SEQ ID NO: 2273072 - DNA, 25 bp, Homo sapien
tggccctgacgtcaagaagccgctg

SEQ ID NO: 2273073 - DNA, 25 bp, Homo sapien
taaccaagaccgagacgatggcgat

SEQ ID NO: 2273074 - DNA, 25 bp, Homo sapien
tagaagcgtatctcgtccgcgaaca

SEQ ID NO: 2273075 - DNA, 25 bp, Homo sapien
gatgttccgggagaaccctgccttg

SEQ ID NO: 2273076 - DNA, 25 bp, Homo sapien
gatactcgaagataagccacacctg

SEQ ID NO: 2273077 - DNA, 25 bp, Homo sapien
ccaggcagagggcataaagggacct

SEQ ID NO: 2273078 - DNA, 25 bp, Homo sapien
cacaaatctgtttcccggctggtgt

SEQ ID NO: 2273079 - DNA, 25 bp, Homo sapien
gctcttggccttgacgttacacttc

SEQ ID NO: 2273080 - DNA, 25 bp, Homo sapien
gggacctccgcaagtccacgttgct

SEQ ID NO: 2273081 - DNA, 25 bp, Homo sapien
gaacagcccataccaagatctctga

SEQ ID NO: 2273082 - DNA, 25 bp, Homo sapien
taggagactggctacaaatacatcc

SEQ ID NO: 2273083 - DNA, 25 bp, Homo sapien
taggcgacccttgggtgtcatggaa

SEQ ID NO: 2273084 - DNA, 25 bp, Homo sapien
tccacagctcctgcgtcatggaatg

SEQ ID NO: 2273085 - DNA, 25 bp, Homo sapien
gctctctcgcagaaacatcttcatt

SEQ ID NO: 2273086 - DNA, 25 bp, Homo sapien
aagctctctcgcagaaacatcttca

SEQ ID NO: 2273087 - DNA, 25 bp, Homo sapien
ctctctcgcagaaacatcttcattt

SEQ ID NO: 2273088 - DNA, 25 bp, Homo sapien
aggttagagaaataattgacagttc

SEQ ID NO: 2273089 - DNA, 25 bp, Homo sapien
aaaggtttgcatggatgctattgca

SEQ ID NO: 2273090 - DNA, 25 bp, Homo sapien
gcatcttgtatttttcactccacat

SEQ ID NO: 2273091 - DNA, 25 bp, Homo sapien
ggatgctattgcagtgcatcttgta

SEQ ID NO: 2273092 - DNA, 25 bp, Homo sapien
ttgcatggatgctattgcagtgcat

SEQ ID NO: 2273093 - DNA, 25 bp, Homo sapien
tgttcttacgacgtctgagctgacc

SEQ ID NO: 2273094 - DNA, 25 bp, Homo sapien
gtacaagagctggttgagagaccct

SEQ ID NO: 2273095 - DNA, 25 bp, Homo sapien
gcagcatagactttacagtcaggta

SEQ ID NO: 2273096 - DNA, 25 bp, Homo sapien
cagggcagctgttcttacgacgtct

SEQ ID NO: 2273097 - DNA, 25 bp, Homo sapien
tcagggaagccgaggattctcatcc

SEQ ID NO: 2273098 - DNA, 25 bp, Homo sapien
gacggtcactgtccatccgagcact

SEQ ID NO: 2273099 - DNA, 25 bp, Homo sapien
ctcagggaagccgaggattctcatc

SEQ ID NO: 2273100 - DNA, 25 bp, Homo sapien
ctgctgggtcaccagacggtcactg

SEQ ID NO: 2273101 - DNA, 25 bp, Homo sapien
cctttaacacgcactcggccttctt

SEQ ID NO: 2273102 - DNA, 25 bp, Homo sapien
cgcactcggccttcttctttcactc

SEQ ID NO: 2273103 - DNA, 25 bp, Homo sapien
gcactcggccttcttctttcactcc

SEQ ID NO: 2273104 - DNA, 25 bp, Homo sapien
ttaacacgcactcggccttcttctt

SEQ ID NO: 2273105 - DNA, 25 bp, Homo sapien
cctgcgtgtgcaaaaaggttccagt

SEQ ID NO: 2273106 - DNA, 25 bp, Homo sapien
cgtgtgcaaaaaggttccagtgtgc

SEQ ID NO: 2273107 - DNA, 25 bp, Homo sapien
ggccagccctgcgtgtgcaaaaagg

SEQ ID NO: 2273108 - DNA, 25 bp, Homo sapien
cagccctgcgtgtgcaaaaaggttc

SEQ ID NO: 2273109 - DNA, 25 bp, Homo sapien
caagagcagtgttccctgggggaac

SEQ ID NO: 2273110 - DNA, 25 bp, Homo sapien
ctgcaagagcagtgttccctggggg

SEQ ID NO: 2273111 - DNA, 25 bp, Homo sapien
gcaagagcagtgttccctgggggaa

SEQ ID NO: 2273112 - DNA, 25 bp, Homo sapien
agagcagtgttccctgggggaactc

SEQ ID NO: 2273113 - DNA, 25 bp, Homo sapien
tttttgtctatcacacgagctggag

SEQ ID NO: 2273114 - DNA, 25 bp, Homo sapien
atggcagcctttttgtctatcacac

SEQ ID NO: 2273115 - DNA, 25 bp, Homo sapien
tgtctatcacacgagctggagagca

SEQ ID NO: 2273116 - DNA, 25 bp, Homo sapien
tctcttacactggtgaggggtgccg

SEQ ID NO: 2273117 - DNA, 25 bp, Homo sapien
tagaaggagttaaattgcaccctgc

SEQ ID NO: 2273118 - DNA, 25 bp, Homo sapien
tgtatcttcggtgaacccaaaggca

SEQ ID NO: 2273119 - DNA, 25 bp, Homo sapien
cacgtgtgctctgtgactaagggat

SEQ ID NO: 2273120 - DNA, 25 bp, Homo sapien
aaaggcagtgctagacgttggtcaa

SEQ ID NO: 2273121 - DNA, 25 bp, Homo sapien
taaggcatttcaattccccaaatcc

SEQ ID NO: 2273122 - DNA, 25 bp, Homo sapien
catttgagcaatgcagagcagtgaa

SEQ ID NO: 2273123 - DNA, 25 bp, Homo sapien
gtagaggcctctccggaccagtcgg

SEQ ID NO: 2273124 - DNA, 25 bp, Homo sapien
gaccagtcggcttctatcatggaaa

SEQ ID NO: 2273125 - DNA, 25 bp, Homo sapien
tggagaggataacaaaggactggat

SEQ ID NO: 2273126 - DNA, 25 bp, Homo sapien
tccaagtgacaacagttctcatggg

SEQ ID NO: 2273127 - DNA, 25 bp, Homo sapien
agccattcataaaggtccattccaa

SEQ ID NO: 2273128 - DNA, 25 bp, Homo sapien
gaggataacaaaggactggatagca

SEQ ID NO: 2273129 - DNA, 25 bp, Homo sapien
caagcactgcataaatgacctagag

SEQ ID NO: 2273130 - DNA, 25 bp, Homo sapien
tctaatggtcttccctgaggtagct

SEQ ID NO: 2273131 - DNA, 25 bp, Homo sapien
cttactgggaaggaatggatcctga

SEQ ID NO: 2273132 - DNA, 25 bp, Homo sapien
tctgtattcgaaaaactctcatgtc

SEQ ID NO: 2273133 - DNA, 25 bp, Homo sapien
ctaataaaccgcaacatttcagtgg

SEQ ID NO: 2273134 - DNA, 25 bp, Homo sapien
ttacttgcaaccgaaagcatctatg

SEQ ID NO: 2273135 - DNA, 25 bp, Homo sapien
caaatgcaggctaaatgatctgcct

SEQ ID NO: 2273136 - DNA, 25 bp, Homo sapien
tgttttgtagctataccaactggga

SEQ ID NO: 2273137 - DNA, 25 bp, Homo sapien
tttttgctgttgtaggatgtcttat

SEQ ID NO: 2273138 - DNA, 25 bp, Homo sapien
tttgctgttgtaggatgtcttatag

SEQ ID NO: 2273139 - DNA, 25 bp, Homo sapien
gctgttgtaggatgtcttataggac

SEQ ID NO: 2273140 - DNA, 25 bp, Homo sapien
tgctgttgtaggatgtcttatagga

SEQ ID NO: 2273141 - DNA, 25 bp, Homo sapien
cagtgccagagaaataatctttatc

SEQ ID NO: 2273142 - DNA, 25 bp, Homo sapien
tggaagtcattttcagtgccagaga

SEQ ID NO: 2273143 - DNA, 25 bp, Homo sapien
caccttcatctttattaccagcaga

SEQ ID NO: 2273144 - DNA, 25 bp, Homo sapien
tagttttggaagtcattttcagtgc

SEQ ID NO: 2273145 - DNA, 25 bp, Homo sapien
tgcctgcccgtgaccaataatgtgg

SEQ ID NO: 2273146 - DNA, 25 bp, Homo sapien
ttgctcattgatgggtccggcctca

SEQ ID NO: 2273147 - DNA, 25 bp, Homo sapien
atttgaggtgcagacacgagcccca

SEQ ID NO: 2273148 - DNA, 25 bp, Homo sapien
tcagaaggaatttagtgcctgcccg

SEQ ID NO: 2273149 - DNA, 25 bp, Homo sapien
gtgactccttcaagggcttggcctc

SEQ ID NO: 2273150 - DNA, 25 bp, Homo sapien
tatgtgactccttcaagggcttggc

SEQ ID NO: 2273151 - DNA, 25 bp, Homo sapien
aagggcttggcctctgcttccgcca

SEQ ID NO: 2273152 - DNA, 25 bp, Homo sapien
cttatgtgactccttcaagggcttg

SEQ ID NO: 2273153 - DNA, 25 bp, Homo sapien
gatttgtgtatgtccagaagccagt

SEQ ID NO: 2273154 - DNA, 25 bp, Homo sapien
cagcatgaggatttgtgtatgtcca

SEQ ID NO: 2273155 - DNA, 25 bp, Homo sapien
aggatttgtgtatgtccagaagcca

SEQ ID NO: 2273156 - DNA, 25 bp, Homo sapien
tctgcagcatgaggatttgtgtatg

SEQ ID NO: 2273157 - DNA, 25 bp, Homo sapien
ttactccaaagtagtgtcaagctta

SEQ ID NO: 2273158 - DNA, 25 bp, Homo sapien
aggcaataaatagatcactcctggg

SEQ ID NO: 2273159 - DNA, 25 bp, Homo sapien
cctagggatttactccaaagtagtg

SEQ ID NO: 2273160 - DNA, 25 bp, Homo sapien
aacttttacccacatacactaatgg

SEQ ID NO: 2273161 - DNA, 25 bp, Homo sapien
tcctccgtaggaaacattgtccata

SEQ ID NO: 2273162 - DNA, 25 bp, Homo sapien
ccctctcaaggatgttctcaaccag

SEQ ID NO: 2273163 - DNA, 25 bp, Homo sapien
taccttcggcatctgtgcagcctaa

SEQ ID NO: 2273164 - DNA, 25 bp, Homo sapien
tgtgagaaatttcaccatctgacag

SEQ ID NO: 2273165 - DNA, 25 bp, Homo sapien
tgttctggggataaccaacacatta

SEQ ID NO: 2273166 - DNA, 25 bp, Homo sapien
tgttctggaattctcgctgtggaga

SEQ ID NO: 2273167 - DNA, 25 bp, Homo sapien
cacattatatgctagatgcaattgc

SEQ ID NO: 2273168 - DNA, 25 bp, Homo sapien
ttctggaattctcgctgtggagatg

SEQ ID NO: 2273169 - DNA, 25 bp, Homo sapien
tagatgttgcgatgacagcagttca

SEQ ID NO: 2273170 - DNA, 25 bp, Homo sapien
gaaacactttcaaaactctgtcgtg

SEQ ID NO: 2273171 - DNA, 25 bp, Homo sapien
gttgggaggcttttaactctcttca

SEQ ID NO: 2273172 - DNA, 25 bp, Homo sapien
cataagcaacgtagggcagaaacac

SEQ ID NO: 2273173 - DNA, 25 bp, Homo sapien
tagcccaagagagtccagtagaaga

SEQ ID NO: 2273174 - DNA, 25 bp, Homo sapien
catcacagcaagacgcaggcttggg

SEQ ID NO: 2273175 - DNA, 25 bp, Homo sapien
gggctttcccaatgaccaggttctc

SEQ ID NO: 2273176 - DNA, 25 bp, Homo sapien
taaagacatgaaaggatagcccaag

SEQ ID NO: 2273177 - DNA, 25 bp, Homo sapien
gatcaaaacactctaaggaattagt

SEQ ID NO: 2273178 - DNA, 25 bp, Homo sapien
caacctgaagttccggtgctgtttc

SEQ ID NO: 2273179 - DNA, 25 bp, Homo sapien
catgcactccttgacatctgttctt

SEQ ID NO: 2273180 - DNA, 25 bp, Homo sapien
tttctcacatgcactccttgacatc

SEQ ID NO: 2273181 - DNA, 25 bp, Homo sapien
ttcctgttaccgtcagcagaggcag

SEQ ID NO: 2273182 - DNA, 25 bp, Homo sapien
gagaatctctcatgtcttgcaggca

SEQ ID NO: 2273183 - DNA, 25 bp, Homo sapien
taggagcgctaacaacatttggagc

SEQ ID NO: 2273184 - DNA, 25 bp, Homo sapien
cacagtttgatcctatgggctgcca

SEQ ID NO: 2273185 - DNA, 25 bp, Homo sapien
ttctccagattggatgaatgcaggg

SEQ ID NO: 2273186 - DNA, 25 bp, Homo sapien
gggacttctcttgcaacacaaatta

SEQ ID NO: 2273187 - DNA, 25 bp, Homo sapien
aatttcaagctggtggctacagagt

SEQ ID NO: 2273188 - DNA, 25 bp, Homo sapien
gaacacgattgctttctgttgagaa

SEQ ID NO: 2273189 - DNA, 25 bp, Homo sapien
aatgcttcgtagaaaagatgaagct

SEQ ID NO: 2273190 - DNA, 25 bp, Homo sapien
aagatgaagcttcttggctataggt

SEQ ID NO: 2273191 - DNA, 25 bp, Homo sapien
accaagaaatgcttcgtagaaaaga

SEQ ID NO: 2273192 - DNA, 25 bp, Homo sapien
caagaaatgcttcgtagaaaagatg

SEQ ID NO: 2273193 - DNA, 25 bp, Homo sapien
tctttaaaggcatgaggccccttgc

SEQ ID NO: 2273194 - DNA, 25 bp, Homo sapien
gctaggtaggagtatgcttggcatc

SEQ ID NO: 2273195 - DNA, 25 bp, Homo sapien
gggcagtcctcgtattcaagcttcc

SEQ ID NO: 2273196 - DNA, 25 bp, Homo sapien
ggccccttgcagtccactaactgtg

SEQ ID NO: 2273197 - DNA, 25 bp, Homo sapien
ctttcttgcatcttcccttgctcag

SEQ ID NO: 2273198 - DNA, 25 bp, Homo sapien
ggagtttttagccttgtcagagaac

SEQ ID NO: 2273199 - DNA, 25 bp, Homo sapien
tgtcagagaactttggaagtactta

SEQ ID NO: 2273200 - DNA, 25 bp, Homo sapien
tgtgcaagaatctttggttgaatga

SEQ ID NO: 2273201 - DNA, 25 bp, Homo sapien
ttggttgaatgaggagtttttagcc

SEQ ID NO: 2273202 - DNA, 25 bp, Homo sapien
cctcctccagagaaatactacagca

SEQ ID NO: 2273203 - DNA, 25 bp, Homo sapien
accaaaaagttaaggcgctgcagaa

SEQ ID NO: 2273204 - DNA, 25 bp, Homo sapien
gactggcacctcgttctggggatga

SEQ ID NO: 2273205 - DNA, 25 bp, Homo sapien
aacatagcgagtgatgactggcacc

SEQ ID NO: 2273206 - DNA, 25 bp, Homo sapien
cattccagagcattaaacgtggctt

SEQ ID NO: 2273207 - DNA, 25 bp, Homo sapien
gacatatctcctaggtggaggcagc

SEQ ID NO: 2273208 - DNA, 25 bp, Homo sapien
agtggagattggctaacagaccttc

SEQ ID NO: 2273209 - DNA, 25 bp, Homo sapien
caactggctcttggtagacatatct

SEQ ID NO: 2273210 - DNA, 25 bp, Homo sapien
ctcgccttgggtggcgcattctctt

SEQ ID NO: 2273211 - DNA, 25 bp, Homo sapien
gggcaaagcagtgccataagcaaga

SEQ ID NO: 2273212 - DNA, 25 bp, Homo sapien
ggcaaagcagtgccataagcaagag

SEQ ID NO: 2273213 - DNA, 25 bp, Homo sapien
gcagtgccataagcaagagggcggg

SEQ ID NO: 2273214 - DNA, 25 bp, Homo sapien
ttcaaagaagagcaacctggagttg

SEQ ID NO: 2273215 - DNA, 25 bp, Homo sapien
tcagccacaggaaatcttccaatgg

SEQ ID NO: 2273216 - DNA, 25 bp, Homo sapien
caacctggagttggattcttcatca

SEQ ID NO: 2273217 - DNA, 25 bp, Homo sapien
tcttccaatggcctgactcacctcc

SEQ ID NO: 2273218 - DNA, 25 bp, Homo sapien
ggcggtctagcaacaaaagcaggga

SEQ ID NO: 2273219 - DNA, 25 bp, Homo sapien
tggatagagagtccccagaggcaat

SEQ ID NO: 2273220 - DNA, 25 bp, Homo sapien
tggtggtcatatgcaggatggctca

SEQ ID NO: 2273221 - DNA, 25 bp, Homo sapien
tctggaatgttgagcataggtgcct

SEQ ID NO: 2273222 - DNA, 25 bp, Homo sapien
gacctgttcaccaacctcactttga

SEQ ID NO: 2273223 - DNA, 25 bp, Homo sapien
ggcaccttcaggtgtgacctgttca

SEQ ID NO: 2273224 - DNA, 25 bp, Homo sapien
gttcaccttcatctgcctcttgctg

SEQ ID NO: 2273225 - DNA, 25 bp, Homo sapien
tctcaggcatctgctgtagggtccc

SEQ ID NO: 2273226 - DNA, 25 bp, Homo sapien
cgccataaccgttcttgctgccttt

SEQ ID NO: 2273227 - DNA, 25 bp, Homo sapien
gagtacttcctcatcgccataaccg

SEQ ID NO: 2273228 - DNA, 25 bp, Homo sapien
gcatgtcatgagtacttcctcatcg

SEQ ID NO: 2273229 - DNA, 25 bp, Homo sapien
ttcctcatcgccataaccgttcttg

SEQ ID NO: 2273230 - DNA, 25 bp, Homo sapien
atggatggttgagagtcgttgtaac

SEQ ID NO: 2273231 - DNA, 25 bp, Homo sapien
gagtcgttgtaactgaagtccatgt

SEQ ID NO: 2273232 - DNA, 25 bp, Homo sapien
ttgagagtcgttgtaactgaagtcc

SEQ ID NO: 2273233 - DNA, 25 bp, Homo sapien
cgttgtaactgaagtccatgtggtc

SEQ ID NO: 2273234 - DNA, 25 bp, Homo sapien
gagctgtgtctcttaaattagaaga

SEQ ID NO: 2273235 - DNA, 25 bp, Homo sapien
tcattcattacagagctgtgtctct

SEQ ID NO: 2273236 - DNA, 25 bp, Homo sapien
taactctgattataatggagatggg

SEQ ID NO: 2273237 - DNA, 25 bp, Homo sapien
gatacagagagatcacttcgaaggc

SEQ ID NO: 2273238 - DNA, 25 bp, Homo sapien
tttgctgaacgctcctttgtcctct

SEQ ID NO: 2273239 - DNA, 25 bp, Homo sapien
tatagctttatcacccaagtgtgca

SEQ ID NO: 2273240 - DNA, 25 bp, Homo sapien
gatgaaccttgcatttgacctgcca

SEQ ID NO: 2273241 - DNA, 25 bp, Homo sapien
gtcacagcaccatttctcactctag

SEQ ID NO: 2273242 - DNA, 25 bp, Homo sapien
tccctgatattagaaagaaacccca

SEQ ID NO: 2273243 - DNA, 25 bp, Homo sapien
cttctttggaatataaaaggttcag

SEQ ID NO: 2273244 - DNA, 25 bp, Homo sapien
ctgacttagaattcctagtgtggtg

SEQ ID NO: 2273245 - DNA, 25 bp, Homo sapien
tggtgggcttccagacttttaggat

SEQ ID NO: 2273246 - DNA, 25 bp, Homo sapien
cagctgaccatttctggccaatgag

SEQ ID NO: 2273247 - DNA, 25 bp, Homo sapien
cacagcagtcttggacatgatgcca

SEQ ID NO: 2273248 - DNA, 25 bp, Homo sapien
cagtacgtgcatgccaaagatggat

SEQ ID NO: 2273249 - DNA, 25 bp, Homo sapien
tgcattaccttagggccagctgacc

SEQ ID NO: 2273250 - DNA, 25 bp, Homo sapien
caaaaatggcttatcagcaactgtg

SEQ ID NO: 2273251 - DNA, 25 bp, Homo sapien
caacttctagatttcatgagctcca

SEQ ID NO: 2273252 - DNA, 25 bp, Homo sapien
gaaacttcaactgcctcacaatgtg

SEQ ID NO: 2273253 - DNA, 25 bp, Homo sapien
gccacatgcccttgtagagctggat

SEQ ID NO: 2273254 - DNA, 25 bp, Homo sapien
catgacataggagcgagggaaataa

SEQ ID NO: 2273255 - DNA, 25 bp, Homo sapien
gcccatcgacatggttgaataagcc

SEQ ID NO: 2273256 - DNA, 25 bp, Homo sapien
cactaagcagttaatgagagggtag

SEQ ID NO: 2273257 - DNA, 25 bp, Homo sapien
gaaaatgagctaacacctaaatgcc

SEQ ID NO: 2273258 - DNA, 25 bp, Homo sapien
agcctgcaggacagtggcacaatct

SEQ ID NO: 2273259 - DNA, 25 bp, Homo sapien
tgagctcaagccatcataccacctt

SEQ ID NO: 2273260 - DNA, 25 bp, Homo sapien
tctcgctctgtcacagagcctgcag

SEQ ID NO: 2273261 - DNA, 25 bp, Homo sapien
gcacaatcttacacctcactgcagc

SEQ ID NO: 2273262 - DNA, 25 bp, Homo sapien
gactgaaaaggcttgtctctcttcc

SEQ ID NO: 2273263 - DNA, 25 bp, Homo sapien
ttcatctatcatttgagaccatatg

SEQ ID NO: 2273264 - DNA, 25 bp, Homo sapien
gagaccatatgtggaaattctgatc

SEQ ID NO: 2273265 - DNA, 25 bp, Homo sapien
taaaaaggctagagttgactccaac

SEQ ID NO: 2273266 - DNA, 25 bp, Homo sapien
taggttacccgaggataagccatgc

SEQ ID NO: 2273267 - DNA, 25 bp, Homo sapien
ctgaagagtaagtgatgtgtgtccc

SEQ ID NO: 2273268 - DNA, 25 bp, Homo sapien
ccctactgagagaaccttggcactg

SEQ ID NO: 2273269 - DNA, 25 bp, Homo sapien
tgagggcctaggacaaaggactgac

SEQ ID NO: 2273270 - DNA, 25 bp, Homo sapien
tataggtcagtacacacaaaggagc

SEQ ID NO: 2273271 - DNA, 25 bp, Homo sapien
aaggcccaggtgaatttaaatccat

SEQ ID NO: 2273272 - DNA, 25 bp, Homo sapien
ccatactcgggctgtgttcctaaca

SEQ ID NO: 2273273 - DNA, 25 bp, Homo sapien
gaacaccccaggcattatataggtc

SEQ ID NO: 2273274 - DNA, 25 bp, Homo sapien
aacatcttatacagccgtggtacat

SEQ ID NO: 2273275 - DNA, 25 bp, Homo sapien
taatcttctttcatcatcctggagc

SEQ ID NO: 2273276 - DNA, 25 bp, Homo sapien
tcagtgctctagactccgcctctaa

SEQ ID NO: 2273277 - DNA, 25 bp, Homo sapien
aaatccaaccctaagtctcagtgct

SEQ ID NO: 2273278 - DNA, 25 bp, Homo sapien
atccctcggggcacttaagagtatt

SEQ ID NO: 2273279 - DNA, 25 bp, Homo sapien
aggaatggtaccatcatccctcggg

SEQ ID NO: 2273280 - DNA, 25 bp, Homo sapien
cttgaggaatggtaccatcatccct

SEQ ID NO: 2273281 - DNA, 25 bp, Homo sapien
cacttaagagtatttcatgtcctcc

SEQ ID NO: 2273282 - DNA, 25 bp, Homo sapien
tgacagcatctatccggtacctgcc

SEQ ID NO: 2273283 - DNA, 25 bp, Homo sapien
agtgacagcatctatccggtacctg

SEQ ID NO: 2273284 - DNA, 25 bp, Homo sapien
tctatccggtacctgcccaaccatg

SEQ ID NO: 2273285 - DNA, 25 bp, Homo sapien
tatccggtacctgcccaaccatgtc

SEQ ID NO: 2273286 - DNA, 25 bp, Homo sapien
gaaggtcaaaggcatccatgaggag

SEQ ID NO: 2273287 - DNA, 25 bp, Homo sapien
gcaagtggcctctacatggtgtgaa

SEQ ID NO: 2273288 - DNA, 25 bp, Homo sapien
cctagctatgggcaggaccaggact

SEQ ID NO: 2273289 - DNA, 25 bp, Homo sapien
tctgtgtcctagagacccgccatgt

SEQ ID NO: 2273290 - DNA, 25 bp, Homo sapien
agcctggatgttccgcacagccttg

SEQ ID NO: 2273291 - DNA, 25 bp, Homo sapien
caagttgcggtttgtctcctctcca

SEQ ID NO: 2273292 - DNA, 25 bp, Homo sapien
cccactcattgccaagtccaagttg

SEQ ID NO: 2273293 - DNA, 25 bp, Homo sapien
cagccttgcacaaagcttcagatgc

SEQ ID NO: 2273294 - DNA, 25 bp, Homo sapien
cccaggctcacaaagcagatgttgg

SEQ ID NO: 2273295 - DNA, 25 bp, Homo sapien
gataaccgtcattctgctgagatct

SEQ ID NO: 2273296 - DNA, 25 bp, Homo sapien
tcacctgcttcacgcctttgaggcg

SEQ ID NO: 2273297 - DNA, 25 bp, Homo sapien
gaactcaggtccattgaaccctacg

SEQ ID NO: 2273298 - DNA, 25 bp, Homo sapien
tctcgtttcatcacatgatcagtgt

SEQ ID NO: 2273299 - DNA, 25 bp, Homo sapien
attgatggcccgcagcatgacattc

SEQ ID NO: 2273300 - DNA, 25 bp, Homo sapien
gacattctcgtttcatcacatgatc

SEQ ID NO: 2273301 - DNA, 25 bp, Homo sapien
gcagcatgacattctcgtttcatca

SEQ ID NO: 2273302 - DNA, 25 bp, Homo sapien
catgcagcagtttccactaaaaaat

SEQ ID NO: 2273303 - DNA, 25 bp, Homo sapien
ccttgcccttacacatgcagcagtt

SEQ ID NO: 2273304 - DNA, 25 bp, Homo sapien
ttgcccttacacatgcagcagtttc

SEQ ID NO: 2273305 - DNA, 25 bp, Homo sapien
cagcagtttccactaaaaaatggca

SEQ ID NO: 2273306 - DNA, 25 bp, Homo sapien
ttctccaaggacctccattgcctga

SEQ ID NO: 2273307 - DNA, 25 bp, Homo sapien
aactggaaagactccgctagtgggg

SEQ ID NO: 2273308 - DNA, 25 bp, Homo sapien
tggggaagatattctccattcttgt

SEQ ID NO: 2273309 - DNA, 25 bp, Homo sapien
cctgaacccattaggaagcttgtgg

SEQ ID NO: 2273310 - DNA, 25 bp, Homo sapien
ctactttgaacagaaccccatatcc

SEQ ID NO: 2273311 - DNA, 25 bp, Homo sapien
tactttgaacagaaccccatatccc

SEQ ID NO: 2273312 - DNA, 25 bp, Homo sapien
actttgaacagaaccccatatccct

SEQ ID NO: 2273313 - DNA, 25 bp, Homo sapien
ctgaaccgtcagtggtgaggctctt

SEQ ID NO: 2273314 - DNA, 25 bp, Homo sapien
gataacatcgaggaaataaagtttg

SEQ ID NO: 2273315 - DNA, 25 bp, Homo sapien
ccgtcagtggtgaggctcttgataa

SEQ ID NO: 2273316 - DNA, 25 bp, Homo sapien
gaggctcttgataacatcgaggaaa

SEQ ID NO: 2273317 - DNA, 25 bp, Homo sapien
caagacccctgggaagtagtcactg

SEQ ID NO: 2273318 - DNA, 25 bp, Homo sapien
tgaacccgaggttccagtgctgccc

SEQ ID NO: 2273319 - DNA, 25 bp, Homo sapien
ggccctgaacccgaggttccagtgc

SEQ ID NO: 2273320 - DNA, 25 bp, Homo sapien
ttacataagtgaaccacccacacag

SEQ ID NO: 2273321 - DNA, 25 bp, Homo sapien
ttagcaaatgtctacagtcacatgt

SEQ ID NO: 2273322 - DNA, 25 bp, Homo sapien
cccggcctcgcagaattcttatgct

SEQ ID NO: 2273323 - DNA, 25 bp, Homo sapien
ttagaagggaatactaccttatgga

SEQ ID NO: 2273324 - DNA, 25 bp, Homo sapien
tagaagggaatactaccttatggaa

SEQ ID NO: 2273325 - DNA, 25 bp, Homo sapien
ccaaatatccggcaatttcccaggc

SEQ ID NO: 2273326 - DNA, 25 bp, Homo sapien
aatatccggcaatttcccaggctct

SEQ ID NO: 2273327 - DNA, 25 bp, Homo sapien
ccaggctctccggtgaaagcctgct

SEQ ID NO: 2273328 - DNA, 25 bp, Homo sapien
gctctccggtgaaagcctgcttggt

SEQ ID NO: 2273329 - DNA, 25 bp, Homo sapien
gacgattgtacttaccttgaagggc

SEQ ID NO: 2273330 - DNA, 25 bp, Homo sapien
gctttatgcgaccacaaagaatgga

SEQ ID NO: 2273331 - DNA, 25 bp, Homo sapien
cagtttgggccaattagctcatgtc

SEQ ID NO: 2273332 - DNA, 25 bp, Homo sapien
aactctgaaggactgcacatcttag

SEQ ID NO: 2273333 - DNA, 25 bp, Homo sapien
tatgcagggtctcatgctctgtact

SEQ ID NO: 2273334 - DNA, 25 bp, Homo sapien
catgctctgtactgctaattctttg

SEQ ID NO: 2273335 - DNA, 25 bp, Homo sapien
atttgtctttatgcagggtctcatg

SEQ ID NO: 2273336 - DNA, 25 bp, Homo sapien
gctctgtactgctaattctttgtca

SEQ ID NO: 2273337 - DNA, 25 bp, Homo sapien
agacacgacggatgcacgcacatgg

SEQ ID NO: 2273338 - DNA, 25 bp, Homo sapien
agagagacacgacggatgcacgcac

SEQ ID NO: 2273339 - DNA, 25 bp, Homo sapien
gacaccttgcgcttcggcttctccc

SEQ ID NO: 2273340 - DNA, 25 bp, Homo sapien
cacgacggatgcacgcacatggaga

SEQ ID NO: 2273341 - DNA, 25 bp, Homo sapien
cagaactggacacaccagacagtta

SEQ ID NO: 2273342 - DNA, 25 bp, Homo sapien
tggacacaccagacagttagcagaa

SEQ ID NO: 2273343 - DNA, 25 bp, Homo sapien
cagacagttagcagaaggcacatgt

SEQ ID NO: 2273344 - DNA, 25 bp, Homo sapien
cacaccagacagttagcagaaggca

SEQ ID NO: 2273345 - DNA, 25 bp, Homo sapien
ctcttaagtcgtccccagtacccat

SEQ ID NO: 2273346 - DNA, 25 bp, Homo sapien
aagttccaggtacccgtgcaggtca

SEQ ID NO: 2273347 - DNA, 25 bp, Homo sapien
gatcttggtagatgatcacaccgca

SEQ ID NO: 2273348 - DNA, 25 bp, Homo sapien
tggtccctaccagacagcaagagat

SEQ ID NO: 2273349 - DNA, 25 bp, Homo sapien
taaccatctgtgtagcatcaatgcc

SEQ ID NO: 2273350 - DNA, 25 bp, Homo sapien
tatggagcctgtagttgaaaaatgt

SEQ ID NO: 2273351 - DNA, 25 bp, Homo sapien
ccagaagtcccctgataaaaagata

SEQ ID NO: 2273352 - DNA, 25 bp, Homo sapien
taagttcatgcaaaggcattgtctc

SEQ ID NO: 2273353 - DNA, 25 bp, Homo sapien
gtctcaggcacagtgtaattaatta

SEQ ID NO: 2273354 - DNA, 25 bp, Homo sapien
tcttaaatacgtcagttcttcccaa

SEQ ID NO: 2273355 - DNA, 25 bp, Homo sapien
agcacctctacctggaagagtacaa

SEQ ID NO: 2273356 - DNA, 25 bp, Homo sapien
ggaagactcaatatcttaaatacgt

SEQ ID NO: 2273357 - DNA, 25 bp, Homo sapien
gcacctctacctggaagagtacaaa

SEQ ID NO: 2273358 - DNA, 25 bp, Homo sapien
ctgatgggggttgccacatcgaaaa

SEQ ID NO: 2273359 - DNA, 25 bp, Homo sapien
gattgtacctgcctcatcattatcc

SEQ ID NO: 2273360 - DNA, 25 bp, Homo sapien
tagatagattgtacctgcctcatca

SEQ ID NO: 2273361 - DNA, 25 bp, Homo sapien
ttgccacatcgaaaaccgccagaag

SEQ ID NO: 2273362 - DNA, 25 bp, Homo sapien
gagctcggtcattcaaagtctcccc

SEQ ID NO: 2273363 - DNA, 25 bp, Homo sapien
gccgtttccagggacgtcgacatga

SEQ ID NO: 2273364 - DNA, 25 bp, Homo sapien
ggcaaaagtaaccatggcatccgtg

SEQ ID NO: 2273365 - DNA, 25 bp, Homo sapien
tcgacatgaagagaaaggtggacgc

SEQ ID NO: 2273366 - DNA, 25 bp, Homo sapien
gaggcctgaacatctgatacatctg

SEQ ID NO: 2273367 - DNA, 25 bp, Homo sapien
catcctgaatgtagggaaagaggag

SEQ ID NO: 2273368 - DNA, 25 bp, Homo sapien
gtctggagaagcttgtagcagaagc

SEQ ID NO: 2273369 - DNA, 25 bp, Homo sapien
tctgatacatctgggagtggaagtg

SEQ ID NO: 2273370 - DNA, 25 bp, Homo sapien
attcacactccccaagcaactggat

SEQ ID NO: 2273371 - DNA, 25 bp, Homo sapien
cactccccaagcaactggatggcat

SEQ ID NO: 2273372 - DNA, 25 bp, Homo sapien
tccccaagcaactggatggcatgcc

SEQ ID NO: 2273373 - DNA, 25 bp, Homo sapien
caagcaactggatggcatgccggct

SEQ ID NO: 2273374 - DNA, 25 bp, Homo sapien
agaaggtgcattgtgcattctggga

SEQ ID NO: 2273375 - DNA, 25 bp, Homo sapien
gagagctgcagtagtgtgagcaaat

SEQ ID NO: 2273376 - DNA, 25 bp, Homo sapien
ggccagaaggtgcattgtgcattct

SEQ ID NO: 2273377 - DNA, 25 bp, Homo sapien
tcagaggccagaaggtgcattgtgc

SEQ ID NO: 2273378 - DNA, 25 bp, Homo sapien
ggaattcatagtgccaccccaagga

SEQ ID NO: 2273379 - DNA, 25 bp, Homo sapien
tcccagaggcggtcatgctcaagtg

SEQ ID NO: 2273380 - DNA, 25 bp, Homo sapien
tgcgacagaggactagggacagcct

SEQ ID NO: 2273381 - DNA, 25 bp, Homo sapien
tataagccagacactgtcacgtgtg

SEQ ID NO: 2273382 - DNA, 25 bp, Homo sapien
gcacgtaagcagaatgccaatagct

SEQ ID NO: 2273383 - DNA, 25 bp, Homo sapien
agaatgccaatagctgctctcgcca

SEQ ID NO: 2273384 - DNA, 25 bp, Homo sapien
aatagctgctctcgccacagtgcat

SEQ ID NO: 2273385 - DNA, 25 bp, Homo sapien
tctggaaacagcacgtaagcagaat

SEQ ID NO: 2273386 - DNA, 25 bp, Homo sapien
tcttttaatgcaatactatcattcc

SEQ ID NO: 2273387 - DNA, 25 bp, Homo sapien
ttaatgcaatactatcattcccatc

SEQ ID NO: 2273388 - DNA, 25 bp, Homo sapien
ttttaatgcaatactatcattccca

SEQ ID NO: 2273389 - DNA, 25 bp, Homo sapien
aatgcaatactatcattcccatcac

SEQ ID NO: 2273390 - DNA, 25 bp, Homo sapien
caaggatgaggtatattgactggcg

SEQ ID NO: 2273391 - DNA, 25 bp, Homo sapien
tgattggcggtctggtctggatccc

SEQ ID NO: 2273392 - DNA, 25 bp, Homo sapien
tgtgtcaaatatggcccctcctgtc

SEQ ID NO: 2273393 - DNA, 25 bp, Homo sapien
cggtctgcggctatattgattggcg

SEQ ID NO: 2273394 - DNA, 25 bp, Homo sapien
tcggggataaactcaaaccatactg

SEQ ID NO: 2273395 - DNA, 25 bp, Homo sapien
aaaccatactgatttggcccccaga

SEQ ID NO: 2273396 - DNA, 25 bp, Homo sapien
tcaaccatagcagcaagtcggggat

SEQ ID NO: 2273397 - DNA, 25 bp, Homo sapien
ttggcccccagaggacttggctgca

SEQ ID NO: 2273398 - DNA, 25 bp, Homo sapien
tttggaagccaatcaactctgcctt

SEQ ID NO: 2273399 - DNA, 25 bp, Homo sapien
tagtgaaccccctttctacactctc

SEQ ID NO: 2273400 - DNA, 25 bp, Homo sapien
gctcttcttggctataattagaaaa

SEQ ID NO: 2273401 - DNA, 25 bp, Homo sapien
ggccctggctctgaagtcggccatg

SEQ ID NO: 2273402 - DNA, 25 bp, Homo sapien
ctcacagcaatctttaccaacacgg

SEQ ID NO: 2273403 - DNA, 25 bp, Homo sapien
ccttgacgcacacgggcgagggacc

SEQ ID NO: 2273404 - DNA, 25 bp, Homo sapien
ctgcccttgacgcacacgggcgagg

SEQ ID NO: 2273405 - DNA, 25 bp, Homo sapien
acagcaatctttaccaacacggtcc

SEQ ID NO: 2273406 - DNA, 25 bp, Homo sapien
catcgctgccacctcactggctccc

SEQ ID NO: 2273407 - DNA, 25 bp, Homo sapien
atcgctgccacctcactggctccca

SEQ ID NO: 2273408 - DNA, 25 bp, Homo sapien
tagtagaagcttaacaccggactcc

SEQ ID NO: 2273409 - DNA, 25 bp, Homo sapien
gcccagatgttctgagggtagcact

SEQ ID NO: 2273410 - DNA, 25 bp, Homo sapien
cgaattcgtccacctccttgagata

SEQ ID NO: 2273411 - DNA, 25 bp, Homo sapien
cagctgagctagtgatccccgaatt

SEQ ID NO: 2273412 - DNA, 25 bp, Homo sapien
gggacgctctccacaaaacgcagct

SEQ ID NO: 2273413 - DNA, 25 bp, Homo sapien
tacatacgcatcaccaactgatctg

SEQ ID NO: 2273414 - DNA, 25 bp, Homo sapien
aactgatctgctccatccccgggga

SEQ ID NO: 2273415 - DNA, 25 bp, Homo sapien
gagggcctacgttccagggtgctct

SEQ ID NO: 2273416 - DNA, 25 bp, Homo sapien
ttaaacatcccttgagcctgcaaag

SEQ ID NO: 2273417 - DNA, 25 bp, Homo sapien
ggttcactctaccttggcaaagcat

SEQ ID NO: 2273418 - DNA, 25 bp, Homo sapien
cctgcaaagacgcatggttcactct

SEQ ID NO: 2273419 - DNA, 25 bp, Homo sapien
gcagcggtggccttgtaattgtctc

SEQ ID NO: 2273420 - DNA, 25 bp, Homo sapien
gtgttattctggcaccagctacctg

SEQ ID NO: 2273421 - DNA, 25 bp, Homo sapien
tgtgttattctggcaccagctacct

SEQ ID NO: 2273422 - DNA, 25 bp, Homo sapien
tgttattctggcaccagctacctga

SEQ ID NO: 2273423 - DNA, 25 bp, Homo sapien
ctgtgttattctggcaccagctacc

SEQ ID NO: 2273424 - DNA, 25 bp, Homo sapien
tgttgtcgcagcagttcggtgtcca

SEQ ID NO: 2273425 - DNA, 25 bp, Homo sapien
tggtgtccccgaatgtcgatggccg

SEQ ID NO: 2273426 - DNA, 25 bp, Homo sapien
taatcctccatgagatacaagggcg

SEQ ID NO: 2273427 - DNA, 25 bp, Homo sapien
gtgatgttctgttcgccaccacggg

SEQ ID NO: 2273428 - DNA, 25 bp, Homo sapien
tcatgttcttccgatttttctcgac

SEQ ID NO: 2273429 - DNA, 25 bp, Homo sapien
tcttccgatttttctcgacaaggca

SEQ ID NO: 2273430 - DNA, 25 bp, Homo sapien
tgttcttccgatttttctcgacaag

SEQ ID NO: 2273431 - DNA, 25 bp, Homo sapien
cgatttttctcgacaaggcacacac

SEQ ID NO: 2273432 - DNA, 25 bp, Homo sapien
aacatttatatgctacatgcatatc

SEQ ID NO: 2273433 - DNA, 25 bp, Homo sapien
tttatatatggggagagatgccaat

SEQ ID NO: 2273434 - DNA, 25 bp, Homo sapien
agaaaaaagcttatatactgtaggg

SEQ ID NO: 2273435 - DNA, 25 bp, Homo sapien
tatgctacatgcatatcatataatt

SEQ ID NO: 2273436 - DNA, 25 bp, Homo sapien
acagagtgactcctgagagccggat

SEQ ID NO: 2273437 - DNA, 25 bp, Homo sapien
aaatactggtgtacacagattttac

SEQ ID NO: 2273438 - DNA, 25 bp, Homo sapien
ggtgtacacagattttacagagtga

SEQ ID NO: 2273439 - DNA, 25 bp, Homo sapien
gagagccggatcacaaaacaagttt

SEQ ID NO: 2273440 - DNA, 25 bp, Homo sapien
actggaattcagagggagtggccct

SEQ ID NO: 2273441 - DNA, 25 bp, Homo sapien
gaggcactggaattcagagggagtg

SEQ ID NO: 2273442 - DNA, 25 bp, Homo sapien
cactggaattcagagggagtggccc

SEQ ID NO: 2273443 - DNA, 25 bp, Homo sapien
ggcactggaattcagagggagtggc

SEQ ID NO: 2273444 - DNA, 25 bp, Homo sapien
ctggcacagactgggcgcatgagaa

SEQ ID NO: 2273445 - DNA, 25 bp, Homo sapien
cagactgggcgcatgagaagctgaa

SEQ ID NO: 2273446 - DNA, 25 bp, Homo sapien
cacagactgggcgcatgagaagctg

SEQ ID NO: 2273447 - DNA, 25 bp, Homo sapien
ggcacagactgggcgcatgagaagc

SEQ ID NO: 2273448 - DNA, 25 bp, Homo sapien
gaagagccactggtgcctatggtga

SEQ ID NO: 2273449 - DNA, 25 bp, Homo sapien
cagaagagccactggtgcctatggt

SEQ ID NO: 2273450 - DNA, 25 bp, Homo sapien
gacagaagagccactggtgcctatg

SEQ ID NO: 2273451 - DNA, 25 bp, Homo sapien
ctggacagaagagccactggtgcct

SEQ ID NO: 2273452 - DNA, 25 bp, Homo sapien
agcaagtgtagatgacgcagcacac

SEQ ID NO: 2273453 - DNA, 25 bp, Homo sapien
caagtgtagatgacgcagcacacca

SEQ ID NO: 2273454 - DNA, 25 bp, Homo sapien
tagatgacgcagcacaccagagggt

SEQ ID NO: 2273455 - DNA, 25 bp, Homo sapien
gtgtagatgacgcagcacaccagag

SEQ ID NO: 2273456 - DNA, 25 bp, Homo sapien
agatgtcacagaggatcctgaggtc

SEQ ID NO: 2273457 - DNA, 25 bp, Homo sapien
cagcagcatgcctgtccaggtctct

SEQ ID NO: 2273458 - DNA, 25 bp, Homo sapien
ccagagatgtcacagaggatcctga

SEQ ID NO: 2273459 - DNA, 25 bp, Homo sapien
tgcctttcaacgcagcagcatgcct

SEQ ID NO: 2273460 - DNA, 25 bp, Homo sapien
ggttgactcgccacaaagctaatgg

SEQ ID NO: 2273461 - DNA, 25 bp, Homo sapien
gcatcctagcaaggtattcacgtgg

SEQ ID NO: 2273462 - DNA, 25 bp, Homo sapien
gcctgggaccatggacctgaagagt

SEQ ID NO: 2273463 - DNA, 25 bp, Homo sapien
tcagaactttgctgcggcctgggac

SEQ ID NO: 2273464 - DNA, 25 bp, Homo sapien
ctttgaggcaggtaaagccgcctca

SEQ ID NO: 2273465 - DNA, 25 bp, Homo sapien
gaggcaggtaaagccgcctcataca

SEQ ID NO: 2273466 - DNA, 25 bp, Homo sapien
cactgcaaggaaggcgttggagcca

SEQ ID NO: 2273467 - DNA, 25 bp, Homo sapien
catacactgcaaggaaggcgttgga

SEQ ID NO: 2273468 - DNA, 25 bp, Homo sapien
cagccgacggttccgcgtcaccagg

SEQ ID NO: 2273469 - DNA, 25 bp, Homo sapien
ggcgcagcgtgccagccgacggttc

SEQ ID NO: 2273470 - DNA, 25 bp, Homo sapien
ccagcacagagtttgtgcagttatt

SEQ ID NO: 2273471 - DNA, 25 bp, Homo sapien
cacgtgggggcgcagcgtgccagcc

SEQ ID NO: 2273472 - DNA, 25 bp, Homo sapien
gggagcacctttgccaagcgcatgc

SEQ ID NO: 2273473 - DNA, 25 bp, Homo sapien
gagcacctttgccaagcgcatgcga

SEQ ID NO: 2273474 - DNA, 25 bp, Homo sapien
ttgccaagcgcatgcgagtgcacat

SEQ ID NO: 2273475 - DNA, 25 bp, Homo sapien
cacctttgccaagcgcatgcgagtg

SEQ ID NO: 2273476 - DNA, 25 bp, Homo sapien
tgcagcatgggtgcctcaggaggtc

SEQ ID NO: 2273477 - DNA, 25 bp, Homo sapien
taagcctctgggaactgcagcatgg

SEQ ID NO: 2273478 - DNA, 25 bp, Homo sapien
tcaggaggtccttgtccagaacaca

SEQ ID NO: 2273479 - DNA, 25 bp, Homo sapien
acacgtcccgcagccgtccttaagc

SEQ ID NO: 2273480 - DNA, 25 bp, Homo sapien
tctctgtgcaggtaacagtgcagcc

SEQ ID NO: 2273481 - DNA, 25 bp, Homo sapien
tattgaatgcacaatctcggttggg

SEQ ID NO: 2273482 - DNA, 25 bp, Homo sapien
gacacggactctgctcttaagggac

SEQ ID NO: 2273483 - DNA, 25 bp, Homo sapien
tacagcaggacagtgacggagtgcc

SEQ ID NO: 2273484 - DNA, 25 bp, Homo sapien
tatcaaaaaccgaggtcagggatgt

SEQ ID NO: 2273485 - DNA, 25 bp, Homo sapien
gcctggcagcaaccataatgggctt

SEQ ID NO: 2273486 - DNA, 25 bp, Homo sapien
atgttgggaggccattcctgtgtct

SEQ ID NO: 2273487 - DNA, 25 bp, Homo sapien
ggtctcaaggcgcttatctatgggc

SEQ ID NO: 2273488 - DNA, 25 bp, Homo sapien
aaggcacctttgctttcttctcctg

SEQ ID NO: 2273489 - DNA, 25 bp, Homo sapien
caaaggcacctttgctttcttctcc

SEQ ID NO: 2273490 - DNA, 25 bp, Homo sapien
aggcacctttgctttcttctcctgt

SEQ ID NO: 2273491 - DNA, 25 bp, Homo sapien
ctacaaaggcacctttgctttcttc

SEQ ID NO: 2273492 - DNA, 25 bp, Homo sapien
agcacaacaggaccgggtgaaccca

SEQ ID NO: 2273493 - DNA, 25 bp, Homo sapien
tgactcagggccggggtcaagcaca

SEQ ID NO: 2273494 - DNA, 25 bp, Homo sapien
tcagggccggggtcaagcacaacag

SEQ ID NO: 2273495 - DNA, 25 bp, Homo sapien
caacaggaccgggtgaacccacaga

SEQ ID NO: 2273496 - DNA, 25 bp, Homo sapien
tcaccactgtctggacttcccgcac

SEQ ID NO: 2273497 - DNA, 25 bp, Homo sapien
gttggacacatgtgctgccctgctg

SEQ ID NO: 2273498 - DNA, 25 bp, Homo sapien
ggaggttggacacatgtgctgccct

SEQ ID NO: 2273499 - DNA, 25 bp, Homo sapien
gaggttggacacatgtgctgccctg

SEQ ID NO: 2273500 - DNA, 25 bp, Homo sapien
ttagaatgggaatatcttttgaggg

SEQ ID NO: 2273501 - DNA, 25 bp, Homo sapien
accacaaactccttacgctgtttgt

SEQ ID NO: 2273502 - DNA, 25 bp, Homo sapien
aagttccaggtattagaatgggaat

SEQ ID NO: 2273503 - DNA, 25 bp, Homo sapien
gtttccccacttgtgaagtgagagg

SEQ ID NO: 2273504 - DNA, 25 bp, Homo sapien
cagcccacctagataccgcaggata

SEQ ID NO: 2273505 - DNA, 25 bp, Homo sapien
gagaatctgttacgcgcctcttcca

SEQ ID NO: 2273506 - DNA, 25 bp, Homo sapien
ttccagggtccggtggctatggcca

SEQ ID NO: 2273507 - DNA, 25 bp, Homo sapien
caactccgatgttcaaggcccgtgt

SEQ ID NO: 2273508 - DNA, 25 bp, Homo sapien
tcagacttcaggagagtgtcgagtg

SEQ ID NO: 2273509 - DNA, 25 bp, Homo sapien
tgggcttcgagcatttccatgttca

SEQ ID NO: 2273510 - DNA, 25 bp, Homo sapien
tccatgttcagtccgagctgtgtca

SEQ ID NO: 2273511 - DNA, 25 bp, Homo sapien
tctgactcggtctagcctgctcctg

SEQ ID NO: 2273512 - DNA, 25 bp, Homo sapien
taaaagcaccgcatgtcaaaacctg

SEQ ID NO: 2273513 - DNA, 25 bp, Homo sapien
cgtagactatactctctggccataa

SEQ ID NO: 2273514 - DNA, 25 bp, Homo sapien
tggttaaagcggaaatcacagggaa

SEQ ID NO: 2273515 - DNA, 25 bp, Homo sapien
tagacgtcgataacaaaaggatagc

SEQ ID NO: 2273516 - DNA, 25 bp, Homo sapien
tagttcctaggattagcccctccac

SEQ ID NO: 2273517 - DNA, 25 bp, Homo sapien
ccaagggctatttctcggaggatca

SEQ ID NO: 2273518 - DNA, 25 bp, Homo sapien
ttttcagtaaagagtcaatcaggga

SEQ ID NO: 2273519 - DNA, 25 bp, Homo sapien
aataagattaatcccaggctctagg

SEQ ID NO: 2273520 - DNA, 25 bp, Homo sapien
gcaagatacagccagcatgaaaatg

SEQ ID NO: 2273521 - DNA, 25 bp, Homo sapien
tgacatacttcttccacatgtgact

SEQ ID NO: 2273522 - DNA, 25 bp, Homo sapien
taagagtactggcaagatacagcca

SEQ ID NO: 2273523 - DNA, 25 bp, Homo sapien
tacagccagcatgaaaatgacatac

SEQ ID NO: 2273524 - DNA, 25 bp, Homo sapien
tggaatcacctctttctagtagaag

SEQ ID NO: 2273525 - DNA, 25 bp, Homo sapien
ttgcttcagtaacaacactctgtcc

SEQ ID NO: 2273526 - DNA, 25 bp, Homo sapien
gtatcacttcagttgacaatggcca

SEQ ID NO: 2273527 - DNA, 25 bp, Homo sapien
tcacagagtaggaagcctgcagttc

SEQ ID NO: 2273528 - DNA, 25 bp, Homo sapien
gtgaagtagctctaggggtgtgggc

SEQ ID NO: 2273529 - DNA, 25 bp, Homo sapien
tgtgaagtagctctaggggtgtggg

SEQ ID NO: 2273530 - DNA, 25 bp, Homo sapien
tgaagtagctctaggggtgtgggct

SEQ ID NO: 2273531 - DNA, 25 bp, Homo sapien
attcggaatttatttgattcaaaat

SEQ ID NO: 2273532 - DNA, 25 bp, Homo sapien
cggaatttatttgattcaaaatggt

SEQ ID NO: 2273533 - DNA, 25 bp, Homo sapien
tcggaatttatttgattcaaaatgg

SEQ ID NO: 2273534 - DNA, 25 bp, Homo sapien
ttcggaatttatttgattcaaaatg

SEQ ID NO: 2273535 - DNA, 25 bp, Homo sapien
atgtggacagcagaagtacagcact

SEQ ID NO: 2273536 - DNA, 25 bp, Homo sapien
tacgttatgtcaaaagcaggtagca

SEQ ID NO: 2273537 - DNA, 25 bp, Homo sapien
tgtaaagttcttctccacgtatgtg

SEQ ID NO: 2273538 - DNA, 25 bp, Homo sapien
gcacttttccatgtacgttatgtca

SEQ ID NO: 2273539 - DNA, 25 bp, Homo sapien
acatttgcttggtctgggtgaggct

SEQ ID NO: 2273540 - DNA, 25 bp, Homo sapien
catgatggactctggttggcctgca

SEQ ID NO: 2273541 - DNA, 25 bp, Homo sapien
tatgtgtcagcttctatcaagaacc

SEQ ID NO: 2273542 - DNA, 25 bp, Homo sapien
caaattcttcagagtatgtgtcagc

SEQ ID NO: 2273543 - DNA, 25 bp, Homo sapien
cactctgtggtggtgaggttgacca

SEQ ID NO: 2273544 - DNA, 25 bp, Homo sapien
ggggtcactttcatgcatggtgctc

SEQ ID NO: 2273545 - DNA, 25 bp, Homo sapien
ggcacactctgtggtggtgaggttg

SEQ ID NO: 2273546 - DNA, 25 bp, Homo sapien
aaggtgagatcattctgggggtcac

SEQ ID NO: 2273547 - DNA, 25 bp, Homo sapien
ggttcgagtgggctctaaggcaact

SEQ ID NO: 2273548 - DNA, 25 bp, Homo sapien
ggcaactgccgtgtgccagtctgtt

SEQ ID NO: 2273549 - DNA, 25 bp, Homo sapien
tgttgacatgatcaacattaatatt

SEQ ID NO: 2273550 - DNA, 25 bp, Homo sapien
tcactggattggttcgagtgggctc

SEQ ID NO: 2273551 - DNA, 25 bp, Homo sapien
catttgctttaagagctgcaagctt

SEQ ID NO: 2273552 - DNA, 25 bp, Homo sapien
ggacacttgcagccatttgactttt

SEQ ID NO: 2273553 - DNA, 25 bp, Homo sapien
taagagctgcaagcttaagttctct

SEQ ID NO: 2273554 - DNA, 25 bp, Homo sapien
tgctttaagagctgcaagcttaagt

SEQ ID NO: 2273555 - DNA, 25 bp, Homo sapien
atcattttcttgattgtactctatg

SEQ ID NO: 2273556 - DNA, 25 bp, Homo sapien
ctcatcattttcttgattgtactct

SEQ ID NO: 2273557 - DNA, 25 bp, Homo sapien
ttttcttgattgtactctatgctgc

SEQ ID NO: 2273558 - DNA, 25 bp, Homo sapien
cattttcttgattgtactctatgct

SEQ ID NO: 2273559 - DNA, 25 bp, Homo sapien
cgtgtactcggtgtagtacataagg

SEQ ID NO: 2273560 - DNA, 25 bp, Homo sapien
tgtagtacataaggggcggcttttg

SEQ ID NO: 2273561 - DNA, 25 bp, Homo sapien
ttagttgatcgtgtactcggtgtag

SEQ ID NO: 2273562 - DNA, 25 bp, Homo sapien
tgatcgtgtactcggtgtagtacat

SEQ ID NO: 2273563 - DNA, 25 bp, Homo sapien
gaaggcctctggttggtaccaagcc

SEQ ID NO: 2273564 - DNA, 25 bp, Homo sapien
aggcctctggttggtaccaagccca

SEQ ID NO: 2273565 - DNA, 25 bp, Homo sapien
caagcccaggggcaaatggaacctg

SEQ ID NO: 2273566 - DNA, 25 bp, Homo sapien
gcaaatggaacctgagtccagtcca

SEQ ID NO: 2273567 - DNA, 25 bp, Homo sapien
tttgggccagatcccgatactggat

SEQ ID NO: 2273568 - DNA, 25 bp, Homo sapien
agatcccgatactggattttgtttc

SEQ ID NO: 2273569 - DNA, 25 bp, Homo sapien
tcccgatactggattttgtttcttc

SEQ ID NO: 2273570 - DNA, 25 bp, Homo sapien
gggccagatcccgatactggatttt

SEQ ID NO: 2273571 - DNA, 25 bp, Homo sapien
gcgcaccagcttgtccccagcttgt

SEQ ID NO: 2273572 - DNA, 25 bp, Homo sapien
ctgggtcaatttgggcattccattt

SEQ ID NO: 2273573 - DNA, 25 bp, Homo sapien
cctctgggtcaatttgggcattcca

SEQ ID NO: 2273574 - DNA, 25 bp, Homo sapien
attttctctgacaaatgcgcaccag

SEQ ID NO: 2273575 - DNA, 25 bp, Homo sapien
ggaatttctatggacgttgggtgaa

SEQ ID NO: 2273576 - DNA, 25 bp, Homo sapien
ctactcgactgttggctttgtcatc

SEQ ID NO: 2273577 - DNA, 25 bp, Homo sapien
tactactcgactgttggctttgtca

SEQ ID NO: 2273578 - DNA, 25 bp, Homo sapien
ctttgttctttctactactcgactg

SEQ ID NO: 2273579 - DNA, 25 bp, Homo sapien
tagaatgcgtccataaacatctccc

SEQ ID NO: 2273580 - DNA, 25 bp, Homo sapien
gccagagatgtgtagaatgcgtcca

SEQ ID NO: 2273581 - DNA, 25 bp, Homo sapien
aaggatgccagagatgtgtagaatg

SEQ ID NO: 2273582 - DNA, 25 bp, Homo sapien
tccagcgtggttcgggcttcatgga

SEQ ID NO: 2273583 - DNA, 25 bp, Homo sapien
tcacaccgcaatgtgagtggactgt

SEQ ID NO: 2273584 - DNA, 25 bp, Homo sapien
agggagagccagccttcacggccac

SEQ ID NO: 2273585 - DNA, 25 bp, Homo sapien
ggccaccacatcacaccgcaatgtg

SEQ ID NO: 2273586 - DNA, 25 bp, Homo sapien
ccaaaccaccaaagggagagccagc

SEQ ID NO: 2273587 - DNA, 25 bp, Homo sapien
gattgtgtattcagttacagcagcc

SEQ ID NO: 2273588 - DNA, 25 bp, Homo sapien
gctgtaatgaacagctacctcccac

SEQ ID NO: 2273589 - DNA, 25 bp, Homo sapien
tctcttcctttgatagctgtaatga

SEQ ID NO: 2273590 - DNA, 25 bp, Homo sapien
gcttcctggcatagggtaggatttg

SEQ ID NO: 2273591 - DNA, 25 bp, Homo sapien
gcagcttagtctccgactgagccag

SEQ ID NO: 2273592 - DNA, 25 bp, Homo sapien
gatgagaactcacctcgcagcttag

SEQ ID NO: 2273593 - DNA, 25 bp, Homo sapien
gccagagtgttacatatgcttgacc

SEQ ID NO: 2273594 - DNA, 25 bp, Homo sapien
tgacctgaactgaatgtagtctggc

SEQ ID NO: 2273595 - DNA, 25 bp, Homo sapien
agccagtcaggagacctaccgtaca

SEQ ID NO: 2273596 - DNA, 25 bp, Homo sapien
gcatgggtcagtccctcggtggcca

SEQ ID NO: 2273597 - DNA, 25 bp, Homo sapien
tgatgagaaggcaagagctggtagt

SEQ ID NO: 2273598 - DNA, 25 bp, Homo sapien
ctgctgtcgttccacagccagtcag

SEQ ID NO: 2273599 - DNA, 25 bp, Homo sapien
aaactggtaccgtccctgaatggct

SEQ ID NO: 2273600 - DNA, 25 bp, Homo sapien
gccattacttgacacgtggaagatg

SEQ ID NO: 2273601 - DNA, 25 bp, Homo sapien
attcttccgggtaaccaggatcctg

SEQ ID NO: 2273602 - DNA, 25 bp, Homo sapien
aatgtctctcatgcacatcagctga

SEQ ID NO: 2273603 - DNA, 25 bp, Homo sapien
tcccagaattaggtcgtagccagtg

SEQ ID NO: 2273604 - DNA, 25 bp, Homo sapien
agggccttgcggaagtggggcacag

SEQ ID NO: 2273605 - DNA, 25 bp, Homo sapien
ccagtgcaaagcagggccttgcgga

SEQ ID NO: 2273606 - DNA, 25 bp, Homo sapien
tttaaggatgttgtttgagggatag

SEQ ID NO: 2273607 - DNA, 25 bp, Homo sapien
actttaaggatgttgtttgagggat

SEQ ID NO: 2273608 - DNA, 25 bp, Homo sapien
gatgttgtttgagggataggaaaag

SEQ ID NO: 2273609 - DNA, 25 bp, Homo sapien
tgtttgagggataggaaaagttgcc

SEQ ID NO: 2273610 - DNA, 25 bp, Homo sapien
gcagcaagcgagcagggacagattt

SEQ ID NO: 2273611 - DNA, 25 bp, Homo sapien
gctctcttgcatgcgtgaatgtgca

SEQ ID NO: 2273612 - DNA, 25 bp, Homo sapien
gctccaggttgtagctgaccttggc

SEQ ID NO: 2273613 - DNA, 25 bp, Homo sapien
cgctgaaaggcttaatgctctcttg

SEQ ID NO: 2273614 - DNA, 25 bp, Homo sapien
tggtggcgtgctggagggtgatgct

SEQ ID NO: 2273615 - DNA, 25 bp, Homo sapien
gctgagatggattcggaggctccat

SEQ ID NO: 2273616 - DNA, 25 bp, Homo sapien
tccatccaagggcaataggcaggaa

SEQ ID NO: 2273617 - DNA, 25 bp, Homo sapien
gggcaataggcaggaatcctgtgct

SEQ ID NO: 2273618 - DNA, 25 bp, Homo sapien
cccaggcccggttgactacgtggag

SEQ ID NO: 2273619 - DNA, 25 bp, Homo sapien
aacctgagatggtcacggccgtgtg

SEQ ID NO: 2273620 - DNA, 25 bp, Homo sapien
atgtgcgtatgagcctgggaagacc

SEQ ID NO: 2273621 - DNA, 25 bp, Homo sapien
ttcctgtgaggaacctgagatggtc

SEQ ID NO: 2273622 - DNA, 25 bp, Homo sapien
gatcttcctacgtgaccttggcatg

SEQ ID NO: 2273623 - DNA, 25 bp, Homo sapien
tggaagagacttggtgcatggatct

SEQ ID NO: 2273624 - DNA, 25 bp, Homo sapien
gagttttatggaagagacttggtgc

SEQ ID NO: 2273625 - DNA, 25 bp, Homo sapien
tggtgcatggatcttcctacgtgac

SEQ ID NO: 2273626 - DNA, 25 bp, Homo sapien
catgcctttttaggaaagcaggctc

SEQ ID NO: 2273627 - DNA, 25 bp, Homo sapien
aagtagatgctgttaacttccagca

SEQ ID NO: 2273628 - DNA, 25 bp, Homo sapien
tgtgtcctttgcacgcaagtagatg

SEQ ID NO: 2273629 - DNA, 25 bp, Homo sapien
taacttccagcaagtcatgcctttt

SEQ ID NO: 2273630 - DNA, 25 bp, Homo sapien
ctgatttacattgttggccaacacc

SEQ ID NO: 2273631 - DNA, 25 bp, Homo sapien
catgccgactctcagtgctatcatt

SEQ ID NO: 2273632 - DNA, 25 bp, Homo sapien
cagaattccatatttgttgccttct

SEQ ID NO: 2273633 - DNA, 25 bp, Homo sapien
gctatcattatagtcagcaacacca

SEQ ID NO: 2273634 - DNA, 25 bp, Homo sapien
gagaagcaacacattgtccctgtcc

SEQ ID NO: 2273635 - DNA, 25 bp, Homo sapien
tgtccctgtccgtgttcttcatttt

SEQ ID NO: 2273636 - DNA, 25 bp, Homo sapien
acattgtccctgtccgtgttcttca

SEQ ID NO: 2273637 - DNA, 25 bp, Homo sapien
gtttgctccatgagaagcaacacat

SEQ ID NO: 2273638 - DNA, 25 bp, Homo sapien
tgacaggcctgggacttcctacaga

SEQ ID NO: 2273639 - DNA, 25 bp, Homo sapien
tacagaaatatctgtgccctggttc

SEQ ID NO: 2273640 - DNA, 25 bp, Homo sapien
ctgggacttcctacagaaatatctg

SEQ ID NO: 2273641 - DNA, 25 bp, Homo sapien
caggcctgggacttcctacagaaat

SEQ ID NO: 2273642 - DNA, 25 bp, Homo sapien
accagtggacatcatgagttaaaag

SEQ ID NO: 2273643 - DNA, 25 bp, Homo sapien
ggtctgggaaaccagtggacatcat

SEQ ID NO: 2273644 - DNA, 25 bp, Homo sapien
tgggaaaccagtggacatcatgagt

SEQ ID NO: 2273645 - DNA, 25 bp, Homo sapien
gaaaccagtggacatcatgagttaa

SEQ ID NO: 2273646 - DNA, 25 bp, Homo sapien
gtcttgctgctggtcttagtgggtc

SEQ ID NO: 2273647 - DNA, 25 bp, Homo sapien
tcatgtccataggaccctgggttgt

SEQ ID NO: 2273648 - DNA, 25 bp, Homo sapien
cctctgctgattattggccaccttc

SEQ ID NO: 2273649 - DNA, 25 bp, Homo sapien
gcttggtgggcatttggctctgtct

SEQ ID NO: 2273650 - DNA, 25 bp, Homo sapien
cgctcacaacggcatgtgcaaatct

SEQ ID NO: 2273651 - DNA, 25 bp, Homo sapien
ttccatgccgctcacaacggcatgt

SEQ ID NO: 2273652 - DNA, 25 bp, Homo sapien
tcacaacggcatgtgcaaatctcat

SEQ ID NO: 2273653 - DNA, 25 bp, Homo sapien
tgccgctcacaacggcatgtgcaaa

SEQ ID NO: 2273654 - DNA, 25 bp, Homo sapien
tcaaattattctggccagaagacac

SEQ ID NO: 2273655 - DNA, 25 bp, Homo sapien
gacacgatccagactgggctttcgc

SEQ ID NO: 2273656 - DNA, 25 bp, Homo sapien
ctggaaactcaattgcacaaacccc

SEQ ID NO: 2273657 - DNA, 25 bp, Homo sapien
tgatattcacaagcactctatgagg

SEQ ID NO: 2273658 - DNA, 25 bp, Homo sapien
tccagacctgcggtctcaggcagga

SEQ ID NO: 2273659 - DNA, 25 bp, Homo sapien
aggactggttccatgtggtgtgcat

SEQ ID NO: 2273660 - DNA, 25 bp, Homo sapien
gctgtttgcagagccgcccagtttg

SEQ ID NO: 2273661 - DNA, 25 bp, Homo sapien
tgtaaactccctaggtcccttctca

SEQ ID NO: 2273662 - DNA, 25 bp, Homo sapien
ccctccagggtctatgtttctgatt

SEQ ID NO: 2273663 - DNA, 25 bp, Homo sapien
tcccctccagggtctatgtttctga

SEQ ID NO: 2273664 - DNA, 25 bp, Homo sapien
cttcccctccagggtctatgtttct

SEQ ID NO: 2273665 - DNA, 25 bp, Homo sapien
gtctatgtttctgattattccccac

SEQ ID NO: 2273666 - DNA, 25 bp, Homo sapien
gctagtttctggactgcttctctga

SEQ ID NO: 2273667 - DNA, 25 bp, Homo sapien
catcctagagctagtttctggactg

SEQ ID NO: 2273668 - DNA, 25 bp, Homo sapien
gagctagtttctggactgcttctct

SEQ ID NO: 2273669 - DNA, 25 bp, Homo sapien
ctagagctagtttctggactgcttc

SEQ ID NO: 2273670 - DNA, 25 bp, Homo sapien
tgtcatctgcacagcaacccatggg

SEQ ID NO: 2273671 - DNA, 25 bp, Homo sapien
ccaaattcctccagcgaggcaggga

SEQ ID NO: 2273672 - DNA, 25 bp, Homo sapien
ttcctctagcctgctggatgggccc

SEQ ID NO: 2273673 - DNA, 25 bp, Homo sapien
ttggatgctatttgcccacagagtc

SEQ ID NO: 2273674 - DNA, 25 bp, Homo sapien
tgccagaaggcacagcaagtcgcat

SEQ ID NO: 2273675 - DNA, 25 bp, Homo sapien
gagctttgcagacatgtgtgaggtt

SEQ ID NO: 2273676 - DNA, 25 bp, Homo sapien
gtttctgattgggaagcggatgcca

SEQ ID NO: 2273677 - DNA, 25 bp, Homo sapien
cacagcaagtcgcatgaggcacggg

SEQ ID NO: 2273678 - DNA, 25 bp, Homo sapien
tggctccttagctctgaccctgctt

SEQ ID NO: 2273679 - DNA, 25 bp, Homo sapien
ttgtttatgtggaatcagcttcacg

SEQ ID NO: 2273680 - DNA, 25 bp, Homo sapien
tgcctgcggcttcatctgctgatta

SEQ ID NO: 2273681 - DNA, 25 bp, Homo sapien
gaatcagcttcacgtggctccttag

SEQ ID NO: 2273682 - DNA, 25 bp, Homo sapien
ggtagatgcacatgtactcctccct

SEQ ID NO: 2273683 - DNA, 25 bp, Homo sapien
ggcagcagctatactgatgatgagt

SEQ ID NO: 2273684 - DNA, 25 bp, Homo sapien
tgagtttttccattcccccagccag

SEQ ID NO: 2273685 - DNA, 25 bp, Homo sapien
ctgatgcatttcacagagacttggc

SEQ ID NO: 2273686 - DNA, 25 bp, Homo sapien
aagtttccatgtgccagtaggatca

SEQ ID NO: 2273687 - DNA, 25 bp, Homo sapien
gccaggaagtttccatgtgccagta

SEQ ID NO: 2273688 - DNA, 25 bp, Homo sapien
ggaagtttccatgtgccagtaggat

SEQ ID NO: 2273689 - DNA, 25 bp, Homo sapien
caggaagtttccatgtgccagtagg

SEQ ID NO: 2273690 - DNA, 25 bp, Homo sapien
tggtgcagaaagtgccggctgtcct

SEQ ID NO: 2273691 - DNA, 25 bp, Homo sapien
ggtgcagaaagtgccggctgtcctg

SEQ ID NO: 2273692 - DNA, 25 bp, Homo sapien
caccaattgcggacacagaatcaac

SEQ ID NO: 2273693 - DNA, 25 bp, Homo sapien
aacttagtggttaagcactcatgct

SEQ ID NO: 2273694 - DNA, 25 bp, Homo sapien
tgtgagcagacaaacctgaattcaa

SEQ ID NO: 2273695 - DNA, 25 bp, Homo sapien
tgtcccggaacaatgtaacttagtg

SEQ ID NO: 2273696 - DNA, 25 bp, Homo sapien
tcattgagcgaagctctatgatcag

SEQ ID NO: 2273697 - DNA, 25 bp, Homo sapien
cgaagctctatgatcagtaggaagt

SEQ ID NO: 2273698 - DNA, 25 bp, Homo sapien
tcttggacggggtgcttcattgagc

SEQ ID NO: 2273699 - DNA, 25 bp, Homo sapien
gggtgcttcattgagcgaagctcta

SEQ ID NO: 2273700 - DNA, 25 bp, Homo sapien
tcacttctgggcagtgctggttttc

SEQ ID NO: 2273701 - DNA, 25 bp, Homo sapien
gggcagtgctggttttcccaagatg

SEQ ID NO: 2273702 - DNA, 25 bp, Homo sapien
ttctgggcagtgctggttttcccaa

SEQ ID NO: 2273703 - DNA, 25 bp, Homo sapien
agtgctggttttcccaagatgcagg

SEQ ID NO: 2273704 - DNA, 25 bp, Homo sapien
ctatatgagctgtgacttgtaaaat

SEQ ID NO: 2273705 - DNA, 25 bp, Homo sapien
ttgtaaaatatgggaaaggcaaaca

SEQ ID NO: 2273706 - DNA, 25 bp, Homo sapien
agctgtgacttgtaaaatatgggaa

SEQ ID NO: 2273707 - DNA, 25 bp, Homo sapien
tatgagctgtgacttgtaaaatatg

SEQ ID NO: 2273708 - DNA, 25 bp, Homo sapien
cattatcttcaatggtactgttttc

SEQ ID NO: 2273709 - DNA, 25 bp, Homo sapien
ttcctatgaagcacccattatcttc

SEQ ID NO: 2273710 - DNA, 25 bp, Homo sapien
attatcttcaatggtactgttttca

SEQ ID NO: 2273711 - DNA, 25 bp, Homo sapien
gaatccgagggacctttgcatccct

SEQ ID NO: 2273712 - DNA, 25 bp, Homo sapien
tggaatccgagggacctttgcatcc

SEQ ID NO: 2273713 - DNA, 25 bp, Homo sapien
tatctggaatccgagggacctttgc

SEQ ID NO: 2273714 - DNA, 25 bp, Homo sapien
tctggaatccgagggacctttgcat

SEQ ID NO: 2273715 - DNA, 25 bp, Homo sapien
gagctagaagatgaagctgggcata

SEQ ID NO: 2273716 - DNA, 25 bp, Homo sapien
ctagaagatgaagctgggcatagtg

SEQ ID NO: 2273717 - DNA, 25 bp, Homo sapien
ccagagctagaagatgaagctgggc

SEQ ID NO: 2273718 - DNA, 25 bp, Homo sapien
gagccagagctagaagatgaagctg

SEQ ID NO: 2273719 - DNA, 25 bp, Homo sapien
aatctcccatcctaattattcccag

SEQ ID NO: 2273720 - DNA, 25 bp, Homo sapien
ctttacagaccagcatgagacttca

SEQ ID NO: 2273721 - DNA, 25 bp, Homo sapien
ctgtaagttggatgtaatctcccat

SEQ ID NO: 2273722 - DNA, 25 bp, Homo sapien
tgagacttcaacactgcgcaattgt

SEQ ID NO: 2273723 - DNA, 25 bp, Homo sapien
tcattcaatagcagtattgcctttg

SEQ ID NO: 2273724 - DNA, 25 bp, Homo sapien
agcagtattgcctttggttctccca

SEQ ID NO: 2273725 - DNA, 25 bp, Homo sapien
caatagcagtattgcctttggttct

SEQ ID NO: 2273726 - DNA, 25 bp, Homo sapien
acagcaatctgcagcccgctcagag

SEQ ID NO: 2273727 - DNA, 25 bp, Homo sapien
tagggtgcttatatctgatgactcc

SEQ ID NO: 2273728 - DNA, 25 bp, Homo sapien
gaatggttatatctgggcttgacag

SEQ ID NO: 2273729 - DNA, 25 bp, Homo sapien
tgctacccctggacagcttcttagg

SEQ ID NO: 2273730 - DNA, 25 bp, Homo sapien
ttcagccttaagtgtcctccttcac

SEQ ID NO: 2273731 - DNA, 25 bp, Homo sapien
tatttttcagatccattcacgttct

SEQ ID NO: 2273732 - DNA, 25 bp, Homo sapien
tcagagttgtcaggtctcctaagac

SEQ ID NO: 2273733 - DNA, 25 bp, Homo sapien
tagaaggtactgttttatagcccat

SEQ ID NO: 2273734 - DNA, 25 bp, Homo sapien
gtttctcagaactgtatgcattctt

SEQ ID NO: 2273735 - DNA, 25 bp, Homo sapien
agtcactttcttaccagtcttcctt

SEQ ID NO: 2273736 - DNA, 25 bp, Homo sapien
cttctttccttattagtcactttct

SEQ ID NO: 2273737 - DNA, 25 bp, Homo sapien
cttctttcctcactcgtctaccttc

SEQ ID NO: 2273738 - DNA, 25 bp, Homo sapien
cttccttactagtctatcttctttc

SEQ ID NO: 2273739 - DNA, 25 bp, Homo sapien
agtcactttcttaccagtcttcctt

SEQ ID NO: 2273740 - DNA, 25 bp, Homo sapien
cttctttccttattagtcactttct

SEQ ID NO: 2273741 - DNA, 25 bp, Homo sapien
tctttccttattagtcactttctta

SEQ ID NO: 2273742 - DNA, 25 bp, Homo sapien
tgtcttctttccttactcgtctgcc

SEQ ID NO: 2273743 - DNA, 25 bp, Homo sapien
gtcttctttccttactcgtctgcct

SEQ ID NO: 2273744 - DNA, 25 bp, Homo sapien
gtgaggaggctagcagtcattgctc

SEQ ID NO: 2273745 - DNA, 25 bp, Homo sapien
tagctggccccttgtggggactccg

SEQ ID NO: 2273746 - DNA, 25 bp, Homo sapien
aggaggctagcagtcattgctctca

SEQ ID NO: 2273747 - DNA, 25 bp, Homo sapien
actccgcaggcagaaaatgagggtg

SEQ ID NO: 2273748 - DNA, 25 bp, Homo sapien
tcagttccctacatcgttacctcca

SEQ ID NO: 2273749 - DNA, 25 bp, Homo sapien
catcgttacctccaaaagcttttag

SEQ ID NO: 2273750 - DNA, 25 bp, Homo sapien
tccctacatcgttacctccaaaagc

SEQ ID NO: 2273751 - DNA, 25 bp, Homo sapien
ctacatcgttacctccaaaagcttt

SEQ ID NO: 2273752 - DNA, 25 bp, Homo sapien
caagttctagtccagtttccaggtg

SEQ ID NO: 2273753 - DNA, 25 bp, Homo sapien
ctcaagttctagtccagtttccagg

SEQ ID NO: 2273754 - DNA, 25 bp, Homo sapien
tctagtccagtttccaggtgtgcca

SEQ ID NO: 2273755 - DNA, 25 bp, Homo sapien
agtttccaggtgtgccatctcttca

SEQ ID NO: 2273756 - DNA, 25 bp, Homo sapien
gagataatccgactgaatttttaca

SEQ ID NO: 2273757 - DNA, 25 bp, Homo sapien
ctgaatttttacactcgaagcaggt

SEQ ID NO: 2273758 - DNA, 25 bp, Homo sapien
ttttacactcgaagcaggttgtggg

SEQ ID NO: 2273759 - DNA, 25 bp, Homo sapien
gacagttcatgagataatccgactg

SEQ ID NO: 2273760 - DNA, 25 bp, Homo sapien
gccagcaaagccatgtactccattg

SEQ ID NO: 2273761 - DNA, 25 bp, Homo sapien
tgcagggcaaatgtgccagcaaagc

SEQ ID NO: 2273762 - DNA, 25 bp, Homo sapien
tcaacgatgtgcaggaccagtgctc

SEQ ID NO: 2273763 - DNA, 25 bp, Homo sapien
gccatgtactccattgacatcaacg

SEQ ID NO: 2273764 - DNA, 25 bp, Homo sapien
gggtgtgggtatgatattattacca

SEQ ID NO: 2273765 - DNA, 25 bp, Homo sapien
tcctttacaaattgcctagctgtcc

SEQ ID NO: 2273766 - DNA, 25 bp, Homo sapien
catgcataaaaattgcagctagagg

SEQ ID NO: 2273767 - DNA, 25 bp, Homo sapien
gacatgtcagacctatgatcttcct

SEQ ID NO: 2273768 - DNA, 25 bp, Homo sapien
cactactgccaggtaagggctctgc

SEQ ID NO: 2273769 - DNA, 25 bp, Homo sapien
gatctgaatgccactaacccctgtg

SEQ ID NO: 2273770 - DNA, 25 bp, Homo sapien
caaaggtgcctagggatcttctcgg

SEQ ID NO: 2273771 - DNA, 25 bp, Homo sapien
tgaaagggacctatttccagcccag

SEQ ID NO: 2273772 - DNA, 25 bp, Homo sapien
cacaaatctgcacatcagacagtgt

SEQ ID NO: 2273773 - DNA, 25 bp, Homo sapien
catacatgcttgtgtttgtgagcac

SEQ ID NO: 2273774 - DNA, 25 bp, Homo sapien
gcagcagctttggagacgagacaca

SEQ ID NO: 2273775 - DNA, 25 bp, Homo sapien
agctcctctttacctcgtagttatg

SEQ ID NO: 2273776 - DNA, 25 bp, Homo sapien
gattgctcatagtcctatcctggga

SEQ ID NO: 2273777 - DNA, 25 bp, Homo sapien
cagaaagatatttcgtgaccactgg

SEQ ID NO: 2273778 - DNA, 25 bp, Homo sapien
gccttttccctcataggatctttga

SEQ ID NO: 2273779 - DNA, 25 bp, Homo sapien
tagatcccatggagcaatctctttc

SEQ ID NO: 2273780 - DNA, 25 bp, Homo sapien
cacagggctgtgagttcggagctaa

SEQ ID NO: 2273781 - DNA, 25 bp, Homo sapien
aattggcccggagtgacctgaaagc

SEQ ID NO: 2273782 - DNA, 25 bp, Homo sapien
catctgggcacttaagcacagggct

SEQ ID NO: 2273783 - DNA, 25 bp, Homo sapien
ttatgaaaattccaggcacctgctg

SEQ ID NO: 2273784 - DNA, 25 bp, Homo sapien
tagtctccctgggaatgaagatcct

SEQ ID NO: 2273785 - DNA, 25 bp, Homo sapien
gatttttagtctccctgggaatgaa

SEQ ID NO: 2273786 - DNA, 25 bp, Homo sapien
ctgatttttagtctccctgggaatg

SEQ ID NO: 2273787 - DNA, 25 bp, Homo sapien
tttagtctccctgggaatgaagatc

SEQ ID NO: 2273788 - DNA, 25 bp, Homo sapien
acctataaaaccattgacataacca

SEQ ID NO: 2273789 - DNA, 25 bp, Homo sapien
gacataaccaagataatgaatttcc

SEQ ID NO: 2273790 - DNA, 25 bp, Homo sapien
ttaaatatatccctcaaccctagac

SEQ ID NO: 2273791 - DNA, 25 bp, Homo sapien
tgtcactatagattcgtttacattt

SEQ ID NO: 2273792 - DNA, 25 bp, Homo sapien
attgctaccctgacctgcttcatgc

SEQ ID NO: 2273793 - DNA, 25 bp, Homo sapien
gctttcagtattctcaagctgaagc

SEQ ID NO: 2273794 - DNA, 25 bp, Homo sapien
aaaagggagatctgcctgtcaccct

SEQ ID NO: 2273795 - DNA, 25 bp, Homo sapien
gaagaacatggaccactgcagcgct

SEQ ID NO: 2273796 - DNA, 25 bp, Homo sapien
tctagagctgaactgcccgaaaggc

SEQ ID NO: 2273797 - DNA, 25 bp, Homo sapien
tcttacccggatgaggaatgcaatg

SEQ ID NO: 2273798 - DNA, 25 bp, Homo sapien
caccatgtggtaagtgcaggcagca

SEQ ID NO: 2273799 - DNA, 25 bp, Homo sapien
tatgacggtgagatcttccagccag

SEQ ID NO: 2273800 - DNA, 25 bp, Homo sapien
cagcgcatccagagttcttcgtttc

SEQ ID NO: 2273801 - DNA, 25 bp, Homo sapien
tagctgagtctgtgtctggaattcg

SEQ ID NO: 2273802 - DNA, 25 bp, Homo sapien
ggttcgcagtcttgctgactcagca

SEQ ID NO: 2273803 - DNA, 25 bp, Homo sapien
ttcgagaataaagacgcagaccctc

SEQ ID NO: 2273804 - DNA, 25 bp, Homo sapien
gcctaggctgatcattgtttttaaa

SEQ ID NO: 2273805 - DNA, 25 bp, Homo sapien
tgcctgacctatggataattgagaa

SEQ ID NO: 2273806 - DNA, 25 bp, Homo sapien
ttgagttgctgtaactttctgcctc

SEQ ID NO: 2273807 - DNA, 25 bp, Homo sapien
tctcaaattagaaccccaggtcttg

SEQ ID NO: 2273808 - DNA, 25 bp, Homo sapien
ggagagaaatcaggtctttgttgtg

SEQ ID NO: 2273809 - DNA, 25 bp, Homo sapien
gaaatcaggtctttgttgtgtatga

SEQ ID NO: 2273810 - DNA, 25 bp, Homo sapien
acaggagagaaatcaggtctttgtt

SEQ ID NO: 2273811 - DNA, 25 bp, Homo sapien
gagaaatcaggtctttgttgtgtat

SEQ ID NO: 2273812 - DNA, 25 bp, Homo sapien
cgcattgttgcagtggatggctaca

SEQ ID NO: 2273813 - DNA, 25 bp, Homo sapien
catattccgccttcacagtaacagt

SEQ ID NO: 2273814 - DNA, 25 bp, Homo sapien
gatggctacacatgtgcatagttgg

SEQ ID NO: 2273815 - DNA, 25 bp, Homo sapien
tgttcaccctctgggtaaaagagta

SEQ ID NO: 2273816 - DNA, 25 bp, Homo sapien
gacaataccagcattatcttcaatg

SEQ ID NO: 2273817 - DNA, 25 bp, Homo sapien
cggaatgacaataccagcattatct

SEQ ID NO: 2273818 - DNA, 25 bp, Homo sapien
tcggcagttccggaatgacaatacc

SEQ ID NO: 2273819 - DNA, 25 bp, Homo sapien
cagttccggaatgacaataccagca

SEQ ID NO: 2273820 - DNA, 25 bp, Homo sapien
gaaggcatcctgcacttgtgaatgc

SEQ ID NO: 2273821 - DNA, 25 bp, Homo sapien
gagaaggcatcctgcacttgtgaat

SEQ ID NO: 2273822 - DNA, 25 bp, Homo sapien
gcatcctgcacttgtgaatgcccca

SEQ ID NO: 2273823 - DNA, 25 bp, Homo sapien
ctgcacttgtgaatgccccacacat

SEQ ID NO: 2273824 - DNA, 25 bp, Homo sapien
tctattaacagacggcttctgggag

SEQ ID NO: 2273825 - DNA, 25 bp, Homo sapien
attaggattgcacaccgcccgaggg

SEQ ID NO: 2273826 - DNA, 25 bp, Homo sapien
tgtgccctcactctttccaaagttg

SEQ ID NO: 2273827 - DNA, 25 bp, Homo sapien
caaagttgaggttccctgcttccca

SEQ ID NO: 2273828 - DNA, 25 bp, Homo sapien
agtaattagcaaatacctatcaccg

SEQ ID NO: 2273829 - DNA, 25 bp, Homo sapien
tagcaaatacctatcaccgaataat

SEQ ID NO: 2273830 - DNA, 25 bp, Homo sapien
ctatcaccgaataataacacagctg

SEQ ID NO: 2273831 - DNA, 25 bp, Homo sapien
tacctatcaccgaataataacacag

SEQ ID NO: 2273832 - DNA, 25 bp, Homo sapien
tcgtctgtctccttgcaaaccttcg

SEQ ID NO: 2273833 - DNA, 25 bp, Homo sapien
tgggagactcttccccgggtcgtca

SEQ ID NO: 2273834 - DNA, 25 bp, Homo sapien
gaccatacttttcattgggcacagc

SEQ ID NO: 2273835 - DNA, 25 bp, Homo sapien
tgcgaggatttaaagggaagccgcc

SEQ ID NO: 2273836 - DNA, 25 bp, Homo sapien
cggctgtaggctggtctccggctgc

SEQ ID NO: 2273837 - DNA, 25 bp, Homo sapien
tggatacagatgcaggcggctgtag

SEQ ID NO: 2273838 - DNA, 25 bp, Homo sapien
tggtctccggctgcacttttaaaaa

SEQ ID NO: 2273839 - DNA, 25 bp, Homo sapien
agatgcaggcggctgtaggctggtc

SEQ ID NO: 2273840 - DNA, 25 bp, Homo sapien
cttagcctgggccgaacgggtgcgg

SEQ ID NO: 2273841 - DNA, 25 bp, Homo sapien
acttagcctgggccgaacgggtgcg

SEQ ID NO: 2273842 - DNA, 25 bp, Homo sapien
gaagttaaatccgaacagcaggtat

SEQ ID NO: 2273843 - DNA, 25 bp, Homo sapien
aatccgaacagcaggtatttgatgc

SEQ ID NO: 2273844 - DNA, 25 bp, Homo sapien
agatgaagttaaatccgaacagcag

SEQ ID NO: 2273845 - DNA, 25 bp, Homo sapien
ccgaacagcaggtatttgatgcact

SEQ ID NO: 2273846 - DNA, 25 bp, Homo sapien
ggtgcctgcccggtgcgggcagtgc

SEQ ID NO: 2273847 - DNA, 25 bp, Homo sapien
agcgcgcggcagtcgcgctcactca

SEQ ID NO: 2273848 - DNA, 25 bp, Homo sapien
gaatgcgcccgtcgcggccgtcccg

SEQ ID NO: 2273849 - DNA, 25 bp, Homo sapien
ggcccgcgaacaggtgggccctgag

SEQ ID NO: 2273850 - DNA, 25 bp, Homo sapien
ggctccccacgccggctgggcggtg

SEQ ID NO: 2273851 - DNA, 25 bp, Homo sapien
tccccacgccggctgggcggtgatg

SEQ ID NO: 2273852 - DNA, 25 bp, Homo sapien
ctccccacgccggctgggcggtgat

SEQ ID NO: 2273853 - DNA, 25 bp, Homo sapien
cccacgccggctgggcggtgatgag

SEQ ID NO: 2273854 - DNA, 25 bp, Homo sapien
ttggcccaaagaggggtgctccgct

SEQ ID NO: 2273855 - DNA, 25 bp, Homo sapien
tgccttcctctctggcactcggagg

SEQ ID NO: 2273856 - DNA, 25 bp, Homo sapien
cccaaagaggggtgctccgcttctc

SEQ ID NO: 2273857 - DNA, 25 bp, Homo sapien
gagggacttgagctgggagcagaca

SEQ ID NO: 2273858 - DNA, 25 bp, Homo sapien
gactggtgctttgatcactaggcca

SEQ ID NO: 2273859 - DNA, 25 bp, Homo sapien
tatacgggcaatgaacacccctgag

SEQ ID NO: 2273860 - DNA, 25 bp, Homo sapien
catgtgtcagactggactggcccta

SEQ ID NO: 2273861 - DNA, 25 bp, Homo sapien
gagccattttatgcaacagtcccag

SEQ ID NO: 2273862 - DNA, 25 bp, Homo sapien
ttcagtgcacgtgtagccagcttca

SEQ ID NO: 2273863 - DNA, 25 bp, Homo sapien
tcaccccagcgcaggctgtctgggc

SEQ ID NO: 2273864 - DNA, 25 bp, Homo sapien
agtgcacgtgtagccagcttcaccc

SEQ ID NO: 2273865 - DNA, 25 bp, Homo sapien
gcttcagtgcacgtgtagccagctt

SEQ ID NO: 2273866 - DNA, 25 bp, Homo sapien
gggcaaaggaagcagatacctggcc

SEQ ID NO: 2273867 - DNA, 25 bp, Homo sapien
ggtgtaggggagagaccatcaaaat

SEQ ID NO: 2273868 - DNA, 25 bp, Homo sapien
taggggagagaccatcaaaatcctg

SEQ ID NO: 2273869 - DNA, 25 bp, Homo sapien
cctgggcaaaggaagcagatacctg

SEQ ID NO: 2273870 - DNA, 25 bp, Homo sapien
caccatcaaaagattgggtctttgt

SEQ ID NO: 2273871 - DNA, 25 bp, Homo sapien
ccatcaaaagattgggtctttgttg

SEQ ID NO: 2273872 - DNA, 25 bp, Homo sapien
accatcaaaagattgggtctttgtt

SEQ ID NO: 2273873 - DNA, 25 bp, Homo sapien
catcaaaagattgggtctttgttgt

SEQ ID NO: 2273874 - DNA, 25 bp, Homo sapien
gaaaaggcgcctttgtcaatccaag

SEQ ID NO: 2273875 - DNA, 25 bp, Homo sapien
tgtgagcgtgtgcagaggaatcctc

SEQ ID NO: 2273876 - DNA, 25 bp, Homo sapien
tatcaaagcactcccaaattcgggc

SEQ ID NO: 2273877 - DNA, 25 bp, Homo sapien
gaacatgctgccagtaggaccacag

SEQ ID NO: 2273878 - DNA, 25 bp, Homo sapien
gattttcagactcttaacaaggaag

SEQ ID NO: 2273879 - DNA, 25 bp, Homo sapien
tggatccaaataaagtcccgctgac

SEQ ID NO: 2273880 - DNA, 25 bp, Homo sapien
ggaagtcgttgctcttctgtgtgta

SEQ ID NO: 2273881 - DNA, 25 bp, Homo sapien
tggggtaaagcctgtttctgcaagg

SEQ ID NO: 2273882 - DNA, 25 bp, Homo sapien
gaaatgtataaagactagcccccgc

SEQ ID NO: 2273883 - DNA, 25 bp, Homo sapien
ctgctctctgaggccatgggtctga

SEQ ID NO: 2273884 - DNA, 25 bp, Homo sapien
aggccatgggtctgacaggctctca

SEQ ID NO: 2273885 - DNA, 25 bp, Homo sapien
ctctgaggccatgggtctgacaggc

SEQ ID NO: 2273886 - DNA, 25 bp, Homo sapien
attgaagaggaagggctcttaagac

SEQ ID NO: 2273887 - DNA, 25 bp, Homo sapien
tgaagggttacttttctagcagagc

SEQ ID NO: 2273888 - DNA, 25 bp, Homo sapien
gagccactatttcttccctcaggca

SEQ ID NO: 2273889 - DNA, 25 bp, Homo sapien
acaatgcctggcttaaggattgaag

SEQ ID NO: 2273890 - DNA, 25 bp, Homo sapien
cctcctcatcctagaagataatcta

SEQ ID NO: 2273891 - DNA, 25 bp, Homo sapien
gtgccagcctcccatgacaaagaag

SEQ ID NO: 2273892 - DNA, 25 bp, Homo sapien
gggcacgagctctcaagacacaccc

SEQ ID NO: 2273893 - DNA, 25 bp, Homo sapien
agaaccaccctgccagcaaagggca

SEQ ID NO: 2273894 - DNA, 25 bp, Homo sapien
tcaagttggaacctgcgtttggctc

SEQ ID NO: 2273895 - DNA, 25 bp, Homo sapien
aaaggagagagaacggctggacaac

SEQ ID NO: 2273896 - DNA, 25 bp, Homo sapien
ggccagctcgctgttatgcatgaga

SEQ ID NO: 2273897 - DNA, 25 bp, Homo sapien
ggacaactctgtgctgaacccactg

SEQ ID NO: 2273898 - DNA, 25 bp, Homo sapien
gggaggttcgtatgtacagcctggc

SEQ ID NO: 2273899 - DNA, 25 bp, Homo sapien
gaacctggggaggttcgtatgtaca

SEQ ID NO: 2273900 - DNA, 25 bp, Homo sapien
cctggggaggttcgtatgtacagcc

SEQ ID NO: 2273901 - DNA, 25 bp, Homo sapien
aggttcgtatgtacagcctggcctc

SEQ ID NO: 2273902 - DNA, 25 bp, Homo sapien
tgaatgactacttcagtgaaaaagt

SEQ ID NO: 2273903 - DNA, 25 bp, Homo sapien
gggacctctgagtcattcttttatc

SEQ ID NO: 2273904 - DNA, 25 bp, Homo sapien
catccatgctttggacggatggtca

SEQ ID NO: 2273905 - DNA, 25 bp, Homo sapien
taagtaattactccataaatgaatg

SEQ ID NO: 2273906 - DNA, 25 bp, Homo sapien
tagtgaaatccgactaagtccagag

SEQ ID NO: 2273907 - DNA, 25 bp, Homo sapien
tcactggtgctaggccctgagaaaa

SEQ ID NO: 2273908 - DNA, 25 bp, Homo sapien
tgctgaatgagacagtgccctgttc

SEQ ID NO: 2273909 - DNA, 25 bp, Homo sapien
gcaacctgtagtatgcccagctggt

SEQ ID NO: 2273910 - DNA, 25 bp, Homo sapien
ttaccagcatgaagccccaccagcc

SEQ ID NO: 2273911 - DNA, 25 bp, Homo sapien
tttaccagcatgaagccccaccagc

SEQ ID NO: 2273912 - DNA, 25 bp, Homo sapien
ccgggggagtgactcacaggcctcc

SEQ ID NO: 2273913 - DNA, 25 bp, Homo sapien
tataggcaacagaacactatacagc

SEQ ID NO: 2273914 - DNA, 25 bp, Homo sapien
ccatgtagttaaaaacgctatgctg

SEQ ID NO: 2273915 - DNA, 25 bp, Homo sapien
gagtaactctagctacacgcaacac

SEQ ID NO: 2273916 - DNA, 25 bp, Homo sapien
cacgcaacaccatgagtgcatctca

SEQ ID NO: 2273917 - DNA, 25 bp, Homo sapien
acacagtccccacgcgcttaagggt

SEQ ID NO: 2273918 - DNA, 25 bp, Homo sapien
agggtgagacttgcaaaggactttg

SEQ ID NO: 2273919 - DNA, 25 bp, Homo sapien
cttaagggtgagacttgcaaaggac

SEQ ID NO: 2273920 - DNA, 25 bp, Homo sapien
ccacgcgcttaagggtgagacttgc

SEQ ID NO: 2273921 - DNA, 25 bp, Homo sapien
ctgcaagacatacaggacatcagca

SEQ ID NO: 2273922 - DNA, 25 bp, Homo sapien
caagacatacaggacatcagcatta

SEQ ID NO: 2273923 - DNA, 25 bp, Homo sapien
tacaggacatcagcattaattctgg

SEQ ID NO: 2273924 - DNA, 25 bp, Homo sapien
gacatacaggacatcagcattaatt

SEQ ID NO: 2273925 - DNA, 25 bp, Homo sapien
cttggtctgagagtcgaatcggagc

SEQ ID NO: 2273926 - DNA, 25 bp, Homo sapien
atggcaaggacagcaatcccggcaa

SEQ ID NO: 2273927 - DNA, 25 bp, Homo sapien
tcgaatcggagccatagtccaatgg

SEQ ID NO: 2273928 - DNA, 25 bp, Homo sapien
tattagtttcttgctcgaagatgct

SEQ ID NO: 2273929 - DNA, 25 bp, Homo sapien
tccaggacagagaatatccacggga

SEQ ID NO: 2273930 - DNA, 25 bp, Homo sapien
cgggaatccctacattcggaatgca

SEQ ID NO: 2273931 - DNA, 25 bp, Homo sapien
tggaaggtgcccattagccctcaat

SEQ ID NO: 2273932 - DNA, 25 bp, Homo sapien
gcaagatgaatccactcaagctagt

SEQ ID NO: 2273933 - DNA, 25 bp, Homo sapien
gcgccggctccgatcagaatataga

SEQ ID NO: 2273934 - DNA, 25 bp, Homo sapien
agggcgccggctccgatcagaatat

SEQ ID NO: 2273935 - DNA, 25 bp, Homo sapien
tgagggcgccggctccgatcagaat

SEQ ID NO: 2273936 - DNA, 25 bp, Homo sapien
gcccaccagcatcatgagggcgccg

SEQ ID NO: 2273937 - DNA, 25 bp, Homo sapien
agcaaacgtggtcctcgagaaaagg

SEQ ID NO: 2273938 - DNA, 25 bp, Homo sapien
aagcaaacgtggtcctcgagaaaag

SEQ ID NO: 2273939 - DNA, 25 bp, Homo sapien
tcatccttgtgggaatatccccaga

SEQ ID NO: 2273940 - DNA, 25 bp, Homo sapien
tgggaatatccccagatggccgcag

SEQ ID NO: 2273941 - DNA, 25 bp, Homo sapien
agctatttcaatggcgaatatcacc

SEQ ID NO: 2273942 - DNA, 25 bp, Homo sapien
cccagatggccgcagctatttcaat

SEQ ID NO: 2273943 - DNA, 25 bp, Homo sapien
aaaaacactactctgatatggccca

SEQ ID NO: 2273944 - DNA, 25 bp, Homo sapien
tgctgaacatgacaaggcagccctt

SEQ ID NO: 2273945 - DNA, 25 bp, Homo sapien
aaaacaatagggttcctgcctccag

SEQ ID NO: 2273946 - DNA, 25 bp, Homo sapien
tcacgtcagttacagatggaagtcc

SEQ ID NO: 2273947 - DNA, 25 bp, Homo sapien
gcttgttgtaggtgtccttgtaaaa

SEQ ID NO: 2273948 - DNA, 25 bp, Homo sapien
cccgctggggctcatccttggtttt

SEQ ID NO: 2273949 - DNA, 25 bp, Homo sapien
agcttgttgtaggtgtccttgtaaa

SEQ ID NO: 2273950 - DNA, 25 bp, Homo sapien
cgtttcccgctggggctcatccttg

SEQ ID NO: 2273951 - DNA, 25 bp, Homo sapien
aagcgcaggagggtgtctttgccaa

SEQ ID NO: 2273952 - DNA, 25 bp, Homo sapien
cttcacggtgaaggtttcgagtacg

SEQ ID NO: 2273953 - DNA, 25 bp, Homo sapien
tcgagtacgtccttcttggggcaga

SEQ ID NO: 2273954 - DNA, 25 bp, Homo sapien
gataaactgttccacgcccccagcc

SEQ ID NO: 2273955 - DNA, 25 bp, Homo sapien
cttggggcagatgtctgagataaac

SEQ ID NO: 2273956 - DNA, 25 bp, Homo sapien
caccaggatcctggtctgagtttac

SEQ ID NO: 2273957 - DNA, 25 bp, Homo sapien
tcactttcatgcttgcagggtttgt

SEQ ID NO: 2273958 - DNA, 25 bp, Homo sapien
ttgcagggtttgtccagagcaatgg

SEQ ID NO: 2273959 - DNA, 25 bp, Homo sapien
tttgtccagagcaatgggggcaggg

SEQ ID NO: 2273960 - DNA, 25 bp, Homo sapien
cagaacgggtcttgctgaagcagca

SEQ ID NO: 2273961 - DNA, 25 bp, Homo sapien
taaacagagggcccaaagtgggaga

SEQ ID NO: 2273962 - DNA, 25 bp, Homo sapien
ccctttcacaggcagaacgggtctt

SEQ ID NO: 2273963 - DNA, 25 bp, Homo sapien
tcacaggcagaacgggtcttgctga

SEQ ID NO: 2273964 - DNA, 25 bp, Homo sapien
actgacaaagtcagagtgggagtcc

SEQ ID NO: 2273965 - DNA, 25 bp, Homo sapien
gatggctatgctagtggatccctaa

SEQ ID NO: 2273966 - DNA, 25 bp, Homo sapien
tctcacccgggagaactggtgggca

SEQ ID NO: 2273967 - DNA, 25 bp, Homo sapien
gaacacttgtcattcccctggtccg

SEQ ID NO: 2273968 - DNA, 25 bp, Homo sapien
tgtggaatttattgtcgaagacctc

SEQ ID NO: 2273969 - DNA, 25 bp, Homo sapien
ccgatgcccactgcgccgatgatgt

SEQ ID NO: 2273970 - DNA, 25 bp, Homo sapien
ttgtcgaagacctctttgatggcat

SEQ ID NO: 2273971 - DNA, 25 bp, Homo sapien
atgaccacggcaatgccgatgccca

SEQ ID NO: 2273972 - DNA, 25 bp, Homo sapien
ggcagtcagctgcacaagcattttc

SEQ ID NO: 2273973 - DNA, 25 bp, Homo sapien
gagatgcaggccagataatgagaag

SEQ ID NO: 2273974 - DNA, 25 bp, Homo sapien
caaacgagtcagaaggtgctgaagc

SEQ ID NO: 2273975 - DNA, 25 bp, Homo sapien
tggcatccaggaggccaaacgagtc

SEQ ID NO: 2273976 - DNA, 25 bp, Homo sapien
gagataggaagaaacatgaggatca

SEQ ID NO: 2273977 - DNA, 25 bp, Homo sapien
cagggtggtttgatctgaaggaagg

SEQ ID NO: 2273978 - DNA, 25 bp, Homo sapien
aacatgaggatcagggtggtttgat

SEQ ID NO: 2273979 - DNA, 25 bp, Homo sapien
ctaggagataggaagaaacatgagg

SEQ ID NO: 2273980 - DNA, 25 bp, Homo sapien
ctgcggatagcacagcacaagatca

SEQ ID NO: 2273981 - DNA, 25 bp, Homo sapien
gatagcacagcacaagatcatactg

SEQ ID NO: 2273982 - DNA, 25 bp, Homo sapien
gcggatagcacagcacaagatcata

SEQ ID NO: 2273983 - DNA, 25 bp, Homo sapien
ggatagcacagcacaagatcatact

SEQ ID NO: 2273984 - DNA, 25 bp, Homo sapien
tcttcatgggtaaactttcctgctc

SEQ ID NO: 2273985 - DNA, 25 bp, Homo sapien
caatcttcatgggtaaactttcctg

SEQ ID NO: 2273986 - DNA, 25 bp, Homo sapien
ttcatgggtaaactttcctgctcag

SEQ ID NO: 2273987 - DNA, 25 bp, Homo sapien
catgggtaaactttcctgctcaggg

SEQ ID NO: 2273988 - DNA, 25 bp, Homo sapien
cccgctcaactacaaatgtcaatat

SEQ ID NO: 2273989 - DNA, 25 bp, Homo sapien
tctagagtctagcaaatatagtacc

SEQ ID NO: 2273990 - DNA, 25 bp, Homo sapien
gtacctttcattgcaggatttctgc

SEQ ID NO: 2273991 - DNA, 25 bp, Homo sapien
tcagcttttatctagcaatgcagaa

SEQ ID NO: 2273992 - DNA, 25 bp, Homo sapien
catggaatgtgctcgtagcctctga

SEQ ID NO: 2273993 - DNA, 25 bp, Homo sapien
gcagcatggaatgtgctcgtagcct

SEQ ID NO: 2273994 - DNA, 25 bp, Homo sapien
aatgtgctcgtagcctctgagacct

SEQ ID NO: 2273995 - DNA, 25 bp, Homo sapien
ggaggttacacgcaggggtctcctc

SEQ ID NO: 2273996 - DNA, 25 bp, Homo sapien
atttgctgaatactgtctttgcatt

SEQ ID NO: 2273997 - DNA, 25 bp, Homo sapien
atactgtctttgcatttcatcttca

SEQ ID NO: 2273998 - DNA, 25 bp, Homo sapien
ttaatttgctgaatactgtctttgc

SEQ ID NO: 2273999 - DNA, 25 bp, Homo sapien
aatactgtctttgcatttcatcttc

SEQ ID NO: 2274000 - DNA, 25 bp, Homo sapien
tgaatcccacgatgtccaatggcat

SEQ ID NO: 2274001 - DNA, 25 bp, Homo sapien
ggatgaatcccacgatgtccaatgg

SEQ ID NO: 2274002 - DNA, 25 bp, Homo sapien
gatgaatcccacgatgtccaatggc

SEQ ID NO: 2274003 - DNA, 25 bp, Homo sapien
gaggatgaatcccacgatgtccaat

SEQ ID NO: 2274004 - DNA, 25 bp, Homo sapien
agaggtctctgccacaaggtctgat

SEQ ID NO: 2274005 - DNA, 25 bp, Homo sapien
gggcagggcctctgacgatcagcaa

SEQ ID NO: 2274006 - DNA, 25 bp, Homo sapien
tgcaccctccataaagggggcaggg

SEQ ID NO: 2274007 - DNA, 25 bp, Homo sapien
ctctgacgatcagcaagaggtctct

SEQ ID NO: 2274008 - DNA, 25 bp, Homo sapien
tattccaccagcaagaagtggtccc

SEQ ID NO: 2274009 - DNA, 25 bp, Homo sapien
acttccacttttattccaccagcaa

SEQ ID NO: 2274010 - DNA, 25 bp, Homo sapien
ttccaccagcaagaagtggtcccat

SEQ ID NO: 2274011 - DNA, 25 bp, Homo sapien
ttttattccaccagcaagaagtggt

SEQ ID NO: 2274012 - DNA, 25 bp, Homo sapien
cttctgtgctggaagttacgctcac

SEQ ID NO: 2274013 - DNA, 25 bp, Homo sapien
tgcttctgtgctggaagttacgctc

SEQ ID NO: 2274014 - DNA, 25 bp, Homo sapien
gcttctgtgctggaagttacgctca

SEQ ID NO: 2274015 - DNA, 25 bp, Homo sapien
ctgcttctgtgctggaagttacgct

SEQ ID NO: 2274016 - DNA, 25 bp, Homo sapien
cctcaccagttatctgagtcactct

SEQ ID NO: 2274017 - DNA, 25 bp, Homo sapien
gaaattcagatttcacgcttcgata

SEQ ID NO: 2274018 - DNA, 25 bp, Homo sapien
cagttatctgagtcactcttgcaga

SEQ ID NO: 2274019 - DNA, 25 bp, Homo sapien
gataacagctacgaatcactccatt

SEQ ID NO: 2274020 - DNA, 25 bp, Homo sapien
ttgggttcttggattctcagcccct

SEQ ID NO: 2274021 - DNA, 25 bp, Homo sapien
gtgcactctgacacccatcctggag

SEQ ID NO: 2274022 - DNA, 25 bp, Homo sapien
tgtggccctccactcgggatgcttt

SEQ ID NO: 2274023 - DNA, 25 bp, Homo sapien
gctttgggttcttggattctcagcc

SEQ ID NO: 2274024 - DNA, 25 bp, Homo sapien
tgatcccaaatagccctgcgattca

SEQ ID NO: 2274025 - DNA, 25 bp, Homo sapien
acttgtccacagggagtggatgccc

SEQ ID NO: 2274026 - DNA, 25 bp, Homo sapien
aggctctgatcccaaatagccctgc

SEQ ID NO: 2274027 - DNA, 25 bp, Homo sapien
tccacagggagtggatgccctggcc

SEQ ID NO: 2274028 - DNA, 25 bp, Homo sapien
tctcgtccagagtccttatcttggc

SEQ ID NO: 2274029 - DNA, 25 bp, Homo sapien
aagttctaccttctctcgtccagag

SEQ ID NO: 2274030 - DNA, 25 bp, Homo sapien
ttttcctttgcagtgaagttctacc

SEQ ID NO: 2274031 - DNA, 25 bp, Homo sapien
tcctctcagaaatgcagtcaaattc

SEQ ID NO: 2274032 - DNA, 25 bp, Homo sapien
tgcagagcctgatgtggtctgcccc

SEQ ID NO: 2274033 - DNA, 25 bp, Homo sapien
ttcacaaggatcatgacgctcgggc

SEQ ID NO: 2274034 - DNA, 25 bp, Homo sapien
gatcatgacgctcgggcctgtggcc

SEQ ID NO: 2274035 - DNA, 25 bp, Homo sapien
ctgcagagcctgatgtggtctgccc

SEQ ID NO: 2274036 - DNA, 25 bp, Homo sapien
ggccccaggacctggtctctggcgc

SEQ ID NO: 2274037 - DNA, 25 bp, Homo sapien
tttctccttgttagctctccatatg

SEQ ID NO: 2274038 - DNA, 25 bp, Homo sapien
cttgttagctctccatatggcccca

SEQ ID NO: 2274039 - DNA, 25 bp, Homo sapien
gccccaggacctggtctctggcgcc

SEQ ID NO: 2274040 - DNA, 25 bp, Homo sapien
tagtcccttgcggatgacagtggag

SEQ ID NO: 2274041 - DNA, 25 bp, Homo sapien
ttagtcccttgcggatgacagtgga

SEQ ID NO: 2274042 - DNA, 25 bp, Homo sapien
tccattcatttcgtacattgtggga

SEQ ID NO: 2274043 - DNA, 25 bp, Homo sapien
tccatccattcatttcgtacattgt

SEQ ID NO: 2274044 - DNA, 25 bp, Homo sapien
acacaccgacgggaatagaatccag

SEQ ID NO: 2274045 - DNA, 25 bp, Homo sapien
agtccacacaccgacgggacaggat

SEQ ID NO: 2274046 - DNA, 25 bp, Homo sapien
acacaccgacggaacaggatccagt

SEQ ID NO: 2274047 - DNA, 25 bp, Homo sapien
agtccacgcgccgacggaagaggat

SEQ ID NO: 2274048 - DNA, 25 bp, Homo sapien
cgacggaagaggatccagtccacac

SEQ ID NO: 2274049 - DNA, 25 bp, Homo sapien
acggaagaggatccagtccacacac

SEQ ID NO: 2274050 - DNA, 25 bp, Homo sapien
gacggaagaggatccagtccacaca

SEQ ID NO: 2274051 - DNA, 25 bp, Homo sapien
acacacggacgggaatagaatccag

SEQ ID NO: 2274052 - DNA, 25 bp, Homo sapien
acacaccgacgggaatagaatccag

SEQ ID NO: 2274053 - DNA, 25 bp, Homo sapien
tccacacacggacgggaatagaatc

SEQ ID NO: 2274054 - DNA, 25 bp, Homo sapien
acggaagaggatccagtccacacgc

SEQ ID NO: 2274055 - DNA, 25 bp, Homo sapien
cgacggaagaggatccagtccacac

SEQ ID NO: 2274056 - DNA, 25 bp, Homo sapien
gacggaagaggatccagtccacaca

SEQ ID NO: 2274057 - DNA, 25 bp, Homo sapien
acggaagaggatccagtccacacac

SEQ ID NO: 2274058 - DNA, 25 bp, Homo sapien
tccacacacggacgggaatagaatc

SEQ ID NO: 2274059 - DNA, 25 bp, Homo sapien
acggaagaggatccagtccacacgc

SEQ ID NO: 2274060 - DNA, 25 bp, Homo sapien
acacaccgacggaacaggatccagt

SEQ ID NO: 2274061 - DNA, 25 bp, Homo sapien
agtccacacgccgacggaagaggat

SEQ ID NO: 2274062 - DNA, 25 bp, Homo sapien
gacgggaatagaatccagtccacac

SEQ ID NO: 2274063 - DNA, 25 bp, Homo sapien
cgacgggaatagaatccagtccaca

SEQ ID NO: 2274064 - DNA, 25 bp, Homo sapien
acgggaatagaatccagtccacaca

SEQ ID NO: 2274065 - DNA, 25 bp, Homo sapien
cgggaatagaatccagtccacacac

SEQ ID NO: 2274066 - DNA, 25 bp, Homo sapien
acacacggacgggaatagaatccag

SEQ ID NO: 2274067 - DNA, 25 bp, Homo sapien
gtccacacaccgacggaacaggatc

SEQ ID NO: 2274068 - DNA, 25 bp, Homo sapien
acacaccgacggaacaggatccagt

SEQ ID NO: 2274069 - DNA, 25 bp, Homo sapien
agtccacgcgccgacggaagaggat

SEQ ID NO: 2274070 - DNA, 25 bp, Homo sapien
acgggaatagaatccagtccacaca

SEQ ID NO: 2274071 - DNA, 25 bp, Homo sapien
gacgggaatagaatccagtccacac

SEQ ID NO: 2274072 - DNA, 25 bp, Homo sapien
cgacgggaatagaatccagtccaca

SEQ ID NO: 2274073 - DNA, 25 bp, Homo sapien
cgggaatagaatccagtccacacac

SEQ ID NO: 2274074 - DNA, 25 bp, Homo sapien
cagaagccctgttccctctgcataa

SEQ ID NO: 2274075 - DNA, 25 bp, Homo sapien
tcagaagccctgttccctctgcata

SEQ ID NO: 2274076 - DNA, 25 bp, Homo sapien
tcagggacatttatgccggagtcct

SEQ ID NO: 2274077 - DNA, 25 bp, Homo sapien
tacctaacattctgtctgggagttc

SEQ ID NO: 2274078 - DNA, 25 bp, Homo sapien
cggagtcctgacctttaagccgagg

SEQ ID NO: 2274079 - DNA, 25 bp, Homo sapien
gaaccccagaaggacttacttgtgc

SEQ ID NO: 2274080 - DNA, 25 bp, Homo sapien
attgtttaggattgctggcccaggg

SEQ ID NO: 2274081 - DNA, 25 bp, Homo sapien
gctattgcctaccactgataagagg

SEQ ID NO: 2274082 - DNA, 25 bp, Homo sapien
tgcccggccgaagttcacatataat

SEQ ID NO: 2274083 - DNA, 25 bp, Homo sapien
tacaattctctaaggacaatgcagc

SEQ ID NO: 2274084 - DNA, 25 bp, Homo sapien
tgcttctgtccaatagcagcctgag

SEQ ID NO: 2274085 - DNA, 25 bp, Homo sapien
aggcccctggattgaccccataact

SEQ ID NO: 2274086 - DNA, 25 bp, Homo sapien
tgtgtgtccacggtcagagctctga

SEQ ID NO: 2274087 - DNA, 25 bp, Homo sapien
cccataactgatggtaaagtgtgtg

SEQ ID NO: 2274088 - DNA, 25 bp, Homo sapien
tgtcactctcacagtctccacttcc

SEQ ID NO: 2274089 - DNA, 25 bp, Homo sapien
tgggaccgcgcgccctccactccgg

SEQ ID NO: 2274090 - DNA, 25 bp, Homo sapien
ctccactccgggccagacccccgcg

SEQ ID NO: 2274091 - DNA, 25 bp, Homo sapien
ctgaactcgacacccgccggccgag

SEQ ID NO: 2274092 - DNA, 25 bp, Homo sapien
ctcgacacccgccggccgagcggga

SEQ ID NO: 2274093 - DNA, 25 bp, Homo sapien
gtcgccgtcggctccccggcgatgc

SEQ ID NO: 2274094 - DNA, 25 bp, Homo sapien
tcgccgtcggctccccggcgatgcc

SEQ ID NO: 2274095 - DNA, 25 bp, Homo sapien
ccgtcgccgtcggctccccggcgat

SEQ ID NO: 2274096 - DNA, 25 bp, Homo sapien
cgtcgccgtcggctccccggcgatg

SEQ ID NO: 2274097 - DNA, 25 bp, Homo sapien
cttcctccgattcaggagcagagga

SEQ ID NO: 2274098 - DNA, 25 bp, Homo sapien
aggaaacgttcgctgtccctcctgc

SEQ ID NO: 2274099 - DNA, 25 bp, Homo sapien
gcagaggaggaaacgttcgctgtcc

SEQ ID NO: 2274100 - DNA, 25 bp, Homo sapien
ccgcctcccaatagtcctccctctg

SEQ ID NO: 2274101 - DNA, 25 bp, Homo sapien
caaagggccatatcttcaatgtcca

SEQ ID NO: 2274102 - DNA, 25 bp, Homo sapien
ctgggtcacctccaaagggccatat

SEQ ID NO: 2274103 - DNA, 25 bp, Homo sapien
cctccaaagggccatatcttcaatg

SEQ ID NO: 2274104 - DNA, 25 bp, Homo sapien
caatgtccaggagaaagaggtcccc

SEQ ID NO: 2274105 - DNA, 25 bp, Homo sapien
ctcaatgcgggaggccacgagtcct

SEQ ID NO: 2274106 - DNA, 25 bp, Homo sapien
ccccataagtctcaatgcgggaggc

SEQ ID NO: 2274107 - DNA, 25 bp, Homo sapien
tatcctcggggatagagtctgccag

SEQ ID NO: 2274108 - DNA, 25 bp, Homo sapien
tgctctgagcagaggctcgatgccg

SEQ ID NO: 2274109 - DNA, 25 bp, Homo sapien
agactccacagcctaggtgtcttcc

SEQ ID NO: 2274110 - DNA, 25 bp, Homo sapien
caccaggtcacttttggggcacagc

SEQ ID NO: 2274111 - DNA, 25 bp, Homo sapien
acctgtaaggggacagagactccac

SEQ ID NO: 2274112 - DNA, 25 bp, Homo sapien
aacctctgaacctgtaaggggacag

SEQ ID NO: 2274113 - DNA, 25 bp, Homo sapien
caaaattatcgtgcattgaggcagg

SEQ ID NO: 2274114 - DNA, 25 bp, Homo sapien
gatgtcccagccacaagcagaactg

SEQ ID NO: 2274115 - DNA, 25 bp, Homo sapien
taggaaagtcccatctccaaaggca

SEQ ID NO: 2274116 - DNA, 25 bp, Homo sapien
tagggacaccctgaacctttgctca

SEQ ID NO: 2274117 - DNA, 25 bp, Homo sapien
tcttctcgggctctggatctcgcag

SEQ ID NO: 2274118 - DNA, 25 bp, Homo sapien
cctggcaaaggggacatactgctgg

SEQ ID NO: 2274119 - DNA, 25 bp, Homo sapien
ctcatgggtgacaggcctcgggcct

SEQ ID NO: 2274120 - DNA, 25 bp, Homo sapien
ggatctcgcagtctcatgggtgaca

SEQ ID NO: 2274121 - DNA, 25 bp, Homo sapien
caggacttctcgatggtcaggccac

SEQ ID NO: 2274122 - DNA, 25 bp, Homo sapien
ctatctcccagtgccgccggtcctc

SEQ ID NO: 2274123 - DNA, 25 bp, Homo sapien
catgctgaaagtgtgcagcctcacc

SEQ ID NO: 2274124 - DNA, 25 bp, Homo sapien
cggggcatcccaaacatgctgaaag

SEQ ID NO: 2274125 - DNA, 25 bp, Homo sapien
atcagtcatgatcttgagctttctc

SEQ ID NO: 2274126 - DNA, 25 bp, Homo sapien
acgtagatcagctcggtggtcagga

SEQ ID NO: 2274127 - DNA, 25 bp, Homo sapien
tcttgagctttctcacgtagatcag

SEQ ID NO: 2274128 - DNA, 25 bp, Homo sapien
gctttctcacgtagatcagctcggt

SEQ ID NO: 2274129 - DNA, 25 bp, Homo sapien
catcagcagtcccactcgctgcagg

SEQ ID NO: 2274130 - DNA, 25 bp, Homo sapien
agcacacttttggaaggtccccagg

SEQ ID NO: 2274131 - DNA, 25 bp, Homo sapien
ggtgaggaccttaagcttggacagc

SEQ ID NO: 2274132 - DNA, 25 bp, Homo sapien
gaggaccttaagcttggacagcagg

SEQ ID NO: 2274133 - DNA, 25 bp, Homo sapien
gcagcacacttttggaaggtcccca

SEQ ID NO: 2274134 - DNA, 25 bp, Homo sapien
aagctccggtgggttcgaatcaggc

SEQ ID NO: 2274135 - DNA, 25 bp, Homo sapien
ggaagccactttgcagaccaatggg

SEQ ID NO: 2274136 - DNA, 25 bp, Homo sapien
acctcatcccaaaagctccggtggg

SEQ ID NO: 2274137 - DNA, 25 bp, Homo sapien
caggaagccactttgcagaccaatg

SEQ ID NO: 2274138 - DNA, 25 bp, Homo sapien
agggttagtttcttgctgttctcgg

SEQ ID NO: 2274139 - DNA, 25 bp, Homo sapien
acataggggtggaaccgctggccaa

SEQ ID NO: 2274140 - DNA, 25 bp, Homo sapien
ccatggtctgcttcactcggaggca

SEQ ID NO: 2274141 - DNA, 25 bp, Homo sapien
gcacgaaggcatggaagagagggtt

SEQ ID NO: 2274142 - DNA, 25 bp, Homo sapien
tcttgggctcgtgcctcggggctcc

SEQ ID NO: 2274143 - DNA, 25 bp, Homo sapien
tggggcttgataagcaagtcacaga

SEQ ID NO: 2274144 - DNA, 25 bp, Homo sapien
tcccagagcgcttgtgcttctcaca

SEQ ID NO: 2274145 - DNA, 25 bp, Homo sapien
cctcggggctcctcttgagcacagc

SEQ ID NO: 2274146 - DNA, 25 bp, Homo sapien
atgcgttgtgctgcagccgccaagc

SEQ ID NO: 2274147 - DNA, 25 bp, Homo sapien
ctcgtagggcccgatgcgttgtgct

SEQ ID NO: 2274148 - DNA, 25 bp, Homo sapien
cctggcggacctgcccattgatgtg

SEQ ID NO: 2274149 - DNA, 25 bp, Homo sapien
gcaggaatgactccacggcttcaat

SEQ ID NO: 2274150 - DNA, 25 bp, Homo sapien
gcagctgtctggtgtgctcagatgc

SEQ ID NO: 2274151 - DNA, 25 bp, Homo sapien
tcgtccctccttcactcgcacaggc

SEQ ID NO: 2274152 - DNA, 25 bp, Homo sapien
tgtctggtgtgctcagatgcaaccc

SEQ ID NO: 2274153 - DNA, 25 bp, Homo sapien
gctcagatgcaacccccagcatggg

SEQ ID NO: 2274154 - DNA, 25 bp, Homo sapien
gggttggcacacgagcttctccagc

SEQ ID NO: 2274155 - DNA, 25 bp, Homo sapien
cgcaggggttggcacacgagcttct

SEQ ID NO: 2274156 - DNA, 25 bp, Homo sapien
tggtcacaaggagcacatcagagaa

SEQ ID NO: 2274157 - DNA, 25 bp, Homo sapien
ttctccagcatgagagggggtcgga

SEQ ID NO: 2274158 - DNA, 25 bp, Homo sapien
ctttatttgatctccgtcccagctc

SEQ ID NO: 2274159 - DNA, 25 bp, Homo sapien
tttatttgatctccgtcccagctcc

SEQ ID NO: 2274160 - DNA, 25 bp, Homo sapien
actgggcacggtctgtaggactggg

SEQ ID NO: 2274161 - DNA, 25 bp, Homo sapien
attcagtgaggtggatcagcaggaa

SEQ ID NO: 2274162 - DNA, 25 bp, Homo sapien
aattcagtgaggtggatcagcagga

SEQ ID NO: 2274163 - DNA, 25 bp, Homo sapien
gccactgggcacggtctgtaggact

SEQ ID NO: 2274164 - DNA, 25 bp, Homo sapien
tgcccatgcctccccgttgctggct

SEQ ID NO: 2274165 - DNA, 25 bp, Homo sapien
gcccatgcctccccgttgctggctt

SEQ ID NO: 2274166 - DNA, 25 bp, Homo sapien
ctgcccatgcctccccgttgctggc

SEQ ID NO: 2274167 - DNA, 25 bp, Homo sapien
tcagattgtccagtctgaaactgaa

SEQ ID NO: 2274168 - DNA, 25 bp, Homo sapien
gcgctcccatgttcattcgttcctt

SEQ ID NO: 2274169 - DNA, 25 bp, Homo sapien
atcagattgtccagtctgaaactga

SEQ ID NO: 2274170 - DNA, 25 bp, Homo sapien
ctctgcgctcccatgttcattcgtt

SEQ ID NO: 2274171 - DNA, 25 bp, Homo sapien
tgtatcttgggctctcccagtggct

SEQ ID NO: 2274172 - DNA, 25 bp, Homo sapien
cctgatttcgaaaaagagtcttcgc

SEQ ID NO: 2274173 - DNA, 25 bp, Homo sapien
gcttctgatgcattttaggccacca

SEQ ID NO: 2274174 - DNA, 25 bp, Homo sapien
tagggtgggctcgaaatctaatact

SEQ ID NO: 2274175 - DNA, 25 bp, Homo sapien
gcagatttgcagagatcctaagagc

SEQ ID NO: 2274176 - DNA, 25 bp, Homo sapien
aatttgattaaccaccagaatgatg

SEQ ID NO: 2274177 - DNA, 25 bp, Homo sapien
gtcagtccagcctagtggaaagtgt

SEQ ID NO: 2274178 - DNA, 25 bp, Homo sapien
cagtccagcctagtggaaagtgtgt

SEQ ID NO: 2274179 - DNA, 25 bp, Homo sapien
cagtcagtccagcctagtggaaagt

SEQ ID NO: 2274180 - DNA, 25 bp, Homo sapien
tcctggtcccgatagagggtcagga

SEQ ID NO: 2274181 - DNA, 25 bp, Homo sapien
aggagctccctcttctgttgaacat

SEQ ID NO: 2274182 - DNA, 25 bp, Homo sapien
cttctgttgaacatactcctctgcc

SEQ ID NO: 2274183 - DNA, 25 bp, Homo sapien
tcccctctgcgctgctctgagagcc

SEQ ID NO: 2274184 - DNA, 25 bp, Homo sapien
gccgtagccagagtctgaggtatca

SEQ ID NO: 2274185 - DNA, 25 bp, Homo sapien
agccgggccctgtggagtgtttcca

SEQ ID NO: 2274186 - DNA, 25 bp, Homo sapien
ggctctttggcgtagacggctcagt

SEQ ID NO: 2274187 - DNA, 25 bp, Homo sapien
tgcctgggatcaaagtgccgtagcc

SEQ ID NO: 2274188 - DNA, 25 bp, Homo sapien
agcttccgtggcctgctgtcccggg

SEQ ID NO: 2274189 - DNA, 25 bp, Homo sapien
cagctgggcccgagtcagcttccgt

SEQ ID NO: 2274190 - DNA, 25 bp, Homo sapien
tcctcccggatctctctgagcatgt

SEQ ID NO: 2274191 - DNA, 25 bp, Homo sapien
tgagcatgtcctcagcccgcattgg

SEQ ID NO: 2274192 - DNA, 25 bp, Homo sapien
gctgaatgatgtggggcccccgcat

SEQ ID NO: 2274193 - DNA, 25 bp, Homo sapien
gaatgatgtggggcccccgcatcct

SEQ ID NO: 2274194 - DNA, 25 bp, Homo sapien
ctgaatgatgtggggcccccgcatc

SEQ ID NO: 2274195 - DNA, 25 bp, Homo sapien
tgaatgatgtggggcccccgcatcc

SEQ ID NO: 2274196 - DNA, 25 bp, Homo sapien
atgccggagggtgaccagcactact

SEQ ID NO: 2274197 - DNA, 25 bp, Homo sapien
ttcttgatccccaaacagagcagga

SEQ ID NO: 2274198 - DNA, 25 bp, Homo sapien
tccttgaggtagagtcacagatgcc

SEQ ID NO: 2274199 - DNA, 25 bp, Homo sapien
gagatgcatgccaaaggtcctctgc

SEQ ID NO: 2274200 - DNA, 25 bp, Homo sapien
ccattctatgtggttctcaccatga

SEQ ID NO: 2274201 - DNA, 25 bp, Homo sapien
tataccattctatgtggttctcacc

SEQ ID NO: 2274202 - DNA, 25 bp, Homo sapien
ggtgggctaaagtgcctctccctgc

SEQ ID NO: 2274203 - DNA, 25 bp, Homo sapien
caccatgagcttgagtggtgggcta

SEQ ID NO: 2274204 - DNA, 25 bp, Homo sapien
tgaccttaggtgctccagtggcttc

SEQ ID NO: 2274205 - DNA, 25 bp, Homo sapien
gaggcttgaacttccgggcctgcac

SEQ ID NO: 2274206 - DNA, 25 bp, Homo sapien
tgtggcttcccctgtttgcggctga

SEQ ID NO: 2274207 - DNA, 25 bp, Homo sapien
aaggaaccacactttcaggactggg

SEQ ID NO: 2274208 - DNA, 25 bp, Homo sapien
tcactggcttctactagagtggaag

SEQ ID NO: 2274209 - DNA, 25 bp, Homo sapien
tatcattagatcgatcagttgatcc

SEQ ID NO: 2274210 - DNA, 25 bp, Homo sapien
gcctttgtatcattcagacacactg

SEQ ID NO: 2274211 - DNA, 25 bp, Homo sapien
cacaccagactcttaagtaagggtg

SEQ ID NO: 2274212 - DNA, 25 bp, Homo sapien
ctgctgctaggcaggtagccgctgt

SEQ ID NO: 2274213 - DNA, 25 bp, Homo sapien
aatgtatccttgatcgtcctccacg

SEQ ID NO: 2274214 - DNA, 25 bp, Homo sapien
tccacgtcttggtccgggaatcatc

SEQ ID NO: 2274215 - DNA, 25 bp, Homo sapien
tgttcagatgtcctgggcccatcta

SEQ ID NO: 2274216 - DNA, 25 bp, Homo sapien
aagttgctccaagaacagtagctga

SEQ ID NO: 2274217 - DNA, 25 bp, Homo sapien
tgaaggatgtgcagggcttcctctc

SEQ ID NO: 2274218 - DNA, 25 bp, Homo sapien
gagccgcccaaactgccgttgatgt

SEQ ID NO: 2274219 - DNA, 25 bp, Homo sapien
taccccttggtactgcctctgaaca

SEQ ID NO: 2274220 - DNA, 25 bp, Homo sapien
aaacaatgacctgcttgagaccgta

SEQ ID NO: 2274221 - DNA, 25 bp, Homo sapien
tccgtgtttctccaccgctgatgga

SEQ ID NO: 2274222 - DNA, 25 bp, Homo sapien
ttcaaggccagtggaatatcccgga

SEQ ID NO: 2274223 - DNA, 25 bp, Homo sapien
gaatgtgcaccagtatgtcacgcct

SEQ ID NO: 2274224 - DNA, 25 bp, Homo sapien
aacaccaggccctacatctcagaga

SEQ ID NO: 2274225 - DNA, 25 bp, Homo sapien
gaacaccaggccctacatctcagag

SEQ ID NO: 2274226 - DNA, 25 bp, Homo sapien
ggctaggcacctggcaaaatggatt

SEQ ID NO: 2274227 - DNA, 25 bp, Homo sapien
ggaggccccttcgtatattccatca

SEQ ID NO: 2274228 - DNA, 25 bp, Homo sapien
tcatgtccaaaggtgcgttacggac

SEQ ID NO: 2274229 - DNA, 25 bp, Homo sapien
taagccagtaactgtggcacactgg

SEQ ID NO: 2274230 - DNA, 25 bp, Homo sapien
tcccagcacaaccgcatgaagacgg

SEQ ID NO: 2274231 - DNA, 25 bp, Homo sapien
atccacggcgccatccgcctggtgt

SEQ ID NO: 2274232 - DNA, 25 bp, Homo sapien
gctcctaccgagagctcttcgagtt

SEQ ID NO: 2274233 - DNA, 25 bp, Homo sapien
aggaggaggccctgatcgagttcca

SEQ ID NO: 2274234 - DNA, 25 bp, Homo sapien
tccagggctcccatggcggagctca

SEQ ID NO: 2274235 - DNA, 25 bp, Homo sapien
agtgggagtggagcgagctggccgc

SEQ ID NO: 2274236 - DNA, 25 bp, Homo sapien
gaagtgggagtggagcgagctggcc

SEQ ID NO: 2274237 - DNA, 25 bp, Homo sapien
ctcccatggcggagctcaggaagtg

SEQ ID NO: 2274238 - DNA, 25 bp, Homo sapien
ggcggccagcaacgtgggggcctgg

SEQ ID NO: 2274239 - DNA, 25 bp, Homo sapien
gcggccagcaacgtgggggcctggg

SEQ ID NO: 2274240 - DNA, 25 bp, Homo sapien
aggcggccagcaacgtgggggcctg

SEQ ID NO: 2274241 - DNA, 25 bp, Homo sapien
gccaggccgggggcagaggtggccc

SEQ ID NO: 2274242 - DNA, 25 bp, Homo sapien
aggccaggccgggggcagaggtggc

SEQ ID NO: 2274243 - DNA, 25 bp, Homo sapien
ccaggccaggccgggggcagaggtg

SEQ ID NO: 2274244 - DNA, 25 bp, Homo sapien
caggccaggccgggggcagaggtgg

SEQ ID NO: 2274245 - DNA, 25 bp, Homo sapien
ccaggagcccgaagaggcccagcac

SEQ ID NO: 2274246 - DNA, 25 bp, Homo sapien
gggctgcgatgctgccaggagcccg

SEQ ID NO: 2274247 - DNA, 25 bp, Homo sapien
ctgcaggtctggttctccgacgcat

SEQ ID NO: 2274248 - DNA, 25 bp, Homo sapien
gcggtgctggggctcatagtattcc

SEQ ID NO: 2274249 - DNA, 25 bp, Homo sapien
ggttctccgacgcatatggaggcac

SEQ ID NO: 2274250 - DNA, 25 bp, Homo sapien
aggtctggttctccgacgcatatgg

SEQ ID NO: 2274251 - DNA, 25 bp, Homo sapien
tctgaggccgcgagggggctggagc

SEQ ID NO: 2274252 - DNA, 25 bp, Homo sapien
cttccctctgaggccgcgagggggc

SEQ ID NO: 2274253 - DNA, 25 bp, Homo sapien
tccgaggcccaggttcgtcctgcca

SEQ ID NO: 2274254 - DNA, 25 bp, Homo sapien
cttccgaggcccaggttcgtcctgc

SEQ ID NO: 2274255 - DNA, 25 bp, Homo sapien
agatggtcaggtagttccagtgctc

SEQ ID NO: 2274256 - DNA, 25 bp, Homo sapien
ggcacaaactgtgtcccggatgcgg

SEQ ID NO: 2274257 - DNA, 25 bp, Homo sapien
tgtaggaattctcggcacatgtggc

SEQ ID NO: 2274258 - DNA, 25 bp, Homo sapien
cacatgtggcacaaactgtgtcccg

SEQ ID NO: 2274259 - DNA, 25 bp, Homo sapien
agcacagaacattcccggctggcag

SEQ ID NO: 2274260 - DNA, 25 bp, Homo sapien
tgcagggggcaatctcctcgaggcc

SEQ ID NO: 2274261 - DNA, 25 bp, Homo sapien
gcagtcagaaagtagctcgcagtgt

SEQ ID NO: 2274262 - DNA, 25 bp, Homo sapien
cgcagtgtgtacactcgagggccca

SEQ ID NO: 2274263 - DNA, 25 bp, Homo sapien
ccttttcacatccagcccctcaggg

SEQ ID NO: 2274264 - DNA, 25 bp, Homo sapien
cctccttttcacatccagcccctca

SEQ ID NO: 2274265 - DNA, 25 bp, Homo sapien
ctccttttcacatccagcccctcag

SEQ ID NO: 2274266 - DNA, 25 bp, Homo sapien
tccttttcacatccagcccctcagg

SEQ ID NO: 2274267 - DNA, 25 bp, Homo sapien
ttcccagtactgagaagaaccacct

SEQ ID NO: 2274268 - DNA, 25 bp, Homo sapien
cctttgccggcctgtgagtttcctt

SEQ ID NO: 2274269 - DNA, 25 bp, Homo sapien
gcctactgcctaccattttgcccaa

SEQ ID NO: 2274270 - DNA, 25 bp, Homo sapien
tgtgagcctctgcatggaatgagaa

SEQ ID NO: 2274271 - DNA, 25 bp, Homo sapien
caggggacgcagtggttgttaccct

SEQ ID NO: 2274272 - DNA, 25 bp, Homo sapien
gacgcagtggttgttacccttccca

SEQ ID NO: 2274273 - DNA, 25 bp, Homo sapien
cgctgggggaggaggtattctggaa

SEQ ID NO: 2274274 - DNA, 25 bp, Homo sapien
gcgctgggggaggaggtattctgga

SEQ ID NO: 2274275 - DNA, 25 bp, Homo sapien
aggaggtattctggaagtgcccggc

SEQ ID NO: 2274276 - DNA, 25 bp, Homo sapien
gggaggaggtattctggaagtgccc

SEQ ID NO: 2274277 - DNA, 25 bp, Homo sapien
agtcgagtccgtggtgtcaaggata

SEQ ID NO: 2274278 - DNA, 25 bp, Homo sapien
gctgaaagtggtgagtcgagtccgt

SEQ ID NO: 2274279 - DNA, 25 bp, Homo sapien
gcccaccagtgtcccgactccactg

SEQ ID NO: 2274280 - DNA, 25 bp, Homo sapien
gatgatgaccttttcacgccctggc

SEQ ID NO: 2274281 - DNA, 25 bp, Homo sapien
ggatttttgcaggttgtgtcggact

SEQ ID NO: 2274282 - DNA, 25 bp, Homo sapien
aggttgtgtcggactgggcagtgcc

SEQ ID NO: 2274283 - DNA, 25 bp, Homo sapien
tggctctaatggatttttgcaggtt

SEQ ID NO: 2274284 - DNA, 25 bp, Homo sapien
gggcagtggctctaatggatttttg

SEQ ID NO: 2274285 - DNA, 25 bp, Homo sapien
tagcaagccaatcagtccacaggaa

SEQ ID NO: 2274286 - DNA, 25 bp, Homo sapien
gaggactcccgcatttctatgctgg

SEQ ID NO: 2274287 - DNA, 25 bp, Homo sapien
aaatgtccgggaggatatataccac

SEQ ID NO: 2274288 - DNA, 25 bp, Homo sapien
tcatgtaaatctgtagcctaaggga

SEQ ID NO: 2274289 - DNA, 25 bp, Homo sapien
agcagggcttgcaagttctccaccc

SEQ ID NO: 2274290 - DNA, 25 bp, Homo sapien
gcagggcttgcaagttctccacccc

SEQ ID NO: 2274291 - DNA, 25 bp, Homo sapien
gagcagggcttgcaagttctccacc

SEQ ID NO: 2274292 - DNA, 25 bp, Homo sapien
ggggtgagagagtagggaaacttgc

SEQ ID NO: 2274293 - DNA, 25 bp, Homo sapien
caggggtgagagagtagggaaactt

SEQ ID NO: 2274294 - DNA, 25 bp, Homo sapien
aggggtgagagagtagggaaacttg

SEQ ID NO: 2274295 - DNA, 25 bp, Homo sapien
ggcaacccagacagagaaaagggag

SEQ ID NO: 2274296 - DNA, 25 bp, Homo sapien
tgggcaacccagacagagaaaaggg

SEQ ID NO: 2274297 - DNA, 25 bp, Homo sapien
cttttttccttctagacacaatgca

SEQ ID NO: 2274298 - DNA, 25 bp, Homo sapien
agcttttttccttctagacacaatg

SEQ ID NO: 2274299 - DNA, 25 bp, Homo sapien
gtggcagcagaacggccagcatcag

SEQ ID NO: 2274300 - DNA, 25 bp, Homo sapien
aggagaagacggtggcaaggagcag

SEQ ID NO: 2274301 - DNA, 25 bp, Homo sapien
tgcggacgcctcttgagcagcgatc

SEQ ID NO: 2274302 - DNA, 25 bp, Homo sapien
ctgcggacgcctcttgagcagcgat

SEQ ID NO: 2274303 - DNA, 25 bp, Homo sapien
ttcagagaccaggattgggcaggct

SEQ ID NO: 2274304 - DNA, 25 bp, Homo sapien
cccaaacaatgatgagggccccaga

SEQ ID NO: 2274305 - DNA, 25 bp, Homo sapien
tgcgggtgccctcctgttcagagac

SEQ ID NO: 2274306 - DNA, 25 bp, Homo sapien
tcaaatatcaggttctcagagaggc

SEQ ID NO: 2274307 - DNA, 25 bp, Homo sapien
tatggatgggccttcggaggctccc

SEQ ID NO: 2274308 - DNA, 25 bp, Homo sapien
gaaatgggtagcagtggctgtacca

SEQ ID NO: 2274309 - DNA, 25 bp, Homo sapien
gcagtggctgtaccaagtcagggaa

SEQ ID NO: 2274310 - DNA, 25 bp, Homo sapien
atgggccttcggaggctcccagctt

SEQ ID NO: 2274311 - DNA, 25 bp, Homo sapien
ttccaactgcggctccctggtcagg

SEQ ID NO: 2274312 - DNA, 25 bp, Homo sapien
gctgttgcggcacccctgcctccaa

SEQ ID NO: 2274313 - DNA, 25 bp, Homo sapien
tccaactgcggctccctggtcaggt

SEQ ID NO: 2274314 - DNA, 25 bp, Homo sapien
tctgctgttgcggcacccctgcctc

SEQ ID NO: 2274315 - DNA, 25 bp, Homo sapien
atgttgccagtgatagtcatagacc

SEQ ID NO: 2274316 - DNA, 25 bp, Homo sapien
gacccgccggtgacatgaatgccat

SEQ ID NO: 2274317 - DNA, 25 bp, Homo sapien
atagacccgccggtgacatgaatgc

SEQ ID NO: 2274318 - DNA, 25 bp, Homo sapien
tgatagtcatagacccgccggtgac

SEQ ID NO: 2274319 - DNA, 25 bp, Homo sapien
ttcctggtggggtgtagagagcccg

SEQ ID NO: 2274320 - DNA, 25 bp, Homo sapien
gctctgtctccgctaggtgccaagc

SEQ ID NO: 2274321 - DNA, 25 bp, Homo sapien
cgctaggtgccaagccttgccatct

SEQ ID NO: 2274322 - DNA, 25 bp, Homo sapien
tgtctccgctaggtgccaagccttg

SEQ ID NO: 2274323 - DNA, 25 bp, Homo sapien
ccttgggcccctgttagagggtgtg

SEQ ID NO: 2274324 - DNA, 25 bp, Homo sapien
gggcccctgttagagggtgtggcac

SEQ ID NO: 2274325 - DNA, 25 bp, Homo sapien
tcatgggtgataaattggttccttg

SEQ ID NO: 2274326 - DNA, 25 bp, Homo sapien
cagtcatgggtgataaattggttcc

SEQ ID NO: 2274327 - DNA, 25 bp, Homo sapien
cctgtgaatcccacgtgggcagggc

SEQ ID NO: 2274328 - DNA, 25 bp, Homo sapien
aggtgtctgagccttaatcccttag

SEQ ID NO: 2274329 - DNA, 25 bp, Homo sapien
cttaatcccttagggctctgcttcc

SEQ ID NO: 2274330 - DNA, 25 bp, Homo sapien
tcaggcccctgtgaatcccacgtgg

SEQ ID NO: 2274331 - DNA, 25 bp, Homo sapien
tgggcagcagttggtatcatgtgcc

SEQ ID NO: 2274332 - DNA, 25 bp, Homo sapien
ctgccgggaggcctcaggtttgctc

SEQ ID NO: 2274333 - DNA, 25 bp, Homo sapien
tgggtctgccgggaggcctcaggtt

SEQ ID NO: 2274334 - DNA, 25 bp, Homo sapien
ccctgtccgtgcctgaggctgagca

SEQ ID NO: 2274335 - DNA, 25 bp, Homo sapien
tgtggaaccccaaagggtctctgaa

SEQ ID NO: 2274336 - DNA, 25 bp, Homo sapien
gtgacgtccttgcaggtgaccgtgt

SEQ ID NO: 2274337 - DNA, 25 bp, Homo sapien
cgtgtggcggctccctcggtgccgt

SEQ ID NO: 2274338 - DNA, 25 bp, Homo sapien
tgagcaccacgaatcctttagaggg

SEQ ID NO: 2274339 - DNA, 25 bp, Homo sapien
ctagttgttaatgactccctttcct

SEQ ID NO: 2274340 - DNA, 25 bp, Homo sapien
tagttgttaatgactccctttcctc

SEQ ID NO: 2274341 - DNA, 25 bp, Homo sapien
gttgttaatgactccctttcctctc

SEQ ID NO: 2274342 - DNA, 25 bp, Homo sapien
ggagggaaggagcgtcctccctata

SEQ ID NO: 2274343 - DNA, 25 bp, Homo sapien
ctagatgtttgagagttgactgaaa

SEQ ID NO: 2274344 - DNA, 25 bp, Homo sapien
atgtttgagagttgactgaaaagta

SEQ ID NO: 2274345 - DNA, 25 bp, Homo sapien
gtttgagagttgactgaaaagtaac

SEQ ID NO: 2274346 - DNA, 25 bp, Homo sapien
ttgagagttgactgaaaagtaacac

SEQ ID NO: 2274347 - DNA, 25 bp, Homo sapien
tcgaccgagcacaggagagaattca

SEQ ID NO: 2274348 - DNA, 25 bp, Homo sapien
tctaaagtgcacacctcaggtcagg

SEQ ID NO: 2274349 - DNA, 25 bp, Homo sapien
catatcagacccatgagagtggcct

SEQ ID NO: 2274350 - DNA, 25 bp, Homo sapien
cactccattggatcagacgccttct

SEQ ID NO: 2274351 - DNA, 25 bp, Homo sapien
ccattgtcaactgccattgcatcct

SEQ ID NO: 2274352 - DNA, 25 bp, Homo sapien
attgtcaactgccattgcatcctgt

SEQ ID NO: 2274353 - DNA, 25 bp, Homo sapien
cccattgtcaactgccattgcatcc

SEQ ID NO: 2274354 - DNA, 25 bp, Homo sapien
tgtcaactgccattgcatcctgttg

SEQ ID NO: 2274355 - DNA, 25 bp, Homo sapien
tcagggtggtaaacttgccacagga

SEQ ID NO: 2274356 - DNA, 25 bp, Homo sapien
tgccacaggattgttgctagttgaa

SEQ ID NO: 2274357 - DNA, 25 bp, Homo sapien
ggatgcaaagcttcactccaagttc

SEQ ID NO: 2274358 - DNA, 25 bp, Homo sapien
ctgggatattcagggtggtaaactt

SEQ ID NO: 2274359 - DNA, 25 bp, Homo sapien
ccgtggcggtttcctcatgatggta

SEQ ID NO: 2274360 - DNA, 25 bp, Homo sapien
cagtaacattggttgcttccagagc

SEQ ID NO: 2274361 - DNA, 25 bp, Homo sapien
taaaaagaagcccaggagtaggtgc

SEQ ID NO: 2274362 - DNA, 25 bp, Homo sapien
caggagtgatgttgtcacacgcaaa

SEQ ID NO: 2274363 - DNA, 25 bp, Homo sapien
gataaggcaaaggagcgctcattct

SEQ ID NO: 2274364 - DNA, 25 bp, Homo sapien
tagtctctctaagggtctgcgatga

SEQ ID NO: 2274365 - DNA, 25 bp, Homo sapien
tctgcgatgagtgggtatagtacct

SEQ ID NO: 2274366 - DNA, 25 bp, Homo sapien
tctggtcctgtggtatacatacggg

SEQ ID NO: 2274367 - DNA, 25 bp, Homo sapien
aatactctcataaaaaacacacctt

SEQ ID NO: 2274368 - DNA, 25 bp, Homo sapien
aaatactctcataaaaaacacacct

SEQ ID NO: 2274369 - DNA, 25 bp, Homo sapien
atactctcataaaaaacacaccttt

SEQ ID NO: 2274370 - DNA, 25 bp, Homo sapien
cagaggaggctatcagcaatcaggt

SEQ ID NO: 2274371 - DNA, 25 bp, Homo sapien
aggtaatcgtgcctctcatgagcga

SEQ ID NO: 2274372 - DNA, 25 bp, Homo sapien
taatgtcccacgtgaatgctaatcg

SEQ ID NO: 2274373 - DNA, 25 bp, Homo sapien
tgaatttcccagaacggtcccagaa

SEQ ID NO: 2274374 - DNA, 25 bp, Homo sapien
caagcgcatttgtggagtaggcttc

SEQ ID NO: 2274375 - DNA, 25 bp, Homo sapien
cgcatttgtggagtaggcttcaaga

SEQ ID NO: 2274376 - DNA, 25 bp, Homo sapien
ttgtggagtaggcttcaagaagcgt

SEQ ID NO: 2274377 - DNA, 25 bp, Homo sapien
atttgtggagtaggcttcaagaagc

SEQ ID NO: 2274378 - DNA, 25 bp, Homo sapien
gaatgctgatgtcttgaagcgtcca

SEQ ID NO: 2274379 - DNA, 25 bp, Homo sapien
gatgtatattggatatcatccacgg

SEQ ID NO: 2274380 - DNA, 25 bp, Homo sapien
tgggtctaaataccttccagtgaga

SEQ ID NO: 2274381 - DNA, 25 bp, Homo sapien
tcagcaaattagtcgaacccaaaga

SEQ ID NO: 2274382 - DNA, 25 bp, Homo sapien
ggtctggaatctagcctcacgaggg

SEQ ID NO: 2274383 - DNA, 25 bp, Homo sapien
tggaagcttagcagagaaaccagcg

SEQ ID NO: 2274384 - DNA, 25 bp, Homo sapien
caaaggcacaatatgggctaccagt

SEQ ID NO: 2274385 - DNA, 25 bp, Homo sapien
ggaccagcgtgtttgctccaggcta

SEQ ID NO: 2274386 - DNA, 25 bp, Homo sapien
aggccacaggcataggcagggtcct

SEQ ID NO: 2274387 - DNA, 25 bp, Homo sapien
ttggcctgcgtccaaggccgtctct

SEQ ID NO: 2274388 - DNA, 25 bp, Homo sapien
gatgattcgagtaaatctgtgctgc

SEQ ID NO: 2274389 - DNA, 25 bp, Homo sapien
gggaagtccaaggatcaatcagctg

SEQ ID NO: 2274390 - DNA, 25 bp, Homo sapien
ctgaagtcacggatggagagtttga

SEQ ID NO: 2274391 - DNA, 25 bp, Homo sapien
aggtgtaggcgtgttgctatgacac

SEQ ID NO: 2274392 - DNA, 25 bp, Homo sapien
tatgacaccctgtgggccgttgctg

SEQ ID NO: 2274393 - DNA, 25 bp, Homo sapien
cttttctgaagtcacggatggagag

SEQ ID NO: 2274394 - DNA, 25 bp, Homo sapien
ccgtcaggaattgcttgctctccaa

SEQ ID NO: 2274395 - DNA, 25 bp, Homo sapien
ggaattgcttgctctccaacgacat

SEQ ID NO: 2274396 - DNA, 25 bp, Homo sapien
ctccgtcaggaattgcttgctctcc

SEQ ID NO: 2274397 - DNA, 25 bp, Homo sapien
caggaattgcttgctctccaacgac

SEQ ID NO: 2274398 - DNA, 25 bp, Homo sapien
tcacttccttggagttcaccacagt

SEQ ID NO: 2274399 - DNA, 25 bp, Homo sapien
cacttccttggagttcaccacagtg

SEQ ID NO: 2274400 - DNA, 25 bp, Homo sapien
ttttgtccctcttctcagcccgtcc

SEQ ID NO: 2274401 - DNA, 25 bp, Homo sapien
gtgaaagcagggaatttgtgccctt

SEQ ID NO: 2274402 - DNA, 25 bp, Homo sapien
ttctcagcccgtccatgttagctct

SEQ ID NO: 2274403 - DNA, 25 bp, Homo sapien
cagggaatttgtgccctttactgtg

SEQ ID NO: 2274404 - DNA, 25 bp, Homo sapien
actcccactttcttcgatgaccacc

SEQ ID NO: 2274405 - DNA, 25 bp, Homo sapien
ccttcccagcaaggctttgagaggc

SEQ ID NO: 2274406 - DNA, 25 bp, Homo sapien
cagtggggtggctagctgactgcag

SEQ ID NO: 2274407 - DNA, 25 bp, Homo sapien
gtggggtggctagctgactgcaggc

SEQ ID NO: 2274408 - DNA, 25 bp, Homo sapien
tggggtggctagctgactgcaggcc

SEQ ID NO: 2274409 - DNA, 25 bp, Homo sapien
agtggggtggctagctgactgcagg

SEQ ID NO: 2274410 - DNA, 25 bp, Homo sapien
cctgaattcccaccgcagagagtgt

SEQ ID NO: 2274411 - DNA, 25 bp, Homo sapien
tgtggccgtgaggacttttctgtca

SEQ ID NO: 2274412 - DNA, 25 bp, Homo sapien
cacatttgggtgtgattcagagagc

SEQ ID NO: 2274413 - DNA, 25 bp, Homo sapien
gccatttccaggttgtggtaaatgt

SEQ ID NO: 2274414 - DNA, 25 bp, Homo sapien
ttttctctctcatagcagcaacctc

SEQ ID NO: 2274415 - DNA, 25 bp, Homo sapien
tgcccagttgctgatgctggcctct

SEQ ID NO: 2274416 - DNA, 25 bp, Homo sapien
ggtggcaagccaacctttgaaggca

SEQ ID NO: 2274417 - DNA, 25 bp, Homo sapien
agttagcacctccaagctgggcgct

SEQ ID NO: 2274418 - DNA, 25 bp, Homo sapien
cctgagcccagtagtgcctctctgg

SEQ ID NO: 2274419 - DNA, 25 bp, Homo sapien
ctgagcccagtagtgcctctctggg

SEQ ID NO: 2274420 - DNA, 25 bp, Homo sapien
agggtccccagaacgcacagccacc

SEQ ID NO: 2274421 - DNA, 25 bp, Homo sapien
tccctgagcccagtagtgcctctct

SEQ ID NO: 2274422 - DNA, 25 bp, Homo sapien
tacagtgccgacagctctcacagtg

SEQ ID NO: 2274423 - DNA, 25 bp, Homo sapien
ggagacccccggtatgcaaggatca

SEQ ID NO: 2274424 - DNA, 25 bp, Homo sapien
ggtcacagtccttcacgaggaatgt

SEQ ID NO: 2274425 - DNA, 25 bp, Homo sapien
gcagcctttctatgctggtcacagt

SEQ ID NO: 2274426 - DNA, 25 bp, Homo sapien
ctcagacctgtggagaccttcaagg

SEQ ID NO: 2274427 - DNA, 25 bp, Homo sapien
ccagggagcataggacactcagacc

SEQ ID NO: 2274428 - DNA, 25 bp, Homo sapien
gaaggaagattcatgggttcagaca

SEQ ID NO: 2274429 - DNA, 25 bp, Homo sapien
aggcccacctctagggacgtgcttc

SEQ ID NO: 2274430 - DNA, 25 bp, Homo sapien
tgcactgccagccattgcgacaggc

SEQ ID NO: 2274431 - DNA, 25 bp, Homo sapien
cagcgaagggtttggaagaggatca

SEQ ID NO: 2274432 - DNA, 25 bp, Homo sapien
cacactcagcattggcagtgatggt

SEQ ID NO: 2274433 - DNA, 25 bp, Homo sapien
cctgagacgaccgagcggtcagcga

SEQ ID NO: 2274434 - DNA, 25 bp, Homo sapien
tactggttggggtatcaccgctacc

SEQ ID NO: 2274435 - DNA, 25 bp, Homo sapien
ggagtactggttggggtatcaccgc

SEQ ID NO: 2274436 - DNA, 25 bp, Homo sapien
gggtatcaccgctaccccacgtgat

SEQ ID NO: 2274437 - DNA, 25 bp, Homo sapien
ccgctaccccacgtgatggcacaga

SEQ ID NO: 2274438 - DNA, 25 bp, Homo sapien
tctgcatgtgcccagctgtcctggc

SEQ ID NO: 2274439 - DNA, 25 bp, Homo sapien
agtcagccagagtctgcatgtgccc

SEQ ID NO: 2274440 - DNA, 25 bp, Homo sapien
caggcagctgcctgaagtcagccag

SEQ ID NO: 2274441 - DNA, 25 bp, Homo sapien
tgggtagagagagtccgggcaggca

SEQ ID NO: 2274442 - DNA, 25 bp, Homo sapien
tttccttcgttgatggaggaacagg

SEQ ID NO: 2274443 - DNA, 25 bp, Homo sapien
taaaatcggagctgcacagggatct

SEQ ID NO: 2274444 - DNA, 25 bp, Homo sapien
cggccagggtgaaaacaaggaacat

SEQ ID NO: 2274445 - DNA, 25 bp, Homo sapien
cacaaggatgcgaataaaatcggag

SEQ ID NO: 2274446 - DNA, 25 bp, Homo sapien
gatgggtagaggcgggtgcgcttgg

SEQ ID NO: 2274447 - DNA, 25 bp, Homo sapien
gagatccgatgagtcttggccagca

SEQ ID NO: 2274448 - DNA, 25 bp, Homo sapien
ctgcagaaggagatccgatgagtct

SEQ ID NO: 2274449 - DNA, 25 bp, Homo sapien
aggagatccgatgagtcttggccag

SEQ ID NO: 2274450 - DNA, 25 bp, Homo sapien
ctgtaatgacaaggctctgcaggct

SEQ ID NO: 2274451 - DNA, 25 bp, Homo sapien
gtaatgacaaggctctgcaggctcc

SEQ ID NO: 2274452 - DNA, 25 bp, Homo sapien
tctgcaggctccacaggactttctc

SEQ ID NO: 2274453 - DNA, 25 bp, Homo sapien
tgcaggctccacaggactttctcct

SEQ ID NO: 2274454 - DNA, 25 bp, Homo sapien
caggcaggctccggttttcggtaat

SEQ ID NO: 2274455 - DNA, 25 bp, Homo sapien
gagcaggcaggctccggttttcggt

SEQ ID NO: 2274456 - DNA, 25 bp, Homo sapien
cggttttcggtaatcctcctggatg

SEQ ID NO: 2274457 - DNA, 25 bp, Homo sapien
tcctggatggggatggtgctgccct

SEQ ID NO: 2274458 - DNA, 25 bp, Homo sapien
gaagtgtgttttacaaccagagccc

SEQ ID NO: 2274459 - DNA, 25 bp, Homo sapien
gaaaaggcactctgtcacgtgtaca

SEQ ID NO: 2274460 - DNA, 25 bp, Homo sapien
gccctgacaagaggatgggactgca

SEQ ID NO: 2274461 - DNA, 25 bp, Homo sapien
tcactctcccttggatggtcggcgg

SEQ ID NO: 2274462 - DNA, 25 bp, Homo sapien
tttattttgcccgtcttgtagcatg

SEQ ID NO: 2274463 - DNA, 25 bp, Homo sapien
tgcccgtcttgtagcatgtgggtct

SEQ ID NO: 2274464 - DNA, 25 bp, Homo sapien
tattttgcccgtcttgtagcatgtg

SEQ ID NO: 2274465 - DNA, 25 bp, Homo sapien
ttttgcccgtcttgtagcatgtggg

SEQ ID NO: 2274466 - DNA, 25 bp, Homo sapien
tgtgtgaagccgtctgcagcagctg

SEQ ID NO: 2274467 - DNA, 25 bp, Homo sapien
cacctgtcccaaaaaagtggagcta

SEQ ID NO: 2274468 - DNA, 25 bp, Homo sapien
tgaagtcagacacaggatccacagt

SEQ ID NO: 2274469 - DNA, 25 bp, Homo sapien
caacataaccggctgagaaacctcc

SEQ ID NO: 2274470 - DNA, 25 bp, Homo sapien
agcagcaggcaccagccctcctgtg

SEQ ID NO: 2274471 - DNA, 25 bp, Homo sapien
caggcaccagccctcctgtgtgccc

SEQ ID NO: 2274472 - DNA, 25 bp, Homo sapien
ggtttctgctgctccagatagagcc

SEQ ID NO: 2274473 - DNA, 25 bp, Homo sapien
tggtttctgctgctccagatagagc

SEQ ID NO: 2274474 - DNA, 25 bp, Homo sapien
cccctgttgggcttagaaggcgatg

SEQ ID NO: 2274475 - DNA, 25 bp, Homo sapien
agaggcagcccctctttagcatttt

SEQ ID NO: 2274476 - DNA, 25 bp, Homo sapien
agccgctgagcctttcccctgttgg

SEQ ID NO: 2274477 - DNA, 25 bp, Homo sapien
atccccggcccctttgctcttctgg

SEQ ID NO: 2274478 - DNA, 25 bp, Homo sapien
tgcccgccactgcccctctgctggg

SEQ ID NO: 2274479 - DNA, 25 bp, Homo sapien
taggaccacgtccactgcccgccac

SEQ ID NO: 2274480 - DNA, 25 bp, Homo sapien
ctaggaccacgtccactgcccgcca

SEQ ID NO: 2274481 - DNA, 25 bp, Homo sapien
cgccactgcccctctgctgggtggg

SEQ ID NO: 2274482 - DNA, 25 bp, Homo sapien
gtgcgcaccgtccttcgccaggaag

SEQ ID NO: 2274483 - DNA, 25 bp, Homo sapien
cttcagcacaagggaggcccttgcc

SEQ ID NO: 2274484 - DNA, 25 bp, Homo sapien
agtgtgcccccttggaaatcggtga

SEQ ID NO: 2274485 - DNA, 25 bp, Homo sapien
gataataggtgggtcatcttgggcc

SEQ ID NO: 2274486 - DNA, 25 bp, Homo sapien
agtcagcatggagcaaggcctcggc

SEQ ID NO: 2274487 - DNA, 25 bp, Homo sapien
caaggcctcggcctggggaatctgg

SEQ ID NO: 2274488 - DNA, 25 bp, Homo sapien
tcagcatggagcaaggcctcggcct

SEQ ID NO: 2274489 - DNA, 25 bp, Homo sapien
gcagtcagcatggagcaaggcctcg

SEQ ID NO: 2274490 - DNA, 25 bp, Homo sapien
ctgtcatctggagaaagtagcggga

SEQ ID NO: 2274491 - DNA, 25 bp, Homo sapien
gaaagtagcgggagatctcacaggt

SEQ ID NO: 2274492 - DNA, 25 bp, Homo sapien
catgaaccaagctgctgtcttaaca

SEQ ID NO: 2274493 - DNA, 25 bp, Homo sapien
tgtcttaacagtggtctctgtcatc

SEQ ID NO: 2274494 - DNA, 25 bp, Homo sapien
caagttcagcgtcgggtgccagagc

SEQ ID NO: 2274495 - DNA, 25 bp, Homo sapien
caccaaggagatgctaggtccccct

SEQ ID NO: 2274496 - DNA, 25 bp, Homo sapien
cagagcgcctcattcttggtgaccc

SEQ ID NO: 2274497 - DNA, 25 bp, Homo sapien
ctcagtggcaagttcagcgtcgggt

SEQ ID NO: 2274498 - DNA, 25 bp, Homo sapien
ctgcccttgtgctgcagtcgccact

SEQ ID NO: 2274499 - DNA, 25 bp, Homo sapien
aagctcagggattgggtctgtgtca

SEQ ID NO: 2274500 - DNA, 25 bp, Homo sapien
tgcagtcgccactccacactgatga

SEQ ID NO: 2274501 - DNA, 25 bp, Homo sapien
cactgatgaggtccaagcccggtgc

SEQ ID NO: 2274502 - DNA, 25 bp, Homo sapien
tgtatagtgaggccgggcagggtga

SEQ ID NO: 2274503 - DNA, 25 bp, Homo sapien
aggctccagggtagcgcccttccgc

SEQ ID NO: 2274504 - DNA, 25 bp, Homo sapien
gcggtccagctgtacaccaactgac

SEQ ID NO: 2274505 - DNA, 25 bp, Homo sapien
cctgcggtccagctgtacaccaact

SEQ ID NO: 2274506 - DNA, 25 bp, Homo sapien
gtggtgatctggcaaatgtaggtcc

SEQ ID NO: 2274507 - DNA, 25 bp, Homo sapien
tctggcaaatgtaggtcccctcgtc

SEQ ID NO: 2274508 - DNA, 25 bp, Homo sapien
gatctgctgagctcggtacagagag

SEQ ID NO: 2274509 - DNA, 25 bp, Homo sapien
tggatgatctgctgagctcggtaca

SEQ ID NO: 2274510 - DNA, 25 bp, Homo sapien
tagccagcaatgtcgcagatgaggg

SEQ ID NO: 2274511 - DNA, 25 bp, Homo sapien
gtaggtgcctgccacgctttgcctg

SEQ ID NO: 2274512 - DNA, 25 bp, Homo sapien
gctcctccagagagatgtgtgtgac

SEQ ID NO: 2274513 - DNA, 25 bp, Homo sapien
tgccaagctcagtcgtactttaggg

SEQ ID NO: 2274514 - DNA, 25 bp, Homo sapien
tgtggaggtggggaaaaggaggaca

SEQ ID NO: 2274515 - DNA, 25 bp, Homo sapien
ctagtgtggaggtggggaaaaggag

SEQ ID NO: 2274516 - DNA, 25 bp, Homo sapien
ctgccgccttgggaaaatagtcagg

SEQ ID NO: 2274517 - DNA, 25 bp, Homo sapien
ctgcgaacaaagtggatgggcagca

SEQ ID NO: 2274518 - DNA, 25 bp, Homo sapien
gcagctgccgccttgggaaaatagt

SEQ ID NO: 2274519 - DNA, 25 bp, Homo sapien
gcagaacaaggccatagatgagctg

SEQ ID NO: 2274520 - DNA, 25 bp, Homo sapien
tgaggtgggagaatcacttgagcct

SEQ ID NO: 2274521 - DNA, 25 bp, Homo sapien
attaactgggcatgttggtgtgcgc

SEQ ID NO: 2274522 - DNA, 25 bp, Homo sapien
ctgtggtcccaggtacttgggaggc

SEQ ID NO: 2274523 - DNA, 25 bp, Homo sapien
ggagaatcacttgagcctgggaggc

SEQ ID NO: 2274524 - DNA, 25 bp, Homo sapien
ggaacatcagtgcaagaaggaagag

SEQ ID NO: 2274525 - DNA, 25 bp, Homo sapien
aagatgactcccaaggctgttctcc

SEQ ID NO: 2274526 - DNA, 25 bp, Homo sapien
gatgactcccaaggctgttctccgc

SEQ ID NO: 2274527 - DNA, 25 bp, Homo sapien
caggaacatcagtgcaagaaggaag

SEQ ID NO: 2274528 - DNA, 25 bp, Homo sapien
aacgagggaacacgactggtttcat

SEQ ID NO: 2274529 - DNA, 25 bp, Homo sapien
caggagagtgacagactttagtgag

SEQ ID NO: 2274530 - DNA, 25 bp, Homo sapien
tcattttcatttagggcaaactcaa

SEQ ID NO: 2274531 - DNA, 25 bp, Homo sapien
tagtgaggtagctaggagaaaacga

SEQ ID NO: 2274532 - DNA, 25 bp, Homo sapien
cttggtgcatgagcccagggtgcac

SEQ ID NO: 2274533 - DNA, 25 bp, Homo sapien
tgggagcacgtgactactctttctt

SEQ ID NO: 2274534 - DNA, 25 bp, Homo sapien
gacttgacttagagtccttctggga

SEQ ID NO: 2274535 - DNA, 25 bp, Homo sapien
ccttggtgcatgagcccagggtgca

SEQ ID NO: 2274536 - DNA, 25 bp, Homo sapien
catcatcctcacgtacagttttggt

SEQ ID NO: 2274537 - DNA, 25 bp, Homo sapien
ccagataaggctgtcagtgaacacc

SEQ ID NO: 2274538 - DNA, 25 bp, Homo sapien
gagttccaccgtattgattaggcac

SEQ ID NO: 2274539 - DNA, 25 bp, Homo sapien
caggaagttgcgtgggcatctcaca

SEQ ID NO: 2274540 - DNA, 25 bp, Homo sapien
tgtgtcagcacaggaagtggtctcc

SEQ ID NO: 2274541 - DNA, 25 bp, Homo sapien
agctgggctggcttacacgcgctgt

SEQ ID NO: 2274542 - DNA, 25 bp, Homo sapien
cgcgctgtgcggtcttcatggagat

SEQ ID NO: 2274543 - DNA, 25 bp, Homo sapien
tggtctcccagcgttcagcctgaag

SEQ ID NO: 2274544 - DNA, 25 bp, Homo sapien
tttctagtagtctcatgtcgcttta

SEQ ID NO: 2274545 - DNA, 25 bp, Homo sapien
tctagtagtctcatgtcgctttagg

SEQ ID NO: 2274546 - DNA, 25 bp, Homo sapien
cattaaactggcttggttgttgttt

SEQ ID NO: 2274547 - DNA, 25 bp, Homo sapien
ttctttctagtagtctcatgtcgct

SEQ ID NO: 2274548 - DNA, 25 bp, Homo sapien
ctgaacaaaggcaaaaaatacaaat

SEQ ID NO: 2274549 - DNA, 25 bp, Homo sapien
aacagttgtacttccaccaaaggca

SEQ ID NO: 2274550 - DNA, 25 bp, Homo sapien
ttcggtttgccatgagacgatgtgg

SEQ ID NO: 2274551 - DNA, 25 bp, Homo sapien
accaaaggcatgtggcatatttacc

SEQ ID NO: 2274552 - DNA, 25 bp, Homo sapien
taaccctgatctcatacttgtatag

SEQ ID NO: 2274553 - DNA, 25 bp, Homo sapien
gggtcaccgctggagaagaaccacc

SEQ ID NO: 2274554 - DNA, 25 bp, Homo sapien
gagcgaatccgtcctcttggctctc

SEQ ID NO: 2274555 - DNA, 25 bp, Homo sapien
actgtcctcgatgtgtcccaagcct

SEQ ID NO: 2274556 - DNA, 25 bp, Homo sapien
ccgctggagaagaaccaccactgtc

SEQ ID NO: 2274557 - DNA, 25 bp, Homo sapien
attcctcctttttcgttgcgttcat

SEQ ID NO: 2274558 - DNA, 25 bp, Homo sapien
tttttcgttgcgttcatttgcactc

SEQ ID NO: 2274559 - DNA, 25 bp, Homo sapien
attgccatccacattcatgtcctct

SEQ ID NO: 2274560 - DNA, 25 bp, Homo sapien
tcctttttcgttgcgttcatttgca

SEQ ID NO: 2274561 - DNA, 25 bp, Homo sapien
gcaaaaaggagctcaatgcaggtcc

SEQ ID NO: 2274562 - DNA, 25 bp, Homo sapien
gaatgccttctaaagccccaagaca

SEQ ID NO: 2274563 - DNA, 25 bp, Homo sapien
gacatactgtggttatgatcccctg

SEQ ID NO: 2274564 - DNA, 25 bp, Homo sapien
ccattgtcccaaggatggaaggaat

SEQ ID NO: 2274565 - DNA, 25 bp, Homo sapien
ggccctgagaggcaaagcacccttt

SEQ ID NO: 2274566 - DNA, 25 bp, Homo sapien
ttcgtaggagaatagtcaaaggccc

SEQ ID NO: 2274567 - DNA, 25 bp, Homo sapien
tggatgaccgagctgatgccttgca

SEQ ID NO: 2274568 - DNA, 25 bp, Homo sapien
cctttagagttgcacagggccagac

SEQ ID NO: 2274569 - DNA, 25 bp, Homo sapien
atagcaccggaaagatgggccccat

SEQ ID NO: 2274570 - DNA, 25 bp, Homo sapien
agttgagtcaaaggatagccccaga

SEQ ID NO: 2274571 - DNA, 25 bp, Homo sapien
caaggctaggccatatgtccctgta

SEQ ID NO: 2274572 - DNA, 25 bp, Homo sapien
gagatgtcttgatgccatcctggat

SEQ ID NO: 2274573 - DNA, 25 bp, Homo sapien
tccggatgtagccgtactcagctgg

SEQ ID NO: 2274574 - DNA, 25 bp, Homo sapien
ggtccggatgtagccgtactcagct

SEQ ID NO: 2274575 - DNA, 25 bp, Homo sapien
ccggatgtagccgtactcagctggg

SEQ ID NO: 2274576 - DNA, 25 bp, Homo sapien
gtccggatgtagccgtactcagctg

SEQ ID NO: 2274577 - DNA, 25 bp, Homo sapien
gctcctggatccgcaggctcttgac

SEQ ID NO: 2274578 - DNA, 25 bp, Homo sapien
ttcggtgaagatttccgttgcccac

SEQ ID NO: 2274579 - DNA, 25 bp, Homo sapien
cggtgaagatttccgttgcccacgg

SEQ ID NO: 2274580 - DNA, 25 bp, Homo sapien
tcggtgaagatttccgttgcccacg

SEQ ID NO: 2274581 - DNA, 25 bp, Homo sapien
tcttccccagcgaccttcataagtg

SEQ ID NO: 2274582 - DNA, 25 bp, Homo sapien
taggttgtagacatactcaggaaca

SEQ ID NO: 2274583 - DNA, 25 bp, Homo sapien
gacttctgggagctgtactgtgctg

SEQ ID NO: 2274584 - DNA, 25 bp, Homo sapien
tttcttccacggacttctgggagct

SEQ ID NO: 2274585 - DNA, 25 bp, Homo sapien
aggagaaatctccagtctcctcaga

SEQ ID NO: 2274586 - DNA, 25 bp, Homo sapien
taatcgctgtgcgtgtagtgagccc

SEQ ID NO: 2274587 - DNA, 25 bp, Homo sapien
tgtgcgtgtagtgagccctctccgg

SEQ ID NO: 2274588 - DNA, 25 bp, Homo sapien
ctctggctgtactggtaatcgctgt

SEQ ID NO: 2274589 - DNA, 25 bp, Homo sapien
gcgatctcagaacgatcatatctcg

SEQ ID NO: 2274590 - DNA, 25 bp, Homo sapien
ccagtacggcggacccccgcgatct

SEQ ID NO: 2274591 - DNA, 25 bp, Homo sapien
ctgtggtgtcaaagtggtgctgcct

SEQ ID NO: 2274592 - DNA, 25 bp, Homo sapien
ccccgcgatctcagaacgatcatat

SEQ ID NO: 2274593 - DNA, 25 bp, Homo sapien
ctggggtacgtgagcagggccgggt

SEQ ID NO: 2274594 - DNA, 25 bp, Homo sapien
gagcagggccgggttggcagggatg

SEQ ID NO: 2274595 - DNA, 25 bp, Homo sapien
acgtgagcagggccgggttggcagg

SEQ ID NO: 2274596 - DNA, 25 bp, Homo sapien
ggtacgtgagcagggccgggttggc

SEQ ID NO: 2274597 - DNA, 25 bp, Homo sapien
ttctccaagaggttgcccatgctgc

SEQ ID NO: 2274598 - DNA, 25 bp, Homo sapien
ctccaagaggttgcccatgctgcgg

SEQ ID NO: 2274599 - DNA, 25 bp, Homo sapien
tctccaagaggttgcccatgctgcg

SEQ ID NO: 2274600 - DNA, 25 bp, Homo sapien
cggcagaaatcctggacggcggcat

SEQ ID NO: 2274601 - DNA, 25 bp, Homo sapien
tggacggcggcatctggtctgcatc

SEQ ID NO: 2274602 - DNA, 25 bp, Homo sapien
cagaagcttggggatgccacaaaac

SEQ ID NO: 2274603 - DNA, 25 bp, Homo sapien
ggcatctggtctgcatcgagcatac

SEQ ID NO: 2274604 - DNA, 25 bp, Homo sapien
gatgattatattctcggtcagcata

SEQ ID NO: 2274605 - DNA, 25 bp, Homo sapien
tatattctcggtcagcataagcaat

SEQ ID NO: 2274606 - DNA, 25 bp, Homo sapien
gattatattctcggtcagcataagc

SEQ ID NO: 2274607 - DNA, 25 bp, Homo sapien
agatgattatattctcggtcagcat

SEQ ID NO: 2274608 - DNA, 25 bp, Homo sapien
gacatccagtgggttgtagactgtg

SEQ ID NO: 2274609 - DNA, 25 bp, Homo sapien
ccagtgggttgtagactgtgtcaaa

SEQ ID NO: 2274610 - DNA, 25 bp, Homo sapien
catccagtgggttgtagactgtgtc

SEQ ID NO: 2274611 - DNA, 25 bp, Homo sapien
ttagacatccagtgggttgtagact

SEQ ID NO: 2274612 - DNA, 25 bp, Homo sapien
tgttgttagtctggacatttgggtt

SEQ ID NO: 2274613 - DNA, 25 bp, Homo sapien
cttttgttgttagtctggacatttg

SEQ ID NO: 2274614 - DNA, 25 bp, Homo sapien
cttttctcctatcagggccagcagc

SEQ ID NO: 2274615 - DNA, 25 bp, Homo sapien
tctggagagcgcctaaggaggcttc

SEQ ID NO: 2274616 - DNA, 25 bp, Homo sapien
cacacttgggtcactgacatgcacc

SEQ ID NO: 2274617 - DNA, 25 bp, Homo sapien
cccggtattcggaaggcgctgtgca

SEQ ID NO: 2274618 - DNA, 25 bp, Homo sapien
tgggacactcttggcgatcaaggac

SEQ ID NO: 2274619 - DNA, 25 bp, Homo sapien
taggcatgatggagttccgtgtgtg

SEQ ID NO: 2274620 - DNA, 25 bp, Homo sapien
tgtaggcatgatggagttccgtgtg

SEQ ID NO: 2274621 - DNA, 25 bp, Homo sapien
aggcatgatggagttccgtgtgtgc

SEQ ID NO: 2274622 - DNA, 25 bp, Homo sapien
cttgtaggcatgatggagttccgtg

SEQ ID NO: 2274623 - DNA, 25 bp, Homo sapien
tttaagggagtggtaggctttgaca

SEQ ID NO: 2274624 - DNA, 25 bp, Homo sapien
gagtggtaggctttgacagtccagc

SEQ ID NO: 2274625 - DNA, 25 bp, Homo sapien
acagtccagctgttgacaaaatctg

SEQ ID NO: 2274626 - DNA, 25 bp, Homo sapien
cagtctttaagggagtggtaggctt

SEQ ID NO: 2274627 - DNA, 25 bp, Homo sapien
ccactatttgtagagcctgtgacca

SEQ ID NO: 2274628 - DNA, 25 bp, Homo sapien
gaaaatgatagaaacgaggcatgct

SEQ ID NO: 2274629 - DNA, 25 bp, Homo sapien
tttgtagagcctgtgaccagtatct

SEQ ID NO: 2274630 - DNA, 25 bp, Homo sapien
tagagcctgtgaccagtatctactg

SEQ ID NO: 2274631 - DNA, 25 bp, Homo sapien
ttcacggttgaaggacgccaaagaa

SEQ ID NO: 2274632 - DNA, 25 bp, Homo sapien
ggaatcttagcgacgagtcgcggac

SEQ ID NO: 2274633 - DNA, 25 bp, Homo sapien
cttcatttccttcacggttgaagga

SEQ ID NO: 2274634 - DNA, 25 bp, Homo sapien
gagtcgcggacctcagcttgtccgg

SEQ ID NO: 2274635 - DNA, 25 bp, Homo sapien
cagttttcaagtcggcggagaatcc

SEQ ID NO: 2274636 - DNA, 25 bp, Homo sapien
taaaaacagctacagcggaagactg

SEQ ID NO: 2274637 - DNA, 25 bp, Homo sapien
gagttcaaatctcaacggctgcagg

SEQ ID NO: 2274638 - DNA, 25 bp, Homo sapien
cgctgggagttagaaggcatcgcct

SEQ ID NO: 2274639 - DNA, 25 bp, Homo sapien
ggaaaaaacacgcgtgcacaacacg

SEQ ID NO: 2274640 - DNA, 25 bp, Homo sapien
aaggaaaaaacacgcgtgcacaaca

SEQ ID NO: 2274641 - DNA, 25 bp, Homo sapien
aaaaacacgcgtgcacaacacgcac

SEQ ID NO: 2274642 - DNA, 25 bp, Homo sapien
gaaaaaacacgcgtgcacaacacgc

SEQ ID NO: 2274643 - DNA, 25 bp, Homo sapien
gggatctcacccgcggctctgattc

SEQ ID NO: 2274644 - DNA, 25 bp, Homo sapien
cgcggctctgattccggcagtcagg

SEQ ID NO: 2274645 - DNA, 25 bp, Homo sapien
tcacccgcggctctgattccggcag

SEQ ID NO: 2274646 - DNA, 25 bp, Homo sapien
ctggggatctcacccgcggctctga

SEQ ID NO: 2274647 - DNA, 25 bp, Homo sapien
tggacagtacctcttgcacaacata

SEQ ID NO: 2274648 - DNA, 25 bp, Homo sapien
aacaactcctctggggataatggca

SEQ ID NO: 2274649 - DNA, 25 bp, Homo sapien
ctgtggtggaagatgtttgatggac

SEQ ID NO: 2274650 - DNA, 25 bp, Homo sapien
ttgcacaacatactgattcacccct

SEQ ID NO: 2274651 - DNA, 25 bp, Homo sapien
tggacactgttggtttgccatccat

SEQ ID NO: 2274652 - DNA, 25 bp, Homo sapien
tgtggacactgttggtttgccatcc

SEQ ID NO: 2274653 - DNA, 25 bp, Homo sapien
gtggacactgttggtttgccatcca

SEQ ID NO: 2274654 - DNA, 25 bp, Homo sapien
cattcacagcccaagagaaacggaa

SEQ ID NO: 2274655 - DNA, 25 bp, Homo sapien
cacagcccaagagaaacggaaataa

SEQ ID NO: 2274656 - DNA, 25 bp, Homo sapien
cacagacagtacatgacatcattca

SEQ ID NO: 2274657 - DNA, 25 bp, Homo sapien
aacacagacagtacatgacatcatt

SEQ ID NO: 2274658 - DNA, 25 bp, Homo sapien
tgtgtaggtccactaatatgctaat

SEQ ID NO: 2274659 - DNA, 25 bp, Homo sapien
taaagctacatatgtcatgaacgca

SEQ ID NO: 2274660 - DNA, 25 bp, Homo sapien
agtaaggcacctatgtatgtctaca

SEQ ID NO: 2274661 - DNA, 25 bp, Homo sapien
taatcttcgaacaatacgatttgaa

SEQ ID NO: 2274662 - DNA, 25 bp, Homo sapien
ccaggggcccctgagctcgaaaggc

SEQ ID NO: 2274663 - DNA, 25 bp, Homo sapien
caggggcccctgagctcgaaaggca

SEQ ID NO: 2274664 - DNA, 25 bp, Homo sapien
aaaatgctgtagatagtatcaaagt

SEQ ID NO: 2274665 - DNA, 25 bp, Homo sapien
gctgtagatagtatcaaagtgctgc

SEQ ID NO: 2274666 - DNA, 25 bp, Homo sapien
gtagatagtatcaaagtgctgcagc

SEQ ID NO: 2274667 - DNA, 25 bp, Homo sapien
aatgctgtagatagtatcaaagtgc

SEQ ID NO: 2274668 - DNA, 25 bp, Homo sapien
aggccaggatctatacttcgaaagt

SEQ ID NO: 2274669 - DNA, 25 bp, Homo sapien
ggccaggatctatacttcgaaagtg

SEQ ID NO: 2274670 - DNA, 25 bp, Homo sapien
gaggccaggatctatacttcgaaag

SEQ ID NO: 2274671 - DNA, 25 bp, Homo sapien
gccaggatctatacttcgaaagtga

SEQ ID NO: 2274672 - DNA, 25 bp, Homo sapien
gccaaaggtccctgggcttagccaa

SEQ ID NO: 2274673 - DNA, 25 bp, Homo sapien
tggccataacacaagctaagtcctt

SEQ ID NO: 2274674 - DNA, 25 bp, Homo sapien
acataactctgtatcgcccaccaag

SEQ ID NO: 2274675 - DNA, 25 bp, Homo sapien
ccttggccctgataccctgaacatg

SEQ ID NO: 2274676 - DNA, 25 bp, Homo sapien
gagcataacagttcattttgagggc

SEQ ID NO: 2274677 - DNA, 25 bp, Homo sapien
tatctgatccactcaaagttgtatc

SEQ ID NO: 2274678 - DNA, 25 bp, Homo sapien
aagttgtatcatccaggatagctgg

SEQ ID NO: 2274679 - DNA, 25 bp, Homo sapien
ttttgagggcatttagatgggcgtt

SEQ ID NO: 2274680 - DNA, 25 bp, Homo sapien
gtccacaaggtttgtctggctggcc

SEQ ID NO: 2274681 - DNA, 25 bp, Homo sapien
ctggccatggtctcaaaggattcca

SEQ ID NO: 2274682 - DNA, 25 bp, Homo sapien
ccacaaggtttgtctggctggccat

SEQ ID NO: 2274683 - DNA, 25 bp, Homo sapien
gccatggtctcaaaggattccagga

SEQ ID NO: 2274684 - DNA, 25 bp, Homo sapien
ggttccacaggtgacggatgtccaa

SEQ ID NO: 2274685 - DNA, 25 bp, Homo sapien
catgggctgccttggtccgagcttt

SEQ ID NO: 2274686 - DNA, 25 bp, Homo sapien
caactgaagtagctgtgttaaaagc

SEQ ID NO: 2274687 - DNA, 25 bp, Homo sapien
aaagctgaagaattggttgcctctc

SEQ ID NO: 2274688 - DNA, 25 bp, Homo sapien
gggtcaaggctacaccaagcaggtg

SEQ ID NO: 2274689 - DNA, 25 bp, Homo sapien
tgagcatatggttataacgggtcaa

SEQ ID NO: 2274690 - DNA, 25 bp, Homo sapien
ctggtgattaatggtgggattctcc

SEQ ID NO: 2274691 - DNA, 25 bp, Homo sapien
gcaggtgtgttatggcttcccgagt

SEQ ID NO: 2274692 - DNA, 25 bp, Homo sapien
cggctgcaaccagtacaggtgccag

SEQ ID NO: 2274693 - DNA, 25 bp, Homo sapien
cattccatagtcagttgcccataga

SEQ ID NO: 2274694 - DNA, 25 bp, Homo sapien
tcagttgcccatagactcacggctg

SEQ ID NO: 2274695 - DNA, 25 bp, Homo sapien
tcccactatgctcttcattccatag

SEQ ID NO: 2274696 - DNA, 25 bp, Homo sapien
atgctggacatcaggatagctggga

SEQ ID NO: 2274697 - DNA, 25 bp, Homo sapien
gctgggacacgttctgctagttctg

SEQ ID NO: 2274698 - DNA, 25 bp, Homo sapien
ctgaagggtctcgactcagctcttg

SEQ ID NO: 2274699 - DNA, 25 bp, Homo sapien
tttgtccctgaagggtctcgactca

SEQ ID NO: 2274700 - DNA, 25 bp, Homo sapien
atccaggtgatctagcaaaatgcac

SEQ ID NO: 2274701 - DNA, 25 bp, Homo sapien
catccaggtgatctagcaaaatgca

SEQ ID NO: 2274702 - DNA, 25 bp, Homo sapien
tccatccaggtgatctagcaaaatg

SEQ ID NO: 2274703 - DNA, 25 bp, Homo sapien
tctccatccaggtgatctagcaaaa

SEQ ID NO: 2274704 - DNA, 25 bp, Homo sapien
ggccatgggcttgtaaagtatccaa

SEQ ID NO: 2274705 - DNA, 25 bp, Homo sapien
tggacaattcgggtgaagagctgca

SEQ ID NO: 2274706 - DNA, 25 bp, Homo sapien
caaaggagttgacatcatggccatg

SEQ ID NO: 2274707 - DNA, 25 bp, Homo sapien
tgcttccagttgatcgccactgaga

SEQ ID NO: 2274708 - DNA, 25 bp, Homo sapien
ctagcactgacttgtctgccagacg

SEQ ID NO: 2274709 - DNA, 25 bp, Homo sapien
tctgccagacgtcccacagctaaag

SEQ ID NO: 2274710 - DNA, 25 bp, Homo sapien
ctggatggcatttttacatactagc

SEQ ID NO: 2274711 - DNA, 25 bp, Homo sapien
gcagctggatggcatttttacatac

SEQ ID NO: 2274712 - DNA, 25 bp, Homo sapien
ttctgcagtggtccggcaaggtcag

SEQ ID NO: 2274713 - DNA, 25 bp, Homo sapien
cagtggtccggcaaggtcagcatca

SEQ ID NO: 2274714 - DNA, 25 bp, Homo sapien
tgcagtggtccggcaaggtcagcat

SEQ ID NO: 2274715 - DNA, 25 bp, Homo sapien
gggtctccttctgcagtggtccggc

SEQ ID NO: 2274716 - DNA, 25 bp, Homo sapien
cagttgatagatgcgtcctttcaca

SEQ ID NO: 2274717 - DNA, 25 bp, Homo sapien
ctgtattggcaatttgctcaggaat

SEQ ID NO: 2274718 - DNA, 25 bp, Homo sapien
gctttggcaagcagttgatagatgc

SEQ ID NO: 2274719 - DNA, 25 bp, Homo sapien
gctgctgcagggtagacttcaactc

SEQ ID NO: 2274720 - DNA, 25 bp, Homo sapien
catgcttaattgtggactaggccta

SEQ ID NO: 2274721 - DNA, 25 bp, Homo sapien
tggtggcagcatatctgtgtgcagt

SEQ ID NO: 2274722 - DNA, 25 bp, Homo sapien
ggttaactctaaacataaacagatc

SEQ ID NO: 2274723 - DNA, 25 bp, Homo sapien
ggtcagaccattactacatgaaaac

SEQ ID NO: 2274724 - DNA, 25 bp, Homo sapien
cagggtagagtgtagcggagcaatc

SEQ ID NO: 2274725 - DNA, 25 bp, Homo sapien
aaacaagatggtagatcagtgggca

SEQ ID NO: 2274726 - DNA, 25 bp, Homo sapien
gactgcttgtctacatgttatcttc

SEQ ID NO: 2274727 - DNA, 25 bp, Homo sapien
cagtgggcagagaattctatcagtc

SEQ ID NO: 2274728 - DNA, 25 bp, Homo sapien
tcaagagcctggtctcctctgactc

SEQ ID NO: 2274729 - DNA, 25 bp, Homo sapien
tcctctgggtctatatgactgaagg

SEQ ID NO: 2274730 - DNA, 25 bp, Homo sapien
tgaagataagtcctaagatattcaa

SEQ ID NO: 2274731 - DNA, 25 bp, Homo sapien
gactgaagggttcggactcctggaa

SEQ ID NO: 2274732 - DNA, 25 bp, Homo sapien
accatgtttcctgtagactcccggg

SEQ ID NO: 2274733 - DNA, 25 bp, Homo sapien
tgaccatgtttcctgtagactcccg

SEQ ID NO: 2274734 - DNA, 25 bp, Homo sapien
atgtttcctgtagactcccggggat

SEQ ID NO: 2274735 - DNA, 25 bp, Homo sapien
gaccatgtttcctgtagactcccgg

SEQ ID NO: 2274736 - DNA, 25 bp, Homo sapien
tcaggatccgacatattgggtttat

SEQ ID NO: 2274737 - DNA, 25 bp, Homo sapien
ctgtagttgtgttttcatacatcat

SEQ ID NO: 2274738 - DNA, 25 bp, Homo sapien
tgcagatactgtaccagcatctcct

SEQ ID NO: 2274739 - DNA, 25 bp, Homo sapien
tacatcatcttgctgatgatgccaa

SEQ ID NO: 2274740 - DNA, 25 bp, Homo sapien
atcacaaagaattcaatcacctcct

SEQ ID NO: 2274741 - DNA, 25 bp, Homo sapien
ggtaccccaaattggaagaccatca

SEQ ID NO: 2274742 - DNA, 25 bp, Homo sapien
ccatcacaaagaattcaatcacctc

SEQ ID NO: 2274743 - DNA, 25 bp, Homo sapien
ccaaattggaagaccatcacaaaga

SEQ ID NO: 2274744 - DNA, 25 bp, Homo sapien
ccaggctccttagaccagatgagag

SEQ ID NO: 2274745 - DNA, 25 bp, Homo sapien
cagatgagaggcagcatacggcgca

SEQ ID NO: 2274746 - DNA, 25 bp, Homo sapien
tagagttggcggtaggcattaagca

SEQ ID NO: 2274747 - DNA, 25 bp, Homo sapien
taggcattaagcacggcttcccgga

SEQ ID NO: 2274748 - DNA, 25 bp, Homo sapien
ctgtgggaacagcagagatcagcgg

SEQ ID NO: 2274749 - DNA, 25 bp, Homo sapien
gtgggaacagcagagatcagcggtc

SEQ ID NO: 2274750 - DNA, 25 bp, Homo sapien
tgtgggaacagcagagatcagcggt

SEQ ID NO: 2274751 - DNA, 25 bp, Homo sapien
actgaatggtcccaaccgaggcatc

SEQ ID NO: 2274752 - DNA, 25 bp, Homo sapien
agacactgaatggtcccaaccgagg

SEQ ID NO: 2274753 - DNA, 25 bp, Homo sapien
tggtcccaaccgaggcatccactag

SEQ ID NO: 2274754 - DNA, 25 bp, Homo sapien
ccgaggcatccactagcagcagaga

SEQ ID NO: 2274755 - DNA, 25 bp, Homo sapien
tcactgctggtttcaactcatcctt

SEQ ID NO: 2274756 - DNA, 25 bp, Homo sapien
tgccaagaagcatgacagaggaaca

SEQ ID NO: 2274757 - DNA, 25 bp, Homo sapien
caggcgaccttctcggtggcccgct

SEQ ID NO: 2274758 - DNA, 25 bp, Homo sapien
ctcatccttctgcacaaactcacag

SEQ ID NO: 2274759 - DNA, 25 bp, Homo sapien
ctgtggaaacttctcatccagccct

SEQ ID NO: 2274760 - DNA, 25 bp, Homo sapien
ctatgctcaccagtgtgtctaaatt

SEQ ID NO: 2274761 - DNA, 25 bp, Homo sapien
ctcaccagtgtgtctaaattgcttc

SEQ ID NO: 2274762 - DNA, 25 bp, Homo sapien
cctgtccgagatgttggcaatggca

SEQ ID NO: 2274763 - DNA, 25 bp, Homo sapien
gtcgctcaaacaacctgtgttcctg

SEQ ID NO: 2274764 - DNA, 25 bp, Homo sapien
ctgaggcagccggaagggggggtga

SEQ ID NO: 2274765 - DNA, 25 bp, Homo sapien
cttttgtgactgtctcccgcagtcg

SEQ ID NO: 2274766 - DNA, 25 bp, Homo sapien
tgactgtctcccgcagtcgctcaaa

SEQ ID NO: 2274767 - DNA, 25 bp, Homo sapien
tctgccagttggtaaatgagggtca

SEQ ID NO: 2274768 - DNA, 25 bp, Homo sapien
cagttggtaaatgagggtcactgcc

SEQ ID NO: 2274769 - DNA, 25 bp, Homo sapien
ctctgccagttggtaaatgagggtc

SEQ ID NO: 2274770 - DNA, 25 bp, Homo sapien
tgccagttggtaaatgagggtcact

SEQ ID NO: 2274771 - DNA, 25 bp, Homo sapien
tctccttgggatctttggtcttgtg

SEQ ID NO: 2274772 - DNA, 25 bp, Homo sapien
ttgtgctcctgttcttcccggagaa

SEQ ID NO: 2274773 - DNA, 25 bp, Homo sapien
ctccttgggatctttggtcttgtgc

SEQ ID NO: 2274774 - DNA, 25 bp, Homo sapien
ctgttcttcccggagaactcggcgc

SEQ ID NO: 2274775 - DNA, 25 bp, Homo sapien
tccatctcgcagatgccacggatta

SEQ ID NO: 2274776 - DNA, 25 bp, Homo sapien
agttccatctcgcagatgccacgga

SEQ ID NO: 2274777 - DNA, 25 bp, Homo sapien
tcgcagatgccacggattagttctg

SEQ ID NO: 2274778 - DNA, 25 bp, Homo sapien
caacagttccatctcgcagatgcca

SEQ ID NO: 2274779 - DNA, 25 bp, Homo sapien
agaggcctgggttgttacagacttt

SEQ ID NO: 2274780 - DNA, 25 bp, Homo sapien
gaggcctgggttgttacagacttta

SEQ ID NO: 2274781 - DNA, 25 bp, Homo sapien
tagaggcctgggttgttacagactt

SEQ ID NO: 2274782 - DNA, 25 bp, Homo sapien
tccagcatggtgaacagaagacgaa

SEQ ID NO: 2274783 - DNA, 25 bp, Homo sapien
catgaggttagaccggacaatggga

SEQ ID NO: 2274784 - DNA, 25 bp, Homo sapien
ggtccaccagattgggaaagcggat

SEQ ID NO: 2274785 - DNA, 25 bp, Homo sapien
cgagcatacagatgaggagtccagg

SEQ ID NO: 2274786 - DNA, 25 bp, Homo sapien
ttccgcacttgctgagcagggtccc

SEQ ID NO: 2274787 - DNA, 25 bp, Homo sapien
aggtgggtcatcaccagccccgctg

SEQ ID NO: 2274788 - DNA, 25 bp, Homo sapien
atctcgctgacctgccccttcacct

SEQ ID NO: 2274789 - DNA, 25 bp, Homo sapien
gccccgctgttttccgcacttgctg

SEQ ID NO: 2274790 - DNA, 25 bp, Homo sapien
tatctggaaggagattatagattgc

SEQ ID NO: 2274791 - DNA, 25 bp, Homo sapien
gacaggcggctgatgatatctggaa

SEQ ID NO: 2274792 - DNA, 25 bp, Homo sapien
ttcatgatggtgtggaaaggctctt

SEQ ID NO: 2274793 - DNA, 25 bp, Homo sapien
gaaggagattatagattgcgttgcc

SEQ ID NO: 2274794 - DNA, 25 bp, Homo sapien
cgggatgtgcggaaccgctgacaca

SEQ ID NO: 2274795 - DNA, 25 bp, Homo sapien
ccacgtcgcagcttgcctacaactg

SEQ ID NO: 2274796 - DNA, 25 bp, Homo sapien
gtcaaaattgtcaagcatcttacgg

SEQ ID NO: 2274797 - DNA, 25 bp, Homo sapien
agcatcttacggaggcctcgctctg

SEQ ID NO: 2274798 - DNA, 25 bp, Homo sapien
gcctacaactgacaaaaaagcactg

SEQ ID NO: 2274799 - DNA, 25 bp, Homo sapien
tgagaaggctccataccggatcatt

SEQ ID NO: 2274800 - DNA, 25 bp, Homo sapien
catggaggccttaaacgcacattac

SEQ ID NO: 2274801 - DNA, 25 bp, Homo sapien
cgtgcagtgaactccaaggtaaacc

SEQ ID NO: 2274802 - DNA, 25 bp, Homo sapien
tactaagaagccaaggtgagaaggc

SEQ ID NO: 2274803 - DNA, 25 bp, Homo sapien
tggccaatctcaagctccttgattc

SEQ ID NO: 2274804 - DNA, 25 bp, Homo sapien
tatgacaggcccgaagcttctgctc

SEQ ID NO: 2274805 - DNA, 25 bp, Homo sapien
tggtatgacaggcccgaagcttctg

SEQ ID NO: 2274806 - DNA, 25 bp, Homo sapien
gccaatctcaagctccttgattcca

SEQ ID NO: 2274807 - DNA, 25 bp, Homo sapien
ctgtagaagccagaggctggtacct

SEQ ID NO: 2274808 - DNA, 25 bp, Homo sapien
gtagaagccagaggctggtacctag

SEQ ID NO: 2274809 - DNA, 25 bp, Homo sapien
gaagccagaggctggtacctagaac

SEQ ID NO: 2274810 - DNA, 25 bp, Homo sapien
agaagccagaggctggtacctagaa

SEQ ID NO: 2274811 - DNA, 25 bp, Homo sapien
catcacttgagaagacaactttggg

SEQ ID NO: 2274812 - DNA, 25 bp, Homo sapien
cttcctcactggactcatcacttga

SEQ ID NO: 2274813 - DNA, 25 bp, Homo sapien
tctttttggaagctcgctgctgggt

SEQ ID NO: 2274814 - DNA, 25 bp, Homo sapien
gggctctggtgtgacaaagtcattg

SEQ ID NO: 2274815 - DNA, 25 bp, Homo sapien
ctatgcaaagaattaaaggaataag

SEQ ID NO: 2274816 - DNA, 25 bp, Homo sapien
tatgcaaagaattaaaggaataaga

SEQ ID NO: 2274817 - DNA, 25 bp, Homo sapien
tgcaaagaattaaaggaataagaaa

SEQ ID NO: 2274818 - DNA, 25 bp, Homo sapien
atgcaaagaattaaaggaataagaa

SEQ ID NO: 2274819 - DNA, 25 bp, Homo sapien
tgttttcttgggtgtctcgtcttct

SEQ ID NO: 2274820 - DNA, 25 bp, Homo sapien
cacagggaggacaggaacagacttc

SEQ ID NO: 2274821 - DNA, 25 bp, Homo sapien
tgcacagggaggacaggaacagact

SEQ ID NO: 2274822 - DNA, 25 bp, Homo sapien
gcacagggaggacaggaacagactt

SEQ ID NO: 2274823 - DNA, 25 bp, Homo sapien
cctgcacagggaggacaggaacaga

SEQ ID NO: 2274824 - DNA, 25 bp, Homo sapien
aacagaattcgaattccaggtcacc

SEQ ID NO: 2274825 - DNA, 25 bp, Homo sapien
gaaacagaattcgaattccaggtca

SEQ ID NO: 2274826 - DNA, 25 bp, Homo sapien
agggaaacagaattcgaattccagg

SEQ ID NO: 2274827 - DNA, 25 bp, Homo sapien
tacaagggaaacagaattcgaattc

SEQ ID NO: 2274828 - DNA, 25 bp, Homo sapien
gctcaacgcagttcagttaggctaa

SEQ ID NO: 2274829 - DNA, 25 bp, Homo sapien
ggctaatttaagagaaagccttgca

SEQ ID NO: 2274830 - DNA, 25 bp, Homo sapien
gcattttaaagagcgtgtaggcatt

SEQ ID NO: 2274831 - DNA, 25 bp, Homo sapien
gaaaacaaggagattggcaaacata

SEQ ID NO: 2274832 - DNA, 25 bp, Homo sapien
agatggggaattggagccggagccc

SEQ ID NO: 2274833 - DNA, 25 bp, Homo sapien
ggaggactttgggaacgactgagat

SEQ ID NO: 2274834 - DNA, 25 bp, Homo sapien
gcagcaggacactagggagtcaagg

SEQ ID NO: 2274835 - DNA, 25 bp, Homo sapien
acccttacacgcttggatgaaacag

SEQ ID NO: 2274836 - DNA, 25 bp, Homo sapien
tgatcggtgctggttcccaggactg

SEQ ID NO: 2274837 - DNA, 25 bp, Homo sapien
cccgatgggaggtgatcggtgctgg

SEQ ID NO: 2274838 - DNA, 25 bp, Homo sapien
tggcccgatgggaggtgatcggtgc

SEQ ID NO: 2274839 - DNA, 25 bp, Homo sapien
gagattggcccgatgggaggtgatc

SEQ ID NO: 2274840 - DNA, 25 bp, Homo sapien
ccaaggtcttgaggcctgagctacg

SEQ ID NO: 2274841 - DNA, 25 bp, Homo sapien
gctgcgggctcaatttatagaaacc

SEQ ID NO: 2274842 - DNA, 25 bp, Homo sapien
aagatgcggctgactgtcgaacagg

SEQ ID NO: 2274843 - DNA, 25 bp, Homo sapien
tgcgcccgtaaaaccgctagtagcc

SEQ ID NO: 2274844 - DNA, 25 bp, Homo sapien
ccgcagcggcgcgaacacatccggc

SEQ ID NO: 2274845 - DNA, 25 bp, Homo sapien
ccttcaggccgtccctagcctcccg

SEQ ID NO: 2274846 - DNA, 25 bp, Homo sapien
cgccttcaggccgtccctagcctcc

SEQ ID NO: 2274847 - DNA, 25 bp, Homo sapien
ggcgcgaacacatccggcctgcgcc

SEQ ID NO: 2274848 - DNA, 25 bp, Homo sapien
ccagcccgcgccgcatcacgtcctc

SEQ ID NO: 2274849 - DNA, 25 bp, Homo sapien
ggagagaacagtgagcgcctagtgg

SEQ ID NO: 2274850 - DNA, 25 bp, Homo sapien
gtggccccggccgacacacacgcct

SEQ ID NO: 2274851 - DNA, 25 bp, Homo sapien
gcccgcccctgcaatgcggaggccg

SEQ ID NO: 2274852 - DNA, 25 bp, Homo sapien
tccttgcggggaacagctaccctgc

SEQ ID NO: 2274853 - DNA, 25 bp, Homo sapien
ccgcaaggctcgtagacgcggttcg

SEQ ID NO: 2274854 - DNA, 25 bp, Homo sapien
ctgcccccatacgactgcaaagacc

SEQ ID NO: 2274855 - DNA, 25 bp, Homo sapien
ttcgggggcggtcgcagcccagggc

SEQ ID NO: 2274856 - DNA, 25 bp, Homo sapien
cagggttagtcaccggcaggctttc

SEQ ID NO: 2274857 - DNA, 25 bp, Homo sapien
tcacccggaggagaaatcgggccag

SEQ ID NO: 2274858 - DNA, 25 bp, Homo sapien
tttccttcccggttgcaacatggcg

SEQ ID NO: 2274859 - DNA, 25 bp, Homo sapien
taatctaggaaaagcatcacccgga

SEQ ID NO: 2274860 - DNA, 25 bp, Homo sapien
tcctacaaaagggacagagactggg

SEQ ID NO: 2274861 - DNA, 25 bp, Homo sapien
aattaactggacagggcaagcccac

SEQ ID NO: 2274862 - DNA, 25 bp, Homo sapien
tacgaagcccttccaggagaagcgg

SEQ ID NO: 2274863 - DNA, 25 bp, Homo sapien
tatttaacctcagaccagggtgcgg

SEQ ID NO: 2274864 - DNA, 25 bp, Homo sapien
ccaggctggcctggcttaaggcatg

SEQ ID NO: 2274865 - DNA, 25 bp, Homo sapien
tccctgccaggctggcctggcttaa

SEQ ID NO: 2274866 - DNA, 25 bp, Homo sapien
ctgccaggctggcctggcttaaggc

SEQ ID NO: 2274867 - DNA, 25 bp, Homo sapien
gccaggctggcctggcttaaggcat

SEQ ID NO: 2274868 - DNA, 25 bp, Homo sapien
ctaagagacaagaggcaagaaggca

SEQ ID NO: 2274869 - DNA, 25 bp, Homo sapien
gaccaggcgcccaatacgaccaaat

SEQ ID NO: 2274870 - DNA, 25 bp, Homo sapien
tggtgaccaggcgcccaatacgacc

SEQ ID NO: 2274871 - DNA, 25 bp, Homo sapien
gtgaccaggcgcccaatacgaccaa

SEQ ID NO: 2274872 - DNA, 25 bp, Homo sapien
cctggtgaccaggcgcccaatacga

SEQ ID NO: 2274873 - DNA, 25 bp, Homo sapien
aatttgccatgggtggaatcatatt

SEQ ID NO: 2274874 - DNA, 25 bp, Homo sapien
tttgccatgggtggaatcatattgg

SEQ ID NO: 2274875 - DNA, 25 bp, Homo sapien
tggaatcatattggaacatgtaaac

SEQ ID NO: 2274876 - DNA, 25 bp, Homo sapien
ggtggaatcatattggaacatgtaa

SEQ ID NO: 2274877 - DNA, 25 bp, Homo sapien
tgatgacaagcttcccgttctcagc

SEQ ID NO: 2274878 - DNA, 25 bp, Homo sapien
atttccattgatgacaagcttcccg

SEQ ID NO: 2274879 - DNA, 25 bp, Homo sapien
cattgatgacaagcttcccgttctc

SEQ ID NO: 2274880 - DNA, 25 bp, Homo sapien
gatgggatttccattgatgacaagc

SEQ ID NO: 2274881 - DNA, 25 bp, Homo sapien
acaggaccatattgagggacacaag

SEQ ID NO: 2274882 - DNA, 25 bp, Homo sapien
accatcctagttgcctccccaaagc

SEQ ID NO: 2274883 - DNA, 25 bp, Homo sapien
catattgagggacacaaggttacca

SEQ ID NO: 2274884 - DNA, 25 bp, Homo sapien
atatacccaagggagccacaccatc

SEQ ID NO: 2274885 - DNA, 25 bp, Homo sapien
cacgacgtactcagcgccagcatcg

SEQ ID NO: 2274886 - DNA, 25 bp, Homo sapien
tgaagacgccagtggactccacgac

SEQ ID NO: 2274887 - DNA, 25 bp, Homo sapien
gacgccagtggactccacgacgtac

SEQ ID NO: 2274888 - DNA, 25 bp, Homo sapien
aagacgccagtggactccacgacgt

SEQ ID NO: 2274889 - DNA, 25 bp, Homo sapien
gacagttatgaacccgggtcctgcc

SEQ ID NO: 2274890 - DNA, 25 bp, Homo sapien
cagacagttatgaacccgggtcctg

SEQ ID NO: 2274891 - DNA, 25 bp, Homo sapien
agagaagcagacagttatgaacccg

SEQ ID NO: 2274892 - DNA, 25 bp, Homo sapien
gaagcagacagttatgaacccgggt

SEQ ID NO: 2274893 - DNA, 25 bp, Homo sapien
agatgatgacccttttggctccccc

SEQ ID NO: 2274894 - DNA, 25 bp, Homo sapien
catgacgaacatgggggcatcagca

SEQ ID NO: 2274895 - DNA, 25 bp, Homo sapien
ccatgacgaacatgggggcatcagc

SEQ ID NO: 2274896 - DNA, 25 bp, Homo sapien
gagggggcagagatgatgacccttt

SEQ ID NO: 2274897 - DNA, 25 bp, Homo sapien
ctgatgatcttgaggctgttgtcat

SEQ ID NO: 2274898 - DNA, 25 bp, Homo sapien
tgatgatcttgaggctgttgtcata

SEQ ID NO: 2274899 - DNA, 25 bp, Homo sapien
agcgtgtccatagggtgccaggctg

SEQ ID NO: 2274900 - DNA, 25 bp, Homo sapien
ggagcggggcgcaagtcaggggagc

SEQ ID NO: 2274901 - DNA, 25 bp, Homo sapien
tcaggggagcgtgtccatagggtgc

SEQ ID NO: 2274902 - DNA, 25 bp, Homo sapien
caggctggccgcttctccacgggcc

SEQ ID NO: 2274903 - DNA, 25 bp, Homo sapien
ccttggccaggggtgctaagcagtt

SEQ ID NO: 2274904 - DNA, 25 bp, Homo sapien
gagtccttccacgataccaaagttg

SEQ ID NO: 2274905 - DNA, 25 bp, Homo sapien
catgagtccttccacgataccaaag

SEQ ID NO: 2274906 - DNA, 25 bp, Homo sapien
atgaccttggccaggggtgctaagc

SEQ ID NO: 2274907 - DNA, 25 bp, Homo sapien
gggttgcacgcagccccggcaggga

SEQ ID NO: 2274908 - DNA, 25 bp, Homo sapien
tatgggaaagccagtccccagaacc

SEQ ID NO: 2274909 - DNA, 25 bp, Homo sapien
tgcaaaaggagtgaggccctgcagc

SEQ ID NO: 2274910 - DNA, 25 bp, Homo sapien
ctccccaccttgaaaggaaattatg

SEQ ID NO: 2274911 - DNA, 25 bp, Homo sapien
cccgcggccatcacgccacagtttc

SEQ ID NO: 2274912 - DNA, 25 bp, Homo sapien
agccccgcggccatcacgccacagt

SEQ ID NO: 2274913 - DNA, 25 bp, Homo sapien
ccccgcggccatcacgccacagttt

SEQ ID NO: 2274914 - DNA, 25 bp, Homo sapien
gagagccccgcggccatcacgccac

SEQ ID NO: 2274915 - DNA, 25 bp, Homo sapien
ttgagggggccctccgacgcctgct

SEQ ID NO: 2274916 - DNA, 25 bp, Homo sapien
cgctgttgaagtcagaggagaccac

SEQ ID NO: 2274917 - DNA, 25 bp, Homo sapien
ccttgagggggccctccgacgcctg

SEQ ID NO: 2274918 - DNA, 25 bp, Homo sapien
gtcgctgttgaagtcagaggagacc

SEQ ID NO: 2274919 - DNA, 25 bp, Homo sapien
gcaatgccagccccagcgtcaaagg

SEQ ID NO: 2274920 - DNA, 25 bp, Homo sapien
aatgccagccccagcgtcaaaggtg

SEQ ID NO: 2274921 - DNA, 25 bp, Homo sapien
gggcaatgccagccccagcgtcaaa

SEQ ID NO: 2274922 - DNA, 25 bp, Homo sapien
gagggcaatgccagccccagcgtca

SEQ ID NO: 2274923 - DNA, 25 bp, Homo sapien
gaccctgcactttttaagagccagt

SEQ ID NO: 2274924 - DNA, 25 bp, Homo sapien
agaccctgcactttttaagagccag

SEQ ID NO: 2274925 - DNA, 25 bp, Homo sapien
ttactccttggaggccatgtgggcc

SEQ ID NO: 2274926 - DNA, 25 bp, Homo sapien
tactccttggaggccatgtgggcca

SEQ ID NO: 2274927 - DNA, 25 bp, Homo sapien
ctccttggaggccatgtgggccatg

SEQ ID NO: 2274928 - DNA, 25 bp, Homo sapien
ccttggaggccatgtgggccatgag

SEQ ID NO: 2274929 - DNA, 25 bp, Homo sapien
ttgtgctcttgctggggctggtggt

SEQ ID NO: 2274930 - DNA, 25 bp, Homo sapien
ccccagcagtgagggtctctctctt

SEQ ID NO: 2274931 - DNA, 25 bp, Homo sapien
actccccagcagtgagggtctctct

SEQ ID NO: 2274932 - DNA, 25 bp, Homo sapien
gggactccccagcagtgagggtctc

SEQ ID NO: 2274933 - DNA, 25 bp, Homo sapien
gattcagtgtggtgggggactgagt

SEQ ID NO: 2274934 - DNA, 25 bp, Homo sapien
gagattcagtgtggtgggggactga

SEQ ID NO: 2274935 - DNA, 25 bp, Homo sapien
gggagattcagtgtggtgggggact

SEQ ID NO: 2274936 - DNA, 25 bp, Homo sapien
ttcagtgtggtgggggactgagtgt

SEQ ID NO: 2274937 - DNA, 25 bp, Homo sapien
tcatcctccttgcgtcctaaagctt

SEQ ID NO: 2274938 - DNA, 25 bp, Homo sapien
actcatcctccttgcgtcctaaagc

SEQ ID NO: 2274939 - DNA, 25 bp, Homo sapien
acactcatcctccttgcgtcctaaa

SEQ ID NO: 2274940 - DNA, 25 bp, Homo sapien
tttgtacacattgcacactcatcct

SEQ ID NO: 2274941 - DNA, 25 bp, Homo sapien
aggatttcgtaaacactggtaggtg

SEQ ID NO: 2274942 - DNA, 25 bp, Homo sapien
ctggtaggtgaacaagtgcaatttt

SEQ ID NO: 2274943 - DNA, 25 bp, Homo sapien
caaatacaggatttcgtaaacactg

SEQ ID NO: 2274944 - DNA, 25 bp, Homo sapien
acactggtaggtgaacaagtgcaat

SEQ ID NO: 2274945 - DNA, 25 bp, Homo sapien
ccagctggaaaagccgaagggatca

SEQ ID NO: 2274946 - DNA, 25 bp, Homo sapien
tgtgttatccccatccaagactcag

SEQ ID NO: 2274947 - DNA, 25 bp, Homo sapien
tccagcttccaggatagcagtcagc

SEQ ID NO: 2274948 - DNA, 25 bp, Homo sapien
agaaagttgctttcctcaggcagaa

SEQ ID NO: 2274949 - DNA, 25 bp, Homo sapien
gagtctggcctggatctcaagggaa

SEQ ID NO: 2274950 - DNA, 25 bp, Homo sapien
gtcaggaattcgacacggtgaaacc

SEQ ID NO: 2274951 - DNA, 25 bp, Homo sapien
aacagccttgagagcactgcttact

SEQ ID NO: 2274952 - DNA, 25 bp, Homo sapien
actgcttactgggatataaccctgg

SEQ ID NO: 2274953 - DNA, 25 bp, Homo sapien
gggctttgaccgagtactgctggat

SEQ ID NO: 2274954 - DNA, 25 bp, Homo sapien
tcgaccctagtaaatattgccctgc

SEQ ID NO: 2274955 - DNA, 25 bp, Homo sapien
gaagagacatatgattcatctgtat

SEQ ID NO: 2274956 - DNA, 25 bp, Homo sapien
gacctcaatgtttagactcgaccct

SEQ ID NO: 2274957 - DNA, 25 bp, Homo sapien
cccctgcgaatgaggtgcagtgcag

SEQ ID NO: 2274958 - DNA, 25 bp, Homo sapien
cctgaaagcgagttccggcgaagag

SEQ ID NO: 2274959 - DNA, 25 bp, Homo sapien
caggtcagccttgcaacccgttgtt

SEQ ID NO: 2274960 - DNA, 25 bp, Homo sapien
tgtttcccaactaattgtagaccca

SEQ ID NO: 2274961 - DNA, 25 bp, Homo sapien
agcggctctagccactgagcggcta

SEQ ID NO: 2274962 - DNA, 25 bp, Homo sapien
gcatctttttaataccaggaaccca

SEQ ID NO: 2274963 - DNA, 25 bp, Homo sapien
cactgagcggctaaatgaaataaag

SEQ ID NO: 2274964 - DNA, 25 bp, Homo sapien
tgttggcatctttttaataccagga

SEQ ID NO: 2274965 - DNA, 25 bp, Homo sapien
tgagatggcgataagaggaaataaa

SEQ ID NO: 2274966 - DNA, 25 bp, Homo sapien
gggcctagaggcaacataaatgttc

SEQ ID NO: 2274967 - DNA, 25 bp, Homo sapien
tccatcagatgacatgtgcatgagt

SEQ ID NO: 2274968 - DNA, 25 bp, Homo sapien
cattaggagaatgcataggtgaaac

SEQ ID NO: 2274969 - DNA, 25 bp, Homo sapien
acatttagttgtcagtgggccaatg

SEQ ID NO: 2274970 - DNA, 25 bp, Homo sapien
catttagttgtcagtgggccaatgg

SEQ ID NO: 2274971 - DNA, 25 bp, Homo sapien
ctgggtctgagagacacccaggtgg

SEQ ID NO: 2274972 - DNA, 25 bp, Homo sapien
ggtctgagagacacccaggtggaga

SEQ ID NO: 2274973 - DNA, 25 bp, Homo sapien
ttgaatccacaggtgcggaacccgt

SEQ ID NO: 2274974 - DNA, 25 bp, Homo sapien
tactgggagaaattgctgcggcacc

SEQ ID NO: 2274975 - DNA, 25 bp, Homo sapien
tctttggtggaatgcgacctgctgc

SEQ ID NO: 2274976 - DNA, 25 bp, Homo sapien
caattatgcgatatggtatgccacc

SEQ ID NO: 2274977 - DNA, 25 bp, Homo sapien
catttttctataagagttagggtct

SEQ ID NO: 2274978 - DNA, 25 bp, Homo sapien
agcacagtcagagctcattataacc

SEQ ID NO: 2274979 - DNA, 25 bp, Homo sapien
cacctggcctattctgacatttttc

SEQ ID NO: 2274980 - DNA, 25 bp, Homo sapien
gcagtagcacagtcagagctcatta

SEQ ID NO: 2274981 - DNA, 25 bp, Homo sapien
ttattgggatatgttctctcttgga

SEQ ID NO: 2274982 - DNA, 25 bp, Homo sapien
cgtgtatcatagtttgcttggttgc

SEQ ID NO: 2274983 - DNA, 25 bp, Homo sapien
tggcaccattctgtcgtgtatcata

SEQ ID NO: 2274984 - DNA, 25 bp, Homo sapien
cattctgtcgtgtatcatagtttgc

SEQ ID NO: 2274985 - DNA, 25 bp, Homo sapien
ccagcttagcaacgcagaagagtac

SEQ ID NO: 2274986 - DNA, 25 bp, Homo sapien
aatgggcattctggatctaaaccgc

SEQ ID NO: 2274987 - DNA, 25 bp, Homo sapien
tttaaactgtgagcacgcagagcac

SEQ ID NO: 2274988 - DNA, 25 bp, Homo sapien
tttagacttggcatccagcatggga

SEQ ID NO: 2274989 - DNA, 25 bp, Homo sapien
tgagagcccggctgtcgaggccccg

SEQ ID NO: 2274990 - DNA, 25 bp, Homo sapien
gatgggctctggccactttagggcc

SEQ ID NO: 2274991 - DNA, 25 bp, Homo sapien
ctggccactttagggccctgagagc

SEQ ID NO: 2274992 - DNA, 25 bp, Homo sapien
tctggatgggctctggccactttag

SEQ ID NO: 2274993 - DNA, 25 bp, Homo sapien
tcacatgtaaaaggaacttgggtag

SEQ ID NO: 2274994 - DNA, 25 bp, Homo sapien
tgagggctaggtgtgatcaacactt

SEQ ID NO: 2274995 - DNA, 25 bp, Homo sapien
tcttcattccccctcctgtggtgag

SEQ ID NO: 2274996 - DNA, 25 bp, Homo sapien
caaggtggaatgcagataactcaca

SEQ ID NO: 2274997 - DNA, 25 bp, Homo sapien
tcaaggcaaacgcaaggactggact

SEQ ID NO: 2274998 - DNA, 25 bp, Homo sapien
tcccaagttggtcacaggtggctta

SEQ ID NO: 2274999 - DNA, 25 bp, Homo sapien
tgatgtaagactagaggctggccct

SEQ ID NO: 2275000 - DNA, 25 bp, Homo sapien
ttagctccctaggtgccacagtcag

SEQ ID NO: 2275001 - DNA, 25 bp, Homo sapien
caagggaaggatttgctatgacctc

SEQ ID NO: 2275002 - DNA, 25 bp, Homo sapien
gaaggatttgctatgacctcataga

SEQ ID NO: 2275003 - DNA, 25 bp, Homo sapien
ctaaaactgggggtcggtgctcaag

SEQ ID NO: 2275004 - DNA, 25 bp, Homo sapien
tgctcaagggaaggatttgctatga

SEQ ID NO: 2275005 - DNA, 25 bp, Homo sapien
caaaggaatactgagctgatggtgt

SEQ ID NO: 2275006 - DNA, 25 bp, Homo sapien
aaaggaatactgagctgatggtgtc

SEQ ID NO: 2275007 - DNA, 25 bp, Homo sapien
cagccctcctgattgcaaaggaata

SEQ ID NO: 2275008 - DNA, 25 bp, Homo sapien
cctcctgattgcaaaggaatactga

SEQ ID NO: 2275009 - DNA, 25 bp, Homo sapien
agctcttagagatccgtgctgccac

SEQ ID NO: 2275010 - DNA, 25 bp, Homo sapien
tgacctgaccccgtataagacggcg

SEQ ID NO: 2275011 - DNA, 25 bp, Homo sapien
taagacggcggagcatcataaggac

SEQ ID NO: 2275012 - DNA, 25 bp, Homo sapien
gaaacatatgcgcaaacacaacccg

SEQ ID NO: 2275013 - DNA, 25 bp, Homo sapien
ttcaagtgccacaactgtcatcggg

SEQ ID NO: 2275014 - DNA, 25 bp, Homo sapien
tcatcgggcgtacacggatgcagcc

SEQ ID NO: 2275015 - DNA, 25 bp, Homo sapien
gaggtgcacctgtctacgcacacag

SEQ ID NO: 2275016 - DNA, 25 bp, Homo sapien
cactatctgcagtcgggcatacaca

SEQ ID NO: 2275017 - DNA, 25 bp, Homo sapien
caagtcggagatgcagatccactcc

SEQ ID NO: 2275018 - DNA, 25 bp, Homo sapien
gccggatgtgctcactgacattcta

SEQ ID NO: 2275019 - DNA, 25 bp, Homo sapien
tgacattctactccaagtcggagat

SEQ ID NO: 2275020 - DNA, 25 bp, Homo sapien
tccactccaagtcacacaccgagac

SEQ ID NO: 2275021 - DNA, 25 bp, Homo sapien
ctgtcctaggcatttgctcgccctt

SEQ ID NO: 2275022 - DNA, 25 bp, Homo sapien
actgtcctaggcatttgctcgccct

SEQ ID NO: 2275023 - DNA, 25 bp, Homo sapien
tcagggctgcccgagatgaatgacc

SEQ ID NO: 2275024 - DNA, 25 bp, Homo sapien
gaccatcagaaagacggcaagacct

SEQ ID NO: 2275025 - DNA, 25 bp, Homo sapien
tagcatcgaccctaaccgaggaagg

SEQ ID NO: 2275026 - DNA, 25 bp, Homo sapien
catttcggctcccatgattgtctca

SEQ ID NO: 2275027 - DNA, 25 bp, Homo sapien
cacccgtctttggattgctggctgg

SEQ ID NO: 2275028 - DNA, 25 bp, Homo sapien
gcctggcccctgtaacctagacaat

SEQ ID NO: 2275029 - DNA, 25 bp, Homo sapien
tcttgtatccacgtagagggtagca

SEQ ID NO: 2275030 - DNA, 25 bp, Homo sapien
gactgactgctgacaaataattcct

SEQ ID NO: 2275031 - DNA, 25 bp, Homo sapien
actgaacatgaatattcacttgata

SEQ ID NO: 2275032 - DNA, 25 bp, Homo sapien
atattcacttgataaacttggtcca

SEQ ID NO: 2275033 - DNA, 25 bp, Homo sapien
catgaatattcacttgataaacttg

SEQ ID NO: 2275034 - DNA, 25 bp, Homo sapien
tattcacttgataaacttggtccat

SEQ ID NO: 2275035 - DNA, 25 bp, Homo sapien
tgctttctcccagcctggagggcag

SEQ ID NO: 2275036 - DNA, 25 bp, Homo sapien
aaaaacaccagagtttcactcgtca

SEQ ID NO: 2275037 - DNA, 25 bp, Homo sapien
cctgagaagctgggaatacaaaaaa

SEQ ID NO: 2275038 - DNA, 25 bp, Homo sapien
catactggccaggctaagtctcgaa

SEQ ID NO: 2275039 - DNA, 25 bp, Homo sapien
ggccactaaactctatggcgggctt

SEQ ID NO: 2275040 - DNA, 25 bp, Homo sapien
ctctatggcgggcttccggccgtac

SEQ ID NO: 2275041 - DNA, 25 bp, Homo sapien
acctccctgaagagtcgctctggcc

SEQ ID NO: 2275042 - DNA, 25 bp, Homo sapien
ctggaagcttcgacctccagcgcac

SEQ ID NO: 2275043 - DNA, 25 bp, Homo sapien
tgggtcaggctctgcgggccgctac

SEQ ID NO: 2275044 - DNA, 25 bp, Homo sapien
cctgggtcaggctctgcgggccgct

SEQ ID NO: 2275045 - DNA, 25 bp, Homo sapien
ctgggtcaggctctgcgggccgcta

SEQ ID NO: 2275046 - DNA, 25 bp, Homo sapien
tcccttaaagacaccgcccagcgac

SEQ ID NO: 2275047 - DNA, 25 bp, Homo sapien
ggctcccgccgactgcttcgtcgta

SEQ ID NO: 2275048 - DNA, 25 bp, Homo sapien
aaagacaccgcccagcgaccgtggg

SEQ ID NO: 2275049 - DNA, 25 bp, Homo sapien
cgaccgtgggctcccgccgactgct

SEQ ID NO: 2275050 - DNA, 25 bp, Homo sapien
aaggagaaatgggtgtcgcatggtg

SEQ ID NO: 2275051 - DNA, 25 bp, Homo sapien
ggagaaatgggtgtcgcatggtgtc

SEQ ID NO: 2275052 - DNA, 25 bp, Homo sapien
agaaatgggtgtcgcatggtgtcca

SEQ ID NO: 2275053 - DNA, 25 bp, Homo sapien
gaaatgggtgtcgcatggtgtccac

SEQ ID NO: 2275054 - DNA, 25 bp, Homo sapien
catggagcggtctaaaattctgatc

SEQ ID NO: 2275055 - DNA, 25 bp, Homo sapien
ctgagggactggattgtaaaggcac

SEQ ID NO: 2275056 - DNA, 25 bp, Homo sapien
cggttctgcggtgaggaatcagaca

SEQ ID NO: 2275057 - DNA, 25 bp, Homo sapien
taaagtcagccacttcgcaaggctg

SEQ ID NO: 2275058 - DNA, 25 bp, Homo sapien
ggggacttgggctcaggatgtccag

SEQ ID NO: 2275059 - DNA, 25 bp, Homo sapien
cactgcactgagtgtgggggacttg

SEQ ID NO: 2275060 - DNA, 25 bp, Homo sapien
ggacttgggctcaggatgtccagag

SEQ ID NO: 2275061 - DNA, 25 bp, Homo sapien
ctgcactgagtgtgggggacttggg

SEQ ID NO: 2275062 - DNA, 25 bp, Homo sapien
taggagcagaaattgctcctggttc

SEQ ID NO: 2275063 - DNA, 25 bp, Homo sapien
ttctccaaacacgtagacaccaggg

SEQ ID NO: 2275064 - DNA, 25 bp, Homo sapien
ccttggccgacttggctaggagcag

SEQ ID NO: 2275065 - DNA, 25 bp, Homo sapien
cattgggcatgtccagcagttctcc

SEQ ID NO: 2275066 - DNA, 25 bp, Homo sapien
cacgcttctctgagggctattcaag

SEQ ID NO: 2275067 - DNA, 25 bp, Homo sapien
gctggtttgcttgttcactggttac

SEQ ID NO: 2275068 - DNA, 25 bp, Homo sapien
cactggttacttctgcaagttggca

SEQ ID NO: 2275069 - DNA, 25 bp, Homo sapien
tattggatcacaaaatgagccctgc

SEQ ID NO: 2275070 - DNA, 25 bp, Homo sapien
caggattctgccatatcggtttcac

SEQ ID NO: 2275071 - DNA, 25 bp, Homo sapien
tctgccatatcggtttcacctcctg

SEQ ID NO: 2275072 - DNA, 25 bp, Homo sapien
tgggatacatgagcttttgtttgtt

SEQ ID NO: 2275073 - DNA, 25 bp, Homo sapien
gagacaggattctgccatatcggtt

SEQ ID NO: 2275074 - DNA, 25 bp, Homo sapien
gccctcttgctccatacgtcatcca

SEQ ID NO: 2275075 - DNA, 25 bp, Homo sapien
ggcttttgtttacactattctccca

SEQ ID NO: 2275076 - DNA, 25 bp, Homo sapien
tctcccaaaccacaatgccctcttg

SEQ ID NO: 2275077 - DNA, 25 bp, Homo sapien
ctctgatcactcttcacataggaag

SEQ ID NO: 2275078 - DNA, 25 bp, Homo sapien
caaacactgtgagcagccggaaggt

SEQ ID NO: 2275079 - DNA, 25 bp, Homo sapien
tagaggcaaagtcactctcagccag

SEQ ID NO: 2275080 - DNA, 25 bp, Homo sapien
ggtagaggcaaagtcactctcagcc

SEQ ID NO: 2275081 - DNA, 25 bp, Homo sapien
taagtagtcagcgtatgtcccataa

SEQ ID NO: 2275082 - DNA, 25 bp, Homo sapien
gcagccagggtgacaactgagaggt

SEQ ID NO: 2275083 - DNA, 25 bp, Homo sapien
tagtggaggaagattccgggcttca

SEQ ID NO: 2275084 - DNA, 25 bp, Homo sapien
ggtgtcgaagcttattcttctgagc

SEQ ID NO: 2275085 - DNA, 25 bp, Homo sapien
tctgttagtggaggaagattccggg

SEQ ID NO: 2275086 - DNA, 25 bp, Homo sapien
tgacgctccgtagtagagaagggct

SEQ ID NO: 2275087 - DNA, 25 bp, Homo sapien
gatttgtgacgctccgtagtagaga

SEQ ID NO: 2275088 - DNA, 25 bp, Homo sapien
ccgcggagatcaggccaggatttgt

SEQ ID NO: 2275089 - DNA, 25 bp, Homo sapien
tcaggccaggatttgtgacgctccg

SEQ ID NO: 2275090 - DNA, 25 bp, Homo sapien
acacagcctcaatcacaaggtcttc

SEQ ID NO: 2275091 - DNA, 25 bp, Homo sapien
acagcctcaatcacaaggtcttcca

SEQ ID NO: 2275092 - DNA, 25 bp, Homo sapien
ccagcaacactgcatatgggataca

SEQ ID NO: 2275093 - DNA, 25 bp, Homo sapien
cgcacattacgcagggcaagagcct

SEQ ID NO: 2275094 - DNA, 25 bp, Homo sapien
acctcgagccgctggttgcgctggt

SEQ ID NO: 2275095 - DNA, 25 bp, Homo sapien
ctgtagtcaacctcgagccgctggt

SEQ ID NO: 2275096 - DNA, 25 bp, Homo sapien
atgtcccgcccgatgctgtagtcaa

SEQ ID NO: 2275097 - DNA, 25 bp, Homo sapien
aggtcctggcgctggatgtcccgcc

SEQ ID NO: 2275098 - DNA, 25 bp, Homo sapien
gggcacctagaaaccacctgtgata

SEQ ID NO: 2275099 - DNA, 25 bp, Homo sapien
gaccttgctggttaggatcccctta

SEQ ID NO: 2275100 - DNA, 25 bp, Homo sapien
cattttgagtctgagttgggaaccc

SEQ ID NO: 2275101 - DNA, 25 bp, Homo sapien
taacactcctagcagtgggatggac

SEQ ID NO: 2275102 - DNA, 25 bp, Homo sapien
aatgcctgacagcacgacctcacag

SEQ ID NO: 2275103 - DNA, 25 bp, Homo sapien
tgttggttggcacggctcacctgct

SEQ ID NO: 2275104 - DNA, 25 bp, Homo sapien
tgctcctcaatgcctgacagcacga

SEQ ID NO: 2275105 - DNA, 25 bp, Homo sapien
ccttgtgttggttggcacggctcac

SEQ ID NO: 2275106 - DNA, 25 bp, Homo sapien
ccaggatgaaaggaatggggatagc

SEQ ID NO: 2275107 - DNA, 25 bp, Homo sapien
gaatggggatagcaaggaaggttcc

SEQ ID NO: 2275108 - DNA, 25 bp, Homo sapien
aatggggatagcaaggaaggttcca

SEQ ID NO: 2275109 - DNA, 25 bp, Homo sapien
ctaccaggatgaaaggaatggggat

SEQ ID NO: 2275110 - DNA, 25 bp, Homo sapien
tcagtcaggtgttgctcagggtcct

SEQ ID NO: 2275111 - DNA, 25 bp, Homo sapien
cctttgaggctttcttgctgggctg

SEQ ID NO: 2275112 - DNA, 25 bp, Homo sapien
caggagctggttccctcagctcagt

SEQ ID NO: 2275113 - DNA, 25 bp, Homo sapien
gctgctgccgtcgtaactttaatgg

SEQ ID NO: 2275114 - DNA, 25 bp, Homo sapien
gcaccctgcaagtgagcagttcctg

SEQ ID NO: 2275115 - DNA, 25 bp, Homo sapien
tgcaagtgagcagttcctgctaccc

SEQ ID NO: 2275116 - DNA, 25 bp, Homo sapien
ccctgcaagtgagcagttcctgcta

SEQ ID NO: 2275117 - DNA, 25 bp, Homo sapien
agggcaccctgcaagtgagcagttc

SEQ ID NO: 2275118 - DNA, 25 bp, Homo sapien
tggaccaaatcttggcgctccctcg

SEQ ID NO: 2275119 - DNA, 25 bp, Homo sapien
tcaattcgacttggaccaaatcttg

SEQ ID NO: 2275120 - DNA, 25 bp, Homo sapien
tcgacttggaccaaatcttggcgct

SEQ ID NO: 2275121 - DNA, 25 bp, Homo sapien
gacttggaccaaatcttggcgctcc

SEQ ID NO: 2275122 - DNA, 25 bp, Homo sapien
tcagaggctgctcaataggtcaggg

SEQ ID NO: 2275123 - DNA, 25 bp, Homo sapien
tctcaacatgttaagaaacggctgc

SEQ ID NO: 2275124 - DNA, 25 bp, Homo sapien
gaacctaggattatcagctggccag

SEQ ID NO: 2275125 - DNA, 25 bp, Homo sapien
tttgcctcctccctagagaaggtgt

SEQ ID NO: 2275126 - DNA, 25 bp, Homo sapien
agatttatttctgcgtcatattata

SEQ ID NO: 2275127 - DNA, 25 bp, Homo sapien
tatttctgcgtcatattatatatag

SEQ ID NO: 2275128 - DNA, 25 bp, Homo sapien
tagatttatttctgcgtcatattat

SEQ ID NO: 2275129 - DNA, 25 bp, Homo sapien
atttatttctgcgtcatattatata

SEQ ID NO: 2275130 - DNA, 25 bp, Homo sapien
cagcaaatagtatctgggtctcttc

SEQ ID NO: 2275131 - DNA, 25 bp, Homo sapien
agccatacagcttgggatctaggcc

SEQ ID NO: 2275132 - DNA, 25 bp, Homo sapien
caaagccatacagcttgggatctag

SEQ ID NO: 2275133 - DNA, 25 bp, Homo sapien
ccagggactcagcaaatagtatctg

SEQ ID NO: 2275134 - DNA, 25 bp, Homo sapien
catagtctgaactcaagctccttga

SEQ ID NO: 2275135 - DNA, 25 bp, Homo sapien
aggtgggaggacatagtctgaactc

SEQ ID NO: 2275136 - DNA, 25 bp, Homo sapien
tgagagcagaaacagcggccatcat

SEQ ID NO: 2275137 - DNA, 25 bp, Homo sapien
ggccatcatttgtatgtccagtgcc

SEQ ID NO: 2275138 - DNA, 25 bp, Homo sapien
acagaagtccaatggcttcttcttg

SEQ ID NO: 2275139 - DNA, 25 bp, Homo sapien
tcaagttcattaccaactctttccc

SEQ ID NO: 2275140 - DNA, 25 bp, Homo sapien
ggacagaagtccaatggcttcttct

SEQ ID NO: 2275141 - DNA, 25 bp, Homo sapien
aggacagaagtccaatggcttcttc

SEQ ID NO: 2275142 - DNA, 25 bp, Homo sapien
cagcgggtcacagaatgaagccttt

SEQ ID NO: 2275143 - DNA, 25 bp, Homo sapien
tataggattgtctatcttgccccat

SEQ ID NO: 2275144 - DNA, 25 bp, Homo sapien
caagacatggtctcaaaagcaaaat

SEQ ID NO: 2275145 - DNA, 25 bp, Homo sapien
atttgccaattgactgataaatgaa

SEQ ID NO: 2275146 - DNA, 25 bp, Homo sapien
atagaaaatttcctgcagggcgtgg

SEQ ID NO: 2275147 - DNA, 25 bp, Homo sapien
gaagccgattcccaatacagatgaa

SEQ ID NO: 2275148 - DNA, 25 bp, Homo sapien
gcaccactggtgacttcagataaag

SEQ ID NO: 2275149 - DNA, 25 bp, Homo sapien
tactaaagccgaatgtcagggttgg

SEQ ID NO: 2275150 - DNA, 25 bp, Homo sapien
ggagctgcctttggtagtacaagtt

SEQ ID NO: 2275151 - DNA, 25 bp, Homo sapien
ttaccattgatgacttcgcctctgc

SEQ ID NO: 2275152 - DNA, 25 bp, Homo sapien
gagcagactggttcctaactctctc

SEQ ID NO: 2275153 - DNA, 25 bp, Homo sapien
ccaactcctggctcttaacgtaagt

SEQ ID NO: 2275154 - DNA, 25 bp, Homo sapien
tccagcgctcccgaaaccatcgcac

SEQ ID NO: 2275155 - DNA, 25 bp, Homo sapien
atcctccagcgctcccgaaaccatc

SEQ ID NO: 2275156 - DNA, 25 bp, Homo sapien
gctcccgaaaccatcgcacggggga

SEQ ID NO: 2275157 - DNA, 25 bp, Homo sapien
gaaaccatcgcacgggggaccagga

SEQ ID NO: 2275158 - DNA, 25 bp, Homo sapien
cggaggactgttcgggattcagaca

SEQ ID NO: 2275159 - DNA, 25 bp, Homo sapien
ccgggagacacggaggactgttcgg

SEQ ID NO: 2275160 - DNA, 25 bp, Homo sapien
ctgttcgggattcagacagtggact

SEQ ID NO: 2275161 - DNA, 25 bp, Homo sapien
ttcgggattcagacagtggactgga

SEQ ID NO: 2275162 - DNA, 25 bp, Homo sapien
gtacctgctgtcatgcctgcctgaa

SEQ ID NO: 2275163 - DNA, 25 bp, Homo sapien
tacgtagcatacaattaaggccctg

SEQ ID NO: 2275164 - DNA, 25 bp, Homo sapien
gataaagtaattgaaccagagagcc

SEQ ID NO: 2275165 - DNA, 25 bp, Homo sapien
ccttcttgctcgtggttggactcag

SEQ ID NO: 2275166 - DNA, 25 bp, Homo sapien
tccgtcctcagtcatctgtacctag

SEQ ID NO: 2275167 - DNA, 25 bp, Homo sapien
caattataactcgaatcgctcccat

SEQ ID NO: 2275168 - DNA, 25 bp, Homo sapien
ctcacttttattcgcctggtccttc

SEQ ID NO: 2275169 - DNA, 25 bp, Homo sapien
tctatttctcttcatccgtcctcag

SEQ ID NO: 2275170 - DNA, 25 bp, Homo sapien
agggctgcggccgtccggagggcgg

SEQ ID NO: 2275171 - DNA, 25 bp, Homo sapien
ggaacccgcttataaggcggcgctg

SEQ ID NO: 2275172 - DNA, 25 bp, Homo sapien
gctcggccgcggtagctcgatcccg

SEQ ID NO: 2275173 - DNA, 25 bp, Homo sapien
gcggccggaacctggcgcggtggcg

SEQ ID NO: 2275174 - DNA, 25 bp, Homo sapien
ggccgctgcctccacgcttttctcc

SEQ ID NO: 2275175 - DNA, 25 bp, Homo sapien
tcggccgctgcctccacgcttttct

SEQ ID NO: 2275176 - DNA, 25 bp, Homo sapien
tggcgctcaactcggccgctgcctc

SEQ ID NO: 2275177 - DNA, 25 bp, Homo sapien
cttggcgctcaactcggccgctgcc

SEQ ID NO: 2275178 - DNA, 25 bp, Homo sapien
aaagcgacaacatggctccagaaca

SEQ ID NO: 2275179 - DNA, 25 bp, Homo sapien
catgcacacatgtaactgacacggg

SEQ ID NO: 2275180 - DNA, 25 bp, Homo sapien
gaacatctacgtctccacatgcaca

SEQ ID NO: 2275181 - DNA, 25 bp, Homo sapien
catgtaactgacacgggcagtccca

SEQ ID NO: 2275182 - DNA, 25 bp, Homo sapien
gccgacagccatgcacagacacagt

SEQ ID NO: 2275183 - DNA, 25 bp, Homo sapien
tggcccagcgttgggccattctggt

SEQ ID NO: 2275184 - DNA, 25 bp, Homo sapien
gacacagttagagaggagcacccac

SEQ ID NO: 2275185 - DNA, 25 bp, Homo sapien
agcacccacgcgatgggagacacat

SEQ ID NO: 2275186 - DNA, 25 bp, Homo sapien
gtgtctccctaatcctcaggcccct

SEQ ID NO: 2275187 - DNA, 25 bp, Homo sapien
tgtgtctccctaatcctcaggcccc

SEQ ID NO: 2275188 - DNA, 25 bp, Homo sapien
ctgtgtctccctaatcctcaggccc

SEQ ID NO: 2275189 - DNA, 25 bp, Homo sapien
ttcctgaggactctctctcctgggc

SEQ ID NO: 2275190 - DNA, 25 bp, Homo sapien
ctctggggccttttcctgaggactc

SEQ ID NO: 2275191 - DNA, 25 bp, Homo sapien
ttttcctgaggactctctctcctgg

SEQ ID NO: 2275192 - DNA, 25 bp, Homo sapien
gggccttttcctgaggactctctct

SEQ ID NO: 2275193 - DNA, 25 bp, Homo sapien
tttctttcgctctttccggcttgcc

SEQ ID NO: 2275194 - DNA, 25 bp, Homo sapien
tctttcgctctttccggcttgcctt

SEQ ID NO: 2275195 - DNA, 25 bp, Homo sapien
gctctttccggcttgccttctcctc

SEQ ID NO: 2275196 - DNA, 25 bp, Homo sapien
tctttctttcgctctttccggcttg

SEQ ID NO: 2275197 - DNA, 25 bp, Homo sapien
caggagagggagtagcctcaggctg

SEQ ID NO: 2275198 - DNA, 25 bp, Homo sapien
ggaccaggagagggagtagcctcag

SEQ ID NO: 2275199 - DNA, 25 bp, Homo sapien
accaggagagggagtagcctcaggc

SEQ ID NO: 2275200 - DNA, 25 bp, Homo sapien
tcaggctggctgcatgccttgccca

SEQ ID NO: 2275201 - DNA, 25 bp, Homo sapien
tctccatcctcggcagtttcttctt

SEQ ID NO: 2275202 - DNA, 25 bp, Homo sapien
ctcctctccatcctcggcagtttct

SEQ ID NO: 2275203 - DNA, 25 bp, Homo sapien
tccatcctcggcagtttcttcttct

SEQ ID NO: 2275204 - DNA, 25 bp, Homo sapien
cctctccatcctcggcagtttcttc

SEQ ID NO: 2275205 - DNA, 25 bp, Homo sapien
gaaatgggtcattggggaagggcag

SEQ ID NO: 2275206 - DNA, 25 bp, Homo sapien
gagccagaaatgggtcattggggaa

SEQ ID NO: 2275207 - DNA, 25 bp, Homo sapien
ggagccagaaatgggtcattgggga

SEQ ID NO: 2275208 - DNA, 25 bp, Homo sapien
tcagcgcgggcccttcatcatcctc

SEQ ID NO: 2275209 - DNA, 25 bp, Homo sapien
ttcatcatcctcttcttcttcttcc

SEQ ID NO: 2275210 - DNA, 25 bp, Homo sapien
tcatcctcttcttcttcttcctcat

SEQ ID NO: 2275211 - DNA, 25 bp, Homo sapien
catcatcctcttcttcttcttcctc

SEQ ID NO: 2275212 - DNA, 25 bp, Homo sapien
ggatctgggtccaaatccaaagggc

SEQ ID NO: 2275213 - DNA, 25 bp, Homo sapien
tgggtccaaatccaaagggcgccca

SEQ ID NO: 2275214 - DNA, 25 bp, Homo sapien
agcccggctgcatccctgacagccc

SEQ ID NO: 2275215 - DNA, 25 bp, Homo sapien
tctgggtccaaatccaaagggcgcc

SEQ ID NO: 2275216 - DNA, 25 bp, Homo sapien
gagagaatgggggagctgtaaaatg

SEQ ID NO: 2275217 - DNA, 25 bp, Homo sapien
agagaatgggggagctgtaaaatgg

SEQ ID NO: 2275218 - DNA, 25 bp, Homo sapien
gagaatgggggagctgtaaaatggg

SEQ ID NO: 2275219 - DNA, 25 bp, Homo sapien
ctgtcttctgccgtttgggatccgc

SEQ ID NO: 2275220 - DNA, 25 bp, Homo sapien
tttctgtcttctgccgtttgggatc

SEQ ID NO: 2275221 - DNA, 25 bp, Homo sapien
cttctgccgtttgggatccgcttca

SEQ ID NO: 2275222 - DNA, 25 bp, Homo sapien
tgtcttctgccgtttgggatccgct

SEQ ID NO: 2275223 - DNA, 25 bp, Homo sapien
tggagaggcggaaatgagaaggctg

SEQ ID NO: 2275224 - DNA, 25 bp, Homo sapien
agtgtctggagaggcggaaatgaga

SEQ ID NO: 2275225 - DNA, 25 bp, Homo sapien
gagaggagcaattgggggccagctg

SEQ ID NO: 2275226 - DNA, 25 bp, Homo sapien
agaggagcaattgggggccagctgg

SEQ ID NO: 2275227 - DNA, 25 bp, Homo sapien
cagggatcaggcaggatagggatgg

SEQ ID NO: 2275228 - DNA, 25 bp, Homo sapien
gggatctgagggagatccagggatc

SEQ ID NO: 2275229 - DNA, 25 bp, Homo sapien
gggatgcagaggttaggtgggagag

SEQ ID NO: 2275230 - DNA, 25 bp, Homo sapien
gatctgagggagatccagggatcag

SEQ ID NO: 2275231 - DNA, 25 bp, Homo sapien
cgcgaccatttctttattaaattat

SEQ ID NO: 2275232 - DNA, 25 bp, Homo sapien
aagggaggggaggggggcagctgtg

SEQ ID NO: 2275233 - DNA, 25 bp, Homo sapien
gaggggggcagctgtggggctcggc

SEQ ID NO: 2275234 - DNA, 25 bp, Homo sapien
gggcagctgtggggctcggccccaa

SEQ ID NO: 2275235 - DNA, 25 bp, Homo sapien
tgggatgccgttctgctggtctctg

SEQ ID NO: 2275236 - DNA, 25 bp, Homo sapien
gctgggatgccgttctgctggtctc

SEQ ID NO: 2275237 - DNA, 25 bp, Homo sapien
agggccgtggcggagagcagacaga

SEQ ID NO: 2275238 - DNA, 25 bp, Homo sapien
acagagcaaagtggccgtcgtggct

SEQ ID NO: 2275239 - DNA, 25 bp, Homo sapien
agcccaggaactgagcctcccacat

SEQ ID NO: 2275240 - DNA, 25 bp, Homo sapien
ctgcagaaacagcaagcccaggaac

SEQ ID NO: 2275241 - DNA, 25 bp, Homo sapien
aaagcggctgcagaaacagcaagcc

SEQ ID NO: 2275242 - DNA, 25 bp, Homo sapien
ggagccacccaaagcggctgcagaa

SEQ ID NO: 2275243 - DNA, 25 bp, Homo sapien
ctaggtgagcaaaagagaggccaag

SEQ ID NO: 2275244 - DNA, 25 bp, Homo sapien
gagcctgggtgtttcccgagggaga

SEQ ID NO: 2275245 - DNA, 25 bp, Homo sapien
ggctggaggtcaaccctcccgccat

SEQ ID NO: 2275246 - DNA, 25 bp, Homo sapien
acctcaggacctttgtggccacaga

SEQ ID NO: 2275247 - DNA, 25 bp, Homo sapien
gggcccacaccaccgggacctcagc

SEQ ID NO: 2275248 - DNA, 25 bp, Homo sapien
tgggcccacaccaccgggacctcag

SEQ ID NO: 2275249 - DNA, 25 bp, Homo sapien
gtgacccctgctcttcgcagaaggc

SEQ ID NO: 2275250 - DNA, 25 bp, Homo sapien
tgacccctgctcttcgcagaaggct

SEQ ID NO: 2275251 - DNA, 25 bp, Homo sapien
tgatgctgccaagtgacccctgctc

SEQ ID NO: 2275252 - DNA, 25 bp, Homo sapien
gacccctgctcttcgcagaaggctg

SEQ ID NO: 2275253 - DNA, 25 bp, Homo sapien
aagagttctcttgaccaccaaccgt

SEQ ID NO: 2275254 - DNA, 25 bp, Homo sapien
gaggatgagaaagcccgccccaaga

SEQ ID NO: 2275255 - DNA, 25 bp, Homo sapien
tctgttggactggccgcatccactt

SEQ ID NO: 2275256 - DNA, 25 bp, Homo sapien
atgcaggcagccacccgttgaggat

SEQ ID NO: 2275257 - DNA, 25 bp, Homo sapien
gaggagggcgccgccgggtgagggc

SEQ ID NO: 2275258 - DNA, 25 bp, Homo sapien
caggaggagggcgccgccgggtgag

SEQ ID NO: 2275259 - DNA, 25 bp, Homo sapien
cccaggaggagggcgccgccgggtg

SEQ ID NO: 2275260 - DNA, 25 bp, Homo sapien
ggccaggggatggccgggggcggca

SEQ ID NO: 2275261 - DNA, 25 bp, Homo sapien
acgctcagcaccgtgtagcggcggg

SEQ ID NO: 2275262 - DNA, 25 bp, Homo sapien
cgctcagcaccgtgtagcggcgggg

SEQ ID NO: 2275263 - DNA, 25 bp, Homo sapien
cctcccgctgcgcaggcctccggga

SEQ ID NO: 2275264 - DNA, 25 bp, Homo sapien
gctcagcaccgtgtagcggcggggc

SEQ ID NO: 2275265 - DNA, 25 bp, Homo sapien
tccctgaggtgcaccgcggcgcggt

SEQ ID NO: 2275266 - DNA, 25 bp, Homo sapien
ctgggcgcagccatagcgagaagtc

SEQ ID NO: 2275267 - DNA, 25 bp, Homo sapien
gcagccatagcgagaagtccccgcg

SEQ ID NO: 2275268 - DNA, 25 bp, Homo sapien
gagagggcgcggtccctgaggtgca

SEQ ID NO: 2275269 - DNA, 25 bp, Homo sapien
ccagcccttctcccatcgtcccgcc

SEQ ID NO: 2275270 - DNA, 25 bp, Homo sapien
cagcccttctcccatcgtcccgccc

SEQ ID NO: 2275271 - DNA, 25 bp, Homo sapien
gaaggagcagttcaaaatgacccag

SEQ ID NO: 2275272 - DNA, 25 bp, Homo sapien
gccatctctgtaggtgaggatgcag

SEQ ID NO: 2275273 - DNA, 25 bp, Homo sapien
cccggttccggaaccaatgcacaga

SEQ ID NO: 2275274 - DNA, 25 bp, Homo sapien
ccagaacagtgaggttatacatgat

SEQ ID NO: 2275275 - DNA, 25 bp, Homo sapien
cagcaatataaaggggtcgaacagt

SEQ ID NO: 2275276 - DNA, 25 bp, Homo sapien
tgagacccacagcaatgacgtaggc

SEQ ID NO: 2275277 - DNA, 25 bp, Homo sapien
acagcaatgacgtaggccactcgct

SEQ ID NO: 2275278 - DNA, 25 bp, Homo sapien
acgtaggccactcgctgccgagaac

SEQ ID NO: 2275279 - DNA, 25 bp, Homo sapien
gctgttcctgcagatggatatggca

SEQ ID NO: 2275280 - DNA, 25 bp, Homo sapien
tgctccagcgtacactgtcaaggga

SEQ ID NO: 2275281 - DNA, 25 bp, Homo sapien
gaagggtaaagtcgccattgtctcc

SEQ ID NO: 2275282 - DNA, 25 bp, Homo sapien
tggctcacatcctctagtcgaaggg

SEQ ID NO: 2275283 - DNA, 25 bp, Homo sapien
gcatcacagggtgggtttgcctagt

SEQ ID NO: 2275284 - DNA, 25 bp, Homo sapien
tgggtttgcctagtctttgccctgc

SEQ ID NO: 2275285 - DNA, 25 bp, Homo sapien
tcgtttctttattatgggggtgaga

SEQ ID NO: 2275286 - DNA, 25 bp, Homo sapien
ggaacttgtgcccagtggcctggca

SEQ ID NO: 2275287 - DNA, 25 bp, Homo sapien
gagagctccacacaaagcgttcttg

SEQ ID NO: 2275288 - DNA, 25 bp, Homo sapien
acaaagcgttcttgtccagatactg

SEQ ID NO: 2275289 - DNA, 25 bp, Homo sapien
actggagtcacctcacaaagcagct

SEQ ID NO: 2275290 - DNA, 25 bp, Homo sapien
tctgtgaagtacactgctgctccaa

SEQ ID NO: 2275291 - DNA, 25 bp, Homo sapien
ttattgctgtggcgtttgggtcctg

SEQ ID NO: 2275292 - DNA, 25 bp, Homo sapien
attgctgtggcgtttgggtcctggc

SEQ ID NO: 2275293 - DNA, 25 bp, Homo sapien
tgctgtggcgtttgggtcctggcat

SEQ ID NO: 2275294 - DNA, 25 bp, Homo sapien
ctgtggcgtttgggtcctggcattc

SEQ ID NO: 2275295 - DNA, 25 bp, Homo sapien
tgatcagtggcggaaacgggtcaac

SEQ ID NO: 2275296 - DNA, 25 bp, Homo sapien
tatggagaaagtacaggatgaggca

SEQ ID NO: 2275297 - DNA, 25 bp, Homo sapien
tgagatccagagagtttaagggact

SEQ ID NO: 2275298 - DNA, 25 bp, Homo sapien
gaaaggacactttgtcattctctca

SEQ ID NO: 2275299 - DNA, 25 bp, Homo sapien
ctgtcttctccaaaggtgaaagcca

SEQ ID NO: 2275300 - DNA, 25 bp, Homo sapien
aaaggtgaaagccaaaggctccagt

SEQ ID NO: 2275301 - DNA, 25 bp, Homo sapien
caaaggctccagtcaccaaaaggag

SEQ ID NO: 2275302 - DNA, 25 bp, Homo sapien
ggctccagtcaccaaaaggagcaga

SEQ ID NO: 2275303 - DNA, 25 bp, Homo sapien
caagttcagggtcccatttggtcac

SEQ ID NO: 2275304 - DNA, 25 bp, Homo sapien
cactgagtccctctattttttctca

SEQ ID NO: 2275305 - DNA, 25 bp, Homo sapien
agggaagcggatgaggagggacact

SEQ ID NO: 2275306 - DNA, 25 bp, Homo sapien
tccctggagtgagaggcttatgaag

SEQ ID NO: 2275307 - DNA, 25 bp, Homo sapien
tgcggagggtgaatcccttgctcta

SEQ ID NO: 2275308 - DNA, 25 bp, Homo sapien
cctgcggagggtgaatcccttgctc

SEQ ID NO: 2275309 - DNA, 25 bp, Homo sapien
agcctgcggagggtgaatcccttgc

SEQ ID NO: 2275310 - DNA, 25 bp, Homo sapien
tgagcctgcggagggtgaatccctt

SEQ ID NO: 2275311 - DNA, 25 bp, Homo sapien
tgctgagatctgctggctgcctcag

SEQ ID NO: 2275312 - DNA, 25 bp, Homo sapien
tttatttggactgggctgctgagat

SEQ ID NO: 2275313 - DNA, 25 bp, Homo sapien
acagggagtttatttggactgggct

SEQ ID NO: 2275314 - DNA, 25 bp, Homo sapien
ttgctgctgacagggagtttatttg

SEQ ID NO: 2275315 - DNA, 25 bp, Homo sapien
atctttggcagcactgacgccctct

SEQ ID NO: 2275316 - DNA, 25 bp, Homo sapien
gcagcactgacgccctctgcaaagg

SEQ ID NO: 2275317 - DNA, 25 bp, Homo sapien
tatctttggcagcactgacgccctc

SEQ ID NO: 2275318 - DNA, 25 bp, Homo sapien
gtatctttggcagcactgacgccct

SEQ ID NO: 2275319 - DNA, 25 bp, Homo sapien
aaagttgaaagccccaggtgcaact

SEQ ID NO: 2275320 - DNA, 25 bp, Homo sapien
ggaaagttgaaagccccaggtgcaa

SEQ ID NO: 2275321 - DNA, 25 bp, Homo sapien
caggaaagttgaaagccccaggtgc

SEQ ID NO: 2275322 - DNA, 25 bp, Homo sapien
gcaggaaagttgaaagccccaggtg

SEQ ID NO: 2275323 - DNA, 25 bp, Homo sapien
gaccgtagaggctatactggcatgt

SEQ ID NO: 2275324 - DNA, 25 bp, Homo sapien
tctgagttgaccgtagaggctatac

SEQ ID NO: 2275325 - DNA, 25 bp, Homo sapien
tactggcatgtgagcctagagttgc

SEQ ID NO: 2275326 - DNA, 25 bp, Homo sapien
tagaggctatactggcatgtgagcc

SEQ ID NO: 2275327 - DNA, 25 bp, Homo sapien
gctctgtgggactgagtacactcac

SEQ ID NO: 2275328 - DNA, 25 bp, Homo sapien
aatactgactcctcattctaactcc

SEQ ID NO: 2275329 - DNA, 25 bp, Homo sapien
gcaactcctggctattgaataatat

SEQ ID NO: 2275330 - DNA, 25 bp, Homo sapien
cacatggttgtgtaaccatctagaa

SEQ ID NO: 2275331 - DNA, 25 bp, Homo sapien
cagagtcgtgcttaaatgaagagag

SEQ ID NO: 2275332 - DNA, 25 bp, Homo sapien
tctgcagagtcgtgcttaaatgaag

SEQ ID NO: 2275333 - DNA, 25 bp, Homo sapien
ttgttccttctgcagagtcgtgctt

SEQ ID NO: 2275334 - DNA, 25 bp, Homo sapien
ccttctgcagagtcgtgcttaaatg

SEQ ID NO: 2275335 - DNA, 25 bp, Homo sapien
tttcttgcccgctgcttctcaaaca

SEQ ID NO: 2275336 - DNA, 25 bp, Homo sapien
ttgcgtctttcttgcccgctgcttc

SEQ ID NO: 2275337 - DNA, 25 bp, Homo sapien
acaggcgtatctgtgtgaggacttg

SEQ ID NO: 2275338 - DNA, 25 bp, Homo sapien
ctgcttctcaaacaggcgtatctgt

SEQ ID NO: 2275339 - DNA, 25 bp, Homo sapien
tgtttgcggcaccaacaacttggga

SEQ ID NO: 2275340 - DNA, 25 bp, Homo sapien
gtaaacttgcacacccctaactgga

SEQ ID NO: 2275341 - DNA, 25 bp, Homo sapien
ctgtcaaccaaaaggcacatgctgg

SEQ ID NO: 2275342 - DNA, 25 bp, Homo sapien
caggacgtggaaatgcttgaaggcc

SEQ ID NO: 2275343 - DNA, 25 bp, Homo sapien
gggcctgagccagtagggacctgag

SEQ ID NO: 2275344 - DNA, 25 bp, Homo sapien
ggggcctgagccagtagggacctga

SEQ ID NO: 2275345 - DNA, 25 bp, Homo sapien
cctgagccagtagggacctgagccc

SEQ ID NO: 2275346 - DNA, 25 bp, Homo sapien
gcctgagccagtagggacctgagcc

SEQ ID NO: 2275347 - DNA, 25 bp, Homo sapien
accagaagcaagtgcctaaaaggga

SEQ ID NO: 2275348 - DNA, 25 bp, Homo sapien
ccagaagcaagtgcctaaaagggac

SEQ ID NO: 2275349 - DNA, 25 bp, Homo sapien
gaagcaagtgcctaaaagggactcc

SEQ ID NO: 2275350 - DNA, 25 bp, Homo sapien
ccagttgcagcaccagaagcaagtg

SEQ ID NO: 2275351 - DNA, 25 bp, Homo sapien
catctgcattgagaccccaggtctg

SEQ ID NO: 2275352 - DNA, 25 bp, Homo sapien
tcaggtctcaatgtcgccgctgtcc

SEQ ID NO: 2275353 - DNA, 25 bp, Homo sapien
tttcctcccacgtcatctgcattga

SEQ ID NO: 2275354 - DNA, 25 bp, Homo sapien
aggagtcaggtctcaatgtcgccgc

SEQ ID NO: 2275355 - DNA, 25 bp, Homo sapien
tcttctgggaagctgtacaggtcag

SEQ ID NO: 2275356 - DNA, 25 bp, Homo sapien
ccagtggaattgtatgctcttcttc

SEQ ID NO: 2275357 - DNA, 25 bp, Homo sapien
ctttagttaagaaggagccctgatt

SEQ ID NO: 2275358 - DNA, 25 bp, Homo sapien
cccagaatctttatctggttggagt

SEQ ID NO: 2275359 - DNA, 25 bp, Homo sapien
cataggtctgtagcaacaatactca

SEQ ID NO: 2275360 - DNA, 25 bp, Homo sapien
aactctggataagaatgccactgag

SEQ ID NO: 2275361 - DNA, 25 bp, Homo sapien
ccagatctcagacaccaaaggcttt

SEQ ID NO: 2275362 - DNA, 25 bp, Homo sapien
ctgggatcccagagtttaactaaga

SEQ ID NO: 2275363 - DNA, 25 bp, Homo sapien
acttgagctcatgagttcgagacca

SEQ ID NO: 2275364 - DNA, 25 bp, Homo sapien
tctgagaggccaaggtgagtggatc

SEQ ID NO: 2275365 - DNA, 25 bp, Homo sapien
cactctgagaggccaaggtgagtgg

SEQ ID NO: 2275366 - DNA, 25 bp, Homo sapien
gcctggccaacatggtgaaaccctg

SEQ ID NO: 2275367 - DNA, 25 bp, Homo sapien
tccacgccgaacaacagtggaagaa

SEQ ID NO: 2275368 - DNA, 25 bp, Homo sapien
tggaagaaaataggccacatgcagt

SEQ ID NO: 2275369 - DNA, 25 bp, Homo sapien
tgtatataatattctccacgccgaa

SEQ ID NO: 2275370 - DNA, 25 bp, Homo sapien
taattggtagtctcattatgatata

SEQ ID NO: 2275371 - DNA, 25 bp, Homo sapien
tggccctacgcatgttttttagatt

SEQ ID NO: 2275372 - DNA, 25 bp, Homo sapien
cacctggccctacgcatgtttttta

SEQ ID NO: 2275373 - DNA, 25 bp, Homo sapien
ctctcctaccgaggctggaaagcag

SEQ ID NO: 2275374 - DNA, 25 bp, Homo sapien
tgctctcctaccgaggctggaaagc

SEQ ID NO: 2275375 - DNA, 25 bp, Homo sapien
cacagatgtaagtatctgagtcttc

SEQ ID NO: 2275376 - DNA, 25 bp, Homo sapien
tgagtcttctatcttaagattcttg

SEQ ID NO: 2275377 - DNA, 25 bp, Homo sapien
tcttcttgagtcagcgcgatcattc

SEQ ID NO: 2275378 - DNA, 25 bp, Homo sapien
atcttaagattcttgatgatcaggg

SEQ ID NO: 2275379 - DNA, 25 bp, Homo sapien
ggctgctgcggtatcaccagctcag

SEQ ID NO: 2275380 - DNA, 25 bp, Homo sapien
gctgctgcggtatcaccagctcagg

SEQ ID NO: 2275381 - DNA, 25 bp, Homo sapien
gggctgctgcggtatcaccagctca

SEQ ID NO: 2275382 - DNA, 25 bp, Homo sapien
tggggctgctgcggtatcaccagct

SEQ ID NO: 2275383 - DNA, 25 bp, Homo sapien
caggtgggtgtcagagttggcagtc

SEQ ID NO: 2275384 - DNA, 25 bp, Homo sapien
ttggactcctacattgcactgaggg

SEQ ID NO: 2275385 - DNA, 25 bp, Homo sapien
tccagctgagacacggagagggtct

SEQ ID NO: 2275386 - DNA, 25 bp, Homo sapien
gcaccacgatgtctattttgaactc

SEQ ID NO: 2275387 - DNA, 25 bp, Homo sapien
cccctctttcttatagactatgctg

SEQ ID NO: 2275388 - DNA, 25 bp, Homo sapien
gaggtggagcgggagcttcttgccc

SEQ ID NO: 2275389 - DNA, 25 bp, Homo sapien
ggtcaaaggtgatccaagacttgga

SEQ ID NO: 2275390 - DNA, 25 bp, Homo sapien
catctggagcttagggtcctgggta

SEQ ID NO: 2275391 - DNA, 25 bp, Homo sapien
gacacttccttgttcttcaggtcaa

SEQ ID NO: 2275392 - DNA, 25 bp, Homo sapien
cctgatgcaactttcctgttttcgc

SEQ ID NO: 2275393 - DNA, 25 bp, Homo sapien
ctgttttcgcttcaagggccagggt

SEQ ID NO: 2275394 - DNA, 25 bp, Homo sapien
ttcctgttttcgcttcaagggccag

SEQ ID NO: 2275395 - DNA, 25 bp, Homo sapien
gcaactttcctgttttcgcttcaag

SEQ ID NO: 2275396 - DNA, 25 bp, Homo sapien
atccccgcctcagggttcagcaccc

SEQ ID NO: 2275397 - DNA, 25 bp, Homo sapien
ggacctgtcccgagtcactcagcag

SEQ ID NO: 2275398 - DNA, 25 bp, Homo sapien
gggttcagcacccacaccgccttct

SEQ ID NO: 2275399 - DNA, 25 bp, Homo sapien
ccgcttcgagacctttgcctccttg

SEQ ID NO: 2275400 - DNA, 25 bp, Homo sapien
gggctctcggtcaggtggaccccat

SEQ ID NO: 2275401 - DNA, 25 bp, Homo sapien
gactctgggtggtctctgccaacca

SEQ ID NO: 2275402 - DNA, 25 bp, Homo sapien
tgtagaattacaactggcagcctag

SEQ ID NO: 2275403 - DNA, 25 bp, Homo sapien
ccatccctaggctgtagacctgagg

SEQ ID NO: 2275404 - DNA, 25 bp, Homo sapien
agagagaagctgtggtctggctcct

SEQ ID NO: 2275405 - DNA, 25 bp, Homo sapien
agagaagctgtggtctggctcctgg

SEQ ID NO: 2275406 - DNA, 25 bp, Homo sapien
gagagagaagctgtggtctggctcc

SEQ ID NO: 2275407 - DNA, 25 bp, Homo sapien
gagagagagaagctgtggtctggct

SEQ ID NO: 2275408 - DNA, 25 bp, Homo sapien
cacagaagaagatgcctagcccaat

SEQ ID NO: 2275409 - DNA, 25 bp, Homo sapien
gaaaagcaggaggccggcgacgccc

SEQ ID NO: 2275410 - DNA, 25 bp, Homo sapien
agatgcctagcccaatgaaaagcag

SEQ ID NO: 2275411 - DNA, 25 bp, Homo sapien
ccattggctgcaccggggtggacca

SEQ ID NO: 2275412 - DNA, 25 bp, Homo sapien
tctcctggtagaggactcaggggtt

SEQ ID NO: 2275413 - DNA, 25 bp, Homo sapien
ggagctgggccaaaatcagttccca

SEQ ID NO: 2275414 - DNA, 25 bp, Homo sapien
aaaatcagttcccatatacaggatc

SEQ ID NO: 2275415 - DNA, 25 bp, Homo sapien
cccatatacaggatctcctggtaga

SEQ ID NO: 2275416 - DNA, 25 bp, Homo sapien
tccagggacaagaaagggagtcacg

SEQ ID NO: 2275417 - DNA, 25 bp, Homo sapien
agaaagggagtcacgagggtcccag

SEQ ID NO: 2275418 - DNA, 25 bp, Homo sapien
agggagtcacgagggtcccaggcct

SEQ ID NO: 2275419 - DNA, 25 bp, Homo sapien
gacaagaaagggagtcacgagggtc

SEQ ID NO: 2275420 - DNA, 25 bp, Homo sapien
gatctgagacatccgctctgcttgg

SEQ ID NO: 2275421 - DNA, 25 bp, Homo sapien
tggcaggtcttcttctcactgagga

SEQ ID NO: 2275422 - DNA, 25 bp, Homo sapien
cactgaggagtctcttgatctgaga

SEQ ID NO: 2275423 - DNA, 25 bp, Homo sapien
ttgatctgagacatccgctctgctt

SEQ ID NO: 2275424 - DNA, 25 bp, Homo sapien
ggggctacatgtcttctgaaaccgg

SEQ ID NO: 2275425 - DNA, 25 bp, Homo sapien
tcaaatggggctacatgtcttctga

SEQ ID NO: 2275426 - DNA, 25 bp, Homo sapien
aatggggctacatgtcttctgaaac

SEQ ID NO: 2275427 - DNA, 25 bp, Homo sapien
tggggctacatgtcttctgaaaccg

SEQ ID NO: 2275428 - DNA, 25 bp, Homo sapien
gcagagcctggcacaatcacctttg

SEQ ID NO: 2275429 - DNA, 25 bp, Homo sapien
gctacattcatctggtccgcaggca

SEQ ID NO: 2275430 - DNA, 25 bp, Homo sapien
tgtgagacatcccttgaggccgtgt

SEQ ID NO: 2275431 - DNA, 25 bp, Homo sapien
gatttgtaaccctgatttccctgtg

SEQ ID NO: 2275432 - DNA, 25 bp, Homo sapien
ttcagctcaggggagcaggggtgga

SEQ ID NO: 2275433 - DNA, 25 bp, Homo sapien
tttcagctcaggggagcaggggtgg

SEQ ID NO: 2275434 - DNA, 25 bp, Homo sapien
aggctcagcccacggctcactcggt

SEQ ID NO: 2275435 - DNA, 25 bp, Homo sapien
cggggtcgtcctgccagtgagccca

SEQ ID NO: 2275436 - DNA, 25 bp, Homo sapien
ctcccgacgcggctctctcgggctc

SEQ ID NO: 2275437 - DNA, 25 bp, Homo sapien
actgccatggagaccgcactcccga

SEQ ID NO: 2275438 - DNA, 25 bp, Homo sapien
tcttgaccagtcaggaatcttctgg

SEQ ID NO: 2275439 - DNA, 25 bp, Homo sapien
aatcctcagctttcatactgggcgg

SEQ ID NO: 2275440 - DNA, 25 bp, Homo sapien
cttaagcatccctgcaattgatggg

SEQ ID NO: 2275441 - DNA, 25 bp, Homo sapien
cagctgagggcagatgtagagggca

SEQ ID NO: 2275442 - DNA, 25 bp, Homo sapien
ccatgatccccacaatcctcgccct

SEQ ID NO: 2275443 - DNA, 25 bp, Homo sapien
atccccacaatcctcgccctgtcag

SEQ ID NO: 2275444 - DNA, 25 bp, Homo sapien
acaatcctcgccctgtcagcaggca

SEQ ID NO: 2275445 - DNA, 25 bp, Homo sapien
aatcctcgccctgtcagcaggcagg

SEQ ID NO: 2275446 - DNA, 25 bp, Homo sapien
agccaggacaatgcgttggagcgca

SEQ ID NO: 2275447 - DNA, 25 bp, Homo sapien
caggacaatgcgttggagcgcaggg

SEQ ID NO: 2275448 - DNA, 25 bp, Homo sapien
ccagccaggacaatgcgttggagcg

SEQ ID NO: 2275449 - DNA, 25 bp, Homo sapien
ggccagccaggacaatgcgttggag

SEQ ID NO: 2275450 - DNA, 25 bp, Homo sapien
tgtgtgcccgctaggaagcagagca

SEQ ID NO: 2275451 - DNA, 25 bp, Homo sapien
tcttggagactatgaactggcagcc

SEQ ID NO: 2275452 - DNA, 25 bp, Homo sapien
tccagtcatagtcggaggaagcctg

SEQ ID NO: 2275453 - DNA, 25 bp, Homo sapien
tagcgctcgccgttgttgtgccagc

SEQ ID NO: 2275454 - DNA, 25 bp, Homo sapien
tgagtcatagagaaagacgatggcg

SEQ ID NO: 2275455 - DNA, 25 bp, Homo sapien
cctgtgagtgagtcatagagaaaga

SEQ ID NO: 2275456 - DNA, 25 bp, Homo sapien
catagagaaagacgatggcgctgac

SEQ ID NO: 2275457 - DNA, 25 bp, Homo sapien
agatgggcacccctgtgagtgagtc

SEQ ID NO: 2275458 - DNA, 25 bp, Homo sapien
agcggctggatgagaggtctgcggc

SEQ ID NO: 2275459 - DNA, 25 bp, Homo sapien
tctgcggctgaaccgtggagctgca

SEQ ID NO: 2275460 - DNA, 25 bp, Homo sapien
gctggaggacaggtcgtggaactga

SEQ ID NO: 2275461 - DNA, 25 bp, Homo sapien
gagctgcaggatggatgacggagct

SEQ ID NO: 2275462 - DNA, 25 bp, Homo sapien
tggtgggcaagacgtcagaagtaat

SEQ ID NO: 2275463 - DNA, 25 bp, Homo sapien
gaggaacagaggtggaccaggaacc

SEQ ID NO: 2275464 - DNA, 25 bp, Homo sapien
tgctccaacagaggcgaagcggagg

SEQ ID NO: 2275465 - DNA, 25 bp, Homo sapien
tgaaccccatatcctagtgcagctg

SEQ ID NO: 2275466 - DNA, 25 bp, Homo sapien
ctcccacactgtgcgcacgtcggcg

SEQ ID NO: 2275467 - DNA, 25 bp, Homo sapien
acatgatggccacgcattgctccca

SEQ ID NO: 2275468 - DNA, 25 bp, Homo sapien
ggtagcgctcgcaggaccagatgaa

SEQ ID NO: 2275469 - DNA, 25 bp, Homo sapien
cctcagacatgatggccacgcattg

SEQ ID NO: 2275470 - DNA, 25 bp, Homo sapien
tcaggttccccatagtgccagagct

SEQ ID NO: 2275471 - DNA, 25 bp, Homo sapien
tattgaaacaattgcctgcactccc

SEQ ID NO: 2275472 - DNA, 25 bp, Homo sapien
cccagggtggtgcagattctgtcca

SEQ ID NO: 2275473 - DNA, 25 bp, Homo sapien
cccagtgaagggagccctgagtgct

SEQ ID NO: 2275474 - DNA, 25 bp, Homo sapien
gacccctttagttcccattagcatg

SEQ ID NO: 2275475 - DNA, 25 bp, Homo sapien
gtagggaatgcctaccgcggcctcc

SEQ ID NO: 2275476 - DNA, 25 bp, Homo sapien
tcccaccactgcctttataagctcc

SEQ ID NO: 2275477 - DNA, 25 bp, Homo sapien
cagagtggttacaggtagggaatgc

SEQ ID NO: 2275478 - DNA, 25 bp, Homo sapien
gaactttgcaaactcggccctctgc

SEQ ID NO: 2275479 - DNA, 25 bp, Homo sapien
tcggccctctgcatagtcgtcacag

SEQ ID NO: 2275480 - DNA, 25 bp, Homo sapien
tccgttagcatcaaagcgaactttg

SEQ ID NO: 2275481 - DNA, 25 bp, Homo sapien
cctgtggctccgttagcatcaaagc

SEQ ID NO: 2275482 - DNA, 25 bp, Homo sapien
tggactctctcaagaggagggaaga

SEQ ID NO: 2275483 - DNA, 25 bp, Homo sapien
aagtagtggactctctcaagaggag

SEQ ID NO: 2275484 - DNA, 25 bp, Homo sapien
ggagggaagagcatgtgccttccag

SEQ ID NO: 2275485 - DNA, 25 bp, Homo sapien
ctgtaagtagtggactctctcaaga

SEQ ID NO: 2275486 - DNA, 25 bp, Homo sapien
ctcgtcctccaacctgtgtctttgt

SEQ ID NO: 2275487 - DNA, 25 bp, Homo sapien
cagaggatgaccacttgtgcaggaa

SEQ ID NO: 2275488 - DNA, 25 bp, Homo sapien
tcatcatgggacagacgccgggata

SEQ ID NO: 2275489 - DNA, 25 bp, Homo sapien
gaagatgtttgtctcatcatgggac

SEQ ID NO: 2275490 - DNA, 25 bp, Homo sapien
tctccaagaattggcgaaggctggc

SEQ ID NO: 2275491 - DNA, 25 bp, Homo sapien
ccaagaattggcgaaggctggccag

SEQ ID NO: 2275492 - DNA, 25 bp, Homo sapien
cccactctccaagaattggcgaagg

SEQ ID NO: 2275493 - DNA, 25 bp, Homo sapien
agaattggcgaaggctggccagccc

SEQ ID NO: 2275494 - DNA, 25 bp, Homo sapien
gcagaggtgtctcatcgatgaaggt

SEQ ID NO: 2275495 - DNA, 25 bp, Homo sapien
catcgatgaaggtggtgatctcctc

SEQ ID NO: 2275496 - DNA, 25 bp, Homo sapien
atctcctcccggaagaagccaggac

SEQ ID NO: 2275497 - DNA, 25 bp, Homo sapien
gcagtcggagaaggcagaggtgtct

SEQ ID NO: 2275498 - DNA, 25 bp, Homo sapien
gcccagtggccggggccgacgagga

SEQ ID NO: 2275499 - DNA, 25 bp, Homo sapien
ccaagggagagtcggcggggtgaga

SEQ ID NO: 2275500 - DNA, 25 bp, Homo sapien
ggccggggccgacgaggagagtgcc

SEQ ID NO: 2275501 - DNA, 25 bp, Homo sapien
tcaggggacccaagggagagtcggc

SEQ ID NO: 2275502 - DNA, 25 bp, Homo sapien
ggagcagcgtctccctgcgcttagt

SEQ ID NO: 2275503 - DNA, 25 bp, Homo sapien
tctccctgcgcttagtcccaaagga

SEQ ID NO: 2275504 - DNA, 25 bp, Homo sapien
gtctccctgcgcttagtcccaaagg

SEQ ID NO: 2275505 - DNA, 25 bp, Homo sapien
cgtcagggagcagcgtctccctgcg

SEQ ID NO: 2275506 - DNA, 25 bp, Homo sapien
gaaagatggggttgcctgggcccca

SEQ ID NO: 2275507 - DNA, 25 bp, Homo sapien
ctggggaaagatggggttgcctggg

SEQ ID NO: 2275508 - DNA, 25 bp, Homo sapien
gggttgcctgggccccaggatcctc

SEQ ID NO: 2275509 - DNA, 25 bp, Homo sapien
tgggccccaggatcctccccaagcc

SEQ ID NO: 2275510 - DNA, 25 bp, Homo sapien
tctgagttcagcaggcctgcttggg

SEQ ID NO: 2275511 - DNA, 25 bp, Homo sapien
ctcctctgagttcagcaggcctgct

SEQ ID NO: 2275512 - DNA, 25 bp, Homo sapien
ctgagttcagcaggcctgcttgggc

SEQ ID NO: 2275513 - DNA, 25 bp, Homo sapien
cctctgagttcagcaggcctgcttg

SEQ ID NO: 2275514 - DNA, 25 bp, Homo sapien
tgagtagggcatctggtcacttgga

SEQ ID NO: 2275515 - DNA, 25 bp, Homo sapien
aatctagcgcccgtctccccagagt

SEQ ID NO: 2275516 - DNA, 25 bp, Homo sapien
gctgccctactctcggccagaatga

SEQ ID NO: 2275517 - DNA, 25 bp, Homo sapien
cagactttaatacatattgctaggg

SEQ ID NO: 2275518 - DNA, 25 bp, Homo sapien
ccagcggtgacttcagcccctgagg

SEQ ID NO: 2275519 - DNA, 25 bp, Homo sapien
agaagagtgctgagtggacaaagct

SEQ ID NO: 2275520 - DNA, 25 bp, Homo sapien
tgacttcagccccagcggtgacttc

SEQ ID NO: 2275521 - DNA, 25 bp, Homo sapien
caaagctggtctagtgtggaataag

SEQ ID NO: 2275522 - DNA, 25 bp, Homo sapien
ggcagccgaggggaaatgcgggagc

SEQ ID NO: 2275523 - DNA, 25 bp, Homo sapien
ggggaaatgcgggagccgagaggga

SEQ ID NO: 2275524 - DNA, 25 bp, Homo sapien
ggaaatgcgggagccgagagggagg

SEQ ID NO: 2275525 - DNA, 25 bp, Homo sapien
agccgaggggaaatgcgggagccga

SEQ ID NO: 2275526 - DNA, 25 bp, Homo sapien
agtagcagcagcggccggaggagcc

SEQ ID NO: 2275527 - DNA, 25 bp, Homo sapien
gcagcggccggaggagccggagcat

SEQ ID NO: 2275528 - DNA, 25 bp, Homo sapien
gcagcagcggccggaggagccggag

SEQ ID NO: 2275529 - DNA, 25 bp, Homo sapien
ctgggtcaggccggggggctcaggg

SEQ ID NO: 2275530 - DNA, 25 bp, Homo sapien
gcgcgcagcccgtcagcgtagagca

SEQ ID NO: 2275531 - DNA, 25 bp, Homo sapien
cgtaggcgcgcagcccgtcagcgta

SEQ ID NO: 2275532 - DNA, 25 bp, Homo sapien
cgcagcccgtcagcgtagagcaagt

SEQ ID NO: 2275533 - DNA, 25 bp, Homo sapien
agcccgtcagcgtagagcaagtcgg

SEQ ID NO: 2275534 - DNA, 25 bp, Homo sapien
acggagaagctgtcgctcccaggac

SEQ ID NO: 2275535 - DNA, 25 bp, Homo sapien
cggcggagcgctgcacggagaagct

SEQ ID NO: 2275536 - DNA, 25 bp, Homo sapien
agcgctgcacggagaagctgtcgct

SEQ ID NO: 2275537 - DNA, 25 bp, Homo sapien
gtcaggcagtctgcgcggcggagcg

SEQ ID NO: 2275538 - DNA, 25 bp, Homo sapien
tccccacgcgaagcgcgccgcgccc

SEQ ID NO: 2275539 - DNA, 25 bp, Homo sapien
ctccccacgcgaagcgcgccgcgcc

SEQ ID NO: 2275540 - DNA, 25 bp, Homo sapien
ccccacgcgaagcgcgccgcgcccc

SEQ ID NO: 2275541 - DNA, 25 bp, Homo sapien
cccacgcgaagcgcgccgcgccccc

SEQ ID NO: 2275542 - DNA, 25 bp, Homo sapien
acggcggaaggcgtcccggagcgcg

SEQ ID NO: 2275543 - DNA, 25 bp, Homo sapien
tgtagggctcccgacggcggaaggc

SEQ ID NO: 2275544 - DNA, 25 bp, Homo sapien
aataggccctctgcaggtagttgta

SEQ ID NO: 2275545 - DNA, 25 bp, Homo sapien
tagttgtagggctcccgacggcgga

SEQ ID NO: 2275546 - DNA, 25 bp, Homo sapien
ttcattcctaggaagaggcggccct

SEQ ID NO: 2275547 - DNA, 25 bp, Homo sapien
gacttcaggacctcaatttgggaga

SEQ ID NO: 2275548 - DNA, 25 bp, Homo sapien
cctagaggccagaacgttgggactc

SEQ ID NO: 2275549 - DNA, 25 bp, Homo sapien
tggaagactggccaatcagaaccgc

SEQ ID NO: 2275550 - DNA, 25 bp, Homo sapien
tgccgcagctgccagatccagcttc

SEQ ID NO: 2275551 - DNA, 25 bp, Homo sapien
gtttgctacaaagaaggtgtgtgct

SEQ ID NO: 2275552 - DNA, 25 bp, Homo sapien
cgcagctgccagatccagcttcttc

SEQ ID NO: 2275553 - DNA, 25 bp, Homo sapien
gggtttgctacaaagaaggtgtgtg

SEQ ID NO: 2275554 - DNA, 25 bp, Homo sapien
tctggggccgaactcccgacattcg

SEQ ID NO: 2275555 - DNA, 25 bp, Homo sapien
gaactcccgacattcgtctgtactt

SEQ ID NO: 2275556 - DNA, 25 bp, Homo sapien
ttcgtctgtacttagccatgtcctc

SEQ ID NO: 2275557 - DNA, 25 bp, Homo sapien
cgacattcgtctgtacttagccatg

SEQ ID NO: 2275558 - DNA, 25 bp, Homo sapien
gcgccccagtagctccaggccagtg

SEQ ID NO: 2275559 - DNA, 25 bp, Homo sapien
agtcagcacggcagctctccatctg

SEQ ID NO: 2275560 - DNA, 25 bp, Homo sapien
aatggcctcatagaggcccccctgg

SEQ ID NO: 2275561 - DNA, 25 bp, Homo sapien
ccctcacagtcagcacggcagctct

SEQ ID NO: 2275562 - DNA, 25 bp, Homo sapien
aagtctgggacagggaagctgcgac

SEQ ID NO: 2275563 - DNA, 25 bp, Homo sapien
gcgttgccggcactgcaggacctga

SEQ ID NO: 2275564 - DNA, 25 bp, Homo sapien
tgagcatgggcctcatgtagccgcc

SEQ ID NO: 2275565 - DNA, 25 bp, Homo sapien
aagctgcgaccagggcgtgtggctg

SEQ ID NO: 2275566 - DNA, 25 bp, Homo sapien
tgtcacaggcgccaaaggagggcaa

SEQ ID NO: 2275567 - DNA, 25 bp, Homo sapien
gagcttgtcacaggcgccaaaggag

SEQ ID NO: 2275568 - DNA, 25 bp, Homo sapien
ccttgtgaagtgatggttcccatgc

SEQ ID NO: 2275569 - DNA, 25 bp, Homo sapien
gagggcaaattagagtccttgtgaa

SEQ ID NO: 2275570 - DNA, 25 bp, Homo sapien
caggacattttctatagcctgggac

SEQ ID NO: 2275571 - DNA, 25 bp, Homo sapien
gcaggacactcaggacattttctat

SEQ ID NO: 2275572 - DNA, 25 bp, Homo sapien
tctatagcctgggacagattgccca

SEQ ID NO: 2275573 - DNA, 25 bp, Homo sapien
tagaagagcaggacactcaggacat

SEQ ID NO: 2275574 - DNA, 25 bp, Homo sapien
gctccatggcatagtagagctgcct

SEQ ID NO: 2275575 - DNA, 25 bp, Homo sapien
tgctccatggcatagtagagctgcc

SEQ ID NO: 2275576 - DNA, 25 bp, Homo sapien
ggaaaagcccgggactcaatgtcag

SEQ ID NO: 2275577 - DNA, 25 bp, Homo sapien
ctgacattagagctgaaatatctca

SEQ ID NO: 2275578 - DNA, 25 bp, Homo sapien
cgggactcaatgtcaggagccctgg

SEQ ID NO: 2275579 - DNA, 25 bp, Homo sapien
ttccagagaggaagacggaggtagg

SEQ ID NO: 2275580 - DNA, 25 bp, Homo sapien
gaaaagcatcatcacccaccaaggt

SEQ ID NO: 2275581 - DNA, 25 bp, Homo sapien
catcacccaccaaggtcagcccctg

SEQ ID NO: 2275582 - DNA, 25 bp, Homo sapien
aaagcatcatcacccaccaaggtca

SEQ ID NO: 2275583 - DNA, 25 bp, Homo sapien
aaaagcatcatcacccaccaaggtc

SEQ ID NO: 2275584 - DNA, 25 bp, Homo sapien
ttctctaagtgcctcagggatgaga

SEQ ID NO: 2275585 - DNA, 25 bp, Homo sapien
ttttctctaagtgcctcagggatga

SEQ ID NO: 2275586 - DNA, 25 bp, Homo sapien
cttttctctaagtgcctcagggatg

SEQ ID NO: 2275587 - DNA, 25 bp, Homo sapien
tctctaagtgcctcagggatgagag

SEQ ID NO: 2275588 - DNA, 25 bp, Homo sapien
gggtgagagatgcgctcagtgggtg

SEQ ID NO: 2275589 - DNA, 25 bp, Homo sapien
tgagagatgcgctcagtgggtgccc

SEQ ID NO: 2275590 - DNA, 25 bp, Homo sapien
gtgagagatgcgctcagtgggtgcc

SEQ ID NO: 2275591 - DNA, 25 bp, Homo sapien
aggggtgagagatgcgctcagtggg

SEQ ID NO: 2275592 - DNA, 25 bp, Homo sapien
acgggctcatggtcccaaggcctct

SEQ ID NO: 2275593 - DNA, 25 bp, Homo sapien
tcacgggctcatggtcccaaggcct

SEQ ID NO: 2275594 - DNA, 25 bp, Homo sapien
cgggctcatggtcccaaggcctctt

SEQ ID NO: 2275595 - DNA, 25 bp, Homo sapien
cacgggctcatggtcccaaggcctc

SEQ ID NO: 2275596 - DNA, 25 bp, Homo sapien
cagagcagagggggctgagcatccc

SEQ ID NO: 2275597 - DNA, 25 bp, Homo sapien
ctgccagggaaaagacagagcagag

SEQ ID NO: 2275598 - DNA, 25 bp, Homo sapien
aagacagagcagagggggctgagca

SEQ ID NO: 2275599 - DNA, 25 bp, Homo sapien
agacagagcagagggggctgagcat

SEQ ID NO: 2275600 - DNA, 25 bp, Homo sapien
cccacactcggctggggtgagcagc

SEQ ID NO: 2275601 - DNA, 25 bp, Homo sapien
tgggtcaaggtcacaccctccagga

SEQ ID NO: 2275602 - DNA, 25 bp, Homo sapien
gaatcctgggtcaaggtcacaccct

SEQ ID NO: 2275603 - DNA, 25 bp, Homo sapien
tgcctggaatcctgggtcaaggtca

SEQ ID NO: 2275604 - DNA, 25 bp, Homo sapien
cccggttggataatcaggacaggca

SEQ ID NO: 2275605 - DNA, 25 bp, Homo sapien
agtggtaagcacagtcccggttgga

SEQ ID NO: 2275606 - DNA, 25 bp, Homo sapien
gacgagacggaacttatccacagct

SEQ ID NO: 2275607 - DNA, 25 bp, Homo sapien
caacctggtgagtatgagtcattca

SEQ ID NO: 2275608 - DNA, 25 bp, Homo sapien
aatggcacgagatcagctcaccaca

SEQ ID NO: 2275609 - DNA, 25 bp, Homo sapien
caatggcacgagatcagctcaccac

SEQ ID NO: 2275610 - DNA, 25 bp, Homo sapien
atggcacgagatcagctcaccacaa

SEQ ID NO: 2275611 - DNA, 25 bp, Homo sapien
ccaacggtggcattcgtcaattact

SEQ ID NO: 2275612 - DNA, 25 bp, Homo sapien
gaatgcaaaagtcaaccgtcctaaa

SEQ ID NO: 2275613 - DNA, 25 bp, Homo sapien
tctacagactgccactagagggctc

SEQ ID NO: 2275614 - DNA, 25 bp, Homo sapien
taccactcctacaggtgactccaga

SEQ ID NO: 2275615 - DNA, 25 bp, Homo sapien
aacatataggcgcataggcccagct

SEQ ID NO: 2275616 - DNA, 25 bp, Homo sapien
gtaggtgggaacatataggcgcata

SEQ ID NO: 2275617 - DNA, 25 bp, Homo sapien
gtgggaacatataggcgcataggcc

SEQ ID NO: 2275618 - DNA, 25 bp, Homo sapien
catataggcgcataggcccagctaa

SEQ ID NO: 2275619 - DNA, 25 bp, Homo sapien
tctggtacgggctggaatcccgctt

SEQ ID NO: 2275620 - DNA, 25 bp, Homo sapien
tgttgtggctcgtcttcctgagctg

SEQ ID NO: 2275621 - DNA, 25 bp, Homo sapien
gagagaactcgggagagcttcctac

SEQ ID NO: 2275622 - DNA, 25 bp, Homo sapien
tccagaagaagctagatgctcccac

SEQ ID NO: 2275623 - DNA, 25 bp, Homo sapien
ctgcgcagccttaagcaccgtgagc

SEQ ID NO: 2275624 - DNA, 25 bp, Homo sapien
gcgaccacgatagccagacctggct

SEQ ID NO: 2275625 - DNA, 25 bp, Homo sapien
ggagcggcgaccacgatagccagac

SEQ ID NO: 2275626 - DNA, 25 bp, Homo sapien
gtgagcccctcgaagcgttcatggg

SEQ ID NO: 2275627 - DNA, 25 bp, Homo sapien
tagtctcggtcccaagaaagctcct

SEQ ID NO: 2275628 - DNA, 25 bp, Homo sapien
tgtccatcagcccaaactgctcctt

SEQ ID NO: 2275629 - DNA, 25 bp, Homo sapien
cgctgggtcctatcaggtagtctcg

SEQ ID NO: 2275630 - DNA, 25 bp, Homo sapien
ccaggtctgggcatcagacgggccc

SEQ ID NO: 2275631 - DNA, 25 bp, Homo sapien
cagaagcagcttagcaccctgactg

SEQ ID NO: 2275632 - DNA, 25 bp, Homo sapien
ttctatggcgctgcggcacaccagg

SEQ ID NO: 2275633 - DNA, 25 bp, Homo sapien
tccagaagcagcttagcaccctgac

SEQ ID NO: 2275634 - DNA, 25 bp, Homo sapien
ctgggtcaaggtccgcacccgctcg

SEQ ID NO: 2275635 - DNA, 25 bp, Homo sapien
tccaggacgcagttgtctgcgtgca

SEQ ID NO: 2275636 - DNA, 25 bp, Homo sapien
tgtagtcccgataggtgtaggctgg

SEQ ID NO: 2275637 - DNA, 25 bp, Homo sapien
cactgggtgactcaggtccatgcgc

SEQ ID NO: 2275638 - DNA, 25 bp, Homo sapien
cagcactctcccgtgtcagggtcca

SEQ ID NO: 2275639 - DNA, 25 bp, Homo sapien
cagtgagggcgttgggctccgtgaa

SEQ ID NO: 2275640 - DNA, 25 bp, Homo sapien
aagtcatcgttgaggtagaggagtc

SEQ ID NO: 2275641 - DNA, 25 bp, Homo sapien
tccccaccctggaagtcatcgttga

SEQ ID NO: 2275642 - DNA, 25 bp, Homo sapien
tgggctccgtgaagaacaggtcccc

SEQ ID NO: 2275643 - DNA, 25 bp, Homo sapien
ggcgctgcctcattcttttaggtac

SEQ ID NO: 2275644 - DNA, 25 bp, Homo sapien
tgcttatcattaccaggcgctgcct

SEQ ID NO: 2275645 - DNA, 25 bp, Homo sapien
gggcaaatgagaaatcagcttcaac

SEQ ID NO: 2275646 - DNA, 25 bp, Homo sapien
tctccacggatggtctcctgttggt

SEQ ID NO: 2275647 - DNA, 25 bp, Homo sapien
acaaggcgcccacagcgaggacgca

SEQ ID NO: 2275648 - DNA, 25 bp, Homo sapien
ctgtgctcaggtgcccacgtgtgcc

SEQ ID NO: 2275649 - DNA, 25 bp, Homo sapien
gggattctcgacaccggagctgaag

SEQ ID NO: 2275650 - DNA, 25 bp, Homo sapien
ggagctgaaggccacaaggcgccca

SEQ ID NO: 2275651 - DNA, 25 bp, Homo sapien
cagcagttctttggcttctatccac

SEQ ID NO: 2275652 - DNA, 25 bp, Homo sapien
tcctcctgtgactcctgcagcagtt

SEQ ID NO: 2275653 - DNA, 25 bp, Homo sapien
gcagttctttggcttctatccactc

SEQ ID NO: 2275654 - DNA, 25 bp, Homo sapien
aagggtctttgctgggcatttcttc

SEQ ID NO: 2275655 - DNA, 25 bp, Homo sapien
ttccagtcttgtcttggaccctctg

SEQ ID NO: 2275656 - DNA, 25 bp, Homo sapien
cctctggtgcctgcggctagggggc

SEQ ID NO: 2275657 - DNA, 25 bp, Homo sapien
agtcttgtcttggaccctctggtgc

SEQ ID NO: 2275658 - DNA, 25 bp, Homo sapien
cgaacccgaggtgcccttccagtct

SEQ ID NO: 2275659 - DNA, 25 bp, Homo sapien
caggctagcctgtgcactgtcctct

SEQ ID NO: 2275660 - DNA, 25 bp, Homo sapien
gagaggagcagggttatacctccca

SEQ ID NO: 2275661 - DNA, 25 bp, Homo sapien
tgtgtgtcctggcatcaagatggcc

SEQ ID NO: 2275662 - DNA, 25 bp, Homo sapien
tcagggaggcacagtgttccccatc

SEQ ID NO: 2275663 - DNA, 25 bp, Homo sapien
gataatccttcttctcgacaaaccc

SEQ ID NO: 2275664 - DNA, 25 bp, Homo sapien
agaaaggactgatctggataatcct

SEQ ID NO: 2275665 - DNA, 25 bp, Homo sapien
gatggacaggtctgcccctattgtg

SEQ ID NO: 2275666 - DNA, 25 bp, Homo sapien
acaaaccccaaccagctgcctctgg

SEQ ID NO: 2275667 - DNA, 25 bp, Homo sapien
accacaacgtcaggcaaatgaaatc

SEQ ID NO: 2275668 - DNA, 25 bp, Homo sapien
caaatgaaatcagctggcaggggtg

SEQ ID NO: 2275669 - DNA, 25 bp, Homo sapien
gaggtgtacggattccagagagact

SEQ ID NO: 2275670 - DNA, 25 bp, Homo sapien
tgacagggaagggtagagccaacca

SEQ ID NO: 2275671 - DNA, 25 bp, Homo sapien
tggacctcggccgggtttccagctc

SEQ ID NO: 2275672 - DNA, 25 bp, Homo sapien
ttactccctcagctgcgacgcccgc

SEQ ID NO: 2275673 - DNA, 25 bp, Homo sapien
cctccttactccctcagctgcgacg

SEQ ID NO: 2275674 - DNA, 25 bp, Homo sapien
gctctggctggacctcggccgggtt

SEQ ID NO: 2275675 - DNA, 25 bp, Homo sapien
gacacagggaaacgactgggtggct

SEQ ID NO: 2275676 - DNA, 25 bp, Homo sapien
cccagctaggccctccaagtttgag

SEQ ID NO: 2275677 - DNA, 25 bp, Homo sapien
gaaacgactgggtggctgcaccctc

SEQ ID NO: 2275678 - DNA, 25 bp, Homo sapien
gtttgaggtcctttgcgtccagccc

SEQ ID NO: 2275679 - DNA, 25 bp, Homo sapien
gctgacaggtcgaggggtcactctg

SEQ ID NO: 2275680 - DNA, 25 bp, Homo sapien
ggctgacaggtcgaggggtcactct

SEQ ID NO: 2275681 - DNA, 25 bp, Homo sapien
ctgacaggtcgaggggtcactctgg

SEQ ID NO: 2275682 - DNA, 25 bp, Homo sapien
tgacaggtcgaggggtcactctggc

SEQ ID NO: 2275683 - DNA, 25 bp, Homo sapien
gctccgcttcctgacgcagttgctc

SEQ ID NO: 2275684 - DNA, 25 bp, Homo sapien
tgctccgcttcctgacgcagttgct

SEQ ID NO: 2275685 - DNA, 25 bp, Homo sapien
ctgctccgcttcctgacgcagttgc

SEQ ID NO: 2275686 - DNA, 25 bp, Homo sapien
tccgcttcctgacgcagttgctcca

SEQ ID NO: 2275687 - DNA, 25 bp, Homo sapien
tagtcactcaagagcaaacccagcc

SEQ ID NO: 2275688 - DNA, 25 bp, Homo sapien
tatgcgaaccaagtttagaaagtcc

SEQ ID NO: 2275689 - DNA, 25 bp, Homo sapien
acgctcctcatgtccccagctgttt

SEQ ID NO: 2275690 - DNA, 25 bp, Homo sapien
gtccctggtcacttctagtcactca

SEQ ID NO: 2275691 - DNA, 25 bp, Homo sapien
agagtaacgtcagcacaggctttcc

SEQ ID NO: 2275692 - DNA, 25 bp, Homo sapien
ccagagtaacgtcagcacaggcttt

SEQ ID NO: 2275693 - DNA, 25 bp, Homo sapien
tgccagagtaacgtcagcacaggct

SEQ ID NO: 2275694 - DNA, 25 bp, Homo sapien
ctctgccagagtaacgtcagcacag

SEQ ID NO: 2275695 - DNA, 25 bp, Homo sapien
gctgtggtcactcttgttctacgga

SEQ ID NO: 2275696 - DNA, 25 bp, Homo sapien
gcatccaatatggtgcctggctcag

SEQ ID NO: 2275697 - DNA, 25 bp, Homo sapien
gaataggaaccgtgtccgcatcttt

SEQ ID NO: 2275698 - DNA, 25 bp, Homo sapien
tgttctacggatgagaataggaacc

SEQ ID NO: 2275699 - DNA, 25 bp, Homo sapien
gtccgcatctggactcgtcccacca

SEQ ID NO: 2275700 - DNA, 25 bp, Homo sapien
atctggactcgtcccaccacctcta

SEQ ID NO: 2275701 - DNA, 25 bp, Homo sapien
aacgtccgccgcgtccgcatctgga

SEQ ID NO: 2275702 - DNA, 25 bp, Homo sapien
gaatcagtggcccagtgcatggcgt

SEQ ID NO: 2275703 - DNA, 25 bp, Homo sapien
tggtggtgtagctgtcccacacgat

SEQ ID NO: 2275704 - DNA, 25 bp, Homo sapien
gatcagcttcccatcttgcgaggca

SEQ ID NO: 2275705 - DNA, 25 bp, Homo sapien
atcttgcgaggcacttaccagcagc

SEQ ID NO: 2275706 - DNA, 25 bp, Homo sapien
tgtagctgtcccacacgatcagctt

SEQ ID NO: 2275707 - DNA, 25 bp, Homo sapien
tgtgagcagaaagctcccggctgac

SEQ ID NO: 2275708 - DNA, 25 bp, Homo sapien
gatggaacacatgttgtccagcccc

SEQ ID NO: 2275709 - DNA, 25 bp, Homo sapien
ccctcacgggatttgaggttgtaga

SEQ ID NO: 2275710 - DNA, 25 bp, Homo sapien
ttgacattgccctcacgggatttga

SEQ ID NO: 2275711 - DNA, 25 bp, Homo sapien
cgagctggtcacaatattgttgtca

SEQ ID NO: 2275712 - DNA, 25 bp, Homo sapien
gtggtgtcccccgagctggtcacaa

SEQ ID NO: 2275713 - DNA, 25 bp, Homo sapien
tcacaatattgttgtcatccaggaa

SEQ ID NO: 2275714 - DNA, 25 bp, Homo sapien
gtcccccgagctggtcacaatattg

SEQ ID NO: 2275715 - DNA, 25 bp, Homo sapien
ccccgaaatgaagagattgaagtca

SEQ ID NO: 2275716 - DNA, 25 bp, Homo sapien
gagcttggcactggcatcacaggcc

SEQ ID NO: 2275717 - DNA, 25 bp, Homo sapien
gtgaaagtctgacggcaggtcccct

SEQ ID NO: 2275718 - DNA, 25 bp, Homo sapien
tcacccgtgtgtcccacaaatacag

SEQ ID NO: 2275719 - DNA, 25 bp, Homo sapien
gatgtctgcaacctactttcaaaag

SEQ ID NO: 2275720 - DNA, 25 bp, Homo sapien
agccaagcgtggtcacacgcatctg

SEQ ID NO: 2275721 - DNA, 25 bp, Homo sapien
tatctacatctaagtgtgtatgtgt

SEQ ID NO: 2275722 - DNA, 25 bp, Homo sapien
caaacgtgataaaatgggctaggcg

SEQ ID NO: 2275723 - DNA, 25 bp, Homo sapien
ggcaagtgggtcagggatcagacct

SEQ ID NO: 2275724 - DNA, 25 bp, Homo sapien
gccaacacataccacgtgccagtga

SEQ ID NO: 2275725 - DNA, 25 bp, Homo sapien
ccacgtgccagtgacttccctatgc

SEQ ID NO: 2275726 - DNA, 25 bp, Homo sapien
tgagggcacgggtggcaagtgggtc

SEQ ID NO: 2275727 - DNA, 25 bp, Homo sapien
tcaaacaagcggcaggaagcgtcat

SEQ ID NO: 2275728 - DNA, 25 bp, Homo sapien
tctcgtgggagaagcagatcagctc

SEQ ID NO: 2275729 - DNA, 25 bp, Homo sapien
tcgtagccagcgaatagtaggcggc

SEQ ID NO: 2275730 - DNA, 25 bp, Homo sapien
tgatgccgcagatgatgctctcgtg

SEQ ID NO: 2275731 - DNA, 25 bp, Homo sapien
agccatcccgtcagctgtgactccc

SEQ ID NO: 2275732 - DNA, 25 bp, Homo sapien
gctcaccctgttatcgtggccagag

SEQ ID NO: 2275733 - DNA, 25 bp, Homo sapien
tgtggccacagccatcccgtcagct

SEQ ID NO: 2275734 - DNA, 25 bp, Homo sapien
ccctgttatcgtggccagagaggat

SEQ ID NO: 2275735 - DNA, 25 bp, Homo sapien
tggtgccagagccatagtcacaggg

SEQ ID NO: 2275736 - DNA, 25 bp, Homo sapien
aaagcttagtgggaatggcacccgg

SEQ ID NO: 2275737 - DNA, 25 bp, Homo sapien
taccagggtgctacactttattgca

SEQ ID NO: 2275738 - DNA, 25 bp, Homo sapien
tggcacccggaatatagaagagaac

SEQ ID NO: 2275739 - DNA, 25 bp, Homo sapien
caagctatccagtacccagccttta

SEQ ID NO: 2275740 - DNA, 25 bp, Homo sapien
gcaggccatagcgaactgctgcaca

SEQ ID NO: 2275741 - DNA, 25 bp, Homo sapien
ccgtacaaacacatgggcaccacag

SEQ ID NO: 2275742 - DNA, 25 bp, Homo sapien
ctgcccttaaatgggacctgggtct

SEQ ID NO: 2275743 - DNA, 25 bp, Homo sapien
tagaatggcggcctagagagcttgc

SEQ ID NO: 2275744 - DNA, 25 bp, Homo sapien
ggtatatgtaaaccttgcaccgagt

SEQ ID NO: 2275745 - DNA, 25 bp, Homo sapien
gctctccctgggtgtttacttctag

SEQ ID NO: 2275746 - DNA, 25 bp, Homo sapien
gagagcttgcgttccctggcctgag

SEQ ID NO: 2275747 - DNA, 25 bp, Homo sapien
tctcgaaagcgaagactggcactcc

SEQ ID NO: 2275748 - DNA, 25 bp, Homo sapien
taacttcgggagttgagccacgagc

SEQ ID NO: 2275749 - DNA, 25 bp, Homo sapien
tcgcaggccgatactgaacagaagt

SEQ ID NO: 2275750 - DNA, 25 bp, Homo sapien
tatgggaactacgtcggctcagcca

SEQ ID NO: 2275751 - DNA, 25 bp, Homo sapien
agcttctccacacacggcggctccc

SEQ ID NO: 2275752 - DNA, 25 bp, Homo sapien
agcagcttctccacacacggcggct

SEQ ID NO: 2275753 - DNA, 25 bp, Homo sapien
gcagcttctccacacacggcggctc

SEQ ID NO: 2275754 - DNA, 25 bp, Homo sapien
gcagcagcttctccacacacggcgg

SEQ ID NO: 2275755 - DNA, 25 bp, Homo sapien
ctcgtctttgtggacccggtctcca

SEQ ID NO: 2275756 - DNA, 25 bp, Homo sapien
ggcgtgtcgaaggagaaggcgcact

SEQ ID NO: 2275757 - DNA, 25 bp, Homo sapien
tccagccttagggacccggatcgtc

SEQ ID NO: 2275758 - DNA, 25 bp, Homo sapien
cgtcggtaatactgacagcagcgcc

SEQ ID NO: 2275759 - DNA, 25 bp, Homo sapien
gcttagaacggcaacgaaggcagtg

SEQ ID NO: 2275760 - DNA, 25 bp, Homo sapien
tacacgagactacaaaacccggaga

SEQ ID NO: 2275761 - DNA, 25 bp, Homo sapien
ggtagtcacacgacagccgcagtta

SEQ ID NO: 2275762 - DNA, 25 bp, Homo sapien
tgagtgactacaatgcccacagtgc

SEQ ID NO: 2275763 - DNA, 25 bp, Homo sapien
ccgggtccgccggaggtgcaagtag

SEQ ID NO: 2275764 - DNA, 25 bp, Homo sapien
gcccagaaacgtgttcatacagatg

SEQ ID NO: 2275765 - DNA, 25 bp, Homo sapien
tgtctctccacatactgtttcccaa

SEQ ID NO: 2275766 - DNA, 25 bp, Homo sapien
cgctggccggtcttattgaaatgtc

SEQ ID NO: 2275767 - DNA, 25 bp, Homo sapien
cggggtgggtctccagtgcctgtag

SEQ ID NO: 2275768 - DNA, 25 bp, Homo sapien
ggggtgggtctccagtgcctgtagc

SEQ ID NO: 2275769 - DNA, 25 bp, Homo sapien
ggtgggtctccagtgcctgtagcag

SEQ ID NO: 2275770 - DNA, 25 bp, Homo sapien
gggtgggtctccagtgcctgtagca

SEQ ID NO: 2275771 - DNA, 25 bp, Homo sapien
gggagaagaataggactgcagcggt

SEQ ID NO: 2275772 - DNA, 25 bp, Homo sapien
gaagaataggactgcagcggtgctc

SEQ ID NO: 2275773 - DNA, 25 bp, Homo sapien
gagaagaataggactgcagcggtgc

SEQ ID NO: 2275774 - DNA, 25 bp, Homo sapien
agaataggactgcagcggtgctcac

SEQ ID NO: 2275775 - DNA, 25 bp, Homo sapien
ttgccccatccagagttctagggcc

SEQ ID NO: 2275776 - DNA, 25 bp, Homo sapien
tccaggtaatctggcaaaatgacaa

SEQ ID NO: 2275777 - DNA, 25 bp, Homo sapien
catcctcgtctaattcaaacttctc

SEQ ID NO: 2275778 - DNA, 25 bp, Homo sapien
ccagtccatcccgggcaatctccag

SEQ ID NO: 2275779 - DNA, 25 bp, Homo sapien
cttcacatcctcgtctaattcaaac

SEQ ID NO: 2275780 - DNA, 25 bp, Homo sapien
gctttgtcagtgcttgcctaagaca

SEQ ID NO: 2275781 - DNA, 25 bp, Homo sapien
tggcccatcttgctctagaatcttg

SEQ ID NO: 2275782 - DNA, 25 bp, Homo sapien
gagggtcagaggcaatacccaaccc

SEQ ID NO: 2275783 - DNA, 25 bp, Homo sapien
agtgcttgcctaagacaccactacc

SEQ ID NO: 2275784 - DNA, 25 bp, Homo sapien
tgcacctcctgcttgcgggaggctg

SEQ ID NO: 2275785 - DNA, 25 bp, Homo sapien
ggctgaaggcatgcttagacacctg

SEQ ID NO: 2275786 - DNA, 25 bp, Homo sapien
tgagtcggccgacagtagggcctcc

SEQ ID NO: 2275787 - DNA, 25 bp, Homo sapien
gattcgagcagggttgtccaactgc

SEQ ID NO: 2275788 - DNA, 25 bp, Homo sapien
tggtgcccagcttgacagctaacgg

SEQ ID NO: 2275789 - DNA, 25 bp, Homo sapien
atcgaagtagcgtcgcccacagagg

SEQ ID NO: 2275790 - DNA, 25 bp, Homo sapien
tagtgctccacagcgtggttgttgc

SEQ ID NO: 2275791 - DNA, 25 bp, Homo sapien
taacgggtagcctgtctctcggtag

SEQ ID NO: 2275792 - DNA, 25 bp, Homo sapien
gaagacagatgaaaccgggtgaggg

SEQ ID NO: 2275793 - DNA, 25 bp, Homo sapien
tatgagtgcggtcatggcccttctg

SEQ ID NO: 2275794 - DNA, 25 bp, Homo sapien
tgagggttggaattacttgtgattc

SEQ ID NO: 2275795 - DNA, 25 bp, Homo sapien
ggttcccttgaatatgagtaatatg

SEQ ID NO: 2275796 - DNA, 25 bp, Homo sapien
ttcagcatgtcgatgccgaagtggg

SEQ ID NO: 2275797 - DNA, 25 bp, Homo sapien
tcttcagcatgtcgatgccgaagtg

SEQ ID NO: 2275798 - DNA, 25 bp, Homo sapien
catgtcgatgccgaagtgggacagg

SEQ ID NO: 2275799 - DNA, 25 bp, Homo sapien
cagcatgtcgatgccgaagtgggac

SEQ ID NO: 2275800 - DNA, 25 bp, Homo sapien
ccaactcagtcatcgtcttgtctgt

SEQ ID NO: 2275801 - DNA, 25 bp, Homo sapien
tgactcctggatcagctcccattca

SEQ ID NO: 2275802 - DNA, 25 bp, Homo sapien
cagctgttacccaggttccggatgc

SEQ ID NO: 2275803 - DNA, 25 bp, Homo sapien
ccattcaccaatccgctggttcatg

SEQ ID NO: 2275804 - DNA, 25 bp, Homo sapien
ggaactactctaagactagaatcaa

SEQ ID NO: 2275805 - DNA, 25 bp, Homo sapien
ccagccgataggaactactctaaga

SEQ ID NO: 2275806 - DNA, 25 bp, Homo sapien
acacacccagccgataggaactact

SEQ ID NO: 2275807 - DNA, 25 bp, Homo sapien
gataggaactactctaagactagaa

SEQ ID NO: 2275808 - DNA, 25 bp, Homo sapien
gtagggtccgtcggggcattctgga

SEQ ID NO: 2275809 - DNA, 25 bp, Homo sapien
tccgtcggggcattctggaagatct

SEQ ID NO: 2275810 - DNA, 25 bp, Homo sapien
gatcttctccagcttatccacatac

SEQ ID NO: 2275811 - DNA, 25 bp, Homo sapien
tgctgaaatcctgggtagggtccgt

SEQ ID NO: 2275812 - DNA, 25 bp, Homo sapien
tccggtactggcttggaatactccc

SEQ ID NO: 2275813 - DNA, 25 bp, Homo sapien
cgcccgactccggtactggcttgga

SEQ ID NO: 2275814 - DNA, 25 bp, Homo sapien
aatactccccggagagaaggccatg

SEQ ID NO: 2275815 - DNA, 25 bp, Homo sapien
tggcttggaatactccccggagaga

SEQ ID NO: 2275816 - DNA, 25 bp, Homo sapien
ttgaacatccgaggggcaatgccat

SEQ ID NO: 2275817 - DNA, 25 bp, Homo sapien
ccatgttgataaggtgaaggaagaa

SEQ ID NO: 2275818 - DNA, 25 bp, Homo sapien
cagggtggcccttgccgatgagggc

SEQ ID NO: 2275819 - DNA, 25 bp, Homo sapien
caccatgttgataaggtgaaggaag

SEQ ID NO: 2275820 - DNA, 25 bp, Homo sapien
tggccaggcacttgatcttttcctc

SEQ ID NO: 2275821 - DNA, 25 bp, Homo sapien
ctgtggccaggcacttgatcttttc

SEQ ID NO: 2275822 - DNA, 25 bp, Homo sapien
tcgctgggtgtacttcaccttctct

SEQ ID NO: 2275823 - DNA, 25 bp, Homo sapien
ctgcatgatgtagtcaactcgctgg

SEQ ID NO: 2275824 - DNA, 25 bp, Homo sapien
ccagaagtcatcgacctgctcaggg

SEQ ID NO: 2275825 - DNA, 25 bp, Homo sapien
ggcttgccgcttcttctcctcgtac

SEQ ID NO: 2275826 - DNA, 25 bp, Homo sapien
catcttctcctcttcggcttgccgc

SEQ ID NO: 2275827 - DNA, 25 bp, Homo sapien
gcacctgggcccgaaccagttctgg

SEQ ID NO: 2275828 - DNA, 25 bp, Homo sapien
ctgggcaggtgtctgatgcctgtcc

SEQ ID NO: 2275829 - DNA, 25 bp, Homo sapien
caacgaggagcagtagaggccagaa

SEQ ID NO: 2275830 - DNA, 25 bp, Homo sapien
tcctcggccaacgaggagcagtaga

SEQ ID NO: 2275831 - DNA, 25 bp, Homo sapien
tgatgcctgtcctcggccaacgagg

SEQ ID NO: 2275832 - DNA, 25 bp, Homo sapien
gagagactgtgctggtacccagaca

SEQ ID NO: 2275833 - DNA, 25 bp, Homo sapien
tgctggtacccagacaatccccagg

SEQ ID NO: 2275834 - DNA, 25 bp, Homo sapien
tgtgctggtacccagacaatcccca

SEQ ID NO: 2275835 - DNA, 25 bp, Homo sapien
gactgtgctggtacccagacaatcc

SEQ ID NO: 2275836 - DNA, 25 bp, Homo sapien
tgggcacccagtctaagccgaaggt

SEQ ID NO: 2275837 - DNA, 25 bp, Homo sapien
ttcttgggcacccagtctaagccga

SEQ ID NO: 2275838 - DNA, 25 bp, Homo sapien
ccagtctaagccgaaggtgaacttc

SEQ ID NO: 2275839 - DNA, 25 bp, Homo sapien
cagggaatgaggcaaatcgtgtggt

SEQ ID NO: 2275840 - DNA, 25 bp, Homo sapien
cgagttctcaaatgacagtcaggga

SEQ ID NO: 2275841 - DNA, 25 bp, Homo sapien
gggcctagaacttgtgagacagaat

SEQ ID NO: 2275842 - DNA, 25 bp, Homo sapien
tagaaaatgaaggtacatcacgagt

SEQ ID NO: 2275843 - DNA, 25 bp, Homo sapien
tatattcctgtgagtctcaacttcc

SEQ ID NO: 2275844 - DNA, 25 bp, Homo sapien
caactgggagatgtcgagctcctct

SEQ ID NO: 2275845 - DNA, 25 bp, Homo sapien
gctcatccggagtgaccaggggtgg

SEQ ID NO: 2275846 - DNA, 25 bp, Homo sapien
tcctctggcatctcgatggacacat

SEQ ID NO: 2275847 - DNA, 25 bp, Homo sapien
gggagatgtcgagctcctctggcat

SEQ ID NO: 2275848 - DNA, 25 bp, Homo sapien
aaggagtcttcgtcttcgttgccat

SEQ ID NO: 2275849 - DNA, 25 bp, Homo sapien
agaaggagtcttcgtcttcgttgcc

SEQ ID NO: 2275850 - DNA, 25 bp, Homo sapien
tcttcgtcttcgttgccatagaaac

SEQ ID NO: 2275851 - DNA, 25 bp, Homo sapien
gagtcttcgtcttcgttgccataga

SEQ ID NO: 2275852 - DNA, 25 bp, Homo sapien
gtacacggaccgactgattgggcca

SEQ ID NO: 2275853 - DNA, 25 bp, Homo sapien
caaaatgaccacacaattgtaatgt

SEQ ID NO: 2275854 - DNA, 25 bp, Homo sapien
tttctcccatggattggcaccttat

SEQ ID NO: 2275855 - DNA, 25 bp, Homo sapien
taatgggaattgtgggtacacggac

SEQ ID NO: 2275856 - DNA, 25 bp, Homo sapien
tgtagtagacagctttgcggcaggc

SEQ ID NO: 2275857 - DNA, 25 bp, Homo sapien
agccccgctgttgcccgtgtagtag

SEQ ID NO: 2275858 - DNA, 25 bp, Homo sapien
atgacccagttcatggcggcctcag

SEQ ID NO: 2275859 - DNA, 25 bp, Homo sapien
caggcgtccatagggaatcccatct

SEQ ID NO: 2275860 - DNA, 25 bp, Homo sapien
atgtgaaggggttgatgtgtttggg

SEQ ID NO: 2275861 - DNA, 25 bp, Homo sapien
tggatgtgaaggggttgatgtgttt

SEQ ID NO: 2275862 - DNA, 25 bp, Homo sapien
ggatgtgaaggggttgatgtgtttg

SEQ ID NO: 2275863 - DNA, 25 bp, Homo sapien
gatgtgaaggggttgatgtgtttgg

SEQ ID NO: 2275864 - DNA, 25 bp, Homo sapien
agacaatggtggtcacacagtcctc

SEQ ID NO: 2275865 - DNA, 25 bp, Homo sapien
gagaagcccatggagacaatggtgg

SEQ ID NO: 2275866 - DNA, 25 bp, Homo sapien
gcgcttgtggagcccggcccactag

SEQ ID NO: 2275867 - DNA, 25 bp, Homo sapien
gcccgcagcgctttcaaggcctggt

SEQ ID NO: 2275868 - DNA, 25 bp, Homo sapien
cactggccccatgtccttagctggg

SEQ ID NO: 2275869 - DNA, 25 bp, Homo sapien
cccactggccccatgtccttagctg

SEQ ID NO: 2275870 - DNA, 25 bp, Homo sapien
ccactggccccatgtccttagctgg

SEQ ID NO: 2275871 - DNA, 25 bp, Homo sapien
cagcttcagcatccaggtcgtcaat

SEQ ID NO: 2275872 - DNA, 25 bp, Homo sapien
tcaatgtgactgaagatccagtcca

SEQ ID NO: 2275873 - DNA, 25 bp, Homo sapien
gtccacagcccgttctaaactattg

SEQ ID NO: 2275874 - DNA, 25 bp, Homo sapien
ccatcccggactttaggtcccactg

SEQ ID NO: 2275875 - DNA, 25 bp, Homo sapien
gccttctttcttgatgtggcagacg

SEQ ID NO: 2275876 - DNA, 25 bp, Homo sapien
catggtagaggtgcccatgtgacta

SEQ ID NO: 2275877 - DNA, 25 bp, Homo sapien
tgcccatgtgactaatgaaggcaaa

SEQ ID NO: 2275878 - DNA, 25 bp, Homo sapien
cagacgtagtgaccacacatggtag

SEQ ID NO: 2275879 - DNA, 25 bp, Homo sapien
cggcttctcggaggcacacactttc

SEQ ID NO: 2275880 - DNA, 25 bp, Homo sapien
agatgtagcccaggtccttgggcgg

SEQ ID NO: 2275881 - DNA, 25 bp, Homo sapien
acaggtgatcgctccactgggagag

SEQ ID NO: 2275882 - DNA, 25 bp, Homo sapien
caaaaggaaaaagggtacagagcag

SEQ ID NO: 2275883 - DNA, 25 bp, Homo sapien
gccgttgtacttttattcacatcgt

SEQ ID NO: 2275884 - DNA, 25 bp, Homo sapien
tcacatcgtgtattttggcattttc

SEQ ID NO: 2275885 - DNA, 25 bp, Homo sapien
gatgatgcactgttccgacgttccc

SEQ ID NO: 2275886 - DNA, 25 bp, Homo sapien
gctttcgggacaaggcgagacctgt

SEQ ID NO: 2275887 - DNA, 25 bp, Homo sapien
caagcggaactagctggtggcaact

SEQ ID NO: 2275888 - DNA, 25 bp, Homo sapien
gcggccactgcccacttatatagag

SEQ ID NO: 2275889 - DNA, 25 bp, Homo sapien
tgcttccgcccgttcatcttccagt

SEQ ID NO: 2275890 - DNA, 25 bp, Homo sapien
tgccgatgagctcccccagactctg

SEQ ID NO: 2275891 - DNA, 25 bp, Homo sapien
cttggccgcgttcagagtgccgatg

SEQ ID NO: 2275892 - DNA, 25 bp, Homo sapien
gtgtcggccggcaccttggccgcgt

SEQ ID NO: 2275893 - DNA, 25 bp, Homo sapien
cagacccctcctcggcgagggctta

SEQ ID NO: 2275894 - DNA, 25 bp, Homo sapien
gccagacccctcctcggcgagggct

SEQ ID NO: 2275895 - DNA, 25 bp, Homo sapien
ccagacccctcctcggcgagggctt

SEQ ID NO: 2275896 - DNA, 25 bp, Homo sapien
ggccagacccctcctcggcgagggc

SEQ ID NO: 2275897 - DNA, 25 bp, Homo sapien
ctgcatcaggtccgcgcggataccg

SEQ ID NO: 2275898 - DNA, 25 bp, Homo sapien
ccccagcggccctcgtcccacagcc

SEQ ID NO: 2275899 - DNA, 25 bp, Homo sapien
accccagcggccctcgtcccacagc

SEQ ID NO: 2275900 - DNA, 25 bp, Homo sapien
cccagcggccctcgtcccacagccc

SEQ ID NO: 2275901 - DNA, 25 bp, Homo sapien
cagcctgtttggcacgggctcggtc

SEQ ID NO: 2275902 - DNA, 25 bp, Homo sapien
caaaacgtccttacctgccccatag

SEQ ID NO: 2275903 - DNA, 25 bp, Homo sapien
caaggggcatcatgtgctccgccct

SEQ ID NO: 2275904 - DNA, 25 bp, Homo sapien
ggcgggagtcgttcaggttgccgaa

SEQ ID NO: 2275905 - DNA, 25 bp, Homo sapien
aactgactcagaggccttgcgcttt

SEQ ID NO: 2275906 - DNA, 25 bp, Homo sapien
ggaaagcggtaggatggctcctcac

SEQ ID NO: 2275907 - DNA, 25 bp, Homo sapien
ctaactgactcagaggccttgcgct

SEQ ID NO: 2275908 - DNA, 25 bp, Homo sapien
gaggccttgcgctttgctgtttcca

SEQ ID NO: 2275909 - DNA, 25 bp, Homo sapien
ctcccctttgcaaggcaaggatttg

SEQ ID NO: 2275910 - DNA, 25 bp, Homo sapien
tttggatcaggcccgcggctctccg

SEQ ID NO: 2275911 - DNA, 25 bp, Homo sapien
agagcatcctttgcccgtgggtggc

SEQ ID NO: 2275912 - DNA, 25 bp, Homo sapien
ccgcggctctccgatttcggtggag

SEQ ID NO: 2275913 - DNA, 25 bp, Homo sapien
ggggatgagactaaagaaagccttc

SEQ ID NO: 2275914 - DNA, 25 bp, Homo sapien
gggatgagactaaagaaagccttca

SEQ ID NO: 2275915 - DNA, 25 bp, Homo sapien
agggggatgagactaaagaaagcct

SEQ ID NO: 2275916 - DNA, 25 bp, Homo sapien
gcagtagggggagcacaaaccacct

SEQ ID NO: 2275917 - DNA, 25 bp, Homo sapien
atataggcagtagggggagcacaaa

SEQ ID NO: 2275918 - DNA, 25 bp, Homo sapien
ttgggatctagcttctgccgggcga

SEQ ID NO: 2275919 - DNA, 25 bp, Homo sapien
ccgggcgaagtcgatataggcagta

SEQ ID NO: 2275920 - DNA, 25 bp, Homo sapien
tgatctccccagtaaaagccccatt

SEQ ID NO: 2275921 - DNA, 25 bp, Homo sapien
ctgatctccccagtaaaagccccat

SEQ ID NO: 2275922 - DNA, 25 bp, Homo sapien
tccccagtaaaagccccattagtca

SEQ ID NO: 2275923 - DNA, 25 bp, Homo sapien
atctccccagtaaaagccccattag

SEQ ID NO: 2275924 - DNA, 25 bp, Homo sapien
ccacgtggctccgcagtctttgatc

SEQ ID NO: 2275925 - DNA, 25 bp, Homo sapien
cacccacgtggctccgcagtctttg

SEQ ID NO: 2275926 - DNA, 25 bp, Homo sapien
acgtggctccgcagtctttgatcat

SEQ ID NO: 2275927 - DNA, 25 bp, Homo sapien
aggaccacccacgtggctccgcagt

SEQ ID NO: 2275928 - DNA, 25 bp, Homo sapien
tcatctagcttctccccaatgcagg

SEQ ID NO: 2275929 - DNA, 25 bp, Homo sapien
ctgcgatgacctttgtctgctcgaa

SEQ ID NO: 2275930 - DNA, 25 bp, Homo sapien
ccccaatgcaggcgattactccgag

SEQ ID NO: 2275931 - DNA, 25 bp, Homo sapien
ctttgtctgctcgaaaacaaccttc

SEQ ID NO: 2275932 - DNA, 25 bp, Homo sapien
ctactgccccctagtggacattggg

SEQ ID NO: 2275933 - DNA, 25 bp, Homo sapien
ccagccaggttctccggagtacgaa

SEQ ID NO: 2275934 - DNA, 25 bp, Homo sapien
tctccggagtacgaagaacggtggc

SEQ ID NO: 2275935 - DNA, 25 bp, Homo sapien
gtacgaagaacggtggcctactgcc

SEQ ID NO: 2275936 - DNA, 25 bp, Homo sapien
ggtgttgcagtcttgccagtaccaa

SEQ ID NO: 2275937 - DNA, 25 bp, Homo sapien
gcccacacaggctcataggccagga

SEQ ID NO: 2275938 - DNA, 25 bp, Homo sapien
taggccaggacgaccttgctccagt

SEQ ID NO: 2275939 - DNA, 25 bp, Homo sapien
ccaatggcccacacaggctcatagg

SEQ ID NO: 2275940 - DNA, 25 bp, Homo sapien
ggatgagggcagggctcctgggccc

SEQ ID NO: 2275941 - DNA, 25 bp, Homo sapien
tgggatgagggcagggctcctgggc

SEQ ID NO: 2275942 - DNA, 25 bp, Homo sapien
atgagggcagggctcctgggcccgg

SEQ ID NO: 2275943 - DNA, 25 bp, Homo sapien
tgagggcagggctcctgggcccggt

SEQ ID NO: 2275944 - DNA, 25 bp, Homo sapien
gtggacacttagtgtggtttctgac

SEQ ID NO: 2275945 - DNA, 25 bp, Homo sapien
gacacttagtgtggtttctgactga

SEQ ID NO: 2275946 - DNA, 25 bp, Homo sapien
taccagggctctgatccaagccagg

SEQ ID NO: 2275947 - DNA, 25 bp, Homo sapien
tggcctaagtaagaccttttctgcc

SEQ ID NO: 2275948 - DNA, 25 bp, Homo sapien
gacttcagccatcctcggagcttct

SEQ ID NO: 2275949 - DNA, 25 bp, Homo sapien
caccgcatcagagacgttggacttc

SEQ ID NO: 2275950 - DNA, 25 bp, Homo sapien
catcctcggagcttctcgtgtactt

SEQ ID NO: 2275951 - DNA, 25 bp, Homo sapien
atgatacgggtgctctgagccaccg

SEQ ID NO: 2275952 - DNA, 25 bp, Homo sapien
cttgagggaagcaccacccacaagg

SEQ ID NO: 2275953 - DNA, 25 bp, Homo sapien
tccttgcaggttgccccagtcacag

SEQ ID NO: 2275954 - DNA, 25 bp, Homo sapien
cattgatgatgtccacgaattcggg

SEQ ID NO: 2275955 - DNA, 25 bp, Homo sapien
ggaagccatccacatcaggctggct

SEQ ID NO: 2275956 - DNA, 25 bp, Homo sapien
gaaagggcagttactgggcttctgg

SEQ ID NO: 2275957 - DNA, 25 bp, Homo sapien
acaggaaggagcagatgacaccatc

SEQ ID NO: 2275958 - DNA, 25 bp, Homo sapien
gggctgcttagtccctggcttggca

SEQ ID NO: 2275959 - DNA, 25 bp, Homo sapien
catcagaagcatatgcagggaaagg

SEQ ID NO: 2275960 - DNA, 25 bp, Homo sapien
ttggcctggtcccaaccattacagg

SEQ ID NO: 2275961 - DNA, 25 bp, Homo sapien
ccattacagggtgaagatataaaca

SEQ ID NO: 2275962 - DNA, 25 bp, Homo sapien
ggtcccaaccattacagggtgaaga

SEQ ID NO: 2275963 - DNA, 25 bp, Homo sapien
tacagggtgaagatataaacagtaa

SEQ ID NO: 2275964 - DNA, 25 bp, Homo sapien
gagggcagcactcctgccttctgag

SEQ ID NO: 2275965 - DNA, 25 bp, Homo sapien
gagagggcagcactcctgccttctg

SEQ ID NO: 2275966 - DNA, 25 bp, Homo sapien
agggcagcactcctgccttctgagg

SEQ ID NO: 2275967 - DNA, 25 bp, Homo sapien
tgggagagggcagcactcctgcctt

SEQ ID NO: 2275968 - DNA, 25 bp, Homo sapien
ttcacatacacagcacagaggcacg

SEQ ID NO: 2275969 - DNA, 25 bp, Homo sapien
tggttcacatacacagcacagaggc

SEQ ID NO: 2275970 - DNA, 25 bp, Homo sapien
ccctcacatgggtggttcacataca

SEQ ID NO: 2275971 - DNA, 25 bp, Homo sapien
cctcacatgggtggttcacatacac

SEQ ID NO: 2275972 - DNA, 25 bp, Homo sapien
aatgatcatttatatagctgcctca

SEQ ID NO: 2275973 - DNA, 25 bp, Homo sapien
agctgcctcaaaaaggaagattatc

SEQ ID NO: 2275974 - DNA, 25 bp, Homo sapien
tcaaaaaggaagattatctgggcaa

SEQ ID NO: 2275975 - DNA, 25 bp, Homo sapien
ctgggcaagtccagtgaaggcagac

SEQ ID NO: 2275976 - DNA, 25 bp, Homo sapien
tagtaagagatgttgttatagaaac

SEQ ID NO: 2275977 - DNA, 25 bp, Homo sapien
ggagccggcgttcaaggctatgaca

SEQ ID NO: 2275978 - DNA, 25 bp, Homo sapien
agctctgcggaaatcaacagcccca

SEQ ID NO: 2275979 - DNA, 25 bp, Homo sapien
gacagtctgctacgcaaaacatttt

SEQ ID NO: 2275980 - DNA, 25 bp, Homo sapien
gactgaccactacgcggcgctgctg

SEQ ID NO: 2275981 - DNA, 25 bp, Homo sapien
ctgggagatcagctggcccctagag

SEQ ID NO: 2275982 - DNA, 25 bp, Homo sapien
ggaaccccaaagactgttcagagaa

SEQ ID NO: 2275983 - DNA, 25 bp, Homo sapien
ctcctgtcccgagggcttggaagag

SEQ ID NO: 2275984 - DNA, 25 bp, Homo sapien
ctgccgcagcaagagaagggttaac

SEQ ID NO: 2275985 - DNA, 25 bp, Homo sapien
agggattcccgacgcggtgatgcca

SEQ ID NO: 2275986 - DNA, 25 bp, Homo sapien
tcgctcaggcggctcaaaggtcttg

SEQ ID NO: 2275987 - DNA, 25 bp, Homo sapien
tcaaagcgttaattctgagatgggc

SEQ ID NO: 2275988 - DNA, 25 bp, Homo sapien
cagtatacactgaacgctatttata

SEQ ID NO: 2275989 - DNA, 25 bp, Homo sapien
tgtgcctggtcttacagtcatgatg

SEQ ID NO: 2275990 - DNA, 25 bp, Homo sapien
caggttgggtggatgacaagtttca

SEQ ID NO: 2275991 - DNA, 25 bp, Homo sapien
tattgatgtcacatactggcaagca

SEQ ID NO: 2275992 - DNA, 25 bp, Homo sapien
gagctcaagtagtcttcacatctca

SEQ ID NO: 2275993 - DNA, 25 bp, Homo sapien
tgagctcaagtagtcttcacatctc

SEQ ID NO: 2275994 - DNA, 25 bp, Homo sapien
ccctctatggctccgttggtgacaa

SEQ ID NO: 2275995 - DNA, 25 bp, Homo sapien
cacagatcctggtctggcaagaggc

SEQ ID NO: 2275996 - DNA, 25 bp, Homo sapien
ggcaagaggccttcttcgacaatga

SEQ ID NO: 2275997 - DNA, 25 bp, Homo sapien
tggtgacaatgctaggcctatggcg

SEQ ID NO: 2275998 - DNA, 25 bp, Homo sapien
attccggctgggtgccctgcctccc

SEQ ID NO: 2275999 - DNA, 25 bp, Homo sapien
ccagcccagggggtagcgaaagaga

SEQ ID NO: 2276000 - DNA, 25 bp, Homo sapien
gagggagcaattgagggaccaccca

SEQ ID NO: 2276001 - DNA, 25 bp, Homo sapien
cagggggtagcgaaagagaggaggg

SEQ ID NO: 2276002 - DNA, 25 bp, Homo sapien
tccttgtggaagttgggcttcagga

SEQ ID NO: 2276003 - DNA, 25 bp, Homo sapien
cttgtggaagttgggcttcaggatc

SEQ ID NO: 2276004 - DNA, 25 bp, Homo sapien
agtccttgtggaagttgggcttcag

SEQ ID NO: 2276005 - DNA, 25 bp, Homo sapien
ggccacaccactgccagtccttgtg

SEQ ID NO: 2276006 - DNA, 25 bp, Homo sapien
ggtggatgggcccatatcagtgggc

SEQ ID NO: 2276007 - DNA, 25 bp, Homo sapien
gatgggcccatatcagtgggccatg

SEQ ID NO: 2276008 - DNA, 25 bp, Homo sapien
tggatgggcccatatcagtgggcca

SEQ ID NO: 2276009 - DNA, 25 bp, Homo sapien
tgggcccatatcagtgggccatgca

SEQ ID NO: 2276010 - DNA, 25 bp, Homo sapien
tgccagcttgtgctttgtagtgatg

SEQ ID NO: 2276011 - DNA, 25 bp, Homo sapien
tcttgtaaatgccagccacccttaa

SEQ ID NO: 2276012 - DNA, 25 bp, Homo sapien
gatgagtgaggagcggtcctccttc

SEQ ID NO: 2276013 - DNA, 25 bp, Homo sapien
ggatgagtgaggagcggtcctcctt

SEQ ID NO: 2276014 - DNA, 25 bp, Homo sapien
attgccgatgggcatttctggtcct

SEQ ID NO: 2276015 - DNA, 25 bp, Homo sapien
cctgtcagctgagtatccagttcga

SEQ ID NO: 2276016 - DNA, 25 bp, Homo sapien
ctgagtatccagttcgagttcttca

SEQ ID NO: 2276017 - DNA, 25 bp, Homo sapien
agtatccagttcgagttcttcagca

SEQ ID NO: 2276018 - DNA, 25 bp, Homo sapien
cgatgactctggctttctccttgta

SEQ ID NO: 2276019 - DNA, 25 bp, Homo sapien
ctagtcagcgatgactctggctttc

SEQ ID NO: 2276020 - DNA, 25 bp, Homo sapien
tgactctggctttctccttgtagac

SEQ ID NO: 2276021 - DNA, 25 bp, Homo sapien
tagtcagcgatgactctggctttct

SEQ ID NO: 2276022 - DNA, 25 bp, Homo sapien
tttgtgcctatatgccgaagagctg

SEQ ID NO: 2276023 - DNA, 25 bp, Homo sapien
ccagcgcgaagctgatgcagcggct

SEQ ID NO: 2276024 - DNA, 25 bp, Homo sapien
tttgcatgggccatacagagactaa

SEQ ID NO: 2276025 - DNA, 25 bp, Homo sapien
cagagactaacaaggcctggaagtt

SEQ ID NO: 2276026 - DNA, 25 bp, Homo sapien
atctccagttgtatgtctcaaaggc

SEQ ID NO: 2276027 - DNA, 25 bp, Homo sapien
caaaggcatctgatgcacaacaggt

SEQ ID NO: 2276028 - DNA, 25 bp, Homo sapien
gccgagcttccagtctttacattca

SEQ ID NO: 2276029 - DNA, 25 bp, Homo sapien
tcaatttcctatctcacatctccag

SEQ ID NO: 2276030 - DNA, 25 bp, Homo sapien
catcagcaacttgcactcctgaggc

SEQ ID NO: 2276031 - DNA, 25 bp, Homo sapien
taaaaaatgcgacacacttcatcag

SEQ ID NO: 2276032 - DNA, 25 bp, Homo sapien
gtcataaaaaatgcgacacacttca

SEQ ID NO: 2276033 - DNA, 25 bp, Homo sapien
cttcatcagcaacttgcactcctga

SEQ ID NO: 2276034 - DNA, 25 bp, Homo sapien
caaaggtgctagttctgatgcccac

SEQ ID NO: 2276035 - DNA, 25 bp, Homo sapien
gatgcccacaagaaaacatcaattc

SEQ ID NO: 2276036 - DNA, 25 bp, Homo sapien
gagatcttctggtccgtttgtttgc

SEQ ID NO: 2276037 - DNA, 25 bp, Homo sapien
tgaaaggctcacttatagttacacc

SEQ ID NO: 2276038 - DNA, 25 bp, Homo sapien
agccgagatcctgtcactgcactcc

SEQ ID NO: 2276039 - DNA, 25 bp, Homo sapien
gtgtggtggcgcacgctataatccc

SEQ ID NO: 2276040 - DNA, 25 bp, Homo sapien
acccgggaggcagaggttgcagtga

SEQ ID NO: 2276041 - DNA, 25 bp, Homo sapien
gaggctgggcaggaaaatcacttga

SEQ ID NO: 2276042 - DNA, 25 bp, Homo sapien
ccacccctacagatatatttagggc

SEQ ID NO: 2276043 - DNA, 25 bp, Homo sapien
cctacagatatatttagggctgttt

SEQ ID NO: 2276044 - DNA, 25 bp, Homo sapien
tttgtggcactgaatgatgatctac

SEQ ID NO: 2276045 - DNA, 25 bp, Homo sapien
ctgaatgatgatctacacagggcat

SEQ ID NO: 2276046 - DNA, 25 bp, Homo sapien
caacgaagatatgtggttaatgaaa

SEQ ID NO: 2276047 - DNA, 25 bp, Homo sapien
ctgctaaagtgacaacgaagatatg

SEQ ID NO: 2276048 - DNA, 25 bp, Homo sapien
taaagtgacaacgaagatatgtggt

SEQ ID NO: 2276049 - DNA, 25 bp, Homo sapien
acaactgctaaagtgacaacgaaga

SEQ ID NO: 2276050 - DNA, 25 bp, Homo sapien
tgccgcgagctttgccgtggttacg

SEQ ID NO: 2276051 - DNA, 25 bp, Homo sapien
ttacgcaactggcacctgggcggct

SEQ ID NO: 2276052 - DNA, 25 bp, Homo sapien
ggctcttcggagttggatcttgact

SEQ ID NO: 2276053 - DNA, 25 bp, Homo sapien
atttcctccccgctagtgggcaggg

SEQ ID NO: 2276054 - DNA, 25 bp, Homo sapien
aatgctccacgcatgaaagtcagcg

SEQ ID NO: 2276055 - DNA, 25 bp, Homo sapien
cttctggaacccgagctagagacgc

SEQ ID NO: 2276056 - DNA, 25 bp, Homo sapien
cctgggatctctgttccgggccaga

SEQ ID NO: 2276057 - DNA, 25 bp, Homo sapien
ccaagaacggactttcagcctcggg

SEQ ID NO: 2276058 - DNA, 25 bp, Homo sapien
caagcctccatgataccctgttagg

SEQ ID NO: 2276059 - DNA, 25 bp, Homo sapien
taagtcgtgaacaagtgacaagcct

SEQ ID NO: 2276060 - DNA, 25 bp, Homo sapien
caggctcaactgtaatagcgagatc

SEQ ID NO: 2276061 - DNA, 25 bp, Homo sapien
cagaggctcggaaggatgtcaaaag

SEQ ID NO: 2276062 - DNA, 25 bp, Homo sapien
gatggctgcacatagctatcagaga

SEQ ID NO: 2276063 - DNA, 25 bp, Homo sapien
gtctcataagagcaaggaaccatcc

SEQ ID NO: 2276064 - DNA, 25 bp, Homo sapien
tccaggactgcaatccacagtgatg

SEQ ID NO: 2276065 - DNA, 25 bp, Homo sapien
tatcagagactcaagtgggaccact

SEQ ID NO: 2276066 - DNA, 25 bp, Homo sapien
aattacaagcacgtgccaccctccc

SEQ ID NO: 2276067 - DNA, 25 bp, Homo sapien
tggaattacaagcacgtgccaccct

SEQ ID NO: 2276068 - DNA, 25 bp, Homo sapien
caagcacgtgccaccctcccacttc

SEQ ID NO: 2276069 - DNA, 25 bp, Homo sapien
aagcacgtgccaccctcccacttca

SEQ ID NO: 2276070 - DNA, 25 bp, Homo sapien
gaatctggtccaaagtcgaggtcct

SEQ ID NO: 2276071 - DNA, 25 bp, Homo sapien
ccaggttgttatggaaaaaggcagt

SEQ ID NO: 2276072 - DNA, 25 bp, Homo sapien
gtttcctgcccacaatcattgtgca

SEQ ID NO: 2276073 - DNA, 25 bp, Homo sapien
taacgctgtttaaatccccatagat

SEQ ID NO: 2276074 - DNA, 25 bp, Homo sapien
ttttcacaggcacaactgatgcagg

SEQ ID NO: 2276075 - DNA, 25 bp, Homo sapien
catgactgctcctaccgagcaaggc

SEQ ID NO: 2276076 - DNA, 25 bp, Homo sapien
tgcagggcaggtgaacacccaaatt

SEQ ID NO: 2276077 - DNA, 25 bp, Homo sapien
tcctgagcatgtggtagaagataca

SEQ ID NO: 2276078 - DNA, 25 bp, Homo sapien
ctcgtccttcgaagcaaaaagggcg

SEQ ID NO: 2276079 - DNA, 25 bp, Homo sapien
tcaggaaaaactcgtccttcgaagc

SEQ ID NO: 2276080 - DNA, 25 bp, Homo sapien
caggaaaaactcgtccttcgaagca

SEQ ID NO: 2276081 - DNA, 25 bp, Homo sapien
gatgcgcaaatcagccggggagggg

SEQ ID NO: 2276082 - DNA, 25 bp, Homo sapien
gggaggggattgatcagtagttgcc

SEQ ID NO: 2276083 - DNA, 25 bp, Homo sapien
tagttgcctggttaccacgccactt

SEQ ID NO: 2276084 - DNA, 25 bp, Homo sapien
cgggaacccggatgaggcgcggaag

SEQ ID NO: 2276085 - DNA, 25 bp, Homo sapien
cccgagagggaaggactgtttagca

SEQ ID NO: 2276086 - DNA, 25 bp, Homo sapien
gtttctgctcaatcagaagcagttc

SEQ ID NO: 2276087 - DNA, 25 bp, Homo sapien
tggagaggcccttggtcccgagagg

SEQ ID NO: 2276088 - DNA, 25 bp, Homo sapien
ggcacttggcaactgcagctcgcca

SEQ ID NO: 2276089 - DNA, 25 bp, Homo sapien
tcccattgcgccatccgtaatccct

SEQ ID NO: 2276090 - DNA, 25 bp, Homo sapien
acaccagcctaaagcgcagtctcca

SEQ ID NO: 2276091 - DNA, 25 bp, Homo sapien
tcccactcaattcgccttagcaaag

SEQ ID NO: 2276092 - DNA, 25 bp, Homo sapien
tccgtaatccctgctccattcattt

SEQ ID NO: 2276093 - DNA, 25 bp, Homo sapien
ttccctcctgaaagctctggagtca

SEQ ID NO: 2276094 - DNA, 25 bp, Homo sapien
cttccctcctgaaagctctggagtc

SEQ ID NO: 2276095 - DNA, 25 bp, Homo sapien
ctcagaatcatcctggtctggctca

SEQ ID NO: 2276096 - DNA, 25 bp, Homo sapien
tcagaatcatcctggtctggctcag

SEQ ID NO: 2276097 - DNA, 25 bp, Homo sapien
atgtcctccgtgaggggggtgggca

SEQ ID NO: 2276098 - DNA, 25 bp, Homo sapien
catgtcctccgtgaggggggtgggc

SEQ ID NO: 2276099 - DNA, 25 bp, Homo sapien
tctttaacctccagcttgacataag

SEQ ID NO: 2276100 - DNA, 25 bp, Homo sapien
taagcatgagccagcccattgcctg

SEQ ID NO: 2276101 - DNA, 25 bp, Homo sapien
cattgcctgtcttacagagcagaga

SEQ ID NO: 2276102 - DNA, 25 bp, Homo sapien
taacctccagcttgacataagcatg

SEQ ID NO: 2276103 - DNA, 25 bp, Homo sapien
ttcaagacgaggatgagagatgcct

SEQ ID NO: 2276104 - DNA, 25 bp, Homo sapien
cgattgccatcagccttgagccaga

SEQ ID NO: 2276105 - DNA, 25 bp, Homo sapien
tgtaggagcgcagcaagtagatgtc

SEQ ID NO: 2276106 - DNA, 25 bp, Homo sapien
caaaactagcaatctgcaggtaggg

SEQ ID NO: 2276107 - DNA, 25 bp, Homo sapien
aatgaatgcagactgccatgtgccc

SEQ ID NO: 2276108 - DNA, 25 bp, Homo sapien
gaatcttgtgtagcccatcctaaag

SEQ ID NO: 2276109 - DNA, 25 bp, Homo sapien
caaggaccatactgcccacttctgt

SEQ ID NO: 2276110 - DNA, 25 bp, Homo sapien
gctatatgagaatagggacgttcct

SEQ ID NO: 2276111 - DNA, 25 bp, Homo sapien
gaggttcttcagcttaggaagattg

SEQ ID NO: 2276112 - DNA, 25 bp, Homo sapien
tggttcccccgaagctccactgtgt

SEQ ID NO: 2276113 - DNA, 25 bp, Homo sapien
actgtgtgcaggctgatcaacttct

SEQ ID NO: 2276114 - DNA, 25 bp, Homo sapien
tcagcttaggaagattgattcccag

SEQ ID NO: 2276115 - DNA, 25 bp, Homo sapien
cacagcatctggaaccaactatggt

SEQ ID NO: 2276116 - DNA, 25 bp, Homo sapien
ccacagactgatgtttgtacctcaa

SEQ ID NO: 2276117 - DNA, 25 bp, Homo sapien
tatatattatcagccctgctaggtg

SEQ ID NO: 2276118 - DNA, 25 bp, Homo sapien
taatgatgaagttagtagctgagcc

SEQ ID NO: 2276119 - DNA, 25 bp, Homo sapien
gagggtgatgcatctgggaagggca

SEQ ID NO: 2276120 - DNA, 25 bp, Homo sapien
gcgcccggcctgattgtggttctta

SEQ ID NO: 2276121 - DNA, 25 bp, Homo sapien
gggtagctgaacacgtgaaagcttt

SEQ ID NO: 2276122 - DNA, 25 bp, Homo sapien
ggcatggagcactgcacccatatcc

SEQ ID NO: 2276123 - DNA, 25 bp, Homo sapien
ttgtctcgaagatgcaaggtggtga

SEQ ID NO: 2276124 - DNA, 25 bp, Homo sapien
aggttgaggtactgcaatgatttca

SEQ ID NO: 2276125 - DNA, 25 bp, Homo sapien
gtcaatctggttgtctcgaagatgc

SEQ ID NO: 2276126 - DNA, 25 bp, Homo sapien
tctggagaagccactcagggtgtca

SEQ ID NO: 2276127 - DNA, 25 bp, Homo sapien
ctggtcaggggtaggggcaaggtgg

SEQ ID NO: 2276128 - DNA, 25 bp, Homo sapien
gcaaggtggggcttggagagggtgc

SEQ ID NO: 2276129 - DNA, 25 bp, Homo sapien
aaggtggggcttggagagggtgcat

SEQ ID NO: 2276130 - DNA, 25 bp, Homo sapien
ggtggggcttggagagggtgcatac

SEQ ID NO: 2276131 - DNA, 25 bp, Homo sapien
tagtgttgcaactcagtgcagaaga

SEQ ID NO: 2276132 - DNA, 25 bp, Homo sapien
gggtcacaagctataagggatttag

SEQ ID NO: 2276133 - DNA, 25 bp, Homo sapien
tctcaataattgtggattgaatgaa

SEQ ID NO: 2276134 - DNA, 25 bp, Homo sapien
ggcacatagcacattctcaataatt

SEQ ID NO: 2276135 - DNA, 25 bp, Homo sapien
caccagatccgtgtggcagagttca

SEQ ID NO: 2276136 - DNA, 25 bp, Homo sapien
tgtgagccccttaggaacaggaatc

SEQ ID NO: 2276137 - DNA, 25 bp, Homo sapien
cataaagtcctccatccgacaagag

SEQ ID NO: 2276138 - DNA, 25 bp, Homo sapien
cttgttgactaaggaaagaggcagt

SEQ ID NO: 2276139 - DNA, 25 bp, Homo sapien
tagctggtttcgtccgtgcatgggt

SEQ ID NO: 2276140 - DNA, 25 bp, Homo sapien
gtgcatgggttatcaagcagcacca

SEQ ID NO: 2276141 - DNA, 25 bp, Homo sapien
aaggtatggcatctgcaccagggcc

SEQ ID NO: 2276142 - DNA, 25 bp, Homo sapien
cttgggcaggtctcgaagcttggcc

SEQ ID NO: 2276143 - DNA, 25 bp, Homo sapien
tctttaagggtcctgcttgtctgat

SEQ ID NO: 2276144 - DNA, 25 bp, Homo sapien
cctcctctctttaagggtcctgctt

SEQ ID NO: 2276145 - DNA, 25 bp, Homo sapien
cctcctaagtctttctcagctggtc

SEQ ID NO: 2276146 - DNA, 25 bp, Homo sapien
taagtctttctcagctggtcccagg

SEQ ID NO: 2276147 - DNA, 25 bp, Homo sapien
ggaggcgggcagatcacgaggtcag

SEQ ID NO: 2276148 - DNA, 25 bp, Homo sapien
agggaccaggcgctgtggctcaccc

SEQ ID NO: 2276149 - DNA, 25 bp, Homo sapien
ctgtaatcccagcactttggaaggc

SEQ ID NO: 2276150 - DNA, 25 bp, Homo sapien
gagatccagaccatcctggctaacg

SEQ ID NO: 2276151 - DNA, 25 bp, Homo sapien
acactgcccagaggaccggcacaga

SEQ ID NO: 2276152 - DNA, 25 bp, Homo sapien
tctctgtcatacatgtggtggctgc

SEQ ID NO: 2276153 - DNA, 25 bp, Homo sapien
tgggcctcaggttgtgatgaatttc

SEQ ID NO: 2276154 - DNA, 25 bp, Homo sapien
tctgatcaggtctgaaggccagcgt

SEQ ID NO: 2276155 - DNA, 25 bp, Homo sapien
cagccgccttcgcaagtctctccaa

SEQ ID NO: 2276156 - DNA, 25 bp, Homo sapien
tattggaaatccgaacaccccagcc

SEQ ID NO: 2276157 - DNA, 25 bp, Homo sapien
cggtcttggctctcacccacgcctg

SEQ ID NO: 2276158 - DNA, 25 bp, Homo sapien
aagtctctccaaccactcctaccag

SEQ ID NO: 2276159 - DNA, 25 bp, Homo sapien
ccccgatgagtcaggagctgccggc

SEQ ID NO: 2276160 - DNA, 25 bp, Homo sapien
ggaggaggcgcctatagggccgcgc

SEQ ID NO: 2276161 - DNA, 25 bp, Homo sapien
actgcagactcagacggtggtagtg

SEQ ID NO: 2276162 - DNA, 25 bp, Homo sapien
cggaggcgcacgtacgagcgcgggt

SEQ ID NO: 2276163 - DNA, 25 bp, Homo sapien
aaggcgcatgcaatacaggtgtcgg

SEQ ID NO: 2276164 - DNA, 25 bp, Homo sapien
tctagggctgtagaagggattcccc

SEQ ID NO: 2276165 - DNA, 25 bp, Homo sapien
tcaaatgatgagatgggagaacact

SEQ ID NO: 2276166 - DNA, 25 bp, Homo sapien
gatctcctcagagcggaatggctgc

SEQ ID NO: 2276167 - DNA, 25 bp, Homo sapien
gggagtccaggatctcccgggccca

SEQ ID NO: 2276168 - DNA, 25 bp, Homo sapien
ggttcccgcgggagtccaggatctc

SEQ ID NO: 2276169 - DNA, 25 bp, Homo sapien
gttcccgcgggagtccaggatctcc

SEQ ID NO: 2276170 - DNA, 25 bp, Homo sapien
agtccaggatctcccgggcccagat

SEQ ID NO: 2276171 - DNA, 25 bp, Homo sapien
cctaagtaacgctgtttgtctccat

SEQ ID NO: 2276172 - DNA, 25 bp, Homo sapien
ctgggcactgcagcccggaaaagac

SEQ ID NO: 2276173 - DNA, 25 bp, Homo sapien
agggcctcatagatgcccgtagagg

SEQ ID NO: 2276174 - DNA, 25 bp, Homo sapien
ctttgcctaagtaacgctgtttgtc

SEQ ID NO: 2276175 - DNA, 25 bp, Homo sapien
cgcgatggtggagttgatgtggtcc

SEQ ID NO: 2276176 - DNA, 25 bp, Homo sapien
ctgatgagggctggcgcgatggtgg

SEQ ID NO: 2276177 - DNA, 25 bp, Homo sapien
gatgagggctggcgcgatggtggag

SEQ ID NO: 2276178 - DNA, 25 bp, Homo sapien
gcgcgatggtggagttgatgtggtc

SEQ ID NO: 2276179 - DNA, 25 bp, Homo sapien
actccagcatcaggttgtccagttt

SEQ ID NO: 2276180 - DNA, 25 bp, Homo sapien
ctccagcatcaggttgtccagtttc

SEQ ID NO: 2276181 - DNA, 25 bp, Homo sapien
tccagcatcaggttgtccagtttct

SEQ ID NO: 2276182 - DNA, 25 bp, Homo sapien
tccatctgtagtctccaaaaggagc

SEQ ID NO: 2276183 - DNA, 25 bp, Homo sapien
tctccaaaaggagccagtaaaggag

SEQ ID NO: 2276184 - DNA, 25 bp, Homo sapien
aacacctcatccatgctctcttgaa

SEQ ID NO: 2276185 - DNA, 25 bp, Homo sapien
ttggaaacggcagagagccacacct

SEQ ID NO: 2276186 - DNA, 25 bp, Homo sapien
gaggtctgagttcccggccagctga

SEQ ID NO: 2276187 - DNA, 25 bp, Homo sapien
agctgagcaatgtggcgatacaggg

SEQ ID NO: 2276188 - DNA, 25 bp, Homo sapien
atgaggtctgagttcccggccagct

SEQ ID NO: 2276189 - DNA, 25 bp, Homo sapien
ggatgaggtctgagttcccggccag

SEQ ID NO: 2276190 - DNA, 25 bp, Homo sapien
gagccaccattgatcacgttgaagg

SEQ ID NO: 2276191 - DNA, 25 bp, Homo sapien
ggcatccttgccgtatttgtccttg

SEQ ID NO: 2276192 - DNA, 25 bp, Homo sapien
cttgatgactcccttgagtgtatgg

SEQ ID NO: 2276193 - DNA, 25 bp, Homo sapien
tagacctctgcacctagtcgcatgg

SEQ ID NO: 2276194 - DNA, 25 bp, Homo sapien
caggacagatttcgaatggatggga

SEQ ID NO: 2276195 - DNA, 25 bp, Homo sapien
cagcagtaactccacaagtcaaggt

SEQ ID NO: 2276196 - DNA, 25 bp, Homo sapien
taaatccaggttatttggccccaga

SEQ ID NO: 2276197 - DNA, 25 bp, Homo sapien
gaagtaagaaagttcaccagcagta

SEQ ID NO: 2276198 - DNA, 25 bp, Homo sapien
gatcttttccgtgtagccagccttg

SEQ ID NO: 2276199 - DNA, 25 bp, Homo sapien
tttgccatcacgataaaactctgag

SEQ ID NO: 2276200 - DNA, 25 bp, Homo sapien
tgacaaagtcctggtagagtgcccc

SEQ ID NO: 2276201 - DNA, 25 bp, Homo sapien
cccagtgatgtatcgggaaggatca

SEQ ID NO: 2276202 - DNA, 25 bp, Homo sapien
tccccctcacaccacttcctctcac

SEQ ID NO: 2276203 - DNA, 25 bp, Homo sapien
ctccccctcacaccacttcctctca

SEQ ID NO: 2276204 - DNA, 25 bp, Homo sapien
agagttgctgggacacgtccctgcc

SEQ ID NO: 2276205 - DNA, 25 bp, Homo sapien
gttgctgggacacgtccctgcctgc

SEQ ID NO: 2276206 - DNA, 25 bp, Homo sapien
gagtcagcaccccataaggtccaga

SEQ ID NO: 2276207 - DNA, 25 bp, Homo sapien
accccataaggtccagagttgctgg

SEQ ID NO: 2276208 - DNA, 25 bp, Homo sapien
catcaggcaggaacatgccccttta

SEQ ID NO: 2276209 - DNA, 25 bp, Homo sapien
caggcaggaacatgcccctttattc

SEQ ID NO: 2276210 - DNA, 25 bp, Homo sapien
tacatcaggcaggaacatgcccctt

SEQ ID NO: 2276211 - DNA, 25 bp, Homo sapien
ctacatcaggcaggaacatgcccct

SEQ ID NO: 2276212 - DNA, 25 bp, Homo sapien
aggggggaggtgttcatcttccctg

SEQ ID NO: 2276213 - DNA, 25 bp, Homo sapien
aatctggatccctacattggctgtg

SEQ ID NO: 2276214 - DNA, 25 bp, Homo sapien
caatcatcctggtcaaatgggtcct

SEQ ID NO: 2276215 - DNA, 25 bp, Homo sapien
gcttggatggcttcagtgaccgagc

SEQ ID NO: 2276216 - DNA, 25 bp, Homo sapien
ctcaatacgttttgggttggtcact

SEQ ID NO: 2276217 - DNA, 25 bp, Homo sapien
tctcctgagcgatgactcaccatga

SEQ ID NO: 2276218 - DNA, 25 bp, Homo sapien
caccaggtcagcaatgaatgtgtcc

SEQ ID NO: 2276219 - DNA, 25 bp, Homo sapien
cctcagtctctcctgagcgatgact

SEQ ID NO: 2276220 - DNA, 25 bp, Homo sapien
accatgaccccccagccattctcct

SEQ ID NO: 2276221 - DNA, 25 bp, Homo sapien
tgggtgagctagaaataccaatccc

SEQ ID NO: 2276222 - DNA, 25 bp, Homo sapien
gtgggtgagctagaaataccaatcc

SEQ ID NO: 2276223 - DNA, 25 bp, Homo sapien
aggtgggtgagctagaaataccaat

SEQ ID NO: 2276224 - DNA, 25 bp, Homo sapien
ggtgggtgagctagaaataccaatc

SEQ ID NO: 2276225 - DNA, 25 bp, Homo sapien
tcaaaggatttgcagctcagtgact

SEQ ID NO: 2276226 - DNA, 25 bp, Homo sapien
tatttagccagacgttcagaacggc

SEQ ID NO: 2276227 - DNA, 25 bp, Homo sapien
tagccagacgttcagaacggcacgg

SEQ ID NO: 2276228 - DNA, 25 bp, Homo sapien
gagctggttgtatttagccagacgt

SEQ ID NO: 2276229 - DNA, 25 bp, Homo sapien
tggttgtatttagccagacgttcag

SEQ ID NO: 2276230 - DNA, 25 bp, Homo sapien
tgggattacggaagttatgtccggc

SEQ ID NO: 2276231 - DNA, 25 bp, Homo sapien
tatgtccggcaaagcgagcttcatc

SEQ ID NO: 2276232 - DNA, 25 bp, Homo sapien
cggaagttatgtccggcaaagcgag

SEQ ID NO: 2276233 - DNA, 25 bp, Homo sapien
gattacggaagttatgtccggcaaa

SEQ ID NO: 2276234 - DNA, 25 bp, Homo sapien
cagcggagcaggtcaatcagggaag

SEQ ID NO: 2276235 - DNA, 25 bp, Homo sapien
gtggaaagtgcggaaccccaatgag

SEQ ID NO: 2276236 - DNA, 25 bp, Homo sapien
ccccaatgagtagggcacagaaagg

SEQ ID NO: 2276237 - DNA, 25 bp, Homo sapien
aactatcacagatcaggacagcaag

SEQ ID NO: 2276238 - DNA, 25 bp, Homo sapien
ccccttttataataatcctcattca

SEQ ID NO: 2276239 - DNA, 25 bp, Homo sapien
cttttataataatcctcattcacat

SEQ ID NO: 2276240 - DNA, 25 bp, Homo sapien
tttataataatcctcattcacattt

SEQ ID NO: 2276241 - DNA, 25 bp, Homo sapien
ccttttataataatcctcattcaca

SEQ ID NO: 2276242 - DNA, 25 bp, Homo sapien
ggaactgatgtcaaggccctttcta

SEQ ID NO: 2276243 - DNA, 25 bp, Homo sapien
caggcttcagtgagtacacacaaag

SEQ ID NO: 2276244 - DNA, 25 bp, Homo sapien
cacagttcacggctcatatgcaaag

SEQ ID NO: 2276245 - DNA, 25 bp, Homo sapien
gacacgtgggacaagagcaaagcac

SEQ ID NO: 2276246 - DNA, 25 bp, Homo sapien
gaggtgctcatttcaatgccacaga

SEQ ID NO: 2276247 - DNA, 25 bp, Homo sapien
aatggaggtgctcatttcaatgcca

SEQ ID NO: 2276248 - DNA, 25 bp, Homo sapien
ggaggtgctcatttcaatgccacag

SEQ ID NO: 2276249 - DNA, 25 bp, Homo sapien
tggaggtgctcatttcaatgccaca

SEQ ID NO: 2276250 - DNA, 25 bp, Homo sapien
cagctctgctatccagtttcaccag

SEQ ID NO: 2276251 - DNA, 25 bp, Homo sapien
ctctcccctcatagggactagagta

SEQ ID NO: 2276252 - DNA, 25 bp, Homo sapien
tcatagggactagagtaagactcct

SEQ ID NO: 2276253 - DNA, 25 bp, Homo sapien
tagagtaagactccttagacacaac

SEQ ID NO: 2276254 - DNA, 25 bp, Homo sapien
catcatctcggccatatttgttcag

SEQ ID NO: 2276255 - DNA, 25 bp, Homo sapien
ccacctagccagaatggggtaggca

SEQ ID NO: 2276256 - DNA, 25 bp, Homo sapien
ggtaggcagtgccatcatctcggcc

SEQ ID NO: 2276257 - DNA, 25 bp, Homo sapien
agtgccatcatctcggccatatttg

SEQ ID NO: 2276258 - DNA, 25 bp, Homo sapien
tgttccattcgagaaccagccaggg

SEQ ID NO: 2276259 - DNA, 25 bp, Homo sapien
gaagtcctgttccattcgagaacca

SEQ ID NO: 2276260 - DNA, 25 bp, Homo sapien
ttgttggcagaggcccagtacagga

SEQ ID NO: 2276261 - DNA, 25 bp, Homo sapien
gtcctgttccattcgagaaccagcc

SEQ ID NO: 2276262 - DNA, 25 bp, Homo sapien
tgaagttcctcccacttggcgtcca

SEQ ID NO: 2276263 - DNA, 25 bp, Homo sapien
cttgaagttcctcccacttggcgtc

SEQ ID NO: 2276264 - DNA, 25 bp, Homo sapien
gaggcccgcaggggacagccttgaa

SEQ ID NO: 2276265 - DNA, 25 bp, Homo sapien
ccttgaagttcctcccacttggcgt

SEQ ID NO: 2276266 - DNA, 25 bp, Homo sapien
ctcagtcgccgccgcgacgacggcg

SEQ ID NO: 2276267 - DNA, 25 bp, Homo sapien
ctgctggtagctcgggacggctggc

SEQ ID NO: 2276268 - DNA, 25 bp, Homo sapien
tccgagcgggattccgggctccggc

SEQ ID NO: 2276269 - DNA, 25 bp, Homo sapien
ccctctcctcttctcggcctcagtc

SEQ ID NO: 2276270 - DNA, 25 bp, Homo sapien
gaacctgttcaccaagtcagttagg

SEQ ID NO: 2276271 - DNA, 25 bp, Homo sapien
gaatgtacctgaggaacacagcaat

SEQ ID NO: 2276272 - DNA, 25 bp, Homo sapien
agaacaacacccaccatagcaaaag

SEQ ID NO: 2276273 - DNA, 25 bp, Homo sapien
tcataaaagaacaagtaatcctggg

SEQ ID NO: 2276274 - DNA, 25 bp, Homo sapien
ctgtgcccggccaactagttttctt

SEQ ID NO: 2276275 - DNA, 25 bp, Homo sapien
actgtgcccggccaactagttttct

SEQ ID NO: 2276276 - DNA, 25 bp, Homo sapien
tcttcaggctgtggagaccccattc

SEQ ID NO: 2276277 - DNA, 25 bp, Homo sapien
gggcagctgaatacagaaacttctc

SEQ ID NO: 2276278 - DNA, 25 bp, Homo sapien
agtgtgggcacctggaacttttgca

SEQ ID NO: 2276279 - DNA, 25 bp, Homo sapien
cttttgcaggatctgttttcaatga

SEQ ID NO: 2276280 - DNA, 25 bp, Homo sapien
cgatctcagttcttcccggggccca

SEQ ID NO: 2276281 - DNA, 25 bp, Homo sapien
gaggcccggcccctcgatctcagtt

SEQ ID NO: 2276282 - DNA, 25 bp, Homo sapien
gcccctcgatctcagttcttcccgg

SEQ ID NO: 2276283 - DNA, 25 bp, Homo sapien
gcccggcccctcgatctcagttctt

SEQ ID NO: 2276284 - DNA, 25 bp, Homo sapien
tggtgcattggtctcctcactttca

SEQ ID NO: 2276285 - DNA, 25 bp, Homo sapien
ccgaccctgcttgttgacctttggg

SEQ ID NO: 2276286 - DNA, 25 bp, Homo sapien
tcttttttggtgcattggtctcctc

SEQ ID NO: 2276287 - DNA, 25 bp, Homo sapien
actccgaccctgcttgttgaccttt

SEQ ID NO: 2276288 - DNA, 25 bp, Homo sapien
catgatatccagtgggtgtcacaga

SEQ ID NO: 2276289 - DNA, 25 bp, Homo sapien
tcgatatccctagggtcgctgctgc

SEQ ID NO: 2276290 - DNA, 25 bp, Homo sapien
cgtgcttcggttgtcctggtcgata

SEQ ID NO: 2276291 - DNA, 25 bp, Homo sapien
cgtccaagctatccagatcggaggg

SEQ ID NO: 2276292 - DNA, 25 bp, Homo sapien
ctgaaatgggagtagtgggtggggg

SEQ ID NO: 2276293 - DNA, 25 bp, Homo sapien
atgggagtagtgggtggggggtgct

SEQ ID NO: 2276294 - DNA, 25 bp, Homo sapien
ggtaggcggctttgttgggggagca

SEQ ID NO: 2276295 - DNA, 25 bp, Homo sapien
gtaggcggctttgttgggggagcac

SEQ ID NO: 2276296 - DNA, 25 bp, Homo sapien
agaggctgatgcattgttgaggggt

SEQ ID NO: 2276297 - DNA, 25 bp, Homo sapien
cacatgggggaagttggctggtggt

SEQ ID NO: 2276298 - DNA, 25 bp, Homo sapien
ggggagagggcagatgaccaggtag

SEQ ID NO: 2276299 - DNA, 25 bp, Homo sapien
tgggggaggcaggttcggtgtcaca

SEQ ID NO: 2276300 - DNA, 25 bp, Homo sapien
gctactactagaggatgaataagga

SEQ ID NO: 2276301 - DNA, 25 bp, Homo sapien
ctgcagagctactactagaggatga

SEQ ID NO: 2276302 - DNA, 25 bp, Homo sapien
gagccagagttgggcccttctctgg

SEQ ID NO: 2276303 - DNA, 25 bp, Homo sapien
tcatggggggcgctggagcagaaga

SEQ ID NO: 2276304 - DNA, 25 bp, Homo sapien
ctgggaagctgggaagggggaggca

SEQ ID NO: 2276305 - DNA, 25 bp, Homo sapien
ggggaggcagaggaagaggaggaag

SEQ ID NO: 2276306 - DNA, 25 bp, Homo sapien
gaggcagaggaagaggaggaagaac

SEQ ID NO: 2276307 - DNA, 25 bp, Homo sapien
gggaagctgggaagggggaggcaga

SEQ ID NO: 2276308 - DNA, 25 bp, Homo sapien
tgatggtgatgtgttgagactggtg

SEQ ID NO: 2276309 - DNA, 25 bp, Homo sapien
acttggggggctgattggagacaga

SEQ ID NO: 2276310 - DNA, 25 bp, Homo sapien
cattgctgttggctaagaggcggcc

SEQ ID NO: 2276311 - DNA, 25 bp, Homo sapien
ggcccagagtttccgtgatgctgct

SEQ ID NO: 2276312 - DNA, 25 bp, Homo sapien
tgcttggctgtaggacacctggctg

SEQ ID NO: 2276313 - DNA, 25 bp, Homo sapien
ttggctgtaggacacctggctgtga

SEQ ID NO: 2276314 - DNA, 25 bp, Homo sapien
ggagacatggcgtaagggtgtgcgt

SEQ ID NO: 2276315 - DNA, 25 bp, Homo sapien
taagggtgtgcgtggtgggagctac

SEQ ID NO: 2276316 - DNA, 25 bp, Homo sapien
gaggggtgtgaacatgggtaggacc

SEQ ID NO: 2276317 - DNA, 25 bp, Homo sapien
gggaggggtgtgaacatgggtagga

SEQ ID NO: 2276318 - DNA, 25 bp, Homo sapien
ggaggggtgtgaacatgggtaggac

SEQ ID NO: 2276319 - DNA, 25 bp, Homo sapien
caatgaccgtggaaagggtagccga

SEQ ID NO: 2276320 - DNA, 25 bp, Homo sapien
ggtagccgaagaggtggtgaccgta

SEQ ID NO: 2276321 - DNA, 25 bp, Homo sapien
aggaagccacggtggcaatgaccgt

SEQ ID NO: 2276322 - DNA, 25 bp, Homo sapien
gtggtgaccgtaggcaccggtggga

SEQ ID NO: 2276323 - DNA, 25 bp, Homo sapien
gcaccgggctctcgggggtctcata

SEQ ID NO: 2276324 - DNA, 25 bp, Homo sapien
tggcgaggttcctcgatagcccggt

SEQ ID NO: 2276325 - DNA, 25 bp, Homo sapien
tgggcctgcaggtggcgaggttcct

SEQ ID NO: 2276326 - DNA, 25 bp, Homo sapien
tcctgtttgatctgcgtggcgctca

SEQ ID NO: 2276327 - DNA, 25 bp, Homo sapien
agactgactggcatggctgggtaca

SEQ ID NO: 2276328 - DNA, 25 bp, Homo sapien
tggcatggctgggtacatctaccac

SEQ ID NO: 2276329 - DNA, 25 bp, Homo sapien
tgactggcatggctgggtacatcta

SEQ ID NO: 2276330 - DNA, 25 bp, Homo sapien
ggcagactgactggcatggctgggt

SEQ ID NO: 2276331 - DNA, 25 bp, Homo sapien
tgtcgtcgtcccctttccaggccca

SEQ ID NO: 2276332 - DNA, 25 bp, Homo sapien
gagaggggcgtgcttttctaaaaca

SEQ ID NO: 2276333 - DNA, 25 bp, Homo sapien
tctaaaacactacaccagcgcaagg

SEQ ID NO: 2276334 - DNA, 25 bp, Homo sapien
tctcgtcgccgccttgtcgtcgtcc

SEQ ID NO: 2276335 - DNA, 25 bp, Homo sapien
tgcgagctgcccgatggagcccgca

SEQ ID NO: 2276336 - DNA, 25 bp, Homo sapien
cgcggccccggcgagtgcttgtagc

SEQ ID NO: 2276337 - DNA, 25 bp, Homo sapien
aagcagcgggcgctcaggcggtgcg

SEQ ID NO: 2276338 - DNA, 25 bp, Homo sapien
agtgcttgtagcccccgcctcaaaa

SEQ ID NO: 2276339 - DNA, 25 bp, Homo sapien
ggagccctccagtggcacgaagtac

SEQ ID NO: 2276340 - DNA, 25 bp, Homo sapien
tggcacgaagtacaggtcgctgcgc

SEQ ID NO: 2276341 - DNA, 25 bp, Homo sapien
tcgctgcgcgcgcacgagttgaagc

SEQ ID NO: 2276342 - DNA, 25 bp, Homo sapien
ttgaagccgcgatccaggtgtttgt

SEQ ID NO: 2276343 - DNA, 25 bp, Homo sapien
tcccctccgacaggtggcgacgtga

SEQ ID NO: 2276344 - DNA, 25 bp, Homo sapien
ggatccacaggtagtcccatctgag

SEQ ID NO: 2276345 - DNA, 25 bp, Homo sapien
gaatatttgcccttcttgggatcca

SEQ ID NO: 2276346 - DNA, 25 bp, Homo sapien
tggctctcgctgaaaaccttttggg

SEQ ID NO: 2276347 - DNA, 25 bp, Homo sapien
gattgccaggagacatgacatgagg

SEQ ID NO: 2276348 - DNA, 25 bp, Homo sapien
tacagggccgggacattgtaaccca

SEQ ID NO: 2276349 - DNA, 25 bp, Homo sapien
gagtcacattgagcatctgcagccg

SEQ ID NO: 2276350 - DNA, 25 bp, Homo sapien
tgaggccgggcatattcactgagag

SEQ ID NO: 2276351 - DNA, 25 bp, Homo sapien
caaagagctggtgacgaagaacttc

SEQ ID NO: 2276352 - DNA, 25 bp, Homo sapien
gacgaagaacttcgttctcgtgcag

SEQ ID NO: 2276353 - DNA, 25 bp, Homo sapien
acttcgttctcgtgcagagggtgag

SEQ ID NO: 2276354 - DNA, 25 bp, Homo sapien
ccagggggtcaatgagagggtgcac

SEQ ID NO: 2276355 - DNA, 25 bp, Homo sapien
aaaactcgtgcttctcttgggcaga

SEQ ID NO: 2276356 - DNA, 25 bp, Homo sapien
gataacaagtacctgctctggacca

SEQ ID NO: 2276357 - DNA, 25 bp, Homo sapien
tgggattcgaacctcttaggctgac

SEQ ID NO: 2276358 - DNA, 25 bp, Homo sapien
gtgaggtaacacacccagttctgta

SEQ ID NO: 2276359 - DNA, 25 bp, Homo sapien
tgagctgctgacatcggggcagaaa

SEQ ID NO: 2276360 - DNA, 25 bp, Homo sapien
gctgactgtgcgtgcatggcctgca

SEQ ID NO: 2276361 - DNA, 25 bp, Homo sapien
tgctgctgttccagcgccaagcgct

SEQ ID NO: 2276362 - DNA, 25 bp, Homo sapien
gcacactgtgcagcgggtgatgggc

SEQ ID NO: 2276363 - DNA, 25 bp, Homo sapien
tcccaggctcgctgagcccatgtcc

SEQ ID NO: 2276364 - DNA, 25 bp, Homo sapien
tcctcccaggctcgctgagcccatg

SEQ ID NO: 2276365 - DNA, 25 bp, Homo sapien
ctcccaggctcgctgagcccatgtc

SEQ ID NO: 2276366 - DNA, 25 bp, Homo sapien
cctcccaggctcgctgagcccatgt

SEQ ID NO: 2276367 - DNA, 25 bp, Homo sapien
gggcagtgcatagcagagaggtaag

SEQ ID NO: 2276368 - DNA, 25 bp, Homo sapien
cagagaggtaagagacttgagacca

SEQ ID NO: 2276369 - DNA, 25 bp, Homo sapien
ggggcagtgcatagcagagaggtaa

SEQ ID NO: 2276370 - DNA, 25 bp, Homo sapien
aggggcagtgcatagcagagaggta

SEQ ID NO: 2276371 - DNA, 25 bp, Homo sapien
tacagtggcttgtcgctttccttct

SEQ ID NO: 2276372 - DNA, 25 bp, Homo sapien
ggcttgtcgctttccttcttcaggt

SEQ ID NO: 2276373 - DNA, 25 bp, Homo sapien
ctacagtggcttgtcgctttccttc

SEQ ID NO: 2276374 - DNA, 25 bp, Homo sapien
tggcttgtcgctttccttcttcagg

SEQ ID NO: 2276375 - DNA, 25 bp, Homo sapien
ggtggcacacgatgctacgcaaaac

SEQ ID NO: 2276376 - DNA, 25 bp, Homo sapien
gagccatggtgctctcttgatcgca

SEQ ID NO: 2276377 - DNA, 25 bp, Homo sapien
cagatgaaataatcacaccaacggg

SEQ ID NO: 2276378 - DNA, 25 bp, Homo sapien
tccaaggtccaatgtaggagccatg

SEQ ID NO: 2276379 - DNA, 25 bp, Homo sapien
tggattcggcagtaaaggcccagag

SEQ ID NO: 2276380 - DNA, 25 bp, Homo sapien
cgcagtttcctaaaggccttgtcta

SEQ ID NO: 2276381 - DNA, 25 bp, Homo sapien
ttgatgagcgatggagcctaatgcc

SEQ ID NO: 2276382 - DNA, 25 bp, Homo sapien
caaaagccgttgtcgcagtttccta

SEQ ID NO: 2276383 - DNA, 25 bp, Homo sapien
cgcgaacatttgttctcagcccatg

SEQ ID NO: 2276384 - DNA, 25 bp, Homo sapien
tggttgagaaagcagccagtcacag

SEQ ID NO: 2276385 - DNA, 25 bp, Homo sapien
tgcaaatgagttcggtgctgattgg

SEQ ID NO: 2276386 - DNA, 25 bp, Homo sapien
ttcatttctagagttcgcgaacatt

SEQ ID NO: 2276387 - DNA, 25 bp, Homo sapien
gtaaaaagccagaaagcctactaga

SEQ ID NO: 2276388 - DNA, 25 bp, Homo sapien
attctaaaagagctgtaacactgct

SEQ ID NO: 2276389 - DNA, 25 bp, Homo sapien
taaaaagccagaaagcctactagac

SEQ ID NO: 2276390 - DNA, 25 bp, Homo sapien
cctactagacaaattctaaaagagc

SEQ ID NO: 2276391 - DNA, 25 bp, Homo sapien
cggaagcgcccaggcgtggcccaaa

SEQ ID NO: 2276392 - DNA, 25 bp, Homo sapien
gaaaggaaacagcatccggcgcagc

SEQ ID NO: 2276393 - DNA, 25 bp, Homo sapien
gcttacaactgcatcaagaccacca

SEQ ID NO: 2276394 - DNA, 25 bp, Homo sapien
aaaactacccataatttttgcacag

SEQ ID NO: 2276395 - DNA, 25 bp, Homo sapien
ataaagagccacgtcctacaaccgt

SEQ ID NO: 2276396 - DNA, 25 bp, Homo sapien
aataaagagccacgtcctacaaccg

SEQ ID NO: 2276397 - DNA, 25 bp, Homo sapien
gaataaagagccacgtcctacaacc

SEQ ID NO: 2276398 - DNA, 25 bp, Homo sapien
gagccacgtcctacaaccgttccca

SEQ ID NO: 2276399 - DNA, 25 bp, Homo sapien
taggttcagcggaggtaaatggaaa

SEQ ID NO: 2276400 - DNA, 25 bp, Homo sapien
ctaggttcagcggaggtaaatggaa

SEQ ID NO: 2276401 - DNA, 25 bp, Homo sapien
ctcaaggccgccggttgggtcgagg

SEQ ID NO: 2276402 - DNA, 25 bp, Homo sapien
caaggccgccggttgggtcgaggcg

SEQ ID NO: 2276403 - DNA, 25 bp, Homo sapien
cgctcaaggccgccggttgggtcga

SEQ ID NO: 2276404 - DNA, 25 bp, Homo sapien
tttgcttgctcagcgctcaaggccg

SEQ ID NO: 2276405 - DNA, 25 bp, Homo sapien
caagcgccccacttagaaggacggt

SEQ ID NO: 2276406 - DNA, 25 bp, Homo sapien
ctgtaggtaacccaataagatccca

SEQ ID NO: 2276407 - DNA, 25 bp, Homo sapien
gtagccaggtttgtcgccccacatc

SEQ ID NO: 2276408 - DNA, 25 bp, Homo sapien
cattttcccggcggacgtagccagg

SEQ ID NO: 2276409 - DNA, 25 bp, Homo sapien
agacagcgggcccagcggagagcgc

SEQ ID NO: 2276410 - DNA, 25 bp, Homo sapien
catcccagggaggcgtcccgggtag

SEQ ID NO: 2276411 - DNA, 25 bp, Homo sapien
agagcgcaaggaattagtggattga

SEQ ID NO: 2276412 - DNA, 25 bp, Homo sapien
tcccgggtaggcgtcggagaacaga

SEQ ID NO: 2276413 - DNA, 25 bp, Homo sapien
gagcctcgtccatgcgcactgcatt

SEQ ID NO: 2276414 - DNA, 25 bp, Homo sapien
ggcgttatcccgagcctcgtccatg

SEQ ID NO: 2276415 - DNA, 25 bp, Homo sapien
ccatgtcgttgcaggcgttatcccg

SEQ ID NO: 2276416 - DNA, 25 bp, Homo sapien
gggcggagaacgcctggatcacctc

SEQ ID NO: 2276417 - DNA, 25 bp, Homo sapien
cacgggcagcacgaattgcagcatc

SEQ ID NO: 2276418 - DNA, 25 bp, Homo sapien
ggcagcacgaattgcagcatcttac

SEQ ID NO: 2276419 - DNA, 25 bp, Homo sapien
gtcgcagctgaagccataggctttg

SEQ ID NO: 2276420 - DNA, 25 bp, Homo sapien
cagctgaagccataggctttgataa

SEQ ID NO: 2276421 - DNA, 25 bp, Homo sapien
tactgtacaaaacgcaactcggacg

SEQ ID NO: 2276422 - DNA, 25 bp, Homo sapien
tacactgggcacaactagatgggat

SEQ ID NO: 2276423 - DNA, 25 bp, Homo sapien
tcggacgcacaagctcagggtagac

SEQ ID NO: 2276424 - DNA, 25 bp, Homo sapien
tgtttgccaaacaggacgcatgcag

SEQ ID NO: 2276425 - DNA, 25 bp, Homo sapien
tgacaggctggcgatctcaggatcc

SEQ ID NO: 2276426 - DNA, 25 bp, Homo sapien
gatcctgggcttcgtaggacttgac

SEQ ID NO: 2276427 - DNA, 25 bp, Homo sapien
ggacttgaccaagcgagcaaactta

SEQ ID NO: 2276428 - DNA, 25 bp, Homo sapien
gaaacagcgccttcagcttgcctga

SEQ ID NO: 2276429 - DNA, 25 bp, Homo sapien
tttattattgtctggaacatcaagg

SEQ ID NO: 2276430 - DNA, 25 bp, Homo sapien
ttattgtctggaacatcaaggcctt

SEQ ID NO: 2276431 - DNA, 25 bp, Homo sapien
agtcacaggcgcatttattattgtc

SEQ ID NO: 2276432 - DNA, 25 bp, Homo sapien
aagtcacaggcgcatttattattgt

SEQ ID NO: 2276433 - DNA, 25 bp, Homo sapien
gaggaagaaccgctcagtaatcagc

SEQ ID NO: 2276434 - DNA, 25 bp, Homo sapien
ccaggtgaggaagaaccgctcagta

SEQ ID NO: 2276435 - DNA, 25 bp, Homo sapien
gaaccgctcagtaatcagccacttc

SEQ ID NO: 2276436 - DNA, 25 bp, Homo sapien
gaagaaccgctcagtaatcagccac

SEQ ID NO: 2276437 - DNA, 25 bp, Homo sapien
ttggctggacgtgggagggccttcg

SEQ ID NO: 2276438 - DNA, 25 bp, Homo sapien
tatttgttcggtctgtaacctccca

SEQ ID NO: 2276439 - DNA, 25 bp, Homo sapien
gtcttgttcactccagtattaccag

SEQ ID NO: 2276440 - DNA, 25 bp, Homo sapien
aatagatgctcaacacgtacctgtt

SEQ ID NO: 2276441 - DNA, 25 bp, Homo sapien
tgatcactacgtcacatggccagct

SEQ ID NO: 2276442 - DNA, 25 bp, Homo sapien
tgctaggactaccacatgcttgggc

SEQ ID NO: 2276443 - DNA, 25 bp, Homo sapien
gatccctccagctagtaatgtcacc

SEQ ID NO: 2276444 - DNA, 25 bp, Homo sapien
tctgccacgggcacactgtcctttt

SEQ ID NO: 2276445 - DNA, 25 bp, Homo sapien
agaagactcagtaggaaccccatcg

SEQ ID NO: 2276446 - DNA, 25 bp, Homo sapien
aatgaccacagacgggatcagggac

SEQ ID NO: 2276447 - DNA, 25 bp, Homo sapien
ggaccagaagactcagtaggaaccc

SEQ ID NO: 2276448 - DNA, 25 bp, Homo sapien
actcagtaggaaccccatcggtggg

SEQ ID NO: 2276449 - DNA, 25 bp, Homo sapien
cacgtctgcaatcaaaggctcagga

SEQ ID NO: 2276450 - DNA, 25 bp, Homo sapien
aactgtcatcgagtgagtcctgctg

SEQ ID NO: 2276451 - DNA, 25 bp, Homo sapien
taatacttcacgcatgcgaacccag

SEQ ID NO: 2276452 - DNA, 25 bp, Homo sapien
acaatgatggcggtgacaactgtca

SEQ ID NO: 2276453 - DNA, 25 bp, Homo sapien
agttctggggctgccactccactgg

SEQ ID NO: 2276454 - DNA, 25 bp, Homo sapien
gcagctcccagtgccgggccgcctc

SEQ ID NO: 2276455 - DNA, 25 bp, Homo sapien
ggtcccagttctggggctgccactc

SEQ ID NO: 2276456 - DNA, 25 bp, Homo sapien
ctaagcctcagatgcagctcccagt

SEQ ID NO: 2276457 - DNA, 25 bp, Homo sapien
agggggcgcagggaatgaggaggtg

SEQ ID NO: 2276458 - DNA, 25 bp, Homo sapien
gaagggggcgcagggaatgaggagg

SEQ ID NO: 2276459 - DNA, 25 bp, Homo sapien
aagggggcgcagggaatgaggaggt

SEQ ID NO: 2276460 - DNA, 25 bp, Homo sapien
cctgtctaccgtgggtggcaggccc

SEQ ID NO: 2276461 - DNA, 25 bp, Homo sapien
ccttgcctcctgtctaccgtgggtg

SEQ ID NO: 2276462 - DNA, 25 bp, Homo sapien
gcctcctgtctaccgtgggtggcag

SEQ ID NO: 2276463 - DNA, 25 bp, Homo sapien
cttgcctcctgtctaccgtgggtgg

SEQ ID NO: 2276464 - DNA, 25 bp, Homo sapien
ggcccttgagcagggtctctgcatc

SEQ ID NO: 2276465 - DNA, 25 bp, Homo sapien
tgacggagagcgagaagtcaccctg

SEQ ID NO: 2276466 - DNA, 25 bp, Homo sapien
aggaagctaccgtggacacctcggc

SEQ ID NO: 2276467 - DNA, 25 bp, Homo sapien
tggttcttgcgactgggccgagcca

SEQ ID NO: 2276468 - DNA, 25 bp, Homo sapien
gaacagacggggagtcagcactgcc

SEQ ID NO: 2276469 - DNA, 25 bp, Homo sapien
gagtggccaaaatgcccggggttgc

SEQ ID NO: 2276470 - DNA, 25 bp, Homo sapien
gaatgagtggttcagggcctggatg

SEQ ID NO: 2276471 - DNA, 25 bp, Homo sapien
cctggatggcacaagagagtggcca

SEQ ID NO: 2276472 - DNA, 25 bp, Homo sapien
caggcggtgaggccagtcggtgcag

SEQ ID NO: 2276473 - DNA, 25 bp, Homo sapien
gcaccaggcggtgaggccagtcggt

SEQ ID NO: 2276474 - DNA, 25 bp, Homo sapien
caccaggcggtgaggccagtcggtg

SEQ ID NO: 2276475 - DNA, 25 bp, Homo sapien
accaggcggtgaggccagtcggtgc

SEQ ID NO: 2276476 - DNA, 25 bp, Homo sapien
catagaaatcccctgagttctggat

SEQ ID NO: 2276477 - DNA, 25 bp, Homo sapien
agttctggatccgaatatgggtcac

SEQ ID NO: 2276478 - DNA, 25 bp, Homo sapien
gatcggagcagttcagcgggtactt

SEQ ID NO: 2276479 - DNA, 25 bp, Homo sapien
gctctgtcagagtcgcaaacttctc

SEQ ID NO: 2276480 - DNA, 25 bp, Homo sapien
gaaagggtggtaggttaggctctga

SEQ ID NO: 2276481 - DNA, 25 bp, Homo sapien
ggtggtaggttaggctctgagacac

SEQ ID NO: 2276482 - DNA, 25 bp, Homo sapien
ggaggagggacattgagagccccag

SEQ ID NO: 2276483 - DNA, 25 bp, Homo sapien
agcggccagggctcccggagtaggg

SEQ ID NO: 2276484 - DNA, 25 bp, Homo sapien
tgtcatgaggagcattcagagcccc

SEQ ID NO: 2276485 - DNA, 25 bp, Homo sapien
catggtgtcatgaggagcattcaga

SEQ ID NO: 2276486 - DNA, 25 bp, Homo sapien
gagccatggtgtcatgaggagcatt

SEQ ID NO: 2276487 - DNA, 25 bp, Homo sapien
gctgaaaggagccatggtgtcatga

SEQ ID NO: 2276488 - DNA, 25 bp, Homo sapien
ctccaggcactggtcagcccgtcct

SEQ ID NO: 2276489 - DNA, 25 bp, Homo sapien
aggcactggtcagcccgtcctcctc

SEQ ID NO: 2276490 - DNA, 25 bp, Homo sapien
tggtcagcccgtcctcctctcctgg

SEQ ID NO: 2276491 - DNA, 25 bp, Homo sapien
tccaggcactggtcagcccgtcctc

SEQ ID NO: 2276492 - DNA, 25 bp, Homo sapien
gctggctgaggctctcacgcacaag

SEQ ID NO: 2276493 - DNA, 25 bp, Homo sapien
acatgaccttgatgtgggtgaccct

SEQ ID NO: 2276494 - DNA, 25 bp, Homo sapien
acgcacaagaaacgtccagggctcg

SEQ ID NO: 2276495 - DNA, 25 bp, Homo sapien
gcctgcccgccagacatgtggccat

SEQ ID NO: 2276496 - DNA, 25 bp, Homo sapien
tcttgaaatgctccaccaggtccgt

SEQ ID NO: 2276497 - DNA, 25 bp, Homo sapien
caaaccacccactgtgtagcgtcca

SEQ ID NO: 2276498 - DNA, 25 bp, Homo sapien
aggtccgtgaggctgtcgaaggtct

SEQ ID NO: 2276499 - DNA, 25 bp, Homo sapien
ctgccgcaggtagacaaaggcgcct

SEQ ID NO: 2276500 - DNA, 25 bp, Homo sapien
caacactcggttctcaatgtcagcc

SEQ ID NO: 2276501 - DNA, 25 bp, Homo sapien
cattcaccctcgtggcatagtacgg

SEQ ID NO: 2276502 - DNA, 25 bp, Homo sapien
cggttctcaatgtcagccgcattca

SEQ ID NO: 2276503 - DNA, 25 bp, Homo sapien
aatgtcagccgcattcaccctcgtg

SEQ ID NO: 2276504 - DNA, 25 bp, Homo sapien
gttcttgtagcggttcttgcccttg

SEQ ID NO: 2276505 - DNA, 25 bp, Homo sapien
cgctggtgcaagttcttcacctcct

SEQ ID NO: 2276506 - DNA, 25 bp, Homo sapien
gggagaatgttcttgtagcggttct

SEQ ID NO: 2276507 - DNA, 25 bp, Homo sapien
gctgcccttccagacgctggtgcaa

SEQ ID NO: 2276508 - DNA, 25 bp, Homo sapien
tgcaggatcactcggctgtggtcaa

SEQ ID NO: 2276509 - DNA, 25 bp, Homo sapien
gggatgttactgtcccgtccctgca

SEQ ID NO: 2276510 - DNA, 25 bp, Homo sapien
gttactgtcccgtccctgcaggatc

SEQ ID NO: 2276511 - DNA, 25 bp, Homo sapien
ggcattgatgtagtcggacccgggg

SEQ ID NO: 2276512 - DNA, 25 bp, Homo sapien
atgacacggctgttctcctgccacg

SEQ ID NO: 2276513 - DNA, 25 bp, Homo sapien
taggtcttagcgttctcatcagggc

SEQ ID NO: 2276514 - DNA, 25 bp, Homo sapien
tccagacaaccctggctggcgatgt

SEQ ID NO: 2276515 - DNA, 25 bp, Homo sapien
gtcattgaccgtggcctccagacaa

SEQ ID NO: 2276516 - DNA, 25 bp, Homo sapien
ccttcaagagaagcgtgcgggtcag

SEQ ID NO: 2276517 - DNA, 25 bp, Homo sapien
gccttagagtgcgactttatcccaa

SEQ ID NO: 2276518 - DNA, 25 bp, Homo sapien
gagggaagccaccagaccttgaatg

SEQ ID NO: 2276519 - DNA, 25 bp, Homo sapien
cggatgggatcacttcaatggcagc

SEQ ID NO: 2276520 - DNA, 25 bp, Homo sapien
tgtattcggttgtgtcatgctcccc

SEQ ID NO: 2276521 - DNA, 25 bp, Homo sapien
ggtcacagagtagggcccataagca

SEQ ID NO: 2276522 - DNA, 25 bp, Homo sapien
atgctccccgcagttggtcacagag

SEQ ID NO: 2276523 - DNA, 25 bp, Homo sapien
tcgggccagtatgggacgcatttgt

SEQ ID NO: 2276524 - DNA, 25 bp, Homo sapien
tttcctgccgctggttgatctggtc

SEQ ID NO: 2276525 - DNA, 25 bp, Homo sapien
taatgccagatctcccgaatcaggt

SEQ ID NO: 2276526 - DNA, 25 bp, Homo sapien
cagctcaggtactggtaatgccaga

SEQ ID NO: 2276527 - DNA, 25 bp, Homo sapien
ggccctgcgtgaggcagactttcct

SEQ ID NO: 2276528 - DNA, 25 bp, Homo sapien
ttccttcaaaccctgacgtcaggga

SEQ ID NO: 2276529 - DNA, 25 bp, Homo sapien
gagcgtctctcagcatggcttcact

SEQ ID NO: 2276530 - DNA, 25 bp, Homo sapien
gggaaaggatagccctgagacagca

SEQ ID NO: 2276531 - DNA, 25 bp, Homo sapien
tgaaggagttatggagcgtctctca

SEQ ID NO: 2276532 - DNA, 25 bp, Homo sapien
cggtgctgacgctggctccccagct

SEQ ID NO: 2276533 - DNA, 25 bp, Homo sapien
aaggggggtacccagcgctcagctc

SEQ ID NO: 2276534 - DNA, 25 bp, Homo sapien
tccacctcgggctctgcggtgctga

SEQ ID NO: 2276535 - DNA, 25 bp, Homo sapien
ccatcagaggccagtcaagccctcc

SEQ ID NO: 2276536 - DNA, 25 bp, Homo sapien
ccatgagcatgtcgatgacaatgat

SEQ ID NO: 2276537 - DNA, 25 bp, Homo sapien
tccatgagcatgtcgatgacaatga

SEQ ID NO: 2276538 - DNA, 25 bp, Homo sapien
catgagcatgtcgatgacaatgatg

SEQ ID NO: 2276539 - DNA, 25 bp, Homo sapien
tgggcgatggccacgtagatgaact

SEQ ID NO: 2276540 - DNA, 25 bp, Homo sapien
tttcaatgaactgggcgatggccac

SEQ ID NO: 2276541 - DNA, 25 bp, Homo sapien
cttagtggtttcaatgaactgggcg

SEQ ID NO: 2276542 - DNA, 25 bp, Homo sapien
ctgggcgatggccacgtagatgaac

SEQ ID NO: 2276543 - DNA, 25 bp, Homo sapien
catggctgggggataggtgatgttc

SEQ ID NO: 2276544 - DNA, 25 bp, Homo sapien
atgttcccgtactccgactcctggc

SEQ ID NO: 2276545 - DNA, 25 bp, Homo sapien
ttggacgaggtgcgggaggccttgg

SEQ ID NO: 2276546 - DNA, 25 bp, Homo sapien
tgatgttcccgtactccgactcctg

SEQ ID NO: 2276547 - DNA, 25 bp, Homo sapien
acccggcactggcagtcccctctgg

SEQ ID NO: 2276548 - DNA, 25 bp, Homo sapien
agccacggtccctgcactagactcc

SEQ ID NO: 2276549 - DNA, 25 bp, Homo sapien
tcacaggtgacgcagccacggtccc

SEQ ID NO: 2276550 - DNA, 25 bp, Homo sapien
cacagggggacccggcactggcagt

SEQ ID NO: 2276551 - DNA, 25 bp, Homo sapien
tcttgttcttagtgtgcaggttctc

SEQ ID NO: 2276552 - DNA, 25 bp, Homo sapien
ctccctcttgttcttagtgtgcagg

SEQ ID NO: 2276553 - DNA, 25 bp, Homo sapien
cctcttgttcttagtgtgcaggttc

SEQ ID NO: 2276554 - DNA, 25 bp, Homo sapien
cttgttcttagtgtgcaggttctca

SEQ ID NO: 2276555 - DNA, 25 bp, Homo sapien
tctccttgtctgctgaccgctgctt

SEQ ID NO: 2276556 - DNA, 25 bp, Homo sapien
ctccttgtctgctgaccgctgcttc

SEQ ID NO: 2276557 - DNA, 25 bp, Homo sapien
gggcactcctaggttcaggttgtga

SEQ ID NO: 2276558 - DNA, 25 bp, Homo sapien
cctggctgggctatatacagggtca

SEQ ID NO: 2276559 - DNA, 25 bp, Homo sapien
tgtccatcgcgaaatgcttccacag

SEQ ID NO: 2276560 - DNA, 25 bp, Homo sapien
aattacaaaagaatggggcactcct

SEQ ID NO: 2276561 - DNA, 25 bp, Homo sapien
gtgctggggagacgaaggggcttta

SEQ ID NO: 2276562 - DNA, 25 bp, Homo sapien
aggccccagattccacggcctagag

SEQ ID NO: 2276563 - DNA, 25 bp, Homo sapien
tgctggggagacgaaggggctttaa

SEQ ID NO: 2276564 - DNA, 25 bp, Homo sapien
gctttaaggccccagattccacggc

SEQ ID NO: 2276565 - DNA, 25 bp, Homo sapien
tacccggcagtattagagactccca

SEQ ID NO: 2276566 - DNA, 25 bp, Homo sapien
caaacactgctgggtaagacgaggg

SEQ ID NO: 2276567 - DNA, 25 bp, Homo sapien
cctccatcattacccggcagtatta

SEQ ID NO: 2276568 - DNA, 25 bp, Homo sapien
agtattagagactcccaaccgcacc

SEQ ID NO: 2276569 - DNA, 25 bp, Homo sapien
caattagaccatccaacactgtact

SEQ ID NO: 2276570 - DNA, 25 bp, Homo sapien
actgtactggaagatggacccaggg

SEQ ID NO: 2276571 - DNA, 25 bp, Homo sapien
cacaattagaccatccaacactgta

SEQ ID NO: 2276572 - DNA, 25 bp, Homo sapien
cactgtactggaagatggacccagg

SEQ ID NO: 2276573 - DNA, 25 bp, Homo sapien
acatcttgctgcagctgtaaaggca

SEQ ID NO: 2276574 - DNA, 25 bp, Homo sapien
caatggaggtgcctagggaaccagt

SEQ ID NO: 2276575 - DNA, 25 bp, Homo sapien
tatttatttcatgctcccaaggcgg

SEQ ID NO: 2276576 - DNA, 25 bp, Homo sapien
ggtcagtagtcctccatggtcttca

SEQ ID NO: 2276577 - DNA, 25 bp, Homo sapien
aagacaggccttcccgaatctcagg

SEQ ID NO: 2276578 - DNA, 25 bp, Homo sapien
tcagtccacagataagctgacactt

SEQ ID NO: 2276579 - DNA, 25 bp, Homo sapien
gaaacagagccaccgtttatacctg

SEQ ID NO: 2276580 - DNA, 25 bp, Homo sapien
caggtgcctgtctgttcagtccaca

SEQ ID NO: 2276581 - DNA, 25 bp, Homo sapien
tctcagtcaccaggcgtgaggagct

SEQ ID NO: 2276582 - DNA, 25 bp, Homo sapien
tggcagcaagcatgcgcacgttcac

SEQ ID NO: 2276583 - DNA, 25 bp, Homo sapien
ttcatgaactgggtaactggcagca

SEQ ID NO: 2276584 - DNA, 25 bp, Homo sapien
cacgttcacatgtgcgctcctgggt

SEQ ID NO: 2276585 - DNA, 25 bp, Homo sapien
gggacagtgcgtgatttctcagtga

SEQ ID NO: 2276586 - DNA, 25 bp, Homo sapien
agactgaagactagccccttttctg

SEQ ID NO: 2276587 - DNA, 25 bp, Homo sapien
taccccgccccagtatcatgcgatg

SEQ ID NO: 2276588 - DNA, 25 bp, Homo sapien
ctgaacccctcttggattaaggaag

SEQ ID NO: 2276589 - DNA, 25 bp, Homo sapien
gaaaattgtgcaggccgagggtgag

SEQ ID NO: 2276590 - DNA, 25 bp, Homo sapien
aggccgaggctgccaagatgatatc

SEQ ID NO: 2276591 - DNA, 25 bp, Homo sapien
cccagcgggcccaattcttggtaga

SEQ ID NO: 2276592 - DNA, 25 bp, Homo sapien
acagcggcagaaaattgtgcaggcc

SEQ ID NO: 2276593 - DNA, 25 bp, Homo sapien
tgaagggtgcagtacctaagccgga

SEQ ID NO: 2276594 - DNA, 25 bp, Homo sapien
caataccggaagttgcgctaacgct

SEQ ID NO: 2276595 - DNA, 25 bp, Homo sapien
gggacttccgtatgcgcgattcctg

SEQ ID NO: 2276596 - DNA, 25 bp, Homo sapien
gaacagcgcggcttctaatcacaaa

SEQ ID NO: 2276597 - DNA, 25 bp, Homo sapien
ttgaatccatcactgggcgcggcca

SEQ ID NO: 2276598 - DNA, 25 bp, Homo sapien
ctggccccttccagcaccacaataa

SEQ ID NO: 2276599 - DNA, 25 bp, Homo sapien
ccaccgcttcgttcacgaggcttga

SEQ ID NO: 2276600 - DNA, 25 bp, Homo sapien
accacaataaactacggcctccgat

SEQ ID NO: 2276601 - DNA, 25 bp, Homo sapien
tccacggagtcccaacctatcgatt

SEQ ID NO: 2276602 - DNA, 25 bp, Homo sapien
ggagtcccaacctatcgatttacta

SEQ ID NO: 2276603 - DNA, 25 bp, Homo sapien
aacctatcgatttactacttctcca

SEQ ID NO: 2276604 - DNA, 25 bp, Homo sapien
tatcgatttactacttctccacttc

SEQ ID NO: 2276605 - DNA, 25 bp, Homo sapien
agttgagtagctcatatgtcttccc

SEQ ID NO: 2276606 - DNA, 25 bp, Homo sapien
tgtgcttgtcacagttgagtagctc

SEQ ID NO: 2276607 - DNA, 25 bp, Homo sapien
ttcttcaacaatatagacttgtgct

SEQ ID NO: 2276608 - DNA, 25 bp, Homo sapien
gtgggtgatatctggccgcgcttcc

SEQ ID NO: 2276609 - DNA, 25 bp, Homo sapien
tcaaagggttgtgagcactgtccct

SEQ ID NO: 2276610 - DNA, 25 bp, Homo sapien
agctgccaacccttccatacagagg

SEQ ID NO: 2276611 - DNA, 25 bp, Homo sapien
gcagaaaccgagacatggttaaggc

SEQ ID NO: 2276612 - DNA, 25 bp, Homo sapien
cgagacatggttaaggctgaagaga

SEQ ID NO: 2276613 - DNA, 25 bp, Homo sapien
tgtagcaagccagctcggttcaggg

SEQ ID NO: 2276614 - DNA, 25 bp, Homo sapien
gaattcgggtctggggattcacttc

SEQ ID NO: 2276615 - DNA, 25 bp, Homo sapien
tctgtgtatggatataaacctgtag

SEQ ID NO: 2276616 - DNA, 25 bp, Homo sapien
cacaaaagcggtcaaaggttctggg

SEQ ID NO: 2276617 - DNA, 25 bp, Homo sapien
caaggaaaaccccatggataagatg

SEQ ID NO: 2276618 - DNA, 25 bp, Homo sapien
gctttatatctagactggactcctg

SEQ ID NO: 2276619 - DNA, 25 bp, Homo sapien
gagttcagagctagatggagaccac

SEQ ID NO: 2276620 - DNA, 25 bp, Homo sapien
caagcatatggctagctgtacagtg

SEQ ID NO: 2276621 - DNA, 25 bp, Homo sapien
gctgctcgaacactgagcttgtgta

SEQ ID NO: 2276622 - DNA, 25 bp, Homo sapien
cagctgctcgaacactgagcttgtg

SEQ ID NO: 2276623 - DNA, 25 bp, Homo sapien
tgctcgaacactgagcttgtgtaaa

SEQ ID NO: 2276624 - DNA, 25 bp, Homo sapien
catcagctgctcgaacactgagctt

SEQ ID NO: 2276625 - DNA, 25 bp, Homo sapien
ccagaaccagccttcaactaacagg

SEQ ID NO: 2276626 - DNA, 25 bp, Homo sapien
agctcacgcacatcactgacaaccg

SEQ ID NO: 2276627 - DNA, 25 bp, Homo sapien
caactggaaagtgatctgatactgg

SEQ ID NO: 2276628 - DNA, 25 bp, Homo sapien
gatctgatactggattcttaattac

SEQ ID NO: 2276629 - DNA, 25 bp, Homo sapien
cgggatggaaaaagaagtgccaact

SEQ ID NO: 2276630 - DNA, 25 bp, Homo sapien
ttccaattatggcagcagccctcaa

SEQ ID NO: 2276631 - DNA, 25 bp, Homo sapien
tgttaaaatgcctactgctctggga

SEQ ID NO: 2276632 - DNA, 25 bp, Homo sapien
ccaagaatttcagggttgagcccag

SEQ ID NO: 2276633 - DNA, 25 bp, Homo sapien
tagggcaggaaaactatggctgagc

SEQ ID NO: 2276634 - DNA, 25 bp, Homo sapien
gtagttactgatggacaccatcttc

SEQ ID NO: 2276635 - DNA, 25 bp, Homo sapien
gggtagttactgatggacaccatct

SEQ ID NO: 2276636 - DNA, 25 bp, Homo sapien
agttactgatggacaccatcttctc

SEQ ID NO: 2276637 - DNA, 25 bp, Homo sapien
agggggtagttactgatggacacca

SEQ ID NO: 2276638 - DNA, 25 bp, Homo sapien
cctttagcacatgggaatctgggag

SEQ ID NO: 2276639 - DNA, 25 bp, Homo sapien
gattgtgtatgtgccgctaccacca

SEQ ID NO: 2276640 - DNA, 25 bp, Homo sapien
tacaccactggatactttaggaacc

SEQ ID NO: 2276641 - DNA, 25 bp, Homo sapien
cagaccagggtcaaaggatgtgaca

SEQ ID NO: 2276642 - DNA, 25 bp, Homo sapien
tttttggagaaggcgtcttgctttg

SEQ ID NO: 2276643 - DNA, 25 bp, Homo sapien
ttggagaaggcgtcttgctttgtca

SEQ ID NO: 2276644 - DNA, 25 bp, Homo sapien
gctgtgcctctgctgccagccaagt

SEQ ID NO: 2276645 - DNA, 25 bp, Homo sapien
caagtcttcatttggggccaaaggg

SEQ ID NO: 2276646 - DNA, 25 bp, Homo sapien
gcaaagtgggatgcctgtgccaaca

SEQ ID NO: 2276647 - DNA, 25 bp, Homo sapien
agtatgcattttgacgggcctgggc

SEQ ID NO: 2276648 - DNA, 25 bp, Homo sapien
tcttcacgtgggacaaatggcttaa

SEQ ID NO: 2276649 - DNA, 25 bp, Homo sapien
caaaggttgcaaaggacactccagg

SEQ ID NO: 2276650 - DNA, 25 bp, Homo sapien
tcagcatcaattcaaccaagaaatg

SEQ ID NO: 2276651 - DNA, 25 bp, Homo sapien
attccttcactgagaacttgtccat

SEQ ID NO: 2276652 - DNA, 25 bp, Homo sapien
tgtgtttcagcatcaattcaaccaa

SEQ ID NO: 2276653 - DNA, 25 bp, Homo sapien
ctgagaacttgtccatcctgtgttt

SEQ ID NO: 2276654 - DNA, 25 bp, Homo sapien
ttcatcggcagagaggttcaagact

SEQ ID NO: 2276655 - DNA, 25 bp, Homo sapien
aagtccagagatcaatgccagcaag

SEQ ID NO: 2276656 - DNA, 25 bp, Homo sapien
gctatttgaagaaccccagtcagtg

SEQ ID NO: 2276657 - DNA, 25 bp, Homo sapien
tatgccatacgtggtgttccttccc

SEQ ID NO: 2276658 - DNA, 25 bp, Homo sapien
tcatccttcgactaatgggccgcac

SEQ ID NO: 2276659 - DNA, 25 bp, Homo sapien
ggtttaacccactatccaggagcag

SEQ ID NO: 2276660 - DNA, 25 bp, Homo sapien
tcaggtaggtggcttatcacaggcc

SEQ ID NO: 2276661 - DNA, 25 bp, Homo sapien
tcaggctacagctgacagcggttca

SEQ ID NO: 2276662 - DNA, 25 bp, Homo sapien
gtggatgtaactgaatgaccgagcc

SEQ ID NO: 2276663 - DNA, 25 bp, Homo sapien
atacagtaacaagctgggtgtggta

SEQ ID NO: 2276664 - DNA, 25 bp, Homo sapien
gagccaagcagtccccacttagatt

SEQ ID NO: 2276665 - DNA, 25 bp, Homo sapien
tgtggtagcccggaattcaaggctg

SEQ ID NO: 2276666 - DNA, 25 bp, Homo sapien
ttccaaaccaaactgggatggcacc

SEQ ID NO: 2276667 - DNA, 25 bp, Homo sapien
tgacaccgcaattagtgggaacctg

SEQ ID NO: 2276668 - DNA, 25 bp, Homo sapien
cccacttgcaaagagggttgtatga

SEQ ID NO: 2276669 - DNA, 25 bp, Homo sapien
taaactaaattagcagtgacaccgc

SEQ ID NO: 2276670 - DNA, 25 bp, Homo sapien
aaatgtctggcaatagttcataagc

SEQ ID NO: 2276671 - DNA, 25 bp, Homo sapien
accatgcctagcttccttgtatcat

SEQ ID NO: 2276672 - DNA, 25 bp, Homo sapien
cagtgctagcaagatagatcacaaa

SEQ ID NO: 2276673 - DNA, 25 bp, Homo sapien
gatgggtacgctcaaatctttgtat

SEQ ID NO: 2276674 - DNA, 25 bp, Homo sapien
catggcctttggactatactctgaa

SEQ ID NO: 2276675 - DNA, 25 bp, Homo sapien
ttgatgcccagattacagactgtga

SEQ ID NO: 2276676 - DNA, 25 bp, Homo sapien
caacccttggccatgtataatcagt

SEQ ID NO: 2276677 - DNA, 25 bp, Homo sapien
tgaaggtgagtctgcagtaaagcca

SEQ ID NO: 2276678 - DNA, 25 bp, Homo sapien
catataacatgattgtgtgcattta

SEQ ID NO: 2276679 - DNA, 25 bp, Homo sapien
ttaaaagcaagaatcgcagcaattc

SEQ ID NO: 2276680 - DNA, 25 bp, Homo sapien
ttctaagcgttttagagttaagcaa

SEQ ID NO: 2276681 - DNA, 25 bp, Homo sapien
taagcaaactcacagtaaactgtat

SEQ ID NO: 2276682 - DNA, 25 bp, Homo sapien
tagagctagtgatcctatatcccat

SEQ ID NO: 2276683 - DNA, 25 bp, Homo sapien
ctgaaagggtcatagatgtctccac

SEQ ID NO: 2276684 - DNA, 25 bp, Homo sapien
tgaaagggtcatagatgtctccacc

SEQ ID NO: 2276685 - DNA, 25 bp, Homo sapien
aaagggtcatagatgtctccacctc

SEQ ID NO: 2276686 - DNA, 25 bp, Homo sapien
tttactctggaatagatacgatcca

SEQ ID NO: 2276687 - DNA, 25 bp, Homo sapien
tctggaatagatacgatccagacac

SEQ ID NO: 2276688 - DNA, 25 bp, Homo sapien
ctcagaacgtcataaagccatcatg

SEQ ID NO: 2276689 - DNA, 25 bp, Homo sapien
gtcataaagccatcatgactttact

SEQ ID NO: 2276690 - DNA, 25 bp, Homo sapien
tgctagtgtgcaatacctcacctgt

SEQ ID NO: 2276691 - DNA, 25 bp, Homo sapien
cacctgtttggaactcaacaacgtc

SEQ ID NO: 2276692 - DNA, 25 bp, Homo sapien
caggctttgctgttctccgtcaccg

SEQ ID NO: 2276693 - DNA, 25 bp, Homo sapien
ccacggcggcttgcttccaggcttt

SEQ ID NO: 2276694 - DNA, 25 bp, Homo sapien
ttattttctaacacagtagacattg

SEQ ID NO: 2276695 - DNA, 25 bp, Homo sapien
tcttctcattagatggctttatttc

SEQ ID NO: 2276696 - DNA, 25 bp, Homo sapien
aatataatgtgtagtagttttactg

SEQ ID NO: 2276697 - DNA, 25 bp, Homo sapien
taaccaaactaacatattacaacag

SEQ ID NO: 2276698 - DNA, 25 bp, Homo sapien
aaaatgcagatactttctctgtctg

SEQ ID NO: 2276699 - DNA, 25 bp, Homo sapien
catttgggcgattattcaagttgca

SEQ ID NO: 2276700 - DNA, 25 bp, Homo sapien
tagagtacggtggttgtcacaagga

SEQ ID NO: 2276701 - DNA, 25 bp, Homo sapien
tctggcagacagtctcttgaaactg

SEQ ID NO: 2276702 - DNA, 25 bp, Homo sapien
ggttttagacttaggcatctggcag

SEQ ID NO: 2276703 - DNA, 25 bp, Homo sapien
tgaacccaggaagttgaaactgcag

SEQ ID NO: 2276704 - DNA, 25 bp, Homo sapien
ctccagcctgggcaacagagtgaag

SEQ ID NO: 2276705 - DNA, 25 bp, Homo sapien
ccagcctgggcaacagagtgaagta

SEQ ID NO: 2276706 - DNA, 25 bp, Homo sapien
tgagctgtgattgtgccgctgcact

SEQ ID NO: 2276707 - DNA, 25 bp, Homo sapien
actgatccagctgattggtttgcca

SEQ ID NO: 2276708 - DNA, 25 bp, Homo sapien
cacacggccaaacatagtagctcac

SEQ ID NO: 2276709 - DNA, 25 bp, Homo sapien
gcacttaaaacacaccttcaatagg

SEQ ID NO: 2276710 - DNA, 25 bp, Homo sapien
tcaataggcattagaaagcacacac

SEQ ID NO: 2276711 - DNA, 25 bp, Homo sapien
tatatccccacctaaatgtccatga

SEQ ID NO: 2276712 - DNA, 25 bp, Homo sapien
gattttgtatctcattatatgaagt

SEQ ID NO: 2276713 - DNA, 25 bp, Homo sapien
gcagagtgggtcagtaatgagattt

SEQ ID NO: 2276714 - DNA, 25 bp, Homo sapien
tccccacctaaatgtccatgatcta

SEQ ID NO: 2276715 - DNA, 25 bp, Homo sapien
tgaattgggaatggccactatgcgg

SEQ ID NO: 2276716 - DNA, 25 bp, Homo sapien
tctggcattagatagcagagatgaa

SEQ ID NO: 2276717 - DNA, 25 bp, Homo sapien
tgatcacatgctgcgacacagatga

SEQ ID NO: 2276718 - DNA, 25 bp, Homo sapien
cactatgcggtacagggtttctaat

SEQ ID NO: 2276719 - DNA, 25 bp, Homo sapien
tcaggtatagctcatcatgtggacg

SEQ ID NO: 2276720 - DNA, 25 bp, Homo sapien
gtaatgcatctaccacactcccgag

SEQ ID NO: 2276721 - DNA, 25 bp, Homo sapien
gggcttcaacttgcctcctatcagg

SEQ ID NO: 2276722 - DNA, 25 bp, Homo sapien
ggctattgctgtgtactgtcacggg

SEQ ID NO: 2276723 - DNA, 25 bp, Homo sapien
gaagcgatagcgttttgcccgcatt

SEQ ID NO: 2276724 - DNA, 25 bp, Homo sapien
agttaagatggcgtcctcagcggag

SEQ ID NO: 2276725 - DNA, 25 bp, Homo sapien
gagctgagccttaacaagttggcga

SEQ ID NO: 2276726 - DNA, 25 bp, Homo sapien
ttctgcagtcgggtttccaggagct

SEQ ID NO: 2276727 - DNA, 25 bp, Homo sapien
atttgtgcatcctcccactccgtgg

SEQ ID NO: 2276728 - DNA, 25 bp, Homo sapien
taaatattctattgcgcagccaaag

SEQ ID NO: 2276729 - DNA, 25 bp, Homo sapien
ccctcaggaagggatataccggctt

SEQ ID NO: 2276730 - DNA, 25 bp, Homo sapien
tctgtctgccgcttacttgtaaagg

SEQ ID NO: 2276731 - DNA, 25 bp, Homo sapien
tcagataaactagttgctgcaatag

SEQ ID NO: 2276732 - DNA, 25 bp, Homo sapien
cagataaactagttgctgcaatagc

SEQ ID NO: 2276733 - DNA, 25 bp, Homo sapien
agataaactagttgctgcaatagct

SEQ ID NO: 2276734 - DNA, 25 bp, Homo sapien
ttttaaggtggtgcgtctggagtct

SEQ ID NO: 2276735 - DNA, 25 bp, Homo sapien
cttttaaggtggtgcgtctggagtc

SEQ ID NO: 2276736 - DNA, 25 bp, Homo sapien
tgacaaattccagtagggggcatcc

SEQ ID NO: 2276737 - DNA, 25 bp, Homo sapien
cataatccctgtataatcatgagaa

SEQ ID NO: 2276738 - DNA, 25 bp, Homo sapien
gggcatcctataatactctttccca

SEQ ID NO: 2276739 - DNA, 25 bp, Homo sapien
aaaagccataatccctgtataatca

SEQ ID NO: 2276740 - DNA, 25 bp, Homo sapien
tgttcagaatccatgtcctgtgggc

SEQ ID NO: 2276741 - DNA, 25 bp, Homo sapien
gccagttgttcagaatccatgtcct

SEQ ID NO: 2276742 - DNA, 25 bp, Homo sapien
cttgaggccagtcgatttatgccag

SEQ ID NO: 2276743 - DNA, 25 bp, Homo sapien
gaggccagtcgatttatgccagttg

SEQ ID NO: 2276744 - DNA, 25 bp, Homo sapien
aatcagtccccacaagaactcagag

SEQ ID NO: 2276745 - DNA, 25 bp, Homo sapien
tcataggagtgtagaaaacagacct

SEQ ID NO: 2276746 - DNA, 25 bp, Homo sapien
caatggctggtcatcggttagctac

SEQ ID NO: 2276747 - DNA, 25 bp, Homo sapien
cagaggctagggttcttaaggagaa

SEQ ID NO: 2276748 - DNA, 25 bp, Homo sapien
cccgagtgtgcatgtctgaaattcc

SEQ ID NO: 2276749 - DNA, 25 bp, Homo sapien
tgaaattccctgatctaaacagagg

SEQ ID NO: 2276750 - DNA, 25 bp, Homo sapien
ggagctccctctgcttttgaaacaa

SEQ ID NO: 2276751 - DNA, 25 bp, Homo sapien
tcataagattccctacccgagtgtg

SEQ ID NO: 2276752 - DNA, 25 bp, Homo sapien
gcctaagagaaataggttgtctata

SEQ ID NO: 2276753 - DNA, 25 bp, Homo sapien
ggtgagcctaagagaaataggttgt

SEQ ID NO: 2276754 - DNA, 25 bp, Homo sapien
gccctctatcattgccccaagccct

SEQ ID NO: 2276755 - DNA, 25 bp, Homo sapien
ttatgctgcctttgtcagccctcta

SEQ ID NO: 2276756 - DNA, 25 bp, Homo sapien
caaaggtataacacacagggccata

SEQ ID NO: 2276757 - DNA, 25 bp, Homo sapien
ggtataacacacagggccatatcac

SEQ ID NO: 2276758 - DNA, 25 bp, Homo sapien
accaacatccccacatggcaccgtg

SEQ ID NO: 2276759 - DNA, 25 bp, Homo sapien
acacacagggccatatcaccaacat

SEQ ID NO: 2276760 - DNA, 25 bp, Homo sapien
ttctttggtggtgcggcgtcacctg

SEQ ID NO: 2276761 - DNA, 25 bp, Homo sapien
caccttctttggtggtgcggcgtca

SEQ ID NO: 2276762 - DNA, 25 bp, Homo sapien
caaacacaagcaccttctttggtgg

SEQ ID NO: 2276763 - DNA, 25 bp, Homo sapien
cacaagcaccttctttggtggtgcg

SEQ ID NO: 2276764 - DNA, 25 bp, Homo sapien
ctggcgatttgtccaccctggtgag

SEQ ID NO: 2276765 - DNA, 25 bp, Homo sapien
ccctggtgagctgcctgtctcttgg

SEQ ID NO: 2276766 - DNA, 25 bp, Homo sapien
ctttctgcacctccggactttggag

SEQ ID NO: 2276767 - DNA, 25 bp, Homo sapien
gctttctgcacctccggactttgga

SEQ ID NO: 2276768 - DNA, 25 bp, Homo sapien
gctcagcataaacccatgccaaaag

SEQ ID NO: 2276769 - DNA, 25 bp, Homo sapien
taggctcagcataaacccatgccaa

SEQ ID NO: 2276770 - DNA, 25 bp, Homo sapien
ggctcagcataaacccatgccaaaa

SEQ ID NO: 2276771 - DNA, 25 bp, Homo sapien
ggtaggctcagcataaacccatgcc

SEQ ID NO: 2276772 - DNA, 25 bp, Homo sapien
acttctatgtcccaagatttctcta

SEQ ID NO: 2276773 - DNA, 25 bp, Homo sapien
ggtgaatcccatacccttcaggaac

SEQ ID NO: 2276774 - DNA, 25 bp, Homo sapien
gctcaatgtccagatgggtgaagta

SEQ ID NO: 2276775 - DNA, 25 bp, Homo sapien
cctcactgggatatgcctgaggata

SEQ ID NO: 2276776 - DNA, 25 bp, Homo sapien
tatggagttaaaagaagggacagag

SEQ ID NO: 2276777 - DNA, 25 bp, Homo sapien
ggacttgactccagttcactgtgag

SEQ ID NO: 2276778 - DNA, 25 bp, Homo sapien
gaatagaacatttatgccactagga

SEQ ID NO: 2276779 - DNA, 25 bp, Homo sapien
ttattccgctaccttagccctagtc

SEQ ID NO: 2276780 - DNA, 25 bp, Homo sapien
tatgggacttggaactcttccacaa

SEQ ID NO: 2276781 - DNA, 25 bp, Homo sapien
gtatgcagcaaaccccgtaaaacgc

SEQ ID NO: 2276782 - DNA, 25 bp, Homo sapien
gagagtggggattgttactgctcct

SEQ ID NO: 2276783 - DNA, 25 bp, Homo sapien
tgacttaaagatcacctggagtttg

SEQ ID NO: 2276784 - DNA, 25 bp, Homo sapien
ggcctaggcagctcttaatgtcaga

SEQ ID NO: 2276785 - DNA, 25 bp, Homo sapien
tacagaagtacccagaatttgaagg

SEQ ID NO: 2276786 - DNA, 25 bp, Homo sapien
gcacatgcagaagggtgagccttac

SEQ ID NO: 2276787 - DNA, 25 bp, Homo sapien
aagtgatttatggagcgacccaggc

SEQ ID NO: 2276788 - DNA, 25 bp, Homo sapien
tcatgtcatcatggaggaaatattc

SEQ ID NO: 2276789 - DNA, 25 bp, Homo sapien
gagcagaagtaaccaccaatgaaat

SEQ ID NO: 2276790 - DNA, 25 bp, Homo sapien
tcttcatgtcatcatggaggaaata

SEQ ID NO: 2276791 - DNA, 25 bp, Homo sapien
cagaagtggctacaagggacatcta

SEQ ID NO: 2276792 - DNA, 25 bp, Homo sapien
gataattgggacttgcaatctcccc

SEQ ID NO: 2276793 - DNA, 25 bp, Homo sapien
tccccaatcagtgcagtgaatacat

SEQ ID NO: 2276794 - DNA, 25 bp, Homo sapien
caaaatcttctctccgcaaggtcac

SEQ ID NO: 2276795 - DNA, 25 bp, Homo sapien
tcaaggcagtttcccgctgagtcag

SEQ ID NO: 2276796 - DNA, 25 bp, Homo sapien
ataattttatcttcaggctgagtgc

SEQ ID NO: 2276797 - DNA, 25 bp, Homo sapien
aagaggcattaaatgtcacataaaa

SEQ ID NO: 2276798 - DNA, 25 bp, Homo sapien
aaaagaggcattaaatgtcacataa

SEQ ID NO: 2276799 - DNA, 25 bp, Homo sapien
taattttatcttcaggctgagtgca

SEQ ID NO: 2276800 - DNA, 25 bp, Homo sapien
aagatgatatcaagagcattactct

SEQ ID NO: 2276801 - DNA, 25 bp, Homo sapien
gcccagggaatccatgaccacagta

SEQ ID NO: 2276802 - DNA, 25 bp, Homo sapien
cacagtaaggaccaaattgccgatc

SEQ ID NO: 2276803 - DNA, 25 bp, Homo sapien
gatctccatgatagcgaagtttcca

SEQ ID NO: 2276804 - DNA, 25 bp, Homo sapien
ctggatcatctacctgctttgatcc

SEQ ID NO: 2276805 - DNA, 25 bp, Homo sapien
tggatcatctacctgctttgatccc

SEQ ID NO: 2276806 - DNA, 25 bp, Homo sapien
ctttgatcccacattgtttggggac

SEQ ID NO: 2276807 - DNA, 25 bp, Homo sapien
ggatcatctacctgctttgatccca

SEQ ID NO: 2276808 - DNA, 25 bp, Homo sapien
agacaggttatctgcaccacatctc

SEQ ID NO: 2276809 - DNA, 25 bp, Homo sapien
ccacaacttcaaacccatccagaca

SEQ ID NO: 2276810 - DNA, 25 bp, Homo sapien
ccaaacagaattgggagtgtcttcc

SEQ ID NO: 2276811 - DNA, 25 bp, Homo sapien
aagacatattttgccttcgcaggct

SEQ ID NO: 2276812 - DNA, 25 bp, Homo sapien
tgggtaaacaactggacaatttcag

SEQ ID NO: 2276813 - DNA, 25 bp, Homo sapien
ttgggtaaacaactggacaatttca

SEQ ID NO: 2276814 - DNA, 25 bp, Homo sapien
ctggacaatttcagtccgctcatcc

SEQ ID NO: 2276815 - DNA, 25 bp, Homo sapien
atttcagtccgctcatcctgatctg

SEQ ID NO: 2276816 - DNA, 25 bp, Homo sapien
ggagaataataaacatcaccactta

SEQ ID NO: 2276817 - DNA, 25 bp, Homo sapien
ctggagaataataaacatcaccact

SEQ ID NO: 2276818 - DNA, 25 bp, Homo sapien
gagaataataaacatcaccacttat

SEQ ID NO: 2276819 - DNA, 25 bp, Homo sapien
gaataataaacatcaccacttattt

SEQ ID NO: 2276820 - DNA, 25 bp, Homo sapien
ttccattgctttgacaagtcgaata

SEQ ID NO: 2276821 - DNA, 25 bp, Homo sapien
ttggaattactccactttccattgc

SEQ ID NO: 2276822 - DNA, 25 bp, Homo sapien
ttgacaagtcgaatagaaagatgtt

SEQ ID NO: 2276823 - DNA, 25 bp, Homo sapien
cattgctttgacaagtcgaatagaa

SEQ ID NO: 2276824 - DNA, 25 bp, Homo sapien
ccatgaaagccgtagtgaagagcct

SEQ ID NO: 2276825 - DNA, 25 bp, Homo sapien
gaaagacttccactttgaagagaca

SEQ ID NO: 2276826 - DNA, 25 bp, Homo sapien
gaaacatgccgatctagttggcctg

SEQ ID NO: 2276827 - DNA, 25 bp, Homo sapien
gaagccacaaatgcacccacgtggg

SEQ ID NO: 2276828 - DNA, 25 bp, Homo sapien
gaaggaaggagagcgatggtcagga

SEQ ID NO: 2276829 - DNA, 25 bp, Homo sapien
cgaaggaaggagagcgatggtcagg

SEQ ID NO: 2276830 - DNA, 25 bp, Homo sapien
aggaaggagagcgatggtcaggaca

SEQ ID NO: 2276831 - DNA, 25 bp, Homo sapien
gacgaaggaaggagagcgatggtca

SEQ ID NO: 2276832 - DNA, 25 bp, Homo sapien
caagtgtagcggatgacagaaccaa

SEQ ID NO: 2276833 - DNA, 25 bp, Homo sapien
catgtagtaatatggctcctcacaa

SEQ ID NO: 2276834 - DNA, 25 bp, Homo sapien
gacagaaccaaacaaagtgctctct

SEQ ID NO: 2276835 - DNA, 25 bp, Homo sapien
ctgggtcttcaactttaccattctc

SEQ ID NO: 2276836 - DNA, 25 bp, Homo sapien
attcacccagctcccgttaccagca

SEQ ID NO: 2276837 - DNA, 25 bp, Homo sapien
acctcattcacccagctcccgttac

SEQ ID NO: 2276838 - DNA, 25 bp, Homo sapien
agcacctcattcacccagctcccgt

SEQ ID NO: 2276839 - DNA, 25 bp, Homo sapien
cccagctcccgttaccagcacagtg

SEQ ID NO: 2276840 - DNA, 25 bp, Homo sapien
gatactgccacctcactgagctgga

SEQ ID NO: 2276841 - DNA, 25 bp, Homo sapien
ggccctgtttttagcagttctgtat

SEQ ID NO: 2276842 - DNA, 25 bp, Homo sapien
tgcagctacattaccagacaccaac

SEQ ID NO: 2276843 - DNA, 25 bp, Homo sapien
tcgctggctgacgtttctatttcct

SEQ ID NO: 2276844 - DNA, 25 bp, Homo sapien
tactcattaatgagcgctccaccag

SEQ ID NO: 2276845 - DNA, 25 bp, Homo sapien
tacattgttggctccctgtttccct

SEQ ID NO: 2276846 - DNA, 25 bp, Homo sapien
gattttgccagccgtgaggtctgca

SEQ ID NO: 2276847 - DNA, 25 bp, Homo sapien
tcggatcctccaattatcctctgtt

SEQ ID NO: 2276848 - DNA, 25 bp, Homo sapien
cccatccatgaggttgtagtcggaa

SEQ ID NO: 2276849 - DNA, 25 bp, Homo sapien
tcagccgcaccagtgcaatgtcatt

SEQ ID NO: 2276850 - DNA, 25 bp, Homo sapien
tcaaaattggttcgtccttctggga

SEQ ID NO: 2276851 - DNA, 25 bp, Homo sapien
gagacggtgggtcccattttcactg

SEQ ID NO: 2276852 - DNA, 25 bp, Homo sapien
cttaaaggagctacaggtaaccttg

SEQ ID NO: 2276853 - DNA, 25 bp, Homo sapien
ttgaggcgaacagcacgatctctct

SEQ ID NO: 2276854 - DNA, 25 bp, Homo sapien
acaggtaaccttgccgccttgaggc

SEQ ID NO: 2276855 - DNA, 25 bp, Homo sapien
agcacgatctctcttctctgttcgg

SEQ ID NO: 2276856 - DNA, 25 bp, Homo sapien
cagtcaacatagttctttacccgtg

SEQ ID NO: 2276857 - DNA, 25 bp, Homo sapien
cattgggatcctgtacagcaaaggc

SEQ ID NO: 2276858 - DNA, 25 bp, Homo sapien
caggccagctgcgtagaatttggtc

SEQ ID NO: 2276859 - DNA, 25 bp, Homo sapien
tttacccgtgtgtagagcccatagg

SEQ ID NO: 2276860 - DNA, 25 bp, Homo sapien
gaatagtgcaagaaaggagtgcccc

SEQ ID NO: 2276861 - DNA, 25 bp, Homo sapien
tagcaaggcgtctcaacaatcaagt

SEQ ID NO: 2276862 - DNA, 25 bp, Homo sapien
gaaggtaatgcattggtcaccaccc

SEQ ID NO: 2276863 - DNA, 25 bp, Homo sapien
tgttatctacaataggtactccggg

SEQ ID NO: 2276864 - DNA, 25 bp, Homo sapien
attaaatattagttgctggatgccc

SEQ ID NO: 2276865 - DNA, 25 bp, Homo sapien
tggatgcccaatttcagtgacataa

SEQ ID NO: 2276866 - DNA, 25 bp, Homo sapien
gaattccctgttttcgtgacaatta

SEQ ID NO: 2276867 - DNA, 25 bp, Homo sapien
tgtggaatgaggtaagtcacacaaa

SEQ ID NO: 2276868 - DNA, 25 bp, Homo sapien
gaagatcttaaacagccaactcaaa

SEQ ID NO: 2276869 - DNA, 25 bp, Homo sapien
cataatattgcatgatacaatgagt

SEQ ID NO: 2276870 - DNA, 25 bp, Homo sapien
caatttctacttaaagaagatctta

SEQ ID NO: 2276871 - DNA, 25 bp, Homo sapien
taactttccgttcacatattgaaac

SEQ ID NO: 2276872 - DNA, 25 bp, Homo sapien
gatgtactttacctgaaacaaccca

SEQ ID NO: 2276873 - DNA, 25 bp, Homo sapien
gaccagttgttgataaccactaaga

SEQ ID NO: 2276874 - DNA, 25 bp, Homo sapien
taggttcgaatccagagagcagtgt

SEQ ID NO: 2276875 - DNA, 25 bp, Homo sapien
cagaaagaccgtgtgtgaaattctc

SEQ ID NO: 2276876 - DNA, 25 bp, Homo sapien
taatttgttagcatcaagagtcaag

SEQ ID NO: 2276877 - DNA, 25 bp, Homo sapien
aaatggcaggattcaaagttgtaca

SEQ ID NO: 2276878 - DNA, 25 bp, Homo sapien
ctcaaaatactaaacagaggtggtt

SEQ ID NO: 2276879 - DNA, 25 bp, Homo sapien
gagtcaagttgctatatggtcaaag

SEQ ID NO: 2276880 - DNA, 25 bp, Homo sapien
ccagtaatgtttagtgtgttcacaa

SEQ ID NO: 2276881 - DNA, 25 bp, Homo sapien
taatactcctttctatggatacgcc

SEQ ID NO: 2276882 - DNA, 25 bp, Homo sapien
ggttcattcctgttatagcatccat

SEQ ID NO: 2276883 - DNA, 25 bp, Homo sapien
caacgtacgtttctaaatctcctgg

SEQ ID NO: 2276884 - DNA, 25 bp, Homo sapien
tgaatttcagtctatcggtcctcct

SEQ ID NO: 2276885 - DNA, 25 bp, Homo sapien
tctaagccgtcacacattctgggag

SEQ ID NO: 2276886 - DNA, 25 bp, Homo sapien
cctgagttctttgctctctaagccg

SEQ ID NO: 2276887 - DNA, 25 bp, Homo sapien
tcaccagactcttaaccaggagtgt

SEQ ID NO: 2276888 - DNA, 25 bp, Homo sapien
ccgtatggcaaaggccaagagagca

SEQ ID NO: 2276889 - DNA, 25 bp, Homo sapien
ccgggtacccagagccgtatggcaa

SEQ ID NO: 2276890 - DNA, 25 bp, Homo sapien
gggctccgtcctcttggcccaagag

SEQ ID NO: 2276891 - DNA, 25 bp, Homo sapien
ggacatcaaggctccagagggcttt

SEQ ID NO: 2276892 - DNA, 25 bp, Homo sapien
gaagtgcccgggcctcaagggtgag

SEQ ID NO: 2276893 - DNA, 25 bp, Homo sapien
gatatttacggcagaccctcactcg

SEQ ID NO: 2276894 - DNA, 25 bp, Homo sapien
tctcctgggagatgagcaaaggtga

SEQ ID NO: 2276895 - DNA, 25 bp, Homo sapien
gatggaaaacccacaatcctagagc

SEQ ID NO: 2276896 - DNA, 25 bp, Homo sapien
tcctttggacgagactctcctggga

SEQ ID NO: 2276897 - DNA, 25 bp, Homo sapien
atctgtcctggccatcactctctta

SEQ ID NO: 2276898 - DNA, 25 bp, Homo sapien
tcactctcttatcatctccttgtag

SEQ ID NO: 2276899 - DNA, 25 bp, Homo sapien
catagactgtggctctcctaaatct

SEQ ID NO: 2276900 - DNA, 25 bp, Homo sapien
tagactgtggctctcctaaatctct

SEQ ID NO: 2276901 - DNA, 25 bp, Homo sapien
tcttgggattggtaccattgttcac

SEQ ID NO: 2276902 - DNA, 25 bp, Homo sapien
ctgcccctcttagcaaacaaggaaa

SEQ ID NO: 2276903 - DNA, 25 bp, Homo sapien
tccccaatcctgatctgagtcttgg

SEQ ID NO: 2276904 - DNA, 25 bp, Homo sapien
caggaaagtcttctcagatgggcta

SEQ ID NO: 2276905 - DNA, 25 bp, Homo sapien
tctttagcgcttctcatagtggagg

SEQ ID NO: 2276906 - DNA, 25 bp, Homo sapien
gctatcgtgcccgtcctaaagaact

SEQ ID NO: 2276907 - DNA, 25 bp, Homo sapien
gaccactctgccagttagagacgag

SEQ ID NO: 2276908 - DNA, 25 bp, Homo sapien
tctgctggcgacaagaatctctgtt

SEQ ID NO: 2276909 - DNA, 25 bp, Homo sapien
acagacgcaggtggacacctagatg

SEQ ID NO: 2276910 - DNA, 25 bp, Homo sapien
cagacgcaggtggacacctagatgt

SEQ ID NO: 2276911 - DNA, 25 bp, Homo sapien
gcaggtggacacctagatgtgctga

SEQ ID NO: 2276912 - DNA, 25 bp, Homo sapien
gacgcaggtggacacctagatgtgc

SEQ ID NO: 2276913 - DNA, 25 bp, Homo sapien
taacctcaatattcgctaagtgggc

SEQ ID NO: 2276914 - DNA, 25 bp, Homo sapien
tagacagcatgagtgacaagccgca

SEQ ID NO: 2276915 - DNA, 25 bp, Homo sapien
tgagtcagaacctttgggcagtccc

SEQ ID NO: 2276916 - DNA, 25 bp, Homo sapien
tactaaatgataggccccaggtgag

SEQ ID NO: 2276917 - DNA, 25 bp, Homo sapien
atctcttctgtgtccttccaatttg

SEQ ID NO: 2276918 - DNA, 25 bp, Homo sapien
tcttctgtgtccttccaatttgagt

SEQ ID NO: 2276919 - DNA, 25 bp, Homo sapien
gctaatctcttctgtgtccttccaa

SEQ ID NO: 2276920 - DNA, 25 bp, Homo sapien
cttctgtgtccttccaatttgagta

SEQ ID NO: 2276921 - DNA, 25 bp, Homo sapien
tggtctcctgcaggatatctcacca

SEQ ID NO: 2276922 - DNA, 25 bp, Homo sapien
cctgcaggatatctcaccatctttc

SEQ ID NO: 2276923 - DNA, 25 bp, Homo sapien
gtctcctgcaggatatctcaccatc

SEQ ID NO: 2276924 - DNA, 25 bp, Homo sapien
ggtctcctgcaggatatctcaccat

SEQ ID NO: 2276925 - DNA, 25 bp, Homo sapien
gaatgggggctagtgtagccatcat

SEQ ID NO: 2276926 - DNA, 25 bp, Homo sapien
agaatgggggctagtgtagccatca

SEQ ID NO: 2276927 - DNA, 25 bp, Homo sapien
cagagaatgggggctagtgtagcca

SEQ ID NO: 2276928 - DNA, 25 bp, Homo sapien
agagaatgggggctagtgtagccat

SEQ ID NO: 2276929 - DNA, 25 bp, Homo sapien
gctgaatatgcacccctactagagg

SEQ ID NO: 2276930 - DNA, 25 bp, Homo sapien
gacctcagccaacaggacggcattg

SEQ ID NO: 2276931 - DNA, 25 bp, Homo sapien
ctactagaggccacttaggtaccgg

SEQ ID NO: 2276932 - DNA, 25 bp, Homo sapien
ggtgcaaggagtacccagagaaccc

SEQ ID NO: 2276933 - DNA, 25 bp, Homo sapien
catgattatgggcagatgagaatcg

SEQ ID NO: 2276934 - DNA, 25 bp, Homo sapien
ggctgtgtccatgattatgggcaga

SEQ ID NO: 2276935 - DNA, 25 bp, Homo sapien
gaatcggggagaccttgtaggtaca

SEQ ID NO: 2276936 - DNA, 25 bp, Homo sapien
gagaccttgtaggtacagcaggagg

SEQ ID NO: 2276937 - DNA, 25 bp, Homo sapien
cataagagtacccatgctttcaggg

SEQ ID NO: 2276938 - DNA, 25 bp, Homo sapien
gtgaggccactttcataacccccaa

SEQ ID NO: 2276939 - DNA, 25 bp, Homo sapien
accgcatcagccgtgaggccacttt

SEQ ID NO: 2276940 - DNA, 25 bp, Homo sapien
tccctggtgtaacgccctcagtcat

SEQ ID NO: 2276941 - DNA, 25 bp, Homo sapien
ataactgtgctctctaagtcagccc

SEQ ID NO: 2276942 - DNA, 25 bp, Homo sapien
tggaactccagatggtccctgagag

SEQ ID NO: 2276943 - DNA, 25 bp, Homo sapien
cagctggaactccagatggtccctg

SEQ ID NO: 2276944 - DNA, 25 bp, Homo sapien
tttccatatggatggaataactgtg

SEQ ID NO: 2276945 - DNA, 25 bp, Homo sapien
gctaaagtgggctcaatccctcaaa

SEQ ID NO: 2276946 - DNA, 25 bp, Homo sapien
caaaactccccgtgatgtgggcgtc

SEQ ID NO: 2276947 - DNA, 25 bp, Homo sapien
ggaggactatgcagcttcagaggca

SEQ ID NO: 2276948 - DNA, 25 bp, Homo sapien
gatcccctaagggagcacaagcatc

SEQ ID NO: 2276949 - DNA, 25 bp, Homo sapien
tccatgcccttcagtgaccatgctg

SEQ ID NO: 2276950 - DNA, 25 bp, Homo sapien
agtctcggcagaggccttgactcag

SEQ ID NO: 2276951 - DNA, 25 bp, Homo sapien
ggaaagccccttctttgcaaagcca

SEQ ID NO: 2276952 - DNA, 25 bp, Homo sapien
gatgctccgtgtgtactcgcccatt

SEQ ID NO: 2276953 - DNA, 25 bp, Homo sapien
tagagcccttcagaactaattgcct

SEQ ID NO: 2276954 - DNA, 25 bp, Homo sapien
tacacttaactcagcatacaagggt

SEQ ID NO: 2276955 - DNA, 25 bp, Homo sapien
gcatgctgtagccacagggtctact

SEQ ID NO: 2276956 - DNA, 25 bp, Homo sapien
taaccctcctctaatctgcatgctg

SEQ ID NO: 2276957 - DNA, 25 bp, Homo sapien
cagggtgctcttcatggtggcagct

SEQ ID NO: 2276958 - DNA, 25 bp, Homo sapien
gggagctctgagagccaggcctaca

SEQ ID NO: 2276959 - DNA, 25 bp, Homo sapien
tgagagccaggcctacagggtgctc

SEQ ID NO: 2276960 - DNA, 25 bp, Homo sapien
gccaggcctacagggtgctcttcat

SEQ ID NO: 2276961 - DNA, 25 bp, Homo sapien
cttccatccacagatccgtgctgcg

SEQ ID NO: 2276962 - DNA, 25 bp, Homo sapien
tccatccacagatccgtgctgcgtg

SEQ ID NO: 2276963 - DNA, 25 bp, Homo sapien
agggcggtccgcagggcggtatcga

SEQ ID NO: 2276964 - DNA, 25 bp, Homo sapien
aatcctggcatttgtagcccagggc

SEQ ID NO: 2276965 - DNA, 25 bp, Homo sapien
gcagggcagggacggaaaggagcct

SEQ ID NO: 2276966 - DNA, 25 bp, Homo sapien
ctagtccataaagcgggcctgggca

SEQ ID NO: 2276967 - DNA, 25 bp, Homo sapien
gtagctgaggcggtggacttgcagc

SEQ ID NO: 2276968 - DNA, 25 bp, Homo sapien
agcctgcggattccaccttgcggga

SEQ ID NO: 2276969 - DNA, 25 bp, Homo sapien
gttacaggagcaggacgcgagcaga

SEQ ID NO: 2276970 - DNA, 25 bp, Homo sapien
cgcatgggtagagatggaccagaaa

SEQ ID NO: 2276971 - DNA, 25 bp, Homo sapien
tagccaccagcgtgtagaaattagg

SEQ ID NO: 2276972 - DNA, 25 bp, Homo sapien
agcaagatgaccagcaagagaaacg

SEQ ID NO: 2276973 - DNA, 25 bp, Homo sapien
cccaggacgggaatggagaccaaat

SEQ ID NO: 2276974 - DNA, 25 bp, Homo sapien
gaagcagatggatctgccacacacc

SEQ ID NO: 2276975 - DNA, 25 bp, Homo sapien
cgaagcagatggatctgccacacac

SEQ ID NO: 2276976 - DNA, 25 bp, Homo sapien
ggcgaagcagatggatctgccacac

SEQ ID NO: 2276977 - DNA, 25 bp, Homo sapien
gcgaagcagatggatctgccacaca

SEQ ID NO: 2276978 - DNA, 25 bp, Homo sapien
gtctgaatgcagaggcacacgcaaa

SEQ ID NO: 2276979 - DNA, 25 bp, Homo sapien
atccgtttccacctacctgagccct

SEQ ID NO: 2276980 - DNA, 25 bp, Homo sapien
gaatgtatccgctgtctgccagaga

SEQ ID NO: 2276981 - DNA, 25 bp, Homo sapien
ccgcccagctgaatgtatccgctgt

SEQ ID NO: 2276982 - DNA, 25 bp, Homo sapien
gccttctcctatagcagggtagaca

SEQ ID NO: 2276983 - DNA, 25 bp, Homo sapien
gggtagacagttcccatggaaacaa

SEQ ID NO: 2276984 - DNA, 25 bp, Homo sapien
cagctactaaaggagtcagagggtc

SEQ ID NO: 2276985 - DNA, 25 bp, Homo sapien
tataggagcaccttacaggaggcgg

SEQ ID NO: 2276986 - DNA, 25 bp, Homo sapien
cccacaacaacccttgttgacccag

SEQ ID NO: 2276987 - DNA, 25 bp, Homo sapien
ttgacccagacaactcacaccccag

SEQ ID NO: 2276988 - DNA, 25 bp, Homo sapien
ccacaacaacccttgttgacccaga

SEQ ID NO: 2276989 - DNA, 25 bp, Homo sapien
aaagagtggtggattcagtaggacc

SEQ ID NO: 2276990 - DNA, 25 bp, Homo sapien
ggtactctgcctcaatccatggctt

SEQ ID NO: 2276991 - DNA, 25 bp, Homo sapien
ccttgtccaaggcaaagagtggtgg

SEQ ID NO: 2276992 - DNA, 25 bp, Homo sapien
taggaccgtgttgtcattctccatg

SEQ ID NO: 2276993 - DNA, 25 bp, Homo sapien
gggcctcgcagtccacaggctcctt

SEQ ID NO: 2276994 - DNA, 25 bp, Homo sapien
atggagccggaagccgcagatctca

SEQ ID NO: 2276995 - DNA, 25 bp, Homo sapien
tctcctgtcgccttgtcaaggatca

SEQ ID NO: 2276996 - DNA, 25 bp, Homo sapien
ttggcccggatcagcccctctcctg

SEQ ID NO: 2276997 - DNA, 25 bp, Homo sapien
aaggagggatgaagacacgtcagcc

SEQ ID NO: 2276998 - DNA, 25 bp, Homo sapien
gaggtacagcctcgatacggtacat

SEQ ID NO: 2276999 - DNA, 25 bp, Homo sapien
acgtcagccagcctcgacattatac

SEQ ID NO: 2277000 - DNA, 25 bp, Homo sapien
acagccttgatacagcacaccgagg

SEQ ID NO: 2277001 - DNA, 25 bp, Homo sapien
gatacagccgttccacaaacactgg

SEQ ID NO: 2277002 - DNA, 25 bp, Homo sapien
cgcaggatgcgatcgtacagcttcc

SEQ ID NO: 2277003 - DNA, 25 bp, Homo sapien
cgttcacatcgttgacccgcacatg

SEQ ID NO: 2277004 - DNA, 25 bp, Homo sapien
gtcaatggcttccacccgcaggatg

SEQ ID NO: 2277005 - DNA, 25 bp, Homo sapien
caggaggacagagcattagagcatt

SEQ ID NO: 2277006 - DNA, 25 bp, Homo sapien
ggacagagcattagagcattggaga

SEQ ID NO: 2277007 - DNA, 25 bp, Homo sapien
gacagagcattagagcattggagaa

SEQ ID NO: 2277008 - DNA, 25 bp, Homo sapien
gaggacagagcattagagcattgga

SEQ ID NO: 2277009 - DNA, 25 bp, Homo sapien
cttcccacagtcataagctgtcact

SEQ ID NO: 2277010 - DNA, 25 bp, Homo sapien
cacagtcataagctgtcactgtaaa

SEQ ID NO: 2277011 - DNA, 25 bp, Homo sapien
tgtcactgtaaacttatagagcctc

SEQ ID NO: 2277012 - DNA, 25 bp, Homo sapien
tgtaaacttatagagcctctcacca

SEQ ID NO: 2277013 - DNA, 25 bp, Homo sapien
gataccagggaacaaagccaagctc

SEQ ID NO: 2277014 - DNA, 25 bp, Homo sapien
gctggtctgcagctctatggtggcc

SEQ ID NO: 2277015 - DNA, 25 bp, Homo sapien
gtagttgtcacggtcacagcccttg

SEQ ID NO: 2277016 - DNA, 25 bp, Homo sapien
tggttcatcacaggtctccaggcgg

SEQ ID NO: 2277017 - DNA, 25 bp, Homo sapien
ttgggccgcaaatgctaatcgtgtc

SEQ ID NO: 2277018 - DNA, 25 bp, Homo sapien
ccttttgggccgcaaatgctaatcg

SEQ ID NO: 2277019 - DNA, 25 bp, Homo sapien
gccgcaaatgctaatcgtgtcacaa

SEQ ID NO: 2277020 - DNA, 25 bp, Homo sapien
gcaaatgctaatcgtgtcacaacct

SEQ ID NO: 2277021 - DNA, 25 bp, Homo sapien
cattgaaccagtagatcaggctgct

SEQ ID NO: 2277022 - DNA, 25 bp, Homo sapien
gagttacgccatgcttcatccagaa

SEQ ID NO: 2277023 - DNA, 25 bp, Homo sapien
tcttgcccttgttgggagttacgcc

SEQ ID NO: 2277024 - DNA, 25 bp, Homo sapien
tgtagtgcaccgagagtcctgctgt

SEQ ID NO: 2277025 - DNA, 25 bp, Homo sapien
gcctaccacatggtgggacacagag

SEQ ID NO: 2277026 - DNA, 25 bp, Homo sapien
gagtagcagcaaggaatcccattgc

SEQ ID NO: 2277027 - DNA, 25 bp, Homo sapien
ttgactgggcaactgaaaacaagag

SEQ ID NO: 2277028 - DNA, 25 bp, Homo sapien
cagcagtacgatccaacatgtcatg

SEQ ID NO: 2277029 - DNA, 25 bp, Homo sapien
cagaggaacttgactgggcgggcac

SEQ ID NO: 2277030 - DNA, 25 bp, Homo sapien
atcctacagccgtggacagtcagcg

SEQ ID NO: 2277031 - DNA, 25 bp, Homo sapien
cagcgagtagtgagagaagccgtcc

SEQ ID NO: 2277032 - DNA, 25 bp, Homo sapien
cagccgtggacagtcagcgagtagt

SEQ ID NO: 2277033 - DNA, 25 bp, Homo sapien
cagagggagtgcttttcagtctaca

SEQ ID NO: 2277034 - DNA, 25 bp, Homo sapien
tcatttaatcctaacgactctggga

SEQ ID NO: 2277035 - DNA, 25 bp, Homo sapien
gctgcaactgttggctcaagagagg

SEQ ID NO: 2277036 - DNA, 25 bp, Homo sapien
cagtctacaacggtctattacatca

SEQ ID NO: 2277037 - DNA, 25 bp, Homo sapien
ttcccagaacctagctgaatgacag

SEQ ID NO: 2277038 - DNA, 25 bp, Homo sapien
ttttttgccgtttgcttactcagcc

SEQ ID NO: 2277039 - DNA, 25 bp, Homo sapien
caggagcacccaatctaaggcaagt

SEQ ID NO: 2277040 - DNA, 25 bp, Homo sapien
tttatctccccaactgaaatgtaag

SEQ ID NO: 2277041 - DNA, 25 bp, Homo sapien
tgccgtcggtatagagtgtgactgt

SEQ ID NO: 2277042 - DNA, 25 bp, Homo sapien
ggccccaatcatgagagcaggctcc

SEQ ID NO: 2277043 - DNA, 25 bp, Homo sapien
gcgtagtggtgccactcatcatcac

SEQ ID NO: 2277044 - DNA, 25 bp, Homo sapien
aactcgaggttcagagcgtagtggt

SEQ ID NO: 2277045 - DNA, 25 bp, Homo sapien
cccaaatcctgaaccactggagtct

SEQ ID NO: 2277046 - DNA, 25 bp, Homo sapien
tgtactgttgtctcccttttccttc

SEQ ID NO: 2277047 - DNA, 25 bp, Homo sapien
gtctgtactgttgtctcccttttcc

SEQ ID NO: 2277048 - DNA, 25 bp, Homo sapien
tggtgtctgtactgttgtctccctt

SEQ ID NO: 2277049 - DNA, 25 bp, Homo sapien
ggtgtctgtactgttgtctcccttt

SEQ ID NO: 2277050 - DNA, 25 bp, Homo sapien
gaaaccagccaggtagccatggaag

SEQ ID NO: 2277051 - DNA, 25 bp, Homo sapien
catgcatagaggcactcgatgacct

SEQ ID NO: 2277052 - DNA, 25 bp, Homo sapien
tagtggtggatcgacaaagggtctc

SEQ ID NO: 2277053 - DNA, 25 bp, Homo sapien
ggctctcgaaatccctatagtccag

SEQ ID NO: 2277054 - DNA, 25 bp, Homo sapien
gagcagaggtagaggggtagggcaa

SEQ ID NO: 2277055 - DNA, 25 bp, Homo sapien
agaggaagggagcagaggtagaggg

SEQ ID NO: 2277056 - DNA, 25 bp, Homo sapien
cagaggaagggagcagaggtagagg

SEQ ID NO: 2277057 - DNA, 25 bp, Homo sapien
gaagggagcagaggtagaggggtag

SEQ ID NO: 2277058 - DNA, 25 bp, Homo sapien
ttgacagcagtggtgaggcgcaggg

SEQ ID NO: 2277059 - DNA, 25 bp, Homo sapien
ctgacgccgggcgtggcaaagcgca

SEQ ID NO: 2277060 - DNA, 25 bp, Homo sapien
gcagggcatggttgaaggtctccac

SEQ ID NO: 2277061 - DNA, 25 bp, Homo sapien
aaagcgcagagtgttcatgtaagcc

SEQ ID NO: 2277062 - DNA, 25 bp, Homo sapien
gccaccgacgtctttttcatcaggg

SEQ ID NO: 2277063 - DNA, 25 bp, Homo sapien
tcaacttaagatcactcacctagcc

SEQ ID NO: 2277064 - DNA, 25 bp, Homo sapien
ttcgaagactagagataggtcagct

SEQ ID NO: 2277065 - DNA, 25 bp, Homo sapien
ggtaataagacctgggctagaacag

SEQ ID NO: 2277066 - DNA, 25 bp, Homo sapien
gctacctctatcatagagcatctca

SEQ ID NO: 2277067 - DNA, 25 bp, Homo sapien
cgccccagctacctctatcatagag

SEQ ID NO: 2277068 - DNA, 25 bp, Homo sapien
ttctgtttcactccccgccccagct

SEQ ID NO: 2277069 - DNA, 25 bp, Homo sapien
acattctgtttcactccccgcccca

SEQ ID NO: 2277070 - DNA, 25 bp, Homo sapien
gatttgaagatcagggaacaaaggg

SEQ ID NO: 2277071 - DNA, 25 bp, Homo sapien
tcagggatggagacgcaggactctt

SEQ ID NO: 2277072 - DNA, 25 bp, Homo sapien
ggctgaaggacgaccacgtagccct

SEQ ID NO: 2277073 - DNA, 25 bp, Homo sapien
tgagcagtgccactcagcaggatct

SEQ ID NO: 2277074 - DNA, 25 bp, Homo sapien
gaggttctgagacccaaccatgccc

SEQ ID NO: 2277075 - DNA, 25 bp, Homo sapien
gggcccacggaggttctgagaccca

SEQ ID NO: 2277076 - DNA, 25 bp, Homo sapien
cagagccaaagggcccacggaggtt

SEQ ID NO: 2277077 - DNA, 25 bp, Homo sapien
agccaaagggcccacggaggttctg

SEQ ID NO: 2277078 - DNA, 25 bp, Homo sapien
tccaggttgtgcacaatctcatccg

SEQ ID NO: 2277079 - DNA, 25 bp, Homo sapien
tctcatccgacatgcgtgtgtctgt

SEQ ID NO: 2277080 - DNA, 25 bp, Homo sapien
taggcagatgtgttggtgagctcca

SEQ ID NO: 2277081 - DNA, 25 bp, Homo sapien
ggagcaggctttcccgctcgggatc

SEQ ID NO: 2277082 - DNA, 25 bp, Homo sapien
cagaagtgcgacctgaggtcgaagg

SEQ ID NO: 2277083 - DNA, 25 bp, Homo sapien
cccactctgactaactaggatggag

SEQ ID NO: 2277084 - DNA, 25 bp, Homo sapien
cctgaggtcgaagggagggatgctc

SEQ ID NO: 2277085 - DNA, 25 bp, Homo sapien
tgacgccacacaagctgtagagcag

SEQ ID NO: 2277086 - DNA, 25 bp, Homo sapien
tgtcgcagccgataacgagcctgcc

SEQ ID NO: 2277087 - DNA, 25 bp, Homo sapien
taacggccattcatttccgagcagg

SEQ ID NO: 2277088 - DNA, 25 bp, Homo sapien
tccgagcaggaaagccggaacttcc

SEQ ID NO: 2277089 - DNA, 25 bp, Homo sapien
aattcattgctggagtaacggccat

SEQ ID NO: 2277090 - DNA, 25 bp, Homo sapien
gtaactgtggaaggaaggagactct

SEQ ID NO: 2277091 - DNA, 25 bp, Homo sapien
tcagctcctttctgggggtgggtaa

SEQ ID NO: 2277092 - DNA, 25 bp, Homo sapien
ggaaggaaggagactctctgggtac

SEQ ID NO: 2277093 - DNA, 25 bp, Homo sapien
gtgggtaactgtggaaggaaggaga

SEQ ID NO: 2277094 - DNA, 25 bp, Homo sapien
cccggttcatgctgtgcaggacatt

SEQ ID NO: 2277095 - DNA, 25 bp, Homo sapien
gtgggcaacccggttcatgctgtgc

SEQ ID NO: 2277096 - DNA, 25 bp, Homo sapien
gcaacccggttcatgctgtgcagga

SEQ ID NO: 2277097 - DNA, 25 bp, Homo sapien
ggttcatgctgtgcaggacattgac

SEQ ID NO: 2277098 - DNA, 25 bp, Homo sapien
gatacctgtcccaacacactcacct

SEQ ID NO: 2277099 - DNA, 25 bp, Homo sapien
ccctccctgcccagccccaccaggc

SEQ ID NO: 2277100 - DNA, 25 bp, Homo sapien
acactcacctgccacctgcccctcc

SEQ ID NO: 2277101 - DNA, 25 bp, Homo sapien
ccctgcccagccccaccaggcttac

SEQ ID NO: 2277102 - DNA, 25 bp, Homo sapien
taagcatccctacaatgacacaagg

SEQ ID NO: 2277103 - DNA, 25 bp, Homo sapien
cattcgtaaaggaccatgaccggga

SEQ ID NO: 2277104 - DNA, 25 bp, Homo sapien
cacggccaggttgctttgaagggca

SEQ ID NO: 2277105 - DNA, 25 bp, Homo sapien
cagaggatcctaggtccagggctaa

SEQ ID NO: 2277106 - DNA, 25 bp, Homo sapien
gccaccagccaattagaacggactc

SEQ ID NO: 2277107 - DNA, 25 bp, Homo sapien
ggactggctggatcagtatttctca

SEQ ID NO: 2277108 - DNA, 25 bp, Homo sapien
agccaattagaacggactctgctgg

SEQ ID NO: 2277109 - DNA, 25 bp, Homo sapien
acactccctcgacactggttccaag

SEQ ID NO: 2277110 - DNA, 25 bp, Homo sapien
acactcagctgccacgcactccagg

SEQ ID NO: 2277111 - DNA, 25 bp, Homo sapien
catgtgtcaacagacagagcagagc

SEQ ID NO: 2277112 - DNA, 25 bp, Homo sapien
gtagggaagcgcatggcccaggagc

SEQ ID NO: 2277113 - DNA, 25 bp, Homo sapien
agcctgagactcatgtgtcaacaga

SEQ ID NO: 2277114 - DNA, 25 bp, Homo sapien
cagagaccagcagtcacacaagcaa

SEQ ID NO: 2277115 - DNA, 25 bp, Homo sapien
gctgagggactattccatgtatgtg

SEQ ID NO: 2277116 - DNA, 25 bp, Homo sapien
gaaaaatacacacatcgcattccag

SEQ ID NO: 2277117 - DNA, 25 bp, Homo sapien
gcggtcccgttgctgagggactatt

SEQ ID NO: 2277118 - DNA, 25 bp, Homo sapien
aggcccagggcccttacgggcagct

SEQ ID NO: 2277119 - DNA, 25 bp, Homo sapien
aggcagagaccccacacacgcacct

SEQ ID NO: 2277120 - DNA, 25 bp, Homo sapien
acgggcagctgggtcactactcccc

SEQ ID NO: 2277121 - DNA, 25 bp, Homo sapien
cagctctcgaagaagcacaaggaag

SEQ ID NO: 2277122 - DNA, 25 bp, Homo sapien
gacatagacactacagacgtgggcc

SEQ ID NO: 2277123 - DNA, 25 bp, Homo sapien
catagacactacagacgtgggccgt

SEQ ID NO: 2277124 - DNA, 25 bp, Homo sapien
tgagggccacagagcgagccgccat

SEQ ID NO: 2277125 - DNA, 25 bp, Homo sapien
agacactacagacgtgggccgtgag

SEQ ID NO: 2277126 - DNA, 25 bp, Homo sapien
tccagcaaggcacggtagagccata

SEQ ID NO: 2277127 - DNA, 25 bp, Homo sapien
ctgcgggagtaaaggaacgcgtctg

SEQ ID NO: 2277128 - DNA, 25 bp, Homo sapien
aggcacggtagagccatatgtgcag

SEQ ID NO: 2277129 - DNA, 25 bp, Homo sapien
caaggcacggtagagccatatgtgc

SEQ ID NO: 2277130 - DNA, 25 bp, Homo sapien
ccttagagctgatggcggcaaagca

SEQ ID NO: 2277131 - DNA, 25 bp, Homo sapien
aggtacatgctcaggaagaccgtgt

SEQ ID NO: 2277132 - DNA, 25 bp, Homo sapien
tcaggaagaccgtgtgggcacacag

SEQ ID NO: 2277133 - DNA, 25 bp, Homo sapien
cagctgcacaaaggttgccacgccc

SEQ ID NO: 2277134 - DNA, 25 bp, Homo sapien
gagacacagaacggtgcgttcactc

SEQ ID NO: 2277135 - DNA, 25 bp, Homo sapien
acacagaacggtgcgttcactctca

SEQ ID NO: 2277136 - DNA, 25 bp, Homo sapien
cacagaacggtgcgttcactctcac

SEQ ID NO: 2277137 - DNA, 25 bp, Homo sapien
gacacagaacggtgcgttcactctc

SEQ ID NO: 2277138 - DNA, 25 bp, Homo sapien
ggactgagctcactccgtgacacct

SEQ ID NO: 2277139 - DNA, 25 bp, Homo sapien
tggactgagctcactccgtgacacc

SEQ ID NO: 2277140 - DNA, 25 bp, Homo sapien
tgagctcactccgtgacacctccct

SEQ ID NO: 2277141 - DNA, 25 bp, Homo sapien
gctcactccgtgacacctcccttct

SEQ ID NO: 2277142 - DNA, 25 bp, Homo sapien
agcagagcgtgactaggcacacctg

SEQ ID NO: 2277143 - DNA, 25 bp, Homo sapien
tgaacagccctattcgcagaggaca

SEQ ID NO: 2277144 - DNA, 25 bp, Homo sapien
cctaggaaagaggtgccagtgccca

SEQ ID NO: 2277145 - DNA, 25 bp, Homo sapien
cagaacacacggtggccgagaagag

SEQ ID NO: 2277146 - DNA, 25 bp, Homo sapien
gctgagtcatcccagaagaggtctg

SEQ ID NO: 2277147 - DNA, 25 bp, Homo sapien
cccacgcacaccacaatgatgaggg

SEQ ID NO: 2277148 - DNA, 25 bp, Homo sapien
aagggaatggatgcgcaccaggccc

SEQ ID NO: 2277149 - DNA, 25 bp, Homo sapien
ggttcacaatgatggtgagagctga

SEQ ID NO: 2277150 - DNA, 25 bp, Homo sapien
gctccacagtcttgaccctacagaa

SEQ ID NO: 2277151 - DNA, 25 bp, Homo sapien
tgtgctccacagtcttgaccctaca

SEQ ID NO: 2277152 - DNA, 25 bp, Homo sapien
tgctccacagtcttgaccctacaga

SEQ ID NO: 2277153 - DNA, 25 bp, Homo sapien
tccacagtcttgaccctacagaacc

SEQ ID NO: 2277154 - DNA, 25 bp, Homo sapien
ccgtcacacaggactgccgattctg

SEQ ID NO: 2277155 - DNA, 25 bp, Homo sapien
cacaggactgccgattctggtagga

SEQ ID NO: 2277156 - DNA, 25 bp, Homo sapien
ccccgtcacacaggactgccgattc

SEQ ID NO: 2277157 - DNA, 25 bp, Homo sapien
tcacacaggactgccgattctggta

SEQ ID NO: 2277158 - DNA, 25 bp, Homo sapien
gggtctcgatgatgcgtctctcgtc

SEQ ID NO: 2277159 - DNA, 25 bp, Homo sapien
ggccacctccgagtcactgctgtcc

SEQ ID NO: 2277160 - DNA, 25 bp, Homo sapien
tgatgcgtctctcgtcgctgctggg

SEQ ID NO: 2277161 - DNA, 25 bp, Homo sapien
tcgctgctgggggaatcggccacct

SEQ ID NO: 2277162 - DNA, 25 bp, Homo sapien
tgaaaggaggactggttctgaagcc

SEQ ID NO: 2277163 - DNA, 25 bp, Homo sapien
tgagctgcacgcaggaacatgggct

SEQ ID NO: 2277164 - DNA, 25 bp, Homo sapien
acgatggtccagctgagggagccct

SEQ ID NO: 2277165 - DNA, 25 bp, Homo sapien
ggagtgtctgtttcaccagggcaga

SEQ ID NO: 2277166 - DNA, 25 bp, Homo sapien
accaagggagtcctagtgtcatgga

SEQ ID NO: 2277167 - DNA, 25 bp, Homo sapien
agggagtcctagtgtcatggagaag

SEQ ID NO: 2277168 - DNA, 25 bp, Homo sapien
caagggagtcctagtgtcatggaga

SEQ ID NO: 2277169 - DNA, 25 bp, Homo sapien
ccaagggagtcctagtgtcatggag

SEQ ID NO: 2277170 - DNA, 25 bp, Homo sapien
gcgccgcgccgcacgacccgccggg

SEQ ID NO: 2277171 - DNA, 25 bp, Homo sapien
cgccgcgccgcacgacccgccgggg

SEQ ID NO: 2277172 - DNA, 25 bp, Homo sapien
gggccccctcggggtcaggcgctca

SEQ ID NO: 2277173 - DNA, 25 bp, Homo sapien
ggccccctcggggtcaggcgctcac

SEQ ID NO: 2277174 - DNA, 25 bp, Homo sapien
tccgcgactacggtcccatgggctg

SEQ ID NO: 2277175 - DNA, 25 bp, Homo sapien
cttcaacaaccaggctggacggcga

SEQ ID NO: 2277176 - DNA, 25 bp, Homo sapien
gttcgagggaggtcggtactctctc

SEQ ID NO: 2277177 - DNA, 25 bp, Homo sapien
gcgacactgcccgaagaagggacag

SEQ ID NO: 2277178 - DNA, 25 bp, Homo sapien
tgaggtacccaagccagacccttct

SEQ ID NO: 2277179 - DNA, 25 bp, Homo sapien
atccacaactctgcccgtatctgag

SEQ ID NO: 2277180 - DNA, 25 bp, Homo sapien
atctgaggaaggcacacaggcgtct

SEQ ID NO: 2277181 - DNA, 25 bp, Homo sapien
cacaggaggtttggaactgaggtac

SEQ ID NO: 2277182 - DNA, 25 bp, Homo sapien
aagtgcccggcgagcttcatgagcg

SEQ ID NO: 2277183 - DNA, 25 bp, Homo sapien
catgagcgggttggcacccccgcat

SEQ ID NO: 2277184 - DNA, 25 bp, Homo sapien
cctgggtgaagtgcccggcgagctt

SEQ ID NO: 2277185 - DNA, 25 bp, Homo sapien
tgagcgggttggcacccccgcattc

SEQ ID NO: 2277186 - DNA, 25 bp, Homo sapien
cagaggctgcacctgggctttccac

SEQ ID NO: 2277187 - DNA, 25 bp, Homo sapien
tgcctcagaggctgcacctgggctt

SEQ ID NO: 2277188 - DNA, 25 bp, Homo sapien
gcctcagaggctgcacctgggcttt

SEQ ID NO: 2277189 - DNA, 25 bp, Homo sapien
ctcagaggctgcacctgggctttcc

SEQ ID NO: 2277190 - DNA, 25 bp, Homo sapien
cagaggctgcacctgggctttccac

SEQ ID NO: 2277191 - DNA, 25 bp, Homo sapien
tgcctcagaggctgcacctgggctt

SEQ ID NO: 2277192 - DNA, 25 bp, Homo sapien
gcctcagaggctgcacctgggcttt

SEQ ID NO: 2277193 - DNA, 25 bp, Homo sapien
ctcagaggctgcacctgggctttcc

SEQ ID NO: 2277194 - DNA, 25 bp, Homo sapien
catttatttaaaggtgcacagggtt

SEQ ID NO: 2277195 - DNA, 25 bp, Homo sapien
tttgcaacacaatagagaaagcagt

SEQ ID NO: 2277196 - DNA, 25 bp, Homo sapien
tataccaagatgtgcaaacagcccc

SEQ ID NO: 2277197 - DNA, 25 bp, Homo sapien
tggtaactactatgatttgcaacac

SEQ ID NO: 2277198 - DNA, 25 bp, Homo sapien
tcatcttcagaagctactcccaaag

SEQ ID NO: 2277199 - DNA, 25 bp, Homo sapien
ctcatcttcagaagctactcccaaa

SEQ ID NO: 2277200 - DNA, 25 bp, Homo sapien
catcttcagaagctactcccaaagg

SEQ ID NO: 2277201 - DNA, 25 bp, Homo sapien
agcctggcggaagtttgactgctca

SEQ ID NO: 2277202 - DNA, 25 bp, Homo sapien
tggcggaagtttgactgctcaatct

SEQ ID NO: 2277203 - DNA, 25 bp, Homo sapien
gacacaaggggtgcattctggtcct

SEQ ID NO: 2277204 - DNA, 25 bp, Homo sapien
agtttgactgctcaatctgctgcat

SEQ ID NO: 2277205 - DNA, 25 bp, Homo sapien
ggaccagtcagtctcattataatcc

SEQ ID NO: 2277206 - DNA, 25 bp, Homo sapien
aacttcagagatgaattcttgggac

SEQ ID NO: 2277207 - DNA, 25 bp, Homo sapien
gaattcttgggaccagtcagtctca

SEQ ID NO: 2277208 - DNA, 25 bp, Homo sapien
ttataatcctgagttacatccacag

SEQ ID NO: 2277209 - DNA, 25 bp, Homo sapien
ccaatatagattttcccataacaag

SEQ ID NO: 2277210 - DNA, 25 bp, Homo sapien
tgaacaggggaagggtatagaattc

SEQ ID NO: 2277211 - DNA, 25 bp, Homo sapien
tcccatagaagccaatatagatttt

SEQ ID NO: 2277212 - DNA, 25 bp, Homo sapien
gaagccaatatagattttcccataa

SEQ ID NO: 2277213 - DNA, 25 bp, Homo sapien
ctcttcgttctctctatccaaaatc

SEQ ID NO: 2277214 - DNA, 25 bp, Homo sapien
aatctcttatccagtacaaacccag

SEQ ID NO: 2277215 - DNA, 25 bp, Homo sapien
actcttcgttctctctatccaaaat

SEQ ID NO: 2277216 - DNA, 25 bp, Homo sapien
atctcttatccagtacaaacccagt

SEQ ID NO: 2277217 - DNA, 25 bp, Homo sapien
cagaatcccaggtgctgtagtgaat

SEQ ID NO: 2277218 - DNA, 25 bp, Homo sapien
caaataacttaaggccagaatccca

SEQ ID NO: 2277219 - DNA, 25 bp, Homo sapien
tagtgaatactctcttcctcggcaa

SEQ ID NO: 2277220 - DNA, 25 bp, Homo sapien
tcaggcactggaacttcacaataac

SEQ ID NO: 2277221 - DNA, 25 bp, Homo sapien
gagaaggcacaagcctacggtgttc

SEQ ID NO: 2277222 - DNA, 25 bp, Homo sapien
cctttactatcctgtggccagaaaa

SEQ ID NO: 2277223 - DNA, 25 bp, Homo sapien
cactcctggcccatgacaaggacag

SEQ ID NO: 2277224 - DNA, 25 bp, Homo sapien
gactgcgggcactaaagaacacaag

SEQ ID NO: 2277225 - DNA, 25 bp, Homo sapien
gtggctgttccctcaggttctccca

SEQ ID NO: 2277226 - DNA, 25 bp, Homo sapien
cagcgatcggtggctgttccctcag

SEQ ID NO: 2277227 - DNA, 25 bp, Homo sapien
cagcttctcctctgattgctccaaa

SEQ ID NO: 2277228 - DNA, 25 bp, Homo sapien
aaatattcctcagcccagcgggcag

SEQ ID NO: 2277229 - DNA, 25 bp, Homo sapien
ctcctcaggatgatattcatcatac

SEQ ID NO: 2277230 - DNA, 25 bp, Homo sapien
atcctcctcaggatgatattcatca

SEQ ID NO: 2277231 - DNA, 25 bp, Homo sapien
tcctcctcaggatgatattcatcat

SEQ ID NO: 2277232 - DNA, 25 bp, Homo sapien
gatcctcctcaggatgatattcatc

SEQ ID NO: 2277233 - DNA, 25 bp, Homo sapien
gatatgctaaagaccctaaaagagg

SEQ ID NO: 2277234 - DNA, 25 bp, Homo sapien
tctatagacaggaacgaagagacct

SEQ ID NO: 2277235 - DNA, 25 bp, Homo sapien
tctctagctgcagacaagatatgct

SEQ ID NO: 2277236 - DNA, 25 bp, Homo sapien
gaagaggcaggatcttaagtctctg

SEQ ID NO: 2277237 - DNA, 25 bp, Homo sapien
gggacacctgcccttcgccaatctg

SEQ ID NO: 2277238 - DNA, 25 bp, Homo sapien
actgttctgcctgagctcggcccga

SEQ ID NO: 2277239 - DNA, 25 bp, Homo sapien
caatctgccgcacgaatttcaggaa

SEQ ID NO: 2277240 - DNA, 25 bp, Homo sapien
gctgctgtataaactctgctgccca

SEQ ID NO: 2277241 - DNA, 25 bp, Homo sapien
tggctctgaagtgggactggaaagt

SEQ ID NO: 2277242 - DNA, 25 bp, Homo sapien
ggactggaaagtgacaatgtcctac

SEQ ID NO: 2277243 - DNA, 25 bp, Homo sapien
gcatcagctggctctgaagtgggac

SEQ ID NO: 2277244 - DNA, 25 bp, Homo sapien
tgaagtgggactggaaagtgacaat

SEQ ID NO: 2277245 - DNA, 25 bp, Homo sapien
ggtcaacccaggcatctgatgtacc

SEQ ID NO: 2277246 - DNA, 25 bp, Homo sapien
tcaagggcagatgtgtttactggtc

SEQ ID NO: 2277247 - DNA, 25 bp, Homo sapien
tgtgaactggtcaacccaggcatct

SEQ ID NO: 2277248 - DNA, 25 bp, Homo sapien
ggtcttgtgaactggtcaacccagg

SEQ ID NO: 2277249 - DNA, 25 bp, Homo sapien
cttatcataggtagctgacgtaagg

SEQ ID NO: 2277250 - DNA, 25 bp, Homo sapien
tagctgacgtaaggtcatcatagtc

SEQ ID NO: 2277251 - DNA, 25 bp, Homo sapien
cataggtagctgacgtaaggtcatc

SEQ ID NO: 2277252 - DNA, 25 bp, Homo sapien
acgtaaggtcatcatagtcagaaag

SEQ ID NO: 2277253 - DNA, 25 bp, Homo sapien
ttccatgtgcttaggatcctgctgc

SEQ ID NO: 2277254 - DNA, 25 bp, Homo sapien
tccatgtgcttaggatcctgctgca

SEQ ID NO: 2277255 - DNA, 25 bp, Homo sapien
caatgcactgatggctaatagttct

SEQ ID NO: 2277256 - DNA, 25 bp, Homo sapien
ctccgcaatgcactgatggctaata

SEQ ID NO: 2277257 - DNA, 25 bp, Homo sapien
cgcaatgcactgatggctaatagtt

SEQ ID NO: 2277258 - DNA, 25 bp, Homo sapien
cactgatggctaatagttcttgttc

SEQ ID NO: 2277259 - DNA, 25 bp, Homo sapien
caggtgtcaccagatgggcataggc

SEQ ID NO: 2277260 - DNA, 25 bp, Homo sapien
caggcctgtcgctgcagggactcgt

SEQ ID NO: 2277261 - DNA, 25 bp, Homo sapien
cgcagccagtctcgtagggtttcac

SEQ ID NO: 2277262 - DNA, 25 bp, Homo sapien
tgtctggttatctggctttagctcc

SEQ ID NO: 2277263 - DNA, 25 bp, Homo sapien
gagatcccaggatacgcttgctggg

SEQ ID NO: 2277264 - DNA, 25 bp, Homo sapien
tcagacaagagagatcccaggatac

SEQ ID NO: 2277265 - DNA, 25 bp, Homo sapien
gagagatcccaggatacgcttgctg

SEQ ID NO: 2277266 - DNA, 25 bp, Homo sapien
caagagagatcccaggatacgcttg

SEQ ID NO: 2277267 - DNA, 25 bp, Homo sapien
ttgggacgaacgctgagggcagctg

SEQ ID NO: 2277268 - DNA, 25 bp, Homo sapien
aatggaggtagggtccagccgcaca

SEQ ID NO: 2277269 - DNA, 25 bp, Homo sapien
agggtcaatggaggtagggtccagc

SEQ ID NO: 2277270 - DNA, 25 bp, Homo sapien
cagctgtgaagcagtccacggcctt

SEQ ID NO: 2277271 - DNA, 25 bp, Homo sapien
ggcccggcggtacgcagctactgct

SEQ ID NO: 2277272 - DNA, 25 bp, Homo sapien
cggcggtacgcagctactgcttctt

SEQ ID NO: 2277273 - DNA, 25 bp, Homo sapien
ggtgagccccgaggttgatgcagct

SEQ ID NO: 2277274 - DNA, 25 bp, Homo sapien
aggctggagctcgagggcccggcgg

SEQ ID NO: 2277275 - DNA, 25 bp, Homo sapien
catcgctctggcctaacatagacaa

SEQ ID NO: 2277276 - DNA, 25 bp, Homo sapien
gccaaacgcagggtgctccagatgt

SEQ ID NO: 2277277 - DNA, 25 bp, Homo sapien
caaacatagttaggagggtggacag

SEQ ID NO: 2277278 - DNA, 25 bp, Homo sapien
gggtggacagatcccgcgcgtcggc

SEQ ID NO: 2277279 - DNA, 25 bp, Homo sapien
tgaggaccgctgcagtgatgacaca

SEQ ID NO: 2277280 - DNA, 25 bp, Homo sapien
ggttagtgtatctccccatgcaggg

SEQ ID NO: 2277281 - DNA, 25 bp, Homo sapien
tggtagaccctatcagaaatggcag

SEQ ID NO: 2277282 - DNA, 25 bp, Homo sapien
agacagacattagaggcgcacagca

SEQ ID NO: 2277283 - DNA, 25 bp, Homo sapien
gtgacaggtgccacaacagcttcct

SEQ ID NO: 2277284 - DNA, 25 bp, Homo sapien
ctcgtgatcccccaggtggtgacag

SEQ ID NO: 2277285 - DNA, 25 bp, Homo sapien
tcgtgatcccccaggtggtgacagg

SEQ ID NO: 2277286 - DNA, 25 bp, Homo sapien
ccaagatggtaggtagagaatccaa

SEQ ID NO: 2277287 - DNA, 25 bp, Homo sapien
aactccagcccgttcattcagaagc

SEQ ID NO: 2277288 - DNA, 25 bp, Homo sapien
tcctacatgaattgtccaagatggt

SEQ ID NO: 2277289 - DNA, 25 bp, Homo sapien
caatatgagttcaggatcccaagga

SEQ ID NO: 2277290 - DNA, 25 bp, Homo sapien
caggataaacacttctagcaggaca

SEQ ID NO: 2277291 - DNA, 25 bp, Homo sapien
gactttaaattaagctggagcccga

SEQ ID NO: 2277292 - DNA, 25 bp, Homo sapien
ttcacctagaggacatagcatccag

SEQ ID NO: 2277293 - DNA, 25 bp, Homo sapien
gaaactggcagtctactacgctgct

SEQ ID NO: 2277294 - DNA, 25 bp, Homo sapien
caacttggagtctttccctttcact

SEQ ID NO: 2277295 - DNA, 25 bp, Homo sapien
gcaacaacttcctcaacttggagtc

SEQ ID NO: 2277296 - DNA, 25 bp, Homo sapien
gaagccatcagcaacaacttcctca

SEQ ID NO: 2277297 - DNA, 25 bp, Homo sapien
cttggagtctttccctttcactcat

SEQ ID NO: 2277298 - DNA, 25 bp, Homo sapien
gcaatcctcgctgatctttgatccc

SEQ ID NO: 2277299 - DNA, 25 bp, Homo sapien
gctgtgtccacagcgaaggagttcc

SEQ ID NO: 2277300 - DNA, 25 bp, Homo sapien
ttccactgagctgtgcaatcctcgc

SEQ ID NO: 2277301 - DNA, 25 bp, Homo sapien
tccatccatggtatcttccactgag

SEQ ID NO: 2277302 - DNA, 25 bp, Homo sapien
gggaacagaatctggtccatagtca

SEQ ID NO: 2277303 - DNA, 25 bp, Homo sapien
ggaacagaatctggtccatagtcac

SEQ ID NO: 2277304 - DNA, 25 bp, Homo sapien
gaatcgtgtatatttcagagggctg

SEQ ID NO: 2277305 - DNA, 25 bp, Homo sapien
ctgagcctccatcagtctgaagcag

SEQ ID NO: 2277306 - DNA, 25 bp, Homo sapien
tgagcctccatcagtctgaagcagt

SEQ ID NO: 2277307 - DNA, 25 bp, Homo sapien
aatgatgaagtggaaaaacttccaa

SEQ ID NO: 2277308 - DNA, 25 bp, Homo sapien
gagcctccatcagtctgaagcagtt

SEQ ID NO: 2277309 - DNA, 25 bp, Homo sapien
cattgttgttgccaagtcctctgtg

SEQ ID NO: 2277310 - DNA, 25 bp, Homo sapien
cttctggataagtggcaggtccatt

SEQ ID NO: 2277311 - DNA, 25 bp, Homo sapien
ggtgcagggtgtgccatccttcatt

SEQ ID NO: 2277312 - DNA, 25 bp, Homo sapien
gctggcaataccgttggtgttaaac

SEQ ID NO: 2277313 - DNA, 25 bp, Homo sapien
aatgtctggtagcggaaaaaaatct

SEQ ID NO: 2277314 - DNA, 25 bp, Homo sapien
atgtctggtagcggaaaaaaatctt

SEQ ID NO: 2277315 - DNA, 25 bp, Homo sapien
ggtccagcacatctgcagcaaagtt

SEQ ID NO: 2277316 - DNA, 25 bp, Homo sapien
gcaagagtcagaggcgtccaaagct

SEQ ID NO: 2277317 - DNA, 25 bp, Homo sapien
tatggcttcaaagtcagcaagagtc

SEQ ID NO: 2277318 - DNA, 25 bp, Homo sapien
tgatctttgtgtaagcgccggccag

SEQ ID NO: 2277319 - DNA, 25 bp, Homo sapien
tattcgtgcttacgcatgctcagag

SEQ ID NO: 2277320 - DNA, 25 bp, Homo sapien
ccttccccgagcagtaggtgggcat

SEQ ID NO: 2277321 - DNA, 25 bp, Homo sapien
cctgaatggatctgctaagtttgac

SEQ ID NO: 2277322 - DNA, 25 bp, Homo sapien
tgaaaagagaatccctcaggttgct

SEQ ID NO: 2277323 - DNA, 25 bp, Homo sapien
tcgtctttgagggaactgcccctct

SEQ ID NO: 2277324 - DNA, 25 bp, Homo sapien
acagcgccctgagttcgtctttgag

SEQ ID NO: 2277325 - DNA, 25 bp, Homo sapien
tgcggcatctgctgttttccccctt

SEQ ID NO: 2277326 - DNA, 25 bp, Homo sapien
cactggttctggtgcattctgctaa

SEQ ID NO: 2277327 - DNA, 25 bp, Homo sapien
gggtaggtttacatgactgattact

SEQ ID NO: 2277328 - DNA, 25 bp, Homo sapien
aagagaggggtaggtttacatgact

SEQ ID NO: 2277329 - DNA, 25 bp, Homo sapien
ggtttacatgactgattactcttac

SEQ ID NO: 2277330 - DNA, 25 bp, Homo sapien
ctgaccagggacacatggaaaagag

SEQ ID NO: 2277331 - DNA, 25 bp, Homo sapien
gattctgggcagaatcacggccaaa

SEQ ID NO: 2277332 - DNA, 25 bp, Homo sapien
cagggctgggttagctggtctctcc

SEQ ID NO: 2277333 - DNA, 25 bp, Homo sapien
tttcgggacaaggagcccagttctc

SEQ ID NO: 2277334 - DNA, 25 bp, Homo sapien
tcgtatgcaagctacattgaccagc

SEQ ID NO: 2277335 - DNA, 25 bp, Homo sapien
gattgttcccggcatgaagatgatc

SEQ ID NO: 2277336 - DNA, 25 bp, Homo sapien
gccacccattccagctttgtggaga

SEQ ID NO: 2277337 - DNA, 25 bp, Homo sapien
ttgtcttaaggtcaggacactccaa

SEQ ID NO: 2277338 - DNA, 25 bp, Homo sapien
caatacaatggactccaccgctggg

SEQ ID NO: 2277339 - DNA, 25 bp, Homo sapien
cggagttttactctgccatgcaagc

SEQ ID NO: 2277340 - DNA, 25 bp, Homo sapien
ccatctccagccaacagtgaggatt

SEQ ID NO: 2277341 - DNA, 25 bp, Homo sapien
gagttttactctgccatgcaagctg

SEQ ID NO: 2277342 - DNA, 25 bp, Homo sapien
caccatctccagccaacagtgagga

SEQ ID NO: 2277343 - DNA, 25 bp, Homo sapien
gagggtgaacccaatgccgaggctg

SEQ ID NO: 2277344 - DNA, 25 bp, Homo sapien
agggtgaacccaatgccgaggctgc

SEQ ID NO: 2277345 - DNA, 25 bp, Homo sapien
agagggtgaacccaatgccgaggct

SEQ ID NO: 2277346 - DNA, 25 bp, Homo sapien
gggtgaacccaatgccgaggctgct

SEQ ID NO: 2277347 - DNA, 25 bp, Homo sapien
tattccatatgatatctgaggactt

SEQ ID NO: 2277348 - DNA, 25 bp, Homo sapien
ggaagaaaacacactgccaatggcg

SEQ ID NO: 2277349 - DNA, 25 bp, Homo sapien
tatctgaggacttcaagtccagcca

SEQ ID NO: 2277350 - DNA, 25 bp, Homo sapien
gtcaaactgtgccattcgatgcaca

SEQ ID NO: 2277351 - DNA, 25 bp, Homo sapien
gatctatctagctggaggacatgac

SEQ ID NO: 2277352 - DNA, 25 bp, Homo sapien
aagctgaggcccttgagactttgct

SEQ ID NO: 2277353 - DNA, 25 bp, Homo sapien
gtcaaatacgtttcaaaagctgagg

SEQ ID NO: 2277354 - DNA, 25 bp, Homo sapien
tatgggaaacaaggaagaactctaa

SEQ ID NO: 2277355 - DNA, 25 bp, Homo sapien
cttaaggtctttttgcacgagcatc

SEQ ID NO: 2277356 - DNA, 25 bp, Homo sapien
cacgagcatccggtacacagtggga

SEQ ID NO: 2277357 - DNA, 25 bp, Homo sapien
tctttttgcacgagcatccggtaca

SEQ ID NO: 2277358 - DNA, 25 bp, Homo sapien
agcatccggtacacagtgggaggac

SEQ ID NO: 2277359 - DNA, 25 bp, Homo sapien
ggttgagtggctcccctccggtcaa

SEQ ID NO: 2277360 - DNA, 25 bp, Homo sapien
gcacttctgggttgagtggctcccc

SEQ ID NO: 2277361 - DNA, 25 bp, Homo sapien
agtggctcccctccggtcaagcagt

SEQ ID NO: 2277362 - DNA, 25 bp, Homo sapien
ctgctccagcacttctgggttgagt

SEQ ID NO: 2277363 - DNA, 25 bp, Homo sapien
aatttcttggcctttctgattggca

SEQ ID NO: 2277364 - DNA, 25 bp, Homo sapien
ctggacatcatagggcagcattcct

SEQ ID NO: 2277365 - DNA, 25 bp, Homo sapien
cattgaacctggtttaatttcttgg

SEQ ID NO: 2277366 - DNA, 25 bp, Homo sapien
ggcctttctgattggcacaaatcat

SEQ ID NO: 2277367 - DNA, 25 bp, Homo sapien
gagtctgagggcaatttccccttct

SEQ ID NO: 2277368 - DNA, 25 bp, Homo sapien
tttgccaggtggtagaacattgcca

SEQ ID NO: 2277369 - DNA, 25 bp, Homo sapien
aacagaagggccgtgtaggtttgag

SEQ ID NO: 2277370 - DNA, 25 bp, Homo sapien
ttccccttctttgccaggtggtaga

SEQ ID NO: 2277371 - DNA, 25 bp, Homo sapien
atcagctctgccgacaaaccagaaa

SEQ ID NO: 2277372 - DNA, 25 bp, Homo sapien
gacatcatcagctctgccgacaaac

SEQ ID NO: 2277373 - DNA, 25 bp, Homo sapien
atcatcagctctgccgacaaaccag

SEQ ID NO: 2277374 - DNA, 25 bp, Homo sapien
agctctgccgacaaaccagaaatac

SEQ ID NO: 2277375 - DNA, 25 bp, Homo sapien
tgctcaatgagtgcactctccactt

SEQ ID NO: 2277376 - DNA, 25 bp, Homo sapien
actactgacaacagccgattcaaca

SEQ ID NO: 2277377 - DNA, 25 bp, Homo sapien
gcggatttgatctggactactgaca

SEQ ID NO: 2277378 - DNA, 25 bp, Homo sapien
agccgattcaacaactgctggatgc

SEQ ID NO: 2277379 - DNA, 25 bp, Homo sapien
acttaaagggtgcagctaagacaac

SEQ ID NO: 2277380 - DNA, 25 bp, Homo sapien
cattcttggtctcttaaaacgttgc

SEQ ID NO: 2277381 - DNA, 25 bp, Homo sapien
gttgcgtttgattttcccagtgatt

SEQ ID NO: 2277382 - DNA, 25 bp, Homo sapien
aacgttgcgtttgattttcccagtg

SEQ ID NO: 2277383 - DNA, 25 bp, Homo sapien
tggtctcttaaaacgttgcgtttga

SEQ ID NO: 2277384 - DNA, 25 bp, Homo sapien
tggtctatctcaagtaaaaagggag

SEQ ID NO: 2277385 - DNA, 25 bp, Homo sapien
atttctttatgtgctggtctatctc

SEQ ID NO: 2277386 - DNA, 25 bp, Homo sapien
gccaaggaacaccatttgggaataa

SEQ ID NO: 2277387 - DNA, 25 bp, Homo sapien
aacacagcatagagccaaggaacac

SEQ ID NO: 2277388 - DNA, 25 bp, Homo sapien
ttttgtccttatgcacagtgttatg

SEQ ID NO: 2277389 - DNA, 25 bp, Homo sapien
ttgtccttatgcacagtgttatgca

SEQ ID NO: 2277390 - DNA, 25 bp, Homo sapien
tttgtccttatgcacagtgttatgc

SEQ ID NO: 2277391 - DNA, 25 bp, Homo sapien
tttttgtccttatgcacagtgttat

SEQ ID NO: 2277392 - DNA, 25 bp, Homo sapien
gtcactttcacaaatagtaatgggt

SEQ ID NO: 2277393 - DNA, 25 bp, Homo sapien
aaggcccaggggtatagatttcagc

SEQ ID NO: 2277394 - DNA, 25 bp, Homo sapien
tagtaatgggtcgtttcccatccca

SEQ ID NO: 2277395 - DNA, 25 bp, Homo sapien
tagatttcagcctcagaatccctgg

SEQ ID NO: 2277396 - DNA, 25 bp, Homo sapien
tgtaatgtcacaggtaattccatat

SEQ ID NO: 2277397 - DNA, 25 bp, Homo sapien
aataagggtctcagaatttctcatc

SEQ ID NO: 2277398 - DNA, 25 bp, Homo sapien
tcaatataaacatcgataataaggg

SEQ ID NO: 2277399 - DNA, 25 bp, Homo sapien
taattccatataggctaaatgactc

SEQ ID NO: 2277400 - DNA, 25 bp, Homo sapien
tttcttgacttttgctagcttctaa

SEQ ID NO: 2277401 - DNA, 25 bp, Homo sapien
ttcttgacttttgctagcttctaaa

SEQ ID NO: 2277402 - DNA, 25 bp, Homo sapien
tgtggagtagggcggagcgcggaac

SEQ ID NO: 2277403 - DNA, 25 bp, Homo sapien
tggagtagggcggagcgcggaacgc

SEQ ID NO: 2277404 - DNA, 25 bp, Homo sapien
gagtagggcggagcgcggaacgcga

SEQ ID NO: 2277405 - DNA, 25 bp, Homo sapien
gatgtggagtagggcggagcgcgga

SEQ ID NO: 2277406 - DNA, 25 bp, Homo sapien
tcagcagttagtttgctatggattc

SEQ ID NO: 2277407 - DNA, 25 bp, Homo sapien
acttctgtgagatcattttatcagc

SEQ ID NO: 2277408 - DNA, 25 bp, Homo sapien
tatggattctgttagcatgaaagcg

SEQ ID NO: 2277409 - DNA, 25 bp, Homo sapien
gcgtttccggtcatactgtatttta

SEQ ID NO: 2277410 - DNA, 25 bp, Homo sapien
tcagtgagttccttggaaagccaat

SEQ ID NO: 2277411 - DNA, 25 bp, Homo sapien
ttctgtccgctgtccttcatgggcc

SEQ ID NO: 2277412 - DNA, 25 bp, Homo sapien
tagacgaagtgctggcctctgagaa

SEQ ID NO: 2277413 - DNA, 25 bp, Homo sapien
tatcaaatcctaccggacaggaagg

SEQ ID NO: 2277414 - DNA, 25 bp, Homo sapien
cattaaacatgtagagacctcacag

SEQ ID NO: 2277415 - DNA, 25 bp, Homo sapien
tcccaacctaggcatgcagtgaggg

SEQ ID NO: 2277416 - DNA, 25 bp, Homo sapien
caatatggctccagatacctcccaa

SEQ ID NO: 2277417 - DNA, 25 bp, Homo sapien
tggaaacttgtacgtgctgcatgtc

SEQ ID NO: 2277418 - DNA, 25 bp, Homo sapien
tatcaatttttgatgttttcaaaaa

SEQ ID NO: 2277419 - DNA, 25 bp, Homo sapien
atttttgatgttttcaaaaaatcag

SEQ ID NO: 2277420 - DNA, 25 bp, Homo sapien
tttgatgttttcaaaaaatcagctc

SEQ ID NO: 2277421 - DNA, 25 bp, Homo sapien
ctatcaatttttgatgttttcaaaa

SEQ ID NO: 2277422 - DNA, 25 bp, Homo sapien
tatcctgaagagttggatattaact

SEQ ID NO: 2277423 - DNA, 25 bp, Homo sapien
aagagttggatattaactaacttgg

SEQ ID NO: 2277424 - DNA, 25 bp, Homo sapien
ttcaggtgcaccagtcaaacgtgta

SEQ ID NO: 2277425 - DNA, 25 bp, Homo sapien
ggtgcaccagtcaaacgtgtatttg

SEQ ID NO: 2277426 - DNA, 25 bp, Homo sapien
ttgaggtcaatgaaagggccattgg

SEQ ID NO: 2277427 - DNA, 25 bp, Homo sapien
cagctatcatgaacaggcacctaat

SEQ ID NO: 2277428 - DNA, 25 bp, Homo sapien
tgaggtcaatgaaagggccattggt

SEQ ID NO: 2277429 - DNA, 25 bp, Homo sapien
catgaacaggcacctaatatggcca

SEQ ID NO: 2277430 - DNA, 25 bp, Homo sapien
tagcttcccattctcagccttgatg

SEQ ID NO: 2277431 - DNA, 25 bp, Homo sapien
gcttcccattctcagccttgatggt

SEQ ID NO: 2277432 - DNA, 25 bp, Homo sapien
agcttcccattctcagccttgatgg

SEQ ID NO: 2277433 - DNA, 25 bp, Homo sapien
ttcccattctcagccttgatggtac

SEQ ID NO: 2277434 - DNA, 25 bp, Homo sapien
atctcatttggttttggtgagctct

SEQ ID NO: 2277435 - DNA, 25 bp, Homo sapien
ctcatttggttttggtgagctctca

SEQ ID NO: 2277436 - DNA, 25 bp, Homo sapien
tgacataattagcaccagcattatc

SEQ ID NO: 2277437 - DNA, 25 bp, Homo sapien
acataattagcaccagcattatctc

SEQ ID NO: 2277438 - DNA, 25 bp, Homo sapien
tgatgaaccttttggttcccctctc

SEQ ID NO: 2277439 - DNA, 25 bp, Homo sapien
cagcctttgccaaggtagtgaagat

SEQ ID NO: 2277440 - DNA, 25 bp, Homo sapien
atgatgaaccttttggttcccctct

SEQ ID NO: 2277441 - DNA, 25 bp, Homo sapien
ggctgtcatgccagagtttcctgga

SEQ ID NO: 2277442 - DNA, 25 bp, Homo sapien
aatggtgttctggaaagccccatgg

SEQ ID NO: 2277443 - DNA, 25 bp, Homo sapien
tgttttcatgcttatggttcatgcc

SEQ ID NO: 2277444 - DNA, 25 bp, Homo sapien
ggcattgctgatgactgtgagtttg

SEQ ID NO: 2277445 - DNA, 25 bp, Homo sapien
ctgggaacacagaagaccatgccag

SEQ ID NO: 2277446 - DNA, 25 bp, Homo sapien
gcttcccattaagcttaggaatgac

SEQ ID NO: 2277447 - DNA, 25 bp, Homo sapien
agtgagcttcccattaagcttagga

SEQ ID NO: 2277448 - DNA, 25 bp, Homo sapien
gagcttcccattaagcttaggaatg

SEQ ID NO: 2277449 - DNA, 25 bp, Homo sapien
caggtttctccagacaagaggtcag

SEQ ID NO: 2277450 - DNA, 25 bp, Homo sapien
aggtttctccagacaagaggtcagt

SEQ ID NO: 2277451 - DNA, 25 bp, Homo sapien
cttgaggggtccttgggtgcctgcc

SEQ ID NO: 2277452 - DNA, 25 bp, Homo sapien
aggggtccttgggtgcctgcctcac

SEQ ID NO: 2277453 - DNA, 25 bp, Homo sapien
tgaggggtccttgggtgcctgcctc

SEQ ID NO: 2277454 - DNA, 25 bp, Homo sapien
ttgaggggtccttgggtgcctgcct

SEQ ID NO: 2277455 - DNA, 25 bp, Homo sapien
aattccaaagggacaacctggtgct

SEQ ID NO: 2277456 - DNA, 25 bp, Homo sapien
gccccagcttcaaaggtggaagggc

SEQ ID NO: 2277457 - DNA, 25 bp, Homo sapien
attccaaagggacaacctggtgctc

SEQ ID NO: 2277458 - DNA, 25 bp, Homo sapien
tcaaaggtggaagggcgggtattgc

SEQ ID NO: 2277459 - DNA, 25 bp, Homo sapien
gttactgtaggcaaattcattgcca

SEQ ID NO: 2277460 - DNA, 25 bp, Homo sapien
ttgttactgtaggcaaattcattgc

SEQ ID NO: 2277461 - DNA, 25 bp, Homo sapien
tgttactgtaggcaaattcattgcc

SEQ ID NO: 2277462 - DNA, 25 bp, Homo sapien
ttactgtaggcaaattcattgccat

SEQ ID NO: 2277463 - DNA, 25 bp, Homo sapien
aggccatgtgtaccatgagtccatc

SEQ ID NO: 2277464 - DNA, 25 bp, Homo sapien
tagtgattgggggattttactcctc

SEQ ID NO: 2277465 - DNA, 25 bp, Homo sapien
gattttactcctcagaggccatgtg

SEQ ID NO: 2277466 - DNA, 25 bp, Homo sapien
gccatgtgtaccatgagtccatcac

SEQ ID NO: 2277467 - DNA, 25 bp, Homo sapien
ttcttcagaggatctggaaactgtg

SEQ ID NO: 2277468 - DNA, 25 bp, Homo sapien
cttcagaggatctggaaactgtgag

SEQ ID NO: 2277469 - DNA, 25 bp, Homo sapien
cccagcagctaagggtccctctctt

SEQ ID NO: 2277470 - DNA, 25 bp, Homo sapien
gagagaagattctgtgtggtcgggg

SEQ ID NO: 2277471 - DNA, 25 bp, Homo sapien
ttcctcttcatgcttactttctcct

SEQ ID NO: 2277472 - DNA, 25 bp, Homo sapien
gcttactttctccttcccttgctag

SEQ ID NO: 2277473 - DNA, 25 bp, Homo sapien
ttactttctccttcccttgctagcc

SEQ ID NO: 2277474 - DNA, 25 bp, Homo sapien
atgcttactttctccttcccttgct

SEQ ID NO: 2277475 - DNA, 25 bp, Homo sapien
tcattgttgtacttcagaatttact

SEQ ID NO: 2277476 - DNA, 25 bp, Homo sapien
gtacttcagaatttacttccttgcc

SEQ ID NO: 2277477 - DNA, 25 bp, Homo sapien
tgtacttcagaatttacttccttgc

SEQ ID NO: 2277478 - DNA, 25 bp, Homo sapien
ttgttgtacttcagaatttacttcc

SEQ ID NO: 2277479 - DNA, 25 bp, Homo sapien
actgtctgttggactattactttcc

SEQ ID NO: 2277480 - DNA, 25 bp, Homo sapien
tggactattactttcctggtagtat

SEQ ID NO: 2277481 - DNA, 25 bp, Homo sapien
cttgtgaaatgctgcacaactgtct

SEQ ID NO: 2277482 - DNA, 25 bp, Homo sapien
ctatccacttgtgaaatgctgcaca

SEQ ID NO: 2277483 - DNA, 25 bp, Homo sapien
gatactttcaggctctgactgcaat

SEQ ID NO: 2277484 - DNA, 25 bp, Homo sapien
tctccatttacggatactttcaggc

SEQ ID NO: 2277485 - DNA, 25 bp, Homo sapien
tttacggatactttcaggctctgac

SEQ ID NO: 2277486 - DNA, 25 bp, Homo sapien
tcttctctccatttacggatacttt

SEQ ID NO: 2277487 - DNA, 25 bp, Homo sapien
ggtcaatgtcatttacaaaggcttc

SEQ ID NO: 2277488 - DNA, 25 bp, Homo sapien
cttctgctgccctgtttgcttttgt

SEQ ID NO: 2277489 - DNA, 25 bp, Homo sapien
aatgtcatttacaaaggcttcttct

SEQ ID NO: 2277490 - DNA, 25 bp, Homo sapien
ctggtcaatgtcatttacaaaggct

SEQ ID NO: 2277491 - DNA, 25 bp, Homo sapien
gttaaagttacacagccaggccaca

SEQ ID NO: 2277492 - DNA, 25 bp, Homo sapien
taaagttacacagccaggccacact

SEQ ID NO: 2277493 - DNA, 25 bp, Homo sapien
agttacacagccaggccacactttc

SEQ ID NO: 2277494 - DNA, 25 bp, Homo sapien
aagttacacagccaggccacacttt

SEQ ID NO: 2277495 - DNA, 25 bp, Homo sapien
tccaataactgtgaagaactttgct

SEQ ID NO: 2277496 - DNA, 25 bp, Homo sapien
ccaataactgtgaagaactttgctg

SEQ ID NO: 2277497 - DNA, 25 bp, Homo sapien
atccaataactgtgaagaactttgc

SEQ ID NO: 2277498 - DNA, 25 bp, Homo sapien
taatccaataactgtgaagaacttt

SEQ ID NO: 2277499 - DNA, 25 bp, Homo sapien
cagttaagtgggctttattccaggg

SEQ ID NO: 2277500 - DNA, 25 bp, Homo sapien
gactcatagacctgataacgacttc

SEQ ID NO: 2277501 - DNA, 25 bp, Homo sapien
caacatagtgctggactcctaacca

SEQ ID NO: 2277502 - DNA, 25 bp, Homo sapien
tggaagagcaaggatgccctcctgc

SEQ ID NO: 2277503 - DNA, 25 bp, Homo sapien
tggttgaccttacttagacatgtga

SEQ ID NO: 2277504 - DNA, 25 bp, Homo sapien
gaagaccaatccacaggatttacca

SEQ ID NO: 2277505 - DNA, 25 bp, Homo sapien
cagcaaagttggctgagtagcagta

SEQ ID NO: 2277506 - DNA, 25 bp, Homo sapien
taccaacatctggagatcaagacaa

SEQ ID NO: 2277507 - DNA, 25 bp, Homo sapien
tgtcattgacgaatgaaaaaacaaa

SEQ ID NO: 2277508 - DNA, 25 bp, Homo sapien
caaaaaacttagagggatctcagag

SEQ ID NO: 2277509 - DNA, 25 bp, Homo sapien
tgtgatatacacgtataatgaatat

SEQ ID NO: 2277510 - DNA, 25 bp, Homo sapien
cctatgttcatagcgccacaattca

SEQ ID NO: 2277511 - DNA, 25 bp, Homo sapien
ctaccaggtagcccggaaagaggct

SEQ ID NO: 2277512 - DNA, 25 bp, Homo sapien
aaagaggctgaaaaccggagctcca

SEQ ID NO: 2277513 - DNA, 25 bp, Homo sapien
gaaagaggctgaaaaccggagctcc

SEQ ID NO: 2277514 - DNA, 25 bp, Homo sapien
ttgctaccaggtagcccggaaagag

SEQ ID NO: 2277515 - DNA, 25 bp, Homo sapien
ggagaccctgggatgtaggttggat

SEQ ID NO: 2277516 - DNA, 25 bp, Homo sapien
cttcggtgagcatttgtggagaccc

SEQ ID NO: 2277517 - DNA, 25 bp, Homo sapien
tcccgggaattttcttcggtgagca

SEQ ID NO: 2277518 - DNA, 25 bp, Homo sapien
tgggatgtaggttggattaaactgt

SEQ ID NO: 2277519 - DNA, 25 bp, Homo sapien
cactcggatatatagaccagcattc

SEQ ID NO: 2277520 - DNA, 25 bp, Homo sapien
tttctttcccactcggatatataga

SEQ ID NO: 2277521 - DNA, 25 bp, Homo sapien
ggatatatagaccagcattctttct

SEQ ID NO: 2277522 - DNA, 25 bp, Homo sapien
tttcccactcggatatatagaccag

SEQ ID NO: 2277523 - DNA, 25 bp, Homo sapien
acagactctcgacggagtaaagctt

SEQ ID NO: 2277524 - DNA, 25 bp, Homo sapien
cagactctcgacggagtaaagcttc

SEQ ID NO: 2277525 - DNA, 25 bp, Homo sapien
agactctcgacggagtaaagcttcc

SEQ ID NO: 2277526 - DNA, 25 bp, Homo sapien
cgagtaacatgtatctcaatcttgc

SEQ ID NO: 2277527 - DNA, 25 bp, Homo sapien
acgaactccgccgagtaacatgtat

SEQ ID NO: 2277528 - DNA, 25 bp, Homo sapien
tctgcacagacagcaatgttcttac

SEQ ID NO: 2277529 - DNA, 25 bp, Homo sapien
ttctctctgcacagacagcaatgtt

SEQ ID NO: 2277530 - DNA, 25 bp, Homo sapien
ccttgtttgttggtcttctttcatg

SEQ ID NO: 2277531 - DNA, 25 bp, Homo sapien
actcccttaggctccttgtttgttg

SEQ ID NO: 2277532 - DNA, 25 bp, Homo sapien
ctccttgtttgttggtcttctttca

SEQ ID NO: 2277533 - DNA, 25 bp, Homo sapien
ccttaggctccttgtttgttggtct

SEQ ID NO: 2277534 - DNA, 25 bp, Homo sapien
agaaggatcccatccattagacacg

SEQ ID NO: 2277535 - DNA, 25 bp, Homo sapien
atcccatccattagacacgcagaaa

SEQ ID NO: 2277536 - DNA, 25 bp, Homo sapien
aagtggcttggtgtcttgattccct

SEQ ID NO: 2277537 - DNA, 25 bp, Homo sapien
cattagacacgcagaaactgcaggg

SEQ ID NO: 2277538 - DNA, 25 bp, Homo sapien
tgggcttctaagacacatgggaata

SEQ ID NO: 2277539 - DNA, 25 bp, Homo sapien
catagagtagctttctcaacctgct

SEQ ID NO: 2277540 - DNA, 25 bp, Homo sapien
ttgggtcaaatcaaacagtagagct

SEQ ID NO: 2277541 - DNA, 25 bp, Homo sapien
tacattcagattacacagatccctt

SEQ ID NO: 2277542 - DNA, 25 bp, Homo sapien
gctgaggcagcactgaatcttccat

SEQ ID NO: 2277543 - DNA, 25 bp, Homo sapien
tgctgaggcagcactgaatcttcca

SEQ ID NO: 2277544 - DNA, 25 bp, Homo sapien
ctgctgaggcagcactgaatcttcc

SEQ ID NO: 2277545 - DNA, 25 bp, Homo sapien
ggtcgctggtagtcccctcagatgc

SEQ ID NO: 2277546 - DNA, 25 bp, Homo sapien
gagttgctgcctatggccttacagg

SEQ ID NO: 2277547 - DNA, 25 bp, Homo sapien
aggaggtctctgttcgtcatggtcg

SEQ ID NO: 2277548 - DNA, 25 bp, Homo sapien
ttacaggtcttccatcctagcagct

SEQ ID NO: 2277549 - DNA, 25 bp, Homo sapien
gaggttacagagatgaccgaccaga

SEQ ID NO: 2277550 - DNA, 25 bp, Homo sapien
gagatgaccgaccagataaggtaga

SEQ ID NO: 2277551 - DNA, 25 bp, Homo sapien
ttacagagatgaccgaccagataag

SEQ ID NO: 2277552 - DNA, 25 bp, Homo sapien
tagggaggttacagagatgaccgac

SEQ ID NO: 2277553 - DNA, 25 bp, Homo sapien
cccagagagtatgcatgagggattt

SEQ ID NO: 2277554 - DNA, 25 bp, Homo sapien
ttcaaatgacagtgatagactctct

SEQ ID NO: 2277555 - DNA, 25 bp, Homo sapien
gtgatagactctcttgtatagtggg

SEQ ID NO: 2277556 - DNA, 25 bp, Homo sapien
gctgactaatcttttctcgggatac

SEQ ID NO: 2277557 - DNA, 25 bp, Homo sapien
tattatatttcttcctcgttttaca

SEQ ID NO: 2277558 - DNA, 25 bp, Homo sapien
ttatgctttctcttggacatttctt

SEQ ID NO: 2277559 - DNA, 25 bp, Homo sapien
ttttcttatgctttctcttggacat

SEQ ID NO: 2277560 - DNA, 25 bp, Homo sapien
tcttatgctttctcttggacatttc

SEQ ID NO: 2277561 - DNA, 25 bp, Homo sapien
agccttggcaacacagagatctcca

SEQ ID NO: 2277562 - DNA, 25 bp, Homo sapien
gccttggcaacacagagatctccat

SEQ ID NO: 2277563 - DNA, 25 bp, Homo sapien
cagccttggcaacacagagatctcc

SEQ ID NO: 2277564 - DNA, 25 bp, Homo sapien
ccagccttggcaacacagagatctc

SEQ ID NO: 2277565 - DNA, 25 bp, Homo sapien
tgcatacccctcatttagttctact

SEQ ID NO: 2277566 - DNA, 25 bp, Homo sapien
tccacggaatcaacgactgttaatg

SEQ ID NO: 2277567 - DNA, 25 bp, Homo sapien
gtaaaatgtcttagccagtgcgatg

SEQ ID NO: 2277568 - DNA, 25 bp, Homo sapien
tattggtgagaatggtgtcatgtaa

SEQ ID NO: 2277569 - DNA, 25 bp, Homo sapien
tactccgtgcccatctcgtgtgggt

SEQ ID NO: 2277570 - DNA, 25 bp, Homo sapien
tttcaagactactccgtgcccatct

SEQ ID NO: 2277571 - DNA, 25 bp, Homo sapien
tccgtgcccatctcgtgtgggtgtg

SEQ ID NO: 2277572 - DNA, 25 bp, Homo sapien
agactactccgtgcccatctcgtgt

SEQ ID NO: 2277573 - DNA, 25 bp, Homo sapien
gggataaagtgagttgcctgcataa

SEQ ID NO: 2277574 - DNA, 25 bp, Homo sapien
gagttgcctgcataataacatgagg

SEQ ID NO: 2277575 - DNA, 25 bp, Homo sapien
agaaattgggataaagtgagttgcc

SEQ ID NO: 2277576 - DNA, 25 bp, Homo sapien
aggaaaagtatcaagaaattgggat

SEQ ID NO: 2277577 - DNA, 25 bp, Homo sapien
caaggcaagctttggggacaagctg

SEQ ID NO: 2277578 - DNA, 25 bp, Homo sapien
caagctttggggacaagctggatcc

SEQ ID NO: 2277579 - DNA, 25 bp, Homo sapien
gcaagctttggggacaagctggatc

SEQ ID NO: 2277580 - DNA, 25 bp, Homo sapien
gcaaggcaagctttggggacaagct

SEQ ID NO: 2277581 - DNA, 25 bp, Homo sapien
tcttccttttttgcgacactcttct

SEQ ID NO: 2277582 - DNA, 25 bp, Homo sapien
cttttttgcgacactcttctctgca

SEQ ID NO: 2277583 - DNA, 25 bp, Homo sapien
ttgtcttccttttttgcgacactct

SEQ ID NO: 2277584 - DNA, 25 bp, Homo sapien
ttttttgcgacactcttctctgcag

SEQ ID NO: 2277585 - DNA, 25 bp, Homo sapien
gctgaggttcaggatgttggagagt

SEQ ID NO: 2277586 - DNA, 25 bp, Homo sapien
gagagttcttgcatctgctggaggc

SEQ ID NO: 2277587 - DNA, 25 bp, Homo sapien
gtagctgaggttcaggatgttggag

SEQ ID NO: 2277588 - DNA, 25 bp, Homo sapien
tgaggttcaggatgttggagagttc

SEQ ID NO: 2277589 - DNA, 25 bp, Homo sapien
aattatttgcaagaggcgatgtacg

SEQ ID NO: 2277590 - DNA, 25 bp, Homo sapien
tgttcaccttattccaaggacaaaa

SEQ ID NO: 2277591 - DNA, 25 bp, Homo sapien
ggtcttagccatgcaaattagtcca

SEQ ID NO: 2277592 - DNA, 25 bp, Homo sapien
caatattggtctgtgcaagaaagtg

SEQ ID NO: 2277593 - DNA, 25 bp, Homo sapien
ttcttcggccagttgtttttctgcc

SEQ ID NO: 2277594 - DNA, 25 bp, Homo sapien
cattgctattcttcggccagttgtt

SEQ ID NO: 2277595 - DNA, 25 bp, Homo sapien
tgtttttctgccacctcttagattt

SEQ ID NO: 2277596 - DNA, 25 bp, Homo sapien
ttcggccagttgtttttctgccacc

SEQ ID NO: 2277597 - DNA, 25 bp, Homo sapien
ctggggtaggtaggtgctgaggcct

SEQ ID NO: 2277598 - DNA, 25 bp, Homo sapien
tggggtaggtaggtgctgaggcctt

SEQ ID NO: 2277599 - DNA, 25 bp, Homo sapien
ccacattggaaggttcccagtcggg

SEQ ID NO: 2277600 - DNA, 25 bp, Homo sapien
catccctggtggtaggaagagtaaa

SEQ ID NO: 2277601 - DNA, 25 bp, Homo sapien
gcatccctggtggtaggaagagtaa

SEQ ID NO: 2277602 - DNA, 25 bp, Homo sapien
agtcgggttcaccaggcatccctgg

SEQ ID NO: 2277603 - DNA, 25 bp, Homo sapien
aggagaatttggctggaactgcatg

SEQ ID NO: 2277604 - DNA, 25 bp, Homo sapien
gcatgttcatggagtagtttaggaa

SEQ ID NO: 2277605 - DNA, 25 bp, Homo sapien
aatccatggtttgtggagtactaaa

SEQ ID NO: 2277606 - DNA, 25 bp, Homo sapien
ctaaaatacctagtggtctgctgta

SEQ ID NO: 2277607 - DNA, 25 bp, Homo sapien
gccagagacggcagccaaggttatt

SEQ ID NO: 2277608 - DNA, 25 bp, Homo sapien
cagtactcatgtcattacgatgcag

SEQ ID NO: 2277609 - DNA, 25 bp, Homo sapien
tgaacttaaaccaactaaagcagta

SEQ ID NO: 2277610 - DNA, 25 bp, Homo sapien
tagcaaaacagagccaaaaacggta

SEQ ID NO: 2277611 - DNA, 25 bp, Homo sapien
ttcaaggaccacagagtttacacca

SEQ ID NO: 2277612 - DNA, 25 bp, Homo sapien
tattcaaggaccacagagtttacac

SEQ ID NO: 2277613 - DNA, 25 bp, Homo sapien
acactttattcaaggaccacagagt

SEQ ID NO: 2277614 - DNA, 25 bp, Homo sapien
tttattcaaggaccacagagtttac

SEQ ID NO: 2277615 - DNA, 25 bp, Homo sapien
atgatctaggctgattgcagcctct

SEQ ID NO: 2277616 - DNA, 25 bp, Homo sapien
acacctatctccctggctggaatgc

SEQ ID NO: 2277617 - DNA, 25 bp, Homo sapien
tgatctaggctgattgcagcctctg

SEQ ID NO: 2277618 - DNA, 25 bp, Homo sapien
ttcacacctatctccctggctggaa

SEQ ID NO: 2277619 - DNA, 25 bp, Homo sapien
tgggttctgatattgccgcactaga

SEQ ID NO: 2277620 - DNA, 25 bp, Homo sapien
ggagagaccgagtgaacctaccttc

SEQ ID NO: 2277621 - DNA, 25 bp, Homo sapien
caacctcagacttaccaggaagcag

SEQ ID NO: 2277622 - DNA, 25 bp, Homo sapien
catttcaggagggattggccgcttg

SEQ ID NO: 2277623 - DNA, 25 bp, Homo sapien
tcctgacatacttaatccctcatgc

SEQ ID NO: 2277624 - DNA, 25 bp, Homo sapien
gaatcaaatgacacagcataggtgt

SEQ ID NO: 2277625 - DNA, 25 bp, Homo sapien
cacagcataggtgtctgagggcagc

SEQ ID NO: 2277626 - DNA, 25 bp, Homo sapien
ccaaagtacactgaagacccagctc

SEQ ID NO: 2277627 - DNA, 25 bp, Homo sapien
tccgaagccccttctgtatgggtat

SEQ ID NO: 2277628 - DNA, 25 bp, Homo sapien
taaaatggcttcgtagcttcctggc

SEQ ID NO: 2277629 - DNA, 25 bp, Homo sapien
cggaatataaaccagaacgttcatg

SEQ ID NO: 2277630 - DNA, 25 bp, Homo sapien
ttttaaaaacacgaatcaactgatg

SEQ ID NO: 2277631 - DNA, 25 bp, Homo sapien
ttgcatgtgcccttcagtaaagtag

SEQ ID NO: 2277632 - DNA, 25 bp, Homo sapien
atgtgcccttcagtaaagtagaaaa

SEQ ID NO: 2277633 - DNA, 25 bp, Homo sapien
gcatgtgcccttcagtaaagtagaa

SEQ ID NO: 2277634 - DNA, 25 bp, Homo sapien
caattctatcaccactagaaaacaa

SEQ ID NO: 2277635 - DNA, 25 bp, Homo sapien
tagtactcgtagacacgatgctcag

SEQ ID NO: 2277636 - DNA, 25 bp, Homo sapien
gactggaaccagcactaggaaactt

SEQ ID NO: 2277637 - DNA, 25 bp, Homo sapien
tagctcgaactggaaacaatgatgc

SEQ ID NO: 2277638 - DNA, 25 bp, Homo sapien
gagaaggaggctatagactggaacc

SEQ ID NO: 2277639 - DNA, 25 bp, Homo sapien
aaattcctgagctctactctcagta

SEQ ID NO: 2277640 - DNA, 25 bp, Homo sapien
aattggttagatcagttttccctca

SEQ ID NO: 2277641 - DNA, 25 bp, Homo sapien
cctggagagctggttagacacaaat

SEQ ID NO: 2277642 - DNA, 25 bp, Homo sapien
tgttgagtgagttaaagcaatggaa

SEQ ID NO: 2277643 - DNA, 25 bp, Homo sapien
aagaaattcataattggtacagtgg

SEQ ID NO: 2277644 - DNA, 25 bp, Homo sapien
aattcataattggtacagtggtaca

SEQ ID NO: 2277645 - DNA, 25 bp, Homo sapien
ttggtacagtggtacaaacaccact

SEQ ID NO: 2277646 - DNA, 25 bp, Homo sapien
taattggtacagtggtacaaacacc

SEQ ID NO: 2277647 - DNA, 25 bp, Homo sapien
actactggtattcaaagactgctgc

SEQ ID NO: 2277648 - DNA, 25 bp, Homo sapien
agtagaactactggtattcaaagac

SEQ ID NO: 2277649 - DNA, 25 bp, Homo sapien
cttacacttgaagtagaactactgg

SEQ ID NO: 2277650 - DNA, 25 bp, Homo sapien
agggcttacacttgaagtagaacta

SEQ ID NO: 2277651 - DNA, 25 bp, Homo sapien
gaatgatgctgtctctgcacgtcct

SEQ ID NO: 2277652 - DNA, 25 bp, Homo sapien
tgcagctgtcaggatcaaagaagag

SEQ ID NO: 2277653 - DNA, 25 bp, Homo sapien
tgcacgtcctccacgtggggacatt

SEQ ID NO: 2277654 - DNA, 25 bp, Homo sapien
cacgtggggacattggaatcttttc

SEQ ID NO: 2277655 - DNA, 25 bp, Homo sapien
catcacactggttgaggagaacagg

SEQ ID NO: 2277656 - DNA, 25 bp, Homo sapien
aaaaacaaacagagagttgggcgca

SEQ ID NO: 2277657 - DNA, 25 bp, Homo sapien
aactttgctgatacagccatttggg

SEQ ID NO: 2277658 - DNA, 25 bp, Homo sapien
agtaatggcctgtttagatttcttc

SEQ ID NO: 2277659 - DNA, 25 bp, Homo sapien
atcagcacgggacttatatgggcca

SEQ ID NO: 2277660 - DNA, 25 bp, Homo sapien
tgtggtcccccgctcgtgggagatt

SEQ ID NO: 2277661 - DNA, 25 bp, Homo sapien
tcaacacctgatgtgcaaagcacac

SEQ ID NO: 2277662 - DNA, 25 bp, Homo sapien
ctctgtggagaagctagttcacttc

SEQ ID NO: 2277663 - DNA, 25 bp, Homo sapien
gagcgcagatatagggtactgttct

SEQ ID NO: 2277664 - DNA, 25 bp, Homo sapien
ctttaaaaaggaccatatgggccag

SEQ ID NO: 2277665 - DNA, 25 bp, Homo sapien
tcaagctgaaggtaagatcaagaga

SEQ ID NO: 2277666 - DNA, 25 bp, Homo sapien
caccactgcgctcgggtaattttgt

SEQ ID NO: 2277667 - DNA, 25 bp, Homo sapien
tacctgtgctaattctcacttccag

SEQ ID NO: 2277668 - DNA, 25 bp, Homo sapien
caaggatgttactagcaccacagca

SEQ ID NO: 2277669 - DNA, 25 bp, Homo sapien
ggagggatggcgcaaagatatacac

SEQ ID NO: 2277670 - DNA, 25 bp, Homo sapien
ggtggccaactgctaaccagctctg

SEQ ID NO: 2277671 - DNA, 25 bp, Homo sapien
gcgtggctatcctgaccaactagtt

SEQ ID NO: 2277672 - DNA, 25 bp, Homo sapien
cattcagtgaattatcacctctggt

SEQ ID NO: 2277673 - DNA, 25 bp, Homo sapien
ccaagagtgtatttccggagttttg

SEQ ID NO: 2277674 - DNA, 25 bp, Homo sapien
agggcagcgtggctatcctgaccaa

SEQ ID NO: 2277675 - DNA, 25 bp, Homo sapien
ccccttgtgctgtggtcgcttcttg

SEQ ID NO: 2277676 - DNA, 25 bp, Homo sapien
tggctttggtccacttgctgaacat

SEQ ID NO: 2277677 - DNA, 25 bp, Homo sapien
tggtcgaacatcacgaagacattgg

SEQ ID NO: 2277678 - DNA, 25 bp, Homo sapien
aactcctggatgtggaactggtcga

SEQ ID NO: 2277679 - DNA, 25 bp, Homo sapien
gaagccagcttgtcgtgctgtcccc

SEQ ID NO: 2277680 - DNA, 25 bp, Homo sapien
cgcggtgaagccagcttgtcgtgct

SEQ ID NO: 2277681 - DNA, 25 bp, Homo sapien
cggtgaagccagcttgtcgtgctgt

SEQ ID NO: 2277682 - DNA, 25 bp, Homo sapien
cttccgcggtgaagccagcttgtcg

SEQ ID NO: 2277683 - DNA, 25 bp, Homo sapien
gattcctcgttgaagcaggtgaagg

SEQ ID NO: 2277684 - DNA, 25 bp, Homo sapien
aaggcgttttggatcacatcctggg

SEQ ID NO: 2277685 - DNA, 25 bp, Homo sapien
gaaacctgaggattcctcgttgaag

SEQ ID NO: 2277686 - DNA, 25 bp, Homo sapien
catggtgagggaagtggtgaagttg

SEQ ID NO: 2277687 - DNA, 25 bp, Homo sapien
acttgtctttttttatcaatgggtg

SEQ ID NO: 2277688 - DNA, 25 bp, Homo sapien
tttttttatcaatgggtgcctccca

SEQ ID NO: 2277689 - DNA, 25 bp, Homo sapien
tctttttttatcaatgggtgcctcc

SEQ ID NO: 2277690 - DNA, 25 bp, Homo sapien
tagttgaacttgtctttttttatca

SEQ ID NO: 2277691 - DNA, 25 bp, Homo sapien
atctttgcccttggcgccatgtatg

SEQ ID NO: 2277692 - DNA, 25 bp, Homo sapien
tttgcccttggcgccatgtatgagg

SEQ ID NO: 2277693 - DNA, 25 bp, Homo sapien
tgcccttggcgccatgtatgaggat

SEQ ID NO: 2277694 - DNA, 25 bp, Homo sapien
catctttgcccttggcgccatgtat

SEQ ID NO: 2277695 - DNA, 25 bp, Homo sapien
aggggtcagagactccagcccaggg

SEQ ID NO: 2277696 - DNA, 25 bp, Homo sapien
ctggaggggtcagagactccagccc

SEQ ID NO: 2277697 - DNA, 25 bp, Homo sapien
gggtcagagactccagcccagggcc

SEQ ID NO: 2277698 - DNA, 25 bp, Homo sapien
tggaggggtcagagactccagccca

SEQ ID NO: 2277699 - DNA, 25 bp, Homo sapien
gaggcccatctcttcataaggcggt

SEQ ID NO: 2277700 - DNA, 25 bp, Homo sapien
agtctagtgtcctgtcctctgagag

SEQ ID NO: 2277701 - DNA, 25 bp, Homo sapien
atctcaggactaagggtcccttcct

SEQ ID NO: 2277702 - DNA, 25 bp, Homo sapien
tgcatgtgaaatggtattggatctc

SEQ ID NO: 2277703 - DNA, 25 bp, Homo sapien
tgaaccgagtcacgttttgtaacca

SEQ ID NO: 2277704 - DNA, 25 bp, Homo sapien
tcccgatgaaccgagtcacgttttg

SEQ ID NO: 2277705 - DNA, 25 bp, Homo sapien
agggctcccgatgaaccgagtcacg

SEQ ID NO: 2277706 - DNA, 25 bp, Homo sapien
accgagtcacgttttgtaaccacat

SEQ ID NO: 2277707 - DNA, 25 bp, Homo sapien
aggctgagcttgcccgcagctgtcc

SEQ ID NO: 2277708 - DNA, 25 bp, Homo sapien
gaggctgagcttgcccgcagctgtc

SEQ ID NO: 2277709 - DNA, 25 bp, Homo sapien
cgaggctgagcttgcccgcagctgt

SEQ ID NO: 2277710 - DNA, 25 bp, Homo sapien
tataggtgaccagtctttacagtca

SEQ ID NO: 2277711 - DNA, 25 bp, Homo sapien
caaatcacaggtataggtgaccagt

SEQ ID NO: 2277712 - DNA, 25 bp, Homo sapien
ggtgaccagtctttacagtcagatg

SEQ ID NO: 2277713 - DNA, 25 bp, Homo sapien
cacaggtataggtgaccagtcttta

SEQ ID NO: 2277714 - DNA, 25 bp, Homo sapien
tggcactcttctctgcagtagtggg

SEQ ID NO: 2277715 - DNA, 25 bp, Homo sapien
ccttttttgtggcactcttctctgc

SEQ ID NO: 2277716 - DNA, 25 bp, Homo sapien
gactggtggaagaatcatggctgtc

SEQ ID NO: 2277717 - DNA, 25 bp, Homo sapien
ttgtggcactcttctctgcagtagt

SEQ ID NO: 2277718 - DNA, 25 bp, Homo sapien
tgtttgtagctgaggttcaggatgt

SEQ ID NO: 2277719 - DNA, 25 bp, Homo sapien
ctgaggttcaggatgttggaaagtt

SEQ ID NO: 2277720 - DNA, 25 bp, Homo sapien
tatcattgagtacacacagctgggt

SEQ ID NO: 2277721 - DNA, 25 bp, Homo sapien
ggtggaagagaacacagttctggtc

SEQ ID NO: 2277722 - DNA, 25 bp, Homo sapien
cccaatcctggaacaatcaggcctg

SEQ ID NO: 2277723 - DNA, 25 bp, Homo sapien
acgagacccagaacatccagtcctg

SEQ ID NO: 2277724 - DNA, 25 bp, Homo sapien
cgagacccagaacatccagtcctgg

SEQ ID NO: 2277725 - DNA, 25 bp, Homo sapien
ctggaacactcagacctggtgcacc

SEQ ID NO: 2277726 - DNA, 25 bp, Homo sapien
tcttcagccagttgtttttctgcca

SEQ ID NO: 2277727 - DNA, 25 bp, Homo sapien
cacaccattgctattcttcagccag

SEQ ID NO: 2277728 - DNA, 25 bp, Homo sapien
caccattgctattcttcagccagtt

SEQ ID NO: 2277729 - DNA, 25 bp, Homo sapien
tgcgtcacaccattgctattcttca

SEQ ID NO: 2277730 - DNA, 25 bp, Homo sapien
ttcccagtcgggttcaccaggcatc

SEQ ID NO: 2277731 - DNA, 25 bp, Homo sapien
tggttgctccaggttgaattgttcc

SEQ ID NO: 2277732 - DNA, 25 bp, Homo sapien
actggatgttctgggtctggttgct

SEQ ID NO: 2277733 - DNA, 25 bp, Homo sapien
caggagtggttgctccaggactgga

SEQ ID NO: 2277734 - DNA, 25 bp, Homo sapien
tattaaaatacctagtggtctgctg

SEQ ID NO: 2277735 - DNA, 25 bp, Homo sapien
catggtttgtggagtattaaaatac

SEQ ID NO: 2277736 - DNA, 25 bp, Homo sapien
aatccatggtttgtggagtattaaa

SEQ ID NO: 2277737 - DNA, 25 bp, Homo sapien
ataaatccatggtttgtggagtatt

SEQ ID NO: 2277738 - DNA, 25 bp, Homo sapien
tagccagagacagcttctatcaagt

SEQ ID NO: 2277739 - DNA, 25 bp, Homo sapien
atagccagagacagcttctatcaag

SEQ ID NO: 2277740 - DNA, 25 bp, Homo sapien
tatagccagagacagcttctatcaa

SEQ ID NO: 2277741 - DNA, 25 bp, Homo sapien
ttctatcaagttgtctttagcagcc

SEQ ID NO: 2277742 - DNA, 25 bp, Homo sapien
tacgggctatagtaaaacggagcca

SEQ ID NO: 2277743 - DNA, 25 bp, Homo sapien
tagtcataaccaacaaaatacgggc

SEQ ID NO: 2277744 - DNA, 25 bp, Homo sapien
cgaagtagtactgatgccattataa

SEQ ID NO: 2277745 - DNA, 25 bp, Homo sapien
ttcacccttcacctcaatagagttt

SEQ ID NO: 2277746 - DNA, 25 bp, Homo sapien
agaacattttattcgaggaccacaa

SEQ ID NO: 2277747 - DNA, 25 bp, Homo sapien
tggacacaccagcttttctgaatgg

SEQ ID NO: 2277748 - DNA, 25 bp, Homo sapien
taatcaaggcctgtattcctcccac

SEQ ID NO: 2277749 - DNA, 25 bp, Homo sapien
tacagtagaattaaccttgtccttc

SEQ ID NO: 2277750 - DNA, 25 bp, Homo sapien
tgagctgtagatacccaaagaatgg

SEQ ID NO: 2277751 - DNA, 25 bp, Homo sapien
cgtcctctctcatcatgagctgtag

SEQ ID NO: 2277752 - DNA, 25 bp, Homo sapien
gaatggcaccgatgaatcatctagt

SEQ ID NO: 2277753 - DNA, 25 bp, Homo sapien
gccttcgctgcactggcgtggctga

SEQ ID NO: 2277754 - DNA, 25 bp, Homo sapien
agtgtgctttagcttgaaaaggtga

SEQ ID NO: 2277755 - DNA, 25 bp, Homo sapien
tgctttagcttgaaaaggtgacctt

SEQ ID NO: 2277756 - DNA, 25 bp, Homo sapien
catagctatcaagtgtgctttagct

SEQ ID NO: 2277757 - DNA, 25 bp, Homo sapien
aatgcacatagctatcaagtgtgct

SEQ ID NO: 2277758 - DNA, 25 bp, Homo sapien
ggagttggggaccaacctgactatc

SEQ ID NO: 2277759 - DNA, 25 bp, Homo sapien
gttggggaccaacctgactatcatg

SEQ ID NO: 2277760 - DNA, 25 bp, Homo sapien
cacaccattgcggtagcacacacct

SEQ ID NO: 2277761 - DNA, 25 bp, Homo sapien
gatcacaccattgcggtagcacaca

SEQ ID NO: 2277762 - DNA, 25 bp, Homo sapien
tggttcatgcctgtcatcacaacac

SEQ ID NO: 2277763 - DNA, 25 bp, Homo sapien
ttggaaggccaaggttagaggattg

SEQ ID NO: 2277764 - DNA, 25 bp, Homo sapien
ctttggaaggccaaggttagaggat

SEQ ID NO: 2277765 - DNA, 25 bp, Homo sapien
cttgagcccagaagttcaagaccag

SEQ ID NO: 2277766 - DNA, 25 bp, Homo sapien
aaaaaagcatttagctgggcctgat

SEQ ID NO: 2277767 - DNA, 25 bp, Homo sapien
taaaaaagcatttagctgggcctga

SEQ ID NO: 2277768 - DNA, 25 bp, Homo sapien
tacttatgtaacacttttctttcaa

SEQ ID NO: 2277769 - DNA, 25 bp, Homo sapien
cttgtatagcttagtaatcagatac

SEQ ID NO: 2277770 - DNA, 25 bp, Homo sapien
gcttagtaatcagatacttatgtaa

SEQ ID NO: 2277771 - DNA, 25 bp, Homo sapien
cagttttcttgtatagcttagtaat

SEQ ID NO: 2277772 - DNA, 25 bp, Homo sapien
tcttctctctccccgattatccctc

SEQ ID NO: 2277773 - DNA, 25 bp, Homo sapien
actctcaacctggaaccactcttct

SEQ ID NO: 2277774 - DNA, 25 bp, Homo sapien
tttactctcaacctggaaccactct

SEQ ID NO: 2277775 - DNA, 25 bp, Homo sapien
tctcaacctggaaccactcttctct

SEQ ID NO: 2277776 - DNA, 25 bp, Homo sapien
tgctgtggtgactaaaggggcctct

SEQ ID NO: 2277777 - DNA, 25 bp, Homo sapien
aattcagttgctgtggtgactaaag

SEQ ID NO: 2277778 - DNA, 25 bp, Homo sapien
ttcagttgctgtggtgactaaaggg

SEQ ID NO: 2277779 - DNA, 25 bp, Homo sapien
taaattcagttgctgtggtgactaa

SEQ ID NO: 2277780 - DNA, 25 bp, Homo sapien
tcataagttttagtttgttcatttg

SEQ ID NO: 2277781 - DNA, 25 bp, Homo sapien
cttggtttcactgtcagctgtgccc

SEQ ID NO: 2277782 - DNA, 25 bp, Homo sapien
cactgtcagctgtgccctgtttgtg

SEQ ID NO: 2277783 - DNA, 25 bp, Homo sapien
tttcactgtcagctgtgccctgttt

SEQ ID NO: 2277784 - DNA, 25 bp, Homo sapien
gtgccctgtttgtgtggcctgcaag

SEQ ID NO: 2277785 - DNA, 25 bp, Homo sapien
tgcaaggagtgtcacttgtttctcc

SEQ ID NO: 2277786 - DNA, 25 bp, Homo sapien
cactgaaatactctgcaaggagtgt

SEQ ID NO: 2277787 - DNA, 25 bp, Homo sapien
gaaagagcttctgctttagagtaga

SEQ ID NO: 2277788 - DNA, 25 bp, Homo sapien
ttagagtagatggtcatttcaggga

SEQ ID NO: 2277789 - DNA, 25 bp, Homo sapien
gatgttgtcgtatcgctcggtggca

SEQ ID NO: 2277790 - DNA, 25 bp, Homo sapien
gaagtactcgagattttgcactccc

SEQ ID NO: 2277791 - DNA, 25 bp, Homo sapien
gaccagagtatttgatccgctttga

SEQ ID NO: 2277792 - DNA, 25 bp, Homo sapien
tttacaaaagcaagacgccagcagg

SEQ ID NO: 2277793 - DNA, 25 bp, Homo sapien
tcttgttgtcactacgttagtctgc

SEQ ID NO: 2277794 - DNA, 25 bp, Homo sapien
ccagacttatatccccttgtggatt

SEQ ID NO: 2277795 - DNA, 25 bp, Homo sapien
ttcactcttgttgtcactacgttag

SEQ ID NO: 2277796 - DNA, 25 bp, Homo sapien
tgtcactacgttagtctgctgctgt

SEQ ID NO: 2277797 - DNA, 25 bp, Homo sapien
caggctccatttctaggcgtaaaag

SEQ ID NO: 2277798 - DNA, 25 bp, Homo sapien
tttatgacaagctgcctaagaaggg

SEQ ID NO: 2277799 - DNA, 25 bp, Homo sapien
gagaaagagtggctatcccggattc

SEQ ID NO: 2277800 - DNA, 25 bp, Homo sapien
agtctccagatgtcttgcacccagg

SEQ ID NO: 2277801 - DNA, 25 bp, Homo sapien
gattcctgaaaattgcaaggctctc

SEQ ID NO: 2277802 - DNA, 25 bp, Homo sapien
gctttccagagaagacgccgattcc

SEQ ID NO: 2277803 - DNA, 25 bp, Homo sapien
gacgtgccgtgtggcacgctacccg

SEQ ID NO: 2277804 - DNA, 25 bp, Homo sapien
cagcatgtgggagtcggcgggacct

SEQ ID NO: 2277805 - DNA, 25 bp, Homo sapien
atctgcccttaaggcgaaaccctct

SEQ ID NO: 2277806 - DNA, 25 bp, Homo sapien
tggcctagcacaaaacatctgccct

SEQ ID NO: 2277807 - DNA, 25 bp, Homo sapien
ttactggcctagcacaaaacatctg

SEQ ID NO: 2277808 - DNA, 25 bp, Homo sapien
cacaaaacatctgcccttaaggcga

SEQ ID NO: 2277809 - DNA, 25 bp, Homo sapien
tctttttgaaacagcgcctgtgaca

SEQ ID NO: 2277810 - DNA, 25 bp, Homo sapien
tcaacgttgcaacaaatctggtggc

SEQ ID NO: 2277811 - DNA, 25 bp, Homo sapien
gaggagccttccagtagcctttaca

SEQ ID NO: 2277812 - DNA, 25 bp, Homo sapien
tgacattcccactcattacagcgtg

SEQ ID NO: 2277813 - DNA, 25 bp, Homo sapien
agcagtgtgagtggaaaagtaatga

SEQ ID NO: 2277814 - DNA, 25 bp, Homo sapien
tgaagaaattcataactggttgtga

SEQ ID NO: 2277815 - DNA, 25 bp, Homo sapien
cagttagttgtaaatgccactgtac

SEQ ID NO: 2277816 - DNA, 25 bp, Homo sapien
gtgagtggaaaagtaatgaagaaat

SEQ ID NO: 2277817 - DNA, 25 bp, Homo sapien
tagcaccagtggtattcgaagactg

SEQ ID NO: 2277818 - DNA, 25 bp, Homo sapien
gctagcaccagtggtattcgaagac

SEQ ID NO: 2277819 - DNA, 25 bp, Homo sapien
agggcttacacttgagctagcacca

SEQ ID NO: 2277820 - DNA, 25 bp, Homo sapien
accagtggtattcgaagactgctgc

SEQ ID NO: 2277821 - DNA, 25 bp, Homo sapien
agcagtctcatctggggaaagactg

SEQ ID NO: 2277822 - DNA, 25 bp, Homo sapien
catcgtaacagctacagcatcggct

SEQ ID NO: 2277823 - DNA, 25 bp, Homo sapien
ccctttggccccatcgtaacagcta

SEQ ID NO: 2277824 - DNA, 25 bp, Homo sapien
aagactgtgggtaacggaagaagca

SEQ ID NO: 2277825 - DNA, 25 bp, Homo sapien
tcagttgactttgcaacagtcacac

SEQ ID NO: 2277826 - DNA, 25 bp, Homo sapien
ctatcctttaagtcagttgactttg

SEQ ID NO: 2277827 - DNA, 25 bp, Homo sapien
taagtcagttgactttgcaacagtc

SEQ ID NO: 2277828 - DNA, 25 bp, Homo sapien
agtcagttgactttgcaacagtcac

SEQ ID NO: 2277829 - DNA, 25 bp, Homo sapien
gtgccagtacggtagcagaggtggt

SEQ ID NO: 2277830 - DNA, 25 bp, Homo sapien
cgtgccagtacggtagcagaggtgg

SEQ ID NO: 2277831 - DNA, 25 bp, Homo sapien
gcgtgccagtacggtagcagaggtg

SEQ ID NO: 2277832 - DNA, 25 bp, Homo sapien
caataatttctaattcatcattcag

SEQ ID NO: 2277833 - DNA, 25 bp, Homo sapien
atttctaattcatcattcagtgttt

SEQ ID NO: 2277834 - DNA, 25 bp, Homo sapien
atcattcagtgtttttccatccttt

SEQ ID NO: 2277835 - DNA, 25 bp, Homo sapien
cattcagtgtttttccatcctttac

SEQ ID NO: 2277836 - DNA, 25 bp, Homo sapien
tgaagaaatatagcctcgatcaaac

SEQ ID NO: 2277837 - DNA, 25 bp, Homo sapien
cacatttctgaccttttggtgtatt

SEQ ID NO: 2277838 - DNA, 25 bp, Homo sapien
tcacatttctgaccttttggtgtat

SEQ ID NO: 2277839 - DNA, 25 bp, Homo sapien
taaagtatgaagaaatatagcctcg

SEQ ID NO: 2277840 - DNA, 25 bp, Homo sapien
acaatttcaagagcaggtacaatgg

SEQ ID NO: 2277841 - DNA, 25 bp, Homo sapien
acggtgagcattgacaatttcaaga

SEQ ID NO: 2277842 - DNA, 25 bp, Homo sapien
cttacggtgagcattgacaatttca

SEQ ID NO: 2277843 - DNA, 25 bp, Homo sapien
caatttcaagagcaggtacaatgga

SEQ ID NO: 2277844 - DNA, 25 bp, Homo sapien
tgtcaccaaaagagccttgactgcc

SEQ ID NO: 2277845 - DNA, 25 bp, Homo sapien
tctattgtcaccaaaagagccttga

SEQ ID NO: 2277846 - DNA, 25 bp, Homo sapien
aagacccacatttagcctattcaag

SEQ ID NO: 2277847 - DNA, 25 bp, Homo sapien
ctggttcttcagctggttctattgt

SEQ ID NO: 2277848 - DNA, 25 bp, Homo sapien
accagtagcaatagccatatctttc

SEQ ID NO: 2277849 - DNA, 25 bp, Homo sapien
cagtagcaatagccatatctttcac

SEQ ID NO: 2277850 - DNA, 25 bp, Homo sapien
tcaagatttaaggtcaacctctctt

SEQ ID NO: 2277851 - DNA, 25 bp, Homo sapien
agatttaaggtcaacctctcttctc

SEQ ID NO: 2277852 - DNA, 25 bp, Homo sapien
tgggtcgggggagaacaatctctcc

SEQ ID NO: 2277853 - DNA, 25 bp, Homo sapien
gggtcgggggagaacaatctctcca

SEQ ID NO: 2277854 - DNA, 25 bp, Homo sapien
ttgggtcgggggagaacaatctctc

SEQ ID NO: 2277855 - DNA, 25 bp, Homo sapien
catgataaatgagcgtgtaacggtg

SEQ ID NO: 2277856 - DNA, 25 bp, Homo sapien
taaatgagcgtgtaacggtgaaata

SEQ ID NO: 2277857 - DNA, 25 bp, Homo sapien
cgtgtaacggtgaaataaacatcag

SEQ ID NO: 2277858 - DNA, 25 bp, Homo sapien
gtggatacatgataaatgagcgtgt

SEQ ID NO: 2277859 - DNA, 25 bp, Homo sapien
cagaaggcgggcagacagtgtcagg

SEQ ID NO: 2277860 - DNA, 25 bp, Homo sapien
gagccagaaggcgggcagacagtgt

SEQ ID NO: 2277861 - DNA, 25 bp, Homo sapien
ggggagccagaaggcgggcagacag

SEQ ID NO: 2277862 - DNA, 25 bp, Homo sapien
ccggggagccagaaggcgggcagac

SEQ ID NO: 2277863 - DNA, 25 bp, Homo sapien
tttcgtactcccggctgtccctgag

SEQ ID NO: 2277864 - DNA, 25 bp, Homo sapien
gcctgggcagcacggtccgggaggc

SEQ ID NO: 2277865 - DNA, 25 bp, Homo sapien
ggtccctgctactgtggcggcagca

SEQ ID NO: 2277866 - DNA, 25 bp, Homo sapien
ggaggccgcggctcgagactccggt

SEQ ID NO: 2277867 - DNA, 25 bp, Homo sapien
tcctgtctcctgtgaatagtggtgg

SEQ ID NO: 2277868 - DNA, 25 bp, Homo sapien
cactgtctaggcacgaggaagttga

SEQ ID NO: 2277869 - DNA, 25 bp, Homo sapien
ggagcctctcccaaccaggagttgt

SEQ ID NO: 2277870 - DNA, 25 bp, Homo sapien
tggcttctgaacgtaaggactcctg

SEQ ID NO: 2277871 - DNA, 25 bp, Homo sapien
ctcccaagttggtgaggggaactgg

SEQ ID NO: 2277872 - DNA, 25 bp, Homo sapien
ctggacgaggctgagcctcccaagt

SEQ ID NO: 2277873 - DNA, 25 bp, Homo sapien
ggacgaggctgagcctcccaagttg

SEQ ID NO: 2277874 - DNA, 25 bp, Homo sapien
gagcctcccaagttggtgaggggaa

SEQ ID NO: 2277875 - DNA, 25 bp, Homo sapien
ctgtctccaaggttcctccggcaaa

SEQ ID NO: 2277876 - DNA, 25 bp, Homo sapien
tgtctccaaggttcctccggcaaag

SEQ ID NO: 2277877 - DNA, 25 bp, Homo sapien
gaggcaggtgacggctctcatcctc

SEQ ID NO: 2277878 - DNA, 25 bp, Homo sapien
ggcaggtgacggctctcatcctcag

SEQ ID NO: 2277879 - DNA, 25 bp, Homo sapien
catagctgtatcgtggcttgccgtc

SEQ ID NO: 2277880 - DNA, 25 bp, Homo sapien
ttctcaatggtagctcggagggtca

SEQ ID NO: 2277881 - DNA, 25 bp, Homo sapien
tgaggctactctctaggtcagaagc

SEQ ID NO: 2277882 - DNA, 25 bp, Homo sapien
ggaagttatcacagatccagcggta

SEQ ID NO: 2277883 - DNA, 25 bp, Homo sapien
tccggaaacacttgttgagagaaag

SEQ ID NO: 2277884 - DNA, 25 bp, Homo sapien
gaggtctgggcaccttccggaaaca

SEQ ID NO: 2277885 - DNA, 25 bp, Homo sapien
ttcccagggtcatcccgaggtctgg

SEQ ID NO: 2277886 - DNA, 25 bp, Homo sapien
tgagagaaaggttgtgccgtattga

SEQ ID NO: 2277887 - DNA, 25 bp, Homo sapien
ggtccaaacacaggcctcgattgtt

SEQ ID NO: 2277888 - DNA, 25 bp, Homo sapien
gaaactcactgagtatgccagaggt

SEQ ID NO: 2277889 - DNA, 25 bp, Homo sapien
gggcagaacaatggcatctagctca

SEQ ID NO: 2277890 - DNA, 25 bp, Homo sapien
cagaggtaatcctgtggtccaaaca

SEQ ID NO: 2277891 - DNA, 25 bp, Homo sapien
agggtgtcttctctttcgggaaatg

SEQ ID NO: 2277892 - DNA, 25 bp, Homo sapien
atgtcagggcaggtgtcaattgtcc

SEQ ID NO: 2277893 - DNA, 25 bp, Homo sapien
caggtgtcaattgtccaataggaac

SEQ ID NO: 2277894 - DNA, 25 bp, Homo sapien
cttctctttcgggaaatgtcagggc

SEQ ID NO: 2277895 - DNA, 25 bp, Homo sapien
ggctgtagctggctatagatgtggg

SEQ ID NO: 2277896 - DNA, 25 bp, Homo sapien
ctggctatagatgtggggctctgaa

SEQ ID NO: 2277897 - DNA, 25 bp, Homo sapien
gtgacatctgcggattcccctcagg

SEQ ID NO: 2277898 - DNA, 25 bp, Homo sapien
aacgcctccccgtgggctcttgctt

SEQ ID NO: 2277899 - DNA, 25 bp, Homo sapien
tagaggttgcggaaggaccagctta

SEQ ID NO: 2277900 - DNA, 25 bp, Homo sapien
gaatttaaagtcatggttggtgtta

SEQ ID NO: 2277901 - DNA, 25 bp, Homo sapien
tcctgaaagttgatctctgagtagg

SEQ ID NO: 2277902 - DNA, 25 bp, Homo sapien
tccagcatggacttatagaggttgc

SEQ ID NO: 2277903 - DNA, 25 bp, Homo sapien
aatgactcacttgcagccctaaaat

SEQ ID NO: 2277904 - DNA, 25 bp, Homo sapien
gcagccctaaaatcactgcccttag

SEQ ID NO: 2277905 - DNA, 25 bp, Homo sapien
cgcagggattcttcaggagagggta

SEQ ID NO: 2277906 - DNA, 25 bp, Homo sapien
cctcgtggtcgtcctccaaatgact

SEQ ID NO: 2277907 - DNA, 25 bp, Homo sapien
tagtagttgttcgagggtgggatgt

SEQ ID NO: 2277908 - DNA, 25 bp, Homo sapien
gtagttgttcgagggtgggatgtcc

SEQ ID NO: 2277909 - DNA, 25 bp, Homo sapien
ttgttcgagggtgggatgtccccca

SEQ ID NO: 2277910 - DNA, 25 bp, Homo sapien
atgtagtagttgttcgagggtggga

SEQ ID NO: 2277911 - DNA, 25 bp, Homo sapien
ctgctgctgttgaggtggcggtggc

SEQ ID NO: 2277912 - DNA, 25 bp, Homo sapien
gaggtggcggtggctgctgctgctg

SEQ ID NO: 2277913 - DNA, 25 bp, Homo sapien
ggtggcggtggctgctgctgctgat

SEQ ID NO: 2277914 - DNA, 25 bp, Homo sapien
tggcggtggctgctgctgctgatac

SEQ ID NO: 2277915 - DNA, 25 bp, Homo sapien
ctacagctgaggggccctgggcagg

SEQ ID NO: 2277916 - DNA, 25 bp, Homo sapien
aggggccctgggcaggtgcctgctg

SEQ ID NO: 2277917 - DNA, 25 bp, Homo sapien
gccctgggcaggtgcctgctgctgc

SEQ ID NO: 2277918 - DNA, 25 bp, Homo sapien
gggccctgggcaggtgcctgctgct

SEQ ID NO: 2277919 - DNA, 25 bp, Homo sapien
cctggtggggtacaaccatctgtgc

SEQ ID NO: 2277920 - DNA, 25 bp, Homo sapien
gggtggatgcatggccattacaggg

SEQ ID NO: 2277921 - DNA, 25 bp, Homo sapien
caaagccagtgttgttgatgggagc

SEQ ID NO: 2277922 - DNA, 25 bp, Homo sapien
cattacagggggaggcccatagcct

SEQ ID NO: 2277923 - DNA, 25 bp, Homo sapien
tcctttaaagagtcaatattagagc

SEQ ID NO: 2277924 - DNA, 25 bp, Homo sapien
gagccgattcaccatcttgaagctt

SEQ ID NO: 2277925 - DNA, 25 bp, Homo sapien
gaattgtgactgctcaatgctggac

SEQ ID NO: 2277926 - DNA, 25 bp, Homo sapien
gagtcaatattagagcaccagtcag

SEQ ID NO: 2277927 - DNA, 25 bp, Homo sapien
ggcacgtgaccagtctgagtaagga

SEQ ID NO: 2277928 - DNA, 25 bp, Homo sapien
tgctggtcgagggtccagttcttct

SEQ ID NO: 2277929 - DNA, 25 bp, Homo sapien
ggcacaggagtcagcaatacgggca

SEQ ID NO: 2277930 - DNA, 25 bp, Homo sapien
tctgctctgcctgtcgtagactctc

SEQ ID NO: 2277931 - DNA, 25 bp, Homo sapien
catggcaactggcttggtgcagtac

SEQ ID NO: 2277932 - DNA, 25 bp, Homo sapien
cctccatggcaactggcttggtgca

SEQ ID NO: 2277933 - DNA, 25 bp, Homo sapien
ccacctccatggcaactggcttggt

SEQ ID NO: 2277934 - DNA, 25 bp, Homo sapien
tcaacatagtctccacctccatggc

SEQ ID NO: 2277935 - DNA, 25 bp, Homo sapien
tgctcaatttgggtcactgccccat

SEQ ID NO: 2277936 - DNA, 25 bp, Homo sapien
tccggtatcacccaggcggtaggga

SEQ ID NO: 2277937 - DNA, 25 bp, Homo sapien
tgataaactagttccactgctcaat

SEQ ID NO: 2277938 - DNA, 25 bp, Homo sapien
cggtagggattactgagacgcaaat

SEQ ID NO: 2277939 - DNA, 25 bp, Homo sapien
gattgggtacattggtgatgggcca

SEQ ID NO: 2277940 - DNA, 25 bp, Homo sapien
gagcttgtgggtgcccataagagtt

SEQ ID NO: 2277941 - DNA, 25 bp, Homo sapien
ctgggcgattgtatcctgctgagtc

SEQ ID NO: 2277942 - DNA, 25 bp, Homo sapien
gggcgattgtatcctgctgagtcct

SEQ ID NO: 2277943 - DNA, 25 bp, Homo sapien
aaaacacgtgtggttaggcagaata

SEQ ID NO: 2277944 - DNA, 25 bp, Homo sapien
gaatagagagagtcagatgtcaccc

SEQ ID NO: 2277945 - DNA, 25 bp, Homo sapien
tgtctgtggcaatttagtgtctccc

SEQ ID NO: 2277946 - DNA, 25 bp, Homo sapien
caggaaagcagacatgggcacacag

SEQ ID NO: 2277947 - DNA, 25 bp, Homo sapien
tcagggatctcctcattggcaccag

SEQ ID NO: 2277948 - DNA, 25 bp, Homo sapien
ccagtcgaagtcatcagggatctcc

SEQ ID NO: 2277949 - DNA, 25 bp, Homo sapien
taagtgatcaagtcccagtcgaagt

SEQ ID NO: 2277950 - DNA, 25 bp, Homo sapien
gcactgatggccgagggaccatatg

SEQ ID NO: 2277951 - DNA, 25 bp, Homo sapien
caagagaaaggtaaactggagtcta

SEQ ID NO: 2277952 - DNA, 25 bp, Homo sapien
gggacaggagactatggacagtata

SEQ ID NO: 2277953 - DNA, 25 bp, Homo sapien
gattagcattgagtttctccaagag

SEQ ID NO: 2277954 - DNA, 25 bp, Homo sapien
aaagagagggttatcttcggcagca

SEQ ID NO: 2277955 - DNA, 25 bp, Homo sapien
taagtgccctccaacatcatgggag

SEQ ID NO: 2277956 - DNA, 25 bp, Homo sapien
tcatggccaccccttgtaaaagaga

SEQ ID NO: 2277957 - DNA, 25 bp, Homo sapien
tataaagggacaaggaagacctcag

SEQ ID NO: 2277958 - DNA, 25 bp, Homo sapien
gtataggacacaccctgactggaag

SEQ ID NO: 2277959 - DNA, 25 bp, Homo sapien
tgcacattgttagccttctctttat

SEQ ID NO: 2277960 - DNA, 25 bp, Homo sapien
ttccatcacagccaacccaaaagac

SEQ ID NO: 2277961 - DNA, 25 bp, Homo sapien
tgttctgcacattgttagccttctc

SEQ ID NO: 2277962 - DNA, 25 bp, Homo sapien
tcacagccaacccaaaagactccag

SEQ ID NO: 2277963 - DNA, 25 bp, Homo sapien
gttaaatagactatacgtgggatca

SEQ ID NO: 2277964 - DNA, 25 bp, Homo sapien
tgttaaatagactatacgtgggatc

SEQ ID NO: 2277965 - DNA, 25 bp, Homo sapien
ctgttaaatagactatacgtgggat

SEQ ID NO: 2277966 - DNA, 25 bp, Homo sapien
ttaaatagactatacgtgggatcaa

SEQ ID NO: 2277967 - DNA, 25 bp, Homo sapien
tctttatctccgatttttcaggacg

SEQ ID NO: 2277968 - DNA, 25 bp, Homo sapien
aaatgttttgccacactttcggcgt

SEQ ID NO: 2277969 - DNA, 25 bp, Homo sapien
cgtgtattccgattatctttttgga

SEQ ID NO: 2277970 - DNA, 25 bp, Homo sapien
ttcaggacgacacctgttaaaatgt

SEQ ID NO: 2277971 - DNA, 25 bp, Homo sapien
ggcggagatgcaaagcgcgacaact

SEQ ID NO: 2277972 - DNA, 25 bp, Homo sapien
tgagattaaccttttcggtgacgcg

SEQ ID NO: 2277973 - DNA, 25 bp, Homo sapien
aacgtaagaccggaggcggagcacg

SEQ ID NO: 2277974 - DNA, 25 bp, Homo sapien
tccgcgcgagttcaagttagtttct

SEQ ID NO: 2277975 - DNA, 25 bp, Homo sapien
gaatccggtagacgctgacgtctgg

SEQ ID NO: 2277976 - DNA, 25 bp, Homo sapien
gcggaatccggtagacgctgacgtc

SEQ ID NO: 2277977 - DNA, 25 bp, Homo sapien
acagactcgtactccaactcggtcg

SEQ ID NO: 2277978 - DNA, 25 bp, Homo sapien
cggtagacgctgacgtctggcttca

SEQ ID NO: 2277979 - DNA, 25 bp, Homo sapien
tgctcactggtaaaactgctgaagg

SEQ ID NO: 2277980 - DNA, 25 bp, Homo sapien
gagtggcaagcaacacgattaccca

SEQ ID NO: 2277981 - DNA, 25 bp, Homo sapien
gatgacagttggtgacgaaattgac

SEQ ID NO: 2277982 - DNA, 25 bp, Homo sapien
ctgctgaaggaaaaaccgaatggtg

SEQ ID NO: 2277983 - DNA, 25 bp, Homo sapien
aagtgattcggaggcgaccagtcca

SEQ ID NO: 2277984 - DNA, 25 bp, Homo sapien
ccttttgaagtgattcggaggcgac

SEQ ID NO: 2277985 - DNA, 25 bp, Homo sapien
tgaagtgattcggaggcgaccagtc

SEQ ID NO: 2277986 - DNA, 25 bp, Homo sapien
tttgaagtgattcggaggcgaccag

SEQ ID NO: 2277987 - DNA, 25 bp, Homo sapien
cagtccccaaattgaaggtacttat

SEQ ID NO: 2277988 - DNA, 25 bp, Homo sapien
taaaagcacaccaaattaatattct

SEQ ID NO: 2277989 - DNA, 25 bp, Homo sapien
tattcttaatgttagagggtcaccc

SEQ ID NO: 2277990 - DNA, 25 bp, Homo sapien
cagaaccccaattaacaagtagtat

SEQ ID NO: 2277991 - DNA, 25 bp, Homo sapien
caaagtagcggctagaatctgtcac

SEQ ID NO: 2277992 - DNA, 25 bp, Homo sapien
ttctactggtgcctgagcaaagagc

SEQ ID NO: 2277993 - DNA, 25 bp, Homo sapien
cagtaccatcctggatccggattac

SEQ ID NO: 2277994 - DNA, 25 bp, Homo sapien
cctggatccggattacaaagtagcg

SEQ ID NO: 2277995 - DNA, 25 bp, Homo sapien
cacatcttgaactcgtgcttatcta

SEQ ID NO: 2277996 - DNA, 25 bp, Homo sapien
tcctaacttcgttccactcaaaatc

SEQ ID NO: 2277997 - DNA, 25 bp, Homo sapien
caactagagcaactttagagaaagg

SEQ ID NO: 2277998 - DNA, 25 bp, Homo sapien
aatgcaatcggaaacacttttcatg

SEQ ID NO: 2277999 - DNA, 25 bp, Homo sapien
agtgatcctgcaaggagacattaaa

SEQ ID NO: 2278000 - DNA, 25 bp, Homo sapien
aagtgatcctgcaaggagacattaa

SEQ ID NO: 2278001 - DNA, 25 bp, Homo sapien
ggcatctccccgatctgtgaagcca

SEQ ID NO: 2278002 - DNA, 25 bp, Homo sapien
caaactactgcacaagggatctgaa

SEQ ID NO: 2278003 - DNA, 25 bp, Homo sapien
gcattcctataagcattcagcctcg

SEQ ID NO: 2278004 - DNA, 25 bp, Homo sapien
taacttcagagagtcctaaggcaga

SEQ ID NO: 2278005 - DNA, 25 bp, Homo sapien
tacataaggtaacaagagtggcaca

SEQ ID NO: 2278006 - DNA, 25 bp, Homo sapien
tgagattccttggaaatctcagatt

SEQ ID NO: 2278007 - DNA, 25 bp, Homo sapien
ggaaatctcagattcctgctttacc

SEQ ID NO: 2278008 - DNA, 25 bp, Homo sapien
aatctcagattcctgctttacccac

SEQ ID NO: 2278009 - DNA, 25 bp, Homo sapien
ccttggaaatctcagattcctgctt

SEQ ID NO: 2278010 - DNA, 25 bp, Homo sapien
gatccaacttaggacgagcatccat

SEQ ID NO: 2278011 - DNA, 25 bp, Homo sapien
gcccagatccaacttaggacgagca

SEQ ID NO: 2278012 - DNA, 25 bp, Homo sapien
cagatccaacttaggacgagcatcc

SEQ ID NO: 2278013 - DNA, 25 bp, Homo sapien
ccagatccaacttaggacgagcatc

SEQ ID NO: 2278014 - DNA, 25 bp, Homo sapien
gatgtcataggcttatggaagcaca

SEQ ID NO: 2278015 - DNA, 25 bp, Homo sapien
agaaagatgtcataggcttatggaa

SEQ ID NO: 2278016 - DNA, 25 bp, Homo sapien
tcataggcttatggaagcacaggaa

SEQ ID NO: 2278017 - DNA, 25 bp, Homo sapien
aaagatgtcataggcttatggaagc

SEQ ID NO: 2278018 - DNA, 25 bp, Homo sapien
agaagcacctcctttcttgtttgta

SEQ ID NO: 2278019 - DNA, 25 bp, Homo sapien
gaatagtgactttgcctcctggcgg

SEQ ID NO: 2278020 - DNA, 25 bp, Homo sapien
tgcagtcctgggcttagaagcacct

SEQ ID NO: 2278021 - DNA, 25 bp, Homo sapien
gggtgggagtaagctcagaccccca

SEQ ID NO: 2278022 - DNA, 25 bp, Homo sapien
cactgcctccatggttagatttcgg

SEQ ID NO: 2278023 - DNA, 25 bp, Homo sapien
tggggtgacatgattgctgatggca

SEQ ID NO: 2278024 - DNA, 25 bp, Homo sapien
gcctccatggttagatttcggaatg

SEQ ID NO: 2278025 - DNA, 25 bp, Homo sapien
tggttagatttcggaatgggtggtg

SEQ ID NO: 2278026 - DNA, 25 bp, Homo sapien
gattccttgctagaagctgacagaa

SEQ ID NO: 2278027 - DNA, 25 bp, Homo sapien
tctgccaaagaacctatgagatact

SEQ ID NO: 2278028 - DNA, 25 bp, Homo sapien
ctccttgacaaacaggtgttgctta

SEQ ID NO: 2278029 - DNA, 25 bp, Homo sapien
gaatcaccttgtcagtaccatgagc

SEQ ID NO: 2278030 - DNA, 25 bp, Homo sapien
tgctggtgtcgtgacaggagcagga

SEQ ID NO: 2278031 - DNA, 25 bp, Homo sapien
ggtgctggtgtcgtgacaggagcag

SEQ ID NO: 2278032 - DNA, 25 bp, Homo sapien
gagttggtgctggtgtcgtgacagg

SEQ ID NO: 2278033 - DNA, 25 bp, Homo sapien
gaaactggagttggtgctggtgtcg

SEQ ID NO: 2278034 - DNA, 25 bp, Homo sapien
gaagtctccccacaagtcattgctt

SEQ ID NO: 2278035 - DNA, 25 bp, Homo sapien
gtgctgaagtctccccacaagtcat

SEQ ID NO: 2278036 - DNA, 25 bp, Homo sapien
ctgaagtctccccacaagtcattgc

SEQ ID NO: 2278037 - DNA, 25 bp, Homo sapien
agtctccccacaagtcattgcttac

SEQ ID NO: 2278038 - DNA, 25 bp, Homo sapien
ggacccagttggatggctgtggtgc

SEQ ID NO: 2278039 - DNA, 25 bp, Homo sapien
tggacccagttggatggctgtggtg

SEQ ID NO: 2278040 - DNA, 25 bp, Homo sapien
acccagttggatggctgtggtgcct

SEQ ID NO: 2278041 - DNA, 25 bp, Homo sapien
gacccagttggatggctgtggtgcc

SEQ ID NO: 2278042 - DNA, 25 bp, Homo sapien
gtccttaatgtcctgccaatgccat

SEQ ID NO: 2278043 - DNA, 25 bp, Homo sapien
taaggactcccttcggccagagtgt

SEQ ID NO: 2278044 - DNA, 25 bp, Homo sapien
cctgggtgacaggtatcaaagcctt

SEQ ID NO: 2278045 - DNA, 25 bp, Homo sapien
tcaactttaggtcaaagaacagggc

SEQ ID NO: 2278046 - DNA, 25 bp, Homo sapien
gcttcacaaagaggcacacaagggt

SEQ ID NO: 2278047 - DNA, 25 bp, Homo sapien
ctttattaactactggtccacttat

SEQ ID NO: 2278048 - DNA, 25 bp, Homo sapien
tttattaactactggtccacttata

SEQ ID NO: 2278049 - DNA, 25 bp, Homo sapien
tatcctttattaactactggtccac

SEQ ID NO: 2278050 - DNA, 25 bp, Homo sapien
atcctttattaactactggtccact

SEQ ID NO: 2278051 - DNA, 25 bp, Homo sapien
tctgttggccaatgcaagttacctg

SEQ ID NO: 2278052 - DNA, 25 bp, Homo sapien
gataaggtgtacgttgtatttgctc

SEQ ID NO: 2278053 - DNA, 25 bp, Homo sapien
taaggtgtacgttgtatttgctctg

SEQ ID NO: 2278054 - DNA, 25 bp, Homo sapien
tcagataaggtgtacgttgtatttg

SEQ ID NO: 2278055 - DNA, 25 bp, Homo sapien
cttgggctctgacactccatgcagg

SEQ ID NO: 2278056 - DNA, 25 bp, Homo sapien
caagtcctccctctgcatagaagct

SEQ ID NO: 2278057 - DNA, 25 bp, Homo sapien
tctgcatagaagctttcttcatcct

SEQ ID NO: 2278058 - DNA, 25 bp, Homo sapien
ggctctgacactccatgcaggtcct

SEQ ID NO: 2278059 - DNA, 25 bp, Homo sapien
gagcagaggcaccagataggcacat

SEQ ID NO: 2278060 - DNA, 25 bp, Homo sapien
tcctcaggaccagtatagtgagaat

SEQ ID NO: 2278061 - DNA, 25 bp, Homo sapien
taaaaaccgcagttcacagaagccc

SEQ ID NO: 2278062 - DNA, 25 bp, Homo sapien
tcctttcactcaactagtggagagc

SEQ ID NO: 2278063 - DNA, 25 bp, Homo sapien
cagcataagtgatttccgaagtcat

SEQ ID NO: 2278064 - DNA, 25 bp, Homo sapien
ttcagcataagtgatttccgaagtc

SEQ ID NO: 2278065 - DNA, 25 bp, Homo sapien
cttcagcataagtgatttccgaagt

SEQ ID NO: 2278066 - DNA, 25 bp, Homo sapien
tcagcataagtgatttccgaagtca

SEQ ID NO: 2278067 - DNA, 25 bp, Homo sapien
aggctgtgttgatgcctgaggactt

SEQ ID NO: 2278068 - DNA, 25 bp, Homo sapien
cagaagaggctgtgttgatgcctga

SEQ ID NO: 2278069 - DNA, 25 bp, Homo sapien
ctgcagaagaggctgtgttgatgcc

SEQ ID NO: 2278070 - DNA, 25 bp, Homo sapien
gaggctgtgttgatgcctgaggact

SEQ ID NO: 2278071 - DNA, 25 bp, Homo sapien
ttcactctgacccctagaaaatgat

SEQ ID NO: 2278072 - DNA, 25 bp, Homo sapien
tcactctgacccctagaaaatgatc

SEQ ID NO: 2278073 - DNA, 25 bp, Homo sapien
tgaagaagaagccaaattagtttta

SEQ ID NO: 2278074 - DNA, 25 bp, Homo sapien
agaagccaaattagttttatcagta

SEQ ID NO: 2278075 - DNA, 25 bp, Homo sapien
tatcagtaataagtttggtctttac

SEQ ID NO: 2278076 - DNA, 25 bp, Homo sapien
agaagaagccaaattagttttatca

SEQ ID NO: 2278077 - DNA, 25 bp, Homo sapien
taaagaatgagattgccaatagcag

SEQ ID NO: 2278078 - DNA, 25 bp, Homo sapien
tttgtgaggggcagtcctctccttg

SEQ ID NO: 2278079 - DNA, 25 bp, Homo sapien
cagcttggggaatccggtattactt

SEQ ID NO: 2278080 - DNA, 25 bp, Homo sapien
gattgccaatagcaggaaaaatatc

SEQ ID NO: 2278081 - DNA, 25 bp, Homo sapien
gttgtatgaaccagctcttttgtag

SEQ ID NO: 2278082 - DNA, 25 bp, Homo sapien
tcacacactccaatgttgtatgaac

SEQ ID NO: 2278083 - DNA, 25 bp, Homo sapien
tttttcacacactccaatgttgtat

SEQ ID NO: 2278084 - DNA, 25 bp, Homo sapien
tatgaaccagctcttttgtagtctt

SEQ ID NO: 2278085 - DNA, 25 bp, Homo sapien
gacctggctaagcttccaaggccct

SEQ ID NO: 2278086 - DNA, 25 bp, Homo sapien
ccgggctgggttgatcctcggacct

SEQ ID NO: 2278087 - DNA, 25 bp, Homo sapien
ggcttcggatttcgccttctcaccc

SEQ ID NO: 2278088 - DNA, 25 bp, Homo sapien
gatcctcggacctggctaagcttcc

SEQ ID NO: 2278089 - DNA, 25 bp, Homo sapien
agtctacctcaatcaggcagtaatg

SEQ ID NO: 2278090 - DNA, 25 bp, Homo sapien
acctcaatcaggcagtaatgaggca

SEQ ID NO: 2278091 - DNA, 25 bp, Homo sapien
ctcaatcaggcagtaatgaggcagg

SEQ ID NO: 2278092 - DNA, 25 bp, Homo sapien
ctacctcaatcaggcagtaatgagg

SEQ ID NO: 2278093 - DNA, 25 bp, Homo sapien
tgtcttgccaagatgctgattcagt

SEQ ID NO: 2278094 - DNA, 25 bp, Homo sapien
caggtgagcctccattctagcacag

SEQ ID NO: 2278095 - DNA, 25 bp, Homo sapien
tctagcacagtccttctcactgtct

SEQ ID NO: 2278096 - DNA, 25 bp, Homo sapien
agaaataaagtagcagttggaacta

SEQ ID NO: 2278097 - DNA, 25 bp, Homo sapien
ttctggatctgagagccccacaaaa

SEQ ID NO: 2278098 - DNA, 25 bp, Homo sapien
caatgtcgctgaccttctggatctg

SEQ ID NO: 2278099 - DNA, 25 bp, Homo sapien
atgtcgctgaccttctggatctgag

SEQ ID NO: 2278100 - DNA, 25 bp, Homo sapien
tctgagagccccacaaaataagcag

SEQ ID NO: 2278101 - DNA, 25 bp, Homo sapien
tacgaaaatttagcacaacgcagcg

SEQ ID NO: 2278102 - DNA, 25 bp, Homo sapien
agcgctcattgggatcactgggctc

SEQ ID NO: 2278103 - DNA, 25 bp, Homo sapien
gaccaagacaattaacatcattcca

SEQ ID NO: 2278104 - DNA, 25 bp, Homo sapien
catcttttgggtgatttacgaaaat

SEQ ID NO: 2278105 - DNA, 25 bp, Homo sapien
tcataagtggatcttcatcatctca

SEQ ID NO: 2278106 - DNA, 25 bp, Homo sapien
ggatcttcatcatctcacaaactga

SEQ ID NO: 2278107 - DNA, 25 bp, Homo sapien
ataagtggatcttcatcatctcaca

SEQ ID NO: 2278108 - DNA, 25 bp, Homo sapien
gtggatcttcatcatctcacaaact

SEQ ID NO: 2278109 - DNA, 25 bp, Homo sapien
cagaccaattctctcataagtagaa

SEQ ID NO: 2278110 - DNA, 25 bp, Homo sapien
gtgaatcagtcaatgtacagaccaa

SEQ ID NO: 2278111 - DNA, 25 bp, Homo sapien
taaattctatggacctcccttacac

SEQ ID NO: 2278112 - DNA, 25 bp, Homo sapien
taagtagaatagttgacagaccacc

SEQ ID NO: 2278113 - DNA, 25 bp, Homo sapien
ttatatatcagtatagtagggatga

SEQ ID NO: 2278114 - DNA, 25 bp, Homo sapien
tacaattatatatcagtatagtagg

SEQ ID NO: 2278115 - DNA, 25 bp, Homo sapien
caattatatatcagtatagtaggga

SEQ ID NO: 2278116 - DNA, 25 bp, Homo sapien
atatatcagtatagtagggatgaag

SEQ ID NO: 2278117 - DNA, 25 bp, Homo sapien
atatatacaattttatttgtcagtg

SEQ ID NO: 2278118 - DNA, 25 bp, Homo sapien
tatatacaattttatttgtcagtgt

SEQ ID NO: 2278119 - DNA, 25 bp, Homo sapien
atatacaattttatttgtcagtgta

SEQ ID NO: 2278120 - DNA, 25 bp, Homo sapien
atcaatatctggatttgggtcaaaa

SEQ ID NO: 2278121 - DNA, 25 bp, Homo sapien
gatttgggtcaaaatacttaatcat

SEQ ID NO: 2278122 - DNA, 25 bp, Homo sapien
tcaatatctggatttgggtcaaaat

SEQ ID NO: 2278123 - DNA, 25 bp, Homo sapien
ctggatttgggtcaaaatacttaat

SEQ ID NO: 2278124 - DNA, 25 bp, Homo sapien
gtgatgaccccgagccgcaaaacca

SEQ ID NO: 2278125 - DNA, 25 bp, Homo sapien
ccccgctgtgctgatgagggtctat

SEQ ID NO: 2278126 - DNA, 25 bp, Homo sapien
ggactgtgatgaccccgagccgcaa

SEQ ID NO: 2278127 - DNA, 25 bp, Homo sapien
atgagggtctatgccccgctgtgct

SEQ ID NO: 2278128 - DNA, 25 bp, Homo sapien
caagctgaataggaatgtggacatt

SEQ ID NO: 2278129 - DNA, 25 bp, Homo sapien
aatgtggacattagaacaggaagtc

SEQ ID NO: 2278130 - DNA, 25 bp, Homo sapien
gaacaggaagtctgattactcatgg

SEQ ID NO: 2278131 - DNA, 25 bp, Homo sapien
ctgattactcatggcaaagttatac

SEQ ID NO: 2278132 - DNA, 25 bp, Homo sapien
gccttctgaagctttactccacttt

SEQ ID NO: 2278133 - DNA, 25 bp, Homo sapien
cttctgaagctttactccactttta

SEQ ID NO: 2278134 - DNA, 25 bp, Homo sapien
cacagccttctgaagctttactcca

SEQ ID NO: 2278135 - DNA, 25 bp, Homo sapien
tctgaagctttactccacttttatt

SEQ ID NO: 2278136 - DNA, 25 bp, Homo sapien
ttggatgtgtccatcatggcccact

SEQ ID NO: 2278137 - DNA, 25 bp, Homo sapien
ttcctgggtgaagtcaatagctaca

SEQ ID NO: 2278138 - DNA, 25 bp, Homo sapien
acatctctgtacagctttctcttgg

SEQ ID NO: 2278139 - DNA, 25 bp, Homo sapien
gacaccaggtgactgatattttcca

SEQ ID NO: 2278140 - DNA, 25 bp, Homo sapien
aaattatataggatttgcttatctg

SEQ ID NO: 2278141 - DNA, 25 bp, Homo sapien
ttatataggatttgcttatctggta

SEQ ID NO: 2278142 - DNA, 25 bp, Homo sapien
atataggatttgcttatctggtacc

SEQ ID NO: 2278143 - DNA, 25 bp, Homo sapien
aattatataggatttgcttatctgg

SEQ ID NO: 2278144 - DNA, 25 bp, Homo sapien
ctggattctggtcttgaagaaattc

SEQ ID NO: 2278145 - DNA, 25 bp, Homo sapien
ggattctggtcttgaagaaattctc

SEQ ID NO: 2278146 - DNA, 25 bp, Homo sapien
agaaattctcttccttcccgccaca

SEQ ID NO: 2278147 - DNA, 25 bp, Homo sapien
cttccttcccgccacagctcttttc

SEQ ID NO: 2278148 - DNA, 25 bp, Homo sapien
atactggtggatgcgtcttttctgg

SEQ ID NO: 2278149 - DNA, 25 bp, Homo sapien
cattgtcatactggtggatgcgtct

SEQ ID NO: 2278150 - DNA, 25 bp, Homo sapien
cttttctggtgataggatgcatgga

SEQ ID NO: 2278151 - DNA, 25 bp, Homo sapien
tgcatggatatcatgtgttttttct

SEQ ID NO: 2278152 - DNA, 25 bp, Homo sapien
tgtgagttaacaaacgctgagttat

SEQ ID NO: 2278153 - DNA, 25 bp, Homo sapien
gccgtctaaggcgaaagcaattagt

SEQ ID NO: 2278154 - DNA, 25 bp, Homo sapien
gaaaagattacgaagagattttcca

SEQ ID NO: 2278155 - DNA, 25 bp, Homo sapien
catcttgtgccgtctaaggcgaaag

SEQ ID NO: 2278156 - DNA, 25 bp, Homo sapien
taaggtcggaagacagactgaaggc

SEQ ID NO: 2278157 - DNA, 25 bp, Homo sapien
tcatctaaggtcggaagacagactg

SEQ ID NO: 2278158 - DNA, 25 bp, Homo sapien
tctaaggtcggaagacagactgaag

SEQ ID NO: 2278159 - DNA, 25 bp, Homo sapien
aggtcggaagacagactgaaggcct

SEQ ID NO: 2278160 - DNA, 25 bp, Homo sapien
gaattttctcctttcaggatgctaa

SEQ ID NO: 2278161 - DNA, 25 bp, Homo sapien
cactaaagaattttctcctttcagg

SEQ ID NO: 2278162 - DNA, 25 bp, Homo sapien
tttctcctttcaggatgctaaccat

SEQ ID NO: 2278163 - DNA, 25 bp, Homo sapien
aattttctcctttcaggatgctaac

SEQ ID NO: 2278164 - DNA, 25 bp, Homo sapien
tctgtctctgtgtaataactcagga

SEQ ID NO: 2278165 - DNA, 25 bp, Homo sapien
gtctgtctctgtgtaataactcagg

SEQ ID NO: 2278166 - DNA, 25 bp, Homo sapien
gcttcgggaaaagtacattgaatcg

SEQ ID NO: 2278167 - DNA, 25 bp, Homo sapien
tactgaggctccttcacggacaata

SEQ ID NO: 2278168 - DNA, 25 bp, Homo sapien
tataggaaaggcttgcaaggtggct

SEQ ID NO: 2278169 - DNA, 25 bp, Homo sapien
tcaaccacggataaggccatttagc

SEQ ID NO: 2278170 - DNA, 25 bp, Homo sapien
ccagcgcgggtatccgagcccagag

SEQ ID NO: 2278171 - DNA, 25 bp, Homo sapien
ccctgaccatgggtgaagaaaaact

SEQ ID NO: 2278172 - DNA, 25 bp, Homo sapien
ctgaccatgggtgaagaaaaactca

SEQ ID NO: 2278173 - DNA, 25 bp, Homo sapien
tatccgagcccagagtgggtatccg

SEQ ID NO: 2278174 - DNA, 25 bp, Homo sapien
tagggtcccgattcaccgatgtgaa

SEQ ID NO: 2278175 - DNA, 25 bp, Homo sapien
gataatgccaccaacactgttaatg

SEQ ID NO: 2278176 - DNA, 25 bp, Homo sapien
gttgtcctccggaatgctcttcaga

SEQ ID NO: 2278177 - DNA, 25 bp, Homo sapien
tgaaggatggcgacaatttctggcc

SEQ ID NO: 2278178 - DNA, 25 bp, Homo sapien
ttctgcatagggtcaggatgccttc

SEQ ID NO: 2278179 - DNA, 25 bp, Homo sapien
ttagctcatggaagtgtttctgcat

SEQ ID NO: 2278180 - DNA, 25 bp, Homo sapien
aggatcttgctttggctttcaggcc

SEQ ID NO: 2278181 - DNA, 25 bp, Homo sapien
caggccttcacataggttgtttagc

SEQ ID NO: 2278182 - DNA, 25 bp, Homo sapien
tggacagctttgtaataagaggatc

SEQ ID NO: 2278183 - DNA, 25 bp, Homo sapien
tagtccctggcacatcttttgcaag

SEQ ID NO: 2278184 - DNA, 25 bp, Homo sapien
tcagaaggaccaaggaggacatttc

SEQ ID NO: 2278185 - DNA, 25 bp, Homo sapien
cagtcttccccggacaagtgaggag

SEQ ID NO: 2278186 - DNA, 25 bp, Homo sapien
ttttgcaagcaatggcggctcccag

SEQ ID NO: 2278187 - DNA, 25 bp, Homo sapien
aggagttcatccagacatccagctg

SEQ ID NO: 2278188 - DNA, 25 bp, Homo sapien
tcaggagttcatccagacatccagc

SEQ ID NO: 2278189 - DNA, 25 bp, Homo sapien
ctttcaggagttcatccagacatcc

SEQ ID NO: 2278190 - DNA, 25 bp, Homo sapien
tgcaggacactcagcagctttcagg

SEQ ID NO: 2278191 - DNA, 25 bp, Homo sapien
tcacagagtgagggagtccccttca

SEQ ID NO: 2278192 - DNA, 25 bp, Homo sapien
gagtgagggagtccccttcatcctt

SEQ ID NO: 2278193 - DNA, 25 bp, Homo sapien
cacagagtgagggagtccccttcat

SEQ ID NO: 2278194 - DNA, 25 bp, Homo sapien
cagagtgagggagtccccttcatcc

SEQ ID NO: 2278195 - DNA, 25 bp, Homo sapien
gggcctgggcctgctacacctcagg

SEQ ID NO: 2278196 - DNA, 25 bp, Homo sapien
ttttccatacttctggggcctgggc

SEQ ID NO: 2278197 - DNA, 25 bp, Homo sapien
gggcctgctacacctcaggcttcct

SEQ ID NO: 2278198 - DNA, 25 bp, Homo sapien
ctgggcctgctacacctcaggcttc

SEQ ID NO: 2278199 - DNA, 25 bp, Homo sapien
ctgctcaatccaggccaatatccct

SEQ ID NO: 2278200 - DNA, 25 bp, Homo sapien
aagtcggctgcatctttgggatgaa

SEQ ID NO: 2278201 - DNA, 25 bp, Homo sapien
ttcttaatagaatactagcaaacag

SEQ ID NO: 2278202 - DNA, 25 bp, Homo sapien
caccacaatcaagtcggctgcatct

SEQ ID NO: 2278203 - DNA, 25 bp, Homo sapien
agttgcctgttctccatacagagcc

SEQ ID NO: 2278204 - DNA, 25 bp, Homo sapien
ttgcctgttctccatacagagccat

SEQ ID NO: 2278205 - DNA, 25 bp, Homo sapien
catgctctcagttgcctgttctcca

SEQ ID NO: 2278206 - DNA, 25 bp, Homo sapien
atcatgctctcagttgcctgttctc

SEQ ID NO: 2278207 - DNA, 25 bp, Homo sapien
caaggtcacatgcactcgtgtccaa

SEQ ID NO: 2278208 - DNA, 25 bp, Homo sapien
tggcacaaggtcacatgcactcgtg

SEQ ID NO: 2278209 - DNA, 25 bp, Homo sapien
catgcactcgtgtccaactccaaat

SEQ ID NO: 2278210 - DNA, 25 bp, Homo sapien
cgtgtccaactccaaatagtagctt

SEQ ID NO: 2278211 - DNA, 25 bp, Homo sapien
ggccaattatcacaagtccaaatct

SEQ ID NO: 2278212 - DNA, 25 bp, Homo sapien
agaggccaattatcacaagtccaaa

SEQ ID NO: 2278213 - DNA, 25 bp, Homo sapien
accagtcagtcttccacacaatgac

SEQ ID NO: 2278214 - DNA, 25 bp, Homo sapien
cagtcagtcttccacacaatgacac

SEQ ID NO: 2278215 - DNA, 25 bp, Homo sapien
cacttgccaacatttgagtggatta

SEQ ID NO: 2278216 - DNA, 25 bp, Homo sapien
tggattaatttgtgtggtagtcaag

SEQ ID NO: 2278217 - DNA, 25 bp, Homo sapien
caacatttgagtggattaatttgtg

SEQ ID NO: 2278218 - DNA, 25 bp, Homo sapien
tctgctccacttgccaacatttgag

SEQ ID NO: 2278219 - DNA, 25 bp, Homo sapien
aaggtaaggctctggtcctgcaaga

SEQ ID NO: 2278220 - DNA, 25 bp, Homo sapien
taaggctctggtcctgcaagactct

SEQ ID NO: 2278221 - DNA, 25 bp, Homo sapien
ggaaaggtaaggctctggtcctgca

SEQ ID NO: 2278222 - DNA, 25 bp, Homo sapien
ggtaaggctctggtcctgcaagact

SEQ ID NO: 2278223 - DNA, 25 bp, Homo sapien
agttgcaggtgtaggcctaaatcca

SEQ ID NO: 2278224 - DNA, 25 bp, Homo sapien
taggcctaaatccaggtgtgaagat

SEQ ID NO: 2278225 - DNA, 25 bp, Homo sapien
gggtagttgcaggtgtaggcctaaa

SEQ ID NO: 2278226 - DNA, 25 bp, Homo sapien
gtagttgcaggtgtaggcctaaatc

SEQ ID NO: 2278227 - DNA, 25 bp, Homo sapien
ctgattgggagggagccgccagcag

SEQ ID NO: 2278228 - DNA, 25 bp, Homo sapien
attgggagggagccgccagcagcat

SEQ ID NO: 2278229 - DNA, 25 bp, Homo sapien
gagggagccgccagcagcatcaccc

SEQ ID NO: 2278230 - DNA, 25 bp, Homo sapien
agggagccgccagcagcatcaccct

SEQ ID NO: 2278231 - DNA, 25 bp, Homo sapien
catggctctccgttgggctaggatg

SEQ ID NO: 2278232 - DNA, 25 bp, Homo sapien
gctctccgttgggctaggatgagga

SEQ ID NO: 2278233 - DNA, 25 bp, Homo sapien
gcatggctctccgttgggctaggat

SEQ ID NO: 2278234 - DNA, 25 bp, Homo sapien
tggctctccgttgggctaggatgag

SEQ ID NO: 2278235 - DNA, 25 bp, Homo sapien
ggatctgcatagggaactgcaagcc

SEQ ID NO: 2278236 - DNA, 25 bp, Homo sapien
attggatctgcatagggaactgcaa

SEQ ID NO: 2278237 - DNA, 25 bp, Homo sapien
cattggatctgcatagggaactgca

SEQ ID NO: 2278238 - DNA, 25 bp, Homo sapien
gcattggatctgcatagggaactgc

SEQ ID NO: 2278239 - DNA, 25 bp, Homo sapien
gtggtacattctctgttgtcatggc

SEQ ID NO: 2278240 - DNA, 25 bp, Homo sapien
gagagtggtacattctctgttgtca

SEQ ID NO: 2278241 - DNA, 25 bp, Homo sapien
gtgagagtggtacattctctgttgt

SEQ ID NO: 2278242 - DNA, 25 bp, Homo sapien
ggtacattctctgttgtcatggctg

SEQ ID NO: 2278243 - DNA, 25 bp, Homo sapien
gactatggatatgactgcatatgac

SEQ ID NO: 2278244 - DNA, 25 bp, Homo sapien
gttaccctgcagatatagacatgaa

SEQ ID NO: 2278245 - DNA, 25 bp, Homo sapien
gatgagttccttacaggagagaagg

SEQ ID NO: 2278246 - DNA, 25 bp, Homo sapien
tttcataggatgagttccttacagg

SEQ ID NO: 2278247 - DNA, 25 bp, Homo sapien
tacgctaagcccactaaggataccc

SEQ ID NO: 2278248 - DNA, 25 bp, Homo sapien
ctaaggatacccagaagccatggta

SEQ ID NO: 2278249 - DNA, 25 bp, Homo sapien
tatgccctcctatagccagtgaagg

SEQ ID NO: 2278250 - DNA, 25 bp, Homo sapien
tccagtgcctagatgtaccagtcaa

SEQ ID NO: 2278251 - DNA, 25 bp, Homo sapien
tctaagtcagttcagaagcttattg

SEQ ID NO: 2278252 - DNA, 25 bp, Homo sapien
gcttattgattcacctttgcaggca

SEQ ID NO: 2278253 - DNA, 25 bp, Homo sapien
gatacgtctatctggagtggcagga

SEQ ID NO: 2278254 - DNA, 25 bp, Homo sapien
gtgtgacccggatacgtctatctgg

SEQ ID NO: 2278255 - DNA, 25 bp, Homo sapien
ccaggacagctaaaggagtacttgc

SEQ ID NO: 2278256 - DNA, 25 bp, Homo sapien
ttgagccacagtaggatagggcact

SEQ ID NO: 2278257 - DNA, 25 bp, Homo sapien
gcatcttggatatcagttgagccac

SEQ ID NO: 2278258 - DNA, 25 bp, Homo sapien
cagtgtactgaggtgagtggccata

SEQ ID NO: 2278259 - DNA, 25 bp, Homo sapien
cacactgctgtgagacttgaggaca

SEQ ID NO: 2278260 - DNA, 25 bp, Homo sapien
tgaggacagattacatcactgggtc

SEQ ID NO: 2278261 - DNA, 25 bp, Homo sapien
gacattcttgagcaccagcctagtg

SEQ ID NO: 2278262 - DNA, 25 bp, Homo sapien
gaacatgtgcatgctaggctcagcg

SEQ ID NO: 2278263 - DNA, 25 bp, Homo sapien
ctggctgaaggcctactgacagtcc

SEQ ID NO: 2278264 - DNA, 25 bp, Homo sapien
aaggcctactgacagtcctttacag

SEQ ID NO: 2278265 - DNA, 25 bp, Homo sapien
accacagctggcagtcttttggaag

SEQ ID NO: 2278266 - DNA, 25 bp, Homo sapien
agtcttttggaagcaccacctcctg

SEQ ID NO: 2278267 - DNA, 25 bp, Homo sapien
gctttgggtcctgcggaagttcatt

SEQ ID NO: 2278268 - DNA, 25 bp, Homo sapien
aagttcattgtctcagtttgtctgg

SEQ ID NO: 2278269 - DNA, 25 bp, Homo sapien
gtttgtctggtgtttgcagaagaga

SEQ ID NO: 2278270 - DNA, 25 bp, Homo sapien
gaagagatgtctgcaaagtagtaga

SEQ ID NO: 2278271 - DNA, 25 bp, Homo sapien
tttgccactggagtaagcaacatcc

SEQ ID NO: 2278272 - DNA, 25 bp, Homo sapien
caaggtggaaccaccatggccctca

SEQ ID NO: 2278273 - DNA, 25 bp, Homo sapien
cagaaagggactatctgtatcagcc

SEQ ID NO: 2278274 - DNA, 25 bp, Homo sapien
aagatgaagatgtaccatctcctcc

SEQ ID NO: 2278275 - DNA, 25 bp, Homo sapien
ctgagatgcgagaaacatctttttt

SEQ ID NO: 2278276 - DNA, 25 bp, Homo sapien
tgagatgcgagaaacatcttttttg

SEQ ID NO: 2278277 - DNA, 25 bp, Homo sapien
gagatgcgagaaacatcttttttgg

SEQ ID NO: 2278278 - DNA, 25 bp, Homo sapien
ggagcaggatataccagcctttagc

SEQ ID NO: 2278279 - DNA, 25 bp, Homo sapien
agccatcagctttaccattagagag

SEQ ID NO: 2278280 - DNA, 25 bp, Homo sapien
ctctgggagggttcaagggaccatt

SEQ ID NO: 2278281 - DNA, 25 bp, Homo sapien
tattgtaatagcacaaagccatcag

SEQ ID NO: 2278282 - DNA, 25 bp, Homo sapien
caatagcagcagtcatttgagacca

SEQ ID NO: 2278283 - DNA, 25 bp, Homo sapien
aagtgcccagtgctcaagctccagt

SEQ ID NO: 2278284 - DNA, 25 bp, Homo sapien
tcaattctccccgttcaaaggcata

SEQ ID NO: 2278285 - DNA, 25 bp, Homo sapien
cagctagccaatacaaagtgcccag

SEQ ID NO: 2278286 - DNA, 25 bp, Homo sapien
ctctagcctgggtgacagagtgaga

SEQ ID NO: 2278287 - DNA, 25 bp, Homo sapien
accctggaggcggaggtggtagtga

SEQ ID NO: 2278288 - DNA, 25 bp, Homo sapien
tgaaccctggaggcggaggtggtag

SEQ ID NO: 2278289 - DNA, 25 bp, Homo sapien
gccgagatcatgccattgcactcta

SEQ ID NO: 2278290 - DNA, 25 bp, Homo sapien
cctgccttcagacctcatcaggcct

SEQ ID NO: 2278291 - DNA, 25 bp, Homo sapien
ctgccttcagacctcatcaggcctc

SEQ ID NO: 2278292 - DNA, 25 bp, Homo sapien
gcacattcacttgattctcagcctg

SEQ ID NO: 2278293 - DNA, 25 bp, Homo sapien
agagctcagttcctggtcctcttct

SEQ ID NO: 2278294 - DNA, 25 bp, Homo sapien
tgcatgacacctcctataggagagc

SEQ ID NO: 2278295 - DNA, 25 bp, Homo sapien
tcactggagctaccacttcggcttc

SEQ ID NO: 2278296 - DNA, 25 bp, Homo sapien
tatccccaggtaagttggtagctga

SEQ ID NO: 2278297 - DNA, 25 bp, Homo sapien
cagatgagaaggctatatccctggc

SEQ ID NO: 2278298 - DNA, 25 bp, Homo sapien
ccctggccagacaagatcctagaat

SEQ ID NO: 2278299 - DNA, 25 bp, Homo sapien
gagaatccaggctcaacccacattg

SEQ ID NO: 2278300 - DNA, 25 bp, Homo sapien
taaaggctatgccaaagctttggtg

SEQ ID NO: 2278301 - DNA, 25 bp, Homo sapien
ttttacccaagaagatgatcaggca

SEQ ID NO: 2278302 - DNA, 25 bp, Homo sapien
acctattgcccctcagtactgttgg

SEQ ID NO: 2278303 - DNA, 25 bp, Homo sapien
tgtatcacaggtataagaccccttg

SEQ ID NO: 2278304 - DNA, 25 bp, Homo sapien
gcagtgacttttcactgtcctgttt

SEQ ID NO: 2278305 - DNA, 25 bp, Homo sapien
gcaccaaaagaaaagtatagattag

SEQ ID NO: 2278306 - DNA, 25 bp, Homo sapien
tacagatacgcactaatatacccac

SEQ ID NO: 2278307 - DNA, 25 bp, Homo sapien
tttcaacacaagttatgggctaggc

SEQ ID NO: 2278308 - DNA, 25 bp, Homo sapien
gccttctatgttctaataatgcacc

SEQ ID NO: 2278309 - DNA, 25 bp, Homo sapien
ccacgcccaaaaacatgttctccaa

SEQ ID NO: 2278310 - DNA, 25 bp, Homo sapien
ttctcccacgcccaaaaacatgttc

SEQ ID NO: 2278311 - DNA, 25 bp, Homo sapien
gaaataactgatacctatatttgct

SEQ ID NO: 2278312 - DNA, 25 bp, Homo sapien
ccaaatgatctgtcaatagaaataa

SEQ ID NO: 2278313 - DNA, 25 bp, Homo sapien
caaaggagtacaaaccatgtgataa

SEQ ID NO: 2278314 - DNA, 25 bp, Homo sapien
ctgcaaaggagtacaaaccatgtga

SEQ ID NO: 2278315 - DNA, 25 bp, Homo sapien
aaggagtacaaaccatgtgataaat

SEQ ID NO: 2278316 - DNA, 25 bp, Homo sapien
ggagtacaaaccatgtgataaattt

SEQ ID NO: 2278317 - DNA, 25 bp, Homo sapien
tgaaagcatccacctccaaacttac

SEQ ID NO: 2278318 - DNA, 25 bp, Homo sapien
tgaacttaatggctgaaagcatcca

SEQ ID NO: 2278319 - DNA, 25 bp, Homo sapien
tggcagtacttttgaacttaatggc

SEQ ID NO: 2278320 - DNA, 25 bp, Homo sapien
tgtaaccaggctgcgctgcaatggc

SEQ ID NO: 2278321 - DNA, 25 bp, Homo sapien
caggttgggagacactgtatgttta

SEQ ID NO: 2278322 - DNA, 25 bp, Homo sapien
tgtttaaattctaaagggatgtagc

SEQ ID NO: 2278323 - DNA, 25 bp, Homo sapien
ttccggagaggacacaaaaacagct

SEQ ID NO: 2278324 - DNA, 25 bp, Homo sapien
cctcaacttggattccggagaggac

SEQ ID NO: 2278325 - DNA, 25 bp, Homo sapien
gaaaactttgtcagcacatttaagg

SEQ ID NO: 2278326 - DNA, 25 bp, Homo sapien
gggcaacatacatggcagatgccat

SEQ ID NO: 2278327 - DNA, 25 bp, Homo sapien
tacagagccattggaggccattacc

SEQ ID NO: 2278328 - DNA, 25 bp, Homo sapien
aaagccacctgcttcgaagtctcat

SEQ ID NO: 2278329 - DNA, 25 bp, Homo sapien
taatgcctagagtagcaagacgagc

SEQ ID NO: 2278330 - DNA, 25 bp, Homo sapien
cgaccctaactcgtgcagctgcaga

SEQ ID NO: 2278331 - DNA, 25 bp, Homo sapien
gagtctacttgatgccagcgaagca

SEQ ID NO: 2278332 - DNA, 25 bp, Homo sapien
tgcggtccaattcactgtggtagaa

SEQ ID NO: 2278333 - DNA, 25 bp, Homo sapien
gaataattaatgaagcgcaaatcaa

SEQ ID NO: 2278334 - DNA, 25 bp, Homo sapien
gactcgagtttcagcctgtgcaatt

SEQ ID NO: 2278335 - DNA, 25 bp, Homo sapien
caaaggggactcgagtttcagcctg

SEQ ID NO: 2278336 - DNA, 25 bp, Homo sapien
gtgcaattcatccaacgggagatcg

SEQ ID NO: 2278337 - DNA, 25 bp, Homo sapien
gggggtcgtcagcaggccttccaac

SEQ ID NO: 2278338 - DNA, 25 bp, Homo sapien
atctaggaggcctcggaactgagcg

SEQ ID NO: 2278339 - DNA, 25 bp, Homo sapien
gcaggattccacatctaggaggcct

SEQ ID NO: 2278340 - DNA, 25 bp, Homo sapien
tccacatctaggaggcctcggaact

SEQ ID NO: 2278341 - DNA, 25 bp, Homo sapien
acaactctgagcaggattccacatc

SEQ ID NO: 2278342 - DNA, 25 bp, Homo sapien
cggatgtctgacaccgggcctttcc

SEQ ID NO: 2278343 - DNA, 25 bp, Homo sapien
ggcagcactactgccaacatgtctc

SEQ ID NO: 2278344 - DNA, 25 bp, Homo sapien
ttctcctagctcagagttgaataaa

SEQ ID NO: 2278345 - DNA, 25 bp, Homo sapien
gagttgaataaatgtacgatcgggt

SEQ ID NO: 2278346 - DNA, 25 bp, Homo sapien
aataacaaggcagcactactgccaa

SEQ ID NO: 2278347 - DNA, 25 bp, Homo sapien
cgaaaagaaatgtactgcagcatgc

SEQ ID NO: 2278348 - DNA, 25 bp, Homo sapien
gtttgtttcacgcaatccctgaggg

SEQ ID NO: 2278349 - DNA, 25 bp, Homo sapien
ggtttgcccttcagccgtgtaagac

SEQ ID NO: 2278350 - DNA, 25 bp, Homo sapien
caaaggaggccgaaagaaagcgatc

SEQ ID NO: 2278351 - DNA, 25 bp, Homo sapien
agaggccctttgccttcacagagaa

SEQ ID NO: 2278352 - DNA, 25 bp, Homo sapien
tcctcggccctccagccagggggtg

SEQ ID NO: 2278353 - DNA, 25 bp, Homo sapien
aggccctttgccttcacagagaaaa

SEQ ID NO: 2278354 - DNA, 25 bp, Homo sapien
ttgccttcacagagaaaagcagaca

SEQ ID NO: 2278355 - DNA, 25 bp, Homo sapien
tggaggatgtgtccagagagacacc

SEQ ID NO: 2278356 - DNA, 25 bp, Homo sapien
ggaggatgtgtccagagagacaccc

SEQ ID NO: 2278357 - DNA, 25 bp, Homo sapien
ccactggaggatgtgtccagagaga

SEQ ID NO: 2278358 - DNA, 25 bp, Homo sapien
actggaggatgtgtccagagagaca

SEQ ID NO: 2278359 - DNA, 25 bp, Homo sapien
cacttgaagttcacggcacacgcag

SEQ ID NO: 2278360 - DNA, 25 bp, Homo sapien
tgaagttcacggcacacgcaggcaa

SEQ ID NO: 2278361 - DNA, 25 bp, Homo sapien
tcacggcacacgcaggcaaacagca

SEQ ID NO: 2278362 - DNA, 25 bp, Homo sapien
aagttcacggcacacgcaggcaaac

SEQ ID NO: 2278363 - DNA, 25 bp, Homo sapien
ctgcagagagaaccaagggagcctg

SEQ ID NO: 2278364 - DNA, 25 bp, Homo sapien
cagagagaaccaagggagcctgaga

SEQ ID NO: 2278365 - DNA, 25 bp, Homo sapien
agagaaccaagggagcctgagagct

SEQ ID NO: 2278366 - DNA, 25 bp, Homo sapien
agaaccaagggagcctgagagctgc

SEQ ID NO: 2278367 - DNA, 25 bp, Homo sapien
caaagaccaggccattttctttatg

SEQ ID NO: 2278368 - DNA, 25 bp, Homo sapien
ttctttatgtttcaccagctcatgt

SEQ ID NO: 2278369 - DNA, 25 bp, Homo sapien
agtcctcaaagaccaggccattttc

SEQ ID NO: 2278370 - DNA, 25 bp, Homo sapien
ctctgagtcctcaaagaccaggcca

SEQ ID NO: 2278371 - DNA, 25 bp, Homo sapien
tttagcttgcctgcaggatcaggag

SEQ ID NO: 2278372 - DNA, 25 bp, Homo sapien
tcccgcaggttcttctggaactggt

SEQ ID NO: 2278373 - DNA, 25 bp, Homo sapien
ggaactggtttagcttgcctgcagg

SEQ ID NO: 2278374 - DNA, 25 bp, Homo sapien
tgcctgcaggatcaggagagtttga

SEQ ID NO: 2278375 - DNA, 25 bp, Homo sapien
accaggtggcaccactgccgtcatt

SEQ ID NO: 2278376 - DNA, 25 bp, Homo sapien
attcaccaggtggcaccactgccgt

SEQ ID NO: 2278377 - DNA, 25 bp, Homo sapien
tcattcaccaggtggcaccactgcc

SEQ ID NO: 2278378 - DNA, 25 bp, Homo sapien
aggtggcaccactgccgtcatttca

SEQ ID NO: 2278379 - DNA, 25 bp, Homo sapien
catggtttattcagccatgtggtgg

SEQ ID NO: 2278380 - DNA, 25 bp, Homo sapien
tcctgtcatggtttattcagccatg

SEQ ID NO: 2278381 - DNA, 25 bp, Homo sapien
tgtcatggtttattcagccatgtgg

SEQ ID NO: 2278382 - DNA, 25 bp, Homo sapien
ggtcctgtcatggtttattcagcca

SEQ ID NO: 2278383 - DNA, 25 bp, Homo sapien
gaagccgttccttagtaggcagtag

SEQ ID NO: 2278384 - DNA, 25 bp, Homo sapien
acaggaggatgtcgagaagccgttc

SEQ ID NO: 2278385 - DNA, 25 bp, Homo sapien
ggatgtcgagaagccgttccttagt

SEQ ID NO: 2278386 - DNA, 25 bp, Homo sapien
tccttagtaggcagtagcagacctg

SEQ ID NO: 2278387 - DNA, 25 bp, Homo sapien
aaggtcagttatgggcagtgtccgc

SEQ ID NO: 2278388 - DNA, 25 bp, Homo sapien
ggacagcatagccacctgcgtgctg

SEQ ID NO: 2278389 - DNA, 25 bp, Homo sapien
gtccgcccagtagccggacagcata

SEQ ID NO: 2278390 - DNA, 25 bp, Homo sapien
aagcacccgccgtcagtcaagtatg

SEQ ID NO: 2278391 - DNA, 25 bp, Homo sapien
gggctctcgagcaaccaacgttctg

SEQ ID NO: 2278392 - DNA, 25 bp, Homo sapien
tctttgctgagggatcaggtagcct

SEQ ID NO: 2278393 - DNA, 25 bp, Homo sapien
taggagacttaagacgggctctcga

SEQ ID NO: 2278394 - DNA, 25 bp, Homo sapien
cctttgccgtagactgtgaagcatc

SEQ ID NO: 2278395 - DNA, 25 bp, Homo sapien
ggaacttgctcatcctgcacttggc

SEQ ID NO: 2278396 - DNA, 25 bp, Homo sapien
tgaagcatgagatatagggagagct

SEQ ID NO: 2278397 - DNA, 25 bp, Homo sapien
atatagggagagctgctttaaaacc

SEQ ID NO: 2278398 - DNA, 25 bp, Homo sapien
tctgccctccgttccatgtgccagc

SEQ ID NO: 2278399 - DNA, 25 bp, Homo sapien
taactcgggagccaaagttcgctgc

SEQ ID NO: 2278400 - DNA, 25 bp, Homo sapien
caatgaagtgccttgccgtgtgcca

SEQ ID NO: 2278401 - DNA, 25 bp, Homo sapien
cagagagagggattagcaccaggtc

SEQ ID NO: 2278402 - DNA, 25 bp, Homo sapien
ggcttgaggcccctataagaggaca

SEQ ID NO: 2278403 - DNA, 25 bp, Homo sapien
catgcccacgctgaatgctaacttg

SEQ ID NO: 2278404 - DNA, 25 bp, Homo sapien
aaatgcatgtcggtgttagctagtg

SEQ ID NO: 2278405 - DNA, 25 bp, Homo sapien
tgttgtcagcgttgagtacaaaagc

SEQ ID NO: 2278406 - DNA, 25 bp, Homo sapien
tatcactcacatttgaccagaggga

SEQ ID NO: 2278407 - DNA, 25 bp, Homo sapien
gctgtgcctcgtgcctcagtgttct

SEQ ID NO: 2278408 - DNA, 25 bp, Homo sapien
attctaaaaagtcagcgccctcagg

SEQ ID NO: 2278409 - DNA, 25 bp, Homo sapien
tcctgagcgcggtggccagatcaca

SEQ ID NO: 2278410 - DNA, 25 bp, Homo sapien
tgtcgagcactgcacagaattggct

SEQ ID NO: 2278411 - DNA, 25 bp, Homo sapien
ctcaccttcgtggcagatatcgcta

SEQ ID NO: 2278412 - DNA, 25 bp, Homo sapien
gcgcacccgtaaggcctctgctaaa

SEQ ID NO: 2278413 - DNA, 25 bp, Homo sapien
tcctgtccctgcaagatcaaaactc

SEQ ID NO: 2278414 - DNA, 25 bp, Homo sapien
aagccccgctagctctgtctgctca

SEQ ID NO: 2278415 - DNA, 25 bp, Homo sapien
gctagaatatctgttggtctaaaat

SEQ ID NO: 2278416 - DNA, 25 bp, Homo sapien
aaatagtattgtagccagccacagg

SEQ ID NO: 2278417 - DNA, 25 bp, Homo sapien
agagagcatcacgtttcttatatgc

SEQ ID NO: 2278418 - DNA, 25 bp, Homo sapien
gcatcacgtttcttatatgctagaa

SEQ ID NO: 2278419 - DNA, 25 bp, Homo sapien
cctgttgggtgtaatctgctgccat

SEQ ID NO: 2278420 - DNA, 25 bp, Homo sapien
ccttttcctgttgggtgtaatctgc

SEQ ID NO: 2278421 - DNA, 25 bp, Homo sapien
tttcctgttgggtgtaatctgctgc

SEQ ID NO: 2278422 - DNA, 25 bp, Homo sapien
gttgggtgtaatctgctgccatctc

SEQ ID NO: 2278423 - DNA, 25 bp, Homo sapien
gcaaagcaaggaaacgcgtagagcc

SEQ ID NO: 2278424 - DNA, 25 bp, Homo sapien
gcgtagagccaagcttgagttctga

SEQ ID NO: 2278425 - DNA, 25 bp, Homo sapien
acccattgttccctagaatcagtaa

SEQ ID NO: 2278426 - DNA, 25 bp, Homo sapien
caaatacagggcgtccatctctttc

SEQ ID NO: 2278427 - DNA, 25 bp, Homo sapien
gctgggcttaattctggctctctcc

SEQ ID NO: 2278428 - DNA, 25 bp, Homo sapien
ggattggccatctgctcaccatggg

SEQ ID NO: 2278429 - DNA, 25 bp, Homo sapien
tcagtgggccggcaaatctgcattg

SEQ ID NO: 2278430 - DNA, 25 bp, Homo sapien
gcaaccaacttagaactgacatctt

SEQ ID NO: 2278431 - DNA, 25 bp, Homo sapien
cgggtgtcttcaggttctgttttct

SEQ ID NO: 2278432 - DNA, 25 bp, Homo sapien
ctccatctagaaaagggctgccttc

SEQ ID NO: 2278433 - DNA, 25 bp, Homo sapien
tagaaaagggctgccttcgtggaat

SEQ ID NO: 2278434 - DNA, 25 bp, Homo sapien
caagagcagtttagggaaacgggtg

SEQ ID NO: 2278435 - DNA, 25 bp, Homo sapien
cagaccgacactgcctgatcgatcg

SEQ ID NO: 2278436 - DNA, 25 bp, Homo sapien
tgcagaccgacactgcctgatcgat

SEQ ID NO: 2278437 - DNA, 25 bp, Homo sapien
gacactgcctgatcgatcgcctcgg

SEQ ID NO: 2278438 - DNA, 25 bp, Homo sapien
actgcctgatcgatcgcctcggaag

SEQ ID NO: 2278439 - DNA, 25 bp, Homo sapien
tcctaggtgatgcaatgctgagggt

SEQ ID NO: 2278440 - DNA, 25 bp, Homo sapien
taggtgatgcaatgctgagggtcca

SEQ ID NO: 2278441 - DNA, 25 bp, Homo sapien
gctcctaggtgatgcaatgctgagg

SEQ ID NO: 2278442 - DNA, 25 bp, Homo sapien
cctaggtgatgcaatgctgagggtc

SEQ ID NO: 2278443 - DNA, 25 bp, Homo sapien
cgcaaccaccaaaattgtctccaga

SEQ ID NO: 2278444 - DNA, 25 bp, Homo sapien
cagccgcaaccaccaaaattgtctc

SEQ ID NO: 2278445 - DNA, 25 bp, Homo sapien
gccgcaaccaccaaaattgtctcca

SEQ ID NO: 2278446 - DNA, 25 bp, Homo sapien
gcaaccaccaaaattgtctccagac

SEQ ID NO: 2278447 - DNA, 25 bp, Homo sapien
tggagctctgggacccacaagcctg

SEQ ID NO: 2278448 - DNA, 25 bp, Homo sapien
ctggagctctgggacccacaagcct

SEQ ID NO: 2278449 - DNA, 25 bp, Homo sapien
tctggagctctgggacccacaagcc

SEQ ID NO: 2278450 - DNA, 25 bp, Homo sapien
ttgcctctcaatcatgaccgtggca

SEQ ID NO: 2278451 - DNA, 25 bp, Homo sapien
caggaagaagtagcccctctactac

SEQ ID NO: 2278452 - DNA, 25 bp, Homo sapien
gaccgtggcaggaagaagtagcccc

SEQ ID NO: 2278453 - DNA, 25 bp, Homo sapien
ttctcccttaaagttatcccatgtc

SEQ ID NO: 2278454 - DNA, 25 bp, Homo sapien
tatgtaaagaaatgtacgcccgtac

SEQ ID NO: 2278455 - DNA, 25 bp, Homo sapien
ggtgcgacagcaagttcagcgtctc

SEQ ID NO: 2278456 - DNA, 25 bp, Homo sapien
tcttaaaaatgatccgagtagtcct

SEQ ID NO: 2278457 - DNA, 25 bp, Homo sapien
cacatctcgttttccggtgcgacag

SEQ ID NO: 2278458 - DNA, 25 bp, Homo sapien
tatgcttagtgaaatgggattctct

SEQ ID NO: 2278459 - DNA, 25 bp, Homo sapien
tggtgagtttcaccaaaccgccaca

SEQ ID NO: 2278460 - DNA, 25 bp, Homo sapien
aaaatcccctcttttatgcttagtg

SEQ ID NO: 2278461 - DNA, 25 bp, Homo sapien
tgagtttcaccaaaccgccacatct

SEQ ID NO: 2278462 - DNA, 25 bp, Homo sapien
atgcttaattgcacatgtttgacta

SEQ ID NO: 2278463 - DNA, 25 bp, Homo sapien
tgcttaattgcacatgtttgactaa

SEQ ID NO: 2278464 - DNA, 25 bp, Homo sapien
catgcttaattgcacatgtttgact

SEQ ID NO: 2278465 - DNA, 25 bp, Homo sapien
acatgcttaattgcacatgtttgac

SEQ ID NO: 2278466 - DNA, 25 bp, Homo sapien
aaagttgagtgatctgtttggatgc

SEQ ID NO: 2278467 - DNA, 25 bp, Homo sapien
ccacacgtgtctaattttgggatat

SEQ ID NO: 2278468 - DNA, 25 bp, Homo sapien
tcactgaatgtgagttgtgtgggct

SEQ ID NO: 2278469 - DNA, 25 bp, Homo sapien
gagttcactatgtggagaaatgagg

SEQ ID NO: 2278470 - DNA, 25 bp, Homo sapien
tgactgggcaccatcatgagatggg

SEQ ID NO: 2278471 - DNA, 25 bp, Homo sapien
ggctgactgggcaccatcatgagat

SEQ ID NO: 2278472 - DNA, 25 bp, Homo sapien
ctgggcaccatcatgagatgggcag

SEQ ID NO: 2278473 - DNA, 25 bp, Homo sapien
tggtcgagtcattctgggctgactg

SEQ ID NO: 2278474 - DNA, 25 bp, Homo sapien
atgaatactgcatctttttgtccca

SEQ ID NO: 2278475 - DNA, 25 bp, Homo sapien
tatttcccaatagaaatgaatactg

SEQ ID NO: 2278476 - DNA, 25 bp, Homo sapien
gttaagaaaagccggcatcacagca

SEQ ID NO: 2278477 - DNA, 25 bp, Homo sapien
aaatataaaactcatataggccggg

SEQ ID NO: 2278478 - DNA, 25 bp, Homo sapien
cctgcctcagcctcggctaattttt

SEQ ID NO: 2278479 - DNA, 25 bp, Homo sapien
ctgcctcagcctcggctaatttttt

SEQ ID NO: 2278480 - DNA, 25 bp, Homo sapien
ttatgctcaggaccaacagtctgcc

SEQ ID NO: 2278481 - DNA, 25 bp, Homo sapien
tatgctcaggaccaacagtctgcca

SEQ ID NO: 2278482 - DNA, 25 bp, Homo sapien
tgctcaggaccaacagtctgccaaa

SEQ ID NO: 2278483 - DNA, 25 bp, Homo sapien
cttatgctcaggaccaacagtctgc

SEQ ID NO: 2278484 - DNA, 25 bp, Homo sapien
ttcaacaatgattgacgctcatgtt

SEQ ID NO: 2278485 - DNA, 25 bp, Homo sapien
atgttcaacaatgattgacgctcat

SEQ ID NO: 2278486 - DNA, 25 bp, Homo sapien
aacaatgattgacgctcatgttgat

SEQ ID NO: 2278487 - DNA, 25 bp, Homo sapien
tgttcaacaatgattgacgctcatg

SEQ ID NO: 2278488 - DNA, 25 bp, Homo sapien
gccttttcgtactctgagcagcacc

SEQ ID NO: 2278489 - DNA, 25 bp, Homo sapien
ttttcgtactctgagcagcaccatg

SEQ ID NO: 2278490 - DNA, 25 bp, Homo sapien
ccttttcgtactctgagcagcacca

SEQ ID NO: 2278491 - DNA, 25 bp, Homo sapien
tagccttttcgtactctgagcagca

SEQ ID NO: 2278492 - DNA, 25 bp, Homo sapien
ttcctggtccagatagttaccgtgt

SEQ ID NO: 2278493 - DNA, 25 bp, Homo sapien
catttgtttcctctggagcggtcga

SEQ ID NO: 2278494 - DNA, 25 bp, Homo sapien
tggtccagatagttaccgtgtcatt

SEQ ID NO: 2278495 - DNA, 25 bp, Homo sapien
tggagcggtcgattggtcatgaact

SEQ ID NO: 2278496 - DNA, 25 bp, Homo sapien
tgtacattttgttgcatttccgtgg

SEQ ID NO: 2278497 - DNA, 25 bp, Homo sapien
gcatttccgtggtgaaggacattgg

SEQ ID NO: 2278498 - DNA, 25 bp, Homo sapien
tgcatttccgtggtgaaggacattg

SEQ ID NO: 2278499 - DNA, 25 bp, Homo sapien
ttttgttgcatttccgtggtgaagg

SEQ ID NO: 2278500 - DNA, 25 bp, Homo sapien
ttttgctttttgccagcactgacat

SEQ ID NO: 2278501 - DNA, 25 bp, Homo sapien
tgctttttgccagcactgacattgg

SEQ ID NO: 2278502 - DNA, 25 bp, Homo sapien
ttggcctttgcagtctcttgacttc

SEQ ID NO: 2278503 - DNA, 25 bp, Homo sapien
ttgctttttgccagcactgacattg

SEQ ID NO: 2278504 - DNA, 25 bp, Homo sapien
gtgtgtgtgggtgcttattaaataa

SEQ ID NO: 2278505 - DNA, 25 bp, Homo sapien
tacaaggcataggaacatcagaatc

SEQ ID NO: 2278506 - DNA, 25 bp, Homo sapien
catagttccatgtttctacaaggca

SEQ ID NO: 2278507 - DNA, 25 bp, Homo sapien
ggctcagttaggacctatgtttgca

SEQ ID NO: 2278508 - DNA, 25 bp, Homo sapien
tctgggatgggtagtagttggagat

SEQ ID NO: 2278509 - DNA, 25 bp, Homo sapien
ttctgggatgggtagtagttggaga

SEQ ID NO: 2278510 - DNA, 25 bp, Homo sapien
ctgggatgggtagtagttggagatc

SEQ ID NO: 2278511 - DNA, 25 bp, Homo sapien
ttttagctgagacttctgggatggg

SEQ ID NO: 2278512 - DNA, 25 bp, Homo sapien
gagcttttagcaacaaagttaccca

SEQ ID NO: 2278513 - DNA, 25 bp, Homo sapien
ccgtgcctggccaaacataaactta

SEQ ID NO: 2278514 - DNA, 25 bp, Homo sapien
caggatactccgatctcttgacctc

SEQ ID NO: 2278515 - DNA, 25 bp, Homo sapien
ccaaatgtctttatccagaagagct

SEQ ID NO: 2278516 - DNA, 25 bp, Homo sapien
agtacatggaaaatactgggcatag

SEQ ID NO: 2278517 - DNA, 25 bp, Homo sapien
ctgagataataagacagtacatgga

SEQ ID NO: 2278518 - DNA, 25 bp, Homo sapien
gacagtacatggaaaatactgggca

SEQ ID NO: 2278519 - DNA, 25 bp, Homo sapien
actgagataataagacagtacatgg

SEQ ID NO: 2278520 - DNA, 25 bp, Homo sapien
gagttatggctctgccggctgccag

SEQ ID NO: 2278521 - DNA, 25 bp, Homo sapien
ttggtgacagtgtgagttatggctc

SEQ ID NO: 2278522 - DNA, 25 bp, Homo sapien
gctgccagtggagccagccgctctg

SEQ ID NO: 2278523 - DNA, 25 bp, Homo sapien
cacaacatcttgtagcctgattggg

SEQ ID NO: 2278524 - DNA, 25 bp, Homo sapien
gctcttgcatagatgcaaacagcca

SEQ ID NO: 2278525 - DNA, 25 bp, Homo sapien
tttcctgcgagctcttgcatagatg

SEQ ID NO: 2278526 - DNA, 25 bp, Homo sapien
cctgcgagctcttgcatagatgcaa

SEQ ID NO: 2278527 - DNA, 25 bp, Homo sapien
ctcttgcatagatgcaaacagccag

SEQ ID NO: 2278528 - DNA, 25 bp, Homo sapien
aacacagggctgtgttacagcacaa

SEQ ID NO: 2278529 - DNA, 25 bp, Homo sapien
tagtgaacagctgcccaaacgattg

SEQ ID NO: 2278530 - DNA, 25 bp, Homo sapien
caagcgtttgcatgatcactcccaa

SEQ ID NO: 2278531 - DNA, 25 bp, Homo sapien
ggtcaattgccttttcatatagtga

SEQ ID NO: 2278532 - DNA, 25 bp, Homo sapien
gggtgcaggcaactggattatccac

SEQ ID NO: 2278533 - DNA, 25 bp, Homo sapien
gctccagggacgtctttggcttcca

SEQ ID NO: 2278534 - DNA, 25 bp, Homo sapien
tctaataggctgagttgtgtccatg

SEQ ID NO: 2278535 - DNA, 25 bp, Homo sapien
gaatccctttgctcaagactaaagt

SEQ ID NO: 2278536 - DNA, 25 bp, Homo sapien
ccacagctcgacaagtgggtgccac

SEQ ID NO: 2278537 - DNA, 25 bp, Homo sapien
ccttgtagaccacagctcgacaagt

SEQ ID NO: 2278538 - DNA, 25 bp, Homo sapien
tagaccacagctcgacaagtgggtg

SEQ ID NO: 2278539 - DNA, 25 bp, Homo sapien
gttccttgtagaccacagctcgaca

SEQ ID NO: 2278540 - DNA, 25 bp, Homo sapien
ctgcagcccgtcctcactttgctgt

SEQ ID NO: 2278541 - DNA, 25 bp, Homo sapien
tgcagcccgtcctcactttgctgtc

SEQ ID NO: 2278542 - DNA, 25 bp, Homo sapien
agagtcatctctcacgcaggctgcc

SEQ ID NO: 2278543 - DNA, 25 bp, Homo sapien
ctctcacgcaggctgcctgacacag

SEQ ID NO: 2278544 - DNA, 25 bp, Homo sapien
tggaagaggcgttggagggtacctc

SEQ ID NO: 2278545 - DNA, 25 bp, Homo sapien
gtttgctgattttatggaagaggcg

SEQ ID NO: 2278546 - DNA, 25 bp, Homo sapien
tgattttatggaagaggcgttggag

SEQ ID NO: 2278547 - DNA, 25 bp, Homo sapien
gggtacctcggttcagatgtgtcat

SEQ ID NO: 2278548 - DNA, 25 bp, Homo sapien
tcttgcatgttgtgacaccttcacc

SEQ ID NO: 2278549 - DNA, 25 bp, Homo sapien
atcttgcatgttgtgacaccttcac

SEQ ID NO: 2278550 - DNA, 25 bp, Homo sapien
caccgtccccaagatgatagtggag

SEQ ID NO: 2278551 - DNA, 25 bp, Homo sapien
cgtccccaagatgatagtggagatc

SEQ ID NO: 2278552 - DNA, 25 bp, Homo sapien
ccgtccccaagatgatagtggagat

SEQ ID NO: 2278553 - DNA, 25 bp, Homo sapien
accgtccccaagatgatagtggaga

SEQ ID NO: 2278554 - DNA, 25 bp, Homo sapien
agacaggcttgcggtaagttgtacc

SEQ ID NO: 2278555 - DNA, 25 bp, Homo sapien
tggccaccagggctaacacgaatcc

SEQ ID NO: 2278556 - DNA, 25 bp, Homo sapien
ttggccaccagggctaacacgaatc

SEQ ID NO: 2278557 - DNA, 25 bp, Homo sapien
gatagacaggcttgcggtaagttgt

SEQ ID NO: 2278558 - DNA, 25 bp, Homo sapien
gatcaatgaggataacccccaaaaa

SEQ ID NO: 2278559 - DNA, 25 bp, Homo sapien
atggatcaatgaggataacccccaa

SEQ ID NO: 2278560 - DNA, 25 bp, Homo sapien
caaaaatttttatgtggaatcttca

SEQ ID NO: 2278561 - DNA, 25 bp, Homo sapien
ctttatagaatggatcaatgaggat

SEQ ID NO: 2278562 - DNA, 25 bp, Homo sapien
ctccctgtgcttgtggactggtttg

SEQ ID NO: 2278563 - DNA, 25 bp, Homo sapien
tggactggtttggtgatccactggg

SEQ ID NO: 2278564 - DNA, 25 bp, Homo sapien
ccctgtgcttgtggactggtttggt

SEQ ID NO: 2278565 - DNA, 25 bp, Homo sapien
actggtttggtgatccactgggtgt

SEQ ID NO: 2278566 - DNA, 25 bp, Homo sapien
agtattgcacattctccaatctgcc

SEQ ID NO: 2278567 - DNA, 25 bp, Homo sapien
tattgcacattctccaatctgccag

SEQ ID NO: 2278568 - DNA, 25 bp, Homo sapien
gtattgcacattctccaatctgcca

SEQ ID NO: 2278569 - DNA, 25 bp, Homo sapien
attgcacattctccaatctgccaga

SEQ ID NO: 2278570 - DNA, 25 bp, Homo sapien
tcactcttagaccaaaccttctctt

SEQ ID NO: 2278571 - DNA, 25 bp, Homo sapien
aaccaaatgtgctcccatctcaaca

SEQ ID NO: 2278572 - DNA, 25 bp, Homo sapien
gtgctcccatctcaacacagttctg

SEQ ID NO: 2278573 - DNA, 25 bp, Homo sapien
ctgctcactcttagaccaaaccttc

SEQ ID NO: 2278574 - DNA, 25 bp, Homo sapien
gactattgaagcacattgctctgca

SEQ ID NO: 2278575 - DNA, 25 bp, Homo sapien
tctgcagaatgattgggctcaccta

SEQ ID NO: 2278576 - DNA, 25 bp, Homo sapien
gattgggctcacctaggtgccaaaa

SEQ ID NO: 2278577 - DNA, 25 bp, Homo sapien
taggtttccagaagactattgaagc

SEQ ID NO: 2278578 - DNA, 25 bp, Homo sapien
cataaatttgcatattattcttgca

SEQ ID NO: 2278579 - DNA, 25 bp, Homo sapien
ataaatttgcatattattcttgcac

SEQ ID NO: 2278580 - DNA, 25 bp, Homo sapien
gcatattattcttgcacagcagcca

SEQ ID NO: 2278581 - DNA, 25 bp, Homo sapien
tttgcatattattcttgcacagcag

SEQ ID NO: 2278582 - DNA, 25 bp, Homo sapien
gccccacaagcatagggttgatgta

SEQ ID NO: 2278583 - DNA, 25 bp, Homo sapien
tttggttccccaaatcgtggactca

SEQ ID NO: 2278584 - DNA, 25 bp, Homo sapien
tgtggatcttaaacctagagctctg

SEQ ID NO: 2278585 - DNA, 25 bp, Homo sapien
aatccgtagagcagaacaaccaggc

SEQ ID NO: 2278586 - DNA, 25 bp, Homo sapien
gaggcaggtccttttctccgccggc

SEQ ID NO: 2278587 - DNA, 25 bp, Homo sapien
tggccgactgctgggtcctagtctg

SEQ ID NO: 2278588 - DNA, 25 bp, Homo sapien
acccttgggccttggccgactgctg

SEQ ID NO: 2278589 - DNA, 25 bp, Homo sapien
aggaggcaggtccttttctccgccg

SEQ ID NO: 2278590 - DNA, 25 bp, Homo sapien
tgaggctttgtcgtgctccttgctc

SEQ ID NO: 2278591 - DNA, 25 bp, Homo sapien
gcttcctatcagaaggtgctgtcca

SEQ ID NO: 2278592 - DNA, 25 bp, Homo sapien
gaggctttgtcgtgctccttgctcc

SEQ ID NO: 2278593 - DNA, 25 bp, Homo sapien
cttgcttcctatcagaaggtgctgt

SEQ ID NO: 2278594 - DNA, 25 bp, Homo sapien
ttaagccaggtgtatatgcggtgtc

SEQ ID NO: 2278595 - DNA, 25 bp, Homo sapien
cggtgtcaaccactggtcgcttgcc

SEQ ID NO: 2278596 - DNA, 25 bp, Homo sapien
tgggtctccaactggcagcgagtca

SEQ ID NO: 2278597 - DNA, 25 bp, Homo sapien
agcgagtcaataactttaagccagg

SEQ ID NO: 2278598 - DNA, 25 bp, Homo sapien
acagatgaagggtaactgagagatg

SEQ ID NO: 2278599 - DNA, 25 bp, Homo sapien
taactgagagatgctatatggctgc

SEQ ID NO: 2278600 - DNA, 25 bp, Homo sapien
actgagagatgctatatggctgcac

SEQ ID NO: 2278601 - DNA, 25 bp, Homo sapien
tgaagggtaactgagagatgctata

SEQ ID NO: 2278602 - DNA, 25 bp, Homo sapien
tgttcactggtcaaggtactataga

SEQ ID NO: 2278603 - DNA, 25 bp, Homo sapien
tcactggtcaaggtactatagacca

SEQ ID NO: 2278604 - DNA, 25 bp, Homo sapien
ttcactggtcaaggtactatagacc

SEQ ID NO: 2278605 - DNA, 25 bp, Homo sapien
tgtgttcactggtcaaggtactata

SEQ ID NO: 2278606 - DNA, 25 bp, Homo sapien
tctcttgttcaatggtcaggacggc

SEQ ID NO: 2278607 - DNA, 25 bp, Homo sapien
ggtcaggacggcaagaatttgttct

SEQ ID NO: 2278608 - DNA, 25 bp, Homo sapien
taccagtataagaaagttagctcaa

SEQ ID NO: 2278609 - DNA, 25 bp, Homo sapien
cagaaatacttgagatcgaacacca

SEQ ID NO: 2278610 - DNA, 25 bp, Homo sapien
aaccgaaggtatcagctggggatgc

SEQ ID NO: 2278611 - DNA, 25 bp, Homo sapien
ccgaaggtatcagctggggatgcat

SEQ ID NO: 2278612 - DNA, 25 bp, Homo sapien
accgaaggtatcagctggggatgca

SEQ ID NO: 2278613 - DNA, 25 bp, Homo sapien
gatgcatttgagctttgcatggtgc

SEQ ID NO: 2278614 - DNA, 25 bp, Homo sapien
gctctaacttgtgcactcctgtgcc

SEQ ID NO: 2278615 - DNA, 25 bp, Homo sapien
tcctgtgcctctcttacagcgtgaa

SEQ ID NO: 2278616 - DNA, 25 bp, Homo sapien
gctttgcatggtgctctaacttgtg

SEQ ID NO: 2278617 - DNA, 25 bp, Homo sapien
tctcagcccacgtcttgttgtcagt

SEQ ID NO: 2278618 - DNA, 25 bp, Homo sapien
tgaacagttcctttcactctcagcc

SEQ ID NO: 2278619 - DNA, 25 bp, Homo sapien
gttgtcagtaagaggaaaatagcag

SEQ ID NO: 2278620 - DNA, 25 bp, Homo sapien
gaaggctctccagtcaataggacaa

SEQ ID NO: 2278621 - DNA, 25 bp, Homo sapien
tccgtgctgatggtcatcagatggg

SEQ ID NO: 2278622 - DNA, 25 bp, Homo sapien
gcttccgtgctgatggtcatcagat

SEQ ID NO: 2278623 - DNA, 25 bp, Homo sapien
cagcttccgtgctgatggtcatcag

SEQ ID NO: 2278624 - DNA, 25 bp, Homo sapien
tgctgatggtcatcagatgggcccc

SEQ ID NO: 2278625 - DNA, 25 bp, Homo sapien
gttaaatggcgtctggtccacccaa

SEQ ID NO: 2278626 - DNA, 25 bp, Homo sapien
actctgcgtgggttaaatggcgtct

SEQ ID NO: 2278627 - DNA, 25 bp, Homo sapien
tctaagtccaaggaaataggaaagc

SEQ ID NO: 2278628 - DNA, 25 bp, Homo sapien
gaaagccgtctatccagaaactgaa

SEQ ID NO: 2278629 - DNA, 25 bp, Homo sapien
attccaggcccatttatcttggtta

SEQ ID NO: 2278630 - DNA, 25 bp, Homo sapien
ttctccctgagagttgtcgggttca

SEQ ID NO: 2278631 - DNA, 25 bp, Homo sapien
gttgtcgggttcattcttatgccag

SEQ ID NO: 2278632 - DNA, 25 bp, Homo sapien
caggtattttacaaatcctacttgc

SEQ ID NO: 2278633 - DNA, 25 bp, Homo sapien
tctgtgttccaatgacgcacgtaca

SEQ ID NO: 2278634 - DNA, 25 bp, Homo sapien
agtaatgaggtcgagtaatccccag

SEQ ID NO: 2278635 - DNA, 25 bp, Homo sapien
agtaacttcctgtgataccaaaggg

SEQ ID NO: 2278636 - DNA, 25 bp, Homo sapien
tctctaatgaagcacacctgggtct

SEQ ID NO: 2278637 - DNA, 25 bp, Homo sapien
tatcaaagacaacttccccaaccta

SEQ ID NO: 2278638 - DNA, 25 bp, Homo sapien
taccagaaatagacaggaagaatgg

SEQ ID NO: 2278639 - DNA, 25 bp, Homo sapien
ggtactccacaagaagatcaactcc

SEQ ID NO: 2278640 - DNA, 25 bp, Homo sapien
gaaactgtaccagccagaagagatt

SEQ ID NO: 2278641 - DNA, 25 bp, Homo sapien
cctaagtggcaatcgtattcaaccg

SEQ ID NO: 2278642 - DNA, 25 bp, Homo sapien
gataatttctatgagctccacacta

SEQ ID NO: 2278643 - DNA, 25 bp, Homo sapien
tattcaaccgtttagatgcttcttt

SEQ ID NO: 2278644 - DNA, 25 bp, Homo sapien
gcacaatcatggcttcattggagcc

SEQ ID NO: 2278645 - DNA, 25 bp, Homo sapien
cttaactggttgtgatatcatagga

SEQ ID NO: 2278646 - DNA, 25 bp, Homo sapien
ttgcccccagtgataggccttggta

SEQ ID NO: 2278647 - DNA, 25 bp, Homo sapien
ctggttgtgatatcataggaaatga

SEQ ID NO: 2278648 - DNA, 25 bp, Homo sapien
taggccttggtagcttaactggttg

SEQ ID NO: 2278649 - DNA, 25 bp, Homo sapien
taacctcatcctgtgtcccgagtgc

SEQ ID NO: 2278650 - DNA, 25 bp, Homo sapien
tggctttgccaatcaacagctgcat

SEQ ID NO: 2278651 - DNA, 25 bp, Homo sapien
cacattacgttagtttaagatggcc

SEQ ID NO: 2278652 - DNA, 25 bp, Homo sapien
gagtgctgccacgtgcatggttgca

SEQ ID NO: 2278653 - DNA, 25 bp, Homo sapien
tccccagtcagtgcccggctcctcc

SEQ ID NO: 2278654 - DNA, 25 bp, Homo sapien
tgggtccccagtcagtgcccggctc

SEQ ID NO: 2278655 - DNA, 25 bp, Homo sapien
ggtccccagtcagtgcccggctcct

SEQ ID NO: 2278656 - DNA, 25 bp, Homo sapien
ctgggtccccagtcagtgcccggct

SEQ ID NO: 2278657 - DNA, 25 bp, Homo sapien
aatcactcagtgtcttggaacgttc

SEQ ID NO: 2278658 - DNA, 25 bp, Homo sapien
gattttcagcaaatcactcagtgtc

SEQ ID NO: 2278659 - DNA, 25 bp, Homo sapien
ttcagcaaatcactcagtgtcttgg

SEQ ID NO: 2278660 - DNA, 25 bp, Homo sapien
tagatgtgtgattttcagcaaatca

SEQ ID NO: 2278661 - DNA, 25 bp, Homo sapien
acggatttgtcaagtgtggtggtca

SEQ ID NO: 2278662 - DNA, 25 bp, Homo sapien
aacagtctttaaccagcatgctatg

SEQ ID NO: 2278663 - DNA, 25 bp, Homo sapien
gtacaaatgtgtgcaacaacggatt

SEQ ID NO: 2278664 - DNA, 25 bp, Homo sapien
gccaggattcgaataaaaacagtct

SEQ ID NO: 2278665 - DNA, 25 bp, Homo sapien
aatccttctgtatgagaaaggagat

SEQ ID NO: 2278666 - DNA, 25 bp, Homo sapien
gaatccttctgtatgagaaaggaga

SEQ ID NO: 2278667 - DNA, 25 bp, Homo sapien
tccttctgtatgagaaaggagattt

SEQ ID NO: 2278668 - DNA, 25 bp, Homo sapien
atccttctgtatgagaaaggagatt

SEQ ID NO: 2278669 - DNA, 25 bp, Homo sapien
gcagcagtgggaaggtagggaaaga

SEQ ID NO: 2278670 - DNA, 25 bp, Homo sapien
gggagattgctgtgcgtcctgccag

SEQ ID NO: 2278671 - DNA, 25 bp, Homo sapien
ctactctgctaggactgagcgcggg

SEQ ID NO: 2278672 - DNA, 25 bp, Homo sapien
tgtgcgtcctgccagactactctgc

SEQ ID NO: 2278673 - DNA, 25 bp, Homo sapien
cagaaatggcctaggccaggacaag

SEQ ID NO: 2278674 - DNA, 25 bp, Homo sapien
tgtgaacaagacaccctaataatgg

SEQ ID NO: 2278675 - DNA, 25 bp, Homo sapien
ggctctcgtgggtctcttcatctca

SEQ ID NO: 2278676 - DNA, 25 bp, Homo sapien
taatgggttgatgtctgaagtagca

SEQ ID NO: 2278677 - DNA, 25 bp, Homo sapien
cagaaatgccaatcaggtcaaggtt

SEQ ID NO: 2278678 - DNA, 25 bp, Homo sapien
ccagggacgtgctgcaattggtgca

SEQ ID NO: 2278679 - DNA, 25 bp, Homo sapien
gggactttgatagcaacttccagga

SEQ ID NO: 2278680 - DNA, 25 bp, Homo sapien
tcagtttagaagactctccggcccc

SEQ ID NO: 2278681 - DNA, 25 bp, Homo sapien
gaatgcaacattgtcccctactggg

SEQ ID NO: 2278682 - DNA, 25 bp, Homo sapien
cctgggaagggctgcatgaaaattc

SEQ ID NO: 2278683 - DNA, 25 bp, Homo sapien
accacgaaagaactttcaaagcctg

SEQ ID NO: 2278684 - DNA, 25 bp, Homo sapien
ttactgctggaatacttttgtagaa

SEQ ID NO: 2278685 - DNA, 25 bp, Homo sapien
aattcagttcgtctctccagacagc

SEQ ID NO: 2278686 - DNA, 25 bp, Homo sapien
ctgtcagactaagacagagaaccat

SEQ ID NO: 2278687 - DNA, 25 bp, Homo sapien
tcaaatttgaatgtgaagggccaat

SEQ ID NO: 2278688 - DNA, 25 bp, Homo sapien
gggccaatgcactgtcagactaaga

SEQ ID NO: 2278689 - DNA, 25 bp, Homo sapien
aatgtgaagggccaatgcactgtca

SEQ ID NO: 2278690 - DNA, 25 bp, Homo sapien
gggatcagaggatcctgaagtcaga

SEQ ID NO: 2278691 - DNA, 25 bp, Homo sapien
ggatcagaggatcctgaagtcagag

SEQ ID NO: 2278692 - DNA, 25 bp, Homo sapien
gatcagaggatcctgaagtcagaga

SEQ ID NO: 2278693 - DNA, 25 bp, Homo sapien
gtggaagatttaattcgaataactg

SEQ ID NO: 2278694 - DNA, 25 bp, Homo sapien
gaagtggaagatttaattcgaataa

SEQ ID NO: 2278695 - DNA, 25 bp, Homo sapien
aagatttaattcgaataactgccac

SEQ ID NO: 2278696 - DNA, 25 bp, Homo sapien
ttgaagtggaagatttaattcgaat

SEQ ID NO: 2278697 - DNA, 25 bp, Homo sapien
taacttccgtgaactctgaatgcag

SEQ ID NO: 2278698 - DNA, 25 bp, Homo sapien
tctgatttgattagtagcccagact

SEQ ID NO: 2278699 - DNA, 25 bp, Homo sapien
gattagtagcccagacttcattcat

SEQ ID NO: 2278700 - DNA, 25 bp, Homo sapien
tccgtgaactctgaatgcagctctt

SEQ ID NO: 2278701 - DNA, 25 bp, Homo sapien
gatggcagctataacaggctttgcg

SEQ ID NO: 2278702 - DNA, 25 bp, Homo sapien
ctataacaggctttgcggccttttc

SEQ ID NO: 2278703 - DNA, 25 bp, Homo sapien
ccactgatggcagctataacaggct

SEQ ID NO: 2278704 - DNA, 25 bp, Homo sapien
gcagctataacaggctttgcggcct

SEQ ID NO: 2278705 - DNA, 25 bp, Homo sapien
cccattttctttgcgctatctgcat

SEQ ID NO: 2278706 - DNA, 25 bp, Homo sapien
gcttccaggtattcgattgtccatt

SEQ ID NO: 2278707 - DNA, 25 bp, Homo sapien
gacttcaggggcacctaatattgtt

SEQ ID NO: 2278708 - DNA, 25 bp, Homo sapien
gcatgaatgtttctactagtcagca

SEQ ID NO: 2278709 - DNA, 25 bp, Homo sapien
cagcatcaatccctcgctcaattcc

SEQ ID NO: 2278710 - DNA, 25 bp, Homo sapien
gataaccagcatcaatccctcgctc

SEQ ID NO: 2278711 - DNA, 25 bp, Homo sapien
agcatcaatccctcgctcaattcca

SEQ ID NO: 2278712 - DNA, 25 bp, Homo sapien
gagataaccagcatcaatccctcgc

SEQ ID NO: 2278713 - DNA, 25 bp, Homo sapien
ggtagagacccatcaaggcctttga

SEQ ID NO: 2278714 - DNA, 25 bp, Homo sapien
catcaaggcctttgattcactggtc

SEQ ID NO: 2278715 - DNA, 25 bp, Homo sapien
atggtagagacccatcaaggccttt

SEQ ID NO: 2278716 - DNA, 25 bp, Homo sapien
ctgaccatggtagagacccatcaag

SEQ ID NO: 2278717 - DNA, 25 bp, Homo sapien
ggcctagcctagtgagtgtggcatc

SEQ ID NO: 2278718 - DNA, 25 bp, Homo sapien
atgatgttagagctttcttattcac

SEQ ID NO: 2278719 - DNA, 25 bp, Homo sapien
aaatgatgttagagctttcttattc

SEQ ID NO: 2278720 - DNA, 25 bp, Homo sapien
aatgatgttagagctttcttattca

SEQ ID NO: 2278721 - DNA, 25 bp, Homo sapien
cccagtcaagttgctgaagatggaa

SEQ ID NO: 2278722 - DNA, 25 bp, Homo sapien
tgtgcttaagactaaggtcctcaaa

SEQ ID NO: 2278723 - DNA, 25 bp, Homo sapien
cctcaaacacagcttcaatcaccat

SEQ ID NO: 2278724 - DNA, 25 bp, Homo sapien
taagactaaggtcctcaaacacagc

SEQ ID NO: 2278725 - DNA, 25 bp, Homo sapien
ctctgtgcttaagactaaggtcctc

SEQ ID NO: 2278726 - DNA, 25 bp, Homo sapien
ggtccatccataaccacaatgatga

SEQ ID NO: 2278727 - DNA, 25 bp, Homo sapien
tggtggtatagaagccaggtccatc

SEQ ID NO: 2278728 - DNA, 25 bp, Homo sapien
ctggtggtatagaagccaggtccat

SEQ ID NO: 2278729 - DNA, 25 bp, Homo sapien
ccaggtccatccataaccacaatga

SEQ ID NO: 2278730 - DNA, 25 bp, Homo sapien
ttcagacatcatgggtgcaagacac

SEQ ID NO: 2278731 - DNA, 25 bp, Homo sapien
cttcagacatcatgggtgcaagaca

SEQ ID NO: 2278732 - DNA, 25 bp, Homo sapien
taagatactatccacatcagaattc

SEQ ID NO: 2278733 - DNA, 25 bp, Homo sapien
ggcatctttagactcactaagatac

SEQ ID NO: 2278734 - DNA, 25 bp, Homo sapien
ccccaagggctttgcgcagatcttc

SEQ ID NO: 2278735 - DNA, 25 bp, Homo sapien
gctttgcgcagatcttccgccatat

SEQ ID NO: 2278736 - DNA, 25 bp, Homo sapien
ttgagccgggccactatcttctggg

SEQ ID NO: 2278737 - DNA, 25 bp, Homo sapien
ctagcatggagtgaactgttttcca

SEQ ID NO: 2278738 - DNA, 25 bp, Homo sapien
ggggccatacagagccacaaagcag

SEQ ID NO: 2278739 - DNA, 25 bp, Homo sapien
ctgttttccataggcagcctcatac

SEQ ID NO: 2278740 - DNA, 25 bp, Homo sapien
tgcccacagctagggttagtgcact

SEQ ID NO: 2278741 - DNA, 25 bp, Homo sapien
tggtacaacttctcgttagggctat

SEQ ID NO: 2278742 - DNA, 25 bp, Homo sapien
aagcatgagacctgctcactggtac

SEQ ID NO: 2278743 - DNA, 25 bp, Homo sapien
cccacagctagggttagtgcactga

SEQ ID NO: 2278744 - DNA, 25 bp, Homo sapien
tcttggctgccactctaggcctcag

SEQ ID NO: 2278745 - DNA, 25 bp, Homo sapien
ttggctgccactctaggcctcaggg

SEQ ID NO: 2278746 - DNA, 25 bp, Homo sapien
gctgccactctaggcctcagggctt

SEQ ID NO: 2278747 - DNA, 25 bp, Homo sapien
gctcttggctgccactctaggcctc

SEQ ID NO: 2278748 - DNA, 25 bp, Homo sapien
attggttgacgtttccttgagttgc

SEQ ID NO: 2278749 - DNA, 25 bp, Homo sapien
cttaatgtgaaatcataccattggt

SEQ ID NO: 2278750 - DNA, 25 bp, Homo sapien
gcaaattagacaacttaatgtgaaa

SEQ ID NO: 2278751 - DNA, 25 bp, Homo sapien
caccacaaagcaaattagacaactt

SEQ ID NO: 2278752 - DNA, 25 bp, Homo sapien
gaaaacaccacagacaaagccattt

SEQ ID NO: 2278753 - DNA, 25 bp, Homo sapien
gagctgtagttaacttcgcagaagg

SEQ ID NO: 2278754 - DNA, 25 bp, Homo sapien
tgtagttaacttcgcagaaggaaac

SEQ ID NO: 2278755 - DNA, 25 bp, Homo sapien
taagagctgtagttaacttcgcaga

SEQ ID NO: 2278756 - DNA, 25 bp, Homo sapien
ctaatttggagacagtaaggtttgg

SEQ ID NO: 2278757 - DNA, 25 bp, Homo sapien
atgcactaatttggagacagtaagg

SEQ ID NO: 2278758 - DNA, 25 bp, Homo sapien
atttggagacagtaaggtttggata

SEQ ID NO: 2278759 - DNA, 25 bp, Homo sapien
gcactaatttggagacagtaaggtt

SEQ ID NO: 2278760 - DNA, 25 bp, Homo sapien
aggaacacgaagctatgaaaggtaa

SEQ ID NO: 2278761 - DNA, 25 bp, Homo sapien
gaacacgaagctatgaaaggtaaga

SEQ ID NO: 2278762 - DNA, 25 bp, Homo sapien
ggaacacgaagctatgaaaggtaag

SEQ ID NO: 2278763 - DNA, 25 bp, Homo sapien
acacgaagctatgaaaggtaagatg

SEQ ID NO: 2278764 - DNA, 25 bp, Homo sapien
acaaggagatctgctctcgtcttgt

SEQ ID NO: 2278765 - DNA, 25 bp, Homo sapien
caacaaggagatctgctctcgtctt

SEQ ID NO: 2278766 - DNA, 25 bp, Homo sapien
tcaacaaggagatctgctctcgtct

SEQ ID NO: 2278767 - DNA, 25 bp, Homo sapien
aacaaggagatctgctctcgtcttg

SEQ ID NO: 2278768 - DNA, 25 bp, Homo sapien
ggtgagttctcctctcaaggctttc

SEQ ID NO: 2278769 - DNA, 25 bp, Homo sapien
tccttgcctatgacactgggacgtc

SEQ ID NO: 2278770 - DNA, 25 bp, Homo sapien
aggtgagttctcctctcaaggcttt

SEQ ID NO: 2278771 - DNA, 25 bp, Homo sapien
gcctatgacactgggacgtctgcag

SEQ ID NO: 2278772 - DNA, 25 bp, Homo sapien
ctatggcatacaaggtccaccattc

SEQ ID NO: 2278773 - DNA, 25 bp, Homo sapien
ttctatggcatacaaggtccaccat

SEQ ID NO: 2278774 - DNA, 25 bp, Homo sapien
tttctatggcatacaaggtccacca

SEQ ID NO: 2278775 - DNA, 25 bp, Homo sapien
tctatggcatacaaggtccaccatt

SEQ ID NO: 2278776 - DNA, 25 bp, Homo sapien
cccagaagacgaaggtttcagtgag

SEQ ID NO: 2278777 - DNA, 25 bp, Homo sapien
tcccagttactagggcaggaaaatc

SEQ ID NO: 2278778 - DNA, 25 bp, Homo sapien
taatcccagttactagggcaggaaa

SEQ ID NO: 2278779 - DNA, 25 bp, Homo sapien
ttgaacccagaagacgaaggtttca

SEQ ID NO: 2278780 - DNA, 25 bp, Homo sapien
gctcagggtatctcataaggctgtc

SEQ ID NO: 2278781 - DNA, 25 bp, Homo sapien
tgggcatcttaataaagcagctcac

SEQ ID NO: 2278782 - DNA, 25 bp, Homo sapien
tttggctacagacatcagtgccttg

SEQ ID NO: 2278783 - DNA, 25 bp, Homo sapien
ctcagggcccaattgagaaaagatc

SEQ ID NO: 2278784 - DNA, 25 bp, Homo sapien
tgatgtcagatcatcctgaaaaatg

SEQ ID NO: 2278785 - DNA, 25 bp, Homo sapien
taaataggtaaaaatctgatgtcag

SEQ ID NO: 2278786 - DNA, 25 bp, Homo sapien
acagccccgcattccagaagttagg

SEQ ID NO: 2278787 - DNA, 25 bp, Homo sapien
tgcaccagctggaatccatgccatt

SEQ ID NO: 2278788 - DNA, 25 bp, Homo sapien
cttctgtatggctggaaagtattgc

SEQ ID NO: 2278789 - DNA, 25 bp, Homo sapien
ttctgtatggctggaaagtattgct

SEQ ID NO: 2278790 - DNA, 25 bp, Homo sapien
tctgtatggctggaaagtattgctc

SEQ ID NO: 2278791 - DNA, 25 bp, Homo sapien
gtggaagcagcccacgaatccataa

SEQ ID NO: 2278792 - DNA, 25 bp, Homo sapien
cacgaatccataaacccggaagctc

SEQ ID NO: 2278793 - DNA, 25 bp, Homo sapien
gaagctcatcaagacccactgttca

SEQ ID NO: 2278794 - DNA, 25 bp, Homo sapien
gtccctgagttagagtacaccaccc

SEQ ID NO: 2278795 - DNA, 25 bp, Homo sapien
cctcgggcgcagggtcctgccggca

SEQ ID NO: 2278796 - DNA, 25 bp, Homo sapien
ccctcgggcgcagggtcctgccggc

SEQ ID NO: 2278797 - DNA, 25 bp, Homo sapien
ctcgggcgcagggtcctgccggcat

SEQ ID NO: 2278798 - DNA, 25 bp, Homo sapien
cccctcgggcgcagggtcctgccgg

SEQ ID NO: 2278799 - DNA, 25 bp, Homo sapien
gtcctcgcacactcgcccagtttct

SEQ ID NO: 2278800 - DNA, 25 bp, Homo sapien
ccgactgcggctcccgcaggctggc

SEQ ID NO: 2278801 - DNA, 25 bp, Homo sapien
gggccttcgaggaagcgcgggccgc

SEQ ID NO: 2278802 - DNA, 25 bp, Homo sapien
cagtttctcacagcctcgcgtcccg

SEQ ID NO: 2278803 - DNA, 25 bp, Homo sapien
gcaatcccgaggacaggtcagcagc

SEQ ID NO: 2278804 - DNA, 25 bp, Homo sapien
gtagctgcgggaccgcaccacgtga

SEQ ID NO: 2278805 - DNA, 25 bp, Homo sapien
ggaggaaaacgtggaatcgaataca

SEQ ID NO: 2278806 - DNA, 25 bp, Homo sapien
ccgcggtcgctccatagaatttgtg

SEQ ID NO: 2278807 - DNA, 25 bp, Homo sapien
gaattttagctggtagccaaccggc

SEQ ID NO: 2278808 - DNA, 25 bp, Homo sapien
cgtgttcactggtcaaataatgtcc

SEQ ID NO: 2278809 - DNA, 25 bp, Homo sapien
tcatggttggtcagtctttcagctc

SEQ ID NO: 2278810 - DNA, 25 bp, Homo sapien
caaccggctaaagattaaacgctca

SEQ ID NO: 2278811 - DNA, 25 bp, Homo sapien
tccagtagcgaaacataaacgcagc

SEQ ID NO: 2278812 - DNA, 25 bp, Homo sapien
gacttcaatcccaaaggtagaggct

SEQ ID NO: 2278813 - DNA, 25 bp, Homo sapien
cttagaatgtaagctcaggtcaacc

SEQ ID NO: 2278814 - DNA, 25 bp, Homo sapien
tgacagtcctgctaatgatccagaa

SEQ ID NO: 2278815 - DNA, 25 bp, Homo sapien
aagggcctgctccacagtgcacacg

SEQ ID NO: 2278816 - DNA, 25 bp, Homo sapien
agggcctgctccacagtgcacacgg

SEQ ID NO: 2278817 - DNA, 25 bp, Homo sapien
agaagggcctgctccacagtgcaca

SEQ ID NO: 2278818 - DNA, 25 bp, Homo sapien
caagaagggcctgctccacagtgca

SEQ ID NO: 2278819 - DNA, 25 bp, Homo sapien
cctgaatagtggcagctggacatgg

SEQ ID NO: 2278820 - DNA, 25 bp, Homo sapien
agcttcctgaatagtggcagctgga

SEQ ID NO: 2278821 - DNA, 25 bp, Homo sapien
tggacatggtccaccctcccaggta

SEQ ID NO: 2278822 - DNA, 25 bp, Homo sapien
agctggacatggtccaccctcccag

SEQ ID NO: 2278823 - DNA, 25 bp, Homo sapien
gatcagcttgtgcttccttgcctgg

SEQ ID NO: 2278824 - DNA, 25 bp, Homo sapien
atttcctcttggatgtaacgtctac

SEQ ID NO: 2278825 - DNA, 25 bp, Homo sapien
cttgcctggattatttcctcttgga

SEQ ID NO: 2278826 - DNA, 25 bp, Homo sapien
cttgatcagcttgtgcttccttgcc

SEQ ID NO: 2278827 - DNA, 25 bp, Homo sapien
ccaggtttccttgctcgattgtcag

SEQ ID NO: 2278828 - DNA, 25 bp, Homo sapien
ctgatgcgacgatctgtcaaaaacc

SEQ ID NO: 2278829 - DNA, 25 bp, Homo sapien
tagtcttccctgatgcgacgatctg

SEQ ID NO: 2278830 - DNA, 25 bp, Homo sapien
ggtttccttgctcgattgtcagcac

SEQ ID NO: 2278831 - DNA, 25 bp, Homo sapien
tattcctaaaacatgcagattcatc

SEQ ID NO: 2278832 - DNA, 25 bp, Homo sapien
caaaagatcacttagtatacagact

SEQ ID NO: 2278833 - DNA, 25 bp, Homo sapien
ttcatcatattctaggtaaaaatcc

SEQ ID NO: 2278834 - DNA, 25 bp, Homo sapien
taagaattcctctgtcctaattatt

SEQ ID NO: 2278835 - DNA, 25 bp, Homo sapien
tgagccaacaaggtccggccaaaaa

SEQ ID NO: 2278836 - DNA, 25 bp, Homo sapien
caaagtgcctactttggctgagtgc

SEQ ID NO: 2278837 - DNA, 25 bp, Homo sapien
caaaacccatggatacaaagtgcct

SEQ ID NO: 2278838 - DNA, 25 bp, Homo sapien
aaaacactagatgtttgatctgcat

SEQ ID NO: 2278839 - DNA, 25 bp, Homo sapien
tgtaagttacaatgagaaggccaca

SEQ ID NO: 2278840 - DNA, 25 bp, Homo sapien
ctgtaagttacaatgagaaggccac

SEQ ID NO: 2278841 - DNA, 25 bp, Homo sapien
gtaagttacaatgagaaggccacat

SEQ ID NO: 2278842 - DNA, 25 bp, Homo sapien
gctctttgtaggacataaaggttcc

SEQ ID NO: 2278843 - DNA, 25 bp, Homo sapien
gtaggacataaaggttccagacacc

SEQ ID NO: 2278844 - DNA, 25 bp, Homo sapien
cataaaggttccagacaccatgaaa

SEQ ID NO: 2278845 - DNA, 25 bp, Homo sapien
atgtgctctttgtaggacataaagg

SEQ ID NO: 2278846 - DNA, 25 bp, Homo sapien
tcttcaaattgatgatgcagatgcc

SEQ ID NO: 2278847 - DNA, 25 bp, Homo sapien
gctccagtggtggtagcaaacttca

SEQ ID NO: 2278848 - DNA, 25 bp, Homo sapien
cagccagcattcctagaggatatat

SEQ ID NO: 2278849 - DNA, 25 bp, Homo sapien
gtgaaggttccaagagtcaagcaac

SEQ ID NO: 2278850 - DNA, 25 bp, Homo sapien
ctaagatgtctctgtgaaaggttgg

SEQ ID NO: 2278851 - DNA, 25 bp, Homo sapien
atgtctctgtgaaaggttggtggtc

SEQ ID NO: 2278852 - DNA, 25 bp, Homo sapien
ctgtgaaaggttggtggtcagcctt

SEQ ID NO: 2278853 - DNA, 25 bp, Homo sapien
tctgtgaaaggttggtggtcagcct

SEQ ID NO: 2278854 - DNA, 25 bp, Homo sapien
gtggtgccatgcgtttgcagaactt

SEQ ID NO: 2278855 - DNA, 25 bp, Homo sapien
acaggaggtggtgccatgcgtttgc

SEQ ID NO: 2278856 - DNA, 25 bp, Homo sapien
aggtggtgccatgcgtttgcagaac

SEQ ID NO: 2278857 - DNA, 25 bp, Homo sapien
gggccaacatctaccacattggacc

SEQ ID NO: 2278858 - DNA, 25 bp, Homo sapien
gtactctgactaccaccacttgtgg

SEQ ID NO: 2278859 - DNA, 25 bp, Homo sapien
gatgtcactatcactttgcacccaa

SEQ ID NO: 2278860 - DNA, 25 bp, Homo sapien
tgtgggtaggcagtgattagctctc

SEQ ID NO: 2278861 - DNA, 25 bp, Homo sapien
tctagatggcgcaaaacagtgatgt

SEQ ID NO: 2278862 - DNA, 25 bp, Homo sapien
gaaatgtccagaacttattaacgca

SEQ ID NO: 2278863 - DNA, 25 bp, Homo sapien
gaaagtatccggcagaggaacacca

SEQ ID NO: 2278864 - DNA, 25 bp, Homo sapien
acttattaacgcagttcaggatggc

SEQ ID NO: 2278865 - DNA, 25 bp, Homo sapien
ccatggccagccaactcttgaaatg

SEQ ID NO: 2278866 - DNA, 25 bp, Homo sapien
ttgggaactccagaacttcagcctc

SEQ ID NO: 2278867 - DNA, 25 bp, Homo sapien
tgggaactccagaacttcagcctca

SEQ ID NO: 2278868 - DNA, 25 bp, Homo sapien
gggaactccagaacttcagcctcat

SEQ ID NO: 2278869 - DNA, 25 bp, Homo sapien
attgggaactccagaacttcagcct

SEQ ID NO: 2278870 - DNA, 25 bp, Homo sapien
ctgtgccaacggaagtggctgtttt

SEQ ID NO: 2278871 - DNA, 25 bp, Homo sapien
tctcgagccaagaaaacagctttac

SEQ ID NO: 2278872 - DNA, 25 bp, Homo sapien
gactctttaacatacttctggaaca

SEQ ID NO: 2278873 - DNA, 25 bp, Homo sapien
caatgacacgtacatcccgtccatg

SEQ ID NO: 2278874 - DNA, 25 bp, Homo sapien
gatggcttagatcagccaaatggtg

SEQ ID NO: 2278875 - DNA, 25 bp, Homo sapien
gccacagcacctgacctcaaaacaa

SEQ ID NO: 2278876 - DNA, 25 bp, Homo sapien
agccacagcacctgacctcaaaaca

SEQ ID NO: 2278877 - DNA, 25 bp, Homo sapien
cacagcacctgacctcaaaacaaac

SEQ ID NO: 2278878 - DNA, 25 bp, Homo sapien
acagcacctgacctcaaaacaaact

SEQ ID NO: 2278879 - DNA, 25 bp, Homo sapien
tcaataaccacaataagataccatc

SEQ ID NO: 2278880 - DNA, 25 bp, Homo sapien
aattcctcagggacctataactaga

SEQ ID NO: 2278881 - DNA, 25 bp, Homo sapien
gtggcaattcctcagggacctataa

SEQ ID NO: 2278882 - DNA, 25 bp, Homo sapien
tgcaaatcaataaccacaataagat

SEQ ID NO: 2278883 - DNA, 25 bp, Homo sapien
gacgcagaaggagccgtcatctttc

SEQ ID NO: 2278884 - DNA, 25 bp, Homo sapien
tttcatcagcagatcaatgccacac

SEQ ID NO: 2278885 - DNA, 25 bp, Homo sapien
tcagcagatcaatgccacacacatc

SEQ ID NO: 2278886 - DNA, 25 bp, Homo sapien
agacgcagaaggagccgtcatcttt

SEQ ID NO: 2278887 - DNA, 25 bp, Homo sapien
ggaggcggcatagtctgctatgata

SEQ ID NO: 2278888 - DNA, 25 bp, Homo sapien
tagcagctggttcatgttgaacagg

SEQ ID NO: 2278889 - DNA, 25 bp, Homo sapien
tttgatttcattggctagcagctgg

SEQ ID NO: 2278890 - DNA, 25 bp, Homo sapien
cagtccaccagtagtttgatttcat

SEQ ID NO: 2278891 - DNA, 25 bp, Homo sapien
aaaaaattacgttgggctctgcagc

SEQ ID NO: 2278892 - DNA, 25 bp, Homo sapien
ggtgaatacctctaccccagtggag

SEQ ID NO: 2278893 - DNA, 25 bp, Homo sapien
tataacgctggcattcgaaatcact

SEQ ID NO: 2278894 - DNA, 25 bp, Homo sapien
taaaagcttcagaggattcgtaggg

SEQ ID NO: 2278895 - DNA, 25 bp, Homo sapien
ctgtacaagtaagcatgatcaaacc

SEQ ID NO: 2278896 - DNA, 25 bp, Homo sapien
gggaaaaactgtacaagtaagcatg

SEQ ID NO: 2278897 - DNA, 25 bp, Homo sapien
caagtaagcatgatcaaacctctgt

SEQ ID NO: 2278898 - DNA, 25 bp, Homo sapien
taagcatgatcaaacctctgttata

SEQ ID NO: 2278899 - DNA, 25 bp, Homo sapien
tagtatgcatcctccacagtatggt

SEQ ID NO: 2278900 - DNA, 25 bp, Homo sapien
tcattcagcgaaagaagtaccaagt

SEQ ID NO: 2278901 - DNA, 25 bp, Homo sapien
aaagtccagttttcatcatgggtga

SEQ ID NO: 2278902 - DNA, 25 bp, Homo sapien
tttaccctgcgcaagataagttctt

SEQ ID NO: 2278903 - DNA, 25 bp, Homo sapien
ctgagcacctacattttcttaggag

SEQ ID NO: 2278904 - DNA, 25 bp, Homo sapien
acctgtctgagcacctacattttct

SEQ ID NO: 2278905 - DNA, 25 bp, Homo sapien
ttcttaggaggggatcgtgtctcac

SEQ ID NO: 2278906 - DNA, 25 bp, Homo sapien
tgtctgagcacctacattttcttag

SEQ ID NO: 2278907 - DNA, 25 bp, Homo sapien
tggtaaagaacagtaacagtgcaag

SEQ ID NO: 2278908 - DNA, 25 bp, Homo sapien
ggtaaagaacagtaacagtgcaagc

SEQ ID NO: 2278909 - DNA, 25 bp, Homo sapien
ctggtaaagaacagtaacagtgcaa

SEQ ID NO: 2278910 - DNA, 25 bp, Homo sapien
tgtatttgtttttttggctcctgaa

SEQ ID NO: 2278911 - DNA, 25 bp, Homo sapien
ttgtatttgtttttttggctcctga

SEQ ID NO: 2278912 - DNA, 25 bp, Homo sapien
gtgcctgaatccaaaccggtgcatt

SEQ ID NO: 2278913 - DNA, 25 bp, Homo sapien
tgaccccgaaagttctcaatacttc

SEQ ID NO: 2278914 - DNA, 25 bp, Homo sapien
ggcactgaccccgaaagttctcaat

SEQ ID NO: 2278915 - DNA, 25 bp, Homo sapien
aaaccggtgcatttaccattcatta

SEQ ID NO: 2278916 - DNA, 25 bp, Homo sapien
ggagtcatctaaatggctaaacaaa

SEQ ID NO: 2278917 - DNA, 25 bp, Homo sapien
tttaagtgagaattatgacaaaccc

SEQ ID NO: 2278918 - DNA, 25 bp, Homo sapien
attatttgctagatacatttatgca

SEQ ID NO: 2278919 - DNA, 25 bp, Homo sapien
aaattcccaagtcttgagtatatca

SEQ ID NO: 2278920 - DNA, 25 bp, Homo sapien
tacagcctctttggatagtacgtcc

SEQ ID NO: 2278921 - DNA, 25 bp, Homo sapien
tagccactcttgctgagtacaaggc

SEQ ID NO: 2278922 - DNA, 25 bp, Homo sapien
tagtgacttgctggatgtacagcct

SEQ ID NO: 2278923 - DNA, 25 bp, Homo sapien
gcattacacgccaagaattcctatt

SEQ ID NO: 2278924 - DNA, 25 bp, Homo sapien
ggactgcgccgttcccacggatgct

SEQ ID NO: 2278925 - DNA, 25 bp, Homo sapien
cacggatgctcctagaggcctgctg

SEQ ID NO: 2278926 - DNA, 25 bp, Homo sapien
tctgtatatgggatgagcctgagca

SEQ ID NO: 2278927 - DNA, 25 bp, Homo sapien
tgagcaggagagttggtgatgtcag

SEQ ID NO: 2278928 - DNA, 25 bp, Homo sapien
tctcattccttcccccgatctcaaa

SEQ ID NO: 2278929 - DNA, 25 bp, Homo sapien
ctcattccttcccccgatctcaaac

SEQ ID NO: 2278930 - DNA, 25 bp, Homo sapien
tcattccttcccccgatctcaaacc

SEQ ID NO: 2278931 - DNA, 25 bp, Homo sapien
ttctcattccttcccccgatctcaa

SEQ ID NO: 2278932 - DNA, 25 bp, Homo sapien
cattagctattaagggacagtctcc

SEQ ID NO: 2278933 - DNA, 25 bp, Homo sapien
tactgacataagcaccaaagactag

SEQ ID NO: 2278934 - DNA, 25 bp, Homo sapien
gtagaactgggcatcaacacagcat

SEQ ID NO: 2278935 - DNA, 25 bp, Homo sapien
gacagtctccagtaaatgaactaga

SEQ ID NO: 2278936 - DNA, 25 bp, Homo sapien
tgcttgagttttcaatgttctggac

SEQ ID NO: 2278937 - DNA, 25 bp, Homo sapien
ggactgcttattgcccaatggctct

SEQ ID NO: 2278938 - DNA, 25 bp, Homo sapien
tctggactgcttattgcccaatggc

SEQ ID NO: 2278939 - DNA, 25 bp, Homo sapien
gagttttcaatgttctggactgctt

SEQ ID NO: 2278940 - DNA, 25 bp, Homo sapien
gtggtaagatttagccactcagcag

SEQ ID NO: 2278941 - DNA, 25 bp, Homo sapien
gcagctgccacctcaagaagccatt

SEQ ID NO: 2278942 - DNA, 25 bp, Homo sapien
cactgtatgatccatgttcatgcta

SEQ ID NO: 2278943 - DNA, 25 bp, Homo sapien
taggtagtctacaactcctacaaat

SEQ ID NO: 2278944 - DNA, 25 bp, Homo sapien
tgctgccacctaccagtttagttgt

SEQ ID NO: 2278945 - DNA, 25 bp, Homo sapien
catttagagtcaaaatgcaggaatc

SEQ ID NO: 2278946 - DNA, 25 bp, Homo sapien
ccttgcttcacttggtatgtcatgc

SEQ ID NO: 2278947 - DNA, 25 bp, Homo sapien
cagactttaagtcagtagccatcaa

SEQ ID NO: 2278948 - DNA, 25 bp, Homo sapien
agttaaatgctctcttgtgttccag

SEQ ID NO: 2278949 - DNA, 25 bp, Homo sapien
ggaaattgttctctctagtgagtga

SEQ ID NO: 2278950 - DNA, 25 bp, Homo sapien
tacttaattaagatgctgacaccaa

SEQ ID NO: 2278951 - DNA, 25 bp, Homo sapien
tagtgagtgaacagtcgcaagttca

SEQ ID NO: 2278952 - DNA, 25 bp, Homo sapien
aaacacaacttatttaaatcataga

SEQ ID NO: 2278953 - DNA, 25 bp, Homo sapien
gtcttggtgagctcagttaacaaag

SEQ ID NO: 2278954 - DNA, 25 bp, Homo sapien
tttaaaagtctctataaccaggata

SEQ ID NO: 2278955 - DNA, 25 bp, Homo sapien
gttattatcactttgtcttggtgag

SEQ ID NO: 2278956 - DNA, 25 bp, Homo sapien
aaagatcactggttacttcaaaaga

SEQ ID NO: 2278957 - DNA, 25 bp, Homo sapien
aaaagatcactggttacttcaaaag

SEQ ID NO: 2278958 - DNA, 25 bp, Homo sapien
atgagggtaagcaaaaaagatcact

SEQ ID NO: 2278959 - DNA, 25 bp, Homo sapien
aagatcactggttacttcaaaagaa

SEQ ID NO: 2278960 - DNA, 25 bp, Homo sapien
ttagaaaacagacggaatcaaacag

SEQ ID NO: 2278961 - DNA, 25 bp, Homo sapien
gttctgtatattcatattctccact

SEQ ID NO: 2278962 - DNA, 25 bp, Homo sapien
tatttagaaaacagacggaatcaaa

SEQ ID NO: 2278963 - DNA, 25 bp, Homo sapien
aacagacggaatcaaacaggttgga

SEQ ID NO: 2278964 - DNA, 25 bp, Homo sapien
tttagaaggtatcatagaaatcagt

SEQ ID NO: 2278965 - DNA, 25 bp, Homo sapien
tgtgccaaaagaggagtaatcattt

SEQ ID NO: 2278966 - DNA, 25 bp, Homo sapien
ttttagaaggtatcatagaaatcag

SEQ ID NO: 2278967 - DNA, 25 bp, Homo sapien
ctatgtgccaaaagaggagtaatca

SEQ ID NO: 2278968 - DNA, 25 bp, Homo sapien
gtgataggtgatggtctcgccgctc

SEQ ID NO: 2278969 - DNA, 25 bp, Homo sapien
tggtgataggtgatggtctcgccgc

SEQ ID NO: 2278970 - DNA, 25 bp, Homo sapien
cttggtgataggtgatggtctcgcc

SEQ ID NO: 2278971 - DNA, 25 bp, Homo sapien
tgataggtgatggtctcgccgctca

SEQ ID NO: 2278972 - DNA, 25 bp, Homo sapien
gggcccaagccatagtgcagaaaaa

SEQ ID NO: 2278973 - DNA, 25 bp, Homo sapien
ggcccaagccatagtgcagaaaaaa

SEQ ID NO: 2278974 - DNA, 25 bp, Homo sapien
cgtaacctgcccttcgtgtcccatt

SEQ ID NO: 2278975 - DNA, 25 bp, Homo sapien
catgtgtatttgaagcaccggtccc

SEQ ID NO: 2278976 - DNA, 25 bp, Homo sapien
ttctccacaactgaacttccattgg

SEQ ID NO: 2278977 - DNA, 25 bp, Homo sapien
catcactaactatggcgtaacctgc

SEQ ID NO: 2278978 - DNA, 25 bp, Homo sapien
aactctaggccaggggaagtgccag

SEQ ID NO: 2278979 - DNA, 25 bp, Homo sapien
aagagtgagtgagggctgaggactg

SEQ ID NO: 2278980 - DNA, 25 bp, Homo sapien
ccaagagtgagtgagggctgaggac

SEQ ID NO: 2278981 - DNA, 25 bp, Homo sapien
cagtgggtcggtccaggggcccttg

SEQ ID NO: 2278982 - DNA, 25 bp, Homo sapien
gattggtgtatttatgtctagctca

SEQ ID NO: 2278983 - DNA, 25 bp, Homo sapien
ttcttcacggccccaccagagcagc

SEQ ID NO: 2278984 - DNA, 25 bp, Homo sapien
gttcttcacggccccaccagagcag

SEQ ID NO: 2278985 - DNA, 25 bp, Homo sapien
tcttcacggccccaccagagcagct

SEQ ID NO: 2278986 - DNA, 25 bp, Homo sapien
cttcacggccccaccagagcagcta

SEQ ID NO: 2278987 - DNA, 25 bp, Homo sapien
ctggctggggcagcctggtttcatt

SEQ ID NO: 2278988 - DNA, 25 bp, Homo sapien
gattagatacagagtatccacacaa

SEQ ID NO: 2278989 - DNA, 25 bp, Homo sapien
ccacgtccccatcagattagataca

SEQ ID NO: 2278990 - DNA, 25 bp, Homo sapien
gctggggcagcctggtttcattctc

SEQ ID NO: 2278991 - DNA, 25 bp, Homo sapien
tctgtatagcaatctaagagaaaat

SEQ ID NO: 2278992 - DNA, 25 bp, Homo sapien
tatagcaatctaagagaaaattggc

SEQ ID NO: 2278993 - DNA, 25 bp, Homo sapien
aatctaagagaaaattggcaccggg

SEQ ID NO: 2278994 - DNA, 25 bp, Homo sapien
gcaatctaagagaaaattggcaccg

SEQ ID NO: 2278995 - DNA, 25 bp, Homo sapien
tgagaactatttgtacattgtgagc

SEQ ID NO: 2278996 - DNA, 25 bp, Homo sapien
agaactatttgtacattgtgagctt

SEQ ID NO: 2278997 - DNA, 25 bp, Homo sapien
cttgagaactatttgtacattgtga

SEQ ID NO: 2278998 - DNA, 25 bp, Homo sapien
gagaactatttgtacattgtgagct

SEQ ID NO: 2278999 - DNA, 25 bp, Homo sapien
cattcctggacccaaagtgctccat

SEQ ID NO: 2279000 - DNA, 25 bp, Homo sapien
ttgtccacagtcagtgatcttcttg

SEQ ID NO: 2279001 - DNA, 25 bp, Homo sapien
ctggtcttgccattcctggacccaa

SEQ ID NO: 2279002 - DNA, 25 bp, Homo sapien
gttgtccacagtcagtgatcttctt

SEQ ID NO: 2279003 - DNA, 25 bp, Homo sapien
gggaagtccccggatctgagtcacg

SEQ ID NO: 2279004 - DNA, 25 bp, Homo sapien
cccaagggaagtccccggatctgag

SEQ ID NO: 2279005 - DNA, 25 bp, Homo sapien
gaagtccccggatctgagtcacggc

SEQ ID NO: 2279006 - DNA, 25 bp, Homo sapien
ctcccaagggaagtccccggatctg

SEQ ID NO: 2279007 - DNA, 25 bp, Homo sapien
ttggggcgcagagatacaaggttgg

SEQ ID NO: 2279008 - DNA, 25 bp, Homo sapien
cctcctctacaaaagcgggacttgc

SEQ ID NO: 2279009 - DNA, 25 bp, Homo sapien
gagatataagaggttgggccacgga

SEQ ID NO: 2279010 - DNA, 25 bp, Homo sapien
cgcagagatacaaggttggggtact

SEQ ID NO: 2279011 - DNA, 25 bp, Homo sapien
gaatcatagagggtcgaagttagat

SEQ ID NO: 2279012 - DNA, 25 bp, Homo sapien
ttaaatccttgagccttcgtggatc

SEQ ID NO: 2279013 - DNA, 25 bp, Homo sapien
gagccttcgtggatcagagttttta

SEQ ID NO: 2279014 - DNA, 25 bp, Homo sapien
catagagggtcgaagttagattttc

SEQ ID NO: 2279015 - DNA, 25 bp, Homo sapien
gtggaccagggtagggccactattc

SEQ ID NO: 2279016 - DNA, 25 bp, Homo sapien
ccagggtagggccactattcacttc

SEQ ID NO: 2279017 - DNA, 25 bp, Homo sapien
taggtggtggaccagggtagggcca

SEQ ID NO: 2279018 - DNA, 25 bp, Homo sapien
ggtagggccactattcacttcttta

SEQ ID NO: 2279019 - DNA, 25 bp, Homo sapien
gaagttcttctgcaatggctggtga

SEQ ID NO: 2279020 - DNA, 25 bp, Homo sapien
ggccaacattcctagaaggagctga

SEQ ID NO: 2279021 - DNA, 25 bp, Homo sapien
gggcagagatcgctccgcgtagctt

SEQ ID NO: 2279022 - DNA, 25 bp, Homo sapien
caatggctggtgatagggccaacat

SEQ ID NO: 2279023 - DNA, 25 bp, Homo sapien
gagatacaatgtaagtgcctcttct

SEQ ID NO: 2279024 - DNA, 25 bp, Homo sapien
cagtccagagtattctagcaacttc

SEQ ID NO: 2279025 - DNA, 25 bp, Homo sapien
cttggtctccagagtaaccgtgaat

SEQ ID NO: 2279026 - DNA, 25 bp, Homo sapien
ggctcaggtccaaacaaaccttctg

SEQ ID NO: 2279027 - DNA, 25 bp, Homo sapien
ccgacacccggattgtggccacttc

SEQ ID NO: 2279028 - DNA, 25 bp, Homo sapien
agagaggtttgtcagtctgtacaaa

SEQ ID NO: 2279029 - DNA, 25 bp, Homo sapien
ccgttcccctgcctctgaattagaa

SEQ ID NO: 2279030 - DNA, 25 bp, Homo sapien
agctgatgttatttccaactcccga

SEQ ID NO: 2279031 - DNA, 25 bp, Homo sapien
ttgctatccatggtgacaatgcgga

SEQ ID NO: 2279032 - DNA, 25 bp, Homo sapien
cattcactggaacgaagttgctatc

SEQ ID NO: 2279033 - DNA, 25 bp, Homo sapien
ggaacgaagttgctatccatggtga

SEQ ID NO: 2279034 - DNA, 25 bp, Homo sapien
cttgtcattcactggaacgaagttg

SEQ ID NO: 2279035 - DNA, 25 bp, Homo sapien
agtttgctgaaagcaaaagttcaca

SEQ ID NO: 2279036 - DNA, 25 bp, Homo sapien
cagataatgcgggttaaagaaggtt

SEQ ID NO: 2279037 - DNA, 25 bp, Homo sapien
aatgcgggttaaagaaggttgacag

SEQ ID NO: 2279038 - DNA, 25 bp, Homo sapien
tcttcctttctaaatggctcttttg

SEQ ID NO: 2279039 - DNA, 25 bp, Homo sapien
cctatggcaagggctattaccttac

SEQ ID NO: 2279040 - DNA, 25 bp, Homo sapien
ctgttgagaatgcctatggcaaggg

SEQ ID NO: 2279041 - DNA, 25 bp, Homo sapien
ctatggcaagggctattaccttaca

SEQ ID NO: 2279042 - DNA, 25 bp, Homo sapien
ccaatagagaaactgcatgatgtgc

SEQ ID NO: 2279043 - DNA, 25 bp, Homo sapien
tgtccaatagagaaactgcatgatg

SEQ ID NO: 2279044 - DNA, 25 bp, Homo sapien
tccaatagagaaactgcatgatgtg

SEQ ID NO: 2279045 - DNA, 25 bp, Homo sapien
ctgtccaatagagaaactgcatgat

SEQ ID NO: 2279046 - DNA, 25 bp, Homo sapien
tcaggtaccacttccagccactgtg

SEQ ID NO: 2279047 - DNA, 25 bp, Homo sapien
tgaaagtaccaaaggtcttgccctc

SEQ ID NO: 2279048 - DNA, 25 bp, Homo sapien
ttggaaggacaggtctacaatgcct

SEQ ID NO: 2279049 - DNA, 25 bp, Homo sapien
actgccacagtgtaggtgcccagca

SEQ ID NO: 2279050 - DNA, 25 bp, Homo sapien
agtaaaaggagaaatggagaaagca

SEQ ID NO: 2279051 - DNA, 25 bp, Homo sapien
ctgaagagagtaaaaggagaaatgg

SEQ ID NO: 2279052 - DNA, 25 bp, Homo sapien
gagtaaaaggagaaatggagaaagc

SEQ ID NO: 2279053 - DNA, 25 bp, Homo sapien
agagagtaaaaggagaaatggagaa

SEQ ID NO: 2279054 - DNA, 25 bp, Homo sapien
cctgcaccgttgataactccttggg

SEQ ID NO: 2279055 - DNA, 25 bp, Homo sapien
tgataactccttgggttccaccact

SEQ ID NO: 2279056 - DNA, 25 bp, Homo sapien
gcaccgttgataactccttgggttc

SEQ ID NO: 2279057 - DNA, 25 bp, Homo sapien
gattcctgcaccgttgataactcct

SEQ ID NO: 2279058 - DNA, 25 bp, Homo sapien
tgtcaggaagctgttcccgttccac

SEQ ID NO: 2279059 - DNA, 25 bp, Homo sapien
tgcactgcccctagcatgggctttc

SEQ ID NO: 2279060 - DNA, 25 bp, Homo sapien
gttccacctctcgataccagtaagt

SEQ ID NO: 2279061 - DNA, 25 bp, Homo sapien
agtatttgccttctgacacacagat

SEQ ID NO: 2279062 - DNA, 25 bp, Homo sapien
caatgaggtcaaaggtggccatgtc

SEQ ID NO: 2279063 - DNA, 25 bp, Homo sapien
tcctccacaacagtagccacaatat

SEQ ID NO: 2279064 - DNA, 25 bp, Homo sapien
ccatgtccacaggtgctgagaaaca

SEQ ID NO: 2279065 - DNA, 25 bp, Homo sapien
gatttgatggctgtacgcatatcca

SEQ ID NO: 2279066 - DNA, 25 bp, Homo sapien
ttttcttaatgagccaaggagcacc

SEQ ID NO: 2279067 - DNA, 25 bp, Homo sapien
ttggagtaaatctgtccctgggacc

SEQ ID NO: 2279068 - DNA, 25 bp, Homo sapien
taatgagccaaggagcaccctactt

SEQ ID NO: 2279069 - DNA, 25 bp, Homo sapien
tgtatacttggagtaaatctgtccc

SEQ ID NO: 2279070 - DNA, 25 bp, Homo sapien
gaaatttggatggtaaaaattgctg

SEQ ID NO: 2279071 - DNA, 25 bp, Homo sapien
attgatcccatttgtggagaaatgt

SEQ ID NO: 2279072 - DNA, 25 bp, Homo sapien
aatttggatggtaaaaattgctggt

SEQ ID NO: 2279073 - DNA, 25 bp, Homo sapien
aaatttggatggtaaaaattgctgg

SEQ ID NO: 2279074 - DNA, 25 bp, Homo sapien
cattgttatcagtaaccagggtctg

SEQ ID NO: 2279075 - DNA, 25 bp, Homo sapien
cattccaaccggatgtctccaaggt

SEQ ID NO: 2279076 - DNA, 25 bp, Homo sapien
taaagggagctaggccattgttatc

SEQ ID NO: 2279077 - DNA, 25 bp, Homo sapien
gagaaacgtctgtcccattccaacc

SEQ ID NO: 2279078 - DNA, 25 bp, Homo sapien
tttagcatgtgctccaaccatggaa

SEQ ID NO: 2279079 - DNA, 25 bp, Homo sapien
cttgttacggttttcaaatagagct

SEQ ID NO: 2279080 - DNA, 25 bp, Homo sapien
ttcaaatagagctctttctctcaaa

SEQ ID NO: 2279081 - DNA, 25 bp, Homo sapien
tacggttttcaaatagagctctttc

SEQ ID NO: 2279082 - DNA, 25 bp, Homo sapien
gcacttgttccggattatatactaa

SEQ ID NO: 2279083 - DNA, 25 bp, Homo sapien
ccgtttagccggtggatgccaagga

SEQ ID NO: 2279084 - DNA, 25 bp, Homo sapien
tagtaacgtggcacttgttccggat

SEQ ID NO: 2279085 - DNA, 25 bp, Homo sapien
tgcaggtaggcattttggtagtaac

SEQ ID NO: 2279086 - DNA, 25 bp, Homo sapien
gccgggtcgatgtaataatccacca

SEQ ID NO: 2279087 - DNA, 25 bp, Homo sapien
ccgggtcgatgtaataatccaccag

SEQ ID NO: 2279088 - DNA, 25 bp, Homo sapien
cgggtcgatgtaataatccaccagc

SEQ ID NO: 2279089 - DNA, 25 bp, Homo sapien
ttctctttccttcccagcatactct

SEQ ID NO: 2279090 - DNA, 25 bp, Homo sapien
tctttccttcccagcatactctcac

SEQ ID NO: 2279091 - DNA, 25 bp, Homo sapien
ctctttccttcccagcatactctca

SEQ ID NO: 2279092 - DNA, 25 bp, Homo sapien
tcattctctttccttcccagcatac

SEQ ID NO: 2279093 - DNA, 25 bp, Homo sapien
agcatccactagcttgacaaatgca

SEQ ID NO: 2279094 - DNA, 25 bp, Homo sapien
aggatgctgccaacgggtcctggtg

SEQ ID NO: 2279095 - DNA, 25 bp, Homo sapien
ttcttcttagagttcaggtgtttct

SEQ ID NO: 2279096 - DNA, 25 bp, Homo sapien
tcttcttagagttcaggtgtttctg

SEQ ID NO: 2279097 - DNA, 25 bp, Homo sapien
cttcttagagttcaggtgtttctgc

SEQ ID NO: 2279098 - DNA, 25 bp, Homo sapien
catatgtacttttcactgagccagt

SEQ ID NO: 2279099 - DNA, 25 bp, Homo sapien
atatgtacttttcactgagccagtg

SEQ ID NO: 2279100 - DNA, 25 bp, Homo sapien
cactgggaaaaatggcatagatcac

SEQ ID NO: 2279101 - DNA, 25 bp, Homo sapien
ttgtcagctacaacacctccactgg

SEQ ID NO: 2279102 - DNA, 25 bp, Homo sapien
ggccagtctcgaagtgaaggtcagt

SEQ ID NO: 2279103 - DNA, 25 bp, Homo sapien
tgattgtcaaagcacatctcgactg

SEQ ID NO: 2279104 - DNA, 25 bp, Homo sapien
ggtataacttggggatcaggtcagc

SEQ ID NO: 2279105 - DNA, 25 bp, Homo sapien
aaggtataacttggggatcaggtca

SEQ ID NO: 2279106 - DNA, 25 bp, Homo sapien
aggtataacttggggatcaggtcag

SEQ ID NO: 2279107 - DNA, 25 bp, Homo sapien
cagctctctgtctggcctaagcagt

SEQ ID NO: 2279108 - DNA, 25 bp, Homo sapien
ggcctaagcagtaagacactctcat

SEQ ID NO: 2279109 - DNA, 25 bp, Homo sapien
gcacacagggatccgggagctgcct

SEQ ID NO: 2279110 - DNA, 25 bp, Homo sapien
ccggagcgcacacagggatccggga

SEQ ID NO: 2279111 - DNA, 25 bp, Homo sapien
ttctccatcaactccctcctcccac

SEQ ID NO: 2279112 - DNA, 25 bp, Homo sapien
ctcttaattgtcttctccatcaact

SEQ ID NO: 2279113 - DNA, 25 bp, Homo sapien
tcttaattgtcttctccatcaactc

SEQ ID NO: 2279114 - DNA, 25 bp, Homo sapien
gtcttctccatcaactccctcctcc

SEQ ID NO: 2279115 - DNA, 25 bp, Homo sapien
tgatcatactcagccacttgatagg

SEQ ID NO: 2279116 - DNA, 25 bp, Homo sapien
aacgagggcctccagataatggaac

SEQ ID NO: 2279117 - DNA, 25 bp, Homo sapien
tccgtgccttcagagaacgagggcc

SEQ ID NO: 2279118 - DNA, 25 bp, Homo sapien
taatggaacgctggctcgaatgccc

SEQ ID NO: 2279119 - DNA, 25 bp, Homo sapien
tacaagggctactgcccaggaattc

SEQ ID NO: 2279120 - DNA, 25 bp, Homo sapien
tgataggcatcagagaaataagtat

SEQ ID NO: 2279121 - DNA, 25 bp, Homo sapien
ttccaccatcaaagagttgaaacaa

SEQ ID NO: 2279122 - DNA, 25 bp, Homo sapien
ttccccaactacaagggctactgcc

SEQ ID NO: 2279123 - DNA, 25 bp, Homo sapien
tgactgcaatctactggcttcttga

SEQ ID NO: 2279124 - DNA, 25 bp, Homo sapien
gcagtgctgtattctggagatctgt

SEQ ID NO: 2279125 - DNA, 25 bp, Homo sapien
cacccatagcagtgctgtattctgg

SEQ ID NO: 2279126 - DNA, 25 bp, Homo sapien
tggagatctgtgactgcaatctact

SEQ ID NO: 2279127 - DNA, 25 bp, Homo sapien
ggagacttcttgttgtgacataaat

SEQ ID NO: 2279128 - DNA, 25 bp, Homo sapien
tgttgtgacataaattgggatggag

SEQ ID NO: 2279129 - DNA, 25 bp, Homo sapien
tgacataaattgggatggagggatt

SEQ ID NO: 2279130 - DNA, 25 bp, Homo sapien
tcttgttgtgacataaattgggatg

SEQ ID NO: 2279131 - DNA, 25 bp, Homo sapien
aaggagttgatgactcaaaagcctc

SEQ ID NO: 2279132 - DNA, 25 bp, Homo sapien
gacctgagaatcctctgcttgatgt

SEQ ID NO: 2279133 - DNA, 25 bp, Homo sapien
tactggcggacctgagaatcctctg

SEQ ID NO: 2279134 - DNA, 25 bp, Homo sapien
gatgtaaaggagttgatgactcaaa

SEQ ID NO: 2279135 - DNA, 25 bp, Homo sapien
tggcagtaagacgaaaggattcccc

SEQ ID NO: 2279136 - DNA, 25 bp, Homo sapien
tagtccaacagtgggtgaaagcccg

SEQ ID NO: 2279137 - DNA, 25 bp, Homo sapien
tgaaagcccgaagcctcttgactgg

SEQ ID NO: 2279138 - DNA, 25 bp, Homo sapien
tcaggaactgtgacgtggaccgcct

SEQ ID NO: 2279139 - DNA, 25 bp, Homo sapien
ctgattcctgtatccccagctctca

SEQ ID NO: 2279140 - DNA, 25 bp, Homo sapien
tgattcctgtatccccagctctcac

SEQ ID NO: 2279141 - DNA, 25 bp, Homo sapien
cccagggaaaattgggatgcttcca

SEQ ID NO: 2279142 - DNA, 25 bp, Homo sapien
aacttatgggggaggtgtgattcca

SEQ ID NO: 2279143 - DNA, 25 bp, Homo sapien
attgggatgcttccaatttagagac

SEQ ID NO: 2279144 - DNA, 25 bp, Homo sapien
tgagacgccgacatctcctctcttt

SEQ ID NO: 2279145 - DNA, 25 bp, Homo sapien
gcgatttagccaggtcagtctgaac

SEQ ID NO: 2279146 - DNA, 25 bp, Homo sapien
tcatgcgatttagccaggtcagtct

SEQ ID NO: 2279147 - DNA, 25 bp, Homo sapien
tggtactcatgcgatttagccaggt

SEQ ID NO: 2279148 - DNA, 25 bp, Homo sapien
tactcatgcgatttagccaggtcag

SEQ ID NO: 2279149 - DNA, 25 bp, Homo sapien
gtgggtttttgcgtcatcagcacag

SEQ ID NO: 2279150 - DNA, 25 bp, Homo sapien
ctgtgatgttccagtggtgggtttt

SEQ ID NO: 2279151 - DNA, 25 bp, Homo sapien
ccagtggtgggtttttgcgtcatca

SEQ ID NO: 2279152 - DNA, 25 bp, Homo sapien
gcacagagacaactggaggtctgag

SEQ ID NO: 2279153 - DNA, 25 bp, Homo sapien
actggcttgatgagcgtgtcacttc

SEQ ID NO: 2279154 - DNA, 25 bp, Homo sapien
tgctgtccagaatctttgtactaat

SEQ ID NO: 2279155 - DNA, 25 bp, Homo sapien
agcgtgtcacttcggcccttttggg

SEQ ID NO: 2279156 - DNA, 25 bp, Homo sapien
gtccagaatctttgtactaatagta

SEQ ID NO: 2279157 - DNA, 25 bp, Homo sapien
tcaggagggatggcactaaaggaaa

SEQ ID NO: 2279158 - DNA, 25 bp, Homo sapien
aggagggatggcactaaaggaaagg

SEQ ID NO: 2279159 - DNA, 25 bp, Homo sapien
gagggatggcactaaaggaaaggga

SEQ ID NO: 2279160 - DNA, 25 bp, Homo sapien
catcaggagggatggcactaaagga

SEQ ID NO: 2279161 - DNA, 25 bp, Homo sapien
ttttgggcacagcaatgagctgtgt

SEQ ID NO: 2279162 - DNA, 25 bp, Homo sapien
cttttgggcacagcaatgagctgtg

SEQ ID NO: 2279163 - DNA, 25 bp, Homo sapien
caccaatcctgctctgagtccaccc

SEQ ID NO: 2279164 - DNA, 25 bp, Homo sapien
ccaatcctgctctgagtccacccac

SEQ ID NO: 2279165 - DNA, 25 bp, Homo sapien
accaatcctgctctgagtccaccca

SEQ ID NO: 2279166 - DNA, 25 bp, Homo sapien
cgagtcaggaacaatgtccactggg

SEQ ID NO: 2279167 - DNA, 25 bp, Homo sapien
gagacagattcagatgccacctttc

SEQ ID NO: 2279168 - DNA, 25 bp, Homo sapien
agaaccgtaacataagccttggtcg

SEQ ID NO: 2279169 - DNA, 25 bp, Homo sapien
cataagccttggtcgagtcaggaac

SEQ ID NO: 2279170 - DNA, 25 bp, Homo sapien
atagatgatgggagcaaacaagacc

SEQ ID NO: 2279171 - DNA, 25 bp, Homo sapien
gccttctccaggtactgcaagacat

SEQ ID NO: 2279172 - DNA, 25 bp, Homo sapien
aagaccatgttctgctcgccacagc

SEQ ID NO: 2279173 - DNA, 25 bp, Homo sapien
caggtactgcaagacatagatgatg

SEQ ID NO: 2279174 - DNA, 25 bp, Homo sapien
tatttccaggaaacccactgcccga

SEQ ID NO: 2279175 - DNA, 25 bp, Homo sapien
atttccaggaaacccactgcccgag

SEQ ID NO: 2279176 - DNA, 25 bp, Homo sapien
ttccaggaaacccactgcccgagac

SEQ ID NO: 2279177 - DNA, 25 bp, Homo sapien
ctatttccaggaaacccactgcccg

SEQ ID NO: 2279178 - DNA, 25 bp, Homo sapien
tgtttgtacatcagctccttctggt

SEQ ID NO: 2279179 - DNA, 25 bp, Homo sapien
ccatctcgctccccaaaggcactgt

SEQ ID NO: 2279180 - DNA, 25 bp, Homo sapien
ggcattaatgggcaccaatgaggac

SEQ ID NO: 2279181 - DNA, 25 bp, Homo sapien
ccatccatgagggtgaaataaacag

SEQ ID NO: 2279182 - DNA, 25 bp, Homo sapien
tacagaactcattgggaattgggtg

SEQ ID NO: 2279183 - DNA, 25 bp, Homo sapien
gaagatcgagggacttgaccatcca

SEQ ID NO: 2279184 - DNA, 25 bp, Homo sapien
gagatttcccacgttggcatagcag

SEQ ID NO: 2279185 - DNA, 25 bp, Homo sapien
ccacgttggcatagcagccactggg

SEQ ID NO: 2279186 - DNA, 25 bp, Homo sapien
atttcccacgttggcatagcagcca

SEQ ID NO: 2279187 - DNA, 25 bp, Homo sapien
tcccacgttggcatagcagccactg

SEQ ID NO: 2279188 - DNA, 25 bp, Homo sapien
tgtgacatacgcagtcaaggagacc

SEQ ID NO: 2279189 - DNA, 25 bp, Homo sapien
tgacatacgcagtcaaggagacctc

SEQ ID NO: 2279190 - DNA, 25 bp, Homo sapien
gtgacatacgcagtcaaggagacct

SEQ ID NO: 2279191 - DNA, 25 bp, Homo sapien
tacatcctttcccatctccagcaat

SEQ ID NO: 2279192 - DNA, 25 bp, Homo sapien
atctacatcctttcccatctccagc

SEQ ID NO: 2279193 - DNA, 25 bp, Homo sapien
acatcctttcccatctccagcaatg

SEQ ID NO: 2279194 - DNA, 25 bp, Homo sapien
tcctttcccatctccagcaatgcag

SEQ ID NO: 2279195 - DNA, 25 bp, Homo sapien
tgagatgatagcctgttgatctaac

SEQ ID NO: 2279196 - DNA, 25 bp, Homo sapien
gaatgtttctgatgtccatttcccc

SEQ ID NO: 2279197 - DNA, 25 bp, Homo sapien
tcttgagacaccgtagaccctgact

SEQ ID NO: 2279198 - DNA, 25 bp, Homo sapien
aatgtaagccaacagggcctgtgtg

SEQ ID NO: 2279199 - DNA, 25 bp, Homo sapien
agaactctcaacaggaccaacatac

SEQ ID NO: 2279200 - DNA, 25 bp, Homo sapien
caaagaactctcaacaggaccaaca

SEQ ID NO: 2279201 - DNA, 25 bp, Homo sapien
aaagaactctcaacaggaccaacat

SEQ ID NO: 2279202 - DNA, 25 bp, Homo sapien
tcaaagaactctcaacaggaccaac

SEQ ID NO: 2279203 - DNA, 25 bp, Homo sapien
tatgctagtggccttcgctatctcc

SEQ ID NO: 2279204 - DNA, 25 bp, Homo sapien
taagctgggccaacaatgcatatgc

SEQ ID NO: 2279205 - DNA, 25 bp, Homo sapien
tgcattgtgttgcttggccaaccaa

SEQ ID NO: 2279206 - DNA, 25 bp, Homo sapien
tatctccttttgagtcaggctgggc

SEQ ID NO: 2279207 - DNA, 25 bp, Homo sapien
atctcctcagatggcatgtaggcgg

SEQ ID NO: 2279208 - DNA, 25 bp, Homo sapien
gagcttggagagcaactacagtatc

SEQ ID NO: 2279209 - DNA, 25 bp, Homo sapien
aagagcttggagagcaactacagta

SEQ ID NO: 2279210 - DNA, 25 bp, Homo sapien
cggtagtggcatatttggcaagagc

SEQ ID NO: 2279211 - DNA, 25 bp, Homo sapien
ctgtatgttgaatgtgcgctggaaa

SEQ ID NO: 2279212 - DNA, 25 bp, Homo sapien
ccaatctgttaactgactgtatgtt

SEQ ID NO: 2279213 - DNA, 25 bp, Homo sapien
tgaatgtgcgctggaaattctcagt

SEQ ID NO: 2279214 - DNA, 25 bp, Homo sapien
gggcagggtatcctgctgaaatacc

SEQ ID NO: 2279215 - DNA, 25 bp, Homo sapien
ctgcacatagacacagccctggcct

SEQ ID NO: 2279216 - DNA, 25 bp, Homo sapien
ccctggcctgaggcctccaacgtgt

SEQ ID NO: 2279217 - DNA, 25 bp, Homo sapien
tgcacatagacacagccctggcctg

SEQ ID NO: 2279218 - DNA, 25 bp, Homo sapien
cagccctggcctgaggcctccaacg

SEQ ID NO: 2279219 - DNA, 25 bp, Homo sapien
tgtgaatagtgagagtcaaggatcg

SEQ ID NO: 2279220 - DNA, 25 bp, Homo sapien
gatcgaggtgaagtcggttgctcac

SEQ ID NO: 2279221 - DNA, 25 bp, Homo sapien
tatttccacactaagactaaaggtc

SEQ ID NO: 2279222 - DNA, 25 bp, Homo sapien
ggagaatattgtatctcaacaccgt

SEQ ID NO: 2279223 - DNA, 25 bp, Homo sapien
ttggaagagctacggctccccacat

SEQ ID NO: 2279224 - DNA, 25 bp, Homo sapien
tgaacccagatagcatcttcacttc

SEQ ID NO: 2279225 - DNA, 25 bp, Homo sapien
ttccacaatagccatattggaagag

SEQ ID NO: 2279226 - DNA, 25 bp, Homo sapien
gaacccagatagcatcttcacttcc

SEQ ID NO: 2279227 - DNA, 25 bp, Homo sapien
aatgttaagtgtgtcagttccaaat

SEQ ID NO: 2279228 - DNA, 25 bp, Homo sapien
gttaagtgtgtcagttccaaattca

SEQ ID NO: 2279229 - DNA, 25 bp, Homo sapien
gtaaatgttaagtgtgtcagttcca

SEQ ID NO: 2279230 - DNA, 25 bp, Homo sapien
taaatgttaagtgtgtcagttccaa

SEQ ID NO: 2279231 - DNA, 25 bp, Homo sapien
gaaaattacactgtatgcaatgtgg

SEQ ID NO: 2279232 - DNA, 25 bp, Homo sapien
aattacactgtatgcaatgtggaat

SEQ ID NO: 2279233 - DNA, 25 bp, Homo sapien
tgaaaattacactgtatgcaatgtg

SEQ ID NO: 2279234 - DNA, 25 bp, Homo sapien
aaattacactgtatgcaatgtggaa

SEQ ID NO: 2279235 - DNA, 25 bp, Homo sapien
tcatagaccttgatggttgctggtt

SEQ ID NO: 2279236 - DNA, 25 bp, Homo sapien
gttgctggtttcaagttggtgacca

SEQ ID NO: 2279237 - DNA, 25 bp, Homo sapien
gtgaaggtgtaagtctgagtgttct

SEQ ID NO: 2279238 - DNA, 25 bp, Homo sapien
ccagcacactttggctgatggtgaa

SEQ ID NO: 2279239 - DNA, 25 bp, Homo sapien
cacagggatcagaatactgaattgt

SEQ ID NO: 2279240 - DNA, 25 bp, Homo sapien
gggatcagaatactgaattgttgcc

SEQ ID NO: 2279241 - DNA, 25 bp, Homo sapien
cagaatactgaattgttgcctgttc

SEQ ID NO: 2279242 - DNA, 25 bp, Homo sapien
tcattcacagggatcagaatactga

SEQ ID NO: 2279243 - DNA, 25 bp, Homo sapien
tattgttttaataccaagcattagc

SEQ ID NO: 2279244 - DNA, 25 bp, Homo sapien
tcttctgtaaactattttcaagagt

SEQ ID NO: 2279245 - DNA, 25 bp, Homo sapien
ttcaagagtttaggacaggccgggc

SEQ ID NO: 2279246 - DNA, 25 bp, Homo sapien
actattttcaagagtttaggacagg

SEQ ID NO: 2279247 - DNA, 25 bp, Homo sapien
tctgcttcaagcgacagaagaatgt

SEQ ID NO: 2279248 - DNA, 25 bp, Homo sapien
cacctccagtgttgaggcgattctc

SEQ ID NO: 2279249 - DNA, 25 bp, Homo sapien
ccatgcaacgcctcctctgagtgat

SEQ ID NO: 2279250 - DNA, 25 bp, Homo sapien
gaggactaattgagtttccagctcc

SEQ ID NO: 2279251 - DNA, 25 bp, Homo sapien
tacttcccttatccctttgcctcca

SEQ ID NO: 2279252 - DNA, 25 bp, Homo sapien
gttaaatatcattcatcttacttcc

SEQ ID NO: 2279253 - DNA, 25 bp, Homo sapien
taggtgatagatagcccatgtgggg

SEQ ID NO: 2279254 - DNA, 25 bp, Homo sapien
gaggaagtgcttgcacggtgatagg

SEQ ID NO: 2279255 - DNA, 25 bp, Homo sapien
gcttgggaatgacctcctttgcata

SEQ ID NO: 2279256 - DNA, 25 bp, Homo sapien
tgggaatgacctcctttgcatatct

SEQ ID NO: 2279257 - DNA, 25 bp, Homo sapien
aagcttgggaatgacctcctttgca

SEQ ID NO: 2279258 - DNA, 25 bp, Homo sapien
tgatacccaagaggcaagcttggga

SEQ ID NO: 2279259 - DNA, 25 bp, Homo sapien
ctggataactgtagcagtctcctaa

SEQ ID NO: 2279260 - DNA, 25 bp, Homo sapien
atggtttcaaggacttcggctttct

SEQ ID NO: 2279261 - DNA, 25 bp, Homo sapien
gtgccgtgccacagagtccactatg

SEQ ID NO: 2279262 - DNA, 25 bp, Homo sapien
tatgggcaaaagtccagagcgggca

SEQ ID NO: 2279263 - DNA, 25 bp, Homo sapien
tcagttgttaacactcccaggaagt

SEQ ID NO: 2279264 - DNA, 25 bp, Homo sapien
tcacagaggataggccactatgggc

SEQ ID NO: 2279265 - DNA, 25 bp, Homo sapien
ggactcagcttacatcttgggaaaa

SEQ ID NO: 2279266 - DNA, 25 bp, Homo sapien
tacactagctcagcggacatgcatc

SEQ ID NO: 2279267 - DNA, 25 bp, Homo sapien
tgcaggaagctggtttacaaaagcg

SEQ ID NO: 2279268 - DNA, 25 bp, Homo sapien
catgcatcttgaaagtctgagcagc

SEQ ID NO: 2279269 - DNA, 25 bp, Homo sapien
gatagcgatataggcaataaaatcc

SEQ ID NO: 2279270 - DNA, 25 bp, Homo sapien
caaaatgctgatagcgatataggca

SEQ ID NO: 2279271 - DNA, 25 bp, Homo sapien
tgctgatagcgatataggcaataaa

SEQ ID NO: 2279272 - DNA, 25 bp, Homo sapien
gctgatagcgatataggcaataaaa

SEQ ID NO: 2279273 - DNA, 25 bp, Homo sapien
gccagagtataacgagatgtagaac

SEQ ID NO: 2279274 - DNA, 25 bp, Homo sapien
tatgagttcgaatgacaaaaacggg

SEQ ID NO: 2279275 - DNA, 25 bp, Homo sapien
gatgcctcgtggattaacaactggg

SEQ ID NO: 2279276 - DNA, 25 bp, Homo sapien
tctactatgtgctaaaccgtggaag

SEQ ID NO: 2279277 - DNA, 25 bp, Homo sapien
tcatgtgccggggtccccagtcgcc

SEQ ID NO: 2279278 - DNA, 25 bp, Homo sapien
atgtgccggggtccccagtcgccag

SEQ ID NO: 2279279 - DNA, 25 bp, Homo sapien
gggggcgtccacctcatgtgccggg

SEQ ID NO: 2279280 - DNA, 25 bp, Homo sapien
ggcgtccacctcatgtgccggggtc

SEQ ID NO: 2279281 - DNA, 25 bp, Homo sapien
tactggatttagttcactggactca

SEQ ID NO: 2279282 - DNA, 25 bp, Homo sapien
atacaaaccgtatgacccctcgtct

SEQ ID NO: 2279283 - DNA, 25 bp, Homo sapien
gtaaggattagaggcagcacggcac

SEQ ID NO: 2279284 - DNA, 25 bp, Homo sapien
gacacgagacccctttgctaggtat

SEQ ID NO: 2279285 - DNA, 25 bp, Homo sapien
gaaaaatcatatcagcttcaactag

SEQ ID NO: 2279286 - DNA, 25 bp, Homo sapien
ggtcttagggattgcatccaaaaca

SEQ ID NO: 2279287 - DNA, 25 bp, Homo sapien
gaatttctgctaagtgttgtcaaca

SEQ ID NO: 2279288 - DNA, 25 bp, Homo sapien
gaggcactgggccactagaaatatc

SEQ ID NO: 2279289 - DNA, 25 bp, Homo sapien
aaggctggtgctctgtctgactcaa

SEQ ID NO: 2279290 - DNA, 25 bp, Homo sapien
gctggtgctctgtctgactcaagac

SEQ ID NO: 2279291 - DNA, 25 bp, Homo sapien
ccaaggctggtgctctgtctgactc

SEQ ID NO: 2279292 - DNA, 25 bp, Homo sapien
gatagtggtccagggtccccaaggc

SEQ ID NO: 2279293 - DNA, 25 bp, Homo sapien
tttgagctatctggggccgagagct

SEQ ID NO: 2279294 - DNA, 25 bp, Homo sapien
agctagaactcccattggtggaatt

SEQ ID NO: 2279295 - DNA, 25 bp, Homo sapien
agaactcccattggtggaattggag

SEQ ID NO: 2279296 - DNA, 25 bp, Homo sapien
ctgagctagaactcccattggtgga

SEQ ID NO: 2279297 - DNA, 25 bp, Homo sapien
agaccatggcccctcagagctgagt

SEQ ID NO: 2279298 - DNA, 25 bp, Homo sapien
catggcccctcagagctgagtctca

SEQ ID NO: 2279299 - DNA, 25 bp, Homo sapien
accatggcccctcagagctgagtct

SEQ ID NO: 2279300 - DNA, 25 bp, Homo sapien
atggcccctcagagctgagtctcac

SEQ ID NO: 2279301 - DNA, 25 bp, Homo sapien
agctgcattgggctgccgctgcagt

SEQ ID NO: 2279302 - DNA, 25 bp, Homo sapien
gctgccgctgcagtgcttgcagagc

SEQ ID NO: 2279303 - DNA, 25 bp, Homo sapien
gcagccaggctatgcagctgggcat

SEQ ID NO: 2279304 - DNA, 25 bp, Homo sapien
ctgctggagcatgaactggtggaaa

SEQ ID NO: 2279305 - DNA, 25 bp, Homo sapien
tcccctccctctcgggccagctggc

SEQ ID NO: 2279306 - DNA, 25 bp, Homo sapien
tgtcccctccctctcgggccagctg

SEQ ID NO: 2279307 - DNA, 25 bp, Homo sapien
ccctccctctcgggccagctggctg

SEQ ID NO: 2279308 - DNA, 25 bp, Homo sapien
ctgtagtgcctgtcccctccctctc

SEQ ID NO: 2279309 - DNA, 25 bp, Homo sapien
tctgctgctgtgtagtgctggtgtt

SEQ ID NO: 2279310 - DNA, 25 bp, Homo sapien
gtgtttggggagctggcctgccgac

SEQ ID NO: 2279311 - DNA, 25 bp, Homo sapien
cctgccgactggcagcaattgtggc

SEQ ID NO: 2279312 - DNA, 25 bp, Homo sapien
tggtggtagtctgctgctgtgtagt

SEQ ID NO: 2279313 - DNA, 25 bp, Homo sapien
ggagagctcacactctgggatcggc

SEQ ID NO: 2279314 - DNA, 25 bp, Homo sapien
acatctgggcctgagactggttgag

SEQ ID NO: 2279315 - DNA, 25 bp, Homo sapien
tgttccccagtagcacagattgggt

SEQ ID NO: 2279316 - DNA, 25 bp, Homo sapien
agattgggtcaaggtggtagcactg

SEQ ID NO: 2279317 - DNA, 25 bp, Homo sapien
gccccattaggcatcaggatgagtt

SEQ ID NO: 2279318 - DNA, 25 bp, Homo sapien
cattaggcatcaggatgagttggga

SEQ ID NO: 2279319 - DNA, 25 bp, Homo sapien
aggcacattccgacccagggttcgg

SEQ ID NO: 2279320 - DNA, 25 bp, Homo sapien
tgggaggctagaggcacattccgac

SEQ ID NO: 2279321 - DNA, 25 bp, Homo sapien
ctgcatctgcatgaactccaggaga

SEQ ID NO: 2279322 - DNA, 25 bp, Homo sapien
gatctgcatctgcatgaactccagg

SEQ ID NO: 2279323 - DNA, 25 bp, Homo sapien
tctgcatctgcatgaactccaggag

SEQ ID NO: 2279324 - DNA, 25 bp, Homo sapien
ctgatctgcatctgcatgaactcca

SEQ ID NO: 2279325 - DNA, 25 bp, Homo sapien
cagagatgcagaacctacaggtatg

SEQ ID NO: 2279326 - DNA, 25 bp, Homo sapien
agagatgcagaacctacaggtatga

SEQ ID NO: 2279327 - DNA, 25 bp, Homo sapien
ttgattccttactgccaagttctga

SEQ ID NO: 2279328 - DNA, 25 bp, Homo sapien
tgaggcctgttgattccttactgcc

SEQ ID NO: 2279329 - DNA, 25 bp, Homo sapien
ctgaggtccttgagctgaggcctgt

SEQ ID NO: 2279330 - DNA, 25 bp, Homo sapien
agctgaggcctgttgattccttact

SEQ ID NO: 2279331 - DNA, 25 bp, Homo sapien
tggacccatggaccctgggatgcta

SEQ ID NO: 2279332 - DNA, 25 bp, Homo sapien
gctaataagtgtctggctgggcgca

SEQ ID NO: 2279333 - DNA, 25 bp, Homo sapien
tccaccagcttgactaaggttgagg

SEQ ID NO: 2279334 - DNA, 25 bp, Homo sapien
tgtccgtgtcaggttcatgcccaca

SEQ ID NO: 2279335 - DNA, 25 bp, Homo sapien
tgaatggggctggatctgtgtgtag

SEQ ID NO: 2279336 - DNA, 25 bp, Homo sapien
tgtttctgctggaggtggatctgtt

SEQ ID NO: 2279337 - DNA, 25 bp, Homo sapien
tgctggaggtggatctgttgctgtt

SEQ ID NO: 2279338 - DNA, 25 bp, Homo sapien
ctgaatcagtgaatggggctggatc

SEQ ID NO: 2279339 - DNA, 25 bp, Homo sapien
ctgctgcgccaactggaggtgtgta

SEQ ID NO: 2279340 - DNA, 25 bp, Homo sapien
tgctgcgccaactggaggtgtgtag

SEQ ID NO: 2279341 - DNA, 25 bp, Homo sapien
ctgcgccaactggaggtgtgtagct

SEQ ID NO: 2279342 - DNA, 25 bp, Homo sapien
gaggtgtgtagctgtgtgaaggagc

SEQ ID NO: 2279343 - DNA, 25 bp, Homo sapien
agacaagggtgaagactgaagcatg

SEQ ID NO: 2279344 - DNA, 25 bp, Homo sapien
aacgaccagggtttgggcttgctgc

SEQ ID NO: 2279345 - DNA, 25 bp, Homo sapien
gaagagacaagggtgaagactgaag

SEQ ID NO: 2279346 - DNA, 25 bp, Homo sapien
gctgaacgaccagggtttgggcttg

SEQ ID NO: 2279347 - DNA, 25 bp, Homo sapien
gctgtcgagtgcctacaacttgcac

SEQ ID NO: 2279348 - DNA, 25 bp, Homo sapien
agctgacatcttagcggcccctaac

SEQ ID NO: 2279349 - DNA, 25 bp, Homo sapien
cctgggctgtacctggctgtcgagt

SEQ ID NO: 2279350 - DNA, 25 bp, Homo sapien
ggcccctaactgaggcggcttgata

SEQ ID NO: 2279351 - DNA, 25 bp, Homo sapien
cctttaccacatgtgctgtcccctg

SEQ ID NO: 2279352 - DNA, 25 bp, Homo sapien
ggacctgggctacaacaggtgagga

SEQ ID NO: 2279353 - DNA, 25 bp, Homo sapien
aaatgggcctgaccagactgcactg

SEQ ID NO: 2279354 - DNA, 25 bp, Homo sapien
gccaatgtgggagggcactcctgca

SEQ ID NO: 2279355 - DNA, 25 bp, Homo sapien
taacatgatttagtcctgacctagg

SEQ ID NO: 2279356 - DNA, 25 bp, Homo sapien
taatagtgccctcaaaaccatcaga

SEQ ID NO: 2279357 - DNA, 25 bp, Homo sapien
taatgtgtcactctcttacagaaga

SEQ ID NO: 2279358 - DNA, 25 bp, Homo sapien
gagaccctgtattcacgtagaccaa

SEQ ID NO: 2279359 - DNA, 25 bp, Homo sapien
tgaacccaatgtggagacatcatct

SEQ ID NO: 2279360 - DNA, 25 bp, Homo sapien
tccaagactgctcttctcgtccatg

SEQ ID NO: 2279361 - DNA, 25 bp, Homo sapien
gctttctgctactggagatgccttg

SEQ ID NO: 2279362 - DNA, 25 bp, Homo sapien
tgccttggcaggaagcattgaaccc

SEQ ID NO: 2279363 - DNA, 25 bp, Homo sapien
ggatctattcatttgtccaccaact

SEQ ID NO: 2279364 - DNA, 25 bp, Homo sapien
tccaacagcattagaagtcagttac

SEQ ID NO: 2279365 - DNA, 25 bp, Homo sapien
tattagttgagccagcatgatcttc

SEQ ID NO: 2279366 - DNA, 25 bp, Homo sapien
tgtccacccttgacaattcacctgg

SEQ ID NO: 2279367 - DNA, 25 bp, Homo sapien
ggttttgagtcacccatttgtctag

SEQ ID NO: 2279368 - DNA, 25 bp, Homo sapien
tagacaccatggctagtgtaggagg

SEQ ID NO: 2279369 - DNA, 25 bp, Homo sapien
taacaaagccttcaatgatgtgggt

SEQ ID NO: 2279370 - DNA, 25 bp, Homo sapien
cgggggtcaaggctactagttcact

SEQ ID NO: 2279371 - DNA, 25 bp, Homo sapien
gagaacaggttcctacgctggctcc

SEQ ID NO: 2279372 - DNA, 25 bp, Homo sapien
ttctgcaaaccctaggaaagctcct

SEQ ID NO: 2279373 - DNA, 25 bp, Homo sapien
caagacacctcagttctagtcctgg

SEQ ID NO: 2279374 - DNA, 25 bp, Homo sapien
gaatgcactaggagtcaagacacct

SEQ ID NO: 2279375 - DNA, 25 bp, Homo sapien
gccagtctgtagtggcttctcagac

SEQ ID NO: 2279376 - DNA, 25 bp, Homo sapien
tctcagtcagccctgtcggaaggcc

SEQ ID NO: 2279377 - DNA, 25 bp, Homo sapien
agccctgtcggaaggccagtctgta

SEQ ID NO: 2279378 - DNA, 25 bp, Homo sapien
aaggccagtctgtagtggcttctca

SEQ ID NO: 2279379 - DNA, 25 bp, Homo sapien
cacagtactcgcacttcaggagatt

SEQ ID NO: 2279380 - DNA, 25 bp, Homo sapien
caggagattcgccttcttatctaac

SEQ ID NO: 2279381 - DNA, 25 bp, Homo sapien
ttagagccacgaaactgctctgcgg

SEQ ID NO: 2279382 - DNA, 25 bp, Homo sapien
tcttagcgcaagtcatggagcagaa

SEQ ID NO: 2279383 - DNA, 25 bp, Homo sapien
cacgcctgcgaacgcgagcatagtt

SEQ ID NO: 2279384 - DNA, 25 bp, Homo sapien
tcttggcacgggcaatgtcagagga

SEQ ID NO: 2279385 - DNA, 25 bp, Homo sapien
gagcatagttggcttcttgaaactc

SEQ ID NO: 2279386 - DNA, 25 bp, Homo sapien
tcttcagccggaactgatggctaca

SEQ ID NO: 2279387 - DNA, 25 bp, Homo sapien
gctcttactgataaaggcccaggag

SEQ ID NO: 2279388 - DNA, 25 bp, Homo sapien
gggattccccaggtcacgttctcca

SEQ ID NO: 2279389 - DNA, 25 bp, Homo sapien
ggaattatctgaaccccggctagag

SEQ ID NO: 2279390 - DNA, 25 bp, Homo sapien
catgtaattccggtgtaggtggagc

SEQ ID NO: 2279391 - DNA, 25 bp, Homo sapien
tcctctacactccaacggctgggat

SEQ ID NO: 2279392 - DNA, 25 bp, Homo sapien
cactccaacggctgggattactgga

SEQ ID NO: 2279393 - DNA, 25 bp, Homo sapien
ttggagagaagcaataaactcgtac

SEQ ID NO: 2279394 - DNA, 25 bp, Homo sapien
gcaataaactcgtacacctcctcta

SEQ ID NO: 2279395 - DNA, 25 bp, Homo sapien
aggtaatgccagatgataggagaag

SEQ ID NO: 2279396 - DNA, 25 bp, Homo sapien
gtgagaacatgtaggtaatgccaga

SEQ ID NO: 2279397 - DNA, 25 bp, Homo sapien
agaaatggtgagaacatgtaggtaa

SEQ ID NO: 2279398 - DNA, 25 bp, Homo sapien
taatgccagatgataggagaaggga

SEQ ID NO: 2279399 - DNA, 25 bp, Homo sapien
ggcactcataagatgttcttcttta

SEQ ID NO: 2279400 - DNA, 25 bp, Homo sapien
ctgtgagcgaaattcctctgcaatc

SEQ ID NO: 2279401 - DNA, 25 bp, Homo sapien
atcaatctcctgtgagcgaaattcc

SEQ ID NO: 2279402 - DNA, 25 bp, Homo sapien
tatcttggcgcagatcttgagggca

SEQ ID NO: 2279403 - DNA, 25 bp, Homo sapien
aggttataacctggacagtggagag

SEQ ID NO: 2279404 - DNA, 25 bp, Homo sapien
agagtgtctgccttaggctggtttg

SEQ ID NO: 2279405 - DNA, 25 bp, Homo sapien
aaagtctgctggtaccaggttataa

SEQ ID NO: 2279406 - DNA, 25 bp, Homo sapien
ggctggtttgtgcaagagggccacc

SEQ ID NO: 2279407 - DNA, 25 bp, Homo sapien
ccatgtagcaccagcaaccaattct

SEQ ID NO: 2279408 - DNA, 25 bp, Homo sapien
taaggtacgtgaaatggtgagaact

SEQ ID NO: 2279409 - DNA, 25 bp, Homo sapien
agaaaatgtcaaagctgccgccatg

SEQ ID NO: 2279410 - DNA, 25 bp, Homo sapien
tcagtaatcccctacagaaggttac

SEQ ID NO: 2279411 - DNA, 25 bp, Homo sapien
ggataaggctgagcagtcctagttc

SEQ ID NO: 2279412 - DNA, 25 bp, Homo sapien
cctcttggagaattaagacctgggc

SEQ ID NO: 2279413 - DNA, 25 bp, Homo sapien
gcagtcctagttctctagactgcct

SEQ ID NO: 2279414 - DNA, 25 bp, Homo sapien
ggctgagcagtcctagttctctaga

SEQ ID NO: 2279415 - DNA, 25 bp, Homo sapien
caaccaagtctctatactggctggg

SEQ ID NO: 2279416 - DNA, 25 bp, Homo sapien
tcccattgggcaggcaacctgacat

SEQ ID NO: 2279417 - DNA, 25 bp, Homo sapien
tataaggaatagtgcctaaggcagg

SEQ ID NO: 2279418 - DNA, 25 bp, Homo sapien
aatacttttagtccctgcagcagaa

SEQ ID NO: 2279419 - DNA, 25 bp, Homo sapien
aatgaaactatttcatctttggact

SEQ ID NO: 2279420 - DNA, 25 bp, Homo sapien
ggacttttcaatactattggagtga

SEQ ID NO: 2279421 - DNA, 25 bp, Homo sapien
ggcaaagactggaatagagtaagac

SEQ ID NO: 2279422 - DNA, 25 bp, Homo sapien
agagtaagacaactgaaaccaattt

SEQ ID NO: 2279423 - DNA, 25 bp, Homo sapien
cactgaagagtaacatggctccact

SEQ ID NO: 2279424 - DNA, 25 bp, Homo sapien
gctccactggacacaaaagagggat

SEQ ID NO: 2279425 - DNA, 25 bp, Homo sapien
tctttaatagtgaacccctgggcca

SEQ ID NO: 2279426 - DNA, 25 bp, Homo sapien
cttctagaaagggaacggaagcaga

SEQ ID NO: 2279427 - DNA, 25 bp, Homo sapien
cagaaatccagttcgttggaaagga

SEQ ID NO: 2279428 - DNA, 25 bp, Homo sapien
ccagaaatccagttcgttggaaagg

SEQ ID NO: 2279429 - DNA, 25 bp, Homo sapien
gaaaattggtactcctgtgccacag

SEQ ID NO: 2279430 - DNA, 25 bp, Homo sapien
gaaaggaaaattggtactcctgtgc

SEQ ID NO: 2279431 - DNA, 25 bp, Homo sapien
ggattatacggtaccatcacatcat

SEQ ID NO: 2279432 - DNA, 25 bp, Homo sapien
tatctgtccacatacagccaaaatg

SEQ ID NO: 2279433 - DNA, 25 bp, Homo sapien
atttcccaattacaggattatacgg

SEQ ID NO: 2279434 - DNA, 25 bp, Homo sapien
tgggattgggctaaggactgtggtc

SEQ ID NO: 2279435 - DNA, 25 bp, Homo sapien
gatgttctagacttgcttctcccac

SEQ ID NO: 2279436 - DNA, 25 bp, Homo sapien
cagtgattacttggttgcagtccaa

SEQ ID NO: 2279437 - DNA, 25 bp, Homo sapien
tatagtagcctccatgagaatctgg

SEQ ID NO: 2279438 - DNA, 25 bp, Homo sapien
tagtctgagcctggagatgttctag

SEQ ID NO: 2279439 - DNA, 25 bp, Homo sapien
aagtcagagttaatataatagggcc

SEQ ID NO: 2279440 - DNA, 25 bp, Homo sapien
tgggcaaaatggtgtagcaggctca

SEQ ID NO: 2279441 - DNA, 25 bp, Homo sapien
gagttaatataatagggcctgtgaa

SEQ ID NO: 2279442 - DNA, 25 bp, Homo sapien
ttgacatcagaagttacaataggca

SEQ ID NO: 2279443 - DNA, 25 bp, Homo sapien
tggactgacagcactctaactggtt

SEQ ID NO: 2279444 - DNA, 25 bp, Homo sapien
ccttttcagggaatgtatcttagga

SEQ ID NO: 2279445 - DNA, 25 bp, Homo sapien
caggtttgcatcactggttgctgtt

SEQ ID NO: 2279446 - DNA, 25 bp, Homo sapien
tcttggccatagaatcacacgctgt

SEQ ID NO: 2279447 - DNA, 25 bp, Homo sapien
cattaacagataccagagtaaagtg

SEQ ID NO: 2279448 - DNA, 25 bp, Homo sapien
acaagtagcaatggcctgagggatc

SEQ ID NO: 2279449 - DNA, 25 bp, Homo sapien
tttgcaagggtaagtcagtctgtcc

SEQ ID NO: 2279450 - DNA, 25 bp, Homo sapien
gaaattgtccgtgatactcttggaa

SEQ ID NO: 2279451 - DNA, 25 bp, Homo sapien
gcggcgaacgggctagggaagcgcc

SEQ ID NO: 2279452 - DNA, 25 bp, Homo sapien
cgagggcgagctgcctgcgtaactt

SEQ ID NO: 2279453 - DNA, 25 bp, Homo sapien
tacccgggagcggtcaggcgcgtga

SEQ ID NO: 2279454 - DNA, 25 bp, Homo sapien
gacctagcgtgagaactacaactcc

SEQ ID NO: 2279455 - DNA, 25 bp, Homo sapien
gtcgctgcactactctcgtctaggg

SEQ ID NO: 2279456 - DNA, 25 bp, Homo sapien
atcacggccccgtcgctgcactact

SEQ ID NO: 2279457 - DNA, 25 bp, Homo sapien
cgttaagaaagccaggacgcacatc

SEQ ID NO: 2279458 - DNA, 25 bp, Homo sapien
aggagaggtgtcgttaagaaagcca

SEQ ID NO: 2279459 - DNA, 25 bp, Homo sapien
tgtcaaaaggataaaggaggcacca

SEQ ID NO: 2279460 - DNA, 25 bp, Homo sapien
tcctgtggtaggaaacacaccctcc

SEQ ID NO: 2279461 - DNA, 25 bp, Homo sapien
aacttctcggcctcatcagtgggtg

SEQ ID NO: 2279462 - DNA, 25 bp, Homo sapien
tatgtgcctgaaagtaaagaattcc

SEQ ID NO: 2279463 - DNA, 25 bp, Homo sapien
ttgcctcccaagtctcaaagcagca

SEQ ID NO: 2279464 - DNA, 25 bp, Homo sapien
tatctagaactgtgaagaatcagag

SEQ ID NO: 2279465 - DNA, 25 bp, Homo sapien
gatgctgtgcaaccagtgggtctac

SEQ ID NO: 2279466 - DNA, 25 bp, Homo sapien
ctcaaaggcaaaggacattactatt

SEQ ID NO: 2279467 - DNA, 25 bp, Homo sapien
tgacacaccctttagaactagtgcc

SEQ ID NO: 2279468 - DNA, 25 bp, Homo sapien
tttagaactagtgcccatatgtgcc

SEQ ID NO: 2279469 - DNA, 25 bp, Homo sapien
catatgtgccccacaagtctccagt

SEQ ID NO: 2279470 - DNA, 25 bp, Homo sapien
tatcagacccaatgccatgacacac

SEQ ID NO: 2279471 - DNA, 25 bp, Homo sapien
acatgcagttgagagagttaaatta

SEQ ID NO: 2279472 - DNA, 25 bp, Homo sapien
gagttaaattatagaagtgtgaagg

SEQ ID NO: 2279473 - DNA, 25 bp, Homo sapien
ttatagaagtgtgaagggatatgta

SEQ ID NO: 2279474 - DNA, 25 bp, Homo sapien
cttcagctaagatctttcacatgca

SEQ ID NO: 2279475 - DNA, 25 bp, Homo sapien
aacatggaataaataacactgtcag

SEQ ID NO: 2279476 - DNA, 25 bp, Homo sapien
tggaataaataacactgtcagtcat

SEQ ID NO: 2279477 - DNA, 25 bp, Homo sapien
catggaataaataacactgtcagtc

SEQ ID NO: 2279478 - DNA, 25 bp, Homo sapien
ctaacatggaataaataacactgtc

SEQ ID NO: 2279479 - DNA, 25 bp, Homo sapien
tgggcttgggttgccgtaggcaact

SEQ ID NO: 2279480 - DNA, 25 bp, Homo sapien
tgctgtggtccatagtcattctggg

SEQ ID NO: 2279481 - DNA, 25 bp, Homo sapien
tggtccatagtcattctgggcttgg

SEQ ID NO: 2279482 - DNA, 25 bp, Homo sapien
tttttgctgtggtccatagtcattc

SEQ ID NO: 2279483 - DNA, 25 bp, Homo sapien
tgcaacaacagagtcaaagcacaat

SEQ ID NO: 2279484 - DNA, 25 bp, Homo sapien
ctgcaacaacagagtcaaagcacaa

SEQ ID NO: 2279485 - DNA, 25 bp, Homo sapien
gcaacaacagagtcaaagcacaatc

SEQ ID NO: 2279486 - DNA, 25 bp, Homo sapien
ggtatagcagcacactcagaagaac

SEQ ID NO: 2279487 - DNA, 25 bp, Homo sapien
ggcacaggatccactggtatagcag

SEQ ID NO: 2279488 - DNA, 25 bp, Homo sapien
gaagaactgcagtcagaagccccaa

SEQ ID NO: 2279489 - DNA, 25 bp, Homo sapien
gaagccccaaagctattgccacaag

SEQ ID NO: 2279490 - DNA, 25 bp, Homo sapien
accatatttcatccagcggtctggg

SEQ ID NO: 2279491 - DNA, 25 bp, Homo sapien
gacagctggcacaagtggagtagtt

SEQ ID NO: 2279492 - DNA, 25 bp, Homo sapien
tccagtccttttcctccactgagaa

SEQ ID NO: 2279493 - DNA, 25 bp, Homo sapien
gattgtccgttatcacaaggaggtg

SEQ ID NO: 2279494 - DNA, 25 bp, Homo sapien
tgttcctcagaccaatccagcaaaa

SEQ ID NO: 2279495 - DNA, 25 bp, Homo sapien
gaccaatccagcaaaaggcctcact

SEQ ID NO: 2279496 - DNA, 25 bp, Homo sapien
cagccagaattgttcctcagaccaa

SEQ ID NO: 2279497 - DNA, 25 bp, Homo sapien
acctccagccagaattgttcctcag

SEQ ID NO: 2279498 - DNA, 25 bp, Homo sapien
ttgttgatggcaccgcatgtctgca

SEQ ID NO: 2279499 - DNA, 25 bp, Homo sapien
tgatggcaccgcatgtctgcacaaa

SEQ ID NO: 2279500 - DNA, 25 bp, Homo sapien
agcttgaggcttgaagaccattttt

SEQ ID NO: 2279501 - DNA, 25 bp, Homo sapien
atttttgttgatggcaccgcatgtc

SEQ ID NO: 2279502 - DNA, 25 bp, Homo sapien
caaagagaatccatcagttaggcat

SEQ ID NO: 2279503 - DNA, 25 bp, Homo sapien
cctccttttagggatacatgacaga

SEQ ID NO: 2279504 - DNA, 25 bp, Homo sapien
catgacagatctgagggtcaggaca

SEQ ID NO: 2279505 - DNA, 25 bp, Homo sapien
tccctaggaggttgtcttgcatcta

SEQ ID NO: 2279506 - DNA, 25 bp, Homo sapien
tcagaataaagcttgatctgcaaag

SEQ ID NO: 2279507 - DNA, 25 bp, Homo sapien
aataaagcttgatctgcaaagggac

SEQ ID NO: 2279508 - DNA, 25 bp, Homo sapien
ataaagcttgatctgcaaagggaca

SEQ ID NO: 2279509 - DNA, 25 bp, Homo sapien
agaataaagcttgatctgcaaaggg

SEQ ID NO: 2279510 - DNA, 25 bp, Homo sapien
tgtatgtccaaactctactgaggag

SEQ ID NO: 2279511 - DNA, 25 bp, Homo sapien
tttgcattacgtgtgaagagctcag

SEQ ID NO: 2279512 - DNA, 25 bp, Homo sapien
tatagtggtagataagatacagtcc

SEQ ID NO: 2279513 - DNA, 25 bp, Homo sapien
gaaaatgccttatcgaattgactgc

SEQ ID NO: 2279514 - DNA, 25 bp, Homo sapien
gtctccattggcatggaacatcttt

SEQ ID NO: 2279515 - DNA, 25 bp, Homo sapien
tctccattggcatggaacatctttt

SEQ ID NO: 2279516 - DNA, 25 bp, Homo sapien
atgtaaatagagccagtcctgctct

SEQ ID NO: 2279517 - DNA, 25 bp, Homo sapien
cagcctcagaaaggtctagtttcat

SEQ ID NO: 2279518 - DNA, 25 bp, Homo sapien
cagaaagtagattgggaattccggg

SEQ ID NO: 2279519 - DNA, 25 bp, Homo sapien
tactgtaaaactctagaagatgctg

SEQ ID NO: 2279520 - DNA, 25 bp, Homo sapien
caacttaaacgtccatcaaagagta

SEQ ID NO: 2279521 - DNA, 25 bp, Homo sapien
taattgcggtaaatccacacagtag

SEQ ID NO: 2279522 - DNA, 25 bp, Homo sapien
tgaggactgtgtttgtgactaattg

SEQ ID NO: 2279523 - DNA, 25 bp, Homo sapien
tcatgtgcatgggcaaaaaacttga

SEQ ID NO: 2279524 - DNA, 25 bp, Homo sapien
atgtgcatgggcaaaaaacttgagg

SEQ ID NO: 2279525 - DNA, 25 bp, Homo sapien
acttgaggactgtgtttgtgactaa

SEQ ID NO: 2279526 - DNA, 25 bp, Homo sapien
tgccaaggttaacatatgatgaaga

SEQ ID NO: 2279527 - DNA, 25 bp, Homo sapien
tgcaggtctgcccataggtcgccat

SEQ ID NO: 2279528 - DNA, 25 bp, Homo sapien
atgcaggtctgcccataggtcgcca

SEQ ID NO: 2279529 - DNA, 25 bp, Homo sapien
ttgccaaggttaacatatgatgaag

SEQ ID NO: 2279530 - DNA, 25 bp, Homo sapien
aatcccacagcactgcgtgactttg

SEQ ID NO: 2279531 - DNA, 25 bp, Homo sapien
atcccacagcactgcgtgactttgt

SEQ ID NO: 2279532 - DNA, 25 bp, Homo sapien
cccacagcactgcgtgactttgttc

SEQ ID NO: 2279533 - DNA, 25 bp, Homo sapien
aaaggtggtccaattgtgatttctg

SEQ ID NO: 2279534 - DNA, 25 bp, Homo sapien
caaaggtggtccaattgtgatttct

SEQ ID NO: 2279535 - DNA, 25 bp, Homo sapien
ttagtgtgaagctcgaagtccccca

SEQ ID NO: 2279536 - DNA, 25 bp, Homo sapien
ctgtcagtggtcatctggtacccag

SEQ ID NO: 2279537 - DNA, 25 bp, Homo sapien
tcacaagcaaggtttatgcagtccc

SEQ ID NO: 2279538 - DNA, 25 bp, Homo sapien
gctttgacttggcactgtcagtggt

SEQ ID NO: 2279539 - DNA, 25 bp, Homo sapien
tcacataccctctgataaactgagc

SEQ ID NO: 2279540 - DNA, 25 bp, Homo sapien
gcactttttatctagcagagcagaa

SEQ ID NO: 2279541 - DNA, 25 bp, Homo sapien
gaagtatcaagattgtcacataccc

SEQ ID NO: 2279542 - DNA, 25 bp, Homo sapien
cagttggcacttgatgtccgagcaa

SEQ ID NO: 2279543 - DNA, 25 bp, Homo sapien
gagtctccagtatctgttatcccac

SEQ ID NO: 2279544 - DNA, 25 bp, Homo sapien
taagtgatttcccatccctcttgcc

SEQ ID NO: 2279545 - DNA, 25 bp, Homo sapien
gccatcacccaattagagtacattg

SEQ ID NO: 2279546 - DNA, 25 bp, Homo sapien
gagtgtagccatcacccaattagag

SEQ ID NO: 2279547 - DNA, 25 bp, Homo sapien
ccatcaacttcatttgcagcaaaag

SEQ ID NO: 2279548 - DNA, 25 bp, Homo sapien
agcaaaagaacagcccctgatgtac

SEQ ID NO: 2279549 - DNA, 25 bp, Homo sapien
tttgcagcaaaagaacagcccctga

SEQ ID NO: 2279550 - DNA, 25 bp, Homo sapien
acagcccctgatgtacgcctgtttc

SEQ ID NO: 2279551 - DNA, 25 bp, Homo sapien
taagcatccatttgcctcagagaat

SEQ ID NO: 2279552 - DNA, 25 bp, Homo sapien
gaatactgggttgttatgacaagaa

SEQ ID NO: 2279553 - DNA, 25 bp, Homo sapien
tatatgtgactcaccactaacccta

SEQ ID NO: 2279554 - DNA, 25 bp, Homo sapien
tatgatacactgctattctcttgca

SEQ ID NO: 2279555 - DNA, 25 bp, Homo sapien
tgcaggtccggtggcgcctccttgc

SEQ ID NO: 2279556 - DNA, 25 bp, Homo sapien
ggtccggtggcgcctccttgcaggc

SEQ ID NO: 2279557 - DNA, 25 bp, Homo sapien
caggtccggtggcgcctccttgcag

SEQ ID NO: 2279558 - DNA, 25 bp, Homo sapien
gcaggtccggtggcgcctccttgca

SEQ ID NO: 2279559 - DNA, 25 bp, Homo sapien
tgttcagcttctagcagaacggaga

SEQ ID NO: 2279560 - DNA, 25 bp, Homo sapien
ggaatgggtagtttctctccacagg

SEQ ID NO: 2279561 - DNA, 25 bp, Homo sapien
tgcagttagtagctcatttccacag

SEQ ID NO: 2279562 - DNA, 25 bp, Homo sapien
tccacaggtaggtcatccattgtct

SEQ ID NO: 2279563 - DNA, 25 bp, Homo sapien
tgcatcaagcagacaagtggagaat

SEQ ID NO: 2279564 - DNA, 25 bp, Homo sapien
caagcagacaagtggagaatgagac

SEQ ID NO: 2279565 - DNA, 25 bp, Homo sapien
catcaagcagacaagtggagaatga

SEQ ID NO: 2279566 - DNA, 25 bp, Homo sapien
ctgcatcaagcagacaagtggagaa

SEQ ID NO: 2279567 - DNA, 25 bp, Homo sapien
gggtgtcgctttcctggccagtcta

SEQ ID NO: 2279568 - DNA, 25 bp, Homo sapien
ggagtcctactcttcatttggcaca

SEQ ID NO: 2279569 - DNA, 25 bp, Homo sapien
ggaaagaatactctctgctcatgga

SEQ ID NO: 2279570 - DNA, 25 bp, Homo sapien
tgtcaaacctcagagagtccatagg

SEQ ID NO: 2279571 - DNA, 25 bp, Homo sapien
gcaaaggtaagccactcacactcct

SEQ ID NO: 2279572 - DNA, 25 bp, Homo sapien
ttgcaattgctgagtacaatgctcc

SEQ ID NO: 2279573 - DNA, 25 bp, Homo sapien
tccttgcagcaaaggtaagccactc

SEQ ID NO: 2279574 - DNA, 25 bp, Homo sapien
gagtacaatgctccttgcagcaaag

SEQ ID NO: 2279575 - DNA, 25 bp, Homo sapien
ggtagcaagcaacacatcagatgaa

SEQ ID NO: 2279576 - DNA, 25 bp, Homo sapien
tactaatacaaaacacctgtgggat

SEQ ID NO: 2279577 - DNA, 25 bp, Homo sapien
ggtacaatactgttcttcccacaac

SEQ ID NO: 2279578 - DNA, 25 bp, Homo sapien
tggcctgtatcccacagatgtttgc

SEQ ID NO: 2279579 - DNA, 25 bp, Homo sapien
tcccagtaagagatctgaaaccagc

SEQ ID NO: 2279580 - DNA, 25 bp, Homo sapien
gaaaccagccatagtgaaagtctat

SEQ ID NO: 2279581 - DNA, 25 bp, Homo sapien
ttccaggtgtcaaatcagacactga

SEQ ID NO: 2279582 - DNA, 25 bp, Homo sapien
cagacactgagcttgttcttcacgg

SEQ ID NO: 2279583 - DNA, 25 bp, Homo sapien
gacaggaattctgggaaagggcaaa

SEQ ID NO: 2279584 - DNA, 25 bp, Homo sapien
cccctttgctttaggagtgcagact

SEQ ID NO: 2279585 - DNA, 25 bp, Homo sapien
catccaggatctactattgtgcaac

SEQ ID NO: 2279586 - DNA, 25 bp, Homo sapien
tccctaagtgtcaggtaagaccttc

SEQ ID NO: 2279587 - DNA, 25 bp, Homo sapien
ctgttttgcctggagtcagcctgga

SEQ ID NO: 2279588 - DNA, 25 bp, Homo sapien
catggcagccatgtatataccaaag

SEQ ID NO: 2279589 - DNA, 25 bp, Homo sapien
tgttgtccgcaatgccctgttttgc

SEQ ID NO: 2279590 - DNA, 25 bp, Homo sapien
gcactgctggcctatgcttttgccc

SEQ ID NO: 2279591 - DNA, 25 bp, Homo sapien
gaagtgaccctctccgcctatatca

SEQ ID NO: 2279592 - DNA, 25 bp, Homo sapien
atcgcccttctggagattcctctca

SEQ ID NO: 2279593 - DNA, 25 bp, Homo sapien
gaagatgaagtgaccctctccgcct

SEQ ID NO: 2279594 - DNA, 25 bp, Homo sapien
ctatatcaccatcgcccttctggag

SEQ ID NO: 2279595 - DNA, 25 bp, Homo sapien
gagctctgggtcactgctcaacaat

SEQ ID NO: 2279596 - DNA, 25 bp, Homo sapien
ggcagaaggacaatggctgtttcag

SEQ ID NO: 2279597 - DNA, 25 bp, Homo sapien
ttcaggagctctgggtcactgctca

SEQ ID NO: 2279598 - DNA, 25 bp, Homo sapien
tgggtcactgctcaacaatgccata

SEQ ID NO: 2279599 - DNA, 25 bp, Homo sapien
tagcttagctcactatgatagctgc

SEQ ID NO: 2279600 - DNA, 25 bp, Homo sapien
tccagatgccctatggctgtggaga

SEQ ID NO: 2279601 - DNA, 25 bp, Homo sapien
tctaggagacatattaggctctgcc

SEQ ID NO: 2279602 - DNA, 25 bp, Homo sapien
caaggccattggctatctcaacact

SEQ ID NO: 2279603 - DNA, 25 bp, Homo sapien
cagttggtgacaaccttgagcaggc

SEQ ID NO: 2279604 - DNA, 25 bp, Homo sapien
gctgggtactacaatggcctctggt

SEQ ID NO: 2279605 - DNA, 25 bp, Homo sapien
gttaggcagggtcacaatccgggct

SEQ ID NO: 2279606 - DNA, 25 bp, Homo sapien
tcatgggttccctagttggctgggc

SEQ ID NO: 2279607 - DNA, 25 bp, Homo sapien
gacaccatcaccgagtggaaggcag

SEQ ID NO: 2279608 - DNA, 25 bp, Homo sapien
gatccctcactggttagcaatcctg

SEQ ID NO: 2279609 - DNA, 25 bp, Homo sapien
agattgcctgtaagagatccctcac

SEQ ID NO: 2279610 - DNA, 25 bp, Homo sapien
taggagtaacagtccctgacaccat

SEQ ID NO: 2279611 - DNA, 25 bp, Homo sapien
gcagccacataggactccacagagt

SEQ ID NO: 2279612 - DNA, 25 bp, Homo sapien
caaagccactgtcataacatgtgtg

SEQ ID NO: 2279613 - DNA, 25 bp, Homo sapien
gcctctcctggcttgttaagtcaac

SEQ ID NO: 2279614 - DNA, 25 bp, Homo sapien
gaagctttccttgatgacccaagcg

SEQ ID NO: 2279615 - DNA, 25 bp, Homo sapien
ggcagagtcacactaagaagcagaa

SEQ ID NO: 2279616 - DNA, 25 bp, Homo sapien
tttacacatgtgaacattagggcca

SEQ ID NO: 2279617 - DNA, 25 bp, Homo sapien
caatccctgtgaagtcagacattgc

SEQ ID NO: 2279618 - DNA, 25 bp, Homo sapien
cattgctcctgtcgctcggttgctc

SEQ ID NO: 2279619 - DNA, 25 bp, Homo sapien
ttttcagcctattttctttgcgtta

SEQ ID NO: 2279620 - DNA, 25 bp, Homo sapien
tgggccagctatgatggcttacgcc

SEQ ID NO: 2279621 - DNA, 25 bp, Homo sapien
aaatgtacgatttcaaggtatgttg

SEQ ID NO: 2279622 - DNA, 25 bp, Homo sapien
gtgtataatctatgcttattccaga

SEQ ID NO: 2279623 - DNA, 25 bp, Homo sapien
tgttacggctaccagtgggtgtcag

SEQ ID NO: 2279624 - DNA, 25 bp, Homo sapien
caaggatcgtagtccctgttacggc

SEQ ID NO: 2279625 - DNA, 25 bp, Homo sapien
cattaggtcaattacaaggatcgta

SEQ ID NO: 2279626 - DNA, 25 bp, Homo sapien
tagtccctgttacggctaccagtgg

SEQ ID NO: 2279627 - DNA, 25 bp, Homo sapien
tcaggtggaaggacagagcaccctt

SEQ ID NO: 2279628 - DNA, 25 bp, Homo sapien
caaggtggtggtacagaagaaatca

SEQ ID NO: 2279629 - DNA, 25 bp, Homo sapien
cagagtttccagttagagggtggcc

SEQ ID NO: 2279630 - DNA, 25 bp, Homo sapien
aaaggaaatcgcatcgcacaatggc

SEQ ID NO: 2279631 - DNA, 25 bp, Homo sapien
gatcttaaattacatgtcagggtac

SEQ ID NO: 2279632 - DNA, 25 bp, Homo sapien
ggagttctgtgagcaaaaatgtata

SEQ ID NO: 2279633 - DNA, 25 bp, Homo sapien
aatatgtaaggagtgcacagagtcc

SEQ ID NO: 2279634 - DNA, 25 bp, Homo sapien
gaaagtttctgtactgcacatgagt

SEQ ID NO: 2279635 - DNA, 25 bp, Homo sapien
tctctgaagctctaatatgcaaagc

SEQ ID NO: 2279636 - DNA, 25 bp, Homo sapien
caaatctagtttactcattacttgc

SEQ ID NO: 2279637 - DNA, 25 bp, Homo sapien
ctaagattccttccagattttacaa

SEQ ID NO: 2279638 - DNA, 25 bp, Homo sapien
ctcattacttgcttacttttaatca

SEQ ID NO: 2279639 - DNA, 25 bp, Homo sapien
atggggaagaacaaactccttcatc

SEQ ID NO: 2279640 - DNA, 25 bp, Homo sapien
tgtgcagctggttgtcccatcgtct

SEQ ID NO: 2279641 - DNA, 25 bp, Homo sapien
cgtaggcaggtcttcccaacatcta

SEQ ID NO: 2279642 - DNA, 25 bp, Homo sapien
cactgtagtcccgaagtctctgcag

SEQ ID NO: 2279643 - DNA, 25 bp, Homo sapien
cctgctgattgatccatgggcagcc

SEQ ID NO: 2279644 - DNA, 25 bp, Homo sapien
atcgggcgccctgcgcaggccttga

SEQ ID NO: 2279645 - DNA, 25 bp, Homo sapien
ctgcgcaggccttgatgtctgcctc

SEQ ID NO: 2279646 - DNA, 25 bp, Homo sapien
ccaggcggcgggtgtcaatctgcaa

SEQ ID NO: 2279647 - DNA, 25 bp, Homo sapien
tcaatctgcaagacaatccgggagt

SEQ ID NO: 2279648 - DNA, 25 bp, Homo sapien
gctcgagcaggatgcggtcggcagt

SEQ ID NO: 2279649 - DNA, 25 bp, Homo sapien
tgctgtaaggatctttctggcgctc

SEQ ID NO: 2279650 - DNA, 25 bp, Homo sapien
tctggcagtcagcacacacattgcc

SEQ ID NO: 2279651 - DNA, 25 bp, Homo sapien
ggtcggcagtgatctcctgctcagg

SEQ ID NO: 2279652 - DNA, 25 bp, Homo sapien
tgagccctttgctgtggagaaactt

SEQ ID NO: 2279653 - DNA, 25 bp, Homo sapien
tgttgcccgttcgtgagccctttgc

SEQ ID NO: 2279654 - DNA, 25 bp, Homo sapien
tataatgttctgtcagcagttcctg

SEQ ID NO: 2279655 - DNA, 25 bp, Homo sapien
aggtctgcagctgttgcccgttcgt

SEQ ID NO: 2279656 - DNA, 25 bp, Homo sapien
gggcttccttcaacacaatggtcaa

SEQ ID NO: 2279657 - DNA, 25 bp, Homo sapien
gcctattctgtagcggactctccaa

SEQ ID NO: 2279658 - DNA, 25 bp, Homo sapien
ttttgacaattctgatagggcgtgc

SEQ ID NO: 2279659 - DNA, 25 bp, Homo sapien
tgcagcacaggtaagagttcaccac

SEQ ID NO: 2279660 - DNA, 25 bp, Homo sapien
gaatcgtgtaagcctgggaggcaga

SEQ ID NO: 2279661 - DNA, 25 bp, Homo sapien
ggttgcagtgagctgagatcacgcc

SEQ ID NO: 2279662 - DNA, 25 bp, Homo sapien
agaatcgtgtaagcctgggaggcag

SEQ ID NO: 2279663 - DNA, 25 bp, Homo sapien
gagaatcgtgtaagcctgggaggca

SEQ ID NO: 2279664 - DNA, 25 bp, Homo sapien
tgaagccagcaattgttaaagtcta

SEQ ID NO: 2279665 - DNA, 25 bp, Homo sapien
tgaaacaatcttaaccagagccaag

SEQ ID NO: 2279666 - DNA, 25 bp, Homo sapien
acatcccagtaggagacttgaagcc

SEQ ID NO: 2279667 - DNA, 25 bp, Homo sapien
taaaaacgacttactacagtctggc

SEQ ID NO: 2279668 - DNA, 25 bp, Homo sapien
tagactctgaatataaaggccattt

SEQ ID NO: 2279669 - DNA, 25 bp, Homo sapien
tctcttacctaaatgatagactctg

SEQ ID NO: 2279670 - DNA, 25 bp, Homo sapien
cacattccccaggtgacatattagg

SEQ ID NO: 2279671 - DNA, 25 bp, Homo sapien
ggattacaggcgatagctgctattc

SEQ ID NO: 2279672 - DNA, 25 bp, Homo sapien
ccacatgcaactgttggaggtggct

SEQ ID NO: 2279673 - DNA, 25 bp, Homo sapien
ggtactaacttgttgccagcccaca

SEQ ID NO: 2279674 - DNA, 25 bp, Homo sapien
tgggatcagggaccttctcaaagaa

SEQ ID NO: 2279675 - DNA, 25 bp, Homo sapien
ccctcattgggaggtctcgcccagt

SEQ ID NO: 2279676 - DNA, 25 bp, Homo sapien
ggttctacagtccttttagttgaga

SEQ ID NO: 2279677 - DNA, 25 bp, Homo sapien
tcagctcagctttgatctttgctat

SEQ ID NO: 2279678 - DNA, 25 bp, Homo sapien
cttttagatgcaggcacttagtgct

SEQ ID NO: 2279679 - DNA, 25 bp, Homo sapien
tcccagagattgcagtacattgtct

SEQ ID NO: 2279680 - DNA, 25 bp, Homo sapien
gtaaattaccttgcgcaccagcatg

SEQ ID NO: 2279681 - DNA, 25 bp, Homo sapien
taaataaataaataagcctctattg

SEQ ID NO: 2279682 - DNA, 25 bp, Homo sapien
ctgcacaatgtgcacatgtacccta

SEQ ID NO: 2279683 - DNA, 25 bp, Homo sapien
gcacatgtatacatatgtaactaac

SEQ ID NO: 2279684 - DNA, 25 bp, Homo sapien
tagccaacaaggtgagcgatttaac

SEQ ID NO: 2279685 - DNA, 25 bp, Homo sapien
ttccctgtggagtcagacgttgccc

SEQ ID NO: 2279686 - DNA, 25 bp, Homo sapien
tgaatggacgcagttctcaagtgga

SEQ ID NO: 2279687 - DNA, 25 bp, Homo sapien
taaagttctgaagggagacattggc

SEQ ID NO: 2279688 - DNA, 25 bp, Homo sapien
tttgtatgagatggttaaaaaggcc

SEQ ID NO: 2279689 - DNA, 25 bp, Homo sapien
gagatggttaaaaaggccaaagata

SEQ ID NO: 2279690 - DNA, 25 bp, Homo sapien
tatgagatggttaaaaaggccaaag

SEQ ID NO: 2279691 - DNA, 25 bp, Homo sapien
agttggtttgtatgagatggttaaa

SEQ ID NO: 2279692 - DNA, 25 bp, Homo sapien
tccacttcccgtctcagaatctaaa

SEQ ID NO: 2279693 - DNA, 25 bp, Homo sapien
tcccgtctcagaatctaaacgtggt

SEQ ID NO: 2279694 - DNA, 25 bp, Homo sapien
taaacgtggtcaccttcgagtagag

SEQ ID NO: 2279695 - DNA, 25 bp, Homo sapien
ccatgagaatttgcaacaggggagg

SEQ ID NO: 2279696 - DNA, 25 bp, Homo sapien
aatcaccaccgaggacttaaaggag

SEQ ID NO: 2279697 - DNA, 25 bp, Homo sapien
ctccgaaatcaccaccgaggactta

SEQ ID NO: 2279698 - DNA, 25 bp, Homo sapien
tcaccaccgaggacttaaaggagaa

SEQ ID NO: 2279699 - DNA, 25 bp, Homo sapien
gaaggaagttgtggaagaggcggaa

SEQ ID NO: 2279700 - DNA, 25 bp, Homo sapien
atgtcagacgcagccgtagacacca

SEQ ID NO: 2279701 - DNA, 25 bp, Homo sapien
gcgtgccccaccatgtcagacgcag

SEQ ID NO: 2279702 - DNA, 25 bp, Homo sapien
ccaccatgtcagacgcagccgtaga

SEQ ID NO: 2279703 - DNA, 25 bp, Homo sapien
ccatgtcagacgcagccgtagacac

SEQ ID NO: 2279704 - DNA, 25 bp, Homo sapien
cctcctccaaatctaaggacatttg

SEQ ID NO: 2279705 - DNA, 25 bp, Homo sapien
ctgctctgaaaagccgtctttgcat

SEQ ID NO: 2279706 - DNA, 25 bp, Homo sapien
aaagccgtctttgcattgtgcgtcg

SEQ ID NO: 2279707 - DNA, 25 bp, Homo sapien
attgtgcgtcgtcagcctccttgct

SEQ ID NO: 2279708 - DNA, 25 bp, Homo sapien
aaaatgaggttcacactgaggcctg

SEQ ID NO: 2279709 - DNA, 25 bp, Homo sapien
tcacagagtggaaggccagcgcatt

SEQ ID NO: 2279710 - DNA, 25 bp, Homo sapien
ccccaggagccgtagaaataatgta

SEQ ID NO: 2279711 - DNA, 25 bp, Homo sapien
tctgtggtgcgaggagaagccttca

SEQ ID NO: 2279712 - DNA, 25 bp, Homo sapien
tcaggaggtacatgtacaggtcatt

SEQ ID NO: 2279713 - DNA, 25 bp, Homo sapien
ggaggtacatgtacaggtcatttgt

SEQ ID NO: 2279714 - DNA, 25 bp, Homo sapien
caggaggtacatgtacaggtcattt

SEQ ID NO: 2279715 - DNA, 25 bp, Homo sapien
attcaggaggtacatgtacaggtca

SEQ ID NO: 2279716 - DNA, 25 bp, Homo sapien
tcaggaaaatatgtcgttcatctgc

SEQ ID NO: 2279717 - DNA, 25 bp, Homo sapien
ggaaaatatgtcgttcatctgctag

SEQ ID NO: 2279718 - DNA, 25 bp, Homo sapien
cttcaggaaaatatgtcgttcatct

SEQ ID NO: 2279719 - DNA, 25 bp, Homo sapien
aaaatatgtcgttcatctgctagag

SEQ ID NO: 2279720 - DNA, 25 bp, Homo sapien
gttgttaaatcttgggaatggccaa

SEQ ID NO: 2279721 - DNA, 25 bp, Homo sapien
acatcttattcgttctagcagtggg

SEQ ID NO: 2279722 - DNA, 25 bp, Homo sapien
ttatgctccggctttcagcacatct

SEQ ID NO: 2279723 - DNA, 25 bp, Homo sapien
taatgatgggtagttagtttgttgt

SEQ ID NO: 2279724 - DNA, 25 bp, Homo sapien
taataggatgacatactgggtttgc

SEQ ID NO: 2279725 - DNA, 25 bp, Homo sapien
aatctcccaatcaggaatccatgtg

SEQ ID NO: 2279726 - DNA, 25 bp, Homo sapien
gccttcagatcaaagcaagaggaaa

SEQ ID NO: 2279727 - DNA, 25 bp, Homo sapien
gcaatttggagctattctcacatta

SEQ ID NO: 2279728 - DNA, 25 bp, Homo sapien
gccaggccccgggaatcagggcaaa

SEQ ID NO: 2279729 - DNA, 25 bp, Homo sapien
cttcttcgccggcagaattgctacg

SEQ ID NO: 2279730 - DNA, 25 bp, Homo sapien
acgctgaaagccaggccccgggaat

SEQ ID NO: 2279731 - DNA, 25 bp, Homo sapien
cgggaatcagggcaaacgccactga

SEQ ID NO: 2279732 - DNA, 25 bp, Homo sapien
gacgcccagtttgcgatttcaccag

SEQ ID NO: 2279733 - DNA, 25 bp, Homo sapien
agtttgcgatttcaccagtctgccc

SEQ ID NO: 2279734 - DNA, 25 bp, Homo sapien
ggaacagacgcccagtttgcgattt

SEQ ID NO: 2279735 - DNA, 25 bp, Homo sapien
gcccagtttgcgatttcaccagtct

SEQ ID NO: 2279736 - DNA, 25 bp, Homo sapien
gcactgctgttaagccagggccaca

SEQ ID NO: 2279737 - DNA, 25 bp, Homo sapien
tatgacacttccgtcaacaatctgg

SEQ ID NO: 2279738 - DNA, 25 bp, Homo sapien
tggaggatggcctggcccataatac

SEQ ID NO: 2279739 - DNA, 25 bp, Homo sapien
aagcttttccgcactgctgttaagc

SEQ ID NO: 2279740 - DNA, 25 bp, Homo sapien
gagaagtaaacgctatctggaggcc

SEQ ID NO: 2279741 - DNA, 25 bp, Homo sapien
aaggagaagtaaacgctatctggag

SEQ ID NO: 2279742 - DNA, 25 bp, Homo sapien
gaaaggagaagtaaacgctatctgg

SEQ ID NO: 2279743 - DNA, 25 bp, Homo sapien
aggagaagtaaacgctatctggagg

SEQ ID NO: 2279744 - DNA, 25 bp, Homo sapien
caaccttctgtgtttcattagccat

SEQ ID NO: 2279745 - DNA, 25 bp, Homo sapien
gcaccaaccttctgtgtttcattag

SEQ ID NO: 2279746 - DNA, 25 bp, Homo sapien
ggatggcaccaaccttctgtgtttc

SEQ ID NO: 2279747 - DNA, 25 bp, Homo sapien
ctggatggaatagggtgtgaaggga

SEQ ID NO: 2279748 - DNA, 25 bp, Homo sapien
ccaaaacccggtacagctctgccat

SEQ ID NO: 2279749 - DNA, 25 bp, Homo sapien
ccagcctccaaaacccggtacagct

SEQ ID NO: 2279750 - DNA, 25 bp, Homo sapien
gttggactctcaaatatcccaatct

SEQ ID NO: 2279751 - DNA, 25 bp, Homo sapien
tgccagttggactctcaaatatccc

SEQ ID NO: 2279752 - DNA, 25 bp, Homo sapien
aacatcgacaattaaaggctgagca

SEQ ID NO: 2279753 - DNA, 25 bp, Homo sapien
gaagatgaagctatagaaccagaaa

SEQ ID NO: 2279754 - DNA, 25 bp, Homo sapien
gctatagaaccagaaacatcgacaa

SEQ ID NO: 2279755 - DNA, 25 bp, Homo sapien
gaaccagaaacatcgacaattaaag

SEQ ID NO: 2279756 - DNA, 25 bp, Homo sapien
agccagtgccctccatttgaaagtg

SEQ ID NO: 2279757 - DNA, 25 bp, Homo sapien
agacacaatggttagaaagccagtg

SEQ ID NO: 2279758 - DNA, 25 bp, Homo sapien
ccagtgccctccatttgaaagtgag

SEQ ID NO: 2279759 - DNA, 25 bp, Homo sapien
ggagacacaatggttagaaagccag

SEQ ID NO: 2279760 - DNA, 25 bp, Homo sapien
tccctcagcttttgatagaaagtaa

SEQ ID NO: 2279761 - DNA, 25 bp, Homo sapien
atggcaaagggttccaggcagcatt

SEQ ID NO: 2279762 - DNA, 25 bp, Homo sapien
agcttttgatagaaagtaaatggca

SEQ ID NO: 2279763 - DNA, 25 bp, Homo sapien
agtaaatggcaaagggttccaggca

SEQ ID NO: 2279764 - DNA, 25 bp, Homo sapien
tcttccagagaggacccttcaggga

SEQ ID NO: 2279765 - DNA, 25 bp, Homo sapien
gcgatgtcatgatacccaaggagaa

SEQ ID NO: 2279766 - DNA, 25 bp, Homo sapien
ccagcgctgtgggatgtcagtttct

SEQ ID NO: 2279767 - DNA, 25 bp, Homo sapien
cagaagggaccaagcatgctgacac

SEQ ID NO: 2279768 - DNA, 25 bp, Homo sapien
aggagtcgtgcctcttcttcacgct

SEQ ID NO: 2279769 - DNA, 25 bp, Homo sapien
cttcacgcttcttctgttcaaagtc

SEQ ID NO: 2279770 - DNA, 25 bp, Homo sapien
tctcatcatgtaaggggccagttcc

SEQ ID NO: 2279771 - DNA, 25 bp, Homo sapien
gacacagggattcatctttctcatc

SEQ ID NO: 2279772 - DNA, 25 bp, Homo sapien
cctgcagccccttcgcaggaggaag

SEQ ID NO: 2279773 - DNA, 25 bp, Homo sapien
tgcctgcagccccttcgcaggagga

SEQ ID NO: 2279774 - DNA, 25 bp, Homo sapien
gggtgcctgcagccccttcgcagga

SEQ ID NO: 2279775 - DNA, 25 bp, Homo sapien
ggtgcctgcagccccttcgcaggag

SEQ ID NO: 2279776 - DNA, 25 bp, Homo sapien
agtaacccaggccggttctccagca

SEQ ID NO: 2279777 - DNA, 25 bp, Homo sapien
tgagtaacccaggccggttctccag

SEQ ID NO: 2279778 - DNA, 25 bp, Homo sapien
taacccaggccggttctccagcagg

SEQ ID NO: 2279779 - DNA, 25 bp, Homo sapien
aacccaggccggttctccagcaggc

SEQ ID NO: 2279780 - DNA, 25 bp, Homo sapien
aggtccctctcttctttcttctgca

SEQ ID NO: 2279781 - DNA, 25 bp, Homo sapien
ttcagtcggtccaccaggtccctct

SEQ ID NO: 2279782 - DNA, 25 bp, Homo sapien
cctctcttctttcttctgcacaaac

SEQ ID NO: 2279783 - DNA, 25 bp, Homo sapien
cttcagtcggtccaccaggtccctc

SEQ ID NO: 2279784 - DNA, 25 bp, Homo sapien
gcactgcctgagtctcggaatcgcc

SEQ ID NO: 2279785 - DNA, 25 bp, Homo sapien
gggagcatgcactgcctgagtctcg

SEQ ID NO: 2279786 - DNA, 25 bp, Homo sapien
ccacttccggataccccaggtctca

SEQ ID NO: 2279787 - DNA, 25 bp, Homo sapien
aacaatcgctgaagccctgtttcct

SEQ ID NO: 2279788 - DNA, 25 bp, Homo sapien
caggcgcttggctgcatacttgagc

SEQ ID NO: 2279789 - DNA, 25 bp, Homo sapien
tgctgcaggcgttcttctcgctgct

SEQ ID NO: 2279790 - DNA, 25 bp, Homo sapien
gctgctgcaggcgttcttctcgctg

SEQ ID NO: 2279791 - DNA, 25 bp, Homo sapien
gcagctgctgcaggcgttcttctcg

SEQ ID NO: 2279792 - DNA, 25 bp, Homo sapien
tgaggcggaggagattctctgtttc

SEQ ID NO: 2279793 - DNA, 25 bp, Homo sapien
ctgaggcggaggagattctctgttt

SEQ ID NO: 2279794 - DNA, 25 bp, Homo sapien
ctgctgaggcggaggagattctctg

SEQ ID NO: 2279795 - DNA, 25 bp, Homo sapien
aggcggaggagattctctgtttctt

SEQ ID NO: 2279796 - DNA, 25 bp, Homo sapien
tattcggcgaggaccagctcctcct

SEQ ID NO: 2279797 - DNA, 25 bp, Homo sapien
tcgtattcggcgaggaccagctcct

SEQ ID NO: 2279798 - DNA, 25 bp, Homo sapien
cgtattcggcgaggaccagctcctc

SEQ ID NO: 2279799 - DNA, 25 bp, Homo sapien
tctcgtattcggcgaggaccagctc

SEQ ID NO: 2279800 - DNA, 25 bp, Homo sapien
agcacacccctatgccaaacactgg

SEQ ID NO: 2279801 - DNA, 25 bp, Homo sapien
catcaaactgtaaagacgtggttcc

SEQ ID NO: 2279802 - DNA, 25 bp, Homo sapien
cgaagccaccaagacgacacctgag

SEQ ID NO: 2279803 - DNA, 25 bp, Homo sapien
actgggtcagctctgggaacatcaa

SEQ ID NO: 2279804 - DNA, 25 bp, Homo sapien
gcacaaactgtttatgaccccctct

SEQ ID NO: 2279805 - DNA, 25 bp, Homo sapien
ccttgtccccatgggctctaaggga

SEQ ID NO: 2279806 - DNA, 25 bp, Homo sapien
tctcaccagcgaggcataaagcaac

SEQ ID NO: 2279807 - DNA, 25 bp, Homo sapien
ggagcagaaacacgaccttggaggt

SEQ ID NO: 2279808 - DNA, 25 bp, Homo sapien
gatgctgtcacttatgaccagctgc

SEQ ID NO: 2279809 - DNA, 25 bp, Homo sapien
gctgtcacttatgaccagctgcaac

SEQ ID NO: 2279810 - DNA, 25 bp, Homo sapien
agaggatgctgtcacttatgaccag

SEQ ID NO: 2279811 - DNA, 25 bp, Homo sapien
actcttcttttgtcagcgcctcagt

SEQ ID NO: 2279812 - DNA, 25 bp, Homo sapien
attcccagcaatgggttccaccaag

SEQ ID NO: 2279813 - DNA, 25 bp, Homo sapien
tgggttccaccaaggtagcaggtgc

SEQ ID NO: 2279814 - DNA, 25 bp, Homo sapien
gggttccaccaaggtagcaggtgct

SEQ ID NO: 2279815 - DNA, 25 bp, Homo sapien
ggttccaccaaggtagcaggtgctg

SEQ ID NO: 2279816 - DNA, 25 bp, Homo sapien
aaacagtcttccctcagcaaactca

SEQ ID NO: 2279817 - DNA, 25 bp, Homo sapien
gagaatagaaaacagtcttccctca

SEQ ID NO: 2279818 - DNA, 25 bp, Homo sapien
aacagtcttccctcagcaaactcag

SEQ ID NO: 2279819 - DNA, 25 bp, Homo sapien
tgtgtgagagagaatagaaaacagt

SEQ ID NO: 2279820 - DNA, 25 bp, Homo sapien
caggtcatcctcatcctcatccact

SEQ ID NO: 2279821 - DNA, 25 bp, Homo sapien
ctccaggtcatcctcatcctcatcc

SEQ ID NO: 2279822 - DNA, 25 bp, Homo sapien
ttcctccaggtcatcctcatcctca

SEQ ID NO: 2279823 - DNA, 25 bp, Homo sapien
cttagttatgtgttcttcctccagg

SEQ ID NO: 2279824 - DNA, 25 bp, Homo sapien
gggagaccagccgaacatccttgcc

SEQ ID NO: 2279825 - DNA, 25 bp, Homo sapien
ttcacctcatgcacaaactgggcca

SEQ ID NO: 2279826 - DNA, 25 bp, Homo sapien
tcttcttcacctcatgcacaaactg

SEQ ID NO: 2279827 - DNA, 25 bp, Homo sapien
ccagccgaacatccttgccaaaggg

SEQ ID NO: 2279828 - DNA, 25 bp, Homo sapien
tgataagctgcacagaacctaggct

SEQ ID NO: 2279829 - DNA, 25 bp, Homo sapien
ttgataagctgcacagaacctaggc

SEQ ID NO: 2279830 - DNA, 25 bp, Homo sapien
gataagctgcacagaacctaggctt

SEQ ID NO: 2279831 - DNA, 25 bp, Homo sapien
cggctacaccatggtcccggtggct

SEQ ID NO: 2279832 - DNA, 25 bp, Homo sapien
gctacaccatggtcccggtggctac

SEQ ID NO: 2279833 - DNA, 25 bp, Homo sapien
ctgcggctacaccatggtcccggtg

SEQ ID NO: 2279834 - DNA, 25 bp, Homo sapien
tgcggctacaccatggtcccggtgg

SEQ ID NO: 2279835 - DNA, 25 bp, Homo sapien
ggactcaggaaggaactggggtctc

SEQ ID NO: 2279836 - DNA, 25 bp, Homo sapien
gactcaggaaggaactggggtctcc

SEQ ID NO: 2279837 - DNA, 25 bp, Homo sapien
cagagagtaggaacactttttccca

SEQ ID NO: 2279838 - DNA, 25 bp, Homo sapien
tcaggaaggaactggggtctcctct

SEQ ID NO: 2279839 - DNA, 25 bp, Homo sapien
tcctgcctcctcctctttggcttct

SEQ ID NO: 2279840 - DNA, 25 bp, Homo sapien
ctctttggcttctcctcctcagctc

SEQ ID NO: 2279841 - DNA, 25 bp, Homo sapien
ctcctctttggcttctcctcctcag

SEQ ID NO: 2279842 - DNA, 25 bp, Homo sapien
ctgcctcctcctctttggcttctcc

SEQ ID NO: 2279843 - DNA, 25 bp, Homo sapien
tcatcccggagaaggcccatctgct

SEQ ID NO: 2279844 - DNA, 25 bp, Homo sapien
ccatctgctcgtggttgtagaaggg

SEQ ID NO: 2279845 - DNA, 25 bp, Homo sapien
tgccagggcctcatcccggagaagg

SEQ ID NO: 2279846 - DNA, 25 bp, Homo sapien
gaaggcccatctgctcgtggttgta

SEQ ID NO: 2279847 - DNA, 25 bp, Homo sapien
taggcatggaagttgggagcatcac

SEQ ID NO: 2279848 - DNA, 25 bp, Homo sapien
ggagcatcacttggaaagccatttg

SEQ ID NO: 2279849 - DNA, 25 bp, Homo sapien
tggtttcactaggaatgcaccggct

SEQ ID NO: 2279850 - DNA, 25 bp, Homo sapien
taaggtgccatcaacctgaccacgg

SEQ ID NO: 2279851 - DNA, 25 bp, Homo sapien
tgcctggactgtgtagagacgttca

SEQ ID NO: 2279852 - DNA, 25 bp, Homo sapien
tcctgagtaaaccaagggcagggct

SEQ ID NO: 2279853 - DNA, 25 bp, Homo sapien
tgacaacggacaagctctcctcgag

SEQ ID NO: 2279854 - DNA, 25 bp, Homo sapien
tgaagaccatcggtgcaccaggaag

SEQ ID NO: 2279855 - DNA, 25 bp, Homo sapien
gcatctgatagggcagcaccaccag

SEQ ID NO: 2279856 - DNA, 25 bp, Homo sapien
cgatcaggttgtgcgcctcgtcgat

SEQ ID NO: 2279857 - DNA, 25 bp, Homo sapien
cctgccgagtggccgcatgcagcag

SEQ ID NO: 2279858 - DNA, 25 bp, Homo sapien
tgggagccgctgacctccacgctgt

SEQ ID NO: 2279859 - DNA, 25 bp, Homo sapien
ctggggaaagaacacaaaccaggct

SEQ ID NO: 2279860 - DNA, 25 bp, Homo sapien
atcgctccatgtactgcagcagctg

SEQ ID NO: 2279861 - DNA, 25 bp, Homo sapien
tccatgtactgcagcagctgggaat

SEQ ID NO: 2279862 - DNA, 25 bp, Homo sapien
ccgtatcgctccatgtactgcagca

SEQ ID NO: 2279863 - DNA, 25 bp, Homo sapien
gtatcgctccatgtactgcagcagc

SEQ ID NO: 2279864 - DNA, 25 bp, Homo sapien
gtggtgccctgatggcgactcgccc

SEQ ID NO: 2279865 - DNA, 25 bp, Homo sapien
gaagccaacggacattaagtggtgg

SEQ ID NO: 2279866 - DNA, 25 bp, Homo sapien
ccaacggacattaagtggtggtgcc

SEQ ID NO: 2279867 - DNA, 25 bp, Homo sapien
tgagaagaagccaacggacattaag

SEQ ID NO: 2279868 - DNA, 25 bp, Homo sapien
cctagcacagccacgaatttctcca

SEQ ID NO: 2279869 - DNA, 25 bp, Homo sapien
aatttctccagcaaatacaggatct

SEQ ID NO: 2279870 - DNA, 25 bp, Homo sapien
agccacgaatttctccagcaaatac

SEQ ID NO: 2279871 - DNA, 25 bp, Homo sapien
cacgaatttctccagcaaatacagg

SEQ ID NO: 2279872 - DNA, 25 bp, Homo sapien
aaaagcagcccggtgggttttgcag

SEQ ID NO: 2279873 - DNA, 25 bp, Homo sapien
cctgatgggcatccaaggaaaaagc

SEQ ID NO: 2279874 - DNA, 25 bp, Homo sapien
ggttagccggggggcgaggctctca

SEQ ID NO: 2279875 - DNA, 25 bp, Homo sapien
agaactgaggcgtcctgatgggcat

SEQ ID NO: 2279876 - DNA, 25 bp, Homo sapien
ccgggtttgagcaagcaattctctt

SEQ ID NO: 2279877 - DNA, 25 bp, Homo sapien
cgggtttgagcaagcaattctcttg

SEQ ID NO: 2279878 - DNA, 25 bp, Homo sapien
ggactacaggccacggcaacactcc

SEQ ID NO: 2279879 - DNA, 25 bp, Homo sapien
caggccacggcaacactcccagcta

SEQ ID NO: 2279880 - DNA, 25 bp, Homo sapien
gcagccagaccaaggtatgcagggc

SEQ ID NO: 2279881 - DNA, 25 bp, Homo sapien
gtgcttgcacgtggaacccaaagcc

SEQ ID NO: 2279882 - DNA, 25 bp, Homo sapien
ttctccaggaggccgggacacagca

SEQ ID NO: 2279883 - DNA, 25 bp, Homo sapien
ccaaggtatgcagggcaccggagca

SEQ ID NO: 2279884 - DNA, 25 bp, Homo sapien
ctgtgacagactctgtgtattggga

SEQ ID NO: 2279885 - DNA, 25 bp, Homo sapien
tgacagactctgtgtattgggattt

SEQ ID NO: 2279886 - DNA, 25 bp, Homo sapien
gtattgggattttgcttaatgttcc

SEQ ID NO: 2279887 - DNA, 25 bp, Homo sapien
gactctgtgtattgggattttgctt

SEQ ID NO: 2279888 - DNA, 25 bp, Homo sapien
tgatgttgtcgatctggctctggaa

SEQ ID NO: 2279889 - DNA, 25 bp, Homo sapien
tgttgtcgatctggctctggaagag

SEQ ID NO: 2279890 - DNA, 25 bp, Homo sapien
cttgaacaggttgatgttgtcgatc

SEQ ID NO: 2279891 - DNA, 25 bp, Homo sapien
ggctctggaagagaaagtcgttgat

SEQ ID NO: 2279892 - DNA, 25 bp, Homo sapien
tgtggaacatggcaaggtggaaacc

SEQ ID NO: 2279893 - DNA, 25 bp, Homo sapien
gtggaacatggcaaggtggaaacct

SEQ ID NO: 2279894 - DNA, 25 bp, Homo sapien
tggatgtggaacatggcaaggtgga

SEQ ID NO: 2279895 - DNA, 25 bp, Homo sapien
gatgtggaacatggcaaggtggaaa

SEQ ID NO: 2279896 - DNA, 25 bp, Homo sapien
gaacaaatcaacgtcctattcctgt

SEQ ID NO: 2279897 - DNA, 25 bp, Homo sapien
cacagaacaaatcaacgtcctattc

SEQ ID NO: 2279898 - DNA, 25 bp, Homo sapien
caacgtcctattcctgtccataagc

SEQ ID NO: 2279899 - DNA, 25 bp, Homo sapien
aatcaacgtcctattcctgtccata

SEQ ID NO: 2279900 - DNA, 25 bp, Homo sapien
gtggccgtgtttcatctggggagcg

SEQ ID NO: 2279901 - DNA, 25 bp, Homo sapien
gccgtgtttcatctggggagcgctg

SEQ ID NO: 2279902 - DNA, 25 bp, Homo sapien
cggcagtggccgtgtttcatctggg

SEQ ID NO: 2279903 - DNA, 25 bp, Homo sapien
ccgtgtttcatctggggagcgctgg

SEQ ID NO: 2279904 - DNA, 25 bp, Homo sapien
gggcaaaaggatatcctagctcaga

SEQ ID NO: 2279905 - DNA, 25 bp, Homo sapien
tcagagcacagcacgtggcatgccg

SEQ ID NO: 2279906 - DNA, 25 bp, Homo sapien
cttgccggggcaaaaggatatccta

SEQ ID NO: 2279907 - DNA, 25 bp, Homo sapien
aaaggatatcctagctcagagcaca

SEQ ID NO: 2279908 - DNA, 25 bp, Homo sapien
gtgggaagcctgtgctcgccaccct

SEQ ID NO: 2279909 - DNA, 25 bp, Homo sapien
ttgtgggaagcctgtgctcgccacc

SEQ ID NO: 2279910 - DNA, 25 bp, Homo sapien
cctgtgctcgccaccctcctgaagt

SEQ ID NO: 2279911 - DNA, 25 bp, Homo sapien
gtgctcgccaccctcctgaagtcac

SEQ ID NO: 2279912 - DNA, 25 bp, Homo sapien
gctgatcatgctcttctcacagtat

SEQ ID NO: 2279913 - DNA, 25 bp, Homo sapien
tttctgctgatcatgctcttctcac

SEQ ID NO: 2279914 - DNA, 25 bp, Homo sapien
ctgctgatcatgctcttctcacagt

SEQ ID NO: 2279915 - DNA, 25 bp, Homo sapien
gatcatgctcttctcacagtatcgc

SEQ ID NO: 2279916 - DNA, 25 bp, Homo sapien
acactgctccgtaccgttcagtgaa

SEQ ID NO: 2279917 - DNA, 25 bp, Homo sapien
ggctctgcaggaattgctgaaaccc

SEQ ID NO: 2279918 - DNA, 25 bp, Homo sapien
tgagaacactgctccgtaccgttca

SEQ ID NO: 2279919 - DNA, 25 bp, Homo sapien
tgaaacccagccagtttgggctgct

SEQ ID NO: 2279920 - DNA, 25 bp, Homo sapien
gctggcctgactctcgtctgcaggg

SEQ ID NO: 2279921 - DNA, 25 bp, Homo sapien
accctgccgtcctggttggccgtag

SEQ ID NO: 2279922 - DNA, 25 bp, Homo sapien
ctgccgtcctggttggccgtagtga

SEQ ID NO: 2279923 - DNA, 25 bp, Homo sapien
tgaccctgccgtcctggttggccgt

SEQ ID NO: 2279924 - DNA, 25 bp, Homo sapien
agtgcaagcccaacagacacttcta

SEQ ID NO: 2279925 - DNA, 25 bp, Homo sapien
aacagacacttctatcgtcccagca

SEQ ID NO: 2279926 - DNA, 25 bp, Homo sapien
gcaagcccaacagacacttctatcg

SEQ ID NO: 2279927 - DNA, 25 bp, Homo sapien
acacttctatcgtcccagcaaaggg

SEQ ID NO: 2279928 - DNA, 25 bp, Homo sapien
tgcccggcattccttcaccacttgg

SEQ ID NO: 2279929 - DNA, 25 bp, Homo sapien
cagctggattcaggagcaaaaactt

SEQ ID NO: 2279930 - DNA, 25 bp, Homo sapien
tcaggagcaaaaacttcagggtgct

SEQ ID NO: 2279931 - DNA, 25 bp, Homo sapien
gcaatgaccactgcccggcattcct

SEQ ID NO: 2279932 - DNA, 25 bp, Homo sapien
ggcacgaggggctgggaaaggtgtc

SEQ ID NO: 2279933 - DNA, 25 bp, Homo sapien
gcacgaggggctgggaaaggtgtcc

SEQ ID NO: 2279934 - DNA, 25 bp, Homo sapien
ctggggcacgaggggctgggaaagg

SEQ ID NO: 2279935 - DNA, 25 bp, Homo sapien
cacgaggggctgggaaaggtgtcct

SEQ ID NO: 2279936 - DNA, 25 bp, Homo sapien
ctgtatatctgggtaactggaatcc

SEQ ID NO: 2279937 - DNA, 25 bp, Homo sapien
tgataatgcatctctcccaagtccc

SEQ ID NO: 2279938 - DNA, 25 bp, Homo sapien
tactgaaatacgtgcatgcttgctg

SEQ ID NO: 2279939 - DNA, 25 bp, Homo sapien
cacatggagggagccgcacttttgt

SEQ ID NO: 2279940 - DNA, 25 bp, Homo sapien
aggccacggcgtcatggccccatga

SEQ ID NO: 2279941 - DNA, 25 bp, Homo sapien
tagaccaaggccacggcgtcatggc

SEQ ID NO: 2279942 - DNA, 25 bp, Homo sapien
tcatggccccatgacccctcagagg

SEQ ID NO: 2279943 - DNA, 25 bp, Homo sapien
atggccccatgacccctcagaggcc

SEQ ID NO: 2279944 - DNA, 25 bp, Homo sapien
ccagcagctgctgccggaagtcaga

SEQ ID NO: 2279945 - DNA, 25 bp, Homo sapien
gcagctgctgccggaagtcagacac

SEQ ID NO: 2279946 - DNA, 25 bp, Homo sapien
caggaaaactccaccacgcgctcag

SEQ ID NO: 2279947 - DNA, 25 bp, Homo sapien
acaggaaaactccaccacgcgctca

SEQ ID NO: 2279948 - DNA, 25 bp, Homo sapien
ctctagcctgccccaccctgggcac

SEQ ID NO: 2279949 - DNA, 25 bp, Homo sapien
cctgccccaccctgggcacagcttc

SEQ ID NO: 2279950 - DNA, 25 bp, Homo sapien
tctagcctgccccaccctgggcaca

SEQ ID NO: 2279951 - DNA, 25 bp, Homo sapien
gccccaccctgggcacagcttctca

SEQ ID NO: 2279952 - DNA, 25 bp, Homo sapien
tgcctggtcacggtatgaggtatta

SEQ ID NO: 2279953 - DNA, 25 bp, Homo sapien
cacggtatgaggtattacccacaga

SEQ ID NO: 2279954 - DNA, 25 bp, Homo sapien
cctgggcgagcgcacgaagggtgag

SEQ ID NO: 2279955 - DNA, 25 bp, Homo sapien
tggtcacggtatgaggtattaccca

SEQ ID NO: 2279956 - DNA, 25 bp, Homo sapien
ggaacagcgactgacagcgctcacc

SEQ ID NO: 2279957 - DNA, 25 bp, Homo sapien
aggaacagcgactgacagcgctcac

SEQ ID NO: 2279958 - DNA, 25 bp, Homo sapien
caggaacagcgactgacagcgctca

SEQ ID NO: 2279959 - DNA, 25 bp, Homo sapien
tgtaagacactgcagagagggcatt

SEQ ID NO: 2279960 - DNA, 25 bp, Homo sapien
ctgtaagacactgcagagagggcat

SEQ ID NO: 2279961 - DNA, 25 bp, Homo sapien
taagacactgcagagagggcattta

SEQ ID NO: 2279962 - DNA, 25 bp, Homo sapien
aagacactgcagagagggcatttac

SEQ ID NO: 2279963 - DNA, 25 bp, Homo sapien
tggtaagatcagggaggggccgaaa

SEQ ID NO: 2279964 - DNA, 25 bp, Homo sapien
ctggtaagatcagggaggggccgaa

SEQ ID NO: 2279965 - DNA, 25 bp, Homo sapien
gatgttgtctggagggatcacgtga

SEQ ID NO: 2279966 - DNA, 25 bp, Homo sapien
atgttgtctggagggatcacgtgac

SEQ ID NO: 2279967 - DNA, 25 bp, Homo sapien
tccataagcatctagatcgacgccg

SEQ ID NO: 2279968 - DNA, 25 bp, Homo sapien
ccttcctccataagcatctagatcg

SEQ ID NO: 2279969 - DNA, 25 bp, Homo sapien
gatcgacgccgctcattctgtgtgg

SEQ ID NO: 2279970 - DNA, 25 bp, Homo sapien
taagcatctagatcgacgccgctca

SEQ ID NO: 2279971 - DNA, 25 bp, Homo sapien
ggggcctccctattgccctggcact

SEQ ID NO: 2279972 - DNA, 25 bp, Homo sapien
gggggcctccctattgccctggcac

SEQ ID NO: 2279973 - DNA, 25 bp, Homo sapien
gacacatgtcacagcactagcgtcc

SEQ ID NO: 2279974 - DNA, 25 bp, Homo sapien
ggcctccctattgccctggcactga

SEQ ID NO: 2279975 - DNA, 25 bp, Homo sapien
ttcctggcagccagacggcccagca

SEQ ID NO: 2279976 - DNA, 25 bp, Homo sapien
tcccagtgggcatggacctggcgca

SEQ ID NO: 2279977 - DNA, 25 bp, Homo sapien
ttctcccagtgggcatggacctggc

SEQ ID NO: 2279978 - DNA, 25 bp, Homo sapien
cctggcagccagacggcccagcagg

SEQ ID NO: 2279979 - DNA, 25 bp, Homo sapien
gcaaggctgccgacaggccactcac

SEQ ID NO: 2279980 - DNA, 25 bp, Homo sapien
gtggcaaggctgccgacaggccact

SEQ ID NO: 2279981 - DNA, 25 bp, Homo sapien
ggcaaggctgccgacaggccactca

SEQ ID NO: 2279982 - DNA, 25 bp, Homo sapien
aagtggcaaggctgccgacaggcca

SEQ ID NO: 2279983 - DNA, 25 bp, Homo sapien
ctgctccacctggtgtgcgctctta

SEQ ID NO: 2279984 - DNA, 25 bp, Homo sapien
tggtgtgcgctcttaggttcctgga

SEQ ID NO: 2279985 - DNA, 25 bp, Homo sapien
gctccacctggtgtgcgctcttagg

SEQ ID NO: 2279986 - DNA, 25 bp, Homo sapien
tccacctggtgtgcgctcttaggtt

SEQ ID NO: 2279987 - DNA, 25 bp, Homo sapien
aggagaaacccagacgctgagttgc

SEQ ID NO: 2279988 - DNA, 25 bp, Homo sapien
aaacccagacgctgagttgctgagc

SEQ ID NO: 2279989 - DNA, 25 bp, Homo sapien
acttggatgacacccacgtttccag

SEQ ID NO: 2279990 - DNA, 25 bp, Homo sapien
gttgctgagccaaaacttggatgac

SEQ ID NO: 2279991 - DNA, 25 bp, Homo sapien
tcatctttcctccaaccacagagag

SEQ ID NO: 2279992 - DNA, 25 bp, Homo sapien
gtcagagaagttgatcccttcactc

SEQ ID NO: 2279993 - DNA, 25 bp, Homo sapien
tttcctccaaccacagagaggagca

SEQ ID NO: 2279994 - DNA, 25 bp, Homo sapien
tcagagaagttgatcccttcactca

SEQ ID NO: 2279995 - DNA, 25 bp, Homo sapien
tgatgttggggaagggcatgcccac

SEQ ID NO: 2279996 - DNA, 25 bp, Homo sapien
ctgatgttggggaagggcatgccca

SEQ ID NO: 2279997 - DNA, 25 bp, Homo sapien
gatgttggggaagggcatgcccacc

SEQ ID NO: 2279998 - DNA, 25 bp, Homo sapien
tgttggggaagggcatgcccaccat

SEQ ID NO: 2279999 - DNA, 25 bp, Homo sapien
gagggtttgatccaagtaggccatc

SEQ ID NO: 2280000 - DNA, 25 bp, Homo sapien
agggtttgatccaagtaggccatct

SEQ ID NO: 2280001 - DNA, 25 bp, Homo sapien
gtcaccctctgtgacactggggtca

SEQ ID NO: 2280002 - DNA, 25 bp, Homo sapien
tctgtcaccctctgtgacactgggg

SEQ ID NO: 2280003 - DNA, 25 bp, Homo sapien
cctctgtgacactggggtcactcac

SEQ ID NO: 2280004 - DNA, 25 bp, Homo sapien
ccctctgtgacactggggtcactca

SEQ ID NO: 2280005 - DNA, 25 bp, Homo sapien
ggatgacccatcaggactgttccct

SEQ ID NO: 2280006 - DNA, 25 bp, Homo sapien
tgaaggggatgacccatcaggactg

SEQ ID NO: 2280007 - DNA, 25 bp, Homo sapien
agtgaaggggatgacccatcaggac

SEQ ID NO: 2280008 - DNA, 25 bp, Homo sapien
aaggggatgacccatcaggactgtt

SEQ ID NO: 2280009 - DNA, 25 bp, Homo sapien
tatggactggttgacggccttcatg

SEQ ID NO: 2280010 - DNA, 25 bp, Homo sapien
accagagccttccctgggggtgcct

SEQ ID NO: 2280011 - DNA, 25 bp, Homo sapien
tgacggccttcatgcacaggttctc

SEQ ID NO: 2280012 - DNA, 25 bp, Homo sapien
tccaccagagccttccctgggggtg

SEQ ID NO: 2280013 - DNA, 25 bp, Homo sapien
tcctcagacttatataggaaacagg

SEQ ID NO: 2280014 - DNA, 25 bp, Homo sapien
agacttatataggaaacagggcagg

SEQ ID NO: 2280015 - DNA, 25 bp, Homo sapien
ctcagacttatataggaaacagggc

SEQ ID NO: 2280016 - DNA, 25 bp, Homo sapien
cttcctcagacttatataggaaaca

SEQ ID NO: 2280017 - DNA, 25 bp, Homo sapien
ggtagctttgacctccacactggct

SEQ ID NO: 2280018 - DNA, 25 bp, Homo sapien
ggccgggcgtatcgctggtccagga

SEQ ID NO: 2280019 - DNA, 25 bp, Homo sapien
acactggctcggatccaggccggca

SEQ ID NO: 2280020 - DNA, 25 bp, Homo sapien
aaaatccttctggtgcctgatggcc

SEQ ID NO: 2280021 - DNA, 25 bp, Homo sapien
accacgcccacgacaaacactgtct

SEQ ID NO: 2280022 - DNA, 25 bp, Homo sapien
gcagaccacgcccacgacaaacact

SEQ ID NO: 2280023 - DNA, 25 bp, Homo sapien
agaccacgcccacgacaaacactgt

SEQ ID NO: 2280024 - DNA, 25 bp, Homo sapien
acgcccacgacaaacactgtctcca

SEQ ID NO: 2280025 - DNA, 25 bp, Homo sapien
ggaacgccccaaggacagccaggac

SEQ ID NO: 2280026 - DNA, 25 bp, Homo sapien
ctggaacgccccaaggacagccagg

SEQ ID NO: 2280027 - DNA, 25 bp, Homo sapien
cattttctcctacgggagctaacgc

SEQ ID NO: 2280028 - DNA, 25 bp, Homo sapien
tggaacgccccaaggacagccagga

SEQ ID NO: 2280029 - DNA, 25 bp, Homo sapien
tcctgcggactccaagcaggaagcc

SEQ ID NO: 2280030 - DNA, 25 bp, Homo sapien
gctccatctcgcctcttaaggtggg

SEQ ID NO: 2280031 - DNA, 25 bp, Homo sapien
agcctcctgcggactccaagcagga

SEQ ID NO: 2280032 - DNA, 25 bp, Homo sapien
tctcgcctcttaaggtgggcaggac

SEQ ID NO: 2280033 - DNA, 25 bp, Homo sapien
gcagtccagggcagctataaccttg

SEQ ID NO: 2280034 - DNA, 25 bp, Homo sapien
caaggatacaaatccaggcagggct

SEQ ID NO: 2280035 - DNA, 25 bp, Homo sapien
ctctatagtcatgttgagagcctaa

SEQ ID NO: 2280036 - DNA, 25 bp, Homo sapien
cagggccttctactgaaggagtgac

SEQ ID NO: 2280037 - DNA, 25 bp, Homo sapien
aattctcacctctacggtagaggga

SEQ ID NO: 2280038 - DNA, 25 bp, Homo sapien
tcacctctacggtagagggagcctg

SEQ ID NO: 2280039 - DNA, 25 bp, Homo sapien
tttcaaactgtagcgccctggaatt

SEQ ID NO: 2280040 - DNA, 25 bp, Homo sapien
ttttcaaactgtagcgccctggaat

SEQ ID NO: 2280041 - DNA, 25 bp, Homo sapien
ttttaatagttgtcatttcttgttc

SEQ ID NO: 2280042 - DNA, 25 bp, Homo sapien
tctttttaatagttgtcatttcttg

SEQ ID NO: 2280043 - DNA, 25 bp, Homo sapien
taatagttgtcatttcttgttctac

SEQ ID NO: 2280044 - DNA, 25 bp, Homo sapien
ttaatagttgtcatttcttgttcta

SEQ ID NO: 2280045 - DNA, 25 bp, Homo sapien
aaggagtgaatctggatcagcagtg

SEQ ID NO: 2280046 - DNA, 25 bp, Homo sapien
gctgctggtccaactccaaaatcca

SEQ ID NO: 2280047 - DNA, 25 bp, Homo sapien
catgctgctcgtcaacatcagagag

SEQ ID NO: 2280048 - DNA, 25 bp, Homo sapien
catcagagagatcctttgtagcaga

SEQ ID NO: 2280049 - DNA, 25 bp, Homo sapien
tttcagtggggatgtgacgtgctcc

SEQ ID NO: 2280050 - DNA, 25 bp, Homo sapien
tgcagcaatggacaagcatgtgggc

SEQ ID NO: 2280051 - DNA, 25 bp, Homo sapien
cagcaatggacaagcatgtgggctt

SEQ ID NO: 2280052 - DNA, 25 bp, Homo sapien
caatggacaagcatgtgggcttttc

SEQ ID NO: 2280053 - DNA, 25 bp, Homo sapien
aaggcactgagcaaatcactataga

SEQ ID NO: 2280054 - DNA, 25 bp, Homo sapien
ccaacagtgcctgtgtgcaaggcac

SEQ ID NO: 2280055 - DNA, 25 bp, Homo sapien
tgagcaaatcactatagatccagtg

SEQ ID NO: 2280056 - DNA, 25 bp, Homo sapien
caaatcactatagatccagtgatga

SEQ ID NO: 2280057 - DNA, 25 bp, Homo sapien
tgtactgggaagtcctctctccagt

SEQ ID NO: 2280058 - DNA, 25 bp, Homo sapien
atgctctgctgccacccacccccac

SEQ ID NO: 2280059 - DNA, 25 bp, Homo sapien
aaatgctctgctgccacccaccccc

SEQ ID NO: 2280060 - DNA, 25 bp, Homo sapien
aatgctctgctgccacccaccccca

SEQ ID NO: 2280061 - DNA, 25 bp, Homo sapien
gagcagggcctggatactctatacc

SEQ ID NO: 2280062 - DNA, 25 bp, Homo sapien
ccatgtacccctgtttccagcctct

SEQ ID NO: 2280063 - DNA, 25 bp, Homo sapien
ccttctggctccctaagctctagcc

SEQ ID NO: 2280064 - DNA, 25 bp, Homo sapien
ccttgcaattcgagtatttttccct

SEQ ID NO: 2280065 - DNA, 25 bp, Homo sapien
acctctgttgccacggagggtccca

SEQ ID NO: 2280066 - DNA, 25 bp, Homo sapien
tgttgccacggagggtcccactacc

SEQ ID NO: 2280067 - DNA, 25 bp, Homo sapien
ccacacctctgttgccacggagggt

SEQ ID NO: 2280068 - DNA, 25 bp, Homo sapien
cacggagggtcccactacccaggag

SEQ ID NO: 2280069 - DNA, 25 bp, Homo sapien
gaggaaggaggacggacatctcaga

SEQ ID NO: 2280070 - DNA, 25 bp, Homo sapien
aaggaggacggacatctcagatcat

SEQ ID NO: 2280071 - DNA, 25 bp, Homo sapien
aagaggaaggaggacggacatctca

SEQ ID NO: 2280072 - DNA, 25 bp, Homo sapien
ggaaggaggacggacatctcagatc

SEQ ID NO: 2280073 - DNA, 25 bp, Homo sapien
aaacgtgtgcagaaagtcttacatc

SEQ ID NO: 2280074 - DNA, 25 bp, Homo sapien
tggtctcacacggttgggttcctca

SEQ ID NO: 2280075 - DNA, 25 bp, Homo sapien
cacacggttgggttcctcagatggt

SEQ ID NO: 2280076 - DNA, 25 bp, Homo sapien
acaggactgagttaagatggccagc

SEQ ID NO: 2280077 - DNA, 25 bp, Homo sapien
tggtacttcctcaaggatgactgtg

SEQ ID NO: 2280078 - DNA, 25 bp, Homo sapien
tcaagaccagactcctagccttggt

SEQ ID NO: 2280079 - DNA, 25 bp, Homo sapien
catgtacctggtggctaccacactg

SEQ ID NO: 2280080 - DNA, 25 bp, Homo sapien
cttcctcaaggatgactgtgtcccc

SEQ ID NO: 2280081 - DNA, 25 bp, Homo sapien
gtcagaagcttctattattggttcg

SEQ ID NO: 2280082 - DNA, 25 bp, Homo sapien
ggtgggcgaaggagtcagaagcttc

SEQ ID NO: 2280083 - DNA, 25 bp, Homo sapien
aagaagtcagaagggtgggcgaagg

SEQ ID NO: 2280084 - DNA, 25 bp, Homo sapien
cagaagcttctattattggttcggg

SEQ ID NO: 2280085 - DNA, 25 bp, Homo sapien
aggctcctgcgtgtcccggatttcc

SEQ ID NO: 2280086 - DNA, 25 bp, Homo sapien
actgaggctcctgcgtgtcccggat

SEQ ID NO: 2280087 - DNA, 25 bp, Homo sapien
cactgaggctcctgcgtgtcccgga

SEQ ID NO: 2280088 - DNA, 25 bp, Homo sapien
tgaggctcctgcgtgtcccggattt

SEQ ID NO: 2280089 - DNA, 25 bp, Homo sapien
ctggtgagatgagacaatggtcgga

SEQ ID NO: 2280090 - DNA, 25 bp, Homo sapien
tggtgagatgagacaatggtcggat

SEQ ID NO: 2280091 - DNA, 25 bp, Homo sapien
ctagctcttgcgggacttcatgttg

SEQ ID NO: 2280092 - DNA, 25 bp, Homo sapien
tcttgcgggacttcatgttgttttt

SEQ ID NO: 2280093 - DNA, 25 bp, Homo sapien
tagctcttgcgggacttcatgttgt

SEQ ID NO: 2280094 - DNA, 25 bp, Homo sapien
gctcttgcgggacttcatgttgttt

SEQ ID NO: 2280095 - DNA, 25 bp, Homo sapien
tttctgacaccgctgtccctgactt

SEQ ID NO: 2280096 - DNA, 25 bp, Homo sapien
tctgccaaactcaggtccacctgtg

SEQ ID NO: 2280097 - DNA, 25 bp, Homo sapien
cctgacttgggcagcgttggtcccc

SEQ ID NO: 2280098 - DNA, 25 bp, Homo sapien
tcctctgccaaactcaggtccacct

SEQ ID NO: 2280099 - DNA, 25 bp, Homo sapien
tccatctccgtgacaactcctatgt

SEQ ID NO: 2280100 - DNA, 25 bp, Homo sapien
agctggggtcgcatgctctgctctc

SEQ ID NO: 2280101 - DNA, 25 bp, Homo sapien
cctgggaagcctttcagagaggccc

SEQ ID NO: 2280102 - DNA, 25 bp, Homo sapien
gacaactcctatgttcaggatctgg

SEQ ID NO: 2280103 - DNA, 25 bp, Homo sapien
tgaacaaggcaaagcctgcaccaag

SEQ ID NO: 2280104 - DNA, 25 bp, Homo sapien
ctcctgtcaggaagcctgccatgaa

SEQ ID NO: 2280105 - DNA, 25 bp, Homo sapien
caaagcctgcaccaagtatgagaaa

SEQ ID NO: 2280106 - DNA, 25 bp, Homo sapien
gtcaggaagcctgccatgaacaagg

SEQ ID NO: 2280107 - DNA, 25 bp, Homo sapien
ggaccactatgacaattgtattaac

SEQ ID NO: 2280108 - DNA, 25 bp, Homo sapien
ctatgacaattgtattaactgtaca

SEQ ID NO: 2280109 - DNA, 25 bp, Homo sapien
cataagctgaaggatgtacgtcacc

SEQ ID NO: 2280110 - DNA, 25 bp, Homo sapien
tcaggaccactatgacaattgtatt

SEQ ID NO: 2280111 - DNA, 25 bp, Homo sapien
gacctgtaccctatggaggctgcac

SEQ ID NO: 2280112 - DNA, 25 bp, Homo sapien
gaaagagcctgttttgggcagcata

SEQ ID NO: 2280113 - DNA, 25 bp, Homo sapien
gcagcatattggaggacctgttgca

SEQ ID NO: 2280114 - DNA, 25 bp, Homo sapien
cagggcacagctgctagtcttggag

SEQ ID NO: 2280115 - DNA, 25 bp, Homo sapien
tctttggctgcttggagccaaaata

SEQ ID NO: 2280116 - DNA, 25 bp, Homo sapien
aggtgatggatgcttgtctctcctc

SEQ ID NO: 2280117 - DNA, 25 bp, Homo sapien
tggcatttggtgttgcttgcacgag

SEQ ID NO: 2280118 - DNA, 25 bp, Homo sapien
ccgtgcctccctgattggttggttg

SEQ ID NO: 2280119 - DNA, 25 bp, Homo sapien
gatctttagcatcacagtggaagcg

SEQ ID NO: 2280120 - DNA, 25 bp, Homo sapien
gattggatgaccagccttgatgcga

SEQ ID NO: 2280121 - DNA, 25 bp, Homo sapien
gcccaaagtctcatagctagcaagt

SEQ ID NO: 2280122 - DNA, 25 bp, Homo sapien
gacatggtgcttagtgcattaccca

SEQ ID NO: 2280123 - DNA, 25 bp, Homo sapien
gaggagcctttttctgcctattagc

SEQ ID NO: 2280124 - DNA, 25 bp, Homo sapien
gagcctttttctgcctattagccat

SEQ ID NO: 2280125 - DNA, 25 bp, Homo sapien
gagaggagcctttttctgcctatta

SEQ ID NO: 2280126 - DNA, 25 bp, Homo sapien
gtgagaggagcctttttctgcctat

SEQ ID NO: 2280127 - DNA, 25 bp, Homo sapien
tggatggaataaatggaccccattc

SEQ ID NO: 2280128 - DNA, 25 bp, Homo sapien
cttgccccatcttggatggaataaa

SEQ ID NO: 2280129 - DNA, 25 bp, Homo sapien
ggatggaataaatggaccccattcc

SEQ ID NO: 2280130 - DNA, 25 bp, Homo sapien
cttggatggaataaatggaccccat

SEQ ID NO: 2280131 - DNA, 25 bp, Homo sapien
ttctagctgggacattctcttctct

SEQ ID NO: 2280132 - DNA, 25 bp, Homo sapien
gggacattctcttctctgaaaatag

SEQ ID NO: 2280133 - DNA, 25 bp, Homo sapien
gctgggacattctcttctctgaaaa

SEQ ID NO: 2280134 - DNA, 25 bp, Homo sapien
ggacattctcttctctgaaaatagt

SEQ ID NO: 2280135 - DNA, 25 bp, Homo sapien
tcgcaaatcattggcctcatcgggt

SEQ ID NO: 2280136 - DNA, 25 bp, Homo sapien
cgcaaatcattggcctcatcgggtt

SEQ ID NO: 2280137 - DNA, 25 bp, Homo sapien
actcgcaaatcattggcctcatcgg

SEQ ID NO: 2280138 - DNA, 25 bp, Homo sapien
ccactcgcaaatcattggcctcatc

SEQ ID NO: 2280139 - DNA, 25 bp, Homo sapien
gctctctgcaactcagttttcctgt

SEQ ID NO: 2280140 - DNA, 25 bp, Homo sapien
aaataggatggctgcatggtaacaa

SEQ ID NO: 2280141 - DNA, 25 bp, Homo sapien
tggggcttcgctctctgcaactcag

SEQ ID NO: 2280142 - DNA, 25 bp, Homo sapien
tggctgcatggtaacaaatttctcc

SEQ ID NO: 2280143 - DNA, 25 bp, Homo sapien
aaaaaatgcactgccacactgctgg

SEQ ID NO: 2280144 - DNA, 25 bp, Homo sapien
cactgtgaacctttggaaataggga

SEQ ID NO: 2280145 - DNA, 25 bp, Homo sapien
taattctgttcccatcgtatgccaa

SEQ ID NO: 2280146 - DNA, 25 bp, Homo sapien
gaggacgaaaatcacactcctcaca

SEQ ID NO: 2280147 - DNA, 25 bp, Homo sapien
tctgtccaatggagtttgctgggtg

SEQ ID NO: 2280148 - DNA, 25 bp, Homo sapien
tccagggcctagctgtgaagctgtt

SEQ ID NO: 2280149 - DNA, 25 bp, Homo sapien
ggaacggcatctccagaatgcagga

SEQ ID NO: 2280150 - DNA, 25 bp, Homo sapien
agggaacctccatcttggaacggca

SEQ ID NO: 2280151 - DNA, 25 bp, Homo sapien
tggagactgaccatgcgtatgaggt

SEQ ID NO: 2280152 - DNA, 25 bp, Homo sapien
tgtccagcagtaaagagggccttca

SEQ ID NO: 2280153 - DNA, 25 bp, Homo sapien
caaaagaacttgctatagatgcggg

SEQ ID NO: 2280154 - DNA, 25 bp, Homo sapien
tatcgtgcataaagggaccacatgg

SEQ ID NO: 2280155 - DNA, 25 bp, Homo sapien
tcgtgcctccagagcttggtcagag

SEQ ID NO: 2280156 - DNA, 25 bp, Homo sapien
gcagtccgagaagagacttcgtgcc

SEQ ID NO: 2280157 - DNA, 25 bp, Homo sapien
gagaagagacttcgtgcctccagag

SEQ ID NO: 2280158 - DNA, 25 bp, Homo sapien
acgggcacccgagcagtccgagaag

SEQ ID NO: 2280159 - DNA, 25 bp, Homo sapien
taaagtaagcccaagaggtactgtc

SEQ ID NO: 2280160 - DNA, 25 bp, Homo sapien
tgtgggagcgatcacatactctgtg

SEQ ID NO: 2280161 - DNA, 25 bp, Homo sapien
aatggactccctatgactcactgag

SEQ ID NO: 2280162 - DNA, 25 bp, Homo sapien
aacagaaacccagtggctacagccg

SEQ ID NO: 2280163 - DNA, 25 bp, Homo sapien
gatggttccttagcactacgtcagg

SEQ ID NO: 2280164 - DNA, 25 bp, Homo sapien
tgcccaaagtctcatagctagcgag

SEQ ID NO: 2280165 - DNA, 25 bp, Homo sapien
taaagggccgtctaatgaacatgca

SEQ ID NO: 2280166 - DNA, 25 bp, Homo sapien
tccaggaaactggaatggccgcagt

SEQ ID NO: 2280167 - DNA, 25 bp, Homo sapien
agacctaggctgttcggcttcagag

SEQ ID NO: 2280168 - DNA, 25 bp, Homo sapien
tataaggaaagatactaagacaccg

SEQ ID NO: 2280169 - DNA, 25 bp, Homo sapien
ctattaggtaggagcaatcatcacc

SEQ ID NO: 2280170 - DNA, 25 bp, Homo sapien
gagcttgttgatgaaagaaccggga

SEQ ID NO: 2280171 - DNA, 25 bp, Homo sapien
agacccagccaggtaacccaggaga

SEQ ID NO: 2280172 - DNA, 25 bp, Homo sapien
ggtaacccaggagaatctccccatc

SEQ ID NO: 2280173 - DNA, 25 bp, Homo sapien
ccagccaggtaacccaggagaatct

SEQ ID NO: 2280174 - DNA, 25 bp, Homo sapien
agccaggtaacccaggagaatctcc

SEQ ID NO: 2280175 - DNA, 25 bp, Homo sapien
tggacctctgcttctacggccacat

SEQ ID NO: 2280176 - DNA, 25 bp, Homo sapien
agtgacagaggtccgatgtccacag

SEQ ID NO: 2280177 - DNA, 25 bp, Homo sapien
ggccacatctccgtctctgactttg

SEQ ID NO: 2280178 - DNA, 25 bp, Homo sapien
ctgaagtcacggtgtcatcagggct

SEQ ID NO: 2280179 - DNA, 25 bp, Homo sapien
agcacacgctgcttaatctgagagg

SEQ ID NO: 2280180 - DNA, 25 bp, Homo sapien
acgctgcttaatctgagaggagcct

SEQ ID NO: 2280181 - DNA, 25 bp, Homo sapien
cacacgctgcttaatctgagaggag

SEQ ID NO: 2280182 - DNA, 25 bp, Homo sapien
cccgcagtcccagcacacgctgctt

SEQ ID NO: 2280183 - DNA, 25 bp, Homo sapien
agatggatatttgtgagggaccgta

SEQ ID NO: 2280184 - DNA, 25 bp, Homo sapien
atggatatttgtgagggaccgtaga

SEQ ID NO: 2280185 - DNA, 25 bp, Homo sapien
ggatatttgtgagggaccgtagatg

SEQ ID NO: 2280186 - DNA, 25 bp, Homo sapien
tagatggatatttgtgagggaccgt

SEQ ID NO: 2280187 - DNA, 25 bp, Homo sapien
gcccaacacctaacacaggacgtgg

SEQ ID NO: 2280188 - DNA, 25 bp, Homo sapien
gggctgcaggtctaattgtctgcat

SEQ ID NO: 2280189 - DNA, 25 bp, Homo sapien
aagtttgcccaacacctaacacagg

SEQ ID NO: 2280190 - DNA, 25 bp, Homo sapien
catcttgacacctggaaagtttgcc

SEQ ID NO: 2280191 - DNA, 25 bp, Homo sapien
accttctccccctgtaccaggccat

SEQ ID NO: 2280192 - DNA, 25 bp, Homo sapien
caccttctccccctgtaccaggcca

SEQ ID NO: 2280193 - DNA, 25 bp, Homo sapien
cttctccccctgtaccaggccatga

SEQ ID NO: 2280194 - DNA, 25 bp, Homo sapien
cttcaccttctccccctgtaccagg

SEQ ID NO: 2280195 - DNA, 25 bp, Homo sapien
tgatcagcatcagtaaccattagag

SEQ ID NO: 2280196 - DNA, 25 bp, Homo sapien
tgcttagaaaccagacaactcacac

SEQ ID NO: 2280197 - DNA, 25 bp, Homo sapien
tcacttgaacaaggtatagccactc

SEQ ID NO: 2280198 - DNA, 25 bp, Homo sapien
ggtacatgtcctatgtgactcagca

SEQ ID NO: 2280199 - DNA, 25 bp, Homo sapien
ggctttttgaaggtgcgatacatca

SEQ ID NO: 2280200 - DNA, 25 bp, Homo sapien
gcgatacatcaggttaagaagcttg

SEQ ID NO: 2280201 - DNA, 25 bp, Homo sapien
tggggaaggcaatcagtttttcatc

SEQ ID NO: 2280202 - DNA, 25 bp, Homo sapien
caatcttatggggaaggcaatcagt

SEQ ID NO: 2280203 - DNA, 25 bp, Homo sapien
gagtgggccccatctagtctaatga

SEQ ID NO: 2280204 - DNA, 25 bp, Homo sapien
catgctccagatgtaggcggtcgtc

SEQ ID NO: 2280205 - DNA, 25 bp, Homo sapien
gcatgttttcacgagagccctagga

SEQ ID NO: 2280206 - DNA, 25 bp, Homo sapien
aatacatcgactttcaagggccgca

SEQ ID NO: 2280207 - DNA, 25 bp, Homo sapien
ccaaggataattggatgcttcaatt

SEQ ID NO: 2280208 - DNA, 25 bp, Homo sapien
ccttccaaggataattggatgcttc

SEQ ID NO: 2280209 - DNA, 25 bp, Homo sapien
ttcttatagatatgtatgataggat

SEQ ID NO: 2280210 - DNA, 25 bp, Homo sapien
tgcttcaatttcttatagatatgta

SEQ ID NO: 2280211 - DNA, 25 bp, Homo sapien
tacttgttcagccatagtttagcaa

SEQ ID NO: 2280212 - DNA, 25 bp, Homo sapien
ggaattcgcaataaatccagtatgg

SEQ ID NO: 2280213 - DNA, 25 bp, Homo sapien
caaccatgtcatccattgaagaggt

SEQ ID NO: 2280214 - DNA, 25 bp, Homo sapien
tatttttgcgctaacactggagagc

SEQ ID NO: 2280215 - DNA, 25 bp, Homo sapien
taggccacccttaagtacaatgttc

SEQ ID NO: 2280216 - DNA, 25 bp, Homo sapien
taccaatgatcgaagtatactcttg

SEQ ID NO: 2280217 - DNA, 25 bp, Homo sapien
ttctcctacctaagaaggcatctgg

SEQ ID NO: 2280218 - DNA, 25 bp, Homo sapien
tttaccgggtgcatgatacaggcat

SEQ ID NO: 2280219 - DNA, 25 bp, Homo sapien
taaggatcttagaatccgcggtggg

SEQ ID NO: 2280220 - DNA, 25 bp, Homo sapien
ggtgggtgctaaggatcttagaatc

SEQ ID NO: 2280221 - DNA, 25 bp, Homo sapien
ttttctgatcccgagctgcgttcag

SEQ ID NO: 2280222 - DNA, 25 bp, Homo sapien
ccaagtaaggtaccttctgctggaa

SEQ ID NO: 2280223 - DNA, 25 bp, Homo sapien
tctttctgatcccgggctgcgttcg

SEQ ID NO: 2280224 - DNA, 25 bp, Homo sapien
tttctgatcccgggctgcgttcgga

SEQ ID NO: 2280225 - DNA, 25 bp, Homo sapien
tctgatcccgggctgcgttcggacc

SEQ ID NO: 2280226 - DNA, 25 bp, Homo sapien
tttctttctgatcccgggctgcgtt

SEQ ID NO: 2280227 - DNA, 25 bp, Homo sapien
gatatgacacgcgatatcgcaggga

SEQ ID NO: 2280228 - DNA, 25 bp, Homo sapien
caatatgacagaaggtggacacgcc

SEQ ID NO: 2280229 - DNA, 25 bp, Homo sapien
caatacagatgggtgtacgccctct

SEQ ID NO: 2280230 - DNA, 25 bp, Homo sapien
aacagttcataatctccggaggtct

SEQ ID NO: 2280231 - DNA, 25 bp, Homo sapien
ctcatattcagaggccaagaagttg

SEQ ID NO: 2280232 - DNA, 25 bp, Homo sapien
gcaggacgtatacaccctcgtgtta

SEQ ID NO: 2280233 - DNA, 25 bp, Homo sapien
caccctcgtgttagatggtccttaa

SEQ ID NO: 2280234 - DNA, 25 bp, Homo sapien
tcctcatattcagaggccaagaagt

SEQ ID NO: 2280235 - DNA, 25 bp, Homo sapien
agagaatgatattactccccataat

SEQ ID NO: 2280236 - DNA, 25 bp, Homo sapien
tgactccgcataatagagcacgagg

SEQ ID NO: 2280237 - DNA, 25 bp, Homo sapien
cataatagacagatatgactccgca

SEQ ID NO: 2280238 - DNA, 25 bp, Homo sapien
aatagagcacgaggtgtacacccac

SEQ ID NO: 2280239 - DNA, 25 bp, Homo sapien
gcattgccggctgtgttcacccagc

SEQ ID NO: 2280240 - DNA, 25 bp, Homo sapien
aataatttcagcattgccggctgtg

SEQ ID NO: 2280241 - DNA, 25 bp, Homo sapien
cagccctgacgaaggggctagggaa

SEQ ID NO: 2280242 - DNA, 25 bp, Homo sapien
tgtgttcacccagcctgtgaaattg

SEQ ID NO: 2280243 - DNA, 25 bp, Homo sapien
tgtaaacctaaactaactatctatc

SEQ ID NO: 2280244 - DNA, 25 bp, Homo sapien
ttattatctccaatgttaggaaagg

SEQ ID NO: 2280245 - DNA, 25 bp, Homo sapien
aacctaaactaactatctatctata

SEQ ID NO: 2280246 - DNA, 25 bp, Homo sapien
tatctccaatgttaggaaaggaaat

SEQ ID NO: 2280247 - DNA, 25 bp, Homo sapien
aattaactcttctcccgatgccact

SEQ ID NO: 2280248 - DNA, 25 bp, Homo sapien
aagcaggaatcacactgcagatggc

SEQ ID NO: 2280249 - DNA, 25 bp, Homo sapien
ccaggctagagcttagggagccaga

SEQ ID NO: 2280250 - DNA, 25 bp, Homo sapien
tactcgaattgcaaggtgagggcac

SEQ ID NO: 2280251 - DNA, 25 bp, Homo sapien
tagccggtcgtggtgacgcgcatct

SEQ ID NO: 2280252 - DNA, 25 bp, Homo sapien
ccggtcgtggtgacgcgcatctgta

SEQ ID NO: 2280253 - DNA, 25 bp, Homo sapien
cggtcgtggtgacgcgcatctgtag

SEQ ID NO: 2280254 - DNA, 25 bp, Homo sapien
gccggtcgtggtgacgcgcatctgt

SEQ ID NO: 2280255 - DNA, 25 bp, Homo sapien
caaccagttggtccgggaagacaga

SEQ ID NO: 2280256 - DNA, 25 bp, Homo sapien
tttgttacagcaccaaccagttggt

SEQ ID NO: 2280257 - DNA, 25 bp, Homo sapien
tacagcaccaaccagttggtccggg

SEQ ID NO: 2280258 - DNA, 25 bp, Homo sapien
gcaccaaccagttggtccgggaaga

SEQ ID NO: 2280259 - DNA, 25 bp, Homo sapien
tccctgccttggcttacggctctca

SEQ ID NO: 2280260 - DNA, 25 bp, Homo sapien
tcaattccctgccttggcttacggc

SEQ ID NO: 2280261 - DNA, 25 bp, Homo sapien
tgttgaagagatcccacatcaattc

SEQ ID NO: 2280262 - DNA, 25 bp, Homo sapien
gcttgcgtctcaggaccagcttgtt

SEQ ID NO: 2280263 - DNA, 25 bp, Homo sapien
cagggctgaggatcccattctggct

SEQ ID NO: 2280264 - DNA, 25 bp, Homo sapien
gagccatcctccgatggagcacagg

SEQ ID NO: 2280265 - DNA, 25 bp, Homo sapien
gcggcgcccgctaggatttccagtt

SEQ ID NO: 2280266 - DNA, 25 bp, Homo sapien
tctggaagcctctttagggaatcga

SEQ ID NO: 2280267 - DNA, 25 bp, Homo sapien
cagtgaacccgatcacggctctctg

SEQ ID NO: 2280268 - DNA, 25 bp, Homo sapien
gcagtgaacccgatcacggctctct

SEQ ID NO: 2280269 - DNA, 25 bp, Homo sapien
gctggagcgcagtgaacccgatcac

SEQ ID NO: 2280270 - DNA, 25 bp, Homo sapien
gagcgcagtgaacccgatcacggct

SEQ ID NO: 2280271 - DNA, 25 bp, Homo sapien
tgtctaacaaaacagccaaatacac

SEQ ID NO: 2280272 - DNA, 25 bp, Homo sapien
agttctgtgagttctcttcttgtgc

SEQ ID NO: 2280273 - DNA, 25 bp, Homo sapien
gcaaatccataaactgccaccaatc

SEQ ID NO: 2280274 - DNA, 25 bp, Homo sapien
taaagacagagggtaaaataatgct

SEQ ID NO: 2280275 - DNA, 25 bp, Homo sapien
agtgttgtcattctagagtttggtc

SEQ ID NO: 2280276 - DNA, 25 bp, Homo sapien
tgaagagggctgaacaagtcactgc

SEQ ID NO: 2280277 - DNA, 25 bp, Homo sapien
taaacctctatgatttagcctgtgc

SEQ ID NO: 2280278 - DNA, 25 bp, Homo sapien
ggcttagtgaatccgttatactcag

SEQ ID NO: 2280279 - DNA, 25 bp, Homo sapien
tctctgtggagagcagactgggctc

SEQ ID NO: 2280280 - DNA, 25 bp, Homo sapien
atctctgtggagagcagactgggct

SEQ ID NO: 2280281 - DNA, 25 bp, Homo sapien
ctctgtggagagcagactgggctca

SEQ ID NO: 2280282 - DNA, 25 bp, Homo sapien
gctggccctctgtgaaagcaacacc

SEQ ID NO: 2280283 - DNA, 25 bp, Homo sapien
aatgtgctataggtgcttacagtgc

SEQ ID NO: 2280284 - DNA, 25 bp, Homo sapien
tacagtgcaatggtgttcaagacag

SEQ ID NO: 2280285 - DNA, 25 bp, Homo sapien
cgtgactgcagatgaatctttagga

SEQ ID NO: 2280286 - DNA, 25 bp, Homo sapien
tctggatctgattgccacagatctc

SEQ ID NO: 2280287 - DNA, 25 bp, Homo sapien
ttgagagtggctcctttagcagaaa

SEQ ID NO: 2280288 - DNA, 25 bp, Homo sapien
caggcttgtaggtgggtttatcagt

SEQ ID NO: 2280289 - DNA, 25 bp, Homo sapien
aaatgccagtgggtcagatctggcc

SEQ ID NO: 2280290 - DNA, 25 bp, Homo sapien
tgtatcaggcatggccaatgcttcc

SEQ ID NO: 2280291 - DNA, 25 bp, Homo sapien
cccgtgacatctgtatcaggcatgg

SEQ ID NO: 2280292 - DNA, 25 bp, Homo sapien
tggccaatgcttcccccttagatcc

SEQ ID NO: 2280293 - DNA, 25 bp, Homo sapien
gacatctgtatcaggcatggccaat

SEQ ID NO: 2280294 - DNA, 25 bp, Homo sapien
ggctctgagattaactggaaggaga

SEQ ID NO: 2280295 - DNA, 25 bp, Homo sapien
ggtgatttcataccatccgaggatg

SEQ ID NO: 2280296 - DNA, 25 bp, Homo sapien
tccgaggatgggctctgagattaac

SEQ ID NO: 2280297 - DNA, 25 bp, Homo sapien
tggaaggagagttgtagaatccctc

SEQ ID NO: 2280298 - DNA, 25 bp, Homo sapien
acagagaaggagtgatatgttttct

SEQ ID NO: 2280299 - DNA, 25 bp, Homo sapien
cagagaaggagtgatatgttttctt

SEQ ID NO: 2280300 - DNA, 25 bp, Homo sapien
agagaaggagtgatatgttttcttc

SEQ ID NO: 2280301 - DNA, 25 bp, Homo sapien
tattttctggtgcatccacagtcat

SEQ ID NO: 2280302 - DNA, 25 bp, Homo sapien
cagacattcactttgaattcagagt

SEQ ID NO: 2280303 - DNA, 25 bp, Homo sapien
gagtccacaactaagatattttctg

SEQ ID NO: 2280304 - DNA, 25 bp, Homo sapien
aattcagagtccacaactaagatat

SEQ ID NO: 2280305 - DNA, 25 bp, Homo sapien
ttacagagtgaactgataagatgag

SEQ ID NO: 2280306 - DNA, 25 bp, Homo sapien
catgaatgataagccgtagattctc

SEQ ID NO: 2280307 - DNA, 25 bp, Homo sapien
gataagccgtagattctctgcacac

SEQ ID NO: 2280308 - DNA, 25 bp, Homo sapien
cgtccacaggttcaccataggtata

SEQ ID NO: 2280309 - DNA, 25 bp, Homo sapien
caaaagcacctgtgttaatgaactt

SEQ ID NO: 2280310 - DNA, 25 bp, Homo sapien
aagcacctgtgttaatgaacttgga

SEQ ID NO: 2280311 - DNA, 25 bp, Homo sapien
taactcaaaagcacctgtgttaatg

SEQ ID NO: 2280312 - DNA, 25 bp, Homo sapien
aactcaaaagcacctgtgttaatga

SEQ ID NO: 2280313 - DNA, 25 bp, Homo sapien
atttcggaagcatgtagtaaatttg

SEQ ID NO: 2280314 - DNA, 25 bp, Homo sapien
cggaagcatgtagtaaatttgggaa

SEQ ID NO: 2280315 - DNA, 25 bp, Homo sapien
ttcggaagcatgtagtaaatttggg

SEQ ID NO: 2280316 - DNA, 25 bp, Homo sapien
ggaagcatgtagtaaatttgggaat

SEQ ID NO: 2280317 - DNA, 25 bp, Homo sapien
gtatatgtgtccaagaaaaactgag

SEQ ID NO: 2280318 - DNA, 25 bp, Homo sapien
gaaaaactgagcgatgccatttaca

SEQ ID NO: 2280319 - DNA, 25 bp, Homo sapien
agtgatatttgggtatgtaaacgta

SEQ ID NO: 2280320 - DNA, 25 bp, Homo sapien
tttacatctgtggtgtagtttccca

SEQ ID NO: 2280321 - DNA, 25 bp, Homo sapien
tggcaattttcattggccttgtagg

SEQ ID NO: 2280322 - DNA, 25 bp, Homo sapien
gcaattttcattggccttgtaggct

SEQ ID NO: 2280323 - DNA, 25 bp, Homo sapien
cctggcaattttcattggccttgta

SEQ ID NO: 2280324 - DNA, 25 bp, Homo sapien
tgagggtattgaggcaacacccagc

SEQ ID NO: 2280325 - DNA, 25 bp, Homo sapien
gagaatgcagtgcactagcaccctc

SEQ ID NO: 2280326 - DNA, 25 bp, Homo sapien
catctcttggacaatctttaggaag

SEQ ID NO: 2280327 - DNA, 25 bp, Homo sapien
tctgctggttgcatctcagttcttc

SEQ ID NO: 2280328 - DNA, 25 bp, Homo sapien
agtgcactagcaccctcttctgctg

SEQ ID NO: 2280329 - DNA, 25 bp, Homo sapien
tttcgttgatctcaattttctgttg

SEQ ID NO: 2280330 - DNA, 25 bp, Homo sapien
cattttcgttgatctcaattttctg

SEQ ID NO: 2280331 - DNA, 25 bp, Homo sapien
attttcgttgatctcaattttctgt

SEQ ID NO: 2280332 - DNA, 25 bp, Homo sapien
ttttcgttgatctcaattttctgtt

SEQ ID NO: 2280333 - DNA, 25 bp, Homo sapien
ctatagaaatggaaaatatgccctt

SEQ ID NO: 2280334 - DNA, 25 bp, Homo sapien
tagaaatggaaaatatgcccttcct

SEQ ID NO: 2280335 - DNA, 25 bp, Homo sapien
gaaatggaaaatatgcccttcctcc

SEQ ID NO: 2280336 - DNA, 25 bp, Homo sapien
tatagaaatggaaaatatgcccttc

SEQ ID NO: 2280337 - DNA, 25 bp, Homo sapien
cggaattgggtgctatcagtgacca

SEQ ID NO: 2280338 - DNA, 25 bp, Homo sapien
gagggcgctaattcagggttaatgt

SEQ ID NO: 2280339 - DNA, 25 bp, Homo sapien
aagcatttctcaattcggaattggg

SEQ ID NO: 2280340 - DNA, 25 bp, Homo sapien
agctatagacaagcatatctactga

SEQ ID NO: 2280341 - DNA, 25 bp, Homo sapien
aaagagagtttgaagcagccgagac

SEQ ID NO: 2280342 - DNA, 25 bp, Homo sapien
gagagtttgaagcagccgagacttg

SEQ ID NO: 2280343 - DNA, 25 bp, Homo sapien
tgaccataattccttagtagcaata

SEQ ID NO: 2280344 - DNA, 25 bp, Homo sapien
gagtttgaagcagccgagacttgaa

SEQ ID NO: 2280345 - DNA, 25 bp, Homo sapien
gccatcttctaagttaagtcctctg

SEQ ID NO: 2280346 - DNA, 25 bp, Homo sapien
aagacacggcactttaaggccatct

SEQ ID NO: 2280347 - DNA, 25 bp, Homo sapien
catcttcaagacacggcactttaag

SEQ ID NO: 2280348 - DNA, 25 bp, Homo sapien
aataaattccattgtaaaggatatg

SEQ ID NO: 2280349 - DNA, 25 bp, Homo sapien
ggtaatatttcggaaagaagtcaca

SEQ ID NO: 2280350 - DNA, 25 bp, Homo sapien
tgggtaatatttcggaaagaagtca

SEQ ID NO: 2280351 - DNA, 25 bp, Homo sapien
aaatcagttggaacgagagttgggt

SEQ ID NO: 2280352 - DNA, 25 bp, Homo sapien
tggaacgagagttgggtaatatttc

SEQ ID NO: 2280353 - DNA, 25 bp, Homo sapien
tagttactgtttgtggtgcattgac

SEQ ID NO: 2280354 - DNA, 25 bp, Homo sapien
atagttactgtttgtggtgcattga

SEQ ID NO: 2280355 - DNA, 25 bp, Homo sapien
aaatagttactgtttgtggtgcatt

SEQ ID NO: 2280356 - DNA, 25 bp, Homo sapien
aatagttactgtttgtggtgcattg

SEQ ID NO: 2280357 - DNA, 25 bp, Homo sapien
tactctctgcacacccggatttggg

SEQ ID NO: 2280358 - DNA, 25 bp, Homo sapien
aaaaatactctctgcacacccggat

SEQ ID NO: 2280359 - DNA, 25 bp, Homo sapien
aaaatactctctgcacacccggatt

SEQ ID NO: 2280360 - DNA, 25 bp, Homo sapien
aatactctctgcacacccggatttg

SEQ ID NO: 2280361 - DNA, 25 bp, Homo sapien
aaatgtcatgaacaatcccgaacgg

SEQ ID NO: 2280362 - DNA, 25 bp, Homo sapien
tctgtaacaattacagcgacatgaa

SEQ ID NO: 2280363 - DNA, 25 bp, Homo sapien
caattacagcgacatgaaatgtcat

SEQ ID NO: 2280364 - DNA, 25 bp, Homo sapien
cggtagagttggaagacttttgtat

SEQ ID NO: 2280365 - DNA, 25 bp, Homo sapien
cagttccaagcaattgagtgataaa

SEQ ID NO: 2280366 - DNA, 25 bp, Homo sapien
tccatgttctcaaagtttacagttc

SEQ ID NO: 2280367 - DNA, 25 bp, Homo sapien
aagtttacagttccaagcaattgag

SEQ ID NO: 2280368 - DNA, 25 bp, Homo sapien
tctcaaagtttacagttccaagcaa

SEQ ID NO: 2280369 - DNA, 25 bp, Homo sapien
ttgagctccagttgcaacaacttgt

SEQ ID NO: 2280370 - DNA, 25 bp, Homo sapien
tcaaatatgtctgaagtgtcaatgg

SEQ ID NO: 2280371 - DNA, 25 bp, Homo sapien
tggaaaattgagcttcgccattctc

SEQ ID NO: 2280372 - DNA, 25 bp, Homo sapien
tgttcaccataggtacattattggg

SEQ ID NO: 2280373 - DNA, 25 bp, Homo sapien
aaagcgtgagactaagaagtgagca

SEQ ID NO: 2280374 - DNA, 25 bp, Homo sapien
catatgcttcactgtttagggagta

SEQ ID NO: 2280375 - DNA, 25 bp, Homo sapien
gcatccaagtactgaggcgtcaacc

SEQ ID NO: 2280376 - DNA, 25 bp, Homo sapien
gggagtaatgcacagtaacaacctt

SEQ ID NO: 2280377 - DNA, 25 bp, Homo sapien
tgtccactgagtaagatagctcctt

SEQ ID NO: 2280378 - DNA, 25 bp, Homo sapien
gtccactgagtaagatagctccttt

SEQ ID NO: 2280379 - DNA, 25 bp, Homo sapien
ttgtccactgagtaagatagctcct

SEQ ID NO: 2280380 - DNA, 25 bp, Homo sapien
gacgaagagatacgatgctgaaagt

SEQ ID NO: 2280381 - DNA, 25 bp, Homo sapien
aaataggagacgaagagatacgatg

SEQ ID NO: 2280382 - DNA, 25 bp, Homo sapien
taggagacgaagagatacgatgctg

SEQ ID NO: 2280383 - DNA, 25 bp, Homo sapien
aagagatacgatgctgaaagtttcc

SEQ ID NO: 2280384 - DNA, 25 bp, Homo sapien
gaatctgacactgtcagccacaatt

SEQ ID NO: 2280385 - DNA, 25 bp, Homo sapien
tctgacactgtcagccacaatttcc

SEQ ID NO: 2280386 - DNA, 25 bp, Homo sapien
gtgtttaaagcacttgtcaacctgg

SEQ ID NO: 2280387 - DNA, 25 bp, Homo sapien
aaagcacttgtcaacctggaatctg

SEQ ID NO: 2280388 - DNA, 25 bp, Homo sapien
gaaggacattcctatccacagccct

SEQ ID NO: 2280389 - DNA, 25 bp, Homo sapien
aaggacattcctatccacagccctg

SEQ ID NO: 2280390 - DNA, 25 bp, Homo sapien
tcatcaagattgaggccatggtaga

SEQ ID NO: 2280391 - DNA, 25 bp, Homo sapien
tacggctctatacttggaaccatgt

SEQ ID NO: 2280392 - DNA, 25 bp, Homo sapien
ccccatagttgcttacaggtgtgta

SEQ ID NO: 2280393 - DNA, 25 bp, Homo sapien
aacatatccctctgaggaatgcaag

SEQ ID NO: 2280394 - DNA, 25 bp, Homo sapien
tggttttcggtaatggagattggta

SEQ ID NO: 2280395 - DNA, 25 bp, Homo sapien
ctggttttcggtaatggagattggt

SEQ ID NO: 2280396 - DNA, 25 bp, Homo sapien
ttctggttttcggtaatggagattg

SEQ ID NO: 2280397 - DNA, 25 bp, Homo sapien
tctggttttcggtaatggagattgg

SEQ ID NO: 2280398 - DNA, 25 bp, Homo sapien
agataaagcggcttagggagtggca

SEQ ID NO: 2280399 - DNA, 25 bp, Homo sapien
agcggcttagggagtggcagccttc

SEQ ID NO: 2280400 - DNA, 25 bp, Homo sapien
taaagcggcttagggagtggcagcc

SEQ ID NO: 2280401 - DNA, 25 bp, Homo sapien
ggcttagggagtggcagccttctct

SEQ ID NO: 2280402 - DNA, 25 bp, Homo sapien
tgacgaggtcccacatccatgtctc

SEQ ID NO: 2280403 - DNA, 25 bp, Homo sapien
gacactgacgaggtcccacatccat

SEQ ID NO: 2280404 - DNA, 25 bp, Homo sapien
ttgaattatagcctgttctacatag

SEQ ID NO: 2280405 - DNA, 25 bp, Homo sapien
tgttctacatagtcagcattctccc

SEQ ID NO: 2280406 - DNA, 25 bp, Homo sapien
cacttgcctcccattgggttatcgt

SEQ ID NO: 2280407 - DNA, 25 bp, Homo sapien
caggaatgaggaacgaaagattggc

SEQ ID NO: 2280408 - DNA, 25 bp, Homo sapien
tgggttatcgtatcaggaatgagga

SEQ ID NO: 2280409 - DNA, 25 bp, Homo sapien
aatgaggaacgaaagattggcagag

SEQ ID NO: 2280410 - DNA, 25 bp, Homo sapien
tttgcttcataattctgagactcct

SEQ ID NO: 2280411 - DNA, 25 bp, Homo sapien
gagactcctccacttgaacagaaat

SEQ ID NO: 2280412 - DNA, 25 bp, Homo sapien
gaataacctcactgccattgatttt

SEQ ID NO: 2280413 - DNA, 25 bp, Homo sapien
tccagcttgaataacctcactgcca

SEQ ID NO: 2280414 - DNA, 25 bp, Homo sapien
tgctttgtttggactcagcaactac

SEQ ID NO: 2280415 - DNA, 25 bp, Homo sapien
ccattccttcatttgggcaagcact

SEQ ID NO: 2280416 - DNA, 25 bp, Homo sapien
tgtttggactcagcaactacagtga

SEQ ID NO: 2280417 - DNA, 25 bp, Homo sapien
ggactcagcaactacagtgatattc

SEQ ID NO: 2280418 - DNA, 25 bp, Homo sapien
cattttagcctctgcgttctgtagc

SEQ ID NO: 2280419 - DNA, 25 bp, Homo sapien
ggaaaagtgattaagcaccagctca

SEQ ID NO: 2280420 - DNA, 25 bp, Homo sapien
tgagagaagatccaactcatggtcc

SEQ ID NO: 2280421 - DNA, 25 bp, Homo sapien
agcatggctggtgcaagtttatccc

SEQ ID NO: 2280422 - DNA, 25 bp, Homo sapien
acagataaggaaactctgggtcctt

SEQ ID NO: 2280423 - DNA, 25 bp, Homo sapien
cagataaggaaactctgggtccttt

SEQ ID NO: 2280424 - DNA, 25 bp, Homo sapien
ctctggctgacccttctactacatc

SEQ ID NO: 2280425 - DNA, 25 bp, Homo sapien
gcaagtccaaaactccctgcttgga

SEQ ID NO: 2280426 - DNA, 25 bp, Homo sapien
aacagtgaaaaagcctctggctgac

SEQ ID NO: 2280427 - DNA, 25 bp, Homo sapien
ccacaacagtgaaaaagcctctggc

SEQ ID NO: 2280428 - DNA, 25 bp, Homo sapien
tccatagggcatttggagaacaacc

SEQ ID NO: 2280429 - DNA, 25 bp, Homo sapien
tgtcagttgctcagtagatttcaga

SEQ ID NO: 2280430 - DNA, 25 bp, Homo sapien
aagtatcagatgctagtagggcagc

SEQ ID NO: 2280431 - DNA, 25 bp, Homo sapien
gatttcagatagtccagaacataag

SEQ ID NO: 2280432 - DNA, 25 bp, Homo sapien
acacactataggaaccatcagagtt

SEQ ID NO: 2280433 - DNA, 25 bp, Homo sapien
ctataggaaccatcagagtttttga

SEQ ID NO: 2280434 - DNA, 25 bp, Homo sapien
cactataggaaccatcagagttttt

SEQ ID NO: 2280435 - DNA, 25 bp, Homo sapien
cacactataggaaccatcagagttt

SEQ ID NO: 2280436 - DNA, 25 bp, Homo sapien
ccagattaaggtctgtttttgaaca

SEQ ID NO: 2280437 - DNA, 25 bp, Homo sapien
tgaacattttcatcaatgaatacat

SEQ ID NO: 2280438 - DNA, 25 bp, Homo sapien
ctccaatgtcttaaaagtaagagca

SEQ ID NO: 2280439 - DNA, 25 bp, Homo sapien
tctctccaatgtcttaaaagtaaga

SEQ ID NO: 2280440 - DNA, 25 bp, Homo sapien
attcttaaagcagccgcttgttttc

SEQ ID NO: 2280441 - DNA, 25 bp, Homo sapien
ctcccaggcgtggttgaaaagctgg

SEQ ID NO: 2280442 - DNA, 25 bp, Homo sapien
gtggttgaaaagctggccatcattc

SEQ ID NO: 2280443 - DNA, 25 bp, Homo sapien
caggcgtggttgaaaagctggccat

SEQ ID NO: 2280444 - DNA, 25 bp, Homo sapien
caatgagtcattcgggacagcagag

SEQ ID NO: 2280445 - DNA, 25 bp, Homo sapien
gacactaacatgaggtacgaggact

SEQ ID NO: 2280446 - DNA, 25 bp, Homo sapien
gaaaagcaccctaggagatcaccag

SEQ ID NO: 2280447 - DNA, 25 bp, Homo sapien
gaaagttgccgtgaagattcctgga

SEQ ID NO: 2280448 - DNA, 25 bp, Homo sapien
cagcttcaaagaacatcccaacaac

SEQ ID NO: 2280449 - DNA, 25 bp, Homo sapien
gaatgtgcattcagctgcctgaaat

SEQ ID NO: 2280450 - DNA, 25 bp, Homo sapien
aattgagcccagcttcaaagaacat

SEQ ID NO: 2280451 - DNA, 25 bp, Homo sapien
aatgtgcattcagctgcctgaaatc

SEQ ID NO: 2280452 - DNA, 25 bp, Homo sapien
tgaatgtcttctatgcggcaaagca

SEQ ID NO: 2280453 - DNA, 25 bp, Homo sapien
gctagggtgagccacacttaagttg

SEQ ID NO: 2280454 - DNA, 25 bp, Homo sapien
taggccacggctttacttagaacag

SEQ ID NO: 2280455 - DNA, 25 bp, Homo sapien
gccaggcccaatgaaatttagtaag

SEQ ID NO: 2280456 - DNA, 25 bp, Homo sapien
cttcaaggcaaaagagtgcgtttcg

SEQ ID NO: 2280457 - DNA, 25 bp, Homo sapien
aggcaaaagagtgcgtttcgtagag

SEQ ID NO: 2280458 - DNA, 25 bp, Homo sapien
caaaagagtgcgtttcgtagagcag

SEQ ID NO: 2280459 - DNA, 25 bp, Homo sapien
tcaaggcaaaagagtgcgtttcgta

SEQ ID NO: 2280460 - DNA, 25 bp, Homo sapien
gcagattgatccagggtttggagta

SEQ ID NO: 2280461 - DNA, 25 bp, Homo sapien
ttagtgacaccactgtccaatgccg

SEQ ID NO: 2280462 - DNA, 25 bp, Homo sapien
caaaagcataagctagaattgcatg

SEQ ID NO: 2280463 - DNA, 25 bp, Homo sapien
ggagtaaagattccacttgcttctc

SEQ ID NO: 2280464 - DNA, 25 bp, Homo sapien
tagcaacaatgaataataacgctta

SEQ ID NO: 2280465 - DNA, 25 bp, Homo sapien
agcaacaatgaataataacgcttac

SEQ ID NO: 2280466 - DNA, 25 bp, Homo sapien
ttagcaacaatgaataataacgctt

SEQ ID NO: 2280467 - DNA, 25 bp, Homo sapien
ttccgggaaatgacagccaacagca

SEQ ID NO: 2280468 - DNA, 25 bp, Homo sapien
cactgcacaatcttactagcatagg

SEQ ID NO: 2280469 - DNA, 25 bp, Homo sapien
cagaaggtgcccagggaataaagga

SEQ ID NO: 2280470 - DNA, 25 bp, Homo sapien
cataggtgaggtcaggaattttccg

SEQ ID NO: 2280471 - DNA, 25 bp, Homo sapien
agcttctgcattaaacatattgcta

SEQ ID NO: 2280472 - DNA, 25 bp, Homo sapien
tctgcattaaacatattgctattaa

SEQ ID NO: 2280473 - DNA, 25 bp, Homo sapien
gctattaatatcaggcctacattaa

SEQ ID NO: 2280474 - DNA, 25 bp, Homo sapien
tgctattaatatcaggcctacatta

SEQ ID NO: 2280475 - DNA, 25 bp, Homo sapien
gcttttcccagtgtatagcccacag

SEQ ID NO: 2280476 - DNA, 25 bp, Homo sapien
cagaactagagcgaaagctttcttt

SEQ ID NO: 2280477 - DNA, 25 bp, Homo sapien
aatttgaacagagtatcatcaggtg

SEQ ID NO: 2280478 - DNA, 25 bp, Homo sapien
tctttttggcccgtatataatttga

SEQ ID NO: 2280479 - DNA, 25 bp, Homo sapien
tggcaagaagacaaactgcagtttc

SEQ ID NO: 2280480 - DNA, 25 bp, Homo sapien
tatgtagcgggttatggcaagaaga

SEQ ID NO: 2280481 - DNA, 25 bp, Homo sapien
ttatgtagcgggttatggcaagaag

SEQ ID NO: 2280482 - DNA, 25 bp, Homo sapien
ggttatggcaagaagacaaactgca

SEQ ID NO: 2280483 - DNA, 25 bp, Homo sapien
aagggcagaaggcaggtgagagaat

SEQ ID NO: 2280484 - DNA, 25 bp, Homo sapien
taagggcagaaggcaggtgagagaa

SEQ ID NO: 2280485 - DNA, 25 bp, Homo sapien
ctaagggcagaaggcaggtgagaga

SEQ ID NO: 2280486 - DNA, 25 bp, Homo sapien
agggcagaaggcaggtgagagaatt

SEQ ID NO: 2280487 - DNA, 25 bp, Homo sapien
gcagccgggatcacaaagaaagcag

SEQ ID NO: 2280488 - DNA, 25 bp, Homo sapien
ccaggaccgtgggaacaatatctca

SEQ ID NO: 2280489 - DNA, 25 bp, Homo sapien
tacacctcgtgctctattatgcgga

SEQ ID NO: 2280490 - DNA, 25 bp, Homo sapien
taacacgagggtgtatacgtcctgc

SEQ ID NO: 2280491 - DNA, 25 bp, Homo sapien
tggctcttaggatccacggtggact

SEQ ID NO: 2280492 - DNA, 25 bp, Homo sapien
tatttggaattcactatccgacagg

SEQ ID NO: 2280493 - DNA, 25 bp, Homo sapien
gatctgccgacggtaggtacattat

SEQ ID NO: 2280494 - DNA, 25 bp, Homo sapien
gccgacggtaggtacattatttgga

SEQ ID NO: 2280495 - DNA, 25 bp, Homo sapien
tctgccgacggtaggtacattattt

SEQ ID NO: 2280496 - DNA, 25 bp, Homo sapien
tccccccgggctcttaggatcgcca

SEQ ID NO: 2280497 - DNA, 25 bp, Homo sapien
ctgctaaaggtgacagtgttttgat

SEQ ID NO: 2280498 - DNA, 25 bp, Homo sapien
tgttacttctgaacgttggaccagt

SEQ ID NO: 2280499 - DNA, 25 bp, Homo sapien
cttctgaacgttggaccagtaggcg

SEQ ID NO: 2280500 - DNA, 25 bp, Homo sapien
tgtgttacttctgaacgttggacca

SEQ ID NO: 2280501 - DNA, 25 bp, Homo sapien
tacttctgaacgttggaccagtagg

SEQ ID NO: 2280502 - DNA, 25 bp, Homo sapien
tcttttactggcaaacactcatcac

SEQ ID NO: 2280503 - DNA, 25 bp, Homo sapien
tctttatcatcagggaatcaggtta

SEQ ID NO: 2280504 - DNA, 25 bp, Homo sapien
gaaacttctcttagacagctgagta

SEQ ID NO: 2280505 - DNA, 25 bp, Homo sapien
caaaacggtcaaataacacttcacg

SEQ ID NO: 2280506 - DNA, 25 bp, Homo sapien
ttaggtaggagaacattgtacttaa

SEQ ID NO: 2280507 - DNA, 25 bp, Homo sapien
ggagaacattgtacttaagggtggc

SEQ ID NO: 2280508 - DNA, 25 bp, Homo sapien
cagatgccttcttaggtaggagaac

SEQ ID NO: 2280509 - DNA, 25 bp, Homo sapien
aaatcctgctcacatagactgcatg

SEQ ID NO: 2280510 - DNA, 25 bp, Homo sapien
gcttgctactatatgaccatgcatg

SEQ ID NO: 2280511 - DNA, 25 bp, Homo sapien
gtactaaattgtggtgtccggacag

SEQ ID NO: 2280512 - DNA, 25 bp, Homo sapien
ccggacagagggctaaaaagtgact

SEQ ID NO: 2280513 - DNA, 25 bp, Homo sapien
ttaagaaaacacttgtttagatatc

SEQ ID NO: 2280514 - DNA, 25 bp, Homo sapien
acacttgtttagatatcaattttaa

SEQ ID NO: 2280515 - DNA, 25 bp, Homo sapien
aagaaaacacttgtttagatatcaa

SEQ ID NO: 2280516 - DNA, 25 bp, Homo sapien
aaacacttgtttagatatcaatttt

SEQ ID NO: 2280517 - DNA, 25 bp, Homo sapien
actggatttattgcgaattccagtg

SEQ ID NO: 2280518 - DNA, 25 bp, Homo sapien
catggttggagtaaatcctgatagc

SEQ ID NO: 2280519 - DNA, 25 bp, Homo sapien
gttggagtaaatcctgatagcattt

SEQ ID NO: 2280520 - DNA, 25 bp, Homo sapien
ggatttattgcgaattccagtgtat

SEQ ID NO: 2280521 - DNA, 25 bp, Homo sapien
ttcatcacttggcccttgttttcaa

SEQ ID NO: 2280522 - DNA, 25 bp, Homo sapien
tcatcacttggcccttgttttcaag

SEQ ID NO: 2280523 - DNA, 25 bp, Homo sapien
cttcatcacttggcccttgttttca

SEQ ID NO: 2280524 - DNA, 25 bp, Homo sapien
gaacatggtcattcttgacttcagt

SEQ ID NO: 2280525 - DNA, 25 bp, Homo sapien
tttccaagtagaaaagaacatggtc

SEQ ID NO: 2280526 - DNA, 25 bp, Homo sapien
gaaaagaacatggtcattcttgact

SEQ ID NO: 2280527 - DNA, 25 bp, Homo sapien
gtagaaaagaacatggtcattcttg

SEQ ID NO: 2280528 - DNA, 25 bp, Homo sapien
gcatccaattatccttggaaggaaa

SEQ ID NO: 2280529 - DNA, 25 bp, Homo sapien
aaattgaagcatccaattatccttg

SEQ ID NO: 2280530 - DNA, 25 bp, Homo sapien
tgaagcatccaattatccttggaag

SEQ ID NO: 2280531 - DNA, 25 bp, Homo sapien
gaagcatccaattatccttggaagg

SEQ ID NO: 2280532 - DNA, 25 bp, Homo sapien
ggaaactgtctgctcgaccaaaacc

SEQ ID NO: 2280533 - DNA, 25 bp, Homo sapien
aaagggaaactgtctgctcgaccaa

SEQ ID NO: 2280534 - DNA, 25 bp, Homo sapien
acaaggttgctctgctcaacagaaa

SEQ ID NO: 2280535 - DNA, 25 bp, Homo sapien
tgaatgttgaacacaaggttgctct

SEQ ID NO: 2280536 - DNA, 25 bp, Homo sapien
ttttcgtaataatcgtagaccatgg

SEQ ID NO: 2280537 - DNA, 25 bp, Homo sapien
gtaataatcgtagaccatggctggg

SEQ ID NO: 2280538 - DNA, 25 bp, Homo sapien
ttcgtaataatcgtagaccatggct

SEQ ID NO: 2280539 - DNA, 25 bp, Homo sapien
ctttttcgtaataatcgtagaccat

SEQ ID NO: 2280540 - DNA, 25 bp, Homo sapien
gtatacaaagtaatgccatctattg

SEQ ID NO: 2280541 - DNA, 25 bp, Homo sapien
tatacaaagtaatgccatctattgt

SEQ ID NO: 2280542 - DNA, 25 bp, Homo sapien
catgcatatataggcacatagacat

SEQ ID NO: 2280543 - DNA, 25 bp, Homo sapien
actgttcacgatgtcagatggttca

SEQ ID NO: 2280544 - DNA, 25 bp, Homo sapien
tcagattactcatgcagtacacagc

SEQ ID NO: 2280545 - DNA, 25 bp, Homo sapien
gcctaaatttttactgacctgtcaa

SEQ ID NO: 2280546 - DNA, 25 bp, Homo sapien
gaattaacatggagtccatttcaac

SEQ ID NO: 2280547 - DNA, 25 bp, Homo sapien
aacatggagtccatttcaactttca

SEQ ID NO: 2280548 - DNA, 25 bp, Homo sapien
cttgaattaacatggagtccatttc

SEQ ID NO: 2280549 - DNA, 25 bp, Homo sapien
ttaacatggagtccatttcaacttt

SEQ ID NO: 2280550 - DNA, 25 bp, Homo sapien
cgagtctatgtgttttgtgccttta

SEQ ID NO: 2280551 - DNA, 25 bp, Homo sapien
tctcggaagatacattcgagtctat

SEQ ID NO: 2280552 - DNA, 25 bp, Homo sapien
cattcgagtctatgtgttttgtgcc

SEQ ID NO: 2280553 - DNA, 25 bp, Homo sapien
cggaagatacattcgagtctatgtg

SEQ ID NO: 2280554 - DNA, 25 bp, Homo sapien
agcaatgcctttgctccaacgggat

SEQ ID NO: 2280555 - DNA, 25 bp, Homo sapien
ataggacgtcctggccgatcctctg

SEQ ID NO: 2280556 - DNA, 25 bp, Homo sapien
ctggtgagtaaggatgcaagcatag

SEQ ID NO: 2280557 - DNA, 25 bp, Homo sapien
caacgggatgggcaacgttggatta

SEQ ID NO: 2280558 - DNA, 25 bp, Homo sapien
ctcatctgagatggattgcacagtg

SEQ ID NO: 2280559 - DNA, 25 bp, Homo sapien
tctctgcgctttggaaattcactca

SEQ ID NO: 2280560 - DNA, 25 bp, Homo sapien
catctgagatggattgcacagtgta

SEQ ID NO: 2280561 - DNA, 25 bp, Homo sapien
agtgtatgtccagggcccatcccgg

SEQ ID NO: 2280562 - DNA, 25 bp, Homo sapien
tgcagggcagaagttagcagggaag

SEQ ID NO: 2280563 - DNA, 25 bp, Homo sapien
acaggggcgggtggcacttgaaaat

SEQ ID NO: 2280564 - DNA, 25 bp, Homo sapien
ggcagaagttagcagggaagtcttc

SEQ ID NO: 2280565 - DNA, 25 bp, Homo sapien
cagggcagaagttagcagggaagtc

SEQ ID NO: 2280566 - DNA, 25 bp, Homo sapien
cacttaggactgatagtgagcttca

SEQ ID NO: 2280567 - DNA, 25 bp, Homo sapien
tgtctagaacatggtaagtgtcact

SEQ ID NO: 2280568 - DNA, 25 bp, Homo sapien
gaacaacttaactaatccctctatg

SEQ ID NO: 2280569 - DNA, 25 bp, Homo sapien
tagcaatcataattaccacttagga

SEQ ID NO: 2280570 - DNA, 25 bp, Homo sapien
ttttatttatcccatctgtcgttaa

SEQ ID NO: 2280571 - DNA, 25 bp, Homo sapien
tcctcccacactctacccttaaaga

SEQ ID NO: 2280572 - DNA, 25 bp, Homo sapien
tatcccatctgtcgttaatggaaat

SEQ ID NO: 2280573 - DNA, 25 bp, Homo sapien
catctgtcgttaatggaaatttagg

SEQ ID NO: 2280574 - DNA, 25 bp, Homo sapien
ttaaattcttgataacacaagcagc

SEQ ID NO: 2280575 - DNA, 25 bp, Homo sapien
aattcttgataacacaagcagcagt

SEQ ID NO: 2280576 - DNA, 25 bp, Homo sapien
aaattcttgataacacaagcagcag

SEQ ID NO: 2280577 - DNA, 25 bp, Homo sapien
ttcttgataacacaagcagcagttt

SEQ ID NO: 2280578 - DNA, 25 bp, Homo sapien
aatgcctttgttcacgttgttcaga

SEQ ID NO: 2280579 - DNA, 25 bp, Homo sapien
cagtagtgatttttaggctcaagac

SEQ ID NO: 2280580 - DNA, 25 bp, Homo sapien
tccaggcaaaaatagtcgaacaggc

SEQ ID NO: 2280581 - DNA, 25 bp, Homo sapien
tatcccaaggacatagagaaatgcc

SEQ ID NO: 2280582 - DNA, 25 bp, Homo sapien
cacataagcaccaagtgatgaggct

SEQ ID NO: 2280583 - DNA, 25 bp, Homo sapien
taaggttttaaccagcaaggcatgc

SEQ ID NO: 2280584 - DNA, 25 bp, Homo sapien
cagtgtggacattcaacagagcagg

SEQ ID NO: 2280585 - DNA, 25 bp, Homo sapien
gagcctctgctaggatactccactg

SEQ ID NO: 2280586 - DNA, 25 bp, Homo sapien
ggtaacacatgatggatagcatggc

SEQ ID NO: 2280587 - DNA, 25 bp, Homo sapien
aaagaagcggggaacaccaatgtga

SEQ ID NO: 2280588 - DNA, 25 bp, Homo sapien
tgtgaggtaacacatgatggatagc

SEQ ID NO: 2280589 - DNA, 25 bp, Homo sapien
gggaacaccaatgtgaggtaacaca

SEQ ID NO: 2280590 - DNA, 25 bp, Homo sapien
atttgttgaaactggcactttcctg

SEQ ID NO: 2280591 - DNA, 25 bp, Homo sapien
cctgtgtctctgaagagttagcatt

SEQ ID NO: 2280592 - DNA, 25 bp, Homo sapien
tggcactttcctgtgtctctgaaga

SEQ ID NO: 2280593 - DNA, 25 bp, Homo sapien
tgaaactggcactttcctgtgtctc

SEQ ID NO: 2280594 - DNA, 25 bp, Homo sapien
tcatctcttcctcggggtaagtggc

SEQ ID NO: 2280595 - DNA, 25 bp, Homo sapien
ttcatctcttcctcggggtaagtgg

SEQ ID NO: 2280596 - DNA, 25 bp, Homo sapien
cttcatctcttcctcggggtaagtg

SEQ ID NO: 2280597 - DNA, 25 bp, Homo sapien
cgtttatcgatttgtgtatgttgga

SEQ ID NO: 2280598 - DNA, 25 bp, Homo sapien
tggtgtgccagtattttatagagaa

SEQ ID NO: 2280599 - DNA, 25 bp, Homo sapien
ctggtagaatgtgactgtgaatctg

SEQ ID NO: 2280600 - DNA, 25 bp, Homo sapien
tagaatgtgactgtgaatctgtctg

SEQ ID NO: 2280601 - DNA, 25 bp, Homo sapien
acaaaattaggtcagttgcacagga

SEQ ID NO: 2280602 - DNA, 25 bp, Homo sapien
gaagagtaggaacacaattcagccc

SEQ ID NO: 2280603 - DNA, 25 bp, Homo sapien
tatcagtggagctataagcataagc

SEQ ID NO: 2280604 - DNA, 25 bp, Homo sapien
gaatttaccgttactaatgcaagaa

SEQ ID NO: 2280605 - DNA, 25 bp, Homo sapien
cgtttggctgtggcttttctatttg

SEQ ID NO: 2280606 - DNA, 25 bp, Homo sapien
tgcttggacttctcactcatcagag

SEQ ID NO: 2280607 - DNA, 25 bp, Homo sapien
tttgcttggacttctcactcatcag

SEQ ID NO: 2280608 - DNA, 25 bp, Homo sapien
tttctatttgcttggacttctcact

SEQ ID NO: 2280609 - DNA, 25 bp, Homo sapien
tccaatccccatatagtgaactaga

SEQ ID NO: 2280610 - DNA, 25 bp, Homo sapien
ccaggatacatcacatgttaggtca

SEQ ID NO: 2280611 - DNA, 25 bp, Homo sapien
ccaacagcaccagggtatgcattcg

SEQ ID NO: 2280612 - DNA, 25 bp, Homo sapien
cattcgttttgagtgcacatggaac

SEQ ID NO: 2280613 - DNA, 25 bp, Homo sapien
gttcaacatggagggtccatcttct

SEQ ID NO: 2280614 - DNA, 25 bp, Homo sapien
aggaacaggcaacaaggcacaggcc

SEQ ID NO: 2280615 - DNA, 25 bp, Homo sapien
tcttttcttgtcatcacatgtacag

SEQ ID NO: 2280616 - DNA, 25 bp, Homo sapien
ttgtcatcacatgtacagtaaagga

SEQ ID NO: 2280617 - DNA, 25 bp, Homo sapien
acatgggtccatcaggagctggctc

SEQ ID NO: 2280618 - DNA, 25 bp, Homo sapien
ttccacatgggtccatcaggagctg

SEQ ID NO: 2280619 - DNA, 25 bp, Homo sapien
atgggtccatcaggagctggctctg

SEQ ID NO: 2280620 - DNA, 25 bp, Homo sapien
ccacatgggtccatcaggagctggc

SEQ ID NO: 2280621 - DNA, 25 bp, Homo sapien
gactgccaggatgatatctggaggt

SEQ ID NO: 2280622 - DNA, 25 bp, Homo sapien
ccctcttaaagtcttcaatgactgc

SEQ ID NO: 2280623 - DNA, 25 bp, Homo sapien
aagtcttcaatgactgccaggatga

SEQ ID NO: 2280624 - DNA, 25 bp, Homo sapien
actgccaggatgatatctggaggtc

SEQ ID NO: 2280625 - DNA, 25 bp, Homo sapien
caccaagggctagttctgcagatgc

SEQ ID NO: 2280626 - DNA, 25 bp, Homo sapien
ttcaagacttcgctgttctcaccaa

SEQ ID NO: 2280627 - DNA, 25 bp, Homo sapien
agtggacaggtattccttgtccaaa

SEQ ID NO: 2280628 - DNA, 25 bp, Homo sapien
gacttcgctgttctcaccaagggct

SEQ ID NO: 2280629 - DNA, 25 bp, Homo sapien
tccaatccttaaggctccagttcca

SEQ ID NO: 2280630 - DNA, 25 bp, Homo sapien
gcagaaagctggctccaatccttaa

SEQ ID NO: 2280631 - DNA, 25 bp, Homo sapien
cagaaatggtctgcacaatgacaaa

SEQ ID NO: 2280632 - DNA, 25 bp, Homo sapien
aaagctggctccaatccttaaggct

SEQ ID NO: 2280633 - DNA, 25 bp, Homo sapien
ctgaagatgggcgtgtgatttcccc

SEQ ID NO: 2280634 - DNA, 25 bp, Homo sapien
gaagatgggcgtgtgatttccccag

SEQ ID NO: 2280635 - DNA, 25 bp, Homo sapien
tgaagatgggcgtgtgatttcccca

SEQ ID NO: 2280636 - DNA, 25 bp, Homo sapien
ttccactgttccagacctgggtcca

SEQ ID NO: 2280637 - DNA, 25 bp, Homo sapien
tggtaggctatgtcaaagaaggcaa

SEQ ID NO: 2280638 - DNA, 25 bp, Homo sapien
tcaaagaaggcaaagagactcttct

SEQ ID NO: 2280639 - DNA, 25 bp, Homo sapien
aagaaggcaaagagactcttcttct

SEQ ID NO: 2280640 - DNA, 25 bp, Homo sapien
cttggtaggctatgtcaaagaaggc

SEQ ID NO: 2280641 - DNA, 25 bp, Homo sapien
tgccctgttcaaagaagtggtgcac

SEQ ID NO: 2280642 - DNA, 25 bp, Homo sapien
aaagaagtggtgcacagcccgggca

SEQ ID NO: 2280643 - DNA, 25 bp, Homo sapien
cctgttcaaagaagtggtgcacagc

SEQ ID NO: 2280644 - DNA, 25 bp, Homo sapien
ttcaaagaagtggtgcacagcccgg

SEQ ID NO: 2280645 - DNA, 25 bp, Homo sapien
tacagtgaaggctcctacacgctca

SEQ ID NO: 2280646 - DNA, 25 bp, Homo sapien
acagtgaaggctcctacacgctcac

SEQ ID NO: 2280647 - DNA, 25 bp, Homo sapien
ttttggtttcatcgcatctttgcat

SEQ ID NO: 2280648 - DNA, 25 bp, Homo sapien
ccttttggtttcatcgcatctttgc

SEQ ID NO: 2280649 - DNA, 25 bp, Homo sapien
ttggtttcatcgcatctttgcatac

SEQ ID NO: 2280650 - DNA, 25 bp, Homo sapien
cttttggtttcatcgcatctttgca

SEQ ID NO: 2280651 - DNA, 25 bp, Homo sapien
acggttggcatacgtggaatggatc

SEQ ID NO: 2280652 - DNA, 25 bp, Homo sapien
gttggcatacgtggaatggatcaag

SEQ ID NO: 2280653 - DNA, 25 bp, Homo sapien
caaccattgttttcatgaatctggg

SEQ ID NO: 2280654 - DNA, 25 bp, Homo sapien
cccattgtggggacggttggcatac

SEQ ID NO: 2280655 - DNA, 25 bp, Homo sapien
caaaacatgccagtttgggcagtgc

SEQ ID NO: 2280656 - DNA, 25 bp, Homo sapien
tttgggcagtgctatgtggccagtt

SEQ ID NO: 2280657 - DNA, 25 bp, Homo sapien
cgcatgctaatgatgtggtcggcca

SEQ ID NO: 2280658 - DNA, 25 bp, Homo sapien
tggagacaagctgagtccgcatgct

SEQ ID NO: 2280659 - DNA, 25 bp, Homo sapien
agaaatgcggccgtcctttgtcata

SEQ ID NO: 2280660 - DNA, 25 bp, Homo sapien
agaactccttggttagccactccac

SEQ ID NO: 2280661 - DNA, 25 bp, Homo sapien
ctgccacagaaatgcggccgtcctt

SEQ ID NO: 2280662 - DNA, 25 bp, Homo sapien
tggttagccactccacctgttcagg

SEQ ID NO: 2280663 - DNA, 25 bp, Homo sapien
gaatggcatgggcaaggtagcccac

SEQ ID NO: 2280664 - DNA, 25 bp, Homo sapien
ctggtgaatggcatgggcaaggtag

SEQ ID NO: 2280665 - DNA, 25 bp, Homo sapien
ggtgaatggcatgggcaaggtagcc

SEQ ID NO: 2280666 - DNA, 25 bp, Homo sapien
tgaatggcatgggcaaggtagccca

SEQ ID NO: 2280667 - DNA, 25 bp, Homo sapien
cccaatagcagaggctgaagacaga

SEQ ID NO: 2280668 - DNA, 25 bp, Homo sapien
gacagaaaggtcgtctctgtttcct

SEQ ID NO: 2280669 - DNA, 25 bp, Homo sapien
ctcatcctctgtgtgaagctcccaa

SEQ ID NO: 2280670 - DNA, 25 bp, Homo sapien
tctgtttccttgcaccaggtacatt

SEQ ID NO: 2280671 - DNA, 25 bp, Homo sapien
aaaactcatatagcaatttgacatt

SEQ ID NO: 2280672 - DNA, 25 bp, Homo sapien
taaacattaaacctcatgagactta

SEQ ID NO: 2280673 - DNA, 25 bp, Homo sapien
tgcaggaaaatttccccttataata

SEQ ID NO: 2280674 - DNA, 25 bp, Homo sapien
catatcacagacattgagagtaagc

SEQ ID NO: 2280675 - DNA, 25 bp, Homo sapien
tagtgccttaatagtccttccacct

SEQ ID NO: 2280676 - DNA, 25 bp, Homo sapien
atgataatgaaacaacctcgatcac

SEQ ID NO: 2280677 - DNA, 25 bp, Homo sapien
cagaagtagtgccttaatagtcctt

SEQ ID NO: 2280678 - DNA, 25 bp, Homo sapien
gaaacaacctcgatcacatttcaga

SEQ ID NO: 2280679 - DNA, 25 bp, Homo sapien
gcgcttctggcgcttgtgacccgag

SEQ ID NO: 2280680 - DNA, 25 bp, Homo sapien
agccgccggcgcttctggcgcttgt

SEQ ID NO: 2280681 - DNA, 25 bp, Homo sapien
ctttccacatccggcaggaacgcga

SEQ ID NO: 2280682 - DNA, 25 bp, Homo sapien
cttgtgacccgagcaggaagcccag

SEQ ID NO: 2280683 - DNA, 25 bp, Homo sapien
acatgggcttctaggctctctcgcg

SEQ ID NO: 2280684 - DNA, 25 bp, Homo sapien
ctccaagcctcaagtttccgccaca

SEQ ID NO: 2280685 - DNA, 25 bp, Homo sapien
agtttccgccacaccctccagagaa

SEQ ID NO: 2280686 - DNA, 25 bp, Homo sapien
gggctgcgggattcgcggctacatg

SEQ ID NO: 2280687 - DNA, 25 bp, Homo sapien
ttctgcttttttcggagctccaggt

SEQ ID NO: 2280688 - DNA, 25 bp, Homo sapien
tcggagctccaggtgacggctcctc

SEQ ID NO: 2280689 - DNA, 25 bp, Homo sapien
cttctgcttttttcggagctccagg

SEQ ID NO: 2280690 - DNA, 25 bp, Homo sapien
cctggcggggtcacactggctaaat

SEQ ID NO: 2280691 - DNA, 25 bp, Homo sapien
gggtcacactggctaaataaaaagc

SEQ ID NO: 2280692 - DNA, 25 bp, Homo sapien
gcggggtcacactggctaaataaaa

SEQ ID NO: 2280693 - DNA, 25 bp, Homo sapien
gtcacactggctaaataaaaagcgc

SEQ ID NO: 2280694 - DNA, 25 bp, Homo sapien
ttttcttttcatggcctggtcagag

SEQ ID NO: 2280695 - DNA, 25 bp, Homo sapien
gcaagtcagagtcccgtgacatgtg

SEQ ID NO: 2280696 - DNA, 25 bp, Homo sapien
gggaggcatcgcacagatttttctt

SEQ ID NO: 2280697 - DNA, 25 bp, Homo sapien
caaaggcaagtcagagtcccgtgac

SEQ ID NO: 2280698 - DNA, 25 bp, Homo sapien
ccatgaatgctaagagctaggagca

SEQ ID NO: 2280699 - DNA, 25 bp, Homo sapien
caagtcttcttgaggtcacagcatc

SEQ ID NO: 2280700 - DNA, 25 bp, Homo sapien
tatctagcagacaaagtgaacccac

SEQ ID NO: 2280701 - DNA, 25 bp, Homo sapien
ctaggctggaaaaacaagttggatc

SEQ ID NO: 2280702 - DNA, 25 bp, Homo sapien
gaaaaaactcgatcacacattcaca

SEQ ID NO: 2280703 - DNA, 25 bp, Homo sapien
tgtaaattcaccacatgccctagcc

SEQ ID NO: 2280704 - DNA, 25 bp, Homo sapien
gcctgtggaatggtcagccaattaa

SEQ ID NO: 2280705 - DNA, 25 bp, Homo sapien
gctgctgaagaggtaaacaactatt

SEQ ID NO: 2280706 - DNA, 25 bp, Homo sapien
gaacaattgagtgtcctaatgcaaa

SEQ ID NO: 2280707 - DNA, 25 bp, Homo sapien
ggaaatcagggaacctgctttcgta

SEQ ID NO: 2280708 - DNA, 25 bp, Homo sapien
tctaaacgtgtatcatcaattgaca

SEQ ID NO: 2280709 - DNA, 25 bp, Homo sapien
caattgacatttgacagacgtggaa

SEQ ID NO: 2280710 - DNA, 25 bp, Homo sapien
gagataaaaatcgaattctccccac

SEQ ID NO: 2280711 - DNA, 25 bp, Homo sapien
tctcaatctcaggaatatcgtaggg

SEQ ID NO: 2280712 - DNA, 25 bp, Homo sapien
caaaagggcttggttcataaatgag

SEQ ID NO: 2280713 - DNA, 25 bp, Homo sapien
gcccaaagagggctagagataaaaa

SEQ ID NO: 2280714 - DNA, 25 bp, Homo sapien
tgcaatcacacttgtagtcaggact

SEQ ID NO: 2280715 - DNA, 25 bp, Homo sapien
caaaacaatagaaagtgcaatcaca

SEQ ID NO: 2280716 - DNA, 25 bp, Homo sapien
agtgctagacattgtctttgcagag

SEQ ID NO: 2280717 - DNA, 25 bp, Homo sapien
ccttgacaggagttactggagatat

SEQ ID NO: 2280718 - DNA, 25 bp, Homo sapien
atttattgacaacaaaaacatatgg

SEQ ID NO: 2280719 - DNA, 25 bp, Homo sapien
caacaaaaacatatggagaatattg

SEQ ID NO: 2280720 - DNA, 25 bp, Homo sapien
ttgtacagtttggagaacaagtaac

SEQ ID NO: 2280721 - DNA, 25 bp, Homo sapien
catatggagaatattgtacagtttg

SEQ ID NO: 2280722 - DNA, 25 bp, Homo sapien
cagctttttgggcaagcagcgtatt

SEQ ID NO: 2280723 - DNA, 25 bp, Homo sapien
tagatgactctaccactggcttttc

SEQ ID NO: 2280724 - DNA, 25 bp, Homo sapien
tatttagatgactctaccactggct

SEQ ID NO: 2280725 - DNA, 25 bp, Homo sapien
caagcagcgtatttagatgactcta

SEQ ID NO: 2280726 - DNA, 25 bp, Homo sapien
aactgagcaaggctggcttctaatg

SEQ ID NO: 2280727 - DNA, 25 bp, Homo sapien
caaggctggcttctaatgagacaca

SEQ ID NO: 2280728 - DNA, 25 bp, Homo sapien
tgactcaatgtctaatttcttatgc

SEQ ID NO: 2280729 - DNA, 25 bp, Homo sapien
gagacacagaacgtttgactcaatg

SEQ ID NO: 2280730 - DNA, 25 bp, Homo sapien
tgtccatttccaaatgcgatgggat

SEQ ID NO: 2280731 - DNA, 25 bp, Homo sapien
cttctaaggccaatccaatggtcag

SEQ ID NO: 2280732 - DNA, 25 bp, Homo sapien
ctcttctaaggccaatccaatggtc

SEQ ID NO: 2280733 - DNA, 25 bp, Homo sapien
ttccaaatgcgatgggatgattctc

SEQ ID NO: 2280734 - DNA, 25 bp, Homo sapien
aaacacagcaaaagatgagaagtct

SEQ ID NO: 2280735 - DNA, 25 bp, Homo sapien
gcagtaagttttccatgatactaca

SEQ ID NO: 2280736 - DNA, 25 bp, Homo sapien
tcttacctcatattgcagtaagttt

SEQ ID NO: 2280737 - DNA, 25 bp, Homo sapien
attgcagtaagttttccatgatact

SEQ ID NO: 2280738 - DNA, 25 bp, Homo sapien
taagttttccatgatactacatttc

SEQ ID NO: 2280739 - DNA, 25 bp, Homo sapien
ggtggtcttcagtcaagatgatttc

SEQ ID NO: 2280740 - DNA, 25 bp, Homo sapien
cattggtggtcttcagtcaagatga

SEQ ID NO: 2280741 - DNA, 25 bp, Homo sapien
tgccattggtggtcttcagtcaaga

SEQ ID NO: 2280742 - DNA, 25 bp, Homo sapien
ctgctgccattggtggtcttcagtc

SEQ ID NO: 2280743 - DNA, 25 bp, Homo sapien
ctgttcatgtagattctgccactgt

SEQ ID NO: 2280744 - DNA, 25 bp, Homo sapien
catgtagattctgccactgttgact

SEQ ID NO: 2280745 - DNA, 25 bp, Homo sapien
ctgtagacataattgtttggcttgc

SEQ ID NO: 2280746 - DNA, 25 bp, Homo sapien
aattgtttggcttgctacaaatcca

SEQ ID NO: 2280747 - DNA, 25 bp, Homo sapien
tacttgcagtttttccaggggcatg

SEQ ID NO: 2280748 - DNA, 25 bp, Homo sapien
tgctgctgattccaccattctggag

SEQ ID NO: 2280749 - DNA, 25 bp, Homo sapien
cacagctctactaggtagtatccca

SEQ ID NO: 2280750 - DNA, 25 bp, Homo sapien
gcaggtctgttacttgcagtttttc

SEQ ID NO: 2280751 - DNA, 25 bp, Homo sapien
ccaggactagacagttctcaggaag

SEQ ID NO: 2280752 - DNA, 25 bp, Homo sapien
taaggctcagtttccctaagcagtc

SEQ ID NO: 2280753 - DNA, 25 bp, Homo sapien
tattacaggtatctcagcatgtcag

SEQ ID NO: 2280754 - DNA, 25 bp, Homo sapien
tctagagaaacctgccaaagatgtc

SEQ ID NO: 2280755 - DNA, 25 bp, Homo sapien
ccctggcctctatgcacattctgaa

SEQ ID NO: 2280756 - DNA, 25 bp, Homo sapien
tggtatctaatgtccctagctggtc

SEQ ID NO: 2280757 - DNA, 25 bp, Homo sapien
aggatctagttcagtccacaggcag

SEQ ID NO: 2280758 - DNA, 25 bp, Homo sapien
tccctagtcaggatcgaggcaagag

SEQ ID NO: 2280759 - DNA, 25 bp, Homo sapien
tagaacctcttgaggctaggaaacc

SEQ ID NO: 2280760 - DNA, 25 bp, Homo sapien
aatgttagaagtcactgagcaggcc

SEQ ID NO: 2280761 - DNA, 25 bp, Homo sapien
caagcccgcttaaatatgactggaa

SEQ ID NO: 2280762 - DNA, 25 bp, Homo sapien
aaggactggctcaaacatgctggca

SEQ ID NO: 2280763 - DNA, 25 bp, Homo sapien
gatccctgattagctgacacaagtg

SEQ ID NO: 2280764 - DNA, 25 bp, Homo sapien
tgtgagacatacagttgtttacaag

SEQ ID NO: 2280765 - DNA, 25 bp, Homo sapien
tacttaatttttcacccattgtgag

SEQ ID NO: 2280766 - DNA, 25 bp, Homo sapien
tacaggcttttgtgtaaatataagt

SEQ ID NO: 2280767 - DNA, 25 bp, Homo sapien
tgtttacaagttttgactattatga

SEQ ID NO: 2280768 - DNA, 25 bp, Homo sapien
tggaacgttggccagaaactcttct

SEQ ID NO: 2280769 - DNA, 25 bp, Homo sapien
cagtgcctgcgtttaaatattctga

SEQ ID NO: 2280770 - DNA, 25 bp, Homo sapien
tctgaatatcgacgtttcctcaaga

SEQ ID NO: 2280771 - DNA, 25 bp, Homo sapien
tcatttccctcaagtgtggaacgtt

SEQ ID NO: 2280772 - DNA, 25 bp, Homo sapien
tcacatagtagaaggaacaaggcag

SEQ ID NO: 2280773 - DNA, 25 bp, Homo sapien
tgatggtaacttctagatgtgtcct

SEQ ID NO: 2280774 - DNA, 25 bp, Homo sapien
ttgatggtaacttctagatgtgtcc

SEQ ID NO: 2280775 - DNA, 25 bp, Homo sapien
ctcacatagtagaaggaacaaggca

SEQ ID NO: 2280776 - DNA, 25 bp, Homo sapien
tatgtgccctactcatgtcctgcaa

SEQ ID NO: 2280777 - DNA, 25 bp, Homo sapien
caaaaatgggcttgaacggtgtgca

SEQ ID NO: 2280778 - DNA, 25 bp, Homo sapien
gaagttgcattaggactgagttcca

SEQ ID NO: 2280779 - DNA, 25 bp, Homo sapien
ccagattggacagctattgccttta

SEQ ID NO: 2280780 - DNA, 25 bp, Homo sapien
agtttctatgagtgatctaaaccac

SEQ ID NO: 2280781 - DNA, 25 bp, Homo sapien
ccaacgactaaaacgtgtaagtgtg

SEQ ID NO: 2280782 - DNA, 25 bp, Homo sapien
taaaccacagtctctacgttttcaa

SEQ ID NO: 2280783 - DNA, 25 bp, Homo sapien
ttcaaccccaagaatgattcaaaac

SEQ ID NO: 2280784 - DNA, 25 bp, Homo sapien
caattcagatggtgtaatgtctttc

SEQ ID NO: 2280785 - DNA, 25 bp, Homo sapien
ggcaattcagatggtgtaatgtctt

SEQ ID NO: 2280786 - DNA, 25 bp, Homo sapien
ttgcaggcaattcagatggtgtaat

SEQ ID NO: 2280787 - DNA, 25 bp, Homo sapien
caggcaattcagatggtgtaatgtc

SEQ ID NO: 2280788 - DNA, 25 bp, Homo sapien
cccctggttgatgcacatgtctgaa

SEQ ID NO: 2280789 - DNA, 25 bp, Homo sapien
ccagggtgattgcttgctaaaacaa

SEQ ID NO: 2280790 - DNA, 25 bp, Homo sapien
gagtagagcattgcacagttcccaa

SEQ ID NO: 2280791 - DNA, 25 bp, Homo sapien
ggaactgacattggaaccagatccc

SEQ ID NO: 2280792 - DNA, 25 bp, Homo sapien
tacgtgaggcaaaaattaacagaac

SEQ ID NO: 2280793 - DNA, 25 bp, Homo sapien
taaatgtgcacgcacctaacaagag

SEQ ID NO: 2280794 - DNA, 25 bp, Homo sapien
ccagcagggtatattggctcatgac

SEQ ID NO: 2280795 - DNA, 25 bp, Homo sapien
tggaaatgcacagatccagcagggt

SEQ ID NO: 2280796 - DNA, 25 bp, Homo sapien
ctgggtgttgtagcttacacttata

SEQ ID NO: 2280797 - DNA, 25 bp, Homo sapien
ctcagggctcaggtaggagaatcac

SEQ ID NO: 2280798 - DNA, 25 bp, Homo sapien
tatgttagttgtgagtgtatattgc

SEQ ID NO: 2280799 - DNA, 25 bp, Homo sapien
cactagggtaaccactaaaatcaca

SEQ ID NO: 2280800 - DNA, 25 bp, Homo sapien
cagacataatactgccagaaacatt

SEQ ID NO: 2280801 - DNA, 25 bp, Homo sapien
tactgccagaaacattaagcatcaa

SEQ ID NO: 2280802 - DNA, 25 bp, Homo sapien
cataatactgccagaaacattaagc

SEQ ID NO: 2280803 - DNA, 25 bp, Homo sapien
aaatacagacataatactgccagaa

SEQ ID NO: 2280804 - DNA, 25 bp, Homo sapien
aaataagcgccaaattaaggtagct

SEQ ID NO: 2280805 - DNA, 25 bp, Homo sapien
taaagcagcaaccattccacacact

SEQ ID NO: 2280806 - DNA, 25 bp, Homo sapien
tagctttaatagaatgctcttttga

SEQ ID NO: 2280807 - DNA, 25 bp, Homo sapien
cactatgattgtcagaaacatgatt

SEQ ID NO: 2280808 - DNA, 25 bp, Homo sapien
tgaataaagattacagttcacttac

SEQ ID NO: 2280809 - DNA, 25 bp, Homo sapien
cagctattggctccacacaagaaat

SEQ ID NO: 2280810 - DNA, 25 bp, Homo sapien
gatgaaagtctggttcaatatatgt

SEQ ID NO: 2280811 - DNA, 25 bp, Homo sapien
ccattgtctcatccccttaaaactt

SEQ ID NO: 2280812 - DNA, 25 bp, Homo sapien
aactcatagcgaatatcatactgag

SEQ ID NO: 2280813 - DNA, 25 bp, Homo sapien
gaaagtgtattcaacaggaagagag

SEQ ID NO: 2280814 - DNA, 25 bp, Homo sapien
cctaggccatggatcagtactggtc

SEQ ID NO: 2280815 - DNA, 25 bp, Homo sapien
gattcaaactcatgccttcagcagg

SEQ ID NO: 2280816 - DNA, 25 bp, Homo sapien
taacttaagcttgctctgggccatg

SEQ ID NO: 2280817 - DNA, 25 bp, Homo sapien
catttgatcagctttggagaacaga

SEQ ID NO: 2280818 - DNA, 25 bp, Homo sapien
ccaatccagctttctgggcatgcag

SEQ ID NO: 2280819 - DNA, 25 bp, Homo sapien
ctgggcatgcagcttgaagacatac

SEQ ID NO: 2280820 - DNA, 25 bp, Homo sapien
gaagacatactgatggctcttgatg

SEQ ID NO: 2280821 - DNA, 25 bp, Homo sapien
tttgaaaaccaatccagctttctgg

SEQ ID NO: 2280822 - DNA, 25 bp, Homo sapien
caagatcagcatcttgtgagtcaca

SEQ ID NO: 2280823 - DNA, 25 bp, Homo sapien
cagttcctggaagctttcaacctga

SEQ ID NO: 2280824 - DNA, 25 bp, Homo sapien
tctgacttgatgtccagttcttggt

SEQ ID NO: 2280825 - DNA, 25 bp, Homo sapien
gttcttggtgtcatcagaaaaatag

SEQ ID NO: 2280826 - DNA, 25 bp, Homo sapien
aaaacatatccttgtagggctgaat

SEQ ID NO: 2280827 - DNA, 25 bp, Homo sapien
aaacatatccttgtagggctgaatc

SEQ ID NO: 2280828 - DNA, 25 bp, Homo sapien
tcaatgtaaaagcagatgtctaaac

SEQ ID NO: 2280829 - DNA, 25 bp, Homo sapien
caatgtaaaagcagatgtctaaacc

SEQ ID NO: 2280830 - DNA, 25 bp, Homo sapien
taggttactctttcgttatgcaaaa

SEQ ID NO: 2280831 - DNA, 25 bp, Homo sapien
tacatgctaggttactctttcgtta

SEQ ID NO: 2280832 - DNA, 25 bp, Homo sapien
gatgaggactgatgcaatgatagcc

SEQ ID NO: 2280833 - DNA, 25 bp, Homo sapien
ggaagccacttcagctgatgaggac

SEQ ID NO: 2280834 - DNA, 25 bp, Homo sapien
aaaggtgcttattgttcaccctggc

SEQ ID NO: 2280835 - DNA, 25 bp, Homo sapien
ccctgacatttggacaaaaaggtgc

SEQ ID NO: 2280836 - DNA, 25 bp, Homo sapien
gacaaaaatatagccactcggcact

SEQ ID NO: 2280837 - DNA, 25 bp, Homo sapien
ggaggctctgaattgctgtctagtg

SEQ ID NO: 2280838 - DNA, 25 bp, Homo sapien
tgttcagtgtataccataaacgtgc

SEQ ID NO: 2280839 - DNA, 25 bp, Homo sapien
ttgaccaatggctgttgaagagcgg

SEQ ID NO: 2280840 - DNA, 25 bp, Homo sapien
tccagtgatcagatgggcctttata

SEQ ID NO: 2280841 - DNA, 25 bp, Homo sapien
cagtgatcagatgggcctttatatc

SEQ ID NO: 2280842 - DNA, 25 bp, Homo sapien
tttatccatttccatggttggcctt

SEQ ID NO: 2280843 - DNA, 25 bp, Homo sapien
tccatttccatggttggccttgttc

SEQ ID NO: 2280844 - DNA, 25 bp, Homo sapien
atacaaatattactgccagattttt

SEQ ID NO: 2280845 - DNA, 25 bp, Homo sapien
tacaaatattactgccagattttta

SEQ ID NO: 2280846 - DNA, 25 bp, Homo sapien
gtcttggattcattcgaggaacttg

SEQ ID NO: 2280847 - DNA, 25 bp, Homo sapien
gaaacctttgcaacatacaagttgg

SEQ ID NO: 2280848 - DNA, 25 bp, Homo sapien
gattcattcgaggaacttgtgaaac

SEQ ID NO: 2280849 - DNA, 25 bp, Homo sapien
tgcaacatacaagttggcaccatct

SEQ ID NO: 2280850 - DNA, 25 bp, Homo sapien
tatttatgaagcagtcacaatgtgc

SEQ ID NO: 2280851 - DNA, 25 bp, Homo sapien
ggagccaagttcacagtcagtctac

SEQ ID NO: 2280852 - DNA, 25 bp, Homo sapien
tgtgcaaggcagtgtagatacaaca

SEQ ID NO: 2280853 - DNA, 25 bp, Homo sapien
caaacctgccaatgtccagtctggg

SEQ ID NO: 2280854 - DNA, 25 bp, Homo sapien
acatagtgagaccccatcgctgaaa

SEQ ID NO: 2280855 - DNA, 25 bp, Homo sapien
aaaaaagccaagcaaggtggcacac

SEQ ID NO: 2280856 - DNA, 25 bp, Homo sapien
aaaaaaagccaagcaaggtggcaca

SEQ ID NO: 2280857 - DNA, 25 bp, Homo sapien
tagtgagaccccatcgctgaaaaaa

SEQ ID NO: 2280858 - DNA, 25 bp, Homo sapien
ttagtcagtgggctttgcttagcag

SEQ ID NO: 2280859 - DNA, 25 bp, Homo sapien
caactataggaatactgcaaagtcc

SEQ ID NO: 2280860 - DNA, 25 bp, Homo sapien
gaagaagcagaatcagttggccact

SEQ ID NO: 2280861 - DNA, 25 bp, Homo sapien
gcttagcaggagatgttataaatca

SEQ ID NO: 2280862 - DNA, 25 bp, Homo sapien
cattcaaataggcacactctcctgc

SEQ ID NO: 2280863 - DNA, 25 bp, Homo sapien
attcaaataggcacactctcctgct

SEQ ID NO: 2280864 - DNA, 25 bp, Homo sapien
gtgcctggcactactggcacctttg

SEQ ID NO: 2280865 - DNA, 25 bp, Homo sapien
ttcctctctgtgtagtgcctggcac

SEQ ID NO: 2280866 - DNA, 25 bp, Homo sapien
tgtagtgcctggcactactggcacc

SEQ ID NO: 2280867 - DNA, 25 bp, Homo sapien
tagtgcctggcactactggcacctt

SEQ ID NO: 2280868 - DNA, 25 bp, Homo sapien
tgtatatctgatttggaacaaatcc

SEQ ID NO: 2280869 - DNA, 25 bp, Homo sapien
gagaacaggtaatattagcaccatg

SEQ ID NO: 2280870 - DNA, 25 bp, Homo sapien
gtatgtcattagcagtgggagaaca

SEQ ID NO: 2280871 - DNA, 25 bp, Homo sapien
ggagttatcagttccaatatgcttc

SEQ ID NO: 2280872 - DNA, 25 bp, Homo sapien
tttcccagttattagtgatattgag

SEQ ID NO: 2280873 - DNA, 25 bp, Homo sapien
taggagttcctgtgcacaagtcccc

SEQ ID NO: 2280874 - DNA, 25 bp, Homo sapien
caaggcagacgaagataaatgaatg

SEQ ID NO: 2280875 - DNA, 25 bp, Homo sapien
cacacttaggtaggagacaaggcag

SEQ ID NO: 2280876 - DNA, 25 bp, Homo sapien
tctgtcatgattgcaagacctcccc

SEQ ID NO: 2280877 - DNA, 25 bp, Homo sapien
tagttcacaactgaaaagatagttc

SEQ ID NO: 2280878 - DNA, 25 bp, Homo sapien
gggggctcatgtccatgtccatcga

SEQ ID NO: 2280879 - DNA, 25 bp, Homo sapien
tttgtcggcctttagttcacaactg

SEQ ID NO: 2280880 - DNA, 25 bp, Homo sapien
ctcatgtccatgtccatcgaatctt

SEQ ID NO: 2280881 - DNA, 25 bp, Homo sapien
aattggactgccttcgtcattcatg

SEQ ID NO: 2280882 - DNA, 25 bp, Homo sapien
cccaagagaaaccgttggctgtaca

SEQ ID NO: 2280883 - DNA, 25 bp, Homo sapien
aagagaaaccgttggctgtacagac

SEQ ID NO: 2280884 - DNA, 25 bp, Homo sapien
ttggactgccttcgtcattcatggc

SEQ ID NO: 2280885 - DNA, 25 bp, Homo sapien
caccttccttcacagctactaagtg

SEQ ID NO: 2280886 - DNA, 25 bp, Homo sapien
ctctgcaccttccttcacagctact

SEQ ID NO: 2280887 - DNA, 25 bp, Homo sapien
gaaccacacttcaaccttaagtcca

SEQ ID NO: 2280888 - DNA, 25 bp, Homo sapien
ctgactctgcaccttccttcacagc

SEQ ID NO: 2280889 - DNA, 25 bp, Homo sapien
catcagcagcagcagcaagttttac

SEQ ID NO: 2280890 - DNA, 25 bp, Homo sapien
tcatcatcatcatcagcagcagcag

SEQ ID NO: 2280891 - DNA, 25 bp, Homo sapien
catcatcagcagcagcagcaagttt

SEQ ID NO: 2280892 - DNA, 25 bp, Homo sapien
catcatcatcatcagcagcagcagc

SEQ ID NO: 2280893 - DNA, 25 bp, Homo sapien
ttggctggagtatctcgtatagatt

SEQ ID NO: 2280894 - DNA, 25 bp, Homo sapien
catttttggctggagtatctcgtat

SEQ ID NO: 2280895 - DNA, 25 bp, Homo sapien
gcatttttggctggagtatctcgta

SEQ ID NO: 2280896 - DNA, 25 bp, Homo sapien
tttttggctggagtatctcgtatag

SEQ ID NO: 2280897 - DNA, 25 bp, Homo sapien
tcttggtcagtcatccagaagaaat

SEQ ID NO: 2280898 - DNA, 25 bp, Homo sapien
cctcttggtcagtcatccagaagaa

SEQ ID NO: 2280899 - DNA, 25 bp, Homo sapien
ttggtcagtcatccagaagaaattc

SEQ ID NO: 2280900 - DNA, 25 bp, Homo sapien
gcctcttggtcagtcatccagaaga

SEQ ID NO: 2280901 - DNA, 25 bp, Homo sapien
taatggctgcaccaaactgtgttcc

SEQ ID NO: 2280902 - DNA, 25 bp, Homo sapien
gccaggtggagacaattgctttatg

SEQ ID NO: 2280903 - DNA, 25 bp, Homo sapien
ggcttgttcccaacataacaggatt

SEQ ID NO: 2280904 - DNA, 25 bp, Homo sapien
tcaaataacagtgctgagaccagct

SEQ ID NO: 2280905 - DNA, 25 bp, Homo sapien
tgttccccacatgtcacagggtagt

SEQ ID NO: 2280906 - DNA, 25 bp, Homo sapien
gatatctagacatactcaccctttg

SEQ ID NO: 2280907 - DNA, 25 bp, Homo sapien
tattgcccagaccaacgttgtgaag

SEQ ID NO: 2280908 - DNA, 25 bp, Homo sapien
catcaagttttcagtacacagtgca

SEQ ID NO: 2280909 - DNA, 25 bp, Homo sapien
ttaatgaaaacccatggaaggcacc

SEQ ID NO: 2280910 - DNA, 25 bp, Homo sapien
agtgatcaccccaccaagcaatggg

SEQ ID NO: 2280911 - DNA, 25 bp, Homo sapien
gacaaagtctactgggcttgcagag

SEQ ID NO: 2280912 - DNA, 25 bp, Homo sapien
tatccaggtgggttaagagacttca

SEQ ID NO: 2280913 - DNA, 25 bp, Homo sapien
taatgtactagctgatcccagggat

SEQ ID NO: 2280914 - DNA, 25 bp, Homo sapien
tgtattataaaagaccaaggtagcc

SEQ ID NO: 2280915 - DNA, 25 bp, Homo sapien
gaaatgaaaccttgcacaggagcaa

SEQ ID NO: 2280916 - DNA, 25 bp, Homo sapien
taaactttaccagagagataactgt

SEQ ID NO: 2280917 - DNA, 25 bp, Homo sapien
tctgtcagtcagtggcctaccagca

SEQ ID NO: 2280918 - DNA, 25 bp, Homo sapien
tctcaatgtccagccacctatgtgt

SEQ ID NO: 2280919 - DNA, 25 bp, Homo sapien
ctccctgtgtgttcctccgctgatg

SEQ ID NO: 2280920 - DNA, 25 bp, Homo sapien
gccaaactctgcattgttctgtcag

SEQ ID NO: 2280921 - DNA, 25 bp, Homo sapien
tatgctagggctgtttcaataaagt

SEQ ID NO: 2280922 - DNA, 25 bp, Homo sapien
ccaagacactcttgagaacaaggag

SEQ ID NO: 2280923 - DNA, 25 bp, Homo sapien
cacagactaggtagctaaagcaaca

SEQ ID NO: 2280924 - DNA, 25 bp, Homo sapien
tcccactgtcctacacaagatgaag

SEQ ID NO: 2280925 - DNA, 25 bp, Homo sapien
gatttaacatttagaggtgacagca

SEQ ID NO: 2280926 - DNA, 25 bp, Homo sapien
cctgccaaagactggaaggtgcata

SEQ ID NO: 2280927 - DNA, 25 bp, Homo sapien
tcatatctcatggtgattcaagaca

SEQ ID NO: 2280928 - DNA, 25 bp, Homo sapien
ttcaaatgtaccctggaacaaagca

SEQ ID NO: 2280929 - DNA, 25 bp, Homo sapien
caatgactgttgatcttaagaagct

SEQ ID NO: 2280930 - DNA, 25 bp, Homo sapien
tcagcactatagtcgaataaactgg

SEQ ID NO: 2280931 - DNA, 25 bp, Homo sapien
caacctgaagaagctttgtattaca

SEQ ID NO: 2280932 - DNA, 25 bp, Homo sapien
catcccagatacataggagtttgag

SEQ ID NO: 2280933 - DNA, 25 bp, Homo sapien
catcatggacagaatgacaagtcgt

SEQ ID NO: 2280934 - DNA, 25 bp, Homo sapien
tataattgataaaggaatctgtctc

SEQ ID NO: 2280935 - DNA, 25 bp, Homo sapien
gaagacattctaacacgtataattg

SEQ ID NO: 2280936 - DNA, 25 bp, Homo sapien
gtcgtcacagagtggaagacattct

SEQ ID NO: 2280937 - DNA, 25 bp, Homo sapien
caaaagttgcagtgccatctagtgg

SEQ ID NO: 2280938 - DNA, 25 bp, Homo sapien
cacgcgcgggctgactagctatttt

SEQ ID NO: 2280939 - DNA, 25 bp, Homo sapien
tctggctccctagtacaccataggc

SEQ ID NO: 2280940 - DNA, 25 bp, Homo sapien
taaagccgcgtttctacacgacatg

SEQ ID NO: 2280941 - DNA, 25 bp, Homo sapien
catgtgtcagctaggacagtgccaa

SEQ ID NO: 2280942 - DNA, 25 bp, Homo sapien
gaggccactgacaaccatgtgcttg

SEQ ID NO: 2280943 - DNA, 25 bp, Homo sapien
catgtgcttggtacgttggctactt

SEQ ID NO: 2280944 - DNA, 25 bp, Homo sapien
tcagggctaaccacaataagtttgc

SEQ ID NO: 2280945 - DNA, 25 bp, Homo sapien
tcagaagggatgtggactgacactg

SEQ ID NO: 2280946 - DNA, 25 bp, Homo sapien
ttcgtcctcacagtattccagtggt

SEQ ID NO: 2280947 - DNA, 25 bp, Homo sapien
aaagccaatgcgttcgtcctcacag

SEQ ID NO: 2280948 - DNA, 25 bp, Homo sapien
caatcatgtggttcttcctaaaacc

SEQ ID NO: 2280949 - DNA, 25 bp, Homo sapien
gttcggagtactgtaaaggtctatc

SEQ ID NO: 2280950 - DNA, 25 bp, Homo sapien
ttgctcccttgatgacctgtctgga

SEQ ID NO: 2280951 - DNA, 25 bp, Homo sapien
tgcggtcaattttagattatgtggc

SEQ ID NO: 2280952 - DNA, 25 bp, Homo sapien
ttaagactctttgtagctaagaact

SEQ ID NO: 2280953 - DNA, 25 bp, Homo sapien
gtgtgtatacaggtatgttttgttt

SEQ ID NO: 2280954 - DNA, 25 bp, Homo sapien
tgtgtatacaggtatgttttgtttt

SEQ ID NO: 2280955 - DNA, 25 bp, Homo sapien
ctttgactgtacattcaatgtcatg

SEQ ID NO: 2280956 - DNA, 25 bp, Homo sapien
gactgtacattcaatgtcatgtatc

SEQ ID NO: 2280957 - DNA, 25 bp, Homo sapien
ttctttgactgtacattcaatgtca

SEQ ID NO: 2280958 - DNA, 25 bp, Homo sapien
cttttctttgactgtacattcaatg

SEQ ID NO: 2280959 - DNA, 25 bp, Homo sapien
gatcaaggagatcaaagtcaaagtg

SEQ ID NO: 2280960 - DNA, 25 bp, Homo sapien
tcacggttccagatattcccagtaa

SEQ ID NO: 2280961 - DNA, 25 bp, Homo sapien
tcaaagtgagaataccattcacggt

SEQ ID NO: 2280962 - DNA, 25 bp, Homo sapien
gattttataccagtgcaacgtcact

SEQ ID NO: 2280963 - DNA, 25 bp, Homo sapien
gcattttagcaatactccctgagaa

SEQ ID NO: 2280964 - DNA, 25 bp, Homo sapien
gcacaaaggtccttattacttatat

SEQ ID NO: 2280965 - DNA, 25 bp, Homo sapien
ctggtctgcagatctcgaagcacaa

SEQ ID NO: 2280966 - DNA, 25 bp, Homo sapien
gtgtcctcatactgagtggcatttg

SEQ ID NO: 2280967 - DNA, 25 bp, Homo sapien
tgaattgttttagcagtagatatca

SEQ ID NO: 2280968 - DNA, 25 bp, Homo sapien
ttagcagacaacatgtaactgagtt

SEQ ID NO: 2280969 - DNA, 25 bp, Homo sapien
gcagacaacatgtaactgagtttgt

SEQ ID NO: 2280970 - DNA, 25 bp, Homo sapien
aaatccagagcacctatggactctt

SEQ ID NO: 2280971 - DNA, 25 bp, Homo sapien
atgttgtataaataagagttgagct

SEQ ID NO: 2280972 - DNA, 25 bp, Homo sapien
taaaatcacttatagcaaattgtcc

SEQ ID NO: 2280973 - DNA, 25 bp, Homo sapien
ataagagttgagctacaataaaatc

SEQ ID NO: 2280974 - DNA, 25 bp, Homo sapien
ataaaatcacttatagcaaattgtc

SEQ ID NO: 2280975 - DNA, 25 bp, Homo sapien
caagttggtcatgtatgattagtag

SEQ ID NO: 2280976 - DNA, 25 bp, Homo sapien
tttccaaacaatacacataactgtc

SEQ ID NO: 2280977 - DNA, 25 bp, Homo sapien
aatacacataactgtcactccagct

SEQ ID NO: 2280978 - DNA, 25 bp, Homo sapien
ttagagaaccaataacaacacttcc

SEQ ID NO: 2280979 - DNA, 25 bp, Homo sapien
ttaagcccaatccatacgtagttta

SEQ ID NO: 2280980 - DNA, 25 bp, Homo sapien
gcccaatccatacgtagtttaattg

SEQ ID NO: 2280981 - DNA, 25 bp, Homo sapien
caatccatacgtagtttaattgtct

SEQ ID NO: 2280982 - DNA, 25 bp, Homo sapien
catacgtagtttaattgtcttaggt

SEQ ID NO: 2280983 - DNA, 25 bp, Homo sapien
gaatctattggagaaccatccaccc

SEQ ID NO: 2280984 - DNA, 25 bp, Homo sapien
aatctattggagaaccatccaccca

SEQ ID NO: 2280985 - DNA, 25 bp, Homo sapien
tgctttccttaatggcagcacagct

SEQ ID NO: 2280986 - DNA, 25 bp, Homo sapien
tactgacaaatccatttgaaaacac

SEQ ID NO: 2280987 - DNA, 25 bp, Homo sapien
taagcgacgaataaaaatcctggat

SEQ ID NO: 2280988 - DNA, 25 bp, Homo sapien
ctgaggctagaccagtgtcgatgat

SEQ ID NO: 2280989 - DNA, 25 bp, Homo sapien
ctaataggccaaaaatagtgatcat

SEQ ID NO: 2280990 - DNA, 25 bp, Homo sapien
tatgatcacatgaagtcacattggt

SEQ ID NO: 2280991 - DNA, 25 bp, Homo sapien
tttctgtcatttggtggtattgaga

SEQ ID NO: 2280992 - DNA, 25 bp, Homo sapien
caccaaagtgttataatggtctcca

SEQ ID NO: 2280993 - DNA, 25 bp, Homo sapien
gagagatttcttccaaggttatatg

SEQ ID NO: 2280994 - DNA, 25 bp, Homo sapien
taagacaccaaagtgttataatggt

SEQ ID NO: 2280995 - DNA, 25 bp, Homo sapien
gatgatagatatgatccagatactc

SEQ ID NO: 2280996 - DNA, 25 bp, Homo sapien
caatggagaaggattaaccatgact

SEQ ID NO: 2280997 - DNA, 25 bp, Homo sapien
gaatgttaaagccttcgagaaaaga

SEQ ID NO: 2280998 - DNA, 25 bp, Homo sapien
ccagatactcatacagttctcagaa

SEQ ID NO: 2280999 - DNA, 25 bp, Homo sapien
tctggaaggatacgtggttaagtac

SEQ ID NO: 2281000 - DNA, 25 bp, Homo sapien
taaggtgatctttcttaacacagga

SEQ ID NO: 2281001 - DNA, 25 bp, Homo sapien
aagtggtatacctctagtttggagc

SEQ ID NO: 2281002 - DNA, 25 bp, Homo sapien
gcaatttcgtgttctgtggttcaga

SEQ ID NO: 2281003 - DNA, 25 bp, Homo sapien
gccagacccctcagttctacccaag

SEQ ID NO: 2281004 - DNA, 25 bp, Homo sapien
cagacccctcagttctacccaaggg

SEQ ID NO: 2281005 - DNA, 25 bp, Homo sapien
ctgggcgccagacccctcagttcta

SEQ ID NO: 2281006 - DNA, 25 bp, Homo sapien
ccctcagttctacccaagggccatc

SEQ ID NO: 2281007 - DNA, 25 bp, Homo sapien
cactgtataaaaggtagcaacttta

SEQ ID NO: 2281008 - DNA, 25 bp, Homo sapien
aaatcggttcacaaaactgaccttg

SEQ ID NO: 2281009 - DNA, 25 bp, Homo sapien
aactgaccttgaagagaggaaatca

SEQ ID NO: 2281010 - DNA, 25 bp, Homo sapien
actgcctagcctcctcactgtataa

SEQ ID NO: 2281011 - DNA, 25 bp, Homo sapien
tattgccgttgatatcagaaagcct

SEQ ID NO: 2281012 - DNA, 25 bp, Homo sapien
gattccgctgtagcatctcccaata

SEQ ID NO: 2281013 - DNA, 25 bp, Homo sapien
gtcaacagtgaacagttgccacagc

SEQ ID NO: 2281014 - DNA, 25 bp, Homo sapien
tgccacagcaggtcgtcaccaggtt

SEQ ID NO: 2281015 - DNA, 25 bp, Homo sapien
ttactaatcattccctctggcttat

SEQ ID NO: 2281016 - DNA, 25 bp, Homo sapien
gattactaatcattccctctggctt

SEQ ID NO: 2281017 - DNA, 25 bp, Homo sapien
gaaaactctgattactaatcattcc

SEQ ID NO: 2281018 - DNA, 25 bp, Homo sapien
tctgattactaatcattccctctgg

SEQ ID NO: 2281019 - DNA, 25 bp, Homo sapien
tgcttcgatttacaacgattcttga

SEQ ID NO: 2281020 - DNA, 25 bp, Homo sapien
tttacaacgattcttgaaactcagc

SEQ ID NO: 2281021 - DNA, 25 bp, Homo sapien
gaaactcagcgtcatatacccatct

SEQ ID NO: 2281022 - DNA, 25 bp, Homo sapien
tttagatttctgcttcgatttacaa

SEQ ID NO: 2281023 - DNA, 25 bp, Homo sapien
gtaggtaactcagatttaagtccca

SEQ ID NO: 2281024 - DNA, 25 bp, Homo sapien
tgtccaaaagagttattgtaggtaa

SEQ ID NO: 2281025 - DNA, 25 bp, Homo sapien
ttattgtaggtaactcagatttaag

SEQ ID NO: 2281026 - DNA, 25 bp, Homo sapien
caaaagagttattgtaggtaactca

SEQ ID NO: 2281027 - DNA, 25 bp, Homo sapien
tactgatgcattgggtacttattct

SEQ ID NO: 2281028 - DNA, 25 bp, Homo sapien
tattactgatgcattgggtacttat

SEQ ID NO: 2281029 - DNA, 25 bp, Homo sapien
gcattgggtacttattctcctgtgc

SEQ ID NO: 2281030 - DNA, 25 bp, Homo sapien
gatgcattgggtacttattctcctg

SEQ ID NO: 2281031 - DNA, 25 bp, Homo sapien
gtaacatttcccttcgttcaacagc

SEQ ID NO: 2281032 - DNA, 25 bp, Homo sapien
tttgaatcaccagtaaatgtgcctg

SEQ ID NO: 2281033 - DNA, 25 bp, Homo sapien
tgcctgtagctgtgtacaatcacgt

SEQ ID NO: 2281034 - DNA, 25 bp, Homo sapien
caatcacgttgactctctttccacg

SEQ ID NO: 2281035 - DNA, 25 bp, Homo sapien
tccttgtgcagttagatcctgtttt

SEQ ID NO: 2281036 - DNA, 25 bp, Homo sapien
ttttccttgtgcagttagatcctgt

SEQ ID NO: 2281037 - DNA, 25 bp, Homo sapien
ttagatcctgtttttgatttctcac

SEQ ID NO: 2281038 - DNA, 25 bp, Homo sapien
tttttccttgtgcagttagatcctg

SEQ ID NO: 2281039 - DNA, 25 bp, Homo sapien
ccataggttcccttggaatgtaaca

SEQ ID NO: 2281040 - DNA, 25 bp, Homo sapien
taacatatagtccaatccaaccaaa

SEQ ID NO: 2281041 - DNA, 25 bp, Homo sapien
tcccttggaatgtaacatatagtcc

SEQ ID NO: 2281042 - DNA, 25 bp, Homo sapien
cacatccataggttcccttggaatg

SEQ ID NO: 2281043 - DNA, 25 bp, Homo sapien
tggttccattgtgcgtcaagatcgc

SEQ ID NO: 2281044 - DNA, 25 bp, Homo sapien
caagatcgcatctctctggcaaatg

SEQ ID NO: 2281045 - DNA, 25 bp, Homo sapien
tgtgataacggcacagctcctgtca

SEQ ID NO: 2281046 - DNA, 25 bp, Homo sapien
tcctgtcatcagttggtccaatcac

SEQ ID NO: 2281047 - DNA, 25 bp, Homo sapien
aaacatatcaggctcagcgctctcc

SEQ ID NO: 2281048 - DNA, 25 bp, Homo sapien
gattgttacacttgcgtgcactgca

SEQ ID NO: 2281049 - DNA, 25 bp, Homo sapien
taaggcagaccatagctctagagat

SEQ ID NO: 2281050 - DNA, 25 bp, Homo sapien
tggagaacatgtgggacccaacact

SEQ ID NO: 2281051 - DNA, 25 bp, Homo sapien
tttgactatgtgtccacaaggctgg

SEQ ID NO: 2281052 - DNA, 25 bp, Homo sapien
tagctactaaaagacaggcacactc

SEQ ID NO: 2281053 - DNA, 25 bp, Homo sapien
aacaacgtggatcaatggctgagaa

SEQ ID NO: 2281054 - DNA, 25 bp, Homo sapien
agaagttatggatctctggccaggc

SEQ ID NO: 2281055 - DNA, 25 bp, Homo sapien
tacgggtagagatgttccctcactc

SEQ ID NO: 2281056 - DNA, 25 bp, Homo sapien
gaagaatacacccaagcggtctgca

SEQ ID NO: 2281057 - DNA, 25 bp, Homo sapien
tctggacccacaaatgacactcact

SEQ ID NO: 2281058 - DNA, 25 bp, Homo sapien
gaactggaacagtcagggtgcttcc

SEQ ID NO: 2281059 - DNA, 25 bp, Homo sapien
cacaaaaagatgagtgagttaacag

SEQ ID NO: 2281060 - DNA, 25 bp, Homo sapien
gtaccaatcacccatatgtctgcaa

SEQ ID NO: 2281061 - DNA, 25 bp, Homo sapien
gagctgaatgttaaacaggacctat

SEQ ID NO: 2281062 - DNA, 25 bp, Homo sapien
tctgtttataaacggaagcttaagc

SEQ ID NO: 2281063 - DNA, 25 bp, Homo sapien
ttttccatctcactggagttctgga

SEQ ID NO: 2281064 - DNA, 25 bp, Homo sapien
gttctggaattgaagatctgcataa

SEQ ID NO: 2281065 - DNA, 25 bp, Homo sapien
ttccatctcactggagttctggaat

SEQ ID NO: 2281066 - DNA, 25 bp, Homo sapien
gaagatctgcataagtaacttcttc

SEQ ID NO: 2281067 - DNA, 25 bp, Homo sapien
ctatggattcgctagggcagatttc

SEQ ID NO: 2281068 - DNA, 25 bp, Homo sapien
catacataataggaaaactatagga

SEQ ID NO: 2281069 - DNA, 25 bp, Homo sapien
gctagggcagatttcactcccaaaa

SEQ ID NO: 2281070 - DNA, 25 bp, Homo sapien
gaaggcaagaaccatacataatagg

SEQ ID NO: 2281071 - DNA, 25 bp, Homo sapien
gtagattctaagctcgataatgaga

SEQ ID NO: 2281072 - DNA, 25 bp, Homo sapien
gtaatattaggctcatgatatgccc

SEQ ID NO: 2281073 - DNA, 25 bp, Homo sapien
gacatggattcaatatttccgtgaa

SEQ ID NO: 2281074 - DNA, 25 bp, Homo sapien
aatgctcatcataaatggatccaag

SEQ ID NO: 2281075 - DNA, 25 bp, Homo sapien
gcttgccaagactcccaatccaatg

SEQ ID NO: 2281076 - DNA, 25 bp, Homo sapien
acgccatacatgagagggagctgga

SEQ ID NO: 2281077 - DNA, 25 bp, Homo sapien
tgagcaacagaaggcacagaagagt

SEQ ID NO: 2281078 - DNA, 25 bp, Homo sapien
aacaaggctgctggacgccatacat

SEQ ID NO: 2281079 - DNA, 25 bp, Homo sapien
ctcttgacaaaaacaggggcagtac

SEQ ID NO: 2281080 - DNA, 25 bp, Homo sapien
tcttgacaaaaacaggggcagtaca

SEQ ID NO: 2281081 - DNA, 25 bp, Homo sapien
ttgacaaaaacaggggcagtacata

SEQ ID NO: 2281082 - DNA, 25 bp, Homo sapien
tcctcttgacaaaaacaggggcagt

SEQ ID NO: 2281083 - DNA, 25 bp, Homo sapien
gggaaagcaattactctacaggagt

SEQ ID NO: 2281084 - DNA, 25 bp, Homo sapien
ccttgtgggcctatcacctatcatt

SEQ ID NO: 2281085 - DNA, 25 bp, Homo sapien
tatcatttgcagaagtagtataaag

SEQ ID NO: 2281086 - DNA, 25 bp, Homo sapien
agttccacattgtaagtcctccttg

SEQ ID NO: 2281087 - DNA, 25 bp, Homo sapien
gctcacgacataatttggtggctat

SEQ ID NO: 2281088 - DNA, 25 bp, Homo sapien
cctgatcttgttggagatattcatg

SEQ ID NO: 2281089 - DNA, 25 bp, Homo sapien
tggagaggttcctgatcttgttgga

SEQ ID NO: 2281090 - DNA, 25 bp, Homo sapien
tgttctttgctatatagctcacgac

SEQ ID NO: 2281091 - DNA, 25 bp, Homo sapien
aataactccaagagaatacaagatt

SEQ ID NO: 2281092 - DNA, 25 bp, Homo sapien
taactccaagagaatacaagattac

SEQ ID NO: 2281093 - DNA, 25 bp, Homo sapien
aggctgctagctaattataaaatga

SEQ ID NO: 2281094 - DNA, 25 bp, Homo sapien
aattatgactccctagagaaaggct

SEQ ID NO: 2281095 - DNA, 25 bp, Homo sapien
tactctcctgccatgtttggacatc

SEQ ID NO: 2281096 - DNA, 25 bp, Homo sapien
taggaaataacagctgtccttatgc

SEQ ID NO: 2281097 - DNA, 25 bp, Homo sapien
ccttggacaaggcttacatttgtgc

SEQ ID NO: 2281098 - DNA, 25 bp, Homo sapien
gttgtttatcttcaacaggctggca

SEQ ID NO: 2281099 - DNA, 25 bp, Homo sapien
cagaggagttgattatattatccac

SEQ ID NO: 2281100 - DNA, 25 bp, Homo sapien
taccacgagtggaatcttcttcagg

SEQ ID NO: 2281101 - DNA, 25 bp, Homo sapien
gataatcccagccaatagtcatatg

SEQ ID NO: 2281102 - DNA, 25 bp, Homo sapien
tattatccactctcataccacgagt

SEQ ID NO: 2281103 - DNA, 25 bp, Homo sapien
aatggaatttgccactatttttata

SEQ ID NO: 2281104 - DNA, 25 bp, Homo sapien
tgtggtggcacctcaacacagttga

SEQ ID NO: 2281105 - DNA, 25 bp, Homo sapien
tctgagtgcctaaactcgctgtggt

SEQ ID NO: 2281106 - DNA, 25 bp, Homo sapien
tcattgccaaccatcagaggtaggg

SEQ ID NO: 2281107 - DNA, 25 bp, Homo sapien
tatggcccaatgtgatgagtatgca

SEQ ID NO: 2281108 - DNA, 25 bp, Homo sapien
taagtcaggtgcgtttcttataacc

SEQ ID NO: 2281109 - DNA, 25 bp, Homo sapien
catcttctcacatatcattcttttt

SEQ ID NO: 2281110 - DNA, 25 bp, Homo sapien
tgtagaaccaagctgcactggattg

SEQ ID NO: 2281111 - DNA, 25 bp, Homo sapien
tataagtgcagtgataatattgaac

SEQ ID NO: 2281112 - DNA, 25 bp, Homo sapien
tcataaggccttcagccatagggag

SEQ ID NO: 2281113 - DNA, 25 bp, Homo sapien
cctagcaacgctgtgggacaaaatt

SEQ ID NO: 2281114 - DNA, 25 bp, Homo sapien
gaagcttgctacctggatgtttcat

SEQ ID NO: 2281115 - DNA, 25 bp, Homo sapien
tcccatggaagtataggatggaccc

SEQ ID NO: 2281116 - DNA, 25 bp, Homo sapien
aataccttgtaacaaagcctcttgg

SEQ ID NO: 2281117 - DNA, 25 bp, Homo sapien
tgtttgcatagctaattgctgtatg

SEQ ID NO: 2281118 - DNA, 25 bp, Homo sapien
ttttcagaacaatgcttatgtttgc

SEQ ID NO: 2281119 - DNA, 25 bp, Homo sapien
tcccagttatgagttatggagataa

SEQ ID NO: 2281120 - DNA, 25 bp, Homo sapien
caataggagtacatcaaagccagga

SEQ ID NO: 2281121 - DNA, 25 bp, Homo sapien
tactatgggttatagaagcagcagc

SEQ ID NO: 2281122 - DNA, 25 bp, Homo sapien
tctcgccagaagtcgaatgaggtct

SEQ ID NO: 2281123 - DNA, 25 bp, Homo sapien
tcactggacacttagaataggaggg

SEQ ID NO: 2281124 - DNA, 25 bp, Homo sapien
ttcaatatcttgaggcctgggaaca

SEQ ID NO: 2281125 - DNA, 25 bp, Homo sapien
tgtttttcaaggctgggagctttga

SEQ ID NO: 2281126 - DNA, 25 bp, Homo sapien
gggagctttgatgtagtcactcagc

SEQ ID NO: 2281127 - DNA, 25 bp, Homo sapien
actcagctgacccagacacactcta

SEQ ID NO: 2281128 - DNA, 25 bp, Homo sapien
agaatcctgaaatgtgagtgtcgcg

SEQ ID NO: 2281129 - DNA, 25 bp, Homo sapien
tgtcgcgtaggtcacttcttcagac

SEQ ID NO: 2281130 - DNA, 25 bp, Homo sapien
taggttatttccatctcggttattc

SEQ ID NO: 2281131 - DNA, 25 bp, Homo sapien
ctgaaatgtgagtgtcgcgtaggtc

SEQ ID NO: 2281132 - DNA, 25 bp, Homo sapien
agacccagagcagcatgacgccaaa

SEQ ID NO: 2281133 - DNA, 25 bp, Homo sapien
cagcatgacgccaaatgggagatgg

SEQ ID NO: 2281134 - DNA, 25 bp, Homo sapien
gtcaccagcccaatcagcaacatca

SEQ ID NO: 2281135 - DNA, 25 bp, Homo sapien
atccccaatgtcaccagcccaatca

SEQ ID NO: 2281136 - DNA, 25 bp, Homo sapien
tgataagtgaatgtgtgtctaggca

SEQ ID NO: 2281137 - DNA, 25 bp, Homo sapien
gagacagcagaaaagtatcagacga

SEQ ID NO: 2281138 - DNA, 25 bp, Homo sapien
gacgattcaggatgctaggacccat

SEQ ID NO: 2281139 - DNA, 25 bp, Homo sapien
tacaatccaagctgaaagtacatgg

SEQ ID NO: 2281140 - DNA, 25 bp, Homo sapien
gatcggctgctaatcctcatactga

SEQ ID NO: 2281141 - DNA, 25 bp, Homo sapien
tctatatcgaaccaatggacgtacg

SEQ ID NO: 2281142 - DNA, 25 bp, Homo sapien
gagttccctgtaagcgaataccatg

SEQ ID NO: 2281143 - DNA, 25 bp, Homo sapien
ccaacttcccgaggatgggtcagaa

SEQ ID NO: 2281144 - DNA, 25 bp, Homo sapien
ccatggacaagttgttggagttgcc

SEQ ID NO: 2281145 - DNA, 25 bp, Homo sapien
tatgaatgattagctcttggcacag

SEQ ID NO: 2281146 - DNA, 25 bp, Homo sapien
gatctgtgacttgagaaattcctcc

SEQ ID NO: 2281147 - DNA, 25 bp, Homo sapien
cttcagtacactggagatctgtgac

SEQ ID NO: 2281148 - DNA, 25 bp, Homo sapien
ggtaccattgccacatcttaggaca

SEQ ID NO: 2281149 - DNA, 25 bp, Homo sapien
aactgtctatcttcactagggtgga

SEQ ID NO: 2281150 - DNA, 25 bp, Homo sapien
gcagtcctttctactgttagcccag

SEQ ID NO: 2281151 - DNA, 25 bp, Homo sapien
tcttaggacatggattacatctgtg

SEQ ID NO: 2281152 - DNA, 25 bp, Homo sapien
aaacatgagtaatggctgtgacata

SEQ ID NO: 2281153 - DNA, 25 bp, Homo sapien
acttctgccagaggagtcccatgat

SEQ ID NO: 2281154 - DNA, 25 bp, Homo sapien
cagccaaaagaacgaaaacatgagt

SEQ ID NO: 2281155 - DNA, 25 bp, Homo sapien
gtcccatgataatcccagccaaaag

SEQ ID NO: 2281156 - DNA, 25 bp, Homo sapien
atcattattaattttcccaggattc

SEQ ID NO: 2281157 - DNA, 25 bp, Homo sapien
tctcacaatcattattaattttccc

SEQ ID NO: 2281158 - DNA, 25 bp, Homo sapien
gctcttttctcagtatgttgtactc

SEQ ID NO: 2281159 - DNA, 25 bp, Homo sapien
tctcagtatgttgtactcctctttt

SEQ ID NO: 2281160 - DNA, 25 bp, Homo sapien
tagccttggcctttactcagtagtc

SEQ ID NO: 2281161 - DNA, 25 bp, Homo sapien
tctaacctgtgtttgacatgctggc

SEQ ID NO: 2281162 - DNA, 25 bp, Homo sapien
tggaaaccctcagtctagtagcaac

SEQ ID NO: 2281163 - DNA, 25 bp, Homo sapien
tcaaggaaatggctatgcaatctgg

SEQ ID NO: 2281164 - DNA, 25 bp, Homo sapien
tctgagacaatcatagggccatagt

SEQ ID NO: 2281165 - DNA, 25 bp, Homo sapien
gaaaataagcacatcctttggatcc

SEQ ID NO: 2281166 - DNA, 25 bp, Homo sapien
tcagaagacgtcagacaaggaactg

SEQ ID NO: 2281167 - DNA, 25 bp, Homo sapien
gaagcatactaatccaaatcctcag

SEQ ID NO: 2281168 - DNA, 25 bp, Homo sapien
aatacccagattacaaaatcaataa

SEQ ID NO: 2281169 - DNA, 25 bp, Homo sapien
aataatacccagattacaaaatcaa

SEQ ID NO: 2281170 - DNA, 25 bp, Homo sapien
ataataatacccagattacaaaatc

SEQ ID NO: 2281171 - DNA, 25 bp, Homo sapien
taatacccagattacaaaatcaata

SEQ ID NO: 2281172 - DNA, 25 bp, Homo sapien
ctaagcacccaatgcaggaatgttc

SEQ ID NO: 2281173 - DNA, 25 bp, Homo sapien
tggaaggatcatgcaaatctgctct

SEQ ID NO: 2281174 - DNA, 25 bp, Homo sapien
ctggaaggatcatgcaaatctgctc

SEQ ID NO: 2281175 - DNA, 25 bp, Homo sapien
aaaacctgtacacactgctgagacc

SEQ ID NO: 2281176 - DNA, 25 bp, Homo sapien
caaggtaggccgttgtgcttcacaa

SEQ ID NO: 2281177 - DNA, 25 bp, Homo sapien
gcttgcgagttatttgagaagaatc

SEQ ID NO: 2281178 - DNA, 25 bp, Homo sapien
gctgggtttaatcatctgtgggcct

SEQ ID NO: 2281179 - DNA, 25 bp, Homo sapien
ttctgcagagagtatcatcagtttg

SEQ ID NO: 2281180 - DNA, 25 bp, Homo sapien
tgcacaggatcagcagaatcaaagc

SEQ ID NO: 2281181 - DNA, 25 bp, Homo sapien
tccccatgcacaggatcagcagaat

SEQ ID NO: 2281182 - DNA, 25 bp, Homo sapien
cccatgcacaggatcagcagaatca

SEQ ID NO: 2281183 - DNA, 25 bp, Homo sapien
catccccatgcacaggatcagcaga

SEQ ID NO: 2281184 - DNA, 25 bp, Homo sapien
atctccataatatgtccagttggca

SEQ ID NO: 2281185 - DNA, 25 bp, Homo sapien
tatctccataatatgtccagttggc

SEQ ID NO: 2281186 - DNA, 25 bp, Homo sapien
tggtcagaatccctccacagctgtt

SEQ ID NO: 2281187 - DNA, 25 bp, Homo sapien
aatggtcagaatccctccacagctg

SEQ ID NO: 2281188 - DNA, 25 bp, Homo sapien
gctgttgataatgacataaagacaa

SEQ ID NO: 2281189 - DNA, 25 bp, Homo sapien
cacaatggtcagaatccctccacag

SEQ ID NO: 2281190 - DNA, 25 bp, Homo sapien
tccaggaatcctagttagtgatagc

SEQ ID NO: 2281191 - DNA, 25 bp, Homo sapien
ttctttcgtcttgggagacattgga

SEQ ID NO: 2281192 - DNA, 25 bp, Homo sapien
tagttagtgatagcattcctccaaa

SEQ ID NO: 2281193 - DNA, 25 bp, Homo sapien
acttgggattctttcgtcttgggag

SEQ ID NO: 2281194 - DNA, 25 bp, Homo sapien
tctaaggtgctttgataggaaagca

SEQ ID NO: 2281195 - DNA, 25 bp, Homo sapien
gtgctttgataggaaagcagtccac

SEQ ID NO: 2281196 - DNA, 25 bp, Homo sapien
aaggtgctttgataggaaagcagtc

SEQ ID NO: 2281197 - DNA, 25 bp, Homo sapien
ggtgctttgataggaaagcagtcca

SEQ ID NO: 2281198 - DNA, 25 bp, Homo sapien
aagagaggtgtatatttcttcctcg

SEQ ID NO: 2281199 - DNA, 25 bp, Homo sapien
aggtgtatatttcttcctcgtgcat

SEQ ID NO: 2281200 - DNA, 25 bp, Homo sapien
agaggtgtatatttcttcctcgtgc

SEQ ID NO: 2281201 - DNA, 25 bp, Homo sapien
ctgaagagaggtgtatatttcttcc

SEQ ID NO: 2281202 - DNA, 25 bp, Homo sapien
catttctggtaagtgtctggtgctg

SEQ ID NO: 2281203 - DNA, 25 bp, Homo sapien
gtaagtgtctggtgctgggctatcc

SEQ ID NO: 2281204 - DNA, 25 bp, Homo sapien
ttgttggaagacagacatttctggt

SEQ ID NO: 2281205 - DNA, 25 bp, Homo sapien
agacatttctggtaagtgtctggtg

SEQ ID NO: 2281206 - DNA, 25 bp, Homo sapien
taaatatacattttttggaagacga

SEQ ID NO: 2281207 - DNA, 25 bp, Homo sapien
atacattttttggaagacgaacaag

SEQ ID NO: 2281208 - DNA, 25 bp, Homo sapien
atatacattttttggaagacgaaca

SEQ ID NO: 2281209 - DNA, 25 bp, Homo sapien
tatacattttttggaagacgaacaa

SEQ ID NO: 2281210 - DNA, 25 bp, Homo sapien
tgctgttaataatcccatgcagaaa

SEQ ID NO: 2281211 - DNA, 25 bp, Homo sapien
cagaaaacacatgaaatcaccatca

SEQ ID NO: 2281212 - DNA, 25 bp, Homo sapien
acttgacgcccaagaaaatggatgc

SEQ ID NO: 2281213 - DNA, 25 bp, Homo sapien
tgaaatcaccatcacaagacagcat

SEQ ID NO: 2281214 - DNA, 25 bp, Homo sapien
ttagttcaatagcacaaccaggata

SEQ ID NO: 2281215 - DNA, 25 bp, Homo sapien
tgaatataaaactcgctctctcccc

SEQ ID NO: 2281216 - DNA, 25 bp, Homo sapien
tacaaaagacgtggaacaaaatgtc

SEQ ID NO: 2281217 - DNA, 25 bp, Homo sapien
cattaacatgcatatttgaactcag

SEQ ID NO: 2281218 - DNA, 25 bp, Homo sapien
tgcatcgcaatggtggacacctgca

SEQ ID NO: 2281219 - DNA, 25 bp, Homo sapien
taatgagttttgcatgaaggcttgg

SEQ ID NO: 2281220 - DNA, 25 bp, Homo sapien
taaagtttagcagtgccctctcttg

SEQ ID NO: 2281221 - DNA, 25 bp, Homo sapien
gcttggcaatatttcatctgaaggg

SEQ ID NO: 2281222 - DNA, 25 bp, Homo sapien
tttggatccctagtgtttccacgta

SEQ ID NO: 2281223 - DNA, 25 bp, Homo sapien
ccctagtgtttccacgtagtattgg

SEQ ID NO: 2281224 - DNA, 25 bp, Homo sapien
tgtttccacgtagtattggatgtta

SEQ ID NO: 2281225 - DNA, 25 bp, Homo sapien
ccacgtagtattggatgttataaat

SEQ ID NO: 2281226 - DNA, 25 bp, Homo sapien
tcttgactggtgtgccaaatgctcc

SEQ ID NO: 2281227 - DNA, 25 bp, Homo sapien
ccaattgtttggacaaggactgctg

SEQ ID NO: 2281228 - DNA, 25 bp, Homo sapien
gagacatagtaacaactttctctgt

SEQ ID NO: 2281229 - DNA, 25 bp, Homo sapien
tctctatttgtagcagcgtggaacc

SEQ ID NO: 2281230 - DNA, 25 bp, Homo sapien
ccacccagtaatcatagcttccttt

SEQ ID NO: 2281231 - DNA, 25 bp, Homo sapien
tcctttaatcttcctcaagctgcca

SEQ ID NO: 2281232 - DNA, 25 bp, Homo sapien
cccagtaatcatagcttcctttaat

SEQ ID NO: 2281233 - DNA, 25 bp, Homo sapien
taatcttcctcaagctgccagtgat

SEQ ID NO: 2281234 - DNA, 25 bp, Homo sapien
tgccaaagccagcgtccgctgtgtc

SEQ ID NO: 2281235 - DNA, 25 bp, Homo sapien
gccaaagccagcgtccgctgtgtcc

SEQ ID NO: 2281236 - DNA, 25 bp, Homo sapien
cttgccaaagccagcgtccgctgtg

SEQ ID NO: 2281237 - DNA, 25 bp, Homo sapien
ttgccaaagccagcgtccgctgtgt

SEQ ID NO: 2281238 - DNA, 25 bp, Homo sapien
aggccaggagaaggagaggagccat

SEQ ID NO: 2281239 - DNA, 25 bp, Homo sapien
ccacagacttggttagctgactggg

SEQ ID NO: 2281240 - DNA, 25 bp, Homo sapien
cagacttggttagctgactgggatc

SEQ ID NO: 2281241 - DNA, 25 bp, Homo sapien
cttggttagctgactgggatctctc

SEQ ID NO: 2281242 - DNA, 25 bp, Homo sapien
ggttagctgactgggatctctctgc

SEQ ID NO: 2281243 - DNA, 25 bp, Homo sapien
tcagacagaggatctcaacgcatac

SEQ ID NO: 2281244 - DNA, 25 bp, Homo sapien
cgtgctgcagttagacgaaagaagg

SEQ ID NO: 2281245 - DNA, 25 bp, Homo sapien
caacgcatacttctcacagataaaa

SEQ ID NO: 2281246 - DNA, 25 bp, Homo sapien
gataaaatacttccacgtgctgcag

SEQ ID NO: 2281247 - DNA, 25 bp, Homo sapien
agtgtattattgagtcccaggttgc

SEQ ID NO: 2281248 - DNA, 25 bp, Homo sapien
catagatgcgtaccttgtgtgaaag

SEQ ID NO: 2281249 - DNA, 25 bp, Homo sapien
catcaaatgaaatctggacggtgtg

SEQ ID NO: 2281250 - DNA, 25 bp, Homo sapien
cccaggttgctaatttcatggccca

SEQ ID NO: 2281251 - DNA, 25 bp, Homo sapien
tctttctaggttcttgtttatgtaa

SEQ ID NO: 2281252 - DNA, 25 bp, Homo sapien
gatctccggtacacaataagctctt

SEQ ID NO: 2281253 - DNA, 25 bp, Homo sapien
caggaacagtcaaacgaggagccca

SEQ ID NO: 2281254 - DNA, 25 bp, Homo sapien
tcctggtagagctgagatctccggt

SEQ ID NO: 2281255 - DNA, 25 bp, Homo sapien
tccatattataatagatgtcaccag

SEQ ID NO: 2281256 - DNA, 25 bp, Homo sapien
tgtgtggccatccttaatgggatga

SEQ ID NO: 2281257 - DNA, 25 bp, Homo sapien
tcaaaggactgcaaagaattgaagc

SEQ ID NO: 2281258 - DNA, 25 bp, Homo sapien
taatagatgtcaccagcccaagaag

SEQ ID NO: 2281259 - DNA, 25 bp, Homo sapien
gcacatagagggtcacttatcatat

SEQ ID NO: 2281260 - DNA, 25 bp, Homo sapien
taggagacttgtttttacatagagc

SEQ ID NO: 2281261 - DNA, 25 bp, Homo sapien
gcttcctcctaaacattcattgaaa

SEQ ID NO: 2281262 - DNA, 25 bp, Homo sapien
ttgatctaattgtcccttgcttcct

SEQ ID NO: 2281263 - DNA, 25 bp, Homo sapien
tacacatatacccttgaccagactg

SEQ ID NO: 2281264 - DNA, 25 bp, Homo sapien
tcgtcctcttcgacccagtgcacag

SEQ ID NO: 2281265 - DNA, 25 bp, Homo sapien
agatccgctgaatcaacactggcaa

SEQ ID NO: 2281266 - DNA, 25 bp, Homo sapien
tcttcgacccagtgcacagcttcag

SEQ ID NO: 2281267 - DNA, 25 bp, Homo sapien
ctgttattgacttagatgcaagagg

SEQ ID NO: 2281268 - DNA, 25 bp, Homo sapien
gtggcgaccagtggccctgaccctg

SEQ ID NO: 2281269 - DNA, 25 bp, Homo sapien
ggggcttttgtgtaagtctgcgctc

SEQ ID NO: 2281270 - DNA, 25 bp, Homo sapien
gcacagggctccctcttcaacgtgg

SEQ ID NO: 2281271 - DNA, 25 bp, Homo sapien
ccaagtacagcagcacgagggacat

SEQ ID NO: 2281272 - DNA, 25 bp, Homo sapien
agtccaaatagaccacagtccttgt

SEQ ID NO: 2281273 - DNA, 25 bp, Homo sapien
tctgccacaactcggcatccagagc

SEQ ID NO: 2281274 - DNA, 25 bp, Homo sapien
cgctgtaggaatccagatgcaggcc

SEQ ID NO: 2281275 - DNA, 25 bp, Homo sapien
ttaggagatttaggcacaaatgaac

SEQ ID NO: 2281276 - DNA, 25 bp, Homo sapien
cttctcagtttaggagatttaggca

SEQ ID NO: 2281277 - DNA, 25 bp, Homo sapien
atttaggcacaaatgaactggcttc

SEQ ID NO: 2281278 - DNA, 25 bp, Homo sapien
tcagtttaggagatttaggcacaaa

SEQ ID NO: 2281279 - DNA, 25 bp, Homo sapien
tgaggtctggcctccgccagctgac

SEQ ID NO: 2281280 - DNA, 25 bp, Homo sapien
tccagctcgcgctgctgaggtctgg

SEQ ID NO: 2281281 - DNA, 25 bp, Homo sapien
gcgccttgggctcggctgtgctcca

SEQ ID NO: 2281282 - DNA, 25 bp, Homo sapien
gccagctgacttcaactgcaactgc

SEQ ID NO: 2281283 - DNA, 25 bp, Homo sapien
ctgggttctcgttggcgccaggcgt

SEQ ID NO: 2281284 - DNA, 25 bp, Homo sapien
ttttgattttgattcccgctcgagg

SEQ ID NO: 2281285 - DNA, 25 bp, Homo sapien
gggcgctgcggtcgctccgacgact

SEQ ID NO: 2281286 - DNA, 25 bp, Homo sapien
ttgattcccgctcgagggcgctgcg

SEQ ID NO: 2281287 - DNA, 25 bp, Homo sapien
tcgtcctcggcgatttttgattttg

SEQ ID NO: 2281288 - DNA, 25 bp, Homo sapien
tcaggccaccaacgagcatttttgc

SEQ ID NO: 2281289 - DNA, 25 bp, Homo sapien
tcaggattcagaccctcggcgaaga

SEQ ID NO: 2281290 - DNA, 25 bp, Homo sapien
ccaacgagcatttttgctgcgtcct

SEQ ID NO: 2281291 - DNA, 25 bp, Homo sapien
cagaccctcggcgaagattttcttc

SEQ ID NO: 2281292 - DNA, 25 bp, Homo sapien
tccactgatagtatggaactttttc

SEQ ID NO: 2281293 - DNA, 25 bp, Homo sapien
aggtgataaacacaaaaccttgtct

SEQ ID NO: 2281294 - DNA, 25 bp, Homo sapien
caactttggatccactggaatttca

SEQ ID NO: 2281295 - DNA, 25 bp, Homo sapien
ccactggaatttcaatggcctcgat

SEQ ID NO: 2281296 - DNA, 25 bp, Homo sapien
aaccataccgctgctgccaataaac

SEQ ID NO: 2281297 - DNA, 25 bp, Homo sapien
agaaccataccgctgctgccaataa

SEQ ID NO: 2281298 - DNA, 25 bp, Homo sapien
ccataccgctgctgccaataaactt

SEQ ID NO: 2281299 - DNA, 25 bp, Homo sapien
tccccagaaccataccgctgctgcc

SEQ ID NO: 2281300 - DNA, 25 bp, Homo sapien
gctgtagtttgtactgccctgacct

SEQ ID NO: 2281301 - DNA, 25 bp, Homo sapien
ttgctgtagtttgtactgccctgac

SEQ ID NO: 2281302 - DNA, 25 bp, Homo sapien
gctcttgctgtagtttgtactgccc

SEQ ID NO: 2281303 - DNA, 25 bp, Homo sapien
tcactggctcttgctgtagtttgta

SEQ ID NO: 2281304 - DNA, 25 bp, Homo sapien
tgtagggaaactgctctcataggaa

SEQ ID NO: 2281305 - DNA, 25 bp, Homo sapien
gtaaccaacctcattggaacaagta

SEQ ID NO: 2281306 - DNA, 25 bp, Homo sapien
ggcatttacagtcctctaatgttga

SEQ ID NO: 2281307 - DNA, 25 bp, Homo sapien
tctgtattactagggaggcatttac

SEQ ID NO: 2281308 - DNA, 25 bp, Homo sapien
atttggtctgaaacaaagactcatc

SEQ ID NO: 2281309 - DNA, 25 bp, Homo sapien
tgccttttagttttcctgagtcagc

SEQ ID NO: 2281310 - DNA, 25 bp, Homo sapien
ggtctgaaacaaagactcatctgct

SEQ ID NO: 2281311 - DNA, 25 bp, Homo sapien
atctgctatgctgccttttagtttt

SEQ ID NO: 2281312 - DNA, 25 bp, Homo sapien
cagtttccagcaatgttaggtgttt

SEQ ID NO: 2281313 - DNA, 25 bp, Homo sapien
ctcttcagtttccagcaatgttagg

SEQ ID NO: 2281314 - DNA, 25 bp, Homo sapien
aaggtcggataaatgagttgaacac

SEQ ID NO: 2281315 - DNA, 25 bp, Homo sapien
tcaaggtcggataaatgagttgaac

SEQ ID NO: 2281316 - DNA, 25 bp, Homo sapien
caggccttgttaagttctactcagc

SEQ ID NO: 2281317 - DNA, 25 bp, Homo sapien
cataactgtccgtagaaatactcag

SEQ ID NO: 2281318 - DNA, 25 bp, Homo sapien
agaaggctctcttgtcgtataacat

SEQ ID NO: 2281319 - DNA, 25 bp, Homo sapien
gggtctcagtcacgaacctggtgat

SEQ ID NO: 2281320 - DNA, 25 bp, Homo sapien
tcattattgttctctagttctctat

SEQ ID NO: 2281321 - DNA, 25 bp, Homo sapien
gcttcttattactgactgcaaggta

SEQ ID NO: 2281322 - DNA, 25 bp, Homo sapien
ctgcaaggtactcccctcattattg

SEQ ID NO: 2281323 - DNA, 25 bp, Homo sapien
agacagcttcttattactgactgca

SEQ ID NO: 2281324 - DNA, 25 bp, Homo sapien
tgtttcttgcattaacatttaatga

SEQ ID NO: 2281325 - DNA, 25 bp, Homo sapien
cattaacatttaatgaggggtattt

SEQ ID NO: 2281326 - DNA, 25 bp, Homo sapien
tttcttgcattaacatttaatgagg

SEQ ID NO: 2281327 - DNA, 25 bp, Homo sapien
accatgctcggccttccacctgttt

SEQ ID NO: 2281328 - DNA, 25 bp, Homo sapien
aagtgtcacaatgctcctcctgatg

SEQ ID NO: 2281329 - DNA, 25 bp, Homo sapien
ccatcttgatgctcgtatgaattca

SEQ ID NO: 2281330 - DNA, 25 bp, Homo sapien
tcatccttatgtaggcaagagatgt

SEQ ID NO: 2281331 - DNA, 25 bp, Homo sapien
tgcatactacaattaagagagtgaa

SEQ ID NO: 2281332 - DNA, 25 bp, Homo sapien
ccttggaggtgcgtaaattagtgcc

SEQ ID NO: 2281333 - DNA, 25 bp, Homo sapien
gcaagccttacgcagatacttcaga

SEQ ID NO: 2281334 - DNA, 25 bp, Homo sapien
tgtgccgggcccatcaatttaaata

SEQ ID NO: 2281335 - DNA, 25 bp, Homo sapien
atggaggtagactggcttgcaagcc

SEQ ID NO: 2281336 - DNA, 25 bp, Homo sapien
tgatccaaccaagctagactgtgag

SEQ ID NO: 2281337 - DNA, 25 bp, Homo sapien
gtggactcataattgaatagcataa

SEQ ID NO: 2281338 - DNA, 25 bp, Homo sapien
agtttcttgaggagtaattgtcggg

SEQ ID NO: 2281339 - DNA, 25 bp, Homo sapien
tgtacacgtggtgtatattaaaaac

SEQ ID NO: 2281340 - DNA, 25 bp, Homo sapien
tccttcacagggtcctgtgattttc

SEQ ID NO: 2281341 - DNA, 25 bp, Homo sapien
ttcattatttaagagtgatgaggcc

SEQ ID NO: 2281342 - DNA, 25 bp, Homo sapien
ttcacagggtcctgtgattttcttt

SEQ ID NO: 2281343 - DNA, 25 bp, Homo sapien
ttatttaagagtgatgaggccaggc

SEQ ID NO: 2281344 - DNA, 25 bp, Homo sapien
taactgggcatcaggaggactaaca

SEQ ID NO: 2281345 - DNA, 25 bp, Homo sapien
aattctatacatcggagggctcggg

SEQ ID NO: 2281346 - DNA, 25 bp, Homo sapien
gaatcccagtgttagccccaaaatg

SEQ ID NO: 2281347 - DNA, 25 bp, Homo sapien
ccttttacagagagctaactgggca

SEQ ID NO: 2281348 - DNA, 25 bp, Homo sapien
tcctctgatgctcatgaaaaatagt

SEQ ID NO: 2281349 - DNA, 25 bp, Homo sapien
tcataaattacttagcgaaatatcc

SEQ ID NO: 2281350 - DNA, 25 bp, Homo sapien
gaagagtgggtacaatatctctcct

SEQ ID NO: 2281351 - DNA, 25 bp, Homo sapien
cttagcgaaatatcctgaaacacct

SEQ ID NO: 2281352 - DNA, 25 bp, Homo sapien
gttgggtcctctgcttgatgtctca

SEQ ID NO: 2281353 - DNA, 25 bp, Homo sapien
ctcaggtgagcctgggaagattcac

SEQ ID NO: 2281354 - DNA, 25 bp, Homo sapien
ggctgcaggatccatttaagcttgc

SEQ ID NO: 2281355 - DNA, 25 bp, Homo sapien
tggctgctgggttgcactctcatca

SEQ ID NO: 2281356 - DNA, 25 bp, Homo sapien
aaggcagattgctggtgaccaaata

SEQ ID NO: 2281357 - DNA, 25 bp, Homo sapien
tcttgcactgggcatccgttgcctc

SEQ ID NO: 2281358 - DNA, 25 bp, Homo sapien
gagtactccagcgtgactgttgcag

SEQ ID NO: 2281359 - DNA, 25 bp, Homo sapien
gtgaaagtcaccctgctaatctcct

SEQ ID NO: 2281360 - DNA, 25 bp, Homo sapien
atacagcagggctgaggccgccacg

SEQ ID NO: 2281361 - DNA, 25 bp, Homo sapien
agcagggctgaggccgccacgacat

SEQ ID NO: 2281362 - DNA, 25 bp, Homo sapien
caggatgaaatacagcagggctgag

SEQ ID NO: 2281363 - DNA, 25 bp, Homo sapien
acagcagggctgaggccgccacgac

SEQ ID NO: 2281364 - DNA, 25 bp, Homo sapien
ctgagagttgattaatctggggaaa

SEQ ID NO: 2281365 - DNA, 25 bp, Homo sapien
tctgccttttcaccactgaactcac

SEQ ID NO: 2281366 - DNA, 25 bp, Homo sapien
ctggggaaaaatactctttctgcct

SEQ ID NO: 2281367 - DNA, 25 bp, Homo sapien
aatctggggaaaaatactctttctg

SEQ ID NO: 2281368 - DNA, 25 bp, Homo sapien
ttttcctcacatctcgtcccagaaa

SEQ ID NO: 2281369 - DNA, 25 bp, Homo sapien
tttcctcacatctcgtcccagaaag

SEQ ID NO: 2281370 - DNA, 25 bp, Homo sapien
cagaaagcaggtgtcaagtagtcaa

SEQ ID NO: 2281371 - DNA, 25 bp, Homo sapien
tcttctagttctaattagactctgg

SEQ ID NO: 2281372 - DNA, 25 bp, Homo sapien
ccaatttgcatgtgacaggtaatca

SEQ ID NO: 2281373 - DNA, 25 bp, Homo sapien
cctatggtggaagatgtgtaaaacc

SEQ ID NO: 2281374 - DNA, 25 bp, Homo sapien
tataccagagatgtacccagtctgt

SEQ ID NO: 2281375 - DNA, 25 bp, Homo sapien
taccagagatgtacccagtctgtgg

SEQ ID NO: 2281376 - DNA, 25 bp, Homo sapien
atataccagagatgtacccagtctg

SEQ ID NO: 2281377 - DNA, 25 bp, Homo sapien
tatataccagagatgtacccagtct

SEQ ID NO: 2281378 - DNA, 25 bp, Homo sapien
tccccattttgctggcggctcagac

SEQ ID NO: 2281379 - DNA, 25 bp, Homo sapien
ggaagcacagggacgtcaggccaca

SEQ ID NO: 2281380 - DNA, 25 bp, Homo sapien
acaggagaagcagcgcgccaattac

SEQ ID NO: 2281381 - DNA, 25 bp, Homo sapien
gctgtcgtgatcgaaagcaatgacg

SEQ ID NO: 2281382 - DNA, 25 bp, Homo sapien
ccaagagtcaactattcgagtcgac

SEQ ID NO: 2281383 - DNA, 25 bp, Homo sapien
cacatggctactgtgaagcgactca

SEQ ID NO: 2281384 - DNA, 25 bp, Homo sapien
gtagatcaggtgctttctgcccgca

SEQ ID NO: 2281385 - DNA, 25 bp, Homo sapien
tcttcataccctgggagggtgtcca

SEQ ID NO: 2281386 - DNA, 25 bp, Homo sapien
cctgtgaacgaagagtaagaaccat

SEQ ID NO: 2281387 - DNA, 25 bp, Homo sapien
tcagataagtcatagcaggcaaggg

SEQ ID NO: 2281388 - DNA, 25 bp, Homo sapien
taaaatcgattgctgtctcaggagg

SEQ ID NO: 2281389 - DNA, 25 bp, Homo sapien
taaccgcagtggattcgctgacaga

SEQ ID NO: 2281390 - DNA, 25 bp, Homo sapien
ttgggatccagcctcaggagaaaag

SEQ ID NO: 2281391 - DNA, 25 bp, Homo sapien
ctgcaaacatcaaaacattcgagtt

SEQ ID NO: 2281392 - DNA, 25 bp, Homo sapien
acaaatacaaaaggcgaaaatccag

SEQ ID NO: 2281393 - DNA, 25 bp, Homo sapien
gagctgtcccgtgcttgcaccgtgc

SEQ ID NO: 2281394 - DNA, 25 bp, Homo sapien
cacaaaaacagctgggtggcgcgtc

SEQ ID NO: 2281395 - DNA, 25 bp, Homo sapien
agccagatggagaaataccggcggc

SEQ ID NO: 2281396 - DNA, 25 bp, Homo sapien
aaataccggcggcttttcgctagag

SEQ ID NO: 2281397 - DNA, 25 bp, Homo sapien
gctagagctgggagcacaaaaacag

SEQ ID NO: 2281398 - DNA, 25 bp, Homo sapien
ctgcagaaacgtccgctccgggggc

SEQ ID NO: 2281399 - DNA, 25 bp, Homo sapien
ggcaacagcgctgggccgagtgtgc

SEQ ID NO: 2281400 - DNA, 25 bp, Homo sapien
gctccctcagccgacgtcaaggtgt

SEQ ID NO: 2281401 - DNA, 25 bp, Homo sapien
aaggtgtgctcagaatagctgcaga

SEQ ID NO: 2281402 - DNA, 25 bp, Homo sapien
atgcaccgcagggcttccgagatcc

SEQ ID NO: 2281403 - DNA, 25 bp, Homo sapien
gatgcaccgcagggcttccgagatc

SEQ ID NO: 2281404 - DNA, 25 bp, Homo sapien
ctttttccgatactcaaagggatgg

SEQ ID NO: 2281405 - DNA, 25 bp, Homo sapien
ccctgtccggatatttcttccggat

SEQ ID NO: 2281406 - DNA, 25 bp, Homo sapien
gatatttcttccggatcttttctcc

SEQ ID NO: 2281407 - DNA, 25 bp, Homo sapien
cctttttccgatactcaaagggatg

SEQ ID NO: 2281408 - DNA, 25 bp, Homo sapien
tctggacgtccattggctctggcac

SEQ ID NO: 2281409 - DNA, 25 bp, Homo sapien
aaaacgccgtcagccctgaagtggg

SEQ ID NO: 2281410 - DNA, 25 bp, Homo sapien
tgctgagtcactgaagacggcggct

SEQ ID NO: 2281411 - DNA, 25 bp, Homo sapien
caatgtccctgcgttcttaaaggca

SEQ ID NO: 2281412 - DNA, 25 bp, Homo sapien
gaaaattactgaatagcttctgaac

SEQ ID NO: 2281413 - DNA, 25 bp, Homo sapien
gggctgttgggcagagaacgtgacc

SEQ ID NO: 2281414 - DNA, 25 bp, Homo sapien
ggcagagaacgtgaccttgttttcc

SEQ ID NO: 2281415 - DNA, 25 bp, Homo sapien
tgttgggcagagaacgtgaccttgt

SEQ ID NO: 2281416 - DNA, 25 bp, Homo sapien
tgggcagagaacgtgaccttgtttt

SEQ ID NO: 2281417 - DNA, 25 bp, Homo sapien
caacacgaggaggctggctgtcccc

SEQ ID NO: 2281418 - DNA, 25 bp, Homo sapien
aacacgaggaggctggctgtcccca

SEQ ID NO: 2281419 - DNA, 25 bp, Homo sapien
tcaacacgaggaggctggctgtccc

SEQ ID NO: 2281420 - DNA, 25 bp, Homo sapien
tctgttcctactcactgcctgcggt

SEQ ID NO: 2281421 - DNA, 25 bp, Homo sapien
ctgcgcagcctgcattagagaaaca

SEQ ID NO: 2281422 - DNA, 25 bp, Homo sapien
gaaaacgcccggatgctgaaagata

SEQ ID NO: 2281423 - DNA, 25 bp, Homo sapien
tcagtcctgccttatcgcgaccagg

SEQ ID NO: 2281424 - DNA, 25 bp, Homo sapien
gagtaagggattagctcacccctct

SEQ ID NO: 2281425 - DNA, 25 bp, Homo sapien
gagtacttataataccgctagggta

SEQ ID NO: 2281426 - DNA, 25 bp, Homo sapien
aaattttcaggtatccaaggtccag

SEQ ID NO: 2281427 - DNA, 25 bp, Homo sapien
ctggtagctataaaaccacgaacgt

SEQ ID NO: 2281428 - DNA, 25 bp, Homo sapien
agatcagcaatgtgaaacctttagg

SEQ ID NO: 2281429 - DNA, 25 bp, Homo sapien
agctcaaccacagatcagcaatgtg

SEQ ID NO: 2281430 - DNA, 25 bp, Homo sapien
acctttaggaagttactgcatttct

SEQ ID NO: 2281431 - DNA, 25 bp, Homo sapien
ccacagtccttcagacagggttgga

SEQ ID NO: 2281432 - DNA, 25 bp, Homo sapien
gaaatgaatctgtctaggcccagga

SEQ ID NO: 2281433 - DNA, 25 bp, Homo sapien
tgatgtcagcacaacaagccattta

SEQ ID NO: 2281434 - DNA, 25 bp, Homo sapien
agctttaggctttcgattgttagga

SEQ ID NO: 2281435 - DNA, 25 bp, Homo sapien
tagagttgcctagttactactggaa

SEQ ID NO: 2281436 - DNA, 25 bp, Homo sapien
tacttcctcttgtccagatcaggca

SEQ ID NO: 2281437 - DNA, 25 bp, Homo sapien
ggtcagagggcactaggtacttcct

SEQ ID NO: 2281438 - DNA, 25 bp, Homo sapien
cagtaaggtcagagggcactaggta

SEQ ID NO: 2281439 - DNA, 25 bp, Homo sapien
ttgtccagatcaggcaccctggctt

SEQ ID NO: 2281440 - DNA, 25 bp, Homo sapien
tctcaatctcacaatctcatgcatg

SEQ ID NO: 2281441 - DNA, 25 bp, Homo sapien
caagtatgtactgcctctcaatctc

SEQ ID NO: 2281442 - DNA, 25 bp, Homo sapien
tctagagagttttttcaccggagga

SEQ ID NO: 2281443 - DNA, 25 bp, Homo sapien
catgtaatgaggatctagagagttt

SEQ ID NO: 2281444 - DNA, 25 bp, Homo sapien
atttttaatgaagacatggtttcac

SEQ ID NO: 2281445 - DNA, 25 bp, Homo sapien
gatctgcccacatccccgtcccaaa

SEQ ID NO: 2281446 - DNA, 25 bp, Homo sapien
ggtgatctgcccacatccccgtccc

SEQ ID NO: 2281447 - DNA, 25 bp, Homo sapien
tttttaatgaagacatggtttcacc

SEQ ID NO: 2281448 - DNA, 25 bp, Homo sapien
caaagaagaataaggcgtcctcagg

SEQ ID NO: 2281449 - DNA, 25 bp, Homo sapien
ataaggcgtcctcaggtctcaggtg

SEQ ID NO: 2281450 - DNA, 25 bp, Homo sapien
gaagaataaggcgtcctcaggtctc

SEQ ID NO: 2281451 - DNA, 25 bp, Homo sapien
gacaaagaagaataaggcgtcctca

SEQ ID NO: 2281452 - DNA, 25 bp, Homo sapien
caagggctagaggatgccagactgc

SEQ ID NO: 2281453 - DNA, 25 bp, Homo sapien
tatcaacgcatctagaacaagggct

SEQ ID NO: 2281454 - DNA, 25 bp, Homo sapien
actgccatatgtaagaggatccgga

SEQ ID NO: 2281455 - DNA, 25 bp, Homo sapien
ggatccggataaataacaccttctg

SEQ ID NO: 2281456 - DNA, 25 bp, Homo sapien
taaatctagtagagtggctaatccc

SEQ ID NO: 2281457 - DNA, 25 bp, Homo sapien
caggaactgcgatgggctgacgctt

SEQ ID NO: 2281458 - DNA, 25 bp, Homo sapien
tatgaagatgactagggcacagtcc

SEQ ID NO: 2281459 - DNA, 25 bp, Homo sapien
ttaaagagctcactcctagcaaggg

SEQ ID NO: 2281460 - DNA, 25 bp, Homo sapien
gaaaatagtcttcctcatgattgtc

SEQ ID NO: 2281461 - DNA, 25 bp, Homo sapien
agaaaatagtcttcctcatgattgt

SEQ ID NO: 2281462 - DNA, 25 bp, Homo sapien
tgtgatgacggtgtgtgtggtgtaa

SEQ ID NO: 2281463 - DNA, 25 bp, Homo sapien
tctttccccatgtcgcgcacacaca

SEQ ID NO: 2281464 - DNA, 25 bp, Homo sapien
tactgtaaacttacatcatccccat

SEQ ID NO: 2281465 - DNA, 25 bp, Homo sapien
tgcacaacaattaaaccccaggaat

SEQ ID NO: 2281466 - DNA, 25 bp, Homo sapien
tggatgataaccaaggagggaagca

SEQ ID NO: 2281467 - DNA, 25 bp, Homo sapien
gctaagagtggttttagtctacaat

SEQ ID NO: 2281468 - DNA, 25 bp, Homo sapien
cattcctgtgcatgtgagcctgaag

SEQ ID NO: 2281469 - DNA, 25 bp, Homo sapien
taattaccttacttcatacttgccc

SEQ ID NO: 2281470 - DNA, 25 bp, Homo sapien
caattattttatttccttggcctga

SEQ ID NO: 2281471 - DNA, 25 bp, Homo sapien
gcaattattttatttccttggcctg

SEQ ID NO: 2281472 - DNA, 25 bp, Homo sapien
aagaagtgccaaatccaatccagcc

SEQ ID NO: 2281473 - DNA, 25 bp, Homo sapien
gaagtgccaaatccaatccagcctg

SEQ ID NO: 2281474 - DNA, 25 bp, Homo sapien
gtaaagaagtgccaaatccaatcca

SEQ ID NO: 2281475 - DNA, 25 bp, Homo sapien
taaagaagtgccaaatccaatccag

SEQ ID NO: 2281476 - DNA, 25 bp, Homo sapien
tgaaaacagttctctagtggagagg

SEQ ID NO: 2281477 - DNA, 25 bp, Homo sapien
caggaatggaagtcctcactctggt

SEQ ID NO: 2281478 - DNA, 25 bp, Homo sapien
gaaaagcagatcatgtttccctgaa

SEQ ID NO: 2281479 - DNA, 25 bp, Homo sapien
caggctgtttttgacctgaaggtaa

SEQ ID NO: 2281480 - DNA, 25 bp, Homo sapien
taatctgtccttgattcttttcccc

SEQ ID NO: 2281481 - DNA, 25 bp, Homo sapien
atctgtccttgattcttttccccat

SEQ ID NO: 2281482 - DNA, 25 bp, Homo sapien
tttggagatttaatctgtccttgat

SEQ ID NO: 2281483 - DNA, 25 bp, Homo sapien
tttaatctgtccttgattcttttcc

SEQ ID NO: 2281484 - DNA, 25 bp, Homo sapien
tccttgagcctggtgggtagcgact

SEQ ID NO: 2281485 - DNA, 25 bp, Homo sapien
tagcgactgatttgatgactgttct

SEQ ID NO: 2281486 - DNA, 25 bp, Homo sapien
gcttgataccccagacactgactga

SEQ ID NO: 2281487 - DNA, 25 bp, Homo sapien
gaatgagtatattggtcacaaatgg

SEQ ID NO: 2281488 - DNA, 25 bp, Homo sapien
tgacagggtaagacttttcctccaa

SEQ ID NO: 2281489 - DNA, 25 bp, Homo sapien
gatcacttaagtctggagcccgagg

SEQ ID NO: 2281490 - DNA, 25 bp, Homo sapien
gcacttatatctttccagtcagagg

SEQ ID NO: 2281491 - DNA, 25 bp, Homo sapien
ttctcagacaggtcacaaatcatgt

SEQ ID NO: 2281492 - DNA, 25 bp, Homo sapien
atacaaaaactagcccggcttggtg

SEQ ID NO: 2281493 - DNA, 25 bp, Homo sapien
gccctatctctactaaaaatacaaa

SEQ ID NO: 2281494 - DNA, 25 bp, Homo sapien
agccctatctctactaaaaatacaa

SEQ ID NO: 2281495 - DNA, 25 bp, Homo sapien
aaactagcccggcttggtggtgctt

SEQ ID NO: 2281496 - DNA, 25 bp, Homo sapien
tcatttagtgcccttgcttgtttaa

SEQ ID NO: 2281497 - DNA, 25 bp, Homo sapien
tcctctcatggaatctactgtcttc

SEQ ID NO: 2281498 - DNA, 25 bp, Homo sapien
cagtgtcatgtcttggttcacttga

SEQ ID NO: 2281499 - DNA, 25 bp, Homo sapien
ccttcctctgaaagttattcctctt

SEQ ID NO: 2281500 - DNA, 25 bp, Homo sapien
tctaggcccaagtcacaactcacac

SEQ ID NO: 2281501 - DNA, 25 bp, Homo sapien
tggttcattcccttttgtgtacaca

SEQ ID NO: 2281502 - DNA, 25 bp, Homo sapien
cagtaatgctatgttcaatcaagca

SEQ ID NO: 2281503 - DNA, 25 bp, Homo sapien
agctgcgatagttttactccctacc

SEQ ID NO: 2281504 - DNA, 25 bp, Homo sapien
taactgtgaactttgaatacctggt

SEQ ID NO: 2281505 - DNA, 25 bp, Homo sapien
ggatcaatgcaggaaacactctggg

SEQ ID NO: 2281506 - DNA, 25 bp, Homo sapien
cctaaccctaactacatgcttcgga

SEQ ID NO: 2281507 - DNA, 25 bp, Homo sapien
gagtggaggatatacaaacgcagtt

SEQ ID NO: 2281508 - DNA, 25 bp, Homo sapien
caaagcccgcgtaatgtcactaagt

SEQ ID NO: 2281509 - DNA, 25 bp, Homo sapien
tgagcccctgtcttagcctttaggc

SEQ ID NO: 2281510 - DNA, 25 bp, Homo sapien
cactaagtgtcagtgaagtggaact

SEQ ID NO: 2281511 - DNA, 25 bp, Homo sapien
aaagctctatggtcagtatctgccg

SEQ ID NO: 2281512 - DNA, 25 bp, Homo sapien
taataggttagtcctttatatagga

SEQ ID NO: 2281513 - DNA, 25 bp, Homo sapien
taattagagtccttaatgtgtatct

SEQ ID NO: 2281514 - DNA, 25 bp, Homo sapien
ttcttaattagagtccttaatgtgt

SEQ ID NO: 2281515 - DNA, 25 bp, Homo sapien
ataataggttagtcctttatatagg

SEQ ID NO: 2281516 - DNA, 25 bp, Homo sapien
aaagtgacatgtttatgtagtaaaa

SEQ ID NO: 2281517 - DNA, 25 bp, Homo sapien
tcaagttatgcatataagtaaatct

SEQ ID NO: 2281518 - DNA, 25 bp, Homo sapien
taagtaaatctacactgcccagtag

SEQ ID NO: 2281519 - DNA, 25 bp, Homo sapien
tctacactgcccagtagctatttac

SEQ ID NO: 2281520 - DNA, 25 bp, Homo sapien
agtctcttgaacttgatgagctgag

SEQ ID NO: 2281521 - DNA, 25 bp, Homo sapien
tgaggcattagagtctcttgaactt

SEQ ID NO: 2281522 - DNA, 25 bp, Homo sapien
gagtctcttgaacttgatgagctga

SEQ ID NO: 2281523 - DNA, 25 bp, Homo sapien
ggcattagagtctcttgaacttgat

SEQ ID NO: 2281524 - DNA, 25 bp, Homo sapien
aagtgttccaggaaccacaatacag

SEQ ID NO: 2281525 - DNA, 25 bp, Homo sapien
aagttgagtatgaagaaatttagca

SEQ ID NO: 2281526 - DNA, 25 bp, Homo sapien
taaatgatgttcttgaatcatctat

SEQ ID NO: 2281527 - DNA, 25 bp, Homo sapien
gtgtgaataagaagcagtagaatca

SEQ ID NO: 2281528 - DNA, 25 bp, Homo sapien
acagcgttgaattgttgaagctgag

SEQ ID NO: 2281529 - DNA, 25 bp, Homo sapien
tttcagaaagaacagcgttgaattg

SEQ ID NO: 2281530 - DNA, 25 bp, Homo sapien
aattatgttccaagagcgaagtaga

SEQ ID NO: 2281531 - DNA, 25 bp, Homo sapien
agcgaagtagagaaggcacgatgtg

SEQ ID NO: 2281532 - DNA, 25 bp, Homo sapien
caaagcaagtaagtatccaagtcag

SEQ ID NO: 2281533 - DNA, 25 bp, Homo sapien
cagaaactagtgacggagaatccac

SEQ ID NO: 2281534 - DNA, 25 bp, Homo sapien
taaaggtagccctgtcagaaaccac

SEQ ID NO: 2281535 - DNA, 25 bp, Homo sapien
ggagattctgtgctaacgtgaacac

SEQ ID NO: 2281536 - DNA, 25 bp, Homo sapien
tcccagaaattaacctccacagagt

SEQ ID NO: 2281537 - DNA, 25 bp, Homo sapien
ccagaaattaacctccacagagtgg

SEQ ID NO: 2281538 - DNA, 25 bp, Homo sapien
ggtcccagaaattaacctccacaga

SEQ ID NO: 2281539 - DNA, 25 bp, Homo sapien
cagaaattaacctccacagagtggt

SEQ ID NO: 2281540 - DNA, 25 bp, Homo sapien
aacaaaattcccaacgtagacatca

SEQ ID NO: 2281541 - DNA, 25 bp, Homo sapien
acaaaattcccaacgtagacatcaa

SEQ ID NO: 2281542 - DNA, 25 bp, Homo sapien
caacaaaattcccaacgtagacatc

SEQ ID NO: 2281543 - DNA, 25 bp, Homo sapien
ttcaacaaaattcccaacgtagaca

SEQ ID NO: 2281544 - DNA, 25 bp, Homo sapien
taattaggtatgggtttatgaaata

SEQ ID NO: 2281545 - DNA, 25 bp, Homo sapien
taggtatgggtttatgaaatactaa

SEQ ID NO: 2281546 - DNA, 25 bp, Homo sapien
tgtttaattaggtatgggtttatga

SEQ ID NO: 2281547 - DNA, 25 bp, Homo sapien
attaggtatgggtttatgaaatact

SEQ ID NO: 2281548 - DNA, 25 bp, Homo sapien
gggtcctggagtaaatgctggctca

SEQ ID NO: 2281549 - DNA, 25 bp, Homo sapien
gagttctatgttgggtcctggagta

SEQ ID NO: 2281550 - DNA, 25 bp, Homo sapien
ctttctggagttctatgttgggtcc

SEQ ID NO: 2281551 - DNA, 25 bp, Homo sapien
tgctggctcaatactcagtttagta

SEQ ID NO: 2281552 - DNA, 25 bp, Homo sapien
gaagtaacagttgcaccggtaccca

SEQ ID NO: 2281553 - DNA, 25 bp, Homo sapien
aagcacagagatgccgactttcgtt

SEQ ID NO: 2281554 - DNA, 25 bp, Homo sapien
ctgaagcaggctggatttctgagaa

SEQ ID NO: 2281555 - DNA, 25 bp, Homo sapien
gagatgccgactttcgttccaagtt

SEQ ID NO: 2281556 - DNA, 25 bp, Homo sapien
ttttctagatcaaagaaaatgtaga

SEQ ID NO: 2281557 - DNA, 25 bp, Homo sapien
tatttttctagatcaaagaaaatgt

SEQ ID NO: 2281558 - DNA, 25 bp, Homo sapien
tcaaagaaaatgtagaaaatcagac

SEQ ID NO: 2281559 - DNA, 25 bp, Homo sapien
atcaaagaaaatgtagaaaatcaga

SEQ ID NO: 2281560 - DNA, 25 bp, Homo sapien
gagtccaatccagtaaaattgttga

SEQ ID NO: 2281561 - DNA, 25 bp, Homo sapien
taagagagtccaatccagtaaaatt

SEQ ID NO: 2281562 - DNA, 25 bp, Homo sapien
ctgtaagagagtccaatccagtaaa

SEQ ID NO: 2281563 - DNA, 25 bp, Homo sapien
tccaatccagtaaaattgttgactg

SEQ ID NO: 2281564 - DNA, 25 bp, Homo sapien
tctcccacaaccaggcggtgtgctc

SEQ ID NO: 2281565 - DNA, 25 bp, Homo sapien
ctcccacaaccaggcggtgtgctcc

SEQ ID NO: 2281566 - DNA, 25 bp, Homo sapien
agatactgggagagtgcagagccat

SEQ ID NO: 2281567 - DNA, 25 bp, Homo sapien
aggacaaattcataaagagcaaaaa

SEQ ID NO: 2281568 - DNA, 25 bp, Homo sapien
aaggacaaattcataaagagcaaaa

SEQ ID NO: 2281569 - DNA, 25 bp, Homo sapien
taaggacaaattcataaagagcaaa

SEQ ID NO: 2281570 - DNA, 25 bp, Homo sapien
agatataacgatttttatcttcaca

SEQ ID NO: 2281571 - DNA, 25 bp, Homo sapien
tatcttcacaggattcatctaaagc

SEQ ID NO: 2281572 - DNA, 25 bp, Homo sapien
ggattatacgctatgcagttctttg

SEQ ID NO: 2281573 - DNA, 25 bp, Homo sapien
gcatttccatttggattatacgcta

SEQ ID NO: 2281574 - DNA, 25 bp, Homo sapien
taatgttgggtctttactctccacc

SEQ ID NO: 2281575 - DNA, 25 bp, Homo sapien
gcctgggcagtgtgagttaaatttt

SEQ ID NO: 2281576 - DNA, 25 bp, Homo sapien
tctccagaaagtgcaatgcataagc

SEQ ID NO: 2281577 - DNA, 25 bp, Homo sapien
gcatagtgacatggtgcctgcagtc

SEQ ID NO: 2281578 - DNA, 25 bp, Homo sapien
cctagcatatgggaatcaaggaacc

SEQ ID NO: 2281579 - DNA, 25 bp, Homo sapien
tacagtaggcataactctaaagtgg

SEQ ID NO: 2281580 - DNA, 25 bp, Homo sapien
aaggcgggcagaatccttgacccca

SEQ ID NO: 2281581 - DNA, 25 bp, Homo sapien
ggtaatagtttagcacatggcccat

SEQ ID NO: 2281582 - DNA, 25 bp, Homo sapien
gtaagtacatttacaactggtaaga

SEQ ID NO: 2281583 - DNA, 25 bp, Homo sapien
aatttgtaagtacatttacaactgg

SEQ ID NO: 2281584 - DNA, 25 bp, Homo sapien
tcatatagcaaaatttgtaagtaca

SEQ ID NO: 2281585 - DNA, 25 bp, Homo sapien
acatttacaactggtaagaagtgac

SEQ ID NO: 2281586 - DNA, 25 bp, Homo sapien
ggatagaacaaccaaacataaaggc

SEQ ID NO: 2281587 - DNA, 25 bp, Homo sapien
cactgcaagtcaagtcacctacaga

SEQ ID NO: 2281588 - DNA, 25 bp, Homo sapien
gacccagatgacctgatcaacactg

SEQ ID NO: 2281589 - DNA, 25 bp, Homo sapien
tgataaaggcgtcaattcacattgg

SEQ ID NO: 2281590 - DNA, 25 bp, Homo sapien
cattcctgagggccccttcaatgag

SEQ ID NO: 2281591 - DNA, 25 bp, Homo sapien
tcttggcctgtgcacaaagttgtcg

SEQ ID NO: 2281592 - DNA, 25 bp, Homo sapien
cagcatcatttataacctgccgcat

SEQ ID NO: 2281593 - DNA, 25 bp, Homo sapien
gaatgtatccccatacagactgcca

SEQ ID NO: 2281594 - DNA, 25 bp, Homo sapien
gaaatgtatcgggatatataaggaa

SEQ ID NO: 2281595 - DNA, 25 bp, Homo sapien
aggtgcactggtccacttggattaa

SEQ ID NO: 2281596 - DNA, 25 bp, Homo sapien
tcgggatatataaggaatcagagag

SEQ ID NO: 2281597 - DNA, 25 bp, Homo sapien
atttaggtgcactggtccacttgga

SEQ ID NO: 2281598 - DNA, 25 bp, Homo sapien
atcctcggttccattgcgctgccag

SEQ ID NO: 2281599 - DNA, 25 bp, Homo sapien
ccattgcgctgccaggcagggtgct

SEQ ID NO: 2281600 - DNA, 25 bp, Homo sapien
gtgaagctcagctgtggcacacctt

SEQ ID NO: 2281601 - DNA, 25 bp, Homo sapien
ggagagctggtctatatatccgggt

SEQ ID NO: 2281602 - DNA, 25 bp, Homo sapien
taagatcttaggacgtttcctttgc

SEQ ID NO: 2281603 - DNA, 25 bp, Homo sapien
gggtcatgctgccacttttaatggg

SEQ ID NO: 2281604 - DNA, 25 bp, Homo sapien
ggccatgattatcttaaaggcatta

SEQ ID NO: 2281605 - DNA, 25 bp, Homo sapien
tattctccagccttaagtaagatct

SEQ ID NO: 2281606 - DNA, 25 bp, Homo sapien
tagactccacaggaccaaaccatag

SEQ ID NO: 2281607 - DNA, 25 bp, Homo sapien
tccacaggaccaaaccatagaacaa

SEQ ID NO: 2281608 - DNA, 25 bp, Homo sapien
caggaccaaaccatagaacaatttc

SEQ ID NO: 2281609 - DNA, 25 bp, Homo sapien
gaccaaaccatagaacaatttcact

SEQ ID NO: 2281610 - DNA, 25 bp, Homo sapien
tgcaaaggactgtgtaaagatgatc

SEQ ID NO: 2281611 - DNA, 25 bp, Homo sapien
tgtgtaaagatgatcaaccatctca

SEQ ID NO: 2281612 - DNA, 25 bp, Homo sapien
ggaacagagaagagattacaccagc

SEQ ID NO: 2281613 - DNA, 25 bp, Homo sapien
ccagcggtaacactgccaactgaga

SEQ ID NO: 2281614 - DNA, 25 bp, Homo sapien
ccttggcagcggagcaagattctgt

SEQ ID NO: 2281615 - DNA, 25 bp, Homo sapien
gccttggcagcggagcaagattctg

SEQ ID NO: 2281616 - DNA, 25 bp, Homo sapien
tccagccttggcagcggagcaagat

SEQ ID NO: 2281617 - DNA, 25 bp, Homo sapien
cagccttggcagcggagcaagattc

SEQ ID NO: 2281618 - DNA, 25 bp, Homo sapien
cacttgttttgatcagcctcttaaa

SEQ ID NO: 2281619 - DNA, 25 bp, Homo sapien
acactgttatccaaagtggtgatga

SEQ ID NO: 2281620 - DNA, 25 bp, Homo sapien
tctacctagcagtatgtaagagaaa

SEQ ID NO: 2281621 - DNA, 25 bp, Homo sapien
gaaaagttatcttgagattcagcca

SEQ ID NO: 2281622 - DNA, 25 bp, Homo sapien
tgcttcatcgctgtagccatgggaa

SEQ ID NO: 2281623 - DNA, 25 bp, Homo sapien
ttctgctgcttcatcgctgtagcca

SEQ ID NO: 2281624 - DNA, 25 bp, Homo sapien
ccatgggaatccgtttcattattat

SEQ ID NO: 2281625 - DNA, 25 bp, Homo sapien
attatggtaacaatatggagtgctg

SEQ ID NO: 2281626 - DNA, 25 bp, Homo sapien
tatattaaatacaaagatacccaaa

SEQ ID NO: 2281627 - DNA, 25 bp, Homo sapien
ttatattaaatacaaagatacccaa

SEQ ID NO: 2281628 - DNA, 25 bp, Homo sapien
tatttatattaaatacaaagatacc

SEQ ID NO: 2281629 - DNA, 25 bp, Homo sapien
tttatattaaatacaaagataccca

SEQ ID NO: 2281630 - DNA, 25 bp, Homo sapien
tcagagaggaacaagaactgtgcac

SEQ ID NO: 2281631 - DNA, 25 bp, Homo sapien
cacgggagcagcactaggtaaactt

SEQ ID NO: 2281632 - DNA, 25 bp, Homo sapien
tattatagaagcagagcgatcacca

SEQ ID NO: 2281633 - DNA, 25 bp, Homo sapien
ccttaagttagtagaggctccactc

SEQ ID NO: 2281634 - DNA, 25 bp, Homo sapien
caagtcatctcataatccgtcctac

SEQ ID NO: 2281635 - DNA, 25 bp, Homo sapien
tgtggtcaaaatactcctgctggtg

SEQ ID NO: 2281636 - DNA, 25 bp, Homo sapien
ccacaagattatctcagggtctttg

SEQ ID NO: 2281637 - DNA, 25 bp, Homo sapien
tagtattcagggcaaatgtgggttc

SEQ ID NO: 2281638 - DNA, 25 bp, Homo sapien
catcaatgggcttgtatgttgcttc

SEQ ID NO: 2281639 - DNA, 25 bp, Homo sapien
tgcttttttcatagcggccatgcta

SEQ ID NO: 2281640 - DNA, 25 bp, Homo sapien
gaccttgttcatctcgtataactga

SEQ ID NO: 2281641 - DNA, 25 bp, Homo sapien
catgggagtgccgatacctgttcaa

SEQ ID NO: 2281642 - DNA, 25 bp, Homo sapien
aatttcagttaatttcatatttctg

SEQ ID NO: 2281643 - DNA, 25 bp, Homo sapien
tctatttaatttcagttaatttcat

SEQ ID NO: 2281644 - DNA, 25 bp, Homo sapien
taatttcagttaatttcatatttct

SEQ ID NO: 2281645 - DNA, 25 bp, Homo sapien
ttctatttaatttcagttaatttca

SEQ ID NO: 2281646 - DNA, 25 bp, Homo sapien
tttagcacatacagacatttcatcc

SEQ ID NO: 2281647 - DNA, 25 bp, Homo sapien
ttatatttatagaggttactcagat

SEQ ID NO: 2281648 - DNA, 25 bp, Homo sapien
tcataatatggtttcattatctgtt

SEQ ID NO: 2281649 - DNA, 25 bp, Homo sapien
caatttggtaatttgcatattcaag

SEQ ID NO: 2281650 - DNA, 25 bp, Homo sapien
ttctatataccgataatattcaagc

SEQ ID NO: 2281651 - DNA, 25 bp, Homo sapien
tcttgtcgctatttctatgagttca

SEQ ID NO: 2281652 - DNA, 25 bp, Homo sapien
catccatgttagatcatatgatata

SEQ ID NO: 2281653 - DNA, 25 bp, Homo sapien
tatatgtctttatatggctggcatt

SEQ ID NO: 2281654 - DNA, 25 bp, Homo sapien
tgtacctatattaattgtggcttgt

SEQ ID NO: 2281655 - DNA, 25 bp, Homo sapien
tactggaaaacacggtgcaaagttg

SEQ ID NO: 2281656 - DNA, 25 bp, Homo sapien
gcctcagtgcttggacttctctctg

SEQ ID NO: 2281657 - DNA, 25 bp, Homo sapien
tcgactagggtctcaggatggccgg

SEQ ID NO: 2281658 - DNA, 25 bp, Homo sapien
ctgtaggaaactcatcaggcatact

SEQ ID NO: 2281659 - DNA, 25 bp, Homo sapien
tgtctgtaggaaactcatcaggcat

SEQ ID NO: 2281660 - DNA, 25 bp, Homo sapien
tcctggaatgtctgtaggaaactca

SEQ ID NO: 2281661 - DNA, 25 bp, Homo sapien
tctgtaggaaactcatcaggcatac

SEQ ID NO: 2281662 - DNA, 25 bp, Homo sapien
tctgtgcacactggattggtcaaaa

SEQ ID NO: 2281663 - DNA, 25 bp, Homo sapien
ttcagtgcgtacacctagaagccgt

SEQ ID NO: 2281664 - DNA, 25 bp, Homo sapien
gtgaatatctcaggtaaagctccga

SEQ ID NO: 2281665 - DNA, 25 bp, Homo sapien
tttttcaactcttcggctaagggca

SEQ ID NO: 2281666 - DNA, 25 bp, Homo sapien
ccttggttgttaaagagaaattgca

SEQ ID NO: 2281667 - DNA, 25 bp, Homo sapien
caattccccaatatcgctttgaaaa

SEQ ID NO: 2281668 - DNA, 25 bp, Homo sapien
tactaaggtaacaaactgtgaaatc

SEQ ID NO: 2281669 - DNA, 25 bp, Homo sapien
ccatccgaatgtattatttaaccgg

SEQ ID NO: 2281670 - DNA, 25 bp, Homo sapien
caggtattatcagccagtgtgggtg

SEQ ID NO: 2281671 - DNA, 25 bp, Homo sapien
tattcctgaccaagtttgtcttcca

SEQ ID NO: 2281672 - DNA, 25 bp, Homo sapien
tgaaatctcaaggcatagacacagg

SEQ ID NO: 2281673 - DNA, 25 bp, Homo sapien
tgtattcctgaccaagtttgtcttc

SEQ ID NO: 2281674 - DNA, 25 bp, Homo sapien
tgaacaaacaattggatgaaatgca

SEQ ID NO: 2281675 - DNA, 25 bp, Homo sapien
gaacaaacaattggatgaaatgcac

SEQ ID NO: 2281676 - DNA, 25 bp, Homo sapien
ttcagtgattctggcggagagccca

SEQ ID NO: 2281677 - DNA, 25 bp, Homo sapien
taagctgctgattattgggtcccat

SEQ ID NO: 2281678 - DNA, 25 bp, Homo sapien
gtgattctcaatcccacacagggtg

SEQ ID NO: 2281679 - DNA, 25 bp, Homo sapien
cagctttatcttgaccaggtgcgag

SEQ ID NO: 2281680 - DNA, 25 bp, Homo sapien
gcactgtatgttgatggttcaaaag

SEQ ID NO: 2281681 - DNA, 25 bp, Homo sapien
caagtacaatgctaaagactaatga

SEQ ID NO: 2281682 - DNA, 25 bp, Homo sapien
tgccttccctgaatgtatgatcaac

SEQ ID NO: 2281683 - DNA, 25 bp, Homo sapien
gactaatgatggtacaataaacttt

SEQ ID NO: 2281684 - DNA, 25 bp, Homo sapien
tgttgagctgccgacagccctcagt

SEQ ID NO: 2281685 - DNA, 25 bp, Homo sapien
tagaaggatttagacagcgaatggc

SEQ ID NO: 2281686 - DNA, 25 bp, Homo sapien
ggctatggcagctatgtgtggccac

SEQ ID NO: 2281687 - DNA, 25 bp, Homo sapien
ccaaacgcagaagattagaaggatt

SEQ ID NO: 2281688 - DNA, 25 bp, Homo sapien
ctcaggaaatttagcattagtacag

SEQ ID NO: 2281689 - DNA, 25 bp, Homo sapien
caaacttactgaaagttgcaagcat

SEQ ID NO: 2281690 - DNA, 25 bp, Homo sapien
gcaagcatagtacaaggaacttcta

SEQ ID NO: 2281691 - DNA, 25 bp, Homo sapien
atcacagtgcaattatcaaactcag

SEQ ID NO: 2281692 - DNA, 25 bp, Homo sapien
cgggtccttctgaattcacggtcca

SEQ ID NO: 2281693 - DNA, 25 bp, Homo sapien
tcagtcaggccagattttaaacagg

SEQ ID NO: 2281694 - DNA, 25 bp, Homo sapien
caagagccttgttggaagcccgggt

SEQ ID NO: 2281695 - DNA, 25 bp, Homo sapien
ctgaagtcacacatgggagctaggg

SEQ ID NO: 2281696 - DNA, 25 bp, Homo sapien
gatacttttattgaacctatgagaa

SEQ ID NO: 2281697 - DNA, 25 bp, Homo sapien
gaaatcctgtctgtagtgctaaatt

SEQ ID NO: 2281698 - DNA, 25 bp, Homo sapien
ggctcagtataacatgtcaggattt

SEQ ID NO: 2281699 - DNA, 25 bp, Homo sapien
taattagtcctagcctatgaagcgt

SEQ ID NO: 2281700 - DNA, 25 bp, Homo sapien
ttctttactataagagccaggaagt

SEQ ID NO: 2281701 - DNA, 25 bp, Homo sapien
ggataaaagttaggcattagaacaa

SEQ ID NO: 2281702 - DNA, 25 bp, Homo sapien
tgtcatgcagtgggataaaagttag

SEQ ID NO: 2281703 - DNA, 25 bp, Homo sapien
gcctgcttcggcctcgttttatctt

SEQ ID NO: 2281704 - DNA, 25 bp, Homo sapien
agtacgctatcatcttcaggtcttt

SEQ ID NO: 2281705 - DNA, 25 bp, Homo sapien
tgttcctcaaaacaggttgtggctc

SEQ ID NO: 2281706 - DNA, 25 bp, Homo sapien
tcgtcttttgaacttccagtaggcc

SEQ ID NO: 2281707 - DNA, 25 bp, Homo sapien
cagttgtagaccttgatgattgtgc

SEQ ID NO: 2281708 - DNA, 25 bp, Homo sapien
tacagttcaccttatagatcttgtg

SEQ ID NO: 2281709 - DNA, 25 bp, Homo sapien
cacttgtgggtatttggatctcagt

SEQ ID NO: 2281710 - DNA, 25 bp, Homo sapien
catccataggaatgagaaagttcag

SEQ ID NO: 2281711 - DNA, 25 bp, Homo sapien
taaccttgacgtgaactacacttgc

SEQ ID NO: 2281712 - DNA, 25 bp, Homo sapien
tcctagtaaagcgaaagtcacggcg

SEQ ID NO: 2281713 - DNA, 25 bp, Homo sapien
aactaccaatcgctatccaaaggga

SEQ ID NO: 2281714 - DNA, 25 bp, Homo sapien
caaacgccgcaaggattgggagacc

SEQ ID NO: 2281715 - DNA, 25 bp, Homo sapien
aatagtttatattcccggtctgcca

SEQ ID NO: 2281716 - DNA, 25 bp, Homo sapien
tttgtttctcttgagtcgtaaggga

SEQ ID NO: 2281717 - DNA, 25 bp, Homo sapien
tctgtcaaccaactgcacagttttg

SEQ ID NO: 2281718 - DNA, 25 bp, Homo sapien
ctgagcttctgtcaaccaactgcac

SEQ ID NO: 2281719 - DNA, 25 bp, Homo sapien
tcttgagtcgtaagggaattgttta

SEQ ID NO: 2281720 - DNA, 25 bp, Homo sapien
tgcagttctttattacccttaggag

SEQ ID NO: 2281721 - DNA, 25 bp, Homo sapien
ggtagcataactggctgagggtact

SEQ ID NO: 2281722 - DNA, 25 bp, Homo sapien
tccagttgataaacttcctactgct

SEQ ID NO: 2281723 - DNA, 25 bp, Homo sapien
ggtacttattgattggcatgcccgt

SEQ ID NO: 2281724 - DNA, 25 bp, Homo sapien
gtgtttgcgttctttcttgaagccc

SEQ ID NO: 2281725 - DNA, 25 bp, Homo sapien
gaacggcatggctttctgacactga

SEQ ID NO: 2281726 - DNA, 25 bp, Homo sapien
ctgacactgagagttgaacctgctg

SEQ ID NO: 2281727 - DNA, 25 bp, Homo sapien
ctcatttacagcgtgtgaacggcat

SEQ ID NO: 2281728 - DNA, 25 bp, Homo sapien
cagaggctagtctggacacatgtgc

SEQ ID NO: 2281729 - DNA, 25 bp, Homo sapien
cagctgggatataaatattgtagcc

SEQ ID NO: 2281730 - DNA, 25 bp, Homo sapien
tgtagccttcatgtatctggtagag

SEQ ID NO: 2281731 - DNA, 25 bp, Homo sapien
acacatgtgcatcccaaagttccag

SEQ ID NO: 2281732 - DNA, 25 bp, Homo sapien
tattctgcctactgtacctgagctt

SEQ ID NO: 2281733 - DNA, 25 bp, Homo sapien
gtacctgagctttcccaactgggta

SEQ ID NO: 2281734 - DNA, 25 bp, Homo sapien
tactgtacctgagctttcccaactg

SEQ ID NO: 2281735 - DNA, 25 bp, Homo sapien
ttattctgcctactgtacctgagct

SEQ ID NO: 2281736 - DNA, 25 bp, Homo sapien
atcggaaaccggagtgaccagagga

SEQ ID NO: 2281737 - DNA, 25 bp, Homo sapien
ctgtcattatttcccctccgactgg

SEQ ID NO: 2281738 - DNA, 25 bp, Homo sapien
cgactgggccggtgccatcggaaac

SEQ ID NO: 2281739 - DNA, 25 bp, Homo sapien
atttccttgaggctggcacaccttg

SEQ ID NO: 2281740 - DNA, 25 bp, Homo sapien
aacctccaagtgtcatgatttaaaa

SEQ ID NO: 2281741 - DNA, 25 bp, Homo sapien
atgctggtgctaaacctccaagtgt

SEQ ID NO: 2281742 - DNA, 25 bp, Homo sapien
gctaaacctccaagtgtcatgattt

SEQ ID NO: 2281743 - DNA, 25 bp, Homo sapien
ggtgctaaacctccaagtgtcatga

SEQ ID NO: 2281744 - DNA, 25 bp, Homo sapien
gccaaggcaggtgaagcaccaactg

SEQ ID NO: 2281745 - DNA, 25 bp, Homo sapien
tgaagcaccaactgagaaccctgct

SEQ ID NO: 2281746 - DNA, 25 bp, Homo sapien
cacccagcagagcagtgctgagtaa

SEQ ID NO: 2281747 - DNA, 25 bp, Homo sapien
cagtgctgagtaacaccaggctcct

SEQ ID NO: 2281748 - DNA, 25 bp, Homo sapien
gcctggccctgatcacttgactttt

SEQ ID NO: 2281749 - DNA, 25 bp, Homo sapien
tctgttcgccgtggataccggcgtc

SEQ ID NO: 2281750 - DNA, 25 bp, Homo sapien
aaatcagcaagccaccagtggtcca

SEQ ID NO: 2281751 - DNA, 25 bp, Homo sapien
cagtggtccaaaccagccgtctgtt

SEQ ID NO: 2281752 - DNA, 25 bp, Homo sapien
cagacgggcactgttgcggattcgc

SEQ ID NO: 2281753 - DNA, 25 bp, Homo sapien
ctcccagacgggcactgttgcggat

SEQ ID NO: 2281754 - DNA, 25 bp, Homo sapien
ctgtctcccagacgggcactgttgc

SEQ ID NO: 2281755 - DNA, 25 bp, Homo sapien
gcggattcgcgtggtggaaaatgcc

SEQ ID NO: 2281756 - DNA, 25 bp, Homo sapien
gcgctggccgcctcccttgccggcg

SEQ ID NO: 2281757 - DNA, 25 bp, Homo sapien
ccggcgctcccaggtgagcgcgctg

SEQ ID NO: 2281758 - DNA, 25 bp, Homo sapien
tgccggcgctcccaggtgagcgcgc

SEQ ID NO: 2281759 - DNA, 25 bp, Homo sapien
cagcgctggccgcctcccttgccgg

SEQ ID NO: 2281760 - DNA, 25 bp, Homo sapien
cgctacatctcccacccgggctgga

SEQ ID NO: 2281761 - DNA, 25 bp, Homo sapien
gtgtgggcagctcgcgctacatctc

SEQ ID NO: 2281762 - DNA, 25 bp, Homo sapien
ggctgccgtagtggggcgggcccag

SEQ ID NO: 2281763 - DNA, 25 bp, Homo sapien
gccggccgcggagcacgtgtgggca

SEQ ID NO: 2281764 - DNA, 25 bp, Homo sapien
gcctgcgccgcgagatccgccccgg

SEQ ID NO: 2281765 - DNA, 25 bp, Homo sapien
gccgcgaccaccagccgcgctaacc

SEQ ID NO: 2281766 - DNA, 25 bp, Homo sapien
tgcgccgcgagatccgccccggcct

SEQ ID NO: 2281767 - DNA, 25 bp, Homo sapien
gcgctaaccgccgaccaaccgccac

SEQ ID NO: 2281768 - DNA, 25 bp, Homo sapien
gggaggagagccaatgcaccccgct

SEQ ID NO: 2281769 - DNA, 25 bp, Homo sapien
caacaaagggtcagcagcgcgggct

SEQ ID NO: 2281770 - DNA, 25 bp, Homo sapien
gattggagccatagaaagcgcaccg

SEQ ID NO: 2281771 - DNA, 25 bp, Homo sapien
gggctcctcggaacgctccagaaga

SEQ ID NO: 2281772 - DNA, 25 bp, Homo sapien
tgagagggtaaagcgcagagtagtt

SEQ ID NO: 2281773 - DNA, 25 bp, Homo sapien
gagggtaaagcgcagagtagtttgg

SEQ ID NO: 2281774 - DNA, 25 bp, Homo sapien
gtaaagcgcagagtagtttgggtgc

SEQ ID NO: 2281775 - DNA, 25 bp, Homo sapien
gtttgagagggtaaagcgcagagta

SEQ ID NO: 2281776 - DNA, 25 bp, Homo sapien
tcatctgcgtgttacagatgaaatt

SEQ ID NO: 2281777 - DNA, 25 bp, Homo sapien
aattatccgtatattacctttcagg

SEQ ID NO: 2281778 - DNA, 25 bp, Homo sapien
gctgtgctacgaatagctgctggtg

SEQ ID NO: 2281779 - DNA, 25 bp, Homo sapien
gagtaagttgccaaatagtcttaag

SEQ ID NO: 2281780 - DNA, 25 bp, Homo sapien
ttaagctttcaccagctggcagagg

SEQ ID NO: 2281781 - DNA, 25 bp, Homo sapien
cattaaatctgtgaggtcaatttcc

SEQ ID NO: 2281782 - DNA, 25 bp, Homo sapien
tcaaagggcatgtgggctcttcaac

SEQ ID NO: 2281783 - DNA, 25 bp, Homo sapien
tcctcgaggctaagagggctcagtt

SEQ ID NO: 2281784 - DNA, 25 bp, Homo sapien
tgagtagttttggaagccagtccag

SEQ ID NO: 2281785 - DNA, 25 bp, Homo sapien
gccagtccagcacaaattctaggaa

SEQ ID NO: 2281786 - DNA, 25 bp, Homo sapien
tccagaggttggagatcacacctgt

SEQ ID NO: 2281787 - DNA, 25 bp, Homo sapien
taagaaagtcaatggtcagtcctca

SEQ ID NO: 2281788 - DNA, 25 bp, Homo sapien
tcacaatcagtaatgtcaaaagaag

SEQ ID NO: 2281789 - DNA, 25 bp, Homo sapien
cacaatcagtaatgtcaaaagaagc

SEQ ID NO: 2281790 - DNA, 25 bp, Homo sapien
gaaaccagaagttcacaatcagtaa

SEQ ID NO: 2281791 - DNA, 25 bp, Homo sapien
gttttttcagtcatcatcatcataa

SEQ ID NO: 2281792 - DNA, 25 bp, Homo sapien
tttttcagtcatcatcatcataacc

SEQ ID NO: 2281793 - DNA, 25 bp, Homo sapien
tttcagtcatcatcatcataaccat

SEQ ID NO: 2281794 - DNA, 25 bp, Homo sapien
aaaagttttttcagtcatcatcatc

SEQ ID NO: 2281795 - DNA, 25 bp, Homo sapien
gaaggccgtacacaaggcaatgacg

SEQ ID NO: 2281796 - DNA, 25 bp, Homo sapien
gcaatgacggtgatggcaatgattc

SEQ ID NO: 2281797 - DNA, 25 bp, Homo sapien
tgacacagaagctggcgaaacgcgt

SEQ ID NO: 2281798 - DNA, 25 bp, Homo sapien
gattcccacgggagaaccaactgtg

SEQ ID NO: 2281799 - DNA, 25 bp, Homo sapien
cagggtggcgataacactgaacgga

SEQ ID NO: 2281800 - DNA, 25 bp, Homo sapien
aatccacagggtggcgataacactg

SEQ ID NO: 2281801 - DNA, 25 bp, Homo sapien
aagaaatccacagggtggcgataac

SEQ ID NO: 2281802 - DNA, 25 bp, Homo sapien
cgataacactgaacggaatgtgaat

SEQ ID NO: 2281803 - DNA, 25 bp, Homo sapien
tcttcctgggttgtgctcaaagcca

SEQ ID NO: 2281804 - DNA, 25 bp, Homo sapien
gaacattatctctaacgttcacacg

SEQ ID NO: 2281805 - DNA, 25 bp, Homo sapien
gaagaacattatctctaacgttcac

SEQ ID NO: 2281806 - DNA, 25 bp, Homo sapien
cattatctctaacgttcacacgaac

SEQ ID NO: 2281807 - DNA, 25 bp, Homo sapien
ggaagaagaacattatctctaacgt

SEQ ID NO: 2281808 - DNA, 25 bp, Homo sapien
cagcagttagtgtcaaatgcaagct

SEQ ID NO: 2281809 - DNA, 25 bp, Homo sapien
aaagatggcattggagacaaaactc

SEQ ID NO: 2281810 - DNA, 25 bp, Homo sapien
tgaaagctagttttaatagaaagat

SEQ ID NO: 2281811 - DNA, 25 bp, Homo sapien
tagaagagagtttccgaaggaggag

SEQ ID NO: 2281812 - DNA, 25 bp, Homo sapien
tttcgtggaggagctatacatatta

SEQ ID NO: 2281813 - DNA, 25 bp, Homo sapien
tggaggagctatacatattacaatg

SEQ ID NO: 2281814 - DNA, 25 bp, Homo sapien
ttcgtggaggagctatacatattac

SEQ ID NO: 2281815 - DNA, 25 bp, Homo sapien
cgtggaggagctatacatattacaa

SEQ ID NO: 2281816 - DNA, 25 bp, Homo sapien
gacgtctaaattgtggatgatcagc

SEQ ID NO: 2281817 - DNA, 25 bp, Homo sapien
tgggtgcctactgtgtattccagag

SEQ ID NO: 2281818 - DNA, 25 bp, Homo sapien
tacagacagctttaattcattcatt

SEQ ID NO: 2281819 - DNA, 25 bp, Homo sapien
tggaatgtagtataggacgtctaaa

SEQ ID NO: 2281820 - DNA, 25 bp, Homo sapien
ggccacatctaaaggtaccacagca

SEQ ID NO: 2281821 - DNA, 25 bp, Homo sapien
tctataaattcaggacacgtacccc

SEQ ID NO: 2281822 - DNA, 25 bp, Homo sapien
taagaggatgtatgcacctcaggcc

SEQ ID NO: 2281823 - DNA, 25 bp, Homo sapien
ttagaggcctgtttgcccagatggg

SEQ ID NO: 2281824 - DNA, 25 bp, Homo sapien
agagtaatgtttggactgagatgag

SEQ ID NO: 2281825 - DNA, 25 bp, Homo sapien
taagaacaacgattgacagagtaat

SEQ ID NO: 2281826 - DNA, 25 bp, Homo sapien
agattttaagaacaacgattgacag

SEQ ID NO: 2281827 - DNA, 25 bp, Homo sapien
actgagatgagtcaagaataagctc

SEQ ID NO: 2281828 - DNA, 25 bp, Homo sapien
caactgtcacatctacaggaatcat

SEQ ID NO: 2281829 - DNA, 25 bp, Homo sapien
ctaactttgaccttatagatatcaa

SEQ ID NO: 2281830 - DNA, 25 bp, Homo sapien
tcatcatttcaactgtcacatctac

SEQ ID NO: 2281831 - DNA, 25 bp, Homo sapien
agtttctaactttgaccttatagat

SEQ ID NO: 2281832 - DNA, 25 bp, Homo sapien
gccatcatctatgctctgagcagag

SEQ ID NO: 2281833 - DNA, 25 bp, Homo sapien
gcctttgagagcaggactagcagca

SEQ ID NO: 2281834 - DNA, 25 bp, Homo sapien
ggactagcagcaccttgatggaagc

SEQ ID NO: 2281835 - DNA, 25 bp, Homo sapien
gagcaggactagcagcaccttgatg

SEQ ID NO: 2281836 - DNA, 25 bp, Homo sapien
ccttctcctctttattgcctactat

SEQ ID NO: 2281837 - DNA, 25 bp, Homo sapien
gacatatcaggcgaatgcagctcag

SEQ ID NO: 2281838 - DNA, 25 bp, Homo sapien
ctccctgcggagacatatcaggcga

SEQ ID NO: 2281839 - DNA, 25 bp, Homo sapien
tcaggcgaatgcagctcagtgccac

SEQ ID NO: 2281840 - DNA, 25 bp, Homo sapien
tgcggagacatatcaggcgaatgca

SEQ ID NO: 2281841 - DNA, 25 bp, Homo sapien
tatttctcaacctggcaacgctgct

SEQ ID NO: 2281842 - DNA, 25 bp, Homo sapien
caagttatttctcaacctggcaacg

SEQ ID NO: 2281843 - DNA, 25 bp, Homo sapien
ggcaacgctgctccccttttgtgtg

SEQ ID NO: 2281844 - DNA, 25 bp, Homo sapien
ttctaccaagttatttctcaacctg

SEQ ID NO: 2281845 - DNA, 25 bp, Homo sapien
cagataaacctcaatggaattctaa

SEQ ID NO: 2281846 - DNA, 25 bp, Homo sapien
tccactaagatgtctgcacacagag

SEQ ID NO: 2281847 - DNA, 25 bp, Homo sapien
gtaaaacctacagcatccactaaga

SEQ ID NO: 2281848 - DNA, 25 bp, Homo sapien
cacatgaaagcaaggcgtacaaaac

SEQ ID NO: 2281849 - DNA, 25 bp, Homo sapien
gacaactttatcatttcacggagac

SEQ ID NO: 2281850 - DNA, 25 bp, Homo sapien
tattctcttgtgtgactgtaccatg

SEQ ID NO: 2281851 - DNA, 25 bp, Homo sapien
caaccactgttaattgatatgtagg

SEQ ID NO: 2281852 - DNA, 25 bp, Homo sapien
cactactacaggttcaagttgcagt

SEQ ID NO: 2281853 - DNA, 25 bp, Homo sapien
ttcaaaatcagcaacgaccaccccg

SEQ ID NO: 2281854 - DNA, 25 bp, Homo sapien
cccctggtgatagtggtaaccaaga

SEQ ID NO: 2281855 - DNA, 25 bp, Homo sapien
gaccaccaaaaccaggaggccatca

SEQ ID NO: 2281856 - DNA, 25 bp, Homo sapien
gacgaggacaccgtcaactctctct

SEQ ID NO: 2281857 - DNA, 25 bp, Homo sapien
gcttaggtgcccagagatggagtca

SEQ ID NO: 2281858 - DNA, 25 bp, Homo sapien
ccccgcacggttatgtggcttcagg

SEQ ID NO: 2281859 - DNA, 25 bp, Homo sapien
accaacttgaatacagagatgcctg

SEQ ID NO: 2281860 - DNA, 25 bp, Homo sapien
tagtttccacatagggcttaggtgc

SEQ ID NO: 2281861 - DNA, 25 bp, Homo sapien
tctatgcgtgttggaaaaggtctgg

SEQ ID NO: 2281862 - DNA, 25 bp, Homo sapien
taggcactaaaacgatcagaaagct

SEQ ID NO: 2281863 - DNA, 25 bp, Homo sapien
caattcatacttaagagtaggcact

SEQ ID NO: 2281864 - DNA, 25 bp, Homo sapien
tttcacagtagagggattggatgcc

SEQ ID NO: 2281865 - DNA, 25 bp, Homo sapien
ccaaactagttactgaccccaatga

SEQ ID NO: 2281866 - DNA, 25 bp, Homo sapien
gacatgacagttggttagctctctg

SEQ ID NO: 2281867 - DNA, 25 bp, Homo sapien
ggaaatcagatatctgcaagatagc

SEQ ID NO: 2281868 - DNA, 25 bp, Homo sapien
ggactggtaactagatttgctgaac

SEQ ID NO: 2281869 - DNA, 25 bp, Homo sapien
gacatctaggtatctggtgaatttc

SEQ ID NO: 2281870 - DNA, 25 bp, Homo sapien
cctttggtaactacatggtatgtta

SEQ ID NO: 2281871 - DNA, 25 bp, Homo sapien
tacctagtctatcgttgaagctttt

SEQ ID NO: 2281872 - DNA, 25 bp, Homo sapien
ctttactaccaagatatctgtttgg

SEQ ID NO: 2281873 - DNA, 25 bp, Homo sapien
tctttgctgttgtgtatggtgtttc

SEQ ID NO: 2281874 - DNA, 25 bp, Homo sapien
gccattctgaatagggtaaggtgat

SEQ ID NO: 2281875 - DNA, 25 bp, Homo sapien
tcctctgcatagatacagtagtaag

SEQ ID NO: 2281876 - DNA, 25 bp, Homo sapien
caatcagggtgtataagagctctcc

SEQ ID NO: 2281877 - DNA, 25 bp, Homo sapien
caagaccctgtgaccctgtgtttta

SEQ ID NO: 2281878 - DNA, 25 bp, Homo sapien
gattcaatgacaggtacgattccag

SEQ ID NO: 2281879 - DNA, 25 bp, Homo sapien
cctgttaatattgccctgtcctgga

SEQ ID NO: 2281880 - DNA, 25 bp, Homo sapien
tattcctgctaagtggtccttgaac

SEQ ID NO: 2281881 - DNA, 25 bp, Homo sapien
catcatcaggcaatatctgcctggc

SEQ ID NO: 2281882 - DNA, 25 bp, Homo sapien
cctgaagtcaccgaggcaggactgc

SEQ ID NO: 2281883 - DNA, 25 bp, Homo sapien
cctttttgacatgatggttgacctg

SEQ ID NO: 2281884 - DNA, 25 bp, Homo sapien
gctgccaaggagaaacctgtcttgc

SEQ ID NO: 2281885 - DNA, 25 bp, Homo sapien
cttccattacctctgtttttgatgt

SEQ ID NO: 2281886 - DNA, 25 bp, Homo sapien
tatggaggaccaattacagacctgc

SEQ ID NO: 2281887 - DNA, 25 bp, Homo sapien
gttaaaattggacggatgctgctgg

SEQ ID NO: 2281888 - DNA, 25 bp, Homo sapien
gacagtggttctccacacagggcaa

SEQ ID NO: 2281889 - DNA, 25 bp, Homo sapien
gaatagaccacgagatttccatgtg

SEQ ID NO: 2281890 - DNA, 25 bp, Homo sapien
cctcaaggtagccaacttctccaat

SEQ ID NO: 2281891 - DNA, 25 bp, Homo sapien
caatataggctatgagaaaatgcct

SEQ ID NO: 2281892 - DNA, 25 bp, Homo sapien
tgcagtaagttttgacattctctgg

SEQ ID NO: 2281893 - DNA, 25 bp, Homo sapien
tctctggacaggatccagctatttc

SEQ ID NO: 2281894 - DNA, 25 bp, Homo sapien
cactcccaactttatgctgggagaa

SEQ ID NO: 2281895 - DNA, 25 bp, Homo sapien
caactttatgctgggagaaacgtgt

SEQ ID NO: 2281896 - DNA, 25 bp, Homo sapien
ggtgtcactcccaactttatgctgg

SEQ ID NO: 2281897 - DNA, 25 bp, Homo sapien
gctctggtgtcactcccaactttat

SEQ ID NO: 2281898 - DNA, 25 bp, Homo sapien
ggccagcagggccactgacagcaga

SEQ ID NO: 2281899 - DNA, 25 bp, Homo sapien
gccagcagggccactgacagcagaa

SEQ ID NO: 2281900 - DNA, 25 bp, Homo sapien
ttcatctaagtcctgagctgagctg

SEQ ID NO: 2281901 - DNA, 25 bp, Homo sapien
catctaagtcctgagctgagctgaa

SEQ ID NO: 2281902 - DNA, 25 bp, Homo sapien
tcatctaagtcctgagctgagctga

SEQ ID NO: 2281903 - DNA, 25 bp, Homo sapien
cttcatctaagtcctgagctgagct

SEQ ID NO: 2281904 - DNA, 25 bp, Homo sapien
gccaccagacatagccacttagata

SEQ ID NO: 2281905 - DNA, 25 bp, Homo sapien
attcgcccgtaaaccccaatcagag

SEQ ID NO: 2281906 - DNA, 25 bp, Homo sapien
tgtagacagaggcaagtgtttaccc

SEQ ID NO: 2281907 - DNA, 25 bp, Homo sapien
gaatgaaggcacaacaggtcttctg

SEQ ID NO: 2281908 - DNA, 25 bp, Homo sapien
aagggaacgtcttcttggctgacat

SEQ ID NO: 2281909 - DNA, 25 bp, Homo sapien
ctgatattaccaagggaacgtcttc

SEQ ID NO: 2281910 - DNA, 25 bp, Homo sapien
taccaagggaacgtcttcttggctg

SEQ ID NO: 2281911 - DNA, 25 bp, Homo sapien
atattaccaagggaacgtcttcttg

SEQ ID NO: 2281912 - DNA, 25 bp, Homo sapien
ctatgaactgctcagagtctcctcc

SEQ ID NO: 2281913 - DNA, 25 bp, Homo sapien
caaaggtggtccctgacgctcctca

SEQ ID NO: 2281914 - DNA, 25 bp, Homo sapien
ctcatctatgaactgctcagagtct

SEQ ID NO: 2281915 - DNA, 25 bp, Homo sapien
ggtccctgacgctcctcatctatga

SEQ ID NO: 2281916 - DNA, 25 bp, Homo sapien
ggtccctgctgagggccatcattct

SEQ ID NO: 2281917 - DNA, 25 bp, Homo sapien
ctgagggccatcattctggttccca

SEQ ID NO: 2281918 - DNA, 25 bp, Homo sapien
caccagcagagggttgagattgctg

SEQ ID NO: 2281919 - DNA, 25 bp, Homo sapien
gcagagggttgagattgctgtcctc

SEQ ID NO: 2281920 - DNA, 25 bp, Homo sapien
gaggagggggatggcctccctgttg

SEQ ID NO: 2281921 - DNA, 25 bp, Homo sapien
tccctgttggggtggtccttgtggc

SEQ ID NO: 2281922 - DNA, 25 bp, Homo sapien
ggatggcctccctgttggggtggtc

SEQ ID NO: 2281923 - DNA, 25 bp, Homo sapien
aggaggagggggatggcctccctgt

SEQ ID NO: 2281924 - DNA, 25 bp, Homo sapien
tccctgttggggtggtccttgtggc

SEQ ID NO: 2281925 - DNA, 25 bp, Homo sapien
ggatggcctccctgttggggtggtc

SEQ ID NO: 2281926 - DNA, 25 bp, Homo sapien
ctcgaggaggacggggatggcctcc

SEQ ID NO: 2281927 - DNA, 25 bp, Homo sapien
atggcctccctgttggggtggtcct

SEQ ID NO: 2281928 - DNA, 25 bp, Homo sapien
tccctgttggggtggtccttgtggc

SEQ ID NO: 2281929 - DNA, 25 bp, Homo sapien
ctccctgttggggtggtccttgtgg

SEQ ID NO: 2281930 - DNA, 25 bp, Homo sapien
gaggtgggggaggaccttgctgatg

SEQ ID NO: 2281931 - DNA, 25 bp, Homo sapien
agactgcccctgtggaggtccttgt

SEQ ID NO: 2281932 - DNA, 25 bp, Homo sapien
tgaggagactgcccctgtggaggtc

SEQ ID NO: 2281933 - DNA, 25 bp, Homo sapien
ggtgggggaggaccttgctgatggc

SEQ ID NO: 2281934 - DNA, 25 bp, Homo sapien
gactgcaacatatcctgtaataggg

SEQ ID NO: 2281935 - DNA, 25 bp, Homo sapien
gaaagcagccttaatgttcagtgac

SEQ ID NO: 2281936 - DNA, 25 bp, Homo sapien
tccaaggaccatttagcaggaatac

SEQ ID NO: 2281937 - DNA, 25 bp, Homo sapien
cattggtttactgcggtgaggaaga

SEQ ID NO: 2281938 - DNA, 25 bp, Homo sapien
taaatcagcatactaaaggactgcc

SEQ ID NO: 2281939 - DNA, 25 bp, Homo sapien
tgttgcagatacacataaggttagc

SEQ ID NO: 2281940 - DNA, 25 bp, Homo sapien
aattgcccttcaaattatgctgccg

SEQ ID NO: 2281941 - DNA, 25 bp, Homo sapien
tggtaagaatcataggcagggacag

SEQ ID NO: 2281942 - DNA, 25 bp, Homo sapien
tgtgaaaaaagctatgtgcccattc

SEQ ID NO: 2281943 - DNA, 25 bp, Homo sapien
gatcttcgaatcctcacagctttga

SEQ ID NO: 2281944 - DNA, 25 bp, Homo sapien
taacactggtgaacggaattgactg

SEQ ID NO: 2281945 - DNA, 25 bp, Homo sapien
tcttgtggtgaagagaatacatcac

SEQ ID NO: 2281946 - DNA, 25 bp, Homo sapien
ttaacaataaacgtaatactgactc

SEQ ID NO: 2281947 - DNA, 25 bp, Homo sapien
caaagtgttaagtaatcctgatcgt

SEQ ID NO: 2281948 - DNA, 25 bp, Homo sapien
cctatcttcctgtgtatagtattgt

SEQ ID NO: 2281949 - DNA, 25 bp, Homo sapien
caataaacgtaatactgactctagc

SEQ ID NO: 2281950 - DNA, 25 bp, Homo sapien
gaagaaacaagacttgcagttctga

SEQ ID NO: 2281951 - DNA, 25 bp, Homo sapien
cataccctttactttgtccctggca

SEQ ID NO: 2281952 - DNA, 25 bp, Homo sapien
tccagtcttattgtattaaccagca

SEQ ID NO: 2281953 - DNA, 25 bp, Homo sapien
gcttcttgtgacttcggtcttcttg

SEQ ID NO: 2281954 - DNA, 25 bp, Homo sapien
caagggaagaaagatctcttcggtt

SEQ ID NO: 2281955 - DNA, 25 bp, Homo sapien
tatttacattcgttttaattgtgga

SEQ ID NO: 2281956 - DNA, 25 bp, Homo sapien
caatgggtggtgtcataaagagcat

SEQ ID NO: 2281957 - DNA, 25 bp, Homo sapien
gaactgtattgactgggtcaaggga

SEQ ID NO: 2281958 - DNA, 25 bp, Homo sapien
gatgcagtttgaaggcaaagagccc

SEQ ID NO: 2281959 - DNA, 25 bp, Homo sapien
ctttgatctctcacttgagtaatga

SEQ ID NO: 2281960 - DNA, 25 bp, Homo sapien
cacttgagtaatgatgcagtttgaa

SEQ ID NO: 2281961 - DNA, 25 bp, Homo sapien
gcagtttgaaggcaaagagccccat

SEQ ID NO: 2281962 - DNA, 25 bp, Homo sapien
taagatgcgaccaaaagaaattgtc

SEQ ID NO: 2281963 - DNA, 25 bp, Homo sapien
ttttggaattttaagatgcgaccaa

SEQ ID NO: 2281964 - DNA, 25 bp, Homo sapien
ttaatgctttgccaagcttttggaa

SEQ ID NO: 2281965 - DNA, 25 bp, Homo sapien
ctgtgtctaatcatatcgttttgga

SEQ ID NO: 2281966 - DNA, 25 bp, Homo sapien
gcagaagtgacaaagccctgacata

SEQ ID NO: 2281967 - DNA, 25 bp, Homo sapien
aatatctgcgttggtgttctctaaa

SEQ ID NO: 2281968 - DNA, 25 bp, Homo sapien
ggaagataccacatcctagagagca

SEQ ID NO: 2281969 - DNA, 25 bp, Homo sapien
gttttaatctgctgacccacccatg

SEQ ID NO: 2281970 - DNA, 25 bp, Homo sapien
gaagagaattaagagtgttgttctg

SEQ ID NO: 2281971 - DNA, 25 bp, Homo sapien
taagagtgttgttctggtgatactg

SEQ ID NO: 2281972 - DNA, 25 bp, Homo sapien
ctgatttgtaatcttgctgtgataa

SEQ ID NO: 2281973 - DNA, 25 bp, Homo sapien
tttgtaatcttgctgtgataaccat

SEQ ID NO: 2281974 - DNA, 25 bp, Homo sapien
tttctccaaccttatttctctccac

SEQ ID NO: 2281975 - DNA, 25 bp, Homo sapien
ttgccaatttctccaaccttatttc

SEQ ID NO: 2281976 - DNA, 25 bp, Homo sapien
tgctcaagattgccaatttctccaa

SEQ ID NO: 2281977 - DNA, 25 bp, Homo sapien
gctcaagattgccaatttctccaac

SEQ ID NO: 2281978 - DNA, 25 bp, Homo sapien
gggctgtaacgaaccatttcagcat

SEQ ID NO: 2281979 - DNA, 25 bp, Homo sapien
attgttgcttctaatgcctgggctg

SEQ ID NO: 2281980 - DNA, 25 bp, Homo sapien
gcctgggctgtaacgaaccatttca

SEQ ID NO: 2281981 - DNA, 25 bp, Homo sapien
tgcttctaatgcctgggctgtaacg

SEQ ID NO: 2281982 - DNA, 25 bp, Homo sapien
ggcttcatagccctagtaaatgtca

SEQ ID NO: 2281983 - DNA, 25 bp, Homo sapien
ggaaatgttgccaatggcttcatag

SEQ ID NO: 2281984 - DNA, 25 bp, Homo sapien
gtcattgactgggttaacacacgaa

SEQ ID NO: 2281985 - DNA, 25 bp, Homo sapien
gaacaagtgttactaagcctgcatt

SEQ ID NO: 2281986 - DNA, 25 bp, Homo sapien
gaatatgtccctatttgcgtactag

SEQ ID NO: 2281987 - DNA, 25 bp, Homo sapien
taacaactgaagtcactaaagataa

SEQ ID NO: 2281988 - DNA, 25 bp, Homo sapien
tatttgcgtactagcaaatgaggat

SEQ ID NO: 2281989 - DNA, 25 bp, Homo sapien
ctgaaagtgaatatgtccctatttg

SEQ ID NO: 2281990 - DNA, 25 bp, Homo sapien
aaatattaagttgaatatgcaagaa

SEQ ID NO: 2281991 - DNA, 25 bp, Homo sapien
cttgttggggtaattatacaattga

SEQ ID NO: 2281992 - DNA, 25 bp, Homo sapien
caataaagggtcttattgaaaatat

SEQ ID NO: 2281993 - DNA, 25 bp, Homo sapien
taatgtcttgttggggtaattatac

SEQ ID NO: 2281994 - DNA, 25 bp, Homo sapien
taccacatatatgtacttaactatc

SEQ ID NO: 2281995 - DNA, 25 bp, Homo sapien
atttgtaccacatatatgtacttaa

SEQ ID NO: 2281996 - DNA, 25 bp, Homo sapien
tgtaccacatatatgtacttaacta

SEQ ID NO: 2281997 - DNA, 25 bp, Homo sapien
ccacatatatgtacttaactatcat

SEQ ID NO: 2281998 - DNA, 25 bp, Homo sapien
ttttatcaggaaatcattgttgttt

SEQ ID NO: 2281999 - DNA, 25 bp, Homo sapien
agcttttatcaggaaatcattgttg

SEQ ID NO: 2282000 - DNA, 25 bp, Homo sapien
ttatcaggaaatcattgttgttttc

SEQ ID NO: 2282001 - DNA, 25 bp, Homo sapien
gcttttatcaggaaatcattgttgt

SEQ ID NO: 2282002 - DNA, 25 bp, Homo sapien
atagattagaagtaagaatttttgg

SEQ ID NO: 2282003 - DNA, 25 bp, Homo sapien
tattattacattggtatgcaactgt

SEQ ID NO: 2282004 - DNA, 25 bp, Homo sapien
gtttactctgggtcatattattaca

SEQ ID NO: 2282005 - DNA, 25 bp, Homo sapien
taatgtctcagcaataaccaagcat

SEQ ID NO: 2282006 - DNA, 25 bp, Homo sapien
aatgtctgggcagtaatcaaccatt

SEQ ID NO: 2282007 - DNA, 25 bp, Homo sapien
aatcaaccatttcagcaactggctt

SEQ ID NO: 2282008 - DNA, 25 bp, Homo sapien
ttgctactagcctcagcatatttta

SEQ ID NO: 2282009 - DNA, 25 bp, Homo sapien
gcaactggcttgctactagcctcag

SEQ ID NO: 2282010 - DNA, 25 bp, Homo sapien
ctcttggtttagcagagttgattta

SEQ ID NO: 2282011 - DNA, 25 bp, Homo sapien
ggtttagcagagttgatttatcagt

SEQ ID NO: 2282012 - DNA, 25 bp, Homo sapien
tagcagagttgatttatcagttatg

SEQ ID NO: 2282013 - DNA, 25 bp, Homo sapien
ttcccacactcttggtttagcagag

SEQ ID NO: 2282014 - DNA, 25 bp, Homo sapien
agcatctggcttgctgctagcctca

SEQ ID NO: 2282015 - DNA, 25 bp, Homo sapien
taatcaaccatttcagcatctggct

SEQ ID NO: 2282016 - DNA, 25 bp, Homo sapien
gctgctagcctcagcatattttatt

SEQ ID NO: 2282017 - DNA, 25 bp, Homo sapien
tcagcaataatcaaccatttcagca

SEQ ID NO: 2282018 - DNA, 25 bp, Homo sapien
aaatattaagttgaatatgcaagaa

SEQ ID NO: 2282019 - DNA, 25 bp, Homo sapien
cttgttggggtaattatacaattga

SEQ ID NO: 2282020 - DNA, 25 bp, Homo sapien
taatgtcttgttggggtaattatac

SEQ ID NO: 2282021 - DNA, 25 bp, Homo sapien
caataaagggtcttattgaaaatat

SEQ ID NO: 2282022 - DNA, 25 bp, Homo sapien
gaagaatccccagtatggaagccat

SEQ ID NO: 2282023 - DNA, 25 bp, Homo sapien
ctaagctgggtttgatggatggctc

SEQ ID NO: 2282024 - DNA, 25 bp, Homo sapien
gatgggccaaattcggcatcttgga

SEQ ID NO: 2282025 - DNA, 25 bp, Homo sapien
tacttgcgaggcgatattctcatgg

SEQ ID NO: 2282026 - DNA, 25 bp, Homo sapien
caggaatcaggtacacatagatgtt

SEQ ID NO: 2282027 - DNA, 25 bp, Homo sapien
tcaggaatcaggtacacatagatgt

SEQ ID NO: 2282028 - DNA, 25 bp, Homo sapien
ttcaggaatcaggtacacatagatg

SEQ ID NO: 2282029 - DNA, 25 bp, Homo sapien
aattcaggaatcaggtacacataga

SEQ ID NO: 2282030 - DNA, 25 bp, Homo sapien
catccactggcatattgagatgctt

SEQ ID NO: 2282031 - DNA, 25 bp, Homo sapien
tcatccactggcatattgagatgct

SEQ ID NO: 2282032 - DNA, 25 bp, Homo sapien
atccactggcatattgagatgcttt

SEQ ID NO: 2282033 - DNA, 25 bp, Homo sapien
tcataacagtcatattccttgtcca

SEQ ID NO: 2282034 - DNA, 25 bp, Homo sapien
ctttcataacagtcatattccttgt

SEQ ID NO: 2282035 - DNA, 25 bp, Homo sapien
ttcataacagtcatattccttgtcc

SEQ ID NO: 2282036 - DNA, 25 bp, Homo sapien
cataacagtcatattccttgtccat

SEQ ID NO: 2282037 - DNA, 25 bp, Homo sapien
atttggctctaggtgccaagggcac

SEQ ID NO: 2282038 - DNA, 25 bp, Homo sapien
agcatttggctctaggtgccaaggg

SEQ ID NO: 2282039 - DNA, 25 bp, Homo sapien
ccaagggcacatgtgacaagaaggt

SEQ ID NO: 2282040 - DNA, 25 bp, Homo sapien
gaaggtgccagctttataaaccttg

SEQ ID NO: 2282041 - DNA, 25 bp, Homo sapien
ggatatagtcaaagcgaatttagca

SEQ ID NO: 2282042 - DNA, 25 bp, Homo sapien
gacatcaattcttgccaaattcagg

SEQ ID NO: 2282043 - DNA, 25 bp, Homo sapien
taaagacgcacagaatgaggaacat

SEQ ID NO: 2282044 - DNA, 25 bp, Homo sapien
agtttattatgctaagggcctggga

SEQ ID NO: 2282045 - DNA, 25 bp, Homo sapien
tttcatcaaccacttcccctagggc

SEQ ID NO: 2282046 - DNA, 25 bp, Homo sapien
cgttttgactttcatcaaccacttc

SEQ ID NO: 2282047 - DNA, 25 bp, Homo sapien
ccctagggccagagactcattaaac

SEQ ID NO: 2282048 - DNA, 25 bp, Homo sapien
cccctagggccagagactcattaaa

SEQ ID NO: 2282049 - DNA, 25 bp, Homo sapien
attctctgtaattgttccaacttta

SEQ ID NO: 2282050 - DNA, 25 bp, Homo sapien
ctaatattctctgtaattgttccaa

SEQ ID NO: 2282051 - DNA, 25 bp, Homo sapien
tattctctgtaattgttccaacttt

SEQ ID NO: 2282052 - DNA, 25 bp, Homo sapien
aatattctctgtaattgttccaact

SEQ ID NO: 2282053 - DNA, 25 bp, Homo sapien
gcaggacggtaagcaaagcggctcc

SEQ ID NO: 2282054 - DNA, 25 bp, Homo sapien
cccagcgtctgtagcgagggttgcc

SEQ ID NO: 2282055 - DNA, 25 bp, Homo sapien
ggacctcctagcgacggctgggacc

SEQ ID NO: 2282056 - DNA, 25 bp, Homo sapien
gagggttgccgcagggcccgcggac

SEQ ID NO: 2282057 - DNA, 25 bp, Homo sapien
ctgcaatcggatgttgaggatcacc

SEQ ID NO: 2282058 - DNA, 25 bp, Homo sapien
ccgagcccgcgacgtagaagtacgg

SEQ ID NO: 2282059 - DNA, 25 bp, Homo sapien
gcagaagacgccgtacgaggtgggt

SEQ ID NO: 2282060 - DNA, 25 bp, Homo sapien
ctgacggccaaggaggacggagccg

SEQ ID NO: 2282061 - DNA, 25 bp, Homo sapien
tgaggagctccgctagcagctaaga

SEQ ID NO: 2282062 - DNA, 25 bp, Homo sapien
gaaataatgcatcctctgcgctttg

SEQ ID NO: 2282063 - DNA, 25 bp, Homo sapien
tcttgcttacaatccagtccgagga

SEQ ID NO: 2282064 - DNA, 25 bp, Homo sapien
cacaggatcactgaagtagagccca

SEQ ID NO: 2282065 - DNA, 25 bp, Homo sapien
tatatcagatcttgattggctcacc

SEQ ID NO: 2282066 - DNA, 25 bp, Homo sapien
cctcccagcgttatagaatcatttg

SEQ ID NO: 2282067 - DNA, 25 bp, Homo sapien
cagccaagctttgtgctactatggg

SEQ ID NO: 2282068 - DNA, 25 bp, Homo sapien
tattcacagttgaggtataccgtgt

SEQ ID NO: 2282069 - DNA, 25 bp, Homo sapien
tgtaggaggcaaactataccccaag

SEQ ID NO: 2282070 - DNA, 25 bp, Homo sapien
cacatactgttactaccgggtgtaa

SEQ ID NO: 2282071 - DNA, 25 bp, Homo sapien
taatggatattacctggaagtgtgc

SEQ ID NO: 2282072 - DNA, 25 bp, Homo sapien
cactgaattgcatcatgtaggaggc

SEQ ID NO: 2282073 - DNA, 25 bp, Homo sapien
tctggatcaatcaacgtgcatgatg

SEQ ID NO: 2282074 - DNA, 25 bp, Homo sapien
agcccaatttatgggcaataaagtg

SEQ ID NO: 2282075 - DNA, 25 bp, Homo sapien
gatcaatcaacgtgcatgatggcct

SEQ ID NO: 2282076 - DNA, 25 bp, Homo sapien
taactataccacctatgtctctgct

SEQ ID NO: 2282077 - DNA, 25 bp, Homo sapien
tccattctgaggacaacgttctttc

SEQ ID NO: 2282078 - DNA, 25 bp, Homo sapien
caaaagctattgatgtcctgccaga

SEQ ID NO: 2282079 - DNA, 25 bp, Homo sapien
tttagttagggatcctcaggacagg

SEQ ID NO: 2282080 - DNA, 25 bp, Homo sapien
tctgggtagcacaggaaagtgtttc

SEQ ID NO: 2282081 - DNA, 25 bp, Homo sapien
cctttgtaggataagtgcaaaatca

SEQ ID NO: 2282082 - DNA, 25 bp, Homo sapien
ccatgaatactagtgtgtcacacca

SEQ ID NO: 2282083 - DNA, 25 bp, Homo sapien
tcaaaaccacactttgacacaggat

SEQ ID NO: 2282084 - DNA, 25 bp, Homo sapien
gaattcaagctatcctacctttgta

SEQ ID NO: 2282085 - DNA, 25 bp, Homo sapien
gatacttgtttcacagtcaagccta

SEQ ID NO: 2282086 - DNA, 25 bp, Homo sapien
gaatgtaacattttctgtaaggagg

SEQ ID NO: 2282087 - DNA, 25 bp, Homo sapien
ccccatcttaggtggcagaccatgt

SEQ ID NO: 2282088 - DNA, 25 bp, Homo sapien
tagtgggactgccaactaagttagc

SEQ ID NO: 2282089 - DNA, 25 bp, Homo sapien
cagtctgggagatctataggcacaa

SEQ ID NO: 2282090 - DNA, 25 bp, Homo sapien
tgtgctgcctcacaaaaccagtctg

SEQ ID NO: 2282091 - DNA, 25 bp, Homo sapien
tccgagatcatggagttaggaccag

SEQ ID NO: 2282092 - DNA, 25 bp, Homo sapien
gaccagaagttacgcaagttaggac

SEQ ID NO: 2282093 - DNA, 25 bp, Homo sapien
aaactcctattggaaggtcggtgtg

SEQ ID NO: 2282094 - DNA, 25 bp, Homo sapien
tttctggatcaatgttgatataaaa

SEQ ID NO: 2282095 - DNA, 25 bp, Homo sapien
cctattggaaggtcggtgtgaatga

SEQ ID NO: 2282096 - DNA, 25 bp, Homo sapien
ggtcggtgtgaatgaagcccacctt

SEQ ID NO: 2282097 - DNA, 25 bp, Homo sapien
ttctggagctatgacaaaggcagtg

SEQ ID NO: 2282098 - DNA, 25 bp, Homo sapien
gacaaaggcagtgtaaagtatctct

SEQ ID NO: 2282099 - DNA, 25 bp, Homo sapien
tcaagtggggcgttctttctggagc

SEQ ID NO: 2282100 - DNA, 25 bp, Homo sapien
taaagtatctctacgactgtaacca

SEQ ID NO: 2282101 - DNA, 25 bp, Homo sapien
ctcataagtcttgggagggaactga

SEQ ID NO: 2282102 - DNA, 25 bp, Homo sapien
aaatcagctatttttccagggatcc

SEQ ID NO: 2282103 - DNA, 25 bp, Homo sapien
tatttcgaaaacagtatctgggagg

SEQ ID NO: 2282104 - DNA, 25 bp, Homo sapien
tgcttttactgccataggcctgaaa

SEQ ID NO: 2282105 - DNA, 25 bp, Homo sapien
tcttggttaatgtggagtttgtcag

SEQ ID NO: 2282106 - DNA, 25 bp, Homo sapien
tcagtgaatcagtatcagaaggtag

SEQ ID NO: 2282107 - DNA, 25 bp, Homo sapien
ttgatctcttggttaatgtggagtt

SEQ ID NO: 2282108 - DNA, 25 bp, Homo sapien
tactggtttgtctcaatattggtga

SEQ ID NO: 2282109 - DNA, 25 bp, Homo sapien
tattattctaccatgagagttgagg

SEQ ID NO: 2282110 - DNA, 25 bp, Homo sapien
agtgcctggcaatgctatttattat

SEQ ID NO: 2282111 - DNA, 25 bp, Homo sapien
ggattacaggttcctacgaccacat

SEQ ID NO: 2282112 - DNA, 25 bp, Homo sapien
tgcccggcctgattgttagaacaca

SEQ ID NO: 2282113 - DNA, 25 bp, Homo sapien
gcaaagttcaatgcgttttggcaaa

SEQ ID NO: 2282114 - DNA, 25 bp, Homo sapien
tctttgaactgcaaagttcaatgcg

SEQ ID NO: 2282115 - DNA, 25 bp, Homo sapien
tttcactctttgaactgcaaagttc

SEQ ID NO: 2282116 - DNA, 25 bp, Homo sapien
cacaattacaatattgtacaggata

SEQ ID NO: 2282117 - DNA, 25 bp, Homo sapien
gagggttgtcaatcttttccagaga

SEQ ID NO: 2282118 - DNA, 25 bp, Homo sapien
tccagagatgctcatgaacaggctc

SEQ ID NO: 2282119 - DNA, 25 bp, Homo sapien
tacagtagaagtgtgagccagtacg

SEQ ID NO: 2282120 - DNA, 25 bp, Homo sapien
tctgtgccattgtagagattcgcct

SEQ ID NO: 2282121 - DNA, 25 bp, Homo sapien
taagcacaagcttttagaacccctg

SEQ ID NO: 2282122 - DNA, 25 bp, Homo sapien
gatcagtgctgaagccataggagag

SEQ ID NO: 2282123 - DNA, 25 bp, Homo sapien
gaacccctgccgtaaacataattga

SEQ ID NO: 2282124 - DNA, 25 bp, Homo sapien
cctggtgggaaaaagtgctcattgc

SEQ ID NO: 2282125 - DNA, 25 bp, Homo sapien
catggcattcagtatccctttcaag

SEQ ID NO: 2282126 - DNA, 25 bp, Homo sapien
ggcccagttccatgaatgtgagtac

SEQ ID NO: 2282127 - DNA, 25 bp, Homo sapien
ttccaaagatggagatataaggccc

SEQ ID NO: 2282128 - DNA, 25 bp, Homo sapien
gctgctagcacagaaagatcttcca

SEQ ID NO: 2282129 - DNA, 25 bp, Homo sapien
ggaggtgtcctaaaagaacactgca

SEQ ID NO: 2282130 - DNA, 25 bp, Homo sapien
tagtcttattctctgcggcgctttc

SEQ ID NO: 2282131 - DNA, 25 bp, Homo sapien
gaatatctactgtgtccccactctg

SEQ ID NO: 2282132 - DNA, 25 bp, Homo sapien
cagagtccttgcagcataatgtggt

SEQ ID NO: 2282133 - DNA, 25 bp, Homo sapien
ttcacaccatccagagatgatgctg

SEQ ID NO: 2282134 - DNA, 25 bp, Homo sapien
tttcacaccatccagagatgatgct

SEQ ID NO: 2282135 - DNA, 25 bp, Homo sapien
tcacaccatccagagatgatgctga

SEQ ID NO: 2282136 - DNA, 25 bp, Homo sapien
gcccaaatccatttgggcatttctg

SEQ ID NO: 2282137 - DNA, 25 bp, Homo sapien
actacaagagcaaggggcagcttca

SEQ ID NO: 2282138 - DNA, 25 bp, Homo sapien
ctacaagagcaaggggcagcttcat

SEQ ID NO: 2282139 - DNA, 25 bp, Homo sapien
gcagcttcatggcccaaatccattt

SEQ ID NO: 2282140 - DNA, 25 bp, Homo sapien
gtttacaatcagtgggggagtcaga

SEQ ID NO: 2282141 - DNA, 25 bp, Homo sapien
gcatggagtgaatattcagtcaatg

SEQ ID NO: 2282142 - DNA, 25 bp, Homo sapien
ccttcgtttacaatcagtgggggag

SEQ ID NO: 2282143 - DNA, 25 bp, Homo sapien
cttcaaagcatggagtgaatattca

SEQ ID NO: 2282144 - DNA, 25 bp, Homo sapien
gtttctcctttgcagaacatgctcc

SEQ ID NO: 2282145 - DNA, 25 bp, Homo sapien
tcctttgcagaacatgctccctctg

SEQ ID NO: 2282146 - DNA, 25 bp, Homo sapien
caaattcttgctcttccactagttt

SEQ ID NO: 2282147 - DNA, 25 bp, Homo sapien
ttattggtggtcaaaggcctactga

SEQ ID NO: 2282148 - DNA, 25 bp, Homo sapien
gaccatataacccaattaatttaca

SEQ ID NO: 2282149 - DNA, 25 bp, Homo sapien
tgaccatataacccaattaatttac

SEQ ID NO: 2282150 - DNA, 25 bp, Homo sapien
caattaatttacagatgctggcaag

SEQ ID NO: 2282151 - DNA, 25 bp, Homo sapien
acccaattaatttacagatgctggc

SEQ ID NO: 2282152 - DNA, 25 bp, Homo sapien
tgcaactggtgacatcggattcctc

SEQ ID NO: 2282153 - DNA, 25 bp, Homo sapien
ctttctgatgacaatgggaccttga

SEQ ID NO: 2282154 - DNA, 25 bp, Homo sapien
tgtccacatgtcgtgaggaagccca

SEQ ID NO: 2282155 - DNA, 25 bp, Homo sapien
caatgtgtggcagatcataccttcc

SEQ ID NO: 2282156 - DNA, 25 bp, Homo sapien
aagccccgtgtgcaataggtatttc

SEQ ID NO: 2282157 - DNA, 25 bp, Homo sapien
taagccccgtgtgcaataggtattt

SEQ ID NO: 2282158 - DNA, 25 bp, Homo sapien
ttaagccccgtgtgcaataggtatt

SEQ ID NO: 2282159 - DNA, 25 bp, Homo sapien
ttttaagccccgtgtgcaataggta

SEQ ID NO: 2282160 - DNA, 25 bp, Homo sapien
taagctaacaaaagatatctaatgg

SEQ ID NO: 2282161 - DNA, 25 bp, Homo sapien
gttaattttaaaggcgtagctcatc

SEQ ID NO: 2282162 - DNA, 25 bp, Homo sapien
aagtacatgattaagctaacaaaag

SEQ ID NO: 2282163 - DNA, 25 bp, Homo sapien
taaaggcgtagctcatcctactcac

SEQ ID NO: 2282164 - DNA, 25 bp, Homo sapien
tctagatgcccaatctcctgctgca

SEQ ID NO: 2282165 - DNA, 25 bp, Homo sapien
ctctagatgcccaatctcctgctgc

SEQ ID NO: 2282166 - DNA, 25 bp, Homo sapien
tcatggtcctgttacatctaatgca

SEQ ID NO: 2282167 - DNA, 25 bp, Homo sapien
gcagcagattcttccgataaaatta

SEQ ID NO: 2282168 - DNA, 25 bp, Homo sapien
agtctgccttgtaaagtcacttgaa

SEQ ID NO: 2282169 - DNA, 25 bp, Homo sapien
taggaacacaggtaatagcagtctg

SEQ ID NO: 2282170 - DNA, 25 bp, Homo sapien
gaattcctggcatcaatagtcctcc

SEQ ID NO: 2282171 - DNA, 25 bp, Homo sapien
gccagcatgctaggtgtatagtcac

SEQ ID NO: 2282172 - DNA, 25 bp, Homo sapien
gatcaccttctgaattagatgggac

SEQ ID NO: 2282173 - DNA, 25 bp, Homo sapien
ggtgccaatcaccatgcaaggttga

SEQ ID NO: 2282174 - DNA, 25 bp, Homo sapien
ttcagctcacacacggtgcactgca

SEQ ID NO: 2282175 - DNA, 25 bp, Homo sapien
ctccagcacctgtcttttactgaca

SEQ ID NO: 2282176 - DNA, 25 bp, Homo sapien
tgcttcagctcacacacggtgcact

SEQ ID NO: 2282177 - DNA, 25 bp, Homo sapien
tatttggccgtcttggctccagcct

SEQ ID NO: 2282178 - DNA, 25 bp, Homo sapien
tctatcagcccatctaagcaagcct

SEQ ID NO: 2282179 - DNA, 25 bp, Homo sapien
gagccctaactatctctggaattgg

SEQ ID NO: 2282180 - DNA, 25 bp, Homo sapien
tacctagttcattctgctgtggcca

SEQ ID NO: 2282181 - DNA, 25 bp, Homo sapien
tgaagtcctatgtattgagccctaa

SEQ ID NO: 2282182 - DNA, 25 bp, Homo sapien
gtaagaagacctcaccccttcaaga

SEQ ID NO: 2282183 - DNA, 25 bp, Homo sapien
tgatataatctactggtcatggcag

SEQ ID NO: 2282184 - DNA, 25 bp, Homo sapien
ttcaagaaaggatgtcaaggtacca

SEQ ID NO: 2282185 - DNA, 25 bp, Homo sapien
tcatggcagtaacgaagttctaccc

SEQ ID NO: 2282186 - DNA, 25 bp, Homo sapien
ctgctttaaccccatcctcactgac

SEQ ID NO: 2282187 - DNA, 25 bp, Homo sapien
gctttaaccccatcctcactgactg

SEQ ID NO: 2282188 - DNA, 25 bp, Homo sapien
tgctttaaccccatcctcactgact

SEQ ID NO: 2282189 - DNA, 25 bp, Homo sapien
cctgctttaaccccatcctcactga

SEQ ID NO: 2282190 - DNA, 25 bp, Homo sapien
aaaccagcgcattgtaaagttgaag

SEQ ID NO: 2282191 - DNA, 25 bp, Homo sapien
tgggcaaaccactctttagttgttc

SEQ ID NO: 2282192 - DNA, 25 bp, Homo sapien
gttctagacaaaccagcgcattgta

SEQ ID NO: 2282193 - DNA, 25 bp, Homo sapien
tcagcacaactctgtccatgttcaa

SEQ ID NO: 2282194 - DNA, 25 bp, Homo sapien
gagggaagagacactagtgctacat

SEQ ID NO: 2282195 - DNA, 25 bp, Homo sapien
caaatgccagaagggtttgtcccac

SEQ ID NO: 2282196 - DNA, 25 bp, Homo sapien
taatccactgggtggttcaaatgcc

SEQ ID NO: 2282197 - DNA, 25 bp, Homo sapien
caagctttggacattggagggaaga

SEQ ID NO: 2282198 - DNA, 25 bp, Homo sapien
ggcaggaatgttaccaagagcagct

SEQ ID NO: 2282199 - DNA, 25 bp, Homo sapien
caagtggagtgctaagggctgcaac

SEQ ID NO: 2282200 - DNA, 25 bp, Homo sapien
tcctacaggagagagtatcacggcc

SEQ ID NO: 2282201 - DNA, 25 bp, Homo sapien
ctcgatttgctaaagggcagtgcct

SEQ ID NO: 2282202 - DNA, 25 bp, Homo sapien
gaggaaagacagcattgctaacatt

SEQ ID NO: 2282203 - DNA, 25 bp, Homo sapien
aggaaagacagcattgctaacattg

SEQ ID NO: 2282204 - DNA, 25 bp, Homo sapien
cgccgtaagttgtagaggaaagaca

SEQ ID NO: 2282205 - DNA, 25 bp, Homo sapien
cgtaagttgtagaggaaagacagca

SEQ ID NO: 2282206 - DNA, 25 bp, Homo sapien
tcatgagctaccaccatattctctc

SEQ ID NO: 2282207 - DNA, 25 bp, Homo sapien
gtgtactcagctaagtgaacaagat

SEQ ID NO: 2282208 - DNA, 25 bp, Homo sapien
caagagtgtactcagctaagtgaac

SEQ ID NO: 2282209 - DNA, 25 bp, Homo sapien
tcttctccccaagagtgtactcagc

SEQ ID NO: 2282210 - DNA, 25 bp, Homo sapien
ggtagcttgatacctgatatttact

SEQ ID NO: 2282211 - DNA, 25 bp, Homo sapien
gtctctggtagcttgatacctgata

SEQ ID NO: 2282212 - DNA, 25 bp, Homo sapien
actccttcctgatatgctaatctct

SEQ ID NO: 2282213 - DNA, 25 bp, Homo sapien
ctgatatgctaatctcttttcatgc

SEQ ID NO: 2282214 - DNA, 25 bp, Homo sapien
ctgacagggcctctttcagctcctc

SEQ ID NO: 2282215 - DNA, 25 bp, Homo sapien
cctgacagggcctctttcagctcct

SEQ ID NO: 2282216 - DNA, 25 bp, Homo sapien
ccttactccctgacagggcctcttt

SEQ ID NO: 2282217 - DNA, 25 bp, Homo sapien
tactccctgacagggcctctttcag

SEQ ID NO: 2282218 - DNA, 25 bp, Homo sapien
aaaaggtgcctgagctcctgctgca

SEQ ID NO: 2282219 - DNA, 25 bp, Homo sapien
ggcctgctccttgctttgaccccat

SEQ ID NO: 2282220 - DNA, 25 bp, Homo sapien
gctgcaggcctgctccttgctttga

SEQ ID NO: 2282221 - DNA, 25 bp, Homo sapien
caaaaggtgcctgagctcctgctgc

SEQ ID NO: 2282222 - DNA, 25 bp, Homo sapien
aataacatcaggacaccagattggc

SEQ ID NO: 2282223 - DNA, 25 bp, Homo sapien
gatgggccaccataagctacctagg

SEQ ID NO: 2282224 - DNA, 25 bp, Homo sapien
gagaagtctgtctctaaccaggact

SEQ ID NO: 2282225 - DNA, 25 bp, Homo sapien
gatatttggaaggatcacctcttgc

SEQ ID NO: 2282226 - DNA, 25 bp, Homo sapien
ggtgttgattggagatctttcctac

SEQ ID NO: 2282227 - DNA, 25 bp, Homo sapien
tgtacccagtagtcactcagagcag

SEQ ID NO: 2282228 - DNA, 25 bp, Homo sapien
ttgtgtacccagtagtcactcagag

SEQ ID NO: 2282229 - DNA, 25 bp, Homo sapien
gggtgttgattggagatctttccta

SEQ ID NO: 2282230 - DNA, 25 bp, Homo sapien
tgcatctatttgttttttctctctt

SEQ ID NO: 2282231 - DNA, 25 bp, Homo sapien
ttgtagaggtgtttatattattctc

SEQ ID NO: 2282232 - DNA, 25 bp, Homo sapien
attgcatctatttgttttttctctc

SEQ ID NO: 2282233 - DNA, 25 bp, Homo sapien
ttattgcatctatttgttttttctc

SEQ ID NO: 2282234 - DNA, 25 bp, Homo sapien
caccactacagtacactctttagat

SEQ ID NO: 2282235 - DNA, 25 bp, Homo sapien
cactacagtacactctttagattcc

SEQ ID NO: 2282236 - DNA, 25 bp, Homo sapien
ctcatttcaataggcccttcagtca

SEQ ID NO: 2282237 - DNA, 25 bp, Homo sapien
ctacagtacactctttagattcctc

SEQ ID NO: 2282238 - DNA, 25 bp, Homo sapien
tcccaagagtgtactcagctaagcg

SEQ ID NO: 2282239 - DNA, 25 bp, Homo sapien
tcatgagctaccaccatattctctc

SEQ ID NO: 2282240 - DNA, 25 bp, Homo sapien
gtactcagctaagcgaacaagatgc

SEQ ID NO: 2282241 - DNA, 25 bp, Homo sapien
ttcttcccaagagtgtactcagcta

SEQ ID NO: 2282242 - DNA, 25 bp, Homo sapien
tgcagacctgctccttgctttgacc

SEQ ID NO: 2282243 - DNA, 25 bp, Homo sapien
ttgaccccatccttactcactgaca

SEQ ID NO: 2282244 - DNA, 25 bp, Homo sapien
tactcactgacagggcctcattcag

SEQ ID NO: 2282245 - DNA, 25 bp, Homo sapien
ttgctttgaccccatccttactcac

SEQ ID NO: 2282246 - DNA, 25 bp, Homo sapien
cctgttcctcacaataccactcaga

SEQ ID NO: 2282247 - DNA, 25 bp, Homo sapien
cctgctttgcttcactgcaatacat

SEQ ID NO: 2282248 - DNA, 25 bp, Homo sapien
tcctcacaataccactcagaaactg

SEQ ID NO: 2282249 - DNA, 25 bp, Homo sapien
cacaataccactcagaaactgactc

SEQ ID NO: 2282250 - DNA, 25 bp, Homo sapien
ccaaaaacctgggatgctaacaaga

SEQ ID NO: 2282251 - DNA, 25 bp, Homo sapien
tgcaaatggttcaaggtgacacact

SEQ ID NO: 2282252 - DNA, 25 bp, Homo sapien
cacacccacatctcataaggcagaa

SEQ ID NO: 2282253 - DNA, 25 bp, Homo sapien
cattagggattctgttactctgaga

SEQ ID NO: 2282254 - DNA, 25 bp, Homo sapien
tttccagagaaaccttattgacagc

SEQ ID NO: 2282255 - DNA, 25 bp, Homo sapien
gacagcaaatcctgtgatgatagag

SEQ ID NO: 2282256 - DNA, 25 bp, Homo sapien
cagagaaaccttattgacagcaaat

SEQ ID NO: 2282257 - DNA, 25 bp, Homo sapien
agaggctccccagaagttattgtcc

SEQ ID NO: 2282258 - DNA, 25 bp, Homo sapien
tctttgtccttgatgttgagtaact

SEQ ID NO: 2282259 - DNA, 25 bp, Homo sapien
ttgagtaactgctcatataaggccc

SEQ ID NO: 2282260 - DNA, 25 bp, Homo sapien
ccttgatgttgagtaactgctcata

SEQ ID NO: 2282261 - DNA, 25 bp, Homo sapien
tgttgagtaactgctcatataaggc

SEQ ID NO: 2282262 - DNA, 25 bp, Homo sapien
tataactcaaggcacctcacgtggc

SEQ ID NO: 2282263 - DNA, 25 bp, Homo sapien
tctacctatgacctaaaagcagccc

SEQ ID NO: 2282264 - DNA, 25 bp, Homo sapien
gttgtctaatcatgtgggatcccag

SEQ ID NO: 2282265 - DNA, 25 bp, Homo sapien
aaagcagccccgaccttcgagttgt

SEQ ID NO: 2282266 - DNA, 25 bp, Homo sapien
gctgatgagaatctctgccctctgc

SEQ ID NO: 2282267 - DNA, 25 bp, Homo sapien
tgcccttggataggtggagaactga

SEQ ID NO: 2282268 - DNA, 25 bp, Homo sapien
ctttgctgatgagaatctctgccct

SEQ ID NO: 2282269 - DNA, 25 bp, Homo sapien
ctgcccttggataggtggagaactg

SEQ ID NO: 2282270 - DNA, 25 bp, Homo sapien
gctttgtttctccatgcatttccca

SEQ ID NO: 2282271 - DNA, 25 bp, Homo sapien
aggaaggtgactggtagcctcttct

SEQ ID NO: 2282272 - DNA, 25 bp, Homo sapien
gaaggtgactggtagcctcttctgc

SEQ ID NO: 2282273 - DNA, 25 bp, Homo sapien
tgactggtagcctcttctgcccgct

SEQ ID NO: 2282274 - DNA, 25 bp, Homo sapien
tcctcacatttcccctttttcgaca

SEQ ID NO: 2282275 - DNA, 25 bp, Homo sapien
ggtctctgatgttagatagtaaaat

SEQ ID NO: 2282276 - DNA, 25 bp, Homo sapien
tttttgggatccctaggtctgtgct

SEQ ID NO: 2282277 - DNA, 25 bp, Homo sapien
ttgggatccctaggtctgtgctttg

SEQ ID NO: 2282278 - DNA, 25 bp, Homo sapien
cagagccttgtggtctctgatgtta

SEQ ID NO: 2282279 - DNA, 25 bp, Homo sapien
gattttgcatcacagcttgaccctg

SEQ ID NO: 2282280 - DNA, 25 bp, Homo sapien
atcacagcttgaccctgcctgaggc

SEQ ID NO: 2282281 - DNA, 25 bp, Homo sapien
acctgcctggctggcgggcactgat

SEQ ID NO: 2282282 - DNA, 25 bp, Homo sapien
gctggcgggcactgattttgcatca

SEQ ID NO: 2282283 - DNA, 25 bp, Homo sapien
tgcaacaattgctgaaaagcccacc

SEQ ID NO: 2282284 - DNA, 25 bp, Homo sapien
tgctggctgaaatagtgattgcctg

SEQ ID NO: 2282285 - DNA, 25 bp, Homo sapien
caactcatgtaatccgtatgcaaca

SEQ ID NO: 2282286 - DNA, 25 bp, Homo sapien
ctttagcttttcagataagttcgga

SEQ ID NO: 2282287 - DNA, 25 bp, Homo sapien
gaaacatggaatagcccacaacaag

SEQ ID NO: 2282288 - DNA, 25 bp, Homo sapien
aatagcccacaacaagagccactgc

SEQ ID NO: 2282289 - DNA, 25 bp, Homo sapien
tcaaccagaattcctgaaacatgga

SEQ ID NO: 2282290 - DNA, 25 bp, Homo sapien
ttcaaccagaattcctgaaacatgg

SEQ ID NO: 2282291 - DNA, 25 bp, Homo sapien
ccattgggttggtagctctagagca

SEQ ID NO: 2282292 - DNA, 25 bp, Homo sapien
tgactgcttctagacccattgggtt

SEQ ID NO: 2282293 - DNA, 25 bp, Homo sapien
tattgccccaggaaacagttgactg

SEQ ID NO: 2282294 - DNA, 25 bp, Homo sapien
aactgtgcaggtgattcgggaaagt

SEQ ID NO: 2282295 - DNA, 25 bp, Homo sapien
taaagctgccaagctgggatcccac

SEQ ID NO: 2282296 - DNA, 25 bp, Homo sapien
ggatcccactggggtgattaggact

SEQ ID NO: 2282297 - DNA, 25 bp, Homo sapien
gggtgattaggactaattcagggca

SEQ ID NO: 2282298 - DNA, 25 bp, Homo sapien
tggctaccaaggcaagggcaaatgg

SEQ ID NO: 2282299 - DNA, 25 bp, Homo sapien
ctatgaagctggaaaccgttgagtc

SEQ ID NO: 2282300 - DNA, 25 bp, Homo sapien
aaagacaattcttagctatgggcca

SEQ ID NO: 2282301 - DNA, 25 bp, Homo sapien
gctcagcaacggtatcattatccat

SEQ ID NO: 2282302 - DNA, 25 bp, Homo sapien
tgacccgtgggccttactttgcaaa

SEQ ID NO: 2282303 - DNA, 25 bp, Homo sapien
gatgctgggtcctcgcaggagtcat

SEQ ID NO: 2282304 - DNA, 25 bp, Homo sapien
acaaggcataggtctgatctgccag

SEQ ID NO: 2282305 - DNA, 25 bp, Homo sapien
tgtgggacaaggcataggtctgatc

SEQ ID NO: 2282306 - DNA, 25 bp, Homo sapien
caggtctggtgggatgtgggacaag

SEQ ID NO: 2282307 - DNA, 25 bp, Homo sapien
ccagcctcttgagcccttcctgcgc

SEQ ID NO: 2282308 - DNA, 25 bp, Homo sapien
agaagtctctccaagccgcccgcca

SEQ ID NO: 2282309 - DNA, 25 bp, Homo sapien
ggcgcaccggattctccagaagtct

SEQ ID NO: 2282310 - DNA, 25 bp, Homo sapien
tgaggtagagcccggcgcaccggat

SEQ ID NO: 2282311 - DNA, 25 bp, Homo sapien
tgcgcttgcggcagctgcggatgct

SEQ ID NO: 2282312 - DNA, 25 bp, Homo sapien
ctcccacaggctgcgattctaggcg

SEQ ID NO: 2282313 - DNA, 25 bp, Homo sapien
tgggtgcggacgagcctctgttggt

SEQ ID NO: 2282314 - DNA, 25 bp, Homo sapien
gattctaggcgctcagctcgttcag

SEQ ID NO: 2282315 - DNA, 25 bp, Homo sapien
gtcctgaagatgttcctgggccccg

SEQ ID NO: 2282316 - DNA, 25 bp, Homo sapien
accccaagtgttcccgggtgctgat

SEQ ID NO: 2282317 - DNA, 25 bp, Homo sapien
gttcgtggttctgaaacgatgccag

SEQ ID NO: 2282318 - DNA, 25 bp, Homo sapien
tccagggtctggctcgggttgcgcc

SEQ ID NO: 2282319 - DNA, 25 bp, Homo sapien
agattcttgctgaaggggggttccg

SEQ ID NO: 2282320 - DNA, 25 bp, Homo sapien
cgcgggagattcttgctgaaggggg

SEQ ID NO: 2282321 - DNA, 25 bp, Homo sapien
ggcgcgggagattcttgctgaaggg

SEQ ID NO: 2282322 - DNA, 25 bp, Homo sapien
agggcgcgggagattcttgctgaag

SEQ ID NO: 2282323 - DNA, 25 bp, Homo sapien
ccaggaacaggtgtgaagtcatcct

SEQ ID NO: 2282324 - DNA, 25 bp, Homo sapien
caggaacaggtgtgaagtcatcctc

SEQ ID NO: 2282325 - DNA, 25 bp, Homo sapien
ctgagaatgagaataaggcttgcag

SEQ ID NO: 2282326 - DNA, 25 bp, Homo sapien
ggcatatacacatgtggtctttgca

SEQ ID NO: 2282327 - DNA, 25 bp, Homo sapien
catatacacatgtggtctttgcaca

SEQ ID NO: 2282328 - DNA, 25 bp, Homo sapien
gaataaggcttgcaggcatatacac

SEQ ID NO: 2282329 - DNA, 25 bp, Homo sapien
gattagcagagatgcctccttttcc

SEQ ID NO: 2282330 - DNA, 25 bp, Homo sapien
ccagcacagcatgtggctttcaggg

SEQ ID NO: 2282331 - DNA, 25 bp, Homo sapien
gctttcaggggacctggtgctttct

SEQ ID NO: 2282332 - DNA, 25 bp, Homo sapien
aagtggggggaggattagcagagat

SEQ ID NO: 2282333 - DNA, 25 bp, Homo sapien
aaaggcacatcttagtgtggaaggg

SEQ ID NO: 2282334 - DNA, 25 bp, Homo sapien
aaggactcaggctcactgccctctg

SEQ ID NO: 2282335 - DNA, 25 bp, Homo sapien
catcaggagggatttagactcagca

SEQ ID NO: 2282336 - DNA, 25 bp, Homo sapien
tggcccagagctaaagaagacatga

SEQ ID NO: 2282337 - DNA, 25 bp, Homo sapien
tctcagcactgagaggatggactgg

SEQ ID NO: 2282338 - DNA, 25 bp, Homo sapien
tgccctcagtggtctgaggataaag

SEQ ID NO: 2282339 - DNA, 25 bp, Homo sapien
gggcactgattcagctctcagcact

SEQ ID NO: 2282340 - DNA, 25 bp, Homo sapien
tctgaggataaagcgtgccgggcat

SEQ ID NO: 2282341 - DNA, 25 bp, Homo sapien
ggtggcgatctgcaggcctccacga

SEQ ID NO: 2282342 - DNA, 25 bp, Homo sapien
gcaggtggcgatctgcaggcctcca

SEQ ID NO: 2282343 - DNA, 25 bp, Homo sapien
cactgcggggcaggtggcgatctgc

SEQ ID NO: 2282344 - DNA, 25 bp, Homo sapien
gggcaggtggcgatctgcaggcctc

SEQ ID NO: 2282345 - DNA, 25 bp, Homo sapien
gataagtagaggagtagcaaaatat

SEQ ID NO: 2282346 - DNA, 25 bp, Homo sapien
atttatacaaccagtgcatttatat

SEQ ID NO: 2282347 - DNA, 25 bp, Homo sapien
ccagtgaatataggataagtagagg

SEQ ID NO: 2282348 - DNA, 25 bp, Homo sapien
atatttatataaccagtgaatatag

SEQ ID NO: 2282349 - DNA, 25 bp, Homo sapien
gggtagacacagtgccagtggccac

SEQ ID NO: 2282350 - DNA, 25 bp, Homo sapien
cacaataaacaagactgcagacaca

SEQ ID NO: 2282351 - DNA, 25 bp, Homo sapien
gccagtggccacaataaacaagact

SEQ ID NO: 2282352 - DNA, 25 bp, Homo sapien
cacagtgccagtggccacaataaac

SEQ ID NO: 2282353 - DNA, 25 bp, Homo sapien
aggatggtatttatgcttgcctcaa

SEQ ID NO: 2282354 - DNA, 25 bp, Homo sapien
caggatggtatttatgcttgcctca

SEQ ID NO: 2282355 - DNA, 25 bp, Homo sapien
ggatggtatttatgcttgcctcaaa

SEQ ID NO: 2282356 - DNA, 25 bp, Homo sapien
atggtatttatgcttgcctcaaatc

SEQ ID NO: 2282357 - DNA, 25 bp, Homo sapien
tggcagagaaaaggcctgttctcct

SEQ ID NO: 2282358 - DNA, 25 bp, Homo sapien
gtggcagagaaaaggcctgttctcc

SEQ ID NO: 2282359 - DNA, 25 bp, Homo sapien
gagtggcagagaaaaggcctgttct

SEQ ID NO: 2282360 - DNA, 25 bp, Homo sapien
ctgagtggcagagaaaaggcctgtt

SEQ ID NO: 2282361 - DNA, 25 bp, Homo sapien
tccccaagttctccacttcctgctt

SEQ ID NO: 2282362 - DNA, 25 bp, Homo sapien
cccactctccccaagttctccactt

SEQ ID NO: 2282363 - DNA, 25 bp, Homo sapien
ctctccccaagttctccacttcctg

SEQ ID NO: 2282364 - DNA, 25 bp, Homo sapien
ccactctccccaagttctccacttc

SEQ ID NO: 2282365 - DNA, 25 bp, Homo sapien
ctgctggctgccacacccttcttca

SEQ ID NO: 2282366 - DNA, 25 bp, Homo sapien
gagagtggtgttctgggcactgctg

SEQ ID NO: 2282367 - DNA, 25 bp, Homo sapien
atgtagtagttttccaggggagagt

SEQ ID NO: 2282368 - DNA, 25 bp, Homo sapien
ttttccaggggagagtggtgttctg

SEQ ID NO: 2282369 - DNA, 25 bp, Homo sapien
tagcagctgattaaatttctcatct

SEQ ID NO: 2282370 - DNA, 25 bp, Homo sapien
gcgaagaaaatgtagcagctgatta

SEQ ID NO: 2282371 - DNA, 25 bp, Homo sapien
ctgcgaagaaaatgtagcagctgat

SEQ ID NO: 2282372 - DNA, 25 bp, Homo sapien
aatgtagcagctgattaaatttctc

SEQ ID NO: 2282373 - DNA, 25 bp, Homo sapien
cacaggtgcaagtgctaaagaagac

SEQ ID NO: 2282374 - DNA, 25 bp, Homo sapien
gcaagtgctaaagaagaccaggtgt

SEQ ID NO: 2282375 - DNA, 25 bp, Homo sapien
tccacacaggtgcaagtgctaaaga

SEQ ID NO: 2282376 - DNA, 25 bp, Homo sapien
agtattccacacaggtgcaagtgct

SEQ ID NO: 2282377 - DNA, 25 bp, Homo sapien
tcaatttgcatgaagatcgtatttc

SEQ ID NO: 2282378 - DNA, 25 bp, Homo sapien
aacccagtttacttcaggaacattg

SEQ ID NO: 2282379 - DNA, 25 bp, Homo sapien
ctctgtggccaatgagggctgtgcg

SEQ ID NO: 2282380 - DNA, 25 bp, Homo sapien
gctgtgcggctacagtgctgcacaa

SEQ ID NO: 2282381 - DNA, 25 bp, Homo sapien
taggggcgattgtactgcaaaaccc

SEQ ID NO: 2282382 - DNA, 25 bp, Homo sapien
tcggatttacttgattaccctgcat

SEQ ID NO: 2282383 - DNA, 25 bp, Homo sapien
caaaagtagggaatggcagattcgg

SEQ ID NO: 2282384 - DNA, 25 bp, Homo sapien
cagcccaaggcaaaagtagggaatg

SEQ ID NO: 2282385 - DNA, 25 bp, Homo sapien
gaatggcagattcggatttacttga

SEQ ID NO: 2282386 - DNA, 25 bp, Homo sapien
tctgtcatttggttgaattgtccca

SEQ ID NO: 2282387 - DNA, 25 bp, Homo sapien
atctgtcatttggttgaattgtccc

SEQ ID NO: 2282388 - DNA, 25 bp, Homo sapien
tgttgactttttgttggagccatca

SEQ ID NO: 2282389 - DNA, 25 bp, Homo sapien
cctgttgactttttgttggagccat

SEQ ID NO: 2282390 - DNA, 25 bp, Homo sapien
tttcctgttgactttttgttggagc

SEQ ID NO: 2282391 - DNA, 25 bp, Homo sapien
tcctgttgactttttgttggagcca

SEQ ID NO: 2282392 - DNA, 25 bp, Homo sapien
gcaccaccagcgtgtgatgcatgct

SEQ ID NO: 2282393 - DNA, 25 bp, Homo sapien
ccaaagctcaaggtgagctctgggc

SEQ ID NO: 2282394 - DNA, 25 bp, Homo sapien
cagcgtgtgatgcatgctgtgtttt

SEQ ID NO: 2282395 - DNA, 25 bp, Homo sapien
gggacgttgtccaccaaagctcaag

SEQ ID NO: 2282396 - DNA, 25 bp, Homo sapien
ctgtggggaggagaacagtgtacat

SEQ ID NO: 2282397 - DNA, 25 bp, Homo sapien
cacaccgacccacatgggggtcagc

SEQ ID NO: 2282398 - DNA, 25 bp, Homo sapien
tgctgctttagtaaggctcagggga

SEQ ID NO: 2282399 - DNA, 25 bp, Homo sapien
tgatctgtgaacagtcctcaagtgc

SEQ ID NO: 2282400 - DNA, 25 bp, Homo sapien
gggagcgagagcaagtgattctcct

SEQ ID NO: 2282401 - DNA, 25 bp, Homo sapien
gaaagacttcagtgatcgcagagct

SEQ ID NO: 2282402 - DNA, 25 bp, Homo sapien
cagaggaagcgagagcctgaaagac

SEQ ID NO: 2282403 - DNA, 25 bp, Homo sapien
gagctgatgctccaccgatagagga

SEQ ID NO: 2282404 - DNA, 25 bp, Homo sapien
gacatttactggctgcgaggtggaa

SEQ ID NO: 2282405 - DNA, 25 bp, Homo sapien
cccaggatccatgagtatggacttt

SEQ ID NO: 2282406 - DNA, 25 bp, Homo sapien
gttggccccgggcagtcttgcctag

SEQ ID NO: 2282407 - DNA, 25 bp, Homo sapien
ggccttcttgatttcccaggatcca

SEQ ID NO: 2282408 - DNA, 25 bp, Homo sapien
gactttaggaattctggtgaaggga

SEQ ID NO: 2282409 - DNA, 25 bp, Homo sapien
ctactagaaggctgtgaaggtgctg

SEQ ID NO: 2282410 - DNA, 25 bp, Homo sapien
cagaactactagaaggctgtgaagg

SEQ ID NO: 2282411 - DNA, 25 bp, Homo sapien
cagatgatggcttttagtctgtggg

SEQ ID NO: 2282412 - DNA, 25 bp, Homo sapien
tctgtggggccgctttaagaggcag

SEQ ID NO: 2282413 - DNA, 25 bp, Homo sapien
cgaaaggacaaagcctccacagtgt

SEQ ID NO: 2282414 - DNA, 25 bp, Homo sapien
agcgaaaggacaaagcctccacagt

SEQ ID NO: 2282415 - DNA, 25 bp, Homo sapien
aagagttattgcaaagagcgaaagg

SEQ ID NO: 2282416 - DNA, 25 bp, Homo sapien
ttgcaaagagcgaaaggacaaagcc

SEQ ID NO: 2282417 - DNA, 25 bp, Homo sapien
gcccaggtggagtgatgatcgcgcc

SEQ ID NO: 2282418 - DNA, 25 bp, Homo sapien
ccaggtggagtgatgatcgcgcctc

SEQ ID NO: 2282419 - DNA, 25 bp, Homo sapien
caggtggagtgatgatcgcgcctca

SEQ ID NO: 2282420 - DNA, 25 bp, Homo sapien
gtggagtgatgatcgcgcctcatca

SEQ ID NO: 2282421 - DNA, 25 bp, Homo sapien
gcactccagtctggatgacagggac

SEQ ID NO: 2282422 - DNA, 25 bp, Homo sapien
cactccagtctggatgacagggact

SEQ ID NO: 2282423 - DNA, 25 bp, Homo sapien
gaggcaactgacacaatcaagataa

SEQ ID NO: 2282424 - DNA, 25 bp, Homo sapien
taaagtgtacaacatagtaaatttc

SEQ ID NO: 2282425 - DNA, 25 bp, Homo sapien
tcgacctattttacaccaaagaggc

SEQ ID NO: 2282426 - DNA, 25 bp, Homo sapien
tgtacaacatagtaaatttcgacct

SEQ ID NO: 2282427 - DNA, 25 bp, Homo sapien
aaattggaggaagctcctaggggag

SEQ ID NO: 2282428 - DNA, 25 bp, Homo sapien
ggagggcatttcaggaacatggaaa

SEQ ID NO: 2282429 - DNA, 25 bp, Homo sapien
cttcttgaatgtgaaagagtagata

SEQ ID NO: 2282430 - DNA, 25 bp, Homo sapien
gtgatgaagaggttggttgtattcc

SEQ ID NO: 2282431 - DNA, 25 bp, Homo sapien
tattatagatttccatcgtatgtac

SEQ ID NO: 2282432 - DNA, 25 bp, Homo sapien
tagcagatttcagtatgggggagtt

SEQ ID NO: 2282433 - DNA, 25 bp, Homo sapien
gggagttaatggaggaagatggaac

SEQ ID NO: 2282434 - DNA, 25 bp, Homo sapien
gtactgtaacaataagattcaaatg

SEQ ID NO: 2282435 - DNA, 25 bp, Homo sapien
tagtggtagaactggggccatcacc

SEQ ID NO: 2282436 - DNA, 25 bp, Homo sapien
ctcaagaggtgaaatgaagcatcgt

SEQ ID NO: 2282437 - DNA, 25 bp, Homo sapien
tgacgtacggggaaatttagatctc

SEQ ID NO: 2282438 - DNA, 25 bp, Homo sapien
tgaagcatcgtaggcacatggctag

SEQ ID NO: 2282439 - DNA, 25 bp, Homo sapien
ttaaagcaaactcccaccctatgtg

SEQ ID NO: 2282440 - DNA, 25 bp, Homo sapien
acagcctacgctagtttgtgggcaa

SEQ ID NO: 2282441 - DNA, 25 bp, Homo sapien
tgccttgataaggatcagctggagc

SEQ ID NO: 2282442 - DNA, 25 bp, Homo sapien
tctagccgttgacaggcgacaaagc

SEQ ID NO: 2282443 - DNA, 25 bp, Homo sapien
ggtgccaaggcaacatactctaaat

SEQ ID NO: 2282444 - DNA, 25 bp, Homo sapien
ctttaattaaactcagcctggctcc

SEQ ID NO: 2282445 - DNA, 25 bp, Homo sapien
tcacaggctgtgctaacaaacccag

SEQ ID NO: 2282446 - DNA, 25 bp, Homo sapien
tcccacctggaaggaatctgcgctt

SEQ ID NO: 2282447 - DNA, 25 bp, Homo sapien
gagacaggagaaagacgcgcttccc

SEQ ID NO: 2282448 - DNA, 25 bp, Homo sapien
tatgtaattcatagaagctccagac

SEQ ID NO: 2282449 - DNA, 25 bp, Homo sapien
ggtcacaggcaagtgtgacattttc

SEQ ID NO: 2282450 - DNA, 25 bp, Homo sapien
gctccagacagaggccgtctttttc

SEQ ID NO: 2282451 - DNA, 25 bp, Homo sapien
gcctgagtagtgatttaggtatcat

SEQ ID NO: 2282452 - DNA, 25 bp, Homo sapien
gatttaggtatcattcttgcccgtg

SEQ ID NO: 2282453 - DNA, 25 bp, Homo sapien
tctcctgtgcctgagtagtgattta

SEQ ID NO: 2282454 - DNA, 25 bp, Homo sapien
gcccgtgcagactgtcctgacactt

SEQ ID NO: 2282455 - DNA, 25 bp, Homo sapien
tggataaggcatgtaacctctctgg

SEQ ID NO: 2282456 - DNA, 25 bp, Homo sapien
taagcgctacgagtgagaaaccagg

SEQ ID NO: 2282457 - DNA, 25 bp, Homo sapien
gattatcagtcagtaggaaccgggt

SEQ ID NO: 2282458 - DNA, 25 bp, Homo sapien
tgacattgactatctgtgtgaccct

SEQ ID NO: 2282459 - DNA, 25 bp, Homo sapien
ccaaggctgatacattgactccaag

SEQ ID NO: 2282460 - DNA, 25 bp, Homo sapien
tcaaaacgactgttgcatctcctgg

SEQ ID NO: 2282461 - DNA, 25 bp, Homo sapien
catctcctggcagctcaagtggaaa

SEQ ID NO: 2282462 - DNA, 25 bp, Homo sapien
tgtatttggctacgagaaccagcaa

SEQ ID NO: 2282463 - DNA, 25 bp, Homo sapien
ttatggcaaaagaattggtgtcacc

SEQ ID NO: 2282464 - DNA, 25 bp, Homo sapien
ccaggtacctctgtgcatgtataat

SEQ ID NO: 2282465 - DNA, 25 bp, Homo sapien
tcaggaccaagttacacaatgtgaa

SEQ ID NO: 2282466 - DNA, 25 bp, Homo sapien
aataacagatggatcatataggcac

SEQ ID NO: 2282467 - DNA, 25 bp, Homo sapien
cactagcggtggaacccttagcaca

SEQ ID NO: 2282468 - DNA, 25 bp, Homo sapien
gttctactgcccaggtggattcagg

SEQ ID NO: 2282469 - DNA, 25 bp, Homo sapien
gttctttttgctacggaatgccaca

SEQ ID NO: 2282470 - DNA, 25 bp, Homo sapien
gaagtgataacactgggtcccacta

SEQ ID NO: 2282471 - DNA, 25 bp, Homo sapien
tccatgtctgcatgctggactatcc

SEQ ID NO: 2282472 - DNA, 25 bp, Homo sapien
gcctagaacccagaatttcttagga

SEQ ID NO: 2282473 - DNA, 25 bp, Homo sapien
tcctctccacctaattccatggtgg

SEQ ID NO: 2282474 - DNA, 25 bp, Homo sapien
gatgagtacacattctctcttcctc

SEQ ID NO: 2282475 - DNA, 25 bp, Homo sapien
taagcaaatatttcgccttcttggg

SEQ ID NO: 2282476 - DNA, 25 bp, Homo sapien
agcaaatatttcgccttcttgggtt

SEQ ID NO: 2282477 - DNA, 25 bp, Homo sapien
cataagcaaatatttcgccttcttg

SEQ ID NO: 2282478 - DNA, 25 bp, Homo sapien
aagcaaatatttcgccttcttgggt

SEQ ID NO: 2282479 - DNA, 25 bp, Homo sapien
tgttcaccatactttgttatctcgg

SEQ ID NO: 2282480 - DNA, 25 bp, Homo sapien
taatcaaatgttcaccatactttgt

SEQ ID NO: 2282481 - DNA, 25 bp, Homo sapien
tatctcggcagttattaaaaaacat

SEQ ID NO: 2282482 - DNA, 25 bp, Homo sapien
ccatactttgttatctcggcagtta

SEQ ID NO: 2282483 - DNA, 25 bp, Homo sapien
ccgaatagcctaatttctcagagat

SEQ ID NO: 2282484 - DNA, 25 bp, Homo sapien
gagatcatcttggtagtcatttgaa

SEQ ID NO: 2282485 - DNA, 25 bp, Homo sapien
atgtcctccgatttccacttttaag

SEQ ID NO: 2282486 - DNA, 25 bp, Homo sapien
ggatttgatgctcttccgaatagcc

SEQ ID NO: 2282487 - DNA, 25 bp, Homo sapien
cagttcccatctgcagctcccacag

SEQ ID NO: 2282488 - DNA, 25 bp, Homo sapien
gcagctcccacaggctggactgaat

SEQ ID NO: 2282489 - DNA, 25 bp, Homo sapien
ctgcagctcccacaggctggactga

SEQ ID NO: 2282490 - DNA, 25 bp, Homo sapien
gctcccacaggctggactgaatcat

SEQ ID NO: 2282491 - DNA, 25 bp, Homo sapien
catatcccatttagtgacaccttcc

SEQ ID NO: 2282492 - DNA, 25 bp, Homo sapien
ctgacaataacacgaaagccgaagg

SEQ ID NO: 2282493 - DNA, 25 bp, Homo sapien
cacgaaagccgaaggatagttatta

SEQ ID NO: 2282494 - DNA, 25 bp, Homo sapien
tagttattaacttctgtcatatccc

SEQ ID NO: 2282495 - DNA, 25 bp, Homo sapien
caggataacaggtaactatgaaaca

SEQ ID NO: 2282496 - DNA, 25 bp, Homo sapien
gaacccttgataaaacaggataaca

SEQ ID NO: 2282497 - DNA, 25 bp, Homo sapien
ctatgaaacaatacttagttatcta

SEQ ID NO: 2282498 - DNA, 25 bp, Homo sapien
tggggaagactatcaaaaattgcaa

SEQ ID NO: 2282499 - DNA, 25 bp, Homo sapien
tactccatagacagatcagcgccag

SEQ ID NO: 2282500 - DNA, 25 bp, Homo sapien
tttacagaccatacagtgtaacttc

SEQ ID NO: 2282501 - DNA, 25 bp, Homo sapien
cctttacagaccatacagtgtaact

SEQ ID NO: 2282502 - DNA, 25 bp, Homo sapien
ccatagacagatcagcgccagcact

SEQ ID NO: 2282503 - DNA, 25 bp, Homo sapien
agcagccagtgtattctgtattaat

SEQ ID NO: 2282504 - DNA, 25 bp, Homo sapien
agcaaagcagccagtgtattctgta

SEQ ID NO: 2282505 - DNA, 25 bp, Homo sapien
ttttaccacaatttcctggactgcg

SEQ ID NO: 2282506 - DNA, 25 bp, Homo sapien
gctgggggagaaagttccttagcaa

SEQ ID NO: 2282507 - DNA, 25 bp, Homo sapien
cggttgattggatggccctgggatc

SEQ ID NO: 2282508 - DNA, 25 bp, Homo sapien
ccggttgattggatggccctgggat

SEQ ID NO: 2282509 - DNA, 25 bp, Homo sapien
gccggttgattggatggccctggga

SEQ ID NO: 2282510 - DNA, 25 bp, Homo sapien
tggccggttgattggatggccctgg

SEQ ID NO: 2282511 - DNA, 25 bp, Homo sapien
gtgttcctgcagataatacccctcc

SEQ ID NO: 2282512 - DNA, 25 bp, Homo sapien
caggacgtgttcctgcagataatac

SEQ ID NO: 2282513 - DNA, 25 bp, Homo sapien
gaaataggtgactcgactacaaagt

SEQ ID NO: 2282514 - DNA, 25 bp, Homo sapien
tttaaagaaatagcggccgctacca

SEQ ID NO: 2282515 - DNA, 25 bp, Homo sapien
gacgcggaatccgaaggaggaaata

SEQ ID NO: 2282516 - DNA, 25 bp, Homo sapien
tttgttctgcttctcgaccgctgcc

SEQ ID NO: 2282517 - DNA, 25 bp, Homo sapien
tatgaagggccattccggttaggac

SEQ ID NO: 2282518 - DNA, 25 bp, Homo sapien
ccaggaaatgggagatcgggttaca

SEQ ID NO: 2282519 - DNA, 25 bp, Homo sapien
gtctcacagcgagagagatcaggaa

SEQ ID NO: 2282520 - DNA, 25 bp, Homo sapien
cagacgcggtcatttaagaagtttc

SEQ ID NO: 2282521 - DNA, 25 bp, Homo sapien
gccagccagacgcggtcatttaaga

SEQ ID NO: 2282522 - DNA, 25 bp, Homo sapien
gggcggccggcggagttgggcgcgc

SEQ ID NO: 2282523 - DNA, 25 bp, Homo sapien
cttaatgctacactgagcaggagtc

SEQ ID NO: 2282524 - DNA, 25 bp, Homo sapien
taatgctacactgagcaggagtctc

SEQ ID NO: 2282525 - DNA, 25 bp, Homo sapien
gctacactgagcaggagtctcagac

SEQ ID NO: 2282526 - DNA, 25 bp, Homo sapien
aatgctacactgagcaggagtctca

SEQ ID NO: 2282527 - DNA, 25 bp, Homo sapien
ccaaataatttcctgcgaacagagc

SEQ ID NO: 2282528 - DNA, 25 bp, Homo sapien
gagcaactgcaacagcctgctctga

SEQ ID NO: 2282529 - DNA, 25 bp, Homo sapien
ccctggccggtgcagctcagggttt

SEQ ID NO: 2282530 - DNA, 25 bp, Homo sapien
gaggagcccagcacgactgccctgg

SEQ ID NO: 2282531 - DNA, 25 bp, Homo sapien
cggttctggagacaatccgggttgc

SEQ ID NO: 2282532 - DNA, 25 bp, Homo sapien
gaccggcatttcattgtcaaaaagc

SEQ ID NO: 2282533 - DNA, 25 bp, Homo sapien
gctctgaccaattgtgaccggcatt

SEQ ID NO: 2282534 - DNA, 25 bp, Homo sapien
caaggttacgctaaagggtacagca

SEQ ID NO: 2282535 - DNA, 25 bp, Homo sapien
agcaacttgcttgtgggttaccagc

SEQ ID NO: 2282536 - DNA, 25 bp, Homo sapien
gaagcaagcaacttgcttgtgggtt

SEQ ID NO: 2282537 - DNA, 25 bp, Homo sapien
caagcaacttgcttgtgggttacca

SEQ ID NO: 2282538 - DNA, 25 bp, Homo sapien
agcaagcaacttgcttgtgggttac

SEQ ID NO: 2282539 - DNA, 25 bp, Homo sapien
aaagcaagtgaggacggtttcagga

SEQ ID NO: 2282540 - DNA, 25 bp, Homo sapien
agttcggtatatcaggttcatcagc

SEQ ID NO: 2282541 - DNA, 25 bp, Homo sapien
gctgacccgctacttgtaaggaatg

SEQ ID NO: 2282542 - DNA, 25 bp, Homo sapien
cttttgtgtcacaggagttcggtat

SEQ ID NO: 2282543 - DNA, 25 bp, Homo sapien
caacagtgccacaaccttcaagggt

SEQ ID NO: 2282544 - DNA, 25 bp, Homo sapien
caggcgatgggagcaaacttacaca

SEQ ID NO: 2282545 - DNA, 25 bp, Homo sapien
tatcaggcattcattgcgagcgacc

SEQ ID NO: 2282546 - DNA, 25 bp, Homo sapien
tcagtgcccttggagtagtcaacct

SEQ ID NO: 2282547 - DNA, 25 bp, Homo sapien
cacatttttagctttgactgtttga

SEQ ID NO: 2282548 - DNA, 25 bp, Homo sapien
ttatcctgagcaggatagctacttc

SEQ ID NO: 2282549 - DNA, 25 bp, Homo sapien
tttttagctttgactgtttgaaaca

SEQ ID NO: 2282550 - DNA, 25 bp, Homo sapien
catttttagctttgactgtttgaaa

SEQ ID NO: 2282551 - DNA, 25 bp, Homo sapien
catctggggtattttttgcccttga

SEQ ID NO: 2282552 - DNA, 25 bp, Homo sapien
gtgctcacatctggggtattttttg

SEQ ID NO: 2282553 - DNA, 25 bp, Homo sapien
acatctggggtattttttgcccttg

SEQ ID NO: 2282554 - DNA, 25 bp, Homo sapien
ctcacatctggggtattttttgccc

SEQ ID NO: 2282555 - DNA, 25 bp, Homo sapien
gtgaacattcaccagcccacagcaa

SEQ ID NO: 2282556 - DNA, 25 bp, Homo sapien
aagtgaacattcaccagcccacagc

SEQ ID NO: 2282557 - DNA, 25 bp, Homo sapien
attaaacttccacgaagggccatct

SEQ ID NO: 2282558 - DNA, 25 bp, Homo sapien
aaacttccacgaagggccatctact

SEQ ID NO: 2282559 - DNA, 25 bp, Homo sapien
gattactgacctcatcaaagagata

SEQ ID NO: 2282560 - DNA, 25 bp, Homo sapien
caggattactgacctcatcaaagag

SEQ ID NO: 2282561 - DNA, 25 bp, Homo sapien
agtgaagcaggattactgacctcat

SEQ ID NO: 2282562 - DNA, 25 bp, Homo sapien
tataggggacgtaagtgaagcagga

SEQ ID NO: 2282563 - DNA, 25 bp, Homo sapien
ttccaggccacacctgcaagtgagg

SEQ ID NO: 2282564 - DNA, 25 bp, Homo sapien
cacacctgcaagtgaggtgggcagc

SEQ ID NO: 2282565 - DNA, 25 bp, Homo sapien
tcttcattagagaccccggcactct

SEQ ID NO: 2282566 - DNA, 25 bp, Homo sapien
taacacattccttctatctagctgt

SEQ ID NO: 2282567 - DNA, 25 bp, Homo sapien
caacaggtatgctctctccttccac

SEQ ID NO: 2282568 - DNA, 25 bp, Homo sapien
acctcacccgaaagtatcagcgtca

SEQ ID NO: 2282569 - DNA, 25 bp, Homo sapien
cgtcagcagatgaagggaaggacta

SEQ ID NO: 2282570 - DNA, 25 bp, Homo sapien
gatgaagggaaggactaaatggcac

SEQ ID NO: 2282571 - DNA, 25 bp, Homo sapien
ttttctaagggtagatggcttcaaa

SEQ ID NO: 2282572 - DNA, 25 bp, Homo sapien
aagggtagatggcttcaaaaagata

SEQ ID NO: 2282573 - DNA, 25 bp, Homo sapien
tgctgtctatgtcagtggctccttg

SEQ ID NO: 2282574 - DNA, 25 bp, Homo sapien
aaactgccttgcacccaaaagataa

SEQ ID NO: 2282575 - DNA, 25 bp, Homo sapien
gcatcgtagtaacaagaaagagttc

SEQ ID NO: 2282576 - DNA, 25 bp, Homo sapien
aatagtagcagaaactggcacggac

SEQ ID NO: 2282577 - DNA, 25 bp, Homo sapien
cacggactgatgttcaactatgtca

SEQ ID NO: 2282578 - DNA, 25 bp, Homo sapien
cagcagaagcatggcatcgtagtaa

SEQ ID NO: 2282579 - DNA, 25 bp, Homo sapien
cttagtcctggatggcttttgtggc

SEQ ID NO: 2282580 - DNA, 25 bp, Homo sapien
ggcttttgtggcagtgctggcttta

SEQ ID NO: 2282581 - DNA, 25 bp, Homo sapien
ttttgtggcagtgctggctttaagt

SEQ ID NO: 2282582 - DNA, 25 bp, Homo sapien
gtggcagtgctggctttaagttggc

SEQ ID NO: 2282583 - DNA, 25 bp, Homo sapien
ccatacggtggtgacctgccactgg

SEQ ID NO: 2282584 - DNA, 25 bp, Homo sapien
tccctactagctcttagaggaatgg

SEQ ID NO: 2282585 - DNA, 25 bp, Homo sapien
ctcagagaagtttcagcaagccgtg

SEQ ID NO: 2282586 - DNA, 25 bp, Homo sapien
cagcaagccgtgctgctcttccggg

SEQ ID NO: 2282587 - DNA, 25 bp, Homo sapien
ggaaactgtaaaaggactcttgctg

SEQ ID NO: 2282588 - DNA, 25 bp, Homo sapien
cagcaggcggtcaggaaaacttgtg

SEQ ID NO: 2282589 - DNA, 25 bp, Homo sapien
ccccagcaggcggtcaggaaaactt

SEQ ID NO: 2282590 - DNA, 25 bp, Homo sapien
aaactgtaaaaggactcttgctggg

SEQ ID NO: 2282591 - DNA, 25 bp, Homo sapien
aagatgaagtcaaatctggcagggc

SEQ ID NO: 2282592 - DNA, 25 bp, Homo sapien
agccaagatgaagtcaaatctggca

SEQ ID NO: 2282593 - DNA, 25 bp, Homo sapien
cggcagccaagatgaagtcaaatct

SEQ ID NO: 2282594 - DNA, 25 bp, Homo sapien
agatgaagtcaaatctggcagggct

SEQ ID NO: 2282595 - DNA, 25 bp, Homo sapien
ttcacattcatatacagacctatgc

SEQ ID NO: 2282596 - DNA, 25 bp, Homo sapien
acctactgcacaagccctcgaggag

SEQ ID NO: 2282597 - DNA, 25 bp, Homo sapien
gatcagcacccgtaacaactctcaa

SEQ ID NO: 2282598 - DNA, 25 bp, Homo sapien
gctccctaagtggtccagatcagca

SEQ ID NO: 2282599 - DNA, 25 bp, Homo sapien
ctaagtgtgagcagatagattttat

SEQ ID NO: 2282600 - DNA, 25 bp, Homo sapien
cagatagattttatttggaggatga

SEQ ID NO: 2282601 - DNA, 25 bp, Homo sapien
ggaggatgaaatgctttgagctcat

SEQ ID NO: 2282602 - DNA, 25 bp, Homo sapien
ttggaggatgaaatgctttgagctc

SEQ ID NO: 2282603 - DNA, 25 bp, Homo sapien
tctctgtttcaattgcctaccatct

SEQ ID NO: 2282604 - DNA, 25 bp, Homo sapien
gtttcaattgcctaccatctgcctt

SEQ ID NO: 2282605 - DNA, 25 bp, Homo sapien
cttcacgtgcagatatttgtggttt

SEQ ID NO: 2282606 - DNA, 25 bp, Homo sapien
tgtctctctgtttcaattgcctacc

SEQ ID NO: 2282607 - DNA, 25 bp, Homo sapien
tcccagagcagtaggatggcgataa

SEQ ID NO: 2282608 - DNA, 25 bp, Homo sapien
ggttctgatcaaccctgttcaccgc

SEQ ID NO: 2282609 - DNA, 25 bp, Homo sapien
gttcaatactgccaagtggtccctt

SEQ ID NO: 2282610 - DNA, 25 bp, Homo sapien
gctcttggctaattcagggtttccc

SEQ ID NO: 2282611 - DNA, 25 bp, Homo sapien
gagagccctgcacagttacccagct

SEQ ID NO: 2282612 - DNA, 25 bp, Homo sapien
agccacaaatggcccgctgcgagag

SEQ ID NO: 2282613 - DNA, 25 bp, Homo sapien
gagaagtgccagatttcgtctggaa

SEQ ID NO: 2282614 - DNA, 25 bp, Homo sapien
gaaagtcctccagtcagtgaaaagg

SEQ ID NO: 2282615 - DNA, 25 bp, Homo sapien
ccaacattaggagggcagcgggtct

SEQ ID NO: 2282616 - DNA, 25 bp, Homo sapien
gcccatgatgcattaaatcccttcc

SEQ ID NO: 2282617 - DNA, 25 bp, Homo sapien
cagatttacccgtcatccttaggga

SEQ ID NO: 2282618 - DNA, 25 bp, Homo sapien
ggaattggtggatccggacacagcc

SEQ ID NO: 2282619 - DNA, 25 bp, Homo sapien
ggagctgacggagggcctggctgta

SEQ ID NO: 2282620 - DNA, 25 bp, Homo sapien
tcagggagctgacggagggcctggc

SEQ ID NO: 2282621 - DNA, 25 bp, Homo sapien
agggagctgacggagggcctggctg

SEQ ID NO: 2282622 - DNA, 25 bp, Homo sapien
gagctgacggagggcctggctgtac

SEQ ID NO: 2282623 - DNA, 25 bp, Homo sapien
ggctcttcatccaaagggtttggca

SEQ ID NO: 2282624 - DNA, 25 bp, Homo sapien
cagcacggagtgaagtgtccaagca

SEQ ID NO: 2282625 - DNA, 25 bp, Homo sapien
ggtttggcacaagtgcaggaacaga

SEQ ID NO: 2282626 - DNA, 25 bp, Homo sapien
ccagagatgggcacaacgaggctct

SEQ ID NO: 2282627 - DNA, 25 bp, Homo sapien
tgtctaggagggtgtttccggagag

SEQ ID NO: 2282628 - DNA, 25 bp, Homo sapien
gggtgcccagattacacattatttc

SEQ ID NO: 2282629 - DNA, 25 bp, Homo sapien
cggagagattagctcctgaacagta

SEQ ID NO: 2282630 - DNA, 25 bp, Homo sapien
tatgtcaatttgactcggattatgg

SEQ ID NO: 2282631 - DNA, 25 bp, Homo sapien
ttccatctcaaaaagtcacatgttc

SEQ ID NO: 2282632 - DNA, 25 bp, Homo sapien
gaaataacaccacacgactagaacc

SEQ ID NO: 2282633 - DNA, 25 bp, Homo sapien
tattgaatctactcaaggaggaatc

SEQ ID NO: 2282634 - DNA, 25 bp, Homo sapien
caattagcattcacaatgaaagtgc

SEQ ID NO: 2282635 - DNA, 25 bp, Homo sapien
taatacagtctagtggcagataaca

SEQ ID NO: 2282636 - DNA, 25 bp, Homo sapien
tgttagggtccatcaaaaaaggatg

SEQ ID NO: 2282637 - DNA, 25 bp, Homo sapien
caatgtcttatctaccatggaggca

SEQ ID NO: 2282638 - DNA, 25 bp, Homo sapien
aaagcagtcttgagaagttcatgcc

SEQ ID NO: 2282639 - DNA, 25 bp, Homo sapien
gaaaaaggtgcctagctagatgaca

SEQ ID NO: 2282640 - DNA, 25 bp, Homo sapien
catcaagctcttcacgcagtggcaa

SEQ ID NO: 2282641 - DNA, 25 bp, Homo sapien
caatattggtgtactccggatggtc

SEQ ID NO: 2282642 - DNA, 25 bp, Homo sapien
gaccaaaaggtatcacaaagctcaa

SEQ ID NO: 2282643 - DNA, 25 bp, Homo sapien
ctttgcccgtaaggtatctacttcg

SEQ ID NO: 2282644 - DNA, 25 bp, Homo sapien
ggtatctacttcgatccagttctcc

SEQ ID NO: 2282645 - DNA, 25 bp, Homo sapien
tcctgtatacaccagactcttccat

SEQ ID NO: 2282646 - DNA, 25 bp, Homo sapien
tgtatacaccagactcttccatgag

SEQ ID NO: 2282647 - DNA, 25 bp, Homo sapien
agtttgagggagaattggtcacaga

SEQ ID NO: 2282648 - DNA, 25 bp, Homo sapien
tactcttccctgaaatcatcactcc

SEQ ID NO: 2282649 - DNA, 25 bp, Homo sapien
tctccaagaagtgagactcctgcta

SEQ ID NO: 2282650 - DNA, 25 bp, Homo sapien
ctagtttgagggagaattggtcaca

SEQ ID NO: 2282651 - DNA, 25 bp, Homo sapien
gaggttcctcacaatcctccaggat

SEQ ID NO: 2282652 - DNA, 25 bp, Homo sapien
ctccaggatgcacacccctaggtct

SEQ ID NO: 2282653 - DNA, 25 bp, Homo sapien
gcctggtcagaggacgaggggagca

SEQ ID NO: 2282654 - DNA, 25 bp, Homo sapien
aggatgcacacccctaggtctccag

SEQ ID NO: 2282655 - DNA, 25 bp, Homo sapien
cacagttagctgagtacccggtttt

SEQ ID NO: 2282656 - DNA, 25 bp, Homo sapien
ggcacctagcacatggtaccacagt

SEQ ID NO: 2282657 - DNA, 25 bp, Homo sapien
tagctgctcagttgctaagcgaaca

SEQ ID NO: 2282658 - DNA, 25 bp, Homo sapien
gagcccctgatacacagtagctgct

SEQ ID NO: 2282659 - DNA, 25 bp, Homo sapien
aactgttcgctgtgaagtagagggc

SEQ ID NO: 2282660 - DNA, 25 bp, Homo sapien
gacagtacaaactgttcgctgtgaa

SEQ ID NO: 2282661 - DNA, 25 bp, Homo sapien
caagcagcatcaacctgcaggtcat

SEQ ID NO: 2282662 - DNA, 25 bp, Homo sapien
catatgtgcaccagagtaaagattt

SEQ ID NO: 2282663 - DNA, 25 bp, Homo sapien
ttcgacgtatgctcaccacagaggg

SEQ ID NO: 2282664 - DNA, 25 bp, Homo sapien
tcaggtagagaagcgctgcgattcc

SEQ ID NO: 2282665 - DNA, 25 bp, Homo sapien
tgtgtgccatgacgttctccaggac

SEQ ID NO: 2282666 - DNA, 25 bp, Homo sapien
gatcgatggaaacgcagtgcacaac

SEQ ID NO: 2282667 - DNA, 25 bp, Homo sapien
ccgcattacggagggccatgtgctt

SEQ ID NO: 2282668 - DNA, 25 bp, Homo sapien
tgggtgaggcctacccgcattacgg

SEQ ID NO: 2282669 - DNA, 25 bp, Homo sapien
ctgtggcattccctcttcggttcta

SEQ ID NO: 2282670 - DNA, 25 bp, Homo sapien
cagtgtaagtctgaaggccatctgc

SEQ ID NO: 2282671 - DNA, 25 bp, Homo sapien
tagctatcaactagcagagcgcagg

SEQ ID NO: 2282672 - DNA, 25 bp, Homo sapien
gatgatagtagttaccacctgggat

SEQ ID NO: 2282673 - DNA, 25 bp, Homo sapien
gaagcaagcgctctaaagtcggact

SEQ ID NO: 2282674 - DNA, 25 bp, Homo sapien
tgtttcagaagcgtcagaagcaagc

SEQ ID NO: 2282675 - DNA, 25 bp, Homo sapien
gcaggctgcgtagttaggcaattca

SEQ ID NO: 2282676 - DNA, 25 bp, Homo sapien
cagcaggcccctaatcaaatacatg

SEQ ID NO: 2282677 - DNA, 25 bp, Homo sapien
ccgtctttggttctcagcctcttga

SEQ ID NO: 2282678 - DNA, 25 bp, Homo sapien
cctgtgttaagccatgcatgtagta

SEQ ID NO: 2282679 - DNA, 25 bp, Homo sapien
gaaaggaactaatcctgctctgccc

SEQ ID NO: 2282680 - DNA, 25 bp, Homo sapien
tcgcttgggtggcataaatcactcc

SEQ ID NO: 2282681 - DNA, 25 bp, Homo sapien
ttcagccaaaagtgaaccaccttcc

SEQ ID NO: 2282682 - DNA, 25 bp, Homo sapien
tgatggaccccagcggttcaggtca

SEQ ID NO: 2282683 - DNA, 25 bp, Homo sapien
taatgagtcttccaaagcatccttg

SEQ ID NO: 2282684 - DNA, 25 bp, Homo sapien
aggaaaagagtgatgctcttgtttg

SEQ ID NO: 2282685 - DNA, 25 bp, Homo sapien
aatgcagatgtctaaggcagtccag

SEQ ID NO: 2282686 - DNA, 25 bp, Homo sapien
tcttgtttgagtcccttatttcaga

SEQ ID NO: 2282687 - DNA, 25 bp, Homo sapien
tacaactgtttgaaggccacagagg

SEQ ID NO: 2282688 - DNA, 25 bp, Homo sapien
tggagttgaaccactcagatctggg

SEQ ID NO: 2282689 - DNA, 25 bp, Homo sapien
gatctgggatacaataagctcaacc

SEQ ID NO: 2282690 - DNA, 25 bp, Homo sapien
cctgctgaaatacgggcttggatga

SEQ ID NO: 2282691 - DNA, 25 bp, Homo sapien
tcttgtgatcacttgcaggcgcatg

SEQ ID NO: 2282692 - DNA, 25 bp, Homo sapien
cccactcagctagagaacgggttgt

SEQ ID NO: 2282693 - DNA, 25 bp, Homo sapien
tgccttgggaaagcattctcatgcg

SEQ ID NO: 2282694 - DNA, 25 bp, Homo sapien
gcaccaagtcccagtagttacctag

SEQ ID NO: 2282695 - DNA, 25 bp, Homo sapien
gcctcctgacttgagatgcaggcct

SEQ ID NO: 2282696 - DNA, 25 bp, Homo sapien
cctcctgacttgagatgcaggcctc

SEQ ID NO: 2282697 - DNA, 25 bp, Homo sapien
aatatgcatgagattgcccaaaggg

SEQ ID NO: 2282698 - DNA, 25 bp, Homo sapien
aaagatcaggatctttcgtgggtct

SEQ ID NO: 2282699 - DNA, 25 bp, Homo sapien
gcccaaagggactgtgagataactt

SEQ ID NO: 2282700 - DNA, 25 bp, Homo sapien
tctttcgtgggtctatgtttgtcgg

SEQ ID NO: 2282701 - DNA, 25 bp, Homo sapien
ccaaatctgtatgaactgccaccag

SEQ ID NO: 2282702 - DNA, 25 bp, Homo sapien
gaccgcttcctatctcagtgaggga

SEQ ID NO: 2282703 - DNA, 25 bp, Homo sapien
tcagagccaatgactgtgccggagc

SEQ ID NO: 2282704 - DNA, 25 bp, Homo sapien
tatagcttctgattcgtgggagacc

SEQ ID NO: 2282705 - DNA, 25 bp, Homo sapien
tgtgctgtttaaccatacaactcag

SEQ ID NO: 2282706 - DNA, 25 bp, Homo sapien
tgtcagaactaagagctgaacacag

SEQ ID NO: 2282707 - DNA, 25 bp, Homo sapien
tgcctctccctaaaaactgtgctgt

SEQ ID NO: 2282708 - DNA, 25 bp, Homo sapien
gccttgagcaagaaatttttatcct

SEQ ID NO: 2282709 - DNA, 25 bp, Homo sapien
ctgaagatacccaggggagaataaa

SEQ ID NO: 2282710 - DNA, 25 bp, Homo sapien
tgttagcagttctgataaagacttg

SEQ ID NO: 2282711 - DNA, 25 bp, Homo sapien
tcaaaccagtcgacttttctccttg

SEQ ID NO: 2282712 - DNA, 25 bp, Homo sapien
acttggtgggagaagaattattatt

SEQ ID NO: 2282713 - DNA, 25 bp, Homo sapien
tggccatttcactgttcattagcac

SEQ ID NO: 2282714 - DNA, 25 bp, Homo sapien
cttttggccatttcactgttcatta

SEQ ID NO: 2282715 - DNA, 25 bp, Homo sapien
tttggccatttcactgttcattagc

SEQ ID NO: 2282716 - DNA, 25 bp, Homo sapien
ggccatttcactgttcattagcacc

SEQ ID NO: 2282717 - DNA, 25 bp, Homo sapien
tttgtggattatctgagcctccttc

SEQ ID NO: 2282718 - DNA, 25 bp, Homo sapien
tccagtgtgttaatttagcttccaa

SEQ ID NO: 2282719 - DNA, 25 bp, Homo sapien
gcttccaacaatgcctagcaggtga

SEQ ID NO: 2282720 - DNA, 25 bp, Homo sapien
ggagttaactcaattattcaaagcg

SEQ ID NO: 2282721 - DNA, 25 bp, Homo sapien
tcaaaatatttgggttgtccatttc

SEQ ID NO: 2282722 - DNA, 25 bp, Homo sapien
tttctctcagtttagggcctggcct

SEQ ID NO: 2282723 - DNA, 25 bp, Homo sapien
agtttagggcctggcctacaactgg

SEQ ID NO: 2282724 - DNA, 25 bp, Homo sapien
gggagagtaacttcaattctcttca

SEQ ID NO: 2282725 - DNA, 25 bp, Homo sapien
gagagtgtaggtccggccctcccag

SEQ ID NO: 2282726 - DNA, 25 bp, Homo sapien
agaccaggactcctatgctcttcct

SEQ ID NO: 2282727 - DNA, 25 bp, Homo sapien
taaagatttttgatgggtggtccag

SEQ ID NO: 2282728 - DNA, 25 bp, Homo sapien
gtggtccaggtagaagctagtgaaa

SEQ ID NO: 2282729 - DNA, 25 bp, Homo sapien
tattttgcagacctagaaagcgtgg

SEQ ID NO: 2282730 - DNA, 25 bp, Homo sapien
cccagtaacgcatagatggtcatga

SEQ ID NO: 2282731 - DNA, 25 bp, Homo sapien
taaaatgcacccctcgacgctggca

SEQ ID NO: 2282732 - DNA, 25 bp, Homo sapien
gcatcaataattttcgcttgcacag

SEQ ID NO: 2282733 - DNA, 25 bp, Homo sapien
ccttggtgacttgcacctttgtgca

SEQ ID NO: 2282734 - DNA, 25 bp, Homo sapien
gcacactacaattggcttccttgag

SEQ ID NO: 2282735 - DNA, 25 bp, Homo sapien
gtttgtacaggacttgtcaagcagg

SEQ ID NO: 2282736 - DNA, 25 bp, Homo sapien
tacaaaggctgcctagaccgtgggc

SEQ ID NO: 2282737 - DNA, 25 bp, Homo sapien
ttctagggaagagcaaacagcaacc

SEQ ID NO: 2282738 - DNA, 25 bp, Homo sapien
gagcagtgctacaaaaggcagcctc

SEQ ID NO: 2282739 - DNA, 25 bp, Homo sapien
cattctgcggtggagagagttgcca

SEQ ID NO: 2282740 - DNA, 25 bp, Homo sapien
aagtcgcaggttcacagagcaggga

SEQ ID NO: 2282741 - DNA, 25 bp, Homo sapien
aaagcagcacattcaaacgacacag

SEQ ID NO: 2282742 - DNA, 25 bp, Homo sapien
cagggacagggtgctttcagaacaa

SEQ ID NO: 2282743 - DNA, 25 bp, Homo sapien
gacaacgtccttctccagagtagag

SEQ ID NO: 2282744 - DNA, 25 bp, Homo sapien
ggtcatgtgttcaggctcagggaca

SEQ ID NO: 2282745 - DNA, 25 bp, Homo sapien
agtctaactgtctacataaaaatct

SEQ ID NO: 2282746 - DNA, 25 bp, Homo sapien
aagtctaactgtctacataaaaatc

SEQ ID NO: 2282747 - DNA, 25 bp, Homo sapien
tgaagtctaactgtctacataaaaa

SEQ ID NO: 2282748 - DNA, 25 bp, Homo sapien
gaagtctaactgtctacataaaaat

SEQ ID NO: 2282749 - DNA, 25 bp, Homo sapien
gggcttcaacaacggttccaacatg

SEQ ID NO: 2282750 - DNA, 25 bp, Homo sapien
tgttcaaactactagagtgggtagt

SEQ ID NO: 2282751 - DNA, 25 bp, Homo sapien
ctgtgaaagcgtgctacagcatcaa

SEQ ID NO: 2282752 - DNA, 25 bp, Homo sapien
ccaacatgtagctgccaacaactga

SEQ ID NO: 2282753 - DNA, 25 bp, Homo sapien
tgcctcttcgtaaacccttcgcctc

SEQ ID NO: 2282754 - DNA, 25 bp, Homo sapien
tacaagctttgaacctgcatgggaa

SEQ ID NO: 2282755 - DNA, 25 bp, Homo sapien
ccagtgtggatgtacacgcaggcaa

SEQ ID NO: 2282756 - DNA, 25 bp, Homo sapien
tgattccttgtcacgtcaggctgtg

SEQ ID NO: 2282757 - DNA, 25 bp, Homo sapien
tgtatcctgggcacaacaaagtggc

SEQ ID NO: 2282758 - DNA, 25 bp, Homo sapien
cttctgcacctgctctgggatctga

SEQ ID NO: 2282759 - DNA, 25 bp, Homo sapien
cttacggtgaaacaccacacttctg

SEQ ID NO: 2282760 - DNA, 25 bp, Homo sapien
ttacggtgaaacaccacacttctgc

SEQ ID NO: 2282761 - DNA, 25 bp, Homo sapien
acacttctgcacctgctctgggatc

SEQ ID NO: 2282762 - DNA, 25 bp, Homo sapien
gcaggcggatcgagtcttcctccat

SEQ ID NO: 2282763 - DNA, 25 bp, Homo sapien
gcaggcaggcggatcgagtcttcct

SEQ ID NO: 2282764 - DNA, 25 bp, Homo sapien
ggaagcgtaactcggcactgggctc

SEQ ID NO: 2282765 - DNA, 25 bp, Homo sapien
acatgaagtggcgtcgaggaagcgt

SEQ ID NO: 2282766 - DNA, 25 bp, Homo sapien
aatcctctgtccctctcgggtcacg

SEQ ID NO: 2282767 - DNA, 25 bp, Homo sapien
tcaatcctctgtccctctcgggtca

SEQ ID NO: 2282768 - DNA, 25 bp, Homo sapien
ctctgtccctctcgggtcacgaaca

SEQ ID NO: 2282769 - DNA, 25 bp, Homo sapien
gtccctctcgggtcacgaacactca

SEQ ID NO: 2282770 - DNA, 25 bp, Homo sapien
ttttttaacatgtcatagtcaggga

SEQ ID NO: 2282771 - DNA, 25 bp, Homo sapien
ggtgtgaaagattccaaagcagcgt

SEQ ID NO: 2282772 - DNA, 25 bp, Homo sapien
ttaacatgtcatagtcagggaagaa

SEQ ID NO: 2282773 - DNA, 25 bp, Homo sapien
aagcagcgtggcgaagtcctgtgaa

SEQ ID NO: 2282774 - DNA, 25 bp, Homo sapien
tgaatatatcggtcacaggatgact

SEQ ID NO: 2282775 - DNA, 25 bp, Homo sapien
gaccctggcacctttacagttcgaa

SEQ ID NO: 2282776 - DNA, 25 bp, Homo sapien
gaacactgatgttcccagccatgac

SEQ ID NO: 2282777 - DNA, 25 bp, Homo sapien
catgagtatgttccatcctgaggcg

SEQ ID NO: 2282778 - DNA, 25 bp, Homo sapien
gagtcgagccatgctgcacacatag

SEQ ID NO: 2282779 - DNA, 25 bp, Homo sapien
taccatgcggccacctgaaactttc

SEQ ID NO: 2282780 - DNA, 25 bp, Homo sapien
gctggcccttaaatttagacaactg

SEQ ID NO: 2282781 - DNA, 25 bp, Homo sapien
taatgactgttctcacgccccaaat

SEQ ID NO: 2282782 - DNA, 25 bp, Homo sapien
ttttccacaacggaaagttgcaggc

SEQ ID NO: 2282783 - DNA, 25 bp, Homo sapien
ctaatatgcaaggtgtggacagagc

SEQ ID NO: 2282784 - DNA, 25 bp, Homo sapien
tttgtactagcactgagcctacggg

SEQ ID NO: 2282785 - DNA, 25 bp, Homo sapien
gccatttcgagagtatgcagactat

SEQ ID NO: 2282786 - DNA, 25 bp, Homo sapien
caggtaagagacacacccagggagt

SEQ ID NO: 2282787 - DNA, 25 bp, Homo sapien
taggcaacccagcatctagtaagcg

SEQ ID NO: 2282788 - DNA, 25 bp, Homo sapien
taacaaaacaagtctagcatccggt

SEQ ID NO: 2282789 - DNA, 25 bp, Homo sapien
aactgtcaggcacgtgagaaggcac

SEQ ID NO: 2282790 - DNA, 25 bp, Homo sapien
tggtttactcagagggacccaagtg

SEQ ID NO: 2282791 - DNA, 25 bp, Homo sapien
cattggcgccatgttgatccgttac

SEQ ID NO: 2282792 - DNA, 25 bp, Homo sapien
tatgaactgaaacttcacggccaga

SEQ ID NO: 2282793 - DNA, 25 bp, Homo sapien
gacccaagtggttaaataggacatg

SEQ ID NO: 2282794 - DNA, 25 bp, Homo sapien
aacagacgctctgacttggtggtgg

SEQ ID NO: 2282795 - DNA, 25 bp, Homo sapien
ggtttccttcaaatgtacacaacag

SEQ ID NO: 2282796 - DNA, 25 bp, Homo sapien
ttgactcagtgtagtttaactcccc

SEQ ID NO: 2282797 - DNA, 25 bp, Homo sapien
tcatttcagagtctatccaaggcca

SEQ ID NO: 2282798 - DNA, 25 bp, Homo sapien
gatcttggaccttcccgagaccaat

SEQ ID NO: 2282799 - DNA, 25 bp, Homo sapien
tcatacttcaatcctgatcttggac

SEQ ID NO: 2282800 - DNA, 25 bp, Homo sapien
tcccgagaccaatcttagaaacagc

SEQ ID NO: 2282801 - DNA, 25 bp, Homo sapien
tagaaacagctttatggtatgagca

SEQ ID NO: 2282802 - DNA, 25 bp, Homo sapien
tcttccatgggccttgtggttgggt

SEQ ID NO: 2282803 - DNA, 25 bp, Homo sapien
tccaggtccgccctcagttgtgtga

SEQ ID NO: 2282804 - DNA, 25 bp, Homo sapien
accacatcgggtgatgcctccacaa

SEQ ID NO: 2282805 - DNA, 25 bp, Homo sapien
ggtcttgctcccaacggtctctcaa

SEQ ID NO: 2282806 - DNA, 25 bp, Homo sapien
aaagcaaaaacaagatgaacaaata

SEQ ID NO: 2282807 - DNA, 25 bp, Homo sapien
gcaaaaacaagatgaacaaataagc

SEQ ID NO: 2282808 - DNA, 25 bp, Homo sapien
taaaagcaaaaacaagatgaacaaa

SEQ ID NO: 2282809 - DNA, 25 bp, Homo sapien
agcaaaaacaagatgaacaaataag

SEQ ID NO: 2282810 - DNA, 25 bp, Homo sapien
gactctcttgcgtggttaacacaca

SEQ ID NO: 2282811 - DNA, 25 bp, Homo sapien
tctctgtgcagttccctaggtggtg

SEQ ID NO: 2282812 - DNA, 25 bp, Homo sapien
gaacattgctcaaccgtggacctga

SEQ ID NO: 2282813 - DNA, 25 bp, Homo sapien
gcttcgggagccaacaaagttctgg

SEQ ID NO: 2282814 - DNA, 25 bp, Homo sapien
caactcacggatatgaagggcagac

SEQ ID NO: 2282815 - DNA, 25 bp, Homo sapien
agggcagactgtataccttgtcagg

SEQ ID NO: 2282816 - DNA, 25 bp, Homo sapien
tggaatcacggatgtgcaactcacg

SEQ ID NO: 2282817 - DNA, 25 bp, Homo sapien
gaatgaactacgtatgccatccttg

SEQ ID NO: 2282818 - DNA, 25 bp, Homo sapien
tgtgcaaaactccagtgaagagtgt

SEQ ID NO: 2282819 - DNA, 25 bp, Homo sapien
tctggtaagatttgtgcaaaactcc

SEQ ID NO: 2282820 - DNA, 25 bp, Homo sapien
tgtgcacgcggtcaatttctccaaa

SEQ ID NO: 2282821 - DNA, 25 bp, Homo sapien
ccagtgaagagtgtgcacgcggtca

SEQ ID NO: 2282822 - DNA, 25 bp, Homo sapien
ttctcctgggaagtatgtgaactga

SEQ ID NO: 2282823 - DNA, 25 bp, Homo sapien
tctgggttttctgcgctgaagctgc

SEQ ID NO: 2282824 - DNA, 25 bp, Homo sapien
cacagccaccttggatggcagttca

SEQ ID NO: 2282825 - DNA, 25 bp, Homo sapien
gaaggttcttcgacatgactataaa

SEQ ID NO: 2282826 - DNA, 25 bp, Homo sapien
catgtgccaggggaattcccatcac

SEQ ID NO: 2282827 - DNA, 25 bp, Homo sapien
catcaaaacacagttgggtctaact

SEQ ID NO: 2282828 - DNA, 25 bp, Homo sapien
tgctgagcactcattttgtccacct

SEQ ID NO: 2282829 - DNA, 25 bp, Homo sapien
acctctccgttcactcacccactca

SEQ ID NO: 2282830 - DNA, 25 bp, Homo sapien
gcacaaggcaggattaacaaaaact

SEQ ID NO: 2282831 - DNA, 25 bp, Homo sapien
tacagatgaataagaccaggagcta

SEQ ID NO: 2282832 - DNA, 25 bp, Homo sapien
gacgtatgcgggagagttctaacgc

SEQ ID NO: 2282833 - DNA, 25 bp, Homo sapien
tatatgtttactgatgctacagatg

SEQ ID NO: 2282834 - DNA, 25 bp, Homo sapien
ggttttgctattgagctgctctgct

SEQ ID NO: 2282835 - DNA, 25 bp, Homo sapien
gatgtctcgtcgctgggttttggtt

SEQ ID NO: 2282836 - DNA, 25 bp, Homo sapien
tccgtggggattctgagagttacac

SEQ ID NO: 2282837 - DNA, 25 bp, Homo sapien
ggattctgagagttacactgctgct

SEQ ID NO: 2282838 - DNA, 25 bp, Homo sapien
ggccatccctaaccttttcaatgtg

SEQ ID NO: 2282839 - DNA, 25 bp, Homo sapien
ggcccagagaactctacacctttca

SEQ ID NO: 2282840 - DNA, 25 bp, Homo sapien
tactataggaacgagcaaaaccact

SEQ ID NO: 2282841 - DNA, 25 bp, Homo sapien
aaagctggccatcagcgtggctggt

SEQ ID NO: 2282842 - DNA, 25 bp, Homo sapien
ccaaatagaaatgtccgtgtcctaa

SEQ ID NO: 2282843 - DNA, 25 bp, Homo sapien
gctgccaaatagaaatgtccgtgtc

SEQ ID NO: 2282844 - DNA, 25 bp, Homo sapien
tggctgccaaatagaaatgtccgtg

SEQ ID NO: 2282845 - DNA, 25 bp, Homo sapien
tgttggctgccaaatagaaatgtcc

SEQ ID NO: 2282846 - DNA, 25 bp, Homo sapien
gaggaatgagtcaggtgacccttga

SEQ ID NO: 2282847 - DNA, 25 bp, Homo sapien
taggagtgacaagaggtaggagccc

SEQ ID NO: 2282848 - DNA, 25 bp, Homo sapien
cttcggcccgtcatcattcatggct

SEQ ID NO: 2282849 - DNA, 25 bp, Homo sapien
tagctttggtgggtagtcagatgaa

SEQ ID NO: 2282850 - DNA, 25 bp, Homo sapien
tccaccgaaaggctgtctgggctgc

SEQ ID NO: 2282851 - DNA, 25 bp, Homo sapien
tgattcagcatttcgcggggcagac

SEQ ID NO: 2282852 - DNA, 25 bp, Homo sapien
gggtgtcgaatctaccctccaccga

SEQ ID NO: 2282853 - DNA, 25 bp, Homo sapien
ttggttgcctttgggtgtcgaatct

SEQ ID NO: 2282854 - DNA, 25 bp, Homo sapien
tacctgtgaggtaatgcgaaaacca

SEQ ID NO: 2282855 - DNA, 25 bp, Homo sapien
ccttcaaaatgcacaggcacatgga

SEQ ID NO: 2282856 - DNA, 25 bp, Homo sapien
gagcaagtacttctcagcgttagga

SEQ ID NO: 2282857 - DNA, 25 bp, Homo sapien
ttatttgaaacgcacagtcctgacc

SEQ ID NO: 2282858 - DNA, 25 bp, Homo sapien
ttgccgagggcagggtttacttaga

SEQ ID NO: 2282859 - DNA, 25 bp, Homo sapien
ggtctagctgcagatcccgaatact

SEQ ID NO: 2282860 - DNA, 25 bp, Homo sapien
catcatctattctgcgagggagcta

SEQ ID NO: 2282861 - DNA, 25 bp, Homo sapien
ctaagaccaaaactccagctccagg

SEQ ID NO: 2282862 - DNA, 25 bp, Homo sapien
tgagtgcaaattagcaatgctcctc

SEQ ID NO: 2282863 - DNA, 25 bp, Homo sapien
tgccagactgtacagccaaagattt

SEQ ID NO: 2282864 - DNA, 25 bp, Homo sapien
gagttaacatgtccatgcatgtagc

SEQ ID NO: 2282865 - DNA, 25 bp, Homo sapien
acagtccccaggtttaatgccagac

SEQ ID NO: 2282866 - DNA, 25 bp, Homo sapien
tgccatgacagagatccaggtggtc

SEQ ID NO: 2282867 - DNA, 25 bp, Homo sapien
ccatagtgctttttgtgtagcctaa

SEQ ID NO: 2282868 - DNA, 25 bp, Homo sapien
caggtggtctagctctacagtgtca

SEQ ID NO: 2282869 - DNA, 25 bp, Homo sapien
aggagaaaactagaacacagggaag

SEQ ID NO: 2282870 - DNA, 25 bp, Homo sapien
cagtccatggatatgggaagtacca

SEQ ID NO: 2282871 - DNA, 25 bp, Homo sapien
gaaaacacgtatctagaatcacagg

SEQ ID NO: 2282872 - DNA, 25 bp, Homo sapien
gcaaaatctcagtttttgaactggt

SEQ ID NO: 2282873 - DNA, 25 bp, Homo sapien
tgtttttgactcctgactggccaga

SEQ ID NO: 2282874 - DNA, 25 bp, Homo sapien
gggaacaaacggctcaaatgccctg

SEQ ID NO: 2282875 - DNA, 25 bp, Homo sapien
ggaacaaacggctcaaatgccctgg

SEQ ID NO: 2282876 - DNA, 25 bp, Homo sapien
aaacggctcaaatgccctggaaaat

SEQ ID NO: 2282877 - DNA, 25 bp, Homo sapien
aacaaacggctcaaatgccctggaa

SEQ ID NO: 2282878 - DNA, 25 bp, Homo sapien
gatcttgggacccatcagggttccc

SEQ ID NO: 2282879 - DNA, 25 bp, Homo sapien
aactgctgggtcagaagaagctgga

SEQ ID NO: 2282880 - DNA, 25 bp, Homo sapien
tagggtgcctatgaagtaaaacatc

SEQ ID NO: 2282881 - DNA, 25 bp, Homo sapien
tcttaggtggaatgttctagaaggc

SEQ ID NO: 2282882 - DNA, 25 bp, Homo sapien
gcttcctggtggggtggtacttgaa

SEQ ID NO: 2282883 - DNA, 25 bp, Homo sapien
gagcttcctggtggggtggtacttg

SEQ ID NO: 2282884 - DNA, 25 bp, Homo sapien
tagagcttcctggtggggtggtact

SEQ ID NO: 2282885 - DNA, 25 bp, Homo sapien
acattagagcttcctggtggggtgg

SEQ ID NO: 2282886 - DNA, 25 bp, Homo sapien
tgatctgattgcagcccagcgtcct

SEQ ID NO: 2282887 - DNA, 25 bp, Homo sapien
ggagggtcctcagattcagagctga

SEQ ID NO: 2282888 - DNA, 25 bp, Homo sapien
ccagagctgagcttgaccttccaga

SEQ ID NO: 2282889 - DNA, 25 bp, Homo sapien
tcttccaggaagagcaattcactca

SEQ ID NO: 2282890 - DNA, 25 bp, Homo sapien
caggggctgttccagggtgcccaca

SEQ ID NO: 2282891 - DNA, 25 bp, Homo sapien
cagttccaggggctgttccagggtg

SEQ ID NO: 2282892 - DNA, 25 bp, Homo sapien
ctgcccttccttgcccagttccagg

SEQ ID NO: 2282893 - DNA, 25 bp, Homo sapien
tccaggggctgttccagggtgccca

SEQ ID NO: 2282894 - DNA, 25 bp, Homo sapien
aaatgagtctccacatctcaagagc

SEQ ID NO: 2282895 - DNA, 25 bp, Homo sapien
tctcaagagcccttatgttcaactc

SEQ ID NO: 2282896 - DNA, 25 bp, Homo sapien
ggtcttgtcagttagacagctggaa

SEQ ID NO: 2282897 - DNA, 25 bp, Homo sapien
aagcccagaagcagcctccaagagg

SEQ ID NO: 2282898 - DNA, 25 bp, Homo sapien
attttcagcccacttgagccactgg

SEQ ID NO: 2282899 - DNA, 25 bp, Homo sapien
gatcgatagcgaaagtcctctttgg

SEQ ID NO: 2282900 - DNA, 25 bp, Homo sapien
gggctacgtcatccctgctccagta

SEQ ID NO: 2282901 - DNA, 25 bp, Homo sapien
caaacgtgttgctgtcaattggcct

SEQ ID NO: 2282902 - DNA, 25 bp, Homo sapien
ggcatatgccaagagtccagactct

SEQ ID NO: 2282903 - DNA, 25 bp, Homo sapien
ttgggcatatgccaagagtccagac

SEQ ID NO: 2282904 - DNA, 25 bp, Homo sapien
aagttgggcatatgccaagagtcca

SEQ ID NO: 2282905 - DNA, 25 bp, Homo sapien
agttgggcatatgccaagagtccag

SEQ ID NO: 2282906 - DNA, 25 bp, Homo sapien
catctcctgtaatgagggacgtttc

SEQ ID NO: 2282907 - DNA, 25 bp, Homo sapien
agtttattaacttctggcaggtctc

SEQ ID NO: 2282908 - DNA, 25 bp, Homo sapien
gactatgccaagaccttctgcagga

SEQ ID NO: 2282909 - DNA, 25 bp, Homo sapien
gatcctcgccctttgtcaagttaca

SEQ ID NO: 2282910 - DNA, 25 bp, Homo sapien
catttcttcatataaacggtctgtg

SEQ ID NO: 2282911 - DNA, 25 bp, Homo sapien
gcatttcttcatataaacggtctgt

SEQ ID NO: 2282912 - DNA, 25 bp, Homo sapien
agcatttcttcatataaacggtctg

SEQ ID NO: 2282913 - DNA, 25 bp, Homo sapien
atttcttcatataaacggtctgtgg

SEQ ID NO: 2282914 - DNA, 25 bp, Homo sapien
tgtgagattacatacagaattgatg

SEQ ID NO: 2282915 - DNA, 25 bp, Homo sapien
tttcttattgtgagattacatacag

SEQ ID NO: 2282916 - DNA, 25 bp, Homo sapien
catacagaattgatgatatgagaca

SEQ ID NO: 2282917 - DNA, 25 bp, Homo sapien
tacatacagaattgatgatatgaga

SEQ ID NO: 2282918 - DNA, 25 bp, Homo sapien
tctgtgacctatatccttggatgct

SEQ ID NO: 2282919 - DNA, 25 bp, Homo sapien
gccaactctggtgtcttcagacaag

SEQ ID NO: 2282920 - DNA, 25 bp, Homo sapien
taaaatagccagttgacacagccct

SEQ ID NO: 2282921 - DNA, 25 bp, Homo sapien
cagacaagggtcatgcctgctacaa

SEQ ID NO: 2282922 - DNA, 25 bp, Homo sapien
tctgcaaggctacctaggtctctcc

SEQ ID NO: 2282923 - DNA, 25 bp, Homo sapien
tcaagtatatgacaacagggtgggt

SEQ ID NO: 2282924 - DNA, 25 bp, Homo sapien
cactgtgcagttggttttccctacg

SEQ ID NO: 2282925 - DNA, 25 bp, Homo sapien
caatgtttagcgtcatctgcaaggc

SEQ ID NO: 2282926 - DNA, 25 bp, Homo sapien
caaagggcaatggttggtactcagg

SEQ ID NO: 2282927 - DNA, 25 bp, Homo sapien
tcttagaatactccatggcttcaga

SEQ ID NO: 2282928 - DNA, 25 bp, Homo sapien
tccagcccttcagtagtaaggttcc

SEQ ID NO: 2282929 - DNA, 25 bp, Homo sapien
tcaatcggctcgtctatgctaaatc

SEQ ID NO: 2282930 - DNA, 25 bp, Homo sapien
tgaaaataaagagcatgcgccacag

SEQ ID NO: 2282931 - DNA, 25 bp, Homo sapien
atattgcccaaaccgtaagcctcag

SEQ ID NO: 2282932 - DNA, 25 bp, Homo sapien
tgatgtaccatgaagctagtgagct

SEQ ID NO: 2282933 - DNA, 25 bp, Homo sapien
tgagccctactggtcaaagaaccat

SEQ ID NO: 2282934 - DNA, 25 bp, Homo sapien
catctagagatgtcaggccattgcc

SEQ ID NO: 2282935 - DNA, 25 bp, Homo sapien
gctgaaaatgcaggtgggtgcctca

SEQ ID NO: 2282936 - DNA, 25 bp, Homo sapien
caagatactctataaggaactggca

SEQ ID NO: 2282937 - DNA, 25 bp, Homo sapien
tcacaagtccggttagaggtggtaa

SEQ ID NO: 2282938 - DNA, 25 bp, Homo sapien
gcagtatgacctccggctgtgtgtg

SEQ ID NO: 2282939 - DNA, 25 bp, Homo sapien
gtgtgtgtatagagtttccagggtg

SEQ ID NO: 2282940 - DNA, 25 bp, Homo sapien
catggttctgatgcagtatgacctc

SEQ ID NO: 2282941 - DNA, 25 bp, Homo sapien
cagaatatgctgaaggagttcatag

SEQ ID NO: 2282942 - DNA, 25 bp, Homo sapien
caagaaaagagaaacctcttccagt

SEQ ID NO: 2282943 - DNA, 25 bp, Homo sapien
ggcaagaaaagagaaacctcttcca

SEQ ID NO: 2282944 - DNA, 25 bp, Homo sapien
tcaggcaagaaaagagaaacctctt

SEQ ID NO: 2282945 - DNA, 25 bp, Homo sapien
caggcaagaaaagagaaacctcttc

SEQ ID NO: 2282946 - DNA, 25 bp, Homo sapien
atatggttacgcttctgtgcttctg

SEQ ID NO: 2282947 - DNA, 25 bp, Homo sapien
atccatctcactgcttcgctttgat

SEQ ID NO: 2282948 - DNA, 25 bp, Homo sapien
atctcactgcttcgctttgatcgtg

SEQ ID NO: 2282949 - DNA, 25 bp, Homo sapien
ctttacggtgcctactatatggtta

SEQ ID NO: 2282950 - DNA, 25 bp, Homo sapien
gagcagctctcagagtaagccagct

SEQ ID NO: 2282951 - DNA, 25 bp, Homo sapien
tcattacagcgtatgcggtggcaca

SEQ ID NO: 2282952 - DNA, 25 bp, Homo sapien
tatttacttggtttgcgagcagctc

SEQ ID NO: 2282953 - DNA, 25 bp, Homo sapien
ccaccaacatcataatacttgagag

SEQ ID NO: 2282954 - DNA, 25 bp, Homo sapien
ctctttgtcatcaagggcaccatat

SEQ ID NO: 2282955 - DNA, 25 bp, Homo sapien
tctttgtcatcaagggcaccatata

SEQ ID NO: 2282956 - DNA, 25 bp, Homo sapien
tctctttgtcatcaagggcaccata

SEQ ID NO: 2282957 - DNA, 25 bp, Homo sapien
tccttcttttacaggtagagacctg

SEQ ID NO: 2282958 - DNA, 25 bp, Homo sapien
tctttcttatgtcaaccctttgaga

SEQ ID NO: 2282959 - DNA, 25 bp, Homo sapien
acctgagacccaaggcagttgcctg

SEQ ID NO: 2282960 - DNA, 25 bp, Homo sapien
tcacacagccggtaaactggggagc

SEQ ID NO: 2282961 - DNA, 25 bp, Homo sapien
acacaggaaatgcactgagcggaca

SEQ ID NO: 2282962 - DNA, 25 bp, Homo sapien
cggacagtgggtgcattaaatcccc

SEQ ID NO: 2282963 - DNA, 25 bp, Homo sapien
cactgagcggacagtgggtgcatta

SEQ ID NO: 2282964 - DNA, 25 bp, Homo sapien
ggtgcattaaatcccccagatgtag

SEQ ID NO: 2282965 - DNA, 25 bp, Homo sapien
gggtacatggtgattcattacacaa

SEQ ID NO: 2282966 - DNA, 25 bp, Homo sapien
tactgggcaccaactaaaatgatct

SEQ ID NO: 2282967 - DNA, 25 bp, Homo sapien
ggttggaaagacaagcactaacttc

SEQ ID NO: 2282968 - DNA, 25 bp, Homo sapien
gaagacatgattggccttgagttga

SEQ ID NO: 2282969 - DNA, 25 bp, Homo sapien
tcagttcaacaatagcagagtggcg

SEQ ID NO: 2282970 - DNA, 25 bp, Homo sapien
cagagtggcgtgtaccaaactaacc

SEQ ID NO: 2282971 - DNA, 25 bp, Homo sapien
tgaagaaacaaatcccatacagtgg

SEQ ID NO: 2282972 - DNA, 25 bp, Homo sapien
tctgattaccgaatagcccaagtgc

SEQ ID NO: 2282973 - DNA, 25 bp, Homo sapien
aggaagccaaacttccatgccccat

SEQ ID NO: 2282974 - DNA, 25 bp, Homo sapien
ggcctgtaggcacaaggaagccaaa

SEQ ID NO: 2282975 - DNA, 25 bp, Homo sapien
ctgtaggcacaaggaagccaaactt

SEQ ID NO: 2282976 - DNA, 25 bp, Homo sapien
ctgtggcctgtaggcacaaggaagc

SEQ ID NO: 2282977 - DNA, 25 bp, Homo sapien
tatggtgcacattatccacggatgg

SEQ ID NO: 2282978 - DNA, 25 bp, Homo sapien
aatgggcatggcgtgctcttcaggc

SEQ ID NO: 2282979 - DNA, 25 bp, Homo sapien
gacctggagcggtgcaacagttcaa

SEQ ID NO: 2282980 - DNA, 25 bp, Homo sapien
gacactgacagagggtaggactcct

SEQ ID NO: 2282981 - DNA, 25 bp, Homo sapien
tcatccaagcagaagcctccaattg

SEQ ID NO: 2282982 - DNA, 25 bp, Homo sapien
cgaggctggctgcaaagatcacagg

SEQ ID NO: 2282983 - DNA, 25 bp, Homo sapien
cagagagccttggagggcgcctaat

SEQ ID NO: 2282984 - DNA, 25 bp, Homo sapien
gagagtgggactttgtcaggtcccc

SEQ ID NO: 2282985 - DNA, 25 bp, Homo sapien
tcggtatccgcagctaaaggcattg

SEQ ID NO: 2282986 - DNA, 25 bp, Homo sapien
ttttcggaacccatgcctgcacaga

SEQ ID NO: 2282987 - DNA, 25 bp, Homo sapien
cagccaggtgtgtgttgatacgcag

SEQ ID NO: 2282988 - DNA, 25 bp, Homo sapien
gaattcacatccagggactgcaggg

SEQ ID NO: 2282989 - DNA, 25 bp, Homo sapien
acaaccccaaacaagctgccaattg

SEQ ID NO: 2282990 - DNA, 25 bp, Homo sapien
cccaaacaagctgccaattgatcat

SEQ ID NO: 2282991 - DNA, 25 bp, Homo sapien
gcttcaagaacatttgtatccggca

SEQ ID NO: 2282992 - DNA, 25 bp, Homo sapien
gagaacaccgtttccctatcagctt

SEQ ID NO: 2282993 - DNA, 25 bp, Homo sapien
cacagtcgagccagtccgttgggat

SEQ ID NO: 2282994 - DNA, 25 bp, Homo sapien
tgatagacgtaatcccaaagcagtc

SEQ ID NO: 2282995 - DNA, 25 bp, Homo sapien
catcggatgaagttttcgtaccggc

SEQ ID NO: 2282996 - DNA, 25 bp, Homo sapien
tcgtaccggctgtcagaaagcaact

SEQ ID NO: 2282997 - DNA, 25 bp, Homo sapien
tgtttagtttgtagtagtggcgcag

SEQ ID NO: 2282998 - DNA, 25 bp, Homo sapien
ggctccttcctgataatgtttagtt

SEQ ID NO: 2282999 - DNA, 25 bp, Homo sapien
gctccttcctgataatgtttagttt

SEQ ID NO: 2283000 - DNA, 25 bp, Homo sapien
caccagcaccagaggtctacttcta

SEQ ID NO: 2283001 - DNA, 25 bp, Homo sapien
tctacatctcctgattggtccttca

SEQ ID NO: 2283002 - DNA, 25 bp, Homo sapien
agttggccccgctaatgactaccac

SEQ ID NO: 2283003 - DNA, 25 bp, Homo sapien
cctctcttgcatagtacttggaatt

SEQ ID NO: 2283004 - DNA, 25 bp, Homo sapien
catcacccaaggttgtgtttgttga

SEQ ID NO: 2283005 - DNA, 25 bp, Homo sapien
ccaaggttgtgtttgttgatctcac

SEQ ID NO: 2283006 - DNA, 25 bp, Homo sapien
tctctagccccatctgccactctct

SEQ ID NO: 2283007 - DNA, 25 bp, Homo sapien
gataattcacaatctacatctctag

SEQ ID NO: 2283008 - DNA, 25 bp, Homo sapien
tttaagagcctaaccactgaggtga

SEQ ID NO: 2283009 - DNA, 25 bp, Homo sapien
tgaagaaaagccatacggtagagcc

SEQ ID NO: 2283010 - DNA, 25 bp, Homo sapien
gaaagggagccaaggactgcgttta

SEQ ID NO: 2283011 - DNA, 25 bp, Homo sapien
gatcagttcatccacgaaaaaggta

SEQ ID NO: 2283012 - DNA, 25 bp, Homo sapien
ggcagcctggttgcagatgttccac

SEQ ID NO: 2283013 - DNA, 25 bp, Homo sapien
gcattaatgcatgaccacacgagaa

SEQ ID NO: 2283014 - DNA, 25 bp, Homo sapien
gacaacttagtggagcttctggaaa

SEQ ID NO: 2283015 - DNA, 25 bp, Homo sapien
tgagcaccctttgggatcacgtggt

SEQ ID NO: 2283016 - DNA, 25 bp, Homo sapien
tgctccagacggtctgttcggccac

SEQ ID NO: 2283017 - DNA, 25 bp, Homo sapien
gtctgttcggccactcatgatttca

SEQ ID NO: 2283018 - DNA, 25 bp, Homo sapien
tcggccactcatgatttcatctggg

SEQ ID NO: 2283019 - DNA, 25 bp, Homo sapien
agacggtctgttcggccactcatga

SEQ ID NO: 2283020 - DNA, 25 bp, Homo sapien
ggtatatttgttcatccagctcctg

SEQ ID NO: 2283021 - DNA, 25 bp, Homo sapien
catcttcttggtatatttgttcatc

SEQ ID NO: 2283022 - DNA, 25 bp, Homo sapien
ttcttggtatatttgttcatccagc

SEQ ID NO: 2283023 - DNA, 25 bp, Homo sapien
tcagcattcatcttcttggtatatt

SEQ ID NO: 2283024 - DNA, 25 bp, Homo sapien
ggaacagacctgatccacgtggcag

SEQ ID NO: 2283025 - DNA, 25 bp, Homo sapien
taaatactgtatccaggtgctggca

SEQ ID NO: 2283026 - DNA, 25 bp, Homo sapien
tattcagacttggagcctaggcagt

SEQ ID NO: 2283027 - DNA, 25 bp, Homo sapien
caaagctctgtgtccagtggagacc

SEQ ID NO: 2283028 - DNA, 25 bp, Homo sapien
ctgaaagggaacaagcaaacttctc

SEQ ID NO: 2283029 - DNA, 25 bp, Homo sapien
ttgatgctgccctgaaagggaacaa

SEQ ID NO: 2283030 - DNA, 25 bp, Homo sapien
cttgatgctgccctgaaagggaaca

SEQ ID NO: 2283031 - DNA, 25 bp, Homo sapien
gaaatctttgcctaaattaaggtca

SEQ ID NO: 2283032 - DNA, 25 bp, Homo sapien
acatataccttgtgccagccccatg

SEQ ID NO: 2283033 - DNA, 25 bp, Homo sapien
tgtgcataaaatactctacctttag

SEQ ID NO: 2283034 - DNA, 25 bp, Homo sapien
aaatcgggttattcatcttattgag

SEQ ID NO: 2283035 - DNA, 25 bp, Homo sapien
gaacaaagtgggctacattcttgtg

SEQ ID NO: 2283036 - DNA, 25 bp, Homo sapien
agtgggctacattcttgtgggtgac

SEQ ID NO: 2283037 - DNA, 25 bp, Homo sapien
tctatgaacaaagtgggctacattc

SEQ ID NO: 2283038 - DNA, 25 bp, Homo sapien
tccagtctatgaacaaagtgggcta

SEQ ID NO: 2283039 - DNA, 25 bp, Homo sapien
tctgactctgtgtgccaaagacgat

SEQ ID NO: 2283040 - DNA, 25 bp, Homo sapien
tacttttcgtaactgaacttgtgcg

SEQ ID NO: 2283041 - DNA, 25 bp, Homo sapien
aacttgtgcgttctggaacattttc

SEQ ID NO: 2283042 - DNA, 25 bp, Homo sapien
caaagacgatgaactgtacagaggc

SEQ ID NO: 2283043 - DNA, 25 bp, Homo sapien
ctgaacagaattggggttctgtttc

SEQ ID NO: 2283044 - DNA, 25 bp, Homo sapien
cctgaacagaattggggttctgttt

SEQ ID NO: 2283045 - DNA, 25 bp, Homo sapien
tgaacagaattggggttctgtttct

SEQ ID NO: 2283046 - DNA, 25 bp, Homo sapien
tcacaggtaatcttgatgcctctta

SEQ ID NO: 2283047 - DNA, 25 bp, Homo sapien
gacaaggacgcagggtgtgggtccc

SEQ ID NO: 2283048 - DNA, 25 bp, Homo sapien
ttgatgcctcttaggtcatgcatcg

SEQ ID NO: 2283049 - DNA, 25 bp, Homo sapien
ggtaatcttgatgcctcttaggtca

SEQ ID NO: 2283050 - DNA, 25 bp, Homo sapien
gcactgacttcgtaggtcaaatttg

SEQ ID NO: 2283051 - DNA, 25 bp, Homo sapien
aagactatctttgctgtatcatatt

SEQ ID NO: 2283052 - DNA, 25 bp, Homo sapien
gtatcatattatcattgctcctttg

SEQ ID NO: 2283053 - DNA, 25 bp, Homo sapien
tcctgttcatcaacatgaaatatct

SEQ ID NO: 2283054 - DNA, 25 bp, Homo sapien
ttttggttcccatcataaactcgaa

SEQ ID NO: 2283055 - DNA, 25 bp, Homo sapien
tgaagatttttggttcccatcataa

SEQ ID NO: 2283056 - DNA, 25 bp, Homo sapien
actcgaatcacatggactgcatggc

SEQ ID NO: 2283057 - DNA, 25 bp, Homo sapien
tcccatcataaactcgaatcacatg

SEQ ID NO: 2283058 - DNA, 25 bp, Homo sapien
ttgaagaactgagataaaagcccaa

SEQ ID NO: 2283059 - DNA, 25 bp, Homo sapien
tgttacgtctgatctggttgtttga

SEQ ID NO: 2283060 - DNA, 25 bp, Homo sapien
ctgttacgtctgatctggttgtttg

SEQ ID NO: 2283061 - DNA, 25 bp, Homo sapien
tgaagaactgagataaaagcccaac

SEQ ID NO: 2283062 - DNA, 25 bp, Homo sapien
ggagatgttactgggtgttcgttcc

SEQ ID NO: 2283063 - DNA, 25 bp, Homo sapien
tgttcgttcctggatattgtgggaa

SEQ ID NO: 2283064 - DNA, 25 bp, Homo sapien
actgggtgttcgttcctggatattg

SEQ ID NO: 2283065 - DNA, 25 bp, Homo sapien
tcctggatattgtgggaaaattccc

SEQ ID NO: 2283066 - DNA, 25 bp, Homo sapien
tctcacacctgccaggtaaatgggt

SEQ ID NO: 2283067 - DNA, 25 bp, Homo sapien
tccattttcagctgtgtgcttagaa

SEQ ID NO: 2283068 - DNA, 25 bp, Homo sapien
aggtaaatgggttctctcctgctcc

SEQ ID NO: 2283069 - DNA, 25 bp, Homo sapien
gtgcttagaaacaccttgactcttc

SEQ ID NO: 2283070 - DNA, 25 bp, Homo sapien
cagaaggaagtgatatctttctcct

SEQ ID NO: 2283071 - DNA, 25 bp, Homo sapien
cagaggtggtttgagctttcttgtt

SEQ ID NO: 2283072 - DNA, 25 bp, Homo sapien
gttgcgtaacctgagacctgcctga

SEQ ID NO: 2283073 - DNA, 25 bp, Homo sapien
tttctatggacatggtgtaagggcg

SEQ ID NO: 2283074 - DNA, 25 bp, Homo sapien
cctgtgagattgcacaggacacaga

SEQ ID NO: 2283075 - DNA, 25 bp, Homo sapien
ggcctgtgagattgcacaggacaca

SEQ ID NO: 2283076 - DNA, 25 bp, Homo sapien
gcctgtgagattgcacaggacacag

SEQ ID NO: 2283077 - DNA, 25 bp, Homo sapien
gttttaaccaagttgagctccttca

SEQ ID NO: 2283078 - DNA, 25 bp, Homo sapien
ttttaaccaagttgagctccttcat

SEQ ID NO: 2283079 - DNA, 25 bp, Homo sapien
gggggatgagtgttctgtcaatggt

SEQ ID NO: 2283080 - DNA, 25 bp, Homo sapien
aaatataggctcatgggtcttcctg

SEQ ID NO: 2283081 - DNA, 25 bp, Homo sapien
tcccagaccagtaaaagcctgtgcc

SEQ ID NO: 2283082 - DNA, 25 bp, Homo sapien
gcttgctggatcatcacagatcccg

SEQ ID NO: 2283083 - DNA, 25 bp, Homo sapien
aataatcttgcctctcagcggatgc

SEQ ID NO: 2283084 - DNA, 25 bp, Homo sapien
ttcggaacacgtgggtagaagagaa

SEQ ID NO: 2283085 - DNA, 25 bp, Homo sapien
tctctgagatcctcccgctgtcttg

SEQ ID NO: 2283086 - DNA, 25 bp, Homo sapien
tagaagagaatataccgggctcctt

SEQ ID NO: 2283087 - DNA, 25 bp, Homo sapien
cctgaaaatttgttggaagctgatg

SEQ ID NO: 2283088 - DNA, 25 bp, Homo sapien
actggtgagttctcctcaggcagcc

SEQ ID NO: 2283089 - DNA, 25 bp, Homo sapien
gactggtgagttctcctcaggcagc

SEQ ID NO: 2283090 - DNA, 25 bp, Homo sapien
ctggctgcattgcagtcagtgtgtc

SEQ ID NO: 2283091 - DNA, 25 bp, Homo sapien
ggctgcattgcagtcagtgtgtctt

SEQ ID NO: 2283092 - DNA, 25 bp, Homo sapien
caccatcgaggccaacttcaaagac

SEQ ID NO: 2283093 - DNA, 25 bp, Homo sapien
cattacttttggacgatactcttcc

SEQ ID NO: 2283094 - DNA, 25 bp, Homo sapien
gacgatactcttcctcttgtgaccc

SEQ ID NO: 2283095 - DNA, 25 bp, Homo sapien
ccatccccacattacttttggacga

SEQ ID NO: 2283096 - DNA, 25 bp, Homo sapien
tcaagaacaggaattaacccaggga

SEQ ID NO: 2283097 - DNA, 25 bp, Homo sapien
taggaaacatcacagccgaagtctc

SEQ ID NO: 2283098 - DNA, 25 bp, Homo sapien
tgtgaagtaggaaacatcacagccg

SEQ ID NO: 2283099 - DNA, 25 bp, Homo sapien
atcacagccgaagtctcaagaacag

SEQ ID NO: 2283100 - DNA, 25 bp, Homo sapien
ccattaaatcttcctcccactgtgt

SEQ ID NO: 2283101 - DNA, 25 bp, Homo sapien
aaatcttcctcccactgtgttccgt

SEQ ID NO: 2283102 - DNA, 25 bp, Homo sapien
ttaaatcttcctcccactgtgttcc

SEQ ID NO: 2283103 - DNA, 25 bp, Homo sapien
cattaaatcttcctcccactgtgtt

SEQ ID NO: 2283104 - DNA, 25 bp, Homo sapien
tattccaactacaacttgtgggcag

SEQ ID NO: 2283105 - DNA, 25 bp, Homo sapien
taaacaggcagacagctcgggagag

SEQ ID NO: 2283106 - DNA, 25 bp, Homo sapien
tgcttggtccctctcgtcacaggaa

SEQ ID NO: 2283107 - DNA, 25 bp, Homo sapien
gtttactacactccaccagcagtcg

SEQ ID NO: 2283108 - DNA, 25 bp, Homo sapien
ccaggactctcctctttcccttcct

SEQ ID NO: 2283109 - DNA, 25 bp, Homo sapien
gccaggactctcctctttcccttcc

SEQ ID NO: 2283110 - DNA, 25 bp, Homo sapien
caggactctcctctttcccttcctt

SEQ ID NO: 2283111 - DNA, 25 bp, Homo sapien
gtgtgactagggaaccgctccaggg

SEQ ID NO: 2283112 - DNA, 25 bp, Homo sapien
cattctttaatgtgatggaaaggca

SEQ ID NO: 2283113 - DNA, 25 bp, Homo sapien
tgagcgatactctgggctggacagt

SEQ ID NO: 2283114 - DNA, 25 bp, Homo sapien
ggctcccatcacctggtgtgactag

SEQ ID NO: 2283115 - DNA, 25 bp, Homo sapien
gacagctgcttcctaacatccttta

SEQ ID NO: 2283116 - DNA, 25 bp, Homo sapien
acatcctttaggaagattttctctg

SEQ ID NO: 2283117 - DNA, 25 bp, Homo sapien
gggatggacagctgcttcctaacat

SEQ ID NO: 2283118 - DNA, 25 bp, Homo sapien
tcagggatatgggatggacagctgc

SEQ ID NO: 2283119 - DNA, 25 bp, Homo sapien
tagggggctctatggatttctttcg

SEQ ID NO: 2283120 - DNA, 25 bp, Homo sapien
tcttgaaaatttcattagggggctc

SEQ ID NO: 2283121 - DNA, 25 bp, Homo sapien
ctttcttgtggcgtttaggaagcgg

SEQ ID NO: 2283122 - DNA, 25 bp, Homo sapien
taggaagcggatcatatgtttgtac

SEQ ID NO: 2283123 - DNA, 25 bp, Homo sapien
catctgtatcgcctctggaactctt

SEQ ID NO: 2283124 - DNA, 25 bp, Homo sapien
ctatgtcagcgttggattatacttc

SEQ ID NO: 2283125 - DNA, 25 bp, Homo sapien
tcctggtggaattccatctgtatcg

SEQ ID NO: 2283126 - DNA, 25 bp, Homo sapien
tgtttacactgtcccttctgtagac

SEQ ID NO: 2283127 - DNA, 25 bp, Homo sapien
acggccaacgtggaggcacccaggc

SEQ ID NO: 2283128 - DNA, 25 bp, Homo sapien
caggccaaaggccactgcctggtgg

SEQ ID NO: 2283129 - DNA, 25 bp, Homo sapien
actgcctggtggtgacggccaacgt

SEQ ID NO: 2283130 - DNA, 25 bp, Homo sapien
gtgacggccaacgtggaggcaccca

SEQ ID NO: 2283131 - DNA, 25 bp, Homo sapien
aaaaaactgagctatcagccctctg

SEQ ID NO: 2283132 - DNA, 25 bp, Homo sapien
aaaactgagctatcagccctctggt

SEQ ID NO: 2283133 - DNA, 25 bp, Homo sapien
aactgagctatcagccctctggtac

SEQ ID NO: 2283134 - DNA, 25 bp, Homo sapien
gaaagtcttttcttggtgccataaa

SEQ ID NO: 2283135 - DNA, 25 bp, Homo sapien
cctcttcctccaacggaaaaatgca

SEQ ID NO: 2283136 - DNA, 25 bp, Homo sapien
gaaaaatgcacacggcatatccgtg

SEQ ID NO: 2283137 - DNA, 25 bp, Homo sapien
tgggtgaggtgtgaaccagcagcgc

SEQ ID NO: 2283138 - DNA, 25 bp, Homo sapien
acggcatatccgtgtctgtccacat

SEQ ID NO: 2283139 - DNA, 25 bp, Homo sapien
tggttccggctgcaagaaagtcccg

SEQ ID NO: 2283140 - DNA, 25 bp, Homo sapien
gaaagagctccagcgttagggcttc

SEQ ID NO: 2283141 - DNA, 25 bp, Homo sapien
tcggaccagtctgaccttaacggga

SEQ ID NO: 2283142 - DNA, 25 bp, Homo sapien
tcccggttattctgcgagggcgaaa

SEQ ID NO: 2283143 - DNA, 25 bp, Homo sapien
ccttacaataacgttcttctaggtg

SEQ ID NO: 2283144 - DNA, 25 bp, Homo sapien
caggggagcccatttagcctctagg

SEQ ID NO: 2283145 - DNA, 25 bp, Homo sapien
tctaggtggttagttctgccaggcg

SEQ ID NO: 2283146 - DNA, 25 bp, Homo sapien
gtggttagttctgccaggcgagtcc

SEQ ID NO: 2283147 - DNA, 25 bp, Homo sapien
tagtgtccatcacctatgcctcttg

SEQ ID NO: 2283148 - DNA, 25 bp, Homo sapien
gttttagtgtccatcacctatgcct

SEQ ID NO: 2283149 - DNA, 25 bp, Homo sapien
tgttttagtgtccatcacctatgcc

SEQ ID NO: 2283150 - DNA, 25 bp, Homo sapien
tttagtgtccatcacctatgcctct

SEQ ID NO: 2283151 - DNA, 25 bp, Homo sapien
cactgagtggtatccgaggactgca

SEQ ID NO: 2283152 - DNA, 25 bp, Homo sapien
gttggcgggtctcaaaaaccgtgca

SEQ ID NO: 2283153 - DNA, 25 bp, Homo sapien
tgtaagtgaatctcaggcccagagt

SEQ ID NO: 2283154 - DNA, 25 bp, Homo sapien
aattggttcatacacacctggaggg

SEQ ID NO: 2283155 - DNA, 25 bp, Homo sapien
caggtcaggtggcagtaaggatatt

SEQ ID NO: 2283156 - DNA, 25 bp, Homo sapien
aagactcaggtagtttagagcccca

SEQ ID NO: 2283157 - DNA, 25 bp, Homo sapien
gagtctctctccacgaaacttaaga

SEQ ID NO: 2283158 - DNA, 25 bp, Homo sapien
gaaactttcaacaggtcttcttggc

SEQ ID NO: 2283159 - DNA, 25 bp, Homo sapien
tgagtgcccaagttcccacgaggta

SEQ ID NO: 2283160 - DNA, 25 bp, Homo sapien
tgtccctggccacggaatggctgtc

SEQ ID NO: 2283161 - DNA, 25 bp, Homo sapien
tcagtccctgaatcctcgtggtctc

SEQ ID NO: 2283162 - DNA, 25 bp, Homo sapien
tctagacctcctgcggatgagtgcc

SEQ ID NO: 2283163 - DNA, 25 bp, Homo sapien
aattatacaacttccaagccccgca

SEQ ID NO: 2283164 - DNA, 25 bp, Homo sapien
tgctctgtaaggagtcacgtcagtg

SEQ ID NO: 2283165 - DNA, 25 bp, Homo sapien
aagggcaagttgcaaaacccaccag

SEQ ID NO: 2283166 - DNA, 25 bp, Homo sapien
tggacaatctttcttcccgccactg

SEQ ID NO: 2283167 - DNA, 25 bp, Homo sapien
taatttaagacggtctttcggcatg

SEQ ID NO: 2283168 - DNA, 25 bp, Homo sapien
tcaggctctgtcttaatatggctct

SEQ ID NO: 2283169 - DNA, 25 bp, Homo sapien
tctttcggcatgtaagctgctgtga

SEQ ID NO: 2283170 - DNA, 25 bp, Homo sapien
gaagctgcagtaatattaaggggac

SEQ ID NO: 2283171 - DNA, 25 bp, Homo sapien
taccgtgtgaaatgtcccaggcagt

SEQ ID NO: 2283172 - DNA, 25 bp, Homo sapien
caggcagtgagcgtatcaagaatta

SEQ ID NO: 2283173 - DNA, 25 bp, Homo sapien
caaattcagattgtggccatgccag

SEQ ID NO: 2283174 - DNA, 25 bp, Homo sapien
gagaaagctcagatctaccgtgtga

SEQ ID NO: 2283175 - DNA, 25 bp, Homo sapien
acatgatgtctggtgtagtaggcga

SEQ ID NO: 2283176 - DNA, 25 bp, Homo sapien
tctcactggattgggaatttctgca

SEQ ID NO: 2283177 - DNA, 25 bp, Homo sapien
tttctgcaaggccatgacacctctg

SEQ ID NO: 2283178 - DNA, 25 bp, Homo sapien
ggtgtttaggtcatcatcatctagg

SEQ ID NO: 2283179 - DNA, 25 bp, Homo sapien
cctttgaccctgagcagagaccttg

SEQ ID NO: 2283180 - DNA, 25 bp, Homo sapien
aagcactgctccacgttagaaagac

SEQ ID NO: 2283181 - DNA, 25 bp, Homo sapien
gaccactgctggctgtgcgaatctt

SEQ ID NO: 2283182 - DNA, 25 bp, Homo sapien
tgcgaatcttggtattccaacgtcc

SEQ ID NO: 2283183 - DNA, 25 bp, Homo sapien
cccagagctggggtgcagtgatgtg

SEQ ID NO: 2283184 - DNA, 25 bp, Homo sapien
tcctgagctcaagtgatccttccac

SEQ ID NO: 2283185 - DNA, 25 bp, Homo sapien
acctcagcctccatagtagctggga

SEQ ID NO: 2283186 - DNA, 25 bp, Homo sapien
atcttcgctcactgcagccttgacc

SEQ ID NO: 2283187 - DNA, 25 bp, Homo sapien
tttggacagaaggttggtgtgctca

SEQ ID NO: 2283188 - DNA, 25 bp, Homo sapien
acagtaatggagtggcgttttggac

SEQ ID NO: 2283189 - DNA, 25 bp, Homo sapien
cctagggcacttctgggctttgtac

SEQ ID NO: 2283190 - DNA, 25 bp, Homo sapien
acagaaggttggtgtgctcaaactc

SEQ ID NO: 2283191 - DNA, 25 bp, Homo sapien
gaagtcttgcaaaattagggtctcc

SEQ ID NO: 2283192 - DNA, 25 bp, Homo sapien
gatgcagtcagcacaacttacggcc

SEQ ID NO: 2283193 - DNA, 25 bp, Homo sapien
gacaaaatggtgctgagaggccctt

SEQ ID NO: 2283194 - DNA, 25 bp, Homo sapien
gagccagcccctacatgcataggag

SEQ ID NO: 2283195 - DNA, 25 bp, Homo sapien
cctcctgcctgggtcgcttgtggtg

SEQ ID NO: 2283196 - DNA, 25 bp, Homo sapien
tagaacttgaagctacaggcacgtg

SEQ ID NO: 2283197 - DNA, 25 bp, Homo sapien
tgaagctacaggcacgtggccttgg

SEQ ID NO: 2283198 - DNA, 25 bp, Homo sapien
ctttcttagaacttgaagctacagg

SEQ ID NO: 2283199 - DNA, 25 bp, Homo sapien
ttagtgtggctaccgctctgcatcg

SEQ ID NO: 2283200 - DNA, 25 bp, Homo sapien
gatacctttggagggagaaccttca

SEQ ID NO: 2283201 - DNA, 25 bp, Homo sapien
tcttagggaaagttgctggcacagc

SEQ ID NO: 2283202 - DNA, 25 bp, Homo sapien
taaaatccggtgcactctgtcgcag

SEQ ID NO: 2283203 - DNA, 25 bp, Homo sapien
ttccaactgatctcctgaatatttc

SEQ ID NO: 2283204 - DNA, 25 bp, Homo sapien
gatctcctgaatatttcagcagctc

SEQ ID NO: 2283205 - DNA, 25 bp, Homo sapien
tcctgaatatttcagcagctcaaca

SEQ ID NO: 2283206 - DNA, 25 bp, Homo sapien
caactgatctcctgaatatttcagc

SEQ ID NO: 2283207 - DNA, 25 bp, Homo sapien
tatgctggttgtcatgtgaaaacgg

SEQ ID NO: 2283208 - DNA, 25 bp, Homo sapien
tttttcaggatgctacgggagcatg

SEQ ID NO: 2283209 - DNA, 25 bp, Homo sapien
atagtgctggacatagaagaggtgc

SEQ ID NO: 2283210 - DNA, 25 bp, Homo sapien
aaacggaaatttctgagtgagcagg

SEQ ID NO: 2283211 - DNA, 25 bp, Homo sapien
gcaggccatcaaaccatcctgtgga

SEQ ID NO: 2283212 - DNA, 25 bp, Homo sapien
tgcaggccatcaaaccatcctgtgg

SEQ ID NO: 2283213 - DNA, 25 bp, Homo sapien
agtagcttggctccacgaggcagac

SEQ ID NO: 2283214 - DNA, 25 bp, Homo sapien
tgtgtacaaaagaataagcactcag

SEQ ID NO: 2283215 - DNA, 25 bp, Homo sapien
tccacgaggcagacagaagttcatt

SEQ ID NO: 2283216 - DNA, 25 bp, Homo sapien
ggcagacagaagttcattctttagc

SEQ ID NO: 2283217 - DNA, 25 bp, Homo sapien
ggaagtggcccatcaaagccttatc

SEQ ID NO: 2283218 - DNA, 25 bp, Homo sapien
gcccatcaaagccttatctttcttc

SEQ ID NO: 2283219 - DNA, 25 bp, Homo sapien
ccatcaaagccttatctttcttcag

SEQ ID NO: 2283220 - DNA, 25 bp, Homo sapien
ctggaagtggcccatcaaagcctta

SEQ ID NO: 2283221 - DNA, 25 bp, Homo sapien
tgttcatcgggtggttgtcaatagc

SEQ ID NO: 2283222 - DNA, 25 bp, Homo sapien
agctgtgagcttggccgtgacgtct

SEQ ID NO: 2283223 - DNA, 25 bp, Homo sapien
tgaaaacagagtaggacagcccatc

SEQ ID NO: 2283224 - DNA, 25 bp, Homo sapien
tgacgtctattacaagggcagcctt

SEQ ID NO: 2283225 - DNA, 25 bp, Homo sapien
ggccactcaagtgtcctaaactcat

SEQ ID NO: 2283226 - DNA, 25 bp, Homo sapien
aacagaaattacgtctatctaaaca

SEQ ID NO: 2283227 - DNA, 25 bp, Homo sapien
aaaatatgttcccatcaatgggatc

SEQ ID NO: 2283228 - DNA, 25 bp, Homo sapien
tcatttcctgttccatctgaccagt

SEQ ID NO: 2283229 - DNA, 25 bp, Homo sapien
tccgtgacctctaagtatctgcaag

SEQ ID NO: 2283230 - DNA, 25 bp, Homo sapien
gcatgaggcttagtctccgtgacct

SEQ ID NO: 2283231 - DNA, 25 bp, Homo sapien
gaggtctgttttgactgataccagg

SEQ ID NO: 2283232 - DNA, 25 bp, Homo sapien
ttttatttggtatcaaaatgtcacc

SEQ ID NO: 2283233 - DNA, 25 bp, Homo sapien
ggcccctggaccattctagtggaaa

SEQ ID NO: 2283234 - DNA, 25 bp, Homo sapien
gagagctagcctgtgaacccaattg

SEQ ID NO: 2283235 - DNA, 25 bp, Homo sapien
tagtacattttgacacggtggacct

SEQ ID NO: 2283236 - DNA, 25 bp, Homo sapien
tacagaaactgaagaccgtggcagc

SEQ ID NO: 2283237 - DNA, 25 bp, Homo sapien
tcttcatgtgatatcccaagtattt

SEQ ID NO: 2283238 - DNA, 25 bp, Homo sapien
ctacttcttcatgtgatatcccaag

SEQ ID NO: 2283239 - DNA, 25 bp, Homo sapien
catgtgatatcccaagtattttttc

SEQ ID NO: 2283240 - DNA, 25 bp, Homo sapien
agtctacttcttcatgtgatatccc

SEQ ID NO: 2283241 - DNA, 25 bp, Homo sapien
taggtattaggccaccccaagtgta

SEQ ID NO: 2283242 - DNA, 25 bp, Homo sapien
tacagcagctaacaaaggcaggatg

SEQ ID NO: 2283243 - DNA, 25 bp, Homo sapien
ggagggcctgaaaaacatcactgtc

SEQ ID NO: 2283244 - DNA, 25 bp, Homo sapien
ttatgagctggagacgaacgagacc

SEQ ID NO: 2283245 - DNA, 25 bp, Homo sapien
tcaggccatatgctgggtactacat

SEQ ID NO: 2283246 - DNA, 25 bp, Homo sapien
tctcaggaaagcaatcagtgactgc

SEQ ID NO: 2283247 - DNA, 25 bp, Homo sapien
ttataccgaacagccgcaatctcag

SEQ ID NO: 2283248 - DNA, 25 bp, Homo sapien
cattagggaccataagtgaagactt

SEQ ID NO: 2283249 - DNA, 25 bp, Homo sapien
aaaaggagactcctagccagacgcg

SEQ ID NO: 2283250 - DNA, 25 bp, Homo sapien
aattacctaatgtccaatgccttga

SEQ ID NO: 2283251 - DNA, 25 bp, Homo sapien
tgcatgcagtactctagggcaaaca

SEQ ID NO: 2283252 - DNA, 25 bp, Homo sapien
aacatagggctcacttagagtctca

SEQ ID NO: 2283253 - DNA, 25 bp, Homo sapien
taatagttctaatgtctaacaattc

SEQ ID NO: 2283254 - DNA, 25 bp, Homo sapien
cattcttctatgatgtctaatctgc

SEQ ID NO: 2283255 - DNA, 25 bp, Homo sapien
catctcagatgttatagatttcatc

SEQ ID NO: 2283256 - DNA, 25 bp, Homo sapien
tctagaactttggtttgagtcatac

SEQ ID NO: 2283257 - DNA, 25 bp, Homo sapien
tgagtttaatagaccacttgctgtt

SEQ ID NO: 2283258 - DNA, 25 bp, Homo sapien
taatccaatttgataatctctgcca

SEQ ID NO: 2283259 - DNA, 25 bp, Homo sapien
tgtgttttaggagttgattctgggt

SEQ ID NO: 2283260 - DNA, 25 bp, Homo sapien
gattctgggtttagagtatacattt

SEQ ID NO: 2283261 - DNA, 25 bp, Homo sapien
aggaggctgacgaggcacaatgcaa

SEQ ID NO: 2283262 - DNA, 25 bp, Homo sapien
aggctgacgaggcacaatgcaaaga

SEQ ID NO: 2283263 - DNA, 25 bp, Homo sapien
agcaaggaggctgacgaggcacaat

SEQ ID NO: 2283264 - DNA, 25 bp, Homo sapien
ctgacgaggcacaatgcaaagatgg

SEQ ID NO: 2283265 - DNA, 25 bp, Homo sapien
cgttgtcagcctccggctccccatt

SEQ ID NO: 2283266 - DNA, 25 bp, Homo sapien
attttcctcattagcattcctgtta

SEQ ID NO: 2283267 - DNA, 25 bp, Homo sapien
ctcattagcattcctgttagcaggg

SEQ ID NO: 2283268 - DNA, 25 bp, Homo sapien
ctcgttgtcagcctccggctcccca

SEQ ID NO: 2283269 - DNA, 25 bp, Homo sapien
tcatcttcatctccgtcctcttcct

SEQ ID NO: 2283270 - DNA, 25 bp, Homo sapien
ctcatcttcatctccgtcctcttcc

SEQ ID NO: 2283271 - DNA, 25 bp, Homo sapien
cgtcctcttcctcaccatcaccttc

SEQ ID NO: 2283272 - DNA, 25 bp, Homo sapien
catctccgtcctcttcctcaccatc

SEQ ID NO: 2283273 - DNA, 25 bp, Homo sapien
gcttgcccgtagctgactcagctcc

SEQ ID NO: 2283274 - DNA, 25 bp, Homo sapien
agctgcccgcttgcccgtagctgac

SEQ ID NO: 2283275 - DNA, 25 bp, Homo sapien
ccgcttgcccgtagctgactcagct

SEQ ID NO: 2283276 - DNA, 25 bp, Homo sapien
gcccgcttgcccgtagctgactcag

SEQ ID NO: 2283277 - DNA, 25 bp, Homo sapien
tgttgcaaattctcatggtttgggt

SEQ ID NO: 2283278 - DNA, 25 bp, Homo sapien
ttgcaaattctcatggtttgggttg

SEQ ID NO: 2283279 - DNA, 25 bp, Homo sapien
gttgcaaattctcatggtttgggtt

SEQ ID NO: 2283280 - DNA, 25 bp, Homo sapien
ttggcctttttaaccatctcataca

SEQ ID NO: 2283281 - DNA, 25 bp, Homo sapien
tttttaaccatctcatacaaaccaa

SEQ ID NO: 2283282 - DNA, 25 bp, Homo sapien
ggcctttttaaccatctcatacaaa

SEQ ID NO: 2283283 - DNA, 25 bp, Homo sapien
tttaaccatctcatacaaaccaact

SEQ ID NO: 2283284 - DNA, 25 bp, Homo sapien
tctttgctgactcctcccattcttt

SEQ ID NO: 2283285 - DNA, 25 bp, Homo sapien
cttggtctttgctgactcctcccat

SEQ ID NO: 2283286 - DNA, 25 bp, Homo sapien
ttggtctttgctgactcctcccatt

SEQ ID NO: 2283287 - DNA, 25 bp, Homo sapien
ttgctgactcctcccattctttttc

SEQ ID NO: 2283288 - DNA, 25 bp, Homo sapien
gccaacatttggtcagcccttgtcc

SEQ ID NO: 2283289 - DNA, 25 bp, Homo sapien
ttcccttaagctttaatcttcgtca

SEQ ID NO: 2283290 - DNA, 25 bp, Homo sapien
tcattgactttggtacgatggtgct

SEQ ID NO: 2283291 - DNA, 25 bp, Homo sapien
ttgtcttaaagtcaactggtgtttc

SEQ ID NO: 2283292 - DNA, 25 bp, Homo sapien
gaattacagacaacgcgcttttgct

SEQ ID NO: 2283293 - DNA, 25 bp, Homo sapien
gcagagtacagacctaacgaactgt

SEQ ID NO: 2283294 - DNA, 25 bp, Homo sapien
gtcaaatataagcaggatgggcgat

SEQ ID NO: 2283295 - DNA, 25 bp, Homo sapien
cacttagggtttgcccagaagcaac

SEQ ID NO: 2283296 - DNA, 25 bp, Homo sapien
ttccagtagagttaatagctgtagc

SEQ ID NO: 2283297 - DNA, 25 bp, Homo sapien
tagcttacctagtgtgttaatgaag

SEQ ID NO: 2283298 - DNA, 25 bp, Homo sapien
tgaagaatacttccagtagagttaa

SEQ ID NO: 2283299 - DNA, 25 bp, Homo sapien
gctataaagccctattaatgaagaa

SEQ ID NO: 2283300 - DNA, 25 bp, Homo sapien
tggtcttttataactaaggcctgga

SEQ ID NO: 2283301 - DNA, 25 bp, Homo sapien
gatacattaccaagagatctctgat

SEQ ID NO: 2283302 - DNA, 25 bp, Homo sapien
actttgctccaacagagtcgtggtc

SEQ ID NO: 2283303 - DNA, 25 bp, Homo sapien
gataatagcacattcacagggaaac

SEQ ID NO: 2283304 - DNA, 25 bp, Homo sapien
ggcagttcagcctaatctcagtgtt

SEQ ID NO: 2283305 - DNA, 25 bp, Homo sapien
tattgccttgttggatctcagtcca

SEQ ID NO: 2283306 - DNA, 25 bp, Homo sapien
tgcttgcactgcgatggcaatggcc

SEQ ID NO: 2283307 - DNA, 25 bp, Homo sapien
gcatcttgatctggtgggcttccca

SEQ ID NO: 2283308 - DNA, 25 bp, Homo sapien
tggagactgtaagaatcaggtgcac

SEQ ID NO: 2283309 - DNA, 25 bp, Homo sapien
gcaaatggtaaatctatcagaatcc

SEQ ID NO: 2283310 - DNA, 25 bp, Homo sapien
cattgctggaactaagtgcccacag

SEQ ID NO: 2283311 - DNA, 25 bp, Homo sapien
caagggtgaagtaactgttcatgca

SEQ ID NO: 2283312 - DNA, 25 bp, Homo sapien
tctgccattgaaaattgcctcttgg

SEQ ID NO: 2283313 - DNA, 25 bp, Homo sapien
cagcgaatctgccattgaaaattgc

SEQ ID NO: 2283314 - DNA, 25 bp, Homo sapien
agtacctgctattttcctcagcgaa

SEQ ID NO: 2283315 - DNA, 25 bp, Homo sapien
gctattttcctcagcgaatctgcca

SEQ ID NO: 2283316 - DNA, 25 bp, Homo sapien
aaagactaatcaaatgcagtagtaa

SEQ ID NO: 2283317 - DNA, 25 bp, Homo sapien
aacaaggaatttgatctgtgactgt

SEQ ID NO: 2283318 - DNA, 25 bp, Homo sapien
gtagtaagaaggggagacagagtag

SEQ ID NO: 2283319 - DNA, 25 bp, Homo sapien
gcagtagtaagaaggggagacagag

SEQ ID NO: 2283320 - DNA, 25 bp, Homo sapien
tcaggtatactcagaactctgggtc

SEQ ID NO: 2283321 - DNA, 25 bp, Homo sapien
aatgcctcaggtatactcagaactc

SEQ ID NO: 2283322 - DNA, 25 bp, Homo sapien
ctaattgtgttctgagaagccaggt

SEQ ID NO: 2283323 - DNA, 25 bp, Homo sapien
tcataaatgcctcaggtatactcag

SEQ ID NO: 2283324 - DNA, 25 bp, Homo sapien
tgtagacccttccagttttgcagtg

SEQ ID NO: 2283325 - DNA, 25 bp, Homo sapien
ttacagatttgcatataggtggcca

SEQ ID NO: 2283326 - DNA, 25 bp, Homo sapien
gacccttccagttttgcagtggtaa

SEQ ID NO: 2283327 - DNA, 25 bp, Homo sapien
tagacccttccagttttgcagtggt

SEQ ID NO: 2283328 - DNA, 25 bp, Homo sapien
tgcttaacgtgctgaatatgcatat

SEQ ID NO: 2283329 - DNA, 25 bp, Homo sapien
agcttcctttaggaagctatctcgg

SEQ ID NO: 2283330 - DNA, 25 bp, Homo sapien
tagcgtgcttaacgtgctgaatatg

SEQ ID NO: 2283331 - DNA, 25 bp, Homo sapien
ctcttagcgtgcttaacgtgctgaa

SEQ ID NO: 2283332 - DNA, 25 bp, Homo sapien
cttcccactggttctcacaaaatat

SEQ ID NO: 2283333 - DNA, 25 bp, Homo sapien
actggttctcacaaaatatgcttct

SEQ ID NO: 2283334 - DNA, 25 bp, Homo sapien
ccactggttctcacaaaatatgctt

SEQ ID NO: 2283335 - DNA, 25 bp, Homo sapien
tcccactggttctcacaaaatatgc

SEQ ID NO: 2283336 - DNA, 25 bp, Homo sapien
tagttgaagagtaggatttgacagc

SEQ ID NO: 2283337 - DNA, 25 bp, Homo sapien
gggactattcccaaatgcttgtttg

SEQ ID NO: 2283338 - DNA, 25 bp, Homo sapien
tgagtccagagatggtagttgaaga

SEQ ID NO: 2283339 - DNA, 25 bp, Homo sapien
gccgggtatcttgtactgaacttga

SEQ ID NO: 2283340 - DNA, 25 bp, Homo sapien
gaagtgcagaagtaggtccgatttc

SEQ ID NO: 2283341 - DNA, 25 bp, Homo sapien
aactcctcttcacttaaagcctaat

SEQ ID NO: 2283342 - DNA, 25 bp, Homo sapien
taccaacacatgatcaagtagaggg

SEQ ID NO: 2283343 - DNA, 25 bp, Homo sapien
tctattaggaagcagaaatccgtaa

SEQ ID NO: 2283344 - DNA, 25 bp, Homo sapien
aaaaatccttatagtgagactgagc

SEQ ID NO: 2283345 - DNA, 25 bp, Homo sapien
cacataagtgttagagaactcggtt

SEQ ID NO: 2283346 - DNA, 25 bp, Homo sapien
gactgagctgggtaagtgaacccat

SEQ ID NO: 2283347 - DNA, 25 bp, Homo sapien
gaagcctaatcatgagcagacaact

SEQ ID NO: 2283348 - DNA, 25 bp, Homo sapien
ccagcaagtcatcaatcgcaattta

SEQ ID NO: 2283349 - DNA, 25 bp, Homo sapien
tctatactaagcctccagcaagtca

SEQ ID NO: 2283350 - DNA, 25 bp, Homo sapien
cagatttgtctatactaagcctcca

SEQ ID NO: 2283351 - DNA, 25 bp, Homo sapien
gcaagtcatcaatcgcaatttaggt

SEQ ID NO: 2283352 - DNA, 25 bp, Homo sapien
tctgtgaattgttccagtgttagta

SEQ ID NO: 2283353 - DNA, 25 bp, Homo sapien
atgctgatctgtgaattgttccagt

SEQ ID NO: 2283354 - DNA, 25 bp, Homo sapien
ctgtgaattgttccagtgttagtat

SEQ ID NO: 2283355 - DNA, 25 bp, Homo sapien
gggccatgctgatctgtgaattgtt

SEQ ID NO: 2283356 - DNA, 25 bp, Homo sapien
ggttttaatatcagtgactatattt

SEQ ID NO: 2283357 - DNA, 25 bp, Homo sapien
cagctgtgcctaactttgcagttta

SEQ ID NO: 2283358 - DNA, 25 bp, Homo sapien
tacctgccatctagatacaaaattc

SEQ ID NO: 2283359 - DNA, 25 bp, Homo sapien
ttttcttttgtacctgccatctaga

SEQ ID NO: 2283360 - DNA, 25 bp, Homo sapien
gcaagagttggatcaacccagagct

SEQ ID NO: 2283361 - DNA, 25 bp, Homo sapien
ggacttgcgattggttgatgctaca

SEQ ID NO: 2283362 - DNA, 25 bp, Homo sapien
tagtcatggcttgatatactggagt

SEQ ID NO: 2283363 - DNA, 25 bp, Homo sapien
ggagtgatgtcagcgaagaagccat

SEQ ID NO: 2283364 - DNA, 25 bp, Homo sapien
accattaggcgccaaagctcttgca

SEQ ID NO: 2283365 - DNA, 25 bp, Homo sapien
tagacaccattaggcgccaaagctc

SEQ ID NO: 2283366 - DNA, 25 bp, Homo sapien
ctttagacaccattaggcgccaaag

SEQ ID NO: 2283367 - DNA, 25 bp, Homo sapien
ttctttagacaccattaggcgccaa

SEQ ID NO: 2283368 - DNA, 25 bp, Homo sapien
tctgcccagacgaaagcctggcagg

SEQ ID NO: 2283369 - DNA, 25 bp, Homo sapien
gttaactgttggagcgcctctgccc

SEQ ID NO: 2283370 - DNA, 25 bp, Homo sapien
gcatctgatggctccattagggtta

SEQ ID NO: 2283371 - DNA, 25 bp, Homo sapien
ctccaggtaagggcgtgtgacagct

SEQ ID NO: 2283372 - DNA, 25 bp, Homo sapien
ccaaccacaacaaactgctagccat

SEQ ID NO: 2283373 - DNA, 25 bp, Homo sapien
tctgcaggcatcctaatggaaattg

SEQ ID NO: 2283374 - DNA, 25 bp, Homo sapien
gaagaatctgttagtatctgcaggc

SEQ ID NO: 2283375 - DNA, 25 bp, Homo sapien
catgtatcctgttaaatggcctgtg

SEQ ID NO: 2283376 - DNA, 25 bp, Homo sapien
tagttaataggaatcaagggccttc

SEQ ID NO: 2283377 - DNA, 25 bp, Homo sapien
tgtttacagacaggtgctcaattag

SEQ ID NO: 2283378 - DNA, 25 bp, Homo sapien
tattgcctaactgctgtttacagac

SEQ ID NO: 2283379 - DNA, 25 bp, Homo sapien
gctgtttacagacaggtgctcaatt

SEQ ID NO: 2283380 - DNA, 25 bp, Homo sapien
cctaactgctgtttacagacaggtg

SEQ ID NO: 2283381 - DNA, 25 bp, Homo sapien
aaatttcttgtatggttgcttttca

SEQ ID NO: 2283382 - DNA, 25 bp, Homo sapien
gcttctctaaatttcttgtatggtt

SEQ ID NO: 2283383 - DNA, 25 bp, Homo sapien
ccactccctcggcactctgcttctc

SEQ ID NO: 2283384 - DNA, 25 bp, Homo sapien
tctctaaatttcttgtatggttgct

SEQ ID NO: 2283385 - DNA, 25 bp, Homo sapien
tccctaataaactgtctactttctg

SEQ ID NO: 2283386 - DNA, 25 bp, Homo sapien
gacaggtagggggatgcagggccct

SEQ ID NO: 2283387 - DNA, 25 bp, Homo sapien
tctgctgggtccctaataaactgtc

SEQ ID NO: 2283388 - DNA, 25 bp, Homo sapien
ttagaggtccggtgaaggaggctga

SEQ ID NO: 2283389 - DNA, 25 bp, Homo sapien
gccaagagataagcctgtgaggcca

SEQ ID NO: 2283390 - DNA, 25 bp, Homo sapien
gagcccaagcttcaaccaggatagg

SEQ ID NO: 2283391 - DNA, 25 bp, Homo sapien
ccaggataggccagaaatcaggcat

SEQ ID NO: 2283392 - DNA, 25 bp, Homo sapien
ggtataaaatcctgtctagccacta

SEQ ID NO: 2283393 - DNA, 25 bp, Homo sapien
ctggttaccaattaaaatttctgag

SEQ ID NO: 2283394 - DNA, 25 bp, Homo sapien
taataactagcactaacatgatgct

SEQ ID NO: 2283395 - DNA, 25 bp, Homo sapien
tggttaccaattaaaatttctgaga

SEQ ID NO: 2283396 - DNA, 25 bp, Homo sapien
aataataataactagcactaacatg

SEQ ID NO: 2283397 - DNA, 25 bp, Homo sapien
tcagttctgataaatggccatatcc

SEQ ID NO: 2283398 - DNA, 25 bp, Homo sapien
tctagcggaatgttagcccacatgg

SEQ ID NO: 2283399 - DNA, 25 bp, Homo sapien
cttcacttgggagaatctagcggaa

SEQ ID NO: 2283400 - DNA, 25 bp, Homo sapien
catggagacaatgataagtcagttc

SEQ ID NO: 2283401 - DNA, 25 bp, Homo sapien
aacaaagctctatgtaaagtaataa

SEQ ID NO: 2283402 - DNA, 25 bp, Homo sapien
agtataattgccatataaatttcaa

SEQ ID NO: 2283403 - DNA, 25 bp, Homo sapien
ggtaattttgggtaatctgtctcta

SEQ ID NO: 2283404 - DNA, 25 bp, Homo sapien
aattcaactggcttttatgcaaaga

SEQ ID NO: 2283405 - DNA, 25 bp, Homo sapien
tgcggctacactccaagcaatggct

SEQ ID NO: 2283406 - DNA, 25 bp, Homo sapien
ttcaggcacctacggactcgaaagg

SEQ ID NO: 2283407 - DNA, 25 bp, Homo sapien
tgttccagaaaatcagtacggcctt

SEQ ID NO: 2283408 - DNA, 25 bp, Homo sapien
aaatggcttcttatcgggtccctgc

SEQ ID NO: 2283409 - DNA, 25 bp, Homo sapien
aagcaggaacttgctaaccacaaaa

SEQ ID NO: 2283410 - DNA, 25 bp, Homo sapien
tcgctgcgacggaagcaggaacttg

SEQ ID NO: 2283411 - DNA, 25 bp, Homo sapien
ttgctaaccacaaaacccgccaggc

SEQ ID NO: 2283412 - DNA, 25 bp, Homo sapien
cgctgcgacggaagcaggaacttgc

SEQ ID NO: 2283413 - DNA, 25 bp, Homo sapien
ggaacagaaacgcaaggaggcgcgg

SEQ ID NO: 2283414 - DNA, 25 bp, Homo sapien
gcagatgacactggctttgccgcac

SEQ ID NO: 2283415 - DNA, 25 bp, Homo sapien
ggcgccgcagcgaggctaatgtgtg

SEQ ID NO: 2283416 - DNA, 25 bp, Homo sapien
tccgggagccctaagagaaccggca

SEQ ID NO: 2283417 - DNA, 25 bp, Homo sapien
ctgaggagttcagatcgttgggtcg

SEQ ID NO: 2283418 - DNA, 25 bp, Homo sapien
gagttcagatcgttgggtcggctct

SEQ ID NO: 2283419 - DNA, 25 bp, Homo sapien
tctcggcctcggagctctgctcact

SEQ ID NO: 2283420 - DNA, 25 bp, Homo sapien
agatcgttgggtcggctctcggcct

SEQ ID NO: 2283421 - DNA, 25 bp, Homo sapien
taaagttacactgcttaggagatgc

SEQ ID NO: 2283422 - DNA, 25 bp, Homo sapien
tacactgcttaggagatgcatatta

SEQ ID NO: 2283423 - DNA, 25 bp, Homo sapien
agttacactgcttaggagatgcata

SEQ ID NO: 2283424 - DNA, 25 bp, Homo sapien
aataaagttacactgcttaggagat

SEQ ID NO: 2283425 - DNA, 25 bp, Homo sapien
aatctcttgcaacttgatgacatcg

SEQ ID NO: 2283426 - DNA, 25 bp, Homo sapien
gagctacaaccacaatatcatccat

SEQ ID NO: 2283427 - DNA, 25 bp, Homo sapien
gatgacatcgggatcgttgctgacg

SEQ ID NO: 2283428 - DNA, 25 bp, Homo sapien
catcttggctctatgcttggctggt

SEQ ID NO: 2283429 - DNA, 25 bp, Homo sapien
tagccacagtggagagacttcataa

SEQ ID NO: 2283430 - DNA, 25 bp, Homo sapien
cataaggcaacaggtagagtactca

SEQ ID NO: 2283431 - DNA, 25 bp, Homo sapien
caaagactgcactagatgagcccca

SEQ ID NO: 2283432 - DNA, 25 bp, Homo sapien
ccaacaatttggtggactgaagcag

SEQ ID NO: 2283433 - DNA, 25 bp, Homo sapien
caggagtgtgactcgtactcaagaa

SEQ ID NO: 2283434 - DNA, 25 bp, Homo sapien
aattgcctctgagtattgaagatac

SEQ ID NO: 2283435 - DNA, 25 bp, Homo sapien
taaacaaagagcaatgaacagacaa

SEQ ID NO: 2283436 - DNA, 25 bp, Homo sapien
aaagatttcacaggtttgacaaaca

SEQ ID NO: 2283437 - DNA, 25 bp, Homo sapien
gccacagtggtcacttcaaatatat

SEQ ID NO: 2283438 - DNA, 25 bp, Homo sapien
tgtgtatttggctataccctcacct

SEQ ID NO: 2283439 - DNA, 25 bp, Homo sapien
ggtgcatccaccttattgagataag

SEQ ID NO: 2283440 - DNA, 25 bp, Homo sapien
ggctttctgaccataactttctgta

SEQ ID NO: 2283441 - DNA, 25 bp, Homo sapien
tccttttgaagtgctctccgccatg

SEQ ID NO: 2283442 - DNA, 25 bp, Homo sapien
ccttttgaagtgctctccgccatgg

SEQ ID NO: 2283443 - DNA, 25 bp, Homo sapien
cagcgtaggctgttcctgggcacaa

SEQ ID NO: 2283444 - DNA, 25 bp, Homo sapien
tatcagaatgcagaagcgaattccc

SEQ ID NO: 2283445 - DNA, 25 bp, Homo sapien
ggtcattctctaggatgtcggcatt

SEQ ID NO: 2283446 - DNA, 25 bp, Homo sapien
ccttcagggaacaatattagcagca

SEQ ID NO: 2283447 - DNA, 25 bp, Homo sapien
caggtaccgatcttctctcatcaaa

SEQ ID NO: 2283448 - DNA, 25 bp, Homo sapien
cagactatgtcaggtaccgatcttc

SEQ ID NO: 2283449 - DNA, 25 bp, Homo sapien
ctatgtcaggtaccgatcttctctc

SEQ ID NO: 2283450 - DNA, 25 bp, Homo sapien
tgtcaggtaccgatcttctctcatc

SEQ ID NO: 2283451 - DNA, 25 bp, Homo sapien
gcctgaattcccaatatcgcacaga

SEQ ID NO: 2283452 - DNA, 25 bp, Homo sapien
cctgaattcccaatatcgcacagat

SEQ ID NO: 2283453 - DNA, 25 bp, Homo sapien
tgaattcccaatatcgcacagatat

SEQ ID NO: 2283454 - DNA, 25 bp, Homo sapien
ctgcctgaattcccaatatcgcaca

SEQ ID NO: 2283455 - DNA, 25 bp, Homo sapien
caaggccagacaattagacagggag

SEQ ID NO: 2283456 - DNA, 25 bp, Homo sapien
ggctgccagggtaacaactagtgaa

SEQ ID NO: 2283457 - DNA, 25 bp, Homo sapien
ttttcactgaatcaaggctgccagg

SEQ ID NO: 2283458 - DNA, 25 bp, Homo sapien
gcgtgaaacattggctgctcagaga

SEQ ID NO: 2283459 - DNA, 25 bp, Homo sapien
ttcgttgaaggttcactttcggcat

SEQ ID NO: 2283460 - DNA, 25 bp, Homo sapien
ttattgttgacattcctgctctctc

SEQ ID NO: 2283461 - DNA, 25 bp, Homo sapien
tctgtattattgttgacattcctgc

SEQ ID NO: 2283462 - DNA, 25 bp, Homo sapien
gttcactttcggcatttaccataga

SEQ ID NO: 2283463 - DNA, 25 bp, Homo sapien
catcagggttagaagtgtgggaaat

SEQ ID NO: 2283464 - DNA, 25 bp, Homo sapien
gaagtgtgggaaatattctgcagag

SEQ ID NO: 2283465 - DNA, 25 bp, Homo sapien
aaaatcatcagggttagaagtgtgg

SEQ ID NO: 2283466 - DNA, 25 bp, Homo sapien
aatgttgagtggaaaaatcatcagg

SEQ ID NO: 2283467 - DNA, 25 bp, Homo sapien
ccaaccaccaatgtccacccctcac

SEQ ID NO: 2283468 - DNA, 25 bp, Homo sapien
cccaaccaccaatgtccacccctca

SEQ ID NO: 2283469 - DNA, 25 bp, Homo sapien
cttgttaccacagccagctagtttt

SEQ ID NO: 2283470 - DNA, 25 bp, Homo sapien
caaagctcatcttgggaacccttcc

SEQ ID NO: 2283471 - DNA, 25 bp, Homo sapien
cacaggcacttgttaccacagccag

SEQ ID NO: 2283472 - DNA, 25 bp, Homo sapien
ggcacttgttaccacagccagctag

SEQ ID NO: 2283473 - DNA, 25 bp, Homo sapien
gcacactgatgcaggtgatcttgat

SEQ ID NO: 2283474 - DNA, 25 bp, Homo sapien
ggcagagctgcaacacctgctgaga

SEQ ID NO: 2283475 - DNA, 25 bp, Homo sapien
ttctggtcaaaagcaacggcctctg

SEQ ID NO: 2283476 - DNA, 25 bp, Homo sapien
tgatcttgatatcggaggcagagct

SEQ ID NO: 2283477 - DNA, 25 bp, Homo sapien
taaataggcgtaattgtttccataa

SEQ ID NO: 2283478 - DNA, 25 bp, Homo sapien
ttaaataggcgtaattgtttccata

SEQ ID NO: 2283479 - DNA, 25 bp, Homo sapien
ggttctcccctggttacatactaga

SEQ ID NO: 2283480 - DNA, 25 bp, Homo sapien
gaattttcttaacagcacctcagct

SEQ ID NO: 2283481 - DNA, 25 bp, Homo sapien
catgtcgcccgccaaagtcagttta

SEQ ID NO: 2283482 - DNA, 25 bp, Homo sapien
taatcggttcggagtgagacccaga

SEQ ID NO: 2283483 - DNA, 25 bp, Homo sapien
cttctaataccatcttagtcattat

SEQ ID NO: 2283484 - DNA, 25 bp, Homo sapien
gtccgccgaaccagaagcagcccac

SEQ ID NO: 2283485 - DNA, 25 bp, Homo sapien
tacagtccgccgaaccagaagcagc

SEQ ID NO: 2283486 - DNA, 25 bp, Homo sapien
cttacagtccgccgaaccagaagca

SEQ ID NO: 2283487 - DNA, 25 bp, Homo sapien
cagtccgccgaaccagaagcagccc

SEQ ID NO: 2283488 - DNA, 25 bp, Homo sapien
gaggagagtcacctgctaaccagaa

SEQ ID NO: 2283489 - DNA, 25 bp, Homo sapien
cattggaagtgatacaggacaggga

SEQ ID NO: 2283490 - DNA, 25 bp, Homo sapien
tgagtccctgaactcaatggaggag

SEQ ID NO: 2283491 - DNA, 25 bp, Homo sapien
gagaaaacttatcagtccctaggat

SEQ ID NO: 2283492 - DNA, 25 bp, Homo sapien
gctatcctcagcattaatatgttta

SEQ ID NO: 2283493 - DNA, 25 bp, Homo sapien
attggcaggaggacttaaaccaagc

SEQ ID NO: 2283494 - DNA, 25 bp, Homo sapien
ctcattagctatcctcagcattaat

SEQ ID NO: 2283495 - DNA, 25 bp, Homo sapien
tagatctgttcctaatgtcacttgg

SEQ ID NO: 2283496 - DNA, 25 bp, Homo sapien
agggggcttagacaaagcaatcttc

SEQ ID NO: 2283497 - DNA, 25 bp, Homo sapien
gggggcttagacaaagcaatcttca

SEQ ID NO: 2283498 - DNA, 25 bp, Homo sapien
ggggcttagacaaagcaatcttcat

SEQ ID NO: 2283499 - DNA, 25 bp, Homo sapien
caagggggcttagacaaagcaatct

SEQ ID NO: 2283500 - DNA, 25 bp, Homo sapien
ttttccatgtagacacggttcacaa

SEQ ID NO: 2283501 - DNA, 25 bp, Homo sapien
taacaatcatgggaaaccgcggctc

SEQ ID NO: 2283502 - DNA, 25 bp, Homo sapien
caaattggtgcacaaaataagctgg

SEQ ID NO: 2283503 - DNA, 25 bp, Homo sapien
ccagccctatggatttgtggaaaca

SEQ ID NO: 2283504 - DNA, 25 bp, Homo sapien
aaatcagtactgtccctagggcaaa

SEQ ID NO: 2283505 - DNA, 25 bp, Homo sapien
aacccctgtgcattgctggtaagca

SEQ ID NO: 2283506 - DNA, 25 bp, Homo sapien
gaagagcagtttggccgtttctcaa

SEQ ID NO: 2283507 - DNA, 25 bp, Homo sapien
cactgggatggctcaaattaaaagg

SEQ ID NO: 2283508 - DNA, 25 bp, Homo sapien
ggcagccggcatgcactctttgttg

SEQ ID NO: 2283509 - DNA, 25 bp, Homo sapien
gccgtgacacatgaccaagttataa

SEQ ID NO: 2283510 - DNA, 25 bp, Homo sapien
tggcagatcatgagctagaagcagc

SEQ ID NO: 2283511 - DNA, 25 bp, Homo sapien
tgacagataggaatgctggccaggt

SEQ ID NO: 2283512 - DNA, 25 bp, Homo sapien
taaaccagtatctcacacaattctg

SEQ ID NO: 2283513 - DNA, 25 bp, Homo sapien
tgtgactgtaggcagtaaaccagta

SEQ ID NO: 2283514 - DNA, 25 bp, Homo sapien
ccagacacatgctcattgtaacaca

SEQ ID NO: 2283515 - DNA, 25 bp, Homo sapien
gtatctcacacaattctgaatcacc

SEQ ID NO: 2283516 - DNA, 25 bp, Homo sapien
ctttgctcttgaggtaacattgtcc

SEQ ID NO: 2283517 - DNA, 25 bp, Homo sapien
tttgctcttgaggtaacattgtcct

SEQ ID NO: 2283518 - DNA, 25 bp, Homo sapien
gaattgggaaccttctcgggcatca

SEQ ID NO: 2283519 - DNA, 25 bp, Homo sapien
tctcgggcatcacattttacttggc

SEQ ID NO: 2283520 - DNA, 25 bp, Homo sapien
gtggaatcctgaattgggaaccttc

SEQ ID NO: 2283521 - DNA, 25 bp, Homo sapien
catcacattttacttggcagggcat

SEQ ID NO: 2283522 - DNA, 25 bp, Homo sapien
caggacaagggctcaacacccggta

SEQ ID NO: 2283523 - DNA, 25 bp, Homo sapien
gacaagggctcaacacccggtacca

SEQ ID NO: 2283524 - DNA, 25 bp, Homo sapien
aagggctcaacacccggtaccagag

SEQ ID NO: 2283525 - DNA, 25 bp, Homo sapien
tcaggacaagggctcaacacccggt

SEQ ID NO: 2283526 - DNA, 25 bp, Homo sapien
tgtccctggctctatgttctgggaa

SEQ ID NO: 2283527 - DNA, 25 bp, Homo sapien
tctatgttctgggaatgtgcgttat

SEQ ID NO: 2283528 - DNA, 25 bp, Homo sapien
cgttatttgtaccttgttgagatcc

SEQ ID NO: 2283529 - DNA, 25 bp, Homo sapien
ctgggaatgtgcgttatttgtacct

SEQ ID NO: 2283530 - DNA, 25 bp, Homo sapien
acagctttatcaactgttgtgccag

SEQ ID NO: 2283531 - DNA, 25 bp, Homo sapien
ctgtgagggacacagtcccgcagat

SEQ ID NO: 2283532 - DNA, 25 bp, Homo sapien
acacagtcccgcagatccagtggaa

SEQ ID NO: 2283533 - DNA, 25 bp, Homo sapien
acacagctttatcaactgttgtgcc

SEQ ID NO: 2283534 - DNA, 25 bp, Homo sapien
gcacagtctggtcgatgcccatctg

SEQ ID NO: 2283535 - DNA, 25 bp, Homo sapien
tcttttctggcgctcctgcatgaag

SEQ ID NO: 2283536 - DNA, 25 bp, Homo sapien
tgcccatctgtatgcggcggaggat

SEQ ID NO: 2283537 - DNA, 25 bp, Homo sapien
tctggatctgctcggcatacttggc

SEQ ID NO: 2283538 - DNA, 25 bp, Homo sapien
tatcaccgagaactggttaggttcc

SEQ ID NO: 2283539 - DNA, 25 bp, Homo sapien
cacaccgggaaactgcatcaaggaa

SEQ ID NO: 2283540 - DNA, 25 bp, Homo sapien
tccggtacctggactggactatata

SEQ ID NO: 2283541 - DNA, 25 bp, Homo sapien
gatgatatgaccttagctccacacg

SEQ ID NO: 2283542 - DNA, 25 bp, Homo sapien
cagcttctgatgacgactaagggac

SEQ ID NO: 2283543 - DNA, 25 bp, Homo sapien
taagggacacctaacctgacagtca

SEQ ID NO: 2283544 - DNA, 25 bp, Homo sapien
gaacagggtacaggcctgcatgccg

SEQ ID NO: 2283545 - DNA, 25 bp, Homo sapien
gacgcttgcaggaacttagggaaca

SEQ ID NO: 2283546 - DNA, 25 bp, Homo sapien
caccacaagtgcaggagatccatgg

SEQ ID NO: 2283547 - DNA, 25 bp, Homo sapien
tgcaccttgggagctcggaatttag

SEQ ID NO: 2283548 - DNA, 25 bp, Homo sapien
taacgtgcacgtgatggaacagggc

SEQ ID NO: 2283549 - DNA, 25 bp, Homo sapien
aagtacgactgagacctgcaagcca

SEQ ID NO: 2283550 - DNA, 25 bp, Homo sapien
aggagcgcaaaacctagatccttca

SEQ ID NO: 2283551 - DNA, 25 bp, Homo sapien
taaatacacacgaagctggccaggt

SEQ ID NO: 2283552 - DNA, 25 bp, Homo sapien
tcttaggggagtctaatgctgggtc

SEQ ID NO: 2283553 - DNA, 25 bp, Homo sapien
caatgttatttatgacagcagtccc

SEQ ID NO: 2283554 - DNA, 25 bp, Homo sapien
aaaaatcccggaggcatggacacgc

SEQ ID NO: 2283555 - DNA, 25 bp, Homo sapien
tccagctcaaacactagaatccgtt

SEQ ID NO: 2283556 - DNA, 25 bp, Homo sapien
caatgtgacaggcaaatagggtaac

SEQ ID NO: 2283557 - DNA, 25 bp, Homo sapien
tgtggccggtagaagcaatgtgaca

SEQ ID NO: 2283558 - DNA, 25 bp, Homo sapien
tgcttgcaggccagtgcgagttcca

SEQ ID NO: 2283559 - DNA, 25 bp, Homo sapien
ccccaccgcccgagcagtgaggggc

SEQ ID NO: 2283560 - DNA, 25 bp, Homo sapien
tcagcggaccctgcgctcggagcag

SEQ ID NO: 2283561 - DNA, 25 bp, Homo sapien
ttgcaggccagtgcgagttccaggt

SEQ ID NO: 2283562 - DNA, 25 bp, Homo sapien
ctagactagaagagctatcttggcc

SEQ ID NO: 2283563 - DNA, 25 bp, Homo sapien
gcttcagtgcaaacagatggaatat

SEQ ID NO: 2283564 - DNA, 25 bp, Homo sapien
gacagtgctcggagccccttcatga

SEQ ID NO: 2283565 - DNA, 25 bp, Homo sapien
ctcagcaggctattgttggaggact

SEQ ID NO: 2283566 - DNA, 25 bp, Homo sapien
tctttgcagccataaactcggtggg

SEQ ID NO: 2283567 - DNA, 25 bp, Homo sapien
tgaagtaaggccagctgttgaacgg

SEQ ID NO: 2283568 - DNA, 25 bp, Homo sapien
ccttctggaactgtgatgtagtcac

SEQ ID NO: 2283569 - DNA, 25 bp, Homo sapien
tcttggaatcgagactgccgtggcg

SEQ ID NO: 2283570 - DNA, 25 bp, Homo sapien
ctgtttttggaaacgctggccggcg

SEQ ID NO: 2283571 - DNA, 25 bp, Homo sapien
aataaaacggttgagaaagctgaga

SEQ ID NO: 2283572 - DNA, 25 bp, Homo sapien
tgatgtttctatgattgcctcagac

SEQ ID NO: 2283573 - DNA, 25 bp, Homo sapien
ggcttttatcccctcggcatgcgat

SEQ ID NO: 2283574 - DNA, 25 bp, Homo sapien
gaccctgttagggacagagcctagt

SEQ ID NO: 2283575 - DNA, 25 bp, Homo sapien
cacgttgtgctactaagagatctca

SEQ ID NO: 2283576 - DNA, 25 bp, Homo sapien
tacaccttagcgctgagactgagcc

SEQ ID NO: 2283577 - DNA, 25 bp, Homo sapien
tgtaaaagcaacaggtggatcaacc

SEQ ID NO: 2283578 - DNA, 25 bp, Homo sapien
gataatgacacccacctgataaagg

SEQ ID NO: 2283579 - DNA, 25 bp, Homo sapien
ccatgttaagtcagcagcctggagg

SEQ ID NO: 2283580 - DNA, 25 bp, Homo sapien
tggacccagatatttgaccagcctg

SEQ ID NO: 2283581 - DNA, 25 bp, Homo sapien
tctggtcatctgcacgagctctcat

SEQ ID NO: 2283582 - DNA, 25 bp, Homo sapien
cacagatgagatttgcgtagaggtt

SEQ ID NO: 2283583 - DNA, 25 bp, Homo sapien
tccaatggatgtgttctagtgcact

SEQ ID NO: 2283584 - DNA, 25 bp, Homo sapien
ccctgcatgtatcgttgggtagaga

SEQ ID NO: 2283585 - DNA, 25 bp, Homo sapien
tcctacattctagagtcggccagat

SEQ ID NO: 2283586 - DNA, 25 bp, Homo sapien
ttgaagtgtcagataacaggaatat

SEQ ID NO: 2283587 - DNA, 25 bp, Homo sapien
gaagtgtcagataacaggaatatat

SEQ ID NO: 2283588 - DNA, 25 bp, Homo sapien
tatatttcttaggtaatcagggaaa

SEQ ID NO: 2283589 - DNA, 25 bp, Homo sapien
tgaagtgtcagataacaggaatata

SEQ ID NO: 2283590 - DNA, 25 bp, Homo sapien
cagtaaataaagttgagccatttta

SEQ ID NO: 2283591 - DNA, 25 bp, Homo sapien
cagaaaagttgcttaaaatagggag

SEQ ID NO: 2283592 - DNA, 25 bp, Homo sapien
gttgagccattttatgacatacaga

SEQ ID NO: 2283593 - DNA, 25 bp, Homo sapien
catacagaaaagttgcttaaaatag

SEQ ID NO: 2283594 - DNA, 25 bp, Homo sapien
tatcagccagtatcagctggatgcc

SEQ ID NO: 2283595 - DNA, 25 bp, Homo sapien
tgtacatattgttaagcccctcagc

SEQ ID NO: 2283596 - DNA, 25 bp, Homo sapien
gaaggcatgagactgtgtacacgag

SEQ ID NO: 2283597 - DNA, 25 bp, Homo sapien
ggctgtgtggaataacctcgtcccc

SEQ ID NO: 2283598 - DNA, 25 bp, Homo sapien
caaactcgtgactgcatggacacaa

SEQ ID NO: 2283599 - DNA, 25 bp, Homo sapien
tctccgggttggttggaaggactca

SEQ ID NO: 2283600 - DNA, 25 bp, Homo sapien
gctatgggatactcatgaggtgccc

SEQ ID NO: 2283601 - DNA, 25 bp, Homo sapien
taatgtgccagtaacagagtttgcc

SEQ ID NO: 2283602 - DNA, 25 bp, Homo sapien
gatatcaaaatctacctagaagaga

SEQ ID NO: 2283603 - DNA, 25 bp, Homo sapien
tccagagacattggctctaatttca

SEQ ID NO: 2283604 - DNA, 25 bp, Homo sapien
tcttaagtcatgacaatgtgtgggc

SEQ ID NO: 2283605 - DNA, 25 bp, Homo sapien
tgttcccattgcacgtcacttccag

SEQ ID NO: 2283606 - DNA, 25 bp, Homo sapien
ttagttcatattaaagtaatcacaa

SEQ ID NO: 2283607 - DNA, 25 bp, Homo sapien
agttcatattaaagtaatcacaaac

SEQ ID NO: 2283608 - DNA, 25 bp, Homo sapien
tagttcatattaaagtaatcacaaa

SEQ ID NO: 2283609 - DNA, 25 bp, Homo sapien
gttgctgagggtttcatcttcaatt

SEQ ID NO: 2283610 - DNA, 25 bp, Homo sapien
tttcaagatttccaggttgctgagg

SEQ ID NO: 2283611 - DNA, 25 bp, Homo sapien
gggtttcatcttcaattaggattca

SEQ ID NO: 2283612 - DNA, 25 bp, Homo sapien
ttttcaagatttccaggttgctgag

SEQ ID NO: 2283613 - DNA, 25 bp, Homo sapien
tacagcatgctgaaactaaactgaa

SEQ ID NO: 2283614 - DNA, 25 bp, Homo sapien
caataagatgagtcaggtatggtgg

SEQ ID NO: 2283615 - DNA, 25 bp, Homo sapien
tagtaagaagtcattgatacgtatc

SEQ ID NO: 2283616 - DNA, 25 bp, Homo sapien
tatagttccatctcagtttcaccat

SEQ ID NO: 2283617 - DNA, 25 bp, Homo sapien
tacaccaggaaatgagacaataatc

SEQ ID NO: 2283618 - DNA, 25 bp, Homo sapien
tgccaaacagtgttctaggtgctgg

SEQ ID NO: 2283619 - DNA, 25 bp, Homo sapien
aattaaatgggtgatcaaagtggcc

SEQ ID NO: 2283620 - DNA, 25 bp, Homo sapien
caaagtggcctaattgagatagagg

SEQ ID NO: 2283621 - DNA, 25 bp, Homo sapien
tagactattcatccctcagtgagaa

SEQ ID NO: 2283622 - DNA, 25 bp, Homo sapien
tggaatgcctctaccgccatctgag

SEQ ID NO: 2283623 - DNA, 25 bp, Homo sapien
caagatcacccaggcgatgagtggt

SEQ ID NO: 2283624 - DNA, 25 bp, Homo sapien
gaacacttgcttttttatgccccag

SEQ ID NO: 2283625 - DNA, 25 bp, Homo sapien
taatagcttatgcttgtaccgagcc

SEQ ID NO: 2283626 - DNA, 25 bp, Homo sapien
catatacagcactaagcaggataca

SEQ ID NO: 2283627 - DNA, 25 bp, Homo sapien
catgcattcctagggcaaagctgga

SEQ ID NO: 2283628 - DNA, 25 bp, Homo sapien
catcagcaggtcattccacaagtaa

SEQ ID NO: 2283629 - DNA, 25 bp, Homo sapien
gacggcattgtaggagttaatccca

SEQ ID NO: 2283630 - DNA, 25 bp, Homo sapien
aacatttatagttggagcggactcc

SEQ ID NO: 2283631 - DNA, 25 bp, Homo sapien
gaagccagcttgtcttagaatgtag

SEQ ID NO: 2283632 - DNA, 25 bp, Homo sapien
gcggattcagcttcagtgataggca

SEQ ID NO: 2283633 - DNA, 25 bp, Homo sapien
ttctgtgccacctgggtaccctcat

SEQ ID NO: 2283634 - DNA, 25 bp, Homo sapien
gactcagagacccagtgccattgtt

SEQ ID NO: 2283635 - DNA, 25 bp, Homo sapien
tgctttgtcccatccggattttatc

SEQ ID NO: 2283636 - DNA, 25 bp, Homo sapien
gagaggagccaatcagactcagaga

SEQ ID NO: 2283637 - DNA, 25 bp, Homo sapien
cctctcccagtaggtagggtcctga

SEQ ID NO: 2283638 - DNA, 25 bp, Homo sapien
tccatttctaccctcccaagaccac

SEQ ID NO: 2283639 - DNA, 25 bp, Homo sapien
aatccctggccgtatttcctcttgc

SEQ ID NO: 2283640 - DNA, 25 bp, Homo sapien
cccagtaacttcatccagggatcct

SEQ ID NO: 2283641 - DNA, 25 bp, Homo sapien
tatcttcaggagaatgtagttcagc

SEQ ID NO: 2283642 - DNA, 25 bp, Homo sapien
tccccttagactgtgttccaaattg

SEQ ID NO: 2283643 - DNA, 25 bp, Homo sapien
cattgcttgctcctagagccttcca

SEQ ID NO: 2283644 - DNA, 25 bp, Homo sapien
tccttctgacaaggagagaaccttg

SEQ ID NO: 2283645 - DNA, 25 bp, Homo sapien
agtgtaaccttgtcaaggcctgtac

SEQ ID NO: 2283646 - DNA, 25 bp, Homo sapien
ccttaacgctttgtgggagatactg

SEQ ID NO: 2283647 - DNA, 25 bp, Homo sapien
ccctccttaacgctttgtgggagat

SEQ ID NO: 2283648 - DNA, 25 bp, Homo sapien
tgttgggtggaaataatgtcagtgt

SEQ ID NO: 2283649 - DNA, 25 bp, Homo sapien
cagaatagagccctgaatcagaccc

SEQ ID NO: 2283650 - DNA, 25 bp, Homo sapien
tagcagtgttcagccatattcgtca

SEQ ID NO: 2283651 - DNA, 25 bp, Homo sapien
gataaatgatcctacgtcaattgcc

SEQ ID NO: 2283652 - DNA, 25 bp, Homo sapien
aattttggtccttgcttgccatcac

SEQ ID NO: 2283653 - DNA, 25 bp, Homo sapien
caaaagcttaatggcagtaactgag

SEQ ID NO: 2283654 - DNA, 25 bp, Homo sapien
ggaacagaactgcagaattatccag

SEQ ID NO: 2283655 - DNA, 25 bp, Homo sapien
tagaatgccctatcctttcgttcag

SEQ ID NO: 2283656 - DNA, 25 bp, Homo sapien
gaagcagacttatatagctgtccag

SEQ ID NO: 2283657 - DNA, 25 bp, Homo sapien
tctcagattggagaaagcacacctc

SEQ ID NO: 2283658 - DNA, 25 bp, Homo sapien
gcgttttgaagtcgtgggtgtctca

SEQ ID NO: 2283659 - DNA, 25 bp, Homo sapien
acatcaactgcaaggattcttggcg

SEQ ID NO: 2283660 - DNA, 25 bp, Homo sapien
gcccagggtctgtgtatcacgtgta

SEQ ID NO: 2283661 - DNA, 25 bp, Homo sapien
ctttgcgggcgaagctgctcacttc

SEQ ID NO: 2283662 - DNA, 25 bp, Homo sapien
tgctcacttccaggcgcgactgtta

SEQ ID NO: 2283663 - DNA, 25 bp, Homo sapien
tgttacacaacacgcctgccaagtg

SEQ ID NO: 2283664 - DNA, 25 bp, Homo sapien
tttggtgtaagcagcgaggccacct

SEQ ID NO: 2283665 - DNA, 25 bp, Homo sapien
agaaggtctggttggctcccagaga

SEQ ID NO: 2283666 - DNA, 25 bp, Homo sapien
cgtattctcatggaattgtccgcaa

SEQ ID NO: 2283667 - DNA, 25 bp, Homo sapien
aaaccttggaccatcggaagggcag

SEQ ID NO: 2283668 - DNA, 25 bp, Homo sapien
gagaccaatgttaactcccatcagc

SEQ ID NO: 2283669 - DNA, 25 bp, Homo sapien
tcccatggcttgaagcaagtcccca

SEQ ID NO: 2283670 - DNA, 25 bp, Homo sapien
tacacaacatttgccctactgagaa

SEQ ID NO: 2283671 - DNA, 25 bp, Homo sapien
tggctttgcgtgaaacttcccatgg

SEQ ID NO: 2283672 - DNA, 25 bp, Homo sapien
catgacggtgtttgcataccactgg

SEQ ID NO: 2283673 - DNA, 25 bp, Homo sapien
tgcccatggctctcacctactaaag

SEQ ID NO: 2283674 - DNA, 25 bp, Homo sapien
gaaggccccttgaaacatctgtgag

SEQ ID NO: 2283675 - DNA, 25 bp, Homo sapien
cagaaggacatgaccaatggcttgt

SEQ ID NO: 2283676 - DNA, 25 bp, Homo sapien
tagaaagttcagacattacaagcag

SEQ ID NO: 2283677 - DNA, 25 bp, Homo sapien
gaggcccaaatacgtgcttgtaacc

SEQ ID NO: 2283678 - DNA, 25 bp, Homo sapien
caaatacgtgcttgtaaccttcctg

SEQ ID NO: 2283679 - DNA, 25 bp, Homo sapien
gcaggtgaggcccaaatacgtgctt

SEQ ID NO: 2283680 - DNA, 25 bp, Homo sapien
tacgtgcttgtaaccttcctgccca

SEQ ID NO: 2283681 - DNA, 25 bp, Homo sapien
acaagagtagcaggggaaccatttc

SEQ ID NO: 2283682 - DNA, 25 bp, Homo sapien
atagccttaactgttccattttttg

SEQ ID NO: 2283683 - DNA, 25 bp, Homo sapien
cataaatagccttaactgttccatt

SEQ ID NO: 2283684 - DNA, 25 bp, Homo sapien
gagtagcaggggaaccatttcttac

SEQ ID NO: 2283685 - DNA, 25 bp, Homo sapien
cctgagtcgttaggaggaagtttgc

SEQ ID NO: 2283686 - DNA, 25 bp, Homo sapien
tgagtcgttaggaggaagtttgctt

SEQ ID NO: 2283687 - DNA, 25 bp, Homo sapien
ccctgagtcgttaggaggaagtttg

SEQ ID NO: 2283688 - DNA, 25 bp, Homo sapien
gagaaaagattggaaccctgagtcg

SEQ ID NO: 2283689 - DNA, 25 bp, Homo sapien
gagtgccacggcgttcattcaaggg

SEQ ID NO: 2283690 - DNA, 25 bp, Homo sapien
tcattcaaggggcttataaatcctt

SEQ ID NO: 2283691 - DNA, 25 bp, Homo sapien
ttaagattgagtgccacggcgttca

SEQ ID NO: 2283692 - DNA, 25 bp, Homo sapien
ttccccagggccactaacacttcaa

SEQ ID NO: 2283693 - DNA, 25 bp, Homo sapien
ttacagacgctctggagagccgccg

SEQ ID NO: 2283694 - DNA, 25 bp, Homo sapien
gttcaggaatggcagagcggaccct

SEQ ID NO: 2283695 - DNA, 25 bp, Homo sapien
cgcttccctgatgccagagtcacgg

SEQ ID NO: 2283696 - DNA, 25 bp, Homo sapien
ccctccatgacagtctctgggtgtt

SEQ ID NO: 2283697 - DNA, 25 bp, Homo sapien
ctatgaattttgataagcagtatca

SEQ ID NO: 2283698 - DNA, 25 bp, Homo sapien
actctcacagtttcccttattatta

SEQ ID NO: 2283699 - DNA, 25 bp, Homo sapien
taattgatgaactaacattgattta

SEQ ID NO: 2283700 - DNA, 25 bp, Homo sapien
tacagggagttcctatactatcccc

SEQ ID NO: 2283701 - DNA, 25 bp, Homo sapien
taattcaggagtagctgcttttgag

SEQ ID NO: 2283702 - DNA, 25 bp, Homo sapien
gaacacagtgtacttcatggacttc

SEQ ID NO: 2283703 - DNA, 25 bp, Homo sapien
ctgcttttgagacgccagaaagaga

SEQ ID NO: 2283704 - DNA, 25 bp, Homo sapien
acttcatggacttcactgatttttg

SEQ ID NO: 2283705 - DNA, 25 bp, Homo sapien
tactgatatctcagcttttttcggg

SEQ ID NO: 2283706 - DNA, 25 bp, Homo sapien
gtcaattttggctggcttccgacca

SEQ ID NO: 2283707 - DNA, 25 bp, Homo sapien
gcttttttcgggctcggcattctct

SEQ ID NO: 2283708 - DNA, 25 bp, Homo sapien
tgccggctcctctcaagttttgctt

SEQ ID NO: 2283709 - DNA, 25 bp, Homo sapien
cacatatagctctttctcgactgga

SEQ ID NO: 2283710 - DNA, 25 bp, Homo sapien
gcacatatagctctttctcgactgg

SEQ ID NO: 2283711 - DNA, 25 bp, Homo sapien
catatagctctttctcgactggata

SEQ ID NO: 2283712 - DNA, 25 bp, Homo sapien
atatagctctttctcgactggatac

SEQ ID NO: 2283713 - DNA, 25 bp, Homo sapien
tcttctccagtgagtagggccttta

SEQ ID NO: 2283714 - DNA, 25 bp, Homo sapien
ccattgccatgcaccactgcttgta

SEQ ID NO: 2283715 - DNA, 25 bp, Homo sapien
gagttctgctgagatttgttctgct

SEQ ID NO: 2283716 - DNA, 25 bp, Homo sapien
tttccttggtccattgccatgcacc

SEQ ID NO: 2283717 - DNA, 25 bp, Homo sapien
tattctgcaagtatggatttggccc

SEQ ID NO: 2283718 - DNA, 25 bp, Homo sapien
ggtggcaataccaacccagacaggt

SEQ ID NO: 2283719 - DNA, 25 bp, Homo sapien
catatccagggctgaaccagatgca

SEQ ID NO: 2283720 - DNA, 25 bp, Homo sapien
cagcttatgctggaatggctcacag

SEQ ID NO: 2283721 - DNA, 25 bp, Homo sapien
tatacaattgagtggaccagatggc

SEQ ID NO: 2283722 - DNA, 25 bp, Homo sapien
caggctaagggaggcactttattca

SEQ ID NO: 2283723 - DNA, 25 bp, Homo sapien
taaagacgttccattgaagagcgac

SEQ ID NO: 2283724 - DNA, 25 bp, Homo sapien
caagaggtctttaggagctcaggct

SEQ ID NO: 2283725 - DNA, 25 bp, Homo sapien
tcaaaagtgaccaaagtgtccagcc

SEQ ID NO: 2283726 - DNA, 25 bp, Homo sapien
cttcaaaagtgaccaaagtgtccag

SEQ ID NO: 2283727 - DNA, 25 bp, Homo sapien
caaaagtgaccaaagtgtccagcca

SEQ ID NO: 2283728 - DNA, 25 bp, Homo sapien
atgcttcaaaagtgaccaaagtgtc

SEQ ID NO: 2283729 - DNA, 25 bp, Homo sapien
tgaggggtgccaggatttcactatg

SEQ ID NO: 2283730 - DNA, 25 bp, Homo sapien
tcctggactccgtgactgtcagcca

SEQ ID NO: 2283731 - DNA, 25 bp, Homo sapien
aaaacattactctgtttactcagaa

SEQ ID NO: 2283732 - DNA, 25 bp, Homo sapien
tcacaaaaaggtgaggggtgccagg

SEQ ID NO: 2283733 - DNA, 25 bp, Homo sapien
aacagtaatctgaatttgcgcagga

SEQ ID NO: 2283734 - DNA, 25 bp, Homo sapien
gagaaatactgtcaattagccagca

SEQ ID NO: 2283735 - DNA, 25 bp, Homo sapien
gatcaaataactcaaggtgactcag

SEQ ID NO: 2283736 - DNA, 25 bp, Homo sapien
tagcctaccaattaccctgtgaaag

SEQ ID NO: 2283737 - DNA, 25 bp, Homo sapien
tgctaacaatagtcaaacacaggca

SEQ ID NO: 2283738 - DNA, 25 bp, Homo sapien
aatgctaacaatagtcaaacacagg

SEQ ID NO: 2283739 - DNA, 25 bp, Homo sapien
taaatgctaacaatagtcaaacaca

SEQ ID NO: 2283740 - DNA, 25 bp, Homo sapien
gacttaaatgctaacaatagtcaaa

SEQ ID NO: 2283741 - DNA, 25 bp, Homo sapien
aattcggaggcattgtgctcctgcc

SEQ ID NO: 2283742 - DNA, 25 bp, Homo sapien
ggccaggctgatgacatctcagaca

SEQ ID NO: 2283743 - DNA, 25 bp, Homo sapien
tagtgatatggaacagagatggcca

SEQ ID NO: 2283744 - DNA, 25 bp, Homo sapien
gctcctgccttaggtatatgtggaa

SEQ ID NO: 2283745 - DNA, 25 bp, Homo sapien
ggttcaaaaggctcatgggcacatg

SEQ ID NO: 2283746 - DNA, 25 bp, Homo sapien
gatttcttactctgcctggttcaaa

SEQ ID NO: 2283747 - DNA, 25 bp, Homo sapien
caggcattgccagctttcatctttg

SEQ ID NO: 2283748 - DNA, 25 bp, Homo sapien
gcaaaaaggtgaggttactccaaca

SEQ ID NO: 2283749 - DNA, 25 bp, Homo sapien
gccaagcaagggtgtgaatatcaga

SEQ ID NO: 2283750 - DNA, 25 bp, Homo sapien
tatgtaacctaagcatggaagtgac

SEQ ID NO: 2283751 - DNA, 25 bp, Homo sapien
tagaggctgtctgccccaacaaaat

SEQ ID NO: 2283752 - DNA, 25 bp, Homo sapien
gaattcaattcatcaagggcctcag

SEQ ID NO: 2283753 - DNA, 25 bp, Homo sapien
agttttccagaatgaccgcttgatg

SEQ ID NO: 2283754 - DNA, 25 bp, Homo sapien
cactggcgaattcagggaagtcctc

SEQ ID NO: 2283755 - DNA, 25 bp, Homo sapien
tcttcacgatgcctgtcacactggc

SEQ ID NO: 2283756 - DNA, 25 bp, Homo sapien
ggcactgtgacttgtgggcagagcc

SEQ ID NO: 2283757 - DNA, 25 bp, Homo sapien
tctttcaactttaccatttggcttg

SEQ ID NO: 2283758 - DNA, 25 bp, Homo sapien
ctttcaactttaccatttggcttgc

SEQ ID NO: 2283759 - DNA, 25 bp, Homo sapien
tttcaactttaccatttggcttgct

SEQ ID NO: 2283760 - DNA, 25 bp, Homo sapien
tcctgcacagatgcgcttgcctgtg

SEQ ID NO: 2283761 - DNA, 25 bp, Homo sapien
cctttcatcacaggcttagccccca

SEQ ID NO: 2283762 - DNA, 25 bp, Homo sapien
gcacatcctgcacagatgcgcttgc

SEQ ID NO: 2283763 - DNA, 25 bp, Homo sapien
catcctgcacagatgcgcttgcctg

SEQ ID NO: 2283764 - DNA, 25 bp, Homo sapien
gatgcatcctttgagtggaatctga

SEQ ID NO: 2283765 - DNA, 25 bp, Homo sapien
caggttctcgtaaaccgtcggtgag

SEQ ID NO: 2283766 - DNA, 25 bp, Homo sapien
tcgaatacgttaatgtccagcctgc

SEQ ID NO: 2283767 - DNA, 25 bp, Homo sapien
cttctcatcttcatcgaatacgtta

SEQ ID NO: 2283768 - DNA, 25 bp, Homo sapien
attcttatcccatcagcaaatggct

SEQ ID NO: 2283769 - DNA, 25 bp, Homo sapien
cattcttatcccatcagcaaatggc

SEQ ID NO: 2283770 - DNA, 25 bp, Homo sapien
tcacattcttatcccatcagcaaat

SEQ ID NO: 2283771 - DNA, 25 bp, Homo sapien
acattcttatcccatcagcaaatgg

SEQ ID NO: 2283772 - DNA, 25 bp, Homo sapien
aagtaaccactagccagatctgcta

SEQ ID NO: 2283773 - DNA, 25 bp, Homo sapien
ccactagccagatctgctatggaaa

SEQ ID NO: 2283774 - DNA, 25 bp, Homo sapien
ccatatattggaacttgctggcaag

SEQ ID NO: 2283775 - DNA, 25 bp, Homo sapien
ctgctatggaaagcacgccatatat

SEQ ID NO: 2283776 - DNA, 25 bp, Homo sapien
aaggcactgcctacactgtcatcca

SEQ ID NO: 2283777 - DNA, 25 bp, Homo sapien
tgggaaggcactgcctacactgtca

SEQ ID NO: 2283778 - DNA, 25 bp, Homo sapien
gcactgcctacactgtcatccactt

SEQ ID NO: 2283779 - DNA, 25 bp, Homo sapien
ggaaggcactgcctacactgtcatc

SEQ ID NO: 2283780 - DNA, 25 bp, Homo sapien
tgcatagaccggttctacaccatcg

SEQ ID NO: 2283781 - DNA, 25 bp, Homo sapien
ccaagaaaatgattgcggcatcgtg

SEQ ID NO: 2283782 - DNA, 25 bp, Homo sapien
tcatccataggagtaggaggactca

SEQ ID NO: 2283783 - DNA, 25 bp, Homo sapien
caatatctcactccaggtgtccaga

SEQ ID NO: 2283784 - DNA, 25 bp, Homo sapien
tgggcagacagactcatgggtgtaa

SEQ ID NO: 2283785 - DNA, 25 bp, Homo sapien
aatgggcagacagactcatgggtgt

SEQ ID NO: 2283786 - DNA, 25 bp, Homo sapien
gaaatgggcagacagactcatgggt

SEQ ID NO: 2283787 - DNA, 25 bp, Homo sapien
tggggaaatgggcagacagactcat

SEQ ID NO: 2283788 - DNA, 25 bp, Homo sapien
tagactcaggaactcctcgggctcc

SEQ ID NO: 2283789 - DNA, 25 bp, Homo sapien
tcgggctccctcgtcctgtttctga

SEQ ID NO: 2283790 - DNA, 25 bp, Homo sapien
aatctagactcaggaactcctcggg

SEQ ID NO: 2283791 - DNA, 25 bp, Homo sapien
cgggctccctcgtcctgtttctgag

SEQ ID NO: 2283792 - DNA, 25 bp, Homo sapien
atgtacagccaatttgactctctga

SEQ ID NO: 2283793 - DNA, 25 bp, Homo sapien
tgtacagccaatttgactctctgaa

SEQ ID NO: 2283794 - DNA, 25 bp, Homo sapien
acagccaatttgactctctgaattc

SEQ ID NO: 2283795 - DNA, 25 bp, Homo sapien
gtacagccaatttgactctctgaat

SEQ ID NO: 2283796 - DNA, 25 bp, Homo sapien
taccagatgtcagtaacacttccct

SEQ ID NO: 2283797 - DNA, 25 bp, Homo sapien
actgtgcccaaaccattgtagaatg

SEQ ID NO: 2283798 - DNA, 25 bp, Homo sapien
agaaccactagtctagaacctgtgc

SEQ ID NO: 2283799 - DNA, 25 bp, Homo sapien
tgtgctctcagccaccatactatat

SEQ ID NO: 2283800 - DNA, 25 bp, Homo sapien
ggttaaggaacaccttgccaggtca

SEQ ID NO: 2283801 - DNA, 25 bp, Homo sapien
ttgaagagggtgtaatgctgtccgt

SEQ ID NO: 2283802 - DNA, 25 bp, Homo sapien
aaatagacaaatggctttaacaagc

SEQ ID NO: 2283803 - DNA, 25 bp, Homo sapien
tgaacgctccattgtcccagatgtg

SEQ ID NO: 2283804 - DNA, 25 bp, Homo sapien
ctgatccctggggaacatgctgtcc

SEQ ID NO: 2283805 - DNA, 25 bp, Homo sapien
ggggaacatgctgtcctgtgatgct

SEQ ID NO: 2283806 - DNA, 25 bp, Homo sapien
gatccctggggaacatgctgtcctg

SEQ ID NO: 2283807 - DNA, 25 bp, Homo sapien
cctggggaacatgctgtcctgtgat

SEQ ID NO: 2283808 - DNA, 25 bp, Homo sapien
gagttatttaaaaacagtcaactca

SEQ ID NO: 2283809 - DNA, 25 bp, Homo sapien
gcgtggaaataatgtctgtacaaaa

SEQ ID NO: 2283810 - DNA, 25 bp, Homo sapien
ttgttactataacttctgcatcaca

SEQ ID NO: 2283811 - DNA, 25 bp, Homo sapien
aactcaatcaaaacccactacttca

SEQ ID NO: 2283812 - DNA, 25 bp, Homo sapien
cagctgcgctgtatgtgtgaagtgc

SEQ ID NO: 2283813 - DNA, 25 bp, Homo sapien
ctggcagctgcgctgtatgtgtgaa

SEQ ID NO: 2283814 - DNA, 25 bp, Homo sapien
acttcatttcattttggcagcctaa

SEQ ID NO: 2283815 - DNA, 25 bp, Homo sapien
tttggcagcctaaagtatatcctgg

SEQ ID NO: 2283816 - DNA, 25 bp, Homo sapien
cacgtttgcgcatgcgtctggctca

SEQ ID NO: 2283817 - DNA, 25 bp, Homo sapien
tgcaggcaaaagtccacaagctcgt

SEQ ID NO: 2283818 - DNA, 25 bp, Homo sapien
aaaactttccgcctagtgagaggcg

SEQ ID NO: 2283819 - DNA, 25 bp, Homo sapien
cacgcgagatctgcctgaggagaag

SEQ ID NO: 2283820 - DNA, 25 bp, Homo sapien
aggcgcaatggcaacaggacggtaa

SEQ ID NO: 2283821 - DNA, 25 bp, Homo sapien
gcctcgcagagatcttcttcgtgga

SEQ ID NO: 2283822 - DNA, 25 bp, Homo sapien
gccaatgggctttttcgtagagtga

SEQ ID NO: 2283823 - DNA, 25 bp, Homo sapien
ctggttccaaggtgataaactggct

SEQ ID NO: 2283824 - DNA, 25 bp, Homo sapien
gaaacatcttccgtgacagctctga

SEQ ID NO: 2283825 - DNA, 25 bp, Homo sapien
gcgcttcgcctggactggtaaacaa

SEQ ID NO: 2283826 - DNA, 25 bp, Homo sapien
tttgctcgagcaagaggaccttagg

SEQ ID NO: 2283827 - DNA, 25 bp, Homo sapien
gaattacacgtcaagggagcaaacc

SEQ ID NO: 2283828 - DNA, 25 bp, Homo sapien
attcctgttacacacacgaacacgc

SEQ ID NO: 2283829 - DNA, 25 bp, Homo sapien
cttttcatgtcctatggctaagatt

SEQ ID NO: 2283830 - DNA, 25 bp, Homo sapien
ttttcatgtcctatggctaagattc

SEQ ID NO: 2283831 - DNA, 25 bp, Homo sapien
tgttacacacacgaacacgcactca

SEQ ID NO: 2283832 - DNA, 25 bp, Homo sapien
gaagatcccagagatggctcccagt

SEQ ID NO: 2283833 - DNA, 25 bp, Homo sapien
cagtgcacggtattaggaatcctag

SEQ ID NO: 2283834 - DNA, 25 bp, Homo sapien
agagatggctcccagtgcacggtat

SEQ ID NO: 2283835 - DNA, 25 bp, Homo sapien
ggctcccagtgcacggtattaggaa

SEQ ID NO: 2283836 - DNA, 25 bp, Homo sapien
caaagtgggcagctgcaagcgagta

SEQ ID NO: 2283837 - DNA, 25 bp, Homo sapien
taaaagacggaaagctctacactgc

SEQ ID NO: 2283838 - DNA, 25 bp, Homo sapien
tacttagggctgagaagcgtcccat

SEQ ID NO: 2283839 - DNA, 25 bp, Homo sapien
tcaaggcaccggagatctgtacagc

SEQ ID NO: 2283840 - DNA, 25 bp, Homo sapien
tgccacagaagtttgattttactca

SEQ ID NO: 2283841 - DNA, 25 bp, Homo sapien
cttgccacagaagtttgattttact

SEQ ID NO: 2283842 - DNA, 25 bp, Homo sapien
ttgccacagaagtttgattttactc

SEQ ID NO: 2283843 - DNA, 25 bp, Homo sapien
tcctaatggttctcactggttcagg

SEQ ID NO: 2283844 - DNA, 25 bp, Homo sapien
gagtcaggactagatgcaagtctcc

SEQ ID NO: 2283845 - DNA, 25 bp, Homo sapien
ctcctaacactcaggttggttcatt

SEQ ID NO: 2283846 - DNA, 25 bp, Homo sapien
cagggacatgcattcggttggtacc

SEQ ID NO: 2283847 - DNA, 25 bp, Homo sapien
tcatctcatacgctccagaatgtga

SEQ ID NO: 2283848 - DNA, 25 bp, Homo sapien
tttaccacggaggaaatcgagactc

SEQ ID NO: 2283849 - DNA, 25 bp, Homo sapien
ccacggaggaaatcgagactcagag

SEQ ID NO: 2283850 - DNA, 25 bp, Homo sapien
catctcatacgctccagaatgtgac

SEQ ID NO: 2283851 - DNA, 25 bp, Homo sapien
tacacagcagcaaagttttcttaag

SEQ ID NO: 2283852 - DNA, 25 bp, Homo sapien
caaccttccgttctaatattacaca

SEQ ID NO: 2283853 - DNA, 25 bp, Homo sapien
aagttttcttaagcacctatgctac

SEQ ID NO: 2283854 - DNA, 25 bp, Homo sapien
ccgttctaatattacacagcagcaa

SEQ ID NO: 2283855 - DNA, 25 bp, Homo sapien
tctccgctgatcaaatggactggcg

SEQ ID NO: 2283856 - DNA, 25 bp, Homo sapien
tctccaaaccttgccggcgtcggag

SEQ ID NO: 2283857 - DNA, 25 bp, Homo sapien
tggcaaagcccgtccgagtctgggc

SEQ ID NO: 2283858 - DNA, 25 bp, Homo sapien
ttttagtggcccaatatggcggtgg

SEQ ID NO: 2283859 - DNA, 25 bp, Homo sapien
tccaggctagggctcccgttagaca

SEQ ID NO: 2283860 - DNA, 25 bp, Homo sapien
gacggatcagtctttgggtccacca

SEQ ID NO: 2283861 - DNA, 25 bp, Homo sapien
tcgaaattccacttgcgctggctcg

SEQ ID NO: 2283862 - DNA, 25 bp, Homo sapien
ccaaatgcgtgtcctcagagttagc

SEQ ID NO: 2283863 - DNA, 25 bp, Homo sapien
gcaggcaaagcggggccccaaacac

SEQ ID NO: 2283864 - DNA, 25 bp, Homo sapien
attctatggttgggaaagggtcatt

SEQ ID NO: 2283865 - DNA, 25 bp, Homo sapien
tctatggttgggaaagggtcattac

SEQ ID NO: 2283866 - DNA, 25 bp, Homo sapien
gccccaaacacattctatggttggg

SEQ ID NO: 2283867 - DNA, 25 bp, Homo sapien
gtgggccaggtagcactgaacacct

SEQ ID NO: 2283868 - DNA, 25 bp, Homo sapien
gctctttccctagccaggaggcgga

SEQ ID NO: 2283869 - DNA, 25 bp, Homo sapien
gaggcggaccgttgataaacatccc

SEQ ID NO: 2283870 - DNA, 25 bp, Homo sapien
gaatacgccgaaaagcaagctaagg

SEQ ID NO: 2283871 - DNA, 25 bp, Homo sapien
gcatttggggaaccgtctgaaacat

SEQ ID NO: 2283872 - DNA, 25 bp, Homo sapien
tgttggctcttttgttttgagtaga

SEQ ID NO: 2283873 - DNA, 25 bp, Homo sapien
gtttgacgtcttctgaggccaggct

SEQ ID NO: 2283874 - DNA, 25 bp, Homo sapien
gcttcttgggcgtctgctccacaga

SEQ ID NO: 2283875 - DNA, 25 bp, Homo sapien
tcttgttcggatgggcaaagaacct

SEQ ID NO: 2283876 - DNA, 25 bp, Homo sapien
taccgactcaagctgaacctctagg

SEQ ID NO: 2283877 - DNA, 25 bp, Homo sapien
taattcggactgagggagtacccta

SEQ ID NO: 2283878 - DNA, 25 bp, Homo sapien
caacacgttttagtgggactcacag

SEQ ID NO: 2283879 - DNA, 25 bp, Homo sapien
ttccatttggtttttgcaaatactg

SEQ ID NO: 2283880 - DNA, 25 bp, Homo sapien
tttttgcaaatactggttccttctc

SEQ ID NO: 2283881 - DNA, 25 bp, Homo sapien
catttggtttttgcaaatactggtt

SEQ ID NO: 2283882 - DNA, 25 bp, Homo sapien
tttgcaaatactggttccttctctc

SEQ ID NO: 2283883 - DNA, 25 bp, Homo sapien
cttctgctttgcaacttcagtgtta

SEQ ID NO: 2283884 - DNA, 25 bp, Homo sapien
ttaacttctgctttgcaacttcagt

SEQ ID NO: 2283885 - DNA, 25 bp, Homo sapien
ttctgctttgcaacttcagtgttac

SEQ ID NO: 2283886 - DNA, 25 bp, Homo sapien
aacttctgctttgcaacttcagtgt

SEQ ID NO: 2283887 - DNA, 25 bp, Homo sapien
tacactggctgacgtgttcctggat

SEQ ID NO: 2283888 - DNA, 25 bp, Homo sapien
gacctacggtcaccagtcttgatat

SEQ ID NO: 2283889 - DNA, 25 bp, Homo sapien
gctatttacagtgatcagattcttg

SEQ ID NO: 2283890 - DNA, 25 bp, Homo sapien
tgttacggcacaattagcatacact

SEQ ID NO: 2283891 - DNA, 25 bp, Homo sapien
acaaaccaacaagggctgcgcatgt

SEQ ID NO: 2283892 - DNA, 25 bp, Homo sapien
tcattgcatgtcagaacagggccag

SEQ ID NO: 2283893 - DNA, 25 bp, Homo sapien
tagtgccgttttgtataagcgctga

SEQ ID NO: 2283894 - DNA, 25 bp, Homo sapien
tctgatgagctaggccacaagtcac

SEQ ID NO: 2283895 - DNA, 25 bp, Homo sapien
tacatccaacgcttttagaggcaga

SEQ ID NO: 2283896 - DNA, 25 bp, Homo sapien
tttagatagcttgggagatcaccag

SEQ ID NO: 2283897 - DNA, 25 bp, Homo sapien
tgtgtttacacagcccgaagtgaaa

SEQ ID NO: 2283898 - DNA, 25 bp, Homo sapien
caagcacctcggatttttgccccaa

SEQ ID NO: 2283899 - DNA, 25 bp, Homo sapien
aacactttcctgtggataaatggac

SEQ ID NO: 2283900 - DNA, 25 bp, Homo sapien
tatcctacaagtgtgcttttctcta

SEQ ID NO: 2283901 - DNA, 25 bp, Homo sapien
caaccttttaagcatagccatatta

SEQ ID NO: 2283902 - DNA, 25 bp, Homo sapien
aaaacctattctacccaacacagca

SEQ ID NO: 2283903 - DNA, 25 bp, Homo sapien
gaacatccgtgaacgagttgggtta

SEQ ID NO: 2283904 - DNA, 25 bp, Homo sapien
acacggcgcgcggaacatccgtgaa

SEQ ID NO: 2283905 - DNA, 25 bp, Homo sapien
gcgaagctgcagatcgctgaccgcc

SEQ ID NO: 2283906 - DNA, 25 bp, Homo sapien
ggttacatctctgtccccgcgaagc

SEQ ID NO: 2283907 - DNA, 25 bp, Homo sapien
tctgagtggcggttgaaataacaca

SEQ ID NO: 2283908 - DNA, 25 bp, Homo sapien
tcaataaaaatgacaccgactggct

SEQ ID NO: 2283909 - DNA, 25 bp, Homo sapien
ttctgagtggcggttgaaataacac

SEQ ID NO: 2283910 - DNA, 25 bp, Homo sapien
aaatgacaccgactggctgaattat

SEQ ID NO: 2283911 - DNA, 25 bp, Homo sapien
tgttttaacatattcctcccgcaaa

SEQ ID NO: 2283912 - DNA, 25 bp, Homo sapien
taacatattcctcccgcaaaaacgc

SEQ ID NO: 2283913 - DNA, 25 bp, Homo sapien
gtctcatttcgtatcttgagtttgt

SEQ ID NO: 2283914 - DNA, 25 bp, Homo sapien
caaaggcacttcaaaagtctcattt

SEQ ID NO: 2283915 - DNA, 25 bp, Homo sapien
cactaatacggacatagggactgag

SEQ ID NO: 2283916 - DNA, 25 bp, Homo sapien
tcctaaatcttaacgtacacacgct

SEQ ID NO: 2283917 - DNA, 25 bp, Homo sapien
ttagaaggctagtgctggatatctg

SEQ ID NO: 2283918 - DNA, 25 bp, Homo sapien
aactcgtccgatacactgcagcaag

SEQ ID NO: 2283919 - DNA, 25 bp, Homo sapien
ttgtctacaacgttcctatcaaggg

SEQ ID NO: 2283920 - DNA, 25 bp, Homo sapien
tgctaatgagcaaggaaagtggctt

SEQ ID NO: 2283921 - DNA, 25 bp, Homo sapien
tagtgcttgactcacactccaggga

SEQ ID NO: 2283922 - DNA, 25 bp, Homo sapien
gaggctagcgtgtcttcaactcaaa

SEQ ID NO: 2283923 - DNA, 25 bp, Homo sapien
cagtcttcctattgccataatgtga

SEQ ID NO: 2283924 - DNA, 25 bp, Homo sapien
tgggcttgaaccctacattaagtat

SEQ ID NO: 2283925 - DNA, 25 bp, Homo sapien
cataatgtgaaaagctgtggtgacc

SEQ ID NO: 2283926 - DNA, 25 bp, Homo sapien
tactatattcccatagtctgggctt

SEQ ID NO: 2283927 - DNA, 25 bp, Homo sapien
ggcccagtacactgtgtgagattct

SEQ ID NO: 2283928 - DNA, 25 bp, Homo sapien
ataatatggcccagtacactgtgtg

SEQ ID NO: 2283929 - DNA, 25 bp, Homo sapien
tacactgtgtgagattcttttagac

SEQ ID NO: 2283930 - DNA, 25 bp, Homo sapien
attcttttagacataccatggatga

SEQ ID NO: 2283931 - DNA, 25 bp, Homo sapien
attgcatagcatagtttctctctac

SEQ ID NO: 2283932 - DNA, 25 bp, Homo sapien
cttaacggtaataacagcagtaatt

SEQ ID NO: 2283933 - DNA, 25 bp, Homo sapien
aatcacggcgcccagctgaaaagta

SEQ ID NO: 2283934 - DNA, 25 bp, Homo sapien
tctccaaacggttagctgtaaccta

SEQ ID NO: 2283935 - DNA, 25 bp, Homo sapien
ccataacacattaagaccaaaccat

SEQ ID NO: 2283936 - DNA, 25 bp, Homo sapien
ataacacattaagaccaaaccattt

SEQ ID NO: 2283937 - DNA, 25 bp, Homo sapien
caggtgtaaagtttccataacacat

SEQ ID NO: 2283938 - DNA, 25 bp, Homo sapien
aggtgtaaagtttccataacacatt

SEQ ID NO: 2283939 - DNA, 25 bp, Homo sapien
tggctgctcagctaaagggagtgtt

SEQ ID NO: 2283940 - DNA, 25 bp, Homo sapien
aagagtttcgattttagcccctgct

SEQ ID NO: 2283941 - DNA, 25 bp, Homo sapien
aactcttacagcatcctacaggcag

SEQ ID NO: 2283942 - DNA, 25 bp, Homo sapien
cagcttccaggtctcaacttgaaag

SEQ ID NO: 2283943 - DNA, 25 bp, Homo sapien
caaatgctgtcagaacctagcacag

SEQ ID NO: 2283944 - DNA, 25 bp, Homo sapien
tacacacctcataggcagccaaaag

SEQ ID NO: 2283945 - DNA, 25 bp, Homo sapien
tcctcaggaacaaaggatgcctcct

SEQ ID NO: 2283946 - DNA, 25 bp, Homo sapien
tgtggcatcgcctatagttcctgta

SEQ ID NO: 2283947 - DNA, 25 bp, Homo sapien
gcaaagtagggtgtccatagaaaat

SEQ ID NO: 2283948 - DNA, 25 bp, Homo sapien
aaataagatctgagggccgggtaca

SEQ ID NO: 2283949 - DNA, 25 bp, Homo sapien
tcctaaaggttaggacaatgcagaa

SEQ ID NO: 2283950 - DNA, 25 bp, Homo sapien
gttcagaagacagtcaactactggg

SEQ ID NO: 2283951 - DNA, 25 bp, Homo sapien
aaatttgtcattgcattaaggctta

SEQ ID NO: 2283952 - DNA, 25 bp, Homo sapien
tagagggaaggctgaaagtcactgc

SEQ ID NO: 2283953 - DNA, 25 bp, Homo sapien
cctggagggaccttgaaatttgtca

SEQ ID NO: 2283954 - DNA, 25 bp, Homo sapien
gtcactgcctggagggaccttgaaa

SEQ ID NO: 2283955 - DNA, 25 bp, Homo sapien
ggttattgagtaattggcattctga

SEQ ID NO: 2283956 - DNA, 25 bp, Homo sapien
taaatacatggttattgagtaattg

SEQ ID NO: 2283957 - DNA, 25 bp, Homo sapien
gtaacctctgctaaattcctgtttc

SEQ ID NO: 2283958 - DNA, 25 bp, Homo sapien
taacctctgctaaattcctgtttca

SEQ ID NO: 2283959 - DNA, 25 bp, Homo sapien
cttctcgaccctaaaatgtcctttg

SEQ ID NO: 2283960 - DNA, 25 bp, Homo sapien
ctcgaccctaaaatgtcctttgaca

SEQ ID NO: 2283961 - DNA, 25 bp, Homo sapien
tctcgaccctaaaatgtcctttgac

SEQ ID NO: 2283962 - DNA, 25 bp, Homo sapien
ttctcgaccctaaaatgtcctttga

SEQ ID NO: 2283963 - DNA, 25 bp, Homo sapien
aaatcagcaaacaattccatttgca

SEQ ID NO: 2283964 - DNA, 25 bp, Homo sapien
agcaacagcaagctaagccctcacg

SEQ ID NO: 2283965 - DNA, 25 bp, Homo sapien
taacataccatattaataggctctg

SEQ ID NO: 2283966 - DNA, 25 bp, Homo sapien
ctcttccaagattcaggacccttgt

SEQ ID NO: 2283967 - DNA, 25 bp, Homo sapien
catgcatcccagaaatatccacaag

SEQ ID NO: 2283968 - DNA, 25 bp, Homo sapien
tggaagccaatctctcactaatgct

SEQ ID NO: 2283969 - DNA, 25 bp, Homo sapien
aatgctccgtggtccatagagaacc

SEQ ID NO: 2283970 - DNA, 25 bp, Homo sapien
tacctcgtgctaacacattggaagc

SEQ ID NO: 2283971 - DNA, 25 bp, Homo sapien
taccttggtggctagtgttccaacg

SEQ ID NO: 2283972 - DNA, 25 bp, Homo sapien
ttttttagcctattgtgagggagga

SEQ ID NO: 2283973 - DNA, 25 bp, Homo sapien
caagtcatacttattgaaaagacct

SEQ ID NO: 2283974 - DNA, 25 bp, Homo sapien
gatggaagttttatcgtctattgag

SEQ ID NO: 2283975 - DNA, 25 bp, Homo sapien
caagatcatggcctgaaaacatgag

SEQ ID NO: 2283976 - DNA, 25 bp, Homo sapien
catgagcctgagtccaatctcttca

SEQ ID NO: 2283977 - DNA, 25 bp, Homo sapien
gaaaacatgagcctgagtccaatct

SEQ ID NO: 2283978 - DNA, 25 bp, Homo sapien
tcctggagacacctgcaagatcatg

SEQ ID NO: 2283979 - DNA, 25 bp, Homo sapien
ttgtggttcagtgggccgatacccc

SEQ ID NO: 2283980 - DNA, 25 bp, Homo sapien
gagatgggtggtctgttgtggttca

SEQ ID NO: 2283981 - DNA, 25 bp, Homo sapien
caggtctgtggtgaacttgggctca

SEQ ID NO: 2283982 - DNA, 25 bp, Homo sapien
gggttagctgaacattgtggaatga

SEQ ID NO: 2283983 - DNA, 25 bp, Homo sapien
tatcacatcctaccaaaagtcagtg

SEQ ID NO: 2283984 - DNA, 25 bp, Homo sapien
cacaagaggcaattttggccaagat

SEQ ID NO: 2283985 - DNA, 25 bp, Homo sapien
ccaagatgggacaacttgagcttca

SEQ ID NO: 2283986 - DNA, 25 bp, Homo sapien
gcatgccatttgagtagcgtgatga

SEQ ID NO: 2283987 - DNA, 25 bp, Homo sapien
ttcactggcatggagaatcacatcc

SEQ ID NO: 2283988 - DNA, 25 bp, Homo sapien
tcttcactggcatggagaatcacat

SEQ ID NO: 2283989 - DNA, 25 bp, Homo sapien
cttcactggcatggagaatcacatc

SEQ ID NO: 2283990 - DNA, 25 bp, Homo sapien
cactggcatggagaatcacatccac

SEQ ID NO: 2283991 - DNA, 25 bp, Homo sapien
tctggccccagctgattttatatca

SEQ ID NO: 2283992 - DNA, 25 bp, Homo sapien
ctaattggactaaaggtagacatcc

SEQ ID NO: 2283993 - DNA, 25 bp, Homo sapien
cctttgtgcaactgtagtaggcagc

SEQ ID NO: 2283994 - DNA, 25 bp, Homo sapien
tatattacatgatcctgcccactga

SEQ ID NO: 2283995 - DNA, 25 bp, Homo sapien
agccaggagtagtgacttctgagct

SEQ ID NO: 2283996 - DNA, 25 bp, Homo sapien
tatccagagcatctggttctgatgc

SEQ ID NO: 2283997 - DNA, 25 bp, Homo sapien
atccagagcatctggttctgatgct

SEQ ID NO: 2283998 - DNA, 25 bp, Homo sapien
tgtctgacataagcatagctaattc

SEQ ID NO: 2283999 - DNA, 25 bp, Homo sapien
ttttaaatgattgccccagagtttg

SEQ ID NO: 2284000 - DNA, 25 bp, Homo sapien
ggtgaatttagaccactgacattca

SEQ ID NO: 2284001 - DNA, 25 bp, Homo sapien
cattcaaagtgattgttaatacggt

SEQ ID NO: 2284002 - DNA, 25 bp, Homo sapien
tcaatctccaagtatattgggattt

SEQ ID NO: 2284003 - DNA, 25 bp, Homo sapien
gcgatcataacttactataacctcg

SEQ ID NO: 2284004 - DNA, 25 bp, Homo sapien
ggtgcgatcataacttactataacc

SEQ ID NO: 2284005 - DNA, 25 bp, Homo sapien
cgatcataacttactataacctcga

SEQ ID NO: 2284006 - DNA, 25 bp, Homo sapien
tggaaagccttaacagccgtatcat

SEQ ID NO: 2284007 - DNA, 25 bp, Homo sapien
cttaacagccgtatcattctggaac

SEQ ID NO: 2284008 - DNA, 25 bp, Homo sapien
gccttaacagccgtatcattctgga

SEQ ID NO: 2284009 - DNA, 25 bp, Homo sapien
gaaagccttaacagccgtatcattc

SEQ ID NO: 2284010 - DNA, 25 bp, Homo sapien
ctgtggagaagacattggcggtctc

SEQ ID NO: 2284011 - DNA, 25 bp, Homo sapien
agacattggcggtctcagaaagggc

SEQ ID NO: 2284012 - DNA, 25 bp, Homo sapien
ggagaagacattggcggtctcagaa

SEQ ID NO: 2284013 - DNA, 25 bp, Homo sapien
ctcagaaagggcacactccaggtca

SEQ ID NO: 2284014 - DNA, 25 bp, Homo sapien
ctgcgtgcagttttgggcatctcca

SEQ ID NO: 2284015 - DNA, 25 bp, Homo sapien
gctgcgtgcagttttgggcatctcc

SEQ ID NO: 2284016 - DNA, 25 bp, Homo sapien
tgctgcgtgcagttttgggcatctc

SEQ ID NO: 2284017 - DNA, 25 bp, Homo sapien
tcatttggcatgcagcgggtaccct

SEQ ID NO: 2284018 - DNA, 25 bp, Homo sapien
gagcctgggatcatttggcatgcag

SEQ ID NO: 2284019 - DNA, 25 bp, Homo sapien
taaaagcgttgtgaatctgtgagtg

SEQ ID NO: 2284020 - DNA, 25 bp, Homo sapien
gcagcgggtaccctgcagtcctaag

SEQ ID NO: 2284021 - DNA, 25 bp, Homo sapien
catggtggaaaatgacctgccagca

SEQ ID NO: 2284022 - DNA, 25 bp, Homo sapien
tcatctagaaggacgtgacatggtg

SEQ ID NO: 2284023 - DNA, 25 bp, Homo sapien
agcacagcacatcccgtatttagga

SEQ ID NO: 2284024 - DNA, 25 bp, Homo sapien
tatttaggaaacgaacattgtgtgt

SEQ ID NO: 2284025 - DNA, 25 bp, Homo sapien
cattcacttctgtctgcctccagga

SEQ ID NO: 2284026 - DNA, 25 bp, Homo sapien
tcttaaaagtggcaaatgagccata

SEQ ID NO: 2284027 - DNA, 25 bp, Homo sapien
cattattaggaacttcttaaaagtg

SEQ ID NO: 2284028 - DNA, 25 bp, Homo sapien
tgagccatagaaatagagcatttca

SEQ ID NO: 2284029 - DNA, 25 bp, Homo sapien
cttcatgtccactgtactcttcatt

SEQ ID NO: 2284030 - DNA, 25 bp, Homo sapien
gaataatgctatcttctgcttctct

SEQ ID NO: 2284031 - DNA, 25 bp, Homo sapien
taggaataatgctatcttctgcttc

SEQ ID NO: 2284032 - DNA, 25 bp, Homo sapien
ataggaataatgctatcttctgctt

SEQ ID NO: 2284033 - DNA, 25 bp, Homo sapien
ggaataatgctatcttctgcttctc

SEQ ID NO: 2284034 - DNA, 25 bp, Homo sapien
tggaatccggggggagccacacaag

SEQ ID NO: 2284035 - DNA, 25 bp, Homo sapien
cggggggagccacacaagttctcag

SEQ ID NO: 2284036 - DNA, 25 bp, Homo sapien
ctggaatccggggggagccacacaa

SEQ ID NO: 2284037 - DNA, 25 bp, Homo sapien
atccggggggagccacacaagttct

SEQ ID NO: 2284038 - DNA, 25 bp, Homo sapien
ctgcccggacgccagcgggaacttg

SEQ ID NO: 2284039 - DNA, 25 bp, Homo sapien
gggacatagacacgcggtcagcctg

SEQ ID NO: 2284040 - DNA, 25 bp, Homo sapien
ttggcacgagttcagcggagcagcc

SEQ ID NO: 2284041 - DNA, 25 bp, Homo sapien
gtcagcctggagtctccgtgccagc

SEQ ID NO: 2284042 - DNA, 25 bp, Homo sapien
cagcggcagaaaaactcgaggcagc

SEQ ID NO: 2284043 - DNA, 25 bp, Homo sapien
tcccgggagttgcagaagatcagcg

SEQ ID NO: 2284044 - DNA, 25 bp, Homo sapien
gcagagatcttgaggtcgtggccac

SEQ ID NO: 2284045 - DNA, 25 bp, Homo sapien
gaagccacgtgagccaaagaagacg

SEQ ID NO: 2284046 - DNA, 25 bp, Homo sapien
ttagatgacggcttcacgggcttcc

SEQ ID NO: 2284047 - DNA, 25 bp, Homo sapien
tcaaaccttagtgtgccgcagaacc

SEQ ID NO: 2284048 - DNA, 25 bp, Homo sapien
cctaagggagctacaaattctggag

SEQ ID NO: 2284049 - DNA, 25 bp, Homo sapien
gactagtaggacttggagaggaccc

SEQ ID NO: 2284050 - DNA, 25 bp, Homo sapien
ctgccgactcctgtttgtctctctc

SEQ ID NO: 2284051 - DNA, 25 bp, Homo sapien
tgtagggagtggtctacagatagaa

SEQ ID NO: 2284052 - DNA, 25 bp, Homo sapien
ggtctacagatagaaagaatcttcc

SEQ ID NO: 2284053 - DNA, 25 bp, Homo sapien
gagtggtctacagatagaaagaatc

SEQ ID NO: 2284054 - DNA, 25 bp, Homo sapien
ctacagatagaaagaatcttccaag

SEQ ID NO: 2284055 - DNA, 25 bp, Homo sapien
ctcagcctcccagattcgagcgatt

SEQ ID NO: 2284056 - DNA, 25 bp, Homo sapien
gattcccctgcctcagcctcctaag

SEQ ID NO: 2284057 - DNA, 25 bp, Homo sapien
tgcagtagcgagatctcggctaact

SEQ ID NO: 2284058 - DNA, 25 bp, Homo sapien
gcaacctcagcctcccagattcgag

SEQ ID NO: 2284059 - DNA, 25 bp, Homo sapien
gacaggatgaccataggtgggttcc

SEQ ID NO: 2284060 - DNA, 25 bp, Homo sapien
ttcctatcaggttgaagcagtttgg

SEQ ID NO: 2284061 - DNA, 25 bp, Homo sapien
cgagatgattgtctgcttttgacta

SEQ ID NO: 2284062 - DNA, 25 bp, Homo sapien
cataggtgggttccaaagaggaaag

SEQ ID NO: 2284063 - DNA, 25 bp, Homo sapien
tcagtgtccccagggtatcgagggc

SEQ ID NO: 2284064 - DNA, 25 bp, Homo sapien
gcgctgctcagttctttagtctgtt

SEQ ID NO: 2284065 - DNA, 25 bp, Homo sapien
aaaacttcctctggtgtcagtgtcc

SEQ ID NO: 2284066 - DNA, 25 bp, Homo sapien
ctgccagcaaagtttgggccttgga

SEQ ID NO: 2284067 - DNA, 25 bp, Homo sapien
cgcagggtgctcgttgcagttttat

SEQ ID NO: 2284068 - DNA, 25 bp, Homo sapien
ctaaggctattctggaaagcagcaa

SEQ ID NO: 2284069 - DNA, 25 bp, Homo sapien
gagctgtatgttgcatgccccatgg

SEQ ID NO: 2284070 - DNA, 25 bp, Homo sapien
ggcctgtcacttgggtctcacactg

SEQ ID NO: 2284071 - DNA, 25 bp, Homo sapien
gattgcacccgtccgctaggcaggt

SEQ ID NO: 2284072 - DNA, 25 bp, Homo sapien
ggcccagtgaatatgggcgcgtagg

SEQ ID NO: 2284073 - DNA, 25 bp, Homo sapien
ttgccggggattgcacccgtccgct

SEQ ID NO: 2284074 - DNA, 25 bp, Homo sapien
tagttctccccggacgacgtgctct

SEQ ID NO: 2284075 - DNA, 25 bp, Homo sapien
gtctccggaagtgggtctgcggcgc

SEQ ID NO: 2284076 - DNA, 25 bp, Homo sapien
ggtctccggaagtgggtctgcggcg

SEQ ID NO: 2284077 - DNA, 25 bp, Homo sapien
ctccggaagtgggtctgcggcgcgc

SEQ ID NO: 2284078 - DNA, 25 bp, Homo sapien
tctccggaagtgggtctgcggcgcg

SEQ ID NO: 2284079 - DNA, 25 bp, Homo sapien
gagaatcgtgttcctcgggtgccgc

SEQ ID NO: 2284080 - DNA, 25 bp, Homo sapien
tcctcttccacaatcggctgggacg

SEQ ID NO: 2284081 - DNA, 25 bp, Homo sapien
acaatcggctgggacgcttcggtcg

SEQ ID NO: 2284082 - DNA, 25 bp, Homo sapien
cgcttcggtcggagaatcgtgttcc

SEQ ID NO: 2284083 - DNA, 25 bp, Homo sapien
cttgtaaggccaaaggaatagcttc

SEQ ID NO: 2284084 - DNA, 25 bp, Homo sapien
ggttttgtccatcccaactggtcac

SEQ ID NO: 2284085 - DNA, 25 bp, Homo sapien
ggtcacaagcttcacacaacacatc

SEQ ID NO: 2284086 - DNA, 25 bp, Homo sapien
gcttcaatctggatcttggtgggtt

SEQ ID NO: 2284087 - DNA, 25 bp, Homo sapien
tgcataaagtctaccaagattgtcg

SEQ ID NO: 2284088 - DNA, 25 bp, Homo sapien
ttccctaagtgtgcgcccactgatg

SEQ ID NO: 2284089 - DNA, 25 bp, Homo sapien
gaacaaaccctttcagctattaaga

SEQ ID NO: 2284090 - DNA, 25 bp, Homo sapien
taaatctgtacgaagtcatacaacc

SEQ ID NO: 2284091 - DNA, 25 bp, Homo sapien
ctgatggcataaggaggagccaagg

SEQ ID NO: 2284092 - DNA, 25 bp, Homo sapien
gaactagggcaaacaaacgctgcgg

SEQ ID NO: 2284093 - DNA, 25 bp, Homo sapien
tttctgcaagcccaatgatatcacg

SEQ ID NO: 2284094 - DNA, 25 bp, Homo sapien
tctgcactccaatagaggaccccag

SEQ ID NO: 2284095 - DNA, 25 bp, Homo sapien
ttagaatgggcaaagcaaaggcgcc

SEQ ID NO: 2284096 - DNA, 25 bp, Homo sapien
tgtgatggcaacctaggatcccttc

SEQ ID NO: 2284097 - DNA, 25 bp, Homo sapien
cccaaagctcaaatacaacattagc

SEQ ID NO: 2284098 - DNA, 25 bp, Homo sapien
attatgctagcaatactttcctcca

SEQ ID NO: 2284099 - DNA, 25 bp, Homo sapien
cactcattcttcacttgtgatggca

SEQ ID NO: 2284100 - DNA, 25 bp, Homo sapien
gaatcaattccacctacaatcacag

SEQ ID NO: 2284101 - DNA, 25 bp, Homo sapien
tgaatcaattccacctacaatcaca

SEQ ID NO: 2284102 - DNA, 25 bp, Homo sapien
ttgcaagggccaaagattgagacat

SEQ ID NO: 2284103 - DNA, 25 bp, Homo sapien
attatatgtggtttttttgcaaggg

SEQ ID NO: 2284104 - DNA, 25 bp, Homo sapien
tttttgcaagggccaaagattgaga

SEQ ID NO: 2284105 - DNA, 25 bp, Homo sapien
tattatatgtggtttttttgcaagg

SEQ ID NO: 2284106 - DNA, 25 bp, Homo sapien
tggtcaatcagtcgaccaggagttg

SEQ ID NO: 2284107 - DNA, 25 bp, Homo sapien
tattcggtcggcttcatccatgacc

SEQ ID NO: 2284108 - DNA, 25 bp, Homo sapien
tctgtctcaaaatccatattcagta

SEQ ID NO: 2284109 - DNA, 25 bp, Homo sapien
ttccaagtggtcaatcagtcgacca

SEQ ID NO: 2284110 - DNA, 25 bp, Homo sapien
gaatgttttccgatctcgaggaatc

SEQ ID NO: 2284111 - DNA, 25 bp, Homo sapien
cgatctcgaggaatcactttgagga

SEQ ID NO: 2284112 - DNA, 25 bp, Homo sapien
tgttttccgatctcgaggaatcact

SEQ ID NO: 2284113 - DNA, 25 bp, Homo sapien
aagaggaatgttttccgatctcgag

SEQ ID NO: 2284114 - DNA, 25 bp, Homo sapien
tctggtatttagaggaaacggcaca

SEQ ID NO: 2284115 - DNA, 25 bp, Homo sapien
gaggaaacggcacatttcacaggat

SEQ ID NO: 2284116 - DNA, 25 bp, Homo sapien
ggaaacggcacatttcacaggattc

SEQ ID NO: 2284117 - DNA, 25 bp, Homo sapien
ttttcaactgtctggtatttagagg

SEQ ID NO: 2284118 - DNA, 25 bp, Homo sapien
ggagaagtccttatatcaaagcaca

SEQ ID NO: 2284119 - DNA, 25 bp, Homo sapien
gattggagacctggcatatacataa

SEQ ID NO: 2284120 - DNA, 25 bp, Homo sapien
gcactctaaagcaaacagacaggat

SEQ ID NO: 2284121 - DNA, 25 bp, Homo sapien
ggcatgtctggcttatcggtgataa

SEQ ID NO: 2284122 - DNA, 25 bp, Homo sapien
agtttccagccaattcatttagaat

SEQ ID NO: 2284123 - DNA, 25 bp, Homo sapien
gtttccagccaattcatttagaata

SEQ ID NO: 2284124 - DNA, 25 bp, Homo sapien
gagtttccagccaattcatttagaa

SEQ ID NO: 2284125 - DNA, 25 bp, Homo sapien
tgactcatttgtccatggaggggga

SEQ ID NO: 2284126 - DNA, 25 bp, Homo sapien
ttcgcagtagcaaagctgttctctg

SEQ ID NO: 2284127 - DNA, 25 bp, Homo sapien
gccaagatttcgcagtagcaaagct

SEQ ID NO: 2284128 - DNA, 25 bp, Homo sapien
tgaagccaagatttcgcagtagcaa

SEQ ID NO: 2284129 - DNA, 25 bp, Homo sapien
gaaatattctaatgggagcctctcg

SEQ ID NO: 2284130 - DNA, 25 bp, Homo sapien
taggaggtttatctcgctcacgcca

SEQ ID NO: 2284131 - DNA, 25 bp, Homo sapien
gagcctctcgctaccctgaaaggag

SEQ ID NO: 2284132 - DNA, 25 bp, Homo sapien
gagtcattattaccactagggctga

SEQ ID NO: 2284133 - DNA, 25 bp, Homo sapien
tacatgaggtatgtccaaacctcgg

SEQ ID NO: 2284134 - DNA, 25 bp, Homo sapien
caaacctcggctggcaacgtcagtt

SEQ ID NO: 2284135 - DNA, 25 bp, Homo sapien
aacttattaagggatcctaggcgct

SEQ ID NO: 2284136 - DNA, 25 bp, Homo sapien
ggaatgtcaaagttgacaaccacat

SEQ ID NO: 2284137 - DNA, 25 bp, Homo sapien
caaaagtaatagcctttccggagcg

SEQ ID NO: 2284138 - DNA, 25 bp, Homo sapien
agtaatagcctttccggagcgccca

SEQ ID NO: 2284139 - DNA, 25 bp, Homo sapien
ttcgacctactcgatggatgtaatc

SEQ ID NO: 2284140 - DNA, 25 bp, Homo sapien
cagctctagctgttcgacctactcg

SEQ ID NO: 2284141 - DNA, 25 bp, Homo sapien
gaaggtgcacttagccaagactgca

SEQ ID NO: 2284142 - DNA, 25 bp, Homo sapien
gatacaacgcaataggaaccatagg

SEQ ID NO: 2284143 - DNA, 25 bp, Homo sapien
gaaaatcactcaagggaggccaggc

SEQ ID NO: 2284144 - DNA, 25 bp, Homo sapien
taaatggtagtgtcaggttctcagc

SEQ ID NO: 2284145 - DNA, 25 bp, Homo sapien
caaacctttgggcttcagcgacgcg

SEQ ID NO: 2284146 - DNA, 25 bp, Homo sapien
caattaagtgttctatgcgctggaa

SEQ ID NO: 2284147 - DNA, 25 bp, Homo sapien
gcgctggaagagttccacatcatac

SEQ ID NO: 2284148 - DNA, 25 bp, Homo sapien
gcgacgcgttctgtcagcatcataa

SEQ ID NO: 2284149 - DNA, 25 bp, Homo sapien
tcagaagttcgcctgaccaaaatgg

SEQ ID NO: 2284150 - DNA, 25 bp, Homo sapien
aattttccacttgcggcaatccttt

SEQ ID NO: 2284151 - DNA, 25 bp, Homo sapien
ggcaatccttttcgcactcaaaaaa

SEQ ID NO: 2284152 - DNA, 25 bp, Homo sapien
aggtcagaagttcgcctgaccaaaa

SEQ ID NO: 2284153 - DNA, 25 bp, Homo sapien
gttcctgacaccaatagcaccctct

SEQ ID NO: 2284154 - DNA, 25 bp, Homo sapien
catcctctcgcgagcgtttcttctt

SEQ ID NO: 2284155 - DNA, 25 bp, Homo sapien
atctccagcatcctctcgcgagcgt

SEQ ID NO: 2284156 - DNA, 25 bp, Homo sapien
tgttcctgacaccaatagcaccctc

SEQ ID NO: 2284157 - DNA, 25 bp, Homo sapien
tctgttggagcaggtttcattctcc

SEQ ID NO: 2284158 - DNA, 25 bp, Homo sapien
aattacaggtcatgggcatcatcaa

SEQ ID NO: 2284159 - DNA, 25 bp, Homo sapien
caaggaatcaaagtcgaagaacagt

SEQ ID NO: 2284160 - DNA, 25 bp, Homo sapien
tgcagatgtccaagcttctttacaa

SEQ ID NO: 2284161 - DNA, 25 bp, Homo sapien
taatatttaaatttattgtttcaca

SEQ ID NO: 2284162 - DNA, 25 bp, Homo sapien
aaatttattgtttcacattagtttg

SEQ ID NO: 2284163 - DNA, 25 bp, Homo sapien
atttaaatttattgtttcacattag

SEQ ID NO: 2284164 - DNA, 25 bp, Homo sapien
atctacataagaggcagagtggccg

SEQ ID NO: 2284165 - DNA, 25 bp, Homo sapien
aagaatctacataagaggcagagtg

SEQ ID NO: 2284166 - DNA, 25 bp, Homo sapien
ttattcttgtcacctggggaaaaga

SEQ ID NO: 2284167 - DNA, 25 bp, Homo sapien
tcacctggggaaaagaatctacata

SEQ ID NO: 2284168 - DNA, 25 bp, Homo sapien
ccaagaagggaatagcagaggggtc

SEQ ID NO: 2284169 - DNA, 25 bp, Homo sapien
caggaatgcagaactaaggagttgt

SEQ ID NO: 2284170 - DNA, 25 bp, Homo sapien
ccggccggcgaagctcacagtttct

SEQ ID NO: 2284171 - DNA, 25 bp, Homo sapien
aatgcagaactaaggagttgtacca

SEQ ID NO: 2284172 - DNA, 25 bp, Homo sapien
cagtgacaggagacatcctttgtgt

SEQ ID NO: 2284173 - DNA, 25 bp, Homo sapien
ggatggctacgagcaaacaaaagct

SEQ ID NO: 2284174 - DNA, 25 bp, Homo sapien
cggcctctttgacggcactggcaga

SEQ ID NO: 2284175 - DNA, 25 bp, Homo sapien
cactggcagatgattgaagggtgac

SEQ ID NO: 2284176 - DNA, 25 bp, Homo sapien
gagacttgtccttgtagggccctct

SEQ ID NO: 2284177 - DNA, 25 bp, Homo sapien
ggctgcccttggtgatcacacataa

SEQ ID NO: 2284178 - DNA, 25 bp, Homo sapien
ccctctcgtccccttcaaggctgcc

SEQ ID NO: 2284179 - DNA, 25 bp, Homo sapien
tcacacataattctgagttcaccca

SEQ ID NO: 2284180 - DNA, 25 bp, Homo sapien
gaaacaacttctttaggccatagag

SEQ ID NO: 2284181 - DNA, 25 bp, Homo sapien
ccaacagaccgccttgtaatatgtt

SEQ ID NO: 2284182 - DNA, 25 bp, Homo sapien
ttgtaatatgttgtccctggatgcc

SEQ ID NO: 2284183 - DNA, 25 bp, Homo sapien
ggccactggccaaagagtgactcag

SEQ ID NO: 2284184 - DNA, 25 bp, Homo sapien
accacttctgccgtcacagcaaagt

SEQ ID NO: 2284185 - DNA, 25 bp, Homo sapien
tacaataccacttctgccgtcacag

SEQ ID NO: 2284186 - DNA, 25 bp, Homo sapien
tctgccgtcacagcaaagtctacag

SEQ ID NO: 2284187 - DNA, 25 bp, Homo sapien
cacagcaaagtctacagtcagaaga

SEQ ID NO: 2284188 - DNA, 25 bp, Homo sapien
ccaagatgaaaagacgagatatggg

SEQ ID NO: 2284189 - DNA, 25 bp, Homo sapien
tcgtgcatgaagacagtagctggtg

SEQ ID NO: 2284190 - DNA, 25 bp, Homo sapien
tagcacgccaagtacaattgctctt

SEQ ID NO: 2284191 - DNA, 25 bp, Homo sapien
tcgggcactgtggttcgtgcatgaa

SEQ ID NO: 2284192 - DNA, 25 bp, Homo sapien
ggatccgctatggtgcctccttcca

SEQ ID NO: 2284193 - DNA, 25 bp, Homo sapien
ttgcactgacatggctaaatgcacc

SEQ ID NO: 2284194 - DNA, 25 bp, Homo sapien
ctaaatgcaccaataaagttggaat

SEQ ID NO: 2284195 - DNA, 25 bp, Homo sapien
aagttggaattgtcggtaaatacag

SEQ ID NO: 2284196 - DNA, 25 bp, Homo sapien
tttgaagattcaccaggcatgatgg

SEQ ID NO: 2284197 - DNA, 25 bp, Homo sapien
aatctcaggttactttgtttacaag

SEQ ID NO: 2284198 - DNA, 25 bp, Homo sapien
tagactagcccctccaattagaaaa

SEQ ID NO: 2284199 - DNA, 25 bp, Homo sapien
aatataaagacacaaccaagttgaa

SEQ ID NO: 2284200 - DNA, 25 bp, Homo sapien
ggcagccagtgaccgggaaggagat

SEQ ID NO: 2284201 - DNA, 25 bp, Homo sapien
ccagtgaccgggaaggagatgttca

SEQ ID NO: 2284202 - DNA, 25 bp, Homo sapien
ttctggcagccagtgaccgggaagg

SEQ ID NO: 2284203 - DNA, 25 bp, Homo sapien
gtacgaagtttgcattcatcatcca

SEQ ID NO: 2284204 - DNA, 25 bp, Homo sapien
ctgattcggaccacataacctttcc

SEQ ID NO: 2284205 - DNA, 25 bp, Homo sapien
gaccacataacctttccattcttca

SEQ ID NO: 2284206 - DNA, 25 bp, Homo sapien
attcggaccacataacctttccatt

SEQ ID NO: 2284207 - DNA, 25 bp, Homo sapien
accacataacctttccattcttcac

SEQ ID NO: 2284208 - DNA, 25 bp, Homo sapien
ctatgcaaccacgaactgattttct

SEQ ID NO: 2284209 - DNA, 25 bp, Homo sapien
cactatgcaaccacgaactgatttt

SEQ ID NO: 2284210 - DNA, 25 bp, Homo sapien
cttcatgggaaaaccttgtttgttg

SEQ ID NO: 2284211 - DNA, 25 bp, Homo sapien
tccactatgcaaccacgaactgatt

SEQ ID NO: 2284212 - DNA, 25 bp, Homo sapien
tcattcccttgcctaaaagtttagc

SEQ ID NO: 2284213 - DNA, 25 bp, Homo sapien
ttcccttgcctaaaagtttagcata

SEQ ID NO: 2284214 - DNA, 25 bp, Homo sapien
cagagcaatatgctgccctttgtgc

SEQ ID NO: 2284215 - DNA, 25 bp, Homo sapien
gagcaatatgctgccctttgtgctg

SEQ ID NO: 2284216 - DNA, 25 bp, Homo sapien
tccatttcccttgcagcgattcctg

SEQ ID NO: 2284217 - DNA, 25 bp, Homo sapien
cgattcctggggcacgtctattatc

SEQ ID NO: 2284218 - DNA, 25 bp, Homo sapien
ccatttcccttgcagcgattcctgg

SEQ ID NO: 2284219 - DNA, 25 bp, Homo sapien
cacgtctattatcagcaattgcagg

SEQ ID NO: 2284220 - DNA, 25 bp, Homo sapien
caagctgattttccgctgtgagtac

SEQ ID NO: 2284221 - DNA, 25 bp, Homo sapien
gatctctcactggtacgagtgacca

SEQ ID NO: 2284222 - DNA, 25 bp, Homo sapien
aatgaagagtgattggaatggcccg

SEQ ID NO: 2284223 - DNA, 25 bp, Homo sapien
gacagcgttgctttgagatgcagga

SEQ ID NO: 2284224 - DNA, 25 bp, Homo sapien
gggcggcatacctcgcatggtctgc

SEQ ID NO: 2284225 - DNA, 25 bp, Homo sapien
tggggcggcatacctcgcatggtct

SEQ ID NO: 2284226 - DNA, 25 bp, Homo sapien
ggcggcatacctcgcatggtctgcc

SEQ ID NO: 2284227 - DNA, 25 bp, Homo sapien
ggcatacctcgcatggtctgccaga

SEQ ID NO: 2284228 - DNA, 25 bp, Homo sapien
ccacgttcttctcggcctgtttcca

SEQ ID NO: 2284229 - DNA, 25 bp, Homo sapien
gagtccgtgggtcttgaggacttct

SEQ ID NO: 2284230 - DNA, 25 bp, Homo sapien
gtccgtgggtcttgaggacttctgt

SEQ ID NO: 2284231 - DNA, 25 bp, Homo sapien
ccatagcctcatgaactgtttcttc

SEQ ID NO: 2284232 - DNA, 25 bp, Homo sapien
tttgaggaattaacagtctttattg

SEQ ID NO: 2284233 - DNA, 25 bp, Homo sapien
ttgaggaattaacagtctttattgg

SEQ ID NO: 2284234 - DNA, 25 bp, Homo sapien
gaggaattaacagtctttattgggc

SEQ ID NO: 2284235 - DNA, 25 bp, Homo sapien
tgaggaattaacagtctttattggg

SEQ ID NO: 2284236 - DNA, 25 bp, Homo sapien
aagtcggagccgtcttctttcagag

SEQ ID NO: 2284237 - DNA, 25 bp, Homo sapien
gctacatagacagaccaattcatca

SEQ ID NO: 2284238 - DNA, 25 bp, Homo sapien
tagagatgaaatcgtaggaagtcgg

SEQ ID NO: 2284239 - DNA, 25 bp, Homo sapien
cttgcccgctacatagacagaccaa

SEQ ID NO: 2284240 - DNA, 25 bp, Homo sapien
gagtgactgctttacagacttaagt

SEQ ID NO: 2284241 - DNA, 25 bp, Homo sapien
ggcttcttcaactcactacaggttc

SEQ ID NO: 2284242 - DNA, 25 bp, Homo sapien
gatgttttaagggcttcttcaactc

SEQ ID NO: 2284243 - DNA, 25 bp, Homo sapien
taagcccaaagataagacactagaa

SEQ ID NO: 2284244 - DNA, 25 bp, Homo sapien
cacgcctggctatttttttccattt

SEQ ID NO: 2284245 - DNA, 25 bp, Homo sapien
gcaagaaggaaggtagcttcgtgaa

SEQ ID NO: 2284246 - DNA, 25 bp, Homo sapien
gcctctccccttggtcaggcctcat

SEQ ID NO: 2284247 - DNA, 25 bp, Homo sapien
tcggcacataaagacaggcggtgga

SEQ ID NO: 2284248 - DNA, 25 bp, Homo sapien
gaaggtagcttcgtgaatcggcaca

SEQ ID NO: 2284249 - DNA, 25 bp, Homo sapien
cagtctgttcttctggttcttgctg

SEQ ID NO: 2284250 - DNA, 25 bp, Homo sapien
tgctgcttaaaagcctttgcctgac

SEQ ID NO: 2284251 - DNA, 25 bp, Homo sapien
atcagtctgttcttctggttcttgc

SEQ ID NO: 2284252 - DNA, 25 bp, Homo sapien
ggttcttgctgcttaaaagcctttg

SEQ ID NO: 2284253 - DNA, 25 bp, Homo sapien
caccaggtccgtagttagctcagca

SEQ ID NO: 2284254 - DNA, 25 bp, Homo sapien
gccaaagccacgtgaaagccaagga

SEQ ID NO: 2284255 - DNA, 25 bp, Homo sapien
gcagttgttataaaggcggccctcg

SEQ ID NO: 2284256 - DNA, 25 bp, Homo sapien
actgccgtatgggaagccaggcttc

SEQ ID NO: 2284257 - DNA, 25 bp, Homo sapien
cttcgggtcctctgagatctttctc

SEQ ID NO: 2284258 - DNA, 25 bp, Homo sapien
tttctccctctattcttttcctgca

SEQ ID NO: 2284259 - DNA, 25 bp, Homo sapien
ttcgggtcctctgagatctttctcc

SEQ ID NO: 2284260 - DNA, 25 bp, Homo sapien
ccctctattcttttcctgcagagtg

SEQ ID NO: 2284261 - DNA, 25 bp, Homo sapien
acagcagtggctgattcggccgaac

SEQ ID NO: 2284262 - DNA, 25 bp, Homo sapien
tcggccgaacccttcaacaggtgtg

SEQ ID NO: 2284263 - DNA, 25 bp, Homo sapien
ggtccctagcccattgtgtctgaag

SEQ ID NO: 2284264 - DNA, 25 bp, Homo sapien
ccttcaggaatgaacccacagcagt

SEQ ID NO: 2284265 - DNA, 25 bp, Homo sapien
caggctgagttcttctaagggagaa

SEQ ID NO: 2284266 - DNA, 25 bp, Homo sapien
gactgagtgctgaatatttacccaa

SEQ ID NO: 2284267 - DNA, 25 bp, Homo sapien
gctgagctgcctatcagacaacaag

SEQ ID NO: 2284268 - DNA, 25 bp, Homo sapien
caaagcgtctacagggaaatctcca

SEQ ID NO: 2284269 - DNA, 25 bp, Homo sapien
caaggacagaaccatgtggagcacc

SEQ ID NO: 2284270 - DNA, 25 bp, Homo sapien
tgggctgtaagcacagactggcagt

SEQ ID NO: 2284271 - DNA, 25 bp, Homo sapien
gactggcagtcatcacctagagtgg

SEQ ID NO: 2284272 - DNA, 25 bp, Homo sapien
gacactgggttgtgctgtctctgca

SEQ ID NO: 2284273 - DNA, 25 bp, Homo sapien
tagacatggccttgactgacacaca

SEQ ID NO: 2284274 - DNA, 25 bp, Homo sapien
tctgagattaggagcgcctggccat

SEQ ID NO: 2284275 - DNA, 25 bp, Homo sapien
gtcaaaatgtgtcttcgcgccagcc

SEQ ID NO: 2284276 - DNA, 25 bp, Homo sapien
gactttgagtatgaggacgagaccc

SEQ ID NO: 2284277 - DNA, 25 bp, Homo sapien
caatgagattgttcacgtggcaata

SEQ ID NO: 2284278 - DNA, 25 bp, Homo sapien
gactagaagagaactatgttgcagc

SEQ ID NO: 2284279 - DNA, 25 bp, Homo sapien
gagaactatgttgcagcaggaaaga

SEQ ID NO: 2284280 - DNA, 25 bp, Homo sapien
ccagccctaaagaaggacagagatg

SEQ ID NO: 2284281 - DNA, 25 bp, Homo sapien
tacaaataacctgccagggttcctg

SEQ ID NO: 2284282 - DNA, 25 bp, Homo sapien
taatcataacgttgcagcctctacc

SEQ ID NO: 2284283 - DNA, 25 bp, Homo sapien
acctttggccctgatacagttatca

SEQ ID NO: 2284284 - DNA, 25 bp, Homo sapien
cacagggctggacgtgttggctcat

SEQ ID NO: 2284285 - DNA, 25 bp, Homo sapien
tgtagtacttggatttcaggccatt

SEQ ID NO: 2284286 - DNA, 25 bp, Homo sapien
aaccatcagggactgttgtagccat

SEQ ID NO: 2284287 - DNA, 25 bp, Homo sapien
tacttggatttcaggccattgcggc

SEQ ID NO: 2284288 - DNA, 25 bp, Homo sapien
aggccattgcggcaaccatcaggga

SEQ ID NO: 2284289 - DNA, 25 bp, Homo sapien
taacatcctggactaggctgaagcc

SEQ ID NO: 2284290 - DNA, 25 bp, Homo sapien
tcattgcgacgaggagcggaaagct

SEQ ID NO: 2284291 - DNA, 25 bp, Homo sapien
catcgtgaggtagatgtgggcccca

SEQ ID NO: 2284292 - DNA, 25 bp, Homo sapien
ttgtgagcagccaaaactcgggact

SEQ ID NO: 2284293 - DNA, 25 bp, Homo sapien
gcactgaaatctacaaaggctccac

SEQ ID NO: 2284294 - DNA, 25 bp, Homo sapien
gatgcacagaaacctctgaggtgtt

SEQ ID NO: 2284295 - DNA, 25 bp, Homo sapien
tcctgctggtttgtgataaaagggc

SEQ ID NO: 2284296 - DNA, 25 bp, Homo sapien
tcactgcaggaaatcatggcttggt

SEQ ID NO: 2284297 - DNA, 25 bp, Homo sapien
tatcacagtgtgacatcttgcccat

SEQ ID NO: 2284298 - DNA, 25 bp, Homo sapien
taggaccaggcacaaagcaaacaca

SEQ ID NO: 2284299 - DNA, 25 bp, Homo sapien
tgtctctccagcagaccttaagttt

SEQ ID NO: 2284300 - DNA, 25 bp, Homo sapien
tcttggagggacagagactaggtcc

SEQ ID NO: 2284301 - DNA, 25 bp, Homo sapien
tggaatagggggcatagagcgtgtc

SEQ ID NO: 2284302 - DNA, 25 bp, Homo sapien
tgaaaatgtgtggaatagggggcat

SEQ ID NO: 2284303 - DNA, 25 bp, Homo sapien
atgtgtggaatagggggcatagagc

SEQ ID NO: 2284304 - DNA, 25 bp, Homo sapien
aatagggggcatagagcgtgtcccc

SEQ ID NO: 2284305 - DNA, 25 bp, Homo sapien
ggtaacatcgtctgtttccaaagga

SEQ ID NO: 2284306 - DNA, 25 bp, Homo sapien
catgagaaaggtaacatcgtctgtt

SEQ ID NO: 2284307 - DNA, 25 bp, Homo sapien
gtgttcctgaggtgctaatgccttt

SEQ ID NO: 2284308 - DNA, 25 bp, Homo sapien
gttcctgaggtgctaatgcctttga

SEQ ID NO: 2284309 - DNA, 25 bp, Homo sapien
tatgccaagcactcattcttaccca

SEQ ID NO: 2284310 - DNA, 25 bp, Homo sapien
agtcatatcgtgaaacccactccag

SEQ ID NO: 2284311 - DNA, 25 bp, Homo sapien
gccatttcaacaggtctccagtctg

SEQ ID NO: 2284312 - DNA, 25 bp, Homo sapien
gaggccgcttagaggaaagaagacc

SEQ ID NO: 2284313 - DNA, 25 bp, Homo sapien
tctttgtaagggctcggccaagcgt

SEQ ID NO: 2284314 - DNA, 25 bp, Homo sapien
tttgtaagggctcggccaagcgtgg

SEQ ID NO: 2284315 - DNA, 25 bp, Homo sapien
ctttgtaagggctcggccaagcgtg

SEQ ID NO: 2284316 - DNA, 25 bp, Homo sapien
tgtaagggctcggccaagcgtgggc

SEQ ID NO: 2284317 - DNA, 25 bp, Homo sapien
tacagcgcctctaagaactggagtc

SEQ ID NO: 2284318 - DNA, 25 bp, Homo sapien
cagaatgcagccgtaaatgcggtaa

SEQ ID NO: 2284319 - DNA, 25 bp, Homo sapien
caaccgggcttgtgctagtgaggtc

SEQ ID NO: 2284320 - DNA, 25 bp, Homo sapien
tgagctcagatgaccagacctttag

SEQ ID NO: 2284321 - DNA, 25 bp, Homo sapien
gaagatgagttaacagccgcagcag

SEQ ID NO: 2284322 - DNA, 25 bp, Homo sapien
tatcagtgtaaagacccatgcctgg

SEQ ID NO: 2284323 - DNA, 25 bp, Homo sapien
gagtaaaacctcaggccccgtgatg

SEQ ID NO: 2284324 - DNA, 25 bp, Homo sapien
cccgtttaggtcaaaggagatgcca

SEQ ID NO: 2284325 - DNA, 25 bp, Homo sapien
acacaggacaccgactttaagtggc

SEQ ID NO: 2284326 - DNA, 25 bp, Homo sapien
caggacaccgactttaagtggctgc

SEQ ID NO: 2284327 - DNA, 25 bp, Homo sapien
ggacaccgactttaagtggctgcct

SEQ ID NO: 2284328 - DNA, 25 bp, Homo sapien
cccacacaggacaccgactttaagt

SEQ ID NO: 2284329 - DNA, 25 bp, Homo sapien
ttgcagaaatcagggtcaggcgcac

SEQ ID NO: 2284330 - DNA, 25 bp, Homo sapien
ttcccatggcttacacgcagaaggg

SEQ ID NO: 2284331 - DNA, 25 bp, Homo sapien
tcagcagtcaacacacgagaaggat

SEQ ID NO: 2284332 - DNA, 25 bp, Homo sapien
taaaatgggacgcatttgcctcgcg

SEQ ID NO: 2284333 - DNA, 25 bp, Homo sapien
taaacgctaagagttacaagctgcc

SEQ ID NO: 2284334 - DNA, 25 bp, Homo sapien
taacaatctaagaactctccatggc

SEQ ID NO: 2284335 - DNA, 25 bp, Homo sapien
tcagccagtgaaagtctaaacgcta

SEQ ID NO: 2284336 - DNA, 25 bp, Homo sapien
aagcttatcgaaggccttgctccag

SEQ ID NO: 2284337 - DNA, 25 bp, Homo sapien
atcccaagagtgaagagcatttcca

SEQ ID NO: 2284338 - DNA, 25 bp, Homo sapien
ccaagagtgaagagcatttccattt

SEQ ID NO: 2284339 - DNA, 25 bp, Homo sapien
cccaagagtgaagagcatttccatt

SEQ ID NO: 2284340 - DNA, 25 bp, Homo sapien
gattttagatcatcaccgtgtccgc

SEQ ID NO: 2284341 - DNA, 25 bp, Homo sapien
catgtatctggagtgggagaacaca

SEQ ID NO: 2284342 - DNA, 25 bp, Homo sapien
catattaacatagcatgagctctgt

SEQ ID NO: 2284343 - DNA, 25 bp, Homo sapien
tgaacaagggagtagtcctgcaaca

SEQ ID NO: 2284344 - DNA, 25 bp, Homo sapien
catctctgagcatgccgggttctgt

SEQ ID NO: 2284345 - DNA, 25 bp, Homo sapien
gttctgtgcatttagcaggctgctc

SEQ ID NO: 2284346 - DNA, 25 bp, Homo sapien
ccgtctttcatgaagccagggcgtt

SEQ ID NO: 2284347 - DNA, 25 bp, Homo sapien
gaggggacggccaacataatcaaaa

SEQ ID NO: 2284348 - DNA, 25 bp, Homo sapien
tttagagcgacagactaacagccgc

SEQ ID NO: 2284349 - DNA, 25 bp, Homo sapien
tagtgctcatgcttgagtacactcg

SEQ ID NO: 2284350 - DNA, 25 bp, Homo sapien
cagtgtgtttgtacgcatgcaggag

SEQ ID NO: 2284351 - DNA, 25 bp, Homo sapien
agtacactcgcccaactgctaagat

SEQ ID NO: 2284352 - DNA, 25 bp, Homo sapien
ctggcatgcttccggagtcttgtgt

SEQ ID NO: 2284353 - DNA, 25 bp, Homo sapien
tgtaggctgtccacacttgcgcagt

SEQ ID NO: 2284354 - DNA, 25 bp, Homo sapien
taggctgtccacacttgcgcagtgg

SEQ ID NO: 2284355 - DNA, 25 bp, Homo sapien
aggctgtccacacttgcgcagtggc

SEQ ID NO: 2284356 - DNA, 25 bp, Homo sapien
gacttgagagatcacccactggaca

SEQ ID NO: 2284357 - DNA, 25 bp, Homo sapien
tgagagatcacccactggacagtct

SEQ ID NO: 2284358 - DNA, 25 bp, Homo sapien
cttgagagatcacccactggacagt

SEQ ID NO: 2284359 - DNA, 25 bp, Homo sapien
gcgacttgagagatcacccactgga

SEQ ID NO: 2284360 - DNA, 25 bp, Homo sapien
ggctcgggcctttaagagatcataa

SEQ ID NO: 2284361 - DNA, 25 bp, Homo sapien
atgtcttaatggctcgggcctttaa

SEQ ID NO: 2284362 - DNA, 25 bp, Homo sapien
gcctttaagagatcataactgccac

SEQ ID NO: 2284363 - DNA, 25 bp, Homo sapien
taagagatcataactgccactcttc

SEQ ID NO: 2284364 - DNA, 25 bp, Homo sapien
attcgagatctaccttttcctggaa

SEQ ID NO: 2284365 - DNA, 25 bp, Homo sapien
tatcggccaacttcgtgccttcttc

SEQ ID NO: 2284366 - DNA, 25 bp, Homo sapien
tcttcttccacaattaattcgagat

SEQ ID NO: 2284367 - DNA, 25 bp, Homo sapien
ctattctatatcggccaacttcgtg

SEQ ID NO: 2284368 - DNA, 25 bp, Homo sapien
cggagagtaagcactgtcaggcact

SEQ ID NO: 2284369 - DNA, 25 bp, Homo sapien
tcctcaggatacacagtacagcctc

SEQ ID NO: 2284370 - DNA, 25 bp, Homo sapien
tgtctcctgcggtcacttctacact

SEQ ID NO: 2284371 - DNA, 25 bp, Homo sapien
tctcagctggcctgacggagagtaa

SEQ ID NO: 2284372 - DNA, 25 bp, Homo sapien
gacctactgcccttattgataatga

SEQ ID NO: 2284373 - DNA, 25 bp, Homo sapien
ggtggcatccacatgaagaccctaa

SEQ ID NO: 2284374 - DNA, 25 bp, Homo sapien
caacccaggacctaggtaaatgaca

SEQ ID NO: 2284375 - DNA, 25 bp, Homo sapien
gcaatattatcagcacaacccagga

SEQ ID NO: 2284376 - DNA, 25 bp, Homo sapien
tgacagctacttgggcagcagacat

SEQ ID NO: 2284377 - DNA, 25 bp, Homo sapien
cctgtgacagctacttgggcagcag

SEQ ID NO: 2284378 - DNA, 25 bp, Homo sapien
tgtgacagctacttgggcagcagac

SEQ ID NO: 2284379 - DNA, 25 bp, Homo sapien
ctccctgtgacagctacttgggcag

SEQ ID NO: 2284380 - DNA, 25 bp, Homo sapien
gaattggtgcctcttattcacagaa

SEQ ID NO: 2284381 - DNA, 25 bp, Homo sapien
aattccctttcttagcaatgctgga

SEQ ID NO: 2284382 - DNA, 25 bp, Homo sapien
cattcgtgtaactgcaaaattccct

SEQ ID NO: 2284383 - DNA, 25 bp, Homo sapien
ttcttcattcgtgtaactgcaaaat

SEQ ID NO: 2284384 - DNA, 25 bp, Homo sapien
ccgcaggtaaatgtactcgcctata

SEQ ID NO: 2284385 - DNA, 25 bp, Homo sapien
aaatgtactcgcctatattcaccca

SEQ ID NO: 2284386 - DNA, 25 bp, Homo sapien
tcagccgcaggtaaatgtactcgcc

SEQ ID NO: 2284387 - DNA, 25 bp, Homo sapien
cccattcagccgcaggtaaatgtac

SEQ ID NO: 2284388 - DNA, 25 bp, Homo sapien
aacttcaatggtcccaggtggtgtc

SEQ ID NO: 2284389 - DNA, 25 bp, Homo sapien
cttttttgtcaccctcaaattacag

SEQ ID NO: 2284390 - DNA, 25 bp, Homo sapien
caacttcaatggtcccaggtggtgt

SEQ ID NO: 2284391 - DNA, 25 bp, Homo sapien
cccaggtggtgtcatgtttgtttgt

SEQ ID NO: 2284392 - DNA, 25 bp, Homo sapien
ggcagaacccaacaaagatgattaa

SEQ ID NO: 2284393 - DNA, 25 bp, Homo sapien
tgtgtggtcagcaagaacaaccgtg

SEQ ID NO: 2284394 - DNA, 25 bp, Homo sapien
cacaatcggtcagtctctagcaagg

SEQ ID NO: 2284395 - DNA, 25 bp, Homo sapien
tctagcaaggatacccactgatcca

SEQ ID NO: 2284396 - DNA, 25 bp, Homo sapien
cacacataatgttcaccaggctcaa

SEQ ID NO: 2284397 - DNA, 25 bp, Homo sapien
tccattgcttgttggtgaggcataa

SEQ ID NO: 2284398 - DNA, 25 bp, Homo sapien
aatctgtggctagttgcgcattcaa

SEQ ID NO: 2284399 - DNA, 25 bp, Homo sapien
tattttgattcaagccacctgactc

SEQ ID NO: 2284400 - DNA, 25 bp, Homo sapien
tcacactggttaaagaaaggcatcc

SEQ ID NO: 2284401 - DNA, 25 bp, Homo sapien
gagctctccagaggtacattcctgg

SEQ ID NO: 2284402 - DNA, 25 bp, Homo sapien
cctaaattaggcctggaccatgcga

SEQ ID NO: 2284403 - DNA, 25 bp, Homo sapien
tcaagtgcaacagccgatcctggca

SEQ ID NO: 2284404 - DNA, 25 bp, Homo sapien
gttgggaatataagcgcatgccatc

SEQ ID NO: 2284405 - DNA, 25 bp, Homo sapien
ttgggaatataagcgcatgccatca

SEQ ID NO: 2284406 - DNA, 25 bp, Homo sapien
tggacatattatcaagtgaagcctg

SEQ ID NO: 2284407 - DNA, 25 bp, Homo sapien
tgacagtgtcctaggaacaattttg

SEQ ID NO: 2284408 - DNA, 25 bp, Homo sapien
tgtaactcaggctcttgacagtgtc

SEQ ID NO: 2284409 - DNA, 25 bp, Homo sapien
ccccagggaagcttagcatttagat

SEQ ID NO: 2284410 - DNA, 25 bp, Homo sapien
taaatgggaatcaagcacaaggcag

SEQ ID NO: 2284411 - DNA, 25 bp, Homo sapien
gaggtgagcacttgggaacttattt

SEQ ID NO: 2284412 - DNA, 25 bp, Homo sapien
aaggtgatcagcgaggtctagaatg

SEQ ID NO: 2284413 - DNA, 25 bp, Homo sapien
cacaaggcagtttcggacagggaca

SEQ ID NO: 2284414 - DNA, 25 bp, Homo sapien
gagcttaaggtgtaattggatgtaa

SEQ ID NO: 2284415 - DNA, 25 bp, Homo sapien
taacgtaaacattagccttcacagc

SEQ ID NO: 2284416 - DNA, 25 bp, Homo sapien
ccttcacagcttcggaaagactgct

SEQ ID NO: 2284417 - DNA, 25 bp, Homo sapien
tatgctctttgagtggatgctcacg

SEQ ID NO: 2284418 - DNA, 25 bp, Homo sapien
tggcaaccacagagtattcaattcc

SEQ ID NO: 2284419 - DNA, 25 bp, Homo sapien
ccacagagtattcaattccaagcac

SEQ ID NO: 2284420 - DNA, 25 bp, Homo sapien
caaccacagagtattcaattccaag

SEQ ID NO: 2284421 - DNA, 25 bp, Homo sapien
atatggcaaccacagagtattcaat

SEQ ID NO: 2284422 - DNA, 25 bp, Homo sapien
ttagacaggcatggtcgtcccagct

SEQ ID NO: 2284423 - DNA, 25 bp, Homo sapien
tctttgttcaccaggtttaattcaa

SEQ ID NO: 2284424 - DNA, 25 bp, Homo sapien
taaatacaatcagttattctcttct

SEQ ID NO: 2284425 - DNA, 25 bp, Homo sapien
gaattaaatacaatcagttattctc

SEQ ID NO: 2284426 - DNA, 25 bp, Homo sapien
tgtagtggacagatatgctaaagca

SEQ ID NO: 2284427 - DNA, 25 bp, Homo sapien
tcttttaccctagtccccagtcaga

SEQ ID NO: 2284428 - DNA, 25 bp, Homo sapien
aaagcagagcaaagctaatatcaca

SEQ ID NO: 2284429 - DNA, 25 bp, Homo sapien
tacctgaggcaataagtacatctga

SEQ ID NO: 2284430 - DNA, 25 bp, Homo sapien
ctaagagtaaataaatgggctacat

SEQ ID NO: 2284431 - DNA, 25 bp, Homo sapien
aaagaacaagcagatgaatgaacac

SEQ ID NO: 2284432 - DNA, 25 bp, Homo sapien
tacattaatatgtagacttaacact

SEQ ID NO: 2284433 - DNA, 25 bp, Homo sapien
tttctagggagagagtctaagagta

SEQ ID NO: 2284434 - DNA, 25 bp, Homo sapien
tgggttcaagttaatctcatgattc

SEQ ID NO: 2284435 - DNA, 25 bp, Homo sapien
gcttctaaggaatggataagatcca

SEQ ID NO: 2284436 - DNA, 25 bp, Homo sapien
tctagtaggaagagagatagggtca

SEQ ID NO: 2284437 - DNA, 25 bp, Homo sapien
agtgccatttgtaagggcttctaag

SEQ ID NO: 2284438 - DNA, 25 bp, Homo sapien
taagacagggtgtgaatctaccagt

SEQ ID NO: 2284439 - DNA, 25 bp, Homo sapien
tgctccaggctacgcagatgatccg

SEQ ID NO: 2284440 - DNA, 25 bp, Homo sapien
gaagcagcatagatacccagcagca

SEQ ID NO: 2284441 - DNA, 25 bp, Homo sapien
taatttactccgtggctcagccaga

SEQ ID NO: 2284442 - DNA, 25 bp, Homo sapien
catgggccaaaactaacatacaggg

SEQ ID NO: 2284443 - DNA, 25 bp, Homo sapien
ggaggagccccatacctgctttgtt

SEQ ID NO: 2284444 - DNA, 25 bp, Homo sapien
tacagggccatccatagctgcaaga

SEQ ID NO: 2284445 - DNA, 25 bp, Homo sapien
taaagatgcgtatacctgaggtcaa

SEQ ID NO: 2284446 - DNA, 25 bp, Homo sapien
tgaagacatgagtgacccactgaac

SEQ ID NO: 2284447 - DNA, 25 bp, Homo sapien
ctacggacggcgcaatgagatctgg

SEQ ID NO: 2284448 - DNA, 25 bp, Homo sapien
gggacatctacttctgcacgggtta

SEQ ID NO: 2284449 - DNA, 25 bp, Homo sapien
tgcgatagaccagaaaaatcctggc

SEQ ID NO: 2284450 - DNA, 25 bp, Homo sapien
tcccaagtttctgtcactagatcct

SEQ ID NO: 2284451 - DNA, 25 bp, Homo sapien
agtttctgtcactagatccttctcc

SEQ ID NO: 2284452 - DNA, 25 bp, Homo sapien
ccaagtttctgtcactagatccttc

SEQ ID NO: 2284453 - DNA, 25 bp, Homo sapien
caagtttctgtcactagatccttct

SEQ ID NO: 2284454 - DNA, 25 bp, Homo sapien
agagtcagccagagctaggctccct

SEQ ID NO: 2284455 - DNA, 25 bp, Homo sapien
cttcatacaccaggggattccgggt

SEQ ID NO: 2284456 - DNA, 25 bp, Homo sapien
gccagagctaggctcccttcataca

SEQ ID NO: 2284457 - DNA, 25 bp, Homo sapien
caagcagagtcagccagagctaggc

SEQ ID NO: 2284458 - DNA, 25 bp, Homo sapien
tgtccagattggaagctgaggcacg

SEQ ID NO: 2284459 - DNA, 25 bp, Homo sapien
tcaagtgcgcgcaggaattcggaga

SEQ ID NO: 2284460 - DNA, 25 bp, Homo sapien
ccactgttattgtgctccatgtcca

SEQ ID NO: 2284461 - DNA, 25 bp, Homo sapien
ggcacgaaccaatgaggcaaagtgt

SEQ ID NO: 2284462 - DNA, 25 bp, Homo sapien
gctcctgttgtgtttctggaatcag

SEQ ID NO: 2284463 - DNA, 25 bp, Homo sapien
tcctgttgtgtttctggaatcaggg

SEQ ID NO: 2284464 - DNA, 25 bp, Homo sapien
cagctcctgttgtgtttctggaatc

SEQ ID NO: 2284465 - DNA, 25 bp, Homo sapien
cttttgagtcagctcctgttgtgtt

SEQ ID NO: 2284466 - DNA, 25 bp, Homo sapien
tcttcctgttgcagtgaggctgtca

SEQ ID NO: 2284467 - DNA, 25 bp, Homo sapien
gcatagcagaccgtacaccagtgtg

SEQ ID NO: 2284468 - DNA, 25 bp, Homo sapien
tgaccacacttagagctctcgaggg

SEQ ID NO: 2284469 - DNA, 25 bp, Homo sapien
tccagcctggttgaatgaaacgctt

SEQ ID NO: 2284470 - DNA, 25 bp, Homo sapien
tctttcttaataccttcccttcatg

SEQ ID NO: 2284471 - DNA, 25 bp, Homo sapien
aataaatgcttaatatcacctcttt

SEQ ID NO: 2284472 - DNA, 25 bp, Homo sapien
agaacccatcattcgctattcctca

SEQ ID NO: 2284473 - DNA, 25 bp, Homo sapien
cagaacccatcattcgctattcctc

SEQ ID NO: 2284474 - DNA, 25 bp, Homo sapien
gggtcaacacgtctcatgctgcctt

SEQ ID NO: 2284475 - DNA, 25 bp, Homo sapien
gtccaaaagccttgccaatgataag

SEQ ID NO: 2284476 - DNA, 25 bp, Homo sapien
tctctgtagatgatgcccgggtcaa

SEQ ID NO: 2284477 - DNA, 25 bp, Homo sapien
tctctgtcttagtgatggtcccctc

SEQ ID NO: 2284478 - DNA, 25 bp, Homo sapien
tctaaggcatgattgcaaaggccgg

SEQ ID NO: 2284479 - DNA, 25 bp, Homo sapien
ggtaatgtccttgcccctggaagaa

SEQ ID NO: 2284480 - DNA, 25 bp, Homo sapien
aaagaactttgtcagctgtcagcac

SEQ ID NO: 2284481 - DNA, 25 bp, Homo sapien
tgcagatacacttgggttagaacct

SEQ ID NO: 2284482 - DNA, 25 bp, Homo sapien
taccggtgcttttagatgaatagaa

SEQ ID NO: 2284483 - DNA, 25 bp, Homo sapien
tattagcatcgttaattaccggtgc

SEQ ID NO: 2284484 - DNA, 25 bp, Homo sapien
gcagtgagtgcattcaatgacaaaa

SEQ ID NO: 2284485 - DNA, 25 bp, Homo sapien
gaaagcctggcgtccttcattcagt

SEQ ID NO: 2284486 - DNA, 25 bp, Homo sapien
tactatcaaaggcaggtcggtgacc

SEQ ID NO: 2284487 - DNA, 25 bp, Homo sapien
catcctcaaggtaaagtggtctgca

SEQ ID NO: 2284488 - DNA, 25 bp, Homo sapien
taattgccccactgttggccagcgg

SEQ ID NO: 2284489 - DNA, 25 bp, Homo sapien
caaatgtggtgtctagcctggctcc

SEQ ID NO: 2284490 - DNA, 25 bp, Homo sapien
tagatgtcttgttccattagaggcc

SEQ ID NO: 2284491 - DNA, 25 bp, Homo sapien
tgagaatatttcctacgtggtggtg

SEQ ID NO: 2284492 - DNA, 25 bp, Homo sapien
tctgagccccgtattgcctgtaaat

SEQ ID NO: 2284493 - DNA, 25 bp, Homo sapien
gaggccataaaacgataatgttctc

SEQ ID NO: 2284494 - DNA, 25 bp, Homo sapien
tgagtttgactcgtgagaagccctc

SEQ ID NO: 2284495 - DNA, 25 bp, Homo sapien
taggtggcgtgtgcccacagtaagc

SEQ ID NO: 2284496 - DNA, 25 bp, Homo sapien
tgaagtctcatgaaaggtgtacctg

SEQ ID NO: 2284497 - DNA, 25 bp, Homo sapien
gctgagctacagcacaacgcaaggc

SEQ ID NO: 2284498 - DNA, 25 bp, Homo sapien
cgttctggtgtctgtcgcgagtgcg

SEQ ID NO: 2284499 - DNA, 25 bp, Homo sapien
gtctgtcgcgagtgcggctctccac

SEQ ID NO: 2284500 - DNA, 25 bp, Homo sapien
caggaatgtgctatcgaaggtgcgt

SEQ ID NO: 2284501 - DNA, 25 bp, Homo sapien
tgtgctatcgaaggtgcgttctggt

SEQ ID NO: 2284502 - DNA, 25 bp, Homo sapien
gccgcctcgccgtcccgccgccttg

SEQ ID NO: 2284503 - DNA, 25 bp, Homo sapien
ctcaccgccgggctgaattgccgcc

SEQ ID NO: 2284504 - DNA, 25 bp, Homo sapien
tctctccgccccttcacctcgccgt

SEQ ID NO: 2284505 - DNA, 25 bp, Homo sapien
ttcgcatcactgacccgccctctct

SEQ ID NO: 2284506 - DNA, 25 bp, Homo sapien
cactccaggcgagaatcgctttcca

SEQ ID NO: 2284507 - DNA, 25 bp, Homo sapien
ccccagcggataggttagactcaga

SEQ ID NO: 2284508 - DNA, 25 bp, Homo sapien
taccagcgggatcgagccttcgggt

SEQ ID NO: 2284509 - DNA, 25 bp, Homo sapien
ccaggcacctgagagaggacgttcc

SEQ ID NO: 2284510 - DNA, 25 bp, Homo sapien
tatttcttgtcggtggtgtggagta

SEQ ID NO: 2284511 - DNA, 25 bp, Homo sapien
tcggagcaatggaggatcaggcagc

SEQ ID NO: 2284512 - DNA, 25 bp, Homo sapien
gtgtggagtagagatttattggtaa

SEQ ID NO: 2284513 - DNA, 25 bp, Homo sapien
caaaatatttcttgtcggtggtgtg

SEQ ID NO: 2284514 - DNA, 25 bp, Homo sapien
agcttgaggcctgcaccggccgctg

SEQ ID NO: 2284515 - DNA, 25 bp, Homo sapien
gcctgtcccagatccccggccgctg

SEQ ID NO: 2284516 - DNA, 25 bp, Homo sapien
ggccgccacaggctccggctttcgg

SEQ ID NO: 2284517 - DNA, 25 bp, Homo sapien
ccgctgcgtgaaacgcgagagcgct

SEQ ID NO: 2284518 - DNA, 25 bp, Homo sapien
ctgctgttaacatccatcactgcgc

SEQ ID NO: 2284519 - DNA, 25 bp, Homo sapien
cgtcggggctcaggtcgggcagcct

SEQ ID NO: 2284520 - DNA, 25 bp, Homo sapien
tcaggtcgggcagcctgccccccac

SEQ ID NO: 2284521 - DNA, 25 bp, Homo sapien
cggggctcaggtcgggcagcctgcc

SEQ ID NO: 2284522 - DNA, 25 bp, Homo sapien
ctcaggtcgggcagcctgcccccca

SEQ ID NO: 2284523 - DNA, 25 bp, Homo sapien
gatgcggcgtcccggagaccgcgac

SEQ ID NO: 2284524 - DNA, 25 bp, Homo sapien
ggcccccgctcagcagatgcggcgt

SEQ ID NO: 2284525 - DNA, 25 bp, Homo sapien
tctcggccctttcttgatttgctcc

SEQ ID NO: 2284526 - DNA, 25 bp, Homo sapien
actttctcggccctttcttgatttg

SEQ ID NO: 2284527 - DNA, 25 bp, Homo sapien
tgcccgcgatcgcagagagatgagc

SEQ ID NO: 2284528 - DNA, 25 bp, Homo sapien
agttgcccgcgatcgcagagagatg

SEQ ID NO: 2284529 - DNA, 25 bp, Homo sapien
cgcgatcgcagagagatgagcgtca

SEQ ID NO: 2284530 - DNA, 25 bp, Homo sapien
gagatgagcgtcaggacagagccga

SEQ ID NO: 2284531 - DNA, 25 bp, Homo sapien
gtcgatgctgatcacgtacaaggtc

SEQ ID NO: 2284532 - DNA, 25 bp, Homo sapien
tctgagcccgaccaaaaatggtagg

SEQ ID NO: 2284533 - DNA, 25 bp, Homo sapien
aatggtaggtaaagtgacaaaggcg

SEQ ID NO: 2284534 - DNA, 25 bp, Homo sapien
agaggcttcatgatcccaaggtacc

SEQ ID NO: 2284535 - DNA, 25 bp, Homo sapien
ggagtaaatcgtgtagccaaagtct

SEQ ID NO: 2284536 - DNA, 25 bp, Homo sapien
tagccaaagtcttgactgaccaagc

SEQ ID NO: 2284537 - DNA, 25 bp, Homo sapien
tcgtgtagccaaagtcttgactgac

SEQ ID NO: 2284538 - DNA, 25 bp, Homo sapien
caaagtcttgactgaccaagcacac

SEQ ID NO: 2284539 - DNA, 25 bp, Homo sapien
cccagacgatgatccccaaggtagt

SEQ ID NO: 2284540 - DNA, 25 bp, Homo sapien
agcacatggtggaggcccagacgat

SEQ ID NO: 2284541 - DNA, 25 bp, Homo sapien
cctcctggaacttcactgtgccatt

SEQ ID NO: 2284542 - DNA, 25 bp, Homo sapien
caaggtagtcgctgctttctgtttc

SEQ ID NO: 2284543 - DNA, 25 bp, Homo sapien
aggcagtgccatagacagaagggtc

SEQ ID NO: 2284544 - DNA, 25 bp, Homo sapien
ggcagtgccatagacagaagggtct

SEQ ID NO: 2284545 - DNA, 25 bp, Homo sapien
caggcagtgccatagacagaagggt

SEQ ID NO: 2284546 - DNA, 25 bp, Homo sapien
tgtctggttgatattctggtactgg

SEQ ID NO: 2284547 - DNA, 25 bp, Homo sapien
ttgcatagcccagccatggaaatat

SEQ ID NO: 2284548 - DNA, 25 bp, Homo sapien
gtctggttgatattctggtactggc

SEQ ID NO: 2284549 - DNA, 25 bp, Homo sapien
catagcccagccatggaaatatcct

SEQ ID NO: 2284550 - DNA, 25 bp, Homo sapien
gctgaatattcaccacgagacctag

SEQ ID NO: 2284551 - DNA, 25 bp, Homo sapien
ggtgggtaccactcgcacttcactg

SEQ ID NO: 2284552 - DNA, 25 bp, Homo sapien
taagtatacgcggtcacattagcaa

SEQ ID NO: 2284553 - DNA, 25 bp, Homo sapien
gacctagactcggaagcatggaaag

SEQ ID NO: 2284554 - DNA, 25 bp, Homo sapien
agcaggcaatccctcagctctggtt

SEQ ID NO: 2284555 - DNA, 25 bp, Homo sapien
tcttttaccacaaagctagaggtca

SEQ ID NO: 2284556 - DNA, 25 bp, Homo sapien
gggcagctgccacaaattagtctga

SEQ ID NO: 2284557 - DNA, 25 bp, Homo sapien
tattgattgccactacctggctccg

SEQ ID NO: 2284558 - DNA, 25 bp, Homo sapien
gaaagaatggtggtagctgttctct

SEQ ID NO: 2284559 - DNA, 25 bp, Homo sapien
aggaaagaatggtggtagctgttct

SEQ ID NO: 2284560 - DNA, 25 bp, Homo sapien
ggaaagaatggtggtagctgttctc

SEQ ID NO: 2284561 - DNA, 25 bp, Homo sapien
caatgtctgggcgatgccactggaa

SEQ ID NO: 2284562 - DNA, 25 bp, Homo sapien
ttcagagagggagcaatcactcagg

SEQ ID NO: 2284563 - DNA, 25 bp, Homo sapien
caagggcaagtgtaccggcaaacaa

SEQ ID NO: 2284564 - DNA, 25 bp, Homo sapien
tcaagaattccgacaaagcgcagtg

SEQ ID NO: 2284565 - DNA, 25 bp, Homo sapien
cactgtgtgggttgtgcgattcaca

SEQ ID NO: 2284566 - DNA, 25 bp, Homo sapien
ggtcgtgccaaaatgggccatggcc

SEQ ID NO: 2284567 - DNA, 25 bp, Homo sapien
tggtcgtgccaaaatgggccatggc

SEQ ID NO: 2284568 - DNA, 25 bp, Homo sapien
gaaataagcatcttcgatgcctatg

SEQ ID NO: 2284569 - DNA, 25 bp, Homo sapien
atggtcgtgccaaaatgggccatgg

SEQ ID NO: 2284570 - DNA, 25 bp, Homo sapien
tcttctcttccagccatgatggtat

SEQ ID NO: 2284571 - DNA, 25 bp, Homo sapien
attacagaaattagtgccaccttta

SEQ ID NO: 2284572 - DNA, 25 bp, Homo sapien
gaattacagaaattagtgccacctt

SEQ ID NO: 2284573 - DNA, 25 bp, Homo sapien
ggtctccataacattccagtttaat

SEQ ID NO: 2284574 - DNA, 25 bp, Homo sapien
cccaacagcaacgaggacctctagt

SEQ ID NO: 2284575 - DNA, 25 bp, Homo sapien
tccttgggaaaatggatgatttcat

SEQ ID NO: 2284576 - DNA, 25 bp, Homo sapien
ccagatcgtgatctctgaagggctc

SEQ ID NO: 2284577 - DNA, 25 bp, Homo sapien
tccagggaacaggacttcatacatt

SEQ ID NO: 2284578 - DNA, 25 bp, Homo sapien
tcagtctattcccagatcaatcaga

SEQ ID NO: 2284579 - DNA, 25 bp, Homo sapien
cagtctattcccagatcaatcagag

SEQ ID NO: 2284580 - DNA, 25 bp, Homo sapien
ccgcgcccagccaggaaaggatggt

SEQ ID NO: 2284581 - DNA, 25 bp, Homo sapien
cgcgcccagccaggaaaggatggtt

SEQ ID NO: 2284582 - DNA, 25 bp, Homo sapien
accgcgcccagccaggaaaggatgg

SEQ ID NO: 2284583 - DNA, 25 bp, Homo sapien
aaatgagctcttggtcctcccatcc

SEQ ID NO: 2284584 - DNA, 25 bp, Homo sapien
caaccgaaggacctgtagtagcagt

SEQ ID NO: 2284585 - DNA, 25 bp, Homo sapien
gagaacagtgtaattaaggacagac

SEQ ID NO: 2284586 - DNA, 25 bp, Homo sapien
gtagcagtgtagatggtaacagccc

SEQ ID NO: 2284587 - DNA, 25 bp, Homo sapien
ttatctgaagctgagggtagtaccc

SEQ ID NO: 2284588 - DNA, 25 bp, Homo sapien
tagtaccctctgctacactggtgcc

SEQ ID NO: 2284589 - DNA, 25 bp, Homo sapien
tgtgtgccaggaaggtatgagccca

SEQ ID NO: 2284590 - DNA, 25 bp, Homo sapien
tttgaaacgcatgtgtaccagtggc

SEQ ID NO: 2284591 - DNA, 25 bp, Homo sapien
ctgaatgatttttgcggagagcccg

SEQ ID NO: 2284592 - DNA, 25 bp, Homo sapien
gaatgatttttgcggagagcccgat

SEQ ID NO: 2284593 - DNA, 25 bp, Homo sapien
aatgatttttgcggagagcccgatg

SEQ ID NO: 2284594 - DNA, 25 bp, Homo sapien
tgaatgatttttgcggagagcccga

SEQ ID NO: 2284595 - DNA, 25 bp, Homo sapien
cgcccgcgttctgccgggaagtgta

SEQ ID NO: 2284596 - DNA, 25 bp, Homo sapien
ccggcagcttgagcgccctggacag

SEQ ID NO: 2284597 - DNA, 25 bp, Homo sapien
aagtgtagttccgagcggcggtgcg

SEQ ID NO: 2284598 - DNA, 25 bp, Homo sapien
ttgagcgccctggacagcacggtcg

SEQ ID NO: 2284599 - DNA, 25 bp, Homo sapien
ggcgttctgacattccccgccgtaa

SEQ ID NO: 2284600 - DNA, 25 bp, Homo sapien
ggatgatccacagagggccactcgc

SEQ ID NO: 2284601 - DNA, 25 bp, Homo sapien
catggatgcgtcgttgctgccgtta

SEQ ID NO: 2284602 - DNA, 25 bp, Homo sapien
ggcgctcgggaaggatgctcctctc

SEQ ID NO: 2284603 - DNA, 25 bp, Homo sapien
catctgagtcgggttctggcgcttc

SEQ ID NO: 2284604 - DNA, 25 bp, Homo sapien
gacgtgcgcacatatgacaccaggg

SEQ ID NO: 2284605 - DNA, 25 bp, Homo sapien
gatcatcgagatccccaaagtcagc

SEQ ID NO: 2284606 - DNA, 25 bp, Homo sapien
gatcatactcccctaggtctgggct

SEQ ID NO: 2284607 - DNA, 25 bp, Homo sapien
actcccgttccttgacatcacaaag

SEQ ID NO: 2284608 - DNA, 25 bp, Homo sapien
atcagccaattccaatggagacagg

SEQ ID NO: 2284609 - DNA, 25 bp, Homo sapien
agcacatcacgcaggccatctccat

SEQ ID NO: 2284610 - DNA, 25 bp, Homo sapien
caattccaatggagacaggtcccca

SEQ ID NO: 2284611 - DNA, 25 bp, Homo sapien
caaggcagatggtttcagccaagct

SEQ ID NO: 2284612 - DNA, 25 bp, Homo sapien
gcgctgagcatcttgtgtgtccctg

SEQ ID NO: 2284613 - DNA, 25 bp, Homo sapien
tcatccccgaaaggcatacaagatt

SEQ ID NO: 2284614 - DNA, 25 bp, Homo sapien
tcctcagggagaagactagaccaca

SEQ ID NO: 2284615 - DNA, 25 bp, Homo sapien
tggccagaaccacaaggtctcgaac

SEQ ID NO: 2284616 - DNA, 25 bp, Homo sapien
ctgcaattccccaatggccagaacc

SEQ ID NO: 2284617 - DNA, 25 bp, Homo sapien
tcgaacaccgtcttcatccaagtct

SEQ ID NO: 2284618 - DNA, 25 bp, Homo sapien
gggcagccaaggtaccgttggacaa

SEQ ID NO: 2284619 - DNA, 25 bp, Homo sapien
cacaggtcgacccactggatttccg

SEQ ID NO: 2284620 - DNA, 25 bp, Homo sapien
cccatttgtggtgatgtaaacctga

SEQ ID NO: 2284621 - DNA, 25 bp, Homo sapien
gccaaacaggatgtagacagcccca

SEQ ID NO: 2284622 - DNA, 25 bp, Homo sapien
caacgatgttgtacttcacaggtcg

SEQ ID NO: 2284623 - DNA, 25 bp, Homo sapien
tctatctgcagagaaggtggtgagc

SEQ ID NO: 2284624 - DNA, 25 bp, Homo sapien
tcccgcagtgcgacagcttgtatat

SEQ ID NO: 2284625 - DNA, 25 bp, Homo sapien
gagctgtctcgattttgggcctgaa

SEQ ID NO: 2284626 - DNA, 25 bp, Homo sapien
ggcctgaacaaaaatgtcccgcagt

SEQ ID NO: 2284627 - DNA, 25 bp, Homo sapien
ctgcgcaggccttgaagtctcaatg

SEQ ID NO: 2284628 - DNA, 25 bp, Homo sapien
ccagtaaggtgtcagattttgcccc

SEQ ID NO: 2284629 - DNA, 25 bp, Homo sapien
ggttgtaatcagaaggttgctgcag

SEQ ID NO: 2284630 - DNA, 25 bp, Homo sapien
cccgaagcagcacaaggctttgtct

SEQ ID NO: 2284631 - DNA, 25 bp, Homo sapien
ccatcctgtatctgcagaaggaaat

SEQ ID NO: 2284632 - DNA, 25 bp, Homo sapien
aaatctaatgtctgatcatcagtga

SEQ ID NO: 2284633 - DNA, 25 bp, Homo sapien
tccatcctgtatctgcagaaggaaa

SEQ ID NO: 2284634 - DNA, 25 bp, Homo sapien
ggaaatctaatgtctgatcatcagt

SEQ ID NO: 2284635 - DNA, 25 bp, Homo sapien
ctgacagcccttcggcccagaagag

SEQ ID NO: 2284636 - DNA, 25 bp, Homo sapien
taactgctgaggtggctggcgtttc

SEQ ID NO: 2284637 - DNA, 25 bp, Homo sapien
tcatgtgacacggagcacggtaact

SEQ ID NO: 2284638 - DNA, 25 bp, Homo sapien
taactccaaacaatggagccagagt

SEQ ID NO: 2284639 - DNA, 25 bp, Homo sapien
gtgccggtggtgttggccagatcca

SEQ ID NO: 2284640 - DNA, 25 bp, Homo sapien
gggaacgcaggatgcaggaggtaaa

SEQ ID NO: 2284641 - DNA, 25 bp, Homo sapien
gatgcaggaggtaaaggtggtgaag

SEQ ID NO: 2284642 - DNA, 25 bp, Homo sapien
tctgaagccgtcactgtgccggtgg

SEQ ID NO: 2284643 - DNA, 25 bp, Homo sapien
catctgcgtacacagactcccgctg

SEQ ID NO: 2284644 - DNA, 25 bp, Homo sapien
cctttggaatgggacgcgctttcac

SEQ ID NO: 2284645 - DNA, 25 bp, Homo sapien
gaaagtgccctgctgtcgtctgaga

SEQ ID NO: 2284646 - DNA, 25 bp, Homo sapien
cacattcagagcatatgggttctca

SEQ ID NO: 2284647 - DNA, 25 bp, Homo sapien
ggttttctaaatcaatgccctggca

SEQ ID NO: 2284648 - DNA, 25 bp, Homo sapien
ggactcctgtagctgagccatctgg

SEQ ID NO: 2284649 - DNA, 25 bp, Homo sapien
catctttccagaggtcgttaattcc

SEQ ID NO: 2284650 - DNA, 25 bp, Homo sapien
gagcttggccctgttgtcctggtaa

SEQ ID NO: 2284651 - DNA, 25 bp, Homo sapien
tagtgcccaccgtagactaagcttg

SEQ ID NO: 2284652 - DNA, 25 bp, Homo sapien
gattaatgcagggactgaaaaggta

SEQ ID NO: 2284653 - DNA, 25 bp, Homo sapien
aaagactccaacatgccttcccaag

SEQ ID NO: 2284654 - DNA, 25 bp, Homo sapien
ggtaaatgaggacgaagaagtcttc

SEQ ID NO: 2284655 - DNA, 25 bp, Homo sapien
gatgccccagccaaatagatcatgc

SEQ ID NO: 2284656 - DNA, 25 bp, Homo sapien
tcacatttccaaacgatccacgcag

SEQ ID NO: 2284657 - DNA, 25 bp, Homo sapien
gagattcacatttccaaacgatcca

SEQ ID NO: 2284658 - DNA, 25 bp, Homo sapien
aagagattcacatttccaaacgatc

SEQ ID NO: 2284659 - DNA, 25 bp, Homo sapien
gattcacatttccaaacgatccacg

SEQ ID NO: 2284660 - DNA, 25 bp, Homo sapien
tcaacatcagaggtagggcatctgg

SEQ ID NO: 2284661 - DNA, 25 bp, Homo sapien
tccctgaagcttaggacatacctgg

SEQ ID NO: 2284662 - DNA, 25 bp, Homo sapien
gatgaaaatgcttggatggctaact

SEQ ID NO: 2284663 - DNA, 25 bp, Homo sapien
tagtcatagacttcactggctttcc

SEQ ID NO: 2284664 - DNA, 25 bp, Homo sapien
catacacttctgatgtcgccacaga

SEQ ID NO: 2284665 - DNA, 25 bp, Homo sapien
cacaacatgtggacttggtcagaga

SEQ ID NO: 2284666 - DNA, 25 bp, Homo sapien
tgaagacagcatgcaaacatacact

SEQ ID NO: 2284667 - DNA, 25 bp, Homo sapien
gggtcactgagactacatcctcttg

SEQ ID NO: 2284668 - DNA, 25 bp, Homo sapien
tacagcaggataaggacatcaaagg

SEQ ID NO: 2284669 - DNA, 25 bp, Homo sapien
aaatggttgcatcctggactcaagt

SEQ ID NO: 2284670 - DNA, 25 bp, Homo sapien
tagaggagaacttaattgaagtagc

SEQ ID NO: 2284671 - DNA, 25 bp, Homo sapien
catcaaaggctcctgacttccagtt

SEQ ID NO: 2284672 - DNA, 25 bp, Homo sapien
ttttccatccgctaacattgaattt

SEQ ID NO: 2284673 - DNA, 25 bp, Homo sapien
agttttccatccgctaacattgaat

SEQ ID NO: 2284674 - DNA, 25 bp, Homo sapien
aagcagttttccatccgctaacatt

SEQ ID NO: 2284675 - DNA, 25 bp, Homo sapien
gaagcagttttccatccgctaacat

SEQ ID NO: 2284676 - DNA, 25 bp, Homo sapien
gggatttgccctgcataaacacagt

SEQ ID NO: 2284677 - DNA, 25 bp, Homo sapien
tacaagcccaggtaaagagagaacc

SEQ ID NO: 2284678 - DNA, 25 bp, Homo sapien
agagaaccaggttatgcccggacag

SEQ ID NO: 2284679 - DNA, 25 bp, Homo sapien
tacaggccaggcaacatgcatgctt

SEQ ID NO: 2284680 - DNA, 25 bp, Homo sapien
gggtaagacccttgcatttgtagaa

SEQ ID NO: 2284681 - DNA, 25 bp, Homo sapien
tcctatcttagacacctgggtgggt

SEQ ID NO: 2284682 - DNA, 25 bp, Homo sapien
cccacattggtcagatgaagcttcc

SEQ ID NO: 2284683 - DNA, 25 bp, Homo sapien
ctttgccggcaacctcaggatggga

SEQ ID NO: 2284684 - DNA, 25 bp, Homo sapien
tggtacaatacaactgggagactgg

SEQ ID NO: 2284685 - DNA, 25 bp, Homo sapien
ccaagcccctgtgcgagaaaggtct

SEQ ID NO: 2284686 - DNA, 25 bp, Homo sapien
cagccaagtgctttgacatgccagt

SEQ ID NO: 2284687 - DNA, 25 bp, Homo sapien
tattacagatggagctctcgaaggc

SEQ ID NO: 2284688 - DNA, 25 bp, Homo sapien
ggccagcccctgtcattcaatctat

SEQ ID NO: 2284689 - DNA, 25 bp, Homo sapien
tccctaggatttgccggctggaggc

SEQ ID NO: 2284690 - DNA, 25 bp, Homo sapien
ggaggctatgttgattccactctca

SEQ ID NO: 2284691 - DNA, 25 bp, Homo sapien
caaatcaccacttttctgtagttgg

SEQ ID NO: 2284692 - DNA, 25 bp, Homo sapien
gagcaagtcaaaccctccgaatcgg

SEQ ID NO: 2284693 - DNA, 25 bp, Homo sapien
gaatcggaaccctcacttgtagaat

SEQ ID NO: 2284694 - DNA, 25 bp, Homo sapien
tggtgatgagtcaggcgaacagtcc

SEQ ID NO: 2284695 - DNA, 25 bp, Homo sapien
tgcaggaggtcccataaatctggcc

SEQ ID NO: 2284696 - DNA, 25 bp, Homo sapien
tttcatcttccttcattaaaacttc

SEQ ID NO: 2284697 - DNA, 25 bp, Homo sapien
cttggcctattaccttttcatcttc

SEQ ID NO: 2284698 - DNA, 25 bp, Homo sapien
ttggcctattaccttttcatcttcc

SEQ ID NO: 2284699 - DNA, 25 bp, Homo sapien
catcttccttcattaaaacttccat

SEQ ID NO: 2284700 - DNA, 25 bp, Homo sapien
cagcaaatgttaactgagcatgcac

SEQ ID NO: 2284701 - DNA, 25 bp, Homo sapien
tcattcaatccatttcaggtcagca

SEQ ID NO: 2284702 - DNA, 25 bp, Homo sapien
atgcacctgtgtttcgggcactgtg

SEQ ID NO: 2284703 - DNA, 25 bp, Homo sapien
gataagtaagatatattctctgccc

SEQ ID NO: 2284704 - DNA, 25 bp, Homo sapien
tgctctggggtcctcaaaagcaccc

SEQ ID NO: 2284705 - DNA, 25 bp, Homo sapien
ttctgctctggggtcctcaaaagca

SEQ ID NO: 2284706 - DNA, 25 bp, Homo sapien
cttcccacagggaaattctgctctg

SEQ ID NO: 2284707 - DNA, 25 bp, Homo sapien
gtcctcaaaagcaccccactcacag

SEQ ID NO: 2284708 - DNA, 25 bp, Homo sapien
taacgagcatgtttcataatgggct

SEQ ID NO: 2284709 - DNA, 25 bp, Homo sapien
taatgggctgtatcatcgggatgac

SEQ ID NO: 2284710 - DNA, 25 bp, Homo sapien
gcttcttttattcgagggccttgga

SEQ ID NO: 2284711 - DNA, 25 bp, Homo sapien
gatgacttgttgtacctgccatgca

SEQ ID NO: 2284712 - DNA, 25 bp, Homo sapien
cctgggtcagatcagactggcttcc

SEQ ID NO: 2284713 - DNA, 25 bp, Homo sapien
tggcccaatacactcatttctctgc

SEQ ID NO: 2284714 - DNA, 25 bp, Homo sapien
tctgcagcactttgctttgctgtcc

SEQ ID NO: 2284715 - DNA, 25 bp, Homo sapien
tcctggttggcccaatacactcatt

SEQ ID NO: 2284716 - DNA, 25 bp, Homo sapien
tgtctgtctgctggcagcgagtcag

SEQ ID NO: 2284717 - DNA, 25 bp, Homo sapien
ctgctggcagcgagtcagcaaccaa

SEQ ID NO: 2284718 - DNA, 25 bp, Homo sapien
tggcagcgagtcagcaaccaataaa

SEQ ID NO: 2284719 - DNA, 25 bp, Homo sapien
atgtctgactgcacacgatcaagcc

SEQ ID NO: 2284720 - DNA, 25 bp, Homo sapien
gttgtaaatcgccaatgcatggcag

SEQ ID NO: 2284721 - DNA, 25 bp, Homo sapien
tgagcacagaaaacggttattgttg

SEQ ID NO: 2284722 - DNA, 25 bp, Homo sapien
aaggttggggaaagacagattatga

SEQ ID NO: 2284723 - DNA, 25 bp, Homo sapien
aagacagattatgaatgcaaagcac

SEQ ID NO: 2284724 - DNA, 25 bp, Homo sapien
taaaaacgagtaggagctcttccaa

SEQ ID NO: 2284725 - DNA, 25 bp, Homo sapien
ttaaaaacgagtaggagctcttcca

SEQ ID NO: 2284726 - DNA, 25 bp, Homo sapien
aaaaacgagtaggagctcttccaat

SEQ ID NO: 2284727 - DNA, 25 bp, Homo sapien
gactgatcaatcactaatgctgcag

SEQ ID NO: 2284728 - DNA, 25 bp, Homo sapien
gacaaattgcacaccttgactccga

SEQ ID NO: 2284729 - DNA, 25 bp, Homo sapien
gaaactgcaaagtgtagccagaccc

SEQ ID NO: 2284730 - DNA, 25 bp, Homo sapien
tcaaatggcaacactgaccctaggt

SEQ ID NO: 2284731 - DNA, 25 bp, Homo sapien
tccttgtttaacgtcattgatagct

SEQ ID NO: 2284732 - DNA, 25 bp, Homo sapien
gctaattgatgtacaccagagttaa

SEQ ID NO: 2284733 - DNA, 25 bp, Homo sapien
aggaagtccttgtttaacgtcattg

SEQ ID NO: 2284734 - DNA, 25 bp, Homo sapien
tcagtttgaacataggctaattgat

SEQ ID NO: 2284735 - DNA, 25 bp, Homo sapien
tgtcaggtattaagggcccattcca

SEQ ID NO: 2284736 - DNA, 25 bp, Homo sapien
gccaagctcgcaattagtgttcaag

SEQ ID NO: 2284737 - DNA, 25 bp, Homo sapien
tgcaagtggcagtcaagaatggcta

SEQ ID NO: 2284738 - DNA, 25 bp, Homo sapien
ccagaacttagtggaggcatcaccc

SEQ ID NO: 2284739 - DNA, 25 bp, Homo sapien
tgcccgccagcaacaaggaagcgtt

SEQ ID NO: 2284740 - DNA, 25 bp, Homo sapien
caaggaagcgttgctgtccctcaaa

SEQ ID NO: 2284741 - DNA, 25 bp, Homo sapien
taaacaagaatggttgcccgccagc

SEQ ID NO: 2284742 - DNA, 25 bp, Homo sapien
tgaaaaaccttcacatctccctaaa

SEQ ID NO: 2284743 - DNA, 25 bp, Homo sapien
gatcccacacaagttgaggagcaaa

SEQ ID NO: 2284744 - DNA, 25 bp, Homo sapien
cagatcccacacaagttgaggagca

SEQ ID NO: 2284745 - DNA, 25 bp, Homo sapien
ccacacaagttgaggagcaaagcac

SEQ ID NO: 2284746 - DNA, 25 bp, Homo sapien
tcccacacaagttgaggagcaaagc

SEQ ID NO: 2284747 - DNA, 25 bp, Homo sapien
atcctgtctgaaactgcactcctgg

SEQ ID NO: 2284748 - DNA, 25 bp, Homo sapien
ccatcctgtctgaaactgcactcct

SEQ ID NO: 2284749 - DNA, 25 bp, Homo sapien
ctccatcctgtctgaaactgcactc

SEQ ID NO: 2284750 - DNA, 25 bp, Homo sapien
tcctgtctgaaactgcactcctggg

SEQ ID NO: 2284751 - DNA, 25 bp, Homo sapien
aagccagggagctggccgcttccag

SEQ ID NO: 2284752 - DNA, 25 bp, Homo sapien
gctgtcctgggctttagtggccaca

SEQ ID NO: 2284753 - DNA, 25 bp, Homo sapien
tctggagccataaacatgggaggga

SEQ ID NO: 2284754 - DNA, 25 bp, Homo sapien
tggccgcttccagacatctggctga

SEQ ID NO: 2284755 - DNA, 25 bp, Homo sapien
agtggtcgctggctattcccaggat

SEQ ID NO: 2284756 - DNA, 25 bp, Homo sapien
gctggctattcccaggattcgctgt

SEQ ID NO: 2284757 - DNA, 25 bp, Homo sapien
caggattcgctgtctcctcattaac

SEQ ID NO: 2284758 - DNA, 25 bp, Homo sapien
gctattcccaggattcgctgtctcc

SEQ ID NO: 2284759 - DNA, 25 bp, Homo sapien
agactcagacggcaggaatgattcc

SEQ ID NO: 2284760 - DNA, 25 bp, Homo sapien
gggaggagactcagacggcaggaat

SEQ ID NO: 2284761 - DNA, 25 bp, Homo sapien
gaggagactcagacggcaggaatga

SEQ ID NO: 2284762 - DNA, 25 bp, Homo sapien
aggagactcagacggcaggaatgat

SEQ ID NO: 2284763 - DNA, 25 bp, Homo sapien
ttttaccccatcacgaggcaggaaa

SEQ ID NO: 2284764 - DNA, 25 bp, Homo sapien
agtttttaccccatcacgaggcagg

SEQ ID NO: 2284765 - DNA, 25 bp, Homo sapien
cagatctccacataaggcatcactg

SEQ ID NO: 2284766 - DNA, 25 bp, Homo sapien
cccgcagaggatggcccagttttta

SEQ ID NO: 2284767 - DNA, 25 bp, Homo sapien
tactccctgagcatgactacggcat

SEQ ID NO: 2284768 - DNA, 25 bp, Homo sapien
tatggaacaaacagctcccttggac

SEQ ID NO: 2284769 - DNA, 25 bp, Homo sapien
catcctttttactggtagcctggca

SEQ ID NO: 2284770 - DNA, 25 bp, Homo sapien
gcttttaactaagttgccaggtgca

SEQ ID NO: 2284771 - DNA, 25 bp, Homo sapien
tgcacttggcatggccgcatgaaac

SEQ ID NO: 2284772 - DNA, 25 bp, Homo sapien
gcatggccgcatgaaaccaaaattg

SEQ ID NO: 2284773 - DNA, 25 bp, Homo sapien
gcctctgtctgcacttggcatggcc

SEQ ID NO: 2284774 - DNA, 25 bp, Homo sapien
caggtcacgtgactgaaagtgcagc

SEQ ID NO: 2284775 - DNA, 25 bp, Homo sapien
tggccacagccatctccaagcctct

SEQ ID NO: 2284776 - DNA, 25 bp, Homo sapien
tagagcatggccacagccatctcca

SEQ ID NO: 2284777 - DNA, 25 bp, Homo sapien
gagcatggccacagccatctccaag

SEQ ID NO: 2284778 - DNA, 25 bp, Homo sapien
gcatggccacagccatctccaagcc

SEQ ID NO: 2284779 - DNA, 25 bp, Homo sapien
tcaagtatttccctgattgtgtcag

SEQ ID NO: 2284780 - DNA, 25 bp, Homo sapien
ggagggaatgacacaactatggatg

SEQ ID NO: 2284781 - DNA, 25 bp, Homo sapien
tgacacaactatggatggctgcctt

SEQ ID NO: 2284782 - DNA, 25 bp, Homo sapien
caggtttatacctagtggagggaat

SEQ ID NO: 2284783 - DNA, 25 bp, Homo sapien
cagtaatcaccagggcgagtccatt

SEQ ID NO: 2284784 - DNA, 25 bp, Homo sapien
tcaccagggcgagtccattgaagct

SEQ ID NO: 2284785 - DNA, 25 bp, Homo sapien
gctgttcagtaatcaccagggcgag

SEQ ID NO: 2284786 - DNA, 25 bp, Homo sapien
tgttcagtaatcaccagggcgagtc

SEQ ID NO: 2284787 - DNA, 25 bp, Homo sapien
tgtcactcagagtcttccggttcaa

SEQ ID NO: 2284788 - DNA, 25 bp, Homo sapien
actcagagtcttccggttcaagatc

SEQ ID NO: 2284789 - DNA, 25 bp, Homo sapien
cactcagagtcttccggttcaagat

SEQ ID NO: 2284790 - DNA, 25 bp, Homo sapien
tgccgttcactctcttgttacaagt

SEQ ID NO: 2284791 - DNA, 25 bp, Homo sapien
tccagaaggaagatcaacactcaat

SEQ ID NO: 2284792 - DNA, 25 bp, Homo sapien
tcctctggtggtcaagagaggctgt

SEQ ID NO: 2284793 - DNA, 25 bp, Homo sapien
caaacttgagggtaaacggtccatg

SEQ ID NO: 2284794 - DNA, 25 bp, Homo sapien
gaaatggcagcacagctggtgatca

SEQ ID NO: 2284795 - DNA, 25 bp, Homo sapien
ctgttggaagaaatggcagcacagc

SEQ ID NO: 2284796 - DNA, 25 bp, Homo sapien
aaatggcagcacagctggtgatcat

SEQ ID NO: 2284797 - DNA, 25 bp, Homo sapien
gaagaaatggcagcacagctggtga

SEQ ID NO: 2284798 - DNA, 25 bp, Homo sapien
ttcaggaacacagcaaagatatcca

SEQ ID NO: 2284799 - DNA, 25 bp, Homo sapien
gcagagtttcaggaacacagcaaag

SEQ ID NO: 2284800 - DNA, 25 bp, Homo sapien
ctgcagagtttcaggaacacagcaa

SEQ ID NO: 2284801 - DNA, 25 bp, Homo sapien
aacacagcaaagatatccatggtca

SEQ ID NO: 2284802 - DNA, 25 bp, Homo sapien
atgaaaagtttcctgtgcatcctcc

SEQ ID NO: 2284803 - DNA, 25 bp, Homo sapien
tcttcagagctatatgcgtgacttc

SEQ ID NO: 2284804 - DNA, 25 bp, Homo sapien
caactcttcagagctatatgcgtga

SEQ ID NO: 2284805 - DNA, 25 bp, Homo sapien
gagctatatgcgtgacttccagcat

SEQ ID NO: 2284806 - DNA, 25 bp, Homo sapien
taggtactgcgtgtttcttgaatga

SEQ ID NO: 2284807 - DNA, 25 bp, Homo sapien
actcccagtacctggacaccttagg

SEQ ID NO: 2284808 - DNA, 25 bp, Homo sapien
gccaaggcagaaacattcggagagt

SEQ ID NO: 2284809 - DNA, 25 bp, Homo sapien
tgagttgcattggatgccaaggcag

SEQ ID NO: 2284810 - DNA, 25 bp, Homo sapien
cccttttgggtctatctgaacactt

SEQ ID NO: 2284811 - DNA, 25 bp, Homo sapien
aatccataccagtgtaccagctcaa

SEQ ID NO: 2284812 - DNA, 25 bp, Homo sapien
tccaggccccttttgggtctatctg

SEQ ID NO: 2284813 - DNA, 25 bp, Homo sapien
tgtaccagctcaagcctgagttcca

SEQ ID NO: 2284814 - DNA, 25 bp, Homo sapien
tcctcatccccaggttatctttgca

SEQ ID NO: 2284815 - DNA, 25 bp, Homo sapien
ttaatgtaggctttaggagggaagc

SEQ ID NO: 2284816 - DNA, 25 bp, Homo sapien
tggccacagagggacaacccttgga

SEQ ID NO: 2284817 - DNA, 25 bp, Homo sapien
taatggctgttggactgtccttggc

SEQ ID NO: 2284818 - DNA, 25 bp, Homo sapien
cccaaagatccaggtccagattaat

SEQ ID NO: 2284819 - DNA, 25 bp, Homo sapien
gacttggttaccatggacataaggc

SEQ ID NO: 2284820 - DNA, 25 bp, Homo sapien
gacataaggcaaaacacaaggtttc

SEQ ID NO: 2284821 - DNA, 25 bp, Homo sapien
tggacataaggcaaaacacaaggtt

SEQ ID NO: 2284822 - DNA, 25 bp, Homo sapien
ccatggacataaggcaaaacacaag

SEQ ID NO: 2284823 - DNA, 25 bp, Homo sapien
aagtttcctctgctggtgtactggg

SEQ ID NO: 2284824 - DNA, 25 bp, Homo sapien
cgaggttataagtttcctctgctgg

SEQ ID NO: 2284825 - DNA, 25 bp, Homo sapien
ttataagtttcctctgctggtgtac

SEQ ID NO: 2284826 - DNA, 25 bp, Homo sapien
ctcccgaggttataagtttcctctg

SEQ ID NO: 2284827 - DNA, 25 bp, Homo sapien
agcagccctggtccgctcttctgga

SEQ ID NO: 2284828 - DNA, 25 bp, Homo sapien
gtcccagcgacagaggcgctctgag

SEQ ID NO: 2284829 - DNA, 25 bp, Homo sapien
aagggtcccagcgacagaggcgctc

SEQ ID NO: 2284830 - DNA, 25 bp, Homo sapien
gctcttctggaagtatgtgaccgca

SEQ ID NO: 2284831 - DNA, 25 bp, Homo sapien
tctgtatccactttgagccaaaagt

SEQ ID NO: 2284832 - DNA, 25 bp, Homo sapien
gagaagttttgctgagagtccccac

SEQ ID NO: 2284833 - DNA, 25 bp, Homo sapien
tccccacagcgttgggagctgtcct

SEQ ID NO: 2284834 - DNA, 25 bp, Homo sapien
cagactccgtcctcaaaatacactt

SEQ ID NO: 2284835 - DNA, 25 bp, Homo sapien
tccctccacatcctagaacaagaac

SEQ ID NO: 2284836 - DNA, 25 bp, Homo sapien
acaagaacccggtcactgccaggca

SEQ ID NO: 2284837 - DNA, 25 bp, Homo sapien
tcactgccaggcacgattttagccc

SEQ ID NO: 2284838 - DNA, 25 bp, Homo sapien
aggcacgattttagccccatcccat

SEQ ID NO: 2284839 - DNA, 25 bp, Homo sapien
ccagcgagcagagtaacagttcaag

SEQ ID NO: 2284840 - DNA, 25 bp, Homo sapien
aagtgaatagggaagcaaacaggca

SEQ ID NO: 2284841 - DNA, 25 bp, Homo sapien
ggccagttcccgatgtcatttccaa

SEQ ID NO: 2284842 - DNA, 25 bp, Homo sapien
caatcggaatcaaaacggaggaggt

SEQ ID NO: 2284843 - DNA, 25 bp, Homo sapien
cagggcgccagacaggatgtcctgc

SEQ ID NO: 2284844 - DNA, 25 bp, Homo sapien
agggcgccagacaggatgtcctgca

SEQ ID NO: 2284845 - DNA, 25 bp, Homo sapien
ggcgccagacaggatgtcctgcagc

SEQ ID NO: 2284846 - DNA, 25 bp, Homo sapien
gccagacaggatgtcctgcagcccc

SEQ ID NO: 2284847 - DNA, 25 bp, Homo sapien
ttccccggtcttcaacgtgtctctc

SEQ ID NO: 2284848 - DNA, 25 bp, Homo sapien
gtgggtctggcactacctgaaatcc

SEQ ID NO: 2284849 - DNA, 25 bp, Homo sapien
tccctgtgggtctggcactacctga

SEQ ID NO: 2284850 - DNA, 25 bp, Homo sapien
ccggtcttcaacgtgtctctctcca

SEQ ID NO: 2284851 - DNA, 25 bp, Homo sapien
caagttcaacttccgaaagcaagaa

SEQ ID NO: 2284852 - DNA, 25 bp, Homo sapien
gacagggtgttgtttcattgctcag

SEQ ID NO: 2284853 - DNA, 25 bp, Homo sapien
agacaagtgtctcgcctgtggttac

SEQ ID NO: 2284854 - DNA, 25 bp, Homo sapien
aagcaagaagacaagtgtctcgcct

SEQ ID NO: 2284855 - DNA, 25 bp, Homo sapien
catctgagctggcaccctttacgtt

SEQ ID NO: 2284856 - DNA, 25 bp, Homo sapien
tcttttattcctagtgccgagtgaa

SEQ ID NO: 2284857 - DNA, 25 bp, Homo sapien
agtgaatgctcatggctgagggtaa

SEQ ID NO: 2284858 - DNA, 25 bp, Homo sapien
cctgattctgttcctggtgaatgct

SEQ ID NO: 2284859 - DNA, 25 bp, Homo sapien
ggattagcatgagggctgaaggcct

SEQ ID NO: 2284860 - DNA, 25 bp, Homo sapien
gattagcatgagggctgaaggcctg

SEQ ID NO: 2284861 - DNA, 25 bp, Homo sapien
cacgcagggtggcacgaaagccttt

SEQ ID NO: 2284862 - DNA, 25 bp, Homo sapien
ggcgtagccgcttctggtcaactga

SEQ ID NO: 2284863 - DNA, 25 bp, Homo sapien
tttctgtcctctgcgcaagtcggga

SEQ ID NO: 2284864 - DNA, 25 bp, Homo sapien
tccttcctaagacaccacgcagggt

SEQ ID NO: 2284865 - DNA, 25 bp, Homo sapien
tcataacacagtcctgagattactg

SEQ ID NO: 2284866 - DNA, 25 bp, Homo sapien
gattactgctagacactccctgtct

SEQ ID NO: 2284867 - DNA, 25 bp, Homo sapien
gagattactgctagacactccctgt

SEQ ID NO: 2284868 - DNA, 25 bp, Homo sapien
ctgagattactgctagacactccct

SEQ ID NO: 2284869 - DNA, 25 bp, Homo sapien
gaattatagaatctcaggactgaag

SEQ ID NO: 2284870 - DNA, 25 bp, Homo sapien
ggagagctcactacctaccaggatc

SEQ ID NO: 2284871 - DNA, 25 bp, Homo sapien
tacgtccgagtgtgctctttgcaac

SEQ ID NO: 2284872 - DNA, 25 bp, Homo sapien
taccaggatcccttccccgattaga

SEQ ID NO: 2284873 - DNA, 25 bp, Homo sapien
cgactcagctttcccacacgtgtgg

SEQ ID NO: 2284874 - DNA, 25 bp, Homo sapien
taggctactaatatgatcctgggcg

SEQ ID NO: 2284875 - DNA, 25 bp, Homo sapien
caaaaacggttactgtcagattcaa

SEQ ID NO: 2284876 - DNA, 25 bp, Homo sapien
tcagattcaataagacgactcagct

SEQ ID NO: 2284877 - DNA, 25 bp, Homo sapien
tggtaacttgtgagcaaagagagtt

SEQ ID NO: 2284878 - DNA, 25 bp, Homo sapien
ttttttggtaacttgtgagcaaaga

SEQ ID NO: 2284879 - DNA, 25 bp, Homo sapien
ttttggtaacttgtgagcaaagaga

SEQ ID NO: 2284880 - DNA, 25 bp, Homo sapien
ttggtaacttgtgagcaaagagagt

SEQ ID NO: 2284881 - DNA, 25 bp, Homo sapien
aacaaatagcataataacagtagcg

SEQ ID NO: 2284882 - DNA, 25 bp, Homo sapien
attggcaatggtgctaacaaatagc

SEQ ID NO: 2284883 - DNA, 25 bp, Homo sapien
ggcaatggtgctaacaaatagcata

SEQ ID NO: 2284884 - DNA, 25 bp, Homo sapien
aataacagtagcgatgtggaccaca

SEQ ID NO: 2284885 - DNA, 25 bp, Homo sapien
gaagttcggctccagccacataggt

SEQ ID NO: 2284886 - DNA, 25 bp, Homo sapien
tttgctagcactcccacctgaatgc

SEQ ID NO: 2284887 - DNA, 25 bp, Homo sapien
acataggtgtgtgtcctccttatcc

SEQ ID NO: 2284888 - DNA, 25 bp, Homo sapien
cagtggcactgggttaatcttgcaa

SEQ ID NO: 2284889 - DNA, 25 bp, Homo sapien
tccaaagacctactgatgcatctac

SEQ ID NO: 2284890 - DNA, 25 bp, Homo sapien
tctaccgtattggaaaccaaccaga

SEQ ID NO: 2284891 - DNA, 25 bp, Homo sapien
tactgatgcatctaccgtattggaa

SEQ ID NO: 2284892 - DNA, 25 bp, Homo sapien
gcagctaatgttggtacagtttttc

SEQ ID NO: 2284893 - DNA, 25 bp, Homo sapien
tattgtcagcactgggtcaatatct

SEQ ID NO: 2284894 - DNA, 25 bp, Homo sapien
cagcactgggtcaatatctttatat

SEQ ID NO: 2284895 - DNA, 25 bp, Homo sapien
tgtcagcactgggtcaatatcttta

SEQ ID NO: 2284896 - DNA, 25 bp, Homo sapien
ctattgtcagcactgggtcaatatc

SEQ ID NO: 2284897 - DNA, 25 bp, Homo sapien
tgtagacacaggacgaggagaacaa

SEQ ID NO: 2284898 - DNA, 25 bp, Homo sapien
ggtcactccaggggctgaacattcc

SEQ ID NO: 2284899 - DNA, 25 bp, Homo sapien
ctgtagacacaggacgaggagaaca

SEQ ID NO: 2284900 - DNA, 25 bp, Homo sapien
tccaggggctgaacattccctgacc

SEQ ID NO: 2284901 - DNA, 25 bp, Homo sapien
ggaacacgaagaccaggagggcaat

SEQ ID NO: 2284902 - DNA, 25 bp, Homo sapien
tgacacagaagatgatagagagaat

SEQ ID NO: 2284903 - DNA, 25 bp, Homo sapien
tgaagagctggaacacgaagaccag

SEQ ID NO: 2284904 - DNA, 25 bp, Homo sapien
aaggcctgcactgtcttgagggcat

SEQ ID NO: 2284905 - DNA, 25 bp, Homo sapien
tgtggtggcccctgagaggaagaac

SEQ ID NO: 2284906 - DNA, 25 bp, Homo sapien
gtgtggtggcccctgagaggaagaa

SEQ ID NO: 2284907 - DNA, 25 bp, Homo sapien
agcacaccagtgtggtggcccctga

SEQ ID NO: 2284908 - DNA, 25 bp, Homo sapien
acaccagtgtggtggcccctgagag

SEQ ID NO: 2284909 - DNA, 25 bp, Homo sapien
caagttgccagaaacacccatggta

SEQ ID NO: 2284910 - DNA, 25 bp, Homo sapien
cctgggccaagctcgacggtatgtt

SEQ ID NO: 2284911 - DNA, 25 bp, Homo sapien
tctaggaaagctactcagggatgca

SEQ ID NO: 2284912 - DNA, 25 bp, Homo sapien
aacaggagttctgatggatgtcccc

SEQ ID NO: 2284913 - DNA, 25 bp, Homo sapien
tctcaggaccagatagagaacgccg

SEQ ID NO: 2284914 - DNA, 25 bp, Homo sapien
aatgactagtgtagatggacacccc

SEQ ID NO: 2284915 - DNA, 25 bp, Homo sapien
gatactgcgttccatcacgattcgc

SEQ ID NO: 2284916 - DNA, 25 bp, Homo sapien
taggaatagccgtggtgatactgcg

SEQ ID NO: 2284917 - DNA, 25 bp, Homo sapien
tgtatagaggtgctcctgcggcagc

SEQ ID NO: 2284918 - DNA, 25 bp, Homo sapien
tatcatggctgaaatacggtaggct

SEQ ID NO: 2284919 - DNA, 25 bp, Homo sapien
tcaagggagcatcaaagtactagcc

SEQ ID NO: 2284920 - DNA, 25 bp, Homo sapien
gcaagaggcctagcaaagaccatgg

SEQ ID NO: 2284921 - DNA, 25 bp, Homo sapien
tatgtttgcacacacacgcgaatct

SEQ ID NO: 2284922 - DNA, 25 bp, Homo sapien
tcatgtaggcctctaagaaagcatc

SEQ ID NO: 2284923 - DNA, 25 bp, Homo sapien
tggagaattctgactaatgcacccc

SEQ ID NO: 2284924 - DNA, 25 bp, Homo sapien
tattgtattggtgctgacacgacac

SEQ ID NO: 2284925 - DNA, 25 bp, Homo sapien
tataggtcttgatggtcatgtcccc

SEQ ID NO: 2284926 - DNA, 25 bp, Homo sapien
gacatcagcataaagcacaggttgg

SEQ ID NO: 2284927 - DNA, 25 bp, Homo sapien
ggcaactttcagacccgcactgtag

SEQ ID NO: 2284928 - DNA, 25 bp, Homo sapien
taaagtccctcatgtgccaagtgta

SEQ ID NO: 2284929 - DNA, 25 bp, Homo sapien
catttgcagggcaacagagggttcc

SEQ ID NO: 2284930 - DNA, 25 bp, Homo sapien
gctgtaatgcaaccgtgtcttctga

SEQ ID NO: 2284931 - DNA, 25 bp, Homo sapien
tccagacagagtcatactgaatgcc

SEQ ID NO: 2284932 - DNA, 25 bp, Homo sapien
caaatgcttagcatggccagcaaaa

SEQ ID NO: 2284933 - DNA, 25 bp, Homo sapien
gacgtccagggtaaggtcaagagaa

SEQ ID NO: 2284934 - DNA, 25 bp, Homo sapien
ccagaaattaggagccacgcacgtt

SEQ ID NO: 2284935 - DNA, 25 bp, Homo sapien
taatgcccaaaagcctgtaaatgtc

SEQ ID NO: 2284936 - DNA, 25 bp, Homo sapien
gagaatgaccggctgaaatgaacct

SEQ ID NO: 2284937 - DNA, 25 bp, Homo sapien
gcactccgtgtctctcatggtggga

SEQ ID NO: 2284938 - DNA, 25 bp, Homo sapien
tctcagatgtgtgggccggagtacc

SEQ ID NO: 2284939 - DNA, 25 bp, Homo sapien
tccctgggcctgtcaaatagagagt

SEQ ID NO: 2284940 - DNA, 25 bp, Homo sapien
cacccttagatcaggcgggaggcct

SEQ ID NO: 2284941 - DNA, 25 bp, Homo sapien
tatttctgatagaccgcctctgaac

SEQ ID NO: 2284942 - DNA, 25 bp, Homo sapien
cacttatcatgtgcaagttggaacg

SEQ ID NO: 2284943 - DNA, 25 bp, Homo sapien
tctgaactcttgtagcgggaaatgg

SEQ ID NO: 2284944 - DNA, 25 bp, Homo sapien
ttggaacgcaatgcccagtttgaag

SEQ ID NO: 2284945 - DNA, 25 bp, Homo sapien
taagacagaaagcgggtgtctcctc

SEQ ID NO: 2284946 - DNA, 25 bp, Homo sapien
gacagaaagcgggtgtctcctccca

SEQ ID NO: 2284947 - DNA, 25 bp, Homo sapien
cttaagacagaaagcgggtgtctcc

SEQ ID NO: 2284948 - DNA, 25 bp, Homo sapien
acagaaagcgggtgtctcctcccac

SEQ ID NO: 2284949 - DNA, 25 bp, Homo sapien
gctcctggtctagctcggtagcagc

SEQ ID NO: 2284950 - DNA, 25 bp, Homo sapien
acttcctggctattcgcacaatgag

SEQ ID NO: 2284951 - DNA, 25 bp, Homo sapien
ggaggatcctccattcttatgcaaa

SEQ ID NO: 2284952 - DNA, 25 bp, Homo sapien
atgagcactcagtgatccaggcccc

SEQ ID NO: 2284953 - DNA, 25 bp, Homo sapien
cccagagcctaaataggcacggaag

SEQ ID NO: 2284954 - DNA, 25 bp, Homo sapien
cctaaataggcacggaaggcaagga

SEQ ID NO: 2284955 - DNA, 25 bp, Homo sapien
agtcctctgggtgaataatatgggc

SEQ ID NO: 2284956 - DNA, 25 bp, Homo sapien
tatgggcacgcctggttgctcccag

SEQ ID NO: 2284957 - DNA, 25 bp, Homo sapien
tcaaagacctcatggcaaagccagg

SEQ ID NO: 2284958 - DNA, 25 bp, Homo sapien
tcaaagcttggcaagtgagcccacg

SEQ ID NO: 2284959 - DNA, 25 bp, Homo sapien
cacgacggaagaactcaaaggcctc

SEQ ID NO: 2284960 - DNA, 25 bp, Homo sapien
tcttcacgtggcgttgaccaaggcc

SEQ ID NO: 2284961 - DNA, 25 bp, Homo sapien
tgagaaagtcataggccaaggaaga

SEQ ID NO: 2284962 - DNA, 25 bp, Homo sapien
ggtgagaaagtcataggccaaggaa

SEQ ID NO: 2284963 - DNA, 25 bp, Homo sapien
gagaaagtcataggccaaggaagaa

SEQ ID NO: 2284964 - DNA, 25 bp, Homo sapien
gaggtgagaaagtcataggccaagg

SEQ ID NO: 2284965 - DNA, 25 bp, Homo sapien
caagggcatgtctggtgaggtacca

SEQ ID NO: 2284966 - DNA, 25 bp, Homo sapien
gatatacggtgatatgcagccccag

SEQ ID NO: 2284967 - DNA, 25 bp, Homo sapien
agtggtcagggcactgctcctgggc

SEQ ID NO: 2284968 - DNA, 25 bp, Homo sapien
tgaggtaccacgcagcagtggtcag

SEQ ID NO: 2284969 - DNA, 25 bp, Homo sapien
cccagggcataattgtagagcagag

SEQ ID NO: 2284970 - DNA, 25 bp, Homo sapien
ccagggcataattgtagagcagagc

SEQ ID NO: 2284971 - DNA, 25 bp, Homo sapien
tgagtgctccgcaaccctttgggtt

SEQ ID NO: 2284972 - DNA, 25 bp, Homo sapien
catgacatggtctggaatgaggagc

SEQ ID NO: 2284973 - DNA, 25 bp, Homo sapien
agaaggtgacatggccatctgaatg

SEQ ID NO: 2284974 - DNA, 25 bp, Homo sapien
tttccagtgtgcgttggcagagaag

SEQ ID NO: 2284975 - DNA, 25 bp, Homo sapien
cgccccgtacagctgcacacacttc

SEQ ID NO: 2284976 - DNA, 25 bp, Homo sapien
ttcaccaattcccagcatgtcctct

SEQ ID NO: 2284977 - DNA, 25 bp, Homo sapien
aggactcgcggaggcaggatcacat

SEQ ID NO: 2284978 - DNA, 25 bp, Homo sapien
gtcacaagagcctcagtggaccatg

SEQ ID NO: 2284979 - DNA, 25 bp, Homo sapien
gtggaccatgctcctgaagacatct

SEQ ID NO: 2284980 - DNA, 25 bp, Homo sapien
cagctcggtgcaagagtaaagagag

SEQ ID NO: 2284981 - DNA, 25 bp, Homo sapien
gagcagctcggtgcaagagtaaaga

SEQ ID NO: 2284982 - DNA, 25 bp, Homo sapien
aaagagagagcatatccccgcagca

SEQ ID NO: 2284983 - DNA, 25 bp, Homo sapien
acatggggctgcttcggagaaggag

SEQ ID NO: 2284984 - DNA, 25 bp, Homo sapien
ggaggacaaaactgatttgcaatta

SEQ ID NO: 2284985 - DNA, 25 bp, Homo sapien
aggacaaaactgatttgcaattaag

SEQ ID NO: 2284986 - DNA, 25 bp, Homo sapien
ctggaggacaaaactgatttgcaat

SEQ ID NO: 2284987 - DNA, 25 bp, Homo sapien
tcttctggaggacaaaactgatttg

SEQ ID NO: 2284988 - DNA, 25 bp, Homo sapien
gcggagcttcaaaatcgaatgggcc

SEQ ID NO: 2284989 - DNA, 25 bp, Homo sapien
tggcccggctctagtggcccgaaaa

SEQ ID NO: 2284990 - DNA, 25 bp, Homo sapien
tcgctgcacttcgttgagcactgtg

SEQ ID NO: 2284991 - DNA, 25 bp, Homo sapien
taatatgtacaggagaccggcttgc

SEQ ID NO: 2284992 - DNA, 25 bp, Homo sapien
cccacgcgtgtgcagggacagagct

SEQ ID NO: 2284993 - DNA, 25 bp, Homo sapien
ggacagagctgccacttggcttcta

SEQ ID NO: 2284994 - DNA, 25 bp, Homo sapien
ttctaggggcctgtgttgtcgaggg

SEQ ID NO: 2284995 - DNA, 25 bp, Homo sapien
tggggagtgcccacgcgtgtgcagg

SEQ ID NO: 2284996 - DNA, 25 bp, Homo sapien
ctcactggaattgtatttgcattct

SEQ ID NO: 2284997 - DNA, 25 bp, Homo sapien
cccaaagcttgtactttctcctttg

SEQ ID NO: 2284998 - DNA, 25 bp, Homo sapien
ctcaccaacccaaagcttgtacttt

SEQ ID NO: 2284999 - DNA, 25 bp, Homo sapien
aattgtatttgcattctttgggttc

SEQ ID NO: 2285000 - DNA, 25 bp, Homo sapien
agtccacacagtcccacctctgtca

SEQ ID NO: 2285001 - DNA, 25 bp, Homo sapien
ccaacaacccagtccacacagtccc

SEQ ID NO: 2285002 - DNA, 25 bp, Homo sapien
gaagattcagctcggggccccaaca

SEQ ID NO: 2285003 - DNA, 25 bp, Homo sapien
ttgaagattcagctcggggccccaa

SEQ ID NO: 2285004 - DNA, 25 bp, Homo sapien
acagctgccagaccgcggtgaacaa

SEQ ID NO: 2285005 - DNA, 25 bp, Homo sapien
tcctccatagttcctcccactgtaa

SEQ ID NO: 2285006 - DNA, 25 bp, Homo sapien
cagaccgcggtgaacaaggaccaga

SEQ ID NO: 2285007 - DNA, 25 bp, Homo sapien
ttttctgtagtggatcctccatagt

SEQ ID NO: 2285008 - DNA, 25 bp, Homo sapien
tcaaactgaggagatgattccataa

SEQ ID NO: 2285009 - DNA, 25 bp, Homo sapien
actggaaaacagtagcgattgccag

SEQ ID NO: 2285010 - DNA, 25 bp, Homo sapien
tagcgattgccagagacagcaactt

SEQ ID NO: 2285011 - DNA, 25 bp, Homo sapien
aacttcagatccctcgggcatggag

SEQ ID NO: 2285012 - DNA, 25 bp, Homo sapien
tttgcatctggcatctgagtctgcc

SEQ ID NO: 2285013 - DNA, 25 bp, Homo sapien
gcatctggcatctgagtctgcctca

SEQ ID NO: 2285014 - DNA, 25 bp, Homo sapien
ctttgcatctggcatctgagtctgc

SEQ ID NO: 2285015 - DNA, 25 bp, Homo sapien
tctggcatctgagtctgcctcacct

SEQ ID NO: 2285016 - DNA, 25 bp, Homo sapien
ggaaaagtccaagatcccctgtgtc

SEQ ID NO: 2285017 - DNA, 25 bp, Homo sapien
cgtgtgacagattgggggtggcaga

SEQ ID NO: 2285018 - DNA, 25 bp, Homo sapien
tcaagccccctttggggattgtgga

SEQ ID NO: 2285019 - DNA, 25 bp, Homo sapien
cagaaaggaaagctgcgggttccca

SEQ ID NO: 2285020 - DNA, 25 bp, Homo sapien
tctctaaaagaatctcgtacattaa

SEQ ID NO: 2285021 - DNA, 25 bp, Homo sapien
cttctctaaaagaatctcgtacatt

SEQ ID NO: 2285022 - DNA, 25 bp, Homo sapien
agatttctaccctcatctgcctaga

SEQ ID NO: 2285023 - DNA, 25 bp, Homo sapien
gcctagagtgaccatggacattcct

SEQ ID NO: 2285024 - DNA, 25 bp, Homo sapien
caccagcacccacttcagacactac

SEQ ID NO: 2285025 - DNA, 25 bp, Homo sapien
aaaatcctggccttatgtgccgtac

SEQ ID NO: 2285026 - DNA, 25 bp, Homo sapien
caaccccaaaatcctggccttatgt

SEQ ID NO: 2285027 - DNA, 25 bp, Homo sapien
ccaaaatcctggccttatgtgccgt

SEQ ID NO: 2285028 - DNA, 25 bp, Homo sapien
accccaaaatcctggccttatgtgc

SEQ ID NO: 2285029 - DNA, 25 bp, Homo sapien
cgggtactgctatgttgtgcttctc

SEQ ID NO: 2285030 - DNA, 25 bp, Homo sapien
tggacgggtactgctatgttgtgct

SEQ ID NO: 2285031 - DNA, 25 bp, Homo sapien
gacgggtactgctatgttgtgcttc

SEQ ID NO: 2285032 - DNA, 25 bp, Homo sapien
ggacgggtactgctatgttgtgctt

SEQ ID NO: 2285033 - DNA, 25 bp, Homo sapien
tcccctgctggtccttttaatgcca

SEQ ID NO: 2285034 - DNA, 25 bp, Homo sapien
tgccaaagggctcttgactatgtga

SEQ ID NO: 2285035 - DNA, 25 bp, Homo sapien
tcttgactatgtgaatgcactgaac

SEQ ID NO: 2285036 - DNA, 25 bp, Homo sapien
agatgccgtcccctgctggtccttt

SEQ ID NO: 2285037 - DNA, 25 bp, Homo sapien
catgaagaccaaaagcaccaagtac

SEQ ID NO: 2285038 - DNA, 25 bp, Homo sapien
aagaggcagaaattgacccaaaagg

SEQ ID NO: 2285039 - DNA, 25 bp, Homo sapien
tccaaggataataagaggcagaaat

SEQ ID NO: 2285040 - DNA, 25 bp, Homo sapien
gaggcagaaattgacccaaaaggaa

SEQ ID NO: 2285041 - DNA, 25 bp, Homo sapien
tcccactgtccaaggataataagag

SEQ ID NO: 2285042 - DNA, 25 bp, Homo sapien
ttgggaagaacaatgtggctgacac

SEQ ID NO: 2285043 - DNA, 25 bp, Homo sapien
tctgggcagtattggctccagtact

SEQ ID NO: 2285044 - DNA, 25 bp, Homo sapien
tccagtactccacaggactaagctc

SEQ ID NO: 2285045 - DNA, 25 bp, Homo sapien
caatgtggctgacactctgggcagt

SEQ ID NO: 2285046 - DNA, 25 bp, Homo sapien
tcccgcagcctttgattgttctcac

SEQ ID NO: 2285047 - DNA, 25 bp, Homo sapien
tattcccgcagcctttgattgttct

SEQ ID NO: 2285048 - DNA, 25 bp, Homo sapien
ttattcccgcagcctttgattgttc

SEQ ID NO: 2285049 - DNA, 25 bp, Homo sapien
ttcccgcagcctttgattgttctca

SEQ ID NO: 2285050 - DNA, 25 bp, Homo sapien
cagtgaaaatgagagtattggtttt

SEQ ID NO: 2285051 - DNA, 25 bp, Homo sapien
tacagtgaaaatgagagtattggtt

SEQ ID NO: 2285052 - DNA, 25 bp, Homo sapien
gtgaaaatgagagtattggttttcc

SEQ ID NO: 2285053 - DNA, 25 bp, Homo sapien
gaaaatgagagtattggttttccat

SEQ ID NO: 2285054 - DNA, 25 bp, Homo sapien
catgggcccggagtctgaagatttt

SEQ ID NO: 2285055 - DNA, 25 bp, Homo sapien
cccatgggcccggagtctgaagatt

SEQ ID NO: 2285056 - DNA, 25 bp, Homo sapien
tgggcccggagtctgaagattttca

SEQ ID NO: 2285057 - DNA, 25 bp, Homo sapien
gcccggagtctgaagattttcatac

SEQ ID NO: 2285058 - DNA, 25 bp, Homo sapien
gacggaggcttgcctccttttcttg

SEQ ID NO: 2285059 - DNA, 25 bp, Homo sapien
aggacggaggcttgcctccttttct

SEQ ID NO: 2285060 - DNA, 25 bp, Homo sapien
tagtccctggtcagtgctcagacgg

SEQ ID NO: 2285061 - DNA, 25 bp, Homo sapien
tacaggcatggctctatgggcagtg

SEQ ID NO: 2285062 - DNA, 25 bp, Homo sapien
taaaattgcaatcgcagtgtggctg

SEQ ID NO: 2285063 - DNA, 25 bp, Homo sapien
gggaaattgcctcgcttctgtctag

SEQ ID NO: 2285064 - DNA, 25 bp, Homo sapien
cgatgtctcgctgggctcaagttgt

SEQ ID NO: 2285065 - DNA, 25 bp, Homo sapien
taagctctagcaagtcacccgatgt

SEQ ID NO: 2285066 - DNA, 25 bp, Homo sapien
taaaggagagatggcaccctcaata

SEQ ID NO: 2285067 - DNA, 25 bp, Homo sapien
gcctgctgcatagaactattgtgga

SEQ ID NO: 2285068 - DNA, 25 bp, Homo sapien
gattctgaagtacctaggcagactg

SEQ ID NO: 2285069 - DNA, 25 bp, Homo sapien
tgagggtctattactatccaggcac

SEQ ID NO: 2285070 - DNA, 25 bp, Homo sapien
gagactcaggataccaacagtgatg

SEQ ID NO: 2285071 - DNA, 25 bp, Homo sapien
tatgaatatgcgaagggtactctgg

SEQ ID NO: 2285072 - DNA, 25 bp, Homo sapien
gatggctttcaccacttcaggcctg

SEQ ID NO: 2285073 - DNA, 25 bp, Homo sapien
catgatggctttcaccacttcaggc

SEQ ID NO: 2285074 - DNA, 25 bp, Homo sapien
ggctttcaccacttcaggcctgctg

SEQ ID NO: 2285075 - DNA, 25 bp, Homo sapien
tgatggctttcaccacttcaggcct

SEQ ID NO: 2285076 - DNA, 25 bp, Homo sapien
ctaagagccagctgagttaatattt

SEQ ID NO: 2285077 - DNA, 25 bp, Homo sapien
taagagccagctgagttaatatttg

SEQ ID NO: 2285078 - DNA, 25 bp, Homo sapien
aagagccagctgagttaatatttgc

SEQ ID NO: 2285079 - DNA, 25 bp, Homo sapien
taaactgcatccattcgaagggaac

SEQ ID NO: 2285080 - DNA, 25 bp, Homo sapien
tggattccctcattagcagctgcta

SEQ ID NO: 2285081 - DNA, 25 bp, Homo sapien
gtaattgataccgtaatcccctgga

SEQ ID NO: 2285082 - DNA, 25 bp, Homo sapien
gctgctaatggctggtgtgttaacc

SEQ ID NO: 2285083 - DNA, 25 bp, Homo sapien
caaatataaatggactaaattctgc

SEQ ID NO: 2285084 - DNA, 25 bp, Homo sapien
acttcaaatataaatggactaaatt

SEQ ID NO: 2285085 - DNA, 25 bp, Homo sapien
aattaaaagacacagactggcaagt

SEQ ID NO: 2285086 - DNA, 25 bp, Homo sapien
tcaaatataaatggactaaattctg

SEQ ID NO: 2285087 - DNA, 25 bp, Homo sapien
gggatgatggtgtgactcccagcat

SEQ ID NO: 2285088 - DNA, 25 bp, Homo sapien
atggggatgatggtgtgactcccag

SEQ ID NO: 2285089 - DNA, 25 bp, Homo sapien
caggtgctcagggatgtttttgatg

SEQ ID NO: 2285090 - DNA, 25 bp, Homo sapien
ggtgctcagggatgtttttgatggg

SEQ ID NO: 2285091 - DNA, 25 bp, Homo sapien
ctgtcaaagcaccttcatacccacg

SEQ ID NO: 2285092 - DNA, 25 bp, Homo sapien
ttcatacccacgatctccagtgagc

SEQ ID NO: 2285093 - DNA, 25 bp, Homo sapien
ccttcatacccacgatctccagtga

SEQ ID NO: 2285094 - DNA, 25 bp, Homo sapien
gtcaaagcaccttcatacccacgat

SEQ ID NO: 2285095 - DNA, 25 bp, Homo sapien
caagataaccaagccttgatcctgg

SEQ ID NO: 2285096 - DNA, 25 bp, Homo sapien
tccctcctggaagagtcgaatctca

SEQ ID NO: 2285097 - DNA, 25 bp, Homo sapien
gcagttctgtgcttagtgccaccaa

SEQ ID NO: 2285098 - DNA, 25 bp, Homo sapien
tgcaatggcattccacggctatgtg

SEQ ID NO: 2285099 - DNA, 25 bp, Homo sapien
gaaaggataagatgaacctgaaaca

SEQ ID NO: 2285100 - DNA, 25 bp, Homo sapien
gtgcacagaacccagattataattt

SEQ ID NO: 2285101 - DNA, 25 bp, Homo sapien
aatataccagtagcactaagtgtgc

SEQ ID NO: 2285102 - DNA, 25 bp, Homo sapien
tctgtctccaagaaagcctagaaac

SEQ ID NO: 2285103 - DNA, 25 bp, Homo sapien
tgggctacagcccatctccagagct

SEQ ID NO: 2285104 - DNA, 25 bp, Homo sapien
tgtccatcgcctgacatctgggcta

SEQ ID NO: 2285105 - DNA, 25 bp, Homo sapien
tggaaaaggacatgccccttggaca

SEQ ID NO: 2285106 - DNA, 25 bp, Homo sapien
caaggaaggtggtgtatttggagac

SEQ ID NO: 2285107 - DNA, 25 bp, Homo sapien
tccagcttctgattatatagagttt

SEQ ID NO: 2285108 - DNA, 25 bp, Homo sapien
aaatgcaaacatcactgagcaaatc

SEQ ID NO: 2285109 - DNA, 25 bp, Homo sapien
gacacaggcttcatgcatgtccttg

SEQ ID NO: 2285110 - DNA, 25 bp, Homo sapien
ttttcctttcgtcagccacattcac

SEQ ID NO: 2285111 - DNA, 25 bp, Homo sapien
caaggtctcattagatttgtcgtga

SEQ ID NO: 2285112 - DNA, 25 bp, Homo sapien
catgacaaaggtatggcttcctgaa

SEQ ID NO: 2285113 - DNA, 25 bp, Homo sapien
tgtcgtgaatgcgagggcgttccac

SEQ ID NO: 2285114 - DNA, 25 bp, Homo sapien
tgacaaaggtatggcttcctgaaag

SEQ ID NO: 2285115 - DNA, 25 bp, Homo sapien
gccatagctgagaaaacgccaagct

SEQ ID NO: 2285116 - DNA, 25 bp, Homo sapien
ctgaggcgtttttgagctgggtcca

SEQ ID NO: 2285117 - DNA, 25 bp, Homo sapien
gggccgatcacaaatgaagtccaag

SEQ ID NO: 2285118 - DNA, 25 bp, Homo sapien
gaagtccaagtgcatcgtgccatag

SEQ ID NO: 2285119 - DNA, 25 bp, Homo sapien
ctgaacagagctgccaataagaatc

SEQ ID NO: 2285120 - DNA, 25 bp, Homo sapien
tctatgtcttcacctgaacagagct

SEQ ID NO: 2285121 - DNA, 25 bp, Homo sapien
tgaacagagctgccaataagaatca

SEQ ID NO: 2285122 - DNA, 25 bp, Homo sapien
ttttctatgtcttcacctgaacaga

SEQ ID NO: 2285123 - DNA, 25 bp, Homo sapien
gcagatgtgcaaaatcattcaacac

SEQ ID NO: 2285124 - DNA, 25 bp, Homo sapien
acagatactactcaacttacactgg

SEQ ID NO: 2285125 - DNA, 25 bp, Homo sapien
gaaatacagatactactcaacttac

SEQ ID NO: 2285126 - DNA, 25 bp, Homo sapien
caaacataagtttacaatgggaaag

SEQ ID NO: 2285127 - DNA, 25 bp, Homo sapien
ttggagaaatttgctgagtttggca

SEQ ID NO: 2285128 - DNA, 25 bp, Homo sapien
tatgaatttctctttgtcaggcagc

SEQ ID NO: 2285129 - DNA, 25 bp, Homo sapien
gctgagtttggcaattttccactgt

SEQ ID NO: 2285130 - DNA, 25 bp, Homo sapien
gagaaatttgctgagtttggcaatt

SEQ ID NO: 2285131 - DNA, 25 bp, Homo sapien
ctcctgaattccgtctccctctgcc

SEQ ID NO: 2285132 - DNA, 25 bp, Homo sapien
ccaactcctgaattccgtctccctc

SEQ ID NO: 2285133 - DNA, 25 bp, Homo sapien
tcctgaattccgtctccctctgcct

SEQ ID NO: 2285134 - DNA, 25 bp, Homo sapien
ttccaactcctgaattccgtctccc

SEQ ID NO: 2285135 - DNA, 25 bp, Homo sapien
ctttgctgcaatcccattttccact

SEQ ID NO: 2285136 - DNA, 25 bp, Homo sapien
tttgctgcaatcccattttccactc

SEQ ID NO: 2285137 - DNA, 25 bp, Homo sapien
ggctgcccactgatcctgtggcctt

SEQ ID NO: 2285138 - DNA, 25 bp, Homo sapien
ctggcctttgacttgtctggatata

SEQ ID NO: 2285139 - DNA, 25 bp, Homo sapien
gcctttgacttgtctggatatatct

SEQ ID NO: 2285140 - DNA, 25 bp, Homo sapien
ggcctttgacttgtctggatatatc

SEQ ID NO: 2285141 - DNA, 25 bp, Homo sapien
ctttgacttgtctggatatatcttt

SEQ ID NO: 2285142 - DNA, 25 bp, Homo sapien
gcacatcaccgcacagcctgttgtg

SEQ ID NO: 2285143 - DNA, 25 bp, Homo sapien
tgtgtagctctaagtctcaggtgtt

SEQ ID NO: 2285144 - DNA, 25 bp, Homo sapien
gtcgaaatcgatgttctgttgccca

SEQ ID NO: 2285145 - DNA, 25 bp, Homo sapien
tcagaattcggaagcactatgaagg

SEQ ID NO: 2285146 - DNA, 25 bp, Homo sapien
ggaacccattggttcaggcacttgc

SEQ ID NO: 2285147 - DNA, 25 bp, Homo sapien
ctgcagagcaggttggtgaatatca

SEQ ID NO: 2285148 - DNA, 25 bp, Homo sapien
gaggaacccattggttcaggcactt

SEQ ID NO: 2285149 - DNA, 25 bp, Homo sapien
atcaacattacccaattccaacaga

SEQ ID NO: 2285150 - DNA, 25 bp, Homo sapien
acttcttgcccggtagaggctggca

SEQ ID NO: 2285151 - DNA, 25 bp, Homo sapien
gctggcaagagtgaaaccatctgca

SEQ ID NO: 2285152 - DNA, 25 bp, Homo sapien
tgaaaccatctgcatagaacagagc

SEQ ID NO: 2285153 - DNA, 25 bp, Homo sapien
acaagtgccacttcttgcccggtag

SEQ ID NO: 2285154 - DNA, 25 bp, Homo sapien
ctaaatcaaaggtcaaaaactggtg

SEQ ID NO: 2285155 - DNA, 25 bp, Homo sapien
tcttttagatgtgcccacgagagca

SEQ ID NO: 2285156 - DNA, 25 bp, Homo sapien
cctggttgaccagtggacacctctg

SEQ ID NO: 2285157 - DNA, 25 bp, Homo sapien
ggaataattgtctgacatcacaggg

SEQ ID NO: 2285158 - DNA, 25 bp, Homo sapien
ttcatcaggacaacaaaaggtgggc

SEQ ID NO: 2285159 - DNA, 25 bp, Homo sapien
agaagaactctgtctcatggccaag

SEQ ID NO: 2285160 - DNA, 25 bp, Homo sapien
tgagctcatgtatggcagccctggc

SEQ ID NO: 2285161 - DNA, 25 bp, Homo sapien
cagggctaatccctagttccaggaa

SEQ ID NO: 2285162 - DNA, 25 bp, Homo sapien
tcctagtactggaaaggaccttcta

SEQ ID NO: 2285163 - DNA, 25 bp, Homo sapien
tctgggtggccatgattccaaaatg

SEQ ID NO: 2285164 - DNA, 25 bp, Homo sapien
atcccaagggtctttgcagttttca

SEQ ID NO: 2285165 - DNA, 25 bp, Homo sapien
tggtgaaatctacctggccattgcc

SEQ ID NO: 2285166 - DNA, 25 bp, Homo sapien
ggccattgccagtcaaacattctaa

SEQ ID NO: 2285167 - DNA, 25 bp, Homo sapien
gatgagtatttggagcatcttattc

SEQ ID NO: 2285168 - DNA, 25 bp, Homo sapien
tgtcttctgctacacctatattcat

SEQ ID NO: 2285169 - DNA, 25 bp, Homo sapien
gagtatttggagcatcttattcccc

SEQ ID NO: 2285170 - DNA, 25 bp, Homo sapien
caagatgaccactccctgtcttctg

SEQ ID NO: 2285171 - DNA, 25 bp, Homo sapien
gagtgtcattacagatacctggatc

SEQ ID NO: 2285172 - DNA, 25 bp, Homo sapien
tgagtgtcattacagatacctggat

SEQ ID NO: 2285173 - DNA, 25 bp, Homo sapien
gtgtcattacagatacctggatcat

SEQ ID NO: 2285174 - DNA, 25 bp, Homo sapien
atgagtgtcattacagatacctgga

SEQ ID NO: 2285175 - DNA, 25 bp, Homo sapien
tgctcctctaggataagtatattac

SEQ ID NO: 2285176 - DNA, 25 bp, Homo sapien
ggaatgcgaatttgttgagctgcct

SEQ ID NO: 2285177 - DNA, 25 bp, Homo sapien
aatgcgaatttgttgagctgcctgc

SEQ ID NO: 2285178 - DNA, 25 bp, Homo sapien
gcagtaagagattcatagtctctga

SEQ ID NO: 2285179 - DNA, 25 bp, Homo sapien
ctaggcttcttaaagcggacaggat

SEQ ID NO: 2285180 - DNA, 25 bp, Homo sapien
catgggccacgcagtaacaactgaa

SEQ ID NO: 2285181 - DNA, 25 bp, Homo sapien
ttcttaaagcggacaggatatgcac

SEQ ID NO: 2285182 - DNA, 25 bp, Homo sapien
tttgaactaagcataactgagatgg

SEQ ID NO: 2285183 - DNA, 25 bp, Homo sapien
aacatctttcatcacgaccctaact

SEQ ID NO: 2285184 - DNA, 25 bp, Homo sapien
agccgctaccacaatcgccttttgg

SEQ ID NO: 2285185 - DNA, 25 bp, Homo sapien
ctaactaaaatctgagttgcacacc

SEQ ID NO: 2285186 - DNA, 25 bp, Homo sapien
cacaatcgccttttggtgactgttt

SEQ ID NO: 2285187 - DNA, 25 bp, Homo sapien
ttgtaaagaccaaaacagacgatgt

SEQ ID NO: 2285188 - DNA, 25 bp, Homo sapien
tatgaattggaaagaaccttgacct

SEQ ID NO: 2285189 - DNA, 25 bp, Homo sapien
ggctcagtttgtaagctgaccctga

SEQ ID NO: 2285190 - DNA, 25 bp, Homo sapien
ccacagaggtggtgcttttactcag

SEQ ID NO: 2285191 - DNA, 25 bp, Homo sapien
gggagtggtctgtttgagtggttcc

SEQ ID NO: 2285192 - DNA, 25 bp, Homo sapien
cagcagttcagcatcgctgctgagc

SEQ ID NO: 2285193 - DNA, 25 bp, Homo sapien
catggtgcacacatgtccaggaaga

SEQ ID NO: 2285194 - DNA, 25 bp, Homo sapien
tgttctggagcaagccaaggccttg

SEQ ID NO: 2285195 - DNA, 25 bp, Homo sapien
gcagccacaggtcactaaccaaaca

SEQ ID NO: 2285196 - DNA, 25 bp, Homo sapien
aatgcagccacaggtcactaaccaa

SEQ ID NO: 2285197 - DNA, 25 bp, Homo sapien
aacaggaactctagccgattggccc

SEQ ID NO: 2285198 - DNA, 25 bp, Homo sapien
aacaacaggaactctagccgattgg

SEQ ID NO: 2285199 - DNA, 25 bp, Homo sapien
gctgtgactgtagactctgtggctg

SEQ ID NO: 2285200 - DNA, 25 bp, Homo sapien
tgcgtttggctgtgactgtagactc

SEQ ID NO: 2285201 - DNA, 25 bp, Homo sapien
ctgctgagtgcgtttggctgtgact

SEQ ID NO: 2285202 - DNA, 25 bp, Homo sapien
tggctgtgactgtagactctgtggc

SEQ ID NO: 2285203 - DNA, 25 bp, Homo sapien
gaaatctatcactctctgggcagtg

SEQ ID NO: 2285204 - DNA, 25 bp, Homo sapien
gatttccatggattggcactaagca

SEQ ID NO: 2285205 - DNA, 25 bp, Homo sapien
gttggcccaggcacctgaatgaaat

SEQ ID NO: 2285206 - DNA, 25 bp, Homo sapien
gattggcactaagcagtgaagtatt

SEQ ID NO: 2285207 - DNA, 25 bp, Homo sapien
agtgaacactgtctggggagttaag

SEQ ID NO: 2285208 - DNA, 25 bp, Homo sapien
tgcagggcatctaccacacagcatg

SEQ ID NO: 2285209 - DNA, 25 bp, Homo sapien
gcctagactctggagggccttgact

SEQ ID NO: 2285210 - DNA, 25 bp, Homo sapien
tcagtgaacacctccgaagcttctg

SEQ ID NO: 2285211 - DNA, 25 bp, Homo sapien
ttccaggaaccatcaatcgaaggag

SEQ ID NO: 2285212 - DNA, 25 bp, Homo sapien
ttgccattgtaacaggtgaacagag

SEQ ID NO: 2285213 - DNA, 25 bp, Homo sapien
ttgcagaactggaggcaaatctagc

SEQ ID NO: 2285214 - DNA, 25 bp, Homo sapien
cattgtaacaggtgaacagagatgc

SEQ ID NO: 2285215 - DNA, 25 bp, Homo sapien
gatgccaggacctgagttatctgga

SEQ ID NO: 2285216 - DNA, 25 bp, Homo sapien
acaggtgtcagggaacaccaaacac

SEQ ID NO: 2285217 - DNA, 25 bp, Homo sapien
ggctcttcccatatcgctaacatga

SEQ ID NO: 2285218 - DNA, 25 bp, Homo sapien
agggaacaccaaacacctgcttgtg

SEQ ID NO: 2285219 - DNA, 25 bp, Homo sapien
tatcgctaacatgaactctgctcct

SEQ ID NO: 2285220 - DNA, 25 bp, Homo sapien
gttctgtgttgcacggaatctccag

SEQ ID NO: 2285221 - DNA, 25 bp, Homo sapien
gttgcacggaatctccagatgtacc

SEQ ID NO: 2285222 - DNA, 25 bp, Homo sapien
gcaattacagttctgtgttgcacgg

SEQ ID NO: 2285223 - DNA, 25 bp, Homo sapien
gcaagcacacggagcaattacagtt

SEQ ID NO: 2285224 - DNA, 25 bp, Homo sapien
gaagggattttcgaggaaatagtca

SEQ ID NO: 2285225 - DNA, 25 bp, Homo sapien
tcagacatctgttggaggtgcagag

SEQ ID NO: 2285226 - DNA, 25 bp, Homo sapien
catggcagtggcaccgtatccctgc

SEQ ID NO: 2285227 - DNA, 25 bp, Homo sapien
tatccctgcagccccattgatcaga

SEQ ID NO: 2285228 - DNA, 25 bp, Homo sapien
tcttagttctgtcagctagctgttc

SEQ ID NO: 2285229 - DNA, 25 bp, Homo sapien
tacaggcgttccaggtcttagttct

SEQ ID NO: 2285230 - DNA, 25 bp, Homo sapien
tgtcagctagctgttctgaaggttt

SEQ ID NO: 2285231 - DNA, 25 bp, Homo sapien
aacttaaagcaaatctgtgccaggg

SEQ ID NO: 2285232 - DNA, 25 bp, Homo sapien
gccacatccaccagtaaaggagaga

SEQ ID NO: 2285233 - DNA, 25 bp, Homo sapien
tagatcgttctctggactccccaaa

SEQ ID NO: 2285234 - DNA, 25 bp, Homo sapien
ttttcagtttgtgtagatcgttctc

SEQ ID NO: 2285235 - DNA, 25 bp, Homo sapien
agccacatccaccagtaaaggagag

SEQ ID NO: 2285236 - DNA, 25 bp, Homo sapien
ctgcagcttagggacggatgcacat

SEQ ID NO: 2285237 - DNA, 25 bp, Homo sapien
agcctgcagcttagggacggatgca

SEQ ID NO: 2285238 - DNA, 25 bp, Homo sapien
actgagcctgcagcttagggacgga

SEQ ID NO: 2285239 - DNA, 25 bp, Homo sapien
ctgagcctgcagcttagggacggat

SEQ ID NO: 2285240 - DNA, 25 bp, Homo sapien
tttgtacctgacacactctctggac

SEQ ID NO: 2285241 - DNA, 25 bp, Homo sapien
tctttgtacctgacacactctctgg

SEQ ID NO: 2285242 - DNA, 25 bp, Homo sapien
ctttgtacctgacacactctctgga

SEQ ID NO: 2285243 - DNA, 25 bp, Homo sapien
tattgtccctaagtgcaaccttgga

SEQ ID NO: 2285244 - DNA, 25 bp, Homo sapien
tatttcattggtagggatattgtcc

SEQ ID NO: 2285245 - DNA, 25 bp, Homo sapien
aacatggagtagagcctctttgctg

SEQ ID NO: 2285246 - DNA, 25 bp, Homo sapien
cactgtcaaataagaagtctccttc

SEQ ID NO: 2285247 - DNA, 25 bp, Homo sapien
cgttatgttctcattgtagtagaaa

SEQ ID NO: 2285248 - DNA, 25 bp, Homo sapien
tggtatttgacctccttaaaattgc

SEQ ID NO: 2285249 - DNA, 25 bp, Homo sapien
cagttagcgaaattacataggccaa

SEQ ID NO: 2285250 - DNA, 25 bp, Homo sapien
aaattccacagttagcgaaattaca

SEQ ID NO: 2285251 - DNA, 25 bp, Homo sapien
ttagatctatgggaggcatgtcggt

SEQ ID NO: 2285252 - DNA, 25 bp, Homo sapien
catacagcaacatggcataaagctg

SEQ ID NO: 2285253 - DNA, 25 bp, Homo sapien
aaagctggggctttagatctatggg

SEQ ID NO: 2285254 - DNA, 25 bp, Homo sapien
tactgctgtccatacagcaacatgg

SEQ ID NO: 2285255 - DNA, 25 bp, Homo sapien
tgttcataaatgaccgcctgtggaa

SEQ ID NO: 2285256 - DNA, 25 bp, Homo sapien
tatgttcataaatgaccgcctgtgg

SEQ ID NO: 2285257 - DNA, 25 bp, Homo sapien
ctttctatgttcataaatgaccgcc

SEQ ID NO: 2285258 - DNA, 25 bp, Homo sapien
taaatgaccgcctgtggaattcttg

SEQ ID NO: 2285259 - DNA, 25 bp, Homo sapien
cagggatgcataggtggtcatgtcc

SEQ ID NO: 2285260 - DNA, 25 bp, Homo sapien
tctcaaatggtgctgtcagggatgc

SEQ ID NO: 2285261 - DNA, 25 bp, Homo sapien
tgactactgagggatctgaacagca

SEQ ID NO: 2285262 - DNA, 25 bp, Homo sapien
aattctccaggatctgatgtggccg

SEQ ID NO: 2285263 - DNA, 25 bp, Homo sapien
ttcatcaacaagagtgggcctcctt

SEQ ID NO: 2285264 - DNA, 25 bp, Homo sapien
tcctgcaggccgaaggcttagagat

SEQ ID NO: 2285265 - DNA, 25 bp, Homo sapien
gacctcggcagacctcatgtcactg

SEQ ID NO: 2285266 - DNA, 25 bp, Homo sapien
tggaaaatataatgagggacctcgg

SEQ ID NO: 2285267 - DNA, 25 bp, Homo sapien
tttcccactgggtcgctggctcctt

SEQ ID NO: 2285268 - DNA, 25 bp, Homo sapien
gcatgtgtgggctctgacttcttct

SEQ ID NO: 2285269 - DNA, 25 bp, Homo sapien
catgtgtgggctctgacttcttctt

SEQ ID NO: 2285270 - DNA, 25 bp, Homo sapien
ccagaaatatgcctgtggcatgtgt

SEQ ID NO: 2285271 - DNA, 25 bp, Homo sapien
gaccacgatgttatatgcattgaga

SEQ ID NO: 2285272 - DNA, 25 bp, Homo sapien
ggcagatgaccacgatgttatatgc

SEQ ID NO: 2285273 - DNA, 25 bp, Homo sapien
gatgaccacgatgttatatgcattg

SEQ ID NO: 2285274 - DNA, 25 bp, Homo sapien
ggcagggcagatgaccacgatgtta

SEQ ID NO: 2285275 - DNA, 25 bp, Homo sapien
cttggttttagtaacctcttctgtg

SEQ ID NO: 2285276 - DNA, 25 bp, Homo sapien
tggttttagtaacctcttctgtgac

SEQ ID NO: 2285277 - DNA, 25 bp, Homo sapien
gagtgttgcttggtctggcattatg

SEQ ID NO: 2285278 - DNA, 25 bp, Homo sapien
tgagtgttgcttggtctggcattat

SEQ ID NO: 2285279 - DNA, 25 bp, Homo sapien
ggtagcaaatgaatttctgttttac

SEQ ID NO: 2285280 - DNA, 25 bp, Homo sapien
tagcaaatgaatttctgttttacgt

SEQ ID NO: 2285281 - DNA, 25 bp, Homo sapien
gcaaatgaatttctgttttacgtaa

SEQ ID NO: 2285282 - DNA, 25 bp, Homo sapien
ctggtagcaaatgaatttctgtttt

SEQ ID NO: 2285283 - DNA, 25 bp, Homo sapien
cccagaactggagaggtctgaaggc

SEQ ID NO: 2285284 - DNA, 25 bp, Homo sapien
tgtgaggttttctcctgatgcctgt

SEQ ID NO: 2285285 - DNA, 25 bp, Homo sapien
cattgcacgtgggtctatgtctgtg

SEQ ID NO: 2285286 - DNA, 25 bp, Homo sapien
catttccgtggccttctgagagccc

SEQ ID NO: 2285287 - DNA, 25 bp, Homo sapien
gttcacttccccaacggcacaagat

SEQ ID NO: 2285288 - DNA, 25 bp, Homo sapien
ttccccaacggcacaagatcacatg

SEQ ID NO: 2285289 - DNA, 25 bp, Homo sapien
ggcacaagatcacatgcccgtcaag

SEQ ID NO: 2285290 - DNA, 25 bp, Homo sapien
tgcccgtcaagtctcctgggaaagg

SEQ ID NO: 2285291 - DNA, 25 bp, Homo sapien
ccttgtttctctgagcactgtggac

SEQ ID NO: 2285292 - DNA, 25 bp, Homo sapien
tctttgggcctttcttgttcctgtc

SEQ ID NO: 2285293 - DNA, 25 bp, Homo sapien
ctttcttgttcctgtccttgtttct

SEQ ID NO: 2285294 - DNA, 25 bp, Homo sapien
ctgtccttgtttctctgagcactgt

SEQ ID NO: 2285295 - DNA, 25 bp, Homo sapien
tactcataacgattgtgcagtatgg

SEQ ID NO: 2285296 - DNA, 25 bp, Homo sapien
tgtgcagtatgggaaactgcatctc

SEQ ID NO: 2285297 - DNA, 25 bp, Homo sapien
taacgattgtgcagtatgggaaact

SEQ ID NO: 2285298 - DNA, 25 bp, Homo sapien
taatttgatactcataacgattgtg

SEQ ID NO: 2285299 - DNA, 25 bp, Homo sapien
gctacttaggaaagaagtgctcaag

SEQ ID NO: 2285300 - DNA, 25 bp, Homo sapien
gcattcttctaatgagctacttagg

SEQ ID NO: 2285301 - DNA, 25 bp, Homo sapien
cagagaaattcgtgtacagcagaaa

SEQ ID NO: 2285302 - DNA, 25 bp, Homo sapien
tccaaatgtggcaccctgaagtcag

SEQ ID NO: 2285303 - DNA, 25 bp, Homo sapien
tggagctatcaaacattagctttat

SEQ ID NO: 2285304 - DNA, 25 bp, Homo sapien
gagctatcaaacattagctttattg

SEQ ID NO: 2285305 - DNA, 25 bp, Homo sapien
cttttggagctatcaaacattagct

SEQ ID NO: 2285306 - DNA, 25 bp, Homo sapien
tttggagctatcaaacattagcttt

SEQ ID NO: 2285307 - DNA, 25 bp, Homo sapien
cttatgtggtacacgcagccatcat

SEQ ID NO: 2285308 - DNA, 25 bp, Homo sapien
ttatgtggtacacgcagccatcatc

SEQ ID NO: 2285309 - DNA, 25 bp, Homo sapien
aggcagaaggacttcaggacctgct

SEQ ID NO: 2285310 - DNA, 25 bp, Homo sapien
taaggcagaaggacttcaggacctg

SEQ ID NO: 2285311 - DNA, 25 bp, Homo sapien
tattaaggcagaaggacttcaggac

SEQ ID NO: 2285312 - DNA, 25 bp, Homo sapien
ctattaaggcagaaggacttcagga

SEQ ID NO: 2285313 - DNA, 25 bp, Homo sapien
gctgcttgaggagggtgtcagttgt

SEQ ID NO: 2285314 - DNA, 25 bp, Homo sapien
tgctgcaaacagaaaccctgaaggg

SEQ ID NO: 2285315 - DNA, 25 bp, Homo sapien
cttgaggagggtgtcagttgtcctc

SEQ ID NO: 2285316 - DNA, 25 bp, Homo sapien
gagggtgtcagttgtcctcagctga

SEQ ID NO: 2285317 - DNA, 25 bp, Homo sapien
gaagtagtgttcgattcagtcctgg

SEQ ID NO: 2285318 - DNA, 25 bp, Homo sapien
gtagtgttcgattcagtcctgggtc

SEQ ID NO: 2285319 - DNA, 25 bp, Homo sapien
ccaggaagtagtgttcgattcagtc

SEQ ID NO: 2285320 - DNA, 25 bp, Homo sapien
agtgttcgattcagtcctgggtctg

SEQ ID NO: 2285321 - DNA, 25 bp, Homo sapien
ctctggccaaatacagggactggct

SEQ ID NO: 2285322 - DNA, 25 bp, Homo sapien
gaagttgtccaacggctgtgacagc

SEQ ID NO: 2285323 - DNA, 25 bp, Homo sapien
tcatataagccacggaagctttgct

SEQ ID NO: 2285324 - DNA, 25 bp, Homo sapien
agctgtaggtccagttacactcata

SEQ ID NO: 2285325 - DNA, 25 bp, Homo sapien
cctctgaatggaggtcatagagagt

SEQ ID NO: 2285326 - DNA, 25 bp, Homo sapien
aggatggctctagaagccagagttg

SEQ ID NO: 2285327 - DNA, 25 bp, Homo sapien
atggctctagaagccagagttgata

SEQ ID NO: 2285328 - DNA, 25 bp, Homo sapien
cccccaccgcccctctgaatggagg

SEQ ID NO: 2285329 - DNA, 25 bp, Homo sapien
cagcatctattgtccctattatttt

SEQ ID NO: 2285330 - DNA, 25 bp, Homo sapien
tattttcccaggataatcagaggct

SEQ ID NO: 2285331 - DNA, 25 bp, Homo sapien
cccaggataatcagaggcttgctta

SEQ ID NO: 2285332 - DNA, 25 bp, Homo sapien
tgcttatctgcaagaggggtattca

SEQ ID NO: 2285333 - DNA, 25 bp, Homo sapien
attgctgccaagagatccagtatca

SEQ ID NO: 2285334 - DNA, 25 bp, Homo sapien
tccagtatcacctttgcttttggca

SEQ ID NO: 2285335 - DNA, 25 bp, Homo sapien
aagatgtagcagaaatattgctgcc

SEQ ID NO: 2285336 - DNA, 25 bp, Homo sapien
cacctttgcttttggcagtgatggg

SEQ ID NO: 2285337 - DNA, 25 bp, Homo sapien
cattgctgcttacgatgctgctcag

SEQ ID NO: 2285338 - DNA, 25 bp, Homo sapien
ggcacctggagaccattgctgctta

SEQ ID NO: 2285339 - DNA, 25 bp, Homo sapien
atagtcttcagctgtttatctgttc

SEQ ID NO: 2285340 - DNA, 25 bp, Homo sapien
gctcccgacggttgttctcttgaaa

SEQ ID NO: 2285341 - DNA, 25 bp, Homo sapien
ctggctgcgggaactcggttctgct

SEQ ID NO: 2285342 - DNA, 25 bp, Homo sapien
ctgctggctgcgggaactcggttct

SEQ ID NO: 2285343 - DNA, 25 bp, Homo sapien
ccttcctgcttgttcatcaatactc

SEQ ID NO: 2285344 - DNA, 25 bp, Homo sapien
tgcttgttcatcaatactcctctgt

SEQ ID NO: 2285345 - DNA, 25 bp, Homo sapien
gaaagacaggtgtatgccaattttg

SEQ ID NO: 2285346 - DNA, 25 bp, Homo sapien
gccaattttgccagtgcgaaaatcc

SEQ ID NO: 2285347 - DNA, 25 bp, Homo sapien
tcctgggctcagatctacttgtgaa

SEQ ID NO: 2285348 - DNA, 25 bp, Homo sapien
gctcagatctacttgtgaaaattgt

SEQ ID NO: 2285349 - DNA, 25 bp, Homo sapien
caaacgatcagattttgagatgctg

SEQ ID NO: 2285350 - DNA, 25 bp, Homo sapien
taggctctgcagcttacagatcccc

SEQ ID NO: 2285351 - DNA, 25 bp, Homo sapien
tccagtcctccgcaaacgatcagat

SEQ ID NO: 2285352 - DNA, 25 bp, Homo sapien
cagatccccaatatggctttcagaa

SEQ ID NO: 2285353 - DNA, 25 bp, Homo sapien
ctatggaaatgctactctataccaa

SEQ ID NO: 2285354 - DNA, 25 bp, Homo sapien
tggaaatgctactctataccaagtc

SEQ ID NO: 2285355 - DNA, 25 bp, Homo sapien
tgctactctataccaagtcccctgg

SEQ ID NO: 2285356 - DNA, 25 bp, Homo sapien
gaaatgctactctataccaagtccc

SEQ ID NO: 2285357 - DNA, 25 bp, Homo sapien
tgaaagatggcaatcagctgaaggt

SEQ ID NO: 2285358 - DNA, 25 bp, Homo sapien
cactaatactgatagggagcggaga

SEQ ID NO: 2285359 - DNA, 25 bp, Homo sapien
ggaaaagccattgccttaagaggcc

SEQ ID NO: 2285360 - DNA, 25 bp, Homo sapien
gctgaaggtggctctgcatcactaa

SEQ ID NO: 2285361 - DNA, 25 bp, Homo sapien
tcccctatgtgtctgcggtcatcca

SEQ ID NO: 2285362 - DNA, 25 bp, Homo sapien
tgtggaatctttcatgccgcctggt

SEQ ID NO: 2285363 - DNA, 25 bp, Homo sapien
tcatccaccttctgcgagggctgga

SEQ ID NO: 2285364 - DNA, 25 bp, Homo sapien
ggaccacagcacccctgtggaatct

SEQ ID NO: 2285365 - DNA, 25 bp, Homo sapien
ttcattaacatctgcttgtttctcc

SEQ ID NO: 2285366 - DNA, 25 bp, Homo sapien
aacatctgcttgtttctcctctctt

SEQ ID NO: 2285367 - DNA, 25 bp, Homo sapien
ttaacatctgcttgtttctcctctc

SEQ ID NO: 2285368 - DNA, 25 bp, Homo sapien
cattaacatctgcttgtttctcctc

SEQ ID NO: 2285369 - DNA, 25 bp, Homo sapien
cgaacgggggatagatgttgctttt

SEQ ID NO: 2285370 - DNA, 25 bp, Homo sapien
caggcaagggtcgatagccccgaga

SEQ ID NO: 2285371 - DNA, 25 bp, Homo sapien
cccgagattcaataaggtacagaac

SEQ ID NO: 2285372 - DNA, 25 bp, Homo sapien
ggtacagaacaagagcagtgaacct

SEQ ID NO: 2285373 - DNA, 25 bp, Homo sapien
gagggttatcgtacaaggtggtctc

SEQ ID NO: 2285374 - DNA, 25 bp, Homo sapien
ttgttggacatccttctcagctctc

SEQ ID NO: 2285375 - DNA, 25 bp, Homo sapien
tggacatccttctcagctctcatcc

SEQ ID NO: 2285376 - DNA, 25 bp, Homo sapien
gttggacatccttctcagctctcat

SEQ ID NO: 2285377 - DNA, 25 bp, Homo sapien
tagtcttagtctttccagtacaagc

SEQ ID NO: 2285378 - DNA, 25 bp, Homo sapien
ggaaatctctctcacttagtcttag

SEQ ID NO: 2285379 - DNA, 25 bp, Homo sapien
ccagtacaagctttagggtaggcat

SEQ ID NO: 2285380 - DNA, 25 bp, Homo sapien
ggttcttgactgaacatttctctgg

SEQ ID NO: 2285381 - DNA, 25 bp, Homo sapien
aagtggaagccaggcgtcaggactc

SEQ ID NO: 2285382 - DNA, 25 bp, Homo sapien
cactcctgaggagtgagtgcaacag

SEQ ID NO: 2285383 - DNA, 25 bp, Homo sapien
tgtgatgttacacccacttggtagc

SEQ ID NO: 2285384 - DNA, 25 bp, Homo sapien
agttgtacgtgatggccagatgccc

SEQ ID NO: 2285385 - DNA, 25 bp, Homo sapien
gactgcctttgtactgttgcttctg

SEQ ID NO: 2285386 - DNA, 25 bp, Homo sapien
tctgaagccaagagatcacccctca

SEQ ID NO: 2285387 - DNA, 25 bp, Homo sapien
ctgaagccaagagatcacccctcat

SEQ ID NO: 2285388 - DNA, 25 bp, Homo sapien
tcccaaatgaggcttgttcttccat

SEQ ID NO: 2285389 - DNA, 25 bp, Homo sapien
gagctgctacttctgttcccaaatg

SEQ ID NO: 2285390 - DNA, 25 bp, Homo sapien
gttgtctaacatcatactctggaat

SEQ ID NO: 2285391 - DNA, 25 bp, Homo sapien
ttgttataatatgagcagtggcttg

SEQ ID NO: 2285392 - DNA, 25 bp, Homo sapien
tgtggttatatttgccccagaacct

SEQ ID NO: 2285393 - DNA, 25 bp, Homo sapien
gaggcaatgtggttatatttgcccc

SEQ ID NO: 2285394 - DNA, 25 bp, Homo sapien
gatcccccctggcagagactttctt

SEQ ID NO: 2285395 - DNA, 25 bp, Homo sapien
ctggcagagactttctttaggcttt

SEQ ID NO: 2285396 - DNA, 25 bp, Homo sapien
ccttggcatgctgatgagattaatg

SEQ ID NO: 2285397 - DNA, 25 bp, Homo sapien
tgtaattagaggtaccgttgctcct

SEQ ID NO: 2285398 - DNA, 25 bp, Homo sapien
cgtgttgaaatctttggcatcagag

SEQ ID NO: 2285399 - DNA, 25 bp, Homo sapien
tctgccaccaccaaccgtgttgaaa

SEQ ID NO: 2285400 - DNA, 25 bp, Homo sapien
cttccttacattccgggtgtcgcag

SEQ ID NO: 2285401 - DNA, 25 bp, Homo sapien
ttccgggtgtcgcagcaccacaact

SEQ ID NO: 2285402 - DNA, 25 bp, Homo sapien
tgtcgcagcaccacaacttttgagt

SEQ ID NO: 2285403 - DNA, 25 bp, Homo sapien
ttacattccgggtgtcgcagcacca

SEQ ID NO: 2285404 - DNA, 25 bp, Homo sapien
tccctctggttgagtgttcagatta

SEQ ID NO: 2285405 - DNA, 25 bp, Homo sapien
tttgagctgattgccgaatgccacg

SEQ ID NO: 2285406 - DNA, 25 bp, Homo sapien
ccttatgtcggtggctttgagctga

SEQ ID NO: 2285407 - DNA, 25 bp, Homo sapien
taagggtcctggaaacctgtagcaa

SEQ ID NO: 2285408 - DNA, 25 bp, Homo sapien
agctttgcaccgctgccgtcacaaa

SEQ ID NO: 2285409 - DNA, 25 bp, Homo sapien
aatgaggtgttctgcgagtcagctt

SEQ ID NO: 2285410 - DNA, 25 bp, Homo sapien
cagttaagtattgtgcctgcttctc

SEQ ID NO: 2285411 - DNA, 25 bp, Homo sapien
tatattaacattctcaacaaaggtg

SEQ ID NO: 2285412 - DNA, 25 bp, Homo sapien
tcagtgggaaggtaggcatcttcag

SEQ ID NO: 2285413 - DNA, 25 bp, Homo sapien
tattctaaaaagaaagccacttcag

SEQ ID NO: 2285414 - DNA, 25 bp, Homo sapien
tcagaaatggtaaaagttgtgaaat

SEQ ID NO: 2285415 - DNA, 25 bp, Homo sapien
gaaagccacttcagtgggaaggtag

SEQ ID NO: 2285416 - DNA, 25 bp, Homo sapien
cggaataattactctggattctgca

SEQ ID NO: 2285417 - DNA, 25 bp, Homo sapien
ctctggattctgcattgtgagctgc

SEQ ID NO: 2285418 - DNA, 25 bp, Homo sapien
gcacacggaataattactctggatt

SEQ ID NO: 2285419 - DNA, 25 bp, Homo sapien
ctcacatgcacacggaataattact

SEQ ID NO: 2285420 - DNA, 25 bp, Homo sapien
ctaggaaatctcggggcttcgctct

SEQ ID NO: 2285421 - DNA, 25 bp, Homo sapien
taggaaatctcggggcttcgctcta

SEQ ID NO: 2285422 - DNA, 25 bp, Homo sapien
tctaggaaatctcggggcttcgctc

SEQ ID NO: 2285423 - DNA, 25 bp, Homo sapien
gccttctctcctgtgcgtttgtatg

SEQ ID NO: 2285424 - DNA, 25 bp, Homo sapien
cctgtgcgtttgtatggccgcttct

SEQ ID NO: 2285425 - DNA, 25 bp, Homo sapien
gtatggccgcttctcaggaatgctg

SEQ ID NO: 2285426 - DNA, 25 bp, Homo sapien
tatggccgcttctcaggaatgctgg

SEQ ID NO: 2285427 - DNA, 25 bp, Homo sapien
ggtgcttcgacacttccccaaagta

SEQ ID NO: 2285428 - DNA, 25 bp, Homo sapien
gagtagtctggtctacaggacagca

SEQ ID NO: 2285429 - DNA, 25 bp, Homo sapien
gactaaagttccaagccactaggta

SEQ ID NO: 2285430 - DNA, 25 bp, Homo sapien
tggctgttgtgtatcaagagggcac

SEQ ID NO: 2285431 - DNA, 25 bp, Homo sapien
tggaatcggcgttctaacaactgca

SEQ ID NO: 2285432 - DNA, 25 bp, Homo sapien
tttccctatagtgggccagtacctg

SEQ ID NO: 2285433 - DNA, 25 bp, Homo sapien
ggttcaacatgaatagctacagagg

SEQ ID NO: 2285434 - DNA, 25 bp, Homo sapien
aaagtagattcaaggtcaacccatg

SEQ ID NO: 2285435 - DNA, 25 bp, Homo sapien
gctttgcgtttgctgattgggccat

SEQ ID NO: 2285436 - DNA, 25 bp, Homo sapien
gccatgaaaaagagtgtttgcatct

SEQ ID NO: 2285437 - DNA, 25 bp, Homo sapien
cctctctttgggttgagttggcaga

SEQ ID NO: 2285438 - DNA, 25 bp, Homo sapien
ccaaaagtgtcattagcagcctcaa

SEQ ID NO: 2285439 - DNA, 25 bp, Homo sapien
aacagattgtcaaggtctcccagtg

SEQ ID NO: 2285440 - DNA, 25 bp, Homo sapien
ttccctcaacttgggcagattttta

SEQ ID NO: 2285441 - DNA, 25 bp, Homo sapien
ttacttgggctccacagaagttctc

SEQ ID NO: 2285442 - DNA, 25 bp, Homo sapien
tgttactccatgttctctcaacaga

SEQ ID NO: 2285443 - DNA, 25 bp, Homo sapien
gtggcaggactctaacattgaaaat

SEQ ID NO: 2285444 - DNA, 25 bp, Homo sapien
taggcaagcaaacccatactgtaac

SEQ ID NO: 2285445 - DNA, 25 bp, Homo sapien
tctaggtgttatagtgtggcaggac

SEQ ID NO: 2285446 - DNA, 25 bp, Homo sapien
gcccagcctggttatacacttttaa

SEQ ID NO: 2285447 - DNA, 25 bp, Homo sapien
tctgcgtctgcctaaagtttactgt

SEQ ID NO: 2285448 - DNA, 25 bp, Homo sapien
ttcattgacatcagcttttgtattc

SEQ ID NO: 2285449 - DNA, 25 bp, Homo sapien
aaggaatatttaagaacgtcagatt

SEQ ID NO: 2285450 - DNA, 25 bp, Homo sapien
gttgctctcttgaatgtgaatacac

SEQ ID NO: 2285451 - DNA, 25 bp, Homo sapien
tccttcaagtatagcaggacttctg

SEQ ID NO: 2285452 - DNA, 25 bp, Homo sapien
ccttcaagtatagcaggacttctgc

SEQ ID NO: 2285453 - DNA, 25 bp, Homo sapien
cttcaagtatagcaggacttctgca

SEQ ID NO: 2285454 - DNA, 25 bp, Homo sapien
gactgggttggacttgagatacata

SEQ ID NO: 2285455 - DNA, 25 bp, Homo sapien
tacagcacaacacttgccatggaaa

SEQ ID NO: 2285456 - DNA, 25 bp, Homo sapien
tgagatacatacagcacaacacttg

SEQ ID NO: 2285457 - DNA, 25 bp, Homo sapien
tggaaagcatgtaaatctgcctgca

SEQ ID NO: 2285458 - DNA, 25 bp, Homo sapien
ggccatctttttgaacagagaatga

SEQ ID NO: 2285459 - DNA, 25 bp, Homo sapien
gtttcctaggagataaggctcttct

SEQ ID NO: 2285460 - DNA, 25 bp, Homo sapien
aatgcctgttttgttagagtgtgag

SEQ ID NO: 2285461 - DNA, 25 bp, Homo sapien
tgaggaggagtgaattggtttccta

SEQ ID NO: 2285462 - DNA, 25 bp, Homo sapien
tctgcctgccactgttggaggaata

SEQ ID NO: 2285463 - DNA, 25 bp, Homo sapien
aactggaatacagctgacatgggat

SEQ ID NO: 2285464 - DNA, 25 bp, Homo sapien
ttaaactggaatacagctgacatgg

SEQ ID NO: 2285465 - DNA, 25 bp, Homo sapien
tgcctgccactgttggaggaataat

SEQ ID NO: 2285466 - DNA, 25 bp, Homo sapien
ggaagacttgatcaggaactcttat

SEQ ID NO: 2285467 - DNA, 25 bp, Homo sapien
ggaactcttatttgtaatggcagaa

SEQ ID NO: 2285468 - DNA, 25 bp, Homo sapien
aagaaacacagagtatggatttgga

SEQ ID NO: 2285469 - DNA, 25 bp, Homo sapien
cacagagtatggatttggaagactt

SEQ ID NO: 2285470 - DNA, 25 bp, Homo sapien
tttaagccatcttaggctctgtcca

SEQ ID NO: 2285471 - DNA, 25 bp, Homo sapien
taagccatcttaggctctgtccaga

SEQ ID NO: 2285472 - DNA, 25 bp, Homo sapien
aagccatcttaggctctgtccagaa

SEQ ID NO: 2285473 - DNA, 25 bp, Homo sapien
ttaagccatcttaggctctgtccag

SEQ ID NO: 2285474 - DNA, 25 bp, Homo sapien
ctactttgtagcttaagggcaggaa

SEQ ID NO: 2285475 - DNA, 25 bp, Homo sapien
tagactgtggaagactctccgagcc

SEQ ID NO: 2285476 - DNA, 25 bp, Homo sapien
tgtattgaatgaacctgaatctggc

SEQ ID NO: 2285477 - DNA, 25 bp, Homo sapien
tgatctggataaagtgatgacagga

SEQ ID NO: 2285478 - DNA, 25 bp, Homo sapien
caaccatgaggtctttgccagtcct

SEQ ID NO: 2285479 - DNA, 25 bp, Homo sapien
agtggtccgaccgtcttgtccctct

SEQ ID NO: 2285480 - DNA, 25 bp, Homo sapien
ctgagcaaccatgaggtctttgcca

SEQ ID NO: 2285481 - DNA, 25 bp, Homo sapien
gcataatatccagtggtccgaccgt

SEQ ID NO: 2285482 - DNA, 25 bp, Homo sapien
tcttttagaatctaccgataattcc

SEQ ID NO: 2285483 - DNA, 25 bp, Homo sapien
tgtactctggttgtcatcaaaggta

SEQ ID NO: 2285484 - DNA, 25 bp, Homo sapien
aaagaagaaaagtctgtcctgtgtg

SEQ ID NO: 2285485 - DNA, 25 bp, Homo sapien
aaggtagcaattgtcacaaaaacag

SEQ ID NO: 2285486 - DNA, 25 bp, Homo sapien
tttgcacactttatgattcttatca

SEQ ID NO: 2285487 - DNA, 25 bp, Homo sapien
cttttgcacactttatgattcttat

SEQ ID NO: 2285488 - DNA, 25 bp, Homo sapien
ttttgcacactttatgattcttatc

SEQ ID NO: 2285489 - DNA, 25 bp, Homo sapien
ttgcacactttatgattcttatcat

SEQ ID NO: 2285490 - DNA, 25 bp, Homo sapien
tgcagaaccagtccttatcgtgtac

SEQ ID NO: 2285491 - DNA, 25 bp, Homo sapien
agtccttatcgtgtacataccagtg

SEQ ID NO: 2285492 - DNA, 25 bp, Homo sapien
cagtgtagccatactggttgttaaa

SEQ ID NO: 2285493 - DNA, 25 bp, Homo sapien
tgtacataccagtgtagccatactg

SEQ ID NO: 2285494 - DNA, 25 bp, Homo sapien
cagcagaaagtgtgacatcaggtgt

SEQ ID NO: 2285495 - DNA, 25 bp, Homo sapien
gagaaagctgccctgggattttgtt

SEQ ID NO: 2285496 - DNA, 25 bp, Homo sapien
ttttatactgcctgagaggaccacc

SEQ ID NO: 2285497 - DNA, 25 bp, Homo sapien
cagatatgagccatgctgggagaga

SEQ ID NO: 2285498 - DNA, 25 bp, Homo sapien
tctggatgatcctggtgtaacaggg

SEQ ID NO: 2285499 - DNA, 25 bp, Homo sapien
tctcaataaagggtgtagactcagt

SEQ ID NO: 2285500 - DNA, 25 bp, Homo sapien
tagactcagtggaggaatgccgtgc

SEQ ID NO: 2285501 - DNA, 25 bp, Homo sapien
gatgtagcaccagcttaagaaaggg

SEQ ID NO: 2285502 - DNA, 25 bp, Homo sapien
agcctctcttgataatttgctgtct

SEQ ID NO: 2285503 - DNA, 25 bp, Homo sapien
aagcctctcttgataatttgctgtc

SEQ ID NO: 2285504 - DNA, 25 bp, Homo sapien
gcctctcttgataatttgctgtctg

SEQ ID NO: 2285505 - DNA, 25 bp, Homo sapien
gtagtaattgtgaattggagttcac

SEQ ID NO: 2285506 - DNA, 25 bp, Homo sapien
tctttgtagtaattgtgaattggag

SEQ ID NO: 2285507 - DNA, 25 bp, Homo sapien
ctgtttgcctattattggtgtatag

SEQ ID NO: 2285508 - DNA, 25 bp, Homo sapien
tctctttgtagtaattgtgaattgg

SEQ ID NO: 2285509 - DNA, 25 bp, Homo sapien
ggaaaagactttggcctggtttgca

SEQ ID NO: 2285510 - DNA, 25 bp, Homo sapien
tcagagaccaatcaatctttggcaa

SEQ ID NO: 2285511 - DNA, 25 bp, Homo sapien
gagaatgggatactatcattgacca

SEQ ID NO: 2285512 - DNA, 25 bp, Homo sapien
tctgtgacccaagaggtaagaattc

SEQ ID NO: 2285513 - DNA, 25 bp, Homo sapien
gtgaagacaactgatgggcatagtg

SEQ ID NO: 2285514 - DNA, 25 bp, Homo sapien
caactgatgggcatagtgccctaca

SEQ ID NO: 2285515 - DNA, 25 bp, Homo sapien
tgaacttagtgaagacaactgatgg

SEQ ID NO: 2285516 - DNA, 25 bp, Homo sapien
cagcactgcatgacctgccctgttt

SEQ ID NO: 2285517 - DNA, 25 bp, Homo sapien
ctgctactgattagtgcaagagttt

SEQ ID NO: 2285518 - DNA, 25 bp, Homo sapien
gtgcagttctgctactgattagtgc

SEQ ID NO: 2285519 - DNA, 25 bp, Homo sapien
gttctgctactgattagtgcaagag

SEQ ID NO: 2285520 - DNA, 25 bp, Homo sapien
acaggtgcagttctgctactgatta

SEQ ID NO: 2285521 - DNA, 25 bp, Homo sapien
tgaaattgttccgttgatggttgag

SEQ ID NO: 2285522 - DNA, 25 bp, Homo sapien
ttgttccgttgatggttgagagatg

SEQ ID NO: 2285523 - DNA, 25 bp, Homo sapien
aattgttccgttgatggttgagaga

SEQ ID NO: 2285524 - DNA, 25 bp, Homo sapien
gaaattgttccgttgatggttgaga

SEQ ID NO: 2285525 - DNA, 25 bp, Homo sapien
tcaggtatatgactttccagtgaag

SEQ ID NO: 2285526 - DNA, 25 bp, Homo sapien
ttccagtgaagtgacatgacatagc

SEQ ID NO: 2285527 - DNA, 25 bp, Homo sapien
ggtatatgactttccagtgaagtga

SEQ ID NO: 2285528 - DNA, 25 bp, Homo sapien
tccagtgaagtgacatgacatagct

SEQ ID NO: 2285529 - DNA, 25 bp, Homo sapien
ctctggtcttcaggaggactttgct

SEQ ID NO: 2285530 - DNA, 25 bp, Homo sapien
ctttgcttaagtcacagtccaggtg

SEQ ID NO: 2285531 - DNA, 25 bp, Homo sapien
ttttccgacggagcacactcatggt

SEQ ID NO: 2285532 - DNA, 25 bp, Homo sapien
cactcatggtagatcatctctctgg

SEQ ID NO: 2285533 - DNA, 25 bp, Homo sapien
tggtttgccactggtagtactggga

SEQ ID NO: 2285534 - DNA, 25 bp, Homo sapien
tccaaggttccctactgagggtctg

SEQ ID NO: 2285535 - DNA, 25 bp, Homo sapien
tactgggaatgactttagatgctcc

SEQ ID NO: 2285536 - DNA, 25 bp, Homo sapien
cccaggtgctctgttggcattggta

SEQ ID NO: 2285537 - DNA, 25 bp, Homo sapien
tgtccagcacacgattaatttatgt

SEQ ID NO: 2285538 - DNA, 25 bp, Homo sapien
tccatagtaatttccatagagatac

SEQ ID NO: 2285539 - DNA, 25 bp, Homo sapien
tatactggcctactattctgagagc

SEQ ID NO: 2285540 - DNA, 25 bp, Homo sapien
atttatgtatactggcctactattc

SEQ ID NO: 2285541 - DNA, 25 bp, Homo sapien
ctcttacagctcgaactgctgagac

SEQ ID NO: 2285542 - DNA, 25 bp, Homo sapien
ctctcgggtatcttgatggtgagga

SEQ ID NO: 2285543 - DNA, 25 bp, Homo sapien
cactgctactcctcttacagctcga

SEQ ID NO: 2285544 - DNA, 25 bp, Homo sapien
ttgccctcctctcgggtatcttgat

SEQ ID NO: 2285545 - DNA, 25 bp, Homo sapien
atcagaggctggactgtccccattt

SEQ ID NO: 2285546 - DNA, 25 bp, Homo sapien
tgtaggtaaatcttcttgagtttcc

SEQ ID NO: 2285547 - DNA, 25 bp, Homo sapien
ctggactgtccccattttcagtttc

SEQ ID NO: 2285548 - DNA, 25 bp, Homo sapien
agacttggcttctttgtctccaggt

SEQ ID NO: 2285549 - DNA, 25 bp, Homo sapien
ccagggcaggttggatcaagcaatt

SEQ ID NO: 2285550 - DNA, 25 bp, Homo sapien
gggctgtcactttggcaagctgcca

SEQ ID NO: 2285551 - DNA, 25 bp, Homo sapien
ctttgccgcttgaaatttgaaggcc

SEQ ID NO: 2285552 - DNA, 25 bp, Homo sapien
gctacagagcacacgtggttttgac

SEQ ID NO: 2285553 - DNA, 25 bp, Homo sapien
cgagtggcatgaggagaggaagcaa

SEQ ID NO: 2285554 - DNA, 25 bp, Homo sapien
caacgcagctgtgtggaagctcagc

SEQ ID NO: 2285555 - DNA, 25 bp, Homo sapien
ttgggcgcctaagcagccaaggctc

SEQ ID NO: 2285556 - DNA, 25 bp, Homo sapien
tcgggtagaacttgggcgcctaagc

SEQ ID NO: 2285557 - DNA, 25 bp, Homo sapien
cacattgggccaagtaaagccctgc

SEQ ID NO: 2285558 - DNA, 25 bp, Homo sapien
ggagacaccatgggagtggccttca

SEQ ID NO: 2285559 - DNA, 25 bp, Homo sapien
ccctgggtcccctgatacacattgg

SEQ ID NO: 2285560 - DNA, 25 bp, Homo sapien
tattttgcttgaataatgacactgg

SEQ ID NO: 2285561 - DNA, 25 bp, Homo sapien
tcattcaggacagccccaaatgttc

SEQ ID NO: 2285562 - DNA, 25 bp, Homo sapien
cattcaggacagccccaaatgttcc

SEQ ID NO: 2285563 - DNA, 25 bp, Homo sapien
caggacagccccaaatgttcctttt

SEQ ID NO: 2285564 - DNA, 25 bp, Homo sapien
ttcaggacagccccaaatgttcctt

SEQ ID NO: 2285565 - DNA, 25 bp, Homo sapien
gctttggagaaatcccggaccagac

SEQ ID NO: 2285566 - DNA, 25 bp, Homo sapien
cgctttggagaaatcccggaccaga

SEQ ID NO: 2285567 - DNA, 25 bp, Homo sapien
atcgaaggtttttctcgattgaagg

SEQ ID NO: 2285568 - DNA, 25 bp, Homo sapien
gagatgagaagtcttctccttatcg

SEQ ID NO: 2285569 - DNA, 25 bp, Homo sapien
agtttcaatccctttagcttgcagc

SEQ ID NO: 2285570 - DNA, 25 bp, Homo sapien
tctcttagcttgcagctatgactca

SEQ ID NO: 2285571 - DNA, 25 bp, Homo sapien
gatgacgattgttctagctacttcc

SEQ ID NO: 2285572 - DNA, 25 bp, Homo sapien
tctttggtgtcgtggtgtgagaaca

SEQ ID NO: 2285573 - DNA, 25 bp, Homo sapien
gcttcccatactagtgttaatagtg

SEQ ID NO: 2285574 - DNA, 25 bp, Homo sapien
tgttattaagatagaggaagggctg

SEQ ID NO: 2285575 - DNA, 25 bp, Homo sapien
atttgaattaacacacatttggtct

SEQ ID NO: 2285576 - DNA, 25 bp, Homo sapien
caattcagtactgttgcgtttaacc

SEQ ID NO: 2285577 - DNA, 25 bp, Homo sapien
tttgaggtatgcagtatccttgtat

SEQ ID NO: 2285578 - DNA, 25 bp, Homo sapien
gtctttgaggtatgcagtatccttg

SEQ ID NO: 2285579 - DNA, 25 bp, Homo sapien
tggggtctttgaggtatgcagtatc

SEQ ID NO: 2285580 - DNA, 25 bp, Homo sapien
ttggggtctttgaggtatgcagtat

SEQ ID NO: 2285581 - DNA, 25 bp, Homo sapien
ttagaacaaaccagtgcttgggccg

SEQ ID NO: 2285582 - DNA, 25 bp, Homo sapien
ctttgtagcttgttgacctctatca

SEQ ID NO: 2285583 - DNA, 25 bp, Homo sapien
gcttgggccgtccactactttgtag

SEQ ID NO: 2285584 - DNA, 25 bp, Homo sapien
tcacattccccaaggttataaccaa

SEQ ID NO: 2285585 - DNA, 25 bp, Homo sapien
tatcaccagagggaaaggatttacc

SEQ ID NO: 2285586 - DNA, 25 bp, Homo sapien
ctatcaccagagggaaaggatttac

SEQ ID NO: 2285587 - DNA, 25 bp, Homo sapien
caccagagggaaaggatttaccaat

SEQ ID NO: 2285588 - DNA, 25 bp, Homo sapien
tcaccagagggaaaggatttaccaa

SEQ ID NO: 2285589 - DNA, 25 bp, Homo sapien
cccttccatctttatcaaaactgtc

SEQ ID NO: 2285590 - DNA, 25 bp, Homo sapien
ccccttccatctttatcaaaactgt

SEQ ID NO: 2285591 - DNA, 25 bp, Homo sapien
ccttccatctttatcaaaactgtcc

SEQ ID NO: 2285592 - DNA, 25 bp, Homo sapien
cccccttccatctttatcaaaactg

SEQ ID NO: 2285593 - DNA, 25 bp, Homo sapien
tactctgagatggaattcaacttgg

SEQ ID NO: 2285594 - DNA, 25 bp, Homo sapien
aagtagatgatggacgtgtttgtga

SEQ ID NO: 2285595 - DNA, 25 bp, Homo sapien
gtagatgatggacgtgtttgtgaac

SEQ ID NO: 2285596 - DNA, 25 bp, Homo sapien
agtagatgatggacgtgtttgtgaa

SEQ ID NO: 2285597 - DNA, 25 bp, Homo sapien
ctcagggaagcagatggtcaggggc

SEQ ID NO: 2285598 - DNA, 25 bp, Homo sapien
gggctgtgtgtgatcttctcctcca

SEQ ID NO: 2285599 - DNA, 25 bp, Homo sapien
gtcaggggctgtgtgtgatcttctc

SEQ ID NO: 2285600 - DNA, 25 bp, Homo sapien
ggaagcagatggtcaggggctgtgt

SEQ ID NO: 2285601 - DNA, 25 bp, Homo sapien
tctggttgtagctggctgcctcatc

SEQ ID NO: 2285602 - DNA, 25 bp, Homo sapien
gctgcctcatcatacttgttggacc

SEQ ID NO: 2285603 - DNA, 25 bp, Homo sapien
tggctgcctcatcatacttgttgga

SEQ ID NO: 2285604 - DNA, 25 bp, Homo sapien
gctggctgcctcatcatacttgttg

SEQ ID NO: 2285605 - DNA, 25 bp, Homo sapien
ttcttggtatcggtggcgcatgtga

SEQ ID NO: 2285606 - DNA, 25 bp, Homo sapien
tttgtgcttattcaggtcctcagac

SEQ ID NO: 2285607 - DNA, 25 bp, Homo sapien
tatcggtggcgcatgtgaagtgtgt

SEQ ID NO: 2285608 - DNA, 25 bp, Homo sapien
gaagtgtgtgtagatctccttggtg

SEQ ID NO: 2285609 - DNA, 25 bp, Homo sapien
cttgatgatgacgtcggtgatggca

SEQ ID NO: 2285610 - DNA, 25 bp, Homo sapien
agaggccccagtccttcaggttgtt

SEQ ID NO: 2285611 - DNA, 25 bp, Homo sapien
tggtggtggcccatcctgctaggtc

SEQ ID NO: 2285612 - DNA, 25 bp, Homo sapien
gctaggtcccactgcccctcagaag

SEQ ID NO: 2285613 - DNA, 25 bp, Homo sapien
tgacagaataccggtggacacaaaa

SEQ ID NO: 2285614 - DNA, 25 bp, Homo sapien
ctgacagaataccggtggacacaaa

SEQ ID NO: 2285615 - DNA, 25 bp, Homo sapien
aggaagaactaaagaactgggatgt

SEQ ID NO: 2285616 - DNA, 25 bp, Homo sapien
ttcgaacctgtaattgtaaccctga

SEQ ID NO: 2285617 - DNA, 25 bp, Homo sapien
ccctgaatccgattctatgaattgt

SEQ ID NO: 2285618 - DNA, 25 bp, Homo sapien
ctggcttgtctattgcaactgtgca

SEQ ID NO: 2285619 - DNA, 25 bp, Homo sapien
gcagctttaggctccagcgagtcca

SEQ ID NO: 2285620 - DNA, 25 bp, Homo sapien
atccagttctttctgcgaagtccat

SEQ ID NO: 2285621 - DNA, 25 bp, Homo sapien
cagcagctttaggctccagcgagtc

SEQ ID NO: 2285622 - DNA, 25 bp, Homo sapien
ccagcgagtccaggccaaatccagt

SEQ ID NO: 2285623 - DNA, 25 bp, Homo sapien
cacggggattatgaagagcgagctc

SEQ ID NO: 2285624 - DNA, 25 bp, Homo sapien
cccgacaggccacggggattatgaa

SEQ ID NO: 2285625 - DNA, 25 bp, Homo sapien
tcctggttagagacattgttctgga

SEQ ID NO: 2285626 - DNA, 25 bp, Homo sapien
tctggaaagcagactgggttgccat

SEQ ID NO: 2285627 - DNA, 25 bp, Homo sapien
ccgattttgtcatggattgggctcc

SEQ ID NO: 2285628 - DNA, 25 bp, Homo sapien
gacttttattgccacgaggtagccg

SEQ ID NO: 2285629 - DNA, 25 bp, Homo sapien
cgtagactggaaagtgtgcgaccca

SEQ ID NO: 2285630 - DNA, 25 bp, Homo sapien
ttctccagtaatgagggaccctctc

SEQ ID NO: 2285631 - DNA, 25 bp, Homo sapien
tcttatactgaaccaccctgtggag

SEQ ID NO: 2285632 - DNA, 25 bp, Homo sapien
ggctcaaagaggtttcaactcaaca

SEQ ID NO: 2285633 - DNA, 25 bp, Homo sapien
cagaaacagatatcgacaggtgact

SEQ ID NO: 2285634 - DNA, 25 bp, Homo sapien
tctgaagcctaggactgtgtagaag

SEQ ID NO: 2285635 - DNA, 25 bp, Homo sapien
cctgggctccagttcaggtagctgg

SEQ ID NO: 2285636 - DNA, 25 bp, Homo sapien
gaagccttagctgcatgcacccttg

SEQ ID NO: 2285637 - DNA, 25 bp, Homo sapien
caggtagctgggcttcaataacaga

SEQ ID NO: 2285638 - DNA, 25 bp, Homo sapien
taaaagaatggaggcggcaatagcg

SEQ ID NO: 2285639 - DNA, 25 bp, Homo sapien
aacaccttttcactaagctctccat

SEQ ID NO: 2285640 - DNA, 25 bp, Homo sapien
gtaaacaccttttcactaagctctc

SEQ ID NO: 2285641 - DNA, 25 bp, Homo sapien
taaacaccttttcactaagctctcc

SEQ ID NO: 2285642 - DNA, 25 bp, Homo sapien
agtaaacaccttttcactaagctct

SEQ ID NO: 2285643 - DNA, 25 bp, Homo sapien
gaaacgattctggtccaacaataag

SEQ ID NO: 2285644 - DNA, 25 bp, Homo sapien
gcctgaagaaacgattctggtccaa

SEQ ID NO: 2285645 - DNA, 25 bp, Homo sapien
taggcctgaagaaacgattctggtc

SEQ ID NO: 2285646 - DNA, 25 bp, Homo sapien
gattctggtccaacaataagcatcc

SEQ ID NO: 2285647 - DNA, 25 bp, Homo sapien
tctccagtggacgaaaaggtggagt

SEQ ID NO: 2285648 - DNA, 25 bp, Homo sapien
ttctccagtggacgaaaaggtggag

SEQ ID NO: 2285649 - DNA, 25 bp, Homo sapien
aaggtggagttttccttctgtgtca

SEQ ID NO: 2285650 - DNA, 25 bp, Homo sapien
ggagttttccttctgtgtcactctc

SEQ ID NO: 2285651 - DNA, 25 bp, Homo sapien
gaggccaatcactgaccagggttcc

SEQ ID NO: 2285652 - DNA, 25 bp, Homo sapien
gatacagctaagaatgaggccttga

SEQ ID NO: 2285653 - DNA, 25 bp, Homo sapien
cccagtttgcatgaggaggccaatc

SEQ ID NO: 2285654 - DNA, 25 bp, Homo sapien
tccacggagattcactggcccagtt

SEQ ID NO: 2285655 - DNA, 25 bp, Homo sapien
gagtgtttctcctatctctatgaga

SEQ ID NO: 2285656 - DNA, 25 bp, Homo sapien
gtgtttcgttatactcataaacgaa

SEQ ID NO: 2285657 - DNA, 25 bp, Homo sapien
aaacgaatgatccttgtctaaagcg

SEQ ID NO: 2285658 - DNA, 25 bp, Homo sapien
cttgtctaaagcgagtgtttctcct

SEQ ID NO: 2285659 - DNA, 25 bp, Homo sapien
gaaaatgtgctgtatacttacacaa

SEQ ID NO: 2285660 - DNA, 25 bp, Homo sapien
aatagtggctactagagcctggaaa

SEQ ID NO: 2285661 - DNA, 25 bp, Homo sapien
cagagttgatctcataggagcagag

SEQ ID NO: 2285662 - DNA, 25 bp, Homo sapien
ttcatggcaatgtggatgagcttgg

SEQ ID NO: 2285663 - DNA, 25 bp, Homo sapien
tccagccctctactcgcacatgtag

SEQ ID NO: 2285664 - DNA, 25 bp, Homo sapien
acattccagccctctactcgcacat

SEQ ID NO: 2285665 - DNA, 25 bp, Homo sapien
cacattccagccctctactcgcaca

SEQ ID NO: 2285666 - DNA, 25 bp, Homo sapien
attccagccctctactcgcacatgt

SEQ ID NO: 2285667 - DNA, 25 bp, Homo sapien
aaaggttaatatactatccgattca

SEQ ID NO: 2285668 - DNA, 25 bp, Homo sapien
gctgagaaaactgccctacattgac

SEQ ID NO: 2285669 - DNA, 25 bp, Homo sapien
tcctgctgagaaaactgccctacat

SEQ ID NO: 2285670 - DNA, 25 bp, Homo sapien
tactatccgattcatactcctgctg

SEQ ID NO: 2285671 - DNA, 25 bp, Homo sapien
ttacagcaggtacagtggacaacta

SEQ ID NO: 2285672 - DNA, 25 bp, Homo sapien
ccctccctggaatggtgctaaatca

SEQ ID NO: 2285673 - DNA, 25 bp, Homo sapien
tcttggtagctcaggcacattgctg

SEQ ID NO: 2285674 - DNA, 25 bp, Homo sapien
tattctaccattgcatgaggacagc

SEQ ID NO: 2285675 - DNA, 25 bp, Homo sapien
atggcaatgatagttaagagggtca

SEQ ID NO: 2285676 - DNA, 25 bp, Homo sapien
ggcaatgatagttaagagggtcagt

SEQ ID NO: 2285677 - DNA, 25 bp, Homo sapien
tgatagttaagagggtcagtgtatc

SEQ ID NO: 2285678 - DNA, 25 bp, Homo sapien
caatgatagttaagagggtcagtgt

SEQ ID NO: 2285679 - DNA, 25 bp, Homo sapien
tgccccactttgaggaaatccaaaa

SEQ ID NO: 2285680 - DNA, 25 bp, Homo sapien
aatccaaaataggatactgtgccat

SEQ ID NO: 2285681 - DNA, 25 bp, Homo sapien
ggaaatccaaaataggatactgtgc

SEQ ID NO: 2285682 - DNA, 25 bp, Homo sapien
caacaactgccccactttgaggaaa

SEQ ID NO: 2285683 - DNA, 25 bp, Homo sapien
aagaaagatgatggctctaaagaag

SEQ ID NO: 2285684 - DNA, 25 bp, Homo sapien
aaagtcattggtgtcaatcaactct

SEQ ID NO: 2285685 - DNA, 25 bp, Homo sapien
ctaagaaagaaagatgatggctcta

SEQ ID NO: 2285686 - DNA, 25 bp, Homo sapien
attggtgtcaatcaactctaggctc

SEQ ID NO: 2285687 - DNA, 25 bp, Homo sapien
tgctcttggttgggggtcatcccac

SEQ ID NO: 2285688 - DNA, 25 bp, Homo sapien
cacctagccctgaagctgctcttgg

SEQ ID NO: 2285689 - DNA, 25 bp, Homo sapien
ccacacctagccctgaagctgctct

SEQ ID NO: 2285690 - DNA, 25 bp, Homo sapien
gctcttggttgggggtcatcccaca

SEQ ID NO: 2285691 - DNA, 25 bp, Homo sapien
ttcgcgcgcttcagtcgccgcgccg

SEQ ID NO: 2285692 - DNA, 25 bp, Homo sapien
cgccgcctccgcagattcaaaaaca

SEQ ID NO: 2285693 - DNA, 25 bp, Homo sapien
ccgcctccgcagattcaaaaacaaa

SEQ ID NO: 2285694 - DNA, 25 bp, Homo sapien
ctcagcttttcgcgcgcttcagtcg

SEQ ID NO: 2285695 - DNA, 25 bp, Homo sapien
accaagttccttcctacagagccgt

SEQ ID NO: 2285696 - DNA, 25 bp, Homo sapien
cccgcgcagccgtccccgacgttgc

SEQ ID NO: 2285697 - DNA, 25 bp, Homo sapien
gcgcagccgtccccgacgttgccgc

SEQ ID NO: 2285698 - DNA, 25 bp, Homo sapien
gaaccaagttccttcctacagagcc

SEQ ID NO: 2285699 - DNA, 25 bp, Homo sapien
gcaggcgcagacacaactcccgcag

SEQ ID NO: 2285700 - DNA, 25 bp, Homo sapien
aagatcacgtgctcccatgcagcgc

SEQ ID NO: 2285701 - DNA, 25 bp, Homo sapien
gcagctccgcaaccgcgcaggcgca

SEQ ID NO: 2285702 - DNA, 25 bp, Homo sapien
cgcaagatcacgtgctcccatgcag

SEQ ID NO: 2285703 - DNA, 25 bp, Homo sapien
aaatctagaacccaaatggcgtcca

SEQ ID NO: 2285704 - DNA, 25 bp, Homo sapien
gaacattagatcttgaaaatgaata

SEQ ID NO: 2285705 - DNA, 25 bp, Homo sapien
tgaatattgcgcttgcgcagccacc

SEQ ID NO: 2285706 - DNA, 25 bp, Homo sapien
tggcgtccaacaagaacattagatc

SEQ ID NO: 2285707 - DNA, 25 bp, Homo sapien
gtaacaataatctagctgaagcagt

SEQ ID NO: 2285708 - DNA, 25 bp, Homo sapien
tgaagcagtaatgaacaagtcacct

SEQ ID NO: 2285709 - DNA, 25 bp, Homo sapien
gcacttcccgtgagaacaccactag

SEQ ID NO: 2285710 - DNA, 25 bp, Homo sapien
gaggcctcagggtaatggatgttct

SEQ ID NO: 2285711 - DNA, 25 bp, Homo sapien
aaatggtttccaccatgcaagctga

SEQ ID NO: 2285712 - DNA, 25 bp, Homo sapien
ttattcttaactgaaagtgctcccc

SEQ ID NO: 2285713 - DNA, 25 bp, Homo sapien
tataaacaagcactagtagccctga

SEQ ID NO: 2285714 - DNA, 25 bp, Homo sapien
agtggctgaggtacctgagtcatcc

SEQ ID NO: 2285715 - DNA, 25 bp, Homo sapien
ggaattcacttctgacatttaccac

SEQ ID NO: 2285716 - DNA, 25 bp, Homo sapien
ctaatggaattcacttctgacattt

SEQ ID NO: 2285717 - DNA, 25 bp, Homo sapien
tggaattcacttctgacatttacca

SEQ ID NO: 2285718 - DNA, 25 bp, Homo sapien
aatggaattcacttctgacatttac

SEQ ID NO: 2285719 - DNA, 25 bp, Homo sapien
taccaaatcggaaaatcatttaaca

SEQ ID NO: 2285720 - DNA, 25 bp, Homo sapien
ttttaaatcaacacctcattagacc

SEQ ID NO: 2285721 - DNA, 25 bp, Homo sapien
tcaaatggctaaagaaaacatgaaa

SEQ ID NO: 2285722 - DNA, 25 bp, Homo sapien
cctatgtgaatcaaatggctaaaga

SEQ ID NO: 2285723 - DNA, 25 bp, Homo sapien
cagagaaccccaagataccctacaa

SEQ ID NO: 2285724 - DNA, 25 bp, Homo sapien
taccctacaattataggtactgcag

SEQ ID NO: 2285725 - DNA, 25 bp, Homo sapien
aagctcattaagtcagatgatgcgg

SEQ ID NO: 2285726 - DNA, 25 bp, Homo sapien
cctcccaaggattgcatcttaaata

SEQ ID NO: 2285727 - DNA, 25 bp, Homo sapien
ccacagaatctaaaagccccaaagt

SEQ ID NO: 2285728 - DNA, 25 bp, Homo sapien
gcagaacagttaaagcctacaatta

SEQ ID NO: 2285729 - DNA, 25 bp, Homo sapien
ggtcacaaacattaacatccccagg

SEQ ID NO: 2285730 - DNA, 25 bp, Homo sapien
ccaaagtgctcaaatctagcagaac

SEQ ID NO: 2285731 - DNA, 25 bp, Homo sapien
cactgacatacttgctgcctaagca

SEQ ID NO: 2285732 - DNA, 25 bp, Homo sapien
ctctggtcctgatgcatgtgacaag

SEQ ID NO: 2285733 - DNA, 25 bp, Homo sapien
tggtcctgatgcatgtgacaagtct

SEQ ID NO: 2285734 - DNA, 25 bp, Homo sapien
tgtgacaagtctcctcactgacata

SEQ ID NO: 2285735 - DNA, 25 bp, Homo sapien
tgattcagtgaagaggaccagaggt

SEQ ID NO: 2285736 - DNA, 25 bp, Homo sapien
tccaaggccacgcaggtaacgtgat

SEQ ID NO: 2285737 - DNA, 25 bp, Homo sapien
ggctcccatggcactctatataaaa

SEQ ID NO: 2285738 - DNA, 25 bp, Homo sapien
gatagtgatgtcctttaacacagcg

SEQ ID NO: 2285739 - DNA, 25 bp, Homo sapien
ttagacctgatacgccagtgtgaat

SEQ ID NO: 2285740 - DNA, 25 bp, Homo sapien
ttgaacagttaagttcatcagacat

SEQ ID NO: 2285741 - DNA, 25 bp, Homo sapien
attggtatttgaacagttaagttca

SEQ ID NO: 2285742 - DNA, 25 bp, Homo sapien
aatacagactttcaatttagacctg

SEQ ID NO: 2285743 - DNA, 25 bp, Homo sapien
gaacttcaccctggatctctatctt

SEQ ID NO: 2285744 - DNA, 25 bp, Homo sapien
aggaacttcaccctggatctctatc

SEQ ID NO: 2285745 - DNA, 25 bp, Homo sapien
ggaacttcaccctggatctctatct

SEQ ID NO: 2285746 - DNA, 25 bp, Homo sapien
catcatgaagaggattacagatcag

SEQ ID NO: 2285747 - DNA, 25 bp, Homo sapien
ttgacactacgaaagcctaaacact

SEQ ID NO: 2285748 - DNA, 25 bp, Homo sapien
tatatgaaaccatccagtagtgtgt

SEQ ID NO: 2285749 - DNA, 25 bp, Homo sapien
tacagttgctgaaatgaatggctgg

SEQ ID NO: 2285750 - DNA, 25 bp, Homo sapien
ttcactacttattaggtgttcttaa

SEQ ID NO: 2285751 - DNA, 25 bp, Homo sapien
gcagccatactcttagtttatataa

SEQ ID NO: 2285752 - DNA, 25 bp, Homo sapien
ctgcagccatactcttagtttatat

SEQ ID NO: 2285753 - DNA, 25 bp, Homo sapien
tcaaattcactacttattaggtgtt

SEQ ID NO: 2285754 - DNA, 25 bp, Homo sapien
tgtgctgtctactgcactgaactga

SEQ ID NO: 2285755 - DNA, 25 bp, Homo sapien
tctggacccaaaggattactaggga

SEQ ID NO: 2285756 - DNA, 25 bp, Homo sapien
tgcctttcgcagcaagttacaaaag

SEQ ID NO: 2285757 - DNA, 25 bp, Homo sapien
tatgtcttagcctacaatctgcctg

SEQ ID NO: 2285758 - DNA, 25 bp, Homo sapien
tattttacggcagaagatgtctgcc

SEQ ID NO: 2285759 - DNA, 25 bp, Homo sapien
aaaaagcattggtattttacggcag

SEQ ID NO: 2285760 - DNA, 25 bp, Homo sapien
ttttaggtggcaactcaaatcagaa

SEQ ID NO: 2285761 - DNA, 25 bp, Homo sapien
aaagctttcacatgactgtaattca

SEQ ID NO: 2285762 - DNA, 25 bp, Homo sapien
ttaataacccaattaagaacatgaa

SEQ ID NO: 2285763 - DNA, 25 bp, Homo sapien
aacatgaactctgtagactgtagac

SEQ ID NO: 2285764 - DNA, 25 bp, Homo sapien
tttaataacccaattaagaacatga

SEQ ID NO: 2285765 - DNA, 25 bp, Homo sapien
gaacatgaactctgtagactgtaga

SEQ ID NO: 2285766 - DNA, 25 bp, Homo sapien
cagaagccacctaattgtagactta

SEQ ID NO: 2285767 - DNA, 25 bp, Homo sapien
ttcatgtaatgtttaagacatagaa

SEQ ID NO: 2285768 - DNA, 25 bp, Homo sapien
acagaagccacctaattgtagactt

SEQ ID NO: 2285769 - DNA, 25 bp, Homo sapien
tcatgtaatgtttaagacatagaaa

SEQ ID NO: 2285770 - DNA, 25 bp, Homo sapien
gcttcaagttgctgacgatcactca

SEQ ID NO: 2285771 - DNA, 25 bp, Homo sapien
ggttgccatttaacagcttgacatc

SEQ ID NO: 2285772 - DNA, 25 bp, Homo sapien
caaaggtgaggttgggtccaaatct

SEQ ID NO: 2285773 - DNA, 25 bp, Homo sapien
tacattaacacttaggatacagggt

SEQ ID NO: 2285774 - DNA, 25 bp, Homo sapien
gaccggttcacctgggatgggatca

SEQ ID NO: 2285775 - DNA, 25 bp, Homo sapien
accagaggttgcatcaccagaggca

SEQ ID NO: 2285776 - DNA, 25 bp, Homo sapien
cagcggcacaatcaccagaaatggg

SEQ ID NO: 2285777 - DNA, 25 bp, Homo sapien
caggaactggttcacaaactggtac

SEQ ID NO: 2285778 - DNA, 25 bp, Homo sapien
cattttgcgatataacttcagactc

SEQ ID NO: 2285779 - DNA, 25 bp, Homo sapien
gatttgtctcatcgattggaaggag

SEQ ID NO: 2285780 - DNA, 25 bp, Homo sapien
gcaagtaagttcatcctcagaaggt

SEQ ID NO: 2285781 - DNA, 25 bp, Homo sapien
ctggagagcacgtttcattttgcga

SEQ ID NO: 2285782 - DNA, 25 bp, Homo sapien
ggccctcaagtaccctggactacag

SEQ ID NO: 2285783 - DNA, 25 bp, Homo sapien
tctatttccagactataagggcata

SEQ ID NO: 2285784 - DNA, 25 bp, Homo sapien
tctggcttacaacaatggtgctgtc

SEQ ID NO: 2285785 - DNA, 25 bp, Homo sapien
gaaagaactgctacaactctagtca

SEQ ID NO: 2285786 - DNA, 25 bp, Homo sapien
actgaagagtgctgccaaaagatat

SEQ ID NO: 2285787 - DNA, 25 bp, Homo sapien
tgcatgagtcatataaaatgtaaca

SEQ ID NO: 2285788 - DNA, 25 bp, Homo sapien
tgtaacaactgaagagtgctgccaa

SEQ ID NO: 2285789 - DNA, 25 bp, Homo sapien
cacctcgactggcccagaagggtta

SEQ ID NO: 2285790 - DNA, 25 bp, Homo sapien
catcttcatgtattacttgctcttc

SEQ ID NO: 2285791 - DNA, 25 bp, Homo sapien
ttttctcagaaggtctttcatcatc

SEQ ID NO: 2285792 - DNA, 25 bp, Homo sapien
tcatgtattacttgctcttcttcct

SEQ ID NO: 2285793 - DNA, 25 bp, Homo sapien
ttcctcaggtttgttgtccttttca

SEQ ID NO: 2285794 - DNA, 25 bp, Homo sapien
ctgatttagaacgttttcgtctaga

SEQ ID NO: 2285795 - DNA, 25 bp, Homo sapien
cttcttccatatatcgacgacgttt

SEQ ID NO: 2285796 - DNA, 25 bp, Homo sapien
cctttggctgtaatctttacttgaa

SEQ ID NO: 2285797 - DNA, 25 bp, Homo sapien
gacgtttagactgtacattgtccat

SEQ ID NO: 2285798 - DNA, 25 bp, Homo sapien
ataatgtcagaaacctagaagaaga

SEQ ID NO: 2285799 - DNA, 25 bp, Homo sapien
gaataatgtcagaaacctagaagaa

SEQ ID NO: 2285800 - DNA, 25 bp, Homo sapien
aagaagatagtggtgctatttattc

SEQ ID NO: 2285801 - DNA, 25 bp, Homo sapien
tctatgataaaccacattatgtcaa

SEQ ID NO: 2285802 - DNA, 25 bp, Homo sapien
gaactgttttatgcctcttgttaca

SEQ ID NO: 2285803 - DNA, 25 bp, Homo sapien
tcaaatacagcacactgcagcgcac

SEQ ID NO: 2285804 - DNA, 25 bp, Homo sapien
tcaattctgccaaagtcttatcaaa

SEQ ID NO: 2285805 - DNA, 25 bp, Homo sapien
cattcaatcttttccactcgtgttt

SEQ ID NO: 2285806 - DNA, 25 bp, Homo sapien
caaggttaaaagtagtcaccgctgg

SEQ ID NO: 2285807 - DNA, 25 bp, Homo sapien
aacctcttaggaaataactctgtct

SEQ ID NO: 2285808 - DNA, 25 bp, Homo sapien
ggttggcctataacaaatattactg

SEQ ID NO: 2285809 - DNA, 25 bp, Homo sapien
caccgctggaagctatgattggcag

SEQ ID NO: 2285810 - DNA, 25 bp, Homo sapien
tcaaagcgtttggttaacctggcta

SEQ ID NO: 2285811 - DNA, 25 bp, Homo sapien
ctgcttcaaagcgtttggttaacct

SEQ ID NO: 2285812 - DNA, 25 bp, Homo sapien
ttttcttaagatcttctttggctgc

SEQ ID NO: 2285813 - DNA, 25 bp, Homo sapien
gtttggttaacctggctatcttggc

SEQ ID NO: 2285814 - DNA, 25 bp, Homo sapien
ttttcctggtgatactggtgggttg

SEQ ID NO: 2285815 - DNA, 25 bp, Homo sapien
tgctgttgacatcatttacagtttt

SEQ ID NO: 2285816 - DNA, 25 bp, Homo sapien
ttattgctgttgacatcatttacag

SEQ ID NO: 2285817 - DNA, 25 bp, Homo sapien
tattgctgttgacatcatttacagt

SEQ ID NO: 2285818 - DNA, 25 bp, Homo sapien
gtggtgcactctcgcttacatttct

SEQ ID NO: 2285819 - DNA, 25 bp, Homo sapien
ggtgcactctcgcttacatttcttt

SEQ ID NO: 2285820 - DNA, 25 bp, Homo sapien
gatggtggtgcactctcgcttacat

SEQ ID NO: 2285821 - DNA, 25 bp, Homo sapien
tggtggtgcactctcgcttacattt

SEQ ID NO: 2285822 - DNA, 25 bp, Homo sapien
tgtgaactactacaatagagatttg

SEQ ID NO: 2285823 - DNA, 25 bp, Homo sapien
tgagtatacatacctttaagctatc

SEQ ID NO: 2285824 - DNA, 25 bp, Homo sapien
taaagggatctagagaccagaaagt

SEQ ID NO: 2285825 - DNA, 25 bp, Homo sapien
taaatatcaatggatgtaacccaca

SEQ ID NO: 2285826 - DNA, 25 bp, Homo sapien
ctagcgcccaggatcgagtacactg

SEQ ID NO: 2285827 - DNA, 25 bp, Homo sapien
ggtttcagattacacttcacaacca

SEQ ID NO: 2285828 - DNA, 25 bp, Homo sapien
aaggtttgcctctagcgcccaggat

SEQ ID NO: 2285829 - DNA, 25 bp, Homo sapien
atggaggagttagaaaagttctttg

SEQ ID NO: 2285830 - DNA, 25 bp, Homo sapien
ggagtgacaagattggttgaagata

SEQ ID NO: 2285831 - DNA, 25 bp, Homo sapien
cccactgtgggtaaagaagtccttg

SEQ ID NO: 2285832 - DNA, 25 bp, Homo sapien
gaactgacgttgctgtgagggaacc

SEQ ID NO: 2285833 - DNA, 25 bp, Homo sapien
tgagggaacccgaagtcactggagt

SEQ ID NO: 2285834 - DNA, 25 bp, Homo sapien
ggatttccactaggcacctgagtag

SEQ ID NO: 2285835 - DNA, 25 bp, Homo sapien
aaatcttgtatgtccactgacctca

SEQ ID NO: 2285836 - DNA, 25 bp, Homo sapien
tactaatagtgtacatcaaccagat

SEQ ID NO: 2285837 - DNA, 25 bp, Homo sapien
taatgtggtagcagataacactaac

SEQ ID NO: 2285838 - DNA, 25 bp, Homo sapien
gaagtgtttggagtacaagcatgac

SEQ ID NO: 2285839 - DNA, 25 bp, Homo sapien
tattaattaccaagtactgccaatg

SEQ ID NO: 2285840 - DNA, 25 bp, Homo sapien
tattgcaaggctggtggcgagctcc

SEQ ID NO: 2285841 - DNA, 25 bp, Homo sapien
ccatgcctagccaactctagtttta

SEQ ID NO: 2285842 - DNA, 25 bp, Homo sapien
tatctagtttagtaaatggaacagc

SEQ ID NO: 2285843 - DNA, 25 bp, Homo sapien
aaaaactttccactggcccagcaat

SEQ ID NO: 2285844 - DNA, 25 bp, Homo sapien
ctctaagcagtatctcatggaaata

SEQ ID NO: 2285845 - DNA, 25 bp, Homo sapien
gaccactgctatagtatctttcaga

SEQ ID NO: 2285846 - DNA, 25 bp, Homo sapien
gcccagcaattttaactctaagcag

SEQ ID NO: 2285847 - DNA, 25 bp, Homo sapien
ctgacagaagcatctattgttttgt

SEQ ID NO: 2285848 - DNA, 25 bp, Homo sapien
ttactgacagaagcatctattgttt

SEQ ID NO: 2285849 - DNA, 25 bp, Homo sapien
tactgacagaagcatctattgtttt

SEQ ID NO: 2285850 - DNA, 25 bp, Homo sapien
actgacagaagcatctattgttttg

SEQ ID NO: 2285851 - DNA, 25 bp, Homo sapien
gatgtacctggaagaaattacatgt

SEQ ID NO: 2285852 - DNA, 25 bp, Homo sapien
ttttgcagacaatctttacagtatg

SEQ ID NO: 2285853 - DNA, 25 bp, Homo sapien
caagtgaaggtaaaccaatgagaca

SEQ ID NO: 2285854 - DNA, 25 bp, Homo sapien
tagagtgtggtacaagtgaaggtaa

SEQ ID NO: 2285855 - DNA, 25 bp, Homo sapien
tagccactagccatttgtagctact

SEQ ID NO: 2285856 - DNA, 25 bp, Homo sapien
aaaagacagccatcataatgtccat

SEQ ID NO: 2285857 - DNA, 25 bp, Homo sapien
tatcatattagatagcacagctcta

SEQ ID NO: 2285858 - DNA, 25 bp, Homo sapien
gctctagaagaaccaccatttacaa

SEQ ID NO: 2285859 - DNA, 25 bp, Homo sapien
caattcaaagaatcacaggctacct

SEQ ID NO: 2285860 - DNA, 25 bp, Homo sapien
ctaagtaggcttgggacagaaaaat

SEQ ID NO: 2285861 - DNA, 25 bp, Homo sapien
gcacctggcctgagacatccagatt

SEQ ID NO: 2285862 - DNA, 25 bp, Homo sapien
gcaaggtgcacattagggtaaaaag

SEQ ID NO: 2285863 - DNA, 25 bp, Homo sapien
gagatcaatgacaccacttgaatca

SEQ ID NO: 2285864 - DNA, 25 bp, Homo sapien
tcaatgacaccacttgaatcactgc

SEQ ID NO: 2285865 - DNA, 25 bp, Homo sapien
gatcaatgacaccacttgaatcact

SEQ ID NO: 2285866 - DNA, 25 bp, Homo sapien
gtgagatcaatgacaccacttgaat

SEQ ID NO: 2285867 - DNA, 25 bp, Homo sapien
tgtctttgtagaatactgtaccgta

SEQ ID NO: 2285868 - DNA, 25 bp, Homo sapien
taaaccaagcataatgccataaaca

SEQ ID NO: 2285869 - DNA, 25 bp, Homo sapien
ctgacctcttgcctcgatcctcctg

SEQ ID NO: 2285870 - DNA, 25 bp, Homo sapien
aaaatggtatcaaaacgttgcttag

SEQ ID NO: 2285871 - DNA, 25 bp, Homo sapien
caatggtcgtgacacaggctgagaa

SEQ ID NO: 2285872 - DNA, 25 bp, Homo sapien
tgagatggtccacttgttggcaccc

SEQ ID NO: 2285873 - DNA, 25 bp, Homo sapien
tggttgatacaggagtgtgatttag

SEQ ID NO: 2285874 - DNA, 25 bp, Homo sapien
ttgtatgggttgcaatggtcgtgac

SEQ ID NO: 2285875 - DNA, 25 bp, Homo sapien
ttatatcttaaatcattcttggaga

SEQ ID NO: 2285876 - DNA, 25 bp, Homo sapien
catgaaacacctgttaacactgcag

SEQ ID NO: 2285877 - DNA, 25 bp, Homo sapien
actaggaatatggtttacagtttct

SEQ ID NO: 2285878 - DNA, 25 bp, Homo sapien
taaccatggaactttgtattcatga

SEQ ID NO: 2285879 - DNA, 25 bp, Homo sapien
cctgagttactggacgatgtgttac

SEQ ID NO: 2285880 - DNA, 25 bp, Homo sapien
cagcaggagcctgcataacagttcc

SEQ ID NO: 2285881 - DNA, 25 bp, Homo sapien
tgcaggaagagttgtataaaccacc

SEQ ID NO: 2285882 - DNA, 25 bp, Homo sapien
aacagttcctcgcaagggagcctga

SEQ ID NO: 2285883 - DNA, 25 bp, Homo sapien
tatcttggggccatatacaagaaaa

SEQ ID NO: 2285884 - DNA, 25 bp, Homo sapien
ggccatatacaagaaaaatctctta

SEQ ID NO: 2285885 - DNA, 25 bp, Homo sapien
tggggccatatacaagaaaaatctc

SEQ ID NO: 2285886 - DNA, 25 bp, Homo sapien
ctacatgtatcttggggccatatac

SEQ ID NO: 2285887 - DNA, 25 bp, Homo sapien
tctagctgacatatgcatgatctca

SEQ ID NO: 2285888 - DNA, 25 bp, Homo sapien
catacactgcagaatggctaaatct

SEQ ID NO: 2285889 - DNA, 25 bp, Homo sapien
cttaaaatctgctctatcagctatt

SEQ ID NO: 2285890 - DNA, 25 bp, Homo sapien
caacatgtttgaaatatgcatacac

SEQ ID NO: 2285891 - DNA, 25 bp, Homo sapien
tagattagttttggttatactgcca

SEQ ID NO: 2285892 - DNA, 25 bp, Homo sapien
taatagattagttttggttatactg

SEQ ID NO: 2285893 - DNA, 25 bp, Homo sapien
atagattagttttggttatactgcc

SEQ ID NO: 2285894 - DNA, 25 bp, Homo sapien
gattagttttggttatactgccatt

SEQ ID NO: 2285895 - DNA, 25 bp, Homo sapien
gtcatctacatatgtaacatgcatg

SEQ ID NO: 2285896 - DNA, 25 bp, Homo sapien
cagagcacaaatcaactagtataca

SEQ ID NO: 2285897 - DNA, 25 bp, Homo sapien
ggtaaatcacaattgaccattccca

SEQ ID NO: 2285898 - DNA, 25 bp, Homo sapien
tctttaagactctcattgaaggcta

SEQ ID NO: 2285899 - DNA, 25 bp, Homo sapien
ctaatagaaaagtaggaacagtggt

SEQ ID NO: 2285900 - DNA, 25 bp, Homo sapien
ggaatacaagaccacttacaggata

SEQ ID NO: 2285901 - DNA, 25 bp, Homo sapien
ctctagagaaccctagtatgtttaa

SEQ ID NO: 2285902 - DNA, 25 bp, Homo sapien
gatatcaattttggtggcaaaatca

SEQ ID NO: 2285903 - DNA, 25 bp, Homo sapien
gctgcttaatgtgattagacccaaa

SEQ ID NO: 2285904 - DNA, 25 bp, Homo sapien
tcagttgctcctaagtgcagtggaa

SEQ ID NO: 2285905 - DNA, 25 bp, Homo sapien
tcctgattcactgcttgtgggaagc

SEQ ID NO: 2285906 - DNA, 25 bp, Homo sapien
taccttggaccatatgtggagaacc

SEQ ID NO: 2285907 - DNA, 25 bp, Homo sapien
cgatgttggccaggctcatctcgaa

SEQ ID NO: 2285908 - DNA, 25 bp, Homo sapien
ctcaagtgatctgcctgccttggcc

SEQ ID NO: 2285909 - DNA, 25 bp, Homo sapien
ttttggtagggatgaggtttcacga

SEQ ID NO: 2285910 - DNA, 25 bp, Homo sapien
tggtagggatgaggtttcacgatgt

SEQ ID NO: 2285911 - DNA, 25 bp, Homo sapien
tcctgttgatcccagggttagtcca

SEQ ID NO: 2285912 - DNA, 25 bp, Homo sapien
cacttgtggtggtcggtgatgcact

SEQ ID NO: 2285913 - DNA, 25 bp, Homo sapien
catatgtggttgtttgaggcactcg

SEQ ID NO: 2285914 - DNA, 25 bp, Homo sapien
tgatgcactgtgagctgaggtcctg

SEQ ID NO: 2285915 - DNA, 25 bp, Homo sapien
cagttgagaattttgcaaaaccaag

SEQ ID NO: 2285916 - DNA, 25 bp, Homo sapien
ctctacagttgagaattttgcaaaa

SEQ ID NO: 2285917 - DNA, 25 bp, Homo sapien
gagaattttgcaaaaccaagcatca

SEQ ID NO: 2285918 - DNA, 25 bp, Homo sapien
tgcaaaaccaagcatcaacacttac

SEQ ID NO: 2285919 - DNA, 25 bp, Homo sapien
caggtcacactgattaatgatgatt

SEQ ID NO: 2285920 - DNA, 25 bp, Homo sapien
ctgaagaaacaggtcacactgatta

SEQ ID NO: 2285921 - DNA, 25 bp, Homo sapien
gtcacactgattaatgatgattgca

SEQ ID NO: 2285922 - DNA, 25 bp, Homo sapien
gaaacaggtcacactgattaatgat

SEQ ID NO: 2285923 - DNA, 25 bp, Homo sapien
tcacatctgttgactgaggatcaca

SEQ ID NO: 2285924 - DNA, 25 bp, Homo sapien
aatatccttggctcgtactgcaaag

SEQ ID NO: 2285925 - DNA, 25 bp, Homo sapien
ccattttgactctgaacgcgtgcta

SEQ ID NO: 2285926 - DNA, 25 bp, Homo sapien
gatggtagctatcaacagtggcaca

SEQ ID NO: 2285927 - DNA, 25 bp, Homo sapien
gggtatcatgcacaagattaaaaac

SEQ ID NO: 2285928 - DNA, 25 bp, Homo sapien
tattttgcttctggttataaacaaa

SEQ ID NO: 2285929 - DNA, 25 bp, Homo sapien
cacaaggtggattttacatggggta

SEQ ID NO: 2285930 - DNA, 25 bp, Homo sapien
aatgtagtgtatacacacatctgtc

SEQ ID NO: 2285931 - DNA, 25 bp, Homo sapien
gagaaatcaagggtaaaaggctgca

SEQ ID NO: 2285932 - DNA, 25 bp, Homo sapien
taagcaacaacggacatatggccat

SEQ ID NO: 2285933 - DNA, 25 bp, Homo sapien
caaatagatcctttcctgtgttcga

SEQ ID NO: 2285934 - DNA, 25 bp, Homo sapien
gatactatagatccttcaaaagcag

SEQ ID NO: 2285935 - DNA, 25 bp, Homo sapien
ccttaaacagtatgcagtattcggc

SEQ ID NO: 2285936 - DNA, 25 bp, Homo sapien
taatatagctgctgcccctacgtgc

SEQ ID NO: 2285937 - DNA, 25 bp, Homo sapien
tgggtacatcagactcaacttggca

SEQ ID NO: 2285938 - DNA, 25 bp, Homo sapien
catgggccttcagttttgtagacag

SEQ ID NO: 2285939 - DNA, 25 bp, Homo sapien
caaaaggtgtttgattgcccagtta

SEQ ID NO: 2285940 - DNA, 25 bp, Homo sapien
ctaaagccagaatccccaaaaggtg

SEQ ID NO: 2285941 - DNA, 25 bp, Homo sapien
ggaaggtagaatcacacatcggttt

SEQ ID NO: 2285942 - DNA, 25 bp, Homo sapien
taaaacaggccaaccacaggtcagt

SEQ ID NO: 2285943 - DNA, 25 bp, Homo sapien
tacagacaccactctactatacatt

SEQ ID NO: 2285944 - DNA, 25 bp, Homo sapien
cactacaggtaacacttatacagac

SEQ ID NO: 2285945 - DNA, 25 bp, Homo sapien
taggaaggtcttacttacattgtct

SEQ ID NO: 2285946 - DNA, 25 bp, Homo sapien
ggcttgctggacaaaaccccactac

SEQ ID NO: 2285947 - DNA, 25 bp, Homo sapien
tatctgttataaatgtcagagatca

SEQ ID NO: 2285948 - DNA, 25 bp, Homo sapien
gtatctgttataaatgtcagagatc

SEQ ID NO: 2285949 - DNA, 25 bp, Homo sapien
caggtatctgttataaatgtcagag

SEQ ID NO: 2285950 - DNA, 25 bp, Homo sapien
atacaggtatctgttataaatgtca

SEQ ID NO: 2285951 - DNA, 25 bp, Homo sapien
gggcctctcctcagaactgcttgaa

SEQ ID NO: 2285952 - DNA, 25 bp, Homo sapien
ggttcctcttcacttgggcctctcc

SEQ ID NO: 2285953 - DNA, 25 bp, Homo sapien
ggtgctggcaactggttcctcttca

SEQ ID NO: 2285954 - DNA, 25 bp, Homo sapien
taacatagctgacagggtggtgctg

SEQ ID NO: 2285955 - DNA, 25 bp, Homo sapien
aatcatcatatctcacatgtactga

SEQ ID NO: 2285956 - DNA, 25 bp, Homo sapien
tctgcccatcatcctaaatcttcaa

SEQ ID NO: 2285957 - DNA, 25 bp, Homo sapien
caaatcttcacgtgcactgattgga

SEQ ID NO: 2285958 - DNA, 25 bp, Homo sapien
gattggacaatagacaaaacagatt

SEQ ID NO: 2285959 - DNA, 25 bp, Homo sapien
catagaactatgctttacgatgaag

SEQ ID NO: 2285960 - DNA, 25 bp, Homo sapien
tggagttgtttaacaggcttggtct

SEQ ID NO: 2285961 - DNA, 25 bp, Homo sapien
catgccatcttagctgctgagtcca

SEQ ID NO: 2285962 - DNA, 25 bp, Homo sapien
ttggattcatccagtagacatgaca

SEQ ID NO: 2285963 - DNA, 25 bp, Homo sapien
ctcctaggagcctgttagcgcccgt

SEQ ID NO: 2285964 - DNA, 25 bp, Homo sapien
ggcgtctggttcctgggtgaactca

SEQ ID NO: 2285965 - DNA, 25 bp, Homo sapien
cgtccggccgagttgacgtccagcg

SEQ ID NO: 2285966 - DNA, 25 bp, Homo sapien
gctgttgttagtcaccgcggagccg

SEQ ID NO: 2285967 - DNA, 25 bp, Homo sapien
gcggcgcccctgagtaggccaggag

SEQ ID NO: 2285968 - DNA, 25 bp, Homo sapien
gcgcccctgagtaggccaggagcct

SEQ ID NO: 2285969 - DNA, 25 bp, Homo sapien
gcccctgagtaggccaggagcctct

SEQ ID NO: 2285970 - DNA, 25 bp, Homo sapien
ggcggcgcccctgagtaggccagga

SEQ ID NO: 2285971 - DNA, 25 bp, Homo sapien
tcagacgtaaaggatccgcctttcc

SEQ ID NO: 2285972 - DNA, 25 bp, Homo sapien
gagcaggccgggctcaagaaagagg

SEQ ID NO: 2285973 - DNA, 25 bp, Homo sapien
ttgctagagggtcagacgtaaagga

SEQ ID NO: 2285974 - DNA, 25 bp, Homo sapien
ctgcgaaagaaagcggcaggcagcc

SEQ ID NO: 2285975 - DNA, 25 bp, Homo sapien
cgcctggtccgctgctggagataaa

SEQ ID NO: 2285976 - DNA, 25 bp, Homo sapien
tgttgatgtgaactgattcgcccaa

SEQ ID NO: 2285977 - DNA, 25 bp, Homo sapien
tggagataaatggtcgaccccggag

SEQ ID NO: 2285978 - DNA, 25 bp, Homo sapien
gaaacagcagaggatccgagctgcg

SEQ ID NO: 2285979 - DNA, 25 bp, Homo sapien
tcttgcaggccatgtttgttcatac

SEQ ID NO: 2285980 - DNA, 25 bp, Homo sapien
tcaacactttcttattctactcatc

SEQ ID NO: 2285981 - DNA, 25 bp, Homo sapien
caacactttcttattctactcatct

SEQ ID NO: 2285982 - DNA, 25 bp, Homo sapien
tgctcttgcaggccatgtttgttca

SEQ ID NO: 2285983 - DNA, 25 bp, Homo sapien
ctcagtgccttctccttttggcttg

SEQ ID NO: 2285984 - DNA, 25 bp, Homo sapien
acctcagtgccttctccttttggct

SEQ ID NO: 2285985 - DNA, 25 bp, Homo sapien
cagtgccttctccttttggcttgag

SEQ ID NO: 2285986 - DNA, 25 bp, Homo sapien
gtgccttctccttttggcttgagct

SEQ ID NO: 2285987 - DNA, 25 bp, Homo sapien
gaaagagtggaggacttctgcgaca

SEQ ID NO: 2285988 - DNA, 25 bp, Homo sapien
gactgctcacaccaagaggttcccg

SEQ ID NO: 2285989 - DNA, 25 bp, Homo sapien
tctactccgttgttggctgcttgct

SEQ ID NO: 2285990 - DNA, 25 bp, Homo sapien
gaggttcccgctggaggttctactc

SEQ ID NO: 2285991 - DNA, 25 bp, Homo sapien
ccactctggaaccttattccagcag

SEQ ID NO: 2285992 - DNA, 25 bp, Homo sapien
cttccactctggaaccttattccag

SEQ ID NO: 2285993 - DNA, 25 bp, Homo sapien
agcagttgttccagggagcttctac

SEQ ID NO: 2285994 - DNA, 25 bp, Homo sapien
tggaaccttattccagcagttgttc

SEQ ID NO: 2285995 - DNA, 25 bp, Homo sapien
ccactgtggatcctttatcccaaga

SEQ ID NO: 2285996 - DNA, 25 bp, Homo sapien
atcctttatcccaagagggagcttc

SEQ ID NO: 2285997 - DNA, 25 bp, Homo sapien
gatcctttatcccaagagggagctt

SEQ ID NO: 2285998 - DNA, 25 bp, Homo sapien
ttttttccactgtggatcctttatc

SEQ ID NO: 2285999 - DNA, 25 bp, Homo sapien
cttggactccgtggtacgtaactct

SEQ ID NO: 2286000 - DNA, 25 bp, Homo sapien
tatggacaatgacaaccagttggat

SEQ ID NO: 2286001 - DNA, 25 bp, Homo sapien
ggtctacaactgaactgactccttg

SEQ ID NO: 2286002 - DNA, 25 bp, Homo sapien
ctgatgagaaatgcggaagtgaaac

SEQ ID NO: 2286003 - DNA, 25 bp, Homo sapien
ggagactgtttttctcagaggacaa

SEQ ID NO: 2286004 - DNA, 25 bp, Homo sapien
tattgtctatttggagatacggtca

SEQ ID NO: 2286005 - DNA, 25 bp, Homo sapien
gatggaatccactggcctccgtaag

SEQ ID NO: 2286006 - DNA, 25 bp, Homo sapien
caacacagcctctaggatggaatcc

SEQ ID NO: 2286007 - DNA, 25 bp, Homo sapien
gaaccatatgtactgctgtgcacca

SEQ ID NO: 2286008 - DNA, 25 bp, Homo sapien
gaacaagacctttgagggcaccact

SEQ ID NO: 2286009 - DNA, 25 bp, Homo sapien
catcggtgatgcgtacatggtggct

SEQ ID NO: 2286010 - DNA, 25 bp, Homo sapien
gcatagaactgatccaactggcccc

SEQ ID NO: 2286011 - DNA, 25 bp, Homo sapien
ccacatctgtaagaggttgattatc

SEQ ID NO: 2286012 - DNA, 25 bp, Homo sapien
gcaatgccatattacatatgccagg

SEQ ID NO: 2286013 - DNA, 25 bp, Homo sapien
tgctttacaaaggacccaaatctgg

SEQ ID NO: 2286014 - DNA, 25 bp, Homo sapien
gattcactcaattcactggaagtct

SEQ ID NO: 2286015 - DNA, 25 bp, Homo sapien
tgtcaagaacaaccactccagtcgt

SEQ ID NO: 2286016 - DNA, 25 bp, Homo sapien
caaaggttccaagttttgtcattgc

SEQ ID NO: 2286017 - DNA, 25 bp, Homo sapien
gtcgtgtacctaggaatccaagcca

SEQ ID NO: 2286018 - DNA, 25 bp, Homo sapien
aaggtttctccggatactctggagg

SEQ ID NO: 2286019 - DNA, 25 bp, Homo sapien
tgcatgagcaataactagaagaatc

SEQ ID NO: 2286020 - DNA, 25 bp, Homo sapien
tgaagagctacaatacaccatggct

SEQ ID NO: 2286021 - DNA, 25 bp, Homo sapien
aaacttaagattgcatgtaggaacc

SEQ ID NO: 2286022 - DNA, 25 bp, Homo sapien
tggcttcagcacaactcactttggt

SEQ ID NO: 2286023 - DNA, 25 bp, Homo sapien
tgttgcttccaaggtaaggcaagcc

SEQ ID NO: 2286024 - DNA, 25 bp, Homo sapien
gagggacagggctgacagacttaac

SEQ ID NO: 2286025 - DNA, 25 bp, Homo sapien
gctatatggataccttgatccgacg

SEQ ID NO: 2286026 - DNA, 25 bp, Homo sapien
tattctcgaaacctggaacatctgg

SEQ ID NO: 2286027 - DNA, 25 bp, Homo sapien
tctcattcataggtggaattgaaca

SEQ ID NO: 2286028 - DNA, 25 bp, Homo sapien
catgttctcattcataggtggaatt

SEQ ID NO: 2286029 - DNA, 25 bp, Homo sapien
tgttctcattcataggtggaattga

SEQ ID NO: 2286030 - DNA, 25 bp, Homo sapien
ttctcattcataggtggaattgaac

SEQ ID NO: 2286031 - DNA, 25 bp, Homo sapien
tggtgccagcataagctgtccttgg

SEQ ID NO: 2286032 - DNA, 25 bp, Homo sapien
cgttttgttgaagactggaatgcca

SEQ ID NO: 2286033 - DNA, 25 bp, Homo sapien
ccctaatgggttaggatgtcattgt

SEQ ID NO: 2286034 - DNA, 25 bp, Homo sapien
tatctggtaccagcgttagtgggtc

SEQ ID NO: 2286035 - DNA, 25 bp, Homo sapien
gcatgtctttgggagccagcctcag

SEQ ID NO: 2286036 - DNA, 25 bp, Homo sapien
tcataggttccaggtattaggacgc

SEQ ID NO: 2286037 - DNA, 25 bp, Homo sapien
catatgtgattgcatttgggtccac

SEQ ID NO: 2286038 - DNA, 25 bp, Homo sapien
cacctttctattaggacatatgtga

SEQ ID NO: 2286039 - DNA, 25 bp, Homo sapien
gaaacttgataccatgatcttcggg

SEQ ID NO: 2286040 - DNA, 25 bp, Homo sapien
aacacgttcttctagttgcttcaga

SEQ ID NO: 2286041 - DNA, 25 bp, Homo sapien
gattgactattacaacctgaccaag

SEQ ID NO: 2286042 - DNA, 25 bp, Homo sapien
cccattctgcctaatttgctttgta

SEQ ID NO: 2286043 - DNA, 25 bp, Homo sapien
caaggtaatagaggcaaagtcacat

SEQ ID NO: 2286044 - DNA, 25 bp, Homo sapien
tacatatgacatgagacccctaatg

SEQ ID NO: 2286045 - DNA, 25 bp, Homo sapien
gcccttatacaaaggagctgtagtg

SEQ ID NO: 2286046 - DNA, 25 bp, Homo sapien
gaatttatttctgccccgatgagag

SEQ ID NO: 2286047 - DNA, 25 bp, Homo sapien
tctctaccggtgagctgttctcttc

SEQ ID NO: 2286048 - DNA, 25 bp, Homo sapien
gacccgctccgtgtttgcgtctgtg

SEQ ID NO: 2286049 - DNA, 25 bp, Homo sapien
tgcgtctgtgtccttaatcttctcg

SEQ ID NO: 2286050 - DNA, 25 bp, Homo sapien
gatgacgaaccttgggtatgtcccc

SEQ ID NO: 2286051 - DNA, 25 bp, Homo sapien
agtgcatagcttcttatctggcaca

SEQ ID NO: 2286052 - DNA, 25 bp, Homo sapien
gcatagcttcttatctggcacacca

SEQ ID NO: 2286053 - DNA, 25 bp, Homo sapien
tcttttcagtgcatagcttcttatc

SEQ ID NO: 2286054 - DNA, 25 bp, Homo sapien
tttcagtgcatagcttcttatctgg

SEQ ID NO: 2286055 - DNA, 25 bp, Homo sapien
cctaggcaagctaagatgcagaatc

SEQ ID NO: 2286056 - DNA, 25 bp, Homo sapien
ccacctaggcaagctaagatgcaga

SEQ ID NO: 2286057 - DNA, 25 bp, Homo sapien
cacctaggcaagctaagatgcagaa

SEQ ID NO: 2286058 - DNA, 25 bp, Homo sapien
ccccacctaggcaagctaagatgca

SEQ ID NO: 2286059 - DNA, 25 bp, Homo sapien
caagggttgcacaacgagtttcgac

SEQ ID NO: 2286060 - DNA, 25 bp, Homo sapien
ttgtttcgcaaggtgtcagagcccc

SEQ ID NO: 2286061 - DNA, 25 bp, Homo sapien
ggactgagcacaccacgatgtattt

SEQ ID NO: 2286062 - DNA, 25 bp, Homo sapien
gaagaatttacccacagcagtatag

SEQ ID NO: 2286063 - DNA, 25 bp, Homo sapien
gtttagtcattaaccacagatgtgg

SEQ ID NO: 2286064 - DNA, 25 bp, Homo sapien
gaccatgcccggcactgatttccag

SEQ ID NO: 2286065 - DNA, 25 bp, Homo sapien
ttcctatgaaataaacgtattgccc

SEQ ID NO: 2286066 - DNA, 25 bp, Homo sapien
gtttgatcctcatgacattcctatg

SEQ ID NO: 2286067 - DNA, 25 bp, Homo sapien
gctccttactgccagatgctctgaa

SEQ ID NO: 2286068 - DNA, 25 bp, Homo sapien
gctctgaagcgcagtctctattcat

SEQ ID NO: 2286069 - DNA, 25 bp, Homo sapien
tactgccagatgctctgaagcgcag

SEQ ID NO: 2286070 - DNA, 25 bp, Homo sapien
ccttgtttctcactagtgctcctta

SEQ ID NO: 2286071 - DNA, 25 bp, Homo sapien
aaactgctagtgatcccttcattgt

SEQ ID NO: 2286072 - DNA, 25 bp, Homo sapien
ccactgagagtggtaaagcactcag

SEQ ID NO: 2286073 - DNA, 25 bp, Homo sapien
atgaaaactgctagtgatcccttca

SEQ ID NO: 2286074 - DNA, 25 bp, Homo sapien
accacacctcaccttattgttaagg

SEQ ID NO: 2286075 - DNA, 25 bp, Homo sapien
tgctaggcactatagtaatgctggg

SEQ ID NO: 2286076 - DNA, 25 bp, Homo sapien
gaggttggaccttttatcagtgtga

SEQ ID NO: 2286077 - DNA, 25 bp, Homo sapien
taggcattatagtagtgctaggcac

SEQ ID NO: 2286078 - DNA, 25 bp, Homo sapien
tcctgcagccaaatacactgatgat

SEQ ID NO: 2286079 - DNA, 25 bp, Homo sapien
ccctggaagggttattcagatagtg

SEQ ID NO: 2286080 - DNA, 25 bp, Homo sapien
ccagactgctggaagtgtatttcac

SEQ ID NO: 2286081 - DNA, 25 bp, Homo sapien
aaacagctttccacataggctgaac

SEQ ID NO: 2286082 - DNA, 25 bp, Homo sapien
gattgctgggtaaataataattcca

SEQ ID NO: 2286083 - DNA, 25 bp, Homo sapien
agccaccacgcttggtcttgctcta

SEQ ID NO: 2286084 - DNA, 25 bp, Homo sapien
caccgatacgtgatgtaatgttgaa

SEQ ID NO: 2286085 - DNA, 25 bp, Homo sapien
cagttaacaccgatacgtgatgtaa

SEQ ID NO: 2286086 - DNA, 25 bp, Homo sapien
gtaacacagttaacaccgatacgtg

SEQ ID NO: 2286087 - DNA, 25 bp, Homo sapien
cgtgatgtaatgttgaacgcttgct

SEQ ID NO: 2286088 - DNA, 25 bp, Homo sapien
tcacagccagccaatcgttcacttt

SEQ ID NO: 2286089 - DNA, 25 bp, Homo sapien
tgaagctagagtgatgaccagacgt

SEQ ID NO: 2286090 - DNA, 25 bp, Homo sapien
gcttcctgtgctgacgggaggaaca

SEQ ID NO: 2286091 - DNA, 25 bp, Homo sapien
gaggaacaagctcgcctagccaaaa

SEQ ID NO: 2286092 - DNA, 25 bp, Homo sapien
gacaggcaggctccgctcccaacta

SEQ ID NO: 2286093 - DNA, 25 bp, Homo sapien
ctggtgaccaatgacaggcaggctc

SEQ ID NO: 2286094 - DNA, 25 bp, Homo sapien
gaccaatgacaggcaggctccgctc

SEQ ID NO: 2286095 - DNA, 25 bp, Homo sapien
aatgacaggcaggctccgctcccaa

SEQ ID NO: 2286096 - DNA, 25 bp, Homo sapien
ctacaaactctttacggccgcgcgg

SEQ ID NO: 2286097 - DNA, 25 bp, Homo sapien
tctcgcctacaactccagagacgga

SEQ ID NO: 2286098 - DNA, 25 bp, Homo sapien
tctcggcgtccggtaccggaatgca

SEQ ID NO: 2286099 - DNA, 25 bp, Homo sapien
cagagacggagacaaaccgctctcg

SEQ ID NO: 2286100 - DNA, 25 bp, Homo sapien
cgtagttccctttgcgcagcagtct

SEQ ID NO: 2286101 - DNA, 25 bp, Homo sapien
tttgctcgcactttgccgccctgtt

SEQ ID NO: 2286102 - DNA, 25 bp, Homo sapien
gctccaggatctccgccgtaaggta

SEQ ID NO: 2286103 - DNA, 25 bp, Homo sapien
tttgcgcagcagtctgtgcactcgg

SEQ ID NO: 2286104 - DNA, 25 bp, Homo sapien
aagggcctttgctgggggagccagc

SEQ ID NO: 2286105 - DNA, 25 bp, Homo sapien
tgaaaagggcctttgctgggggagc

SEQ ID NO: 2286106 - DNA, 25 bp, Homo sapien
catgaaaagggcctttgctggggga

SEQ ID NO: 2286107 - DNA, 25 bp, Homo sapien
gggcctttgctgggggagccagctc

SEQ ID NO: 2286108 - DNA, 25 bp, Homo sapien
ctccccgctagatgtcaccggccct

SEQ ID NO: 2286109 - DNA, 25 bp, Homo sapien
accggccctccatgacatccagcac

SEQ ID NO: 2286110 - DNA, 25 bp, Homo sapien
tagatgtcaccggccctccatgaca

SEQ ID NO: 2286111 - DNA, 25 bp, Homo sapien
tgtcaccggccctccatgacatcca

SEQ ID NO: 2286112 - DNA, 25 bp, Homo sapien
tattggctcccgccgggaccctcgc

SEQ ID NO: 2286113 - DNA, 25 bp, Homo sapien
tggctcccgccgggaccctcgccgc

SEQ ID NO: 2286114 - DNA, 25 bp, Homo sapien
tccgacggtatcttcccagaacttg

SEQ ID NO: 2286115 - DNA, 25 bp, Homo sapien
aatatggccgcagacacttcctgcc

SEQ ID NO: 2286116 - DNA, 25 bp, Homo sapien
aaaatatggccgcagacacttcctg

SEQ ID NO: 2286117 - DNA, 25 bp, Homo sapien
cgagctcagctcgatccgacggtat

SEQ ID NO: 2286118 - DNA, 25 bp, Homo sapien
ctatcactttgtacagagcctggca

SEQ ID NO: 2286119 - DNA, 25 bp, Homo sapien
gaagacttcaattccgactcacagg

SEQ ID NO: 2286120 - DNA, 25 bp, Homo sapien
tatgtaacccacgactaaaggcgct

SEQ ID NO: 2286121 - DNA, 25 bp, Homo sapien
taacagaggtgtgtacggcctgacc

SEQ ID NO: 2286122 - DNA, 25 bp, Homo sapien
tttgttccactgaccccaagtggta

SEQ ID NO: 2286123 - DNA, 25 bp, Homo sapien
cccaagtggtaactgtgagtagtag

SEQ ID NO: 2286124 - DNA, 25 bp, Homo sapien
tgagtagtagttctaacaatgaggc

SEQ ID NO: 2286125 - DNA, 25 bp, Homo sapien
tcaaatgtcaaaaccatatatgcat

SEQ ID NO: 2286126 - DNA, 25 bp, Homo sapien
ttttggtaacaatccctcagatgcc

SEQ ID NO: 2286127 - DNA, 25 bp, Homo sapien
gaacggcttgcttatctctgcagga

SEQ ID NO: 2286128 - DNA, 25 bp, Homo sapien
gagtatgcattttaaacagcccgta

SEQ ID NO: 2286129 - DNA, 25 bp, Homo sapien
cacagcatggtatgcgacctttcaa

SEQ ID NO: 2286130 - DNA, 25 bp, Homo sapien
taccgctactcactttacatagaaa

SEQ ID NO: 2286131 - DNA, 25 bp, Homo sapien
gcctatttctatatgggaatcttag

SEQ ID NO: 2286132 - DNA, 25 bp, Homo sapien
ggtttgctatcacaaaagtcgaagg

SEQ ID NO: 2286133 - DNA, 25 bp, Homo sapien
aagtcgaaggattgctagaatgctg

SEQ ID NO: 2286134 - DNA, 25 bp, Homo sapien
tgcactgagagtacgtcgggagaat

SEQ ID NO: 2286135 - DNA, 25 bp, Homo sapien
gatggaagggctactgtgacagctt

SEQ ID NO: 2286136 - DNA, 25 bp, Homo sapien
ggcggatgatacaagtgcagccacc

SEQ ID NO: 2286137 - DNA, 25 bp, Homo sapien
gattactcgatttgtgcccactgca

SEQ ID NO: 2286138 - DNA, 25 bp, Homo sapien
tgtactagatgagcgcaatgaggcg

SEQ ID NO: 2286139 - DNA, 25 bp, Homo sapien
caatgaggcgggctcttagccgaca

SEQ ID NO: 2286140 - DNA, 25 bp, Homo sapien
gatgcctccaactcgagagacagga

SEQ ID NO: 2286141 - DNA, 25 bp, Homo sapien
tattgtatggaaccggaagagactc

SEQ ID NO: 2286142 - DNA, 25 bp, Homo sapien
tcgcacctgcttgggtcataagaaa

SEQ ID NO: 2286143 - DNA, 25 bp, Homo sapien
gagacacccctaaaggatcgcacct

SEQ ID NO: 2286144 - DNA, 25 bp, Homo sapien
tattcgtttacacacggagacaccc

SEQ ID NO: 2286145 - DNA, 25 bp, Homo sapien
taaaggatcgcacctgcttgggtca

SEQ ID NO: 2286146 - DNA, 25 bp, Homo sapien
gaccagtcgggaatatagccaatat

SEQ ID NO: 2286147 - DNA, 25 bp, Homo sapien
caatctgcgactctaatacgggtgc

SEQ ID NO: 2286148 - DNA, 25 bp, Homo sapien
tactaggcgctcacatgggataacc

SEQ ID NO: 2286149 - DNA, 25 bp, Homo sapien
gaagaatcccgtacgtagagtgaca

SEQ ID NO: 2286150 - DNA, 25 bp, Homo sapien
tatgattgtccgtgccatcctggga

SEQ ID NO: 2286151 - DNA, 25 bp, Homo sapien
ctggagatgccaagactagatgact

SEQ ID NO: 2286152 - DNA, 25 bp, Homo sapien
tgtgggctcaaatgtcacaactggc

SEQ ID NO: 2286153 - DNA, 25 bp, Homo sapien
gatcagctgatgctagaccctgtga

SEQ ID NO: 2286154 - DNA, 25 bp, Homo sapien
aaatctgtgggtatcaaaatgctca

SEQ ID NO: 2286155 - DNA, 25 bp, Homo sapien
tcagcaacacacagtatagtcaggg

SEQ ID NO: 2286156 - DNA, 25 bp, Homo sapien
taaacaggaccatctttgactggga

SEQ ID NO: 2286157 - DNA, 25 bp, Homo sapien
aaattttatagcaggatacccagta

SEQ ID NO: 2286158 - DNA, 25 bp, Homo sapien
gactcccaaggatgttactgctgtt

SEQ ID NO: 2286159 - DNA, 25 bp, Homo sapien
gactgatgcaactcctctacattgg

SEQ ID NO: 2286160 - DNA, 25 bp, Homo sapien
gatgactggcgtatgggcacttttg

SEQ ID NO: 2286161 - DNA, 25 bp, Homo sapien
cacatggccattgcaaccttggaac

SEQ ID NO: 2286162 - DNA, 25 bp, Homo sapien
tttgtgtacttatgttctaacatag

SEQ ID NO: 2286163 - DNA, 25 bp, Homo sapien
gcaccaaaagatcttagaaactact

SEQ ID NO: 2286164 - DNA, 25 bp, Homo sapien
ctaacatagcacatgtttggcacca

SEQ ID NO: 2286165 - DNA, 25 bp, Homo sapien
tgtttggcaccaaaagatcttagaa

SEQ ID NO: 2286166 - DNA, 25 bp, Homo sapien
tgtcacctagttgcagtagcctcta

SEQ ID NO: 2286167 - DNA, 25 bp, Homo sapien
tacataaaattacctggcagggagt

SEQ ID NO: 2286168 - DNA, 25 bp, Homo sapien
gaatggcctgtgtcatgatcaaaga

SEQ ID NO: 2286169 - DNA, 25 bp, Homo sapien
gcaaaactgaaaatcggtccatcta

SEQ ID NO: 2286170 - DNA, 25 bp, Homo sapien
caggttgcaattaaaatcgacttcg

SEQ ID NO: 2286171 - DNA, 25 bp, Homo sapien
gcaaatctgcaaccacattcaccat

SEQ ID NO: 2286172 - DNA, 25 bp, Homo sapien
ccttatagagtacagcaaatctgca

SEQ ID NO: 2286173 - DNA, 25 bp, Homo sapien
acttcgacttcgcaccaggttcttt

SEQ ID NO: 2286174 - DNA, 25 bp, Homo sapien
aaggagcaccaggaattgaactgag

SEQ ID NO: 2286175 - DNA, 25 bp, Homo sapien
caccaggaattgaactgagatgtct

SEQ ID NO: 2286176 - DNA, 25 bp, Homo sapien
actgagatgtcttattcaagagtcc

SEQ ID NO: 2286177 - DNA, 25 bp, Homo sapien
ttcaagagtccatgttctagtcact

SEQ ID NO: 2286178 - DNA, 25 bp, Homo sapien
tgtccacgagctcaatagggaagcc

SEQ ID NO: 2286179 - DNA, 25 bp, Homo sapien
gactacagactttgcgaacgctacg

SEQ ID NO: 2286180 - DNA, 25 bp, Homo sapien
gcgccgagggaccaaatgagactga

SEQ ID NO: 2286181 - DNA, 25 bp, Homo sapien
tataatcgctacttcaggaagcgcc

SEQ ID NO: 2286182 - DNA, 25 bp, Homo sapien
ttgccatcctggccgccttagcggt

SEQ ID NO: 2286183 - DNA, 25 bp, Homo sapien
ccatgaagagcctgatccttcttgc

SEQ ID NO: 2286184 - DNA, 25 bp, Homo sapien
ctgcaggacgaaaccatgaagagcc

SEQ ID NO: 2286185 - DNA, 25 bp, Homo sapien
ccgccttagcggtagtaactttgtg

SEQ ID NO: 2286186 - DNA, 25 bp, Homo sapien
taacccctgcaattcttgcaagtta

SEQ ID NO: 2286187 - DNA, 25 bp, Homo sapien
cccctgcaattcttgcaagttactt

SEQ ID NO: 2286188 - DNA, 25 bp, Homo sapien
accaataacccctgcaattcttgca

SEQ ID NO: 2286189 - DNA, 25 bp, Homo sapien
caataacccctgcaattcttgcaag

SEQ ID NO: 2286190 - DNA, 25 bp, Homo sapien
tcggagttcgtactccttcccaaga

SEQ ID NO: 2286191 - DNA, 25 bp, Homo sapien
agtccatggtatagagatgagccag

SEQ ID NO: 2286192 - DNA, 25 bp, Homo sapien
aaacactgctgttctcgagagtcca

SEQ ID NO: 2286193 - DNA, 25 bp, Homo sapien
gatgagccagtatttgtatcggagt

SEQ ID NO: 2286194 - DNA, 25 bp, Homo sapien
ctgaggccaggagtgcaaagctgca

SEQ ID NO: 2286195 - DNA, 25 bp, Homo sapien
agcctagaaaactgagcaagacctt

SEQ ID NO: 2286196 - DNA, 25 bp, Homo sapien
ctagcctagaaaactgagcaagacc

SEQ ID NO: 2286197 - DNA, 25 bp, Homo sapien
tactctagcctagaaaactgagcaa

SEQ ID NO: 2286198 - DNA, 25 bp, Homo sapien
ctccagaggactcagcctgatcctt

SEQ ID NO: 2286199 - DNA, 25 bp, Homo sapien
gactattaagactagagttcatgtt

SEQ ID NO: 2286200 - DNA, 25 bp, Homo sapien
tgagactattaagactagagttcat

SEQ ID NO: 2286201 - DNA, 25 bp, Homo sapien
cagcctgatcctttgagactattaa

SEQ ID NO: 2286202 - DNA, 25 bp, Homo sapien
tccgggactccaacatgcaatgatt

SEQ ID NO: 2286203 - DNA, 25 bp, Homo sapien
gatgctgtaactcaatccagggtcg

SEQ ID NO: 2286204 - DNA, 25 bp, Homo sapien
taaagagtttactgtgggccgggca

SEQ ID NO: 2286205 - DNA, 25 bp, Homo sapien
tgaaggcaccctaaaatggctgaga

SEQ ID NO: 2286206 - DNA, 25 bp, Homo sapien
ttttactatagagagattgagcctc

SEQ ID NO: 2286207 - DNA, 25 bp, Homo sapien
aaacatctagtcttttgcagtctgc

SEQ ID NO: 2286208 - DNA, 25 bp, Homo sapien
ggtgctcagcactcaaaggactgtt

SEQ ID NO: 2286209 - DNA, 25 bp, Homo sapien
gcctctaagatctgaacaaagtggt

SEQ ID NO: 2286210 - DNA, 25 bp, Homo sapien
gaagttaaaggctgtctccaagtcc

SEQ ID NO: 2286211 - DNA, 25 bp, Homo sapien
ggttagcatctccaactccctatgt

SEQ ID NO: 2286212 - DNA, 25 bp, Homo sapien
gaaatagaccatgtgaaaactccat

SEQ ID NO: 2286213 - DNA, 25 bp, Homo sapien
tccctgaactcagcagaaatagacc

SEQ ID NO: 2286214 - DNA, 25 bp, Homo sapien
gccatgccatagtacatctaaaact

SEQ ID NO: 2286215 - DNA, 25 bp, Homo sapien
tatacatgtggaatatgcataatcc

SEQ ID NO: 2286216 - DNA, 25 bp, Homo sapien
caaaatactctcaaagggacaacca

SEQ ID NO: 2286217 - DNA, 25 bp, Homo sapien
caatagcaacagtggaatgcagaat

SEQ ID NO: 2286218 - DNA, 25 bp, Homo sapien
gatgtctgattcgtacccagcattg

SEQ ID NO: 2286219 - DNA, 25 bp, Homo sapien
gggaacatcaaccaagactatccta

SEQ ID NO: 2286220 - DNA, 25 bp, Homo sapien
catgagagaatggtttagttgccca

SEQ ID NO: 2286221 - DNA, 25 bp, Homo sapien
cactgggaaacgtgaacctattgaa

SEQ ID NO: 2286222 - DNA, 25 bp, Homo sapien
tgttgctggcccaatgagtccctag

SEQ ID NO: 2286223 - DNA, 25 bp, Homo sapien
tcaacgtggtccctagaacaagagg

SEQ ID NO: 2286224 - DNA, 25 bp, Homo sapien
tcagctgggagtggaacctgtcgat

SEQ ID NO: 2286225 - DNA, 25 bp, Homo sapien
cctattcaagcaactagaggccaga

SEQ ID NO: 2286226 - DNA, 25 bp, Homo sapien
cacacgggctgtcatgctcgcacat

SEQ ID NO: 2286227 - DNA, 25 bp, Homo sapien
tccacgtcacacgggctgtcatgct

SEQ ID NO: 2286228 - DNA, 25 bp, Homo sapien
gtcacacgggctgtcatgctcgcac

SEQ ID NO: 2286229 - DNA, 25 bp, Homo sapien
acgtcacacgggctgtcatgctcgc

SEQ ID NO: 2286230 - DNA, 25 bp, Homo sapien
cactcttgcgtgtacattcatgcat

SEQ ID NO: 2286231 - DNA, 25 bp, Homo sapien
attcataatacccatagctataggc

SEQ ID NO: 2286232 - DNA, 25 bp, Homo sapien
tgattatcagaaataccctcacaat

SEQ ID NO: 2286233 - DNA, 25 bp, Homo sapien
gctataggctccacactcttgcgtg

SEQ ID NO: 2286234 - DNA, 25 bp, Homo sapien
gcaaactttcaacgtatctggttga

SEQ ID NO: 2286235 - DNA, 25 bp, Homo sapien
tagcactctacattcactgccagca

SEQ ID NO: 2286236 - DNA, 25 bp, Homo sapien
gtggtacaaagtaaagccgatgtga

SEQ ID NO: 2286237 - DNA, 25 bp, Homo sapien
tgggaacagaagtgagtggtacaaa

SEQ ID NO: 2286238 - DNA, 25 bp, Homo sapien
cccataccctccgatatacactggg

SEQ ID NO: 2286239 - DNA, 25 bp, Homo sapien
ctcccataccctccgatatacactg

SEQ ID NO: 2286240 - DNA, 25 bp, Homo sapien
tgctcccataccctccgatatacac

SEQ ID NO: 2286241 - DNA, 25 bp, Homo sapien
cataccctccgatatacactgggct

SEQ ID NO: 2286242 - DNA, 25 bp, Homo sapien
gttgttcctatcagctgcccagctg

SEQ ID NO: 2286243 - DNA, 25 bp, Homo sapien
ggagctgaatgttgttcctatcagc

SEQ ID NO: 2286244 - DNA, 25 bp, Homo sapien
aatgttgttcctatcagctgcccag

SEQ ID NO: 2286245 - DNA, 25 bp, Homo sapien
gaatgttgttcctatcagctgccca

SEQ ID NO: 2286246 - DNA, 25 bp, Homo sapien
cttttcctgcattggaagccagtcc

SEQ ID NO: 2286247 - DNA, 25 bp, Homo sapien
tgtccataaacatcaccaaaggcta

SEQ ID NO: 2286248 - DNA, 25 bp, Homo sapien
taaacatcaccaaaggctaacctca

SEQ ID NO: 2286249 - DNA, 25 bp, Homo sapien
tttcctgcattggaagccagtcctg

SEQ ID NO: 2286250 - DNA, 25 bp, Homo sapien
ccaattctctctgcaaaacctttag

SEQ ID NO: 2286251 - DNA, 25 bp, Homo sapien
ctccaattctctctgcaaaaccttt

SEQ ID NO: 2286252 - DNA, 25 bp, Homo sapien
ctttaggaagggtagaacacctctg

SEQ ID NO: 2286253 - DNA, 25 bp, Homo sapien
ttaggaagggtagaacacctctgac

SEQ ID NO: 2286254 - DNA, 25 bp, Homo sapien
ccttgccatacaccagaggggcaat

SEQ ID NO: 2286255 - DNA, 25 bp, Homo sapien
gcccttgccatacaccagaggggca

SEQ ID NO: 2286256 - DNA, 25 bp, Homo sapien
tgccatacaccagaggggcaattat

SEQ ID NO: 2286257 - DNA, 25 bp, Homo sapien
cttgccatacaccagaggggcaatt

SEQ ID NO: 2286258 - DNA, 25 bp, Homo sapien
attcagttcccgttctgtgggccct

SEQ ID NO: 2286259 - DNA, 25 bp, Homo sapien
ctggtgagcagccaagatctgcgct

SEQ ID NO: 2286260 - DNA, 25 bp, Homo sapien
tgtcccaagtgtggttgggaccctg

SEQ ID NO: 2286261 - DNA, 25 bp, Homo sapien
tagacaggcaaaccttgtgtctgtc

SEQ ID NO: 2286262 - DNA, 25 bp, Homo sapien
aaatctaggtagctatgctgttccc

SEQ ID NO: 2286263 - DNA, 25 bp, Homo sapien
caatctatcagttgtgtaaacggac

SEQ ID NO: 2286264 - DNA, 25 bp, Homo sapien
taccagttctgtcagttacgaagag

SEQ ID NO: 2286265 - DNA, 25 bp, Homo sapien
tgctgttcccatggatctgccactg

SEQ ID NO: 2286266 - DNA, 25 bp, Homo sapien
cgggcggctgatgtttccctttcag

SEQ ID NO: 2286267 - DNA, 25 bp, Homo sapien
ccgggcggctgatgtttccctttca

SEQ ID NO: 2286268 - DNA, 25 bp, Homo sapien
ctggagcaggcagagtagtgttgtc

SEQ ID NO: 2286269 - DNA, 25 bp, Homo sapien
gcaggcagagtagtgttgtcactca

SEQ ID NO: 2286270 - DNA, 25 bp, Homo sapien
ggagcaggcagagtagtgttgtcac

SEQ ID NO: 2286271 - DNA, 25 bp, Homo sapien
gagcaggcagagtagtgttgtcact

SEQ ID NO: 2286272 - DNA, 25 bp, Homo sapien
ggtttactcttgaattggcgagtct

SEQ ID NO: 2286273 - DNA, 25 bp, Homo sapien
tgaacttgggagggcctttgcgtgg

SEQ ID NO: 2286274 - DNA, 25 bp, Homo sapien
ttgaattggcgagtctgcctctgct

SEQ ID NO: 2286275 - DNA, 25 bp, Homo sapien
tactcttgaattggcgagtctgcct

SEQ ID NO: 2286276 - DNA, 25 bp, Homo sapien
gagtcaagcatatcttccagatccc

SEQ ID NO: 2286277 - DNA, 25 bp, Homo sapien
ccttgccaaaatacggaagcagttg

SEQ ID NO: 2286278 - DNA, 25 bp, Homo sapien
ctggtcttgtatgcaccttgccaaa

SEQ ID NO: 2286279 - DNA, 25 bp, Homo sapien
tccaaatacactgtcagagtcaagc

SEQ ID NO: 2286280 - DNA, 25 bp, Homo sapien
atcccaaactgagcgagctcatgca

SEQ ID NO: 2286281 - DNA, 25 bp, Homo sapien
gataatcccaaactgagcgagctca

SEQ ID NO: 2286282 - DNA, 25 bp, Homo sapien
taatcccaaactgagcgagctcatg

SEQ ID NO: 2286283 - DNA, 25 bp, Homo sapien
agataatcccaaactgagcgagctc

SEQ ID NO: 2286284 - DNA, 25 bp, Homo sapien
ctgatagggaatgaccttgaaagtc

SEQ ID NO: 2286285 - DNA, 25 bp, Homo sapien
tgagagtggcagaacctctggcact

SEQ ID NO: 2286286 - DNA, 25 bp, Homo sapien
gaactcttagtagtaactgataggg

SEQ ID NO: 2286287 - DNA, 25 bp, Homo sapien
gaatttcaagactccggcagatcaa

SEQ ID NO: 2286288 - DNA, 25 bp, Homo sapien
atttctacgtagcatttaatacaac

SEQ ID NO: 2286289 - DNA, 25 bp, Homo sapien
tttctacgtagcatttaatacaact

SEQ ID NO: 2286290 - DNA, 25 bp, Homo sapien
ttctacgtagcatttaatacaactt

SEQ ID NO: 2286291 - DNA, 25 bp, Homo sapien
gggtcaactgcctatcctttgcata

SEQ ID NO: 2286292 - DNA, 25 bp, Homo sapien
taatttcactgaagggatgccgtgg

SEQ ID NO: 2286293 - DNA, 25 bp, Homo sapien
tcaaccagagtaccgaaaagaaggc

SEQ ID NO: 2286294 - DNA, 25 bp, Homo sapien
tatacaacttagagctgcatgagac

SEQ ID NO: 2286295 - DNA, 25 bp, Homo sapien
ccagactgtggcgtgaaagatattt

SEQ ID NO: 2286296 - DNA, 25 bp, Homo sapien
tgtggcgtgaaagatatttgcttct

SEQ ID NO: 2286297 - DNA, 25 bp, Homo sapien
ggcgtgaaagatatttgcttcttcc

SEQ ID NO: 2286298 - DNA, 25 bp, Homo sapien
gactgtggcgtgaaagatatttgct

SEQ ID NO: 2286299 - DNA, 25 bp, Homo sapien
ggagaacaggaatcagtgcctagct

SEQ ID NO: 2286300 - DNA, 25 bp, Homo sapien
gaacaggaatcagtgcctagctcac

SEQ ID NO: 2286301 - DNA, 25 bp, Homo sapien
aacaggaatcagtgcctagctcact

SEQ ID NO: 2286302 - DNA, 25 bp, Homo sapien
gagaacaggaatcagtgcctagctc

SEQ ID NO: 2286303 - DNA, 25 bp, Homo sapien
taccaattttgccaagtcagtgtcc

SEQ ID NO: 2286304 - DNA, 25 bp, Homo sapien
gatgtccacatcagcatagtatttt

SEQ ID NO: 2286305 - DNA, 25 bp, Homo sapien
tgtccacatcagcatagtattttac

SEQ ID NO: 2286306 - DNA, 25 bp, Homo sapien
cacatcagcatagtattttaccaat

SEQ ID NO: 2286307 - DNA, 25 bp, Homo sapien
atttctaggcatttcctaggaagtg

SEQ ID NO: 2286308 - DNA, 25 bp, Homo sapien
tttctaggcatttcctaggaagtgg

SEQ ID NO: 2286309 - DNA, 25 bp, Homo sapien
ttctaggcatttcctaggaagtgga

SEQ ID NO: 2286310 - DNA, 25 bp, Homo sapien
gggataggattgcagacccacagga

SEQ ID NO: 2286311 - DNA, 25 bp, Homo sapien
ctattatcacagaaagggatgctct

SEQ ID NO: 2286312 - DNA, 25 bp, Homo sapien
taggattgcagacccacaggaagtt

SEQ ID NO: 2286313 - DNA, 25 bp, Homo sapien
gaattcatgaacgattggggtttct

SEQ ID NO: 2286314 - DNA, 25 bp, Homo sapien
gaggtcatcaagatggtaccaccgg

SEQ ID NO: 2286315 - DNA, 25 bp, Homo sapien
tgaggtcatcaagatggtaccaccg

SEQ ID NO: 2286316 - DNA, 25 bp, Homo sapien
agatcagatatgtgaggtcatcaag

SEQ ID NO: 2286317 - DNA, 25 bp, Homo sapien
ttagatcagatatgtgaggtcatca

SEQ ID NO: 2286318 - DNA, 25 bp, Homo sapien
ttttggtcaaatggtgacagccttt

SEQ ID NO: 2286319 - DNA, 25 bp, Homo sapien
cctggtcctcccttttggtcaaatg

SEQ ID NO: 2286320 - DNA, 25 bp, Homo sapien
ctggtcctcccttttggtcaaatgg

SEQ ID NO: 2286321 - DNA, 25 bp, Homo sapien
ggttttaagcgcagaatccattagc

SEQ ID NO: 2286322 - DNA, 25 bp, Homo sapien
taagcgcagaatccattagctatta

SEQ ID NO: 2286323 - DNA, 25 bp, Homo sapien
acctaggttttaagcgcagaatcca

SEQ ID NO: 2286324 - DNA, 25 bp, Homo sapien
gcagaatccattagctattattcct

SEQ ID NO: 2286325 - DNA, 25 bp, Homo sapien
cagaggttcatgtagttaggttcaa

SEQ ID NO: 2286326 - DNA, 25 bp, Homo sapien
gataaactgtacgagctctgaggac

SEQ ID NO: 2286327 - DNA, 25 bp, Homo sapien
taattgaacattcagagcagtctcc

SEQ ID NO: 2286328 - DNA, 25 bp, Homo sapien
caaaattatgtggaatcgccttccc

SEQ ID NO: 2286329 - DNA, 25 bp, Homo sapien
ttcaactgaattatagccgaggctg

SEQ ID NO: 2286330 - DNA, 25 bp, Homo sapien
gatgacatcgtcttgcagagttact

SEQ ID NO: 2286331 - DNA, 25 bp, Homo sapien
cagaacaagcaagtaggagtcttac

SEQ ID NO: 2286332 - DNA, 25 bp, Homo sapien
tttaagtcaaatagttcgcctccca

SEQ ID NO: 2286333 - DNA, 25 bp, Homo sapien
cgtaaactgctttgtggcaatataa

SEQ ID NO: 2286334 - DNA, 25 bp, Homo sapien
cacgtaaactgctttgtggcaatat

SEQ ID NO: 2286335 - DNA, 25 bp, Homo sapien
tcacgtaaactgctttgtggcaata

SEQ ID NO: 2286336 - DNA, 25 bp, Homo sapien
taaactgctttgtggcaatataact

SEQ ID NO: 2286337 - DNA, 25 bp, Homo sapien
cagcatttcccgaaaggagtaacca

SEQ ID NO: 2286338 - DNA, 25 bp, Homo sapien
gagtaaccaatgccaagactttcta

SEQ ID NO: 2286339 - DNA, 25 bp, Homo sapien
catttcccgaaaggagtaaccaatg

SEQ ID NO: 2286340 - DNA, 25 bp, Homo sapien
ggagtaaccaatgccaagactttct

SEQ ID NO: 2286341 - DNA, 25 bp, Homo sapien
cgttctctcaatgccttgctagact

SEQ ID NO: 2286342 - DNA, 25 bp, Homo sapien
ctctcgttctctcaatgccttgcta

SEQ ID NO: 2286343 - DNA, 25 bp, Homo sapien
tcagacacctctcgttctctcaatg

SEQ ID NO: 2286344 - DNA, 25 bp, Homo sapien
ttcagacacctctcgttctctcaat

SEQ ID NO: 2286345 - DNA, 25 bp, Homo sapien
tccaatctccttgtgactctctgaa

SEQ ID NO: 2286346 - DNA, 25 bp, Homo sapien
cctgtgacagtcagttcagacctac

SEQ ID NO: 2286347 - DNA, 25 bp, Homo sapien
actctctgaaagtccctgccctgtg

SEQ ID NO: 2286348 - DNA, 25 bp, Homo sapien
ctgccctgtgacagtcagttcagac

SEQ ID NO: 2286349 - DNA, 25 bp, Homo sapien
ggaagtctacagatgtttccaaaat

SEQ ID NO: 2286350 - DNA, 25 bp, Homo sapien
gctgtggaacgcaatcttcttctaa

SEQ ID NO: 2286351 - DNA, 25 bp, Homo sapien
tctctctggtcctcaatcaattggt

SEQ ID NO: 2286352 - DNA, 25 bp, Homo sapien
ctatggaagtctacagatgtttcca

SEQ ID NO: 2286353 - DNA, 25 bp, Homo sapien
taatctgtaatctttgtctaagatg

SEQ ID NO: 2286354 - DNA, 25 bp, Homo sapien
tacaccagaggtagaattatcatct

SEQ ID NO: 2286355 - DNA, 25 bp, Homo sapien
gatgagcaaaaacgaaacgatacac

SEQ ID NO: 2286356 - DNA, 25 bp, Homo sapien
gaaatttgagaacctgtaatctgta

SEQ ID NO: 2286357 - DNA, 25 bp, Homo sapien
tgagagccttgacaaaagcacctgg

SEQ ID NO: 2286358 - DNA, 25 bp, Homo sapien
gttttgagagccttgacaaaagcac

SEQ ID NO: 2286359 - DNA, 25 bp, Homo sapien
tcacattactgcaccagagctaagg

SEQ ID NO: 2286360 - DNA, 25 bp, Homo sapien
gcaccagagctaaggttcttcaagg

SEQ ID NO: 2286361 - DNA, 25 bp, Homo sapien
aagcgttagcggcattaattcacca

SEQ ID NO: 2286362 - DNA, 25 bp, Homo sapien
tttggacaacttgatgtaactgact

SEQ ID NO: 2286363 - DNA, 25 bp, Homo sapien
aagaatggagcttaaccatgcctcc

SEQ ID NO: 2286364 - DNA, 25 bp, Homo sapien
cctccattgggaagtctagactttg

SEQ ID NO: 2286365 - DNA, 25 bp, Homo sapien
tgtgctctggtttaccttccctgtg

SEQ ID NO: 2286366 - DNA, 25 bp, Homo sapien
cagttcccagttctcatcgtgttta

SEQ ID NO: 2286367 - DNA, 25 bp, Homo sapien
tgattcacagtgttatcttcagacc

SEQ ID NO: 2286368 - DNA, 25 bp, Homo sapien
gcttgaaagcctagattgactctct

SEQ ID NO: 2286369 - DNA, 25 bp, Homo sapien
tttgcaatttatagttcctgggtta

SEQ ID NO: 2286370 - DNA, 25 bp, Homo sapien
agaaggtggtcttgttgtcatggta

SEQ ID NO: 2286371 - DNA, 25 bp, Homo sapien
tctccgaactgtaggcaagaaggtg

SEQ ID NO: 2286372 - DNA, 25 bp, Homo sapien
atgtgccttgtggttatctcaggag

SEQ ID NO: 2286373 - DNA, 25 bp, Homo sapien
tggcaatctgaacaaagcttctgtg

SEQ ID NO: 2286374 - DNA, 25 bp, Homo sapien
ttattgattgccagggagactcggg

SEQ ID NO: 2286375 - DNA, 25 bp, Homo sapien
tccagaactgaaccgggtggttggc

SEQ ID NO: 2286376 - DNA, 25 bp, Homo sapien
tggcagtatgaggttgtccagaact

SEQ ID NO: 2286377 - DNA, 25 bp, Homo sapien
ccaaaagttacaatgcagcatagac

SEQ ID NO: 2286378 - DNA, 25 bp, Homo sapien
accaggtgtgtgcatgtttttccaa

SEQ ID NO: 2286379 - DNA, 25 bp, Homo sapien
acctacccaggtggcaccaggtgtg

SEQ ID NO: 2286380 - DNA, 25 bp, Homo sapien
aggttctggtcacacctacccaggt

SEQ ID NO: 2286381 - DNA, 25 bp, Homo sapien
aaagcagctctactggcagcaactt

SEQ ID NO: 2286382 - DNA, 25 bp, Homo sapien
agcagctctactggcagcaacttca

SEQ ID NO: 2286383 - DNA, 25 bp, Homo sapien
tttaatgaaagcagctctactggca

SEQ ID NO: 2286384 - DNA, 25 bp, Homo sapien
tgttcttcttactcaattttaatga

SEQ ID NO: 2286385 - DNA, 25 bp, Homo sapien
tagtggagaatacccttgcttaaca

SEQ ID NO: 2286386 - DNA, 25 bp, Homo sapien
gggtgaaagatccagctctataata

SEQ ID NO: 2286387 - DNA, 25 bp, Homo sapien
tatgagaaatagttcaaaggctgtg

SEQ ID NO: 2286388 - DNA, 25 bp, Homo sapien
tacagcacaaaaggggtgaaagatc

SEQ ID NO: 2286389 - DNA, 25 bp, Homo sapien
tcttgacttccagcattctgtgtaa

SEQ ID NO: 2286390 - DNA, 25 bp, Homo sapien
ctgtggggctgcgttaattcttgac

SEQ ID NO: 2286391 - DNA, 25 bp, Homo sapien
tccagcattctgtgtaatgccttca

SEQ ID NO: 2286392 - DNA, 25 bp, Homo sapien
ttaattcttgacttccagcattctg

SEQ ID NO: 2286393 - DNA, 25 bp, Homo sapien
ctgtttctaaggagtattattccct

SEQ ID NO: 2286394 - DNA, 25 bp, Homo sapien
cagacgatgcccctgtttctaagga

SEQ ID NO: 2286395 - DNA, 25 bp, Homo sapien
tattattccctaaggctttaatgct

SEQ ID NO: 2286396 - DNA, 25 bp, Homo sapien
tgcttattgagcaaaccctgatgta

SEQ ID NO: 2286397 - DNA, 25 bp, Homo sapien
cagggataacgtctgcttggctttt

SEQ ID NO: 2286398 - DNA, 25 bp, Homo sapien
cctggcagggataacgtctgcttgg

SEQ ID NO: 2286399 - DNA, 25 bp, Homo sapien
ttttcaatatcaggccacctggcag

SEQ ID NO: 2286400 - DNA, 25 bp, Homo sapien
ggcttttgtgtagtgcttctggcat

SEQ ID NO: 2286401 - DNA, 25 bp, Homo sapien
tgttcagctcaagcaatcaggcaga

SEQ ID NO: 2286402 - DNA, 25 bp, Homo sapien
ttggatgatacccaactgcattggt

SEQ ID NO: 2286403 - DNA, 25 bp, Homo sapien
tctggtccgggcctcaaaggattgg

SEQ ID NO: 2286404 - DNA, 25 bp, Homo sapien
tgtgtggttccacagatctgctgat

SEQ ID NO: 2286405 - DNA, 25 bp, Homo sapien
cctcgagctcggctgccctttgcat

SEQ ID NO: 2286406 - DNA, 25 bp, Homo sapien
aactctgcaggcttcctcgagctcg

SEQ ID NO: 2286407 - DNA, 25 bp, Homo sapien
tgcagaactctgcaggcttcctcga

SEQ ID NO: 2286408 - DNA, 25 bp, Homo sapien
cacactgcagaactctgcaggcttc

SEQ ID NO: 2286409 - DNA, 25 bp, Homo sapien
gatacagtatatgcaagagctgtgg

SEQ ID NO: 2286410 - DNA, 25 bp, Homo sapien
catgggtgcatcctgaaggaagaca

SEQ ID NO: 2286411 - DNA, 25 bp, Homo sapien
ggcatcgcattgcagtgatccttct

SEQ ID NO: 2286412 - DNA, 25 bp, Homo sapien
aagacagtggcatcgcattgcagtg

SEQ ID NO: 2286413 - DNA, 25 bp, Homo sapien
cagcacatgggtgcatcctgaagga

SEQ ID NO: 2286414 - DNA, 25 bp, Homo sapien
taatcaactcatacttggcagtagg

SEQ ID NO: 2286415 - DNA, 25 bp, Homo sapien
cagtaggaaggtccaacaccagctc

SEQ ID NO: 2286416 - DNA, 25 bp, Homo sapien
ccacaaggcggagtaaaaattcacg

SEQ ID NO: 2286417 - DNA, 25 bp, Homo sapien
tctgaccgccagctttgattatagc

SEQ ID NO: 2286418 - DNA, 25 bp, Homo sapien
ggaacaaacttggacactcatattt

SEQ ID NO: 2286419 - DNA, 25 bp, Homo sapien
agatgacaagatgggagtattctcc

SEQ ID NO: 2286420 - DNA, 25 bp, Homo sapien
gggaaaagcccatatttatttatga

SEQ ID NO: 2286421 - DNA, 25 bp, Homo sapien
tgaaattcacaagccgatcttaaaa

SEQ ID NO: 2286422 - DNA, 25 bp, Homo sapien
atacattctctcttgcgcttctcct

SEQ ID NO: 2286423 - DNA, 25 bp, Homo sapien
acattctctcttgcgcttctccttc

SEQ ID NO: 2286424 - DNA, 25 bp, Homo sapien
tacattctctcttgcgcttctcctt

SEQ ID NO: 2286425 - DNA, 25 bp, Homo sapien
catacattctctcttgcgcttctcc

SEQ ID NO: 2286426 - DNA, 25 bp, Homo sapien
cctcatcaatataaacgtaaccacc

SEQ ID NO: 2286427 - DNA, 25 bp, Homo sapien
atataaacgtaaccaccccagcagg

SEQ ID NO: 2286428 - DNA, 25 bp, Homo sapien
cagcaggctttagtcgtttgccttc

SEQ ID NO: 2286429 - DNA, 25 bp, Homo sapien
caggctttagtcgtttgccttcttc

SEQ ID NO: 2286430 - DNA, 25 bp, Homo sapien
cttggttctatgtgtgacctcactt

SEQ ID NO: 2286431 - DNA, 25 bp, Homo sapien
acttggttctatgtgtgacctcact

SEQ ID NO: 2286432 - DNA, 25 bp, Homo sapien
tatgaatagcgaagccctgcagcca

SEQ ID NO: 2286433 - DNA, 25 bp, Homo sapien
ctatgaatagcgaagccctgcagcc

SEQ ID NO: 2286434 - DNA, 25 bp, Homo sapien
atgaatagcgaagccctgcagccac

SEQ ID NO: 2286435 - DNA, 25 bp, Homo sapien
gaatagcgaagccctgcagccacac

SEQ ID NO: 2286436 - DNA, 25 bp, Homo sapien
tgttattttctgcatggtcctgtac

SEQ ID NO: 2286437 - DNA, 25 bp, Homo sapien
taatctctgggaaatccccagtgct

SEQ ID NO: 2286438 - DNA, 25 bp, Homo sapien
tgtccccagggccatcgactcttcc

SEQ ID NO: 2286439 - DNA, 25 bp, Homo sapien
tcattgactgggatcatattggctg

SEQ ID NO: 2286440 - DNA, 25 bp, Homo sapien
ggtcgtaacttccagtttagcctga

SEQ ID NO: 2286441 - DNA, 25 bp, Homo sapien
catctcctcaaagattatcttggtc

SEQ ID NO: 2286442 - DNA, 25 bp, Homo sapien
gattatcttggtcgtaacttccagt

SEQ ID NO: 2286443 - DNA, 25 bp, Homo sapien
taacttccagtttagcctgaaatag

SEQ ID NO: 2286444 - DNA, 25 bp, Homo sapien
gttactgagaagtgtaacattgtaa

SEQ ID NO: 2286445 - DNA, 25 bp, Homo sapien
ggacttcatatactgtacccttctc

SEQ ID NO: 2286446 - DNA, 25 bp, Homo sapien
tggacttcatatactgtacccttct

SEQ ID NO: 2286447 - DNA, 25 bp, Homo sapien
aactggacttcatatactgtaccct

SEQ ID NO: 2286448 - DNA, 25 bp, Homo sapien
gacttaacatgaatccagttcaaca

SEQ ID NO: 2286449 - DNA, 25 bp, Homo sapien
tacccatggaaacttgaagaggaat

SEQ ID NO: 2286450 - DNA, 25 bp, Homo sapien
cagttcaacaaattgttgaccaggc

SEQ ID NO: 2286451 - DNA, 25 bp, Homo sapien
gttgaccaggcagagcttacccatg

SEQ ID NO: 2286452 - DNA, 25 bp, Homo sapien
tgtcggcttaatagtaaggttctgt

SEQ ID NO: 2286453 - DNA, 25 bp, Homo sapien
caagtctgatacaaatgtcggctta

SEQ ID NO: 2286454 - DNA, 25 bp, Homo sapien
gctgtccgctactgaaggccagatg

SEQ ID NO: 2286455 - DNA, 25 bp, Homo sapien
tgaatacactcagtccagcagttgg

SEQ ID NO: 2286456 - DNA, 25 bp, Homo sapien
caatttttacagaatgcaggtagga

SEQ ID NO: 2286457 - DNA, 25 bp, Homo sapien
tgcaggtaggacaaaatgaaattat

SEQ ID NO: 2286458 - DNA, 25 bp, Homo sapien
ccttttattcatctgcccaatgatg

SEQ ID NO: 2286459 - DNA, 25 bp, Homo sapien
gcccaatgatggattcaattgttct

SEQ ID NO: 2286460 - DNA, 25 bp, Homo sapien
gtggctttacagggtttgtatcttc

SEQ ID NO: 2286461 - DNA, 25 bp, Homo sapien
tggctttacagggtttgtatcttcc

SEQ ID NO: 2286462 - DNA, 25 bp, Homo sapien
ccatattgcccatttgctaacgagg

SEQ ID NO: 2286463 - DNA, 25 bp, Homo sapien
ttccccacacttaataccagtagga

SEQ ID NO: 2286464 - DNA, 25 bp, Homo sapien
ccccacacttaataccagtaggaat

SEQ ID NO: 2286465 - DNA, 25 bp, Homo sapien
catttgctaacgaggagtcgtatag

SEQ ID NO: 2286466 - DNA, 25 bp, Homo sapien
aatttcagcagtaatcttccctctt

SEQ ID NO: 2286467 - DNA, 25 bp, Homo sapien
aagagtactctttcctgctaccacc

SEQ ID NO: 2286468 - DNA, 25 bp, Homo sapien
atttcagcagtaatcttccctcttc

SEQ ID NO: 2286469 - DNA, 25 bp, Homo sapien
tgaacaccagcagcctatcttgaca

SEQ ID NO: 2286470 - DNA, 25 bp, Homo sapien
gcaagtgacttgcagtccacaatgg

SEQ ID NO: 2286471 - DNA, 25 bp, Homo sapien
cagcagcctatcttgacagggctct

SEQ ID NO: 2286472 - DNA, 25 bp, Homo sapien
gctgcattttctccctagcctgaaa

SEQ ID NO: 2286473 - DNA, 25 bp, Homo sapien
cattccgagccctgagcgcgctcgg

SEQ ID NO: 2286474 - DNA, 25 bp, Homo sapien
agctctttcgggacgacttcctgca

SEQ ID NO: 2286475 - DNA, 25 bp, Homo sapien
tgagtcggtcctcttggtcaccggg

SEQ ID NO: 2286476 - DNA, 25 bp, Homo sapien
gctcggcctctgagtcggtcctctt

SEQ ID NO: 2286477 - DNA, 25 bp, Homo sapien
agcaactcgcaaacgcaacctgaag

SEQ ID NO: 2286478 - DNA, 25 bp, Homo sapien
caacctgaagcctgggctgcgcagt

SEQ ID NO: 2286479 - DNA, 25 bp, Homo sapien
tggcacttgcttctgcggcgagtcc

SEQ ID NO: 2286480 - DNA, 25 bp, Homo sapien
gggacccattccgaacttgcagagg

SEQ ID NO: 2286481 - DNA, 25 bp, Homo sapien
ccgaagcgccgcactgcagcatcct

SEQ ID NO: 2286482 - DNA, 25 bp, Homo sapien
gggggcgccgaagcgccgcactgca

SEQ ID NO: 2286483 - DNA, 25 bp, Homo sapien
gcgccgaagcgccgcactgcagcat

SEQ ID NO: 2286484 - DNA, 25 bp, Homo sapien
cagtagggggcgccgaagcgccgca

SEQ ID NO: 2286485 - DNA, 25 bp, Homo sapien
taagcgtgctcatttctagtattcc

SEQ ID NO: 2286486 - DNA, 25 bp, Homo sapien
ttttctctaagcgtgctcatttcta

SEQ ID NO: 2286487 - DNA, 25 bp, Homo sapien
tctaagcgtgctcatttctagtatt

SEQ ID NO: 2286488 - DNA, 25 bp, Homo sapien
tctctaagcgtgctcatttctagta

SEQ ID NO: 2286489 - DNA, 25 bp, Homo sapien
tccttcaaagaagggcaggtgtacc

SEQ ID NO: 2286490 - DNA, 25 bp, Homo sapien
cttcaaagaagggcaggtgtaccat

SEQ ID NO: 2286491 - DNA, 25 bp, Homo sapien
ccttcaaagaagggcaggtgtacca

SEQ ID NO: 2286492 - DNA, 25 bp, Homo sapien
tgggcagagcagatgcggaaaagat

SEQ ID NO: 2286493 - DNA, 25 bp, Homo sapien
cagggccatgtgaactacaagagtc

SEQ ID NO: 2286494 - DNA, 25 bp, Homo sapien
gatctagaaaggttagagccaataa

SEQ ID NO: 2286495 - DNA, 25 bp, Homo sapien
gttcagggccatgtgaactacaaga

SEQ ID NO: 2286496 - DNA, 25 bp, Homo sapien
tgtctttgtgctctcttctattcat

SEQ ID NO: 2286497 - DNA, 25 bp, Homo sapien
agatgggatcctggatgtcattctc

SEQ ID NO: 2286498 - DNA, 25 bp, Homo sapien
gggatcctggatgtcattctccttg

SEQ ID NO: 2286499 - DNA, 25 bp, Homo sapien
ccttgtctttgtgctctcttctatt

SEQ ID NO: 2286500 - DNA, 25 bp, Homo sapien
agcagacttccacttttgtctctcc

SEQ ID NO: 2286501 - DNA, 25 bp, Homo sapien
acccagcagacttccacttttgtct

SEQ ID NO: 2286502 - DNA, 25 bp, Homo sapien
ctacccagcagacttccacttttgt

SEQ ID NO: 2286503 - DNA, 25 bp, Homo sapien
ccagcagacttccacttttgtctct

SEQ ID NO: 2286504 - DNA, 25 bp, Homo sapien
ctttcacatgttgtctgcccaccat

SEQ ID NO: 2286505 - DNA, 25 bp, Homo sapien
caccatgaccaaaagtatcagacat

SEQ ID NO: 2286506 - DNA, 25 bp, Homo sapien
gctttcacatgttgtctgcccacca

SEQ ID NO: 2286507 - DNA, 25 bp, Homo sapien
aattctgacactgagcgaagaaccg

SEQ ID NO: 2286508 - DNA, 25 bp, Homo sapien
ctgagcgaagaaccgccaagttgcc

SEQ ID NO: 2286509 - DNA, 25 bp, Homo sapien
agaatcagtcttcttcatgcactgg

SEQ ID NO: 2286510 - DNA, 25 bp, Homo sapien
cttgctttagaatcagtcttcttca

SEQ ID NO: 2286511 - DNA, 25 bp, Homo sapien
tgggaatgtgccgaaatcctgccat

SEQ ID NO: 2286512 - DNA, 25 bp, Homo sapien
agaggaggccattatctgtgggaat

SEQ ID NO: 2286513 - DNA, 25 bp, Homo sapien
aagaggaggccattatctgtgggaa

SEQ ID NO: 2286514 - DNA, 25 bp, Homo sapien
atctgtgggaatgtgccgaaatcct

SEQ ID NO: 2286515 - DNA, 25 bp, Homo sapien
gagagtgtcacgcttaaatcactac

SEQ ID NO: 2286516 - DNA, 25 bp, Homo sapien
cttgagaagagagtgtcacgcttaa

SEQ ID NO: 2286517 - DNA, 25 bp, Homo sapien
catttatgagagtatgaagtctctt

SEQ ID NO: 2286518 - DNA, 25 bp, Homo sapien
gagagtatgaagtctcttgagaaga

SEQ ID NO: 2286519 - DNA, 25 bp, Homo sapien
cctttctccgcacgtggtcctgtgg

SEQ ID NO: 2286520 - DNA, 25 bp, Homo sapien
ccagaagctgtgtgtccacagtagc

SEQ ID NO: 2286521 - DNA, 25 bp, Homo sapien
ttctccgcacgtggtcctgtggaac

SEQ ID NO: 2286522 - DNA, 25 bp, Homo sapien
gtggaactcccagaagctgtgtgtc

SEQ ID NO: 2286523 - DNA, 25 bp, Homo sapien
gttccccatggactctacatatctt

SEQ ID NO: 2286524 - DNA, 25 bp, Homo sapien
acttttccctctaagccatgccttg

SEQ ID NO: 2286525 - DNA, 25 bp, Homo sapien
cctggcagcactcctcttcattatt

SEQ ID NO: 2286526 - DNA, 25 bp, Homo sapien
tggctcgctggcagtgtgcctcctt

SEQ ID NO: 2286527 - DNA, 25 bp, Homo sapien
ttcctgtatggtccaaaacctgcca

SEQ ID NO: 2286528 - DNA, 25 bp, Homo sapien
aatactctttgtgagggtcatgcgg

SEQ ID NO: 2286529 - DNA, 25 bp, Homo sapien
tgcaatgtcaagcattcctgtatgg

SEQ ID NO: 2286530 - DNA, 25 bp, Homo sapien
aactcattgctacaacttggaggaa

SEQ ID NO: 2286531 - DNA, 25 bp, Homo sapien
atacattaagaacaatgttgttcat

SEQ ID NO: 2286532 - DNA, 25 bp, Homo sapien
atatctcggttggcaaaattccact

SEQ ID NO: 2286533 - DNA, 25 bp, Homo sapien
tcatatctcggttggcaaaattcca

SEQ ID NO: 2286534 - DNA, 25 bp, Homo sapien
gttcatatctcggttggcaaaattc

SEQ ID NO: 2286535 - DNA, 25 bp, Homo sapien
acctattttcgggagctcattactt

SEQ ID NO: 2286536 - DNA, 25 bp, Homo sapien
tccagccttttctgtgctattttga

SEQ ID NO: 2286537 - DNA, 25 bp, Homo sapien
ttctgtgctattttgatggattcca

SEQ ID NO: 2286538 - DNA, 25 bp, Homo sapien
tcgggagctcattacttccagcctt

SEQ ID NO: 2286539 - DNA, 25 bp, Homo sapien
agtggaaatacgctaaagaaggtca

SEQ ID NO: 2286540 - DNA, 25 bp, Homo sapien
aaacagtggaaatacgctaaagaag

SEQ ID NO: 2286541 - DNA, 25 bp, Homo sapien
gtggaaatacgctaaagaaggtcat

SEQ ID NO: 2286542 - DNA, 25 bp, Homo sapien
acagtggaaatacgctaaagaaggt

SEQ ID NO: 2286543 - DNA, 25 bp, Homo sapien
gccaagacttattactcttgctgca

SEQ ID NO: 2286544 - DNA, 25 bp, Homo sapien
tttcaaaatgagaacgattgacagc

SEQ ID NO: 2286545 - DNA, 25 bp, Homo sapien
atgagaacgattgacagccctcagg

SEQ ID NO: 2286546 - DNA, 25 bp, Homo sapien
aaatgatgtgttgacaattcataag

SEQ ID NO: 2286547 - DNA, 25 bp, Homo sapien
tttgaaatccgcagttcttgtacat

SEQ ID NO: 2286548 - DNA, 25 bp, Homo sapien
ttttccatttgaaatccgcagttct

SEQ ID NO: 2286549 - DNA, 25 bp, Homo sapien
tagcacaattatgcaccttttccat

SEQ ID NO: 2286550 - DNA, 25 bp, Homo sapien
ccaggaacaaatagcacaattatgc

SEQ ID NO: 2286551 - DNA, 25 bp, Homo sapien
cggcggcggctcacaatggcgaact

SEQ ID NO: 2286552 - DNA, 25 bp, Homo sapien
tggcgagcgcatgctgcctttccag

SEQ ID NO: 2286553 - DNA, 25 bp, Homo sapien
attggagtgggcgaggctctgccgc

SEQ ID NO: 2286554 - DNA, 25 bp, Homo sapien
tttaatgactaaggatggagagggt

SEQ ID NO: 2286555 - DNA, 25 bp, Homo sapien
gcgggcgccgtgtatccccgtgggc

SEQ ID NO: 2286556 - DNA, 25 bp, Homo sapien
aacagcacaaagagccagagcagag

SEQ ID NO: 2286557 - DNA, 25 bp, Homo sapien
gcggcgggcgccgtgtatccccgtg

SEQ ID NO: 2286558 - DNA, 25 bp, Homo sapien
ggcgccgtgtatccccgtgggcagg

SEQ ID NO: 2286559 - DNA, 25 bp, Homo sapien
cccaacggcagagcgagggcgccgg

SEQ ID NO: 2286560 - DNA, 25 bp, Homo sapien
gccgctcccaacggcagagcgaggg

SEQ ID NO: 2286561 - DNA, 25 bp, Homo sapien
gctcccaacggcagagcgagggcgc

SEQ ID NO: 2286562 - DNA, 25 bp, Homo sapien
cgctcccaacggcagagcgagggcg

SEQ ID NO: 2286563 - DNA, 25 bp, Homo sapien
acacgcacacgcgaggacaacaaag

SEQ ID NO: 2286564 - DNA, 25 bp, Homo sapien
ggaacacgcacacgcgaggacaaca

SEQ ID NO: 2286565 - DNA, 25 bp, Homo sapien
cccaggctgcacggcaggcgcttcc

SEQ ID NO: 2286566 - DNA, 25 bp, Homo sapien
cacacgcgaggacaacaaagcgtgc

SEQ ID NO: 2286567 - DNA, 25 bp, Homo sapien
agtgtataattccagcagtaaggaa

SEQ ID NO: 2286568 - DNA, 25 bp, Homo sapien
tgtataattccagcagtaaggaaaa

SEQ ID NO: 2286569 - DNA, 25 bp, Homo sapien
gtgtataattccagcagtaaggaaa

SEQ ID NO: 2286570 - DNA, 25 bp, Homo sapien
tataattccagcagtaaggaaaatt

SEQ ID NO: 2286571 - DNA, 25 bp, Homo sapien
atatttttccaagcatatatcactt

SEQ ID NO: 2286572 - DNA, 25 bp, Homo sapien
tccaagcatatatcacttttctccc

SEQ ID NO: 2286573 - DNA, 25 bp, Homo sapien
gcatatatcacttttctccctttca

SEQ ID NO: 2286574 - DNA, 25 bp, Homo sapien
caagcatatatcacttttctccctt

SEQ ID NO: 2286575 - DNA, 25 bp, Homo sapien
cagaaacctatcggcccacagctga

SEQ ID NO: 2286576 - DNA, 25 bp, Homo sapien
tccagaaacctatcggcccacagct

SEQ ID NO: 2286577 - DNA, 25 bp, Homo sapien
gaataattggtgacactgaaattcc

SEQ ID NO: 2286578 - DNA, 25 bp, Homo sapien
aataattggtgacactgaaattcca

SEQ ID NO: 2286579 - DNA, 25 bp, Homo sapien
gtttataccctgctctaagccagtg

SEQ ID NO: 2286580 - DNA, 25 bp, Homo sapien
gaagcagcaggacctgtttataccc

SEQ ID NO: 2286581 - DNA, 25 bp, Homo sapien
catgcatggcacaaaactgctgtca

SEQ ID NO: 2286582 - DNA, 25 bp, Homo sapien
tagtctgtctgcttataccgaatta

SEQ ID NO: 2286583 - DNA, 25 bp, Homo sapien
tgcctgaaatgcatagagacgtggg

SEQ ID NO: 2286584 - DNA, 25 bp, Homo sapien
cagcaggaagaatatcaggtcgtgg

SEQ ID NO: 2286585 - DNA, 25 bp, Homo sapien
tccggaaaattaggctcaggaatgc

SEQ ID NO: 2286586 - DNA, 25 bp, Homo sapien
tcgtggttgaaggtctgcctgaaat

SEQ ID NO: 2286587 - DNA, 25 bp, Homo sapien
gtaagtgggaccctaccagatgctg

SEQ ID NO: 2286588 - DNA, 25 bp, Homo sapien
cctattacactggactaaatgtttg

SEQ ID NO: 2286589 - DNA, 25 bp, Homo sapien
taaaagaaccctagacaactctctg

SEQ ID NO: 2286590 - DNA, 25 bp, Homo sapien
cacgtgaatctgagctactgtctag

SEQ ID NO: 2286591 - DNA, 25 bp, Homo sapien
tttgaatagagataatgccagacta

SEQ ID NO: 2286592 - DNA, 25 bp, Homo sapien
tccattcatctttgattggtcccga

SEQ ID NO: 2286593 - DNA, 25 bp, Homo sapien
tctccactgacaaatgcttttgagt

SEQ ID NO: 2286594 - DNA, 25 bp, Homo sapien
aattctctactttattaccagggct

SEQ ID NO: 2286595 - DNA, 25 bp, Homo sapien
ccagccatgtgagccagtctaatga

SEQ ID NO: 2286596 - DNA, 25 bp, Homo sapien
tagactgtgtctaagccagaccagc

SEQ ID NO: 2286597 - DNA, 25 bp, Homo sapien
gctatgcacatcctatgaacaggta

SEQ ID NO: 2286598 - DNA, 25 bp, Homo sapien
tagaccatttctgcgtttaagaggc

SEQ ID NO: 2286599 - DNA, 25 bp, Homo sapien
ccaaaacctccacgaaagccactgt

SEQ ID NO: 2286600 - DNA, 25 bp, Homo sapien
acctccacgaaagccactgtggttc

SEQ ID NO: 2286601 - DNA, 25 bp, Homo sapien
tcgctccaccagcgtcatctgctat

SEQ ID NO: 2286602 - DNA, 25 bp, Homo sapien
cccctcgctccaccagcgtcatctg

SEQ ID NO: 2286603 - DNA, 25 bp, Homo sapien
tccttgactaggaggtccagctcgg

SEQ ID NO: 2286604 - DNA, 25 bp, Homo sapien
gtccttgactaggaggtccagctcg

SEQ ID NO: 2286605 - DNA, 25 bp, Homo sapien
ccttgactaggaggtccagctcggt

SEQ ID NO: 2286606 - DNA, 25 bp, Homo sapien
cttggtgtgctggccgacgtgggtc

SEQ ID NO: 2286607 - DNA, 25 bp, Homo sapien
gtgctggccgacgtgggtctgcttc

SEQ ID NO: 2286608 - DNA, 25 bp, Homo sapien
tgatatctgattctttgatgggcag

SEQ ID NO: 2286609 - DNA, 25 bp, Homo sapien
atgatatctgattctttgatgggca

SEQ ID NO: 2286610 - DNA, 25 bp, Homo sapien
gccaatgttcctggactcagggatg

SEQ ID NO: 2286611 - DNA, 25 bp, Homo sapien
aatgttcctggactcagggatgagg

SEQ ID NO: 2286612 - DNA, 25 bp, Homo sapien
ttcctggactcagggatgaggtgca

SEQ ID NO: 2286613 - DNA, 25 bp, Homo sapien
gaagaagtgctcagtgaattcctga

SEQ ID NO: 2286614 - DNA, 25 bp, Homo sapien
gatgttttagtcacagccgttctga

SEQ ID NO: 2286615 - DNA, 25 bp, Homo sapien
tactcattaatgagactgcatggtc

SEQ ID NO: 2286616 - DNA, 25 bp, Homo sapien
gtattggcagagctgatttacattc

SEQ ID NO: 2286617 - DNA, 25 bp, Homo sapien
ccaccaacagtgtaggaacattccc

SEQ ID NO: 2286618 - DNA, 25 bp, Homo sapien
aaatcatagccgtttgttgttattc

SEQ ID NO: 2286619 - DNA, 25 bp, Homo sapien
tttacttaagcacaattttggagct

SEQ ID NO: 2286620 - DNA, 25 bp, Homo sapien
gaattgagcaataagaacctgctgc

SEQ ID NO: 2286621 - DNA, 25 bp, Homo sapien
tgtggtcagaaccaatgatcaatcc

SEQ ID NO: 2286622 - DNA, 25 bp, Homo sapien
agtaattcattacattgtggattgg

SEQ ID NO: 2286623 - DNA, 25 bp, Homo sapien
gaatctatgtttgaatgcatccatc

SEQ ID NO: 2286624 - DNA, 25 bp, Homo sapien
cattacattgtggattggttttctt

SEQ ID NO: 2286625 - DNA, 25 bp, Homo sapien
tcatgcttgcccaggaattcactag

SEQ ID NO: 2286626 - DNA, 25 bp, Homo sapien
tgctaggcagatcaactggaattat

SEQ ID NO: 2286627 - DNA, 25 bp, Homo sapien
gagatatacagcatgtgtttcagag

SEQ ID NO: 2286628 - DNA, 25 bp, Homo sapien
tgtaagcaagttacctggaatgtgg

SEQ ID NO: 2286629 - DNA, 25 bp, Homo sapien
gacgtgatcaatctgcagagaatga

SEQ ID NO: 2286630 - DNA, 25 bp, Homo sapien
cagcaaacttggagacacaacatta

SEQ ID NO: 2286631 - DNA, 25 bp, Homo sapien
tcaaacttaatgcaatggagatata

SEQ ID NO: 2286632 - DNA, 25 bp, Homo sapien
gctcaatgaggtcaatagaacatgc

SEQ ID NO: 2286633 - DNA, 25 bp, Homo sapien
catgcatgaacaaagtgagaatttc

SEQ ID NO: 2286634 - DNA, 25 bp, Homo sapien
gcttctatgtggtgctaatgctgct

SEQ ID NO: 2286635 - DNA, 25 bp, Homo sapien
aaaggcatatgaaatcaggaggtct

SEQ ID NO: 2286636 - DNA, 25 bp, Homo sapien
gaggtctgggatacggcctgcaatt

SEQ ID NO: 2286637 - DNA, 25 bp, Homo sapien
gagctacagggcaaattgggcattt

SEQ ID NO: 2286638 - DNA, 25 bp, Homo sapien
tggaaatatctaatgcaccattggg

SEQ ID NO: 2286639 - DNA, 25 bp, Homo sapien
tccatggaacttgtagaaagggctg

SEQ ID NO: 2286640 - DNA, 25 bp, Homo sapien
ttcacctggaggtgttagggcacag

SEQ ID NO: 2286641 - DNA, 25 bp, Homo sapien
agcaaatagttctccgtcaccctga

SEQ ID NO: 2286642 - DNA, 25 bp, Homo sapien
agagaactgttcagtgccacggaca

SEQ ID NO: 2286643 - DNA, 25 bp, Homo sapien
tatcctggccaatacaagagaactg

SEQ ID NO: 2286644 - DNA, 25 bp, Homo sapien
tgatgctcatgtggactaagccagg

SEQ ID NO: 2286645 - DNA, 25 bp, Homo sapien
gatagttgctagtggtagactccct

SEQ ID NO: 2286646 - DNA, 25 bp, Homo sapien
ggagaataacacaggacgagttcct

SEQ ID NO: 2286647 - DNA, 25 bp, Homo sapien
gaataacacaggacgagttcctggg

SEQ ID NO: 2286648 - DNA, 25 bp, Homo sapien
gagcctgtgacctgttctggaagca

SEQ ID NO: 2286649 - DNA, 25 bp, Homo sapien
gcagcaaaaggggtctgggcacttg

SEQ ID NO: 2286650 - DNA, 25 bp, Homo sapien
ttactaggggcactaattcttcctc

SEQ ID NO: 2286651 - DNA, 25 bp, Homo sapien
tggggttggatcctgtctttactag

SEQ ID NO: 2286652 - DNA, 25 bp, Homo sapien
ttgctgctacagctaacccagtggg

SEQ ID NO: 2286653 - DNA, 25 bp, Homo sapien
cccagtggggttggatcctgtcttt

SEQ ID NO: 2286654 - DNA, 25 bp, Homo sapien
tcagctacagtgaacaggactgtgg

SEQ ID NO: 2286655 - DNA, 25 bp, Homo sapien
ggtctttccgcacattcagctacag

SEQ ID NO: 2286656 - DNA, 25 bp, Homo sapien
cccttggctcatgggtgcctggtct

SEQ ID NO: 2286657 - DNA, 25 bp, Homo sapien
caagactgagggaagaccccttggc

SEQ ID NO: 2286658 - DNA, 25 bp, Homo sapien
tatcatcttggacagttacatggaa

SEQ ID NO: 2286659 - DNA, 25 bp, Homo sapien
tggactgatgacgtctgaagcttct

SEQ ID NO: 2286660 - DNA, 25 bp, Homo sapien
tgaagcttctaatgagacaacgatg

SEQ ID NO: 2286661 - DNA, 25 bp, Homo sapien
tataataaaggccatgataactggc

SEQ ID NO: 2286662 - DNA, 25 bp, Homo sapien
taagaagaaacgggacaatattaca

SEQ ID NO: 2286663 - DNA, 25 bp, Homo sapien
agaagaaacgggacaatattacaca

SEQ ID NO: 2286664 - DNA, 25 bp, Homo sapien
gaaacgggacaatattacacatgat

SEQ ID NO: 2286665 - DNA, 25 bp, Homo sapien
aagaaacgggacaatattacacatg

SEQ ID NO: 2286666 - DNA, 25 bp, Homo sapien
tgggtggagtctgtcaattcgagcc

SEQ ID NO: 2286667 - DNA, 25 bp, Homo sapien
cattctgggtggagtctgtcaattc

SEQ ID NO: 2286668 - DNA, 25 bp, Homo sapien
gccattctgggtggagtctgtcaat

SEQ ID NO: 2286669 - DNA, 25 bp, Homo sapien
tctgggtggagtctgtcaattcgag

SEQ ID NO: 2286670 - DNA, 25 bp, Homo sapien
tcttaatatagctcataactttgaa

SEQ ID NO: 2286671 - DNA, 25 bp, Homo sapien
caaacttcagctgtattcttaatat

SEQ ID NO: 2286672 - DNA, 25 bp, Homo sapien
ttaatatagctcataactttgaatc

SEQ ID NO: 2286673 - DNA, 25 bp, Homo sapien
agtaaacatcaaacttcagctgtat

SEQ ID NO: 2286674 - DNA, 25 bp, Homo sapien
ctgtttcaggagaaggtttatagtc

SEQ ID NO: 2286675 - DNA, 25 bp, Homo sapien
tgtttcaggagaaggtttatagtca

SEQ ID NO: 2286676 - DNA, 25 bp, Homo sapien
aatgttcactcttgtgaaaacgtta

SEQ ID NO: 2286677 - DNA, 25 bp, Homo sapien
tgtgaaaacgttatatttttctgga

SEQ ID NO: 2286678 - DNA, 25 bp, Homo sapien
tagcattgtccggaagtctttacct

SEQ ID NO: 2286679 - DNA, 25 bp, Homo sapien
ctttatatagcattgtccggaagtc

SEQ ID NO: 2286680 - DNA, 25 bp, Homo sapien
cctcagataccagctgaaaggtgat

SEQ ID NO: 2286681 - DNA, 25 bp, Homo sapien
ctgtttgggttcgtgactgacacca

SEQ ID NO: 2286682 - DNA, 25 bp, Homo sapien
tttgggttcgtgactgacaccactg

SEQ ID NO: 2286683 - DNA, 25 bp, Homo sapien
tgtttgggttcgtgactgacaccac

SEQ ID NO: 2286684 - DNA, 25 bp, Homo sapien
ccaccaatatggctgagacgtagtt

SEQ ID NO: 2286685 - DNA, 25 bp, Homo sapien
tcaggccaaccggaagaaatgttgc

SEQ ID NO: 2286686 - DNA, 25 bp, Homo sapien
tccatgggaagtacgctgacaaatt

SEQ ID NO: 2286687 - DNA, 25 bp, Homo sapien
aaatgttgcccgagggaatttcagg

SEQ ID NO: 2286688 - DNA, 25 bp, Homo sapien
tagggatgggtctacactgtgtatc

SEQ ID NO: 2286689 - DNA, 25 bp, Homo sapien
aaggccctgggtatagacaagtcga

SEQ ID NO: 2286690 - DNA, 25 bp, Homo sapien
tgaatagacacctggaaaggccctg

SEQ ID NO: 2286691 - DNA, 25 bp, Homo sapien
tctcatcacgaggtaagggctaaaa

SEQ ID NO: 2286692 - DNA, 25 bp, Homo sapien
gaactaaaggttgtcacagataact

SEQ ID NO: 2286693 - DNA, 25 bp, Homo sapien
tcgagtttcacaagatcctgaggaa

SEQ ID NO: 2286694 - DNA, 25 bp, Homo sapien
acttatatttcccaggttccttcag

SEQ ID NO: 2286695 - DNA, 25 bp, Homo sapien
caacaaattcatgtgcttcttcatc

SEQ ID NO: 2286696 - DNA, 25 bp, Homo sapien
tgataatcaacccaaggacatgggt

SEQ ID NO: 2286697 - DNA, 25 bp, Homo sapien
ttatgctgagcaaacgtaagccacc

SEQ ID NO: 2286698 - DNA, 25 bp, Homo sapien
atacttttgctggtgtgtgactaca

SEQ ID NO: 2286699 - DNA, 25 bp, Homo sapien
taaggctattggcagtctagtgcaa

SEQ ID NO: 2286700 - DNA, 25 bp, Homo sapien
ttgtttctggcaggtcagcgacacc

SEQ ID NO: 2286701 - DNA, 25 bp, Homo sapien
gatgtccaggacatcaaggcagtgg

SEQ ID NO: 2286702 - DNA, 25 bp, Homo sapien
taaaacgtggacactcacgtgctgc

SEQ ID NO: 2286703 - DNA, 25 bp, Homo sapien
gcggcttctcggtcagttcttcaat

SEQ ID NO: 2286704 - DNA, 25 bp, Homo sapien
tatattacaacctggtactgggcac

SEQ ID NO: 2286705 - DNA, 25 bp, Homo sapien
aggatctgaaggtggtccaatcaaa

SEQ ID NO: 2286706 - DNA, 25 bp, Homo sapien
tctgaaggtggtccaatcaaagggc

SEQ ID NO: 2286707 - DNA, 25 bp, Homo sapien
ctttccttaggtatattacaacctg

SEQ ID NO: 2286708 - DNA, 25 bp, Homo sapien
cacggatgcagttaaggaaacagtt

SEQ ID NO: 2286709 - DNA, 25 bp, Homo sapien
taggtggtccactctgatgtcattg

SEQ ID NO: 2286710 - DNA, 25 bp, Homo sapien
ggacccaaaggatagagcattaaat

SEQ ID NO: 2286711 - DNA, 25 bp, Homo sapien
tctgaacacgcctaaataaggtctg

SEQ ID NO: 2286712 - DNA, 25 bp, Homo sapien
agacacatttggtacataaaggttt

SEQ ID NO: 2286713 - DNA, 25 bp, Homo sapien
aagacacatttggtacataaaggtt

SEQ ID NO: 2286714 - DNA, 25 bp, Homo sapien
gacacatttggtacataaaggtttg

SEQ ID NO: 2286715 - DNA, 25 bp, Homo sapien
gaagttgtagtaccatgctggcagc

SEQ ID NO: 2286716 - DNA, 25 bp, Homo sapien
ggatctccccacgtcaccatggtaa

SEQ ID NO: 2286717 - DNA, 25 bp, Homo sapien
catgctggcagcagattagctattc

SEQ ID NO: 2286718 - DNA, 25 bp, Homo sapien
gaagctgatggtagagctgtcacag

SEQ ID NO: 2286719 - DNA, 25 bp, Homo sapien
catccagtgaagcattctagaatgg

SEQ ID NO: 2286720 - DNA, 25 bp, Homo sapien
acagaagtgatttccggagccactg

SEQ ID NO: 2286721 - DNA, 25 bp, Homo sapien
tgtatcatccccatatgtccaactg

SEQ ID NO: 2286722 - DNA, 25 bp, Homo sapien
tctagaatgggacaagtccgttgta

SEQ ID NO: 2286723 - DNA, 25 bp, Homo sapien
caaggcggagcatggaggtattact

SEQ ID NO: 2286724 - DNA, 25 bp, Homo sapien
caagctgagaattgcagtcatgaca

SEQ ID NO: 2286725 - DNA, 25 bp, Homo sapien
ttactgagaggttatagatgtcgcc

SEQ ID NO: 2286726 - DNA, 25 bp, Homo sapien
tacttcctctttcagtacaagcagt

SEQ ID NO: 2286727 - DNA, 25 bp, Homo sapien
tccatcctccattgtctgtggcaga

SEQ ID NO: 2286728 - DNA, 25 bp, Homo sapien
catactgtctctaaaggtctatcac

SEQ ID NO: 2286729 - DNA, 25 bp, Homo sapien
ctgtggcagattttaggatactgtc

SEQ ID NO: 2286730 - DNA, 25 bp, Homo sapien
caactttgtgtcaatccatcctcca

SEQ ID NO: 2286731 - DNA, 25 bp, Homo sapien
gatagctatctaacttggaaggcag

SEQ ID NO: 2286732 - DNA, 25 bp, Homo sapien
gcaggtgaagcatcccccaattcaa

SEQ ID NO: 2286733 - DNA, 25 bp, Homo sapien
tattgcctttgaaatatgtcctttc

SEQ ID NO: 2286734 - DNA, 25 bp, Homo sapien
tcaaatataggtaggtaagagcacc

SEQ ID NO: 2286735 - DNA, 25 bp, Homo sapien
tgcgaagagtgatttgggtggagct

SEQ ID NO: 2286736 - DNA, 25 bp, Homo sapien
cgaagagtgatttgggtggagctgg

SEQ ID NO: 2286737 - DNA, 25 bp, Homo sapien
ctgcgaagagtgatttgggtggagc

SEQ ID NO: 2286738 - DNA, 25 bp, Homo sapien
aagagtgatttgggtggagctggtt

SEQ ID NO: 2286739 - DNA, 25 bp, Homo sapien
ctgaagtttggttttctgactggag

SEQ ID NO: 2286740 - DNA, 25 bp, Homo sapien
tctgactggagccaacttgttgaca

SEQ ID NO: 2286741 - DNA, 25 bp, Homo sapien
aagtttggttttctgactggagcca

SEQ ID NO: 2286742 - DNA, 25 bp, Homo sapien
tttctgactggagccaacttgttga

SEQ ID NO: 2286743 - DNA, 25 bp, Homo sapien
tgagaaaaggtagatcaaaaggtac

SEQ ID NO: 2286744 - DNA, 25 bp, Homo sapien
taagttaactgagaaaaggtagatc

SEQ ID NO: 2286745 - DNA, 25 bp, Homo sapien
agaaaaggtagatcaaaaggtacag

SEQ ID NO: 2286746 - DNA, 25 bp, Homo sapien
actgagaaaaggtagatcaaaaggt

SEQ ID NO: 2286747 - DNA, 25 bp, Homo sapien
gatggtcacgacatgggaagaaaca

SEQ ID NO: 2286748 - DNA, 25 bp, Homo sapien
ttgagacggctatgaacgtagggac

SEQ ID NO: 2286749 - DNA, 25 bp, Homo sapien
gtgacactacaattgtaggcagtgg

SEQ ID NO: 2286750 - DNA, 25 bp, Homo sapien
ctgtcatggctaaagctggtgacac

SEQ ID NO: 2286751 - DNA, 25 bp, Homo sapien
taaagagataagttgtgcattttca

SEQ ID NO: 2286752 - DNA, 25 bp, Homo sapien
aaagagataagttgtgcattttcat

SEQ ID NO: 2286753 - DNA, 25 bp, Homo sapien
ctaaagagataagttgtgcattttc

SEQ ID NO: 2286754 - DNA, 25 bp, Homo sapien
tgagggtaacaagcaacagtccaat

SEQ ID NO: 2286755 - DNA, 25 bp, Homo sapien
cctaagaataatgagggtaacaagc

SEQ ID NO: 2286756 - DNA, 25 bp, Homo sapien
taaaagtgtgctaaggatggccagc

SEQ ID NO: 2286757 - DNA, 25 bp, Homo sapien
agcacggagatcactaccacattgg

SEQ ID NO: 2286758 - DNA, 25 bp, Homo sapien
gatgcaaaattgacaaatgtaccag

SEQ ID NO: 2286759 - DNA, 25 bp, Homo sapien
ggatgcaaaattgacaaatgtacca

SEQ ID NO: 2286760 - DNA, 25 bp, Homo sapien
atgcaaaattgacaaatgtaccagc

SEQ ID NO: 2286761 - DNA, 25 bp, Homo sapien
aggatgcaaaattgacaaatgtacc

SEQ ID NO: 2286762 - DNA, 25 bp, Homo sapien
taaaatgccaaaagataatcagtcc

SEQ ID NO: 2286763 - DNA, 25 bp, Homo sapien
gataatcagtccaaagacatgaggg

SEQ ID NO: 2286764 - DNA, 25 bp, Homo sapien
cagtccaaagacatgagggtagcag

SEQ ID NO: 2286765 - DNA, 25 bp, Homo sapien
gagggtagcagggttaagaaagcaa

SEQ ID NO: 2286766 - DNA, 25 bp, Homo sapien
tccacactgattctgctaccacccc

SEQ ID NO: 2286767 - DNA, 25 bp, Homo sapien
taactgggtactggtgctccacact

SEQ ID NO: 2286768 - DNA, 25 bp, Homo sapien
ctaactgggtactggtgctccacac

SEQ ID NO: 2286769 - DNA, 25 bp, Homo sapien
tgtcagtttcctcttctttaaacca

SEQ ID NO: 2286770 - DNA, 25 bp, Homo sapien
atcaaagtcatccagttgaaccggg

SEQ ID NO: 2286771 - DNA, 25 bp, Homo sapien
gccatttagactgtgttatgagcta

SEQ ID NO: 2286772 - DNA, 25 bp, Homo sapien
tgaatcactgaccactcaagccatg

SEQ ID NO: 2286773 - DNA, 25 bp, Homo sapien
cccacactgctgagatattagactc

SEQ ID NO: 2286774 - DNA, 25 bp, Homo sapien
caagccatgctatagaaacctgaag

SEQ ID NO: 2286775 - DNA, 25 bp, Homo sapien
ggatgaaccaacaaaaattgcccag

SEQ ID NO: 2286776 - DNA, 25 bp, Homo sapien
agatttctctcttcctttgattcct

SEQ ID NO: 2286777 - DNA, 25 bp, Homo sapien
tttctctcttcctttgattcctcat

SEQ ID NO: 2286778 - DNA, 25 bp, Homo sapien
aattgcccagatttctctcttcctt

SEQ ID NO: 2286779 - DNA, 25 bp, Homo sapien
attgggttgcctgactgtagccaac

SEQ ID NO: 2286780 - DNA, 25 bp, Homo sapien
ttgggttgcctgactgtagccaaca

SEQ ID NO: 2286781 - DNA, 25 bp, Homo sapien
cattgggttgcctgactgtagccaa

SEQ ID NO: 2286782 - DNA, 25 bp, Homo sapien
tgtgtaacggtttttacatcgattc

SEQ ID NO: 2286783 - DNA, 25 bp, Homo sapien
gggatatccagtccaatcaatttca

SEQ ID NO: 2286784 - DNA, 25 bp, Homo sapien
ttttacatcgattcagtggaagatc

SEQ ID NO: 2286785 - DNA, 25 bp, Homo sapien
aagatctgcagcaaagtgtgggata

SEQ ID NO: 2286786 - DNA, 25 bp, Homo sapien
gactaatctcacacggctgaagtca

SEQ ID NO: 2286787 - DNA, 25 bp, Homo sapien
ggagactaatctcacacggctgaag

SEQ ID NO: 2286788 - DNA, 25 bp, Homo sapien
cattgatgtagtctgcaccttcctc

SEQ ID NO: 2286789 - DNA, 25 bp, Homo sapien
tcatggagactaatctcacacggct

SEQ ID NO: 2286790 - DNA, 25 bp, Homo sapien
tctcattacactgagtgagcatgac

SEQ ID NO: 2286791 - DNA, 25 bp, Homo sapien
gcatgacaataatctgagacttttg

SEQ ID NO: 2286792 - DNA, 25 bp, Homo sapien
ctgggtggcaatatactcctggggt

SEQ ID NO: 2286793 - DNA, 25 bp, Homo sapien
ctgagacttttgttgcaggaccatc

SEQ ID NO: 2286794 - DNA, 25 bp, Homo sapien
ccacagtgatgtctccataggctat

SEQ ID NO: 2286795 - DNA, 25 bp, Homo sapien
tagttgatccggaagtgtctacagg

SEQ ID NO: 2286796 - DNA, 25 bp, Homo sapien
ttcttccgtgaatggccagtaatgg

SEQ ID NO: 2286797 - DNA, 25 bp, Homo sapien
tgatccggaagtgtctacaggccca

SEQ ID NO: 2286798 - DNA, 25 bp, Homo sapien
tctaacgttgtattgatacgggcaa

SEQ ID NO: 2286799 - DNA, 25 bp, Homo sapien
ccattgcctattttaagggtcagca

SEQ ID NO: 2286800 - DNA, 25 bp, Homo sapien
taacaagtggcaattaacaatggct

SEQ ID NO: 2286801 - DNA, 25 bp, Homo sapien
tctcctgtagagatcaatcagtagg

SEQ ID NO: 2286802 - DNA, 25 bp, Homo sapien
agggggtgacacttaagctgaaact

SEQ ID NO: 2286803 - DNA, 25 bp, Homo sapien
ggaatgggctaacggtgtccaagcc

SEQ ID NO: 2286804 - DNA, 25 bp, Homo sapien
agaaggaatgggctaacggtgtcca

SEQ ID NO: 2286805 - DNA, 25 bp, Homo sapien
agaagacgccacaaagggggtgaca

SEQ ID NO: 2286806 - DNA, 25 bp, Homo sapien
ggccatgcagtgtagttaaaatgca

SEQ ID NO: 2286807 - DNA, 25 bp, Homo sapien
tgctgtgggcacaccatgatcaggc

SEQ ID NO: 2286808 - DNA, 25 bp, Homo sapien
gggacctttgctcttggtagcttgc

SEQ ID NO: 2286809 - DNA, 25 bp, Homo sapien
cggaccatgtgtacaaactgcagga

SEQ ID NO: 2286810 - DNA, 25 bp, Homo sapien
ggcttatggaatggtgagctgttcc

SEQ ID NO: 2286811 - DNA, 25 bp, Homo sapien
ataagggcttatggaatggtgagct

SEQ ID NO: 2286812 - DNA, 25 bp, Homo sapien
aaacctgataagggcttatggaatg

SEQ ID NO: 2286813 - DNA, 25 bp, Homo sapien
ctgataagggcttatggaatggtga

SEQ ID NO: 2286814 - DNA, 25 bp, Homo sapien
gacatccggtatgacctcatttctg

SEQ ID NO: 2286815 - DNA, 25 bp, Homo sapien
catgatcccgaatgtgctgcaagag

SEQ ID NO: 2286816 - DNA, 25 bp, Homo sapien
tgtcaacaaactcatgatcccgaat

SEQ ID NO: 2286817 - DNA, 25 bp, Homo sapien
gacaccagccctaagatgtcaacaa

SEQ ID NO: 2286818 - DNA, 25 bp, Homo sapien
gcaggcggtgctgtctgccggcgtt

SEQ ID NO: 2286819 - DNA, 25 bp, Homo sapien
gctccagactaagtgcatcctcagg

SEQ ID NO: 2286820 - DNA, 25 bp, Homo sapien
gcgttgccttgggttgtcgctccag

SEQ ID NO: 2286821 - DNA, 25 bp, Homo sapien
ctgtctgccggcgttgccttgggtt

SEQ ID NO: 2286822 - DNA, 25 bp, Homo sapien
tttttgcgcccacaagggtacacac

SEQ ID NO: 2286823 - DNA, 25 bp, Homo sapien
gtttttgcgcccacaagggtacaca

SEQ ID NO: 2286824 - DNA, 25 bp, Homo sapien
gaagtcgcgagtatggctgggtgat

SEQ ID NO: 2286825 - DNA, 25 bp, Homo sapien
taagaagtcgcgagtatggctgggt

SEQ ID NO: 2286826 - DNA, 25 bp, Homo sapien
ctaagaagtcgcgagtatggctggg

SEQ ID NO: 2286827 - DNA, 25 bp, Homo sapien
tcgcgagtatggctgggtgatgagg

SEQ ID NO: 2286828 - DNA, 25 bp, Homo sapien
tcttcatccacatcagttgcacaca

SEQ ID NO: 2286829 - DNA, 25 bp, Homo sapien
tcatccacatcagttgcacacactg

SEQ ID NO: 2286830 - DNA, 25 bp, Homo sapien
tgatgcagaactgctgcttcttctt

SEQ ID NO: 2286831 - DNA, 25 bp, Homo sapien
cactgatgcagaactgctgcttctt

SEQ ID NO: 2286832 - DNA, 25 bp, Homo sapien
cttgctaacattctcgtatatgaca

SEQ ID NO: 2286833 - DNA, 25 bp, Homo sapien
ctaggacttgctaacattctcgtat

SEQ ID NO: 2286834 - DNA, 25 bp, Homo sapien
ggacttgctaacattctcgtatatg

SEQ ID NO: 2286835 - DNA, 25 bp, Homo sapien
taggacttgctaacattctcgtata

SEQ ID NO: 2286836 - DNA, 25 bp, Homo sapien
tgttgccaacaccaaccaaggtgca

SEQ ID NO: 2286837 - DNA, 25 bp, Homo sapien
ttaggagtgtccaatccagctcatg

SEQ ID NO: 2286838 - DNA, 25 bp, Homo sapien
tctgatctcgtagtcaaaactggag

SEQ ID NO: 2286839 - DNA, 25 bp, Homo sapien
taagactgagcactcgtggagagct

SEQ ID NO: 2286840 - DNA, 25 bp, Homo sapien
gcagattactgttacctcagccaag

SEQ ID NO: 2286841 - DNA, 25 bp, Homo sapien
tagaggtgcagtgctaatcctatcc

SEQ ID NO: 2286842 - DNA, 25 bp, Homo sapien
ccattgtgcgctctgtctctcttga

SEQ ID NO: 2286843 - DNA, 25 bp, Homo sapien
gtctcacaacccatgcagatgtggg

SEQ ID NO: 2286844 - DNA, 25 bp, Homo sapien
cagggcccactaaaacaatctggaa

SEQ ID NO: 2286845 - DNA, 25 bp, Homo sapien
acaaagcagggcctctgtttagaaa

SEQ ID NO: 2286846 - DNA, 25 bp, Homo sapien
tatctccttggccacatattacaaa

SEQ ID NO: 2286847 - DNA, 25 bp, Homo sapien
ggaggatgggcgcacatcatgtcct

SEQ ID NO: 2286848 - DNA, 25 bp, Homo sapien
cctgccctttggagagcgtcttgac

SEQ ID NO: 2286849 - DNA, 25 bp, Homo sapien
gtccaaaaggacactgtaggctctt

SEQ ID NO: 2286850 - DNA, 25 bp, Homo sapien
taggctctttaaggctaagtcttcc

SEQ ID NO: 2286851 - DNA, 25 bp, Homo sapien
ttaaatgtcccgaagtgaaagagtc

SEQ ID NO: 2286852 - DNA, 25 bp, Homo sapien
gacagtaacattagtccaaaagggc

SEQ ID NO: 2286853 - DNA, 25 bp, Homo sapien
taggcaccacgattgctcagacagc

SEQ ID NO: 2286854 - DNA, 25 bp, Homo sapien
gaaagaaagtgcgttttcacagcct

SEQ ID NO: 2286855 - DNA, 25 bp, Homo sapien
caaggaatgcaaagtctaggcacca

SEQ ID NO: 2286856 - DNA, 25 bp, Homo sapien
ggcactatttgatccctaccttgaa

SEQ ID NO: 2286857 - DNA, 25 bp, Homo sapien
gcagcagtgttggaaacgtacttca

SEQ ID NO: 2286858 - DNA, 25 bp, Homo sapien
ccttttgggaaaattgatctggcac

SEQ ID NO: 2286859 - DNA, 25 bp, Homo sapien
tgttcctgagaatggtgcgacacat

SEQ ID NO: 2286860 - DNA, 25 bp, Homo sapien
acaccacagcctcatttgagagctg

SEQ ID NO: 2286861 - DNA, 25 bp, Homo sapien
ttcaaatccaaagcatctgatcctg

SEQ ID NO: 2286862 - DNA, 25 bp, Homo sapien
catctgatcctgctttgcctgttga

SEQ ID NO: 2286863 - DNA, 25 bp, Homo sapien
aaagcatctgatcctgctttgcctg

SEQ ID NO: 2286864 - DNA, 25 bp, Homo sapien
tcttgatcacataatgggccaatgc

SEQ ID NO: 2286865 - DNA, 25 bp, Homo sapien
cattgtgggtttactttgctctgca

SEQ ID NO: 2286866 - DNA, 25 bp, Homo sapien
tgggaattttactgggcagtcacac

SEQ ID NO: 2286867 - DNA, 25 bp, Homo sapien
tctgtggcaccaccatctgtgttgg

SEQ ID NO: 2286868 - DNA, 25 bp, Homo sapien
cggctctcacggctctttccttcct

SEQ ID NO: 2286869 - DNA, 25 bp, Homo sapien
aaatgccttcgaaagagctttgggc

SEQ ID NO: 2286870 - DNA, 25 bp, Homo sapien
ggaaagctctgcatatggagtagaa

SEQ ID NO: 2286871 - DNA, 25 bp, Homo sapien
gctggaaggaggtgtgcgatgagcc

SEQ ID NO: 2286872 - DNA, 25 bp, Homo sapien
tacagccataccttggacatgcaaa

SEQ ID NO: 2286873 - DNA, 25 bp, Homo sapien
cacaggatttgcttctaggcccatt

SEQ ID NO: 2286874 - DNA, 25 bp, Homo sapien
tgtcattcagggcatagctcactgt

SEQ ID NO: 2286875 - DNA, 25 bp, Homo sapien
cacaaatgcgaaagaggtcatgtct

SEQ ID NO: 2286876 - DNA, 25 bp, Homo sapien
tgtatcaagagcagcgtgaccctct

SEQ ID NO: 2286877 - DNA, 25 bp, Homo sapien
agtccacaggtcatctgccatggct

SEQ ID NO: 2286878 - DNA, 25 bp, Homo sapien
tcagatatggcccacacatttgttt

SEQ ID NO: 2286879 - DNA, 25 bp, Homo sapien
acaatagaaagcctagcgccgagca

SEQ ID NO: 2286880 - DNA, 25 bp, Homo sapien
gcaagtgttactagtctcatactta

SEQ ID NO: 2286881 - DNA, 25 bp, Homo sapien
tatctagttcttttatggtagagat

SEQ ID NO: 2286882 - DNA, 25 bp, Homo sapien
tctggatttggctaagtaccacctg

SEQ ID NO: 2286883 - DNA, 25 bp, Homo sapien
tactgaattgcagacattgcttgaa

SEQ ID NO: 2286884 - DNA, 25 bp, Homo sapien
ggcatttggcagacctatggaccat

SEQ ID NO: 2286885 - DNA, 25 bp, Homo sapien
tttggcatttggcagacctatggac

SEQ ID NO: 2286886 - DNA, 25 bp, Homo sapien
tttttggcatttggcagacctatgg

SEQ ID NO: 2286887 - DNA, 25 bp, Homo sapien
attttttggcatttggcagacctat

SEQ ID NO: 2286888 - DNA, 25 bp, Homo sapien
tctgttgttgttattcttcttccat

SEQ ID NO: 2286889 - DNA, 25 bp, Homo sapien
ttcttcttccatccaccaagaacat

SEQ ID NO: 2286890 - DNA, 25 bp, Homo sapien
tgttgttgttattcttcttccatcc

SEQ ID NO: 2286891 - DNA, 25 bp, Homo sapien
tattcttcttccatccaccaagaac

SEQ ID NO: 2286892 - DNA, 25 bp, Homo sapien
atttgcttactaacttcattagaac

SEQ ID NO: 2286893 - DNA, 25 bp, Homo sapien
ctgctgcggattgatttgcttacta

SEQ ID NO: 2286894 - DNA, 25 bp, Homo sapien
gatttgcttactaacttcattagaa

SEQ ID NO: 2286895 - DNA, 25 bp, Homo sapien
ctgcggattgatttgcttactaact

SEQ ID NO: 2286896 - DNA, 25 bp, Homo sapien
tttctgccacatctagcaaccctag

SEQ ID NO: 2286897 - DNA, 25 bp, Homo sapien
ctctcattatcataatacaccaatt

SEQ ID NO: 2286898 - DNA, 25 bp, Homo sapien
tagcaaccctagcttcctaaattca

SEQ ID NO: 2286899 - DNA, 25 bp, Homo sapien
catctagcaaccctagcttcctaaa

SEQ ID NO: 2286900 - DNA, 25 bp, Homo sapien
ggttagtattctctgtattcctgag

SEQ ID NO: 2286901 - DNA, 25 bp, Homo sapien
tatccttaactttgccgtcacctcg

SEQ ID NO: 2286902 - DNA, 25 bp, Homo sapien
gtcacctcggagtagcttcttttgg

SEQ ID NO: 2286903 - DNA, 25 bp, Homo sapien
acaagatttctagtctgctccgatt

SEQ ID NO: 2286904 - DNA, 25 bp, Homo sapien
ttggccttagaaacctgcccagaat

SEQ ID NO: 2286905 - DNA, 25 bp, Homo sapien
cactgatttcctgtattggcacttt

SEQ ID NO: 2286906 - DNA, 25 bp, Homo sapien
gtattggcactttgccttggcctta

SEQ ID NO: 2286907 - DNA, 25 bp, Homo sapien
ctcaaatccagtcactgatttcctg

SEQ ID NO: 2286908 - DNA, 25 bp, Homo sapien
ggacagcattctgggtatgcgcaca

SEQ ID NO: 2286909 - DNA, 25 bp, Homo sapien
gcagtcgcaaggtttaggcttcaga

SEQ ID NO: 2286910 - DNA, 25 bp, Homo sapien
ggtatgcgcacatcaggccaaggtg

SEQ ID NO: 2286911 - DNA, 25 bp, Homo sapien
ggccaaggtggtatcttgatttgca

SEQ ID NO: 2286912 - DNA, 25 bp, Homo sapien
tgatgactgtagactctagtctccc

SEQ ID NO: 2286913 - DNA, 25 bp, Homo sapien
tgaagtgaaggctgtcaggatactg

SEQ ID NO: 2286914 - DNA, 25 bp, Homo sapien
gatatgatcattatccacttggagc

SEQ ID NO: 2286915 - DNA, 25 bp, Homo sapien
cccaaggctggtcaatgctgttttc

SEQ ID NO: 2286916 - DNA, 25 bp, Homo sapien
aatttctagcccattagaagaacac

SEQ ID NO: 2286917 - DNA, 25 bp, Homo sapien
gtgcagtgcaatcctacggagaatt

SEQ ID NO: 2286918 - DNA, 25 bp, Homo sapien
tatgcaactgattgccagattttgc

SEQ ID NO: 2286919 - DNA, 25 bp, Homo sapien
acctgccatatgcaactgattgcca

SEQ ID NO: 2286920 - DNA, 25 bp, Homo sapien
tgagcattgtagaatacaggataac

SEQ ID NO: 2286921 - DNA, 25 bp, Homo sapien
cctattgagcattgtagaatacagg

SEQ ID NO: 2286922 - DNA, 25 bp, Homo sapien
tgtagaatacaggataacagggagg

SEQ ID NO: 2286923 - DNA, 25 bp, Homo sapien
tacaggataacagggaggaagaagt

SEQ ID NO: 2286924 - DNA, 25 bp, Homo sapien
catctatatctgttatctctagcta

SEQ ID NO: 2286925 - DNA, 25 bp, Homo sapien
cctccatctatatctgttatctcta

SEQ ID NO: 2286926 - DNA, 25 bp, Homo sapien
tgtccttcctccatctatatctgtt

SEQ ID NO: 2286927 - DNA, 25 bp, Homo sapien
tatctgttatctctagctattttca

SEQ ID NO: 2286928 - DNA, 25 bp, Homo sapien
taagaattgcataaatcttctcttc

SEQ ID NO: 2286929 - DNA, 25 bp, Homo sapien
catggccttctaaatgtagctcttt

SEQ ID NO: 2286930 - DNA, 25 bp, Homo sapien
tgtttaagaattgcataaatcttct

SEQ ID NO: 2286931 - DNA, 25 bp, Homo sapien
ctcttctagtcacatggccttctaa

SEQ ID NO: 2286932 - DNA, 25 bp, Homo sapien
agatgtagcccctcgaccatggact

SEQ ID NO: 2286933 - DNA, 25 bp, Homo sapien
taagaagtgattgatccattcatga

SEQ ID NO: 2286934 - DNA, 25 bp, Homo sapien
caaggaggctcttagcagatgtagc

SEQ ID NO: 2286935 - DNA, 25 bp, Homo sapien
ggaagagagacttgagtgagcacat

SEQ ID NO: 2286936 - DNA, 25 bp, Homo sapien
gaaatctgagacttaactatgtggt

SEQ ID NO: 2286937 - DNA, 25 bp, Homo sapien
ttagactcactgacccctgcacagt

SEQ ID NO: 2286938 - DNA, 25 bp, Homo sapien
cagttgatgtatgcaccagctagaa

SEQ ID NO: 2286939 - DNA, 25 bp, Homo sapien
cccttcaatagtgcagcggttagac

SEQ ID NO: 2286940 - DNA, 25 bp, Homo sapien
ggttaggatttgaaatccgcagaca

SEQ ID NO: 2286941 - DNA, 25 bp, Homo sapien
aatctttgcaccgaccgttctccgg

SEQ ID NO: 2286942 - DNA, 25 bp, Homo sapien
catagggcccgtagtactgttggaa

SEQ ID NO: 2286943 - DNA, 25 bp, Homo sapien
caggacgccgtggttaggatttgaa

SEQ ID NO: 2286944 - DNA, 25 bp, Homo sapien
tccctgccctctccgatgttctcac

SEQ ID NO: 2286945 - DNA, 25 bp, Homo sapien
cctgccctctccgatgttctcactc

SEQ ID NO: 2286946 - DNA, 25 bp, Homo sapien
gccctctccgatgttctcactctta

SEQ ID NO: 2286947 - DNA, 25 bp, Homo sapien
tgccctctccgatgttctcactctt

SEQ ID NO: 2286948 - DNA, 25 bp, Homo sapien
ctgtggggcccgtgcagacccgcgc

SEQ ID NO: 2286949 - DNA, 25 bp, Homo sapien
caggtgcggtagggcgctgcggccg

SEQ ID NO: 2286950 - DNA, 25 bp, Homo sapien
gccaggtgcggtagggcgctgcggc

SEQ ID NO: 2286951 - DNA, 25 bp, Homo sapien
agccaggtgcggtagggcgctgcgg

SEQ ID NO: 2286952 - DNA, 25 bp, Homo sapien
ccaggtgcggtagggcgctgcggcc

SEQ ID NO: 2286953 - DNA, 25 bp, Homo sapien
gaatcggagcggtgccaggagccgc

SEQ ID NO: 2286954 - DNA, 25 bp, Homo sapien
ctggaatcggagcggtgccaggagc

SEQ ID NO: 2286955 - DNA, 25 bp, Homo sapien
atcggagcggtgccaggagccgcgt

SEQ ID NO: 2286956 - DNA, 25 bp, Homo sapien
ggaatcggagcggtgccaggagccg

SEQ ID NO: 2286957 - DNA, 25 bp, Homo sapien
ggtccggcggctttgactttctcga

SEQ ID NO: 2286958 - DNA, 25 bp, Homo sapien
agccgtggccccgagggcggatccg

SEQ ID NO: 2286959 - DNA, 25 bp, Homo sapien
gcggatccgaggtaagagccccttg

SEQ ID NO: 2286960 - DNA, 25 bp, Homo sapien
gtaagagccccttggcgaaaggcgc

SEQ ID NO: 2286961 - DNA, 25 bp, Homo sapien
tcggctgccggcaagacccggatag

SEQ ID NO: 2286962 - DNA, 25 bp, Homo sapien
gcctcaagcgctggagtcgaccaga

SEQ ID NO: 2286963 - DNA, 25 bp, Homo sapien
gaccagaactctgcggctcggctgc

SEQ ID NO: 2286964 - DNA, 25 bp, Homo sapien
cccggatagcggatttcgctcctgg

SEQ ID NO: 2286965 - DNA, 25 bp, Homo sapien
tccgactttgatcgcggccttgata

SEQ ID NO: 2286966 - DNA, 25 bp, Homo sapien
ggcgaagctctccacacgctctttg

SEQ ID NO: 2286967 - DNA, 25 bp, Homo sapien
aacctgctgtcgactcgctgccttg

SEQ ID NO: 2286968 - DNA, 25 bp, Homo sapien
gccttgataacttggcgcagcgccc

SEQ ID NO: 2286969 - DNA, 25 bp, Homo sapien
tgggcaccaccagtttaccgcatgg

SEQ ID NO: 2286970 - DNA, 25 bp, Homo sapien
gatgcgtcttgtttgccgccaaagg

SEQ ID NO: 2286971 - DNA, 25 bp, Homo sapien
taccgcatgggttggagagacaaaa

SEQ ID NO: 2286972 - DNA, 25 bp, Homo sapien
agttgggagactctcagggacccga

SEQ ID NO: 2286973 - DNA, 25 bp, Homo sapien
taaggtacgagaggcacaaagtgaa

SEQ ID NO: 2286974 - DNA, 25 bp, Homo sapien
catcagggcttttggcaagagctac

SEQ ID NO: 2286975 - DNA, 25 bp, Homo sapien
gacttcgaagttaggacagcatggg

SEQ ID NO: 2286976 - DNA, 25 bp, Homo sapien
tataggctttcgtggacttctggaa

SEQ ID NO: 2286977 - DNA, 25 bp, Homo sapien
tggagatctattttggcagtgggct

SEQ ID NO: 2286978 - DNA, 25 bp, Homo sapien
ttggagatctattttggcagtgggc

SEQ ID NO: 2286979 - DNA, 25 bp, Homo sapien
gagatctattttggcagtgggctgt

SEQ ID NO: 2286980 - DNA, 25 bp, Homo sapien
cttggagatctattttggcagtggg

SEQ ID NO: 2286981 - DNA, 25 bp, Homo sapien
tatctctcttgggaacttgtgggcc

SEQ ID NO: 2286982 - DNA, 25 bp, Homo sapien
gattagcttcttcaccttgtagccg

SEQ ID NO: 2286983 - DNA, 25 bp, Homo sapien
tattttatgcgggatccaggtgatg

SEQ ID NO: 2286984 - DNA, 25 bp, Homo sapien
ccaaggacctgaaaccgtactgact

SEQ ID NO: 2286985 - DNA, 25 bp, Homo sapien
ggtgaatttactgattgtggggtct

SEQ ID NO: 2286986 - DNA, 25 bp, Homo sapien
cttcaaacacagagctcgttgtcat

SEQ ID NO: 2286987 - DNA, 25 bp, Homo sapien
gagtcatgaaggatctggctagtac

SEQ ID NO: 2286988 - DNA, 25 bp, Homo sapien
gtcatgaaggatctggctagtactt

SEQ ID NO: 2286989 - DNA, 25 bp, Homo sapien
tgagtcatgaaggatctggctagta

SEQ ID NO: 2286990 - DNA, 25 bp, Homo sapien
ctgagtcatgaaggatctggctagt

SEQ ID NO: 2286991 - DNA, 25 bp, Homo sapien
ctggttgcaaaaagcctccagcagc

SEQ ID NO: 2286992 - DNA, 25 bp, Homo sapien
tggttgcaaaaagcctccagcagcc

SEQ ID NO: 2286993 - DNA, 25 bp, Homo sapien
ggttgcaaaaagcctccagcagccc

SEQ ID NO: 2286994 - DNA, 25 bp, Homo sapien
ccagggcatggttggccttgaccat

SEQ ID NO: 2286995 - DNA, 25 bp, Homo sapien
ggccttgaccatcttgtgcatgtca

SEQ ID NO: 2286996 - DNA, 25 bp, Homo sapien
ctaccgccagcagtagtgggccagg

SEQ ID NO: 2286997 - DNA, 25 bp, Homo sapien
tgtcatgcttcctcttgatcacggg

SEQ ID NO: 2286998 - DNA, 25 bp, Homo sapien
ccagtttacccagtatgtcatagtc

SEQ ID NO: 2286999 - DNA, 25 bp, Homo sapien
atagccagtttacccagtatgtcat

SEQ ID NO: 2287000 - DNA, 25 bp, Homo sapien
agccagtttacccagtatgtcatag

SEQ ID NO: 2287001 - DNA, 25 bp, Homo sapien
gccagtttacccagtatgtcatagt

SEQ ID NO: 2287002 - DNA, 25 bp, Homo sapien
tctggattccagctgtgttcattct

SEQ ID NO: 2287003 - DNA, 25 bp, Homo sapien
cgttctctggattccagctgtgttc

SEQ ID NO: 2287004 - DNA, 25 bp, Homo sapien
agcagtgtgtctaaatgtttttcca

SEQ ID NO: 2287005 - DNA, 25 bp, Homo sapien
gcagtgtgtctaaatgtttttccag

SEQ ID NO: 2287006 - DNA, 25 bp, Homo sapien
aacatggggagttcctaaatccctg

SEQ ID NO: 2287007 - DNA, 25 bp, Homo sapien
gggagttcctaaatccctgtgatat

SEQ ID NO: 2287008 - DNA, 25 bp, Homo sapien
gagttcctaaatccctgtgatatgc

SEQ ID NO: 2287009 - DNA, 25 bp, Homo sapien
catggggagttcctaaatccctgtg

SEQ ID NO: 2287010 - DNA, 25 bp, Homo sapien
gatgaggcatttgtcgtaaggaaca

SEQ ID NO: 2287011 - DNA, 25 bp, Homo sapien
gcattgcttcagtccataggctcgc

SEQ ID NO: 2287012 - DNA, 25 bp, Homo sapien
catacatcacacgtctcagagcaca

SEQ ID NO: 2287013 - DNA, 25 bp, Homo sapien
cagagcacaacatcgtgtatgtagc

SEQ ID NO: 2287014 - DNA, 25 bp, Homo sapien
accttgcgaccagtgctcgaattat

SEQ ID NO: 2287015 - DNA, 25 bp, Homo sapien
tgaaatgtatcccaaaaccttgcga

SEQ ID NO: 2287016 - DNA, 25 bp, Homo sapien
tttcagacagcacacgcttacattg

SEQ ID NO: 2287017 - DNA, 25 bp, Homo sapien
cagcacacgcttacattgaaatgta

SEQ ID NO: 2287018 - DNA, 25 bp, Homo sapien
tgatttgggtttaagttggcaggcc

SEQ ID NO: 2287019 - DNA, 25 bp, Homo sapien
aattgatttgggtttaagttggcag

SEQ ID NO: 2287020 - DNA, 25 bp, Homo sapien
gtttaagttggcaggccatgctctc

SEQ ID NO: 2287021 - DNA, 25 bp, Homo sapien
ttgggtttaagttggcaggccatgc

SEQ ID NO: 2287022 - DNA, 25 bp, Homo sapien
ctagatggtggaggattgcataggg

SEQ ID NO: 2287023 - DNA, 25 bp, Homo sapien
agaacccacagtattcccttgccaa

SEQ ID NO: 2287024 - DNA, 25 bp, Homo sapien
tggcaatatgcagaccaaggaaaac

SEQ ID NO: 2287025 - DNA, 25 bp, Homo sapien
ttgccaaactcctgtgtttctctgg

SEQ ID NO: 2287026 - DNA, 25 bp, Homo sapien
tttatttgagaaaggtacggttgca

SEQ ID NO: 2287027 - DNA, 25 bp, Homo sapien
aggtacggttgcaggagaaggctct

SEQ ID NO: 2287028 - DNA, 25 bp, Homo sapien
actgaaagggagcagttatctgaac

SEQ ID NO: 2287029 - DNA, 25 bp, Homo sapien
tgaaagggagcagttatctgaacct

SEQ ID NO: 2287030 - DNA, 25 bp, Homo sapien
tcagtgctcgtgaggtaactggcgc

SEQ ID NO: 2287031 - DNA, 25 bp, Homo sapien
tgaatatctagacggacacgagcca

SEQ ID NO: 2287032 - DNA, 25 bp, Homo sapien
gactaagggagacgctctaggcacc

SEQ ID NO: 2287033 - DNA, 25 bp, Homo sapien
cagcgtcagctgtgtacctgccgag

SEQ ID NO: 2287034 - DNA, 25 bp, Homo sapien
agtgacgacgtaaatgacgcagagc

SEQ ID NO: 2287035 - DNA, 25 bp, Homo sapien
cggaaatgacgattggcgggagggc

SEQ ID NO: 2287036 - DNA, 25 bp, Homo sapien
gagcacccgccggaaatgacgattg

SEQ ID NO: 2287037 - DNA, 25 bp, Homo sapien
gcaggaagtgacgacgtaaatgacg

SEQ ID NO: 2287038 - DNA, 25 bp, Homo sapien
gccagccacgattcacagcgtccac

SEQ ID NO: 2287039 - DNA, 25 bp, Homo sapien
gggccagccacgattcacagcgtcc

SEQ ID NO: 2287040 - DNA, 25 bp, Homo sapien
cagccacgattcacagcgtccacac

SEQ ID NO: 2287041 - DNA, 25 bp, Homo sapien
cgggccagccacgattcacagcgtc

SEQ ID NO: 2287042 - DNA, 25 bp, Homo sapien
cagcaagcaacagtcgacgagggag

SEQ ID NO: 2287043 - DNA, 25 bp, Homo sapien
gaaaagaagggcaatccggtggcac

SEQ ID NO: 2287044 - DNA, 25 bp, Homo sapien
tgcgaccagcaagcaacagtcgacg

SEQ ID NO: 2287045 - DNA, 25 bp, Homo sapien
caatccggtggcaccgaggttaggg

SEQ ID NO: 2287046 - DNA, 25 bp, Homo sapien
gctgagggtcgtcgttgtcttttct

SEQ ID NO: 2287047 - DNA, 25 bp, Homo sapien
ccggactggcgagctgagggtcgtc

SEQ ID NO: 2287048 - DNA, 25 bp, Homo sapien
cgaagccagcgaccggactggcgag

SEQ ID NO: 2287049 - DNA, 25 bp, Homo sapien
ggcggcggcgaagccagcgaccgga

SEQ ID NO: 2287050 - DNA, 25 bp, Homo sapien
aaatcaaccacgggtcgcgtgtggc

SEQ ID NO: 2287051 - DNA, 25 bp, Homo sapien
ggccaaatcaaccacgggtcgcgtg

SEQ ID NO: 2287052 - DNA, 25 bp, Homo sapien
aatcaaccacgggtcgcgtgtggcc

SEQ ID NO: 2287053 - DNA, 25 bp, Homo sapien
ccaaatcaaccacgggtcgcgtgtg

SEQ ID NO: 2287054 - DNA, 25 bp, Homo sapien
tatacaatgatgttcaatgacaaag

SEQ ID NO: 2287055 - DNA, 25 bp, Homo sapien
cagattacttaaagtctaagattca

SEQ ID NO: 2287056 - DNA, 25 bp, Homo sapien
atatacaatgatgttcaatgacaaa

SEQ ID NO: 2287057 - DNA, 25 bp, Homo sapien
gtaatttataagttcagattactta

SEQ ID NO: 2287058 - DNA, 25 bp, Homo sapien
gctttggtggcatccttattcagtg

SEQ ID NO: 2287059 - DNA, 25 bp, Homo sapien
ctttggtggcatccttattcagtgt

SEQ ID NO: 2287060 - DNA, 25 bp, Homo sapien
gattatttcaggacacaagctacag

SEQ ID NO: 2287061 - DNA, 25 bp, Homo sapien
gagcagcattcgtaaaggagatcaa

SEQ ID NO: 2287062 - DNA, 25 bp, Homo sapien
taaggagtacacacagagcagcatt

SEQ ID NO: 2287063 - DNA, 25 bp, Homo sapien
caaacatgcgttctgtatggcagcc

SEQ ID NO: 2287064 - DNA, 25 bp, Homo sapien
attcatctcctgagacagcatccca

SEQ ID NO: 2287065 - DNA, 25 bp, Homo sapien
tgagccagggtcatcaattcatctc

SEQ ID NO: 2287066 - DNA, 25 bp, Homo sapien
cgtgaaatccacagtcttgacaatg

SEQ ID NO: 2287067 - DNA, 25 bp, Homo sapien
ttgacaatgtgtttatgagccaggg

SEQ ID NO: 2287068 - DNA, 25 bp, Homo sapien
accagcaacttaactcgctaaaata

SEQ ID NO: 2287069 - DNA, 25 bp, Homo sapien
ccagcaacttaactcgctaaaataa

SEQ ID NO: 2287070 - DNA, 25 bp, Homo sapien
agcaacttaactcgctaaaataaat

SEQ ID NO: 2287071 - DNA, 25 bp, Homo sapien
cttaactcgctaaaataaattccat

SEQ ID NO: 2287072 - DNA, 25 bp, Homo sapien
gtcatatatgcgtaacagtttatcc

SEQ ID NO: 2287073 - DNA, 25 bp, Homo sapien
ggtttgttcaagtcatatatgcgta

SEQ ID NO: 2287074 - DNA, 25 bp, Homo sapien
tgcttcaggtttgttcaagtcatat

SEQ ID NO: 2287075 - DNA, 25 bp, Homo sapien
atgcgtaacagtttatcctgtcccc

SEQ ID NO: 2287076 - DNA, 25 bp, Homo sapien
tccactcctctttgtcccaccaatt

SEQ ID NO: 2287077 - DNA, 25 bp, Homo sapien
gcccggccaccttccaacaattcca

SEQ ID NO: 2287078 - DNA, 25 bp, Homo sapien
ctgcgcccggccaccttccaacaat

SEQ ID NO: 2287079 - DNA, 25 bp, Homo sapien
cactcctctttgtcccaccaattct

SEQ ID NO: 2287080 - DNA, 25 bp, Homo sapien
cactgcaccacagagctttttttat

SEQ ID NO: 2287081 - DNA, 25 bp, Homo sapien
cctcactgcaccacagagctttttt

SEQ ID NO: 2287082 - DNA, 25 bp, Homo sapien
ctgcaccacagagctttttttatac

SEQ ID NO: 2287083 - DNA, 25 bp, Homo sapien
caccacagagctttttttataccag

SEQ ID NO: 2287084 - DNA, 25 bp, Homo sapien
tttcacttctgtcatagtagcatga

SEQ ID NO: 2287085 - DNA, 25 bp, Homo sapien
tctgtcatagtagcatgatcccaaa

SEQ ID NO: 2287086 - DNA, 25 bp, Homo sapien
cacttctgtcatagtagcatgatcc

SEQ ID NO: 2287087 - DNA, 25 bp, Homo sapien
tgtcatagtagcatgatcccaaagt

SEQ ID NO: 2287088 - DNA, 25 bp, Homo sapien
ctccagcaatagaatactcacctca

SEQ ID NO: 2287089 - DNA, 25 bp, Homo sapien
tccagcaatagaatactcacctcag

SEQ ID NO: 2287090 - DNA, 25 bp, Homo sapien
cagcaatagaatactcacctcagcc

SEQ ID NO: 2287091 - DNA, 25 bp, Homo sapien
agcaatagaatactcacctcagcct

SEQ ID NO: 2287092 - DNA, 25 bp, Homo sapien
agagatgcagaattgatggttgcag

SEQ ID NO: 2287093 - DNA, 25 bp, Homo sapien
tgaagagatgcagaattgatggttg

SEQ ID NO: 2287094 - DNA, 25 bp, Homo sapien
aagagatgcagaattgatggttgca

SEQ ID NO: 2287095 - DNA, 25 bp, Homo sapien
agatgcagaattgatggttgcagga

SEQ ID NO: 2287096 - DNA, 25 bp, Homo sapien
taaagtcttaccagttcaacctcca

SEQ ID NO: 2287097 - DNA, 25 bp, Homo sapien
tattatgactatagagagccaccag

SEQ ID NO: 2287098 - DNA, 25 bp, Homo sapien
gcttcatgtctcattaaggatggag

SEQ ID NO: 2287099 - DNA, 25 bp, Homo sapien
tatcattgaccctttctctgtaaga

SEQ ID NO: 2287100 - DNA, 25 bp, Homo sapien
cacagtgaataggaccaaagtgtcc

SEQ ID NO: 2287101 - DNA, 25 bp, Homo sapien
catagtctcaatgttccatcttctg

SEQ ID NO: 2287102 - DNA, 25 bp, Homo sapien
tcttctgaaccactggcatagagtt

SEQ ID NO: 2287103 - DNA, 25 bp, Homo sapien
tcaggactaaatctcacacagtgaa

SEQ ID NO: 2287104 - DNA, 25 bp, Homo sapien
tctcagctcaatgcatggctcctgg

SEQ ID NO: 2287105 - DNA, 25 bp, Homo sapien
tgtaaaaagaaaagcaatgacgatt

SEQ ID NO: 2287106 - DNA, 25 bp, Homo sapien
ctgtaaaaagaaaagcaatgacgat

SEQ ID NO: 2287107 - DNA, 25 bp, Homo sapien
gtaaaaagaaaagcaatgacgatta

SEQ ID NO: 2287108 - DNA, 25 bp, Homo sapien
taaaaagaaaagcaatgacgattat

SEQ ID NO: 2287109 - DNA, 25 bp, Homo sapien
tctctggaaaaccaatctttggctt

SEQ ID NO: 2287110 - DNA, 25 bp, Homo sapien
cctcttctgttgtctctggaaaacc

SEQ ID NO: 2287111 - DNA, 25 bp, Homo sapien
tttgccagctcaccactatcttctt

SEQ ID NO: 2287112 - DNA, 25 bp, Homo sapien
tttggctttgccagctcaccactat

SEQ ID NO: 2287113 - DNA, 25 bp, Homo sapien
aaagagtaaccacatcggttgtgtc

SEQ ID NO: 2287114 - DNA, 25 bp, Homo sapien
gttgtgtccatactacatctctgtg

SEQ ID NO: 2287115 - DNA, 25 bp, Homo sapien
taatacagcaaatgaggccctcaga

SEQ ID NO: 2287116 - DNA, 25 bp, Homo sapien
gctcatccttagttcccagtttaaa

SEQ ID NO: 2287117 - DNA, 25 bp, Homo sapien
caggccttaacatcaggagctgaag

SEQ ID NO: 2287118 - DNA, 25 bp, Homo sapien
ggaaagatgcaatctgaattctctg

SEQ ID NO: 2287119 - DNA, 25 bp, Homo sapien
ggagctgaaggaaagatgcaatctg

SEQ ID NO: 2287120 - DNA, 25 bp, Homo sapien
tcaggccttaacatcaggagctgaa

SEQ ID NO: 2287121 - DNA, 25 bp, Homo sapien
cagcactggagctaattcattttcc

SEQ ID NO: 2287122 - DNA, 25 bp, Homo sapien
tccagcactggagctaattcatttt

SEQ ID NO: 2287123 - DNA, 25 bp, Homo sapien
ctctggaaggctgatgcttttctct

SEQ ID NO: 2287124 - DNA, 25 bp, Homo sapien
actctggaaggctgatgcttttctc

SEQ ID NO: 2287125 - DNA, 25 bp, Homo sapien
taagaggataactccacctcccttc

SEQ ID NO: 2287126 - DNA, 25 bp, Homo sapien
actataagaggataactccacctcc

SEQ ID NO: 2287127 - DNA, 25 bp, Homo sapien
atcagaaaaaatcagccaatatagt

SEQ ID NO: 2287128 - DNA, 25 bp, Homo sapien
tcagaaaaaatcagccaatatagtt

SEQ ID NO: 2287129 - DNA, 25 bp, Homo sapien
ttactttatcatgtattccctcttc

SEQ ID NO: 2287130 - DNA, 25 bp, Homo sapien
ttcagaggcagtgtacaatgaacga

SEQ ID NO: 2287131 - DNA, 25 bp, Homo sapien
ggcagtgtacaatgaacgagaaatc

SEQ ID NO: 2287132 - DNA, 25 bp, Homo sapien
tacaatgaacgagaaatcaaaccag

SEQ ID NO: 2287133 - DNA, 25 bp, Homo sapien
agaggcattttatttagacaactaa

SEQ ID NO: 2287134 - DNA, 25 bp, Homo sapien
ttagacaactaaaaacaattagatg

SEQ ID NO: 2287135 - DNA, 25 bp, Homo sapien
gaggcattttatttagacaactaaa

SEQ ID NO: 2287136 - DNA, 25 bp, Homo sapien
tcaaaaattcaggacaagtaactga

SEQ ID NO: 2287137 - DNA, 25 bp, Homo sapien
gctatggttatgatacagaaaaacc

SEQ ID NO: 2287138 - DNA, 25 bp, Homo sapien
gaaacactagtaaaggacataagaa

SEQ ID NO: 2287139 - DNA, 25 bp, Homo sapien
ttaattggcttaccttttgctatgg

SEQ ID NO: 2287140 - DNA, 25 bp, Homo sapien
tgagcaactgctggtacaatgacaa

SEQ ID NO: 2287141 - DNA, 25 bp, Homo sapien
tatggatcaccagttggctcccctg

SEQ ID NO: 2287142 - DNA, 25 bp, Homo sapien
aaaagttatcaagggtcactcacag

SEQ ID NO: 2287143 - DNA, 25 bp, Homo sapien
tccagaggttcaggcatgtaacaag

SEQ ID NO: 2287144 - DNA, 25 bp, Homo sapien
gaattggatgagaaggcaagtgaaa

SEQ ID NO: 2287145 - DNA, 25 bp, Homo sapien
tcctgggtaacttcagtctcacacc

SEQ ID NO: 2287146 - DNA, 25 bp, Homo sapien
agctgtacacgggttcactggagag

SEQ ID NO: 2287147 - DNA, 25 bp, Homo sapien
tcacaccggctgaagctgtacacgg

SEQ ID NO: 2287148 - DNA, 25 bp, Homo sapien
aatattgctccgcaaggaaatctcg

SEQ ID NO: 2287149 - DNA, 25 bp, Homo sapien
ctaggaatattgctccgcaaggaaa

SEQ ID NO: 2287150 - DNA, 25 bp, Homo sapien
tgctccgcaaggaaatctcgctgct

SEQ ID NO: 2287151 - DNA, 25 bp, Homo sapien
gtaccctaggaatattgctccgcaa

SEQ ID NO: 2287152 - DNA, 25 bp, Homo sapien
cccgccagctggagcgctcgccccg

SEQ ID NO: 2287153 - DNA, 25 bp, Homo sapien
ggagctgccggctggtaggcgcccg

SEQ ID NO: 2287154 - DNA, 25 bp, Homo sapien
tgccggctggtaggcgcccgcctct

SEQ ID NO: 2287155 - DNA, 25 bp, Homo sapien
agctccggagctgccggctggtagg

SEQ ID NO: 2287156 - DNA, 25 bp, Homo sapien
cgagctcggtgccccgattgtgcgc

SEQ ID NO: 2287157 - DNA, 25 bp, Homo sapien
cggtgccccgattgtgcgcggacat

SEQ ID NO: 2287158 - DNA, 25 bp, Homo sapien
ctcggtgccccgattgtgcgcggac

SEQ ID NO: 2287159 - DNA, 25 bp, Homo sapien
agctcggtgccccgattgtgcgcgg

SEQ ID NO: 2287160 - DNA, 25 bp, Homo sapien
cgcgagggagaggggatggggagcc

SEQ ID NO: 2287161 - DNA, 25 bp, Homo sapien
acgcgagggagaggggatggggagc

SEQ ID NO: 2287162 - DNA, 25 bp, Homo sapien
aacgcgagggagaggggatggggag

SEQ ID NO: 2287163 - DNA, 25 bp, Homo sapien
cactgcttcccgccccagcgaaaac

SEQ ID NO: 2287164 - DNA, 25 bp, Homo sapien
agggctgaccagacgccactgcttc

SEQ ID NO: 2287165 - DNA, 25 bp, Homo sapien
gggtgagggctgaccagacgccact

SEQ ID NO: 2287166 - DNA, 25 bp, Homo sapien
gtgagggctgaccagacgccactgc

SEQ ID NO: 2287167 - DNA, 25 bp, Homo sapien
aggtgcaaagacaagcggcgcgaac

SEQ ID NO: 2287168 - DNA, 25 bp, Homo sapien
gtgcaaagacaagcggcgcgaacgt

SEQ ID NO: 2287169 - DNA, 25 bp, Homo sapien
gcaaagacaagcggcgcgaacgtgc

SEQ ID NO: 2287170 - DNA, 25 bp, Homo sapien
ttaggtgcaaagacaagcggcgcga

SEQ ID NO: 2287171 - DNA, 25 bp, Homo sapien
tttcctactccttccgcatacaaga

SEQ ID NO: 2287172 - DNA, 25 bp, Homo sapien
ctccttccgcatacaagagtaaaag

SEQ ID NO: 2287173 - DNA, 25 bp, Homo sapien
aggcaggaagataataatctaaccc

SEQ ID NO: 2287174 - DNA, 25 bp, Homo sapien
ggcaggaagataataatctaaccct

SEQ ID NO: 2287175 - DNA, 25 bp, Homo sapien
catcgaaccctactctcataatcta

SEQ ID NO: 2287176 - DNA, 25 bp, Homo sapien
tggttttgacatgccatccttgaaa

SEQ ID NO: 2287177 - DNA, 25 bp, Homo sapien
tgaaaacttcactaacatcgaaccc

SEQ ID NO: 2287178 - DNA, 25 bp, Homo sapien
tgaggctcatcagtatatccacatg

SEQ ID NO: 2287179 - DNA, 25 bp, Homo sapien
gagtggaagcgcaagcagggtaagg

SEQ ID NO: 2287180 - DNA, 25 bp, Homo sapien
gggtagcccagagtccaatcagaac

SEQ ID NO: 2287181 - DNA, 25 bp, Homo sapien
cacaaagcgggagcaagacataggg

SEQ ID NO: 2287182 - DNA, 25 bp, Homo sapien
cccagagtgggccaaacagaatggg

SEQ ID NO: 2287183 - DNA, 25 bp, Homo sapien
taaaagggccagagctctccactta

SEQ ID NO: 2287184 - DNA, 25 bp, Homo sapien
ttaaatcgcatcctcaagggctctg

SEQ ID NO: 2287185 - DNA, 25 bp, Homo sapien
tcctggcagaagcatcccattttaa

SEQ ID NO: 2287186 - DNA, 25 bp, Homo sapien
aaggtgacccaatcctcaagtgaca

SEQ ID NO: 2287187 - DNA, 25 bp, Homo sapien
gaaaatgtaaactgatcactggaat

SEQ ID NO: 2287188 - DNA, 25 bp, Homo sapien
gatagaatgagccaagcctagggaa

SEQ ID NO: 2287189 - DNA, 25 bp, Homo sapien
gagaccttgacttaagatctagaga

SEQ ID NO: 2287190 - DNA, 25 bp, Homo sapien
gaagccaccattgtgattcagatgt

SEQ ID NO: 2287191 - DNA, 25 bp, Homo sapien
gagagtgaaaagtcaaagattcaga

SEQ ID NO: 2287192 - DNA, 25 bp, Homo sapien
tgaaaagtcaaagattcagaagcat

SEQ ID NO: 2287193 - DNA, 25 bp, Homo sapien
ctggagagtgaaaagtcaaagattc

SEQ ID NO: 2287194 - DNA, 25 bp, Homo sapien
gagtgaaaagtcaaagattcagaag

SEQ ID NO: 2287195 - DNA, 25 bp, Homo sapien
ttcgtgatcaatctttggccactga

SEQ ID NO: 2287196 - DNA, 25 bp, Homo sapien
taaacccttcgtgatcaatctttgg

SEQ ID NO: 2287197 - DNA, 25 bp, Homo sapien
tctttggccactgagctattccaga

SEQ ID NO: 2287198 - DNA, 25 bp, Homo sapien
tttcacagctctaaacccttcgtga

SEQ ID NO: 2287199 - DNA, 25 bp, Homo sapien
cgcacgggtggcatacgataaataa

SEQ ID NO: 2287200 - DNA, 25 bp, Homo sapien
aaaactccaagcgaaggacctgacg

SEQ ID NO: 2287201 - DNA, 25 bp, Homo sapien
gataaataagtcgagtggttcccaa

SEQ ID NO: 2287202 - DNA, 25 bp, Homo sapien
aaaggttagaactcacaaggtctgc

SEQ ID NO: 2287203 - DNA, 25 bp, Homo sapien
tttatcggtcacaggacacccctga

SEQ ID NO: 2287204 - DNA, 25 bp, Homo sapien
caaaaagaggtaggcctattactca

SEQ ID NO: 2287205 - DNA, 25 bp, Homo sapien
taccactactgtcgccactggaaac

SEQ ID NO: 2287206 - DNA, 25 bp, Homo sapien
gtctctggatctgtgcatgctgcaa

SEQ ID NO: 2287207 - DNA, 25 bp, Homo sapien
cacttctatatctctccagcaattc

SEQ ID NO: 2287208 - DNA, 25 bp, Homo sapien
ctcacttctatatctctccagcaat

SEQ ID NO: 2287209 - DNA, 25 bp, Homo sapien
cttctatatctctccagcaattcca

SEQ ID NO: 2287210 - DNA, 25 bp, Homo sapien
ttctatatctctccagcaattccat

SEQ ID NO: 2287211 - DNA, 25 bp, Homo sapien
ttgtattttggagatccagctaagg

SEQ ID NO: 2287212 - DNA, 25 bp, Homo sapien
ggatttgttccgcacgcctcagaac

SEQ ID NO: 2287213 - DNA, 25 bp, Homo sapien
cagaactgccgggtgattcacttgt

SEQ ID NO: 2287214 - DNA, 25 bp, Homo sapien
tttttcacggttctgcgagcctgga

SEQ ID NO: 2287215 - DNA, 25 bp, Homo sapien
acagtattctgtctcacttgtgaaa

SEQ ID NO: 2287216 - DNA, 25 bp, Homo sapien
tctttggttgggatacactgaagaa

SEQ ID NO: 2287217 - DNA, 25 bp, Homo sapien
attccctttaatcctacacagcacg

SEQ ID NO: 2287218 - DNA, 25 bp, Homo sapien
taaggatgagcaaaacgtgaactat

SEQ ID NO: 2287219 - DNA, 25 bp, Homo sapien
tctataaaggtaacagctttcagga

SEQ ID NO: 2287220 - DNA, 25 bp, Homo sapien
tgaatgttggaagatgtatcatcac

SEQ ID NO: 2287221 - DNA, 25 bp, Homo sapien
gatcttcccggattgggtatttggc

SEQ ID NO: 2287222 - DNA, 25 bp, Homo sapien
tatcatcacctgaaagtgtagtaag

SEQ ID NO: 2287223 - DNA, 25 bp, Homo sapien
tgcttttacagcatcacacacccgg

SEQ ID NO: 2287224 - DNA, 25 bp, Homo sapien
acagggatattacagcctgcagcct

SEQ ID NO: 2287225 - DNA, 25 bp, Homo sapien
cacacacccgggcgggataaacaca

SEQ ID NO: 2287226 - DNA, 25 bp, Homo sapien
gataaacacaaacggcggctgtagt

SEQ ID NO: 2287227 - DNA, 25 bp, Homo sapien
tcttccacagccaatctgatctctt

SEQ ID NO: 2287228 - DNA, 25 bp, Homo sapien
aagcttctgttaattaccacgtcga

SEQ ID NO: 2287229 - DNA, 25 bp, Homo sapien
ttctaatcgtgtcttcaaatgagtc

SEQ ID NO: 2287230 - DNA, 25 bp, Homo sapien
ttaccacgtcgatttctgtagctcc

SEQ ID NO: 2287231 - DNA, 25 bp, Homo sapien
gaatggtgaaactctcttaggtaaa

SEQ ID NO: 2287232 - DNA, 25 bp, Homo sapien
agaatggtgaaactctcttaggtaa

SEQ ID NO: 2287233 - DNA, 25 bp, Homo sapien
tggtgaaactctcttaggtaaaagc

SEQ ID NO: 2287234 - DNA, 25 bp, Homo sapien
atggtgaaactctcttaggtaaaag

SEQ ID NO: 2287235 - DNA, 25 bp, Homo sapien
gctgacgtgatagtgaatcattaat

SEQ ID NO: 2287236 - DNA, 25 bp, Homo sapien
ttagtgtatgctgacgtgatagtga

SEQ ID NO: 2287237 - DNA, 25 bp, Homo sapien
tcattaatttcatgatagtcatcag

SEQ ID NO: 2287238 - DNA, 25 bp, Homo sapien
ttcatgatagtcatcagagctgtgt

SEQ ID NO: 2287239 - DNA, 25 bp, Homo sapien
tccaggagcacattaaacagctgca

SEQ ID NO: 2287240 - DNA, 25 bp, Homo sapien
aggtggtggacaactgcatccagga

SEQ ID NO: 2287241 - DNA, 25 bp, Homo sapien
aagtcagcttctgctacccgcaaaa

SEQ ID NO: 2287242 - DNA, 25 bp, Homo sapien
tagagtacatcatgcgctgtctgcg

SEQ ID NO: 2287243 - DNA, 25 bp, Homo sapien
tcagatccacctttgataataagca

SEQ ID NO: 2287244 - DNA, 25 bp, Homo sapien
gattctgaactctatctttgggagc

SEQ ID NO: 2287245 - DNA, 25 bp, Homo sapien
cacagacaagggagagcagggattt

SEQ ID NO: 2287246 - DNA, 25 bp, Homo sapien
taataagcacacgtaaaatgatggt

SEQ ID NO: 2287247 - DNA, 25 bp, Homo sapien
tcatgtcttcatacgtggaataaaa

SEQ ID NO: 2287248 - DNA, 25 bp, Homo sapien
ttgctccaaatcttactgtgggtca

SEQ ID NO: 2287249 - DNA, 25 bp, Homo sapien
gtcagttatagaacagagaggagga

SEQ ID NO: 2287250 - DNA, 25 bp, Homo sapien
aggagtcatgtcttcatacgtggaa

SEQ ID NO: 2287251 - DNA, 25 bp, Homo sapien
aaagcaggctttagagtaggacaaa

SEQ ID NO: 2287252 - DNA, 25 bp, Homo sapien
aaaaatccaagaacgctaatccaag

SEQ ID NO: 2287253 - DNA, 25 bp, Homo sapien
tactgcctgacatgttataagcact

SEQ ID NO: 2287254 - DNA, 25 bp, Homo sapien
tcagctccatccttaaagtgtcaat

SEQ ID NO: 2287255 - DNA, 25 bp, Homo sapien
acggtgcccggcccataggaagtag

SEQ ID NO: 2287256 - DNA, 25 bp, Homo sapien
caggagggaaacattcataataagg

SEQ ID NO: 2287257 - DNA, 25 bp, Homo sapien
cataataagggttggggtaagcatt

SEQ ID NO: 2287258 - DNA, 25 bp, Homo sapien
cggtgcccggcccataggaagtagt

SEQ ID NO: 2287259 - DNA, 25 bp, Homo sapien
tgagtatctttcataggaagtaggt

SEQ ID NO: 2287260 - DNA, 25 bp, Homo sapien
caggctactgccatggtaacaagac

SEQ ID NO: 2287261 - DNA, 25 bp, Homo sapien
ccatggtaacaagaccaaggctttt

SEQ ID NO: 2287262 - DNA, 25 bp, Homo sapien
ttgaactcaggctactgccatggta

SEQ ID NO: 2287263 - DNA, 25 bp, Homo sapien
ttagtaagagttccaagttctcctg

SEQ ID NO: 2287264 - DNA, 25 bp, Homo sapien
tttaagatgagcctccccacaggcc

SEQ ID NO: 2287265 - DNA, 25 bp, Homo sapien
catcattgctatcatactggcttta

SEQ ID NO: 2287266 - DNA, 25 bp, Homo sapien
cacaggccttgcgaaactgacgaat

SEQ ID NO: 2287267 - DNA, 25 bp, Homo sapien
tccatgtgcacaaccaacagcgtgg

SEQ ID NO: 2287268 - DNA, 25 bp, Homo sapien
ttacctgggctaacaatcacttgtg

SEQ ID NO: 2287269 - DNA, 25 bp, Homo sapien
caaagtatgtcctataagtggctgc

SEQ ID NO: 2287270 - DNA, 25 bp, Homo sapien
taacaggtatcacaagattggctcc

SEQ ID NO: 2287271 - DNA, 25 bp, Homo sapien
cacactatgtgattagataatgttc

SEQ ID NO: 2287272 - DNA, 25 bp, Homo sapien
acaaagcacccaagagttcacacta

SEQ ID NO: 2287273 - DNA, 25 bp, Homo sapien
taatactggcaaagctaagcatggt

SEQ ID NO: 2287274 - DNA, 25 bp, Homo sapien
tcttatttttagtgagggcaaaaca

SEQ ID NO: 2287275 - DNA, 25 bp, Homo sapien
tagatttcccctatccacaaaacca

SEQ ID NO: 2287276 - DNA, 25 bp, Homo sapien
cctggcttgtgctatatgtcactcc

SEQ ID NO: 2287277 - DNA, 25 bp, Homo sapien
tactgttagtatctgtctcttgctc

SEQ ID NO: 2287278 - DNA, 25 bp, Homo sapien
taggtcccaaaactgattcctggct

SEQ ID NO: 2287279 - DNA, 25 bp, Homo sapien
agcacaatcaaatttgccccccgat

SEQ ID NO: 2287280 - DNA, 25 bp, Homo sapien
atttgccccccgatatgtcccacag

SEQ ID NO: 2287281 - DNA, 25 bp, Homo sapien
ttgccccccgatatgtcccacaggc

SEQ ID NO: 2287282 - DNA, 25 bp, Homo sapien
acaatcaaatttgccccccgatatg

SEQ ID NO: 2287283 - DNA, 25 bp, Homo sapien
tcatgggagcctgaatggttttttt

SEQ ID NO: 2287284 - DNA, 25 bp, Homo sapien
catgggagcctgaatggtttttttt

SEQ ID NO: 2287285 - DNA, 25 bp, Homo sapien
ctcatgggagcctgaatggtttttt

SEQ ID NO: 2287286 - DNA, 25 bp, Homo sapien
aattgtctcgaataaaacactgaac

SEQ ID NO: 2287287 - DNA, 25 bp, Homo sapien
cttttctctgagtcaattgtctcga

SEQ ID NO: 2287288 - DNA, 25 bp, Homo sapien
ctaagaccatgactccacaagtctg

SEQ ID NO: 2287289 - DNA, 25 bp, Homo sapien
tctttgttactgagcacgaatctct

SEQ ID NO: 2287290 - DNA, 25 bp, Homo sapien
caccttgcagagcatcaaacacgtc

SEQ ID NO: 2287291 - DNA, 25 bp, Homo sapien
agagcatcaaacacgtcacacagac

SEQ ID NO: 2287292 - DNA, 25 bp, Homo sapien
ccttgcagagcatcaaacacgtcac

SEQ ID NO: 2287293 - DNA, 25 bp, Homo sapien
gcagagcatcaaacacgtcacacag

SEQ ID NO: 2287294 - DNA, 25 bp, Homo sapien
agcagcagaactcggaaaacctcat

SEQ ID NO: 2287295 - DNA, 25 bp, Homo sapien
tcacttggcgaccaccggagacctt

SEQ ID NO: 2287296 - DNA, 25 bp, Homo sapien
ccttgattcctcaacaaaagcagta

SEQ ID NO: 2287297 - DNA, 25 bp, Homo sapien
ggcgaccaccggagaccttgattcc

SEQ ID NO: 2287298 - DNA, 25 bp, Homo sapien
gcaactcattactaaatagaacaag

SEQ ID NO: 2287299 - DNA, 25 bp, Homo sapien
tattcagcaactcattactaaatag

SEQ ID NO: 2287300 - DNA, 25 bp, Homo sapien
cattactaaatagaacaagatgaac

SEQ ID NO: 2287301 - DNA, 25 bp, Homo sapien
gaaatgtactatgtatttttgcatt

SEQ ID NO: 2287302 - DNA, 25 bp, Homo sapien
gaattctagcttagtaccattgtgg

SEQ ID NO: 2287303 - DNA, 25 bp, Homo sapien
tagcttagtaccattgtggtctgag

SEQ ID NO: 2287304 - DNA, 25 bp, Homo sapien
ttctagcttagtaccattgtggtct

SEQ ID NO: 2287305 - DNA, 25 bp, Homo sapien
gctattgaattctagcttagtacca

SEQ ID NO: 2287306 - DNA, 25 bp, Homo sapien
taagacagaagaccaaggctactgg

SEQ ID NO: 2287307 - DNA, 25 bp, Homo sapien
taaaggccttgagctaggcatatac

SEQ ID NO: 2287308 - DNA, 25 bp, Homo sapien
tttgattcactagaaggcttttggg

SEQ ID NO: 2287309 - DNA, 25 bp, Homo sapien
tgaacagactatagaacaggtgcct

SEQ ID NO: 2287310 - DNA, 25 bp, Homo sapien
cagtatacagttgtgacagctcaag

SEQ ID NO: 2287311 - DNA, 25 bp, Homo sapien
tttactacaaaacaggagtgcctac

SEQ ID NO: 2287312 - DNA, 25 bp, Homo sapien
catttccatgaaagagaccacgcta

SEQ ID NO: 2287313 - DNA, 25 bp, Homo sapien
gttaagattcattgagtgccatgca

SEQ ID NO: 2287314 - DNA, 25 bp, Homo sapien
aatggcccgcagcattactatagct

SEQ ID NO: 2287315 - DNA, 25 bp, Homo sapien
cgggaaggtggcatttactgtttct

SEQ ID NO: 2287316 - DNA, 25 bp, Homo sapien
tgtttcttttccagtagaggtctta

SEQ ID NO: 2287317 - DNA, 25 bp, Homo sapien
tccagaagaaatctctaatggcccg

SEQ ID NO: 2287318 - DNA, 25 bp, Homo sapien
ttctgttcatcacaatttttctcca

SEQ ID NO: 2287319 - DNA, 25 bp, Homo sapien
tctgttcatcacaatttttctccat

SEQ ID NO: 2287320 - DNA, 25 bp, Homo sapien
tttctgttcatcacaatttttctcc

SEQ ID NO: 2287321 - DNA, 25 bp, Homo sapien
tggccaacaccttgtgagaaagcct

SEQ ID NO: 2287322 - DNA, 25 bp, Homo sapien
catttaggaatctcttgtcagtgac

SEQ ID NO: 2287323 - DNA, 25 bp, Homo sapien
tgcattaacctgttttcactggcca

SEQ ID NO: 2287324 - DNA, 25 bp, Homo sapien
taacgtctagctaccttttccctgc

SEQ ID NO: 2287325 - DNA, 25 bp, Homo sapien
tagaggttattcgagttgggtcagc

SEQ ID NO: 2287326 - DNA, 25 bp, Homo sapien
tccaatggacaaaggattaaaggtc

SEQ ID NO: 2287327 - DNA, 25 bp, Homo sapien
tggcacaaatcaagagactggattt

SEQ ID NO: 2287328 - DNA, 25 bp, Homo sapien
tttggattgttgcagaaaggatacc

SEQ ID NO: 2287329 - DNA, 25 bp, Homo sapien
aactttatagtctaagggctgccca

SEQ ID NO: 2287330 - DNA, 25 bp, Homo sapien
cactcagggctatgactggttgcac

SEQ ID NO: 2287331 - DNA, 25 bp, Homo sapien
tcatggtctggaagctagcctatcg

SEQ ID NO: 2287332 - DNA, 25 bp, Homo sapien
cagtagcagtgcacggattccaacc

SEQ ID NO: 2287333 - DNA, 25 bp, Homo sapien
ttttctaagttgcaggcacacacag

SEQ ID NO: 2287334 - DNA, 25 bp, Homo sapien
cagttctaaaaagctggcagaccag

SEQ ID NO: 2287335 - DNA, 25 bp, Homo sapien
catttccacaagtaagcctgtagag

SEQ ID NO: 2287336 - DNA, 25 bp, Homo sapien
ggttaccctaaccaaactggcagca

SEQ ID NO: 2287337 - DNA, 25 bp, Homo sapien
gctcattcacactacaaaacaactt

SEQ ID NO: 2287338 - DNA, 25 bp, Homo sapien
tagatcagtgactcatgctcattca

SEQ ID NO: 2287339 - DNA, 25 bp, Homo sapien
ttttggaagaatgtcactacttcca

SEQ ID NO: 2287340 - DNA, 25 bp, Homo sapien
gggaaggcagagaatagaacaatct

SEQ ID NO: 2287341 - DNA, 25 bp, Homo sapien
caagggaatcctttgcactgcggat

SEQ ID NO: 2287342 - DNA, 25 bp, Homo sapien
cagagtactggcacctattcgaaag

SEQ ID NO: 2287343 - DNA, 25 bp, Homo sapien
ctcaatgtccgagagcagagtactg

SEQ ID NO: 2287344 - DNA, 25 bp, Homo sapien
tattcgaaagagttctggcttcagc

SEQ ID NO: 2287345 - DNA, 25 bp, Homo sapien
caccctactcacttctgatggcggt

SEQ ID NO: 2287346 - DNA, 25 bp, Homo sapien
tatacacatcagttaataattatac

SEQ ID NO: 2287347 - DNA, 25 bp, Homo sapien
cattagaaagcctcactagtatgtg

SEQ ID NO: 2287348 - DNA, 25 bp, Homo sapien
cttctgatggcggtttgcttggaag

SEQ ID NO: 2287349 - DNA, 25 bp, Homo sapien
tggaagatcatgataagctgcatat

SEQ ID NO: 2287350 - DNA, 25 bp, Homo sapien
ttggaagatcatgataagctgcata

SEQ ID NO: 2287351 - DNA, 25 bp, Homo sapien
attggaagatcatgataagctgcat

SEQ ID NO: 2287352 - DNA, 25 bp, Homo sapien
ggaagatcatgataagctgcatatc

SEQ ID NO: 2287353 - DNA, 25 bp, Homo sapien
cattgtcgtaaagaacttttctgga

SEQ ID NO: 2287354 - DNA, 25 bp, Homo sapien
aacattgtcgtaaagaacttttctg

SEQ ID NO: 2287355 - DNA, 25 bp, Homo sapien
acattgtcgtaaagaacttttctgg

SEQ ID NO: 2287356 - DNA, 25 bp, Homo sapien
ggcacactgcttgggcggtttaata

SEQ ID NO: 2287357 - DNA, 25 bp, Homo sapien
taataaaagcgcctatccacggcaa

SEQ ID NO: 2287358 - DNA, 25 bp, Homo sapien
tacagcagcgcttgcgagatgttgc

SEQ ID NO: 2287359 - DNA, 25 bp, Homo sapien
gactcctgaagtcgttacagcagcg

SEQ ID NO: 2287360 - DNA, 25 bp, Homo sapien
tgatcaaacctctttttatgtttaa

SEQ ID NO: 2287361 - DNA, 25 bp, Homo sapien
tattttttcattatgtattgtaaca

SEQ ID NO: 2287362 - DNA, 25 bp, Homo sapien
cattatgtattgtaacaatttttaa

SEQ ID NO: 2287363 - DNA, 25 bp, Homo sapien
tggattattttttcattatgtattg

SEQ ID NO: 2287364 - DNA, 25 bp, Homo sapien
aagacagcatatcaaaacaggtggc

SEQ ID NO: 2287365 - DNA, 25 bp, Homo sapien
gcatatcaaaacaggtggcatcctc

SEQ ID NO: 2287366 - DNA, 25 bp, Homo sapien
aatcaatggagataggtgcatgggc

SEQ ID NO: 2287367 - DNA, 25 bp, Homo sapien
ggaaaacaagtgtagaacttctatg

SEQ ID NO: 2287368 - DNA, 25 bp, Homo sapien
tcttgagttaaatttgcatatatgg

SEQ ID NO: 2287369 - DNA, 25 bp, Homo sapien
tctagtaagtgtggccaaactaccc

SEQ ID NO: 2287370 - DNA, 25 bp, Homo sapien
cacagttgctaagtattccaggagc

SEQ ID NO: 2287371 - DNA, 25 bp, Homo sapien
caatgaaatctctgaatcggcaccg

SEQ ID NO: 2287372 - DNA, 25 bp, Homo sapien
taaatgcctctctggttagcaagga

SEQ ID NO: 2287373 - DNA, 25 bp, Homo sapien
tctctgcttcagaaagcttgcctct

SEQ ID NO: 2287374 - DNA, 25 bp, Homo sapien
tctgcttcagaaagcttgcctctct

SEQ ID NO: 2287375 - DNA, 25 bp, Homo sapien
gctctctgcttcagaaagcttgcct

SEQ ID NO: 2287376 - DNA, 25 bp, Homo sapien
tgctctctgcttcagaaagcttgcc

SEQ ID NO: 2287377 - DNA, 25 bp, Homo sapien
tgaggacagctaaaaagacagcatc

SEQ ID NO: 2287378 - DNA, 25 bp, Homo sapien
cccagatgatctgccatgctgacac

SEQ ID NO: 2287379 - DNA, 25 bp, Homo sapien
ccagatgatctgccatgctgacaca

SEQ ID NO: 2287380 - DNA, 25 bp, Homo sapien
ggacagctaaaaagacagcatcccc

SEQ ID NO: 2287381 - DNA, 25 bp, Homo sapien
tgctgctgccttgtgaactccattg

SEQ ID NO: 2287382 - DNA, 25 bp, Homo sapien
agcagcaaagcactaggaaaactta

SEQ ID NO: 2287383 - DNA, 25 bp, Homo sapien
caagaagtgtctttggaacagtgga

SEQ ID NO: 2287384 - DNA, 25 bp, Homo sapien
gcagtcatgagtcgcgcaagtcagc

SEQ ID NO: 2287385 - DNA, 25 bp, Homo sapien
tcttggttgccagctcagtgacatg

SEQ ID NO: 2287386 - DNA, 25 bp, Homo sapien
cctcttggttgccagctcagtgaca

SEQ ID NO: 2287387 - DNA, 25 bp, Homo sapien
ttgccagctcagtgacatgggccat

SEQ ID NO: 2287388 - DNA, 25 bp, Homo sapien
tggttgccagctcagtgacatgggc

SEQ ID NO: 2287389 - DNA, 25 bp, Homo sapien
ttccgtaaggaagggcactatagct

SEQ ID NO: 2287390 - DNA, 25 bp, Homo sapien
gaagggcactatagctcatcattgg

SEQ ID NO: 2287391 - DNA, 25 bp, Homo sapien
cccaaccagatgtaagttccgtaag

SEQ ID NO: 2287392 - DNA, 25 bp, Homo sapien
tcattggtgtaatttcctcggtgcc

SEQ ID NO: 2287393 - DNA, 25 bp, Homo sapien
tccaggccccatagctaatgatttc

SEQ ID NO: 2287394 - DNA, 25 bp, Homo sapien
ccaggccccatagctaatgatttct

SEQ ID NO: 2287395 - DNA, 25 bp, Homo sapien
ttccaggccccatagctaatgattt

SEQ ID NO: 2287396 - DNA, 25 bp, Homo sapien
ggctgtctaaacttcagtacatcat

SEQ ID NO: 2287397 - DNA, 25 bp, Homo sapien
taatgcaggctgtctaaacttcagt

SEQ ID NO: 2287398 - DNA, 25 bp, Homo sapien
gtttggtgatctccataatgcaggc

SEQ ID NO: 2287399 - DNA, 25 bp, Homo sapien
gatctccataatgcaggctgtctaa

SEQ ID NO: 2287400 - DNA, 25 bp, Homo sapien
ttcatgcaggaaagcggagtagttg

SEQ ID NO: 2287401 - DNA, 25 bp, Homo sapien
tgccttagccaactgtcgctggtaa

SEQ ID NO: 2287402 - DNA, 25 bp, Homo sapien
cgtctaaggcagagttgctggaaaa

SEQ ID NO: 2287403 - DNA, 25 bp, Homo sapien
tgactgacacatttcatcaaagcct

SEQ ID NO: 2287404 - DNA, 25 bp, Homo sapien
cagcaggtactccacttgaaatcaa

SEQ ID NO: 2287405 - DNA, 25 bp, Homo sapien
agcaggtactccacttgaaatcaaa

SEQ ID NO: 2287406 - DNA, 25 bp, Homo sapien
tatttccaaagcaggcctcttccag

SEQ ID NO: 2287407 - DNA, 25 bp, Homo sapien
tattccctaggtctgtacgacaaag

SEQ ID NO: 2287408 - DNA, 25 bp, Homo sapien
ggattatggaaaattcacccctgtg

SEQ ID NO: 2287409 - DNA, 25 bp, Homo sapien
caaagctaaggtctaaacagtgtac

SEQ ID NO: 2287410 - DNA, 25 bp, Homo sapien
catcgacagtgagtgctagaaactt

SEQ ID NO: 2287411 - DNA, 25 bp, Homo sapien
taataacacttcaacaacagtctgc

SEQ ID NO: 2287412 - DNA, 25 bp, Homo sapien
aacagtctgcttcccacatcgacag

SEQ ID NO: 2287413 - DNA, 25 bp, Homo sapien
tcttgaagcaggagtcacatcccag

SEQ ID NO: 2287414 - DNA, 25 bp, Homo sapien
tatataaaatttagcccagcgtggt

SEQ ID NO: 2287415 - DNA, 25 bp, Homo sapien
gaggcaccgtaggtcacagttaata

SEQ ID NO: 2287416 - DNA, 25 bp, Homo sapien
taagggaaagcggaatctgtcctct

SEQ ID NO: 2287417 - DNA, 25 bp, Homo sapien
tgtcctctgcctctcagtacagtgc

SEQ ID NO: 2287418 - DNA, 25 bp, Homo sapien
gagagtagaagatcacagaccatgt

SEQ ID NO: 2287419 - DNA, 25 bp, Homo sapien
acaggatatttagccgaattagccc

SEQ ID NO: 2287420 - DNA, 25 bp, Homo sapien
tggctctacaagcaacacagctgtg

SEQ ID NO: 2287421 - DNA, 25 bp, Homo sapien
gaattagccctgtaccaggatgatg

SEQ ID NO: 2287422 - DNA, 25 bp, Homo sapien
gactccacccagttgtcctagaaaa

SEQ ID NO: 2287423 - DNA, 25 bp, Homo sapien
gagcaatgcagtttacatcaccatg

SEQ ID NO: 2287424 - DNA, 25 bp, Homo sapien
aagagtcacacggtgttccctgaga

SEQ ID NO: 2287425 - DNA, 25 bp, Homo sapien
aaaggacaacctgtggcttagccta

SEQ ID NO: 2287426 - DNA, 25 bp, Homo sapien
tctgtcacttaggagttttatggtc

SEQ ID NO: 2287427 - DNA, 25 bp, Homo sapien
atggacagagactccactgggcaac

SEQ ID NO: 2287428 - DNA, 25 bp, Homo sapien
tcctgtacacagtgcgggggctggt

SEQ ID NO: 2287429 - DNA, 25 bp, Homo sapien
taggagttttatggtctttggcaag

SEQ ID NO: 2287430 - DNA, 25 bp, Homo sapien
gtttatagcaatgaatgctgattcc

SEQ ID NO: 2287431 - DNA, 25 bp, Homo sapien
tactgcagtttatagcaatgaatgc

SEQ ID NO: 2287432 - DNA, 25 bp, Homo sapien
ttatagcaatgaatgctgattccat

SEQ ID NO: 2287433 - DNA, 25 bp, Homo sapien
gcagtttatagcaatgaatgctgat

SEQ ID NO: 2287434 - DNA, 25 bp, Homo sapien
tagaagggactctttacttccttgc

SEQ ID NO: 2287435 - DNA, 25 bp, Homo sapien
agaagggactctttacttccttgca

SEQ ID NO: 2287436 - DNA, 25 bp, Homo sapien
gaagggactctttacttccttgcag

SEQ ID NO: 2287437 - DNA, 25 bp, Homo sapien
gtccactgggtgcttttggccttca

SEQ ID NO: 2287438 - DNA, 25 bp, Homo sapien
ttggccttcaggagtatggatcaca

SEQ ID NO: 2287439 - DNA, 25 bp, Homo sapien
gttttatgtagcactgctgaccatt

SEQ ID NO: 2287440 - DNA, 25 bp, Homo sapien
ccttggcattggaggcgtaagagcc

SEQ ID NO: 2287441 - DNA, 25 bp, Homo sapien
ttgtggcaaagaaggctccatccag

SEQ ID NO: 2287442 - DNA, 25 bp, Homo sapien
gtccccagctttctcaactctgttt

SEQ ID NO: 2287443 - DNA, 25 bp, Homo sapien
cagctttctcaactctgtttgtggc

SEQ ID NO: 2287444 - DNA, 25 bp, Homo sapien
tgtttgtggcaaagaaggctccatc

SEQ ID NO: 2287445 - DNA, 25 bp, Homo sapien
acatcataaagaatatctgccaaca

SEQ ID NO: 2287446 - DNA, 25 bp, Homo sapien
cattagtgaaaacgacatcataaag

SEQ ID NO: 2287447 - DNA, 25 bp, Homo sapien
catcataaagaatatctgccaacaa

SEQ ID NO: 2287448 - DNA, 25 bp, Homo sapien
tagtgaaaacgacatcataaagaat

SEQ ID NO: 2287449 - DNA, 25 bp, Homo sapien
ggattatatctataaggcagcaaaa

SEQ ID NO: 2287450 - DNA, 25 bp, Homo sapien
agtcagaacagcgttcaaatttagg

SEQ ID NO: 2287451 - DNA, 25 bp, Homo sapien
gaggtatgagtcagaacagcgttca

SEQ ID NO: 2287452 - DNA, 25 bp, Homo sapien
cagcgttcaaatttaggctcttcta

SEQ ID NO: 2287453 - DNA, 25 bp, Homo sapien
taatctctagctaggcagccatatg

SEQ ID NO: 2287454 - DNA, 25 bp, Homo sapien
tagtcaaatgatcgtaagcagctgc

SEQ ID NO: 2287455 - DNA, 25 bp, Homo sapien
cagggtacagtctgtgccttcagga

SEQ ID NO: 2287456 - DNA, 25 bp, Homo sapien
tatgaaatgagacctttggcccaag

SEQ ID NO: 2287457 - DNA, 25 bp, Homo sapien
ccccataatccagcaatcaaaaggt

SEQ ID NO: 2287458 - DNA, 25 bp, Homo sapien
caatcaaaaggttgattcctggcac

SEQ ID NO: 2287459 - DNA, 25 bp, Homo sapien
tgattcctggcacggttctctggcc

SEQ ID NO: 2287460 - DNA, 25 bp, Homo sapien
tggcacggttctctggccagtgttg

SEQ ID NO: 2287461 - DNA, 25 bp, Homo sapien
ctgacttccaagttttccaggcttt

SEQ ID NO: 2287462 - DNA, 25 bp, Homo sapien
tgacttccaagttttccaggctttc

SEQ ID NO: 2287463 - DNA, 25 bp, Homo sapien
tgggatgaagaaacgttccccatta

SEQ ID NO: 2287464 - DNA, 25 bp, Homo sapien
tttggagtttactgataatgggatg

SEQ ID NO: 2287465 - DNA, 25 bp, Homo sapien
agaaacgttccccattactccacat

SEQ ID NO: 2287466 - DNA, 25 bp, Homo sapien
tttactgataatgggatgaagaaac

SEQ ID NO: 2287467 - DNA, 25 bp, Homo sapien
ccaatactagtgttggtcccagaat

SEQ ID NO: 2287468 - DNA, 25 bp, Homo sapien
tgccacctttggaccaatactagtg

SEQ ID NO: 2287469 - DNA, 25 bp, Homo sapien
taaaacagattttaacggctgcaga

SEQ ID NO: 2287470 - DNA, 25 bp, Homo sapien
caacaaattcaagcgtcacagtagg

SEQ ID NO: 2287471 - DNA, 25 bp, Homo sapien
tctattttcaagctacaggcatgag

SEQ ID NO: 2287472 - DNA, 25 bp, Homo sapien
gacagtcctggaaacgaaagcctgt

SEQ ID NO: 2287473 - DNA, 25 bp, Homo sapien
taaggtctggtacaccattgtcaga

SEQ ID NO: 2287474 - DNA, 25 bp, Homo sapien
tgtcagacaggcactttacagtacc

SEQ ID NO: 2287475 - DNA, 25 bp, Homo sapien
ataccagacaatttgctttgtcacg

SEQ ID NO: 2287476 - DNA, 25 bp, Homo sapien
taccagacaatttgctttgtcacga

SEQ ID NO: 2287477 - DNA, 25 bp, Homo sapien
ccaaattcatgataccagacaattt

SEQ ID NO: 2287478 - DNA, 25 bp, Homo sapien
aagcagcaagcctgtcccgccgccg

SEQ ID NO: 2287479 - DNA, 25 bp, Homo sapien
gaagcagcaagcctgtcccgccgcc

SEQ ID NO: 2287480 - DNA, 25 bp, Homo sapien
gggtcgcgcgcaatgcagggactgt

SEQ ID NO: 2287481 - DNA, 25 bp, Homo sapien
gccgccgggtcgcgcgcaatgcagg

SEQ ID NO: 2287482 - DNA, 25 bp, Homo sapien
ccaagcacttccagctggcagagac

SEQ ID NO: 2287483 - DNA, 25 bp, Homo sapien
gtttagctgctaagtggagccaagc

SEQ ID NO: 2287484 - DNA, 25 bp, Homo sapien
caaaagcgatcgattgaaaagctaa

SEQ ID NO: 2287485 - DNA, 25 bp, Homo sapien
gggacagaaatacaattccctttca

SEQ ID NO: 2287486 - DNA, 25 bp, Homo sapien
ctttaaggattgctcactggaggcc

SEQ ID NO: 2287487 - DNA, 25 bp, Homo sapien
tatgcccatgaaacctgagacatcg

SEQ ID NO: 2287488 - DNA, 25 bp, Homo sapien
tatacagcaatgcttgcgggcaccc

SEQ ID NO: 2287489 - DNA, 25 bp, Homo sapien
tataaacgtggagctcagactgcca

SEQ ID NO: 2287490 - DNA, 25 bp, Homo sapien
aactgtaggctttaggacttgaatt

SEQ ID NO: 2287491 - DNA, 25 bp, Homo sapien
actgtaggctttaggacttgaattc

SEQ ID NO: 2287492 - DNA, 25 bp, Homo sapien
gccagacgcagtggcgtgtgcctgc

SEQ ID NO: 2287493 - DNA, 25 bp, Homo sapien
aatcccagctactcgtgagactgag

SEQ ID NO: 2287494 - DNA, 25 bp, Homo sapien
tagccagacgcagtggcgtgtgcct

SEQ ID NO: 2287495 - DNA, 25 bp, Homo sapien
aaattagccagacgcagtggcgtgt

SEQ ID NO: 2287496 - DNA, 25 bp, Homo sapien
caatctatagaatgcagttgcagta

SEQ ID NO: 2287497 - DNA, 25 bp, Homo sapien
tcttgtcaatctatagaatgcagtt

SEQ ID NO: 2287498 - DNA, 25 bp, Homo sapien
ctttcttgtcaatctatagaatgca

SEQ ID NO: 2287499 - DNA, 25 bp, Homo sapien
aattgttgcataggatgcaaaagcc

SEQ ID NO: 2287500 - DNA, 25 bp, Homo sapien
gatggcatacttcacttacagcata

SEQ ID NO: 2287501 - DNA, 25 bp, Homo sapien
cagaatatctcatctgcttagcaga

SEQ ID NO: 2287502 - DNA, 25 bp, Homo sapien
aacagtgtgctattgggctttacca

SEQ ID NO: 2287503 - DNA, 25 bp, Homo sapien
gaaagcaactgttccataaatacat

SEQ ID NO: 2287504 - DNA, 25 bp, Homo sapien
tagggagtacccatatctacaaatt

SEQ ID NO: 2287505 - DNA, 25 bp, Homo sapien
ttttgcatggtagtgggccacatgc

SEQ ID NO: 2287506 - DNA, 25 bp, Homo sapien
aaaaattttgcatggtagtgggcca

SEQ ID NO: 2287507 - DNA, 25 bp, Homo sapien
aaacttatttcaaatactggccagg

SEQ ID NO: 2287508 - DNA, 25 bp, Homo sapien
tcctttgccaaatgctacacagtct

SEQ ID NO: 2287509 - DNA, 25 bp, Homo sapien
ctacacagtcttctggattggcaaa

SEQ ID NO: 2287510 - DNA, 25 bp, Homo sapien
catctgttcgaagatacttcttggc

SEQ ID NO: 2287511 - DNA, 25 bp, Homo sapien
tgcgtacacgttctactctgtcatc

SEQ ID NO: 2287512 - DNA, 25 bp, Homo sapien
actccttgaccaaaattgtttcata

SEQ ID NO: 2287513 - DNA, 25 bp, Homo sapien
ttcactgaactccttgaccaaaatt

SEQ ID NO: 2287514 - DNA, 25 bp, Homo sapien
cataaagtaagtaatttcaagagac

SEQ ID NO: 2287515 - DNA, 25 bp, Homo sapien
aagtaagtaatttcaagagacactg

SEQ ID NO: 2287516 - DNA, 25 bp, Homo sapien
cagtatgcggaaaagccagtgtctc

SEQ ID NO: 2287517 - DNA, 25 bp, Homo sapien
agatgctggaaacgctctctctgaa

SEQ ID NO: 2287518 - DNA, 25 bp, Homo sapien
gagacgctcttctctcagtatgcgg

SEQ ID NO: 2287519 - DNA, 25 bp, Homo sapien
catttgcaacctgactagcggatca

SEQ ID NO: 2287520 - DNA, 25 bp, Homo sapien
gcacacggtaaagcatacttttcac

SEQ ID NO: 2287521 - DNA, 25 bp, Homo sapien
gttcaaatatgctaatcgtaacagc

SEQ ID NO: 2287522 - DNA, 25 bp, Homo sapien
cattctggctctgccgttcaaatat

SEQ ID NO: 2287523 - DNA, 25 bp, Homo sapien
cacaattgttgcacacggtaaagca

SEQ ID NO: 2287524 - DNA, 25 bp, Homo sapien
agtgctttctaaccatcactggttt

SEQ ID NO: 2287525 - DNA, 25 bp, Homo sapien
tgaatgcttcctagacaagctaaga

SEQ ID NO: 2287526 - DNA, 25 bp, Homo sapien
aagtcacatatcttggtatttcaac

SEQ ID NO: 2287527 - DNA, 25 bp, Homo sapien
gacaagctaagatggtattaaataa

SEQ ID NO: 2287528 - DNA, 25 bp, Homo sapien
gcaagtgtcacttagactccatgga

SEQ ID NO: 2287529 - DNA, 25 bp, Homo sapien
gaatgactccctgtatttcaccagc

SEQ ID NO: 2287530 - DNA, 25 bp, Homo sapien
gggccacgagggacatcatccagtt

SEQ ID NO: 2287531 - DNA, 25 bp, Homo sapien
tcatgacagagtccccagcaagtgt

SEQ ID NO: 2287532 - DNA, 25 bp, Homo sapien
ggctaagaccgaatacaaaacacat

SEQ ID NO: 2287533 - DNA, 25 bp, Homo sapien
ccaaaccgtggcatcttgggtttct

SEQ ID NO: 2287534 - DNA, 25 bp, Homo sapien
tctctggctaagaccgaatacaaaa

SEQ ID NO: 2287535 - DNA, 25 bp, Homo sapien
gttttgctccaaaccgtggcatctt

SEQ ID NO: 2287536 - DNA, 25 bp, Homo sapien
aatgattattgacagaatccttgcc

SEQ ID NO: 2287537 - DNA, 25 bp, Homo sapien
cccaaaccactaggttgccaataat

SEQ ID NO: 2287538 - DNA, 25 bp, Homo sapien
cagaaggcattttgtagttcctaga

SEQ ID NO: 2287539 - DNA, 25 bp, Homo sapien
ctaaatctgagcactaatggatcct

SEQ ID NO: 2287540 - DNA, 25 bp, Homo sapien
aatatgcaatggtgtggtagatccg

SEQ ID NO: 2287541 - DNA, 25 bp, Homo sapien
tgtaagccatggaaagagtaactcc

SEQ ID NO: 2287542 - DNA, 25 bp, Homo sapien
cgacaaatagtctgaagtgcaggat

SEQ ID NO: 2287543 - DNA, 25 bp, Homo sapien
ggtagatccgtgctccgacaaatag

SEQ ID NO: 2287544 - DNA, 25 bp, Homo sapien
ttacaggtacaatttacttttcagc

SEQ ID NO: 2287545 - DNA, 25 bp, Homo sapien
tacaggtacaatttacttttcagca

SEQ ID NO: 2287546 - DNA, 25 bp, Homo sapien
caggtacaatttacttttcagcaac

SEQ ID NO: 2287547 - DNA, 25 bp, Homo sapien
acaggtacaatttacttttcagcaa

SEQ ID NO: 2287548 - DNA, 25 bp, Homo sapien
ctggatgctgagttgtatgattttc

SEQ ID NO: 2287549 - DNA, 25 bp, Homo sapien
aagtgaggtgttgtgtgaatgttac

SEQ ID NO: 2287550 - DNA, 25 bp, Homo sapien
ttggcaatgctaatattcaaaatgg

SEQ ID NO: 2287551 - DNA, 25 bp, Homo sapien
gaaatataggtttctcatacgtgca

SEQ ID NO: 2287552 - DNA, 25 bp, Homo sapien
acatgtaggttcttctgaatctgcc

SEQ ID NO: 2287553 - DNA, 25 bp, Homo sapien
gacagttacaagtctgtttccatgc

SEQ ID NO: 2287554 - DNA, 25 bp, Homo sapien
tctgggatttggacgaccaggccat

SEQ ID NO: 2287555 - DNA, 25 bp, Homo sapien
gcctttctgggcctaagatctcctg

SEQ ID NO: 2287556 - DNA, 25 bp, Homo sapien
tgacttagggcctgcgcttgctgac

SEQ ID NO: 2287557 - DNA, 25 bp, Homo sapien
tagggcctgcgcttgctgactgagg

SEQ ID NO: 2287558 - DNA, 25 bp, Homo sapien
gaggctcacaggtcctatagctcat

SEQ ID NO: 2287559 - DNA, 25 bp, Homo sapien
gctcacaggtcctatagctcatcca

SEQ ID NO: 2287560 - DNA, 25 bp, Homo sapien
tcctgtcttgctcctatgctgtgat

SEQ ID NO: 2287561 - DNA, 25 bp, Homo sapien
tatgctgtgatagcacagtcaggct

SEQ ID NO: 2287562 - DNA, 25 bp, Homo sapien
tgtgatagcacagtcaggctaacct

SEQ ID NO: 2287563 - DNA, 25 bp, Homo sapien
ttgctcctatgctgtgatagcacag

SEQ ID NO: 2287564 - DNA, 25 bp, Homo sapien
gagcataagtaggtgacttgcctgg

SEQ ID NO: 2287565 - DNA, 25 bp, Homo sapien
gagaaagagtagaccaacacctgcc

SEQ ID NO: 2287566 - DNA, 25 bp, Homo sapien
aaatagaatttttagagtcacagaa

SEQ ID NO: 2287567 - DNA, 25 bp, Homo sapien
tcatttcattttggtgacatcacat

SEQ ID NO: 2287568 - DNA, 25 bp, Homo sapien
gttaacagccgtggataatctttgc

SEQ ID NO: 2287569 - DNA, 25 bp, Homo sapien
tctctacctggaagcttttgcggaa

SEQ ID NO: 2287570 - DNA, 25 bp, Homo sapien
tattgggtacttcccgcagtaatag

SEQ ID NO: 2287571 - DNA, 25 bp, Homo sapien
catacgttgcaactgaatgctgaca

SEQ ID NO: 2287572 - DNA, 25 bp, Homo sapien
tgggcttaaaacaaggcacaccagg

SEQ ID NO: 2287573 - DNA, 25 bp, Homo sapien
tttccaatgggcttaaaacaaggca

SEQ ID NO: 2287574 - DNA, 25 bp, Homo sapien
catataaaaccttcctctgtggagt

SEQ ID NO: 2287575 - DNA, 25 bp, Homo sapien
aaagtattagctcagagagaagcca

SEQ ID NO: 2287576 - DNA, 25 bp, Homo sapien
cctgtgataggcctactgcttcgca

SEQ ID NO: 2287577 - DNA, 25 bp, Homo sapien
ggatccctgtgataggcctactgct

SEQ ID NO: 2287578 - DNA, 25 bp, Homo sapien
tacagggatccctgtgataggccta

SEQ ID NO: 2287579 - DNA, 25 bp, Homo sapien
aggcctactgcttcgcagccatcag

SEQ ID NO: 2287580 - DNA, 25 bp, Homo sapien
tgagcggcatactggtcatatacag

SEQ ID NO: 2287581 - DNA, 25 bp, Homo sapien
catactggtcatatacagtaacatc

SEQ ID NO: 2287582 - DNA, 25 bp, Homo sapien
gcggcatactggtcatatacagtaa

SEQ ID NO: 2287583 - DNA, 25 bp, Homo sapien
acagtgagcggcatactggtcatat

SEQ ID NO: 2287584 - DNA, 25 bp, Homo sapien
aacccactgggttgcaagtcataga

SEQ ID NO: 2287585 - DNA, 25 bp, Homo sapien
cagtagacaccagttatctgcaagt

SEQ ID NO: 2287586 - DNA, 25 bp, Homo sapien
tccgtgacgatgctggtgtaaacca

SEQ ID NO: 2287587 - DNA, 25 bp, Homo sapien
caaatcctactggtaacaactggcc

SEQ ID NO: 2287588 - DNA, 25 bp, Homo sapien
tgagagtaagcattaaaaggacact

SEQ ID NO: 2287589 - DNA, 25 bp, Homo sapien
ttgagagtaagcattaaaaggacac

SEQ ID NO: 2287590 - DNA, 25 bp, Homo sapien
gagagtaagcattaaaaggacactt

SEQ ID NO: 2287591 - DNA, 25 bp, Homo sapien
tgttccgtgccgtcaatttgacccg

SEQ ID NO: 2287592 - DNA, 25 bp, Homo sapien
gccgtcaatttgacccgacccatgg

SEQ ID NO: 2287593 - DNA, 25 bp, Homo sapien
gacccgacccatggaatcacaaaaa

SEQ ID NO: 2287594 - DNA, 25 bp, Homo sapien
gagtaagcaatgttccgtgccgtca

SEQ ID NO: 2287595 - DNA, 25 bp, Homo sapien
tattgctgcacctaccagaccaagg

SEQ ID NO: 2287596 - DNA, 25 bp, Homo sapien
gaaatttcaaccctctgacggatgg

SEQ ID NO: 2287597 - DNA, 25 bp, Homo sapien
tagggcctcccttttggagcgcttg

SEQ ID NO: 2287598 - DNA, 25 bp, Homo sapien
gaacatatcaaaatgagccttcgtg

SEQ ID NO: 2287599 - DNA, 25 bp, Homo sapien
ttctctttcatatgacagggtaggt

SEQ ID NO: 2287600 - DNA, 25 bp, Homo sapien
agcctctcgttgcaggttttgcctg

SEQ ID NO: 2287601 - DNA, 25 bp, Homo sapien
tcatatgacagggtaggtttctcta

SEQ ID NO: 2287602 - DNA, 25 bp, Homo sapien
tgtgtgagcagcctctcgttgcagg

SEQ ID NO: 2287603 - DNA, 25 bp, Homo sapien
taatggttaaaggtgctcagttgag

SEQ ID NO: 2287604 - DNA, 25 bp, Homo sapien
cctcagctaatggttaaaggtgctc

SEQ ID NO: 2287605 - DNA, 25 bp, Homo sapien
gttaaaggtgctcagttgagtcctc

SEQ ID NO: 2287606 - DNA, 25 bp, Homo sapien
ctgctaagaagcctcagctaatggt

SEQ ID NO: 2287607 - DNA, 25 bp, Homo sapien
gaatttctgtaaaaggaaatgccca

SEQ ID NO: 2287608 - DNA, 25 bp, Homo sapien
cagtaggaataaggacgtgaagaac

SEQ ID NO: 2287609 - DNA, 25 bp, Homo sapien
gactgtgctttagatctagttgttg

SEQ ID NO: 2287610 - DNA, 25 bp, Homo sapien
taaggactttgactctttgaatttc

SEQ ID NO: 2287611 - DNA, 25 bp, Homo sapien
gaagctgttttcctcgggctgagaa

SEQ ID NO: 2287612 - DNA, 25 bp, Homo sapien
cagaggctccctgttgtgctaaaga

SEQ ID NO: 2287613 - DNA, 25 bp, Homo sapien
tggaagtgaccatgctaagcgccct

SEQ ID NO: 2287614 - DNA, 25 bp, Homo sapien
taagcgccctggacaaggagagaag

SEQ ID NO: 2287615 - DNA, 25 bp, Homo sapien
caaagagcctttgtgatttcttgcc

SEQ ID NO: 2287616 - DNA, 25 bp, Homo sapien
cttattcctgttttccaaagagcct

SEQ ID NO: 2287617 - DNA, 25 bp, Homo sapien
tcctgttttccaaagagcctttgtg

SEQ ID NO: 2287618 - DNA, 25 bp, Homo sapien
tttccaaagagcctttgtgatttct

SEQ ID NO: 2287619 - DNA, 25 bp, Homo sapien
gcaaagatgactaaagccggcaaca

SEQ ID NO: 2287620 - DNA, 25 bp, Homo sapien
cccacagagttaagcctaggcatgc

SEQ ID NO: 2287621 - DNA, 25 bp, Homo sapien
tgtcttccaagagcaggcaaaagct

SEQ ID NO: 2287622 - DNA, 25 bp, Homo sapien
ggagcactgcactatattgaacaca

SEQ ID NO: 2287623 - DNA, 25 bp, Homo sapien
tcctctcaggatataaggccatggg

SEQ ID NO: 2287624 - DNA, 25 bp, Homo sapien
gaagtctggagaaagtgacggtcca

SEQ ID NO: 2287625 - DNA, 25 bp, Homo sapien
gacggtccatgctgagtaaagttgc

SEQ ID NO: 2287626 - DNA, 25 bp, Homo sapien
aacacttgacaaggactgcagggaa

SEQ ID NO: 2287627 - DNA, 25 bp, Homo sapien
ttagcctcatgggacctagtttttg

SEQ ID NO: 2287628 - DNA, 25 bp, Homo sapien
taagtgaaacaatacctattcggag

SEQ ID NO: 2287629 - DNA, 25 bp, Homo sapien
tgttgactgcttacaaattacagag

SEQ ID NO: 2287630 - DNA, 25 bp, Homo sapien
tgcaagtttctagaatgtatccacc

SEQ ID NO: 2287631 - DNA, 25 bp, Homo sapien
ccacaagtcttcaagcactctctcc

SEQ ID NO: 2287632 - DNA, 25 bp, Homo sapien
cacaagtcttcaagcactctctcca

SEQ ID NO: 2287633 - DNA, 25 bp, Homo sapien
ccgtgaactctaaccctcccaccag

SEQ ID NO: 2287634 - DNA, 25 bp, Homo sapien
tggccttccgtgaactctaaccctc

SEQ ID NO: 2287635 - DNA, 25 bp, Homo sapien
aacagctccatatacttcaccttgc

SEQ ID NO: 2287636 - DNA, 25 bp, Homo sapien
ccataaaatgtaggttcgtcagaat

SEQ ID NO: 2287637 - DNA, 25 bp, Homo sapien
gaattaaatgtagacagaaacagct

SEQ ID NO: 2287638 - DNA, 25 bp, Homo sapien
taggttgtggctagagttgaatccg

SEQ ID NO: 2287639 - DNA, 25 bp, Homo sapien
tactgtgcatgacgctggatgatca

SEQ ID NO: 2287640 - DNA, 25 bp, Homo sapien
ctactgtgcatgacgctggatgatc

SEQ ID NO: 2287641 - DNA, 25 bp, Homo sapien
tgtctgtctaccatcccctaggagt

SEQ ID NO: 2287642 - DNA, 25 bp, Homo sapien
ctaccatcccctaggagtttctcat

SEQ ID NO: 2287643 - DNA, 25 bp, Homo sapien
cttgtctgtctaccatcccctagga

SEQ ID NO: 2287644 - DNA, 25 bp, Homo sapien
gtctaccatcccctaggagtttctc

SEQ ID NO: 2287645 - DNA, 25 bp, Homo sapien
taagtccgctcttccattacggcga

SEQ ID NO: 2287646 - DNA, 25 bp, Homo sapien
tattccccgcaaaatgggttgtgcc

SEQ ID NO: 2287647 - DNA, 25 bp, Homo sapien
cctgagtgttagtcccataagagta

SEQ ID NO: 2287648 - DNA, 25 bp, Homo sapien
ttcaatgttggccactgccggaggc

SEQ ID NO: 2287649 - DNA, 25 bp, Homo sapien
ctacttgaagcctaggctagagatc

SEQ ID NO: 2287650 - DNA, 25 bp, Homo sapien
gttctacttgaagcctaggctagag

SEQ ID NO: 2287651 - DNA, 25 bp, Homo sapien
taggctagagatcagcaaactatga

SEQ ID NO: 2287652 - DNA, 25 bp, Homo sapien
gcaaactatgatcctaggactgtat

SEQ ID NO: 2287653 - DNA, 25 bp, Homo sapien
atttcagactctgaagagtgctcat

SEQ ID NO: 2287654 - DNA, 25 bp, Homo sapien
tctgatgtgatcaagaactgtaatg

SEQ ID NO: 2287655 - DNA, 25 bp, Homo sapien
ctctgatgtgatcaagaactgtaat

SEQ ID NO: 2287656 - DNA, 25 bp, Homo sapien
actctgatgtgatcaagaactgtaa

SEQ ID NO: 2287657 - DNA, 25 bp, Homo sapien
gcctctgaactgtggagacaatcat

SEQ ID NO: 2287658 - DNA, 25 bp, Homo sapien
aatagccatacaggtcccatccatg

SEQ ID NO: 2287659 - DNA, 25 bp, Homo sapien
aaacttgctcccattaatagccata

SEQ ID NO: 2287660 - DNA, 25 bp, Homo sapien
ggcctctgaactgtggagacaatca

SEQ ID NO: 2287661 - DNA, 25 bp, Homo sapien
tcagccttagctggataaatccacg

SEQ ID NO: 2287662 - DNA, 25 bp, Homo sapien
aaatccacgtaggaacatggcctgg

SEQ ID NO: 2287663 - DNA, 25 bp, Homo sapien
cttggtatcacagtggtaataatgt

SEQ ID NO: 2287664 - DNA, 25 bp, Homo sapien
ctgggaggacttgcactctatgtca

SEQ ID NO: 2287665 - DNA, 25 bp, Homo sapien
cacgcccaacctctaagtacatttt

SEQ ID NO: 2287666 - DNA, 25 bp, Homo sapien
caaaaagaacgataaatagatgcac

SEQ ID NO: 2287667 - DNA, 25 bp, Homo sapien
gatttttctccctatagattttgcc

SEQ ID NO: 2287668 - DNA, 25 bp, Homo sapien
gatgactttcacaatcagtcacata

SEQ ID NO: 2287669 - DNA, 25 bp, Homo sapien
tttttatttgttcggatttgagctg

SEQ ID NO: 2287670 - DNA, 25 bp, Homo sapien
gaattcatttgtcttcgacaatcat

SEQ ID NO: 2287671 - DNA, 25 bp, Homo sapien
tgtcttcgacaatcatataaaataa

SEQ ID NO: 2287672 - DNA, 25 bp, Homo sapien
ttatttgttcggatttgagctgtag

SEQ ID NO: 2287673 - DNA, 25 bp, Homo sapien
cacctctgccaccttctgcccaagc

SEQ ID NO: 2287674 - DNA, 25 bp, Homo sapien
ttatcttcagctctagtataaatgt

SEQ ID NO: 2287675 - DNA, 25 bp, Homo sapien
atcttcagctctagtataaatgtca

SEQ ID NO: 2287676 - DNA, 25 bp, Homo sapien
tatcttcagctctagtataaatgtc

SEQ ID NO: 2287677 - DNA, 25 bp, Homo sapien
ggcggcgatcccggagacgacgcag

SEQ ID NO: 2287678 - DNA, 25 bp, Homo sapien
gggcatcagaggcgagcccgggtgg

SEQ ID NO: 2287679 - DNA, 25 bp, Homo sapien
ggcaggggcatcagaggcgagcccg

SEQ ID NO: 2287680 - DNA, 25 bp, Homo sapien
catcagaggcgagcccgggtggaag

SEQ ID NO: 2287681 - DNA, 25 bp, Homo sapien
cacatgggtccaccaggagctggct

SEQ ID NO: 2287682 - DNA, 25 bp, Homo sapien
ctccacatgggtccaccaggagctg

SEQ ID NO: 2287683 - DNA, 25 bp, Homo sapien
tccacatgggtccaccaggagctgg

SEQ ID NO: 2287684 - DNA, 25 bp, Homo sapien
ccacatgggtccaccaggagctggc

SEQ ID NO: 2287685 - DNA, 25 bp, Homo sapien
taaagccttcggtgactccaaggat

SEQ ID NO: 2287686 - DNA, 25 bp, Homo sapien
cctcttaaagccttcggtgactcca

SEQ ID NO: 2287687 - DNA, 25 bp, Homo sapien
ccttcggtgactccaaggatgggat

SEQ ID NO: 2287688 - DNA, 25 bp, Homo sapien
tcttaaagccttcggtgactccaag

SEQ ID NO: 2287689 - DNA, 25 bp, Homo sapien
cttgtggatgctgtaaggctttccg

SEQ ID NO: 2287690 - DNA, 25 bp, Homo sapien
gatgctgtaaggctttccgttgtgg

SEQ ID NO: 2287691 - DNA, 25 bp, Homo sapien
tgctgtaaggctttccgttgtggtc

SEQ ID NO: 2287692 - DNA, 25 bp, Homo sapien
tgtggatgctgtaaggctttccgtt

SEQ ID NO: 2287693 - DNA, 25 bp, Homo sapien
gccgcccaatggagaggtagtcctc

SEQ ID NO: 2287694 - DNA, 25 bp, Homo sapien
gagacttcgctattctcgcccaagg

SEQ ID NO: 2287695 - DNA, 25 bp, Homo sapien
gatgggtgtgcgacttccccaggtt

SEQ ID NO: 2287696 - DNA, 25 bp, Homo sapien
aaactagctctgatccttaaggcac

SEQ ID NO: 2287697 - DNA, 25 bp, Homo sapien
tataattggcagagtggcgcacagc

SEQ ID NO: 2287698 - DNA, 25 bp, Homo sapien
tctgctgcttgggaccagggtccac

SEQ ID NO: 2287699 - DNA, 25 bp, Homo sapien
tcttggtgtatgattggcagcgaca

SEQ ID NO: 2287700 - DNA, 25 bp, Homo sapien
gcaagtcttgcggtcatagtatcga

SEQ ID NO: 2287701 - DNA, 25 bp, Homo sapien
ttcatctgcgtctttgcaaaccatg

SEQ ID NO: 2287702 - DNA, 25 bp, Homo sapien
ctttgcaaaccatggtgaagcctgc

SEQ ID NO: 2287703 - DNA, 25 bp, Homo sapien
gcaaaccatggtgaagcctgccaca

SEQ ID NO: 2287704 - DNA, 25 bp, Homo sapien
tcttggcttcatctgcgtctttgca

SEQ ID NO: 2287705 - DNA, 25 bp, Homo sapien
ggtagaagcaaacgggtcccattga

SEQ ID NO: 2287706 - DNA, 25 bp, Homo sapien
gaatggtagaagcaaacgggtccca

SEQ ID NO: 2287707 - DNA, 25 bp, Homo sapien
tggtagaagcaaacgggtcccattg

SEQ ID NO: 2287708 - DNA, 25 bp, Homo sapien
agaagcaaacgggtcccattgaggg

SEQ ID NO: 2287709 - DNA, 25 bp, Homo sapien
ctgcatgctaatgatgcgatgggcc

SEQ ID NO: 2287710 - DNA, 25 bp, Homo sapien
gctaatgatgcgatgggccttgcct

SEQ ID NO: 2287711 - DNA, 25 bp, Homo sapien
tgctaatgatgcgatgggccttgcc

SEQ ID NO: 2287712 - DNA, 25 bp, Homo sapien
catgctaatgatgcgatgggccttg

SEQ ID NO: 2287713 - DNA, 25 bp, Homo sapien
tcaatttgggcagtgatgtgtggcc

SEQ ID NO: 2287714 - DNA, 25 bp, Homo sapien
tccttcttgaggttagagaccagct

SEQ ID NO: 2287715 - DNA, 25 bp, Homo sapien
gtggccagtagtgggtagaaccctc

SEQ ID NO: 2287716 - DNA, 25 bp, Homo sapien
aaaacatgtcaatttgggcagtgat

SEQ ID NO: 2287717 - DNA, 25 bp, Homo sapien
ggtatggacaaggtagcccacattg

SEQ ID NO: 2287718 - DNA, 25 bp, Homo sapien
ggactccttgctcatcctttccacc

SEQ ID NO: 2287719 - DNA, 25 bp, Homo sapien
agctgtcctttgtcacgtagatgga

SEQ ID NO: 2287720 - DNA, 25 bp, Homo sapien
tcctttgtcacgtagatggaggact

SEQ ID NO: 2287721 - DNA, 25 bp, Homo sapien
aaaacagcaagtgaatggctgtgag

SEQ ID NO: 2287722 - DNA, 25 bp, Homo sapien
catcaccagaatgaaggtaaaacag

SEQ ID NO: 2287723 - DNA, 25 bp, Homo sapien
gctgtgagagtatgtacatcagtga

SEQ ID NO: 2287724 - DNA, 25 bp, Homo sapien
gtgggcagcaacaggcatgaaagct

SEQ ID NO: 2287725 - DNA, 25 bp, Homo sapien
tgtggtcagcactaccagggaactt

SEQ ID NO: 2287726 - DNA, 25 bp, Homo sapien
caacagccaaacaagtctaacaggt

SEQ ID NO: 2287727 - DNA, 25 bp, Homo sapien
tgtctgactggacttggacttgatg

SEQ ID NO: 2287728 - DNA, 25 bp, Homo sapien
ttttatgaatatgcaacaacagcca

SEQ ID NO: 2287729 - DNA, 25 bp, Homo sapien
gaaccaggcaatgcagtcagtgaaa

SEQ ID NO: 2287730 - DNA, 25 bp, Homo sapien
tctttatatacgttcccctcgctga

SEQ ID NO: 2287731 - DNA, 25 bp, Homo sapien
gtttcactatggaaagcaggcactg

SEQ ID NO: 2287732 - DNA, 25 bp, Homo sapien
cagtgaaaatgtatgggttatcccc

SEQ ID NO: 2287733 - DNA, 25 bp, Homo sapien
tcactgttgctagcacacgaaattt

SEQ ID NO: 2287734 - DNA, 25 bp, Homo sapien
tacctcatgggcaaagaccatgctc

SEQ ID NO: 2287735 - DNA, 25 bp, Homo sapien
gaatgtgccgtttcctgacatgcct

SEQ ID NO: 2287736 - DNA, 25 bp, Homo sapien
tgcctaaaagatgcttcaagacatt

SEQ ID NO: 2287737 - DNA, 25 bp, Homo sapien
tgaatttgggaagcttgaggcaccc

SEQ ID NO: 2287738 - DNA, 25 bp, Homo sapien
tgtcctgagcatcaacacctgaaga

SEQ ID NO: 2287739 - DNA, 25 bp, Homo sapien
gaggcaccctagactcattgacaga

SEQ ID NO: 2287740 - DNA, 25 bp, Homo sapien
cattgacagacacataggagatgcc

SEQ ID NO: 2287741 - DNA, 25 bp, Homo sapien
ttaagatgcaatctgtaacatctgg

SEQ ID NO: 2287742 - DNA, 25 bp, Homo sapien
agatgcaatctgtaacatctgggag

SEQ ID NO: 2287743 - DNA, 25 bp, Homo sapien
atgcaatctgtaacatctgggagaa

SEQ ID NO: 2287744 - DNA, 25 bp, Homo sapien
taagatgcaatctgtaacatctggg

SEQ ID NO: 2287745 - DNA, 25 bp, Homo sapien
agagtcggcagacattatacggtgg

SEQ ID NO: 2287746 - DNA, 25 bp, Homo sapien
aaagcaggggtagagtcggcagaca

SEQ ID NO: 2287747 - DNA, 25 bp, Homo sapien
gacattatacggtggggaccagctg

SEQ ID NO: 2287748 - DNA, 25 bp, Homo sapien
gatgttcaatctggtggccttatga

SEQ ID NO: 2287749 - DNA, 25 bp, Homo sapien
ccagtaggacacctccgatggagct

SEQ ID NO: 2287750 - DNA, 25 bp, Homo sapien
taagatgcatctcgcataggctgcc

SEQ ID NO: 2287751 - DNA, 25 bp, Homo sapien
aagttccatgttccccagatttgag

SEQ ID NO: 2287752 - DNA, 25 bp, Homo sapien
tgatttctgagcagcgaaagctccc

SEQ ID NO: 2287753 - DNA, 25 bp, Homo sapien
caagatcagtgcatagtctgtgctt

SEQ ID NO: 2287754 - DNA, 25 bp, Homo sapien
atttcaagatcagtgcatagtctgt

SEQ ID NO: 2287755 - DNA, 25 bp, Homo sapien
gcatagtctgtgctttcaatcaaca

SEQ ID NO: 2287756 - DNA, 25 bp, Homo sapien
tcaacatcatcagcaggcagtaatc

SEQ ID NO: 2287757 - DNA, 25 bp, Homo sapien
tatgtgcaagtgtgacatccctcat

SEQ ID NO: 2287758 - DNA, 25 bp, Homo sapien
ttgtttgagtcatatgtgcaagtgt

SEQ ID NO: 2287759 - DNA, 25 bp, Homo sapien
ttttgtttgagtcatatgtgcaagt

SEQ ID NO: 2287760 - DNA, 25 bp, Homo sapien
atatgtgcaagtgtgacatccctca

SEQ ID NO: 2287761 - DNA, 25 bp, Homo sapien
tccctgcctttgagatggtgatgcg

SEQ ID NO: 2287762 - DNA, 25 bp, Homo sapien
gatgcgtgccaaggacaatgtttac

SEQ ID NO: 2287763 - DNA, 25 bp, Homo sapien
tgcctgtagtaagctcatccctgcc

SEQ ID NO: 2287764 - DNA, 25 bp, Homo sapien
cgggaaactgcgctgcctgtagtaa

SEQ ID NO: 2287765 - DNA, 25 bp, Homo sapien
caaggcgcttatgctcttcaagaga

SEQ ID NO: 2287766 - DNA, 25 bp, Homo sapien
cttcaagagacaatccaacaaaaat

SEQ ID NO: 2287767 - DNA, 25 bp, Homo sapien
tcattgcacattttgccagacactt

SEQ ID NO: 2287768 - DNA, 25 bp, Homo sapien
taaacattcattgcacattttgcca

SEQ ID NO: 2287769 - DNA, 25 bp, Homo sapien
tccagcacaagcctaccaagtgatg

SEQ ID NO: 2287770 - DNA, 25 bp, Homo sapien
gctccccgcagttctctacttgtga

SEQ ID NO: 2287771 - DNA, 25 bp, Homo sapien
cccctttattgtagagcacttctcg

SEQ ID NO: 2287772 - DNA, 25 bp, Homo sapien
tgcttcagctggtttgtcttcccca

SEQ ID NO: 2287773 - DNA, 25 bp, Homo sapien
tatcatccaagctgtcatcacccat

SEQ ID NO: 2287774 - DNA, 25 bp, Homo sapien
aaacatgaagcttctatcatccaag

SEQ ID NO: 2287775 - DNA, 25 bp, Homo sapien
ctatcatccaagctgtcatcaccca

SEQ ID NO: 2287776 - DNA, 25 bp, Homo sapien
acatgaagcttctatcatccaagct

SEQ ID NO: 2287777 - DNA, 25 bp, Homo sapien
aaatcactatccgagagacaggcgt

SEQ ID NO: 2287778 - DNA, 25 bp, Homo sapien
tagggagcacccttctaggtatcag

SEQ ID NO: 2287779 - DNA, 25 bp, Homo sapien
gacaggcgttttcgttgatcagaca

SEQ ID NO: 2287780 - DNA, 25 bp, Homo sapien
taggtatcagaacacatagactcgg

SEQ ID NO: 2287781 - DNA, 25 bp, Homo sapien
ggagaactagactgtaaggccctgg

SEQ ID NO: 2287782 - DNA, 25 bp, Homo sapien
gaaggatgtcacgtagggagaacta

SEQ ID NO: 2287783 - DNA, 25 bp, Homo sapien
ggtagtagtgaatagcctctgaggc

SEQ ID NO: 2287784 - DNA, 25 bp, Homo sapien
catttctacgtgcattgaacatggg

SEQ ID NO: 2287785 - DNA, 25 bp, Homo sapien
tagacggagacagtagccagagagc

SEQ ID NO: 2287786 - DNA, 25 bp, Homo sapien
cttgtccagattgagttgaggaacc

SEQ ID NO: 2287787 - DNA, 25 bp, Homo sapien
tgggatatcttcatgcatacttggc

SEQ ID NO: 2287788 - DNA, 25 bp, Homo sapien
catacttcccagaaagctagacgga

SEQ ID NO: 2287789 - DNA, 25 bp, Homo sapien
gactttagccaacaaatcaccatag

SEQ ID NO: 2287790 - DNA, 25 bp, Homo sapien
agctccgagggagtttgatactgcc

SEQ ID NO: 2287791 - DNA, 25 bp, Homo sapien
taaaattcaaacacctgacgccagc

SEQ ID NO: 2287792 - DNA, 25 bp, Homo sapien
gaatctgtgtaaccttagaatggcc

SEQ ID NO: 2287793 - DNA, 25 bp, Homo sapien
caaggaccggtatcttctaaaggca

SEQ ID NO: 2287794 - DNA, 25 bp, Homo sapien
caccaagccgaaaggttgtgctggc

SEQ ID NO: 2287795 - DNA, 25 bp, Homo sapien
gctgcaaccgaaagatcaaggaccg

SEQ ID NO: 2287796 - DNA, 25 bp, Homo sapien
caaatactggcatgaagactgcctg

SEQ ID NO: 2287797 - DNA, 25 bp, Homo sapien
gtcaatgctcccagctgcagaacct

SEQ ID NO: 2287798 - DNA, 25 bp, Homo sapien
ggtgcctcttggcaatcgaatggcc

SEQ ID NO: 2287799 - DNA, 25 bp, Homo sapien
tgtgtcaatgctcccagctgcagaa

SEQ ID NO: 2287800 - DNA, 25 bp, Homo sapien
tggcaatcgaatggccatgttggcc

SEQ ID NO: 2287801 - DNA, 25 bp, Homo sapien
ataagagtggaaaaatgtcagtatc

SEQ ID NO: 2287802 - DNA, 25 bp, Homo sapien
gataagagtggaaaaatgtcagtat

SEQ ID NO: 2287803 - DNA, 25 bp, Homo sapien
ctttgaaagactgctgcttaaacca

SEQ ID NO: 2287804 - DNA, 25 bp, Homo sapien
cattctttgcaaaccatccctgtgt

SEQ ID NO: 2287805 - DNA, 25 bp, Homo sapien
tgtctttctgaaagaaccgaaatat

SEQ ID NO: 2287806 - DNA, 25 bp, Homo sapien
ccaattaatcttgctagatgcaaca

SEQ ID NO: 2287807 - DNA, 25 bp, Homo sapien
atgtggctttgtcattcgccatcat

SEQ ID NO: 2287808 - DNA, 25 bp, Homo sapien
gcatgtggctttgtcattcgccatc

SEQ ID NO: 2287809 - DNA, 25 bp, Homo sapien
catgtggctttgtcattcgccatca

SEQ ID NO: 2287810 - DNA, 25 bp, Homo sapien
ttaatcaaatccatttgttaccagg

SEQ ID NO: 2287811 - DNA, 25 bp, Homo sapien
cacctgtggctcagatgcggtcaac

SEQ ID NO: 2287812 - DNA, 25 bp, Homo sapien
caaggagaagcgctacaaagcagcc

SEQ ID NO: 2287813 - DNA, 25 bp, Homo sapien
cattgcttggcgtatccttgaggac

SEQ ID NO: 2287814 - DNA, 25 bp, Homo sapien
cccctgtatcgcttaattgagaagg

SEQ ID NO: 2287815 - DNA, 25 bp, Homo sapien
cttcagctcggctcctcgcacgctg

SEQ ID NO: 2287816 - DNA, 25 bp, Homo sapien
tcgcacgctgctggggtaagttgtc

SEQ ID NO: 2287817 - DNA, 25 bp, Homo sapien
ttgtcttgaaccaggacggagagag

SEQ ID NO: 2287818 - DNA, 25 bp, Homo sapien
gagagagacagcctcggactgcagt

SEQ ID NO: 2287819 - DNA, 25 bp, Homo sapien
tccgccggctcactaataactgagt

SEQ ID NO: 2287820 - DNA, 25 bp, Homo sapien
ccgccggctcactaataactgagtg

SEQ ID NO: 2287821 - DNA, 25 bp, Homo sapien
gctccgccggctcactaataactga

SEQ ID NO: 2287822 - DNA, 25 bp, Homo sapien
gccggctcactaataactgagtgac

SEQ ID NO: 2287823 - DNA, 25 bp, Homo sapien
tccgagggcggctgtacttgactga

SEQ ID NO: 2287824 - DNA, 25 bp, Homo sapien
cacattttgtgtgcgggtttgtccc

SEQ ID NO: 2287825 - DNA, 25 bp, Homo sapien
tgtccccagcgtttgtgagtagcat

SEQ ID NO: 2287826 - DNA, 25 bp, Homo sapien
gaaattagcaacaaagcccgatctg

SEQ ID NO: 2287827 - DNA, 25 bp, Homo sapien
tgtcggcaaccgctgatgatcacat

SEQ ID NO: 2287828 - DNA, 25 bp, Homo sapien
cctttagcttggctgagtaaacaaa

SEQ ID NO: 2287829 - DNA, 25 bp, Homo sapien
gtgtttttcgcaaagtgtcagcaga

SEQ ID NO: 2287830 - DNA, 25 bp, Homo sapien
cttgtatatttcattgtcggcaacc

SEQ ID NO: 2287831 - DNA, 25 bp, Homo sapien
tcagagcactacctctctccttcat

SEQ ID NO: 2287832 - DNA, 25 bp, Homo sapien
cgtttcagagcactacctctctcct

SEQ ID NO: 2287833 - DNA, 25 bp, Homo sapien
ttcagagcactacctctctccttca

SEQ ID NO: 2287834 - DNA, 25 bp, Homo sapien
gtttcagagcactacctctctcctt

SEQ ID NO: 2287835 - DNA, 25 bp, Homo sapien
gcattataaaagcactagtttggct

SEQ ID NO: 2287836 - DNA, 25 bp, Homo sapien
ttaggctgctttcctaattagaggg

SEQ ID NO: 2287837 - DNA, 25 bp, Homo sapien
ataaaagcactagtttggcttcatc

SEQ ID NO: 2287838 - DNA, 25 bp, Homo sapien
tgattggcattataaaagcactagt

SEQ ID NO: 2287839 - DNA, 25 bp, Homo sapien
gccaggttcaaagtgttcagtttca

SEQ ID NO: 2287840 - DNA, 25 bp, Homo sapien
tgaaagtgaatcctaggcacctgtg

SEQ ID NO: 2287841 - DNA, 25 bp, Homo sapien
tattgagaactcgatgctgccaggt

SEQ ID NO: 2287842 - DNA, 25 bp, Homo sapien
gaaagtagtctacagcaaagcccag

SEQ ID NO: 2287843 - DNA, 25 bp, Homo sapien
cagctgcttggaggcatatgcgaat

SEQ ID NO: 2287844 - DNA, 25 bp, Homo sapien
aattgtcagggaattgaagcctggc

SEQ ID NO: 2287845 - DNA, 25 bp, Homo sapien
tatgcgaatgccatgtactactttg

SEQ ID NO: 2287846 - DNA, 25 bp, Homo sapien
ttacaaaatttgcaggagggacagg

SEQ ID NO: 2287847 - DNA, 25 bp, Homo sapien
tgttgctctccttctccaagtttag

SEQ ID NO: 2287848 - DNA, 25 bp, Homo sapien
ttggttgacctcagggatttcaaag

SEQ ID NO: 2287849 - DNA, 25 bp, Homo sapien
tctccaagtttagcattggttgacc

SEQ ID NO: 2287850 - DNA, 25 bp, Homo sapien
cagcagtgttgctctccttctccaa

SEQ ID NO: 2287851 - DNA, 25 bp, Homo sapien
caaattggcagtgaagtagaataaa

SEQ ID NO: 2287852 - DNA, 25 bp, Homo sapien
cacaaattggcagtgaagtagaata

SEQ ID NO: 2287853 - DNA, 25 bp, Homo sapien
acacaaattggcagtgaagtagaat

SEQ ID NO: 2287854 - DNA, 25 bp, Homo sapien
tacacaaattggcagtgaagtagaa

SEQ ID NO: 2287855 - DNA, 25 bp, Homo sapien
atgcctttgatccaagaactacaat

SEQ ID NO: 2287856 - DNA, 25 bp, Homo sapien
catgcctttgatccaagaactacaa

SEQ ID NO: 2287857 - DNA, 25 bp, Homo sapien
tgtaagctaatgctcctcaaaacac

SEQ ID NO: 2287858 - DNA, 25 bp, Homo sapien
taataatgacaccaaagcaaggtgc

SEQ ID NO: 2287859 - DNA, 25 bp, Homo sapien
cactgtaagcagatactaaagtagg

SEQ ID NO: 2287860 - DNA, 25 bp, Homo sapien
tcctgtgcattgaacccaataccat

SEQ ID NO: 2287861 - DNA, 25 bp, Homo sapien
ctgcagatcagttattatgggaggg

SEQ ID NO: 2287862 - DNA, 25 bp, Homo sapien
taatctgttatcagttctgtaggtg

SEQ ID NO: 2287863 - DNA, 25 bp, Homo sapien
gctctgcaggcctcaagtaatttgc

SEQ ID NO: 2287864 - DNA, 25 bp, Homo sapien
gaagatgacagagaatcatgctctg

SEQ ID NO: 2287865 - DNA, 25 bp, Homo sapien
aatcatctgaatagactgtctgata

SEQ ID NO: 2287866 - DNA, 25 bp, Homo sapien
tatctagttagtccagtagcctatg

SEQ ID NO: 2287867 - DNA, 25 bp, Homo sapien
caagagattttcagtcatgtgtgat

SEQ ID NO: 2287868 - DNA, 25 bp, Homo sapien
ctgatagtatcatgtaacaaggaac

SEQ ID NO: 2287869 - DNA, 25 bp, Homo sapien
cagtgtaaaaccacaagtagggttg

SEQ ID NO: 2287870 - DNA, 25 bp, Homo sapien
taagagtacagaaagctttgtgctg

SEQ ID NO: 2287871 - DNA, 25 bp, Homo sapien
tttgtgctgtctcctaccgtacgta

SEQ ID NO: 2287872 - DNA, 25 bp, Homo sapien
tctgaggtaaatgatctgagtgcaa

SEQ ID NO: 2287873 - DNA, 25 bp, Homo sapien
tctgtgggtatcatacccaccagtc

SEQ ID NO: 2287874 - DNA, 25 bp, Homo sapien
cttctgtgggtatcatacccaccag

SEQ ID NO: 2287875 - DNA, 25 bp, Homo sapien
ttggcaccttctgtgggtatcatac

SEQ ID NO: 2287876 - DNA, 25 bp, Homo sapien
ggcaccttctgtgggtatcataccc

SEQ ID NO: 2287877 - DNA, 25 bp, Homo sapien
aacttcctgagcctaaaataaggca

SEQ ID NO: 2287878 - DNA, 25 bp, Homo sapien
aatttatatgtaaatcggcaataaa

SEQ ID NO: 2287879 - DNA, 25 bp, Homo sapien
taataaagatgttgctaaaattttg

SEQ ID NO: 2287880 - DNA, 25 bp, Homo sapien
caatttatatgtaaatcggcaataa

SEQ ID NO: 2287881 - DNA, 25 bp, Homo sapien
tcaagtcatgtagccacacgggaag

SEQ ID NO: 2287882 - DNA, 25 bp, Homo sapien
gagtatctgtccgaggcttcagaac

SEQ ID NO: 2287883 - DNA, 25 bp, Homo sapien
ttcattgaccatatacttttcacag

SEQ ID NO: 2287884 - DNA, 25 bp, Homo sapien
cacacgggaaggagtatctgtccga

SEQ ID NO: 2287885 - DNA, 25 bp, Homo sapien
actcttactaatatccccagggaag

SEQ ID NO: 2287886 - DNA, 25 bp, Homo sapien
agttgacctgtgtgatacttgcatc

SEQ ID NO: 2287887 - DNA, 25 bp, Homo sapien
cctgtgtgatacttgcatcttggaa

SEQ ID NO: 2287888 - DNA, 25 bp, Homo sapien
aagttatccccaaccctccagtgct

SEQ ID NO: 2287889 - DNA, 25 bp, Homo sapien
ctgcggaagaaggacctagggtcaa

SEQ ID NO: 2287890 - DNA, 25 bp, Homo sapien
cacatcactgcggaagaaggaccta

SEQ ID NO: 2287891 - DNA, 25 bp, Homo sapien
gaaggacctagggtcaaggctctgc

SEQ ID NO: 2287892 - DNA, 25 bp, Homo sapien
gaagaaggacctagggtcaaggctc

SEQ ID NO: 2287893 - DNA, 25 bp, Homo sapien
tattcttcgccggtgaaggcttcga

SEQ ID NO: 2287894 - DNA, 25 bp, Homo sapien
cccactgtattcttcgccggtgaag

SEQ ID NO: 2287895 - DNA, 25 bp, Homo sapien
tagggaccgagcccactgtattctt

SEQ ID NO: 2287896 - DNA, 25 bp, Homo sapien
gaaggcttcgaggtgcccttcctgg

SEQ ID NO: 2287897 - DNA, 25 bp, Homo sapien
tttctatcaataggaattgcccagg

SEQ ID NO: 2287898 - DNA, 25 bp, Homo sapien
atttctatcaataggaattgcccag

SEQ ID NO: 2287899 - DNA, 25 bp, Homo sapien
ttctatcaataggaattgcccaggt

SEQ ID NO: 2287900 - DNA, 25 bp, Homo sapien
tggagtgcttagcattatgaagctg

SEQ ID NO: 2287901 - DNA, 25 bp, Homo sapien
tcccaacagtgtatgacagctcaat

SEQ ID NO: 2287902 - DNA, 25 bp, Homo sapien
tatgaagctgtggttacttgcttta

SEQ ID NO: 2287903 - DNA, 25 bp, Homo sapien
gctttactactgcagaataacatca

SEQ ID NO: 2287904 - DNA, 25 bp, Homo sapien
tctgaaggatatcttttaatcatgc

SEQ ID NO: 2287905 - DNA, 25 bp, Homo sapien
ttaatcatgcagtatcgtttctcag

SEQ ID NO: 2287906 - DNA, 25 bp, Homo sapien
tctcagtaagaacgccaaagagctt

SEQ ID NO: 2287907 - DNA, 25 bp, Homo sapien
catgcagtatcgtttctcagtaaga

SEQ ID NO: 2287908 - DNA, 25 bp, Homo sapien
gcattgtcagctgtagtttatttaa

SEQ ID NO: 2287909 - DNA, 25 bp, Homo sapien
ggacattttacagtatgacagtgtg

SEQ ID NO: 2287910 - DNA, 25 bp, Homo sapien
tgagttgtccctgcggtaataaaga

SEQ ID NO: 2287911 - DNA, 25 bp, Homo sapien
aaagttctaaatgagttgtccctgc

SEQ ID NO: 2287912 - DNA, 25 bp, Homo sapien
ggagatggctgctgttcgatattaa

SEQ ID NO: 2287913 - DNA, 25 bp, Homo sapien
tttgatggaggtttaacagaaagca

SEQ ID NO: 2287914 - DNA, 25 bp, Homo sapien
ttttgtgcgccgtgtgtctgtttga

SEQ ID NO: 2287915 - DNA, 25 bp, Homo sapien
cagcagggatcatctggagatggct

SEQ ID NO: 2287916 - DNA, 25 bp, Homo sapien
ctatttggcttttcatctcttccct

SEQ ID NO: 2287917 - DNA, 25 bp, Homo sapien
cattttctatttggcttttcatctc

SEQ ID NO: 2287918 - DNA, 25 bp, Homo sapien
cttccctcacttttaaatccattca

SEQ ID NO: 2287919 - DNA, 25 bp, Homo sapien
tctcttccctcacttttaaatccat

SEQ ID NO: 2287920 - DNA, 25 bp, Homo sapien
tgaatttagggctatggtataagtg

SEQ ID NO: 2287921 - DNA, 25 bp, Homo sapien
tttgaatttagggctatggtataag

SEQ ID NO: 2287922 - DNA, 25 bp, Homo sapien
ttgaatttagggctatggtataagt

SEQ ID NO: 2287923 - DNA, 25 bp, Homo sapien
ttgattgatgataattgtaatagct

SEQ ID NO: 2287924 - DNA, 25 bp, Homo sapien
gattgatgataattgtaatagctgg

SEQ ID NO: 2287925 - DNA, 25 bp, Homo sapien
cactgacaactcattttgattgatg

SEQ ID NO: 2287926 - DNA, 25 bp, Homo sapien
tctttttcactgacaactcattttg

SEQ ID NO: 2287927 - DNA, 25 bp, Homo sapien
tttccagactgcctaagcatagatt

SEQ ID NO: 2287928 - DNA, 25 bp, Homo sapien
tatcgaatccaaatgcaagcactgc

SEQ ID NO: 2287929 - DNA, 25 bp, Homo sapien
gctgaccagtgcaaaatcatcctca

SEQ ID NO: 2287930 - DNA, 25 bp, Homo sapien
tctaacagataggagcttgatggaa

SEQ ID NO: 2287931 - DNA, 25 bp, Homo sapien
agacctgaagacctcaggtgtggat

SEQ ID NO: 2287932 - DNA, 25 bp, Homo sapien
gcattagacctgaagacctcaggtg

SEQ ID NO: 2287933 - DNA, 25 bp, Homo sapien
cagcattagacctgaagacctcagg

SEQ ID NO: 2287934 - DNA, 25 bp, Homo sapien
ttagacctgaagacctcaggtgtgg

SEQ ID NO: 2287935 - DNA, 25 bp, Homo sapien
ttcccatgattattgtttgaagagc

SEQ ID NO: 2287936 - DNA, 25 bp, Homo sapien
agaaaggcttcccatgattattgtt

SEQ ID NO: 2287937 - DNA, 25 bp, Homo sapien
aaggcttcccatgattattgtttga

SEQ ID NO: 2287938 - DNA, 25 bp, Homo sapien
cccatgattattgtttgaagagcag

SEQ ID NO: 2287939 - DNA, 25 bp, Homo sapien
catgaggctcttagcatgaattaaa

SEQ ID NO: 2287940 - DNA, 25 bp, Homo sapien
tctcttccttctgaccgtaagtacc

SEQ ID NO: 2287941 - DNA, 25 bp, Homo sapien
cgtaagtacctatagcactcatgag

SEQ ID NO: 2287942 - DNA, 25 bp, Homo sapien
tgctgttgcttttaggagtggcaca

SEQ ID NO: 2287943 - DNA, 25 bp, Homo sapien
caaagccacttacagtacagggagc

SEQ ID NO: 2287944 - DNA, 25 bp, Homo sapien
tgcagtcctttcaattcacccagtg

SEQ ID NO: 2287945 - DNA, 25 bp, Homo sapien
tagaaagccctataagaactgagag

SEQ ID NO: 2287946 - DNA, 25 bp, Homo sapien
gatcctacggtcagtcagtcagtct

SEQ ID NO: 2287947 - DNA, 25 bp, Homo sapien
gattcctgtatgatttgcattttga

SEQ ID NO: 2287948 - DNA, 25 bp, Homo sapien
gttgtgcctttttacgattcctgta

SEQ ID NO: 2287949 - DNA, 25 bp, Homo sapien
agcacacaagccagcaatcaggagc

SEQ ID NO: 2287950 - DNA, 25 bp, Homo sapien
cagcacacaagccagcaatcaggag

SEQ ID NO: 2287951 - DNA, 25 bp, Homo sapien
tttgtcagccacctgcgactgcagc

SEQ ID NO: 2287952 - DNA, 25 bp, Homo sapien
tattttcttaacctgcctagctttg

SEQ ID NO: 2287953 - DNA, 25 bp, Homo sapien
gccacacgttggaagcagctcatta

SEQ ID NO: 2287954 - DNA, 25 bp, Homo sapien
tgataaagacagtcctggcagctgg

SEQ ID NO: 2287955 - DNA, 25 bp, Homo sapien
tctattctcaaaacgtcctctctgc

SEQ ID NO: 2287956 - DNA, 25 bp, Homo sapien
tagcacccactctattctcaaaacg

SEQ ID NO: 2287957 - DNA, 25 bp, Homo sapien
ttcctctttgctagcacccactcta

SEQ ID NO: 2287958 - DNA, 25 bp, Homo sapien
tattctcaaaacgtcctctctgcat

SEQ ID NO: 2287959 - DNA, 25 bp, Homo sapien
taaacttaaatttcaggcatgcccc

SEQ ID NO: 2287960 - DNA, 25 bp, Homo sapien
tgtggacgcagacaccatgttcacc

SEQ ID NO: 2287961 - DNA, 25 bp, Homo sapien
tttcatgttacagcagcaggtctgc

SEQ ID NO: 2287962 - DNA, 25 bp, Homo sapien
tgcaggttggcccttatggatccag

SEQ ID NO: 2287963 - DNA, 25 bp, Homo sapien
caaatggccttcgaaggttctaata

SEQ ID NO: 2287964 - DNA, 25 bp, Homo sapien
gacagcaactagatttcattttaga

SEQ ID NO: 2287965 - DNA, 25 bp, Homo sapien
tactggtaggagagtaaattcaaac

SEQ ID NO: 2287966 - DNA, 25 bp, Homo sapien
ctttctgacagcaactagatttcat

SEQ ID NO: 2287967 - DNA, 25 bp, Homo sapien
ggctgactagagttgggaggcgaca

SEQ ID NO: 2287968 - DNA, 25 bp, Homo sapien
aaggcatggtgttctgtgttaagga

SEQ ID NO: 2287969 - DNA, 25 bp, Homo sapien
ggaagaagccactacagtggcgcga

SEQ ID NO: 2287970 - DNA, 25 bp, Homo sapien
ttgggaggaggtgagtcatcctcat

SEQ ID NO: 2287971 - DNA, 25 bp, Homo sapien
gcaacagtcttgcatgtaacatcaa

SEQ ID NO: 2287972 - DNA, 25 bp, Homo sapien
gtcttgcatgtaacatcaagcaaac

SEQ ID NO: 2287973 - DNA, 25 bp, Homo sapien
catattggcaacagtcttgcatgta

SEQ ID NO: 2287974 - DNA, 25 bp, Homo sapien
tggcaacagtcttgcatgtaacatc

SEQ ID NO: 2287975 - DNA, 25 bp, Homo sapien
tggcttttagaggtagttttctctc

SEQ ID NO: 2287976 - DNA, 25 bp, Homo sapien
gtgatgacaatgttgatattagtct

SEQ ID NO: 2287977 - DNA, 25 bp, Homo sapien
ccagtgatgacaatgttgatattag

SEQ ID NO: 2287978 - DNA, 25 bp, Homo sapien
gtccagtgatgacaatgttgatatt

SEQ ID NO: 2287979 - DNA, 25 bp, Homo sapien
atgatactcacgtagtacttactgg

SEQ ID NO: 2287980 - DNA, 25 bp, Homo sapien
tgatactcacgtagtacttactggt

SEQ ID NO: 2287981 - DNA, 25 bp, Homo sapien
aatgatactcacgtagtacttactg

SEQ ID NO: 2287982 - DNA, 25 bp, Homo sapien
tgctcatgggtctgtccattcttgg

SEQ ID NO: 2287983 - DNA, 25 bp, Homo sapien
aagggcatgctcatgggtctgtcca

SEQ ID NO: 2287984 - DNA, 25 bp, Homo sapien
cagaagggcatgctcatgggtctgt

SEQ ID NO: 2287985 - DNA, 25 bp, Homo sapien
gcatgctcatgggtctgtccattct

SEQ ID NO: 2287986 - DNA, 25 bp, Homo sapien
gtcttctggctgtagggttgctcag

SEQ ID NO: 2287987 - DNA, 25 bp, Homo sapien
ttctttaacgatttcctcatatgtc

SEQ ID NO: 2287988 - DNA, 25 bp, Homo sapien
tttaacgatttcctcatatgtcttc

SEQ ID NO: 2287989 - DNA, 25 bp, Homo sapien
tatgtcttctggctgtagggttgct

SEQ ID NO: 2287990 - DNA, 25 bp, Homo sapien
gctgtgtcaaggttgcagccaattt

SEQ ID NO: 2287991 - DNA, 25 bp, Homo sapien
ctgctgtgtcaaggttgcagccaat

SEQ ID NO: 2287992 - DNA, 25 bp, Homo sapien
aaatgctgctgtgtcaaggttgcag

SEQ ID NO: 2287993 - DNA, 25 bp, Homo sapien
tgctgctgtgtcaaggttgcagcca

SEQ ID NO: 2287994 - DNA, 25 bp, Homo sapien
tctactcagccaacagaaacagtac

SEQ ID NO: 2287995 - DNA, 25 bp, Homo sapien
caccagtctctactcagccaacaga

SEQ ID NO: 2287996 - DNA, 25 bp, Homo sapien
tactcagccaacagaaacagtacca

SEQ ID NO: 2287997 - DNA, 25 bp, Homo sapien
ctggagcaccatacagggtttgaga

SEQ ID NO: 2287998 - DNA, 25 bp, Homo sapien
catggtgtatttcaacagactttac

SEQ ID NO: 2287999 - DNA, 25 bp, Homo sapien
gtatttcaacagactttacttcagt

SEQ ID NO: 2288000 - DNA, 25 bp, Homo sapien
gcttcatggtgtatttcaacagact

SEQ ID NO: 2288001 - DNA, 25 bp, Homo sapien
gtgtatttcaacagactttacttca

SEQ ID NO: 2288002 - DNA, 25 bp, Homo sapien
caccagcattgttgccatgacgaac

SEQ ID NO: 2288003 - DNA, 25 bp, Homo sapien
tgtcaccagcattgttgccatgacg

SEQ ID NO: 2288004 - DNA, 25 bp, Homo sapien
gcattgttgccatgacgaacatcct

SEQ ID NO: 2288005 - DNA, 25 bp, Homo sapien
cagcattgttgccatgacgaacatc

SEQ ID NO: 2288006 - DNA, 25 bp, Homo sapien
agtgtgagccgtgtgacaatccagt

SEQ ID NO: 2288007 - DNA, 25 bp, Homo sapien
gtacaagggcatagccagcacttat

SEQ ID NO: 2288008 - DNA, 25 bp, Homo sapien
tgcatgcagtgtgagccgtgtgaca

SEQ ID NO: 2288009 - DNA, 25 bp, Homo sapien
gacaatccagtacaagggcatagcc

SEQ ID NO: 2288010 - DNA, 25 bp, Homo sapien
ttcaagaatttagggccgtcttcca

SEQ ID NO: 2288011 - DNA, 25 bp, Homo sapien
caagaatttagggccgtcttccagc

SEQ ID NO: 2288012 - DNA, 25 bp, Homo sapien
tcaagaatttagggccgtcttccag

SEQ ID NO: 2288013 - DNA, 25 bp, Homo sapien
agaatttagggccgtcttccagctt

SEQ ID NO: 2288014 - DNA, 25 bp, Homo sapien
ctcatatgaccaacagcaaagtgac

SEQ ID NO: 2288015 - DNA, 25 bp, Homo sapien
cctctgctttgatgatacccatggc

SEQ ID NO: 2288016 - DNA, 25 bp, Homo sapien
cctgtcctctgctttgatgataccc

SEQ ID NO: 2288017 - DNA, 25 bp, Homo sapien
tgtctcatatgaccaacagcaaagt

SEQ ID NO: 2288018 - DNA, 25 bp, Homo sapien
tacaagggataatattcactaggct

SEQ ID NO: 2288019 - DNA, 25 bp, Homo sapien
tattcactaggctttggagctttct

SEQ ID NO: 2288020 - DNA, 25 bp, Homo sapien
gggataatattcactaggctttgga

SEQ ID NO: 2288021 - DNA, 25 bp, Homo sapien
gcaggtacaagggataatattcact

SEQ ID NO: 2288022 - DNA, 25 bp, Homo sapien
gggtactactatgacttttgtctac

SEQ ID NO: 2288023 - DNA, 25 bp, Homo sapien
caccacttttctgggtactactatg

SEQ ID NO: 2288024 - DNA, 25 bp, Homo sapien
gacttttgtctactactgctactgc

SEQ ID NO: 2288025 - DNA, 25 bp, Homo sapien
tttctgggtactactatgacttttg

SEQ ID NO: 2288026 - DNA, 25 bp, Homo sapien
cactgaaggtcttaggagtcacatc

SEQ ID NO: 2288027 - DNA, 25 bp, Homo sapien
cagcactgaaggtcttaggagtcac

SEQ ID NO: 2288028 - DNA, 25 bp, Homo sapien
aagcagatctcaaaaccacatacaa

SEQ ID NO: 2288029 - DNA, 25 bp, Homo sapien
tcacagcactgaaggtcttaggagt

SEQ ID NO: 2288030 - DNA, 25 bp, Homo sapien
aggcctggcgcctcacaaaatctct

SEQ ID NO: 2288031 - DNA, 25 bp, Homo sapien
gctttatcttctcttcagtatcctc

SEQ ID NO: 2288032 - DNA, 25 bp, Homo sapien
tctgccacaacagagacctgcttta

SEQ ID NO: 2288033 - DNA, 25 bp, Homo sapien
cacaacagagacctgctttatcttc

SEQ ID NO: 2288034 - DNA, 25 bp, Homo sapien
aagggtttctgccacaacagagacc

SEQ ID NO: 2288035 - DNA, 25 bp, Homo sapien
ttctgcaggtatgtaaaagttgcca

SEQ ID NO: 2288036 - DNA, 25 bp, Homo sapien
tgggttctgcaggtatgtaaaagtt

SEQ ID NO: 2288037 - DNA, 25 bp, Homo sapien
tgacaaatagcaatttgggttctgc

SEQ ID NO: 2288038 - DNA, 25 bp, Homo sapien
cagcttttcttgccagcctacccat

SEQ ID NO: 2288039 - DNA, 25 bp, Homo sapien
gggctcacactattgatacttctgg

SEQ ID NO: 2288040 - DNA, 25 bp, Homo sapien
tgggctcacactattgatacttctg

SEQ ID NO: 2288041 - DNA, 25 bp, Homo sapien
tttgggctcacactattgatacttc

SEQ ID NO: 2288042 - DNA, 25 bp, Homo sapien
gctcacactattgatacttctggtc

SEQ ID NO: 2288043 - DNA, 25 bp, Homo sapien
gcgttgatgatatgacaaagggaaa

SEQ ID NO: 2288044 - DNA, 25 bp, Homo sapien
caccacatttgttgattagttcttt

SEQ ID NO: 2288045 - DNA, 25 bp, Homo sapien
tgagcttaacaaaggttgcgttgat

SEQ ID NO: 2288046 - DNA, 25 bp, Homo sapien
caggtaccccaatgcaatatacggt

SEQ ID NO: 2288047 - DNA, 25 bp, Homo sapien
tctgtcaaggcaacttgcctcttac

SEQ ID NO: 2288048 - DNA, 25 bp, Homo sapien
gtcagaactcaggtacacagggcaa

SEQ ID NO: 2288049 - DNA, 25 bp, Homo sapien
gataagctggtttctcatgttccac

SEQ ID NO: 2288050 - DNA, 25 bp, Homo sapien
taaatgcacagaggattccagacag

SEQ ID NO: 2288051 - DNA, 25 bp, Homo sapien
cacagggcaataagtaggaggcagc

SEQ ID NO: 2288052 - DNA, 25 bp, Homo sapien
agtgccagaatttagttgcataccc

SEQ ID NO: 2288053 - DNA, 25 bp, Homo sapien
gccagaatttagttgcataccccat

SEQ ID NO: 2288054 - DNA, 25 bp, Homo sapien
tgccagaatttagttgcatacccca

SEQ ID NO: 2288055 - DNA, 25 bp, Homo sapien
caagtgccagaatttagttgcatac

SEQ ID NO: 2288056 - DNA, 25 bp, Homo sapien
tgttcttcagcatcgatataaacgg

SEQ ID NO: 2288057 - DNA, 25 bp, Homo sapien
ttcttcagcatcgatataaacggac

SEQ ID NO: 2288058 - DNA, 25 bp, Homo sapien
cttcagcatcgatataaacggacat

SEQ ID NO: 2288059 - DNA, 25 bp, Homo sapien
ttgttcttcagcatcgatataaacg

SEQ ID NO: 2288060 - DNA, 25 bp, Homo sapien
caagtagcttcacttgaaggtggag

SEQ ID NO: 2288061 - DNA, 25 bp, Homo sapien
taaagcaagtagcttcacttgaagg

SEQ ID NO: 2288062 - DNA, 25 bp, Homo sapien
aacccaaataaagcaagtagcttca

SEQ ID NO: 2288063 - DNA, 25 bp, Homo sapien
cccaaataaagcaagtagcttcact

SEQ ID NO: 2288064 - DNA, 25 bp, Homo sapien
tgacagcaaagtcaggcacatgaga

SEQ ID NO: 2288065 - DNA, 25 bp, Homo sapien
ttttgatggcttttcgatccatctc

SEQ ID NO: 2288066 - DNA, 25 bp, Homo sapien
ccatttgcagatttagccatttggt

SEQ ID NO: 2288067 - DNA, 25 bp, Homo sapien
gcagatttagccatttggtaaaact

SEQ ID NO: 2288068 - DNA, 25 bp, Homo sapien
ggcttttcgatccatctctatctcc

SEQ ID NO: 2288069 - DNA, 25 bp, Homo sapien
ttagtgtttttagtgctaggaggag

SEQ ID NO: 2288070 - DNA, 25 bp, Homo sapien
tggcatctggtaattcaaagcactg

SEQ ID NO: 2288071 - DNA, 25 bp, Homo sapien
ggtatcaaggcaacattgtactttg

SEQ ID NO: 2288072 - DNA, 25 bp, Homo sapien
ggatgtaagcccaggtatcaaggca

SEQ ID NO: 2288073 - DNA, 25 bp, Homo sapien
taaatagagaactgttgcacaaaga

SEQ ID NO: 2288074 - DNA, 25 bp, Homo sapien
ttcttatctgacatgtgacaccatc

SEQ ID NO: 2288075 - DNA, 25 bp, Homo sapien
cagacacacatatcgccatgtccag

SEQ ID NO: 2288076 - DNA, 25 bp, Homo sapien
tcattcttacatgtgcagctggcaa

SEQ ID NO: 2288077 - DNA, 25 bp, Homo sapien
gctgcaatagattgagcccattcta

SEQ ID NO: 2288078 - DNA, 25 bp, Homo sapien
ccagctgtcctctattatcacagat

SEQ ID NO: 2288079 - DNA, 25 bp, Homo sapien
gcagccgcctttcgcttcttcaggt

SEQ ID NO: 2288080 - DNA, 25 bp, Homo sapien
tagtattctctgtagcatcagtggg

SEQ ID NO: 2288081 - DNA, 25 bp, Homo sapien
ctgatgaagagctagactaatgtcc

SEQ ID NO: 2288082 - DNA, 25 bp, Homo sapien
agctagactaatgtcccctcttggg

SEQ ID NO: 2288083 - DNA, 25 bp, Homo sapien
cagtaatactctcatggaacattca

SEQ ID NO: 2288084 - DNA, 25 bp, Homo sapien
tcttggggtctgcagtaatactctc

SEQ ID NO: 2288085 - DNA, 25 bp, Homo sapien
gaggctgacatccttgggtagctta

SEQ ID NO: 2288086 - DNA, 25 bp, Homo sapien
tgtgatttgtaatggtgtttgggca

SEQ ID NO: 2288087 - DNA, 25 bp, Homo sapien
tgacagctctcatgacctgatacag

SEQ ID NO: 2288088 - DNA, 25 bp, Homo sapien
cttgcttagggagcccttgttgtga

SEQ ID NO: 2288089 - DNA, 25 bp, Homo sapien
tgttggttgattggccagagaacat

SEQ ID NO: 2288090 - DNA, 25 bp, Homo sapien
cagtcgattccaaagatggtgtctg

SEQ ID NO: 2288091 - DNA, 25 bp, Homo sapien
caattttcaacatcacagtcgattc

SEQ ID NO: 2288092 - DNA, 25 bp, Homo sapien
gagacagcttaaggggttcgacaat

SEQ ID NO: 2288093 - DNA, 25 bp, Homo sapien
tctgacgttgcccagttcagaccat

SEQ ID NO: 2288094 - DNA, 25 bp, Homo sapien
ttgctggaatagctggggactgagc

SEQ ID NO: 2288095 - DNA, 25 bp, Homo sapien
tgaaattgctggaatagctggggac

SEQ ID NO: 2288096 - DNA, 25 bp, Homo sapien
aattgctggaatagctggggactga

SEQ ID NO: 2288097 - DNA, 25 bp, Homo sapien
tctgctacctggaatgaaattgctg

SEQ ID NO: 2288098 - DNA, 25 bp, Homo sapien
tgttagtatccggacctccgaggag

SEQ ID NO: 2288099 - DNA, 25 bp, Homo sapien
ccagaactcctggtgacttgttcac

SEQ ID NO: 2288100 - DNA, 25 bp, Homo sapien
tccgaggagacacagagtgtatggt

SEQ ID NO: 2288101 - DNA, 25 bp, Homo sapien
gtatggtaatgccttccaaagcctg

SEQ ID NO: 2288102 - DNA, 25 bp, Homo sapien
aagatgggatgaaacaggtctgtgt

SEQ ID NO: 2288103 - DNA, 25 bp, Homo sapien
tgggatgaaacaggtctgtgttttt

SEQ ID NO: 2288104 - DNA, 25 bp, Homo sapien
gatgggatgaaacaggtctgtgttt

SEQ ID NO: 2288105 - DNA, 25 bp, Homo sapien
caagatgggatgaaacaggtctgtg

SEQ ID NO: 2288106 - DNA, 25 bp, Homo sapien
tcctttacttcttgtctcatgccta

SEQ ID NO: 2288107 - DNA, 25 bp, Homo sapien
cctttacttcttgtctcatgcctat

SEQ ID NO: 2288108 - DNA, 25 bp, Homo sapien
ttcctttacttcttgtctcatgcct

SEQ ID NO: 2288109 - DNA, 25 bp, Homo sapien
tttacttcttgtctcatgcctattc

SEQ ID NO: 2288110 - DNA, 25 bp, Homo sapien
tgctagaacactgtaaggccagaag

SEQ ID NO: 2288111 - DNA, 25 bp, Homo sapien
taaggcactgcgacaagggtgacaa

SEQ ID NO: 2288112 - DNA, 25 bp, Homo sapien
gacgagcattgcaggaggtattatg

SEQ ID NO: 2288113 - DNA, 25 bp, Homo sapien
tggattggcagccttttcaaaaagg

SEQ ID NO: 2288114 - DNA, 25 bp, Homo sapien
tatttcagcgggcaggcatgctgca

SEQ ID NO: 2288115 - DNA, 25 bp, Homo sapien
aaaggtatttcagcgggcaggcatg

SEQ ID NO: 2288116 - DNA, 25 bp, Homo sapien
ctaattggcaattgaaaggtatttc

SEQ ID NO: 2288117 - DNA, 25 bp, Homo sapien
gcaattgaaaggtatttcagcgggc

SEQ ID NO: 2288118 - DNA, 25 bp, Homo sapien
attctataggaattgattcagccat

SEQ ID NO: 2288119 - DNA, 25 bp, Homo sapien
aggaattctataggaattgattcag

SEQ ID NO: 2288120 - DNA, 25 bp, Homo sapien
ctgtgaggaattctataggaattga

SEQ ID NO: 2288121 - DNA, 25 bp, Homo sapien
tgtgaggaattctataggaattgat

SEQ ID NO: 2288122 - DNA, 25 bp, Homo sapien
ccatgggcaaggctcccgagcgtac

SEQ ID NO: 2288123 - DNA, 25 bp, Homo sapien
gtgaacgctccacagcaatcatcca

SEQ ID NO: 2288124 - DNA, 25 bp, Homo sapien
atgggcaaggctcccgagcgtactc

SEQ ID NO: 2288125 - DNA, 25 bp, Homo sapien
caatgacacccatagtgaacgctcc

SEQ ID NO: 2288126 - DNA, 25 bp, Homo sapien
gaattccaacagggtcattgcggaa

SEQ ID NO: 2288127 - DNA, 25 bp, Homo sapien
cgaattccaacagggtcattgcgga

SEQ ID NO: 2288128 - DNA, 25 bp, Homo sapien
aattccaacagggtcattgcggaaa

SEQ ID NO: 2288129 - DNA, 25 bp, Homo sapien
tctaatctggggaactcggatcctc

SEQ ID NO: 2288130 - DNA, 25 bp, Homo sapien
ccaacactgcgaagctacctctaat

SEQ ID NO: 2288131 - DNA, 25 bp, Homo sapien
actgcgaagctacctctaatctggg

SEQ ID NO: 2288132 - DNA, 25 bp, Homo sapien
acagtcgatggtggagaacaggccc

SEQ ID NO: 2288133 - DNA, 25 bp, Homo sapien
tggggtcctccagcaacaagggcac

SEQ ID NO: 2288134 - DNA, 25 bp, Homo sapien
ctccagcaacaagggcacattttgg

SEQ ID NO: 2288135 - DNA, 25 bp, Homo sapien
tcctccagcaacaagggcacatttt

SEQ ID NO: 2288136 - DNA, 25 bp, Homo sapien
ggtcctccagcaacaagggcacatt

SEQ ID NO: 2288137 - DNA, 25 bp, Homo sapien
tcatgctcatcatactgtttggtgc

SEQ ID NO: 2288138 - DNA, 25 bp, Homo sapien
gagttttatgattcttgatcaaatg

SEQ ID NO: 2288139 - DNA, 25 bp, Homo sapien
gccttcactgggagttttatgattc

SEQ ID NO: 2288140 - DNA, 25 bp, Homo sapien
tttggtgccagtggctactggatgc

SEQ ID NO: 2288141 - DNA, 25 bp, Homo sapien
gagaggtaaggtgagaatgttcagg

SEQ ID NO: 2288142 - DNA, 25 bp, Homo sapien
agaggtaaggtgagaatgttcaggc

SEQ ID NO: 2288143 - DNA, 25 bp, Homo sapien
gaggtaaggtgagaatgttcaggca

SEQ ID NO: 2288144 - DNA, 25 bp, Homo sapien
aggtaaggtgagaatgttcaggcac

SEQ ID NO: 2288145 - DNA, 25 bp, Homo sapien
cactagtttgtacatagattgacca

SEQ ID NO: 2288146 - DNA, 25 bp, Homo sapien
gggaacccatagctcagtcactagt

SEQ ID NO: 2288147 - DNA, 25 bp, Homo sapien
tatagttctgctgtgataaatgaga

SEQ ID NO: 2288148 - DNA, 25 bp, Homo sapien
cttgaaatgcgaaagatatagttct

SEQ ID NO: 2288149 - DNA, 25 bp, Homo sapien
catgctacagtggtccccgttaagg

SEQ ID NO: 2288150 - DNA, 25 bp, Homo sapien
gttaaggatgctagctttcaactca

SEQ ID NO: 2288151 - DNA, 25 bp, Homo sapien
gcaggatcattttgactcatgctac

SEQ ID NO: 2288152 - DNA, 25 bp, Homo sapien
cagtggtccccgttaaggatgctag

SEQ ID NO: 2288153 - DNA, 25 bp, Homo sapien
taggggctctccactccaatatgtt

SEQ ID NO: 2288154 - DNA, 25 bp, Homo sapien
aatagtcttctactactcgccagta

SEQ ID NO: 2288155 - DNA, 25 bp, Homo sapien
ggctctccactccaatatgttggtt

SEQ ID NO: 2288156 - DNA, 25 bp, Homo sapien
agtcttctactactcgccagtaggg

SEQ ID NO: 2288157 - DNA, 25 bp, Homo sapien
tgcttacgtagaagcatattttggt

SEQ ID NO: 2288158 - DNA, 25 bp, Homo sapien
cagtaaattttgcttacgtagaagc

SEQ ID NO: 2288159 - DNA, 25 bp, Homo sapien
tagaagcatattttggtccaatgtg

SEQ ID NO: 2288160 - DNA, 25 bp, Homo sapien
cttcagtaaattttgcttacgtaga

SEQ ID NO: 2288161 - DNA, 25 bp, Homo sapien
tcgtcacccaaccactagacttcag

SEQ ID NO: 2288162 - DNA, 25 bp, Homo sapien
gtcacccaaccactagacttcagaa

SEQ ID NO: 2288163 - DNA, 25 bp, Homo sapien
agcctcgtcacccaaccactagact

SEQ ID NO: 2288164 - DNA, 25 bp, Homo sapien
gcctcgtcacccaaccactagactt

SEQ ID NO: 2288165 - DNA, 25 bp, Homo sapien
gggtgagactggagttaaaggttga

SEQ ID NO: 2288166 - DNA, 25 bp, Homo sapien
gactggagttaaaggttgaactaca

SEQ ID NO: 2288167 - DNA, 25 bp, Homo sapien
gtgagactggagttaaaggttgaac

SEQ ID NO: 2288168 - DNA, 25 bp, Homo sapien
tcaaaggcctgtggactcatagggg

SEQ ID NO: 2288169 - DNA, 25 bp, Homo sapien
gacagctgttgtgaagtgctcatcg

SEQ ID NO: 2288170 - DNA, 25 bp, Homo sapien
ttatgattccatgcaattgctgctg

SEQ ID NO: 2288171 - DNA, 25 bp, Homo sapien
tcaccaccattttacgagatagata

SEQ ID NO: 2288172 - DNA, 25 bp, Homo sapien
gtcacagagcaattttgatgcagac

SEQ ID NO: 2288173 - DNA, 25 bp, Homo sapien
actcggtataagccttcagaaacct

SEQ ID NO: 2288174 - DNA, 25 bp, Homo sapien
tcactcggtataagccttcagaaac

SEQ ID NO: 2288175 - DNA, 25 bp, Homo sapien
cactcggtataagccttcagaaacc

SEQ ID NO: 2288176 - DNA, 25 bp, Homo sapien
ctcactcggtataagccttcagaaa

SEQ ID NO: 2288177 - DNA, 25 bp, Homo sapien
tggtcagtgtaaatttctatgggtt

SEQ ID NO: 2288178 - DNA, 25 bp, Homo sapien
ttggtcagtgtaaatttctatgggt

SEQ ID NO: 2288179 - DNA, 25 bp, Homo sapien
tttggtcagtgtaaatttctatggg

SEQ ID NO: 2288180 - DNA, 25 bp, Homo sapien
tgtataccacagagtgaaagtcaga

SEQ ID NO: 2288181 - DNA, 25 bp, Homo sapien
tatacttggccatggtcacctatca

SEQ ID NO: 2288182 - DNA, 25 bp, Homo sapien
catcatcatgcctagtactgtctgg

SEQ ID NO: 2288183 - DNA, 25 bp, Homo sapien
tactgtctggctagagaagagacta

SEQ ID NO: 2288184 - DNA, 25 bp, Homo sapien
cacttgggccattattcagtctctg

SEQ ID NO: 2288185 - DNA, 25 bp, Homo sapien
gaccactcaggttaatggaaacaca

SEQ ID NO: 2288186 - DNA, 25 bp, Homo sapien
atcgatctgtcgtgccccacttggg

SEQ ID NO: 2288187 - DNA, 25 bp, Homo sapien
tccgaggttgtgaagggaccactca

SEQ ID NO: 2288188 - DNA, 25 bp, Homo sapien
tagctcccggatcgataatgtgtct

SEQ ID NO: 2288189 - DNA, 25 bp, Homo sapien
taccattaatgttattgagtatgca

SEQ ID NO: 2288190 - DNA, 25 bp, Homo sapien
tctttaattcttcagacccagatgt

SEQ ID NO: 2288191 - DNA, 25 bp, Homo sapien
aattttcaatgcttacaggtagctc

SEQ ID NO: 2288192 - DNA, 25 bp, Homo sapien
ggcacagactgtcatatgctcggtc

SEQ ID NO: 2288193 - DNA, 25 bp, Homo sapien
cgccttggtaaaggaggtgtatcca

SEQ ID NO: 2288194 - DNA, 25 bp, Homo sapien
gctcggtctagctgatcaatgaatc

SEQ ID NO: 2288195 - DNA, 25 bp, Homo sapien
cagtagtgaagaaagccgccttggt

SEQ ID NO: 2288196 - DNA, 25 bp, Homo sapien
tggaggccctactaaccctgctggt

SEQ ID NO: 2288197 - DNA, 25 bp, Homo sapien
ccctgctggtggtctaacatcctgt

SEQ ID NO: 2288198 - DNA, 25 bp, Homo sapien
gtatgctccctccaattcaatcagg

SEQ ID NO: 2288199 - DNA, 25 bp, Homo sapien
tacaacagtcacatgtggaggccct

SEQ ID NO: 2288200 - DNA, 25 bp, Homo sapien
ggtaactcagtatgttcggaccagc

SEQ ID NO: 2288201 - DNA, 25 bp, Homo sapien
aattctgtctgttaatgtttttgaa

SEQ ID NO: 2288202 - DNA, 25 bp, Homo sapien
agggaggaaagagtatgacaagaaa

SEQ ID NO: 2288203 - DNA, 25 bp, Homo sapien
gaggtaactcagtatgttcggacca

SEQ ID NO: 2288204 - DNA, 25 bp, Homo sapien
gtgcacctgcttttagcatgaggaa

SEQ ID NO: 2288205 - DNA, 25 bp, Homo sapien
ggtgcacctgcttttagcatgagga

SEQ ID NO: 2288206 - DNA, 25 bp, Homo sapien
agcatgaggaatccttcttttgagg

SEQ ID NO: 2288207 - DNA, 25 bp, Homo sapien
cggtgcacctgcttttagcatgagg

SEQ ID NO: 2288208 - DNA, 25 bp, Homo sapien
catctgctgtcgcagctcgatggtg

SEQ ID NO: 2288209 - DNA, 25 bp, Homo sapien
gtccatctgctgtcgcagctcgatg

SEQ ID NO: 2288210 - DNA, 25 bp, Homo sapien
caagtgctaacttggggagtccatc

SEQ ID NO: 2288211 - DNA, 25 bp, Homo sapien
gggagtccatctgctgtcgcagctc

SEQ ID NO: 2288212 - DNA, 25 bp, Homo sapien
cacggtcctctaaacacctttccat

SEQ ID NO: 2288213 - DNA, 25 bp, Homo sapien
aatagcccaagagaacctcaaacag

SEQ ID NO: 2288214 - DNA, 25 bp, Homo sapien
atatttaatcgcatcacttctgaag

SEQ ID NO: 2288215 - DNA, 25 bp, Homo sapien
cctcctgcatttggcgtctggacca

SEQ ID NO: 2288216 - DNA, 25 bp, Homo sapien
gtttttcctatcacctcaagaacca

SEQ ID NO: 2288217 - DNA, 25 bp, Homo sapien
aactcaacagccattcttcttttgc

SEQ ID NO: 2288218 - DNA, 25 bp, Homo sapien
tcaacagccattcttcttttgctat

SEQ ID NO: 2288219 - DNA, 25 bp, Homo sapien
tgcaactcaacagccattcttcttt

SEQ ID NO: 2288220 - DNA, 25 bp, Homo sapien
ctgcaactcaacagccattcttctt

SEQ ID NO: 2288221 - DNA, 25 bp, Homo sapien
tgcacttctgtggccactcacacag

SEQ ID NO: 2288222 - DNA, 25 bp, Homo sapien
ctgcacttctgtggccactcacaca

SEQ ID NO: 2288223 - DNA, 25 bp, Homo sapien
ttctgtggccactcacacagaccat

SEQ ID NO: 2288224 - DNA, 25 bp, Homo sapien
cacttctgtggccactcacacagac

SEQ ID NO: 2288225 - DNA, 25 bp, Homo sapien
ctggtttgaggagaacagccagcac

SEQ ID NO: 2288226 - DNA, 25 bp, Homo sapien
gaggagaacagccagcacttgcagc

SEQ ID NO: 2288227 - DNA, 25 bp, Homo sapien
gagaacagccagcacttgcagcctg

SEQ ID NO: 2288228 - DNA, 25 bp, Homo sapien
ggtttgaggagaacagccagcactt

SEQ ID NO: 2288229 - DNA, 25 bp, Homo sapien
ctcctctgaatgaacctctatgtca

SEQ ID NO: 2288230 - DNA, 25 bp, Homo sapien
tctgaatgaacctctatgtcatcat

SEQ ID NO: 2288231 - DNA, 25 bp, Homo sapien
ctgattcagtagttggttcgcaagt

SEQ ID NO: 2288232 - DNA, 25 bp, Homo sapien
agtattccaggtatttgcatccccg

SEQ ID NO: 2288233 - DNA, 25 bp, Homo sapien
tctccctttgcacttcaactctctt

SEQ ID NO: 2288234 - DNA, 25 bp, Homo sapien
ttctccctttgcacttcaactctct

SEQ ID NO: 2288235 - DNA, 25 bp, Homo sapien
tagtgatgatgtaagaaaacctttt

SEQ ID NO: 2288236 - DNA, 25 bp, Homo sapien
catcttactaacacgttagtgatga

SEQ ID NO: 2288237 - DNA, 25 bp, Homo sapien
cacgttagtgatgatgtaagaaaac

SEQ ID NO: 2288238 - DNA, 25 bp, Homo sapien
tactaacacgttagtgatgatgtaa

SEQ ID NO: 2288239 - DNA, 25 bp, Homo sapien
taaagactttaataggtagggcatg

SEQ ID NO: 2288240 - DNA, 25 bp, Homo sapien
gcaattctgagtttcctaacctccc

SEQ ID NO: 2288241 - DNA, 25 bp, Homo sapien
tagaaactttagaactagcttgccc

SEQ ID NO: 2288242 - DNA, 25 bp, Homo sapien
tctctcttgactgctgcgatgtgag

SEQ ID NO: 2288243 - DNA, 25 bp, Homo sapien
catgatggagcaaaccactgagacc

SEQ ID NO: 2288244 - DNA, 25 bp, Homo sapien
aaatgtgacagtttttaggccccag

SEQ ID NO: 2288245 - DNA, 25 bp, Homo sapien
tattgctagggactttgacaccaac

SEQ ID NO: 2288246 - DNA, 25 bp, Homo sapien
gcccctgagcatctggtgtgttgta

SEQ ID NO: 2288247 - DNA, 25 bp, Homo sapien
tctaaactggcagaagtcaaagatg

SEQ ID NO: 2288248 - DNA, 25 bp, Homo sapien
tgctgctgttacctggacaattctg

SEQ ID NO: 2288249 - DNA, 25 bp, Homo sapien
tcttctttcactgttcaggtgcatg

SEQ ID NO: 2288250 - DNA, 25 bp, Homo sapien
taagacatgttttatggcctaccag

SEQ ID NO: 2288251 - DNA, 25 bp, Homo sapien
tgccccacgaggtgtcctgtccagg

SEQ ID NO: 2288252 - DNA, 25 bp, Homo sapien
cccagtgccccacgaggtgtcctgt

SEQ ID NO: 2288253 - DNA, 25 bp, Homo sapien
aggctaaagcttcctaatgctaaca

SEQ ID NO: 2288254 - DNA, 25 bp, Homo sapien
ttctgctctctaggctaaagcttcc

SEQ ID NO: 2288255 - DNA, 25 bp, Homo sapien
cagctctgacttaactggctctgaa

SEQ ID NO: 2288256 - DNA, 25 bp, Homo sapien
taactggctctgaaacctgactcac

SEQ ID NO: 2288257 - DNA, 25 bp, Homo sapien
caggctccagctctgacttaactgg

SEQ ID NO: 2288258 - DNA, 25 bp, Homo sapien
cttaactggctctgaaacctgactc

SEQ ID NO: 2288259 - DNA, 25 bp, Homo sapien
gctactacttagttccagagtcttc

SEQ ID NO: 2288260 - DNA, 25 bp, Homo sapien
tctgttctgagcattaggctactac

SEQ ID NO: 2288261 - DNA, 25 bp, Homo sapien
gccatttgtactataaatagggtca

SEQ ID NO: 2288262 - DNA, 25 bp, Homo sapien
tccatactggccatttgtactataa

SEQ ID NO: 2288263 - DNA, 25 bp, Homo sapien
tgtttattaagtggcctattggacc

SEQ ID NO: 2288264 - DNA, 25 bp, Homo sapien
tattggaccttagctagtgacagaa

SEQ ID NO: 2288265 - DNA, 25 bp, Homo sapien
tcaccagttatacccaaagtggtct

SEQ ID NO: 2288266 - DNA, 25 bp, Homo sapien
tgtagttactggaacttcaccagtt

SEQ ID NO: 2288267 - DNA, 25 bp, Homo sapien
tcactggaactcatgccagatgtgt

SEQ ID NO: 2288268 - DNA, 25 bp, Homo sapien
tggaactcatgccagatgtgttagc

SEQ ID NO: 2288269 - DNA, 25 bp, Homo sapien
ctcatgccagatgtgttagctgctg

SEQ ID NO: 2288270 - DNA, 25 bp, Homo sapien
gggtcactggaactcatgccagatg

SEQ ID NO: 2288271 - DNA, 25 bp, Homo sapien
ctttttgctccccaattgttggcat

SEQ ID NO: 2288272 - DNA, 25 bp, Homo sapien
agtcattcaatttgatctgtgaacc

SEQ ID NO: 2288273 - DNA, 25 bp, Homo sapien
tcactttgctttacactgtctgctt

SEQ ID NO: 2288274 - DNA, 25 bp, Homo sapien
gtcatatcctaagtctgaattcatt

SEQ ID NO: 2288275 - DNA, 25 bp, Homo sapien
ctaaacatctgtagtggactccagc

SEQ ID NO: 2288276 - DNA, 25 bp, Homo sapien
aacatctgtagtggactccagccat

SEQ ID NO: 2288277 - DNA, 25 bp, Homo sapien
catttgactgttggaggccatgaga

SEQ ID NO: 2288278 - DNA, 25 bp, Homo sapien
tctgtgtggaaagctgcaatctgca

SEQ ID NO: 2288279 - DNA, 25 bp, Homo sapien
tgggtgctgcaccttttgctacagg

SEQ ID NO: 2288280 - DNA, 25 bp, Homo sapien
gctgcaatccatgccagctcttggg

SEQ ID NO: 2288281 - DNA, 25 bp, Homo sapien
caacagtagtgacaaggttgctgtc

SEQ ID NO: 2288282 - DNA, 25 bp, Homo sapien
acagaacattgctctgtttacagcc

SEQ ID NO: 2288283 - DNA, 25 bp, Homo sapien
tcacctatacccacagaacattgct

SEQ ID NO: 2288284 - DNA, 25 bp, Homo sapien
tacagccactttgcagtatcttcca

SEQ ID NO: 2288285 - DNA, 25 bp, Homo sapien
caaagacacttaagagtatcatttc

SEQ ID NO: 2288286 - DNA, 25 bp, Homo sapien
ccaggtgcccgtaagcactgagatg

SEQ ID NO: 2288287 - DNA, 25 bp, Homo sapien
cagatcccaggtgcccgtaagcact

SEQ ID NO: 2288288 - DNA, 25 bp, Homo sapien
cttgaacaatcttgggaaaacctgc

SEQ ID NO: 2288289 - DNA, 25 bp, Homo sapien
acctgcagatcccaggtgcccgtaa

SEQ ID NO: 2288290 - DNA, 25 bp, Homo sapien
tcacaagaggcattgctcttcagat

SEQ ID NO: 2288291 - DNA, 25 bp, Homo sapien
aagaggcattgctcttcagatgtag

SEQ ID NO: 2288292 - DNA, 25 bp, Homo sapien
cacaagaggcattgctcttcagatg

SEQ ID NO: 2288293 - DNA, 25 bp, Homo sapien
caagaggcattgctcttcagatgta

SEQ ID NO: 2288294 - DNA, 25 bp, Homo sapien
tttggatgggtctttaacatcgtcc

SEQ ID NO: 2288295 - DNA, 25 bp, Homo sapien
gattataaccttctatgaggatcct

SEQ ID NO: 2288296 - DNA, 25 bp, Homo sapien
ccatggagtgagagtggttgcagca

SEQ ID NO: 2288297 - DNA, 25 bp, Homo sapien
tgagaagttcctcttggatcaggga

SEQ ID NO: 2288298 - DNA, 25 bp, Homo sapien
atgttttttgggctggtcagtctga

SEQ ID NO: 2288299 - DNA, 25 bp, Homo sapien
gtaggtgaacctttctcatggagca

SEQ ID NO: 2288300 - DNA, 25 bp, Homo sapien
cccaatccgagtcacggcatcaaat

SEQ ID NO: 2288301 - DNA, 25 bp, Homo sapien
ctgaggtcgtaggtgaacctttctc

SEQ ID NO: 2288302 - DNA, 25 bp, Homo sapien
ggccatctgggtgaatacgtgcaag

SEQ ID NO: 2288303 - DNA, 25 bp, Homo sapien
aggcctgacattcctgccttcttat

SEQ ID NO: 2288304 - DNA, 25 bp, Homo sapien
atctgggtgaatacgtgcaagtcac

SEQ ID NO: 2288305 - DNA, 25 bp, Homo sapien
cagaggcctgacattcctgccttct

SEQ ID NO: 2288306 - DNA, 25 bp, Homo sapien
tcagtccctgggtgtgtcagttctc

SEQ ID NO: 2288307 - DNA, 25 bp, Homo sapien
gtgttccagcctagagcccacaact

SEQ ID NO: 2288308 - DNA, 25 bp, Homo sapien
tcagttctcctgtgctgtgttccag

SEQ ID NO: 2288309 - DNA, 25 bp, Homo sapien
aaagtagtggtgatagctgattccc

SEQ ID NO: 2288310 - DNA, 25 bp, Homo sapien
ctgacgcatatatcttcctgaaatg

SEQ ID NO: 2288311 - DNA, 25 bp, Homo sapien
tttcttttcaagagtcaaatacgct

SEQ ID NO: 2288312 - DNA, 25 bp, Homo sapien
tcctgaaatgaaacacgatctcatt

SEQ ID NO: 2288313 - DNA, 25 bp, Homo sapien
cttcctgaaatgaaacacgatctca

SEQ ID NO: 2288314 - DNA, 25 bp, Homo sapien
aatacgtggataattctggactaac

SEQ ID NO: 2288315 - DNA, 25 bp, Homo sapien
ctctaggacattaccattaatggaa

SEQ ID NO: 2288316 - DNA, 25 bp, Homo sapien
ggaggtgagtgaacatgatagtaaa

SEQ ID NO: 2288317 - DNA, 25 bp, Homo sapien
taagccaatactcaacaaaacagca

SEQ ID NO: 2288318 - DNA, 25 bp, Homo sapien
attgcatagtttttgtaacagaaac

SEQ ID NO: 2288319 - DNA, 25 bp, Homo sapien
ctctgctccaaatatctccttgata

SEQ ID NO: 2288320 - DNA, 25 bp, Homo sapien
ctgctccaaatatctccttgataat

SEQ ID NO: 2288321 - DNA, 25 bp, Homo sapien
gactctgctccaaatatctccttga

SEQ ID NO: 2288322 - DNA, 25 bp, Homo sapien
ttgactctgctccaaatatctcctt

SEQ ID NO: 2288323 - DNA, 25 bp, Homo sapien
gatccgtttgccaagaatatgccat

SEQ ID NO: 2288324 - DNA, 25 bp, Homo sapien
ccaggagagttcacggcttttagaa

SEQ ID NO: 2288325 - DNA, 25 bp, Homo sapien
cattccgggttgaagagagcctttc

SEQ ID NO: 2288326 - DNA, 25 bp, Homo sapien
tctttcggcatgaagtcacttgaga

SEQ ID NO: 2288327 - DNA, 25 bp, Homo sapien
tgctgctttgaggtacttccactag

SEQ ID NO: 2288328 - DNA, 25 bp, Homo sapien
cagactcgtattgctgctttgaggt

SEQ ID NO: 2288329 - DNA, 25 bp, Homo sapien
tattgctgctttgaggtacttccac

SEQ ID NO: 2288330 - DNA, 25 bp, Homo sapien
aaaaagaggccagactcgtattgct

SEQ ID NO: 2288331 - DNA, 25 bp, Homo sapien
ttccatggaaacatctcctccatca

SEQ ID NO: 2288332 - DNA, 25 bp, Homo sapien
ttattccatggaaacatctcctcca

SEQ ID NO: 2288333 - DNA, 25 bp, Homo sapien
ccatggaaacatctcctccatcagg

SEQ ID NO: 2288334 - DNA, 25 bp, Homo sapien
atggaaacatctcctccatcagggg

SEQ ID NO: 2288335 - DNA, 25 bp, Homo sapien
tatgtatattaaacttggtcttaga

SEQ ID NO: 2288336 - DNA, 25 bp, Homo sapien
cccagaattgaaattaacatcagct

SEQ ID NO: 2288337 - DNA, 25 bp, Homo sapien
aatgaagaggttgtgttgagttatc

SEQ ID NO: 2288338 - DNA, 25 bp, Homo sapien
tagaaaagagctgatacggaaatgc

SEQ ID NO: 2288339 - DNA, 25 bp, Homo sapien
gcagaatttctgcaattagatcttt

SEQ ID NO: 2288340 - DNA, 25 bp, Homo sapien
tcagagccacatacacttagaatat

SEQ ID NO: 2288341 - DNA, 25 bp, Homo sapien
ggagtagctggtcatttgtgcaaaa

SEQ ID NO: 2288342 - DNA, 25 bp, Homo sapien
tctgcaattagatctttgacaagat

SEQ ID NO: 2288343 - DNA, 25 bp, Homo sapien
cacgtatttctgttatgaatgagac

SEQ ID NO: 2288344 - DNA, 25 bp, Homo sapien
gagaagtctcagctatccaagttat

SEQ ID NO: 2288345 - DNA, 25 bp, Homo sapien
tccaagttatagtaatgccttctgc

SEQ ID NO: 2288346 - DNA, 25 bp, Homo sapien
gaatatattctcatgggatacatcc

SEQ ID NO: 2288347 - DNA, 25 bp, Homo sapien
cctcccataatattcccaaatacat

SEQ ID NO: 2288348 - DNA, 25 bp, Homo sapien
atcctcccataatattcccaaatac

SEQ ID NO: 2288349 - DNA, 25 bp, Homo sapien
tcctcccataatattcccaaataca

SEQ ID NO: 2288350 - DNA, 25 bp, Homo sapien
ctgaaggaggaaaaaatgaacacaa

SEQ ID NO: 2288351 - DNA, 25 bp, Homo sapien
aggaggaaaaaatgaacacaatcat

SEQ ID NO: 2288352 - DNA, 25 bp, Homo sapien
tgaaggaggaaaaaatgaacacaat

SEQ ID NO: 2288353 - DNA, 25 bp, Homo sapien
gaaggaggaaaaaatgaacacaatc

SEQ ID NO: 2288354 - DNA, 25 bp, Homo sapien
tttgtggctccccaaacagtggtcg

SEQ ID NO: 2288355 - DNA, 25 bp, Homo sapien
ctggagcttccctacttttctgcag

SEQ ID NO: 2288356 - DNA, 25 bp, Homo sapien
tgcaggtggagctgaataacagatt

SEQ ID NO: 2288357 - DNA, 25 bp, Homo sapien
caggtggagctgaataacagattta

SEQ ID NO: 2288358 - DNA, 25 bp, Homo sapien
gtggagctgaataacagatttatct

SEQ ID NO: 2288359 - DNA, 25 bp, Homo sapien
ttctcttcgttctataggctgcaaa

SEQ ID NO: 2288360 - DNA, 25 bp, Homo sapien
tgcaaagtttataatcagggtcaga

SEQ ID NO: 2288361 - DNA, 25 bp, Homo sapien
taggctgcaaagtttataatcaggg

SEQ ID NO: 2288362 - DNA, 25 bp, Homo sapien
cgttctataggctgcaaagtttata

SEQ ID NO: 2288363 - DNA, 25 bp, Homo sapien
caaattagaatcatacattttatct

SEQ ID NO: 2288364 - DNA, 25 bp, Homo sapien
agcagcatccaaattagaatcatac

SEQ ID NO: 2288365 - DNA, 25 bp, Homo sapien
cagcatccaaattagaatcatacat

SEQ ID NO: 2288366 - DNA, 25 bp, Homo sapien
gcagcatccaaattagaatcataca

SEQ ID NO: 2288367 - DNA, 25 bp, Homo sapien
ctggatactttccaaatatgcataa

SEQ ID NO: 2288368 - DNA, 25 bp, Homo sapien
agcagaacttttgctttgccctgaa

SEQ ID NO: 2288369 - DNA, 25 bp, Homo sapien
tgaattaaccctctggacccctgca

SEQ ID NO: 2288370 - DNA, 25 bp, Homo sapien
ctctggacccctgcaactgcacact

SEQ ID NO: 2288371 - DNA, 25 bp, Homo sapien
agaacttttgctttgccctgaatta

SEQ ID NO: 2288372 - DNA, 25 bp, Homo sapien
cttgccatccagtgcttgatttttt

SEQ ID NO: 2288373 - DNA, 25 bp, Homo sapien
aaaagagaagggctgaaatcaaagc

SEQ ID NO: 2288374 - DNA, 25 bp, Homo sapien
ggctgaaatcaaagcccttgccatc

SEQ ID NO: 2288375 - DNA, 25 bp, Homo sapien
ttttttgatgatccaatacggtgtt

SEQ ID NO: 2288376 - DNA, 25 bp, Homo sapien
gttttcaataggtatttcaggtgga

SEQ ID NO: 2288377 - DNA, 25 bp, Homo sapien
tatttcaggtggaagtcatattttc

SEQ ID NO: 2288378 - DNA, 25 bp, Homo sapien
tctgatgagtgttaagagacattgt

SEQ ID NO: 2288379 - DNA, 25 bp, Homo sapien
aagtcatattttctgatgagtgtta

SEQ ID NO: 2288380 - DNA, 25 bp, Homo sapien
cagatcatgttattccttcgcacaa

SEQ ID NO: 2288381 - DNA, 25 bp, Homo sapien
ccttttacatagaggagaggagaca

SEQ ID NO: 2288382 - DNA, 25 bp, Homo sapien
tattgctagtagatgcaaactttgg

SEQ ID NO: 2288383 - DNA, 25 bp, Homo sapien
taaatcactagtagaatgtcagatc

SEQ ID NO: 2288384 - DNA, 25 bp, Homo sapien
tgggtaacagccttgtctcccctgc

SEQ ID NO: 2288385 - DNA, 25 bp, Homo sapien
atgttttgaacatttgaaaaggtgg

SEQ ID NO: 2288386 - DNA, 25 bp, Homo sapien
tgaaaaatgttttgaacatttgaaa

SEQ ID NO: 2288387 - DNA, 25 bp, Homo sapien
catttgaaaaggtgggtaacagcct

SEQ ID NO: 2288388 - DNA, 25 bp, Homo sapien
ctgtagataacaagattcacatctt

SEQ ID NO: 2288389 - DNA, 25 bp, Homo sapien
gataacaagattcacatcttacaat

SEQ ID NO: 2288390 - DNA, 25 bp, Homo sapien
tagataacaagattcacatcttaca

SEQ ID NO: 2288391 - DNA, 25 bp, Homo sapien
tgtagataacaagattcacatctta

SEQ ID NO: 2288392 - DNA, 25 bp, Homo sapien
ttgtttggtttccacacaccctaga

SEQ ID NO: 2288393 - DNA, 25 bp, Homo sapien
ttagacttagttcatttactgcatc

SEQ ID NO: 2288394 - DNA, 25 bp, Homo sapien
caccctagaacactgcatatttttt

SEQ ID NO: 2288395 - DNA, 25 bp, Homo sapien
gacttagttcatttactgcatctgt

SEQ ID NO: 2288396 - DNA, 25 bp, Homo sapien
taatcgatggccatgaggtgacaag

SEQ ID NO: 2288397 - DNA, 25 bp, Homo sapien
ggttcatatttgtcaggaggctggc

SEQ ID NO: 2288398 - DNA, 25 bp, Homo sapien
tattggcgttgtgggaaagattctc

SEQ ID NO: 2288399 - DNA, 25 bp, Homo sapien
taacagatgggaagacgtgtcgaca

SEQ ID NO: 2288400 - DNA, 25 bp, Homo sapien
ctgaagtctctgaactttgataaaa

SEQ ID NO: 2288401 - DNA, 25 bp, Homo sapien
ttttgctgaagtctctgaactttga

SEQ ID NO: 2288402 - DNA, 25 bp, Homo sapien
tttgctgaagtctctgaactttgat

SEQ ID NO: 2288403 - DNA, 25 bp, Homo sapien
tgctgaagtctctgaactttgataa

SEQ ID NO: 2288404 - DNA, 25 bp, Homo sapien
gaagtgcatctaggtacatttacag

SEQ ID NO: 2288405 - DNA, 25 bp, Homo sapien
tctggaatgttgtgtgctgcataca

SEQ ID NO: 2288406 - DNA, 25 bp, Homo sapien
cccgggatttagataggaagtgcat

SEQ ID NO: 2288407 - DNA, 25 bp, Homo sapien
catttacaggctgaaaatctgcata

SEQ ID NO: 2288408 - DNA, 25 bp, Homo sapien
tttttgccctcagtaataaccacga

SEQ ID NO: 2288409 - DNA, 25 bp, Homo sapien
tacgtattcctgctgtcgagaccca

SEQ ID NO: 2288410 - DNA, 25 bp, Homo sapien
taaccacgacatggactacgtattc

SEQ ID NO: 2288411 - DNA, 25 bp, Homo sapien
gctgtcgagacccatgtaacaattt

SEQ ID NO: 2288412 - DNA, 25 bp, Homo sapien
cagaggatataggacttgtttgttg

SEQ ID NO: 2288413 - DNA, 25 bp, Homo sapien
acttgtttgttgttcttctaccaga

SEQ ID NO: 2288414 - DNA, 25 bp, Homo sapien
tcagaggatataggacttgtttgtt

SEQ ID NO: 2288415 - DNA, 25 bp, Homo sapien
tataggacttgtttgttgttcttct

SEQ ID NO: 2288416 - DNA, 25 bp, Homo sapien
ttccctgtagcctgctgcaccatgg

SEQ ID NO: 2288417 - DNA, 25 bp, Homo sapien
tgctgcaccatggagttggcattag

SEQ ID NO: 2288418 - DNA, 25 bp, Homo sapien
tggcaccagtggcagttgagctggt

SEQ ID NO: 2288419 - DNA, 25 bp, Homo sapien
gcaccatggagttggcattagtggc

SEQ ID NO: 2288420 - DNA, 25 bp, Homo sapien
tccagcatatgtaagccaacaggta

SEQ ID NO: 2288421 - DNA, 25 bp, Homo sapien
agcatatgtaagccaacaggtaaaa

SEQ ID NO: 2288422 - DNA, 25 bp, Homo sapien
ccagcatatgtaagccaacaggtaa

SEQ ID NO: 2288423 - DNA, 25 bp, Homo sapien
ttccagcatatgtaagccaacaggt

SEQ ID NO: 2288424 - DNA, 25 bp, Homo sapien
gtttcattccagttgaccaagaaaa

SEQ ID NO: 2288425 - DNA, 25 bp, Homo sapien
tgcacaggcaatcccaaacagtttt

SEQ ID NO: 2288426 - DNA, 25 bp, Homo sapien
ttacagtgagcatggattcccttgg

SEQ ID NO: 2288427 - DNA, 25 bp, Homo sapien
ttcccttggaagtgactttatttca

SEQ ID NO: 2288428 - DNA, 25 bp, Homo sapien
gaagacaagtccacgccagtaaatt

SEQ ID NO: 2288429 - DNA, 25 bp, Homo sapien
tagatcttacaaatactgcaggtaa

SEQ ID NO: 2288430 - DNA, 25 bp, Homo sapien
tattctacaaaaaatggtagatctt

SEQ ID NO: 2288431 - DNA, 25 bp, Homo sapien
aggaaagacacttgtatagctgctc

SEQ ID NO: 2288432 - DNA, 25 bp, Homo sapien
ggaaactcactcatgagaaggaaag

SEQ ID NO: 2288433 - DNA, 25 bp, Homo sapien
cattaactaaaatgtctgaagtcca

SEQ ID NO: 2288434 - DNA, 25 bp, Homo sapien
aagctttgaagatgtgccacacact

SEQ ID NO: 2288435 - DNA, 25 bp, Homo sapien
gaaaggagttacaggtcccatggaa

SEQ ID NO: 2288436 - DNA, 25 bp, Homo sapien
caattcagcacaagatttggaggaa

SEQ ID NO: 2288437 - DNA, 25 bp, Homo sapien
gggagtcgttggcaaacctcaagag

SEQ ID NO: 2288438 - DNA, 25 bp, Homo sapien
agggtctatggtgcctgtgagagcc

SEQ ID NO: 2288439 - DNA, 25 bp, Homo sapien
aactgggagtcgttggcaaacctca

SEQ ID NO: 2288440 - DNA, 25 bp, Homo sapien
ttggcaaacctcaagagggtctatg

SEQ ID NO: 2288441 - DNA, 25 bp, Homo sapien
ctgaacagcatagacccgagaatgg

SEQ ID NO: 2288442 - DNA, 25 bp, Homo sapien
tgaacagcatagacccgagaatgga

SEQ ID NO: 2288443 - DNA, 25 bp, Homo sapien
gaacagcatagacccgagaatggat

SEQ ID NO: 2288444 - DNA, 25 bp, Homo sapien
aacagcatagacccgagaatggatt

SEQ ID NO: 2288445 - DNA, 25 bp, Homo sapien
gtcaccggggatggctgacttacat

SEQ ID NO: 2288446 - DNA, 25 bp, Homo sapien
catcccacactcctggagttatcat

SEQ ID NO: 2288447 - DNA, 25 bp, Homo sapien
tgacttacatcccacactcctggag

SEQ ID NO: 2288448 - DNA, 25 bp, Homo sapien
gggatggctgacttacatcccacac

SEQ ID NO: 2288449 - DNA, 25 bp, Homo sapien
gaaggagacaaaggatgatcagaga

SEQ ID NO: 2288450 - DNA, 25 bp, Homo sapien
gcagtggaaggagataaccgagggc

SEQ ID NO: 2288451 - DNA, 25 bp, Homo sapien
accgagggcagtaacaccaaagcca

SEQ ID NO: 2288452 - DNA, 25 bp, Homo sapien
gacaaaggatgatcagagagcagtg

SEQ ID NO: 2288453 - DNA, 25 bp, Homo sapien
agcatccagggagaatatgtccact

SEQ ID NO: 2288454 - DNA, 25 bp, Homo sapien
atgtccactgtgcacggcagcgggc

SEQ ID NO: 2288455 - DNA, 25 bp, Homo sapien
gactggaacctttgagaattgtctt

SEQ ID NO: 2288456 - DNA, 25 bp, Homo sapien
ggctgcagactggaacctttgagaa

SEQ ID NO: 2288457 - DNA, 25 bp, Homo sapien
tttctgtgaaagtctggcaatatgt

SEQ ID NO: 2288458 - DNA, 25 bp, Homo sapien
ggtttcatatactcccacccagtag

SEQ ID NO: 2288459 - DNA, 25 bp, Homo sapien
caagattacttctattctcttcaga

SEQ ID NO: 2288460 - DNA, 25 bp, Homo sapien
tacactcctttagtggctcttcaag

SEQ ID NO: 2288461 - DNA, 25 bp, Homo sapien
gcagtagaagcgataaaaccataaa

SEQ ID NO: 2288462 - DNA, 25 bp, Homo sapien
tacccaggactaaaggaagggagca

SEQ ID NO: 2288463 - DNA, 25 bp, Homo sapien
gaagggagcagttttcattattgca

SEQ ID NO: 2288464 - DNA, 25 bp, Homo sapien
cctctaaaggttgagaaaatgtcca

SEQ ID NO: 2288465 - DNA, 25 bp, Homo sapien
gctttgtgcgttcctactgcttaga

SEQ ID NO: 2288466 - DNA, 25 bp, Homo sapien
aaatctgctttgtgcgttcctactg

SEQ ID NO: 2288467 - DNA, 25 bp, Homo sapien
ctactgcttagacttcttagttcag

SEQ ID NO: 2288468 - DNA, 25 bp, Homo sapien
ttcagtcccagaccatttttcaaat

SEQ ID NO: 2288469 - DNA, 25 bp, Homo sapien
aaaggcaacaatgaagcttgaatcg

SEQ ID NO: 2288470 - DNA, 25 bp, Homo sapien
gaatcgattgactctttttcatgaa

SEQ ID NO: 2288471 - DNA, 25 bp, Homo sapien
gctaacaataaactaagccttcagc

SEQ ID NO: 2288472 - DNA, 25 bp, Homo sapien
agggtgttcggtccatgttgatgcc

SEQ ID NO: 2288473 - DNA, 25 bp, Homo sapien
ggttgtctaattgttgaactgccac

SEQ ID NO: 2288474 - DNA, 25 bp, Homo sapien
tgaactagctgtgggagatattcca

SEQ ID NO: 2288475 - DNA, 25 bp, Homo sapien
tgggagatattccagtagttcatca

SEQ ID NO: 2288476 - DNA, 25 bp, Homo sapien
gaactgccactttacgaatttcttg

SEQ ID NO: 2288477 - DNA, 25 bp, Homo sapien
tactaccgtaactcagtcccaaatc

SEQ ID NO: 2288478 - DNA, 25 bp, Homo sapien
tgttactaccgtaactcagtcccaa

SEQ ID NO: 2288479 - DNA, 25 bp, Homo sapien
tgactgttactaccgtaactcagtc

SEQ ID NO: 2288480 - DNA, 25 bp, Homo sapien
tcaaaactgactgttactaccgtaa

SEQ ID NO: 2288481 - DNA, 25 bp, Homo sapien
ggagtagaagttgcactaaaggact

SEQ ID NO: 2288482 - DNA, 25 bp, Homo sapien
ctgcaaggagcggtggagtagaagt

SEQ ID NO: 2288483 - DNA, 25 bp, Homo sapien
tagaagttgcactaaaggactctca

SEQ ID NO: 2288484 - DNA, 25 bp, Homo sapien
aagttgcactaaaggactctcaagg

SEQ ID NO: 2288485 - DNA, 25 bp, Homo sapien
taaagacgatgggcaacctggatgc

SEQ ID NO: 2288486 - DNA, 25 bp, Homo sapien
agtaaagacgatgggcaacctggat

SEQ ID NO: 2288487 - DNA, 25 bp, Homo sapien
aaagacgatgggcaacctggatgct

SEQ ID NO: 2288488 - DNA, 25 bp, Homo sapien
cagtaaagacgatgggcaacctgga

SEQ ID NO: 2288489 - DNA, 25 bp, Homo sapien
gattttcatgagaagagtgatctca

SEQ ID NO: 2288490 - DNA, 25 bp, Homo sapien
cagtctccgaccaagttcctgtgta

SEQ ID NO: 2288491 - DNA, 25 bp, Homo sapien
taataacatgctagaggaattgttc

SEQ ID NO: 2288492 - DNA, 25 bp, Homo sapien
tatgagtaacatttcttgaagcaga

SEQ ID NO: 2288493 - DNA, 25 bp, Homo sapien
agttttggtttcactagtgatatcc

SEQ ID NO: 2288494 - DNA, 25 bp, Homo sapien
ttttggtttcactagtgatatccat

SEQ ID NO: 2288495 - DNA, 25 bp, Homo sapien
ccagttttggtttcactagtgatat

SEQ ID NO: 2288496 - DNA, 25 bp, Homo sapien
cagttttggtttcactagtgatatc

SEQ ID NO: 2288497 - DNA, 25 bp, Homo sapien
gggattctatcctgtgtatacattt

SEQ ID NO: 2288498 - DNA, 25 bp, Homo sapien
caagttgctgaaggtagggattcta

SEQ ID NO: 2288499 - DNA, 25 bp, Homo sapien
ggaaaccttgttaccactatctgcc

SEQ ID NO: 2288500 - DNA, 25 bp, Homo sapien
tgcttttggtttaagcaagttgctg

SEQ ID NO: 2288501 - DNA, 25 bp, Homo sapien
ccttagcttcattgccaggaagaat

SEQ ID NO: 2288502 - DNA, 25 bp, Homo sapien
tacattttacactactgaggtctca

SEQ ID NO: 2288503 - DNA, 25 bp, Homo sapien
catactagtggaagctgttgcacct

SEQ ID NO: 2288504 - DNA, 25 bp, Homo sapien
taaataataccatccaacagttaag

SEQ ID NO: 2288505 - DNA, 25 bp, Homo sapien
cactctggtttatcataatgtcaga

SEQ ID NO: 2288506 - DNA, 25 bp, Homo sapien
ataatgtcagatataatgtgcatgt

SEQ ID NO: 2288507 - DNA, 25 bp, Homo sapien
tgtcagatataatgtgcatgtaata

SEQ ID NO: 2288508 - DNA, 25 bp, Homo sapien
tcagatataatgtgcatgtaatacc

SEQ ID NO: 2288509 - DNA, 25 bp, Homo sapien
taactccagaatgcaagcttaaagc

SEQ ID NO: 2288510 - DNA, 25 bp, Homo sapien
acagagttggagctctggaccagca

SEQ ID NO: 2288511 - DNA, 25 bp, Homo sapien
aagaaaagtccttgcaagagggtgg

SEQ ID NO: 2288512 - DNA, 25 bp, Homo sapien
gatgattccgtaggcaagaatgctg

SEQ ID NO: 2288513 - DNA, 25 bp, Homo sapien
tgtcctgggcttccaaatagtcctt

SEQ ID NO: 2288514 - DNA, 25 bp, Homo sapien
gtccttcccactccagctgaacaca

SEQ ID NO: 2288515 - DNA, 25 bp, Homo sapien
gtcaaaaactccaccttgttctgct

SEQ ID NO: 2288516 - DNA, 25 bp, Homo sapien
tttcctgatccccaagaaagccttg

SEQ ID NO: 2288517 - DNA, 25 bp, Homo sapien
gctttgaccgtgaacccacagtggg

SEQ ID NO: 2288518 - DNA, 25 bp, Homo sapien
cacagtgggccttggtggagaatct

SEQ ID NO: 2288519 - DNA, 25 bp, Homo sapien
tataggtagaggttgagccagagcc

SEQ ID NO: 2288520 - DNA, 25 bp, Homo sapien
catggtaaccccaaggtagccagct

SEQ ID NO: 2288521 - DNA, 25 bp, Homo sapien
acagaattggagagcagctagtagc

SEQ ID NO: 2288522 - DNA, 25 bp, Homo sapien
agaattggagagcagctagtagctt

SEQ ID NO: 2288523 - DNA, 25 bp, Homo sapien
ccagaattttgataagtttctgctc

SEQ ID NO: 2288524 - DNA, 25 bp, Homo sapien
agaattttgataagtttctgctcct

SEQ ID NO: 2288525 - DNA, 25 bp, Homo sapien
tcttgaaagaactcttctagtctgc

SEQ ID NO: 2288526 - DNA, 25 bp, Homo sapien
ttctagtctgccaatttctttcttc

SEQ ID NO: 2288527 - DNA, 25 bp, Homo sapien
cttttatacatagggcagggttcag

SEQ ID NO: 2288528 - DNA, 25 bp, Homo sapien
caatcccttttatacatagggcagg

SEQ ID NO: 2288529 - DNA, 25 bp, Homo sapien
taatgaggcatgagttctgactaca

SEQ ID NO: 2288530 - DNA, 25 bp, Homo sapien
gatgtaccacaagactggcactata

SEQ ID NO: 2288531 - DNA, 25 bp, Homo sapien
taacagctttcacactatcattgca

SEQ ID NO: 2288532 - DNA, 25 bp, Homo sapien
cacaatgggttgtctgatgtaccac

SEQ ID NO: 2288533 - DNA, 25 bp, Homo sapien
taagataccttttacaatgcctgac

SEQ ID NO: 2288534 - DNA, 25 bp, Homo sapien
gcctgacactaatcaggtactttga

SEQ ID NO: 2288535 - DNA, 25 bp, Homo sapien
caggaactaacggatataagatacc

SEQ ID NO: 2288536 - DNA, 25 bp, Homo sapien
acatctttgtgatagattcaggaac

SEQ ID NO: 2288537 - DNA, 25 bp, Homo sapien
tcggattagcattgatgaaagtaat

SEQ ID NO: 2288538 - DNA, 25 bp, Homo sapien
aatcttcaatggcaaagcattagat

SEQ ID NO: 2288539 - DNA, 25 bp, Homo sapien
tttgcccatcggattagcattgatg

SEQ ID NO: 2288540 - DNA, 25 bp, Homo sapien
atgctgatgtttttgcccatcggat

SEQ ID NO: 2288541 - DNA, 25 bp, Homo sapien
taaatgatcatttgcatatccaagc

SEQ ID NO: 2288542 - DNA, 25 bp, Homo sapien
ccatcacttgaataagctgcagaac

SEQ ID NO: 2288543 - DNA, 25 bp, Homo sapien
tatccaagccttcctgcagccaaat

SEQ ID NO: 2288544 - DNA, 25 bp, Homo sapien
gcagaacaagcatatcctgacgaag

SEQ ID NO: 2288545 - DNA, 25 bp, Homo sapien
gaatcaaatcaattggctagtacga

SEQ ID NO: 2288546 - DNA, 25 bp, Homo sapien
cattgtaaggtattaagtggcgagt

SEQ ID NO: 2288547 - DNA, 25 bp, Homo sapien
agtatttagagtgggacacttggca

SEQ ID NO: 2288548 - DNA, 25 bp, Homo sapien
cacttggcatggaagtaggagccct

SEQ ID NO: 2288549 - DNA, 25 bp, Homo sapien
aacaatctcatggtagcaaggataa

SEQ ID NO: 2288550 - DNA, 25 bp, Homo sapien
aaagtagggtaagatgcaaggaata

SEQ ID NO: 2288551 - DNA, 25 bp, Homo sapien
tctcatggtagcaaggataaatgac

SEQ ID NO: 2288552 - DNA, 25 bp, Homo sapien
tgagaaaaagtagggtaagatgcaa

SEQ ID NO: 2288553 - DNA, 25 bp, Homo sapien
tatctggagaaaaggtgattcatgt

SEQ ID NO: 2288554 - DNA, 25 bp, Homo sapien
gataggaaagcattaggtcacttac

SEQ ID NO: 2288555 - DNA, 25 bp, Homo sapien
ttcagcattttaggataggaaagca

SEQ ID NO: 2288556 - DNA, 25 bp, Homo sapien
tatgtagcattattctatttcagca

SEQ ID NO: 2288557 - DNA, 25 bp, Homo sapien
gccttggttacattccatgattata

SEQ ID NO: 2288558 - DNA, 25 bp, Homo sapien
ctaaaagattcagccttggttacat

SEQ ID NO: 2288559 - DNA, 25 bp, Homo sapien
tattaactaaaagattcagccttgg

SEQ ID NO: 2288560 - DNA, 25 bp, Homo sapien
agccttggttacattccatgattat

SEQ ID NO: 2288561 - DNA, 25 bp, Homo sapien
taatctgcctttaagtggttgtgct

SEQ ID NO: 2288562 - DNA, 25 bp, Homo sapien
ggtcacagcatcaggtaccatctgc

SEQ ID NO: 2288563 - DNA, 25 bp, Homo sapien
cctatcagtccagaatggcgatgaa

SEQ ID NO: 2288564 - DNA, 25 bp, Homo sapien
tggcgatgaatctttgctagggtca

SEQ ID NO: 2288565 - DNA, 25 bp, Homo sapien
taaaatgatctgcaacaggacaaac

SEQ ID NO: 2288566 - DNA, 25 bp, Homo sapien
tatttaaaatgatctgcaacaggac

SEQ ID NO: 2288567 - DNA, 25 bp, Homo sapien
ttatttaaaatgatctgcaacagga

SEQ ID NO: 2288568 - DNA, 25 bp, Homo sapien
tttaaaatgatctgcaacaggacaa

SEQ ID NO: 2288569 - DNA, 25 bp, Homo sapien
atcagaatatctaatgaaccagagc

SEQ ID NO: 2288570 - DNA, 25 bp, Homo sapien
tctaatgaaccagagcatattctta

SEQ ID NO: 2288571 - DNA, 25 bp, Homo sapien
tatctaatgaaccagagcatattct

SEQ ID NO: 2288572 - DNA, 25 bp, Homo sapien
gaatatctaatgaaccagagcatat

SEQ ID NO: 2288573 - DNA, 25 bp, Homo sapien
tcaatatgaaacatgtggcccgact

SEQ ID NO: 2288574 - DNA, 25 bp, Homo sapien
ccagcacaggagtagaaaaagttcc

SEQ ID NO: 2288575 - DNA, 25 bp, Homo sapien
tgtgcatgacctaagaattttccaa

SEQ ID NO: 2288576 - DNA, 25 bp, Homo sapien
tgtgacggtcacatactcccaggat

SEQ ID NO: 2288577 - DNA, 25 bp, Homo sapien
tctgagtgtcgaaatagaatttcca

SEQ ID NO: 2288578 - DNA, 25 bp, Homo sapien
catttgtttatatgcaggatgtgaa

SEQ ID NO: 2288579 - DNA, 25 bp, Homo sapien
ccttcataatcataactaagattta

SEQ ID NO: 2288580 - DNA, 25 bp, Homo sapien
tttgaaagtttatgggagcctcaga

SEQ ID NO: 2288581 - DNA, 25 bp, Homo sapien
tagaccagctgaggaatcagcattc

SEQ ID NO: 2288582 - DNA, 25 bp, Homo sapien
ttagaccagctgaggaatcagcatt

SEQ ID NO: 2288583 - DNA, 25 bp, Homo sapien
gaccagctgaggaatcagcattcat

SEQ ID NO: 2288584 - DNA, 25 bp, Homo sapien
cttagaccagctgaggaatcagcat

SEQ ID NO: 2288585 - DNA, 25 bp, Homo sapien
gaggagaatggcttcaaagcacaga

SEQ ID NO: 2288586 - DNA, 25 bp, Homo sapien
ccaggaaatttgtgaaggcgagcaa

SEQ ID NO: 2288587 - DNA, 25 bp, Homo sapien
aagtatggtcatctgcttaaagcag

SEQ ID NO: 2288588 - DNA, 25 bp, Homo sapien
cctggagattttgaggcaaggttat

SEQ ID NO: 2288589 - DNA, 25 bp, Homo sapien
aactgtagagtgagatgagaaaagc

SEQ ID NO: 2288590 - DNA, 25 bp, Homo sapien
gaaaagcactaagacaaatcttggg

SEQ ID NO: 2288591 - DNA, 25 bp, Homo sapien
taggtctagtatcccaaaggtgtat

SEQ ID NO: 2288592 - DNA, 25 bp, Homo sapien
caatcttttggtaacttggtagaag

SEQ ID NO: 2288593 - DNA, 25 bp, Homo sapien
taccagactgtgatgtggcacttca

SEQ ID NO: 2288594 - DNA, 25 bp, Homo sapien
tgtcaggactcaagtaacaacatgg

SEQ ID NO: 2288595 - DNA, 25 bp, Homo sapien
acagactacctagggatgtcaggac

SEQ ID NO: 2288596 - DNA, 25 bp, Homo sapien
catgaaatacatgctgctaaagcag

SEQ ID NO: 2288597 - DNA, 25 bp, Homo sapien
ctctgaagtaaaaatgaaaggagct

SEQ ID NO: 2288598 - DNA, 25 bp, Homo sapien
tgaagtaaaaatgaaaggagctcgg

SEQ ID NO: 2288599 - DNA, 25 bp, Homo sapien
tctgaagtaaaaatgaaaggagctc

SEQ ID NO: 2288600 - DNA, 25 bp, Homo sapien
ctgaagtaaaaatgaaaggagctcg

SEQ ID NO: 2288601 - DNA, 25 bp, Homo sapien
tcccaccctctgtaataaagtattc

SEQ ID NO: 2288602 - DNA, 25 bp, Homo sapien
taatattataagcacgacagcaaag

SEQ ID NO: 2288603 - DNA, 25 bp, Homo sapien
cagcaaagttccacaaaatcttgaa

SEQ ID NO: 2288604 - DNA, 25 bp, Homo sapien
ctgataatattataagcacgacagc

SEQ ID NO: 2288605 - DNA, 25 bp, Homo sapien
cttgtggacgaagattattatacac

SEQ ID NO: 2288606 - DNA, 25 bp, Homo sapien
taaaatgacttgttgcttccaggtc

SEQ ID NO: 2288607 - DNA, 25 bp, Homo sapien
tcttgaattccacttagctcaggca

SEQ ID NO: 2288608 - DNA, 25 bp, Homo sapien
tctgtgtcttgtggacgaagattat

SEQ ID NO: 2288609 - DNA, 25 bp, Homo sapien
tggacatagttcaagtagaacaacc

SEQ ID NO: 2288610 - DNA, 25 bp, Homo sapien
catagttcaagtagaacaaccaatt

SEQ ID NO: 2288611 - DNA, 25 bp, Homo sapien
gacatagttcaagtagaacaaccaa

SEQ ID NO: 2288612 - DNA, 25 bp, Homo sapien
tctggacatagttcaagtagaacaa

SEQ ID NO: 2288613 - DNA, 25 bp, Homo sapien
tcatgaaacagaaatccctgagcca

SEQ ID NO: 2288614 - DNA, 25 bp, Homo sapien
caccattggagtgggaagcaatttc

SEQ ID NO: 2288615 - DNA, 25 bp, Homo sapien
gccaagtgaaattccccaagtgtgt

SEQ ID NO: 2288616 - DNA, 25 bp, Homo sapien
agtgtgtacgacatccccatgaagc

SEQ ID NO: 2288617 - DNA, 25 bp, Homo sapien
tcctggtggtagcatagagatagca

SEQ ID NO: 2288618 - DNA, 25 bp, Homo sapien
tattccggataaaaggatgagtgcc

SEQ ID NO: 2288619 - DNA, 25 bp, Homo sapien
tcaacttcagccaacgcaggctctg

SEQ ID NO: 2288620 - DNA, 25 bp, Homo sapien
tctgctgatgcttgaggtattccgg

SEQ ID NO: 2288621 - DNA, 25 bp, Homo sapien
ccaacagttaggatgtaagaagtct

SEQ ID NO: 2288622 - DNA, 25 bp, Homo sapien
tgagactttatggtcagcccatggt

SEQ ID NO: 2288623 - DNA, 25 bp, Homo sapien
ggggcagactttcactcaaatccat

SEQ ID NO: 2288624 - DNA, 25 bp, Homo sapien
agatgaagggtgagactttatggtc

SEQ ID NO: 2288625 - DNA, 25 bp, Homo sapien
tattcaatttaacagggaaacactc

SEQ ID NO: 2288626 - DNA, 25 bp, Homo sapien
taacagggaaacactccagactttc

SEQ ID NO: 2288627 - DNA, 25 bp, Homo sapien
gatcaagttattcaatttaacaggg

SEQ ID NO: 2288628 - DNA, 25 bp, Homo sapien
tgcaagtgtgtggatcaagttattc

SEQ ID NO: 2288629 - DNA, 25 bp, Homo sapien
atttggcagggcttatggctgacat

SEQ ID NO: 2288630 - DNA, 25 bp, Homo sapien
tagatttggcagggcttatggctga

SEQ ID NO: 2288631 - DNA, 25 bp, Homo sapien
gatttggcagggcttatggctgaca

SEQ ID NO: 2288632 - DNA, 25 bp, Homo sapien
agtagatttggcagggcttatggct

SEQ ID NO: 2288633 - DNA, 25 bp, Homo sapien
gttgctctttcaatcgacctagttg

SEQ ID NO: 2288634 - DNA, 25 bp, Homo sapien
ctgaaccctaaaattgttgctcttt

SEQ ID NO: 2288635 - DNA, 25 bp, Homo sapien
tcgacctagttgtactcagcaaaca

SEQ ID NO: 2288636 - DNA, 25 bp, Homo sapien
gaaccctaaaattgttgctctttca

SEQ ID NO: 2288637 - DNA, 25 bp, Homo sapien
ttttctgtcaggcttgtttcgttgt

SEQ ID NO: 2288638 - DNA, 25 bp, Homo sapien
tgaagttggctgtgaagttttgaaa

SEQ ID NO: 2288639 - DNA, 25 bp, Homo sapien
tttcgttgttgctgtgtgtcacctg

SEQ ID NO: 2288640 - DNA, 25 bp, Homo sapien
ttttgaaaactgctcaaatgatttt

SEQ ID NO: 2288641 - DNA, 25 bp, Homo sapien
acggcttggctaccatgcttggagg

SEQ ID NO: 2288642 - DNA, 25 bp, Homo sapien
tgataatttcatgccaccccactga

SEQ ID NO: 2288643 - DNA, 25 bp, Homo sapien
catggaggatagtaaaggacagtca

SEQ ID NO: 2288644 - DNA, 25 bp, Homo sapien
tctgcttctttggtaggaaccacgg

SEQ ID NO: 2288645 - DNA, 25 bp, Homo sapien
tcttctgggttcactagagacacca

SEQ ID NO: 2288646 - DNA, 25 bp, Homo sapien
gctgtctacgtatacccttttagga

SEQ ID NO: 2288647 - DNA, 25 bp, Homo sapien
cattttagcaagtgacatatgcgtc

SEQ ID NO: 2288648 - DNA, 25 bp, Homo sapien
gatgggttggacttcattaagacca

SEQ ID NO: 2288649 - DNA, 25 bp, Homo sapien
aaaggtaggtgccaccaatgaggaa

SEQ ID NO: 2288650 - DNA, 25 bp, Homo sapien
tatctgttccatgtaatgatttaga

SEQ ID NO: 2288651 - DNA, 25 bp, Homo sapien
gtttgtaacttcatgtgatacattt

SEQ ID NO: 2288652 - DNA, 25 bp, Homo sapien
gatttagatctctgaatcttctgtg

SEQ ID NO: 2288653 - DNA, 25 bp, Homo sapien
gagaagttaagcagcacttttgacc

SEQ ID NO: 2288654 - DNA, 25 bp, Homo sapien
caggactgccaggtaggcttctggt

SEQ ID NO: 2288655 - DNA, 25 bp, Homo sapien
taggcttctggtgaatctgcctctc

SEQ ID NO: 2288656 - DNA, 25 bp, Homo sapien
agcacttttgaccactttgcagaca

SEQ ID NO: 2288657 - DNA, 25 bp, Homo sapien
ccacgatcattctctacaatgccag

SEQ ID NO: 2288658 - DNA, 25 bp, Homo sapien
acaatgccagaggtgtctgtcatga

SEQ ID NO: 2288659 - DNA, 25 bp, Homo sapien
gaagaggattcccacgatcattctc

SEQ ID NO: 2288660 - DNA, 25 bp, Homo sapien
tgccagaggtgtctgtcatgacctt

SEQ ID NO: 2288661 - DNA, 25 bp, Homo sapien
tcttcaactgtttgttgcacagcct

SEQ ID NO: 2288662 - DNA, 25 bp, Homo sapien
tacacaggtgatgattcttcaactg

SEQ ID NO: 2288663 - DNA, 25 bp, Homo sapien
ctaggtacacaggtgatgattcttc

SEQ ID NO: 2288664 - DNA, 25 bp, Homo sapien
aactgtttgttgcacagcctcagag

SEQ ID NO: 2288665 - DNA, 25 bp, Homo sapien
catgtgtttcactagtatggtcagc

SEQ ID NO: 2288666 - DNA, 25 bp, Homo sapien
tcctcgtaggatatgactaactgca

SEQ ID NO: 2288667 - DNA, 25 bp, Homo sapien
cagcttcacatcctcgtaggatatg

SEQ ID NO: 2288668 - DNA, 25 bp, Homo sapien
taactgcaccttaggcttcttgtct

SEQ ID NO: 2288669 - DNA, 25 bp, Homo sapien
ttagcaccttctggaatgcgaacat

SEQ ID NO: 2288670 - DNA, 25 bp, Homo sapien
tagcaccttctggaatgcgaacatt

SEQ ID NO: 2288671 - DNA, 25 bp, Homo sapien
cttccttcaaagtctcaaataattt

SEQ ID NO: 2288672 - DNA, 25 bp, Homo sapien
tagcatcgtatcctcttccttcaaa

SEQ ID NO: 2288673 - DNA, 25 bp, Homo sapien
tttattaaagaaatcactagctgtc

SEQ ID NO: 2288674 - DNA, 25 bp, Homo sapien
gctgtctcctcatcaatacttctca

SEQ ID NO: 2288675 - DNA, 25 bp, Homo sapien
taaaattcaacatgtgcactgggcg

SEQ ID NO: 2288676 - DNA, 25 bp, Homo sapien
tttcattgtaagtggggtccgtaca

SEQ ID NO: 2288677 - DNA, 25 bp, Homo sapien
ttcaacatgtgcactgggcgcagag

SEQ ID NO: 2288678 - DNA, 25 bp, Homo sapien
tggggtccgtacattttggaacaga

SEQ ID NO: 2288679 - DNA, 25 bp, Homo sapien
cagccataagaaaaggaacacaaat

SEQ ID NO: 2288680 - DNA, 25 bp, Homo sapien
tatacccaaggtagtatatgataaa

SEQ ID NO: 2288681 - DNA, 25 bp, Homo sapien
gcttgccttagaaagaagttaggga

SEQ ID NO: 2288682 - DNA, 25 bp, Homo sapien
gagaataaatgtaggggcttgcctt

SEQ ID NO: 2288683 - DNA, 25 bp, Homo sapien
ctaccttctgacaaataactaaatg

SEQ ID NO: 2288684 - DNA, 25 bp, Homo sapien
aataatttttacctataggcatgag

SEQ ID NO: 2288685 - DNA, 25 bp, Homo sapien
ctataggcatgagttaagtctttac

SEQ ID NO: 2288686 - DNA, 25 bp, Homo sapien
tactaccttctgacaaataactaaa

SEQ ID NO: 2288687 - DNA, 25 bp, Homo sapien
ctaagtagtgaacgtagcacccaat

SEQ ID NO: 2288688 - DNA, 25 bp, Homo sapien
tgggcttctaatgatcatgttgcct

SEQ ID NO: 2288689 - DNA, 25 bp, Homo sapien
taatgatcatgttgcctaagtagtg

SEQ ID NO: 2288690 - DNA, 25 bp, Homo sapien
tgttgcctaagtagtgaacgtagca

SEQ ID NO: 2288691 - DNA, 25 bp, Homo sapien
ttagctgctaatatcttataccctg

SEQ ID NO: 2288692 - DNA, 25 bp, Homo sapien
tagctgctaatatcttataccctgg

SEQ ID NO: 2288693 - DNA, 25 bp, Homo sapien
aaattagctgctaatatcttatacc

SEQ ID NO: 2288694 - DNA, 25 bp, Homo sapien
gctgctaatatcttataccctggaa

SEQ ID NO: 2288695 - DNA, 25 bp, Homo sapien
acaataagcattaagacatgtcctt

SEQ ID NO: 2288696 - DNA, 25 bp, Homo sapien
gcattaagacatgtccttggagctc

SEQ ID NO: 2288697 - DNA, 25 bp, Homo sapien
cattaagacatgtccttggagctct

SEQ ID NO: 2288698 - DNA, 25 bp, Homo sapien
taagcattaagacatgtccttggag

SEQ ID NO: 2288699 - DNA, 25 bp, Homo sapien
tacagagtcggatgttaattgctcc

SEQ ID NO: 2288700 - DNA, 25 bp, Homo sapien
catttttctttatcgagtgggacac

SEQ ID NO: 2288701 - DNA, 25 bp, Homo sapien
ggatgttaattgctcccacaaatac

SEQ ID NO: 2288702 - DNA, 25 bp, Homo sapien
tatcgagtgggacactacagagtcg

SEQ ID NO: 2288703 - DNA, 25 bp, Homo sapien
caaattatactgtttcctaatggat

SEQ ID NO: 2288704 - DNA, 25 bp, Homo sapien
tcaaattatactgtttcctaatgga

SEQ ID NO: 2288705 - DNA, 25 bp, Homo sapien
aaattatactgtttcctaatggata

SEQ ID NO: 2288706 - DNA, 25 bp, Homo sapien
aattatactgtttcctaatggatac

SEQ ID NO: 2288707 - DNA, 25 bp, Homo sapien
tgacaacaaagatgccttacttatg

SEQ ID NO: 2288708 - DNA, 25 bp, Homo sapien
actgcttttaactgtaggcacacaa

SEQ ID NO: 2288709 - DNA, 25 bp, Homo sapien
tctgtgtccttaataccctgtgctg

SEQ ID NO: 2288710 - DNA, 25 bp, Homo sapien
tacacatcaaatttcatgcaatcag

SEQ ID NO: 2288711 - DNA, 25 bp, Homo sapien
gatcttggagtccaggcataaccaa

SEQ ID NO: 2288712 - DNA, 25 bp, Homo sapien
caagtttaaatcgtgcctctgggtg

SEQ ID NO: 2288713 - DNA, 25 bp, Homo sapien
ctacgaaagtaggttcagaagcagg

SEQ ID NO: 2288714 - DNA, 25 bp, Homo sapien
ggattgtttgccctggtaatggtga

SEQ ID NO: 2288715 - DNA, 25 bp, Homo sapien
gagtctatacctttctccgggcatg

SEQ ID NO: 2288716 - DNA, 25 bp, Homo sapien
aattgatataggcttctctgtgcca

SEQ ID NO: 2288717 - DNA, 25 bp, Homo sapien
aaaaactaaaggtgccgaggcgctg

SEQ ID NO: 2288718 - DNA, 25 bp, Homo sapien
ggaggagttgcaacaaaacttccca

SEQ ID NO: 2288719 - DNA, 25 bp, Homo sapien
tagatatgtatcagagctgggcagg

SEQ ID NO: 2288720 - DNA, 25 bp, Homo sapien
gatgtatgagtagatatgtatcaga

SEQ ID NO: 2288721 - DNA, 25 bp, Homo sapien
tatgagtagatatgtatcagagctg

SEQ ID NO: 2288722 - DNA, 25 bp, Homo sapien
gagtagatatgtatcagagctgggc

SEQ ID NO: 2288723 - DNA, 25 bp, Homo sapien
catcagaatttttgtccggtgtaag

SEQ ID NO: 2288724 - DNA, 25 bp, Homo sapien
tgtaagctccttctgcactcgtgta

SEQ ID NO: 2288725 - DNA, 25 bp, Homo sapien
ttttgtccggtgtaagctccttctg

SEQ ID NO: 2288726 - DNA, 25 bp, Homo sapien
agtaatttatttcgtctttgctgac

SEQ ID NO: 2288727 - DNA, 25 bp, Homo sapien
gggtaggcccttcaactctcatggt

SEQ ID NO: 2288728 - DNA, 25 bp, Homo sapien
taaaaaggaggttgctgaactagac

SEQ ID NO: 2288729 - DNA, 25 bp, Homo sapien
aaaaagaacactgaagagctgtgcc

SEQ ID NO: 2288730 - DNA, 25 bp, Homo sapien
gctgtgcctgccacttatcatgaga

SEQ ID NO: 2288731 - DNA, 25 bp, Homo sapien
caatctgagagttttggtctaggcc

SEQ ID NO: 2288732 - DNA, 25 bp, Homo sapien
taaggccaatgggtaacaacagagt

SEQ ID NO: 2288733 - DNA, 25 bp, Homo sapien
tccaaaatcttatgggtaaggccaa

SEQ ID NO: 2288734 - DNA, 25 bp, Homo sapien
gagttgaccactgagggcttattgt

SEQ ID NO: 2288735 - DNA, 25 bp, Homo sapien
tgaccaccactctgactttgaccca

SEQ ID NO: 2288736 - DNA, 25 bp, Homo sapien
caggaccatgaccaccactctgact

SEQ ID NO: 2288737 - DNA, 25 bp, Homo sapien
ctccaggaccatgaccaccactctg

SEQ ID NO: 2288738 - DNA, 25 bp, Homo sapien
gaccaccactctgactttgacccat

SEQ ID NO: 2288739 - DNA, 25 bp, Homo sapien
gagttgttagagcttgtcatccttc

SEQ ID NO: 2288740 - DNA, 25 bp, Homo sapien
tgagttgttagagcttgtcatcctt

SEQ ID NO: 2288741 - DNA, 25 bp, Homo sapien
gttgttagagcttgtcatccttctt

SEQ ID NO: 2288742 - DNA, 25 bp, Homo sapien
cttgagttgttagagcttgtcatcc

SEQ ID NO: 2288743 - DNA, 25 bp, Homo sapien
tagttggtacaggaggttcatattt

SEQ ID NO: 2288744 - DNA, 25 bp, Homo sapien
tggtacaggaggttcatatttcttt

SEQ ID NO: 2288745 - DNA, 25 bp, Homo sapien
agttggtacaggaggttcatatttc

SEQ ID NO: 2288746 - DNA, 25 bp, Homo sapien
gttggtacaggaggttcatatttct

SEQ ID NO: 2288747 - DNA, 25 bp, Homo sapien
ggcagcatctggtccctttgttttc

SEQ ID NO: 2288748 - DNA, 25 bp, Homo sapien
cacttttgatcttttcccttcttgc

SEQ ID NO: 2288749 - DNA, 25 bp, Homo sapien
ttccaagattcctactgacattggg

SEQ ID NO: 2288750 - DNA, 25 bp, Homo sapien
gacacgatggcatgattgtcatcaa

SEQ ID NO: 2288751 - DNA, 25 bp, Homo sapien
gaatgctgatgtagtgttctgagcc

SEQ ID NO: 2288752 - DNA, 25 bp, Homo sapien
ttgtggttgagcctgaccgagcagc

SEQ ID NO: 2288753 - DNA, 25 bp, Homo sapien
ctatcatggtatgcaccttgtggtt

SEQ ID NO: 2288754 - DNA, 25 bp, Homo sapien
agaagatccttgtctgcaaatgaaa

SEQ ID NO: 2288755 - DNA, 25 bp, Homo sapien
tatctgcataggtctcttggggggc

SEQ ID NO: 2288756 - DNA, 25 bp, Homo sapien
ccagtatctgcataggtctcttggg

SEQ ID NO: 2288757 - DNA, 25 bp, Homo sapien
aaccccccagtatctgcataggtct

SEQ ID NO: 2288758 - DNA, 25 bp, Homo sapien
ccccagtatctgcataggtctcttg

SEQ ID NO: 2288759 - DNA, 25 bp, Homo sapien
tcttcataatattcaggatgggtga

SEQ ID NO: 2288760 - DNA, 25 bp, Homo sapien
tctcttcataatattcaggatgggt

SEQ ID NO: 2288761 - DNA, 25 bp, Homo sapien
catctcttcataatattcaggatgg

SEQ ID NO: 2288762 - DNA, 25 bp, Homo sapien
cttcataatattcaggatgggtgag

SEQ ID NO: 2288763 - DNA, 25 bp, Homo sapien
ccaggtggaccacagagaatgaccc

SEQ ID NO: 2288764 - DNA, 25 bp, Homo sapien
caggtggaccacagagaatgacccc

SEQ ID NO: 2288765 - DNA, 25 bp, Homo sapien
ctgtgccaggtggaccacagagaat

SEQ ID NO: 2288766 - DNA, 25 bp, Homo sapien
tgccaggtggaccacagagaatgac

SEQ ID NO: 2288767 - DNA, 25 bp, Homo sapien
tggctgaggtttggtttgctactgc

SEQ ID NO: 2288768 - DNA, 25 bp, Homo sapien
tactgctttggctaacaaggtttta

SEQ ID NO: 2288769 - DNA, 25 bp, Homo sapien
tgaataagttcagagccaaccactc

SEQ ID NO: 2288770 - DNA, 25 bp, Homo sapien
aaccactctcaagaaagtggctgag

SEQ ID NO: 2288771 - DNA, 25 bp, Homo sapien
aataaacacaatggacggtgcacgt

SEQ ID NO: 2288772 - DNA, 25 bp, Homo sapien
cacaatggacggtgcacgttcttca

SEQ ID NO: 2288773 - DNA, 25 bp, Homo sapien
aatggacggtgcacgttcttcagca

SEQ ID NO: 2288774 - DNA, 25 bp, Homo sapien
gcaactcgaaacaattcccgtccga

SEQ ID NO: 2288775 - DNA, 25 bp, Homo sapien
tcgtgcagggttacatcatcagcca

SEQ ID NO: 2288776 - DNA, 25 bp, Homo sapien
cagcagttccaacgttgttcgctga

SEQ ID NO: 2288777 - DNA, 25 bp, Homo sapien
gatgggcttcttcgtcttttcatca

SEQ ID NO: 2288778 - DNA, 25 bp, Homo sapien
tggttcagcagttccaacgttgttc

SEQ ID NO: 2288779 - DNA, 25 bp, Homo sapien
tcttgggtgcctccacatgtaagtg

SEQ ID NO: 2288780 - DNA, 25 bp, Homo sapien
tctagaaggcatggagactatcacc

SEQ ID NO: 2288781 - DNA, 25 bp, Homo sapien
caaagttaaatagtggagtgtcctc

SEQ ID NO: 2288782 - DNA, 25 bp, Homo sapien
tcctagcagccgaagtcaagagaga

SEQ ID NO: 2288783 - DNA, 25 bp, Homo sapien
gcaggtgatatagctggtggtgaac

SEQ ID NO: 2288784 - DNA, 25 bp, Homo sapien
cagtgcaggtgatatagctggtggt

SEQ ID NO: 2288785 - DNA, 25 bp, Homo sapien
taatttgatttattcaataatgtgg

SEQ ID NO: 2288786 - DNA, 25 bp, Homo sapien
tttattcaataatgtggaggaatga

SEQ ID NO: 2288787 - DNA, 25 bp, Homo sapien
gataagaaaacattccatgagccac

SEQ ID NO: 2288788 - DNA, 25 bp, Homo sapien
ggcagtctggcaaggtctgagcctc

SEQ ID NO: 2288789 - DNA, 25 bp, Homo sapien
tcccatcaaggtgttaacattcaag

SEQ ID NO: 2288790 - DNA, 25 bp, Homo sapien
tgtctatccatgaaagcaggcagtc

SEQ ID NO: 2288791 - DNA, 25 bp, Homo sapien
cacatacagttttaaggcgcacaga

SEQ ID NO: 2288792 - DNA, 25 bp, Homo sapien
tagatttccaaagtccgttccagca

SEQ ID NO: 2288793 - DNA, 25 bp, Homo sapien
gatggtcaaaaaatcggtagtcgcc

SEQ ID NO: 2288794 - DNA, 25 bp, Homo sapien
ccagtcaataagagtgcgggtcact

SEQ ID NO: 2288795 - DNA, 25 bp, Homo sapien
catatcctaatttaggatacatcac

SEQ ID NO: 2288796 - DNA, 25 bp, Homo sapien
acatatcctaatttaggatacatca

SEQ ID NO: 2288797 - DNA, 25 bp, Homo sapien
tatattatccagttgcacaacacac

SEQ ID NO: 2288798 - DNA, 25 bp, Homo sapien
ttatattatccagttgcacaacaca

SEQ ID NO: 2288799 - DNA, 25 bp, Homo sapien
gagacatctctacagattgctcaat

SEQ ID NO: 2288800 - DNA, 25 bp, Homo sapien
tcaaatcaagatagttaccaggagc

SEQ ID NO: 2288801 - DNA, 25 bp, Homo sapien
tcaagatagttaccaggagcaattc

SEQ ID NO: 2288802 - DNA, 25 bp, Homo sapien
aatttgcattggctaagtgagagac

SEQ ID NO: 2288803 - DNA, 25 bp, Homo sapien
ggctaacataagcattctgagcatg

SEQ ID NO: 2288804 - DNA, 25 bp, Homo sapien
catgtctaaggaatgctaggctaaa

SEQ ID NO: 2288805 - DNA, 25 bp, Homo sapien
gacagtccccaatgataggttgact

SEQ ID NO: 2288806 - DNA, 25 bp, Homo sapien
tatgtttcatatatggacagtcccc

SEQ ID NO: 2288807 - DNA, 25 bp, Homo sapien
ggtgacagcttccacatagttggac

SEQ ID NO: 2288808 - DNA, 25 bp, Homo sapien
cagataaattccatcaaaggtgaca

SEQ ID NO: 2288809 - DNA, 25 bp, Homo sapien
ctatgttatatggtatcagataaat

SEQ ID NO: 2288810 - DNA, 25 bp, Homo sapien
acagcttccacatagttggaccctc

SEQ ID NO: 2288811 - DNA, 25 bp, Homo sapien
agtggtcaagaaagctaatatggtg

SEQ ID NO: 2288812 - DNA, 25 bp, Homo sapien
tatcttagaaacagcggagaggctg

SEQ ID NO: 2288813 - DNA, 25 bp, Homo sapien
aatacttaggcaagctagggaaggg

SEQ ID NO: 2288814 - DNA, 25 bp, Homo sapien
gaaaaattccccacactcaatgatc

SEQ ID NO: 2288815 - DNA, 25 bp, Homo sapien
gctcttccccgaatcttatcatctt

SEQ ID NO: 2288816 - DNA, 25 bp, Homo sapien
tatcatctttagtccgtgtcttcat

SEQ ID NO: 2288817 - DNA, 25 bp, Homo sapien
tcttatcatctttagtccgtgtctt

SEQ ID NO: 2288818 - DNA, 25 bp, Homo sapien
agagagattgctcttccccgaatct

SEQ ID NO: 2288819 - DNA, 25 bp, Homo sapien
gctcagataccaactccctggtgtt

SEQ ID NO: 2288820 - DNA, 25 bp, Homo sapien
tacaactatggataatgtggacaga

SEQ ID NO: 2288821 - DNA, 25 bp, Homo sapien
tacctccctctagagagtcatcaga

SEQ ID NO: 2288822 - DNA, 25 bp, Homo sapien
tcatgcatcaggctcagataccaac

SEQ ID NO: 2288823 - DNA, 25 bp, Homo sapien
gtcactgaattgttggtttccctcc

SEQ ID NO: 2288824 - DNA, 25 bp, Homo sapien
cgtttttcacggtcagtatgttggt

SEQ ID NO: 2288825 - DNA, 25 bp, Homo sapien
gaatttcctaaactatgctctgcag

SEQ ID NO: 2288826 - DNA, 25 bp, Homo sapien
tatgttggtgtggagtgaatgcttc

SEQ ID NO: 2288827 - DNA, 25 bp, Homo sapien
tctaacctctaagaacccgaaggca

SEQ ID NO: 2288828 - DNA, 25 bp, Homo sapien
tcttcagtaaccctctaacctctaa

SEQ ID NO: 2288829 - DNA, 25 bp, Homo sapien
ttcagtaaccctctaacctctaaga

SEQ ID NO: 2288830 - DNA, 25 bp, Homo sapien
gaacccgaaggcagctgtgtccact

SEQ ID NO: 2288831 - DNA, 25 bp, Homo sapien
gtttttcagcttccaccgtagccat

SEQ ID NO: 2288832 - DNA, 25 bp, Homo sapien
cagtttttcagcttccaccgtagcc

SEQ ID NO: 2288833 - DNA, 25 bp, Homo sapien
agtttttcagcttccaccgtagcca

SEQ ID NO: 2288834 - DNA, 25 bp, Homo sapien
ttttcagcttccaccgtagccatca

SEQ ID NO: 2288835 - DNA, 25 bp, Homo sapien
gccacttgaagggttaattgaaagc

SEQ ID NO: 2288836 - DNA, 25 bp, Homo sapien
tttgccacttgaagggttaattgaa

SEQ ID NO: 2288837 - DNA, 25 bp, Homo sapien
taactttatgagacactcttactac

SEQ ID NO: 2288838 - DNA, 25 bp, Homo sapien
gacactcttactaccatactcaaaa

SEQ ID NO: 2288839 - DNA, 25 bp, Homo sapien
tttagcagtccataccacaaatatt

SEQ ID NO: 2288840 - DNA, 25 bp, Homo sapien
caccctgctactttagcagtccata

SEQ ID NO: 2288841 - DNA, 25 bp, Homo sapien
gctactttagcagtccataccacaa

SEQ ID NO: 2288842 - DNA, 25 bp, Homo sapien
cctgctactttagcagtccatacca

SEQ ID NO: 2288843 - DNA, 25 bp, Homo sapien
ggcattcattaagggtggagaaggg

SEQ ID NO: 2288844 - DNA, 25 bp, Homo sapien
cagggacagacaaacgtggtggcat

SEQ ID NO: 2288845 - DNA, 25 bp, Homo sapien
caaacgtggtggcattcattaaggg

SEQ ID NO: 2288846 - DNA, 25 bp, Homo sapien
gtggagaagggatattgtccccagt

SEQ ID NO: 2288847 - DNA, 25 bp, Homo sapien
ttggaaacttcactggagtcccttc

SEQ ID NO: 2288848 - DNA, 25 bp, Homo sapien
ggaaacttcactggagtcccttcag

SEQ ID NO: 2288849 - DNA, 25 bp, Homo sapien
tggaaacttcactggagtcccttca

SEQ ID NO: 2288850 - DNA, 25 bp, Homo sapien
tcagaattccgtaagaaggcaaggt

SEQ ID NO: 2288851 - DNA, 25 bp, Homo sapien
gatgaggtaaagtctgcaccttgga

SEQ ID NO: 2288852 - DNA, 25 bp, Homo sapien
taggaagcagtactttgggttaggc

SEQ ID NO: 2288853 - DNA, 25 bp, Homo sapien
ccatatgaagacctaggagaacatt

SEQ ID NO: 2288854 - DNA, 25 bp, Homo sapien
tgttccttccaagtctggcaactgt

SEQ ID NO: 2288855 - DNA, 25 bp, Homo sapien
gcaactgtgcggcttttgttttagg

SEQ ID NO: 2288856 - DNA, 25 bp, Homo sapien
cttactgataaactctgcgatgcct

SEQ ID NO: 2288857 - DNA, 25 bp, Homo sapien
taaactctgcgatgcctattgtcaa

SEQ ID NO: 2288858 - DNA, 25 bp, Homo sapien
cccgtattatttgattcacatcggc

SEQ ID NO: 2288859 - DNA, 25 bp, Homo sapien
tatgtcgcattctttcagttggagg

SEQ ID NO: 2288860 - DNA, 25 bp, Homo sapien
ggcaaattttcagcaaactcaaagt

SEQ ID NO: 2288861 - DNA, 25 bp, Homo sapien
aactcaaagtagttgcactatgtcg

SEQ ID NO: 2288862 - DNA, 25 bp, Homo sapien
tagtattggcttgcagcaaccaagg

SEQ ID NO: 2288863 - DNA, 25 bp, Homo sapien
cagtatagttgcaggctctagtaaa

SEQ ID NO: 2288864 - DNA, 25 bp, Homo sapien
caaggctacctcgagtactgaatta

SEQ ID NO: 2288865 - DNA, 25 bp, Homo sapien
tttggcattcaacccaggcggctaa

SEQ ID NO: 2288866 - DNA, 25 bp, Homo sapien
gcctggaaatagtgggctccctcca

SEQ ID NO: 2288867 - DNA, 25 bp, Homo sapien
tgctcctggtgatgaacgtccttcc

SEQ ID NO: 2288868 - DNA, 25 bp, Homo sapien
gcagctcccaggatgtgagtatgcc

SEQ ID NO: 2288869 - DNA, 25 bp, Homo sapien
ggattctggtatgctgcaatgcaca

SEQ ID NO: 2288870 - DNA, 25 bp, Homo sapien
attcactatggggatgctgtcaaat

SEQ ID NO: 2288871 - DNA, 25 bp, Homo sapien
tcactatggggatgctgtcaaatgc

SEQ ID NO: 2288872 - DNA, 25 bp, Homo sapien
ctcggggcctctatgttggggacaa

SEQ ID NO: 2288873 - DNA, 25 bp, Homo sapien
tctgctacatctctcggggcctcta

SEQ ID NO: 2288874 - DNA, 25 bp, Homo sapien
gatcaggcacagtattgttatttgt

SEQ ID NO: 2288875 - DNA, 25 bp, Homo sapien
attttctagatcaggcacagtattg

SEQ ID NO: 2288876 - DNA, 25 bp, Homo sapien
cactagattattttctagatcaggc

SEQ ID NO: 2288877 - DNA, 25 bp, Homo sapien
cggcctcaaaggattttattcctat

SEQ ID NO: 2288878 - DNA, 25 bp, Homo sapien
cactgcccaaacagtaggataactt

SEQ ID NO: 2288879 - DNA, 25 bp, Homo sapien
actgcccaaacagtaggataacttt

SEQ ID NO: 2288880 - DNA, 25 bp, Homo sapien
ctgcccaaacagtaggataactttg

SEQ ID NO: 2288881 - DNA, 25 bp, Homo sapien
taccctggttctttgctttctcagc

SEQ ID NO: 2288882 - DNA, 25 bp, Homo sapien
cctgtctttaccctggttctttgct

SEQ ID NO: 2288883 - DNA, 25 bp, Homo sapien
agagcagccgtgctgatactttcct

SEQ ID NO: 2288884 - DNA, 25 bp, Homo sapien
ctcttagctgtaccagggcggaaaa

SEQ ID NO: 2288885 - DNA, 25 bp, Homo sapien
cagactcaggttctttcagctttct

SEQ ID NO: 2288886 - DNA, 25 bp, Homo sapien
tagtacgccgaggtattggctgccc

SEQ ID NO: 2288887 - DNA, 25 bp, Homo sapien
gaacaaggtggactggctgtgacat

SEQ ID NO: 2288888 - DNA, 25 bp, Homo sapien
gctgctctcattgatatctgatata

SEQ ID NO: 2288889 - DNA, 25 bp, Homo sapien
gagagatggcagatgttgccctctt

SEQ ID NO: 2288890 - DNA, 25 bp, Homo sapien
acctgggaattggagagatggcaga

SEQ ID NO: 2288891 - DNA, 25 bp, Homo sapien
gagatggcagatgttgccctcttct

SEQ ID NO: 2288892 - DNA, 25 bp, Homo sapien
aaatggggccttggggcaagacctg

SEQ ID NO: 2288893 - DNA, 25 bp, Homo sapien
ttgccgaagactactggattcctct

SEQ ID NO: 2288894 - DNA, 25 bp, Homo sapien
ccgaagactactggattcctctcca

SEQ ID NO: 2288895 - DNA, 25 bp, Homo sapien
caccttgccgaagactactggattc

SEQ ID NO: 2288896 - DNA, 25 bp, Homo sapien
ccttgccgaagactactggattcct

SEQ ID NO: 2288897 - DNA, 25 bp, Homo sapien
agatattagtgatttttggtgtcaa

SEQ ID NO: 2288898 - DNA, 25 bp, Homo sapien
gatattagtgatttttggtgtcaat

SEQ ID NO: 2288899 - DNA, 25 bp, Homo sapien
gagaagtttacacttcacaaagtct

SEQ ID NO: 2288900 - DNA, 25 bp, Homo sapien
agaagtttacacttcacaaagtctc

SEQ ID NO: 2288901 - DNA, 25 bp, Homo sapien
aagtttacacttcacaaagtctctt

SEQ ID NO: 2288902 - DNA, 25 bp, Homo sapien
gaagtttacacttcacaaagtctct

SEQ ID NO: 2288903 - DNA, 25 bp, Homo sapien
cagactccgatttccaacagtcagg

SEQ ID NO: 2288904 - DNA, 25 bp, Homo sapien
ccaggctttcatagtgagaaccaaa

SEQ ID NO: 2288905 - DNA, 25 bp, Homo sapien
tattcctcactcgacaccaggcttt

SEQ ID NO: 2288906 - DNA, 25 bp, Homo sapien
tgatctccggcttctgagctctgaa

SEQ ID NO: 2288907 - DNA, 25 bp, Homo sapien
taatcttcatgtatgtctccatgag

SEQ ID NO: 2288908 - DNA, 25 bp, Homo sapien
tgctttatctcctaacaagagtcag

SEQ ID NO: 2288909 - DNA, 25 bp, Homo sapien
gatgttgggtgagccagcatgaaaa

SEQ ID NO: 2288910 - DNA, 25 bp, Homo sapien
gaattcttgatccatgaactgcaga

SEQ ID NO: 2288911 - DNA, 25 bp, Homo sapien
ctttctctctggcagctagggtttt

SEQ ID NO: 2288912 - DNA, 25 bp, Homo sapien
tttctctctggcagctagggttttc

SEQ ID NO: 2288913 - DNA, 25 bp, Homo sapien
tctctggcagctagggttttctgca

SEQ ID NO: 2288914 - DNA, 25 bp, Homo sapien
tcagctgagccgaagttgcagtgtg

SEQ ID NO: 2288915 - DNA, 25 bp, Homo sapien
gagccgaagttgcagtgtgacttgc

SEQ ID NO: 2288916 - DNA, 25 bp, Homo sapien
aggacccattcagctgagccgaagt

SEQ ID NO: 2288917 - DNA, 25 bp, Homo sapien
ttgcagtgtgacttgctcggccacg

SEQ ID NO: 2288918 - DNA, 25 bp, Homo sapien
atgggctaccacacaggatgaggat

SEQ ID NO: 2288919 - DNA, 25 bp, Homo sapien
tgccccttcctgtgatgggctacca

SEQ ID NO: 2288920 - DNA, 25 bp, Homo sapien
ccacacaggatgaggatctttgctg

SEQ ID NO: 2288921 - DNA, 25 bp, Homo sapien
ggctaccacacaggatgaggatctt

SEQ ID NO: 2288922 - DNA, 25 bp, Homo sapien
tatctgtcatccgaaataggtcgtt

SEQ ID NO: 2288923 - DNA, 25 bp, Homo sapien
actttgttcaagaagcgagtgtgct

SEQ ID NO: 2288924 - DNA, 25 bp, Homo sapien
tcatccgaaataggtcgtttcccca

SEQ ID NO: 2288925 - DNA, 25 bp, Homo sapien
tccccaccagctttaaccactgaac

SEQ ID NO: 2288926 - DNA, 25 bp, Homo sapien
tggcacagcaagaaccttcttctct

SEQ ID NO: 2288927 - DNA, 25 bp, Homo sapien
ctggcacagcaagaaccttcttctc

SEQ ID NO: 2288928 - DNA, 25 bp, Homo sapien
gaaccttcttctcttctacacactc

SEQ ID NO: 2288929 - DNA, 25 bp, Homo sapien
ccttcttctcttctacacactccat

SEQ ID NO: 2288930 - DNA, 25 bp, Homo sapien
agctctgcaaaattccttcgctttt

SEQ ID NO: 2288931 - DNA, 25 bp, Homo sapien
cttcagctctgcaaaattccttcgc

SEQ ID NO: 2288932 - DNA, 25 bp, Homo sapien
tgcaaaattccttcgctttttctta

SEQ ID NO: 2288933 - DNA, 25 bp, Homo sapien
tcagctctgcaaaattccttcgctt

SEQ ID NO: 2288934 - DNA, 25 bp, Homo sapien
ttttcttgccatcctcgcctttcga

SEQ ID NO: 2288935 - DNA, 25 bp, Homo sapien
ttcttgccatcctcgcctttcgaat

SEQ ID NO: 2288936 - DNA, 25 bp, Homo sapien
tgtattccttgtgatagtgctttgc

SEQ ID NO: 2288937 - DNA, 25 bp, Homo sapien
tgccatcctcgcctttcgaatttca

SEQ ID NO: 2288938 - DNA, 25 bp, Homo sapien
acgccattgacacctctgattctga

SEQ ID NO: 2288939 - DNA, 25 bp, Homo sapien
tcacgccattgacacctctgattct

SEQ ID NO: 2288940 - DNA, 25 bp, Homo sapien
gctcacgccattgacacctctgatt

SEQ ID NO: 2288941 - DNA, 25 bp, Homo sapien
gccattgacacctctgattctgacg

SEQ ID NO: 2288942 - DNA, 25 bp, Homo sapien
ctcgtggagaagacaatttgaaggc

SEQ ID NO: 2288943 - DNA, 25 bp, Homo sapien
ttgtcgagcttcacaaaggtgccat

SEQ ID NO: 2288944 - DNA, 25 bp, Homo sapien
cgtggagaagacaatttgaaggccc

SEQ ID NO: 2288945 - DNA, 25 bp, Homo sapien
tcgagcttcacaaaggtgccattga

SEQ ID NO: 2288946 - DNA, 25 bp, Homo sapien
gttcattcttctaataagcctgttg

SEQ ID NO: 2288947 - DNA, 25 bp, Homo sapien
tagttcattcttctaataagcctgt

SEQ ID NO: 2288948 - DNA, 25 bp, Homo sapien
ttagttcattcttctaataagcctg

SEQ ID NO: 2288949 - DNA, 25 bp, Homo sapien
tcattcttctaataagcctgttgac

SEQ ID NO: 2288950 - DNA, 25 bp, Homo sapien
tttttttgagagcaggtactgttta

SEQ ID NO: 2288951 - DNA, 25 bp, Homo sapien
ttttgagagcaggtactgtttatta

SEQ ID NO: 2288952 - DNA, 25 bp, Homo sapien
tactgtttattaaccgaccagctta

SEQ ID NO: 2288953 - DNA, 25 bp, Homo sapien
actgtttattaaccgaccagcttag

SEQ ID NO: 2288954 - DNA, 25 bp, Homo sapien
tatgggtcctgatagaaattctcga

SEQ ID NO: 2288955 - DNA, 25 bp, Homo sapien
gataaaatattcgaaaccaccaagc

SEQ ID NO: 2288956 - DNA, 25 bp, Homo sapien
tgcaactcctccacaaatggtggga

SEQ ID NO: 2288957 - DNA, 25 bp, Homo sapien
ggcggtaatctaggactatgggtcc

SEQ ID NO: 2288958 - DNA, 25 bp, Homo sapien
tcctagatccacaccagtaaaagtc

SEQ ID NO: 2288959 - DNA, 25 bp, Homo sapien
ttcctagatccacaccagtaaaagt

SEQ ID NO: 2288960 - DNA, 25 bp, Homo sapien
cctagatccacaccagtaaaagtca

SEQ ID NO: 2288961 - DNA, 25 bp, Homo sapien
atgccagtgcccagggccacaggta

SEQ ID NO: 2288962 - DNA, 25 bp, Homo sapien
aggaatgccagtgcccagggccaca

SEQ ID NO: 2288963 - DNA, 25 bp, Homo sapien
cagtgcccagggccacaggtaggtc

SEQ ID NO: 2288964 - DNA, 25 bp, Homo sapien
tgccagtgcccagggccacaggtag

SEQ ID NO: 2288965 - DNA, 25 bp, Homo sapien
cagcgtctacttctgcagcgtggaa

SEQ ID NO: 2288966 - DNA, 25 bp, Homo sapien
gccgtgaagaacctggtggacagca

SEQ ID NO: 2288967 - DNA, 25 bp, Homo sapien
tgagagtgtctacgtcctggtgaac

SEQ ID NO: 2288968 - DNA, 25 bp, Homo sapien
tggaaggtctgctcaaacgggccat

SEQ ID NO: 2288969 - DNA, 25 bp, Homo sapien
ttccatagagcggaatataattcag

SEQ ID NO: 2288970 - DNA, 25 bp, Homo sapien
tattccatagagcggaatataattc

SEQ ID NO: 2288971 - DNA, 25 bp, Homo sapien
tatattccatagagcggaatataat

SEQ ID NO: 2288972 - DNA, 25 bp, Homo sapien
tccatagagcggaatataattcagc

SEQ ID NO: 2288973 - DNA, 25 bp, Homo sapien
tcattctggtaattagactctcaac

SEQ ID NO: 2288974 - DNA, 25 bp, Homo sapien
gctctcagtgagaggctcagaatat

SEQ ID NO: 2288975 - DNA, 25 bp, Homo sapien
aatagggacctttgccaactatgca

SEQ ID NO: 2288976 - DNA, 25 bp, Homo sapien
tatgcactgacagacatatattgtg

SEQ ID NO: 2288977 - DNA, 25 bp, Homo sapien
ggagaagttctctctatactattac

SEQ ID NO: 2288978 - DNA, 25 bp, Homo sapien
gttcagaagatcagatgatagtctt

SEQ ID NO: 2288979 - DNA, 25 bp, Homo sapien
tcaataaatggcatgataggtactg

SEQ ID NO: 2288980 - DNA, 25 bp, Homo sapien
tatacattaggcgagagatactgga

SEQ ID NO: 2288981 - DNA, 25 bp, Homo sapien
tgttccacattagcgtcagtagtca

SEQ ID NO: 2288982 - DNA, 25 bp, Homo sapien
gaataactagcaggaaatgttccac

SEQ ID NO: 2288983 - DNA, 25 bp, Homo sapien
gcaattctagtaccagttagtccag

SEQ ID NO: 2288984 - DNA, 25 bp, Homo sapien
cagtagtcactggatataatatagc

SEQ ID NO: 2288985 - DNA, 25 bp, Homo sapien
ggaggagggaacgagcgagcgaagg

SEQ ID NO: 2288986 - DNA, 25 bp, Homo sapien
agggaggagggaacgagcgagcgaa

SEQ ID NO: 2288987 - DNA, 25 bp, Homo sapien
aggagggaacgagcgagcgaaggga

SEQ ID NO: 2288988 - DNA, 25 bp, Homo sapien
agggaacgagcgagcgaagggagcg

SEQ ID NO: 2288989 - DNA, 25 bp, Homo sapien
tcggccgcccctggtgatcccgtaa

SEQ ID NO: 2288990 - DNA, 25 bp, Homo sapien
tggtgatcccgtaagtccaggaccg

SEQ ID NO: 2288991 - DNA, 25 bp, Homo sapien
actccaggttcagatccgccgccat

SEQ ID NO: 2288992 - DNA, 25 bp, Homo sapien
ccggggcagggagatccactccagg

SEQ ID NO: 2288993 - DNA, 25 bp, Homo sapien
tgccgccggtgtccggtgaccaccg

SEQ ID NO: 2288994 - DNA, 25 bp, Homo sapien
cgccggtgtccggtgaccaccgcct

SEQ ID NO: 2288995 - DNA, 25 bp, Homo sapien
ctctgccgccggtgtccggtgacca

SEQ ID NO: 2288996 - DNA, 25 bp, Homo sapien
ggtgtccggtgaccaccgcctcgcc

SEQ ID NO: 2288997 - DNA, 25 bp, Homo sapien
gagggcgccgtctccaagtgctgat

SEQ ID NO: 2288998 - DNA, 25 bp, Homo sapien
gaagagggcgccgtctccaagtgct

SEQ ID NO: 2288999 - DNA, 25 bp, Homo sapien
aggcgcaggaagagggcgccgtctc

SEQ ID NO: 2289000 - DNA, 25 bp, Homo sapien
caggaagagggcgccgtctccaagt

SEQ ID NO: 2289001 - DNA, 25 bp, Homo sapien
tttcagggaggggagcgtcgccact

SEQ ID NO: 2289002 - DNA, 25 bp, Homo sapien
gccgcggaggaaaaactcaggactc

SEQ ID NO: 2289003 - DNA, 25 bp, Homo sapien
tcaccggggagtgagtagcggccgc

SEQ ID NO: 2289004 - DNA, 25 bp, Homo sapien
gagcgtcgccactctagggtcgcga

SEQ ID NO: 2289005 - DNA, 25 bp, Homo sapien
agtctgtgcaacctccgtgcggctg

SEQ ID NO: 2289006 - DNA, 25 bp, Homo sapien
gcaactgaggctgcgaacgcctcct

SEQ ID NO: 2289007 - DNA, 25 bp, Homo sapien
ttagatccggatcgccagcaactga

SEQ ID NO: 2289008 - DNA, 25 bp, Homo sapien
ggaacgcgccaagcgtttcccgagc

SEQ ID NO: 2289009 - DNA, 25 bp, Homo sapien
tctcaagcctttccaatcaccagga

SEQ ID NO: 2289010 - DNA, 25 bp, Homo sapien
agagtccgagagaatgtaccccaga

SEQ ID NO: 2289011 - DNA, 25 bp, Homo sapien
aggactgctgaaactggcctcgcct

SEQ ID NO: 2289012 - DNA, 25 bp, Homo sapien
tcacggaatgtcagagtccgagaga

SEQ ID NO: 2289013 - DNA, 25 bp, Homo sapien
tgcaccttcaaaagtatatgcttct

SEQ ID NO: 2289014 - DNA, 25 bp, Homo sapien
tatcttgcaccttcaaaagtatatg

SEQ ID NO: 2289015 - DNA, 25 bp, Homo sapien
tcttgcaccttcaaaagtatatgct

SEQ ID NO: 2289016 - DNA, 25 bp, Homo sapien
tagtatcttgcaccttcaaaagtat

SEQ ID NO: 2289017 - DNA, 25 bp, Homo sapien
tggcctagccaaaacttaagtacag

SEQ ID NO: 2289018 - DNA, 25 bp, Homo sapien
gatgtctactaagctaactggccta

SEQ ID NO: 2289019 - DNA, 25 bp, Homo sapien
ccaaaatattttcgagatgtctact

SEQ ID NO: 2289020 - DNA, 25 bp, Homo sapien
gctgtctaacagtaaaccaaatagg

SEQ ID NO: 2289021 - DNA, 25 bp, Homo sapien
taaatggaaaaccacagtcagtgga

SEQ ID NO: 2289022 - DNA, 25 bp, Homo sapien
accacagtcagtggaagctcagaac

SEQ ID NO: 2289023 - DNA, 25 bp, Homo sapien
cctttaaatggaaaaccacagtcag

SEQ ID NO: 2289024 - DNA, 25 bp, Homo sapien
tggaaaaccacagtcagtggaagct

SEQ ID NO: 2289025 - DNA, 25 bp, Homo sapien
taaggtagaagatgagccaagggac

SEQ ID NO: 2289026 - DNA, 25 bp, Homo sapien
cattaaggatataagcaagcaaggc

SEQ ID NO: 2289027 - DNA, 25 bp, Homo sapien
taagtctgtgacatccgcaagtaga

SEQ ID NO: 2289028 - DNA, 25 bp, Homo sapien
caactgtggctgtggatgatacata

SEQ ID NO: 2289029 - DNA, 25 bp, Homo sapien
tattagctgcaaagatgcacgtgtg

SEQ ID NO: 2289030 - DNA, 25 bp, Homo sapien
tcccagtcttggttaaagcacaggt

SEQ ID NO: 2289031 - DNA, 25 bp, Homo sapien
gaatgtcaaagagcctatcactgcc

SEQ ID NO: 2289032 - DNA, 25 bp, Homo sapien
aaatgatgtctaggaggccataaca

SEQ ID NO: 2289033 - DNA, 25 bp, Homo sapien
ggcagcataatgttactgaagaaca

SEQ ID NO: 2289034 - DNA, 25 bp, Homo sapien
aaaaagaacattatgagaggcagca

SEQ ID NO: 2289035 - DNA, 25 bp, Homo sapien
catggaaaaagtcagataaaattca

SEQ ID NO: 2289036 - DNA, 25 bp, Homo sapien
tacagtatgtttcgatgacgtcaat

SEQ ID NO: 2289037 - DNA, 25 bp, Homo sapien
tgagatcagattactgctccaaggt

SEQ ID NO: 2289038 - DNA, 25 bp, Homo sapien
cacaggttaaaccaacagggaagag

SEQ ID NO: 2289039 - DNA, 25 bp, Homo sapien
tcttagctcccagaacaatctgaga

SEQ ID NO: 2289040 - DNA, 25 bp, Homo sapien
caaacaagcgattgcatctgatgtc

SEQ ID NO: 2289041 - DNA, 25 bp, Homo sapien
gatgactcccctcatgggttaaata

SEQ ID NO: 2289042 - DNA, 25 bp, Homo sapien
tatttttctgtgtgaagtaccccag

SEQ ID NO: 2289043 - DNA, 25 bp, Homo sapien
acttcctggattcaaccacaaggca

SEQ ID NO: 2289044 - DNA, 25 bp, Homo sapien
caaatgacctagtctttcagagtaa

SEQ ID NO: 2289045 - DNA, 25 bp, Homo sapien
aaatcaccattgtattgcatgggtc

SEQ ID NO: 2289046 - DNA, 25 bp, Homo sapien
tcaggaatcggctttggaatacagt

SEQ ID NO: 2289047 - DNA, 25 bp, Homo sapien
tctcgggtgagcttaggcttgaagc

SEQ ID NO: 2289048 - DNA, 25 bp, Homo sapien
tgttttttaggagccgtaggtgcat

SEQ ID NO: 2289049 - DNA, 25 bp, Homo sapien
tgaatgtagtcgaattgcagttgaa

SEQ ID NO: 2289050 - DNA, 25 bp, Homo sapien
gatctagacacataatcctcagttt

SEQ ID NO: 2289051 - DNA, 25 bp, Homo sapien
gttgaatacaaattgtcccaatcag

SEQ ID NO: 2289052 - DNA, 25 bp, Homo sapien
gcaaaaacatccttgacattaccca

SEQ ID NO: 2289053 - DNA, 25 bp, Homo sapien
cactagcaagggcatagctgtatct

SEQ ID NO: 2289054 - DNA, 25 bp, Homo sapien
tagccagtacataaaaagtccccag

SEQ ID NO: 2289055 - DNA, 25 bp, Homo sapien
tccatccataggcaccagacgtggt

SEQ ID NO: 2289056 - DNA, 25 bp, Homo sapien
ttttcatagccattccccgaggatt

SEQ ID NO: 2289057 - DNA, 25 bp, Homo sapien
gatctagacatagcaaaagcgggct

SEQ ID NO: 2289058 - DNA, 25 bp, Homo sapien
ccataggtggttagagtcataggac

SEQ ID NO: 2289059 - DNA, 25 bp, Homo sapien
tcagtgaaccaataaatgcaggtgg

SEQ ID NO: 2289060 - DNA, 25 bp, Homo sapien
tccaaacctggagtgcaaaaagtca

SEQ ID NO: 2289061 - DNA, 25 bp, Homo sapien
gatagggaacttgcaataacactga

SEQ ID NO: 2289062 - DNA, 25 bp, Homo sapien
taacaggatgtttgctaccagtact

SEQ ID NO: 2289063 - DNA, 25 bp, Homo sapien
gtctcacaagagtaaggcaagcaaa

SEQ ID NO: 2289064 - DNA, 25 bp, Homo sapien
tttaaatagctaggcttcactgctc

SEQ ID NO: 2289065 - DNA, 25 bp, Homo sapien
ttaaaagcttagtaccacatgcctc

SEQ ID NO: 2289066 - DNA, 25 bp, Homo sapien
ctttgctatagtgagaaagtagcca

SEQ ID NO: 2289067 - DNA, 25 bp, Homo sapien
tggcccacgctgcactgcagaggtg

SEQ ID NO: 2289068 - DNA, 25 bp, Homo sapien
gaatgtctatgatagtctcatcact

SEQ ID NO: 2289069 - DNA, 25 bp, Homo sapien
tagtacagatctttgtgtgcacacg

SEQ ID NO: 2289070 - DNA, 25 bp, Homo sapien
ggaaagctactggataacgaagaca

SEQ ID NO: 2289071 - DNA, 25 bp, Homo sapien
gaagtgaagctagtcataggcctgc

SEQ ID NO: 2289072 - DNA, 25 bp, Homo sapien
gaattccttgggtacctctgtcaaa

SEQ ID NO: 2289073 - DNA, 25 bp, Homo sapien
ctcttttaggcagcatcaaggtttt

SEQ ID NO: 2289074 - DNA, 25 bp, Homo sapien
tgcctttctgggaaattcataaaaa

SEQ ID NO: 2289075 - DNA, 25 bp, Homo sapien
gtctctataatttgcctttctggga

SEQ ID NO: 2289076 - DNA, 25 bp, Homo sapien
tttaggcagcatcaaggttttaaag

SEQ ID NO: 2289077 - DNA, 25 bp, Homo sapien
gtaatgctattttaatctccaggag

SEQ ID NO: 2289078 - DNA, 25 bp, Homo sapien
tatgagctcagagaaagtaacagcc

SEQ ID NO: 2289079 - DNA, 25 bp, Homo sapien
aaaatatcgccctttaacttcatgg

SEQ ID NO: 2289080 - DNA, 25 bp, Homo sapien
gaatatttggttgccaagttcacct

SEQ ID NO: 2289081 - DNA, 25 bp, Homo sapien
tctttaagcactactgagattcatc

SEQ ID NO: 2289082 - DNA, 25 bp, Homo sapien
gttacaattactgaaatgcttgcca

SEQ ID NO: 2289083 - DNA, 25 bp, Homo sapien
gacttatgattagaggtatctggga

SEQ ID NO: 2289084 - DNA, 25 bp, Homo sapien
gatattaaagggcaagaagttctgc

SEQ ID NO: 2289085 - DNA, 25 bp, Homo sapien
caaagacttagcagatgtgactgaa

SEQ ID NO: 2289086 - DNA, 25 bp, Homo sapien
gactttggttgatagctgccccatg

SEQ ID NO: 2289087 - DNA, 25 bp, Homo sapien
caagcgattattccacgtgatccca

SEQ ID NO: 2289088 - DNA, 25 bp, Homo sapien
tagtcattggaaactaatacaagcc

SEQ ID NO: 2289089 - DNA, 25 bp, Homo sapien
cacagacataatctgctctgagaag

SEQ ID NO: 2289090 - DNA, 25 bp, Homo sapien
tccttcaaaacccaacacagacata

SEQ ID NO: 2289091 - DNA, 25 bp, Homo sapien
acataatctgctctgagaagccacc

SEQ ID NO: 2289092 - DNA, 25 bp, Homo sapien
tccatgccgctgcacacaatacaca

SEQ ID NO: 2289093 - DNA, 25 bp, Homo sapien
tgggctcttaacaccatctggcaga

SEQ ID NO: 2289094 - DNA, 25 bp, Homo sapien
tggcaccttgtcctaacaactggtt

SEQ ID NO: 2289095 - DNA, 25 bp, Homo sapien
tactggctcctatgtaccagctgaa

SEQ ID NO: 2289096 - DNA, 25 bp, Homo sapien
aaaggcagcatctacccatgcagat

SEQ ID NO: 2289097 - DNA, 25 bp, Homo sapien
cacattagtttaggacctctaagaa

SEQ ID NO: 2289098 - DNA, 25 bp, Homo sapien
cacctatattaagatgagttcaatg

SEQ ID NO: 2289099 - DNA, 25 bp, Homo sapien
ctaagaatcacctatattaagatga

SEQ ID NO: 2289100 - DNA, 25 bp, Homo sapien
caacagaacatttaaccactagaag

SEQ ID NO: 2289101 - DNA, 25 bp, Homo sapien
ggctatgatagttccccagactttc

SEQ ID NO: 2289102 - DNA, 25 bp, Homo sapien
gaccttactgaaataaagtatgtag

SEQ ID NO: 2289103 - DNA, 25 bp, Homo sapien
tttctgttgtaggatatcacattac

SEQ ID NO: 2289104 - DNA, 25 bp, Homo sapien
ttctcttggctatgatagttcccca

SEQ ID NO: 2289105 - DNA, 25 bp, Homo sapien
ctttgggaaagcggactgaaagtag

SEQ ID NO: 2289106 - DNA, 25 bp, Homo sapien
gccttcatcaaaatcaattcttaaa

SEQ ID NO: 2289107 - DNA, 25 bp, Homo sapien
aaggatattcaattacaggcaaaaa

SEQ ID NO: 2289108 - DNA, 25 bp, Homo sapien
taagactcaactgctttgtctttga

SEQ ID NO: 2289109 - DNA, 25 bp, Homo sapien
caggcaaaaagaacactggagtaaa

SEQ ID NO: 2289110 - DNA, 25 bp, Homo sapien
gatttaatttcctgttcatacaaaa

SEQ ID NO: 2289111 - DNA, 25 bp, Homo sapien
tcctgttcatacaaaaaaaagttga

SEQ ID NO: 2289112 - DNA, 25 bp, Homo sapien
tttggccagatttaatttcctgttc

SEQ ID NO: 2289113 - DNA, 25 bp, Homo sapien
tggccagatttaatttcctgttcat

SEQ ID NO: 2289114 - DNA, 25 bp, Homo sapien
gctggatctaatagagtcctcacca

SEQ ID NO: 2289115 - DNA, 25 bp, Homo sapien
catcaaggcatattagctggatcta

SEQ ID NO: 2289116 - DNA, 25 bp, Homo sapien
aattatctggttacacatcaaggca

SEQ ID NO: 2289117 - DNA, 25 bp, Homo sapien
gaatccacctcattgtaacaagact

SEQ ID NO: 2289118 - DNA, 25 bp, Homo sapien
tattcagctgtcacgtaatggcctt

SEQ ID NO: 2289119 - DNA, 25 bp, Homo sapien
taatggccttgacaatcctcacaga

SEQ ID NO: 2289120 - DNA, 25 bp, Homo sapien
tactccaagtaggagtgcctccaag

SEQ ID NO: 2289121 - DNA, 25 bp, Homo sapien
gaaagttgccagaagtcatactcca

SEQ ID NO: 2289122 - DNA, 25 bp, Homo sapien
ttccagggctaaagaaaacaggtca

SEQ ID NO: 2289123 - DNA, 25 bp, Homo sapien
gaagatacttttcgtagagtcgaca

SEQ ID NO: 2289124 - DNA, 25 bp, Homo sapien
tctgttattctagagcttccagggc

SEQ ID NO: 2289125 - DNA, 25 bp, Homo sapien
caggagacatacaaaggaggatgcc

SEQ ID NO: 2289126 - DNA, 25 bp, Homo sapien
cactgaaacaaggtgtcacttaaaa

SEQ ID NO: 2289127 - DNA, 25 bp, Homo sapien
gatttttagggacacacatgctata

SEQ ID NO: 2289128 - DNA, 25 bp, Homo sapien
gggtctttttcaaggccaaatgtca

SEQ ID NO: 2289129 - DNA, 25 bp, Homo sapien
tagtgtgctcctagatccattttcc

SEQ ID NO: 2289130 - DNA, 25 bp, Homo sapien
tctgctataacgcttgctggaactg

SEQ ID NO: 2289131 - DNA, 25 bp, Homo sapien
aaacccagccatgtaggaatacaca

SEQ ID NO: 2289132 - DNA, 25 bp, Homo sapien
ctgtgagagactctagatggatgca

SEQ ID NO: 2289133 - DNA, 25 bp, Homo sapien
ttcagatcaagagaatcatcagttc

SEQ ID NO: 2289134 - DNA, 25 bp, Homo sapien
cactgttttatggtccaacatgggt

SEQ ID NO: 2289135 - DNA, 25 bp, Homo sapien
ctccactgttttatggtccaacatg

SEQ ID NO: 2289136 - DNA, 25 bp, Homo sapien
ctgttttatggtccaacatgggtgc

SEQ ID NO: 2289137 - DNA, 25 bp, Homo sapien
tgttttatggtccaacatgggtgca

SEQ ID NO: 2289138 - DNA, 25 bp, Homo sapien
aaatacaattgtcctgtgatggttg

SEQ ID NO: 2289139 - DNA, 25 bp, Homo sapien
tacaattgtcctgtgatggttgtcc

SEQ ID NO: 2289140 - DNA, 25 bp, Homo sapien
caattgtcctgtgatggttgtcctg

SEQ ID NO: 2289141 - DNA, 25 bp, Homo sapien
tacaaaaatacaattgtcctgtgat

SEQ ID NO: 2289142 - DNA, 25 bp, Homo sapien
tgcataatctgaagtcacgttatag

SEQ ID NO: 2289143 - DNA, 25 bp, Homo sapien
tttatcatacttattggccgttcct

SEQ ID NO: 2289144 - DNA, 25 bp, Homo sapien
tacagggctcattggatgcactgca

SEQ ID NO: 2289145 - DNA, 25 bp, Homo sapien
tgaagtcacgttatagttagaagct

SEQ ID NO: 2289146 - DNA, 25 bp, Homo sapien
gctcagttagcctgttggatttatt

SEQ ID NO: 2289147 - DNA, 25 bp, Homo sapien
tgatccatctagaaaatttctggtg

SEQ ID NO: 2289148 - DNA, 25 bp, Homo sapien
ggtgtaaagtatgaggaacagattc

SEQ ID NO: 2289149 - DNA, 25 bp, Homo sapien
tctttcaagacaatgacctagtggc

SEQ ID NO: 2289150 - DNA, 25 bp, Homo sapien
tgaactttttttgaagctcgtgaag

SEQ ID NO: 2289151 - DNA, 25 bp, Homo sapien
ttatgaactttttttgaagctcgtg

SEQ ID NO: 2289152 - DNA, 25 bp, Homo sapien
tatgaactttttttgaagctcgtga

SEQ ID NO: 2289153 - DNA, 25 bp, Homo sapien
aattatgaactttttttgaagctcg

SEQ ID NO: 2289154 - DNA, 25 bp, Homo sapien
aaagccaacctcgtctgacaaccgg

SEQ ID NO: 2289155 - DNA, 25 bp, Homo sapien
tataaagccaacctcgtctgacaac

SEQ ID NO: 2289156 - DNA, 25 bp, Homo sapien
cctcgtctgacaaccggtgcattag

SEQ ID NO: 2289157 - DNA, 25 bp, Homo sapien
gacaaccggtgcattaggattcctt

SEQ ID NO: 2289158 - DNA, 25 bp, Homo sapien
taagtaatgtccactcctttttctg

SEQ ID NO: 2289159 - DNA, 25 bp, Homo sapien
tgtaagtaatgtccactcctttttc

SEQ ID NO: 2289160 - DNA, 25 bp, Homo sapien
agttgtaagtaatgtccactccttt

SEQ ID NO: 2289161 - DNA, 25 bp, Homo sapien
tcagttgtaagtaatgtccactcct

SEQ ID NO: 2289162 - DNA, 25 bp, Homo sapien
taaaaatcattaggtcacctgaaag

SEQ ID NO: 2289163 - DNA, 25 bp, Homo sapien
tgctttgtatcatctgtacgtatat

SEQ ID NO: 2289164 - DNA, 25 bp, Homo sapien
tctgtacgtatatagaatcagaaag

SEQ ID NO: 2289165 - DNA, 25 bp, Homo sapien
ctggaaagcttaaatatcagatggt

SEQ ID NO: 2289166 - DNA, 25 bp, Homo sapien
gatggtgtgtagtgctacaatctca

SEQ ID NO: 2289167 - DNA, 25 bp, Homo sapien
taaatttatttctagctgtgagtaa

SEQ ID NO: 2289168 - DNA, 25 bp, Homo sapien
tctagctgtgagtaatgacttcaga

SEQ ID NO: 2289169 - DNA, 25 bp, Homo sapien
tgacagctataccaaaaaagaaacc

SEQ ID NO: 2289170 - DNA, 25 bp, Homo sapien
gtcagaaagcacaaaccagcgtttc

SEQ ID NO: 2289171 - DNA, 25 bp, Homo sapien
tcagaaagcacaaaccagcgtttct

SEQ ID NO: 2289172 - DNA, 25 bp, Homo sapien
cagaaagcacaaaccagcgtttctt

SEQ ID NO: 2289173 - DNA, 25 bp, Homo sapien
aagcatatttgcgattaatgtgatc

SEQ ID NO: 2289174 - DNA, 25 bp, Homo sapien
ttaatgtgatcttcagaggtaagca

SEQ ID NO: 2289175 - DNA, 25 bp, Homo sapien
ggtaacagtatgcttcccaggatac

SEQ ID NO: 2289176 - DNA, 25 bp, Homo sapien
caaagctatctgaaaactaggtaac

SEQ ID NO: 2289177 - DNA, 25 bp, Homo sapien
tatctagaaccatttgaaagcacag

SEQ ID NO: 2289178 - DNA, 25 bp, Homo sapien
gagggacattcttctatacaaccat

SEQ ID NO: 2289179 - DNA, 25 bp, Homo sapien
catcaattattagcattctgacatg

SEQ ID NO: 2289180 - DNA, 25 bp, Homo sapien
gacatgaagacacttgacccctaaa

SEQ ID NO: 2289181 - DNA, 25 bp, Homo sapien
gctccagttacattaccttctcatt

SEQ ID NO: 2289182 - DNA, 25 bp, Homo sapien
ccttaggtctttgctccagttacat

SEQ ID NO: 2289183 - DNA, 25 bp, Homo sapien
gcacctctacatgtgtacttcataa

SEQ ID NO: 2289184 - DNA, 25 bp, Homo sapien
catggcctaataatagtgctaatat

SEQ ID NO: 2289185 - DNA, 25 bp, Homo sapien
ctgaaccaaataattgcagagaaaa

SEQ ID NO: 2289186 - DNA, 25 bp, Homo sapien
actgaaccaaataattgcagagaaa

SEQ ID NO: 2289187 - DNA, 25 bp, Homo sapien
aactgaaccaaataattgcagagaa

SEQ ID NO: 2289188 - DNA, 25 bp, Homo sapien
ttctgataagcatttgcaacaatgt

SEQ ID NO: 2289189 - DNA, 25 bp, Homo sapien
caaacttaggagtaaagcagctcat

SEQ ID NO: 2289190 - DNA, 25 bp, Homo sapien
aacaatgtcagcaaacttaggagta

SEQ ID NO: 2289191 - DNA, 25 bp, Homo sapien
aaagcagctcatacattcagaggaa

SEQ ID NO: 2289192 - DNA, 25 bp, Homo sapien
ttttcacaggttctgtctgtactag

SEQ ID NO: 2289193 - DNA, 25 bp, Homo sapien
tctgtctgtactagggcagcatcta

SEQ ID NO: 2289194 - DNA, 25 bp, Homo sapien
aacatggctttcatccacaactcca

SEQ ID NO: 2289195 - DNA, 25 bp, Homo sapien
caggttctgtctgtactagggcagc

SEQ ID NO: 2289196 - DNA, 25 bp, Homo sapien
tatgtactatgacagtgaaatactt

SEQ ID NO: 2289197 - DNA, 25 bp, Homo sapien
ggtggtatcgcaaactaacaaaatg

SEQ ID NO: 2289198 - DNA, 25 bp, Homo sapien
ggattcaccccagtacaccgatagg

SEQ ID NO: 2289199 - DNA, 25 bp, Homo sapien
aattcagaacaggaattgatccttg

SEQ ID NO: 2289200 - DNA, 25 bp, Homo sapien
caaagtttcttactgtaattcatca

SEQ ID NO: 2289201 - DNA, 25 bp, Homo sapien
aacatcaacacactattacagaaaa

SEQ ID NO: 2289202 - DNA, 25 bp, Homo sapien
aatctgtgtagctttaaggtaacaa

SEQ ID NO: 2289203 - DNA, 25 bp, Homo sapien
tactgtaattcatcacactttagaa

SEQ ID NO: 2289204 - DNA, 25 bp, Homo sapien
cctcatctttatgctactcaggtaa

SEQ ID NO: 2289205 - DNA, 25 bp, Homo sapien
tgcatgtggcaaaagtggtttttct

SEQ ID NO: 2289206 - DNA, 25 bp, Homo sapien
caagagtgtggtactacgcccagct

SEQ ID NO: 2289207 - DNA, 25 bp, Homo sapien
tcgttatcagtgctaaccacctcat

SEQ ID NO: 2289208 - DNA, 25 bp, Homo sapien
gattggtctgtagtgcacagtctga

SEQ ID NO: 2289209 - DNA, 25 bp, Homo sapien
tgtatgactcgatcggcctctgtgt

SEQ ID NO: 2289210 - DNA, 25 bp, Homo sapien
gcctctgtgtataagggccctgtat

SEQ ID NO: 2289211 - DNA, 25 bp, Homo sapien
gatctgccaggctaacattgactat

SEQ ID NO: 2289212 - DNA, 25 bp, Homo sapien
tgcgggctaaatagaactaaaatgc

SEQ ID NO: 2289213 - DNA, 25 bp, Homo sapien
ggttacagaaagagcttgcgggcta

SEQ ID NO: 2289214 - DNA, 25 bp, Homo sapien
ctatgccagtgatccctaaactttt

SEQ ID NO: 2289215 - DNA, 25 bp, Homo sapien
ctaaagcagcactcttttaactatg

SEQ ID NO: 2289216 - DNA, 25 bp, Homo sapien
gggttacactgcagatactttcagg

SEQ ID NO: 2289217 - DNA, 25 bp, Homo sapien
tctataaccttcagggtagcgggcc

SEQ ID NO: 2289218 - DNA, 25 bp, Homo sapien
ttgttataaaactgacgctgctgcc

SEQ ID NO: 2289219 - DNA, 25 bp, Homo sapien
tgataagcagctattgacccgtggg

SEQ ID NO: 2289220 - DNA, 25 bp, Homo sapien
tataaggtagtgagttaacacaaaa

SEQ ID NO: 2289221 - DNA, 25 bp, Homo sapien
taaggtagtgagttaacacaaaatc

SEQ ID NO: 2289222 - DNA, 25 bp, Homo sapien
catttataaggtagtgagttaacac

SEQ ID NO: 2289223 - DNA, 25 bp, Homo sapien
agctgccttgcttactttatcccca

SEQ ID NO: 2289224 - DNA, 25 bp, Homo sapien
gacctcaggatccctttatattctt

SEQ ID NO: 2289225 - DNA, 25 bp, Homo sapien
ttgacctcaggatccctttatattc

SEQ ID NO: 2289226 - DNA, 25 bp, Homo sapien
tgacctcaggatccctttatattct

SEQ ID NO: 2289227 - DNA, 25 bp, Homo sapien
ccagcctggagtgtatggcaagatc

SEQ ID NO: 2289228 - DNA, 25 bp, Homo sapien
ggctctggggactaacagactgtaa

SEQ ID NO: 2289229 - DNA, 25 bp, Homo sapien
gggactaacagactgtaaagtcagg

SEQ ID NO: 2289230 - DNA, 25 bp, Homo sapien
tgaccttctgtcaggcacatagaca

SEQ ID NO: 2289231 - DNA, 25 bp, Homo sapien
aacagactgtaaagtcaggccagct

SEQ ID NO: 2289232 - DNA, 25 bp, Homo sapien
ccttcctgtgcagcacataaataaa

SEQ ID NO: 2289233 - DNA, 25 bp, Homo sapien
tatttggccagtcagacacttagga

SEQ ID NO: 2289234 - DNA, 25 bp, Homo sapien
tctcttgcacaaaagcagtaatgtt

SEQ ID NO: 2289235 - DNA, 25 bp, Homo sapien
aaattatgttagatatgtaccttcc

SEQ ID NO: 2289236 - DNA, 25 bp, Homo sapien
ggtttgttttgcctacacgacagca

SEQ ID NO: 2289237 - DNA, 25 bp, Homo sapien
ggctacaggctttcctcactggagt

SEQ ID NO: 2289238 - DNA, 25 bp, Homo sapien
tatccacaggtgagacaacagtttt

SEQ ID NO: 2289239 - DNA, 25 bp, Homo sapien
tgatcattggcattcttatagccca

SEQ ID NO: 2289240 - DNA, 25 bp, Homo sapien
ttagcagcagcgtaagctcctctgg

SEQ ID NO: 2289241 - DNA, 25 bp, Homo sapien
gatactactcagttcggcttgctgc

SEQ ID NO: 2289242 - DNA, 25 bp, Homo sapien
tgtgggcctcaagctttagctgcat

SEQ ID NO: 2289243 - DNA, 25 bp, Homo sapien
tgtgctaacgtatgctcccggatac

SEQ ID NO: 2289244 - DNA, 25 bp, Homo sapien
tggcagacgacacagacaaatctct

SEQ ID NO: 2289245 - DNA, 25 bp, Homo sapien
gggctcatgctcaacactaatgatg

SEQ ID NO: 2289246 - DNA, 25 bp, Homo sapien
ctataatgatggtatgggctcatgc

SEQ ID NO: 2289247 - DNA, 25 bp, Homo sapien
tcatattgactgatgagtgtttcaa

SEQ ID NO: 2289248 - DNA, 25 bp, Homo sapien
tttggagatgatgtgaaagaatttc

SEQ ID NO: 2289249 - DNA, 25 bp, Homo sapien
gaagtcaccagtaggaccacaagca

SEQ ID NO: 2289250 - DNA, 25 bp, Homo sapien
cacattaggatgtttagaagtcacc

SEQ ID NO: 2289251 - DNA, 25 bp, Homo sapien
gaggaagggcatcttagcatatggt

SEQ ID NO: 2289252 - DNA, 25 bp, Homo sapien
caacgaggtctaggtcatttaggta

SEQ ID NO: 2289253 - DNA, 25 bp, Homo sapien
gggcaacactttacttatggcttcc

SEQ ID NO: 2289254 - DNA, 25 bp, Homo sapien
gaggagaccccactttaactgctga

SEQ ID NO: 2289255 - DNA, 25 bp, Homo sapien
tcagcagggcagcttatgcttgatc

SEQ ID NO: 2289256 - DNA, 25 bp, Homo sapien
ggcactttcaaagaactacaacagg

SEQ ID NO: 2289257 - DNA, 25 bp, Homo sapien
ctaagatctgaggtttgcacactga

SEQ ID NO: 2289258 - DNA, 25 bp, Homo sapien
catgcctggatcaaaaaagtgctac

SEQ ID NO: 2289259 - DNA, 25 bp, Homo sapien
ttttgctcaacccaaccagacctgg

SEQ ID NO: 2289260 - DNA, 25 bp, Homo sapien
cacagtagggagcatgcttaccaaa

SEQ ID NO: 2289261 - DNA, 25 bp, Homo sapien
tccgttcccaggaggttgccatatt

SEQ ID NO: 2289262 - DNA, 25 bp, Homo sapien
gtcctccgttcccaggaggttgcca

SEQ ID NO: 2289263 - DNA, 25 bp, Homo sapien
gcatttcctactgggctggctcacc

SEQ ID NO: 2289264 - DNA, 25 bp, Homo sapien
ggactatatagccttgcgccactgt

SEQ ID NO: 2289265 - DNA, 25 bp, Homo sapien
gacagccttgagtattgtactttgt

SEQ ID NO: 2289266 - DNA, 25 bp, Homo sapien
tctgagaagtcaggcttgtgaacca

SEQ ID NO: 2289267 - DNA, 25 bp, Homo sapien
gatttactgtcagttctgagaagtc

SEQ ID NO: 2289268 - DNA, 25 bp, Homo sapien
ccctggcaattcttattggggactg

SEQ ID NO: 2289269 - DNA, 25 bp, Homo sapien
agaaggcctagtctggtccctgcag

SEQ ID NO: 2289270 - DNA, 25 bp, Homo sapien
caactgacacccatgggctggaaat

SEQ ID NO: 2289271 - DNA, 25 bp, Homo sapien
gggctaaggctcatgacatcacctc

SEQ ID NO: 2289272 - DNA, 25 bp, Homo sapien
gggacaaggaccacctcagcttcag

SEQ ID NO: 2289273 - DNA, 25 bp, Homo sapien
ggaggtgggtatccgatgctacagc

SEQ ID NO: 2289274 - DNA, 25 bp, Homo sapien
ttcgtgggaggtgggtatccgatgc

SEQ ID NO: 2289275 - DNA, 25 bp, Homo sapien
agtcgccgtcgccaccttttctcta

SEQ ID NO: 2289276 - DNA, 25 bp, Homo sapien
gctccagtcgccgtcgccacctttt

SEQ ID NO: 2289277 - DNA, 25 bp, Homo sapien
gcgctgctcgcggcgttctccctcc

SEQ ID NO: 2289278 - DNA, 25 bp, Homo sapien
tggtagtgttgctcacggcgctgct

SEQ ID NO: 2289279 - DNA, 25 bp, Homo sapien
gggacgatggtagtgttgctcacgg

SEQ ID NO: 2289280 - DNA, 25 bp, Homo sapien
cgatggtagtgttgctcacggcgct

SEQ ID NO: 2289281 - DNA, 25 bp, Homo sapien
gccgctagggcccggatccgcagtg

SEQ ID NO: 2289282 - DNA, 25 bp, Homo sapien
gccaccacctccgctactgggcccg

SEQ ID NO: 2289283 - DNA, 25 bp, Homo sapien
cctccgctactgggcccgccgctag

SEQ ID NO: 2289284 - DNA, 25 bp, Homo sapien
ctactgggcccgccgctagggcccg

SEQ ID NO: 2289285 - DNA, 25 bp, Homo sapien
tagcagccgaaattaggcagtgtgc

SEQ ID NO: 2289286 - DNA, 25 bp, Homo sapien
agacatggtgcgacaactgctgagt

SEQ ID NO: 2289287 - DNA, 25 bp, Homo sapien
gagacaagccttagccttatcagga

SEQ ID NO: 2289288 - DNA, 25 bp, Homo sapien
caacttgggaccaacagtgctcata

SEQ ID NO: 2289289 - DNA, 25 bp, Homo sapien
tttgtacttctataatgtctagccg

SEQ ID NO: 2289290 - DNA, 25 bp, Homo sapien
tctagccgtgctgtaactttctggg

SEQ ID NO: 2289291 - DNA, 25 bp, Homo sapien
tgaatcatcaacgactcctagactg

SEQ ID NO: 2289292 - DNA, 25 bp, Homo sapien
tctgtcttgggcttttgaatcatca

SEQ ID NO: 2289293 - DNA, 25 bp, Homo sapien
ttttacatctgtatcactctctgat

SEQ ID NO: 2289294 - DNA, 25 bp, Homo sapien
tttacatctgtatcactctctgatt

SEQ ID NO: 2289295 - DNA, 25 bp, Homo sapien
tacatctgtatcactctctgatttt

SEQ ID NO: 2289296 - DNA, 25 bp, Homo sapien
catctgtatcactctctgattttct

SEQ ID NO: 2289297 - DNA, 25 bp, Homo sapien
cactgtcatacccttgttcctcttc

SEQ ID NO: 2289298 - DNA, 25 bp, Homo sapien
ctctctcactgtcatacccttgttc

SEQ ID NO: 2289299 - DNA, 25 bp, Homo sapien
gtcatacccttgttcctcttcatca

SEQ ID NO: 2289300 - DNA, 25 bp, Homo sapien
cctcttcatcataaacccgtgtaac

SEQ ID NO: 2289301 - DNA, 25 bp, Homo sapien
cactgatgcatgtatacagctggat

SEQ ID NO: 2289302 - DNA, 25 bp, Homo sapien
tgtgcccagccggattatcatttca

SEQ ID NO: 2289303 - DNA, 25 bp, Homo sapien
tgaagcagcgccaatagtaaaacgg

SEQ ID NO: 2289304 - DNA, 25 bp, Homo sapien
tatgggttctcctagtgaatcacca

SEQ ID NO: 2289305 - DNA, 25 bp, Homo sapien
ttttactgcacatagtggagcttga

SEQ ID NO: 2289306 - DNA, 25 bp, Homo sapien
ataatttcgaaattgtacatcaaca

SEQ ID NO: 2289307 - DNA, 25 bp, Homo sapien
atttcgaaattgtacatcaacatgg

SEQ ID NO: 2289308 - DNA, 25 bp, Homo sapien
cacatagtggagcttgaaatgtctg

SEQ ID NO: 2289309 - DNA, 25 bp, Homo sapien
aattcacttctggtttgaatataag

SEQ ID NO: 2289310 - DNA, 25 bp, Homo sapien
aagaatacatataattcacttctgg

SEQ ID NO: 2289311 - DNA, 25 bp, Homo sapien
tctggtttgaatataagaatccaag

SEQ ID NO: 2289312 - DNA, 25 bp, Homo sapien
cacttctggtttgaatataagaatc

SEQ ID NO: 2289313 - DNA, 25 bp, Homo sapien
agaaatgttttcgtgaaaagaagag

SEQ ID NO: 2289314 - DNA, 25 bp, Homo sapien
caattctgaaagaggttctacgacg

SEQ ID NO: 2289315 - DNA, 25 bp, Homo sapien
cctgatcagttagcaagcatcaaca

SEQ ID NO: 2289316 - DNA, 25 bp, Homo sapien
tacgacgggcaatatgttctcaaac

SEQ ID NO: 2289317 - DNA, 25 bp, Homo sapien
ggtggctgaattcaatgatagattt

SEQ ID NO: 2289318 - DNA, 25 bp, Homo sapien
aatgtagacgaaatagccttgtatg

SEQ ID NO: 2289319 - DNA, 25 bp, Homo sapien
caatgtagacgaaatagccttgtat

SEQ ID NO: 2289320 - DNA, 25 bp, Homo sapien
tcaatgtagacgaaatagccttgta

SEQ ID NO: 2289321 - DNA, 25 bp, Homo sapien
tacagttggggtcttagcgccgagt

SEQ ID NO: 2289322 - DNA, 25 bp, Homo sapien
accatggtgataataggttcatttt

SEQ ID NO: 2289323 - DNA, 25 bp, Homo sapien
tagcgccgagttctcaatcattgtg

SEQ ID NO: 2289324 - DNA, 25 bp, Homo sapien
tctcaatcattgtgtgaaccatggt

SEQ ID NO: 2289325 - DNA, 25 bp, Homo sapien
ataaatcaaaactgtcactgaggga

SEQ ID NO: 2289326 - DNA, 25 bp, Homo sapien
cagcaaaatgttcagcgaagccatg

SEQ ID NO: 2289327 - DNA, 25 bp, Homo sapien
gaagccatgctaagaatactgcagc

SEQ ID NO: 2289328 - DNA, 25 bp, Homo sapien
tttgcagatgataaagcagtatcat

SEQ ID NO: 2289329 - DNA, 25 bp, Homo sapien
ggttacttctgattgtgcttagcaa

SEQ ID NO: 2289330 - DNA, 25 bp, Homo sapien
ttagcaagatttcaatagccatccc

SEQ ID NO: 2289331 - DNA, 25 bp, Homo sapien
tagccatcccagtcagttataccac

SEQ ID NO: 2289332 - DNA, 25 bp, Homo sapien
gcttctgcccagtacattttggtta

SEQ ID NO: 2289333 - DNA, 25 bp, Homo sapien
tcttcaggtctgtatttgtataatg

SEQ ID NO: 2289334 - DNA, 25 bp, Homo sapien
atcaatatctacttcttcaggtctg

SEQ ID NO: 2289335 - DNA, 25 bp, Homo sapien
tataatgtgcctctaccttcatctt

SEQ ID NO: 2289336 - DNA, 25 bp, Homo sapien
ctacttcttcaggtctgtatttgta

SEQ ID NO: 2289337 - DNA, 25 bp, Homo sapien
cgttggactgctaacaatagggagc

SEQ ID NO: 2289338 - DNA, 25 bp, Homo sapien
gttttttggtcatgcttatttccag

SEQ ID NO: 2289339 - DNA, 25 bp, Homo sapien
tccagtgtttttggcggagaatacg

SEQ ID NO: 2289340 - DNA, 25 bp, Homo sapien
tgaatttacctgatgtcactttgga

SEQ ID NO: 2289341 - DNA, 25 bp, Homo sapien
ttgcctctacaatctgctaaatagg

SEQ ID NO: 2289342 - DNA, 25 bp, Homo sapien
ggaggtaggcagtcattatatgacc

SEQ ID NO: 2289343 - DNA, 25 bp, Homo sapien
cagacaacaagactcagcctacaca

SEQ ID NO: 2289344 - DNA, 25 bp, Homo sapien
aaaataggcatgcaagcattttgcc

SEQ ID NO: 2289345 - DNA, 25 bp, Homo sapien
tatcttgttcacataatcggcttaa

SEQ ID NO: 2289346 - DNA, 25 bp, Homo sapien
cagagcatgcaccactttatcttgt

SEQ ID NO: 2289347 - DNA, 25 bp, Homo sapien
tgttcacataatcggcttaacttgg

SEQ ID NO: 2289348 - DNA, 25 bp, Homo sapien
ccttgtggagttgctgaagtttctc

SEQ ID NO: 2289349 - DNA, 25 bp, Homo sapien
tgatagcaaagcttgctcaagcgtg

SEQ ID NO: 2289350 - DNA, 25 bp, Homo sapien
cgtactaagcagtccattttgtaaa

SEQ ID NO: 2289351 - DNA, 25 bp, Homo sapien
ggctcgagaaagttctcgacacgta

SEQ ID NO: 2289352 - DNA, 25 bp, Homo sapien
tatctcttggctggctgatagcaaa

SEQ ID NO: 2289353 - DNA, 25 bp, Homo sapien
cacccagccttgctatttatatttc

SEQ ID NO: 2289354 - DNA, 25 bp, Homo sapien
tgactcaagttgtcacagagaccct

SEQ ID NO: 2289355 - DNA, 25 bp, Homo sapien
gggtaagtcattcagctcaatcatt

SEQ ID NO: 2289356 - DNA, 25 bp, Homo sapien
ggaatcctctatcccagtcaggctg

SEQ ID NO: 2289357 - DNA, 25 bp, Homo sapien
tagcttggcattgacagtttaaccc

SEQ ID NO: 2289358 - DNA, 25 bp, Homo sapien
cctggtaacagttacatcgtattct

SEQ ID NO: 2289359 - DNA, 25 bp, Homo sapien
tcttgcatctggttcctggtaacag

SEQ ID NO: 2289360 - DNA, 25 bp, Homo sapien
catcgtattctaacttatcatattc

SEQ ID NO: 2289361 - DNA, 25 bp, Homo sapien
catattctctccatgctcgttccaa

SEQ ID NO: 2289362 - DNA, 25 bp, Homo sapien
tttgagatggacttttgcccatcac

SEQ ID NO: 2289363 - DNA, 25 bp, Homo sapien
tggacttttgcccatcactcaggct

SEQ ID NO: 2289364 - DNA, 25 bp, Homo sapien
tgagatggacttttgcccatcactc

SEQ ID NO: 2289365 - DNA, 25 bp, Homo sapien
agatggacttttgcccatcactcag

SEQ ID NO: 2289366 - DNA, 25 bp, Homo sapien
ttttgtattttgtgcaacgacataa

SEQ ID NO: 2289367 - DNA, 25 bp, Homo sapien
tttgtgcaacgacataatctcagct

SEQ ID NO: 2289368 - DNA, 25 bp, Homo sapien
ctcagtagtggggattacggcacgt

SEQ ID NO: 2289369 - DNA, 25 bp, Homo sapien
cggcacgtgctatgccataattttt

SEQ ID NO: 2289370 - DNA, 25 bp, Homo sapien
catgacatcctgaattcgccaaagt

SEQ ID NO: 2289371 - DNA, 25 bp, Homo sapien
ctttctgaatctgtgcacgctgaat

SEQ ID NO: 2289372 - DNA, 25 bp, Homo sapien
tcctgaattcgccaaagttctttct

SEQ ID NO: 2289373 - DNA, 25 bp, Homo sapien
tgtgcacgctgaattcctgctgatt

SEQ ID NO: 2289374 - DNA, 25 bp, Homo sapien
cacatgactgtaatactgtggtcag

SEQ ID NO: 2289375 - DNA, 25 bp, Homo sapien
tagttgttgccctcatgtcagagtg

SEQ ID NO: 2289376 - DNA, 25 bp, Homo sapien
tagtaggccatacaactagatttgt

SEQ ID NO: 2289377 - DNA, 25 bp, Homo sapien
gaatgtaatctgtcaccaagcgaca

SEQ ID NO: 2289378 - DNA, 25 bp, Homo sapien
aagtcttcagtttctaatcattcac

SEQ ID NO: 2289379 - DNA, 25 bp, Homo sapien
aatcattcacttattgttttcagaa

SEQ ID NO: 2289380 - DNA, 25 bp, Homo sapien
cacgcctggccgatttcacatattt

SEQ ID NO: 2289381 - DNA, 25 bp, Homo sapien
gttttcagaattggaaagcaattac

SEQ ID NO: 2289382 - DNA, 25 bp, Homo sapien
gagaaaggctttgatcctatcatac

SEQ ID NO: 2289383 - DNA, 25 bp, Homo sapien
gggtctcgctatagtgcagtgattt

SEQ ID NO: 2289384 - DNA, 25 bp, Homo sapien
gtctcgctatagtgcagtgatttga

SEQ ID NO: 2289385 - DNA, 25 bp, Homo sapien
cgctatagtgcagtgatttgatcat

SEQ ID NO: 2289386 - DNA, 25 bp, Homo sapien
tggggtctcgctatagtgcagtgat

SEQ ID NO: 2289387 - DNA, 25 bp, Homo sapien
ctgtaaagtcataggaccgaggaag

SEQ ID NO: 2289388 - DNA, 25 bp, Homo sapien
gaccgaggaagtggaggacgaggtg

SEQ ID NO: 2289389 - DNA, 25 bp, Homo sapien
aggacgaggtgggactacttcctct

SEQ ID NO: 2289390 - DNA, 25 bp, Homo sapien
aaagtcataggaccgaggaagtgga

SEQ ID NO: 2289391 - DNA, 25 bp, Homo sapien
gcccctgctataacagagcaaggag

SEQ ID NO: 2289392 - DNA, 25 bp, Homo sapien
tccttgaacttgatacatcttcttt

SEQ ID NO: 2289393 - DNA, 25 bp, Homo sapien
aactgggcccctgctataacagagc

SEQ ID NO: 2289394 - DNA, 25 bp, Homo sapien
gagcaaggagctgctatcactgggc

SEQ ID NO: 2289395 - DNA, 25 bp, Homo sapien
aattttcattcacaaggtagtctaa

SEQ ID NO: 2289396 - DNA, 25 bp, Homo sapien
tcattcacaaggtagtctaagtgag

SEQ ID NO: 2289397 - DNA, 25 bp, Homo sapien
attcacaaggtagtctaagtgaggc

SEQ ID NO: 2289398 - DNA, 25 bp, Homo sapien
ttttcattcacaaggtagtctaagt

SEQ ID NO: 2289399 - DNA, 25 bp, Homo sapien
cctatgtcacaattacgtggaaaga

SEQ ID NO: 2289400 - DNA, 25 bp, Homo sapien
ttgaaaggaagacatgtaattaccc

SEQ ID NO: 2289401 - DNA, 25 bp, Homo sapien
taaacattagtagccctagtgagcc

SEQ ID NO: 2289402 - DNA, 25 bp, Homo sapien
tgagccatctgggatataacacaaa

SEQ ID NO: 2289403 - DNA, 25 bp, Homo sapien
atcaacttctgccactgttgttaac

SEQ ID NO: 2289404 - DNA, 25 bp, Homo sapien
tcttgtagagtctataatctggacc

SEQ ID NO: 2289405 - DNA, 25 bp, Homo sapien
tgttgttaactctggttcactcttg

SEQ ID NO: 2289406 - DNA, 25 bp, Homo sapien
cattagattcatcaacttctgccac

SEQ ID NO: 2289407 - DNA, 25 bp, Homo sapien
tagttttcctcaaggttacatagga

SEQ ID NO: 2289408 - DNA, 25 bp, Homo sapien
gaagctattgtcgaagattcgggtg

SEQ ID NO: 2289409 - DNA, 25 bp, Homo sapien
aagattcgggtgttggtgattttgc

SEQ ID NO: 2289410 - DNA, 25 bp, Homo sapien
tgctcttggagggactactccaaca

SEQ ID NO: 2289411 - DNA, 25 bp, Homo sapien
tagaagattaatttccagttaaata

SEQ ID NO: 2289412 - DNA, 25 bp, Homo sapien
ctagaagattaatttccagttaaat

SEQ ID NO: 2289413 - DNA, 25 bp, Homo sapien
caaacagagctgttccactgcactt

SEQ ID NO: 2289414 - DNA, 25 bp, Homo sapien
ccttggtcgagtactttcagccaaa

SEQ ID NO: 2289415 - DNA, 25 bp, Homo sapien
tggtcgagtactttcagccaaacag

SEQ ID NO: 2289416 - DNA, 25 bp, Homo sapien
ttggtcgagtactttcagccaaaca

SEQ ID NO: 2289417 - DNA, 25 bp, Homo sapien
ccctcaggcacgcttgttgatgtct

SEQ ID NO: 2289418 - DNA, 25 bp, Homo sapien
ctccctcaggcacgcttgttgatgt

SEQ ID NO: 2289419 - DNA, 25 bp, Homo sapien
tctccctcaggcacgcttgttgatg

SEQ ID NO: 2289420 - DNA, 25 bp, Homo sapien
cttctccctcaggcacgcttgttga

SEQ ID NO: 2289421 - DNA, 25 bp, Homo sapien
tttgtaagggtgactggtctgaagc

SEQ ID NO: 2289422 - DNA, 25 bp, Homo sapien
ttgtaagggtgactggtctgaagca

SEQ ID NO: 2289423 - DNA, 25 bp, Homo sapien
agtgtccagttccttatcatccctc

SEQ ID NO: 2289424 - DNA, 25 bp, Homo sapien
agttgaacaatttctgttgcaggag

SEQ ID NO: 2289425 - DNA, 25 bp, Homo sapien
cttttagttgaacaatttctgttgc

SEQ ID NO: 2289426 - DNA, 25 bp, Homo sapien
ggcagtgtccagttccttatcatcc

SEQ ID NO: 2289427 - DNA, 25 bp, Homo sapien
cagaatttactccatttggctcagg

SEQ ID NO: 2289428 - DNA, 25 bp, Homo sapien
tactccatttggctcaggttcaaaa

SEQ ID NO: 2289429 - DNA, 25 bp, Homo sapien
acagaatttactccatttggctcag

SEQ ID NO: 2289430 - DNA, 25 bp, Homo sapien
tttggctcaggttcaaaaagcattt

SEQ ID NO: 2289431 - DNA, 25 bp, Homo sapien
cttcaggatgctcttctggtttatg

SEQ ID NO: 2289432 - DNA, 25 bp, Homo sapien
ctggtttatgatttgcggtctgtgt

SEQ ID NO: 2289433 - DNA, 25 bp, Homo sapien
tcctgttcgtcaacactgttctttg

SEQ ID NO: 2289434 - DNA, 25 bp, Homo sapien
cctcaggagttgattcgtaagaaat

SEQ ID NO: 2289435 - DNA, 25 bp, Homo sapien
cggctgagtggatggaactggcgat

SEQ ID NO: 2289436 - DNA, 25 bp, Homo sapien
gagtggatggaactggcgatgccga

SEQ ID NO: 2289437 - DNA, 25 bp, Homo sapien
gctgcggctgagtggatggaactgg

SEQ ID NO: 2289438 - DNA, 25 bp, Homo sapien
tggaactggcgatgccgaggactca

SEQ ID NO: 2289439 - DNA, 25 bp, Homo sapien
aatcctaaagcaccaaacttactag

SEQ ID NO: 2289440 - DNA, 25 bp, Homo sapien
ccaaacttactagatatggtagatg

SEQ ID NO: 2289441 - DNA, 25 bp, Homo sapien
aaatggtggtaatcctaaagcacca

SEQ ID NO: 2289442 - DNA, 25 bp, Homo sapien
taaagcaccaaacttactagatatg

SEQ ID NO: 2289443 - DNA, 25 bp, Homo sapien
gagatgcctccttattcctgcaaga

SEQ ID NO: 2289444 - DNA, 25 bp, Homo sapien
cactactgagtatcgacccaaaaga

SEQ ID NO: 2289445 - DNA, 25 bp, Homo sapien
gcacaatttgcaactccaagggtat

SEQ ID NO: 2289446 - DNA, 25 bp, Homo sapien
caaaaagtgggcaaatgacgcgaat

SEQ ID NO: 2289447 - DNA, 25 bp, Homo sapien
ccggccccacaaggaaacataatgt

SEQ ID NO: 2289448 - DNA, 25 bp, Homo sapien
ggccccacaaggaaacataatgtaa

SEQ ID NO: 2289449 - DNA, 25 bp, Homo sapien
cccggccccacaaggaaacataatg

SEQ ID NO: 2289450 - DNA, 25 bp, Homo sapien
tattatcatcattttggagacggag

SEQ ID NO: 2289451 - DNA, 25 bp, Homo sapien
tgaaaaataagagagaggaaattac

SEQ ID NO: 2289452 - DNA, 25 bp, Homo sapien
ctgaaaaataagagagaggaaatta

SEQ ID NO: 2289453 - DNA, 25 bp, Homo sapien
tgctgaaggtccatgtctttagctt

SEQ ID NO: 2289454 - DNA, 25 bp, Homo sapien
ctgctgaaggtccatgtctttagct

SEQ ID NO: 2289455 - DNA, 25 bp, Homo sapien
actgctgaaggtccatgtctttagc

SEQ ID NO: 2289456 - DNA, 25 bp, Homo sapien
taaaatgatgctctgtgaccaaaag

SEQ ID NO: 2289457 - DNA, 25 bp, Homo sapien
tgaaatcatagcagcaagctggtgt

SEQ ID NO: 2289458 - DNA, 25 bp, Homo sapien
agattacgaagtgtacatatgggcc

SEQ ID NO: 2289459 - DNA, 25 bp, Homo sapien
tctggaaatcagcaactaagtaagc

SEQ ID NO: 2289460 - DNA, 25 bp, Homo sapien
gtagcctttaatacattacatgtgc

SEQ ID NO: 2289461 - DNA, 25 bp, Homo sapien
ggaaacctgcttattgctgtacaca

SEQ ID NO: 2289462 - DNA, 25 bp, Homo sapien
gacattgcaatctgaccgagaaaga

SEQ ID NO: 2289463 - DNA, 25 bp, Homo sapien
gaaatataagcccagtacttcaaaa

SEQ ID NO: 2289464 - DNA, 25 bp, Homo sapien
tgatttccccacctgaagtaaaggc

SEQ ID NO: 2289465 - DNA, 25 bp, Homo sapien
ctgatttccccacctgaagtaaagg

SEQ ID NO: 2289466 - DNA, 25 bp, Homo sapien
gctgatttccccacctgaagtaaag

SEQ ID NO: 2289467 - DNA, 25 bp, Homo sapien
agcttctaagcctctgggaagcagc

SEQ ID NO: 2289468 - DNA, 25 bp, Homo sapien
gagtgagcactaagaacttcagagc

SEQ ID NO: 2289469 - DNA, 25 bp, Homo sapien
gagcactaagaacttcagagcaagc

SEQ ID NO: 2289470 - DNA, 25 bp, Homo sapien
agagcaagcttctaagcctctggga

SEQ ID NO: 2289471 - DNA, 25 bp, Homo sapien
ttgactggttataagggctagattc

SEQ ID NO: 2289472 - DNA, 25 bp, Homo sapien
agttttgactggttataagggctag

SEQ ID NO: 2289473 - DNA, 25 bp, Homo sapien
ggttataagggctagattctaagtc

SEQ ID NO: 2289474 - DNA, 25 bp, Homo sapien
gactggttataagggctagattcta

SEQ ID NO: 2289475 - DNA, 25 bp, Homo sapien
tctttgattaccacagatactgagc

SEQ ID NO: 2289476 - DNA, 25 bp, Homo sapien
tgccaggccagagataagtagaccc

SEQ ID NO: 2289477 - DNA, 25 bp, Homo sapien
catgtgagtacatcgctttccctac

SEQ ID NO: 2289478 - DNA, 25 bp, Homo sapien
tgcgaaatgcctctgggtactcacc

SEQ ID NO: 2289479 - DNA, 25 bp, Homo sapien
gatctccgttgtccagaaccgaggg

SEQ ID NO: 2289480 - DNA, 25 bp, Homo sapien
gggacgatctccgttgtccagaacc

SEQ ID NO: 2289481 - DNA, 25 bp, Homo sapien
ttgactggggacgatctccgttgtc

SEQ ID NO: 2289482 - DNA, 25 bp, Homo sapien
gacgatctccgttgtccagaaccga

SEQ ID NO: 2289483 - DNA, 25 bp, Homo sapien
ttaagagaagctcccaagtgagatc

SEQ ID NO: 2289484 - DNA, 25 bp, Homo sapien
caggcgatggtcacaggttaagaga

SEQ ID NO: 2289485 - DNA, 25 bp, Homo sapien
cacaaaggaccgctgggaagtcggc

SEQ ID NO: 2289486 - DNA, 25 bp, Homo sapien
ccaagtgagatctgcgatataatca

SEQ ID NO: 2289487 - DNA, 25 bp, Homo sapien
tgtgcttggatccaggcccgccagg

SEQ ID NO: 2289488 - DNA, 25 bp, Homo sapien
tgcttggatccaggcccgccaggac

SEQ ID NO: 2289489 - DNA, 25 bp, Homo sapien
cccgccaggacgagcccgctccagg

SEQ ID NO: 2289490 - DNA, 25 bp, Homo sapien
ggcccgccaggacgagcccgctcca

SEQ ID NO: 2289491 - DNA, 25 bp, Homo sapien
tgttgggctgcatcgccaggatcct

SEQ ID NO: 2289492 - DNA, 25 bp, Homo sapien
cttaaacctggcccggccgactgat

SEQ ID NO: 2289493 - DNA, 25 bp, Homo sapien
gcccggccgactgatccaaaacttg

SEQ ID NO: 2289494 - DNA, 25 bp, Homo sapien
tgtgaaaggatgtgttaccccattc

SEQ ID NO: 2289495 - DNA, 25 bp, Homo sapien
tacattatgaccttcagtggatgga

SEQ ID NO: 2289496 - DNA, 25 bp, Homo sapien
gcaactgaaaaccacctgacttgtg

SEQ ID NO: 2289497 - DNA, 25 bp, Homo sapien
ccgggtattgcaccttactaagatt

SEQ ID NO: 2289498 - DNA, 25 bp, Homo sapien
ccatgtcggtgatagcggcggccat

SEQ ID NO: 2289499 - DNA, 25 bp, Homo sapien
agggcccgcgagctgcgtcagcctg

SEQ ID NO: 2289500 - DNA, 25 bp, Homo sapien
ctctctcgactctctctccctcgcc

SEQ ID NO: 2289501 - DNA, 25 bp, Homo sapien
ctccaggtcggccatgtcggtgata

SEQ ID NO: 2289502 - DNA, 25 bp, Homo sapien
gggctcggctccgacatcgtctctg

SEQ ID NO: 2289503 - DNA, 25 bp, Homo sapien
tggctggcgctctcggggctcggct

SEQ ID NO: 2289504 - DNA, 25 bp, Homo sapien
tccgacatcgtctctgcctcgccgc

SEQ ID NO: 2289505 - DNA, 25 bp, Homo sapien
gcctggctggcgctctcggggctcg

SEQ ID NO: 2289506 - DNA, 25 bp, Homo sapien
ggctcaacgagcgggtctcgtcgct

SEQ ID NO: 2289507 - DNA, 25 bp, Homo sapien
gcgccggggctcaacgagcgggtct

SEQ ID NO: 2289508 - DNA, 25 bp, Homo sapien
aacgagcgggtctcgtcgctgctgc

SEQ ID NO: 2289509 - DNA, 25 bp, Homo sapien
ctctcggcgctactctcctcctcac

SEQ ID NO: 2289510 - DNA, 25 bp, Homo sapien
gccctggctgccccgcggtcccttg

SEQ ID NO: 2289511 - DNA, 25 bp, Homo sapien
ccgccgccctggctgccccgcggtc

SEQ ID NO: 2289512 - DNA, 25 bp, Homo sapien
gccgccctggctgccccgcggtccc

SEQ ID NO: 2289513 - DNA, 25 bp, Homo sapien
cgccctggctgccccgcggtccctt

SEQ ID NO: 2289514 - DNA, 25 bp, Homo sapien
cggaggtcgcgctgcttccgcctcc

SEQ ID NO: 2289515 - DNA, 25 bp, Homo sapien
cgctggagactacgctgctgctact

SEQ ID NO: 2289516 - DNA, 25 bp, Homo sapien
cgccgctggagactacgctgctgct

SEQ ID NO: 2289517 - DNA, 25 bp, Homo sapien
cccagtcccgtagccctcgtcgccg

SEQ ID NO: 2289518 - DNA, 25 bp, Homo sapien
gtcctccgagtccatgcggctcagg

SEQ ID NO: 2289519 - DNA, 25 bp, Homo sapien
tgtcctccgagtccatgcggctcag

SEQ ID NO: 2289520 - DNA, 25 bp, Homo sapien
tcctccgagtccatgcggctcaggg

SEQ ID NO: 2289521 - DNA, 25 bp, Homo sapien
cggcgacggcgagagatttccgagt

SEQ ID NO: 2289522 - DNA, 25 bp, Homo sapien
cgacggcgagagatttccgagttga

SEQ ID NO: 2289523 - DNA, 25 bp, Homo sapien
ggcggcgacggcgagagatttccga

SEQ ID NO: 2289524 - DNA, 25 bp, Homo sapien
acggcgagagatttccgagttgaga

SEQ ID NO: 2289525 - DNA, 25 bp, Homo sapien
tttgagagttggaagccgcgatgcg

SEQ ID NO: 2289526 - DNA, 25 bp, Homo sapien
gaacggtttgagagttggaagccgc

SEQ ID NO: 2289527 - DNA, 25 bp, Homo sapien
tgaggtccgtgaggagcgaagcgcc

SEQ ID NO: 2289528 - DNA, 25 bp, Homo sapien
gcgaagcgccgaggggaaagagggc

SEQ ID NO: 2289529 - DNA, 25 bp, Homo sapien
ggactgtttccgagttagagccgtc

SEQ ID NO: 2289530 - DNA, 25 bp, Homo sapien
cttctgctccgccagaggatctggg

SEQ ID NO: 2289531 - DNA, 25 bp, Homo sapien
gtgtgtacatcaaggccctcttctg

SEQ ID NO: 2289532 - DNA, 25 bp, Homo sapien
cttgagtaccgacgtgtgtacatca

SEQ ID NO: 2289533 - DNA, 25 bp, Homo sapien
tcccgaacacggttggaagaagcta

SEQ ID NO: 2289534 - DNA, 25 bp, Homo sapien
tagttctgacaagtgttcccgaaca

SEQ ID NO: 2289535 - DNA, 25 bp, Homo sapien
cagccatattggaaacacttgtcaa

SEQ ID NO: 2289536 - DNA, 25 bp, Homo sapien
ttggaaacacttgtcaattgtagtt

SEQ ID NO: 2289537 - DNA, 25 bp, Homo sapien
tgatgtagtaaatggacactaacta

SEQ ID NO: 2289538 - DNA, 25 bp, Homo sapien
tgtgacacccgtattttacttctta

SEQ ID NO: 2289539 - DNA, 25 bp, Homo sapien
aaaactctgacacatatcacttggt

SEQ ID NO: 2289540 - DNA, 25 bp, Homo sapien
tgtacttaaccaataattcgtctcc

SEQ ID NO: 2289541 - DNA, 25 bp, Homo sapien
catacatactactgttggtattctc

SEQ ID NO: 2289542 - DNA, 25 bp, Homo sapien
tacatactactgttggtattctcaa

SEQ ID NO: 2289543 - DNA, 25 bp, Homo sapien
tacatacatactactgttggtattc

SEQ ID NO: 2289544 - DNA, 25 bp, Homo sapien
gcatacatacatactactgttggta

SEQ ID NO: 2289545 - DNA, 25 bp, Homo sapien
ctgaggcaggacagtcacttgggtc

SEQ ID NO: 2289546 - DNA, 25 bp, Homo sapien
tccaggagtttgaggctgcagtgag

SEQ ID NO: 2289547 - DNA, 25 bp, Homo sapien
ggcaggacagtcacttgggtccagg

SEQ ID NO: 2289548 - DNA, 25 bp, Homo sapien
gaggcaggacagtcacttgggtcca

SEQ ID NO: 2289549 - DNA, 25 bp, Homo sapien
gacccagcagcattcactaaattgg

SEQ ID NO: 2289550 - DNA, 25 bp, Homo sapien
cagcagcattcactaaattggccaa

SEQ ID NO: 2289551 - DNA, 25 bp, Homo sapien
cattcactaaattggccaaaaggga

SEQ ID NO: 2289552 - DNA, 25 bp, Homo sapien
aagacccagcagcattcactaaatt

SEQ ID NO: 2289553 - DNA, 25 bp, Homo sapien
atgccctaggacacagagacttaac

SEQ ID NO: 2289554 - DNA, 25 bp, Homo sapien
taggacacagagacttaaccacaga

SEQ ID NO: 2289555 - DNA, 25 bp, Homo sapien
cctaggacacagagacttaaccaca

SEQ ID NO: 2289556 - DNA, 25 bp, Homo sapien
gccctaggacacagagacttaacca

SEQ ID NO: 2289557 - DNA, 25 bp, Homo sapien
aaggtgagaggcacgtcctggaaca

SEQ ID NO: 2289558 - DNA, 25 bp, Homo sapien
tgaacagggccaacagaagttctgc

SEQ ID NO: 2289559 - DNA, 25 bp, Homo sapien
tacttcatgtggatatagctcctca

SEQ ID NO: 2289560 - DNA, 25 bp, Homo sapien
taagagcatgagctttgcctaccac

SEQ ID NO: 2289561 - DNA, 25 bp, Homo sapien
ttgtagcggcagagtcttgttttgc

SEQ ID NO: 2289562 - DNA, 25 bp, Homo sapien
tacctgcctagtcaatatagattct

SEQ ID NO: 2289563 - DNA, 25 bp, Homo sapien
tacctacctagttagttaaatgcaa

SEQ ID NO: 2289564 - DNA, 25 bp, Homo sapien
catgctagaaacgtatccattttta

SEQ ID NO: 2289565 - DNA, 25 bp, Homo sapien
tatgaaaaggtgtgtatctgcttgc

SEQ ID NO: 2289566 - DNA, 25 bp, Homo sapien
ttttaaaattgcaggcatcatgaca

SEQ ID NO: 2289567 - DNA, 25 bp, Homo sapien
cataagggtcaagagaaagaatgtt

SEQ ID NO: 2289568 - DNA, 25 bp, Homo sapien
cctcccgccaagtttttatcatgga

SEQ ID NO: 2289569 - DNA, 25 bp, Homo sapien
cgggtggactacctgatgccaggag

SEQ ID NO: 2289570 - DNA, 25 bp, Homo sapien
gcgggtggactacctgatgccagga

SEQ ID NO: 2289571 - DNA, 25 bp, Homo sapien
aggcgggtggactacctgatgccag

SEQ ID NO: 2289572 - DNA, 25 bp, Homo sapien
ggcgggtggactacctgatgccagg

SEQ ID NO: 2289573 - DNA, 25 bp, Homo sapien
tgctggagttgaacgcccactggaa

SEQ ID NO: 2289574 - DNA, 25 bp, Homo sapien
gctggagttgaacgcccactggaaa

SEQ ID NO: 2289575 - DNA, 25 bp, Homo sapien
gagttgaacgcccactggaaattgt

SEQ ID NO: 2289576 - DNA, 25 bp, Homo sapien
gaacgcccactggaaattgtgctgt

SEQ ID NO: 2289577 - DNA, 25 bp, Homo sapien
tggtcccaacaacaattataggcaa

SEQ ID NO: 2289578 - DNA, 25 bp, Homo sapien
atctacatgtatggaacggatgtga

SEQ ID NO: 2289579 - DNA, 25 bp, Homo sapien
tggaacggatgtgatctgccagatc

SEQ ID NO: 2289580 - DNA, 25 bp, Homo sapien
tctgggctagagttgaagcaagcct

SEQ ID NO: 2289581 - DNA, 25 bp, Homo sapien
tgggattactgtgaccagccgaaaa

SEQ ID NO: 2289582 - DNA, 25 bp, Homo sapien
cagagagcgggtggcgattacacaa

SEQ ID NO: 2289583 - DNA, 25 bp, Homo sapien
tctgatgttcctaccaacaactact

SEQ ID NO: 2289584 - DNA, 25 bp, Homo sapien
gacaaaacccgctaggcatggtggc

SEQ ID NO: 2289585 - DNA, 25 bp, Homo sapien
tatatcaagaaacctaaacctctgg

SEQ ID NO: 2289586 - DNA, 25 bp, Homo sapien
tcacacatagacgtacggacctagg

SEQ ID NO: 2289587 - DNA, 25 bp, Homo sapien
gacttatattaagaggacactggga

SEQ ID NO: 2289588 - DNA, 25 bp, Homo sapien
tgacctcctgagtgctatagttaac

SEQ ID NO: 2289589 - DNA, 25 bp, Homo sapien
gtagatggagtgttatatactttac

SEQ ID NO: 2289590 - DNA, 25 bp, Homo sapien
cagcatatgcctttgtaaccaactt

SEQ ID NO: 2289591 - DNA, 25 bp, Homo sapien
tggtagatggagtgttatatacttt

SEQ ID NO: 2289592 - DNA, 25 bp, Homo sapien
gtaaccaactttgactggtagatgg

SEQ ID NO: 2289593 - DNA, 25 bp, Homo sapien
aaagctggcattgcagccaccaaca

SEQ ID NO: 2289594 - DNA, 25 bp, Homo sapien
tttggctggctagaaacttttgagg

SEQ ID NO: 2289595 - DNA, 25 bp, Homo sapien
tttgttcattccagctttagaagga

SEQ ID NO: 2289596 - DNA, 25 bp, Homo sapien
tgtgtgggtacatgacgagctagcc

SEQ ID NO: 2289597 - DNA, 25 bp, Homo sapien
aaattcacaataatgaaaggagtcc

SEQ ID NO: 2289598 - DNA, 25 bp, Homo sapien
cattgaagccatcacttaaattcac

SEQ ID NO: 2289599 - DNA, 25 bp, Homo sapien
cctgttagataagtggctactcgaa

SEQ ID NO: 2289600 - DNA, 25 bp, Homo sapien
taaaattaaccactcctcactcaaa

SEQ ID NO: 2289601 - DNA, 25 bp, Homo sapien
gtaataagtaataaagatggaaaca

SEQ ID NO: 2289602 - DNA, 25 bp, Homo sapien
gctgagaggttaaagcatatggctc

SEQ ID NO: 2289603 - DNA, 25 bp, Homo sapien
tactatgaaaaacaacactgtgtcc

SEQ ID NO: 2289604 - DNA, 25 bp, Homo sapien
taaactttctatatgagctgagagg

SEQ ID NO: 2289605 - DNA, 25 bp, Homo sapien
tgcatcgaagaaatcatgtggccgt

SEQ ID NO: 2289606 - DNA, 25 bp, Homo sapien
tttgtgatttctgttaaattgtact

SEQ ID NO: 2289607 - DNA, 25 bp, Homo sapien
tctgggacagacttgttttgttaga

SEQ ID NO: 2289608 - DNA, 25 bp, Homo sapien
ctgtattgtagaaaagcctacgaca

SEQ ID NO: 2289609 - DNA, 25 bp, Homo sapien
aaacaactctattaccaagggtctg

SEQ ID NO: 2289610 - DNA, 25 bp, Homo sapien
gaaaagcctacgacagtatgtcaaa

SEQ ID NO: 2289611 - DNA, 25 bp, Homo sapien
tttgctttggacaatctcattaaga

SEQ ID NO: 2289612 - DNA, 25 bp, Homo sapien
ctttgctttggacaatctcattaag

SEQ ID NO: 2289613 - DNA, 25 bp, Homo sapien
tctttgctttggacaatctcattaa

SEQ ID NO: 2289614 - DNA, 25 bp, Homo sapien
tctactccttaataaggaaagcatg

SEQ ID NO: 2289615 - DNA, 25 bp, Homo sapien
actccttaataaggaaagcatgttt

SEQ ID NO: 2289616 - DNA, 25 bp, Homo sapien
ttaataaggaaagcatgtttgatcc

SEQ ID NO: 2289617 - DNA, 25 bp, Homo sapien
ttctactccttaataaggaaagcat

SEQ ID NO: 2289618 - DNA, 25 bp, Homo sapien
tgaagcaaaagtttgatcttcccag

SEQ ID NO: 2289619 - DNA, 25 bp, Homo sapien
caatgaagcaaaagtttgatcttcc

SEQ ID NO: 2289620 - DNA, 25 bp, Homo sapien
tgtcttcaggcatccaatgaagcaa

SEQ ID NO: 2289621 - DNA, 25 bp, Homo sapien
atgtcttcaggcatccaatgaagca

SEQ ID NO: 2289622 - DNA, 25 bp, Homo sapien
gatgtcgttcactttcattcaccca

SEQ ID NO: 2289623 - DNA, 25 bp, Homo sapien
actgatgtcgttcactttcattcac

SEQ ID NO: 2289624 - DNA, 25 bp, Homo sapien
ttttaactgatgtcgttcactttca

SEQ ID NO: 2289625 - DNA, 25 bp, Homo sapien
tagtttttaactgatgtcgttcact

SEQ ID NO: 2289626 - DNA, 25 bp, Homo sapien
ctttgggtagctttgataaatgaac

SEQ ID NO: 2289627 - DNA, 25 bp, Homo sapien
gcaaggcagtatctttgggtagctt

SEQ ID NO: 2289628 - DNA, 25 bp, Homo sapien
ccaaaagcaaggcagtatctttggg

SEQ ID NO: 2289629 - DNA, 25 bp, Homo sapien
tgggtagctttgataaatgaactac

SEQ ID NO: 2289630 - DNA, 25 bp, Homo sapien
ggccaagacggcttttttgatacag

SEQ ID NO: 2289631 - DNA, 25 bp, Homo sapien
ggcgtgcaacactacgtccgactga

SEQ ID NO: 2289632 - DNA, 25 bp, Homo sapien
gttcctatgcacttcagaacatcag

SEQ ID NO: 2289633 - DNA, 25 bp, Homo sapien
gagtatatgcaacattgttcctatg

SEQ ID NO: 2289634 - DNA, 25 bp, Homo sapien
cttcaacctcttctgcggcattgtt

SEQ ID NO: 2289635 - DNA, 25 bp, Homo sapien
ctcttcaacctcttctgcggcattg

SEQ ID NO: 2289636 - DNA, 25 bp, Homo sapien
tcttcaacctcttctgcggcattgt

SEQ ID NO: 2289637 - DNA, 25 bp, Homo sapien
aagactgcaggtgtccccgcttgtt

SEQ ID NO: 2289638 - DNA, 25 bp, Homo sapien
taatatattccaccgaagagtctac

SEQ ID NO: 2289639 - DNA, 25 bp, Homo sapien
ccctaaacccattgtcagtgactaa

SEQ ID NO: 2289640 - DNA, 25 bp, Homo sapien
tgccaaaagagtgtttgctcagtct

SEQ ID NO: 2289641 - DNA, 25 bp, Homo sapien
tttggtatttgtaagggcacatgtt

SEQ ID NO: 2289642 - DNA, 25 bp, Homo sapien
tcataattgaaaggtaaattatctc

SEQ ID NO: 2289643 - DNA, 25 bp, Homo sapien
aaccaatcacatctatttatcataa

SEQ ID NO: 2289644 - DNA, 25 bp, Homo sapien
aagaacacaaatggcaaccaatcac

SEQ ID NO: 2289645 - DNA, 25 bp, Homo sapien
aaagaacacaaatggcaaccaatca

SEQ ID NO: 2289646 - DNA, 25 bp, Homo sapien
ttagttgattgcaaacgtcgttcac

SEQ ID NO: 2289647 - DNA, 25 bp, Homo sapien
gattgcaaacgtcgttcactgtttg

SEQ ID NO: 2289648 - DNA, 25 bp, Homo sapien
cgatagacgaatttttagttgattg

SEQ ID NO: 2289649 - DNA, 25 bp, Homo sapien
ctaattcgatagacgaatttttagt

SEQ ID NO: 2289650 - DNA, 25 bp, Homo sapien
tgggtataggtcctccctcaaagac

SEQ ID NO: 2289651 - DNA, 25 bp, Homo sapien
taacagtagtacatagtcccttaag

SEQ ID NO: 2289652 - DNA, 25 bp, Homo sapien
tgcagattacttcgcagatacagaa

SEQ ID NO: 2289653 - DNA, 25 bp, Homo sapien
cctctggcagcactagtgaagtaca

SEQ ID NO: 2289654 - DNA, 25 bp, Homo sapien
gacttacaagaacatgaggcaataa

SEQ ID NO: 2289655 - DNA, 25 bp, Homo sapien
gaaaaaatactcaagcaaggtctac

SEQ ID NO: 2289656 - DNA, 25 bp, Homo sapien
gaatgacttacaagaacatgaggca

SEQ ID NO: 2289657 - DNA, 25 bp, Homo sapien
ggtctacaatcattggtcaattaag

SEQ ID NO: 2289658 - DNA, 25 bp, Homo sapien
tagggattgccaacctgtagtaaaa

SEQ ID NO: 2289659 - DNA, 25 bp, Homo sapien
tttccacttgcagcatgatgtcagc

SEQ ID NO: 2289660 - DNA, 25 bp, Homo sapien
ggacctaaggtctcaccactcaatt

SEQ ID NO: 2289661 - DNA, 25 bp, Homo sapien
ggtaggagcaacaatacagatgggc

SEQ ID NO: 2289662 - DNA, 25 bp, Homo sapien
gagactcagaaatgcgatccaagac

SEQ ID NO: 2289663 - DNA, 25 bp, Homo sapien
gatccaagactaaacataaagttca

SEQ ID NO: 2289664 - DNA, 25 bp, Homo sapien
gaaatgcgatccaagactaaacata

SEQ ID NO: 2289665 - DNA, 25 bp, Homo sapien
ctcagaaatgcgatccaagactaaa

SEQ ID NO: 2289666 - DNA, 25 bp, Homo sapien
ccaccatttgttgtaggtacctaat

SEQ ID NO: 2289667 - DNA, 25 bp, Homo sapien
caactagacaaaggaatcgaaaact

SEQ ID NO: 2289668 - DNA, 25 bp, Homo sapien
tgccttacggttcaaacacaatctg

SEQ ID NO: 2289669 - DNA, 25 bp, Homo sapien
tgtactggcttattaccaagatcaa

SEQ ID NO: 2289670 - DNA, 25 bp, Homo sapien
caaagtatctccttgtagacctgta

SEQ ID NO: 2289671 - DNA, 25 bp, Homo sapien
tagacctgtacccaacaggctttgt

SEQ ID NO: 2289672 - DNA, 25 bp, Homo sapien
tacaccaggtcacaagattctttaa

SEQ ID NO: 2289673 - DNA, 25 bp, Homo sapien
caaatgcaaaatgtcctacaccagg

SEQ ID NO: 2289674 - DNA, 25 bp, Homo sapien
tatttgagtgccctgagtaagccgt

SEQ ID NO: 2289675 - DNA, 25 bp, Homo sapien
tgccctgagtaagccgtgcctgtag

SEQ ID NO: 2289676 - DNA, 25 bp, Homo sapien
aaggaagatctatttgagtgccctg

SEQ ID NO: 2289677 - DNA, 25 bp, Homo sapien
gatctatttgagtgccctgagtaag

SEQ ID NO: 2289678 - DNA, 25 bp, Homo sapien
ctagagtaatagtaacacagtgtga

SEQ ID NO: 2289679 - DNA, 25 bp, Homo sapien
tatttactcacactcagtcgatgga

SEQ ID NO: 2289680 - DNA, 25 bp, Homo sapien
catttgtccaccttagactagagta

SEQ ID NO: 2289681 - DNA, 25 bp, Homo sapien
taactgtacaacctaaatggactga

SEQ ID NO: 2289682 - DNA, 25 bp, Homo sapien
ggttctctactctcagatacctgca

SEQ ID NO: 2289683 - DNA, 25 bp, Homo sapien
taacgttttgttcagtgcagcacct

SEQ ID NO: 2289684 - DNA, 25 bp, Homo sapien
tcacgcttgggacagtataaaagaa

SEQ ID NO: 2289685 - DNA, 25 bp, Homo sapien
cagggctttgctcagtaaggcctta

SEQ ID NO: 2289686 - DNA, 25 bp, Homo sapien
gaggagactggaatacaccccactg

SEQ ID NO: 2289687 - DNA, 25 bp, Homo sapien
ggaaaacatacaacggtatttgctc

SEQ ID NO: 2289688 - DNA, 25 bp, Homo sapien
ttgtcacttagatgcttaataggca

SEQ ID NO: 2289689 - DNA, 25 bp, Homo sapien
ttgctctcactctaaatttgacagc

SEQ ID NO: 2289690 - DNA, 25 bp, Homo sapien
cacactgcttgatcaatcgattaca

SEQ ID NO: 2289691 - DNA, 25 bp, Homo sapien
cacctagctagagatcactttttag

SEQ ID NO: 2289692 - DNA, 25 bp, Homo sapien
gcccggccctatgtaagtgtgttaa

SEQ ID NO: 2289693 - DNA, 25 bp, Homo sapien
taaaccttagctaaaacacacactg

SEQ ID NO: 2289694 - DNA, 25 bp, Homo sapien
tgcaaatcagcactgtgctggttga

SEQ ID NO: 2289695 - DNA, 25 bp, Homo sapien
ttgactgcaggcctagcctaaatgg

SEQ ID NO: 2289696 - DNA, 25 bp, Homo sapien
tgactgcaggcctagcctaaatggg

SEQ ID NO: 2289697 - DNA, 25 bp, Homo sapien
tcctcctgcaaatcagcactgtgct

SEQ ID NO: 2289698 - DNA, 25 bp, Homo sapien
aatgccctgcaatggctgtctcggg

SEQ ID NO: 2289699 - DNA, 25 bp, Homo sapien
ggatgaaatcctatgacctctaagg

SEQ ID NO: 2289700 - DNA, 25 bp, Homo sapien
taaggccctgcgtgatctagcacct

SEQ ID NO: 2289701 - DNA, 25 bp, Homo sapien
tagggattagtcctccagagctcgc

SEQ ID NO: 2289702 - DNA, 25 bp, Homo sapien
caatcaacggagtaaaagggacagc

SEQ ID NO: 2289703 - DNA, 25 bp, Homo sapien
cattgatcaaggcaagggtttattt

SEQ ID NO: 2289704 - DNA, 25 bp, Homo sapien
aatgctcacgttgctagtcatcagg

SEQ ID NO: 2289705 - DNA, 25 bp, Homo sapien
gcaaatacagataagtgggattaca

SEQ ID NO: 2289706 - DNA, 25 bp, Homo sapien
tccagaaggaaaggttgtggagagc

SEQ ID NO: 2289707 - DNA, 25 bp, Homo sapien
gatgaatgatcaagggcaggtttcc

SEQ ID NO: 2289708 - DNA, 25 bp, Homo sapien
tgtggagagcggcagaagagcatgc

SEQ ID NO: 2289709 - DNA, 25 bp, Homo sapien
ttgaagtgacgctcaagtcaagatc

SEQ ID NO: 2289710 - DNA, 25 bp, Homo sapien
cgctcagactgttgacatagataga

SEQ ID NO: 2289711 - DNA, 25 bp, Homo sapien
atcgtcctccacattgcccggaaag

SEQ ID NO: 2289712 - DNA, 25 bp, Homo sapien
aaagagccatggttgtacatttctg

SEQ ID NO: 2289713 - DNA, 25 bp, Homo sapien
ggatgttggcccaaagcccatcgtc

SEQ ID NO: 2289714 - DNA, 25 bp, Homo sapien
tagggaccctcaattgcctgtgaca

SEQ ID NO: 2289715 - DNA, 25 bp, Homo sapien
taaaatgcacattcgcgggcaaggt

SEQ ID NO: 2289716 - DNA, 25 bp, Homo sapien
taagggacacattaatcgcttggaa

SEQ ID NO: 2289717 - DNA, 25 bp, Homo sapien
catcccaggcttatgaacaagggcc

SEQ ID NO: 2289718 - DNA, 25 bp, Homo sapien
acagagccagaatgttcaggatgct

SEQ ID NO: 2289719 - DNA, 25 bp, Homo sapien
cacaccgagaaaatatgcgacagat

SEQ ID NO: 2289720 - DNA, 25 bp, Homo sapien
tgcgacagatgataagaagtttttc

SEQ ID NO: 2289721 - DNA, 25 bp, Homo sapien
ggaaagcaatgagagattctgacag

SEQ ID NO: 2289722 - DNA, 25 bp, Homo sapien
ctttggaagagacttgctcagtatc

SEQ ID NO: 2289723 - DNA, 25 bp, Homo sapien
acagcagttttgaggatgacccctt

SEQ ID NO: 2289724 - DNA, 25 bp, Homo sapien
agtatctctgatggtagagggagag

SEQ ID NO: 2289725 - DNA, 25 bp, Homo sapien
gggagagctcataatcgtagaggac

SEQ ID NO: 2289726 - DNA, 25 bp, Homo sapien
gtagaggacataatgatggtgaaga

SEQ ID NO: 2289727 - DNA, 25 bp, Homo sapien
tctgacagtggactagaaaaaatgg

SEQ ID NO: 2289728 - DNA, 25 bp, Homo sapien
tctgtccgcggctgccgccacccaa

SEQ ID NO: 2289729 - DNA, 25 bp, Homo sapien
aattattcgagattaaggcttattg

SEQ ID NO: 2289730 - DNA, 25 bp, Homo sapien
taacacatgtcatggtaattattcg

SEQ ID NO: 2289731 - DNA, 25 bp, Homo sapien
gagataaagtaatcacctgtaaaag

SEQ ID NO: 2289732 - DNA, 25 bp, Homo sapien
atcattggtgtaaaaattaaacttg

SEQ ID NO: 2289733 - DNA, 25 bp, Homo sapien
caaattcatcaaatgccagacgagg

SEQ ID NO: 2289734 - DNA, 25 bp, Homo sapien
tcaaatgccagacgaggctgaagtg

SEQ ID NO: 2289735 - DNA, 25 bp, Homo sapien
cagttgctcttgtcagaaagccaaa

SEQ ID NO: 2289736 - DNA, 25 bp, Homo sapien
ctcagcagttgctcttgtcagaaag

SEQ ID NO: 2289737 - DNA, 25 bp, Homo sapien
taataattctgcacaaggctttttc

SEQ ID NO: 2289738 - DNA, 25 bp, Homo sapien
gcctctcccataaaattatacaggg

SEQ ID NO: 2289739 - DNA, 25 bp, Homo sapien
tggcctctcccataaaattatacag

SEQ ID NO: 2289740 - DNA, 25 bp, Homo sapien
tattgagtaggtaataattctgcac

SEQ ID NO: 2289741 - DNA, 25 bp, Homo sapien
ccaacgtgttaatttccatgccagc

SEQ ID NO: 2289742 - DNA, 25 bp, Homo sapien
ttcatgtttttgcagaccttgacat

SEQ ID NO: 2289743 - DNA, 25 bp, Homo sapien
cttgacatatagctgctttagccat

SEQ ID NO: 2289744 - DNA, 25 bp, Homo sapien
cgtgttaatttccatgccagcttct

SEQ ID NO: 2289745 - DNA, 25 bp, Homo sapien
tctgcactggtattattgtgaactg

SEQ ID NO: 2289746 - DNA, 25 bp, Homo sapien
ctggtattattgtgaactgaaactg

SEQ ID NO: 2289747 - DNA, 25 bp, Homo sapien
cactggtattattgtgaactgaaac

SEQ ID NO: 2289748 - DNA, 25 bp, Homo sapien
catgtctgcactggtattattgtga

SEQ ID NO: 2289749 - DNA, 25 bp, Homo sapien
aaaggttatggctcaggcttcctga

SEQ ID NO: 2289750 - DNA, 25 bp, Homo sapien
tcctgacataagtaaaggaggacac

SEQ ID NO: 2289751 - DNA, 25 bp, Homo sapien
tcaggcttcctgacataagtaaagg

SEQ ID NO: 2289752 - DNA, 25 bp, Homo sapien
ttttttaatcaaaggttatggctca

SEQ ID NO: 2289753 - DNA, 25 bp, Homo sapien
ccatcgattaagttcttaatttcgg

SEQ ID NO: 2289754 - DNA, 25 bp, Homo sapien
aattaatttgttactaaatccatcg

SEQ ID NO: 2289755 - DNA, 25 bp, Homo sapien
tattccttctgtacataattctggg

SEQ ID NO: 2289756 - DNA, 25 bp, Homo sapien
tgtttctgacttaccttataattta

SEQ ID NO: 2289757 - DNA, 25 bp, Homo sapien
tcattcagggctactatgggacatt

SEQ ID NO: 2289758 - DNA, 25 bp, Homo sapien
ctaaactgacacagaagagaggtct

SEQ ID NO: 2289759 - DNA, 25 bp, Homo sapien
cattcactgacgaggcagggtgtta

SEQ ID NO: 2289760 - DNA, 25 bp, Homo sapien
gcaagggcacattgaacattctcca

SEQ ID NO: 2289761 - DNA, 25 bp, Homo sapien
ctttgtaggtcactaaggactatag

SEQ ID NO: 2289762 - DNA, 25 bp, Homo sapien
taggtcactaaggactataggcatg

SEQ ID NO: 2289763 - DNA, 25 bp, Homo sapien
aggtcactaaggactataggcatgg

SEQ ID NO: 2289764 - DNA, 25 bp, Homo sapien
tgtaggtcactaaggactataggca

SEQ ID NO: 2289765 - DNA, 25 bp, Homo sapien
aaaaaaggtagagtgcgcagtggct

SEQ ID NO: 2289766 - DNA, 25 bp, Homo sapien
aggagtttgagcctcgcaccactgc

SEQ ID NO: 2289767 - DNA, 25 bp, Homo sapien
gattaggaactaagacaggcctcca

SEQ ID NO: 2289768 - DNA, 25 bp, Homo sapien
tgggccacggctcctagaggatgca

SEQ ID NO: 2289769 - DNA, 25 bp, Homo sapien
ccagtcgggctttgaagatagtcca

SEQ ID NO: 2289770 - DNA, 25 bp, Homo sapien
tagaaacgatcattagcttcccagg

SEQ ID NO: 2289771 - DNA, 25 bp, Homo sapien
tctgtcaggtgctagccaggcttag

SEQ ID NO: 2289772 - DNA, 25 bp, Homo sapien
caggatatccctgggcatcgagcca

SEQ ID NO: 2289773 - DNA, 25 bp, Homo sapien
ttttttaaatccagggcatgtacta

SEQ ID NO: 2289774 - DNA, 25 bp, Homo sapien
tgcccggccagccttctgtaatttt

SEQ ID NO: 2289775 - DNA, 25 bp, Homo sapien
ttttaaatccagggcatgtactagt

SEQ ID NO: 2289776 - DNA, 25 bp, Homo sapien
tttaaatccagggcatgtactagtt

SEQ ID NO: 2289777 - DNA, 25 bp, Homo sapien
agccaaaccataacagagaagcaag

SEQ ID NO: 2289778 - DNA, 25 bp, Homo sapien
ttcacaaggcgaccagagaaggcag

SEQ ID NO: 2289779 - DNA, 25 bp, Homo sapien
aaaccataacagagaagcaagcacc

SEQ ID NO: 2289780 - DNA, 25 bp, Homo sapien
tcaccatcacgagaaaaacacagga

SEQ ID NO: 2289781 - DNA, 25 bp, Homo sapien
tagaggtccaactacaacctggtca

SEQ ID NO: 2289782 - DNA, 25 bp, Homo sapien
ccccagggctaggttggtagcagct

SEQ ID NO: 2289783 - DNA, 25 bp, Homo sapien
tattttcgaggtagtggattggcca

SEQ ID NO: 2289784 - DNA, 25 bp, Homo sapien
gacatcaacactgggccctagaggt

SEQ ID NO: 2289785 - DNA, 25 bp, Homo sapien
tcaaatacttatagcactgtgccag

SEQ ID NO: 2289786 - DNA, 25 bp, Homo sapien
cccttggccaggagattctgtgcga

SEQ ID NO: 2289787 - DNA, 25 bp, Homo sapien
tcatggttagtgacgcaggaaggac

SEQ ID NO: 2289788 - DNA, 25 bp, Homo sapien
tatcctacccaatcatacagacgtg

SEQ ID NO: 2289789 - DNA, 25 bp, Homo sapien
tccagggttttttgcgctgatcttg

SEQ ID NO: 2289790 - DNA, 25 bp, Homo sapien
ttgcgctgatcttgtcatccaaagg

SEQ ID NO: 2289791 - DNA, 25 bp, Homo sapien
ggagtcaaatgtactccaggtggcc

SEQ ID NO: 2289792 - DNA, 25 bp, Homo sapien
ggacgtaagctcagtgcatccaggg

SEQ ID NO: 2289793 - DNA, 25 bp, Homo sapien
gaatgaccctcagcatagtaacata

SEQ ID NO: 2289794 - DNA, 25 bp, Homo sapien
catatgcatctagaatttacataca

SEQ ID NO: 2289795 - DNA, 25 bp, Homo sapien
gaggacgacatcaacttacactgct

SEQ ID NO: 2289796 - DNA, 25 bp, Homo sapien
aatgagcacaagtctctgacacaga

SEQ ID NO: 2289797 - DNA, 25 bp, Homo sapien
cccatctgcagttacggaaggcaaa

SEQ ID NO: 2289798 - DNA, 25 bp, Homo sapien
gccacccgacacaggagagtgaatt

SEQ ID NO: 2289799 - DNA, 25 bp, Homo sapien
gctgtgtacacaattcaaaagggaa

SEQ ID NO: 2289800 - DNA, 25 bp, Homo sapien
ggcttaatgttaatcccagcaaaga

SEQ ID NO: 2289801 - DNA, 25 bp, Homo sapien
catcctgtccactgtgaacctgtga

SEQ ID NO: 2289802 - DNA, 25 bp, Homo sapien
gggtaagagtcaaggtgcaatccac

SEQ ID NO: 2289803 - DNA, 25 bp, Homo sapien
taactcatgaacattggtgtcacct

SEQ ID NO: 2289804 - DNA, 25 bp, Homo sapien
tgaggacgtccaggatcaagttgcc

SEQ ID NO: 2289805 - DNA, 25 bp, Homo sapien
gatggtcaactagtcactgccagga

SEQ ID NO: 2289806 - DNA, 25 bp, Homo sapien
gaagacataaactctgggctgaagg

SEQ ID NO: 2289807 - DNA, 25 bp, Homo sapien
cattgagagtgtaccgaaggaagac

SEQ ID NO: 2289808 - DNA, 25 bp, Homo sapien
ttaaacaggcgaggagtggcccact

SEQ ID NO: 2289809 - DNA, 25 bp, Homo sapien
tgcatagagctaaacccacaggctg

SEQ ID NO: 2289810 - DNA, 25 bp, Homo sapien
taatacttgggcacttaggaccact

SEQ ID NO: 2289811 - DNA, 25 bp, Homo sapien
ggcagtcaacccagatttgcagcaa

SEQ ID NO: 2289812 - DNA, 25 bp, Homo sapien
tgtgtacccctatgaagtaagaggc

SEQ ID NO: 2289813 - DNA, 25 bp, Homo sapien
gagtatgatttcatgcacctgctca

SEQ ID NO: 2289814 - DNA, 25 bp, Homo sapien
cccgattgcccaggacattgcttct

SEQ ID NO: 2289815 - DNA, 25 bp, Homo sapien
gctccctcaacctttgggagtatga

SEQ ID NO: 2289816 - DNA, 25 bp, Homo sapien
ccagctgcacgcattttaccgtaaa

SEQ ID NO: 2289817 - DNA, 25 bp, Homo sapien
cagactgaggaatgcccctgtaacc

SEQ ID NO: 2289818 - DNA, 25 bp, Homo sapien
tgagcgctcaggttctactagtggt

SEQ ID NO: 2289819 - DNA, 25 bp, Homo sapien
ggtcaacttactacgagcaagcaga

SEQ ID NO: 2289820 - DNA, 25 bp, Homo sapien
tatatgaccttcaactgggagcagg

SEQ ID NO: 2289821 - DNA, 25 bp, Homo sapien
caatacccatggaaacgtccactct

SEQ ID NO: 2289822 - DNA, 25 bp, Homo sapien
tttgactggttctgctcatgacagg

SEQ ID NO: 2289823 - DNA, 25 bp, Homo sapien
ggcactaagaatggggccctttgac

SEQ ID NO: 2289824 - DNA, 25 bp, Homo sapien
cagttgtgagccaagtgcgttcacc

SEQ ID NO: 2289825 - DNA, 25 bp, Homo sapien
tatccctctggctcataaaacccag

SEQ ID NO: 2289826 - DNA, 25 bp, Homo sapien
gcatctgcgtcttgatatccctctg

SEQ ID NO: 2289827 - DNA, 25 bp, Homo sapien
gaccgaaatgtttgtctcttgggca

SEQ ID NO: 2289828 - DNA, 25 bp, Homo sapien
taggccactcagagatctcattcac

SEQ ID NO: 2289829 - DNA, 25 bp, Homo sapien
gctatttttatctcctgaaacagga

SEQ ID NO: 2289830 - DNA, 25 bp, Homo sapien
gactttaaccagtccagaaagctat

SEQ ID NO: 2289831 - DNA, 25 bp, Homo sapien
gcaaaatatagtgaaggtctttgtt

SEQ ID NO: 2289832 - DNA, 25 bp, Homo sapien
aagtcacactattcatatgatagat

SEQ ID NO: 2289833 - DNA, 25 bp, Homo sapien
agttgtagaacataaatccacgaag

SEQ ID NO: 2289834 - DNA, 25 bp, Homo sapien
cagttgtagaacataaatccacgaa

SEQ ID NO: 2289835 - DNA, 25 bp, Homo sapien
gttgtagaacataaatccacgaaga

SEQ ID NO: 2289836 - DNA, 25 bp, Homo sapien
tcagttgtagaacataaatccacga

SEQ ID NO: 2289837 - DNA, 25 bp, Homo sapien
agtgaagccatgaaagctcattgca

SEQ ID NO: 2289838 - DNA, 25 bp, Homo sapien
gcagtgaagccatgaaagctcattg

SEQ ID NO: 2289839 - DNA, 25 bp, Homo sapien
ggagtgcagtgaagccatgaaagct

SEQ ID NO: 2289840 - DNA, 25 bp, Homo sapien
gaagccatgaaagctcattgcaagc

SEQ ID NO: 2289841 - DNA, 25 bp, Homo sapien
tctcttcaagatactaagcttctgc

SEQ ID NO: 2289842 - DNA, 25 bp, Homo sapien
gaaggcctggtcaccacagtgggat

SEQ ID NO: 2289843 - DNA, 25 bp, Homo sapien
tggtagagtccagcaaagtcccaga

SEQ ID NO: 2289844 - DNA, 25 bp, Homo sapien
gaataggatccaaccagcccactat

SEQ ID NO: 2289845 - DNA, 25 bp, Homo sapien
aagaacccctagctcaggtatgaag

SEQ ID NO: 2289846 - DNA, 25 bp, Homo sapien
aaacaaatgcgggatctcaagaacc

SEQ ID NO: 2289847 - DNA, 25 bp, Homo sapien
ggttcaaccgctccacttatgagga

SEQ ID NO: 2289848 - DNA, 25 bp, Homo sapien
tgacagatgtctccagctgcaattt

SEQ ID NO: 2289849 - DNA, 25 bp, Homo sapien
gttgtggtgaatgccattgttttat

SEQ ID NO: 2289850 - DNA, 25 bp, Homo sapien
gagtagtattcctatacattcctac

SEQ ID NO: 2289851 - DNA, 25 bp, Homo sapien
ctttattcgttgattgataggcatt

SEQ ID NO: 2289852 - DNA, 25 bp, Homo sapien
tcgccacccctaactctttccacca

SEQ ID NO: 2289853 - DNA, 25 bp, Homo sapien
gatgtcctatactcccttcgatgcc

SEQ ID NO: 2289854 - DNA, 25 bp, Homo sapien
gcaatcccgttagatgtcctatact

SEQ ID NO: 2289855 - DNA, 25 bp, Homo sapien
cttcgatgcctaacgccttcctcct

SEQ ID NO: 2289856 - DNA, 25 bp, Homo sapien
tttctctgcaatcccgttagatgtc

SEQ ID NO: 2289857 - DNA, 25 bp, Homo sapien
caagcttggtgcttgtcccactggg

SEQ ID NO: 2289858 - DNA, 25 bp, Homo sapien
tcctggagaacgtactggcaagctt

SEQ ID NO: 2289859 - DNA, 25 bp, Homo sapien
aacaagtcctggagaacgtactggc

SEQ ID NO: 2289860 - DNA, 25 bp, Homo sapien
gaacgtactggcaagcttggtgctt

SEQ ID NO: 2289861 - DNA, 25 bp, Homo sapien
tccgctaaacctaggccacctgagg

SEQ ID NO: 2289862 - DNA, 25 bp, Homo sapien
ccgctaaacctaggccacctgaggt

SEQ ID NO: 2289863 - DNA, 25 bp, Homo sapien
cgctaaacctaggccacctgaggtt

SEQ ID NO: 2289864 - DNA, 25 bp, Homo sapien
gttttgtaatactcaaagccatcca

SEQ ID NO: 2289865 - DNA, 25 bp, Homo sapien
ttgaaccctagtcaacccacattga

SEQ ID NO: 2289866 - DNA, 25 bp, Homo sapien
ccatccatgtctaccgcaaataaaa

SEQ ID NO: 2289867 - DNA, 25 bp, Homo sapien
tgtctaccgcaaataaaatctcttc

SEQ ID NO: 2289868 - DNA, 25 bp, Homo sapien
accagaattagtcccttctcacatt

SEQ ID NO: 2289869 - DNA, 25 bp, Homo sapien
ttagtcccttctcacattgctgata

SEQ ID NO: 2289870 - DNA, 25 bp, Homo sapien
cataccagaattagtcccttctcac

SEQ ID NO: 2289871 - DNA, 25 bp, Homo sapien
tagtcccttctcacattgctgataa

SEQ ID NO: 2289872 - DNA, 25 bp, Homo sapien
gactacgtgtgggattgtaagaact

SEQ ID NO: 2289873 - DNA, 25 bp, Homo sapien
caaaattcttgtggactgacaaacc

SEQ ID NO: 2289874 - DNA, 25 bp, Homo sapien
taaaaaatactacgtcagctcaggc

SEQ ID NO: 2289875 - DNA, 25 bp, Homo sapien
tctcataccacatggagactacgtg

SEQ ID NO: 2289876 - DNA, 25 bp, Homo sapien
tcaactgcaacctgcgttctctggg

SEQ ID NO: 2289877 - DNA, 25 bp, Homo sapien
gaagcgtttgttcaggtgttctacc

SEQ ID NO: 2289878 - DNA, 25 bp, Homo sapien
tcacacaacacatgaaaggagacat

SEQ ID NO: 2289879 - DNA, 25 bp, Homo sapien
acagtctctgttttgatagccatgg

SEQ ID NO: 2289880 - DNA, 25 bp, Homo sapien
taggtgagacttactctgggaaaac

SEQ ID NO: 2289881 - DNA, 25 bp, Homo sapien
agtatctcccgtgctaggtaagtaa

SEQ ID NO: 2289882 - DNA, 25 bp, Homo sapien
aatcacaggggccagtatacccaga

SEQ ID NO: 2289883 - DNA, 25 bp, Homo sapien
tacccagagtgcaataggtgagact

SEQ ID NO: 2289884 - DNA, 25 bp, Homo sapien
tagaaggcacaagaatagaagacga

SEQ ID NO: 2289885 - DNA, 25 bp, Homo sapien
tctacagcggtgtagctgacaatcc

SEQ ID NO: 2289886 - DNA, 25 bp, Homo sapien
ggattcagccacgtctgtagaggtg

SEQ ID NO: 2289887 - DNA, 25 bp, Homo sapien
gacaaagtcaacatgagatgctcct

SEQ ID NO: 2289888 - DNA, 25 bp, Homo sapien
tagagaacaagtggtggatgatgca

SEQ ID NO: 2289889 - DNA, 25 bp, Homo sapien
caaatgcggctatggtagttgtgtg

SEQ ID NO: 2289890 - DNA, 25 bp, Homo sapien
tgtgtgagcctgaatgtttagttga

SEQ ID NO: 2289891 - DNA, 25 bp, Homo sapien
ccctccaggtggactggtgtcaaat

SEQ ID NO: 2289892 - DNA, 25 bp, Homo sapien
gagtccatctcgagagcctagcgaa

SEQ ID NO: 2289893 - DNA, 25 bp, Homo sapien
catctcgagagcctagcgaaacaca

SEQ ID NO: 2289894 - DNA, 25 bp, Homo sapien
ctcgagagcctagcgaaacacaggg

SEQ ID NO: 2289895 - DNA, 25 bp, Homo sapien
gaactgagtccatctcgagagccta

SEQ ID NO: 2289896 - DNA, 25 bp, Homo sapien
accctaaggaggcactagtgaagcc

SEQ ID NO: 2289897 - DNA, 25 bp, Homo sapien
cctaaggaggcactagtgaagccta

SEQ ID NO: 2289898 - DNA, 25 bp, Homo sapien
gaggcactagtgaagcctaatgttt

SEQ ID NO: 2289899 - DNA, 25 bp, Homo sapien
taaggaggcactagtgaagcctaat

SEQ ID NO: 2289900 - DNA, 25 bp, Homo sapien
ctttgagtagatgagtaattttatg

SEQ ID NO: 2289901 - DNA, 25 bp, Homo sapien
ttgagtagatgagtaattttatggc

SEQ ID NO: 2289902 - DNA, 25 bp, Homo sapien
tttatggcatttggcagttgctttc

SEQ ID NO: 2289903 - DNA, 25 bp, Homo sapien
attttatggcatttggcagttgctt

SEQ ID NO: 2289904 - DNA, 25 bp, Homo sapien
gagagcgaccagcatacccaaaggt

SEQ ID NO: 2289905 - DNA, 25 bp, Homo sapien
tagtttgtaggccaccaaaccacaa

SEQ ID NO: 2289906 - DNA, 25 bp, Homo sapien
ggccgatagaacatcttttagtttg

SEQ ID NO: 2289907 - DNA, 25 bp, Homo sapien
acatctggccccgatggagagcgac

SEQ ID NO: 2289908 - DNA, 25 bp, Homo sapien
aaggatatagtcaggcatcacagcg

SEQ ID NO: 2289909 - DNA, 25 bp, Homo sapien
taaatcccaaaggatatagtcaggc

SEQ ID NO: 2289910 - DNA, 25 bp, Homo sapien
gtcaggcatcacagcgaacacggga

SEQ ID NO: 2289911 - DNA, 25 bp, Homo sapien
aaaatgactaaatcccaaaggatat

SEQ ID NO: 2289912 - DNA, 25 bp, Homo sapien
tcagggggtatgtactttgatacag

SEQ ID NO: 2289913 - DNA, 25 bp, Homo sapien
tctataccagtaggacatggactat

SEQ ID NO: 2289914 - DNA, 25 bp, Homo sapien
tataccagtaggacatggactatcc

SEQ ID NO: 2289915 - DNA, 25 bp, Homo sapien
ctagtctataccagtaggacatgga

SEQ ID NO: 2289916 - DNA, 25 bp, Homo sapien
tagtctataccagtaggacatggac

SEQ ID NO: 2289917 - DNA, 25 bp, Homo sapien
gaagacacagttaatgctagtacca

SEQ ID NO: 2289918 - DNA, 25 bp, Homo sapien
cctggcacatgggagatgtctaagg

SEQ ID NO: 2289919 - DNA, 25 bp, Homo sapien
agacaggtgatgcttctcaaagaag

SEQ ID NO: 2289920 - DNA, 25 bp, Homo sapien
catggatcatgtaatagggacttaa

SEQ ID NO: 2289921 - DNA, 25 bp, Homo sapien
tgcttaaatgtgtcaaaggctcttt

SEQ ID NO: 2289922 - DNA, 25 bp, Homo sapien
aaatgtgtcaaaggctctttgccat

SEQ ID NO: 2289923 - DNA, 25 bp, Homo sapien
taaatgtgtcaaaggctctttgcca

SEQ ID NO: 2289924 - DNA, 25 bp, Homo sapien
cttaaatgtgtcaaaggctctttgc

SEQ ID NO: 2289925 - DNA, 25 bp, Homo sapien
tccactagggatgatccatcgaaca

SEQ ID NO: 2289926 - DNA, 25 bp, Homo sapien
cactagggatgatccatcgaacaca

SEQ ID NO: 2289927 - DNA, 25 bp, Homo sapien
actagggatgatccatcgaacacac

SEQ ID NO: 2289928 - DNA, 25 bp, Homo sapien
ctatccactagggatgatccatcga

SEQ ID NO: 2289929 - DNA, 25 bp, Homo sapien
gccacactccaggaaatttcaaact

SEQ ID NO: 2289930 - DNA, 25 bp, Homo sapien
tggcgggcaggtatgctgatttatc

SEQ ID NO: 2289931 - DNA, 25 bp, Homo sapien
cagaaaactccacgtcaaggatcca

SEQ ID NO: 2289932 - DNA, 25 bp, Homo sapien
caaggatccaataatggctgcttct

SEQ ID NO: 2289933 - DNA, 25 bp, Homo sapien
gatttatcagcatgttttcttcatc

SEQ ID NO: 2289934 - DNA, 25 bp, Homo sapien
agcccactttcacataattccatga

SEQ ID NO: 2289935 - DNA, 25 bp, Homo sapien
agcagcccactttcacataattcca

SEQ ID NO: 2289936 - DNA, 25 bp, Homo sapien
cactttcacataattccatgatgga

SEQ ID NO: 2289937 - DNA, 25 bp, Homo sapien
ccactttcacataattccatgatgg

SEQ ID NO: 2289938 - DNA, 25 bp, Homo sapien
tatctaacacagagaggagaagctg

SEQ ID NO: 2289939 - DNA, 25 bp, Homo sapien
gagagtcatcatattaaggtccctt

SEQ ID NO: 2289940 - DNA, 25 bp, Homo sapien
gaagctggacttcaagctgtgctaa

SEQ ID NO: 2289941 - DNA, 25 bp, Homo sapien
aaggtccctttgatctagaattctc

SEQ ID NO: 2289942 - DNA, 25 bp, Homo sapien
cttcttggtcccgtagcctgtgtat

SEQ ID NO: 2289943 - DNA, 25 bp, Homo sapien
cgtagcctgtgtatgattcacagta

SEQ ID NO: 2289944 - DNA, 25 bp, Homo sapien
agtattctttccatcgctttcccca

SEQ ID NO: 2289945 - DNA, 25 bp, Homo sapien
agccagacatgcaagcgttcacctt

SEQ ID NO: 2289946 - DNA, 25 bp, Homo sapien
ctccaactccagtggtagcaccatg

SEQ ID NO: 2289947 - DNA, 25 bp, Homo sapien
gaaggtggcagagtgcttgcattca

SEQ ID NO: 2289948 - DNA, 25 bp, Homo sapien
aactccagtggtagcaccatgtgca

SEQ ID NO: 2289949 - DNA, 25 bp, Homo sapien
caactccagtggtagcaccatgtgc

SEQ ID NO: 2289950 - DNA, 25 bp, Homo sapien
tagtaatccattaggcgcggtgagg

SEQ ID NO: 2289951 - DNA, 25 bp, Homo sapien
tacttctgaggtaagccagcactcc

SEQ ID NO: 2289952 - DNA, 25 bp, Homo sapien
cactgacgtcaatgagagccaggca

SEQ ID NO: 2289953 - DNA, 25 bp, Homo sapien
ggaagtgccaaattctgccctacag

SEQ ID NO: 2289954 - DNA, 25 bp, Homo sapien
caactgcattcttaattacctttct

SEQ ID NO: 2289955 - DNA, 25 bp, Homo sapien
tggcatacataacgtgcccacagtt

SEQ ID NO: 2289956 - DNA, 25 bp, Homo sapien
ttgaattcccttttgctggcataca

SEQ ID NO: 2289957 - DNA, 25 bp, Homo sapien
tactccagcataggactggggactg

SEQ ID NO: 2289958 - DNA, 25 bp, Homo sapien
cttatatattgtctcagtccctttg

SEQ ID NO: 2289959 - DNA, 25 bp, Homo sapien
ttatatattgtctcagtccctttgt

SEQ ID NO: 2289960 - DNA, 25 bp, Homo sapien
gtcatgtaaagatcaagatttattc

SEQ ID NO: 2289961 - DNA, 25 bp, Homo sapien
taatctctgtcatgtaaagatcaag

SEQ ID NO: 2289962 - DNA, 25 bp, Homo sapien
tctctgtcatgtaaagatcaagatt

SEQ ID NO: 2289963 - DNA, 25 bp, Homo sapien
ctgtaatctctgtcatgtaaagatc

SEQ ID NO: 2289964 - DNA, 25 bp, Homo sapien
catcactggctgttagaaccaggca

SEQ ID NO: 2289965 - DNA, 25 bp, Homo sapien
ttcatcactggctgttagaaccagg

SEQ ID NO: 2289966 - DNA, 25 bp, Homo sapien
gctgttagaaccaggcatgtctttt

SEQ ID NO: 2289967 - DNA, 25 bp, Homo sapien
actggctgttagaaccaggcatgtc

SEQ ID NO: 2289968 - DNA, 25 bp, Homo sapien
taaggagaggactattggaatcacc

SEQ ID NO: 2289969 - DNA, 25 bp, Homo sapien
tcaccttaggagaatttagcaaaat

SEQ ID NO: 2289970 - DNA, 25 bp, Homo sapien
tcccatgctgtaaccaatatatgct

SEQ ID NO: 2289971 - DNA, 25 bp, Homo sapien
atatatgctgatgggttattagagc

SEQ ID NO: 2289972 - DNA, 25 bp, Homo sapien
attctgctcctactgcgggcaacca

SEQ ID NO: 2289973 - DNA, 25 bp, Homo sapien
tcctactgcgggcaaccagttatcg

SEQ ID NO: 2289974 - DNA, 25 bp, Homo sapien
ggcaaccagttatcgtggcccctcg

SEQ ID NO: 2289975 - DNA, 25 bp, Homo sapien
ctgcgggcaaccagttatcgtggcc

SEQ ID NO: 2289976 - DNA, 25 bp, Homo sapien
tttatccaagacaacggaccaagag

SEQ ID NO: 2289977 - DNA, 25 bp, Homo sapien
tatccaagacaacggaccaagagca

SEQ ID NO: 2289978 - DNA, 25 bp, Homo sapien
caagacaacggaccaagagcacttt

SEQ ID NO: 2289979 - DNA, 25 bp, Homo sapien
caacggaccaagagcactttttaca

SEQ ID NO: 2289980 - DNA, 25 bp, Homo sapien
ttaggagttctgctgcaataataac

SEQ ID NO: 2289981 - DNA, 25 bp, Homo sapien
gattgtcttagcagcattaatcagg

SEQ ID NO: 2289982 - DNA, 25 bp, Homo sapien
tgcttccttgcaagcaagtcgttag

SEQ ID NO: 2289983 - DNA, 25 bp, Homo sapien
tagccactaataactgatgtgggat

SEQ ID NO: 2289984 - DNA, 25 bp, Homo sapien
cagttcatctttgttaacaattagg

SEQ ID NO: 2289985 - DNA, 25 bp, Homo sapien
agtcaaggcaagcaatttttgcatt

SEQ ID NO: 2289986 - DNA, 25 bp, Homo sapien
aagtcaaggcaagcaatttttgcat

SEQ ID NO: 2289987 - DNA, 25 bp, Homo sapien
catcaattccaccagtggttagaat

SEQ ID NO: 2289988 - DNA, 25 bp, Homo sapien
tgctccagaagctttagcaatgcct

SEQ ID NO: 2289989 - DNA, 25 bp, Homo sapien
gctccagaagctttagcaatgcctt

SEQ ID NO: 2289990 - DNA, 25 bp, Homo sapien
aagatcagctcatcatcacaaattc

SEQ ID NO: 2289991 - DNA, 25 bp, Homo sapien
gcatcatgtaaagagcgctccatct

SEQ ID NO: 2289992 - DNA, 25 bp, Homo sapien
atcatgtaaagagcgctccatctca

SEQ ID NO: 2289993 - DNA, 25 bp, Homo sapien
catcatgtaaagagcgctccatctc

SEQ ID NO: 2289994 - DNA, 25 bp, Homo sapien
ctggaaccatggattttgactccaa

SEQ ID NO: 2289995 - DNA, 25 bp, Homo sapien
ccatggattttgactccaaaactct

SEQ ID NO: 2289996 - DNA, 25 bp, Homo sapien
atggattttgactccaaaactctct

SEQ ID NO: 2289997 - DNA, 25 bp, Homo sapien
gattttgactccaaaactctcttca

SEQ ID NO: 2289998 - DNA, 25 bp, Homo sapien
atgctggttgcatagttttcaaggt

SEQ ID NO: 2289999 - DNA, 25 bp, Homo sapien
catgctggttgcatagttttcaagg

SEQ ID NO: 2290000 - DNA, 25 bp, Homo sapien
tgtctccacgttcaccattgctcaa

SEQ ID NO: 2290001 - DNA, 25 bp, Homo sapien
tttgttgtctccacgttcaccattg

SEQ ID NO: 2290002 - DNA, 25 bp, Homo sapien
tgttgtctccacgttcaccattgct

SEQ ID NO: 2290003 - DNA, 25 bp, Homo sapien
tgtttgttgtctccacgttcaccat

SEQ ID NO: 2290004 - DNA, 25 bp, Homo sapien
ttaatgtgtaatactcaactcaagg

SEQ ID NO: 2290005 - DNA, 25 bp, Homo sapien
taatactcaactcaaggtacaagac

SEQ ID NO: 2290006 - DNA, 25 bp, Homo sapien
tgtgtaatactcaactcaaggtaca

SEQ ID NO: 2290007 - DNA, 25 bp, Homo sapien
caactcaaggtacaagacaattgca

SEQ ID NO: 2290008 - DNA, 25 bp, Homo sapien
tggaacctccactacatggcagatg

SEQ ID NO: 2290009 - DNA, 25 bp, Homo sapien
tcctccatgttgagggtgcagactc

SEQ ID NO: 2290010 - DNA, 25 bp, Homo sapien
ggtgcccatcatgctggagtccttc

SEQ ID NO: 2290011 - DNA, 25 bp, Homo sapien
tgtcctctgttcttggtcctaagag

SEQ ID NO: 2290012 - DNA, 25 bp, Homo sapien
aaaatgttctagttgtagccccagg

SEQ ID NO: 2290013 - DNA, 25 bp, Homo sapien
tcttcataggtatcacccaggccct

SEQ ID NO: 2290014 - DNA, 25 bp, Homo sapien
caactttgcctttgagtgagtactc

SEQ ID NO: 2290015 - DNA, 25 bp, Homo sapien
ggagtcagtgctctccaatgtgaga

SEQ ID NO: 2290016 - DNA, 25 bp, Homo sapien
atgcgctccagcttaggcaaagagg

SEQ ID NO: 2290017 - DNA, 25 bp, Homo sapien
agtgagcgatgatcacaccaatgcg

SEQ ID NO: 2290018 - DNA, 25 bp, Homo sapien
acaccaatgcgctccagcttaggca

SEQ ID NO: 2290019 - DNA, 25 bp, Homo sapien
ccaatgcgctccagcttaggcaaag

SEQ ID NO: 2290020 - DNA, 25 bp, Homo sapien
tcactgtgaacgtccacggcttcat

SEQ ID NO: 2290021 - DNA, 25 bp, Homo sapien
aggtctaatactcactgtgaacgtc

SEQ ID NO: 2290022 - DNA, 25 bp, Homo sapien
taacactcatcgcacaggtctgtgg

SEQ ID NO: 2290023 - DNA, 25 bp, Homo sapien
gaagttagcgagaggacaaacccac

SEQ ID NO: 2290024 - DNA, 25 bp, Homo sapien
catttgaaagtcaggcatacattta

SEQ ID NO: 2290025 - DNA, 25 bp, Homo sapien
tcatgataatactgatttgaaggca

SEQ ID NO: 2290026 - DNA, 25 bp, Homo sapien
cagtgagtgctggtcataaagcttg

SEQ ID NO: 2290027 - DNA, 25 bp, Homo sapien
ggcattctttctaataaggcgaaca

SEQ ID NO: 2290028 - DNA, 25 bp, Homo sapien
gcaatgtcaccagggctgactgtgg

SEQ ID NO: 2290029 - DNA, 25 bp, Homo sapien
ctgactgtggctggaaggtctgaag

SEQ ID NO: 2290030 - DNA, 25 bp, Homo sapien
tgatatgcaatgtcaccagggctga

SEQ ID NO: 2290031 - DNA, 25 bp, Homo sapien
ggctggaaggtctgaagaaactgtt

SEQ ID NO: 2290032 - DNA, 25 bp, Homo sapien
attccatcttggaccaatcaaatgt

SEQ ID NO: 2290033 - DNA, 25 bp, Homo sapien
cacattccatcttggaccaatcaaa

SEQ ID NO: 2290034 - DNA, 25 bp, Homo sapien
cattccatcttggaccaatcaaatg

SEQ ID NO: 2290035 - DNA, 25 bp, Homo sapien
gtcacattccatcttggaccaatca

SEQ ID NO: 2290036 - DNA, 25 bp, Homo sapien
gccaaggaatgtgcgaggcccttta

SEQ ID NO: 2290037 - DNA, 25 bp, Homo sapien
caaggaatgtgcgaggccctttaga

SEQ ID NO: 2290038 - DNA, 25 bp, Homo sapien
caagccaaggaatgtgcgaggccct

SEQ ID NO: 2290039 - DNA, 25 bp, Homo sapien
aggaatgtgcgaggccctttagaag

SEQ ID NO: 2290040 - DNA, 25 bp, Homo sapien
cacagtgggcttcaagtagaggttt

SEQ ID NO: 2290041 - DNA, 25 bp, Homo sapien
tacatctggatttgcccaaccctag

SEQ ID NO: 2290042 - DNA, 25 bp, Homo sapien
gcagtgtgtctcaatcctaaggtat

SEQ ID NO: 2290043 - DNA, 25 bp, Homo sapien
aatttaccagtacttgcacagtggg

SEQ ID NO: 2290044 - DNA, 25 bp, Homo sapien
tattatcactgtagccccaacaggc

SEQ ID NO: 2290045 - DNA, 25 bp, Homo sapien
gctagttagcattttcacagggaaa

SEQ ID NO: 2290046 - DNA, 25 bp, Homo sapien
taagtttgacagttgctttgacctg

SEQ ID NO: 2290047 - DNA, 25 bp, Homo sapien
gatggtggtggctcaatgtattgct

SEQ ID NO: 2290048 - DNA, 25 bp, Homo sapien
tacagcttggttgtgcattggcagt

SEQ ID NO: 2290049 - DNA, 25 bp, Homo sapien
ggacaattggctctacttagtgaaa

SEQ ID NO: 2290050 - DNA, 25 bp, Homo sapien
gatggtcactctaactccttaacag

SEQ ID NO: 2290051 - DNA, 25 bp, Homo sapien
gctccgttagctggcttctaggtga

SEQ ID NO: 2290052 - DNA, 25 bp, Homo sapien
gtatgtattgttattctattagcga

SEQ ID NO: 2290053 - DNA, 25 bp, Homo sapien
tattctattagcgatgatttcaaaa

SEQ ID NO: 2290054 - DNA, 25 bp, Homo sapien
aaatgcctagaactatttctgggca

SEQ ID NO: 2290055 - DNA, 25 bp, Homo sapien
tccagcaccatattacttgtatgta

SEQ ID NO: 2290056 - DNA, 25 bp, Homo sapien
gattatgtaaggtactgagaacaag

SEQ ID NO: 2290057 - DNA, 25 bp, Homo sapien
ttgtggagctgtttgtcttactaac

SEQ ID NO: 2290058 - DNA, 25 bp, Homo sapien
gagagaattgactttgtggagctgt

SEQ ID NO: 2290059 - DNA, 25 bp, Homo sapien
gacagtgggtattaaggagagaatt

SEQ ID NO: 2290060 - DNA, 25 bp, Homo sapien
ttctgctgatacacgtttctaaagc

SEQ ID NO: 2290061 - DNA, 25 bp, Homo sapien
cacgtttctaaagcaccaagcagcc

SEQ ID NO: 2290062 - DNA, 25 bp, Homo sapien
ctaatttgccctggcacaaggacag

SEQ ID NO: 2290063 - DNA, 25 bp, Homo sapien
taaagcaccaagcagcctctgctga

SEQ ID NO: 2290064 - DNA, 25 bp, Homo sapien
gtcaaggacgggtccagaatcagat

SEQ ID NO: 2290065 - DNA, 25 bp, Homo sapien
tcctggtctagagaaatggttgtca

SEQ ID NO: 2290066 - DNA, 25 bp, Homo sapien
ccagaattgaggattcctggtctag

SEQ ID NO: 2290067 - DNA, 25 bp, Homo sapien
tccccatatccaaggttgcacgatg

SEQ ID NO: 2290068 - DNA, 25 bp, Homo sapien
tggctcaaggagaagaacagatgtg

SEQ ID NO: 2290069 - DNA, 25 bp, Homo sapien
tgggtcatcagggtgcatcaccaac

SEQ ID NO: 2290070 - DNA, 25 bp, Homo sapien
cctgcacttgcagatgcgtggtaat

SEQ ID NO: 2290071 - DNA, 25 bp, Homo sapien
caatgggagcatcgctagtgaaaag

SEQ ID NO: 2290072 - DNA, 25 bp, Homo sapien
tgtcaaaagacacttgcagaacaaa

SEQ ID NO: 2290073 - DNA, 25 bp, Homo sapien
gtcaaaagacacttgcagaacaaat

SEQ ID NO: 2290074 - DNA, 25 bp, Homo sapien
tcaaaagacacttgcagaacaaatc

SEQ ID NO: 2290075 - DNA, 25 bp, Homo sapien
aacaacaaaccattcctggtcatga

SEQ ID NO: 2290076 - DNA, 25 bp, Homo sapien
caaaccattcctggtcatgagctta

SEQ ID NO: 2290077 - DNA, 25 bp, Homo sapien
caacaaaccattcctggtcatgagc

SEQ ID NO: 2290078 - DNA, 25 bp, Homo sapien
aaaccattcctggtcatgagcttac

SEQ ID NO: 2290079 - DNA, 25 bp, Homo sapien
tacgatgataaaccttgacacagaa

SEQ ID NO: 2290080 - DNA, 25 bp, Homo sapien
ctacgatgataaaccttgacacaga

SEQ ID NO: 2290081 - DNA, 25 bp, Homo sapien
acctacgatgataaaccttgacaca

SEQ ID NO: 2290082 - DNA, 25 bp, Homo sapien
cctacgatgataaaccttgacacag

SEQ ID NO: 2290083 - DNA, 25 bp, Homo sapien
ccatttaccgactaggagatctttt

SEQ ID NO: 2290084 - DNA, 25 bp, Homo sapien
taccgactaggagatcttttcccca

SEQ ID NO: 2290085 - DNA, 25 bp, Homo sapien
ccgactaggagatcttttccccatt

SEQ ID NO: 2290086 - DNA, 25 bp, Homo sapien
cctagcaccatttaccgactaggag

SEQ ID NO: 2290087 - DNA, 25 bp, Homo sapien
cagactgagcgttggaacagtgacc

SEQ ID NO: 2290088 - DNA, 25 bp, Homo sapien
tgttcctggcttgactttgtactgc

SEQ ID NO: 2290089 - DNA, 25 bp, Homo sapien
caataccctgcacaagtcccttttg

SEQ ID NO: 2290090 - DNA, 25 bp, Homo sapien
tgcagggttaccaatacaggaactg

SEQ ID NO: 2290091 - DNA, 25 bp, Homo sapien
gaaccaacagcaaccgattattgct

SEQ ID NO: 2290092 - DNA, 25 bp, Homo sapien
gatcactatcaatggcaaactttta

SEQ ID NO: 2290093 - DNA, 25 bp, Homo sapien
tatattcaacttccatggttcagga

SEQ ID NO: 2290094 - DNA, 25 bp, Homo sapien
gaaaatctgtaattagcgtgacata

SEQ ID NO: 2290095 - DNA, 25 bp, Homo sapien
tgtgtcattatagagcaagcagaca

SEQ ID NO: 2290096 - DNA, 25 bp, Homo sapien
gctaatctatagtgtggacacactg

SEQ ID NO: 2290097 - DNA, 25 bp, Homo sapien
aactagtttaatgttggtctctgtg

SEQ ID NO: 2290098 - DNA, 25 bp, Homo sapien
cattccaaagtgatgtgtatttgtt

SEQ ID NO: 2290099 - DNA, 25 bp, Homo sapien
caggcgtacgaaaacacaggactat

SEQ ID NO: 2290100 - DNA, 25 bp, Homo sapien
ggactatatgacctaacaccatgag

SEQ ID NO: 2290101 - DNA, 25 bp, Homo sapien
tgctggaaccctaaccttggacgtc

SEQ ID NO: 2290102 - DNA, 25 bp, Homo sapien
tctgcataccaagagcgggcactta

SEQ ID NO: 2290103 - DNA, 25 bp, Homo sapien
tgcctctttcggagtccccagtgtc

SEQ ID NO: 2290104 - DNA, 25 bp, Homo sapien
tcggcatctaggttgagttcatgac

SEQ ID NO: 2290105 - DNA, 25 bp, Homo sapien
cagtaaacatagtaaccaacaggta

SEQ ID NO: 2290106 - DNA, 25 bp, Homo sapien
ttatccagtcaaccattcatcggca

SEQ ID NO: 2290107 - DNA, 25 bp, Homo sapien
tgtgcaaacccaccatcctgtacat

SEQ ID NO: 2290108 - DNA, 25 bp, Homo sapien
catcctgtgcaaacccaccttcctg

SEQ ID NO: 2290109 - DNA, 25 bp, Homo sapien
catcctgtacgtcccttactatact

SEQ ID NO: 2290110 - DNA, 25 bp, Homo sapien
cgtcccttactatactgtgcaaacc

SEQ ID NO: 2290111 - DNA, 25 bp, Homo sapien
tgtaaacttattttgtagtggtgaa

SEQ ID NO: 2290112 - DNA, 25 bp, Homo sapien
tatgtaaacttattttgtagtggtg

SEQ ID NO: 2290113 - DNA, 25 bp, Homo sapien
tattataaccattacttgaataatg

SEQ ID NO: 2290114 - DNA, 25 bp, Homo sapien
tataaccattacttgaataatggac

SEQ ID NO: 2290115 - DNA, 25 bp, Homo sapien
tccagaactaagattctcctacagt

SEQ ID NO: 2290116 - DNA, 25 bp, Homo sapien
gagggtcaactctccagaactaaga

SEQ ID NO: 2290117 - DNA, 25 bp, Homo sapien
taatgcttcgcctggagggtcaact

SEQ ID NO: 2290118 - DNA, 25 bp, Homo sapien
ttgtatcaaagcctaatgcttcgcc

SEQ ID NO: 2290119 - DNA, 25 bp, Homo sapien
caggttctgataggctttcaggaca

SEQ ID NO: 2290120 - DNA, 25 bp, Homo sapien
ccttctcctgacaggttctgatagg

SEQ ID NO: 2290121 - DNA, 25 bp, Homo sapien
tctcctgacaggttctgataggctt

SEQ ID NO: 2290122 - DNA, 25 bp, Homo sapien
cctgacaggttctgataggctttca

SEQ ID NO: 2290123 - DNA, 25 bp, Homo sapien
cctacgtctgagaaataaaatgatt

SEQ ID NO: 2290124 - DNA, 25 bp, Homo sapien
ttttctttaagtcctacgtctgaga

SEQ ID NO: 2290125 - DNA, 25 bp, Homo sapien
tctttaagtcctacgtctgagaaat

SEQ ID NO: 2290126 - DNA, 25 bp, Homo sapien
taagtcctacgtctgagaaataaaa

SEQ ID NO: 2290127 - DNA, 25 bp, Homo sapien
caccagcaccaagagcgttggcaca

SEQ ID NO: 2290128 - DNA, 25 bp, Homo sapien
caggcaaagagagagtggaattcat

SEQ ID NO: 2290129 - DNA, 25 bp, Homo sapien
ggcacaaaatctgggcttctccaag

SEQ ID NO: 2290130 - DNA, 25 bp, Homo sapien
gagactctgaacttggattgagtaa

SEQ ID NO: 2290131 - DNA, 25 bp, Homo sapien
atgtgttctgttgaacaatctcctt

SEQ ID NO: 2290132 - DNA, 25 bp, Homo sapien
cagatgggctaaaactaatgaaagc

SEQ ID NO: 2290133 - DNA, 25 bp, Homo sapien
aaattctgcagatgggctaaaacta

SEQ ID NO: 2290134 - DNA, 25 bp, Homo sapien
cttgtaagtcgagtggcatttctgt

SEQ ID NO: 2290135 - DNA, 25 bp, Homo sapien
gtcgagtggcatttctgtgatgcca

SEQ ID NO: 2290136 - DNA, 25 bp, Homo sapien
tcagatcgtttcccccaagtggtca

SEQ ID NO: 2290137 - DNA, 25 bp, Homo sapien
cagatcgtttcccccaagtggtcaa

SEQ ID NO: 2290138 - DNA, 25 bp, Homo sapien
ctatcaacgggttcagtgttaaaag

SEQ ID NO: 2290139 - DNA, 25 bp, Homo sapien
gatttggacactatcaacgggttca

SEQ ID NO: 2290140 - DNA, 25 bp, Homo sapien
tcaccattgacagctcgatttggac

SEQ ID NO: 2290141 - DNA, 25 bp, Homo sapien
tattgatccttaatacttctctaga

SEQ ID NO: 2290142 - DNA, 25 bp, Homo sapien
gacacctaggaattatcttgagata

SEQ ID NO: 2290143 - DNA, 25 bp, Homo sapien
caatgtagtcaaaaaggcaaatggc

SEQ ID NO: 2290144 - DNA, 25 bp, Homo sapien
ggcatataaagacctaccacttgat

SEQ ID NO: 2290145 - DNA, 25 bp, Homo sapien
aattggtacagcatctttggtgagc

SEQ ID NO: 2290146 - DNA, 25 bp, Homo sapien
tgcctgatttatgtgaccaggtcat

SEQ ID NO: 2290147 - DNA, 25 bp, Homo sapien
cactgtaggtagagcctggatgcct

SEQ ID NO: 2290148 - DNA, 25 bp, Homo sapien
gatgcctgatttatgtgaccaggtc

SEQ ID NO: 2290149 - DNA, 25 bp, Homo sapien
atgcctgatttatgtgaccaggtca

SEQ ID NO: 2290150 - DNA, 25 bp, Homo sapien
cataatatttgaaacttcaggcata

SEQ ID NO: 2290151 - DNA, 25 bp, Homo sapien
tcaggcatattgctaaaactgcacc

SEQ ID NO: 2290152 - DNA, 25 bp, Homo sapien
gctaaaactgcacctctgaaggagt

SEQ ID NO: 2290153 - DNA, 25 bp, Homo sapien
cctctgaaggagttacatgttttgt

SEQ ID NO: 2290154 - DNA, 25 bp, Homo sapien
gaaagcacttttagtgagaagaatt

SEQ ID NO: 2290155 - DNA, 25 bp, Homo sapien
gcacttttagtgagaagaatttaat

SEQ ID NO: 2290156 - DNA, 25 bp, Homo sapien
aagaatttaatcatttttgcatgca

SEQ ID NO: 2290157 - DNA, 25 bp, Homo sapien
cagaaagcacttttagtgagaagaa

SEQ ID NO: 2290158 - DNA, 25 bp, Homo sapien
aaaggcctcggcgtgataatgaagt

SEQ ID NO: 2290159 - DNA, 25 bp, Homo sapien
aacaaaaagcttagtcaattcccag

SEQ ID NO: 2290160 - DNA, 25 bp, Homo sapien
ttcatgctcgcaaacatccaaacca

SEQ ID NO: 2290161 - DNA, 25 bp, Homo sapien
catttactggcataccagagtggtg

SEQ ID NO: 2290162 - DNA, 25 bp, Homo sapien
agtaactctacctacccgtatctag

SEQ ID NO: 2290163 - DNA, 25 bp, Homo sapien
aaatgatcaaccaagagatatgtga

SEQ ID NO: 2290164 - DNA, 25 bp, Homo sapien
tttctggacctataggctgtcatca

SEQ ID NO: 2290165 - DNA, 25 bp, Homo sapien
ggatattctctgagataaagcatat

SEQ ID NO: 2290166 - DNA, 25 bp, Homo sapien
gtaagggccacctctatttctcctg

SEQ ID NO: 2290167 - DNA, 25 bp, Homo sapien
cattgatgctaagccaagagtcaca

SEQ ID NO: 2290168 - DNA, 25 bp, Homo sapien
gggatgcctgtaagggccacctcta

SEQ ID NO: 2290169 - DNA, 25 bp, Homo sapien
tgctttcccggttgataaaatactg

SEQ ID NO: 2290170 - DNA, 25 bp, Homo sapien
tttgtggcccaattgacctttgagc

SEQ ID NO: 2290171 - DNA, 25 bp, Homo sapien
tggcccaattgacctttgagcagat

SEQ ID NO: 2290172 - DNA, 25 bp, Homo sapien
aattttgtggcccaattgacctttg

SEQ ID NO: 2290173 - DNA, 25 bp, Homo sapien
tgcttttgttaattgatgcagagtt

SEQ ID NO: 2290174 - DNA, 25 bp, Homo sapien
tgtaccacaaaaacttactcagtag

SEQ ID NO: 2290175 - DNA, 25 bp, Homo sapien
gtttctagactggatggactctcat

SEQ ID NO: 2290176 - DNA, 25 bp, Homo sapien
gactctcatttggttagtaaatccc

SEQ ID NO: 2290177 - DNA, 25 bp, Homo sapien
gataaggttgatccaagttgttcag

SEQ ID NO: 2290178 - DNA, 25 bp, Homo sapien
taggtggaaataggccagccgatgc

SEQ ID NO: 2290179 - DNA, 25 bp, Homo sapien
caatcgttggacaggaaagtgatca

SEQ ID NO: 2290180 - DNA, 25 bp, Homo sapien
tagttgctaacccatcagtctgccc

SEQ ID NO: 2290181 - DNA, 25 bp, Homo sapien
cagccgatgctagggacaggaaaat

SEQ ID NO: 2290182 - DNA, 25 bp, Homo sapien
gcaaatcatggcttctggttctgaa

SEQ ID NO: 2290183 - DNA, 25 bp, Homo sapien
gaaaccattgtgtgaatcagtgcca

SEQ ID NO: 2290184 - DNA, 25 bp, Homo sapien
tgtaaggagttggaagtcaaccctc

SEQ ID NO: 2290185 - DNA, 25 bp, Homo sapien
gaggtcacaggatgaactgctacca

SEQ ID NO: 2290186 - DNA, 25 bp, Homo sapien
gaaattgagacctgtaagtctttcc

SEQ ID NO: 2290187 - DNA, 25 bp, Homo sapien
gctgctgaaattgagacctgtaagt

SEQ ID NO: 2290188 - DNA, 25 bp, Homo sapien
gagacctgtaagtctttccatagct

SEQ ID NO: 2290189 - DNA, 25 bp, Homo sapien
tgagacctgtaagtctttccatagc

SEQ ID NO: 2290190 - DNA, 25 bp, Homo sapien
tctctatttgagcagcccggcaact

SEQ ID NO: 2290191 - DNA, 25 bp, Homo sapien
aaggagccggtgtatattctactgc

SEQ ID NO: 2290192 - DNA, 25 bp, Homo sapien
tgctgtcgactaaatggctactgct

SEQ ID NO: 2290193 - DNA, 25 bp, Homo sapien
tctgagtgctgtttgtctgccgctt

SEQ ID NO: 2290194 - DNA, 25 bp, Homo sapien
tagcacgctcaagttgaaaacaagc

SEQ ID NO: 2290195 - DNA, 25 bp, Homo sapien
aatgagacttcttcaagttaaaggc

SEQ ID NO: 2290196 - DNA, 25 bp, Homo sapien
tcagctttcgaataactcctggaga

SEQ ID NO: 2290197 - DNA, 25 bp, Homo sapien
gaatgctagatgctccaatgagact

SEQ ID NO: 2290198 - DNA, 25 bp, Homo sapien
cccgccccgacccacgcgcgcgcgc

SEQ ID NO: 2290199 - DNA, 25 bp, Homo sapien
ccccgccccgacccacgcgcgcgcg

SEQ ID NO: 2290200 - DNA, 25 bp, Homo sapien
ccgccccgacccacgcgcgcgcgcg

SEQ ID NO: 2290201 - DNA, 25 bp, Homo sapien
tagtcaaggcgatcatgaggacgcc

SEQ ID NO: 2290202 - DNA, 25 bp, Homo sapien
ccaggtacgccaggtaaggtctcca

SEQ ID NO: 2290203 - DNA, 25 bp, Homo sapien
tcctccgatgggacttgctgctgca

SEQ ID NO: 2290204 - DNA, 25 bp, Homo sapien
gaaagtttccgagagctccggagcg

SEQ ID NO: 2290205 - DNA, 25 bp, Homo sapien
tagttcccagcgctcggattctctc

SEQ ID NO: 2290206 - DNA, 25 bp, Homo sapien
tgtttcaagtttccaagagccgaga

SEQ ID NO: 2290207 - DNA, 25 bp, Homo sapien
actctgcgccggttgccaagtgttt

SEQ ID NO: 2290208 - DNA, 25 bp, Homo sapien
cctttagttcccagcgctcggattc

SEQ ID NO: 2290209 - DNA, 25 bp, Homo sapien
cagactgtaaaggtacaccaaagta

SEQ ID NO: 2290210 - DNA, 25 bp, Homo sapien
gcagactgtaaaggtacaccaaagt

SEQ ID NO: 2290211 - DNA, 25 bp, Homo sapien
gagcagactgtaaaggtacaccaaa

SEQ ID NO: 2290212 - DNA, 25 bp, Homo sapien
agcagactgtaaaggtacaccaaag

SEQ ID NO: 2290213 - DNA, 25 bp, Homo sapien
agagcttctccatagcaaaacaatc

SEQ ID NO: 2290214 - DNA, 25 bp, Homo sapien
aagagcttctccatagcaaaacaat

SEQ ID NO: 2290215 - DNA, 25 bp, Homo sapien
cctggactcctatgtatttgggaca

SEQ ID NO: 2290216 - DNA, 25 bp, Homo sapien
caatcactggtacacaaaactttgc

SEQ ID NO: 2290217 - DNA, 25 bp, Homo sapien
gagctcagtcggacatgcaccagaa

SEQ ID NO: 2290218 - DNA, 25 bp, Homo sapien
gaaaacacgacagggctaatggaga

SEQ ID NO: 2290219 - DNA, 25 bp, Homo sapien
taagtgctctccctgcaaagtcgca

SEQ ID NO: 2290220 - DNA, 25 bp, Homo sapien
acagaaacaaagatacctgctaacc

SEQ ID NO: 2290221 - DNA, 25 bp, Homo sapien
gctctccctgcaaagtcgcaattct

SEQ ID NO: 2290222 - DNA, 25 bp, Homo sapien
taaccacaccacaccggacagctaa

SEQ ID NO: 2290223 - DNA, 25 bp, Homo sapien
aagcaacactcctcatagccaatag

SEQ ID NO: 2290224 - DNA, 25 bp, Homo sapien
gagttgttatctggtgtgaacacag

SEQ ID NO: 2290225 - DNA, 25 bp, Homo sapien
gctatttgcttattctataccagag

SEQ ID NO: 2290226 - DNA, 25 bp, Homo sapien
ttataaacccttaagatagatggca

SEQ ID NO: 2290227 - DNA, 25 bp, Homo sapien
agaaacaagttcaaggcattataaa

SEQ ID NO: 2290228 - DNA, 25 bp, Homo sapien
ccacagagaaacaagttcaaggcat

SEQ ID NO: 2290229 - DNA, 25 bp, Homo sapien
gaaacaagttcaaggcattataaaa

SEQ ID NO: 2290230 - DNA, 25 bp, Homo sapien
cagagaaacaagttcaaggcattat

SEQ ID NO: 2290231 - DNA, 25 bp, Homo sapien
agctctaaaatcttacgcatgagag

SEQ ID NO: 2290232 - DNA, 25 bp, Homo sapien
aacacctttgtttgtccagatgcat

SEQ ID NO: 2290233 - DNA, 25 bp, Homo sapien
ctttgtttgtccagatgcatgaggc

SEQ ID NO: 2290234 - DNA, 25 bp, Homo sapien
aatcttacgcatgagagtccactta

SEQ ID NO: 2290235 - DNA, 25 bp, Homo sapien
caaaactgttaagaggaggcacggt

SEQ ID NO: 2290236 - DNA, 25 bp, Homo sapien
tctggctcacttgctacagagggaa

SEQ ID NO: 2290237 - DNA, 25 bp, Homo sapien
ggctataggaagctgaagcactgtc

SEQ ID NO: 2290238 - DNA, 25 bp, Homo sapien
actacctgtagccttaccttgggat

SEQ ID NO: 2290239 - DNA, 25 bp, Homo sapien
gaatttcctgagtatgccaagtcct

SEQ ID NO: 2290240 - DNA, 25 bp, Homo sapien
gatattctgacacgtatgcctagca

SEQ ID NO: 2290241 - DNA, 25 bp, Homo sapien
tggtgaaatacgcatagtgccagac

SEQ ID NO: 2290242 - DNA, 25 bp, Homo sapien
cagacattattggtcaccgaggcca

SEQ ID NO: 2290243 - DNA, 25 bp, Homo sapien
gaaggaggctttggtataactcaac

SEQ ID NO: 2290244 - DNA, 25 bp, Homo sapien
tggcaaactcatccaaaagcatacg

SEQ ID NO: 2290245 - DNA, 25 bp, Homo sapien
tcaatgcttagtccgagagagaacc

SEQ ID NO: 2290246 - DNA, 25 bp, Homo sapien
tgggcaagcccatagcgttaattct

SEQ ID NO: 2290247 - DNA, 25 bp, Homo sapien
gaggcctgctctctgttacaaagat

SEQ ID NO: 2290248 - DNA, 25 bp, Homo sapien
tggttaagctaacacagaatggcat

SEQ ID NO: 2290249 - DNA, 25 bp, Homo sapien
tataccaccactgatacggactcta

SEQ ID NO: 2290250 - DNA, 25 bp, Homo sapien
gaaagcatcctagctccaaggtgag

SEQ ID NO: 2290251 - DNA, 25 bp, Homo sapien
gctgtcaggcattggaatgggaaca

SEQ ID NO: 2290252 - DNA, 25 bp, Homo sapien
taagtgtttgtgctccgtagaagca

SEQ ID NO: 2290253 - DNA, 25 bp, Homo sapien
tgtcaggcattggaatgggaacaat

SEQ ID NO: 2290254 - DNA, 25 bp, Homo sapien
tgtcagtgctaagtgtttgtgctcc

SEQ ID NO: 2290255 - DNA, 25 bp, Homo sapien
gcaatgagtgatgatcttcaaagca

SEQ ID NO: 2290256 - DNA, 25 bp, Homo sapien
aggagttcatagaagatttcgagca

SEQ ID NO: 2290257 - DNA, 25 bp, Homo sapien
aagcaatggcgactgaagctgcaga

SEQ ID NO: 2290258 - DNA, 25 bp, Homo sapien
aagcctcttgcccaagtgtcctcag

SEQ ID NO: 2290259 - DNA, 25 bp, Homo sapien
aaatgtatgtgatactttaacttct

SEQ ID NO: 2290260 - DNA, 25 bp, Homo sapien
ttttgtaaattcatttagcacttct

SEQ ID NO: 2290261 - DNA, 25 bp, Homo sapien
tgtccagccttatgcacctttttgt

SEQ ID NO: 2290262 - DNA, 25 bp, Homo sapien
ccgtgtccagccttatgcacctttt

SEQ ID NO: 2290263 - DNA, 25 bp, Homo sapien
tacctacagtatactcgagaggctg

SEQ ID NO: 2290264 - DNA, 25 bp, Homo sapien
gtaagccattgcaccagctgcgaat

SEQ ID NO: 2290265 - DNA, 25 bp, Homo sapien
tacacgtggtggctttgtacctaca

SEQ ID NO: 2290266 - DNA, 25 bp, Homo sapien
tttttaaatgtgagtgaaggtcggc

SEQ ID NO: 2290267 - DNA, 25 bp, Homo sapien
tctccaatattacaagtttcctcca

SEQ ID NO: 2290268 - DNA, 25 bp, Homo sapien
ctccaatattacaagtttcctccag

SEQ ID NO: 2290269 - DNA, 25 bp, Homo sapien
tccaatattacaagtttcctccaga

SEQ ID NO: 2290270 - DNA, 25 bp, Homo sapien
ccaatattacaagtttcctccagaa

SEQ ID NO: 2290271 - DNA, 25 bp, Homo sapien
cctcttgaacaagttctaaggagca

SEQ ID NO: 2290272 - DNA, 25 bp, Homo sapien
ggttctactacagtgacctgaagtc

SEQ ID NO: 2290273 - DNA, 25 bp, Homo sapien
tgtttgtggaggtggttctactaca

SEQ ID NO: 2290274 - DNA, 25 bp, Homo sapien
gagctgtcacgtcagatctctgaga

SEQ ID NO: 2290275 - DNA, 25 bp, Homo sapien
ttggatgaattccaacaacggaacg

SEQ ID NO: 2290276 - DNA, 25 bp, Homo sapien
taaattcttagtatggatcccaaaa

SEQ ID NO: 2290277 - DNA, 25 bp, Homo sapien
cccaaaagaatttggcccatgaggt

SEQ ID NO: 2290278 - DNA, 25 bp, Homo sapien
caacaacggaacgtggacagctcat

SEQ ID NO: 2290279 - DNA, 25 bp, Homo sapien
gaataagcgcccacttcaacacgta

SEQ ID NO: 2290280 - DNA, 25 bp, Homo sapien
tcaacacgtaacataaacacccaag

SEQ ID NO: 2290281 - DNA, 25 bp, Homo sapien
gactggctttttgagaagaaggatc

SEQ ID NO: 2290282 - DNA, 25 bp, Homo sapien
tcattaaagcgatttgactggcttt

SEQ ID NO: 2290283 - DNA, 25 bp, Homo sapien
cctatctaagtgttgcgtctggaga

SEQ ID NO: 2290284 - DNA, 25 bp, Homo sapien
ggaaatactccaatccaacactagg

SEQ ID NO: 2290285 - DNA, 25 bp, Homo sapien
agttcagtcattgtcatagcaagga

SEQ ID NO: 2290286 - DNA, 25 bp, Homo sapien
tggaagaacaaacacttcggatctg

SEQ ID NO: 2290287 - DNA, 25 bp, Homo sapien
cagacttgactaccttgctaattac

SEQ ID NO: 2290288 - DNA, 25 bp, Homo sapien
tagagctgtcataactaggtaaaca

SEQ ID NO: 2290289 - DNA, 25 bp, Homo sapien
ccaggagaccatgactactaatatc

SEQ ID NO: 2290290 - DNA, 25 bp, Homo sapien
tgaaatctagatgtcaacaggccta

SEQ ID NO: 2290291 - DNA, 25 bp, Homo sapien
gattatcataagggagagtgctcat

SEQ ID NO: 2290292 - DNA, 25 bp, Homo sapien
aggagcagacctctggattatcata

SEQ ID NO: 2290293 - DNA, 25 bp, Homo sapien
gcagacctctggattatcataaggg

SEQ ID NO: 2290294 - DNA, 25 bp, Homo sapien
gacctctggattatcataagggaga

SEQ ID NO: 2290295 - DNA, 25 bp, Homo sapien
ggagatagggaacatggataaccat

SEQ ID NO: 2290296 - DNA, 25 bp, Homo sapien
ggtgggtaactccaagcagaaagac

SEQ ID NO: 2290297 - DNA, 25 bp, Homo sapien
gaaactgggtatcacagattgtggt

SEQ ID NO: 2290298 - DNA, 25 bp, Homo sapien
tatgacacagttctataatccaggc

SEQ ID NO: 2290299 - DNA, 25 bp, Homo sapien
cataacgtgtggcttgaaggttgaa

SEQ ID NO: 2290300 - DNA, 25 bp, Homo sapien
aggaaaggctgcataacgtgtggct

SEQ ID NO: 2290301 - DNA, 25 bp, Homo sapien
tcatgccaggtatatggaacacccc

SEQ ID NO: 2290302 - DNA, 25 bp, Homo sapien
taaagtatctgtttctcagtgcgag

SEQ ID NO: 2290303 - DNA, 25 bp, Homo sapien
caggtggtgctgaaaaagacttacc

SEQ ID NO: 2290304 - DNA, 25 bp, Homo sapien
tgtttatcagccctccagtcgtcaa

SEQ ID NO: 2290305 - DNA, 25 bp, Homo sapien
caaagaagctaacagaattcctggg

SEQ ID NO: 2290306 - DNA, 25 bp, Homo sapien
tttaaatctctgctggcaggaaccg

SEQ ID NO: 2290307 - DNA, 25 bp, Homo sapien
cggaatcgagaaagagctatcaatc

SEQ ID NO: 2290308 - DNA, 25 bp, Homo sapien
tatcaatctgtcaatcctgtccgta

SEQ ID NO: 2290309 - DNA, 25 bp, Homo sapien
cccacggaatcgagaaagagctatc

SEQ ID NO: 2290310 - DNA, 25 bp, Homo sapien
caccacccacggaatcgagaaagag

SEQ ID NO: 2290311 - DNA, 25 bp, Homo sapien
aattaaccagacaaatcgctccacc

SEQ ID NO: 2290312 - DNA, 25 bp, Homo sapien
gccagagtctcgttcgttatcggaa

SEQ ID NO: 2290313 - DNA, 25 bp, Homo sapien
atcggaattaaccagacaaatcgct

SEQ ID NO: 2290314 - DNA, 25 bp, Homo sapien
gagtctcgttcgttatcggaattaa

SEQ ID NO: 2290315 - DNA, 25 bp, Homo sapien
ggcgcagacccgctcgggggtcgcg

SEQ ID NO: 2290316 - DNA, 25 bp, Homo sapien
cgcagacccgctcgggggtcgcgta

SEQ ID NO: 2290317 - DNA, 25 bp, Homo sapien
caggcgcagacccgctcgggggtcg

SEQ ID NO: 2290318 - DNA, 25 bp, Homo sapien
gcagacccgctcgggggtcgcgtaa

SEQ ID NO: 2290319 - DNA, 25 bp, Homo sapien
agtagatgtggaaggccatgtcgca

SEQ ID NO: 2290320 - DNA, 25 bp, Homo sapien
cgtcctcgctgggaacactgctgag

SEQ ID NO: 2290321 - DNA, 25 bp, Homo sapien
atcattccggcactcagggcagtac

SEQ ID NO: 2290322 - DNA, 25 bp, Homo sapien
catcgcacatgagctgcttgtcggg

SEQ ID NO: 2290323 - DNA, 25 bp, Homo sapien
acattccttggtgcggcccacacag

SEQ ID NO: 2290324 - DNA, 25 bp, Homo sapien
ggtacattccttggtgcggcccaca

SEQ ID NO: 2290325 - DNA, 25 bp, Homo sapien
tacattccttggtgcggcccacaca

SEQ ID NO: 2290326 - DNA, 25 bp, Homo sapien
gtacattccttggtgcggcccacac

SEQ ID NO: 2290327 - DNA, 25 bp, Homo sapien
tcggccccttcttggtcattgatgg

SEQ ID NO: 2290328 - DNA, 25 bp, Homo sapien
attcttgccacccttgacattgcgc

SEQ ID NO: 2290329 - DNA, 25 bp, Homo sapien
ccccgccaggactagggagtacgct

SEQ ID NO: 2290330 - DNA, 25 bp, Homo sapien
tctgatcacaagactgttccgcggt

SEQ ID NO: 2290331 - DNA, 25 bp, Homo sapien
catcgtagcggttgccctcagcggg

SEQ ID NO: 2290332 - DNA, 25 bp, Homo sapien
gccatcgtagcggttgccctcagcg

SEQ ID NO: 2290333 - DNA, 25 bp, Homo sapien
gatgccatcgtagcggttgccctca

SEQ ID NO: 2290334 - DNA, 25 bp, Homo sapien
gtagatgccatcgtagcggttgccc

SEQ ID NO: 2290335 - DNA, 25 bp, Homo sapien
tcatcatcgtccctccgcagaaggt

SEQ ID NO: 2290336 - DNA, 25 bp, Homo sapien
aaggtagcgccacacgagaaacccg

SEQ ID NO: 2290337 - DNA, 25 bp, Homo sapien
gccccagcttcttgatccggtcctt

SEQ ID NO: 2290338 - DNA, 25 bp, Homo sapien
ctccgcagaaggtagcgccacacga

SEQ ID NO: 2290339 - DNA, 25 bp, Homo sapien
ccttctctcgctctcggttggccag

SEQ ID NO: 2290340 - DNA, 25 bp, Homo sapien
ctctcgctctcggttggccagggct

SEQ ID NO: 2290341 - DNA, 25 bp, Homo sapien
tgcccgtcctgggggacgcgaagcc

SEQ ID NO: 2290342 - DNA, 25 bp, Homo sapien
cttgcccgtcctgggggacgcgaag

SEQ ID NO: 2290343 - DNA, 25 bp, Homo sapien
cagcttggcgttgctcttgtcctct

SEQ ID NO: 2290344 - DNA, 25 bp, Homo sapien
cacagcttggcgttgctcttgtcct

SEQ ID NO: 2290345 - DNA, 25 bp, Homo sapien
ccacagcttggcgttgctcttgtcc

SEQ ID NO: 2290346 - DNA, 25 bp, Homo sapien
gcttggcgttgctcttgtcctctct

SEQ ID NO: 2290347 - DNA, 25 bp, Homo sapien
gtccttgagtgacgccaggacctca

SEQ ID NO: 2290348 - DNA, 25 bp, Homo sapien
gccggccggtccttgagtgacgcca

SEQ ID NO: 2290349 - DNA, 25 bp, Homo sapien
ccggccggtccttgagtgacgccag

SEQ ID NO: 2290350 - DNA, 25 bp, Homo sapien
gccggtccttgagtgacgccaggac

SEQ ID NO: 2290351 - DNA, 25 bp, Homo sapien
gttgtgctggcacacggtcgtgatg

SEQ ID NO: 2290352 - DNA, 25 bp, Homo sapien
agctcctgacagcagatacactgga

SEQ ID NO: 2290353 - DNA, 25 bp, Homo sapien
cacggtcgtgatgggccggaacacc

SEQ ID NO: 2290354 - DNA, 25 bp, Homo sapien
acagcagatacactggaacgtctcc

SEQ ID NO: 2290355 - DNA, 25 bp, Homo sapien
gagctggttgaggacggtctgcaga

SEQ ID NO: 2290356 - DNA, 25 bp, Homo sapien
gctgaacacctgtgcccgaaaggat

SEQ ID NO: 2290357 - DNA, 25 bp, Homo sapien
tcacctgcatggcatagctgcggcc

SEQ ID NO: 2290358 - DNA, 25 bp, Homo sapien
caggcagggcagctgaacacctgtg

SEQ ID NO: 2290359 - DNA, 25 bp, Homo sapien
gagccctccgacacgttttcagcaa

SEQ ID NO: 2290360 - DNA, 25 bp, Homo sapien
gatgaacgagccctccgacacgttt

SEQ ID NO: 2290361 - DNA, 25 bp, Homo sapien
aaatcagtgccgatgaacgagccct

SEQ ID NO: 2290362 - DNA, 25 bp, Homo sapien
gcccactaagaacaaaatcagtgcc

SEQ ID NO: 2290363 - DNA, 25 bp, Homo sapien
caacttttagccagaatacataaat

SEQ ID NO: 2290364 - DNA, 25 bp, Homo sapien
tcctgaaaatgtatagatttgaaaa

SEQ ID NO: 2290365 - DNA, 25 bp, Homo sapien
caatactgagaagtccaacttttag

SEQ ID NO: 2290366 - DNA, 25 bp, Homo sapien
tgttttgtcgagaaattgcaggctt

SEQ ID NO: 2290367 - DNA, 25 bp, Homo sapien
cctgtcgccttcttaaagagttggt

SEQ ID NO: 2290368 - DNA, 25 bp, Homo sapien
agcctccacaccacgtagtttctga

SEQ ID NO: 2290369 - DNA, 25 bp, Homo sapien
aacccgagagaaggactgatcctgt

SEQ ID NO: 2290370 - DNA, 25 bp, Homo sapien
tgacaccagaaacatcaacagcctc

SEQ ID NO: 2290371 - DNA, 25 bp, Homo sapien
gaatcaaaggcacttgcacgtgact

SEQ ID NO: 2290372 - DNA, 25 bp, Homo sapien
tctataaggctcaaacggttcccaa

SEQ ID NO: 2290373 - DNA, 25 bp, Homo sapien
caaaggtttgaactaggcccgagat

SEQ ID NO: 2290374 - DNA, 25 bp, Homo sapien
ggcagaggacttttcacgcggatct

SEQ ID NO: 2290375 - DNA, 25 bp, Homo sapien
gtggtcccattctgaatgccccatg

SEQ ID NO: 2290376 - DNA, 25 bp, Homo sapien
ggtcccattctgaatgccccatgag

SEQ ID NO: 2290377 - DNA, 25 bp, Homo sapien
gtgatcctcttggccctcgtttgtg

SEQ ID NO: 2290378 - DNA, 25 bp, Homo sapien
tcttggccctcgtttgtggtcccat

SEQ ID NO: 2290379 - DNA, 25 bp, Homo sapien
agctcttagaaggaatatcctggca

SEQ ID NO: 2290380 - DNA, 25 bp, Homo sapien
tgtttccctcagatgaagagagtta

SEQ ID NO: 2290381 - DNA, 25 bp, Homo sapien
taaagagagtgggttgctgatcaaa

SEQ ID NO: 2290382 - DNA, 25 bp, Homo sapien
tgatcaaaatgtattctgccgagac

SEQ ID NO: 2290383 - DNA, 25 bp, Homo sapien
cattcccttccctgaaccgcaccat

SEQ ID NO: 2290384 - DNA, 25 bp, Homo sapien
ctggaagaaagcacattcccttccc

SEQ ID NO: 2290385 - DNA, 25 bp, Homo sapien
taaagaagtgccaaaaggaccactc

SEQ ID NO: 2290386 - DNA, 25 bp, Homo sapien
aagaagtgccaaaaggaccactctg

SEQ ID NO: 2290387 - DNA, 25 bp, Homo sapien
cctaagctgcatgagacagaatcac

SEQ ID NO: 2290388 - DNA, 25 bp, Homo sapien
gagtagtcacatgcctagagaatga

SEQ ID NO: 2290389 - DNA, 25 bp, Homo sapien
gaaaagcctggtcatatcatgtgtc

SEQ ID NO: 2290390 - DNA, 25 bp, Homo sapien
tgggaatctcaacttagctgtacgc

SEQ ID NO: 2290391 - DNA, 25 bp, Homo sapien
ccaccagtgcataaaatgacgaaca

SEQ ID NO: 2290392 - DNA, 25 bp, Homo sapien
catgaaaagagagacgggttcaaca

SEQ ID NO: 2290393 - DNA, 25 bp, Homo sapien
taagcagtcgtatagctatcaacaa

SEQ ID NO: 2290394 - DNA, 25 bp, Homo sapien
tctagtataacaaatgacagcctct

SEQ ID NO: 2290395 - DNA, 25 bp, Homo sapien
atacgttagtgaagcccaaagtggc

SEQ ID NO: 2290396 - DNA, 25 bp, Homo sapien
gcttatgaacaaatacgcaggtact

SEQ ID NO: 2290397 - DNA, 25 bp, Homo sapien
gagccaccgtgttgataacttaaga

SEQ ID NO: 2290398 - DNA, 25 bp, Homo sapien
gatattgggcttgacgtcaatccag

SEQ ID NO: 2290399 - DNA, 25 bp, Homo sapien
ggaaagctttagaccacttctggga

SEQ ID NO: 2290400 - DNA, 25 bp, Homo sapien
tgtgacagctgtaataaaaggctcc

SEQ ID NO: 2290401 - DNA, 25 bp, Homo sapien
gtgtttccgcagctgtcacgatcca

SEQ ID NO: 2290402 - DNA, 25 bp, Homo sapien
gctgtcacgatccatgaaaagtcct

SEQ ID NO: 2290403 - DNA, 25 bp, Homo sapien
actgccatgctagacccttcaggtc

SEQ ID NO: 2290404 - DNA, 25 bp, Homo sapien
tccgcagctgtcacgatccatgaaa

SEQ ID NO: 2290405 - DNA, 25 bp, Homo sapien
catcatctcctaaatctccccaaac

SEQ ID NO: 2290406 - DNA, 25 bp, Homo sapien
gaaggtgcttcttgaaattttataa

SEQ ID NO: 2290407 - DNA, 25 bp, Homo sapien
aggaagttggaaggtgcttcttgaa

SEQ ID NO: 2290408 - DNA, 25 bp, Homo sapien
gaagttggaaggtgcttcttgaaat

SEQ ID NO: 2290409 - DNA, 25 bp, Homo sapien
gagatactgattgtgcccctttccc

SEQ ID NO: 2290410 - DNA, 25 bp, Homo sapien
ttcttggatgttggtctctcgttcc

SEQ ID NO: 2290411 - DNA, 25 bp, Homo sapien
tcttggatgttggtctctcgttcct

SEQ ID NO: 2290412 - DNA, 25 bp, Homo sapien
tatgatgccacaaccctatgctttg

SEQ ID NO: 2290413 - DNA, 25 bp, Homo sapien
tggcttttcccaatgcagagatatt

SEQ ID NO: 2290414 - DNA, 25 bp, Homo sapien
tcagggctccgcgaagttagggaac

SEQ ID NO: 2290415 - DNA, 25 bp, Homo sapien
cattatatcacacgaggatggctac

SEQ ID NO: 2290416 - DNA, 25 bp, Homo sapien
aggatcatcaaggttttgtatggga

SEQ ID NO: 2290417 - DNA, 25 bp, Homo sapien
catttagcgggcagatgtcaggcag

SEQ ID NO: 2290418 - DNA, 25 bp, Homo sapien
gtatttcaaaatgataccccactcc

SEQ ID NO: 2290419 - DNA, 25 bp, Homo sapien
ccactccacatttagcaacaatgtg

SEQ ID NO: 2290420 - DNA, 25 bp, Homo sapien
tgagcaagttgctcacggctctcaa

SEQ ID NO: 2290421 - DNA, 25 bp, Homo sapien
cggctctcaaggatgtgcacacgtt

SEQ ID NO: 2290422 - DNA, 25 bp, Homo sapien
gacgggattcactctgggcttgtga

SEQ ID NO: 2290423 - DNA, 25 bp, Homo sapien
caggtatagttttcactgagcgaag

SEQ ID NO: 2290424 - DNA, 25 bp, Homo sapien
agtcactgatatgaatctgcagatg

SEQ ID NO: 2290425 - DNA, 25 bp, Homo sapien
gagtcactgatatgaatctgcagat

SEQ ID NO: 2290426 - DNA, 25 bp, Homo sapien
tgagtcactgatatgaatctgcaga

SEQ ID NO: 2290427 - DNA, 25 bp, Homo sapien
gtcactgatatgaatctgcagatgg

SEQ ID NO: 2290428 - DNA, 25 bp, Homo sapien
aacaagccaggaggcaaactccttc

SEQ ID NO: 2290429 - DNA, 25 bp, Homo sapien
caggaggcaaactccttctcaggcg

SEQ ID NO: 2290430 - DNA, 25 bp, Homo sapien
ccaggaggcaaactccttctcaggc

SEQ ID NO: 2290431 - DNA, 25 bp, Homo sapien
ctcaacaagccaggaggcaaactcc

SEQ ID NO: 2290432 - DNA, 25 bp, Homo sapien
tggccgaggtggtggtggtccaagt

SEQ ID NO: 2290433 - DNA, 25 bp, Homo sapien
ctgtggccgaggtggtggtggtcca

SEQ ID NO: 2290434 - DNA, 25 bp, Homo sapien
tggtggtccaagtggaagaaactcg

SEQ ID NO: 2290435 - DNA, 25 bp, Homo sapien
gtggtggtggtccaagtggaagaaa

SEQ ID NO: 2290436 - DNA, 25 bp, Homo sapien
ttcctgcagtttgatgctggtgctg

SEQ ID NO: 2290437 - DNA, 25 bp, Homo sapien
gctggtgctgcggtctctccgtact

SEQ ID NO: 2290438 - DNA, 25 bp, Homo sapien
ctctccgtactggtgcaggctccaa

SEQ ID NO: 2290439 - DNA, 25 bp, Homo sapien
gctgcggtctctccgtactggtgca

SEQ ID NO: 2290440 - DNA, 25 bp, Homo sapien
ttacatggttagctgcagaaatagc

SEQ ID NO: 2290441 - DNA, 25 bp, Homo sapien
tttttagcctttacatggttagctg

SEQ ID NO: 2290442 - DNA, 25 bp, Homo sapien
ctggtcgactttgctttttagcctt

SEQ ID NO: 2290443 - DNA, 25 bp, Homo sapien
tagcctttacatggttagctgcaga

SEQ ID NO: 2290444 - DNA, 25 bp, Homo sapien
aggagcagggcgatgaaagaggtga

SEQ ID NO: 2290445 - DNA, 25 bp, Homo sapien
tgaggagcagggcgatgaaagaggt

SEQ ID NO: 2290446 - DNA, 25 bp, Homo sapien
ggagcagggcgatgaaagaggtgaa

SEQ ID NO: 2290447 - DNA, 25 bp, Homo sapien
gaggagcagggcgatgaaagaggtg

SEQ ID NO: 2290448 - DNA, 25 bp, Homo sapien
tgcagaaattttgctgaccaggctg

SEQ ID NO: 2290449 - DNA, 25 bp, Homo sapien
gctacatataacaggtggagtcagg

SEQ ID NO: 2290450 - DNA, 25 bp, Homo sapien
ctctgagtgtaagttaaggccctgt

SEQ ID NO: 2290451 - DNA, 25 bp, Homo sapien
gtttggcagttgtgtcagcagattc

SEQ ID NO: 2290452 - DNA, 25 bp, Homo sapien
tgagcaatgccctctaacagagggt

SEQ ID NO: 2290453 - DNA, 25 bp, Homo sapien
cataggatgctggttgagagaaaca

SEQ ID NO: 2290454 - DNA, 25 bp, Homo sapien
aaacagtaaccccacaaatggcctg

SEQ ID NO: 2290455 - DNA, 25 bp, Homo sapien
gaaacaggccctagatgtaccgtaa

SEQ ID NO: 2290456 - DNA, 25 bp, Homo sapien
acttggtgtccgagtggctacccca

SEQ ID NO: 2290457 - DNA, 25 bp, Homo sapien
tctacttggtgtccgagtggctacc

SEQ ID NO: 2290458 - DNA, 25 bp, Homo sapien
ctgttctacttggtgtccgagtggc

SEQ ID NO: 2290459 - DNA, 25 bp, Homo sapien
tggtgtccgagtggctaccccactt

SEQ ID NO: 2290460 - DNA, 25 bp, Homo sapien
ctacaattaaaagagaacaacttat

SEQ ID NO: 2290461 - DNA, 25 bp, Homo sapien
aaaagagaacaacttattacaagat

SEQ ID NO: 2290462 - DNA, 25 bp, Homo sapien
taaaagagaacaacttattacaaga

SEQ ID NO: 2290463 - DNA, 25 bp, Homo sapien
cagaaacatcatggtctcaggagca

SEQ ID NO: 2290464 - DNA, 25 bp, Homo sapien
cataggtgctgcaagccgatgcttt

SEQ ID NO: 2290465 - DNA, 25 bp, Homo sapien
gatgctttcctcagaggctctctca

SEQ ID NO: 2290466 - DNA, 25 bp, Homo sapien
ggctctctcaggcactctgtttcat

SEQ ID NO: 2290467 - DNA, 25 bp, Homo sapien
tatccatgacaagaggttcgggagc

SEQ ID NO: 2290468 - DNA, 25 bp, Homo sapien
ctgactaagaatacggccacatttt

SEQ ID NO: 2290469 - DNA, 25 bp, Homo sapien
tagctgctccataattgagtccagg

SEQ ID NO: 2290470 - DNA, 25 bp, Homo sapien
gttcgggagcaagaattggtttgtc

SEQ ID NO: 2290471 - DNA, 25 bp, Homo sapien
aaggaatatccctatatccaatctc

SEQ ID NO: 2290472 - DNA, 25 bp, Homo sapien
gaatatccctatatccaatctccaa

SEQ ID NO: 2290473 - DNA, 25 bp, Homo sapien
ggaatatccctatatccaatctcca

SEQ ID NO: 2290474 - DNA, 25 bp, Homo sapien
tatccctatatccaatctccaaagc

SEQ ID NO: 2290475 - DNA, 25 bp, Homo sapien
gaataggctgtgtagtaagatacca

SEQ ID NO: 2290476 - DNA, 25 bp, Homo sapien
actggttgaaccatgatcattaatc

SEQ ID NO: 2290477 - DNA, 25 bp, Homo sapien
gcatgtaaaacatcagtggcatgga

SEQ ID NO: 2290478 - DNA, 25 bp, Homo sapien
tcacagttgagaggcctggaatagg

SEQ ID NO: 2290479 - DNA, 25 bp, Homo sapien
tcctggatgatcataatcgtgcatg

SEQ ID NO: 2290480 - DNA, 25 bp, Homo sapien
tacgtttttgagaatacatatccca

SEQ ID NO: 2290481 - DNA, 25 bp, Homo sapien
tcaactccaaggcagggatattccc

SEQ ID NO: 2290482 - DNA, 25 bp, Homo sapien
gaggagcactagttgcaaccaggaa

SEQ ID NO: 2290483 - DNA, 25 bp, Homo sapien
ctgaacgatcgttatatagcaccgc

SEQ ID NO: 2290484 - DNA, 25 bp, Homo sapien
tctggccgggacatgaaaagattcc

SEQ ID NO: 2290485 - DNA, 25 bp, Homo sapien
tcaatgacaaggaaacggaaatgct

SEQ ID NO: 2290486 - DNA, 25 bp, Homo sapien
cagcagctgcgtgatgattctccaa

SEQ ID NO: 2290487 - DNA, 25 bp, Homo sapien
ggaccattgatatcagccaacttta

SEQ ID NO: 2290488 - DNA, 25 bp, Homo sapien
gacaataccatctgtccactgaaga

SEQ ID NO: 2290489 - DNA, 25 bp, Homo sapien
gtagacgatcattttcattggtcca

SEQ ID NO: 2290490 - DNA, 25 bp, Homo sapien
cacatttgacaaaccagtagacgat

SEQ ID NO: 2290491 - DNA, 25 bp, Homo sapien
catgaaggggcttatgggtaatcca

SEQ ID NO: 2290492 - DNA, 25 bp, Homo sapien
cagtatctcctgactcatcgctgtc

SEQ ID NO: 2290493 - DNA, 25 bp, Homo sapien
ggcattagtcctgctgaatcatagg

SEQ ID NO: 2290494 - DNA, 25 bp, Homo sapien
gaatcataggagttgcacagaggcc

SEQ ID NO: 2290495 - DNA, 25 bp, Homo sapien
tcaaactccgcaaatgatgtttaga

SEQ ID NO: 2290496 - DNA, 25 bp, Homo sapien
agacttgaagtattgtgtatttcat

SEQ ID NO: 2290497 - DNA, 25 bp, Homo sapien
gtatttcataagaagcataaaattc

SEQ ID NO: 2290498 - DNA, 25 bp, Homo sapien
gatgtttagacttgaagtattgtgt

SEQ ID NO: 2290499 - DNA, 25 bp, Homo sapien
tcattcctgctttagtgaacttgat

SEQ ID NO: 2290500 - DNA, 25 bp, Homo sapien
ctgagagccaaaagcattgaagtta

SEQ ID NO: 2290501 - DNA, 25 bp, Homo sapien
gctaactgataagcattgattcccc

SEQ ID NO: 2290502 - DNA, 25 bp, Homo sapien
tatatgtaaagtgaggcagctaact

SEQ ID NO: 2290503 - DNA, 25 bp, Homo sapien
aaaattctgttactctatgtggcca

SEQ ID NO: 2290504 - DNA, 25 bp, Homo sapien
gggctggatgtaagtaatgagaatt

SEQ ID NO: 2290505 - DNA, 25 bp, Homo sapien
gctgagttatttggcagtagatttt

SEQ ID NO: 2290506 - DNA, 25 bp, Homo sapien
ctgtaagaggtgctgagttatttgg

SEQ ID NO: 2290507 - DNA, 25 bp, Homo sapien
gtaagaggtgctgagttatttggca

SEQ ID NO: 2290508 - DNA, 25 bp, Homo sapien
gttatttggcagtagatttttctcc

SEQ ID NO: 2290509 - DNA, 25 bp, Homo sapien
gattttctatgcctgccaaccgttg

SEQ ID NO: 2290510 - DNA, 25 bp, Homo sapien
ttttctatgcctgccaaccgttgct

SEQ ID NO: 2290511 - DNA, 25 bp, Homo sapien
ggattgattttctatgcctgccaac

SEQ ID NO: 2290512 - DNA, 25 bp, Homo sapien
ttgattttctatgcctgccaaccgt

SEQ ID NO: 2290513 - DNA, 25 bp, Homo sapien
tctgttctgaagagtgcgactgagg

SEQ ID NO: 2290514 - DNA, 25 bp, Homo sapien
ttgggttggtatctcctcgcctctt

SEQ ID NO: 2290515 - DNA, 25 bp, Homo sapien
tggcttttgggttggtatctcctcg

SEQ ID NO: 2290516 - DNA, 25 bp, Homo sapien
gcttttgggttggtatctcctcgcc

SEQ ID NO: 2290517 - DNA, 25 bp, Homo sapien
tgagacttccaccatagtagccaag

SEQ ID NO: 2290518 - DNA, 25 bp, Homo sapien
taagaagacacaggctatcacgctg

SEQ ID NO: 2290519 - DNA, 25 bp, Homo sapien
tggcaccacaggaagtaagctctgg

SEQ ID NO: 2290520 - DNA, 25 bp, Homo sapien
tccccggccagaagaagcatgactg

SEQ ID NO: 2290521 - DNA, 25 bp, Homo sapien
gccaaaccaggtcttatctaaatga

SEQ ID NO: 2290522 - DNA, 25 bp, Homo sapien
tactgggattgcaacggaaagattt

SEQ ID NO: 2290523 - DNA, 25 bp, Homo sapien
gatatatccctgtacagagctactg

SEQ ID NO: 2290524 - DNA, 25 bp, Homo sapien
tagatagatatataaccggaaagac

SEQ ID NO: 2290525 - DNA, 25 bp, Homo sapien
gaaaggcattaaactagaatcaggg

SEQ ID NO: 2290526 - DNA, 25 bp, Homo sapien
ccgatactgacatggaagcaccaag

SEQ ID NO: 2290527 - DNA, 25 bp, Homo sapien
gaagaggacaagacccttattgagg

SEQ ID NO: 2290528 - DNA, 25 bp, Homo sapien
gcaccaagaatacctcccacagtag

SEQ ID NO: 2290529 - DNA, 25 bp, Homo sapien
aatggactgacaatatcagcaaatt

SEQ ID NO: 2290530 - DNA, 25 bp, Homo sapien
ttaaaaaatggactgacaatatcag

SEQ ID NO: 2290531 - DNA, 25 bp, Homo sapien
atggactgacaatatcagcaaattc

SEQ ID NO: 2290532 - DNA, 25 bp, Homo sapien
aaaaatggactgacaatatcagcaa

SEQ ID NO: 2290533 - DNA, 25 bp, Homo sapien
cacattgcctaacatccatggtgca

SEQ ID NO: 2290534 - DNA, 25 bp, Homo sapien
ttaggtaaggtcaaagcaacatgta

SEQ ID NO: 2290535 - DNA, 25 bp, Homo sapien
caaataccatgtgttggcaatagca

SEQ ID NO: 2290536 - DNA, 25 bp, Homo sapien
cacttcaagttaggtaaaagcacca

SEQ ID NO: 2290537 - DNA, 25 bp, Homo sapien
tctcagactataatttgtacaaagt

SEQ ID NO: 2290538 - DNA, 25 bp, Homo sapien
aattgctggataatacactcctttg

SEQ ID NO: 2290539 - DNA, 25 bp, Homo sapien
aatgtatttgaatccttcataaaac

SEQ ID NO: 2290540 - DNA, 25 bp, Homo sapien
aaactcagaagatctcagactataa

SEQ ID NO: 2290541 - DNA, 25 bp, Homo sapien
caagggctaattcacatttggaaac

SEQ ID NO: 2290542 - DNA, 25 bp, Homo sapien
ggtgtcctgggataccctgcaaatt

SEQ ID NO: 2290543 - DNA, 25 bp, Homo sapien
cttgtcataaaggaagtcatggttg

SEQ ID NO: 2290544 - DNA, 25 bp, Homo sapien
gaaacatgtataagtgctccttgtc

SEQ ID NO: 2290545 - DNA, 25 bp, Homo sapien
tggtcagaacaaatgcccgcagaaa

SEQ ID NO: 2290546 - DNA, 25 bp, Homo sapien
caccagttaagcaaacataataagc

SEQ ID NO: 2290547 - DNA, 25 bp, Homo sapien
tgatataagatggagtttttgaccc

SEQ ID NO: 2290548 - DNA, 25 bp, Homo sapien
gacaaggaaactgctatgaaccaac

SEQ ID NO: 2290549 - DNA, 25 bp, Homo sapien
taaacatattcaggtctgtcgagag

SEQ ID NO: 2290550 - DNA, 25 bp, Homo sapien
tgatgaagttcaaaagactcactct

SEQ ID NO: 2290551 - DNA, 25 bp, Homo sapien
tgacatccctatagtgtcactttgg

SEQ ID NO: 2290552 - DNA, 25 bp, Homo sapien
gtcactttggttggcagttatttga

SEQ ID NO: 2290553 - DNA, 25 bp, Homo sapien
aaaacatcacatggtcactttggag

SEQ ID NO: 2290554 - DNA, 25 bp, Homo sapien
gagctgggatgccttgaagactaca

SEQ ID NO: 2290555 - DNA, 25 bp, Homo sapien
gatatgtgactaataccaggtgtaa

SEQ ID NO: 2290556 - DNA, 25 bp, Homo sapien
tgccaataggattcagaagccagcc

SEQ ID NO: 2290557 - DNA, 25 bp, Homo sapien
ggtgttttcacactctgaaaggcca

SEQ ID NO: 2290558 - DNA, 25 bp, Homo sapien
tcaaaagcacattgcaaatgagcgg

SEQ ID NO: 2290559 - DNA, 25 bp, Homo sapien
cttgcactgagaaagtccacaattc

SEQ ID NO: 2290560 - DNA, 25 bp, Homo sapien
gattcaccctactcttaagtggctg

SEQ ID NO: 2290561 - DNA, 25 bp, Homo sapien
tcagcagagaattggccacgctggc

SEQ ID NO: 2290562 - DNA, 25 bp, Homo sapien
gcagtcagcagagaattggccacgc

SEQ ID NO: 2290563 - DNA, 25 bp, Homo sapien
aggccactgacgtgcatctcagctc

SEQ ID NO: 2290564 - DNA, 25 bp, Homo sapien
agagctgaagcttttgagccatttc

SEQ ID NO: 2290565 - DNA, 25 bp, Homo sapien
caagcagaggagattagggaaaaga

SEQ ID NO: 2290566 - DNA, 25 bp, Homo sapien
ggaaactgaggtaaactccacagca

SEQ ID NO: 2290567 - DNA, 25 bp, Homo sapien
acaagcagaggagattagggaaaag

SEQ ID NO: 2290568 - DNA, 25 bp, Homo sapien
ggtaaactccacagcaattttgaac

SEQ ID NO: 2290569 - DNA, 25 bp, Homo sapien
gaagagatcaaagatagccagttcc

SEQ ID NO: 2290570 - DNA, 25 bp, Homo sapien
ttcaatgtgctcagcaagaggatgg

SEQ ID NO: 2290571 - DNA, 25 bp, Homo sapien
tgtgctcagcaagaggatggaccac

SEQ ID NO: 2290572 - DNA, 25 bp, Homo sapien
tagccagttcctttcaatgtgctca

SEQ ID NO: 2290573 - DNA, 25 bp, Homo sapien
tgaagtgtcttgatggttaatgcgc

SEQ ID NO: 2290574 - DNA, 25 bp, Homo sapien
tggcactgcatagctttactgaagt

SEQ ID NO: 2290575 - DNA, 25 bp, Homo sapien
aagtgtagtatgttccaaggaggct

SEQ ID NO: 2290576 - DNA, 25 bp, Homo sapien
tagggcaaaataggatccagcttaa

SEQ ID NO: 2290577 - DNA, 25 bp, Homo sapien
atcctgctattggaactctgtagcc

SEQ ID NO: 2290578 - DNA, 25 bp, Homo sapien
gttgtcacagtaagttggcaaatgt

SEQ ID NO: 2290579 - DNA, 25 bp, Homo sapien
cttttgttgtcacagtaagttggca

SEQ ID NO: 2290580 - DNA, 25 bp, Homo sapien
tctgattaactaatcctgctattgg

SEQ ID NO: 2290581 - DNA, 25 bp, Homo sapien
tataaacacattccttgactctgat

SEQ ID NO: 2290582 - DNA, 25 bp, Homo sapien
aaagaaggccttccaacaggttgca

SEQ ID NO: 2290583 - DNA, 25 bp, Homo sapien
ctttagttcaccacagcatggttgc

SEQ ID NO: 2290584 - DNA, 25 bp, Homo sapien
aggccttccaacaggttgcactgaa

SEQ ID NO: 2290585 - DNA, 25 bp, Homo sapien
gttcaccacagcatggttgcttttc

SEQ ID NO: 2290586 - DNA, 25 bp, Homo sapien
ggtagagattgcttgcaccgcctgg

SEQ ID NO: 2290587 - DNA, 25 bp, Homo sapien
cacatggcagaagttcaataaatac

SEQ ID NO: 2290588 - DNA, 25 bp, Homo sapien
taatttaacccacatggtcaggtag

SEQ ID NO: 2290589 - DNA, 25 bp, Homo sapien
atctggacagaaaactaagagcatc

SEQ ID NO: 2290590 - DNA, 25 bp, Homo sapien
aaagcaactcttctccctactctgt

SEQ ID NO: 2290591 - DNA, 25 bp, Homo sapien
agcaactcttctccctactctgtaa

SEQ ID NO: 2290592 - DNA, 25 bp, Homo sapien
caactcttctccctactctgtaaca

SEQ ID NO: 2290593 - DNA, 25 bp, Homo sapien
aagcaactcttctccctactctgta

SEQ ID NO: 2290594 - DNA, 25 bp, Homo sapien
tgcaccagccgggaacataatgtac

SEQ ID NO: 2290595 - DNA, 25 bp, Homo sapien
tccatcagccttaagcactgtaagt

SEQ ID NO: 2290596 - DNA, 25 bp, Homo sapien
tcctataacaagtccagcacttggg

SEQ ID NO: 2290597 - DNA, 25 bp, Homo sapien
aacactgttcgaggtttccatcagc

SEQ ID NO: 2290598 - DNA, 25 bp, Homo sapien
tggcaaagtaaacaaaagacaaggc

SEQ ID NO: 2290599 - DNA, 25 bp, Homo sapien
taaacaaaagacaaggcacacaaga

SEQ ID NO: 2290600 - DNA, 25 bp, Homo sapien
aacaaaagacaaggcacacaagaac

SEQ ID NO: 2290601 - DNA, 25 bp, Homo sapien
caaaagacaaggcacacaagaacac

SEQ ID NO: 2290602 - DNA, 25 bp, Homo sapien
atatcaaaccttctctctatctgag

SEQ ID NO: 2290603 - DNA, 25 bp, Homo sapien
ccatcaataactcccaccagtgaag

SEQ ID NO: 2290604 - DNA, 25 bp, Homo sapien
tggtgctcttcagatagccttctgc

SEQ ID NO: 2290605 - DNA, 25 bp, Homo sapien
agtgaagaagggatatcaaaccttc

SEQ ID NO: 2290606 - DNA, 25 bp, Homo sapien
caagcgcagttcattatagtagtac

SEQ ID NO: 2290607 - DNA, 25 bp, Homo sapien
gaaacatgacttgcacagtggtcct

SEQ ID NO: 2290608 - DNA, 25 bp, Homo sapien
taaaaatatcccaaccaagcgcagt

SEQ ID NO: 2290609 - DNA, 25 bp, Homo sapien
tatggctccaagaagaattaagctc

SEQ ID NO: 2290610 - DNA, 25 bp, Homo sapien
ggctccaaagtagctaacaaatgtt

SEQ ID NO: 2290611 - DNA, 25 bp, Homo sapien
ctgctccaattatttttggcctgtg

SEQ ID NO: 2290612 - DNA, 25 bp, Homo sapien
gtttggctccaaagtagctaacaaa

SEQ ID NO: 2290613 - DNA, 25 bp, Homo sapien
tgctccaattatttttggcctgtga

SEQ ID NO: 2290614 - DNA, 25 bp, Homo sapien
catgaagaactgaggcattgcaatg

SEQ ID NO: 2290615 - DNA, 25 bp, Homo sapien
ctgaggcattgcaatgagcagtgtt

SEQ ID NO: 2290616 - DNA, 25 bp, Homo sapien
gctccatgaagaactgaggcattgc

SEQ ID NO: 2290617 - DNA, 25 bp, Homo sapien
gaagaactgaggcattgcaatgagc

SEQ ID NO: 2290618 - DNA, 25 bp, Homo sapien
gaattggaggaaggagaatatctct

SEQ ID NO: 2290619 - DNA, 25 bp, Homo sapien
tggaggaaggagaatatctctcata

SEQ ID NO: 2290620 - DNA, 25 bp, Homo sapien
aggagaatatctctcatatttgtac

SEQ ID NO: 2290621 - DNA, 25 bp, Homo sapien
ggaaggagaatatctctcatatttg

SEQ ID NO: 2290622 - DNA, 25 bp, Homo sapien
taactgaaactggtaattgactgct

SEQ ID NO: 2290623 - DNA, 25 bp, Homo sapien
tttccataactgaaactggtaattg

SEQ ID NO: 2290624 - DNA, 25 bp, Homo sapien
gaaactggtaattgactgcttgact

SEQ ID NO: 2290625 - DNA, 25 bp, Homo sapien
cataactgaaactggtaattgactg

SEQ ID NO: 2290626 - DNA, 25 bp, Homo sapien
gaagagctagtgtccacttcacatt

SEQ ID NO: 2290627 - DNA, 25 bp, Homo sapien
tccacatggaagagctagtgtccac

SEQ ID NO: 2290628 - DNA, 25 bp, Homo sapien
taggcaatgcccaaaggctgaatgg

SEQ ID NO: 2290629 - DNA, 25 bp, Homo sapien
gggagtttctcctattccacgaaga

SEQ ID NO: 2290630 - DNA, 25 bp, Homo sapien
cataatgagcctaacaggaaaccaa

SEQ ID NO: 2290631 - DNA, 25 bp, Homo sapien
ggtcctataattgcaaccgtctgca

SEQ ID NO: 2290632 - DNA, 25 bp, Homo sapien
aagccaatgtcaacatatagtttgg

SEQ ID NO: 2290633 - DNA, 25 bp, Homo sapien
ccaaagattggtcctataattgcaa

SEQ ID NO: 2290634 - DNA, 25 bp, Homo sapien
aggggatggctaagtaatacaaaca

SEQ ID NO: 2290635 - DNA, 25 bp, Homo sapien
ggatggctaagtaatacaaacagca

SEQ ID NO: 2290636 - DNA, 25 bp, Homo sapien
gggatggctaagtaatacaaacagc

SEQ ID NO: 2290637 - DNA, 25 bp, Homo sapien
gatggctaagtaatacaaacagcaa

SEQ ID NO: 2290638 - DNA, 25 bp, Homo sapien
gaagacttatgattcctgctattag

SEQ ID NO: 2290639 - DNA, 25 bp, Homo sapien
tgctattagatagccaagccaccag

SEQ ID NO: 2290640 - DNA, 25 bp, Homo sapien
tgggatcttggtaaactctttggta

SEQ ID NO: 2290641 - DNA, 25 bp, Homo sapien
gctgcaagaagacttatgattcctg

SEQ ID NO: 2290642 - DNA, 25 bp, Homo sapien
ttgcattttctccctggggtgtttg

SEQ ID NO: 2290643 - DNA, 25 bp, Homo sapien
tgcattttctccctggggtgtttgg

SEQ ID NO: 2290644 - DNA, 25 bp, Homo sapien
tgtacgtcaccatgccgaacagaga

SEQ ID NO: 2290645 - DNA, 25 bp, Homo sapien
caatgtactttggtttgtacgtcac

SEQ ID NO: 2290646 - DNA, 25 bp, Homo sapien
gactgtccatactgctgctcaatgt

SEQ ID NO: 2290647 - DNA, 25 bp, Homo sapien
aacagtgcttgtacataaatatagg

SEQ ID NO: 2290648 - DNA, 25 bp, Homo sapien
tgagaaacaagaaaaatatatcatt

SEQ ID NO: 2290649 - DNA, 25 bp, Homo sapien
gagaaacaagaaaaatatatcattt

SEQ ID NO: 2290650 - DNA, 25 bp, Homo sapien
acaagaaaaatatatcattttgtga

SEQ ID NO: 2290651 - DNA, 25 bp, Homo sapien
gaaaaatatatcattttgtgaatct

SEQ ID NO: 2290652 - DNA, 25 bp, Homo sapien
gccactgctggaatgttgatgagcc

SEQ ID NO: 2290653 - DNA, 25 bp, Homo sapien
gagaatattccaagggccactgctg

SEQ ID NO: 2290654 - DNA, 25 bp, Homo sapien
gacagttagtcctgccacatcagaa

SEQ ID NO: 2290655 - DNA, 25 bp, Homo sapien
gtagagttttgcagctccacacaca

SEQ ID NO: 2290656 - DNA, 25 bp, Homo sapien
tataacaggcgctcatttagcagca

SEQ ID NO: 2290657 - DNA, 25 bp, Homo sapien
gcagatacagttgggaaggccttcc

SEQ ID NO: 2290658 - DNA, 25 bp, Homo sapien
tgtttgcttttgagccacaggcaga

SEQ ID NO: 2290659 - DNA, 25 bp, Homo sapien
gacaagacagataagcagggaagca

SEQ ID NO: 2290660 - DNA, 25 bp, Homo sapien
tcccagaagccgtaatttatgaact

SEQ ID NO: 2290661 - DNA, 25 bp, Homo sapien
ttcactaaggcagcactacactcag

SEQ ID NO: 2290662 - DNA, 25 bp, Homo sapien
cactcagctgagtctaacaatgtgg

SEQ ID NO: 2290663 - DNA, 25 bp, Homo sapien
caatgtggctgtgataactcccaga

SEQ ID NO: 2290664 - DNA, 25 bp, Homo sapien
caaggataacaaaactaaactcata

SEQ ID NO: 2290665 - DNA, 25 bp, Homo sapien
ttgagtcacgcctgtgttcaaaccc

SEQ ID NO: 2290666 - DNA, 25 bp, Homo sapien
tacaactgtccctctaccgtgagga

SEQ ID NO: 2290667 - DNA, 25 bp, Homo sapien
caaaccccagatccatgcagtttct

SEQ ID NO: 2290668 - DNA, 25 bp, Homo sapien
agagctcgttcatgataagagacag

SEQ ID NO: 2290669 - DNA, 25 bp, Homo sapien
gttgcaatctgaaaagagagctcgt

SEQ ID NO: 2290670 - DNA, 25 bp, Homo sapien
aacatttgcatcttgagttgcaatc

SEQ ID NO: 2290671 - DNA, 25 bp, Homo sapien
cgttcatgataagagacaggtttgg

SEQ ID NO: 2290672 - DNA, 25 bp, Homo sapien
gctgatacatatgtgattccatttt

SEQ ID NO: 2290673 - DNA, 25 bp, Homo sapien
agctgatacatatgtgattccattt

SEQ ID NO: 2290674 - DNA, 25 bp, Homo sapien
ccactcctgttggaggtttgacaac

SEQ ID NO: 2290675 - DNA, 25 bp, Homo sapien
ttttccactcctgttggaggtttga

SEQ ID NO: 2290676 - DNA, 25 bp, Homo sapien
tgtgagcccccatagagttttgttg

SEQ ID NO: 2290677 - DNA, 25 bp, Homo sapien
ctagtagtggtctgctgtgagcccc

SEQ ID NO: 2290678 - DNA, 25 bp, Homo sapien
ccatcgccatatacttgagaggtga

SEQ ID NO: 2290679 - DNA, 25 bp, Homo sapien
gaggcaagcctcctactagtagtgg

SEQ ID NO: 2290680 - DNA, 25 bp, Homo sapien
cagtaccactaggaatggttataac

SEQ ID NO: 2290681 - DNA, 25 bp, Homo sapien
gcaactccagtaccactaggaatgg

SEQ ID NO: 2290682 - DNA, 25 bp, Homo sapien
cactaggaatggttataacattttc

SEQ ID NO: 2290683 - DNA, 25 bp, Homo sapien
ttttcagcaactccagtaccactag

SEQ ID NO: 2290684 - DNA, 25 bp, Homo sapien
tacatgggtggtctaattttctgcc

SEQ ID NO: 2290685 - DNA, 25 bp, Homo sapien
caaggaccacggatcttagggccag

SEQ ID NO: 2290686 - DNA, 25 bp, Homo sapien
gaatcttaattctggtcgctcacta

SEQ ID NO: 2290687 - DNA, 25 bp, Homo sapien
tgtaacacgatagggaaaagtccaa

SEQ ID NO: 2290688 - DNA, 25 bp, Homo sapien
tgacatcttcccactatgcctgagg

SEQ ID NO: 2290689 - DNA, 25 bp, Homo sapien
ggtatgccacctagggataaagtat

SEQ ID NO: 2290690 - DNA, 25 bp, Homo sapien
tagaagctgcaattcccacacaagt

SEQ ID NO: 2290691 - DNA, 25 bp, Homo sapien
aggaatttccggatttagaagctgc

SEQ ID NO: 2290692 - DNA, 25 bp, Homo sapien
tattgctaatgtgtagatacccaag

SEQ ID NO: 2290693 - DNA, 25 bp, Homo sapien
caaggcaaaagacttaagctgtggc

SEQ ID NO: 2290694 - DNA, 25 bp, Homo sapien
tgtagatacccaaggcaaaagactt

SEQ ID NO: 2290695 - DNA, 25 bp, Homo sapien
agacttaagctgtggcttaatgcac

SEQ ID NO: 2290696 - DNA, 25 bp, Homo sapien
tgcatgatcctctacttccacatct

SEQ ID NO: 2290697 - DNA, 25 bp, Homo sapien
taaatccccatttgaggcatgaagt

SEQ ID NO: 2290698 - DNA, 25 bp, Homo sapien
aactccaaaatacactggagctggg

SEQ ID NO: 2290699 - DNA, 25 bp, Homo sapien
ggcatgaagtatcaatcaaaactcc

SEQ ID NO: 2290700 - DNA, 25 bp, Homo sapien
ctgtagcaatgagatgcgggaatgc

SEQ ID NO: 2290701 - DNA, 25 bp, Homo sapien
tggcattgtgtaaatctgggatgct

SEQ ID NO: 2290702 - DNA, 25 bp, Homo sapien
aatgagatgcgggaatgcttttgat

SEQ ID NO: 2290703 - DNA, 25 bp, Homo sapien
aaaacttgttagtgtcagtggcatt

SEQ ID NO: 2290704 - DNA, 25 bp, Homo sapien
tagaagaagagagaatctctgttat

SEQ ID NO: 2290705 - DNA, 25 bp, Homo sapien
tctctgttataattaatgcaacaac

SEQ ID NO: 2290706 - DNA, 25 bp, Homo sapien
aagagagaatctctgttataattaa

SEQ ID NO: 2290707 - DNA, 25 bp, Homo sapien
tctgttataattaatgcaacaacca

SEQ ID NO: 2290708 - DNA, 25 bp, Homo sapien
tgaaaagtactgcaatgcttaggag

SEQ ID NO: 2290709 - DNA, 25 bp, Homo sapien
tgcccagtatcacagttagtcccag

SEQ ID NO: 2290710 - DNA, 25 bp, Homo sapien
taaagttgagtttccttgcctggcc

SEQ ID NO: 2290711 - DNA, 25 bp, Homo sapien
tttggaatcttgtagacaccattgt

SEQ ID NO: 2290712 - DNA, 25 bp, Homo sapien
gaacacgtcgtgtataagtaggaag

SEQ ID NO: 2290713 - DNA, 25 bp, Homo sapien
catagtcacttatagcgccacacaa

SEQ ID NO: 2290714 - DNA, 25 bp, Homo sapien
tcaaacatgttttaggaacacgtcg

SEQ ID NO: 2290715 - DNA, 25 bp, Homo sapien
gagacaattgttcttctaggagtac

SEQ ID NO: 2290716 - DNA, 25 bp, Homo sapien
cagaattggatggtgagccagcagt

SEQ ID NO: 2290717 - DNA, 25 bp, Homo sapien
catctagtcttctccggattgtacc

SEQ ID NO: 2290718 - DNA, 25 bp, Homo sapien
ccagcagtagaaacagtatacctca

SEQ ID NO: 2290719 - DNA, 25 bp, Homo sapien
gattgtaccggactaacagaatgtg

SEQ ID NO: 2290720 - DNA, 25 bp, Homo sapien
gctttcataccatggagagtggatg

SEQ ID NO: 2290721 - DNA, 25 bp, Homo sapien
tttcaagtgctgagctttcatacca

SEQ ID NO: 2290722 - DNA, 25 bp, Homo sapien
caagtgctgagctttcataccatgg

SEQ ID NO: 2290723 - DNA, 25 bp, Homo sapien
ctgagctttcataccatggagagtg

SEQ ID NO: 2290724 - DNA, 25 bp, Homo sapien
caagaagcccttgatacgacagcaa

SEQ ID NO: 2290725 - DNA, 25 bp, Homo sapien
gtcttggctatctcagaatatggca

SEQ ID NO: 2290726 - DNA, 25 bp, Homo sapien
tatggcatactagagtgctgcacac

SEQ ID NO: 2290727 - DNA, 25 bp, Homo sapien
tactcctgggtatccgagaatttcc

SEQ ID NO: 2290728 - DNA, 25 bp, Homo sapien
actttgaatgctacagcaactgcaa

SEQ ID NO: 2290729 - DNA, 25 bp, Homo sapien
ttgactttgaatgctacagcaactg

SEQ ID NO: 2290730 - DNA, 25 bp, Homo sapien
tgactttgaatgctacagcaactgc

SEQ ID NO: 2290731 - DNA, 25 bp, Homo sapien
gactttgaatgctacagcaactgca

SEQ ID NO: 2290732 - DNA, 25 bp, Homo sapien
gtaaactcagcatcgcaaagcacaa

SEQ ID NO: 2290733 - DNA, 25 bp, Homo sapien
acaacgggacaacacttcagggcta

SEQ ID NO: 2290734 - DNA, 25 bp, Homo sapien
cagggctatgcttgaagtccattta

SEQ ID NO: 2290735 - DNA, 25 bp, Homo sapien
ttctgtcaggccctctaggaggtgg

SEQ ID NO: 2290736 - DNA, 25 bp, Homo sapien
ttttaattgttgctgatgcttggtt

SEQ ID NO: 2290737 - DNA, 25 bp, Homo sapien
ttaattgttgctgatgcttggtttg

SEQ ID NO: 2290738 - DNA, 25 bp, Homo sapien
ccattgcagcgtcttgttttctttt

SEQ ID NO: 2290739 - DNA, 25 bp, Homo sapien
tccattgcagcgtcttgttttcttt

SEQ ID NO: 2290740 - DNA, 25 bp, Homo sapien
cttgaatccattgcagcgtcttgtt

SEQ ID NO: 2290741 - DNA, 25 bp, Homo sapien
ccaacttccttcactatccctcaac

SEQ ID NO: 2290742 - DNA, 25 bp, Homo sapien
attcctttcattttcggatagagac

SEQ ID NO: 2290743 - DNA, 25 bp, Homo sapien
gagacatgttttatccgtggaccca

SEQ ID NO: 2290744 - DNA, 25 bp, Homo sapien
tttcaatcttgacaccacacttcaa

SEQ ID NO: 2290745 - DNA, 25 bp, Homo sapien
cagtaacgtggccatacattgccac

SEQ ID NO: 2290746 - DNA, 25 bp, Homo sapien
gcaacatgtagattcagtaacgtgg

SEQ ID NO: 2290747 - DNA, 25 bp, Homo sapien
atacattgccactgtcaggtctctg

SEQ ID NO: 2290748 - DNA, 25 bp, Homo sapien
tgtagattcagtaacgtggccatac

SEQ ID NO: 2290749 - DNA, 25 bp, Homo sapien
tcacagccatgcgagatcagacaaa

SEQ ID NO: 2290750 - DNA, 25 bp, Homo sapien
tgagcattcctaataacgtgggatc

SEQ ID NO: 2290751 - DNA, 25 bp, Homo sapien
cacacttcagagtgatatggcctat

SEQ ID NO: 2290752 - DNA, 25 bp, Homo sapien
tgcaggacataagatttcacaacct

SEQ ID NO: 2290753 - DNA, 25 bp, Homo sapien
tagaaatcaactccagaaggaactc

SEQ ID NO: 2290754 - DNA, 25 bp, Homo sapien
cagaggtcagaaagctggtagaatc

SEQ ID NO: 2290755 - DNA, 25 bp, Homo sapien
cttttcactaactggggctgctctt

SEQ ID NO: 2290756 - DNA, 25 bp, Homo sapien
tgctctttccaagaggtcagaggtc

SEQ ID NO: 2290757 - DNA, 25 bp, Homo sapien
agctggtagaatcatacaagaccat

SEQ ID NO: 2290758 - DNA, 25 bp, Homo sapien
gcaggagtagcactttcaggaagcc

SEQ ID NO: 2290759 - DNA, 25 bp, Homo sapien
tataggaagctagacactgttctca

SEQ ID NO: 2290760 - DNA, 25 bp, Homo sapien
tacaacattcgattgctagaggagt

SEQ ID NO: 2290761 - DNA, 25 bp, Homo sapien
tatttccatgtgaatagccctggct

SEQ ID NO: 2290762 - DNA, 25 bp, Homo sapien
aagcttccatcaattaaaccagcaa

SEQ ID NO: 2290763 - DNA, 25 bp, Homo sapien
ttccatcaattaaaccagcaagaga

SEQ ID NO: 2290764 - DNA, 25 bp, Homo sapien
agcttccatcaattaaaccagcaag

SEQ ID NO: 2290765 - DNA, 25 bp, Homo sapien
ttttcaacttatgcaagtatggtta

SEQ ID NO: 2290766 - DNA, 25 bp, Homo sapien
aacttatgcaagtatggttatcaaa

SEQ ID NO: 2290767 - DNA, 25 bp, Homo sapien
ttcaacttatgcaagtatggttatc

SEQ ID NO: 2290768 - DNA, 25 bp, Homo sapien
gtttttcaacttatgcaagtatggt

SEQ ID NO: 2290769 - DNA, 25 bp, Homo sapien
gcagcatacctgacctctaccccta

SEQ ID NO: 2290770 - DNA, 25 bp, Homo sapien
caaaaatatcctaacatattgccaa

SEQ ID NO: 2290771 - DNA, 25 bp, Homo sapien
tattgccaaattgcccatgagagac

SEQ ID NO: 2290772 - DNA, 25 bp, Homo sapien
tgacctctacccctaggtaccagtg

SEQ ID NO: 2290773 - DNA, 25 bp, Homo sapien
taagaattatcgtcctccctcaacc

SEQ ID NO: 2290774 - DNA, 25 bp, Homo sapien
gcaaaccatgagtttgtgtaggacc

SEQ ID NO: 2290775 - DNA, 25 bp, Homo sapien
tgagacaagggagataaagtttcct

SEQ ID NO: 2290776 - DNA, 25 bp, Homo sapien
taggttgctcctatgcagtccttcc

SEQ ID NO: 2290777 - DNA, 25 bp, Homo sapien
tgtgtagtttagatccaaagtaact

SEQ ID NO: 2290778 - DNA, 25 bp, Homo sapien
caattccaattaacttcggtctgtg

SEQ ID NO: 2290779 - DNA, 25 bp, Homo sapien
aacttcggtctgtgtagtttagatc

SEQ ID NO: 2290780 - DNA, 25 bp, Homo sapien
tccaattaacttcggtctgtgtagt

SEQ ID NO: 2290781 - DNA, 25 bp, Homo sapien
gtacagcagcaggtgaagttgtgaa

SEQ ID NO: 2290782 - DNA, 25 bp, Homo sapien
cagcagcaggtgaagttgtgaagcc

SEQ ID NO: 2290783 - DNA, 25 bp, Homo sapien
caggtgaagttgtgaagccttactg

SEQ ID NO: 2290784 - DNA, 25 bp, Homo sapien
tacaccatgaacaaagtgggttatc

SEQ ID NO: 2290785 - DNA, 25 bp, Homo sapien
aacttcccagcatgtatttcagaac

SEQ ID NO: 2290786 - DNA, 25 bp, Homo sapien
tatcctaagagtgcttataatctgg

SEQ ID NO: 2290787 - DNA, 25 bp, Homo sapien
tgggagtgtccactaagaaagatac

SEQ ID NO: 2290788 - DNA, 25 bp, Homo sapien
tccattgaatgataaggtttgatta

SEQ ID NO: 2290789 - DNA, 25 bp, Homo sapien
gtttgattaattaaacaggttgata

SEQ ID NO: 2290790 - DNA, 25 bp, Homo sapien
acaggttgataaacttgatgttgaa

SEQ ID NO: 2290791 - DNA, 25 bp, Homo sapien
ctttttctactatctcaggtgatgt

SEQ ID NO: 2290792 - DNA, 25 bp, Homo sapien
catagatccacatgtgtgacccaga

SEQ ID NO: 2290793 - DNA, 25 bp, Homo sapien
gacatagatccacatgtgtgaccca

SEQ ID NO: 2290794 - DNA, 25 bp, Homo sapien
gaagacatagatccacatgtgtgac

SEQ ID NO: 2290795 - DNA, 25 bp, Homo sapien
gatccacatgtgtgacccagattcc

SEQ ID NO: 2290796 - DNA, 25 bp, Homo sapien
ttcccctatgccacgaagcatattc

SEQ ID NO: 2290797 - DNA, 25 bp, Homo sapien
tctacatatccaatatccacgtaca

SEQ ID NO: 2290798 - DNA, 25 bp, Homo sapien
tacatatccaatatccacgtacatt

SEQ ID NO: 2290799 - DNA, 25 bp, Homo sapien
tatccaatatccacgtacattttag

SEQ ID NO: 2290800 - DNA, 25 bp, Homo sapien
catatccaatatccacgtacatttt

SEQ ID NO: 2290801 - DNA, 25 bp, Homo sapien
ctacacatcaacatccaagtcacca

SEQ ID NO: 2290802 - DNA, 25 bp, Homo sapien
acatcaacatccaagtcaccatcaa

SEQ ID NO: 2290803 - DNA, 25 bp, Homo sapien
tacacatcaacatccaagtcaccat

SEQ ID NO: 2290804 - DNA, 25 bp, Homo sapien
cacatcaacatccaagtcaccatca

SEQ ID NO: 2290805 - DNA, 25 bp, Homo sapien
caatgatggcgacttcaacggtgta

SEQ ID NO: 2290806 - DNA, 25 bp, Homo sapien
cacagtgtggctttacagaaataca

SEQ ID NO: 2290807 - DNA, 25 bp, Homo sapien
cacacagtgtggctttacagaaaca

SEQ ID NO: 2290808 - DNA, 25 bp, Homo sapien
gaagctatgcacaacatttggacag

SEQ ID NO: 2290809 - DNA, 25 bp, Homo sapien
gagtccttaggagttattctgatag

SEQ ID NO: 2290810 - DNA, 25 bp, Homo sapien
ggtcaaattagctgtttgatttcta

SEQ ID NO: 2290811 - DNA, 25 bp, Homo sapien
tcaatggtactccattagcccattt

SEQ ID NO: 2290812 - DNA, 25 bp, Homo sapien
gattattgcttctcaatggtactcc

SEQ ID NO: 2290813 - DNA, 25 bp, Homo sapien
gcttctcaatggtactccattagcc

SEQ ID NO: 2290814 - DNA, 25 bp, Homo sapien
tattgcttctcaatggtactccatt

SEQ ID NO: 2290815 - DNA, 25 bp, Homo sapien
gaccgtactgttgctccatatattt

SEQ ID NO: 2290816 - DNA, 25 bp, Homo sapien
tgctccatatatttaaagacgtaag

SEQ ID NO: 2290817 - DNA, 25 bp, Homo sapien
agatgcagactgaccgtactgttgc

SEQ ID NO: 2290818 - DNA, 25 bp, Homo sapien
caaaaagttagcatgagatgcagac

SEQ ID NO: 2290819 - DNA, 25 bp, Homo sapien
aaacattccagttgcaaccgtagga

SEQ ID NO: 2290820 - DNA, 25 bp, Homo sapien
gaaacaagaaggatatcatcgaagt

SEQ ID NO: 2290821 - DNA, 25 bp, Homo sapien
gatttgctttcgcagattagaggga

SEQ ID NO: 2290822 - DNA, 25 bp, Homo sapien
gagggaaatatagaagttgaaacaa

SEQ ID NO: 2290823 - DNA, 25 bp, Homo sapien
gacatgacttatgacctagaaaaag

SEQ ID NO: 2290824 - DNA, 25 bp, Homo sapien
gacttagacaagaggtctttatcat

SEQ ID NO: 2290825 - DNA, 25 bp, Homo sapien
aaagaggttagataagacttagaca

SEQ ID NO: 2290826 - DNA, 25 bp, Homo sapien
tttgatttgctgatgtcaaaatggc

SEQ ID NO: 2290827 - DNA, 25 bp, Homo sapien
agaaagtggtacatctacatgagat

SEQ ID NO: 2290828 - DNA, 25 bp, Homo sapien
tgcaataagaaagtggtacatctac

SEQ ID NO: 2290829 - DNA, 25 bp, Homo sapien
taagaaagtggtacatctacatgag

SEQ ID NO: 2290830 - DNA, 25 bp, Homo sapien
agttgcaataagaaagtggtacatc

SEQ ID NO: 2290831 - DNA, 25 bp, Homo sapien
caggtaagttattccattgttccca

SEQ ID NO: 2290832 - DNA, 25 bp, Homo sapien
gacaggtaagttattccattgttcc

SEQ ID NO: 2290833 - DNA, 25 bp, Homo sapien
tgacaggtaagttattccattgttc

SEQ ID NO: 2290834 - DNA, 25 bp, Homo sapien
aatgtggtacctcctgttgcagaga

SEQ ID NO: 2290835 - DNA, 25 bp, Homo sapien
agttacttccacacaactacagtta

SEQ ID NO: 2290836 - DNA, 25 bp, Homo sapien
ttcacagtcaacaagataaatgtgg

SEQ ID NO: 2290837 - DNA, 25 bp, Homo sapien
aagagtttatgacttgaattgcaac

SEQ ID NO: 2290838 - DNA, 25 bp, Homo sapien
ttcttgcctgctcatactcacatcc

SEQ ID NO: 2290839 - DNA, 25 bp, Homo sapien
ctcactgatgtgcacacgctcgtgc

SEQ ID NO: 2290840 - DNA, 25 bp, Homo sapien
cttcttgcctgctcatactcacatc

SEQ ID NO: 2290841 - DNA, 25 bp, Homo sapien
cactgatgtgcacacgctcgtgcat

SEQ ID NO: 2290842 - DNA, 25 bp, Homo sapien
tgttgaatagctttggctaaaagcc

SEQ ID NO: 2290843 - DNA, 25 bp, Homo sapien
gtagagtgggacgttgctaaaaaga

SEQ ID NO: 2290844 - DNA, 25 bp, Homo sapien
taccggtagagtgggacgttgctaa

SEQ ID NO: 2290845 - DNA, 25 bp, Homo sapien
ggctaaaagcctgatagtgatatgg

SEQ ID NO: 2290846 - DNA, 25 bp, Homo sapien
agtgttcttataaccattgactgga

SEQ ID NO: 2290847 - DNA, 25 bp, Homo sapien
gttcttataaccattgactggaaac

SEQ ID NO: 2290848 - DNA, 25 bp, Homo sapien
ctagtgttcttataaccattgactg

SEQ ID NO: 2290849 - DNA, 25 bp, Homo sapien
ttataaccattgactggaaacccat

SEQ ID NO: 2290850 - DNA, 25 bp, Homo sapien
gaccttctcaccgaatacacttcat

SEQ ID NO: 2290851 - DNA, 25 bp, Homo sapien
tcttcacggtaatttggccatagag

SEQ ID NO: 2290852 - DNA, 25 bp, Homo sapien
cacttcatgtacaacttcttcacgg

SEQ ID NO: 2290853 - DNA, 25 bp, Homo sapien
aggatggaggcaatgcaaccctgca

SEQ ID NO: 2290854 - DNA, 25 bp, Homo sapien
ttccaggagtgaggtatcgtctctg

SEQ ID NO: 2290855 - DNA, 25 bp, Homo sapien
cgtctctgaatctggaggtagagaa

SEQ ID NO: 2290856 - DNA, 25 bp, Homo sapien
catatcagaaggagtcctaactacc

SEQ ID NO: 2290857 - DNA, 25 bp, Homo sapien
gagtcctaactacccagatgctatt

SEQ ID NO: 2290858 - DNA, 25 bp, Homo sapien
caaaaaatacggaattatatatcct

SEQ ID NO: 2290859 - DNA, 25 bp, Homo sapien
tatatcctacaagccccttgtgctc

SEQ ID NO: 2290860 - DNA, 25 bp, Homo sapien
tatatatcctacaagccccttgtgc

SEQ ID NO: 2290861 - DNA, 25 bp, Homo sapien
atatcctacaagccccttgtgctcc

SEQ ID NO: 2290862 - DNA, 25 bp, Homo sapien
ttgtagaaagcagtctgacgatttc

SEQ ID NO: 2290863 - DNA, 25 bp, Homo sapien
cttaatgtcacttgcaggatacttc

SEQ ID NO: 2290864 - DNA, 25 bp, Homo sapien
tattatactttcaggcatttgggtc

SEQ ID NO: 2290865 - DNA, 25 bp, Homo sapien
taagaggtaaggtacaattgcagca

SEQ ID NO: 2290866 - DNA, 25 bp, Homo sapien
taagcatagtcacttacaggtagtt

SEQ ID NO: 2290867 - DNA, 25 bp, Homo sapien
taccccttgctgttgaactttgctt

SEQ ID NO: 2290868 - DNA, 25 bp, Homo sapien
gcattagttcaattaggattcaaca

SEQ ID NO: 2290869 - DNA, 25 bp, Homo sapien
cataggacatttggttgtgtctatc

SEQ ID NO: 2290870 - DNA, 25 bp, Homo sapien
gtgctgggaatcttaaagctataga

SEQ ID NO: 2290871 - DNA, 25 bp, Homo sapien
agtgctgggaatcttaaagctatag

SEQ ID NO: 2290872 - DNA, 25 bp, Homo sapien
tttctttcattgtccgatgccttgg

SEQ ID NO: 2290873 - DNA, 25 bp, Homo sapien
tccaaattacatgttttactatctg

SEQ ID NO: 2290874 - DNA, 25 bp, Homo sapien
aatgttcaccattatttaagaattc

SEQ ID NO: 2290875 - DNA, 25 bp, Homo sapien
gttttactatctgttccagcagaag

SEQ ID NO: 2290876 - DNA, 25 bp, Homo sapien
tatatcctaaccatgggtactccca

SEQ ID NO: 2290877 - DNA, 25 bp, Homo sapien
taatccacttccatgggtccagtag

SEQ ID NO: 2290878 - DNA, 25 bp, Homo sapien
gatgcatagacttatccattggtcc

SEQ ID NO: 2290879 - DNA, 25 bp, Homo sapien
caagtatgcaaggaagtaacacaga

SEQ ID NO: 2290880 - DNA, 25 bp, Homo sapien
tatctccaccaacagggatagggct

SEQ ID NO: 2290881 - DNA, 25 bp, Homo sapien
gaacccatcaggagttgagcttacc

SEQ ID NO: 2290882 - DNA, 25 bp, Homo sapien
cagggagcaggaatgtctcacccac

SEQ ID NO: 2290883 - DNA, 25 bp, Homo sapien
tctctctctagcacccaggtaggag

SEQ ID NO: 2290884 - DNA, 25 bp, Homo sapien
caatgccgcttacattggatttaca

SEQ ID NO: 2290885 - DNA, 25 bp, Homo sapien
tgcttctccattaatgcgtctacta

SEQ ID NO: 2290886 - DNA, 25 bp, Homo sapien
tagccgctcaatccaatgccgctta

SEQ ID NO: 2290887 - DNA, 25 bp, Homo sapien
tgcgtctactaaagtacagcgacac

SEQ ID NO: 2290888 - DNA, 25 bp, Homo sapien
ttagagcaattctggtgatgcttga

SEQ ID NO: 2290889 - DNA, 25 bp, Homo sapien
ctcttagagcaattctggtgatgct

SEQ ID NO: 2290890 - DNA, 25 bp, Homo sapien
agagcaattctggtgatgcttgacc

SEQ ID NO: 2290891 - DNA, 25 bp, Homo sapien
gagcaattctggtgatgcttgacct

SEQ ID NO: 2290892 - DNA, 25 bp, Homo sapien
ctgtactgtgcttaaagacgtgagg

SEQ ID NO: 2290893 - DNA, 25 bp, Homo sapien
aaagacgtgaggtgtaagctcctag

SEQ ID NO: 2290894 - DNA, 25 bp, Homo sapien
ggtgtaagctcctagcactcaaagc

SEQ ID NO: 2290895 - DNA, 25 bp, Homo sapien
gctcctagcactcaaagcactctga

SEQ ID NO: 2290896 - DNA, 25 bp, Homo sapien
aagagaagaggatatctcaaatctc

SEQ ID NO: 2290897 - DNA, 25 bp, Homo sapien
agagaagaggatatctcaaatctcc

SEQ ID NO: 2290898 - DNA, 25 bp, Homo sapien
caattccaattaacttcggtctgtg

SEQ ID NO: 2290899 - DNA, 25 bp, Homo sapien
tgtgtagtttagatccaaagtaact

SEQ ID NO: 2290900 - DNA, 25 bp, Homo sapien
aacttcggtctgtgtagtttagatc

SEQ ID NO: 2290901 - DNA, 25 bp, Homo sapien
tccaattaacttcggtctgtgtagt

SEQ ID NO: 2290902 - DNA, 25 bp, Homo sapien
agaaatgtggtaaagccatcaaaat

SEQ ID NO: 2290903 - DNA, 25 bp, Homo sapien
gaagaaatgtggtaaagccatcaaa

SEQ ID NO: 2290904 - DNA, 25 bp, Homo sapien
atcccatgaagaaatgtggtaaagc

SEQ ID NO: 2290905 - DNA, 25 bp, Homo sapien
ccatgaagaaatgtggtaaagccat

SEQ ID NO: 2290906 - DNA, 25 bp, Homo sapien
tattatctcagacggtgttctattg

SEQ ID NO: 2290907 - DNA, 25 bp, Homo sapien
ctctttctattatctcagacggtgt

SEQ ID NO: 2290908 - DNA, 25 bp, Homo sapien
gacggtgttctattgagtgataaca

SEQ ID NO: 2290909 - DNA, 25 bp, Homo sapien
tctcagacggtgttctattgagtga

SEQ ID NO: 2290910 - DNA, 25 bp, Homo sapien
gatccacatgtgtgacccagattcc

SEQ ID NO: 2290911 - DNA, 25 bp, Homo sapien
catagatccacatgtgtgacccaga

SEQ ID NO: 2290912 - DNA, 25 bp, Homo sapien
gacatagatccacatgtgtgaccca

SEQ ID NO: 2290913 - DNA, 25 bp, Homo sapien
gaagacatagatccacatgtgtgac

SEQ ID NO: 2290914 - DNA, 25 bp, Homo sapien
tttcccctatgccacgaagcatatt

SEQ ID NO: 2290915 - DNA, 25 bp, Homo sapien
ggtttcccctatgccacgaagcata

SEQ ID NO: 2290916 - DNA, 25 bp, Homo sapien
gggtttcccctatgccacgaagcat

SEQ ID NO: 2290917 - DNA, 25 bp, Homo sapien
ggggtttcccctatgccacgaagca

SEQ ID NO: 2290918 - DNA, 25 bp, Homo sapien
cataaaggcaaaaactagaccagtc

SEQ ID NO: 2290919 - DNA, 25 bp, Homo sapien
acagagatcccagcataaaggcaaa

SEQ ID NO: 2290920 - DNA, 25 bp, Homo sapien
tagaccagtcattcccattacattc

SEQ ID NO: 2290921 - DNA, 25 bp, Homo sapien
cacatatccgatatccacatacatt

SEQ ID NO: 2290922 - DNA, 25 bp, Homo sapien
tacacatcaaccaagtcatcatcaa

SEQ ID NO: 2290923 - DNA, 25 bp, Homo sapien
ctacacatcaaccaagtcatcatca

SEQ ID NO: 2290924 - DNA, 25 bp, Homo sapien
aggaaaccaagccaccaagctccaa

SEQ ID NO: 2290925 - DNA, 25 bp, Homo sapien
aagctccaacccaacgagagtcctt

SEQ ID NO: 2290926 - DNA, 25 bp, Homo sapien
cgagagtccttaggagttatcctga

SEQ ID NO: 2290927 - DNA, 25 bp, Homo sapien
ccaacccaacgagagtccttaggag

SEQ ID NO: 2290928 - DNA, 25 bp, Homo sapien
taatatattttcttcggttggtcaa

SEQ ID NO: 2290929 - DNA, 25 bp, Homo sapien
tatcattagtttttagcacatgcaa

SEQ ID NO: 2290930 - DNA, 25 bp, Homo sapien
gaagaaataatggatactattccag

SEQ ID NO: 2290931 - DNA, 25 bp, Homo sapien
cacatgcaaaaatagtgaaactttc

SEQ ID NO: 2290932 - DNA, 25 bp, Homo sapien
tactgttgctccaccattttaatga

SEQ ID NO: 2290933 - DNA, 25 bp, Homo sapien
gtcttagatgcagaccaaccatact

SEQ ID NO: 2290934 - DNA, 25 bp, Homo sapien
tttaatgatataagtaagagaagca

SEQ ID NO: 2290935 - DNA, 25 bp, Homo sapien
aaaaagttagtcttagatgcagacc

SEQ ID NO: 2290936 - DNA, 25 bp, Homo sapien
caattgcaacagcaggtagggcgag

SEQ ID NO: 2290937 - DNA, 25 bp, Homo sapien
tatatcctcctgaaaacatgccaat

SEQ ID NO: 2290938 - DNA, 25 bp, Homo sapien
taaaacttgagataagagatgcact

SEQ ID NO: 2290939 - DNA, 25 bp, Homo sapien
gccaatttggcaagtccaactaaag

SEQ ID NO: 2290940 - DNA, 25 bp, Homo sapien
tacatgagatcttactggactattt

SEQ ID NO: 2290941 - DNA, 25 bp, Homo sapien
acatctacatgagatcttactggac

SEQ ID NO: 2290942 - DNA, 25 bp, Homo sapien
ggtacatctacatgagatcttactg

SEQ ID NO: 2290943 - DNA, 25 bp, Homo sapien
gaaagtggtacatctacatgagatc

SEQ ID NO: 2290944 - DNA, 25 bp, Homo sapien
ccagcacggaatatgaggtaagtcc

SEQ ID NO: 2290945 - DNA, 25 bp, Homo sapien
ctaatcaccagcacggaatatgagg

SEQ ID NO: 2290946 - DNA, 25 bp, Homo sapien
cacggaatatgaggtaagtccaact

SEQ ID NO: 2290947 - DNA, 25 bp, Homo sapien
gaatatgaggtaagtccaactgcac

SEQ ID NO: 2290948 - DNA, 25 bp, Homo sapien
ctagcgatcgcataatcattgaatg

SEQ ID NO: 2290949 - DNA, 25 bp, Homo sapien
tagcgatcgcataatcattgaatgg

SEQ ID NO: 2290950 - DNA, 25 bp, Homo sapien
aattggaagtttggtactaagtgtg

SEQ ID NO: 2290951 - DNA, 25 bp, Homo sapien
tttaagatgattgtttgtgaattgg

SEQ ID NO: 2290952 - DNA, 25 bp, Homo sapien
tggaagtttggtactaagtgtgcat

SEQ ID NO: 2290953 - DNA, 25 bp, Homo sapien
gaagtttggtactaagtgtgcattt

SEQ ID NO: 2290954 - DNA, 25 bp, Homo sapien
aattatatatcctacaagcccctcg

SEQ ID NO: 2290955 - DNA, 25 bp, Homo sapien
atatatcctacaagcccctcgtgct

SEQ ID NO: 2290956 - DNA, 25 bp, Homo sapien
ccccaaaatatattggaactagaat

SEQ ID NO: 2290957 - DNA, 25 bp, Homo sapien
ttatatatcctacaagcccctcgtg

SEQ ID NO: 2290958 - DNA, 25 bp, Homo sapien
cagcactctcggttcacgaaaatct

SEQ ID NO: 2290959 - DNA, 25 bp, Homo sapien
aggcaccccctgtaggggaagactg

SEQ ID NO: 2290960 - DNA, 25 bp, Homo sapien
aatgatcagacagcagcactctcgg

SEQ ID NO: 2290961 - DNA, 25 bp, Homo sapien
gaagactgacacttcacacagccgg

SEQ ID NO: 2290962 - DNA, 25 bp, Homo sapien
actgagaaggaagttcgaagttcac

SEQ ID NO: 2290963 - DNA, 25 bp, Homo sapien
tcattctacataagggcaggagaca

SEQ ID NO: 2290964 - DNA, 25 bp, Homo sapien
gatccaggtatataacggacgttgg

SEQ ID NO: 2290965 - DNA, 25 bp, Homo sapien
tacaggctcggtaaaagattgagac

SEQ ID NO: 2290966 - DNA, 25 bp, Homo sapien
gtacaaaatgttcactgtcgtttaa

SEQ ID NO: 2290967 - DNA, 25 bp, Homo sapien
tccataggcctagcagaaacttaac

SEQ ID NO: 2290968 - DNA, 25 bp, Homo sapien
tcattatagcataaatccaggctag

SEQ ID NO: 2290969 - DNA, 25 bp, Homo sapien
aatacatcaaggtggctagcaaaca

SEQ ID NO: 2290970 - DNA, 25 bp, Homo sapien
cataaggttctctcgttatttaggc

SEQ ID NO: 2290971 - DNA, 25 bp, Homo sapien
aatatgttgaagagtcattctgcac

SEQ ID NO: 2290972 - DNA, 25 bp, Homo sapien
tatcactaacaatcagcgaaatgca

SEQ ID NO: 2290973 - DNA, 25 bp, Homo sapien
tcacctcatcccagacagaatggat

SEQ ID NO: 2290974 - DNA, 25 bp, Homo sapien
ctgttcatattatccaaggcatgta

SEQ ID NO: 2290975 - DNA, 25 bp, Homo sapien
tgtagccacctagcaatcatgagga

SEQ ID NO: 2290976 - DNA, 25 bp, Homo sapien
taggctgctggagggtcgttaccca

SEQ ID NO: 2290977 - DNA, 25 bp, Homo sapien
gaatgtttgcaccaacagggatggg

SEQ ID NO: 2290978 - DNA, 25 bp, Homo sapien
tggttaccccttaggccaatgagat

SEQ ID NO: 2290979 - DNA, 25 bp, Homo sapien
tccaagaatagtgtctcatacctag

SEQ ID NO: 2290980 - DNA, 25 bp, Homo sapien
aacaaagacttaatctgcaatagta

SEQ ID NO: 2290981 - DNA, 25 bp, Homo sapien
gagtcaaacttgaccatggagcaag

SEQ ID NO: 2290982 - DNA, 25 bp, Homo sapien
ttaaaaatgcataccaatgaactga

SEQ ID NO: 2290983 - DNA, 25 bp, Homo sapien
atttagaatcctacagcaactgcaa

SEQ ID NO: 2290984 - DNA, 25 bp, Homo sapien
ctggatttagaatcctacagcaact

SEQ ID NO: 2290985 - DNA, 25 bp, Homo sapien
gatttagaatcctacagcaactgca

SEQ ID NO: 2290986 - DNA, 25 bp, Homo sapien
ggatttagaatcctacagcaactgc

SEQ ID NO: 2290987 - DNA, 25 bp, Homo sapien
attgtaaagaccatcaaggctagga

SEQ ID NO: 2290988 - DNA, 25 bp, Homo sapien
tgaaggagaaacaaaatccttcaca

SEQ ID NO: 2290989 - DNA, 25 bp, Homo sapien
gacaagcaaatgctgattttgtcac

SEQ ID NO: 2290990 - DNA, 25 bp, Homo sapien
caccaggcctgccctaaaagagctc

SEQ ID NO: 2290991 - DNA, 25 bp, Homo sapien
tttgttgttgatgctcagtttgaaa

SEQ ID NO: 2290992 - DNA, 25 bp, Homo sapien
aaatatagatatcatacaaatgttt

SEQ ID NO: 2290993 - DNA, 25 bp, Homo sapien
ttgttgttgatgctcagtttgaaac

SEQ ID NO: 2290994 - DNA, 25 bp, Homo sapien
gattgaaatatagatatcatacaaa

SEQ ID NO: 2290995 - DNA, 25 bp, Homo sapien
tcttattctctgaaggttgtgcctc

SEQ ID NO: 2290996 - DNA, 25 bp, Homo sapien
tccattgcagtatcttgttttctta

SEQ ID NO: 2290997 - DNA, 25 bp, Homo sapien
ctctgaaggttgtgcctctgctgtt

SEQ ID NO: 2290998 - DNA, 25 bp, Homo sapien
cttcaatccattgcagtatcttgtt

SEQ ID NO: 2290999 - DNA, 25 bp, Homo sapien
cagtatttctgcagtactagttaac

SEQ ID NO: 2291000 - DNA, 25 bp, Homo sapien
cctcaaagcaatttcgcattcaggg

SEQ ID NO: 2291001 - DNA, 25 bp, Homo sapien
gcagtactagttaacaatctcctca

SEQ ID NO: 2291002 - DNA, 25 bp, Homo sapien
ccttctacaggtaatcccctcagta

SEQ ID NO: 2291003 - DNA, 25 bp, Homo sapien
cctagtgtcttagcaataaagctga

SEQ ID NO: 2291004 - DNA, 25 bp, Homo sapien
tcaaagcttccgtcaataaaaccaa

SEQ ID NO: 2291005 - DNA, 25 bp, Homo sapien
taataattgcacctagtgtcttagc

SEQ ID NO: 2291006 - DNA, 25 bp, Homo sapien
aatctccgttctatatgaatgatgg

SEQ ID NO: 2291007 - DNA, 25 bp, Homo sapien
ttaccccagttgataaccagtggtg

SEQ ID NO: 2291008 - DNA, 25 bp, Homo sapien
ggtctaacgtaggttgctctgaaaa

SEQ ID NO: 2291009 - DNA, 25 bp, Homo sapien
tgccaaattgcctgtgagagataaa

SEQ ID NO: 2291010 - DNA, 25 bp, Homo sapien
gaatcagggtttctgaacatcctca

SEQ ID NO: 2291011 - DNA, 25 bp, Homo sapien
tggtctatgtagtttggatccaaag

SEQ ID NO: 2291012 - DNA, 25 bp, Homo sapien
ttaactttggtctatgtagtttgga

SEQ ID NO: 2291013 - DNA, 25 bp, Homo sapien
ccgattccaattaactttggtctat

SEQ ID NO: 2291014 - DNA, 25 bp, Homo sapien
gattccaattaactttggtctatgt

SEQ ID NO: 2291015 - DNA, 25 bp, Homo sapien
tatcccatgaagaaatgtggcaaag

SEQ ID NO: 2291016 - DNA, 25 bp, Homo sapien
agaaatgtggcaaagcagtcaaaac

SEQ ID NO: 2291017 - DNA, 25 bp, Homo sapien
gaagaaatgtggcaaagcagtcaaa

SEQ ID NO: 2291018 - DNA, 25 bp, Homo sapien
aaatgtggcaaagcagtcaaaacac

SEQ ID NO: 2291019 - DNA, 25 bp, Homo sapien
tttcccactatctcaggtgatgctc

SEQ ID NO: 2291020 - DNA, 25 bp, Homo sapien
taattaaacaagtggataaggtcga

SEQ ID NO: 2291021 - DNA, 25 bp, Homo sapien
caggtgatgctctattgagtgataa

SEQ ID NO: 2291022 - DNA, 25 bp, Homo sapien
tctgatgaattgatattagtttctt

SEQ ID NO: 2291023 - DNA, 25 bp, Homo sapien
cacatatatccacatgtatgaccca

SEQ ID NO: 2291024 - DNA, 25 bp, Homo sapien
gggagtctcccctattccacgaagc

SEQ ID NO: 2291025 - DNA, 25 bp, Homo sapien
gagtctcccctattccacgaagcat

SEQ ID NO: 2291026 - DNA, 25 bp, Homo sapien
ctatgggagtctcccctattccacg

SEQ ID NO: 2291027 - DNA, 25 bp, Homo sapien
tggtactatgggagtctcccctatt

SEQ ID NO: 2291028 - DNA, 25 bp, Homo sapien
atccaatatccacgtacattttaga

SEQ ID NO: 2291029 - DNA, 25 bp, Homo sapien
caatatccacgtacattttagaaaa

SEQ ID NO: 2291030 - DNA, 25 bp, Homo sapien
gagatcccagggtaaagccaatgat

SEQ ID NO: 2291031 - DNA, 25 bp, Homo sapien
ggtaaagccaatgattggaccaatc

SEQ ID NO: 2291032 - DNA, 25 bp, Homo sapien
gctggcagataagctgttactcggg

SEQ ID NO: 2291033 - DNA, 25 bp, Homo sapien
tgagctacgattgcttctctgcgct

SEQ ID NO: 2291034 - DNA, 25 bp, Homo sapien
cagagtgaggtacagtctcaaatat

SEQ ID NO: 2291035 - DNA, 25 bp, Homo sapien
ccagtaaatggtgcttaagagtaat

SEQ ID NO: 2291036 - DNA, 25 bp, Homo sapien
tgttctgttgctaaaggtctggatg

SEQ ID NO: 2291037 - DNA, 25 bp, Homo sapien
tctttcagcttttggatcattctac

SEQ ID NO: 2291038 - DNA, 25 bp, Homo sapien
cagattccgaattgcctgtctgtca

SEQ ID NO: 2291039 - DNA, 25 bp, Homo sapien
caatgtggttaagaaccatcgctgg

SEQ ID NO: 2291040 - DNA, 25 bp, Homo sapien
caagctccaacccatcgagaatcag

SEQ ID NO: 2291041 - DNA, 25 bp, Homo sapien
ccaacccatcgagaatcagtaggag

SEQ ID NO: 2291042 - DNA, 25 bp, Homo sapien
cgagaatcagtaggagttatcctga

SEQ ID NO: 2291043 - DNA, 25 bp, Homo sapien
cccatcgagaatcagtaggagttat

SEQ ID NO: 2291044 - DNA, 25 bp, Homo sapien
aattagctgtttgatccttttcatc

SEQ ID NO: 2291045 - DNA, 25 bp, Homo sapien
ggtcaaattagctgtttgatccttt

SEQ ID NO: 2291046 - DNA, 25 bp, Homo sapien
attggtcaaattagctgtttgatcc

SEQ ID NO: 2291047 - DNA, 25 bp, Homo sapien
caaattagctgtttgatccttttca

SEQ ID NO: 2291048 - DNA, 25 bp, Homo sapien
gccttagatgaaggctgaccatact

SEQ ID NO: 2291049 - DNA, 25 bp, Homo sapien
ccaataagatgttagccttagatga

SEQ ID NO: 2291050 - DNA, 25 bp, Homo sapien
gttgctctacgtatttgaagacata

SEQ ID NO: 2291051 - DNA, 25 bp, Homo sapien
tgtaacaacgtcaaaagcacaaaca

SEQ ID NO: 2291052 - DNA, 25 bp, Homo sapien
gcaattccaacggtgttcagtttga

SEQ ID NO: 2291053 - DNA, 25 bp, Homo sapien
ttgcaaaaataggtatggttatgac

SEQ ID NO: 2291054 - DNA, 25 bp, Homo sapien
tggttagtccggcaactgatttgtt

SEQ ID NO: 2291055 - DNA, 25 bp, Homo sapien
gacatcacagcagtaaaacatgaga

SEQ ID NO: 2291056 - DNA, 25 bp, Homo sapien
caagttaaaaccaacacctcatggg

SEQ ID NO: 2291057 - DNA, 25 bp, Homo sapien
taggagataccaataacagttcaga

SEQ ID NO: 2291058 - DNA, 25 bp, Homo sapien
catgggatccagactttgaaagctc

SEQ ID NO: 2291059 - DNA, 25 bp, Homo sapien
tacaagggttggattgcatcatctc

SEQ ID NO: 2291060 - DNA, 25 bp, Homo sapien
cttatttattttacgctctccatct

SEQ ID NO: 2291061 - DNA, 25 bp, Homo sapien
ttatttattttacgctctccatctt

SEQ ID NO: 2291062 - DNA, 25 bp, Homo sapien
tctttgccaatacatgacttgtgac

SEQ ID NO: 2291063 - DNA, 25 bp, Homo sapien
gcttatttattttacgctctccatc

SEQ ID NO: 2291064 - DNA, 25 bp, Homo sapien
ttgcaataagaaagtggtacatctc

SEQ ID NO: 2291065 - DNA, 25 bp, Homo sapien
cagggtgagatgtaagttattccat

SEQ ID NO: 2291066 - DNA, 25 bp, Homo sapien
tttgcaacctgctagacagggtgag

SEQ ID NO: 2291067 - DNA, 25 bp, Homo sapien
tctctatgagatgtcactggattat

SEQ ID NO: 2291068 - DNA, 25 bp, Homo sapien
tggaaatcctagacagatcaatcag

SEQ ID NO: 2291069 - DNA, 25 bp, Homo sapien
gaagcattcttcttaagaacaggag

SEQ ID NO: 2291070 - DNA, 25 bp, Homo sapien
gaacaggagcaaagcatgaatgccc

SEQ ID NO: 2291071 - DNA, 25 bp, Homo sapien
ggatggtccagtatacacaatcaat

SEQ ID NO: 2291072 - DNA, 25 bp, Homo sapien
aatctctaagtttcagagacatgcc

SEQ ID NO: 2291073 - DNA, 25 bp, Homo sapien
gacaatctctaagtttcagagacat

SEQ ID NO: 2291074 - DNA, 25 bp, Homo sapien
caatctctaagtttcagagacatgc

SEQ ID NO: 2291075 - DNA, 25 bp, Homo sapien
ggacaatctctaagtttcagagaca

SEQ ID NO: 2291076 - DNA, 25 bp, Homo sapien
taaaatttccttgtacaagcatcat

SEQ ID NO: 2291077 - DNA, 25 bp, Homo sapien
tgtgaggtgcctccaagtgcagaga

SEQ ID NO: 2291078 - DNA, 25 bp, Homo sapien
caagacttgtattgcaacaaaaaag

SEQ ID NO: 2291079 - DNA, 25 bp, Homo sapien
gacatgtgaggtgcctccaagtgca

SEQ ID NO: 2291080 - DNA, 25 bp, Homo sapien
ctagtgctcgtataaccattgagtg

SEQ ID NO: 2291081 - DNA, 25 bp, Homo sapien
gagtggaaacccagtgcaagtgatt

SEQ ID NO: 2291082 - DNA, 25 bp, Homo sapien
gctcgtataaccattgagtggaaac

SEQ ID NO: 2291083 - DNA, 25 bp, Homo sapien
tgagtggaaacccagtgcaagtgat

SEQ ID NO: 2291084 - DNA, 25 bp, Homo sapien
gtgccacagttgttggtggaccact

SEQ ID NO: 2291085 - DNA, 25 bp, Homo sapien
tgtgccacagttgttggtggaccac

SEQ ID NO: 2291086 - DNA, 25 bp, Homo sapien
gccacagttgttggtggaccacttt

SEQ ID NO: 2291087 - DNA, 25 bp, Homo sapien
gtgtgccacagttgttggtggacca

SEQ ID NO: 2291088 - DNA, 25 bp, Homo sapien
gatgtggaattatatgtcctacatg

SEQ ID NO: 2291089 - DNA, 25 bp, Homo sapien
aatgatgtggaattatatgtcctac

SEQ ID NO: 2291090 - DNA, 25 bp, Homo sapien
atgatgtggaattatatgtcctaca

SEQ ID NO: 2291091 - DNA, 25 bp, Homo sapien
aaaatgatgtggaattatatgtcct

SEQ ID NO: 2291092 - DNA, 25 bp, Homo sapien
caatgtggtaagtcccaaagagggt

SEQ ID NO: 2291093 - DNA, 25 bp, Homo sapien
gataagggccatgagttagctacaa

SEQ ID NO: 2291094 - DNA, 25 bp, Homo sapien
catttcctggcagttagaagcctaa

SEQ ID NO: 2291095 - DNA, 25 bp, Homo sapien
gggacctccaggaaataagctgttc

SEQ ID NO: 2291096 - DNA, 25 bp, Homo sapien
aaatgaatccatatttaataacctt

SEQ ID NO: 2291097 - DNA, 25 bp, Homo sapien
gaaagcatcaaactaaactgaaaag

SEQ ID NO: 2291098 - DNA, 25 bp, Homo sapien
gaatccatatttaataaccttctaa

SEQ ID NO: 2291099 - DNA, 25 bp, Homo sapien
cagaaagcatcaaactaaactgaaa

SEQ ID NO: 2291100 - DNA, 25 bp, Homo sapien
acccagaaacgtggtatgctggcaa

SEQ ID NO: 2291101 - DNA, 25 bp, Homo sapien
tggcttggcccccaaagctatggtg

SEQ ID NO: 2291102 - DNA, 25 bp, Homo sapien
tatggtgcaatgagcagggtcatca

SEQ ID NO: 2291103 - DNA, 25 bp, Homo sapien
gaatttgttaccagccaagcttctg

SEQ ID NO: 2291104 - DNA, 25 bp, Homo sapien
agtgatgagactcttaacattgaag

SEQ ID NO: 2291105 - DNA, 25 bp, Homo sapien
cttaacattgaagacaagcccaagt

SEQ ID NO: 2291106 - DNA, 25 bp, Homo sapien
tgagactcttaacattgaagacaag

SEQ ID NO: 2291107 - DNA, 25 bp, Homo sapien
gactcttaacattgaagacaagccc

SEQ ID NO: 2291108 - DNA, 25 bp, Homo sapien
tgtgtttcactatctgccccagcag

SEQ ID NO: 2291109 - DNA, 25 bp, Homo sapien
caggccttagtattatagttcaaac

SEQ ID NO: 2291110 - DNA, 25 bp, Homo sapien
tcttagtgaaaggaccaggaactcc

SEQ ID NO: 2291111 - DNA, 25 bp, Homo sapien
gcatatatccaagctagacttcagg

SEQ ID NO: 2291112 - DNA, 25 bp, Homo sapien
taaaatagacactaggcatttctct

SEQ ID NO: 2291113 - DNA, 25 bp, Homo sapien
gaaacagacttatggctaacatgga

SEQ ID NO: 2291114 - DNA, 25 bp, Homo sapien
gactaagagacgtgggaaagctgca

SEQ ID NO: 2291115 - DNA, 25 bp, Homo sapien
taacatggagaaaacttcagtagcc

SEQ ID NO: 2291116 - DNA, 25 bp, Homo sapien
tagagcaaggacataactctctgtc

SEQ ID NO: 2291117 - DNA, 25 bp, Homo sapien
ctctgtggcatccagaactatgact

SEQ ID NO: 2291118 - DNA, 25 bp, Homo sapien
ctacattgggttacacctgaagcca

SEQ ID NO: 2291119 - DNA, 25 bp, Homo sapien
gtaattactccctgactactgccaa

SEQ ID NO: 2291120 - DNA, 25 bp, Homo sapien
tgcccaaggtctgctgtaattactc

SEQ ID NO: 2291121 - DNA, 25 bp, Homo sapien
tacttaacaataacaggcaccagtg

SEQ ID NO: 2291122 - DNA, 25 bp, Homo sapien
tcaaaggttgccaggatcagtcctc

SEQ ID NO: 2291123 - DNA, 25 bp, Homo sapien
aaaatccccagttctagagtctgag

SEQ ID NO: 2291124 - DNA, 25 bp, Homo sapien
ctttgccaagcgaaacacgattcct

SEQ ID NO: 2291125 - DNA, 25 bp, Homo sapien
tatcctcaaacctggaatccatctc

SEQ ID NO: 2291126 - DNA, 25 bp, Homo sapien
aaataaggccttgcactgaaatagg

SEQ ID NO: 2291127 - DNA, 25 bp, Homo sapien
gcatccagctgcaatctatcctcaa

SEQ ID NO: 2291128 - DNA, 25 bp, Homo sapien
tctcccagagtctcatggaaataag

SEQ ID NO: 2291129 - DNA, 25 bp, Homo sapien
gcattcctgcacctatatattttgg

SEQ ID NO: 2291130 - DNA, 25 bp, Homo sapien
ccctgtcaattgtagctggcattcc

SEQ ID NO: 2291131 - DNA, 25 bp, Homo sapien
gatatatgattccaccaccttcagg

SEQ ID NO: 2291132 - DNA, 25 bp, Homo sapien
taagcatagactgtgcataacgcag

SEQ ID NO: 2291133 - DNA, 25 bp, Homo sapien
tttttgaacatgtaatatcctgtca

SEQ ID NO: 2291134 - DNA, 25 bp, Homo sapien
ggtgatgtgccattagattgcttct

SEQ ID NO: 2291135 - DNA, 25 bp, Homo sapien
atacagccacacagatacatacaca

SEQ ID NO: 2291136 - DNA, 25 bp, Homo sapien
cttggagaaaatctgacatcaaata

SEQ ID NO: 2291137 - DNA, 25 bp, Homo sapien
gaacatttactagaagcaggccaca

SEQ ID NO: 2291138 - DNA, 25 bp, Homo sapien
tccaggtagatcttgctgagaacca

SEQ ID NO: 2291139 - DNA, 25 bp, Homo sapien
tcaagacagagaacatgtggacagg

SEQ ID NO: 2291140 - DNA, 25 bp, Homo sapien
gagcctgaatggtagcagtgtgacc

SEQ ID NO: 2291141 - DNA, 25 bp, Homo sapien
aaagttgaagaagctcgtgtctgga

SEQ ID NO: 2291142 - DNA, 25 bp, Homo sapien
tagacaagtgatgagacagctgatg

SEQ ID NO: 2291143 - DNA, 25 bp, Homo sapien
cagagatcagggagggttcagcata

SEQ ID NO: 2291144 - DNA, 25 bp, Homo sapien
tgaacgcgcacaagagagggagtat

SEQ ID NO: 2291145 - DNA, 25 bp, Homo sapien
tggaggtgaccctttcatctgcttg

SEQ ID NO: 2291146 - DNA, 25 bp, Homo sapien
tcattaatgtgggtgtacgtcctag

SEQ ID NO: 2291147 - DNA, 25 bp, Homo sapien
gaatgggtgaaactcccatcctgcc

SEQ ID NO: 2291148 - DNA, 25 bp, Homo sapien
aataccacaagtctagtgcccctgg

SEQ ID NO: 2291149 - DNA, 25 bp, Homo sapien
tctagagaagccatcaaatgacttg

SEQ ID NO: 2291150 - DNA, 25 bp, Homo sapien
ttccaaattatgagcagccagacct

SEQ ID NO: 2291151 - DNA, 25 bp, Homo sapien
gggcagattcttcttaaggtctaaa

SEQ ID NO: 2291152 - DNA, 25 bp, Homo sapien
tttgaccaactgtacccaacttggc

SEQ ID NO: 2291153 - DNA, 25 bp, Homo sapien
tacttagtgtcacaattcatggagg

SEQ ID NO: 2291154 - DNA, 25 bp, Homo sapien
catcatataagttggaaaactaggg

SEQ ID NO: 2291155 - DNA, 25 bp, Homo sapien
cctgctctagatggttacttagtgt

SEQ ID NO: 2291156 - DNA, 25 bp, Homo sapien
catggagggaactatatagaattcc

SEQ ID NO: 2291157 - DNA, 25 bp, Homo sapien
gataccacccaagaggctgttcttg

SEQ ID NO: 2291158 - DNA, 25 bp, Homo sapien
aattcattggcacatacttgcttgg

SEQ ID NO: 2291159 - DNA, 25 bp, Homo sapien
cttgcttggattagtattggttgaa

SEQ ID NO: 2291160 - DNA, 25 bp, Homo sapien
ggttgaaattgtttcagctggatac

SEQ ID NO: 2291161 - DNA, 25 bp, Homo sapien
tctgttccagtcactgaatgttggg

SEQ ID NO: 2291162 - DNA, 25 bp, Homo sapien
gaattgaagttagccaaggtgggaa

SEQ ID NO: 2291163 - DNA, 25 bp, Homo sapien
caggttcagggtgttagattaagcc

SEQ ID NO: 2291164 - DNA, 25 bp, Homo sapien
tgagcaaggcagatcaagtttctac

SEQ ID NO: 2291165 - DNA, 25 bp, Homo sapien
tagatgtagatattaggataggtct

SEQ ID NO: 2291166 - DNA, 25 bp, Homo sapien
aatgtagatgtagatattaggatag

SEQ ID NO: 2291167 - DNA, 25 bp, Homo sapien
ctggaaatgtagatgtagatattag

SEQ ID NO: 2291168 - DNA, 25 bp, Homo sapien
tgtagatgtagatattaggataggt

SEQ ID NO: 2291169 - DNA, 25 bp, Homo sapien
ggcaatgaccagatgacccaaaaat

SEQ ID NO: 2291170 - DNA, 25 bp, Homo sapien
tataacaacacccaggagttactgc

SEQ ID NO: 2291171 - DNA, 25 bp, Homo sapien
taaaacagggccaatggaaagcagc

SEQ ID NO: 2291172 - DNA, 25 bp, Homo sapien
tgaaatttccgcataaaccatccct

SEQ ID NO: 2291173 - DNA, 25 bp, Homo sapien
aatagaacaacttagtgtcatgtaa

SEQ ID NO: 2291174 - DNA, 25 bp, Homo sapien
atttcaattgtcagtgaaaatgtgc

SEQ ID NO: 2291175 - DNA, 25 bp, Homo sapien
tgtgcatgcctgtgtaatcttaaaa

SEQ ID NO: 2291176 - DNA, 25 bp, Homo sapien
aacaacttagtgtcatgtaaagcaa

SEQ ID NO: 2291177 - DNA, 25 bp, Homo sapien
caagaaaagagtccaagcttgtatc

SEQ ID NO: 2291178 - DNA, 25 bp, Homo sapien
ttgtatccactggaatatttacccc

SEQ ID NO: 2291179 - DNA, 25 bp, Homo sapien
tgtcagcaatatcagcaaatgcttc

SEQ ID NO: 2291180 - DNA, 25 bp, Homo sapien
tgcttctgatagaaagaaagcttca

SEQ ID NO: 2291181 - DNA, 25 bp, Homo sapien
gagaaatacttgcagcttcaggatg

SEQ ID NO: 2291182 - DNA, 25 bp, Homo sapien
tcagatggttcaatgcaacagagag

SEQ ID NO: 2291183 - DNA, 25 bp, Homo sapien
gaaatacttgcagcttcaggatgcc

SEQ ID NO: 2291184 - DNA, 25 bp, Homo sapien
acaatgagaaatacttgcagcttca

SEQ ID NO: 2291185 - DNA, 25 bp, Homo sapien
cgcttcatgttctggctttgcccct

SEQ ID NO: 2291186 - DNA, 25 bp, Homo sapien
caaaactggaattatccattcctgt

SEQ ID NO: 2291187 - DNA, 25 bp, Homo sapien
gcccctctaagttccaagagtatat

SEQ ID NO: 2291188 - DNA, 25 bp, Homo sapien
gagtatatttcttgacaaaactgga

SEQ ID NO: 2291189 - DNA, 25 bp, Homo sapien
cgttggtagatgagagaatggcacc

SEQ ID NO: 2291190 - DNA, 25 bp, Homo sapien
caggcgctgcgttgcacatgtggca

SEQ ID NO: 2291191 - DNA, 25 bp, Homo sapien
cctcttgccatatgtattggatccc

SEQ ID NO: 2291192 - DNA, 25 bp, Homo sapien
gcagtgttgcatttccgcttttcca

SEQ ID NO: 2291193 - DNA, 25 bp, Homo sapien
cacaagttgtttcgcaataccctgc

SEQ ID NO: 2291194 - DNA, 25 bp, Homo sapien
tgtgccactgagatataggtcccaa

SEQ ID NO: 2291195 - DNA, 25 bp, Homo sapien
tattttgaccgagtcaggagcagga

SEQ ID NO: 2291196 - DNA, 25 bp, Homo sapien
taaatagcctcttagtaccagcaag

SEQ ID NO: 2291197 - DNA, 25 bp, Homo sapien
caacgaaagcctctacaatttggta

SEQ ID NO: 2291198 - DNA, 25 bp, Homo sapien
tcttctgtccaacattgcagctgct

SEQ ID NO: 2291199 - DNA, 25 bp, Homo sapien
tggcataacgcagcatgatggcagt

SEQ ID NO: 2291200 - DNA, 25 bp, Homo sapien
cctaaggcacacttcataaagggaa

SEQ ID NO: 2291201 - DNA, 25 bp, Homo sapien
caagaagctgcagcttacacgtttg

SEQ ID NO: 2291202 - DNA, 25 bp, Homo sapien
gctgcagcttacacgtttgaggtgc

SEQ ID NO: 2291203 - DNA, 25 bp, Homo sapien
tacacgtttgaggtgccttattcat

SEQ ID NO: 2291204 - DNA, 25 bp, Homo sapien
cagcttacacgtttgaggtgcctta

SEQ ID NO: 2291205 - DNA, 25 bp, Homo sapien
gaggagtatgagcacaggtctttaa

SEQ ID NO: 2291206 - DNA, 25 bp, Homo sapien
gagcacaggtctttaagtacaacat

SEQ ID NO: 2291207 - DNA, 25 bp, Homo sapien
ttgaagaggagtatgagcacaggtc

SEQ ID NO: 2291208 - DNA, 25 bp, Homo sapien
tggcaaattgaagaggagtatgagc

SEQ ID NO: 2291209 - DNA, 25 bp, Homo sapien
aggactagtatcttcaacatgatac

SEQ ID NO: 2291210 - DNA, 25 bp, Homo sapien
gcagttgcggatttctggtagactc

SEQ ID NO: 2291211 - DNA, 25 bp, Homo sapien
gactgggacacttttcgttgggcag

SEQ ID NO: 2291212 - DNA, 25 bp, Homo sapien
tgatactgagtttcatcaacagaga

SEQ ID NO: 2291213 - DNA, 25 bp, Homo sapien
cggacactatgcttttctgtattta

SEQ ID NO: 2291214 - DNA, 25 bp, Homo sapien
tcaggaacggacactatgcttttct

SEQ ID NO: 2291215 - DNA, 25 bp, Homo sapien
ggaacggacactatgcttttctgta

SEQ ID NO: 2291216 - DNA, 25 bp, Homo sapien
gaacggacactatgcttttctgtat

SEQ ID NO: 2291217 - DNA, 25 bp, Homo sapien
agaataggagtattgaggttaattt

SEQ ID NO: 2291218 - DNA, 25 bp, Homo sapien
ataggagtattgaggttaattttca

SEQ ID NO: 2291219 - DNA, 25 bp, Homo sapien
ctagaataggagtattgaggttaat

SEQ ID NO: 2291220 - DNA, 25 bp, Homo sapien
taggagtattgaggttaattttcaa

SEQ ID NO: 2291221 - DNA, 25 bp, Homo sapien
catacccacctaatctcttgaaggc

SEQ ID NO: 2291222 - DNA, 25 bp, Homo sapien
tgttacatctgattcccatacccac

SEQ ID NO: 2291223 - DNA, 25 bp, Homo sapien
tcttgaaggccatccccaactttca

SEQ ID NO: 2291224 - DNA, 25 bp, Homo sapien
ctccataatgttgttacatctgatt

SEQ ID NO: 2291225 - DNA, 25 bp, Homo sapien
ctctttatggaagtcggaaggaaga

SEQ ID NO: 2291226 - DNA, 25 bp, Homo sapien
ccaggggaaacggaaggagatcatc

SEQ ID NO: 2291227 - DNA, 25 bp, Homo sapien
tggagtggaatttaagctcccaggg

SEQ ID NO: 2291228 - DNA, 25 bp, Homo sapien
caggatcctcttgtatattgtgaca

SEQ ID NO: 2291229 - DNA, 25 bp, Homo sapien
gctgccggactcccagtggtttact

SEQ ID NO: 2291230 - DNA, 25 bp, Homo sapien
gccggactcccagtggtttactgaa

SEQ ID NO: 2291231 - DNA, 25 bp, Homo sapien
ctgccggactcccagtggtttactg

SEQ ID NO: 2291232 - DNA, 25 bp, Homo sapien
tgccggactcccagtggtttactga

SEQ ID NO: 2291233 - DNA, 25 bp, Homo sapien
gctccgcacaagtgacgcccgcgat

SEQ ID NO: 2291234 - DNA, 25 bp, Homo sapien
ccgcacaagtgacgcccgcgatgcc

SEQ ID NO: 2291235 - DNA, 25 bp, Homo sapien
ctccgcacaagtgacgcccgcgatg

SEQ ID NO: 2291236 - DNA, 25 bp, Homo sapien
ctgctccgcacaagtgacgcccgcg

SEQ ID NO: 2291237 - DNA, 25 bp, Homo sapien
tacaggctgacgcaacagaagaatc

SEQ ID NO: 2291238 - DNA, 25 bp, Homo sapien
gacattacaaggatctgagcacgga

SEQ ID NO: 2291239 - DNA, 25 bp, Homo sapien
tcctccctgcgcctaagagaaagct

SEQ ID NO: 2291240 - DNA, 25 bp, Homo sapien
tcatctgaggaccaccaagcagttt

SEQ ID NO: 2291241 - DNA, 25 bp, Homo sapien
gctgttaccaagagaatatcttccg

SEQ ID NO: 2291242 - DNA, 25 bp, Homo sapien
tttaataacaggagaagctgttacc

SEQ ID NO: 2291243 - DNA, 25 bp, Homo sapien
cttccgatggaaagtgagtagccaa

SEQ ID NO: 2291244 - DNA, 25 bp, Homo sapien
caagagaatatcttccgatggaaag

SEQ ID NO: 2291245 - DNA, 25 bp, Homo sapien
caacatcgaattcttccaatatttt

SEQ ID NO: 2291246 - DNA, 25 bp, Homo sapien
tgattgttcttcaacatcgaattct

SEQ ID NO: 2291247 - DNA, 25 bp, Homo sapien
tacttgattgttcttcaacatcgaa

SEQ ID NO: 2291248 - DNA, 25 bp, Homo sapien
ggtacttgattgttcttcaacatcg

SEQ ID NO: 2291249 - DNA, 25 bp, Homo sapien
cttcagttgctttacgccagattct

SEQ ID NO: 2291250 - DNA, 25 bp, Homo sapien
tcttcagttgctttacgccagattc

SEQ ID NO: 2291251 - DNA, 25 bp, Homo sapien
ctcttcagttgctttacgccagatt

SEQ ID NO: 2291252 - DNA, 25 bp, Homo sapien
ctgtatcacggattcctaatacata

SEQ ID NO: 2291253 - DNA, 25 bp, Homo sapien
ctgagcactgtctgtatcacggatt

SEQ ID NO: 2291254 - DNA, 25 bp, Homo sapien
agcactgtctgtatcacggattcct

SEQ ID NO: 2291255 - DNA, 25 bp, Homo sapien
gtctgtatcacggattcctaataca

SEQ ID NO: 2291256 - DNA, 25 bp, Homo sapien
actaactcaagtgcaataccaccgt

SEQ ID NO: 2291257 - DNA, 25 bp, Homo sapien
gctttagtaagctgtttctgaaatt

SEQ ID NO: 2291258 - DNA, 25 bp, Homo sapien
caataccaccgttccctatgatcat

SEQ ID NO: 2291259 - DNA, 25 bp, Homo sapien
tcaagtgcaataccaccgttcccta

SEQ ID NO: 2291260 - DNA, 25 bp, Homo sapien
tcctgcatcgaagaaagtattccct

SEQ ID NO: 2291261 - DNA, 25 bp, Homo sapien
gaaagtattccctatagctttatct

SEQ ID NO: 2291262 - DNA, 25 bp, Homo sapien
cttcagttgtatatctggttctttt

SEQ ID NO: 2291263 - DNA, 25 bp, Homo sapien
agctgctcctgcatcgaagaaagta

SEQ ID NO: 2291264 - DNA, 25 bp, Homo sapien
acaaaacttcttcaggtattgccaa

SEQ ID NO: 2291265 - DNA, 25 bp, Homo sapien
aacttcttcaggtattgccaaaatg

SEQ ID NO: 2291266 - DNA, 25 bp, Homo sapien
ttcaggtattgccaaaatgtagtat

SEQ ID NO: 2291267 - DNA, 25 bp, Homo sapien
ttcttcaggtattgccaaaatgtag

SEQ ID NO: 2291268 - DNA, 25 bp, Homo sapien
caatgcacttcctacattatctgct

SEQ ID NO: 2291269 - DNA, 25 bp, Homo sapien
ccaatgcacttcctacattatctgc

SEQ ID NO: 2291270 - DNA, 25 bp, Homo sapien
cctgaagatgagactacattgctgc

SEQ ID NO: 2291271 - DNA, 25 bp, Homo sapien
gatgagactacattgctgcaatctc

SEQ ID NO: 2291272 - DNA, 25 bp, Homo sapien
tgagcaaagaacgtagttatctgag

SEQ ID NO: 2291273 - DNA, 25 bp, Homo sapien
gatggagtttacttctggtgaggat

SEQ ID NO: 2291274 - DNA, 25 bp, Homo sapien
cagagtaagcccctaactgttttca

SEQ ID NO: 2291275 - DNA, 25 bp, Homo sapien
tattagggttattgaggaaggcaca

SEQ ID NO: 2291276 - DNA, 25 bp, Homo sapien
gaaaccagggcaatcagttactctg

SEQ ID NO: 2291277 - DNA, 25 bp, Homo sapien
tgagaaagcgaaacagtcttcttgc

SEQ ID NO: 2291278 - DNA, 25 bp, Homo sapien
tatcaaggatgtcacgaagaaacag

SEQ ID NO: 2291279 - DNA, 25 bp, Homo sapien
tgaagcttctatgccctctccagat

SEQ ID NO: 2291280 - DNA, 25 bp, Homo sapien
agatagaccaccctctagcaacttc

SEQ ID NO: 2291281 - DNA, 25 bp, Homo sapien
gactgattaaattactggctgctag

SEQ ID NO: 2291282 - DNA, 25 bp, Homo sapien
ttcttcaaaattctaaactcatcct

SEQ ID NO: 2291283 - DNA, 25 bp, Homo sapien
tttcttcaaaattctaaactcatcc

SEQ ID NO: 2291284 - DNA, 25 bp, Homo sapien
tatggtctcttggaaaagtgaagga

SEQ ID NO: 2291285 - DNA, 25 bp, Homo sapien
tggtctcttggaaaagtgaaggact

SEQ ID NO: 2291286 - DNA, 25 bp, Homo sapien
tatttttaatagaacacagcaggat

SEQ ID NO: 2291287 - DNA, 25 bp, Homo sapien
ttatttttaatagaacacagcagga

SEQ ID NO: 2291288 - DNA, 25 bp, Homo sapien
gagagctgcatcttagtcccaaaaa

SEQ ID NO: 2291289 - DNA, 25 bp, Homo sapien
caaatcatggcaattctcagaggag

SEQ ID NO: 2291290 - DNA, 25 bp, Homo sapien
gaatatttcatatgctagttaactg

SEQ ID NO: 2291291 - DNA, 25 bp, Homo sapien
cacctttaagagctctaggtttttg

SEQ ID NO: 2291292 - DNA, 25 bp, Homo sapien
ttttaatgcaattagcatcatctcg

SEQ ID NO: 2291293 - DNA, 25 bp, Homo sapien
ccacagcagtgtatgtgactacaat

SEQ ID NO: 2291294 - DNA, 25 bp, Homo sapien
tagcatcatctcgtttgggtataat

SEQ ID NO: 2291295 - DNA, 25 bp, Homo sapien
acactccttagcaattattatgagg

SEQ ID NO: 2291296 - DNA, 25 bp, Homo sapien
tcgcagccatatatcttttcattgg

SEQ ID NO: 2291297 - DNA, 25 bp, Homo sapien
gcactgacaatgaaatcgcagccat

SEQ ID NO: 2291298 - DNA, 25 bp, Homo sapien
aattccacatagacaggccacatct

SEQ ID NO: 2291299 - DNA, 25 bp, Homo sapien
ttttcattggtcaattccacataga

SEQ ID NO: 2291300 - DNA, 25 bp, Homo sapien
gcaaagtttagacacctgagctgaa

SEQ ID NO: 2291301 - DNA, 25 bp, Homo sapien
caacattcctcataagcgttaagtg

SEQ ID NO: 2291302 - DNA, 25 bp, Homo sapien
gaagtcacgggaggtgtcagtctct

SEQ ID NO: 2291303 - DNA, 25 bp, Homo sapien
cattactgatgacgcttatgcaagg

SEQ ID NO: 2291304 - DNA, 25 bp, Homo sapien
gtgcatatgatcatccactttcagg

SEQ ID NO: 2291305 - DNA, 25 bp, Homo sapien
aggatgtagtacagatgtcaccggc

SEQ ID NO: 2291306 - DNA, 25 bp, Homo sapien
gaagggatgtgtgcatatgatcatc

SEQ ID NO: 2291307 - DNA, 25 bp, Homo sapien
ccggcagcatagatatcaggaaggg

SEQ ID NO: 2291308 - DNA, 25 bp, Homo sapien
caccaatggataactaatcagactg

SEQ ID NO: 2291309 - DNA, 25 bp, Homo sapien
tgaaaaaatgttacacaatgtcatt

SEQ ID NO: 2291310 - DNA, 25 bp, Homo sapien
tttgccacagaagcagtcaccaatg

SEQ ID NO: 2291311 - DNA, 25 bp, Homo sapien
taaaggagttcaatgtttgacagtc

SEQ ID NO: 2291312 - DNA, 25 bp, Homo sapien
gagtctcctgaactcgctgcagcca

SEQ ID NO: 2291313 - DNA, 25 bp, Homo sapien
tttgtcacatgagcaaacagttcaa

SEQ ID NO: 2291314 - DNA, 25 bp, Homo sapien
cccatctgtctagcctgggtccaca

SEQ ID NO: 2291315 - DNA, 25 bp, Homo sapien
tgcactttgctgcataccatcccat

SEQ ID NO: 2291316 - DNA, 25 bp, Homo sapien
ctcccatcattcgtccattttgcat

SEQ ID NO: 2291317 - DNA, 25 bp, Homo sapien
atctcagcattaattcatgatctga

SEQ ID NO: 2291318 - DNA, 25 bp, Homo sapien
taattcatgatctgaacctaagccc

SEQ ID NO: 2291319 - DNA, 25 bp, Homo sapien
tttgcatgacgactttgatgtattc

SEQ ID NO: 2291320 - DNA, 25 bp, Homo sapien
ggacaagcttgtagatgatttcagg

SEQ ID NO: 2291321 - DNA, 25 bp, Homo sapien
tagacccgtgggctagagttggaca

SEQ ID NO: 2291322 - DNA, 25 bp, Homo sapien
tgttctgggctgcattagacccgtg

SEQ ID NO: 2291323 - DNA, 25 bp, Homo sapien
tctagtctactagagtacatttggc

SEQ ID NO: 2291324 - DNA, 25 bp, Homo sapien
tgtatggatctatattttcagagct

SEQ ID NO: 2291325 - DNA, 25 bp, Homo sapien
ctctgaagatctaaacttttgagaa

SEQ ID NO: 2291326 - DNA, 25 bp, Homo sapien
agcaatattatactgacagaggctc

SEQ ID NO: 2291327 - DNA, 25 bp, Homo sapien
gaataagttcatacaatcgtcttaa

SEQ ID NO: 2291328 - DNA, 25 bp, Homo sapien
tcaagtgccattgtgtctaaggaca

SEQ ID NO: 2291329 - DNA, 25 bp, Homo sapien
taggctgaatcgtctcaaacttgtc

SEQ ID NO: 2291330 - DNA, 25 bp, Homo sapien
tagaacttctctcacaacgtagccc

SEQ ID NO: 2291331 - DNA, 25 bp, Homo sapien
tatgcaagtgacaaagtccacgcag

SEQ ID NO: 2291332 - DNA, 25 bp, Homo sapien
gcaacagaataaacggttttgcagt

SEQ ID NO: 2291333 - DNA, 25 bp, Homo sapien
aacggttttgcagttattttgtgtg

SEQ ID NO: 2291334 - DNA, 25 bp, Homo sapien
cagaataaacggttttgcagttatt

SEQ ID NO: 2291335 - DNA, 25 bp, Homo sapien
aattgcaacagaataaacggttttg

SEQ ID NO: 2291336 - DNA, 25 bp, Homo sapien
gaaatctagagagttagtcgttctg

SEQ ID NO: 2291337 - DNA, 25 bp, Homo sapien
tataagattgccatcctcccagttt

SEQ ID NO: 2291338 - DNA, 25 bp, Homo sapien
tcacatagcaattggtgctagacct

SEQ ID NO: 2291339 - DNA, 25 bp, Homo sapien
ccgtgcttaggaatgacagattact

SEQ ID NO: 2291340 - DNA, 25 bp, Homo sapien
ggacagcggcgacagcacctcggaa

SEQ ID NO: 2291341 - DNA, 25 bp, Homo sapien
acagcacctcggaaagcccagggtg

SEQ ID NO: 2291342 - DNA, 25 bp, Homo sapien
tcgggagaaatgaagccgggaaaca

SEQ ID NO: 2291343 - DNA, 25 bp, Homo sapien
acgtcttccggaaacacgcagccac

SEQ ID NO: 2291344 - DNA, 25 bp, Homo sapien
tctgcgtgtccgttaaggagatcat

SEQ ID NO: 2291345 - DNA, 25 bp, Homo sapien
tttcctgataactagtgtcttccat

SEQ ID NO: 2291346 - DNA, 25 bp, Homo sapien
aatttcctgataactagtgtcttcc

SEQ ID NO: 2291347 - DNA, 25 bp, Homo sapien
tcaatttcctgataactagtgtctt

SEQ ID NO: 2291348 - DNA, 25 bp, Homo sapien
caatttcctgataactagtgtcttc

SEQ ID NO: 2291349 - DNA, 25 bp, Homo sapien
ccaatagccagtagtgctttgtcaa

SEQ ID NO: 2291350 - DNA, 25 bp, Homo sapien
ttccaatagccagtagtgctttgtc

SEQ ID NO: 2291351 - DNA, 25 bp, Homo sapien
aatagccagtagtgctttgtcaaaa

SEQ ID NO: 2291352 - DNA, 25 bp, Homo sapien
caatagccagtagtgctttgtcaaa

SEQ ID NO: 2291353 - DNA, 25 bp, Homo sapien
aacagaaagctgacaggtttcattc

SEQ ID NO: 2291354 - DNA, 25 bp, Homo sapien
ttatttaaacagaaagctgacaggt

SEQ ID NO: 2291355 - DNA, 25 bp, Homo sapien
tttaaacagaaagctgacaggtttc

SEQ ID NO: 2291356 - DNA, 25 bp, Homo sapien
taaacagaaagctgacaggtttcat

SEQ ID NO: 2291357 - DNA, 25 bp, Homo sapien
tggaattagaaaacctcattaagtg

SEQ ID NO: 2291358 - DNA, 25 bp, Homo sapien
tatggaattagaaaacctcattaag

SEQ ID NO: 2291359 - DNA, 25 bp, Homo sapien
atggaattagaaaacctcattaagt

SEQ ID NO: 2291360 - DNA, 25 bp, Homo sapien
tattgacatggctaagttgatagca

SEQ ID NO: 2291361 - DNA, 25 bp, Homo sapien
tctagaatatctggtggcagcagaa

SEQ ID NO: 2291362 - DNA, 25 bp, Homo sapien
ggtgatggattaagagcttgctttc

SEQ ID NO: 2291363 - DNA, 25 bp, Homo sapien
acaacgtgaagccaagaagattcta

SEQ ID NO: 2291364 - DNA, 25 bp, Homo sapien
tgcccataaatatgtcacccaaggg

SEQ ID NO: 2291365 - DNA, 25 bp, Homo sapien
caagggtattcctcttggttctgaa

SEQ ID NO: 2291366 - DNA, 25 bp, Homo sapien
gttggcaaggcataaagaggaaagc

SEQ ID NO: 2291367 - DNA, 25 bp, Homo sapien
gcttagtcaagcagatgagttggca

SEQ ID NO: 2291368 - DNA, 25 bp, Homo sapien
tcttctatcttgattaaatggagaa

SEQ ID NO: 2291369 - DNA, 25 bp, Homo sapien
agagaaacaaagaaagattagacgt

SEQ ID NO: 2291370 - DNA, 25 bp, Homo sapien
tatcaaaggccaaccaataaggact

SEQ ID NO: 2291371 - DNA, 25 bp, Homo sapien
gactacaaatacaccacccagaaaa

SEQ ID NO: 2291372 - DNA, 25 bp, Homo sapien
caaaagccaagccggctacaaataa

SEQ ID NO: 2291373 - DNA, 25 bp, Homo sapien
ttcgaagatcatgcctatcaaaggc

SEQ ID NO: 2291374 - DNA, 25 bp, Homo sapien
tttccatcaagtagcagtagctatg

SEQ ID NO: 2291375 - DNA, 25 bp, Homo sapien
tactattgtttatctgctaactggc

SEQ ID NO: 2291376 - DNA, 25 bp, Homo sapien
caaaatctcccatagtagtgtattt

SEQ ID NO: 2291377 - DNA, 25 bp, Homo sapien
tcttctaatacgtatatgtgctaaa

SEQ ID NO: 2291378 - DNA, 25 bp, Homo sapien
cacatgctcctgttctataagagta

SEQ ID NO: 2291379 - DNA, 25 bp, Homo sapien
ctgttaactgtcgttccctttctcg

SEQ ID NO: 2291380 - DNA, 25 bp, Homo sapien
tcaaagcccagtttatcagttaaca

SEQ ID NO: 2291381 - DNA, 25 bp, Homo sapien
gtgtgtttttatggccctgtctgtt

SEQ ID NO: 2291382 - DNA, 25 bp, Homo sapien
cagtgttcagggagcttccggatag

SEQ ID NO: 2291383 - DNA, 25 bp, Homo sapien
gctggtcactcatggccaataattt

SEQ ID NO: 2291384 - DNA, 25 bp, Homo sapien
caaggcaagattagagggctggaaa

SEQ ID NO: 2291385 - DNA, 25 bp, Homo sapien
gttatcatcaatggttggcagcccc

SEQ ID NO: 2291386 - DNA, 25 bp, Homo sapien
caggtaaatttaggagggatccaag

SEQ ID NO: 2291387 - DNA, 25 bp, Homo sapien
tgatctaattccaggtaaatttagg

SEQ ID NO: 2291388 - DNA, 25 bp, Homo sapien
taataaagccaacaacgacaggaaa

SEQ ID NO: 2291389 - DNA, 25 bp, Homo sapien
taaagccaacaacgacaggaaagaa

SEQ ID NO: 2291390 - DNA, 25 bp, Homo sapien
taattgtctgaatctagtctattgg

SEQ ID NO: 2291391 - DNA, 25 bp, Homo sapien
tgaatctagtctattggtgatacag

SEQ ID NO: 2291392 - DNA, 25 bp, Homo sapien
ccggccttatttaattgtctgaatc

SEQ ID NO: 2291393 - DNA, 25 bp, Homo sapien
gccttatttaattgtctgaatctag

SEQ ID NO: 2291394 - DNA, 25 bp, Homo sapien
gctatgatagagttgtgcacaggaa

SEQ ID NO: 2291395 - DNA, 25 bp, Homo sapien
caggctatagtgtggcggtgtgagc

SEQ ID NO: 2291396 - DNA, 25 bp, Homo sapien
gcggtgtgagcatcgcttaacacag

SEQ ID NO: 2291397 - DNA, 25 bp, Homo sapien
tgttatagaagcacaccccgagtca

SEQ ID NO: 2291398 - DNA, 25 bp, Homo sapien
tcttggctgtaaggttctgacccta

SEQ ID NO: 2291399 - DNA, 25 bp, Homo sapien
aggtggctggccactgaaactaaaa

SEQ ID NO: 2291400 - DNA, 25 bp, Homo sapien
ccataggtaagccattctttagctc

SEQ ID NO: 2291401 - DNA, 25 bp, Homo sapien
tgcaaatgaaatcagagtatacccc

SEQ ID NO: 2291402 - DNA, 25 bp, Homo sapien
tactgtggatctcttctgggcctat

SEQ ID NO: 2291403 - DNA, 25 bp, Homo sapien
cattactgtggatctcttctgggcc

SEQ ID NO: 2291404 - DNA, 25 bp, Homo sapien
tgtggatctcttctgggcctatgta

SEQ ID NO: 2291405 - DNA, 25 bp, Homo sapien
tggatctcttctgggcctatgtagt

SEQ ID NO: 2291406 - DNA, 25 bp, Homo sapien
tattgttgctttctccaactttatc

SEQ ID NO: 2291407 - DNA, 25 bp, Homo sapien
gttgctttctccaactttatctaca

SEQ ID NO: 2291408 - DNA, 25 bp, Homo sapien
catattgttgctttctccaacttta

SEQ ID NO: 2291409 - DNA, 25 bp, Homo sapien
tgctttctccaactttatctacaaa

SEQ ID NO: 2291410 - DNA, 25 bp, Homo sapien
aactcctgtaaagaacattacaagc

SEQ ID NO: 2291411 - DNA, 25 bp, Homo sapien
agaacattacaagctatttcatgta

SEQ ID NO: 2291412 - DNA, 25 bp, Homo sapien
cctgtaaagaacattacaagctatt

SEQ ID NO: 2291413 - DNA, 25 bp, Homo sapien
ttaaactcctgtaaagaacattaca

SEQ ID NO: 2291414 - DNA, 25 bp, Homo sapien
aaacaacacaaatagccttcaagag

SEQ ID NO: 2291415 - DNA, 25 bp, Homo sapien
tcttagttcacttgagtagaagcct

SEQ ID NO: 2291416 - DNA, 25 bp, Homo sapien
acttccagagatacagtgcaactgg

SEQ ID NO: 2291417 - DNA, 25 bp, Homo sapien
tgacacaatccaatcgaattcatgc

SEQ ID NO: 2291418 - DNA, 25 bp, Homo sapien
aaaaaagtaatccatacatcaaaat

SEQ ID NO: 2291419 - DNA, 25 bp, Homo sapien
tacaaaaaaaagtaatccatacatc

SEQ ID NO: 2291420 - DNA, 25 bp, Homo sapien
caaaaaaaagtaatccatacatcaa

SEQ ID NO: 2291421 - DNA, 25 bp, Homo sapien
acaaaaaaaagtaatccatacatca

SEQ ID NO: 2291422 - DNA, 25 bp, Homo sapien
tagacagatacttaggagggcagac

SEQ ID NO: 2291423 - DNA, 25 bp, Homo sapien
gactttccggagtatgctgctgaca

SEQ ID NO: 2291424 - DNA, 25 bp, Homo sapien
taaggactgggagattatcaaaccc

SEQ ID NO: 2291425 - DNA, 25 bp, Homo sapien
tgtaacagagttctacagggcacct

SEQ ID NO: 2291426 - DNA, 25 bp, Homo sapien
gcttacttgaagtctatttgtattc

SEQ ID NO: 2291427 - DNA, 25 bp, Homo sapien
aatgaggttattttgcaatgctaaa

SEQ ID NO: 2291428 - DNA, 25 bp, Homo sapien
tgctaaattagcttttagaacttca

SEQ ID NO: 2291429 - DNA, 25 bp, Homo sapien
gaaagatgtgaagatcatttgataa

SEQ ID NO: 2291430 - DNA, 25 bp, Homo sapien
cttgctctgaaattggagcttttaa

SEQ ID NO: 2291431 - DNA, 25 bp, Homo sapien
tatctgtgagttttcgactcttgct

SEQ ID NO: 2291432 - DNA, 25 bp, Homo sapien
tcttggtgttaagggcacctcccca

SEQ ID NO: 2291433 - DNA, 25 bp, Homo sapien
catcttgtcagtcttcaagcaagat

SEQ ID NO: 2291434 - DNA, 25 bp, Homo sapien
ggaaaagagccaaggttgttgctgc

SEQ ID NO: 2291435 - DNA, 25 bp, Homo sapien
cctttcaggtagagcatagcttgag

SEQ ID NO: 2291436 - DNA, 25 bp, Homo sapien
tcaggtagagcatagcttgaggagt

SEQ ID NO: 2291437 - DNA, 25 bp, Homo sapien
gtgcccctttcaggtagagcatagc

SEQ ID NO: 2291438 - DNA, 25 bp, Homo sapien
aggtagagcatagcttgaggagtcc

SEQ ID NO: 2291439 - DNA, 25 bp, Homo sapien
tccaggatagggtcgcgcggggctg

SEQ ID NO: 2291440 - DNA, 25 bp, Homo sapien
cgctcccagcgcaaccccgggctga

SEQ ID NO: 2291441 - DNA, 25 bp, Homo sapien
ggctgccgagtttccagcgctccca

SEQ ID NO: 2291442 - DNA, 25 bp, Homo sapien
gcacagcgcagtccccgggcgtggg

SEQ ID NO: 2291443 - DNA, 25 bp, Homo sapien
tggccggtcggagaggtcctttctc

SEQ ID NO: 2291444 - DNA, 25 bp, Homo sapien
gctctggtcggagatgaagcggcga

SEQ ID NO: 2291445 - DNA, 25 bp, Homo sapien
tctggtcggagatgaagcggcgacc

SEQ ID NO: 2291446 - DNA, 25 bp, Homo sapien
ttctccggctctggtcggagatgaa

SEQ ID NO: 2291447 - DNA, 25 bp, Homo sapien
cgtctttccggtgaggagacgcttt

SEQ ID NO: 2291448 - DNA, 25 bp, Homo sapien
cctcagagccgcgtctttccggtga

SEQ ID NO: 2291449 - DNA, 25 bp, Homo sapien
gcggactgtatctgagggcgcctca

SEQ ID NO: 2291450 - DNA, 25 bp, Homo sapien
tgaacagccgcaagccaataaggct

SEQ ID NO: 2291451 - DNA, 25 bp, Homo sapien
agctgcacctcaggtcctaactccc

SEQ ID NO: 2291452 - DNA, 25 bp, Homo sapien
gctgcacctcaggtcctaactccct

SEQ ID NO: 2291453 - DNA, 25 bp, Homo sapien
tgcacctcaggtcctaactccctgg

SEQ ID NO: 2291454 - DNA, 25 bp, Homo sapien
cacctcaggtcctaactccctgggg

SEQ ID NO: 2291455 - DNA, 25 bp, Homo sapien
agtaagatggttgctgcctccggaa

SEQ ID NO: 2291456 - DNA, 25 bp, Homo sapien
tctggtgatttctgaagggacgcca

SEQ ID NO: 2291457 - DNA, 25 bp, Homo sapien
tgcctccggaatagttagtagttgg

SEQ ID NO: 2291458 - DNA, 25 bp, Homo sapien
ctgaagggacgccagtaagatggtt

SEQ ID NO: 2291459 - DNA, 25 bp, Homo sapien
gtttaatgtcccctgagttctgtat

SEQ ID NO: 2291460 - DNA, 25 bp, Homo sapien
tactaaccattctgctatagtaacc

SEQ ID NO: 2291461 - DNA, 25 bp, Homo sapien
ggaatagcagcagcaagctgtgtca

SEQ ID NO: 2291462 - DNA, 25 bp, Homo sapien
ccattctgctatagtaaccattctg

SEQ ID NO: 2291463 - DNA, 25 bp, Homo sapien
cttccaggaatctggtttgatcaaa

SEQ ID NO: 2291464 - DNA, 25 bp, Homo sapien
cagttaagcagactgtcttccagga

SEQ ID NO: 2291465 - DNA, 25 bp, Homo sapien
agttaagcagactgtcttccaggaa

SEQ ID NO: 2291466 - DNA, 25 bp, Homo sapien
ccaggaatctggtttgatcaaagtt

SEQ ID NO: 2291467 - DNA, 25 bp, Homo sapien
taattaaacataatccagtatattt

SEQ ID NO: 2291468 - DNA, 25 bp, Homo sapien
agggtccaaaggttttattcacatg

SEQ ID NO: 2291469 - DNA, 25 bp, Homo sapien
cactgaagtgttcctatcacagagc

SEQ ID NO: 2291470 - DNA, 25 bp, Homo sapien
cacaagttatttttcgacggagatc

SEQ ID NO: 2291471 - DNA, 25 bp, Homo sapien
ggcaaaccttctacctcaatgactg

SEQ ID NO: 2291472 - DNA, 25 bp, Homo sapien
actaagatcaagacaggtactggct

SEQ ID NO: 2291473 - DNA, 25 bp, Homo sapien
gagattgttctggttagttgtagga

SEQ ID NO: 2291474 - DNA, 25 bp, Homo sapien
ccacccctcctaatggtgaagtggt

SEQ ID NO: 2291475 - DNA, 25 bp, Homo sapien
taacagctattgatcattgagacag

SEQ ID NO: 2291476 - DNA, 25 bp, Homo sapien
aatcagatgtaagcactacctagta

SEQ ID NO: 2291477 - DNA, 25 bp, Homo sapien
tggcagtatgtgtaggaatcacctt

SEQ ID NO: 2291478 - DNA, 25 bp, Homo sapien
tactcagtcccctattcagacagct

SEQ ID NO: 2291479 - DNA, 25 bp, Homo sapien
tatcctgtactcagtcccctattca

SEQ ID NO: 2291480 - DNA, 25 bp, Homo sapien
gaatcaccttctatcctgtactcag

SEQ ID NO: 2291481 - DNA, 25 bp, Homo sapien
tccctcttgagattggtggtatcaa

SEQ ID NO: 2291482 - DNA, 25 bp, Homo sapien
caaagtttaatagcacccagactac

SEQ ID NO: 2291483 - DNA, 25 bp, Homo sapien
cccagactacaaaagatagataact

SEQ ID NO: 2291484 - DNA, 25 bp, Homo sapien
taaaaaattgatagtgcatgcatag

SEQ ID NO: 2291485 - DNA, 25 bp, Homo sapien
gcacataattaccacccaagatcca

SEQ ID NO: 2291486 - DNA, 25 bp, Homo sapien
gttccagtagatgaacctacattgg

SEQ ID NO: 2291487 - DNA, 25 bp, Homo sapien
aaattgtctatactctgcccactca

SEQ ID NO: 2291488 - DNA, 25 bp, Homo sapien
ctttttcaagattgtcacacagttg

SEQ ID NO: 2291489 - DNA, 25 bp, Homo sapien
gatgtcacaccacatgaaagcatga

SEQ ID NO: 2291490 - DNA, 25 bp, Homo sapien
ctctctatagaacagggcagacaca

SEQ ID NO: 2291491 - DNA, 25 bp, Homo sapien
gaagcaggccttcagagtagcacgt

SEQ ID NO: 2291492 - DNA, 25 bp, Homo sapien
caaagtgggttctcaactaaccgag

SEQ ID NO: 2291493 - DNA, 25 bp, Homo sapien
gccaggaaacttttatgagtgctta

SEQ ID NO: 2291494 - DNA, 25 bp, Homo sapien
aattactaaacacgacaacagttgt

SEQ ID NO: 2291495 - DNA, 25 bp, Homo sapien
tttggcaatgtttggtatattctag

SEQ ID NO: 2291496 - DNA, 25 bp, Homo sapien
gggtcaatagcacacattatactaa

SEQ ID NO: 2291497 - DNA, 25 bp, Homo sapien
tgtgggacatccagaaggacctaaa

SEQ ID NO: 2291498 - DNA, 25 bp, Homo sapien
aggttgctcagctcaagaaaagtgc

SEQ ID NO: 2291499 - DNA, 25 bp, Homo sapien
taaaagacctgtgactagtgagctc

SEQ ID NO: 2291500 - DNA, 25 bp, Homo sapien
gaaaagtgcagataccctgtgggac

SEQ ID NO: 2291501 - DNA, 25 bp, Homo sapien
gttgtcccaggcttttcaaactgac

SEQ ID NO: 2291502 - DNA, 25 bp, Homo sapien
aatgtggcctcggatttttatctca

SEQ ID NO: 2291503 - DNA, 25 bp, Homo sapien
tcagctgtttccctaatgagccctg

SEQ ID NO: 2291504 - DNA, 25 bp, Homo sapien
tcatttgtaatgctcaagttgtccc

SEQ ID NO: 2291505 - DNA, 25 bp, Homo sapien
gctaaggacacattcagtcatcggg

SEQ ID NO: 2291506 - DNA, 25 bp, Homo sapien
tagattttagcaacagaggacagtg

SEQ ID NO: 2291507 - DNA, 25 bp, Homo sapien
gaccaggcagccacttagattttag

SEQ ID NO: 2291508 - DNA, 25 bp, Homo sapien
ggaaatgttttgtacgtgatcccca

SEQ ID NO: 2291509 - DNA, 25 bp, Homo sapien
gcgtgtgctatcagcattctgggaa

SEQ ID NO: 2291510 - DNA, 25 bp, Homo sapien
cagccgggtctcatggttctttaaa

SEQ ID NO: 2291511 - DNA, 25 bp, Homo sapien
ggaaaaactcattgcaccagttgcg

SEQ ID NO: 2291512 - DNA, 25 bp, Homo sapien
gagaagttcagcatgtatacacagt

SEQ ID NO: 2291513 - DNA, 25 bp, Homo sapien
ctgaggtgcccttcccagatttatc

SEQ ID NO: 2291514 - DNA, 25 bp, Homo sapien
tgaggtgcccttcccagatttatca

SEQ ID NO: 2291515 - DNA, 25 bp, Homo sapien
gaggtgcccttcccagatttatcat

SEQ ID NO: 2291516 - DNA, 25 bp, Homo sapien
catgtgtcataagtataggtaagca

SEQ ID NO: 2291517 - DNA, 25 bp, Homo sapien
ttacgaaacattccctaggcatcat

SEQ ID NO: 2291518 - DNA, 25 bp, Homo sapien
tgtcagttcattaagacaaagtcca

SEQ ID NO: 2291519 - DNA, 25 bp, Homo sapien
cagtttcattgccagagtcataata

SEQ ID NO: 2291520 - DNA, 25 bp, Homo sapien
gtgatcatcactgttgttcccactt

SEQ ID NO: 2291521 - DNA, 25 bp, Homo sapien
ctgtgatcatcactgttgttcccac

SEQ ID NO: 2291522 - DNA, 25 bp, Homo sapien
gttgttcccacttccatccattaca

SEQ ID NO: 2291523 - DNA, 25 bp, Homo sapien
actgttgttcccacttccatccatt

SEQ ID NO: 2291524 - DNA, 25 bp, Homo sapien
gaacattactggtagtcacaacttt

SEQ ID NO: 2291525 - DNA, 25 bp, Homo sapien
ttaagaacattactggtagtcacaa

SEQ ID NO: 2291526 - DNA, 25 bp, Homo sapien
cattactggtagtcacaactttggc

SEQ ID NO: 2291527 - DNA, 25 bp, Homo sapien
ctggtagtcacaactttggcagcta

SEQ ID NO: 2291528 - DNA, 25 bp, Homo sapien
ctcgccatttccggttgatttccaa

SEQ ID NO: 2291529 - DNA, 25 bp, Homo sapien
tcgccatttccggttgatttccaac

SEQ ID NO: 2291530 - DNA, 25 bp, Homo sapien
ctgcatatgctaggaatgtttaagt

SEQ ID NO: 2291531 - DNA, 25 bp, Homo sapien
tctgcatatgctaggaatgtttaag

SEQ ID NO: 2291532 - DNA, 25 bp, Homo sapien
tcctgcccactcaacgtaactttga

SEQ ID NO: 2291533 - DNA, 25 bp, Homo sapien
tgcccactcaacgtaactttgactt

SEQ ID NO: 2291534 - DNA, 25 bp, Homo sapien
tgtcctgcccactcaacgtaacttt

SEQ ID NO: 2291535 - DNA, 25 bp, Homo sapien
cccactcaacgtaactttgactttg

SEQ ID NO: 2291536 - DNA, 25 bp, Homo sapien
gtgcatacatttactatcacccatt

SEQ ID NO: 2291537 - DNA, 25 bp, Homo sapien
ccatttccccaccaactgacaggcc

SEQ ID NO: 2291538 - DNA, 25 bp, Homo sapien
caggtatacatgtgctgtcttggtt

SEQ ID NO: 2291539 - DNA, 25 bp, Homo sapien
gctgtcttggtttgccacacccatt

SEQ ID NO: 2291540 - DNA, 25 bp, Homo sapien
acatgtgctgtcttggtttgccaca

SEQ ID NO: 2291541 - DNA, 25 bp, Homo sapien
tctccatctgagaggacctgtaagt

SEQ ID NO: 2291542 - DNA, 25 bp, Homo sapien
gcttgtcaaaaagtggcccaccctc

SEQ ID NO: 2291543 - DNA, 25 bp, Homo sapien
caagtaaaggcttgtcaaaaagtgg

SEQ ID NO: 2291544 - DNA, 25 bp, Homo sapien
ctagggaacacaagtaaaggcttgt

SEQ ID NO: 2291545 - DNA, 25 bp, Homo sapien
ccttcacttcgttcttcatgtggag

SEQ ID NO: 2291546 - DNA, 25 bp, Homo sapien
tgcaatggccacaaaaaacctgtct

SEQ ID NO: 2291547 - DNA, 25 bp, Homo sapien
tcatgtggagcttcaaaagaattga

SEQ ID NO: 2291548 - DNA, 25 bp, Homo sapien
gacaagctgacgctagagtttatat

SEQ ID NO: 2291549 - DNA, 25 bp, Homo sapien
tgtcctatgaacagaagctagtgga

SEQ ID NO: 2291550 - DNA, 25 bp, Homo sapien
tatgaacagaagctagtggaccact

SEQ ID NO: 2291551 - DNA, 25 bp, Homo sapien
gggctcaatgtcctatgaacagaag

SEQ ID NO: 2291552 - DNA, 25 bp, Homo sapien
gaagctagtggaccactttcaattc

SEQ ID NO: 2291553 - DNA, 25 bp, Homo sapien
catgctgtgattgccgtccgaaatg

SEQ ID NO: 2291554 - DNA, 25 bp, Homo sapien
aaactttgattttcagccgccatgc

SEQ ID NO: 2291555 - DNA, 25 bp, Homo sapien
gccatcacggttttgattctccaga

SEQ ID NO: 2291556 - DNA, 25 bp, Homo sapien
tgacagaggaatgccctttggccat

SEQ ID NO: 2291557 - DNA, 25 bp, Homo sapien
tcagtaccttccatatgactcaagt

SEQ ID NO: 2291558 - DNA, 25 bp, Homo sapien
aaattaggcccatcactatgtgacc

SEQ ID NO: 2291559 - DNA, 25 bp, Homo sapien
tcaagtctcctaaacatagatacgc

SEQ ID NO: 2291560 - DNA, 25 bp, Homo sapien
tagaattaggccttagcttaaggga

SEQ ID NO: 2291561 - DNA, 25 bp, Homo sapien
tgtaatctagtaagtgtgtaatacc

SEQ ID NO: 2291562 - DNA, 25 bp, Homo sapien
taatctagtaagtgtgtaataccat

SEQ ID NO: 2291563 - DNA, 25 bp, Homo sapien
tggaggggctagccttgatattgat

SEQ ID NO: 2291564 - DNA, 25 bp, Homo sapien
gaagagtttgctgcaacaattgact

SEQ ID NO: 2291565 - DNA, 25 bp, Homo sapien
ttcagtgcccacaggtaaatatctc

SEQ ID NO: 2291566 - DNA, 25 bp, Homo sapien
caaaagcgcacacattgagttcagt

SEQ ID NO: 2291567 - DNA, 25 bp, Homo sapien
taattcaaaggattacacagagtgc
